United States Patent Application Publication US 2005/0244851 A1 - sequence listing, part 145

SEQ ID NO: 5661845 - DNA, 25 bp, Homo sapien
ggtctcaagctgctaacctcaagtg

SEQ ID NO: 5661846 - DNA, 25 bp, Homo sapien
ccagactggtctcaagctgctaacc

SEQ ID NO: 5661847 - DNA, 25 bp, Homo sapien
caagctgctaacctcaagtgatcca

SEQ ID NO: 5661848 - DNA, 25 bp, Homo sapien
gactggtctcaagctgctaacctca

SEQ ID NO: 5661849 - DNA, 25 bp, Homo sapien
tgaggttagcagcttgagaccagtc

SEQ ID NO: 5661850 - DNA, 25 bp, Homo sapien
tggatcacttgaggttagcagcttg

SEQ ID NO: 5661851 - DNA, 25 bp, Homo sapien
atcacttgaggttagcagcttgaga

SEQ ID NO: 5661852 - DNA, 25 bp, Homo sapien
cacttgaggttagcagcttgagacc

SEQ ID NO: 5661853 - DNA, 25 bp, Homo sapien
tctgggcaacctggtgaaacccctc

SEQ ID NO: 5661854 - DNA, 25 bp, Homo sapien
ggttagcagcttgagaccagtctgg

SEQ ID NO: 5661855 - DNA, 25 bp, Homo sapien
ggattacagctgcgcgatgccatgc

SEQ ID NO: 5661856 - DNA, 25 bp, Homo sapien
gattacagctgcgcgatgccatgcc

SEQ ID NO: 5661857 - DNA, 25 bp, Homo sapien
gcatggcatcgcgcagctgtaatcc

SEQ ID NO: 5661858 - DNA, 25 bp, Homo sapien
ggcatggcatcgcgcagctgtaatc

SEQ ID NO: 5661859 - DNA, 25 bp, Homo sapien
tagctgggattacagctgcgcgatg

SEQ ID NO: 5661860 - DNA, 25 bp, Homo sapien
gggattacagctgcgcgatgccatg

SEQ ID NO: 5661861 - DNA, 25 bp, Homo sapien
tgggattacagctgcgcgatgccat

SEQ ID NO: 5661862 - DNA, 25 bp, Homo sapien
ctgggattacagctgcgcgatgcca

SEQ ID NO: 5661863 - DNA, 25 bp, Homo sapien
gctgggattacagctgcgcgatgcc

SEQ ID NO: 5661864 - DNA, 25 bp, Homo sapien
gattacagctgcgcgatgccatgcc

SEQ ID NO: 5661865 - DNA, 25 bp, Homo sapien
ggcatggcatcgcgcagctgtaatc

SEQ ID NO: 5661866 - DNA, 25 bp, Homo sapien
atggcatcgcgcagctgtaatccca

SEQ ID NO: 5661867 - DNA, 25 bp, Homo sapien
catcgcgcagctgtaatcccagcta

SEQ ID NO: 5661868 - DNA, 25 bp, Homo sapien
ggcatcgcgcagctgtaatcccagc

SEQ ID NO: 5661869 - DNA, 25 bp, Homo sapien
tggcatcgcgcagctgtaatcccag

SEQ ID NO: 5661870 - DNA, 25 bp, Homo sapien
catggcatcgcgcagctgtaatccc

SEQ ID NO: 5661871 - DNA, 25 bp, Homo sapien
tttgcagaatagtgatttgaatgca

SEQ ID NO: 5661872 - DNA, 25 bp, Homo sapien
ttgcagaatagtgatttgaatgcag

SEQ ID NO: 5661873 - DNA, 25 bp, Homo sapien
ctgcattcaaatcactattctgcaa

SEQ ID NO: 5661874 - DNA, 25 bp, Homo sapien
tgcattcaaatcactattctgcaaa

SEQ ID NO: 5661875 - DNA, 25 bp, Homo sapien
gagatgactactagtaatttgcaga

SEQ ID NO: 5661876 - DNA, 25 bp, Homo sapien
ttgcagaatagtgatttgaatgcag

SEQ ID NO: 5661877 - DNA, 25 bp, Homo sapien
tacccagagatgactactagtaatt

SEQ ID NO: 5661878 - DNA, 25 bp, Homo sapien
cagaatagtgatttgaatgcaggct

SEQ ID NO: 5661879 - DNA, 25 bp, Homo sapien
tgactactagtaatttgcagaatag

SEQ ID NO: 5661880 - DNA, 25 bp, Homo sapien
gatttgaatgcaggctaattttatt

SEQ ID NO: 5661881 - DNA, 25 bp, Homo sapien
aataaaattagcctgcattcaaatc

SEQ ID NO: 5661882 - DNA, 25 bp, Homo sapien
agcctgcattcaaatcactattctg

SEQ ID NO: 5661883 - DNA, 25 bp, Homo sapien
ctattctgcaaattactagtagtca

SEQ ID NO: 5661884 - DNA, 25 bp, Homo sapien
aattactagtagtcatctctgggta

SEQ ID NO: 5661885 - DNA, 25 bp, Homo sapien
tgcattcaaatcactattctgcaaa

SEQ ID NO: 5661886 - DNA, 25 bp, Homo sapien
gcaaattactagtagtcatctctgg

SEQ ID NO: 5661887 - DNA, 25 bp, Homo sapien
cactagatgtgaagattcaagcaaa

SEQ ID NO: 5661888 - DNA, 25 bp, Homo sapien
gatgtgaagattcaagcaaagcatt

SEQ ID NO: 5661889 - DNA, 25 bp, Homo sapien
tgtcactagatgtgaagattcaagc

SEQ ID NO: 5661890 - DNA, 25 bp, Homo sapien
gtcactagatgtgaagattcaagca

SEQ ID NO: 5661891 - DNA, 25 bp, Homo sapien
tagtatcttatttaaccattacaat

SEQ ID NO: 5661892 - DNA, 25 bp, Homo sapien
ctagatgtgaagattcaagcaaagc

SEQ ID NO: 5661893 - DNA, 25 bp, Homo sapien
tattgtaatggttaaataagatact

SEQ ID NO: 5661894 - DNA, 25 bp, Homo sapien
aatgctttgcttgaatcttcacatc

SEQ ID NO: 5661895 - DNA, 25 bp, Homo sapien
tgcttgaatcttcacatctagtgac

SEQ ID NO: 5661896 - DNA, 25 bp, Homo sapien
tttgcttgaatcttcacatctagtg

SEQ ID NO: 5661897 - DNA, 25 bp, Homo sapien
gctttgcttgaatcttcacatctag

SEQ ID NO: 5661898 - DNA, 25 bp, Homo sapien
gcttgaatcttcacatctagtgaca

SEQ ID NO: 5661899 - DNA, 25 bp, Homo sapien
tccttcttatttttttagattgata

SEQ ID NO: 5661900 - DNA, 25 bp, Homo sapien
ttgataaattaggggtttcaccatg

SEQ ID NO: 5661901 - DNA, 25 bp, Homo sapien
gattgataaattaggggtttcacca

SEQ ID NO: 5661902 - DNA, 25 bp, Homo sapien
tagattgataaattaggggtttcac

SEQ ID NO: 5661903 - DNA, 25 bp, Homo sapien
attgataaattaggggtttcaccat

SEQ ID NO: 5661904 - DNA, 25 bp, Homo sapien
gtgaaacccctaatttatcaatcta

SEQ ID NO: 5661905 - DNA, 25 bp, Homo sapien
tggtgaaacccctaatttatcaatc

SEQ ID NO: 5661906 - DNA, 25 bp, Homo sapien
tatcaatctaaaaaaataagaagga

SEQ ID NO: 5661907 - DNA, 25 bp, Homo sapien
atggtgaaacccctaatttatcaat

SEQ ID NO: 5661908 - DNA, 25 bp, Homo sapien
catggtgaaacccctaatttatcaa

SEQ ID NO: 5661909 - DNA, 25 bp, Homo sapien
tgaaacccctaatttatcaatctaa

SEQ ID NO: 5661910 - DNA, 25 bp, Homo sapien
tatttagtaaccgtgccattgtggt

SEQ ID NO: 5661911 - DNA, 25 bp, Homo sapien
caacagttgctatgggtcaagtgcc

SEQ ID NO: 5661912 - DNA, 25 bp, Homo sapien
ctatgggtcaagtgccatggtgtgt

SEQ ID NO: 5661913 - DNA, 25 bp, Homo sapien
ctaagccggagaaggctatgcctcg

SEQ ID NO: 5661914 - DNA, 25 bp, Homo sapien
cctcgcttatttagtaaccgtgcca

SEQ ID NO: 5661915 - DNA, 25 bp, Homo sapien
ccggagaaggctatgcctcgcttat

SEQ ID NO: 5661916 - DNA, 25 bp, Homo sapien
gcacttgacccatagcaactgttga

SEQ ID NO: 5661917 - DNA, 25 bp, Homo sapien
cgaggcatagccttctccggcttag

SEQ ID NO: 5661918 - DNA, 25 bp, Homo sapien
aataagcgaggcatagccttctccg

SEQ ID NO: 5661919 - DNA, 25 bp, Homo sapien
cacaatggcacggttactaaataag

SEQ ID NO: 5661920 - DNA, 25 bp, Homo sapien
ggcacggttactaaataagcgaggc

SEQ ID NO: 5661921 - DNA, 25 bp, Homo sapien
acacaccatggcacttgacccatag

SEQ ID NO: 5661922 - DNA, 25 bp, Homo sapien
cgttgatggctgaagagtcgactct

SEQ ID NO: 5661923 - DNA, 25 bp, Homo sapien
gaagagtcgactctgacagctcatc

SEQ ID NO: 5661924 - DNA, 25 bp, Homo sapien
gactctgacagctcatccctagtat

SEQ ID NO: 5661925 - DNA, 25 bp, Homo sapien
ggaagcaccgcgaggcgttgatggc

SEQ ID NO: 5661926 - DNA, 25 bp, Homo sapien
catttgcctcaaaaccggaactggg

SEQ ID NO: 5661927 - DNA, 25 bp, Homo sapien
gctcatccctagtatctcctcattt

SEQ ID NO: 5661928 - DNA, 25 bp, Homo sapien
agagtcgactcttcagccatcaacg

SEQ ID NO: 5661929 - DNA, 25 bp, Homo sapien
ggatgagctgtcagagtcgactctt

SEQ ID NO: 5661930 - DNA, 25 bp, Homo sapien
tgcccagttccggttttgaggcaaa

SEQ ID NO: 5661931 - DNA, 25 bp, Homo sapien
cagttccggttttgaggcaaatgag

SEQ ID NO: 5661932 - DNA, 25 bp, Homo sapien
aaatgaggagatactagggatgagc

SEQ ID NO: 5661933 - DNA, 25 bp, Homo sapien
gagatactagggatgagctgtcaga

SEQ ID NO: 5661934 - DNA, 25 bp, Homo sapien
cgacctacctggggtggacgtattg

SEQ ID NO: 5661935 - DNA, 25 bp, Homo sapien
ggtggacgtattgatagggcaaggg

SEQ ID NO: 5661936 - DNA, 25 bp, Homo sapien
cgcggaatgttcgtagggtgtccga

SEQ ID NO: 5661937 - DNA, 25 bp, Homo sapien
gaacgcggaatgttcgtagggtgtc

SEQ ID NO: 5661938 - DNA, 25 bp, Homo sapien
gaatgttcgtagggtgtccgaccta

SEQ ID NO: 5661939 - DNA, 25 bp, Homo sapien
tattgatagggcaaggggagcatct

SEQ ID NO: 5661940 - DNA, 25 bp, Homo sapien
tcggacaccctacgaacattccgcg

SEQ ID NO: 5661941 - DNA, 25 bp, Homo sapien
agatgctccccttgccctatcaata

SEQ ID NO: 5661942 - DNA, 25 bp, Homo sapien
taggtcggacaccctacgaacattc

SEQ ID NO: 5661943 - DNA, 25 bp, Homo sapien
gacaccctacgaacattccgcgttc

SEQ ID NO: 5661944 - DNA, 25 bp, Homo sapien
caatacgtccaccccaggtaggtcg

SEQ ID NO: 5661945 - DNA, 25 bp, Homo sapien
tcctcagatgctccccttgccctat

SEQ ID NO: 5661946 - DNA, 25 bp, Homo sapien
gcatcatttgctcccggggaacgcg

SEQ ID NO: 5661947 - DNA, 25 bp, Homo sapien
gacctacctggggtggacgtattga

SEQ ID NO: 5661948 - DNA, 25 bp, Homo sapien
ggtggacgtattgatagggcaaggg

SEQ ID NO: 5661949 - DNA, 25 bp, Homo sapien
gaacgcggaatgttcgtagggtgtc

SEQ ID NO: 5661950 - DNA, 25 bp, Homo sapien
gaatgttcgtagggtgtccgaccta

SEQ ID NO: 5661951 - DNA, 25 bp, Homo sapien
tattgatagggcaaggggagcatct

SEQ ID NO: 5661952 - DNA, 25 bp, Homo sapien
cagctgcggcgctgacctggtcact

SEQ ID NO: 5661953 - DNA, 25 bp, Homo sapien
agctgcggcgctgacctggtcactc

SEQ ID NO: 5661954 - DNA, 25 bp, Homo sapien
ttggtggtggttagcagctgcggcg

SEQ ID NO: 5661955 - DNA, 25 bp, Homo sapien
actccggccaaataagagcccgcac

SEQ ID NO: 5661956 - DNA, 25 bp, Homo sapien
ggtcactccactccggccaaataag

SEQ ID NO: 5661957 - DNA, 25 bp, Homo sapien
tggtcactccactccggccaaataa

SEQ ID NO: 5661958 - DNA, 25 bp, Homo sapien
agtgaccaggtcagcgccgcagctg

SEQ ID NO: 5661959 - DNA, 25 bp, Homo sapien
cttatttggccggagtggagtgacc

SEQ ID NO: 5661960 - DNA, 25 bp, Homo sapien
ttatttggccggagtggagtgacca

SEQ ID NO: 5661961 - DNA, 25 bp, Homo sapien
cgggctcttatttggccggagtgga

SEQ ID NO: 5661962 - DNA, 25 bp, Homo sapien
gagtgaccaggtcagcgccgcagct

SEQ ID NO: 5661963 - DNA, 25 bp, Homo sapien
agggtgcgggctcttatttggccgg

SEQ ID NO: 5661964 - DNA, 25 bp, Homo sapien
ttcctaaccccgctctaaggagtgc

SEQ ID NO: 5661965 - DNA, 25 bp, Homo sapien
ctaaggagtgcttgtgattttgcaa

SEQ ID NO: 5661966 - DNA, 25 bp, Homo sapien
tgattttgcaaacagcgtcggccct

SEQ ID NO: 5661967 - DNA, 25 bp, Homo sapien
cccgctctaaggagtgcttgtgatt

SEQ ID NO: 5661968 - DNA, 25 bp, Homo sapien
taaccccgctctaaggagtgcttgt

SEQ ID NO: 5661969 - DNA, 25 bp, Homo sapien
tttgcaaacagcgtcggccctcagg

SEQ ID NO: 5661970 - DNA, 25 bp, Homo sapien
agggccgacgctgtttgcaaaatca

SEQ ID NO: 5661971 - DNA, 25 bp, Homo sapien
aatcacaagcactccttagagcggg

SEQ ID NO: 5661972 - DNA, 25 bp, Homo sapien
aaaatcacaagcactccttagagcg

SEQ ID NO: 5661973 - DNA, 25 bp, Homo sapien
gcctgagggccgacgctgtttgcaa

SEQ ID NO: 5661974 - DNA, 25 bp, Homo sapien
gagggccgacgctgtttgcaaaatc

SEQ ID NO: 5661975 - DNA, 25 bp, Homo sapien
ttgcaaaatcacaagcactccttag

SEQ ID NO: 5661976 - DNA, 25 bp, Homo sapien
gacatgtaaaggtgaaggcagacaa

SEQ ID NO: 5661977 - DNA, 25 bp, Homo sapien
gggaaggccactcatagacaaaatg

SEQ ID NO: 5661978 - DNA, 25 bp, Homo sapien
tgtaaaggtgaaggcagacaactgg

SEQ ID NO: 5661979 - DNA, 25 bp, Homo sapien
ggaaggccactcatagacaaaatgt

SEQ ID NO: 5661980 - DNA, 25 bp, Homo sapien
catgtaaaggtgaaggcagacaact

SEQ ID NO: 5661981 - DNA, 25 bp, Homo sapien
tttagacatgtaaaggtgaaggcag

SEQ ID NO: 5661982 - DNA, 25 bp, Homo sapien
acattttgtctatgagtggccttcc

SEQ ID NO: 5661983 - DNA, 25 bp, Homo sapien
ccagttgtctgccttcacctttaca

SEQ ID NO: 5661984 - DNA, 25 bp, Homo sapien
tgccttcacctttacatgtctaaat

SEQ ID NO: 5661985 - DNA, 25 bp, Homo sapien
cattttgtctatgagtggccttccc

SEQ ID NO: 5661986 - DNA, 25 bp, Homo sapien
agttgtctgccttcacctttacatg

SEQ ID NO: 5661987 - DNA, 25 bp, Homo sapien
tgtctgccttcacctttacatgtct

SEQ ID NO: 5661988 - DNA, 25 bp, Homo sapien
tgtgaaattgagaagtagtaccaga

SEQ ID NO: 5661989 - DNA, 25 bp, Homo sapien
tgcagatcaagatggggcattttaa

SEQ ID NO: 5661990 - DNA, 25 bp, Homo sapien
gtgaaattgagaagtagtaccagaa

SEQ ID NO: 5661991 - DNA, 25 bp, Homo sapien
taaggatgtagcgtttgtgaaattg

SEQ ID NO: 5661992 - DNA, 25 bp, Homo sapien
aacctagtgtgcagatcaagatggg

SEQ ID NO: 5661993 - DNA, 25 bp, Homo sapien
ggatgtagcgtttgtgaaattgaga

SEQ ID NO: 5661994 - DNA, 25 bp, Homo sapien
tgccccatcttgatctgcacactag

SEQ ID NO: 5661995 - DNA, 25 bp, Homo sapien
aaaatgccccatcttgatctgcaca

SEQ ID NO: 5661996 - DNA, 25 bp, Homo sapien
caatttcacaaacgctacatcctta

SEQ ID NO: 5661997 - DNA, 25 bp, Homo sapien
tctggtactacttctcaatttcaca

SEQ ID NO: 5661998 - DNA, 25 bp, Homo sapien
cccatcttgatctgcacactaggtt

SEQ ID NO: 5661999 - DNA, 25 bp, Homo sapien
ttaaaatgccccatcttgatctgca

SEQ ID NO: 5662000 - DNA, 25 bp, Homo sapien
gatgactttcttaggacacctttgg

SEQ ID NO: 5662001 - DNA, 25 bp, Homo sapien
agtgatgactttcttaggacacctt

SEQ ID NO: 5662002 - DNA, 25 bp, Homo sapien
taggacacctttggatttaccgtga

SEQ ID NO: 5662003 - DNA, 25 bp, Homo sapien
atgactttcttaggacacctttgga

SEQ ID NO: 5662004 - DNA, 25 bp, Homo sapien
tgatgactttcttaggacacctttg

SEQ ID NO: 5662005 - DNA, 25 bp, Homo sapien
tgactttcttaggacacctttggat

SEQ ID NO: 5662006 - DNA, 25 bp, Homo sapien
ccaaaggtgtcctaagaaagtcatc

SEQ ID NO: 5662007 - DNA, 25 bp, Homo sapien
caaaggtgtcctaagaaagtcatca

SEQ ID NO: 5662008 - DNA, 25 bp, Homo sapien
aaggtgtcctaagaaagtcatcact

SEQ ID NO: 5662009 - DNA, 25 bp, Homo sapien
atccaaaggtgtcctaagaaagtca

SEQ ID NO: 5662010 - DNA, 25 bp, Homo sapien
tccaaaggtgtcctaagaaagtcat

SEQ ID NO: 5662011 - DNA, 25 bp, Homo sapien
tcacggtaaatccaaaggtgtccta

SEQ ID NO: 5662012 - DNA, 25 bp, Homo sapien
gagcagccaccttatatttaggcat

SEQ ID NO: 5662013 - DNA, 25 bp, Homo sapien
tagctgcagtgatgactttcttagg

SEQ ID NO: 5662014 - DNA, 25 bp, Homo sapien
ttctgagcagccaccttatatttag

SEQ ID NO: 5662015 - DNA, 25 bp, Homo sapien
ttatatttaggcattgatgatcagg

SEQ ID NO: 5662016 - DNA, 25 bp, Homo sapien
gccaccttatatttaggcattgatg

SEQ ID NO: 5662017 - DNA, 25 bp, Homo sapien
taggacacctttggatttaccgtga

SEQ ID NO: 5662018 - DNA, 25 bp, Homo sapien
tgcctaaatataaggtggctgctca

SEQ ID NO: 5662019 - DNA, 25 bp, Homo sapien
ctaaatataaggtggctgctcagaa

SEQ ID NO: 5662020 - DNA, 25 bp, Homo sapien
tcacggtaaatccaaaggtgtccta

SEQ ID NO: 5662021 - DNA, 25 bp, Homo sapien
cctgatcatcaatgcctaaatataa

SEQ ID NO: 5662022 - DNA, 25 bp, Homo sapien
catcaatgcctaaatataaggtggc

SEQ ID NO: 5662023 - DNA, 25 bp, Homo sapien
taagaaagtcatcactgcagctacc

SEQ ID NO: 5662024 - DNA, 25 bp, Homo sapien
cctgcgcgcgggaagcgactgggga

SEQ ID NO: 5662025 - DNA, 25 bp, Homo sapien
tgagcggcaggccacggcgcctgag

SEQ ID NO: 5662026 - DNA, 25 bp, Homo sapien
aagcgactggggagcgacgtccgca

SEQ ID NO: 5662027 - DNA, 25 bp, Homo sapien
agcggcaggccacggcgcctgaggg

SEQ ID NO: 5662028 - DNA, 25 bp, Homo sapien
gcggctgcgggtcggtcgcctgcgc

SEQ ID NO: 5662029 - DNA, 25 bp, Homo sapien
gggtcggtcgcctgcgcgcgggaag

SEQ ID NO: 5662030 - DNA, 25 bp, Homo sapien
gggtgcggacgtcgctccccagtcg

SEQ ID NO: 5662031 - DNA, 25 bp, Homo sapien
tgcggacgtcgctccccagtcgctt

SEQ ID NO: 5662032 - DNA, 25 bp, Homo sapien
gcgcaggcgaccgacccgcagccgc

SEQ ID NO: 5662033 - DNA, 25 bp, Homo sapien
ctcaggcgccgtggcctgccgctca

SEQ ID NO: 5662034 - DNA, 25 bp, Homo sapien
tccccagtcgcttcccgcgcgcagg

SEQ ID NO: 5662035 - DNA, 25 bp, Homo sapien
gcttcccgcgcgcaggcgaccgacc

SEQ ID NO: 5662036 - DNA, 25 bp, Homo sapien
cctgcgcgcgggaagcgactgggga

SEQ ID NO: 5662037 - DNA, 25 bp, Homo sapien
tgagcggcaggccacggcgcctgag

SEQ ID NO: 5662038 - DNA, 25 bp, Homo sapien
ccacggcgcctgagggaggcggctg

SEQ ID NO: 5662039 - DNA, 25 bp, Homo sapien
aagcgactggggagcgacgtccgca

SEQ ID NO: 5662040 - DNA, 25 bp, Homo sapien
gcggctgcgggtcggtcgcctgcgc

SEQ ID NO: 5662041 - DNA, 25 bp, Homo sapien
gggtcggtcgcctgcgcgcgggaag

SEQ ID NO: 5662042 - DNA, 25 bp, Homo sapien
gggtgcggacgtcgctccccagtcg

SEQ ID NO: 5662043 - DNA, 25 bp, Homo sapien
tgcggacgtcgctccccagtcgctt

SEQ ID NO: 5662044 - DNA, 25 bp, Homo sapien
ctcaggcgccgtggcctgccgctca

SEQ ID NO: 5662045 - DNA, 25 bp, Homo sapien
ttcccgcgcgcaggcgaccgacccg

SEQ ID NO: 5662046 - DNA, 25 bp, Homo sapien
tccccagtcgcttcccgcgcgcagg

SEQ ID NO: 5662047 - DNA, 25 bp, Homo sapien
cagccgcctccctcaggcgccgtgg

SEQ ID NO: 5662048 - DNA, 25 bp, Homo sapien
tagggataaggtgaggccatcgccc

SEQ ID NO: 5662049 - DNA, 25 bp, Homo sapien
gatagcagtagggataaggtgaggc

SEQ ID NO: 5662050 - DNA, 25 bp, Homo sapien
agggataaggtgaggccatcgccct

SEQ ID NO: 5662051 - DNA, 25 bp, Homo sapien
tagcagtagggataaggtgaggcca

SEQ ID NO: 5662052 - DNA, 25 bp, Homo sapien
atagcagtagggataaggtgaggcc

SEQ ID NO: 5662053 - DNA, 25 bp, Homo sapien
gcagtagggataaggtgaggccatc

SEQ ID NO: 5662054 - DNA, 25 bp, Homo sapien
cccagtcctcgtggaactacaactt

SEQ ID NO: 5662055 - DNA, 25 bp, Homo sapien
ccagtcctcgtggaactacaacttc

SEQ ID NO: 5662056 - DNA, 25 bp, Homo sapien
gaagttgtagttccacgaggactgg

SEQ ID NO: 5662057 - DNA, 25 bp, Homo sapien
aagttgtagttccacgaggactggg

SEQ ID NO: 5662058 - DNA, 25 bp, Homo sapien
ttatccctactgctatccccacatc

SEQ ID NO: 5662059 - DNA, 25 bp, Homo sapien
agggcgatggcctcaccttatccct

SEQ ID NO: 5662060 - DNA, 25 bp, Homo sapien
gggcgatggcctcaccttatcccta

SEQ ID NO: 5662061 - DNA, 25 bp, Homo sapien
tggcctcaccttatccctactgcta

SEQ ID NO: 5662062 - DNA, 25 bp, Homo sapien
ggcctcaccttatccctactgctat

SEQ ID NO: 5662063 - DNA, 25 bp, Homo sapien
caccttatccctactgctatcccca

SEQ ID NO: 5662064 - DNA, 25 bp, Homo sapien
tagggataaggtgaggccatcgccc

SEQ ID NO: 5662065 - DNA, 25 bp, Homo sapien
cttcatgggtaagtgggaggagcct

SEQ ID NO: 5662066 - DNA, 25 bp, Homo sapien
acaacttcatgggtaagtgggagga

SEQ ID NO: 5662067 - DNA, 25 bp, Homo sapien
ataaggtgaggccatcgccctttgc

SEQ ID NO: 5662068 - DNA, 25 bp, Homo sapien
agggataaggtgaggccatcgccct

SEQ ID NO: 5662069 - DNA, 25 bp, Homo sapien
tgcccagtcctcgtggaactacaac

SEQ ID NO: 5662070 - DNA, 25 bp, Homo sapien
ttatccctactgctatccccacatc

SEQ ID NO: 5662071 - DNA, 25 bp, Homo sapien
agggcgatggcctcaccttatccct

SEQ ID NO: 5662072 - DNA, 25 bp, Homo sapien
gggcgatggcctcaccttatcccta

SEQ ID NO: 5662073 - DNA, 25 bp, Homo sapien
tcctcccacttacccatgaagttgt

SEQ ID NO: 5662074 - DNA, 25 bp, Homo sapien
gttgtagttccacgaggactgggca

SEQ ID NO: 5662075 - DNA, 25 bp, Homo sapien
gcaaagggcgatggcctcaccttat

SEQ ID NO: 5662076 - DNA, 25 bp, Homo sapien
aaaacatcattttgggccaaggtgg

SEQ ID NO: 5662077 - DNA, 25 bp, Homo sapien
taaaacatcattttgggccaaggtg

SEQ ID NO: 5662078 - DNA, 25 bp, Homo sapien
gggatattatagtttataaaacatc

SEQ ID NO: 5662079 - DNA, 25 bp, Homo sapien
aaacatcattttgggccaaggtggg

SEQ ID NO: 5662080 - DNA, 25 bp, Homo sapien
tagtttataaaacatcattttgggc

SEQ ID NO: 5662081 - DNA, 25 bp, Homo sapien
gtttataaaacatcattttgggcca

SEQ ID NO: 5662082 - DNA, 25 bp, Homo sapien
ccaccttggcccaaaatgatgtttt

SEQ ID NO: 5662083 - DNA, 25 bp, Homo sapien
tggcccaaaatgatgttttataaac

SEQ ID NO: 5662084 - DNA, 25 bp, Homo sapien
gcccaaaatgatgttttataaacta

SEQ ID NO: 5662085 - DNA, 25 bp, Homo sapien
caccttggcccaaaatgatgtttta

SEQ ID NO: 5662086 - DNA, 25 bp, Homo sapien
gatgttttataaactataatatccc

SEQ ID NO: 5662087 - DNA, 25 bp, Homo sapien
cccaccttggcccaaaatgatgttt

SEQ ID NO: 5662088 - DNA, 25 bp, Homo sapien
gaaaagatgcataactttactagtg

SEQ ID NO: 5662089 - DNA, 25 bp, Homo sapien
gtgataccctgcttcaaaaaagaga

SEQ ID NO: 5662090 - DNA, 25 bp, Homo sapien
ccctgcttcaaaaaagagaaaagat

SEQ ID NO: 5662091 - DNA, 25 bp, Homo sapien
agatcatgtcactgcctgctagcct

SEQ ID NO: 5662092 - DNA, 25 bp, Homo sapien
agatgcataactttactagtgtatc

SEQ ID NO: 5662093 - DNA, 25 bp, Homo sapien
catgtcactgcctgctagcctgggt

SEQ ID NO: 5662094 - DNA, 25 bp, Homo sapien
gatacactagtaaagttatgcatct

SEQ ID NO: 5662095 - DNA, 25 bp, Homo sapien
atcttttctcttttttgaagcaggg

SEQ ID NO: 5662096 - DNA, 25 bp, Homo sapien
aggctagcaggcagtgacatgatct

SEQ ID NO: 5662097 - DNA, 25 bp, Homo sapien
acccaggctagcaggcagtgacatg

SEQ ID NO: 5662098 - DNA, 25 bp, Homo sapien
cactagtaaagttatgcatcttttc

SEQ ID NO: 5662099 - DNA, 25 bp, Homo sapien
tctcttttttgaagcagggtatcac

SEQ ID NO: 5662100 - DNA, 25 bp, Homo sapien
gggaggatcacctgatcctggaggg

SEQ ID NO: 5662101 - DNA, 25 bp, Homo sapien
aggatcacctgatcctggagggtgg

SEQ ID NO: 5662102 - DNA, 25 bp, Homo sapien
gaggatcacctgatcctggagggtg

SEQ ID NO: 5662103 - DNA, 25 bp, Homo sapien
ggatcacctgatcctggagggtggt

SEQ ID NO: 5662104 - DNA, 25 bp, Homo sapien
atcacctgatcctggagggtggtga

SEQ ID NO: 5662105 - DNA, 25 bp, Homo sapien
ggaggatcacctgatcctggagggt

SEQ ID NO: 5662106 - DNA, 25 bp, Homo sapien
ccctccaggatcaggtgatcctccc

SEQ ID NO: 5662107 - DNA, 25 bp, Homo sapien
tcaccaccctccaggatcaggtgat

SEQ ID NO: 5662108 - DNA, 25 bp, Homo sapien
accaccctccaggatcaggtgatcc

SEQ ID NO: 5662109 - DNA, 25 bp, Homo sapien
caccctccaggatcaggtgatcctc

SEQ ID NO: 5662110 - DNA, 25 bp, Homo sapien
ccaccctccaggatcaggtgatcct

SEQ ID NO: 5662111 - DNA, 25 bp, Homo sapien
accctccaggatcaggtgatcctcc

SEQ ID NO: 5662112 - DNA, 25 bp, Homo sapien
atgacgaaatggagtctctacaaaa

SEQ ID NO: 5662113 - DNA, 25 bp, Homo sapien
gcaacatgacgaaatggagtctcta

SEQ ID NO: 5662114 - DNA, 25 bp, Homo sapien
ggtgggcagatcttttgagcccagg

SEQ ID NO: 5662115 - DNA, 25 bp, Homo sapien
gtgggcagatcttttgagcccagga

SEQ ID NO: 5662116 - DNA, 25 bp, Homo sapien
cgaggtgggcagatcttttgagccc

SEQ ID NO: 5662117 - DNA, 25 bp, Homo sapien
catgacgaaatggagtctctacaaa

SEQ ID NO: 5662118 - DNA, 25 bp, Homo sapien
tttgtagagactccatttcgtcatg

SEQ ID NO: 5662119 - DNA, 25 bp, Homo sapien
gggctcaaaagatctgcccacctcg

SEQ ID NO: 5662120 - DNA, 25 bp, Homo sapien
cctgggctcaaaagatctgcccacc

SEQ ID NO: 5662121 - DNA, 25 bp, Homo sapien
tcctgggctcaaaagatctgcccac

SEQ ID NO: 5662122 - DNA, 25 bp, Homo sapien
tagagactccatttcgtcatgttgc

SEQ ID NO: 5662123 - DNA, 25 bp, Homo sapien
ttttgtagagactccatttcgtcat

SEQ ID NO: 5662124 - DNA, 25 bp, Homo sapien
ggaggatgaggttgcttgaacgcaa

SEQ ID NO: 5662125 - DNA, 25 bp, Homo sapien
cttgaacgcaagcagtgagctttga

SEQ ID NO: 5662126 - DNA, 25 bp, Homo sapien
gcttgaacgcaagcagtgagctttg

SEQ ID NO: 5662127 - DNA, 25 bp, Homo sapien
tcaaagctcactgcttgcgttcaag

SEQ ID NO: 5662128 - DNA, 25 bp, Homo sapien
caaagctcactgcttgcgttcaagc

SEQ ID NO: 5662129 - DNA, 25 bp, Homo sapien
ttgcgttcaagcaacctcatcctcc

SEQ ID NO: 5662130 - DNA, 25 bp, Homo sapien
tttgggaggccaaggtgggtagatc

SEQ ID NO: 5662131 - DNA, 25 bp, Homo sapien
tttgaaaccatcctggccaacgtgg

SEQ ID NO: 5662132 - DNA, 25 bp, Homo sapien
tgggtagatcatttgaggtcaggag

SEQ ID NO: 5662133 - DNA, 25 bp, Homo sapien
ttgggaggccaaggtgggtagatca

SEQ ID NO: 5662134 - DNA, 25 bp, Homo sapien
ctcctgacctcaaatgatctaccca

SEQ ID NO: 5662135 - DNA, 25 bp, Homo sapien
gatctacccaccttggcctcccaaa

SEQ ID NO: 5662136 - DNA, 25 bp, Homo sapien
ccacgttggccaggatggtttcaaa

SEQ ID NO: 5662137 - DNA, 25 bp, Homo sapien
tgatctacccaccttggcctcccaa

SEQ ID NO: 5662138 - DNA, 25 bp, Homo sapien
ggaagcacttaggcttagaagtttc

SEQ ID NO: 5662139 - DNA, 25 bp, Homo sapien
ttggaagcacttaggcttagaagtt

SEQ ID NO: 5662140 - DNA, 25 bp, Homo sapien
tggaagcacttaggcttagaagttt

SEQ ID NO: 5662141 - DNA, 25 bp, Homo sapien
aggaggtctatatacggttttctgg

SEQ ID NO: 5662142 - DNA, 25 bp, Homo sapien
tttggaagcacttaggcttagaagt

SEQ ID NO: 5662143 - DNA, 25 bp, Homo sapien
aaacttctaagcctaagtgcttcca

SEQ ID NO: 5662144 - DNA, 25 bp, Homo sapien
ccagaaaaccgtatatagacctcct

SEQ ID NO: 5662145 - DNA, 25 bp, Homo sapien
gaaacttctaagcctaagtgcttcc

SEQ ID NO: 5662146 - DNA, 25 bp, Homo sapien
aacttctaagcctaagtgcttccaa

SEQ ID NO: 5662147 - DNA, 25 bp, Homo sapien
acttctaagcctaagtgcttccaaa

SEQ ID NO: 5662148 - DNA, 25 bp, Homo sapien
cgaggtgcagctcaaggatctgatc

SEQ ID NO: 5662149 - DNA, 25 bp, Homo sapien
ggatcaaggtcgaggtgcagctcaa

SEQ ID NO: 5662150 - DNA, 25 bp, Homo sapien
aagaatggatcaaggtcgaggtgca

SEQ ID NO: 5662151 - DNA, 25 bp, Homo sapien
tctgatcttggctgactacggcaag

SEQ ID NO: 5662152 - DNA, 25 bp, Homo sapien
caaggtcgaggtgcagctcaaggat

SEQ ID NO: 5662153 - DNA, 25 bp, Homo sapien
aaggatctgatcttggctgactacg

SEQ ID NO: 5662154 - DNA, 25 bp, Homo sapien
tcttgccgtagtcagccaagatcag

SEQ ID NO: 5662155 - DNA, 25 bp, Homo sapien
ccttgagctgcacctcgaccttgat

SEQ ID NO: 5662156 - DNA, 25 bp, Homo sapien
tgcacctcgaccttgatccattctt

SEQ ID NO: 5662157 - DNA, 25 bp, Homo sapien
gatcagatccttgagctgcacctcg

SEQ ID NO: 5662158 - DNA, 25 bp, Homo sapien
ccgtagtcagccaagatcagatcct

SEQ ID NO: 5662159 - DNA, 25 bp, Homo sapien
ccaagatcagatccttgagctgcac

SEQ ID NO: 5662160 - DNA, 25 bp, Homo sapien
attcttgggtttcatgaaaggttag

SEQ ID NO: 5662161 - DNA, 25 bp, Homo sapien
gattaaagtgggagagcctcaagca

SEQ ID NO: 5662162 - DNA, 25 bp, Homo sapien
tcttgggtttcatgaaaggttagga

SEQ ID NO: 5662163 - DNA, 25 bp, Homo sapien
cttgggtttcatgaaaggttaggat

SEQ ID NO: 5662164 - DNA, 25 bp, Homo sapien
atcctaacctttcatgaaacccaag

SEQ ID NO: 5662165 - DNA, 25 bp, Homo sapien
ctaacctttcatgaaacccaagaat

SEQ ID NO: 5662166 - DNA, 25 bp, Homo sapien
tcctaacctttcatgaaacccaaga

SEQ ID NO: 5662167 - DNA, 25 bp, Homo sapien
tgcttgaggctctcccactttaatc

SEQ ID NO: 5662168 - DNA, 25 bp, Homo sapien
agtgtgctgggatgcacctgtagtc

SEQ ID NO: 5662169 - DNA, 25 bp, Homo sapien
ccgagtgtgctgggatgcacctgta

SEQ ID NO: 5662170 - DNA, 25 bp, Homo sapien
cgagtgtgctgggatgcacctgtag

SEQ ID NO: 5662171 - DNA, 25 bp, Homo sapien
gagtgtgctgggatgcacctgtagt

SEQ ID NO: 5662172 - DNA, 25 bp, Homo sapien
actacaggtgcatcccagcacactc

SEQ ID NO: 5662173 - DNA, 25 bp, Homo sapien
ctacaggtgcatcccagcacactcg

SEQ ID NO: 5662174 - DNA, 25 bp, Homo sapien
tacaggtgcatcccagcacactcgg

SEQ ID NO: 5662175 - DNA, 25 bp, Homo sapien
gactacaggtgcatcccagcacact

SEQ ID NO: 5662176 - DNA, 25 bp, Homo sapien
tgggaggctgagttgggtgaatcac

SEQ ID NO: 5662177 - DNA, 25 bp, Homo sapien
agcactttgggaggctgagttgggt

SEQ ID NO: 5662178 - DNA, 25 bp, Homo sapien
ctgaggtcaggagtttgagatcagg

SEQ ID NO: 5662179 - DNA, 25 bp, Homo sapien
tgagatcaggctggccaacatgacg

SEQ ID NO: 5662180 - DNA, 25 bp, Homo sapien
acccaactcagcctcccaaagtgct

SEQ ID NO: 5662181 - DNA, 25 bp, Homo sapien
cgtcatgttggccagcctgatctca

SEQ ID NO: 5662182 - DNA, 25 bp, Homo sapien
gtgattcacccaactcagcctccca

SEQ ID NO: 5662183 - DNA, 25 bp, Homo sapien
cctgatctcaaactcctgacctcag

SEQ ID NO: 5662184 - DNA, 25 bp, Homo sapien
ggaactctgttgactttcatgagag

SEQ ID NO: 5662185 - DNA, 25 bp, Homo sapien
ggtgggaactctgttgactttcatg

SEQ ID NO: 5662186 - DNA, 25 bp, Homo sapien
tgggaactctgttgactttcatgag

SEQ ID NO: 5662187 - DNA, 25 bp, Homo sapien
gggaactctgttgactttcatgaga

SEQ ID NO: 5662188 - DNA, 25 bp, Homo sapien
ttcacatttttagcctatagattgg

SEQ ID NO: 5662189 - DNA, 25 bp, Homo sapien
gaactctgttgactttcatgagagt

SEQ ID NO: 5662190 - DNA, 25 bp, Homo sapien
tctcatgaaagtcaacagagttccc

SEQ ID NO: 5662191 - DNA, 25 bp, Homo sapien
tcatgaaagtcaacagagttcccac

SEQ ID NO: 5662192 - DNA, 25 bp, Homo sapien
ccaatctataggctaaaaatgtgaa

SEQ ID NO: 5662193 - DNA, 25 bp, Homo sapien
ctctcatgaaagtcaacagagttcc

SEQ ID NO: 5662194 - DNA, 25 bp, Homo sapien
aactctcatgaaagtcaacagagtt

SEQ ID NO: 5662195 - DNA, 25 bp, Homo sapien
catgaaagtcaacagagttcccacc

SEQ ID NO: 5662196 - DNA, 25 bp, Homo sapien
gccatttgatactctttgtaccttc

SEQ ID NO: 5662197 - DNA, 25 bp, Homo sapien
ggacacggccatttgatactctttg

SEQ ID NO: 5662198 - DNA, 25 bp, Homo sapien
catgtgtcagcttgtggtattgtct

SEQ ID NO: 5662199 - DNA, 25 bp, Homo sapien
tagcacatactcatgtgtcagcttg

SEQ ID NO: 5662200 - DNA, 25 bp, Homo sapien
ggtcattggacacggccatttgata

SEQ ID NO: 5662201 - DNA, 25 bp, Homo sapien
catactcatgtgtcagcttgtggta

SEQ ID NO: 5662202 - DNA, 25 bp, Homo sapien
gcccctttcaacaagacaataccac

SEQ ID NO: 5662203 - DNA, 25 bp, Homo sapien
gacaataccacaagctgacacatga

SEQ ID NO: 5662204 - DNA, 25 bp, Homo sapien
tatcaaatggccgtgtccaatgacc

SEQ ID NO: 5662205 - DNA, 25 bp, Homo sapien
caaagagtatcaaatggccgtgtcc

SEQ ID NO: 5662206 - DNA, 25 bp, Homo sapien
caagctgacacatgagtatgtgcta

SEQ ID NO: 5662207 - DNA, 25 bp, Homo sapien
gaaggtacaaagagtatcaaatggc

SEQ ID NO: 5662208 - DNA, 25 bp, Homo sapien
tagcatgtttcatcttacattcagt

SEQ ID NO: 5662209 - DNA, 25 bp, Homo sapien
aggatcttagtagcccaaacccctg

SEQ ID NO: 5662210 - DNA, 25 bp, Homo sapien
ggatcttagtagcccaaacccctga

SEQ ID NO: 5662211 - DNA, 25 bp, Homo sapien
atagcatgtttcatcttacattcag

SEQ ID NO: 5662212 - DNA, 25 bp, Homo sapien
caggatcttagtagcccaaacccct

SEQ ID NO: 5662213 - DNA, 25 bp, Homo sapien
agcatgtttcatcttacattcagtc

SEQ ID NO: 5662214 - DNA, 25 bp, Homo sapien
ctgaatgtaagatgaaacatgctat

SEQ ID NO: 5662215 - DNA, 25 bp, Homo sapien
tcaggggtttgggctactaagatcc

SEQ ID NO: 5662216 - DNA, 25 bp, Homo sapien
aggggtttgggctactaagatcctg

SEQ ID NO: 5662217 - DNA, 25 bp, Homo sapien
actgaatgtaagatgaaacatgcta

SEQ ID NO: 5662218 - DNA, 25 bp, Homo sapien
caggggtttgggctactaagatcct

SEQ ID NO: 5662219 - DNA, 25 bp, Homo sapien
gactgaatgtaagatgaaacatgct

SEQ ID NO: 5662220 - DNA, 25 bp, Homo sapien
tacaagcaaaacacagatttggaga

SEQ ID NO: 5662221 - DNA, 25 bp, Homo sapien
tgggctactaagatcctggactgaa

SEQ ID NO: 5662222 - DNA, 25 bp, Homo sapien
cacagatttggagatgagcatcagg

SEQ ID NO: 5662223 - DNA, 25 bp, Homo sapien
tcctggactgaatgtaagatgaaac

SEQ ID NO: 5662224 - DNA, 25 bp, Homo sapien
gactgaatgtaagatgaaacatgct

SEQ ID NO: 5662225 - DNA, 25 bp, Homo sapien
gggtttgggctactaagatcctgga

SEQ ID NO: 5662226 - DNA, 25 bp, Homo sapien
ggcccagcaacgcatattcttgaaa

SEQ ID NO: 5662227 - DNA, 25 bp, Homo sapien
ccggcccagcaacgcatattcttga

SEQ ID NO: 5662228 - DNA, 25 bp, Homo sapien
cggcccagcaacgcatattcttgaa

SEQ ID NO: 5662229 - DNA, 25 bp, Homo sapien
cccggcccagcaacgcatattcttg

SEQ ID NO: 5662230 - DNA, 25 bp, Homo sapien
gcccagcaacgcatattcttgaaac

SEQ ID NO: 5662231 - DNA, 25 bp, Homo sapien
tcaagaatatgcgttgctgggccgg

SEQ ID NO: 5662232 - DNA, 25 bp, Homo sapien
gtttcaagaatatgcgttgctgggc

SEQ ID NO: 5662233 - DNA, 25 bp, Homo sapien
ttcaagaatatgcgttgctgggccg

SEQ ID NO: 5662234 - DNA, 25 bp, Homo sapien
caagaatatgcgttgctgggccggg

SEQ ID NO: 5662235 - DNA, 25 bp, Homo sapien
tttcaagaatatgcgttgctgggcc

SEQ ID NO: 5662236 - DNA, 25 bp, Homo sapien
ggcccagcaacgcatattcttgaaa

SEQ ID NO: 5662237 - DNA, 25 bp, Homo sapien
ccggcccagcaacgcatattcttga

SEQ ID NO: 5662238 - DNA, 25 bp, Homo sapien
gcttgagccaccgtgcccggcccag

SEQ ID NO: 5662239 - DNA, 25 bp, Homo sapien
gcccagcaacgcatattcttgaaac

SEQ ID NO: 5662240 - DNA, 25 bp, Homo sapien
cggcccagcaacgcatattcttgaa

SEQ ID NO: 5662241 - DNA, 25 bp, Homo sapien
cttgagccaccgtgcccggcccagc

SEQ ID NO: 5662242 - DNA, 25 bp, Homo sapien
tcaagaatatgcgttgctgggccgg

SEQ ID NO: 5662243 - DNA, 25 bp, Homo sapien
gctgggccgggcacggtggctcaag

SEQ ID NO: 5662244 - DNA, 25 bp, Homo sapien
gtttcaagaatatgcgttgctgggc

SEQ ID NO: 5662245 - DNA, 25 bp, Homo sapien
ttcaagaatatgcgttgctgggccg

SEQ ID NO: 5662246 - DNA, 25 bp, Homo sapien
tttcaagaatatgcgttgctgggcc

SEQ ID NO: 5662247 - DNA, 25 bp, Homo sapien
ctgggccgggcacggtggctcaagc

SEQ ID NO: 5662248 - DNA, 25 bp, Homo sapien
ggaatgcagtggcctgatttcagct

SEQ ID NO: 5662249 - DNA, 25 bp, Homo sapien
gaatgcagtggcctgatttcagctc

SEQ ID NO: 5662250 - DNA, 25 bp, Homo sapien
ctggaatgcagtggcctgatttcag

SEQ ID NO: 5662251 - DNA, 25 bp, Homo sapien
tggaatgcagtggcctgatttcagc

SEQ ID NO: 5662252 - DNA, 25 bp, Homo sapien
aatgcagtggcctgatttcagctca

SEQ ID NO: 5662253 - DNA, 25 bp, Homo sapien
atgcagtggcctgatttcagctcac

SEQ ID NO: 5662254 - DNA, 25 bp, Homo sapien
gagctgaaatcaggccactgcattc

SEQ ID NO: 5662255 - DNA, 25 bp, Homo sapien
ctgaaatcaggccactgcattccag

SEQ ID NO: 5662256 - DNA, 25 bp, Homo sapien
agctgaaatcaggccactgcattcc

SEQ ID NO: 5662257 - DNA, 25 bp, Homo sapien
gctgaaatcaggccactgcattcca

SEQ ID NO: 5662258 - DNA, 25 bp, Homo sapien
tgagctgaaatcaggccactgcatt

SEQ ID NO: 5662259 - DNA, 25 bp, Homo sapien
gtgagctgaaatcaggccactgcat

SEQ ID NO: 5662260 - DNA, 25 bp, Homo sapien
ttcacgccattctcctgccttagcc

SEQ ID NO: 5662261 - DNA, 25 bp, Homo sapien
tcacgccattctcctgccttagcct

SEQ ID NO: 5662262 - DNA, 25 bp, Homo sapien
caccacgcctggctaattttttttg

SEQ ID NO: 5662263 - DNA, 25 bp, Homo sapien
ctacaggcgcccgccaccacgcctg

SEQ ID NO: 5662264 - DNA, 25 bp, Homo sapien
acgccattctcctgccttagcctcc

SEQ ID NO: 5662265 - DNA, 25 bp, Homo sapien
cacgccattctcctgccttagcctc

SEQ ID NO: 5662266 - DNA, 25 bp, Homo sapien
caggcgtggtggcgggcgcctgtag

SEQ ID NO: 5662267 - DNA, 25 bp, Homo sapien
ggctaaggcaggagaatggcgtgaa

SEQ ID NO: 5662268 - DNA, 25 bp, Homo sapien
gaggctaaggcaggagaatggcgtg

SEQ ID NO: 5662269 - DNA, 25 bp, Homo sapien
ggaggctaaggcaggagaatggcgt

SEQ ID NO: 5662270 - DNA, 25 bp, Homo sapien
aggctaaggcaggagaatggcgtga

SEQ ID NO: 5662271 - DNA, 25 bp, Homo sapien
caaaaaaaattagccaggcgtggtg

SEQ ID NO: 5662272 - DNA, 25 bp, Homo sapien
agagtgtatgaggtgcttcgttccc

SEQ ID NO: 5662273 - DNA, 25 bp, Homo sapien
ttctgtgggaggtccaagagtgtat

SEQ ID NO: 5662274 - DNA, 25 bp, Homo sapien
ggtccaagagtgtatgaggtgcttc

SEQ ID NO: 5662275 - DNA, 25 bp, Homo sapien
tatgaggtgcttcgttcccttccag

SEQ ID NO: 5662276 - DNA, 25 bp, Homo sapien
tccaagagtgtatgaggtgcttcgt

SEQ ID NO: 5662277 - DNA, 25 bp, Homo sapien
tattctgtgggaggtccaagagtgt

SEQ ID NO: 5662278 - DNA, 25 bp, Homo sapien
gaacgaagcacctcatacactcttg

SEQ ID NO: 5662279 - DNA, 25 bp, Homo sapien
gaagcacctcatacactcttggacc

SEQ ID NO: 5662280 - DNA, 25 bp, Homo sapien
gaagggaacgaagcacctcatacac

SEQ ID NO: 5662281 - DNA, 25 bp, Homo sapien
ctggaagggaacgaagcacctcata

SEQ ID NO: 5662282 - DNA, 25 bp, Homo sapien
gggaacgaagcacctcatacactct

SEQ ID NO: 5662283 - DNA, 25 bp, Homo sapien
tacactcttggacctcccacagaat

SEQ ID NO: 5662284 - DNA, 25 bp, Homo sapien
caaggtgagtgttagcagcagtgta

SEQ ID NO: 5662285 - DNA, 25 bp, Homo sapien
taggtgcgggactctgtacatggct

SEQ ID NO: 5662286 - DNA, 25 bp, Homo sapien
ttcacaaggtgagtgttagcagcag

SEQ ID NO: 5662287 - DNA, 25 bp, Homo sapien
cagcagtgtataggtgcgggactct

SEQ ID NO: 5662288 - DNA, 25 bp, Homo sapien
gagtaatgggctaagtgtgtacaca

SEQ ID NO: 5662289 - DNA, 25 bp, Homo sapien
gtgtgtacacatgctgggaagaagg

SEQ ID NO: 5662290 - DNA, 25 bp, Homo sapien
agccatgtacagagtcccgcaccta

SEQ ID NO: 5662291 - DNA, 25 bp, Homo sapien
ctgctgctaacactcaccttgtgaa

SEQ ID NO: 5662292 - DNA, 25 bp, Homo sapien
ccttcttcccagcatgtgtacacac

SEQ ID NO: 5662293 - DNA, 25 bp, Homo sapien
tacactgctgctaacactcaccttg

SEQ ID NO: 5662294 - DNA, 25 bp, Homo sapien
agagtcccgcacctatacactgctg

SEQ ID NO: 5662295 - DNA, 25 bp, Homo sapien
tgtgtacacacttagcccattactc

SEQ ID NO: 5662296 - DNA, 25 bp, Homo sapien
tctccagcctgtatgtacacatgag

SEQ ID NO: 5662297 - DNA, 25 bp, Homo sapien
cctctgtagagttggcagcttgtct

SEQ ID NO: 5662298 - DNA, 25 bp, Homo sapien
tcttctccagcctgtatgtacacat

SEQ ID NO: 5662299 - DNA, 25 bp, Homo sapien
tcctctgtagagttggcagcttgtc

SEQ ID NO: 5662300 - DNA, 25 bp, Homo sapien
agcctgtatgtacacatgagcagag

SEQ ID NO: 5662301 - DNA, 25 bp, Homo sapien
ccagcctgtatgtacacatgagcag

SEQ ID NO: 5662302 - DNA, 25 bp, Homo sapien
tgctcatgtgtacatacaggctgga

SEQ ID NO: 5662303 - DNA, 25 bp, Homo sapien
tgtgtacatacaggctggagaagag

SEQ ID NO: 5662304 - DNA, 25 bp, Homo sapien
tcatgtgtacatacaggctggagaa

SEQ ID NO: 5662305 - DNA, 25 bp, Homo sapien
ctctgctcatgtgtacatacaggct

SEQ ID NO: 5662306 - DNA, 25 bp, Homo sapien
agacaagctgccaactctacagagg

SEQ ID NO: 5662307 - DNA, 25 bp, Homo sapien
gacaagctgccaactctacagagga

SEQ ID NO: 5662308 - DNA, 25 bp, Homo sapien
agaaggttgaggtgggagaattact

SEQ ID NO: 5662309 - DNA, 25 bp, Homo sapien
gtggtggtccacgcctgtagtccca

SEQ ID NO: 5662310 - DNA, 25 bp, Homo sapien
ggcgtggtggtccacgcctgtagtc

SEQ ID NO: 5662311 - DNA, 25 bp, Homo sapien
aaggttgaggtgggagaattacttg

SEQ ID NO: 5662312 - DNA, 25 bp, Homo sapien
cagaaggttgaggtgggagaattac

SEQ ID NO: 5662313 - DNA, 25 bp, Homo sapien
tggtggtccacgcctgtagtcccag

SEQ ID NO: 5662314 - DNA, 25 bp, Homo sapien
tgggactacaggcgtggaccaccac

SEQ ID NO: 5662315 - DNA, 25 bp, Homo sapien
gtaattctcccacctcaaccttctg

SEQ ID NO: 5662316 - DNA, 25 bp, Homo sapien
caagtaattctcccacctcaacctt

SEQ ID NO: 5662317 - DNA, 25 bp, Homo sapien
ctgggactacaggcgtggaccacca

SEQ ID NO: 5662318 - DNA, 25 bp, Homo sapien
gactacaggcgtggaccaccacgcc

SEQ ID NO: 5662319 - DNA, 25 bp, Homo sapien
agtaattctcccacctcaaccttct

SEQ ID NO: 5662320 - DNA, 25 bp, Homo sapien
cggtgggcagattgtctgagctcag

SEQ ID NO: 5662321 - DNA, 25 bp, Homo sapien
gtgggcagattgtctgagctcagga

SEQ ID NO: 5662322 - DNA, 25 bp, Homo sapien
cgcggtgggcagattgtctgagctc

SEQ ID NO: 5662323 - DNA, 25 bp, Homo sapien
gcggtgggcagattgtctgagctca

SEQ ID NO: 5662324 - DNA, 25 bp, Homo sapien
ggtgggcagattgtctgagctcagg

SEQ ID NO: 5662325 - DNA, 25 bp, Homo sapien
ccgcggtgggcagattgtctgagct

SEQ ID NO: 5662326 - DNA, 25 bp, Homo sapien
gagctcagacaatctgcccaccgcg

SEQ ID NO: 5662327 - DNA, 25 bp, Homo sapien
tgagctcagacaatctgcccaccgc

SEQ ID NO: 5662328 - DNA, 25 bp, Homo sapien
cctgagctcagacaatctgcccacc

SEQ ID NO: 5662329 - DNA, 25 bp, Homo sapien
ctgagctcagacaatctgcccaccg

SEQ ID NO: 5662330 - DNA, 25 bp, Homo sapien
tcctgagctcagacaatctgcccac

SEQ ID NO: 5662331 - DNA, 25 bp, Homo sapien
agctcagacaatctgcccaccgcgg

SEQ ID NO: 5662332 - DNA, 25 bp, Homo sapien
tataacttgcacaggtgagttgagg

SEQ ID NO: 5662333 - DNA, 25 bp, Homo sapien
cttgcacaggtgagttgaggctcag

SEQ ID NO: 5662334 - DNA, 25 bp, Homo sapien
taacttgcacaggtgagttgaggct

SEQ ID NO: 5662335 - DNA, 25 bp, Homo sapien
ggctcaggaccatgtattttcaggc

SEQ ID NO: 5662336 - DNA, 25 bp, Homo sapien
caggtgagttgaggctcaggaccat

SEQ ID NO: 5662337 - DNA, 25 bp, Homo sapien
aacttgcacaggtgagttgaggctc

SEQ ID NO: 5662338 - DNA, 25 bp, Homo sapien
cattgacctggcctataacttgcac

SEQ ID NO: 5662339 - DNA, 25 bp, Homo sapien
ttgacctggcctataacttgcacag

SEQ ID NO: 5662340 - DNA, 25 bp, Homo sapien
attgacctggcctataacttgcaca

SEQ ID NO: 5662341 - DNA, 25 bp, Homo sapien
ctgtgcaagttataggccaggtcaa

SEQ ID NO: 5662342 - DNA, 25 bp, Homo sapien
gtgcaagttataggccaggtcaatg

SEQ ID NO: 5662343 - DNA, 25 bp, Homo sapien
tgtgcaagttataggccaggtcaat

SEQ ID NO: 5662344 - DNA, 25 bp, Homo sapien
ctcaactcacctgtgcaagttatag

SEQ ID NO: 5662345 - DNA, 25 bp, Homo sapien
gcctgaaaatacatggtcctgagcc

SEQ ID NO: 5662346 - DNA, 25 bp, Homo sapien
gagcctcaactcacctgtgcaagtt

SEQ ID NO: 5662347 - DNA, 25 bp, Homo sapien
ctgagcctcaactcacctgtgcaag

SEQ ID NO: 5662348 - DNA, 25 bp, Homo sapien
tgagcctcaactcacctgtgcaagt

SEQ ID NO: 5662349 - DNA, 25 bp, Homo sapien
atggtcctgagcctcaactcacctg

SEQ ID NO: 5662350 - DNA, 25 bp, Homo sapien
acattgagcgctacgcccgggccaa

SEQ ID NO: 5662351 - DNA, 25 bp, Homo sapien
aacatgagtatctacccttcgccca

SEQ ID NO: 5662352 - DNA, 25 bp, Homo sapien
tatgattcccacgacattgagcgct

SEQ ID NO: 5662353 - DNA, 25 bp, Homo sapien
gtatctacccttcgcccacaggtgt

SEQ ID NO: 5662354 - DNA, 25 bp, Homo sapien
aagttcctggactacaccaccgaca

SEQ ID NO: 5662355 - DNA, 25 bp, Homo sapien
gactacaccaccgacaacatgagta

SEQ ID NO: 5662356 - DNA, 25 bp, Homo sapien
cctgtgggcgaagggtagatactca

SEQ ID NO: 5662357 - DNA, 25 bp, Homo sapien
tgtcggtggtgtagtccaggaactt

SEQ ID NO: 5662358 - DNA, 25 bp, Homo sapien
gcgtagcgctcaatgtcgtgggaat

SEQ ID NO: 5662359 - DNA, 25 bp, Homo sapien
cgctcaatgtcgtgggaatcatagt

SEQ ID NO: 5662360 - DNA, 25 bp, Homo sapien
gatactcatgttgtcggtggtgtag

SEQ ID NO: 5662361 - DNA, 25 bp, Homo sapien
ttggcccgggcgtagcgctcaatgt

SEQ ID NO: 5662362 - DNA, 25 bp, Homo sapien
gtactgtagagagtcagctcaggtg

SEQ ID NO: 5662363 - DNA, 25 bp, Homo sapien
ggtactgtagagagtcagctcaggt

SEQ ID NO: 5662364 - DNA, 25 bp, Homo sapien
agagggtactgtagagagtcagctc

SEQ ID NO: 5662365 - DNA, 25 bp, Homo sapien
tactgtagagagtcagctcaggtgg

SEQ ID NO: 5662366 - DNA, 25 bp, Homo sapien
gagggtactgtagagagtcagctca

SEQ ID NO: 5662367 - DNA, 25 bp, Homo sapien
agggtactgtagagagtcagctcag

SEQ ID NO: 5662368 - DNA, 25 bp, Homo sapien
ctgagctgactctctacagtaccct

SEQ ID NO: 5662369 - DNA, 25 bp, Homo sapien
gagctgactctctacagtaccctct

SEQ ID NO: 5662370 - DNA, 25 bp, Homo sapien
tgagctgactctctacagtaccctc

SEQ ID NO: 5662371 - DNA, 25 bp, Homo sapien
cacctgagctgactctctacagtac

SEQ ID NO: 5662372 - DNA, 25 bp, Homo sapien
acctgagctgactctctacagtacc

SEQ ID NO: 5662373 - DNA, 25 bp, Homo sapien
ccacctgagctgactctctacagta

SEQ ID NO: 5662374 - DNA, 25 bp, Homo sapien
ggaatcgaggggagagggtactgta

SEQ ID NO: 5662375 - DNA, 25 bp, Homo sapien
tggaatcgaggggagagggtactgt

SEQ ID NO: 5662376 - DNA, 25 bp, Homo sapien
acagtaccctctcccctcgattcca

SEQ ID NO: 5662377 - DNA, 25 bp, Homo sapien
tacagtaccctctcccctcgattcc

SEQ ID NO: 5662378 - DNA, 25 bp, Homo sapien
gggtactgtacagagtcagctcagg

SEQ ID NO: 5662379 - DNA, 25 bp, Homo sapien
cagagtcagctcaggtggaatcgag

SEQ ID NO: 5662380 - DNA, 25 bp, Homo sapien
gagagggtactgtacagagtcagct

SEQ ID NO: 5662381 - DNA, 25 bp, Homo sapien
tactgtacagagtcagctcaggtgg

SEQ ID NO: 5662382 - DNA, 25 bp, Homo sapien
gagggtactgtacagagtcagctca

SEQ ID NO: 5662383 - DNA, 25 bp, Homo sapien
tagagagtcagctcaggtggaattg

SEQ ID NO: 5662384 - DNA, 25 bp, Homo sapien
ctgagctgactctgtacagtaccct

SEQ ID NO: 5662385 - DNA, 25 bp, Homo sapien
tgtacagtaccctctcccctcaatt

SEQ ID NO: 5662386 - DNA, 25 bp, Homo sapien
ctcgattccacctgagctgactctg

SEQ ID NO: 5662387 - DNA, 25 bp, Homo sapien
caattccacctgagctgactctcta

SEQ ID NO: 5662388 - DNA, 25 bp, Homo sapien
tgagctgactctgtacagtaccctc

SEQ ID NO: 5662389 - DNA, 25 bp, Homo sapien
tgtacagtaccctctcccctcgatt

SEQ ID NO: 5662390 - DNA, 25 bp, Homo sapien
tcatccagatcttccgagctcactt

SEQ ID NO: 5662391 - DNA, 25 bp, Homo sapien
tcttccgagctcacttgtggcagaa

SEQ ID NO: 5662392 - DNA, 25 bp, Homo sapien
gatcttccgagctcacttgtggcag

SEQ ID NO: 5662393 - DNA, 25 bp, Homo sapien
tggcagaagatccatgagagcattg

SEQ ID NO: 5662394 - DNA, 25 bp, Homo sapien
ggcagaagatccatgagagcattgt

SEQ ID NO: 5662395 - DNA, 25 bp, Homo sapien
cagatcttccgagctcacttgtggc

SEQ ID NO: 5662396 - DNA, 25 bp, Homo sapien
caatgctctcatggatcttctgcca

SEQ ID NO: 5662397 - DNA, 25 bp, Homo sapien
tgccacaagtgagctcggaagatct

SEQ ID NO: 5662398 - DNA, 25 bp, Homo sapien
aagtgagctcggaagatctggatga

SEQ ID NO: 5662399 - DNA, 25 bp, Homo sapien
acaatgctctcatggatcttctgcc

SEQ ID NO: 5662400 - DNA, 25 bp, Homo sapien
ttctgccacaagtgagctcggaaga

SEQ ID NO: 5662401 - DNA, 25 bp, Homo sapien
cacaagtgagctcggaagatctgga

SEQ ID NO: 5662402 - DNA, 25 bp, Homo sapien
gtcgttttcctggcaggtatatgta

SEQ ID NO: 5662403 - DNA, 25 bp, Homo sapien
acattgtcgttttcctggcaggtat

SEQ ID NO: 5662404 - DNA, 25 bp, Homo sapien
attgtcgttttcctggcaggtatat

SEQ ID NO: 5662405 - DNA, 25 bp, Homo sapien
cattgtcgttttcctggcaggtata

SEQ ID NO: 5662406 - DNA, 25 bp, Homo sapien
tgtcgttttcctggcaggtatatgt

SEQ ID NO: 5662407 - DNA, 25 bp, Homo sapien
ttgtcgttttcctggcaggtatatg

SEQ ID NO: 5662408 - DNA, 25 bp, Homo sapien
caggtgcagctagacctgacgggta

SEQ ID NO: 5662409 - DNA, 25 bp, Homo sapien
tatcttcatgcacggcaagatcccc

SEQ ID NO: 5662410 - DNA, 25 bp, Homo sapien
gacctgacgggtatcttcatgcacg

SEQ ID NO: 5662411 - DNA, 25 bp, Homo sapien
ggtatatgtaggctttcaggtgcag

SEQ ID NO: 5662412 - DNA, 25 bp, Homo sapien
ggcaagatccccacgctgaagatct

SEQ ID NO: 5662413 - DNA, 25 bp, Homo sapien
gacgggtatcttcatgcacggcaag

SEQ ID NO: 5662414 - DNA, 25 bp, Homo sapien
ccgtcaggtctagctgcacctgaaa

SEQ ID NO: 5662415 - DNA, 25 bp, Homo sapien
tcttgccgtgcatgaagatacccgt

SEQ ID NO: 5662416 - DNA, 25 bp, Homo sapien
tgaagatacccgtcaggtctagctg

SEQ ID NO: 5662417 - DNA, 25 bp, Homo sapien
gcacctgaaagcctacatatacctg

SEQ ID NO: 5662418 - DNA, 25 bp, Homo sapien
gggatcttgccgtgcatgaagatac

SEQ ID NO: 5662419 - DNA, 25 bp, Homo sapien
cgtgcatgaagatacccgtcaggtc

SEQ ID NO: 5662420 - DNA, 25 bp, Homo sapien
tatacctgccaggaaaacgacaatg

SEQ ID NO: 5662421 - DNA, 25 bp, Homo sapien
acatatacctgccaggaaaacgaca

SEQ ID NO: 5662422 - DNA, 25 bp, Homo sapien
atacctgccaggaaaacgacaatgt

SEQ ID NO: 5662423 - DNA, 25 bp, Homo sapien
atatacctgccaggaaaacgacaat

SEQ ID NO: 5662424 - DNA, 25 bp, Homo sapien
tacatatacctgccaggaaaacgac

SEQ ID NO: 5662425 - DNA, 25 bp, Homo sapien
catatacctgccaggaaaacgacaa

SEQ ID NO: 5662426 - DNA, 25 bp, Homo sapien
tcaggaaaatccatggctatccccg

SEQ ID NO: 5662427 - DNA, 25 bp, Homo sapien
cagtatcaggtatgtagagggagca

SEQ ID NO: 5662428 - DNA, 25 bp, Homo sapien
gtcaggaaaatccatggctatcccc

SEQ ID NO: 5662429 - DNA, 25 bp, Homo sapien
aggaaaatccatggctatccccgaa

SEQ ID NO: 5662430 - DNA, 25 bp, Homo sapien
taagcagtatcaggtatgtagaggg

SEQ ID NO: 5662431 - DNA, 25 bp, Homo sapien
gagggagcagattttccctgagtca

SEQ ID NO: 5662432 - DNA, 25 bp, Homo sapien
taagggctggcgtgtcagaactgac

SEQ ID NO: 5662433 - DNA, 25 bp, Homo sapien
ggctggcgtgtcagaactgacttta

SEQ ID NO: 5662434 - DNA, 25 bp, Homo sapien
agggctggcgtgtcagaactgactt

SEQ ID NO: 5662435 - DNA, 25 bp, Homo sapien
ggcgtgtcagaactgactttaagca

SEQ ID NO: 5662436 - DNA, 25 bp, Homo sapien
aagggctggcgtgtcagaactgact

SEQ ID NO: 5662437 - DNA, 25 bp, Homo sapien
gctggcgtgtcagaactgactttaa

SEQ ID NO: 5662438 - DNA, 25 bp, Homo sapien
taaagtcagttctgacacgccagcc

SEQ ID NO: 5662439 - DNA, 25 bp, Homo sapien
agtcagttctgacacgccagccctt

SEQ ID NO: 5662440 - DNA, 25 bp, Homo sapien
tgcttaaagtcagttctgacacgcc

SEQ ID NO: 5662441 - DNA, 25 bp, Homo sapien
gcttaaagtcagttctgacacgcca

SEQ ID NO: 5662442 - DNA, 25 bp, Homo sapien
ttaaagtcagttctgacacgccagc

SEQ ID NO: 5662443 - DNA, 25 bp, Homo sapien
tcagttctgacacgccagcccttat

SEQ ID NO: 5662444 - DNA, 25 bp, Homo sapien
ttcggggatagccatggattttcct

SEQ ID NO: 5662445 - DNA, 25 bp, Homo sapien
ccctctacatacctgatactgctta

SEQ ID NO: 5662446 - DNA, 25 bp, Homo sapien
ggggatagccatggattttcctgac

SEQ ID NO: 5662447 - DNA, 25 bp, Homo sapien
tgctccctctacatacctgatactg

SEQ ID NO: 5662448 - DNA, 25 bp, Homo sapien
tgactcagggaaaatctgctccctc

SEQ ID NO: 5662449 - DNA, 25 bp, Homo sapien
tccctctacatacctgatactgctt

SEQ ID NO: 5662450 - DNA, 25 bp, Homo sapien
gggcacctaggagggcatgccaacc

SEQ ID NO: 5662451 - DNA, 25 bp, Homo sapien
agttcagggtcagagcatgccatgg

SEQ ID NO: 5662452 - DNA, 25 bp, Homo sapien
ttgaaccgtgtggagttcagggtca

SEQ ID NO: 5662453 - DNA, 25 bp, Homo sapien
tggagttcagggtcagagcatgcca

SEQ ID NO: 5662454 - DNA, 25 bp, Homo sapien
gtggcctttgaaccgtgtggagttc

SEQ ID NO: 5662455 - DNA, 25 bp, Homo sapien
cctaggagggcatgccaaccctggg

SEQ ID NO: 5662456 - DNA, 25 bp, Homo sapien
tgaccctgaactccacacggttcaa

SEQ ID NO: 5662457 - DNA, 25 bp, Homo sapien
gaactccacacggttcaaaggccac

SEQ ID NO: 5662458 - DNA, 25 bp, Homo sapien
ggttggcatgccctcctaggtgccc

SEQ ID NO: 5662459 - DNA, 25 bp, Homo sapien
cccagggttggcatgccctcctagg

SEQ ID NO: 5662460 - DNA, 25 bp, Homo sapien
tggcatgctctgaccctgaactcca

SEQ ID NO: 5662461 - DNA, 25 bp, Homo sapien
ccatggcatgctctgaccctgaact

SEQ ID NO: 5662462 - DNA, 25 bp, Homo sapien
tacagccatgggagagcgagttcat

SEQ ID NO: 5662463 - DNA, 25 bp, Homo sapien
catgggagagcgagttcattgattc

SEQ ID NO: 5662464 - DNA, 25 bp, Homo sapien
tcattgattctcagcgggtctgggc

SEQ ID NO: 5662465 - DNA, 25 bp, Homo sapien
tgagtacgcactcaagaggcaagag

SEQ ID NO: 5662466 - DNA, 25 bp, Homo sapien
taccgctacatacagccatgggaga

SEQ ID NO: 5662467 - DNA, 25 bp, Homo sapien
cgggtctgggctgagtacgcactca

SEQ ID NO: 5662468 - DNA, 25 bp, Homo sapien
ctcttgcctcttgagtgcgtactca

SEQ ID NO: 5662469 - DNA, 25 bp, Homo sapien
aatgaactcgctctcccatggctgt

SEQ ID NO: 5662470 - DNA, 25 bp, Homo sapien
ttgagtgcgtactcagcccagaccc

SEQ ID NO: 5662471 - DNA, 25 bp, Homo sapien
gcccagacccgctgagaatcaatga

SEQ ID NO: 5662472 - DNA, 25 bp, Homo sapien
gacccgctgagaatcaatgaactcg

SEQ ID NO: 5662473 - DNA, 25 bp, Homo sapien
tctcccatggctgtatgtagcggta

SEQ ID NO: 5662474 - DNA, 25 bp, Homo sapien
taaaccctattgctcaggccctaag

SEQ ID NO: 5662475 - DNA, 25 bp, Homo sapien
cagcctggttcaacgtatttctaaa

SEQ ID NO: 5662476 - DNA, 25 bp, Homo sapien
ccctattgctcaggccctaagggaa

SEQ ID NO: 5662477 - DNA, 25 bp, Homo sapien
ttctaaaccctattgctcaggccct

SEQ ID NO: 5662478 - DNA, 25 bp, Homo sapien
ctcaggccctaagggaagtgggtat

SEQ ID NO: 5662479 - DNA, 25 bp, Homo sapien
caggtacagcctggttcaacgtatt

SEQ ID NO: 5662480 - DNA, 25 bp, Homo sapien
tgtgctcatcccccaatccgacctc

SEQ ID NO: 5662481 - DNA, 25 bp, Homo sapien
atgtgctcatcccccaatccgacct

SEQ ID NO: 5662482 - DNA, 25 bp, Homo sapien
catgtgctcatcccccaatccgacc

SEQ ID NO: 5662483 - DNA, 25 bp, Homo sapien
tgctcatcccccaatccgacctcag

SEQ ID NO: 5662484 - DNA, 25 bp, Homo sapien
gtgctcatcccccaatccgacctca

SEQ ID NO: 5662485 - DNA, 25 bp, Homo sapien
ctgaggtcggattgggggatgagca

SEQ ID NO: 5662486 - DNA, 25 bp, Homo sapien
tgaggtcggattgggggatgagcac

SEQ ID NO: 5662487 - DNA, 25 bp, Homo sapien
ttcccttagggcctgagcaataggg

SEQ ID NO: 5662488 - DNA, 25 bp, Homo sapien
tttagaaatacgttgaaccaggctg

SEQ ID NO: 5662489 - DNA, 25 bp, Homo sapien
tacgttgaaccaggctgtacctgag

SEQ ID NO: 5662490 - DNA, 25 bp, Homo sapien
atacccacttcccttagggcctgag

SEQ ID NO: 5662491 - DNA, 25 bp, Homo sapien
gaaatacgttgaaccaggctgtacc

SEQ ID NO: 5662492 - DNA, 25 bp, Homo sapien
tagggcctgagcaatagggtttaga

SEQ ID NO: 5662493 - DNA, 25 bp, Homo sapien
ggttaatgtaactatcaatgtggca

SEQ ID NO: 5662494 - DNA, 25 bp, Homo sapien
taatgtaactatcaatgtggcaatg

SEQ ID NO: 5662495 - DNA, 25 bp, Homo sapien
agctcagtttaaatctaccgtctta

SEQ ID NO: 5662496 - DNA, 25 bp, Homo sapien
tgtggcaatgtagctcagtttaaat

SEQ ID NO: 5662497 - DNA, 25 bp, Homo sapien
tgtagctcagtttaaatctaccgtc

SEQ ID NO: 5662498 - DNA, 25 bp, Homo sapien
ggcaatgtagctcagtttaaatcta

SEQ ID NO: 5662499 - DNA, 25 bp, Homo sapien
gacggtagatttaaactgagctaca

SEQ ID NO: 5662500 - DNA, 25 bp, Homo sapien
gatttaaactgagctacattgccac

SEQ ID NO: 5662501 - DNA, 25 bp, Homo sapien
tgccacattgatagttacattaacc

SEQ ID NO: 5662502 - DNA, 25 bp, Homo sapien
cattgccacattgatagttacatta

SEQ ID NO: 5662503 - DNA, 25 bp, Homo sapien
taagacggtagatttaaactgagct

SEQ ID NO: 5662504 - DNA, 25 bp, Homo sapien
tagatttaaactgagctacattgcc

SEQ ID NO: 5662505 - DNA, 25 bp, Homo sapien
ctcttgcctaggttggacccaaact

SEQ ID NO: 5662506 - DNA, 25 bp, Homo sapien
cactcttgcctaggttggacccaaa

SEQ ID NO: 5662507 - DNA, 25 bp, Homo sapien
tcttgcctaggttggacccaaactc

SEQ ID NO: 5662508 - DNA, 25 bp, Homo sapien
tcactcttgcctaggttggacccaa

SEQ ID NO: 5662509 - DNA, 25 bp, Homo sapien
ttgggtccaacctaggcaagagtga

SEQ ID NO: 5662510 - DNA, 25 bp, Homo sapien
gagtttgggtccaacctaggcaaga

SEQ ID NO: 5662511 - DNA, 25 bp, Homo sapien
tttgggtccaacctaggcaagagtg

SEQ ID NO: 5662512 - DNA, 25 bp, Homo sapien
agtttgggtccaacctaggcaagag

SEQ ID NO: 5662513 - DNA, 25 bp, Homo sapien
gctcactgcgacccccgcctcccgg

SEQ ID NO: 5662514 - DNA, 25 bp, Homo sapien
atttcagctcactgcgacccccgcc

SEQ ID NO: 5662515 - DNA, 25 bp, Homo sapien
agctcactgcgacccccgcctcccg

SEQ ID NO: 5662516 - DNA, 25 bp, Homo sapien
ttcagctcactgcgacccccgcctc

SEQ ID NO: 5662517 - DNA, 25 bp, Homo sapien
gggtttaagtaattctcctgcctca

SEQ ID NO: 5662518 - DNA, 25 bp, Homo sapien
tttcagctcactgcgacccccgcct

SEQ ID NO: 5662519 - DNA, 25 bp, Homo sapien
gaggcgggggtcgcagtgagctgaa

SEQ ID NO: 5662520 - DNA, 25 bp, Homo sapien
cgggaggcgggggtcgcagtgagct

SEQ ID NO: 5662521 - DNA, 25 bp, Homo sapien
aggcgggggtcgcagtgagctgaaa

SEQ ID NO: 5662522 - DNA, 25 bp, Homo sapien
ggcgggggtcgcagtgagctgaaat

SEQ ID NO: 5662523 - DNA, 25 bp, Homo sapien
tgaggcaggagaattacttaaaccc

SEQ ID NO: 5662524 - DNA, 25 bp, Homo sapien
ccgggaggcgggggtcgcagtgagc

SEQ ID NO: 5662525 - DNA, 25 bp, Homo sapien
gaccccattgagatactggaagagg

SEQ ID NO: 5662526 - DNA, 25 bp, Homo sapien
tagaccccattgagatactggaaga

SEQ ID NO: 5662527 - DNA, 25 bp, Homo sapien
gctagaccccattgagatactggaa

SEQ ID NO: 5662528 - DNA, 25 bp, Homo sapien
aagaatgctagaccccattgagata

SEQ ID NO: 5662529 - DNA, 25 bp, Homo sapien
aatgctagaccccattgagatactg

SEQ ID NO: 5662530 - DNA, 25 bp, Homo sapien
aaaagaatgctagaccccattgaga

SEQ ID NO: 5662531 - DNA, 25 bp, Homo sapien
ccagtatctcaatggggtctagcat

SEQ ID NO: 5662532 - DNA, 25 bp, Homo sapien
tatctcaatggggtctagcattctt

SEQ ID NO: 5662533 - DNA, 25 bp, Homo sapien
tcttccagtatctcaatggggtcta

SEQ ID NO: 5662534 - DNA, 25 bp, Homo sapien
cctcttccagtatctcaatggggtc

SEQ ID NO: 5662535 - DNA, 25 bp, Homo sapien
ttccagtatctcaatggggtctagc

SEQ ID NO: 5662536 - DNA, 25 bp, Homo sapien
tctcaatggggtctagcattctttt

SEQ ID NO: 5662537 - DNA, 25 bp, Homo sapien
tgcctacaattctttcccaggccaa

SEQ ID NO: 5662538 - DNA, 25 bp, Homo sapien
ctacaattctttcccaggccaatgg

SEQ ID NO: 5662539 - DNA, 25 bp, Homo sapien
aggccaatggcctcttctgctctct

SEQ ID NO: 5662540 - DNA, 25 bp, Homo sapien
caattctttcccaggccaatggcct

SEQ ID NO: 5662541 - DNA, 25 bp, Homo sapien
tctcaatggggtctagcattctttt

SEQ ID NO: 5662542 - DNA, 25 bp, Homo sapien
tcccctcttccagtatctcaatggg

SEQ ID NO: 5662543 - DNA, 25 bp, Homo sapien
aggcttcatgggaagtgagtgagtg

SEQ ID NO: 5662544 - DNA, 25 bp, Homo sapien
gggtgaggcttcatgggaagtgagt

SEQ ID NO: 5662545 - DNA, 25 bp, Homo sapien
ggcttcatgggaagtgagtgagtgg

SEQ ID NO: 5662546 - DNA, 25 bp, Homo sapien
tgggtgaggcttcatgggaagtgag

SEQ ID NO: 5662547 - DNA, 25 bp, Homo sapien
ctcacttcccatgaagcctcaccca

SEQ ID NO: 5662548 - DNA, 25 bp, Homo sapien
cactcactcacttcccatgaagcct

SEQ ID NO: 5662549 - DNA, 25 bp, Homo sapien
ccactcactcacttcccatgaagcc

SEQ ID NO: 5662550 - DNA, 25 bp, Homo sapien
actcacttcccatgaagcctcaccc

SEQ ID NO: 5662551 - DNA, 25 bp, Homo sapien
tcagttgaagagaaggaaggacatc

SEQ ID NO: 5662552 - DNA, 25 bp, Homo sapien
gacagcaaggacaatctgtttgtca

SEQ ID NO: 5662553 - DNA, 25 bp, Homo sapien
tgggtgaggcttcatgggaagtgag

SEQ ID NO: 5662554 - DNA, 25 bp, Homo sapien
caatctgtttgtcagttgaagagaa

SEQ ID NO: 5662555 - DNA, 25 bp, Homo sapien
gaaggaaggacatcagatgccacct

SEQ ID NO: 5662556 - DNA, 25 bp, Homo sapien
tgagtggagacagcaaggacaatct

SEQ ID NO: 5662557 - DNA, 25 bp, Homo sapien
gattgtccttgctgtctccactcac

SEQ ID NO: 5662558 - DNA, 25 bp, Homo sapien
ctcacttcccatgaagcctcaccca

SEQ ID NO: 5662559 - DNA, 25 bp, Homo sapien
gacaaacagattgtccttgctgtct

SEQ ID NO: 5662560 - DNA, 25 bp, Homo sapien
aggtggcatctgatgtccttccttc

SEQ ID NO: 5662561 - DNA, 25 bp, Homo sapien
gatgtccttccttctcttcaactga

SEQ ID NO: 5662562 - DNA, 25 bp, Homo sapien
tcttcaactgacaaacagattgtcc

SEQ ID NO: 5662563 - DNA, 25 bp, Homo sapien
ctgccaccacgcccggctaagtttt

SEQ ID NO: 5662564 - DNA, 25 bp, Homo sapien
gcctgccaccacgcccggctaagtt

SEQ ID NO: 5662565 - DNA, 25 bp, Homo sapien
cgcctgccaccacgcccggctaagt

SEQ ID NO: 5662566 - DNA, 25 bp, Homo sapien
cctcctgagtagctgggactacagg

SEQ ID NO: 5662567 - DNA, 25 bp, Homo sapien
cgcaagctccgcctcccaggttcac

SEQ ID NO: 5662568 - DNA, 25 bp, Homo sapien
cctgccaccacgcccggctaagttt

SEQ ID NO: 5662569 - DNA, 25 bp, Homo sapien
gtgaacctgggaggcggagcttgcg

SEQ ID NO: 5662570 - DNA, 25 bp, Homo sapien
aacttagccgggcgtggtggcaggc

SEQ ID NO: 5662571 - DNA, 25 bp, Homo sapien
acttagccgggcgtggtggcaggcg

SEQ ID NO: 5662572 - DNA, 25 bp, Homo sapien
aaaacttagccgggcgtggtggcag

SEQ ID NO: 5662573 - DNA, 25 bp, Homo sapien
aaacttagccgggcgtggtggcagg

SEQ ID NO: 5662574 - DNA, 25 bp, Homo sapien
cctgtagtcccagctactcaggagg

SEQ ID NO: 5662575 - DNA, 25 bp, Homo sapien
gaagggcagtggcgctatcatagct

SEQ ID NO: 5662576 - DNA, 25 bp, Homo sapien
tagctcactgcagctcaagtgatcc

SEQ ID NO: 5662577 - DNA, 25 bp, Homo sapien
tcactgtcacttaggctgaagggca

SEQ ID NO: 5662578 - DNA, 25 bp, Homo sapien
ctcactgtcacttaggctgaagggc

SEQ ID NO: 5662579 - DNA, 25 bp, Homo sapien
tctcactgtcacttaggctgaaggg

SEQ ID NO: 5662580 - DNA, 25 bp, Homo sapien
cactgtcacttaggctgaagggcag

SEQ ID NO: 5662581 - DNA, 25 bp, Homo sapien
ctatgatagcgccactgcccttcag

SEQ ID NO: 5662582 - DNA, 25 bp, Homo sapien
ccttcagcctaagtgacagtgagac

SEQ ID NO: 5662583 - DNA, 25 bp, Homo sapien
tgcccttcagcctaagtgacagtga

SEQ ID NO: 5662584 - DNA, 25 bp, Homo sapien
gcccttcagcctaagtgacagtgag

SEQ ID NO: 5662585 - DNA, 25 bp, Homo sapien
ctgcccttcagcctaagtgacagtg

SEQ ID NO: 5662586 - DNA, 25 bp, Homo sapien
ggatcacttgagctgcagtgagcta

SEQ ID NO: 5662587 - DNA, 25 bp, Homo sapien
ttcatatctctaaatgtgcggcatt

SEQ ID NO: 5662588 - DNA, 25 bp, Homo sapien
gtgcggcatttgcatgcgcagaatg

SEQ ID NO: 5662589 - DNA, 25 bp, Homo sapien
aatgtgcggcatttgcatgcgcaga

SEQ ID NO: 5662590 - DNA, 25 bp, Homo sapien
taacatttttcttgcattccgacct

SEQ ID NO: 5662591 - DNA, 25 bp, Homo sapien
tagagtaactcttagctataacatt

SEQ ID NO: 5662592 - DNA, 25 bp, Homo sapien
gcattccgaccttcatatctctaaa

SEQ ID NO: 5662593 - DNA, 25 bp, Homo sapien
gaaaaatgttatagctaagagttac

SEQ ID NO: 5662594 - DNA, 25 bp, Homo sapien
cattctgcgcatgcaaatgccgcac

SEQ ID NO: 5662595 - DNA, 25 bp, Homo sapien
ggtcggaatgcaagaaaaatgttat

SEQ ID NO: 5662596 - DNA, 25 bp, Homo sapien
ttatagctaagagttactctaatgg

SEQ ID NO: 5662597 - DNA, 25 bp, Homo sapien
aatgccgcacatttagagatatgaa

SEQ ID NO: 5662598 - DNA, 25 bp, Homo sapien
tttagagatatgaaggtcggaatgc

SEQ ID NO: 5662599 - DNA, 25 bp, Homo sapien
ggttctgaaacctcgtctctgctaa

SEQ ID NO: 5662600 - DNA, 25 bp, Homo sapien
aaccgggcctggtggccggcgcctg

SEQ ID NO: 5662601 - DNA, 25 bp, Homo sapien
tgtggttctgaaacctcgtctctgc

SEQ ID NO: 5662602 - DNA, 25 bp, Homo sapien
gtggttctgaaacctcgtctctgct

SEQ ID NO: 5662603 - DNA, 25 bp, Homo sapien
tggttctgaaacctcgtctctgcta

SEQ ID NO: 5662604 - DNA, 25 bp, Homo sapien
gttctgaaacctcgtctctgctaaa

SEQ ID NO: 5662605 - DNA, 25 bp, Homo sapien
ttagcagagacgaggtttcagaacc

SEQ ID NO: 5662606 - DNA, 25 bp, Homo sapien
tttagcagagacgaggtttcagaac

SEQ ID NO: 5662607 - DNA, 25 bp, Homo sapien
tagcagagacgaggtttcagaacca

SEQ ID NO: 5662608 - DNA, 25 bp, Homo sapien
gcagagacgaggtttcagaaccaca

SEQ ID NO: 5662609 - DNA, 25 bp, Homo sapien
caggcgccggccaccaggcccggtt

SEQ ID NO: 5662610 - DNA, 25 bp, Homo sapien
agcagagacgaggtttcagaaccac

SEQ ID NO: 5662611 - DNA, 25 bp, Homo sapien
gaaggcaaccggaattgagaaagaa

SEQ ID NO: 5662612 - DNA, 25 bp, Homo sapien
tctgaggaattttgaactacgtata

SEQ ID NO: 5662613 - DNA, 25 bp, Homo sapien
cccagccgaaggcaaccggaattga

SEQ ID NO: 5662614 - DNA, 25 bp, Homo sapien
catctcggggttcgtttctccttca

SEQ ID NO: 5662615 - DNA, 25 bp, Homo sapien
ttcacttaccttcagaggcccagcc

SEQ ID NO: 5662616 - DNA, 25 bp, Homo sapien
cagccgaaggcaaccggaattgaga

SEQ ID NO: 5662617 - DNA, 25 bp, Homo sapien
tatacgtagttcaaaattcctcaga

SEQ ID NO: 5662618 - DNA, 25 bp, Homo sapien
tctttctcaattccggttgccttcg

SEQ ID NO: 5662619 - DNA, 25 bp, Homo sapien
ggctgggcctctgaaggtaagtgaa

SEQ ID NO: 5662620 - DNA, 25 bp, Homo sapien
tctcaattccggttgccttcggctg

SEQ ID NO: 5662621 - DNA, 25 bp, Homo sapien
tcaattccggttgccttcggctggg

SEQ ID NO: 5662622 - DNA, 25 bp, Homo sapien
tgaaggagaaacgaaccccgagatg

SEQ ID NO: 5662623 - DNA, 25 bp, Homo sapien
tttctgagcgttccttgtagaaatt

SEQ ID NO: 5662624 - DNA, 25 bp, Homo sapien
tcttgtggacttgtgatgattctaa

SEQ ID NO: 5662625 - DNA, 25 bp, Homo sapien
gcctccttcttgtggacttgtgatg

SEQ ID NO: 5662626 - DNA, 25 bp, Homo sapien
ttcatcgttattttctgagcgttcc

SEQ ID NO: 5662627 - DNA, 25 bp, Homo sapien
tagtggcttatagtatgtcaggtca

SEQ ID NO: 5662628 - DNA, 25 bp, Homo sapien
gtatgtcaggtcacttcatcgttat

SEQ ID NO: 5662629 - DNA, 25 bp, Homo sapien
ttagaatcatcacaagtccacaaga

SEQ ID NO: 5662630 - DNA, 25 bp, Homo sapien
aatttctacaaggaacgctcagaaa

SEQ ID NO: 5662631 - DNA, 25 bp, Homo sapien
catcacaagtccacaagaaggaggc

SEQ ID NO: 5662632 - DNA, 25 bp, Homo sapien
gacctgacatactataagccactat

SEQ ID NO: 5662633 - DNA, 25 bp, Homo sapien
gaaaataacgatgaagtgacctgac

SEQ ID NO: 5662634 - DNA, 25 bp, Homo sapien
ggaacgctcagaaaataacgatgaa

SEQ ID NO: 5662635 - DNA, 25 bp, Homo sapien
cctgggtcagtcaccggagtcttgt

SEQ ID NO: 5662636 - DNA, 25 bp, Homo sapien
gagtgacatgaacgcgcctgcactt

SEQ ID NO: 5662637 - DNA, 25 bp, Homo sapien
tgggagtgacatgaacgcgcctgca

SEQ ID NO: 5662638 - DNA, 25 bp, Homo sapien
tcaccggagtcttgttgggtggaaa

SEQ ID NO: 5662639 - DNA, 25 bp, Homo sapien
aaagacttgagtggtgggcacagtt

SEQ ID NO: 5662640 - DNA, 25 bp, Homo sapien
gtcagtcaccggagtcttgttgggt

SEQ ID NO: 5662641 - DNA, 25 bp, Homo sapien
tttccacccaacaagactccggtga

SEQ ID NO: 5662642 - DNA, 25 bp, Homo sapien
aactgtgcccaccactcaagtcttt

SEQ ID NO: 5662643 - DNA, 25 bp, Homo sapien
aagtgcaggcgcgttcatgtcactc

SEQ ID NO: 5662644 - DNA, 25 bp, Homo sapien
acaagactccggtgactgacccagg

SEQ ID NO: 5662645 - DNA, 25 bp, Homo sapien
gtgcaggcgcgttcatgtcactccc

SEQ ID NO: 5662646 - DNA, 25 bp, Homo sapien
acccaacaagactccggtgactgac

SEQ ID NO: 5662647 - DNA, 25 bp, Homo sapien
gtgagccgggattgcgccgctgcgc

SEQ ID NO: 5662648 - DNA, 25 bp, Homo sapien
agccgggattgcgccgctgcgctcc

SEQ ID NO: 5662649 - DNA, 25 bp, Homo sapien
gccgggattgcgccgctgcgctcca

SEQ ID NO: 5662650 - DNA, 25 bp, Homo sapien
ccgggattgcgccgctgcgctccag

SEQ ID NO: 5662651 - DNA, 25 bp, Homo sapien
gcctggggaaagagcgagactgtct

SEQ ID NO: 5662652 - DNA, 25 bp, Homo sapien
tgagccgggattgcgccgctgcgct

SEQ ID NO: 5662653 - DNA, 25 bp, Homo sapien
tggagcgcagcggcgcaatcccggc

SEQ ID NO: 5662654 - DNA, 25 bp, Homo sapien
tgagacagtctcgctctttccccag

SEQ ID NO: 5662655 - DNA, 25 bp, Homo sapien
agacagtctcgctctttccccaggc

SEQ ID NO: 5662656 - DNA, 25 bp, Homo sapien
ggagcgcagcggcgcaatcccggct

SEQ ID NO: 5662657 - DNA, 25 bp, Homo sapien
ctggagcgcagcggcgcaatcccgg

SEQ ID NO: 5662658 - DNA, 25 bp, Homo sapien
gagacagtctcgctctttccccagg

SEQ ID NO: 5662659 - DNA, 25 bp, Homo sapien
ggctttaaaatggaatgaagcggcc

SEQ ID NO: 5662660 - DNA, 25 bp, Homo sapien
aaatggaatgaagcggccgggtgcg

SEQ ID NO: 5662661 - DNA, 25 bp, Homo sapien
taaaatggaatgaagcggccgggtg

SEQ ID NO: 5662662 - DNA, 25 bp, Homo sapien
gctttaaaatggaatgaagcggccg

SEQ ID NO: 5662663 - DNA, 25 bp, Homo sapien
ctttaaaatggaatgaagcggccgg

SEQ ID NO: 5662664 - DNA, 25 bp, Homo sapien
aaaatggaatgaagcggccgggtgc

SEQ ID NO: 5662665 - DNA, 25 bp, Homo sapien
cacccggccgcttcattccatttta

SEQ ID NO: 5662666 - DNA, 25 bp, Homo sapien
ggccgcttcattccattttaaagcc

SEQ ID NO: 5662667 - DNA, 25 bp, Homo sapien
cggccgcttcattccattttaaagc

SEQ ID NO: 5662668 - DNA, 25 bp, Homo sapien
ccggccgcttcattccattttaaag

SEQ ID NO: 5662669 - DNA, 25 bp, Homo sapien
cgcacccggccgcttcattccattt

SEQ ID NO: 5662670 - DNA, 25 bp, Homo sapien
gcacccggccgcttcattccatttt

SEQ ID NO: 5662671 - DNA, 25 bp, Homo sapien
gctgaggaggaggctgggtgcggtg

SEQ ID NO: 5662672 - DNA, 25 bp, Homo sapien
caccgcacccagcctcctcctcagc

SEQ ID NO: 5662673 - DNA, 25 bp, Homo sapien
gagtgcttgtctggcccactgactc

SEQ ID NO: 5662674 - DNA, 25 bp, Homo sapien
tcatcaactataaggtgcgtctcag

SEQ ID NO: 5662675 - DNA, 25 bp, Homo sapien
caactataaggtgcgtctcaggcgc

SEQ ID NO: 5662676 - DNA, 25 bp, Homo sapien
tgtgtggagtgcttgtctggcccac

SEQ ID NO: 5662677 - DNA, 25 bp, Homo sapien
aaggtgcgtctcaggcgcagtagca

SEQ ID NO: 5662678 - DNA, 25 bp, Homo sapien
cgcagtagcatggaattgtgtgtgg

SEQ ID NO: 5662679 - DNA, 25 bp, Homo sapien
ccaagaacaacgtcgtcatcaacta

SEQ ID NO: 5662680 - DNA, 25 bp, Homo sapien
cagccaagaacaacgtcgtcatcaa

SEQ ID NO: 5662681 - DNA, 25 bp, Homo sapien
gaacaacgtcgtcatcaactataag

SEQ ID NO: 5662682 - DNA, 25 bp, Homo sapien
gccaagaacaacgtcgtcatcaact

SEQ ID NO: 5662683 - DNA, 25 bp, Homo sapien
caagaacaacgtcgtcatcaactat

SEQ ID NO: 5662684 - DNA, 25 bp, Homo sapien
agccaagaacaacgtcgtcatcaac

SEQ ID NO: 5662685 - DNA, 25 bp, Homo sapien
gttgatgacgacgttgttcttggct

SEQ ID NO: 5662686 - DNA, 25 bp, Homo sapien
agttgatgacgacgttgttcttggc

SEQ ID NO: 5662687 - DNA, 25 bp, Homo sapien
tagttgatgacgacgttgttcttgg

SEQ ID NO: 5662688 - DNA, 25 bp, Homo sapien
ttgatgacgacgttgttcttggctg

SEQ ID NO: 5662689 - DNA, 25 bp, Homo sapien
cttatagttgatgacgacgttgttc

SEQ ID NO: 5662690 - DNA, 25 bp, Homo sapien
tatagttgatgacgacgttgttctt

SEQ ID NO: 5662691 - DNA, 25 bp, Homo sapien
cgcctgagacgcaccttatagttga

SEQ ID NO: 5662692 - DNA, 25 bp, Homo sapien
gtgggccagacaagcactccacaca

SEQ ID NO: 5662693 - DNA, 25 bp, Homo sapien
ctgagacgcaccttatagttgatga

SEQ ID NO: 5662694 - DNA, 25 bp, Homo sapien
tgctactgcgcctgagacgcacctt

SEQ ID NO: 5662695 - DNA, 25 bp, Homo sapien
gagtcagtgggccagacaagcactc

SEQ ID NO: 5662696 - DNA, 25 bp, Homo sapien
cacacaattccatgctactgcgcct

SEQ ID NO: 5662697 - DNA, 25 bp, Homo sapien
gatcgacttgactctgctcaacagg

SEQ ID NO: 5662698 - DNA, 25 bp, Homo sapien
tgactctgctcaacaggctgctgcg

SEQ ID NO: 5662699 - DNA, 25 bp, Homo sapien
gaccacaacatagccgactacatga

SEQ ID NO: 5662700 - DNA, 25 bp, Homo sapien
gagaagatcgacttgactctgctca

SEQ ID NO: 5662701 - DNA, 25 bp, Homo sapien
tcatcgtggaccacaacatagccga

SEQ ID NO: 5662702 - DNA, 25 bp, Homo sapien
ctggaatcccgctttgagaagatgt

SEQ ID NO: 5662703 - DNA, 25 bp, Homo sapien
tcggctatgttgtggtccacgatga

SEQ ID NO: 5662704 - DNA, 25 bp, Homo sapien
tgagcagagtcaagtcgatcttctc

SEQ ID NO: 5662705 - DNA, 25 bp, Homo sapien
acatcttctcaaagcgggattccag

SEQ ID NO: 5662706 - DNA, 25 bp, Homo sapien
cctgttgagcagagtcaagtcgatc

SEQ ID NO: 5662707 - DNA, 25 bp, Homo sapien
catgtagtcggctatgttgtggtcc

SEQ ID NO: 5662708 - DNA, 25 bp, Homo sapien
cgcagcagcctgttgagcagagtca

SEQ ID NO: 5662709 - DNA, 25 bp, Homo sapien
gaggaaaagcccatagtcaaagcaa

SEQ ID NO: 5662710 - DNA, 25 bp, Homo sapien
agtagtgttcgtgttaaactgagga

SEQ ID NO: 5662711 - DNA, 25 bp, Homo sapien
agtcaaagcaatccaaatgaatacg

SEQ ID NO: 5662712 - DNA, 25 bp, Homo sapien
tcttgatgcgtggtagtaaagggaa

SEQ ID NO: 5662713 - DNA, 25 bp, Homo sapien
ttaaactgaggaaaagcccatagtc

SEQ ID NO: 5662714 - DNA, 25 bp, Homo sapien
tactctcttgatgcgtggtagtaaa

SEQ ID NO: 5662715 - DNA, 25 bp, Homo sapien
tccctttactaccacgcatcaagag

SEQ ID NO: 5662716 - DNA, 25 bp, Homo sapien
gactatgggcttttcctcagtttaa

SEQ ID NO: 5662717 - DNA, 25 bp, Homo sapien
cgtattcatttggattgctttgact

SEQ ID NO: 5662718 - DNA, 25 bp, Homo sapien
tgctttgactatgggcttttcctca

SEQ ID NO: 5662719 - DNA, 25 bp, Homo sapien
tactaccacgcatcaagagagtaaa

SEQ ID NO: 5662720 - DNA, 25 bp, Homo sapien
tcctcagtttaacacgaacactact

SEQ ID NO: 5662721 - DNA, 25 bp, Homo sapien
gggcaggaatttagttctacgtcaa

SEQ ID NO: 5662722 - DNA, 25 bp, Homo sapien
caagtggtgtcaaggtagaactttc

SEQ ID NO: 5662723 - DNA, 25 bp, Homo sapien
gaactttcatgagatcgccctgtga

SEQ ID NO: 5662724 - DNA, 25 bp, Homo sapien
catgagatcgccctgtgaggaacgg

SEQ ID NO: 5662725 - DNA, 25 bp, Homo sapien
ggtagaactttcatgagatcgccct

SEQ ID NO: 5662726 - DNA, 25 bp, Homo sapien
tagttctacgtcaaaaatctcatct

SEQ ID NO: 5662727 - DNA, 25 bp, Homo sapien
ccgttcctcacagggcgatctcatg

SEQ ID NO: 5662728 - DNA, 25 bp, Homo sapien
cagggcgatctcatgaaagttctac

SEQ ID NO: 5662729 - DNA, 25 bp, Homo sapien
gaaagttctaccttgacaccacttg

SEQ ID NO: 5662730 - DNA, 25 bp, Homo sapien
gatgagatttttgacgtagaactaa

SEQ ID NO: 5662731 - DNA, 25 bp, Homo sapien
tcctcacagggcgatctcatgaaag

SEQ ID NO: 5662732 - DNA, 25 bp, Homo sapien
ttgacgtagaactaaattcctgccc

SEQ ID NO: 5662733 - DNA, 25 bp, Homo sapien
tggttctaccaaaggtagcagttgc

SEQ ID NO: 5662734 - DNA, 25 bp, Homo sapien
caaaggtagcagttgcctttggttc

SEQ ID NO: 5662735 - DNA, 25 bp, Homo sapien
tctaccaaaggtagcagttgccttt

SEQ ID NO: 5662736 - DNA, 25 bp, Homo sapien
gttctaccaaaggtagcagttgcct

SEQ ID NO: 5662737 - DNA, 25 bp, Homo sapien
aaaggtagcagttgcctttggttct

SEQ ID NO: 5662738 - DNA, 25 bp, Homo sapien
taccaaaggtagcagttgcctttgg

SEQ ID NO: 5662739 - DNA, 25 bp, Homo sapien
tcctcacacagagagccttcaaaga

SEQ ID NO: 5662740 - DNA, 25 bp, Homo sapien
cctcacacagagagccttcaaagag

SEQ ID NO: 5662741 - DNA, 25 bp, Homo sapien
ctctttgaaggctctctgtgtgagg

SEQ ID NO: 5662742 - DNA, 25 bp, Homo sapien
tctttgaaggctctctgtgtgagga

SEQ ID NO: 5662743 - DNA, 25 bp, Homo sapien
ggcaactgctacctttggtagaacc

SEQ ID NO: 5662744 - DNA, 25 bp, Homo sapien
caaaggcaactgctacctttggtag

SEQ ID NO: 5662745 - DNA, 25 bp, Homo sapien
aaggcaactgctacctttggtagaa

SEQ ID NO: 5662746 - DNA, 25 bp, Homo sapien
agaaccaaaggcaactgctaccttt

SEQ ID NO: 5662747 - DNA, 25 bp, Homo sapien
caactgctacctttggtagaaccaa

SEQ ID NO: 5662748 - DNA, 25 bp, Homo sapien
gaaccaaaggcaactgctacctttg

SEQ ID NO: 5662749 - DNA, 25 bp, Homo sapien
tgacagcagggaatggcgtcatcct

SEQ ID NO: 5662750 - DNA, 25 bp, Homo sapien
acagcagggaatggcgtcatcctca

SEQ ID NO: 5662751 - DNA, 25 bp, Homo sapien
gggaatggcgtcatcctcagagtcc

SEQ ID NO: 5662752 - DNA, 25 bp, Homo sapien
aaggtgtagccccagtctttcctgg

SEQ ID NO: 5662753 - DNA, 25 bp, Homo sapien
cagggaatggcgtcatcctcagagt

SEQ ID NO: 5662754 - DNA, 25 bp, Homo sapien
gcagggaatggcgtcatcctcagag

SEQ ID NO: 5662755 - DNA, 25 bp, Homo sapien
ccaggaaagactggggctacacctt

SEQ ID NO: 5662756 - DNA, 25 bp, Homo sapien
tgaggatgacgccattccctgctgt

SEQ ID NO: 5662757 - DNA, 25 bp, Homo sapien
ggatgacgccattccctgctgtcac

SEQ ID NO: 5662758 - DNA, 25 bp, Homo sapien
gactctgaggatgacgccattccct

SEQ ID NO: 5662759 - DNA, 25 bp, Homo sapien
ggactctgaggatgacgccattccc

SEQ ID NO: 5662760 - DNA, 25 bp, Homo sapien
ctctgaggatgacgccattccctgc

SEQ ID NO: 5662761 - DNA, 25 bp, Homo sapien
tgtagagttgtgactgaaccttgtt

SEQ ID NO: 5662762 - DNA, 25 bp, Homo sapien
tgggcaagagggaggactgtagagt

SEQ ID NO: 5662763 - DNA, 25 bp, Homo sapien
gaggactgtagagttgtgactgaac

SEQ ID NO: 5662764 - DNA, 25 bp, Homo sapien
aggactgtagagttgtgactgaacc

SEQ ID NO: 5662765 - DNA, 25 bp, Homo sapien
aaggttgggcagagtaggctgggct

SEQ ID NO: 5662766 - DNA, 25 bp, Homo sapien
actgtagagttgtgactgaaccttg

SEQ ID NO: 5662767 - DNA, 25 bp, Homo sapien
aacaaggttcagtcacaactctaca

SEQ ID NO: 5662768 - DNA, 25 bp, Homo sapien
agcccagcctactctgcccaacctt

SEQ ID NO: 5662769 - DNA, 25 bp, Homo sapien
actctacagtcctccctcttgccca

SEQ ID NO: 5662770 - DNA, 25 bp, Homo sapien
ggttcagtcacaactctacagtcct

SEQ ID NO: 5662771 - DNA, 25 bp, Homo sapien
acaaggttcagtcacaactctacag

SEQ ID NO: 5662772 - DNA, 25 bp, Homo sapien
caaggttcagtcacaactctacagt

SEQ ID NO: 5662773 - DNA, 25 bp, Homo sapien
ttagggggctatctggctccaatct

SEQ ID NO: 5662774 - DNA, 25 bp, Homo sapien
tagggggctatctggctccaatctc

SEQ ID NO: 5662775 - DNA, 25 bp, Homo sapien
attagggggctatctggctccaatc

SEQ ID NO: 5662776 - DNA, 25 bp, Homo sapien
cgggaatcattagggggctatctgg

SEQ ID NO: 5662777 - DNA, 25 bp, Homo sapien
gggaatcattagggggctatctggc

SEQ ID NO: 5662778 - DNA, 25 bp, Homo sapien
gagattggagccagatagcccccta

SEQ ID NO: 5662779 - DNA, 25 bp, Homo sapien
agattggagccagatagccccctaa

SEQ ID NO: 5662780 - DNA, 25 bp, Homo sapien
gccagatagccccctaatgattccc

SEQ ID NO: 5662781 - DNA, 25 bp, Homo sapien
gattggagccagatagccccctaat

SEQ ID NO: 5662782 - DNA, 25 bp, Homo sapien
ccagatagccccctaatgattcccg

SEQ ID NO: 5662783 - DNA, 25 bp, Homo sapien
gggctatctggctccaatctctttt

SEQ ID NO: 5662784 - DNA, 25 bp, Homo sapien
tttagacagggaaaagaagcaccat

SEQ ID NO: 5662785 - DNA, 25 bp, Homo sapien
ggaaaagaagcaccatgttgcttag

SEQ ID NO: 5662786 - DNA, 25 bp, Homo sapien
attagggggctatctggctccaatc

SEQ ID NO: 5662787 - DNA, 25 bp, Homo sapien
tggctccaatctcttttcttttccc

SEQ ID NO: 5662788 - DNA, 25 bp, Homo sapien
acagggaaaagaagcaccatgttgc

SEQ ID NO: 5662789 - DNA, 25 bp, Homo sapien
gggaaaagaaaagagattggagcca

SEQ ID NO: 5662790 - DNA, 25 bp, Homo sapien
aaagagattggagccagatagcccc

SEQ ID NO: 5662791 - DNA, 25 bp, Homo sapien
gcaacatggtgcttcttttccctgt

SEQ ID NO: 5662792 - DNA, 25 bp, Homo sapien
tggtgcttcttttccctgtctaaaa

SEQ ID NO: 5662793 - DNA, 25 bp, Homo sapien
ctaagcaacatggtgcttcttttcc

SEQ ID NO: 5662794 - DNA, 25 bp, Homo sapien
gattggagccagatagccccctaat

SEQ ID NO: 5662795 - DNA, 25 bp, Homo sapien
tccttggaggcgtaaacatccgtct

SEQ ID NO: 5662796 - DNA, 25 bp, Homo sapien
cttggaggcgtaaacatccgtcttt

SEQ ID NO: 5662797 - DNA, 25 bp, Homo sapien
tatttccttggaggcgtaaacatcc

SEQ ID NO: 5662798 - DNA, 25 bp, Homo sapien
tggaggcgtaaacatccgtctttag

SEQ ID NO: 5662799 - DNA, 25 bp, Homo sapien
ttccttggaggcgtaaacatccgtc

SEQ ID NO: 5662800 - DNA, 25 bp, Homo sapien
ccttggaggcgtaaacatccgtctt

SEQ ID NO: 5662801 - DNA, 25 bp, Homo sapien
ctggcgctgctggaaagccaacatt

SEQ ID NO: 5662802 - DNA, 25 bp, Homo sapien
aatgttggctttccagcagcgccag

SEQ ID NO: 5662803 - DNA, 25 bp, Homo sapien
gacggatgtttacgcctccaaggaa

SEQ ID NO: 5662804 - DNA, 25 bp, Homo sapien
ggatgtttacgcctccaaggaaata

SEQ ID NO: 5662805 - DNA, 25 bp, Homo sapien
ctaaagacggatgtttacgcctcca

SEQ ID NO: 5662806 - DNA, 25 bp, Homo sapien
gatgtttacgcctccaaggaaataa

SEQ ID NO: 5662807 - DNA, 25 bp, Homo sapien
taaagacggatgtttacgcctccaa

SEQ ID NO: 5662808 - DNA, 25 bp, Homo sapien
aagacggatgtttacgcctccaagg

SEQ ID NO: 5662809 - DNA, 25 bp, Homo sapien
gggccttgagaggcagtcatgcatt

SEQ ID NO: 5662810 - DNA, 25 bp, Homo sapien
ttcctcagaagcatagttgtgaatg

SEQ ID NO: 5662811 - DNA, 25 bp, Homo sapien
ggaaattcctcagaagcatagttgt

SEQ ID NO: 5662812 - DNA, 25 bp, Homo sapien
gaaattcctcagaagcatagttgtg

SEQ ID NO: 5662813 - DNA, 25 bp, Homo sapien
cctcagaagcatagttgtgaatgtt

SEQ ID NO: 5662814 - DNA, 25 bp, Homo sapien
aattcctcagaagcatagttgtgaa

SEQ ID NO: 5662815 - DNA, 25 bp, Homo sapien
aacattcacaactatgcttctgagg

SEQ ID NO: 5662816 - DNA, 25 bp, Homo sapien
aatgcatgactgcctctcaaggccc

SEQ ID NO: 5662817 - DNA, 25 bp, Homo sapien
cacaactatgcttctgaggaatttc

SEQ ID NO: 5662818 - DNA, 25 bp, Homo sapien
ttcacaactatgcttctgaggaatt

SEQ ID NO: 5662819 - DNA, 25 bp, Homo sapien
cattcacaactatgcttctgaggaa

SEQ ID NO: 5662820 - DNA, 25 bp, Homo sapien
acaactatgcttctgaggaatttcc

SEQ ID NO: 5662821 - DNA, 25 bp, Homo sapien
tcctactggattgcctttaggtcca

SEQ ID NO: 5662822 - DNA, 25 bp, Homo sapien
gctcttgtatgagcactcttcctac

SEQ ID NO: 5662823 - DNA, 25 bp, Homo sapien
tggattgcctttaggtccagttctg

SEQ ID NO: 5662824 - DNA, 25 bp, Homo sapien
gcctttaggtccagttctgaaatga

SEQ ID NO: 5662825 - DNA, 25 bp, Homo sapien
tgcccctgtttgagtctgttccctg

SEQ ID NO: 5662826 - DNA, 25 bp, Homo sapien
tccctgctcttgtatgagcactctt

SEQ ID NO: 5662827 - DNA, 25 bp, Homo sapien
agtaggaagagtgctcatacaagag

SEQ ID NO: 5662828 - DNA, 25 bp, Homo sapien
cagaactggacctaaaggcaatcca

SEQ ID NO: 5662829 - DNA, 25 bp, Homo sapien
cagggaacagactcaaacaggggca

SEQ ID NO: 5662830 - DNA, 25 bp, Homo sapien
tcatttcagaactggacctaaaggc

SEQ ID NO: 5662831 - DNA, 25 bp, Homo sapien
gaagagtgctcatacaagagcaggg

SEQ ID NO: 5662832 - DNA, 25 bp, Homo sapien
gacctaaaggcaatccagtaggaag

SEQ ID NO: 5662833 - DNA, 25 bp, Homo sapien
tggttttctctgtgtccaacttctc

SEQ ID NO: 5662834 - DNA, 25 bp, Homo sapien
ggcattacccctttattagagcgat

SEQ ID NO: 5662835 - DNA, 25 bp, Homo sapien
gagcgatggcttggcaacctcctgg

SEQ ID NO: 5662836 - DNA, 25 bp, Homo sapien
ttagagcgatggcttggcaacctcc

SEQ ID NO: 5662837 - DNA, 25 bp, Homo sapien
attacccctttattagagcgatggc

SEQ ID NO: 5662838 - DNA, 25 bp, Homo sapien
ccctttattagagcgatggcttggc

SEQ ID NO: 5662839 - DNA, 25 bp, Homo sapien
ttattagagcgatggcttggcaacc

SEQ ID NO: 5662840 - DNA, 25 bp, Homo sapien
ggaggttgccaagccatcgctctaa

SEQ ID NO: 5662841 - DNA, 25 bp, Homo sapien
ccaggaggttgccaagccatcgctc

SEQ ID NO: 5662842 - DNA, 25 bp, Homo sapien
ttgccaagccatcgctctaataaag

SEQ ID NO: 5662843 - DNA, 25 bp, Homo sapien
aggaggttgccaagccatcgctcta

SEQ ID NO: 5662844 - DNA, 25 bp, Homo sapien
ggttgccaagccatcgctctaataa

SEQ ID NO: 5662845 - DNA, 25 bp, Homo sapien
gccaagccatcgctctaataaaggg

SEQ ID NO: 5662846 - DNA, 25 bp, Homo sapien
gagaagttggacacagagaaaacca

SEQ ID NO: 5662847 - DNA, 25 bp, Homo sapien
cagtttgaaggtgagtggttttctc

SEQ ID NO: 5662848 - DNA, 25 bp, Homo sapien
ggcattacccctttattagagcgat

SEQ ID NO: 5662849 - DNA, 25 bp, Homo sapien
tgtgtccaacttctcctgttattgc

SEQ ID NO: 5662850 - DNA, 25 bp, Homo sapien
tggttttctctgtgtccaacttctc

SEQ ID NO: 5662851 - DNA, 25 bp, Homo sapien
ttttctctgtgtccaacttctcctg

SEQ ID NO: 5662852 - DNA, 25 bp, Homo sapien
ttagagcgatggcttggcaacctcc

SEQ ID NO: 5662853 - DNA, 25 bp, Homo sapien
ggaggttgccaagccatcgctctaa

SEQ ID NO: 5662854 - DNA, 25 bp, Homo sapien
gagaaaaccactcaccttcaaactg

SEQ ID NO: 5662855 - DNA, 25 bp, Homo sapien
caataacaggagaagttggacacag

SEQ ID NO: 5662856 - DNA, 25 bp, Homo sapien
caggagaagttggacacagagaaaa

SEQ ID NO: 5662857 - DNA, 25 bp, Homo sapien
aagcaataacaggagaagttggaca

SEQ ID NO: 5662858 - DNA, 25 bp, Homo sapien
gagaagttggacacagagaaaacca

SEQ ID NO: 5662859 - DNA, 25 bp, Homo sapien
gccatacctacattcctctgtatgt

SEQ ID NO: 5662860 - DNA, 25 bp, Homo sapien
ctgccatacctacattcctctgtat

SEQ ID NO: 5662861 - DNA, 25 bp, Homo sapien
ccatacctacattcctctgtatgta

SEQ ID NO: 5662862 - DNA, 25 bp, Homo sapien
cctacattcctctgtatgtatatta

SEQ ID NO: 5662863 - DNA, 25 bp, Homo sapien
tacctacattcctctgtatgtatat

SEQ ID NO: 5662864 - DNA, 25 bp, Homo sapien
tgccatacctacattcctctgtatg

SEQ ID NO: 5662865 - DNA, 25 bp, Homo sapien
tatacatacagaggaatgtaggtat

SEQ ID NO: 5662866 - DNA, 25 bp, Homo sapien
tacatacagaggaatgtaggtatgg

SEQ ID NO: 5662867 - DNA, 25 bp, Homo sapien
acatacagaggaatgtaggtatggc

SEQ ID NO: 5662868 - DNA, 25 bp, Homo sapien
catacagaggaatgtaggtatggca

SEQ ID NO: 5662869 - DNA, 25 bp, Homo sapien
atacagaggaatgtaggtatggcag

SEQ ID NO: 5662870 - DNA, 25 bp, Homo sapien
taatatacatacagaggaatgtagg

SEQ ID NO: 5662871 - DNA, 25 bp, Homo sapien
gccatacctacattcctctgtatgt

SEQ ID NO: 5662872 - DNA, 25 bp, Homo sapien
ttatacatatatgccccacctctgc

SEQ ID NO: 5662873 - DNA, 25 bp, Homo sapien
ttctttttacccctctactgccata

SEQ ID NO: 5662874 - DNA, 25 bp, Homo sapien
tactgccatacctacattcctctgt

SEQ ID NO: 5662875 - DNA, 25 bp, Homo sapien
cacctctgcccaggtttctattgtt

SEQ ID NO: 5662876 - DNA, 25 bp, Homo sapien
cctacattcctctgtatgtatatta

SEQ ID NO: 5662877 - DNA, 25 bp, Homo sapien
gcagaggtggggcatatatgtataa

SEQ ID NO: 5662878 - DNA, 25 bp, Homo sapien
aacaatagaaacctgggcagaggtg

SEQ ID NO: 5662879 - DNA, 25 bp, Homo sapien
tacatacagaggaatgtaggtatgg

SEQ ID NO: 5662880 - DNA, 25 bp, Homo sapien
catacagaggaatgtaggtatggca

SEQ ID NO: 5662881 - DNA, 25 bp, Homo sapien
tatggcagtagaggggtaaaaagaa

SEQ ID NO: 5662882 - DNA, 25 bp, Homo sapien
taatatacatacagaggaatgtagg

SEQ ID NO: 5662883 - DNA, 25 bp, Homo sapien
cttactcttgtctcttgggctggtg

SEQ ID NO: 5662884 - DNA, 25 bp, Homo sapien
cagagtcttactcttgtctcttggg

SEQ ID NO: 5662885 - DNA, 25 bp, Homo sapien
agtcttactcttgtctcttgggctg

SEQ ID NO: 5662886 - DNA, 25 bp, Homo sapien
tcttactcttgtctcttgggctggt

SEQ ID NO: 5662887 - DNA, 25 bp, Homo sapien
gtcttactcttgtctcttgggctgg

SEQ ID NO: 5662888 - DNA, 25 bp, Homo sapien
gagtcttactcttgtctcttgggct

SEQ ID NO: 5662889 - DNA, 25 bp, Homo sapien
caccagcccaagagacaagagtaag

SEQ ID NO: 5662890 - DNA, 25 bp, Homo sapien
cccaagagacaagagtaagactctg

SEQ ID NO: 5662891 - DNA, 25 bp, Homo sapien
cagcccaagagacaagagtaagact

SEQ ID NO: 5662892 - DNA, 25 bp, Homo sapien
accagcccaagagacaagagtaaga

SEQ ID NO: 5662893 - DNA, 25 bp, Homo sapien
ccagcccaagagacaagagtaagac

SEQ ID NO: 5662894 - DNA, 25 bp, Homo sapien
gcccaagagacaagagtaagactct

SEQ ID NO: 5662895 - DNA, 25 bp, Homo sapien
aatacaagctgatgcgacagattcg

SEQ ID NO: 5662896 - DNA, 25 bp, Homo sapien
cgacagattcgcatgtgcaaggacc

SEQ ID NO: 5662897 - DNA, 25 bp, Homo sapien
cgatacaaatacaagctgatgcgac

SEQ ID NO: 5662898 - DNA, 25 bp, Homo sapien
gacgggcatgtatcgatacaaatac

SEQ ID NO: 5662899 - DNA, 25 bp, Homo sapien
gacctgaagcatctcatctattatc

SEQ ID NO: 5662900 - DNA, 25 bp, Homo sapien
tctcatctattatcgtttcaacacg

SEQ ID NO: 5662901 - DNA, 25 bp, Homo sapien
gataatagatgagatgcttcaggtc

SEQ ID NO: 5662902 - DNA, 25 bp, Homo sapien
gtcgcatcagcttgtatttgtatcg

SEQ ID NO: 5662903 - DNA, 25 bp, Homo sapien
cgtgttgaaacgataatagatgaga

SEQ ID NO: 5662904 - DNA, 25 bp, Homo sapien
ggtccttgcacatgcgaatctgtcg

SEQ ID NO: 5662905 - DNA, 25 bp, Homo sapien
tatttgtatcgatacatgcccgtca

SEQ ID NO: 5662906 - DNA, 25 bp, Homo sapien
gcgaatctgtcgcatcagcttgtat

SEQ ID NO: 5662907 - DNA, 25 bp, Homo sapien
gctgggcaatgtggatgccttccag

SEQ ID NO: 5662908 - DNA, 25 bp, Homo sapien
tagtcacgtgcagtatcggctgggc

SEQ ID NO: 5662909 - DNA, 25 bp, Homo sapien
tcggctgggcaatgtggatgccttc

SEQ ID NO: 5662910 - DNA, 25 bp, Homo sapien
tatcggctgggcaatgtggatgcct

SEQ ID NO: 5662911 - DNA, 25 bp, Homo sapien
atagtcacgtgcagtatcggctggg

SEQ ID NO: 5662912 - DNA, 25 bp, Homo sapien
ggctgggcaatgtggatgccttcca

SEQ ID NO: 5662913 - DNA, 25 bp, Homo sapien
aaggcatccacattgcccagccgat

SEQ ID NO: 5662914 - DNA, 25 bp, Homo sapien
gcccagccgatactgcacgtgacta

SEQ ID NO: 5662915 - DNA, 25 bp, Homo sapien
aggcatccacattgcccagccgata

SEQ ID NO: 5662916 - DNA, 25 bp, Homo sapien
tggaaggcatccacattgcccagcc

SEQ ID NO: 5662917 - DNA, 25 bp, Homo sapien
cccagccgatactgcacgtgactat

SEQ ID NO: 5662918 - DNA, 25 bp, Homo sapien
ctggaaggcatccacattgcccagc

SEQ ID NO: 5662919 - DNA, 25 bp, Homo sapien
tattcccaacccctgcctgggtgag

SEQ ID NO: 5662920 - DNA, 25 bp, Homo sapien
gatgccttccaggtaaggttaggta

SEQ ID NO: 5662921 - DNA, 25 bp, Homo sapien
tagtcacgtgcagtatcggctgggc

SEQ ID NO: 5662922 - DNA, 25 bp, Homo sapien
gtgaggacgctggaggaagcctgtg

SEQ ID NO: 5662923 - DNA, 25 bp, Homo sapien
gtggatgccttccaggtaaggttag

SEQ ID NO: 5662924 - DNA, 25 bp, Homo sapien
caacccctgcctgggtgaggacgct

SEQ ID NO: 5662925 - DNA, 25 bp, Homo sapien
gcttcaaggacggacagttgttttc

SEQ ID NO: 5662926 - DNA, 25 bp, Homo sapien
ctgggcttcaaggacggacagttgt

SEQ ID NO: 5662927 - DNA, 25 bp, Homo sapien
tgggcttcaaggacggacagttgtt

SEQ ID NO: 5662928 - DNA, 25 bp, Homo sapien
gaaaacaactgtccgtccttgaagc

SEQ ID NO: 5662929 - DNA, 25 bp, Homo sapien
acaactgtccgtccttgaagcccag

SEQ ID NO: 5662930 - DNA, 25 bp, Homo sapien
aacaactgtccgtccttgaagccca

SEQ ID NO: 5662931 - DNA, 25 bp, Homo sapien
gcttcaaggacggacagttgttttc

SEQ ID NO: 5662932 - DNA, 25 bp, Homo sapien
gacagttgttttcctctggttactg

SEQ ID NO: 5662933 - DNA, 25 bp, Homo sapien
aaggtgcctgcattggaccctaggg

SEQ ID NO: 5662934 - DNA, 25 bp, Homo sapien
tcaccaccaaggtgcctgcattgga

SEQ ID NO: 5662935 - DNA, 25 bp, Homo sapien
ctctggttactgatgaaggcataca

SEQ ID NO: 5662936 - DNA, 25 bp, Homo sapien
ctgggcttcaaggacggacagttgt

SEQ ID NO: 5662937 - DNA, 25 bp, Homo sapien
gaaaacaactgtccgtccttgaagc

SEQ ID NO: 5662938 - DNA, 25 bp, Homo sapien
catcagtaaccagaggaaaacaact

SEQ ID NO: 5662939 - DNA, 25 bp, Homo sapien
acaactgtccgtccttgaagcccag

SEQ ID NO: 5662940 - DNA, 25 bp, Homo sapien
aggaggcccctagggtccaatgcag

SEQ ID NO: 5662941 - DNA, 25 bp, Homo sapien
tccaatgcaggcaccttggtggtga

SEQ ID NO: 5662942 - DNA, 25 bp, Homo sapien
tgtatgccttcatcagtaaccagag

SEQ ID NO: 5662943 - DNA, 25 bp, Homo sapien
caactaggtgggcatgtagcctttt

SEQ ID NO: 5662944 - DNA, 25 bp, Homo sapien
ctccaactaggtgggcatgtagcct

SEQ ID NO: 5662945 - DNA, 25 bp, Homo sapien
gactccaactaggtgggcatgtagc

SEQ ID NO: 5662946 - DNA, 25 bp, Homo sapien
aaaatggtagacaacccaaggcttg

SEQ ID NO: 5662947 - DNA, 25 bp, Homo sapien
gaaaagactccaactaggtgggcat

SEQ ID NO: 5662948 - DNA, 25 bp, Homo sapien
tcccataaaaatggtagacaaccca

SEQ ID NO: 5662949 - DNA, 25 bp, Homo sapien
aaaaaggctacatgcccacctagtt

SEQ ID NO: 5662950 - DNA, 25 bp, Homo sapien
caagccttgggttgtctaccatttt

SEQ ID NO: 5662951 - DNA, 25 bp, Homo sapien
ggctacatgcccacctagttggagt

SEQ ID NO: 5662952 - DNA, 25 bp, Homo sapien
catgcccacctagttggagtctttt

SEQ ID NO: 5662953 - DNA, 25 bp, Homo sapien
tgggttgtctaccatttttatggga

SEQ ID NO: 5662954 - DNA, 25 bp, Homo sapien
aaaaggctacatgcccacctagttg

SEQ ID NO: 5662955 - DNA, 25 bp, Homo sapien
taacataccatacaagttatccatt

SEQ ID NO: 5662956 - DNA, 25 bp, Homo sapien
agagttgtcccaactgtcacgacat

SEQ ID NO: 5662957 - DNA, 25 bp, Homo sapien
gttaacataccatacaagttatcca

SEQ ID NO: 5662958 - DNA, 25 bp, Homo sapien
tagttaacataccatacaagttatc

SEQ ID NO: 5662959 - DNA, 25 bp, Homo sapien
gtagttaacataccatacaagttat

SEQ ID NO: 5662960 - DNA, 25 bp, Homo sapien
agttaacataccatacaagttatcc

SEQ ID NO: 5662961 - DNA, 25 bp, Homo sapien
gataacttgtatggtatgttaacta

SEQ ID NO: 5662962 - DNA, 25 bp, Homo sapien
atgtcgtgacagttgggacaactct

SEQ ID NO: 5662963 - DNA, 25 bp, Homo sapien
tggataacttgtatggtatgttaac

SEQ ID NO: 5662964 - DNA, 25 bp, Homo sapien
aatggataacttgtatggtatgtta

SEQ ID NO: 5662965 - DNA, 25 bp, Homo sapien
ataacttgtatggtatgttaactac

SEQ ID NO: 5662966 - DNA, 25 bp, Homo sapien
ggataacttgtatggtatgttaact

SEQ ID NO: 5662967 - DNA, 25 bp, Homo sapien
tcccggtctgtctctattgtgtttg

SEQ ID NO: 5662968 - DNA, 25 bp, Homo sapien
tctagataatctgtcccggtctgtc

SEQ ID NO: 5662969 - DNA, 25 bp, Homo sapien
cttgggtgctctagataatctgtcc

SEQ ID NO: 5662970 - DNA, 25 bp, Homo sapien
ggtgctctagataatctgtcccggt

SEQ ID NO: 5662971 - DNA, 25 bp, Homo sapien
tctgtcccggtctgtctctattgtg

SEQ ID NO: 5662972 - DNA, 25 bp, Homo sapien
cttttcttgggtgctctagataatc

SEQ ID NO: 5662973 - DNA, 25 bp, Homo sapien
tgtgattatccttttggactttacg

SEQ ID NO: 5662974 - DNA, 25 bp, Homo sapien
cgtaaagtccaaaaggataatcaca

SEQ ID NO: 5662975 - DNA, 25 bp, Homo sapien
caatagagacagaccgggacagatt

SEQ ID NO: 5662976 - DNA, 25 bp, Homo sapien
gattatctagagcacccaagaaaag

SEQ ID NO: 5662977 - DNA, 25 bp, Homo sapien
gacagaccgggacagattatctaga

SEQ ID NO: 5662978 - DNA, 25 bp, Homo sapien
gaccgggacagattatctagagcac

SEQ ID NO: 5662979 - DNA, 25 bp, Homo sapien
ggacagattatctagagcacccaag

SEQ ID NO: 5662980 - DNA, 25 bp, Homo sapien
caaacacaatagagacagaccggga

SEQ ID NO: 5662981 - DNA, 25 bp, Homo sapien
cttgagcccagaagtttgagaccaa

SEQ ID NO: 5662982 - DNA, 25 bp, Homo sapien
gcaaaatggcaaaaccctatcttta

SEQ ID NO: 5662983 - DNA, 25 bp, Homo sapien
atctcagcactttgggaagctgagg

SEQ ID NO: 5662984 - DNA, 25 bp, Homo sapien
tctcagcactttgggaagctgaggc

SEQ ID NO: 5662985 - DNA, 25 bp, Homo sapien
aatctcagcactttgggaagctgag

SEQ ID NO: 5662986 - DNA, 25 bp, Homo sapien
ccaatctgggcaaaatggcaaaacc

SEQ ID NO: 5662987 - DNA, 25 bp, Homo sapien
ttggtctcaaacttctgggctcaag

SEQ ID NO: 5662988 - DNA, 25 bp, Homo sapien
gcctcagcttcccaaagtgctgaga

SEQ ID NO: 5662989 - DNA, 25 bp, Homo sapien
taaagatagggttttgccattttgc

SEQ ID NO: 5662990 - DNA, 25 bp, Homo sapien
ctcagcttcccaaagtgctgagatt

SEQ ID NO: 5662991 - DNA, 25 bp, Homo sapien
ggttttgccattttgcccagattgg

SEQ ID NO: 5662992 - DNA, 25 bp, Homo sapien
cctcagcttcccaaagtgctgagat

SEQ ID NO: 5662993 - DNA, 25 bp, Homo sapien
tgaatgaaacgtaatcttgatcctt

SEQ ID NO: 5662994 - DNA, 25 bp, Homo sapien
attagtctgtttacaccaggtgcag

SEQ ID NO: 5662995 - DNA, 25 bp, Homo sapien
tgagttgaatgaaacgtaatcttga

SEQ ID NO: 5662996 - DNA, 25 bp, Homo sapien
taatcttgatccttaaagtcctgat

SEQ ID NO: 5662997 - DNA, 25 bp, Homo sapien
cgtaatcttgatccttaaagtcctg

SEQ ID NO: 5662998 - DNA, 25 bp, Homo sapien
caaattagtctgtttacaccaggtg

SEQ ID NO: 5662999 - DNA, 25 bp, Homo sapien
tcaagattacgtttcattcaactca

SEQ ID NO: 5663000 - DNA, 25 bp, Homo sapien
ggatcaagattacgtttcattcaac

SEQ ID NO: 5663001 - DNA, 25 bp, Homo sapien
ctgcacctggtgtaaacagactaat

SEQ ID NO: 5663002 - DNA, 25 bp, Homo sapien
cacctggtgtaaacagactaatttg

SEQ ID NO: 5663003 - DNA, 25 bp, Homo sapien
ctttaaggatcaagattacgtttca

SEQ ID NO: 5663004 - DNA, 25 bp, Homo sapien
tcaggactttaaggatcaagattac

SEQ ID NO: 5663005 - DNA, 25 bp, Homo sapien
acatcaacctacagtgagttggaga

SEQ ID NO: 5663006 - DNA, 25 bp, Homo sapien
gacatcaacctacagtgagttggag

SEQ ID NO: 5663007 - DNA, 25 bp, Homo sapien
catcaacctacagtgagttggagag

SEQ ID NO: 5663008 - DNA, 25 bp, Homo sapien
atcaacctacagtgagttggagaga

SEQ ID NO: 5663009 - DNA, 25 bp, Homo sapien
aacctacagtgagttggagagatta

SEQ ID NO: 5663010 - DNA, 25 bp, Homo sapien
gaacctcttgttcgagacatcaacc

SEQ ID NO: 5663011 - DNA, 25 bp, Homo sapien
aaatttgaacctcttgttcgagaca

SEQ ID NO: 5663012 - DNA, 25 bp, Homo sapien
ctcttgttcgagacatcaacctaca

SEQ ID NO: 5663013 - DNA, 25 bp, Homo sapien
caaggcactcaatatggccattcct

SEQ ID NO: 5663014 - DNA, 25 bp, Homo sapien
cgtccaaggcactcaatatggccat

SEQ ID NO: 5663015 - DNA, 25 bp, Homo sapien
ttacgtccaaggcactcaatatggc

SEQ ID NO: 5663016 - DNA, 25 bp, Homo sapien
aatggccatattgagtgccttggac

SEQ ID NO: 5663017 - DNA, 25 bp, Homo sapien
aggaatggccatattgagtgccttg

SEQ ID NO: 5663018 - DNA, 25 bp, Homo sapien
tgtaggttgatgtctcgaacaagag

SEQ ID NO: 5663019 - DNA, 25 bp, Homo sapien
gccatattgagtgccttggacgtaa

SEQ ID NO: 5663020 - DNA, 25 bp, Homo sapien
ggttgatgtctcgaacaagaggttc

SEQ ID NO: 5663021 - DNA, 25 bp, Homo sapien
tgatgtctcgaacaagaggttcaaa

SEQ ID NO: 5663022 - DNA, 25 bp, Homo sapien
ctccaactcactgtaggttgatgtc

SEQ ID NO: 5663023 - DNA, 25 bp, Homo sapien
taatctctccaactcactgtaggtt

SEQ ID NO: 5663024 - DNA, 25 bp, Homo sapien
tctccaactcactgtaggttgatgt

SEQ ID NO: 5663025 - DNA, 25 bp, Homo sapien
tctctccaactcactgtaggttgat

SEQ ID NO: 5663026 - DNA, 25 bp, Homo sapien
ctctccaactcactgtaggttgatg

SEQ ID NO: 5663027 - DNA, 25 bp, Homo sapien
cctggctaatcagctcctgacagac

SEQ ID NO: 5663028 - DNA, 25 bp, Homo sapien
gacttggtggatgacaactacttct

SEQ ID NO: 5663029 - DNA, 25 bp, Homo sapien
tcagctcctgacagacttggtggat

SEQ ID NO: 5663030 - DNA, 25 bp, Homo sapien
atgtcgactctctaccgcctggcta

SEQ ID NO: 5663031 - DNA, 25 bp, Homo sapien
tacctatgatgtcgactctctaccg

SEQ ID NO: 5663032 - DNA, 25 bp, Homo sapien
tatgatgtcgactctctaccgcctg

SEQ ID NO: 5663033 - DNA, 25 bp, Homo sapien
gtctgtcaggagctgattagccagg

SEQ ID NO: 5663034 - DNA, 25 bp, Homo sapien
agaagtagttgtcatccaccaagtc

SEQ ID NO: 5663035 - DNA, 25 bp, Homo sapien
ttagccaggcggtagagagtcgaca

SEQ ID NO: 5663036 - DNA, 25 bp, Homo sapien
tccaccaagtctgtcaggagctgat

SEQ ID NO: 5663037 - DNA, 25 bp, Homo sapien
ccaggcggtagagagtcgacatcat

SEQ ID NO: 5663038 - DNA, 25 bp, Homo sapien
cggtagagagtcgacatcataggta

SEQ ID NO: 5663039 - DNA, 25 bp, Homo sapien
gaagtgagtgatagatggagatact

SEQ ID NO: 5663040 - DNA, 25 bp, Homo sapien
gagtgatagatggagatactacacc

SEQ ID NO: 5663041 - DNA, 25 bp, Homo sapien
gatagatggagatactacacctggg

SEQ ID NO: 5663042 - DNA, 25 bp, Homo sapien
agatggagatactacacctgggagg

SEQ ID NO: 5663043 - DNA, 25 bp, Homo sapien
tagatggagatactacacctgggag

SEQ ID NO: 5663044 - DNA, 25 bp, Homo sapien
tgatagatggagatactacacctgg

SEQ ID NO: 5663045 - DNA, 25 bp, Homo sapien
cctcccaggtgtagtatctccatct

SEQ ID NO: 5663046 - DNA, 25 bp, Homo sapien
ggtgtagtatctccatctatcactc

SEQ ID NO: 5663047 - DNA, 25 bp, Homo sapien
caggtgtagtatctccatctatcac

SEQ ID NO: 5663048 - DNA, 25 bp, Homo sapien
ccaggtgtagtatctccatctatca

SEQ ID NO: 5663049 - DNA, 25 bp, Homo sapien
tcccaggtgtagtatctccatctat

SEQ ID NO: 5663050 - DNA, 25 bp, Homo sapien
gtagtatctccatctatcactcact

SEQ ID NO: 5663051 - DNA, 25 bp, Homo sapien
tgggacaggtagcagaacacctcgt

SEQ ID NO: 5663052 - DNA, 25 bp, Homo sapien
ggacaggtagcagaacacctcgtca

SEQ ID NO: 5663053 - DNA, 25 bp, Homo sapien
ggtagcagaacacctcgtcatttct

SEQ ID NO: 5663054 - DNA, 25 bp, Homo sapien
agaacacctcgtcatttctgatagc

SEQ ID NO: 5663055 - DNA, 25 bp, Homo sapien
caggtagcagaacacctcgtcattt

SEQ ID NO: 5663056 - DNA, 25 bp, Homo sapien
tagcagaacacctcgtcatttctga

SEQ ID NO: 5663057 - DNA, 25 bp, Homo sapien
gctatcagaaatgacgaggtgttct

SEQ ID NO: 5663058 - DNA, 25 bp, Homo sapien
tatcagaaatgacgaggtgttctgc

SEQ ID NO: 5663059 - DNA, 25 bp, Homo sapien
acgaggtgttctgctacctgtccca

SEQ ID NO: 5663060 - DNA, 25 bp, Homo sapien
cagaaatgacgaggtgttctgctac

SEQ ID NO: 5663061 - DNA, 25 bp, Homo sapien
gaaatgacgaggtgttctgctacct

SEQ ID NO: 5663062 - DNA, 25 bp, Homo sapien
tgacgaggtgttctgctacctgtcc

SEQ ID NO: 5663063 - DNA, 25 bp, Homo sapien
tatgacgtttaagaagagtggtgca

SEQ ID NO: 5663064 - DNA, 25 bp, Homo sapien
aagagtggtgcaaggtgaagttgga

SEQ ID NO: 5663065 - DNA, 25 bp, Homo sapien
ctgataccagcattgtgggattatg

SEQ ID NO: 5663066 - DNA, 25 bp, Homo sapien
ccagcattgtgggattatgacgttt

SEQ ID NO: 5663067 - DNA, 25 bp, Homo sapien
cattgtgggattatgacgtttaaga

SEQ ID NO: 5663068 - DNA, 25 bp, Homo sapien
taccagcattgtgggattatgacgt

SEQ ID NO: 5663069 - DNA, 25 bp, Homo sapien
gcaccactcttcttaaacgtcataa

SEQ ID NO: 5663070 - DNA, 25 bp, Homo sapien
acgtcataatcccacaatgctggta

SEQ ID NO: 5663071 - DNA, 25 bp, Homo sapien
ttgcaccactcttcttaaacgtcat

SEQ ID NO: 5663072 - DNA, 25 bp, Homo sapien
taaacgtcataatcccacaatgctg

SEQ ID NO: 5663073 - DNA, 25 bp, Homo sapien
tcttcttaaacgtcataatcccaca

SEQ ID NO: 5663074 - DNA, 25 bp, Homo sapien
cataatcccacaatgctggtatcag

SEQ ID NO: 5663075 - DNA, 25 bp, Homo sapien
ggtgatagtgaagtatggtgaatac

SEQ ID NO: 5663076 - DNA, 25 bp, Homo sapien
tctagtggcctgacagacatgagac

SEQ ID NO: 5663077 - DNA, 25 bp, Homo sapien
catgagacaactggtgatagtgaag

SEQ ID NO: 5663078 - DNA, 25 bp, Homo sapien
gatttatgggaagatgcggagggaa

SEQ ID NO: 5663079 - DNA, 25 bp, Homo sapien
caactggtgatagtgaagtatggtg

SEQ ID NO: 5663080 - DNA, 25 bp, Homo sapien
cctgacagacatgagacaactggtg

SEQ ID NO: 5663081 - DNA, 25 bp, Homo sapien
tattcaccatacttcactatcacca

SEQ ID NO: 5663082 - DNA, 25 bp, Homo sapien
agttgtctcatgtctgtcaggccac

SEQ ID NO: 5663083 - DNA, 25 bp, Homo sapien
tattccctccgcatcttcccataaa

SEQ ID NO: 5663084 - DNA, 25 bp, Homo sapien
tacttcactatcaccagttgtctca

SEQ ID NO: 5663085 - DNA, 25 bp, Homo sapien
tctcatgtctgtcaggccactagac

SEQ ID NO: 5663086 - DNA, 25 bp, Homo sapien
caccagttgtctcatgtctgtcagg

SEQ ID NO: 5663087 - DNA, 25 bp, Homo sapien
gctgctggggatatagtagcgagca

SEQ ID NO: 5663088 - DNA, 25 bp, Homo sapien
atgtttgccatgtaatgaactggaa

SEQ ID NO: 5663089 - DNA, 25 bp, Homo sapien
tgctggggatatagtagcgagcaga

SEQ ID NO: 5663090 - DNA, 25 bp, Homo sapien
tgtttgccatgtaatgaactggaag

SEQ ID NO: 5663091 - DNA, 25 bp, Homo sapien
gctggggatatagtagcgagcagag

SEQ ID NO: 5663092 - DNA, 25 bp, Homo sapien
ctggggatatagtagcgagcagagg

SEQ ID NO: 5663093 - DNA, 25 bp, Homo sapien
cctctgctcgctactatatccccag

SEQ ID NO: 5663094 - DNA, 25 bp, Homo sapien
ctctgctcgctactatatccccagc

SEQ ID NO: 5663095 - DNA, 25 bp, Homo sapien
tctgctcgctactatatccccagca

SEQ ID NO: 5663096 - DNA, 25 bp, Homo sapien
tgctcgctactatatccccagcagc

SEQ ID NO: 5663097 - DNA, 25 bp, Homo sapien
ttccagttcattacatggcaaacat

SEQ ID NO: 5663098 - DNA, 25 bp, Homo sapien
cttccagttcattacatggcaaaca

SEQ ID NO: 5663099 - DNA, 25 bp, Homo sapien
ccatgtaatgaactggaagttttgt

SEQ ID NO: 5663100 - DNA, 25 bp, Homo sapien
tatagtagcgagcagagggtaacaa

SEQ ID NO: 5663101 - DNA, 25 bp, Homo sapien
tgtttgccatgtaatgaactggaag

SEQ ID NO: 5663102 - DNA, 25 bp, Homo sapien
aaaatacttagagaactgtgctggc

SEQ ID NO: 5663103 - DNA, 25 bp, Homo sapien
gatatagtagcgagcagagggtaac

SEQ ID NO: 5663104 - DNA, 25 bp, Homo sapien
tacttagagaactgtgctggctgct

SEQ ID NO: 5663105 - DNA, 25 bp, Homo sapien
tgaaataaacaaaacttccagttca

SEQ ID NO: 5663106 - DNA, 25 bp, Homo sapien
agcagccagcacagttctctaagta

SEQ ID NO: 5663107 - DNA, 25 bp, Homo sapien
gccagcacagttctctaagtatttt

SEQ ID NO: 5663108 - DNA, 25 bp, Homo sapien
tgctcgctactatatccccagcagc

SEQ ID NO: 5663109 - DNA, 25 bp, Homo sapien
tgttaccctctgctcgctactatat

SEQ ID NO: 5663110 - DNA, 25 bp, Homo sapien
cttccagttcattacatggcaaaca

SEQ ID NO: 5663111 - DNA, 25 bp, Homo sapien
tacaggtacagatgtcttagcagat

SEQ ID NO: 5663112 - DNA, 25 bp, Homo sapien
taaactgggctagtacaggtacaga

SEQ ID NO: 5663113 - DNA, 25 bp, Homo sapien
aactgggctagtacaggtacagatg

SEQ ID NO: 5663114 - DNA, 25 bp, Homo sapien
tgggctagtacaggtacagatgtct

SEQ ID NO: 5663115 - DNA, 25 bp, Homo sapien
ctctaaactgggctagtacaggtac

SEQ ID NO: 5663116 - DNA, 25 bp, Homo sapien
tagtacaggtacagatgtcttagca

SEQ ID NO: 5663117 - DNA, 25 bp, Homo sapien
gctaagacatctgtacctgtactag

SEQ ID NO: 5663118 - DNA, 25 bp, Homo sapien
taagacatctgtacctgtactagcc

SEQ ID NO: 5663119 - DNA, 25 bp, Homo sapien
gtacctgtactagcccagtttagag

SEQ ID NO: 5663120 - DNA, 25 bp, Homo sapien
gacatctgtacctgtactagcccag

SEQ ID NO: 5663121 - DNA, 25 bp, Homo sapien
atctgctaagacatctgtacctgta

SEQ ID NO: 5663122 - DNA, 25 bp, Homo sapien
tctgtacctgtactagcccagttta

SEQ ID NO: 5663123 - DNA, 25 bp, Homo sapien
agtccagagtgggatactgtgcata

SEQ ID NO: 5663124 - DNA, 25 bp, Homo sapien
aaaataagatgtccctatggttgag

SEQ ID NO: 5663125 - DNA, 25 bp, Homo sapien
taagatgtccctatggttgagctgg

SEQ ID NO: 5663126 - DNA, 25 bp, Homo sapien
ccagagtgggatactgtgcatagtg

SEQ ID NO: 5663127 - DNA, 25 bp, Homo sapien
aagatgtccctatggttgagctggt

SEQ ID NO: 5663128 - DNA, 25 bp, Homo sapien
aataagatgtccctatggttgagct

SEQ ID NO: 5663129 - DNA, 25 bp, Homo sapien
cactatgcacagtatcccactctgg

SEQ ID NO: 5663130 - DNA, 25 bp, Homo sapien
tatgcacagtatcccactctggact

SEQ ID NO: 5663131 - DNA, 25 bp, Homo sapien
agctcaaccatagggacatcttatt

SEQ ID NO: 5663132 - DNA, 25 bp, Homo sapien
actatgcacagtatcccactctgga

SEQ ID NO: 5663133 - DNA, 25 bp, Homo sapien
ccagctcaaccatagggacatctta

SEQ ID NO: 5663134 - DNA, 25 bp, Homo sapien
accagctcaaccatagggacatctt

SEQ ID NO: 5663135 - DNA, 25 bp, Homo sapien
agtcagatagtgatcaatgtgatga

SEQ ID NO: 5663136 - DNA, 25 bp, Homo sapien
aagtcagatagtgatcaatgtgatg

SEQ ID NO: 5663137 - DNA, 25 bp, Homo sapien
gtcagatagtgatcaatgtgatgaa

SEQ ID NO: 5663138 - DNA, 25 bp, Homo sapien
aaaagtcagatagtgatcaatgtga

SEQ ID NO: 5663139 - DNA, 25 bp, Homo sapien
aaaaagtcagatagtgatcaatgtg

SEQ ID NO: 5663140 - DNA, 25 bp, Homo sapien
tcagatagtgatcaatgtgatgaaa

SEQ ID NO: 5663141 - DNA, 25 bp, Homo sapien
ttcatcacattgatcactatctgac

SEQ ID NO: 5663142 - DNA, 25 bp, Homo sapien
tcacattgatcactatctgactttt

SEQ ID NO: 5663143 - DNA, 25 bp, Homo sapien
catcacattgatcactatctgactt

SEQ ID NO: 5663144 - DNA, 25 bp, Homo sapien
tcatcacattgatcactatctgact

SEQ ID NO: 5663145 - DNA, 25 bp, Homo sapien
tttcatcacattgatcactatctga

SEQ ID NO: 5663146 - DNA, 25 bp, Homo sapien
cacattgatcactatctgacttttt

SEQ ID NO: 5663147 - DNA, 25 bp, Homo sapien
gagacagagtgaaacaacctctcaa

SEQ ID NO: 5663148 - DNA, 25 bp, Homo sapien
aagtcagatagtgatcaatgtgatg

SEQ ID NO: 5663149 - DNA, 25 bp, Homo sapien
tgatcaatgtgatgaaaggaaaaac

SEQ ID NO: 5663150 - DNA, 25 bp, Homo sapien
aaaagtcagatagtgatcaatgtga

SEQ ID NO: 5663151 - DNA, 25 bp, Homo sapien
aaaaagtcagatagtgatcaatgtg

SEQ ID NO: 5663152 - DNA, 25 bp, Homo sapien
tcagatagtgatcaatgtgatgaaa

SEQ ID NO: 5663153 - DNA, 25 bp, Homo sapien
ttgagaggttgtttcactctgtctc

SEQ ID NO: 5663154 - DNA, 25 bp, Homo sapien
catcacattgatcactatctgactt

SEQ ID NO: 5663155 - DNA, 25 bp, Homo sapien
tcatcacattgatcactatctgact

SEQ ID NO: 5663156 - DNA, 25 bp, Homo sapien
tttcatcacattgatcactatctga

SEQ ID NO: 5663157 - DNA, 25 bp, Homo sapien
cacattgatcactatctgacttttt

SEQ ID NO: 5663158 - DNA, 25 bp, Homo sapien
gtttttcctttcatcacattgatca

SEQ ID NO: 5663159 - DNA, 25 bp, Homo sapien
gtcgtgtgtggtggcgcgtgtctat

SEQ ID NO: 5663160 - DNA, 25 bp, Homo sapien
agtcgtgtgtggtggcgcgtgtcta

SEQ ID NO: 5663161 - DNA, 25 bp, Homo sapien
gtgtgtggtggcgcgtgtctataat

SEQ ID NO: 5663162 - DNA, 25 bp, Homo sapien
cgtgtgtggtggcgcgtgtctataa

SEQ ID NO: 5663163 - DNA, 25 bp, Homo sapien
tgtgtggtggcgcgtgtctataatc

SEQ ID NO: 5663164 - DNA, 25 bp, Homo sapien
tcgtgtgtggtggcgcgtgtctata

SEQ ID NO: 5663165 - DNA, 25 bp, Homo sapien
tatagacacgcgccaccacacacga

SEQ ID NO: 5663166 - DNA, 25 bp, Homo sapien
gattatagacacgcgccaccacaca

SEQ ID NO: 5663167 - DNA, 25 bp, Homo sapien
ttatagacacgcgccaccacacacg

SEQ ID NO: 5663168 - DNA, 25 bp, Homo sapien
tagacacgcgccaccacacacgact

SEQ ID NO: 5663169 - DNA, 25 bp, Homo sapien
attatagacacgcgccaccacacac

SEQ ID NO: 5663170 - DNA, 25 bp, Homo sapien
atagacacgcgccaccacacacgac

SEQ ID NO: 5663171 - DNA, 25 bp, Homo sapien
ggtgaggcgagagtgtggagcggcg

SEQ ID NO: 5663172 - DNA, 25 bp, Homo sapien
gcgcgcaggcgggtggggaccctcc

SEQ ID NO: 5663173 - DNA, 25 bp, Homo sapien
cgggtgtgcgcgcgcgcaggcgggt

SEQ ID NO: 5663174 - DNA, 25 bp, Homo sapien
gcgagagtgtggagcggcgcgcggg

SEQ ID NO: 5663175 - DNA, 25 bp, Homo sapien
tgaggcgagagtgtggagcggcgcg

SEQ ID NO: 5663176 - DNA, 25 bp, Homo sapien
gaaaggtgaggcgagagtgtggagc

SEQ ID NO: 5663177 - DNA, 25 bp, Homo sapien
cctgcgcgcgcgcacacccgccccg

SEQ ID NO: 5663178 - DNA, 25 bp, Homo sapien
gcccgcgcgccgctccacactctcg

SEQ ID NO: 5663179 - DNA, 25 bp, Homo sapien
gcgccgctccacactctcgcctcac

SEQ ID NO: 5663180 - DNA, 25 bp, Homo sapien
gctccacactctcgcctcacctttc

SEQ ID NO: 5663181 - DNA, 25 bp, Homo sapien
cgctccacactctcgcctcaccttt

SEQ ID NO: 5663182 - DNA, 25 bp, Homo sapien
ggagggtccccacccgcctgcgcgc

SEQ ID NO: 5663183 - DNA, 25 bp, Homo sapien
caggccggtgtgtagggtgggatgg

SEQ ID NO: 5663184 - DNA, 25 bp, Homo sapien
cggtgtgtagggtgggatggtgtga

SEQ ID NO: 5663185 - DNA, 25 bp, Homo sapien
agcaggccggtgtgtagggtgggat

SEQ ID NO: 5663186 - DNA, 25 bp, Homo sapien
ggaggggctcggaaggatagggagc

SEQ ID NO: 5663187 - DNA, 25 bp, Homo sapien
gagcttgagcaggccggtgtgtagg

SEQ ID NO: 5663188 - DNA, 25 bp, Homo sapien
gagcaggccggtgtgtagggtggga

SEQ ID NO: 5663189 - DNA, 25 bp, Homo sapien
gctccctatccttccgagcccctcc

SEQ ID NO: 5663190 - DNA, 25 bp, Homo sapien
ctccctatccttccgagcccctcct

SEQ ID NO: 5663191 - DNA, 25 bp, Homo sapien
accatcccaccctacacaccggcct

SEQ ID NO: 5663192 - DNA, 25 bp, Homo sapien
ttcacaccatcccaccctacacacc

SEQ ID NO: 5663193 - DNA, 25 bp, Homo sapien
cctacacaccggcctgctcaagctc

SEQ ID NO: 5663194 - DNA, 25 bp, Homo sapien
atcccaccctacacaccggcctgct

SEQ ID NO: 5663195 - DNA, 25 bp, Homo sapien
ctcggaaggatagggagcttgagca

SEQ ID NO: 5663196 - DNA, 25 bp, Homo sapien
cggtgtgtagggtgggatggtgtga

SEQ ID NO: 5663197 - DNA, 25 bp, Homo sapien
cagcggctggtaaaggtgaggaggg

SEQ ID NO: 5663198 - DNA, 25 bp, Homo sapien
ggctccctctgccagcggctggtaa

SEQ ID NO: 5663199 - DNA, 25 bp, Homo sapien
ggatagggagcttgagcaggccggt

SEQ ID NO: 5663200 - DNA, 25 bp, Homo sapien
gagcaggccggtgtgtagggtggga

SEQ ID NO: 5663201 - DNA, 25 bp, Homo sapien
cgagcccctcctcacctttaccagc

SEQ ID NO: 5663202 - DNA, 25 bp, Homo sapien
acaccggcctgctcaagctccctat

SEQ ID NO: 5663203 - DNA, 25 bp, Homo sapien
tcacttcacaccatcccaccctaca

SEQ ID NO: 5663204 - DNA, 25 bp, Homo sapien
tttaccagccgctggcagagggagc

SEQ ID NO: 5663205 - DNA, 25 bp, Homo sapien
tgctcaagctccctatccttccgag

SEQ ID NO: 5663206 - DNA, 25 bp, Homo sapien
atcccaccctacacaccggcctgct

SEQ ID NO: 5663207 - DNA, 25 bp, Homo sapien
atatagcaagatgcctgaccctacc

SEQ ID NO: 5663208 - DNA, 25 bp, Homo sapien
tagcaagatgcctgaccctaccaga

SEQ ID NO: 5663209 - DNA, 25 bp, Homo sapien
caatatagcaagatgcctgacccta

SEQ ID NO: 5663210 - DNA, 25 bp, Homo sapien
atagcaagatgcctgaccctaccag

SEQ ID NO: 5663211 - DNA, 25 bp, Homo sapien
agcaagatgcctgaccctaccagaa

SEQ ID NO: 5663212 - DNA, 25 bp, Homo sapien
aatatagcaagatgcctgaccctac

SEQ ID NO: 5663213 - DNA, 25 bp, Homo sapien
tagggtcaggcatcttgctatattg

SEQ ID NO: 5663214 - DNA, 25 bp, Homo sapien
ctggtagggtcaggcatcttgctat

SEQ ID NO: 5663215 - DNA, 25 bp, Homo sapien
ttctggtagggtcaggcatcttgct

SEQ ID NO: 5663216 - DNA, 25 bp, Homo sapien
ggtagggtcaggcatcttgctatat

SEQ ID NO: 5663217 - DNA, 25 bp, Homo sapien
gtagggtcaggcatcttgctatatt

SEQ ID NO: 5663218 - DNA, 25 bp, Homo sapien
tctggtagggtcaggcatcttgcta

SEQ ID NO: 5663219 - DNA, 25 bp, Homo sapien
tgggtgggtatggtagttatgtcta

SEQ ID NO: 5663220 - DNA, 25 bp, Homo sapien
tattgggtgggtatggtagttatgt

SEQ ID NO: 5663221 - DNA, 25 bp, Homo sapien
attgggtgggtatggtagttatgtc

SEQ ID NO: 5663222 - DNA, 25 bp, Homo sapien
gtgggtatggtagttatgtctataa

SEQ ID NO: 5663223 - DNA, 25 bp, Homo sapien
ttgggtgggtatggtagttatgtct

SEQ ID NO: 5663224 - DNA, 25 bp, Homo sapien
ggtgggtatggtagttatgtctata

SEQ ID NO: 5663225 - DNA, 25 bp, Homo sapien
tagacataactaccatacccaccca

SEQ ID NO: 5663226 - DNA, 25 bp, Homo sapien
ttatagacataactaccatacccac

SEQ ID NO: 5663227 - DNA, 25 bp, Homo sapien
agacataactaccatacccacccaa

SEQ ID NO: 5663228 - DNA, 25 bp, Homo sapien
gacataactaccatacccacccaat

SEQ ID NO: 5663229 - DNA, 25 bp, Homo sapien
tatagacataactaccatacccacc

SEQ ID NO: 5663230 - DNA, 25 bp, Homo sapien
cataactaccatacccacccaatac

SEQ ID NO: 5663231 - DNA, 25 bp, Homo sapien
ggtgggtatggtagttatgtctata

SEQ ID NO: 5663232 - DNA, 25 bp, Homo sapien
aaaatacatgtattgggtgggtatg

SEQ ID NO: 5663233 - DNA, 25 bp, Homo sapien
tggtagttatgtctataatcctagc

SEQ ID NO: 5663234 - DNA, 25 bp, Homo sapien
ggaaggtgagaagcagcttatttaa

SEQ ID NO: 5663235 - DNA, 25 bp, Homo sapien
ggtatggtagttatgtctataatcc

SEQ ID NO: 5663236 - DNA, 25 bp, Homo sapien
gagaagcagcttatttaaaatacat

SEQ ID NO: 5663237 - DNA, 25 bp, Homo sapien
gattatagacataactaccataccc

SEQ ID NO: 5663238 - DNA, 25 bp, Homo sapien
catacccacccaatacatgtatttt

SEQ ID NO: 5663239 - DNA, 25 bp, Homo sapien
tatagacataactaccatacccacc

SEQ ID NO: 5663240 - DNA, 25 bp, Homo sapien
taaataagctgcttctcaccttccc

SEQ ID NO: 5663241 - DNA, 25 bp, Homo sapien
taggattatagacataactaccata

SEQ ID NO: 5663242 - DNA, 25 bp, Homo sapien
tgtattttaaataagctgcttctca

SEQ ID NO: 5663243 - DNA, 25 bp, Homo sapien
agaaagagaattgcccagatagtgg

SEQ ID NO: 5663244 - DNA, 25 bp, Homo sapien
gacaagaaagagaattgcccagata

SEQ ID NO: 5663245 - DNA, 25 bp, Homo sapien
agaattgcccagatagtggttccca

SEQ ID NO: 5663246 - DNA, 25 bp, Homo sapien
gagaattgcccagatagtggttccc

SEQ ID NO: 5663247 - DNA, 25 bp, Homo sapien
caagaaagagaattgcccagatagt

SEQ ID NO: 5663248 - DNA, 25 bp, Homo sapien
aagagaattgcccagatagtggttc

SEQ ID NO: 5663249 - DNA, 25 bp, Homo sapien
ggaaccactatctgggcaattctct

SEQ ID NO: 5663250 - DNA, 25 bp, Homo sapien
actatctgggcaattctctttcttg

SEQ ID NO: 5663251 - DNA, 25 bp, Homo sapien
tatctgggcaattctctttcttgtc

SEQ ID NO: 5663252 - DNA, 25 bp, Homo sapien
ccactatctgggcaattctctttct

SEQ ID NO: 5663253 - DNA, 25 bp, Homo sapien
tgggaaccactatctgggcaattct

SEQ ID NO: 5663254 - DNA, 25 bp, Homo sapien
gaaccactatctgggcaattctctt

SEQ ID NO: 5663255 - DNA, 25 bp, Homo sapien
gctggtaggttctaggagttgggaa

SEQ ID NO: 5663256 - DNA, 25 bp, Homo sapien
tggagagctggtaggttctaggagt

SEQ ID NO: 5663257 - DNA, 25 bp, Homo sapien
ttggagagctggtaggttctaggag

SEQ ID NO: 5663258 - DNA, 25 bp, Homo sapien
ctggtaggttctaggagttgggaag

SEQ ID NO: 5663259 - DNA, 25 bp, Homo sapien
agctggtaggttctaggagttggga

SEQ ID NO: 5663260 - DNA, 25 bp, Homo sapien
gagctggtaggttctaggagttggg

SEQ ID NO: 5663261 - DNA, 25 bp, Homo sapien
atctttgaggtgctgagctggttgg

SEQ ID NO: 5663262 - DNA, 25 bp, Homo sapien
ctttgaggtgctgagctggttggag

SEQ ID NO: 5663263 - DNA, 25 bp, Homo sapien
tctttgaggtgctgagctggttgga

SEQ ID NO: 5663264 - DNA, 25 bp, Homo sapien
tgaggtgctgagctggttggagagc

SEQ ID NO: 5663265 - DNA, 25 bp, Homo sapien
tttgaggtgctgagctggttggaga

SEQ ID NO: 5663266 - DNA, 25 bp, Homo sapien
gatctttgaggtgctgagctggttg

SEQ ID NO: 5663267 - DNA, 25 bp, Homo sapien
tccaaccagctcagcacctcaaaga

SEQ ID NO: 5663268 - DNA, 25 bp, Homo sapien
tctccaaccagctcagcacctcaaa

SEQ ID NO: 5663269 - DNA, 25 bp, Homo sapien
gctctccaaccagctcagcacctca

SEQ ID NO: 5663270 - DNA, 25 bp, Homo sapien
ctccaaccagctcagcacctcaaag

SEQ ID NO: 5663271 - DNA, 25 bp, Homo sapien
ccaaccagctcagcacctcaaagat

SEQ ID NO: 5663272 - DNA, 25 bp, Homo sapien
caaccagctcagcacctcaaagatc

SEQ ID NO: 5663273 - DNA, 25 bp, Homo sapien
cttcccaactcctagaacctaccag

SEQ ID NO: 5663274 - DNA, 25 bp, Homo sapien
cccaactcctagaacctaccagctc

SEQ ID NO: 5663275 - DNA, 25 bp, Homo sapien
ttcccaactcctagaacctaccagc

SEQ ID NO: 5663276 - DNA, 25 bp, Homo sapien
tcccaactcctagaacctaccagct

SEQ ID NO: 5663277 - DNA, 25 bp, Homo sapien
actcctagaacctaccagctctcca

SEQ ID NO: 5663278 - DNA, 25 bp, Homo sapien
ctcctagaacctaccagctctccaa

SEQ ID NO: 5663279 - DNA, 25 bp, Homo sapien
gctggtaggttctaggagttgggaa

SEQ ID NO: 5663280 - DNA, 25 bp, Homo sapien
tggagagctggtaggttctaggagt

SEQ ID NO: 5663281 - DNA, 25 bp, Homo sapien
tgggaagaagggctcgagggatttg

SEQ ID NO: 5663282 - DNA, 25 bp, Homo sapien
tctttgaggtgctgagctggttgga

SEQ ID NO: 5663283 - DNA, 25 bp, Homo sapien
tctaggagttgggaagaagggctcg

SEQ ID NO: 5663284 - DNA, 25 bp, Homo sapien
ggctgagtcctcagccataggagct

SEQ ID NO: 5663285 - DNA, 25 bp, Homo sapien
agctcctatggctgaggactcagcc

SEQ ID NO: 5663286 - DNA, 25 bp, Homo sapien
ttcccaactcctagaacctaccagc

SEQ ID NO: 5663287 - DNA, 25 bp, Homo sapien
tcgagcccttcttcccaactcctag

SEQ ID NO: 5663288 - DNA, 25 bp, Homo sapien
actcctagaacctaccagctctcca

SEQ ID NO: 5663289 - DNA, 25 bp, Homo sapien
caaatccctcgagcccttcttccca

SEQ ID NO: 5663290 - DNA, 25 bp, Homo sapien
caaccagctcagcacctcaaagatc

SEQ ID NO: 5663291 - DNA, 25 bp, Homo sapien
tgactgtggctcatccaagtctggt

SEQ ID NO: 5663292 - DNA, 25 bp, Homo sapien
aaatgactgtggctcatccaagtct

SEQ ID NO: 5663293 - DNA, 25 bp, Homo sapien
ggtttgatgtccactctccgtactc

SEQ ID NO: 5663294 - DNA, 25 bp, Homo sapien
tccaagtctggtttgatgtccactc

SEQ ID NO: 5663295 - DNA, 25 bp, Homo sapien
tctccgtactcacaggattggcatc

SEQ ID NO: 5663296 - DNA, 25 bp, Homo sapien
cgtactcacaggattggcatctcta

SEQ ID NO: 5663297 - DNA, 25 bp, Homo sapien
cggagagtggacatcaaaccagact

SEQ ID NO: 5663298 - DNA, 25 bp, Homo sapien
gagtggacatcaaaccagacttgga

SEQ ID NO: 5663299 - DNA, 25 bp, Homo sapien
cagacttggatgagccacagtcatt

SEQ ID NO: 5663300 - DNA, 25 bp, Homo sapien
gagtacggagagtggacatcaaacc

SEQ ID NO: 5663301 - DNA, 25 bp, Homo sapien
gatgccaatcctgtgagtacggaga

SEQ ID NO: 5663302 - DNA, 25 bp, Homo sapien
tagagatgccaatcctgtgagtacg

SEQ ID NO: 5663303 - DNA, 25 bp, Homo sapien
gccataggggcggttgtagttgctg

SEQ ID NO: 5663304 - DNA, 25 bp, Homo sapien
tatgcattagccataggggcggttg

SEQ ID NO: 5663305 - DNA, 25 bp, Homo sapien
tgtgtaaaaacttttgagacagtat

SEQ ID NO: 5663306 - DNA, 25 bp, Homo sapien
taatgtgtaaaaacttttgagacag

SEQ ID NO: 5663307 - DNA, 25 bp, Homo sapien
tgcattagccataggggcggttgta

SEQ ID NO: 5663308 - DNA, 25 bp, Homo sapien
caaatatgcattagccataggggcg

SEQ ID NO: 5663309 - DNA, 25 bp, Homo sapien
tacaaccgcccctatggctaatgca

SEQ ID NO: 5663310 - DNA, 25 bp, Homo sapien
tgtctcaaaagtttttacacattaa

SEQ ID NO: 5663311 - DNA, 25 bp, Homo sapien
atactgtctcaaaagtttttacaca

SEQ ID NO: 5663312 - DNA, 25 bp, Homo sapien
gcccctatggctaatgcatatttgg

SEQ ID NO: 5663313 - DNA, 25 bp, Homo sapien
cagcaactacaaccgcccctatggc

SEQ ID NO: 5663314 - DNA, 25 bp, Homo sapien
caaccgcccctatggctaatgcata

SEQ ID NO: 5663315 - DNA, 25 bp, Homo sapien
tatgcattagccataggggcggttg

SEQ ID NO: 5663316 - DNA, 25 bp, Homo sapien
taatgtgtaaaaacttttgagacag

SEQ ID NO: 5663317 - DNA, 25 bp, Homo sapien
tgccaaatatgcattagccataggg

SEQ ID NO: 5663318 - DNA, 25 bp, Homo sapien
aaacttttgagacagtatctggcac

SEQ ID NO: 5663319 - DNA, 25 bp, Homo sapien
tgagacagtatctggcacatggtaa

SEQ ID NO: 5663320 - DNA, 25 bp, Homo sapien
cacatggtaagtgccaaatatgcat

SEQ ID NO: 5663321 - DNA, 25 bp, Homo sapien
ccctgtggacacagaccattctcag

SEQ ID NO: 5663322 - DNA, 25 bp, Homo sapien
cccctcttgcttagtggagagtata

SEQ ID NO: 5663323 - DNA, 25 bp, Homo sapien
tctcccctcttgcttagtggagagt

SEQ ID NO: 5663324 - DNA, 25 bp, Homo sapien
ggcaggtggtgattcaatgagttaa

SEQ ID NO: 5663325 - DNA, 25 bp, Homo sapien
tgtggacacagaccattctcagggt

SEQ ID NO: 5663326 - DNA, 25 bp, Homo sapien
cttagtggagagtataatgtgaaac

SEQ ID NO: 5663327 - DNA, 25 bp, Homo sapien
accctgagaatggtctgtgtccaca

SEQ ID NO: 5663328 - DNA, 25 bp, Homo sapien
cacattatactctccactaagcaag

SEQ ID NO: 5663329 - DNA, 25 bp, Homo sapien
gtttcacattatactctccactaag

SEQ ID NO: 5663330 - DNA, 25 bp, Homo sapien
ctgagaatggtctgtgtccacaggg

SEQ ID NO: 5663331 - DNA, 25 bp, Homo sapien
ttaactcattgaatcaccacctgcc

SEQ ID NO: 5663332 - DNA, 25 bp, Homo sapien
ttatactctccactaagcaagaggg

SEQ ID NO: 5663333 - DNA, 25 bp, Homo sapien
tgagtcagagtttatcctattgggt

SEQ ID NO: 5663334 - DNA, 25 bp, Homo sapien
gagtttatcctattgggttctgaat

SEQ ID NO: 5663335 - DNA, 25 bp, Homo sapien
agtcagagtttatcctattgggttc

SEQ ID NO: 5663336 - DNA, 25 bp, Homo sapien
cctattgggttctgaatatttgtgt

SEQ ID NO: 5663337 - DNA, 25 bp, Homo sapien
cagggccccacagggtacactctga

SEQ ID NO: 5663338 - DNA, 25 bp, Homo sapien
gtgtccatactttctctgcccctag

SEQ ID NO: 5663339 - DNA, 25 bp, Homo sapien
gaacccaataggataaactctgact

SEQ ID NO: 5663340 - DNA, 25 bp, Homo sapien
ctaggggcagagaaagtatggacac

SEQ ID NO: 5663341 - DNA, 25 bp, Homo sapien
cacaaatattcagaacccaatagga

SEQ ID NO: 5663342 - DNA, 25 bp, Homo sapien
tattcagaacccaataggataaact

SEQ ID NO: 5663343 - DNA, 25 bp, Homo sapien
tcagagtgtaccctgtggggccctg

SEQ ID NO: 5663344 - DNA, 25 bp, Homo sapien
acccaataggataaactctgactca

SEQ ID NO: 5663345 - DNA, 25 bp, Homo sapien
gattcgtagagcagtaaggccaaga

SEQ ID NO: 5663346 - DNA, 25 bp, Homo sapien
cgtagagcagtaaggccaagagcag

SEQ ID NO: 5663347 - DNA, 25 bp, Homo sapien
ttcgtagagcagtaaggccaagagc

SEQ ID NO: 5663348 - DNA, 25 bp, Homo sapien
agattcgtagagcagtaaggccaag

SEQ ID NO: 5663349 - DNA, 25 bp, Homo sapien
gagcagtaaggccaagagcagaaca

SEQ ID NO: 5663350 - DNA, 25 bp, Homo sapien
gcagtaaggccaagagcagaacatt

SEQ ID NO: 5663351 - DNA, 25 bp, Homo sapien
taaccagtttttggagattcgtaga

SEQ ID NO: 5663352 - DNA, 25 bp, Homo sapien
tcttcagtactaaccagtttttgga

SEQ ID NO: 5663353 - DNA, 25 bp, Homo sapien
cagtttttggagattcgtagagcag

SEQ ID NO: 5663354 - DNA, 25 bp, Homo sapien
tcctatctcttcagtactaaccagt

SEQ ID NO: 5663355 - DNA, 25 bp, Homo sapien
tcagtactaaccagtttttggagat

SEQ ID NO: 5663356 - DNA, 25 bp, Homo sapien
ccagtttttggagattcgtagagca

SEQ ID NO: 5663357 - DNA, 25 bp, Homo sapien
aatctccaaaaactggttagtactg

SEQ ID NO: 5663358 - DNA, 25 bp, Homo sapien
aactggttagtactgaagagatagg

SEQ ID NO: 5663359 - DNA, 25 bp, Homo sapien
ccaaaaactggttagtactgaagag

SEQ ID NO: 5663360 - DNA, 25 bp, Homo sapien
ggttagtactgaagagataggaaag

SEQ ID NO: 5663361 - DNA, 25 bp, Homo sapien
tgctctacgaatctccaaaaactgg

SEQ ID NO: 5663362 - DNA, 25 bp, Homo sapien
ctacgaatctccaaaaactggttag

SEQ ID NO: 5663363 - DNA, 25 bp, Homo sapien
tgctcttggccttactgctctacga

SEQ ID NO: 5663364 - DNA, 25 bp, Homo sapien
gctcttggccttactgctctacgaa

SEQ ID NO: 5663365 - DNA, 25 bp, Homo sapien
tgttctgctcttggccttactgctc

SEQ ID NO: 5663366 - DNA, 25 bp, Homo sapien
cttggccttactgctctacgaatct

SEQ ID NO: 5663367 - DNA, 25 bp, Homo sapien
aatgttctgctcttggccttactgc

SEQ ID NO: 5663368 - DNA, 25 bp, Homo sapien
ctgctcttggccttactgctctacg

SEQ ID NO: 5663369 - DNA, 25 bp, Homo sapien
cctccccagtagctgggactacagg

SEQ ID NO: 5663370 - DNA, 25 bp, Homo sapien
tcttgtgcctcagcctccccagtag

SEQ ID NO: 5663371 - DNA, 25 bp, Homo sapien
ttgtgcctcagcctccccagtagct

SEQ ID NO: 5663372 - DNA, 25 bp, Homo sapien
cttgtgcctcagcctccccagtagc

SEQ ID NO: 5663373 - DNA, 25 bp, Homo sapien
tgtgcctcagcctccccagtagctg

SEQ ID NO: 5663374 - DNA, 25 bp, Homo sapien
cacacaccaccgcccctggctaatt

SEQ ID NO: 5663375 - DNA, 25 bp, Homo sapien
agctactggggaggctgaggcacaa

SEQ ID NO: 5663376 - DNA, 25 bp, Homo sapien
agccaggggcggtggtgtgtgcctg

SEQ ID NO: 5663377 - DNA, 25 bp, Homo sapien
tagtcccagctactggggaggctga

SEQ ID NO: 5663378 - DNA, 25 bp, Homo sapien
ctactggggaggctgaggcacaaga

SEQ ID NO: 5663379 - DNA, 25 bp, Homo sapien
aattagccaggggcggtggtgtgtg

SEQ ID NO: 5663380 - DNA, 25 bp, Homo sapien
gctactggggaggctgaggcacaag

SEQ ID NO: 5663381 - DNA, 25 bp, Homo sapien
gacagtctcactttgtcacccaggc

SEQ ID NO: 5663382 - DNA, 25 bp, Homo sapien
gagacagtctcactttgtcacccag

SEQ ID NO: 5663383 - DNA, 25 bp, Homo sapien
agacagtctcactttgtcacccagg

SEQ ID NO: 5663384 - DNA, 25 bp, Homo sapien
ctgggtgacaaagtgagactgtctc

SEQ ID NO: 5663385 - DNA, 25 bp, Homo sapien
cctgggtgacaaagtgagactgtct

SEQ ID NO: 5663386 - DNA, 25 bp, Homo sapien
gcctgggtgacaaagtgagactgtc

SEQ ID NO: 5663387 - DNA, 25 bp, Homo sapien
aggataggatgagagtgtttgggcc

SEQ ID NO: 5663388 - DNA, 25 bp, Homo sapien
gaggataggatgagagtgtttgggc

SEQ ID NO: 5663389 - DNA, 25 bp, Homo sapien
ggataggatgagagtgtttgggccc

SEQ ID NO: 5663390 - DNA, 25 bp, Homo sapien
gggcccaaacactctcatcctatcc

SEQ ID NO: 5663391 - DNA, 25 bp, Homo sapien
gcccaaacactctcatcctatcctc

SEQ ID NO: 5663392 - DNA, 25 bp, Homo sapien
ggcccaaacactctcatcctatcct

SEQ ID NO: 5663393 - DNA, 25 bp, Homo sapien
cccggtgagcctggaaatgaggata

SEQ ID NO: 5663394 - DNA, 25 bp, Homo sapien
tgtgtcccggtgagcctggaaatga

SEQ ID NO: 5663395 - DNA, 25 bp, Homo sapien
atgagagtgtttgggccctagagaa

SEQ ID NO: 5663396 - DNA, 25 bp, Homo sapien
tgtagctcatgtgtcccggtgagcc

SEQ ID NO: 5663397 - DNA, 25 bp, Homo sapien
ggataggatgagagtgtttgggccc

SEQ ID NO: 5663398 - DNA, 25 bp, Homo sapien
aaatgaggataggatgagagtgttt

SEQ ID NO: 5663399 - DNA, 25 bp, Homo sapien
tagggcccaaacactctcatcctat

SEQ ID NO: 5663400 - DNA, 25 bp, Homo sapien
catttccaggctcaccgggacacat

SEQ ID NO: 5663401 - DNA, 25 bp, Homo sapien
ttctctagggcccaaacactctcat

SEQ ID NO: 5663402 - DNA, 25 bp, Homo sapien
tatcctcatttccaggctcaccggg

SEQ ID NO: 5663403 - DNA, 25 bp, Homo sapien
aaacactctcatcctatcctcattt

SEQ ID NO: 5663404 - DNA, 25 bp, Homo sapien
ggctcaccgggacacatgagctaca

SEQ ID NO: 5663405 - DNA, 25 bp, Homo sapien
tgtttgctcactcggccttccttct

SEQ ID NO: 5663406 - DNA, 25 bp, Homo sapien
ttgctcactcggccttccttctgtc

SEQ ID NO: 5663407 - DNA, 25 bp, Homo sapien
gtttgctcactcggccttccttctg

SEQ ID NO: 5663408 - DNA, 25 bp, Homo sapien
tgctcactcggccttccttctgtcc

SEQ ID NO: 5663409 - DNA, 25 bp, Homo sapien
tttgctcactcggccttccttctgt

SEQ ID NO: 5663410 - DNA, 25 bp, Homo sapien
ccctattcgccgactccagaagaaa

SEQ ID NO: 5663411 - DNA, 25 bp, Homo sapien
tgctgtcgaactgctccagaaggca

SEQ ID NO: 5663412 - DNA, 25 bp, Homo sapien
gccctattcgccgactccagaagaa

SEQ ID NO: 5663413 - DNA, 25 bp, Homo sapien
tttcttctggagtcggcgaataggg

SEQ ID NO: 5663414 - DNA, 25 bp, Homo sapien
ttcttctggagtcggcgaatagggc

SEQ ID NO: 5663415 - DNA, 25 bp, Homo sapien
tgccttctggagcagttcgacagca

SEQ ID NO: 5663416 - DNA, 25 bp, Homo sapien
gacagaaggaaggccgagtgagcaa

SEQ ID NO: 5663417 - DNA, 25 bp, Homo sapien
ggacagaaggaaggccgagtgagca

SEQ ID NO: 5663418 - DNA, 25 bp, Homo sapien
cagaaggaaggccgagtgagcaaac

SEQ ID NO: 5663419 - DNA, 25 bp, Homo sapien
acagaaggaaggccgagtgagcaaa

SEQ ID NO: 5663420 - DNA, 25 bp, Homo sapien
agaaggaaggccgagtgagcaaaca

SEQ ID NO: 5663421 - DNA, 25 bp, Homo sapien
tgtttgctcactcggccttccttct

SEQ ID NO: 5663422 - DNA, 25 bp, Homo sapien
tgctgtcgaactgctccagaaggca

SEQ ID NO: 5663423 - DNA, 25 bp, Homo sapien
tgctcactcggccttccttctgtcc

SEQ ID NO: 5663424 - DNA, 25 bp, Homo sapien
ttctgtcccttgcagacattgctgt

SEQ ID NO: 5663425 - DNA, 25 bp, Homo sapien
gccctattcgccgactccagaagaa

SEQ ID NO: 5663426 - DNA, 25 bp, Homo sapien
tgtcccttgcagacattgctgtcga

SEQ ID NO: 5663427 - DNA, 25 bp, Homo sapien
ggacagaaggaaggccgagtgagca

SEQ ID NO: 5663428 - DNA, 25 bp, Homo sapien
ttcttctggagtcggcgaatagggc

SEQ ID NO: 5663429 - DNA, 25 bp, Homo sapien
tcgacagcaatgtctgcaagggaca

SEQ ID NO: 5663430 - DNA, 25 bp, Homo sapien
acagcaatgtctgcaagggacagaa

SEQ ID NO: 5663431 - DNA, 25 bp, Homo sapien
tgccttctggagcagttcgacagca

SEQ ID NO: 5663432 - DNA, 25 bp, Homo sapien
agaaggaaggccgagtgagcaaaca

SEQ ID NO: 5663433 - DNA, 25 bp, Homo sapien
catatgttccccaagtaaacaaggc

SEQ ID NO: 5663434 - DNA, 25 bp, Homo sapien
tatccatcatatgttccccaagtaa

SEQ ID NO: 5663435 - DNA, 25 bp, Homo sapien
tgttccccaagtaaacaaggcatgt

SEQ ID NO: 5663436 - DNA, 25 bp, Homo sapien
aaagctaattttcgaaggatatcca

SEQ ID NO: 5663437 - DNA, 25 bp, Homo sapien
tccccaagtaaacaaggcatgttta

SEQ ID NO: 5663438 - DNA, 25 bp, Homo sapien
gctaattttcgaaggatatccatca

SEQ ID NO: 5663439 - DNA, 25 bp, Homo sapien
tgatggatatccttcgaaaattagc

SEQ ID NO: 5663440 - DNA, 25 bp, Homo sapien
tggatatccttcgaaaattagcttt

SEQ ID NO: 5663441 - DNA, 25 bp, Homo sapien
taaacatgccttgtttacttgggga

SEQ ID NO: 5663442 - DNA, 25 bp, Homo sapien
acatatgatggatatccttcgaaaa

SEQ ID NO: 5663443 - DNA, 25 bp, Homo sapien
gatggatatccttcgaaaattagct

SEQ ID NO: 5663444 - DNA, 25 bp, Homo sapien
ttacttggggaacatatgatggata

SEQ ID NO: 5663445 - DNA, 25 bp, Homo sapien
cattgctagctcgttggtacttggt

SEQ ID NO: 5663446 - DNA, 25 bp, Homo sapien
gggcagtttgcatttcccattcttt

SEQ ID NO: 5663447 - DNA, 25 bp, Homo sapien
caagagggcagtttgcatttcccat

SEQ ID NO: 5663448 - DNA, 25 bp, Homo sapien
tcttcattgctagctcgttggtact

SEQ ID NO: 5663449 - DNA, 25 bp, Homo sapien
gctagctcgttggtacttggttcaa

SEQ ID NO: 5663450 - DNA, 25 bp, Homo sapien
ctcgttggtacttggttcaagaggg

SEQ ID NO: 5663451 - DNA, 25 bp, Homo sapien
gaatgggaaatgcaaactgccctct

SEQ ID NO: 5663452 - DNA, 25 bp, Homo sapien
tcttgaaccaagtaccaacgagcta

SEQ ID NO: 5663453 - DNA, 25 bp, Homo sapien
ccctcttgaaccaagtaccaacgag

SEQ ID NO: 5663454 - DNA, 25 bp, Homo sapien
agtaccaacgagctagcaatgaaga

SEQ ID NO: 5663455 - DNA, 25 bp, Homo sapien
tgaaccaagtaccaacgagctagca

SEQ ID NO: 5663456 - DNA, 25 bp, Homo sapien
aaagaatgggaaatgcaaactgccc

SEQ ID NO: 5663457 - DNA, 25 bp, Homo sapien
gactggacaagtgagaagcatgaaa

SEQ ID NO: 5663458 - DNA, 25 bp, Homo sapien
aaaatggctcgaggtttgccccgtg

SEQ ID NO: 5663459 - DNA, 25 bp, Homo sapien
tgtgactggacaagtgagaagcatg

SEQ ID NO: 5663460 - DNA, 25 bp, Homo sapien
cagaaaatggctcgaggtttgcccc

SEQ ID NO: 5663461 - DNA, 25 bp, Homo sapien
tggacaagtgagaagcatgaaaatg

SEQ ID NO: 5663462 - DNA, 25 bp, Homo sapien
taggcagtgttgtgtgactggacaa

SEQ ID NO: 5663463 - DNA, 25 bp, Homo sapien
cacggggcaaacctcgagccatttt

SEQ ID NO: 5663464 - DNA, 25 bp, Homo sapien
catgcttctcacttgtccagtcaca

SEQ ID NO: 5663465 - DNA, 25 bp, Homo sapien
tttcatgcttctcacttgtccagtc

SEQ ID NO: 5663466 - DNA, 25 bp, Homo sapien
cattttcatgcttctcacttgtcca

SEQ ID NO: 5663467 - DNA, 25 bp, Homo sapien
tgtccagtcacacaacactgcctaa

SEQ ID NO: 5663468 - DNA, 25 bp, Homo sapien
gggcaaacctcgagccattttctgc

SEQ ID NO: 5663469 - DNA, 25 bp, Homo sapien
aggctctactatggctgggactggg

SEQ ID NO: 5663470 - DNA, 25 bp, Homo sapien
actgggaagccgactgtagcctgga

SEQ ID NO: 5663471 - DNA, 25 bp, Homo sapien
cagaagctgagtgcccggatccgaa

SEQ ID NO: 5663472 - DNA, 25 bp, Homo sapien
caccagaagctgagtgcccggatcc

SEQ ID NO: 5663473 - DNA, 25 bp, Homo sapien
aaggaggctctactatggctgggac

SEQ ID NO: 5663474 - DNA, 25 bp, Homo sapien
aagccgactgtagcctggaggagct

SEQ ID NO: 5663475 - DNA, 25 bp, Homo sapien
gtcccagccatagtagagcctcctt

SEQ ID NO: 5663476 - DNA, 25 bp, Homo sapien
agtcccagccatagtagagcctcct

SEQ ID NO: 5663477 - DNA, 25 bp, Homo sapien
ttcggatccgggcactcagcttctg

SEQ ID NO: 5663478 - DNA, 25 bp, Homo sapien
ggatccgggcactcagcttctggtg

SEQ ID NO: 5663479 - DNA, 25 bp, Homo sapien
tccaggctacagtcggcttcccagt

SEQ ID NO: 5663480 - DNA, 25 bp, Homo sapien
agctcctccaggctacagtcggctt

SEQ ID NO: 5663481 - DNA, 25 bp, Homo sapien
gccaggatctgcatcatacctttcc

SEQ ID NO: 5663482 - DNA, 25 bp, Homo sapien
agccaggatctgcatcatacctttc

SEQ ID NO: 5663483 - DNA, 25 bp, Homo sapien
ggaaaggtatgatgcagatcctggc

SEQ ID NO: 5663484 - DNA, 25 bp, Homo sapien
gaaaggtatgatgcagatcctggct

SEQ ID NO: 5663485 - DNA, 25 bp, Homo sapien
tgccccgccttccagcccagagcca

SEQ ID NO: 5663486 - DNA, 25 bp, Homo sapien
cagcccagagccaggatctgcatca

SEQ ID NO: 5663487 - DNA, 25 bp, Homo sapien
gatctgcatcatacctttccgtgcc

SEQ ID NO: 5663488 - DNA, 25 bp, Homo sapien
agagccaggatctgcatcatacctt

SEQ ID NO: 5663489 - DNA, 25 bp, Homo sapien
gcccagagccaggatctgcatcata

SEQ ID NO: 5663490 - DNA, 25 bp, Homo sapien
tgcccctgccctgtttcagttcctc

SEQ ID NO: 5663491 - DNA, 25 bp, Homo sapien
ccgcggctgcttgggccgggaggga

SEQ ID NO: 5663492 - DNA, 25 bp, Homo sapien
gcggagtataggaatgggcgtaggg

SEQ ID NO: 5663493 - DNA, 25 bp, Homo sapien
tggccacacgagggcccttctcgga

SEQ ID NO: 5663494 - DNA, 25 bp, Homo sapien
gggagagccgcggagtataggaatg

SEQ ID NO: 5663495 - DNA, 25 bp, Homo sapien
gccgcggagtataggaatgggcgta

SEQ ID NO: 5663496 - DNA, 25 bp, Homo sapien
gagagccgcggagtataggaatggg

SEQ ID NO: 5663497 - DNA, 25 bp, Homo sapien
tccgagaagggccctcgtgtggcca

SEQ ID NO: 5663498 - DNA, 25 bp, Homo sapien
cctacgcccattcctatactccgcg

SEQ ID NO: 5663499 - DNA, 25 bp, Homo sapien
tccctcccggcccaagcagccgcgg

SEQ ID NO: 5663500 - DNA, 25 bp, Homo sapien
cattcctatactccgcggctctccc

SEQ ID NO: 5663501 - DNA, 25 bp, Homo sapien
cacccctacgcccattcctatactc

SEQ ID NO: 5663502 - DNA, 25 bp, Homo sapien
tacgcccattcctatactccgcggc

SEQ ID NO: 5663503 - DNA, 25 bp, Homo sapien
ccgcggctgcttgggccgggaggga

SEQ ID NO: 5663504 - DNA, 25 bp, Homo sapien
ccgcggagtataggaatgggcgtag

SEQ ID NO: 5663505 - DNA, 25 bp, Homo sapien
cacgagggcccttctcggagaactt

SEQ ID NO: 5663506 - DNA, 25 bp, Homo sapien
gggtggccacacgagggcccttctc

SEQ ID NO: 5663507 - DNA, 25 bp, Homo sapien
gggagagccgcggagtataggaatg

SEQ ID NO: 5663508 - DNA, 25 bp, Homo sapien
gcttccttgaggccgcggctgcttg

SEQ ID NO: 5663509 - DNA, 25 bp, Homo sapien
tccctcccggcccaagcagccgcgg

SEQ ID NO: 5663510 - DNA, 25 bp, Homo sapien
cattcctatactccgcggctctccc

SEQ ID NO: 5663511 - DNA, 25 bp, Homo sapien
caagcagccgcggcctcaaggaagc

SEQ ID NO: 5663512 - DNA, 25 bp, Homo sapien
tacgcccattcctatactccgcggc

SEQ ID NO: 5663513 - DNA, 25 bp, Homo sapien
aagttctccgagaagggccctcgtg

SEQ ID NO: 5663514 - DNA, 25 bp, Homo sapien
gagaagggccctcgtgtggccaccc

SEQ ID NO: 5663515 - DNA, 25 bp, Homo sapien
cggcctgagcggcgctgcgagctcg

SEQ ID NO: 5663516 - DNA, 25 bp, Homo sapien
ctcccggcctgagcggcgctgcgag

SEQ ID NO: 5663517 - DNA, 25 bp, Homo sapien
agctcgcctgactgctgtgccggga

SEQ ID NO: 5663518 - DNA, 25 bp, Homo sapien
ccctcccggcctgagcggcgctgcg

SEQ ID NO: 5663519 - DNA, 25 bp, Homo sapien
ggcctgagcggcgctgcgagctcgc

SEQ ID NO: 5663520 - DNA, 25 bp, Homo sapien
cctcccggcctgagcggcgctgcga

SEQ ID NO: 5663521 - DNA, 25 bp, Homo sapien
ctcgcagcgccgctcaggccgggag

SEQ ID NO: 5663522 - DNA, 25 bp, Homo sapien
tcgcagcgccgctcaggccgggagg

SEQ ID NO: 5663523 - DNA, 25 bp, Homo sapien
cgagctcgcagcgccgctcaggccg

SEQ ID NO: 5663524 - DNA, 25 bp, Homo sapien
tcccggcacagcagtcaggcgagct

SEQ ID NO: 5663525 - DNA, 25 bp, Homo sapien
gcgagctcgcagcgccgctcaggcc

SEQ ID NO: 5663526 - DNA, 25 bp, Homo sapien
cgcagcgccgctcaggccgggaggg

SEQ ID NO: 5663527 - DNA, 25 bp, Homo sapien
actgggcggcagctgctcgagcagt

SEQ ID NO: 5663528 - DNA, 25 bp, Homo sapien
tcgcctgactgctgtgccgggactg

SEQ ID NO: 5663529 - DNA, 25 bp, Homo sapien
agctcgcctgactgctgtgccggga

SEQ ID NO: 5663530 - DNA, 25 bp, Homo sapien
tgctgtgccgggactgggcggcagc

SEQ ID NO: 5663531 - DNA, 25 bp, Homo sapien
agcggcgctgcgagctcgcctgact

SEQ ID NO: 5663532 - DNA, 25 bp, Homo sapien
cctcccggcctgagcggcgctgcga

SEQ ID NO: 5663533 - DNA, 25 bp, Homo sapien
gcacagcagtcaggcgagctcgcag

SEQ ID NO: 5663534 - DNA, 25 bp, Homo sapien
cagtcccggcacagcagtcaggcga

SEQ ID NO: 5663535 - DNA, 25 bp, Homo sapien
tcgcagcgccgctcaggccgggagg

SEQ ID NO: 5663536 - DNA, 25 bp, Homo sapien
agtcaggcgagctcgcagcgccgct

SEQ ID NO: 5663537 - DNA, 25 bp, Homo sapien
actgctcgagcagctgccgcccagt

SEQ ID NO: 5663538 - DNA, 25 bp, Homo sapien
tcccggcacagcagtcaggcgagct

SEQ ID NO: 5663539 - DNA, 25 bp, Homo sapien
atggacctgaccgggctcctgctgg

SEQ ID NO: 5663540 - DNA, 25 bp, Homo sapien
ctcctgctggacgaagaaggcacct

SEQ ID NO: 5663541 - DNA, 25 bp, Homo sapien
caccttctccctcgccggcttccag

SEQ ID NO: 5663542 - DNA, 25 bp, Homo sapien
tcctgctggacgaagaaggcacctt

SEQ ID NO: 5663543 - DNA, 25 bp, Homo sapien
tccctcgccggcttccaggacttca

SEQ ID NO: 5663544 - DNA, 25 bp, Homo sapien
ggcaccttctccctcgccggcttcc

SEQ ID NO: 5663545 - DNA, 25 bp, Homo sapien
ggaagccggcgagggagaaggtgcc

SEQ ID NO: 5663546 - DNA, 25 bp, Homo sapien
ctggaagccggcgagggagaaggtg

SEQ ID NO: 5663547 - DNA, 25 bp, Homo sapien
aaggtgccttcttcgtccagcagga

SEQ ID NO: 5663548 - DNA, 25 bp, Homo sapien
aggtgccttcttcgtccagcaggag

SEQ ID NO: 5663549 - DNA, 25 bp, Homo sapien
ccagcaggagcccggtcaggtccat

SEQ ID NO: 5663550 - DNA, 25 bp, Homo sapien
tgaagtcctggaagccggcgaggga

SEQ ID NO: 5663551 - DNA, 25 bp, Homo sapien
cacctgttgggccctttagtctggg

SEQ ID NO: 5663552 - DNA, 25 bp, Homo sapien
tacactgtcttagtacagtgttttg

SEQ ID NO: 5663553 - DNA, 25 bp, Homo sapien
gggccctttagtctggggacataca

SEQ ID NO: 5663554 - DNA, 25 bp, Homo sapien
tactcacctgttgggccctttagtc

SEQ ID NO: 5663555 - DNA, 25 bp, Homo sapien
gacatacactgtcttagtacagtgt

SEQ ID NO: 5663556 - DNA, 25 bp, Homo sapien
gggacatacactgtcttagtacagt

SEQ ID NO: 5663557 - DNA, 25 bp, Homo sapien
gactaaagggcccaacaggtgagta

SEQ ID NO: 5663558 - DNA, 25 bp, Homo sapien
caaaacactgtactaagacagtgta

SEQ ID NO: 5663559 - DNA, 25 bp, Homo sapien
gacagtgtatgtccccagactaaag

SEQ ID NO: 5663560 - DNA, 25 bp, Homo sapien
taagacagtgtatgtccccagacta

SEQ ID NO: 5663561 - DNA, 25 bp, Homo sapien
tgtatgtccccagactaaagggccc

SEQ ID NO: 5663562 - DNA, 25 bp, Homo sapien
tgtactaagacagtgtatgtcccca

SEQ ID NO: 5663563 - DNA, 25 bp, Homo sapien
gtggcgggatctcacaccattcttc

SEQ ID NO: 5663564 - DNA, 25 bp, Homo sapien
agtggcgggatctcacaccattctt

SEQ ID NO: 5663565 - DNA, 25 bp, Homo sapien
gaagaatggtgtgagatcccgccac

SEQ ID NO: 5663566 - DNA, 25 bp, Homo sapien
aagaatggtgtgagatcccgccact

SEQ ID NO: 5663567 - DNA, 25 bp, Homo sapien
gtggcgggatctcacaccattcttc

SEQ ID NO: 5663568 - DNA, 25 bp, Homo sapien
agtggcgggatctcacaccattctt

SEQ ID NO: 5663569 - DNA, 25 bp, Homo sapien
tggcgggatctcacaccattcttct

SEQ ID NO: 5663570 - DNA, 25 bp, Homo sapien
gcgggatctcacaccattcttctgc

SEQ ID NO: 5663571 - DNA, 25 bp, Homo sapien
gggatctcacaccattcttctgcct

SEQ ID NO: 5663572 - DNA, 25 bp, Homo sapien
ggcgggatctcacaccattcttctg

SEQ ID NO: 5663573 - DNA, 25 bp, Homo sapien
gcagaagaatggtgtgagatcccgc

SEQ ID NO: 5663574 - DNA, 25 bp, Homo sapien
agaagaatggtgtgagatcccgcca

SEQ ID NO: 5663575 - DNA, 25 bp, Homo sapien
cagaagaatggtgtgagatcccgcc

SEQ ID NO: 5663576 - DNA, 25 bp, Homo sapien
aggcagaagaatggtgtgagatccc

SEQ ID NO: 5663577 - DNA, 25 bp, Homo sapien
gaagaatggtgtgagatcccgccac

SEQ ID NO: 5663578 - DNA, 25 bp, Homo sapien
aagaatggtgtgagatcccgccact

SEQ ID NO: 5663579 - DNA, 25 bp, Homo sapien
ttaagaagtacaagaggccgggcac

SEQ ID NO: 5663580 - DNA, 25 bp, Homo sapien
gtgcccggcctcttgtacttcttaa

SEQ ID NO: 5663581 - DNA, 25 bp, Homo sapien
aagaggccgggcacaatggctcacg

SEQ ID NO: 5663582 - DNA, 25 bp, Homo sapien
agaagtacaagaggccgggcacaat

SEQ ID NO: 5663583 - DNA, 25 bp, Homo sapien
accgtgcccggccagtacaagtgtt

SEQ ID NO: 5663584 - DNA, 25 bp, Homo sapien
ttaagaagtacaagaggccgggcac

SEQ ID NO: 5663585 - DNA, 25 bp, Homo sapien
taagaagtacaagaggccgggcaca

SEQ ID NO: 5663586 - DNA, 25 bp, Homo sapien
cgtgcccggccagtacaagtgtttt

SEQ ID NO: 5663587 - DNA, 25 bp, Homo sapien
gtgcccggcctcttgtacttcttaa

SEQ ID NO: 5663588 - DNA, 25 bp, Homo sapien
gtgagccattgtgcccggcctcttg

SEQ ID NO: 5663589 - DNA, 25 bp, Homo sapien
attgtgcccggcctcttgtacttct

SEQ ID NO: 5663590 - DNA, 25 bp, Homo sapien
aacacttgtactggccgggcacggt

SEQ ID NO: 5663591 - DNA, 25 bp, Homo sapien
cgtgagccattgtgcccggcctctt

SEQ ID NO: 5663592 - DNA, 25 bp, Homo sapien
aaaacacttgtactggccgggcacg

SEQ ID NO: 5663593 - DNA, 25 bp, Homo sapien
ttagctgggcatggtaatcctgtaa

SEQ ID NO: 5663594 - DNA, 25 bp, Homo sapien
ttacaggattaccatgcccagctaa

SEQ ID NO: 5663595 - DNA, 25 bp, Homo sapien
gggcatggtaatcctgtaatcccag

SEQ ID NO: 5663596 - DNA, 25 bp, Homo sapien
ggcatggtaatcctgtaatcccagc

SEQ ID NO: 5663597 - DNA, 25 bp, Homo sapien
tgggcatggtaatcctgtaatccca

SEQ ID NO: 5663598 - DNA, 25 bp, Homo sapien
ctgggcatggtaatcctgtaatccc

SEQ ID NO: 5663599 - DNA, 25 bp, Homo sapien
ctgggattacaggattaccatgccc

SEQ ID NO: 5663600 - DNA, 25 bp, Homo sapien
gctgggattacaggattaccatgcc

SEQ ID NO: 5663601 - DNA, 25 bp, Homo sapien
gggattacaggattaccatgcccag

SEQ ID NO: 5663602 - DNA, 25 bp, Homo sapien
tgggattacaggattaccatgccca

SEQ ID NO: 5663603 - DNA, 25 bp, Homo sapien
tccgtctcaaagaggtgcaaggccg

SEQ ID NO: 5663604 - DNA, 25 bp, Homo sapien
ccgtctcaaagaggtgcaaggccgg

SEQ ID NO: 5663605 - DNA, 25 bp, Homo sapien
ccggccttgcacctctttgagacgg

SEQ ID NO: 5663606 - DNA, 25 bp, Homo sapien
cggccttgcacctctttgagacgga

SEQ ID NO: 5663607 - DNA, 25 bp, Homo sapien
tccgtctcaaagaggtgcaaggccg

SEQ ID NO: 5663608 - DNA, 25 bp, Homo sapien
agcaaagctccgtctcaaagaggtg

SEQ ID NO: 5663609 - DNA, 25 bp, Homo sapien
ccgtctcaaagaggtgcaaggccgg

SEQ ID NO: 5663610 - DNA, 25 bp, Homo sapien
tgggcaaggagagcaaagctccgtc

SEQ ID NO: 5663611 - DNA, 25 bp, Homo sapien
ctcaaagaggtgcaaggccgggcac

SEQ ID NO: 5663612 - DNA, 25 bp, Homo sapien
caaagctccgtctcaaagaggtgca

SEQ ID NO: 5663613 - DNA, 25 bp, Homo sapien
tgcccggccttgcacctctttgaga

SEQ ID NO: 5663614 - DNA, 25 bp, Homo sapien
tgcacctctttgagacggagctttg

SEQ ID NO: 5663615 - DNA, 25 bp, Homo sapien
ccggccttgcacctctttgagacgg

SEQ ID NO: 5663616 - DNA, 25 bp, Homo sapien
cggccttgcacctctttgagacgga

SEQ ID NO: 5663617 - DNA, 25 bp, Homo sapien
gtgcccggccttgcacctctttgag

SEQ ID NO: 5663618 - DNA, 25 bp, Homo sapien
cacctctttgagacggagctttgct

SEQ ID NO: 5663619 - DNA, 25 bp, Homo sapien
aggtgcgagaattgagaaagtcctg

SEQ ID NO: 5663620 - DNA, 25 bp, Homo sapien
ctccagcaaaagaggtgcgagaatt

SEQ ID NO: 5663621 - DNA, 25 bp, Homo sapien
cctccagcaaaagaggtgcgagaat

SEQ ID NO: 5663622 - DNA, 25 bp, Homo sapien
tccagcaaaagaggtgcgagaattg

SEQ ID NO: 5663623 - DNA, 25 bp, Homo sapien
aattctcgcacctcttttgctggag

SEQ ID NO: 5663624 - DNA, 25 bp, Homo sapien
attctcgcacctcttttgctggagg

SEQ ID NO: 5663625 - DNA, 25 bp, Homo sapien
caggactttctcaattctcgcacct

SEQ ID NO: 5663626 - DNA, 25 bp, Homo sapien
caattctcgcacctcttttgctgga

SEQ ID NO: 5663627 - DNA, 25 bp, Homo sapien
ctgggttggctgacctaaaggggca

SEQ ID NO: 5663628 - DNA, 25 bp, Homo sapien
actctgggttggctgacctaaaggg

SEQ ID NO: 5663629 - DNA, 25 bp, Homo sapien
tttactctgggttggctgacctaaa

SEQ ID NO: 5663630 - DNA, 25 bp, Homo sapien
tctgggttggctgacctaaaggggc

SEQ ID NO: 5663631 - DNA, 25 bp, Homo sapien
ttactctgggttggctgacctaaag

SEQ ID NO: 5663632 - DNA, 25 bp, Homo sapien
ggttggctgacctaaaggggcagag

SEQ ID NO: 5663633 - DNA, 25 bp, Homo sapien
ccctttaggtcagccaacccagagt

SEQ ID NO: 5663634 - DNA, 25 bp, Homo sapien
ctctgcccctttaggtcagccaacc

SEQ ID NO: 5663635 - DNA, 25 bp, Homo sapien
tttaggtcagccaacccagagtaaa

SEQ ID NO: 5663636 - DNA, 25 bp, Homo sapien
ctttaggtcagccaacccagagtaa

SEQ ID NO: 5663637 - DNA, 25 bp, Homo sapien
cccctttaggtcagccaacccagag

SEQ ID NO: 5663638 - DNA, 25 bp, Homo sapien
tgcccctttaggtcagccaacccag

SEQ ID NO: 5663639 - DNA, 25 bp, Homo sapien
actctgggttggctgacctaaaggg

SEQ ID NO: 5663640 - DNA, 25 bp, Homo sapien
tttactctgggttggctgacctaaa

SEQ ID NO: 5663641 - DNA, 25 bp, Homo sapien
ttactctgggttggctgacctaaag

SEQ ID NO: 5663642 - DNA, 25 bp, Homo sapien
ggttggctgacctaaaggggcagag

SEQ ID NO: 5663643 - DNA, 25 bp, Homo sapien
agagagaggccggacaccatggctc

SEQ ID NO: 5663644 - DNA, 25 bp, Homo sapien
gagaggccggacaccatggctcacg

SEQ ID NO: 5663645 - DNA, 25 bp, Homo sapien
atggtggctggcacatgtaatccca

SEQ ID NO: 5663646 - DNA, 25 bp, Homo sapien
catggtggctggcacatgtaatccc

SEQ ID NO: 5663647 - DNA, 25 bp, Homo sapien
ggcatggtggctggcacatgtaatc

SEQ ID NO: 5663648 - DNA, 25 bp, Homo sapien
agctattccggaggctgaggtggga

SEQ ID NO: 5663649 - DNA, 25 bp, Homo sapien
gaatcgcttgagtttgggaggtgga

SEQ ID NO: 5663650 - DNA, 25 bp, Homo sapien
cgcttgagtttgggaggtggaggct

SEQ ID NO: 5663651 - DNA, 25 bp, Homo sapien
tcccacctcagcctccggaatagct

SEQ ID NO: 5663652 - DNA, 25 bp, Homo sapien
gattacatgtgccagccaccatgcc

SEQ ID NO: 5663653 - DNA, 25 bp, Homo sapien
agcctccacctcccaaactcaagcg

SEQ ID NO: 5663654 - DNA, 25 bp, Homo sapien
gggattacatgtgccagccaccatg

SEQ ID NO: 5663655 - DNA, 25 bp, Homo sapien
tgggattacatgtgccagccaccat

SEQ ID NO: 5663656 - DNA, 25 bp, Homo sapien
tccacctcccaaactcaagcgattc

SEQ ID NO: 5663657 - DNA, 25 bp, Homo sapien
ggggttgaggcagctagtgtttggg

SEQ ID NO: 5663658 - DNA, 25 bp, Homo sapien
gggttgaggcagctagtgtttgggc

SEQ ID NO: 5663659 - DNA, 25 bp, Homo sapien
ttgaggcagctagtgtttgggctgt

SEQ ID NO: 5663660 - DNA, 25 bp, Homo sapien
gttgaggcagctagtgtttgggctg

SEQ ID NO: 5663661 - DNA, 25 bp, Homo sapien
ggttgaggcagctagtgtttgggct

SEQ ID NO: 5663662 - DNA, 25 bp, Homo sapien
cccaaacactagctgcctcaacccc

SEQ ID NO: 5663663 - DNA, 25 bp, Homo sapien
acagcccaaacactagctgcctcaa

SEQ ID NO: 5663664 - DNA, 25 bp, Homo sapien
gcccaaacactagctgcctcaaccc

SEQ ID NO: 5663665 - DNA, 25 bp, Homo sapien
cagcccaaacactagctgcctcaac

SEQ ID NO: 5663666 - DNA, 25 bp, Homo sapien
agcccaaacactagctgcctcaacc

SEQ ID NO: 5663667 - DNA, 25 bp, Homo sapien
ataataataaaagggcagagagagc

SEQ ID NO: 5663668 - DNA, 25 bp, Homo sapien
gggttgaggcagctagtgtttgggc

SEQ ID NO: 5663669 - DNA, 25 bp, Homo sapien
gagagagctgtttcttgggtgctgg

SEQ ID NO: 5663670 - DNA, 25 bp, Homo sapien
gaggcagctagtgtttgggctgtca

SEQ ID NO: 5663671 - DNA, 25 bp, Homo sapien
ataaaagggcagagagagctgtttc

SEQ ID NO: 5663672 - DNA, 25 bp, Homo sapien
taataaaagggcagagagagctgtt

SEQ ID NO: 5663673 - DNA, 25 bp, Homo sapien
gctctctctgcccttttattattat

SEQ ID NO: 5663674 - DNA, 25 bp, Homo sapien
tgacagcccaaacactagctgcctc

SEQ ID NO: 5663675 - DNA, 25 bp, Homo sapien
catcccagcacccaagaaacagctc

SEQ ID NO: 5663676 - DNA, 25 bp, Homo sapien
ccagcacccaagaaacagctctctc

SEQ ID NO: 5663677 - DNA, 25 bp, Homo sapien
gaaacagctctctctgcccttttat

SEQ ID NO: 5663678 - DNA, 25 bp, Homo sapien
agcccaaacactagctgcctcaacc

SEQ ID NO: 5663679 - DNA, 25 bp, Homo sapien
atactaagaattatctgggcctggt

SEQ ID NO: 5663680 - DNA, 25 bp, Homo sapien
ctaagaattatctgggcctggtggt

SEQ ID NO: 5663681 - DNA, 25 bp, Homo sapien
aaatactaagaattatctgggcctg

SEQ ID NO: 5663682 - DNA, 25 bp, Homo sapien
aaaatactaagaattatctgggcct

SEQ ID NO: 5663683 - DNA, 25 bp, Homo sapien
ctaaaaaatactaagaattatctgg

SEQ ID NO: 5663684 - DNA, 25 bp, Homo sapien
cctaaaaaatactaagaattatctg

SEQ ID NO: 5663685 - DNA, 25 bp, Homo sapien
accaggcccagataattcttagtat

SEQ ID NO: 5663686 - DNA, 25 bp, Homo sapien
cagataattcttagtattttttagg

SEQ ID NO: 5663687 - DNA, 25 bp, Homo sapien
ccagataattcttagtattttttag

SEQ ID NO: 5663688 - DNA, 25 bp, Homo sapien
aggcccagataattcttagtatttt

SEQ ID NO: 5663689 - DNA, 25 bp, Homo sapien
caggcccagataattcttagtattt

SEQ ID NO: 5663690 - DNA, 25 bp, Homo sapien
accaccaggcccagataattcttag

SEQ ID NO: 5663691 - DNA, 25 bp, Homo sapien
aggcggaagttgcagggagggctga

SEQ ID NO: 5663692 - DNA, 25 bp, Homo sapien
tgcagggagggctgagatagcacca

SEQ ID NO: 5663693 - DNA, 25 bp, Homo sapien
tgcactgcagtctgacaacagcaag

SEQ ID NO: 5663694 - DNA, 25 bp, Homo sapien
actgcagtctgacaacagcaagact

SEQ ID NO: 5663695 - DNA, 25 bp, Homo sapien
gcactgcagtctgacaacagcaaga

SEQ ID NO: 5663696 - DNA, 25 bp, Homo sapien
cagtctgacaacagcaagactccat

SEQ ID NO: 5663697 - DNA, 25 bp, Homo sapien
tggtgctatctcagccctccctgca

SEQ ID NO: 5663698 - DNA, 25 bp, Homo sapien
cttgctgttgtcagactgcagtgca

SEQ ID NO: 5663699 - DNA, 25 bp, Homo sapien
tcttgctgttgtcagactgcagtgc

SEQ ID NO: 5663700 - DNA, 25 bp, Homo sapien
atggagtcttgctgttgtcagactg

SEQ ID NO: 5663701 - DNA, 25 bp, Homo sapien
gagtcttgctgttgtcagactgcag

SEQ ID NO: 5663702 - DNA, 25 bp, Homo sapien
tcagccctccctgcaacttccgcct

SEQ ID NO: 5663703 - DNA, 25 bp, Homo sapien
gcctctgtccttagcctgataatcc

SEQ ID NO: 5663704 - DNA, 25 bp, Homo sapien
gagatttatgctgcctctgtcctta

SEQ ID NO: 5663705 - DNA, 25 bp, Homo sapien
ctgccttaatgagatttatgctgcc

SEQ ID NO: 5663706 - DNA, 25 bp, Homo sapien
gctgggaaaatgttaaatctgcctt

SEQ ID NO: 5663707 - DNA, 25 bp, Homo sapien
aaaaaagacgctgggtgatggatga

SEQ ID NO: 5663708 - DNA, 25 bp, Homo sapien
tatgctgcctctgtccttagcctga

SEQ ID NO: 5663709 - DNA, 25 bp, Homo sapien
taaggacagaggcagcataaatctc

SEQ ID NO: 5663710 - DNA, 25 bp, Homo sapien
tcatccatcacccagcgtctttttt

SEQ ID NO: 5663711 - DNA, 25 bp, Homo sapien
tatcaggctaaggacagaggcagca

SEQ ID NO: 5663712 - DNA, 25 bp, Homo sapien
aaggcagatttaacattttcccagc

SEQ ID NO: 5663713 - DNA, 25 bp, Homo sapien
ggattatcaggctaaggacagaggc

SEQ ID NO: 5663714 - DNA, 25 bp, Homo sapien
ggcagcataaatctcattaaggcag

SEQ ID NO: 5663715 - DNA, 25 bp, Homo sapien
ttgacttaaaggtgcactgcaagat

SEQ ID NO: 5663716 - DNA, 25 bp, Homo sapien
cagtgccttaataaacaactattcg

SEQ ID NO: 5663717 - DNA, 25 bp, Homo sapien
gacttaaaggtgcactgcaagatct

SEQ ID NO: 5663718 - DNA, 25 bp, Homo sapien
tcttgacttaaaggtgcactgcaag

SEQ ID NO: 5663719 - DNA, 25 bp, Homo sapien
taaacaactattcgaatatactttg

SEQ ID NO: 5663720 - DNA, 25 bp, Homo sapien
gtgccttaataaacaactattcgaa

SEQ ID NO: 5663721 - DNA, 25 bp, Homo sapien
agatcttgcagtgcacctttaagtc

SEQ ID NO: 5663722 - DNA, 25 bp, Homo sapien
cttgcagtgcacctttaagtcaaga

SEQ ID NO: 5663723 - DNA, 25 bp, Homo sapien
tattcgaatagttgtttattaaggc

SEQ ID NO: 5663724 - DNA, 25 bp, Homo sapien
cgaatagttgtttattaaggcactg

SEQ ID NO: 5663725 - DNA, 25 bp, Homo sapien
gaacaaagtatattcgaatagttgt

SEQ ID NO: 5663726 - DNA, 25 bp, Homo sapien
gatcttgcagtgcacctttaagtca

SEQ ID NO: 5663727 - DNA, 25 bp, Homo sapien
gtagaaacaataagattgcatcttt

SEQ ID NO: 5663728 - DNA, 25 bp, Homo sapien
aaagatgcaatcttattgtttctac

SEQ ID NO: 5663729 - DNA, 25 bp, Homo sapien
tactgtagaaaaactgccattttac

SEQ ID NO: 5663730 - DNA, 25 bp, Homo sapien
gattgcatctttctaaaaagtttaa

SEQ ID NO: 5663731 - DNA, 25 bp, Homo sapien
taaatactgccatttactgtagaaa

SEQ ID NO: 5663732 - DNA, 25 bp, Homo sapien
gtagaaacaataagattgcatcttt

SEQ ID NO: 5663733 - DNA, 25 bp, Homo sapien
gccattttactgtagaaacaataag

SEQ ID NO: 5663734 - DNA, 25 bp, Homo sapien
attaaacaggtaaatactgccattt

SEQ ID NO: 5663735 - DNA, 25 bp, Homo sapien
aaagatgcaatcttattgtttctac

SEQ ID NO: 5663736 - DNA, 25 bp, Homo sapien
taaactttttagaaagatgcaatct

SEQ ID NO: 5663737 - DNA, 25 bp, Homo sapien
taaaatggcagtttttctacagtaa

SEQ ID NO: 5663738 - DNA, 25 bp, Homo sapien
tattgtttctacagtaaaatggcag

SEQ ID NO: 5663739 - DNA, 25 bp, Homo sapien
aaatggcagtatttacctgtttaat

SEQ ID NO: 5663740 - DNA, 25 bp, Homo sapien
tctacagtaaatggcagtatttacc

SEQ ID NO: 5663741 - DNA, 25 bp, Homo sapien
tgtcaactttacatttttaccacaa

SEQ ID NO: 5663742 - DNA, 25 bp, Homo sapien
tcaactttacatttttaccacaata

SEQ ID NO: 5663743 - DNA, 25 bp, Homo sapien
ttgtcaactttacatttttaccaca

SEQ ID NO: 5663744 - DNA, 25 bp, Homo sapien
tattgtggtaaaaatgtaaagttga

SEQ ID NO: 5663745 - DNA, 25 bp, Homo sapien
ttgtggtaaaaatgtaaagttgaca

SEQ ID NO: 5663746 - DNA, 25 bp, Homo sapien
tgtggtaaaaatgtaaagttgacaa

SEQ ID NO: 5663747 - DNA, 25 bp, Homo sapien
ggcggttacttgtgatcccagctac

SEQ ID NO: 5663748 - DNA, 25 bp, Homo sapien
tggcggttacttgtgatcccagcta

SEQ ID NO: 5663749 - DNA, 25 bp, Homo sapien
gtggcggttacttgtgatcccagct

SEQ ID NO: 5663750 - DNA, 25 bp, Homo sapien
gtagctgggatcacaagtaaccgcc

SEQ ID NO: 5663751 - DNA, 25 bp, Homo sapien
tagctgggatcacaagtaaccgcca

SEQ ID NO: 5663752 - DNA, 25 bp, Homo sapien
agctgggatcacaagtaaccgccac

SEQ ID NO: 5663753 - DNA, 25 bp, Homo sapien
gcaacatggtggaacccggtttcta

SEQ ID NO: 5663754 - DNA, 25 bp, Homo sapien
taattctaccacttggggaggccaa

SEQ ID NO: 5663755 - DNA, 25 bp, Homo sapien
aattctaccacttggggaggccaag

SEQ ID NO: 5663756 - DNA, 25 bp, Homo sapien
gtaattctaccacttggggaggcca

SEQ ID NO: 5663757 - DNA, 25 bp, Homo sapien
ctgggcaacatggtggaacccggtt

SEQ ID NO: 5663758 - DNA, 25 bp, Homo sapien
ccaaggcggacagattgcctgagct

SEQ ID NO: 5663759 - DNA, 25 bp, Homo sapien
ccttggcctccccaagtggtagaat

SEQ ID NO: 5663760 - DNA, 25 bp, Homo sapien
ttggcctccccaagtggtagaatta

SEQ ID NO: 5663761 - DNA, 25 bp, Homo sapien
agctcaggcaatctgtccgccttgg

SEQ ID NO: 5663762 - DNA, 25 bp, Homo sapien
tagaaaccgggttccaccatgttgc

SEQ ID NO: 5663763 - DNA, 25 bp, Homo sapien
aaccgggttccaccatgttgcccag

SEQ ID NO: 5663764 - DNA, 25 bp, Homo sapien
tggcctccccaagtggtagaattac

SEQ ID NO: 5663765 - DNA, 25 bp, Homo sapien
cctggcaacatagtagtgaagaccc

SEQ ID NO: 5663766 - DNA, 25 bp, Homo sapien
acctggcaacatagtagtgaagacc

SEQ ID NO: 5663767 - DNA, 25 bp, Homo sapien
caacatagtagtgaagaccccagtt

SEQ ID NO: 5663768 - DNA, 25 bp, Homo sapien
ggtcttcactactatgttgccaggt

SEQ ID NO: 5663769 - DNA, 25 bp, Homo sapien
gggtcttcactactatgttgccagg

SEQ ID NO: 5663770 - DNA, 25 bp, Homo sapien
aactggggtcttcactactatgttg

SEQ ID NO: 5663771 - DNA, 25 bp, Homo sapien
taagtagaaactggggtcttcacta

SEQ ID NO: 5663772 - DNA, 25 bp, Homo sapien
cctgggctcaagctcaagggatcct

SEQ ID NO: 5663773 - DNA, 25 bp, Homo sapien
ggtcttcactactatgttgccaggt

SEQ ID NO: 5663774 - DNA, 25 bp, Homo sapien
gggtcttcactactatgttgccagg

SEQ ID NO: 5663775 - DNA, 25 bp, Homo sapien
tcctgggctcaagctcaagggatcc

SEQ ID NO: 5663776 - DNA, 25 bp, Homo sapien
aactggggtcttcactactatgttg

SEQ ID NO: 5663777 - DNA, 25 bp, Homo sapien
tccacctcaaccttatgggctcaag

SEQ ID NO: 5663778 - DNA, 25 bp, Homo sapien
ccacctcaaccttatgggctcaagt

SEQ ID NO: 5663779 - DNA, 25 bp, Homo sapien
tggggagacaggtcctctgttgctc

SEQ ID NO: 5663780 - DNA, 25 bp, Homo sapien
ggatcacagctcactccacctcaac

SEQ ID NO: 5663781 - DNA, 25 bp, Homo sapien
ttggggagacaggtcctctgttgct

SEQ ID NO: 5663782 - DNA, 25 bp, Homo sapien
ttttggggagacaggtcctctgttg

SEQ ID NO: 5663783 - DNA, 25 bp, Homo sapien
gagcaacagaggacctgtctcccca

SEQ ID NO: 5663784 - DNA, 25 bp, Homo sapien
caacagaggacctgtctccccaaaa

SEQ ID NO: 5663785 - DNA, 25 bp, Homo sapien
cttgagcccataaggttgaggtgga

SEQ ID NO: 5663786 - DNA, 25 bp, Homo sapien
gttgaggtggagtgagctgtgatcc

SEQ ID NO: 5663787 - DNA, 25 bp, Homo sapien
acttgagcccataaggttgaggtgg

SEQ ID NO: 5663788 - DNA, 25 bp, Homo sapien
agcaacagaggacctgtctccccaa

SEQ ID NO: 5663789 - DNA, 25 bp, Homo sapien
gatagctacacagcgctatgaatgt

SEQ ID NO: 5663790 - DNA, 25 bp, Homo sapien
cgctatgaatgtacataaggccact

SEQ ID NO: 5663791 - DNA, 25 bp, Homo sapien
cacagcgctatgaatgtacataagg

SEQ ID NO: 5663792 - DNA, 25 bp, Homo sapien
gctacacagcgctatgaatgtacat

SEQ ID NO: 5663793 - DNA, 25 bp, Homo sapien
ggtgatagctacacagcgctatgaa

SEQ ID NO: 5663794 - DNA, 25 bp, Homo sapien
gaatgtacataaggccactatacct

SEQ ID NO: 5663795 - DNA, 25 bp, Homo sapien
ggtatagtggccttatgtacattca

SEQ ID NO: 5663796 - DNA, 25 bp, Homo sapien
ttcatagcgctgtgtagctatcacc

SEQ ID NO: 5663797 - DNA, 25 bp, Homo sapien
tatgtacattcatagcgctgtgtag

SEQ ID NO: 5663798 - DNA, 25 bp, Homo sapien
tagtggccttatgtacattcatagc

SEQ ID NO: 5663799 - DNA, 25 bp, Homo sapien
ggccttatgtacattcatagcgctg

SEQ ID NO: 5663800 - DNA, 25 bp, Homo sapien
cattcatagcgctgtgtagctatca

SEQ ID NO: 5663801 - DNA, 25 bp, Homo sapien
tgtactctagctcctccggaggcca

SEQ ID NO: 5663802 - DNA, 25 bp, Homo sapien
tactctagctcctccggaggccaag

SEQ ID NO: 5663803 - DNA, 25 bp, Homo sapien
gtcatagcaaatccgggcttggtgg

SEQ ID NO: 5663804 - DNA, 25 bp, Homo sapien
cagtgtcatagcaaatccgggcttg

SEQ ID NO: 5663805 - DNA, 25 bp, Homo sapien
tatcagtgtcatagcaaatccgggc

SEQ ID NO: 5663806 - DNA, 25 bp, Homo sapien
ggctgtactctagctcctccggagg

SEQ ID NO: 5663807 - DNA, 25 bp, Homo sapien
caagcccggatttgctatgacactg

SEQ ID NO: 5663808 - DNA, 25 bp, Homo sapien
cttggcctccggaggagctagagta

SEQ ID NO: 5663809 - DNA, 25 bp, Homo sapien
ccaccaagcccggatttgctatgac

SEQ ID NO: 5663810 - DNA, 25 bp, Homo sapien
gcctccggaggagctagagtacagc

SEQ ID NO: 5663811 - DNA, 25 bp, Homo sapien
gcccggatttgctatgacactgata

SEQ ID NO: 5663812 - DNA, 25 bp, Homo sapien
ctccggaggagctagagtacagccg

SEQ ID NO: 5663813 - DNA, 25 bp, Homo sapien
cagttccacttctaagttataccct

SEQ ID NO: 5663814 - DNA, 25 bp, Homo sapien
gcagttccacttctaagttataccc

SEQ ID NO: 5663815 - DNA, 25 bp, Homo sapien
agggtataacttagaagtggaactg

SEQ ID NO: 5663816 - DNA, 25 bp, Homo sapien
gggtataacttagaagtggaactgc

SEQ ID NO: 5663817 - DNA, 25 bp, Homo sapien
cagttccacttctaagttataccct

SEQ ID NO: 5663818 - DNA, 25 bp, Homo sapien
cctaaaacagttgaaagcagggact

SEQ ID NO: 5663819 - DNA, 25 bp, Homo sapien
taaaaattatcccagcagttccact

SEQ ID NO: 5663820 - DNA, 25 bp, Homo sapien
tgaaagcagggactctataacttgt

SEQ ID NO: 5663821 - DNA, 25 bp, Homo sapien
tataccctaaaacagttgaaagcag

SEQ ID NO: 5663822 - DNA, 25 bp, Homo sapien
gcagttccacttctaagttataccc

SEQ ID NO: 5663823 - DNA, 25 bp, Homo sapien
agggtataacttagaagtggaactg

SEQ ID NO: 5663824 - DNA, 25 bp, Homo sapien
agtccctgctttcaactgttttagg

SEQ ID NO: 5663825 - DNA, 25 bp, Homo sapien
gggtataacttagaagtggaactgc

SEQ ID NO: 5663826 - DNA, 25 bp, Homo sapien
tgctttcaactgttttagggtataa

SEQ ID NO: 5663827 - DNA, 25 bp, Homo sapien
acaagttatagagtccctgctttca

SEQ ID NO: 5663828 - DNA, 25 bp, Homo sapien
agtggaactgctgggataattttta

SEQ ID NO: 5663829 - DNA, 25 bp, Homo sapien
gcattgctaaatatgcaacagctgt

SEQ ID NO: 5663830 - DNA, 25 bp, Homo sapien
tgcattgctaaatatgcaacagctg

SEQ ID NO: 5663831 - DNA, 25 bp, Homo sapien
cattgctaaatatgcaacagctgtg

SEQ ID NO: 5663832 - DNA, 25 bp, Homo sapien
acagctgttgcatatttagcaatgc

SEQ ID NO: 5663833 - DNA, 25 bp, Homo sapien
cacagctgttgcatatttagcaatg

SEQ ID NO: 5663834 - DNA, 25 bp, Homo sapien
cagctgttgcatatttagcaatgca

SEQ ID NO: 5663835 - DNA, 25 bp, Homo sapien
cattgctaaatatgcaacagctgtg

SEQ ID NO: 5663836 - DNA, 25 bp, Homo sapien
gggagaaattggaacctttgtgcat

SEQ ID NO: 5663837 - DNA, 25 bp, Homo sapien
aattggaacctttgtgcattgctaa

SEQ ID NO: 5663838 - DNA, 25 bp, Homo sapien
tgcattgctaaatatgcaacagctg

SEQ ID NO: 5663839 - DNA, 25 bp, Homo sapien
gcaacagctgtgaaaaatcatttgg

SEQ ID NO: 5663840 - DNA, 25 bp, Homo sapien
aatcatttggtgttttctcaaaagg

SEQ ID NO: 5663841 - DNA, 25 bp, Homo sapien
atgcacaaaggttccaatttctccc

SEQ ID NO: 5663842 - DNA, 25 bp, Homo sapien
ccttttgagaaaacaccaaatgatt

SEQ ID NO: 5663843 - DNA, 25 bp, Homo sapien
cacagctgttgcatatttagcaatg

SEQ ID NO: 5663844 - DNA, 25 bp, Homo sapien
ccaaatgatttttcacagctgttgc

SEQ ID NO: 5663845 - DNA, 25 bp, Homo sapien
tatttagcaatgcacaaaggttcca

SEQ ID NO: 5663846 - DNA, 25 bp, Homo sapien
cagctgttgcatatttagcaatgca

SEQ ID NO: 5663847 - DNA, 25 bp, Homo sapien
taaaagtggatatgacacacctatt

SEQ ID NO: 5663848 - DNA, 25 bp, Homo sapien
gatatgacacacctattagggtgac

SEQ ID NO: 5663849 - DNA, 25 bp, Homo sapien
tggatatgacacacctattagggtg

SEQ ID NO: 5663850 - DNA, 25 bp, Homo sapien
agtggatatgacacacctattaggg

SEQ ID NO: 5663851 - DNA, 25 bp, Homo sapien
tatgacacacctattagggtgacta

SEQ ID NO: 5663852 - DNA, 25 bp, Homo sapien
aaatatgttgaaagttcagaggaag

SEQ ID NO: 5663853 - DNA, 25 bp, Homo sapien
tagtcaccctaataggtgtgtcata

SEQ ID NO: 5663854 - DNA, 25 bp, Homo sapien
aataggtgtgtcatatccactttta

SEQ ID NO: 5663855 - DNA, 25 bp, Homo sapien
ccctaataggtgtgtcatatccact

SEQ ID NO: 5663856 - DNA, 25 bp, Homo sapien
cttcctctgaactttcaacatattt

SEQ ID NO: 5663857 - DNA, 25 bp, Homo sapien
accctaataggtgtgtcatatccac

SEQ ID NO: 5663858 - DNA, 25 bp, Homo sapien
tcaccctaataggtgtgtcatatcc

SEQ ID NO: 5663859 - DNA, 25 bp, Homo sapien
gaagaggtgaaccagtgaagcagtt

SEQ ID NO: 5663860 - DNA, 25 bp, Homo sapien
gaggtgaaccagtgaagcagttaaa

SEQ ID NO: 5663861 - DNA, 25 bp, Homo sapien
cgggttagctgataactaggataat

SEQ ID NO: 5663862 - DNA, 25 bp, Homo sapien
gcaaacgggttagctgataactagg

SEQ ID NO: 5663863 - DNA, 25 bp, Homo sapien
ttagctgataactaggataatttca

SEQ ID NO: 5663864 - DNA, 25 bp, Homo sapien
catgaagaggtgaaccagtgaagca

SEQ ID NO: 5663865 - DNA, 25 bp, Homo sapien
tatcctagttatcagctaacccgtt

SEQ ID NO: 5663866 - DNA, 25 bp, Homo sapien
tgcttcactggttcacctcttcatg

SEQ ID NO: 5663867 - DNA, 25 bp, Homo sapien
attatcctagttatcagctaacccg

SEQ ID NO: 5663868 - DNA, 25 bp, Homo sapien
tgaaattatcctagttatcagctaa

SEQ ID NO: 5663869 - DNA, 25 bp, Homo sapien
cctagttatcagctaacccgtttgc

SEQ ID NO: 5663870 - DNA, 25 bp, Homo sapien
tttaactgcttcactggttcacctc

SEQ ID NO: 5663871 - DNA, 25 bp, Homo sapien
aaggcaaaagggtcgtgtcagccta

SEQ ID NO: 5663872 - DNA, 25 bp, Homo sapien
caaggcaaaagggtcgtgtcagcct

SEQ ID NO: 5663873 - DNA, 25 bp, Homo sapien
caaaagggtcgtgtcagcctaggaa

SEQ ID NO: 5663874 - DNA, 25 bp, Homo sapien
gccaaggcaaaagggtcgtgtcagc

SEQ ID NO: 5663875 - DNA, 25 bp, Homo sapien
aggcaaaagggtcgtgtcagcctag

SEQ ID NO: 5663876 - DNA, 25 bp, Homo sapien
gcaaaagggtcgtgtcagcctagga

SEQ ID NO: 5663877 - DNA, 25 bp, Homo sapien
ctaggctgacacgacccttttgcct

SEQ ID NO: 5663878 - DNA, 25 bp, Homo sapien
tcctaggctgacacgacccttttgc

SEQ ID NO: 5663879 - DNA, 25 bp, Homo sapien
ttcctaggctgacacgacccttttg

SEQ ID NO: 5663880 - DNA, 25 bp, Homo sapien
taggctgacacgacccttttgcctt

SEQ ID NO: 5663881 - DNA, 25 bp, Homo sapien
aggctgacacgacccttttgccttg

SEQ ID NO: 5663882 - DNA, 25 bp, Homo sapien
gctgacacgacccttttgccttggc

SEQ ID NO: 5663883 - DNA, 25 bp, Homo sapien
acaaggtaaagtagcctgggcgcgg

SEQ ID NO: 5663884 - DNA, 25 bp, Homo sapien
caaggtaaagtagcctgggcgcggt

SEQ ID NO: 5663885 - DNA, 25 bp, Homo sapien
aacaaggtaaagtagcctgggcgcg

SEQ ID NO: 5663886 - DNA, 25 bp, Homo sapien
ggtaaagtagcctgggcgcggtggc

SEQ ID NO: 5663887 - DNA, 25 bp, Homo sapien
aaggtaaagtagcctgggcgcggtg

SEQ ID NO: 5663888 - DNA, 25 bp, Homo sapien
aggtaaagtagcctgggcgcggtgg

SEQ ID NO: 5663889 - DNA, 25 bp, Homo sapien
ccgcgcccaggctactttaccttgt

SEQ ID NO: 5663890 - DNA, 25 bp, Homo sapien
caccgcgcccaggctactttacctt

SEQ ID NO: 5663891 - DNA, 25 bp, Homo sapien
agccaccgcgcccaggctactttac

SEQ ID NO: 5663892 - DNA, 25 bp, Homo sapien
cgcgcccaggctactttaccttgtt

SEQ ID NO: 5663893 - DNA, 25 bp, Homo sapien
ccaccgcgcccaggctactttacct

SEQ ID NO: 5663894 - DNA, 25 bp, Homo sapien
accgcgcccaggctactttaccttg

SEQ ID NO: 5663895 - DNA, 25 bp, Homo sapien
ggttgcgctaagccaagatcgcgcc

SEQ ID NO: 5663896 - DNA, 25 bp, Homo sapien
tgcgctaagccaagatcgcgccatt

SEQ ID NO: 5663897 - DNA, 25 bp, Homo sapien
gttgcgctaagccaagatcgcgcca

SEQ ID NO: 5663898 - DNA, 25 bp, Homo sapien
ttgcgctaagccaagatcgcgccat

SEQ ID NO: 5663899 - DNA, 25 bp, Homo sapien
gcgctaagccaagatcgcgccattg

SEQ ID NO: 5663900 - DNA, 25 bp, Homo sapien
cgctaagccaagatcgcgccattgc

SEQ ID NO: 5663901 - DNA, 25 bp, Homo sapien
atggcgcgatcttggcttagcgcaa

SEQ ID NO: 5663902 - DNA, 25 bp, Homo sapien
ggcgcgatcttggcttagcgcaacc

SEQ ID NO: 5663903 - DNA, 25 bp, Homo sapien
gcaatggcgcgatcttggcttagcg

SEQ ID NO: 5663904 - DNA, 25 bp, Homo sapien
caatggcgcgatcttggcttagcgc

SEQ ID NO: 5663905 - DNA, 25 bp, Homo sapien
aatggcgcgatcttggcttagcgca

SEQ ID NO: 5663906 - DNA, 25 bp, Homo sapien
tggcgcgatcttggcttagcgcaac

SEQ ID NO: 5663907 - DNA, 25 bp, Homo sapien
cggtaagagtgacgggaacaggagt

SEQ ID NO: 5663908 - DNA, 25 bp, Homo sapien
aacgaggtcaagtagtaagagaagc

SEQ ID NO: 5663909 - DNA, 25 bp, Homo sapien
gtcattgacctcttgggagaggaga

SEQ ID NO: 5663910 - DNA, 25 bp, Homo sapien
ggtcaagtagtaagagaagcggtaa

SEQ ID NO: 5663911 - DNA, 25 bp, Homo sapien
caagtagtaagagaagcggtaagag

SEQ ID NO: 5663912 - DNA, 25 bp, Homo sapien
caggagtcattgacctcttgggaga

SEQ ID NO: 5663913 - DNA, 25 bp, Homo sapien
tctcccaagaggtcaatgactcctg

SEQ ID NO: 5663914 - DNA, 25 bp, Homo sapien
gcttctcttactacttgacctcgtt

SEQ ID NO: 5663915 - DNA, 25 bp, Homo sapien
actcctgttcccgtcactcttaccg

SEQ ID NO: 5663916 - DNA, 25 bp, Homo sapien
ttaccgcttctcttactacttgacc

SEQ ID NO: 5663917 - DNA, 25 bp, Homo sapien
tctcctctcccaagaggtcaatgac

SEQ ID NO: 5663918 - DNA, 25 bp, Homo sapien
ctcttaccgcttctcttactacttg

SEQ ID NO: 5663919 - DNA, 25 bp, Homo sapien
aatggtgtgaccttgcctcactgca

SEQ ID NO: 5663920 - DNA, 25 bp, Homo sapien
caatggtgtgaccttgcctcactgc

SEQ ID NO: 5663921 - DNA, 25 bp, Homo sapien
tatttgtttcttgtttttgagacag

SEQ ID NO: 5663922 - DNA, 25 bp, Homo sapien
tgctcttgttgcccaggctagagtg

SEQ ID NO: 5663923 - DNA, 25 bp, Homo sapien
ttatttgtttcttgtttttgagaca

SEQ ID NO: 5663924 - DNA, 25 bp, Homo sapien
atggtgtgaccttgcctcactgcaa

SEQ ID NO: 5663925 - DNA, 25 bp, Homo sapien
gcagtgaggcaaggtcacaccattg

SEQ ID NO: 5663926 - DNA, 25 bp, Homo sapien
cactctagcctgggcaacaagagca

SEQ ID NO: 5663927 - DNA, 25 bp, Homo sapien
ttgcagtgaggcaaggtcacaccat

SEQ ID NO: 5663928 - DNA, 25 bp, Homo sapien
ctgtctcaaaaacaagaaacaaata

SEQ ID NO: 5663929 - DNA, 25 bp, Homo sapien
tgcagtgaggcaaggtcacaccatt

SEQ ID NO: 5663930 - DNA, 25 bp, Homo sapien
tgtctcaaaaacaagaaacaaataa

SEQ ID NO: 5663931 - DNA, 25 bp, Homo sapien
ttgccctaattcaggcctgccctgt

SEQ ID NO: 5663932 - DNA, 25 bp, Homo sapien
gccctaattcaggcctgccctgtgg

SEQ ID NO: 5663933 - DNA, 25 bp, Homo sapien
tgccctaattcaggcctgccctgtg

SEQ ID NO: 5663934 - DNA, 25 bp, Homo sapien
ggacataaaggcctcttgtcctcac

SEQ ID NO: 5663935 - DNA, 25 bp, Homo sapien
gacataaaggcctcttgtcctcact

SEQ ID NO: 5663936 - DNA, 25 bp, Homo sapien
ccacagggcaggcctgaattagggc

SEQ ID NO: 5663937 - DNA, 25 bp, Homo sapien
agtgaggacaagaggcctttatgtc

SEQ ID NO: 5663938 - DNA, 25 bp, Homo sapien
gtgaggacaagaggcctttatgtcc

SEQ ID NO: 5663939 - DNA, 25 bp, Homo sapien
cacagggcaggcctgaattagggca

SEQ ID NO: 5663940 - DNA, 25 bp, Homo sapien
acagggcaggcctgaattagggcaa

SEQ ID NO: 5663941 - DNA, 25 bp, Homo sapien
tccgagtctcaatagtacctgtctc

SEQ ID NO: 5663942 - DNA, 25 bp, Homo sapien
ctccgagtctcaatagtacctgtct

SEQ ID NO: 5663943 - DNA, 25 bp, Homo sapien
gctccgagtctcaatagtacctgtc

SEQ ID NO: 5663944 - DNA, 25 bp, Homo sapien
cagctccgagtctcaatagtacctg

SEQ ID NO: 5663945 - DNA, 25 bp, Homo sapien
agctccgagtctcaatagtacctgt

SEQ ID NO: 5663946 - DNA, 25 bp, Homo sapien
gacaggtactattgagactcggagc

SEQ ID NO: 5663947 - DNA, 25 bp, Homo sapien
caggtactattgagactcggagctg

SEQ ID NO: 5663948 - DNA, 25 bp, Homo sapien
agacaggtactattgagactcggag

SEQ ID NO: 5663949 - DNA, 25 bp, Homo sapien
gagacaggtactattgagactcgga

SEQ ID NO: 5663950 - DNA, 25 bp, Homo sapien
acaggtactattgagactcggagct

SEQ ID NO: 5663951 - DNA, 25 bp, Homo sapien
ccacgttgaccagaatggtctcaat

SEQ ID NO: 5663952 - DNA, 25 bp, Homo sapien
cacgttgaccagaatggtctcaatc

SEQ ID NO: 5663953 - DNA, 25 bp, Homo sapien
accacgttgaccagaatggtctcaa

SEQ ID NO: 5663954 - DNA, 25 bp, Homo sapien
cgttgaccagaatggtctcaatctc

SEQ ID NO: 5663955 - DNA, 25 bp, Homo sapien
caccacgttgaccagaatggtctca

SEQ ID NO: 5663956 - DNA, 25 bp, Homo sapien
acgttgaccagaatggtctcaatct

SEQ ID NO: 5663957 - DNA, 25 bp, Homo sapien
tgagaccattctggtcaacgtggtg

SEQ ID NO: 5663958 - DNA, 25 bp, Homo sapien
ttgagaccattctggtcaacgtggt

SEQ ID NO: 5663959 - DNA, 25 bp, Homo sapien
agattgagaccattctggtcaacgt

SEQ ID NO: 5663960 - DNA, 25 bp, Homo sapien
attgagaccattctggtcaacgtgg

SEQ ID NO: 5663961 - DNA, 25 bp, Homo sapien
gagattgagaccattctggtcaacg

SEQ ID NO: 5663962 - DNA, 25 bp, Homo sapien
gattgagaccattctggtcaacgtg

SEQ ID NO: 5663963 - DNA, 25 bp, Homo sapien
acgcggttttcccatgttggcaagg

SEQ ID NO: 5663964 - DNA, 25 bp, Homo sapien
gcggttttcccatgttggcaaggct

SEQ ID NO: 5663965 - DNA, 25 bp, Homo sapien
tggtagagacgcggttttcccatgt

SEQ ID NO: 5663966 - DNA, 25 bp, Homo sapien
gacgcggttttcccatgttggcaag

SEQ ID NO: 5663967 - DNA, 25 bp, Homo sapien
agacgcggttttcccatgttggcaa

SEQ ID NO: 5663968 - DNA, 25 bp, Homo sapien
cgcggttttcccatgttggcaaggc

SEQ ID NO: 5663969 - DNA, 25 bp, Homo sapien
ccttgccaacatgggaaaaccgcgt

SEQ ID NO: 5663970 - DNA, 25 bp, Homo sapien
acatgggaaaaccgcgtctctacca

SEQ ID NO: 5663971 - DNA, 25 bp, Homo sapien
catgggaaaaccgcgtctctaccaa

SEQ ID NO: 5663972 - DNA, 25 bp, Homo sapien
cttgccaacatgggaaaaccgcgtc

SEQ ID NO: 5663973 - DNA, 25 bp, Homo sapien
gccttgccaacatgggaaaaccgcg

SEQ ID NO: 5663974 - DNA, 25 bp, Homo sapien
ttgccaacatgggaaaaccgcgtct

SEQ ID NO: 5663975 - DNA, 25 bp, Homo sapien
cactgcgcacttaagtgtctgggac

SEQ ID NO: 5663976 - DNA, 25 bp, Homo sapien
gcacttaagtgtctgggacaattcc

SEQ ID NO: 5663977 - DNA, 25 bp, Homo sapien
gcttcactgcgcacttaagtgtctg

SEQ ID NO: 5663978 - DNA, 25 bp, Homo sapien
gcgcacttaagtgtctgggacaatt

SEQ ID NO: 5663979 - DNA, 25 bp, Homo sapien
ctgcgcacttaagtgtctgggacaa

SEQ ID NO: 5663980 - DNA, 25 bp, Homo sapien
ttcactgcgcacttaagtgtctggg

SEQ ID NO: 5663981 - DNA, 25 bp, Homo sapien
ggaattgtcccagacacttaagtgc

SEQ ID NO: 5663982 - DNA, 25 bp, Homo sapien
cagacacttaagtgcgcagtgaagc

SEQ ID NO: 5663983 - DNA, 25 bp, Homo sapien
cccagacacttaagtgcgcagtgaa

SEQ ID NO: 5663984 - DNA, 25 bp, Homo sapien
aattgtcccagacacttaagtgcgc

SEQ ID NO: 5663985 - DNA, 25 bp, Homo sapien
gtcccagacacttaagtgcgcagtg

SEQ ID NO: 5663986 - DNA, 25 bp, Homo sapien
ttgtcccagacacttaagtgcgcag

SEQ ID NO: 5663987 - DNA, 25 bp, Homo sapien
gagatttctgtttgttttacaaggc

SEQ ID NO: 5663988 - DNA, 25 bp, Homo sapien
cactgcgcacttaagtgtctgggac

SEQ ID NO: 5663989 - DNA, 25 bp, Homo sapien
cctcagtttccttcacataccaggg

SEQ ID NO: 5663990 - DNA, 25 bp, Homo sapien
tgttttacaaggcttcactgcgcac

SEQ ID NO: 5663991 - DNA, 25 bp, Homo sapien
ccttcacataccagggtaaagggag

SEQ ID NO: 5663992 - DNA, 25 bp, Homo sapien
cataccagggtaaagggagatttct

SEQ ID NO: 5663993 - DNA, 25 bp, Homo sapien
taccctggtatgtgaaggaaactga

SEQ ID NO: 5663994 - DNA, 25 bp, Homo sapien
gccttgtaaaacaaacagaaatctc

SEQ ID NO: 5663995 - DNA, 25 bp, Homo sapien
cctggtatgtgaaggaaactgaggc

SEQ ID NO: 5663996 - DNA, 25 bp, Homo sapien
gaattgtcccagacacttaagtgcg

SEQ ID NO: 5663997 - DNA, 25 bp, Homo sapien
agaaatctccctttaccctggtatg

SEQ ID NO: 5663998 - DNA, 25 bp, Homo sapien
gcgcagtgaagccttgtaaaacaaa

SEQ ID NO: 5663999 - DNA, 25 bp, Homo sapien
cctaccaccacgcctggagaatttt

SEQ ID NO: 5664000 - DNA, 25 bp, Homo sapien
gtgcctaccaccacgcctggagaat

SEQ ID NO: 5664001 - DNA, 25 bp, Homo sapien
gcctaccaccacgcctggagaattt

SEQ ID NO: 5664002 - DNA, 25 bp, Homo sapien
accgtgttagtagtcaggatggtct

SEQ ID NO: 5664003 - DNA, 25 bp, Homo sapien
tgcctaccaccacgcctggagaatt

SEQ ID NO: 5664004 - DNA, 25 bp, Homo sapien
ggtgcctaccaccacgcctggagaa

SEQ ID NO: 5664005 - DNA, 25 bp, Homo sapien
aaattctccaggcgtggtggtaggc

SEQ ID NO: 5664006 - DNA, 25 bp, Homo sapien
aaaaattctccaggcgtggtggtag

SEQ ID NO: 5664007 - DNA, 25 bp, Homo sapien
attctccaggcgtggtggtaggcac

SEQ ID NO: 5664008 - DNA, 25 bp, Homo sapien
aaaattctccaggcgtggtggtagg

SEQ ID NO: 5664009 - DNA, 25 bp, Homo sapien
aattctccaggcgtggtggtaggca

SEQ ID NO: 5664010 - DNA, 25 bp, Homo sapien
ttctccaggcgtggtggtaggcacc

SEQ ID NO: 5664011 - DNA, 25 bp, Homo sapien
ctacagacatactgtaccacaccca

SEQ ID NO: 5664012 - DNA, 25 bp, Homo sapien
tacagacatactgtaccacacccag

SEQ ID NO: 5664013 - DNA, 25 bp, Homo sapien
gtctacagacatactgtaccacacc

SEQ ID NO: 5664014 - DNA, 25 bp, Homo sapien
tctacagacatactgtaccacaccc

SEQ ID NO: 5664015 - DNA, 25 bp, Homo sapien
ggtgtggtacagtatgtctgtagac

SEQ ID NO: 5664016 - DNA, 25 bp, Homo sapien
gggtgtggtacagtatgtctgtaga

SEQ ID NO: 5664017 - DNA, 25 bp, Homo sapien
tgggtgtggtacagtatgtctgtag

SEQ ID NO: 5664018 - DNA, 25 bp, Homo sapien
ctgggtgtggtacagtatgtctgta

SEQ ID NO: 5664019 - DNA, 25 bp, Homo sapien
tacagacatactgtaccacacccag

SEQ ID NO: 5664020 - DNA, 25 bp, Homo sapien
gacatactgtaccacacccagctaa

SEQ ID NO: 5664021 - DNA, 25 bp, Homo sapien
agacatactgtaccacacccagcta

SEQ ID NO: 5664022 - DNA, 25 bp, Homo sapien
gtctacagacatactgtaccacacc

SEQ ID NO: 5664023 - DNA, 25 bp, Homo sapien
acatactgtaccacacccagctaat

SEQ ID NO: 5664024 - DNA, 25 bp, Homo sapien
tctacagacatactgtaccacaccc

SEQ ID NO: 5664025 - DNA, 25 bp, Homo sapien
ggtgtggtacagtatgtctgtagac

SEQ ID NO: 5664026 - DNA, 25 bp, Homo sapien
gggtgtggtacagtatgtctgtaga

SEQ ID NO: 5664027 - DNA, 25 bp, Homo sapien
tgggtgtggtacagtatgtctgtag

SEQ ID NO: 5664028 - DNA, 25 bp, Homo sapien
ctgggtgtggtacagtatgtctgta

SEQ ID NO: 5664029 - DNA, 25 bp, Homo sapien
ttagctgggtgtggtacagtatgtc

SEQ ID NO: 5664030 - DNA, 25 bp, Homo sapien
tagctgggtgtggtacagtatgtct

SEQ ID NO: 5664031 - DNA, 25 bp, Homo sapien
tgcctgcctcggcctcctaaagtgt

SEQ ID NO: 5664032 - DNA, 25 bp, Homo sapien
cctcggcctcctaaagtgttgggat

SEQ ID NO: 5664033 - DNA, 25 bp, Homo sapien
ctgcctgcctcggcctcctaaagtg

SEQ ID NO: 5664034 - DNA, 25 bp, Homo sapien
tctgcctgcctcggcctcctaaagt

SEQ ID NO: 5664035 - DNA, 25 bp, Homo sapien
tacaggtgtgagcctaatttttgta

SEQ ID NO: 5664036 - DNA, 25 bp, Homo sapien
acaggtgtgagcctaatttttgtat

SEQ ID NO: 5664037 - DNA, 25 bp, Homo sapien
atacaaaaattaggctcacacctgt

SEQ ID NO: 5664038 - DNA, 25 bp, Homo sapien
cactttaggaggccgaggcaggcag

SEQ ID NO: 5664039 - DNA, 25 bp, Homo sapien
acactttaggaggccgaggcaggca

SEQ ID NO: 5664040 - DNA, 25 bp, Homo sapien
atcccaacactttaggaggccgagg

SEQ ID NO: 5664041 - DNA, 25 bp, Homo sapien
tacaaaaattaggctcacacctgta

SEQ ID NO: 5664042 - DNA, 25 bp, Homo sapien
actttaggaggccgaggcaggcaga

SEQ ID NO: 5664043 - DNA, 25 bp, Homo sapien
ccagcagttagggaggctgacgcag

SEQ ID NO: 5664044 - DNA, 25 bp, Homo sapien
gttagggaggctgacgcaggcagat

SEQ ID NO: 5664045 - DNA, 25 bp, Homo sapien
tgaaaaggcaggaatggctgggcac

SEQ ID NO: 5664046 - DNA, 25 bp, Homo sapien
ataatgaaaaggcaggaatggctgg

SEQ ID NO: 5664047 - DNA, 25 bp, Homo sapien
cacataatgaaaaggcaggaatggc

SEQ ID NO: 5664048 - DNA, 25 bp, Homo sapien
aaaggcaggaatggctgggcacagt

SEQ ID NO: 5664049 - DNA, 25 bp, Homo sapien
ctgcgtcagcctccctaactgctgg

SEQ ID NO: 5664050 - DNA, 25 bp, Homo sapien
agccattcctgccttttcattatgt

SEQ ID NO: 5664051 - DNA, 25 bp, Homo sapien
actgtgcccagccattcctgccttt

SEQ ID NO: 5664052 - DNA, 25 bp, Homo sapien
ccagccattcctgccttttcattat

SEQ ID NO: 5664053 - DNA, 25 bp, Homo sapien
atctgcctgcgtcagcctccctaac

SEQ ID NO: 5664054 - DNA, 25 bp, Homo sapien
gccattcctgccttttcattatgtg

SEQ ID NO: 5664055 - DNA, 25 bp, Homo sapien
atgtaagaagcagcctcgcaggggg

SEQ ID NO: 5664056 - DNA, 25 bp, Homo sapien
taagaagcagcctcgcagggggagc

SEQ ID NO: 5664057 - DNA, 25 bp, Homo sapien
gtaagaagcagcctcgcagggggag

SEQ ID NO: 5664058 - DNA, 25 bp, Homo sapien
tgtaagaagcagcctcgcaggggga

SEQ ID NO: 5664059 - DNA, 25 bp, Homo sapien
ccccctgcgaggctgcttcttacat

SEQ ID NO: 5664060 - DNA, 25 bp, Homo sapien
gctccccctgcgaggctgcttctta

SEQ ID NO: 5664061 - DNA, 25 bp, Homo sapien
ctccccctgcgaggctgcttcttac

SEQ ID NO: 5664062 - DNA, 25 bp, Homo sapien
tccccctgcgaggctgcttcttaca

SEQ ID NO: 5664063 - DNA, 25 bp, Homo sapien
tatcagagaagaggccacatgtaag

SEQ ID NO: 5664064 - DNA, 25 bp, Homo sapien
gaagaggccacatgtaagaagcagc

SEQ ID NO: 5664065 - DNA, 25 bp, Homo sapien
ggccacatgtaagaagcagcctcgc

SEQ ID NO: 5664066 - DNA, 25 bp, Homo sapien
aatttatcagagaagaggccacatg

SEQ ID NO: 5664067 - DNA, 25 bp, Homo sapien
aaaaaatttatcagagaagaggcca

SEQ ID NO: 5664068 - DNA, 25 bp, Homo sapien
acatgtaagaagcagcctcgcaggg

SEQ ID NO: 5664069 - DNA, 25 bp, Homo sapien
gctgcttcttacatgtggcctcttc

SEQ ID NO: 5664070 - DNA, 25 bp, Homo sapien
tgcgaggctgcttcttacatgtggc

SEQ ID NO: 5664071 - DNA, 25 bp, Homo sapien
tacatgtggcctcttctctgataaa

SEQ ID NO: 5664072 - DNA, 25 bp, Homo sapien
cccctgcgaggctgcttcttacatg

SEQ ID NO: 5664073 - DNA, 25 bp, Homo sapien
cctgcgaggctgcttcttacatgtg

SEQ ID NO: 5664074 - DNA, 25 bp, Homo sapien
catgtggcctcttctctgataaatt

SEQ ID NO: 5664075 - DNA, 25 bp, Homo sapien
gagtgggcactaggacgggagtccg

SEQ ID NO: 5664076 - DNA, 25 bp, Homo sapien
cactaggacgggagtccgtgccccg

SEQ ID NO: 5664077 - DNA, 25 bp, Homo sapien
ctaggacgggagtccgtgccccgtg

SEQ ID NO: 5664078 - DNA, 25 bp, Homo sapien
cagagtgggcactaggacgggagtc

SEQ ID NO: 5664079 - DNA, 25 bp, Homo sapien
gcactaggacgggagtccgtgcccc

SEQ ID NO: 5664080 - DNA, 25 bp, Homo sapien
agagtgggcactaggacgggagtcc

SEQ ID NO: 5664081 - DNA, 25 bp, Homo sapien
ggggcacggactcccgtcctagtgc

SEQ ID NO: 5664082 - DNA, 25 bp, Homo sapien
ggactcccgtcctagtgcccactct

SEQ ID NO: 5664083 - DNA, 25 bp, Homo sapien
actcccgtcctagtgcccactctgc

SEQ ID NO: 5664084 - DNA, 25 bp, Homo sapien
cggggcacggactcccgtcctagtg

SEQ ID NO: 5664085 - DNA, 25 bp, Homo sapien
gcacggactcccgtcctagtgccca

SEQ ID NO: 5664086 - DNA, 25 bp, Homo sapien
acggactcccgtcctagtgcccact

SEQ ID NO: 5664087 - DNA, 25 bp, Homo sapien
tcagcagctggcagagtgggcacta

SEQ ID NO: 5664088 - DNA, 25 bp, Homo sapien
cactaggacgggagtccgtgccccg

SEQ ID NO: 5664089 - DNA, 25 bp, Homo sapien
ctggtcctgtcagcagctggcagag

SEQ ID NO: 5664090 - DNA, 25 bp, Homo sapien
ctggcctggtcctgtcagcagctgg

SEQ ID NO: 5664091 - DNA, 25 bp, Homo sapien
cagagtgggcactaggacgggagtc

SEQ ID NO: 5664092 - DNA, 25 bp, Homo sapien
cagggtcagggtgctggcctggtcc

SEQ ID NO: 5664093 - DNA, 25 bp, Homo sapien
actctgccagctgctgacaggacca

SEQ ID NO: 5664094 - DNA, 25 bp, Homo sapien
tctgccagctgctgacaggaccagg

SEQ ID NO: 5664095 - DNA, 25 bp, Homo sapien
cggggcacggactcccgtcctagtg

SEQ ID NO: 5664096 - DNA, 25 bp, Homo sapien
agctgctgacaggaccaggccagca

SEQ ID NO: 5664097 - DNA, 25 bp, Homo sapien
tagtgcccactctgccagctgctga

SEQ ID NO: 5664098 - DNA, 25 bp, Homo sapien
acggactcccgtcctagtgcccact

SEQ ID NO: 5664099 - DNA, 25 bp, Homo sapien
ccatgtccagctgttacccacagtc

SEQ ID NO: 5664100 - DNA, 25 bp, Homo sapien
catgtccagctgttacccacagtca

SEQ ID NO: 5664101 - DNA, 25 bp, Homo sapien
atgtccagctgttacccacagtcac

SEQ ID NO: 5664102 - DNA, 25 bp, Homo sapien
gtgactgtgggtaacagctggacat

SEQ ID NO: 5664103 - DNA, 25 bp, Homo sapien
gactgtgggtaacagctggacatgg

SEQ ID NO: 5664104 - DNA, 25 bp, Homo sapien
tgactgtgggtaacagctggacatg

SEQ ID NO: 5664105 - DNA, 25 bp, Homo sapien
gctgttacccacagtcacccatggg

SEQ ID NO: 5664106 - DNA, 25 bp, Homo sapien
ttcgaggatctgtcccatgtccagc

SEQ ID NO: 5664107 - DNA, 25 bp, Homo sapien
ttccctgagccccagcttcgaggat

SEQ ID NO: 5664108 - DNA, 25 bp, Homo sapien
tacccacagtcacccatggggtggg

SEQ ID NO: 5664109 - DNA, 25 bp, Homo sapien
catgtccagctgttacccacagtca

SEQ ID NO: 5664110 - DNA, 25 bp, Homo sapien
atgtccagctgttacccacagtcac

SEQ ID NO: 5664111 - DNA, 25 bp, Homo sapien
gtgactgtgggtaacagctggacat

SEQ ID NO: 5664112 - DNA, 25 bp, Homo sapien
caccccatgggtgactgtgggtaac

SEQ ID NO: 5664113 - DNA, 25 bp, Homo sapien
ccatgggtgactgtgggtaacagct

SEQ ID NO: 5664114 - DNA, 25 bp, Homo sapien
cccaccccatgggtgactgtgggta

SEQ ID NO: 5664115 - DNA, 25 bp, Homo sapien
gctggacatgggacagatcctcgaa

SEQ ID NO: 5664116 - DNA, 25 bp, Homo sapien
tgactgtgggtaacagctggacatg

SEQ ID NO: 5664117 - DNA, 25 bp, Homo sapien
tcgcgtgttctctggggtaccattc

SEQ ID NO: 5664118 - DNA, 25 bp, Homo sapien
cgcgtgttctctggggtaccattcc

SEQ ID NO: 5664119 - DNA, 25 bp, Homo sapien
gcgtgttctctggggtaccattcca

SEQ ID NO: 5664120 - DNA, 25 bp, Homo sapien
cgtgttctctggggtaccattccat

SEQ ID NO: 5664121 - DNA, 25 bp, Homo sapien
gtgttctctggggtaccattccatg

SEQ ID NO: 5664122 - DNA, 25 bp, Homo sapien
ctcgcgtgttctctggggtaccatt

SEQ ID NO: 5664123 - DNA, 25 bp, Homo sapien
atggaatggtaccccagagaacacg

SEQ ID NO: 5664124 - DNA, 25 bp, Homo sapien
catggaatggtaccccagagaacac

SEQ ID NO: 5664125 - DNA, 25 bp, Homo sapien
ggaatggtaccccagagaacacgcg

SEQ ID NO: 5664126 - DNA, 25 bp, Homo sapien
tggaatggtaccccagagaacacgc

SEQ ID NO: 5664127 - DNA, 25 bp, Homo sapien
aatggtaccccagagaacacgcgag

SEQ ID NO: 5664128 - DNA, 25 bp, Homo sapien
gaatggtaccccagagaacacgcga

SEQ ID NO: 5664129 - DNA, 25 bp, Homo sapien
gcaggctgagcctgggttcacacca

SEQ ID NO: 5664130 - DNA, 25 bp, Homo sapien
gggtaccattccatgttgccaccac

SEQ ID NO: 5664131 - DNA, 25 bp, Homo sapien
ccatctgttgaaaaggccgacagct

SEQ ID NO: 5664132 - DNA, 25 bp, Homo sapien
caccttaaagggctctgcaggctga

SEQ ID NO: 5664133 - DNA, 25 bp, Homo sapien
catgttgccaccaccttaaagggct

SEQ ID NO: 5664134 - DNA, 25 bp, Homo sapien
ctcgcgtgttctctggggtaccatt

SEQ ID NO: 5664135 - DNA, 25 bp, Homo sapien
gtgagccaggttcgccctcagggct

SEQ ID NO: 5664136 - DNA, 25 bp, Homo sapien
cctgtaggcctaaccccagatcttg

SEQ ID NO: 5664137 - DNA, 25 bp, Homo sapien
cttcctcacctcaccttgaagggag

SEQ ID NO: 5664138 - DNA, 25 bp, Homo sapien
aggcctaaccccagatcttgtgtcc

SEQ ID NO: 5664139 - DNA, 25 bp, Homo sapien
taggcctaaccccagatcttgtgtc

SEQ ID NO: 5664140 - DNA, 25 bp, Homo sapien
agggctcctgtaggcctaaccccag

SEQ ID NO: 5664141 - DNA, 25 bp, Homo sapien
agccctgagggcgaacctggctcac

SEQ ID NO: 5664142 - DNA, 25 bp, Homo sapien
ctggggttaggcctacaggagccct

SEQ ID NO: 5664143 - DNA, 25 bp, Homo sapien
caagatctggggttaggcctacagg

SEQ ID NO: 5664144 - DNA, 25 bp, Homo sapien
gacacaagatctggggttaggccta

SEQ ID NO: 5664145 - DNA, 25 bp, Homo sapien
ctcccttcaaggtgaggtgaggaag

SEQ ID NO: 5664146 - DNA, 25 bp, Homo sapien
gagccctgagggcgaacctggctca

SEQ ID NO: 5664147 - DNA, 25 bp, Homo sapien
aagggtcaagtcatacccccatggg

SEQ ID NO: 5664148 - DNA, 25 bp, Homo sapien
agggtcaagtcatacccccatgggg

SEQ ID NO: 5664149 - DNA, 25 bp, Homo sapien
ggtcaagtcatacccccatggggtg

SEQ ID NO: 5664150 - DNA, 25 bp, Homo sapien
aaagggtcaagtcatacccccatgg

SEQ ID NO: 5664151 - DNA, 25 bp, Homo sapien
tcaagtcatacccccatggggtgag

SEQ ID NO: 5664152 - DNA, 25 bp, Homo sapien
aaaagggtcaagtcatacccccatg

SEQ ID NO: 5664153 - DNA, 25 bp, Homo sapien
cccatgggggtatgacttgaccctt

SEQ ID NO: 5664154 - DNA, 25 bp, Homo sapien
caccccatgggggtatgacttgacc

SEQ ID NO: 5664155 - DNA, 25 bp, Homo sapien
ctcaccccatgggggtatgacttga

SEQ ID NO: 5664156 - DNA, 25 bp, Homo sapien
ccatgggggtatgacttgacccttt

SEQ ID NO: 5664157 - DNA, 25 bp, Homo sapien
catgggggtatgacttgaccctttt

SEQ ID NO: 5664158 - DNA, 25 bp, Homo sapien
ccccatgggggtatgacttgaccct

SEQ ID NO: 5664159 - DNA, 25 bp, Homo sapien
aagggtcaagtcatacccccatggg

SEQ ID NO: 5664160 - DNA, 25 bp, Homo sapien
agggtcaagtcatacccccatgggg

SEQ ID NO: 5664161 - DNA, 25 bp, Homo sapien
ggtcaagtcatacccccatggggtg

SEQ ID NO: 5664162 - DNA, 25 bp, Homo sapien
aaagggtcaagtcatacccccatgg

SEQ ID NO: 5664163 - DNA, 25 bp, Homo sapien
aaaagggtcaagtcatacccccatg

SEQ ID NO: 5664164 - DNA, 25 bp, Homo sapien
aagtcatacccccatggggtgaggg

SEQ ID NO: 5664165 - DNA, 25 bp, Homo sapien
ccctcaccccatgggggtatgactt

SEQ ID NO: 5664166 - DNA, 25 bp, Homo sapien
cccatgggggtatgacttgaccctt

SEQ ID NO: 5664167 - DNA, 25 bp, Homo sapien
caccccatgggggtatgacttgacc

SEQ ID NO: 5664168 - DNA, 25 bp, Homo sapien
ccatgggggtatgacttgacccttt

SEQ ID NO: 5664169 - DNA, 25 bp, Homo sapien
catgggggtatgacttgaccctttt

SEQ ID NO: 5664170 - DNA, 25 bp, Homo sapien
ccccatgggggtatgacttgaccct

SEQ ID NO: 5664171 - DNA, 25 bp, Homo sapien
gacttaagtatgaagaagcattcac

SEQ ID NO: 5664172 - DNA, 25 bp, Homo sapien
gataaaacttcgagaattccctgag

SEQ ID NO: 5664173 - DNA, 25 bp, Homo sapien
tcttctagagcctttagatcacatc

SEQ ID NO: 5664174 - DNA, 25 bp, Homo sapien
cttgataaaacttcgagaattccct

SEQ ID NO: 5664175 - DNA, 25 bp, Homo sapien
tagagcctttagatcacatcaagtg

SEQ ID NO: 5664176 - DNA, 25 bp, Homo sapien
taaaacttcgagaattccctgagac

SEQ ID NO: 5664177 - DNA, 25 bp, Homo sapien
gtgaatgcttcttcatacttaagtc

SEQ ID NO: 5664178 - DNA, 25 bp, Homo sapien
gtctcagggaattctcgaagtttta

SEQ ID NO: 5664179 - DNA, 25 bp, Homo sapien
cacttgatgtgatctaaaggctcta

SEQ ID NO: 5664180 - DNA, 25 bp, Homo sapien
cttgatgtgatctaaaggctctaga

SEQ ID NO: 5664181 - DNA, 25 bp, Homo sapien
cagggaattctcgaagttttatcaa

SEQ ID NO: 5664182 - DNA, 25 bp, Homo sapien
gatgtgatctaaaggctctagaaga

SEQ ID NO: 5664183 - DNA, 25 bp, Homo sapien
ctagcacgggagcaagctctgtagc

SEQ ID NO: 5664184 - DNA, 25 bp, Homo sapien
gaggtctagagtgatctgtgggcta

SEQ ID NO: 5664185 - DNA, 25 bp, Homo sapien
gaaggtgtgtagcagcccactttct

SEQ ID NO: 5664186 - DNA, 25 bp, Homo sapien
agaagaaggtgtgtagcagcccact

SEQ ID NO: 5664187 - DNA, 25 bp, Homo sapien
ctctgtagccattgtgatctttaac

SEQ ID NO: 5664188 - DNA, 25 bp, Homo sapien
ggctagcacgggagcaagctctgta

SEQ ID NO: 5664189 - DNA, 25 bp, Homo sapien
agaaagtgggctgctacacaccttc

SEQ ID NO: 5664190 - DNA, 25 bp, Homo sapien
tagcccacagatcactctagacctc

SEQ ID NO: 5664191 - DNA, 25 bp, Homo sapien
tacagagcttgctcccgtgctagcc

SEQ ID NO: 5664192 - DNA, 25 bp, Homo sapien
gttaaagatcacaatggctacagag

SEQ ID NO: 5664193 - DNA, 25 bp, Homo sapien
agtgggctgctacacaccttcttct

SEQ ID NO: 5664194 - DNA, 25 bp, Homo sapien
gctacagagcttgctcccgtgctag

SEQ ID NO: 5664195 - DNA, 25 bp, Homo sapien
caacaagcaggtcatccgtgtctac

SEQ ID NO: 5664196 - DNA, 25 bp, Homo sapien
aacaagcaggtcatccgtgtctaca

SEQ ID NO: 5664197 - DNA, 25 bp, Homo sapien
ccaacaagcaggtcatccgtgtcta

SEQ ID NO: 5664198 - DNA, 25 bp, Homo sapien
aagcaggtcatccgtgtctacagcc

SEQ ID NO: 5664199 - DNA, 25 bp, Homo sapien
acaagcaggtcatccgtgtctacag

SEQ ID NO: 5664200 - DNA, 25 bp, Homo sapien
caagcaggtcatccgtgtctacagc

SEQ ID NO: 5664201 - DNA, 25 bp, Homo sapien
gctgtagacacggatgacctgcttg

SEQ ID NO: 5664202 - DNA, 25 bp, Homo sapien
tgtagacacggatgacctgcttgtt

SEQ ID NO: 5664203 - DNA, 25 bp, Homo sapien
gtagacacggatgacctgcttgttg

SEQ ID NO: 5664204 - DNA, 25 bp, Homo sapien
ctgtagacacggatgacctgcttgt

SEQ ID NO: 5664205 - DNA, 25 bp, Homo sapien
tagacacggatgacctgcttgttgg

SEQ ID NO: 5664206 - DNA, 25 bp, Homo sapien
ggctgtagacacggatgacctgctt

SEQ ID NO: 5664207 - DNA, 25 bp, Homo sapien
tcgcttgggttcatgagttcaaatc

SEQ ID NO: 5664208 - DNA, 25 bp, Homo sapien
gagaatcgcttgggttcatgagttc

SEQ ID NO: 5664209 - DNA, 25 bp, Homo sapien
cgcttgggttcatgagttcaaatcc

SEQ ID NO: 5664210 - DNA, 25 bp, Homo sapien
ggatttgaactcatgaacccaagcg

SEQ ID NO: 5664211 - DNA, 25 bp, Homo sapien
gaactcatgaacccaagcgattctc

SEQ ID NO: 5664212 - DNA, 25 bp, Homo sapien
gatttgaactcatgaacccaagcga

SEQ ID NO: 5664213 - DNA, 25 bp, Homo sapien
tcgcttgggttcatgagttcaaatc

SEQ ID NO: 5664214 - DNA, 25 bp, Homo sapien
cttgggttcatgagttcaaatcctg

SEQ ID NO: 5664215 - DNA, 25 bp, Homo sapien
aatcctgaactcaccagcttgggca

SEQ ID NO: 5664216 - DNA, 25 bp, Homo sapien
ggagaatcgcttgggttcatgagtt

SEQ ID NO: 5664217 - DNA, 25 bp, Homo sapien
cgcttgggttcatgagttcaaatcc

SEQ ID NO: 5664218 - DNA, 25 bp, Homo sapien
tcaaatcctgaactcaccagcttgg

SEQ ID NO: 5664219 - DNA, 25 bp, Homo sapien
caagctggtgagttcaggatttgaa

SEQ ID NO: 5664220 - DNA, 25 bp, Homo sapien
ggatttgaactcatgaacccaagcg

SEQ ID NO: 5664221 - DNA, 25 bp, Homo sapien
cccaagctggtgagttcaggatttg

SEQ ID NO: 5664222 - DNA, 25 bp, Homo sapien
caggatttgaactcatgaacccaag

SEQ ID NO: 5664223 - DNA, 25 bp, Homo sapien
gatttgaactcatgaacccaagcga

SEQ ID NO: 5664224 - DNA, 25 bp, Homo sapien
tgcccaagctggtgagttcaggatt

SEQ ID NO: 5664225 - DNA, 25 bp, Homo sapien
tacacgcttcatcagcagtgcagat

SEQ ID NO: 5664226 - DNA, 25 bp, Homo sapien
tctatatttgatttatctccgccag

SEQ ID NO: 5664227 - DNA, 25 bp, Homo sapien
aattgtccaatacacgcttcatcag

SEQ ID NO: 5664228 - DNA, 25 bp, Homo sapien
gccagtcaattgtccaatacacgct

SEQ ID NO: 5664229 - DNA, 25 bp, Homo sapien
tatctccgccagtcaattgtccaat

SEQ ID NO: 5664230 - DNA, 25 bp, Homo sapien
agaattctaacatgccccagcaagc

SEQ ID NO: 5664231 - DNA, 25 bp, Homo sapien
tggacaattgactggcggagataaa

SEQ ID NO: 5664232 - DNA, 25 bp, Homo sapien
gaagcgtgtattggacaattgactg

SEQ ID NO: 5664233 - DNA, 25 bp, Homo sapien
atctgcactgctgatgaagcgtgta

SEQ ID NO: 5664234 - DNA, 25 bp, Homo sapien
tgtattggacaattgactggcggag

SEQ ID NO: 5664235 - DNA, 25 bp, Homo sapien
actgctgatgaagcgtgtattggac

SEQ ID NO: 5664236 - DNA, 25 bp, Homo sapien
gactggcggagataaatcaaatata

SEQ ID NO: 5664237 - DNA, 25 bp, Homo sapien
atttcactgataattgccctagttc

SEQ ID NO: 5664238 - DNA, 25 bp, Homo sapien
attgccctagttcagggccccattt

SEQ ID NO: 5664239 - DNA, 25 bp, Homo sapien
tttcactgataattgccctagttca

SEQ ID NO: 5664240 - DNA, 25 bp, Homo sapien
aaatggggccctgaactagggcaat

SEQ ID NO: 5664241 - DNA, 25 bp, Homo sapien
tgaactagggcaattatcagtgaaa

SEQ ID NO: 5664242 - DNA, 25 bp, Homo sapien
gaactagggcaattatcagtgaaat

SEQ ID NO: 5664243 - DNA, 25 bp, Homo sapien
gtctcctaactgatttctctacctc

SEQ ID NO: 5664244 - DNA, 25 bp, Homo sapien
ctgatttctctacctccacccaact

SEQ ID NO: 5664245 - DNA, 25 bp, Homo sapien
gtcctggatttcactgataattgcc

SEQ ID NO: 5664246 - DNA, 25 bp, Homo sapien
tcagggccccatttcatcatgcctg

SEQ ID NO: 5664247 - DNA, 25 bp, Homo sapien
gataattgccctagttcagggcccc

SEQ ID NO: 5664248 - DNA, 25 bp, Homo sapien
tttgtctcctaactgatttctctac

SEQ ID NO: 5664249 - DNA, 25 bp, Homo sapien
agttgggtggaggtagagaaatcag

SEQ ID NO: 5664250 - DNA, 25 bp, Homo sapien
gtagagaaatcagttaggagacaaa

SEQ ID NO: 5664251 - DNA, 25 bp, Homo sapien
gacaaatgtcaaacaggcatgatga

SEQ ID NO: 5664252 - DNA, 25 bp, Homo sapien
gaggtagagaaatcagttaggagac

SEQ ID NO: 5664253 - DNA, 25 bp, Homo sapien
gcaattatcagtgaaatccaggaca

SEQ ID NO: 5664254 - DNA, 25 bp, Homo sapien
gggccctgaactagggcaattatca

SEQ ID NO: 5664255 - DNA, 25 bp, Homo sapien
tcttccacctaagctctgagcctcc

SEQ ID NO: 5664256 - DNA, 25 bp, Homo sapien
agcctccaacatctccaacttcttt

SEQ ID NO: 5664257 - DNA, 25 bp, Homo sapien
gcctccaacatctccaacttctttt

SEQ ID NO: 5664258 - DNA, 25 bp, Homo sapien
cctaagctctgagcctccaacatct

SEQ ID NO: 5664259 - DNA, 25 bp, Homo sapien
ggaggctcagagcttaggtggaaga

SEQ ID NO: 5664260 - DNA, 25 bp, Homo sapien
aaaagaagttggagatgttggaggc

SEQ ID NO: 5664261 - DNA, 25 bp, Homo sapien
aaagaagttggagatgttggaggct

SEQ ID NO: 5664262 - DNA, 25 bp, Homo sapien
agatgttggaggctcagagcttagg

SEQ ID NO: 5664263 - DNA, 25 bp, Homo sapien
tgcattccttgtcacatggccccct

SEQ ID NO: 5664264 - DNA, 25 bp, Homo sapien
agggggccatgtgacaaggaatgca

SEQ ID NO: 5664265 - DNA, 25 bp, Homo sapien
catcagatccttcttgtgcttcaga

SEQ ID NO: 5664266 - DNA, 25 bp, Homo sapien
gccacctgcattccttgtcacatgg

SEQ ID NO: 5664267 - DNA, 25 bp, Homo sapien
ttcagatctctgacttcctccgtct

SEQ ID NO: 5664268 - DNA, 25 bp, Homo sapien
ccatctccaagatagcaacagcaca

SEQ ID NO: 5664269 - DNA, 25 bp, Homo sapien
gatagcaacagcacatcagatcctt

SEQ ID NO: 5664270 - DNA, 25 bp, Homo sapien
ccttcttgtgcttcagatctctgac

SEQ ID NO: 5664271 - DNA, 25 bp, Homo sapien
tctgaagcacaagaaggatctgatg

SEQ ID NO: 5664272 - DNA, 25 bp, Homo sapien
tcagagatctgaagcacaagaagga

SEQ ID NO: 5664273 - DNA, 25 bp, Homo sapien
ccatgtgacaaggaatgcaggtggc

SEQ ID NO: 5664274 - DNA, 25 bp, Homo sapien
agacggaggaagtcagagatctgaa

SEQ ID NO: 5664275 - DNA, 25 bp, Homo sapien
tgtgctgttgctatcttggagatgg

SEQ ID NO: 5664276 - DNA, 25 bp, Homo sapien
caagaaggatctgatgtgctgttgc

SEQ ID NO: 5664277 - DNA, 25 bp, Homo sapien
catgcagtttgggtggggccacaaa

SEQ ID NO: 5664278 - DNA, 25 bp, Homo sapien
catggtgtcaatagaaatagaactg

SEQ ID NO: 5664279 - DNA, 25 bp, Homo sapien
tctcatctggaggttctgaaagaaa

SEQ ID NO: 5664280 - DNA, 25 bp, Homo sapien
caaggcagaaatcatggtgtcaata

SEQ ID NO: 5664281 - DNA, 25 bp, Homo sapien
tagaactgagttctcatctggaggt

SEQ ID NO: 5664282 - DNA, 25 bp, Homo sapien
gggccacaaatccaaacaaggcaga

SEQ ID NO: 5664283 - DNA, 25 bp, Homo sapien
tgccttgtttggatttgtggcccca

SEQ ID NO: 5664284 - DNA, 25 bp, Homo sapien
ttttctttcagaacctccagatgag

SEQ ID NO: 5664285 - DNA, 25 bp, Homo sapien
cagttctatttctattgacaccatg

SEQ ID NO: 5664286 - DNA, 25 bp, Homo sapien
tattgacaccatgatttctgccttg

SEQ ID NO: 5664287 - DNA, 25 bp, Homo sapien
acctccagatgagaactcagttcta

SEQ ID NO: 5664288 - DNA, 25 bp, Homo sapien
tttgtggccccacccaaactgcatg

SEQ ID NO: 5664289 - DNA, 25 bp, Homo sapien
acttgcaatggtggcagaaagcaaa

SEQ ID NO: 5664290 - DNA, 25 bp, Homo sapien
aaacttgcaatggtggcagaaagca

SEQ ID NO: 5664291 - DNA, 25 bp, Homo sapien
aacttgcaatggtggcagaaagcaa

SEQ ID NO: 5664292 - DNA, 25 bp, Homo sapien
ttgctttctgccaccattgcaagtt

SEQ ID NO: 5664293 - DNA, 25 bp, Homo sapien
tttgctttctgccaccattgcaagt

SEQ ID NO: 5664294 - DNA, 25 bp, Homo sapien
tgctttctgccaccattgcaagttt

SEQ ID NO: 5664295 - DNA, 25 bp, Homo sapien
acttgcaatggtggcagaaagcaaa

SEQ ID NO: 5664296 - DNA, 25 bp, Homo sapien
ggagaagcaggcacatcatggccag

SEQ ID NO: 5664297 - DNA, 25 bp, Homo sapien
tgcaatggtggcagaaagcaaagga

SEQ ID NO: 5664298 - DNA, 25 bp, Homo sapien
gcaggcacatcatggccagagcagg

SEQ ID NO: 5664299 - DNA, 25 bp, Homo sapien
aaacttgcaatggtggcagaaagca

SEQ ID NO: 5664300 - DNA, 25 bp, Homo sapien
aacttgcaatggtggcagaaagcaa

SEQ ID NO: 5664301 - DNA, 25 bp, Homo sapien
tcctttgctttctgccaccattgca

SEQ ID NO: 5664302 - DNA, 25 bp, Homo sapien
tctggccatgatgtgcctgcttctc

SEQ ID NO: 5664303 - DNA, 25 bp, Homo sapien
ttgctttctgccaccattgcaagtt

SEQ ID NO: 5664304 - DNA, 25 bp, Homo sapien
tttgctttctgccaccattgcaagt

SEQ ID NO: 5664305 - DNA, 25 bp, Homo sapien
tgctttctgccaccattgcaagttt

SEQ ID NO: 5664306 - DNA, 25 bp, Homo sapien
cctgctctggccatgatgtgcctgc

SEQ ID NO: 5664307 - DNA, 25 bp, Homo sapien
accaatttattagctcacggttttg

SEQ ID NO: 5664308 - DNA, 25 bp, Homo sapien
cagcacccggcctaacaataccaat

SEQ ID NO: 5664309 - DNA, 25 bp, Homo sapien
acagcacccggcctaacaataccaa

SEQ ID NO: 5664310 - DNA, 25 bp, Homo sapien
agcacccggcctaacaataccaatt

SEQ ID NO: 5664311 - DNA, 25 bp, Homo sapien
aataccaatttattagctcacggtt

SEQ ID NO: 5664312 - DNA, 25 bp, Homo sapien
ataccaatttattagctcacggttt

SEQ ID NO: 5664313 - DNA, 25 bp, Homo sapien
aaccgtgagctaataaattggtatt

SEQ ID NO: 5664314 - DNA, 25 bp, Homo sapien
aaaccgtgagctaataaattggtat

SEQ ID NO: 5664315 - DNA, 25 bp, Homo sapien
aattggtattgttaggccgggtgct

SEQ ID NO: 5664316 - DNA, 25 bp, Homo sapien
caaaaccgtgagctaataaattggt

SEQ ID NO: 5664317 - DNA, 25 bp, Homo sapien
ttggtattgttaggccgggtgctgt

SEQ ID NO: 5664318 - DNA, 25 bp, Homo sapien
attggtattgttaggccgggtgctg

SEQ ID NO: 5664319 - DNA, 25 bp, Homo sapien
gctgtgtgcttggtccttgtattag

SEQ ID NO: 5664320 - DNA, 25 bp, Homo sapien
taggttagaagtccagtgctgtgtg

SEQ ID NO: 5664321 - DNA, 25 bp, Homo sapien
accaatttattagctcacggttttg

SEQ ID NO: 5664322 - DNA, 25 bp, Homo sapien
tagctcacggttttgtaggttagaa

SEQ ID NO: 5664323 - DNA, 25 bp, Homo sapien
agcacccggcctaacaataccaatt

SEQ ID NO: 5664324 - DNA, 25 bp, Homo sapien
aataccaatttattagctcacggtt

SEQ ID NO: 5664325 - DNA, 25 bp, Homo sapien
gtagctaggattataggcatgcacc

SEQ ID NO: 5664326 - DNA, 25 bp, Homo sapien
tagctaggattataggcatgcacca

SEQ ID NO: 5664327 - DNA, 25 bp, Homo sapien
gctaggattataggcatgcaccacc

SEQ ID NO: 5664328 - DNA, 25 bp, Homo sapien
cctctacctcccgggctcaagcgat

SEQ ID NO: 5664329 - DNA, 25 bp, Homo sapien
agtagctaggattataggcatgcac

SEQ ID NO: 5664330 - DNA, 25 bp, Homo sapien
ctaggattataggcatgcaccacca

SEQ ID NO: 5664331 - DNA, 25 bp, Homo sapien
tggtggtgcatgcctataatcctag

SEQ ID NO: 5664332 - DNA, 25 bp, Homo sapien
ggtggtgcatgcctataatcctagc

SEQ ID NO: 5664333 - DNA, 25 bp, Homo sapien
gtgcatgcctataatcctagctact

SEQ ID NO: 5664334 - DNA, 25 bp, Homo sapien
tggtgcatgcctataatcctagcta

SEQ ID NO: 5664335 - DNA, 25 bp, Homo sapien
atcgcttgagcccgggaggtagagg

SEQ ID NO: 5664336 - DNA, 25 bp, Homo sapien
ggtgcatgcctataatcctagctac

SEQ ID NO: 5664337 - DNA, 25 bp, Homo sapien
attagttttctttcgcaccataaca

SEQ ID NO: 5664338 - DNA, 25 bp, Homo sapien
tcctttttgatcccagtggagtcac

SEQ ID NO: 5664339 - DNA, 25 bp, Homo sapien
tggacagctctcttcgccatacata

SEQ ID NO: 5664340 - DNA, 25 bp, Homo sapien
tcgccatacatacttctgtattata

SEQ ID NO: 5664341 - DNA, 25 bp, Homo sapien
gacagctctcttcgccatacatact

SEQ ID NO: 5664342 - DNA, 25 bp, Homo sapien
gctctcttcgccatacatacttctg

SEQ ID NO: 5664343 - DNA, 25 bp, Homo sapien
gtgactccactgggatcaaaaagga

SEQ ID NO: 5664344 - DNA, 25 bp, Homo sapien
tatgtatggcgaagagagctgtcca

SEQ ID NO: 5664345 - DNA, 25 bp, Homo sapien
tataatacagaagtatgtatggcga

SEQ ID NO: 5664346 - DNA, 25 bp, Homo sapien
cagaagtatgtatggcgaagagagc

SEQ ID NO: 5664347 - DNA, 25 bp, Homo sapien
tgttatggtgcgaaagaaaactaat

SEQ ID NO: 5664348 - DNA, 25 bp, Homo sapien
tacagaagtatgtatggcgaagaga

SEQ ID NO: 5664349 - DNA, 25 bp, Homo sapien
agaactatgttaagtgttaagaact

SEQ ID NO: 5664350 - DNA, 25 bp, Homo sapien
tctgcttattttttacgcaggaacc

SEQ ID NO: 5664351 - DNA, 25 bp, Homo sapien
tgtgtgtagaactatgttaagtgtt

SEQ ID NO: 5664352 - DNA, 25 bp, Homo sapien
tagaactatgttaagtgttaagaac

SEQ ID NO: 5664353 - DNA, 25 bp, Homo sapien
tgtgtgtgtagaactatgttaagtg

SEQ ID NO: 5664354 - DNA, 25 bp, Homo sapien
tgcttattttttacgcaggaaccag

SEQ ID NO: 5664355 - DNA, 25 bp, Homo sapien
tcttaacacttaacatagttctaca

SEQ ID NO: 5664356 - DNA, 25 bp, Homo sapien
ggttcctgcgtaaaaaataagcaga

SEQ ID NO: 5664357 - DNA, 25 bp, Homo sapien
taacacttaacatagttctacacac

SEQ ID NO: 5664358 - DNA, 25 bp, Homo sapien
agttcttaacacttaacatagttct

SEQ ID NO: 5664359 - DNA, 25 bp, Homo sapien
ctggttcctgcgtaaaaaataagca

SEQ ID NO: 5664360 - DNA, 25 bp, Homo sapien
cacttaacatagttctacacacaca

SEQ ID NO: 5664361 - DNA, 25 bp, Homo sapien
tcccctttcgttacttatagagcta

SEQ ID NO: 5664362 - DNA, 25 bp, Homo sapien
tagctctataagtaacgaaagggga

SEQ ID NO: 5664363 - DNA, 25 bp, Homo sapien
tgagttttttcctctgcttagttcc

SEQ ID NO: 5664364 - DNA, 25 bp, Homo sapien
ctttcgttacttatagagctacctg

SEQ ID NO: 5664365 - DNA, 25 bp, Homo sapien
tcccctttcgttacttatagagcta

SEQ ID NO: 5664366 - DNA, 25 bp, Homo sapien
cgttacttatagagctacctggatg

SEQ ID NO: 5664367 - DNA, 25 bp, Homo sapien
gctaggttgtataaactgtttctta

SEQ ID NO: 5664368 - DNA, 25 bp, Homo sapien
cttatagagctacctggatgttttt

SEQ ID NO: 5664369 - DNA, 25 bp, Homo sapien
ccaggtagctctataagtaacgaaa

SEQ ID NO: 5664370 - DNA, 25 bp, Homo sapien
aaaaacatccaggtagctctataag

SEQ ID NO: 5664371 - DNA, 25 bp, Homo sapien
catccaggtagctctataagtaacg

SEQ ID NO: 5664372 - DNA, 25 bp, Homo sapien
taagaaacagtttatacaacctagc

SEQ ID NO: 5664373 - DNA, 25 bp, Homo sapien
ggaactaagcagaggaaaaaactca

SEQ ID NO: 5664374 - DNA, 25 bp, Homo sapien
aggtagctctataagtaacgaaagg

SEQ ID NO: 5664375 - DNA, 25 bp, Homo sapien
atggtgaatatatgccatggcaaaa

SEQ ID NO: 5664376 - DNA, 25 bp, Homo sapien
caaatggtgaatatatgccatggca

SEQ ID NO: 5664377 - DNA, 25 bp, Homo sapien
aaatggtgaatatatgccatggcaa

SEQ ID NO: 5664378 - DNA, 25 bp, Homo sapien
tggtgaatatatgccatggcaaaaa

SEQ ID NO: 5664379 - DNA, 25 bp, Homo sapien
aatggtgaatatatgccatggcaaa

SEQ ID NO: 5664380 - DNA, 25 bp, Homo sapien
tcaaatggtgaatatatgccatggc

SEQ ID NO: 5664381 - DNA, 25 bp, Homo sapien
tgccatggcatatattcaccatttg

SEQ ID NO: 5664382 - DNA, 25 bp, Homo sapien
tttttgccatggcatatattcacca

SEQ ID NO: 5664383 - DNA, 25 bp, Homo sapien
ttttgccatggcatatattcaccat

SEQ ID NO: 5664384 - DNA, 25 bp, Homo sapien
gccatggcatatattcaccatttga

SEQ ID NO: 5664385 - DNA, 25 bp, Homo sapien
tttgccatggcatatattcaccatt

SEQ ID NO: 5664386 - DNA, 25 bp, Homo sapien
ttgccatggcatatattcaccattt

SEQ ID NO: 5664387 - DNA, 25 bp, Homo sapien
caccatttgatgtaaatcaatttat

SEQ ID NO: 5664388 - DNA, 25 bp, Homo sapien
gtaaccatgctcatctctacttcat

SEQ ID NO: 5664389 - DNA, 25 bp, Homo sapien
tttttgccatggcatatattcacca

SEQ ID NO: 5664390 - DNA, 25 bp, Homo sapien
gccatggcatatattcaccatttga

SEQ ID NO: 5664391 - DNA, 25 bp, Homo sapien
tttgccatggcatatattcaccatt

SEQ ID NO: 5664392 - DNA, 25 bp, Homo sapien
tattgttcactgtgtttcctcctcc

SEQ ID NO: 5664393 - DNA, 25 bp, Homo sapien
ctgggcttggatgttaggctctctg

SEQ ID NO: 5664394 - DNA, 25 bp, Homo sapien
gcctgggcttggatgttaggctctc

SEQ ID NO: 5664395 - DNA, 25 bp, Homo sapien
tgggcttggatgttaggctctctga

SEQ ID NO: 5664396 - DNA, 25 bp, Homo sapien
cctgggcttggatgttaggctctct

SEQ ID NO: 5664397 - DNA, 25 bp, Homo sapien
atgcctgggcttggatgttaggctc

SEQ ID NO: 5664398 - DNA, 25 bp, Homo sapien
ccacctttagcaggggagttacatg

SEQ ID NO: 5664399 - DNA, 25 bp, Homo sapien
gagagcctaacatccaagcccaggc

SEQ ID NO: 5664400 - DNA, 25 bp, Homo sapien
atgtaactcccctgctaaaggtggg

SEQ ID NO: 5664401 - DNA, 25 bp, Homo sapien
agagagcctaacatccaagcccagg

SEQ ID NO: 5664402 - DNA, 25 bp, Homo sapien
gagcctaacatccaagcccaggcat

SEQ ID NO: 5664403 - DNA, 25 bp, Homo sapien
tcagagagcctaacatccaagccca

SEQ ID NO: 5664404 - DNA, 25 bp, Homo sapien
catgtaactcccctgctaaaggtgg

SEQ ID NO: 5664405 - DNA, 25 bp, Homo sapien
ttggttgtgggactgagcaggtcag

SEQ ID NO: 5664406 - DNA, 25 bp, Homo sapien
tcttggttgtgggactgagcaggtc

SEQ ID NO: 5664407 - DNA, 25 bp, Homo sapien
gctaggctcttggttgtgggactga

SEQ ID NO: 5664408 - DNA, 25 bp, Homo sapien
tctgctttgtgctaggctcttggtt

SEQ ID NO: 5664409 - DNA, 25 bp, Homo sapien
ctttgtgctaggctcttggttgtgg

SEQ ID NO: 5664410 - DNA, 25 bp, Homo sapien
tgctttgtgctaggctcttggttgt

SEQ ID NO: 5664411 - DNA, 25 bp, Homo sapien
aaccaagagcctagcacaaagcaga

SEQ ID NO: 5664412 - DNA, 25 bp, Homo sapien
caaccaagagcctagcacaaagcag

SEQ ID NO: 5664413 - DNA, 25 bp, Homo sapien
tgctcagtcccacaaccaagagcct

SEQ ID NO: 5664414 - DNA, 25 bp, Homo sapien
acaaccaagagcctagcacaaagca

SEQ ID NO: 5664415 - DNA, 25 bp, Homo sapien
tgacctgctcagtcccacaaccaag

SEQ ID NO: 5664416 - DNA, 25 bp, Homo sapien
ccacaaccaagagcctagcacaaag

SEQ ID NO: 5664417 - DNA, 25 bp, Homo sapien
gaggcaacctacatcaaccacaatt

SEQ ID NO: 5664418 - DNA, 25 bp, Homo sapien
catggaggcaacctacatcaaccac

SEQ ID NO: 5664419 - DNA, 25 bp, Homo sapien
gtaattccttcaattcaccccgcaa

SEQ ID NO: 5664420 - DNA, 25 bp, Homo sapien
ggtaattccttcaattcaccccgca

SEQ ID NO: 5664421 - DNA, 25 bp, Homo sapien
gccatggaggcaacctacatcaacc

SEQ ID NO: 5664422 - DNA, 25 bp, Homo sapien
tccttcaattcaccccgcaacctgg

SEQ ID NO: 5664423 - DNA, 25 bp, Homo sapien
tgtggttgatgtaggttgcctccat

SEQ ID NO: 5664424 - DNA, 25 bp, Homo sapien
tggttgatgtaggttgcctccatgg

SEQ ID NO: 5664425 - DNA, 25 bp, Homo sapien
ttgtggttgatgtaggttgcctcca

SEQ ID NO: 5664426 - DNA, 25 bp, Homo sapien
aattgtggttgatgtaggttgcctc

SEQ ID NO: 5664427 - DNA, 25 bp, Homo sapien
tgcggggtgaattgaaggaattacc

SEQ ID NO: 5664428 - DNA, 25 bp, Homo sapien
ggttgatgtaggttgcctccatggc

SEQ ID NO: 5664429 - DNA, 25 bp, Homo sapien
gttgcagtgagccgtggacacacca

SEQ ID NO: 5664430 - DNA, 25 bp, Homo sapien
ggttgcagtgagccgtggacacacc

SEQ ID NO: 5664431 - DNA, 25 bp, Homo sapien
ggtgtgtccacggctcactgcaacc

SEQ ID NO: 5664432 - DNA, 25 bp, Homo sapien
tggtgtgtccacggctcactgcaac

SEQ ID NO: 5664433 - DNA, 25 bp, Homo sapien
gcggagaatcacttgacatcaggag

SEQ ID NO: 5664434 - DNA, 25 bp, Homo sapien
ccgaggcggagaatcacttgacatc

SEQ ID NO: 5664435 - DNA, 25 bp, Homo sapien
cgaggcggagaatcacttgacatca

SEQ ID NO: 5664436 - DNA, 25 bp, Homo sapien
ggcggagaatcacttgacatcagga

SEQ ID NO: 5664437 - DNA, 25 bp, Homo sapien
gaggcggagaatcacttgacatcag

SEQ ID NO: 5664438 - DNA, 25 bp, Homo sapien
gaatcacttgacatcaggagatcga

SEQ ID NO: 5664439 - DNA, 25 bp, Homo sapien
ctcctgatgtcaagtgattctccgc

SEQ ID NO: 5664440 - DNA, 25 bp, Homo sapien
tcgatctcctgatgtcaagtgattc

SEQ ID NO: 5664441 - DNA, 25 bp, Homo sapien
gatgtcaagtgattctccgcctcgg

SEQ ID NO: 5664442 - DNA, 25 bp, Homo sapien
tcctgatgtcaagtgattctccgcc

SEQ ID NO: 5664443 - DNA, 25 bp, Homo sapien
tgatgtcaagtgattctccgcctcg

SEQ ID NO: 5664444 - DNA, 25 bp, Homo sapien
ctgatgtcaagtgattctccgcctc

SEQ ID NO: 5664445 - DNA, 25 bp, Homo sapien
tatacaccataaaggaaaaccatgt

SEQ ID NO: 5664446 - DNA, 25 bp, Homo sapien
aaattaacaaaacaggctggacacg

SEQ ID NO: 5664447 - DNA, 25 bp, Homo sapien
gaaaaccatgtcactcaaaaattaa

SEQ ID NO: 5664448 - DNA, 25 bp, Homo sapien
tatgtatttatacaccataaaggaa

SEQ ID NO: 5664449 - DNA, 25 bp, Homo sapien
taaaggaaaaccatgtcactcaaaa

SEQ ID NO: 5664450 - DNA, 25 bp, Homo sapien
attaacaaaacaggctggacacggt

SEQ ID NO: 5664451 - DNA, 25 bp, Homo sapien
tgagtgacatggttttcctttatgg

SEQ ID NO: 5664452 - DNA, 25 bp, Homo sapien
accgtgtccagcctgttttgttaat

SEQ ID NO: 5664453 - DNA, 25 bp, Homo sapien
catggttttcctttatggtgtataa

SEQ ID NO: 5664454 - DNA, 25 bp, Homo sapien
ttcctttatggtgtataaatacata

SEQ ID NO: 5664455 - DNA, 25 bp, Homo sapien
ccgtgtccagcctgttttgttaatt

SEQ ID NO: 5664456 - DNA, 25 bp, Homo sapien
taatttttgagtgacatggttttcc

SEQ ID NO: 5664457 - DNA, 25 bp, Homo sapien
tttcgacttttgccatcttgcatac

SEQ ID NO: 5664458 - DNA, 25 bp, Homo sapien
ttcgacttttgccatcttgcatacc

SEQ ID NO: 5664459 - DNA, 25 bp, Homo sapien
ctttttcgacttttgccatcttgca

SEQ ID NO: 5664460 - DNA, 25 bp, Homo sapien
tttttcgacttttgccatcttgcat

SEQ ID NO: 5664461 - DNA, 25 bp, Homo sapien
ttttcgacttttgccatcttgcata

SEQ ID NO: 5664462 - DNA, 25 bp, Homo sapien
ggtatgcaagatggcaaaagtcgaa

SEQ ID NO: 5664463 - DNA, 25 bp, Homo sapien
tgcaagatggcaaaagtcgaaaaag

SEQ ID NO: 5664464 - DNA, 25 bp, Homo sapien
gtatgcaagatggcaaaagtcgaaa

SEQ ID NO: 5664465 - DNA, 25 bp, Homo sapien
tatgcaagatggcaaaagtcgaaaa

SEQ ID NO: 5664466 - DNA, 25 bp, Homo sapien
atgcaagatggcaaaagtcgaaaaa

SEQ ID NO: 5664467 - DNA, 25 bp, Homo sapien
ttcgacttttgccatcttgcatacc

SEQ ID NO: 5664468 - DNA, 25 bp, Homo sapien
ctttttcgacttttgccatcttgca

SEQ ID NO: 5664469 - DNA, 25 bp, Homo sapien
cctggcccaaatgttattcatttaa

SEQ ID NO: 5664470 - DNA, 25 bp, Homo sapien
gacttttgccatcttgcataccttg

SEQ ID NO: 5664471 - DNA, 25 bp, Homo sapien
cataccttgttcagtgtttgcttac

SEQ ID NO: 5664472 - DNA, 25 bp, Homo sapien
ttttcgacttttgccatcttgcata

SEQ ID NO: 5664473 - DNA, 25 bp, Homo sapien
caaggtatgcaagatggcaaaagtc

SEQ ID NO: 5664474 - DNA, 25 bp, Homo sapien
taaatgaataacatttgggccaggt

SEQ ID NO: 5664475 - DNA, 25 bp, Homo sapien
ggtatgcaagatggcaaaagtcgaa

SEQ ID NO: 5664476 - DNA, 25 bp, Homo sapien
tatttaaatgaataacatttgggcc

SEQ ID NO: 5664477 - DNA, 25 bp, Homo sapien
tgcaagatggcaaaagtcgaaaaag

SEQ ID NO: 5664478 - DNA, 25 bp, Homo sapien
gtaagcaaacactgaacaaggtatg

SEQ ID NO: 5664479 - DNA, 25 bp, Homo sapien
gcctggctactttctatatttttag

SEQ ID NO: 5664480 - DNA, 25 bp, Homo sapien
ctggctactttctatatttttagta

SEQ ID NO: 5664481 - DNA, 25 bp, Homo sapien
gcctcaagtgatccatcagccttgg

SEQ ID NO: 5664482 - DNA, 25 bp, Homo sapien
acgcctggctactttctatattttt

SEQ ID NO: 5664483 - DNA, 25 bp, Homo sapien
tacgcctggctactttctatatttt

SEQ ID NO: 5664484 - DNA, 25 bp, Homo sapien
cgcctggctactttctatattttta

SEQ ID NO: 5664485 - DNA, 25 bp, Homo sapien
ccaaggctgatggatcacttgaggc

SEQ ID NO: 5664486 - DNA, 25 bp, Homo sapien
taaaaatatagaaagtagccaggcg

SEQ ID NO: 5664487 - DNA, 25 bp, Homo sapien
aaaatatagaaagtagccaggcgta

SEQ ID NO: 5664488 - DNA, 25 bp, Homo sapien
ctaaaaatatagaaagtagccaggc

SEQ ID NO: 5664489 - DNA, 25 bp, Homo sapien
aaaaatatagaaagtagccaggcgt

SEQ ID NO: 5664490 - DNA, 25 bp, Homo sapien
tactaaaaatatagaaagtagccag

SEQ ID NO: 5664491 - DNA, 25 bp, Homo sapien
actgcagcgtctgcctcccacattc

SEQ ID NO: 5664492 - DNA, 25 bp, Homo sapien
gcagcgtctgcctcccacattcaag

SEQ ID NO: 5664493 - DNA, 25 bp, Homo sapien
gcgtctgcctcccacattcaagtga

SEQ ID NO: 5664494 - DNA, 25 bp, Homo sapien
cagcgtctgcctcccacattcaagt

SEQ ID NO: 5664495 - DNA, 25 bp, Homo sapien
agcgtctgcctcccacattcaagtg

SEQ ID NO: 5664496 - DNA, 25 bp, Homo sapien
cactgcagcgtctgcctcccacatt

SEQ ID NO: 5664497 - DNA, 25 bp, Homo sapien
gaatgtgggaggcagacgctgcagt

SEQ ID NO: 5664498 - DNA, 25 bp, Homo sapien
tcacttgaatgtgggaggcagacgc

SEQ ID NO: 5664499 - DNA, 25 bp, Homo sapien
aatgtgggaggcagacgctgcagtg

SEQ ID NO: 5664500 - DNA, 25 bp, Homo sapien
cacttgaatgtgggaggcagacgct

SEQ ID NO: 5664501 - DNA, 25 bp, Homo sapien
cttgaatgtgggaggcagacgctgc

SEQ ID NO: 5664502 - DNA, 25 bp, Homo sapien
acttgaatgtgggaggcagacgctg

SEQ ID NO: 5664503 - DNA, 25 bp, Homo sapien
agtctctggagccttagttctctca

SEQ ID NO: 5664504 - DNA, 25 bp, Homo sapien
tggagccttagttctctcatctgca

SEQ ID NO: 5664505 - DNA, 25 bp, Homo sapien
tctgccgcgcttcctggcttagtct

SEQ ID NO: 5664506 - DNA, 25 bp, Homo sapien
gtagatgtacatagcactaccactg

SEQ ID NO: 5664507 - DNA, 25 bp, Homo sapien
agttctgccgcgcttcctggcttag

SEQ ID NO: 5664508 - DNA, 25 bp, Homo sapien
ttagttctctcatctgcaacaaggg

SEQ ID NO: 5664509 - DNA, 25 bp, Homo sapien
ctaccccttgttgcagatgagagaa

SEQ ID NO: 5664510 - DNA, 25 bp, Homo sapien
tgcagatgagagaactaaggctcca

SEQ ID NO: 5664511 - DNA, 25 bp, Homo sapien
tagtgctatgtacatctaccccttg

SEQ ID NO: 5664512 - DNA, 25 bp, Homo sapien
tgagagaactaaggctccagagact

SEQ ID NO: 5664513 - DNA, 25 bp, Homo sapien
ctaagccaggaagcgcggcagaact

SEQ ID NO: 5664514 - DNA, 25 bp, Homo sapien
gccccagtggtagtgctatgtacat

SEQ ID NO: 5664515 - DNA, 25 bp, Homo sapien
tgttaagcacagctggacttgaagc

SEQ ID NO: 5664516 - DNA, 25 bp, Homo sapien
gacatgggaataacgtatgtattat

SEQ ID NO: 5664517 - DNA, 25 bp, Homo sapien
aaagcactttgccaggtagaccgga

SEQ ID NO: 5664518 - DNA, 25 bp, Homo sapien
gtattataggtaaaagcactttgcc

SEQ ID NO: 5664519 - DNA, 25 bp, Homo sapien
gaaatgtggatgttaagcacagctg

SEQ ID NO: 5664520 - DNA, 25 bp, Homo sapien
ttgccaggtagaccggaaatgtgga

SEQ ID NO: 5664521 - DNA, 25 bp, Homo sapien
tccacatttccggtctacctggcaa

SEQ ID NO: 5664522 - DNA, 25 bp, Homo sapien
taatacatacgttattcccatgtct

SEQ ID NO: 5664523 - DNA, 25 bp, Homo sapien
ggcaaagtgcttttacctataatac

SEQ ID NO: 5664524 - DNA, 25 bp, Homo sapien
caagtccagctgtgcttaacatcca

SEQ ID NO: 5664525 - DNA, 25 bp, Homo sapien
gcttcaagtccagctgtgcttaaca

SEQ ID NO: 5664526 - DNA, 25 bp, Homo sapien
tccggtctacctggcaaagtgcttt

SEQ ID NO: 5664527 - DNA, 25 bp, Homo sapien
ccttgttaggaatgctgtcggcttc

SEQ ID NO: 5664528 - DNA, 25 bp, Homo sapien
tgtcatccgcaaggtgtgcgcctcc

SEQ ID NO: 5664529 - DNA, 25 bp, Homo sapien
ccccttgttaggaatgctgtcggct

SEQ ID NO: 5664530 - DNA, 25 bp, Homo sapien
tccgcaaggtgtgcgcctccttctg

SEQ ID NO: 5664531 - DNA, 25 bp, Homo sapien
aatgctgtcggcttctacagctgaa

SEQ ID NO: 5664532 - DNA, 25 bp, Homo sapien
taggaatgctgtcggcttctacagc

SEQ ID NO: 5664533 - DNA, 25 bp, Homo sapien
accaccacagacgaccctgtcatcc

SEQ ID NO: 5664534 - DNA, 25 bp, Homo sapien
ccaccacagacgaccctgtcatccg

SEQ ID NO: 5664535 - DNA, 25 bp, Homo sapien
accacagacgaccctgtcatccgca

SEQ ID NO: 5664536 - DNA, 25 bp, Homo sapien
caccacagacgaccctgtcatccgc

SEQ ID NO: 5664537 - DNA, 25 bp, Homo sapien
gcggatgacagggtcgtctgtggtg

SEQ ID NO: 5664538 - DNA, 25 bp, Homo sapien
tgcggatgacagggtcgtctgtggt

SEQ ID NO: 5664539 - DNA, 25 bp, Homo sapien
ggatgacagggtcgtctgtggtggt

SEQ ID NO: 5664540 - DNA, 25 bp, Homo sapien
cggatgacagggtcgtctgtggtgg

SEQ ID NO: 5664541 - DNA, 25 bp, Homo sapien
tcagctgtagaagccgacagcattc

SEQ ID NO: 5664542 - DNA, 25 bp, Homo sapien
cagaaggaggcgcacaccttgcgga

SEQ ID NO: 5664543 - DNA, 25 bp, Homo sapien
cttcagctgtagaagccgacagcat

SEQ ID NO: 5664544 - DNA, 25 bp, Homo sapien
ggaggcgcacaccttgcggatgaca

SEQ ID NO: 5664545 - DNA, 25 bp, Homo sapien
tgtagaagccgacagcattcctaac

SEQ ID NO: 5664546 - DNA, 25 bp, Homo sapien
aagccgacagcattcctaacaaggg

SEQ ID NO: 5664547 - DNA, 25 bp, Homo sapien
gggccctagaatactacgacaaagc

SEQ ID NO: 5664548 - DNA, 25 bp, Homo sapien
cactgcggagcatcaagcgcatctt

SEQ ID NO: 5664549 - DNA, 25 bp, Homo sapien
tttgaccgcatcaccacgaggagtg

SEQ ID NO: 5664550 - DNA, 25 bp, Homo sapien
tgagaagccactgcggagcatcaag

SEQ ID NO: 5664551 - DNA, 25 bp, Homo sapien
tagaatactacgacaaagcctttga

SEQ ID NO: 5664552 - DNA, 25 bp, Homo sapien
gcatcaagcgcatcttccacactgt

SEQ ID NO: 5664553 - DNA, 25 bp, Homo sapien
cactcctcgtggtgatgcggtcaaa

SEQ ID NO: 5664554 - DNA, 25 bp, Homo sapien
tcgtagtattctagggccccacaac

SEQ ID NO: 5664555 - DNA, 25 bp, Homo sapien
ttgatgctccgcagtggcttctcac

SEQ ID NO: 5664556 - DNA, 25 bp, Homo sapien
caaaggctttgtcgtagtattctag

SEQ ID NO: 5664557 - DNA, 25 bp, Homo sapien
acagtgtggaagatgcgcttgatgc

SEQ ID NO: 5664558 - DNA, 25 bp, Homo sapien
gaagatgcgcttgatgctccgcagt

SEQ ID NO: 5664559 - DNA, 25 bp, Homo sapien
acaagtaggtggaatttaggtagtg

SEQ ID NO: 5664560 - DNA, 25 bp, Homo sapien
tataactagtcatctcctgtcttag

SEQ ID NO: 5664561 - DNA, 25 bp, Homo sapien
agcaccagacgagaagtcagcctac

SEQ ID NO: 5664562 - DNA, 25 bp, Homo sapien
gcctacccaggtgcttctataacta

SEQ ID NO: 5664563 - DNA, 25 bp, Homo sapien
ccaggtgcttctataactagtcatc

SEQ ID NO: 5664564 - DNA, 25 bp, Homo sapien
aaaccagagcaccagacgagaagtc

SEQ ID NO: 5664565 - DNA, 25 bp, Homo sapien
ggtaggctgacttctcgtctggtgc

SEQ ID NO: 5664566 - DNA, 25 bp, Homo sapien
cactacctaaattccacctacttgt

SEQ ID NO: 5664567 - DNA, 25 bp, Homo sapien
tagttatagaagcacctgggtaggc

SEQ ID NO: 5664568 - DNA, 25 bp, Homo sapien
gatgactagttatagaagcacctgg

SEQ ID NO: 5664569 - DNA, 25 bp, Homo sapien
cttctcgtctggtgctctggtttcc

SEQ ID NO: 5664570 - DNA, 25 bp, Homo sapien
ctaagacaggagatgactagttata

SEQ ID NO: 5664571 - DNA, 25 bp, Homo sapien
ggaatctttgcttctcctgacattt

SEQ ID NO: 5664572 - DNA, 25 bp, Homo sapien
ggaggaatctttgcttctcctgaca

SEQ ID NO: 5664573 - DNA, 25 bp, Homo sapien
aatctttgcttctcctgacatttca

SEQ ID NO: 5664574 - DNA, 25 bp, Homo sapien
ttaagttataaaactcttgtcagga

SEQ ID NO: 5664575 - DNA, 25 bp, Homo sapien
ttgcttctcctgacatttcaaatag

SEQ ID NO: 5664576 - DNA, 25 bp, Homo sapien
gaggaatctttgcttctcctgacat

SEQ ID NO: 5664577 - DNA, 25 bp, Homo sapien
gaaatgtcaggagaagcaaagattc

SEQ ID NO: 5664578 - DNA, 25 bp, Homo sapien
ctatttgaaatgtcaggagaagcaa

SEQ ID NO: 5664579 - DNA, 25 bp, Homo sapien
tcctgacaagagttttataacttaa

SEQ ID NO: 5664580 - DNA, 25 bp, Homo sapien
ttgaaatgtcaggagaagcaaagat

SEQ ID NO: 5664581 - DNA, 25 bp, Homo sapien
tgtcaggagaagcaaagattcctcc

SEQ ID NO: 5664582 - DNA, 25 bp, Homo sapien
aaatgtcaggagaagcaaagattcc

SEQ ID NO: 5664583 - DNA, 25 bp, Homo sapien
gaagaaatgagttatacaactcttt

SEQ ID NO: 5664584 - DNA, 25 bp, Homo sapien
gaaatgagttatacaactcttttgg

SEQ ID NO: 5664585 - DNA, 25 bp, Homo sapien
aagaagaaatgagttatacaactct

SEQ ID NO: 5664586 - DNA, 25 bp, Homo sapien
aaatgagttatacaactcttttggc

SEQ ID NO: 5664587 - DNA, 25 bp, Homo sapien
agaagaaatgagttatacaactctt

SEQ ID NO: 5664588 - DNA, 25 bp, Homo sapien
aatgagttatacaactcttttggca

SEQ ID NO: 5664589 - DNA, 25 bp, Homo sapien
caaaagagttgtataactcatttct

SEQ ID NO: 5664590 - DNA, 25 bp, Homo sapien
tgccaaaagagttgtataactcatt

SEQ ID NO: 5664591 - DNA, 25 bp, Homo sapien
ccaaaagagttgtataactcatttc

SEQ ID NO: 5664592 - DNA, 25 bp, Homo sapien
aaagagttgtataactcatttcttc

SEQ ID NO: 5664593 - DNA, 25 bp, Homo sapien
gccaaaagagttgtataactcattt

SEQ ID NO: 5664594 - DNA, 25 bp, Homo sapien
aagagttgtataactcatttcttct

SEQ ID NO: 5664595 - DNA, 25 bp, Homo sapien
aaagcagaagttcactgactgcaaa

SEQ ID NO: 5664596 - DNA, 25 bp, Homo sapien
taacttcctggtatcctgaggaaag

SEQ ID NO: 5664597 - DNA, 25 bp, Homo sapien
tctttttaacttcctggtatcctga

SEQ ID NO: 5664598 - DNA, 25 bp, Homo sapien
cactgactgcaaacttctttttaac

SEQ ID NO: 5664599 - DNA, 25 bp, Homo sapien
cctgaggaaagaagaaatgagttat

SEQ ID NO: 5664600 - DNA, 25 bp, Homo sapien
aatgagttatacaactcttttggca

SEQ ID NO: 5664601 - DNA, 25 bp, Homo sapien
tctttcctcaggataccaggaagtt

SEQ ID NO: 5664602 - DNA, 25 bp, Homo sapien
tcaggataccaggaagttaaaaaga

SEQ ID NO: 5664603 - DNA, 25 bp, Homo sapien
tgccaaaagagttgtataactcatt

SEQ ID NO: 5664604 - DNA, 25 bp, Homo sapien
tgaacttctgcttttccccttggtc

SEQ ID NO: 5664605 - DNA, 25 bp, Homo sapien
gttaaaaagaagtttgcagtcagtg

SEQ ID NO: 5664606 - DNA, 25 bp, Homo sapien
aagtttgcagtcagtgaacttctgc

SEQ ID NO: 5664607 - DNA, 25 bp, Homo sapien
cgggtgtggtggcacacacctgtaa

SEQ ID NO: 5664608 - DNA, 25 bp, Homo sapien
aacttagccgggtgtggtggcacac

SEQ ID NO: 5664609 - DNA, 25 bp, Homo sapien
acttagccgggtgtggtggcacaca

SEQ ID NO: 5664610 - DNA, 25 bp, Homo sapien
cttagccgggtgtggtggcacacac

SEQ ID NO: 5664611 - DNA, 25 bp, Homo sapien
ttagccgggtgtggtggcacacacc

SEQ ID NO: 5664612 - DNA, 25 bp, Homo sapien
tagccgggtgtggtggcacacacct

SEQ ID NO: 5664613 - DNA, 25 bp, Homo sapien
gtgtgccaccacacccggctaagtt

SEQ ID NO: 5664614 - DNA, 25 bp, Homo sapien
gtgtgtgccaccacacccggctaag

SEQ ID NO: 5664615 - DNA, 25 bp, Homo sapien
ttacaggtgtgtgccaccacacccg

SEQ ID NO: 5664616 - DNA, 25 bp, Homo sapien
tgtgtgccaccacacccggctaagt

SEQ ID NO: 5664617 - DNA, 25 bp, Homo sapien
ggtgtgtgccaccacacccggctaa

SEQ ID NO: 5664618 - DNA, 25 bp, Homo sapien
aggtgtgtgccaccacacccggcta

SEQ ID NO: 5664619 - DNA, 25 bp, Homo sapien
atttcataaggttaacagaggtatt

SEQ ID NO: 5664620 - DNA, 25 bp, Homo sapien
tgaagccacttactcaaaacacatt

SEQ ID NO: 5664621 - DNA, 25 bp, Homo sapien
ctttgaagccacttactcaaaacac

SEQ ID NO: 5664622 - DNA, 25 bp, Homo sapien
cataaggttaacagaggtatttgaa

SEQ ID NO: 5664623 - DNA, 25 bp, Homo sapien
gaagccacttactcaaaacacattt

SEQ ID NO: 5664624 - DNA, 25 bp, Homo sapien
gccacttactcaaaacacatttcat

SEQ ID NO: 5664625 - DNA, 25 bp, Homo sapien
caaatacctctgttaaccttatgaa

SEQ ID NO: 5664626 - DNA, 25 bp, Homo sapien
ttcaaatacctctgttaaccttatg

SEQ ID NO: 5664627 - DNA, 25 bp, Homo sapien
gtgttttgagtaagtggcttcaaag

SEQ ID NO: 5664628 - DNA, 25 bp, Homo sapien
tgaaatgtgttttgagtaagtggct

SEQ ID NO: 5664629 - DNA, 25 bp, Homo sapien
tatgaaatgtgttttgagtaagtgg

SEQ ID NO: 5664630 - DNA, 25 bp, Homo sapien
aaatgtgttttgagtaagtggcttc

SEQ ID NO: 5664631 - DNA, 25 bp, Homo sapien
ctggtgatgggtattttcttaagcc

SEQ ID NO: 5664632 - DNA, 25 bp, Homo sapien
tacactgctcttatgtgtgtggacc

SEQ ID NO: 5664633 - DNA, 25 bp, Homo sapien
cactgctcttatgtgtgtggaccag

SEQ ID NO: 5664634 - DNA, 25 bp, Homo sapien
ctgctcttatgtgtgtggaccagct

SEQ ID NO: 5664635 - DNA, 25 bp, Homo sapien
tgatgggtattttcttaagccctag

SEQ ID NO: 5664636 - DNA, 25 bp, Homo sapien
tactactttctacactgctcttatg

SEQ ID NO: 5664637 - DNA, 25 bp, Homo sapien
ggcttaagaaaatacccatcaccag

SEQ ID NO: 5664638 - DNA, 25 bp, Homo sapien
tggtccacacacataagagcagtgt

SEQ ID NO: 5664639 - DNA, 25 bp, Homo sapien
agctggtccacacacataagagcag

SEQ ID NO: 5664640 - DNA, 25 bp, Homo sapien
cataagagcagtgtagaaagtagta

SEQ ID NO: 5664641 - DNA, 25 bp, Homo sapien
ctagggcttaagaaaatacccatca

SEQ ID NO: 5664642 - DNA, 25 bp, Homo sapien
cacacataagagcagtgtagaaagt

SEQ ID NO: 5664643 - DNA, 25 bp, Homo sapien
aatggattttcctcagttgatgaag

SEQ ID NO: 5664644 - DNA, 25 bp, Homo sapien
gactcttcagttgaagttcgtagtg

SEQ ID NO: 5664645 - DNA, 25 bp, Homo sapien
tggattttcctcagttgatgaagat

SEQ ID NO: 5664646 - DNA, 25 bp, Homo sapien
gaagatgcgctacttggaagtatca

SEQ ID NO: 5664647 - DNA, 25 bp, Homo sapien
gatgaagatgcgctacttggaagta

SEQ ID NO: 5664648 - DNA, 25 bp, Homo sapien
cagttgaagttcgtagtgattggga

SEQ ID NO: 5664649 - DNA, 25 bp, Homo sapien
tcccaatcactacgaacttcaactg

SEQ ID NO: 5664650 - DNA, 25 bp, Homo sapien
tcttcatcaactgaggaaaatccat

SEQ ID NO: 5664651 - DNA, 25 bp, Homo sapien
tgatacttccaagtagcgcatcttc

SEQ ID NO: 5664652 - DNA, 25 bp, Homo sapien
tacttccaagtagcgcatcttcatc

SEQ ID NO: 5664653 - DNA, 25 bp, Homo sapien
acttcccaatcactacgaacttcaa

SEQ ID NO: 5664654 - DNA, 25 bp, Homo sapien
cactacgaacttcaactgaagagtc

SEQ ID NO: 5664655 - DNA, 25 bp, Homo sapien
tgagacaggatctcgtgtcactcag

SEQ ID NO: 5664656 - DNA, 25 bp, Homo sapien
gccactgagcccctccgttttatgt

SEQ ID NO: 5664657 - DNA, 25 bp, Homo sapien
cgttttatgtggttgttgtttgaga

SEQ ID NO: 5664658 - DNA, 25 bp, Homo sapien
tgagcccctccgttttatgtggttg

SEQ ID NO: 5664659 - DNA, 25 bp, Homo sapien
cactgagcccctccgttttatgtgg

SEQ ID NO: 5664660 - DNA, 25 bp, Homo sapien
gagacaggatctcgtgtcactcagg

SEQ ID NO: 5664661 - DNA, 25 bp, Homo sapien
cctgagtgacacgagatcctgtctc

SEQ ID NO: 5664662 - DNA, 25 bp, Homo sapien
caaacaacaaccacataaaacggag

SEQ ID NO: 5664663 - DNA, 25 bp, Homo sapien
acataaaacggaggggctcagtggc

SEQ ID NO: 5664664 - DNA, 25 bp, Homo sapien
tctcaaacaacaaccacataaaacg

SEQ ID NO: 5664665 - DNA, 25 bp, Homo sapien
caaccacataaaacggaggggctca

SEQ ID NO: 5664666 - DNA, 25 bp, Homo sapien
ctgagtgacacgagatcctgtctca

SEQ ID NO: 5664667 - DNA, 25 bp, Homo sapien
tgcatcaccatgcctggctaatttt

SEQ ID NO: 5664668 - DNA, 25 bp, Homo sapien
aggcatgcatcaccatgcctggcta

SEQ ID NO: 5664669 - DNA, 25 bp, Homo sapien
atgcatcaccatgcctggctaattt

SEQ ID NO: 5664670 - DNA, 25 bp, Homo sapien
ttacaggcatgcatcaccatgcctg

SEQ ID NO: 5664671 - DNA, 25 bp, Homo sapien
gcatcaccatgcctggctaattttt

SEQ ID NO: 5664672 - DNA, 25 bp, Homo sapien
ggcatgcatcaccatgcctggctaa

SEQ ID NO: 5664673 - DNA, 25 bp, Homo sapien
caggcatggtgatgcatgcctgtaa

SEQ ID NO: 5664674 - DNA, 25 bp, Homo sapien
aaaaattagccaggcatggtgatgc

SEQ ID NO: 5664675 - DNA, 25 bp, Homo sapien
aaaattagccaggcatggtgatgca

SEQ ID NO: 5664676 - DNA, 25 bp, Homo sapien
tagccaggcatggtgatgcatgcct

SEQ ID NO: 5664677 - DNA, 25 bp, Homo sapien
ttagccaggcatggtgatgcatgcc

SEQ ID NO: 5664678 - DNA, 25 bp, Homo sapien
aaattagccaggcatggtgatgcat

SEQ ID NO: 5664679 - DNA, 25 bp, Homo sapien
cctcccagattcaagctgttctcct

SEQ ID NO: 5664680 - DNA, 25 bp, Homo sapien
agattcaagctgttctcctgcctca

SEQ ID NO: 5664681 - DNA, 25 bp, Homo sapien
gattcaagctgttctcctgcctcag

SEQ ID NO: 5664682 - DNA, 25 bp, Homo sapien
attcaagctgttctcctgcctcagc

SEQ ID NO: 5664683 - DNA, 25 bp, Homo sapien
gcctcccagattcaagctgttctcc

SEQ ID NO: 5664684 - DNA, 25 bp, Homo sapien
ccagattcaagctgttctcctgcct

SEQ ID NO: 5664685 - DNA, 25 bp, Homo sapien
ctgaggcaggagaacagcttgaatc

SEQ ID NO: 5664686 - DNA, 25 bp, Homo sapien
aggagaacagcttgaatctgggagg

SEQ ID NO: 5664687 - DNA, 25 bp, Homo sapien
ggagaacagcttgaatctgggaggc

SEQ ID NO: 5664688 - DNA, 25 bp, Homo sapien
aggcaggagaacagcttgaatctgg

SEQ ID NO: 5664689 - DNA, 25 bp, Homo sapien
tgaggcaggagaacagcttgaatct

SEQ ID NO: 5664690 - DNA, 25 bp, Homo sapien
gctgaggcaggagaacagcttgaat

SEQ ID NO: 5664691 - DNA, 25 bp, Homo sapien
tgtcttataaaacagtcagcactcc

SEQ ID NO: 5664692 - DNA, 25 bp, Homo sapien
tcttataaaacagtcagcactccat

SEQ ID NO: 5664693 - DNA, 25 bp, Homo sapien
tctgtcttataaaacagtcagcact

SEQ ID NO: 5664694 - DNA, 25 bp, Homo sapien
ttctgtcttataaaacagtcagcac

SEQ ID NO: 5664695 - DNA, 25 bp, Homo sapien
cttataaaacagtcagcactccatt

SEQ ID NO: 5664696 - DNA, 25 bp, Homo sapien
gtcttataaaacagtcagcactcca

SEQ ID NO: 5664697 - DNA, 25 bp, Homo sapien
agtgctgactgttttataagacaga

SEQ ID NO: 5664698 - DNA, 25 bp, Homo sapien
gtgctgactgttttataagacagaa

SEQ ID NO: 5664699 - DNA, 25 bp, Homo sapien
tggagtgctgactgttttataagac

SEQ ID NO: 5664700 - DNA, 25 bp, Homo sapien
ggagtgctgactgttttataagaca

SEQ ID NO: 5664701 - DNA, 25 bp, Homo sapien
aatggagtgctgactgttttataag

SEQ ID NO: 5664702 - DNA, 25 bp, Homo sapien
gagtgctgactgttttataagacag

SEQ ID NO: 5664703 - DNA, 25 bp, Homo sapien
acccaagctgcagtgccagtggcgc

SEQ ID NO: 5664704 - DNA, 25 bp, Homo sapien
ctgtcacccaagctgcagtgccagt

SEQ ID NO: 5664705 - DNA, 25 bp, Homo sapien
ccaagctgcagtgccagtggcgcga

SEQ ID NO: 5664706 - DNA, 25 bp, Homo sapien
cacccaagctgcagtgccagtggcg

SEQ ID NO: 5664707 - DNA, 25 bp, Homo sapien
cccaagctgcagtgccagtggcgcg

SEQ ID NO: 5664708 - DNA, 25 bp, Homo sapien
tgtcacccaagctgcagtgccagtg

SEQ ID NO: 5664709 - DNA, 25 bp, Homo sapien
tcgcgccactggcactgcagcttgg

SEQ ID NO: 5664710 - DNA, 25 bp, Homo sapien
cgccactggcactgcagcttgggtg

SEQ ID NO: 5664711 - DNA, 25 bp, Homo sapien
cgcgccactggcactgcagcttggg

SEQ ID NO: 5664712 - DNA, 25 bp, Homo sapien
gcgccactggcactgcagcttgggt

SEQ ID NO: 5664713 - DNA, 25 bp, Homo sapien
actggcactgcagcttgggtgacag

SEQ ID NO: 5664714 - DNA, 25 bp, Homo sapien
cactggcactgcagcttgggtgaca

SEQ ID NO: 5664715 - DNA, 25 bp, Homo sapien
tgcgcctggcttgtattttcaatcc

SEQ ID NO: 5664716 - DNA, 25 bp, Homo sapien
gcgcctggcttgtattttcaatcca

SEQ ID NO: 5664717 - DNA, 25 bp, Homo sapien
ggattgaaaatacaagccaggcgca

SEQ ID NO: 5664718 - DNA, 25 bp, Homo sapien
tggattgaaaatacaagccaggcgc

SEQ ID NO: 5664719 - DNA, 25 bp, Homo sapien
tgcgcctggcttgtattttcaatcc

SEQ ID NO: 5664720 - DNA, 25 bp, Homo sapien
gcctggcttgtattttcaatccatg

SEQ ID NO: 5664721 - DNA, 25 bp, Homo sapien
cctggcttgtattttcaatccatgt

SEQ ID NO: 5664722 - DNA, 25 bp, Homo sapien
gcgcctggcttgtattttcaatcca

SEQ ID NO: 5664723 - DNA, 25 bp, Homo sapien
cactgcgcctggcttgtattttcaa

SEQ ID NO: 5664724 - DNA, 25 bp, Homo sapien
tggcttgtattttcaatccatgttt

SEQ ID NO: 5664725 - DNA, 25 bp, Homo sapien
catggattgaaaatacaagccaggc

SEQ ID NO: 5664726 - DNA, 25 bp, Homo sapien
ttgaaaatacaagccaggcgcagtg

SEQ ID NO: 5664727 - DNA, 25 bp, Homo sapien
ggattgaaaatacaagccaggcgca

SEQ ID NO: 5664728 - DNA, 25 bp, Homo sapien
acatggattgaaaatacaagccagg

SEQ ID NO: 5664729 - DNA, 25 bp, Homo sapien
aaacatggattgaaaatacaagcca

SEQ ID NO: 5664730 - DNA, 25 bp, Homo sapien
tggattgaaaatacaagccaggcgc

SEQ ID NO: 5664731 - DNA, 25 bp, Homo sapien
gtggcatgaatcttagccaactgca

SEQ ID NO: 5664732 - DNA, 25 bp, Homo sapien
cagtggcatgaatcttagccaactg

SEQ ID NO: 5664733 - DNA, 25 bp, Homo sapien
agtggcatgaatcttagccaactgc

SEQ ID NO: 5664734 - DNA, 25 bp, Homo sapien
cagttggctaagattcatgccactg

SEQ ID NO: 5664735 - DNA, 25 bp, Homo sapien
gcagttggctaagattcatgccact

SEQ ID NO: 5664736 - DNA, 25 bp, Homo sapien
tgcagttggctaagattcatgccac

SEQ ID NO: 5664737 - DNA, 25 bp, Homo sapien
gcatgaatcttagccaactgcaacc

SEQ ID NO: 5664738 - DNA, 25 bp, Homo sapien
ggcatgaatcttagccaactgcaac

SEQ ID NO: 5664739 - DNA, 25 bp, Homo sapien
gtggcatgaatcttagccaactgca

SEQ ID NO: 5664740 - DNA, 25 bp, Homo sapien
atgaatcttagccaactgcaacctc

SEQ ID NO: 5664741 - DNA, 25 bp, Homo sapien
cagtggcatgaatcttagccaactg

SEQ ID NO: 5664742 - DNA, 25 bp, Homo sapien
agtggcatgaatcttagccaactgc

SEQ ID NO: 5664743 - DNA, 25 bp, Homo sapien
gaggttgcagttggctaagattcat

SEQ ID NO: 5664744 - DNA, 25 bp, Homo sapien
cagttggctaagattcatgccactg

SEQ ID NO: 5664745 - DNA, 25 bp, Homo sapien
ggttgcagttggctaagattcatgc

SEQ ID NO: 5664746 - DNA, 25 bp, Homo sapien
gcagttggctaagattcatgccact

SEQ ID NO: 5664747 - DNA, 25 bp, Homo sapien
gttgcagttggctaagattcatgcc

SEQ ID NO: 5664748 - DNA, 25 bp, Homo sapien
tgcagttggctaagattcatgccac

SEQ ID NO: 5664749 - DNA, 25 bp, Homo sapien
gcagcttttatttagcgtgttttca

SEQ ID NO: 5664750 - DNA, 25 bp, Homo sapien
tgtgtcggtacagttttccttcagt

SEQ ID NO: 5664751 - DNA, 25 bp, Homo sapien
atgtgtcggtacagttttccttcag

SEQ ID NO: 5664752 - DNA, 25 bp, Homo sapien
gcatgtgtcggtacagttttccttc

SEQ ID NO: 5664753 - DNA, 25 bp, Homo sapien
tagcatgtgtcggtacagttttcct

SEQ ID NO: 5664754 - DNA, 25 bp, Homo sapien
catgtgtcggtacagttttccttca

SEQ ID NO: 5664755 - DNA, 25 bp, Homo sapien
gaaaacacgctaaataaaagctgcc

SEQ ID NO: 5664756 - DNA, 25 bp, Homo sapien
actgaaggaaaactgtaccgacaca

SEQ ID NO: 5664757 - DNA, 25 bp, Homo sapien
aggaaaactgtaccgacacatgcta

SEQ ID NO: 5664758 - DNA, 25 bp, Homo sapien
tgaaaacacgctaaataaaagctgc

SEQ ID NO: 5664759 - DNA, 25 bp, Homo sapien
gaaggaaaactgtaccgacacatgc

SEQ ID NO: 5664760 - DNA, 25 bp, Homo sapien
tgaaggaaaactgtaccgacacatg

SEQ ID NO: 5664761 - DNA, 25 bp, Homo sapien
actgccgcagtagcaaccagattgc

SEQ ID NO: 5664762 - DNA, 25 bp, Homo sapien
gcagtagcaaccagattgccaaatg

SEQ ID NO: 5664763 - DNA, 25 bp, Homo sapien
gccgcagtagcaaccagattgccaa

SEQ ID NO: 5664764 - DNA, 25 bp, Homo sapien
aaggccctacctcccgacactgccg

SEQ ID NO: 5664765 - DNA, 25 bp, Homo sapien
caaccagattgccaaatgaattcca

SEQ ID NO: 5664766 - DNA, 25 bp, Homo sapien
gacactgccgcagtagcaaccagat

SEQ ID NO: 5664767 - DNA, 25 bp, Homo sapien
gcaatctggttgctactgcggcagt

SEQ ID NO: 5664768 - DNA, 25 bp, Homo sapien
ttggcaatctggttgctactgcggc

SEQ ID NO: 5664769 - DNA, 25 bp, Homo sapien
catttggcaatctggttgctactgc

SEQ ID NO: 5664770 - DNA, 25 bp, Homo sapien
cggcagtgtcgggaggtagggcctt

SEQ ID NO: 5664771 - DNA, 25 bp, Homo sapien
atctggttgctactgcggcagtgtc

SEQ ID NO: 5664772 - DNA, 25 bp, Homo sapien
tggaattcatttggcaatctggttg

SEQ ID NO: 5664773 - DNA, 25 bp, Homo sapien
cagatcaggagccacatctggtgag

SEQ ID NO: 5664774 - DNA, 25 bp, Homo sapien
agtcccagatcaggagccacatctg

SEQ ID NO: 5664775 - DNA, 25 bp, Homo sapien
ggtttctttagctcatggttctggg

SEQ ID NO: 5664776 - DNA, 25 bp, Homo sapien
tataaagcggtttctttagctcatg

SEQ ID NO: 5664777 - DNA, 25 bp, Homo sapien
ggaagtcccagatcaggagccacat

SEQ ID NO: 5664778 - DNA, 25 bp, Homo sapien
taaagcggtttctttagctcatggt

SEQ ID NO: 5664779 - DNA, 25 bp, Homo sapien
cagtccccagaaccatgagctaaag

SEQ ID NO: 5664780 - DNA, 25 bp, Homo sapien
atgtggctcctgatctgggacttcc

SEQ ID NO: 5664781 - DNA, 25 bp, Homo sapien
catgagctaaagaaaccgctttata

SEQ ID NO: 5664782 - DNA, 25 bp, Homo sapien
gaaccatgagctaaagaaaccgctt

SEQ ID NO: 5664783 - DNA, 25 bp, Homo sapien
cagatgtggctcctgatctgggact

SEQ ID NO: 5664784 - DNA, 25 bp, Homo sapien
ctcaccagatgtggctcctgatctg

SEQ ID NO: 5664785 - DNA, 25 bp, Homo sapien
atgtatttataccagaattctgcct

SEQ ID NO: 5664786 - DNA, 25 bp, Homo sapien
tcagaaatcacaggtaatgtattta

SEQ ID NO: 5664787 - DNA, 25 bp, Homo sapien
aatgtatttataccagaattctgcc

SEQ ID NO: 5664788 - DNA, 25 bp, Homo sapien
aaatcacaggtaatgtatttatacc

SEQ ID NO: 5664789 - DNA, 25 bp, Homo sapien
gtatttataccagaattctgccttg

SEQ ID NO: 5664790 - DNA, 25 bp, Homo sapien
gaaatcacaggtaatgtatttatac

SEQ ID NO: 5664791 - DNA, 25 bp, Homo sapien
aaatacattacctgtgatttctgat

SEQ ID NO: 5664792 - DNA, 25 bp, Homo sapien
caaggcagaattctggtataaatac

SEQ ID NO: 5664793 - DNA, 25 bp, Homo sapien
aggcagaattctggtataaatacat

SEQ ID NO: 5664794 - DNA, 25 bp, Homo sapien
taaatacattacctgtgatttctga

SEQ ID NO: 5664795 - DNA, 25 bp, Homo sapien
ggcagaattctggtataaatacatt

SEQ ID NO: 5664796 - DNA, 25 bp, Homo sapien
gtataaatacattacctgtgatttc

SEQ ID NO: 5664797 - DNA, 25 bp, Homo sapien
ctgctgtgggtcaactctaggaagc

SEQ ID NO: 5664798 - DNA, 25 bp, Homo sapien
tctgctgtgggtcaactctaggaag

SEQ ID NO: 5664799 - DNA, 25 bp, Homo sapien
tcagttctgctgtgggtcaactcta

SEQ ID NO: 5664800 - DNA, 25 bp, Homo sapien
gttctgctgtgggtcaactctagga

SEQ ID NO: 5664801 - DNA, 25 bp, Homo sapien
agcttacctgggctcagttctgctg

SEQ ID NO: 5664802 - DNA, 25 bp, Homo sapien
ggtcaactctaggaagccccctgta

SEQ ID NO: 5664803 - DNA, 25 bp, Homo sapien
ctagagttgacccacagcagaactg

SEQ ID NO: 5664804 - DNA, 25 bp, Homo sapien
agagttgacccacagcagaactgag

SEQ ID NO: 5664805 - DNA, 25 bp, Homo sapien
gcttcctagagttgacccacagcag

SEQ ID NO: 5664806 - DNA, 25 bp, Homo sapien
tcctagagttgacccacagcagaac

SEQ ID NO: 5664807 - DNA, 25 bp, Homo sapien
tacagggggcttcctagagttgacc

SEQ ID NO: 5664808 - DNA, 25 bp, Homo sapien
cagcagaactgagcccaggtaagct

SEQ ID NO: 5664809 - DNA, 25 bp, Homo sapien
ctggttcatggcagatagcatgggc

SEQ ID NO: 5664810 - DNA, 25 bp, Homo sapien
tcatggcagatagcatgggcaggaa

SEQ ID NO: 5664811 - DNA, 25 bp, Homo sapien
ccccttttagcttgtcgttctcagg

SEQ ID NO: 5664812 - DNA, 25 bp, Homo sapien
atagcatgggcaggaaactaactcc

SEQ ID NO: 5664813 - DNA, 25 bp, Homo sapien
tggcagatagcatgggcaggaaact

SEQ ID NO: 5664814 - DNA, 25 bp, Homo sapien
tagcttgtcgttctcaggctggttc

SEQ ID NO: 5664815 - DNA, 25 bp, Homo sapien
tagtttcctgcccatgctatctgcc

SEQ ID NO: 5664816 - DNA, 25 bp, Homo sapien
ggagttagtttcctgcccatgctat

SEQ ID NO: 5664817 - DNA, 25 bp, Homo sapien
gtttcctgcccatgctatctgccat

SEQ ID NO: 5664818 - DNA, 25 bp, Homo sapien
gaaccagcctgagaacgacaagcta

SEQ ID NO: 5664819 - DNA, 25 bp, Homo sapien
gcctgagaacgacaagctaaaaggg

SEQ ID NO: 5664820 - DNA, 25 bp, Homo sapien
gcccatgctatctgccatgaaccag

SEQ ID NO: 5664821 - DNA, 25 bp, Homo sapien
gaacaagacacccttcccagactgg

SEQ ID NO: 5664822 - DNA, 25 bp, Homo sapien
cttcccagactggccgtatttggaa

SEQ ID NO: 5664823 - DNA, 25 bp, Homo sapien
aagcaggaggatggttgtattcccc

SEQ ID NO: 5664824 - DNA, 25 bp, Homo sapien
gctggaacaagacacccttcccaga

SEQ ID NO: 5664825 - DNA, 25 bp, Homo sapien
gaggatggttgtattccccaccact

SEQ ID NO: 5664826 - DNA, 25 bp, Homo sapien
gaaaccacaggaccaaagcaggagg

SEQ ID NO: 5664827 - DNA, 25 bp, Homo sapien
ttccaaatacggccagtctgggaag

SEQ ID NO: 5664828 - DNA, 25 bp, Homo sapien
tctgggaagggtgtcttgttccagc

SEQ ID NO: 5664829 - DNA, 25 bp, Homo sapien
agtggtggggaatacaaccatcctc

SEQ ID NO: 5664830 - DNA, 25 bp, Homo sapien
ccagtctgggaagggtgtcttgttc

SEQ ID NO: 5664831 - DNA, 25 bp, Homo sapien
gggaatacaaccatcctcctgcttt

SEQ ID NO: 5664832 - DNA, 25 bp, Homo sapien
cctcctgctttggtcctgtggtttc

SEQ ID NO: 5664833 - DNA, 25 bp, Homo sapien
gcagagacaaagatcgtcggaacat

SEQ ID NO: 5664834 - DNA, 25 bp, Homo sapien
caaagatcgtcggaacatgttgcag

SEQ ID NO: 5664835 - DNA, 25 bp, Homo sapien
cctgcctaagagtgccaaacagaaa

SEQ ID NO: 5664836 - DNA, 25 bp, Homo sapien
tgcagatcctgcctaagagtgccaa

SEQ ID NO: 5664837 - DNA, 25 bp, Homo sapien
gaacatgttgcagttcaacctgcag

SEQ ID NO: 5664838 - DNA, 25 bp, Homo sapien
ttgcagttcaacctgcagatcctgc

SEQ ID NO: 5664839 - DNA, 25 bp, Homo sapien
ttggcactcttaggcaggatctgca

SEQ ID NO: 5664840 - DNA, 25 bp, Homo sapien
caggttgaactgcaacatgttccga

SEQ ID NO: 5664841 - DNA, 25 bp, Homo sapien
tttctgtttggcactcttaggcagg

SEQ ID NO: 5664842 - DNA, 25 bp, Homo sapien
gaactgcaacatgttccgacgatct

SEQ ID NO: 5664843 - DNA, 25 bp, Homo sapien
catgttccgacgatctttgtctctg

SEQ ID NO: 5664844 - DNA, 25 bp, Homo sapien
gcaggatctgcaggttgaactgcaa

SEQ ID NO: 5664845 - DNA, 25 bp, Homo sapien
gagccaaatctccaagattttaaca

SEQ ID NO: 5664846 - DNA, 25 bp, Homo sapien
gccaaatctccaagattttaacatg

SEQ ID NO: 5664847 - DNA, 25 bp, Homo sapien
agccaaatctccaagattttaacat

SEQ ID NO: 5664848 - DNA, 25 bp, Homo sapien
catgttaaaatcttggagatttggc

SEQ ID NO: 5664849 - DNA, 25 bp, Homo sapien
atgttaaaatcttggagatttggct

SEQ ID NO: 5664850 - DNA, 25 bp, Homo sapien
tgttaaaatcttggagatttggctc

SEQ ID NO: 5664851 - DNA, 25 bp, Homo sapien
atttactccaaagacctcccacttg

SEQ ID NO: 5664852 - DNA, 25 bp, Homo sapien
gacctcccacttgttctgcctattg

SEQ ID NO: 5664853 - DNA, 25 bp, Homo sapien
gccaaatctccaagattttaacatg

SEQ ID NO: 5664854 - DNA, 25 bp, Homo sapien
ggcatcctaaatttactccaaagac

SEQ ID NO: 5664855 - DNA, 25 bp, Homo sapien
gggatttggcatcctaaatttactc

SEQ ID NO: 5664856 - DNA, 25 bp, Homo sapien
tctgcctattgtgagccaaatctcc

SEQ ID NO: 5664857 - DNA, 25 bp, Homo sapien
catgttaaaatcttggagatttggc

SEQ ID NO: 5664858 - DNA, 25 bp, Homo sapien
ggagatttggctcacaataggcaga

SEQ ID NO: 5664859 - DNA, 25 bp, Homo sapien
gagtaaatttaggatgccaaatccc

SEQ ID NO: 5664860 - DNA, 25 bp, Homo sapien
caataggcagaacaagtgggaggtc

SEQ ID NO: 5664861 - DNA, 25 bp, Homo sapien
tctttggagtaaatttaggatgcca

SEQ ID NO: 5664862 - DNA, 25 bp, Homo sapien
caagtgggaggtctttggagtaaat

SEQ ID NO: 5664863 - DNA, 25 bp, Homo sapien
gaaagcacagagtaagatgtgaaac

SEQ ID NO: 5664864 - DNA, 25 bp, Homo sapien
tagagtgaaagcacagagtaagatg

SEQ ID NO: 5664865 - DNA, 25 bp, Homo sapien
gggagtataggtctaagcaaagtcc

SEQ ID NO: 5664866 - DNA, 25 bp, Homo sapien
gccgtagagtgaaagcacagagtaa

SEQ ID NO: 5664867 - DNA, 25 bp, Homo sapien
gtataggtctaagcaaagtccaagc

SEQ ID NO: 5664868 - DNA, 25 bp, Homo sapien
gatgccgtagagtgaaagcacagag

SEQ ID NO: 5664869 - DNA, 25 bp, Homo sapien
gtttcacatcttactctgtgctttc

SEQ ID NO: 5664870 - DNA, 25 bp, Homo sapien
cttactctgtgctttcactctacgg

SEQ ID NO: 5664871 - DNA, 25 bp, Homo sapien
ggactttgcttagacctatactccc

SEQ ID NO: 5664872 - DNA, 25 bp, Homo sapien
catcttactctgtgctttcactcta

SEQ ID NO: 5664873 - DNA, 25 bp, Homo sapien
gcttggactttgcttagacctatac

SEQ ID NO: 5664874 - DNA, 25 bp, Homo sapien
tactctgtgctttcactctacggca

SEQ ID NO: 5664875 - DNA, 25 bp, Homo sapien
ggataagaaggtgcacctgtgcctg

SEQ ID NO: 5664876 - DNA, 25 bp, Homo sapien
taagaaggtgcacctgtgcctgtta

SEQ ID NO: 5664877 - DNA, 25 bp, Homo sapien
ccacacttaattgctgtgtgcagac

SEQ ID NO: 5664878 - DNA, 25 bp, Homo sapien
aagaaggtgcacctgtgcctgttac

SEQ ID NO: 5664879 - DNA, 25 bp, Homo sapien
gataagaaggtgcacctgtgcctgt

SEQ ID NO: 5664880 - DNA, 25 bp, Homo sapien
ataagaaggtgcacctgtgcctgtt

SEQ ID NO: 5664881 - DNA, 25 bp, Homo sapien
taacaggcacaggtgcaccttctta

SEQ ID NO: 5664882 - DNA, 25 bp, Homo sapien
acaggcacaggtgcaccttcttatc

SEQ ID NO: 5664883 - DNA, 25 bp, Homo sapien
gtaacaggcacaggtgcaccttctt

SEQ ID NO: 5664884 - DNA, 25 bp, Homo sapien
caggcacaggtgcaccttcttatcc

SEQ ID NO: 5664885 - DNA, 25 bp, Homo sapien
gtctgcacacagcaattaagtgtgg

SEQ ID NO: 5664886 - DNA, 25 bp, Homo sapien
aacaggcacaggtgcaccttcttat

SEQ ID NO: 5664887 - DNA, 25 bp, Homo sapien
gaacttgcactaggatcagggatgc

SEQ ID NO: 5664888 - DNA, 25 bp, Homo sapien
cataacaagtggtaccaaggtgaac

SEQ ID NO: 5664889 - DNA, 25 bp, Homo sapien
ccgttccataacaagtggtaccaag

SEQ ID NO: 5664890 - DNA, 25 bp, Homo sapien
aagtggtaccaaggtgaacttgcac

SEQ ID NO: 5664891 - DNA, 25 bp, Homo sapien
taggatcagggatgcatttaaatag

SEQ ID NO: 5664892 - DNA, 25 bp, Homo sapien
ttccataacaagtggtaccaaggtg

SEQ ID NO: 5664893 - DNA, 25 bp, Homo sapien
cttggtaccacttgttatggaacgg

SEQ ID NO: 5664894 - DNA, 25 bp, Homo sapien
gtgcaagttcaccttggtaccactt

SEQ ID NO: 5664895 - DNA, 25 bp, Homo sapien
gcatccctgatcctagtgcaagttc

SEQ ID NO: 5664896 - DNA, 25 bp, Homo sapien
tcaccttggtaccacttgttatgga

SEQ ID NO: 5664897 - DNA, 25 bp, Homo sapien
actatttaaatgcatccctgatcct

SEQ ID NO: 5664898 - DNA, 25 bp, Homo sapien
tatttaaatgcatccctgatcctag

SEQ ID NO: 5664899 - DNA, 25 bp, Homo sapien
cctgctaaaaaatgctaccttgtga

SEQ ID NO: 5664900 - DNA, 25 bp, Homo sapien
aggtcttttcgtgaatctcgggtca

SEQ ID NO: 5664901 - DNA, 25 bp, Homo sapien
tactgttggccatcacctgctaaaa

SEQ ID NO: 5664902 - DNA, 25 bp, Homo sapien
tgagagagggaagcatattataggt

SEQ ID NO: 5664903 - DNA, 25 bp, Homo sapien
tataggtcttttcgtgaatctcggg

SEQ ID NO: 5664904 - DNA, 25 bp, Homo sapien
tgctaccttgtgactcctaatgaga

SEQ ID NO: 5664905 - DNA, 25 bp, Homo sapien
tgacccgagattcacgaaaagacct

SEQ ID NO: 5664906 - DNA, 25 bp, Homo sapien
ttttagcaggtgatggccaacagta

SEQ ID NO: 5664907 - DNA, 25 bp, Homo sapien
cgagattcacgaaaagacctataat

SEQ ID NO: 5664908 - DNA, 25 bp, Homo sapien
acctataatatgcttccctctctca

SEQ ID NO: 5664909 - DNA, 25 bp, Homo sapien
cacaaggtagcattttttagcaggt

SEQ ID NO: 5664910 - DNA, 25 bp, Homo sapien
tctcattaggagtcacaaggtagca

SEQ ID NO: 5664911 - DNA, 25 bp, Homo sapien
tccagctggtggatacagcgcgcac

SEQ ID NO: 5664912 - DNA, 25 bp, Homo sapien
atacagcgcgcacacagaagacggc

SEQ ID NO: 5664913 - DNA, 25 bp, Homo sapien
gctggtggatacagcgcgcacacag

SEQ ID NO: 5664914 - DNA, 25 bp, Homo sapien
gcctaccagcggaatcgaatgagat

SEQ ID NO: 5664915 - DNA, 25 bp, Homo sapien
acagaagacggcctaccagcggaat

SEQ ID NO: 5664916 - DNA, 25 bp, Homo sapien
gcggaatcgaatgagatttgcccag

SEQ ID NO: 5664917 - DNA, 25 bp, Homo sapien
tgtgcgcgctgtatccaccagctgg

SEQ ID NO: 5664918 - DNA, 25 bp, Homo sapien
ctgggcaaatctcattcgattccgc

SEQ ID NO: 5664919 - DNA, 25 bp, Homo sapien
cattcgattccgctggtaggccgtc

SEQ ID NO: 5664920 - DNA, 25 bp, Homo sapien
ggcaaatctcattcgattccgctgg

SEQ ID NO: 5664921 - DNA, 25 bp, Homo sapien
gccgtcttctgtgtgcgcgctgtat

SEQ ID NO: 5664922 - DNA, 25 bp, Homo sapien
cgattccgctggtaggccgtcttct

SEQ ID NO: 5664923 - DNA, 25 bp, Homo sapien
ctttgcctccagataagtactcctc

SEQ ID NO: 5664924 - DNA, 25 bp, Homo sapien
tcaatatgcttatttccatgaggag

SEQ ID NO: 5664925 - DNA, 25 bp, Homo sapien
ataagtactcctctcagtttggtgg

SEQ ID NO: 5664926 - DNA, 25 bp, Homo sapien
agtactcctctcagtttggtggtgg

SEQ ID NO: 5664927 - DNA, 25 bp, Homo sapien
taagtactcctctcagtttggtggt

SEQ ID NO: 5664928 - DNA, 25 bp, Homo sapien
gataagtactcctctcagtttggtg

SEQ ID NO: 5664929 - DNA, 25 bp, Homo sapien
aagtactcctctcagtttggtggtg

SEQ ID NO: 5664930 - DNA, 25 bp, Homo sapien
caccaaactgagaggagtacttatc

SEQ ID NO: 5664931 - DNA, 25 bp, Homo sapien
caccaccaaactgagaggagtactt

SEQ ID NO: 5664932 - DNA, 25 bp, Homo sapien
ctcctcatggaaataagcatattga

SEQ ID NO: 5664933 - DNA, 25 bp, Homo sapien
ccaccaaactgagaggagtacttat

SEQ ID NO: 5664934 - DNA, 25 bp, Homo sapien
ccaccaccaaactgagaggagtact

SEQ ID NO: 5664935 - DNA, 25 bp, Homo sapien
accaaactgagaggagtacttatct

SEQ ID NO: 5664936 - DNA, 25 bp, Homo sapien
gaggagtacttatctggaggcaaag

SEQ ID NO: 5664937 - DNA, 25 bp, Homo sapien
gttactacatgccatcacctttgcc

SEQ ID NO: 5664938 - DNA, 25 bp, Homo sapien
cagataagtactcctctcagtttgg

SEQ ID NO: 5664939 - DNA, 25 bp, Homo sapien
ttccatgaggaggatgaaagtagct

SEQ ID NO: 5664940 - DNA, 25 bp, Homo sapien
ctttgcctccagataagtactcctc

SEQ ID NO: 5664941 - DNA, 25 bp, Homo sapien
gccatcacctttgcctccagataag

SEQ ID NO: 5664942 - DNA, 25 bp, Homo sapien
cctctcagtttggtggtggaagtca

SEQ ID NO: 5664943 - DNA, 25 bp, Homo sapien
tgacttccaccaccaaactgagagg

SEQ ID NO: 5664944 - DNA, 25 bp, Homo sapien
agctactttcatcctcctcatggaa

SEQ ID NO: 5664945 - DNA, 25 bp, Homo sapien
cttatctggaggcaaaggtgatggc

SEQ ID NO: 5664946 - DNA, 25 bp, Homo sapien
gaggagtacttatctggaggcaaag

SEQ ID NO: 5664947 - DNA, 25 bp, Homo sapien
ggcaaaggtgatggcatgtagtaac

SEQ ID NO: 5664948 - DNA, 25 bp, Homo sapien
caaactgagaggagtacttatctgg

SEQ ID NO: 5664949 - DNA, 25 bp, Homo sapien
catatgaatcatccggggatcttgt

SEQ ID NO: 5664950 - DNA, 25 bp, Homo sapien
agagttgttcaaaattgaatgtgca

SEQ ID NO: 5664951 - DNA, 25 bp, Homo sapien
ggccagagttgttcaaaattgaatg

SEQ ID NO: 5664952 - DNA, 25 bp, Homo sapien
ccagagttgttcaaaattgaatgtg

SEQ ID NO: 5664953 - DNA, 25 bp, Homo sapien
cagagttgttcaaaattgaatgtgc

SEQ ID NO: 5664954 - DNA, 25 bp, Homo sapien
aggccagagttgttcaaaattgaat

SEQ ID NO: 5664955 - DNA, 25 bp, Homo sapien
attcaattttgaacaactctggcct

SEQ ID NO: 5664956 - DNA, 25 bp, Homo sapien
cattcaattttgaacaactctggcc

SEQ ID NO: 5664957 - DNA, 25 bp, Homo sapien
gcacattcaattttgaacaactctg

SEQ ID NO: 5664958 - DNA, 25 bp, Homo sapien
tgcacattcaattttgaacaactct

SEQ ID NO: 5664959 - DNA, 25 bp, Homo sapien
acaagatccccggatgattcatatg

SEQ ID NO: 5664960 - DNA, 25 bp, Homo sapien
cacattcaattttgaacaactctgg

SEQ ID NO: 5664961 - DNA, 25 bp, Homo sapien
tgaatgtgcatatgaatcatccggg

SEQ ID NO: 5664962 - DNA, 25 bp, Homo sapien
tcagattcttggcttagaaagttct

SEQ ID NO: 5664963 - DNA, 25 bp, Homo sapien
ggccagagttgttcaaaattgaatg

SEQ ID NO: 5664964 - DNA, 25 bp, Homo sapien
tcttgttaaaatgctggttctgatt

SEQ ID NO: 5664965 - DNA, 25 bp, Homo sapien
cagagttgttcaaaattgaatgtgc

SEQ ID NO: 5664966 - DNA, 25 bp, Homo sapien
tagaaagttctttaggccagagttg

SEQ ID NO: 5664967 - DNA, 25 bp, Homo sapien
ccattcattaaagaggtctagccta

SEQ ID NO: 5664968 - DNA, 25 bp, Homo sapien
tagggatgtattctgggctttaaca

SEQ ID NO: 5664969 - DNA, 25 bp, Homo sapien
aaacttagaccattcattaaagagg

SEQ ID NO: 5664970 - DNA, 25 bp, Homo sapien
gaaatagccctcaaaacttagacca

SEQ ID NO: 5664971 - DNA, 25 bp, Homo sapien
tagccctcaaaacttagaccattca

SEQ ID NO: 5664972 - DNA, 25 bp, Homo sapien
taacttttagggatgtattctgggc

SEQ ID NO: 5664973 - DNA, 25 bp, Homo sapien
tgaatggtctaagttttgagggcta

SEQ ID NO: 5664974 - DNA, 25 bp, Homo sapien
tggtctaagttttgagggctatttc

SEQ ID NO: 5664975 - DNA, 25 bp, Homo sapien
tgttaaagcccagaatacatcccta

SEQ ID NO: 5664976 - DNA, 25 bp, Homo sapien
taggctagacctctttaatgaatgg

SEQ ID NO: 5664977 - DNA, 25 bp, Homo sapien
gcccagaatacatccctaaaagtta

SEQ ID NO: 5664978 - DNA, 25 bp, Homo sapien
cctctttaatgaatggtctaagttt

SEQ ID NO: 5664979 - DNA, 25 bp, Homo sapien
tgttctttattctaatgaccttctt

SEQ ID NO: 5664980 - DNA, 25 bp, Homo sapien
actgaatgccccaatcagggccttg

SEQ ID NO: 5664981 - DNA, 25 bp, Homo sapien
tctttattctaatgaccttcttctg

SEQ ID NO: 5664982 - DNA, 25 bp, Homo sapien
ctgcaactgaatgccccaatcaggg

SEQ ID NO: 5664983 - DNA, 25 bp, Homo sapien
gttctttattctaatgaccttcttc

SEQ ID NO: 5664984 - DNA, 25 bp, Homo sapien
aactgaatgccccaatcagggcctt

SEQ ID NO: 5664985 - DNA, 25 bp, Homo sapien
cagaagaaggtcattagaataaaga

SEQ ID NO: 5664986 - DNA, 25 bp, Homo sapien
caaggccctgattggggcattcagt

SEQ ID NO: 5664987 - DNA, 25 bp, Homo sapien
aagaaggtcattagaataaagaaca

SEQ ID NO: 5664988 - DNA, 25 bp, Homo sapien
gaagaaggtcattagaataaagaac

SEQ ID NO: 5664989 - DNA, 25 bp, Homo sapien
ccctgattggggcattcagttgcag

SEQ ID NO: 5664990 - DNA, 25 bp, Homo sapien
agaagaaggtcattagaataaagaa

SEQ ID NO: 5664991 - DNA, 25 bp, Homo sapien
tctaaaaagctttcagaagaaggtc

SEQ ID NO: 5664992 - DNA, 25 bp, Homo sapien
cagaagaaggtcattagaataaaga

SEQ ID NO: 5664993 - DNA, 25 bp, Homo sapien
gttggcagtttcttcccattctaaa

SEQ ID NO: 5664994 - DNA, 25 bp, Homo sapien
aacaactttcccaaggccctgattg

SEQ ID NO: 5664995 - DNA, 25 bp, Homo sapien
ccctgattggggcattcagttgcag

SEQ ID NO: 5664996 - DNA, 25 bp, Homo sapien
tcattagaataaagaacaactttcc

SEQ ID NO: 5664997 - DNA, 25 bp, Homo sapien
ttttcttgttcttcgtaggttgcag

SEQ ID NO: 5664998 - DNA, 25 bp, Homo sapien
cttttcttgttcttcgtaggttgca

SEQ ID NO: 5664999 - DNA, 25 bp, Homo sapien
ttgttcttcgtaggttgcagactgg

SEQ ID NO: 5665000 - DNA, 25 bp, Homo sapien
tcttgttcttcgtaggttgcagact

SEQ ID NO: 5665001 - DNA, 25 bp, Homo sapien
ttcttgttcttcgtaggttgcagac

SEQ ID NO: 5665002 - DNA, 25 bp, Homo sapien
tgttcttcgtaggttgcagactgga

SEQ ID NO: 5665003 - DNA, 25 bp, Homo sapien
cacataccaagataagaggtacaca

SEQ ID NO: 5665004 - DNA, 25 bp, Homo sapien
ggagccacataccaagataagaggt

SEQ ID NO: 5665005 - DNA, 25 bp, Homo sapien
tggacaggagccacataccaagata

SEQ ID NO: 5665006 - DNA, 25 bp, Homo sapien
cataccaagataagaggtacacaag

SEQ ID NO: 5665007 - DNA, 25 bp, Homo sapien
caggagccacataccaagataagag

SEQ ID NO: 5665008 - DNA, 25 bp, Homo sapien
gccacataccaagataagaggtaca

SEQ ID NO: 5665009 - DNA, 25 bp, Homo sapien
ctcttatcttggtatgtggctcctg

SEQ ID NO: 5665010 - DNA, 25 bp, Homo sapien
acctcttatcttggtatgtggctcc

SEQ ID NO: 5665011 - DNA, 25 bp, Homo sapien
tgtacctcttatcttggtatgtggc

SEQ ID NO: 5665012 - DNA, 25 bp, Homo sapien
tatcttggtatgtggctcctgtcca

SEQ ID NO: 5665013 - DNA, 25 bp, Homo sapien
tgtgtacctcttatcttggtatgtg

SEQ ID NO: 5665014 - DNA, 25 bp, Homo sapien
acttgtgtacctcttatcttggtat

SEQ ID NO: 5665015 - DNA, 25 bp, Homo sapien
tgcaacctacgaagaacaagaaaag

SEQ ID NO: 5665016 - DNA, 25 bp, Homo sapien
gtctgcaacctacgaagaacaagaa

SEQ ID NO: 5665017 - DNA, 25 bp, Homo sapien
agtctgcaacctacgaagaacaaga

SEQ ID NO: 5665018 - DNA, 25 bp, Homo sapien
tccagtctgcaacctacgaagaaca

SEQ ID NO: 5665019 - DNA, 25 bp, Homo sapien
tctgcaacctacgaagaacaagaaa

SEQ ID NO: 5665020 - DNA, 25 bp, Homo sapien
cagtctgcaacctacgaagaacaag

SEQ ID NO: 5665021 - DNA, 25 bp, Homo sapien
gaatttcttatagggatgccagctg

SEQ ID NO: 5665022 - DNA, 25 bp, Homo sapien
ttacagaggtgttgtgaacaaattc

SEQ ID NO: 5665023 - DNA, 25 bp, Homo sapien
tcctgaatttcttatagggatgcca

SEQ ID NO: 5665024 - DNA, 25 bp, Homo sapien
aagagctgggcacttacagaggtgt

SEQ ID NO: 5665025 - DNA, 25 bp, Homo sapien
tatctctgggtgtagtcatagaaga

SEQ ID NO: 5665026 - DNA, 25 bp, Homo sapien
atttcttatagggatgccagctgag

SEQ ID NO: 5665027 - DNA, 25 bp, Homo sapien
tcttctatgactacacccagagata

SEQ ID NO: 5665028 - DNA, 25 bp, Homo sapien
gaatttgttcacaacacctctgtaa

SEQ ID NO: 5665029 - DNA, 25 bp, Homo sapien
ggcatccctataagaaattcaggag

SEQ ID NO: 5665030 - DNA, 25 bp, Homo sapien
ctcagctggcatccctataagaaat

SEQ ID NO: 5665031 - DNA, 25 bp, Homo sapien
aacacctctgtaagtgcccagctct

SEQ ID NO: 5665032 - DNA, 25 bp, Homo sapien
ttctatgactacacccagagataac

SEQ ID NO: 5665033 - DNA, 25 bp, Homo sapien
agcaggagtctgaatctttgcagct

SEQ ID NO: 5665034 - DNA, 25 bp, Homo sapien
gtggctgctactctcgagtccctgt

SEQ ID NO: 5665035 - DNA, 25 bp, Homo sapien
tacatgcctgtcagcaggagtctga

SEQ ID NO: 5665036 - DNA, 25 bp, Homo sapien
cggctaggaaaggtacatgcctgtc

SEQ ID NO: 5665037 - DNA, 25 bp, Homo sapien
ctcgagtccctgtttagattttatt

SEQ ID NO: 5665038 - DNA, 25 bp, Homo sapien
ggaaaggtacatgcctgtcagcagg

SEQ ID NO: 5665039 - DNA, 25 bp, Homo sapien
gacaggcatgtacctttcctagccg

SEQ ID NO: 5665040 - DNA, 25 bp, Homo sapien
acagggactcgagagtagcagccac

SEQ ID NO: 5665041 - DNA, 25 bp, Homo sapien
aataaaatctaaacagggactcgag

SEQ ID NO: 5665042 - DNA, 25 bp, Homo sapien
agctgcaaagattcagactcctgct

SEQ ID NO: 5665043 - DNA, 25 bp, Homo sapien
tcagactcctgctgacaggcatgta

SEQ ID NO: 5665044 - DNA, 25 bp, Homo sapien
tctaaacagggactcgagagtagca

SEQ ID NO: 5665045 - DNA, 25 bp, Homo sapien
tttaaacacttatgtaacacagaaa

SEQ ID NO: 5665046 - DNA, 25 bp, Homo sapien
ttttaaacacttatgtaacacagaa

SEQ ID NO: 5665047 - DNA, 25 bp, Homo sapien
acattttatcaaatctgacaccatt

SEQ ID NO: 5665048 - DNA, 25 bp, Homo sapien
ggacattttatcaaatctgacacca

SEQ ID NO: 5665049 - DNA, 25 bp, Homo sapien
taggacattttatcaaatctgacac

SEQ ID NO: 5665050 - DNA, 25 bp, Homo sapien
gacattttatcaaatctgacaccat

SEQ ID NO: 5665051 - DNA, 25 bp, Homo sapien
aatggtgtcagatttgataaaatgt

SEQ ID NO: 5665052 - DNA, 25 bp, Homo sapien
tggtgtcagatttgataaaatgtcc

SEQ ID NO: 5665053 - DNA, 25 bp, Homo sapien
ggtgtcagatttgataaaatgtcct

SEQ ID NO: 5665054 - DNA, 25 bp, Homo sapien
gtgtcagatttgataaaatgtccta

SEQ ID NO: 5665055 - DNA, 25 bp, Homo sapien
tctgtgttacataagtgtttaaaaa

SEQ ID NO: 5665056 - DNA, 25 bp, Homo sapien
tttctgtgttacataagtgtttaaa

SEQ ID NO: 5665057 - DNA, 25 bp, Homo sapien
tctttttctgtgttacataagtgtt

SEQ ID NO: 5665058 - DNA, 25 bp, Homo sapien
aaaaatttaatggtgtcagatttga

SEQ ID NO: 5665059 - DNA, 25 bp, Homo sapien
tggtgtcagatttgataaaatgtcc

SEQ ID NO: 5665060 - DNA, 25 bp, Homo sapien
ggtgtcagatttgataaaatgtcct

SEQ ID NO: 5665061 - DNA, 25 bp, Homo sapien
tctgtgttacataagtgtttaaaaa

SEQ ID NO: 5665062 - DNA, 25 bp, Homo sapien
gataaaatgtcctaatgttttttca

SEQ ID NO: 5665063 - DNA, 25 bp, Homo sapien
attggtgaaggtatatctcagaacc

SEQ ID NO: 5665064 - DNA, 25 bp, Homo sapien
tggtgaaggtatatctcagaaccaa

SEQ ID NO: 5665065 - DNA, 25 bp, Homo sapien
gagtttgtatgaattggtgaaggta

SEQ ID NO: 5665066 - DNA, 25 bp, Homo sapien
ctaagtcttagggaagttgagtttg

SEQ ID NO: 5665067 - DNA, 25 bp, Homo sapien
cttagggaagttgagtttgtatgaa

SEQ ID NO: 5665068 - DNA, 25 bp, Homo sapien
tgaattggtgaaggtatatctcaga

SEQ ID NO: 5665069 - DNA, 25 bp, Homo sapien
caaactcaacttccctaagacttag

SEQ ID NO: 5665070 - DNA, 25 bp, Homo sapien
ttggttctgagatataccttcacca

SEQ ID NO: 5665071 - DNA, 25 bp, Homo sapien
ttcatacaaactcaacttccctaag

SEQ ID NO: 5665072 - DNA, 25 bp, Homo sapien
gatataccttcaccaattcatacaa

SEQ ID NO: 5665073 - DNA, 25 bp, Homo sapien
ggttctgagatataccttcaccaat

SEQ ID NO: 5665074 - DNA, 25 bp, Homo sapien
tcaccaattcatacaaactcaactt

SEQ ID NO: 5665075 - DNA, 25 bp, Homo sapien
aaggcggaagttgcacgccactgca

SEQ ID NO: 5665076 - DNA, 25 bp, Homo sapien
tgcagtggcgtgcaacttccgcctt

SEQ ID NO: 5665077 - DNA, 25 bp, Homo sapien
ggaagttgcacgccactgcacccca

SEQ ID NO: 5665078 - DNA, 25 bp, Homo sapien
cggaagttgcacgccactgcacccc

SEQ ID NO: 5665079 - DNA, 25 bp, Homo sapien
aggcggaagttgcacgccactgcac

SEQ ID NO: 5665080 - DNA, 25 bp, Homo sapien
ggcggaagttgcacgccactgcacc

SEQ ID NO: 5665081 - DNA, 25 bp, Homo sapien
gcggaagttgcacgccactgcaccc

SEQ ID NO: 5665082 - DNA, 25 bp, Homo sapien
aaggcggaagttgcacgccactgca

SEQ ID NO: 5665083 - DNA, 25 bp, Homo sapien
tggggtgcagtggcgtgcaacttcc

SEQ ID NO: 5665084 - DNA, 25 bp, Homo sapien
tgcagtggcgtgcaacttccgcctt

SEQ ID NO: 5665085 - DNA, 25 bp, Homo sapien
gtgcagtggcgtgcaacttccgcct

SEQ ID NO: 5665086 - DNA, 25 bp, Homo sapien
ggtgcagtggcgtgcaacttccgcc

SEQ ID NO: 5665087 - DNA, 25 bp, Homo sapien
gggtgcagtggcgtgcaacttccgc

SEQ ID NO: 5665088 - DNA, 25 bp, Homo sapien
ggggtgcagtggcgtgcaacttccg

SEQ ID NO: 5665089 - DNA, 25 bp, Homo sapien
agaaaatagccaggcggcgcttgcc

SEQ ID NO: 5665090 - DNA, 25 bp, Homo sapien
ggcaagcgccgcctggctattttct

SEQ ID NO: 5665091 - DNA, 25 bp, Homo sapien
aaacacagaaaatagccaggcggcg

SEQ ID NO: 5665092 - DNA, 25 bp, Homo sapien
gaaaatagccaggcggcgcttgcct

SEQ ID NO: 5665093 - DNA, 25 bp, Homo sapien
acacagaaaatagccaggcggcgct

SEQ ID NO: 5665094 - DNA, 25 bp, Homo sapien
acagaaaatagccaggcggcgcttg

SEQ ID NO: 5665095 - DNA, 25 bp, Homo sapien
agaaaatagccaggcggcgcttgcc

SEQ ID NO: 5665096 - DNA, 25 bp, Homo sapien
aacacagaaaatagccaggcggcgc

SEQ ID NO: 5665097 - DNA, 25 bp, Homo sapien
ggcaagcgccgcctggctattttct

SEQ ID NO: 5665098 - DNA, 25 bp, Homo sapien
gcgccgcctggctattttctgtgtt

SEQ ID NO: 5665099 - DNA, 25 bp, Homo sapien
aggcaagcgccgcctggctattttc

SEQ ID NO: 5665100 - DNA, 25 bp, Homo sapien
agcgccgcctggctattttctgtgt

SEQ ID NO: 5665101 - DNA, 25 bp, Homo sapien
caagcgccgcctggctattttctgt

SEQ ID NO: 5665102 - DNA, 25 bp, Homo sapien
cgccgcctggctattttctgtgttt

SEQ ID NO: 5665103 - DNA, 25 bp, Homo sapien
tagaacaaggatcttgtttattttg

SEQ ID NO: 5665104 - DNA, 25 bp, Homo sapien
gaacaaggatcttgtttattttgca

SEQ ID NO: 5665105 - DNA, 25 bp, Homo sapien
agaacaaggatcttgtttattttgc

SEQ ID NO: 5665106 - DNA, 25 bp, Homo sapien
gcaaaataaacaagatccttgttct

SEQ ID NO: 5665107 - DNA, 25 bp, Homo sapien
tgcaaaataaacaagatccttgttc

SEQ ID NO: 5665108 - DNA, 25 bp, Homo sapien
caaaataaacaagatccttgttcta

SEQ ID NO: 5665109 - DNA, 25 bp, Homo sapien
acaaggatcttgtttattttgcaga

SEQ ID NO: 5665110 - DNA, 25 bp, Homo sapien
gatcttgtttattttgcagatggaa

SEQ ID NO: 5665111 - DNA, 25 bp, Homo sapien
caaggatcttgtttattttgcagat

SEQ ID NO: 5665112 - DNA, 25 bp, Homo sapien
gaacaaggatcttgtttattttgca

SEQ ID NO: 5665113 - DNA, 25 bp, Homo sapien
atggaaaagactaaggtggctggac

SEQ ID NO: 5665114 - DNA, 25 bp, Homo sapien
gcagatggaaaagactaaggtggct

SEQ ID NO: 5665115 - DNA, 25 bp, Homo sapien
gcaaaataaacaagatccttgttct

SEQ ID NO: 5665116 - DNA, 25 bp, Homo sapien
ttccatctgcaaaataaacaagatc

SEQ ID NO: 5665117 - DNA, 25 bp, Homo sapien
tgcaaaataaacaagatccttgttc

SEQ ID NO: 5665118 - DNA, 25 bp, Homo sapien
tctgcaaaataaacaagatccttgt

SEQ ID NO: 5665119 - DNA, 25 bp, Homo sapien
ccatctgcaaaataaacaagatcct

SEQ ID NO: 5665120 - DNA, 25 bp, Homo sapien
gccaccttagtcttttccatctgca

SEQ ID NO: 5665121 - DNA, 25 bp, Homo sapien
tttctcagcactctatatacataaa

SEQ ID NO: 5665122 - DNA, 25 bp, Homo sapien
tgcaagtctgaatacttgtgtggca

SEQ ID NO: 5665123 - DNA, 25 bp, Homo sapien
aatgcacttttgcaagtctgaatac

SEQ ID NO: 5665124 - DNA, 25 bp, Homo sapien
cataaatgcacttttgcaagtctga

SEQ ID NO: 5665125 - DNA, 25 bp, Homo sapien
gaatacttgtgtggcattatacaaa

SEQ ID NO: 5665126 - DNA, 25 bp, Homo sapien
tctgaatacttgtgtggcattatac

SEQ ID NO: 5665127 - DNA, 25 bp, Homo sapien
cagacttgcaaaagtgcatttatgt

SEQ ID NO: 5665128 - DNA, 25 bp, Homo sapien
tttatgtatatagagtgctgagaaa

SEQ ID NO: 5665129 - DNA, 25 bp, Homo sapien
aagtattcagacttgcaaaagtgca

SEQ ID NO: 5665130 - DNA, 25 bp, Homo sapien
tttgtataatgccacacaagtattc

SEQ ID NO: 5665131 - DNA, 25 bp, Homo sapien
tataatgccacacaagtattcagac

SEQ ID NO: 5665132 - DNA, 25 bp, Homo sapien
gccacacaagtattcagacttgcaa

SEQ ID NO: 5665133 - DNA, 25 bp, Homo sapien
tgcctggctttatgtccgcttgcac

SEQ ID NO: 5665134 - DNA, 25 bp, Homo sapien
atttaacatggcaactttgggcctg

SEQ ID NO: 5665135 - DNA, 25 bp, Homo sapien
gcctggctttatgtccgcttgcact

SEQ ID NO: 5665136 - DNA, 25 bp, Homo sapien
tttaacatggcaactttgggcctga

SEQ ID NO: 5665137 - DNA, 25 bp, Homo sapien
catttaacatggcaactttgggcct

SEQ ID NO: 5665138 - DNA, 25 bp, Homo sapien
agtgcaagcggacataaagccaggc

SEQ ID NO: 5665139 - DNA, 25 bp, Homo sapien
gtgcaagcggacataaagccaggca

SEQ ID NO: 5665140 - DNA, 25 bp, Homo sapien
tcaggcccaaagttgccatgttaaa

SEQ ID NO: 5665141 - DNA, 25 bp, Homo sapien
caggcccaaagttgccatgttaaat

SEQ ID NO: 5665142 - DNA, 25 bp, Homo sapien
aggcccaaagttgccatgttaaatg

SEQ ID NO: 5665143 - DNA, 25 bp, Homo sapien
tatagcattatgcagagtgcagact

SEQ ID NO: 5665144 - DNA, 25 bp, Homo sapien
ttttttatagaagtgtcgggcagcc

SEQ ID NO: 5665145 - DNA, 25 bp, Homo sapien
gccatctgctatacagcgccggttt

SEQ ID NO: 5665146 - DNA, 25 bp, Homo sapien
catctgctatacagcgccggttttt

SEQ ID NO: 5665147 - DNA, 25 bp, Homo sapien
cattatgcagagtgcagactctggg

SEQ ID NO: 5665148 - DNA, 25 bp, Homo sapien
ttatagaagtgtcgggcagccatct

SEQ ID NO: 5665149 - DNA, 25 bp, Homo sapien
gagtctgcactctgcataatgctat

SEQ ID NO: 5665150 - DNA, 25 bp, Homo sapien
ggctgcccgacacttctataaaaaa

SEQ ID NO: 5665151 - DNA, 25 bp, Homo sapien
aaaaaaccggcgctgtatagcagat

SEQ ID NO: 5665152 - DNA, 25 bp, Homo sapien
cccagagtctgcactctgcataatg

SEQ ID NO: 5665153 - DNA, 25 bp, Homo sapien
aaaccggcgctgtatagcagatggc

SEQ ID NO: 5665154 - DNA, 25 bp, Homo sapien
agatggctgcccgacacttctataa

SEQ ID NO: 5665155 - DNA, 25 bp, Homo sapien
tggtattacaggtgcccgccaccac

SEQ ID NO: 5665156 - DNA, 25 bp, Homo sapien
tgagtagctggtattacaggtgccc

SEQ ID NO: 5665157 - DNA, 25 bp, Homo sapien
ggtattacaggtgcccgccaccacg

SEQ ID NO: 5665158 - DNA, 25 bp, Homo sapien
gtattacaggtgcccgccaccacgc

SEQ ID NO: 5665159 - DNA, 25 bp, Homo sapien
tattacaggtgcccgccaccacgcc

SEQ ID NO: 5665160 - DNA, 25 bp, Homo sapien
ttacaggtgcccgccaccacgccca

SEQ ID NO: 5665161 - DNA, 25 bp, Homo sapien
gtggtggcgggcacctgtaatacca

SEQ ID NO: 5665162 - DNA, 25 bp, Homo sapien
tgggcgtggtggcgggcacctgtaa

SEQ ID NO: 5665163 - DNA, 25 bp, Homo sapien
gcgtggtggcgggcacctgtaatac

SEQ ID NO: 5665164 - DNA, 25 bp, Homo sapien
ggcgtggtggcgggcacctgtaata

SEQ ID NO: 5665165 - DNA, 25 bp, Homo sapien
cgtggtggcgggcacctgtaatacc

SEQ ID NO: 5665166 - DNA, 25 bp, Homo sapien
gggcacctgtaataccagctactca

SEQ ID NO: 5665167 - DNA, 25 bp, Homo sapien
tgaaacttctaggttcatcctgtgt

SEQ ID NO: 5665168 - DNA, 25 bp, Homo sapien
ctaggttcatcctgtgttgctgtca

SEQ ID NO: 5665169 - DNA, 25 bp, Homo sapien
tacaaattgttctgagaccaccacc

SEQ ID NO: 5665170 - DNA, 25 bp, Homo sapien
tctattagaaagatgaaacttctag

SEQ ID NO: 5665171 - DNA, 25 bp, Homo sapien
tgttctgagaccaccaccctttttc

SEQ ID NO: 5665172 - DNA, 25 bp, Homo sapien
tgtcctcttcctatagtttctatta

SEQ ID NO: 5665173 - DNA, 25 bp, Homo sapien
taatagaaactataggaagaggaca

SEQ ID NO: 5665174 - DNA, 25 bp, Homo sapien
gaaaaagggtggtggtctcagaaca

SEQ ID NO: 5665175 - DNA, 25 bp, Homo sapien
tataggaagaggacagaagaaaaag

SEQ ID NO: 5665176 - DNA, 25 bp, Homo sapien
ggtggtggtctcagaacaatttgta

SEQ ID NO: 5665177 - DNA, 25 bp, Homo sapien
tgacagcaacacaggatgaacctag

SEQ ID NO: 5665178 - DNA, 25 bp, Homo sapien
cacaggatgaacctagaagtttcat

SEQ ID NO: 5665179 - DNA, 25 bp, Homo sapien
caaacccctgatctttgcgggctgc

SEQ ID NO: 5665180 - DNA, 25 bp, Homo sapien
ctcgttgtcttggtattatgatgta

SEQ ID NO: 5665181 - DNA, 25 bp, Homo sapien
ttatgatgtacggtctcaaacccct

SEQ ID NO: 5665182 - DNA, 25 bp, Homo sapien
tcttggtattatgatgtacggtctc

SEQ ID NO: 5665183 - DNA, 25 bp, Homo sapien
acccctgatctttgcgggctgctgc

SEQ ID NO: 5665184 - DNA, 25 bp, Homo sapien
aagtgtgttttgagactcgttgtct

SEQ ID NO: 5665185 - DNA, 25 bp, Homo sapien
tacatcataataccaagacaacgag

SEQ ID NO: 5665186 - DNA, 25 bp, Homo sapien
cagcagcccgcaaagatcaggggtt

SEQ ID NO: 5665187 - DNA, 25 bp, Homo sapien
tttgagaccgtacatcataatacca

SEQ ID NO: 5665188 - DNA, 25 bp, Homo sapien
gagaccgtacatcataataccaaga

SEQ ID NO: 5665189 - DNA, 25 bp, Homo sapien
agacaacgagtctcaaaacacactt

SEQ ID NO: 5665190 - DNA, 25 bp, Homo sapien
gggtttgagaccgtacatcataata

SEQ ID NO: 5665191 - DNA, 25 bp, Homo sapien
cttatgatctgtagtggcctgccaa

SEQ ID NO: 5665192 - DNA, 25 bp, Homo sapien
cccctgttcagcgatggacggctta

SEQ ID NO: 5665193 - DNA, 25 bp, Homo sapien
ttcagcgatggacggcttatgatct

SEQ ID NO: 5665194 - DNA, 25 bp, Homo sapien
tggacggcttatgatctgtagtggc

SEQ ID NO: 5665195 - DNA, 25 bp, Homo sapien
cctgttcagcgatggacggcttatg

SEQ ID NO: 5665196 - DNA, 25 bp, Homo sapien
ccttctgagtgccctcttggaacct

SEQ ID NO: 5665197 - DNA, 25 bp, Homo sapien
tacagatcataagccgtccatcgct

SEQ ID NO: 5665198 - DNA, 25 bp, Homo sapien
ttggcaggccactacagatcataag

SEQ ID NO: 5665199 - DNA, 25 bp, Homo sapien
agatcataagccgtccatcgctgaa

SEQ ID NO: 5665200 - DNA, 25 bp, Homo sapien
gccactacagatcataagccgtcca

SEQ ID NO: 5665201 - DNA, 25 bp, Homo sapien
ataagccgtccatcgctgaacaggg

SEQ ID NO: 5665202 - DNA, 25 bp, Homo sapien
aggttccaagagggcactcagaagg

SEQ ID NO: 5665203 - DNA, 25 bp, Homo sapien
cctgaagcgtctggggcgtgagcgg

SEQ ID NO: 5665204 - DNA, 25 bp, Homo sapien
gagacgagcggcctgaagcgtctgg

SEQ ID NO: 5665205 - DNA, 25 bp, Homo sapien
gggaggagacgagcggcctgaagcg

SEQ ID NO: 5665206 - DNA, 25 bp, Homo sapien
gccgcggggggagccggtggcgtga

SEQ ID NO: 5665207 - DNA, 25 bp, Homo sapien
agacgagcggcctgaagcgtctggg

SEQ ID NO: 5665208 - DNA, 25 bp, Homo sapien
tctggggcgtgagcggtccgaggcc

SEQ ID NO: 5665209 - DNA, 25 bp, Homo sapien
ccagacgcttcaggccgctcgtctc

SEQ ID NO: 5665210 - DNA, 25 bp, Homo sapien
gcttcaggccgctcgtctcctcccc

SEQ ID NO: 5665211 - DNA, 25 bp, Homo sapien
ggcctcggaccgctcacgccccaga

SEQ ID NO: 5665212 - DNA, 25 bp, Homo sapien
cgctcacgccccagacgcttcaggc

SEQ ID NO: 5665213 - DNA, 25 bp, Homo sapien
tcacgccccagacgcttcaggccgc

SEQ ID NO: 5665214 - DNA, 25 bp, Homo sapien
gccccagacgcttcaggccgctcgt

SEQ ID NO: 5665215 - DNA, 25 bp, Homo sapien
gccccagacgcttcaggccgctcgt

SEQ ID NO: 5665216 - DNA, 25 bp, Homo sapien
ccagacgcttcaggccgctcgtctc

SEQ ID NO: 5665217 - DNA, 25 bp, Homo sapien
gcttcaggccgctcgtctcctcccc

SEQ ID NO: 5665218 - DNA, 25 bp, Homo sapien
caggccccgggcctcggaccgctca

SEQ ID NO: 5665219 - DNA, 25 bp, Homo sapien
ggcctcggaccgctcacgccccaga

SEQ ID NO: 5665220 - DNA, 25 bp, Homo sapien
cgctcacgccccagacgcttcaggc

SEQ ID NO: 5665221 - DNA, 25 bp, Homo sapien
ctaacggcggtggttcataggcttc

SEQ ID NO: 5665222 - DNA, 25 bp, Homo sapien
ggccgcctggaagttcggcctttgc

SEQ ID NO: 5665223 - DNA, 25 bp, Homo sapien
tttctaacggcggtggttcataggc

SEQ ID NO: 5665224 - DNA, 25 bp, Homo sapien
ggagctccaggcgtggtttattttc

SEQ ID NO: 5665225 - DNA, 25 bp, Homo sapien
tttgccggggatacgtggcggagct

SEQ ID NO: 5665226 - DNA, 25 bp, Homo sapien
gctccaggcgtggtttattttctaa

SEQ ID NO: 5665227 - DNA, 25 bp, Homo sapien
ttagaaaataaaccacgcctggagc

SEQ ID NO: 5665228 - DNA, 25 bp, Homo sapien
ctccgccacgtatccccggcaaagg

SEQ ID NO: 5665229 - DNA, 25 bp, Homo sapien
gaaaataaaccacgcctggagctcc

SEQ ID NO: 5665230 - DNA, 25 bp, Homo sapien
caaaggccgaacttccaggcggccg

SEQ ID NO: 5665231 - DNA, 25 bp, Homo sapien
gcctatgaaccaccgccgttagaaa

SEQ ID NO: 5665232 - DNA, 25 bp, Homo sapien
gaagcctatgaaccaccgccgttag

SEQ ID NO: 5665233 - DNA, 25 bp, Homo sapien
ctggtagcactagggttctggaggt

SEQ ID NO: 5665234 - DNA, 25 bp, Homo sapien
taagaggctggtagcactagggttc

SEQ ID NO: 5665235 - DNA, 25 bp, Homo sapien
tgctgtggctctgttgaagtgggaa

SEQ ID NO: 5665236 - DNA, 25 bp, Homo sapien
actcaccggcgtgttgccactcgtg

SEQ ID NO: 5665237 - DNA, 25 bp, Homo sapien
cggcgtgttgccactcgtgagccag

SEQ ID NO: 5665238 - DNA, 25 bp, Homo sapien
gaaatgttaagaggctggtagcact

SEQ ID NO: 5665239 - DNA, 25 bp, Homo sapien
ctggctcacgagtggcaacacgccg

SEQ ID NO: 5665240 - DNA, 25 bp, Homo sapien
agtgctaccagcctcttaacatttc

SEQ ID NO: 5665241 - DNA, 25 bp, Homo sapien
acctccagaaccctagtgctaccag

SEQ ID NO: 5665242 - DNA, 25 bp, Homo sapien
ttcccacttcaacagagccacagca

SEQ ID NO: 5665243 - DNA, 25 bp, Homo sapien
gaaccctagtgctaccagcctctta

SEQ ID NO: 5665244 - DNA, 25 bp, Homo sapien
acgagtggcaacacgccggtgagtc

SEQ ID NO: 5665245 - DNA, 25 bp, Homo sapien
gagactaaatctaaaccaagacgct

SEQ ID NO: 5665246 - DNA, 25 bp, Homo sapien
tgactccgtagctgctgcttcgtga

SEQ ID NO: 5665247 - DNA, 25 bp, Homo sapien
taaaccaagacgcttgactccgtag

SEQ ID NO: 5665248 - DNA, 25 bp, Homo sapien
gcttcgtgaatattaatgaggcttc

SEQ ID NO: 5665249 - DNA, 25 bp, Homo sapien
aagacgcttgactccgtagctgctg

SEQ ID NO: 5665250 - DNA, 25 bp, Homo sapien
tcgtgaatattaatgaggcttcgtt

SEQ ID NO: 5665251 - DNA, 25 bp, Homo sapien
gaagcagcagctacggagtcaagcg

SEQ ID NO: 5665252 - DNA, 25 bp, Homo sapien
gaagcctcattaatattcacgaagc

SEQ ID NO: 5665253 - DNA, 25 bp, Homo sapien
aacgaagcctcattaatattcacga

SEQ ID NO: 5665254 - DNA, 25 bp, Homo sapien
caagcgtcttggtttagatttagtc

SEQ ID NO: 5665255 - DNA, 25 bp, Homo sapien
cagctacggagtcaagcgtcttggt

SEQ ID NO: 5665256 - DNA, 25 bp, Homo sapien
tcacgaagcagcagctacggagtca

SEQ ID NO: 5665257 - DNA, 25 bp, Homo sapien
ccacttgggtttttgatctcagtag

SEQ ID NO: 5665258 - DNA, 25 bp, Homo sapien
ctcagtaggattaattgcagaagcc

SEQ ID NO: 5665259 - DNA, 25 bp, Homo sapien
tgcggtagtcctgccccaaaaagga

SEQ ID NO: 5665260 - DNA, 25 bp, Homo sapien
gagagtcccacttgggtttttgatc

SEQ ID NO: 5665261 - DNA, 25 bp, Homo sapien
tcgacttgcggtagtcctgccccaa

SEQ ID NO: 5665262 - DNA, 25 bp, Homo sapien
ttaattgcagaagcctaatctttgt

SEQ ID NO: 5665263 - DNA, 25 bp, Homo sapien
ctgagatcaaaaacccaagtgggac

SEQ ID NO: 5665264 - DNA, 25 bp, Homo sapien
ggcttctgcaattaatcctactgag

SEQ ID NO: 5665265 - DNA, 25 bp, Homo sapien
ctactgagatcaaaaacccaagtgg

SEQ ID NO: 5665266 - DNA, 25 bp, Homo sapien
ctttttggggcaggactaccgcaag

SEQ ID NO: 5665267 - DNA, 25 bp, Homo sapien
caaagattaggcttctgcaattaat

SEQ ID NO: 5665268 - DNA, 25 bp, Homo sapien
gatcaaaaacccaagtgggactctc

SEQ ID NO: 5665269 - DNA, 25 bp, Homo sapien
gagagtagacatatgtattcaaaac

SEQ ID NO: 5665270 - DNA, 25 bp, Homo sapien
gaattttgcccattcatggagtgag

SEQ ID NO: 5665271 - DNA, 25 bp, Homo sapien
ttgaagaattttgcccattcatgga

SEQ ID NO: 5665272 - DNA, 25 bp, Homo sapien
ggagtgagagtagacatatgtattc

SEQ ID NO: 5665273 - DNA, 25 bp, Homo sapien
catggagtgagagtagacatatgta

SEQ ID NO: 5665274 - DNA, 25 bp, Homo sapien
attttgcccattcatggagtgagag

SEQ ID NO: 5665275 - DNA, 25 bp, Homo sapien
tcactccatgaatgggcaaaattct

SEQ ID NO: 5665276 - DNA, 25 bp, Homo sapien
tacatatgtctactctcactccatg

SEQ ID NO: 5665277 - DNA, 25 bp, Homo sapien
tccatgaatgggcaaaattcttcaa

SEQ ID NO: 5665278 - DNA, 25 bp, Homo sapien
gaatacatatgtctactctcactcc

SEQ ID NO: 5665279 - DNA, 25 bp, Homo sapien
gttttgaatacatatgtctactctc

SEQ ID NO: 5665280 - DNA, 25 bp, Homo sapien
ctctcactccatgaatgggcaaaat

SEQ ID NO: 5665281 - DNA, 25 bp, Homo sapien
agtaagctattcatgtttgtaaccg

SEQ ID NO: 5665282 - DNA, 25 bp, Homo sapien
tgttgatccctgtagcaaacttcgg

SEQ ID NO: 5665283 - DNA, 25 bp, Homo sapien
tattcatgtttgtaaccgttctcat

SEQ ID NO: 5665284 - DNA, 25 bp, Homo sapien
tggagtgttgatccctgtagcaaac

SEQ ID NO: 5665285 - DNA, 25 bp, Homo sapien
gatccctgtagcaaacttcggttct

SEQ ID NO: 5665286 - DNA, 25 bp, Homo sapien
aaagagtggagtgttgatccctgta

SEQ ID NO: 5665287 - DNA, 25 bp, Homo sapien
gtttgctacagggatcaacactcca

SEQ ID NO: 5665288 - DNA, 25 bp, Homo sapien
aagaaccgaagtttgctacagggat

SEQ ID NO: 5665289 - DNA, 25 bp, Homo sapien
tgagaacggttacaaacatgaatag

SEQ ID NO: 5665290 - DNA, 25 bp, Homo sapien
tacagggatcaacactccactcttt

SEQ ID NO: 5665291 - DNA, 25 bp, Homo sapien
cggttacaaacatgaatagcttact

SEQ ID NO: 5665292 - DNA, 25 bp, Homo sapien
ccgaagtttgctacagggatcaaca

SEQ ID NO: 5665293 - DNA, 25 bp, Homo sapien
tgaaatatggtatgatgagagaatg

SEQ ID NO: 5665294 - DNA, 25 bp, Homo sapien
cagtacctatcagcgtagttagaga

SEQ ID NO: 5665295 - DNA, 25 bp, Homo sapien
cctatcagcgtagttagagatgaaa

SEQ ID NO: 5665296 - DNA, 25 bp, Homo sapien
ggaattatagtcttttatgggtgtc

SEQ ID NO: 5665297 - DNA, 25 bp, Homo sapien
taacagtacctatcagcgtagttag

SEQ ID NO: 5665298 - DNA, 25 bp, Homo sapien
tatgggtgtctgtagaggtttctgt

SEQ ID NO: 5665299 - DNA, 25 bp, Homo sapien
aacagaaacctctacagacacccat

SEQ ID NO: 5665300 - DNA, 25 bp, Homo sapien
tttcatctctaactacgctgatagg

SEQ ID NO: 5665301 - DNA, 25 bp, Homo sapien
gacacccataaaagactataattcc

SEQ ID NO: 5665302 - DNA, 25 bp, Homo sapien
cattctctcatcataccatatttca

SEQ ID NO: 5665303 - DNA, 25 bp, Homo sapien
tctacagacacccataaaagactat

SEQ ID NO: 5665304 - DNA, 25 bp, Homo sapien
tctctaactacgctgataggtactg

SEQ ID NO: 5665305 - DNA, 25 bp, Homo sapien
gtacctcactgtctgtacatctttg

SEQ ID NO: 5665306 - DNA, 25 bp, Homo sapien
tcttacacctgggtattgtgtgtac

SEQ ID NO: 5665307 - DNA, 25 bp, Homo sapien
tactatttcttacacctgggtattg

SEQ ID NO: 5665308 - DNA, 25 bp, Homo sapien
cctcactgtctgtacatctttgaag

SEQ ID NO: 5665309 - DNA, 25 bp, Homo sapien
tcactgtctgtacatctttgaagaa

SEQ ID NO: 5665310 - DNA, 25 bp, Homo sapien
ttacacctgggtattgtgtgtacct

SEQ ID NO: 5665311 - DNA, 25 bp, Homo sapien
ttcttcaaagatgtacagacagtga

SEQ ID NO: 5665312 - DNA, 25 bp, Homo sapien
cttcaaagatgtacagacagtgagg

SEQ ID NO: 5665313 - DNA, 25 bp, Homo sapien
cacaatacccaggtgtaagaaatag

SEQ ID NO: 5665314 - DNA, 25 bp, Homo sapien
caaagatgtacagacagtgaggtac

SEQ ID NO: 5665315 - DNA, 25 bp, Homo sapien
caatacccaggtgtaagaaatagta

SEQ ID NO: 5665316 - DNA, 25 bp, Homo sapien
ggtacacacaatacccaggtgtaag

SEQ ID NO: 5665317 - DNA, 25 bp, Homo sapien
gataatctttcatgtctaccagaga

SEQ ID NO: 5665318 - DNA, 25 bp, Homo sapien
caaagcccttgtaaaaggcatcgat

SEQ ID NO: 5665319 - DNA, 25 bp, Homo sapien
gcccttgtaaaaggcatcgataatc

SEQ ID NO: 5665320 - DNA, 25 bp, Homo sapien
ccttgtaaaaggcatcgataatctt

SEQ ID NO: 5665321 - DNA, 25 bp, Homo sapien
taaaaggcatcgataatctttcatg

SEQ ID NO: 5665322 - DNA, 25 bp, Homo sapien
tacaaagcccttgtaaaaggcatcg

SEQ ID NO: 5665323 - DNA, 25 bp, Homo sapien
gattatcgatgccttttacaagggc

SEQ ID NO: 5665324 - DNA, 25 bp, Homo sapien
tagacatgaaagattatcgatgcct

SEQ ID NO: 5665325 - DNA, 25 bp, Homo sapien
ctggtagacatgaaagattatcgat

SEQ ID NO: 5665326 - DNA, 25 bp, Homo sapien
tctctggtagacatgaaagattatc

SEQ ID NO: 5665327 - DNA, 25 bp, Homo sapien
gatgccttttacaagggctttgtaa

SEQ ID NO: 5665328 - DNA, 25 bp, Homo sapien
aagattatcgatgccttttacaagg

SEQ ID NO: 5665329 - DNA, 25 bp, Homo sapien
tgatttgccaagatcacaaaacctg

SEQ ID NO: 5665330 - DNA, 25 bp, Homo sapien
ccaagatcacaaaacctgaggacaa

SEQ ID NO: 5665331 - DNA, 25 bp, Homo sapien
tttgccaagatcacaaaacctgagg

SEQ ID NO: 5665332 - DNA, 25 bp, Homo sapien
tgagaaactgatttgccaagatcac

SEQ ID NO: 5665333 - DNA, 25 bp, Homo sapien
tgccaagatcacaaaacctgaggac

SEQ ID NO: 5665334 - DNA, 25 bp, Homo sapien
gagaaactgatttgccaagatcaca

SEQ ID NO: 5665335 - DNA, 25 bp, Homo sapien
tcctcaggttttgtgatcttggcaa

SEQ ID NO: 5665336 - DNA, 25 bp, Homo sapien
ttgtcctcaggttttgtgatcttgg

SEQ ID NO: 5665337 - DNA, 25 bp, Homo sapien
cctcaggttttgtgatcttggcaaa

SEQ ID NO: 5665338 - DNA, 25 bp, Homo sapien
tgtcctcaggttttgtgatcttggc

SEQ ID NO: 5665339 - DNA, 25 bp, Homo sapien
caggttttgtgatcttggcaaatca

SEQ ID NO: 5665340 - DNA, 25 bp, Homo sapien
gtgatcttggcaaatcagtttctca

SEQ ID NO: 5665341 - DNA, 25 bp, Homo sapien
gctgggtcaacagatggatcgcata

SEQ ID NO: 5665342 - DNA, 25 bp, Homo sapien
gggtcaacagatggatcgcatatac

SEQ ID NO: 5665343 - DNA, 25 bp, Homo sapien
ctgggtcaacagatggatcgcatat

SEQ ID NO: 5665344 - DNA, 25 bp, Homo sapien
tcaacagatggatcgcatatacaat

SEQ ID NO: 5665345 - DNA, 25 bp, Homo sapien
ggtcaacagatggatcgcatataca

SEQ ID NO: 5665346 - DNA, 25 bp, Homo sapien
tgggtcaacagatggatcgcatata

SEQ ID NO: 5665347 - DNA, 25 bp, Homo sapien
atatgcgatccatctgttgacccag

SEQ ID NO: 5665348 - DNA, 25 bp, Homo sapien
tgtatatgcgatccatctgttgacc

SEQ ID NO: 5665349 - DNA, 25 bp, Homo sapien
tatatgcgatccatctgttgaccca

SEQ ID NO: 5665350 - DNA, 25 bp, Homo sapien
tatgcgatccatctgttgacccagc

SEQ ID NO: 5665351 - DNA, 25 bp, Homo sapien
gtatatgcgatccatctgttgaccc

SEQ ID NO: 5665352 - DNA, 25 bp, Homo sapien
attgtatatgcgatccatctgttga

SEQ ID NO: 5665353 - DNA, 25 bp, Homo sapien
ttccgagttcaagtaattccctgcc

SEQ ID NO: 5665354 - DNA, 25 bp, Homo sapien
atttccgagttcaagtaattccctg

SEQ ID NO: 5665355 - DNA, 25 bp, Homo sapien
tgatttccgagttcaagtaattccc

SEQ ID NO: 5665356 - DNA, 25 bp, Homo sapien
ctgatttccgagttcaagtaattcc

SEQ ID NO: 5665357 - DNA, 25 bp, Homo sapien
tccgagttcaagtaattccctgcct

SEQ ID NO: 5665358 - DNA, 25 bp, Homo sapien
tttccgagttcaagtaattccctgc

SEQ ID NO: 5665359 - DNA, 25 bp, Homo sapien
ggaattacttgaactcggaaatcag

SEQ ID NO: 5665360 - DNA, 25 bp, Homo sapien
cagggaattacttgaactcggaaat

SEQ ID NO: 5665361 - DNA, 25 bp, Homo sapien
gggaattacttgaactcggaaatca

SEQ ID NO: 5665362 - DNA, 25 bp, Homo sapien
ggcagggaattacttgaactcggaa

SEQ ID NO: 5665363 - DNA, 25 bp, Homo sapien
aggcagggaattacttgaactcgga

SEQ ID NO: 5665364 - DNA, 25 bp, Homo sapien
gcagggaattacttgaactcggaaa

SEQ ID NO: 5665365 - DNA, 25 bp, Homo sapien
gaggttgttaccatgttgtccaggc

SEQ ID NO: 5665366 - DNA, 25 bp, Homo sapien
gagacgaggttgttaccatgttgtc

SEQ ID NO: 5665367 - DNA, 25 bp, Homo sapien
agacgaggttgttaccatgttgtcc

SEQ ID NO: 5665368 - DNA, 25 bp, Homo sapien
gacgaggttgttaccatgttgtcca

SEQ ID NO: 5665369 - DNA, 25 bp, Homo sapien
cgaggttgttaccatgttgtccagg

SEQ ID NO: 5665370 - DNA, 25 bp, Homo sapien
cacacctggctaatttttgtgtttt

SEQ ID NO: 5665371 - DNA, 25 bp, Homo sapien
gcctggacaacatggtaacaacctc

SEQ ID NO: 5665372 - DNA, 25 bp, Homo sapien
aaaacacaaaaattagccaggtgtg

SEQ ID NO: 5665373 - DNA, 25 bp, Homo sapien
gacaacatggtaacaacctcgtctc

SEQ ID NO: 5665374 - DNA, 25 bp, Homo sapien
cctggacaacatggtaacaacctcg

SEQ ID NO: 5665375 - DNA, 25 bp, Homo sapien
tggacaacatggtaacaacctcgtc

SEQ ID NO: 5665376 - DNA, 25 bp, Homo sapien
ggacaacatggtaacaacctcgtct

SEQ ID NO: 5665377 - DNA, 25 bp, Homo sapien
ggcttatgtgtttgcctgtaatgtt

SEQ ID NO: 5665378 - DNA, 25 bp, Homo sapien
tatgtgtttgcctgtaatgtttatt

SEQ ID NO: 5665379 - DNA, 25 bp, Homo sapien
ttatgtgtttgcctgtaatgtttat

SEQ ID NO: 5665380 - DNA, 25 bp, Homo sapien
tggcttatgtgtttgcctgtaatgt

SEQ ID NO: 5665381 - DNA, 25 bp, Homo sapien
gcttatgtgtttgcctgtaatgttt

SEQ ID NO: 5665382 - DNA, 25 bp, Homo sapien
aaacattacaggcaaacacataagc

SEQ ID NO: 5665383 - DNA, 25 bp, Homo sapien
aataaacattacaggcaaacacata

SEQ ID NO: 5665384 - DNA, 25 bp, Homo sapien
ataaacattacaggcaaacacataa

SEQ ID NO: 5665385 - DNA, 25 bp, Homo sapien
acattacaggcaaacacataagcca

SEQ ID NO: 5665386 - DNA, 25 bp, Homo sapien
aacattacaggcaaacacataagcc

SEQ ID NO: 5665387 - DNA, 25 bp, Homo sapien
tgatgaaaaatttctcccttctagg

SEQ ID NO: 5665388 - DNA, 25 bp, Homo sapien
gttcattttcttcacatgtttagtg

SEQ ID NO: 5665389 - DNA, 25 bp, Homo sapien
tgtttgcctgtaatgtttattgttc

SEQ ID NO: 5665390 - DNA, 25 bp, Homo sapien
tatgtgtttgcctgtaatgtttatt

SEQ ID NO: 5665391 - DNA, 25 bp, Homo sapien
tggcttatgtgtttgcctgtaatgt

SEQ ID NO: 5665392 - DNA, 25 bp, Homo sapien
cacatgtttagtgatgaaaaatttc

SEQ ID NO: 5665393 - DNA, 25 bp, Homo sapien
cctagaagggagaaatttttcatca

SEQ ID NO: 5665394 - DNA, 25 bp, Homo sapien
acattacaggcaaacacataagcca

SEQ ID NO: 5665395 - DNA, 25 bp, Homo sapien
aataaacattacaggcaaacacata

SEQ ID NO: 5665396 - DNA, 25 bp, Homo sapien
gaaatttttcatcactaaacatgtg

SEQ ID NO: 5665397 - DNA, 25 bp, Homo sapien
gaacaataaacattacaggcaaaca

SEQ ID NO: 5665398 - DNA, 25 bp, Homo sapien
cactaaacatgtgaagaaaatgaac

SEQ ID NO: 5665399 - DNA, 25 bp, Homo sapien
ggttccaatgtgagtctagaaattg

SEQ ID NO: 5665400 - DNA, 25 bp, Homo sapien
tggacttaaagcatgggtatagtac

SEQ ID NO: 5665401 - DNA, 25 bp, Homo sapien
aagcatgggtatagtactactgtct

SEQ ID NO: 5665402 - DNA, 25 bp, Homo sapien
gtttggacttaaagcatgggtatag

SEQ ID NO: 5665403 - DNA, 25 bp, Homo sapien
ccaatgtgagtctagaaattggaga

SEQ ID NO: 5665404 - DNA, 25 bp, Homo sapien
ttaaagcatgggtatagtactactg

SEQ ID NO: 5665405 - DNA, 25 bp, Homo sapien
cagtagtactatacccatgctttaa

SEQ ID NO: 5665406 - DNA, 25 bp, Homo sapien
tctccaatttctagactcacattgg

SEQ ID NO: 5665407 - DNA, 25 bp, Homo sapien
aatttctagactcacattggaacct

SEQ ID NO: 5665408 - DNA, 25 bp, Homo sapien
agacagtagtactatacccatgctt

SEQ ID NO: 5665409 - DNA, 25 bp, Homo sapien
gtactatacccatgctttaagtcca

SEQ ID NO: 5665410 - DNA, 25 bp, Homo sapien
ctatacccatgctttaagtccaaac

SEQ ID NO: 5665411 - DNA, 25 bp, Homo sapien
gaacctctccgggattcaagcgatc

SEQ ID NO: 5665412 - DNA, 25 bp, Homo sapien
acctctccgggattcaagcgatcct

SEQ ID NO: 5665413 - DNA, 25 bp, Homo sapien
actggaacctctccgggattcaagc

SEQ ID NO: 5665414 - DNA, 25 bp, Homo sapien
tcactggaacctctccgggattcaa

SEQ ID NO: 5665415 - DNA, 25 bp, Homo sapien
aacctctccgggattcaagcgatcc

SEQ ID NO: 5665416 - DNA, 25 bp, Homo sapien
ctcactggaacctctccgggattca

SEQ ID NO: 5665417 - DNA, 25 bp, Homo sapien
tgaatcccggagaggttccagtgag

SEQ ID NO: 5665418 - DNA, 25 bp, Homo sapien
ggatcgcttgaatcccggagaggtt

SEQ ID NO: 5665419 - DNA, 25 bp, Homo sapien
aggatcgcttgaatcccggagaggt

SEQ ID NO: 5665420 - DNA, 25 bp, Homo sapien
gcttgaatcccggagaggttccagt

SEQ ID NO: 5665421 - DNA, 25 bp, Homo sapien
ttgaatcccggagaggttccagtga

SEQ ID NO: 5665422 - DNA, 25 bp, Homo sapien
gatcgcttgaatcccggagaggttc

SEQ ID NO: 5665423 - DNA, 25 bp, Homo sapien
ccttaacgtgatctgcacgccctgg

SEQ ID NO: 5665424 - DNA, 25 bp, Homo sapien
ttaacgtgatctgcacgccctggcc

SEQ ID NO: 5665425 - DNA, 25 bp, Homo sapien
tggccttaacgtgatctgcacgccc

SEQ ID NO: 5665426 - DNA, 25 bp, Homo sapien
taacgtgatctgcacgccctggcct

SEQ ID NO: 5665427 - DNA, 25 bp, Homo sapien
gccttaacgtgatctgcacgccctg

SEQ ID NO: 5665428 - DNA, 25 bp, Homo sapien
cctggccttaacgtgatctgcacgc

SEQ ID NO: 5665429 - DNA, 25 bp, Homo sapien
gcgtgcagatcacgttaaggccagg

SEQ ID NO: 5665430 - DNA, 25 bp, Homo sapien
gccagggcgtgcagatcacgttaag

SEQ ID NO: 5665431 - DNA, 25 bp, Homo sapien
ggccagggcgtgcagatcacgttaa

SEQ ID NO: 5665432 - DNA, 25 bp, Homo sapien
gggcgtgcagatcacgttaaggcca

SEQ ID NO: 5665433 - DNA, 25 bp, Homo sapien
cagggcgtgcagatcacgttaaggc

SEQ ID NO: 5665434 - DNA, 25 bp, Homo sapien
aggccagggcgtgcagatcacgtta

SEQ ID NO: 5665435 - DNA, 25 bp, Homo sapien
catagcttgctatatcctcgaactg

SEQ ID NO: 5665436 - DNA, 25 bp, Homo sapien
tcgaactgctactgggttcacctca

SEQ ID NO: 5665437 - DNA, 25 bp, Homo sapien
cgaactgctactgggttcacctcag

SEQ ID NO: 5665438 - DNA, 25 bp, Homo sapien
tagcttgctatatcctcgaactgct

SEQ ID NO: 5665439 - DNA, 25 bp, Homo sapien
gcttgctatatcctcgaactgctac

SEQ ID NO: 5665440 - DNA, 25 bp, Homo sapien
cttgctatatcctcgaactgctact

SEQ ID NO: 5665441 - DNA, 25 bp, Homo sapien
gaggtgaacccagtagcagttcgag

SEQ ID NO: 5665442 - DNA, 25 bp, Homo sapien
gcagttcgaggatatagcaagctat

SEQ ID NO: 5665443 - DNA, 25 bp, Homo sapien
cagttcgaggatatagcaagctatg

SEQ ID NO: 5665444 - DNA, 25 bp, Homo sapien
agtagcagttcgaggatatagcaag

SEQ ID NO: 5665445 - DNA, 25 bp, Homo sapien
ctgaggtgaacccagtagcagttcg

SEQ ID NO: 5665446 - DNA, 25 bp, Homo sapien
tagcagttcgaggatatagcaagct

SEQ ID NO: 5665447 - DNA, 25 bp, Homo sapien
gttgcccagattggactcttggcct

SEQ ID NO: 5665448 - DNA, 25 bp, Homo sapien
aggccaagagtccaatctgggcaac

SEQ ID NO: 5665449 - DNA, 25 bp, Homo sapien
tgcccagattggactcttggcctca

SEQ ID NO: 5665450 - DNA, 25 bp, Homo sapien
gttgcccagattggactcttggcct

SEQ ID NO: 5665451 - DNA, 25 bp, Homo sapien
ttggcctccccaaagtgagattaca

SEQ ID NO: 5665452 - DNA, 25 bp, Homo sapien
cctccccaggcttcttgcatttaaa

SEQ ID NO: 5665453 - DNA, 25 bp, Homo sapien
gcccagattggactcttggcctcaa

SEQ ID NO: 5665454 - DNA, 25 bp, Homo sapien
ttgcccagattggactcttggcctc

SEQ ID NO: 5665455 - DNA, 25 bp, Homo sapien
tttaaatgcaagaagcctggggagg

SEQ ID NO: 5665456 - DNA, 25 bp, Homo sapien
cttgaggccaagagtccaatctggg

SEQ ID NO: 5665457 - DNA, 25 bp, Homo sapien
aggccaagagtccaatctgggcaac

SEQ ID NO: 5665458 - DNA, 25 bp, Homo sapien
ttgaggccaagagtccaatctgggc

SEQ ID NO: 5665459 - DNA, 25 bp, Homo sapien
gaggccaagagtccaatctgggcaa

SEQ ID NO: 5665460 - DNA, 25 bp, Homo sapien
tgaggccaagagtccaatctgggca

SEQ ID NO: 5665461 - DNA, 25 bp, Homo sapien
agagtatttactatcagtgttcttt

SEQ ID NO: 5665462 - DNA, 25 bp, Homo sapien
ttaaatagaatagaagtctcagttt

SEQ ID NO: 5665463 - DNA, 25 bp, Homo sapien
tttaaatagaatagaagtctcagtt

SEQ ID NO: 5665464 - DNA, 25 bp, Homo sapien
ttttaaatagaatagaagtctcagt

SEQ ID NO: 5665465 - DNA, 25 bp, Homo sapien
aaactgagacttctattctatttaa

SEQ ID NO: 5665466 - DNA, 25 bp, Homo sapien
aaagaacactgatagtaaatactct

SEQ ID NO: 5665467 - DNA, 25 bp, Homo sapien
aactgagacttctattctatttaaa

SEQ ID NO: 5665468 - DNA, 25 bp, Homo sapien
actgagacttctattctatttaaaa

SEQ ID NO: 5665469 - DNA, 25 bp, Homo sapien
aaagttccttttcccatgtgctctt

SEQ ID NO: 5665470 - DNA, 25 bp, Homo sapien
agagtatttactatcagtgttcttt

SEQ ID NO: 5665471 - DNA, 25 bp, Homo sapien
ttaaatagaatagaagtctcagttt

SEQ ID NO: 5665472 - DNA, 25 bp, Homo sapien
gaagtctcagtttttagagtattta

SEQ ID NO: 5665473 - DNA, 25 bp, Homo sapien
gaatagaagtctcagtttttagagt

SEQ ID NO: 5665474 - DNA, 25 bp, Homo sapien
ttttaaatagaatagaagtctcagt

SEQ ID NO: 5665475 - DNA, 25 bp, Homo sapien
aaaagagcacatgggaaaaggaact

SEQ ID NO: 5665476 - DNA, 25 bp, Homo sapien
aaactgagacttctattctatttaa

SEQ ID NO: 5665477 - DNA, 25 bp, Homo sapien
aaagaacactgatagtaaatactct

SEQ ID NO: 5665478 - DNA, 25 bp, Homo sapien
taaatactctaaaaactgagacttc

SEQ ID NO: 5665479 - DNA, 25 bp, Homo sapien
aagagcacatgggaaaaggaacttt

SEQ ID NO: 5665480 - DNA, 25 bp, Homo sapien
actgagacttctattctatttaaaa

SEQ ID NO: 5665481 - DNA, 25 bp, Homo sapien
tgtgagcctttacaatgctgtgact

SEQ ID NO: 5665482 - DNA, 25 bp, Homo sapien
gaagggtagactatagtgtttgtga

SEQ ID NO: 5665483 - DNA, 25 bp, Homo sapien
gcctttacaatgctgtgacttgtga

SEQ ID NO: 5665484 - DNA, 25 bp, Homo sapien
tgtgaagtttgattatgtccctttg

SEQ ID NO: 5665485 - DNA, 25 bp, Homo sapien
gggtctgtgagcctttacaatgctg

SEQ ID NO: 5665486 - DNA, 25 bp, Homo sapien
gactcttcagaagggtagactatag

SEQ ID NO: 5665487 - DNA, 25 bp, Homo sapien
tcacaagtcacagcattgtaaaggc

SEQ ID NO: 5665488 - DNA, 25 bp, Homo sapien
tcacaaacactatagtctacccttc

SEQ ID NO: 5665489 - DNA, 25 bp, Homo sapien
cactatagtctacccttctgaagag

SEQ ID NO: 5665490 - DNA, 25 bp, Homo sapien
tagtctacccttctgaagagtcaca

SEQ ID NO: 5665491 - DNA, 25 bp, Homo sapien
cagcattgtaaaggctcacagaccc

SEQ ID NO: 5665492 - DNA, 25 bp, Homo sapien
caaagggacataatcaaacttcaca

SEQ ID NO: 5665493 - DNA, 25 bp, Homo sapien
tgtgttatacccatcaagcctggta

SEQ ID NO: 5665494 - DNA, 25 bp, Homo sapien
atgtgttatacccatcaagcctggt

SEQ ID NO: 5665495 - DNA, 25 bp, Homo sapien
tgttatacccatcaagcctggtatg

SEQ ID NO: 5665496 - DNA, 25 bp, Homo sapien
tggatgtgttatacccatcaagcct

SEQ ID NO: 5665497 - DNA, 25 bp, Homo sapien
tatgttttatggtgagcagttaatg

SEQ ID NO: 5665498 - DNA, 25 bp, Homo sapien
ggatgtgttatacccatcaagcctg

SEQ ID NO: 5665499 - DNA, 25 bp, Homo sapien
taccaggcttgatgggtataacaca

SEQ ID NO: 5665500 - DNA, 25 bp, Homo sapien
cataccaggcttgatgggtataaca

SEQ ID NO: 5665501 - DNA, 25 bp, Homo sapien
aggcttgatgggtataacacatcca

SEQ ID NO: 5665502 - DNA, 25 bp, Homo sapien
cattaactgctcaccataaaacata

SEQ ID NO: 5665503 - DNA, 25 bp, Homo sapien
caggcttgatgggtataacacatcc

SEQ ID NO: 5665504 - DNA, 25 bp, Homo sapien
accaggcttgatgggtataacacat

SEQ ID NO: 5665505 - DNA, 25 bp, Homo sapien
taatacgcacactggtataaagtac

SEQ ID NO: 5665506 - DNA, 25 bp, Homo sapien
tacgcacactggtataaagtactgt

SEQ ID NO: 5665507 - DNA, 25 bp, Homo sapien
caaacagttaatacgcacactggta

SEQ ID NO: 5665508 - DNA, 25 bp, Homo sapien
cagttaatacgcacactggtataaa

SEQ ID NO: 5665509 - DNA, 25 bp, Homo sapien
gttaatacgcacactggtataaagt

SEQ ID NO: 5665510 - DNA, 25 bp, Homo sapien
acgcacactggtataaagtactgtt

SEQ ID NO: 5665511 - DNA, 25 bp, Homo sapien
aacagtactttataccagtgtgcgt

SEQ ID NO: 5665512 - DNA, 25 bp, Homo sapien
taccagtgtgcgtattaactgtttg

SEQ ID NO: 5665513 - DNA, 25 bp, Homo sapien
ttataccagtgtgcgtattaactgt

SEQ ID NO: 5665514 - DNA, 25 bp, Homo sapien
cagtactttataccagtgtgcgtat

SEQ ID NO: 5665515 - DNA, 25 bp, Homo sapien
acagtactttataccagtgtgcgta

SEQ ID NO: 5665516 - DNA, 25 bp, Homo sapien
actttataccagtgtgcgtattaac

SEQ ID NO: 5665517 - DNA, 25 bp, Homo sapien
gaggttggtccatatgcatttattg

SEQ ID NO: 5665518 - DNA, 25 bp, Homo sapien
gtccttcagttctgaggttggtcca

SEQ ID NO: 5665519 - DNA, 25 bp, Homo sapien
ccttcagttctgaggttggtccata

SEQ ID NO: 5665520 - DNA, 25 bp, Homo sapien
gttctgaggttggtccatatgcatt

SEQ ID NO: 5665521 - DNA, 25 bp, Homo sapien
aaacaaatataagaacatgcacttt

SEQ ID NO: 5665522 - DNA, 25 bp, Homo sapien
tcagttctgaggttggtccatatgc

SEQ ID NO: 5665523 - DNA, 25 bp, Homo sapien
tggaccaacctcagaactgaaggac

SEQ ID NO: 5665524 - DNA, 25 bp, Homo sapien
taaagtgcatgttcttatatttgtt

SEQ ID NO: 5665525 - DNA, 25 bp, Homo sapien
gcatatggaccaacctcagaactga

SEQ ID NO: 5665526 - DNA, 25 bp, Homo sapien
caataaatgcatatggaccaacctc

SEQ ID NO: 5665527 - DNA, 25 bp, Homo sapien
tatggaccaacctcagaactgaagg

SEQ ID NO: 5665528 - DNA, 25 bp, Homo sapien
taaatgcatatggaccaacctcaga

SEQ ID NO: 5665529 - DNA, 25 bp, Homo sapien
aatctttgagcatgacgatgaaggc

SEQ ID NO: 5665530 - DNA, 25 bp, Homo sapien
aaaatctttgagcatgacgatgaag

SEQ ID NO: 5665531 - DNA, 25 bp, Homo sapien
aaatctttgagcatgacgatgaagg

SEQ ID NO: 5665532 - DNA, 25 bp, Homo sapien
gccttcatcgtcatgctcaaagatt

SEQ ID NO: 5665533 - DNA, 25 bp, Homo sapien
ccttcatcgtcatgctcaaagattt

SEQ ID NO: 5665534 - DNA, 25 bp, Homo sapien
cttcatcgtcatgctcaaagatttt

SEQ ID NO: 5665535 - DNA, 25 bp, Homo sapien
gcatgacgatgaaggcagaaaacag

SEQ ID NO: 5665536 - DNA, 25 bp, Homo sapien
aatctttgagcatgacgatgaaggc

SEQ ID NO: 5665537 - DNA, 25 bp, Homo sapien
taggttttaagctggtggttcttca

SEQ ID NO: 5665538 - DNA, 25 bp, Homo sapien
tgaaggcagaaaacaggaaaaaggc

SEQ ID NO: 5665539 - DNA, 25 bp, Homo sapien
gctggtggttcttcaaaatctttga

SEQ ID NO: 5665540 - DNA, 25 bp, Homo sapien
gcatgaaagatcaaattgggagttt

SEQ ID NO: 5665541 - DNA, 25 bp, Homo sapien
tcaaagattttgaagaaccaccagc

SEQ ID NO: 5665542 - DNA, 25 bp, Homo sapien
gccttcatcgtcatgctcaaagatt

SEQ ID NO: 5665543 - DNA, 25 bp, Homo sapien
tgttttctgccttcatcgtcatgct

SEQ ID NO: 5665544 - DNA, 25 bp, Homo sapien
tgaagaaccaccagcttaaaaccta

SEQ ID NO: 5665545 - DNA, 25 bp, Homo sapien
gcctttttcctgttttctgccttca

SEQ ID NO: 5665546 - DNA, 25 bp, Homo sapien
aaactcccaatttgatctttcatgc

SEQ ID NO: 5665547 - DNA, 25 bp, Homo sapien
cctaacacccagccaagatgagagg

SEQ ID NO: 5665548 - DNA, 25 bp, Homo sapien
atcctaacacccagccaagatgaga

SEQ ID NO: 5665549 - DNA, 25 bp, Homo sapien
aatcctaacacccagccaagatgag

SEQ ID NO: 5665550 - DNA, 25 bp, Homo sapien
tcctaacacccagccaagatgagag

SEQ ID NO: 5665551 - DNA, 25 bp, Homo sapien
ctctcatcttggctgggtgttagga

SEQ ID NO: 5665552 - DNA, 25 bp, Homo sapien
cctctcatcttggctgggtgttagg

SEQ ID NO: 5665553 - DNA, 25 bp, Homo sapien
tctcatcttggctgggtgttaggat

SEQ ID NO: 5665554 - DNA, 25 bp, Homo sapien
ctcatcttggctgggtgttaggatt

SEQ ID NO: 5665555 - DNA, 25 bp, Homo sapien
cccagccaagatgagaggatctctt

SEQ ID NO: 5665556 - DNA, 25 bp, Homo sapien
ctaacacccagccaagatgagagga

SEQ ID NO: 5665557 - DNA, 25 bp, Homo sapien
taaaaattcaaagtatgaccaggcg

SEQ ID NO: 5665558 - DNA, 25 bp, Homo sapien
aattcaaagtatgaccaggcgcagt

SEQ ID NO: 5665559 - DNA, 25 bp, Homo sapien
aatcctaacacccagccaagatgag

SEQ ID NO: 5665560 - DNA, 25 bp, Homo sapien
tcctaacacccagccaagatgagag

SEQ ID NO: 5665561 - DNA, 25 bp, Homo sapien
ctctcatcttggctgggtgttagga

SEQ ID NO: 5665562 - DNA, 25 bp, Homo sapien
catactttgaatttttaagctttcg

SEQ ID NO: 5665563 - DNA, 25 bp, Homo sapien
tcctctcatcttggctgggtgttag

SEQ ID NO: 5665564 - DNA, 25 bp, Homo sapien
ctcatcttggctgggtgttaggatt

SEQ ID NO: 5665565 - DNA, 25 bp, Homo sapien
aagagatcctctcatcttggctggg

SEQ ID NO: 5665566 - DNA, 25 bp, Homo sapien
cactgcgcctggtcatactttgaat

SEQ ID NO: 5665567 - DNA, 25 bp, Homo sapien
tggagtctccagttgctcaggctgg

SEQ ID NO: 5665568 - DNA, 25 bp, Homo sapien
atggagtctccagttgctcaggctg

SEQ ID NO: 5665569 - DNA, 25 bp, Homo sapien
agatggagtctccagttgctcaggc

SEQ ID NO: 5665570 - DNA, 25 bp, Homo sapien
ggagtctccagttgctcaggctgga

SEQ ID NO: 5665571 - DNA, 25 bp, Homo sapien
cagcctgagcaactggagactccat

SEQ ID NO: 5665572 - DNA, 25 bp, Homo sapien
tccagcctgagcaactggagactcc

SEQ ID NO: 5665573 - DNA, 25 bp, Homo sapien
ccagcctgagcaactggagactcca

SEQ ID NO: 5665574 - DNA, 25 bp, Homo sapien
gcctgagcaactggagactccatct

SEQ ID NO: 5665575 - DNA, 25 bp, Homo sapien
gggactgcaggctcggggcaccatg

SEQ ID NO: 5665576 - DNA, 25 bp, Homo sapien
tgggactgcaggctcggggcaccat

SEQ ID NO: 5665577 - DNA, 25 bp, Homo sapien
ctgcaggctcggggcaccatgccct

SEQ ID NO: 5665578 - DNA, 25 bp, Homo sapien
actgcaggctcggggcaccatgccc

SEQ ID NO: 5665579 - DNA, 25 bp, Homo sapien
tgcaggctcggggcaccatgccctg

SEQ ID NO: 5665580 - DNA, 25 bp, Homo sapien
atggtgccccgagcctgcagtccca

SEQ ID NO: 5665581 - DNA, 25 bp, Homo sapien
cagggcatggtgccccgagcctgca

SEQ ID NO: 5665582 - DNA, 25 bp, Homo sapien
agggcatggtgccccgagcctgcag

SEQ ID NO: 5665583 - DNA, 25 bp, Homo sapien
catggtgccccgagcctgcagtccc

SEQ ID NO: 5665584 - DNA, 25 bp, Homo sapien
gggcatggtgccccgagcctgcagt

SEQ ID NO: 5665585 - DNA, 25 bp, Homo sapien
gggactgcaggctcggggcaccatg

SEQ ID NO: 5665586 - DNA, 25 bp, Homo sapien
tgggactgcaggctcggggcaccat

SEQ ID NO: 5665587 - DNA, 25 bp, Homo sapien
gggcaccatgccctgctaatttttg

SEQ ID NO: 5665588 - DNA, 25 bp, Homo sapien
cgggtagctgggactgcaggctcgg

SEQ ID NO: 5665589 - DNA, 25 bp, Homo sapien
aggctcggggcaccatgccctgcta

SEQ ID NO: 5665590 - DNA, 25 bp, Homo sapien
tgcaggctcggggcaccatgccctg

SEQ ID NO: 5665591 - DNA, 25 bp, Homo sapien
tagcagggcatggtgccccgagcct

SEQ ID NO: 5665592 - DNA, 25 bp, Homo sapien
atggtgccccgagcctgcagtccca

SEQ ID NO: 5665593 - DNA, 25 bp, Homo sapien
caaaaattagcagggcatggtgccc

SEQ ID NO: 5665594 - DNA, 25 bp, Homo sapien
aattagcagggcatggtgccccgag

SEQ ID NO: 5665595 - DNA, 25 bp, Homo sapien
ggcatggtgccccgagcctgcagtc

SEQ ID NO: 5665596 - DNA, 25 bp, Homo sapien
catggtgccccgagcctgcagtccc

SEQ ID NO: 5665597 - DNA, 25 bp, Homo sapien
ggattgcagatgtgaaccactgcgc

SEQ ID NO: 5665598 - DNA, 25 bp, Homo sapien
gcagatgtgaaccactgcgcccagc

SEQ ID NO: 5665599 - DNA, 25 bp, Homo sapien
tgcagatgtgaaccactgcgcccag

SEQ ID NO: 5665600 - DNA, 25 bp, Homo sapien
attgcagatgtgaaccactgcgccc

SEQ ID NO: 5665601 - DNA, 25 bp, Homo sapien
gattgcagatgtgaaccactgcgcc

SEQ ID NO: 5665602 - DNA, 25 bp, Homo sapien
ttgcagatgtgaaccactgcgccca

SEQ ID NO: 5665603 - DNA, 25 bp, Homo sapien
gctgggcgcagtggttcacatctgc

SEQ ID NO: 5665604 - DNA, 25 bp, Homo sapien
ggcgcagtggttcacatctgcaatc

SEQ ID NO: 5665605 - DNA, 25 bp, Homo sapien
gggcgcagtggttcacatctgcaat

SEQ ID NO: 5665606 - DNA, 25 bp, Homo sapien
ctgggcgcagtggttcacatctgca

SEQ ID NO: 5665607 - DNA, 25 bp, Homo sapien
gcgcagtggttcacatctgcaatcc

SEQ ID NO: 5665608 - DNA, 25 bp, Homo sapien
tgggcgcagtggttcacatctgcaa

SEQ ID NO: 5665609 - DNA, 25 bp, Homo sapien
aacctcgggcgatctggtcacctca

SEQ ID NO: 5665610 - DNA, 25 bp, Homo sapien
ctaacctcgggcgatctggtcacct

SEQ ID NO: 5665611 - DNA, 25 bp, Homo sapien
acctcgggcgatctggtcacctcat

SEQ ID NO: 5665612 - DNA, 25 bp, Homo sapien
tcgggcgatctggtcacctcatcct

SEQ ID NO: 5665613 - DNA, 25 bp, Homo sapien
ggcgatctggtcacctcatcctccc

SEQ ID NO: 5665614 - DNA, 25 bp, Homo sapien
taacctcgggcgatctggtcacctc

SEQ ID NO: 5665615 - DNA, 25 bp, Homo sapien
atgaggtgaccagatcgcccgaggt

SEQ ID NO: 5665616 - DNA, 25 bp, Homo sapien
aggatgaggtgaccagatcgcccga

SEQ ID NO: 5665617 - DNA, 25 bp, Homo sapien
gggaggatgaggtgaccagatcgcc

SEQ ID NO: 5665618 - DNA, 25 bp, Homo sapien
gaggtgaccagatcgcccgaggtta

SEQ ID NO: 5665619 - DNA, 25 bp, Homo sapien
aggtgaccagatcgcccgaggttag

SEQ ID NO: 5665620 - DNA, 25 bp, Homo sapien
tgaggtgaccagatcgcccgaggtt

SEQ ID NO: 5665621 - DNA, 25 bp, Homo sapien
taccatgctactcagactggacttg

SEQ ID NO: 5665622 - DNA, 25 bp, Homo sapien
tgttttaccatgctactcagactgg

SEQ ID NO: 5665623 - DNA, 25 bp, Homo sapien
ggtgttttaccatgctactcagact

SEQ ID NO: 5665624 - DNA, 25 bp, Homo sapien
accatgctactcagactggacttga

SEQ ID NO: 5665625 - DNA, 25 bp, Homo sapien
tggtgttttaccatgctactcagac

SEQ ID NO: 5665626 - DNA, 25 bp, Homo sapien
gttttaccatgctactcagactgga

SEQ ID NO: 5665627 - DNA, 25 bp, Homo sapien
caagtccagtctgagtagcatggta

SEQ ID NO: 5665628 - DNA, 25 bp, Homo sapien
tccagtctgagtagcatggtaaaac

SEQ ID NO: 5665629 - DNA, 25 bp, Homo sapien
cagtctgagtagcatggtaaaacac

SEQ ID NO: 5665630 - DNA, 25 bp, Homo sapien
gtctgagtagcatggtaaaacacca

SEQ ID NO: 5665631 - DNA, 25 bp, Homo sapien
agtctgagtagcatggtaaaacacc

SEQ ID NO: 5665632 - DNA, 25 bp, Homo sapien
tcaagtccagtctgagtagcatggt

SEQ ID NO: 5665633 - DNA, 25 bp, Homo sapien
tggacttgaatctctgggcacaagc

SEQ ID NO: 5665634 - DNA, 25 bp, Homo sapien
taccatgctactcagactggacttg

SEQ ID NO: 5665635 - DNA, 25 bp, Homo sapien
acttgaatctctgggcacaagctat

SEQ ID NO: 5665636 - DNA, 25 bp, Homo sapien
ggtgttttaccatgctactcagact

SEQ ID NO: 5665637 - DNA, 25 bp, Homo sapien
actggacttgaatctctgggcacaa

SEQ ID NO: 5665638 - DNA, 25 bp, Homo sapien
gacttgaatctctgggcacaagcta

SEQ ID NO: 5665639 - DNA, 25 bp, Homo sapien
caagtccagtctgagtagcatggta

SEQ ID NO: 5665640 - DNA, 25 bp, Homo sapien
gtctgagtagcatggtaaaacacca

SEQ ID NO: 5665641 - DNA, 25 bp, Homo sapien
gcttgtgcccagagattcaagtcca

SEQ ID NO: 5665642 - DNA, 25 bp, Homo sapien
atagcttgtgcccagagattcaagt

SEQ ID NO: 5665643 - DNA, 25 bp, Homo sapien
ttgtgcccagagattcaagtccagt

SEQ ID NO: 5665644 - DNA, 25 bp, Homo sapien
tagcttgtgcccagagattcaagtc

SEQ ID NO: 5665645 - DNA, 25 bp, Homo sapien
taccatgctactcagactggacttg

SEQ ID NO: 5665646 - DNA, 25 bp, Homo sapien
tgttttaccatgctactcagactgg

SEQ ID NO: 5665647 - DNA, 25 bp, Homo sapien
atgctactcagactggacttgaatc

SEQ ID NO: 5665648 - DNA, 25 bp, Homo sapien
tgcccggccactttttttcttgaga

SEQ ID NO: 5665649 - DNA, 25 bp, Homo sapien
tggtgttttaccatgctactcagac

SEQ ID NO: 5665650 - DNA, 25 bp, Homo sapien
ccatgctactcagactggacttgaa

SEQ ID NO: 5665651 - DNA, 25 bp, Homo sapien
caagtccagtctgagtagcatggta

SEQ ID NO: 5665652 - DNA, 25 bp, Homo sapien
cagtctgagtagcatggtaaaacac

SEQ ID NO: 5665653 - DNA, 25 bp, Homo sapien
gtctgagtagcatggtaaaacacca

SEQ ID NO: 5665654 - DNA, 25 bp, Homo sapien
caccatctcaagaaaaaaagtggcc

SEQ ID NO: 5665655 - DNA, 25 bp, Homo sapien
gattcaagtccagtctgagtagcat

SEQ ID NO: 5665656 - DNA, 25 bp, Homo sapien
tctcaagaaaaaaagtggccgggca

SEQ ID NO: 5665657 - DNA, 25 bp, Homo sapien
aatagggatggtatggttcggattg

SEQ ID NO: 5665658 - DNA, 25 bp, Homo sapien
tggttcggattggtttagtctgatt

SEQ ID NO: 5665659 - DNA, 25 bp, Homo sapien
ggattggtttagtctgattttgagt

SEQ ID NO: 5665660 - DNA, 25 bp, Homo sapien
cggattggtttagtctgattttgag

SEQ ID NO: 5665661 - DNA, 25 bp, Homo sapien
tatggttcggattggtttagtctga

SEQ ID NO: 5665662 - DNA, 25 bp, Homo sapien
tggtatggttcggattggtttagtc

SEQ ID NO: 5665663 - DNA, 25 bp, Homo sapien
gactaaaccaatccgaaccatacca

SEQ ID NO: 5665664 - DNA, 25 bp, Homo sapien
caaaatcagactaaaccaatccgaa

SEQ ID NO: 5665665 - DNA, 25 bp, Homo sapien
actcaaaatcagactaaaccaatcc

SEQ ID NO: 5665666 - DNA, 25 bp, Homo sapien
aatcagactaaaccaatccgaacca

SEQ ID NO: 5665667 - DNA, 25 bp, Homo sapien
tcagactaaaccaatccgaaccata

SEQ ID NO: 5665668 - DNA, 25 bp, Homo sapien
ctcaaaatcagactaaaccaatccg

SEQ ID NO: 5665669 - DNA, 25 bp, Homo sapien
aaaattgatataattaggccaggca

SEQ ID NO: 5665670 - DNA, 25 bp, Homo sapien
aaaaattgatataattaggccaggc

SEQ ID NO: 5665671 - DNA, 25 bp, Homo sapien
aattgatataattaggccaggcatg

SEQ ID NO: 5665672 - DNA, 25 bp, Homo sapien
taaaaattgatataattaggccagg

SEQ ID NO: 5665673 - DNA, 25 bp, Homo sapien
aaattgatataattaggccaggcat

SEQ ID NO: 5665674 - DNA, 25 bp, Homo sapien
attgatataattaggccaggcatgg

SEQ ID NO: 5665675 - DNA, 25 bp, Homo sapien
gcctggcctaattatatcaattttt

SEQ ID NO: 5665676 - DNA, 25 bp, Homo sapien
cctggcctaattatatcaattttta

SEQ ID NO: 5665677 - DNA, 25 bp, Homo sapien
ccatgcctggcctaattatatcaat

SEQ ID NO: 5665678 - DNA, 25 bp, Homo sapien
atgcctggcctaattatatcaattt

SEQ ID NO: 5665679 - DNA, 25 bp, Homo sapien
catgcctggcctaattatatcaatt

SEQ ID NO: 5665680 - DNA, 25 bp, Homo sapien
tgcctggcctaattatatcaatttt

SEQ ID NO: 5665681 - DNA, 25 bp, Homo sapien
aagaatgcgccaccgtgttccatcc

SEQ ID NO: 5665682 - DNA, 25 bp, Homo sapien
agaatgcgccaccgtgttccatcct

SEQ ID NO: 5665683 - DNA, 25 bp, Homo sapien
caagaatgcgccaccgtgttccatc

SEQ ID NO: 5665684 - DNA, 25 bp, Homo sapien
ccaagaatgcgccaccgtgttccat

SEQ ID NO: 5665685 - DNA, 25 bp, Homo sapien
gaatgcgccaccgtgttccatcctg

SEQ ID NO: 5665686 - DNA, 25 bp, Homo sapien
ggatggaacacggtggcgcattctt

SEQ ID NO: 5665687 - DNA, 25 bp, Homo sapien
atggaacacggtggcgcattcttgg

SEQ ID NO: 5665688 - DNA, 25 bp, Homo sapien
aggatggaacacggtggcgcattct

SEQ ID NO: 5665689 - DNA, 25 bp, Homo sapien
gatggaacacggtggcgcattcttg

SEQ ID NO: 5665690 - DNA, 25 bp, Homo sapien
caggatggaacacggtggcgcattc

SEQ ID NO: 5665691 - DNA, 25 bp, Homo sapien
aagaatgcgccaccgtgttccatcc

SEQ ID NO: 5665692 - DNA, 25 bp, Homo sapien
caagaatgcgccaccgtgttccatc

SEQ ID NO: 5665693 - DNA, 25 bp, Homo sapien
aatgcgccaccgtgttccatcctgg

SEQ ID NO: 5665694 - DNA, 25 bp, Homo sapien
ccaagaatgcgccaccgtgttccat

SEQ ID NO: 5665695 - DNA, 25 bp, Homo sapien
atgcgccaccgtgttccatcctggg

SEQ ID NO: 5665696 - DNA, 25 bp, Homo sapien
gaatgcgccaccgtgttccatcctg

SEQ ID NO: 5665697 - DNA, 25 bp, Homo sapien
ttgcccaggatggaacacggtggcg

SEQ ID NO: 5665698 - DNA, 25 bp, Homo sapien
ggatggaacacggtggcgcattctt

SEQ ID NO: 5665699 - DNA, 25 bp, Homo sapien
atggaacacggtggcgcattcttgg

SEQ ID NO: 5665700 - DNA, 25 bp, Homo sapien
gatggaacacggtggcgcattcttg

SEQ ID NO: 5665701 - DNA, 25 bp, Homo sapien
cccaggatggaacacggtggcgcat

SEQ ID NO: 5665702 - DNA, 25 bp, Homo sapien
caggatggaacacggtggcgcattc

SEQ ID NO: 5665703 - DNA, 25 bp, Homo sapien
ttttttcggcaagtctcgctcttgt

SEQ ID NO: 5665704 - DNA, 25 bp, Homo sapien
tttcggcaagtctcgctcttgtgcc

SEQ ID NO: 5665705 - DNA, 25 bp, Homo sapien
gcaagtctcgctcttgtgccccagg

SEQ ID NO: 5665706 - DNA, 25 bp, Homo sapien
ggcaagtctcgctcttgtgccccag

SEQ ID NO: 5665707 - DNA, 25 bp, Homo sapien
ttttcggcaagtctcgctcttgtgc

SEQ ID NO: 5665708 - DNA, 25 bp, Homo sapien
ttcggcaagtctcgctcttgtgccc

SEQ ID NO: 5665709 - DNA, 25 bp, Homo sapien
ggcacaagagcgagacttgccgaaa

SEQ ID NO: 5665710 - DNA, 25 bp, Homo sapien
cctggggcacaagagcgagacttgc

SEQ ID NO: 5665711 - DNA, 25 bp, Homo sapien
gcacaagagcgagacttgccgaaaa

SEQ ID NO: 5665712 - DNA, 25 bp, Homo sapien
cacaagagcgagacttgccgaaaaa

SEQ ID NO: 5665713 - DNA, 25 bp, Homo sapien
acaagagcgagacttgccgaaaaaa

SEQ ID NO: 5665714 - DNA, 25 bp, Homo sapien
gggcacaagagcgagacttgccgaa

SEQ ID NO: 5665715 - DNA, 25 bp, Homo sapien
tctgcatagtagtaaaggatgcctt

SEQ ID NO: 5665716 - DNA, 25 bp, Homo sapien
tgcatagtagtaaaggatgccttga

SEQ ID NO: 5665717 - DNA, 25 bp, Homo sapien
catgcaccgccgcaagttttcatat

SEQ ID NO: 5665718 - DNA, 25 bp, Homo sapien
accgccgcaagttttcatataagtt

SEQ ID NO: 5665719 - DNA, 25 bp, Homo sapien
ctaaggtctgcatagtagtaaagga

SEQ ID NO: 5665720 - DNA, 25 bp, Homo sapien
gcaccgccgcaagttttcatataag

SEQ ID NO: 5665721 - DNA, 25 bp, Homo sapien
tcctttactactatgcagaccttag

SEQ ID NO: 5665722 - DNA, 25 bp, Homo sapien
aacttatatgaaaacttgcggcggt

SEQ ID NO: 5665723 - DNA, 25 bp, Homo sapien
aaggcatcctttactactatgcaga

SEQ ID NO: 5665724 - DNA, 25 bp, Homo sapien
cttatatgaaaacttgcggcggtgc

SEQ ID NO: 5665725 - DNA, 25 bp, Homo sapien
tcaaggcatcctttactactatgca

SEQ ID NO: 5665726 - DNA, 25 bp, Homo sapien
ttatatgaaaacttgcggcggtgca

SEQ ID NO: 5665727 - DNA, 25 bp, Homo sapien
tagtatgtggcccttaaatgtcttt

SEQ ID NO: 5665728 - DNA, 25 bp, Homo sapien
ggctatgtaatgtgcatagtgctga

SEQ ID NO: 5665729 - DNA, 25 bp, Homo sapien
taatacgttgatagtatgtggccct

SEQ ID NO: 5665730 - DNA, 25 bp, Homo sapien
catagatgtatgtaatacgttgata

SEQ ID NO: 5665731 - DNA, 25 bp, Homo sapien
agtatgtggcccttaaatgtctttt

SEQ ID NO: 5665732 - DNA, 25 bp, Homo sapien
gctatgtaatgtgcatagtgctgat

SEQ ID NO: 5665733 - DNA, 25 bp, Homo sapien
tatcaacgtattacatacatctatg

SEQ ID NO: 5665734 - DNA, 25 bp, Homo sapien
tcagcactatgcacattacatagcc

SEQ ID NO: 5665735 - DNA, 25 bp, Homo sapien
agggccacatactatcaacgtatta

SEQ ID NO: 5665736 - DNA, 25 bp, Homo sapien
gggccacatactatcaacgtattac

SEQ ID NO: 5665737 - DNA, 25 bp, Homo sapien
aaagacatttaagggccacatacta

SEQ ID NO: 5665738 - DNA, 25 bp, Homo sapien
aaaagacatttaagggccacatact

SEQ ID NO: 5665739 - DNA, 25 bp, Homo sapien
tcatggctcactgtaacttctgcct

SEQ ID NO: 5665740 - DNA, 25 bp, Homo sapien
atggctcactgtaacttctgcctcc

SEQ ID NO: 5665741 - DNA, 25 bp, Homo sapien
cactgtaacttctgcctcccgggtt

SEQ ID NO: 5665742 - DNA, 25 bp, Homo sapien
tcactgtaacttctgcctcccgggt

SEQ ID NO: 5665743 - DNA, 25 bp, Homo sapien
ggctcactgtaacttctgcctcccg

SEQ ID NO: 5665744 - DNA, 25 bp, Homo sapien
catggctcactgtaacttctgcctc

SEQ ID NO: 5665745 - DNA, 25 bp, Homo sapien
cgggaggcagaagttacagtgagcc

SEQ ID NO: 5665746 - DNA, 25 bp, Homo sapien
acccgggaggcagaagttacagtga

SEQ ID NO: 5665747 - DNA, 25 bp, Homo sapien
ggaggcagaagttacagtgagccat

SEQ ID NO: 5665748 - DNA, 25 bp, Homo sapien
gaggcagaagttacagtgagccatg

SEQ ID NO: 5665749 - DNA, 25 bp, Homo sapien
aggcagaagttacagtgagccatga

SEQ ID NO: 5665750 - DNA, 25 bp, Homo sapien
aacccgggaggcagaagttacagtg

SEQ ID NO: 5665751 - DNA, 25 bp, Homo sapien
cacaccctgccagtaaagctgtttt

SEQ ID NO: 5665752 - DNA, 25 bp, Homo sapien
accacaccctgccagtaaagctgtt

SEQ ID NO: 5665753 - DNA, 25 bp, Homo sapien
ctgccagtaaagctgttttgatagt

SEQ ID NO: 5665754 - DNA, 25 bp, Homo sapien
ccctgccagtaaagctgttttgata

SEQ ID NO: 5665755 - DNA, 25 bp, Homo sapien
acaccctgccagtaaagctgttttg

SEQ ID NO: 5665756 - DNA, 25 bp, Homo sapien
caccctgccagtaaagctgttttga

SEQ ID NO: 5665757 - DNA, 25 bp, Homo sapien
aaaacagctttactggcagggtgtg

SEQ ID NO: 5665758 - DNA, 25 bp, Homo sapien
aacagctttactggcagggtgtggt

SEQ ID NO: 5665759 - DNA, 25 bp, Homo sapien
tcaaaacagctttactggcagggtg

SEQ ID NO: 5665760 - DNA, 25 bp, Homo sapien
actatcaaaacagctttactggcag

SEQ ID NO: 5665761 - DNA, 25 bp, Homo sapien
caaaacagctttactggcagggtgt

SEQ ID NO: 5665762 - DNA, 25 bp, Homo sapien
tatcaaaacagctttactggcaggg

SEQ ID NO: 5665763 - DNA, 25 bp, Homo sapien
ttgtttctagcacaggggaggcacc

SEQ ID NO: 5665764 - DNA, 25 bp, Homo sapien
tcttgtttctagcacaggggaggca

SEQ ID NO: 5665765 - DNA, 25 bp, Homo sapien
gccagaaacttgtactgacaaaatc

SEQ ID NO: 5665766 - DNA, 25 bp, Homo sapien
ccagaaacttgtactgacaaaatca

SEQ ID NO: 5665767 - DNA, 25 bp, Homo sapien
atcttgtttctagcacaggggaggc

SEQ ID NO: 5665768 - DNA, 25 bp, Homo sapien
cagaaacttgtactgacaaaatcac

SEQ ID NO: 5665769 - DNA, 25 bp, Homo sapien
ggtgcctcccctgtgctagaaacaa

SEQ ID NO: 5665770 - DNA, 25 bp, Homo sapien
tgcctcccctgtgctagaaacaaga

SEQ ID NO: 5665771 - DNA, 25 bp, Homo sapien
gtgattttgtcagtacaagtttctg

SEQ ID NO: 5665772 - DNA, 25 bp, Homo sapien
gcctcccctgtgctagaaacaagat

SEQ ID NO: 5665773 - DNA, 25 bp, Homo sapien
gtgcctcccctgtgctagaaacaag

SEQ ID NO: 5665774 - DNA, 25 bp, Homo sapien
gattttgtcagtacaagtttctggc

SEQ ID NO: 5665775 - DNA, 25 bp, Homo sapien
gagaccagtacgttcagttgttgaa

SEQ ID NO: 5665776 - DNA, 25 bp, Homo sapien
cgtgaaccccttggtatttgctaat

SEQ ID NO: 5665777 - DNA, 25 bp, Homo sapien
ggatttagagaccagtacgttcagt

SEQ ID NO: 5665778 - DNA, 25 bp, Homo sapien
gaaccccttggtatttgctaataga

SEQ ID NO: 5665779 - DNA, 25 bp, Homo sapien
gaagttgctgtattgggatttagag

SEQ ID NO: 5665780 - DNA, 25 bp, Homo sapien
tcagttgttgaattaaacgtgaacc

SEQ ID NO: 5665781 - DNA, 25 bp, Homo sapien
tctattagcaaataccaaggggttc

SEQ ID NO: 5665782 - DNA, 25 bp, Homo sapien
ttcaacaactgaacgtactggtctc

SEQ ID NO: 5665783 - DNA, 25 bp, Homo sapien
caacaactgaacgtactggtctcta

SEQ ID NO: 5665784 - DNA, 25 bp, Homo sapien
gtctctaaatcccaatacagcaact

SEQ ID NO: 5665785 - DNA, 25 bp, Homo sapien
ggttcacgtttaattcaacaactga

SEQ ID NO: 5665786 - DNA, 25 bp, Homo sapien
actgaacgtactggtctctaaatcc

SEQ ID NO: 5665787 - DNA, 25 bp, Homo sapien
gtctctgctaacatacagctgggtg

SEQ ID NO: 5665788 - DNA, 25 bp, Homo sapien
cgtctctgctaacatacagctgggt

SEQ ID NO: 5665789 - DNA, 25 bp, Homo sapien
tctctgctaacatacagctgggtgt

SEQ ID NO: 5665790 - DNA, 25 bp, Homo sapien
acacccagctgtatgttagcagaga

SEQ ID NO: 5665791 - DNA, 25 bp, Homo sapien
cacccagctgtatgttagcagagac

SEQ ID NO: 5665792 - DNA, 25 bp, Homo sapien
acccagctgtatgttagcagagacg

SEQ ID NO: 5665793 - DNA, 25 bp, Homo sapien
tgggtggtcgatgcgggcagatcac

SEQ ID NO: 5665794 - DNA, 25 bp, Homo sapien
gtctctgctaacatacagctgggtg

SEQ ID NO: 5665795 - DNA, 25 bp, Homo sapien
tctgctaacatacagctgggtgtga

SEQ ID NO: 5665796 - DNA, 25 bp, Homo sapien
cgtctctgctaacatacagctgggt

SEQ ID NO: 5665797 - DNA, 25 bp, Homo sapien
ctctgctaacatacagctgggtgtg

SEQ ID NO: 5665798 - DNA, 25 bp, Homo sapien
tctctgctaacatacagctgggtgt

SEQ ID NO: 5665799 - DNA, 25 bp, Homo sapien
gtgatctgcccgcatcgaccaccca

SEQ ID NO: 5665800 - DNA, 25 bp, Homo sapien
tcacacccagctgtatgttagcaga

SEQ ID NO: 5665801 - DNA, 25 bp, Homo sapien
acacccagctgtatgttagcagaga

SEQ ID NO: 5665802 - DNA, 25 bp, Homo sapien
cacccagctgtatgttagcagagac

SEQ ID NO: 5665803 - DNA, 25 bp, Homo sapien
acccagctgtatgttagcagagacg

SEQ ID NO: 5665804 - DNA, 25 bp, Homo sapien
cacacccagctgtatgttagcagag

SEQ ID NO: 5665805 - DNA, 25 bp, Homo sapien
tcctgtccctcatattttgcacgaa

SEQ ID NO: 5665806 - DNA, 25 bp, Homo sapien
tgtccctcatattttgcacgaatgg

SEQ ID NO: 5665807 - DNA, 25 bp, Homo sapien
tggacttctgtgactgttttcttag

SEQ ID NO: 5665808 - DNA, 25 bp, Homo sapien
catattttgcacgaatggacttctg

SEQ ID NO: 5665809 - DNA, 25 bp, Homo sapien
tctgtgactgttttcttagcacagt

SEQ ID NO: 5665810 - DNA, 25 bp, Homo sapien
tgcacgaatggacttctgtgactgt

SEQ ID NO: 5665811 - DNA, 25 bp, Homo sapien
ccattcgtgcaaaatatgagggaca

SEQ ID NO: 5665812 - DNA, 25 bp, Homo sapien
actgtgctaagaaaacagtcacaga

SEQ ID NO: 5665813 - DNA, 25 bp, Homo sapien
taagaaaacagtcacagaagtccat

SEQ ID NO: 5665814 - DNA, 25 bp, Homo sapien
gaagtccattcgtgcaaaatatgag

SEQ ID NO: 5665815 - DNA, 25 bp, Homo sapien
cagtcacagaagtccattcgtgcaa

SEQ ID NO: 5665816 - DNA, 25 bp, Homo sapien
tcgtgcaaaatatgagggacaggaa

SEQ ID NO: 5665817 - DNA, 25 bp, Homo sapien
atttatatggttgaatacattgtat

SEQ ID NO: 5665818 - DNA, 25 bp, Homo sapien
tatttatatggttgaatacattgta

SEQ ID NO: 5665819 - DNA, 25 bp, Homo sapien
tacaatgtattcaaccatataaata

SEQ ID NO: 5665820 - DNA, 25 bp, Homo sapien
atacaatgtattcaaccatataaat

SEQ ID NO: 5665821 - DNA, 25 bp, Homo sapien
cagttggtgagcatttgagttgctt

SEQ ID NO: 5665822 - DNA, 25 bp, Homo sapien
tatgggtatgtttggttattcatca

SEQ ID NO: 5665823 - DNA, 25 bp, Homo sapien
gagttgcttctacttgttgactgct

SEQ ID NO: 5665824 - DNA, 25 bp, Homo sapien
tcagtactccatttatttatatggt

SEQ ID NO: 5665825 - DNA, 25 bp, Homo sapien
tatatggttgaatacattgtatggg

SEQ ID NO: 5665826 - DNA, 25 bp, Homo sapien
tttggttattcatcagttggtgagc

SEQ ID NO: 5665827 - DNA, 25 bp, Homo sapien
agcagtcaacaagtagaagcaactc

SEQ ID NO: 5665828 - DNA, 25 bp, Homo sapien
gaataaccaaacatacccatacaat

SEQ ID NO: 5665829 - DNA, 25 bp, Homo sapien
accatataaataaatggagtactga

SEQ ID NO: 5665830 - DNA, 25 bp, Homo sapien
gctcaccaactgatgaataaccaaa

SEQ ID NO: 5665831 - DNA, 25 bp, Homo sapien
gaagcaactcaaatgctcaccaact

SEQ ID NO: 5665832 - DNA, 25 bp, Homo sapien
ccatacaatgtattcaaccatataa

SEQ ID NO: 5665833 - DNA, 25 bp, Homo sapien
gtcattttacttggatgtacaccta

SEQ ID NO: 5665834 - DNA, 25 bp, Homo sapien
gagtggctcacccattgtattccca

SEQ ID NO: 5665835 - DNA, 25 bp, Homo sapien
ggctcacccattgtattcccactag

SEQ ID NO: 5665836 - DNA, 25 bp, Homo sapien
tacttggatgtacacctaaagcaga

SEQ ID NO: 5665837 - DNA, 25 bp, Homo sapien
ggatgtacacctaaagcagagtggc

SEQ ID NO: 5665838 - DNA, 25 bp, Homo sapien
tacacctaaagcagagtggctcacc

SEQ ID NO: 5665839 - DNA, 25 bp, Homo sapien
ctagtgggaatacaatgggtgagcc

SEQ ID NO: 5665840 - DNA, 25 bp, Homo sapien
tgggaatacaatgggtgagccactc

SEQ ID NO: 5665841 - DNA, 25 bp, Homo sapien
gggtgagccactctgctttaggtgt

SEQ ID NO: 5665842 - DNA, 25 bp, Homo sapien
taggtgtacatccaagtaaaatgac

SEQ ID NO: 5665843 - DNA, 25 bp, Homo sapien
cactctgctttaggtgtacatccaa

SEQ ID NO: 5665844 - DNA, 25 bp, Homo sapien
gagccactctgctttaggtgtacat

SEQ ID NO: 5665845 - DNA, 25 bp, Homo sapien
tgtgggtttgattgcgtctccctgt

SEQ ID NO: 5665846 - DNA, 25 bp, Homo sapien
aatcctggtggtatgaagtgctgat

SEQ ID NO: 5665847 - DNA, 25 bp, Homo sapien
gattgtgggtttgattgcgtctccc

SEQ ID NO: 5665848 - DNA, 25 bp, Homo sapien
tctaatcctggtggtatgaagtgct

SEQ ID NO: 5665849 - DNA, 25 bp, Homo sapien
ttgccattatctgactctaatcctg

SEQ ID NO: 5665850 - DNA, 25 bp, Homo sapien
tgctgattgtgggtttgattgcgtc

SEQ ID NO: 5665851 - DNA, 25 bp, Homo sapien
caggattagagtcagataatggcaa

SEQ ID NO: 5665852 - DNA, 25 bp, Homo sapien
tcagcacttcataccaccaggatta

SEQ ID NO: 5665853 - DNA, 25 bp, Homo sapien
cagataatggcaagtgagggtgtag

SEQ ID NO: 5665854 - DNA, 25 bp, Homo sapien
acagggagacgcaatcaaacccaca

SEQ ID NO: 5665855 - DNA, 25 bp, Homo sapien
gcacttcataccaccaggattagag

SEQ ID NO: 5665856 - DNA, 25 bp, Homo sapien
gacgcaatcaaacccacaatcagca

SEQ ID NO: 5665857 - DNA, 25 bp, Homo sapien
aatgtttttgcccacttaaatccat

SEQ ID NO: 5665858 - DNA, 25 bp, Homo sapien
tggagaaatgtttttgcccacttaa

SEQ ID NO: 5665859 - DNA, 25 bp, Homo sapien
cattggccatatatctttggagaaa

SEQ ID NO: 5665860 - DNA, 25 bp, Homo sapien
ttcatgtattcattggccatatatc

SEQ ID NO: 5665861 - DNA, 25 bp, Homo sapien
catttacttctctttgtctttacta

SEQ ID NO: 5665862 - DNA, 25 bp, Homo sapien
taaatccatttacttctctttgtct

SEQ ID NO: 5665863 - DNA, 25 bp, Homo sapien
gaagtaaatggatttaagtgggcaa

SEQ ID NO: 5665864 - DNA, 25 bp, Homo sapien
catttctccaaagatatatggccaa

SEQ ID NO: 5665865 - DNA, 25 bp, Homo sapien
ttaagtgggcaaaaacatttctcca

SEQ ID NO: 5665866 - DNA, 25 bp, Homo sapien
gatatatggccaatgaatacatgaa

SEQ ID NO: 5665867 - DNA, 25 bp, Homo sapien
tagtaaagacaaagagaagtaaatg

SEQ ID NO: 5665868 - DNA, 25 bp, Homo sapien
tctccaaagatatatggccaatgaa

SEQ ID NO: 5665869 - DNA, 25 bp, Homo sapien
tttgacaagtctctgttgcccaggc

SEQ ID NO: 5665870 - DNA, 25 bp, Homo sapien
ttttgacaagtctctgttgcccagg

SEQ ID NO: 5665871 - DNA, 25 bp, Homo sapien
tttttttgacaagtctctgttgccc

SEQ ID NO: 5665872 - DNA, 25 bp, Homo sapien
tgtgcctggcaagaattcttttttt

SEQ ID NO: 5665873 - DNA, 25 bp, Homo sapien
tttttgacaagtctctgttgcccag

SEQ ID NO: 5665874 - DNA, 25 bp, Homo sapien
ctgtgcctggcaagaattctttttt

SEQ ID NO: 5665875 - DNA, 25 bp, Homo sapien
ctgggcaacagagacttgtcaaaaa

SEQ ID NO: 5665876 - DNA, 25 bp, Homo sapien
gggcaacagagacttgtcaaaaaaa

SEQ ID NO: 5665877 - DNA, 25 bp, Homo sapien
aaaaaagaattcttgccaggcacag

SEQ ID NO: 5665878 - DNA, 25 bp, Homo sapien
cctgggcaacagagacttgtcaaaa

SEQ ID NO: 5665879 - DNA, 25 bp, Homo sapien
gcctgggcaacagagacttgtcaaa

SEQ ID NO: 5665880 - DNA, 25 bp, Homo sapien
aaaaaaagaattcttgccaggcaca

SEQ ID NO: 5665881 - DNA, 25 bp, Homo sapien
tattctgcaaacaagtcccttatca

SEQ ID NO: 5665882 - DNA, 25 bp, Homo sapien
gtattctgcaaacaagtcccttatc

SEQ ID NO: 5665883 - DNA, 25 bp, Homo sapien
tgataagggacttgtttgcagaata

SEQ ID NO: 5665884 - DNA, 25 bp, Homo sapien
gataagggacttgtttgcagaatac

SEQ ID NO: 5665885 - DNA, 25 bp, Homo sapien
aacaagtcccttatcagacacaaga

SEQ ID NO: 5665886 - DNA, 25 bp, Homo sapien
agccactgcactgggcccaagaatt

SEQ ID NO: 5665887 - DNA, 25 bp, Homo sapien
gcactgggcccaagaattctttatg

SEQ ID NO: 5665888 - DNA, 25 bp, Homo sapien
tttatgtattctgcaaacaagtccc

SEQ ID NO: 5665889 - DNA, 25 bp, Homo sapien
gggcccaagaattctttatgtattc

SEQ ID NO: 5665890 - DNA, 25 bp, Homo sapien
gtattctgcaaacaagtcccttatc

SEQ ID NO: 5665891 - DNA, 25 bp, Homo sapien
gataagggacttgtttgcagaatac

SEQ ID NO: 5665892 - DNA, 25 bp, Homo sapien
aattcttgggcccagtgcagtggct

SEQ ID NO: 5665893 - DNA, 25 bp, Homo sapien
taaagaattcttgggcccagtgcag

SEQ ID NO: 5665894 - DNA, 25 bp, Homo sapien
tcttgtgtctgataagggacttgtt

SEQ ID NO: 5665895 - DNA, 25 bp, Homo sapien
gaatacataaagaattcttgggccc

SEQ ID NO: 5665896 - DNA, 25 bp, Homo sapien
tgcagaatacataaagaattcttgg

SEQ ID NO: 5665897 - DNA, 25 bp, Homo sapien
tatggtgtgaatggaggggtctaaa

SEQ ID NO: 5665898 - DNA, 25 bp, Homo sapien
tgttccattttgagtaaacttatgt

SEQ ID NO: 5665899 - DNA, 25 bp, Homo sapien
ttgttccattttgagtaaacttatg

SEQ ID NO: 5665900 - DNA, 25 bp, Homo sapien
gttccattttgagtaaacttatgtg

SEQ ID NO: 5665901 - DNA, 25 bp, Homo sapien
tgtgtatggtgtgaatggaggggtc

SEQ ID NO: 5665902 - DNA, 25 bp, Homo sapien
gtatggtgtgaatggaggggtctaa

SEQ ID NO: 5665903 - DNA, 25 bp, Homo sapien
tttagacccctccattcacaccata

SEQ ID NO: 5665904 - DNA, 25 bp, Homo sapien
acataagtttactcaaaatggaaca

SEQ ID NO: 5665905 - DNA, 25 bp, Homo sapien
cccctccattcacaccatacacata

SEQ ID NO: 5665906 - DNA, 25 bp, Homo sapien
cataagtttactcaaaatggaacaa

SEQ ID NO: 5665907 - DNA, 25 bp, Homo sapien
ttagacccctccattcacaccatac

SEQ ID NO: 5665908 - DNA, 25 bp, Homo sapien
cacataagtttactcaaaatggaac

SEQ ID NO: 5665909 - DNA, 25 bp, Homo sapien
aacttatgtgtatggtgtgaatgga

SEQ ID NO: 5665910 - DNA, 25 bp, Homo sapien
ctgagttttgtcctttatatttagg

SEQ ID NO: 5665911 - DNA, 25 bp, Homo sapien
tgcccccttaattctgagttttgtc

SEQ ID NO: 5665912 - DNA, 25 bp, Homo sapien
gttccattttgagtaaacttatgtg

SEQ ID NO: 5665913 - DNA, 25 bp, Homo sapien
tatttagggctttgttccattttga

SEQ ID NO: 5665914 - DNA, 25 bp, Homo sapien
tagggctttgttccattttgagtaa

SEQ ID NO: 5665915 - DNA, 25 bp, Homo sapien
tttagacccctccattcacaccata

SEQ ID NO: 5665916 - DNA, 25 bp, Homo sapien
cctaaatataaaggacaaaactcag

SEQ ID NO: 5665917 - DNA, 25 bp, Homo sapien
gacaaaactcagaattaagggggca

SEQ ID NO: 5665918 - DNA, 25 bp, Homo sapien
tccattcacaccatacacataagtt

SEQ ID NO: 5665919 - DNA, 25 bp, Homo sapien
caaaatggaacaaagccctaaatat

SEQ ID NO: 5665920 - DNA, 25 bp, Homo sapien
cacataagtttactcaaaatggaac

SEQ ID NO: 5665921 - DNA, 25 bp, Homo sapien
tcatgaccaggagattgagactatc

SEQ ID NO: 5665922 - DNA, 25 bp, Homo sapien
tgaccaggagattgagactatcctg

SEQ ID NO: 5665923 - DNA, 25 bp, Homo sapien
tgagactatcctggccaatttggtg

SEQ ID NO: 5665924 - DNA, 25 bp, Homo sapien
atgaccaggagattgagactatcct

SEQ ID NO: 5665925 - DNA, 25 bp, Homo sapien
catgaccaggagattgagactatcc

SEQ ID NO: 5665926 - DNA, 25 bp, Homo sapien
atcatgaccaggagattgagactat

SEQ ID NO: 5665927 - DNA, 25 bp, Homo sapien
ggatagtctcaatctcctggtcatg

SEQ ID NO: 5665928 - DNA, 25 bp, Homo sapien
caccaaattggccaggatagtctca

SEQ ID NO: 5665929 - DNA, 25 bp, Homo sapien
gatagtctcaatctcctggtcatga

SEQ ID NO: 5665930 - DNA, 25 bp, Homo sapien
atagtctcaatctcctggtcatgat

SEQ ID NO: 5665931 - DNA, 25 bp, Homo sapien
aggatagtctcaatctcctggtcat

SEQ ID NO: 5665932 - DNA, 25 bp, Homo sapien
caggatagtctcaatctcctggtca

SEQ ID NO: 5665933 - DNA, 25 bp, Homo sapien
tgttctgttgatgtgtctatcctta

SEQ ID NO: 5665934 - DNA, 25 bp, Homo sapien
gtaagaacagtacaacactgttcct

SEQ ID NO: 5665935 - DNA, 25 bp, Homo sapien
tgtaagaacagtacaacactgttcc

SEQ ID NO: 5665936 - DNA, 25 bp, Homo sapien
gtgtctatccttaacatgtaagaac

SEQ ID NO: 5665937 - DNA, 25 bp, Homo sapien
tctgttgatgtgtctatccttaaca

SEQ ID NO: 5665938 - DNA, 25 bp, Homo sapien
tgatgtgtctatccttaacatgtaa

SEQ ID NO: 5665939 - DNA, 25 bp, Homo sapien
ggaacagtgttgtactgttcttaca

SEQ ID NO: 5665940 - DNA, 25 bp, Homo sapien
tgttaaggatagacacatcaacaga

SEQ ID NO: 5665941 - DNA, 25 bp, Homo sapien
gttcttacatgttaaggatagacac

SEQ ID NO: 5665942 - DNA, 25 bp, Homo sapien
catgttaaggatagacacatcaaca

SEQ ID NO: 5665943 - DNA, 25 bp, Homo sapien
ttacatgttaaggatagacacatca

SEQ ID NO: 5665944 - DNA, 25 bp, Homo sapien
taaggatagacacatcaacagaaca

SEQ ID NO: 5665945 - DNA, 25 bp, Homo sapien
agtggcagaattacacagttacagt

SEQ ID NO: 5665946 - DNA, 25 bp, Homo sapien
ccttagcttttcaaatagctaggac

SEQ ID NO: 5665947 - DNA, 25 bp, Homo sapien
tcactgtctcaagcagatcctcctg

SEQ ID NO: 5665948 - DNA, 25 bp, Homo sapien
tacagttcactgtctcaagcagatc

SEQ ID NO: 5665949 - DNA, 25 bp, Homo sapien
tcctgccttagcttttcaaatagct

SEQ ID NO: 5665950 - DNA, 25 bp, Homo sapien
gcagaattacacagttacagttcac

SEQ ID NO: 5665951 - DNA, 25 bp, Homo sapien
gaactgtaactgtgtaattctgcca

SEQ ID NO: 5665952 - DNA, 25 bp, Homo sapien
caggaggatctgcttgagacagtga

SEQ ID NO: 5665953 - DNA, 25 bp, Homo sapien
gctatttgaaaagctaaggcaggag

SEQ ID NO: 5665954 - DNA, 25 bp, Homo sapien
cctagctatttgaaaagctaaggca

SEQ ID NO: 5665955 - DNA, 25 bp, Homo sapien
gaggatctgcttgagacagtgaact

SEQ ID NO: 5665956 - DNA, 25 bp, Homo sapien
tctgcttgagacagtgaactgtaac

SEQ ID NO: 5665957 - DNA, 25 bp, Homo sapien
gtcttgaactaaaacgatcctccca

SEQ ID NO: 5665958 - DNA, 25 bp, Homo sapien
tgggaggatcgttttagttcaagac

SEQ ID NO: 5665959 - DNA, 25 bp, Homo sapien
gtcttgaactaaaacgatcctccca

SEQ ID NO: 5665960 - DNA, 25 bp, Homo sapien
ctggtcttgaactaaaacgatcctc

SEQ ID NO: 5665961 - DNA, 25 bp, Homo sapien
tttgtagagagggttctcattatgt

SEQ ID NO: 5665962 - DNA, 25 bp, Homo sapien
gctggtcttgaactaaaacgatcct

SEQ ID NO: 5665963 - DNA, 25 bp, Homo sapien
tcttgaactaaaacgatcctcccac

SEQ ID NO: 5665964 - DNA, 25 bp, Homo sapien
tagagagggttctcattatgttgcc

SEQ ID NO: 5665965 - DNA, 25 bp, Homo sapien
tgggaggatcgttttagttcaagac

SEQ ID NO: 5665966 - DNA, 25 bp, Homo sapien
gaggatcgttttagttcaagaccag

SEQ ID NO: 5665967 - DNA, 25 bp, Homo sapien
gtgggaggatcgttttagttcaaga

SEQ ID NO: 5665968 - DNA, 25 bp, Homo sapien
aggatcgttttagttcaagaccagc

SEQ ID NO: 5665969 - DNA, 25 bp, Homo sapien
acataatgagaaccctctctacaaa

SEQ ID NO: 5665970 - DNA, 25 bp, Homo sapien
ggcaacataatgagaaccctctcta

SEQ ID NO: 5665971 - DNA, 25 bp, Homo sapien
agagaaaccagcttggggagtcttc

SEQ ID NO: 5665972 - DNA, 25 bp, Homo sapien
agaaaccagcttggggagtcttcta

SEQ ID NO: 5665973 - DNA, 25 bp, Homo sapien
ttttaggatctgtttctacagagaa

SEQ ID NO: 5665974 - DNA, 25 bp, Homo sapien
cagagaaaccagcttggggagtctt

SEQ ID NO: 5665975 - DNA, 25 bp, Homo sapien
gagaaaccagcttggggagtcttct

SEQ ID NO: 5665976 - DNA, 25 bp, Homo sapien
agaagactccccaagctggtttctc

SEQ ID NO: 5665977 - DNA, 25 bp, Homo sapien
ttctctgtagaaacagatcctaaaa

SEQ ID NO: 5665978 - DNA, 25 bp, Homo sapien
tagaagactccccaagctggtttct

SEQ ID NO: 5665979 - DNA, 25 bp, Homo sapien
aagactccccaagctggtttctctg

SEQ ID NO: 5665980 - DNA, 25 bp, Homo sapien
gaagactccccaagctggtttctct

SEQ ID NO: 5665981 - DNA, 25 bp, Homo sapien
gtttctacagagaaaccagcttggg

SEQ ID NO: 5665982 - DNA, 25 bp, Homo sapien
taggtgtgagacactgtgccagttc

SEQ ID NO: 5665983 - DNA, 25 bp, Homo sapien
taaattttaggatctgtttctacag

SEQ ID NO: 5665984 - DNA, 25 bp, Homo sapien
gtgccagttcttgggtttgtttata

SEQ ID NO: 5665985 - DNA, 25 bp, Homo sapien
ttttaggatctgtttctacagagaa

SEQ ID NO: 5665986 - DNA, 25 bp, Homo sapien
gagaaaccagcttggggagtcttct

SEQ ID NO: 5665987 - DNA, 25 bp, Homo sapien
tggaatgtttctatttaggtcttta

SEQ ID NO: 5665988 - DNA, 25 bp, Homo sapien
acatggaatgtttctatttaggtct

SEQ ID NO: 5665989 - DNA, 25 bp, Homo sapien
tgtatattcggggagtgtttccatc

SEQ ID NO: 5665990 - DNA, 25 bp, Homo sapien
aacatggaatgtttctatttaggtc

SEQ ID NO: 5665991 - DNA, 25 bp, Homo sapien
catggaatgtttctatttaggtctt

SEQ ID NO: 5665992 - DNA, 25 bp, Homo sapien
atattcggggagtgtttccatcttg

SEQ ID NO: 5665993 - DNA, 25 bp, Homo sapien
taaagacctaaatagaaacattcca

SEQ ID NO: 5665994 - DNA, 25 bp, Homo sapien
caagatggaaacactccccgaatat

SEQ ID NO: 5665995 - DNA, 25 bp, Homo sapien
gatggaaacactccccgaatataca

SEQ ID NO: 5665996 - DNA, 25 bp, Homo sapien
aagacctaaatagaaacattccatg

SEQ ID NO: 5665997 - DNA, 25 bp, Homo sapien
gacctaaatagaaacattccatgtt

SEQ ID NO: 5665998 - DNA, 25 bp, Homo sapien
agatggaaacactccccgaatatac

SEQ ID NO: 5665999 - DNA, 25 bp, Homo sapien
catacattatacagtggtatagtgt

SEQ ID NO: 5666000 - DNA, 25 bp, Homo sapien
tacatacattatacagtggtatagt

SEQ ID NO: 5666001 - DNA, 25 bp, Homo sapien
cattatacagtggtatagtgtgtat

SEQ ID NO: 5666002 - DNA, 25 bp, Homo sapien
ttatacagtggtatagtgtgtattt

SEQ ID NO: 5666003 - DNA, 25 bp, Homo sapien
tacattacttaaatatacatacatt

SEQ ID NO: 5666004 - DNA, 25 bp, Homo sapien
gtttaatagaactatacattactta

SEQ ID NO: 5666005 - DNA, 25 bp, Homo sapien
aaatacacactataccactgtataa

SEQ ID NO: 5666006 - DNA, 25 bp, Homo sapien
tatttaagtaatgtatagttctatt

SEQ ID NO: 5666007 - DNA, 25 bp, Homo sapien
cacactataccactgtataatgtat

SEQ ID NO: 5666008 - DNA, 25 bp, Homo sapien
cactataccactgtataatgtatgt

SEQ ID NO: 5666009 - DNA, 25 bp, Homo sapien
tacacactataccactgtataatgt

SEQ ID NO: 5666010 - DNA, 25 bp, Homo sapien
taagtaatgtatagttctattaaac

SEQ ID NO: 5666011 - DNA, 25 bp, Homo sapien
tatttatgcaaaactactcattgag

SEQ ID NO: 5666012 - DNA, 25 bp, Homo sapien
cagtggtatagtgtgtatttatgca

SEQ ID NO: 5666013 - DNA, 25 bp, Homo sapien
gcaaaactactcattgagcaacttc

SEQ ID NO: 5666014 - DNA, 25 bp, Homo sapien
tgcaaaactactcattgagcaactt

SEQ ID NO: 5666015 - DNA, 25 bp, Homo sapien
tatgcaaaactactcattgagcaac

SEQ ID NO: 5666016 - DNA, 25 bp, Homo sapien
tttatgcaaaactactcattgagca

SEQ ID NO: 5666017 - DNA, 25 bp, Homo sapien
tgctcaatgagtagttttgcataaa

SEQ ID NO: 5666018 - DNA, 25 bp, Homo sapien
gttgctcaatgagtagttttgcata

SEQ ID NO: 5666019 - DNA, 25 bp, Homo sapien
gcataaatacacactataccactgt

SEQ ID NO: 5666020 - DNA, 25 bp, Homo sapien
tagttctattaaactgtacactcag

SEQ ID NO: 5666021 - DNA, 25 bp, Homo sapien
gctcaatgagtagttttgcataaat

SEQ ID NO: 5666022 - DNA, 25 bp, Homo sapien
gaagttgctcaatgagtagttttgc

SEQ ID NO: 5666023 - DNA, 25 bp, Homo sapien
gtcatgtagcatgcaagaggatttt

SEQ ID NO: 5666024 - DNA, 25 bp, Homo sapien
aaaatcctcttgcatgctacatgac

SEQ ID NO: 5666025 - DNA, 25 bp, Homo sapien
catgtagcatgcaagaggattttca

SEQ ID NO: 5666026 - DNA, 25 bp, Homo sapien
gtcatgtagcatgcaagaggatttt

SEQ ID NO: 5666027 - DNA, 25 bp, Homo sapien
ctttcacctcttggctgttgtgaac

SEQ ID NO: 5666028 - DNA, 25 bp, Homo sapien
caagaggattttcattgtgtgtaca

SEQ ID NO: 5666029 - DNA, 25 bp, Homo sapien
tttagtcatttaacacttgggttgc

SEQ ID NO: 5666030 - DNA, 25 bp, Homo sapien
catttaacacttgggttgctttcac

SEQ ID NO: 5666031 - DNA, 25 bp, Homo sapien
tatatgtacacacaatgaaaatcct

SEQ ID NO: 5666032 - DNA, 25 bp, Homo sapien
gcaacccaagtgttaaatgactaaa

SEQ ID NO: 5666033 - DNA, 25 bp, Homo sapien
caatgaaaatcctcttgcatgctac

SEQ ID NO: 5666034 - DNA, 25 bp, Homo sapien
aaaatcctcttgcatgctacatgac

SEQ ID NO: 5666035 - DNA, 25 bp, Homo sapien
gaggtgaaagcaacccaagtgttaa

SEQ ID NO: 5666036 - DNA, 25 bp, Homo sapien
gttcacaacagccaagaggtgaaag

SEQ ID NO: 5666037 - DNA, 25 bp, Homo sapien
tgtctactcccaaattttgaaagtg

SEQ ID NO: 5666038 - DNA, 25 bp, Homo sapien
ctactcccaaattttgaaagtgctt

SEQ ID NO: 5666039 - DNA, 25 bp, Homo sapien
gggtgcacaaataatcacttcaagg

SEQ ID NO: 5666040 - DNA, 25 bp, Homo sapien
tgcacaaataatcacttcaaggtcc

SEQ ID NO: 5666041 - DNA, 25 bp, Homo sapien
aaacatgggtgcacaaataatcact

SEQ ID NO: 5666042 - DNA, 25 bp, Homo sapien
caaataatcacttcaaggtcctgct

SEQ ID NO: 5666043 - DNA, 25 bp, Homo sapien
aagcactttcaaaatttgggagtag

SEQ ID NO: 5666044 - DNA, 25 bp, Homo sapien
ggaccttgaagtgattatttgtgca

SEQ ID NO: 5666045 - DNA, 25 bp, Homo sapien
ccttgaagtgattatttgtgcaccc

SEQ ID NO: 5666046 - DNA, 25 bp, Homo sapien
agcaggaccttgaagtgattatttg

SEQ ID NO: 5666047 - DNA, 25 bp, Homo sapien
gaagtgattatttgtgcacccatgt

SEQ ID NO: 5666048 - DNA, 25 bp, Homo sapien
cactttcaaaatttgggagtagaca

SEQ ID NO: 5666049 - DNA, 25 bp, Homo sapien
gaagaaagtgagtagatacaatgct

SEQ ID NO: 5666050 - DNA, 25 bp, Homo sapien
tgaagaaagtgagtagatacaatgc

SEQ ID NO: 5666051 - DNA, 25 bp, Homo sapien
agcattgtatctactcactttcttc

SEQ ID NO: 5666052 - DNA, 25 bp, Homo sapien
gcattgtatctactcactttcttca

SEQ ID NO: 5666053 - DNA, 25 bp, Homo sapien
tgaagaaagtgagtagatacaatgc

SEQ ID NO: 5666054 - DNA, 25 bp, Homo sapien
ttcatttgtagtgatgatgatgatg

SEQ ID NO: 5666055 - DNA, 25 bp, Homo sapien
gcgccagtgaagaaagtgagtagat

SEQ ID NO: 5666056 - DNA, 25 bp, Homo sapien
tagatacaatgctacaaggttgtta

SEQ ID NO: 5666057 - DNA, 25 bp, Homo sapien
gaagaaagtgagtagatacaatgct

SEQ ID NO: 5666058 - DNA, 25 bp, Homo sapien
gaaagtgagtagatacaatgctaca

SEQ ID NO: 5666059 - DNA, 25 bp, Homo sapien
agcattgtatctactcactttcttc

SEQ ID NO: 5666060 - DNA, 25 bp, Homo sapien
tatctactcactttcttcactggcg

SEQ ID NO: 5666061 - DNA, 25 bp, Homo sapien
catcatcatcatcactacaaatgaa

SEQ ID NO: 5666062 - DNA, 25 bp, Homo sapien
ccttgtagcattgtatctactcact

SEQ ID NO: 5666063 - DNA, 25 bp, Homo sapien
taacaaccttgtagcattgtatcta

SEQ ID NO: 5666064 - DNA, 25 bp, Homo sapien
gcattgtatctactcactttcttca

SEQ ID NO: 5666065 - DNA, 25 bp, Homo sapien
cttctgcctcccgggttgaagcgat

SEQ ID NO: 5666066 - DNA, 25 bp, Homo sapien
tgcctcccgggttgaagcgattctc

SEQ ID NO: 5666067 - DNA, 25 bp, Homo sapien
aacttctgcctcccgggttgaagcg

SEQ ID NO: 5666068 - DNA, 25 bp, Homo sapien
ctgagtagctggaattacagactca

SEQ ID NO: 5666069 - DNA, 25 bp, Homo sapien
acttctgcctcccgggttgaagcga

SEQ ID NO: 5666070 - DNA, 25 bp, Homo sapien
ttctgcctcccgggttgaagcgatt

SEQ ID NO: 5666071 - DNA, 25 bp, Homo sapien
atcgcttcaacccgggaggcagaag

SEQ ID NO: 5666072 - DNA, 25 bp, Homo sapien
cgcttcaacccgggaggcagaagtt

SEQ ID NO: 5666073 - DNA, 25 bp, Homo sapien
gagaatcgcttcaacccgggaggca

SEQ ID NO: 5666074 - DNA, 25 bp, Homo sapien
tgagtctgtaattccagctactcag

SEQ ID NO: 5666075 - DNA, 25 bp, Homo sapien
tcgcttcaacccgggaggcagaagt

SEQ ID NO: 5666076 - DNA, 25 bp, Homo sapien
aatcgcttcaacccgggaggcagaa

SEQ ID NO: 5666077 - DNA, 25 bp, Homo sapien
tttttagtagaccaccatgtcggcc

SEQ ID NO: 5666078 - DNA, 25 bp, Homo sapien
ttttagtagaccaccatgtcggcca

SEQ ID NO: 5666079 - DNA, 25 bp, Homo sapien
ggccgacatggtggtctactaaaaa

SEQ ID NO: 5666080 - DNA, 25 bp, Homo sapien
tggccgacatggtggtctactaaaa

SEQ ID NO: 5666081 - DNA, 25 bp, Homo sapien
tttttagtagaccaccatgtcggcc

SEQ ID NO: 5666082 - DNA, 25 bp, Homo sapien
agtagaccaccatgtcggccaggct

SEQ ID NO: 5666083 - DNA, 25 bp, Homo sapien
ttagtagaccaccatgtcggccagg

SEQ ID NO: 5666084 - DNA, 25 bp, Homo sapien
tagaccaccatgtcggccaggctgg

SEQ ID NO: 5666085 - DNA, 25 bp, Homo sapien
ttttagtagaccaccatgtcggcca

SEQ ID NO: 5666086 - DNA, 25 bp, Homo sapien
tttagtagaccaccatgtcggccag

SEQ ID NO: 5666087 - DNA, 25 bp, Homo sapien
ggccgacatggtggtctactaaaaa

SEQ ID NO: 5666088 - DNA, 25 bp, Homo sapien
gcctggccgacatggtggtctacta

SEQ ID NO: 5666089 - DNA, 25 bp, Homo sapien
ccagcctggccgacatggtggtcta

SEQ ID NO: 5666090 - DNA, 25 bp, Homo sapien
tggccgacatggtggtctactaaaa

SEQ ID NO: 5666091 - DNA, 25 bp, Homo sapien
cctggccgacatggtggtctactaa

SEQ ID NO: 5666092 - DNA, 25 bp, Homo sapien
cagcctggccgacatggtggtctac

SEQ ID NO: 5666093 - DNA, 25 bp, Homo sapien
aatttctaattgcagtctatacgag

SEQ ID NO: 5666094 - DNA, 25 bp, Homo sapien
tttctaattgcagtctatacgagat

SEQ ID NO: 5666095 - DNA, 25 bp, Homo sapien
aaatttctaattgcagtctatacga

SEQ ID NO: 5666096 - DNA, 25 bp, Homo sapien
ttgtttgcactgttgttggggtcag

SEQ ID NO: 5666097 - DNA, 25 bp, Homo sapien
agctttgtttgcactgttgttgggg

SEQ ID NO: 5666098 - DNA, 25 bp, Homo sapien
atttctaattgcagtctatacgaga

SEQ ID NO: 5666099 - DNA, 25 bp, Homo sapien
ccccaacaacagtgcaaacaaagct

SEQ ID NO: 5666100 - DNA, 25 bp, Homo sapien
atctcgtatagactgcaattagaaa

SEQ ID NO: 5666101 - DNA, 25 bp, Homo sapien
tcgtatagactgcaattagaaattt

SEQ ID NO: 5666102 - DNA, 25 bp, Homo sapien
gaccccaacaacagtgcaaacaaag

SEQ ID NO: 5666103 - DNA, 25 bp, Homo sapien
ctgaccccaacaacagtgcaaacaa

SEQ ID NO: 5666104 - DNA, 25 bp, Homo sapien
tgaccccaacaacagtgcaaacaaa

SEQ ID NO: 5666105 - DNA, 25 bp, Homo sapien
catggcttggacagctttgtttgca

SEQ ID NO: 5666106 - DNA, 25 bp, Homo sapien
cagctttgtttgcactgttgttggg

SEQ ID NO: 5666107 - DNA, 25 bp, Homo sapien
aatttctaattgcagtctatacgag

SEQ ID NO: 5666108 - DNA, 25 bp, Homo sapien
ctaattgcagtctatacgagatact

SEQ ID NO: 5666109 - DNA, 25 bp, Homo sapien
gggtcagggacagtgattaagataa

SEQ ID NO: 5666110 - DNA, 25 bp, Homo sapien
gtcttacatggcttggacagctttg

SEQ ID NO: 5666111 - DNA, 25 bp, Homo sapien
caaaagacatacaagtggccaaaaa

SEQ ID NO: 5666112 - DNA, 25 bp, Homo sapien
tttcaaaagacatacaagtggccaa

SEQ ID NO: 5666113 - DNA, 25 bp, Homo sapien
ttcaaaagacatacaagtggccaaa

SEQ ID NO: 5666114 - DNA, 25 bp, Homo sapien
tcaaaagacatacaagtggccaaaa

SEQ ID NO: 5666115 - DNA, 25 bp, Homo sapien
ttttcaaaagacatacaagtggcca

SEQ ID NO: 5666116 - DNA, 25 bp, Homo sapien
aaagacatacaagtggccaaaaagc

SEQ ID NO: 5666117 - DNA, 25 bp, Homo sapien
tttggccacttgtatgtcttttgaa

SEQ ID NO: 5666118 - DNA, 25 bp, Homo sapien
ttttggccacttgtatgtcttttga

SEQ ID NO: 5666119 - DNA, 25 bp, Homo sapien
gctttttggccacttgtatgtcttt

SEQ ID NO: 5666120 - DNA, 25 bp, Homo sapien
ttggccacttgtatgtcttttgaaa

SEQ ID NO: 5666121 - DNA, 25 bp, Homo sapien
tttttggccacttgtatgtcttttg

SEQ ID NO: 5666122 - DNA, 25 bp, Homo sapien
tggccacttgtatgtcttttgaaaa

SEQ ID NO: 5666123 - DNA, 25 bp, Homo sapien
ctcaaaaaacaacagctgctggcaa

SEQ ID NO: 5666124 - DNA, 25 bp, Homo sapien
actcaaaaaacaacagctgctggca

SEQ ID NO: 5666125 - DNA, 25 bp, Homo sapien
ttgccagcagctgttgttttttgag

SEQ ID NO: 5666126 - DNA, 25 bp, Homo sapien
tgccagcagctgttgttttttgagt

SEQ ID NO: 5666127 - DNA, 25 bp, Homo sapien
aaaaagggaatgcttacacactctt

SEQ ID NO: 5666128 - DNA, 25 bp, Homo sapien
aaaaaagggaatgcttacacactct

SEQ ID NO: 5666129 - DNA, 25 bp, Homo sapien
tgcttacacactcttggtgggagtg

SEQ ID NO: 5666130 - DNA, 25 bp, Homo sapien
gaaaaaagggaatgcttacacactc

SEQ ID NO: 5666131 - DNA, 25 bp, Homo sapien
aaaagggaatgcttacacactcttg

SEQ ID NO: 5666132 - DNA, 25 bp, Homo sapien
aatgcttacacactcttggtgggag

SEQ ID NO: 5666133 - DNA, 25 bp, Homo sapien
aagagtgtgtaagcattcccttttt

SEQ ID NO: 5666134 - DNA, 25 bp, Homo sapien
agagtgtgtaagcattccctttttt

SEQ ID NO: 5666135 - DNA, 25 bp, Homo sapien
cactcccaccaagagtgtgtaagca

SEQ ID NO: 5666136 - DNA, 25 bp, Homo sapien
ccaagagtgtgtaagcattcccttt

SEQ ID NO: 5666137 - DNA, 25 bp, Homo sapien
caagagtgtgtaagcattccctttt

SEQ ID NO: 5666138 - DNA, 25 bp, Homo sapien
gagtgtgtaagcattcccttttttc

SEQ ID NO: 5666139 - DNA, 25 bp, Homo sapien
caatcccattacattcccaaaggaa

SEQ ID NO: 5666140 - DNA, 25 bp, Homo sapien
cccattacattcccaaaggaatata

SEQ ID NO: 5666141 - DNA, 25 bp, Homo sapien
agcaatcccattacattcccaaagg

SEQ ID NO: 5666142 - DNA, 25 bp, Homo sapien
gcaatcccattacattcccaaagga

SEQ ID NO: 5666143 - DNA, 25 bp, Homo sapien
tcccattacattcccaaaggaatat

SEQ ID NO: 5666144 - DNA, 25 bp, Homo sapien
aatcccattacattcccaaaggaat

SEQ ID NO: 5666145 - DNA, 25 bp, Homo sapien
tcctttgggaatgtaatgggattgc

SEQ ID NO: 5666146 - DNA, 25 bp, Homo sapien
ttcctttgggaatgtaatgggattg

SEQ ID NO: 5666147 - DNA, 25 bp, Homo sapien
atattcctttgggaatgtaatggga

SEQ ID NO: 5666148 - DNA, 25 bp, Homo sapien
tattcctttgggaatgtaatgggat

SEQ ID NO: 5666149 - DNA, 25 bp, Homo sapien
tatattcctttgggaatgtaatggg

SEQ ID NO: 5666150 - DNA, 25 bp, Homo sapien
cctttgggaatgtaatgggattgct

SEQ ID NO: 5666151 - DNA, 25 bp, Homo sapien
cacaaagctgccatcgtcatcctgg

SEQ ID NO: 5666152 - DNA, 25 bp, Homo sapien
acaaagctgccatcgtcatcctggc

SEQ ID NO: 5666153 - DNA, 25 bp, Homo sapien
ctattccacaaagctgccatcgtca

SEQ ID NO: 5666154 - DNA, 25 bp, Homo sapien
tattccacaaagctgccatcgtcat

SEQ ID NO: 5666155 - DNA, 25 bp, Homo sapien
tctattccacaaagctgccatcgtc

SEQ ID NO: 5666156 - DNA, 25 bp, Homo sapien
aagctgccatcgtcatcctggcccg

SEQ ID NO: 5666157 - DNA, 25 bp, Homo sapien
atgacgatggcagctttgtggaata

SEQ ID NO: 5666158 - DNA, 25 bp, Homo sapien
gacgatggcagctttgtggaataga

SEQ ID NO: 5666159 - DNA, 25 bp, Homo sapien
ccaggatgacgatggcagctttgtg

SEQ ID NO: 5666160 - DNA, 25 bp, Homo sapien
cgggccaggatgacgatggcagctt

SEQ ID NO: 5666161 - DNA, 25 bp, Homo sapien
gccaggatgacgatggcagctttgt

SEQ ID NO: 5666162 - DNA, 25 bp, Homo sapien
tgacgatggcagctttgtggaatag

SEQ ID NO: 5666163 - DNA, 25 bp, Homo sapien
tcacttcccagtaggggcggctggg

SEQ ID NO: 5666164 - DNA, 25 bp, Homo sapien
gctgggcagaggcgcccctcacctc

SEQ ID NO: 5666165 - DNA, 25 bp, Homo sapien
gctggccgggcaggggggctgaccc

SEQ ID NO: 5666166 - DNA, 25 bp, Homo sapien
tgggcagaggcgcccctcacctccc

SEQ ID NO: 5666167 - DNA, 25 bp, Homo sapien
cggctgggcagaggcgcccctcacc

SEQ ID NO: 5666168 - DNA, 25 bp, Homo sapien
cggctggccgggcaggggggctgac

SEQ ID NO: 5666169 - DNA, 25 bp, Homo sapien
gggtcagcccccctgcccggccagc

SEQ ID NO: 5666170 - DNA, 25 bp, Homo sapien
gtcagcccccctgcccggccagccg

SEQ ID NO: 5666171 - DNA, 25 bp, Homo sapien
ggtgaggggcgcctctgcccagccg

SEQ ID NO: 5666172 - DNA, 25 bp, Homo sapien
gggaggtgaggggcgcctctgccca

SEQ ID NO: 5666173 - DNA, 25 bp, Homo sapien
tgcccagccgcccctactgggaagt

SEQ ID NO: 5666174 - DNA, 25 bp, Homo sapien
cccagccgcccctactgggaagtga

SEQ ID NO: 5666175 - DNA, 25 bp, Homo sapien
ggctggccaggcggggggctgaccc

SEQ ID NO: 5666176 - DNA, 25 bp, Homo sapien
cggctggccaggcggggggctgacc

SEQ ID NO: 5666177 - DNA, 25 bp, Homo sapien
ggcggctggccaggcggggggctga

SEQ ID NO: 5666178 - DNA, 25 bp, Homo sapien
gctggccaggcggggggctgacccc

SEQ ID NO: 5666179 - DNA, 25 bp, Homo sapien
gcggctggccaggcggggggctgac

SEQ ID NO: 5666180 - DNA, 25 bp, Homo sapien
cggacggggcggctggccaggcggg

SEQ ID NO: 5666181 - DNA, 25 bp, Homo sapien
cgcctggccagccgccccgtccggg

SEQ ID NO: 5666182 - DNA, 25 bp, Homo sapien
ggggtcagccccccgcctggccagc

SEQ ID NO: 5666183 - DNA, 25 bp, Homo sapien
ggtcagccccccgcctggccagccg

SEQ ID NO: 5666184 - DNA, 25 bp, Homo sapien
tcagccccccgcctggccagccgcc

SEQ ID NO: 5666185 - DNA, 25 bp, Homo sapien
gtcagccccccgcctggccagccgc

SEQ ID NO: 5666186 - DNA, 25 bp, Homo sapien
cccgcctggccagccgccccgtccg

SEQ ID NO: 5666187 - DNA, 25 bp, Homo sapien
gaggcgcccctcacctcccagacgg

SEQ ID NO: 5666188 - DNA, 25 bp, Homo sapien
acctcccagacggggcggctggccg

SEQ ID NO: 5666189 - DNA, 25 bp, Homo sapien
cctcccagacggggcggctggccgg

SEQ ID NO: 5666190 - DNA, 25 bp, Homo sapien
cggacggggcggctggccgggcaga

SEQ ID NO: 5666191 - DNA, 25 bp, Homo sapien
gcgcccctcacctcccagacggggc

SEQ ID NO: 5666192 - DNA, 25 bp, Homo sapien
aggcgcccctcacctcccagacggg

SEQ ID NO: 5666193 - DNA, 25 bp, Homo sapien
ccggccagccgccccgtctgggagg

SEQ ID NO: 5666194 - DNA, 25 bp, Homo sapien
cccgtctgggaggtgaggggcgcct

SEQ ID NO: 5666195 - DNA, 25 bp, Homo sapien
aggagcccctctgcccggccagccg

SEQ ID NO: 5666196 - DNA, 25 bp, Homo sapien
tctgcccggccagccgccccgtccg

SEQ ID NO: 5666197 - DNA, 25 bp, Homo sapien
cggccagccgccccgtctgggaggt

SEQ ID NO: 5666198 - DNA, 25 bp, Homo sapien
ccgtctgggaggtgaggggcgcctc

SEQ ID NO: 5666199 - DNA, 25 bp, Homo sapien
ggcggctggccgggcggggggctga

SEQ ID NO: 5666200 - DNA, 25 bp, Homo sapien
gcagaggcaaccctcacctcccgga

SEQ ID NO: 5666201 - DNA, 25 bp, Homo sapien
agaggcaaccctcacctcccggacg

SEQ ID NO: 5666202 - DNA, 25 bp, Homo sapien
tcacctcccggacggggcggctggc

SEQ ID NO: 5666203 - DNA, 25 bp, Homo sapien
cgggctgaggggctcctcacttccc

SEQ ID NO: 5666204 - DNA, 25 bp, Homo sapien
cagaggcaaccctcacctcccggac

SEQ ID NO: 5666205 - DNA, 25 bp, Homo sapien
gggaagtgaggagcccctcagcccg

SEQ ID NO: 5666206 - DNA, 25 bp, Homo sapien
tccgggaggtgagggttgcctctgc

SEQ ID NO: 5666207 - DNA, 25 bp, Homo sapien
gccagccgccccgtccgggaggtga

SEQ ID NO: 5666208 - DNA, 25 bp, Homo sapien
cgtccgggaggtgagggttgcctct

SEQ ID NO: 5666209 - DNA, 25 bp, Homo sapien
tgggaagtgaggagcccctcagccc

SEQ ID NO: 5666210 - DNA, 25 bp, Homo sapien
gtccgggaggtgagggttgcctctg

SEQ ID NO: 5666211 - DNA, 25 bp, Homo sapien
tgctgggcggagatgctcctcactt

SEQ ID NO: 5666212 - DNA, 25 bp, Homo sapien
tggggtggctgccgggcggagaggc

SEQ ID NO: 5666213 - DNA, 25 bp, Homo sapien
tcccggacggggtggctgctgggcg

SEQ ID NO: 5666214 - DNA, 25 bp, Homo sapien
gatggggtggctgccgggcggagag

SEQ ID NO: 5666215 - DNA, 25 bp, Homo sapien
cgggcggagaggctcctcacttctc

SEQ ID NO: 5666216 - DNA, 25 bp, Homo sapien
ctgctgggcggagatgctcctcact

SEQ ID NO: 5666217 - DNA, 25 bp, Homo sapien
ccagcagccaccccgtccgggaggg

SEQ ID NO: 5666218 - DNA, 25 bp, Homo sapien
gagaagtgaggagcctctccgcccg

SEQ ID NO: 5666219 - DNA, 25 bp, Homo sapien
agtgaggagcatctccgcccagcag

SEQ ID NO: 5666220 - DNA, 25 bp, Homo sapien
ctctccgcccggcagccaccccatc

SEQ ID NO: 5666221 - DNA, 25 bp, Homo sapien
cgcccagcagccaccccgtccggga

SEQ ID NO: 5666222 - DNA, 25 bp, Homo sapien
aagtgaggagcatctccgcccagca

SEQ ID NO: 5666223 - DNA, 25 bp, Homo sapien
cctcacatcccagatggggcggcgg

SEQ ID NO: 5666224 - DNA, 25 bp, Homo sapien
tcctcacatcccagatggggcggcg

SEQ ID NO: 5666225 - DNA, 25 bp, Homo sapien
catcccagatggggcggcggggcag

SEQ ID NO: 5666226 - DNA, 25 bp, Homo sapien
tcacatcccagatggggcggcgggg

SEQ ID NO: 5666227 - DNA, 25 bp, Homo sapien
acgctcctcacttcctagatgtgat

SEQ ID NO: 5666228 - DNA, 25 bp, Homo sapien
ctcacatcccagatggggcggcggg

SEQ ID NO: 5666229 - DNA, 25 bp, Homo sapien
atcacatctaggaagtgaggagcgt

SEQ ID NO: 5666230 - DNA, 25 bp, Homo sapien
gccccgccgccccatctgggatgtg

SEQ ID NO: 5666231 - DNA, 25 bp, Homo sapien
ccgccgccccatctgggatgtgagg

SEQ ID NO: 5666232 - DNA, 25 bp, Homo sapien
cgccgccccatctgggatgtgagga

SEQ ID NO: 5666233 - DNA, 25 bp, Homo sapien
ccccgccgccccatctgggatgtga

SEQ ID NO: 5666234 - DNA, 25 bp, Homo sapien
cccgccgccccatctgggatgtgag

SEQ ID NO: 5666235 - DNA, 25 bp, Homo sapien
cagaggctgcaatctcggcactttg

SEQ ID NO: 5666236 - DNA, 25 bp, Homo sapien
cggctgggaggtgtaggttgtagtg

SEQ ID NO: 5666237 - DNA, 25 bp, Homo sapien
gcggctgggaggtgtaggttgtagt

SEQ ID NO: 5666238 - DNA, 25 bp, Homo sapien
ggcagaggctgcaatctcggcactt

SEQ ID NO: 5666239 - DNA, 25 bp, Homo sapien
gggcagaggctgcaatctcggcact

SEQ ID NO: 5666240 - DNA, 25 bp, Homo sapien
gcagaggctgcaatctcggcacttt

SEQ ID NO: 5666241 - DNA, 25 bp, Homo sapien
cactacaacctacacctcccagccg

SEQ ID NO: 5666242 - DNA, 25 bp, Homo sapien
agtgccgagattgcagcctctgccc

SEQ ID NO: 5666243 - DNA, 25 bp, Homo sapien
caaagtgccgagattgcagcctctg

SEQ ID NO: 5666244 - DNA, 25 bp, Homo sapien
actacaacctacacctcccagccgc

SEQ ID NO: 5666245 - DNA, 25 bp, Homo sapien
aagtgccgagattgcagcctctgcc

SEQ ID NO: 5666246 - DNA, 25 bp, Homo sapien
aaagtgccgagattgcagcctctgc

SEQ ID NO: 5666247 - DNA, 25 bp, Homo sapien
actacagcctccagctgctgggctt

SEQ ID NO: 5666248 - DNA, 25 bp, Homo sapien
cctccagctgctgggcttaagcaat

SEQ ID NO: 5666249 - DNA, 25 bp, Homo sapien
tggcctactcttgcccaggttgaag

SEQ ID NO: 5666250 - DNA, 25 bp, Homo sapien
tactcttgcccaggttgaagtacag

SEQ ID NO: 5666251 - DNA, 25 bp, Homo sapien
gggtggcctactcttgcccaggttg

SEQ ID NO: 5666252 - DNA, 25 bp, Homo sapien
atgggtggcctactcttgcccaggt

SEQ ID NO: 5666253 - DNA, 25 bp, Homo sapien
acctgggcaagagtaggccacccat

SEQ ID NO: 5666254 - DNA, 25 bp, Homo sapien
aacctgggcaagagtaggccaccca

SEQ ID NO: 5666255 - DNA, 25 bp, Homo sapien
ttcaacctgggcaagagtaggccac

SEQ ID NO: 5666256 - DNA, 25 bp, Homo sapien
attgcttaagcccagcagctggagg

SEQ ID NO: 5666257 - DNA, 25 bp, Homo sapien
taagcccagcagctggaggctgtag

SEQ ID NO: 5666258 - DNA, 25 bp, Homo sapien
cttcaacctgggcaagagtaggcca

SEQ ID NO: 5666259 - DNA, 25 bp, Homo sapien
tagagaaccaacagagggcgtatga

SEQ ID NO: 5666260 - DNA, 25 bp, Homo sapien
agaaccaacagagggcgtatgagac

SEQ ID NO: 5666261 - DNA, 25 bp, Homo sapien
ttgtaagatatgctagagaaccaac

SEQ ID NO: 5666262 - DNA, 25 bp, Homo sapien
cctattctggttgtaagatatgcta

SEQ ID NO: 5666263 - DNA, 25 bp, Homo sapien
gctagagaaccaacagagggcgtat

SEQ ID NO: 5666264 - DNA, 25 bp, Homo sapien
ctggttgtaagatatgctagagaac

SEQ ID NO: 5666265 - DNA, 25 bp, Homo sapien
tctagcatatcttacaaccagaata

SEQ ID NO: 5666266 - DNA, 25 bp, Homo sapien
tagcatatcttacaaccagaatagg

SEQ ID NO: 5666267 - DNA, 25 bp, Homo sapien
gtctcatacgccctctgttggttct

SEQ ID NO: 5666268 - DNA, 25 bp, Homo sapien
catacgccctctgttggttctctag

SEQ ID NO: 5666269 - DNA, 25 bp, Homo sapien
gttggttctctagcatatcttacaa

SEQ ID NO: 5666270 - DNA, 25 bp, Homo sapien
gttctctagcatatcttacaaccag

SEQ ID NO: 5666271 - DNA, 25 bp, Homo sapien
tctttgccctttacaccaagttgtc

SEQ ID NO: 5666272 - DNA, 25 bp, Homo sapien
tctctttgccctttacaccaagttg

SEQ ID NO: 5666273 - DNA, 25 bp, Homo sapien
atgattgaccctagtcagaagtgat

SEQ ID NO: 5666274 - DNA, 25 bp, Homo sapien
tcatgattgaccctagtcagaagtg

SEQ ID NO: 5666275 - DNA, 25 bp, Homo sapien
gccctttacaccaagttgtcaccag

SEQ ID NO: 5666276 - DNA, 25 bp, Homo sapien
tattcatgattgaccctagtcagaa

SEQ ID NO: 5666277 - DNA, 25 bp, Homo sapien
tgacaacttggtgtaaagggcaaag

SEQ ID NO: 5666278 - DNA, 25 bp, Homo sapien
caacttggtgtaaagggcaaagaga

SEQ ID NO: 5666279 - DNA, 25 bp, Homo sapien
atcacttctgactagggtcaatcat

SEQ ID NO: 5666280 - DNA, 25 bp, Homo sapien
cacttctgactagggtcaatcatga

SEQ ID NO: 5666281 - DNA, 25 bp, Homo sapien
ctggtgacaacttggtgtaaagggc

SEQ ID NO: 5666282 - DNA, 25 bp, Homo sapien
tctgactagggtcaatcatgaatat

SEQ ID NO: 5666283 - DNA, 25 bp, Homo sapien
agatttcgtgaatgactaataggct

SEQ ID NO: 5666284 - DNA, 25 bp, Homo sapien
tagatttcgtgaatgactaataggc

SEQ ID NO: 5666285 - DNA, 25 bp, Homo sapien
tacatgtagtaatagctagatttcg

SEQ ID NO: 5666286 - DNA, 25 bp, Homo sapien
ttaatacatgtagtaatagctagat

SEQ ID NO: 5666287 - DNA, 25 bp, Homo sapien
gctagatttcgtgaatgactaatag

SEQ ID NO: 5666288 - DNA, 25 bp, Homo sapien
acatgtagtaatagctagatttcgt

SEQ ID NO: 5666289 - DNA, 25 bp, Homo sapien
cctattagtcattcacgaaatctag

SEQ ID NO: 5666290 - DNA, 25 bp, Homo sapien
acgaaatctagctattactacatgt

SEQ ID NO: 5666291 - DNA, 25 bp, Homo sapien
agcctattagtcattcacgaaatct

SEQ ID NO: 5666292 - DNA, 25 bp, Homo sapien
tattagtcattcacgaaatctagct

SEQ ID NO: 5666293 - DNA, 25 bp, Homo sapien
gcctattagtcattcacgaaatcta

SEQ ID NO: 5666294 - DNA, 25 bp, Homo sapien
cgaaatctagctattactacatgta

SEQ ID NO: 5666295 - DNA, 25 bp, Homo sapien
gggatttgagtaggatatggaataa

SEQ ID NO: 5666296 - DNA, 25 bp, Homo sapien
catctgcttgactgggggatttgag

SEQ ID NO: 5666297 - DNA, 25 bp, Homo sapien
gcttgactgggggatttgagtagga

SEQ ID NO: 5666298 - DNA, 25 bp, Homo sapien
cttgactgggggatttgagtaggat

SEQ ID NO: 5666299 - DNA, 25 bp, Homo sapien
atctgcttgactgggggatttgagt

SEQ ID NO: 5666300 - DNA, 25 bp, Homo sapien
tctgcttgactgggggatttgagta

SEQ ID NO: 5666301 - DNA, 25 bp, Homo sapien
actcaaatcccccagtcaagcagat

SEQ ID NO: 5666302 - DNA, 25 bp, Homo sapien
tactcaaatcccccagtcaagcaga

SEQ ID NO: 5666303 - DNA, 25 bp, Homo sapien
tcaaatcccccagtcaagcagatga

SEQ ID NO: 5666304 - DNA, 25 bp, Homo sapien
ttattccatatcctactcaaatccc

SEQ ID NO: 5666305 - DNA, 25 bp, Homo sapien
ctcaaatcccccagtcaagcagatg

SEQ ID NO: 5666306 - DNA, 25 bp, Homo sapien
tcctactcaaatcccccagtcaagc

SEQ ID NO: 5666307 - DNA, 25 bp, Homo sapien
gggatttgagtaggatatggaataa

SEQ ID NO: 5666308 - DNA, 25 bp, Homo sapien
catctgcttgactgggggatttgag

SEQ ID NO: 5666309 - DNA, 25 bp, Homo sapien
aaatggtttaaatgccttggaagca

SEQ ID NO: 5666310 - DNA, 25 bp, Homo sapien
taaatggtttaaatgccttggaagc

SEQ ID NO: 5666311 - DNA, 25 bp, Homo sapien
gagtaggatatggaataaatggttt

SEQ ID NO: 5666312 - DNA, 25 bp, Homo sapien
ccttggaagcacatttgagagaagc

SEQ ID NO: 5666313 - DNA, 25 bp, Homo sapien
taaaccatttattccatatcctact

SEQ ID NO: 5666314 - DNA, 25 bp, Homo sapien
actcaaatcccccagtcaagcagat

SEQ ID NO: 5666315 - DNA, 25 bp, Homo sapien
gcttccaaggcatttaaaccattta

SEQ ID NO: 5666316 - DNA, 25 bp, Homo sapien
tcaaatcccccagtcaagcagatga

SEQ ID NO: 5666317 - DNA, 25 bp, Homo sapien
gcttctctcaaatgtgcttccaagg

SEQ ID NO: 5666318 - DNA, 25 bp, Homo sapien
ttattccatatcctactcaaatccc

SEQ ID NO: 5666319 - DNA, 25 bp, Homo sapien
gtaatctatagatttttcgtggctt

SEQ ID NO: 5666320 - DNA, 25 bp, Homo sapien
ggtggtgaaaaattgccaactcatt

SEQ ID NO: 5666321 - DNA, 25 bp, Homo sapien
gggtggtgaaaaattgccaactcat

SEQ ID NO: 5666322 - DNA, 25 bp, Homo sapien
ttgtaatctatagatttttcgtggc

SEQ ID NO: 5666323 - DNA, 25 bp, Homo sapien
tggtgaaaaattgccaactcatttc

SEQ ID NO: 5666324 - DNA, 25 bp, Homo sapien
tgaaaaattgccaactcatttcccc

SEQ ID NO: 5666325 - DNA, 25 bp, Homo sapien
actccaactattgagagcaaatgtg

SEQ ID NO: 5666326 - DNA, 25 bp, Homo sapien
tccaactattgagagcaaatgtggg

SEQ ID NO: 5666327 - DNA, 25 bp, Homo sapien
gactccaactattgagagcaaatgt

SEQ ID NO: 5666328 - DNA, 25 bp, Homo sapien
tagactccaactattgagagcaaat

SEQ ID NO: 5666329 - DNA, 25 bp, Homo sapien
ctccaactattgagagcaaatgtgg

SEQ ID NO: 5666330 - DNA, 25 bp, Homo sapien
tttagactccaactattgagagcaa

SEQ ID NO: 5666331 - DNA, 25 bp, Homo sapien
ccacatttgctctcaatagttggag

SEQ ID NO: 5666332 - DNA, 25 bp, Homo sapien
caccccacatttgctctcaatagtt

SEQ ID NO: 5666333 - DNA, 25 bp, Homo sapien
ccccacatttgctctcaatagttgg

SEQ ID NO: 5666334 - DNA, 25 bp, Homo sapien
catttgctctcaatagttggagtct

SEQ ID NO: 5666335 - DNA, 25 bp, Homo sapien
cacatttgctctcaatagttggagt

SEQ ID NO: 5666336 - DNA, 25 bp, Homo sapien
ttgctctcaatagttggagtctaaa

SEQ ID NO: 5666337 - DNA, 25 bp, Homo sapien
gccacgaaaaatctatagattacaa

SEQ ID NO: 5666338 - DNA, 25 bp, Homo sapien
gagttggcaatttttcaccacccca

SEQ ID NO: 5666339 - DNA, 25 bp, Homo sapien
aagccacgaaaaatctatagattac

SEQ ID NO: 5666340 - DNA, 25 bp, Homo sapien
gaaatgagttggcaatttttcacca

SEQ ID NO: 5666341 - DNA, 25 bp, Homo sapien
aatgagttggcaatttttcaccacc

SEQ ID NO: 5666342 - DNA, 25 bp, Homo sapien
gggaaatgagttggcaatttttcac

SEQ ID NO: 5666343 - DNA, 25 bp, Homo sapien
tgaataatacttttagactccaact

SEQ ID NO: 5666344 - DNA, 25 bp, Homo sapien
tccaactattgagagcaaatgtggg

SEQ ID NO: 5666345 - DNA, 25 bp, Homo sapien
gactccaactattgagagcaaatgt

SEQ ID NO: 5666346 - DNA, 25 bp, Homo sapien
tagactccaactattgagagcaaat

SEQ ID NO: 5666347 - DNA, 25 bp, Homo sapien
ctccaactattgagagcaaatgtgg

SEQ ID NO: 5666348 - DNA, 25 bp, Homo sapien
tttagactccaactattgagagcaa

SEQ ID NO: 5666349 - DNA, 25 bp, Homo sapien
ccccacatttgctctcaatagttgg

SEQ ID NO: 5666350 - DNA, 25 bp, Homo sapien
caccccacatttgctctcaatagtt

SEQ ID NO: 5666351 - DNA, 25 bp, Homo sapien
catttgctctcaatagttggagtct

SEQ ID NO: 5666352 - DNA, 25 bp, Homo sapien
agttggagtctaaaagtattattca

SEQ ID NO: 5666353 - DNA, 25 bp, Homo sapien
cacatttgctctcaatagttggagt

SEQ ID NO: 5666354 - DNA, 25 bp, Homo sapien
ccacatttgctctcaatagttggag

SEQ ID NO: 5666355 - DNA, 25 bp, Homo sapien
ttttaatatggtcctatctccttgg

SEQ ID NO: 5666356 - DNA, 25 bp, Homo sapien
ggtttaattgcaggcgcattgaaca

SEQ ID NO: 5666357 - DNA, 25 bp, Homo sapien
aatatggtcctatctccttggttta

SEQ ID NO: 5666358 - DNA, 25 bp, Homo sapien
ctccttggtttaattgcaggcgcat

SEQ ID NO: 5666359 - DNA, 25 bp, Homo sapien
ccttggtttaattgcaggcgcattg

SEQ ID NO: 5666360 - DNA, 25 bp, Homo sapien
ttaattgcaggcgcattgaacagtc

SEQ ID NO: 5666361 - DNA, 25 bp, Homo sapien
atgcgcctgcaattaaaccaaggag

SEQ ID NO: 5666362 - DNA, 25 bp, Homo sapien
tgttcaatgcgcctgcaattaaacc

SEQ ID NO: 5666363 - DNA, 25 bp, Homo sapien
taaaccaaggagataggaccatatt

SEQ ID NO: 5666364 - DNA, 25 bp, Homo sapien
tcaatgcgcctgcaattaaaccaag

SEQ ID NO: 5666365 - DNA, 25 bp, Homo sapien
ccaaggagataggaccatattaaaa

SEQ ID NO: 5666366 - DNA, 25 bp, Homo sapien
attaaaccaaggagataggaccata

SEQ ID NO: 5666367 - DNA, 25 bp, Homo sapien
agtttcttaatgctatacctgattc

SEQ ID NO: 5666368 - DNA, 25 bp, Homo sapien
aagtttcttaatgctatacctgatt

SEQ ID NO: 5666369 - DNA, 25 bp, Homo sapien
cagttaagtttcttaatgctatacc

SEQ ID NO: 5666370 - DNA, 25 bp, Homo sapien
gtttcttaatgctatacctgattct

SEQ ID NO: 5666371 - DNA, 25 bp, Homo sapien
taagtttcttaatgctatacctgat

SEQ ID NO: 5666372 - DNA, 25 bp, Homo sapien
agttaagtttcttaatgctatacct

SEQ ID NO: 5666373 - DNA, 25 bp, Homo sapien
atcaggtatagcattaagaaactta

SEQ ID NO: 5666374 - DNA, 25 bp, Homo sapien
ggtatagcattaagaaacttaactg

SEQ ID NO: 5666375 - DNA, 25 bp, Homo sapien
gaatcaggtatagcattaagaaact

SEQ ID NO: 5666376 - DNA, 25 bp, Homo sapien
aatcaggtatagcattaagaaactt

SEQ ID NO: 5666377 - DNA, 25 bp, Homo sapien
agaatcaggtatagcattaagaaac

SEQ ID NO: 5666378 - DNA, 25 bp, Homo sapien
aggtatagcattaagaaacttaact

SEQ ID NO: 5666379 - DNA, 25 bp, Homo sapien
aatgctatacctgattctgccaaag

SEQ ID NO: 5666380 - DNA, 25 bp, Homo sapien
tattggaggcagttaagtttcttaa

SEQ ID NO: 5666381 - DNA, 25 bp, Homo sapien
tatacctgattctgccaaagtccct

SEQ ID NO: 5666382 - DNA, 25 bp, Homo sapien
gtttcttaatgctatacctgattct

SEQ ID NO: 5666383 - DNA, 25 bp, Homo sapien
taagtttcttaatgctatacctgat

SEQ ID NO: 5666384 - DNA, 25 bp, Homo sapien
gccaaagtcccttggacatttgaaa

SEQ ID NO: 5666385 - DNA, 25 bp, Homo sapien
ggtatagcattaagaaacttaactg

SEQ ID NO: 5666386 - DNA, 25 bp, Homo sapien
ggactttggcagaatcaggtatagc

SEQ ID NO: 5666387 - DNA, 25 bp, Homo sapien
tggcagaatcaggtatagcattaag

SEQ ID NO: 5666388 - DNA, 25 bp, Homo sapien
taagaaacttaactgcctccaataa

SEQ ID NO: 5666389 - DNA, 25 bp, Homo sapien
gaatcaggtatagcattaagaaact

SEQ ID NO: 5666390 - DNA, 25 bp, Homo sapien
tttcaaatgtccaagggactttggc

SEQ ID NO: 5666391 - DNA, 25 bp, Homo sapien
aggatcgcttgaacctgggaggcag

SEQ ID NO: 5666392 - DNA, 25 bp, Homo sapien
aggttgcagtgagcgccactgcact

SEQ ID NO: 5666393 - DNA, 25 bp, Homo sapien
atgtacctgtaatcccacctactca

SEQ ID NO: 5666394 - DNA, 25 bp, Homo sapien
tcaagaggcggaggcaggaggatcg

SEQ ID NO: 5666395 - DNA, 25 bp, Homo sapien
tgtacctgtaatcccacctactcaa

SEQ ID NO: 5666396 - DNA, 25 bp, Homo sapien
ggttgcagtgagcgccactgcactc

SEQ ID NO: 5666397 - DNA, 25 bp, Homo sapien
tgagtaggtgggattacaggtacat

SEQ ID NO: 5666398 - DNA, 25 bp, Homo sapien
cgatcctcctgcctccgcctcttga

SEQ ID NO: 5666399 - DNA, 25 bp, Homo sapien
ctgcctcccaggttcaagcgatcct

SEQ ID NO: 5666400 - DNA, 25 bp, Homo sapien
gagtgcagtggcgctcactgcaacc

SEQ ID NO: 5666401 - DNA, 25 bp, Homo sapien
agtgcagtggcgctcactgcaacct

SEQ ID NO: 5666402 - DNA, 25 bp, Homo sapien
ttgagtaggtgggattacaggtaca

SEQ ID NO: 5666403 - DNA, 25 bp, Homo sapien
cattcggtattcagttaccttgtac

SEQ ID NO: 5666404 - DNA, 25 bp, Homo sapien
taatattggcattcggtattcagtt

SEQ ID NO: 5666405 - DNA, 25 bp, Homo sapien
tttaatattggcattcggtattcag

SEQ ID NO: 5666406 - DNA, 25 bp, Homo sapien
tggcattcggtattcagttaccttg

SEQ ID NO: 5666407 - DNA, 25 bp, Homo sapien
tattggcattcggtattcagttacc

SEQ ID NO: 5666408 - DNA, 25 bp, Homo sapien
agttaccttgtacctgagaacccat

SEQ ID NO: 5666409 - DNA, 25 bp, Homo sapien
ggtaactgaataccgaatgccaata

SEQ ID NO: 5666410 - DNA, 25 bp, Homo sapien
gtacaaggtaactgaataccgaatg

SEQ ID NO: 5666411 - DNA, 25 bp, Homo sapien
tacaaggtaactgaataccgaatgc

SEQ ID NO: 5666412 - DNA, 25 bp, Homo sapien
atgggttctcaggtacaaggtaact

SEQ ID NO: 5666413 - DNA, 25 bp, Homo sapien
caaggtaactgaataccgaatgcca

SEQ ID NO: 5666414 - DNA, 25 bp, Homo sapien
ctgaataccgaatgccaatattaaa

SEQ ID NO: 5666415 - DNA, 25 bp, Homo sapien
tttctagttcttggtgaacttctgg

SEQ ID NO: 5666416 - DNA, 25 bp, Homo sapien
ttctagttcttggtgaacttctgga

SEQ ID NO: 5666417 - DNA, 25 bp, Homo sapien
atttctagttcttggtgaacttctg

SEQ ID NO: 5666418 - DNA, 25 bp, Homo sapien
tctagttcttggtgaacttctggac

SEQ ID NO: 5666419 - DNA, 25 bp, Homo sapien
ttcttggtgaacttctggacttttc

SEQ ID NO: 5666420 - DNA, 25 bp, Homo sapien
tccagaagttcaccaagaactagaa

SEQ ID NO: 5666421 - DNA, 25 bp, Homo sapien
gaaaagtccagaagttcaccaagaa

SEQ ID NO: 5666422 - DNA, 25 bp, Homo sapien
gtccagaagttcaccaagaactaga

SEQ ID NO: 5666423 - DNA, 25 bp, Homo sapien
ccagaagttcaccaagaactagaaa

SEQ ID NO: 5666424 - DNA, 25 bp, Homo sapien
cagaagttcaccaagaactagaaat

SEQ ID NO: 5666425 - DNA, 25 bp, Homo sapien
gagtcatctcatttctagttcttgg

SEQ ID NO: 5666426 - DNA, 25 bp, Homo sapien
tctagttcttggtgaacttctggac

SEQ ID NO: 5666427 - DNA, 25 bp, Homo sapien
tgaaacagtgacagctgagagaatc

SEQ ID NO: 5666428 - DNA, 25 bp, Homo sapien
ttcttggtgaacttctggacttttc

SEQ ID NO: 5666429 - DNA, 25 bp, Homo sapien
ttttcttcagaaccaccttgccatg

SEQ ID NO: 5666430 - DNA, 25 bp, Homo sapien
cagctgagagaatcctgagtcatct

SEQ ID NO: 5666431 - DNA, 25 bp, Homo sapien
acctctcaggtgatccaacaccttg

SEQ ID NO: 5666432 - DNA, 25 bp, Homo sapien
gacctctcaggtgatccaacacctt

SEQ ID NO: 5666433 - DNA, 25 bp, Homo sapien
caccatgcctggccagctgtttttt

SEQ ID NO: 5666434 - DNA, 25 bp, Homo sapien
tgacctctcaggtgatccaacacct

SEQ ID NO: 5666435 - DNA, 25 bp, Homo sapien
atccaacaccttggcctcttaaagt

SEQ ID NO: 5666436 - DNA, 25 bp, Homo sapien
gatccaacaccttggcctcttaaag

SEQ ID NO: 5666437 - DNA, 25 bp, Homo sapien
tttaagaggccaaggtgttggatca

SEQ ID NO: 5666438 - DNA, 25 bp, Homo sapien
aggtgttggatcacctgagaggtca

SEQ ID NO: 5666439 - DNA, 25 bp, Homo sapien
caaggtgttggatcacctgagaggt

SEQ ID NO: 5666440 - DNA, 25 bp, Homo sapien
aaaaaacagctggccaggcatggtg

SEQ ID NO: 5666441 - DNA, 25 bp, Homo sapien
actttaagaggccaaggtgttggat

SEQ ID NO: 5666442 - DNA, 25 bp, Homo sapien
ctttaagaggccaaggtgttggatc

SEQ ID NO: 5666443 - DNA, 25 bp, Homo sapien
gtacccatctgtagtgtgatcttgg

SEQ ID NO: 5666444 - DNA, 25 bp, Homo sapien
ggtacccatctgtagtgtgatcttg

SEQ ID NO: 5666445 - DNA, 25 bp, Homo sapien
ccaagatcacactacagatgggtac

SEQ ID NO: 5666446 - DNA, 25 bp, Homo sapien
caagatcacactacagatgggtacc

SEQ ID NO: 5666447 - DNA, 25 bp, Homo sapien
tgtagttgcacaccaccaagcctgg

SEQ ID NO: 5666448 - DNA, 25 bp, Homo sapien
agttgcacaccaccaagcctggcta

SEQ ID NO: 5666449 - DNA, 25 bp, Homo sapien
agtagctgggcctcctgtagttgca

SEQ ID NO: 5666450 - DNA, 25 bp, Homo sapien
gctgggcctcctgtagttgcacacc

SEQ ID NO: 5666451 - DNA, 25 bp, Homo sapien
tgggcctcctgtagttgcacaccac

SEQ ID NO: 5666452 - DNA, 25 bp, Homo sapien
tagctgggcctcctgtagttgcaca

SEQ ID NO: 5666453 - DNA, 25 bp, Homo sapien
gtggtgtgcaactacaggaggccca

SEQ ID NO: 5666454 - DNA, 25 bp, Homo sapien
ccaggcttggtggtgtgcaactaca

SEQ ID NO: 5666455 - DNA, 25 bp, Homo sapien
gtgtgcaactacaggaggcccagct

SEQ ID NO: 5666456 - DNA, 25 bp, Homo sapien
tggtgtgcaactacaggaggcccag

SEQ ID NO: 5666457 - DNA, 25 bp, Homo sapien
tagccaggcttggtggtgtgcaact

SEQ ID NO: 5666458 - DNA, 25 bp, Homo sapien
tgcaactacaggaggcccagctact

SEQ ID NO: 5666459 - DNA, 25 bp, Homo sapien
tgtcttaactagttcaaagaaggct

SEQ ID NO: 5666460 - DNA, 25 bp, Homo sapien
taatctttgaaggacagtgcaatgt

SEQ ID NO: 5666461 - DNA, 25 bp, Homo sapien
ctaatctttgaaggacagtgcaatg

SEQ ID NO: 5666462 - DNA, 25 bp, Homo sapien
cagtgcaatgtggattttgctgagg

SEQ ID NO: 5666463 - DNA, 25 bp, Homo sapien
tcttaactagttcaaagaaggctaa

SEQ ID NO: 5666464 - DNA, 25 bp, Homo sapien
agtgcaatgtggattttgctgagga

SEQ ID NO: 5666465 - DNA, 25 bp, Homo sapien
cattgcactgtccttcaaagattag

SEQ ID NO: 5666466 - DNA, 25 bp, Homo sapien
ccttctttgaactagttaagacact

SEQ ID NO: 5666467 - DNA, 25 bp, Homo sapien
tcctcagcaaaatccacattgcact

SEQ ID NO: 5666468 - DNA, 25 bp, Homo sapien
acattgcactgtccttcaaagatta

SEQ ID NO: 5666469 - DNA, 25 bp, Homo sapien
tagccttctttgaactagttaagac

SEQ ID NO: 5666470 - DNA, 25 bp, Homo sapien
cctcagcaaaatccacattgcactg

SEQ ID NO: 5666471 - DNA, 25 bp, Homo sapien
aatctttcaaattactttggtcact

SEQ ID NO: 5666472 - DNA, 25 bp, Homo sapien
aacttactctaaaacatagaagaat

SEQ ID NO: 5666473 - DNA, 25 bp, Homo sapien
gaatctttcaaattactttggtcac

SEQ ID NO: 5666474 - DNA, 25 bp, Homo sapien
atctttcaaattactttggtcactt

SEQ ID NO: 5666475 - DNA, 25 bp, Homo sapien
taacttactctaaaacatagaagaa

SEQ ID NO: 5666476 - DNA, 25 bp, Homo sapien
tgaatctttcaaattactttggtca

SEQ ID NO: 5666477 - DNA, 25 bp, Homo sapien
agtgaccaaagtaatttgaaagatt

SEQ ID NO: 5666478 - DNA, 25 bp, Homo sapien
attcttctatgttttagagtaagtt

SEQ ID NO: 5666479 - DNA, 25 bp, Homo sapien
gtgaccaaagtaatttgaaagattc

SEQ ID NO: 5666480 - DNA, 25 bp, Homo sapien
ttcttctatgttttagagtaagtta

SEQ ID NO: 5666481 - DNA, 25 bp, Homo sapien
aagtgaccaaagtaatttgaaagat

SEQ ID NO: 5666482 - DNA, 25 bp, Homo sapien
tgaccaaagtaatttgaaagattca

SEQ ID NO: 5666483 - DNA, 25 bp, Homo sapien
cctaggttggagcaaaagtcattga

SEQ ID NO: 5666484 - DNA, 25 bp, Homo sapien
ggagcaaaagtcattgaatctttca

SEQ ID NO: 5666485 - DNA, 25 bp, Homo sapien
catagaagaatattaagtttaattc

SEQ ID NO: 5666486 - DNA, 25 bp, Homo sapien
gaatctttcaaattactttggtcac

SEQ ID NO: 5666487 - DNA, 25 bp, Homo sapien
taacttactctaaaacatagaagaa

SEQ ID NO: 5666488 - DNA, 25 bp, Homo sapien
aattactttggtcactttatcttgt

SEQ ID NO: 5666489 - DNA, 25 bp, Homo sapien
gtgaccaaagtaatttgaaagattc

SEQ ID NO: 5666490 - DNA, 25 bp, Homo sapien
tcaatgacttttgctccaacctagg

SEQ ID NO: 5666491 - DNA, 25 bp, Homo sapien
gaattaaacttaatattcttctatg

SEQ ID NO: 5666492 - DNA, 25 bp, Homo sapien
tgaaagattcaatgacttttgctcc

SEQ ID NO: 5666493 - DNA, 25 bp, Homo sapien
tcttctatgttttagagtaagttaa

SEQ ID NO: 5666494 - DNA, 25 bp, Homo sapien
aacaagataaagtgaccaaagtaat

SEQ ID NO: 5666495 - DNA, 25 bp, Homo sapien
aatcttaaacacgtaaaggtgaatg

SEQ ID NO: 5666496 - DNA, 25 bp, Homo sapien
aattcaaagttacagttttcacaat

SEQ ID NO: 5666497 - DNA, 25 bp, Homo sapien
acacgtaaaggtgaatgttaatgtc

SEQ ID NO: 5666498 - DNA, 25 bp, Homo sapien
cattgcattaatcttaaacacgtaa

SEQ ID NO: 5666499 - DNA, 25 bp, Homo sapien
cattaatcttaaacacgtaaaggtg

SEQ ID NO: 5666500 - DNA, 25 bp, Homo sapien
tcaaagttacagttttcacaatatt

SEQ ID NO: 5666501 - DNA, 25 bp, Homo sapien
cattcacctttacgtgtttaagatt

SEQ ID NO: 5666502 - DNA, 25 bp, Homo sapien
aatattgtgaaaactgtaactttga

SEQ ID NO: 5666503 - DNA, 25 bp, Homo sapien
tattgtgaaaactgtaactttgaat

SEQ ID NO: 5666504 - DNA, 25 bp, Homo sapien
tacgtgtttaagattaatgcaatgt

SEQ ID NO: 5666505 - DNA, 25 bp, Homo sapien
cctttacgtgtttaagattaatgca

SEQ ID NO: 5666506 - DNA, 25 bp, Homo sapien
gacattaacattcacctttacgtgt

SEQ ID NO: 5666507 - DNA, 25 bp, Homo sapien
aagttgtttttgcacgcaattgata

SEQ ID NO: 5666508 - DNA, 25 bp, Homo sapien
ttgcacgcaattgatagcctttggg

SEQ ID NO: 5666509 - DNA, 25 bp, Homo sapien
tgtttttgcacgcaattgatagcct

SEQ ID NO: 5666510 - DNA, 25 bp, Homo sapien
tctgcattagattctgtttaccctg

SEQ ID NO: 5666511 - DNA, 25 bp, Homo sapien
tttgcacgcaattgatagcctttgg

SEQ ID NO: 5666512 - DNA, 25 bp, Homo sapien
gcaattgatagcctttggggtctgt

SEQ ID NO: 5666513 - DNA, 25 bp, Homo sapien
cagggtaaacagaatctaatgcaga

SEQ ID NO: 5666514 - DNA, 25 bp, Homo sapien
cccaaaggctatcaattgcgtgcaa

SEQ ID NO: 5666515 - DNA, 25 bp, Homo sapien
caaaggctatcaattgcgtgcaaaa

SEQ ID NO: 5666516 - DNA, 25 bp, Homo sapien
tatcaattgcgtgcaaaaacaactt

SEQ ID NO: 5666517 - DNA, 25 bp, Homo sapien
acagaccccaaaggctatcaattgc

SEQ ID NO: 5666518 - DNA, 25 bp, Homo sapien
gaccccaaaggctatcaattgcgtg

SEQ ID NO: 5666519 - DNA, 25 bp, Homo sapien
tgaatgccatagtagtgaatgaata

SEQ ID NO: 5666520 - DNA, 25 bp, Homo sapien
gaatgccatagtagtgaatgaatac

SEQ ID NO: 5666521 - DNA, 25 bp, Homo sapien
aatgccatagtagtgaatgaatact

SEQ ID NO: 5666522 - DNA, 25 bp, Homo sapien
tattcattcactactatggcattca

SEQ ID NO: 5666523 - DNA, 25 bp, Homo sapien
gtattcattcactactatggcattc

SEQ ID NO: 5666524 - DNA, 25 bp, Homo sapien
agtattcattcactactatggcatt

SEQ ID NO: 5666525 - DNA, 25 bp, Homo sapien
gctgggttaaggcaaatatatacta

SEQ ID NO: 5666526 - DNA, 25 bp, Homo sapien
gaatgccatagtagtgaatgaatac

SEQ ID NO: 5666527 - DNA, 25 bp, Homo sapien
gccatagtagtgaatgaatactgta

SEQ ID NO: 5666528 - DNA, 25 bp, Homo sapien
aaaatagtgagcatttgaaactagc

SEQ ID NO: 5666529 - DNA, 25 bp, Homo sapien
tgaaactagcttatgaatgccatag

SEQ ID NO: 5666530 - DNA, 25 bp, Homo sapien
aaaagtgctgggttaaggcaaatat

SEQ ID NO: 5666531 - DNA, 25 bp, Homo sapien
tatggcattcataagctagtttcaa

SEQ ID NO: 5666532 - DNA, 25 bp, Homo sapien
tattcattcactactatggcattca

SEQ ID NO: 5666533 - DNA, 25 bp, Homo sapien
tagtatatatttgccttaacccagc

SEQ ID NO: 5666534 - DNA, 25 bp, Homo sapien
tatatttgccttaacccagcacttt

SEQ ID NO: 5666535 - DNA, 25 bp, Homo sapien
taagctagtttcaaatgctcactat

SEQ ID NO: 5666536 - DNA, 25 bp, Homo sapien
tacagtattcattcactactatggc

SEQ ID NO: 5666537 - DNA, 25 bp, Homo sapien
cttgtactgtacagtggcagaaagc

SEQ ID NO: 5666538 - DNA, 25 bp, Homo sapien
ccaccattattcctaccttcttgta

SEQ ID NO: 5666539 - DNA, 25 bp, Homo sapien
tataggtatctgatacacttctgtc

SEQ ID NO: 5666540 - DNA, 25 bp, Homo sapien
tattcctaccttcttgtactgtaca

SEQ ID NO: 5666541 - DNA, 25 bp, Homo sapien
tctgatacacttctgtctattacag

SEQ ID NO: 5666542 - DNA, 25 bp, Homo sapien
ccttcttgtactgtacagtggcaga

SEQ ID NO: 5666543 - DNA, 25 bp, Homo sapien
tagacagaagtgtatcagataccta

SEQ ID NO: 5666544 - DNA, 25 bp, Homo sapien
gctttctgccactgtacagtacaag

SEQ ID NO: 5666545 - DNA, 25 bp, Homo sapien
aactgtaatagacagaagtgtatca

SEQ ID NO: 5666546 - DNA, 25 bp, Homo sapien
ctgtacagtacaagaaggtaggaat

SEQ ID NO: 5666547 - DNA, 25 bp, Homo sapien
tacaagaaggtaggaataatggtgg

SEQ ID NO: 5666548 - DNA, 25 bp, Homo sapien
tctgccactgtacagtacaagaagg

SEQ ID NO: 5666549 - DNA, 25 bp, Homo sapien
gcatgcaccactatgcctggctaat

SEQ ID NO: 5666550 - DNA, 25 bp, Homo sapien
ggcatgcaccactatgcctggctaa

SEQ ID NO: 5666551 - DNA, 25 bp, Homo sapien
acaggcatgcaccactatgcctggc

SEQ ID NO: 5666552 - DNA, 25 bp, Homo sapien
catgcaccactatgcctggctaatt

SEQ ID NO: 5666553 - DNA, 25 bp, Homo sapien
aggcatgcaccactatgcctggcta

SEQ ID NO: 5666554 - DNA, 25 bp, Homo sapien
caggcatgcaccactatgcctggct

SEQ ID NO: 5666555 - DNA, 25 bp, Homo sapien
tagccaggcatagtggtgcatgcct

SEQ ID NO: 5666556 - DNA, 25 bp, Homo sapien
gccaggcatagtggtgcatgcctgt

SEQ ID NO: 5666557 - DNA, 25 bp, Homo sapien
attagccaggcatagtggtgcatgc

SEQ ID NO: 5666558 - DNA, 25 bp, Homo sapien
ttagccaggcatagtggtgcatgcc

SEQ ID NO: 5666559 - DNA, 25 bp, Homo sapien
agccaggcatagtggtgcatgcctg

SEQ ID NO: 5666560 - DNA, 25 bp, Homo sapien
aattagccaggcatagtggtgcatg

SEQ ID NO: 5666561 - DNA, 25 bp, Homo sapien
gctttaagatgaaatgttaagatgg

SEQ ID NO: 5666562 - DNA, 25 bp, Homo sapien
tgttaagatggattccttctcagcc

SEQ ID NO: 5666563 - DNA, 25 bp, Homo sapien
cagcccataggatcttctgattaac

SEQ ID NO: 5666564 - DNA, 25 bp, Homo sapien
ccttctcagcccataggatcttctg

SEQ ID NO: 5666565 - DNA, 25 bp, Homo sapien
gaaatgttaagatggattccttctc

SEQ ID NO: 5666566 - DNA, 25 bp, Homo sapien
gcccataggatcttctgattaacca

SEQ ID NO: 5666567 - DNA, 25 bp, Homo sapien
cagaagatcctatgggctgagaagg

SEQ ID NO: 5666568 - DNA, 25 bp, Homo sapien
ccatcttaacatttcatcttaaagc

SEQ ID NO: 5666569 - DNA, 25 bp, Homo sapien
ggctgagaaggaatccatcttaaca

SEQ ID NO: 5666570 - DNA, 25 bp, Homo sapien
gagaaggaatccatcttaacatttc

SEQ ID NO: 5666571 - DNA, 25 bp, Homo sapien
tggttaatcagaagatcctatgggc

SEQ ID NO: 5666572 - DNA, 25 bp, Homo sapien
taatcagaagatcctatgggctgag

SEQ ID NO: 5666573 - DNA, 25 bp, Homo sapien
ttaccagtatagactttctcttgag

SEQ ID NO: 5666574 - DNA, 25 bp, Homo sapien
atttggttaccagtatagactttct

SEQ ID NO: 5666575 - DNA, 25 bp, Homo sapien
accagtatagactttctcttgagaa

SEQ ID NO: 5666576 - DNA, 25 bp, Homo sapien
tgaatttggttaccagtatagactt

SEQ ID NO: 5666577 - DNA, 25 bp, Homo sapien
agtgaatttggttaccagtatagac

SEQ ID NO: 5666578 - DNA, 25 bp, Homo sapien
taccagtatagactttctcttgaga

SEQ ID NO: 5666579 - DNA, 25 bp, Homo sapien
tctcaagagaaagtctatactggta

SEQ ID NO: 5666580 - DNA, 25 bp, Homo sapien
gtctatactggtaaccaaattcact

SEQ ID NO: 5666581 - DNA, 25 bp, Homo sapien
agaaagtctatactggtaaccaaat

SEQ ID NO: 5666582 - DNA, 25 bp, Homo sapien
ctcaagagaaagtctatactggtaa

SEQ ID NO: 5666583 - DNA, 25 bp, Homo sapien
aagtctatactggtaaccaaattca

SEQ ID NO: 5666584 - DNA, 25 bp, Homo sapien
ttctcaagagaaagtctatactggt

SEQ ID NO: 5666585 - DNA, 25 bp, Homo sapien
tggtctctatagttgaccctgcagt

SEQ ID NO: 5666586 - DNA, 25 bp, Homo sapien
tgtcctttaattgaacctcctagtg

SEQ ID NO: 5666587 - DNA, 25 bp, Homo sapien
tttaattgaacctcctagtggtctc

SEQ ID NO: 5666588 - DNA, 25 bp, Homo sapien
tcttgtcctttaattgaacctccta

SEQ ID NO: 5666589 - DNA, 25 bp, Homo sapien
ctttaattgaacctcctagtggtct

SEQ ID NO: 5666590 - DNA, 25 bp, Homo sapien
gtggtctctatagttgaccctgcag

SEQ ID NO: 5666591 - DNA, 25 bp, Homo sapien
actgcagggtcaactatagagacca

SEQ ID NO: 5666592 - DNA, 25 bp, Homo sapien
ctaggaggttcaattaaaggacaag

SEQ ID NO: 5666593 - DNA, 25 bp, Homo sapien
taggaggttcaattaaaggacaaga

SEQ ID NO: 5666594 - DNA, 25 bp, Homo sapien
cactaggaggttcaattaaaggaca

SEQ ID NO: 5666595 - DNA, 25 bp, Homo sapien
gagaccactaggaggttcaattaaa

SEQ ID NO: 5666596 - DNA, 25 bp, Homo sapien
ctgcagggtcaactatagagaccac

SEQ ID NO: 5666597 - DNA, 25 bp, Homo sapien
cataggttcacctaagacctgtcac

SEQ ID NO: 5666598 - DNA, 25 bp, Homo sapien
caccctttaggtacttcctgcatag

SEQ ID NO: 5666599 - DNA, 25 bp, Homo sapien
cctaagacctgtcactactacttgc

SEQ ID NO: 5666600 - DNA, 25 bp, Homo sapien
taccatctgggggtggatacaaggt

SEQ ID NO: 5666601 - DNA, 25 bp, Homo sapien
gatacaaggtctgtcataggttcac

SEQ ID NO: 5666602 - DNA, 25 bp, Homo sapien
tatcaccctttaggtacttcctgca

SEQ ID NO: 5666603 - DNA, 25 bp, Homo sapien
taggtgaacctatgacagaccttgt

SEQ ID NO: 5666604 - DNA, 25 bp, Homo sapien
tagtgacaggtcttaggtgaaccta

SEQ ID NO: 5666605 - DNA, 25 bp, Homo sapien
gcaagtagtagtgacaggtcttagg

SEQ ID NO: 5666606 - DNA, 25 bp, Homo sapien
gaccttgtatccacccccagatggt

SEQ ID NO: 5666607 - DNA, 25 bp, Homo sapien
tatgcaggaagtacctaaagggtga

SEQ ID NO: 5666608 - DNA, 25 bp, Homo sapien
gaacctatgacagaccttgtatcca

SEQ ID NO: 5666609 - DNA, 25 bp, Homo sapien
ccaggctggtgaatcacttcaggtc

SEQ ID NO: 5666610 - DNA, 25 bp, Homo sapien
caggctggtgaatcacttcaggtca

SEQ ID NO: 5666611 - DNA, 25 bp, Homo sapien
gcccaggctggtgaatcacttcagg

SEQ ID NO: 5666612 - DNA, 25 bp, Homo sapien
cccaggctggtgaatcacttcaggt

SEQ ID NO: 5666613 - DNA, 25 bp, Homo sapien
aggctggtgaatcacttcaggtcag

SEQ ID NO: 5666614 - DNA, 25 bp, Homo sapien
tgacctgaagtgattcaccagcctg

SEQ ID NO: 5666615 - DNA, 25 bp, Homo sapien
cctgaagtgattcaccagcctgggc

SEQ ID NO: 5666616 - DNA, 25 bp, Homo sapien
ctgacctgaagtgattcaccagcct

SEQ ID NO: 5666617 - DNA, 25 bp, Homo sapien
gacctgaagtgattcaccagcctgg

SEQ ID NO: 5666618 - DNA, 25 bp, Homo sapien
acctgaagtgattcaccagcctggg

SEQ ID NO: 5666619 - DNA, 25 bp, Homo sapien
ttgaaggtgagcagactagagacta

SEQ ID NO: 5666620 - DNA, 25 bp, Homo sapien
gaaggtgagcagactagagactagt

SEQ ID NO: 5666621 - DNA, 25 bp, Homo sapien
caagactttattgtacagttgaagg

SEQ ID NO: 5666622 - DNA, 25 bp, Homo sapien
cagttgaaggtgagcagactagaga

SEQ ID NO: 5666623 - DNA, 25 bp, Homo sapien
ggtgagcagactagagactagttta

SEQ ID NO: 5666624 - DNA, 25 bp, Homo sapien
ctagagactagtttattaccctggg

SEQ ID NO: 5666625 - DNA, 25 bp, Homo sapien
tctctagtctgctcaccttcaactg

SEQ ID NO: 5666626 - DNA, 25 bp, Homo sapien
cccagggtaataaactagtctctag

SEQ ID NO: 5666627 - DNA, 25 bp, Homo sapien
ccttcaactgtacaataaagtcttg

SEQ ID NO: 5666628 - DNA, 25 bp, Homo sapien
tagtctctagtctgctcaccttcaa

SEQ ID NO: 5666629 - DNA, 25 bp, Homo sapien
taaactagtctctagtctgctcacc

SEQ ID NO: 5666630 - DNA, 25 bp, Homo sapien
taataaactagtctctagtctgctc

SEQ ID NO: 5666631 - DNA, 25 bp, Homo sapien
cctaagaagtagaacctgggcatgt

SEQ ID NO: 5666632 - DNA, 25 bp, Homo sapien
acctgggcatgttttaagctctctg

SEQ ID NO: 5666633 - DNA, 25 bp, Homo sapien
gtgttctttgatatggattgctctc

SEQ ID NO: 5666634 - DNA, 25 bp, Homo sapien
gggcatgttttaagctctctggttc

SEQ ID NO: 5666635 - DNA, 25 bp, Homo sapien
ctaggtttattatatccttatacct

SEQ ID NO: 5666636 - DNA, 25 bp, Homo sapien
tatacctaagaagtagaacctgggc

SEQ ID NO: 5666637 - DNA, 25 bp, Homo sapien
gaaccagagagcttaaaacatgccc

SEQ ID NO: 5666638 - DNA, 25 bp, Homo sapien
aggtataaggatataataaacctag

SEQ ID NO: 5666639 - DNA, 25 bp, Homo sapien
cagagagcttaaaacatgcccaggt

SEQ ID NO: 5666640 - DNA, 25 bp, Homo sapien
gagagcaatccatatcaaagaacac

SEQ ID NO: 5666641 - DNA, 25 bp, Homo sapien
acatgcccaggttctacttcttagg

SEQ ID NO: 5666642 - DNA, 25 bp, Homo sapien
gcccaggttctacttcttaggtata

SEQ ID NO: 5666643 - DNA, 25 bp, Homo sapien
cgaatgattgggcttcacctatctg

SEQ ID NO: 5666644 - DNA, 25 bp, Homo sapien
ggcttcacctatctgttatctccta

SEQ ID NO: 5666645 - DNA, 25 bp, Homo sapien
catatgatagtcgaatgattgggct

SEQ ID NO: 5666646 - DNA, 25 bp, Homo sapien
gataggtggagatcaatttcctgag

SEQ ID NO: 5666647 - DNA, 25 bp, Homo sapien
cacgctggagatggagcatatgata

SEQ ID NO: 5666648 - DNA, 25 bp, Homo sapien
gagatcaatttcctgagcacgctgg

SEQ ID NO: 5666649 - DNA, 25 bp, Homo sapien
tccagcgtgctcaggaaattgatct

SEQ ID NO: 5666650 - DNA, 25 bp, Homo sapien
taggagataacagataggtgaagcc

SEQ ID NO: 5666651 - DNA, 25 bp, Homo sapien
caatcattcgactatcatatgctcc

SEQ ID NO: 5666652 - DNA, 25 bp, Homo sapien
ctcaggaaattgatctccacctatc

SEQ ID NO: 5666653 - DNA, 25 bp, Homo sapien
cagataggtgaagcccaatcattcg

SEQ ID NO: 5666654 - DNA, 25 bp, Homo sapien
tatcatatgctccatctccagcgtg

SEQ ID NO: 5666655 - DNA, 25 bp, Homo sapien
taaggccactagcatgattatagcg

SEQ ID NO: 5666656 - DNA, 25 bp, Homo sapien
gcgtacttcccatgtgcagtgtaac

SEQ ID NO: 5666657 - DNA, 25 bp, Homo sapien
gattatagcgtacttcccatgtgca

SEQ ID NO: 5666658 - DNA, 25 bp, Homo sapien
tagcatgattatagcgtacttccca

SEQ ID NO: 5666659 - DNA, 25 bp, Homo sapien
aaaacttaaggccactagcatgatt

SEQ ID NO: 5666660 - DNA, 25 bp, Homo sapien
tatagcgtacttcccatgtgcagtg

SEQ ID NO: 5666661 - DNA, 25 bp, Homo sapien
tacgctataatcatgctagtggcct

SEQ ID NO: 5666662 - DNA, 25 bp, Homo sapien
gttacactgcacatgggaagtacgc

SEQ ID NO: 5666663 - DNA, 25 bp, Homo sapien
gcacatgggaagtacgctataatca

SEQ ID NO: 5666664 - DNA, 25 bp, Homo sapien
tataatcatgctagtggccttaagt

SEQ ID NO: 5666665 - DNA, 25 bp, Homo sapien
cactgcacatgggaagtacgctata

SEQ ID NO: 5666666 - DNA, 25 bp, Homo sapien
tgggaagtacgctataatcatgcta

SEQ ID NO: 5666667 - DNA, 25 bp, Homo sapien
tgtattttagcagagaccgggtttc

SEQ ID NO: 5666668 - DNA, 25 bp, Homo sapien
gcgcctgccactatgcccggctaat

SEQ ID NO: 5666669 - DNA, 25 bp, Homo sapien
acaggcgcctgccactatgcccggc

SEQ ID NO: 5666670 - DNA, 25 bp, Homo sapien
caggcgcctgccactatgcccggct

SEQ ID NO: 5666671 - DNA, 25 bp, Homo sapien
cctgccactatgcccggctaatttt

SEQ ID NO: 5666672 - DNA, 25 bp, Homo sapien
cgcctgccactatgcccggctaatt

SEQ ID NO: 5666673 - DNA, 25 bp, Homo sapien
aattagccgggcatagtggcaggcg

SEQ ID NO: 5666674 - DNA, 25 bp, Homo sapien
gccgggcatagtggcaggcgcctgt

SEQ ID NO: 5666675 - DNA, 25 bp, Homo sapien
agccgggcatagtggcaggcgcctg

SEQ ID NO: 5666676 - DNA, 25 bp, Homo sapien
aaaattagccgggcatagtggcagg

SEQ ID NO: 5666677 - DNA, 25 bp, Homo sapien
gaaacccggtctctgctaaaataca

SEQ ID NO: 5666678 - DNA, 25 bp, Homo sapien
attagccgggcatagtggcaggcgc

SEQ ID NO: 5666679 - DNA, 25 bp, Homo sapien
caaattagaatatagggcctgggtg

SEQ ID NO: 5666680 - DNA, 25 bp, Homo sapien
gagtctcagggtagcaaattagaat

SEQ ID NO: 5666681 - DNA, 25 bp, Homo sapien
gcaaattagaatatagggcctgggt

SEQ ID NO: 5666682 - DNA, 25 bp, Homo sapien
aattagaatatagggcctgggtgca

SEQ ID NO: 5666683 - DNA, 25 bp, Homo sapien
aaattagaatatagggcctgggtgc

SEQ ID NO: 5666684 - DNA, 25 bp, Homo sapien
gtctcagggtagcaaattagaatat

SEQ ID NO: 5666685 - DNA, 25 bp, Homo sapien
attctaatttgctaccctgagactc

SEQ ID NO: 5666686 - DNA, 25 bp, Homo sapien
tattctaatttgctaccctgagact

SEQ ID NO: 5666687 - DNA, 25 bp, Homo sapien
cacccaggccctatattctaatttg

SEQ ID NO: 5666688 - DNA, 25 bp, Homo sapien
acccaggccctatattctaatttgc

SEQ ID NO: 5666689 - DNA, 25 bp, Homo sapien
tgcacccaggccctatattctaatt

SEQ ID NO: 5666690 - DNA, 25 bp, Homo sapien
atattctaatttgctaccctgagac

SEQ ID NO: 5666691 - DNA, 25 bp, Homo sapien
gcaatggcatgatcttggtcactgc

SEQ ID NO: 5666692 - DNA, 25 bp, Homo sapien
tgtttgtttgtttttttgagatgga

SEQ ID NO: 5666693 - DNA, 25 bp, Homo sapien
ttgtttgtttttttgagatggagtc

SEQ ID NO: 5666694 - DNA, 25 bp, Homo sapien
ttgctcttgtcgcccaggctggagt

SEQ ID NO: 5666695 - DNA, 25 bp, Homo sapien
gactccatctcaaaaaaacaaacaa

SEQ ID NO: 5666696 - DNA, 25 bp, Homo sapien
tccatctcaaaaaaacaaacaaaca

SEQ ID NO: 5666697 - DNA, 25 bp, Homo sapien
gcagtgaccaagatcatgccattgc

SEQ ID NO: 5666698 - DNA, 25 bp, Homo sapien
actccagcctgggcgacaagagcaa

SEQ ID NO: 5666699 - DNA, 25 bp, Homo sapien
ttttcctgggagacagagtctccct

SEQ ID NO: 5666700 - DNA, 25 bp, Homo sapien
tttttcctgggagacagagtctccc

SEQ ID NO: 5666701 - DNA, 25 bp, Homo sapien
tgagccaccacgcctggcctttttt

SEQ ID NO: 5666702 - DNA, 25 bp, Homo sapien
gggagactctgtctcccaggaaaaa

SEQ ID NO: 5666703 - DNA, 25 bp, Homo sapien
agggagactctgtctcccaggaaaa

SEQ ID NO: 5666704 - DNA, 25 bp, Homo sapien
aaaaaaggccaggcgtggtggctca

SEQ ID NO: 5666705 - DNA, 25 bp, Homo sapien
cccagctggtttttgtatatttagt

SEQ ID NO: 5666706 - DNA, 25 bp, Homo sapien
aagcgtgtaccaccacacccagctg

SEQ ID NO: 5666707 - DNA, 25 bp, Homo sapien
acaagcgtgtaccaccacacccagc

SEQ ID NO: 5666708 - DNA, 25 bp, Homo sapien
caagcgtgtaccaccacacccagct

SEQ ID NO: 5666709 - DNA, 25 bp, Homo sapien
acccagctggtttttgtatatttag

SEQ ID NO: 5666710 - DNA, 25 bp, Homo sapien
cacccagctggtttttgtatattta

SEQ ID NO: 5666711 - DNA, 25 bp, Homo sapien
taaatatacaaaaaccagctgggtg

SEQ ID NO: 5666712 - DNA, 25 bp, Homo sapien
gctgggtgtggtggtacacgcttgt

SEQ ID NO: 5666713 - DNA, 25 bp, Homo sapien
agctgggtgtggtggtacacgcttg

SEQ ID NO: 5666714 - DNA, 25 bp, Homo sapien
cagctgggtgtggtggtacacgctt

SEQ ID NO: 5666715 - DNA, 25 bp, Homo sapien
ctaaatatacaaaaaccagctgggt

SEQ ID NO: 5666716 - DNA, 25 bp, Homo sapien
actaaatatacaaaaaccagctggg

SEQ ID NO: 5666717 - DNA, 25 bp, Homo sapien
caagcccacctttgacgacttgctt

SEQ ID NO: 5666718 - DNA, 25 bp, Homo sapien
agcccacctttgacgacttgctttt

SEQ ID NO: 5666719 - DNA, 25 bp, Homo sapien
aagcccacctttgacgacttgcttt

SEQ ID NO: 5666720 - DNA, 25 bp, Homo sapien
ccaagcccacctttgacgacttgct

SEQ ID NO: 5666721 - DNA, 25 bp, Homo sapien
aagcaagtcgtcaaaggtgggcttg

SEQ ID NO: 5666722 - DNA, 25 bp, Homo sapien
aaaagcaagtcgtcaaaggtgggct

SEQ ID NO: 5666723 - DNA, 25 bp, Homo sapien
agcaagtcgtcaaaggtgggcttgg

SEQ ID NO: 5666724 - DNA, 25 bp, Homo sapien
aaagcaagtcgtcaaaggtgggctt

SEQ ID NO: 5666725 - DNA, 25 bp, Homo sapien
caagcccacctttgacgacttgctt

SEQ ID NO: 5666726 - DNA, 25 bp, Homo sapien
cttgcttttttaaaattcagatact

SEQ ID NO: 5666727 - DNA, 25 bp, Homo sapien
cagatacttttataaaaggcctctt

SEQ ID NO: 5666728 - DNA, 25 bp, Homo sapien
agcccacctttgacgacttgctttt

SEQ ID NO: 5666729 - DNA, 25 bp, Homo sapien
aagcccacctttgacgacttgcttt

SEQ ID NO: 5666730 - DNA, 25 bp, Homo sapien
tgacgacttgcttttttaaaattca

SEQ ID NO: 5666731 - DNA, 25 bp, Homo sapien
aagaggccttttataaaagtatctg

SEQ ID NO: 5666732 - DNA, 25 bp, Homo sapien
aagcaagtcgtcaaaggtgggcttg

SEQ ID NO: 5666733 - DNA, 25 bp, Homo sapien
tgaattttaaaaaagcaagtcgtca

SEQ ID NO: 5666734 - DNA, 25 bp, Homo sapien
agtatctgaattttaaaaaagcaag

SEQ ID NO: 5666735 - DNA, 25 bp, Homo sapien
aaaagcaagtcgtcaaaggtgggct

SEQ ID NO: 5666736 - DNA, 25 bp, Homo sapien
aaagcaagtcgtcaaaggtgggctt

SEQ ID NO: 5666737 - DNA, 25 bp, Homo sapien
gtgctcatgccacttaggttgtgct

SEQ ID NO: 5666738 - DNA, 25 bp, Homo sapien
tggatttgatccctgatcagaccaa

SEQ ID NO: 5666739 - DNA, 25 bp, Homo sapien
gccacttaggttgtgctagtgcaat

SEQ ID NO: 5666740 - DNA, 25 bp, Homo sapien
gatccctgatcagaccaattacctg

SEQ ID NO: 5666741 - DNA, 25 bp, Homo sapien
gatcagaccaattacctgtgatcca

SEQ ID NO: 5666742 - DNA, 25 bp, Homo sapien
taggttgtgctagtgcaatttttct

SEQ ID NO: 5666743 - DNA, 25 bp, Homo sapien
ttggatcacaggtaattggtctgat

SEQ ID NO: 5666744 - DNA, 25 bp, Homo sapien
tagcacaacctaagtggcatgagca

SEQ ID NO: 5666745 - DNA, 25 bp, Homo sapien
aattgcactagcacaacctaagtgg

SEQ ID NO: 5666746 - DNA, 25 bp, Homo sapien
gaaaaattgcactagcacaacctaa

SEQ ID NO: 5666747 - DNA, 25 bp, Homo sapien
cacaggtaattggtctgatcaggga

SEQ ID NO: 5666748 - DNA, 25 bp, Homo sapien
ttggtctgatcagggatcaaatcca

SEQ ID NO: 5666749 - DNA, 25 bp, Homo sapien
aaggtgggaattggaagctgcctgc

SEQ ID NO: 5666750 - DNA, 25 bp, Homo sapien
aaacccaaaactcattctgttcttg

SEQ ID NO: 5666751 - DNA, 25 bp, Homo sapien
aggtgggaattggaagctgcctgca

SEQ ID NO: 5666752 - DNA, 25 bp, Homo sapien
gaaggtgggaattggaagctgcctg

SEQ ID NO: 5666753 - DNA, 25 bp, Homo sapien
ggaaggtgggaattggaagctgcct

SEQ ID NO: 5666754 - DNA, 25 bp, Homo sapien
tgggaaggtgggaattggaagctgc

SEQ ID NO: 5666755 - DNA, 25 bp, Homo sapien
aggcagcttccaattcccaccttcc

SEQ ID NO: 5666756 - DNA, 25 bp, Homo sapien
cagcttccaattcccaccttcccaa

SEQ ID NO: 5666757 - DNA, 25 bp, Homo sapien
tgcaggcagcttccaattcccacct

SEQ ID NO: 5666758 - DNA, 25 bp, Homo sapien
gcaggcagcttccaattcccacctt

SEQ ID NO: 5666759 - DNA, 25 bp, Homo sapien
caggcagcttccaattcccaccttc

SEQ ID NO: 5666760 - DNA, 25 bp, Homo sapien
caagaacagaatgagttttgggttt

SEQ ID NO: 5666761 - DNA, 25 bp, Homo sapien
aaggtgggaattggaagctgcctgc

SEQ ID NO: 5666762 - DNA, 25 bp, Homo sapien
aaacccaaaactcattctgttcttg

SEQ ID NO: 5666763 - DNA, 25 bp, Homo sapien
cattctgttcttgggaaggtgggaa

SEQ ID NO: 5666764 - DNA, 25 bp, Homo sapien
caaaactcattctgttcttgggaag

SEQ ID NO: 5666765 - DNA, 25 bp, Homo sapien
aactcattctgttcttgggaaggtg

SEQ ID NO: 5666766 - DNA, 25 bp, Homo sapien
tgggaattggaagctgcctgcagag

SEQ ID NO: 5666767 - DNA, 25 bp, Homo sapien
caccttcccaagaacagaatgagtt

SEQ ID NO: 5666768 - DNA, 25 bp, Homo sapien
tgcaggcagcttccaattcccacct

SEQ ID NO: 5666769 - DNA, 25 bp, Homo sapien
ttcccaccttcccaagaacagaatg

SEQ ID NO: 5666770 - DNA, 25 bp, Homo sapien
ccttcccaagaacagaatgagtttt

SEQ ID NO: 5666771 - DNA, 25 bp, Homo sapien
gcaggcagcttccaattcccacctt

SEQ ID NO: 5666772 - DNA, 25 bp, Homo sapien
caagaacagaatgagttttgggttt

SEQ ID NO: 5666773 - DNA, 25 bp, Homo sapien
gttgctacccactagttcagtctag

SEQ ID NO: 5666774 - DNA, 25 bp, Homo sapien
tgtgggctctgttgctacccactag

SEQ ID NO: 5666775 - DNA, 25 bp, Homo sapien
tgggctctgttgctacccactagtt

SEQ ID NO: 5666776 - DNA, 25 bp, Homo sapien
tctgttgctacccactagttcagtc

SEQ ID NO: 5666777 - DNA, 25 bp, Homo sapien
tggggtcttctacccctggcccatg

SEQ ID NO: 5666778 - DNA, 25 bp, Homo sapien
ggctctgttgctacccactagttca

SEQ ID NO: 5666779 - DNA, 25 bp, Homo sapien
gactgaactagtgggtagcaacaga

SEQ ID NO: 5666780 - DNA, 25 bp, Homo sapien
ctagactgaactagtgggtagcaac

SEQ ID NO: 5666781 - DNA, 25 bp, Homo sapien
catgggccaggggtagaagacccca

SEQ ID NO: 5666782 - DNA, 25 bp, Homo sapien
ctagtgggtagcaacagagcccaca

SEQ ID NO: 5666783 - DNA, 25 bp, Homo sapien
aactagtgggtagcaacagagccca

SEQ ID NO: 5666784 - DNA, 25 bp, Homo sapien
tgaactagtgggtagcaacagagcc

SEQ ID NO: 5666785 - DNA, 25 bp, Homo sapien
tgatgtacctttaccatttattgga

SEQ ID NO: 5666786 - DNA, 25 bp, Homo sapien
tattggatacttaccatgggtcagg

SEQ ID NO: 5666787 - DNA, 25 bp, Homo sapien
tttccaagattaagaccatttgtca

SEQ ID NO: 5666788 - DNA, 25 bp, Homo sapien
catgggtcaggcaaaactcttctaa

SEQ ID NO: 5666789 - DNA, 25 bp, Homo sapien
taccatgggtcaggcaaaactcttc

SEQ ID NO: 5666790 - DNA, 25 bp, Homo sapien
tctggtgattgatgtacctttacca

SEQ ID NO: 5666791 - DNA, 25 bp, Homo sapien
ttagaagagttttgcctgacccatg

SEQ ID NO: 5666792 - DNA, 25 bp, Homo sapien
tccaataaatggtaaaggtacatca

SEQ ID NO: 5666793 - DNA, 25 bp, Homo sapien
tggtaaaggtacatcaatcaccaga

SEQ ID NO: 5666794 - DNA, 25 bp, Homo sapien
gcctgacccatggtaagtatccaat

SEQ ID NO: 5666795 - DNA, 25 bp, Homo sapien
tgacaaatggtcttaatcttggaaa

SEQ ID NO: 5666796 - DNA, 25 bp, Homo sapien
gaagagttttgcctgacccatggta

SEQ ID NO: 5666797 - DNA, 25 bp, Homo sapien
gaggagaaatggtaccttgtccgga

SEQ ID NO: 5666798 - DNA, 25 bp, Homo sapien
gataggaaactgataggctttaagt

SEQ ID NO: 5666799 - DNA, 25 bp, Homo sapien
tgattatggattgaggagaaatggt

SEQ ID NO: 5666800 - DNA, 25 bp, Homo sapien
taccttgtccggaggccaagatagg

SEQ ID NO: 5666801 - DNA, 25 bp, Homo sapien
gaaatggtaccttgtccggaggcca

SEQ ID NO: 5666802 - DNA, 25 bp, Homo sapien
gccaagataggaaactgataggctt

SEQ ID NO: 5666803 - DNA, 25 bp, Homo sapien
acttaaagcctatcagtttcctatc

SEQ ID NO: 5666804 - DNA, 25 bp, Homo sapien
tccggacaaggtaccatttctcctc

SEQ ID NO: 5666805 - DNA, 25 bp, Homo sapien
tcttggcctccggacaaggtaccat

SEQ ID NO: 5666806 - DNA, 25 bp, Homo sapien
taccatttctcctcaatccataatc

SEQ ID NO: 5666807 - DNA, 25 bp, Homo sapien
cctatcttggcctccggacaaggta

SEQ ID NO: 5666808 - DNA, 25 bp, Homo sapien
aagcctatcagtttcctatcttggc

SEQ ID NO: 5666809 - DNA, 25 bp, Homo sapien
atcatttccctagaaactgaaagac

SEQ ID NO: 5666810 - DNA, 25 bp, Homo sapien
tcatttccctagaaactgaaagact

SEQ ID NO: 5666811 - DNA, 25 bp, Homo sapien
acttgattctaaatggactgctttt

SEQ ID NO: 5666812 - DNA, 25 bp, Homo sapien
atgtatcatttccctagaaactgaa

SEQ ID NO: 5666813 - DNA, 25 bp, Homo sapien
gtctttcagtttctagggaaatgat

SEQ ID NO: 5666814 - DNA, 25 bp, Homo sapien
aaaagcagtccatttagaatcaagt

SEQ ID NO: 5666815 - DNA, 25 bp, Homo sapien
ttcagtttctagggaaatgatacat

SEQ ID NO: 5666816 - DNA, 25 bp, Homo sapien
agtctttcagtttctagggaaatga

SEQ ID NO: 5666817 - DNA, 25 bp, Homo sapien
aatggactgctttttaccaaggagg

SEQ ID NO: 5666818 - DNA, 25 bp, Homo sapien
gatacattttctgatcttccttgaa

SEQ ID NO: 5666819 - DNA, 25 bp, Homo sapien
tccctagaaactgaaagacttgatt

SEQ ID NO: 5666820 - DNA, 25 bp, Homo sapien
tcatttccctagaaactgaaagact

SEQ ID NO: 5666821 - DNA, 25 bp, Homo sapien
ccttgaatatgtatcatttccctag

SEQ ID NO: 5666822 - DNA, 25 bp, Homo sapien
acttgattctaaatggactgctttt

SEQ ID NO: 5666823 - DNA, 25 bp, Homo sapien
aaaagcagtccatttagaatcaagt

SEQ ID NO: 5666824 - DNA, 25 bp, Homo sapien
gaatcaagtctttcagtttctaggg

SEQ ID NO: 5666825 - DNA, 25 bp, Homo sapien
caaggaagatcagaaaatgtatctc

SEQ ID NO: 5666826 - DNA, 25 bp, Homo sapien
gcctccttggtaaaaagcagtccat

SEQ ID NO: 5666827 - DNA, 25 bp, Homo sapien
agtctttcagtttctagggaaatga

SEQ ID NO: 5666828 - DNA, 25 bp, Homo sapien
ctagggaaatgatacatattcaagg

SEQ ID NO: 5666829 - DNA, 25 bp, Homo sapien
tcttgtctggcaggcatagcctctt

SEQ ID NO: 5666830 - DNA, 25 bp, Homo sapien
tggttcttgtctggcaggcatagcc

SEQ ID NO: 5666831 - DNA, 25 bp, Homo sapien
aattgggttggttcttgtctggcag

SEQ ID NO: 5666832 - DNA, 25 bp, Homo sapien
taaattgggttggttcttgtctggc

SEQ ID NO: 5666833 - DNA, 25 bp, Homo sapien
ggttggttcttgtctggcaggcata

SEQ ID NO: 5666834 - DNA, 25 bp, Homo sapien
gtctggcaggcatagcctctttttt

SEQ ID NO: 5666835 - DNA, 25 bp, Homo sapien
aaaagaggctatgcctgccagacaa

SEQ ID NO: 5666836 - DNA, 25 bp, Homo sapien
aaaaaagaggctatgcctgccagac

SEQ ID NO: 5666837 - DNA, 25 bp, Homo sapien
gaggctatgcctgccagacaagaac

SEQ ID NO: 5666838 - DNA, 25 bp, Homo sapien
cagacaagaaccaacccaatttata

SEQ ID NO: 5666839 - DNA, 25 bp, Homo sapien
tgccagacaagaaccaacccaattt

SEQ ID NO: 5666840 - DNA, 25 bp, Homo sapien
gctatgcctgccagacaagaaccaa

SEQ ID NO: 5666841 - DNA, 25 bp, Homo sapien
tggcccagttgaaggtagagggaaa

SEQ ID NO: 5666842 - DNA, 25 bp, Homo sapien
tttccctctaccttcaactgggcca

SEQ ID NO: 5666843 - DNA, 25 bp, Homo sapien
aacaaggaggttaaatgactgtggc

SEQ ID NO: 5666844 - DNA, 25 bp, Homo sapien
gactcaagaacaaggaggttaaatg

SEQ ID NO: 5666845 - DNA, 25 bp, Homo sapien
tagaaaagccaacatcagcaagctg

SEQ ID NO: 5666846 - DNA, 25 bp, Homo sapien
aacatcagcaagctgtggaccaggg

SEQ ID NO: 5666847 - DNA, 25 bp, Homo sapien
tagagggaaaggactcaagaacaag

SEQ ID NO: 5666848 - DNA, 25 bp, Homo sapien
tggcccagttgaaggtagagggaaa

SEQ ID NO: 5666849 - DNA, 25 bp, Homo sapien
tgttcttgagtcctttccctctacc

SEQ ID NO: 5666850 - DNA, 25 bp, Homo sapien
ccctggtccacagcttgctgatgtt

SEQ ID NO: 5666851 - DNA, 25 bp, Homo sapien
tttccctctaccttcaactgggcca

SEQ ID NO: 5666852 - DNA, 25 bp, Homo sapien
gccacagtcatttaacctccttgtt

SEQ ID NO: 5666853 - DNA, 25 bp, Homo sapien
cacagcttgctgatgttggcttttc

SEQ ID NO: 5666854 - DNA, 25 bp, Homo sapien
catttaacctccttgttcttgagtc

SEQ ID NO: 5666855 - DNA, 25 bp, Homo sapien
gataatcattgattgtcttcttaca

SEQ ID NO: 5666856 - DNA, 25 bp, Homo sapien
ttcttacaagtagcgggctaaagac

SEQ ID NO: 5666857 - DNA, 25 bp, Homo sapien
ctttcagtgttaagggctttgctca

SEQ ID NO: 5666858 - DNA, 25 bp, Homo sapien
tgtcttcttacaagtagcgggctaa

SEQ ID NO: 5666859 - DNA, 25 bp, Homo sapien
gctttgctcagatgtctgataatca

SEQ ID NO: 5666860 - DNA, 25 bp, Homo sapien
tcccatctttcagtgttaagggctt

SEQ ID NO: 5666861 - DNA, 25 bp, Homo sapien
taacactgaaagatgggaaatcaaa

SEQ ID NO: 5666862 - DNA, 25 bp, Homo sapien
gaagacaatcaatgattatcagaca

SEQ ID NO: 5666863 - DNA, 25 bp, Homo sapien
tgagcaaagcccttaacactgaaag

SEQ ID NO: 5666864 - DNA, 25 bp, Homo sapien
tagcccgctacttgtaagaagacaa

SEQ ID NO: 5666865 - DNA, 25 bp, Homo sapien
gtctttagcccgctacttgtaagaa

SEQ ID NO: 5666866 - DNA, 25 bp, Homo sapien
gattatcagacatctgagcaaagcc

SEQ ID NO: 5666867 - DNA, 25 bp, Homo sapien
gttttagatattagacttacttgtc

SEQ ID NO: 5666868 - DNA, 25 bp, Homo sapien
cttgtctggtcttctataatttact

SEQ ID NO: 5666869 - DNA, 25 bp, Homo sapien
ttgtctggtcttctataatttactc

SEQ ID NO: 5666870 - DNA, 25 bp, Homo sapien
ttttagatattagacttacttgtct

SEQ ID NO: 5666871 - DNA, 25 bp, Homo sapien
tgtctggtcttctataatttactct

SEQ ID NO: 5666872 - DNA, 25 bp, Homo sapien
agtaaattatagaagaccagacaag

SEQ ID NO: 5666873 - DNA, 25 bp, Homo sapien
gacaagtaagtctaatatctaaaac

SEQ ID NO: 5666874 - DNA, 25 bp, Homo sapien
agagtaaattatagaagaccagaca

SEQ ID NO: 5666875 - DNA, 25 bp, Homo sapien
gagtaaattatagaagaccagacaa

SEQ ID NO: 5666876 - DNA, 25 bp, Homo sapien
agacaagtaagtctaatatctaaaa

SEQ ID NO: 5666877 - DNA, 25 bp, Homo sapien
gttttagatattagacttacttgtc

SEQ ID NO: 5666878 - DNA, 25 bp, Homo sapien
gacttacttgtctggtcttctataa

SEQ ID NO: 5666879 - DNA, 25 bp, Homo sapien
agatattagacttacttgtctggtc

SEQ ID NO: 5666880 - DNA, 25 bp, Homo sapien
actcctgggttttagatattagact

SEQ ID NO: 5666881 - DNA, 25 bp, Homo sapien
tctgttctttctgaaaactcctggg

SEQ ID NO: 5666882 - DNA, 25 bp, Homo sapien
tgtctggtcttctataatttactct

SEQ ID NO: 5666883 - DNA, 25 bp, Homo sapien
gaatttcgaagactgcactatggtc

SEQ ID NO: 5666884 - DNA, 25 bp, Homo sapien
gctgggaatacgattctaggataga

SEQ ID NO: 5666885 - DNA, 25 bp, Homo sapien
tacgattctaggatagaaataattt

SEQ ID NO: 5666886 - DNA, 25 bp, Homo sapien
gactgcactatggtcttccagtttg

SEQ ID NO: 5666887 - DNA, 25 bp, Homo sapien
tttatcagaatttcgaagactgcac

SEQ ID NO: 5666888 - DNA, 25 bp, Homo sapien
cactatggtcttccagtttggtaaa

SEQ ID NO: 5666889 - DNA, 25 bp, Homo sapien
aaattatttctatcctagaatcgta

SEQ ID NO: 5666890 - DNA, 25 bp, Homo sapien
gcagtcttcgaaattctgataaaaa

SEQ ID NO: 5666891 - DNA, 25 bp, Homo sapien
tttaccaaactggaagaccatagtg

SEQ ID NO: 5666892 - DNA, 25 bp, Homo sapien
catagtgcagtcttcgaaattctga

SEQ ID NO: 5666893 - DNA, 25 bp, Homo sapien
tctatcctagaatcgtattcccagc

SEQ ID NO: 5666894 - DNA, 25 bp, Homo sapien
caaactggaagaccatagtgcagtc

SEQ ID NO: 5666895 - DNA, 25 bp, Homo sapien
caggcgcacaccaccacgcctggct

SEQ ID NO: 5666896 - DNA, 25 bp, Homo sapien
aggcgcacaccaccacgcctggcta

SEQ ID NO: 5666897 - DNA, 25 bp, Homo sapien
ttacaggcgcacaccaccacgcctg

SEQ ID NO: 5666898 - DNA, 25 bp, Homo sapien
cagggtttcactatgttggccagac

SEQ ID NO: 5666899 - DNA, 25 bp, Homo sapien
attacaggcgcacaccaccacgcct

SEQ ID NO: 5666900 - DNA, 25 bp, Homo sapien
cactatgttggccagactggtctcg

SEQ ID NO: 5666901 - DNA, 25 bp, Homo sapien
gtctggccaacatagtgaaaccctg

SEQ ID NO: 5666902 - DNA, 25 bp, Homo sapien
cgagaccagtctggccaacatagtg

SEQ ID NO: 5666903 - DNA, 25 bp, Homo sapien
aggcgtggtggtgtgcgcctgtaat

SEQ ID NO: 5666904 - DNA, 25 bp, Homo sapien
agccaggcgtggtggtgtgcgcctg

SEQ ID NO: 5666905 - DNA, 25 bp, Homo sapien
tagccaggcgtggtggtgtgcgcct

SEQ ID NO: 5666906 - DNA, 25 bp, Homo sapien
ttagccaggcgtggtggtgtgcgcc

SEQ ID NO: 5666907 - DNA, 25 bp, Homo sapien
tatgggttgacttagcccaaatgtt

SEQ ID NO: 5666908 - DNA, 25 bp, Homo sapien
tgacttagcccaaatgtttatctcc

SEQ ID NO: 5666909 - DNA, 25 bp, Homo sapien
tgggttgacttagcccaaatgttta

SEQ ID NO: 5666910 - DNA, 25 bp, Homo sapien
tgtatgggttgacttagcccaaatg

SEQ ID NO: 5666911 - DNA, 25 bp, Homo sapien
tcccaacataaaaaacatacatgta

SEQ ID NO: 5666912 - DNA, 25 bp, Homo sapien
tagcacctaaaacttcccaacataa

SEQ ID NO: 5666913 - DNA, 25 bp, Homo sapien
ttatgttgggaagttttaggtgcta

SEQ ID NO: 5666914 - DNA, 25 bp, Homo sapien
catttgggctaagtcaacccataca

SEQ ID NO: 5666915 - DNA, 25 bp, Homo sapien
taaacatttgggctaagtcaaccca

SEQ ID NO: 5666916 - DNA, 25 bp, Homo sapien
agataaacatttgggctaagtcaac

SEQ ID NO: 5666917 - DNA, 25 bp, Homo sapien
tacatgtatgttttttatgttggga

SEQ ID NO: 5666918 - DNA, 25 bp, Homo sapien
ggagataaacatttgggctaagtca

SEQ ID NO: 5666919 - DNA, 25 bp, Homo sapien
atggaaattccaggcctaactttgg

SEQ ID NO: 5666920 - DNA, 25 bp, Homo sapien
aatgttgaatggaaattccaggcct

SEQ ID NO: 5666921 - DNA, 25 bp, Homo sapien
aatggaaattccaggcctaactttg

SEQ ID NO: 5666922 - DNA, 25 bp, Homo sapien
tgttgaatggaaattccaggcctaa

SEQ ID NO: 5666923 - DNA, 25 bp, Homo sapien
caggcctaactttgggactttatag

SEQ ID NO: 5666924 - DNA, 25 bp, Homo sapien
tgaatggaaattccaggcctaactt

SEQ ID NO: 5666925 - DNA, 25 bp, Homo sapien
ccaaagttaggcctggaatttccat

SEQ ID NO: 5666926 - DNA, 25 bp, Homo sapien
taggcctggaatttccattcaacat

SEQ ID NO: 5666927 - DNA, 25 bp, Homo sapien
caaagttaggcctggaatttccatt

SEQ ID NO: 5666928 - DNA, 25 bp, Homo sapien
gttaggcctggaatttccattcaac

SEQ ID NO: 5666929 - DNA, 25 bp, Homo sapien
ctataaagtcccaaagttaggcctg

SEQ ID NO: 5666930 - DNA, 25 bp, Homo sapien
aagttaggcctggaatttccattca

SEQ ID NO: 5666931 - DNA, 25 bp, Homo sapien
gagacttaaatattactttggatgg

SEQ ID NO: 5666932 - DNA, 25 bp, Homo sapien
ctttggatggtgaagacaagtttat

SEQ ID NO: 5666933 - DNA, 25 bp, Homo sapien
ttggatggtgaagacaagtttatgg

SEQ ID NO: 5666934 - DNA, 25 bp, Homo sapien
tattactttggatggtgaagacaag

SEQ ID NO: 5666935 - DNA, 25 bp, Homo sapien
gctggtttaagagacttaaatatta

SEQ ID NO: 5666936 - DNA, 25 bp, Homo sapien
gctggtaactgtgggtttctttgcc

SEQ ID NO: 5666937 - DNA, 25 bp, Homo sapien
tgtcttcaccatccaaagtaatatt

SEQ ID NO: 5666938 - DNA, 25 bp, Homo sapien
taatatttaagtctcttaaaccagc

SEQ ID NO: 5666939 - DNA, 25 bp, Homo sapien
taaacttgtcttcaccatccaaagt

SEQ ID NO: 5666940 - DNA, 25 bp, Homo sapien
ggcaaagaaacccacagttaccagc

SEQ ID NO: 5666941 - DNA, 25 bp, Homo sapien
ccatccaaagtaatatttaagtctc

SEQ ID NO: 5666942 - DNA, 25 bp, Homo sapien
ccataaacttgtcttcaccatccaa

SEQ ID NO: 5666943 - DNA, 25 bp, Homo sapien
gaactggtgagtcacttgagtagtg

SEQ ID NO: 5666944 - DNA, 25 bp, Homo sapien
gagtcacttgagtagtgtgtaaacc

SEQ ID NO: 5666945 - DNA, 25 bp, Homo sapien
tccgggaactggtgagtcacttgag

SEQ ID NO: 5666946 - DNA, 25 bp, Homo sapien
taaaccacctttgagcaatttggct

SEQ ID NO: 5666947 - DNA, 25 bp, Homo sapien
acctttgagcaatttggctgtgtga

SEQ ID NO: 5666948 - DNA, 25 bp, Homo sapien
tagtgtgtaaaccacctttgagcaa

SEQ ID NO: 5666949 - DNA, 25 bp, Homo sapien
tggtttacacactactcaagtgact

SEQ ID NO: 5666950 - DNA, 25 bp, Homo sapien
ctcaagtgactcaccagttcccgga

SEQ ID NO: 5666951 - DNA, 25 bp, Homo sapien
cacactactcaagtgactcaccagt

SEQ ID NO: 5666952 - DNA, 25 bp, Homo sapien
cacagccaaattgctcaaaggtggt

SEQ ID NO: 5666953 - DNA, 25 bp, Homo sapien
caaattgctcaaaggtggtttacac

SEQ ID NO: 5666954 - DNA, 25 bp, Homo sapien
tcacacagccaaattgctcaaaggt

SEQ ID NO: 5666955 - DNA, 25 bp, Homo sapien
aatggcagtcctcgggggcaagttc

SEQ ID NO: 5666956 - DNA, 25 bp, Homo sapien
tgaactgggaatggcagtcctcggg

SEQ ID NO: 5666957 - DNA, 25 bp, Homo sapien
ttgaactgggaatggcagtcctcgg

SEQ ID NO: 5666958 - DNA, 25 bp, Homo sapien
tttgaactgggaatggcagtcctcg

SEQ ID NO: 5666959 - DNA, 25 bp, Homo sapien
tggcagtcctcgggggcaagttcac

SEQ ID NO: 5666960 - DNA, 25 bp, Homo sapien
atggcagtcctcgggggcaagttca

SEQ ID NO: 5666961 - DNA, 25 bp, Homo sapien
tgaacttgcccccgaggactgccat

SEQ ID NO: 5666962 - DNA, 25 bp, Homo sapien
ccgaggactgccattcccagttcaa

SEQ ID NO: 5666963 - DNA, 25 bp, Homo sapien
gtgaacttgcccccgaggactgcca

SEQ ID NO: 5666964 - DNA, 25 bp, Homo sapien
cccgaggactgccattcccagttca

SEQ ID NO: 5666965 - DNA, 25 bp, Homo sapien
cgaggactgccattcccagttcaaa

SEQ ID NO: 5666966 - DNA, 25 bp, Homo sapien
gaacttgcccccgaggactgccatt

SEQ ID NO: 5666967 - DNA, 25 bp, Homo sapien
tcatttcacagtctgagacttgcag

SEQ ID NO: 5666968 - DNA, 25 bp, Homo sapien
gagacttgcagtgtggaaatcccag

SEQ ID NO: 5666969 - DNA, 25 bp, Homo sapien
ctcatttcacagtctgagacttgca

SEQ ID NO: 5666970 - DNA, 25 bp, Homo sapien
aatcccagagctagaatttgaactg

SEQ ID NO: 5666971 - DNA, 25 bp, Homo sapien
tttgaactgggaatggcagtcctcg

SEQ ID NO: 5666972 - DNA, 25 bp, Homo sapien
tctcatttcacagtctgagacttgc

SEQ ID NO: 5666973 - DNA, 25 bp, Homo sapien
aagtctcagactgtgaaatgagagg

SEQ ID NO: 5666974 - DNA, 25 bp, Homo sapien
ctgcaagtctcagactgtgaaatga

SEQ ID NO: 5666975 - DNA, 25 bp, Homo sapien
tgcaagtctcagactgtgaaatgag

SEQ ID NO: 5666976 - DNA, 25 bp, Homo sapien
gcaagtctcagactgtgaaatgaga

SEQ ID NO: 5666977 - DNA, 25 bp, Homo sapien
cgaggactgccattcccagttcaaa

SEQ ID NO: 5666978 - DNA, 25 bp, Homo sapien
tctgggatttccacactgcaagtct

SEQ ID NO: 5666979 - DNA, 25 bp, Homo sapien
tgcttctgacttaaagcttaaactg

SEQ ID NO: 5666980 - DNA, 25 bp, Homo sapien
tgcccttgtccgcagtctatcactg

SEQ ID NO: 5666981 - DNA, 25 bp, Homo sapien
cactgctggtattaattgggcagga

SEQ ID NO: 5666982 - DNA, 25 bp, Homo sapien
gctggtattaattgggcaggaggcc

SEQ ID NO: 5666983 - DNA, 25 bp, Homo sapien
tgtccgcagtctatcactgctggta

SEQ ID NO: 5666984 - DNA, 25 bp, Homo sapien
ctatcactgctggtattaattgggc

SEQ ID NO: 5666985 - DNA, 25 bp, Homo sapien
gcccaattaataccagcagtgatag

SEQ ID NO: 5666986 - DNA, 25 bp, Homo sapien
taataccagcagtgatagactgcgg

SEQ ID NO: 5666987 - DNA, 25 bp, Homo sapien
cagtttaagctttaagtcagaagca

SEQ ID NO: 5666988 - DNA, 25 bp, Homo sapien
taccagcagtgatagactgcggaca

SEQ ID NO: 5666989 - DNA, 25 bp, Homo sapien
tcctgcccaattaataccagcagtg

SEQ ID NO: 5666990 - DNA, 25 bp, Homo sapien
cagtgatagactgcggacaagggca

SEQ ID NO: 5666991 - DNA, 25 bp, Homo sapien
gatacctgacagctcgaagctatga

SEQ ID NO: 5666992 - DNA, 25 bp, Homo sapien
gcctccagtgtctatctgggtcctc

SEQ ID NO: 5666993 - DNA, 25 bp, Homo sapien
tctgtcccctagtgacaggatacct

SEQ ID NO: 5666994 - DNA, 25 bp, Homo sapien
gacaggatacctgacagctcgaagc

SEQ ID NO: 5666995 - DNA, 25 bp, Homo sapien
cctgacagctcgaagctatgactga

SEQ ID NO: 5666996 - DNA, 25 bp, Homo sapien
tctgtctgtcccctagtgacaggat

SEQ ID NO: 5666997 - DNA, 25 bp, Homo sapien
gaggacccagatagacactggaggc

SEQ ID NO: 5666998 - DNA, 25 bp, Homo sapien
tatcctgtcactaggggacagacag

SEQ ID NO: 5666999 - DNA, 25 bp, Homo sapien
tcagtcatagcttcgagctgtcagg

SEQ ID NO: 5667000 - DNA, 25 bp, Homo sapien
gcttcgagctgtcaggtatcctgtc

SEQ ID NO: 5667001 - DNA, 25 bp, Homo sapien
tcatagcttcgagctgtcaggtatc

SEQ ID NO: 5667002 - DNA, 25 bp, Homo sapien
tagcttcgagctgtcaggtatcctg

SEQ ID NO: 5667003 - DNA, 25 bp, Homo sapien
gaattgcaggtttagaaggtgaccc

SEQ ID NO: 5667004 - DNA, 25 bp, Homo sapien
tcctacttccctggctttgaggacc

SEQ ID NO: 5667005 - DNA, 25 bp, Homo sapien
aattgcaggtttagaaggtgaccct

SEQ ID NO: 5667006 - DNA, 25 bp, Homo sapien
agggtcaccttctaaacctgcaatt

SEQ ID NO: 5667007 - DNA, 25 bp, Homo sapien
gggtcaccttctaaacctgcaattc

SEQ ID NO: 5667008 - DNA, 25 bp, Homo sapien
ggtcctcaaagccagggaagtagga

SEQ ID NO: 5667009 - DNA, 25 bp, Homo sapien
aaagtcactgttgtcctcataagtt

SEQ ID NO: 5667010 - DNA, 25 bp, Homo sapien
cctcataagttagataaactgtctc

SEQ ID NO: 5667011 - DNA, 25 bp, Homo sapien
ttagataaactgtctctatctaggg

SEQ ID NO: 5667012 - DNA, 25 bp, Homo sapien
tgtcctcataagttagataaactgt

SEQ ID NO: 5667013 - DNA, 25 bp, Homo sapien
cactgttgtcctcataagttagata

SEQ ID NO: 5667014 - DNA, 25 bp, Homo sapien
tgtctctatctaggggaagttgtct

SEQ ID NO: 5667015 - DNA, 25 bp, Homo sapien
taacttatgaggacaacagtgactt

SEQ ID NO: 5667016 - DNA, 25 bp, Homo sapien
gacaacttcccctagatagagacag

SEQ ID NO: 5667017 - DNA, 25 bp, Homo sapien
gacagtttatctaacttatgaggac

SEQ ID NO: 5667018 - DNA, 25 bp, Homo sapien
taaaagacaacttcccctagataga

SEQ ID NO: 5667019 - DNA, 25 bp, Homo sapien
ttcccctagatagagacagtttatc

SEQ ID NO: 5667020 - DNA, 25 bp, Homo sapien
tatctaacttatgaggacaacagtg

SEQ ID NO: 5667021 - DNA, 25 bp, Homo sapien
agcagtagaacccttgggcaccagg

SEQ ID NO: 5667022 - DNA, 25 bp, Homo sapien
cctggtgcccaagggttctactgct

SEQ ID NO: 5667023 - DNA, 25 bp, Homo sapien
ggatgtccaagcctacactccaggt

SEQ ID NO: 5667024 - DNA, 25 bp, Homo sapien
atgtccaagcctacactccaggtct

SEQ ID NO: 5667025 - DNA, 25 bp, Homo sapien
aatggccctaactgattggatgtcc

SEQ ID NO: 5667026 - DNA, 25 bp, Homo sapien
tattaatggccctaactgattggat

SEQ ID NO: 5667027 - DNA, 25 bp, Homo sapien
tggtagctattaatggccctaactg

SEQ ID NO: 5667028 - DNA, 25 bp, Homo sapien
gattggatgtccaagcctacactcc

SEQ ID NO: 5667029 - DNA, 25 bp, Homo sapien
acctggagtgtaggcttggacatcc

SEQ ID NO: 5667030 - DNA, 25 bp, Homo sapien
agacctggagtgtaggcttggacat

SEQ ID NO: 5667031 - DNA, 25 bp, Homo sapien
cagttagggccattaatagctacca

SEQ ID NO: 5667032 - DNA, 25 bp, Homo sapien
tccaatcagttagggccattaatag

SEQ ID NO: 5667033 - DNA, 25 bp, Homo sapien
ggacatccaatcagttagggccatt

SEQ ID NO: 5667034 - DNA, 25 bp, Homo sapien
gagtgtaggcttggacatccaatca

SEQ ID NO: 5667035 - DNA, 25 bp, Homo sapien
ggcaatttgggataagttttggcac

SEQ ID NO: 5667036 - DNA, 25 bp, Homo sapien
caatttgggataagttttggcacgt

SEQ ID NO: 5667037 - DNA, 25 bp, Homo sapien
tggcacgttaccagggttgggcact

SEQ ID NO: 5667038 - DNA, 25 bp, Homo sapien
tgggataagttttggcacgttacca

SEQ ID NO: 5667039 - DNA, 25 bp, Homo sapien
tttggcacgttaccagggttgggca

SEQ ID NO: 5667040 - DNA, 25 bp, Homo sapien
ttggcacgttaccagggttgggcac

SEQ ID NO: 5667041 - DNA, 25 bp, Homo sapien
tggtaacgtgccaaaacttatccca

SEQ ID NO: 5667042 - DNA, 25 bp, Homo sapien
agtgcccaaccctggtaacgtgcca

SEQ ID NO: 5667043 - DNA, 25 bp, Homo sapien
acgtgccaaaacttatcccaaattg

SEQ ID NO: 5667044 - DNA, 25 bp, Homo sapien
tgccaaaacttatcccaaattgcca

SEQ ID NO: 5667045 - DNA, 25 bp, Homo sapien
tgcccaaccctggtaacgtgccaaa

SEQ ID NO: 5667046 - DNA, 25 bp, Homo sapien
gtgcccaaccctggtaacgtgccaa

SEQ ID NO: 5667047 - DNA, 25 bp, Homo sapien
tgcttaaaagtctctttcaacccca

SEQ ID NO: 5667048 - DNA, 25 bp, Homo sapien
gacccacacattggatgcagtggat

SEQ ID NO: 5667049 - DNA, 25 bp, Homo sapien
aaggagacccacacattggatgcag

SEQ ID NO: 5667050 - DNA, 25 bp, Homo sapien
ggagacccacacattggatgcagtg

SEQ ID NO: 5667051 - DNA, 25 bp, Homo sapien
taaaggagacccacacattggatgc

SEQ ID NO: 5667052 - DNA, 25 bp, Homo sapien
gagacccacacattggatgcagtgg

SEQ ID NO: 5667053 - DNA, 25 bp, Homo sapien
atccactgcatccaatgtgtgggtc

SEQ ID NO: 5667054 - DNA, 25 bp, Homo sapien
cactgcatccaatgtgtgggtctcc

SEQ ID NO: 5667055 - DNA, 25 bp, Homo sapien
gcatccaatgtgtgggtctccttta

SEQ ID NO: 5667056 - DNA, 25 bp, Homo sapien
tccactgcatccaatgtgtgggtct

SEQ ID NO: 5667057 - DNA, 25 bp, Homo sapien
tggggttgaaagagacttttaagca

SEQ ID NO: 5667058 - DNA, 25 bp, Homo sapien
ctgcatccaatgtgtgggtctcctt

SEQ ID NO: 5667059 - DNA, 25 bp, Homo sapien
ggcagactttgacttcacaatgaag

SEQ ID NO: 5667060 - DNA, 25 bp, Homo sapien
cttcattgtgaagtcaaagtctgcc

SEQ ID NO: 5667061 - DNA, 25 bp, Homo sapien
gaactcaatagagctgtctgaaaat

SEQ ID NO: 5667062 - DNA, 25 bp, Homo sapien
gaatgagctgccttagagaattata

SEQ ID NO: 5667063 - DNA, 25 bp, Homo sapien
ggcagactttgacttcacaatgaag

SEQ ID NO: 5667064 - DNA, 25 bp, Homo sapien
tgtctgaaaatagaatgagctgcct

SEQ ID NO: 5667065 - DNA, 25 bp, Homo sapien
gttcagggaggcagactttgacttc

SEQ ID NO: 5667066 - DNA, 25 bp, Homo sapien
tcacaatgaagaactcaatagagct

SEQ ID NO: 5667067 - DNA, 25 bp, Homo sapien
gaagtcaaagtctgcctccctgaac

SEQ ID NO: 5667068 - DNA, 25 bp, Homo sapien
tctattttcagacagctctattgag

SEQ ID NO: 5667069 - DNA, 25 bp, Homo sapien
gctctattgagttcttcattgtgaa

SEQ ID NO: 5667070 - DNA, 25 bp, Homo sapien
cttcattgtgaagtcaaagtctgcc

SEQ ID NO: 5667071 - DNA, 25 bp, Homo sapien
ggaatttataattctctaaggcagc

SEQ ID NO: 5667072 - DNA, 25 bp, Homo sapien
tctaaggcagctcattctattttca

SEQ ID NO: 5667073 - DNA, 25 bp, Homo sapien
gaaggaatgggaattagcctagaga

SEQ ID NO: 5667074 - DNA, 25 bp, Homo sapien
gacatattaaaggttgatgatatgg

SEQ ID NO: 5667075 - DNA, 25 bp, Homo sapien
acatattaaaggttgatgatatgga

SEQ ID NO: 5667076 - DNA, 25 bp, Homo sapien
taagacatattaaaggttgatgata

SEQ ID NO: 5667077 - DNA, 25 bp, Homo sapien
aggaatgggaattagcctagagaag

SEQ ID NO: 5667078 - DNA, 25 bp, Homo sapien
ggaatgggaattagcctagagaaga

SEQ ID NO: 5667079 - DNA, 25 bp, Homo sapien
tatcatcaacctttaatatgtctta

SEQ ID NO: 5667080 - DNA, 25 bp, Homo sapien
tcttctctaggctaattcccattcc

SEQ ID NO: 5667081 - DNA, 25 bp, Homo sapien
tctctaggctaattcccattccttc

SEQ ID NO: 5667082 - DNA, 25 bp, Homo sapien
cttctctaggctaattcccattcct

SEQ ID NO: 5667083 - DNA, 25 bp, Homo sapien
catatcatcaacctttaatatgtct

SEQ ID NO: 5667084 - DNA, 25 bp, Homo sapien
tccatatcatcaacctttaatatgt

SEQ ID NO: 5667085 - DNA, 25 bp, Homo sapien
tatcatcaacctttaatatgtctta

SEQ ID NO: 5667086 - DNA, 25 bp, Homo sapien
gaatctctaacttttcttctctagg

SEQ ID NO: 5667087 - DNA, 25 bp, Homo sapien
tcttctctaggctaattcccattcc

SEQ ID NO: 5667088 - DNA, 25 bp, Homo sapien
tgtcttaaacaagttatagaatctc

SEQ ID NO: 5667089 - DNA, 25 bp, Homo sapien
tctctaggctaattcccattccttc

SEQ ID NO: 5667090 - DNA, 25 bp, Homo sapien
agacttctctcttccatatcatcaa

SEQ ID NO: 5667091 - DNA, 25 bp, Homo sapien
taactatcattcttcctaagtactt

SEQ ID NO: 5667092 - DNA, 25 bp, Homo sapien
aagtacttcagtactcgggggcagg

SEQ ID NO: 5667093 - DNA, 25 bp, Homo sapien
cagggggtgtagagtagcttgggtc

SEQ ID NO: 5667094 - DNA, 25 bp, Homo sapien
actatcattcttcctaagtacttca

SEQ ID NO: 5667095 - DNA, 25 bp, Homo sapien
taagtacttcagtactcgggggcag

SEQ ID NO: 5667096 - DNA, 25 bp, Homo sapien
ttaactatcattcttcctaagtact

SEQ ID NO: 5667097 - DNA, 25 bp, Homo sapien
cctgcccccgagtactgaagtactt

SEQ ID NO: 5667098 - DNA, 25 bp, Homo sapien
tgcccccgagtactgaagtacttag

SEQ ID NO: 5667099 - DNA, 25 bp, Homo sapien
agtacttaggaagaatgatagttaa

SEQ ID NO: 5667100 - DNA, 25 bp, Homo sapien
tgaagtacttaggaagaatgatagt

SEQ ID NO: 5667101 - DNA, 25 bp, Homo sapien
gaagtacttaggaagaatgatagtt

SEQ ID NO: 5667102 - DNA, 25 bp, Homo sapien
agacccaagctactctacaccccct

SEQ ID NO: 5667103 - DNA, 25 bp, Homo sapien
gtgtagagtagcttgggtctttttc

SEQ ID NO: 5667104 - DNA, 25 bp, Homo sapien
aagtacttcagtactcgggggcagg

SEQ ID NO: 5667105 - DNA, 25 bp, Homo sapien
tcttcctaagtacttcagtactcgg

SEQ ID NO: 5667106 - DNA, 25 bp, Homo sapien
actatcattcttcctaagtacttca

SEQ ID NO: 5667107 - DNA, 25 bp, Homo sapien
ttaactatcattcttcctaagtact

SEQ ID NO: 5667108 - DNA, 25 bp, Homo sapien
agagtagcttgggtctttttcttag

SEQ ID NO: 5667109 - DNA, 25 bp, Homo sapien
cctgcccccgagtactgaagtactt

SEQ ID NO: 5667110 - DNA, 25 bp, Homo sapien
ctaagaaaaagacccaagctactct

SEQ ID NO: 5667111 - DNA, 25 bp, Homo sapien
agtacttaggaagaatgatagttaa

SEQ ID NO: 5667112 - DNA, 25 bp, Homo sapien
tgaagtacttaggaagaatgatagt

SEQ ID NO: 5667113 - DNA, 25 bp, Homo sapien
gaaaaagacccaagctactctacac

SEQ ID NO: 5667114 - DNA, 25 bp, Homo sapien
cccgagtactgaagtacttaggaag

SEQ ID NO: 5667115 - DNA, 25 bp, Homo sapien
aagagaaaattaggccatggtcact

SEQ ID NO: 5667116 - DNA, 25 bp, Homo sapien
tgattagactgtgtaccttgggttt

SEQ ID NO: 5667117 - DNA, 25 bp, Homo sapien
aaattaggccatggtcactaggctg

SEQ ID NO: 5667118 - DNA, 25 bp, Homo sapien
ttaggccatggtcactaggctgtgt

SEQ ID NO: 5667119 - DNA, 25 bp, Homo sapien
gaaaattaggccatggtcactaggc

SEQ ID NO: 5667120 - DNA, 25 bp, Homo sapien
tagactgtgtaccttgggttttgtg

SEQ ID NO: 5667121 - DNA, 25 bp, Homo sapien
cagcctagtgaccatggcctaattt

SEQ ID NO: 5667122 - DNA, 25 bp, Homo sapien
cctagtgaccatggcctaattttct

SEQ ID NO: 5667123 - DNA, 25 bp, Homo sapien
aaacccaaggtacacagtctaatca

SEQ ID NO: 5667124 - DNA, 25 bp, Homo sapien
acacagcctagtgaccatggcctaa

SEQ ID NO: 5667125 - DNA, 25 bp, Homo sapien
agtgaccatggcctaattttctctt

SEQ ID NO: 5667126 - DNA, 25 bp, Homo sapien
cacaaaacccaaggtacacagtcta

SEQ ID NO: 5667127 - DNA, 25 bp, Homo sapien
tgggagcatccctttcaaggaaaac

SEQ ID NO: 5667128 - DNA, 25 bp, Homo sapien
gaagattataatcaggctgggagca

SEQ ID NO: 5667129 - DNA, 25 bp, Homo sapien
tgactcaggcatgaagattataatc

SEQ ID NO: 5667130 - DNA, 25 bp, Homo sapien
ggctgggagcatccctttcaaggaa

SEQ ID NO: 5667131 - DNA, 25 bp, Homo sapien
tgccaagcagttgggttgctcttca

SEQ ID NO: 5667132 - DNA, 25 bp, Homo sapien
gggttgctcttcatctgactcaggc

SEQ ID NO: 5667133 - DNA, 25 bp, Homo sapien
gattataatcttcatgcctgagtca

SEQ ID NO: 5667134 - DNA, 25 bp, Homo sapien
gaagagcaacccaactgcttggcaa

SEQ ID NO: 5667135 - DNA, 25 bp, Homo sapien
tgagtcagatgaagagcaacccaac

SEQ ID NO: 5667136 - DNA, 25 bp, Homo sapien
catgcctgagtcagatgaagagcaa

SEQ ID NO: 5667137 - DNA, 25 bp, Homo sapien
ttttccttgaaagggatgctcccag

SEQ ID NO: 5667138 - DNA, 25 bp, Homo sapien
tgctcccagcctgattataatcttc

SEQ ID NO: 5667139 - DNA, 25 bp, Homo sapien
gtgggctgagactgatgctgttcag

SEQ ID NO: 5667140 - DNA, 25 bp, Homo sapien
tgtgggctgagactgatgctgttca

SEQ ID NO: 5667141 - DNA, 25 bp, Homo sapien
gaagtgagtcacattggctactggt

SEQ ID NO: 5667142 - DNA, 25 bp, Homo sapien
aagtgagtcacattggctactggtg

SEQ ID NO: 5667143 - DNA, 25 bp, Homo sapien
tgaacagcatcagtctcagcccaca

SEQ ID NO: 5667144 - DNA, 25 bp, Homo sapien
caccagtagccaatgtgactcactt

SEQ ID NO: 5667145 - DNA, 25 bp, Homo sapien
accagtagccaatgtgactcacttc

SEQ ID NO: 5667146 - DNA, 25 bp, Homo sapien
ctgaacagcatcagtctcagcccac

SEQ ID NO: 5667147 - DNA, 25 bp, Homo sapien
actttgtggtttctctaactgatga

SEQ ID NO: 5667148 - DNA, 25 bp, Homo sapien
ctttgtggtttctctaactgatgag

SEQ ID NO: 5667149 - DNA, 25 bp, Homo sapien
cacctgagcatttctcccactccag

SEQ ID NO: 5667150 - DNA, 25 bp, Homo sapien
acctgagcatttctcccactccagg

SEQ ID NO: 5667151 - DNA, 25 bp, Homo sapien
ctggagtgggagaaatgctcaggtg

SEQ ID NO: 5667152 - DNA, 25 bp, Homo sapien
cctggagtgggagaaatgctcaggt

SEQ ID NO: 5667153 - DNA, 25 bp, Homo sapien
tcatcagttagagaaaccacaaagt

SEQ ID NO: 5667154 - DNA, 25 bp, Homo sapien
ctcatcagttagagaaaccacaaag

SEQ ID NO: 5667155 - DNA, 25 bp, Homo sapien
actttgtggtttctctaactgatga

SEQ ID NO: 5667156 - DNA, 25 bp, Homo sapien
tgaggtggcacctgagcatttctcc

SEQ ID NO: 5667157 - DNA, 25 bp, Homo sapien
gaggtggcacctgacataactgatg

SEQ ID NO: 5667158 - DNA, 25 bp, Homo sapien
tctaactgatgaggtggcacctgac

SEQ ID NO: 5667159 - DNA, 25 bp, Homo sapien
gagcatttctcccactccagggcag

SEQ ID NO: 5667160 - DNA, 25 bp, Homo sapien
cctgacataactgatgaggtggcac

SEQ ID NO: 5667161 - DNA, 25 bp, Homo sapien
aacaccctgccctggagtgggagaa

SEQ ID NO: 5667162 - DNA, 25 bp, Homo sapien
tcatcagttatgtcaggtgccacct

SEQ ID NO: 5667163 - DNA, 25 bp, Homo sapien
caggtgccacctcatcagttagaga

SEQ ID NO: 5667164 - DNA, 25 bp, Homo sapien
tcatcagttagagaaaccacaaagt

SEQ ID NO: 5667165 - DNA, 25 bp, Homo sapien
ggagaaatgctcaggtgccacctca

SEQ ID NO: 5667166 - DNA, 25 bp, Homo sapien
ctgccctggagtgggagaaatgctc

SEQ ID NO: 5667167 - DNA, 25 bp, Homo sapien
gaattatcgcgcactctggattgct

SEQ ID NO: 5667168 - DNA, 25 bp, Homo sapien
tatcgcgcactctggattgcttgga

SEQ ID NO: 5667169 - DNA, 25 bp, Homo sapien
gattgcttggagtcagtggaactta

SEQ ID NO: 5667170 - DNA, 25 bp, Homo sapien
gcgcactctggattgcttggagtca

SEQ ID NO: 5667171 - DNA, 25 bp, Homo sapien
ctctggaattatcgcgcactctgga

SEQ ID NO: 5667172 - DNA, 25 bp, Homo sapien
gctctggaattatcgcgcactctgg

SEQ ID NO: 5667173 - DNA, 25 bp, Homo sapien
cagagtgcgcgataattccagagca

SEQ ID NO: 5667174 - DNA, 25 bp, Homo sapien
taagttccactgactccaagcaatc

SEQ ID NO: 5667175 - DNA, 25 bp, Homo sapien
tccaagcaatccagagtgcgcgata

SEQ ID NO: 5667176 - DNA, 25 bp, Homo sapien
gcaatccagagtgcgcgataattcc

SEQ ID NO: 5667177 - DNA, 25 bp, Homo sapien
tccagagtgcgcgataattccagag

SEQ ID NO: 5667178 - DNA, 25 bp, Homo sapien
tgactccaagcaatccagagtgcgc

SEQ ID NO: 5667179 - DNA, 25 bp, Homo sapien
cctaatccccttgggttatctgtgt

SEQ ID NO: 5667180 - DNA, 25 bp, Homo sapien
ctaatccccttgggttatctgtgtt

SEQ ID NO: 5667181 - DNA, 25 bp, Homo sapien
atgacagaagtaatatattatagct

SEQ ID NO: 5667182 - DNA, 25 bp, Homo sapien
tcctaatccccttgggttatctgtg

SEQ ID NO: 5667183 - DNA, 25 bp, Homo sapien
cacagataacccaaggggattagga

SEQ ID NO: 5667184 - DNA, 25 bp, Homo sapien
aacacagataacccaaggggattag

SEQ ID NO: 5667185 - DNA, 25 bp, Homo sapien
agctataatatattacttctgtcat

SEQ ID NO: 5667186 - DNA, 25 bp, Homo sapien
acacagataacccaaggggattagg

SEQ ID NO: 5667187 - DNA, 25 bp, Homo sapien
tgtgtttcctgagtattccactgca

SEQ ID NO: 5667188 - DNA, 25 bp, Homo sapien
tcctaatccccttgggttatctgtg

SEQ ID NO: 5667189 - DNA, 25 bp, Homo sapien
gcatcttatatttattatgacagaa

SEQ ID NO: 5667190 - DNA, 25 bp, Homo sapien
cctgagtattccactgcatcttata

SEQ ID NO: 5667191 - DNA, 25 bp, Homo sapien
gacagaagtaatatattatagctgc

SEQ ID NO: 5667192 - DNA, 25 bp, Homo sapien
cccttgggttatctgtgtttcctga

SEQ ID NO: 5667193 - DNA, 25 bp, Homo sapien
taaagatgcagctataatatattac

SEQ ID NO: 5667194 - DNA, 25 bp, Homo sapien
tcataataaatataagatgcagtgg

SEQ ID NO: 5667195 - DNA, 25 bp, Homo sapien
tcaggaaacacagataacccaaggg

SEQ ID NO: 5667196 - DNA, 25 bp, Homo sapien
gcagctataatatattacttctgtc

SEQ ID NO: 5667197 - DNA, 25 bp, Homo sapien
tataagatgcagtggaatactcagg

SEQ ID NO: 5667198 - DNA, 25 bp, Homo sapien
gatgcagtggaatactcaggaaaca

SEQ ID NO: 5667199 - DNA, 25 bp, Homo sapien
caggcctcatcagacaatataacat

SEQ ID NO: 5667200 - DNA, 25 bp, Homo sapien
tccctcagtatatattcaggcctca

SEQ ID NO: 5667201 - DNA, 25 bp, Homo sapien
acaatataacattacctctgaagag

SEQ ID NO: 5667202 - DNA, 25 bp, Homo sapien
gacaatataacattacctctgaaga

SEQ ID NO: 5667203 - DNA, 25 bp, Homo sapien
tccctccctcagtatatattcaggc

SEQ ID NO: 5667204 - DNA, 25 bp, Homo sapien
cagtatatattcaggcctcatcaga

SEQ ID NO: 5667205 - DNA, 25 bp, Homo sapien
tgatgaggcctgaatatatactgag

SEQ ID NO: 5667206 - DNA, 25 bp, Homo sapien
gaggcctgaatatatactgagggag

SEQ ID NO: 5667207 - DNA, 25 bp, Homo sapien
tctgatgaggcctgaatatatactg

SEQ ID NO: 5667208 - DNA, 25 bp, Homo sapien
tcttcagaggtaatgttatattgtc

SEQ ID NO: 5667209 - DNA, 25 bp, Homo sapien
aatgttatattgtctgatgaggcct

SEQ ID NO: 5667210 - DNA, 25 bp, Homo sapien
gcctgaatatatactgagggaggga

SEQ ID NO: 5667211 - DNA, 25 bp, Homo sapien
gaaacttgctgggtaagcatatggt

SEQ ID NO: 5667212 - DNA, 25 bp, Homo sapien
tgcttatatagagtgtcccatgtgt

SEQ ID NO: 5667213 - DNA, 25 bp, Homo sapien
acttgctgggtaagcatatggtggt

SEQ ID NO: 5667214 - DNA, 25 bp, Homo sapien
aataattgcttatatagagtgtccc

SEQ ID NO: 5667215 - DNA, 25 bp, Homo sapien
tgaagagtctctgactaagtgttgg

SEQ ID NO: 5667216 - DNA, 25 bp, Homo sapien
gctcaaggaataattgcttatatag

SEQ ID NO: 5667217 - DNA, 25 bp, Homo sapien
ctatataagcaattattccttgagc

SEQ ID NO: 5667218 - DNA, 25 bp, Homo sapien
cacatgggacactctatataagcaa

SEQ ID NO: 5667219 - DNA, 25 bp, Homo sapien
ccaacacttagtcagagactcttca

SEQ ID NO: 5667220 - DNA, 25 bp, Homo sapien
accaccatatgcttacccagcaagt

SEQ ID NO: 5667221 - DNA, 25 bp, Homo sapien
aacacttagtcagagactcttcaga

SEQ ID NO: 5667222 - DNA, 25 bp, Homo sapien
accatatgcttacccagcaagtttc

SEQ ID NO: 5667223 - DNA, 25 bp, Homo sapien
ctgcacgaagggtaagctggggttt

SEQ ID NO: 5667224 - DNA, 25 bp, Homo sapien
agcctgcacgaagggtaagctgggg

SEQ ID NO: 5667225 - DNA, 25 bp, Homo sapien
gcctgcacgaagggtaagctggggt

SEQ ID NO: 5667226 - DNA, 25 bp, Homo sapien
taagctggggttttctgattgtagc

SEQ ID NO: 5667227 - DNA, 25 bp, Homo sapien
aagctggggttttctgattgtagca

SEQ ID NO: 5667228 - DNA, 25 bp, Homo sapien
cctgcacgaagggtaagctggggtt

SEQ ID NO: 5667229 - DNA, 25 bp, Homo sapien
ttgatcacccgtgctatctctggcc

SEQ ID NO: 5667230 - DNA, 25 bp, Homo sapien
gaaggattgatcacccgtgctatct

SEQ ID NO: 5667231 - DNA, 25 bp, Homo sapien
ttgaaggattgatcacccgtgctat

SEQ ID NO: 5667232 - DNA, 25 bp, Homo sapien
tgttgaaggattgatcacccgtgct

SEQ ID NO: 5667233 - DNA, 25 bp, Homo sapien
gattgatcacccgtgctatctctgg

SEQ ID NO: 5667234 - DNA, 25 bp, Homo sapien
cactgttgaaggattgatcacccgt

SEQ ID NO: 5667235 - DNA, 25 bp, Homo sapien
tagcacgggtgatcaatccttcaac

SEQ ID NO: 5667236 - DNA, 25 bp, Homo sapien
gcacgggtgatcaatccttcaacag

SEQ ID NO: 5667237 - DNA, 25 bp, Homo sapien
gagatagcacgggtgatcaatcctt

SEQ ID NO: 5667238 - DNA, 25 bp, Homo sapien
gatagcacgggtgatcaatccttca

SEQ ID NO: 5667239 - DNA, 25 bp, Homo sapien
acgggtgatcaatccttcaacagtg

SEQ ID NO: 5667240 - DNA, 25 bp, Homo sapien
ggccagagatagcacgggtgatcaa

SEQ ID NO: 5667241 - DNA, 25 bp, Homo sapien
accccagcttacccttcgtgcaggc

SEQ ID NO: 5667242 - DNA, 25 bp, Homo sapien
tgctacaatcagaaaaccccagctt

SEQ ID NO: 5667243 - DNA, 25 bp, Homo sapien
aaccccagcttacccttcgtgcagg

SEQ ID NO: 5667244 - DNA, 25 bp, Homo sapien
gctacaatcagaaaaccccagctta

SEQ ID NO: 5667245 - DNA, 25 bp, Homo sapien
aaaccccagcttacccttcgtgcag

SEQ ID NO: 5667246 - DNA, 25 bp, Homo sapien
ccccagcttacccttcgtgcaggct

SEQ ID NO: 5667247 - DNA, 25 bp, Homo sapien
tcgtgcaggctggtcctgctccagg

SEQ ID NO: 5667248 - DNA, 25 bp, Homo sapien
tgctacaatcagaaaaccccagctt

SEQ ID NO: 5667249 - DNA, 25 bp, Homo sapien
gctacaatcagaaaaccccagctta

SEQ ID NO: 5667250 - DNA, 25 bp, Homo sapien
ccccagcttacccttcgtgcaggct

SEQ ID NO: 5667251 - DNA, 25 bp, Homo sapien
tccaggccagagatagcacgggtga

SEQ ID NO: 5667252 - DNA, 25 bp, Homo sapien
gatcaatccttcaacagtggtcaga

SEQ ID NO: 5667253 - DNA, 25 bp, Homo sapien
agagctgaggctaagtcacacttgt

SEQ ID NO: 5667254 - DNA, 25 bp, Homo sapien
gcagagctgaggctaagtcacactt

SEQ ID NO: 5667255 - DNA, 25 bp, Homo sapien
gagctgaggctaagtcacacttgtc

SEQ ID NO: 5667256 - DNA, 25 bp, Homo sapien
cagagctgaggctaagtcacacttg

SEQ ID NO: 5667257 - DNA, 25 bp, Homo sapien
acaagtgtgacttagcctcagctct

SEQ ID NO: 5667258 - DNA, 25 bp, Homo sapien
aagtgtgacttagcctcagctctgc

SEQ ID NO: 5667259 - DNA, 25 bp, Homo sapien
gacaagtgtgacttagcctcagctc

SEQ ID NO: 5667260 - DNA, 25 bp, Homo sapien
caagtgtgacttagcctcagctctg

SEQ ID NO: 5667261 - DNA, 25 bp, Homo sapien
agttcaagtgaattgcccagggtca

SEQ ID NO: 5667262 - DNA, 25 bp, Homo sapien
gcagagctgaggctaagtcacactt

SEQ ID NO: 5667263 - DNA, 25 bp, Homo sapien
gagctgaggctaagtcacacttgtc

SEQ ID NO: 5667264 - DNA, 25 bp, Homo sapien
aattgcccagggtcatacagggact

SEQ ID NO: 5667265 - DNA, 25 bp, Homo sapien
catacagggacttgatagcagagct

SEQ ID NO: 5667266 - DNA, 25 bp, Homo sapien
aattaagacccagagagttcaagtg

SEQ ID NO: 5667267 - DNA, 25 bp, Homo sapien
aagtgtgacttagcctcagctctgc

SEQ ID NO: 5667268 - DNA, 25 bp, Homo sapien
cacttgaactctctgggtcttaatt

SEQ ID NO: 5667269 - DNA, 25 bp, Homo sapien
tcagctctgctatcaagtccctgta

SEQ ID NO: 5667270 - DNA, 25 bp, Homo sapien
tatcaagtccctgtatgaccctggg

SEQ ID NO: 5667271 - DNA, 25 bp, Homo sapien
caaaagacaagtgtgacttagcctc

SEQ ID NO: 5667272 - DNA, 25 bp, Homo sapien
tgaccctgggcaattcacttgaact

SEQ ID NO: 5667273 - DNA, 25 bp, Homo sapien
tcactattatcagacatgaatggaa

SEQ ID NO: 5667274 - DNA, 25 bp, Homo sapien
tgaatggaaccttgcacctggcctt

SEQ ID NO: 5667275 - DNA, 25 bp, Homo sapien
gcatcactattatcagacatgaatg

SEQ ID NO: 5667276 - DNA, 25 bp, Homo sapien
atgaatggaaccttgcacctggcct

SEQ ID NO: 5667277 - DNA, 25 bp, Homo sapien
catcactattatcagacatgaatgg

SEQ ID NO: 5667278 - DNA, 25 bp, Homo sapien
gaatggaaccttgcacctggccttc

SEQ ID NO: 5667279 - DNA, 25 bp, Homo sapien
tagaattttagcatcactattatca

SEQ ID NO: 5667280 - DNA, 25 bp, Homo sapien
gtagaattttagcatcactattatc

SEQ ID NO: 5667281 - DNA, 25 bp, Homo sapien
gataatagtgatgctaaaattctac

SEQ ID NO: 5667282 - DNA, 25 bp, Homo sapien
tgataatagtgatgctaaaattcta

SEQ ID NO: 5667283 - DNA, 25 bp, Homo sapien
cattcatgtctgataatagtgatgc

SEQ ID NO: 5667284 - DNA, 25 bp, Homo sapien
gaaggccaggtgcaaggttccattc

SEQ ID NO: 5667285 - DNA, 25 bp, Homo sapien
ccattcatgtctgataatagtgatg

SEQ ID NO: 5667286 - DNA, 25 bp, Homo sapien
ttccattcatgtctgataatagtga

SEQ ID NO: 5667287 - DNA, 25 bp, Homo sapien
aggccaggtgcaaggttccattcat

SEQ ID NO: 5667288 - DNA, 25 bp, Homo sapien
aaggccaggtgcaaggttccattca

SEQ ID NO: 5667289 - DNA, 25 bp, Homo sapien
taggtaaaacagctcgagatggtag

SEQ ID NO: 5667290 - DNA, 25 bp, Homo sapien
taaaacagctcgagatggtagaaag

SEQ ID NO: 5667291 - DNA, 25 bp, Homo sapien
ggtagaaagtaatggtaataccata

SEQ ID NO: 5667292 - DNA, 25 bp, Homo sapien
catgagtggaaagcttaggtaaaac

SEQ ID NO: 5667293 - DNA, 25 bp, Homo sapien
gaaagcttaggtaaaacagctcgag

SEQ ID NO: 5667294 - DNA, 25 bp, Homo sapien
aacagctcgagatggtagaaagtaa

SEQ ID NO: 5667295 - DNA, 25 bp, Homo sapien
tagaattttagcatcactattatca

SEQ ID NO: 5667296 - DNA, 25 bp, Homo sapien
gtagaattttagcatcactattatc

SEQ ID NO: 5667297 - DNA, 25 bp, Homo sapien
gataatagtgatgctaaaattctac

SEQ ID NO: 5667298 - DNA, 25 bp, Homo sapien
tgataatagtgatgctaaaattcta

SEQ ID NO: 5667299 - DNA, 25 bp, Homo sapien
aacacactatggtattaccattact

SEQ ID NO: 5667300 - DNA, 25 bp, Homo sapien
taccatctcgagctgttttacctaa

SEQ ID NO: 5667301 - DNA, 25 bp, Homo sapien
tatggtattaccattactttctacc

SEQ ID NO: 5667302 - DNA, 25 bp, Homo sapien
gagctgttttacctaagctttccac

SEQ ID NO: 5667303 - DNA, 25 bp, Homo sapien
gttttacctaagctttccactcatg

SEQ ID NO: 5667304 - DNA, 25 bp, Homo sapien
tactttctaccatctcgagctgttt

SEQ ID NO: 5667305 - DNA, 25 bp, Homo sapien
cctggtgccaggtctagtggtttgt

SEQ ID NO: 5667306 - DNA, 25 bp, Homo sapien
tctttcttgcaaaaccccctggtgc

SEQ ID NO: 5667307 - DNA, 25 bp, Homo sapien
ctagtggtttgtgtatgggttctac

SEQ ID NO: 5667308 - DNA, 25 bp, Homo sapien
tgtgtatgggttctaccatgtaatc

SEQ ID NO: 5667309 - DNA, 25 bp, Homo sapien
tggtttgtgtatgggttctaccatg

SEQ ID NO: 5667310 - DNA, 25 bp, Homo sapien
tgccaggtctagtggtttgtgtatg

SEQ ID NO: 5667311 - DNA, 25 bp, Homo sapien
caccagggggttttgcaagaaagag

SEQ ID NO: 5667312 - DNA, 25 bp, Homo sapien
gattacatggtagaacccatacaca

SEQ ID NO: 5667313 - DNA, 25 bp, Homo sapien
catggtagaacccatacacaaacca

SEQ ID NO: 5667314 - DNA, 25 bp, Homo sapien
catacacaaaccactagacctggca

SEQ ID NO: 5667315 - DNA, 25 bp, Homo sapien
gtagaacccatacacaaaccactag

SEQ ID NO: 5667316 - DNA, 25 bp, Homo sapien
acaaaccactagacctggcaccagg

SEQ ID NO: 5667317 - DNA, 25 bp, Homo sapien
aggaggtaagtttaagatcagagta

SEQ ID NO: 5667318 - DNA, 25 bp, Homo sapien
ggaggtaagtttaagatcagagtat

SEQ ID NO: 5667319 - DNA, 25 bp, Homo sapien
atactctgatcttaaacttacctcc

SEQ ID NO: 5667320 - DNA, 25 bp, Homo sapien
tactctgatcttaaacttacctcct

SEQ ID NO: 5667321 - DNA, 25 bp, Homo sapien
tttaagatcagagtatttgggctgt

SEQ ID NO: 5667322 - DNA, 25 bp, Homo sapien
gatcagagtatttgggctgttcgca

SEQ ID NO: 5667323 - DNA, 25 bp, Homo sapien
ggaggtaagtttaagatcagagtat

SEQ ID NO: 5667324 - DNA, 25 bp, Homo sapien
cagaaaggaggtaagtttaagatca

SEQ ID NO: 5667325 - DNA, 25 bp, Homo sapien
actctgctgccacaaggattcctga

SEQ ID NO: 5667326 - DNA, 25 bp, Homo sapien
aagtttaagatcagagtatttgggc

SEQ ID NO: 5667327 - DNA, 25 bp, Homo sapien
tactctgatcttaaacttacctcct

SEQ ID NO: 5667328 - DNA, 25 bp, Homo sapien
caaatactctgatcttaaacttacc

SEQ ID NO: 5667329 - DNA, 25 bp, Homo sapien
acagcccaaatactctgatcttaaa

SEQ ID NO: 5667330 - DNA, 25 bp, Homo sapien
tgatcttaaacttacctcctttctg

SEQ ID NO: 5667331 - DNA, 25 bp, Homo sapien
tcaggaatccttgtggcagcagagt

SEQ ID NO: 5667332 - DNA, 25 bp, Homo sapien
tgcgaacagcccaaatactctgatc

SEQ ID NO: 5667333 - DNA, 25 bp, Homo sapien
tcctgagtgtgggaaccccataact

SEQ ID NO: 5667334 - DNA, 25 bp, Homo sapien
tgagtgtgggaaccccataactgtc

SEQ ID NO: 5667335 - DNA, 25 bp, Homo sapien
cccataactgtcttgtgggttagaa

SEQ ID NO: 5667336 - DNA, 25 bp, Homo sapien
ttctcgcctggtttaaatattgtcc

SEQ ID NO: 5667337 - DNA, 25 bp, Homo sapien
gtgggaaccccataactgtcttgtg

SEQ ID NO: 5667338 - DNA, 25 bp, Homo sapien
ttgtgggttagaatttagatggaag

SEQ ID NO: 5667339 - DNA, 25 bp, Homo sapien
ttctaacccacaagacagttatggg

SEQ ID NO: 5667340 - DNA, 25 bp, Homo sapien
gacaatatttaaaccaggcgagaaa

SEQ ID NO: 5667341 - DNA, 25 bp, Homo sapien
attctaacccacaagacagttatgg

SEQ ID NO: 5667342 - DNA, 25 bp, Homo sapien
agttatggggttcccacactcagga

SEQ ID NO: 5667343 - DNA, 25 bp, Homo sapien
ggacaatatttaaaccaggcgagaa

SEQ ID NO: 5667344 - DNA, 25 bp, Homo sapien
cttccatctaaattctaacccacaa

SEQ ID NO: 5667345 - DNA, 25 bp, Homo sapien
ctcaccttggccattagaaatgtaa

SEQ ID NO: 5667346 - DNA, 25 bp, Homo sapien
ctctcaccttggccattagaaatgt

SEQ ID NO: 5667347 - DNA, 25 bp, Homo sapien
tctcaccttggccattagaaatgta

SEQ ID NO: 5667348 - DNA, 25 bp, Homo sapien
tctctcaccttggccattagaaatg

SEQ ID NO: 5667349 - DNA, 25 bp, Homo sapien
ttacatttctaatggccaaggtgag

SEQ ID NO: 5667350 - DNA, 25 bp, Homo sapien
catttctaatggccaaggtgagaga

SEQ ID NO: 5667351 - DNA, 25 bp, Homo sapien
tacatttctaatggccaaggtgaga

SEQ ID NO: 5667352 - DNA, 25 bp, Homo sapien
acatttctaatggccaaggtgagag

SEQ ID NO: 5667353 - DNA, 25 bp, Homo sapien
ctcaccttggccattagaaatgtaa

SEQ ID NO: 5667354 - DNA, 25 bp, Homo sapien
ccttggccattagaaatgtaatgta

SEQ ID NO: 5667355 - DNA, 25 bp, Homo sapien
tctcaccttggccattagaaatgta

SEQ ID NO: 5667356 - DNA, 25 bp, Homo sapien
gccattagaaatgtaatgtagccag

SEQ ID NO: 5667357 - DNA, 25 bp, Homo sapien
caccttggccattagaaatgtaatg

SEQ ID NO: 5667358 - DNA, 25 bp, Homo sapien
ttagaaatgtaatgtagccaggcat

SEQ ID NO: 5667359 - DNA, 25 bp, Homo sapien
tttctaatggccaaggtgagagagg

SEQ ID NO: 5667360 - DNA, 25 bp, Homo sapien
atgcctggctacattacatttctaa

SEQ ID NO: 5667361 - DNA, 25 bp, Homo sapien
tacattacatttctaatggccaagg

SEQ ID NO: 5667362 - DNA, 25 bp, Homo sapien
ttacatttctaatggccaaggtgag

SEQ ID NO: 5667363 - DNA, 25 bp, Homo sapien
ggctacattacatttctaatggcca

SEQ ID NO: 5667364 - DNA, 25 bp, Homo sapien
tacatttctaatggccaaggtgaga

SEQ ID NO: 5667365 - DNA, 25 bp, Homo sapien
taaaagtgtcaaggctttgttcact

SEQ ID NO: 5667366 - DNA, 25 bp, Homo sapien
ttgttcactgaaaatggcattatga

SEQ ID NO: 5667367 - DNA, 25 bp, Homo sapien
aaagtgtcaaggctttgttcactga

SEQ ID NO: 5667368 - DNA, 25 bp, Homo sapien
ttctaaaagtgtcaaggctttgttc

SEQ ID NO: 5667369 - DNA, 25 bp, Homo sapien
ctaaaagtgtcaaggctttgttcac

SEQ ID NO: 5667370 - DNA, 25 bp, Homo sapien
tctaaaagtgtcaaggctttgttca

SEQ ID NO: 5667371 - DNA, 25 bp, Homo sapien
tcagtgaacaaagccttgacacttt

SEQ ID NO: 5667372 - DNA, 25 bp, Homo sapien
agtgaacaaagccttgacactttta

SEQ ID NO: 5667373 - DNA, 25 bp, Homo sapien
gaacaaagccttgacacttttagaa

SEQ ID NO: 5667374 - DNA, 25 bp, Homo sapien
gtgaacaaagccttgacacttttag

SEQ ID NO: 5667375 - DNA, 25 bp, Homo sapien
tcataatgccattttcagtgaacaa

SEQ ID NO: 5667376 - DNA, 25 bp, Homo sapien
tgaacaaagccttgacacttttaga

SEQ ID NO: 5667377 - DNA, 25 bp, Homo sapien
tatcaaagagacttactctcatgag

SEQ ID NO: 5667378 - DNA, 25 bp, Homo sapien
tcaatttttgcctttcacgtggact

SEQ ID NO: 5667379 - DNA, 25 bp, Homo sapien
actctcatgagtcaatttttgcctt

SEQ ID NO: 5667380 - DNA, 25 bp, Homo sapien
ctttcacgtggactggcctcagcat

SEQ ID NO: 5667381 - DNA, 25 bp, Homo sapien
ttcacgtggactggcctcagcatct

SEQ ID NO: 5667382 - DNA, 25 bp, Homo sapien
cagcatcttagatttaaatgtttta

SEQ ID NO: 5667383 - DNA, 25 bp, Homo sapien
aaggcaaaaattgactcatgagagt

SEQ ID NO: 5667384 - DNA, 25 bp, Homo sapien
agtccacgtgaaaggcaaaaattga

SEQ ID NO: 5667385 - DNA, 25 bp, Homo sapien
agatgctgaggccagtccacgtgaa

SEQ ID NO: 5667386 - DNA, 25 bp, Homo sapien
gatgctgaggccagtccacgtgaaa

SEQ ID NO: 5667387 - DNA, 25 bp, Homo sapien
taaaacatttaaatctaagatgctg

SEQ ID NO: 5667388 - DNA, 25 bp, Homo sapien
tcatgagagtaagtctctttgatag

SEQ ID NO: 5667389 - DNA, 25 bp, Homo sapien
tagatctgctttaaaagaggggaag

SEQ ID NO: 5667390 - DNA, 25 bp, Homo sapien
gatctgctttaaaagaggggaagca

SEQ ID NO: 5667391 - DNA, 25 bp, Homo sapien
gtaaatagatctgctttaaaagagg

SEQ ID NO: 5667392 - DNA, 25 bp, Homo sapien
taaatagatctgctttaaaagaggg

SEQ ID NO: 5667393 - DNA, 25 bp, Homo sapien
ggtaaatagatctgctttaaaagag

SEQ ID NO: 5667394 - DNA, 25 bp, Homo sapien
ctgctttaaaagaggggaagcagat

SEQ ID NO: 5667395 - DNA, 25 bp, Homo sapien
gcttcccctcttttaaagcagatct

SEQ ID NO: 5667396 - DNA, 25 bp, Homo sapien
tcccctcttttaaagcagatctatt

SEQ ID NO: 5667397 - DNA, 25 bp, Homo sapien
tcttttaaagcagatctatttacca

SEQ ID NO: 5667398 - DNA, 25 bp, Homo sapien
tgcttcccctcttttaaagcagatc

SEQ ID NO: 5667399 - DNA, 25 bp, Homo sapien
atctgcttcccctcttttaaagcag

SEQ ID NO: 5667400 - DNA, 25 bp, Homo sapien
ccctcttttaaagcagatctattta

SEQ ID NO: 5667401 - DNA, 25 bp, Homo sapien
aatagtgtctggtaaatagatctgc

SEQ ID NO: 5667402 - DNA, 25 bp, Homo sapien
ggggaagcagatctttgtaaacaga

SEQ ID NO: 5667403 - DNA, 25 bp, Homo sapien
tttcaaagaatcctagaacctctgc

SEQ ID NO: 5667404 - DNA, 25 bp, Homo sapien
gatctgctttaaaagaggggaagca

SEQ ID NO: 5667405 - DNA, 25 bp, Homo sapien
aacctctgcttttagaatagtgtct

SEQ ID NO: 5667406 - DNA, 25 bp, Homo sapien
taaatagatctgctttaaaagaggg

SEQ ID NO: 5667407 - DNA, 25 bp, Homo sapien
gcttcccctcttttaaagcagatct

SEQ ID NO: 5667408 - DNA, 25 bp, Homo sapien
gcagatctatttaccagacactatt

SEQ ID NO: 5667409 - DNA, 25 bp, Homo sapien
cagacactattctaaaagcagaggt

SEQ ID NO: 5667410 - DNA, 25 bp, Homo sapien
tcttttaaagcagatctatttacca

SEQ ID NO: 5667411 - DNA, 25 bp, Homo sapien
tctgcttcccctcttttaaagcaga

SEQ ID NO: 5667412 - DNA, 25 bp, Homo sapien
tctgtttacaaagatctgcttcccc

SEQ ID NO: 5667413 - DNA, 25 bp, Homo sapien
aatagttgaaaccattcttcttagc

SEQ ID NO: 5667414 - DNA, 25 bp, Homo sapien
cttagctgttgagtagtcaattgtg

SEQ ID NO: 5667415 - DNA, 25 bp, Homo sapien
cattcttcttagctgttgagtagtc

SEQ ID NO: 5667416 - DNA, 25 bp, Homo sapien
tcctgaaacctttatgccctggtta

SEQ ID NO: 5667417 - DNA, 25 bp, Homo sapien
gaaaccattcttcttagctgttgag

SEQ ID NO: 5667418 - DNA, 25 bp, Homo sapien
ctgaaacctttatgccctggttaat

SEQ ID NO: 5667419 - DNA, 25 bp, Homo sapien
gctaagaagaatggtttcaactatt

SEQ ID NO: 5667420 - DNA, 25 bp, Homo sapien
attaaccagggcataaaggtttcag

SEQ ID NO: 5667421 - DNA, 25 bp, Homo sapien
gactactcaacagctaagaagaatg

SEQ ID NO: 5667422 - DNA, 25 bp, Homo sapien
taaccagggcataaaggtttcagga

SEQ ID NO: 5667423 - DNA, 25 bp, Homo sapien
cacaattgactactcaacagctaag

SEQ ID NO: 5667424 - DNA, 25 bp, Homo sapien
ctcaacagctaagaagaatggtttc

SEQ ID NO: 5667425 - DNA, 25 bp, Homo sapien
aatagttgaaaccattcttcttagc

SEQ ID NO: 5667426 - DNA, 25 bp, Homo sapien
cattcttcttagctgttgagtagtc

SEQ ID NO: 5667427 - DNA, 25 bp, Homo sapien
gaaaccattcttcttagctgttgag

SEQ ID NO: 5667428 - DNA, 25 bp, Homo sapien
gagtagtcaattgtgtgagctaata

SEQ ID NO: 5667429 - DNA, 25 bp, Homo sapien
ctgttgagtagtcaattgtgtgagc

SEQ ID NO: 5667430 - DNA, 25 bp, Homo sapien
tcttcttagctgttgagtagtcaat

SEQ ID NO: 5667431 - DNA, 25 bp, Homo sapien
gctaagaagaatggtttcaactatt

SEQ ID NO: 5667432 - DNA, 25 bp, Homo sapien
gctcacacaattgactactcaacag

SEQ ID NO: 5667433 - DNA, 25 bp, Homo sapien
gactactcaacagctaagaagaatg

SEQ ID NO: 5667434 - DNA, 25 bp, Homo sapien
aatattagctcacacaattgactac

SEQ ID NO: 5667435 - DNA, 25 bp, Homo sapien
cacaattgactactcaacagctaag

SEQ ID NO: 5667436 - DNA, 25 bp, Homo sapien
ctcaacagctaagaagaatggtttc

SEQ ID NO: 5667437 - DNA, 25 bp, Homo sapien
tgtcttgatatcaggggaggagatt

SEQ ID NO: 5667438 - DNA, 25 bp, Homo sapien
tgcatgtcttgatatcaggggagga

SEQ ID NO: 5667439 - DNA, 25 bp, Homo sapien
tttctcagtaggtgtcttcattttg

SEQ ID NO: 5667440 - DNA, 25 bp, Homo sapien
catgtcttgatatcaggggaggaga

SEQ ID NO: 5667441 - DNA, 25 bp, Homo sapien
cttttctcagtaggtgtcttcattt

SEQ ID NO: 5667442 - DNA, 25 bp, Homo sapien
ttctcagtaggtgtcttcattttgc

SEQ ID NO: 5667443 - DNA, 25 bp, Homo sapien
aaatgaagacacctactgagaaaag

SEQ ID NO: 5667444 - DNA, 25 bp, Homo sapien
tctcctcccctgatatcaagacatg

SEQ ID NO: 5667445 - DNA, 25 bp, Homo sapien
tcctcccctgatatcaagacatgca

SEQ ID NO: 5667446 - DNA, 25 bp, Homo sapien
cctcccctgatatcaagacatgcaa

SEQ ID NO: 5667447 - DNA, 25 bp, Homo sapien
gcaaaatgaagacacctactgagaa

SEQ ID NO: 5667448 - DNA, 25 bp, Homo sapien
aatctcctcccctgatatcaagaca

SEQ ID NO: 5667449 - DNA, 25 bp, Homo sapien
tcagtaggtgtcttcattttgcatg

SEQ ID NO: 5667450 - DNA, 25 bp, Homo sapien
catgtcttgatatcaggggaggaga

SEQ ID NO: 5667451 - DNA, 25 bp, Homo sapien
cgctaacttttctcagtaggtgtct

SEQ ID NO: 5667452 - DNA, 25 bp, Homo sapien
ttctcagtaggtgtcttcattttgc

SEQ ID NO: 5667453 - DNA, 25 bp, Homo sapien
gaaatagactgaagtcacgctaact

SEQ ID NO: 5667454 - DNA, 25 bp, Homo sapien
cattttgcatgtcttgatatcaggg

SEQ ID NO: 5667455 - DNA, 25 bp, Homo sapien
tgcagaatggtctttgattcacatt

SEQ ID NO: 5667456 - DNA, 25 bp, Homo sapien
aattgggtgactagaatccaggatg

SEQ ID NO: 5667457 - DNA, 25 bp, Homo sapien
taattgggtgactagaatccaggat

SEQ ID NO: 5667458 - DNA, 25 bp, Homo sapien
tttaattgggtgactagaatccagg

SEQ ID NO: 5667459 - DNA, 25 bp, Homo sapien
cagaatggtctttgattcacattat

SEQ ID NO: 5667460 - DNA, 25 bp, Homo sapien
atttcagttttaattgggtgactag

SEQ ID NO: 5667461 - DNA, 25 bp, Homo sapien
catcctggattctagtcacccaatt

SEQ ID NO: 5667462 - DNA, 25 bp, Homo sapien
taatgtgaatcaaagaccattctgc

SEQ ID NO: 5667463 - DNA, 25 bp, Homo sapien
tggattctagtcacccaattaaaac

SEQ ID NO: 5667464 - DNA, 25 bp, Homo sapien
tctagtcacccaattaaaactgaaa

SEQ ID NO: 5667465 - DNA, 25 bp, Homo sapien
aataatgtgaatcaaagaccattct

SEQ ID NO: 5667466 - DNA, 25 bp, Homo sapien
cctggattctagtcacccaattaaa

SEQ ID NO: 5667467 - DNA, 25 bp, Homo sapien
agtctgtgccttctaaaactggtga

SEQ ID NO: 5667468 - DNA, 25 bp, Homo sapien
gccttctaaaactggtgattcaaat

SEQ ID NO: 5667469 - DNA, 25 bp, Homo sapien
tcaaattgagctgtaaacctagaat

SEQ ID NO: 5667470 - DNA, 25 bp, Homo sapien
aaaactggtgattcaaattgagctg

SEQ ID NO: 5667471 - DNA, 25 bp, Homo sapien
tgtgccttctaaaactggtgattca

SEQ ID NO: 5667472 - DNA, 25 bp, Homo sapien
tacacagtctgtgccttctaaaact

SEQ ID NO: 5667473 - DNA, 25 bp, Homo sapien
gaatcaccagttttagaaggcacag

SEQ ID NO: 5667474 - DNA, 25 bp, Homo sapien
aattctaggtttacagctcaatttg

SEQ ID NO: 5667475 - DNA, 25 bp, Homo sapien
agttttagaaggcacagactgtgta

SEQ ID NO: 5667476 - DNA, 25 bp, Homo sapien
tttgaatcaccagttttagaaggca

SEQ ID NO: 5667477 - DNA, 25 bp, Homo sapien
tctaggtttacagctcaatttgaat

SEQ ID NO: 5667478 - DNA, 25 bp, Homo sapien
tacagctcaatttgaatcaccagtt

SEQ ID NO: 5667479 - DNA, 25 bp, Homo sapien
aacactatcaggttacagttttctc

SEQ ID NO: 5667480 - DNA, 25 bp, Homo sapien
gacagatttgtcaacactatcaggt

SEQ ID NO: 5667481 - DNA, 25 bp, Homo sapien
gatttgtcaacactatcaggttaca

SEQ ID NO: 5667482 - DNA, 25 bp, Homo sapien
cagatttgtcaacactatcaggtta

SEQ ID NO: 5667483 - DNA, 25 bp, Homo sapien
ggacagatttgtcaacactatcagg

SEQ ID NO: 5667484 - DNA, 25 bp, Homo sapien
caacactatcaggttacagttttct

SEQ ID NO: 5667485 - DNA, 25 bp, Homo sapien
ctgtaacctgatagtgttgacaaat

SEQ ID NO: 5667486 - DNA, 25 bp, Homo sapien
gagaaaactgtaacctgatagtgtt

SEQ ID NO: 5667487 - DNA, 25 bp, Homo sapien
taacctgatagtgttgacaaatctg

SEQ ID NO: 5667488 - DNA, 25 bp, Homo sapien
tgtaacctgatagtgttgacaaatc

SEQ ID NO: 5667489 - DNA, 25 bp, Homo sapien
agaaaactgtaacctgatagtgttg

SEQ ID NO: 5667490 - DNA, 25 bp, Homo sapien
cctgatagtgttgacaaatctgtcc

SEQ ID NO: 5667491 - DNA, 25 bp, Homo sapien
tacatacatcagctcatgtgatcct

SEQ ID NO: 5667492 - DNA, 25 bp, Homo sapien
tacttttacatacatcagctcatgt

SEQ ID NO: 5667493 - DNA, 25 bp, Homo sapien
cacatacattccacatatactttta

SEQ ID NO: 5667494 - DNA, 25 bp, Homo sapien
ttcctacccagtgatgtggagacag

SEQ ID NO: 5667495 - DNA, 25 bp, Homo sapien
ggattcacatacattccacatatac

SEQ ID NO: 5667496 - DNA, 25 bp, Homo sapien
cctacccagtgatgtggagacagac

SEQ ID NO: 5667497 - DNA, 25 bp, Homo sapien
gtctgtctccacatcactgggtagg

SEQ ID NO: 5667498 - DNA, 25 bp, Homo sapien
ctgtctccacatcactgggtaggaa

SEQ ID NO: 5667499 - DNA, 25 bp, Homo sapien
cacatgagctgatgtatgtaaaagt

SEQ ID NO: 5667500 - DNA, 25 bp, Homo sapien
taaaagtatatgtggaatgtatgtg

SEQ ID NO: 5667501 - DNA, 25 bp, Homo sapien
aaggatcacatgagctgatgtatgt

SEQ ID NO: 5667502 - DNA, 25 bp, Homo sapien
gtatatgtggaatgtatgtgaatcc

SEQ ID NO: 5667503 - DNA, 25 bp, Homo sapien
ttaaatgattataacaagatgcaca

SEQ ID NO: 5667504 - DNA, 25 bp, Homo sapien
aaatgattataacaagatgcacata

SEQ ID NO: 5667505 - DNA, 25 bp, Homo sapien
taaatgattataacaagatgcacat

SEQ ID NO: 5667506 - DNA, 25 bp, Homo sapien
gttaaatgattataacaagatgcac

SEQ ID NO: 5667507 - DNA, 25 bp, Homo sapien
aatgattataacaagatgcacatat

SEQ ID NO: 5667508 - DNA, 25 bp, Homo sapien
tgattataacaagatgcacatattt

SEQ ID NO: 5667509 - DNA, 25 bp, Homo sapien
gtgcatcttgttataatcatttaac

SEQ ID NO: 5667510 - DNA, 25 bp, Homo sapien
aaatatgtgcatcttgttataatca

SEQ ID NO: 5667511 - DNA, 25 bp, Homo sapien
aatatgtgcatcttgttataatcat

SEQ ID NO: 5667512 - DNA, 25 bp, Homo sapien
tatgtgcatcttgttataatcattt

SEQ ID NO: 5667513 - DNA, 25 bp, Homo sapien
atgtgcatcttgttataatcattta

SEQ ID NO: 5667514 - DNA, 25 bp, Homo sapien
tgtgcatcttgttataatcatttaa

SEQ ID NO: 5667515 - DNA, 25 bp, Homo sapien
catttgtaaaatgtcttctagttcc

SEQ ID NO: 5667516 - DNA, 25 bp, Homo sapien
taaatgattataacaagatgcacat

SEQ ID NO: 5667517 - DNA, 25 bp, Homo sapien
gatgcacatatttgtatgaagcctt

SEQ ID NO: 5667518 - DNA, 25 bp, Homo sapien
ttgtaaaatgtcttctagttcccac

SEQ ID NO: 5667519 - DNA, 25 bp, Homo sapien
tgtatgaagccttttacaaaaagta

SEQ ID NO: 5667520 - DNA, 25 bp, Homo sapien
tgtaaaatgtcttctagttcccacg

SEQ ID NO: 5667521 - DNA, 25 bp, Homo sapien
taaaaggcttcatacaaatatgtgc

SEQ ID NO: 5667522 - DNA, 25 bp, Homo sapien
tgggaactagaagacattttacaaa

SEQ ID NO: 5667523 - DNA, 25 bp, Homo sapien
cgtgggaactagaagacattttaca

SEQ ID NO: 5667524 - DNA, 25 bp, Homo sapien
caaatatgtgcatcttgttataatc

SEQ ID NO: 5667525 - DNA, 25 bp, Homo sapien
ggaactagaagacattttacaaatg

SEQ ID NO: 5667526 - DNA, 25 bp, Homo sapien
tactttttgtaaaaggcttcataca

SEQ ID NO: 5667527 - DNA, 25 bp, Homo sapien
gaagagcatgagacaagaagtcaga

SEQ ID NO: 5667528 - DNA, 25 bp, Homo sapien
gagcatgagacaagaagtcagagga

SEQ ID NO: 5667529 - DNA, 25 bp, Homo sapien
aagagcatgagacaagaagtcagag

SEQ ID NO: 5667530 - DNA, 25 bp, Homo sapien
agcatgagacaagaagtcagaggag

SEQ ID NO: 5667531 - DNA, 25 bp, Homo sapien
gggaagagcatgagacaagaagtca

SEQ ID NO: 5667532 - DNA, 25 bp, Homo sapien
ggaagagcatgagacaagaagtcag

SEQ ID NO: 5667533 - DNA, 25 bp, Homo sapien
tcctctgacttcttgtctcatgctc

SEQ ID NO: 5667534 - DNA, 25 bp, Homo sapien
cgcaccagcccctcctctgacttct

SEQ ID NO: 5667535 - DNA, 25 bp, Homo sapien
tctgacttcttgtctcatgctcttc

SEQ ID NO: 5667536 - DNA, 25 bp, Homo sapien
tgacttcttgtctcatgctcttccc

SEQ ID NO: 5667537 - DNA, 25 bp, Homo sapien
cctctgacttcttgtctcatgctct

SEQ ID NO: 5667538 - DNA, 25 bp, Homo sapien
ctgacttcttgtctcatgctcttcc

SEQ ID NO: 5667539 - DNA, 25 bp, Homo sapien
tgctgcacttatcacattgttatga

SEQ ID NO: 5667540 - DNA, 25 bp, Homo sapien
tagtctactgcattcctccagtgct

SEQ ID NO: 5667541 - DNA, 25 bp, Homo sapien
tctcccactggactcaattgtgaac

SEQ ID NO: 5667542 - DNA, 25 bp, Homo sapien
cattgttatgaaactattcattcac

SEQ ID NO: 5667543 - DNA, 25 bp, Homo sapien
tgcacttatcacattgttatgaaac

SEQ ID NO: 5667544 - DNA, 25 bp, Homo sapien
tctctcccactggactcaattgtga

SEQ ID NO: 5667545 - DNA, 25 bp, Homo sapien
cacaattgagtccagtgggagagag

SEQ ID NO: 5667546 - DNA, 25 bp, Homo sapien
agcactggaggaatgcagtagacta

SEQ ID NO: 5667547 - DNA, 25 bp, Homo sapien
gtttcataacaatgtgataagtgca

SEQ ID NO: 5667548 - DNA, 25 bp, Homo sapien
tcataacaatgtgataagtgcagca

SEQ ID NO: 5667549 - DNA, 25 bp, Homo sapien
gttcacaattgagtccagtgggaga

SEQ ID NO: 5667550 - DNA, 25 bp, Homo sapien
gaaagtgaatgaatagtttcataac

SEQ ID NO: 5667551 - DNA, 25 bp, Homo sapien
gaattaggtcctgccgccaaataag

SEQ ID NO: 5667552 - DNA, 25 bp, Homo sapien
ggtcctgccgccaaataagctctct

SEQ ID NO: 5667553 - DNA, 25 bp, Homo sapien
tattgaattaggtcctgccgccaaa

SEQ ID NO: 5667554 - DNA, 25 bp, Homo sapien
tatattgaattaggtcctgccgcca

SEQ ID NO: 5667555 - DNA, 25 bp, Homo sapien
ctgccgccaaataagctctctcaga

SEQ ID NO: 5667556 - DNA, 25 bp, Homo sapien
tatttccaccttatattgaattagg

SEQ ID NO: 5667557 - DNA, 25 bp, Homo sapien
agagagcttatttggcggcaggacc

SEQ ID NO: 5667558 - DNA, 25 bp, Homo sapien
ttcaatataaggtggaaatatcaaa

SEQ ID NO: 5667559 - DNA, 25 bp, Homo sapien
tatttggcggcaggacctaattcaa

SEQ ID NO: 5667560 - DNA, 25 bp, Homo sapien
cttatttggcggcaggacctaattc

SEQ ID NO: 5667561 - DNA, 25 bp, Homo sapien
tctgagagagcttatttggcggcag

SEQ ID NO: 5667562 - DNA, 25 bp, Homo sapien
gcggcaggacctaattcaatataag

SEQ ID NO: 5667563 - DNA, 25 bp, Homo sapien
tgttggcttttcgaattcagttaaa

SEQ ID NO: 5667564 - DNA, 25 bp, Homo sapien
attatgttggcttttcgaattcagt

SEQ ID NO: 5667565 - DNA, 25 bp, Homo sapien
cagttaaagtatagtaatctagaaa

SEQ ID NO: 5667566 - DNA, 25 bp, Homo sapien
tggcttttcgaattcagttaaagta

SEQ ID NO: 5667567 - DNA, 25 bp, Homo sapien
atgttggcttttcgaattcagttaa

SEQ ID NO: 5667568 - DNA, 25 bp, Homo sapien
tatgttggcttttcgaattcagtta

SEQ ID NO: 5667569 - DNA, 25 bp, Homo sapien
tttaactgaattcgaaaagccaaca

SEQ ID NO: 5667570 - DNA, 25 bp, Homo sapien
taactgaattcgaaaagccaacata

SEQ ID NO: 5667571 - DNA, 25 bp, Homo sapien
ttaactgaattcgaaaagccaacat

SEQ ID NO: 5667572 - DNA, 25 bp, Homo sapien
tactttaactgaattcgaaaagcca

SEQ ID NO: 5667573 - DNA, 25 bp, Homo sapien
tctagattactatactttaactgaa

SEQ ID NO: 5667574 - DNA, 25 bp, Homo sapien
actgaattcgaaaagccaacataat

SEQ ID NO: 5667575 - DNA, 25 bp, Homo sapien
tacaggcacttgcccggctagtttt

SEQ ID NO: 5667576 - DNA, 25 bp, Homo sapien
gactacaggcacttgcccggctagt

SEQ ID NO: 5667577 - DNA, 25 bp, Homo sapien
gcacttgcccggctagtttttgtat

SEQ ID NO: 5667578 - DNA, 25 bp, Homo sapien
cctgccgcagcctccccgagtagct

SEQ ID NO: 5667579 - DNA, 25 bp, Homo sapien
ctacaggcacttgcccggctagttt

SEQ ID NO: 5667580 - DNA, 25 bp, Homo sapien
actacaggcacttgcccggctagtt

SEQ ID NO: 5667581 - DNA, 25 bp, Homo sapien
aaaactagccgggcaagtgcctgta

SEQ ID NO: 5667582 - DNA, 25 bp, Homo sapien
aactagccgggcaagtgcctgtagt

SEQ ID NO: 5667583 - DNA, 25 bp, Homo sapien
gctactcggggaggctgcggcagga

SEQ ID NO: 5667584 - DNA, 25 bp, Homo sapien
atacaaaaactagccgggcaagtgc

SEQ ID NO: 5667585 - DNA, 25 bp, Homo sapien
actagccgggcaagtgcctgtagtc

SEQ ID NO: 5667586 - DNA, 25 bp, Homo sapien
aaactagccgggcaagtgcctgtag

SEQ ID NO: 5667587 - DNA, 25 bp, Homo sapien
aggagaatcgtttgaacccatgagg

SEQ ID NO: 5667588 - DNA, 25 bp, Homo sapien
tgagcccgaattgcaccattgcact

SEQ ID NO: 5667589 - DNA, 25 bp, Homo sapien
gtgagcccgaattgcaccattgcac

SEQ ID NO: 5667590 - DNA, 25 bp, Homo sapien
caggagaatcgtttgaacccatgag

SEQ ID NO: 5667591 - DNA, 25 bp, Homo sapien
gtgcaatggtgcaattcgggctcac

SEQ ID NO: 5667592 - DNA, 25 bp, Homo sapien
cctcatgggttcaaacgattctcct

SEQ ID NO: 5667593 - DNA, 25 bp, Homo sapien
ctcatgggttcaaacgattctcctg

SEQ ID NO: 5667594 - DNA, 25 bp, Homo sapien
agtgcaatggtgcaattcgggctca

SEQ ID NO: 5667595 - DNA, 25 bp, Homo sapien
ggaaggatatcctaggaccaacctc

SEQ ID NO: 5667596 - DNA, 25 bp, Homo sapien
aaaagagaaccttaggagatctcat

SEQ ID NO: 5667597 - DNA, 25 bp, Homo sapien
gaaaagagaaccttaggagatctca

SEQ ID NO: 5667598 - DNA, 25 bp, Homo sapien
ggagatctcatcctatttgggggaa

SEQ ID NO: 5667599 - DNA, 25 bp, Homo sapien
gaaggatatcctaggaccaacctct

SEQ ID NO: 5667600 - DNA, 25 bp, Homo sapien
gatctcatcctatttgggggaagga

SEQ ID NO: 5667601 - DNA, 25 bp, Homo sapien
gaggttggtcctaggatatccttcc

SEQ ID NO: 5667602 - DNA, 25 bp, Homo sapien
agaggttggtcctaggatatccttc

SEQ ID NO: 5667603 - DNA, 25 bp, Homo sapien
tcccccaaataggatgagatctcct

SEQ ID NO: 5667604 - DNA, 25 bp, Homo sapien
tgagatctcctaaggttctcttttc

SEQ ID NO: 5667605 - DNA, 25 bp, Homo sapien
tccttcccccaaataggatgagatc

SEQ ID NO: 5667606 - DNA, 25 bp, Homo sapien
gagatctcctaaggttctcttttct

SEQ ID NO: 5667607 - DNA, 25 bp, Homo sapien
tagcggtgttcttggccccgtactc

SEQ ID NO: 5667608 - DNA, 25 bp, Homo sapien
tttgcagtgaagtgccctagtctag

SEQ ID NO: 5667609 - DNA, 25 bp, Homo sapien
tcccatgtagcttactgatgaatgc

SEQ ID NO: 5667610 - DNA, 25 bp, Homo sapien
gcttactgatgaatgcatgcaatct

SEQ ID NO: 5667611 - DNA, 25 bp, Homo sapien
tagtctagcggtgttcttggccccg

SEQ ID NO: 5667612 - DNA, 25 bp, Homo sapien
gtactccttccggtatcccatgtag

SEQ ID NO: 5667613 - DNA, 25 bp, Homo sapien
gcattcatcagtaagctacatggga

SEQ ID NO: 5667614 - DNA, 25 bp, Homo sapien
gattgcatgcattcatcagtaagct

SEQ ID NO: 5667615 - DNA, 25 bp, Homo sapien
gggccaagaacaccgctagactagg

SEQ ID NO: 5667616 - DNA, 25 bp, Homo sapien
accgctagactagggcacttcactg

SEQ ID NO: 5667617 - DNA, 25 bp, Homo sapien
tagactagggcacttcactgcaaac

SEQ ID NO: 5667618 - DNA, 25 bp, Homo sapien
ctacatgggataccggaaggagtac

SEQ ID NO: 5667619 - DNA, 25 bp, Homo sapien
ggctgttttccataccgtatgtcaa

SEQ ID NO: 5667620 - DNA, 25 bp, Homo sapien
gaacaatccattggccttccctggc

SEQ ID NO: 5667621 - DNA, 25 bp, Homo sapien
aacactgttactttatatatgagac

SEQ ID NO: 5667622 - DNA, 25 bp, Homo sapien
agaggcctagaacaatccattggcc

SEQ ID NO: 5667623 - DNA, 25 bp, Homo sapien
ccataccgtatgtcaacactgttac

SEQ ID NO: 5667624 - DNA, 25 bp, Homo sapien
tatatatgagacaacagaggcctag

SEQ ID NO: 5667625 - DNA, 25 bp, Homo sapien
gtaacagtgttgacatacggtatgg

SEQ ID NO: 5667626 - DNA, 25 bp, Homo sapien
gccagggaaggccaatggattgttc

SEQ ID NO: 5667627 - DNA, 25 bp, Homo sapien
tctcatatataaagtaacagtgttg

SEQ ID NO: 5667628 - DNA, 25 bp, Homo sapien
ttgacatacggtatggaaaacagcc

SEQ ID NO: 5667629 - DNA, 25 bp, Homo sapien
ggccaatggattgttctaggcctct

SEQ ID NO: 5667630 - DNA, 25 bp, Homo sapien
taggcctctgttgtctcatatataa

SEQ ID NO: 5667631 - DNA, 25 bp, Homo sapien
ggccttcatcacatatggtacgccc

SEQ ID NO: 5667632 - DNA, 25 bp, Homo sapien
cccctaaatcgctccctcccaagca

SEQ ID NO: 5667633 - DNA, 25 bp, Homo sapien
atggtacgccctcccctaaatcgct

SEQ ID NO: 5667634 - DNA, 25 bp, Homo sapien
tggccttcatcacatatggtacgcc

SEQ ID NO: 5667635 - DNA, 25 bp, Homo sapien
atatggtacgccctcccctaaatcg

SEQ ID NO: 5667636 - DNA, 25 bp, Homo sapien
gccttcatcacatatggtacgccct

SEQ ID NO: 5667637 - DNA, 25 bp, Homo sapien
cgatttaggggagggcgtaccatat

SEQ ID NO: 5667638 - DNA, 25 bp, Homo sapien
gggagggcgtaccatatgtgatgaa

SEQ ID NO: 5667639 - DNA, 25 bp, Homo sapien
gcttgggagggagcgatttagggga

SEQ ID NO: 5667640 - DNA, 25 bp, Homo sapien
ggcgtaccatatgtgatgaaggcca

SEQ ID NO: 5667641 - DNA, 25 bp, Homo sapien
agggcgtaccatatgtgatgaaggc

SEQ ID NO: 5667642 - DNA, 25 bp, Homo sapien
gggcgtaccatatgtgatgaaggcc

SEQ ID NO: 5667643 - DNA, 25 bp, Homo sapien
atcttggtatataaagcagaagtag

SEQ ID NO: 5667644 - DNA, 25 bp, Homo sapien
aatcttggtatataaagcagaagta

SEQ ID NO: 5667645 - DNA, 25 bp, Homo sapien
aagcagaagtagaattggagttttt

SEQ ID NO: 5667646 - DNA, 25 bp, Homo sapien
agaatcttggtatataaagcagaag

SEQ ID NO: 5667647 - DNA, 25 bp, Homo sapien
agcagaagtagaattggagtttttt

SEQ ID NO: 5667648 - DNA, 25 bp, Homo sapien
gaatcttggtatataaagcagaagt

SEQ ID NO: 5667649 - DNA, 25 bp, Homo sapien
ttttttagcagtagagttctttctc

SEQ ID NO: 5667650 - DNA, 25 bp, Homo sapien
ttttagcagtagagttctttctccc

SEQ ID NO: 5667651 - DNA, 25 bp, Homo sapien
cttttttagcagtagagttctttct

SEQ ID NO: 5667652 - DNA, 25 bp, Homo sapien
tttagcagtagagttctttctccct

SEQ ID NO: 5667653 - DNA, 25 bp, Homo sapien
tttttagcagtagagttctttctcc

SEQ ID NO: 5667654 - DNA, 25 bp, Homo sapien
agggagaaagaactctactgctaaa

SEQ ID NO: 5667655 - DNA, 25 bp, Homo sapien
agaaagaactctactgctaaaaaag

SEQ ID NO: 5667656 - DNA, 25 bp, Homo sapien
ggagaaagaactctactgctaaaaa

SEQ ID NO: 5667657 - DNA, 25 bp, Homo sapien
gagaaagaactctactgctaaaaaa

SEQ ID NO: 5667658 - DNA, 25 bp, Homo sapien
gggagaaagaactctactgctaaaa

SEQ ID NO: 5667659 - DNA, 25 bp, Homo sapien
aaaaactccaattctacttctgctt

SEQ ID NO: 5667660 - DNA, 25 bp, Homo sapien
acttctgctttatataccaagattc

SEQ ID NO: 5667661 - DNA, 25 bp, Homo sapien
tacttctgctttatataccaagatt

SEQ ID NO: 5667662 - DNA, 25 bp, Homo sapien
aaaaaactccaattctacttctgct

SEQ ID NO: 5667663 - DNA, 25 bp, Homo sapien
cttctgctttatataccaagattct

SEQ ID NO: 5667664 - DNA, 25 bp, Homo sapien
ctacttctgctttatataccaagat

SEQ ID NO: 5667665 - DNA, 25 bp, Homo sapien
ttttagcagtagagttctttctccc

SEQ ID NO: 5667666 - DNA, 25 bp, Homo sapien
atcttggtatataaagcagaagtag

SEQ ID NO: 5667667 - DNA, 25 bp, Homo sapien
actcttacaaaaagaatcttggtat

SEQ ID NO: 5667668 - DNA, 25 bp, Homo sapien
agaatcttggtatataaagcagaag

SEQ ID NO: 5667669 - DNA, 25 bp, Homo sapien
agcagaagtagaattggagtttttt

SEQ ID NO: 5667670 - DNA, 25 bp, Homo sapien
gaatcttggtatataaagcagaagt

SEQ ID NO: 5667671 - DNA, 25 bp, Homo sapien
cttctgctttatataccaagattct

SEQ ID NO: 5667672 - DNA, 25 bp, Homo sapien
aagaactctactgctaaaaaagtga

SEQ ID NO: 5667673 - DNA, 25 bp, Homo sapien
tataccaagattctttttgtaagag

SEQ ID NO: 5667674 - DNA, 25 bp, Homo sapien
gaagggagaaagaactctactgcta

SEQ ID NO: 5667675 - DNA, 25 bp, Homo sapien
aaaaaactccaattctacttctgct

SEQ ID NO: 5667676 - DNA, 25 bp, Homo sapien
ctacttctgctttatataccaagat

SEQ ID NO: 5667677 - DNA, 25 bp, Homo sapien
aatataagatgggatgctgcttggt

SEQ ID NO: 5667678 - DNA, 25 bp, Homo sapien
atataagatgggatgctgcttggtt

SEQ ID NO: 5667679 - DNA, 25 bp, Homo sapien
accaagcagcatcccatcttatatt

SEQ ID NO: 5667680 - DNA, 25 bp, Homo sapien
aaccaagcagcatcccatcttatat

SEQ ID NO: 5667681 - DNA, 25 bp, Homo sapien
tttactgttgatagacattagattg

SEQ ID NO: 5667682 - DNA, 25 bp, Homo sapien
caatctaatgtctatcaacagtaaa

SEQ ID NO: 5667683 - DNA, 25 bp, Homo sapien
tctttttcattgcagtataatattc

SEQ ID NO: 5667684 - DNA, 25 bp, Homo sapien
tttactgttgatagacattagattg

SEQ ID NO: 5667685 - DNA, 25 bp, Homo sapien
gtttgtatatgctataatttatcca

SEQ ID NO: 5667686 - DNA, 25 bp, Homo sapien
tgatagacattagattgtttccagt

SEQ ID NO: 5667687 - DNA, 25 bp, Homo sapien
cattttactgttgatagacattaga

SEQ ID NO: 5667688 - DNA, 25 bp, Homo sapien
tcattgcagtataatattctattgt

SEQ ID NO: 5667689 - DNA, 25 bp, Homo sapien
actggaaacaatctaatgtctatca

SEQ ID NO: 5667690 - DNA, 25 bp, Homo sapien
gaatattatactgcaatgaaaaaga

SEQ ID NO: 5667691 - DNA, 25 bp, Homo sapien
ggataaattatagcatatacaaaca

SEQ ID NO: 5667692 - DNA, 25 bp, Homo sapien
caatctaatgtctatcaacagtaaa

SEQ ID NO: 5667693 - DNA, 25 bp, Homo sapien
acagtaaaatggataaattatagca

SEQ ID NO: 5667694 - DNA, 25 bp, Homo sapien
tacaaacaatagaatattatactgc

SEQ ID NO: 5667695 - DNA, 25 bp, Homo sapien
gattgtgttgcccaacttacttgtg

SEQ ID NO: 5667696 - DNA, 25 bp, Homo sapien
gtgttgcccaacttacttgtgcaat

SEQ ID NO: 5667697 - DNA, 25 bp, Homo sapien
ttgtgttgcccaacttacttgtgca

SEQ ID NO: 5667698 - DNA, 25 bp, Homo sapien
attgtgttgcccaacttacttgtgc

SEQ ID NO: 5667699 - DNA, 25 bp, Homo sapien
tgtgttgcccaacttacttgtgcaa

SEQ ID NO: 5667700 - DNA, 25 bp, Homo sapien
tgttgcccaacttacttgtgcaatt

SEQ ID NO: 5667701 - DNA, 25 bp, Homo sapien
attgcacaagtaagttgggcaacac

SEQ ID NO: 5667702 - DNA, 25 bp, Homo sapien
ttgcacaagtaagttgggcaacaca

SEQ ID NO: 5667703 - DNA, 25 bp, Homo sapien
tgcacaagtaagttgggcaacacaa

SEQ ID NO: 5667704 - DNA, 25 bp, Homo sapien
cacaagtaagttgggcaacacaatc

SEQ ID NO: 5667705 - DNA, 25 bp, Homo sapien
gcacaagtaagttgggcaacacaat

SEQ ID NO: 5667706 - DNA, 25 bp, Homo sapien
aattgcacaagtaagttgggcaaca

SEQ ID NO: 5667707 - DNA, 25 bp, Homo sapien
ccagcaggtggagattgcagtgagc

SEQ ID NO: 5667708 - DNA, 25 bp, Homo sapien
tgaacccagcaggtggagattgcag

SEQ ID NO: 5667709 - DNA, 25 bp, Homo sapien
tgcttgaacccagcaggtggagatt

SEQ ID NO: 5667710 - DNA, 25 bp, Homo sapien
ttgaacccagcaggtggagattgca

SEQ ID NO: 5667711 - DNA, 25 bp, Homo sapien
cttgaacccagcaggtggagattgc

SEQ ID NO: 5667712 - DNA, 25 bp, Homo sapien
gcttgaacccagcaggtggagattg

SEQ ID NO: 5667713 - DNA, 25 bp, Homo sapien
tgcaatctccacctgctgggttcaa

SEQ ID NO: 5667714 - DNA, 25 bp, Homo sapien
gcaatctccacctgctgggttcaag

SEQ ID NO: 5667715 - DNA, 25 bp, Homo sapien
aatctccacctgctgggttcaagca

SEQ ID NO: 5667716 - DNA, 25 bp, Homo sapien
gctcactgcaatctccacctgctgg

SEQ ID NO: 5667717 - DNA, 25 bp, Homo sapien
ctgcaatctccacctgctgggttca

SEQ ID NO: 5667718 - DNA, 25 bp, Homo sapien
caatctccacctgctgggttcaagc

SEQ ID NO: 5667719 - DNA, 25 bp, Homo sapien
agcatatacacttaggctctgccct

SEQ ID NO: 5667720 - DNA, 25 bp, Homo sapien
ccccagcatatacacttaggctctg

SEQ ID NO: 5667721 - DNA, 25 bp, Homo sapien
agaatattcctcatctaattgaggg

SEQ ID NO: 5667722 - DNA, 25 bp, Homo sapien
cagaatattcctcatctaattgagg

SEQ ID NO: 5667723 - DNA, 25 bp, Homo sapien
tcatctaattgagggggtacatttg

SEQ ID NO: 5667724 - DNA, 25 bp, Homo sapien
ccagcatatacacttaggctctgcc

SEQ ID NO: 5667725 - DNA, 25 bp, Homo sapien
cctcaattagatgaggaatattctg

SEQ ID NO: 5667726 - DNA, 25 bp, Homo sapien
caaatgtaccccctcaattagatga

SEQ ID NO: 5667727 - DNA, 25 bp, Homo sapien
ggcagagcctaagtgtatatgctgg

SEQ ID NO: 5667728 - DNA, 25 bp, Homo sapien
cccctcaattagatgaggaatattc

SEQ ID NO: 5667729 - DNA, 25 bp, Homo sapien
agggcagagcctaagtgtatatgct

SEQ ID NO: 5667730 - DNA, 25 bp, Homo sapien
gcagagcctaagtgtatatgctggg

SEQ ID NO: 5667731 - DNA, 25 bp, Homo sapien
tcctgccgagttctcagtggctctg

SEQ ID NO: 5667732 - DNA, 25 bp, Homo sapien
ctgtctcctgccgagttctcagtgg

SEQ ID NO: 5667733 - DNA, 25 bp, Homo sapien
aggatcgcttgggttccagtccggc

SEQ ID NO: 5667734 - DNA, 25 bp, Homo sapien
cgagttctcagtggctctgtgtggc

SEQ ID NO: 5667735 - DNA, 25 bp, Homo sapien
atcgcttgggttccagtccggcctg

SEQ ID NO: 5667736 - DNA, 25 bp, Homo sapien
cttgggttccagtccggcctgggca

SEQ ID NO: 5667737 - DNA, 25 bp, Homo sapien
ccactgagaactcggcaggagacag

SEQ ID NO: 5667738 - DNA, 25 bp, Homo sapien
ccaggccggactggaacccaagcga

SEQ ID NO: 5667739 - DNA, 25 bp, Homo sapien
cagagccactgagaactcggcagga

SEQ ID NO: 5667740 - DNA, 25 bp, Homo sapien
gccggactggaacccaagcgatcct

SEQ ID NO: 5667741 - DNA, 25 bp, Homo sapien
gccacacagagccactgagaactcg

SEQ ID NO: 5667742 - DNA, 25 bp, Homo sapien
ggagacagggtctggtggtgctgcc

SEQ ID NO: 5667743 - DNA, 25 bp, Homo sapien
tatccctaaatagaaggtcacacta

SEQ ID NO: 5667744 - DNA, 25 bp, Homo sapien
gtcacactaaaaataccatggagct

SEQ ID NO: 5667745 - DNA, 25 bp, Homo sapien
cagatgtgttcacccgtgcctgtgg

SEQ ID NO: 5667746 - DNA, 25 bp, Homo sapien
aataccatggagctaggcagatgtg

SEQ ID NO: 5667747 - DNA, 25 bp, Homo sapien
ggaaaacctgaatcattatccctaa

SEQ ID NO: 5667748 - DNA, 25 bp, Homo sapien
catggagctaggcagatgtgttcac

SEQ ID NO: 5667749 - DNA, 25 bp, Homo sapien
gaacacatctgcctagctccatggt

SEQ ID NO: 5667750 - DNA, 25 bp, Homo sapien
ggtgaacacatctgcctagctccat

SEQ ID NO: 5667751 - DNA, 25 bp, Homo sapien
ccacaggcacgggtgaacacatctg

SEQ ID NO: 5667752 - DNA, 25 bp, Homo sapien
agctccatggtatttttagtgtgac

SEQ ID NO: 5667753 - DNA, 25 bp, Homo sapien
tagggataatgattcaggttttcca

SEQ ID NO: 5667754 - DNA, 25 bp, Homo sapien
tagtgtgaccttctatttagggata

SEQ ID NO: 5667755 - DNA, 25 bp, Homo sapien
tggtctttatccatttcggatttag

SEQ ID NO: 5667756 - DNA, 25 bp, Homo sapien
ccaatgccataaaacttttgctctg

SEQ ID NO: 5667757 - DNA, 25 bp, Homo sapien
gctaaatccaatgccataaaacttt

SEQ ID NO: 5667758 - DNA, 25 bp, Homo sapien
taaatccaatgccataaaacttttg

SEQ ID NO: 5667759 - DNA, 25 bp, Homo sapien
ttgctaaatccaatgccataaaact

SEQ ID NO: 5667760 - DNA, 25 bp, Homo sapien
tgctaaatccaatgccataaaactt

SEQ ID NO: 5667761 - DNA, 25 bp, Homo sapien
cagagcaaaagttttatggcattgg

SEQ ID NO: 5667762 - DNA, 25 bp, Homo sapien
taaatccgaaatggataaagaccaa

SEQ ID NO: 5667763 - DNA, 25 bp, Homo sapien
aaagttttatggcattggatttagc

SEQ ID NO: 5667764 - DNA, 25 bp, Homo sapien
caaaagttttatggcattggattta

SEQ ID NO: 5667765 - DNA, 25 bp, Homo sapien
ctaaatccgaaatggataaagacca

SEQ ID NO: 5667766 - DNA, 25 bp, Homo sapien
agttttatggcattggatttagcaa

SEQ ID NO: 5667767 - DNA, 25 bp, Homo sapien
gccctttattgtacctttatcacag

SEQ ID NO: 5667768 - DNA, 25 bp, Homo sapien
ccgtaggtgccttttcactgttgtg

SEQ ID NO: 5667769 - DNA, 25 bp, Homo sapien
tgtacctttatcacagaagttttaa

SEQ ID NO: 5667770 - DNA, 25 bp, Homo sapien
cactgttgtgccctttattgtacct

SEQ ID NO: 5667771 - DNA, 25 bp, Homo sapien
actttgatatagtccaatttatcta

SEQ ID NO: 5667772 - DNA, 25 bp, Homo sapien
tccccattccgtaggtgccttttca

SEQ ID NO: 5667773 - DNA, 25 bp, Homo sapien
cacaacagtgaaaaggcacctacgg

SEQ ID NO: 5667774 - DNA, 25 bp, Homo sapien
taaaacttctgtgataaaggtacaa

SEQ ID NO: 5667775 - DNA, 25 bp, Homo sapien
tagataaattggactatatcaaagt

SEQ ID NO: 5667776 - DNA, 25 bp, Homo sapien
aggtacaataaagggcacaacagtg

SEQ ID NO: 5667777 - DNA, 25 bp, Homo sapien
ctgtgataaaggtacaataaagggc

SEQ ID NO: 5667778 - DNA, 25 bp, Homo sapien
cagtgaaaaggcacctacggaatgg

SEQ ID NO: 5667779 - DNA, 25 bp, Homo sapien
taattgcattgtaggggtactttaa

SEQ ID NO: 5667780 - DNA, 25 bp, Homo sapien
attgcattgtaggggtactttaata

SEQ ID NO: 5667781 - DNA, 25 bp, Homo sapien
gcattgtaggggtactttaatatat

SEQ ID NO: 5667782 - DNA, 25 bp, Homo sapien
cattgtaggggtactttaatatatt

SEQ ID NO: 5667783 - DNA, 25 bp, Homo sapien
aattgcattgtaggggtactttaat

SEQ ID NO: 5667784 - DNA, 25 bp, Homo sapien
tgcattgtaggggtactttaatata

SEQ ID NO: 5667785 - DNA, 25 bp, Homo sapien
tatattaaagtacccctacaatgca

SEQ ID NO: 5667786 - DNA, 25 bp, Homo sapien
aatatattaaagtacccctacaatg

SEQ ID NO: 5667787 - DNA, 25 bp, Homo sapien
tattaaagtacccctacaatgcaat

SEQ ID NO: 5667788 - DNA, 25 bp, Homo sapien
ttaaagtacccctacaatgcaatta

SEQ ID NO: 5667789 - DNA, 25 bp, Homo sapien
atatattaaagtacccctacaatgc

SEQ ID NO: 5667790 - DNA, 25 bp, Homo sapien
attaaagtacccctacaatgcaatt

SEQ ID NO: 5667791 - DNA, 25 bp, Homo sapien
tgcccattttaaaatctggttatta

SEQ ID NO: 5667792 - DNA, 25 bp, Homo sapien
gcattgtaggggtactttaatatat

SEQ ID NO: 5667793 - DNA, 25 bp, Homo sapien
taggggtactttaatatattctgat

SEQ ID NO: 5667794 - DNA, 25 bp, Homo sapien
ttttgttgttaattgcattgtaggg

SEQ ID NO: 5667795 - DNA, 25 bp, Homo sapien
taattgcattgtaggggtactttaa

SEQ ID NO: 5667796 - DNA, 25 bp, Homo sapien
gtaggggtactttaatatattctga

SEQ ID NO: 5667797 - DNA, 25 bp, Homo sapien
tatattaaagtacccctacaatgca

SEQ ID NO: 5667798 - DNA, 25 bp, Homo sapien
aatatattaaagtacccctacaatg

SEQ ID NO: 5667799 - DNA, 25 bp, Homo sapien
tcagaatatattaaagtacccctac

SEQ ID NO: 5667800 - DNA, 25 bp, Homo sapien
ttaaagtacccctacaatgcaatta

SEQ ID NO: 5667801 - DNA, 25 bp, Homo sapien
taataaccagattttaaaatgggca

SEQ ID NO: 5667802 - DNA, 25 bp, Homo sapien
tacccctacaatgcaattaacaaca

SEQ ID NO: 5667803 - DNA, 25 bp, Homo sapien
tgatactagacatcctaatagatgt

SEQ ID NO: 5667804 - DNA, 25 bp, Homo sapien
ttgatactagacatcctaatagatg

SEQ ID NO: 5667805 - DNA, 25 bp, Homo sapien
tttgatactagacatcctaatagat

SEQ ID NO: 5667806 - DNA, 25 bp, Homo sapien
ttttgatactagacatcctaataga

SEQ ID NO: 5667807 - DNA, 25 bp, Homo sapien
tctattaggatgtctagtatcaaaa

SEQ ID NO: 5667808 - DNA, 25 bp, Homo sapien
atctattaggatgtctagtatcaaa

SEQ ID NO: 5667809 - DNA, 25 bp, Homo sapien
acatctattaggatgtctagtatca

SEQ ID NO: 5667810 - DNA, 25 bp, Homo sapien
catctattaggatgtctagtatcaa

SEQ ID NO: 5667811 - DNA, 25 bp, Homo sapien
tgtattgccctagtgattaatgatg

SEQ ID NO: 5667812 - DNA, 25 bp, Homo sapien
tcctaatagatgtgaggtgatatct

SEQ ID NO: 5667813 - DNA, 25 bp, Homo sapien
tgatactagacatcctaatagatgt

SEQ ID NO: 5667814 - DNA, 25 bp, Homo sapien
gaggtgatatctcgttgtaattttg

SEQ ID NO: 5667815 - DNA, 25 bp, Homo sapien
gtaattttgatttgtattgccctag

SEQ ID NO: 5667816 - DNA, 25 bp, Homo sapien
ttttgatactagacatcctaataga

SEQ ID NO: 5667817 - DNA, 25 bp, Homo sapien
tcactagggcaatacaaatcaaaat

SEQ ID NO: 5667818 - DNA, 25 bp, Homo sapien
tctattaggatgtctagtatcaaaa

SEQ ID NO: 5667819 - DNA, 25 bp, Homo sapien
catcattaatcactagggcaataca

SEQ ID NO: 5667820 - DNA, 25 bp, Homo sapien
tcaaaattacaacgagatatcacct

SEQ ID NO: 5667821 - DNA, 25 bp, Homo sapien
acatctattaggatgtctagtatca

SEQ ID NO: 5667822 - DNA, 25 bp, Homo sapien
agatatcacctcacatctattagga

SEQ ID NO: 5667823 - DNA, 25 bp, Homo sapien
ttttcacactggctaccctatttga

SEQ ID NO: 5667824 - DNA, 25 bp, Homo sapien
tgtttttcacactggctaccctatt

SEQ ID NO: 5667825 - DNA, 25 bp, Homo sapien
tcacactggctaccctatttgattt

SEQ ID NO: 5667826 - DNA, 25 bp, Homo sapien
gaggaaacgcagtactgtttttcac

SEQ ID NO: 5667827 - DNA, 25 bp, Homo sapien
tgattttcccacttgttagtgcaca

SEQ ID NO: 5667828 - DNA, 25 bp, Homo sapien
atttgattttcccacttgttagtgc

SEQ ID NO: 5667829 - DNA, 25 bp, Homo sapien
gcactaacaagtgggaaaatcaaat

SEQ ID NO: 5667830 - DNA, 25 bp, Homo sapien
aaatcaaatagggtagccagtgtga

SEQ ID NO: 5667831 - DNA, 25 bp, Homo sapien
gtgaaaaacagtactgcgtttcctc

SEQ ID NO: 5667832 - DNA, 25 bp, Homo sapien
tgtgcactaacaagtgggaaaatca

SEQ ID NO: 5667833 - DNA, 25 bp, Homo sapien
aatagggtagccagtgtgaaaaaca

SEQ ID NO: 5667834 - DNA, 25 bp, Homo sapien
tcaaatagggtagccagtgtgaaaa

SEQ ID NO: 5667835 - DNA, 25 bp, Homo sapien
gtgtgaaccactgtgcctggccgag

SEQ ID NO: 5667836 - DNA, 25 bp, Homo sapien
tcgggtgatccgcctggttcagcct

SEQ ID NO: 5667837 - DNA, 25 bp, Homo sapien
gtgcctggccgagatcctgctttca

SEQ ID NO: 5667838 - DNA, 25 bp, Homo sapien
aaccactgtgcctggccgagatcct

SEQ ID NO: 5667839 - DNA, 25 bp, Homo sapien
cctggccgagatcctgctttcactt

SEQ ID NO: 5667840 - DNA, 25 bp, Homo sapien
gccgagatcctgctttcacttcttt

SEQ ID NO: 5667841 - DNA, 25 bp, Homo sapien
agtgaaagcaggatctcggccaggc

SEQ ID NO: 5667842 - DNA, 25 bp, Homo sapien
aggctgaaccaggcggatcacccga

SEQ ID NO: 5667843 - DNA, 25 bp, Homo sapien
tctcggccaggcacagtggttcaca

SEQ ID NO: 5667844 - DNA, 25 bp, Homo sapien
aaaagaagtgaaagcaggatctcgg

SEQ ID NO: 5667845 - DNA, 25 bp, Homo sapien
agaagtgaaagcaggatctcggcca

SEQ ID NO: 5667846 - DNA, 25 bp, Homo sapien
ggatctcggccaggcacagtggttc

SEQ ID NO: 5667847 - DNA, 25 bp, Homo sapien
tattgcttgagagcctggttccatc

SEQ ID NO: 5667848 - DNA, 25 bp, Homo sapien
tgcttgagagcctggttccatcccc

SEQ ID NO: 5667849 - DNA, 25 bp, Homo sapien
tcccaacctcccagatggagtttct

SEQ ID NO: 5667850 - DNA, 25 bp, Homo sapien
gcaaatattgcttgagagcctggtt

SEQ ID NO: 5667851 - DNA, 25 bp, Homo sapien
aatattgcttgagagcctggttcca

SEQ ID NO: 5667852 - DNA, 25 bp, Homo sapien
cctaggctggagtgggacggagtga

SEQ ID NO: 5667853 - DNA, 25 bp, Homo sapien
tggaaccaggctctcaagcaatatt

SEQ ID NO: 5667854 - DNA, 25 bp, Homo sapien
agaaactccatctgggaggttggga

SEQ ID NO: 5667855 - DNA, 25 bp, Homo sapien
gggatggaaccaggctctcaagcaa

SEQ ID NO: 5667856 - DNA, 25 bp, Homo sapien
gatggaaccaggctctcaagcaata

SEQ ID NO: 5667857 - DNA, 25 bp, Homo sapien
atcactccgtcccactccagcctag

SEQ ID NO: 5667858 - DNA, 25 bp, Homo sapien
gaaccaggctctcaagcaatatttg

SEQ ID NO: 5667859 - DNA, 25 bp, Homo sapien
tgtcctcaagattcagccatgttgt

SEQ ID NO: 5667860 - DNA, 25 bp, Homo sapien
tgtcacttaaaataatgtcctcaag

SEQ ID NO: 5667861 - DNA, 25 bp, Homo sapien
tgtcatggcttatgtcacttaaaat

SEQ ID NO: 5667862 - DNA, 25 bp, Homo sapien
tgtccctttgtcatggcttatgtca

SEQ ID NO: 5667863 - DNA, 25 bp, Homo sapien
cagccatgttgtagcaggtatcaga

SEQ ID NO: 5667864 - DNA, 25 bp, Homo sapien
ccacatggtatttgtccctttgtca

SEQ ID NO: 5667865 - DNA, 25 bp, Homo sapien
cttgaggacattattttaagtgaca

SEQ ID NO: 5667866 - DNA, 25 bp, Homo sapien
tgacaaagggacaaataccatgtgg

SEQ ID NO: 5667867 - DNA, 25 bp, Homo sapien
tctgatacctgctacaacatggctg

SEQ ID NO: 5667868 - DNA, 25 bp, Homo sapien
tattttaagtgacataagccatgac

SEQ ID NO: 5667869 - DNA, 25 bp, Homo sapien
tgacataagccatgacaaagggaca

SEQ ID NO: 5667870 - DNA, 25 bp, Homo sapien
tacaacatggctgaatcttgaggac

SEQ ID NO: 5667871 - DNA, 25 bp, Homo sapien
tacattgttgtaaaatcatcatcac

SEQ ID NO: 5667872 - DNA, 25 bp, Homo sapien
tatccatatccagaacttttttgtc

SEQ ID NO: 5667873 - DNA, 25 bp, Homo sapien
aatcatcatcactatccatatccag

SEQ ID NO: 5667874 - DNA, 25 bp, Homo sapien
taagtacatgtacattgttgtaaaa

SEQ ID NO: 5667875 - DNA, 25 bp, Homo sapien
tatccagaacttttttgtcttccgc

SEQ ID NO: 5667876 - DNA, 25 bp, Homo sapien
tgttgtaaaatcatcatcactatcc

SEQ ID NO: 5667877 - DNA, 25 bp, Homo sapien
ggatagtgatgatgattttacaaca

SEQ ID NO: 5667878 - DNA, 25 bp, Homo sapien
tgcggaagacaaaaaagttctggat

SEQ ID NO: 5667879 - DNA, 25 bp, Homo sapien
caaaaaagttctggatatggatagt

SEQ ID NO: 5667880 - DNA, 25 bp, Homo sapien
gacaaaaaagttctggatatggata

SEQ ID NO: 5667881 - DNA, 25 bp, Homo sapien
gattttacaacaatgtacatgtact

SEQ ID NO: 5667882 - DNA, 25 bp, Homo sapien
tgatgatgattttacaacaatgtac

SEQ ID NO: 5667883 - DNA, 25 bp, Homo sapien
tgaccttaggtgatccacccacctt

SEQ ID NO: 5667884 - DNA, 25 bp, Homo sapien
accttaggtgatccacccaccttgg

SEQ ID NO: 5667885 - DNA, 25 bp, Homo sapien
ccttaggtgatccacccaccttggc

SEQ ID NO: 5667886 - DNA, 25 bp, Homo sapien
caccgtgcctggcccttgttttatt

SEQ ID NO: 5667887 - DNA, 25 bp, Homo sapien
gaccttaggtgatccacccaccttg

SEQ ID NO: 5667888 - DNA, 25 bp, Homo sapien
cttaggtgatccacccaccttggcc

SEQ ID NO: 5667889 - DNA, 25 bp, Homo sapien
gccaaggtgggtggatcacctaagg

SEQ ID NO: 5667890 - DNA, 25 bp, Homo sapien
ccaaggtgggtggatcacctaaggt

SEQ ID NO: 5667891 - DNA, 25 bp, Homo sapien
ggccaaggtgggtggatcacctaag

SEQ ID NO: 5667892 - DNA, 25 bp, Homo sapien
caaggtgggtggatcacctaaggtc

SEQ ID NO: 5667893 - DNA, 25 bp, Homo sapien
aataaaacaagggccaggcacggtg

SEQ ID NO: 5667894 - DNA, 25 bp, Homo sapien
aaggtgggtggatcacctaaggtca

SEQ ID NO: 5667895 - DNA, 25 bp, Homo sapien
aacctccacctcctgagtttaagca

SEQ ID NO: 5667896 - DNA, 25 bp, Homo sapien
cggagtctctcttgcccaggctgga

SEQ ID NO: 5667897 - DNA, 25 bp, Homo sapien
cagtggcgcaatctcggctcactgc

SEQ ID NO: 5667898 - DNA, 25 bp, Homo sapien
gtgcagtggcgcaatctcggctcac

SEQ ID NO: 5667899 - DNA, 25 bp, Homo sapien
tccagcctgggcaagagagactccg

SEQ ID NO: 5667900 - DNA, 25 bp, Homo sapien
gtgagccgagattgcgccactgcac

SEQ ID NO: 5667901 - DNA, 25 bp, Homo sapien
gcagtgagccgagattgcgccactg

SEQ ID NO: 5667902 - DNA, 25 bp, Homo sapien
tgcttaaactcaggaggtggaggtt

SEQ ID NO: 5667903 - DNA, 25 bp, Homo sapien
ttacaaacatactttcagaatgtct

SEQ ID NO: 5667904 - DNA, 25 bp, Homo sapien
aatccccttgatgtttagactgttt

SEQ ID NO: 5667905 - DNA, 25 bp, Homo sapien
tttaatccccttgatgtttagactg

SEQ ID NO: 5667906 - DNA, 25 bp, Homo sapien
taatccccttgatgtttagactgtt

SEQ ID NO: 5667907 - DNA, 25 bp, Homo sapien
tacaaacatactttcagaatgtctt

SEQ ID NO: 5667908 - DNA, 25 bp, Homo sapien
tagtttaatccccttgatgtttaga

SEQ ID NO: 5667909 - DNA, 25 bp, Homo sapien
aagacattctgaaagtatgtttgta

SEQ ID NO: 5667910 - DNA, 25 bp, Homo sapien
aacagtctaaacatcaaggggatta

SEQ ID NO: 5667911 - DNA, 25 bp, Homo sapien
cagtctaaacatcaaggggattaaa

SEQ ID NO: 5667912 - DNA, 25 bp, Homo sapien
aaacagtctaaacatcaaggggatt

SEQ ID NO: 5667913 - DNA, 25 bp, Homo sapien
agacattctgaaagtatgtttgtaa

SEQ ID NO: 5667914 - DNA, 25 bp, Homo sapien
tctaaacatcaaggggattaaacta

SEQ ID NO: 5667915 - DNA, 25 bp, Homo sapien
tttatcttacagaacaaagacattc

SEQ ID NO: 5667916 - DNA, 25 bp, Homo sapien
ctgaaagtatgtttgtaaagttgaa

SEQ ID NO: 5667917 - DNA, 25 bp, Homo sapien
caaagacattctgaaagtatgtttg

SEQ ID NO: 5667918 - DNA, 25 bp, Homo sapien
attaaaacagtctaaacatcaaggg

SEQ ID NO: 5667919 - DNA, 25 bp, Homo sapien
agacattctgaaagtatgtttgtaa

SEQ ID NO: 5667920 - DNA, 25 bp, Homo sapien
tctaaacatcaaggggattaaacta

SEQ ID NO: 5667921 - DNA, 25 bp, Homo sapien
cctgggcgatggagtgagaccctgt

SEQ ID NO: 5667922 - DNA, 25 bp, Homo sapien
tcgaggctgcagggagccatgattg

SEQ ID NO: 5667923 - DNA, 25 bp, Homo sapien
ccatgattgcaccactgcactccag

SEQ ID NO: 5667924 - DNA, 25 bp, Homo sapien
ctgggcgatggagtgagaccctgtc

SEQ ID NO: 5667925 - DNA, 25 bp, Homo sapien
gtcgaggctgcagggagccatgatt

SEQ ID NO: 5667926 - DNA, 25 bp, Homo sapien
cgaggctgcagggagccatgattgc

SEQ ID NO: 5667927 - DNA, 25 bp, Homo sapien
gcaatcatggctccctgcagcctcg

SEQ ID NO: 5667928 - DNA, 25 bp, Homo sapien
acagggtctcactccatcgcccagg

SEQ ID NO: 5667929 - DNA, 25 bp, Homo sapien
aatcatggctccctgcagcctcgac

SEQ ID NO: 5667930 - DNA, 25 bp, Homo sapien
gacagggtctcactccatcgcccag

SEQ ID NO: 5667931 - DNA, 25 bp, Homo sapien
caatcatggctccctgcagcctcga

SEQ ID NO: 5667932 - DNA, 25 bp, Homo sapien
ctggagtgcagtggtgcaatcatgg

SEQ ID NO: 5667933 - DNA, 25 bp, Homo sapien
cctacccttaggcaagcagaggcgg

SEQ ID NO: 5667934 - DNA, 25 bp, Homo sapien
tccctacccttaggcaagcagaggc

SEQ ID NO: 5667935 - DNA, 25 bp, Homo sapien
tacccttaggcaagcagaggcggga

SEQ ID NO: 5667936 - DNA, 25 bp, Homo sapien
tgtctgtaatccctacccttaggca

SEQ ID NO: 5667937 - DNA, 25 bp, Homo sapien
taatccctacccttaggcaagcaga

SEQ ID NO: 5667938 - DNA, 25 bp, Homo sapien
tctgtaatccctacccttaggcaag

SEQ ID NO: 5667939 - DNA, 25 bp, Homo sapien
tctgcttgcctaagggtagggatta

SEQ ID NO: 5667940 - DNA, 25 bp, Homo sapien
gcttgcctaagggtagggattacag

SEQ ID NO: 5667941 - DNA, 25 bp, Homo sapien
ccgcctctgcttgcctaagggtagg

SEQ ID NO: 5667942 - DNA, 25 bp, Homo sapien
tgcctaagggtagggattacagaca

SEQ ID NO: 5667943 - DNA, 25 bp, Homo sapien
tcccgcctctgcttgcctaagggta

SEQ ID NO: 5667944 - DNA, 25 bp, Homo sapien
gcctctgcttgcctaagggtaggga

SEQ ID NO: 5667945 - DNA, 25 bp, Homo sapien
gctggggccataggtgtgtgctacc

SEQ ID NO: 5667946 - DNA, 25 bp, Homo sapien
agctggggccataggtgtgtgctac

SEQ ID NO: 5667947 - DNA, 25 bp, Homo sapien
tggggccataggtgtgtgctaccac

SEQ ID NO: 5667948 - DNA, 25 bp, Homo sapien
gggccataggtgtgtgctaccacac

SEQ ID NO: 5667949 - DNA, 25 bp, Homo sapien
ctggggccataggtgtgtgctacca

SEQ ID NO: 5667950 - DNA, 25 bp, Homo sapien
ggggccataggtgtgtgctaccaca

SEQ ID NO: 5667951 - DNA, 25 bp, Homo sapien
aaaatgttttaattagccaggtgtg

SEQ ID NO: 5667952 - DNA, 25 bp, Homo sapien
tggtagcacacacctatggccccag

SEQ ID NO: 5667953 - DNA, 25 bp, Homo sapien
gtagcacacacctatggccccagct

SEQ ID NO: 5667954 - DNA, 25 bp, Homo sapien
gtggtagcacacacctatggcccca

SEQ ID NO: 5667955 - DNA, 25 bp, Homo sapien
gtgtggtagcacacacctatggccc

SEQ ID NO: 5667956 - DNA, 25 bp, Homo sapien
tgtggtagcacacacctatggcccc

SEQ ID NO: 5667957 - DNA, 25 bp, Homo sapien
caagataattatgtatatcattata

SEQ ID NO: 5667958 - DNA, 25 bp, Homo sapien
tataatgatatacataattatcttg

SEQ ID NO: 5667959 - DNA, 25 bp, Homo sapien
tagattctaactgaaatgacaagat

SEQ ID NO: 5667960 - DNA, 25 bp, Homo sapien
gattctaactgaaatgacaagataa

SEQ ID NO: 5667961 - DNA, 25 bp, Homo sapien
taactgaaatgacaagataattatg

SEQ ID NO: 5667962 - DNA, 25 bp, Homo sapien
gacaagataattatgtatatcatta

SEQ ID NO: 5667963 - DNA, 25 bp, Homo sapien
ttctagattctaactgaaatgacaa

SEQ ID NO: 5667964 - DNA, 25 bp, Homo sapien
taatagttttctatttcttcagatt

SEQ ID NO: 5667965 - DNA, 25 bp, Homo sapien
tatcttgtcatttcagttagaatct

SEQ ID NO: 5667966 - DNA, 25 bp, Homo sapien
tataatgatatacataattatcttg

SEQ ID NO: 5667967 - DNA, 25 bp, Homo sapien
aaaatctgaagaaatagaaaactat

SEQ ID NO: 5667968 - DNA, 25 bp, Homo sapien
ttgtcatttcagttagaatctagaa

SEQ ID NO: 5667969 - DNA, 25 bp, Homo sapien
catttcagttagaatctagaaaaaa

SEQ ID NO: 5667970 - DNA, 25 bp, Homo sapien
cataattatcttgtcatttcagtta

SEQ ID NO: 5667971 - DNA, 25 bp, Homo sapien
tcctttccaactttgtgggactctg

SEQ ID NO: 5667972 - DNA, 25 bp, Homo sapien
tctggttaccatgatcacaataata

SEQ ID NO: 5667973 - DNA, 25 bp, Homo sapien
cctttccaactttgtgggactctga

SEQ ID NO: 5667974 - DNA, 25 bp, Homo sapien
atctggttaccatgatcacaataat

SEQ ID NO: 5667975 - DNA, 25 bp, Homo sapien
tgaggtcctttccaactttgtggga

SEQ ID NO: 5667976 - DNA, 25 bp, Homo sapien
tcccacaaagttggaaaggacctca

SEQ ID NO: 5667977 - DNA, 25 bp, Homo sapien
tattattgtgatcatggtaaccaga

SEQ ID NO: 5667978 - DNA, 25 bp, Homo sapien
attattgtgatcatggtaaccagat

SEQ ID NO: 5667979 - DNA, 25 bp, Homo sapien
tcagagtcccacaaagttggaaagg

SEQ ID NO: 5667980 - DNA, 25 bp, Homo sapien
cagagtcccacaaagttggaaagga

SEQ ID NO: 5667981 - DNA, 25 bp, Homo sapien
tgttctgtgccatattcctagcacc

SEQ ID NO: 5667982 - DNA, 25 bp, Homo sapien
gaaatgatgcttgtcatgtagtaga

SEQ ID NO: 5667983 - DNA, 25 bp, Homo sapien
tcctagcacctgaaatgatgcttgt

SEQ ID NO: 5667984 - DNA, 25 bp, Homo sapien
aagttccttgagagccagactgttt

SEQ ID NO: 5667985 - DNA, 25 bp, Homo sapien
tctctccataggagtgtaagttcct

SEQ ID NO: 5667986 - DNA, 25 bp, Homo sapien
atgtttctctccataggagtgtaag

SEQ ID NO: 5667987 - DNA, 25 bp, Homo sapien
ggtgctaggaatatggcacagaaca

SEQ ID NO: 5667988 - DNA, 25 bp, Homo sapien
aggaacttacactcctatggagaga

SEQ ID NO: 5667989 - DNA, 25 bp, Homo sapien
gacaagcatcatttcaggtgctagg

SEQ ID NO: 5667990 - DNA, 25 bp, Homo sapien
catctactacatgacaagcatcatt

SEQ ID NO: 5667991 - DNA, 25 bp, Homo sapien
aaacagtctggctctcaaggaactt

SEQ ID NO: 5667992 - DNA, 25 bp, Homo sapien
cttacactcctatggagagaaacat

SEQ ID NO: 5667993 - DNA, 25 bp, Homo sapien
tttcttcatagtacatatctctacc

SEQ ID NO: 5667994 - DNA, 25 bp, Homo sapien
catagtacatatctctacctagtag

SEQ ID NO: 5667995 - DNA, 25 bp, Homo sapien
ttcatagtacatatctctacctagt

SEQ ID NO: 5667996 - DNA, 25 bp, Homo sapien
tcttcatagtacatatctctaccta

SEQ ID NO: 5667997 - DNA, 25 bp, Homo sapien
agtacatatctctacctagtagttc

SEQ ID NO: 5667998 - DNA, 25 bp, Homo sapien
tagtacatatctctacctagtagtt

SEQ ID NO: 5667999 - DNA, 25 bp, Homo sapien
gaactactaggtagagatatgtact

SEQ ID NO: 5668000 - DNA, 25 bp, Homo sapien
ctaggtagagatatgtactatgaag

SEQ ID NO: 5668001 - DNA, 25 bp, Homo sapien
ggtagagatatgtactatgaagaaa

SEQ ID NO: 5668002 - DNA, 25 bp, Homo sapien
actactaggtagagatatgtactat

SEQ ID NO: 5668003 - DNA, 25 bp, Homo sapien
tagagatatgtactatgaagaaaat

SEQ ID NO: 5668004 - DNA, 25 bp, Homo sapien
tactaggtagagatatgtactatga

SEQ ID NO: 5668005 - DNA, 25 bp, Homo sapien
tttcttcatagtacatatctctacc

SEQ ID NO: 5668006 - DNA, 25 bp, Homo sapien
catagtacatatctctacctagtag

SEQ ID NO: 5668007 - DNA, 25 bp, Homo sapien
gaaaagcttcccagtcactctttat

SEQ ID NO: 5668008 - DNA, 25 bp, Homo sapien
agtacatatctctacctagtagttc

SEQ ID NO: 5668009 - DNA, 25 bp, Homo sapien
tcccagtcactctttattatcctgt

SEQ ID NO: 5668010 - DNA, 25 bp, Homo sapien
tctctacctagtagttcctggttta

SEQ ID NO: 5668011 - DNA, 25 bp, Homo sapien
gaactactaggtagagatatgtact

SEQ ID NO: 5668012 - DNA, 25 bp, Homo sapien
ggtagagatatgtactatgaagaaa

SEQ ID NO: 5668013 - DNA, 25 bp, Homo sapien
atcaataagttaacaaataaaccag

SEQ ID NO: 5668014 - DNA, 25 bp, Homo sapien
taaaccaggaactactaggtagaga

SEQ ID NO: 5668015 - DNA, 25 bp, Homo sapien
ataaagagtgactgggaagcttttc

SEQ ID NO: 5668016 - DNA, 25 bp, Homo sapien
taaaacaggataataaagagtgact

SEQ ID NO: 5668017 - DNA, 25 bp, Homo sapien
ctcttaaagagaccttctgttatga

SEQ ID NO: 5668018 - DNA, 25 bp, Homo sapien
tcttaaagagaccttctgttatgat

SEQ ID NO: 5668019 - DNA, 25 bp, Homo sapien
aagctcttaaagagaccttctgtta

SEQ ID NO: 5668020 - DNA, 25 bp, Homo sapien
gctcttaaagagaccttctgttatg

SEQ ID NO: 5668021 - DNA, 25 bp, Homo sapien
tattggtcttaaatagcaagctctt

SEQ ID NO: 5668022 - DNA, 25 bp, Homo sapien
agctcttaaagagaccttctgttat

SEQ ID NO: 5668023 - DNA, 25 bp, Homo sapien
ataacagaaggtctctttaagagct

SEQ ID NO: 5668024 - DNA, 25 bp, Homo sapien
tcataacagaaggtctctttaagag

SEQ ID NO: 5668025 - DNA, 25 bp, Homo sapien
atcataacagaaggtctctttaaga

SEQ ID NO: 5668026 - DNA, 25 bp, Homo sapien
aagagcttgctatttaagaccaata

SEQ ID NO: 5668027 - DNA, 25 bp, Homo sapien
cataacagaaggtctctttaagagc

SEQ ID NO: 5668028 - DNA, 25 bp, Homo sapien
taacagaaggtctctttaagagctt

SEQ ID NO: 5668029 - DNA, 25 bp, Homo sapien
taacatgtcaagattgttcttactg

SEQ ID NO: 5668030 - DNA, 25 bp, Homo sapien
gtccttgtgtttataacatgtcaag

SEQ ID NO: 5668031 - DNA, 25 bp, Homo sapien
ggcgtctgtccttgtgtttataaca

SEQ ID NO: 5668032 - DNA, 25 bp, Homo sapien
accatgcctggcgtctgtccttgtg

SEQ ID NO: 5668033 - DNA, 25 bp, Homo sapien
gcctggcgtctgtccttgtgtttat

SEQ ID NO: 5668034 - DNA, 25 bp, Homo sapien
tcaagattgttcttactgtctagaa

SEQ ID NO: 5668035 - DNA, 25 bp, Homo sapien
tataaacacaaggacagacgccagg

SEQ ID NO: 5668036 - DNA, 25 bp, Homo sapien
acaatcttgacatgttataaacaca

SEQ ID NO: 5668037 - DNA, 25 bp, Homo sapien
tgacatgttataaacacaaggacag

SEQ ID NO: 5668038 - DNA, 25 bp, Homo sapien
tctagacagtaagaacaatcttgac

SEQ ID NO: 5668039 - DNA, 25 bp, Homo sapien
tgttataaacacaaggacagacgcc

SEQ ID NO: 5668040 - DNA, 25 bp, Homo sapien
cacaaggacagacgccaggcatggt

SEQ ID NO: 5668041 - DNA, 25 bp, Homo sapien
tgcctctttttaaccttgcgaacca

SEQ ID NO: 5668042 - DNA, 25 bp, Homo sapien
tggttcgcaaggttaaaaagaggca

SEQ ID NO: 5668043 - DNA, 25 bp, Homo sapien
ccttctgcctctttttaaccttgcg

SEQ ID NO: 5668044 - DNA, 25 bp, Homo sapien
gccttctgcctctttttaaccttgc

SEQ ID NO: 5668045 - DNA, 25 bp, Homo sapien
tctgcctctttttaaccttgcgaac

SEQ ID NO: 5668046 - DNA, 25 bp, Homo sapien
actgcgcccggccttctgcctcttt

SEQ ID NO: 5668047 - DNA, 25 bp, Homo sapien
cttctgcctctttttaaccttgcga

SEQ ID NO: 5668048 - DNA, 25 bp, Homo sapien
tgcctctttttaaccttgcgaacca

SEQ ID NO: 5668049 - DNA, 25 bp, Homo sapien
gcaaggttaaaaagaggcagaaggc

SEQ ID NO: 5668050 - DNA, 25 bp, Homo sapien
tcgcaaggttaaaaagaggcagaag

SEQ ID NO: 5668051 - DNA, 25 bp, Homo sapien
cgcaaggttaaaaagaggcagaagg

SEQ ID NO: 5668052 - DNA, 25 bp, Homo sapien
aaagaggcagaaggccgggcgcagt

SEQ ID NO: 5668053 - DNA, 25 bp, Homo sapien
gttcgcaaggttaaaaagaggcaga

SEQ ID NO: 5668054 - DNA, 25 bp, Homo sapien
tggttcgcaaggttaaaaagaggca

SEQ ID NO: 5668055 - DNA, 25 bp, Homo sapien
ccaggagcctgccactgcacccggc

SEQ ID NO: 5668056 - DNA, 25 bp, Homo sapien
aggagcctgccactgcacccggcta

SEQ ID NO: 5668057 - DNA, 25 bp, Homo sapien
gattccaggagcctgccactgcacc

SEQ ID NO: 5668058 - DNA, 25 bp, Homo sapien
attccaggagcctgccactgcaccc

SEQ ID NO: 5668059 - DNA, 25 bp, Homo sapien
ttccaggagcctgccactgcacccg

SEQ ID NO: 5668060 - DNA, 25 bp, Homo sapien
tccaggagcctgccactgcacccgg

SEQ ID NO: 5668061 - DNA, 25 bp, Homo sapien
ccgggtgcagtggcaggctcctgga

SEQ ID NO: 5668062 - DNA, 25 bp, Homo sapien
ttagccgggtgcagtggcaggctcc

SEQ ID NO: 5668063 - DNA, 25 bp, Homo sapien
gccgggtgcagtggcaggctcctgg

SEQ ID NO: 5668064 - DNA, 25 bp, Homo sapien
ggtgcagtggcaggctcctggaatc

SEQ ID NO: 5668065 - DNA, 25 bp, Homo sapien
cgggtgcagtggcaggctcctggaa

SEQ ID NO: 5668066 - DNA, 25 bp, Homo sapien
gggtgcagtggcaggctcctggaat

SEQ ID NO: 5668067 - DNA, 25 bp, Homo sapien
agtgcagtggcgcgatctcagctca

SEQ ID NO: 5668068 - DNA, 25 bp, Homo sapien
aacctccgcccttggagttcaagcg

SEQ ID NO: 5668069 - DNA, 25 bp, Homo sapien
ccgcccttggagttcaagcgattct

SEQ ID NO: 5668070 - DNA, 25 bp, Homo sapien
tccgcccttggagttcaagcgattc

SEQ ID NO: 5668071 - DNA, 25 bp, Homo sapien
cagtggcgcgatctcagctcactgc

SEQ ID NO: 5668072 - DNA, 25 bp, Homo sapien
cgcttgaactccaagggcggaggtt

SEQ ID NO: 5668073 - DNA, 25 bp, Homo sapien
tgagctgagatcgcgccactgcact

SEQ ID NO: 5668074 - DNA, 25 bp, Homo sapien
gcagtgagctgagatcgcgccactg

SEQ ID NO: 5668075 - DNA, 25 bp, Homo sapien
agaatcgcttgaactccaagggcgg

SEQ ID NO: 5668076 - DNA, 25 bp, Homo sapien
gaatcgcttgaactccaagggcgga

SEQ ID NO: 5668077 - DNA, 25 bp, Homo sapien
tcttcaccagttagtacgtggtgtc

SEQ ID NO: 5668078 - DNA, 25 bp, Homo sapien
tgcctcttcaccagttagtacgtgg

SEQ ID NO: 5668079 - DNA, 25 bp, Homo sapien
cgtggtgtcaatgttggttgtggtt

SEQ ID NO: 5668080 - DNA, 25 bp, Homo sapien
cagttagtacgtggtgtcaatgttg

SEQ ID NO: 5668081 - DNA, 25 bp, Homo sapien
caccagttagtacgtggtgtcaatg

SEQ ID NO: 5668082 - DNA, 25 bp, Homo sapien
tagtacgtggtgtcaatgttggttg

SEQ ID NO: 5668083 - DNA, 25 bp, Homo sapien
gacaccacgtactaactggtgaaga

SEQ ID NO: 5668084 - DNA, 25 bp, Homo sapien
cattgacaccacgtactaactggtg

SEQ ID NO: 5668085 - DNA, 25 bp, Homo sapien
accacgtactaactggtgaagaggc

SEQ ID NO: 5668086 - DNA, 25 bp, Homo sapien
caaccaacattgacaccacgtacta

SEQ ID NO: 5668087 - DNA, 25 bp, Homo sapien
caacattgacaccacgtactaactg

SEQ ID NO: 5668088 - DNA, 25 bp, Homo sapien
cacgtactaactggtgaagaggcag

SEQ ID NO: 5668089 - DNA, 25 bp, Homo sapien
gtaaatccagttgccaacttgatgt

SEQ ID NO: 5668090 - DNA, 25 bp, Homo sapien
tgtatacctacaactactcctttat

SEQ ID NO: 5668091 - DNA, 25 bp, Homo sapien
ccagttgccaacttgatgtcttcac

SEQ ID NO: 5668092 - DNA, 25 bp, Homo sapien
agtaaatccagttgccaacttgatg

SEQ ID NO: 5668093 - DNA, 25 bp, Homo sapien
ttagtaaatccagttgccaacttga

SEQ ID NO: 5668094 - DNA, 25 bp, Homo sapien
attagtaaatccagttgccaacttg

SEQ ID NO: 5668095 - DNA, 25 bp, Homo sapien
ataaaggagtagttgtaggtataca

SEQ ID NO: 5668096 - DNA, 25 bp, Homo sapien
caagttggcaactggatttactaat

SEQ ID NO: 5668097 - DNA, 25 bp, Homo sapien
catcaagttggcaactggatttact

SEQ ID NO: 5668098 - DNA, 25 bp, Homo sapien
acatcaagttggcaactggatttac

SEQ ID NO: 5668099 - DNA, 25 bp, Homo sapien
tcaagttggcaactggatttactaa

SEQ ID NO: 5668100 - DNA, 25 bp, Homo sapien
gtgaagacatcaagttggcaactgg

SEQ ID NO: 5668101 - DNA, 25 bp, Homo sapien
tgtgctgggcgcttctctgactgag

SEQ ID NO: 5668102 - DNA, 25 bp, Homo sapien
tgaatacaacactctcctgcttgtt

SEQ ID NO: 5668103 - DNA, 25 bp, Homo sapien
tttcttgaatacaacactctcctgc

SEQ ID NO: 5668104 - DNA, 25 bp, Homo sapien
tacaacactctcctgcttgttctgt

SEQ ID NO: 5668105 - DNA, 25 bp, Homo sapien
tgctgggcgcttctctgactgagag

SEQ ID NO: 5668106 - DNA, 25 bp, Homo sapien
tgctgttttgtgctgggcgcttctc

SEQ ID NO: 5668107 - DNA, 25 bp, Homo sapien
caagcaggagagtgttgtattcaag

SEQ ID NO: 5668108 - DNA, 25 bp, Homo sapien
gcaggagagtgttgtattcaagaaa

SEQ ID NO: 5668109 - DNA, 25 bp, Homo sapien
gagaagcgcccagcacaaaacagca

SEQ ID NO: 5668110 - DNA, 25 bp, Homo sapien
ctctcagtcagagaagcgcccagca

SEQ ID NO: 5668111 - DNA, 25 bp, Homo sapien
tcagtcagagaagcgcccagcacaa

SEQ ID NO: 5668112 - DNA, 25 bp, Homo sapien
gacagaacaagcaggagagtgttgt

SEQ ID NO: 5668113 - DNA, 25 bp, Homo sapien
taactattcattccttaacccactc

SEQ ID NO: 5668114 - DNA, 25 bp, Homo sapien
tattggtctgtcctcgctacttcac

SEQ ID NO: 5668115 - DNA, 25 bp, Homo sapien
ctacttcactgaattacttcactga

SEQ ID NO: 5668116 - DNA, 25 bp, Homo sapien
aactattcattccttaacccactct

SEQ ID NO: 5668117 - DNA, 25 bp, Homo sapien
gtattggtctgtcctcgctacttca

SEQ ID NO: 5668118 - DNA, 25 bp, Homo sapien
ctattcattccttaacccactcttg

SEQ ID NO: 5668119 - DNA, 25 bp, Homo sapien
caagagtgggttaaggaatgaatag

SEQ ID NO: 5668120 - DNA, 25 bp, Homo sapien
gagtgggttaaggaatgaatagtta

SEQ ID NO: 5668121 - DNA, 25 bp, Homo sapien
agagtgggttaaggaatgaatagtt

SEQ ID NO: 5668122 - DNA, 25 bp, Homo sapien
tcagtgaagtaattcagtgaagtag

SEQ ID NO: 5668123 - DNA, 25 bp, Homo sapien
gtgaagtagcgaggacagaccaata

SEQ ID NO: 5668124 - DNA, 25 bp, Homo sapien
tgaagtagcgaggacagaccaatac

SEQ ID NO: 5668125 - DNA, 25 bp, Homo sapien
catcatacaaacatgttctaatatt

SEQ ID NO: 5668126 - DNA, 25 bp, Homo sapien
ttcccatcatacaaacatgttctaa

SEQ ID NO: 5668127 - DNA, 25 bp, Homo sapien
tcccatcatacaaacatgttctaat

SEQ ID NO: 5668128 - DNA, 25 bp, Homo sapien
ccatcatacaaacatgttctaatat

SEQ ID NO: 5668129 - DNA, 25 bp, Homo sapien
tcatacaaacatgttctaatattgt

SEQ ID NO: 5668130 - DNA, 25 bp, Homo sapien
cccatcatacaaacatgttctaata

SEQ ID NO: 5668131 - DNA, 25 bp, Homo sapien
atattagaacatgtttgtatgatgg

SEQ ID NO: 5668132 - DNA, 25 bp, Homo sapien
acaatattagaacatgtttgtatga

SEQ ID NO: 5668133 - DNA, 25 bp, Homo sapien
tattagaacatgtttgtatgatggg

SEQ ID NO: 5668134 - DNA, 25 bp, Homo sapien
ttagaacatgtttgtatgatgggaa

SEQ ID NO: 5668135 - DNA, 25 bp, Homo sapien
attagaacatgtttgtatgatggga

SEQ ID NO: 5668136 - DNA, 25 bp, Homo sapien
caatattagaacatgtttgtatgat

SEQ ID NO: 5668137 - DNA, 25 bp, Homo sapien
ttcccatcatacaaacatgttctaa

SEQ ID NO: 5668138 - DNA, 25 bp, Homo sapien
tgtttctctcctggatcattcccat

SEQ ID NO: 5668139 - DNA, 25 bp, Homo sapien
gttccgtgtcattaatttctgtttc

SEQ ID NO: 5668140 - DNA, 25 bp, Homo sapien
caaacatgttctaatattgtctatt

SEQ ID NO: 5668141 - DNA, 25 bp, Homo sapien
tcatacaaacatgttctaatattgt

SEQ ID NO: 5668142 - DNA, 25 bp, Homo sapien
cccatcatacaaacatgttctaata

SEQ ID NO: 5668143 - DNA, 25 bp, Homo sapien
gaaacagaaattaatgacacggaac

SEQ ID NO: 5668144 - DNA, 25 bp, Homo sapien
tattagaacatgtttgtatgatggg

SEQ ID NO: 5668145 - DNA, 25 bp, Homo sapien
ttagaacatgtttgtatgatgggaa

SEQ ID NO: 5668146 - DNA, 25 bp, Homo sapien
aatagacaatattagaacatgtttg

SEQ ID NO: 5668147 - DNA, 25 bp, Homo sapien
caatattagaacatgtttgtatgat

SEQ ID NO: 5668148 - DNA, 25 bp, Homo sapien
atgggaatgatccaggagagaaaca

SEQ ID NO: 5668149 - DNA, 25 bp, Homo sapien
gatcacctacttttatacccatact

SEQ ID NO: 5668150 - DNA, 25 bp, Homo sapien
tatacccatactctctgacttctca

SEQ ID NO: 5668151 - DNA, 25 bp, Homo sapien
ctttcctgtgaaagctctgcttgtg

SEQ ID NO: 5668152 - DNA, 25 bp, Homo sapien
ttcaccactgaatcataacagatca

SEQ ID NO: 5668153 - DNA, 25 bp, Homo sapien
gaatcataacagatcacctactttt

SEQ ID NO: 5668154 - DNA, 25 bp, Homo sapien
ggtggatgatgtgtctctttcctgt

SEQ ID NO: 5668155 - DNA, 25 bp, Homo sapien
acaggaaagagacacatcatccacc

SEQ ID NO: 5668156 - DNA, 25 bp, Homo sapien
tgatctgttatgattcagtggtgaa

SEQ ID NO: 5668157 - DNA, 25 bp, Homo sapien
agtatgggtataaaagtaggtgatc

SEQ ID NO: 5668158 - DNA, 25 bp, Homo sapien
cacaagcagagctttcacaggaaag

SEQ ID NO: 5668159 - DNA, 25 bp, Homo sapien
aagtaggtgatctgttatgattcag

SEQ ID NO: 5668160 - DNA, 25 bp, Homo sapien
tgagaagtcagagagtatgggtata

SEQ ID NO: 5668161 - DNA, 25 bp, Homo sapien
gaatagtgagcaatgatgtgctagg

SEQ ID NO: 5668162 - DNA, 25 bp, Homo sapien
ggcttctactctcacagagtttgta

SEQ ID NO: 5668163 - DNA, 25 bp, Homo sapien
gctaggttctctgccaaggtgctgg

SEQ ID NO: 5668164 - DNA, 25 bp, Homo sapien
caatgatgtgctaggttctctgcca

SEQ ID NO: 5668165 - DNA, 25 bp, Homo sapien
acagacgtggcttctactctcacag

SEQ ID NO: 5668166 - DNA, 25 bp, Homo sapien
gacgtggcttctactctcacagagt

SEQ ID NO: 5668167 - DNA, 25 bp, Homo sapien
caaactctgtgagagtagaagccac

SEQ ID NO: 5668168 - DNA, 25 bp, Homo sapien
tggcagagaacctagcacatcattg

SEQ ID NO: 5668169 - DNA, 25 bp, Homo sapien
gaacctagcacatcattgctcacta

SEQ ID NO: 5668170 - DNA, 25 bp, Homo sapien
tacaaactctgtgagagtagaagcc

SEQ ID NO: 5668171 - DNA, 25 bp, Homo sapien
cagcaccttggcagagaacctagca

SEQ ID NO: 5668172 - DNA, 25 bp, Homo sapien
tctgtgagagtagaagccacgtctg

SEQ ID NO: 5668173 - DNA, 25 bp, Homo sapien
ctggcttattgccctttggaaccct

SEQ ID NO: 5668174 - DNA, 25 bp, Homo sapien
gcctggcttattgccctttggaacc

SEQ ID NO: 5668175 - DNA, 25 bp, Homo sapien
tatgcctggcttattgccctttgga

SEQ ID NO: 5668176 - DNA, 25 bp, Homo sapien
tgcctggcttattgccctttggaac

SEQ ID NO: 5668177 - DNA, 25 bp, Homo sapien
atgcctggcttattgccctttggaa

SEQ ID NO: 5668178 - DNA, 25 bp, Homo sapien
gttccaaagggcaataagccaggca

SEQ ID NO: 5668179 - DNA, 25 bp, Homo sapien
agggttccaaagggcaataagccag

SEQ ID NO: 5668180 - DNA, 25 bp, Homo sapien
ggttccaaagggcaataagccaggc

SEQ ID NO: 5668181 - DNA, 25 bp, Homo sapien
ttccaaagggcaataagccaggcat

SEQ ID NO: 5668182 - DNA, 25 bp, Homo sapien
tccaaagggcaataagccaggcata

SEQ ID NO: 5668183 - DNA, 25 bp, Homo sapien
gcctggcttattgccctttggaacc

SEQ ID NO: 5668184 - DNA, 25 bp, Homo sapien
ctctccagcagattgaggtctttcc

SEQ ID NO: 5668185 - DNA, 25 bp, Homo sapien
ggcacacagcactatgcctggctta

SEQ ID NO: 5668186 - DNA, 25 bp, Homo sapien
tgactctccagcagattgaggtctt

SEQ ID NO: 5668187 - DNA, 25 bp, Homo sapien
tatgcctggcttattgccctttgga

SEQ ID NO: 5668188 - DNA, 25 bp, Homo sapien
ttccctgactctccagcagattgag

SEQ ID NO: 5668189 - DNA, 25 bp, Homo sapien
gctccaacagtattgagctacttgt

SEQ ID NO: 5668190 - DNA, 25 bp, Homo sapien
tcctctatactctgctccaacagta

SEQ ID NO: 5668191 - DNA, 25 bp, Homo sapien
tctgctccaacagtattgagctact

SEQ ID NO: 5668192 - DNA, 25 bp, Homo sapien
tccaacagtattgagctacttgtca

SEQ ID NO: 5668193 - DNA, 25 bp, Homo sapien
tatactctgctccaacagtattgag

SEQ ID NO: 5668194 - DNA, 25 bp, Homo sapien
tactctgctccaacagtattgagct

SEQ ID NO: 5668195 - DNA, 25 bp, Homo sapien
tactgttggagcagagtatagagga

SEQ ID NO: 5668196 - DNA, 25 bp, Homo sapien
caagtagctcaatactgttggagca

SEQ ID NO: 5668197 - DNA, 25 bp, Homo sapien
tgacaagtagctcaatactgttgga

SEQ ID NO: 5668198 - DNA, 25 bp, Homo sapien
gacaagtagctcaatactgttggag

SEQ ID NO: 5668199 - DNA, 25 bp, Homo sapien
tagctcaatactgttggagcagagt

SEQ ID NO: 5668200 - DNA, 25 bp, Homo sapien
gctcaatactgttggagcagagtat

SEQ ID NO: 5668201 - DNA, 25 bp, Homo sapien
ttagaagtttgccacccatgtgcct

SEQ ID NO: 5668202 - DNA, 25 bp, Homo sapien
gattagaagtttgccacccatgtgc

SEQ ID NO: 5668203 - DNA, 25 bp, Homo sapien
taactgttatccgagagattagaag

SEQ ID NO: 5668204 - DNA, 25 bp, Homo sapien
tatccgagagattagaagtttgcca

SEQ ID NO: 5668205 - DNA, 25 bp, Homo sapien
ccgagagattagaagtttgccaccc

SEQ ID NO: 5668206 - DNA, 25 bp, Homo sapien
gagagattagaagtttgccacccat

SEQ ID NO: 5668207 - DNA, 25 bp, Homo sapien
aggcacatgggtggcaaacttctaa

SEQ ID NO: 5668208 - DNA, 25 bp, Homo sapien
catgggtggcaaacttctaatctct

SEQ ID NO: 5668209 - DNA, 25 bp, Homo sapien
gggtggcaaacttctaatctctcgg

SEQ ID NO: 5668210 - DNA, 25 bp, Homo sapien
gcacatgggtggcaaacttctaatc

SEQ ID NO: 5668211 - DNA, 25 bp, Homo sapien
ggcaaacttctaatctctcggataa

SEQ ID NO: 5668212 - DNA, 25 bp, Homo sapien
cttctaatctctcggataacagtta

SEQ ID NO: 5668213 - DNA, 25 bp, Homo sapien
aataagtctttggtcttgaaacaag

SEQ ID NO: 5668214 - DNA, 25 bp, Homo sapien
tttcccaactttcatctgttctgtt

SEQ ID NO: 5668215 - DNA, 25 bp, Homo sapien
ataagtctttggtcttgaaacaagt

SEQ ID NO: 5668216 - DNA, 25 bp, Homo sapien
atttcccaactttcatctgttctgt

SEQ ID NO: 5668217 - DNA, 25 bp, Homo sapien
aacagaacagatgaaagttgggaaa

SEQ ID NO: 5668218 - DNA, 25 bp, Homo sapien
acagaacagatgaaagttgggaaat

SEQ ID NO: 5668219 - DNA, 25 bp, Homo sapien
acttgtttcaagaccaaagacttat

SEQ ID NO: 5668220 - DNA, 25 bp, Homo sapien
cttgtttcaagaccaaagacttatt

SEQ ID NO: 5668221 - DNA, 25 bp, Homo sapien
cattaagactgtcctcaaaataagt

SEQ ID NO: 5668222 - DNA, 25 bp, Homo sapien
aataagtctttggtcttgaaacaag

SEQ ID NO: 5668223 - DNA, 25 bp, Homo sapien
caactttcatctgttctgttctcta

SEQ ID NO: 5668224 - DNA, 25 bp, Homo sapien
ctgttctctaatctatatgaggtaa

SEQ ID NO: 5668225 - DNA, 25 bp, Homo sapien
atttcccaactttcatctgttctgt

SEQ ID NO: 5668226 - DNA, 25 bp, Homo sapien
tggtcttgaaacaagttttaattca

SEQ ID NO: 5668227 - DNA, 25 bp, Homo sapien
tagagaacagaacagatgaaagttg

SEQ ID NO: 5668228 - DNA, 25 bp, Homo sapien
aacagaacagatgaaagttgggaaa

SEQ ID NO: 5668229 - DNA, 25 bp, Homo sapien
caaagacttattttgaggacagtct

SEQ ID NO: 5668230 - DNA, 25 bp, Homo sapien
acttgtttcaagaccaaagacttat

SEQ ID NO: 5668231 - DNA, 25 bp, Homo sapien
tgaattaaaacttgtttcaagacca

SEQ ID NO: 5668232 - DNA, 25 bp, Homo sapien
ttacctcatatagattagagaacag

SEQ ID NO: 5668233 - DNA, 25 bp, Homo sapien
atattggctttaaaaggacctcaga

SEQ ID NO: 5668234 - DNA, 25 bp, Homo sapien
cagagtataatatattggctttaaa

SEQ ID NO: 5668235 - DNA, 25 bp, Homo sapien
attggctttaaaaggacctcagagg

SEQ ID NO: 5668236 - DNA, 25 bp, Homo sapien
tattggctttaaaaggacctcagag

SEQ ID NO: 5668237 - DNA, 25 bp, Homo sapien
tttaaagccaatatattatactctg

SEQ ID NO: 5668238 - DNA, 25 bp, Homo sapien
cctctgaggtccttttaaagccaat

SEQ ID NO: 5668239 - DNA, 25 bp, Homo sapien
tctgaggtccttttaaagccaatat

SEQ ID NO: 5668240 - DNA, 25 bp, Homo sapien
ctctgaggtccttttaaagccaata

SEQ ID NO: 5668241 - DNA, 25 bp, Homo sapien
gctttaaaaggacctcagaggtaga

SEQ ID NO: 5668242 - DNA, 25 bp, Homo sapien
tgtgtgttttggatcatcagagtat

SEQ ID NO: 5668243 - DNA, 25 bp, Homo sapien
cagagtataatatattggctttaaa

SEQ ID NO: 5668244 - DNA, 25 bp, Homo sapien
gaaagttgtcattgagagatctttt

SEQ ID NO: 5668245 - DNA, 25 bp, Homo sapien
gacctcagaggtagaatatttttct

SEQ ID NO: 5668246 - DNA, 25 bp, Homo sapien
tattggctttaaaaggacctcagag

SEQ ID NO: 5668247 - DNA, 25 bp, Homo sapien
caatatattatactctgatgatcca

SEQ ID NO: 5668248 - DNA, 25 bp, Homo sapien
gaaaaatattctacctctgaggtcc

SEQ ID NO: 5668249 - DNA, 25 bp, Homo sapien
tttaaagccaatatattatactctg

SEQ ID NO: 5668250 - DNA, 25 bp, Homo sapien
cctctgaggtccttttaaagccaat

SEQ ID NO: 5668251 - DNA, 25 bp, Homo sapien
aaagatctctcaatgacaactttct

SEQ ID NO: 5668252 - DNA, 25 bp, Homo sapien
tactctgatgatccaaaacacacac

SEQ ID NO: 5668253 - DNA, 25 bp, Homo sapien
atagtaaagcttctgaagatgcttt

SEQ ID NO: 5668254 - DNA, 25 bp, Homo sapien
aatagtaaagcttctgaagatgctt

SEQ ID NO: 5668255 - DNA, 25 bp, Homo sapien
tagtaaagcttctgaagatgctttt

SEQ ID NO: 5668256 - DNA, 25 bp, Homo sapien
gtaatagtaaagcttctgaagatgc

SEQ ID NO: 5668257 - DNA, 25 bp, Homo sapien
taatagtaaagcttctgaagatgct

SEQ ID NO: 5668258 - DNA, 25 bp, Homo sapien
gtaaagcttctgaagatgctttttt

SEQ ID NO: 5668259 - DNA, 25 bp, Homo sapien
gcatcttcagaagctttactattac

SEQ ID NO: 5668260 - DNA, 25 bp, Homo sapien
agcatcttcagaagctttactatta

SEQ ID NO: 5668261 - DNA, 25 bp, Homo sapien
aaagcatcttcagaagctttactat

SEQ ID NO: 5668262 - DNA, 25 bp, Homo sapien
aagcatcttcagaagctttactatt

SEQ ID NO: 5668263 - DNA, 25 bp, Homo sapien
aaaaaagcatcttcagaagctttac

SEQ ID NO: 5668264 - DNA, 25 bp, Homo sapien
aaaagcatcttcagaagctttacta

SEQ ID NO: 5668265 - DNA, 25 bp, Homo sapien
ggaaatgtaggcgatactgttgaag

SEQ ID NO: 5668266 - DNA, 25 bp, Homo sapien
tgtaggcgatactgttgaaggatta

SEQ ID NO: 5668267 - DNA, 25 bp, Homo sapien
ttaggtagtgctgggtgctagatgt

SEQ ID NO: 5668268 - DNA, 25 bp, Homo sapien
tgaaggattaggtagtgctgggtgc

SEQ ID NO: 5668269 - DNA, 25 bp, Homo sapien
aaatgtaggcgatactgttgaagga

SEQ ID NO: 5668270 - DNA, 25 bp, Homo sapien
agagggaaatgtaggcgatactgtt

SEQ ID NO: 5668271 - DNA, 25 bp, Homo sapien
cttcaacagtatcgcctacatttcc

SEQ ID NO: 5668272 - DNA, 25 bp, Homo sapien
aacagtatcgcctacatttccctct

SEQ ID NO: 5668273 - DNA, 25 bp, Homo sapien
taatccttcaacagtatcgcctaca

SEQ ID NO: 5668274 - DNA, 25 bp, Homo sapien
acatctagcacccagcactacctaa

SEQ ID NO: 5668275 - DNA, 25 bp, Homo sapien
ccagcactacctaatccttcaacag

SEQ ID NO: 5668276 - DNA, 25 bp, Homo sapien
tccttcaacagtatcgcctacattt

SEQ ID NO: 5668277 - DNA, 25 bp, Homo sapien
tgccaagacctgtttttgagcccgt

SEQ ID NO: 5668278 - DNA, 25 bp, Homo sapien
tgggaactaggtggcttgtcattga

SEQ ID NO: 5668279 - DNA, 25 bp, Homo sapien
tgaaattgaattggcagactggact

SEQ ID NO: 5668280 - DNA, 25 bp, Homo sapien
gacctgtttttgagcccgttgtggc

SEQ ID NO: 5668281 - DNA, 25 bp, Homo sapien
tctccagtgggaactaggtggcttg

SEQ ID NO: 5668282 - DNA, 25 bp, Homo sapien
tttgagcccgttgtggctgaaattg

SEQ ID NO: 5668283 - DNA, 25 bp, Homo sapien
cgggctcaaaaacaggtcttggcat

SEQ ID NO: 5668284 - DNA, 25 bp, Homo sapien
caagccacctagttcccactggaga

SEQ ID NO: 5668285 - DNA, 25 bp, Homo sapien
caatttcagccacaacgggctcaaa

SEQ ID NO: 5668286 - DNA, 25 bp, Homo sapien
agtccagtctgccaattcaatttca

SEQ ID NO: 5668287 - DNA, 25 bp, Homo sapien
ccacaacgggctcaaaaacaggtct

SEQ ID NO: 5668288 - DNA, 25 bp, Homo sapien
tcaatgacaagccacctagttccca

SEQ ID NO: 5668289 - DNA, 25 bp, Homo sapien
gatgaccaagacctagttgtctgtg

SEQ ID NO: 5668290 - DNA, 25 bp, Homo sapien
ccttgccttcaggatgtgttaacca

SEQ ID NO: 5668291 - DNA, 25 bp, Homo sapien
cctagatgaccaagacctagttgtc

SEQ ID NO: 5668292 - DNA, 25 bp, Homo sapien
tgtgttaaccatcatccgaccagat

SEQ ID NO: 5668293 - DNA, 25 bp, Homo sapien
taaccatcatccgaccagatacact

SEQ ID NO: 5668294 - DNA, 25 bp, Homo sapien
acactacccctttgctctaagtatt

SEQ ID NO: 5668295 - DNA, 25 bp, Homo sapien
gacaactaggtcttggtcatctagg

SEQ ID NO: 5668296 - DNA, 25 bp, Homo sapien
tatctggtcggatgatggttaacac

SEQ ID NO: 5668297 - DNA, 25 bp, Homo sapien
tggttaacacatcctgaaggcaagg

SEQ ID NO: 5668298 - DNA, 25 bp, Homo sapien
tagtgtatctggtcggatgatggtt

SEQ ID NO: 5668299 - DNA, 25 bp, Homo sapien
ccacagacaactaggtcttggtcat

SEQ ID NO: 5668300 - DNA, 25 bp, Homo sapien
tgatggttaacacatcctgaaggca

SEQ ID NO: 5668301 - DNA, 25 bp, Homo sapien
tcactgtcctgaacccaatttttgt

SEQ ID NO: 5668302 - DNA, 25 bp, Homo sapien
tgttcacataactctattttagcct

SEQ ID NO: 5668303 - DNA, 25 bp, Homo sapien
gatttggtaaccttgtagactgcta

SEQ ID NO: 5668304 - DNA, 25 bp, Homo sapien
taaccttgtagactgctatatttag

SEQ ID NO: 5668305 - DNA, 25 bp, Homo sapien
tccaggatttggtaaccttgtagac

SEQ ID NO: 5668306 - DNA, 25 bp, Homo sapien
tttggtaaccttgtagactgctata

SEQ ID NO: 5668307 - DNA, 25 bp, Homo sapien
taaatatagcagtctacaaggttac

SEQ ID NO: 5668308 - DNA, 25 bp, Homo sapien
tagcagtctacaaggttaccaaatc

SEQ ID NO: 5668309 - DNA, 25 bp, Homo sapien
ggctaaaatagagttatgtgaacaa

SEQ ID NO: 5668310 - DNA, 25 bp, Homo sapien
tatagcagtctacaaggttaccaaa

SEQ ID NO: 5668311 - DNA, 25 bp, Homo sapien
tctacaaggttaccaaatcctggaa

SEQ ID NO: 5668312 - DNA, 25 bp, Homo sapien
acaaaaattgggttcaggacagtga

SEQ ID NO: 5668313 - DNA, 25 bp, Homo sapien
tcacgcttgggcagagccgaactca

SEQ ID NO: 5668314 - DNA, 25 bp, Homo sapien
tgccctcacgcttgggcagagccga

SEQ ID NO: 5668315 - DNA, 25 bp, Homo sapien
cagtagtctgctcattgtgccctca

SEQ ID NO: 5668316 - DNA, 25 bp, Homo sapien
cattgtgccctcacgcttgggcaga

SEQ ID NO: 5668317 - DNA, 25 bp, Homo sapien
cccagtagtctgctcattgtgccct

SEQ ID NO: 5668318 - DNA, 25 bp, Homo sapien
acgcttgggcagagccgaactcagg

SEQ ID NO: 5668319 - DNA, 25 bp, Homo sapien
cctgagttcggctctgcccaagcgt

SEQ ID NO: 5668320 - DNA, 25 bp, Homo sapien
agggcacaatgagcagactactggg

SEQ ID NO: 5668321 - DNA, 25 bp, Homo sapien
ttcggctctgcccaagcgtgagggc

SEQ ID NO: 5668322 - DNA, 25 bp, Homo sapien
tgagggcacaatgagcagactactg

SEQ ID NO: 5668323 - DNA, 25 bp, Homo sapien
tctgcccaagcgtgagggcacaatg

SEQ ID NO: 5668324 - DNA, 25 bp, Homo sapien
tgagttcggctctgcccaagcgtga

SEQ ID NO: 5668325 - DNA, 25 bp, Homo sapien
tgttggcccgtccagagttcttggc

SEQ ID NO: 5668326 - DNA, 25 bp, Homo sapien
agagttcttggcaattggtgtgtca

SEQ ID NO: 5668327 - DNA, 25 bp, Homo sapien
tgtcatgtgtgcctcgtgccctgtg

SEQ ID NO: 5668328 - DNA, 25 bp, Homo sapien
tcttggcaattggtgtgtcatgtgt

SEQ ID NO: 5668329 - DNA, 25 bp, Homo sapien
agagtgggcacagctgcgcagacaa

SEQ ID NO: 5668330 - DNA, 25 bp, Homo sapien
gtgggcacagctgcgcagacaacgc

SEQ ID NO: 5668331 - DNA, 25 bp, Homo sapien
ttgtctgcgcagctgtgcccactct

SEQ ID NO: 5668332 - DNA, 25 bp, Homo sapien
tgacacaccaattgccaagaactct

SEQ ID NO: 5668333 - DNA, 25 bp, Homo sapien
cacagggcacgaggcacacatgaca

SEQ ID NO: 5668334 - DNA, 25 bp, Homo sapien
tgccaagaactctggacgggccaac

SEQ ID NO: 5668335 - DNA, 25 bp, Homo sapien
cacacatgacacaccaattgccaag

SEQ ID NO: 5668336 - DNA, 25 bp, Homo sapien
gcgttgtctgcgcagctgtgcccac

SEQ ID NO: 5668337 - DNA, 25 bp, Homo sapien
gcctcacctcaatagcttactgctc

SEQ ID NO: 5668338 - DNA, 25 bp, Homo sapien
cctcacctcaatagcttactgctcc

SEQ ID NO: 5668339 - DNA, 25 bp, Homo sapien
agcctcacctcaatagcttactgct

SEQ ID NO: 5668340 - DNA, 25 bp, Homo sapien
cagcagctgggtgaactggtgtctt

SEQ ID NO: 5668341 - DNA, 25 bp, Homo sapien
tcaatagcttactgctccctcagga

SEQ ID NO: 5668342 - DNA, 25 bp, Homo sapien
ctcaatagcttactgctccctcagg

SEQ ID NO: 5668343 - DNA, 25 bp, Homo sapien
cctgagggagcagtaagctattgag

SEQ ID NO: 5668344 - DNA, 25 bp, Homo sapien
ggagcagtaagctattgaggtgagg

SEQ ID NO: 5668345 - DNA, 25 bp, Homo sapien
gagcagtaagctattgaggtgaggc

SEQ ID NO: 5668346 - DNA, 25 bp, Homo sapien
agcagtaagctattgaggtgaggct

SEQ ID NO: 5668347 - DNA, 25 bp, Homo sapien
tcctgagggagcagtaagctattga

SEQ ID NO: 5668348 - DNA, 25 bp, Homo sapien
aagacaccagttcacccagctgctg

SEQ ID NO: 5668349 - DNA, 25 bp, Homo sapien
ggcttggcggggtaagggtggtgca

SEQ ID NO: 5668350 - DNA, 25 bp, Homo sapien
cttggcggggtaagggtggtgcagg

SEQ ID NO: 5668351 - DNA, 25 bp, Homo sapien
gcttggcggggtaagggtggtgcag

SEQ ID NO: 5668352 - DNA, 25 bp, Homo sapien
cctgcaccacccttaccccgccaag

SEQ ID NO: 5668353 - DNA, 25 bp, Homo sapien
tgcaccacccttaccccgccaagcc

SEQ ID NO: 5668354 - DNA, 25 bp, Homo sapien
ctgcaccacccttaccccgccaagc

SEQ ID NO: 5668355 - DNA, 25 bp, Homo sapien
caacacctgtggaggaaacaggcgg

SEQ ID NO: 5668356 - DNA, 25 bp, Homo sapien
aggcctgggagcctgggcttggcgg

SEQ ID NO: 5668357 - DNA, 25 bp, Homo sapien
taagggtggtgcaggggcaacacct

SEQ ID NO: 5668358 - DNA, 25 bp, Homo sapien
gcaacacctgtggaggaaacaggcg

SEQ ID NO: 5668359 - DNA, 25 bp, Homo sapien
ggaggcctgggagcctgggcttggc

SEQ ID NO: 5668360 - DNA, 25 bp, Homo sapien
ggcaacacctgtggaggaaacaggc

SEQ ID NO: 5668361 - DNA, 25 bp, Homo sapien
tgtttcctccacaggtgttgcccct

SEQ ID NO: 5668362 - DNA, 25 bp, Homo sapien
aggtgttgcccctgcaccaccctta

SEQ ID NO: 5668363 - DNA, 25 bp, Homo sapien
ccgccaagcccaggctcccaggcct

SEQ ID NO: 5668364 - DNA, 25 bp, Homo sapien
caaccccgcctgtttcctccacagg

SEQ ID NO: 5668365 - DNA, 25 bp, Homo sapien
ccgcctgtttcctccacaggtgttg

SEQ ID NO: 5668366 - DNA, 25 bp, Homo sapien
gcctgtttcctccacaggtgttgcc

SEQ ID NO: 5668367 - DNA, 25 bp, Homo sapien
agacacacctgccacttgctgcttg

SEQ ID NO: 5668368 - DNA, 25 bp, Homo sapien
tgtctgatcgttgtcagggccctgt

SEQ ID NO: 5668369 - DNA, 25 bp, Homo sapien
ctgatcgttgtcagggccctgtggt

SEQ ID NO: 5668370 - DNA, 25 bp, Homo sapien
tgccacttgctgcttgcgaggaaag

SEQ ID NO: 5668371 - DNA, 25 bp, Homo sapien
catctgttggtgtctgatcgttgtc

SEQ ID NO: 5668372 - DNA, 25 bp, Homo sapien
tctgtgctgggttgcatctgttggt

SEQ ID NO: 5668373 - DNA, 25 bp, Homo sapien
ctttcctcgcaagcagcaagtggca

SEQ ID NO: 5668374 - DNA, 25 bp, Homo sapien
caagcagcaagtggcaggtgtgtct

SEQ ID NO: 5668375 - DNA, 25 bp, Homo sapien
accaacagatgcaacccagcacaga

SEQ ID NO: 5668376 - DNA, 25 bp, Homo sapien
acagggccctgacaacgatcagaca

SEQ ID NO: 5668377 - DNA, 25 bp, Homo sapien
accacagggccctgacaacgatcag

SEQ ID NO: 5668378 - DNA, 25 bp, Homo sapien
tgacaacgatcagacaccaacagat

SEQ ID NO: 5668379 - DNA, 25 bp, Homo sapien
gaagtgaggcacgagctccccaatt

SEQ ID NO: 5668380 - DNA, 25 bp, Homo sapien
gagccagaggtgggactccagcacc

SEQ ID NO: 5668381 - DNA, 25 bp, Homo sapien
aagtgaggcacgagctccccaattc

SEQ ID NO: 5668382 - DNA, 25 bp, Homo sapien
agtgaggcacgagctccccaattcc

SEQ ID NO: 5668383 - DNA, 25 bp, Homo sapien
aggagccagaggtgggactccagca

SEQ ID NO: 5668384 - DNA, 25 bp, Homo sapien
ggaagtgaggcacgagctccccaat

SEQ ID NO: 5668385 - DNA, 25 bp, Homo sapien
attggggagctcgtgcctcacttcc

SEQ ID NO: 5668386 - DNA, 25 bp, Homo sapien
ggtgctggagtcccacctctggctc

SEQ ID NO: 5668387 - DNA, 25 bp, Homo sapien
tgctggagtcccacctctggctcct

SEQ ID NO: 5668388 - DNA, 25 bp, Homo sapien
aattggggagctcgtgcctcacttc

SEQ ID NO: 5668389 - DNA, 25 bp, Homo sapien
gaattggggagctcgtgcctcactt

SEQ ID NO: 5668390 - DNA, 25 bp, Homo sapien
ggaattggggagctcgtgcctcact

SEQ ID NO: 5668391 - DNA, 25 bp, Homo sapien
agtggaggtcaccactgtgtttcct

SEQ ID NO: 5668392 - DNA, 25 bp, Homo sapien
cagtggaggtcaccactgtgtttcc

SEQ ID NO: 5668393 - DNA, 25 bp, Homo sapien
cttcacttcactagcttagcgctcc

SEQ ID NO: 5668394 - DNA, 25 bp, Homo sapien
tcactagcttagcgctccctcagga

SEQ ID NO: 5668395 - DNA, 25 bp, Homo sapien
gtggaggtcaccactgtgtttcctt

SEQ ID NO: 5668396 - DNA, 25 bp, Homo sapien
ttcactagcttagcgctccctcagg

SEQ ID NO: 5668397 - DNA, 25 bp, Homo sapien
cctgagggagcgctaagctagtgaa

SEQ ID NO: 5668398 - DNA, 25 bp, Homo sapien
aggaaacacagtggtgacctccact

SEQ ID NO: 5668399 - DNA, 25 bp, Homo sapien
tcctgagggagcgctaagctagtga

SEQ ID NO: 5668400 - DNA, 25 bp, Homo sapien
ggagcgctaagctagtgaagtgaag

SEQ ID NO: 5668401 - DNA, 25 bp, Homo sapien
ggaaacacagtggtgacctccactg

SEQ ID NO: 5668402 - DNA, 25 bp, Homo sapien
aaggaaacacagtggtgacctccac

SEQ ID NO: 5668403 - DNA, 25 bp, Homo sapien
catgctggttgtgggttggcagggc

SEQ ID NO: 5668404 - DNA, 25 bp, Homo sapien
gccctgccaacccacaaccagcatg

SEQ ID NO: 5668405 - DNA, 25 bp, Homo sapien
tcaggcccaccagtgccatgctggt

SEQ ID NO: 5668406 - DNA, 25 bp, Homo sapien
catgctggttgtgggttggcagggc

SEQ ID NO: 5668407 - DNA, 25 bp, Homo sapien
accagtgccatgctggttgtgggtt

SEQ ID NO: 5668408 - DNA, 25 bp, Homo sapien
gggcagccctgtcaggcccaccagt

SEQ ID NO: 5668409 - DNA, 25 bp, Homo sapien
gcaggaccggccttggggcagccct

SEQ ID NO: 5668410 - DNA, 25 bp, Homo sapien
caccagtgccatgctggttgtgggt

SEQ ID NO: 5668411 - DNA, 25 bp, Homo sapien
agggctgccccaaggccggtcctgc

SEQ ID NO: 5668412 - DNA, 25 bp, Homo sapien
gccctgccaacccacaaccagcatg

SEQ ID NO: 5668413 - DNA, 25 bp, Homo sapien
gtgggcctgacagggctgccccaag

SEQ ID NO: 5668414 - DNA, 25 bp, Homo sapien
cagcatggcactggtgggcctgaca

SEQ ID NO: 5668415 - DNA, 25 bp, Homo sapien
aacccacaaccagcatggcactggt

SEQ ID NO: 5668416 - DNA, 25 bp, Homo sapien
caaccagcatggcactggtgggcct

SEQ ID NO: 5668417 - DNA, 25 bp, Homo sapien
gacagaagctcacatggggtccagc

SEQ ID NO: 5668418 - DNA, 25 bp, Homo sapien
catatcgggtccttcgaagcacatg

SEQ ID NO: 5668419 - DNA, 25 bp, Homo sapien
ggtccttcgaagcacatgatttagc

SEQ ID NO: 5668420 - DNA, 25 bp, Homo sapien
tttgagtagctctcccatatcgggt

SEQ ID NO: 5668421 - DNA, 25 bp, Homo sapien
cccacaggaccatttgagtagctct

SEQ ID NO: 5668422 - DNA, 25 bp, Homo sapien
ggtccagcccacaggaccatttgag

SEQ ID NO: 5668423 - DNA, 25 bp, Homo sapien
gacccgatatgggagagctactcaa

SEQ ID NO: 5668424 - DNA, 25 bp, Homo sapien
tactcaaatggtcctgtgggctgga

SEQ ID NO: 5668425 - DNA, 25 bp, Homo sapien
agagctactcaaatggtcctgtggg

SEQ ID NO: 5668426 - DNA, 25 bp, Homo sapien
taaatcatgtgcttcgaaggacccg

SEQ ID NO: 5668427 - DNA, 25 bp, Homo sapien
tcgaaggacccgatatgggagagct

SEQ ID NO: 5668428 - DNA, 25 bp, Homo sapien
ggctggaccccatgtgagcttctgt

SEQ ID NO: 5668429 - DNA, 25 bp, Homo sapien
gtcaccataataccatcaagtcata

SEQ ID NO: 5668430 - DNA, 25 bp, Homo sapien
tgtcctgagaactgtaccccttcca

SEQ ID NO: 5668431 - DNA, 25 bp, Homo sapien
caattgctggatgtgtcctgagaac

SEQ ID NO: 5668432 - DNA, 25 bp, Homo sapien
taccatcaagtcataatttctgtga

SEQ ID NO: 5668433 - DNA, 25 bp, Homo sapien
ttcaagtaggtgtgtagcaattgct

SEQ ID NO: 5668434 - DNA, 25 bp, Homo sapien
cagtgcttcaagtaggtgtgtagca

SEQ ID NO: 5668435 - DNA, 25 bp, Homo sapien
gcaattgctacacacctacttgaag

SEQ ID NO: 5668436 - DNA, 25 bp, Homo sapien
ggaaggggtacagttctcaggacac

SEQ ID NO: 5668437 - DNA, 25 bp, Homo sapien
cacagaaattatgacttgatggtat

SEQ ID NO: 5668438 - DNA, 25 bp, Homo sapien
tatgacttgatggtattatggtgac

SEQ ID NO: 5668439 - DNA, 25 bp, Homo sapien
tgctacacacctacttgaagcactg

SEQ ID NO: 5668440 - DNA, 25 bp, Homo sapien
gttctcaggacacatccagcaattg

SEQ ID NO: 5668441 - DNA, 25 bp, Homo sapien
cctagctagtgcattatgggaacca

SEQ ID NO: 5668442 - DNA, 25 bp, Homo sapien
tagctagtgcattatgggaaccagg

SEQ ID NO: 5668443 - DNA, 25 bp, Homo sapien
gggctcctagctagtgcattatggg

SEQ ID NO: 5668444 - DNA, 25 bp, Homo sapien
tggcatggctcattgattgtgggag

SEQ ID NO: 5668445 - DNA, 25 bp, Homo sapien
gctcctagctagtgcattatgggaa

SEQ ID NO: 5668446 - DNA, 25 bp, Homo sapien
ctagtgcattatgggaaccaggctg

SEQ ID NO: 5668447 - DNA, 25 bp, Homo sapien
cagcctggttcccataatgcactag

SEQ ID NO: 5668448 - DNA, 25 bp, Homo sapien
tggttcccataatgcactagctagg

SEQ ID NO: 5668449 - DNA, 25 bp, Homo sapien
ccataatgcactagctaggagcccc

SEQ ID NO: 5668450 - DNA, 25 bp, Homo sapien
tcccataatgcactagctaggagcc

SEQ ID NO: 5668451 - DNA, 25 bp, Homo sapien
ctcccacaatcaatgagccatgcca

SEQ ID NO: 5668452 - DNA, 25 bp, Homo sapien
gcctggttcccataatgcactagct

SEQ ID NO: 5668453 - DNA, 25 bp, Homo sapien
gttggctggcacgtagaggaggtgg

SEQ ID NO: 5668454 - DNA, 25 bp, Homo sapien
cactgcagtgcgtgctgatggttgg

SEQ ID NO: 5668455 - DNA, 25 bp, Homo sapien
actgcagtgcgtgctgatggttggc

SEQ ID NO: 5668456 - DNA, 25 bp, Homo sapien
tggttggctggcacgtagaggaggt

SEQ ID NO: 5668457 - DNA, 25 bp, Homo sapien
tgatggttggctggcacgtagagga

SEQ ID NO: 5668458 - DNA, 25 bp, Homo sapien
atggttggctggcacgtagaggagg

SEQ ID NO: 5668459 - DNA, 25 bp, Homo sapien
ccacctcctctacgtgccagccaac

SEQ ID NO: 5668460 - DNA, 25 bp, Homo sapien
ccaaccatcagcacgcactgcagtg

SEQ ID NO: 5668461 - DNA, 25 bp, Homo sapien
cctcctctacgtgccagccaaccat

SEQ ID NO: 5668462 - DNA, 25 bp, Homo sapien
acctcctctacgtgccagccaacca

SEQ ID NO: 5668463 - DNA, 25 bp, Homo sapien
gccaaccatcagcacgcactgcagt

SEQ ID NO: 5668464 - DNA, 25 bp, Homo sapien
tcctctacgtgccagccaaccatca

SEQ ID NO: 5668465 - DNA, 25 bp, Homo sapien
accctggccactgcagtgcgtgctg

SEQ ID NO: 5668466 - DNA, 25 bp, Homo sapien
tggcacgtagaggaggtggcagggc

SEQ ID NO: 5668467 - DNA, 25 bp, Homo sapien
tgagcagcaggagccaggttagtgg

SEQ ID NO: 5668468 - DNA, 25 bp, Homo sapien
actgcagtgcgtgctgatggttggc

SEQ ID NO: 5668469 - DNA, 25 bp, Homo sapien
tggttggctggcacgtagaggaggt

SEQ ID NO: 5668470 - DNA, 25 bp, Homo sapien
tgatggttggctggcacgtagagga

SEQ ID NO: 5668471 - DNA, 25 bp, Homo sapien
tccccactaacctggctcctgctgc

SEQ ID NO: 5668472 - DNA, 25 bp, Homo sapien
tgccacctcctctacgtgccagcca

SEQ ID NO: 5668473 - DNA, 25 bp, Homo sapien
ctcgggcctccccactaacctggct

SEQ ID NO: 5668474 - DNA, 25 bp, Homo sapien
atcagcacgcactgcagtggccagg

SEQ ID NO: 5668475 - DNA, 25 bp, Homo sapien
gccaaccatcagcacgcactgcagt

SEQ ID NO: 5668476 - DNA, 25 bp, Homo sapien
tcctctacgtgccagccaaccatca

SEQ ID NO: 5668477 - DNA, 25 bp, Homo sapien
actttaggagaattggcctcactcc

SEQ ID NO: 5668478 - DNA, 25 bp, Homo sapien
tactttaggagaattggcctcactc

SEQ ID NO: 5668479 - DNA, 25 bp, Homo sapien
tcatcttgcctgttatctactttag

SEQ ID NO: 5668480 - DNA, 25 bp, Homo sapien
tcaggaattgtctcaaatctttctt

SEQ ID NO: 5668481 - DNA, 25 bp, Homo sapien
tttaggagaattggcctcactcctg

SEQ ID NO: 5668482 - DNA, 25 bp, Homo sapien
tctactttaggagaattggcctcac

SEQ ID NO: 5668483 - DNA, 25 bp, Homo sapien
ctaaagtagataacaggcaagatga

SEQ ID NO: 5668484 - DNA, 25 bp, Homo sapien
gtgaggccaattctcctaaagtaga

SEQ ID NO: 5668485 - DNA, 25 bp, Homo sapien
caggagtgaggccaattctcctaaa

SEQ ID NO: 5668486 - DNA, 25 bp, Homo sapien
aagaaagatttgagacaattcctga

SEQ ID NO: 5668487 - DNA, 25 bp, Homo sapien
gagtgaggccaattctcctaaagta

SEQ ID NO: 5668488 - DNA, 25 bp, Homo sapien
aagtagataacaggcaagatgaaag

SEQ ID NO: 5668489 - DNA, 25 bp, Homo sapien
tagtatgctctcaatgttagaagcg

SEQ ID NO: 5668490 - DNA, 25 bp, Homo sapien
gctctcaatgttagaagcgtgggaa

SEQ ID NO: 5668491 - DNA, 25 bp, Homo sapien
tcaatgttagaagcgtgggaaactg

SEQ ID NO: 5668492 - DNA, 25 bp, Homo sapien
atgcccctcttcttgtgccccaccc

SEQ ID NO: 5668493 - DNA, 25 bp, Homo sapien
taacccttttagtatgctctcaatg

SEQ ID NO: 5668494 - DNA, 25 bp, Homo sapien
tctcaatgttagaagcgtgggaaac

SEQ ID NO: 5668495 - DNA, 25 bp, Homo sapien
gcttctaacattgagagcatactaa

SEQ ID NO: 5668496 - DNA, 25 bp, Homo sapien
cacgcttctaacattgagagcatac

SEQ ID NO: 5668497 - DNA, 25 bp, Homo sapien
cagtttcccacgcttctaacattga

SEQ ID NO: 5668498 - DNA, 25 bp, Homo sapien
tttcccacgcttctaacattgagag

SEQ ID NO: 5668499 - DNA, 25 bp, Homo sapien
cattgagagcatactaaaagggtta

SEQ ID NO: 5668500 - DNA, 25 bp, Homo sapien
taacattgagagcatactaaaaggg

SEQ ID NO: 5668501 - DNA, 25 bp, Homo sapien
aatttgggagacagcaaactggctg

SEQ ID NO: 5668502 - DNA, 25 bp, Homo sapien
aacaaacaggtgagacttcttccca

SEQ ID NO: 5668503 - DNA, 25 bp, Homo sapien
tgggaagaagtctcacctgtttgtt

SEQ ID NO: 5668504 - DNA, 25 bp, Homo sapien
cagccagtttgctgtctcccaaatt

SEQ ID NO: 5668505 - DNA, 25 bp, Homo sapien
tgggaagaagtctcacctgtttgtt

SEQ ID NO: 5668506 - DNA, 25 bp, Homo sapien
agtttgctgtctcccaaattcaggg

SEQ ID NO: 5668507 - DNA, 25 bp, Homo sapien
ggcccaagagccaacaatttccaca

SEQ ID NO: 5668508 - DNA, 25 bp, Homo sapien
gagccaacaatttccacagccagtt

SEQ ID NO: 5668509 - DNA, 25 bp, Homo sapien
cagccagtttgctgtctcccaaatt

SEQ ID NO: 5668510 - DNA, 25 bp, Homo sapien
tataataggcccaagagccaacaat

SEQ ID NO: 5668511 - DNA, 25 bp, Homo sapien
tgatgagaatgctggcggaggacga

SEQ ID NO: 5668512 - DNA, 25 bp, Homo sapien
tcgacagcaatgatcgggagcgagt

SEQ ID NO: 5668513 - DNA, 25 bp, Homo sapien
gatatttgtggtcgacagcaatgat

SEQ ID NO: 5668514 - DNA, 25 bp, Homo sapien
caatgatcgggagcgagtaaatgag

SEQ ID NO: 5668515 - DNA, 25 bp, Homo sapien
gacagcaatgatcgggagcgagtaa

SEQ ID NO: 5668516 - DNA, 25 bp, Homo sapien
gggagcgagtaaatgaggcccggga

SEQ ID NO: 5668517 - DNA, 25 bp, Homo sapien
ctcatttactcgctcccgatcattg

SEQ ID NO: 5668518 - DNA, 25 bp, Homo sapien
gtcctccgccagcattctcatcagc

SEQ ID NO: 5668519 - DNA, 25 bp, Homo sapien
atcattgctgtcgaccacaaatatc

SEQ ID NO: 5668520 - DNA, 25 bp, Homo sapien
catttactcgctcccgatcattgct

SEQ ID NO: 5668521 - DNA, 25 bp, Homo sapien
tactcgctcccgatcattgctgtcg

SEQ ID NO: 5668522 - DNA, 25 bp, Homo sapien
tcccgggcctcatttactcgctccc

SEQ ID NO: 5668523 - DNA, 25 bp, Homo sapien
ttgggtatgagcagagagtgtggct

SEQ ID NO: 5668524 - DNA, 25 bp, Homo sapien
tcaggcctagcgtgggttggttggg

SEQ ID NO: 5668525 - DNA, 25 bp, Homo sapien
ggctgtctttgttaatgggtggcca

SEQ ID NO: 5668526 - DNA, 25 bp, Homo sapien
tgctcaggcctagcgtgggttggtt

SEQ ID NO: 5668527 - DNA, 25 bp, Homo sapien
cgtgggttggttgggtatgagcaga

SEQ ID NO: 5668528 - DNA, 25 bp, Homo sapien
cctagcgtgggttggttgggtatga

SEQ ID NO: 5668529 - DNA, 25 bp, Homo sapien
aacacccaaggtatgctcaggccta

SEQ ID NO: 5668530 - DNA, 25 bp, Homo sapien
acacccaaggtatgctcaggcctag

SEQ ID NO: 5668531 - DNA, 25 bp, Homo sapien
gaacacccaaggtatgctcaggcct

SEQ ID NO: 5668532 - DNA, 25 bp, Homo sapien
acccaaggtatgctcaggcctagcg

SEQ ID NO: 5668533 - DNA, 25 bp, Homo sapien
cacccaaggtatgctcaggcctagc

SEQ ID NO: 5668534 - DNA, 25 bp, Homo sapien
ctaggcctgagcataccttgggtgt

SEQ ID NO: 5668535 - DNA, 25 bp, Homo sapien
aggcctgagcataccttgggtgttc

SEQ ID NO: 5668536 - DNA, 25 bp, Homo sapien
gctaggcctgagcataccttgggtg

SEQ ID NO: 5668537 - DNA, 25 bp, Homo sapien
taggcctgagcataccttgggtgtt

SEQ ID NO: 5668538 - DNA, 25 bp, Homo sapien
cgctaggcctgagcataccttgggt

SEQ ID NO: 5668539 - DNA, 25 bp, Homo sapien
tcatacccaaccaacccacgctagg

SEQ ID NO: 5668540 - DNA, 25 bp, Homo sapien
acactctctgctcatacccaaccaa

SEQ ID NO: 5668541 - DNA, 25 bp, Homo sapien
cagccacactctctgctcataccca

SEQ ID NO: 5668542 - DNA, 25 bp, Homo sapien
ccaaccaacccacgctaggcctgag

SEQ ID NO: 5668543 - DNA, 25 bp, Homo sapien
tggccacccattaacaaagacagcc

SEQ ID NO: 5668544 - DNA, 25 bp, Homo sapien
aaccaacccacgctaggcctgagca

SEQ ID NO: 5668545 - DNA, 25 bp, Homo sapien
ggcaactgtgaacctctcaaccaac

SEQ ID NO: 5668546 - DNA, 25 bp, Homo sapien
ctcatcctctttgacttctcttagg

SEQ ID NO: 5668547 - DNA, 25 bp, Homo sapien
aactgtgaacctctcaaccaacttc

SEQ ID NO: 5668548 - DNA, 25 bp, Homo sapien
cattttggccttcaggctgctagct

SEQ ID NO: 5668549 - DNA, 25 bp, Homo sapien
caggcaactgtgaacctctcaacca

SEQ ID NO: 5668550 - DNA, 25 bp, Homo sapien
ctctttgacttctcttaggttttca

SEQ ID NO: 5668551 - DNA, 25 bp, Homo sapien
agctagcagcctgaaggccaaaatg

SEQ ID NO: 5668552 - DNA, 25 bp, Homo sapien
tggttgagaggttcacagttgcctg

SEQ ID NO: 5668553 - DNA, 25 bp, Homo sapien
tgaaaacctaagagaagtcaaagag

SEQ ID NO: 5668554 - DNA, 25 bp, Homo sapien
gaagttggttgagaggttcacagtt

SEQ ID NO: 5668555 - DNA, 25 bp, Homo sapien
gttggttgagaggttcacagttgcc

SEQ ID NO: 5668556 - DNA, 25 bp, Homo sapien
cctaagagaagtcaaagaggatgag

SEQ ID NO: 5668557 - DNA, 25 bp, Homo sapien
ccgactctggtagccaaagtaccag

SEQ ID NO: 5668558 - DNA, 25 bp, Homo sapien
ctctggtagccaaagtaccagagca

SEQ ID NO: 5668559 - DNA, 25 bp, Homo sapien
gaggccgactctggtagccaaagta

SEQ ID NO: 5668560 - DNA, 25 bp, Homo sapien
tgaggccgactctggtagccaaagt

SEQ ID NO: 5668561 - DNA, 25 bp, Homo sapien
ggccgactctggtagccaaagtacc

SEQ ID NO: 5668562 - DNA, 25 bp, Homo sapien
gactctggtagccaaagtaccagag

SEQ ID NO: 5668563 - DNA, 25 bp, Homo sapien
ggtactttggctaccagagtcggcc

SEQ ID NO: 5668564 - DNA, 25 bp, Homo sapien
gtactttggctaccagagtcggcct

SEQ ID NO: 5668565 - DNA, 25 bp, Homo sapien
ctggtactttggctaccagagtcgg

SEQ ID NO: 5668566 - DNA, 25 bp, Homo sapien
tactttggctaccagagtcggcctc

SEQ ID NO: 5668567 - DNA, 25 bp, Homo sapien
actttggctaccagagtcggcctca

SEQ ID NO: 5668568 - DNA, 25 bp, Homo sapien
tgctctggtactttggctaccagag

SEQ ID NO: 5668569 - DNA, 25 bp, Homo sapien
agcttacttccctttcttcactctg

SEQ ID NO: 5668570 - DNA, 25 bp, Homo sapien
gggctccaggatgccagcttacttc

SEQ ID NO: 5668571 - DNA, 25 bp, Homo sapien
agtcagcattgtcagctggctctgc

SEQ ID NO: 5668572 - DNA, 25 bp, Homo sapien
attgtcagctggctctgcctttggg

SEQ ID NO: 5668573 - DNA, 25 bp, Homo sapien
ggctccagtcagcattgtcagctgg

SEQ ID NO: 5668574 - DNA, 25 bp, Homo sapien
ggatgccagcttacttccctttctt

SEQ ID NO: 5668575 - DNA, 25 bp, Homo sapien
agctgacaatgctgactggagcccc

SEQ ID NO: 5668576 - DNA, 25 bp, Homo sapien
cagagtgaagaaagggaagtaagct

SEQ ID NO: 5668577 - DNA, 25 bp, Homo sapien
gagccccaaaggcagagccagctga

SEQ ID NO: 5668578 - DNA, 25 bp, Homo sapien
aagaaagggaagtaagctggcatcc

SEQ ID NO: 5668579 - DNA, 25 bp, Homo sapien
gcagagccagctgacaatgctgact

SEQ ID NO: 5668580 - DNA, 25 bp, Homo sapien
gaagtaagctggcatcctggagccc

SEQ ID NO: 5668581 - DNA, 25 bp, Homo sapien
gggaacttccatggcctggcactca

SEQ ID NO: 5668582 - DNA, 25 bp, Homo sapien
tgatgcgggaacttccatggcctgg

SEQ ID NO: 5668583 - DNA, 25 bp, Homo sapien
cctcaggcacggagttggtttcttc

SEQ ID NO: 5668584 - DNA, 25 bp, Homo sapien
gctgccctcaggcacggagttggtt

SEQ ID NO: 5668585 - DNA, 25 bp, Homo sapien
cctggctctccctgatgcgggaact

SEQ ID NO: 5668586 - DNA, 25 bp, Homo sapien
aggcacggagttggtttcttctctg

SEQ ID NO: 5668587 - DNA, 25 bp, Homo sapien
cagagaagaaaccaactccgtgcct

SEQ ID NO: 5668588 - DNA, 25 bp, Homo sapien
gccatggaagttcccgcatcaggga

SEQ ID NO: 5668589 - DNA, 25 bp, Homo sapien
agttcccgcatcagggagagccagg

SEQ ID NO: 5668590 - DNA, 25 bp, Homo sapien
tgagtgccaggccatggaagttccc

SEQ ID NO: 5668591 - DNA, 25 bp, Homo sapien
gaagaaaccaactccgtgcctgagg

SEQ ID NO: 5668592 - DNA, 25 bp, Homo sapien
aaccaactccgtgcctgagggcagc

SEQ ID NO: 5668593 - DNA, 25 bp, Homo sapien
cccaggcaagtccatacaatttgtg

SEQ ID NO: 5668594 - DNA, 25 bp, Homo sapien
tgttgtttagcttactaccaggtgc

SEQ ID NO: 5668595 - DNA, 25 bp, Homo sapien
gagggtggtgttgtttagcttacta

SEQ ID NO: 5668596 - DNA, 25 bp, Homo sapien
caggcaagtccatacaatttgtggg

SEQ ID NO: 5668597 - DNA, 25 bp, Homo sapien
tcagaaaagagggtggtgttgttta

SEQ ID NO: 5668598 - DNA, 25 bp, Homo sapien
tagcttactaccaggtgctgaggct

SEQ ID NO: 5668599 - DNA, 25 bp, Homo sapien
tagtaagctaaacaacaccaccctc

SEQ ID NO: 5668600 - DNA, 25 bp, Homo sapien
gaaccccacaaattgtatggacttg

SEQ ID NO: 5668601 - DNA, 25 bp, Homo sapien
gcctcagcacctggtagtaagctaa

SEQ ID NO: 5668602 - DNA, 25 bp, Homo sapien
cacaaattgtatggacttgcctggg

SEQ ID NO: 5668603 - DNA, 25 bp, Homo sapien
taaacaacaccaccctcttttctga

SEQ ID NO: 5668604 - DNA, 25 bp, Homo sapien
gcacctggtagtaagctaaacaaca

SEQ ID NO: 5668605 - DNA, 25 bp, Homo sapien
cagggcagggacctattcctggttc

SEQ ID NO: 5668606 - DNA, 25 bp, Homo sapien
gcagggcagggacctattcctggtt

SEQ ID NO: 5668607 - DNA, 25 bp, Homo sapien
atccctaccattggtaagagcacag

SEQ ID NO: 5668608 - DNA, 25 bp, Homo sapien
ccctaccattggtaagagcacagct

SEQ ID NO: 5668609 - DNA, 25 bp, Homo sapien
tccctaccattggtaagagcacagc

SEQ ID NO: 5668610 - DNA, 25 bp, Homo sapien
catccctaccattggtaagagcaca

SEQ ID NO: 5668611 - DNA, 25 bp, Homo sapien
ctgtgctcttaccaatggtagggat

SEQ ID NO: 5668612 - DNA, 25 bp, Homo sapien
gctgtgctcttaccaatggtaggga

SEQ ID NO: 5668613 - DNA, 25 bp, Homo sapien
agctgtgctcttaccaatggtaggg

SEQ ID NO: 5668614 - DNA, 25 bp, Homo sapien
tgtgctcttaccaatggtagggatg

SEQ ID NO: 5668615 - DNA, 25 bp, Homo sapien
aaccaggaataggtccctgccctgc

SEQ ID NO: 5668616 - DNA, 25 bp, Homo sapien
gaaccaggaataggtccctgccctg

SEQ ID NO: 5668617 - DNA, 25 bp, Homo sapien
gcagggacctattcctggttcccca

SEQ ID NO: 5668618 - DNA, 25 bp, Homo sapien
gcagggcagggacctattcctggtt

SEQ ID NO: 5668619 - DNA, 25 bp, Homo sapien
gatgtgggctttcacgccggcagct

SEQ ID NO: 5668620 - DNA, 25 bp, Homo sapien
ttggatgtgggctttcacgccggca

SEQ ID NO: 5668621 - DNA, 25 bp, Homo sapien
gcacagcttggatgtgggctttcac

SEQ ID NO: 5668622 - DNA, 25 bp, Homo sapien
ctttcacgccggcagctgaggcagg

SEQ ID NO: 5668623 - DNA, 25 bp, Homo sapien
aagctgtgctcttaccaatggtagg

SEQ ID NO: 5668624 - DNA, 25 bp, Homo sapien
agctgccggcgtgaaagcccacatc

SEQ ID NO: 5668625 - DNA, 25 bp, Homo sapien
ggcgtgaaagcccacatccaagctg

SEQ ID NO: 5668626 - DNA, 25 bp, Homo sapien
cctgcctcagctgccggcgtgaaag

SEQ ID NO: 5668627 - DNA, 25 bp, Homo sapien
gaaccaggaataggtccctgccctg

SEQ ID NO: 5668628 - DNA, 25 bp, Homo sapien
tgaaagcccacatccaagctgtgct

SEQ ID NO: 5668629 - DNA, 25 bp, Homo sapien
gaccaccatcctatacaagctgaaa

SEQ ID NO: 5668630 - DNA, 25 bp, Homo sapien
aagaccaccatcctatacaagctga

SEQ ID NO: 5668631 - DNA, 25 bp, Homo sapien
ggagatgcgcatcctgatggtgggc

SEQ ID NO: 5668632 - DNA, 25 bp, Homo sapien
gaagaaggagatgcgcatcctgatg

SEQ ID NO: 5668633 - DNA, 25 bp, Homo sapien
catcctatacaagctgaaactcggg

SEQ ID NO: 5668634 - DNA, 25 bp, Homo sapien
caagctgaaactcggggagatcgtc

SEQ ID NO: 5668635 - DNA, 25 bp, Homo sapien
gatctccccgagtttcagcttgtat

SEQ ID NO: 5668636 - DNA, 25 bp, Homo sapien
ccccgagtttcagcttgtataggat

SEQ ID NO: 5668637 - DNA, 25 bp, Homo sapien
tcagcttgtataggatggtggtctt

SEQ ID NO: 5668638 - DNA, 25 bp, Homo sapien
tttcagcttgtataggatggtggtc

SEQ ID NO: 5668639 - DNA, 25 bp, Homo sapien
gacgatctccccgagtttcagcttg

SEQ ID NO: 5668640 - DNA, 25 bp, Homo sapien
catcaggatgcgcatctccttcttc

SEQ ID NO: 5668641 - DNA, 25 bp, Homo sapien
gtcacatggttagattactggcaga

SEQ ID NO: 5668642 - DNA, 25 bp, Homo sapien
gatccttagtgtttactgctttgtc

SEQ ID NO: 5668643 - DNA, 25 bp, Homo sapien
cagggatccttagtgtttactgctt

SEQ ID NO: 5668644 - DNA, 25 bp, Homo sapien
gggatccttagtgtttactgctttg

SEQ ID NO: 5668645 - DNA, 25 bp, Homo sapien
agcagggatccttagtgtttactgc

SEQ ID NO: 5668646 - DNA, 25 bp, Homo sapien
cttagtgtttactgctttgtctctg

SEQ ID NO: 5668647 - DNA, 25 bp, Homo sapien
aagcagtaaacactaaggatccctg

SEQ ID NO: 5668648 - DNA, 25 bp, Homo sapien
tctgccagtaatctaaccatgtgac

SEQ ID NO: 5668649 - DNA, 25 bp, Homo sapien
gagacaaagcagtaaacactaagga

SEQ ID NO: 5668650 - DNA, 25 bp, Homo sapien
caaagcagtaaacactaaggatccc

SEQ ID NO: 5668651 - DNA, 25 bp, Homo sapien
cagagacaaagcagtaaacactaag

SEQ ID NO: 5668652 - DNA, 25 bp, Homo sapien
gcagtaaacactaaggatccctgct

SEQ ID NO: 5668653 - DNA, 25 bp, Homo sapien
gggtatagggtagaatgtcagaact

SEQ ID NO: 5668654 - DNA, 25 bp, Homo sapien
caatgcctttgggtatagggtagaa

SEQ ID NO: 5668655 - DNA, 25 bp, Homo sapien
aatcccccttccatttacaggtgca

SEQ ID NO: 5668656 - DNA, 25 bp, Homo sapien
tacaatgcctttgggtatagggtag

SEQ ID NO: 5668657 - DNA, 25 bp, Homo sapien
gaaatcatctagttcaatccccctt

SEQ ID NO: 5668658 - DNA, 25 bp, Homo sapien
cctttgggtatagggtagaatgtca

SEQ ID NO: 5668659 - DNA, 25 bp, Homo sapien
ctgcacctgtaaatggaagggggat

SEQ ID NO: 5668660 - DNA, 25 bp, Homo sapien
ctaccctatacccaaaggcattgta

SEQ ID NO: 5668661 - DNA, 25 bp, Homo sapien
ttctaccctatacccaaaggcattg

SEQ ID NO: 5668662 - DNA, 25 bp, Homo sapien
aagggggattgaactagatgatttc

SEQ ID NO: 5668663 - DNA, 25 bp, Homo sapien
tgacattctaccctatacccaaagg

SEQ ID NO: 5668664 - DNA, 25 bp, Homo sapien
agttctgacattctaccctataccc

SEQ ID NO: 5668665 - DNA, 25 bp, Homo sapien
ccagaagtctcagggtaagtaaggt

SEQ ID NO: 5668666 - DNA, 25 bp, Homo sapien
ccttattccgctccctcctctccca

SEQ ID NO: 5668667 - DNA, 25 bp, Homo sapien
gagagccactccttattccgctccc

SEQ ID NO: 5668668 - DNA, 25 bp, Homo sapien
cagaagtctcagggtaagtaaggtt

SEQ ID NO: 5668669 - DNA, 25 bp, Homo sapien
gccactccttattccgctccctcct

SEQ ID NO: 5668670 - DNA, 25 bp, Homo sapien
cagagagccactccttattccgctc

SEQ ID NO: 5668671 - DNA, 25 bp, Homo sapien
accttacttaccctgagacttctgg

SEQ ID NO: 5668672 - DNA, 25 bp, Homo sapien
gagcggaataaggagtggctctctg

SEQ ID NO: 5668673 - DNA, 25 bp, Homo sapien
gggagcggaataaggagtggctctc

SEQ ID NO: 5668674 - DNA, 25 bp, Homo sapien
aaccttacttaccctgagacttctg

SEQ ID NO: 5668675 - DNA, 25 bp, Homo sapien
gaggagggagcggaataaggagtgg

SEQ ID NO: 5668676 - DNA, 25 bp, Homo sapien
tgggagaggagggagcggaataagg

SEQ ID NO: 5668677 - DNA, 25 bp, Homo sapien
ggaagaggcagagtctcttgattaa

SEQ ID NO: 5668678 - DNA, 25 bp, Homo sapien
aggcagagtctcttgattaaaggag

SEQ ID NO: 5668679 - DNA, 25 bp, Homo sapien
gaggcagagtctcttgattaaagga

SEQ ID NO: 5668680 - DNA, 25 bp, Homo sapien
gaagaggcagagtctcttgattaaa

SEQ ID NO: 5668681 - DNA, 25 bp, Homo sapien
gggaagaggcagagtctcttgatta

SEQ ID NO: 5668682 - DNA, 25 bp, Homo sapien
aagaggcagagtctcttgattaaag

SEQ ID NO: 5668683 - DNA, 25 bp, Homo sapien
tcctttaatcaagagactctgcctc

SEQ ID NO: 5668684 - DNA, 25 bp, Homo sapien
ctcctttaatcaagagactctgcct

SEQ ID NO: 5668685 - DNA, 25 bp, Homo sapien
tttaatcaagagactctgcctcttc

SEQ ID NO: 5668686 - DNA, 25 bp, Homo sapien
taatcaagagactctgcctcttccc

SEQ ID NO: 5668687 - DNA, 25 bp, Homo sapien
cctttaatcaagagactctgcctct

SEQ ID NO: 5668688 - DNA, 25 bp, Homo sapien
ttaatcaagagactctgcctcttcc

SEQ ID NO: 5668689 - DNA, 25 bp, Homo sapien
gaggcagagtctcttgattaaagga

SEQ ID NO: 5668690 - DNA, 25 bp, Homo sapien
tgattaaaggagaaagcataaacct

SEQ ID NO: 5668691 - DNA, 25 bp, Homo sapien
tggagttgcaaaaatataggaaggg

SEQ ID NO: 5668692 - DNA, 25 bp, Homo sapien
aagcataaaccttgggaaactggca

SEQ ID NO: 5668693 - DNA, 25 bp, Homo sapien
tggcaagcctgaaccttgtcaggag

SEQ ID NO: 5668694 - DNA, 25 bp, Homo sapien
tgggaaactggcaagcctgaacctt

SEQ ID NO: 5668695 - DNA, 25 bp, Homo sapien
cctcattgcagcgaccatgtgggac

SEQ ID NO: 5668696 - DNA, 25 bp, Homo sapien
gaagcagagaaccaatgagatgact

SEQ ID NO: 5668697 - DNA, 25 bp, Homo sapien
gagaaccaatgagatgactgcctca

SEQ ID NO: 5668698 - DNA, 25 bp, Homo sapien
ttggatgggccacagtaagccaagg

SEQ ID NO: 5668699 - DNA, 25 bp, Homo sapien
tgagatgactgcctcattgcagcga

SEQ ID NO: 5668700 - DNA, 25 bp, Homo sapien
gatgactgcctcattgcagcgacca

SEQ ID NO: 5668701 - DNA, 25 bp, Homo sapien
agtcatctcattggttctctgcttc

SEQ ID NO: 5668702 - DNA, 25 bp, Homo sapien
gtcccacatggtcgctgcaatgagg

SEQ ID NO: 5668703 - DNA, 25 bp, Homo sapien
tcgctgcaatgaggcagtcatctca

SEQ ID NO: 5668704 - DNA, 25 bp, Homo sapien
tgaggcagtcatctcattggttctc

SEQ ID NO: 5668705 - DNA, 25 bp, Homo sapien
catggtcgctgcaatgaggcagtca

SEQ ID NO: 5668706 - DNA, 25 bp, Homo sapien
ccttggcttactgtggcccatccaa

SEQ ID NO: 5668707 - DNA, 25 bp, Homo sapien
agtgtaggtcttgtaggaccttgta

SEQ ID NO: 5668708 - DNA, 25 bp, Homo sapien
aagagagagtagtagatctcatgag

SEQ ID NO: 5668709 - DNA, 25 bp, Homo sapien
aattggagtggagtaagcaaagaga

SEQ ID NO: 5668710 - DNA, 25 bp, Homo sapien
gagtgtaggtcttgtaggaccttgt

SEQ ID NO: 5668711 - DNA, 25 bp, Homo sapien
gcaaagagagagtagtagatctcat

SEQ ID NO: 5668712 - DNA, 25 bp, Homo sapien
agagagtagtagatctcatgagaga

SEQ ID NO: 5668713 - DNA, 25 bp, Homo sapien
tacaaggtcctacaagacctacact

SEQ ID NO: 5668714 - DNA, 25 bp, Homo sapien
tctctttgcttactccactccaatt

SEQ ID NO: 5668715 - DNA, 25 bp, Homo sapien
tctctcatgagatctactactctct

SEQ ID NO: 5668716 - DNA, 25 bp, Homo sapien
catgagatctactactctctctttg

SEQ ID NO: 5668717 - DNA, 25 bp, Homo sapien
tctcatgagatctactactctctct

SEQ ID NO: 5668718 - DNA, 25 bp, Homo sapien
atgagatctactactctctctttgc

SEQ ID NO: 5668719 - DNA, 25 bp, Homo sapien
atagcaaatatgaaagctttgggcc

SEQ ID NO: 5668720 - DNA, 25 bp, Homo sapien
gcaaatatgaaagctttgggccagg

SEQ ID NO: 5668721 - DNA, 25 bp, Homo sapien
agcaaatatgaaagctttgggccag

SEQ ID NO: 5668722 - DNA, 25 bp, Homo sapien
tagcaaatatgaaagctttgggcca

SEQ ID NO: 5668723 - DNA, 25 bp, Homo sapien
ggcccaaagctttcatatttgctat

SEQ ID NO: 5668724 - DNA, 25 bp, Homo sapien
cctggcccaaagctttcatatttgc

SEQ ID NO: 5668725 - DNA, 25 bp, Homo sapien
ctggcccaaagctttcatatttgct

SEQ ID NO: 5668726 - DNA, 25 bp, Homo sapien
tggcccaaagctttcatatttgcta

SEQ ID NO: 5668727 - DNA, 25 bp, Homo sapien
tagcaaatatgaaagctttgggcca

SEQ ID NO: 5668728 - DNA, 25 bp, Homo sapien
cattccaggcagaggtgatagcaaa

SEQ ID NO: 5668729 - DNA, 25 bp, Homo sapien
gcaaatatgaaagctttgggccagg

SEQ ID NO: 5668730 - DNA, 25 bp, Homo sapien
gatggttatctggaagagaagcatt

SEQ ID NO: 5668731 - DNA, 25 bp, Homo sapien
ccaggcagaggtgatagcaaatatg

SEQ ID NO: 5668732 - DNA, 25 bp, Homo sapien
tatctggaagagaagcattccaggc

SEQ ID NO: 5668733 - DNA, 25 bp, Homo sapien
aatgcttctcttccagataaccatc

SEQ ID NO: 5668734 - DNA, 25 bp, Homo sapien
ggcccaaagctttcatatttgctat

SEQ ID NO: 5668735 - DNA, 25 bp, Homo sapien
tttgctatcacctctgcctggaatg

SEQ ID NO: 5668736 - DNA, 25 bp, Homo sapien
cctggcccaaagctttcatatttgc

SEQ ID NO: 5668737 - DNA, 25 bp, Homo sapien
catatttgctatcacctctgcctgg

SEQ ID NO: 5668738 - DNA, 25 bp, Homo sapien
gcctggaatgcttctcttccagata

SEQ ID NO: 5668739 - DNA, 25 bp, Homo sapien
aggcagaataaaacaatcagcaaga

SEQ ID NO: 5668740 - DNA, 25 bp, Homo sapien
cttaggcagaataaaacaatcagca

SEQ ID NO: 5668741 - DNA, 25 bp, Homo sapien
tatcttaggcagaataaaacaatca

SEQ ID NO: 5668742 - DNA, 25 bp, Homo sapien
taggcagaataaaacaatcagcaag

SEQ ID NO: 5668743 - DNA, 25 bp, Homo sapien
ttaggcagaataaaacaatcagcaa

SEQ ID NO: 5668744 - DNA, 25 bp, Homo sapien
tcttaggcagaataaaacaatcagc

SEQ ID NO: 5668745 - DNA, 25 bp, Homo sapien
tgattgttttattctgcctaagata

SEQ ID NO: 5668746 - DNA, 25 bp, Homo sapien
gctgattgttttattctgcctaaga

SEQ ID NO: 5668747 - DNA, 25 bp, Homo sapien
tcttgctgattgttttattctgcct

SEQ ID NO: 5668748 - DNA, 25 bp, Homo sapien
ttgctgattgttttattctgcctaa

SEQ ID NO: 5668749 - DNA, 25 bp, Homo sapien
cttgctgattgttttattctgccta

SEQ ID NO: 5668750 - DNA, 25 bp, Homo sapien
tgctgattgttttattctgcctaag

SEQ ID NO: 5668751 - DNA, 25 bp, Homo sapien
tcttcacaacatttatcaccatctg

SEQ ID NO: 5668752 - DNA, 25 bp, Homo sapien
caccatctgatacattatatattta

SEQ ID NO: 5668753 - DNA, 25 bp, Homo sapien
gctgattgttttattctgcctaaga

SEQ ID NO: 5668754 - DNA, 25 bp, Homo sapien
tcttgctgattgttttattctgcct

SEQ ID NO: 5668755 - DNA, 25 bp, Homo sapien
tttattctgcctaagatatcagctc

SEQ ID NO: 5668756 - DNA, 25 bp, Homo sapien
tatcccactttacttttcttcacaa

SEQ ID NO: 5668757 - DNA, 25 bp, Homo sapien
tatttgttatgtgcctaccatatgc

SEQ ID NO: 5668758 - DNA, 25 bp, Homo sapien
tgcgctcggcctcagcaggtatttg

SEQ ID NO: 5668759 - DNA, 25 bp, Homo sapien
gctcggcctcagcaggtatttgtta

SEQ ID NO: 5668760 - DNA, 25 bp, Homo sapien
catatgccaggcatagcatccagtc

SEQ ID NO: 5668761 - DNA, 25 bp, Homo sapien
cctcagcaggtatttgttatgtgcc

SEQ ID NO: 5668762 - DNA, 25 bp, Homo sapien
tcggcctcagcaggtatttgttatg

SEQ ID NO: 5668763 - DNA, 25 bp, Homo sapien
ggcacataacaaatacctgctgagg

SEQ ID NO: 5668764 - DNA, 25 bp, Homo sapien
gactggatgctatgcctggcatatg

SEQ ID NO: 5668765 - DNA, 25 bp, Homo sapien
aacaaatacctgctgaggccgagcg

SEQ ID NO: 5668766 - DNA, 25 bp, Homo sapien
gcatatggtaggcacataacaaata

SEQ ID NO: 5668767 - DNA, 25 bp, Homo sapien
taggcacataacaaatacctgctga

SEQ ID NO: 5668768 - DNA, 25 bp, Homo sapien
cataacaaatacctgctgaggccga

SEQ ID NO: 5668769 - DNA, 25 bp, Homo sapien
tgtcacccaggctggagcgcagtgg

SEQ ID NO: 5668770 - DNA, 25 bp, Homo sapien
ctcctgcctcaacgttccgagtagc

SEQ ID NO: 5668771 - DNA, 25 bp, Homo sapien
ctgtcacccaggctggagcgcagtg

SEQ ID NO: 5668772 - DNA, 25 bp, Homo sapien
ctccaccttccaggttcaagtgatt

SEQ ID NO: 5668773 - DNA, 25 bp, Homo sapien
cctgcctcaacgttccgagtagctg

SEQ ID NO: 5668774 - DNA, 25 bp, Homo sapien
ctcactgcaacctccaccttccagg

SEQ ID NO: 5668775 - DNA, 25 bp, Homo sapien
cctggaaggtggaggttgcagtgag

SEQ ID NO: 5668776 - DNA, 25 bp, Homo sapien
aatcacttgaacctggaaggtggag

SEQ ID NO: 5668777 - DNA, 25 bp, Homo sapien
ccactgcgctccagcctgggtgaca

SEQ ID NO: 5668778 - DNA, 25 bp, Homo sapien
gctactcggaacgttgaggcaggag

SEQ ID NO: 5668779 - DNA, 25 bp, Homo sapien
cactgcgctccagcctgggtgacag

SEQ ID NO: 5668780 - DNA, 25 bp, Homo sapien
cagctactcggaacgttgaggcagg

SEQ ID NO: 5668781 - DNA, 25 bp, Homo sapien
gagaactggtttgtatgggtgattc

SEQ ID NO: 5668782 - DNA, 25 bp, Homo sapien
gcacagagaactggtttgtatgggt

SEQ ID NO: 5668783 - DNA, 25 bp, Homo sapien
gctgaataagctgcccgctgacaca

SEQ ID NO: 5668784 - DNA, 25 bp, Homo sapien
tggtgattgctgaataagctgcccg

SEQ ID NO: 5668785 - DNA, 25 bp, Homo sapien
gattgctgaataagctgcccgctga

SEQ ID NO: 5668786 - DNA, 25 bp, Homo sapien
gaataagctgcccgctgacacatgc

SEQ ID NO: 5668787 - DNA, 25 bp, Homo sapien
acccatacaaaccagttctctgtgc

SEQ ID NO: 5668788 - DNA, 25 bp, Homo sapien
tgtgtcagcgggcagcttattcagc

SEQ ID NO: 5668789 - DNA, 25 bp, Homo sapien
tcagcgggcagcttattcagcaatc

SEQ ID NO: 5668790 - DNA, 25 bp, Homo sapien
gggcagcttattcagcaatcaccat

SEQ ID NO: 5668791 - DNA, 25 bp, Homo sapien
caggaggcatgtgtcagcgggcagc

SEQ ID NO: 5668792 - DNA, 25 bp, Homo sapien
gaatcacccatacaaaccagttctc

SEQ ID NO: 5668793 - DNA, 25 bp, Homo sapien
tctggaatttgctgcaaactgagaa

SEQ ID NO: 5668794 - DNA, 25 bp, Homo sapien
agtctggaatttgctgcaaactgag

SEQ ID NO: 5668795 - DNA, 25 bp, Homo sapien
aatttgctgcaaactgagaagggtg

SEQ ID NO: 5668796 - DNA, 25 bp, Homo sapien
ctagtctggaatttgctgcaaactg

SEQ ID NO: 5668797 - DNA, 25 bp, Homo sapien
tttgctgcaaactgagaagggtggt

SEQ ID NO: 5668798 - DNA, 25 bp, Homo sapien
ctggaatttgctgcaaactgagaag

SEQ ID NO: 5668799 - DNA, 25 bp, Homo sapien
accacccttctcagtttgcagcaaa

SEQ ID NO: 5668800 - DNA, 25 bp, Homo sapien
cacccttctcagtttgcagcaaatt

SEQ ID NO: 5668801 - DNA, 25 bp, Homo sapien
cagtttgcagcaaattccagactag

SEQ ID NO: 5668802 - DNA, 25 bp, Homo sapien
cttctcagtttgcagcaaattccag

SEQ ID NO: 5668803 - DNA, 25 bp, Homo sapien
cgcatgggggtttggtgggagtttg

SEQ ID NO: 5668804 - DNA, 25 bp, Homo sapien
tctcagtttgcagcaaattccagac

SEQ ID NO: 5668805 - DNA, 25 bp, Homo sapien
cttcctggtgtgtgaaccctctagg

SEQ ID NO: 5668806 - DNA, 25 bp, Homo sapien
gaacctactgagagtgccacgcctg

SEQ ID NO: 5668807 - DNA, 25 bp, Homo sapien
aaggttgagctagcccttcttcctg

SEQ ID NO: 5668808 - DNA, 25 bp, Homo sapien
cctaaggttgagctagcccttcttc

SEQ ID NO: 5668809 - DNA, 25 bp, Homo sapien
tagggctcatctggggaacctactg

SEQ ID NO: 5668810 - DNA, 25 bp, Homo sapien
ctggtgtgtgaaccctctaggtcag

SEQ ID NO: 5668811 - DNA, 25 bp, Homo sapien
caggaagaagggctagctcaacctt

SEQ ID NO: 5668812 - DNA, 25 bp, Homo sapien
ctgacctagagggttcacacaccag

SEQ ID NO: 5668813 - DNA, 25 bp, Homo sapien
caggcgtggcactctcagtaggttc

SEQ ID NO: 5668814 - DNA, 25 bp, Homo sapien
cctagagggttcacacaccaggaag

SEQ ID NO: 5668815 - DNA, 25 bp, Homo sapien
cagtaggttccccagatgagcccta

SEQ ID NO: 5668816 - DNA, 25 bp, Homo sapien
gaagaagggctagctcaaccttagg

SEQ ID NO: 5668817 - DNA, 25 bp, Homo sapien
taaaggctagaagactaggaagact

SEQ ID NO: 5668818 - DNA, 25 bp, Homo sapien
tcatgaggtgttagtagtatgacca

SEQ ID NO: 5668819 - DNA, 25 bp, Homo sapien
gttagtagtatgaccaaaagtcact

SEQ ID NO: 5668820 - DNA, 25 bp, Homo sapien
aggctagaagactaggaagacttgg

SEQ ID NO: 5668821 - DNA, 25 bp, Homo sapien
cactactacaaattgccaaggttgg

SEQ ID NO: 5668822 - DNA, 25 bp, Homo sapien
aaagtcactactacaaattgccaag

SEQ ID NO: 5668823 - DNA, 25 bp, Homo sapien
ggtcatactactaacacctcatgaa

SEQ ID NO: 5668824 - DNA, 25 bp, Homo sapien
ccaagtcttcctagtcttctagcct

SEQ ID NO: 5668825 - DNA, 25 bp, Homo sapien
ccaaccttggcaatttgtagtagtg

SEQ ID NO: 5668826 - DNA, 25 bp, Homo sapien
gacttttggtcatactactaacacc

SEQ ID NO: 5668827 - DNA, 25 bp, Homo sapien
tagtgacttttggtcatactactaa

SEQ ID NO: 5668828 - DNA, 25 bp, Homo sapien
cttggcaatttgtagtagtgacttt

SEQ ID NO: 5668829 - DNA, 25 bp, Homo sapien
tatactcacagttggtaagcattta

SEQ ID NO: 5668830 - DNA, 25 bp, Homo sapien
tattggctagttatatctttttcag

SEQ ID NO: 5668831 - DNA, 25 bp, Homo sapien
gcaaggcatattggctagttatatc

SEQ ID NO: 5668832 - DNA, 25 bp, Homo sapien
gccaccactatactcacagttggta

SEQ ID NO: 5668833 - DNA, 25 bp, Homo sapien
ttttcagccaccactatactcacag

SEQ ID NO: 5668834 - DNA, 25 bp, Homo sapien
gggcaaggcatattggctagttata

SEQ ID NO: 5668835 - DNA, 25 bp, Homo sapien
taccaactgtgagtatagtggtggc

SEQ ID NO: 5668836 - DNA, 25 bp, Homo sapien
tgagtatagtggtggctgaaaaaga

SEQ ID NO: 5668837 - DNA, 25 bp, Homo sapien
gatataactagccaatatgccttgc

SEQ ID NO: 5668838 - DNA, 25 bp, Homo sapien
tagccaatatgccttgccccagaac

SEQ ID NO: 5668839 - DNA, 25 bp, Homo sapien
ttaaatgcttaccaactgtgagtat

SEQ ID NO: 5668840 - DNA, 25 bp, Homo sapien
ctgaaaaagatataactagccaata

SEQ ID NO: 5668841 - DNA, 25 bp, Homo sapien
gcttaacgtgggaagcagtaaatac

SEQ ID NO: 5668842 - DNA, 25 bp, Homo sapien
cacattgagtggttaaggtcattca

SEQ ID NO: 5668843 - DNA, 25 bp, Homo sapien
cacagcttaacgtgggaagcagtaa

SEQ ID NO: 5668844 - DNA, 25 bp, Homo sapien
taagtgccacattgagtggttaagg

SEQ ID NO: 5668845 - DNA, 25 bp, Homo sapien
aaactcgacaaggtagtaagtgcca

SEQ ID NO: 5668846 - DNA, 25 bp, Homo sapien
tcgacaaggtagtaagtgccacatt

SEQ ID NO: 5668847 - DNA, 25 bp, Homo sapien
gtatttactgcttcccacgttaagc

SEQ ID NO: 5668848 - DNA, 25 bp, Homo sapien
tgtggcacttactaccttgtcgagt

SEQ ID NO: 5668849 - DNA, 25 bp, Homo sapien
tactgcttcccacgttaagctgtgt

SEQ ID NO: 5668850 - DNA, 25 bp, Homo sapien
caatgtggcacttactaccttgtcg

SEQ ID NO: 5668851 - DNA, 25 bp, Homo sapien
gaatgaccttaaccactcaatgtgg

SEQ ID NO: 5668852 - DNA, 25 bp, Homo sapien
tttgaatgaccttaaccactcaatg

SEQ ID NO: 5668853 - DNA, 25 bp, Homo sapien
aggctggtctcgaactcctgacctc

SEQ ID NO: 5668854 - DNA, 25 bp, Homo sapien
ggtgatccacccacctcagcctccc

SEQ ID NO: 5668855 - DNA, 25 bp, Homo sapien
aggtgatccacccacctcagcctcc

SEQ ID NO: 5668856 - DNA, 25 bp, Homo sapien
tttcaccatgttggccaggctggtc

SEQ ID NO: 5668857 - DNA, 25 bp, Homo sapien
ggtttcaccatgttggccaggctgg

SEQ ID NO: 5668858 - DNA, 25 bp, Homo sapien
gtttcaccatgttggccaggctggt

SEQ ID NO: 5668859 - DNA, 25 bp, Homo sapien
gaggtcaggagttcgagaccagcct

SEQ ID NO: 5668860 - DNA, 25 bp, Homo sapien
ccagcctggccaacatggtgaaacc

SEQ ID NO: 5668861 - DNA, 25 bp, Homo sapien
gaccagcctggccaacatggtgaaa

SEQ ID NO: 5668862 - DNA, 25 bp, Homo sapien
gggaggctgaggtgggtggatcacc

SEQ ID NO: 5668863 - DNA, 25 bp, Homo sapien
ggaggctgaggtgggtggatcacct

SEQ ID NO: 5668864 - DNA, 25 bp, Homo sapien
accagcctggccaacatggtgaaac

SEQ ID NO: 5668865 - DNA, 25 bp, Homo sapien
aagctgtttttactgcactctgcct

SEQ ID NO: 5668866 - DNA, 25 bp, Homo sapien
aaagctgtttttactgcactctgcc

SEQ ID NO: 5668867 - DNA, 25 bp, Homo sapien
ggcagagtgcagtaaaaacagcttt

SEQ ID NO: 5668868 - DNA, 25 bp, Homo sapien
aggcagagtgcagtaaaaacagctt

SEQ ID NO: 5668869 - DNA, 25 bp, Homo sapien
aagctgtttttactgcactctgcct

SEQ ID NO: 5668870 - DNA, 25 bp, Homo sapien
tgaaaattatctaagaacaaagctg

SEQ ID NO: 5668871 - DNA, 25 bp, Homo sapien
aaagctgtttttactgcactctgcc

SEQ ID NO: 5668872 - DNA, 25 bp, Homo sapien
gcatctcttagtgatatttcaattt

SEQ ID NO: 5668873 - DNA, 25 bp, Homo sapien
actctgcctggcagcagagggtttg

SEQ ID NO: 5668874 - DNA, 25 bp, Homo sapien
cagagggtttgggagaccctggtct

SEQ ID NO: 5668875 - DNA, 25 bp, Homo sapien
ggcagagtgcagtaaaaacagcttt

SEQ ID NO: 5668876 - DNA, 25 bp, Homo sapien
caaaccctctgctgccaggcagagt

SEQ ID NO: 5668877 - DNA, 25 bp, Homo sapien
aaattgaaatatcactaagagatgc

SEQ ID NO: 5668878 - DNA, 25 bp, Homo sapien
caggcagagtgcagtaaaaacagct

SEQ ID NO: 5668879 - DNA, 25 bp, Homo sapien
cagctttgttcttagataattttca

SEQ ID NO: 5668880 - DNA, 25 bp, Homo sapien
agaccagggtctcccaaaccctctg

SEQ ID NO: 5668881 - DNA, 25 bp, Homo sapien
gtgctatctgaaacttaggtctttt

SEQ ID NO: 5668882 - DNA, 25 bp, Homo sapien
aagtgctatctgaaacttaggtctt

SEQ ID NO: 5668883 - DNA, 25 bp, Homo sapien
agtgctatctgaaacttaggtcttt

SEQ ID NO: 5668884 - DNA, 25 bp, Homo sapien
tgctatctgaaacttaggtcttttt

SEQ ID NO: 5668885 - DNA, 25 bp, Homo sapien
taaagtgctatctgaaacttaggtc

SEQ ID NO: 5668886 - DNA, 25 bp, Homo sapien
aaagtgctatctgaaacttaggtct

SEQ ID NO: 5668887 - DNA, 25 bp, Homo sapien
aaaagacctaagtttcagatagcac

SEQ ID NO: 5668888 - DNA, 25 bp, Homo sapien
gacctaagtttcagatagcacttta

SEQ ID NO: 5668889 - DNA, 25 bp, Homo sapien
aaagacctaagtttcagatagcact

SEQ ID NO: 5668890 - DNA, 25 bp, Homo sapien
agacctaagtttcagatagcacttt

SEQ ID NO: 5668891 - DNA, 25 bp, Homo sapien
aagacctaagtttcagatagcactt

SEQ ID NO: 5668892 - DNA, 25 bp, Homo sapien
aaaaagacctaagtttcagatagca

SEQ ID NO: 5668893 - DNA, 25 bp, Homo sapien
aagtgctatctgaaacttaggtctt

SEQ ID NO: 5668894 - DNA, 25 bp, Homo sapien
tgctatctgaaacttaggtcttttt

SEQ ID NO: 5668895 - DNA, 25 bp, Homo sapien
gtgctatctgaaacttaggtctttt

SEQ ID NO: 5668896 - DNA, 25 bp, Homo sapien
agtgctatctgaaacttaggtcttt

SEQ ID NO: 5668897 - DNA, 25 bp, Homo sapien
taaagtgctatctgaaacttaggtc

SEQ ID NO: 5668898 - DNA, 25 bp, Homo sapien
aaagtgctatctgaaacttaggtct

SEQ ID NO: 5668899 - DNA, 25 bp, Homo sapien
aaaagacctaagtttcagatagcac

SEQ ID NO: 5668900 - DNA, 25 bp, Homo sapien
gacctaagtttcagatagcacttta

SEQ ID NO: 5668901 - DNA, 25 bp, Homo sapien
aaagacctaagtttcagatagcact

SEQ ID NO: 5668902 - DNA, 25 bp, Homo sapien
agacctaagtttcagatagcacttt

SEQ ID NO: 5668903 - DNA, 25 bp, Homo sapien
aagacctaagtttcagatagcactt

SEQ ID NO: 5668904 - DNA, 25 bp, Homo sapien
aaaaagacctaagtttcagatagca

SEQ ID NO: 5668905 - DNA, 25 bp, Homo sapien
gattggggatcctctgtttaacagg

SEQ ID NO: 5668906 - DNA, 25 bp, Homo sapien
gaagattaaaaagttgaggtgatga

SEQ ID NO: 5668907 - DNA, 25 bp, Homo sapien
ttgaggtgatgaatagttgtgatag

SEQ ID NO: 5668908 - DNA, 25 bp, Homo sapien
tgatgaatagttgtgatagttacac

SEQ ID NO: 5668909 - DNA, 25 bp, Homo sapien
tggggatcctctgtttaacaggtac

SEQ ID NO: 5668910 - DNA, 25 bp, Homo sapien
tgaatagttgtgatagttacactac

SEQ ID NO: 5668911 - DNA, 25 bp, Homo sapien
gtacctgttaaacagaggatcccca

SEQ ID NO: 5668912 - DNA, 25 bp, Homo sapien
tcatcacctcaactttttaatcttc

SEQ ID NO: 5668913 - DNA, 25 bp, Homo sapien
ctatcacaactattcatcacctcaa

SEQ ID NO: 5668914 - DNA, 25 bp, Homo sapien
tgttaaacagaggatccccaatccc

SEQ ID NO: 5668915 - DNA, 25 bp, Homo sapien
cctgttaaacagaggatccccaatc

SEQ ID NO: 5668916 - DNA, 25 bp, Homo sapien
gtagtgtaactatcacaactattca

SEQ ID NO: 5668917 - DNA, 25 bp, Homo sapien
tttttgagacggagtttcgctcttg

SEQ ID NO: 5668918 - DNA, 25 bp, Homo sapien
gagtgcaatggcacgatcttggctc

SEQ ID NO: 5668919 - DNA, 25 bp, Homo sapien
agtttcgctcttgttgcccagcctg

SEQ ID NO: 5668920 - DNA, 25 bp, Homo sapien
agcagcctccacctcgcaggttcaa

SEQ ID NO: 5668921 - DNA, 25 bp, Homo sapien
acagcagcctccacctcgcaggttc

SEQ ID NO: 5668922 - DNA, 25 bp, Homo sapien
gagccaagatcgtgccattgcactc

SEQ ID NO: 5668923 - DNA, 25 bp, Homo sapien
ttgaacctgcgaggtggaggctgct

SEQ ID NO: 5668924 - DNA, 25 bp, Homo sapien
gaacctgcgaggtggaggctgctgt

SEQ ID NO: 5668925 - DNA, 25 bp, Homo sapien
caggctgggcaacaagagcgaaact

SEQ ID NO: 5668926 - DNA, 25 bp, Homo sapien
tgaacctgcgaggtggaggctgctg

SEQ ID NO: 5668927 - DNA, 25 bp, Homo sapien
tggagacgtgaaatatgaataaggc

SEQ ID NO: 5668928 - DNA, 25 bp, Homo sapien
tgaataaggcatagtctgtgctggc

SEQ ID NO: 5668929 - DNA, 25 bp, Homo sapien
gaggtactttccagcctttttctca

SEQ ID NO: 5668930 - DNA, 25 bp, Homo sapien
gtctagtgaggtactttccagcctt

SEQ ID NO: 5668931 - DNA, 25 bp, Homo sapien
ggatgctggagacgtgaaatatgaa

SEQ ID NO: 5668932 - DNA, 25 bp, Homo sapien
catagtctgtgctggcaaagagctc

SEQ ID NO: 5668933 - DNA, 25 bp, Homo sapien
ttcatatttcacgtctccagcatcc

SEQ ID NO: 5668934 - DNA, 25 bp, Homo sapien
gccagcacagactatgccttattca

SEQ ID NO: 5668935 - DNA, 25 bp, Homo sapien
tgagaaaaaggctggaaagtacctc

SEQ ID NO: 5668936 - DNA, 25 bp, Homo sapien
gagctctttgccagcacagactatg

SEQ ID NO: 5668937 - DNA, 25 bp, Homo sapien
aaggctggaaagtacctcactagac

SEQ ID NO: 5668938 - DNA, 25 bp, Homo sapien
gccttattcatatttcacgtctcca

SEQ ID NO: 5668939 - DNA, 25 bp, Homo sapien
taataatccattatcataatcctaa

SEQ ID NO: 5668940 - DNA, 25 bp, Homo sapien
tatagtaagtaccaaataactgtta

SEQ ID NO: 5668941 - DNA, 25 bp, Homo sapien
gcatatagtaagtaccaaataactg

SEQ ID NO: 5668942 - DNA, 25 bp, Homo sapien
aatgtaaagcacctggtattgtaca

SEQ ID NO: 5668943 - DNA, 25 bp, Homo sapien
gtaaagcacctggtattgtacaaag

SEQ ID NO: 5668944 - DNA, 25 bp, Homo sapien
agcacctggtattgtacaaagcata

SEQ ID NO: 5668945 - DNA, 25 bp, Homo sapien
taacagttatttggtacttactata

SEQ ID NO: 5668946 - DNA, 25 bp, Homo sapien
cagttatttggtacttactatatgc

SEQ ID NO: 5668947 - DNA, 25 bp, Homo sapien
ctttgtacaataccaggtgctttac

SEQ ID NO: 5668948 - DNA, 25 bp, Homo sapien
ttatgataatggattattaatagca

SEQ ID NO: 5668949 - DNA, 25 bp, Homo sapien
tgtacaataccaggtgctttacatt

SEQ ID NO: 5668950 - DNA, 25 bp, Homo sapien
tatgctttgtacaataccaggtgct

SEQ ID NO: 5668951 - DNA, 25 bp, Homo sapien
tcttggaatcagacaaaattagatt

SEQ ID NO: 5668952 - DNA, 25 bp, Homo sapien
ggatcttggaatcagacaaaattag

SEQ ID NO: 5668953 - DNA, 25 bp, Homo sapien
aatcctgcttctgctaattaccagt

SEQ ID NO: 5668954 - DNA, 25 bp, Homo sapien
gagtggatcttggaatcagacaaaa

SEQ ID NO: 5668955 - DNA, 25 bp, Homo sapien
atcctgcttctgctaattaccagtt

SEQ ID NO: 5668956 - DNA, 25 bp, Homo sapien
ggcagaatggtatagtaattaagag

SEQ ID NO: 5668957 - DNA, 25 bp, Homo sapien
aatctaattttgtctgattccaaga

SEQ ID NO: 5668958 - DNA, 25 bp, Homo sapien
ctaattttgtctgattccaagatcc

SEQ ID NO: 5668959 - DNA, 25 bp, Homo sapien
ttttgtctgattccaagatccactc

SEQ ID NO: 5668960 - DNA, 25 bp, Homo sapien
tcttaattactataccattctgcct

SEQ ID NO: 5668961 - DNA, 25 bp, Homo sapien
aattttgtctgattccaagatccac

SEQ ID NO: 5668962 - DNA, 25 bp, Homo sapien
aactggtaattagcagaagcaggat

SEQ ID NO: 5668963 - DNA, 25 bp, Homo sapien
atcctgtacttcagcttctcaagta

SEQ ID NO: 5668964 - DNA, 25 bp, Homo sapien
ccatcctgtacttcagcttctcaag

SEQ ID NO: 5668965 - DNA, 25 bp, Homo sapien
gccatcctgtacttcagcttctcaa

SEQ ID NO: 5668966 - DNA, 25 bp, Homo sapien
catcctgtacttcagcttctcaagt

SEQ ID NO: 5668967 - DNA, 25 bp, Homo sapien
aagccatcctgtacttcagcttctc

SEQ ID NO: 5668968 - DNA, 25 bp, Homo sapien
agccatcctgtacttcagcttctca

SEQ ID NO: 5668969 - DNA, 25 bp, Homo sapien
tacttgagaagctgaagtacaggat

SEQ ID NO: 5668970 - DNA, 25 bp, Homo sapien
gagaagctgaagtacaggatggctt

SEQ ID NO: 5668971 - DNA, 25 bp, Homo sapien
cttgagaagctgaagtacaggatgg

SEQ ID NO: 5668972 - DNA, 25 bp, Homo sapien
acttgagaagctgaagtacaggatg

SEQ ID NO: 5668973 - DNA, 25 bp, Homo sapien
tgagaagctgaagtacaggatggct

SEQ ID NO: 5668974 - DNA, 25 bp, Homo sapien
ttgagaagctgaagtacaggatggc

SEQ ID NO: 5668975 - DNA, 25 bp, Homo sapien
agaggaagtggactcaggatagagg

SEQ ID NO: 5668976 - DNA, 25 bp, Homo sapien
tacactagagtcataataagaggaa

SEQ ID NO: 5668977 - DNA, 25 bp, Homo sapien
gaagtggactcaggatagagggtgg

SEQ ID NO: 5668978 - DNA, 25 bp, Homo sapien
ctagagtcataataagaggaagtgg

SEQ ID NO: 5668979 - DNA, 25 bp, Homo sapien
cactagagtcataataagaggaagt

SEQ ID NO: 5668980 - DNA, 25 bp, Homo sapien
ggactcaggatagagggtgggattt

SEQ ID NO: 5668981 - DNA, 25 bp, Homo sapien
acttcctcttattatgactctagtg

SEQ ID NO: 5668982 - DNA, 25 bp, Homo sapien
cttcctcttattatgactctagtgt

SEQ ID NO: 5668983 - DNA, 25 bp, Homo sapien
ttcctcttattatgactctagtgta

SEQ ID NO: 5668984 - DNA, 25 bp, Homo sapien
aaatcccaccctctatcctgagtcc

SEQ ID NO: 5668985 - DNA, 25 bp, Homo sapien
cctctatcctgagtccacttcctct

SEQ ID NO: 5668986 - DNA, 25 bp, Homo sapien
ccacttcctcttattatgactctag

SEQ ID NO: 5668987 - DNA, 25 bp, Homo sapien
tcctccttctaaccaataaatccca

SEQ ID NO: 5668988 - DNA, 25 bp, Homo sapien
ttcctcttattatgactctagtgta

SEQ ID NO: 5668989 - DNA, 25 bp, Homo sapien
tgagtccacttcctcttattatgac

SEQ ID NO: 5668990 - DNA, 25 bp, Homo sapien
ataaatcccaccctctatcctgagt

SEQ ID NO: 5668991 - DNA, 25 bp, Homo sapien
ccacttcctcttattatgactctag

SEQ ID NO: 5668992 - DNA, 25 bp, Homo sapien
tctatcctgagtccacttcctctta

SEQ ID NO: 5668993 - DNA, 25 bp, Homo sapien
tgttatatatgaattgggatcctgg

SEQ ID NO: 5668994 - DNA, 25 bp, Homo sapien
tatatatgaattgggatcctggaga

SEQ ID NO: 5668995 - DNA, 25 bp, Homo sapien
tacagaattggtaccagtgaatggt

SEQ ID NO: 5668996 - DNA, 25 bp, Homo sapien
acagaattggtaccagtgaatggta

SEQ ID NO: 5668997 - DNA, 25 bp, Homo sapien
aggagggaccaatatatgtatatgt

SEQ ID NO: 5668998 - DNA, 25 bp, Homo sapien
gtgtcaggtacagaattggtaccag

SEQ ID NO: 5668999 - DNA, 25 bp, Homo sapien
tctccaggatcccaattcatatata

SEQ ID NO: 5669000 - DNA, 25 bp, Homo sapien
actggtaccaattctgtacctgaca

SEQ ID NO: 5669001 - DNA, 25 bp, Homo sapien
acatatacatatattggtccctcct

SEQ ID NO: 5669002 - DNA, 25 bp, Homo sapien
caggatcccaattcatatataacac

SEQ ID NO: 5669003 - DNA, 25 bp, Homo sapien
cattcactggtaccaattctgtacc

SEQ ID NO: 5669004 - DNA, 25 bp, Homo sapien
taccattcactggtaccaattctgt

SEQ ID NO: 5669005 - DNA, 25 bp, Homo sapien
gaggcacagaataggcatagataat

SEQ ID NO: 5669006 - DNA, 25 bp, Homo sapien
gcacagaataggcatagataatgga

SEQ ID NO: 5669007 - DNA, 25 bp, Homo sapien
cagaataggcatagataatggaaac

SEQ ID NO: 5669008 - DNA, 25 bp, Homo sapien
tctctgccttcctaagaggcacaga

SEQ ID NO: 5669009 - DNA, 25 bp, Homo sapien
ctctgccttcctaagaggcacagaa

SEQ ID NO: 5669010 - DNA, 25 bp, Homo sapien
gaataggcatagataatggaaactt

SEQ ID NO: 5669011 - DNA, 25 bp, Homo sapien
gtttccattatctatgcctattctg

SEQ ID NO: 5669012 - DNA, 25 bp, Homo sapien
ttctgtgcctcttaggaaggcagag

SEQ ID NO: 5669013 - DNA, 25 bp, Homo sapien
tctgtgcctcttaggaaggcagaga

SEQ ID NO: 5669014 - DNA, 25 bp, Homo sapien
tccattatctatgcctattctgtgc

SEQ ID NO: 5669015 - DNA, 25 bp, Homo sapien
aagtttccattatctatgcctattc

SEQ ID NO: 5669016 - DNA, 25 bp, Homo sapien
cattatctatgcctattctgtgcct

SEQ ID NO: 5669017 - DNA, 25 bp, Homo sapien
tatcatagcccattggacttgagtt

SEQ ID NO: 5669018 - DNA, 25 bp, Homo sapien
agtggattatcatagcccattggac

SEQ ID NO: 5669019 - DNA, 25 bp, Homo sapien
attatcatagcccattggacttgag

SEQ ID NO: 5669020 - DNA, 25 bp, Homo sapien
cagtggattatcatagcccattgga

SEQ ID NO: 5669021 - DNA, 25 bp, Homo sapien
gtggattatcatagcccattggact

SEQ ID NO: 5669022 - DNA, 25 bp, Homo sapien
tggattatcatagcccattggactt

SEQ ID NO: 5669023 - DNA, 25 bp, Homo sapien
agtccaatgggctatgataatccac

SEQ ID NO: 5669024 - DNA, 25 bp, Homo sapien
tccaatgggctatgataatccactg

SEQ ID NO: 5669025 - DNA, 25 bp, Homo sapien
aactcaagtccaatgggctatgata

SEQ ID NO: 5669026 - DNA, 25 bp, Homo sapien
ctcaagtccaatgggctatgataat

SEQ ID NO: 5669027 - DNA, 25 bp, Homo sapien
gtccaatgggctatgataatccact

SEQ ID NO: 5669028 - DNA, 25 bp, Homo sapien
aagtccaatgggctatgataatcca

SEQ ID NO: 5669029 - DNA, 25 bp, Homo sapien
ggtagtaacagtctttgctgctatt

SEQ ID NO: 5669030 - DNA, 25 bp, Homo sapien
tttccacttgccgtgacttgggaca

SEQ ID NO: 5669031 - DNA, 25 bp, Homo sapien
acttgccgtgacttgggacatggga

SEQ ID NO: 5669032 - DNA, 25 bp, Homo sapien
gggtaggtgtttccacttgccgtga

SEQ ID NO: 5669033 - DNA, 25 bp, Homo sapien
tgtcctcaatcaggtaggtagtaac

SEQ ID NO: 5669034 - DNA, 25 bp, Homo sapien
tcaggtaggtagtaacagtctttgc

SEQ ID NO: 5669035 - DNA, 25 bp, Homo sapien
gttactacctacctgattgaggaca

SEQ ID NO: 5669036 - DNA, 25 bp, Homo sapien
gcaaagactgttactacctacctga

SEQ ID NO: 5669037 - DNA, 25 bp, Homo sapien
aatagcagcaaagactgttactacc

SEQ ID NO: 5669038 - DNA, 25 bp, Homo sapien
tcccatgtcccaagtcacggcaagt

SEQ ID NO: 5669039 - DNA, 25 bp, Homo sapien
tgtcccaagtcacggcaagtggaaa

SEQ ID NO: 5669040 - DNA, 25 bp, Homo sapien
tcacggcaagtggaaacacctaccc

SEQ ID NO: 5669041 - DNA, 25 bp, Homo sapien
tcagtgcaacaggacagaatctagt

SEQ ID NO: 5669042 - DNA, 25 bp, Homo sapien
gaatctagtcgctgcatacctcctt

SEQ ID NO: 5669043 - DNA, 25 bp, Homo sapien
ttttattgggaggagatctgctgca

SEQ ID NO: 5669044 - DNA, 25 bp, Homo sapien
gtctgattgcttgggtcagtgcaac

SEQ ID NO: 5669045 - DNA, 25 bp, Homo sapien
gatctgctgcaagagtctgattgct

SEQ ID NO: 5669046 - DNA, 25 bp, Homo sapien
tatggcatgaaagttttattgggag

SEQ ID NO: 5669047 - DNA, 25 bp, Homo sapien
ggtatgcagcgactagattctgtcc

SEQ ID NO: 5669048 - DNA, 25 bp, Homo sapien
tgcagcagatctcctcccaataaaa

SEQ ID NO: 5669049 - DNA, 25 bp, Homo sapien
gttgcactgacccaagcaatcagac

SEQ ID NO: 5669050 - DNA, 25 bp, Homo sapien
gaaggaggtatgcagcgactagatt

SEQ ID NO: 5669051 - DNA, 25 bp, Homo sapien
gattctgtcctgttgcactgaccca

SEQ ID NO: 5669052 - DNA, 25 bp, Homo sapien
gcaatcagactcttgcagcagatct

SEQ ID NO: 5669053 - DNA, 25 bp, Homo sapien
gagcgggggcggtctcacaggagga

SEQ ID NO: 5669054 - DNA, 25 bp, Homo sapien
agcgggggcggtctcacaggaggag

SEQ ID NO: 5669055 - DNA, 25 bp, Homo sapien
ggcggtctcacaggaggagggagca

SEQ ID NO: 5669056 - DNA, 25 bp, Homo sapien
gcggtctcacaggaggagggagcat

SEQ ID NO: 5669057 - DNA, 25 bp, Homo sapien
cggtctcacaggaggagggagcatc

SEQ ID NO: 5669058 - DNA, 25 bp, Homo sapien
ggagcgggggcggtctcacaggagg

SEQ ID NO: 5669059 - DNA, 25 bp, Homo sapien
atgctccctcctcctgtgagaccgc

SEQ ID NO: 5669060 - DNA, 25 bp, Homo sapien
cctcctcctgtgagaccgcccccgc

SEQ ID NO: 5669061 - DNA, 25 bp, Homo sapien
tgctccctcctcctgtgagaccgcc

SEQ ID NO: 5669062 - DNA, 25 bp, Homo sapien
gatgctccctcctcctgtgagaccg

SEQ ID NO: 5669063 - DNA, 25 bp, Homo sapien
tcctcctgtgagaccgcccccgctc

SEQ ID NO: 5669064 - DNA, 25 bp, Homo sapien
ctcctcctgtgagaccgcccccgct

SEQ ID NO: 5669065 - DNA, 25 bp, Homo sapien
ggcggtctcacaggaggagggagca

SEQ ID NO: 5669066 - DNA, 25 bp, Homo sapien
aggagggagcatcttgtcactggcc

SEQ ID NO: 5669067 - DNA, 25 bp, Homo sapien
tctcacaggaggagggagcatcttg

SEQ ID NO: 5669068 - DNA, 25 bp, Homo sapien
cacaggaggagggagcatcttgtca

SEQ ID NO: 5669069 - DNA, 25 bp, Homo sapien
gagcatcttgtcactggccctcagt

SEQ ID NO: 5669070 - DNA, 25 bp, Homo sapien
ttgtcactggccctcagtttgtgtc

SEQ ID NO: 5669071 - DNA, 25 bp, Homo sapien
aagatgctccctcctcctgtgagac

SEQ ID NO: 5669072 - DNA, 25 bp, Homo sapien
caaactgagggccagtgacaagatg

SEQ ID NO: 5669073 - DNA, 25 bp, Homo sapien
gacacaaactgagggccagtgacaa

SEQ ID NO: 5669074 - DNA, 25 bp, Homo sapien
gtgacaagatgctccctcctcctgt

SEQ ID NO: 5669075 - DNA, 25 bp, Homo sapien
tgagggccagtgacaagatgctccc

SEQ ID NO: 5669076 - DNA, 25 bp, Homo sapien
ggaggaaggccccacctctcttctc

SEQ ID NO: 5669077 - DNA, 25 bp, Homo sapien
ttgcgctttcgagtctagggaaccg

SEQ ID NO: 5669078 - DNA, 25 bp, Homo sapien
ccacatgggcgctattgtggtagag

SEQ ID NO: 5669079 - DNA, 25 bp, Homo sapien
tagaggttgcgctttcgagtctagg

SEQ ID NO: 5669080 - DNA, 25 bp, Homo sapien
gctttcgagtctagggaaccgcagg

SEQ ID NO: 5669081 - DNA, 25 bp, Homo sapien
tattgtggtagaggttgcgctttcg

SEQ ID NO: 5669082 - DNA, 25 bp, Homo sapien
ttcgagtctagggaaccgcaggttg

SEQ ID NO: 5669083 - DNA, 25 bp, Homo sapien
caacctgcggttccctagactcgaa

SEQ ID NO: 5669084 - DNA, 25 bp, Homo sapien
gaaagcgcaacctctaccacaatag

SEQ ID NO: 5669085 - DNA, 25 bp, Homo sapien
tgcggttccctagactcgaaagcgc

SEQ ID NO: 5669086 - DNA, 25 bp, Homo sapien
tctaccacaatagcgcccatgtggt

SEQ ID NO: 5669087 - DNA, 25 bp, Homo sapien
ggttccctagactcgaaagcgcaac

SEQ ID NO: 5669088 - DNA, 25 bp, Homo sapien
cctagactcgaaagcgcaacctcta

SEQ ID NO: 5669089 - DNA, 25 bp, Homo sapien
cccatcatagggcaggggtgcgtag

SEQ ID NO: 5669090 - DNA, 25 bp, Homo sapien
gagaagccttgctgtggttacaccc

SEQ ID NO: 5669091 - DNA, 25 bp, Homo sapien
ggagagaagccttgctgtggttaca

SEQ ID NO: 5669092 - DNA, 25 bp, Homo sapien
cttagcaataggagacgggagagaa

SEQ ID NO: 5669093 - DNA, 25 bp, Homo sapien
agaagccttgctgtggttacacccc

SEQ ID NO: 5669094 - DNA, 25 bp, Homo sapien
ccttagcaataggagacgggagaga

SEQ ID NO: 5669095 - DNA, 25 bp, Homo sapien
ggtgtaaccacagcaaggcttctct

SEQ ID NO: 5669096 - DNA, 25 bp, Homo sapien
tgtaaccacagcaaggcttctctcc

SEQ ID NO: 5669097 - DNA, 25 bp, Homo sapien
ttctctcccgtctcctattgctaag

SEQ ID NO: 5669098 - DNA, 25 bp, Homo sapien
ctacgcacccctgccctatgatggg

SEQ ID NO: 5669099 - DNA, 25 bp, Homo sapien
tctctcccgtctcctattgctaagg

SEQ ID NO: 5669100 - DNA, 25 bp, Homo sapien
gggtgtaaccacagcaaggcttctc

SEQ ID NO: 5669101 - DNA, 25 bp, Homo sapien
tgagggggcggtgatggctgtttgt

SEQ ID NO: 5669102 - DNA, 25 bp, Homo sapien
atgagggggcggtgatggctgtttg

SEQ ID NO: 5669103 - DNA, 25 bp, Homo sapien
agggggcggtgatggctgtttgtat

SEQ ID NO: 5669104 - DNA, 25 bp, Homo sapien
gagggggcggtgatggctgtttgta

SEQ ID NO: 5669105 - DNA, 25 bp, Homo sapien
gaggtgatgagggggcggtgatggc

SEQ ID NO: 5669106 - DNA, 25 bp, Homo sapien
gatgagggggcggtgatggctgttt

SEQ ID NO: 5669107 - DNA, 25 bp, Homo sapien
acaaacagccatcaccgccccctca

SEQ ID NO: 5669108 - DNA, 25 bp, Homo sapien
caaacagccatcaccgccccctcat

SEQ ID NO: 5669109 - DNA, 25 bp, Homo sapien
aaacagccatcaccgccccctcatc

SEQ ID NO: 5669110 - DNA, 25 bp, Homo sapien
tacaaacagccatcaccgccccctc

SEQ ID NO: 5669111 - DNA, 25 bp, Homo sapien
atacaaacagccatcaccgccccct

SEQ ID NO: 5669112 - DNA, 25 bp, Homo sapien
ccatcaccgccccctcatcacctct

SEQ ID NO: 5669113 - DNA, 25 bp, Homo sapien
aaaaccgtccgaggagaggtgatga

SEQ ID NO: 5669114 - DNA, 25 bp, Homo sapien
tgtatcttttctgttaaagggctag

SEQ ID NO: 5669115 - DNA, 25 bp, Homo sapien
ggcggtgatggctgtttgtatcttt

SEQ ID NO: 5669116 - DNA, 25 bp, Homo sapien
ctgcaggaggtgtgctgttgaggga

SEQ ID NO: 5669117 - DNA, 25 bp, Homo sapien
cggtgatggctgtttgtatcttttc

SEQ ID NO: 5669118 - DNA, 25 bp, Homo sapien
gctgttgagggagaggaaaaccgtc

SEQ ID NO: 5669119 - DNA, 25 bp, Homo sapien
aaagatacaaacagccatcaccgcc

SEQ ID NO: 5669120 - DNA, 25 bp, Homo sapien
gacggttttcctctccctcaacagc

SEQ ID NO: 5669121 - DNA, 25 bp, Homo sapien
tcatcacctctcctcggacggtttt

SEQ ID NO: 5669122 - DNA, 25 bp, Homo sapien
ctagccctttaacagaaaagataca

SEQ ID NO: 5669123 - DNA, 25 bp, Homo sapien
gaaaagatacaaacagccatcaccg

SEQ ID NO: 5669124 - DNA, 25 bp, Homo sapien
tccctcaacagcacacctcctgcag

SEQ ID NO: 5669125 - DNA, 25 bp, Homo sapien
atttgtcctccgcctcgctcaaggg

SEQ ID NO: 5669126 - DNA, 25 bp, Homo sapien
ttgtcctccgcctcgctcaaggggg

SEQ ID NO: 5669127 - DNA, 25 bp, Homo sapien
gcacacggatttgtcctccgcctcg

SEQ ID NO: 5669128 - DNA, 25 bp, Homo sapien
tgcccccgcatttgaaggacgcaga

SEQ ID NO: 5669129 - DNA, 25 bp, Homo sapien
cccccgcatttgaaggacgcagagc

SEQ ID NO: 5669130 - DNA, 25 bp, Homo sapien
ggggcgcacacggatttgtcctccg

SEQ ID NO: 5669131 - DNA, 25 bp, Homo sapien
tctgcgtccttcaaatgcgggggca

SEQ ID NO: 5669132 - DNA, 25 bp, Homo sapien
gctctgcgtccttcaaatgcggggg

SEQ ID NO: 5669133 - DNA, 25 bp, Homo sapien
cggaggacaaatccgtgtgcgcccc

SEQ ID NO: 5669134 - DNA, 25 bp, Homo sapien
tcgcccccttgagcgaggcggagga

SEQ ID NO: 5669135 - DNA, 25 bp, Homo sapien
ccccttgagcgaggcggaggacaaa

SEQ ID NO: 5669136 - DNA, 25 bp, Homo sapien
gcgggggcaggcgtgaagctggccc

SEQ ID NO: 5669137 - DNA, 25 bp, Homo sapien
ccccgcatttgaaggacgcagagct

SEQ ID NO: 5669138 - DNA, 25 bp, Homo sapien
atttgtcctccgcctcgctcaaggg

SEQ ID NO: 5669139 - DNA, 25 bp, Homo sapien
gggcgcacacggatttgtcctccgc

SEQ ID NO: 5669140 - DNA, 25 bp, Homo sapien
gcacacggatttgtcctccgcctcg

SEQ ID NO: 5669141 - DNA, 25 bp, Homo sapien
tgcccccgcatttgaaggacgcaga

SEQ ID NO: 5669142 - DNA, 25 bp, Homo sapien
ccgcatttgaaggacgcagagctgg

SEQ ID NO: 5669143 - DNA, 25 bp, Homo sapien
ccccgcccggcactgcttggcgtgg

SEQ ID NO: 5669144 - DNA, 25 bp, Homo sapien
ggccccgcccggcactgcttggcgt

SEQ ID NO: 5669145 - DNA, 25 bp, Homo sapien
agaagaggctcggtcagggtgaggg

SEQ ID NO: 5669146 - DNA, 25 bp, Homo sapien
tgaggagatagagcgcctcccgggc

SEQ ID NO: 5669147 - DNA, 25 bp, Homo sapien
gagggctgaggagatagagcgcctc

SEQ ID NO: 5669148 - DNA, 25 bp, Homo sapien
ggctgaggagatagagcgcctcccg

SEQ ID NO: 5669149 - DNA, 25 bp, Homo sapien
cgggaggcgctctatctcctcagcc

SEQ ID NO: 5669150 - DNA, 25 bp, Homo sapien
ccccacgccaagcagtgccgggcgg

SEQ ID NO: 5669151 - DNA, 25 bp, Homo sapien
gcccgggaggcgctctatctcctca

SEQ ID NO: 5669152 - DNA, 25 bp, Homo sapien
ggaggcgctctatctcctcagccct

SEQ ID NO: 5669153 - DNA, 25 bp, Homo sapien
accgccccacgccaagcagtgccgg

SEQ ID NO: 5669154 - DNA, 25 bp, Homo sapien
ccctcaccctgaccgagcctcttct

SEQ ID NO: 5669155 - DNA, 25 bp, Homo sapien
ccccgcccggcactgcttggcgtgg

SEQ ID NO: 5669156 - DNA, 25 bp, Homo sapien
agggctgaggagatagagcgcctcc

SEQ ID NO: 5669157 - DNA, 25 bp, Homo sapien
gaggctcggtcagggtgagggctga

SEQ ID NO: 5669158 - DNA, 25 bp, Homo sapien
agaagaggctcggtcagggtgaggg

SEQ ID NO: 5669159 - DNA, 25 bp, Homo sapien
tggcgtggggcggtgggattcttcc

SEQ ID NO: 5669160 - DNA, 25 bp, Homo sapien
tgaggagatagagcgcctcccgggc

SEQ ID NO: 5669161 - DNA, 25 bp, Homo sapien
gggcccgggaggcgctctatctcct

SEQ ID NO: 5669162 - DNA, 25 bp, Homo sapien
tcaccctgaccgagcctcttctcta

SEQ ID NO: 5669163 - DNA, 25 bp, Homo sapien
tgggaagaatcccaccgccccacgc

SEQ ID NO: 5669164 - DNA, 25 bp, Homo sapien
ccccacgccaagcagtgccgggcgg

SEQ ID NO: 5669165 - DNA, 25 bp, Homo sapien
ggaggcgctctatctcctcagccct

SEQ ID NO: 5669166 - DNA, 25 bp, Homo sapien
cccgggaggcgctctatctcctcag

SEQ ID NO: 5669167 - DNA, 25 bp, Homo sapien
tttgctcttgtcaccccggctggag

SEQ ID NO: 5669168 - DNA, 25 bp, Homo sapien
agttttgctcttgtcaccccggctg

SEQ ID NO: 5669169 - DNA, 25 bp, Homo sapien
tgctcttgtcaccccggctggagtg

SEQ ID NO: 5669170 - DNA, 25 bp, Homo sapien
ttttgctcttgtcaccccggctgga

SEQ ID NO: 5669171 - DNA, 25 bp, Homo sapien
gttttgctcttgtcaccccggctgg

SEQ ID NO: 5669172 - DNA, 25 bp, Homo sapien
ttgctcttgtcaccccggctggagt

SEQ ID NO: 5669173 - DNA, 25 bp, Homo sapien
ctccagccggggtgacaagagcaaa

SEQ ID NO: 5669174 - DNA, 25 bp, Homo sapien
cactccagccggggtgacaagagca

SEQ ID NO: 5669175 - DNA, 25 bp, Homo sapien
ccagccggggtgacaagagcaaaac

SEQ ID NO: 5669176 - DNA, 25 bp, Homo sapien
actccagccggggtgacaagagcaa

SEQ ID NO: 5669177 - DNA, 25 bp, Homo sapien
cagccggggtgacaagagcaaaact

SEQ ID NO: 5669178 - DNA, 25 bp, Homo sapien
tccagccggggtgacaagagcaaaa

SEQ ID NO: 5669179 - DNA, 25 bp, Homo sapien
gagtcacatgggtgatgttaaaatg

SEQ ID NO: 5669180 - DNA, 25 bp, Homo sapien
cacatgggtgatgttaaaatgcaag

SEQ ID NO: 5669181 - DNA, 25 bp, Homo sapien
aaaatgcaagttctgatttcattgg

SEQ ID NO: 5669182 - DNA, 25 bp, Homo sapien
aacatgactgtgcaaaggagtcaca

SEQ ID NO: 5669183 - DNA, 25 bp, Homo sapien
caagttctgatttcattggatctgg

SEQ ID NO: 5669184 - DNA, 25 bp, Homo sapien
tctgatttcattggatctgggatgg

SEQ ID NO: 5669185 - DNA, 25 bp, Homo sapien
cagatccaatgaaatcagaacttgc

SEQ ID NO: 5669186 - DNA, 25 bp, Homo sapien
ccaatgaaatcagaacttgcatttt

SEQ ID NO: 5669187 - DNA, 25 bp, Homo sapien
cttgcattttaacatcacccatgtg

SEQ ID NO: 5669188 - DNA, 25 bp, Homo sapien
gcattttaacatcacccatgtgact

SEQ ID NO: 5669189 - DNA, 25 bp, Homo sapien
tgtgactcctttgcacagtcatgtt

SEQ ID NO: 5669190 - DNA, 25 bp, Homo sapien
ccatcccagatccaatgaaatcaga

SEQ ID NO: 5669191 - DNA, 25 bp, Homo sapien
tcttgtcccatgggttcggcttttc

SEQ ID NO: 5669192 - DNA, 25 bp, Homo sapien
gaaaagccgaacccatgggacaaga

SEQ ID NO: 5669193 - DNA, 25 bp, Homo sapien
cgtcaaagcctggagggccctttct

SEQ ID NO: 5669194 - DNA, 25 bp, Homo sapien
tttctttaaagcctgtcttctatag

SEQ ID NO: 5669195 - DNA, 25 bp, Homo sapien
tctgtcttgtcccatgggttcggct

SEQ ID NO: 5669196 - DNA, 25 bp, Homo sapien
tcaaagcctggagggccctttctgt

SEQ ID NO: 5669197 - DNA, 25 bp, Homo sapien
tcttgtcccatgggttcggcttttc

SEQ ID NO: 5669198 - DNA, 25 bp, Homo sapien
ctttctgtcttgtcccatgggttcg

SEQ ID NO: 5669199 - DNA, 25 bp, Homo sapien
cgaacccatgggacaagacagaaag

SEQ ID NO: 5669200 - DNA, 25 bp, Homo sapien
aagccgaacccatgggacaagacag

SEQ ID NO: 5669201 - DNA, 25 bp, Homo sapien
cccatgggacaagacagaaagggcc

SEQ ID NO: 5669202 - DNA, 25 bp, Homo sapien
gaaaagccgaacccatgggacaaga

SEQ ID NO: 5669203 - DNA, 25 bp, Homo sapien
agaaagggccctccaggctttgacg

SEQ ID NO: 5669204 - DNA, 25 bp, Homo sapien
ctatagaagacaggctttaaagaaa

SEQ ID NO: 5669205 - DNA, 25 bp, Homo sapien
tttatggcaagtatgatgggctgca

SEQ ID NO: 5669206 - DNA, 25 bp, Homo sapien
tacatttatgccagtggtttacatt

SEQ ID NO: 5669207 - DNA, 25 bp, Homo sapien
aatgagttcacacgccgagtgggaa

SEQ ID NO: 5669208 - DNA, 25 bp, Homo sapien
tatgatgggctgcatctaccaaaaa

SEQ ID NO: 5669209 - DNA, 25 bp, Homo sapien
taccaaaaatgagttcacacgccga

SEQ ID NO: 5669210 - DNA, 25 bp, Homo sapien
tttacataaacagcagtttatggca

SEQ ID NO: 5669211 - DNA, 25 bp, Homo sapien
gatgcagcccatcatacttgccata

SEQ ID NO: 5669212 - DNA, 25 bp, Homo sapien
cggcgtgtgaactcatttttggtag

SEQ ID NO: 5669213 - DNA, 25 bp, Homo sapien
ttcccactcggcgtgtgaactcatt

SEQ ID NO: 5669214 - DNA, 25 bp, Homo sapien
tttttggtagatgcagcccatcata

SEQ ID NO: 5669215 - DNA, 25 bp, Homo sapien
gccataaactgctgtttatgtaaaa

SEQ ID NO: 5669216 - DNA, 25 bp, Homo sapien
aaaatgtaaaccactggcataaatg

SEQ ID NO: 5669217 - DNA, 25 bp, Homo sapien
ccttcaggtcgaaaaatgacccatt

SEQ ID NO: 5669218 - DNA, 25 bp, Homo sapien
tctgcccttaaccttcaggtcgaaa

SEQ ID NO: 5669219 - DNA, 25 bp, Homo sapien
tgcatttggacgcaaacagttgtat

SEQ ID NO: 5669220 - DNA, 25 bp, Homo sapien
tcaggtcgaaaaatgacccattctc

SEQ ID NO: 5669221 - DNA, 25 bp, Homo sapien
catttggacgcaaacagttgtatta

SEQ ID NO: 5669222 - DNA, 25 bp, Homo sapien
gtcgaaaaatgacccattctctgcc

SEQ ID NO: 5669223 - DNA, 25 bp, Homo sapien
ataatacaactgtttgcgtccaaat

SEQ ID NO: 5669224 - DNA, 25 bp, Homo sapien
gagaatgggtcatttttcgacctga

SEQ ID NO: 5669225 - DNA, 25 bp, Homo sapien
ggcagagaatgggtcatttttcgac

SEQ ID NO: 5669226 - DNA, 25 bp, Homo sapien
aatacaactgtttgcgtccaaatgc

SEQ ID NO: 5669227 - DNA, 25 bp, Homo sapien
aatgggtcatttttcgacctgaagg

SEQ ID NO: 5669228 - DNA, 25 bp, Homo sapien
tttcgacctgaaggttaagggcaga

SEQ ID NO: 5669229 - DNA, 25 bp, Homo sapien
tgttctgtcaggagctactttagac

SEQ ID NO: 5669230 - DNA, 25 bp, Homo sapien
cttagtctttgtgagagctaaatta

SEQ ID NO: 5669231 - DNA, 25 bp, Homo sapien
gggcagattacctaaaatctgttct

SEQ ID NO: 5669232 - DNA, 25 bp, Homo sapien
tagacttagtctttgtgagagctaa

SEQ ID NO: 5669233 - DNA, 25 bp, Homo sapien
tcaggagctactttagacttagtct

SEQ ID NO: 5669234 - DNA, 25 bp, Homo sapien
aatctgttctgtcaggagctacttt

SEQ ID NO: 5669235 - DNA, 25 bp, Homo sapien
tagctctcacaaagactaagtctaa

SEQ ID NO: 5669236 - DNA, 25 bp, Homo sapien
taaagtagctcctgacagaacagat

SEQ ID NO: 5669237 - DNA, 25 bp, Homo sapien
caaagactaagtctaaagtagctcc

SEQ ID NO: 5669238 - DNA, 25 bp, Homo sapien
taatttagctctcacaaagactaag

SEQ ID NO: 5669239 - DNA, 25 bp, Homo sapien
taagtctaaagtagctcctgacaga

SEQ ID NO: 5669240 - DNA, 25 bp, Homo sapien
gaacagattttaggtaatctgcccc

SEQ ID NO: 5669241 - DNA, 25 bp, Homo sapien
cagcatgatggtgttctgtaactgt

SEQ ID NO: 5669242 - DNA, 25 bp, Homo sapien
ccttccacagcatgatggtgttctg

SEQ ID NO: 5669243 - DNA, 25 bp, Homo sapien
aaccttccacagcatgatggtgttc

SEQ ID NO: 5669244 - DNA, 25 bp, Homo sapien
cacagcatgatggtgttctgtaact

SEQ ID NO: 5669245 - DNA, 25 bp, Homo sapien
ttcttaaccttccacagcatgatgg

SEQ ID NO: 5669246 - DNA, 25 bp, Homo sapien
tccacagcatgatggtgttctgtaa

SEQ ID NO: 5669247 - DNA, 25 bp, Homo sapien
tacagaacaccatcatgctgtggaa

SEQ ID NO: 5669248 - DNA, 25 bp, Homo sapien
gaacaccatcatgctgtggaaggtt

SEQ ID NO: 5669249 - DNA, 25 bp, Homo sapien
ccatcatgctgtggaaggttaagaa

SEQ ID NO: 5669250 - DNA, 25 bp, Homo sapien
acagttacagaacaccatcatgctg

SEQ ID NO: 5669251 - DNA, 25 bp, Homo sapien
gttacagaacaccatcatgctgtgg

SEQ ID NO: 5669252 - DNA, 25 bp, Homo sapien
cagaacaccatcatgctgtggaagg

SEQ ID NO: 5669253 - DNA, 25 bp, Homo sapien
tatttccttagatatacacaaaaca

SEQ ID NO: 5669254 - DNA, 25 bp, Homo sapien
tttccttagatatacacaaaacatt

SEQ ID NO: 5669255 - DNA, 25 bp, Homo sapien
atttccttagatatacacaaaacat

SEQ ID NO: 5669256 - DNA, 25 bp, Homo sapien
ttccttagatatacacaaaacattt

SEQ ID NO: 5669257 - DNA, 25 bp, Homo sapien
atgttttgtgtatatctaaggaaat

SEQ ID NO: 5669258 - DNA, 25 bp, Homo sapien
aaatgttttgtgtatatctaaggaa

SEQ ID NO: 5669259 - DNA, 25 bp, Homo sapien
tgttttgtgtatatctaaggaaata

SEQ ID NO: 5669260 - DNA, 25 bp, Homo sapien
aatgttttgtgtatatctaaggaaa

SEQ ID NO: 5669261 - DNA, 25 bp, Homo sapien
cttagatatacacaaaacatttcat

SEQ ID NO: 5669262 - DNA, 25 bp, Homo sapien
tatttccttagatatacacaaaaca

SEQ ID NO: 5669263 - DNA, 25 bp, Homo sapien
tctaaatgaagtcattggtgctttt

SEQ ID NO: 5669264 - DNA, 25 bp, Homo sapien
catttgtctaaatgaagtcattggt

SEQ ID NO: 5669265 - DNA, 25 bp, Homo sapien
cattggtgctttttttgtaccataa

SEQ ID NO: 5669266 - DNA, 25 bp, Homo sapien
ttccttagatatacacaaaacattt

SEQ ID NO: 5669267 - DNA, 25 bp, Homo sapien
tgaaatgttttgtgtatatctaagg

SEQ ID NO: 5669268 - DNA, 25 bp, Homo sapien
aaatgttttgtgtatatctaaggaa

SEQ ID NO: 5669269 - DNA, 25 bp, Homo sapien
ccaatgacttcatttagacaaatga

SEQ ID NO: 5669270 - DNA, 25 bp, Homo sapien
ttatggtacaaaaaaagcaccaatg

SEQ ID NO: 5669271 - DNA, 25 bp, Homo sapien
aaaaagcaccaatgacttcatttag

SEQ ID NO: 5669272 - DNA, 25 bp, Homo sapien
gcaccaatgacttcatttagacaaa

SEQ ID NO: 5669273 - DNA, 25 bp, Homo sapien
ctgtgaagggaattacctggatccc

SEQ ID NO: 5669274 - DNA, 25 bp, Homo sapien
gctgtgaagggaattacctggatcc

SEQ ID NO: 5669275 - DNA, 25 bp, Homo sapien
ggatccaggtaattcccttcacagc

SEQ ID NO: 5669276 - DNA, 25 bp, Homo sapien
gggatccaggtaattcccttcacag

SEQ ID NO: 5669277 - DNA, 25 bp, Homo sapien
tacaaatgtaaagtgctgtgaaggg

SEQ ID NO: 5669278 - DNA, 25 bp, Homo sapien
ctgtgaagggaattacctggatccc

SEQ ID NO: 5669279 - DNA, 25 bp, Homo sapien
aatgaagctagcagagggcagagcc

SEQ ID NO: 5669280 - DNA, 25 bp, Homo sapien
ggtagagcaggaaatgaagctagca

SEQ ID NO: 5669281 - DNA, 25 bp, Homo sapien
gctgtgaagggaattacctggatcc

SEQ ID NO: 5669282 - DNA, 25 bp, Homo sapien
gggcagagccctaagaagtattaaa

SEQ ID NO: 5669283 - DNA, 25 bp, Homo sapien
agggctctgccctctgctagcttca

SEQ ID NO: 5669284 - DNA, 25 bp, Homo sapien
ccttcacagcactttacatttgtaa

SEQ ID NO: 5669285 - DNA, 25 bp, Homo sapien
ggatccaggtaattcccttcacagc

SEQ ID NO: 5669286 - DNA, 25 bp, Homo sapien
gctagcttcatttcctgctctacct

SEQ ID NO: 5669287 - DNA, 25 bp, Homo sapien
tatttaatacttcttagggctctgc

SEQ ID NO: 5669288 - DNA, 25 bp, Homo sapien
gggatccaggtaattcccttcacag

SEQ ID NO: 5669289 - DNA, 25 bp, Homo sapien
tgaaggtctggaataggctagtagt

SEQ ID NO: 5669290 - DNA, 25 bp, Homo sapien
ctagtagtggagagtaacaggcaaa

SEQ ID NO: 5669291 - DNA, 25 bp, Homo sapien
gctagtagtggagagtaacaggcaa

SEQ ID NO: 5669292 - DNA, 25 bp, Homo sapien
aataggctagtagtggagagtaaca

SEQ ID NO: 5669293 - DNA, 25 bp, Homo sapien
aaggccgtagagtgaaggtctggaa

SEQ ID NO: 5669294 - DNA, 25 bp, Homo sapien
tagagtgaaggtctggaataggcta

SEQ ID NO: 5669295 - DNA, 25 bp, Homo sapien
actactagcctattccagaccttca

SEQ ID NO: 5669296 - DNA, 25 bp, Homo sapien
tgttactctccactactagcctatt

SEQ ID NO: 5669297 - DNA, 25 bp, Homo sapien
tagcctattccagaccttcactcta

SEQ ID NO: 5669298 - DNA, 25 bp, Homo sapien
tttgcctgttactctccactactag

SEQ ID NO: 5669299 - DNA, 25 bp, Homo sapien
tactagcctattccagaccttcact

SEQ ID NO: 5669300 - DNA, 25 bp, Homo sapien
ttccagaccttcactctacggcctt

SEQ ID NO: 5669301 - DNA, 25 bp, Homo sapien
ggagaagttggcgatcacaccacag

SEQ ID NO: 5669302 - DNA, 25 bp, Homo sapien
ggtcccatcgatgcaccggactaaa

SEQ ID NO: 5669303 - DNA, 25 bp, Homo sapien
cggactaaacttggagctaatgagt

SEQ ID NO: 5669304 - DNA, 25 bp, Homo sapien
gcaccggactaaacttggagctaat

SEQ ID NO: 5669305 - DNA, 25 bp, Homo sapien
agaagttggcgatcacaccacagtt

SEQ ID NO: 5669306 - DNA, 25 bp, Homo sapien
cgatgcaccggactaaacttggagc

SEQ ID NO: 5669307 - DNA, 25 bp, Homo sapien
aactgtggtgtgatcgccaacttct

SEQ ID NO: 5669308 - DNA, 25 bp, Homo sapien
actcattagctccaagtttagtccg

SEQ ID NO: 5669309 - DNA, 25 bp, Homo sapien
ctgtggtgtgatcgccaacttctcc

SEQ ID NO: 5669310 - DNA, 25 bp, Homo sapien
gctccaagtttagtccggtgcatcg

SEQ ID NO: 5669311 - DNA, 25 bp, Homo sapien
tttagtccggtgcatcgatgggacc

SEQ ID NO: 5669312 - DNA, 25 bp, Homo sapien
cattagctccaagtttagtccggtg

SEQ ID NO: 5669313 - DNA, 25 bp, Homo sapien
ttgggagccctaggattatataaca

SEQ ID NO: 5669314 - DNA, 25 bp, Homo sapien
aacacatggacgattctctctttca

SEQ ID NO: 5669315 - DNA, 25 bp, Homo sapien
tataacacatggacgattctctctt

SEQ ID NO: 5669316 - DNA, 25 bp, Homo sapien
cattgacattgaagagatcatcaaa

SEQ ID NO: 5669317 - DNA, 25 bp, Homo sapien
tatataacacatggacgattctctc

SEQ ID NO: 5669318 - DNA, 25 bp, Homo sapien
gttcattgacattgaagagatcatc

SEQ ID NO: 5669319 - DNA, 25 bp, Homo sapien
gatgatctcttcaatgtcaatgaac

SEQ ID NO: 5669320 - DNA, 25 bp, Homo sapien
tgaaagagagaatcgtccatgtgtt

SEQ ID NO: 5669321 - DNA, 25 bp, Homo sapien
tttgatgatctcttcaatgtcaatg

SEQ ID NO: 5669322 - DNA, 25 bp, Homo sapien
gagaatcgtccatgtgttatataat

SEQ ID NO: 5669323 - DNA, 25 bp, Homo sapien
tgttatataatcctagggctcccaa

SEQ ID NO: 5669324 - DNA, 25 bp, Homo sapien
gagagaatcgtccatgtgttatata

SEQ ID NO: 5669325 - DNA, 25 bp, Homo sapien
ttcagtgccgcacaatgagtcagaa

SEQ ID NO: 5669326 - DNA, 25 bp, Homo sapien
gtgccgcacaatgagtcagaagatg

SEQ ID NO: 5669327 - DNA, 25 bp, Homo sapien
tgccgcacaatgagtcagaagatga

SEQ ID NO: 5669328 - DNA, 25 bp, Homo sapien
gccgcacaatgagtcagaagatgaa

SEQ ID NO: 5669329 - DNA, 25 bp, Homo sapien
tcagtgccgcacaatgagtcagaag

SEQ ID NO: 5669330 - DNA, 25 bp, Homo sapien
cagtgccgcacaatgagtcagaaga

SEQ ID NO: 5669331 - DNA, 25 bp, Homo sapien
tcttctgactcattgtgcggcactg

SEQ ID NO: 5669332 - DNA, 25 bp, Homo sapien
cttctgactcattgtgcggcactga

SEQ ID NO: 5669333 - DNA, 25 bp, Homo sapien
ttcatcttctgactcattgtgcggc

SEQ ID NO: 5669334 - DNA, 25 bp, Homo sapien
ttctgactcattgtgcggcactgaa

SEQ ID NO: 5669335 - DNA, 25 bp, Homo sapien
tcatcttctgactcattgtgcggca

SEQ ID NO: 5669336 - DNA, 25 bp, Homo sapien
catcttctgactcattgtgcggcac

SEQ ID NO: 5669337 - DNA, 25 bp, Homo sapien
tttagctgttcatttgctcggctcc

SEQ ID NO: 5669338 - DNA, 25 bp, Homo sapien
tcataactagagctcctgtagccaa

SEQ ID NO: 5669339 - DNA, 25 bp, Homo sapien
tagctgttcatttgctcggctcccc

SEQ ID NO: 5669340 - DNA, 25 bp, Homo sapien
cataactagagctcctgtagccaag

SEQ ID NO: 5669341 - DNA, 25 bp, Homo sapien
cactcataactagagctcctgtagc

SEQ ID NO: 5669342 - DNA, 25 bp, Homo sapien
ccacactcataactagagctcctgt

SEQ ID NO: 5669343 - DNA, 25 bp, Homo sapien
gctacaggagctctagttatgagtg

SEQ ID NO: 5669344 - DNA, 25 bp, Homo sapien
gggagccgagcaaatgaacagctaa

SEQ ID NO: 5669345 - DNA, 25 bp, Homo sapien
tggctacaggagctctagttatgag

SEQ ID NO: 5669346 - DNA, 25 bp, Homo sapien
cttggctacaggagctctagttatg

SEQ ID NO: 5669347 - DNA, 25 bp, Homo sapien
tacaggagctctagttatgagtgtg

SEQ ID NO: 5669348 - DNA, 25 bp, Homo sapien
ggagccgagcaaatgaacagctaaa

SEQ ID NO: 5669349 - DNA, 25 bp, Homo sapien
tgtttattgggggtggcctcttgtc

SEQ ID NO: 5669350 - DNA, 25 bp, Homo sapien
ctgtttattgggggtggcctcttgt

SEQ ID NO: 5669351 - DNA, 25 bp, Homo sapien
tctgtttattgggggtggcctcttg

SEQ ID NO: 5669352 - DNA, 25 bp, Homo sapien
cttctgtttattgggggtggcctct

SEQ ID NO: 5669353 - DNA, 25 bp, Homo sapien
caagaggccacccccaataaacaga

SEQ ID NO: 5669354 - DNA, 25 bp, Homo sapien
agaggccacccccaataaacagaag

SEQ ID NO: 5669355 - DNA, 25 bp, Homo sapien
acaagaggccacccccaataaacag

SEQ ID NO: 5669356 - DNA, 25 bp, Homo sapien
gacaagaggccacccccaataaaca

SEQ ID NO: 5669357 - DNA, 25 bp, Homo sapien
tgtttattgggggtggcctcttgtc

SEQ ID NO: 5669358 - DNA, 25 bp, Homo sapien
tggacttctggcttcttagcttgct

SEQ ID NO: 5669359 - DNA, 25 bp, Homo sapien
ccaatttttctttggacttctggct

SEQ ID NO: 5669360 - DNA, 25 bp, Homo sapien
gacttctggcttcttagcttgcttt

SEQ ID NO: 5669361 - DNA, 25 bp, Homo sapien
ggcttcttagcttgctttcctgcct

SEQ ID NO: 5669362 - DNA, 25 bp, Homo sapien
tcctgggcctcttctgtttattggg

SEQ ID NO: 5669363 - DNA, 25 bp, Homo sapien
ggaaagcaagctaagaagccagaag

SEQ ID NO: 5669364 - DNA, 25 bp, Homo sapien
agaggccacccccaataaacagaag

SEQ ID NO: 5669365 - DNA, 25 bp, Homo sapien
agcaagctaagaagccagaagtcca

SEQ ID NO: 5669366 - DNA, 25 bp, Homo sapien
agccagaagtccaaagaaaaattgg

SEQ ID NO: 5669367 - DNA, 25 bp, Homo sapien
ccaataaacagaagaggcccaggaa

SEQ ID NO: 5669368 - DNA, 25 bp, Homo sapien
ggaaggcaggaaagcaagctaagaa

SEQ ID NO: 5669369 - DNA, 25 bp, Homo sapien
taatttctaccgctgatcctagttg

SEQ ID NO: 5669370 - DNA, 25 bp, Homo sapien
tctgttcctgtaatttctaccgctg

SEQ ID NO: 5669371 - DNA, 25 bp, Homo sapien
tctctctcaacagttattctaaagg

SEQ ID NO: 5669372 - DNA, 25 bp, Homo sapien
tcaacagttattctaaaggtttcac

SEQ ID NO: 5669373 - DNA, 25 bp, Homo sapien
gatcctagttgtactccagtttcta

SEQ ID NO: 5669374 - DNA, 25 bp, Homo sapien
taccgctgatcctagttgtactcca

SEQ ID NO: 5669375 - DNA, 25 bp, Homo sapien
cctttagaataactgttgagagaga

SEQ ID NO: 5669376 - DNA, 25 bp, Homo sapien
tagaaactggagtacaactaggatc

SEQ ID NO: 5669377 - DNA, 25 bp, Homo sapien
tgaaacctttagaataactgttgag

SEQ ID NO: 5669378 - DNA, 25 bp, Homo sapien
tggagtacaactaggatcagcggta

SEQ ID NO: 5669379 - DNA, 25 bp, Homo sapien
tcagcggtagaaattacaggaacag

SEQ ID NO: 5669380 - DNA, 25 bp, Homo sapien
tacaactaggatcagcggtagaaat

SEQ ID NO: 5669381 - DNA, 25 bp, Homo sapien
cattagtttgtcattatctctagaa

SEQ ID NO: 5669382 - DNA, 25 bp, Homo sapien
tctctagaactcagcacagcgctca

SEQ ID NO: 5669383 - DNA, 25 bp, Homo sapien
tcagcacagcgctcagggtaataca

SEQ ID NO: 5669384 - DNA, 25 bp, Homo sapien
gaactcagcacagcgctcagggtaa

SEQ ID NO: 5669385 - DNA, 25 bp, Homo sapien
cttttctgaattacccattagtttg

SEQ ID NO: 5669386 - DNA, 25 bp, Homo sapien
tacagattataaggatgactgtcct

SEQ ID NO: 5669387 - DNA, 25 bp, Homo sapien
catccttataatctgtattaccctg

SEQ ID NO: 5669388 - DNA, 25 bp, Homo sapien
taaggacagtcatccttataatctg

SEQ ID NO: 5669389 - DNA, 25 bp, Homo sapien
caaactaatgggtaattcagaaaag

SEQ ID NO: 5669390 - DNA, 25 bp, Homo sapien
tgagcgctgtgctgagttctagaga

SEQ ID NO: 5669391 - DNA, 25 bp, Homo sapien
tgtattaccctgagcgctgtgctga

SEQ ID NO: 5669392 - DNA, 25 bp, Homo sapien
tctagagataatgacaaactaatgg

SEQ ID NO: 5669393 - DNA, 25 bp, Homo sapien
tagttggaaagaccatggtcaaagg

SEQ ID NO: 5669394 - DNA, 25 bp, Homo sapien
tggtagttggaaagaccatggtcaa

SEQ ID NO: 5669395 - DNA, 25 bp, Homo sapien
tgtggtagttggaaagaccatggtc

SEQ ID NO: 5669396 - DNA, 25 bp, Homo sapien
ttggaaagaccatggtcaaagggaa

SEQ ID NO: 5669397 - DNA, 25 bp, Homo sapien
ggtagttggaaagaccatggtcaaa

SEQ ID NO: 5669398 - DNA, 25 bp, Homo sapien
gccctggtggcatgctgaggaagca

SEQ ID NO: 5669399 - DNA, 25 bp, Homo sapien
gaccatggtctttccaactaccaca

SEQ ID NO: 5669400 - DNA, 25 bp, Homo sapien
tgcttcctcagcatgccaccagggc

SEQ ID NO: 5669401 - DNA, 25 bp, Homo sapien
cctttgaccatggtctttccaacta

SEQ ID NO: 5669402 - DNA, 25 bp, Homo sapien
ttccctttgaccatggtctttccaa

SEQ ID NO: 5669403 - DNA, 25 bp, Homo sapien
ttgaccatggtctttccaactacca

SEQ ID NO: 5669404 - DNA, 25 bp, Homo sapien
tttgaccatggtctttccaactacc

SEQ ID NO: 5669405 - DNA, 25 bp, Homo sapien
tgcctgacttcttaaccttcccagg

SEQ ID NO: 5669406 - DNA, 25 bp, Homo sapien
gactcctcaagatccagtatatata

SEQ ID NO: 5669407 - DNA, 25 bp, Homo sapien
ctgacttcttaaccttcccaggtat

SEQ ID NO: 5669408 - DNA, 25 bp, Homo sapien
cctgggaaggttaagaagtcaggca

SEQ ID NO: 5669409 - DNA, 25 bp, Homo sapien
tatatatactggatcttgaggagtc

SEQ ID NO: 5669410 - DNA, 25 bp, Homo sapien
atacctgggaaggttaagaagtcag

SEQ ID NO: 5669411 - DNA, 25 bp, Homo sapien
gatgacttatagcacccaatgtaat

SEQ ID NO: 5669412 - DNA, 25 bp, Homo sapien
tatagcacccaatgtaatttggtgg

SEQ ID NO: 5669413 - DNA, 25 bp, Homo sapien
ctgatgaagggcgtagtccccgaaa

SEQ ID NO: 5669414 - DNA, 25 bp, Homo sapien
tgatgaagggcgtagtccccgaaaa

SEQ ID NO: 5669415 - DNA, 25 bp, Homo sapien
aatgctgatgaagggcgtagtcccc

SEQ ID NO: 5669416 - DNA, 25 bp, Homo sapien
tcaatgctgatgaagggcgtagtcc

SEQ ID NO: 5669417 - DNA, 25 bp, Homo sapien
ttttcggggactacgcccttcatca

SEQ ID NO: 5669418 - DNA, 25 bp, Homo sapien
gggactacgcccttcatcagcattg

SEQ ID NO: 5669419 - DNA, 25 bp, Homo sapien
attacattgggtgctataagtcatc

SEQ ID NO: 5669420 - DNA, 25 bp, Homo sapien
gactacgcccttcatcagcattgaa

SEQ ID NO: 5669421 - DNA, 25 bp, Homo sapien
aaattacattgggtgctataagtca

SEQ ID NO: 5669422 - DNA, 25 bp, Homo sapien
ccaccaaattacattgggtgctata

SEQ ID NO: 5669423 - DNA, 25 bp, Homo sapien
gatcaagggtttggtatgtgggaaa

SEQ ID NO: 5669424 - DNA, 25 bp, Homo sapien
cccttacagatcaagggtttggtat

SEQ ID NO: 5669425 - DNA, 25 bp, Homo sapien
cttacagatcaagggtttggtatgt

SEQ ID NO: 5669426 - DNA, 25 bp, Homo sapien
ccttacagatcaagggtttggtatg

SEQ ID NO: 5669427 - DNA, 25 bp, Homo sapien
tacagatcaagggtttggtatgtgg

SEQ ID NO: 5669428 - DNA, 25 bp, Homo sapien
gcaaaggccccccttacagatcaag

SEQ ID NO: 5669429 - DNA, 25 bp, Homo sapien
acataccaaacccttgatctgtaag

SEQ ID NO: 5669430 - DNA, 25 bp, Homo sapien
cataccaaacccttgatctgtaagg

SEQ ID NO: 5669431 - DNA, 25 bp, Homo sapien
cttgatctgtaaggggggcctttgc

SEQ ID NO: 5669432 - DNA, 25 bp, Homo sapien
ataccaaacccttgatctgtaaggg

SEQ ID NO: 5669433 - DNA, 25 bp, Homo sapien
tttcccacataccaaacccttgatc

SEQ ID NO: 5669434 - DNA, 25 bp, Homo sapien
ccacataccaaacccttgatctgta

SEQ ID NO: 5669435 - DNA, 25 bp, Homo sapien
aagactagaagtcacagtcatctct

SEQ ID NO: 5669436 - DNA, 25 bp, Homo sapien
tgtgaagactagaagtcacagtcat

SEQ ID NO: 5669437 - DNA, 25 bp, Homo sapien
tgtataaatgggatttaaggagtta

SEQ ID NO: 5669438 - DNA, 25 bp, Homo sapien
tgatctaaggtttgtgaagactaga

SEQ ID NO: 5669439 - DNA, 25 bp, Homo sapien
ctattgatctaaggtttgtgaagac

SEQ ID NO: 5669440 - DNA, 25 bp, Homo sapien
tgaagactagaagtcacagtcatct

SEQ ID NO: 5669441 - DNA, 25 bp, Homo sapien
gtcttcacaaaccttagatcaatag

SEQ ID NO: 5669442 - DNA, 25 bp, Homo sapien
tctagtcttcacaaaccttagatca

SEQ ID NO: 5669443 - DNA, 25 bp, Homo sapien
agagatgactgtgacttctagtctt

SEQ ID NO: 5669444 - DNA, 25 bp, Homo sapien
taactccttaaatcccatttataca

SEQ ID NO: 5669445 - DNA, 25 bp, Homo sapien
gatgactgtgacttctagtcttcac

SEQ ID NO: 5669446 - DNA, 25 bp, Homo sapien
tagtcttcacaaaccttagatcaat

SEQ ID NO: 5669447 - DNA, 25 bp, Homo sapien
cataccaggtaaaaggagttgagct

SEQ ID NO: 5669448 - DNA, 25 bp, Homo sapien
cattcacatgagatcaaaaccggtg

SEQ ID NO: 5669449 - DNA, 25 bp, Homo sapien
aaggagttgagctctattaggagga

SEQ ID NO: 5669450 - DNA, 25 bp, Homo sapien
gaggccacataccattcacatgaga

SEQ ID NO: 5669451 - DNA, 25 bp, Homo sapien
tcaaaaccggtgatgagcataccag

SEQ ID NO: 5669452 - DNA, 25 bp, Homo sapien
agcaccagaggccacataccattca

SEQ ID NO: 5669453 - DNA, 25 bp, Homo sapien
tgaatggtatgtggcctctggtgct

SEQ ID NO: 5669454 - DNA, 25 bp, Homo sapien
tcctcctaatagagctcaactcctt

SEQ ID NO: 5669455 - DNA, 25 bp, Homo sapien
ttttacctggtatgctcatcaccgg

SEQ ID NO: 5669456 - DNA, 25 bp, Homo sapien
agagctcaactccttttacctggta

SEQ ID NO: 5669457 - DNA, 25 bp, Homo sapien
tctcatgtgaatggtatgtggcctc

SEQ ID NO: 5669458 - DNA, 25 bp, Homo sapien
catcaccggttttgatctcatgtga

SEQ ID NO: 5669459 - DNA, 25 bp, Homo sapien
ggaccaggtctggtctagctgtttt

SEQ ID NO: 5669460 - DNA, 25 bp, Homo sapien
aggtctggtctagctgttttttact

SEQ ID NO: 5669461 - DNA, 25 bp, Homo sapien
ccaggtctggtctagctgtttttta

SEQ ID NO: 5669462 - DNA, 25 bp, Homo sapien
gaccaggtctggtctagctgttttt

SEQ ID NO: 5669463 - DNA, 25 bp, Homo sapien
gggaccaggtctggtctagctgttt

SEQ ID NO: 5669464 - DNA, 25 bp, Homo sapien
caggtctggtctagctgttttttac

SEQ ID NO: 5669465 - DNA, 25 bp, Homo sapien
aaaaaacagctagaccagacctggt

SEQ ID NO: 5669466 - DNA, 25 bp, Homo sapien
aaaaacagctagaccagacctggtc

SEQ ID NO: 5669467 - DNA, 25 bp, Homo sapien
gtaaaaaacagctagaccagacctg

SEQ ID NO: 5669468 - DNA, 25 bp, Homo sapien
agtaaaaaacagctagaccagacct

SEQ ID NO: 5669469 - DNA, 25 bp, Homo sapien
aaaacagctagaccagacctggtcc

SEQ ID NO: 5669470 - DNA, 25 bp, Homo sapien
taaaaaacagctagaccagacctgg

SEQ ID NO: 5669471 - DNA, 25 bp, Homo sapien
ggaccaggtctggtctagctgtttt

SEQ ID NO: 5669472 - DNA, 25 bp, Homo sapien
ttactgagctttctcaccctggttg

SEQ ID NO: 5669473 - DNA, 25 bp, Homo sapien
ttcaggaggctattagagccttctg

SEQ ID NO: 5669474 - DNA, 25 bp, Homo sapien
ttagagccttctgtttgaatctggg

SEQ ID NO: 5669475 - DNA, 25 bp, Homo sapien
taagggttcaggaggctattagagc

SEQ ID NO: 5669476 - DNA, 25 bp, Homo sapien
caggtctggtctagctgttttttac

SEQ ID NO: 5669477 - DNA, 25 bp, Homo sapien
catggtctcaaactcaagtggtctg

SEQ ID NO: 5669478 - DNA, 25 bp, Homo sapien
tggtctcaaactcaagtggtctgtc

SEQ ID NO: 5669479 - DNA, 25 bp, Homo sapien
cagcatggtctcaaactcaagtggt

SEQ ID NO: 5669480 - DNA, 25 bp, Homo sapien
gcatggtctcaaactcaagtggtct

SEQ ID NO: 5669481 - DNA, 25 bp, Homo sapien
agcatggtctcaaactcaagtggtc

SEQ ID NO: 5669482 - DNA, 25 bp, Homo sapien
ggccagcatggtctcaaactcaagt

SEQ ID NO: 5669483 - DNA, 25 bp, Homo sapien
ccacttgagtttgagaccatgctgg

SEQ ID NO: 5669484 - DNA, 25 bp, Homo sapien
acttgagtttgagaccatgctggcc

SEQ ID NO: 5669485 - DNA, 25 bp, Homo sapien
cagaccacttgagtttgagaccatg

SEQ ID NO: 5669486 - DNA, 25 bp, Homo sapien
gaccacttgagtttgagaccatgct

SEQ ID NO: 5669487 - DNA, 25 bp, Homo sapien
gacagaccacttgagtttgagacca

SEQ ID NO: 5669488 - DNA, 25 bp, Homo sapien
accacttgagtttgagaccatgctg

SEQ ID NO: 5669489 - DNA, 25 bp, Homo sapien
aaagtggtaatgtcaatctaaggct

SEQ ID NO: 5669490 - DNA, 25 bp, Homo sapien
attaggcttgacaatgcctgttttc

SEQ ID NO: 5669491 - DNA, 25 bp, Homo sapien
cctgctggaattaggcttgacaatg

SEQ ID NO: 5669492 - DNA, 25 bp, Homo sapien
ttttgtgatcgtccacaggtgacaa

SEQ ID NO: 5669493 - DNA, 25 bp, Homo sapien
gctggaattaggcttgacaatgcct

SEQ ID NO: 5669494 - DNA, 25 bp, Homo sapien
atctaaggcttttgtgatcgtccac

SEQ ID NO: 5669495 - DNA, 25 bp, Homo sapien
gtggacgatcacaaaagccttagat

SEQ ID NO: 5669496 - DNA, 25 bp, Homo sapien
cattgtcaagcctaattccagcagg

SEQ ID NO: 5669497 - DNA, 25 bp, Homo sapien
tcacctgtggacgatcacaaaagcc

SEQ ID NO: 5669498 - DNA, 25 bp, Homo sapien
caaaagccttagattgacattacca

SEQ ID NO: 5669499 - DNA, 25 bp, Homo sapien
gaaaacaggcattgtcaagcctaat

SEQ ID NO: 5669500 - DNA, 25 bp, Homo sapien
ttgtcacctgtggacgatcacaaaa

SEQ ID NO: 5669501 - DNA, 25 bp, Homo sapien
tggagcggatcatgaaagcccaggc

SEQ ID NO: 5669502 - DNA, 25 bp, Homo sapien
gcggatcatgaaagcccaggcactt

SEQ ID NO: 5669503 - DNA, 25 bp, Homo sapien
gctggacagccaatatggagcggat

SEQ ID NO: 5669504 - DNA, 25 bp, Homo sapien
caatagacttgtgtcttcaccttgc

SEQ ID NO: 5669505 - DNA, 25 bp, Homo sapien
agacttgtgtcttcaccttgctgca

SEQ ID NO: 5669506 - DNA, 25 bp, Homo sapien
tgaccagcacctacggctggacagc

SEQ ID NO: 5669507 - DNA, 25 bp, Homo sapien
tcatgatccgctccatattggctgt

SEQ ID NO: 5669508 - DNA, 25 bp, Homo sapien
tgcagcaaggtgaagacacaagtct

SEQ ID NO: 5669509 - DNA, 25 bp, Homo sapien
tgcctgggctttcatgatccgctcc

SEQ ID NO: 5669510 - DNA, 25 bp, Homo sapien
taggtgctggtcacaatgcagcaag

SEQ ID NO: 5669511 - DNA, 25 bp, Homo sapien
aggtgaagacacaagtctattggag

SEQ ID NO: 5669512 - DNA, 25 bp, Homo sapien
attggctgtccagccgtaggtgctg

SEQ ID NO: 5669513 - DNA, 25 bp, Homo sapien
aagaggctgggaggggtggctcacg

SEQ ID NO: 5669514 - DNA, 25 bp, Homo sapien
agaggctgggaggggtggctcacgc

SEQ ID NO: 5669515 - DNA, 25 bp, Homo sapien
gcgtgagccacccctcccagcctct

SEQ ID NO: 5669516 - DNA, 25 bp, Homo sapien
cgtgagccacccctcccagcctctt

SEQ ID NO: 5669517 - DNA, 25 bp, Homo sapien
gttagagtgagccaagatcatgcca

SEQ ID NO: 5669518 - DNA, 25 bp, Homo sapien
aggttagagtgagccaagatcatgc

SEQ ID NO: 5669519 - DNA, 25 bp, Homo sapien
ggttagagtgagccaagatcatgcc

SEQ ID NO: 5669520 - DNA, 25 bp, Homo sapien
agaggttagagtgagccaagatcat

SEQ ID NO: 5669521 - DNA, 25 bp, Homo sapien
ttagagtgagccaagatcatgccac

SEQ ID NO: 5669522 - DNA, 25 bp, Homo sapien
gaggttagagtgagccaagatcatg

SEQ ID NO: 5669523 - DNA, 25 bp, Homo sapien
gtggcatgatcttggctcactctaa

SEQ ID NO: 5669524 - DNA, 25 bp, Homo sapien
gcatgatcttggctcactctaacct

SEQ ID NO: 5669525 - DNA, 25 bp, Homo sapien
tggcatgatcttggctcactctaac

SEQ ID NO: 5669526 - DNA, 25 bp, Homo sapien
atgatcttggctcactctaacctct

SEQ ID NO: 5669527 - DNA, 25 bp, Homo sapien
catgatcttggctcactctaacctc

SEQ ID NO: 5669528 - DNA, 25 bp, Homo sapien
ggcatgatcttggctcactctaacc

SEQ ID NO: 5669529 - DNA, 25 bp, Homo sapien
ctggtgtggtgggtgcccataatcc

SEQ ID NO: 5669530 - DNA, 25 bp, Homo sapien
tagctggtgtggtgggtgcccataa

SEQ ID NO: 5669531 - DNA, 25 bp, Homo sapien
agctggtgtggtgggtgcccataat

SEQ ID NO: 5669532 - DNA, 25 bp, Homo sapien
gctggtgtggtgggtgcccataatc

SEQ ID NO: 5669533 - DNA, 25 bp, Homo sapien
tggtgtggtgggtgcccataatccc

SEQ ID NO: 5669534 - DNA, 25 bp, Homo sapien
gattatgggcacccaccacaccagc

SEQ ID NO: 5669535 - DNA, 25 bp, Homo sapien
ggattatgggcacccaccacaccag

SEQ ID NO: 5669536 - DNA, 25 bp, Homo sapien
attatgggcacccaccacaccagct

SEQ ID NO: 5669537 - DNA, 25 bp, Homo sapien
gggattatgggcacccaccacacca

SEQ ID NO: 5669538 - DNA, 25 bp, Homo sapien
ctgggggtagcatggaatatctgaa

SEQ ID NO: 5669539 - DNA, 25 bp, Homo sapien
tctgggggtagcatggaatatctga

SEQ ID NO: 5669540 - DNA, 25 bp, Homo sapien
tcagatattccatgctacccccaga

SEQ ID NO: 5669541 - DNA, 25 bp, Homo sapien
ttcagatattccatgctacccccag

SEQ ID NO: 5669542 - DNA, 25 bp, Homo sapien
tttgctcctatgactttagatggat

SEQ ID NO: 5669543 - DNA, 25 bp, Homo sapien
tcctttgctcctatgactttagatg

SEQ ID NO: 5669544 - DNA, 25 bp, Homo sapien
ttgctcctatgactttagatggatg

SEQ ID NO: 5669545 - DNA, 25 bp, Homo sapien
ctttgctcctatgactttagatgga

SEQ ID NO: 5669546 - DNA, 25 bp, Homo sapien
tgctcctatgactttagatggatgg

SEQ ID NO: 5669547 - DNA, 25 bp, Homo sapien
cctttgctcctatgactttagatgg

SEQ ID NO: 5669548 - DNA, 25 bp, Homo sapien
aaatgagttcaaaaggtgagtgctg

SEQ ID NO: 5669549 - DNA, 25 bp, Homo sapien
cagcactcaccttttgaactcattt

SEQ ID NO: 5669550 - DNA, 25 bp, Homo sapien
catctaaagtcataggagcaaagga

SEQ ID NO: 5669551 - DNA, 25 bp, Homo sapien
tccatctaaagtcataggagcaaag

SEQ ID NO: 5669552 - DNA, 25 bp, Homo sapien
ccatccatctaaagtcataggagca

SEQ ID NO: 5669553 - DNA, 25 bp, Homo sapien
ccatctaaagtcataggagcaaagg

SEQ ID NO: 5669554 - DNA, 25 bp, Homo sapien
atccatctaaagtcataggagcaaa

SEQ ID NO: 5669555 - DNA, 25 bp, Homo sapien
catccatctaaagtcataggagcaa

SEQ ID NO: 5669556 - DNA, 25 bp, Homo sapien
aaaaggtgagtgctgtttctcttct

SEQ ID NO: 5669557 - DNA, 25 bp, Homo sapien
tatgactttagatggatggtcccac

SEQ ID NO: 5669558 - DNA, 25 bp, Homo sapien
tctgagatcacctcctttgctccta

SEQ ID NO: 5669559 - DNA, 25 bp, Homo sapien
tagatggatggtcccaccttttccc

SEQ ID NO: 5669560 - DNA, 25 bp, Homo sapien
tgctcctatgactttagatggatgg

SEQ ID NO: 5669561 - DNA, 25 bp, Homo sapien
cctttgctcctatgactttagatgg

SEQ ID NO: 5669562 - DNA, 25 bp, Homo sapien
ttcccctggtctgggggtagcatgg

SEQ ID NO: 5669563 - DNA, 25 bp, Homo sapien
cctggtctgggggtagcatggaata

SEQ ID NO: 5669564 - DNA, 25 bp, Homo sapien
ctggtctgggggtagcatggaatat

SEQ ID NO: 5669565 - DNA, 25 bp, Homo sapien
ctgggggtagcatggaatatctgaa

SEQ ID NO: 5669566 - DNA, 25 bp, Homo sapien
tctgggggtagcatggaatatctga

SEQ ID NO: 5669567 - DNA, 25 bp, Homo sapien
tttcccctggtctgggggtagcatg

SEQ ID NO: 5669568 - DNA, 25 bp, Homo sapien
atattccatgctacccccagaccag

SEQ ID NO: 5669569 - DNA, 25 bp, Homo sapien
gatattccatgctacccccagacca

SEQ ID NO: 5669570 - DNA, 25 bp, Homo sapien
tcagatattccatgctacccccaga

SEQ ID NO: 5669571 - DNA, 25 bp, Homo sapien
ttcagatattccatgctacccccag

SEQ ID NO: 5669572 - DNA, 25 bp, Homo sapien
catgctacccccagaccaggggaaa

SEQ ID NO: 5669573 - DNA, 25 bp, Homo sapien
tattccatgctacccccagaccagg

SEQ ID NO: 5669574 - DNA, 25 bp, Homo sapien
catacattcgtaatcatgcaaccac

SEQ ID NO: 5669575 - DNA, 25 bp, Homo sapien
acattcgtaatcatgcaaccaccac

SEQ ID NO: 5669576 - DNA, 25 bp, Homo sapien
ctctctgttgcctaccactccaaac

SEQ ID NO: 5669577 - DNA, 25 bp, Homo sapien
catccgcatcagaactctttcatta

SEQ ID NO: 5669578 - DNA, 25 bp, Homo sapien
tacattcgtaatcatgcaaccacca

SEQ ID NO: 5669579 - DNA, 25 bp, Homo sapien
accatccgcatcagaactctttcat

SEQ ID NO: 5669580 - DNA, 25 bp, Homo sapien
gtttggagtggtaggcaacagagag

SEQ ID NO: 5669581 - DNA, 25 bp, Homo sapien
atgaaagagttctgatgcggatggt

SEQ ID NO: 5669582 - DNA, 25 bp, Homo sapien
gtggttgcatgattacgaatgtatg

SEQ ID NO: 5669583 - DNA, 25 bp, Homo sapien
tggtggttgcatgattacgaatgta

SEQ ID NO: 5669584 - DNA, 25 bp, Homo sapien
taatgaaagagttctgatgcggatg

SEQ ID NO: 5669585 - DNA, 25 bp, Homo sapien
gtggtggttgcatgattacgaatgt

SEQ ID NO: 5669586 - DNA, 25 bp, Homo sapien
gtgactaaaggcgcgttgcaccatg

SEQ ID NO: 5669587 - DNA, 25 bp, Homo sapien
tgtgactaaaggcgcgttgcaccat

SEQ ID NO: 5669588 - DNA, 25 bp, Homo sapien
ctgtgactaaaggcgcgttgcacca

SEQ ID NO: 5669589 - DNA, 25 bp, Homo sapien
actaaaggcgcgttgcaccatgcct

SEQ ID NO: 5669590 - DNA, 25 bp, Homo sapien
aggcatggtgcaacgcgcctttagt

SEQ ID NO: 5669591 - DNA, 25 bp, Homo sapien
catggtgcaacgcgcctttagtcac

SEQ ID NO: 5669592 - DNA, 25 bp, Homo sapien
tggtgcaacgcgcctttagtcacag

SEQ ID NO: 5669593 - DNA, 25 bp, Homo sapien
atggtgcaacgcgcctttagtcaca

SEQ ID NO: 5669594 - DNA, 25 bp, Homo sapien
gtgactaaaggcgcgttgcaccatg

SEQ ID NO: 5669595 - DNA, 25 bp, Homo sapien
tagtagactcgggtttcactgtgtt

SEQ ID NO: 5669596 - DNA, 25 bp, Homo sapien
tgtgactaaaggcgcgttgcaccat

SEQ ID NO: 5669597 - DNA, 25 bp, Homo sapien
ctgtgactaaaggcgcgttgcacca

SEQ ID NO: 5669598 - DNA, 25 bp, Homo sapien
ctaaaggcgcgttgcaccatgcctg

SEQ ID NO: 5669599 - DNA, 25 bp, Homo sapien
actaaaggcgcgttgcaccatgcct

SEQ ID NO: 5669600 - DNA, 25 bp, Homo sapien
aggcatggtgcaacgcgcctttagt

SEQ ID NO: 5669601 - DNA, 25 bp, Homo sapien
catggtgcaacgcgcctttagtcac

SEQ ID NO: 5669602 - DNA, 25 bp, Homo sapien
tggtgcaacgcgcctttagtcacag

SEQ ID NO: 5669603 - DNA, 25 bp, Homo sapien
atggtgcaacgcgcctttagtcaca

SEQ ID NO: 5669604 - DNA, 25 bp, Homo sapien
caggcatggtgcaacgcgcctttag

SEQ ID NO: 5669605 - DNA, 25 bp, Homo sapien
aacacagtgaaacccgagtctacta

SEQ ID NO: 5669606 - DNA, 25 bp, Homo sapien
agtggcgagatctcggctcaccaca

SEQ ID NO: 5669607 - DNA, 25 bp, Homo sapien
gtggcgagatctcggctcaccacaa

SEQ ID NO: 5669608 - DNA, 25 bp, Homo sapien
ttgtggtgagccgagatctcgccac

SEQ ID NO: 5669609 - DNA, 25 bp, Homo sapien
tgtggtgagccgagatctcgccact

SEQ ID NO: 5669610 - DNA, 25 bp, Homo sapien
gctaatggcagtattcaactgataa

SEQ ID NO: 5669611 - DNA, 25 bp, Homo sapien
cagtattcaactgataactatggtt

SEQ ID NO: 5669612 - DNA, 25 bp, Homo sapien
ggcagtattcaactgataactatgg

SEQ ID NO: 5669613 - DNA, 25 bp, Homo sapien
gcagtattcaactgataactatggt

SEQ ID NO: 5669614 - DNA, 25 bp, Homo sapien
taatggcagtattcaactgataact

SEQ ID NO: 5669615 - DNA, 25 bp, Homo sapien
tggcagtattcaactgataactatg

SEQ ID NO: 5669616 - DNA, 25 bp, Homo sapien
ttatcagttgaatactgccattagc

SEQ ID NO: 5669617 - DNA, 25 bp, Homo sapien
tagttatcagttgaatactgccatt

SEQ ID NO: 5669618 - DNA, 25 bp, Homo sapien
ccatagttatcagttgaatactgcc

SEQ ID NO: 5669619 - DNA, 25 bp, Homo sapien
catagttatcagttgaatactgcca

SEQ ID NO: 5669620 - DNA, 25 bp, Homo sapien
aaccatagttatcagttgaatactg

SEQ ID NO: 5669621 - DNA, 25 bp, Homo sapien
gttatcagttgaatactgccattag

SEQ ID NO: 5669622 - DNA, 25 bp, Homo sapien
tcttcttgcagtctcagtgtatgtc

SEQ ID NO: 5669623 - DNA, 25 bp, Homo sapien
tcttgcagtctcagtgtatgtccaa

SEQ ID NO: 5669624 - DNA, 25 bp, Homo sapien
ccaagtcttattaagctgcctttgc

SEQ ID NO: 5669625 - DNA, 25 bp, Homo sapien
gcagtctcagtgtatgtccaaatct

SEQ ID NO: 5669626 - DNA, 25 bp, Homo sapien
tccaaatctgtacttgtctttcccc

SEQ ID NO: 5669627 - DNA, 25 bp, Homo sapien
gtatgtccaaatctgtacttgtctt

SEQ ID NO: 5669628 - DNA, 25 bp, Homo sapien
gatttggacatacactgagactgca

SEQ ID NO: 5669629 - DNA, 25 bp, Homo sapien
aagacaagtacagatttggacatac

SEQ ID NO: 5669630 - DNA, 25 bp, Homo sapien
caaaggcagcttaataagacttgga

SEQ ID NO: 5669631 - DNA, 25 bp, Homo sapien
gggaaagacaagtacagatttggac

SEQ ID NO: 5669632 - DNA, 25 bp, Homo sapien
gacatacactgagactgcaagaaga

SEQ ID NO: 5669633 - DNA, 25 bp, Homo sapien
tggacatacactgagactgcaagaa

SEQ ID NO: 5669634 - DNA, 25 bp, Homo sapien
gaagagtgctctccatgctctaatt

SEQ ID NO: 5669635 - DNA, 25 bp, Homo sapien
cagaagagtgctctccatgctctaa

SEQ ID NO: 5669636 - DNA, 25 bp, Homo sapien
gtagcagaagagtgctctccatgct

SEQ ID NO: 5669637 - DNA, 25 bp, Homo sapien
tggtagcagaagagtgctctccatg

SEQ ID NO: 5669638 - DNA, 25 bp, Homo sapien
tctccatgctctaatttccgggctg

SEQ ID NO: 5669639 - DNA, 25 bp, Homo sapien
tgctctccatgctctaatttccggg

SEQ ID NO: 5669640 - DNA, 25 bp, Homo sapien
cccggaaattagagcatggagagca

SEQ ID NO: 5669641 - DNA, 25 bp, Homo sapien
tagagcatggagagcactcttctgc

SEQ ID NO: 5669642 - DNA, 25 bp, Homo sapien
aattagagcatggagagcactcttc

SEQ ID NO: 5669643 - DNA, 25 bp, Homo sapien
cagcccggaaattagagcatggaga

SEQ ID NO: 5669644 - DNA, 25 bp, Homo sapien
ggaaattagagcatggagagcactc

SEQ ID NO: 5669645 - DNA, 25 bp, Homo sapien
catggagagcactcttctgctacca

SEQ ID NO: 5669646 - DNA, 25 bp, Homo sapien
taaacatctaagcaaacacttaagc

SEQ ID NO: 5669647 - DNA, 25 bp, Homo sapien
ctaatttccgggctgtgagtatcta

SEQ ID NO: 5669648 - DNA, 25 bp, Homo sapien
tttccgggctgtgagtatctatttc

SEQ ID NO: 5669649 - DNA, 25 bp, Homo sapien
cagaagagtgctctccatgctctaa

SEQ ID NO: 5669650 - DNA, 25 bp, Homo sapien
cgggctgtgagtatctatttctcta

SEQ ID NO: 5669651 - DNA, 25 bp, Homo sapien
tgagtatctatttctctaccctttt

SEQ ID NO: 5669652 - DNA, 25 bp, Homo sapien
tagagcatggagagcactcttctgc

SEQ ID NO: 5669653 - DNA, 25 bp, Homo sapien
aaaagggtagagaaatagatactca

SEQ ID NO: 5669654 - DNA, 25 bp, Homo sapien
tagagaaatagatactcacagcccg

SEQ ID NO: 5669655 - DNA, 25 bp, Homo sapien
tagatactcacagcccggaaattag

SEQ ID NO: 5669656 - DNA, 25 bp, Homo sapien
gcttaagtgtttgcttagatgttta

SEQ ID NO: 5669657 - DNA, 25 bp, Homo sapien
gaaatagatactcacagcccggaaa

SEQ ID NO: 5669658 - DNA, 25 bp, Homo sapien
cctatactatagttgaacaagaagt

SEQ ID NO: 5669659 - DNA, 25 bp, Homo sapien
cgtaaaaaatgtgtgcaactgtctg

SEQ ID NO: 5669660 - DNA, 25 bp, Homo sapien
gaagttgcctgcaattttcccttgg

SEQ ID NO: 5669661 - DNA, 25 bp, Homo sapien
aaatgtgtgcaactgtctgtgggtg

SEQ ID NO: 5669662 - DNA, 25 bp, Homo sapien
gttgcctgcaattttcccttggaaa

SEQ ID NO: 5669663 - DNA, 25 bp, Homo sapien
gaacaagaagttgcctgcaattttc

SEQ ID NO: 5669664 - DNA, 25 bp, Homo sapien
gaaaattgcaggcaacttcttgttc

SEQ ID NO: 5669665 - DNA, 25 bp, Homo sapien
acttcttgttcaactatagtatagg

SEQ ID NO: 5669666 - DNA, 25 bp, Homo sapien
cagacagttgcacacattttttacg

SEQ ID NO: 5669667 - DNA, 25 bp, Homo sapien
tccaagggaaaattgcaggcaactt

SEQ ID NO: 5669668 - DNA, 25 bp, Homo sapien
ttttccaagggaaaattgcaggcaa

SEQ ID NO: 5669669 - DNA, 25 bp, Homo sapien
cacccacagacagttgcacacattt

SEQ ID NO: 5669670 - DNA, 25 bp, Homo sapien
ttttgtcttaggctgtagatatatg

SEQ ID NO: 5669671 - DNA, 25 bp, Homo sapien
tttgtcttaggctgtagatatatgc

SEQ ID NO: 5669672 - DNA, 25 bp, Homo sapien
tgtcttaggctgtagatatatgcta

SEQ ID NO: 5669673 - DNA, 25 bp, Homo sapien
ttgtcttaggctgtagatatatgct

SEQ ID NO: 5669674 - DNA, 25 bp, Homo sapien
gtgaatttcaatgctaataccgtct

SEQ ID NO: 5669675 - DNA, 25 bp, Homo sapien
tgctaataccgtcttcctttctagt

SEQ ID NO: 5669676 - DNA, 25 bp, Homo sapien
aatgctaataccgtcttcctttcta

SEQ ID NO: 5669677 - DNA, 25 bp, Homo sapien
tcaatgctaataccgtcttcctttc

SEQ ID NO: 5669678 - DNA, 25 bp, Homo sapien
aatttcaatgctaataccgtcttcc

SEQ ID NO: 5669679 - DNA, 25 bp, Homo sapien
gaatttcaatgctaataccgtcttc

SEQ ID NO: 5669680 - DNA, 25 bp, Homo sapien
gaagacggtattagcattgaaattc

SEQ ID NO: 5669681 - DNA, 25 bp, Homo sapien
tagaaaggaagacggtattagcatt

SEQ ID NO: 5669682 - DNA, 25 bp, Homo sapien
agacggtattagcattgaaattcac

SEQ ID NO: 5669683 - DNA, 25 bp, Homo sapien
actagaaaggaagacggtattagca

SEQ ID NO: 5669684 - DNA, 25 bp, Homo sapien
aaggaagacggtattagcattgaaa

SEQ ID NO: 5669685 - DNA, 25 bp, Homo sapien
gaaaggaagacggtattagcattga

SEQ ID NO: 5669686 - DNA, 25 bp, Homo sapien
catatatctacagcctaagacaaaa

SEQ ID NO: 5669687 - DNA, 25 bp, Homo sapien
tagcatatatctacagcctaagaca

SEQ ID NO: 5669688 - DNA, 25 bp, Homo sapien
gcatatatctacagcctaagacaaa

SEQ ID NO: 5669689 - DNA, 25 bp, Homo sapien
agcatatatctacagcctaagacaa

SEQ ID NO: 5669690 - DNA, 25 bp, Homo sapien
ttcaagtaaaagctgccagggtgtg

SEQ ID NO: 5669691 - DNA, 25 bp, Homo sapien
tttgtcttaggctgtagatatatgc

SEQ ID NO: 5669692 - DNA, 25 bp, Homo sapien
tagattttgtcttaggctgtagata

SEQ ID NO: 5669693 - DNA, 25 bp, Homo sapien
gaatttcaatgctaataccgtcttc

SEQ ID NO: 5669694 - DNA, 25 bp, Homo sapien
tgtcttaggctgtagatatatgcta

SEQ ID NO: 5669695 - DNA, 25 bp, Homo sapien
gctgccagggtgtgaatttcaatgc

SEQ ID NO: 5669696 - DNA, 25 bp, Homo sapien
ctagaaaggaagacggtattagcat

SEQ ID NO: 5669697 - DNA, 25 bp, Homo sapien
cattgaaattcacaccctggcagct

SEQ ID NO: 5669698 - DNA, 25 bp, Homo sapien
tagcatatatctacagcctaagaca

SEQ ID NO: 5669699 - DNA, 25 bp, Homo sapien
tatctacagcctaagacaaaatcta

SEQ ID NO: 5669700 - DNA, 25 bp, Homo sapien
gcatatatctacagcctaagacaaa

SEQ ID NO: 5669701 - DNA, 25 bp, Homo sapien
agcatatatctacagcctaagacaa

SEQ ID NO: 5669702 - DNA, 25 bp, Homo sapien
gagtagaaaaataaccattcgtgta

SEQ ID NO: 5669703 - DNA, 25 bp, Homo sapien
accattcgtgtattatgaaccctga

SEQ ID NO: 5669704 - DNA, 25 bp, Homo sapien
cattcgtgtattatgaaccctgaag

SEQ ID NO: 5669705 - DNA, 25 bp, Homo sapien
gtgtattatgaaccctgaagttggg

SEQ ID NO: 5669706 - DNA, 25 bp, Homo sapien
tcgtgtattatgaaccctgaagttg

SEQ ID NO: 5669707 - DNA, 25 bp, Homo sapien
taaccattcgtgtattatgaaccct

SEQ ID NO: 5669708 - DNA, 25 bp, Homo sapien
tccccaacttcagggttcataatac

SEQ ID NO: 5669709 - DNA, 25 bp, Homo sapien
caacttcagggttcataatacacga

SEQ ID NO: 5669710 - DNA, 25 bp, Homo sapien
tcagggttcataatacacgaatggt

SEQ ID NO: 5669711 - DNA, 25 bp, Homo sapien
ttctccccaacttcagggttcataa

SEQ ID NO: 5669712 - DNA, 25 bp, Homo sapien
tacacgaatggttatttttctactc

SEQ ID NO: 5669713 - DNA, 25 bp, Homo sapien
ccaacttcagggttcataatacacg

SEQ ID NO: 5669714 - DNA, 25 bp, Homo sapien
aaaggagcctactgcctttcacctc

SEQ ID NO: 5669715 - DNA, 25 bp, Homo sapien
gaggtgaaaggcagtaggctccttt

SEQ ID NO: 5669716 - DNA, 25 bp, Homo sapien
tttcaagaggtgagaaacaaagctt

SEQ ID NO: 5669717 - DNA, 25 bp, Homo sapien
aaaggagcctactgcctttcacctc

SEQ ID NO: 5669718 - DNA, 25 bp, Homo sapien
caattctcatgtggaaaaagatgca

SEQ ID NO: 5669719 - DNA, 25 bp, Homo sapien
tcttggtgcaattctcatgtggaaa

SEQ ID NO: 5669720 - DNA, 25 bp, Homo sapien
caagaggtgagaaacaaagcttttt

SEQ ID NO: 5669721 - DNA, 25 bp, Homo sapien
tgcctttcacctcttggtgcaattc

SEQ ID NO: 5669722 - DNA, 25 bp, Homo sapien
gaggtgaaaggcagtaggctccttt

SEQ ID NO: 5669723 - DNA, 25 bp, Homo sapien
caccaagaggtgaaaggcagtaggc

SEQ ID NO: 5669724 - DNA, 25 bp, Homo sapien
tgcatctttttccacatgagaattg

SEQ ID NO: 5669725 - DNA, 25 bp, Homo sapien
ttttccacatgagaattgcaccaag

SEQ ID NO: 5669726 - DNA, 25 bp, Homo sapien
gaattgcaccaagaggtgaaaggca

SEQ ID NO: 5669727 - DNA, 25 bp, Homo sapien
aaagctttgtttctcacctcttgaa

SEQ ID NO: 5669728 - DNA, 25 bp, Homo sapien
tatgcttgaattaatggaaggcagg

SEQ ID NO: 5669729 - DNA, 25 bp, Homo sapien
gtggtagctcgcattgtgcttaaat

SEQ ID NO: 5669730 - DNA, 25 bp, Homo sapien
tgtggtagctcgcattgtgcttaaa

SEQ ID NO: 5669731 - DNA, 25 bp, Homo sapien
tgcttgaattaatggaaggcaggtt

SEQ ID NO: 5669732 - DNA, 25 bp, Homo sapien
attttgtggtagctcgcattgtgct

SEQ ID NO: 5669733 - DNA, 25 bp, Homo sapien
ttttgtggtagctcgcattgtgctt

SEQ ID NO: 5669734 - DNA, 25 bp, Homo sapien
tttaagcacaatgcgagctaccaca

SEQ ID NO: 5669735 - DNA, 25 bp, Homo sapien
aagcacaatgcgagctaccacaaaa

SEQ ID NO: 5669736 - DNA, 25 bp, Homo sapien
atttaagcacaatgcgagctaccac

SEQ ID NO: 5669737 - DNA, 25 bp, Homo sapien
aacctgccttccattaattcaagca

SEQ ID NO: 5669738 - DNA, 25 bp, Homo sapien
agcacaatgcgagctaccacaaaat

SEQ ID NO: 5669739 - DNA, 25 bp, Homo sapien
cctgccttccattaattcaagcata

SEQ ID NO: 5669740 - DNA, 25 bp, Homo sapien
ggacaagttatcttgagaggacttc

SEQ ID NO: 5669741 - DNA, 25 bp, Homo sapien
aacaagcttatgtggttttacagat

SEQ ID NO: 5669742 - DNA, 25 bp, Homo sapien
aaacctaaggacaagttatcttgag

SEQ ID NO: 5669743 - DNA, 25 bp, Homo sapien
ggttttacagattaagttagatatc

SEQ ID NO: 5669744 - DNA, 25 bp, Homo sapien
cttgagaggacttctacagtaaaac

SEQ ID NO: 5669745 - DNA, 25 bp, Homo sapien
taaggacaagttatcttgagaggac

SEQ ID NO: 5669746 - DNA, 25 bp, Homo sapien
gatatctaacttaatctgtaaaacc

SEQ ID NO: 5669747 - DNA, 25 bp, Homo sapien
tctcaagataacttgtccttaggtt

SEQ ID NO: 5669748 - DNA, 25 bp, Homo sapien
gttttactgtagaagtcctctcaag

SEQ ID NO: 5669749 - DNA, 25 bp, Homo sapien
taatctgtaaaaccacataagcttg

SEQ ID NO: 5669750 - DNA, 25 bp, Homo sapien
taacttaatctgtaaaaccacataa

SEQ ID NO: 5669751 - DNA, 25 bp, Homo sapien
gaagtcctctcaagataacttgtcc

SEQ ID NO: 5669752 - DNA, 25 bp, Homo sapien
gttggaagtcttgagttatcttgag

SEQ ID NO: 5669753 - DNA, 25 bp, Homo sapien
gactgcatgaaaatgtagactatac

SEQ ID NO: 5669754 - DNA, 25 bp, Homo sapien
tactactttattctgctgtggcaga

SEQ ID NO: 5669755 - DNA, 25 bp, Homo sapien
cacattagtgtaggatactgactgc

SEQ ID NO: 5669756 - DNA, 25 bp, Homo sapien
gtgtaggatactgactgcatgaaaa

SEQ ID NO: 5669757 - DNA, 25 bp, Homo sapien
tgtagactatacttagttggaagtc

SEQ ID NO: 5669758 - DNA, 25 bp, Homo sapien
gacttccaactaagtatagtctaca

SEQ ID NO: 5669759 - DNA, 25 bp, Homo sapien
cagtcagtatcctacactaatgtga

SEQ ID NO: 5669760 - DNA, 25 bp, Homo sapien
ttttcatgcagtcagtatcctacac

SEQ ID NO: 5669761 - DNA, 25 bp, Homo sapien
tctgccacagcagaataaagtagta

SEQ ID NO: 5669762 - DNA, 25 bp, Homo sapien
tatagtctacattttcatgcagtca

SEQ ID NO: 5669763 - DNA, 25 bp, Homo sapien
tcaagataactcaagacttccaact

SEQ ID NO: 5669764 - DNA, 25 bp, Homo sapien
tagtcaagagccctagtctttcagt

SEQ ID NO: 5669765 - DNA, 25 bp, Homo sapien
tatacatttagtcaagagccctagt

SEQ ID NO: 5669766 - DNA, 25 bp, Homo sapien
tgcagctagatgttaggtttgacac

SEQ ID NO: 5669767 - DNA, 25 bp, Homo sapien
ggttcacatggcgaatgtgcagcta

SEQ ID NO: 5669768 - DNA, 25 bp, Homo sapien
ccttatctttgtggttcacatggcg

SEQ ID NO: 5669769 - DNA, 25 bp, Homo sapien
gttaggtttgacacttgagaaaata

SEQ ID NO: 5669770 - DNA, 25 bp, Homo sapien
tcgccatgtgaaccacaaagataag

SEQ ID NO: 5669771 - DNA, 25 bp, Homo sapien
tagctgcacattcgccatgtgaacc

SEQ ID NO: 5669772 - DNA, 25 bp, Homo sapien
tattttctcaagtgtcaaacctaac

SEQ ID NO: 5669773 - DNA, 25 bp, Homo sapien
actgaaagactagggctcttgacta

SEQ ID NO: 5669774 - DNA, 25 bp, Homo sapien
gtgtcaaacctaacatctagctgca

SEQ ID NO: 5669775 - DNA, 25 bp, Homo sapien
gactagggctcttgactaaatgtat

SEQ ID NO: 5669776 - DNA, 25 bp, Homo sapien
tggtccttattcgtagtactgtaag

SEQ ID NO: 5669777 - DNA, 25 bp, Homo sapien
ccttattcgtagtactgtaaggagc

SEQ ID NO: 5669778 - DNA, 25 bp, Homo sapien
tgaaagtagcatattggtccttatt

SEQ ID NO: 5669779 - DNA, 25 bp, Homo sapien
tattggtccttattcgtagtactgt

SEQ ID NO: 5669780 - DNA, 25 bp, Homo sapien
gaaatgaaagtagcatattggtcct

SEQ ID NO: 5669781 - DNA, 25 bp, Homo sapien
ttattcgtagtactgtaaggagcag

SEQ ID NO: 5669782 - DNA, 25 bp, Homo sapien
tgctccttacagtactacgaataag

SEQ ID NO: 5669783 - DNA, 25 bp, Homo sapien
ggaccaatatgctactttcatttcc

SEQ ID NO: 5669784 - DNA, 25 bp, Homo sapien
aataaggaccaatatgctactttca

SEQ ID NO: 5669785 - DNA, 25 bp, Homo sapien
cttacagtactacgaataaggacca

SEQ ID NO: 5669786 - DNA, 25 bp, Homo sapien
ctgctccttacagtactacgaataa

SEQ ID NO: 5669787 - DNA, 25 bp, Homo sapien
tacagtactacgaataaggaccaat

SEQ ID NO: 5669788 - DNA, 25 bp, Homo sapien
caggaccttcctatactttagtagt

SEQ ID NO: 5669789 - DNA, 25 bp, Homo sapien
ccaggaccttcctatactttagtag

SEQ ID NO: 5669790 - DNA, 25 bp, Homo sapien
aggaccttcctatactttagtagtg

SEQ ID NO: 5669791 - DNA, 25 bp, Homo sapien
actactaaagtataggaaggtcctg

SEQ ID NO: 5669792 - DNA, 25 bp, Homo sapien
ctactaaagtataggaaggtcctgg

SEQ ID NO: 5669793 - DNA, 25 bp, Homo sapien
cactactaaagtataggaaggtcct

SEQ ID NO: 5669794 - DNA, 25 bp, Homo sapien
ggctatttttgagaccaggaccttc

SEQ ID NO: 5669795 - DNA, 25 bp, Homo sapien
gccctgtgtggctatttttgagacc

SEQ ID NO: 5669796 - DNA, 25 bp, Homo sapien
ccaggaccttcctatactttagtag

SEQ ID NO: 5669797 - DNA, 25 bp, Homo sapien
cgtttctgaaccaggcttttatttg

SEQ ID NO: 5669798 - DNA, 25 bp, Homo sapien
aggaccttcctatactttagtagtg

SEQ ID NO: 5669799 - DNA, 25 bp, Homo sapien
ttcccttttgccctgtgtggctatt

SEQ ID NO: 5669800 - DNA, 25 bp, Homo sapien
gaaggtcctggtctcaaaaatagcc

SEQ ID NO: 5669801 - DNA, 25 bp, Homo sapien
aatagccacacagggcaaaagggaa

SEQ ID NO: 5669802 - DNA, 25 bp, Homo sapien
aaagcctggttcagaaacgccccat

SEQ ID NO: 5669803 - DNA, 25 bp, Homo sapien
cactactaaagtataggaaggtcct

SEQ ID NO: 5669804 - DNA, 25 bp, Homo sapien
ggtctcaaaaatagccacacagggc

SEQ ID NO: 5669805 - DNA, 25 bp, Homo sapien
caaataaaagcctggttcagaaacg

SEQ ID NO: 5669806 - DNA, 25 bp, Homo sapien
gaggtgtttaacaaaactagagcag

SEQ ID NO: 5669807 - DNA, 25 bp, Homo sapien
tgggttaggtcatcacttaccccac

SEQ ID NO: 5669808 - DNA, 25 bp, Homo sapien
taggtcatcacttaccccactcctc

SEQ ID NO: 5669809 - DNA, 25 bp, Homo sapien
gggctgggttaggtcatcacttacc

SEQ ID NO: 5669810 - DNA, 25 bp, Homo sapien
ggttaggtcatcacttaccccactc

SEQ ID NO: 5669811 - DNA, 25 bp, Homo sapien
gctgggttaggtcatcacttacccc

SEQ ID NO: 5669812 - DNA, 25 bp, Homo sapien
taagtgatgacctaacccagccccg

SEQ ID NO: 5669813 - DNA, 25 bp, Homo sapien
gtaagtgatgacctaacccagcccc

SEQ ID NO: 5669814 - DNA, 25 bp, Homo sapien
gagtggggtaagtgatgacctaacc

SEQ ID NO: 5669815 - DNA, 25 bp, Homo sapien
ggtaagtgatgacctaacccagccc

SEQ ID NO: 5669816 - DNA, 25 bp, Homo sapien
gggtaagtgatgacctaacccagcc

SEQ ID NO: 5669817 - DNA, 25 bp, Homo sapien
ctgctctagttttgttaaacacctc

SEQ ID NO: 5669818 - DNA, 25 bp, Homo sapien
ccggaaaatagtagggattgtagct

SEQ ID NO: 5669819 - DNA, 25 bp, Homo sapien
tactgagcacattcggggcttcggg

SEQ ID NO: 5669820 - DNA, 25 bp, Homo sapien
aaatagtagggattgtagctggctc

SEQ ID NO: 5669821 - DNA, 25 bp, Homo sapien
tagtagggattgtagctggctcagt

SEQ ID NO: 5669822 - DNA, 25 bp, Homo sapien
tagggattgtagctggctcagtccc

SEQ ID NO: 5669823 - DNA, 25 bp, Homo sapien
gggattgtagctggctcagtcccca

SEQ ID NO: 5669824 - DNA, 25 bp, Homo sapien
tgagccagctacaatccctactatt

SEQ ID NO: 5669825 - DNA, 25 bp, Homo sapien
gggactgagccagctacaatcccta

SEQ ID NO: 5669826 - DNA, 25 bp, Homo sapien
gcccgaagccccgaatgtgctcagt

SEQ ID NO: 5669827 - DNA, 25 bp, Homo sapien
aagccccgaatgtgctcagtacagg

SEQ ID NO: 5669828 - DNA, 25 bp, Homo sapien
agctacaatccctactattttccgg

SEQ ID NO: 5669829 - DNA, 25 bp, Homo sapien
cgaagccccgaatgtgctcagtaca

SEQ ID NO: 5669830 - DNA, 25 bp, Homo sapien
ctgtctgccgcggaccgccgccttc

SEQ ID NO: 5669831 - DNA, 25 bp, Homo sapien
ttgaagaagtgtaagcagcgggagg

SEQ ID NO: 5669832 - DNA, 25 bp, Homo sapien
accggagtctgtctgccgcggaccg

SEQ ID NO: 5669833 - DNA, 25 bp, Homo sapien
tgaagaagtgtaagcagcgggaggg

SEQ ID NO: 5669834 - DNA, 25 bp, Homo sapien
atgctccctgggttcccggtgtctg

SEQ ID NO: 5669835 - DNA, 25 bp, Homo sapien
tgctccctgggttcccggtgtctgg

SEQ ID NO: 5669836 - DNA, 25 bp, Homo sapien
cagacaccgggaacccagggagcat

SEQ ID NO: 5669837 - DNA, 25 bp, Homo sapien
ccagacaccgggaacccagggagca

SEQ ID NO: 5669838 - DNA, 25 bp, Homo sapien
cggtccgcggcagacagactccggt

SEQ ID NO: 5669839 - DNA, 25 bp, Homo sapien
tcccctcccgctgcttacacttctt

SEQ ID NO: 5669840 - DNA, 25 bp, Homo sapien
cctcccgctgcttacacttcttcaa

SEQ ID NO: 5669841 - DNA, 25 bp, Homo sapien
gaaggcggcggtccgcggcagacag

SEQ ID NO: 5669842 - DNA, 25 bp, Homo sapien
tgaagctgagatccttgtaaagatt

SEQ ID NO: 5669843 - DNA, 25 bp, Homo sapien
tggaagtagtctttgtaaagataca

SEQ ID NO: 5669844 - DNA, 25 bp, Homo sapien
gctgagatccttgtaaagatttgga

SEQ ID NO: 5669845 - DNA, 25 bp, Homo sapien
tgagatccttgtaaagatttggaag

SEQ ID NO: 5669846 - DNA, 25 bp, Homo sapien
attgaagctgagatccttgtaaaga

SEQ ID NO: 5669847 - DNA, 25 bp, Homo sapien
agatacagaaacagtcttgtaggcc

SEQ ID NO: 5669848 - DNA, 25 bp, Homo sapien
tccaaatctttacaaggatctcagc

SEQ ID NO: 5669849 - DNA, 25 bp, Homo sapien
tctttacaaggatctcagcttcaat

SEQ ID NO: 5669850 - DNA, 25 bp, Homo sapien
aatctttacaaggatctcagcttca

SEQ ID NO: 5669851 - DNA, 25 bp, Homo sapien
cttccaaatctttacaaggatctca

SEQ ID NO: 5669852 - DNA, 25 bp, Homo sapien
tgtatctttacaaagactacttcca

SEQ ID NO: 5669853 - DNA, 25 bp, Homo sapien
ggcctacaagactgtttctgtatct

SEQ ID NO: 5669854 - DNA, 25 bp, Homo sapien
taaatgcttgtctgtcataagggag

SEQ ID NO: 5669855 - DNA, 25 bp, Homo sapien
gagtagatccggaatctccatgatg

SEQ ID NO: 5669856 - DNA, 25 bp, Homo sapien
agatccggaatctccatgatgtggg

SEQ ID NO: 5669857 - DNA, 25 bp, Homo sapien
gagatgagtagatccggaatctcca

SEQ ID NO: 5669858 - DNA, 25 bp, Homo sapien
ttgtctgtcataagggagtaatggg

SEQ ID NO: 5669859 - DNA, 25 bp, Homo sapien
agtggagatgagtagatccggaatc

SEQ ID NO: 5669860 - DNA, 25 bp, Homo sapien
ccattactcccttatgacagacaag

SEQ ID NO: 5669861 - DNA, 25 bp, Homo sapien
catcatggagattccggatctactc

SEQ ID NO: 5669862 - DNA, 25 bp, Homo sapien
tcccttatgacagacaagcatttac

SEQ ID NO: 5669863 - DNA, 25 bp, Homo sapien
ccccacatcatggagattccggatc

SEQ ID NO: 5669864 - DNA, 25 bp, Homo sapien
tttacaacccccacatcatggagat

SEQ ID NO: 5669865 - DNA, 25 bp, Homo sapien
gattccggatctactcatctccact

SEQ ID NO: 5669866 - DNA, 25 bp, Homo sapien
tcagccacttcggaggtgccttgtt

SEQ ID NO: 5669867 - DNA, 25 bp, Homo sapien
gaggtgccttgttttggtagtgcaa

SEQ ID NO: 5669868 - DNA, 25 bp, Homo sapien
ccttgttttggtagtgcaaaagaag

SEQ ID NO: 5669869 - DNA, 25 bp, Homo sapien
agaaaaaatagtgatctgtgagctc

SEQ ID NO: 5669870 - DNA, 25 bp, Homo sapien
atgggaagagatcccctcagccact

SEQ ID NO: 5669871 - DNA, 25 bp, Homo sapien
cacttcggaggtgccttgttttggt

SEQ ID NO: 5669872 - DNA, 25 bp, Homo sapien
ttcttttgcactaccaaaacaaggc

SEQ ID NO: 5669873 - DNA, 25 bp, Homo sapien
caaaacaaggcacctccgaagtggc

SEQ ID NO: 5669874 - DNA, 25 bp, Homo sapien
caaggcacctccgaagtggctgagg

SEQ ID NO: 5669875 - DNA, 25 bp, Homo sapien
agtggctgaggggatctcttcccat

SEQ ID NO: 5669876 - DNA, 25 bp, Homo sapien
tttgcactaccaaaacaaggcacct

SEQ ID NO: 5669877 - DNA, 25 bp, Homo sapien
gagctcacagatcactattttttct

SEQ ID NO: 5669878 - DNA, 25 bp, Homo sapien
ttggtttagaaagctgtgtttctta

SEQ ID NO: 5669879 - DNA, 25 bp, Homo sapien
gttccagcaaaaacatgcattaaat

SEQ ID NO: 5669880 - DNA, 25 bp, Homo sapien
ttccagcaaaaacatgcattaaatg

SEQ ID NO: 5669881 - DNA, 25 bp, Homo sapien
atttaatgcatgtttttgctggaac

SEQ ID NO: 5669882 - DNA, 25 bp, Homo sapien
taagaaacacagctttctaaaccaa

SEQ ID NO: 5669883 - DNA, 25 bp, Homo sapien
catttaatgcatgtttttgctggaa

SEQ ID NO: 5669884 - DNA, 25 bp, Homo sapien
catgcattaaatgtacttgaaaagt

SEQ ID NO: 5669885 - DNA, 25 bp, Homo sapien
tgatgatcctttctgttccagcaaa

SEQ ID NO: 5669886 - DNA, 25 bp, Homo sapien
catacctaaaatcccttgatgatcc

SEQ ID NO: 5669887 - DNA, 25 bp, Homo sapien
taaaatcccttgatgatcctttctg

SEQ ID NO: 5669888 - DNA, 25 bp, Homo sapien
tagaaagctgtgtttcttaagctca

SEQ ID NO: 5669889 - DNA, 25 bp, Homo sapien
ttccagcaaaaacatgcattaaatg

SEQ ID NO: 5669890 - DNA, 25 bp, Homo sapien
tgagcttaagaaacacagctttcta

SEQ ID NO: 5669891 - DNA, 25 bp, Homo sapien
ggatcatcaagggattttaggtatg

SEQ ID NO: 5669892 - DNA, 25 bp, Homo sapien
aaacttttcaagtacatttaatgca

SEQ ID NO: 5669893 - DNA, 25 bp, Homo sapien
taagaaacacagctttctaaaccaa

SEQ ID NO: 5669894 - DNA, 25 bp, Homo sapien
tggaacagaaaggatcatcaaggga

SEQ ID NO: 5669895 - DNA, 25 bp, Homo sapien
catttaatgcatgtttttgctggaa

SEQ ID NO: 5669896 - DNA, 25 bp, Homo sapien
tcacctggatgtactcttttctcat

SEQ ID NO: 5669897 - DNA, 25 bp, Homo sapien
agtcacctggatgtactcttttctc

SEQ ID NO: 5669898 - DNA, 25 bp, Homo sapien
cacctggatgtactcttttctcatt

SEQ ID NO: 5669899 - DNA, 25 bp, Homo sapien
gtcacctggatgtactcttttctca

SEQ ID NO: 5669900 - DNA, 25 bp, Homo sapien
aagtcacctggatgtactcttttct

SEQ ID NO: 5669901 - DNA, 25 bp, Homo sapien
caagtcacctggatgtactcttttc

SEQ ID NO: 5669902 - DNA, 25 bp, Homo sapien
aaaagagtacatccaggtgacttgt

SEQ ID NO: 5669903 - DNA, 25 bp, Homo sapien
tgagaaaagagtacatccaggtgac

SEQ ID NO: 5669904 - DNA, 25 bp, Homo sapien
agaaaagagtacatccaggtgactt

SEQ ID NO: 5669905 - DNA, 25 bp, Homo sapien
gaaaagagtacatccaggtgacttg

SEQ ID NO: 5669906 - DNA, 25 bp, Homo sapien
gagaaaagagtacatccaggtgact

SEQ ID NO: 5669907 - DNA, 25 bp, Homo sapien
aatgagaaaagagtacatccaggtg

SEQ ID NO: 5669908 - DNA, 25 bp, Homo sapien
ttctcattcagcatggcctgtatga

SEQ ID NO: 5669909 - DNA, 25 bp, Homo sapien
gactgggtcagtttccctaccagag

SEQ ID NO: 5669910 - DNA, 25 bp, Homo sapien
gattttaatgtttacaagtcacctg

SEQ ID NO: 5669911 - DNA, 25 bp, Homo sapien
ccagagtggtgggtaatgattttaa

SEQ ID NO: 5669912 - DNA, 25 bp, Homo sapien
gtcacctggatgtactcttttctca

SEQ ID NO: 5669913 - DNA, 25 bp, Homo sapien
tcagtttccctaccagagtggtggg

SEQ ID NO: 5669914 - DNA, 25 bp, Homo sapien
tccctggtaagtgctacttttcagt

SEQ ID NO: 5669915 - DNA, 25 bp, Homo sapien
ccctggtaagtgctacttttcagtt

SEQ ID NO: 5669916 - DNA, 25 bp, Homo sapien
cctggtaagtgctacttttcagttc

SEQ ID NO: 5669917 - DNA, 25 bp, Homo sapien
ctgcccgaagccagttctaaatttt

SEQ ID NO: 5669918 - DNA, 25 bp, Homo sapien
actgcccgaagccagttctaaattt

SEQ ID NO: 5669919 - DNA, 25 bp, Homo sapien
aaaatttagaactggcttcgggcag

SEQ ID NO: 5669920 - DNA, 25 bp, Homo sapien
aaatttagaactggcttcgggcagt

SEQ ID NO: 5669921 - DNA, 25 bp, Homo sapien
aactgaaaagtagcacttaccaggg

SEQ ID NO: 5669922 - DNA, 25 bp, Homo sapien
actgaaaagtagcacttaccaggga

SEQ ID NO: 5669923 - DNA, 25 bp, Homo sapien
gaactgaaaagtagcacttaccagg

SEQ ID NO: 5669924 - DNA, 25 bp, Homo sapien
tccctggtaagtgctacttttcagt

SEQ ID NO: 5669925 - DNA, 25 bp, Homo sapien
gtaagtgctacttttcagttctacc

SEQ ID NO: 5669926 - DNA, 25 bp, Homo sapien
ccaatttccctggtaagtgctactt

SEQ ID NO: 5669927 - DNA, 25 bp, Homo sapien
ctgcccgaagccagttctaaatttt

SEQ ID NO: 5669928 - DNA, 25 bp, Homo sapien
cctggtaagtgctacttttcagttc

SEQ ID NO: 5669929 - DNA, 25 bp, Homo sapien
tgctacttttcagttctacctaccc

SEQ ID NO: 5669930 - DNA, 25 bp, Homo sapien
ggtagaactgaaaagtagcacttac

SEQ ID NO: 5669931 - DNA, 25 bp, Homo sapien
aaaatttagaactggcttcgggcag

SEQ ID NO: 5669932 - DNA, 25 bp, Homo sapien
ggtaggtagaactgaaaagtagcac

SEQ ID NO: 5669933 - DNA, 25 bp, Homo sapien
aagtagcacttaccagggaaattgg

SEQ ID NO: 5669934 - DNA, 25 bp, Homo sapien
actgaaaagtagcacttaccaggga

SEQ ID NO: 5669935 - DNA, 25 bp, Homo sapien
gaactgaaaagtagcacttaccagg

SEQ ID NO: 5669936 - DNA, 25 bp, Homo sapien
tacttaaattaggttgagtataaca

SEQ ID NO: 5669937 - DNA, 25 bp, Homo sapien
tgacttcataattgggaaaggtgtg

SEQ ID NO: 5669938 - DNA, 25 bp, Homo sapien
ttgggaaaggtgtgactcacttttg

SEQ ID NO: 5669939 - DNA, 25 bp, Homo sapien
taaattaggttgagtataacaataa

SEQ ID NO: 5669940 - DNA, 25 bp, Homo sapien
cataattgggaaaggtgtgactcac

SEQ ID NO: 5669941 - DNA, 25 bp, Homo sapien
taattgggaaaggtgtgactcactt

SEQ ID NO: 5669942 - DNA, 25 bp, Homo sapien
gagtcacacctttcccaattatgaa

SEQ ID NO: 5669943 - DNA, 25 bp, Homo sapien
gtgagtcacacctttcccaattatg

SEQ ID NO: 5669944 - DNA, 25 bp, Homo sapien
tgttatactcaacctaatttaagta

SEQ ID NO: 5669945 - DNA, 25 bp, Homo sapien
caaaagtgagtcacacctttcccaa

SEQ ID NO: 5669946 - DNA, 25 bp, Homo sapien
aatttattgttatactcaacctaat

SEQ ID NO: 5669947 - DNA, 25 bp, Homo sapien
cacacctttcccaattatgaagtca

SEQ ID NO: 5669948 - DNA, 25 bp, Homo sapien
atgaaattctgacaggtgttttgca

SEQ ID NO: 5669949 - DNA, 25 bp, Homo sapien
aatgaaattctgacaggtgttttgc

SEQ ID NO: 5669950 - DNA, 25 bp, Homo sapien
gcttcatcaggctgtaactcgatcg

SEQ ID NO: 5669951 - DNA, 25 bp, Homo sapien
taaattcatgtggcttcatcaggct

SEQ ID NO: 5669952 - DNA, 25 bp, Homo sapien
ggctgtaactcgatcgtggattcta

SEQ ID NO: 5669953 - DNA, 25 bp, Homo sapien
catcaggctgtaactcgatcgtgga

SEQ ID NO: 5669954 - DNA, 25 bp, Homo sapien
tcatcaggctgtaactcgatcgtgg

SEQ ID NO: 5669955 - DNA, 25 bp, Homo sapien
caggctgtaactcgatcgtggattc

SEQ ID NO: 5669956 - DNA, 25 bp, Homo sapien
agcctgatgaagccacatgaattta

SEQ ID NO: 5669957 - DNA, 25 bp, Homo sapien
gaatccacgatcgagttacagcctg

SEQ ID NO: 5669958 - DNA, 25 bp, Homo sapien
tccacgatcgagttacagcctgatg

SEQ ID NO: 5669959 - DNA, 25 bp, Homo sapien
cgatcgagttacagcctgatgaagc

SEQ ID NO: 5669960 - DNA, 25 bp, Homo sapien
cacgatcgagttacagcctgatgaa

SEQ ID NO: 5669961 - DNA, 25 bp, Homo sapien
tagaatccacgatcgagttacagcc

SEQ ID NO: 5669962 - DNA, 25 bp, Homo sapien
tgcaaaacacctgtcagaatttcat

SEQ ID NO: 5669963 - DNA, 25 bp, Homo sapien
gcaaaacacctgtcagaatttcatt

SEQ ID NO: 5669964 - DNA, 25 bp, Homo sapien
cgatcgtggattctagtaaatgaaa

SEQ ID NO: 5669965 - DNA, 25 bp, Homo sapien
gcaaataactcaattttggtagagt

SEQ ID NO: 5669966 - DNA, 25 bp, Homo sapien
gacaggtgttttgcaaataactcaa

SEQ ID NO: 5669967 - DNA, 25 bp, Homo sapien
aaattcatgtggcttcatcaggctg

SEQ ID NO: 5669968 - DNA, 25 bp, Homo sapien
catcaggctgtaactcgatcgtgga

SEQ ID NO: 5669969 - DNA, 25 bp, Homo sapien
aatgaaattctgacaggtgttttgc

SEQ ID NO: 5669970 - DNA, 25 bp, Homo sapien
tgcaaaacacctgtcagaatttcat

SEQ ID NO: 5669971 - DNA, 25 bp, Homo sapien
tttcatttactagaatccacgatcg

SEQ ID NO: 5669972 - DNA, 25 bp, Homo sapien
tccacgatcgagttacagcctgatg

SEQ ID NO: 5669973 - DNA, 25 bp, Homo sapien
actctaccaaaattgagttatttgc

SEQ ID NO: 5669974 - DNA, 25 bp, Homo sapien
gaatttcatttactagaatccacga

SEQ ID NO: 5669975 - DNA, 25 bp, Homo sapien
gagttatttgcaaaacacctgtcag

SEQ ID NO: 5669976 - DNA, 25 bp, Homo sapien
gcaccctgatttggctaggcgcaca

SEQ ID NO: 5669977 - DNA, 25 bp, Homo sapien
ttgatgagctgcctaaatttgagaa

SEQ ID NO: 5669978 - DNA, 25 bp, Homo sapien
gaatttttatcaagagcaccctgat

SEQ ID NO: 5669979 - DNA, 25 bp, Homo sapien
tggaatcttgatgagctgcctaaat

SEQ ID NO: 5669980 - DNA, 25 bp, Homo sapien
aagtggaatcttgatgagctgccta

SEQ ID NO: 5669981 - DNA, 25 bp, Homo sapien
ctgatttggctaggcgcacagcagt

SEQ ID NO: 5669982 - DNA, 25 bp, Homo sapien
tgtgcgcctagccaaatcagggtgc

SEQ ID NO: 5669983 - DNA, 25 bp, Homo sapien
atcagggtgctcttgataaaaattc

SEQ ID NO: 5669984 - DNA, 25 bp, Homo sapien
taggcagctcatcaagattccactt

SEQ ID NO: 5669985 - DNA, 25 bp, Homo sapien
ttctcaaatttaggcagctcatcaa

SEQ ID NO: 5669986 - DNA, 25 bp, Homo sapien
atttaggcagctcatcaagattcca

SEQ ID NO: 5669987 - DNA, 25 bp, Homo sapien
actgctgtgcgcctagccaaatcag

SEQ ID NO: 5669988 - DNA, 25 bp, Homo sapien
gccggcgggggctttgcggcttgga

SEQ ID NO: 5669989 - DNA, 25 bp, Homo sapien
cgggggctttgcggcttggacttgg

SEQ ID NO: 5669990 - DNA, 25 bp, Homo sapien
ccaagtccaagccgcaaagcccccg

SEQ ID NO: 5669991 - DNA, 25 bp, Homo sapien
tccaagccgcaaagcccccgccggc

SEQ ID NO: 5669992 - DNA, 25 bp, Homo sapien
cttggacttggcctttccgggctat

SEQ ID NO: 5669993 - DNA, 25 bp, Homo sapien
tgggagggcgggtcagggtggcggc

SEQ ID NO: 5669994 - DNA, 25 bp, Homo sapien
ctttgcggcttggacttggcctttc

SEQ ID NO: 5669995 - DNA, 25 bp, Homo sapien
gccgagctgtcaggcctggcgggtg

SEQ ID NO: 5669996 - DNA, 25 bp, Homo sapien
tggacttggcctttccgggctatct

SEQ ID NO: 5669997 - DNA, 25 bp, Homo sapien
ggctttgcggcttggacttggcctt

SEQ ID NO: 5669998 - DNA, 25 bp, Homo sapien
cggaaaggccaagtccaagccgcaa

SEQ ID NO: 5669999 - DNA, 25 bp, Homo sapien
atagcccggaaaggccaagtccaag

SEQ ID NO: 5670000 - DNA, 25 bp, Homo sapien
aaaggccaagtccaagccgcaaagc

SEQ ID NO: 5670001 - DNA, 25 bp, Homo sapien
cacccgccaggcctgacagctcggc

SEQ ID NO: 5670002 - DNA, 25 bp, Homo sapien
gaaaggccaagtccaagccgcaaag

SEQ ID NO: 5670003 - DNA, 25 bp, Homo sapien
agatagcccggaaaggccaagtcca

SEQ ID NO: 5670004 - DNA, 25 bp, Homo sapien
ctgcttgggtcgcttggttgtttct

SEQ ID NO: 5670005 - DNA, 25 bp, Homo sapien
acctgctgtcgagtctgtttagaaa

SEQ ID NO: 5670006 - DNA, 25 bp, Homo sapien
gtgacagtcggcatcacttaaagca

SEQ ID NO: 5670007 - DNA, 25 bp, Homo sapien
gtttgcctgcttgggtcgcttggtt

SEQ ID NO: 5670008 - DNA, 25 bp, Homo sapien
tcttgatttacctgctgtcgagtct

SEQ ID NO: 5670009 - DNA, 25 bp, Homo sapien
tgtttagaaagtgacagtcggcatc

SEQ ID NO: 5670010 - DNA, 25 bp, Homo sapien
tttctaaacagactcgacagcaggt

SEQ ID NO: 5670011 - DNA, 25 bp, Homo sapien
gactcgacagcaggtaaatcaagaa

SEQ ID NO: 5670012 - DNA, 25 bp, Homo sapien
tgctttaagtgatgccgactgtcac

SEQ ID NO: 5670013 - DNA, 25 bp, Homo sapien
aagaaacaaccaagcgacccaagca

SEQ ID NO: 5670014 - DNA, 25 bp, Homo sapien
aaccaagcgacccaagcaggcaaac

SEQ ID NO: 5670015 - DNA, 25 bp, Homo sapien
gatgccgactgtcactttctaaaca

SEQ ID NO: 5670016 - DNA, 25 bp, Homo sapien
tgagcagatcttaagctaagactag

SEQ ID NO: 5670017 - DNA, 25 bp, Homo sapien
tcttaagctaagactagcccaagta

SEQ ID NO: 5670018 - DNA, 25 bp, Homo sapien
gctaagactagcccaagtaaagatt

SEQ ID NO: 5670019 - DNA, 25 bp, Homo sapien
gatcttaagctaagactagcccaag

SEQ ID NO: 5670020 - DNA, 25 bp, Homo sapien
taagctaagactagcccaagtaaag

SEQ ID NO: 5670021 - DNA, 25 bp, Homo sapien
gcagatcttaagctaagactagccc

SEQ ID NO: 5670022 - DNA, 25 bp, Homo sapien
aatctttacttgggctagtcttagc

SEQ ID NO: 5670023 - DNA, 25 bp, Homo sapien
gggctagtcttagcttaagatctgc

SEQ ID NO: 5670024 - DNA, 25 bp, Homo sapien
tagtcttagcttaagatctgctcaa

SEQ ID NO: 5670025 - DNA, 25 bp, Homo sapien
tacttgggctagtcttagcttaaga

SEQ ID NO: 5670026 - DNA, 25 bp, Homo sapien
cttgggctagtcttagcttaagatc

SEQ ID NO: 5670027 - DNA, 25 bp, Homo sapien
tctttacttgggctagtcttagctt

SEQ ID NO: 5670028 - DNA, 25 bp, Homo sapien
tcaggaacgaagtaaagatcattag

SEQ ID NO: 5670029 - DNA, 25 bp, Homo sapien
gatagagtggaaatgtcaggaacga

SEQ ID NO: 5670030 - DNA, 25 bp, Homo sapien
cagttagggttatataggctgcatt

SEQ ID NO: 5670031 - DNA, 25 bp, Homo sapien
cattagatctgattagcagttaggg

SEQ ID NO: 5670032 - DNA, 25 bp, Homo sapien
gcattaagaacagggctgtacggga

SEQ ID NO: 5670033 - DNA, 25 bp, Homo sapien
taggctgcattaagaacagggctgt

SEQ ID NO: 5670034 - DNA, 25 bp, Homo sapien
taatgcagcctatataaccctaact

SEQ ID NO: 5670035 - DNA, 25 bp, Homo sapien
tcccgtacagccctgttcttaatgc

SEQ ID NO: 5670036 - DNA, 25 bp, Homo sapien
tacttcgttcctgacatttccactc

SEQ ID NO: 5670037 - DNA, 25 bp, Homo sapien
gatctaatgatctttacttcgttcc

SEQ ID NO: 5670038 - DNA, 25 bp, Homo sapien
tacagccctgttcttaatgcagcct

SEQ ID NO: 5670039 - DNA, 25 bp, Homo sapien
ccctaactgctaatcagatctaatg

SEQ ID NO: 5670040 - DNA, 25 bp, Homo sapien
aaaagttgtatacagattgcctggg

SEQ ID NO: 5670041 - DNA, 25 bp, Homo sapien
agttgtatacagattgcctgggttt

SEQ ID NO: 5670042 - DNA, 25 bp, Homo sapien
caaaagttgtatacagattgcctgg

SEQ ID NO: 5670043 - DNA, 25 bp, Homo sapien
tctcaaaagttgtatacagattgcc

SEQ ID NO: 5670044 - DNA, 25 bp, Homo sapien
aaagttgtatacagattgcctgggt

SEQ ID NO: 5670045 - DNA, 25 bp, Homo sapien
ccctatctcaaaagttgtatacaga

SEQ ID NO: 5670046 - DNA, 25 bp, Homo sapien
caggcaatctgtatacaacttttga

SEQ ID NO: 5670047 - DNA, 25 bp, Homo sapien
tctgtatacaacttttgagataggg

SEQ ID NO: 5670048 - DNA, 25 bp, Homo sapien
aaacccaggcaatctgtatacaact

SEQ ID NO: 5670049 - DNA, 25 bp, Homo sapien
ccaggcaatctgtatacaacttttg

SEQ ID NO: 5670050 - DNA, 25 bp, Homo sapien
ggcaatctgtatacaacttttgaga

SEQ ID NO: 5670051 - DNA, 25 bp, Homo sapien
acccaggcaatctgtatacaacttt

SEQ ID NO: 5670052 - DNA, 25 bp, Homo sapien
tacatgtgtagttgctttaggacag

SEQ ID NO: 5670053 - DNA, 25 bp, Homo sapien
tgtgtagttgctttaggacagtgaa

SEQ ID NO: 5670054 - DNA, 25 bp, Homo sapien
gagggtaatactttataattgtgga

SEQ ID NO: 5670055 - DNA, 25 bp, Homo sapien
tagttgctttaggacagtgaaatat

SEQ ID NO: 5670056 - DNA, 25 bp, Homo sapien
tgtacatgtgtagttgctttaggac

SEQ ID NO: 5670057 - DNA, 25 bp, Homo sapien
ctttgcataaagagggtaatacttt

SEQ ID NO: 5670058 - DNA, 25 bp, Homo sapien
cactgtcctaaagcaactacacatg

SEQ ID NO: 5670059 - DNA, 25 bp, Homo sapien
aaagtattaccctctttatgcaaag

SEQ ID NO: 5670060 - DNA, 25 bp, Homo sapien
gtcctaaagcaactacacatgtaca

SEQ ID NO: 5670061 - DNA, 25 bp, Homo sapien
tccacaattataaagtattaccctc

SEQ ID NO: 5670062 - DNA, 25 bp, Homo sapien
tatttcactgtcctaaagcaactac

SEQ ID NO: 5670063 - DNA, 25 bp, Homo sapien
tatcttccacaattataaagtatta

SEQ ID NO: 5670064 - DNA, 25 bp, Homo sapien
aaatatggataacagtacaataagg

SEQ ID NO: 5670065 - DNA, 25 bp, Homo sapien
gctttttgttaccagctgtgatgtt

SEQ ID NO: 5670066 - DNA, 25 bp, Homo sapien
tttggcaagttaataaacctctcaa

SEQ ID NO: 5670067 - DNA, 25 bp, Homo sapien
tcctgctttttgttaccagctgtga

SEQ ID NO: 5670068 - DNA, 25 bp, Homo sapien
cctgctttttgttaccagctgtgat

SEQ ID NO: 5670069 - DNA, 25 bp, Homo sapien
tgtttggcaagttaataaacctctc

SEQ ID NO: 5670070 - DNA, 25 bp, Homo sapien
ccttattgtactgttatccatattt

SEQ ID NO: 5670071 - DNA, 25 bp, Homo sapien
gagaggtttattaacttgccaaaca

SEQ ID NO: 5670072 - DNA, 25 bp, Homo sapien
aacatcacagctggtaacaaaaagc

SEQ ID NO: 5670073 - DNA, 25 bp, Homo sapien
tcacagctggtaacaaaaagcagga

SEQ ID NO: 5670074 - DNA, 25 bp, Homo sapien
atcacagctggtaacaaaaagcagg

SEQ ID NO: 5670075 - DNA, 25 bp, Homo sapien
ttgagaggtttattaacttgccaaa

SEQ ID NO: 5670076 - DNA, 25 bp, Homo sapien
cacaacttaaaagagtgtggatgaa

SEQ ID NO: 5670077 - DNA, 25 bp, Homo sapien
accacaacttaaaagagtgtggatg

SEQ ID NO: 5670078 - DNA, 25 bp, Homo sapien
gatgtgggagacactaattagaaca

SEQ ID NO: 5670079 - DNA, 25 bp, Homo sapien
ccacaacttaaaagagtgtggatga

SEQ ID NO: 5670080 - DNA, 25 bp, Homo sapien
agatgtgggagacactaattagaac

SEQ ID NO: 5670081 - DNA, 25 bp, Homo sapien
tagatgtgggagacactaattagaa

SEQ ID NO: 5670082 - DNA, 25 bp, Homo sapien
catccacactcttttaagttgtggt

SEQ ID NO: 5670083 - DNA, 25 bp, Homo sapien
ttcatccacactcttttaagttgtg

SEQ ID NO: 5670084 - DNA, 25 bp, Homo sapien
tgttctaattagtgtctcccacatc

SEQ ID NO: 5670085 - DNA, 25 bp, Homo sapien
tcatccacactcttttaagttgtgg

SEQ ID NO: 5670086 - DNA, 25 bp, Homo sapien
gttctaattagtgtctcccacatct

SEQ ID NO: 5670087 - DNA, 25 bp, Homo sapien
tctaattagtgtctcccacatctat

SEQ ID NO: 5670088 - DNA, 25 bp, Homo sapien
ccacttcctgcagctagatacactg

SEQ ID NO: 5670089 - DNA, 25 bp, Homo sapien
atggcatctgactccttgttaccca

SEQ ID NO: 5670090 - DNA, 25 bp, Homo sapien
agtgtagtgggggtatgatggcatc

SEQ ID NO: 5670091 - DNA, 25 bp, Homo sapien
tagtgggggtatgatggcatctgac

SEQ ID NO: 5670092 - DNA, 25 bp, Homo sapien
tggcatctgactccttgttacccac

SEQ ID NO: 5670093 - DNA, 25 bp, Homo sapien
gtgtagtgggggtatgatggcatct

SEQ ID NO: 5670094 - DNA, 25 bp, Homo sapien
tgggtaacaaggagtcagatgccat

SEQ ID NO: 5670095 - DNA, 25 bp, Homo sapien
cagatgccatcatacccccactaca

SEQ ID NO: 5670096 - DNA, 25 bp, Homo sapien
cagtgtatctagctgcaggaagtgg

SEQ ID NO: 5670097 - DNA, 25 bp, Homo sapien
gtgggtaacaaggagtcagatgcca

SEQ ID NO: 5670098 - DNA, 25 bp, Homo sapien
agatgccatcatacccccactacac

SEQ ID NO: 5670099 - DNA, 25 bp, Homo sapien
gatgccatcatacccccactacact

SEQ ID NO: 5670100 - DNA, 25 bp, Homo sapien
aaaggtgagcctaatcccctaatgg

SEQ ID NO: 5670101 - DNA, 25 bp, Homo sapien
tgagcctaatcccctaatggagtga

SEQ ID NO: 5670102 - DNA, 25 bp, Homo sapien
aggtgagcctaatcccctaatggag

SEQ ID NO: 5670103 - DNA, 25 bp, Homo sapien
gtctaaaggtgagcctaatccccta

SEQ ID NO: 5670104 - DNA, 25 bp, Homo sapien
ggtgagcctaatcccctaatggagt

SEQ ID NO: 5670105 - DNA, 25 bp, Homo sapien
taaaggtgagcctaatcccctaatg

SEQ ID NO: 5670106 - DNA, 25 bp, Homo sapien
tcactccattaggggattaggctca

SEQ ID NO: 5670107 - DNA, 25 bp, Homo sapien
tccattaggggattaggctcacctt

SEQ ID NO: 5670108 - DNA, 25 bp, Homo sapien
ccattaggggattaggctcaccttt

SEQ ID NO: 5670109 - DNA, 25 bp, Homo sapien
taggggattaggctcacctttagac

SEQ ID NO: 5670110 - DNA, 25 bp, Homo sapien
cattaggggattaggctcaccttta

SEQ ID NO: 5670111 - DNA, 25 bp, Homo sapien
actccattaggggattaggctcacc

SEQ ID NO: 5670112 - DNA, 25 bp, Homo sapien
tcactccattaggggattaggctca

SEQ ID NO: 5670113 - DNA, 25 bp, Homo sapien
ccattaggggattaggctcaccttt

SEQ ID NO: 5670114 - DNA, 25 bp, Homo sapien
taggggattaggctcacctttagac

SEQ ID NO: 5670115 - DNA, 25 bp, Homo sapien
cattaggggattaggctcaccttta

SEQ ID NO: 5670116 - DNA, 25 bp, Homo sapien
actccattaggggattaggctcacc

SEQ ID NO: 5670117 - DNA, 25 bp, Homo sapien
cctcgaactgtgcagtggacagcaa

SEQ ID NO: 5670118 - DNA, 25 bp, Homo sapien
aaggctttttctacaatcagcaggg

SEQ ID NO: 5670119 - DNA, 25 bp, Homo sapien
ttttctacaatcagcagggttaaac

SEQ ID NO: 5670120 - DNA, 25 bp, Homo sapien
tctacaatcagcagggttaaactgt

SEQ ID NO: 5670121 - DNA, 25 bp, Homo sapien
caatcagcagggttaaactgttctt

SEQ ID NO: 5670122 - DNA, 25 bp, Homo sapien
gctttttctacaatcagcagggtta

SEQ ID NO: 5670123 - DNA, 25 bp, Homo sapien
cagcagggttaaactgttcttggtg

SEQ ID NO: 5670124 - DNA, 25 bp, Homo sapien
ccctgctgattgtagaaaaagcctt

SEQ ID NO: 5670125 - DNA, 25 bp, Homo sapien
gtttaaccctgctgattgtagaaaa

SEQ ID NO: 5670126 - DNA, 25 bp, Homo sapien
ccaagaacagtttaaccctgctgat

SEQ ID NO: 5670127 - DNA, 25 bp, Homo sapien
taaccctgctgattgtagaaaaagc

SEQ ID NO: 5670128 - DNA, 25 bp, Homo sapien
aacagtttaaccctgctgattgtag

SEQ ID NO: 5670129 - DNA, 25 bp, Homo sapien
ccaccaagaacagtttaaccctgct

SEQ ID NO: 5670130 - DNA, 25 bp, Homo sapien
gggtgtgaatctatagtcgaggtat

SEQ ID NO: 5670131 - DNA, 25 bp, Homo sapien
aagtttcattgacttctgtttgctc

SEQ ID NO: 5670132 - DNA, 25 bp, Homo sapien
tagtgaggaagtcaggttgtgttct

SEQ ID NO: 5670133 - DNA, 25 bp, Homo sapien
gaatctatagtcgaggtatagtgag

SEQ ID NO: 5670134 - DNA, 25 bp, Homo sapien
tctatagtcgaggtatagtgaggaa

SEQ ID NO: 5670135 - DNA, 25 bp, Homo sapien
tatagtcgaggtatagtgaggaagt

SEQ ID NO: 5670136 - DNA, 25 bp, Homo sapien
acttcctcactatacctcgactata

SEQ ID NO: 5670137 - DNA, 25 bp, Homo sapien
agaacacaacctgacttcctcacta

SEQ ID NO: 5670138 - DNA, 25 bp, Homo sapien
cactatacctcgactatagattcac

SEQ ID NO: 5670139 - DNA, 25 bp, Homo sapien
tatacctcgactatagattcacacc

SEQ ID NO: 5670140 - DNA, 25 bp, Homo sapien
tcgactatagattcacaccccaact

SEQ ID NO: 5670141 - DNA, 25 bp, Homo sapien
gagcaaacagaagtcaatgaaactt

SEQ ID NO: 5670142 - DNA, 25 bp, Homo sapien
tgttgcaggctgagctattaatagt

SEQ ID NO: 5670143 - DNA, 25 bp, Homo sapien
gttgcaggctgagctattaatagtt

SEQ ID NO: 5670144 - DNA, 25 bp, Homo sapien
atgttgcaggctgagctattaatag

SEQ ID NO: 5670145 - DNA, 25 bp, Homo sapien
aactattaatagctcagcctgcaac

SEQ ID NO: 5670146 - DNA, 25 bp, Homo sapien
ctattaatagctcagcctgcaacat

SEQ ID NO: 5670147 - DNA, 25 bp, Homo sapien
actattaatagctcagcctgcaaca

SEQ ID NO: 5670148 - DNA, 25 bp, Homo sapien
gctgagctattaatagttacttggg

SEQ ID NO: 5670149 - DNA, 25 bp, Homo sapien
tgttgcaggctgagctattaatagt

SEQ ID NO: 5670150 - DNA, 25 bp, Homo sapien
ctgcatttttctccacaggtgcggg

SEQ ID NO: 5670151 - DNA, 25 bp, Homo sapien
ggagttgaagatgacaaggaatgtt

SEQ ID NO: 5670152 - DNA, 25 bp, Homo sapien
gatgacaaggaatgttattgctgca

SEQ ID NO: 5670153 - DNA, 25 bp, Homo sapien
tgctgcatttttctccacaggtgcg

SEQ ID NO: 5670154 - DNA, 25 bp, Homo sapien
ccccaagtaactattaatagctcag

SEQ ID NO: 5670155 - DNA, 25 bp, Homo sapien
aactattaatagctcagcctgcaac

SEQ ID NO: 5670156 - DNA, 25 bp, Homo sapien
gagaaaaatgcagcaataacattcc

SEQ ID NO: 5670157 - DNA, 25 bp, Homo sapien
cccgcacctgtggagaaaaatgcag

SEQ ID NO: 5670158 - DNA, 25 bp, Homo sapien
ctattaatagctcagcctgcaacat

SEQ ID NO: 5670159 - DNA, 25 bp, Homo sapien
gcagcaataacattccttgtcatct

SEQ ID NO: 5670160 - DNA, 25 bp, Homo sapien
ctggttgctgagatcagtggggaac

SEQ ID NO: 5670161 - DNA, 25 bp, Homo sapien
gttccccactgatctcagcaaccag

SEQ ID NO: 5670162 - DNA, 25 bp, Homo sapien
ctgcatagcattttaacaagtttaa

SEQ ID NO: 5670163 - DNA, 25 bp, Homo sapien
tggaagagaaatttgaagctaagat

SEQ ID NO: 5670164 - DNA, 25 bp, Homo sapien
gcatagacaccaatgctggttgctg

SEQ ID NO: 5670165 - DNA, 25 bp, Homo sapien
caatgctggttgctgagatcagtgg

SEQ ID NO: 5670166 - DNA, 25 bp, Homo sapien
gggaactgcatagcattttaacaag

SEQ ID NO: 5670167 - DNA, 25 bp, Homo sapien
caagtttaatgaacatttggaagag

SEQ ID NO: 5670168 - DNA, 25 bp, Homo sapien
cagcaaccagcattggtgtctatgc

SEQ ID NO: 5670169 - DNA, 25 bp, Homo sapien
tcttccaaatgttcattaaacttgt

SEQ ID NO: 5670170 - DNA, 25 bp, Homo sapien
cactgatctcagcaaccagcattgg

SEQ ID NO: 5670171 - DNA, 25 bp, Homo sapien
ttaaacttgttaaaatgctatgcag

SEQ ID NO: 5670172 - DNA, 25 bp, Homo sapien
taaaatgctatgcagttccccactg

SEQ ID NO: 5670173 - DNA, 25 bp, Homo sapien
tatgcagttccccactgatctcagc

SEQ ID NO: 5670174 - DNA, 25 bp, Homo sapien
ggtattttcccaatataaacattgc

SEQ ID NO: 5670175 - DNA, 25 bp, Homo sapien
caatataaacattgctttttggtta

SEQ ID NO: 5670176 - DNA, 25 bp, Homo sapien
gtattttcccaatataaacattgct

SEQ ID NO: 5670177 - DNA, 25 bp, Homo sapien
tcccaatataaacattgctttttgg

SEQ ID NO: 5670178 - DNA, 25 bp, Homo sapien
tgtaattgttttctgtttcttaata

SEQ ID NO: 5670179 - DNA, 25 bp, Homo sapien
cccaatataaacattgctttttggt

SEQ ID NO: 5670180 - DNA, 25 bp, Homo sapien
taaccaaaaagcaatgtttatattg

SEQ ID NO: 5670181 - DNA, 25 bp, Homo sapien
ccaaaaagcaatgtttatattggga

SEQ ID NO: 5670182 - DNA, 25 bp, Homo sapien
tattaagaaacagaaaacaattaca

SEQ ID NO: 5670183 - DNA, 25 bp, Homo sapien
gcaatgtttatattgggaaaatacc

SEQ ID NO: 5670184 - DNA, 25 bp, Homo sapien
agcaatgtttatattgggaaaatac

SEQ ID NO: 5670185 - DNA, 25 bp, Homo sapien
caaaaagcaatgtttatattgggaa

SEQ ID NO: 5670186 - DNA, 25 bp, Homo sapien
cagaataataccacatacctcattc

SEQ ID NO: 5670187 - DNA, 25 bp, Homo sapien
ttcagaataataccacatacctcat

SEQ ID NO: 5670188 - DNA, 25 bp, Homo sapien
tcagaataataccacatacctcatt

SEQ ID NO: 5670189 - DNA, 25 bp, Homo sapien
gcttcagaataataccacatacctc

SEQ ID NO: 5670190 - DNA, 25 bp, Homo sapien
cttcagaataataccacatacctca

SEQ ID NO: 5670191 - DNA, 25 bp, Homo sapien
ggcttcagaataataccacatacct

SEQ ID NO: 5670192 - DNA, 25 bp, Homo sapien
aggtatgtggtattattctgaagcc

SEQ ID NO: 5670193 - DNA, 25 bp, Homo sapien
aatgaggtatgtggtattattctga

SEQ ID NO: 5670194 - DNA, 25 bp, Homo sapien
gaatgaggtatgtggtattattctg

SEQ ID NO: 5670195 - DNA, 25 bp, Homo sapien
atgaggtatgtggtattattctgaa

SEQ ID NO: 5670196 - DNA, 25 bp, Homo sapien
tgaggtatgtggtattattctgaag

SEQ ID NO: 5670197 - DNA, 25 bp, Homo sapien
gaggtatgtggtattattctgaagc

SEQ ID NO: 5670198 - DNA, 25 bp, Homo sapien
tcagaataataccacatacctcatt

SEQ ID NO: 5670199 - DNA, 25 bp, Homo sapien
gcttcttgtctgaaaaacatttggg

SEQ ID NO: 5670200 - DNA, 25 bp, Homo sapien
gaaaatctgcttcttgtctgaaaaa

SEQ ID NO: 5670201 - DNA, 25 bp, Homo sapien
gccagctgatgatatgcttaggtga

SEQ ID NO: 5670202 - DNA, 25 bp, Homo sapien
ggcttcagaataataccacatacct

SEQ ID NO: 5670203 - DNA, 25 bp, Homo sapien
aataccacatacctcattcttggtg

SEQ ID NO: 5670204 - DNA, 25 bp, Homo sapien
aatgaggtatgtggtattattctga

SEQ ID NO: 5670205 - DNA, 25 bp, Homo sapien
caccaagaatgaggtatgtggtatt

SEQ ID NO: 5670206 - DNA, 25 bp, Homo sapien
gaagccccaaatgtttttcagacaa

SEQ ID NO: 5670207 - DNA, 25 bp, Homo sapien
aggtatgtggtattattctgaagcc

SEQ ID NO: 5670208 - DNA, 25 bp, Homo sapien
ggtattattctgaagccccaaatgt

SEQ ID NO: 5670209 - DNA, 25 bp, Homo sapien
tttttcagacaagaagcagattttc

SEQ ID NO: 5670210 - DNA, 25 bp, Homo sapien
cgacatagtaaaacctgatctctgc

SEQ ID NO: 5670211 - DNA, 25 bp, Homo sapien
gcgacatagtaaaacctgatctctg

SEQ ID NO: 5670212 - DNA, 25 bp, Homo sapien
gcagagatcaggttttactatgtcg

SEQ ID NO: 5670213 - DNA, 25 bp, Homo sapien
cagagatcaggttttactatgtcgc

SEQ ID NO: 5670214 - DNA, 25 bp, Homo sapien
catagtaaaacctgatctctgcaaa

SEQ ID NO: 5670215 - DNA, 25 bp, Homo sapien
cgacatagtaaaacctgatctctgc

SEQ ID NO: 5670216 - DNA, 25 bp, Homo sapien
agttggaagactagcctgggcgaca

SEQ ID NO: 5670217 - DNA, 25 bp, Homo sapien
gcgacatagtaaaacctgatctctg

SEQ ID NO: 5670218 - DNA, 25 bp, Homo sapien
cctgggcgacatagtaaaacctgat

SEQ ID NO: 5670219 - DNA, 25 bp, Homo sapien
ctgatctctgcaaaaatattagccg

SEQ ID NO: 5670220 - DNA, 25 bp, Homo sapien
tatttttgcagagatcaggttttac

SEQ ID NO: 5670221 - DNA, 25 bp, Homo sapien
cggctaatatttttgcagagatcag

SEQ ID NO: 5670222 - DNA, 25 bp, Homo sapien
gcagagatcaggttttactatgtcg

SEQ ID NO: 5670223 - DNA, 25 bp, Homo sapien
gatcaggttttactatgtcgcccag

SEQ ID NO: 5670224 - DNA, 25 bp, Homo sapien
tgtcgcccaggctagtcttccaact

SEQ ID NO: 5670225 - DNA, 25 bp, Homo sapien
cagagatcaggttttactatgtcgc

SEQ ID NO: 5670226 - DNA, 25 bp, Homo sapien
gatagtgcttatagtgctttacccc

SEQ ID NO: 5670227 - DNA, 25 bp, Homo sapien
cttctatcaatcatttaggatgtgt

SEQ ID NO: 5670228 - DNA, 25 bp, Homo sapien
agtgcttatagtgctttaccccttc

SEQ ID NO: 5670229 - DNA, 25 bp, Homo sapien
tatgtttagatagtgcttatagtgc

SEQ ID NO: 5670230 - DNA, 25 bp, Homo sapien
cccttcaaaatagtaacttctatca

SEQ ID NO: 5670231 - DNA, 25 bp, Homo sapien
tatcaatcatttaggatgtgtgtca

SEQ ID NO: 5670232 - DNA, 25 bp, Homo sapien
gggtaaagcactataagcactatct

SEQ ID NO: 5670233 - DNA, 25 bp, Homo sapien
gaaggggtaaagcactataagcact

SEQ ID NO: 5670234 - DNA, 25 bp, Homo sapien
acacatcctaaatgattgatagaag

SEQ ID NO: 5670235 - DNA, 25 bp, Homo sapien
gacacacatcctaaatgattgatag

SEQ ID NO: 5670236 - DNA, 25 bp, Homo sapien
tgatagaagttactattttgaaggg

SEQ ID NO: 5670237 - DNA, 25 bp, Homo sapien
gcactataagcactatctaaacata

SEQ ID NO: 5670238 - DNA, 25 bp, Homo sapien
tggaagctacatttaaagggtctta

SEQ ID NO: 5670239 - DNA, 25 bp, Homo sapien
ggcataaatgtagggtagaccaagt

SEQ ID NO: 5670240 - DNA, 25 bp, Homo sapien
tgtagggtagaccaagtcatcaagg

SEQ ID NO: 5670241 - DNA, 25 bp, Homo sapien
taaatgtagggtagaccaagtcatc

SEQ ID NO: 5670242 - DNA, 25 bp, Homo sapien
gctacatttaaagggtcttagttga

SEQ ID NO: 5670243 - DNA, 25 bp, Homo sapien
tactggcataaatgtagggtagacc

SEQ ID NO: 5670244 - DNA, 25 bp, Homo sapien
tcaactaagaccctttaaatgtagc

SEQ ID NO: 5670245 - DNA, 25 bp, Homo sapien
ccttgatgacttggtctaccctaca

SEQ ID NO: 5670246 - DNA, 25 bp, Homo sapien
taagaccctttaaatgtagcttcca

SEQ ID NO: 5670247 - DNA, 25 bp, Homo sapien
acttggtctaccctacatttatgcc

SEQ ID NO: 5670248 - DNA, 25 bp, Homo sapien
gatgacttggtctaccctacattta

SEQ ID NO: 5670249 - DNA, 25 bp, Homo sapien
ggtctaccctacatttatgccagta

SEQ ID NO: 5670250 - DNA, 25 bp, Homo sapien
gggagtgagtataatggctaacttt

SEQ ID NO: 5670251 - DNA, 25 bp, Homo sapien
attgggagtgagtataatggctaac

SEQ ID NO: 5670252 - DNA, 25 bp, Homo sapien
accttgaataaggtgtttgacaata

SEQ ID NO: 5670253 - DNA, 25 bp, Homo sapien
tttaccttgaataaggtgtttgaca

SEQ ID NO: 5670254 - DNA, 25 bp, Homo sapien
ctattccaaaattgggagtgagtat

SEQ ID NO: 5670255 - DNA, 25 bp, Homo sapien
caaaattgggagtgagtataatggc

SEQ ID NO: 5670256 - DNA, 25 bp, Homo sapien
atactcactcccaattttggaatag

SEQ ID NO: 5670257 - DNA, 25 bp, Homo sapien
cattatactcactcccaattttgga

SEQ ID NO: 5670258 - DNA, 25 bp, Homo sapien
tattgtcaaacaccttattcaaggt

SEQ ID NO: 5670259 - DNA, 25 bp, Homo sapien
gttagccattatactcactcccaat

SEQ ID NO: 5670260 - DNA, 25 bp, Homo sapien
aaagttagccattatactcactccc

SEQ ID NO: 5670261 - DNA, 25 bp, Homo sapien
tgtcaaacaccttattcaaggtaaa

SEQ ID NO: 5670262 - DNA, 25 bp, Homo sapien
tgacagtgattggtcatttatgttt

SEQ ID NO: 5670263 - DNA, 25 bp, Homo sapien
gaaatgtatatcaggttgacattct

SEQ ID NO: 5670264 - DNA, 25 bp, Homo sapien
tgaaatgtatatcaggttgacattc

SEQ ID NO: 5670265 - DNA, 25 bp, Homo sapien
acagtgattggtcatttatgtttta

SEQ ID NO: 5670266 - DNA, 25 bp, Homo sapien
gacagtgattggtcatttatgtttt

SEQ ID NO: 5670267 - DNA, 25 bp, Homo sapien
gatgacagtgattggtcatttatgt

SEQ ID NO: 5670268 - DNA, 25 bp, Homo sapien
taaaacataaatgaccaatcactgt

SEQ ID NO: 5670269 - DNA, 25 bp, Homo sapien
aaacataaatgaccaatcactgtca

SEQ ID NO: 5670270 - DNA, 25 bp, Homo sapien
aaaacataaatgaccaatcactgtc

SEQ ID NO: 5670271 - DNA, 25 bp, Homo sapien
agaatgtcaacctgatatacatttc

SEQ ID NO: 5670272 - DNA, 25 bp, Homo sapien
acataaatgaccaatcactgtcatc

SEQ ID NO: 5670273 - DNA, 25 bp, Homo sapien
gaatgtcaacctgatatacatttca

SEQ ID NO: 5670274 - DNA, 25 bp, Homo sapien
tatatcaggttgacattctgttgta

SEQ ID NO: 5670275 - DNA, 25 bp, Homo sapien
gaaatgtatatcaggttgacattct

SEQ ID NO: 5670276 - DNA, 25 bp, Homo sapien
taaaagatgacagtgattggtcatt

SEQ ID NO: 5670277 - DNA, 25 bp, Homo sapien
gacagtgattggtcatttatgtttt

SEQ ID NO: 5670278 - DNA, 25 bp, Homo sapien
taaactgtcagaacttgttataaag

SEQ ID NO: 5670279 - DNA, 25 bp, Homo sapien
gttttatacctgaaatgtatatcag

SEQ ID NO: 5670280 - DNA, 25 bp, Homo sapien
ctctcccaaggtagttttcatacaa

SEQ ID NO: 5670281 - DNA, 25 bp, Homo sapien
ttgtcaagctctctcccaaggtagt

SEQ ID NO: 5670282 - DNA, 25 bp, Homo sapien
tatttgaactcgatgaaagcttgtc

SEQ ID NO: 5670283 - DNA, 25 bp, Homo sapien
catgaattttataccagatcagatc

SEQ ID NO: 5670284 - DNA, 25 bp, Homo sapien
tataccagatcagatctaaaaaggc

SEQ ID NO: 5670285 - DNA, 25 bp, Homo sapien
gaactcgatgaaagcttgtcaagct

SEQ ID NO: 5670286 - DNA, 25 bp, Homo sapien
ttgtatgaaaactaccttgggagag

SEQ ID NO: 5670287 - DNA, 25 bp, Homo sapien
gcttgacaagctttcatcgagttca

SEQ ID NO: 5670288 - DNA, 25 bp, Homo sapien
gatctgatctggtataaaattcatg

SEQ ID NO: 5670289 - DNA, 25 bp, Homo sapien
gcctttttagatctgatctggtata

SEQ ID NO: 5670290 - DNA, 25 bp, Homo sapien
actaccttgggagagagcttgacaa

SEQ ID NO: 5670291 - DNA, 25 bp, Homo sapien
tttcatcgagttcaaatactaacca

SEQ ID NO: 5670292 - DNA, 25 bp, Homo sapien
ctgttccagacgttaaggctttctt

SEQ ID NO: 5670293 - DNA, 25 bp, Homo sapien
cctatcctgttccagacgttaaggc

SEQ ID NO: 5670294 - DNA, 25 bp, Homo sapien
gccctatcctgttccagacgttaag

SEQ ID NO: 5670295 - DNA, 25 bp, Homo sapien
tatgcagccctatcctgttccagac

SEQ ID NO: 5670296 - DNA, 25 bp, Homo sapien
tatcctgttccagacgttaaggctt

SEQ ID NO: 5670297 - DNA, 25 bp, Homo sapien
gcagccctatcctgttccagacgtt

SEQ ID NO: 5670298 - DNA, 25 bp, Homo sapien
cttaacgtctggaacaggatagggc

SEQ ID NO: 5670299 - DNA, 25 bp, Homo sapien
cgtctggaacaggatagggctgcat

SEQ ID NO: 5670300 - DNA, 25 bp, Homo sapien
aagaaagccttaacgtctggaacag

SEQ ID NO: 5670301 - DNA, 25 bp, Homo sapien
taacgtctggaacaggatagggctg

SEQ ID NO: 5670302 - DNA, 25 bp, Homo sapien
aaagccttaacgtctggaacaggat

SEQ ID NO: 5670303 - DNA, 25 bp, Homo sapien
gccttaacgtctggaacaggatagg

SEQ ID NO: 5670304 - DNA, 25 bp, Homo sapien
ttacacttaaaaataatgttctcat

SEQ ID NO: 5670305 - DNA, 25 bp, Homo sapien
tagccaggttgattttaaaattaca

SEQ ID NO: 5670306 - DNA, 25 bp, Homo sapien
gcgcccggcctagccaggttgattt

SEQ ID NO: 5670307 - DNA, 25 bp, Homo sapien
tccccaagtgctgtaatcacaggcg

SEQ ID NO: 5670308 - DNA, 25 bp, Homo sapien
tgcgcccggcctagccaggttgatt

SEQ ID NO: 5670309 - DNA, 25 bp, Homo sapien
gcccggcctagccaggttgatttta

SEQ ID NO: 5670310 - DNA, 25 bp, Homo sapien
aaatcaacctggctaggccgggcgc

SEQ ID NO: 5670311 - DNA, 25 bp, Homo sapien
taaaatcaacctggctaggccgggc

SEQ ID NO: 5670312 - DNA, 25 bp, Homo sapien
tgagaacattatttttaagtgtaat

SEQ ID NO: 5670313 - DNA, 25 bp, Homo sapien
tgtaattttaaaatcaacctggcta

SEQ ID NO: 5670314 - DNA, 25 bp, Homo sapien
aaaatgagaacattatttttaagtg

SEQ ID NO: 5670315 - DNA, 25 bp, Homo sapien
cgcctgtgattacagcacttgggga

SEQ ID NO: 5670316 - DNA, 25 bp, Homo sapien
gcatattccaccatgcctggctaat

SEQ ID NO: 5670317 - DNA, 25 bp, Homo sapien
attacaggcatattccaccatgcct

SEQ ID NO: 5670318 - DNA, 25 bp, Homo sapien
aggcatattccaccatgcctggcta

SEQ ID NO: 5670319 - DNA, 25 bp, Homo sapien
catattccaccatgcctggctaatt

SEQ ID NO: 5670320 - DNA, 25 bp, Homo sapien
caggcatattccaccatgcctggct

SEQ ID NO: 5670321 - DNA, 25 bp, Homo sapien
ggcatattccaccatgcctggctaa

SEQ ID NO: 5670322 - DNA, 25 bp, Homo sapien
aggcatggtggaatatgcctgtaat

SEQ ID NO: 5670323 - DNA, 25 bp, Homo sapien
attagccaggcatggtggaatatgc

SEQ ID NO: 5670324 - DNA, 25 bp, Homo sapien
aattagccaggcatggtggaatatg

SEQ ID NO: 5670325 - DNA, 25 bp, Homo sapien
agccaggcatggtggaatatgcctg

SEQ ID NO: 5670326 - DNA, 25 bp, Homo sapien
tagccaggcatggtggaatatgcct

SEQ ID NO: 5670327 - DNA, 25 bp, Homo sapien
ttagccaggcatggtggaatatgcc

SEQ ID NO: 5670328 - DNA, 25 bp, Homo sapien
ttgagacggagtttagcttttgttg

SEQ ID NO: 5670329 - DNA, 25 bp, Homo sapien
acggagtttagcttttgttgcccag

SEQ ID NO: 5670330 - DNA, 25 bp, Homo sapien
gacggagtttagcttttgttgccca

SEQ ID NO: 5670331 - DNA, 25 bp, Homo sapien
tgagacggagtttagcttttgttgc

SEQ ID NO: 5670332 - DNA, 25 bp, Homo sapien
caacaaaagctaaactccgtctcaa

SEQ ID NO: 5670333 - DNA, 25 bp, Homo sapien
gcaacaaaagctaaactccgtctca

SEQ ID NO: 5670334 - DNA, 25 bp, Homo sapien
tgggcaacaaaagctaaactccgtc

SEQ ID NO: 5670335 - DNA, 25 bp, Homo sapien
ctgggcaacaaaagctaaactccgt

SEQ ID NO: 5670336 - DNA, 25 bp, Homo sapien
cattctagatagtaaccaactgtca

SEQ ID NO: 5670337 - DNA, 25 bp, Homo sapien
taataaacattctagatagtaacca

SEQ ID NO: 5670338 - DNA, 25 bp, Homo sapien
ttctagatagtaaccaactgtcatt

SEQ ID NO: 5670339 - DNA, 25 bp, Homo sapien
taaacattctagatagtaaccaact

SEQ ID NO: 5670340 - DNA, 25 bp, Homo sapien
ctagatagtaaccaactgtcattta

SEQ ID NO: 5670341 - DNA, 25 bp, Homo sapien
aaacattctagatagtaaccaactg

SEQ ID NO: 5670342 - DNA, 25 bp, Homo sapien
gacagttggttactatctagaatgt

SEQ ID NO: 5670343 - DNA, 25 bp, Homo sapien
tgacagttggttactatctagaatg

SEQ ID NO: 5670344 - DNA, 25 bp, Homo sapien
aatgacagttggttactatctagaa

SEQ ID NO: 5670345 - DNA, 25 bp, Homo sapien
taaatgacagttggttactatctag

SEQ ID NO: 5670346 - DNA, 25 bp, Homo sapien
aaatgacagttggttactatctaga

SEQ ID NO: 5670347 - DNA, 25 bp, Homo sapien
tactatctagaatgtttattaacta

SEQ ID NO: 5670348 - DNA, 25 bp, Homo sapien
tgacagttggttactatctagaatg

SEQ ID NO: 5670349 - DNA, 25 bp, Homo sapien
taaatgacagttggttactatctag

SEQ ID NO: 5670350 - DNA, 25 bp, Homo sapien
taactatgaatataaacatttctcc

SEQ ID NO: 5670351 - DNA, 25 bp, Homo sapien
tactatctagaatgtttattaacta

SEQ ID NO: 5670352 - DNA, 25 bp, Homo sapien
tattttcagtaaatgacagttggtt

SEQ ID NO: 5670353 - DNA, 25 bp, Homo sapien
tccatttttcctgagattattcaaa

SEQ ID NO: 5670354 - DNA, 25 bp, Homo sapien
gaagtaattacacttgacctgctac

SEQ ID NO: 5670355 - DNA, 25 bp, Homo sapien
tcagtgttttgactcttcgaagtaa

SEQ ID NO: 5670356 - DNA, 25 bp, Homo sapien
aggtcagtgttttgactcttcgaag

SEQ ID NO: 5670357 - DNA, 25 bp, Homo sapien
ttcgaagtaattacacttgacctgc

SEQ ID NO: 5670358 - DNA, 25 bp, Homo sapien
gactcttcgaagtaattacacttga

SEQ ID NO: 5670359 - DNA, 25 bp, Homo sapien
gaaggtcagtgttttgactcttcga

SEQ ID NO: 5670360 - DNA, 25 bp, Homo sapien
gcaggtcaagtgtaattacttcgaa

SEQ ID NO: 5670361 - DNA, 25 bp, Homo sapien
caagtgtaattacttcgaagagtca

SEQ ID NO: 5670362 - DNA, 25 bp, Homo sapien
gtagcaggtcaagtgtaattacttc

SEQ ID NO: 5670363 - DNA, 25 bp, Homo sapien
tacttcgaagagtcaaaacactgac

SEQ ID NO: 5670364 - DNA, 25 bp, Homo sapien
taattacttcgaagagtcaaaacac

SEQ ID NO: 5670365 - DNA, 25 bp, Homo sapien
tcgaagagtcaaaacactgaccttc

SEQ ID NO: 5670366 - DNA, 25 bp, Homo sapien
tagaggctgtgtattggttagttgc

SEQ ID NO: 5670367 - DNA, 25 bp, Homo sapien
tggttagttgcccattgatccccag

SEQ ID NO: 5670368 - DNA, 25 bp, Homo sapien
tctagaccatagtacatacagtagg

SEQ ID NO: 5670369 - DNA, 25 bp, Homo sapien
ccccaggaaattctagaccatagta

SEQ ID NO: 5670370 - DNA, 25 bp, Homo sapien
tacatacagtaggtttgtacctggg

SEQ ID NO: 5670371 - DNA, 25 bp, Homo sapien
tgtacctgggatatataccttttat

SEQ ID NO: 5670372 - DNA, 25 bp, Homo sapien
tataaaaggtatatatcccaggtac

SEQ ID NO: 5670373 - DNA, 25 bp, Homo sapien
caaacctactgtatgtactatggtc

SEQ ID NO: 5670374 - DNA, 25 bp, Homo sapien
tgggcaactaaccaatacacagcct

SEQ ID NO: 5670375 - DNA, 25 bp, Homo sapien
tatatcccaggtacaaacctactgt

SEQ ID NO: 5670376 - DNA, 25 bp, Homo sapien
gggatcaatgggcaactaaccaata

SEQ ID NO: 5670377 - DNA, 25 bp, Homo sapien
gtactatggtctagaatttcctggg

SEQ ID NO: 5670378 - DNA, 25 bp, Homo sapien
gcaggctttctgttagccctgataa

SEQ ID NO: 5670379 - DNA, 25 bp, Homo sapien
ggcaggctttctgttagccctgata

SEQ ID NO: 5670380 - DNA, 25 bp, Homo sapien
gattaattgtataacttcctgtttg

SEQ ID NO: 5670381 - DNA, 25 bp, Homo sapien
gggcaggctttctgttagccctgat

SEQ ID NO: 5670382 - DNA, 25 bp, Homo sapien
ggttttcgtttgctgaattctgttc

SEQ ID NO: 5670383 - DNA, 25 bp, Homo sapien
caggctttctgttagccctgataat

SEQ ID NO: 5670384 - DNA, 25 bp, Homo sapien
tatcagggctaacagaaagcctgcc

SEQ ID NO: 5670385 - DNA, 25 bp, Homo sapien
gaacagaattcagcaaacgaaaacc

SEQ ID NO: 5670386 - DNA, 25 bp, Homo sapien
caaacaggaagttatacaattaatc

SEQ ID NO: 5670387 - DNA, 25 bp, Homo sapien
ttatcagggctaacagaaagcctgc

SEQ ID NO: 5670388 - DNA, 25 bp, Homo sapien
attatcagggctaacagaaagcctg

SEQ ID NO: 5670389 - DNA, 25 bp, Homo sapien
cagaaagcctgccccaaacaggaag

SEQ ID NO: 5670390 - DNA, 25 bp, Homo sapien
tcttgtcaggctgtttgatgatagt

SEQ ID NO: 5670391 - DNA, 25 bp, Homo sapien
cctaggcagattcttgtcaggctgt

SEQ ID NO: 5670392 - DNA, 25 bp, Homo sapien
agattcttgtcaggctgtttgatga

SEQ ID NO: 5670393 - DNA, 25 bp, Homo sapien
gcagattcttgtcaggctgtttgat

SEQ ID NO: 5670394 - DNA, 25 bp, Homo sapien
taggcagattcttgtcaggctgttt

SEQ ID NO: 5670395 - DNA, 25 bp, Homo sapien
ggcagattcttgtcaggctgtttga

SEQ ID NO: 5670396 - DNA, 25 bp, Homo sapien
aaacagcctgacaagaatctgccta

SEQ ID NO: 5670397 - DNA, 25 bp, Homo sapien
actatcatcaaacagcctgacaaga

SEQ ID NO: 5670398 - DNA, 25 bp, Homo sapien
acagcctgacaagaatctgcctagg

SEQ ID NO: 5670399 - DNA, 25 bp, Homo sapien
tcaaacagcctgacaagaatctgcc

SEQ ID NO: 5670400 - DNA, 25 bp, Homo sapien
tatcatcaaacagcctgacaagaat

SEQ ID NO: 5670401 - DNA, 25 bp, Homo sapien
tcatcaaacagcctgacaagaatct

SEQ ID NO: 5670402 - DNA, 25 bp, Homo sapien
gatcgtgggttcacgcttccattcc

SEQ ID NO: 5670403 - DNA, 25 bp, Homo sapien
gactaaatcaggtttcttggttgag

SEQ ID NO: 5670404 - DNA, 25 bp, Homo sapien
tagctccgattactgaccgatgatc

SEQ ID NO: 5670405 - DNA, 25 bp, Homo sapien
gagttttcttagctccgattactga

SEQ ID NO: 5670406 - DNA, 25 bp, Homo sapien
tactgaccgatgatcgtgggttcac

SEQ ID NO: 5670407 - DNA, 25 bp, Homo sapien
ttagcaggagggactaaatcaggtt

SEQ ID NO: 5670408 - DNA, 25 bp, Homo sapien
tcaaccaagaaacctgatttagtcc

SEQ ID NO: 5670409 - DNA, 25 bp, Homo sapien
gatcatcggtcagtaatcggagcta

SEQ ID NO: 5670410 - DNA, 25 bp, Homo sapien
taatcggagctaagaaaactcaacc

SEQ ID NO: 5670411 - DNA, 25 bp, Homo sapien
gaaacctgatttagtccctcctgct

SEQ ID NO: 5670412 - DNA, 25 bp, Homo sapien
aggaatggaagcgtgaacccacgat

SEQ ID NO: 5670413 - DNA, 25 bp, Homo sapien
gaagcgtgaacccacgatcatcggt

SEQ ID NO: 5670414 - DNA, 25 bp, Homo sapien
gtgcccaggatcctattttggtgtc

SEQ ID NO: 5670415 - DNA, 25 bp, Homo sapien
cctgtagtcctcttaagagaaacaa

SEQ ID NO: 5670416 - DNA, 25 bp, Homo sapien
ggtgtcttgatatctgtttcccgcc

SEQ ID NO: 5670417 - DNA, 25 bp, Homo sapien
tgatatctgtttcccgcccactaag

SEQ ID NO: 5670418 - DNA, 25 bp, Homo sapien
cgcccactaagggaggcctgtagtc

SEQ ID NO: 5670419 - DNA, 25 bp, Homo sapien
ccggtgcccaggatcctattttggt

SEQ ID NO: 5670420 - DNA, 25 bp, Homo sapien
gactacaggcctcccttagtgggcg

SEQ ID NO: 5670421 - DNA, 25 bp, Homo sapien
cgggaaacagatatcaagacaccaa

SEQ ID NO: 5670422 - DNA, 25 bp, Homo sapien
accaaaataggatcctgggcaccgg

SEQ ID NO: 5670423 - DNA, 25 bp, Homo sapien
ttgtttctcttaagaggactacagg

SEQ ID NO: 5670424 - DNA, 25 bp, Homo sapien
gacaccaaaataggatcctgggcac

SEQ ID NO: 5670425 - DNA, 25 bp, Homo sapien
cttagtgggcgggaaacagatatca

SEQ ID NO: 5670426 - DNA, 25 bp, Homo sapien
gttcttagtcgatcgggcctgcact

SEQ ID NO: 5670427 - DNA, 25 bp, Homo sapien
tccgcgggctctggttaagttctta

SEQ ID NO: 5670428 - DNA, 25 bp, Homo sapien
tgttcctatctccggcctagcatct

SEQ ID NO: 5670429 - DNA, 25 bp, Homo sapien
gatcgggcctgcacttgactggagc

SEQ ID NO: 5670430 - DNA, 25 bp, Homo sapien
tcgatcgggcctgcacttgactgga

SEQ ID NO: 5670431 - DNA, 25 bp, Homo sapien
taagttcttagtcgatcgggcctgc

SEQ ID NO: 5670432 - DNA, 25 bp, Homo sapien
cagtcaagtgcaggcccgatcgact

SEQ ID NO: 5670433 - DNA, 25 bp, Homo sapien
gctccagtcaagtgcaggcccgatc

SEQ ID NO: 5670434 - DNA, 25 bp, Homo sapien
actaagaacttaaccagagcccgcg

SEQ ID NO: 5670435 - DNA, 25 bp, Homo sapien
tagatgctaggccggagataggaac

SEQ ID NO: 5670436 - DNA, 25 bp, Homo sapien
caggcccgatcgactaagaacttaa

SEQ ID NO: 5670437 - DNA, 25 bp, Homo sapien
aagtgcaggcccgatcgactaagaa

SEQ ID NO: 5670438 - DNA, 25 bp, Homo sapien
ggaacgcgtaggctgtccacctctg

SEQ ID NO: 5670439 - DNA, 25 bp, Homo sapien
cggccttaggccgactgttttcttg

SEQ ID NO: 5670440 - DNA, 25 bp, Homo sapien
tcccttgtcggccttaggccgactg

SEQ ID NO: 5670441 - DNA, 25 bp, Homo sapien
acatgttttggggaacgcgtaggct

SEQ ID NO: 5670442 - DNA, 25 bp, Homo sapien
cttaggccgactgttttcttgggat

SEQ ID NO: 5670443 - DNA, 25 bp, Homo sapien
tgcctctcccttgtcggccttaggc

SEQ ID NO: 5670444 - DNA, 25 bp, Homo sapien
agcctacgcgttccccaaaacatgt

SEQ ID NO: 5670445 - DNA, 25 bp, Homo sapien
gtggacagcctacgcgttccccaaa

SEQ ID NO: 5670446 - DNA, 25 bp, Homo sapien
cagaggtggacagcctacgcgttcc

SEQ ID NO: 5670447 - DNA, 25 bp, Homo sapien
caagaaaacagtcggcctaaggccg

SEQ ID NO: 5670448 - DNA, 25 bp, Homo sapien
gcctaaggccgacaagggagaggca

SEQ ID NO: 5670449 - DNA, 25 bp, Homo sapien
atcccaagaaaacagtcggcctaag

SEQ ID NO: 5670450 - DNA, 25 bp, Homo sapien
attaggcctggttcccgctctcagc

SEQ ID NO: 5670451 - DNA, 25 bp, Homo sapien
gcctggttcccgctctcagcccgtt

SEQ ID NO: 5670452 - DNA, 25 bp, Homo sapien
cattaggcctggttcccgctctcag

SEQ ID NO: 5670453 - DNA, 25 bp, Homo sapien
ttcccgctctcagcccgttctccgg

SEQ ID NO: 5670454 - DNA, 25 bp, Homo sapien
ttaggcctggttcccgctctcagcc

SEQ ID NO: 5670455 - DNA, 25 bp, Homo sapien
tggttcccgctctcagcccgttctc

SEQ ID NO: 5670456 - DNA, 25 bp, Homo sapien
agaacgggctgagagcgggaaccag

SEQ ID NO: 5670457 - DNA, 25 bp, Homo sapien
ctgagagcgggaaccaggcctaatg

SEQ ID NO: 5670458 - DNA, 25 bp, Homo sapien
aacgggctgagagcgggaaccaggc

SEQ ID NO: 5670459 - DNA, 25 bp, Homo sapien
ggagaacgggctgagagcgggaacc

SEQ ID NO: 5670460 - DNA, 25 bp, Homo sapien
gctgagagcgggaaccaggcctaat

SEQ ID NO: 5670461 - DNA, 25 bp, Homo sapien
ccggagaacgggctgagagcgggaa

SEQ ID NO: 5670462 - DNA, 25 bp, Homo sapien
attaggcctggttcccgctctcagc

SEQ ID NO: 5670463 - DNA, 25 bp, Homo sapien
tcccaggatagtcaggcccaactag

SEQ ID NO: 5670464 - DNA, 25 bp, Homo sapien
cattaggcctggttcccgctctcag

SEQ ID NO: 5670465 - DNA, 25 bp, Homo sapien
ccaggatagtcaggcccaactagtc

SEQ ID NO: 5670466 - DNA, 25 bp, Homo sapien
ggcatcccaggatagtcaggcccaa

SEQ ID NO: 5670467 - DNA, 25 bp, Homo sapien
tggttcccgctctcagcccgttctc

SEQ ID NO: 5670468 - DNA, 25 bp, Homo sapien
ttgacgccagtaagaacgaggagga

SEQ ID NO: 5670469 - DNA, 25 bp, Homo sapien
aagattgacgccagtaagaacgagg

SEQ ID NO: 5670470 - DNA, 25 bp, Homo sapien
gaagattgacgccagtaagaacgag

SEQ ID NO: 5670471 - DNA, 25 bp, Homo sapien
gggcgaagattgacgccagtaagaa

SEQ ID NO: 5670472 - DNA, 25 bp, Homo sapien
gattgacgccagtaagaacgaggag

SEQ ID NO: 5670473 - DNA, 25 bp, Homo sapien
tgacgccagtaagaacgaggaggat

SEQ ID NO: 5670474 - DNA, 25 bp, Homo sapien
cctcctcgttcttactggcgtcaat

SEQ ID NO: 5670475 - DNA, 25 bp, Homo sapien
ttcttactggcgtcaatcttcgccc

SEQ ID NO: 5670476 - DNA, 25 bp, Homo sapien
ctcgttcttactggcgtcaatcttc

SEQ ID NO: 5670477 - DNA, 25 bp, Homo sapien
atcctcctcgttcttactggcgtca

SEQ ID NO: 5670478 - DNA, 25 bp, Homo sapien
tcctcgttcttactggcgtcaatct

SEQ ID NO: 5670479 - DNA, 25 bp, Homo sapien
gttcttactggcgtcaatcttcgcc

SEQ ID NO: 5670480 - DNA, 25 bp, Homo sapien
ccgccggcccgttgtggcggcagct

SEQ ID NO: 5670481 - DNA, 25 bp, Homo sapien
gcccgccggcccgttgtggcggcag

SEQ ID NO: 5670482 - DNA, 25 bp, Homo sapien
cgccggcccgttgtggcggcagctg

SEQ ID NO: 5670483 - DNA, 25 bp, Homo sapien
gccggcccgttgtggcggcagctgc

SEQ ID NO: 5670484 - DNA, 25 bp, Homo sapien
gcgggaggtcgttggcggggctgcg

SEQ ID NO: 5670485 - DNA, 25 bp, Homo sapien
cccgccggcccgttgtggcggcagc

SEQ ID NO: 5670486 - DNA, 25 bp, Homo sapien
cagccccgccaacgacctcccgcgt

SEQ ID NO: 5670487 - DNA, 25 bp, Homo sapien
cagctgccgccacaacgggccggcg

SEQ ID NO: 5670488 - DNA, 25 bp, Homo sapien
gcagccccgccaacgacctcccgcg

SEQ ID NO: 5670489 - DNA, 25 bp, Homo sapien
gcagctgccgccacaacgggccggc

SEQ ID NO: 5670490 - DNA, 25 bp, Homo sapien
ctgccgccacaacgggccggcgggc

SEQ ID NO: 5670491 - DNA, 25 bp, Homo sapien
gctgccgccacaacgggccggcggg

SEQ ID NO: 5670492 - DNA, 25 bp, Homo sapien
ccggcccgttgtggcggcagctgcg

SEQ ID NO: 5670493 - DNA, 25 bp, Homo sapien
cgccggcccgttgtggcggcagctg

SEQ ID NO: 5670494 - DNA, 25 bp, Homo sapien
atcaacgggcgcgcccgccggcccg

SEQ ID NO: 5670495 - DNA, 25 bp, Homo sapien
gccggcccgttgtggcggcagctgc

SEQ ID NO: 5670496 - DNA, 25 bp, Homo sapien
gcgggaggtcgttggcggggctgcg

SEQ ID NO: 5670497 - DNA, 25 bp, Homo sapien
cgttgtggcggcagctgcgcgcccc

SEQ ID NO: 5670498 - DNA, 25 bp, Homo sapien
cagccccgccaacgacctcccgcgt

SEQ ID NO: 5670499 - DNA, 25 bp, Homo sapien
gggcgcgcagctgccgccacaacgg

SEQ ID NO: 5670500 - DNA, 25 bp, Homo sapien
cagctgccgccacaacgggccggcg

SEQ ID NO: 5670501 - DNA, 25 bp, Homo sapien
cgggccggcgggcgcgcccgttgat

SEQ ID NO: 5670502 - DNA, 25 bp, Homo sapien
gcagctgccgccacaacgggccggc

SEQ ID NO: 5670503 - DNA, 25 bp, Homo sapien
cgcagctgccgccacaacgggccgg

SEQ ID NO: 5670504 - DNA, 25 bp, Homo sapien
ggattgctgcctccgggacgcgcgc

SEQ ID NO: 5670505 - DNA, 25 bp, Homo sapien
ggcgctgccgttaccccatcggccg

SEQ ID NO: 5670506 - DNA, 25 bp, Homo sapien
ttaccccatcggccgctggagggcg

SEQ ID NO: 5670507 - DNA, 25 bp, Homo sapien
ccagggattgctgcctccgggacgc

SEQ ID NO: 5670508 - DNA, 25 bp, Homo sapien
agggattgctgcctccgggacgcgc

SEQ ID NO: 5670509 - DNA, 25 bp, Homo sapien
tgccgttaccccatcggccgctgga

SEQ ID NO: 5670510 - DNA, 25 bp, Homo sapien
gcgtcccggaggcagcaatccctgg

SEQ ID NO: 5670511 - DNA, 25 bp, Homo sapien
gcgcgtcccggaggcagcaatccct

SEQ ID NO: 5670512 - DNA, 25 bp, Homo sapien
tccagcggccgatggggtaacggca

SEQ ID NO: 5670513 - DNA, 25 bp, Homo sapien
cgccctccagcggccgatggggtaa

SEQ ID NO: 5670514 - DNA, 25 bp, Homo sapien
gcgcgcgtcccggaggcagcaatcc

SEQ ID NO: 5670515 - DNA, 25 bp, Homo sapien
ccgatggggtaacggcagcgccggg

SEQ ID NO: 5670516 - DNA, 25 bp, Homo sapien
ggattgctgcctccgggacgcgcgc

SEQ ID NO: 5670517 - DNA, 25 bp, Homo sapien
atcggccgctggagggcgccgcggg

SEQ ID NO: 5670518 - DNA, 25 bp, Homo sapien
ggcgctgccgttaccccatcggccg

SEQ ID NO: 5670519 - DNA, 25 bp, Homo sapien
ttaccccatcggccgctggagggcg

SEQ ID NO: 5670520 - DNA, 25 bp, Homo sapien
ccagggattgctgcctccgggacgc

SEQ ID NO: 5670521 - DNA, 25 bp, Homo sapien
tgccgttaccccatcggccgctgga

SEQ ID NO: 5670522 - DNA, 25 bp, Homo sapien
gagggggcttggcactcgtgggcgc

SEQ ID NO: 5670523 - DNA, 25 bp, Homo sapien
aactgctccccggtggcaccttcca

SEQ ID NO: 5670524 - DNA, 25 bp, Homo sapien
agggggcttggcactcgtgggcgcc

SEQ ID NO: 5670525 - DNA, 25 bp, Homo sapien
cggactcccaactgctccccggtgg

SEQ ID NO: 5670526 - DNA, 25 bp, Homo sapien
caacttccccggactcccaactgct

SEQ ID NO: 5670527 - DNA, 25 bp, Homo sapien
gactcccaactgctccccggtggca

SEQ ID NO: 5670528 - DNA, 25 bp, Homo sapien
ggtgccaccggggagcagttgggag

SEQ ID NO: 5670529 - DNA, 25 bp, Homo sapien
tggaaggtgccaccggggagcagtt

SEQ ID NO: 5670530 - DNA, 25 bp, Homo sapien
gccaccggggagcagttgggagtcc

SEQ ID NO: 5670531 - DNA, 25 bp, Homo sapien
ccaccggggagcagttgggagtccg

SEQ ID NO: 5670532 - DNA, 25 bp, Homo sapien
ggcgcccacgagtgccaagccccct

SEQ ID NO: 5670533 - DNA, 25 bp, Homo sapien
agcagttgggagtccggggaagttg

SEQ ID NO: 5670534 - DNA, 25 bp, Homo sapien
gattacatactgatcatgttggaac

SEQ ID NO: 5670535 - DNA, 25 bp, Homo sapien
tagctcaagagattacatactgatc

SEQ ID NO: 5670536 - DNA, 25 bp, Homo sapien
tggtagctcaagagattacatactg

SEQ ID NO: 5670537 - DNA, 25 bp, Homo sapien
catactgatcatgttggaactaaaa

SEQ ID NO: 5670538 - DNA, 25 bp, Homo sapien
ggttatcaaaagataatttccatgt

SEQ ID NO: 5670539 - DNA, 25 bp, Homo sapien
tactttagtacttaatggttatcaa

SEQ ID NO: 5670540 - DNA, 25 bp, Homo sapien
ttttagttccaacatgatcagtatg

SEQ ID NO: 5670541 - DNA, 25 bp, Homo sapien
tgatcagtatgtaatctcttgagct

SEQ ID NO: 5670542 - DNA, 25 bp, Homo sapien
tatgtaatctcttgagctaccaaaa

SEQ ID NO: 5670543 - DNA, 25 bp, Homo sapien
ttgataaccattaagtactaaagta

SEQ ID NO: 5670544 - DNA, 25 bp, Homo sapien
catggaaattatcttttgataacca

SEQ ID NO: 5670545 - DNA, 25 bp, Homo sapien
tcagtatgtaatctcttgagctacc

SEQ ID NO: 5670546 - DNA, 25 bp, Homo sapien
gttaattgttgggtaaatctgtatg

SEQ ID NO: 5670547 - DNA, 25 bp, Homo sapien
aattgttgggtaaatctgtatgtat

SEQ ID NO: 5670548 - DNA, 25 bp, Homo sapien
ttaattgttgggtaaatctgtatgt

SEQ ID NO: 5670549 - DNA, 25 bp, Homo sapien
taattgttgggtaaatctgtatgta

SEQ ID NO: 5670550 - DNA, 25 bp, Homo sapien
tacatacagatttacccaacaatta

SEQ ID NO: 5670551 - DNA, 25 bp, Homo sapien
catacagatttacccaacaattaac

SEQ ID NO: 5670552 - DNA, 25 bp, Homo sapien
atacatacagatttacccaacaatt

SEQ ID NO: 5670553 - DNA, 25 bp, Homo sapien
acatacagatttacccaacaattaa

SEQ ID NO: 5670554 - DNA, 25 bp, Homo sapien
gttgagcatggtgggcagcattact

SEQ ID NO: 5670555 - DNA, 25 bp, Homo sapien
catggtgggcagcattactgctttc

SEQ ID NO: 5670556 - DNA, 25 bp, Homo sapien
tatgtgtacatatgggttgagcatg

SEQ ID NO: 5670557 - DNA, 25 bp, Homo sapien
tggagaaatgaaagtgggttaattg

SEQ ID NO: 5670558 - DNA, 25 bp, Homo sapien
taattgttgggtaaatctgtatgta

SEQ ID NO: 5670559 - DNA, 25 bp, Homo sapien
gtgggcagcattactgctttcgtgt

SEQ ID NO: 5670560 - DNA, 25 bp, Homo sapien
cacatacatacagatttacccaaca

SEQ ID NO: 5670561 - DNA, 25 bp, Homo sapien
caattaacccactttcatttctcca

SEQ ID NO: 5670562 - DNA, 25 bp, Homo sapien
catacagatttacccaacaattaac

SEQ ID NO: 5670563 - DNA, 25 bp, Homo sapien
agtaatgctgcccaccatgctcaac

SEQ ID NO: 5670564 - DNA, 25 bp, Homo sapien
catgctcaacccatatgtacacata

SEQ ID NO: 5670565 - DNA, 25 bp, Homo sapien
acacgaaagcagtaatgctgcccac

SEQ ID NO: 5670566 - DNA, 25 bp, Homo sapien
tttaattgtcatacacatgtttagt

SEQ ID NO: 5670567 - DNA, 25 bp, Homo sapien
tttttaattgtcatacacatgttta

SEQ ID NO: 5670568 - DNA, 25 bp, Homo sapien
ttttaattgtcatacacatgtttag

SEQ ID NO: 5670569 - DNA, 25 bp, Homo sapien
ttaattgtcatacacatgtttagtt

SEQ ID NO: 5670570 - DNA, 25 bp, Homo sapien
actaaacatgtgtatgacaattaaa

SEQ ID NO: 5670571 - DNA, 25 bp, Homo sapien
taaacatgtgtatgacaattaaaaa

SEQ ID NO: 5670572 - DNA, 25 bp, Homo sapien
ctaaacatgtgtatgacaattaaaa

SEQ ID NO: 5670573 - DNA, 25 bp, Homo sapien
aactaaacatgtgtatgacaattaa

SEQ ID NO: 5670574 - DNA, 25 bp, Homo sapien
cttccagagtgatgggattatgggt

SEQ ID NO: 5670575 - DNA, 25 bp, Homo sapien
ttcctcagccttccagagtgatggg

SEQ ID NO: 5670576 - DNA, 25 bp, Homo sapien
cctaaatttttaattgtcatacaca

SEQ ID NO: 5670577 - DNA, 25 bp, Homo sapien
ttttaattgtcatacacatgtttag

SEQ ID NO: 5670578 - DNA, 25 bp, Homo sapien
tgcctgacctctttattttttccta

SEQ ID NO: 5670579 - DNA, 25 bp, Homo sapien
ttaattgtcatacacatgtttagtt

SEQ ID NO: 5670580 - DNA, 25 bp, Homo sapien
tgtgtatgacaattaaaaatttagg

SEQ ID NO: 5670581 - DNA, 25 bp, Homo sapien
gaaaaaataaagaggtcaggcacag

SEQ ID NO: 5670582 - DNA, 25 bp, Homo sapien
taggaaaaaataaagaggtcaggca

SEQ ID NO: 5670583 - DNA, 25 bp, Homo sapien
ctaaacatgtgtatgacaattaaaa

SEQ ID NO: 5670584 - DNA, 25 bp, Homo sapien
aactaaacatgtgtatgacaattaa

SEQ ID NO: 5670585 - DNA, 25 bp, Homo sapien
cccatcactctggaaggctgaggaa

SEQ ID NO: 5670586 - DNA, 25 bp, Homo sapien
ttgaaacggagtctcgctttgttgc

SEQ ID NO: 5670587 - DNA, 25 bp, Homo sapien
tgaaacggagtctcgctttgttgcc

SEQ ID NO: 5670588 - DNA, 25 bp, Homo sapien
ggcaacaaagcgagactccgtttca

SEQ ID NO: 5670589 - DNA, 25 bp, Homo sapien
gcaacaaagcgagactccgtttcaa

SEQ ID NO: 5670590 - DNA, 25 bp, Homo sapien
tatcaacaactgactccccctagtg

SEQ ID NO: 5670591 - DNA, 25 bp, Homo sapien
tttccctcccactatcaacaactga

SEQ ID NO: 5670592 - DNA, 25 bp, Homo sapien
cagactctcccctccaggttattaa

SEQ ID NO: 5670593 - DNA, 25 bp, Homo sapien
tcagactctcccctccaggttatta

SEQ ID NO: 5670594 - DNA, 25 bp, Homo sapien
tgccttttccctcccactatcaaca

SEQ ID NO: 5670595 - DNA, 25 bp, Homo sapien
caacaactgactccccctagtggga

SEQ ID NO: 5670596 - DNA, 25 bp, Homo sapien
tgttgatagtgggagggaaaaggca

SEQ ID NO: 5670597 - DNA, 25 bp, Homo sapien
tcccactagggggagtcagttgttg

SEQ ID NO: 5670598 - DNA, 25 bp, Homo sapien
ttgatagtgggagggaaaaggcaag

SEQ ID NO: 5670599 - DNA, 25 bp, Homo sapien
cactagggggagtcagttgttgata

SEQ ID NO: 5670600 - DNA, 25 bp, Homo sapien
tcagttgttgatagtgggagggaaa

SEQ ID NO: 5670601 - DNA, 25 bp, Homo sapien
taataacctggaggggagagtctga

SEQ ID NO: 5670602 - DNA, 25 bp, Homo sapien
cttggatgcagaagataacattcat

SEQ ID NO: 5670603 - DNA, 25 bp, Homo sapien
cagaatcatgacttggatgcagaag

SEQ ID NO: 5670604 - DNA, 25 bp, Homo sapien
gagacagggttatcagaatcatgac

SEQ ID NO: 5670605 - DNA, 25 bp, Homo sapien
cattcatgtaattactgcagagtat

SEQ ID NO: 5670606 - DNA, 25 bp, Homo sapien
aagataacattcatgtaattactgc

SEQ ID NO: 5670607 - DNA, 25 bp, Homo sapien
tagagacagggttatcagaatcatg

SEQ ID NO: 5670608 - DNA, 25 bp, Homo sapien
catgattctgataaccctgtctcta

SEQ ID NO: 5670609 - DNA, 25 bp, Homo sapien
taatactctgcagtaattacatgaa

SEQ ID NO: 5670610 - DNA, 25 bp, Homo sapien
agtcatgattctgataaccctgtct

SEQ ID NO: 5670611 - DNA, 25 bp, Homo sapien
atgaatgttatcttctgcatccaag

SEQ ID NO: 5670612 - DNA, 25 bp, Homo sapien
tactctgcagtaattacatgaatgt

SEQ ID NO: 5670613 - DNA, 25 bp, Homo sapien
cttctgcatccaagtcatgattctg

SEQ ID NO: 5670614 - DNA, 25 bp, Homo sapien
tttttattgaaacggtgtctcgctc

SEQ ID NO: 5670615 - DNA, 25 bp, Homo sapien
tattgaaacggtgtctcgctctgtc

SEQ ID NO: 5670616 - DNA, 25 bp, Homo sapien
attgaaacggtgtctcgctctgtca

SEQ ID NO: 5670617 - DNA, 25 bp, Homo sapien
ttttattgaaacggtgtctcgctct

SEQ ID NO: 5670618 - DNA, 25 bp, Homo sapien
ttattgaaacggtgtctcgctctgt

SEQ ID NO: 5670619 - DNA, 25 bp, Homo sapien
tttattgaaacggtgtctcgctctg

SEQ ID NO: 5670620 - DNA, 25 bp, Homo sapien
tgacagagcgagacaccgtttcaat

SEQ ID NO: 5670621 - DNA, 25 bp, Homo sapien
agagcgagacaccgtttcaataaaa

SEQ ID NO: 5670622 - DNA, 25 bp, Homo sapien
gacagagcgagacaccgtttcaata

SEQ ID NO: 5670623 - DNA, 25 bp, Homo sapien
acagagcgagacaccgtttcaataa

SEQ ID NO: 5670624 - DNA, 25 bp, Homo sapien
gagcgagacaccgtttcaataaaaa

SEQ ID NO: 5670625 - DNA, 25 bp, Homo sapien
cagagcgagacaccgtttcaataaa

SEQ ID NO: 5670626 - DNA, 25 bp, Homo sapien
ttacaggcttgcactactacaccca

SEQ ID NO: 5670627 - DNA, 25 bp, Homo sapien
tacaggcttgcactactacacccag

SEQ ID NO: 5670628 - DNA, 25 bp, Homo sapien
acaggcttgcactactacacccagc

SEQ ID NO: 5670629 - DNA, 25 bp, Homo sapien
caggcttgcactactacacccagct

SEQ ID NO: 5670630 - DNA, 25 bp, Homo sapien
ggcttgcactactacacccagctaa

SEQ ID NO: 5670631 - DNA, 25 bp, Homo sapien
aggcttgcactactacacccagcta

SEQ ID NO: 5670632 - DNA, 25 bp, Homo sapien
ttagctgggtgtagtagtgcaagcc

SEQ ID NO: 5670633 - DNA, 25 bp, Homo sapien
tagctgggtgtagtagtgcaagcct

SEQ ID NO: 5670634 - DNA, 25 bp, Homo sapien
tgggtgtagtagtgcaagcctgtaa

SEQ ID NO: 5670635 - DNA, 25 bp, Homo sapien
agctgggtgtagtagtgcaagcctg

SEQ ID NO: 5670636 - DNA, 25 bp, Homo sapien
gctgggtgtagtagtgcaagcctgt

SEQ ID NO: 5670637 - DNA, 25 bp, Homo sapien
ctgggtgtagtagtgcaagcctgta

SEQ ID NO: 5670638 - DNA, 25 bp, Homo sapien
gcaattctcctacttcaggttcctg

SEQ ID NO: 5670639 - DNA, 25 bp, Homo sapien
ctacttcaggttcctgagtagctga

SEQ ID NO: 5670640 - DNA, 25 bp, Homo sapien
aagcaattctcctacttcaggttcc

SEQ ID NO: 5670641 - DNA, 25 bp, Homo sapien
aattctcctacttcaggttcctgag

SEQ ID NO: 5670642 - DNA, 25 bp, Homo sapien
caattctcctacttcaggttcctga

SEQ ID NO: 5670643 - DNA, 25 bp, Homo sapien
agcaattctcctacttcaggttcct

SEQ ID NO: 5670644 - DNA, 25 bp, Homo sapien
ctcaggaacctgaagtaggagaatt

SEQ ID NO: 5670645 - DNA, 25 bp, Homo sapien
tcaggaacctgaagtaggagaattg

SEQ ID NO: 5670646 - DNA, 25 bp, Homo sapien
tcagctactcaggaacctgaagtag

SEQ ID NO: 5670647 - DNA, 25 bp, Homo sapien
caggaacctgaagtaggagaattgc

SEQ ID NO: 5670648 - DNA, 25 bp, Homo sapien
tactcaggaacctgaagtaggagaa

SEQ ID NO: 5670649 - DNA, 25 bp, Homo sapien
aggaacctgaagtaggagaattgct

SEQ ID NO: 5670650 - DNA, 25 bp, Homo sapien
aacatattgactaactggttgactg

SEQ ID NO: 5670651 - DNA, 25 bp, Homo sapien
ttaacatattgactaactggttgac

SEQ ID NO: 5670652 - DNA, 25 bp, Homo sapien
atattgactaactggttgactggtt

SEQ ID NO: 5670653 - DNA, 25 bp, Homo sapien
gattaacatattgactaactggttg

SEQ ID NO: 5670654 - DNA, 25 bp, Homo sapien
tctgattaacatattgactaactgg

SEQ ID NO: 5670655 - DNA, 25 bp, Homo sapien
catattgactaactggttgactggt

SEQ ID NO: 5670656 - DNA, 25 bp, Homo sapien
caaccagttagtcaatatgttaatc

SEQ ID NO: 5670657 - DNA, 25 bp, Homo sapien
ccagttagtcaatatgttaatcaga

SEQ ID NO: 5670658 - DNA, 25 bp, Homo sapien
cagtcaaccagttagtcaatatgtt

SEQ ID NO: 5670659 - DNA, 25 bp, Homo sapien
accagtcaaccagttagtcaatatg

SEQ ID NO: 5670660 - DNA, 25 bp, Homo sapien
ccagtcaaccagttagtcaatatgt

SEQ ID NO: 5670661 - DNA, 25 bp, Homo sapien
aaccagtcaaccagttagtcaatat

SEQ ID NO: 5670662 - DNA, 25 bp, Homo sapien
aaggcagtgggagattgactgccaa

SEQ ID NO: 5670663 - DNA, 25 bp, Homo sapien
ccttgtattcacaggaaggcagtgg

SEQ ID NO: 5670664 - DNA, 25 bp, Homo sapien
ttggcagtcaatctcccactgcctt

SEQ ID NO: 5670665 - DNA, 25 bp, Homo sapien
ccactgccttcctgtgaatacaagg

SEQ ID NO: 5670666 - DNA, 25 bp, Homo sapien
tgggagattgactgccaaagaggaa

SEQ ID NO: 5670667 - DNA, 25 bp, Homo sapien
aaggcagtgggagattgactgccaa

SEQ ID NO: 5670668 - DNA, 25 bp, Homo sapien
ccttgtattcacaggaaggcagtgg

SEQ ID NO: 5670669 - DNA, 25 bp, Homo sapien
ggttggagtccagtgaagagaaggg

SEQ ID NO: 5670670 - DNA, 25 bp, Homo sapien
gagaggtgtgagaggttggagtcca

SEQ ID NO: 5670671 - DNA, 25 bp, Homo sapien
gattgactgccaaagaggaagtagg

SEQ ID NO: 5670672 - DNA, 25 bp, Homo sapien
ttggcagtcaatctcccactgcctt

SEQ ID NO: 5670673 - DNA, 25 bp, Homo sapien
ccactgccttcctgtgaatacaagg

SEQ ID NO: 5670674 - DNA, 25 bp, Homo sapien
tcctacttcctctttggcagtcaat

SEQ ID NO: 5670675 - DNA, 25 bp, Homo sapien
tccttgaccccttctcttcactgga

SEQ ID NO: 5670676 - DNA, 25 bp, Homo sapien
ttcctctttggcagtcaatctccca

SEQ ID NO: 5670677 - DNA, 25 bp, Homo sapien
tcactggactccaacctctcacacc

SEQ ID NO: 5670678 - DNA, 25 bp, Homo sapien
tcccctgtatagcttcattctgcag

SEQ ID NO: 5670679 - DNA, 25 bp, Homo sapien
atgtgctagcatcccctgtatagct

SEQ ID NO: 5670680 - DNA, 25 bp, Homo sapien
gctagcatcccctgtatagcttcat

SEQ ID NO: 5670681 - DNA, 25 bp, Homo sapien
gcatcccctgtatagcttcattctg

SEQ ID NO: 5670682 - DNA, 25 bp, Homo sapien
tgtatagcttcattctgcaggaact

SEQ ID NO: 5670683 - DNA, 25 bp, Homo sapien
cctgtatagcttcattctgcaggaa

SEQ ID NO: 5670684 - DNA, 25 bp, Homo sapien
tcctgcagaatgaagctatacaggg

SEQ ID NO: 5670685 - DNA, 25 bp, Homo sapien
tgaagctatacaggggatgctagca

SEQ ID NO: 5670686 - DNA, 25 bp, Homo sapien
agctatacaggggatgctagcacat

SEQ ID NO: 5670687 - DNA, 25 bp, Homo sapien
gttcctgcagaatgaagctatacag

SEQ ID NO: 5670688 - DNA, 25 bp, Homo sapien
agttcctgcagaatgaagctataca

SEQ ID NO: 5670689 - DNA, 25 bp, Homo sapien
ttcctgcagaatgaagctatacagg

SEQ ID NO: 5670690 - DNA, 25 bp, Homo sapien
tctttatttctttgtagaggcaggg

SEQ ID NO: 5670691 - DNA, 25 bp, Homo sapien
ctcccctccctttgcttctctttct

SEQ ID NO: 5670692 - DNA, 25 bp, Homo sapien
tctttgtagaggcagggttttctct

SEQ ID NO: 5670693 - DNA, 25 bp, Homo sapien
ctctttatttctttgtagaggcagg

SEQ ID NO: 5670694 - DNA, 25 bp, Homo sapien
ctttatttctttgtagaggcagggt

SEQ ID NO: 5670695 - DNA, 25 bp, Homo sapien
tctctttatttctttgtagaggcag

SEQ ID NO: 5670696 - DNA, 25 bp, Homo sapien
ccctgcctctacaaagaaataaaga

SEQ ID NO: 5670697 - DNA, 25 bp, Homo sapien
cctgcctctacaaagaaataaagag

SEQ ID NO: 5670698 - DNA, 25 bp, Homo sapien
accctgcctctacaaagaaataaag

SEQ ID NO: 5670699 - DNA, 25 bp, Homo sapien
ctgcctctacaaagaaataaagaga

SEQ ID NO: 5670700 - DNA, 25 bp, Homo sapien
gagaagaaagagaagcaaagggagg

SEQ ID NO: 5670701 - DNA, 25 bp, Homo sapien
agagaaaaccctgcctctacaaaga

SEQ ID NO: 5670702 - DNA, 25 bp, Homo sapien
gagtggactgggcttaggtaggtca

SEQ ID NO: 5670703 - DNA, 25 bp, Homo sapien
tgacaggaatgaatggcttcttgaa

SEQ ID NO: 5670704 - DNA, 25 bp, Homo sapien
taggtaggtcatgagaggaaggcaa

SEQ ID NO: 5670705 - DNA, 25 bp, Homo sapien
ggaatgaatggcttcttgaaaggaa

SEQ ID NO: 5670706 - DNA, 25 bp, Homo sapien
gacaggaatgaatggcttcttgaaa

SEQ ID NO: 5670707 - DNA, 25 bp, Homo sapien
acaggaatgaatggcttcttgaaag

SEQ ID NO: 5670708 - DNA, 25 bp, Homo sapien
ttcaagaagccattcattcctgtca

SEQ ID NO: 5670709 - DNA, 25 bp, Homo sapien
tgacctacctaagcccagtccactc

SEQ ID NO: 5670710 - DNA, 25 bp, Homo sapien
ttcctttcaagaagccattcattcc

SEQ ID NO: 5670711 - DNA, 25 bp, Homo sapien
tgccttcctctcatgacctacctaa

SEQ ID NO: 5670712 - DNA, 25 bp, Homo sapien
tcctttcaagaagccattcattcct

SEQ ID NO: 5670713 - DNA, 25 bp, Homo sapien
ctttcaagaagccattcattcctgt

SEQ ID NO: 5670714 - DNA, 25 bp, Homo sapien
tcagtcttatgctttgctcctcaaa

SEQ ID NO: 5670715 - DNA, 25 bp, Homo sapien
aaactagacttggagtgattattgc

SEQ ID NO: 5670716 - DNA, 25 bp, Homo sapien
tatgctttgctcctcaaactagact

SEQ ID NO: 5670717 - DNA, 25 bp, Homo sapien
cctcaaactagacttggagtgatta

SEQ ID NO: 5670718 - DNA, 25 bp, Homo sapien
tctacaaactcagtcttatgctttg

SEQ ID NO: 5670719 - DNA, 25 bp, Homo sapien
ggaaattggagtctacaaactcagt

SEQ ID NO: 5670720 - DNA, 25 bp, Homo sapien
caaagcataagactgagtttgtaga

SEQ ID NO: 5670721 - DNA, 25 bp, Homo sapien
tttgaggagcaaagcataagactga

SEQ ID NO: 5670722 - DNA, 25 bp, Homo sapien
gcaataatcactccaagtctagttt

SEQ ID NO: 5670723 - DNA, 25 bp, Homo sapien
taatcactccaagtctagtttgagg

SEQ ID NO: 5670724 - DNA, 25 bp, Homo sapien
actgagtttgtagactccaatttcc

SEQ ID NO: 5670725 - DNA, 25 bp, Homo sapien
agtctagtttgaggagcaaagcata

SEQ ID NO: 5670726 - DNA, 25 bp, Homo sapien
tccagcagggaatagacatacaaca

SEQ ID NO: 5670727 - DNA, 25 bp, Homo sapien
ttttaatgacctatagtgggtccag

SEQ ID NO: 5670728 - DNA, 25 bp, Homo sapien
gtcctcaagggaaactccagcaggg

SEQ ID NO: 5670729 - DNA, 25 bp, Homo sapien
ggaaactccagcagggaatagacat

SEQ ID NO: 5670730 - DNA, 25 bp, Homo sapien
cagggaatagacatacaacaatttt

SEQ ID NO: 5670731 - DNA, 25 bp, Homo sapien
aatgacctatagtgggtccagacaa

SEQ ID NO: 5670732 - DNA, 25 bp, Homo sapien
gttgtatgtctattccctgctggag

SEQ ID NO: 5670733 - DNA, 25 bp, Homo sapien
attgtctggacccactataggtcat

SEQ ID NO: 5670734 - DNA, 25 bp, Homo sapien
aaattgttgtatgtctattccctgc

SEQ ID NO: 5670735 - DNA, 25 bp, Homo sapien
taaaaaattgttgtatgtctattcc

SEQ ID NO: 5670736 - DNA, 25 bp, Homo sapien
tctggacccactataggtcattaaa

SEQ ID NO: 5670737 - DNA, 25 bp, Homo sapien
ccctgctggagtttcccttgaggac

SEQ ID NO: 5670738 - DNA, 25 bp, Homo sapien
gtaaacactctcctctatgtagcaa

SEQ ID NO: 5670739 - DNA, 25 bp, Homo sapien
attatgaagggaatagtatttttag

SEQ ID NO: 5670740 - DNA, 25 bp, Homo sapien
taaacactctcctctatgtagcaaa

SEQ ID NO: 5670741 - DNA, 25 bp, Homo sapien
aaacactctcctctatgtagcaaat

SEQ ID NO: 5670742 - DNA, 25 bp, Homo sapien
ttgacattcaaagtggatcagtaaa

SEQ ID NO: 5670743 - DNA, 25 bp, Homo sapien
agtaaacactctcctctatgtagca

SEQ ID NO: 5670744 - DNA, 25 bp, Homo sapien
atttgctacatagaggagagtgttt

SEQ ID NO: 5670745 - DNA, 25 bp, Homo sapien
tgctacatagaggagagtgtttact

SEQ ID NO: 5670746 - DNA, 25 bp, Homo sapien
ctaaaaatactattcccttcataat

SEQ ID NO: 5670747 - DNA, 25 bp, Homo sapien
ttgctacatagaggagagtgtttac

SEQ ID NO: 5670748 - DNA, 25 bp, Homo sapien
tttgctacatagaggagagtgttta

SEQ ID NO: 5670749 - DNA, 25 bp, Homo sapien
tttactgatccactttgaatgtcaa

SEQ ID NO: 5670750 - DNA, 25 bp, Homo sapien
cctctgcgtctcaggttcaagctat

SEQ ID NO: 5670751 - DNA, 25 bp, Homo sapien
tctgcgtctcaggttcaagctattc

SEQ ID NO: 5670752 - DNA, 25 bp, Homo sapien
agccacccgaatagcagggattaca

SEQ ID NO: 5670753 - DNA, 25 bp, Homo sapien
acctcagccacccgaatagcaggga

SEQ ID NO: 5670754 - DNA, 25 bp, Homo sapien
ctctgcgtctcaggttcaagctatt

SEQ ID NO: 5670755 - DNA, 25 bp, Homo sapien
cacccgaatagcagggattacaggt

SEQ ID NO: 5670756 - DNA, 25 bp, Homo sapien
acctgtaatccctgctattcgggtg

SEQ ID NO: 5670757 - DNA, 25 bp, Homo sapien
gaatagcttgaacctgagacgcaga

SEQ ID NO: 5670758 - DNA, 25 bp, Homo sapien
aatagcttgaacctgagacgcagag

SEQ ID NO: 5670759 - DNA, 25 bp, Homo sapien
atagcttgaacctgagacgcagagg

SEQ ID NO: 5670760 - DNA, 25 bp, Homo sapien
tccctgctattcgggtggctgaggt

SEQ ID NO: 5670761 - DNA, 25 bp, Homo sapien
cctgctattcgggtggctgaggtgg

SEQ ID NO: 5670762 - DNA, 25 bp, Homo sapien
agtgtacccagccaaccagggtaat

SEQ ID NO: 5670763 - DNA, 25 bp, Homo sapien
cccagccaaccagggtaatcttgaa

SEQ ID NO: 5670764 - DNA, 25 bp, Homo sapien
ccagtgtacccagccaaccagggta

SEQ ID NO: 5670765 - DNA, 25 bp, Homo sapien
gccaaccagggtaatcttgaactcc

SEQ ID NO: 5670766 - DNA, 25 bp, Homo sapien
tgtacccagccaaccagggtaatct

SEQ ID NO: 5670767 - DNA, 25 bp, Homo sapien
tgagccagtgtacccagccaaccag

SEQ ID NO: 5670768 - DNA, 25 bp, Homo sapien
ctggttggctgggtacactggctca

SEQ ID NO: 5670769 - DNA, 25 bp, Homo sapien
ccctggttggctgggtacactggct

SEQ ID NO: 5670770 - DNA, 25 bp, Homo sapien
gattaccctggttggctgggtacac

SEQ ID NO: 5670771 - DNA, 25 bp, Homo sapien
taccctggttggctgggtacactgg

SEQ ID NO: 5670772 - DNA, 25 bp, Homo sapien
ggagttcaagattaccctggttggc

SEQ ID NO: 5670773 - DNA, 25 bp, Homo sapien
ttcaagattaccctggttggctggg

SEQ ID NO: 5670774 - DNA, 25 bp, Homo sapien
cactgttgttggctcagggtggagt

SEQ ID NO: 5670775 - DNA, 25 bp, Homo sapien
tcactgttgttggctcagggtggag

SEQ ID NO: 5670776 - DNA, 25 bp, Homo sapien
gtctcactgttgttggctcagggtg

SEQ ID NO: 5670777 - DNA, 25 bp, Homo sapien
actgttgttggctcagggtggagtg

SEQ ID NO: 5670778 - DNA, 25 bp, Homo sapien
ctcactgttgttggctcagggtgga

SEQ ID NO: 5670779 - DNA, 25 bp, Homo sapien
tctcactgttgttggctcagggtgg

SEQ ID NO: 5670780 - DNA, 25 bp, Homo sapien
cactccaccctgagccaacaacagt

SEQ ID NO: 5670781 - DNA, 25 bp, Homo sapien
ctccaccctgagccaacaacagtga

SEQ ID NO: 5670782 - DNA, 25 bp, Homo sapien
caccctgagccaacaacagtgagac

SEQ ID NO: 5670783 - DNA, 25 bp, Homo sapien
tccaccctgagccaacaacagtgag

SEQ ID NO: 5670784 - DNA, 25 bp, Homo sapien
actccaccctgagccaacaacagtg

SEQ ID NO: 5670785 - DNA, 25 bp, Homo sapien
ccaccctgagccaacaacagtgaga

SEQ ID NO: 5670786 - DNA, 25 bp, Homo sapien
cactgttgttggctcagggtggagt

SEQ ID NO: 5670787 - DNA, 25 bp, Homo sapien
gtctcactgttgttggctcagggtg

SEQ ID NO: 5670788 - DNA, 25 bp, Homo sapien
actgttgttggctcagggtggagtg

SEQ ID NO: 5670789 - DNA, 25 bp, Homo sapien
ctcactgttgttggctcagggtgga

SEQ ID NO: 5670790 - DNA, 25 bp, Homo sapien
tctcactgttgttggctcagggtgg

SEQ ID NO: 5670791 - DNA, 25 bp, Homo sapien
ctgttgttggctcagggtggagtgc

SEQ ID NO: 5670792 - DNA, 25 bp, Homo sapien
cactccaccctgagccaacaacagt

SEQ ID NO: 5670793 - DNA, 25 bp, Homo sapien
caccctgagccaacaacagtgagac

SEQ ID NO: 5670794 - DNA, 25 bp, Homo sapien
tccaccctgagccaacaacagtgag

SEQ ID NO: 5670795 - DNA, 25 bp, Homo sapien
actccaccctgagccaacaacagtg

SEQ ID NO: 5670796 - DNA, 25 bp, Homo sapien
ccaccctgagccaacaacagtgaga

SEQ ID NO: 5670797 - DNA, 25 bp, Homo sapien
gcactccaccctgagccaacaacag

SEQ ID NO: 5670798 - DNA, 25 bp, Homo sapien
ccacccgcctcggcctctcaaagtg

SEQ ID NO: 5670799 - DNA, 25 bp, Homo sapien
tgatccacccgcctcggcctctcaa

SEQ ID NO: 5670800 - DNA, 25 bp, Homo sapien
gtgatccacccgcctcggcctctca

SEQ ID NO: 5670801 - DNA, 25 bp, Homo sapien
gatccacccgcctcggcctctcaaa

SEQ ID NO: 5670802 - DNA, 25 bp, Homo sapien
attataggcgtgagccaccacacat

SEQ ID NO: 5670803 - DNA, 25 bp, Homo sapien
ggtgatccacccgcctcggcctctc

SEQ ID NO: 5670804 - DNA, 25 bp, Homo sapien
cactttgagaggccgaggcgggtgg

SEQ ID NO: 5670805 - DNA, 25 bp, Homo sapien
atgtgtggtggctcacgcctataat

SEQ ID NO: 5670806 - DNA, 25 bp, Homo sapien
ttgagaggccgaggcgggtggatca

SEQ ID NO: 5670807 - DNA, 25 bp, Homo sapien
tgagaggccgaggcgggtggatcac

SEQ ID NO: 5670808 - DNA, 25 bp, Homo sapien
gagaggccgaggcgggtggatcacc

SEQ ID NO: 5670809 - DNA, 25 bp, Homo sapien
tttgagaggccgaggcgggtggatc

SEQ ID NO: 5670810 - DNA, 25 bp, Homo sapien
ttttcgacggagtcttactctgtcg

SEQ ID NO: 5670811 - DNA, 25 bp, Homo sapien
gcaatttcagcttactgcaaactct

SEQ ID NO: 5670812 - DNA, 25 bp, Homo sapien
ctatatgtttcttttctcttttctt

SEQ ID NO: 5670813 - DNA, 25 bp, Homo sapien
cctatatgtttcttttctcttttct

SEQ ID NO: 5670814 - DNA, 25 bp, Homo sapien
cttttcgacggagtcttactctgtc

SEQ ID NO: 5670815 - DNA, 25 bp, Homo sapien
tcttttcgacggagtcttactctgt

SEQ ID NO: 5670816 - DNA, 25 bp, Homo sapien
gacagagtaagactccgtcgaaaag

SEQ ID NO: 5670817 - DNA, 25 bp, Homo sapien
agagtttgcagtaagctgaaattgc

SEQ ID NO: 5670818 - DNA, 25 bp, Homo sapien
acagagtaagactccgtcgaaaaga

SEQ ID NO: 5670819 - DNA, 25 bp, Homo sapien
aagaaaagagaaaagaaacatatag

SEQ ID NO: 5670820 - DNA, 25 bp, Homo sapien
agaaaagagaaaagaaacatatagg

SEQ ID NO: 5670821 - DNA, 25 bp, Homo sapien
tgaaattgcaccactgcactccagc

SEQ ID NO: 5670822 - DNA, 25 bp, Homo sapien
agtcgaagtctcacagtgtcgcccg

SEQ ID NO: 5670823 - DNA, 25 bp, Homo sapien
gagtcgaagtctcacagtgtcgccc

SEQ ID NO: 5670824 - DNA, 25 bp, Homo sapien
tcgaagtctcacagtgtcgcccggg

SEQ ID NO: 5670825 - DNA, 25 bp, Homo sapien
tttgagtcgaagtctcacagtgtcg

SEQ ID NO: 5670826 - DNA, 25 bp, Homo sapien
tgagtcgaagtctcacagtgtcgcc

SEQ ID NO: 5670827 - DNA, 25 bp, Homo sapien
gtcgaagtctcacagtgtcgcccgg

SEQ ID NO: 5670828 - DNA, 25 bp, Homo sapien
ggcgacactgtgagacttcgactca

SEQ ID NO: 5670829 - DNA, 25 bp, Homo sapien
gacactgtgagacttcgactcaaaa

SEQ ID NO: 5670830 - DNA, 25 bp, Homo sapien
gcgacactgtgagacttcgactcaa

SEQ ID NO: 5670831 - DNA, 25 bp, Homo sapien
ccgggcgacactgtgagacttcgac

SEQ ID NO: 5670832 - DNA, 25 bp, Homo sapien
cccgggcgacactgtgagacttcga

SEQ ID NO: 5670833 - DNA, 25 bp, Homo sapien
cgggcgacactgtgagacttcgact

SEQ ID NO: 5670834 - DNA, 25 bp, Homo sapien
cacaatttctgtgcagtggtctttg

SEQ ID NO: 5670835 - DNA, 25 bp, Homo sapien
acaatttctgtgcagtggtctttgg

SEQ ID NO: 5670836 - DNA, 25 bp, Homo sapien
ctttggagagttctagttatcttcc

SEQ ID NO: 5670837 - DNA, 25 bp, Homo sapien
tctttggagagttctagttatcttc

SEQ ID NO: 5670838 - DNA, 25 bp, Homo sapien
agtggtctttggagagttctagtta

SEQ ID NO: 5670839 - DNA, 25 bp, Homo sapien
tggtctttggagagttctagttatc

SEQ ID NO: 5670840 - DNA, 25 bp, Homo sapien
ccaaagaccactgcacagaaattgt

SEQ ID NO: 5670841 - DNA, 25 bp, Homo sapien
ggaagataactagaactctccaaag

SEQ ID NO: 5670842 - DNA, 25 bp, Homo sapien
gataactagaactctccaaagacca

SEQ ID NO: 5670843 - DNA, 25 bp, Homo sapien
gaagataactagaactctccaaaga

SEQ ID NO: 5670844 - DNA, 25 bp, Homo sapien
taactagaactctccaaagaccact

SEQ ID NO: 5670845 - DNA, 25 bp, Homo sapien
caaagaccactgcacagaaattgtg

SEQ ID NO: 5670846 - DNA, 25 bp, Homo sapien
gccacttggcacttgatacgtcact

SEQ ID NO: 5670847 - DNA, 25 bp, Homo sapien
tatgtacagaccatgcagcctctct

SEQ ID NO: 5670848 - DNA, 25 bp, Homo sapien
ggcacttgatacgtcactgagtaca

SEQ ID NO: 5670849 - DNA, 25 bp, Homo sapien
ctgcttttgctgtatgccacttggc

SEQ ID NO: 5670850 - DNA, 25 bp, Homo sapien
taaaattatgtacagaccatgcagc

SEQ ID NO: 5670851 - DNA, 25 bp, Homo sapien
cctctcttgtctgtgcttagggcaa

SEQ ID NO: 5670852 - DNA, 25 bp, Homo sapien
gagaggctgcatggtctgtacataa

SEQ ID NO: 5670853 - DNA, 25 bp, Homo sapien
tgtactcagtgacgtatcaagtgcc

SEQ ID NO: 5670854 - DNA, 25 bp, Homo sapien
ccctaagcacagacaagagaggctg

SEQ ID NO: 5670855 - DNA, 25 bp, Homo sapien
gccaagtggcatacagcaaaagcag

SEQ ID NO: 5670856 - DNA, 25 bp, Homo sapien
agtgacgtatcaagtgccaagtggc

SEQ ID NO: 5670857 - DNA, 25 bp, Homo sapien
gcagtttgccctaagcacagacaag

SEQ ID NO: 5670858 - DNA, 25 bp, Homo sapien
atgatcatgcagactatgatcactc

SEQ ID NO: 5670859 - DNA, 25 bp, Homo sapien
gctatgatcatgcagactatgatca

SEQ ID NO: 5670860 - DNA, 25 bp, Homo sapien
tgatcatgcagactatgatcactct

SEQ ID NO: 5670861 - DNA, 25 bp, Homo sapien
ctatgatcatgcagactatgatcac

SEQ ID NO: 5670862 - DNA, 25 bp, Homo sapien
atcatgcagactatgatcactctag

SEQ ID NO: 5670863 - DNA, 25 bp, Homo sapien
gatcatgcagactatgatcactcta

SEQ ID NO: 5670864 - DNA, 25 bp, Homo sapien
tagagtgatcatagtctgcatgatc

SEQ ID NO: 5670865 - DNA, 25 bp, Homo sapien
agagtgatcatagtctgcatgatca

SEQ ID NO: 5670866 - DNA, 25 bp, Homo sapien
gagtgatcatagtctgcatgatcat

SEQ ID NO: 5670867 - DNA, 25 bp, Homo sapien
tgatcatagtctgcatgatcatagc

SEQ ID NO: 5670868 - DNA, 25 bp, Homo sapien
gtgatcatagtctgcatgatcatag

SEQ ID NO: 5670869 - DNA, 25 bp, Homo sapien
ctagagtgatcatagtctgcatgat

SEQ ID NO: 5670870 - DNA, 25 bp, Homo sapien
gctatgatcatgcagactatgatca

SEQ ID NO: 5670871 - DNA, 25 bp, Homo sapien
cacctacttgggaggttgcagcagg

SEQ ID NO: 5670872 - DNA, 25 bp, Homo sapien
tgatcatgcagactatgatcactct

SEQ ID NO: 5670873 - DNA, 25 bp, Homo sapien
ctatgatcatgcagactatgatcac

SEQ ID NO: 5670874 - DNA, 25 bp, Homo sapien
atcatgcagactatgatcactctag

SEQ ID NO: 5670875 - DNA, 25 bp, Homo sapien
gatcatgcagactatgatcactcta

SEQ ID NO: 5670876 - DNA, 25 bp, Homo sapien
cattctgaatgtattaaatggcact

SEQ ID NO: 5670877 - DNA, 25 bp, Homo sapien
ggtgatggttacacattctgaatgt

SEQ ID NO: 5670878 - DNA, 25 bp, Homo sapien
tattttgggtatagatagtggtgat

SEQ ID NO: 5670879 - DNA, 25 bp, Homo sapien
gaatgtattaaatggcactgaactg

SEQ ID NO: 5670880 - DNA, 25 bp, Homo sapien
tattaaatggcactgaactgtacac

SEQ ID NO: 5670881 - DNA, 25 bp, Homo sapien
tgcgggaatgaagaaaatattttgg

SEQ ID NO: 5670882 - DNA, 25 bp, Homo sapien
caaaatattttcttcattcccgcaa

SEQ ID NO: 5670883 - DNA, 25 bp, Homo sapien
catcaccactatctatacccaaaat

SEQ ID NO: 5670884 - DNA, 25 bp, Homo sapien
gttcagtgccatttaatacattcag

SEQ ID NO: 5670885 - DNA, 25 bp, Homo sapien
cagtgccatttaatacattcagaat

SEQ ID NO: 5670886 - DNA, 25 bp, Homo sapien
gtgtacagttcagtgccatttaata

SEQ ID NO: 5670887 - DNA, 25 bp, Homo sapien
acattcagaatgtgtaaccatcacc

SEQ ID NO: 5670888 - DNA, 25 bp, Homo sapien
agttgattcctgatataggtcataa

SEQ ID NO: 5670889 - DNA, 25 bp, Homo sapien
tactagttgattcctgatataggtc

SEQ ID NO: 5670890 - DNA, 25 bp, Homo sapien
gatttggccaactggctgtactagt

SEQ ID NO: 5670891 - DNA, 25 bp, Homo sapien
tataggtcataaagtcttgtcagcg

SEQ ID NO: 5670892 - DNA, 25 bp, Homo sapien
ggccaactggctgtactagttgatt

SEQ ID NO: 5670893 - DNA, 25 bp, Homo sapien
tggatttggccaactggctgtacta

SEQ ID NO: 5670894 - DNA, 25 bp, Homo sapien
tcaactagtacagccagttggccaa

SEQ ID NO: 5670895 - DNA, 25 bp, Homo sapien
cgctgacaagactttatgacctata

SEQ ID NO: 5670896 - DNA, 25 bp, Homo sapien
tagtacagccagttggccaaatcca

SEQ ID NO: 5670897 - DNA, 25 bp, Homo sapien
ttatgacctatatcaggaatcaact

SEQ ID NO: 5670898 - DNA, 25 bp, Homo sapien
aatcaactagtacagccagttggcc

SEQ ID NO: 5670899 - DNA, 25 bp, Homo sapien
cctatatcaggaatcaactagtaca

SEQ ID NO: 5670900 - DNA, 25 bp, Homo sapien
tcttgatattcttcagtgttggtag

SEQ ID NO: 5670901 - DNA, 25 bp, Homo sapien
gatatgtcgctaagttctctttaga

SEQ ID NO: 5670902 - DNA, 25 bp, Homo sapien
tgttggtagtgtatgccacttgcac

SEQ ID NO: 5670903 - DNA, 25 bp, Homo sapien
ttagacagagctagttgtctcccta

SEQ ID NO: 5670904 - DNA, 25 bp, Homo sapien
ttctctttagacagagctagttgtc

SEQ ID NO: 5670905 - DNA, 25 bp, Homo sapien
gccacttgcacttgatatgtcgcta

SEQ ID NO: 5670906 - DNA, 25 bp, Homo sapien
tctaaagagaacttagcgacatatc

SEQ ID NO: 5670907 - DNA, 25 bp, Homo sapien
tagcgacatatcaagtgcaagtggc

SEQ ID NO: 5670908 - DNA, 25 bp, Homo sapien
ctaccaacactgaagaatatcaaga

SEQ ID NO: 5670909 - DNA, 25 bp, Homo sapien
tagggagacaactagctctgtctaa

SEQ ID NO: 5670910 - DNA, 25 bp, Homo sapien
tgcaagtggcatacactaccaacac

SEQ ID NO: 5670911 - DNA, 25 bp, Homo sapien
gacaactagctctgtctaaagagaa

SEQ ID NO: 5670912 - DNA, 25 bp, Homo sapien
ttgacttccctcactagactgtaag

SEQ ID NO: 5670913 - DNA, 25 bp, Homo sapien
gttctgagccccactcaagaagtat

SEQ ID NO: 5670914 - DNA, 25 bp, Homo sapien
tcaagaagtatttcctcatttgact

SEQ ID NO: 5670915 - DNA, 25 bp, Homo sapien
gatttgggttctgagccccactcaa

SEQ ID NO: 5670916 - DNA, 25 bp, Homo sapien
gacttccctcactagactgtaagtt

SEQ ID NO: 5670917 - DNA, 25 bp, Homo sapien
gctcagatttgggttctgagcccca

SEQ ID NO: 5670918 - DNA, 25 bp, Homo sapien
cttacagtctagtgagggaagtcaa

SEQ ID NO: 5670919 - DNA, 25 bp, Homo sapien
aatacttcttgagtggggctcagaa

SEQ ID NO: 5670920 - DNA, 25 bp, Homo sapien
aacttacagtctagtgagggaagtc

SEQ ID NO: 5670921 - DNA, 25 bp, Homo sapien
gagtggggctcagaacccaaatctg

SEQ ID NO: 5670922 - DNA, 25 bp, Homo sapien
agtcaaatgaggaaatacttcttga

SEQ ID NO: 5670923 - DNA, 25 bp, Homo sapien
tcaaatgaggaaatacttcttgagt

SEQ ID NO: 5670924 - DNA, 25 bp, Homo sapien
gcacacttgagacatgccctctggg

SEQ ID NO: 5670925 - DNA, 25 bp, Homo sapien
tgtgtagaactaatgataataatca

SEQ ID NO: 5670926 - DNA, 25 bp, Homo sapien
agtcttctgtctcagcacacttgag

SEQ ID NO: 5670927 - DNA, 25 bp, Homo sapien
taataatcatttagcctgtgattcc

SEQ ID NO: 5670928 - DNA, 25 bp, Homo sapien
taatcatttagcctgtgattccttt

SEQ ID NO: 5670929 - DNA, 25 bp, Homo sapien
agcacacttgagacatgccctctgg

SEQ ID NO: 5670930 - DNA, 25 bp, Homo sapien
ccagagggcatgtctcaagtgtgct

SEQ ID NO: 5670931 - DNA, 25 bp, Homo sapien
tcacaggctaaatgattattatcat

SEQ ID NO: 5670932 - DNA, 25 bp, Homo sapien
ccccagagggcatgtctcaagtgtg

SEQ ID NO: 5670933 - DNA, 25 bp, Homo sapien
gattattatcattagttctacacat

SEQ ID NO: 5670934 - DNA, 25 bp, Homo sapien
ctcaagtgtgctgagacagaagact

SEQ ID NO: 5670935 - DNA, 25 bp, Homo sapien
aaaggaatcacaggctaaatgatta

SEQ ID NO: 5670936 - DNA, 25 bp, Homo sapien
atggtattagagggtaggtcctttg

SEQ ID NO: 5670937 - DNA, 25 bp, Homo sapien
agaaccctaatgcatgggattagtg

SEQ ID NO: 5670938 - DNA, 25 bp, Homo sapien
ggtctgagggtagaaccctaatgca

SEQ ID NO: 5670939 - DNA, 25 bp, Homo sapien
tgatggtattagagggtaggtcctt

SEQ ID NO: 5670940 - DNA, 25 bp, Homo sapien
taggtctgagggtagaaccctaatg

SEQ ID NO: 5670941 - DNA, 25 bp, Homo sapien
aggtctgagggtagaaccctaatgc

SEQ ID NO: 5670942 - DNA, 25 bp, Homo sapien
cattagggttctaccctcagaccta

SEQ ID NO: 5670943 - DNA, 25 bp, Homo sapien
caaaggacctaccctctaataccat

SEQ ID NO: 5670944 - DNA, 25 bp, Homo sapien
aaggacctaccctctaataccatca

SEQ ID NO: 5670945 - DNA, 25 bp, Homo sapien
cactaatcccatgcattagggttct

SEQ ID NO: 5670946 - DNA, 25 bp, Homo sapien
gcattagggttctaccctcagacct

SEQ ID NO: 5670947 - DNA, 25 bp, Homo sapien
tgcattagggttctaccctcagacc

SEQ ID NO: 5670948 - DNA, 25 bp, Homo sapien
tgtcttagggtcagtaaccatattt

SEQ ID NO: 5670949 - DNA, 25 bp, Homo sapien
gtgtcttagggtcagtaaccatatt

SEQ ID NO: 5670950 - DNA, 25 bp, Homo sapien
tgtgtcttagggtcagtaaccatat

SEQ ID NO: 5670951 - DNA, 25 bp, Homo sapien
tgggtttgtgtcttagggtcagtaa

SEQ ID NO: 5670952 - DNA, 25 bp, Homo sapien
ttgtgtcttagggtcagtaaccata

SEQ ID NO: 5670953 - DNA, 25 bp, Homo sapien
gtttgtgtcttagggtcagtaacca

SEQ ID NO: 5670954 - DNA, 25 bp, Homo sapien
aaatatggttactgaccctaagaca

SEQ ID NO: 5670955 - DNA, 25 bp, Homo sapien
aatatggttactgaccctaagacac

SEQ ID NO: 5670956 - DNA, 25 bp, Homo sapien
tatggttactgaccctaagacacaa

SEQ ID NO: 5670957 - DNA, 25 bp, Homo sapien
tggttactgaccctaagacacaaac

SEQ ID NO: 5670958 - DNA, 25 bp, Homo sapien
ttactgaccctaagacacaaaccca

SEQ ID NO: 5670959 - DNA, 25 bp, Homo sapien
atatggttactgaccctaagacaca

SEQ ID NO: 5670960 - DNA, 25 bp, Homo sapien
accgtggtctcgatcatcctgacct

SEQ ID NO: 5670961 - DNA, 25 bp, Homo sapien
agacttcatgagttttttgtatttt

SEQ ID NO: 5670962 - DNA, 25 bp, Homo sapien
tcaccgtggtctcgatcatcctgac

SEQ ID NO: 5670963 - DNA, 25 bp, Homo sapien
caccgtggtctcgatcatcctgacc

SEQ ID NO: 5670964 - DNA, 25 bp, Homo sapien
tttcaccgtggtctcgatcatcctg

SEQ ID NO: 5670965 - DNA, 25 bp, Homo sapien
ttcaccgtggtctcgatcatcctga

SEQ ID NO: 5670966 - DNA, 25 bp, Homo sapien
aaaatacaaaaaactcatgaagtct

SEQ ID NO: 5670967 - DNA, 25 bp, Homo sapien
gtcaggatgatcgagaccacggtga

SEQ ID NO: 5670968 - DNA, 25 bp, Homo sapien
caggatgatcgagaccacggtgaaa

SEQ ID NO: 5670969 - DNA, 25 bp, Homo sapien
aggtcaggatgatcgagaccacggt

SEQ ID NO: 5670970 - DNA, 25 bp, Homo sapien
tcaggatgatcgagaccacggtgaa

SEQ ID NO: 5670971 - DNA, 25 bp, Homo sapien
ggtcaggatgatcgagaccacggtg

SEQ ID NO: 5670972 - DNA, 25 bp, Homo sapien
ttgctgagagtgattgaacttgata

SEQ ID NO: 5670973 - DNA, 25 bp, Homo sapien
cattgctgagagtgattgaacttga

SEQ ID NO: 5670974 - DNA, 25 bp, Homo sapien
aagtttacaattgtattcagtgctt

SEQ ID NO: 5670975 - DNA, 25 bp, Homo sapien
gaattagagtcatgtaaagtttaca

SEQ ID NO: 5670976 - DNA, 25 bp, Homo sapien
tttcattgctgagagtgattgaact

SEQ ID NO: 5670977 - DNA, 25 bp, Homo sapien
gagtggtggaattagagtcatgtaa

SEQ ID NO: 5670978 - DNA, 25 bp, Homo sapien
tacatgactctaattccaccactct

SEQ ID NO: 5670979 - DNA, 25 bp, Homo sapien
tatcaagttcaatcactctcagcaa

SEQ ID NO: 5670980 - DNA, 25 bp, Homo sapien
gtaaactttacatgactctaattcc

SEQ ID NO: 5670981 - DNA, 25 bp, Homo sapien
aagcactgaatacaattgtaaactt

SEQ ID NO: 5670982 - DNA, 25 bp, Homo sapien
caagttcaatcactctcagcaatga

SEQ ID NO: 5670983 - DNA, 25 bp, Homo sapien
tacaattgtaaactttacatgactc

SEQ ID NO: 5670984 - DNA, 25 bp, Homo sapien
ttggtgagacagacaatttgagaag

SEQ ID NO: 5670985 - DNA, 25 bp, Homo sapien
taacactggtggaaaggtaattcaa

SEQ ID NO: 5670986 - DNA, 25 bp, Homo sapien
ttgaattacctttccaccagtgtta

SEQ ID NO: 5670987 - DNA, 25 bp, Homo sapien
cttctcaaattgtctgtctcaccaa

SEQ ID NO: 5670988 - DNA, 25 bp, Homo sapien
ttggtgagacagacaatttgagaag

SEQ ID NO: 5670989 - DNA, 25 bp, Homo sapien
gttgaagccagtttcacttctgaaa

SEQ ID NO: 5670990 - DNA, 25 bp, Homo sapien
aattcaaggtaaaagttgaagccag

SEQ ID NO: 5670991 - DNA, 25 bp, Homo sapien
tattttactacttttggtgagacag

SEQ ID NO: 5670992 - DNA, 25 bp, Homo sapien
taacactggtggaaaggtaattcaa

SEQ ID NO: 5670993 - DNA, 25 bp, Homo sapien
cactggtggaaaggtaattcaaggt

SEQ ID NO: 5670994 - DNA, 25 bp, Homo sapien
ttgaattacctttccaccagtgtta

SEQ ID NO: 5670995 - DNA, 25 bp, Homo sapien
tttcagaagtgaaactggcttcaac

SEQ ID NO: 5670996 - DNA, 25 bp, Homo sapien
accttgaattacctttccaccagtg

SEQ ID NO: 5670997 - DNA, 25 bp, Homo sapien
actggcttcaacttttaccttgaat

SEQ ID NO: 5670998 - DNA, 25 bp, Homo sapien
cttctcaaattgtctgtctcaccaa

SEQ ID NO: 5670999 - DNA, 25 bp, Homo sapien
tgtctcaccaaaagtagtaaaataa

SEQ ID NO: 5671000 - DNA, 25 bp, Homo sapien
gaaaaggtaggaatcaagactgaac

SEQ ID NO: 5671001 - DNA, 25 bp, Homo sapien
taggaatcaagactgaactgataaa

SEQ ID NO: 5671002 - DNA, 25 bp, Homo sapien
ctggaatgattgagtctgtcaggga

SEQ ID NO: 5671003 - DNA, 25 bp, Homo sapien
tcagggaataatctaggagctcaaa

SEQ ID NO: 5671004 - DNA, 25 bp, Homo sapien
aaactggaatgattgagtctgtcag

SEQ ID NO: 5671005 - DNA, 25 bp, Homo sapien
gggaataatctaggagctcaaagaa

SEQ ID NO: 5671006 - DNA, 25 bp, Homo sapien
tatcagttcagtcttgattcctacc

SEQ ID NO: 5671007 - DNA, 25 bp, Homo sapien
ttgagctcctagattattccctgac

SEQ ID NO: 5671008 - DNA, 25 bp, Homo sapien
ttctttgagctcctagattattccc

SEQ ID NO: 5671009 - DNA, 25 bp, Homo sapien
ctgacagactcaatcattccagttt

SEQ ID NO: 5671010 - DNA, 25 bp, Homo sapien
tcagtcttgattcctaccttttctt

SEQ ID NO: 5671011 - DNA, 25 bp, Homo sapien
tccctgacagactcaatcattccag

SEQ ID NO: 5671012 - DNA, 25 bp, Homo sapien
ccagggtggagtgcaatctcggctc

SEQ ID NO: 5671013 - DNA, 25 bp, Homo sapien
ttgttttgagacggggtcttgctct

SEQ ID NO: 5671014 - DNA, 25 bp, Homo sapien
tgttttgagacggggtcttgctctg

SEQ ID NO: 5671015 - DNA, 25 bp, Homo sapien
tttgttttgagacggggtcttgctc

SEQ ID NO: 5671016 - DNA, 25 bp, Homo sapien
tgtttgttttgagacggggtcttgc

SEQ ID NO: 5671017 - DNA, 25 bp, Homo sapien
ttgagacggggtcttgctctgttgc

SEQ ID NO: 5671018 - DNA, 25 bp, Homo sapien
gagcaagaccccgtctcaaaacaaa

SEQ ID NO: 5671019 - DNA, 25 bp, Homo sapien
cagagcaagaccccgtctcaaaaca

SEQ ID NO: 5671020 - DNA, 25 bp, Homo sapien
gcaagaccccgtctcaaaacaaaca

SEQ ID NO: 5671021 - DNA, 25 bp, Homo sapien
gcaacagagcaagaccccgtctcaa

SEQ ID NO: 5671022 - DNA, 25 bp, Homo sapien
gagccgagattgcactccaccctgg

SEQ ID NO: 5671023 - DNA, 25 bp, Homo sapien
agagcaagaccccgtctcaaaacaa

SEQ ID NO: 5671024 - DNA, 25 bp, Homo sapien
cacacacatatatgtattttttttt

SEQ ID NO: 5671025 - DNA, 25 bp, Homo sapien
gagcgagactctgtctcaaaaaaga

SEQ ID NO: 5671026 - DNA, 25 bp, Homo sapien
cgagactctgtctcaaaaaagaaaa

SEQ ID NO: 5671027 - DNA, 25 bp, Homo sapien
aaaaaaaaaaatacatatatgtgtg

SEQ ID NO: 5671028 - DNA, 25 bp, Homo sapien
gagactctgtctcaaaaaagaaaaa

SEQ ID NO: 5671029 - DNA, 25 bp, Homo sapien
agcgagactctgtctcaaaaaagaa

SEQ ID NO: 5671030 - DNA, 25 bp, Homo sapien
gcgagactctgtctcaaaaaagaaa

SEQ ID NO: 5671031 - DNA, 25 bp, Homo sapien
ttgcagtgacgcagtgacgtggtca

SEQ ID NO: 5671032 - DNA, 25 bp, Homo sapien
agtgacgtggtcacggctcactaca

SEQ ID NO: 5671033 - DNA, 25 bp, Homo sapien
tctagactgaagttgcagtgacgca

SEQ ID NO: 5671034 - DNA, 25 bp, Homo sapien
cttgctctagactgaagttgcagtg

SEQ ID NO: 5671035 - DNA, 25 bp, Homo sapien
ctgaagttgcagtgacgcagtgacg

SEQ ID NO: 5671036 - DNA, 25 bp, Homo sapien
gacgcagtgacgtggtcacggctca

SEQ ID NO: 5671037 - DNA, 25 bp, Homo sapien
tgtagtgagccgtgaccacgtcact

SEQ ID NO: 5671038 - DNA, 25 bp, Homo sapien
tgagccgtgaccacgtcactgcgtc

SEQ ID NO: 5671039 - DNA, 25 bp, Homo sapien
cgtcactgcgtcactgcaacttcag

SEQ ID NO: 5671040 - DNA, 25 bp, Homo sapien
gcgtcactgcaacttcagtctagag

SEQ ID NO: 5671041 - DNA, 25 bp, Homo sapien
cactgcaacttcagtctagagcaag

SEQ ID NO: 5671042 - DNA, 25 bp, Homo sapien
tgaccacgtcactgcgtcactgcaa

SEQ ID NO: 5671043 - DNA, 25 bp, Homo sapien
agggcattggcatgatctcagctca

SEQ ID NO: 5671044 - DNA, 25 bp, Homo sapien
tgctttgtttttttgagacagactc

SEQ ID NO: 5671045 - DNA, 25 bp, Homo sapien
cactcaggctggagggcattggcat

SEQ ID NO: 5671046 - DNA, 25 bp, Homo sapien
actcaggctggagggcattggcatg

SEQ ID NO: 5671047 - DNA, 25 bp, Homo sapien
ctgcaaactctgcctcccagttcaa

SEQ ID NO: 5671048 - DNA, 25 bp, Homo sapien
tcaggctggagggcattggcatgat

SEQ ID NO: 5671049 - DNA, 25 bp, Homo sapien
tgagctgagatcatgccaatgccct

SEQ ID NO: 5671050 - DNA, 25 bp, Homo sapien
catgccaatgccctccagcctgagt

SEQ ID NO: 5671051 - DNA, 25 bp, Homo sapien
atgccaatgccctccagcctgagtg

SEQ ID NO: 5671052 - DNA, 25 bp, Homo sapien
ttgaactgggaggcagagtttgcag

SEQ ID NO: 5671053 - DNA, 25 bp, Homo sapien
atcatgccaatgccctccagcctga

SEQ ID NO: 5671054 - DNA, 25 bp, Homo sapien
gagtctgtctcaaaaaaacaaagca

SEQ ID NO: 5671055 - DNA, 25 bp, Homo sapien
attacaaattttagtcaatggaaat

SEQ ID NO: 5671056 - DNA, 25 bp, Homo sapien
gctataattacaaattttagtcaat

SEQ ID NO: 5671057 - DNA, 25 bp, Homo sapien
taattacaaattttagtcaatggaa

SEQ ID NO: 5671058 - DNA, 25 bp, Homo sapien
ataattacaaattttagtcaatgga

SEQ ID NO: 5671059 - DNA, 25 bp, Homo sapien
tataattacaaattttagtcaatgg

SEQ ID NO: 5671060 - DNA, 25 bp, Homo sapien
ctataattacaaattttagtcaatg

SEQ ID NO: 5671061 - DNA, 25 bp, Homo sapien
ccattgactaaaatttgtaattata

SEQ ID NO: 5671062 - DNA, 25 bp, Homo sapien
attgactaaaatttgtaattatagc

SEQ ID NO: 5671063 - DNA, 25 bp, Homo sapien
ttccattgactaaaatttgtaatta

SEQ ID NO: 5671064 - DNA, 25 bp, Homo sapien
cattgactaaaatttgtaattatag

SEQ ID NO: 5671065 - DNA, 25 bp, Homo sapien
tccattgactaaaatttgtaattat

SEQ ID NO: 5671066 - DNA, 25 bp, Homo sapien
atttccattgactaaaatttgtaat

SEQ ID NO: 5671067 - DNA, 25 bp, Homo sapien
ggatgacaaaaatcacacagctata

SEQ ID NO: 5671068 - DNA, 25 bp, Homo sapien
gtccatatgcagcttacagtctagt

SEQ ID NO: 5671069 - DNA, 25 bp, Homo sapien
cagtctagtgggaggatgacaaaaa

SEQ ID NO: 5671070 - DNA, 25 bp, Homo sapien
taattacaaattttagtcaatggaa

SEQ ID NO: 5671071 - DNA, 25 bp, Homo sapien
gaccaacctccatgtccatatgcag

SEQ ID NO: 5671072 - DNA, 25 bp, Homo sapien
aaactgaccaacctccatgtccata

SEQ ID NO: 5671073 - DNA, 25 bp, Homo sapien
gactgtaagctgcatatggacatgg

SEQ ID NO: 5671074 - DNA, 25 bp, Homo sapien
tatagctgtgtgatttttgtcatcc

SEQ ID NO: 5671075 - DNA, 25 bp, Homo sapien
gcaatttccattgactaaaatttgt

SEQ ID NO: 5671076 - DNA, 25 bp, Homo sapien
ttttgtcatcctcccactagactgt

SEQ ID NO: 5671077 - DNA, 25 bp, Homo sapien
actagactgtaagctgcatatggac

SEQ ID NO: 5671078 - DNA, 25 bp, Homo sapien
catatggacatggaggttggtcagt

SEQ ID NO: 5671079 - DNA, 25 bp, Homo sapien
gcttgagtgcatgtgttccagacca

SEQ ID NO: 5671080 - DNA, 25 bp, Homo sapien
ttgagtgcatgtgttccagaccagc

SEQ ID NO: 5671081 - DNA, 25 bp, Homo sapien
cttgagtgcatgtgttccagaccag

SEQ ID NO: 5671082 - DNA, 25 bp, Homo sapien
tcgcttgagtgcatgtgttccagac

SEQ ID NO: 5671083 - DNA, 25 bp, Homo sapien
atcgcttgagtgcatgtgttccaga

SEQ ID NO: 5671084 - DNA, 25 bp, Homo sapien
cgcttgagtgcatgtgttccagacc

SEQ ID NO: 5671085 - DNA, 25 bp, Homo sapien
tctggaacacatgcactcaagcgat

SEQ ID NO: 5671086 - DNA, 25 bp, Homo sapien
ctggtctggaacacatgcactcaag

SEQ ID NO: 5671087 - DNA, 25 bp, Homo sapien
ggtctggaacacatgcactcaagcg

SEQ ID NO: 5671088 - DNA, 25 bp, Homo sapien
gctggtctggaacacatgcactcaa

SEQ ID NO: 5671089 - DNA, 25 bp, Homo sapien
tggtctggaacacatgcactcaagc

SEQ ID NO: 5671090 - DNA, 25 bp, Homo sapien
gtctggaacacatgcactcaagcga

SEQ ID NO: 5671091 - DNA, 25 bp, Homo sapien
gagtcttgccagctatgttttcctg

SEQ ID NO: 5671092 - DNA, 25 bp, Homo sapien
ttgagtcttgccagctatgttttcc

SEQ ID NO: 5671093 - DNA, 25 bp, Homo sapien
tatgttttcctgtgcctaagtcaaa

SEQ ID NO: 5671094 - DNA, 25 bp, Homo sapien
gccagctatgttttcctgtgcctaa

SEQ ID NO: 5671095 - DNA, 25 bp, Homo sapien
ttatagaaagtgcttgagtcttgcc

SEQ ID NO: 5671096 - DNA, 25 bp, Homo sapien
gctatgttttcctgtgcctaagtca

SEQ ID NO: 5671097 - DNA, 25 bp, Homo sapien
caggaaaacatagctggcaagactc

SEQ ID NO: 5671098 - DNA, 25 bp, Homo sapien
ttaggcacaggaaaacatagctggc

SEQ ID NO: 5671099 - DNA, 25 bp, Homo sapien
gaaaacatagctggcaagactcaag

SEQ ID NO: 5671100 - DNA, 25 bp, Homo sapien
ttttgacttaggcacaggaaaacat

SEQ ID NO: 5671101 - DNA, 25 bp, Homo sapien
ggcaagactcaagcactttctataa

SEQ ID NO: 5671102 - DNA, 25 bp, Homo sapien
tgacttaggcacaggaaaacatagc

SEQ ID NO: 5671103 - DNA, 25 bp, Homo sapien
attttagatccttgcagtaagatga

SEQ ID NO: 5671104 - DNA, 25 bp, Homo sapien
ggcagcattttagatccttgcagta

SEQ ID NO: 5671105 - DNA, 25 bp, Homo sapien
agtaactatgctattaatgtgagtg

SEQ ID NO: 5671106 - DNA, 25 bp, Homo sapien
agcattttagatccttgcagtaaga

SEQ ID NO: 5671107 - DNA, 25 bp, Homo sapien
ttcaagcaattctgacagtcagttt

SEQ ID NO: 5671108 - DNA, 25 bp, Homo sapien
tgagtggcagcattttagatccttg

SEQ ID NO: 5671109 - DNA, 25 bp, Homo sapien
tactgcaaggatctaaaatgctgcc

SEQ ID NO: 5671110 - DNA, 25 bp, Homo sapien
caaggatctaaaatgctgccactca

SEQ ID NO: 5671111 - DNA, 25 bp, Homo sapien
aaactgactgtcagaattgcttgaa

SEQ ID NO: 5671112 - DNA, 25 bp, Homo sapien
cactcacattaatagcatagttact

SEQ ID NO: 5671113 - DNA, 25 bp, Homo sapien
tcatcttactgcaaggatctaaaat

SEQ ID NO: 5671114 - DNA, 25 bp, Homo sapien
tcttactgcaaggatctaaaatgct

SEQ ID NO: 5671115 - DNA, 25 bp, Homo sapien
ggaatagatatcttccacactgcct

SEQ ID NO: 5671116 - DNA, 25 bp, Homo sapien
aggcagtgtggaagatatctattcc

SEQ ID NO: 5671117 - DNA, 25 bp, Homo sapien
catttgagtaaataaaattgcacgt

SEQ ID NO: 5671118 - DNA, 25 bp, Homo sapien
ggaatagatatcttccacactgcct

SEQ ID NO: 5671119 - DNA, 25 bp, Homo sapien
gccttatggcttcttggtacacatt

SEQ ID NO: 5671120 - DNA, 25 bp, Homo sapien
tgcacgtaatttgttttggaataga

SEQ ID NO: 5671121 - DNA, 25 bp, Homo sapien
gatatcttccacactgccttatggc

SEQ ID NO: 5671122 - DNA, 25 bp, Homo sapien
tggcttcttggtacacattttattt

SEQ ID NO: 5671123 - DNA, 25 bp, Homo sapien
aatgtgtaccaagaagccataaggc

SEQ ID NO: 5671124 - DNA, 25 bp, Homo sapien
tctattccaaaacaaattacgtgca

SEQ ID NO: 5671125 - DNA, 25 bp, Homo sapien
aggcagtgtggaagatatctattcc

SEQ ID NO: 5671126 - DNA, 25 bp, Homo sapien
taccaagaagccataaggcagtgtg

SEQ ID NO: 5671127 - DNA, 25 bp, Homo sapien
aaataaaatgtgtaccaagaagcca

SEQ ID NO: 5671128 - DNA, 25 bp, Homo sapien
acgtgcaattttatttactcaaatg

SEQ ID NO: 5671129 - DNA, 25 bp, Homo sapien
ccacctccctggttcaagcgattct

SEQ ID NO: 5671130 - DNA, 25 bp, Homo sapien
cacctccctggttcaagcgattctc

SEQ ID NO: 5671131 - DNA, 25 bp, Homo sapien
acctccctggttcaagcgattctcc

SEQ ID NO: 5671132 - DNA, 25 bp, Homo sapien
tggtgcaatctcagctcactgcaac

SEQ ID NO: 5671133 - DNA, 25 bp, Homo sapien
tccacctccctggttcaagcgattc

SEQ ID NO: 5671134 - DNA, 25 bp, Homo sapien
ctccacctccctggttcaagcgatt

SEQ ID NO: 5671135 - DNA, 25 bp, Homo sapien
gagaatcgcttgaaccagggaggtg

SEQ ID NO: 5671136 - DNA, 25 bp, Homo sapien
aatcgcttgaaccagggaggtggag

SEQ ID NO: 5671137 - DNA, 25 bp, Homo sapien
gttgcagtgagctgagattgcacca

SEQ ID NO: 5671138 - DNA, 25 bp, Homo sapien
gaatcgcttgaaccagggaggtgga

SEQ ID NO: 5671139 - DNA, 25 bp, Homo sapien
ggagaatcgcttgaaccagggaggt

SEQ ID NO: 5671140 - DNA, 25 bp, Homo sapien
agaatcgcttgaaccagggaggtgg

SEQ ID NO: 5671141 - DNA, 25 bp, Homo sapien
agtctggtctcgaaccagtcctggc

SEQ ID NO: 5671142 - DNA, 25 bp, Homo sapien
gccaggactggttcgagaccagact

SEQ ID NO: 5671143 - DNA, 25 bp, Homo sapien
agtctggtctcgaaccagtcctggc

SEQ ID NO: 5671144 - DNA, 25 bp, Homo sapien
ctcgaaccagtcctggcctcaagtg

SEQ ID NO: 5671145 - DNA, 25 bp, Homo sapien
tggtctcgaaccagtcctggcctca

SEQ ID NO: 5671146 - DNA, 25 bp, Homo sapien
gcccagccaatttttgtgtgtttag

SEQ ID NO: 5671147 - DNA, 25 bp, Homo sapien
cgcccagccaatttttgtgtgttta

SEQ ID NO: 5671148 - DNA, 25 bp, Homo sapien
acgcccagccaatttttgtgtgttt

SEQ ID NO: 5671149 - DNA, 25 bp, Homo sapien
ctaaacacacaaaaattggctgggc

SEQ ID NO: 5671150 - DNA, 25 bp, Homo sapien
cacttgaggccaggactggttcgag

SEQ ID NO: 5671151 - DNA, 25 bp, Homo sapien
taaacacacaaaaattggctgggcg

SEQ ID NO: 5671152 - DNA, 25 bp, Homo sapien
gccaggactggttcgagaccagact

SEQ ID NO: 5671153 - DNA, 25 bp, Homo sapien
tgaggccaggactggttcgagacca

SEQ ID NO: 5671154 - DNA, 25 bp, Homo sapien
aaacacacaaaaattggctgggcgt

SEQ ID NO: 5671155 - DNA, 25 bp, Homo sapien
acctgggtctgtacttgactcatcc

SEQ ID NO: 5671156 - DNA, 25 bp, Homo sapien
cctgggtctgtacttgactcatcca

SEQ ID NO: 5671157 - DNA, 25 bp, Homo sapien
tgggtctgtacttgactcatccagc

SEQ ID NO: 5671158 - DNA, 25 bp, Homo sapien
gacctgggtctgtacttgactcatc

SEQ ID NO: 5671159 - DNA, 25 bp, Homo sapien
ggtctgtacttgactcatccagctg

SEQ ID NO: 5671160 - DNA, 25 bp, Homo sapien
gggtctgtacttgactcatccagct

SEQ ID NO: 5671161 - DNA, 25 bp, Homo sapien
gatgagtcaagtacagacccaggtc

SEQ ID NO: 5671162 - DNA, 25 bp, Homo sapien
agctggatgagtcaagtacagaccc

SEQ ID NO: 5671163 - DNA, 25 bp, Homo sapien
tggatgagtcaagtacagacccagg

SEQ ID NO: 5671164 - DNA, 25 bp, Homo sapien
gctggatgagtcaagtacagaccca

SEQ ID NO: 5671165 - DNA, 25 bp, Homo sapien
cagctggatgagtcaagtacagacc

SEQ ID NO: 5671166 - DNA, 25 bp, Homo sapien
ggatgagtcaagtacagacccaggt

SEQ ID NO: 5671167 - DNA, 25 bp, Homo sapien
cagacatttctcatatgcagtgggc

SEQ ID NO: 5671168 - DNA, 25 bp, Homo sapien
taagggcgatgaatcctaggccagg

SEQ ID NO: 5671169 - DNA, 25 bp, Homo sapien
tggaaccagatcattaagggcgatg

SEQ ID NO: 5671170 - DNA, 25 bp, Homo sapien
gagttgaggtaaactggaaccagat

SEQ ID NO: 5671171 - DNA, 25 bp, Homo sapien
ctggagttgaggtaaactggaacca

SEQ ID NO: 5671172 - DNA, 25 bp, Homo sapien
cattaagggcgatgaatcctaggcc

SEQ ID NO: 5671173 - DNA, 25 bp, Homo sapien
tggttccagtttacctcaactccag

SEQ ID NO: 5671174 - DNA, 25 bp, Homo sapien
catcgcccttaatgatctggttcca

SEQ ID NO: 5671175 - DNA, 25 bp, Homo sapien
cctggcctaggattcatcgccctta

SEQ ID NO: 5671176 - DNA, 25 bp, Homo sapien
gcccactgcatatgagaaatgtctg

SEQ ID NO: 5671177 - DNA, 25 bp, Homo sapien
gcctaggattcatcgcccttaatga

SEQ ID NO: 5671178 - DNA, 25 bp, Homo sapien
ggattcatcgcccttaatgatctgg

SEQ ID NO: 5671179 - DNA, 25 bp, Homo sapien
tgcaggctagattcatacaggcaca

SEQ ID NO: 5671180 - DNA, 25 bp, Homo sapien
tctgtgcaggctagattcatacagg

SEQ ID NO: 5671181 - DNA, 25 bp, Homo sapien
gcaggctagattcatacaggcacag

SEQ ID NO: 5671182 - DNA, 25 bp, Homo sapien
tgagtagagcgttaacttgggagaa

SEQ ID NO: 5671183 - DNA, 25 bp, Homo sapien
gctgtgtgagtagagcgttaacttg

SEQ ID NO: 5671184 - DNA, 25 bp, Homo sapien
tgtgcaggctagattcatacaggca

SEQ ID NO: 5671185 - DNA, 25 bp, Homo sapien
cctgtatgaatctagcctgcacaga

SEQ ID NO: 5671186 - DNA, 25 bp, Homo sapien
tgcctgtatgaatctagcctgcaca

SEQ ID NO: 5671187 - DNA, 25 bp, Homo sapien
ctgtgcctgtatgaatctagcctgc

SEQ ID NO: 5671188 - DNA, 25 bp, Homo sapien
caagttaacgctctactcacacagc

SEQ ID NO: 5671189 - DNA, 25 bp, Homo sapien
tgtgcctgtatgaatctagcctgca

SEQ ID NO: 5671190 - DNA, 25 bp, Homo sapien
ttctcccaagttaacgctctactca

SEQ ID NO: 5671191 - DNA, 25 bp, Homo sapien
gatagaaattacaagagaccagctg

SEQ ID NO: 5671192 - DNA, 25 bp, Homo sapien
tgaaggcctgagttagaattgtggc

SEQ ID NO: 5671193 - DNA, 25 bp, Homo sapien
tgtgatagaaattacaagagaccag

SEQ ID NO: 5671194 - DNA, 25 bp, Homo sapien
gaattgtggcagtcagataacaaag

SEQ ID NO: 5671195 - DNA, 25 bp, Homo sapien
aattgtggcagtcagataacaaagg

SEQ ID NO: 5671196 - DNA, 25 bp, Homo sapien
aaggcctgagttagaattgtggcag

SEQ ID NO: 5671197 - DNA, 25 bp, Homo sapien
cctttgttatctgactgccacaatt

SEQ ID NO: 5671198 - DNA, 25 bp, Homo sapien
ctgccacaattctaactcaggcctt

SEQ ID NO: 5671199 - DNA, 25 bp, Homo sapien
ctttgttatctgactgccacaattc

SEQ ID NO: 5671200 - DNA, 25 bp, Homo sapien
gccacaattctaactcaggccttca

SEQ ID NO: 5671201 - DNA, 25 bp, Homo sapien
gctggtctcttgtaatttctatcac

SEQ ID NO: 5671202 - DNA, 25 bp, Homo sapien
cagctggtctcttgtaatttctatc

SEQ ID NO: 5671203 - DNA, 25 bp, Homo sapien
tccatctctaaaagctcagtttggt

SEQ ID NO: 5671204 - DNA, 25 bp, Homo sapien
ctaaaagctcagtttggtgatatgc

SEQ ID NO: 5671205 - DNA, 25 bp, Homo sapien
taaaagctcagtttggtgatatgca

SEQ ID NO: 5671206 - DNA, 25 bp, Homo sapien
catctctaaaagctcagtttggtga

SEQ ID NO: 5671207 - DNA, 25 bp, Homo sapien
ctctaaaagctcagtttggtgatat

SEQ ID NO: 5671208 - DNA, 25 bp, Homo sapien
aaaagctcagtttggtgatatgcag

SEQ ID NO: 5671209 - DNA, 25 bp, Homo sapien
tcaccaaactgagcttttagagatg

SEQ ID NO: 5671210 - DNA, 25 bp, Homo sapien
ccaaactgagcttttagagatggag

SEQ ID NO: 5671211 - DNA, 25 bp, Homo sapien
atatcaccaaactgagcttttagag

SEQ ID NO: 5671212 - DNA, 25 bp, Homo sapien
gcatatcaccaaactgagcttttag

SEQ ID NO: 5671213 - DNA, 25 bp, Homo sapien
ctgcatatcaccaaactgagctttt

SEQ ID NO: 5671214 - DNA, 25 bp, Homo sapien
tgcatatcaccaaactgagctttta

SEQ ID NO: 5671215 - DNA, 25 bp, Homo sapien
ggatcgtttgaacatgggaggtcaa

SEQ ID NO: 5671216 - DNA, 25 bp, Homo sapien
cgtttgaacatgggaggtcaaagct

SEQ ID NO: 5671217 - DNA, 25 bp, Homo sapien
atcgtttgaacatgggaggtcaaag

SEQ ID NO: 5671218 - DNA, 25 bp, Homo sapien
gatcgtttgaacatgggaggtcaaa

SEQ ID NO: 5671219 - DNA, 25 bp, Homo sapien
tgacagagcaaaattgtctctaaaa

SEQ ID NO: 5671220 - DNA, 25 bp, Homo sapien
tcgtttgaacatgggaggtcaaagc

SEQ ID NO: 5671221 - DNA, 25 bp, Homo sapien
agctttgacctcccatgttcaaacg

SEQ ID NO: 5671222 - DNA, 25 bp, Homo sapien
tttgacctcccatgttcaaacgatc

SEQ ID NO: 5671223 - DNA, 25 bp, Homo sapien
ttgacctcccatgttcaaacgatcc

SEQ ID NO: 5671224 - DNA, 25 bp, Homo sapien
ttttagagacaattttgctctgtca

SEQ ID NO: 5671225 - DNA, 25 bp, Homo sapien
gctttgacctcccatgttcaaacga

SEQ ID NO: 5671226 - DNA, 25 bp, Homo sapien
ctttgacctcccatgttcaaacgat

SEQ ID NO: 5671227 - DNA, 25 bp, Homo sapien
tccagggacacatgttactgttggg

SEQ ID NO: 5671228 - DNA, 25 bp, Homo sapien
aatccagggacacatgttactgttg

SEQ ID NO: 5671229 - DNA, 25 bp, Homo sapien
cagggacacatgttactgttgggaa

SEQ ID NO: 5671230 - DNA, 25 bp, Homo sapien
ggacacatgttactgttgggaaggt

SEQ ID NO: 5671231 - DNA, 25 bp, Homo sapien
ctaaaagtttgtccccagtcttctg

SEQ ID NO: 5671232 - DNA, 25 bp, Homo sapien
aaaatccagggacacatgttactgt

SEQ ID NO: 5671233 - DNA, 25 bp, Homo sapien
ttcccaacagtaacatgtgtccctg

SEQ ID NO: 5671234 - DNA, 25 bp, Homo sapien
tcccaacagtaacatgtgtccctgg

SEQ ID NO: 5671235 - DNA, 25 bp, Homo sapien
acagtaacatgtgtccctggatttt

SEQ ID NO: 5671236 - DNA, 25 bp, Homo sapien
ccaacagtaacatgtgtccctggat

SEQ ID NO: 5671237 - DNA, 25 bp, Homo sapien
accttcccaacagtaacatgtgtcc

SEQ ID NO: 5671238 - DNA, 25 bp, Homo sapien
cagaagactggggacaaacttttag

SEQ ID NO: 5671239 - DNA, 25 bp, Homo sapien
cttaagaaagggaccacccacagag

SEQ ID NO: 5671240 - DNA, 25 bp, Homo sapien
tggcacccgggtaccagatagccat

SEQ ID NO: 5671241 - DNA, 25 bp, Homo sapien
ttaagaaagggaccacccacagaga

SEQ ID NO: 5671242 - DNA, 25 bp, Homo sapien
ggcacccgggtaccagatagccatc

SEQ ID NO: 5671243 - DNA, 25 bp, Homo sapien
tctctgtgggtggtccctttcttaa

SEQ ID NO: 5671244 - DNA, 25 bp, Homo sapien
atggctatctggtacccgggtgcca

SEQ ID NO: 5671245 - DNA, 25 bp, Homo sapien
gatggctatctggtacccgggtgcc

SEQ ID NO: 5671246 - DNA, 25 bp, Homo sapien
ctctgtgggtggtccctttcttaag

SEQ ID NO: 5671247 - DNA, 25 bp, Homo sapien
gatagacctgaatgagacttttctt

SEQ ID NO: 5671248 - DNA, 25 bp, Homo sapien
aaagaatgatagacctgaatgagac

SEQ ID NO: 5671249 - DNA, 25 bp, Homo sapien
ttcttcagtagcaggggataattag

SEQ ID NO: 5671250 - DNA, 25 bp, Homo sapien
tggaaagaatgatagacctgaatga

SEQ ID NO: 5671251 - DNA, 25 bp, Homo sapien
gaatgatagacctgaatgagacttt

SEQ ID NO: 5671252 - DNA, 25 bp, Homo sapien
gtagcaggggataattagagacaat

SEQ ID NO: 5671253 - DNA, 25 bp, Homo sapien
taattatcccctgctactgaagaaa

SEQ ID NO: 5671254 - DNA, 25 bp, Homo sapien
aagaaaagtctcattcaggtctatc

SEQ ID NO: 5671255 - DNA, 25 bp, Homo sapien
tcattcaggtctatcattctttcca

SEQ ID NO: 5671256 - DNA, 25 bp, Homo sapien
gaaaagtctcattcaggtctatcat

SEQ ID NO: 5671257 - DNA, 25 bp, Homo sapien
ttattgtctctaattatcccctgct

SEQ ID NO: 5671258 - DNA, 25 bp, Homo sapien
tgtctctaattatcccctgctactg

SEQ ID NO: 5671259 - DNA, 25 bp, Homo sapien
tttgacagtattgaaagagagagct

SEQ ID NO: 5671260 - DNA, 25 bp, Homo sapien
ttttgacagtattgaaagagagagc

SEQ ID NO: 5671261 - DNA, 25 bp, Homo sapien
ttgacagtattgaaagagagagctt

SEQ ID NO: 5671262 - DNA, 25 bp, Homo sapien
gctctctctttcaatactgtcaaaa

SEQ ID NO: 5671263 - DNA, 25 bp, Homo sapien
agctctctctttcaatactgtcaaa

SEQ ID NO: 5671264 - DNA, 25 bp, Homo sapien
aagctctctctttcaatactgtcaa

SEQ ID NO: 5671265 - DNA, 25 bp, Homo sapien
tctgggaagattttctccttgcagc

SEQ ID NO: 5671266 - DNA, 25 bp, Homo sapien
tccttgcagctcctatgttgtatac

SEQ ID NO: 5671267 - DNA, 25 bp, Homo sapien
ctttgacctgactctgggaagattt

SEQ ID NO: 5671268 - DNA, 25 bp, Homo sapien
gagagcttctttgacctgactctgg

SEQ ID NO: 5671269 - DNA, 25 bp, Homo sapien
cctatgttgtatacttgtagagcat

SEQ ID NO: 5671270 - DNA, 25 bp, Homo sapien
ttgacagtattgaaagagagagctt

SEQ ID NO: 5671271 - DNA, 25 bp, Homo sapien
aaatcttcccagagtcaggtcaaag

SEQ ID NO: 5671272 - DNA, 25 bp, Homo sapien
tacaagtatacaacataggagctgc

SEQ ID NO: 5671273 - DNA, 25 bp, Homo sapien
ccagagtcaggtcaaagaagctctc

SEQ ID NO: 5671274 - DNA, 25 bp, Homo sapien
tcaatactgtcaaaattaggcccca

SEQ ID NO: 5671275 - DNA, 25 bp, Homo sapien
gagctgcaaggagaaaatcttccca

SEQ ID NO: 5671276 - DNA, 25 bp, Homo sapien
aagctctctctttcaatactgtcaa

SEQ ID NO: 5671277 - DNA, 25 bp, Homo sapien
tagcacactgttgagccccacagta

SEQ ID NO: 5671278 - DNA, 25 bp, Homo sapien
cacactgttgagccccacagtaaat

SEQ ID NO: 5671279 - DNA, 25 bp, Homo sapien
ctagcacactgttgagccccacagt

SEQ ID NO: 5671280 - DNA, 25 bp, Homo sapien
gcacactgttgagccccacagtaaa

SEQ ID NO: 5671281 - DNA, 25 bp, Homo sapien
agcacactgttgagccccacagtaa

SEQ ID NO: 5671282 - DNA, 25 bp, Homo sapien
tttactgtggggctcaacagtgtgc

SEQ ID NO: 5671283 - DNA, 25 bp, Homo sapien
atttactgtggggctcaacagtgtg

SEQ ID NO: 5671284 - DNA, 25 bp, Homo sapien
tactgtggggctcaacagtgtgcta

SEQ ID NO: 5671285 - DNA, 25 bp, Homo sapien
actgtggggctcaacagtgtgctag

SEQ ID NO: 5671286 - DNA, 25 bp, Homo sapien
ttactgtggggctcaacagtgtgct

SEQ ID NO: 5671287 - DNA, 25 bp, Homo sapien
tatttgcataatcacaatatgaatg

SEQ ID NO: 5671288 - DNA, 25 bp, Homo sapien
gcatttcttttattagcctgttaaa

SEQ ID NO: 5671289 - DNA, 25 bp, Homo sapien
taagtgtgatcctagcacactgttg

SEQ ID NO: 5671290 - DNA, 25 bp, Homo sapien
gatcctagcacactgttgagcccca

SEQ ID NO: 5671291 - DNA, 25 bp, Homo sapien
gttgagccccacagtaaataatatt

SEQ ID NO: 5671292 - DNA, 25 bp, Homo sapien
aagtgtgatcctagcacactgttga

SEQ ID NO: 5671293 - DNA, 25 bp, Homo sapien
tacattcatattgtgattatgcaaa

SEQ ID NO: 5671294 - DNA, 25 bp, Homo sapien
tcaacagtgtgctaggatcacactt

SEQ ID NO: 5671295 - DNA, 25 bp, Homo sapien
gggctcaacagtgtgctaggatcac

SEQ ID NO: 5671296 - DNA, 25 bp, Homo sapien
ttatgcaaatattatttactgtggg

SEQ ID NO: 5671297 - DNA, 25 bp, Homo sapien
caacagtgtgctaggatcacactta

SEQ ID NO: 5671298 - DNA, 25 bp, Homo sapien
tttaacaggctaataaaagaaatgc

SEQ ID NO: 5671299 - DNA, 25 bp, Homo sapien
tgaccatgactgtcctgttgtttct

SEQ ID NO: 5671300 - DNA, 25 bp, Homo sapien
agaaacaacaggacagtcatggtca

SEQ ID NO: 5671301 - DNA, 25 bp, Homo sapien
catcttcgctaattacggcccatag

SEQ ID NO: 5671302 - DNA, 25 bp, Homo sapien
cagaccacatcttcgctaattacgg

SEQ ID NO: 5671303 - DNA, 25 bp, Homo sapien
catagaacttgtcctgctggcctcc

SEQ ID NO: 5671304 - DNA, 25 bp, Homo sapien
gggccagaccacatcttcgctaatt

SEQ ID NO: 5671305 - DNA, 25 bp, Homo sapien
tacggcccatagaacttgtcctgct

SEQ ID NO: 5671306 - DNA, 25 bp, Homo sapien
taattacggcccatagaacttgtcc

SEQ ID NO: 5671307 - DNA, 25 bp, Homo sapien
tctatgggccgtaattagcgaagat

SEQ ID NO: 5671308 - DNA, 25 bp, Homo sapien
gcaggacaagttctatgggccgtaa

SEQ ID NO: 5671309 - DNA, 25 bp, Homo sapien
ggaggccagcaggacaagttctatg

SEQ ID NO: 5671310 - DNA, 25 bp, Homo sapien
ccgtaattagcgaagatgtggtctg

SEQ ID NO: 5671311 - DNA, 25 bp, Homo sapien
ccagcaggacaagttctatgggccg

SEQ ID NO: 5671312 - DNA, 25 bp, Homo sapien
attagcgaagatgtggtctggcccc

SEQ ID NO: 5671313 - DNA, 25 bp, Homo sapien
taattggaaagtctgacattgggaa

SEQ ID NO: 5671314 - DNA, 25 bp, Homo sapien
aattggaaagtctgacattgggaag

SEQ ID NO: 5671315 - DNA, 25 bp, Homo sapien
gactttaattggaaagtctgacatt

SEQ ID NO: 5671316 - DNA, 25 bp, Homo sapien
actttaattggaaagtctgacattg

SEQ ID NO: 5671317 - DNA, 25 bp, Homo sapien
caatgtcagactttccaattaaagt

SEQ ID NO: 5671318 - DNA, 25 bp, Homo sapien
ttcccaatgtcagactttccaatta

SEQ ID NO: 5671319 - DNA, 25 bp, Homo sapien
aatgtcagactttccaattaaagtc

SEQ ID NO: 5671320 - DNA, 25 bp, Homo sapien
cttcccaatgtcagactttccaatt

SEQ ID NO: 5671321 - DNA, 25 bp, Homo sapien
taattggaaagtctgacattgggaa

SEQ ID NO: 5671322 - DNA, 25 bp, Homo sapien
taagccataatgactttaattggaa

SEQ ID NO: 5671323 - DNA, 25 bp, Homo sapien
tctgacattgggaaggtggacagtc

SEQ ID NO: 5671324 - DNA, 25 bp, Homo sapien
cccgaaatgtctgttcagtaaacat

SEQ ID NO: 5671325 - DNA, 25 bp, Homo sapien
tttttcccgaaatgtctgttcagta

SEQ ID NO: 5671326 - DNA, 25 bp, Homo sapien
ggtggacagtctatggatgactttt

SEQ ID NO: 5671327 - DNA, 25 bp, Homo sapien
caatgtcagactttccaattaaagt

SEQ ID NO: 5671328 - DNA, 25 bp, Homo sapien
tgtttactgaacagacatttcggga

SEQ ID NO: 5671329 - DNA, 25 bp, Homo sapien
tactgaacagacatttcgggaaaaa

SEQ ID NO: 5671330 - DNA, 25 bp, Homo sapien
aaaaagtcatccatagactgtccac

SEQ ID NO: 5671331 - DNA, 25 bp, Homo sapien
tccaattaaagtcattatggcttat

SEQ ID NO: 5671332 - DNA, 25 bp, Homo sapien
gactgtccaccttcccaatgtcaga

SEQ ID NO: 5671333 - DNA, 25 bp, Homo sapien
gagatgaaaatacctcacaactctt

SEQ ID NO: 5671334 - DNA, 25 bp, Homo sapien
ggagatgaaaatacctcacaactct

SEQ ID NO: 5671335 - DNA, 25 bp, Homo sapien
cttcagtatcatcacatgaatatta

SEQ ID NO: 5671336 - DNA, 25 bp, Homo sapien
gatgaaaatacctcacaactcttca

SEQ ID NO: 5671337 - DNA, 25 bp, Homo sapien
agatgaaaatacctcacaactcttc

SEQ ID NO: 5671338 - DNA, 25 bp, Homo sapien
atgaaaatacctcacaactcttcag

SEQ ID NO: 5671339 - DNA, 25 bp, Homo sapien
aagagttgtgaggtattttcatctc

SEQ ID NO: 5671340 - DNA, 25 bp, Homo sapien
taatattcatgtgatgatactgaag

SEQ ID NO: 5671341 - DNA, 25 bp, Homo sapien
agagttgtgaggtattttcatctcc

SEQ ID NO: 5671342 - DNA, 25 bp, Homo sapien
ttaatattcatgtgatgatactgaa

SEQ ID NO: 5671343 - DNA, 25 bp, Homo sapien
ctgaagagttgtgaggtattttcat

SEQ ID NO: 5671344 - DNA, 25 bp, Homo sapien
gaagagttgtgaggtattttcatct

SEQ ID NO: 5671345 - DNA, 25 bp, Homo sapien
taaagagtcacttgtccaaaaatgt

SEQ ID NO: 5671346 - DNA, 25 bp, Homo sapien
tttctgggatatttgcagatctgtt

SEQ ID NO: 5671347 - DNA, 25 bp, Homo sapien
gtttacacaatgctctgctgatact

SEQ ID NO: 5671348 - DNA, 25 bp, Homo sapien
gaacttcggtttacacaatgctctg

SEQ ID NO: 5671349 - DNA, 25 bp, Homo sapien
gttagaacttcggtttacacaatgc

SEQ ID NO: 5671350 - DNA, 25 bp, Homo sapien
ttcggtttacacaatgctctgctga

SEQ ID NO: 5671351 - DNA, 25 bp, Homo sapien
cagcagagcattgtgtaaaccgaag

SEQ ID NO: 5671352 - DNA, 25 bp, Homo sapien
acatttttggacaagtgactcttta

SEQ ID NO: 5671353 - DNA, 25 bp, Homo sapien
agtatcagcagagcattgtgtaaac

SEQ ID NO: 5671354 - DNA, 25 bp, Homo sapien
gcattgtgtaaaccgaagttctaac

SEQ ID NO: 5671355 - DNA, 25 bp, Homo sapien
tatcagcagagcattgtgtaaaccg

SEQ ID NO: 5671356 - DNA, 25 bp, Homo sapien
aacagatctgcaaatatcccagaaa

SEQ ID NO: 5671357 - DNA, 25 bp, Homo sapien
ttctcagtcctttatcgaagggtgg

SEQ ID NO: 5671358 - DNA, 25 bp, Homo sapien
aatgaactcatttttagctagaccc

SEQ ID NO: 5671359 - DNA, 25 bp, Homo sapien
cgaagggtggttaagaatgaactca

SEQ ID NO: 5671360 - DNA, 25 bp, Homo sapien
tcctagtgccatgctttctccagtt

SEQ ID NO: 5671361 - DNA, 25 bp, Homo sapien
gttcctcctagtgccatgctttctc

SEQ ID NO: 5671362 - DNA, 25 bp, Homo sapien
tcatttttagctagacccatttcac

SEQ ID NO: 5671363 - DNA, 25 bp, Homo sapien
cacccttcgataaaggactgagaaa

SEQ ID NO: 5671364 - DNA, 25 bp, Homo sapien
ggtctagctaaaaatgagttcattc

SEQ ID NO: 5671365 - DNA, 25 bp, Homo sapien
aactggagaaagcatggcactagga

SEQ ID NO: 5671366 - DNA, 25 bp, Homo sapien
gagttcattcttaaccacccttcga

SEQ ID NO: 5671367 - DNA, 25 bp, Homo sapien
gagaaagcatggcactaggaggaac

SEQ ID NO: 5671368 - DNA, 25 bp, Homo sapien
tgaaatgggtctagctaaaaatgag

SEQ ID NO: 5671369 - DNA, 25 bp, Homo sapien
gtctccaggttcaaaaggactctct

SEQ ID NO: 5671370 - DNA, 25 bp, Homo sapien
tcatcattgtctccaggttcaaaag

SEQ ID NO: 5671371 - DNA, 25 bp, Homo sapien
tggtgaatggaagacttaaatctta

SEQ ID NO: 5671372 - DNA, 25 bp, Homo sapien
caaaagtgtccgttggtgaatggaa

SEQ ID NO: 5671373 - DNA, 25 bp, Homo sapien
ccgttggtgaatggaagacttaaat

SEQ ID NO: 5671374 - DNA, 25 bp, Homo sapien
ctctctgggttcaaaagtgtccgtt

SEQ ID NO: 5671375 - DNA, 25 bp, Homo sapien
cttttgaacctggagacaatgatga

SEQ ID NO: 5671376 - DNA, 25 bp, Homo sapien
taagtcttccattcaccaacggaca

SEQ ID NO: 5671377 - DNA, 25 bp, Homo sapien
agagagtccttttgaacctggagac

SEQ ID NO: 5671378 - DNA, 25 bp, Homo sapien
caccaacggacacttttgaacccag

SEQ ID NO: 5671379 - DNA, 25 bp, Homo sapien
gatttaagtcttccattcaccaacg

SEQ ID NO: 5671380 - DNA, 25 bp, Homo sapien
aacggacacttttgaacccagagag

SEQ ID NO: 5671381 - DNA, 25 bp, Homo sapien
taaatggtacctgagactgttctct

SEQ ID NO: 5671382 - DNA, 25 bp, Homo sapien
gtaaatggtacctgagactgttctc

SEQ ID NO: 5671383 - DNA, 25 bp, Homo sapien
ccaagagttgggtaaatggtacctg

SEQ ID NO: 5671384 - DNA, 25 bp, Homo sapien
ttgggtaaatggtacctgagactgt

SEQ ID NO: 5671385 - DNA, 25 bp, Homo sapien
gagttgggtaaatggtacctgagac

SEQ ID NO: 5671386 - DNA, 25 bp, Homo sapien
ggtacctgagactgttctctttact

SEQ ID NO: 5671387 - DNA, 25 bp, Homo sapien
agtaaagagaacagtctcaggtacc

SEQ ID NO: 5671388 - DNA, 25 bp, Homo sapien
caggtaccatttacccaactcttgg

SEQ ID NO: 5671389 - DNA, 25 bp, Homo sapien
acagtctcaggtaccatttacccaa

SEQ ID NO: 5671390 - DNA, 25 bp, Homo sapien
taaagagaacagtctcaggtaccat

SEQ ID NO: 5671391 - DNA, 25 bp, Homo sapien
tcaggtaccatttacccaactcttg

SEQ ID NO: 5671392 - DNA, 25 bp, Homo sapien
gagaacagtctcaggtaccatttac

SEQ ID NO: 5671393 - DNA, 25 bp, Homo sapien
cgggcatagtggcggacacctgtag

SEQ ID NO: 5671394 - DNA, 25 bp, Homo sapien
gggcatagtggcggacacctgtagt

SEQ ID NO: 5671395 - DNA, 25 bp, Homo sapien
gcatagtggcggacacctgtagtcc

SEQ ID NO: 5671396 - DNA, 25 bp, Homo sapien
agccgggcatagtggcggacacctg

SEQ ID NO: 5671397 - DNA, 25 bp, Homo sapien
ggcatagtggcggacacctgtagtc

SEQ ID NO: 5671398 - DNA, 25 bp, Homo sapien
gccgggcatagtggcggacacctgt

SEQ ID NO: 5671399 - DNA, 25 bp, Homo sapien
ctacaggtgtccgccactatgcccg

SEQ ID NO: 5671400 - DNA, 25 bp, Homo sapien
ggactacaggtgtccgccactatgc

SEQ ID NO: 5671401 - DNA, 25 bp, Homo sapien
caggtgtccgccactatgcccggct

SEQ ID NO: 5671402 - DNA, 25 bp, Homo sapien
acaggtgtccgccactatgcccggc

SEQ ID NO: 5671403 - DNA, 25 bp, Homo sapien
gactacaggtgtccgccactatgcc

SEQ ID NO: 5671404 - DNA, 25 bp, Homo sapien
actacaggtgtccgccactatgccc

SEQ ID NO: 5671405 - DNA, 25 bp, Homo sapien
ttgtgaactcaggccagaactccag

SEQ ID NO: 5671406 - DNA, 25 bp, Homo sapien
ttgttctacctgattttgtgaactc

SEQ ID NO: 5671407 - DNA, 25 bp, Homo sapien
gcaccaaacttttgttctacctgat

SEQ ID NO: 5671408 - DNA, 25 bp, Homo sapien
aacttttgttctacctgattttgtg

SEQ ID NO: 5671409 - DNA, 25 bp, Homo sapien
ttttgtgaactcaggccagaactcc

SEQ ID NO: 5671410 - DNA, 25 bp, Homo sapien
tttgtgaactcaggccagaactcca

SEQ ID NO: 5671411 - DNA, 25 bp, Homo sapien
ggagttctggcctgagttcacaaaa

SEQ ID NO: 5671412 - DNA, 25 bp, Homo sapien
atcaggtagaacaaaagtttggtgc

SEQ ID NO: 5671413 - DNA, 25 bp, Homo sapien
cacaaaatcaggtagaacaaaagtt

SEQ ID NO: 5671414 - DNA, 25 bp, Homo sapien
tcacaaaatcaggtagaacaaaagt

SEQ ID NO: 5671415 - DNA, 25 bp, Homo sapien
tggagttctggcctgagttcacaaa

SEQ ID NO: 5671416 - DNA, 25 bp, Homo sapien
gagttcacaaaatcaggtagaacaa

SEQ ID NO: 5671417 - DNA, 25 bp, Homo sapien
ctcgttctgtcaccgaagttggatc

SEQ ID NO: 5671418 - DNA, 25 bp, Homo sapien
tgtcaccgaagttggatcgcagcct

SEQ ID NO: 5671419 - DNA, 25 bp, Homo sapien
gttctgtcaccgaagttggatcgca

SEQ ID NO: 5671420 - DNA, 25 bp, Homo sapien
caccgaagttggatcgcagcctcaa

SEQ ID NO: 5671421 - DNA, 25 bp, Homo sapien
tctgtcaccgaagttggatcgcagc

SEQ ID NO: 5671422 - DNA, 25 bp, Homo sapien
ccgaagttggatcgcagcctcaaat

SEQ ID NO: 5671423 - DNA, 25 bp, Homo sapien
gaggctgcgatccaacttcggtgac

SEQ ID NO: 5671424 - DNA, 25 bp, Homo sapien
tgcgatccaacttcggtgacagaac

SEQ ID NO: 5671425 - DNA, 25 bp, Homo sapien
atttgaggctgcgatccaacttcgg

SEQ ID NO: 5671426 - DNA, 25 bp, Homo sapien
gatccaacttcggtgacagaacgag

SEQ ID NO: 5671427 - DNA, 25 bp, Homo sapien
ttgaggctgcgatccaacttcggtg

SEQ ID NO: 5671428 - DNA, 25 bp, Homo sapien
gctgcgatccaacttcggtgacaga

SEQ ID NO: 5671429 - DNA, 25 bp, Homo sapien
gaccctatcacacgagtgcatcatg

SEQ ID NO: 5671430 - DNA, 25 bp, Homo sapien
tatcacacgagtgcatcatgttagc

SEQ ID NO: 5671431 - DNA, 25 bp, Homo sapien
gtgaccctatcacacgagtgcatca

SEQ ID NO: 5671432 - DNA, 25 bp, Homo sapien
actgtgaccctatcacacgagtgca

SEQ ID NO: 5671433 - DNA, 25 bp, Homo sapien
cacacgagtgcatcatgttagcact

SEQ ID NO: 5671434 - DNA, 25 bp, Homo sapien
tgcatcatgttagcactcagatagt

SEQ ID NO: 5671435 - DNA, 25 bp, Homo sapien
tgagtgctaacatgatgcactcgtg

SEQ ID NO: 5671436 - DNA, 25 bp, Homo sapien
tgcactcgtgtgatagggtcacagt

SEQ ID NO: 5671437 - DNA, 25 bp, Homo sapien
tgctaacatgatgcactcgtgtgat

SEQ ID NO: 5671438 - DNA, 25 bp, Homo sapien
catgatgcactcgtgtgatagggtc

SEQ ID NO: 5671439 - DNA, 25 bp, Homo sapien
taacatgatgcactcgtgtgatagg

SEQ ID NO: 5671440 - DNA, 25 bp, Homo sapien
actatctgagtgctaacatgatgca

SEQ ID NO: 5671441 - DNA, 25 bp, Homo sapien
agtgaagaaggacattgttagggcc

SEQ ID NO: 5671442 - DNA, 25 bp, Homo sapien
ggttacagatcaggtcatccttttc

SEQ ID NO: 5671443 - DNA, 25 bp, Homo sapien
tccttttcccagattataagtgaag

SEQ ID NO: 5671444 - DNA, 25 bp, Homo sapien
aggacattgttagggccttcacaaa

SEQ ID NO: 5671445 - DNA, 25 bp, Homo sapien
tcatgtgttcaggttacagatcagg

SEQ ID NO: 5671446 - DNA, 25 bp, Homo sapien
taaccaatgatttcatgtgttcagg

SEQ ID NO: 5671447 - DNA, 25 bp, Homo sapien
taacctgaacacatgaaatcattgg

SEQ ID NO: 5671448 - DNA, 25 bp, Homo sapien
gaaaaggatgacctgatctgtaacc

SEQ ID NO: 5671449 - DNA, 25 bp, Homo sapien
ggccctaacaatgtccttcttcact

SEQ ID NO: 5671450 - DNA, 25 bp, Homo sapien
tttgtgaaggccctaacaatgtcct

SEQ ID NO: 5671451 - DNA, 25 bp, Homo sapien
tcacttataatctgggaaaaggatg

SEQ ID NO: 5671452 - DNA, 25 bp, Homo sapien
cctgatctgtaacctgaacacatga

SEQ ID NO: 5671453 - DNA, 25 bp, Homo sapien
tgccttcggcttcccgagtggttgg

SEQ ID NO: 5671454 - DNA, 25 bp, Homo sapien
ccaaccactcgggaagccgaaggca

SEQ ID NO: 5671455 - DNA, 25 bp, Homo sapien
tcggcttcccgagtggttgggacta

SEQ ID NO: 5671456 - DNA, 25 bp, Homo sapien
tcaagtgatcttactgccttcggct

SEQ ID NO: 5671457 - DNA, 25 bp, Homo sapien
tcccgagtggttgggactatcgaca

SEQ ID NO: 5671458 - DNA, 25 bp, Homo sapien
gaatgcagtgacacagtcatggctt

SEQ ID NO: 5671459 - DNA, 25 bp, Homo sapien
tgccttcggcttcccgagtggttgg

SEQ ID NO: 5671460 - DNA, 25 bp, Homo sapien
ccgagtggttgggactatcgacaca

SEQ ID NO: 5671461 - DNA, 25 bp, Homo sapien
ccaaccactcgggaagccgaaggca

SEQ ID NO: 5671462 - DNA, 25 bp, Homo sapien
actcgggaagccgaaggcagtaaga

SEQ ID NO: 5671463 - DNA, 25 bp, Homo sapien
agccgaaggcagtaagatcacttga

SEQ ID NO: 5671464 - DNA, 25 bp, Homo sapien
tgtcgatagtcccaaccactcggga

SEQ ID NO: 5671465 - DNA, 25 bp, Homo sapien
tgtgtcgatagtcccaaccactcgg

SEQ ID NO: 5671466 - DNA, 25 bp, Homo sapien
gtaagccatgactgtgtcactgcat

SEQ ID NO: 5671467 - DNA, 25 bp, Homo sapien
tgcctggctgattttgggggatttt

SEQ ID NO: 5671468 - DNA, 25 bp, Homo sapien
ctggctgattttgggggattttttg

SEQ ID NO: 5671469 - DNA, 25 bp, Homo sapien
tcatttgtttttgatagagacaggg

SEQ ID NO: 5671470 - DNA, 25 bp, Homo sapien
ttcatttgtttttgatagagacagg

SEQ ID NO: 5671471 - DNA, 25 bp, Homo sapien
tgttcatttgtttttgatagagaca

SEQ ID NO: 5671472 - DNA, 25 bp, Homo sapien
gttcatttgtttttgatagagacag

SEQ ID NO: 5671473 - DNA, 25 bp, Homo sapien
cctgtctctatcaaaaacaaatgaa

SEQ ID NO: 5671474 - DNA, 25 bp, Homo sapien
caaaaaatcccccaaaatcagccag

SEQ ID NO: 5671475 - DNA, 25 bp, Homo sapien
aaaatcccccaaaatcagccaggca

SEQ ID NO: 5671476 - DNA, 25 bp, Homo sapien
tgtctctatcaaaaacaaatgaaca

SEQ ID NO: 5671477 - DNA, 25 bp, Homo sapien
ctgtctctatcaaaaacaaatgaac

SEQ ID NO: 5671478 - DNA, 25 bp, Homo sapien
ccctgtctctatcaaaaacaaatga

SEQ ID NO: 5671479 - DNA, 25 bp, Homo sapien
aggccctaggagctctctccccaaa

SEQ ID NO: 5671480 - DNA, 25 bp, Homo sapien
tgagagtatgtggtgttcccatctg

SEQ ID NO: 5671481 - DNA, 25 bp, Homo sapien
ccagaagtagggtaacagtatgaga

SEQ ID NO: 5671482 - DNA, 25 bp, Homo sapien
ccatccagaagtagggtaacagtat

SEQ ID NO: 5671483 - DNA, 25 bp, Homo sapien
tagggtaacagtatgagagtatgtg

SEQ ID NO: 5671484 - DNA, 25 bp, Homo sapien
ccccatccagaagtagggtaacagt

SEQ ID NO: 5671485 - DNA, 25 bp, Homo sapien
cacatactctcatactgttacccta

SEQ ID NO: 5671486 - DNA, 25 bp, Homo sapien
tctcatactgttaccctacttctgg

SEQ ID NO: 5671487 - DNA, 25 bp, Homo sapien
tactgttaccctacttctggatggg

SEQ ID NO: 5671488 - DNA, 25 bp, Homo sapien
catactgttaccctacttctggatg

SEQ ID NO: 5671489 - DNA, 25 bp, Homo sapien
cagatgggaacaccacatactctca

SEQ ID NO: 5671490 - DNA, 25 bp, Homo sapien
tttggggagagagctcctagggcct

SEQ ID NO: 5671491 - DNA, 25 bp, Homo sapien
gcattttagggactatatgatttat

SEQ ID NO: 5671492 - DNA, 25 bp, Homo sapien
agcattttagggactatatgattta

SEQ ID NO: 5671493 - DNA, 25 bp, Homo sapien
gaaagcattttagggactatatgat

SEQ ID NO: 5671494 - DNA, 25 bp, Homo sapien
tttctgcttcatggaaatgtatcat

SEQ ID NO: 5671495 - DNA, 25 bp, Homo sapien
cattttagggactatatgatttatg

SEQ ID NO: 5671496 - DNA, 25 bp, Homo sapien
attttagggactatatgatttatgc

SEQ ID NO: 5671497 - DNA, 25 bp, Homo sapien
cataaatcatatagtccctaaaatg

SEQ ID NO: 5671498 - DNA, 25 bp, Homo sapien
taaatcatatagtccctaaaatgct

SEQ ID NO: 5671499 - DNA, 25 bp, Homo sapien
ataaatcatatagtccctaaaatgc

SEQ ID NO: 5671500 - DNA, 25 bp, Homo sapien
atcatatagtccctaaaatgctttc

SEQ ID NO: 5671501 - DNA, 25 bp, Homo sapien
atgatacatttccatgaagcagaaa

SEQ ID NO: 5671502 - DNA, 25 bp, Homo sapien
gcataaatcatatagtccctaaaat

SEQ ID NO: 5671503 - DNA, 25 bp, Homo sapien
cccactcctacaaatctgtctgtct

SEQ ID NO: 5671504 - DNA, 25 bp, Homo sapien
gagtctacccactcctacaaatctg

SEQ ID NO: 5671505 - DNA, 25 bp, Homo sapien
agtctacccactcctacaaatctgt

SEQ ID NO: 5671506 - DNA, 25 bp, Homo sapien
gttgagtctacccactcctacaaat

SEQ ID NO: 5671507 - DNA, 25 bp, Homo sapien
cagttgagtctacccactcctacaa

SEQ ID NO: 5671508 - DNA, 25 bp, Homo sapien
tacccactcctacaaatctgtctgt

SEQ ID NO: 5671509 - DNA, 25 bp, Homo sapien
atttgtaggagtgggtagactcaac

SEQ ID NO: 5671510 - DNA, 25 bp, Homo sapien
acagatttgtaggagtgggtagact

SEQ ID NO: 5671511 - DNA, 25 bp, Homo sapien
acagacagatttgtaggagtgggta

SEQ ID NO: 5671512 - DNA, 25 bp, Homo sapien
ttgtaggagtgggtagactcaactg

SEQ ID NO: 5671513 - DNA, 25 bp, Homo sapien
gatttgtaggagtgggtagactcaa

SEQ ID NO: 5671514 - DNA, 25 bp, Homo sapien
cagatttgtaggagtgggtagactc

SEQ ID NO: 5671515 - DNA, 25 bp, Homo sapien
gttcattaaactgttgatgaagttt

SEQ ID NO: 5671516 - DNA, 25 bp, Homo sapien
cttgccctcataaagtaagtaatgc

SEQ ID NO: 5671517 - DNA, 25 bp, Homo sapien
ttgccctcataaagtaagtaatgct

SEQ ID NO: 5671518 - DNA, 25 bp, Homo sapien
gtgttcattaaactgttgatgaagt

SEQ ID NO: 5671519 - DNA, 25 bp, Homo sapien
tgttcattaaactgttgatgaagtt

SEQ ID NO: 5671520 - DNA, 25 bp, Homo sapien
gctagagggagagtgttcattaaac

SEQ ID NO: 5671521 - DNA, 25 bp, Homo sapien
agagagttataagaaatttgcactt

SEQ ID NO: 5671522 - DNA, 25 bp, Homo sapien
gagagttataagaaatttgcacttt

SEQ ID NO: 5671523 - DNA, 25 bp, Homo sapien
tagagagttataagaaatttgcact

SEQ ID NO: 5671524 - DNA, 25 bp, Homo sapien
agtgcaaatttcttataactctcta

SEQ ID NO: 5671525 - DNA, 25 bp, Homo sapien
aagtgcaaatttcttataactctct

SEQ ID NO: 5671526 - DNA, 25 bp, Homo sapien
aaagtgcaaatttcttataactctc

SEQ ID NO: 5671527 - DNA, 25 bp, Homo sapien
acttcatcaacagtttaatgaacac

SEQ ID NO: 5671528 - DNA, 25 bp, Homo sapien
agcattacttactttatgagggcaa

SEQ ID NO: 5671529 - DNA, 25 bp, Homo sapien
gcattacttactttatgagggcaag

SEQ ID NO: 5671530 - DNA, 25 bp, Homo sapien
aacttcatcaacagtttaatgaaca

SEQ ID NO: 5671531 - DNA, 25 bp, Homo sapien
aaacttcatcaacagtttaatgaac

SEQ ID NO: 5671532 - DNA, 25 bp, Homo sapien
gtttaatgaacactctccctctagc

SEQ ID NO: 5671533 - DNA, 25 bp, Homo sapien
tcacggtctcttccctgtaatgact

SEQ ID NO: 5671534 - DNA, 25 bp, Homo sapien
tagtttcacggtctcttccctgtaa

SEQ ID NO: 5671535 - DNA, 25 bp, Homo sapien
tgtgcactagcaagtccttcctgtt

SEQ ID NO: 5671536 - DNA, 25 bp, Homo sapien
cctgtaatgactgtgcactagcaag

SEQ ID NO: 5671537 - DNA, 25 bp, Homo sapien
ttaaaaatgaacaatcggagcaggc

SEQ ID NO: 5671538 - DNA, 25 bp, Homo sapien
ggctacatttagtttcacggtctct

SEQ ID NO: 5671539 - DNA, 25 bp, Homo sapien
acagtcattacagggaagagaccgt

SEQ ID NO: 5671540 - DNA, 25 bp, Homo sapien
gaacaggaaggacttgctagtgcac

SEQ ID NO: 5671541 - DNA, 25 bp, Homo sapien
gcctgctccgattgttcatttttaa

SEQ ID NO: 5671542 - DNA, 25 bp, Homo sapien
cattacagggaagagaccgtgaaac

SEQ ID NO: 5671543 - DNA, 25 bp, Homo sapien
cttgctagtgcacagtcattacagg

SEQ ID NO: 5671544 - DNA, 25 bp, Homo sapien
agagaccgtgaaactaaatgtagcc

SEQ ID NO: 5671545 - DNA, 25 bp, Homo sapien
tgaaaacagttaggctggaagtgcc

SEQ ID NO: 5671546 - DNA, 25 bp, Homo sapien
ttagggccgaaataacaagcatttg

SEQ ID NO: 5671547 - DNA, 25 bp, Homo sapien
tccattagggccgaaataacaagca

SEQ ID NO: 5671548 - DNA, 25 bp, Homo sapien
gctggaagtgcctatgccatccctt

SEQ ID NO: 5671549 - DNA, 25 bp, Homo sapien
acgtatctccattagggccgaaata

SEQ ID NO: 5671550 - DNA, 25 bp, Homo sapien
tatgccatccctttagcttctctga

SEQ ID NO: 5671551 - DNA, 25 bp, Homo sapien
ggcacttccagcctaactgttttca

SEQ ID NO: 5671552 - DNA, 25 bp, Homo sapien
aagggatggcataggcacttccagc

SEQ ID NO: 5671553 - DNA, 25 bp, Homo sapien
tcagagaagctaaagggatggcata

SEQ ID NO: 5671554 - DNA, 25 bp, Homo sapien
tatttcggccctaatggagatacgt

SEQ ID NO: 5671555 - DNA, 25 bp, Homo sapien
caaatgcttgttatttcggccctaa

SEQ ID NO: 5671556 - DNA, 25 bp, Homo sapien
ctaaagggatggcataggcacttcc

SEQ ID NO: 5671557 - DNA, 25 bp, Homo sapien
cctgtagtcccagttgcatgggagg

SEQ ID NO: 5671558 - DNA, 25 bp, Homo sapien
tcaaaataaatatatacacacacaa

SEQ ID NO: 5671559 - DNA, 25 bp, Homo sapien
caaaataaatatatacacacacaaa

SEQ ID NO: 5671560 - DNA, 25 bp, Homo sapien
atctcaaaataaatatatacacaca

SEQ ID NO: 5671561 - DNA, 25 bp, Homo sapien
tctcaaaataaatatatacacacac

SEQ ID NO: 5671562 - DNA, 25 bp, Homo sapien
ctcaaaataaatatatacacacaca

SEQ ID NO: 5671563 - DNA, 25 bp, Homo sapien
agctaatttttgtgtgtgtatatat

SEQ ID NO: 5671564 - DNA, 25 bp, Homo sapien
tgtgtgtgtatatatttattttgag

SEQ ID NO: 5671565 - DNA, 25 bp, Homo sapien
gagatggggtctcactctgttgccc

SEQ ID NO: 5671566 - DNA, 25 bp, Homo sapien
ttgagatggggtctcactctgttgc

SEQ ID NO: 5671567 - DNA, 25 bp, Homo sapien
tgagatggggtctcactctgttgcc

SEQ ID NO: 5671568 - DNA, 25 bp, Homo sapien
cctcccatgcaactgggactacagg

SEQ ID NO: 5671569 - DNA, 25 bp, Homo sapien
tgggaggccgagattgcgcctctgc

SEQ ID NO: 5671570 - DNA, 25 bp, Homo sapien
acctgggaggccgagattgcgcctc

SEQ ID NO: 5671571 - DNA, 25 bp, Homo sapien
gagattgcgcctctgcactcagcct

SEQ ID NO: 5671572 - DNA, 25 bp, Homo sapien
cctgggaggccgagattgcgcctct

SEQ ID NO: 5671573 - DNA, 25 bp, Homo sapien
gggaggccgagattgcgcctctgca

SEQ ID NO: 5671574 - DNA, 25 bp, Homo sapien
ctgggaggccgagattgcgcctctg

SEQ ID NO: 5671575 - DNA, 25 bp, Homo sapien
cagaggcgcaatctcggcctcccag

SEQ ID NO: 5671576 - DNA, 25 bp, Homo sapien
agaggcgcaatctcggcctcccagg

SEQ ID NO: 5671577 - DNA, 25 bp, Homo sapien
aggctgagtgcagaggcgcaatctc

SEQ ID NO: 5671578 - DNA, 25 bp, Homo sapien
gactacaggcacacgccaccacgca

SEQ ID NO: 5671579 - DNA, 25 bp, Homo sapien
gcagaggcgcaatctcggcctccca

SEQ ID NO: 5671580 - DNA, 25 bp, Homo sapien
gaggcgcaatctcggcctcccaggt

SEQ ID NO: 5671581 - DNA, 25 bp, Homo sapien
tggctaatacagtgaaaccttgtct

SEQ ID NO: 5671582 - DNA, 25 bp, Homo sapien
cctggctaatacagtgaaaccttgt

SEQ ID NO: 5671583 - DNA, 25 bp, Homo sapien
ggctaatacagtgaaaccttgtctc

SEQ ID NO: 5671584 - DNA, 25 bp, Homo sapien
ctggctaatacagtgaaaccttgtc

SEQ ID NO: 5671585 - DNA, 25 bp, Homo sapien
gctaatacagtgaaaccttgtctct

SEQ ID NO: 5671586 - DNA, 25 bp, Homo sapien
ccctggctaatacagtgaaaccttg

SEQ ID NO: 5671587 - DNA, 25 bp, Homo sapien
gagacaaggtttcactgtattagcc

SEQ ID NO: 5671588 - DNA, 25 bp, Homo sapien
agagacaaggtttcactgtattagc

SEQ ID NO: 5671589 - DNA, 25 bp, Homo sapien
caaggtttcactgtattagccaggg

SEQ ID NO: 5671590 - DNA, 25 bp, Homo sapien
agacaaggtttcactgtattagcca

SEQ ID NO: 5671591 - DNA, 25 bp, Homo sapien
acaaggtttcactgtattagccagg

SEQ ID NO: 5671592 - DNA, 25 bp, Homo sapien
gacaaggtttcactgtattagccag

SEQ ID NO: 5671593 - DNA, 25 bp, Homo sapien
tcacaagcacccgttcccaagagct

SEQ ID NO: 5671594 - DNA, 25 bp, Homo sapien
ggacctgtcccaacttctagtatta

SEQ ID NO: 5671595 - DNA, 25 bp, Homo sapien
acaagcacccgttcccaagagctca

SEQ ID NO: 5671596 - DNA, 25 bp, Homo sapien
cacaagcacccgttcccaagagctc

SEQ ID NO: 5671597 - DNA, 25 bp, Homo sapien
gacctgtcccaacttctagtattaa

SEQ ID NO: 5671598 - DNA, 25 bp, Homo sapien
taatactagaagttgggacaggtcc

SEQ ID NO: 5671599 - DNA, 25 bp, Homo sapien
gagctcttgggaacgggtgcttgtg

SEQ ID NO: 5671600 - DNA, 25 bp, Homo sapien
tgagctcttgggaacgggtgcttgt

SEQ ID NO: 5671601 - DNA, 25 bp, Homo sapien
agctcttgggaacgggtgcttgtga

SEQ ID NO: 5671602 - DNA, 25 bp, Homo sapien
ttaatactagaagttgggacaggtc

SEQ ID NO: 5671603 - DNA, 25 bp, Homo sapien
ggacctgtcccaacttctagtatta

SEQ ID NO: 5671604 - DNA, 25 bp, Homo sapien
tcacaagcacccgttcccaagagct

SEQ ID NO: 5671605 - DNA, 25 bp, Homo sapien
aaagtaaaacttctgccaggcatgg

SEQ ID NO: 5671606 - DNA, 25 bp, Homo sapien
gacctgtcccaacttctagtattaa

SEQ ID NO: 5671607 - DNA, 25 bp, Homo sapien
acccgttcccaagagctcagggcag

SEQ ID NO: 5671608 - DNA, 25 bp, Homo sapien
gcaggcccatcaggtgggacctgtc

SEQ ID NO: 5671609 - DNA, 25 bp, Homo sapien
tttggtcttccgttgccggtggtga

SEQ ID NO: 5671610 - DNA, 25 bp, Homo sapien
cacagtttggtcttccgttgccggt

SEQ ID NO: 5671611 - DNA, 25 bp, Homo sapien
gccacagtttggtcttccgttgccg

SEQ ID NO: 5671612 - DNA, 25 bp, Homo sapien
cagtttggtcttccgttgccggtgg

SEQ ID NO: 5671613 - DNA, 25 bp, Homo sapien
tccgttgccggtggtgagctgtgct

SEQ ID NO: 5671614 - DNA, 25 bp, Homo sapien
gaggccacagtttggtcttccgttg

SEQ ID NO: 5671615 - DNA, 25 bp, Homo sapien
cggcaacggaagaccaaactgtggc

SEQ ID NO: 5671616 - DNA, 25 bp, Homo sapien
acagctcaccaccggcaacggaaga

SEQ ID NO: 5671617 - DNA, 25 bp, Homo sapien
caacggaagaccaaactgtggcctc

SEQ ID NO: 5671618 - DNA, 25 bp, Homo sapien
ccaccggcaacggaagaccaaactg

SEQ ID NO: 5671619 - DNA, 25 bp, Homo sapien
tcaccaccggcaacggaagaccaaa

SEQ ID NO: 5671620 - DNA, 25 bp, Homo sapien
accggcaacggaagaccaaactgtg

SEQ ID NO: 5671621 - DNA, 25 bp, Homo sapien
aggtgcaggcccacctttttctgag

SEQ ID NO: 5671622 - DNA, 25 bp, Homo sapien
cacctttttctgagctaacaagaag

SEQ ID NO: 5671623 - DNA, 25 bp, Homo sapien
gagctaacaagaagagctaggagag

SEQ ID NO: 5671624 - DNA, 25 bp, Homo sapien
tttctgagctaacaagaagagctag

SEQ ID NO: 5671625 - DNA, 25 bp, Homo sapien
tctgagctaacaagaagagctagga

SEQ ID NO: 5671626 - DNA, 25 bp, Homo sapien
ctttttctgagctaacaagaagagc

SEQ ID NO: 5671627 - DNA, 25 bp, Homo sapien
tagctcttcttgttagctcagaaaa

SEQ ID NO: 5671628 - DNA, 25 bp, Homo sapien
tctcctagctcttcttgttagctca

SEQ ID NO: 5671629 - DNA, 25 bp, Homo sapien
ctcagaaaaaggtgggcctgcacct

SEQ ID NO: 5671630 - DNA, 25 bp, Homo sapien
gctcttcttgttagctcagaaaaag

SEQ ID NO: 5671631 - DNA, 25 bp, Homo sapien
cctagctcttcttgttagctcagaa

SEQ ID NO: 5671632 - DNA, 25 bp, Homo sapien
cttcttgttagctcagaaaaaggtg

SEQ ID NO: 5671633 - DNA, 25 bp, Homo sapien
aggagacgccctagagttgcaccaa

SEQ ID NO: 5671634 - DNA, 25 bp, Homo sapien
tctgagtctgggcagtggcgtggtg

SEQ ID NO: 5671635 - DNA, 25 bp, Homo sapien
gtggccttcctaggagaccactaga

SEQ ID NO: 5671636 - DNA, 25 bp, Homo sapien
acaggcaggagacgccctagagttg

SEQ ID NO: 5671637 - DNA, 25 bp, Homo sapien
tggtgtggccttcctaggagaccac

SEQ ID NO: 5671638 - DNA, 25 bp, Homo sapien
agagttgcaccaacacagctttctg

SEQ ID NO: 5671639 - DNA, 25 bp, Homo sapien
tctagtggtctcctaggaaggccac

SEQ ID NO: 5671640 - DNA, 25 bp, Homo sapien
tggtgcaactctagggcgtctcctg

SEQ ID NO: 5671641 - DNA, 25 bp, Homo sapien
aactctagggcgtctcctgcctgtg

SEQ ID NO: 5671642 - DNA, 25 bp, Homo sapien
tgttggtgcaactctagggcgtctc

SEQ ID NO: 5671643 - DNA, 25 bp, Homo sapien
gtggtctcctaggaaggccacacca

SEQ ID NO: 5671644 - DNA, 25 bp, Homo sapien
cagaaagctgtgttggtgcaactct

SEQ ID NO: 5671645 - DNA, 25 bp, Homo sapien
ctgctgtgcgggctggcagagagca

SEQ ID NO: 5671646 - DNA, 25 bp, Homo sapien
cagaccctttattcagccctgcctg

SEQ ID NO: 5671647 - DNA, 25 bp, Homo sapien
tgccttccactgctgtgcgggctgg

SEQ ID NO: 5671648 - DNA, 25 bp, Homo sapien
tgctctctgccagcccgcacagcag

SEQ ID NO: 5671649 - DNA, 25 bp, Homo sapien
caggcagggctgaataaagggtctg

SEQ ID NO: 5671650 - DNA, 25 bp, Homo sapien
ccagcccgcacagcagtggaaggca

SEQ ID NO: 5671651 - DNA, 25 bp, Homo sapien
tcagaccctttattcagccctgcct

SEQ ID NO: 5671652 - DNA, 25 bp, Homo sapien
ctgctgtgcgggctggcagagagca

SEQ ID NO: 5671653 - DNA, 25 bp, Homo sapien
cagaccctttattcagccctgcctg

SEQ ID NO: 5671654 - DNA, 25 bp, Homo sapien
tgccttccactgctgtgcgggctgg

SEQ ID NO: 5671655 - DNA, 25 bp, Homo sapien
tgctctctgccagcccgcacagcag

SEQ ID NO: 5671656 - DNA, 25 bp, Homo sapien
caggcagggctgaataaagggtctg

SEQ ID NO: 5671657 - DNA, 25 bp, Homo sapien
ccagcccgcacagcagtggaaggca

SEQ ID NO: 5671658 - DNA, 25 bp, Homo sapien
aggcagggctgaataaagggtctga

SEQ ID NO: 5671659 - DNA, 25 bp, Homo sapien
tgccttccactgctgtgcgggctgg

SEQ ID NO: 5671660 - DNA, 25 bp, Homo sapien
tgaccgcagtgactttcagaccctt

SEQ ID NO: 5671661 - DNA, 25 bp, Homo sapien
tgtgaccgcagtgactttcagaccc

SEQ ID NO: 5671662 - DNA, 25 bp, Homo sapien
tttcagaccctttattcagccctgc

SEQ ID NO: 5671663 - DNA, 25 bp, Homo sapien
gactttcagaccctttattcagccc

SEQ ID NO: 5671664 - DNA, 25 bp, Homo sapien
cgcagtgactttcagaccctttatt

SEQ ID NO: 5671665 - DNA, 25 bp, Homo sapien
gcagggctgaataaagggtctgaaa

SEQ ID NO: 5671666 - DNA, 25 bp, Homo sapien
gctgaataaagggtctgaaagtcac

SEQ ID NO: 5671667 - DNA, 25 bp, Homo sapien
aagggtctgaaagtcactgcggtca

SEQ ID NO: 5671668 - DNA, 25 bp, Homo sapien
gggtctgaaagtcactgcggtcaca

SEQ ID NO: 5671669 - DNA, 25 bp, Homo sapien
gaataaagggtctgaaagtcactgc

SEQ ID NO: 5671670 - DNA, 25 bp, Homo sapien
taaagggtctgaaagtcactgcggt

SEQ ID NO: 5671671 - DNA, 25 bp, Homo sapien
agtggactgatcaggccacaaacct

SEQ ID NO: 5671672 - DNA, 25 bp, Homo sapien
tggactgatcaggccacaaacctca

SEQ ID NO: 5671673 - DNA, 25 bp, Homo sapien
gtggactgatcaggccacaaacctc

SEQ ID NO: 5671674 - DNA, 25 bp, Homo sapien
ggtctcccccacggatgaggagaag

SEQ ID NO: 5671675 - DNA, 25 bp, Homo sapien
caggtctcccccacggatgaggaga

SEQ ID NO: 5671676 - DNA, 25 bp, Homo sapien
atgttgccaccaccgcctatgtggc

SEQ ID NO: 5671677 - DNA, 25 bp, Homo sapien
aggtctcccccacggatgaggagaa

SEQ ID NO: 5671678 - DNA, 25 bp, Homo sapien
ttctcctcatccgtgggggagacct

SEQ ID NO: 5671679 - DNA, 25 bp, Homo sapien
tctcctcatccgtgggggagacctg

SEQ ID NO: 5671680 - DNA, 25 bp, Homo sapien
gccacataggcggtggtggcaacat

SEQ ID NO: 5671681 - DNA, 25 bp, Homo sapien
cttctcctcatccgtgggggagacc

SEQ ID NO: 5671682 - DNA, 25 bp, Homo sapien
aggtttgtggcctgatcagtccact

SEQ ID NO: 5671683 - DNA, 25 bp, Homo sapien
gaggtttgtggcctgatcagtccac

SEQ ID NO: 5671684 - DNA, 25 bp, Homo sapien
tgaggtttgtggcctgatcagtcca

SEQ ID NO: 5671685 - DNA, 25 bp, Homo sapien
agtggactgatcaggccacaaacct

SEQ ID NO: 5671686 - DNA, 25 bp, Homo sapien
taaacaatttgtagtttcagtggac

SEQ ID NO: 5671687 - DNA, 25 bp, Homo sapien
acaatttgtagtttcagtggactga

SEQ ID NO: 5671688 - DNA, 25 bp, Homo sapien
tagtttcagtggactgatcaggcca

SEQ ID NO: 5671689 - DNA, 25 bp, Homo sapien
gtggactgatcaggccacaaacctc

SEQ ID NO: 5671690 - DNA, 25 bp, Homo sapien
gatgaggagaaggtaaacaatttgt

SEQ ID NO: 5671691 - DNA, 25 bp, Homo sapien
tacaaattgtttaccttctcctcat

SEQ ID NO: 5671692 - DNA, 25 bp, Homo sapien
gaggtttgtggcctgatcagtccac

SEQ ID NO: 5671693 - DNA, 25 bp, Homo sapien
tgaggtttgtggcctgatcagtcca

SEQ ID NO: 5671694 - DNA, 25 bp, Homo sapien
agacctgcgccacataggcggtggt

SEQ ID NO: 5671695 - DNA, 25 bp, Homo sapien
tcagtccactgaaactacaaattgt

SEQ ID NO: 5671696 - DNA, 25 bp, Homo sapien
gatcagtccactgaaactacaaatt

SEQ ID NO: 5671697 - DNA, 25 bp, Homo sapien
tgtgcgctcacatcagctgttggcc

SEQ ID NO: 5671698 - DNA, 25 bp, Homo sapien
caagtttcttaagtcctgaaatggg

SEQ ID NO: 5671699 - DNA, 25 bp, Homo sapien
taggagctctgtgcgctcacatcag

SEQ ID NO: 5671700 - DNA, 25 bp, Homo sapien
cagctgttggccttgtaagtcacac

SEQ ID NO: 5671701 - DNA, 25 bp, Homo sapien
ttggccttgtaagtcacacctttgc

SEQ ID NO: 5671702 - DNA, 25 bp, Homo sapien
ctgaaatgggttaggagctctgtgc

SEQ ID NO: 5671703 - DNA, 25 bp, Homo sapien
tgatgtgagcgcacagagctcctaa

SEQ ID NO: 5671704 - DNA, 25 bp, Homo sapien
gcaaaggtgtgacttacaaggccaa

SEQ ID NO: 5671705 - DNA, 25 bp, Homo sapien
gccaacagctgatgtgagcgcacag

SEQ ID NO: 5671706 - DNA, 25 bp, Homo sapien
ggtgtgacttacaaggccaacagct

SEQ ID NO: 5671707 - DNA, 25 bp, Homo sapien
gcacagagctcctaacccatttcag

SEQ ID NO: 5671708 - DNA, 25 bp, Homo sapien
cccatttcaggacttaagaaacttg

SEQ ID NO: 5671709 - DNA, 25 bp, Homo sapien
gaggccctgttacaaactgtataag

SEQ ID NO: 5671710 - DNA, 25 bp, Homo sapien
caaactgtataagtagcttagctgg

SEQ ID NO: 5671711 - DNA, 25 bp, Homo sapien
ccttcaggcattaggaaagtttcct

SEQ ID NO: 5671712 - DNA, 25 bp, Homo sapien
tgcccttcaggcattaggaaagttt

SEQ ID NO: 5671713 - DNA, 25 bp, Homo sapien
ttttcagtaattgcccttcaggcat

SEQ ID NO: 5671714 - DNA, 25 bp, Homo sapien
tcttccgaggccctgttacaaactg

SEQ ID NO: 5671715 - DNA, 25 bp, Homo sapien
cagtttgtaacagggcctcggaaga

SEQ ID NO: 5671716 - DNA, 25 bp, Homo sapien
gaaactttcctaatgcctgaagggc

SEQ ID NO: 5671717 - DNA, 25 bp, Homo sapien
tatacagtttgtaacagggcctcgg

SEQ ID NO: 5671718 - DNA, 25 bp, Homo sapien
ccagctaagctacttatacagtttg

SEQ ID NO: 5671719 - DNA, 25 bp, Homo sapien
atgcctgaagggcaattactgaaaa

SEQ ID NO: 5671720 - DNA, 25 bp, Homo sapien
caaggaaactttcctaatgcctgaa

SEQ ID NO: 5671721 - DNA, 25 bp, Homo sapien
tgactgaggccgctggcactgagaa

SEQ ID NO: 5671722 - DNA, 25 bp, Homo sapien
gactgaggccgctggcactgagaac

SEQ ID NO: 5671723 - DNA, 25 bp, Homo sapien
ttctcagtgccagcggcctcagtca

SEQ ID NO: 5671724 - DNA, 25 bp, Homo sapien
gttctcagtgccagcggcctcagtc

SEQ ID NO: 5671725 - DNA, 25 bp, Homo sapien
atttgtatctggcagaatggtttta

SEQ ID NO: 5671726 - DNA, 25 bp, Homo sapien
tagctatttgtatctggcagaatgg

SEQ ID NO: 5671727 - DNA, 25 bp, Homo sapien
cactcatgacgtttatagctatttg

SEQ ID NO: 5671728 - DNA, 25 bp, Homo sapien
taaccactcatgacgtttatagcta

SEQ ID NO: 5671729 - DNA, 25 bp, Homo sapien
ttaaacacttgtatctcataaccac

SEQ ID NO: 5671730 - DNA, 25 bp, Homo sapien
tatagctatttgtatctggcagaat

SEQ ID NO: 5671731 - DNA, 25 bp, Homo sapien
cattctgccagatacaaatagctat

SEQ ID NO: 5671732 - DNA, 25 bp, Homo sapien
tagctataaacgtcatgagtggtta

SEQ ID NO: 5671733 - DNA, 25 bp, Homo sapien
caaatagctataaacgtcatgagtg

SEQ ID NO: 5671734 - DNA, 25 bp, Homo sapien
tggttatgagatacaagtgtttaag

SEQ ID NO: 5671735 - DNA, 25 bp, Homo sapien
taaaaccattctgccagatacaaat

SEQ ID NO: 5671736 - DNA, 25 bp, Homo sapien
aaccattctgccagatacaaatagc

SEQ ID NO: 5671737 - DNA, 25 bp, Homo sapien
ctttaatcatttctgagaaccagaa

SEQ ID NO: 5671738 - DNA, 25 bp, Homo sapien
tctgagaaccagaagtttcccagta

SEQ ID NO: 5671739 - DNA, 25 bp, Homo sapien
ctgagaaccagaagtttcccagtat

SEQ ID NO: 5671740 - DNA, 25 bp, Homo sapien
tgagaaccagaagtttcccagtatt

SEQ ID NO: 5671741 - DNA, 25 bp, Homo sapien
tactgggaaacttctggttctcaga

SEQ ID NO: 5671742 - DNA, 25 bp, Homo sapien
atactgggaaacttctggttctcag

SEQ ID NO: 5671743 - DNA, 25 bp, Homo sapien
aatactgggaaacttctggttctca

SEQ ID NO: 5671744 - DNA, 25 bp, Homo sapien
ttctggttctcagaaatgattaaag

SEQ ID NO: 5671745 - DNA, 25 bp, Homo sapien
actaaaaatgctgaaatactgggaa

SEQ ID NO: 5671746 - DNA, 25 bp, Homo sapien
gaaatgattaaaggaaatattccca

SEQ ID NO: 5671747 - DNA, 25 bp, Homo sapien
tattcccatataaaaagccaaatgt

SEQ ID NO: 5671748 - DNA, 25 bp, Homo sapien
aatactgggaaacttctggttctca

SEQ ID NO: 5671749 - DNA, 25 bp, Homo sapien
aagccaaatgtattctatgtaagaa

SEQ ID NO: 5671750 - DNA, 25 bp, Homo sapien
ttctggttctcagaaatgattaaag

SEQ ID NO: 5671751 - DNA, 25 bp, Homo sapien
caaatatgcgtagattaacatttta

SEQ ID NO: 5671752 - DNA, 25 bp, Homo sapien
aaaaattagcaaatatgcgtagatt

SEQ ID NO: 5671753 - DNA, 25 bp, Homo sapien
gcaaatatgcgtagattaacatttt

SEQ ID NO: 5671754 - DNA, 25 bp, Homo sapien
aaatatgcgtagattaacattttag

SEQ ID NO: 5671755 - DNA, 25 bp, Homo sapien
taaaatgttaatctacgcatatttg

SEQ ID NO: 5671756 - DNA, 25 bp, Homo sapien
aatctacgcatatttgctaattttt

SEQ ID NO: 5671757 - DNA, 25 bp, Homo sapien
aaaatgttaatctacgcatatttgc

SEQ ID NO: 5671758 - DNA, 25 bp, Homo sapien
ctaaaatgttaatctacgcatattt

SEQ ID NO: 5671759 - DNA, 25 bp, Homo sapien
cagtttaaaggaacactattcttgg

SEQ ID NO: 5671760 - DNA, 25 bp, Homo sapien
ttgtagctccagtttaaaggaacac

SEQ ID NO: 5671761 - DNA, 25 bp, Homo sapien
aaaaattagcaaatatgcgtagatt

SEQ ID NO: 5671762 - DNA, 25 bp, Homo sapien
gcaaatatgcgtagattaacatttt

SEQ ID NO: 5671763 - DNA, 25 bp, Homo sapien
gctccagtttaaaggaacactattc

SEQ ID NO: 5671764 - DNA, 25 bp, Homo sapien
ttaacattttagagagtttccaatc

SEQ ID NO: 5671765 - DNA, 25 bp, Homo sapien
gaatagtgttcctttaaactggagc

SEQ ID NO: 5671766 - DNA, 25 bp, Homo sapien
ccaagaatagtgttcctttaaactg

SEQ ID NO: 5671767 - DNA, 25 bp, Homo sapien
gattggaaactctctaaaatgttaa

SEQ ID NO: 5671768 - DNA, 25 bp, Homo sapien
aaaatgttaatctacgcatatttgc

SEQ ID NO: 5671769 - DNA, 25 bp, Homo sapien
tctctaaaatgttaatctacgcata

SEQ ID NO: 5671770 - DNA, 25 bp, Homo sapien
tgttcctttaaactggagctacaaa

SEQ ID NO: 5671771 - DNA, 25 bp, Homo sapien
ccggcatggattccagttcttagtg

SEQ ID NO: 5671772 - DNA, 25 bp, Homo sapien
gcgcccggcatggattccagttctt

SEQ ID NO: 5671773 - DNA, 25 bp, Homo sapien
cgcgcccggcatggattccagttct

SEQ ID NO: 5671774 - DNA, 25 bp, Homo sapien
gcccggcatggattccagttcttag

SEQ ID NO: 5671775 - DNA, 25 bp, Homo sapien
cgcccggcatggattccagttctta

SEQ ID NO: 5671776 - DNA, 25 bp, Homo sapien
aacgcgcccggcatggattccagtt

SEQ ID NO: 5671777 - DNA, 25 bp, Homo sapien
aagaactggaatccatgccgggcgc

SEQ ID NO: 5671778 - DNA, 25 bp, Homo sapien
agaactggaatccatgccgggcgcg

SEQ ID NO: 5671779 - DNA, 25 bp, Homo sapien
ctaagaactggaatccatgccgggc

SEQ ID NO: 5671780 - DNA, 25 bp, Homo sapien
actggaatccatgccgggcgcgttg

SEQ ID NO: 5671781 - DNA, 25 bp, Homo sapien
cactaagaactggaatccatgccgg

SEQ ID NO: 5671782 - DNA, 25 bp, Homo sapien
taagaactggaatccatgccgggcg

SEQ ID NO: 5671783 - DNA, 25 bp, Homo sapien
tcttctgcttcagcctccccaagta

SEQ ID NO: 5671784 - DNA, 25 bp, Homo sapien
ttctgcttcagcctccccaagtagc

SEQ ID NO: 5671785 - DNA, 25 bp, Homo sapien
ttcttctgcttcagcctccccaagt

SEQ ID NO: 5671786 - DNA, 25 bp, Homo sapien
cttctgcttcagcctccccaagtag

SEQ ID NO: 5671787 - DNA, 25 bp, Homo sapien
ctgcttcagcctccccaagtagctg

SEQ ID NO: 5671788 - DNA, 25 bp, Homo sapien
tctgcttcagcctccccaagtagct

SEQ ID NO: 5671789 - DNA, 25 bp, Homo sapien
cagctacttggggaggctgaagcag

SEQ ID NO: 5671790 - DNA, 25 bp, Homo sapien
ctacttggggaggctgaagcagaag

SEQ ID NO: 5671791 - DNA, 25 bp, Homo sapien
gctacttggggaggctgaagcagaa

SEQ ID NO: 5671792 - DNA, 25 bp, Homo sapien
acttggggaggctgaagcagaagaa

SEQ ID NO: 5671793 - DNA, 25 bp, Homo sapien
agctacttggggaggctgaagcaga

SEQ ID NO: 5671794 - DNA, 25 bp, Homo sapien
tacttggggaggctgaagcagaaga

SEQ ID NO: 5671795 - DNA, 25 bp, Homo sapien
ttctttacaatcaacctcccacacc

SEQ ID NO: 5671796 - DNA, 25 bp, Homo sapien
tttctttacaatcaacctcccacac

SEQ ID NO: 5671797 - DNA, 25 bp, Homo sapien
ttttctttacaatcaacctcccaca

SEQ ID NO: 5671798 - DNA, 25 bp, Homo sapien
tgtgggaggttgattgtaaagaaaa

SEQ ID NO: 5671799 - DNA, 25 bp, Homo sapien
gtgtgggaggttgattgtaaagaaa

SEQ ID NO: 5671800 - DNA, 25 bp, Homo sapien
ggtgtgggaggttgattgtaaagaa

SEQ ID NO: 5671801 - DNA, 25 bp, Homo sapien
ctttacaatcaacctcccacacctt

SEQ ID NO: 5671802 - DNA, 25 bp, Homo sapien
ttctttacaatcaacctcccacacc

SEQ ID NO: 5671803 - DNA, 25 bp, Homo sapien
cagaattttctttacaatcaacctc

SEQ ID NO: 5671804 - DNA, 25 bp, Homo sapien
cagcatgtttacatacagaattttc

SEQ ID NO: 5671805 - DNA, 25 bp, Homo sapien
gccagcatgtttacatacagaattt

SEQ ID NO: 5671806 - DNA, 25 bp, Homo sapien
ttttctttacaatcaacctcccaca

SEQ ID NO: 5671807 - DNA, 25 bp, Homo sapien
gaggttgattgtaaagaaaattctg

SEQ ID NO: 5671808 - DNA, 25 bp, Homo sapien
tgtgggaggttgattgtaaagaaaa

SEQ ID NO: 5671809 - DNA, 25 bp, Homo sapien
aaaattctgtatgtaaacatgctgg

SEQ ID NO: 5671810 - DNA, 25 bp, Homo sapien
aaggtgtgggaggttgattgtaaag

SEQ ID NO: 5671811 - DNA, 25 bp, Homo sapien
aagaaaattctgtatgtaaacatgc

SEQ ID NO: 5671812 - DNA, 25 bp, Homo sapien
ggtgtgggaggttgattgtaaagaa

SEQ ID NO: 5671813 - DNA, 25 bp, Homo sapien
gctctttaagagtcctgaatgtttt

SEQ ID NO: 5671814 - DNA, 25 bp, Homo sapien
gatgtcacaatctgcaaagttatta

SEQ ID NO: 5671815 - DNA, 25 bp, Homo sapien
agagtcctgaatgttttttctttat

SEQ ID NO: 5671816 - DNA, 25 bp, Homo sapien
tgcacccggccttattttagctctt

SEQ ID NO: 5671817 - DNA, 25 bp, Homo sapien
cggccttattttagctctttaagag

SEQ ID NO: 5671818 - DNA, 25 bp, Homo sapien
tctttattctgatgtcacaatctgc

SEQ ID NO: 5671819 - DNA, 25 bp, Homo sapien
aagagctaaaataaggccgggtgca

SEQ ID NO: 5671820 - DNA, 25 bp, Homo sapien
taataactttgcagattgtgacatc

SEQ ID NO: 5671821 - DNA, 25 bp, Homo sapien
ctcttaaagagctaaaataaggccg

SEQ ID NO: 5671822 - DNA, 25 bp, Homo sapien
ataaagaaaaaacattcaggactct

SEQ ID NO: 5671823 - DNA, 25 bp, Homo sapien
tgcagattgtgacatcagaataaag

SEQ ID NO: 5671824 - DNA, 25 bp, Homo sapien
aaaacattcaggactcttaaagagc

SEQ ID NO: 5671825 - DNA, 25 bp, Homo sapien
cacacaaatagtttccaaattctga

SEQ ID NO: 5671826 - DNA, 25 bp, Homo sapien
acacacaaatagtttccaaattctg

SEQ ID NO: 5671827 - DNA, 25 bp, Homo sapien
ccaaattctgaagaaattaggtaga

SEQ ID NO: 5671828 - DNA, 25 bp, Homo sapien
acacacacaaatagtttccaaattc

SEQ ID NO: 5671829 - DNA, 25 bp, Homo sapien
aaattctgaagaaattaggtagaga

SEQ ID NO: 5671830 - DNA, 25 bp, Homo sapien
caaattctgaagaaattaggtagag

SEQ ID NO: 5671831 - DNA, 25 bp, Homo sapien
ctacctaatttcttcagaatttgga

SEQ ID NO: 5671832 - DNA, 25 bp, Homo sapien
ctctacctaatttcttcagaatttg

SEQ ID NO: 5671833 - DNA, 25 bp, Homo sapien
tctacctaatttcttcagaatttgg

SEQ ID NO: 5671834 - DNA, 25 bp, Homo sapien
tacctaatttcttcagaatttggaa

SEQ ID NO: 5671835 - DNA, 25 bp, Homo sapien
tctctacctaatttcttcagaattt

SEQ ID NO: 5671836 - DNA, 25 bp, Homo sapien
gaatttggaaactatttgtgtgtgt

SEQ ID NO: 5671837 - DNA, 25 bp, Homo sapien
aatacgtacaaatagactgggcaac

SEQ ID NO: 5671838 - DNA, 25 bp, Homo sapien
gaatacgtacaaatagactgggcaa

SEQ ID NO: 5671839 - DNA, 25 bp, Homo sapien
agaatacgtacaaatagactgggca

SEQ ID NO: 5671840 - DNA, 25 bp, Homo sapien
tacgtacaaatagactgggcaacat

SEQ ID NO: 5671841 - DNA, 25 bp, Homo sapien
taagaatacgtacaaatagactggg

SEQ ID NO: 5671842 - DNA, 25 bp, Homo sapien
aagaatacgtacaaatagactgggc

SEQ ID NO: 5671843 - DNA, 25 bp, Homo sapien
gcccagtctatttgtacgtattctt

SEQ ID NO: 5671844 - DNA, 25 bp, Homo sapien
ttgcccagtctatttgtacgtattc

SEQ ID NO: 5671845 - DNA, 25 bp, Homo sapien
tgcccagtctatttgtacgtattct

SEQ ID NO: 5671846 - DNA, 25 bp, Homo sapien
tgttgcccagtctatttgtacgtat

SEQ ID NO: 5671847 - DNA, 25 bp, Homo sapien
ccagtctatttgtacgtattcttaa

SEQ ID NO: 5671848 - DNA, 25 bp, Homo sapien
atgttgcccagtctatttgtacgta

SEQ ID NO: 5671849 - DNA, 25 bp, Homo sapien
taggccttttatctgagataatacc

SEQ ID NO: 5671850 - DNA, 25 bp, Homo sapien
tatttgtatacagtggagcaagaac

SEQ ID NO: 5671851 - DNA, 25 bp, Homo sapien
tatacagtggagcaagaaccataat

SEQ ID NO: 5671852 - DNA, 25 bp, Homo sapien
tttgtatacagtggagcaagaacca

SEQ ID NO: 5671853 - DNA, 25 bp, Homo sapien
acagtggagcaagaaccataatttt

SEQ ID NO: 5671854 - DNA, 25 bp, Homo sapien
tgtatacagtggagcaagaaccata

SEQ ID NO: 5671855 - DNA, 25 bp, Homo sapien
ggtattatctcagataaaaggccta

SEQ ID NO: 5671856 - DNA, 25 bp, Homo sapien
ggttcttgctccactgtatacaaat

SEQ ID NO: 5671857 - DNA, 25 bp, Homo sapien
tatggttcttgctccactgtataca

SEQ ID NO: 5671858 - DNA, 25 bp, Homo sapien
aaaattatggttcttgctccactgt

SEQ ID NO: 5671859 - DNA, 25 bp, Homo sapien
aaattatggttcttgctccactgta

SEQ ID NO: 5671860 - DNA, 25 bp, Homo sapien
tggttcttgctccactgtatacaaa

SEQ ID NO: 5671861 - DNA, 25 bp, Homo sapien
ccgccgcgaggggctttcaaactga

SEQ ID NO: 5671862 - DNA, 25 bp, Homo sapien
cgccgccgcgaggggctttcaaact

SEQ ID NO: 5671863 - DNA, 25 bp, Homo sapien
gccgccgcgaggggctttcaaactg

SEQ ID NO: 5671864 - DNA, 25 bp, Homo sapien
accctgacctctcagagacccgccg

SEQ ID NO: 5671865 - DNA, 25 bp, Homo sapien
ctgacctctcagagacccgccgccg

SEQ ID NO: 5671866 - DNA, 25 bp, Homo sapien
tgacctctcagagacccgccgccgc

SEQ ID NO: 5671867 - DNA, 25 bp, Homo sapien
gccacataaccctgacctctcagag

SEQ ID NO: 5671868 - DNA, 25 bp, Homo sapien
ccctgacctctcagagacccgccgc

SEQ ID NO: 5671869 - DNA, 25 bp, Homo sapien
tgccacataaccctgacctctcaga

SEQ ID NO: 5671870 - DNA, 25 bp, Homo sapien
cggcgggtctctgagaggtcagggt

SEQ ID NO: 5671871 - DNA, 25 bp, Homo sapien
gcggcggcgggtctctgagaggtca

SEQ ID NO: 5671872 - DNA, 25 bp, Homo sapien
ctctgagaggtcagggttatgtggc

SEQ ID NO: 5671873 - DNA, 25 bp, Homo sapien
gcggcgggtctctgagaggtcaggg

SEQ ID NO: 5671874 - DNA, 25 bp, Homo sapien
cggcggcgggtctctgagaggtcag

SEQ ID NO: 5671875 - DNA, 25 bp, Homo sapien
tctgagaggtcagggttatgtggca

SEQ ID NO: 5671876 - DNA, 25 bp, Homo sapien
cagtttgaaagcccctcgcggcggc

SEQ ID NO: 5671877 - DNA, 25 bp, Homo sapien
agtttgaaagcccctcgcggcggcg

SEQ ID NO: 5671878 - DNA, 25 bp, Homo sapien
tcagtttgaaagcccctcgcggcgg

SEQ ID NO: 5671879 - DNA, 25 bp, Homo sapien
cgccgcgaggggctttcaaactgat

SEQ ID NO: 5671880 - DNA, 25 bp, Homo sapien
ctgggctgcacttctttttgtttgt

SEQ ID NO: 5671881 - DNA, 25 bp, Homo sapien
caaactgatttccaactgggctgca

SEQ ID NO: 5671882 - DNA, 25 bp, Homo sapien
ccaactgggctgcacttctttttgt

SEQ ID NO: 5671883 - DNA, 25 bp, Homo sapien
tgatttccaactgggctgcacttct

SEQ ID NO: 5671884 - DNA, 25 bp, Homo sapien
ggctttcaaactgatttccaactgg

SEQ ID NO: 5671885 - DNA, 25 bp, Homo sapien
gaagtgcagcccagttggaaatcag

SEQ ID NO: 5671886 - DNA, 25 bp, Homo sapien
caaaaagaagtgcagcccagttgga

SEQ ID NO: 5671887 - DNA, 25 bp, Homo sapien
atcagtttgaaagcccctcgcggcg

SEQ ID NO: 5671888 - DNA, 25 bp, Homo sapien
tggaaatcagtttgaaagcccctcg

SEQ ID NO: 5671889 - DNA, 25 bp, Homo sapien
aaatcagtttgaaagcccctcgcgg

SEQ ID NO: 5671890 - DNA, 25 bp, Homo sapien
acaaacaaaaagaagtgcagcccag

SEQ ID NO: 5671891 - DNA, 25 bp, Homo sapien
caacactggtactcatcagatggaa

SEQ ID NO: 5671892 - DNA, 25 bp, Homo sapien
tatcccagaacaacactggtactca

SEQ ID NO: 5671893 - DNA, 25 bp, Homo sapien
ccgaggttttagtcatgatgtgctg

SEQ ID NO: 5671894 - DNA, 25 bp, Homo sapien
tagtcatgatgtgctgagctctctg

SEQ ID NO: 5671895 - DNA, 25 bp, Homo sapien
gatggaatgttttaccctgccgagg

SEQ ID NO: 5671896 - DNA, 25 bp, Homo sapien
taccctgccgaggttttagtcatga

SEQ ID NO: 5671897 - DNA, 25 bp, Homo sapien
tgagtaccagtgttgttctgggata

SEQ ID NO: 5671898 - DNA, 25 bp, Homo sapien
cattccatctgatgagtaccagtgt

SEQ ID NO: 5671899 - DNA, 25 bp, Homo sapien
cagagagctcagcacatcatgacta

SEQ ID NO: 5671900 - DNA, 25 bp, Homo sapien
cagcacatcatgactaaaacctcgg

SEQ ID NO: 5671901 - DNA, 25 bp, Homo sapien
ctcggcagggtaaaacattccatct

SEQ ID NO: 5671902 - DNA, 25 bp, Homo sapien
catcatgactaaaacctcggcaggg

SEQ ID NO: 5671903 - DNA, 25 bp, Homo sapien
ctgcagatgaacttagaatgtagcc

SEQ ID NO: 5671904 - DNA, 25 bp, Homo sapien
cagatgaacttagaatgtagccttt

SEQ ID NO: 5671905 - DNA, 25 bp, Homo sapien
gcagatgaacttagaatgtagcctt

SEQ ID NO: 5671906 - DNA, 25 bp, Homo sapien
tgcagatgaacttagaatgtagcct

SEQ ID NO: 5671907 - DNA, 25 bp, Homo sapien
agatgaacttagaatgtagcctttt

SEQ ID NO: 5671908 - DNA, 25 bp, Homo sapien
aaggctacattctaagttcatctgc

SEQ ID NO: 5671909 - DNA, 25 bp, Homo sapien
aaaggctacattctaagttcatctg

SEQ ID NO: 5671910 - DNA, 25 bp, Homo sapien
aaaaggctacattctaagttcatct

SEQ ID NO: 5671911 - DNA, 25 bp, Homo sapien
ggctacattctaagttcatctgcag

SEQ ID NO: 5671912 - DNA, 25 bp, Homo sapien
aggctacattctaagttcatctgca

SEQ ID NO: 5671913 - DNA, 25 bp, Homo sapien
tttctgagacaggaataatgtatgt

SEQ ID NO: 5671914 - DNA, 25 bp, Homo sapien
tgaaaactgtcacacaagcagataa

SEQ ID NO: 5671915 - DNA, 25 bp, Homo sapien
aactgtcacacaagcagataagagc

SEQ ID NO: 5671916 - DNA, 25 bp, Homo sapien
acaggaataatgtatgtgaactagc

SEQ ID NO: 5671917 - DNA, 25 bp, Homo sapien
agcagataagagcttactcgaaagg

SEQ ID NO: 5671918 - DNA, 25 bp, Homo sapien
tgtatgtgaactagcaggaaagtct

SEQ ID NO: 5671919 - DNA, 25 bp, Homo sapien
cctttcgagtaagctcttatctgct

SEQ ID NO: 5671920 - DNA, 25 bp, Homo sapien
cacatacattattcctgtctcagaa

SEQ ID NO: 5671921 - DNA, 25 bp, Homo sapien
agactttcctgctagttcacataca

SEQ ID NO: 5671922 - DNA, 25 bp, Homo sapien
gctcttatctgcttgtgtgacagtt

SEQ ID NO: 5671923 - DNA, 25 bp, Homo sapien
tatctgcttgtgtgacagttttcat

SEQ ID NO: 5671924 - DNA, 25 bp, Homo sapien
gctagttcacatacattattcctgt

SEQ ID NO: 5671925 - DNA, 25 bp, Homo sapien
tacagatttaccatcgaggttataa

SEQ ID NO: 5671926 - DNA, 25 bp, Homo sapien
agatttaccatcgaggttataaaag

SEQ ID NO: 5671927 - DNA, 25 bp, Homo sapien
gctacagatttaccatcgaggttat

SEQ ID NO: 5671928 - DNA, 25 bp, Homo sapien
aagtttacaagctcggggctacaga

SEQ ID NO: 5671929 - DNA, 25 bp, Homo sapien
gggctacagatttaccatcgaggtt

SEQ ID NO: 5671930 - DNA, 25 bp, Homo sapien
gctaaagtttacaagctcggggcta

SEQ ID NO: 5671931 - DNA, 25 bp, Homo sapien
tagccccgagcttgtaaactttagc

SEQ ID NO: 5671932 - DNA, 25 bp, Homo sapien
ttttataacctcgatggtaaatctg

SEQ ID NO: 5671933 - DNA, 25 bp, Homo sapien
cgatggtaaatctgtagccccgagc

SEQ ID NO: 5671934 - DNA, 25 bp, Homo sapien
tggtaaatctgtagccccgagcttg

SEQ ID NO: 5671935 - DNA, 25 bp, Homo sapien
tctgtagccccgagcttgtaaactt

SEQ ID NO: 5671936 - DNA, 25 bp, Homo sapien
taacctcgatggtaaatctgtagcc

SEQ ID NO: 5671937 - DNA, 25 bp, Homo sapien
gaaaaaatcaacctagcctgggtca

SEQ ID NO: 5671938 - DNA, 25 bp, Homo sapien
aaaaatcaacctagcctgggtcagc

SEQ ID NO: 5671939 - DNA, 25 bp, Homo sapien
aaaaaatcaacctagcctgggtcag

SEQ ID NO: 5671940 - DNA, 25 bp, Homo sapien
tgacccaggctaggttgattttttc

SEQ ID NO: 5671941 - DNA, 25 bp, Homo sapien
gctgacccaggctaggttgattttt

SEQ ID NO: 5671942 - DNA, 25 bp, Homo sapien
ctgacccaggctaggttgatttttt

SEQ ID NO: 5671943 - DNA, 25 bp, Homo sapien
gaaaaaatcaacctagcctgggtca

SEQ ID NO: 5671944 - DNA, 25 bp, Homo sapien
tccagcttgggtggcagaccctgtc

SEQ ID NO: 5671945 - DNA, 25 bp, Homo sapien
aaaaatcaacctagcctgggtcagc

SEQ ID NO: 5671946 - DNA, 25 bp, Homo sapien
tgaagctgcagtgtgcggagatcat

SEQ ID NO: 5671947 - DNA, 25 bp, Homo sapien
aaaaaatcaacctagcctgggtcag

SEQ ID NO: 5671948 - DNA, 25 bp, Homo sapien
ttgaagctgcagtgtgcggagatca

SEQ ID NO: 5671949 - DNA, 25 bp, Homo sapien
tgatctccgcacactgcagcttcaa

SEQ ID NO: 5671950 - DNA, 25 bp, Homo sapien
tgacccaggctaggttgattttttc

SEQ ID NO: 5671951 - DNA, 25 bp, Homo sapien
ttgagacagggtctgccacccaagc

SEQ ID NO: 5671952 - DNA, 25 bp, Homo sapien
atgatctccgcacactgcagcttca

SEQ ID NO: 5671953 - DNA, 25 bp, Homo sapien
gctgacccaggctaggttgattttt

SEQ ID NO: 5671954 - DNA, 25 bp, Homo sapien
ctgacccaggctaggttgatttttt

SEQ ID NO: 5671955 - DNA, 25 bp, Homo sapien
tgagtcaggaggatggcttgattcc

SEQ ID NO: 5671956 - DNA, 25 bp, Homo sapien
gtgtggtggtacacgcctgtactcc

SEQ ID NO: 5671957 - DNA, 25 bp, Homo sapien
aactagccgggtgtggtggtacacg

SEQ ID NO: 5671958 - DNA, 25 bp, Homo sapien
cgtgtaccaccacacccggctagtt

SEQ ID NO: 5671959 - DNA, 25 bp, Homo sapien
ggaatcaagccatcctcctgactca

SEQ ID NO: 5671960 - DNA, 25 bp, Homo sapien
ggagtacaggcgtgtaccaccacac

SEQ ID NO: 5671961 - DNA, 25 bp, Homo sapien
gtaatttgtaaaattagctgagcgt

SEQ ID NO: 5671962 - DNA, 25 bp, Homo sapien
aatttgtaaaattagctgagcgtgg

SEQ ID NO: 5671963 - DNA, 25 bp, Homo sapien
atttgtaaaattagctgagcgtggt

SEQ ID NO: 5671964 - DNA, 25 bp, Homo sapien
agtaatttgtaaaattagctgagcg

SEQ ID NO: 5671965 - DNA, 25 bp, Homo sapien
taatttgtaaaattagctgagcgtg

SEQ ID NO: 5671966 - DNA, 25 bp, Homo sapien
gagtaatttgtaaaattagctgagc

SEQ ID NO: 5671967 - DNA, 25 bp, Homo sapien
cgctcagctaattttacaaattact

SEQ ID NO: 5671968 - DNA, 25 bp, Homo sapien
tcagctaattttacaaattactctt

SEQ ID NO: 5671969 - DNA, 25 bp, Homo sapien
ctcagctaattttacaaattactct

SEQ ID NO: 5671970 - DNA, 25 bp, Homo sapien
gctcagctaattttacaaattactc

SEQ ID NO: 5671971 - DNA, 25 bp, Homo sapien
aaaacaagagctcgtctctacaaaa

SEQ ID NO: 5671972 - DNA, 25 bp, Homo sapien
acaaaacaagagctcgtctctacaa

SEQ ID NO: 5671973 - DNA, 25 bp, Homo sapien
ggcaacaaaacaagagctcgtctct

SEQ ID NO: 5671974 - DNA, 25 bp, Homo sapien
gcaacaaaacaagagctcgtctcta

SEQ ID NO: 5671975 - DNA, 25 bp, Homo sapien
caacaaaacaagagctcgtctctac

SEQ ID NO: 5671976 - DNA, 25 bp, Homo sapien
caaaacaagagctcgtctctacaaa

SEQ ID NO: 5671977 - DNA, 25 bp, Homo sapien
ttgtagagacgagctcttgttttgt

SEQ ID NO: 5671978 - DNA, 25 bp, Homo sapien
gtagagacgagctcttgttttgttg

SEQ ID NO: 5671979 - DNA, 25 bp, Homo sapien
agagacgagctcttgttttgttgcc

SEQ ID NO: 5671980 - DNA, 25 bp, Homo sapien
tagagacgagctcttgttttgttgc

SEQ ID NO: 5671981 - DNA, 25 bp, Homo sapien
tttgtagagacgagctcttgttttg

SEQ ID NO: 5671982 - DNA, 25 bp, Homo sapien
ttttgtagagacgagctcttgtttt

SEQ ID NO: 5671983 - DNA, 25 bp, Homo sapien
aacacatcctctgattgttagtaga

SEQ ID NO: 5671984 - DNA, 25 bp, Homo sapien
gagaccctaatttatggcagactgg

SEQ ID NO: 5671985 - DNA, 25 bp, Homo sapien
gaccctaatttatggcagactggct

SEQ ID NO: 5671986 - DNA, 25 bp, Homo sapien
tagagaccctaatttatggcagact

SEQ ID NO: 5671987 - DNA, 25 bp, Homo sapien
gaaaacacatcctctgattgttagt

SEQ ID NO: 5671988 - DNA, 25 bp, Homo sapien
accctaatttatggcagactggcta

SEQ ID NO: 5671989 - DNA, 25 bp, Homo sapien
agccagtctgccataaattagggtc

SEQ ID NO: 5671990 - DNA, 25 bp, Homo sapien
tctactaacaatcagaggatgtgtt

SEQ ID NO: 5671991 - DNA, 25 bp, Homo sapien
cagtctgccataaattagggtctct

SEQ ID NO: 5671992 - DNA, 25 bp, Homo sapien
tagccagtctgccataaattagggt

SEQ ID NO: 5671993 - DNA, 25 bp, Homo sapien
gccagtctgccataaattagggtct

SEQ ID NO: 5671994 - DNA, 25 bp, Homo sapien
actaacaatcagaggatgtgttttc

SEQ ID NO: 5671995 - DNA, 25 bp, Homo sapien
gcagcagtaccaggtggggcgggct

SEQ ID NO: 5671996 - DNA, 25 bp, Homo sapien
agcagtaccaggtggggcgggctgg

SEQ ID NO: 5671997 - DNA, 25 bp, Homo sapien
cagcagtaccaggtggggcgggctg

SEQ ID NO: 5671998 - DNA, 25 bp, Homo sapien
gccacagctacacccccactcccca

SEQ ID NO: 5671999 - DNA, 25 bp, Homo sapien
tggggagtgggggtgtagctgtggc

SEQ ID NO: 5672000 - DNA, 25 bp, Homo sapien
cagcccgccccacctggtactgctg

SEQ ID NO: 5672001 - DNA, 25 bp, Homo sapien
ccagcccgccccacctggtactgct

SEQ ID NO: 5672002 - DNA, 25 bp, Homo sapien
agcccgccccacctggtactgctgc

SEQ ID NO: 5672003 - DNA, 25 bp, Homo sapien
gagcctggagaggacctgtgccaca

SEQ ID NO: 5672004 - DNA, 25 bp, Homo sapien
gggcgggctggcctggagcctggag

SEQ ID NO: 5672005 - DNA, 25 bp, Homo sapien
ctggagaggacctgtgccacagcta

SEQ ID NO: 5672006 - DNA, 25 bp, Homo sapien
cttccagtggtagcagcagtaccag

SEQ ID NO: 5672007 - DNA, 25 bp, Homo sapien
gagaggacctgtgccacagctacac

SEQ ID NO: 5672008 - DNA, 25 bp, Homo sapien
ccagtggtagcagcagtaccaggtg

SEQ ID NO: 5672009 - DNA, 25 bp, Homo sapien
ctggtactgctgctaccactggaag

SEQ ID NO: 5672010 - DNA, 25 bp, Homo sapien
tagctgtggcacaggtcctctccag

SEQ ID NO: 5672011 - DNA, 25 bp, Homo sapien
tgtggcacaggtcctctccaggctc

SEQ ID NO: 5672012 - DNA, 25 bp, Homo sapien
gtgtagctgtggcacaggtcctctc

SEQ ID NO: 5672013 - DNA, 25 bp, Homo sapien
cagcccgccccacctggtactgctg

SEQ ID NO: 5672014 - DNA, 25 bp, Homo sapien
cacctggtactgctgctaccactgg

SEQ ID NO: 5672015 - DNA, 25 bp, Homo sapien
aataacagtgatggtctccaccatc

SEQ ID NO: 5672016 - DNA, 25 bp, Homo sapien
aacagtgatggtctccaccatctcc

SEQ ID NO: 5672017 - DNA, 25 bp, Homo sapien
gaaaaagatacgctggggcgacagt

SEQ ID NO: 5672018 - DNA, 25 bp, Homo sapien
aaagatacgctggggcgacagttgt

SEQ ID NO: 5672019 - DNA, 25 bp, Homo sapien
aaaaagatacgctggggcgacagtt

SEQ ID NO: 5672020 - DNA, 25 bp, Homo sapien
aaaagatacgctggggcgacagttg

SEQ ID NO: 5672021 - DNA, 25 bp, Homo sapien
acaactgtcgccccagcgtatcttt

SEQ ID NO: 5672022 - DNA, 25 bp, Homo sapien
aactgtcgccccagcgtatcttttt

SEQ ID NO: 5672023 - DNA, 25 bp, Homo sapien
caactgtcgccccagcgtatctttt

SEQ ID NO: 5672024 - DNA, 25 bp, Homo sapien
gatggtggagaccatcactgttatt

SEQ ID NO: 5672025 - DNA, 25 bp, Homo sapien
ggagatggtggagaccatcactgtt

SEQ ID NO: 5672026 - DNA, 25 bp, Homo sapien
actgtcgccccagcgtatctttttc

SEQ ID NO: 5672027 - DNA, 25 bp, Homo sapien
tgttcagcctgtaaaataacagtga

SEQ ID NO: 5672028 - DNA, 25 bp, Homo sapien
aataacagtgatggtctccaccatc

SEQ ID NO: 5672029 - DNA, 25 bp, Homo sapien
gaaaactgaattgttcagcctgtaa

SEQ ID NO: 5672030 - DNA, 25 bp, Homo sapien
tggtctccaccatctccatttttta

SEQ ID NO: 5672031 - DNA, 25 bp, Homo sapien
cttgtgggtgaaaactgaattgttc

SEQ ID NO: 5672032 - DNA, 25 bp, Homo sapien
gaaaaagatacgctggggcgacagt

SEQ ID NO: 5672033 - DNA, 25 bp, Homo sapien
gctgtggcattttgaaaggactgca

SEQ ID NO: 5672034 - DNA, 25 bp, Homo sapien
gaatgtggtgctgtggcattttgaa

SEQ ID NO: 5672035 - DNA, 25 bp, Homo sapien
ctggagaccacccttgagttaggtt

SEQ ID NO: 5672036 - DNA, 25 bp, Homo sapien
tctgttctgcatgtgaatgtggtgc

SEQ ID NO: 5672037 - DNA, 25 bp, Homo sapien
gagttaggtttttctctgttctgca

SEQ ID NO: 5672038 - DNA, 25 bp, Homo sapien
tctaatcctatctggagaccaccct

SEQ ID NO: 5672039 - DNA, 25 bp, Homo sapien
cagagaaaaacctaactcaagggtg

SEQ ID NO: 5672040 - DNA, 25 bp, Homo sapien
gagcccctgcagtcctttcaaaatg

SEQ ID NO: 5672041 - DNA, 25 bp, Homo sapien
ttcaaaatgccacagcaccacattc

SEQ ID NO: 5672042 - DNA, 25 bp, Homo sapien
aagggtggtctccagataggattag

SEQ ID NO: 5672043 - DNA, 25 bp, Homo sapien
caccacattcacatgcagaacagag

SEQ ID NO: 5672044 - DNA, 25 bp, Homo sapien
ttgatgagcccctgcagtcctttca

SEQ ID NO: 5672045 - DNA, 25 bp, Homo sapien
tgttcatatggtacatttcatctgc

SEQ ID NO: 5672046 - DNA, 25 bp, Homo sapien
actgctttttagatgttcatatggt

SEQ ID NO: 5672047 - DNA, 25 bp, Homo sapien
tagatgttcatatggtacatttcat

SEQ ID NO: 5672048 - DNA, 25 bp, Homo sapien
ctttttagatgttcatatggtacat

SEQ ID NO: 5672049 - DNA, 25 bp, Homo sapien
gatgttcatatggtacatttcatct

SEQ ID NO: 5672050 - DNA, 25 bp, Homo sapien
gctttttagatgttcatatggtaca

SEQ ID NO: 5672051 - DNA, 25 bp, Homo sapien
gaaatgtaccatatgaacatctaaa

SEQ ID NO: 5672052 - DNA, 25 bp, Homo sapien
taccatatgaacatctaaaaagcag

SEQ ID NO: 5672053 - DNA, 25 bp, Homo sapien
gcagatgaaatgtaccatatgaaca

SEQ ID NO: 5672054 - DNA, 25 bp, Homo sapien
cagatgaaatgtaccatatgaacat

SEQ ID NO: 5672055 - DNA, 25 bp, Homo sapien
gatgaaatgtaccatatgaacatct

SEQ ID NO: 5672056 - DNA, 25 bp, Homo sapien
tgtaccatatgaacatctaaaaagc

SEQ ID NO: 5672057 - DNA, 25 bp, Homo sapien
tgttcatatggtacatttcatctgc

SEQ ID NO: 5672058 - DNA, 25 bp, Homo sapien
aaatgattcttctactgctttttag

SEQ ID NO: 5672059 - DNA, 25 bp, Homo sapien
agtacagtgcaataactgcttttta

SEQ ID NO: 5672060 - DNA, 25 bp, Homo sapien
catttcatctgcttgcttttgggta

SEQ ID NO: 5672061 - DNA, 25 bp, Homo sapien
gctttttagatgttcatatggtaca

SEQ ID NO: 5672062 - DNA, 25 bp, Homo sapien
tattaaagtacagtgcaataactgc

SEQ ID NO: 5672063 - DNA, 25 bp, Homo sapien
tatttgctgtatggtgtatctagcc

SEQ ID NO: 5672064 - DNA, 25 bp, Homo sapien
gctgtatggtgtatctagccaccca

SEQ ID NO: 5672065 - DNA, 25 bp, Homo sapien
tgtatctagccacccatcaatctta

SEQ ID NO: 5672066 - DNA, 25 bp, Homo sapien
tatggtgtatctagccacccatcaa

SEQ ID NO: 5672067 - DNA, 25 bp, Homo sapien
agtgaattgcagacttgcatgtgtc

SEQ ID NO: 5672068 - DNA, 25 bp, Homo sapien
cagacttgcatgtgtcttcccctgc

SEQ ID NO: 5672069 - DNA, 25 bp, Homo sapien
ggctagatacaccatacagcaaata

SEQ ID NO: 5672070 - DNA, 25 bp, Homo sapien
gggaagacacatgcaagtctgcaat

SEQ ID NO: 5672071 - DNA, 25 bp, Homo sapien
gacacatgcaagtctgcaattcact

SEQ ID NO: 5672072 - DNA, 25 bp, Homo sapien
gggtggctagatacaccatacagca

SEQ ID NO: 5672073 - DNA, 25 bp, Homo sapien
taagattgatgggtggctagataca

SEQ ID NO: 5672074 - DNA, 25 bp, Homo sapien
tgatgggtggctagatacaccatac

SEQ ID NO: 5672075 - DNA, 25 bp, Homo sapien
atagtctataagttacgtttctgct

SEQ ID NO: 5672076 - DNA, 25 bp, Homo sapien
cagaggttaatagtctataagttac

SEQ ID NO: 5672077 - DNA, 25 bp, Homo sapien
aaatcagaggttaatagtctataag

SEQ ID NO: 5672078 - DNA, 25 bp, Homo sapien
taatagtctataagttacgtttctg

SEQ ID NO: 5672079 - DNA, 25 bp, Homo sapien
aatagtctataagttacgtttctgc

SEQ ID NO: 5672080 - DNA, 25 bp, Homo sapien
agaggttaatagtctataagttacg

SEQ ID NO: 5672081 - DNA, 25 bp, Homo sapien
cttatagactattaacctctgattt

SEQ ID NO: 5672082 - DNA, 25 bp, Homo sapien
gtaacttatagactattaacctctg

SEQ ID NO: 5672083 - DNA, 25 bp, Homo sapien
gcagaaacgtaacttatagactatt

SEQ ID NO: 5672084 - DNA, 25 bp, Homo sapien
cgtaacttatagactattaacctct

SEQ ID NO: 5672085 - DNA, 25 bp, Homo sapien
agcagaaacgtaacttatagactat

SEQ ID NO: 5672086 - DNA, 25 bp, Homo sapien
cagaaacgtaacttatagactatta

SEQ ID NO: 5672087 - DNA, 25 bp, Homo sapien
taacaccatacagtttcacagttga

SEQ ID NO: 5672088 - DNA, 25 bp, Homo sapien
ttttcattatgggaacattcccaaa

SEQ ID NO: 5672089 - DNA, 25 bp, Homo sapien
aagttaacaccatacagtttcacag

SEQ ID NO: 5672090 - DNA, 25 bp, Homo sapien
tcccaaataagttaacaccatacag

SEQ ID NO: 5672091 - DNA, 25 bp, Homo sapien
tgaagattactgcatgagagggaag

SEQ ID NO: 5672092 - DNA, 25 bp, Homo sapien
gttgaagattactgcatgagaggga

SEQ ID NO: 5672093 - DNA, 25 bp, Homo sapien
aactgtgaaactgtatggtgttaac

SEQ ID NO: 5672094 - DNA, 25 bp, Homo sapien
tatggtgttaacttatttgggaatg

SEQ ID NO: 5672095 - DNA, 25 bp, Homo sapien
cttccctctcatgcagtaatcttca

SEQ ID NO: 5672096 - DNA, 25 bp, Homo sapien
tcaactgtgaaactgtatggtgtta

SEQ ID NO: 5672097 - DNA, 25 bp, Homo sapien
tccctctcatgcagtaatcttcaac

SEQ ID NO: 5672098 - DNA, 25 bp, Homo sapien
tttgggaatgttcccataatgaaaa

SEQ ID NO: 5672099 - DNA, 25 bp, Homo sapien
tacatagcctgttctatagaacatt

SEQ ID NO: 5672100 - DNA, 25 bp, Homo sapien
tttaccacacacaagacccaatgta

SEQ ID NO: 5672101 - DNA, 25 bp, Homo sapien
gagcagtgtttcttggcccccttta

SEQ ID NO: 5672102 - DNA, 25 bp, Homo sapien
gaacatttcccactagagcagtgtt

SEQ ID NO: 5672103 - DNA, 25 bp, Homo sapien
tatagaacatttcccactagagcag

SEQ ID NO: 5672104 - DNA, 25 bp, Homo sapien
acacaagacccaatgtaatctcagg

SEQ ID NO: 5672105 - DNA, 25 bp, Homo sapien
cactgctctagtgggaaatgttcta

SEQ ID NO: 5672106 - DNA, 25 bp, Homo sapien
gaaatgttctatagaacaggctatg

SEQ ID NO: 5672107 - DNA, 25 bp, Homo sapien
aaacactgctctagtgggaaatgtt

SEQ ID NO: 5672108 - DNA, 25 bp, Homo sapien
taaagggggccaagaaacactgctc

SEQ ID NO: 5672109 - DNA, 25 bp, Homo sapien
cctgagattacattgggtcttgtgt

SEQ ID NO: 5672110 - DNA, 25 bp, Homo sapien
tacattgggtcttgtgtgtggtaaa

SEQ ID NO: 5672111 - DNA, 25 bp, Homo sapien
gataagatgggaatgagggtttacc

SEQ ID NO: 5672112 - DNA, 25 bp, Homo sapien
taagatgggaatgagggtttacctc

SEQ ID NO: 5672113 - DNA, 25 bp, Homo sapien
aaaaaagataagatgggaatgaggg

SEQ ID NO: 5672114 - DNA, 25 bp, Homo sapien
ttacctcaaagagtttttatggaga

SEQ ID NO: 5672115 - DNA, 25 bp, Homo sapien
tgggaatgagggtttacctcaaaga

SEQ ID NO: 5672116 - DNA, 25 bp, Homo sapien
caaagagtttttatggagattaaat

SEQ ID NO: 5672117 - DNA, 25 bp, Homo sapien
ggtaaaccctcattcccatcttatc

SEQ ID NO: 5672118 - DNA, 25 bp, Homo sapien
gaggtaaaccctcattcccatctta

SEQ ID NO: 5672119 - DNA, 25 bp, Homo sapien
taatctccataaaaactctttgagg

SEQ ID NO: 5672120 - DNA, 25 bp, Homo sapien
tctttgaggtaaaccctcattccca

SEQ ID NO: 5672121 - DNA, 25 bp, Homo sapien
tcatttaatctccataaaaactctt

SEQ ID NO: 5672122 - DNA, 25 bp, Homo sapien
tatttcatttaatctccataaaaac

SEQ ID NO: 5672123 - DNA, 25 bp, Homo sapien
aattagctggttgcgtgcctgtagt

SEQ ID NO: 5672124 - DNA, 25 bp, Homo sapien
tatacaaattagctggttgcgtgcc

SEQ ID NO: 5672125 - DNA, 25 bp, Homo sapien
tacaaattagctggttgcgtgcctg

SEQ ID NO: 5672126 - DNA, 25 bp, Homo sapien
atacaaattagctggttgcgtgcct

SEQ ID NO: 5672127 - DNA, 25 bp, Homo sapien
acaaattagctggttgcgtgcctgt

SEQ ID NO: 5672128 - DNA, 25 bp, Homo sapien
caaattagctggttgcgtgcctgta

SEQ ID NO: 5672129 - DNA, 25 bp, Homo sapien
ggcacgcaaccagctaatttgtata

SEQ ID NO: 5672130 - DNA, 25 bp, Homo sapien
caggcacgcaaccagctaatttgta

SEQ ID NO: 5672131 - DNA, 25 bp, Homo sapien
actacaggcacgcaaccagctaatt

SEQ ID NO: 5672132 - DNA, 25 bp, Homo sapien
acaggcacgcaaccagctaatttgt

SEQ ID NO: 5672133 - DNA, 25 bp, Homo sapien
gcacgcaaccagctaatttgtatat

SEQ ID NO: 5672134 - DNA, 25 bp, Homo sapien
aggcacgcaaccagctaatttgtat

SEQ ID NO: 5672135 - DNA, 25 bp, Homo sapien
catcctttcttagccattcagaacc

SEQ ID NO: 5672136 - DNA, 25 bp, Homo sapien
aatgaggacgtcagtactaagtaca

SEQ ID NO: 5672137 - DNA, 25 bp, Homo sapien
gccattcagaacctttctaaatgca

SEQ ID NO: 5672138 - DNA, 25 bp, Homo sapien
gtaaatgaggacgtcagtactaagt

SEQ ID NO: 5672139 - DNA, 25 bp, Homo sapien
agtacatcctttcttagccattcag

SEQ ID NO: 5672140 - DNA, 25 bp, Homo sapien
cagtactaagtacatcctttcttag

SEQ ID NO: 5672141 - DNA, 25 bp, Homo sapien
tgtacttagtactgacgtcctcatt

SEQ ID NO: 5672142 - DNA, 25 bp, Homo sapien
gaaaggttctgaatggctaagaaag

SEQ ID NO: 5672143 - DNA, 25 bp, Homo sapien
tctgaatggctaagaaaggatgtac

SEQ ID NO: 5672144 - DNA, 25 bp, Homo sapien
ctaagaaaggatgtacttagtactg

SEQ ID NO: 5672145 - DNA, 25 bp, Homo sapien
acttagtactgacgtcctcatttac

SEQ ID NO: 5672146 - DNA, 25 bp, Homo sapien
tgcatttagaaaggttctgaatggc

SEQ ID NO: 5672147 - DNA, 25 bp, Homo sapien
aatcgagaattctatcgttatgcca

SEQ ID NO: 5672148 - DNA, 25 bp, Homo sapien
tgccaactcaaaagtggtttatgtg

SEQ ID NO: 5672149 - DNA, 25 bp, Homo sapien
ggtatacagaccaagtctaatcgag

SEQ ID NO: 5672150 - DNA, 25 bp, Homo sapien
gaccaagtctaatcgagaattctat

SEQ ID NO: 5672151 - DNA, 25 bp, Homo sapien
gagtggtatacagaccaagtctaat

SEQ ID NO: 5672152 - DNA, 25 bp, Homo sapien
tatcgttatgccaactcaaaagtgg

SEQ ID NO: 5672153 - DNA, 25 bp, Homo sapien
aaccacttttgagttggcataacga

SEQ ID NO: 5672154 - DNA, 25 bp, Homo sapien
tggcataacgatagaattctcgatt

SEQ ID NO: 5672155 - DNA, 25 bp, Homo sapien
cgatagaattctcgattagacttgg

SEQ ID NO: 5672156 - DNA, 25 bp, Homo sapien
gaattctcgattagacttggtctgt

SEQ ID NO: 5672157 - DNA, 25 bp, Homo sapien
gattagacttggtctgtataccact

SEQ ID NO: 5672158 - DNA, 25 bp, Homo sapien
cacataaaccacttttgagttggca

SEQ ID NO: 5672159 - DNA, 25 bp, Homo sapien
tatccaaatgattttctatcctgga

SEQ ID NO: 5672160 - DNA, 25 bp, Homo sapien
ctatccaaatgattttctatcctgg

SEQ ID NO: 5672161 - DNA, 25 bp, Homo sapien
atccaaatgattttctatcctggaa

SEQ ID NO: 5672162 - DNA, 25 bp, Homo sapien
ccaggatagaaaatcatttggatag

SEQ ID NO: 5672163 - DNA, 25 bp, Homo sapien
ttccaggatagaaaatcatttggat

SEQ ID NO: 5672164 - DNA, 25 bp, Homo sapien
tccaggatagaaaatcatttggata

SEQ ID NO: 5672165 - DNA, 25 bp, Homo sapien
ggactggacttaatcttccacaagg

SEQ ID NO: 5672166 - DNA, 25 bp, Homo sapien
taatcttccacaaggttcccaggcg

SEQ ID NO: 5672167 - DNA, 25 bp, Homo sapien
caaagggactggacttaatcttcca

SEQ ID NO: 5672168 - DNA, 25 bp, Homo sapien
gacttaatcttccacaaggttccca

SEQ ID NO: 5672169 - DNA, 25 bp, Homo sapien
cacaaggttcccaggcgggtcctgg

SEQ ID NO: 5672170 - DNA, 25 bp, Homo sapien
aagggactggacttaatcttccaca

SEQ ID NO: 5672171 - DNA, 25 bp, Homo sapien
cgcctgggaaccttgtggaagatta

SEQ ID NO: 5672172 - DNA, 25 bp, Homo sapien
gaaccttgtggaagattaagtccag

SEQ ID NO: 5672173 - DNA, 25 bp, Homo sapien
tgggaaccttgtggaagattaagtc

SEQ ID NO: 5672174 - DNA, 25 bp, Homo sapien
caggacccgcctgggaaccttgtgg

SEQ ID NO: 5672175 - DNA, 25 bp, Homo sapien
ccttgtggaagattaagtccagtcc

SEQ ID NO: 5672176 - DNA, 25 bp, Homo sapien
tggaagattaagtccagtccctttg

SEQ ID NO: 5672177 - DNA, 25 bp, Homo sapien
ttgcatccctgtctccaacctgggt

SEQ ID NO: 5672178 - DNA, 25 bp, Homo sapien
tgaggttactgtaagctgtgattgc

SEQ ID NO: 5672179 - DNA, 25 bp, Homo sapien
tgcatccctgtctccaacctgggtg

SEQ ID NO: 5672180 - DNA, 25 bp, Homo sapien
gctgtgattgcatccctgtctccaa

SEQ ID NO: 5672181 - DNA, 25 bp, Homo sapien
gattgcatccctgtctccaacctgg

SEQ ID NO: 5672182 - DNA, 25 bp, Homo sapien
gcatccctgtctccaacctgggtga

SEQ ID NO: 5672183 - DNA, 25 bp, Homo sapien
ccaggttggagacagggatgcaatc

SEQ ID NO: 5672184 - DNA, 25 bp, Homo sapien
gcaatcacagcttacagtaacctca

SEQ ID NO: 5672185 - DNA, 25 bp, Homo sapien
acccaggttggagacagggatgcaa

SEQ ID NO: 5672186 - DNA, 25 bp, Homo sapien
tcacccaggttggagacagggatgc

SEQ ID NO: 5672187 - DNA, 25 bp, Homo sapien
ttggagacagggatgcaatcacagc

SEQ ID NO: 5672188 - DNA, 25 bp, Homo sapien
cacccaggttggagacagggatgca

SEQ ID NO: 5672189 - DNA, 25 bp, Homo sapien
acaaacaaaaatggctaggtgtggt

SEQ ID NO: 5672190 - DNA, 25 bp, Homo sapien
aaacaaacaaaaatggctaggtgtg

SEQ ID NO: 5672191 - DNA, 25 bp, Homo sapien
caaacaaacaaaaatggctaggtgt

SEQ ID NO: 5672192 - DNA, 25 bp, Homo sapien
ggtaacatagtgagagctcgtctct

SEQ ID NO: 5672193 - DNA, 25 bp, Homo sapien
caaacaaaaatggctaggtgtggtg

SEQ ID NO: 5672194 - DNA, 25 bp, Homo sapien
aacaaacaaaaatggctaggtgtgg

SEQ ID NO: 5672195 - DNA, 25 bp, Homo sapien
caccacacctagccatttttgtttg

SEQ ID NO: 5672196 - DNA, 25 bp, Homo sapien
ccaccacacctagccatttttgttt

SEQ ID NO: 5672197 - DNA, 25 bp, Homo sapien
accacacctagccatttttgtttgt

SEQ ID NO: 5672198 - DNA, 25 bp, Homo sapien
ccacacctagccatttttgtttgtt

SEQ ID NO: 5672199 - DNA, 25 bp, Homo sapien
tagagacgagctctcactatgttac

SEQ ID NO: 5672200 - DNA, 25 bp, Homo sapien
agagacgagctctcactatgttacc

SEQ ID NO: 5672201 - DNA, 25 bp, Homo sapien
gtgtacaaatgtctcatcaagacca

SEQ ID NO: 5672202 - DNA, 25 bp, Homo sapien
agaccatgcgtttagttcttttggg

SEQ ID NO: 5672203 - DNA, 25 bp, Homo sapien
tcatcaagaccatgcgtttagttct

SEQ ID NO: 5672204 - DNA, 25 bp, Homo sapien
ggtgtacaaatgtctcatcaagacc

SEQ ID NO: 5672205 - DNA, 25 bp, Homo sapien
tactctgaaaatgggtgtacaaatg

SEQ ID NO: 5672206 - DNA, 25 bp, Homo sapien
tgctactctgaaaatgggtgtacaa

SEQ ID NO: 5672207 - DNA, 25 bp, Homo sapien
agaactaaacgcatggtcttgatga

SEQ ID NO: 5672208 - DNA, 25 bp, Homo sapien
caaaagaactaaacgcatggtcttg

SEQ ID NO: 5672209 - DNA, 25 bp, Homo sapien
ggtcttgatgagacatttgtacacc

SEQ ID NO: 5672210 - DNA, 25 bp, Homo sapien
catttgtacacccattttcagagta

SEQ ID NO: 5672211 - DNA, 25 bp, Homo sapien
cccaaaagaactaaacgcatggtct

SEQ ID NO: 5672212 - DNA, 25 bp, Homo sapien
ttgtacacccattttcagagtagca

SEQ ID NO: 5672213 - DNA, 25 bp, Homo sapien
tggagtctcactctgtcgcccaagc

SEQ ID NO: 5672214 - DNA, 25 bp, Homo sapien
gcagtggcatgatcttggctcactg

SEQ ID NO: 5672215 - DNA, 25 bp, Homo sapien
ggagtctcactctgtcgcccaagct

SEQ ID NO: 5672216 - DNA, 25 bp, Homo sapien
ctcactctgtcgcccaagctggagt

SEQ ID NO: 5672217 - DNA, 25 bp, Homo sapien
caatctctgcctcccgtattcaagt

SEQ ID NO: 5672218 - DNA, 25 bp, Homo sapien
gagtctcactctgtcgcccaagctg

SEQ ID NO: 5672219 - DNA, 25 bp, Homo sapien
agcttgggcgacagagtgagactcc

SEQ ID NO: 5672220 - DNA, 25 bp, Homo sapien
actccagcttgggcgacagagtgag

SEQ ID NO: 5672221 - DNA, 25 bp, Homo sapien
cagcttgggcgacagagtgagactc

SEQ ID NO: 5672222 - DNA, 25 bp, Homo sapien
acttgaatacgggaggcagagattg

SEQ ID NO: 5672223 - DNA, 25 bp, Homo sapien
cagtgagccaagatcatgccactgc

SEQ ID NO: 5672224 - DNA, 25 bp, Homo sapien
gcttgggcgacagagtgagactcca

SEQ ID NO: 5672225 - DNA, 25 bp, Homo sapien
gaagataacagattatattcaaggg

SEQ ID NO: 5672226 - DNA, 25 bp, Homo sapien
aagataacagattatattcaaggga

SEQ ID NO: 5672227 - DNA, 25 bp, Homo sapien
ttaaaacattatagacactgaatat

SEQ ID NO: 5672228 - DNA, 25 bp, Homo sapien
aaaacattatagacactgaatatta

SEQ ID NO: 5672229 - DNA, 25 bp, Homo sapien
taaaacattatagacactgaatatt

SEQ ID NO: 5672230 - DNA, 25 bp, Homo sapien
atattcagtgtctataatgttttaa

SEQ ID NO: 5672231 - DNA, 25 bp, Homo sapien
aatattcagtgtctataatgtttta

SEQ ID NO: 5672232 - DNA, 25 bp, Homo sapien
taatattcagtgtctataatgtttt

SEQ ID NO: 5672233 - DNA, 25 bp, Homo sapien
cccttgaatataatctgttatcttc

SEQ ID NO: 5672234 - DNA, 25 bp, Homo sapien
ccttgaatataatctgttatcttca

SEQ ID NO: 5672235 - DNA, 25 bp, Homo sapien
tcccttgaatataatctgttatctt

SEQ ID NO: 5672236 - DNA, 25 bp, Homo sapien
gatgataaggattttagtctatgta

SEQ ID NO: 5672237 - DNA, 25 bp, Homo sapien
aagatgataaggattttagtctatg

SEQ ID NO: 5672238 - DNA, 25 bp, Homo sapien
gataaggattttagtctatgtagag

SEQ ID NO: 5672239 - DNA, 25 bp, Homo sapien
taaggattttagtctatgtagagta

SEQ ID NO: 5672240 - DNA, 25 bp, Homo sapien
aggattttagtctatgtagagtaca

SEQ ID NO: 5672241 - DNA, 25 bp, Homo sapien
aaggattttagtctatgtagagtac

SEQ ID NO: 5672242 - DNA, 25 bp, Homo sapien
ctctacatagactaaaatccttatc

SEQ ID NO: 5672243 - DNA, 25 bp, Homo sapien
catagactaaaatccttatcatctt

SEQ ID NO: 5672244 - DNA, 25 bp, Homo sapien
tgtactctacatagactaaaatcct

SEQ ID NO: 5672245 - DNA, 25 bp, Homo sapien
tactctacatagactaaaatcctta

SEQ ID NO: 5672246 - DNA, 25 bp, Homo sapien
tacatagactaaaatccttatcatc

SEQ ID NO: 5672247 - DNA, 25 bp, Homo sapien
tctacatagactaaaatccttatca

SEQ ID NO: 5672248 - DNA, 25 bp, Homo sapien
atccaggtccaacaaacttcactca

SEQ ID NO: 5672249 - DNA, 25 bp, Homo sapien
gtatatcagcacaaatagcactgtt

SEQ ID NO: 5672250 - DNA, 25 bp, Homo sapien
tcaggtatatcagcacaaatagcac

SEQ ID NO: 5672251 - DNA, 25 bp, Homo sapien
taccatccaggtccaacaaacttca

SEQ ID NO: 5672252 - DNA, 25 bp, Homo sapien
tagcactgtttaccatccaggtcca

SEQ ID NO: 5672253 - DNA, 25 bp, Homo sapien
tgtttaccatccaggtccaacaaac

SEQ ID NO: 5672254 - DNA, 25 bp, Homo sapien
gtgctatttgtgctgatatacctga

SEQ ID NO: 5672255 - DNA, 25 bp, Homo sapien
gaagtttgttggacctggatggtaa

SEQ ID NO: 5672256 - DNA, 25 bp, Homo sapien
tgagtgaagtttgttggacctggat

SEQ ID NO: 5672257 - DNA, 25 bp, Homo sapien
aacagtgctatttgtgctgatatac

SEQ ID NO: 5672258 - DNA, 25 bp, Homo sapien
tgatactgatgaccccaaccccaca

SEQ ID NO: 5672259 - DNA, 25 bp, Homo sapien
tggacctggatggtaaacagtgcta

SEQ ID NO: 5672260 - DNA, 25 bp, Homo sapien
ctgtgctgggtgatgttagatttgt

SEQ ID NO: 5672261 - DNA, 25 bp, Homo sapien
tcagtcgttatacacctgaggatgt

SEQ ID NO: 5672262 - DNA, 25 bp, Homo sapien
cagccctcagtcgttatacacctga

SEQ ID NO: 5672263 - DNA, 25 bp, Homo sapien
gccctcagtcgttatacacctgagg

SEQ ID NO: 5672264 - DNA, 25 bp, Homo sapien
tcgttatacacctgaggatgtaaat

SEQ ID NO: 5672265 - DNA, 25 bp, Homo sapien
cagtcgttatacacctgaggatgta

SEQ ID NO: 5672266 - DNA, 25 bp, Homo sapien
catcctcaggtgtataacgactgag

SEQ ID NO: 5672267 - DNA, 25 bp, Homo sapien
acaaatctaacatcacccagcacag

SEQ ID NO: 5672268 - DNA, 25 bp, Homo sapien
tacatcctcaggtgtataacgactg

SEQ ID NO: 5672269 - DNA, 25 bp, Homo sapien
tcaggtgtataacgactgagggctg

SEQ ID NO: 5672270 - DNA, 25 bp, Homo sapien
atttacatcctcaggtgtataacga

SEQ ID NO: 5672271 - DNA, 25 bp, Homo sapien
cctcaggtgtataacgactgagggc

SEQ ID NO: 5672272 - DNA, 25 bp, Homo sapien
gcagagggtttgtgagatgggcagc

SEQ ID NO: 5672273 - DNA, 25 bp, Homo sapien
cagcagagggtttgtgagatgggca

SEQ ID NO: 5672274 - DNA, 25 bp, Homo sapien
tcctcagcagagggtttgtgagatg

SEQ ID NO: 5672275 - DNA, 25 bp, Homo sapien
tcagcagagggtttgtgagatgggc

SEQ ID NO: 5672276 - DNA, 25 bp, Homo sapien
atcctcagcagagggtttgtgagat

SEQ ID NO: 5672277 - DNA, 25 bp, Homo sapien
catcctcagcagagggtttgtgaga

SEQ ID NO: 5672278 - DNA, 25 bp, Homo sapien
gctgcccatctcacaaaccctctgc

SEQ ID NO: 5672279 - DNA, 25 bp, Homo sapien
ccatctcacaaaccctctgctgagg

SEQ ID NO: 5672280 - DNA, 25 bp, Homo sapien
tctcacaaaccctctgctgaggatg

SEQ ID NO: 5672281 - DNA, 25 bp, Homo sapien
tgcccatctcacaaaccctctgctg

SEQ ID NO: 5672282 - DNA, 25 bp, Homo sapien
catctcacaaaccctctgctgagga

SEQ ID NO: 5672283 - DNA, 25 bp, Homo sapien
atctcacaaaccctctgctgaggat

SEQ ID NO: 5672284 - DNA, 25 bp, Homo sapien
aaagtaaaaatagtagcgtgtctgg

SEQ ID NO: 5672285 - DNA, 25 bp, Homo sapien
tagtagcgtgtctggatccctgtca

SEQ ID NO: 5672286 - DNA, 25 bp, Homo sapien
aaaaatagtagcgtgtctggatccc

SEQ ID NO: 5672287 - DNA, 25 bp, Homo sapien
tgcttctaatacatggctctgctgg

SEQ ID NO: 5672288 - DNA, 25 bp, Homo sapien
agcgtgtctggatccctgtcaaaga

SEQ ID NO: 5672289 - DNA, 25 bp, Homo sapien
cttctaatacatggctctgctggct

SEQ ID NO: 5672290 - DNA, 25 bp, Homo sapien
agccagcagagccatgtattagaag

SEQ ID NO: 5672291 - DNA, 25 bp, Homo sapien
ccagcagagccatgtattagaagca

SEQ ID NO: 5672292 - DNA, 25 bp, Homo sapien
tctttgacagggatccagacacgct

SEQ ID NO: 5672293 - DNA, 25 bp, Homo sapien
ttgacagggatccagacacgctact

SEQ ID NO: 5672294 - DNA, 25 bp, Homo sapien
cagggatccagacacgctactattt

SEQ ID NO: 5672295 - DNA, 25 bp, Homo sapien
gatccagacacgctactatttttac

SEQ ID NO: 5672296 - DNA, 25 bp, Homo sapien
tccttaatctttcattctcagccac

SEQ ID NO: 5672297 - DNA, 25 bp, Homo sapien
ttccttaatctttcattctcagcca

SEQ ID NO: 5672298 - DNA, 25 bp, Homo sapien
gtggctgagaatgaaagattaagga

SEQ ID NO: 5672299 - DNA, 25 bp, Homo sapien
tggctgagaatgaaagattaaggaa

SEQ ID NO: 5672300 - DNA, 25 bp, Homo sapien
ttctcagccacaaggaattccacat

SEQ ID NO: 5672301 - DNA, 25 bp, Homo sapien
taatctttcattctcagccacaagg

SEQ ID NO: 5672302 - DNA, 25 bp, Homo sapien
caaggaattccacatgcctcttcaa

SEQ ID NO: 5672303 - DNA, 25 bp, Homo sapien
tccacatgcctcttcaaatctgctt

SEQ ID NO: 5672304 - DNA, 25 bp, Homo sapien
ccttttcagccttgagttgtttatt

SEQ ID NO: 5672305 - DNA, 25 bp, Homo sapien
tcaaatctgcttctctataattgtt

SEQ ID NO: 5672306 - DNA, 25 bp, Homo sapien
aagaaaataaacaactcaaggctga

SEQ ID NO: 5672307 - DNA, 25 bp, Homo sapien
gatttgaagaggcatgtggaattcc

SEQ ID NO: 5672308 - DNA, 25 bp, Homo sapien
tagagaagcagatttgaagaggcat

SEQ ID NO: 5672309 - DNA, 25 bp, Homo sapien
aacaattatagagaagcagatttga

SEQ ID NO: 5672310 - DNA, 25 bp, Homo sapien
gcatgtggaattccttgtggctgag

SEQ ID NO: 5672311 - DNA, 25 bp, Homo sapien
tgtggctgagaatgaaagattaagg

SEQ ID NO: 5672312 - DNA, 25 bp, Homo sapien
ccagctccttttctattggaccatt

SEQ ID NO: 5672313 - DNA, 25 bp, Homo sapien
cagctccttttctattggaccattt

SEQ ID NO: 5672314 - DNA, 25 bp, Homo sapien
tccagctccttttctattggaccat

SEQ ID NO: 5672315 - DNA, 25 bp, Homo sapien
gctccttttctattggaccatttag

SEQ ID NO: 5672316 - DNA, 25 bp, Homo sapien
agctccttttctattggaccattta

SEQ ID NO: 5672317 - DNA, 25 bp, Homo sapien
ctccttttctattggaccatttaga

SEQ ID NO: 5672318 - DNA, 25 bp, Homo sapien
ctaaatggtccaatagaaaaggagc

SEQ ID NO: 5672319 - DNA, 25 bp, Homo sapien
taaatggtccaatagaaaaggagct

SEQ ID NO: 5672320 - DNA, 25 bp, Homo sapien
aatggtccaatagaaaaggagctgg

SEQ ID NO: 5672321 - DNA, 25 bp, Homo sapien
tctaaatggtccaatagaaaaggag

SEQ ID NO: 5672322 - DNA, 25 bp, Homo sapien
aaatggtccaatagaaaaggagctg

SEQ ID NO: 5672323 - DNA, 25 bp, Homo sapien
atggtccaatagaaaaggagctgga

SEQ ID NO: 5672324 - DNA, 25 bp, Homo sapien
atcattagctcgagtcagtgaatca

SEQ ID NO: 5672325 - DNA, 25 bp, Homo sapien
ccatgaatttagtgtgtactaagtt

SEQ ID NO: 5672326 - DNA, 25 bp, Homo sapien
ggaatcattagctcgagtcagtgaa

SEQ ID NO: 5672327 - DNA, 25 bp, Homo sapien
cctccatgaatttagtgtgtactaa

SEQ ID NO: 5672328 - DNA, 25 bp, Homo sapien
taagttggaatcattagctcgagtc

SEQ ID NO: 5672329 - DNA, 25 bp, Homo sapien
gttggaatcattagctcgagtcagt

SEQ ID NO: 5672330 - DNA, 25 bp, Homo sapien
ttagtacacactaaattcatggagg

SEQ ID NO: 5672331 - DNA, 25 bp, Homo sapien
ttcactgactcgagctaatgattcc

SEQ ID NO: 5672332 - DNA, 25 bp, Homo sapien
aacttagtacacactaaattcatgg

SEQ ID NO: 5672333 - DNA, 25 bp, Homo sapien
tgattcactgactcgagctaatgat

SEQ ID NO: 5672334 - DNA, 25 bp, Homo sapien
gactcgagctaatgattccaactta

SEQ ID NO: 5672335 - DNA, 25 bp, Homo sapien
cactgactcgagctaatgattccaa

SEQ ID NO: 5672336 - DNA, 25 bp, Homo sapien
ttaaccctgaagacaagacaagtaa

SEQ ID NO: 5672337 - DNA, 25 bp, Homo sapien
ttacttgtcttgtcttcagggttaa

SEQ ID NO: 5672338 - DNA, 25 bp, Homo sapien
taacttttatgcattttaaccctga

SEQ ID NO: 5672339 - DNA, 25 bp, Homo sapien
ccatttggtttgtatctggagaaac

SEQ ID NO: 5672340 - DNA, 25 bp, Homo sapien
tttaaccctgaagacaagacaagta

SEQ ID NO: 5672341 - DNA, 25 bp, Homo sapien
ccctgaagacaagacaagtaattgt

SEQ ID NO: 5672342 - DNA, 25 bp, Homo sapien
aaaattattctatgtagccatttgg

SEQ ID NO: 5672343 - DNA, 25 bp, Homo sapien
gacaagtaattgttgcttgaaaaaa

SEQ ID NO: 5672344 - DNA, 25 bp, Homo sapien
ttttttcaagcaacaattacttgtc

SEQ ID NO: 5672345 - DNA, 25 bp, Homo sapien
acaattacttgtcttgtcttcaggg

SEQ ID NO: 5672346 - DNA, 25 bp, Homo sapien
aaccaaatggctacatagaataatt

SEQ ID NO: 5672347 - DNA, 25 bp, Homo sapien
gtttctccagatacaaaccaaatgg

SEQ ID NO: 5672348 - DNA, 25 bp, Homo sapien
tcagggttaaaatgcataaaagtta

SEQ ID NO: 5672349 - DNA, 25 bp, Homo sapien
tacttgtcttgtcttcagggttaaa

SEQ ID NO: 5672350 - DNA, 25 bp, Homo sapien
cacccgcctcggcctttcaaagtgc

SEQ ID NO: 5672351 - DNA, 25 bp, Homo sapien
ccacccgcctcggcctttcaaagtg

SEQ ID NO: 5672352 - DNA, 25 bp, Homo sapien
atccacccgcctcggcctttcaaag

SEQ ID NO: 5672353 - DNA, 25 bp, Homo sapien
gatccacccgcctcggcctttcaaa

SEQ ID NO: 5672354 - DNA, 25 bp, Homo sapien
acccgcctcggcctttcaaagtgct

SEQ ID NO: 5672355 - DNA, 25 bp, Homo sapien
tgatccacccgcctcggcctttcaa

SEQ ID NO: 5672356 - DNA, 25 bp, Homo sapien
ttgaaaggccgaggcgggtggatca

SEQ ID NO: 5672357 - DNA, 25 bp, Homo sapien
gcactttgaaaggccgaggcgggtg

SEQ ID NO: 5672358 - DNA, 25 bp, Homo sapien
cactttgaaaggccgaggcgggtgg

SEQ ID NO: 5672359 - DNA, 25 bp, Homo sapien
agcactttgaaaggccgaggcgggt

SEQ ID NO: 5672360 - DNA, 25 bp, Homo sapien
ctttgaaaggccgaggcgggtggat

SEQ ID NO: 5672361 - DNA, 25 bp, Homo sapien
tttgaaaggccgaggcgggtggatc

SEQ ID NO: 5672362 - DNA, 25 bp, Homo sapien
tggcgtgagacggtttctcacatgg

SEQ ID NO: 5672363 - DNA, 25 bp, Homo sapien
ggctttttaacgatcaccattccag

SEQ ID NO: 5672364 - DNA, 25 bp, Homo sapien
ccagctggcgtgagacggtttctca

SEQ ID NO: 5672365 - DNA, 25 bp, Homo sapien
tcaccattccagctggcgtgagacg

SEQ ID NO: 5672366 - DNA, 25 bp, Homo sapien
ttccagctggcgtgagacggtttct

SEQ ID NO: 5672367 - DNA, 25 bp, Homo sapien
accattccagctggcgtgagacggt

SEQ ID NO: 5672368 - DNA, 25 bp, Homo sapien
ggaatggtgatcgttaaaaagccag

SEQ ID NO: 5672369 - DNA, 25 bp, Homo sapien
cgtctcacgccagctggaatggtga

SEQ ID NO: 5672370 - DNA, 25 bp, Homo sapien
ctggaatggtgatcgttaaaaagcc

SEQ ID NO: 5672371 - DNA, 25 bp, Homo sapien
tgagaaaccgtctcacgccagctgg

SEQ ID NO: 5672372 - DNA, 25 bp, Homo sapien
gaaaccgtctcacgccagctggaat

SEQ ID NO: 5672373 - DNA, 25 bp, Homo sapien
ccatgtgagaaaccgtctcacgcca

SEQ ID NO: 5672374 - DNA, 25 bp, Homo sapien
tggttctagatccttgaggaatcac

SEQ ID NO: 5672375 - DNA, 25 bp, Homo sapien
ctaatttacactcccaccaacagcg

SEQ ID NO: 5672376 - DNA, 25 bp, Homo sapien
gatggtatttctggttctagatcct

SEQ ID NO: 5672377 - DNA, 25 bp, Homo sapien
tgctgggtcagatggtatttctggt

SEQ ID NO: 5672378 - DNA, 25 bp, Homo sapien
ttgctgggtcagatggtatttctgg

SEQ ID NO: 5672379 - DNA, 25 bp, Homo sapien
cacactgtcttccacagtggttgaa

SEQ ID NO: 5672380 - DNA, 25 bp, Homo sapien
cgctgttggtgggagtgtaaattag

SEQ ID NO: 5672381 - DNA, 25 bp, Homo sapien
gtgattcctcaaggatctagaacca

SEQ ID NO: 5672382 - DNA, 25 bp, Homo sapien
ccagaaataccatctgacccagcaa

SEQ ID NO: 5672383 - DNA, 25 bp, Homo sapien
ttcaaccactgtggaagacagtgtg

SEQ ID NO: 5672384 - DNA, 25 bp, Homo sapien
aggatctagaaccagaaataccatc

SEQ ID NO: 5672385 - DNA, 25 bp, Homo sapien
accagaaataccatctgacccagca

SEQ ID NO: 5672386 - DNA, 25 bp, Homo sapien
acagtgctgcagtaaacataagtgt

SEQ ID NO: 5672387 - DNA, 25 bp, Homo sapien
aagtgtgcatgtgtccttatagtag

SEQ ID NO: 5672388 - DNA, 25 bp, Homo sapien
taagtgtgcatgtgtccttatagta

SEQ ID NO: 5672389 - DNA, 25 bp, Homo sapien
cagtgctgcagtaaacataagtgtg

SEQ ID NO: 5672390 - DNA, 25 bp, Homo sapien
ataagtgtgcatgtgtccttatagt

SEQ ID NO: 5672391 - DNA, 25 bp, Homo sapien
agtgtgcatgtgtccttatagtagc

SEQ ID NO: 5672392 - DNA, 25 bp, Homo sapien
cacacttatgtttactgcagcactg

SEQ ID NO: 5672393 - DNA, 25 bp, Homo sapien
gctactataaggacacatgcacact

SEQ ID NO: 5672394 - DNA, 25 bp, Homo sapien
tactataaggacacatgcacactta

SEQ ID NO: 5672395 - DNA, 25 bp, Homo sapien
gcacacttatgtttactgcagcact

SEQ ID NO: 5672396 - DNA, 25 bp, Homo sapien
acacttatgtttactgcagcactgt

SEQ ID NO: 5672397 - DNA, 25 bp, Homo sapien
actataaggacacatgcacacttat

SEQ ID NO: 5672398 - DNA, 25 bp, Homo sapien
tcccgtctaccattgatggatattt

SEQ ID NO: 5672399 - DNA, 25 bp, Homo sapien
atcccgtctaccattgatggatatt

SEQ ID NO: 5672400 - DNA, 25 bp, Homo sapien
tatcccgtctaccattgatggatat

SEQ ID NO: 5672401 - DNA, 25 bp, Homo sapien
cgtctaccattgatggatatttggg

SEQ ID NO: 5672402 - DNA, 25 bp, Homo sapien
cccgtctaccattgatggatatttg

SEQ ID NO: 5672403 - DNA, 25 bp, Homo sapien
ccgtctaccattgatggatatttgg

SEQ ID NO: 5672404 - DNA, 25 bp, Homo sapien
atatccatcaatggtagacgggata

SEQ ID NO: 5672405 - DNA, 25 bp, Homo sapien
caaatatccatcaatggtagacggg

SEQ ID NO: 5672406 - DNA, 25 bp, Homo sapien
cccaaatatccatcaatggtagacg

SEQ ID NO: 5672407 - DNA, 25 bp, Homo sapien
ccaaatatccatcaatggtagacgg

SEQ ID NO: 5672408 - DNA, 25 bp, Homo sapien
aatatccatcaatggtagacgggat

SEQ ID NO: 5672409 - DNA, 25 bp, Homo sapien
aaatatccatcaatggtagacggga

SEQ ID NO: 5672410 - DNA, 25 bp, Homo sapien
tgaggtgatcattagtagtgcaaag

SEQ ID NO: 5672411 - DNA, 25 bp, Homo sapien
gatagtcttgaggtgatcattagta

SEQ ID NO: 5672412 - DNA, 25 bp, Homo sapien
ggtgatcattagtagtgcaaagtgt

SEQ ID NO: 5672413 - DNA, 25 bp, Homo sapien
gaggtgatcattagtagtgcaaagt

SEQ ID NO: 5672414 - DNA, 25 bp, Homo sapien
cttgaggtgatcattagtagtgcaa

SEQ ID NO: 5672415 - DNA, 25 bp, Homo sapien
tcttgaggtgatcattagtagtgca

SEQ ID NO: 5672416 - DNA, 25 bp, Homo sapien
cactttgcactactaatgatcacct

SEQ ID NO: 5672417 - DNA, 25 bp, Homo sapien
tactaatgatcacctcaagactatc

SEQ ID NO: 5672418 - DNA, 25 bp, Homo sapien
ttgcactactaatgatcacctcaag

SEQ ID NO: 5672419 - DNA, 25 bp, Homo sapien
ctttgcactactaatgatcacctca

SEQ ID NO: 5672420 - DNA, 25 bp, Homo sapien
acactttgcactactaatgatcacc

SEQ ID NO: 5672421 - DNA, 25 bp, Homo sapien
tgcactactaatgatcacctcaaga

SEQ ID NO: 5672422 - DNA, 25 bp, Homo sapien
tgtggagactggattttacaccttg

SEQ ID NO: 5672423 - DNA, 25 bp, Homo sapien
tttggtttgagtaggcagttacatt

SEQ ID NO: 5672424 - DNA, 25 bp, Homo sapien
gtggagactggattttacaccttgt

SEQ ID NO: 5672425 - DNA, 25 bp, Homo sapien
gttttggtttgagtaggcagttaca

SEQ ID NO: 5672426 - DNA, 25 bp, Homo sapien
tggagactggattttacaccttgtt

SEQ ID NO: 5672427 - DNA, 25 bp, Homo sapien
ggagactggattttacaccttgtta

SEQ ID NO: 5672428 - DNA, 25 bp, Homo sapien
caaggtgtaaaatccagtctccaca

SEQ ID NO: 5672429 - DNA, 25 bp, Homo sapien
tgtaactgcctactcaaaccaaaac

SEQ ID NO: 5672430 - DNA, 25 bp, Homo sapien
aaaatgtaactgcctactcaaacca

SEQ ID NO: 5672431 - DNA, 25 bp, Homo sapien
taacaaggtgtaaaatccagtctcc

SEQ ID NO: 5672432 - DNA, 25 bp, Homo sapien
aatgtaactgcctactcaaaccaaa

SEQ ID NO: 5672433 - DNA, 25 bp, Homo sapien
acaaggtgtaaaatccagtctccac

SEQ ID NO: 5672434 - DNA, 25 bp, Homo sapien
gtgatattctctatttacttgactg

SEQ ID NO: 5672435 - DNA, 25 bp, Homo sapien
tctctatttacttgactgttttgag

SEQ ID NO: 5672436 - DNA, 25 bp, Homo sapien
caacatatttatccttgaatatgta

SEQ ID NO: 5672437 - DNA, 25 bp, Homo sapien
tgagtacatttataacaacatattt

SEQ ID NO: 5672438 - DNA, 25 bp, Homo sapien
gatattctctatttacttgactgtt

SEQ ID NO: 5672439 - DNA, 25 bp, Homo sapien
ctctatttacttgactgttttgagt

SEQ ID NO: 5672440 - DNA, 25 bp, Homo sapien
caagtaaatagagaatatcacaaaa

SEQ ID NO: 5672441 - DNA, 25 bp, Homo sapien
aaatatgttgttataaatgtactca

SEQ ID NO: 5672442 - DNA, 25 bp, Homo sapien
tacatattcaaggataaatatgttg

SEQ ID NO: 5672443 - DNA, 25 bp, Homo sapien
tcaaaacagtcaagtaaatagagaa

SEQ ID NO: 5672444 - DNA, 25 bp, Homo sapien
actcaaaacagtcaagtaaatagag

SEQ ID NO: 5672445 - DNA, 25 bp, Homo sapien
cagtcaagtaaatagagaatatcac

SEQ ID NO: 5672446 - DNA, 25 bp, Homo sapien
actgtctagatctagagttctcatt

SEQ ID NO: 5672447 - DNA, 25 bp, Homo sapien
ttatactgtctagatctagagttct

SEQ ID NO: 5672448 - DNA, 25 bp, Homo sapien
atactgtctagatctagagttctca

SEQ ID NO: 5672449 - DNA, 25 bp, Homo sapien
tttatactgtctagatctagagttc

SEQ ID NO: 5672450 - DNA, 25 bp, Homo sapien
tatactgtctagatctagagttctc

SEQ ID NO: 5672451 - DNA, 25 bp, Homo sapien
tactgtctagatctagagttctcat

SEQ ID NO: 5672452 - DNA, 25 bp, Homo sapien
aatgagaactctagatctagacagt

SEQ ID NO: 5672453 - DNA, 25 bp, Homo sapien
atgagaactctagatctagacagta

SEQ ID NO: 5672454 - DNA, 25 bp, Homo sapien
gaactctagatctagacagtataaa

SEQ ID NO: 5672455 - DNA, 25 bp, Homo sapien
tgagaactctagatctagacagtat

SEQ ID NO: 5672456 - DNA, 25 bp, Homo sapien
agaactctagatctagacagtataa

SEQ ID NO: 5672457 - DNA, 25 bp, Homo sapien
gagaactctagatctagacagtata

SEQ ID NO: 5672458 - DNA, 25 bp, Homo sapien
aggcaacctggtgaaaccctgtctc

SEQ ID NO: 5672459 - DNA, 25 bp, Homo sapien
taggcaacctggtgaaaccctgtct

SEQ ID NO: 5672460 - DNA, 25 bp, Homo sapien
gcctaggcaacctggtgaaaccctg

SEQ ID NO: 5672461 - DNA, 25 bp, Homo sapien
cctaggcaacctggtgaaaccctgt

SEQ ID NO: 5672462 - DNA, 25 bp, Homo sapien
ctaggcaacctggtgaaaccctgtc

SEQ ID NO: 5672463 - DNA, 25 bp, Homo sapien
ctgtctctagaaaaacacaaaaaat

SEQ ID NO: 5672464 - DNA, 25 bp, Homo sapien
cagggtttcaccaggttgcctaggc

SEQ ID NO: 5672465 - DNA, 25 bp, Homo sapien
gagacagggtttcaccaggttgcct

SEQ ID NO: 5672466 - DNA, 25 bp, Homo sapien
agacagggtttcaccaggttgccta

SEQ ID NO: 5672467 - DNA, 25 bp, Homo sapien
gacagggtttcaccaggttgcctag

SEQ ID NO: 5672468 - DNA, 25 bp, Homo sapien
attttttgtgtttttctagagacag

SEQ ID NO: 5672469 - DNA, 25 bp, Homo sapien
acagggtttcaccaggttgcctagg

SEQ ID NO: 5672470 - DNA, 25 bp, Homo sapien
agacacgatcttactctgtcaccca

SEQ ID NO: 5672471 - DNA, 25 bp, Homo sapien
ttggagacacgatcttactctgtca

SEQ ID NO: 5672472 - DNA, 25 bp, Homo sapien
gacacgatcttactctgtcacccat

SEQ ID NO: 5672473 - DNA, 25 bp, Homo sapien
tggagacacgatcttactctgtcac

SEQ ID NO: 5672474 - DNA, 25 bp, Homo sapien
gagacacgatcttactctgtcaccc

SEQ ID NO: 5672475 - DNA, 25 bp, Homo sapien
ggagacacgatcttactctgtcacc

SEQ ID NO: 5672476 - DNA, 25 bp, Homo sapien
gggtgacagagtaagatcgtgtctc

SEQ ID NO: 5672477 - DNA, 25 bp, Homo sapien
atgggtgacagagtaagatcgtgtc

SEQ ID NO: 5672478 - DNA, 25 bp, Homo sapien
tgggtgacagagtaagatcgtgtct

SEQ ID NO: 5672479 - DNA, 25 bp, Homo sapien
ggtgacagagtaagatcgtgtctcc

SEQ ID NO: 5672480 - DNA, 25 bp, Homo sapien
gtgacagagtaagatcgtgtctcca

SEQ ID NO: 5672481 - DNA, 25 bp, Homo sapien
tgacagagtaagatcgtgtctccaa

SEQ ID NO: 5672482 - DNA, 25 bp, Homo sapien
gcgcctggccctattttagaagtct

SEQ ID NO: 5672483 - DNA, 25 bp, Homo sapien
tgacttcatgatccgcctgccttgg

SEQ ID NO: 5672484 - DNA, 25 bp, Homo sapien
ttcatgatccgcctgccttggcctc

SEQ ID NO: 5672485 - DNA, 25 bp, Homo sapien
ctgcgcctggccctattttagaagt

SEQ ID NO: 5672486 - DNA, 25 bp, Homo sapien
cgcctggccctattttagaagtctt

SEQ ID NO: 5672487 - DNA, 25 bp, Homo sapien
tgcgcctggccctattttagaagtc

SEQ ID NO: 5672488 - DNA, 25 bp, Homo sapien
ccaaggcaggcggatcatgaagtca

SEQ ID NO: 5672489 - DNA, 25 bp, Homo sapien
aagacttctaaaatagggccaggcg

SEQ ID NO: 5672490 - DNA, 25 bp, Homo sapien
gaggccaaggcaggcggatcatgaa

SEQ ID NO: 5672491 - DNA, 25 bp, Homo sapien
gacttctaaaatagggccaggcgca

SEQ ID NO: 5672492 - DNA, 25 bp, Homo sapien
acttctaaaatagggccaggcgcag

SEQ ID NO: 5672493 - DNA, 25 bp, Homo sapien
agacttctaaaatagggccaggcgc

SEQ ID NO: 5672494 - DNA, 25 bp, Homo sapien
gcctggcctagaagtgttacatttt

SEQ ID NO: 5672495 - DNA, 25 bp, Homo sapien
cattttgatgaagtccagtatatca

SEQ ID NO: 5672496 - DNA, 25 bp, Homo sapien
gaagtgttacattttgatgaagtcc

SEQ ID NO: 5672497 - DNA, 25 bp, Homo sapien
aggcaggagccacagtgcctggcct

SEQ ID NO: 5672498 - DNA, 25 bp, Homo sapien
cagtgcctggcctagaagtgttaca

SEQ ID NO: 5672499 - DNA, 25 bp, Homo sapien
gaagtccagtatatcaaagaaaaaa

SEQ ID NO: 5672500 - DNA, 25 bp, Homo sapien
aattttttctttgatatactggact

SEQ ID NO: 5672501 - DNA, 25 bp, Homo sapien
caaaatgtaacacttctaggccagg

SEQ ID NO: 5672502 - DNA, 25 bp, Homo sapien
gatatactggacttcatcaaaatgt

SEQ ID NO: 5672503 - DNA, 25 bp, Homo sapien
tgtaacacttctaggccaggcactg

SEQ ID NO: 5672504 - DNA, 25 bp, Homo sapien
ggacttcatcaaaatgtaacacttc

SEQ ID NO: 5672505 - DNA, 25 bp, Homo sapien
aggccaggcactgtggctcctgcct

SEQ ID NO: 5672506 - DNA, 25 bp, Homo sapien
acttgtaggagatcttggtgtatga

SEQ ID NO: 5672507 - DNA, 25 bp, Homo sapien
tatgatggtggcaagtcttttgtca

SEQ ID NO: 5672508 - DNA, 25 bp, Homo sapien
agatcttggtgtatgatggtggcaa

SEQ ID NO: 5672509 - DNA, 25 bp, Homo sapien
tctgtttttgacttgtaggagatct

SEQ ID NO: 5672510 - DNA, 25 bp, Homo sapien
tcttggtgtatgatggtggcaagtc

SEQ ID NO: 5672511 - DNA, 25 bp, Homo sapien
ttttgacttgtaggagatcttggtg

SEQ ID NO: 5672512 - DNA, 25 bp, Homo sapien
tacaccaagatctcctacaagtcaa

SEQ ID NO: 5672513 - DNA, 25 bp, Homo sapien
ttgccaccatcatacaccaagatct

SEQ ID NO: 5672514 - DNA, 25 bp, Homo sapien
aaagacttgccaccatcatacacca

SEQ ID NO: 5672515 - DNA, 25 bp, Homo sapien
tcatacaccaagatctcctacaagt

SEQ ID NO: 5672516 - DNA, 25 bp, Homo sapien
tgacaaaagacttgccaccatcata

SEQ ID NO: 5672517 - DNA, 25 bp, Homo sapien
agatctcctacaagtcaaaaacaga

SEQ ID NO: 5672518 - DNA, 25 bp, Homo sapien
tgctgactaatgtggcagatagaag

SEQ ID NO: 5672519 - DNA, 25 bp, Homo sapien
attgctgactaatgtggcagataga

SEQ ID NO: 5672520 - DNA, 25 bp, Homo sapien
gaaattgctgactaatgtggcagat

SEQ ID NO: 5672521 - DNA, 25 bp, Homo sapien
aattgctgactaatgtggcagatag

SEQ ID NO: 5672522 - DNA, 25 bp, Homo sapien
ggtaaatactgggagtgaaattgct

SEQ ID NO: 5672523 - DNA, 25 bp, Homo sapien
tgggtaaatactgggagtgaaattg

SEQ ID NO: 5672524 - DNA, 25 bp, Homo sapien
tctatctgccacattagtcagcaat

SEQ ID NO: 5672525 - DNA, 25 bp, Homo sapien
agcaatttcactcccagtatttacc

SEQ ID NO: 5672526 - DNA, 25 bp, Homo sapien
ttctatctgccacattagtcagcaa

SEQ ID NO: 5672527 - DNA, 25 bp, Homo sapien
cttctatctgccacattagtcagca

SEQ ID NO: 5672528 - DNA, 25 bp, Homo sapien
caatttcactcccagtatttaccca

SEQ ID NO: 5672529 - DNA, 25 bp, Homo sapien
tatctgccacattagtcagcaattt

SEQ ID NO: 5672530 - DNA, 25 bp, Homo sapien
tccaccccctgggttccagtgattc

SEQ ID NO: 5672531 - DNA, 25 bp, Homo sapien
ccctgggttccagtgattctcctgc

SEQ ID NO: 5672532 - DNA, 25 bp, Homo sapien
cccctgggttccagtgattctcctg

SEQ ID NO: 5672533 - DNA, 25 bp, Homo sapien
ccaccccctgggttccagtgattct

SEQ ID NO: 5672534 - DNA, 25 bp, Homo sapien
cctccaccccctgggttccagtgat

SEQ ID NO: 5672535 - DNA, 25 bp, Homo sapien
caccccctgggttccagtgattctc

SEQ ID NO: 5672536 - DNA, 25 bp, Homo sapien
aatcactggaacccagggggtggag

SEQ ID NO: 5672537 - DNA, 25 bp, Homo sapien
agaatcactggaacccagggggtgg

SEQ ID NO: 5672538 - DNA, 25 bp, Homo sapien
gagaatcactggaacccagggggtg

SEQ ID NO: 5672539 - DNA, 25 bp, Homo sapien
gcaggagaatcactggaacccaggg

SEQ ID NO: 5672540 - DNA, 25 bp, Homo sapien
gaatcactggaacccagggggtgga

SEQ ID NO: 5672541 - DNA, 25 bp, Homo sapien
atcactggaacccagggggtggagg

SEQ ID NO: 5672542 - DNA, 25 bp, Homo sapien
gataaatttatagacctatccctgt

SEQ ID NO: 5672543 - DNA, 25 bp, Homo sapien
tgataaatttatagacctatccctg

SEQ ID NO: 5672544 - DNA, 25 bp, Homo sapien
ttatagacctatccctgtcctgggt

SEQ ID NO: 5672545 - DNA, 25 bp, Homo sapien
taaatttatagacctatccctgtcc

SEQ ID NO: 5672546 - DNA, 25 bp, Homo sapien
aatttatagacctatccctgtcctg

SEQ ID NO: 5672547 - DNA, 25 bp, Homo sapien
tttatagacctatccctgtcctggg

SEQ ID NO: 5672548 - DNA, 25 bp, Homo sapien
gacagggataggtctataaatttat

SEQ ID NO: 5672549 - DNA, 25 bp, Homo sapien
acccaggacagggataggtctataa

SEQ ID NO: 5672550 - DNA, 25 bp, Homo sapien
ccaggacagggataggtctataaat

SEQ ID NO: 5672551 - DNA, 25 bp, Homo sapien
cccaggacagggataggtctataaa

SEQ ID NO: 5672552 - DNA, 25 bp, Homo sapien
cagggataggtctataaatttatca

SEQ ID NO: 5672553 - DNA, 25 bp, Homo sapien
aacccaggacagggataggtctata

SEQ ID NO: 5672554 - DNA, 25 bp, Homo sapien
caaatttgagggattaattgaggaa

SEQ ID NO: 5672555 - DNA, 25 bp, Homo sapien
acaaatttgagggattaattgagga

SEQ ID NO: 5672556 - DNA, 25 bp, Homo sapien
aaacaaatttgagggattaattgag

SEQ ID NO: 5672557 - DNA, 25 bp, Homo sapien
tcccaaggaagaagaagaatctaaa

SEQ ID NO: 5672558 - DNA, 25 bp, Homo sapien
aacaaatttgagggattaattgagg

SEQ ID NO: 5672559 - DNA, 25 bp, Homo sapien
caaggaagaagaagaatctaaaagt

SEQ ID NO: 5672560 - DNA, 25 bp, Homo sapien
ctcaattaatccctcaaatttgttt

SEQ ID NO: 5672561 - DNA, 25 bp, Homo sapien
tttagattcttcttcttccttggga

SEQ ID NO: 5672562 - DNA, 25 bp, Homo sapien
cctcaattaatccctcaaatttgtt

SEQ ID NO: 5672563 - DNA, 25 bp, Homo sapien
ttcctcaattaatccctcaaatttg

SEQ ID NO: 5672564 - DNA, 25 bp, Homo sapien
acttttagattcttcttcttccttg

SEQ ID NO: 5672565 - DNA, 25 bp, Homo sapien
tcctcaattaatccctcaaatttgt

SEQ ID NO: 5672566 - DNA, 25 bp, Homo sapien
gaacgcagcctccaataagtttgtt

SEQ ID NO: 5672567 - DNA, 25 bp, Homo sapien
aaaaatgaacgcagcctccaataag

SEQ ID NO: 5672568 - DNA, 25 bp, Homo sapien
aatgaacgcagcctccaataagttt

SEQ ID NO: 5672569 - DNA, 25 bp, Homo sapien
cagcctccaataagtttgttaaaca

SEQ ID NO: 5672570 - DNA, 25 bp, Homo sapien
tgaacgcagcctccaataagtttgt

SEQ ID NO: 5672571 - DNA, 25 bp, Homo sapien
cgcagcctccaataagtttgttaaa

SEQ ID NO: 5672572 - DNA, 25 bp, Homo sapien
acaaacttattggaggctgcgttca

SEQ ID NO: 5672573 - DNA, 25 bp, Homo sapien
tgtttaacaaacttattggaggctg

SEQ ID NO: 5672574 - DNA, 25 bp, Homo sapien
tttaacaaacttattggaggctgcg

SEQ ID NO: 5672575 - DNA, 25 bp, Homo sapien
taacaaacttattggaggctgcgtt

SEQ ID NO: 5672576 - DNA, 25 bp, Homo sapien
cttattggaggctgcgttcattttt

SEQ ID NO: 5672577 - DNA, 25 bp, Homo sapien
caaacttattggaggctgcgttcat

SEQ ID NO: 5672578 - DNA, 25 bp, Homo sapien
aaatttcagagttcgaagacaaggc

SEQ ID NO: 5672579 - DNA, 25 bp, Homo sapien
gccttgtcttcgaactctgaaattt

SEQ ID NO: 5672580 - DNA, 25 bp, Homo sapien
atagcggattgaaatcgcttcaaaa

SEQ ID NO: 5672581 - DNA, 25 bp, Homo sapien
aagatagcggattgaaatcgcttca

SEQ ID NO: 5672582 - DNA, 25 bp, Homo sapien
gatagcggattgaaatcgcttcaaa

SEQ ID NO: 5672583 - DNA, 25 bp, Homo sapien
aagaagatagcggattgaaatcgct

SEQ ID NO: 5672584 - DNA, 25 bp, Homo sapien
agatagcggattgaaatcgcttcaa

SEQ ID NO: 5672585 - DNA, 25 bp, Homo sapien
gaagatagcggattgaaatcgcttc

SEQ ID NO: 5672586 - DNA, 25 bp, Homo sapien
ttgaagcgatttcaatccgctatct

SEQ ID NO: 5672587 - DNA, 25 bp, Homo sapien
agcgatttcaatccgctatcttctt

SEQ ID NO: 5672588 - DNA, 25 bp, Homo sapien
ttttgaagcgatttcaatccgctat

SEQ ID NO: 5672589 - DNA, 25 bp, Homo sapien
tttgaagcgatttcaatccgctatc

SEQ ID NO: 5672590 - DNA, 25 bp, Homo sapien
tgaagcgatttcaatccgctatctt

SEQ ID NO: 5672591 - DNA, 25 bp, Homo sapien
gaagcgatttcaatccgctatcttc

SEQ ID NO: 5672592 - DNA, 25 bp, Homo sapien
tgggcgtaatggcggttgcctataa

SEQ ID NO: 5672593 - DNA, 25 bp, Homo sapien
ttataggcaaccgccattacgccca

SEQ ID NO: 5672594 - DNA, 25 bp, Homo sapien
cagagtcacatttaccttgtaccta

SEQ ID NO: 5672595 - DNA, 25 bp, Homo sapien
ccttgtacctagtaagaaacataat

SEQ ID NO: 5672596 - DNA, 25 bp, Homo sapien
taccttgtacctagtaagaaacata

SEQ ID NO: 5672597 - DNA, 25 bp, Homo sapien
gagtcacatttaccttgtacctagt

SEQ ID NO: 5672598 - DNA, 25 bp, Homo sapien
cacatttaccttgtacctagtaaga

SEQ ID NO: 5672599 - DNA, 25 bp, Homo sapien
gtcacatttaccttgtacctagtaa

SEQ ID NO: 5672600 - DNA, 25 bp, Homo sapien
tatgtttcttactaggtacaaggta

SEQ ID NO: 5672601 - DNA, 25 bp, Homo sapien
taggtacaaggtaaatgtgactctg

SEQ ID NO: 5672602 - DNA, 25 bp, Homo sapien
actaggtacaaggtaaatgtgactc

SEQ ID NO: 5672603 - DNA, 25 bp, Homo sapien
tcttactaggtacaaggtaaatgtg

SEQ ID NO: 5672604 - DNA, 25 bp, Homo sapien
tactaggtacaaggtaaatgtgact

SEQ ID NO: 5672605 - DNA, 25 bp, Homo sapien
attatgtttcttactaggtacaagg

SEQ ID NO: 5672606 - DNA, 25 bp, Homo sapien
taaagtggtaatttgtagcttcttc

SEQ ID NO: 5672607 - DNA, 25 bp, Homo sapien
aagctgaggatttataaagtggtaa

SEQ ID NO: 5672608 - DNA, 25 bp, Homo sapien
tacagcctagtaataaaagctgagg

SEQ ID NO: 5672609 - DNA, 25 bp, Homo sapien
tatgattagttgaaatacagcctag

SEQ ID NO: 5672610 - DNA, 25 bp, Homo sapien
agtggtaatttgtagcttcttcatc

SEQ ID NO: 5672611 - DNA, 25 bp, Homo sapien
gattagttgaaatacagcctagtaa

SEQ ID NO: 5672612 - DNA, 25 bp, Homo sapien
aaattaccactttataaatcctcag

SEQ ID NO: 5672613 - DNA, 25 bp, Homo sapien
ttaccactttataaatcctcagctt

SEQ ID NO: 5672614 - DNA, 25 bp, Homo sapien
tattactaggctgtatttcaactaa

SEQ ID NO: 5672615 - DNA, 25 bp, Homo sapien
cctcagcttttattactaggctgta

SEQ ID NO: 5672616 - DNA, 25 bp, Homo sapien
tactaggctgtatttcaactaatca

SEQ ID NO: 5672617 - DNA, 25 bp, Homo sapien
gatgaagaagctacaaattaccact

SEQ ID NO: 5672618 - DNA, 25 bp, Homo sapien
ccaccctcctcagccttccaaagtg

SEQ ID NO: 5672619 - DNA, 25 bp, Homo sapien
agcgatccaccctcctcagccttcc

SEQ ID NO: 5672620 - DNA, 25 bp, Homo sapien
aagcgatccaccctcctcagccttc

SEQ ID NO: 5672621 - DNA, 25 bp, Homo sapien
cgatccaccctcctcagccttccaa

SEQ ID NO: 5672622 - DNA, 25 bp, Homo sapien
gcgatccaccctcctcagccttcca

SEQ ID NO: 5672623 - DNA, 25 bp, Homo sapien
gatccaccctcctcagccttccaaa

SEQ ID NO: 5672624 - DNA, 25 bp, Homo sapien
ggaaggctgaggagggtggatcgct

SEQ ID NO: 5672625 - DNA, 25 bp, Homo sapien
gaaggctgaggagggtggatcgctt

SEQ ID NO: 5672626 - DNA, 25 bp, Homo sapien
ttggaaggctgaggagggtggatcg

SEQ ID NO: 5672627 - DNA, 25 bp, Homo sapien
tggaaggctgaggagggtggatcgc

SEQ ID NO: 5672628 - DNA, 25 bp, Homo sapien
cactttggaaggctgaggagggtgg

SEQ ID NO: 5672629 - DNA, 25 bp, Homo sapien
tttggaaggctgaggagggtggatc

SEQ ID NO: 5672630 - DNA, 25 bp, Homo sapien
tacattctgtccatttaaaaggctg

SEQ ID NO: 5672631 - DNA, 25 bp, Homo sapien
attctgtccatttaaaaggctgaat

SEQ ID NO: 5672632 - DNA, 25 bp, Homo sapien
ctgtgtgtacattctgtccatttaa

SEQ ID NO: 5672633 - DNA, 25 bp, Homo sapien
cattctgtccatttaaaaggctgaa

SEQ ID NO: 5672634 - DNA, 25 bp, Homo sapien
acattctgtccatttaaaaggctga

SEQ ID NO: 5672635 - DNA, 25 bp, Homo sapien
ttactgtgtgtacattctgtccatt

SEQ ID NO: 5672636 - DNA, 25 bp, Homo sapien
tcagccttttaaatggacagaatgt

SEQ ID NO: 5672637 - DNA, 25 bp, Homo sapien
agccttttaaatggacagaatgtac

SEQ ID NO: 5672638 - DNA, 25 bp, Homo sapien
taaatggacagaatgtacacacagt

SEQ ID NO: 5672639 - DNA, 25 bp, Homo sapien
ttaaatggacagaatgtacacacag

SEQ ID NO: 5672640 - DNA, 25 bp, Homo sapien
aatggacagaatgtacacacagtaa

SEQ ID NO: 5672641 - DNA, 25 bp, Homo sapien
ttcagccttttaaatggacagaatg

SEQ ID NO: 5672642 - DNA, 25 bp, Homo sapien
tctatccctctctgggtaaggatca

SEQ ID NO: 5672643 - DNA, 25 bp, Homo sapien
ctctgggtaaggatcaggtaatgga

SEQ ID NO: 5672644 - DNA, 25 bp, Homo sapien
ccctctctgggtaaggatcaggtaa

SEQ ID NO: 5672645 - DNA, 25 bp, Homo sapien
gtggcactgatttctatccctctct

SEQ ID NO: 5672646 - DNA, 25 bp, Homo sapien
caggagtggcactgatttctatccc

SEQ ID NO: 5672647 - DNA, 25 bp, Homo sapien
aacaggagtggcactgatttctatc

SEQ ID NO: 5672648 - DNA, 25 bp, Homo sapien
tccattacctgatccttacccagag

SEQ ID NO: 5672649 - DNA, 25 bp, Homo sapien
gatccttacccagagagggatagaa

SEQ ID NO: 5672650 - DNA, 25 bp, Homo sapien
agagagggatagaaatcagtgccac

SEQ ID NO: 5672651 - DNA, 25 bp, Homo sapien
tacctgatccttacccagagaggga

SEQ ID NO: 5672652 - DNA, 25 bp, Homo sapien
gagggatagaaatcagtgccactcc

SEQ ID NO: 5672653 - DNA, 25 bp, Homo sapien
gatagaaatcagtgccactcctgtt

SEQ ID NO: 5672654 - DNA, 25 bp, Homo sapien
aaaaattagccaggtctgatggtgc

SEQ ID NO: 5672655 - DNA, 25 bp, Homo sapien
ggtcaggagtttgacaccagcctgt

SEQ ID NO: 5672656 - DNA, 25 bp, Homo sapien
gtcaggagtttgacaccagcctgtc

SEQ ID NO: 5672657 - DNA, 25 bp, Homo sapien
aaaattagccaggtctgatggtgca

SEQ ID NO: 5672658 - DNA, 25 bp, Homo sapien
tgcaccatcagacctggctaatttt

SEQ ID NO: 5672659 - DNA, 25 bp, Homo sapien
gcaccatcagacctggctaattttt

SEQ ID NO: 5672660 - DNA, 25 bp, Homo sapien
acaggctggtgtcaaactcctgacc

SEQ ID NO: 5672661 - DNA, 25 bp, Homo sapien
gacaggctggtgtcaaactcctgac

SEQ ID NO: 5672662 - DNA, 25 bp, Homo sapien
gaaaaaacaaacctggctgggcata

SEQ ID NO: 5672663 - DNA, 25 bp, Homo sapien
aaaacaaacctggctgggcatagtg

SEQ ID NO: 5672664 - DNA, 25 bp, Homo sapien
ctgaaagaaaaaacaaacctggctg

SEQ ID NO: 5672665 - DNA, 25 bp, Homo sapien
aaacaaacctggctgggcatagtgg

SEQ ID NO: 5672666 - DNA, 25 bp, Homo sapien
aaaaaacaaacctggctgggcatag

SEQ ID NO: 5672667 - DNA, 25 bp, Homo sapien
aaaaacaaacctggctgggcatagt

SEQ ID NO: 5672668 - DNA, 25 bp, Homo sapien
ccactatgcccagccaggtttgttt

SEQ ID NO: 5672669 - DNA, 25 bp, Homo sapien
tatgcccagccaggtttgttttttc

SEQ ID NO: 5672670 - DNA, 25 bp, Homo sapien
actatgcccagccaggtttgttttt

SEQ ID NO: 5672671 - DNA, 25 bp, Homo sapien
ctatgcccagccaggtttgtttttt

SEQ ID NO: 5672672 - DNA, 25 bp, Homo sapien
cagccaggtttgttttttctttcag

SEQ ID NO: 5672673 - DNA, 25 bp, Homo sapien
cactatgcccagccaggtttgtttt

SEQ ID NO: 5672674 - DNA, 25 bp, Homo sapien
gacagagatctcatctcaaaaagga

SEQ ID NO: 5672675 - DNA, 25 bp, Homo sapien
acagagatctcatctcaaaaaggaa

SEQ ID NO: 5672676 - DNA, 25 bp, Homo sapien
gagatctcatctcaaaaaggaaaaa

SEQ ID NO: 5672677 - DNA, 25 bp, Homo sapien
agagatctcatctcaaaaaggaaaa

SEQ ID NO: 5672678 - DNA, 25 bp, Homo sapien
cagagatctcatctcaaaaaggaaa

SEQ ID NO: 5672679 - DNA, 25 bp, Homo sapien
agatctcatctcaaaaaggaaaaaa

SEQ ID NO: 5672680 - DNA, 25 bp, Homo sapien
ttttttcctttttgagatgagatct

SEQ ID NO: 5672681 - DNA, 25 bp, Homo sapien
tttttcctttttgagatgagatctc

SEQ ID NO: 5672682 - DNA, 25 bp, Homo sapien
tttcctttttgagatgagatctctg

SEQ ID NO: 5672683 - DNA, 25 bp, Homo sapien
tcctttttgagatgagatctctgtc

SEQ ID NO: 5672684 - DNA, 25 bp, Homo sapien
ttttcctttttgagatgagatctct

SEQ ID NO: 5672685 - DNA, 25 bp, Homo sapien
ttcctttttgagatgagatctctgt

SEQ ID NO: 5672686 - DNA, 25 bp, Homo sapien
gacccctgtatctacaagaaataga

SEQ ID NO: 5672687 - DNA, 25 bp, Homo sapien
tagctgaataccctgtagtcccagc

SEQ ID NO: 5672688 - DNA, 25 bp, Homo sapien
gaaaaattagctgaataccctgtag

SEQ ID NO: 5672689 - DNA, 25 bp, Homo sapien
atagtaagacccctgtatctacaag

SEQ ID NO: 5672690 - DNA, 25 bp, Homo sapien
ccctgtatctacaagaaatagaaga

SEQ ID NO: 5672691 - DNA, 25 bp, Homo sapien
aattagctgaataccctgtagtccc

SEQ ID NO: 5672692 - DNA, 25 bp, Homo sapien
ggactacagggtattcagctaattt

SEQ ID NO: 5672693 - DNA, 25 bp, Homo sapien
tcttctatttcttgtagatacaggg

SEQ ID NO: 5672694 - DNA, 25 bp, Homo sapien
cagggtattcagctaatttttcttc

SEQ ID NO: 5672695 - DNA, 25 bp, Homo sapien
gggactacagggtattcagctaatt

SEQ ID NO: 5672696 - DNA, 25 bp, Homo sapien
gactacagggtattcagctaatttt

SEQ ID NO: 5672697 - DNA, 25 bp, Homo sapien
gctgggactacagggtattcagcta

SEQ ID NO: 5672698 - DNA, 25 bp, Homo sapien
tgattattgtcacatagagttttaa

SEQ ID NO: 5672699 - DNA, 25 bp, Homo sapien
cagataatttactggagaggtgaac

SEQ ID NO: 5672700 - DNA, 25 bp, Homo sapien
agataatttactggagaggtgaact

SEQ ID NO: 5672701 - DNA, 25 bp, Homo sapien
gataatttactggagaggtgaactg

SEQ ID NO: 5672702 - DNA, 25 bp, Homo sapien
gttcacctctccagtaaattatctg

SEQ ID NO: 5672703 - DNA, 25 bp, Homo sapien
ttaaaactctatgtgacaataatca

SEQ ID NO: 5672704 - DNA, 25 bp, Homo sapien
agttcacctctccagtaaattatct

SEQ ID NO: 5672705 - DNA, 25 bp, Homo sapien
cagttcacctctccagtaaattatc

SEQ ID NO: 5672706 - DNA, 25 bp, Homo sapien
ctacgttttactcagtgtttatggt

SEQ ID NO: 5672707 - DNA, 25 bp, Homo sapien
cctgtgggtcctacgttttactcag

SEQ ID NO: 5672708 - DNA, 25 bp, Homo sapien
agtggcattccctgtgggtcctacg

SEQ ID NO: 5672709 - DNA, 25 bp, Homo sapien
cagtggcattccctgtgggtcctac

SEQ ID NO: 5672710 - DNA, 25 bp, Homo sapien
cctacgttttactcagtgtttatgg

SEQ ID NO: 5672711 - DNA, 25 bp, Homo sapien
tgtgggtcctacgttttactcagtg

SEQ ID NO: 5672712 - DNA, 25 bp, Homo sapien
cactgagtaaaacgtaggacccaca

SEQ ID NO: 5672713 - DNA, 25 bp, Homo sapien
accataaacactgagtaaaacgtag

SEQ ID NO: 5672714 - DNA, 25 bp, Homo sapien
cgtaggacccacagggaatgccact

SEQ ID NO: 5672715 - DNA, 25 bp, Homo sapien
gtaggacccacagggaatgccactg

SEQ ID NO: 5672716 - DNA, 25 bp, Homo sapien
cataaacactgagtaaaacgtagga

SEQ ID NO: 5672717 - DNA, 25 bp, Homo sapien
ctgagtaaaacgtaggacccacagg

SEQ ID NO: 5672718 - DNA, 25 bp, Homo sapien
caactgcagccgcagacctgaagtc

SEQ ID NO: 5672719 - DNA, 25 bp, Homo sapien
gaagtcagttggtacgtttcaagga

SEQ ID NO: 5672720 - DNA, 25 bp, Homo sapien
agtcagttggtacgtttcaaggaat

SEQ ID NO: 5672721 - DNA, 25 bp, Homo sapien
aactgcagccgcagacctgaagtca

SEQ ID NO: 5672722 - DNA, 25 bp, Homo sapien
tgaagtcagttggtacgtttcaagg

SEQ ID NO: 5672723 - DNA, 25 bp, Homo sapien
actgcagccgcagacctgaagtcag

SEQ ID NO: 5672724 - DNA, 25 bp, Homo sapien
ctgacttcaggtctgcggctgcagt

SEQ ID NO: 5672725 - DNA, 25 bp, Homo sapien
attccttgaaacgtaccaactgact

SEQ ID NO: 5672726 - DNA, 25 bp, Homo sapien
gacttcaggtctgcggctgcagttg

SEQ ID NO: 5672727 - DNA, 25 bp, Homo sapien
tccttgaaacgtaccaactgacttc

SEQ ID NO: 5672728 - DNA, 25 bp, Homo sapien
ccttgaaacgtaccaactgacttca

SEQ ID NO: 5672729 - DNA, 25 bp, Homo sapien
tgacttcaggtctgcggctgcagtt

SEQ ID NO: 5672730 - DNA, 25 bp, Homo sapien
gtttaggttgtatgtgtatgagatg

SEQ ID NO: 5672731 - DNA, 25 bp, Homo sapien
tttaggttgtatgtgtatgagatga

SEQ ID NO: 5672732 - DNA, 25 bp, Homo sapien
ttaggttgtatgtgtatgagatgaa

SEQ ID NO: 5672733 - DNA, 25 bp, Homo sapien
aagtttaggttgtatgtgtatgaga

SEQ ID NO: 5672734 - DNA, 25 bp, Homo sapien
taggttgtatgtgtatgagatgaat

SEQ ID NO: 5672735 - DNA, 25 bp, Homo sapien
aggttgtatgtgtatgagatgaatt

SEQ ID NO: 5672736 - DNA, 25 bp, Homo sapien
tcatctcatacacatacaacctaaa

SEQ ID NO: 5672737 - DNA, 25 bp, Homo sapien
attcatctcatacacatacaaccta

SEQ ID NO: 5672738 - DNA, 25 bp, Homo sapien
catctcatacacatacaacctaaac

SEQ ID NO: 5672739 - DNA, 25 bp, Homo sapien
aattcatctcatacacatacaacct

SEQ ID NO: 5672740 - DNA, 25 bp, Homo sapien
ttcatctcatacacatacaacctaa

SEQ ID NO: 5672741 - DNA, 25 bp, Homo sapien
tctcatacacatacaacctaaactt

SEQ ID NO: 5672742 - DNA, 25 bp, Homo sapien
taagctatagaaaagacagtgccct

SEQ ID NO: 5672743 - DNA, 25 bp, Homo sapien
cgcacctggccttgtgataatgtat

SEQ ID NO: 5672744 - DNA, 25 bp, Homo sapien
ctatagaaaagacagtgcccttaag

SEQ ID NO: 5672745 - DNA, 25 bp, Homo sapien
tcaagtaagctatagaaaagacagt

SEQ ID NO: 5672746 - DNA, 25 bp, Homo sapien
gtgttcttacaatcaagtaagctat

SEQ ID NO: 5672747 - DNA, 25 bp, Homo sapien
cctggccttgtgataatgtattata

SEQ ID NO: 5672748 - DNA, 25 bp, Homo sapien
atagcttacttgattgtaagaacac

SEQ ID NO: 5672749 - DNA, 25 bp, Homo sapien
ggcactgtcttttctatagcttact

SEQ ID NO: 5672750 - DNA, 25 bp, Homo sapien
tataatacattatcacaaggccagg

SEQ ID NO: 5672751 - DNA, 25 bp, Homo sapien
taatacattatcacaaggccaggtg

SEQ ID NO: 5672752 - DNA, 25 bp, Homo sapien
ttaagggcactgtcttttctatagc

SEQ ID NO: 5672753 - DNA, 25 bp, Homo sapien
gtatataatacattatcacaaggcc

SEQ ID NO: 5672754 - DNA, 25 bp, Homo sapien
cacctgcctcgttctcccaacgtgc

SEQ ID NO: 5672755 - DNA, 25 bp, Homo sapien
acttctgatttcaggtgatccacct

SEQ ID NO: 5672756 - DNA, 25 bp, Homo sapien
ccacctgcctcgttctcccaacgtg

SEQ ID NO: 5672757 - DNA, 25 bp, Homo sapien
tgaacttctgatttcaggtgatcca

SEQ ID NO: 5672758 - DNA, 25 bp, Homo sapien
acctgcctcgttctcccaacgtgct

SEQ ID NO: 5672759 - DNA, 25 bp, Homo sapien
atagagatagggttttaccgtgttg

SEQ ID NO: 5672760 - DNA, 25 bp, Homo sapien
caacacggtaaaaccctatctctat

SEQ ID NO: 5672761 - DNA, 25 bp, Homo sapien
agcacgttgggagaacgaggcaggt

SEQ ID NO: 5672762 - DNA, 25 bp, Homo sapien
aggtggatcacctgaaatcagaagt

SEQ ID NO: 5672763 - DNA, 25 bp, Homo sapien
tggatcacctgaaatcagaagttca

SEQ ID NO: 5672764 - DNA, 25 bp, Homo sapien
cacgttgggagaacgaggcaggtgg

SEQ ID NO: 5672765 - DNA, 25 bp, Homo sapien
gcacgttgggagaacgaggcaggtg

SEQ ID NO: 5672766 - DNA, 25 bp, Homo sapien
ctcagatgatccgtccgccttggcc

SEQ ID NO: 5672767 - DNA, 25 bp, Homo sapien
cctcagatgatccgtccgccttggc

SEQ ID NO: 5672768 - DNA, 25 bp, Homo sapien
acctcagatgatccgtccgccttgg

SEQ ID NO: 5672769 - DNA, 25 bp, Homo sapien
tcagatgatccgtccgccttggcct

SEQ ID NO: 5672770 - DNA, 25 bp, Homo sapien
cgacctcagatgatccgtccgcctt

SEQ ID NO: 5672771 - DNA, 25 bp, Homo sapien
cagatgatccgtccgccttggcctc

SEQ ID NO: 5672772 - DNA, 25 bp, Homo sapien
aggccaaggcggacggatcatctga

SEQ ID NO: 5672773 - DNA, 25 bp, Homo sapien
gccaaggcggacggatcatctgagg

SEQ ID NO: 5672774 - DNA, 25 bp, Homo sapien
aaggcggacggatcatctgaggtcg

SEQ ID NO: 5672775 - DNA, 25 bp, Homo sapien
gaggccaaggcggacggatcatctg

SEQ ID NO: 5672776 - DNA, 25 bp, Homo sapien
ggccaaggcggacggatcatctgag

SEQ ID NO: 5672777 - DNA, 25 bp, Homo sapien
ccaaggcggacggatcatctgaggt

SEQ ID NO: 5672778 - DNA, 25 bp, Homo sapien
tacaggcatgcaccaccacgcctgg

SEQ ID NO: 5672779 - DNA, 25 bp, Homo sapien
gcatgcaccaccacgcctggctaat

SEQ ID NO: 5672780 - DNA, 25 bp, Homo sapien
caggcatgcaccaccacgcctggct

SEQ ID NO: 5672781 - DNA, 25 bp, Homo sapien
ggcatgcaccaccacgcctggctaa

SEQ ID NO: 5672782 - DNA, 25 bp, Homo sapien
acaggcatgcaccaccacgcctggc

SEQ ID NO: 5672783 - DNA, 25 bp, Homo sapien
ctgtctcagcctcccgagtagttgg

SEQ ID NO: 5672784 - DNA, 25 bp, Homo sapien
ccaggcgtggtggtgcatgcctgta

SEQ ID NO: 5672785 - DNA, 25 bp, Homo sapien
agccaggcgtggtggtgcatgcctg

SEQ ID NO: 5672786 - DNA, 25 bp, Homo sapien
attagccaggcgtggtggtgcatgc

SEQ ID NO: 5672787 - DNA, 25 bp, Homo sapien
ccaactactcgggaggctgagacag

SEQ ID NO: 5672788 - DNA, 25 bp, Homo sapien
ttagccaggcgtggtggtgcatgcc

SEQ ID NO: 5672789 - DNA, 25 bp, Homo sapien
gccaggcgtggtggtgcatgcctgt

SEQ ID NO: 5672790 - DNA, 25 bp, Homo sapien
acctctgtctcctgagttgaagcaa

SEQ ID NO: 5672791 - DNA, 25 bp, Homo sapien
ctgtctcctgagttgaagcaattct

SEQ ID NO: 5672792 - DNA, 25 bp, Homo sapien
tctgtctcctgagttgaagcaattc

SEQ ID NO: 5672793 - DNA, 25 bp, Homo sapien
cctctgtctcctgagttgaagcaat

SEQ ID NO: 5672794 - DNA, 25 bp, Homo sapien
tgtctcctgagttgaagcaattctc

SEQ ID NO: 5672795 - DNA, 25 bp, Homo sapien
ctctgtctcctgagttgaagcaatt

SEQ ID NO: 5672796 - DNA, 25 bp, Homo sapien
ttgcttcaactcaggagacagaggt

SEQ ID NO: 5672797 - DNA, 25 bp, Homo sapien
gagaattgcttcaactcaggagaca

SEQ ID NO: 5672798 - DNA, 25 bp, Homo sapien
gaattgcttcaactcaggagacaga

SEQ ID NO: 5672799 - DNA, 25 bp, Homo sapien
attgcttcaactcaggagacagagg

SEQ ID NO: 5672800 - DNA, 25 bp, Homo sapien
aattgcttcaactcaggagacagag

SEQ ID NO: 5672801 - DNA, 25 bp, Homo sapien
agaattgcttcaactcaggagacag

SEQ ID NO: 5672802 - DNA, 25 bp, Homo sapien
aaagtaaatacttgagtctccttag

SEQ ID NO: 5672803 - DNA, 25 bp, Homo sapien
aagtaaatacttgagtctccttagt

SEQ ID NO: 5672804 - DNA, 25 bp, Homo sapien
ttttaacaatgattacataccttct

SEQ ID NO: 5672805 - DNA, 25 bp, Homo sapien
tttaacaatgattacataccttcta

SEQ ID NO: 5672806 - DNA, 25 bp, Homo sapien
agaaggtatgtaatcattgttaaaa

SEQ ID NO: 5672807 - DNA, 25 bp, Homo sapien
actaaggagactcaagtatttactt

SEQ ID NO: 5672808 - DNA, 25 bp, Homo sapien
tagaaggtatgtaatcattgttaaa

SEQ ID NO: 5672809 - DNA, 25 bp, Homo sapien
ctaaggagactcaagtatttacttt

SEQ ID NO: 5672810 - DNA, 25 bp, Homo sapien
tggataagtaccagttgttttataa

SEQ ID NO: 5672811 - DNA, 25 bp, Homo sapien
atgggtggataagtaccagttgttt

SEQ ID NO: 5672812 - DNA, 25 bp, Homo sapien
gtggataagtaccagttgttttata

SEQ ID NO: 5672813 - DNA, 25 bp, Homo sapien
gatgggtggataagtaccagttgtt

SEQ ID NO: 5672814 - DNA, 25 bp, Homo sapien
aacaactggtacttatccacccatc

SEQ ID NO: 5672815 - DNA, 25 bp, Homo sapien
ttataaaacaactggtacttatcca

SEQ ID NO: 5672816 - DNA, 25 bp, Homo sapien
tataaaacaactggtacttatccac

SEQ ID NO: 5672817 - DNA, 25 bp, Homo sapien
aaacaactggtacttatccacccat

SEQ ID NO: 5672818 - DNA, 25 bp, Homo sapien
atagaaattatcgtttggcagtttt

SEQ ID NO: 5672819 - DNA, 25 bp, Homo sapien
tagaaattatcgtttggcagtttta

SEQ ID NO: 5672820 - DNA, 25 bp, Homo sapien
agaaattatcgtttggcagttttat

SEQ ID NO: 5672821 - DNA, 25 bp, Homo sapien
atctaatagaaattatcgtttggca

SEQ ID NO: 5672822 - DNA, 25 bp, Homo sapien
tgccaaacgataatttctattagat

SEQ ID NO: 5672823 - DNA, 25 bp, Homo sapien
aaaactgccaaacgataatttctat

SEQ ID NO: 5672824 - DNA, 25 bp, Homo sapien
taaaactgccaaacgataatttcta

SEQ ID NO: 5672825 - DNA, 25 bp, Homo sapien
ataaaactgccaaacgataatttct

SEQ ID NO: 5672826 - DNA, 25 bp, Homo sapien
aggattgatttaggccaggagttga

SEQ ID NO: 5672827 - DNA, 25 bp, Homo sapien
ttgatttaggccaggagttgaagac

SEQ ID NO: 5672828 - DNA, 25 bp, Homo sapien
tgatttaggccaggagttgaagacc

SEQ ID NO: 5672829 - DNA, 25 bp, Homo sapien
ggattgatttaggccaggagttgaa

SEQ ID NO: 5672830 - DNA, 25 bp, Homo sapien
attgatttaggccaggagttgaaga

SEQ ID NO: 5672831 - DNA, 25 bp, Homo sapien
ctgtctcttcaaaaaataagaaaat

SEQ ID NO: 5672832 - DNA, 25 bp, Homo sapien
gtcttcaactcctggcctaaatcaa

SEQ ID NO: 5672833 - DNA, 25 bp, Homo sapien
ttcaactcctggcctaaatcaatcc

SEQ ID NO: 5672834 - DNA, 25 bp, Homo sapien
attttcttattttttgaagagacag

SEQ ID NO: 5672835 - DNA, 25 bp, Homo sapien
ggtcttcaactcctggcctaaatca

SEQ ID NO: 5672836 - DNA, 25 bp, Homo sapien
tcaactcctggcctaaatcaatcct

SEQ ID NO: 5672837 - DNA, 25 bp, Homo sapien
tcttcaactcctggcctaaatcaat

SEQ ID NO: 5672838 - DNA, 25 bp, Homo sapien
gcagtttcctctattaacttctgat

SEQ ID NO: 5672839 - DNA, 25 bp, Homo sapien
tcatctgtaaacctaatttgaatta

SEQ ID NO: 5672840 - DNA, 25 bp, Homo sapien
taacttctgattaggggagaaaata

SEQ ID NO: 5672841 - DNA, 25 bp, Homo sapien
ggcagtttcctctattaacttctga

SEQ ID NO: 5672842 - DNA, 25 bp, Homo sapien
atcagaagttaatagaggaaactgc

SEQ ID NO: 5672843 - DNA, 25 bp, Homo sapien
tattttctcccctaatcagaagtta

SEQ ID NO: 5672844 - DNA, 25 bp, Homo sapien
taattcaaattaggtttacagatga

SEQ ID NO: 5672845 - DNA, 25 bp, Homo sapien
tcagaagttaatagaggaaactgcc

SEQ ID NO: 5672846 - DNA, 25 bp, Homo sapien
ccaccgcgcccagccttggagtgat

SEQ ID NO: 5672847 - DNA, 25 bp, Homo sapien
gacctcaggtgtttcacctgccttg

SEQ ID NO: 5672848 - DNA, 25 bp, Homo sapien
acctcaggtgtttcacctgccttgg

SEQ ID NO: 5672849 - DNA, 25 bp, Homo sapien
tcaggtgtttcacctgccttggcct

SEQ ID NO: 5672850 - DNA, 25 bp, Homo sapien
ctcaggtgtttcacctgccttggcc

SEQ ID NO: 5672851 - DNA, 25 bp, Homo sapien
cctcaggtgtttcacctgccttggc

SEQ ID NO: 5672852 - DNA, 25 bp, Homo sapien
atcactccaaggctgggcgcggtgg

SEQ ID NO: 5672853 - DNA, 25 bp, Homo sapien
ccaaggcaggtgaaacacctgaggt

SEQ ID NO: 5672854 - DNA, 25 bp, Homo sapien
aggccaaggcaggtgaaacacctga

SEQ ID NO: 5672855 - DNA, 25 bp, Homo sapien
caaggcaggtgaaacacctgaggtc

SEQ ID NO: 5672856 - DNA, 25 bp, Homo sapien
gccaaggcaggtgaaacacctgagg

SEQ ID NO: 5672857 - DNA, 25 bp, Homo sapien
ggccaaggcaggtgaaacacctgag

SEQ ID NO: 5672858 - DNA, 25 bp, Homo sapien
gcttatctagggttaatagtgttct

SEQ ID NO: 5672859 - DNA, 25 bp, Homo sapien
gtatttcctgtgtctaaaggctctg

SEQ ID NO: 5672860 - DNA, 25 bp, Homo sapien
taattcataatagctatgctttctg

SEQ ID NO: 5672861 - DNA, 25 bp, Homo sapien
gagtatttcctgtgtctaaaggctc

SEQ ID NO: 5672862 - DNA, 25 bp, Homo sapien
tggtggatctgagcttatctagggt

SEQ ID NO: 5672863 - DNA, 25 bp, Homo sapien
tcacagtaattcataatagctatgc

SEQ ID NO: 5672864 - DNA, 25 bp, Homo sapien
catagctattatgaattactgtgaa

SEQ ID NO: 5672865 - DNA, 25 bp, Homo sapien
aagaacactattaaccctagataag

SEQ ID NO: 5672866 - DNA, 25 bp, Homo sapien
tattaaccctagataagctcagatc

SEQ ID NO: 5672867 - DNA, 25 bp, Homo sapien
accctagataagctcagatccacca

SEQ ID NO: 5672868 - DNA, 25 bp, Homo sapien
cagagcctttagacacaggaaatac

SEQ ID NO: 5672869 - DNA, 25 bp, Homo sapien
cagaaagcatagctattatgaatta

SEQ ID NO: 5672870 - DNA, 25 bp, Homo sapien
catctatagatcatgtaccttgtgg

SEQ ID NO: 5672871 - DNA, 25 bp, Homo sapien
tgatcatctatagatcatgtacctt

SEQ ID NO: 5672872 - DNA, 25 bp, Homo sapien
aatgatcatctatagatcatgtacc

SEQ ID NO: 5672873 - DNA, 25 bp, Homo sapien
tcatctatagatcatgtaccttgtg

SEQ ID NO: 5672874 - DNA, 25 bp, Homo sapien
gatcatctatagatcatgtaccttg

SEQ ID NO: 5672875 - DNA, 25 bp, Homo sapien
attcctacccgtttgaagcttagag

SEQ ID NO: 5672876 - DNA, 25 bp, Homo sapien
ccacaaggtacatgatctatagatg

SEQ ID NO: 5672877 - DNA, 25 bp, Homo sapien
aaggtacatgatctatagatgatca

SEQ ID NO: 5672878 - DNA, 25 bp, Homo sapien
cacaaggtacatgatctatagatga

SEQ ID NO: 5672879 - DNA, 25 bp, Homo sapien
caaggtacatgatctatagatgatc

SEQ ID NO: 5672880 - DNA, 25 bp, Homo sapien
ctctaagcttcaaacgggtaggaat

SEQ ID NO: 5672881 - DNA, 25 bp, Homo sapien
acaaggtacatgatctatagatgat

SEQ ID NO: 5672882 - DNA, 25 bp, Homo sapien
atgagattttatactggaaaagagt

SEQ ID NO: 5672883 - DNA, 25 bp, Homo sapien
actcttttccagtataaaatctcat

SEQ ID NO: 5672884 - DNA, 25 bp, Homo sapien
tagagaggacccagtcaacaaatat

SEQ ID NO: 5672885 - DNA, 25 bp, Homo sapien
gagtcttagagaggacccagtcaac

SEQ ID NO: 5672886 - DNA, 25 bp, Homo sapien
tggaaaagagtcttagagaggaccc

SEQ ID NO: 5672887 - DNA, 25 bp, Homo sapien
tgagattttatactggaaaagagtc

SEQ ID NO: 5672888 - DNA, 25 bp, Homo sapien
aatgtctatcatgtgccagacactg

SEQ ID NO: 5672889 - DNA, 25 bp, Homo sapien
tattgaatgtctatcatgtgccaga

SEQ ID NO: 5672890 - DNA, 25 bp, Homo sapien
cagtataaaatctcattattctgag

SEQ ID NO: 5672891 - DNA, 25 bp, Homo sapien
gactgggtcctctctaagactcttt

SEQ ID NO: 5672892 - DNA, 25 bp, Homo sapien
gactcttttccagtataaaatctca

SEQ ID NO: 5672893 - DNA, 25 bp, Homo sapien
cagtgtctggcacatgatagacatt

SEQ ID NO: 5672894 - DNA, 25 bp, Homo sapien
tctggcacatgatagacattcaata

SEQ ID NO: 5672895 - DNA, 25 bp, Homo sapien
tatttgttgactgggtcctctctaa

SEQ ID NO: 5672896 - DNA, 25 bp, Homo sapien
ccctggcatctagtaagtagtttta

SEQ ID NO: 5672897 - DNA, 25 bp, Homo sapien
tccttccactgaagcagaagccctg

SEQ ID NO: 5672898 - DNA, 25 bp, Homo sapien
cctggcatctagtaagtagttttat

SEQ ID NO: 5672899 - DNA, 25 bp, Homo sapien
gcatctagtaagtagttttattttc

SEQ ID NO: 5672900 - DNA, 25 bp, Homo sapien
gtctataagggtggaaaaatctaca

SEQ ID NO: 5672901 - DNA, 25 bp, Homo sapien
aaaatctacaaggttccttccactg

SEQ ID NO: 5672902 - DNA, 25 bp, Homo sapien
ataaaactacttactagatgccagg

SEQ ID NO: 5672903 - DNA, 25 bp, Homo sapien
cagggcttctgcttcagtggaagga

SEQ ID NO: 5672904 - DNA, 25 bp, Homo sapien
aataaaactacttactagatgccag

SEQ ID NO: 5672905 - DNA, 25 bp, Homo sapien
taaaactacttactagatgccaggg

SEQ ID NO: 5672906 - DNA, 25 bp, Homo sapien
tgtagatttttccacccttatagac

SEQ ID NO: 5672907 - DNA, 25 bp, Homo sapien
gaaaataaaactacttactagatgc

SEQ ID NO: 5672908 - DNA, 25 bp, Homo sapien
taagatgctgctttatacagaggta

SEQ ID NO: 5672909 - DNA, 25 bp, Homo sapien
ctaggtcagctggttaagatgctgc

SEQ ID NO: 5672910 - DNA, 25 bp, Homo sapien
tatgtgacttttctaggtcagctgg

SEQ ID NO: 5672911 - DNA, 25 bp, Homo sapien
ggtaactcgctatctggattttaaa

SEQ ID NO: 5672912 - DNA, 25 bp, Homo sapien
ctggattttaaagtgactgaaggga

SEQ ID NO: 5672913 - DNA, 25 bp, Homo sapien
tatacagaggtaactcgctatctgg

SEQ ID NO: 5672914 - DNA, 25 bp, Homo sapien
gcagcatcttaaccagctgacctag

SEQ ID NO: 5672915 - DNA, 25 bp, Homo sapien
ccagctgacctagaaaagtcacata

SEQ ID NO: 5672916 - DNA, 25 bp, Homo sapien
tataaagcagcatcttaaccagctg

SEQ ID NO: 5672917 - DNA, 25 bp, Homo sapien
gcgagttacctctgtataaagcagc

SEQ ID NO: 5672918 - DNA, 25 bp, Homo sapien
tttaaaatccagatagcgagttacc

SEQ ID NO: 5672919 - DNA, 25 bp, Homo sapien
tcccttcagtcactttaaaatccag

SEQ ID NO: 5672920 - DNA, 25 bp, Homo sapien
gagttattgaacatcgttagaaaaa

SEQ ID NO: 5672921 - DNA, 25 bp, Homo sapien
tttttctaacgatgttcaataactc

SEQ ID NO: 5672922 - DNA, 25 bp, Homo sapien
caggcatagtagtgccaggtactca

SEQ ID NO: 5672923 - DNA, 25 bp, Homo sapien
ggagcgtcaggctggaagcttgcat

SEQ ID NO: 5672924 - DNA, 25 bp, Homo sapien
agtgccaggtactcaggagcgtcag

SEQ ID NO: 5672925 - DNA, 25 bp, Homo sapien
tagtgccaggtactcaggagcgtca

SEQ ID NO: 5672926 - DNA, 25 bp, Homo sapien
gcatagtagtgccaggtactcagga

SEQ ID NO: 5672927 - DNA, 25 bp, Homo sapien
tagtagtgccaggtactcaggagcg

SEQ ID NO: 5672928 - DNA, 25 bp, Homo sapien
ctgacgctcctgagtacctggcact

SEQ ID NO: 5672929 - DNA, 25 bp, Homo sapien
tgacgctcctgagtacctggcacta

SEQ ID NO: 5672930 - DNA, 25 bp, Homo sapien
tgagtacctggcactactatgcctg

SEQ ID NO: 5672931 - DNA, 25 bp, Homo sapien
atgcaagcttccagcctgacgctcc

SEQ ID NO: 5672932 - DNA, 25 bp, Homo sapien
tcctgagtacctggcactactatgc

SEQ ID NO: 5672933 - DNA, 25 bp, Homo sapien
gctcctgagtacctggcactactat

SEQ ID NO: 5672934 - DNA, 25 bp, Homo sapien
ctatgtattcaaccttgaataggaa

SEQ ID NO: 5672935 - DNA, 25 bp, Homo sapien
tgtattcaaccttgaataggaaaaa

SEQ ID NO: 5672936 - DNA, 25 bp, Homo sapien
aaaacgtgtaatatgcagtgcaata

SEQ ID NO: 5672937 - DNA, 25 bp, Homo sapien
aaaaacgtgtaatatgcagtgcaat

SEQ ID NO: 5672938 - DNA, 25 bp, Homo sapien
acaaaaacgtgtaatatgcagtgca

SEQ ID NO: 5672939 - DNA, 25 bp, Homo sapien
caaaaacgtgtaatatgcagtgcaa

SEQ ID NO: 5672940 - DNA, 25 bp, Homo sapien
tttttcctattcaaggttgaataca

SEQ ID NO: 5672941 - DNA, 25 bp, Homo sapien
tattgcactgcatattacacgtttt

SEQ ID NO: 5672942 - DNA, 25 bp, Homo sapien
tgcactgcatattacacgtttttgt

SEQ ID NO: 5672943 - DNA, 25 bp, Homo sapien
ttcctattcaaggttgaatacatag

SEQ ID NO: 5672944 - DNA, 25 bp, Homo sapien
attgcactgcatattacacgttttt

SEQ ID NO: 5672945 - DNA, 25 bp, Homo sapien
ttgcactgcatattacacgtttttg

SEQ ID NO: 5672946 - DNA, 25 bp, Homo sapien
gtgttgtgtgggttggtcttggact

SEQ ID NO: 5672947 - DNA, 25 bp, Homo sapien
agtccaagaccaacccacacaacac

SEQ ID NO: 5672948 - DNA, 25 bp, Homo sapien
tttttgtgttatggtagagatgagg

SEQ ID NO: 5672949 - DNA, 25 bp, Homo sapien
tcactgtgttgtgtgggttggtctt

SEQ ID NO: 5672950 - DNA, 25 bp, Homo sapien
ttgtgttatggtagagatgaggtct

SEQ ID NO: 5672951 - DNA, 25 bp, Homo sapien
caccacacctgggtgttccaccaca

SEQ ID NO: 5672952 - DNA, 25 bp, Homo sapien
ttgtgtgggttggtcttggactctt

SEQ ID NO: 5672953 - DNA, 25 bp, Homo sapien
cacctgggtgttccaccacacctgg

SEQ ID NO: 5672954 - DNA, 25 bp, Homo sapien
ggtggaacacccaggtgtggtggga

SEQ ID NO: 5672955 - DNA, 25 bp, Homo sapien
cctcatctctaccataacacaaaaa

SEQ ID NO: 5672956 - DNA, 25 bp, Homo sapien
aagaccaacccacacaacacagtga

SEQ ID NO: 5672957 - DNA, 25 bp, Homo sapien
tgtggtggaacacccaggtgtggtg

SEQ ID NO: 5672958 - DNA, 25 bp, Homo sapien
aagagtccaagaccaacccacacaa

SEQ ID NO: 5672959 - DNA, 25 bp, Homo sapien
ccaggtgtggtggaacacccaggtg

SEQ ID NO: 5672960 - DNA, 25 bp, Homo sapien
ttaaattgctgtaatattagtactt

SEQ ID NO: 5672961 - DNA, 25 bp, Homo sapien
aagtactaatattacagcaatttaa

SEQ ID NO: 5672962 - DNA, 25 bp, Homo sapien
gtttgtgcacatgaaataaagcatc

SEQ ID NO: 5672963 - DNA, 25 bp, Homo sapien
ttggttataggtctgtttgtgcaca

SEQ ID NO: 5672964 - DNA, 25 bp, Homo sapien
tacttttttctgagatgacattgaa

SEQ ID NO: 5672965 - DNA, 25 bp, Homo sapien
gtgcacatgaaataaagcatctgct

SEQ ID NO: 5672966 - DNA, 25 bp, Homo sapien
ctgagatgacattgaaaaactaaat

SEQ ID NO: 5672967 - DNA, 25 bp, Homo sapien
taaattgctgtaatattagtacttt

SEQ ID NO: 5672968 - DNA, 25 bp, Homo sapien
ttagtttttcaatgtcatctcagaa

SEQ ID NO: 5672969 - DNA, 25 bp, Homo sapien
tgtgcacaaacagacctataaccaa

SEQ ID NO: 5672970 - DNA, 25 bp, Homo sapien
gaaaaaagtactaatattacagcaa

SEQ ID NO: 5672971 - DNA, 25 bp, Homo sapien
gcagatgctttatttcatgtgcaca

SEQ ID NO: 5672972 - DNA, 25 bp, Homo sapien
tatttcatgtgcacaaacagaccta

SEQ ID NO: 5672973 - DNA, 25 bp, Homo sapien
tcaatgtcatctcagaaaaaagtac

SEQ ID NO: 5672974 - DNA, 25 bp, Homo sapien
tggcatgatcttggctcactacaac

SEQ ID NO: 5672975 - DNA, 25 bp, Homo sapien
gcatgatcttggctcactacaacct

SEQ ID NO: 5672976 - DNA, 25 bp, Homo sapien
tccgccttctggttcaagcaattct

SEQ ID NO: 5672977 - DNA, 25 bp, Homo sapien
catgatcttggctcactacaacctc

SEQ ID NO: 5672978 - DNA, 25 bp, Homo sapien
aacctccgccttctggttcaagcaa

SEQ ID NO: 5672979 - DNA, 25 bp, Homo sapien
atgatcttggctcactacaacctcc

SEQ ID NO: 5672980 - DNA, 25 bp, Homo sapien
ttgcttgaaccagaaggcggaggtt

SEQ ID NO: 5672981 - DNA, 25 bp, Homo sapien
gttgtagtgagccaagatcatgcca

SEQ ID NO: 5672982 - DNA, 25 bp, Homo sapien
ggaggttgtagtgagccaagatcat

SEQ ID NO: 5672983 - DNA, 25 bp, Homo sapien
aggttgtagtgagccaagatcatgc

SEQ ID NO: 5672984 - DNA, 25 bp, Homo sapien
agaattgcttgaaccagaaggcgga

SEQ ID NO: 5672985 - DNA, 25 bp, Homo sapien
gaggttgtagtgagccaagatcatg

SEQ ID NO: 5672986 - DNA, 25 bp, Homo sapien
atacataacaagattgtaagccttt

SEQ ID NO: 5672987 - DNA, 25 bp, Homo sapien
gtggcataatacataacaagattgt

SEQ ID NO: 5672988 - DNA, 25 bp, Homo sapien
tggcataatacataacaagattgta

SEQ ID NO: 5672989 - DNA, 25 bp, Homo sapien
ggcataatacataacaagattgtaa

SEQ ID NO: 5672990 - DNA, 25 bp, Homo sapien
cataatacataacaagattgtaagc

SEQ ID NO: 5672991 - DNA, 25 bp, Homo sapien
taatacataacaagattgtaagcct

SEQ ID NO: 5672992 - DNA, 25 bp, Homo sapien
aggcttacaatcttgttatgtatta

SEQ ID NO: 5672993 - DNA, 25 bp, Homo sapien
aaaggcttacaatcttgttatgtat

SEQ ID NO: 5672994 - DNA, 25 bp, Homo sapien
acaatcttgttatgtattatgccac

SEQ ID NO: 5672995 - DNA, 25 bp, Homo sapien
gcttacaatcttgttatgtattatg

SEQ ID NO: 5672996 - DNA, 25 bp, Homo sapien
tacaatcttgttatgtattatgcca

SEQ ID NO: 5672997 - DNA, 25 bp, Homo sapien
ttacaatcttgttatgtattatgcc

SEQ ID NO: 5672998 - DNA, 25 bp, Homo sapien
tcaagggatccacccgcctcatgga

SEQ ID NO: 5672999 - DNA, 25 bp, Homo sapien
gcatgagccattgcgtctggccttg

SEQ ID NO: 5673000 - DNA, 25 bp, Homo sapien
tgcgtctggccttgttttatattct

SEQ ID NO: 5673001 - DNA, 25 bp, Homo sapien
tccacccgcctcatggattacaaag

SEQ ID NO: 5673002 - DNA, 25 bp, Homo sapien
gcctcatggattacaaagtgctggg

SEQ ID NO: 5673003 - DNA, 25 bp, Homo sapien
tcatggattacaaagtgctgggatt

SEQ ID NO: 5673004 - DNA, 25 bp, Homo sapien
taaaacaaggccagacgcaatggct

SEQ ID NO: 5673005 - DNA, 25 bp, Homo sapien
caaggccagacgcaatggctcatgc

SEQ ID NO: 5673006 - DNA, 25 bp, Homo sapien
aatcccagcactttgtaatccatga

SEQ ID NO: 5673007 - DNA, 25 bp, Homo sapien
gcactttgtaatccatgaggcgggt

SEQ ID NO: 5673008 - DNA, 25 bp, Homo sapien
tccatgaggcgggtggatcccttga

SEQ ID NO: 5673009 - DNA, 25 bp, Homo sapien
aagaatataaaacaaggccagacgc

SEQ ID NO: 5673010 - DNA, 25 bp, Homo sapien
ccaccatgcttggccaatttttgta

SEQ ID NO: 5673011 - DNA, 25 bp, Homo sapien
gagccaccatgcttggccaattttt

SEQ ID NO: 5673012 - DNA, 25 bp, Homo sapien
agccaccatgcttggccaatttttg

SEQ ID NO: 5673013 - DNA, 25 bp, Homo sapien
atgagccaccatgcttggccaattt

SEQ ID NO: 5673014 - DNA, 25 bp, Homo sapien
gccaccatgcttggccaatttttgt

SEQ ID NO: 5673015 - DNA, 25 bp, Homo sapien
tgagccaccatgcttggccaatttt

SEQ ID NO: 5673016 - DNA, 25 bp, Homo sapien
aaattggccaagcatggtggctcat

SEQ ID NO: 5673017 - DNA, 25 bp, Homo sapien
caaaaattggccaagcatggtggct

SEQ ID NO: 5673018 - DNA, 25 bp, Homo sapien
acaaaaattggccaagcatggtggc

SEQ ID NO: 5673019 - DNA, 25 bp, Homo sapien
aaaaattggccaagcatggtggctc

SEQ ID NO: 5673020 - DNA, 25 bp, Homo sapien
tacaaaaattggccaagcatggtgg

SEQ ID NO: 5673021 - DNA, 25 bp, Homo sapien
aaaattggccaagcatggtggctca

SEQ ID NO: 5673022 - DNA, 25 bp, Homo sapien
gcctggcttttcttgtactcctgac

SEQ ID NO: 5673023 - DNA, 25 bp, Homo sapien
gtcaggagtacaagaaaagccaggc

SEQ ID NO: 5673024 - DNA, 25 bp, Homo sapien
tgcaacctctgcctcgcatgttgaa

SEQ ID NO: 5673025 - DNA, 25 bp, Homo sapien
tcgcatgttgaaacgattctcctgc

SEQ ID NO: 5673026 - DNA, 25 bp, Homo sapien
gcctcgcatgttgaaacgattctcc

SEQ ID NO: 5673027 - DNA, 25 bp, Homo sapien
gtgcagtcacgctatctcggctcac

SEQ ID NO: 5673028 - DNA, 25 bp, Homo sapien
acctctgcctcgcatgttgaaacga

SEQ ID NO: 5673029 - DNA, 25 bp, Homo sapien
tctgcctcgcatgttgaaacgattc

SEQ ID NO: 5673030 - DNA, 25 bp, Homo sapien
gcaggagaatcgtttcaacatgcga

SEQ ID NO: 5673031 - DNA, 25 bp, Homo sapien
tcgtttcaacatgcgaggcagaggt

SEQ ID NO: 5673032 - DNA, 25 bp, Homo sapien
ttcaacatgcgaggcagaggttgca

SEQ ID NO: 5673033 - DNA, 25 bp, Homo sapien
gtgagccgagatagcgtgactgcac

SEQ ID NO: 5673034 - DNA, 25 bp, Homo sapien
ggagaatcgtttcaacatgcgaggc

SEQ ID NO: 5673035 - DNA, 25 bp, Homo sapien
gaatcgtttcaacatgcgaggcaga

SEQ ID NO: 5673036 - DNA, 25 bp, Homo sapien
ctcgagtagctgggcttacaggcac

SEQ ID NO: 5673037 - DNA, 25 bp, Homo sapien
cacacaccacaccccgctaattttt

SEQ ID NO: 5673038 - DNA, 25 bp, Homo sapien
tcgagtagctgggcttacaggcaca

SEQ ID NO: 5673039 - DNA, 25 bp, Homo sapien
gcacacaccacaccccgctaatttt

SEQ ID NO: 5673040 - DNA, 25 bp, Homo sapien
tctcgagtagctgggcttacaggca

SEQ ID NO: 5673041 - DNA, 25 bp, Homo sapien
ctctcgagtagctgggcttacaggc

SEQ ID NO: 5673042 - DNA, 25 bp, Homo sapien
gtgcctgtaagcccagctactcgag

SEQ ID NO: 5673043 - DNA, 25 bp, Homo sapien
gcctgtaagcccagctactcgagag

SEQ ID NO: 5673044 - DNA, 25 bp, Homo sapien
aaaattagcggggtgtggtgtgtgc

SEQ ID NO: 5673045 - DNA, 25 bp, Homo sapien
aaaaattagcggggtgtggtgtgtg

SEQ ID NO: 5673046 - DNA, 25 bp, Homo sapien
tgcctgtaagcccagctactcgaga

SEQ ID NO: 5673047 - DNA, 25 bp, Homo sapien
tgtgcctgtaagcccagctactcga

SEQ ID NO: 5673048 - DNA, 25 bp, Homo sapien
ttcatgtgattctccacctcccaga

SEQ ID NO: 5673049 - DNA, 25 bp, Homo sapien
cagattcatgtgattctccacctcc

SEQ ID NO: 5673050 - DNA, 25 bp, Homo sapien
tcccagattcatgtgattctccacc

SEQ ID NO: 5673051 - DNA, 25 bp, Homo sapien
cccagattcatgtgattctccacct

SEQ ID NO: 5673052 - DNA, 25 bp, Homo sapien
ccagattcatgtgattctccacctc

SEQ ID NO: 5673053 - DNA, 25 bp, Homo sapien
tcatgtgattctccacctcccagat

SEQ ID NO: 5673054 - DNA, 25 bp, Homo sapien
aggtggagaatcacatgaatctggg

SEQ ID NO: 5673055 - DNA, 25 bp, Homo sapien
atctgggaggtggagaatcacatga

SEQ ID NO: 5673056 - DNA, 25 bp, Homo sapien
gaggtggagaatcacatgaatctgg

SEQ ID NO: 5673057 - DNA, 25 bp, Homo sapien
ggtggagaatcacatgaatctggga

SEQ ID NO: 5673058 - DNA, 25 bp, Homo sapien
ggaggtggagaatcacatgaatctg

SEQ ID NO: 5673059 - DNA, 25 bp, Homo sapien
tctgggaggtggagaatcacatgaa

SEQ ID NO: 5673060 - DNA, 25 bp, Homo sapien
tccgtatagagaactatacagtgtc

SEQ ID NO: 5673061 - DNA, 25 bp, Homo sapien
gaactatacagtgtcattgacaaat

SEQ ID NO: 5673062 - DNA, 25 bp, Homo sapien
gagaactatacagtgtcattgacaa

SEQ ID NO: 5673063 - DNA, 25 bp, Homo sapien
tatagagaactatacagtgtcattg

SEQ ID NO: 5673064 - DNA, 25 bp, Homo sapien
agtccgtatagagaactatacagtg

SEQ ID NO: 5673065 - DNA, 25 bp, Homo sapien
tagagaactatacagtgtcattgac

SEQ ID NO: 5673066 - DNA, 25 bp, Homo sapien
tatttgtcaatgacactgtatagtt

SEQ ID NO: 5673067 - DNA, 25 bp, Homo sapien
gacactgtatagttctctatacgga

SEQ ID NO: 5673068 - DNA, 25 bp, Homo sapien
caatgacactgtatagttctctata

SEQ ID NO: 5673069 - DNA, 25 bp, Homo sapien
tttgtcaatgacactgtatagttct

SEQ ID NO: 5673070 - DNA, 25 bp, Homo sapien
cactgtatagttctctatacggact

SEQ ID NO: 5673071 - DNA, 25 bp, Homo sapien
tgtcaatgacactgtatagttctct

SEQ ID NO: 5673072 - DNA, 25 bp, Homo sapien
tgctatttgtcagtgacaccctagt

SEQ ID NO: 5673073 - DNA, 25 bp, Homo sapien
gattgctatttgtcagtgacaccct

SEQ ID NO: 5673074 - DNA, 25 bp, Homo sapien
tatttgtcagtgacaccctagttct

SEQ ID NO: 5673075 - DNA, 25 bp, Homo sapien
tagatgattgctatttgtcagtgac

SEQ ID NO: 5673076 - DNA, 25 bp, Homo sapien
gatgattgctatttgtcagtgacac

SEQ ID NO: 5673077 - DNA, 25 bp, Homo sapien
tgattgctatttgtcagtgacaccc

SEQ ID NO: 5673078 - DNA, 25 bp, Homo sapien
agaactagggtgtcactgacaaata

SEQ ID NO: 5673079 - DNA, 25 bp, Homo sapien
gggtgtcactgacaaatagcaatca

SEQ ID NO: 5673080 - DNA, 25 bp, Homo sapien
tagggtgtcactgacaaatagcaat

SEQ ID NO: 5673081 - DNA, 25 bp, Homo sapien
tgtcactgacaaatagcaatcatct

SEQ ID NO: 5673082 - DNA, 25 bp, Homo sapien
aactagggtgtcactgacaaatagc

SEQ ID NO: 5673083 - DNA, 25 bp, Homo sapien
gacaaatagcaatcatctaaattca

SEQ ID NO: 5673084 - DNA, 25 bp, Homo sapien
tttgaattccttacataatacaaaa

SEQ ID NO: 5673085 - DNA, 25 bp, Homo sapien
attttgaattccttacataatacaa

SEQ ID NO: 5673086 - DNA, 25 bp, Homo sapien
tattttgaattccttacataataca

SEQ ID NO: 5673087 - DNA, 25 bp, Homo sapien
ttttgaattccttacataatacaaa

SEQ ID NO: 5673088 - DNA, 25 bp, Homo sapien
ttgtattatgtaaggaattcaaaat

SEQ ID NO: 5673089 - DNA, 25 bp, Homo sapien
tgtattatgtaaggaattcaaaata

SEQ ID NO: 5673090 - DNA, 25 bp, Homo sapien
tttgtattatgtaaggaattcaaaa

SEQ ID NO: 5673091 - DNA, 25 bp, Homo sapien
ttttgtattatgtaaggaattcaaa

SEQ ID NO: 5673092 - DNA, 25 bp, Homo sapien
gcttttgtattatgtaaggaattca

SEQ ID NO: 5673093 - DNA, 25 bp, Homo sapien
aaaccttagattcttcctaatcaga

SEQ ID NO: 5673094 - DNA, 25 bp, Homo sapien
gataattaaaattagttctagttca

SEQ ID NO: 5673095 - DNA, 25 bp, Homo sapien
tagattcttcctaatcagaaaagat

SEQ ID NO: 5673096 - DNA, 25 bp, Homo sapien
gattcttcctaatcagaaaagataa

SEQ ID NO: 5673097 - DNA, 25 bp, Homo sapien
accttagattcttcctaatcagaaa

SEQ ID NO: 5673098 - DNA, 25 bp, Homo sapien
tatgattggtaccttatggtgatgt

SEQ ID NO: 5673099 - DNA, 25 bp, Homo sapien
ggtgtaccttgtgtctagactcacc

SEQ ID NO: 5673100 - DNA, 25 bp, Homo sapien
tggatatgattggtaccttatggtg

SEQ ID NO: 5673101 - DNA, 25 bp, Homo sapien
ggatatgattggtaccttatggtga

SEQ ID NO: 5673102 - DNA, 25 bp, Homo sapien
gtaccttgtgtctagactcaccaaa

SEQ ID NO: 5673103 - DNA, 25 bp, Homo sapien
tgtaccttgtgtctagactcaccaa

SEQ ID NO: 5673104 - DNA, 25 bp, Homo sapien
aacatcaccataaggtaccaatcat

SEQ ID NO: 5673105 - DNA, 25 bp, Homo sapien
ggtgagtctagacacaaggtacacc

SEQ ID NO: 5673106 - DNA, 25 bp, Homo sapien
tttggtgagtctagacacaaggtac

SEQ ID NO: 5673107 - DNA, 25 bp, Homo sapien
caccataaggtaccaatcatatcca

SEQ ID NO: 5673108 - DNA, 25 bp, Homo sapien
tcaccataaggtaccaatcatatcc

SEQ ID NO: 5673109 - DNA, 25 bp, Homo sapien
tggtgagtctagacacaaggtacac

SEQ ID NO: 5673110 - DNA, 25 bp, Homo sapien
aatctgagcttcatttcaattcatg

SEQ ID NO: 5673111 - DNA, 25 bp, Homo sapien
atctgagcttcatttcaattcatgt

SEQ ID NO: 5673112 - DNA, 25 bp, Homo sapien
catgaattgaaatgaagctcagatt

SEQ ID NO: 5673113 - DNA, 25 bp, Homo sapien
acatgaattgaaatgaagctcagat

SEQ ID NO: 5673114 - DNA, 25 bp, Homo sapien
atacttactaattttgcttattctt

SEQ ID NO: 5673115 - DNA, 25 bp, Homo sapien
aatacttactaattttgcttattct

SEQ ID NO: 5673116 - DNA, 25 bp, Homo sapien
aagaataagcaaaattagtaagtat

SEQ ID NO: 5673117 - DNA, 25 bp, Homo sapien
tgaataaatacttactaattttgct

SEQ ID NO: 5673118 - DNA, 25 bp, Homo sapien
acccagccagaatttttattgaata

SEQ ID NO: 5673119 - DNA, 25 bp, Homo sapien
cttattcttttccaccttagcagta

SEQ ID NO: 5673120 - DNA, 25 bp, Homo sapien
gcttattcttttccaccttagcagt

SEQ ID NO: 5673121 - DNA, 25 bp, Homo sapien
aatacttactaattttgcttattct

SEQ ID NO: 5673122 - DNA, 25 bp, Homo sapien
ccagccagaatttttattgaataaa

SEQ ID NO: 5673123 - DNA, 25 bp, Homo sapien
aagaataagcaaaattagtaagtat

SEQ ID NO: 5673124 - DNA, 25 bp, Homo sapien
tattcaataaaaattctggctgggt

SEQ ID NO: 5673125 - DNA, 25 bp, Homo sapien
tatttattcaataaaaattctggct

SEQ ID NO: 5673126 - DNA, 25 bp, Homo sapien
tactgctaaggtggaaaagaataag

SEQ ID NO: 5673127 - DNA, 25 bp, Homo sapien
actgctaaggtggaaaagaataagc

SEQ ID NO: 5673128 - DNA, 25 bp, Homo sapien
ttattcaataaaaattctggctggg

SEQ ID NO: 5673129 - DNA, 25 bp, Homo sapien
aggcgtacatcatcacgtctggcta

SEQ ID NO: 5673130 - DNA, 25 bp, Homo sapien
caggcgtacatcatcacgtctggct

SEQ ID NO: 5673131 - DNA, 25 bp, Homo sapien
ttacaggcgtacatcatcacgtctg

SEQ ID NO: 5673132 - DNA, 25 bp, Homo sapien
agccagacgtgatgatgtacgcctg

SEQ ID NO: 5673133 - DNA, 25 bp, Homo sapien
tagccagacgtgatgatgtacgcct

SEQ ID NO: 5673134 - DNA, 25 bp, Homo sapien
cagacgtgatgatgtacgcctgtaa

SEQ ID NO: 5673135 - DNA, 25 bp, Homo sapien
caggctgcagtgcagtggcacgatc

SEQ ID NO: 5673136 - DNA, 25 bp, Homo sapien
cgatcttagctcagtgcaacctcca

SEQ ID NO: 5673137 - DNA, 25 bp, Homo sapien
tgagatggagtctttctctgtcacc

SEQ ID NO: 5673138 - DNA, 25 bp, Homo sapien
tcctaggctcaaacgattctcgtgc

SEQ ID NO: 5673139 - DNA, 25 bp, Homo sapien
ctcctaggctcaaacgattctcgtg

SEQ ID NO: 5673140 - DNA, 25 bp, Homo sapien
cctcctaggctcaaacgattctcgt

SEQ ID NO: 5673141 - DNA, 25 bp, Homo sapien
cacgagaatcgtttgagcctaggag

SEQ ID NO: 5673142 - DNA, 25 bp, Homo sapien
ggaggttgcactgagctaagatcgt

SEQ ID NO: 5673143 - DNA, 25 bp, Homo sapien
gatcgtgccactgcactgcagcctg

SEQ ID NO: 5673144 - DNA, 25 bp, Homo sapien
cgagaatcgtttgagcctaggaggt

SEQ ID NO: 5673145 - DNA, 25 bp, Homo sapien
gcacgagaatcgtttgagcctagga

SEQ ID NO: 5673146 - DNA, 25 bp, Homo sapien
acgagaatcgtttgagcctaggagg

SEQ ID NO: 5673147 - DNA, 25 bp, Homo sapien
aagtgattttcatgctcagccttct

SEQ ID NO: 5673148 - DNA, 25 bp, Homo sapien
gtgattttcatgctcagccttctga

SEQ ID NO: 5673149 - DNA, 25 bp, Homo sapien
ccatctcttgggttcaagtgatttt

SEQ ID NO: 5673150 - DNA, 25 bp, Homo sapien
agtgattttcatgctcagccttctg

SEQ ID NO: 5673151 - DNA, 25 bp, Homo sapien
gattttcatgctcagccttctgagt

SEQ ID NO: 5673152 - DNA, 25 bp, Homo sapien
tgattttcatgctcagccttctgag

SEQ ID NO: 5673153 - DNA, 25 bp, Homo sapien
ctcagaaggctgagcatgaaaatca

SEQ ID NO: 5673154 - DNA, 25 bp, Homo sapien
tcagaaggctgagcatgaaaatcac

SEQ ID NO: 5673155 - DNA, 25 bp, Homo sapien
actcagaaggctgagcatgaaaatc

SEQ ID NO: 5673156 - DNA, 25 bp, Homo sapien
agaaggctgagcatgaaaatcactt

SEQ ID NO: 5673157 - DNA, 25 bp, Homo sapien
cagaaggctgagcatgaaaatcact

SEQ ID NO: 5673158 - DNA, 25 bp, Homo sapien
aaaatcacttgaacccaagagatgg

SEQ ID NO: 5673159 - DNA, 25 bp, Homo sapien
tgcataccacctgcctggcttattt

SEQ ID NO: 5673160 - DNA, 25 bp, Homo sapien
agatgcataccacctgcctggctta

SEQ ID NO: 5673161 - DNA, 25 bp, Homo sapien
taaagatgcataccacctgcctggc

SEQ ID NO: 5673162 - DNA, 25 bp, Homo sapien
aaagatgcataccacctgcctggct

SEQ ID NO: 5673163 - DNA, 25 bp, Homo sapien
gatgcataccacctgcctggcttat

SEQ ID NO: 5673164 - DNA, 25 bp, Homo sapien
ggctaaagatgcataccacctgcct

SEQ ID NO: 5673165 - DNA, 25 bp, Homo sapien
aaataagccaggcaggtggtatgca

SEQ ID NO: 5673166 - DNA, 25 bp, Homo sapien
caggcaggtggtatgcatctttagc

SEQ ID NO: 5673167 - DNA, 25 bp, Homo sapien
taagccaggcaggtggtatgcatct

SEQ ID NO: 5673168 - DNA, 25 bp, Homo sapien
ataagccaggcaggtggtatgcatc

SEQ ID NO: 5673169 - DNA, 25 bp, Homo sapien
gccaggcaggtggtatgcatcttta

SEQ ID NO: 5673170 - DNA, 25 bp, Homo sapien
aggcaggtggtatgcatctttagcc

SEQ ID NO: 5673171 - DNA, 25 bp, Homo sapien
acctcatgtgatctgtctgccttgg

SEQ ID NO: 5673172 - DNA, 25 bp, Homo sapien
atgcctggctaatttttgtattttt

SEQ ID NO: 5673173 - DNA, 25 bp, Homo sapien
ggtctggaacccctgacctcatgtg

SEQ ID NO: 5673174 - DNA, 25 bp, Homo sapien
catgcctggctaatttttgtatttt

SEQ ID NO: 5673175 - DNA, 25 bp, Homo sapien
ttagtagagacggggttccaccatg

SEQ ID NO: 5673176 - DNA, 25 bp, Homo sapien
ccaccatgatggccaggctggtctg

SEQ ID NO: 5673177 - DNA, 25 bp, Homo sapien
ccaaggcagacagatcacatgaggt

SEQ ID NO: 5673178 - DNA, 25 bp, Homo sapien
cacatgaggtcaggggttccagacc

SEQ ID NO: 5673179 - DNA, 25 bp, Homo sapien
aaaatacaaaaattagccaggcatg

SEQ ID NO: 5673180 - DNA, 25 bp, Homo sapien
aaaaatacaaaaattagccaggcat

SEQ ID NO: 5673181 - DNA, 25 bp, Homo sapien
catggtggaaccccgtctctactaa

SEQ ID NO: 5673182 - DNA, 25 bp, Homo sapien
cagaccagcctggccatcatggtgg

SEQ ID NO: 5673183 - DNA, 25 bp, Homo sapien
tatcatatccagaaccatattcaaa

SEQ ID NO: 5673184 - DNA, 25 bp, Homo sapien
tatatcatatccagaaccatattca

SEQ ID NO: 5673185 - DNA, 25 bp, Homo sapien
cattctcctgcataagcataatacc

SEQ ID NO: 5673186 - DNA, 25 bp, Homo sapien
aataccattatatcatatccagaac

SEQ ID NO: 5673187 - DNA, 25 bp, Homo sapien
ccagaaccatattcaaatttcccag

SEQ ID NO: 5673188 - DNA, 25 bp, Homo sapien
attctcctgcataagcataatacca

SEQ ID NO: 5673189 - DNA, 25 bp, Homo sapien
ctgggaaatttgaatatggttctgg

SEQ ID NO: 5673190 - DNA, 25 bp, Homo sapien
ggtattatgcttatgcaggagaatg

SEQ ID NO: 5673191 - DNA, 25 bp, Homo sapien
gaatatggttctggatatgatataa

SEQ ID NO: 5673192 - DNA, 25 bp, Homo sapien
gttctggatatgatataatggtatt

SEQ ID NO: 5673193 - DNA, 25 bp, Homo sapien
gggaaatttgaatatggttctggat

SEQ ID NO: 5673194 - DNA, 25 bp, Homo sapien
tggtattatgcttatgcaggagaat

SEQ ID NO: 5673195 - DNA, 25 bp, Homo sapien
tatggatatgatgtgtactgtgtct

SEQ ID NO: 5673196 - DNA, 25 bp, Homo sapien
tatgatgtgtactgtgtcttatggg

SEQ ID NO: 5673197 - DNA, 25 bp, Homo sapien
ctacgtatatggatatgatgtgtac

SEQ ID NO: 5673198 - DNA, 25 bp, Homo sapien
tgtactgtgtcttatgggagataga

SEQ ID NO: 5673199 - DNA, 25 bp, Homo sapien
cacctacgtatatggatatgatgtg

SEQ ID NO: 5673200 - DNA, 25 bp, Homo sapien
gatgtgtactgtgtcttatgggaga

SEQ ID NO: 5673201 - DNA, 25 bp, Homo sapien
tcccataagacacagtacacatcat

SEQ ID NO: 5673202 - DNA, 25 bp, Homo sapien
gacacagtacacatcatatccatat

SEQ ID NO: 5673203 - DNA, 25 bp, Homo sapien
cacatcatatccatatacgtaggtg

SEQ ID NO: 5673204 - DNA, 25 bp, Homo sapien
atctatctcccataagacacagtac

SEQ ID NO: 5673205 - DNA, 25 bp, Homo sapien
taagacacagtacacatcatatcca

SEQ ID NO: 5673206 - DNA, 25 bp, Homo sapien
tatctcccataagacacagtacaca

SEQ ID NO: 5673207 - DNA, 25 bp, Homo sapien
tgccagcgcaagtccagtgctttcc

SEQ ID NO: 5673208 - DNA, 25 bp, Homo sapien
taacagagaatagtctaggaaggga

SEQ ID NO: 5673209 - DNA, 25 bp, Homo sapien
gatgtgccagcgcaagtccagtgct

SEQ ID NO: 5673210 - DNA, 25 bp, Homo sapien
tagaggatcgtctgatgtgccagcg

SEQ ID NO: 5673211 - DNA, 25 bp, Homo sapien
cgtctgatgtgccagcgcaagtcca

SEQ ID NO: 5673212 - DNA, 25 bp, Homo sapien
ggatcgtctgatgtgccagcgcaag

SEQ ID NO: 5673213 - DNA, 25 bp, Homo sapien
ttgcgctggcacatcagacgatcct

SEQ ID NO: 5673214 - DNA, 25 bp, Homo sapien
tcccttcctagactattctctgtta

SEQ ID NO: 5673215 - DNA, 25 bp, Homo sapien
aaagcactggacttgcgctggcaca

SEQ ID NO: 5673216 - DNA, 25 bp, Homo sapien
gctggcacatcagacgatcctctac

SEQ ID NO: 5673217 - DNA, 25 bp, Homo sapien
ggaaagcactggacttgcgctggca

SEQ ID NO: 5673218 - DNA, 25 bp, Homo sapien
tggacttgcgctggcacatcagacg

SEQ ID NO: 5673219 - DNA, 25 bp, Homo sapien
aagtgtcaacactgaaaaggtgact

SEQ ID NO: 5673220 - DNA, 25 bp, Homo sapien
tgtcaacactgaaaaggtgactagg

SEQ ID NO: 5673221 - DNA, 25 bp, Homo sapien
caacactgaaaaggtgactaggctg

SEQ ID NO: 5673222 - DNA, 25 bp, Homo sapien
acactgaaaaggtgactaggctggg

SEQ ID NO: 5673223 - DNA, 25 bp, Homo sapien
tccaccattgattttacatcatcag

SEQ ID NO: 5673224 - DNA, 25 bp, Homo sapien
tcaacactgaaaaggtgactaggct

SEQ ID NO: 5673225 - DNA, 25 bp, Homo sapien
tagtcaccttttcagtgttgacact

SEQ ID NO: 5673226 - DNA, 25 bp, Homo sapien
gcctagtcaccttttcagtgttgac

SEQ ID NO: 5673227 - DNA, 25 bp, Homo sapien
ctgatgatgtaaaatcaatggtgga

SEQ ID NO: 5673228 - DNA, 25 bp, Homo sapien
cccagcctagtcaccttttcagtgt

SEQ ID NO: 5673229 - DNA, 25 bp, Homo sapien
actgatgatgtaaaatcaatggtgg

SEQ ID NO: 5673230 - DNA, 25 bp, Homo sapien
cagcctagtcaccttttcagtgttg

SEQ ID NO: 5673231 - DNA, 25 bp, Homo sapien
cctgctaatttttgtgtatttagta

SEQ ID NO: 5673232 - DNA, 25 bp, Homo sapien
gccctgctaatttttgtgtatttag

SEQ ID NO: 5673233 - DNA, 25 bp, Homo sapien
tctgcctcagcctcctgagttgctg

SEQ ID NO: 5673234 - DNA, 25 bp, Homo sapien
tggaattacaggcatgcaccaccat

SEQ ID NO: 5673235 - DNA, 25 bp, Homo sapien
gttctgcctcagcctcctgagttgc

SEQ ID NO: 5673236 - DNA, 25 bp, Homo sapien
ttctgcctcagcctcctgagttgct

SEQ ID NO: 5673237 - DNA, 25 bp, Homo sapien
tactaaatacacaaaaattagcagg

SEQ ID NO: 5673238 - DNA, 25 bp, Homo sapien
cagcaactcaggaggctgaggcaga

SEQ ID NO: 5673239 - DNA, 25 bp, Homo sapien
ctaaatacacaaaaattagcagggc

SEQ ID NO: 5673240 - DNA, 25 bp, Homo sapien
agcaactcaggaggctgaggcagaa

SEQ ID NO: 5673241 - DNA, 25 bp, Homo sapien
atggtggtgcatgcctgtaattcca

SEQ ID NO: 5673242 - DNA, 25 bp, Homo sapien
gcaactcaggaggctgaggcagaac

SEQ ID NO: 5673243 - DNA, 25 bp, Homo sapien
accatgcccagctaagttttgtatt

SEQ ID NO: 5673244 - DNA, 25 bp, Homo sapien
gcgccaccatgcccagctaagtttt

SEQ ID NO: 5673245 - DNA, 25 bp, Homo sapien
atgcgccaccatgcccagctaagtt

SEQ ID NO: 5673246 - DNA, 25 bp, Homo sapien
cgccaccatgcccagctaagttttg

SEQ ID NO: 5673247 - DNA, 25 bp, Homo sapien
tgcgccaccatgcccagctaagttt

SEQ ID NO: 5673248 - DNA, 25 bp, Homo sapien
ccatgcccagctaagttttgtattt

SEQ ID NO: 5673249 - DNA, 25 bp, Homo sapien
aatacaaaacttagctgggcatggt

SEQ ID NO: 5673250 - DNA, 25 bp, Homo sapien
aaatacaaaacttagctgggcatgg

SEQ ID NO: 5673251 - DNA, 25 bp, Homo sapien
aaaacttagctgggcatggtggcgc

SEQ ID NO: 5673252 - DNA, 25 bp, Homo sapien
aaacttagctgggcatggtggcgca

SEQ ID NO: 5673253 - DNA, 25 bp, Homo sapien
aacttagctgggcatggtggcgcat

SEQ ID NO: 5673254 - DNA, 25 bp, Homo sapien
caaaacttagctgggcatggtggcg

SEQ ID NO: 5673255 - DNA, 25 bp, Homo sapien
aattcacatacatgcttctgtgttc

SEQ ID NO: 5673256 - DNA, 25 bp, Homo sapien
aaaactgaattcacatacatgcttc

SEQ ID NO: 5673257 - DNA, 25 bp, Homo sapien
ttctgttgcgatatattgtctaggc

SEQ ID NO: 5673258 - DNA, 25 bp, Homo sapien
tgttcagttctgttgcgatatattg

SEQ ID NO: 5673259 - DNA, 25 bp, Homo sapien
ctgaattcacatacatgcttctgtg

SEQ ID NO: 5673260 - DNA, 25 bp, Homo sapien
cagttctgttgcgatatattgtcta

SEQ ID NO: 5673261 - DNA, 25 bp, Homo sapien
gaacacagaagcatgtatgtgaatt

SEQ ID NO: 5673262 - DNA, 25 bp, Homo sapien
gcctagacaatatatcgcaacagaa

SEQ ID NO: 5673263 - DNA, 25 bp, Homo sapien
tagacaatatatcgcaacagaactg

SEQ ID NO: 5673264 - DNA, 25 bp, Homo sapien
caatatatcgcaacagaactgaaca

SEQ ID NO: 5673265 - DNA, 25 bp, Homo sapien
cagaagcatgtatgtgaattcagtt

SEQ ID NO: 5673266 - DNA, 25 bp, Homo sapien
cacagaagcatgtatgtgaattcag

SEQ ID NO: 5673267 - DNA, 25 bp, Homo sapien
ttatacttttcggttgatggtcaat

SEQ ID NO: 5673268 - DNA, 25 bp, Homo sapien
catttatacttttcggttgatggtc

SEQ ID NO: 5673269 - DNA, 25 bp, Homo sapien
tggtcaatttattggtggttgtcct

SEQ ID NO: 5673270 - DNA, 25 bp, Homo sapien
tcctgagagtggtcatttatacttt

SEQ ID NO: 5673271 - DNA, 25 bp, Homo sapien
tgtcttagtgtattcatgcttgctt

SEQ ID NO: 5673272 - DNA, 25 bp, Homo sapien
tacttttcggttgatggtcaattta

SEQ ID NO: 5673273 - DNA, 25 bp, Homo sapien
tgaccatcaaccgaaaagtataaat

SEQ ID NO: 5673274 - DNA, 25 bp, Homo sapien
tcaaccgaaaagtataaatgaccac

SEQ ID NO: 5673275 - DNA, 25 bp, Homo sapien
aggacaaccaccaataaattgacca

SEQ ID NO: 5673276 - DNA, 25 bp, Homo sapien
taaattgaccatcaaccgaaaagta

SEQ ID NO: 5673277 - DNA, 25 bp, Homo sapien
aagcaagcatgaatacactaagaca

SEQ ID NO: 5673278 - DNA, 25 bp, Homo sapien
aagtataaatgaccactctcaggaa

SEQ ID NO: 5673279 - DNA, 25 bp, Homo sapien
tgggctacatagtgatatcctgttg

SEQ ID NO: 5673280 - DNA, 25 bp, Homo sapien
gggctacatagtgatatcctgttgc

SEQ ID NO: 5673281 - DNA, 25 bp, Homo sapien
ggctacatagtgatatcctgttgct

SEQ ID NO: 5673282 - DNA, 25 bp, Homo sapien
ctacatagtgatatcctgttgctac

SEQ ID NO: 5673283 - DNA, 25 bp, Homo sapien
gctacatagtgatatcctgttgcta

SEQ ID NO: 5673284 - DNA, 25 bp, Homo sapien
gcaacaggatatcactatgtagccc

SEQ ID NO: 5673285 - DNA, 25 bp, Homo sapien
gtagcaacaggatatcactatgtag

SEQ ID NO: 5673286 - DNA, 25 bp, Homo sapien
agcaacaggatatcactatgtagcc

SEQ ID NO: 5673287 - DNA, 25 bp, Homo sapien
caacaggatatcactatgtagccca

SEQ ID NO: 5673288 - DNA, 25 bp, Homo sapien
tagcaacaggatatcactatgtagc

SEQ ID NO: 5673289 - DNA, 25 bp, Homo sapien
ggccccaactcggatattacacaga

SEQ ID NO: 5673290 - DNA, 25 bp, Homo sapien
gccccaactcggatattacacagaa

SEQ ID NO: 5673291 - DNA, 25 bp, Homo sapien
ccccaactcggatattacacagaat

SEQ ID NO: 5673292 - DNA, 25 bp, Homo sapien
ccaactcggatattacacagaatca

SEQ ID NO: 5673293 - DNA, 25 bp, Homo sapien
acagtttaacaggatctccaggtta

SEQ ID NO: 5673294 - DNA, 25 bp, Homo sapien
gatctccaggttattcttatatata

SEQ ID NO: 5673295 - DNA, 25 bp, Homo sapien
gattctgtgtaatatccgagttggg

SEQ ID NO: 5673296 - DNA, 25 bp, Homo sapien
taacctggagatcctgttaaactgt

SEQ ID NO: 5673297 - DNA, 25 bp, Homo sapien
tatatataagaataacctggagatc

SEQ ID NO: 5673298 - DNA, 25 bp, Homo sapien
tgattctgtgtaatatccgagttgg

SEQ ID NO: 5673299 - DNA, 25 bp, Homo sapien
cacatgcgagaatgttgatagagca

SEQ ID NO: 5673300 - DNA, 25 bp, Homo sapien
ttagaagacacatgcgagaatgttg

SEQ ID NO: 5673301 - DNA, 25 bp, Homo sapien
gaatgttgatagagcattatttgta

SEQ ID NO: 5673302 - DNA, 25 bp, Homo sapien
gaagacacatgcgagaatgttgata

SEQ ID NO: 5673303 - DNA, 25 bp, Homo sapien
gcgagaatgttgatagagcattatt

SEQ ID NO: 5673304 - DNA, 25 bp, Homo sapien
catgcgagaatgttgatagagcatt

SEQ ID NO: 5673305 - DNA, 25 bp, Homo sapien
tacaaataatgctctatcaacattc

SEQ ID NO: 5673306 - DNA, 25 bp, Homo sapien
caacattctcgcatgtgtcttctaa

SEQ ID NO: 5673307 - DNA, 25 bp, Homo sapien
aataatgctctatcaacattctcgc

SEQ ID NO: 5673308 - DNA, 25 bp, Homo sapien
tatcaacattctcgcatgtgtcttc

SEQ ID NO: 5673309 - DNA, 25 bp, Homo sapien
tgctctatcaacattctcgcatgtg

SEQ ID NO: 5673310 - DNA, 25 bp, Homo sapien
aatgctctatcaacattctcgcatg

SEQ ID NO: 5673311 - DNA, 25 bp, Homo sapien
gcaaattaaatcacttcttaactag

SEQ ID NO: 5673312 - DNA, 25 bp, Homo sapien
ttaaatcacttcttaactagaatgg

SEQ ID NO: 5673313 - DNA, 25 bp, Homo sapien
catgcccggtccctaatcattaatc

SEQ ID NO: 5673314 - DNA, 25 bp, Homo sapien
cggtccctaatcattaatcaactat

SEQ ID NO: 5673315 - DNA, 25 bp, Homo sapien
accatgcccggtccctaatcattaa

SEQ ID NO: 5673316 - DNA, 25 bp, Homo sapien
tgcccggtccctaatcattaatcaa

SEQ ID NO: 5673317 - DNA, 25 bp, Homo sapien
tgattaatgattagggaccgggcat

SEQ ID NO: 5673318 - DNA, 25 bp, Homo sapien
ttaatgattagggaccgggcatggt

SEQ ID NO: 5673319 - DNA, 25 bp, Homo sapien
gattaatgattagggaccgggcatg

SEQ ID NO: 5673320 - DNA, 25 bp, Homo sapien
gttgattaatgattagggaccgggc

SEQ ID NO: 5673321 - DNA, 25 bp, Homo sapien
atagttgattaatgattagggaccg

SEQ ID NO: 5673322 - DNA, 25 bp, Homo sapien
ccattctagttaagaagtgatttaa

SEQ ID NO: 5673323 - DNA, 25 bp, Homo sapien
acttttataaagcagcgagaaaaag

SEQ ID NO: 5673324 - DNA, 25 bp, Homo sapien
gcacttatcataagtgccttatcac

SEQ ID NO: 5673325 - DNA, 25 bp, Homo sapien
tgaataggcacttatcataagtgcc

SEQ ID NO: 5673326 - DNA, 25 bp, Homo sapien
ttgaataggcacttatcataagtgc

SEQ ID NO: 5673327 - DNA, 25 bp, Homo sapien
tatcataagtgccttatcacttagc

SEQ ID NO: 5673328 - DNA, 25 bp, Homo sapien
cacttatcataagtgccttatcact

SEQ ID NO: 5673329 - DNA, 25 bp, Homo sapien
ctttttctcgctgctttataaaagt

SEQ ID NO: 5673330 - DNA, 25 bp, Homo sapien
gtgataaggcacttatgataagtgc

SEQ ID NO: 5673331 - DNA, 25 bp, Homo sapien
gctaagtgataaggcacttatgata

SEQ ID NO: 5673332 - DNA, 25 bp, Homo sapien
taagtgataaggcacttatgataag

SEQ ID NO: 5673333 - DNA, 25 bp, Homo sapien
agtgataaggcacttatgataagtg

SEQ ID NO: 5673334 - DNA, 25 bp, Homo sapien
gcacttatgataagtgcctattcaa

SEQ ID NO: 5673335 - DNA, 25 bp, Homo sapien
gttggtgctgctttaggttgttttc

SEQ ID NO: 5673336 - DNA, 25 bp, Homo sapien
tatgtggaactatatgttggtgctg

SEQ ID NO: 5673337 - DNA, 25 bp, Homo sapien
atgtggaactatatgttggtgctgc

SEQ ID NO: 5673338 - DNA, 25 bp, Homo sapien
gtggaactatatgttggtgctgctt

SEQ ID NO: 5673339 - DNA, 25 bp, Homo sapien
catatgtggaactatatgttggtgc

SEQ ID NO: 5673340 - DNA, 25 bp, Homo sapien
ggaactatatgttggtgctgcttta

SEQ ID NO: 5673341 - DNA, 25 bp, Homo sapien
aagcagcaccaacatatagttccac

SEQ ID NO: 5673342 - DNA, 25 bp, Homo sapien
gcaccaacatatagttccacatatg

SEQ ID NO: 5673343 - DNA, 25 bp, Homo sapien
gcagcaccaacatatagttccacat

SEQ ID NO: 5673344 - DNA, 25 bp, Homo sapien
gaaaacaacctaaagcagcaccaac

SEQ ID NO: 5673345 - DNA, 25 bp, Homo sapien
taaagcagcaccaacatatagttcc

SEQ ID NO: 5673346 - DNA, 25 bp, Homo sapien
caacatatagttccacatatgaaaa

SEQ ID NO: 5673347 - DNA, 25 bp, Homo sapien
gagaacgtcagtatcgctgatggtt

SEQ ID NO: 5673348 - DNA, 25 bp, Homo sapien
tctacacgtactagcactttggtgc

SEQ ID NO: 5673349 - DNA, 25 bp, Homo sapien
cagtatcgctgatggttctgtcccc

SEQ ID NO: 5673350 - DNA, 25 bp, Homo sapien
tgaaggaagagaacgtcagtatcgc

SEQ ID NO: 5673351 - DNA, 25 bp, Homo sapien
agcactttggtgcaattaaatatta

SEQ ID NO: 5673352 - DNA, 25 bp, Homo sapien
cacatccacatatctacacgtacta

SEQ ID NO: 5673353 - DNA, 25 bp, Homo sapien
gcaccaaagtgctagtacgtgtaga

SEQ ID NO: 5673354 - DNA, 25 bp, Homo sapien
taatatttaattgcaccaaagtgct

SEQ ID NO: 5673355 - DNA, 25 bp, Homo sapien
gaaccatcagcgatactgacgttct

SEQ ID NO: 5673356 - DNA, 25 bp, Homo sapien
gggacagaaccatcagcgatactga

SEQ ID NO: 5673357 - DNA, 25 bp, Homo sapien
tagtacgtgtagatatgtggatgtg

SEQ ID NO: 5673358 - DNA, 25 bp, Homo sapien
gcgatactgacgttctcttccttca

SEQ ID NO: 5673359 - DNA, 25 bp, Homo sapien
tccaagtctaaattgctctgtaatc

SEQ ID NO: 5673360 - DNA, 25 bp, Homo sapien
tttggctctattcccttccaagtct

SEQ ID NO: 5673361 - DNA, 25 bp, Homo sapien
taaattttggctctattcccttcca

SEQ ID NO: 5673362 - DNA, 25 bp, Homo sapien
gtttgtcactaggaaggtatatcaa

SEQ ID NO: 5673363 - DNA, 25 bp, Homo sapien
tgtcactaggaaggtatatcaaaat

SEQ ID NO: 5673364 - DNA, 25 bp, Homo sapien
tagtttgtcactaggaaggtatatc

SEQ ID NO: 5673365 - DNA, 25 bp, Homo sapien
gatataccttcctagtgacaaacta

SEQ ID NO: 5673366 - DNA, 25 bp, Homo sapien
attttgatataccttcctagtgaca

SEQ ID NO: 5673367 - DNA, 25 bp, Homo sapien
gattacagagcaatttagacttgga

SEQ ID NO: 5673368 - DNA, 25 bp, Homo sapien
ttgatataccttcctagtgacaaac

SEQ ID NO: 5673369 - DNA, 25 bp, Homo sapien
agacttggaagggaatagagccaaa

SEQ ID NO: 5673370 - DNA, 25 bp, Homo sapien
tggaagggaatagagccaaaattta

SEQ ID NO: 5673371 - DNA, 25 bp, Homo sapien
gagacagggtctcggtctcttaccc

SEQ ID NO: 5673372 - DNA, 25 bp, Homo sapien
cagggtctcggtctcttacccaggc

SEQ ID NO: 5673373 - DNA, 25 bp, Homo sapien
ggtctcggtctcttacccaggctgg

SEQ ID NO: 5673374 - DNA, 25 bp, Homo sapien
tgagacagggtctcggtctcttacc

SEQ ID NO: 5673375 - DNA, 25 bp, Homo sapien
acagggtctcggtctcttacccagg

SEQ ID NO: 5673376 - DNA, 25 bp, Homo sapien
agggtctcggtctcttacccaggct

SEQ ID NO: 5673377 - DNA, 25 bp, Homo sapien
gggtaagagaccgagaccctgtctc

SEQ ID NO: 5673378 - DNA, 25 bp, Homo sapien
ggtaagagaccgagaccctgtctca

SEQ ID NO: 5673379 - DNA, 25 bp, Homo sapien
gcctgggtaagagaccgagaccctg

SEQ ID NO: 5673380 - DNA, 25 bp, Homo sapien
cctgggtaagagaccgagaccctgt

SEQ ID NO: 5673381 - DNA, 25 bp, Homo sapien
ccagcctgggtaagagaccgagacc

SEQ ID NO: 5673382 - DNA, 25 bp, Homo sapien
agcctgggtaagagaccgagaccct

SEQ ID NO: 5673383 - DNA, 25 bp, Homo sapien
caagtggttggaattacaggtgctc

SEQ ID NO: 5673384 - DNA, 25 bp, Homo sapien
aggctcccaagtggttggaattaca

SEQ ID NO: 5673385 - DNA, 25 bp, Homo sapien
ggctcccaagtggttggaattacag

SEQ ID NO: 5673386 - DNA, 25 bp, Homo sapien
tcaggctcccaagtggttggaatta

SEQ ID NO: 5673387 - DNA, 25 bp, Homo sapien
ctcaggctcccaagtggttggaatt

SEQ ID NO: 5673388 - DNA, 25 bp, Homo sapien
caggctcccaagtggttggaattac

SEQ ID NO: 5673389 - DNA, 25 bp, Homo sapien
tgtaattccaaccacttgggagcct

SEQ ID NO: 5673390 - DNA, 25 bp, Homo sapien
ctgtaattccaaccacttgggagcc

SEQ ID NO: 5673391 - DNA, 25 bp, Homo sapien
aattccaaccacttgggagcctgag

SEQ ID NO: 5673392 - DNA, 25 bp, Homo sapien
gagcacctgtaattccaaccacttg

SEQ ID NO: 5673393 - DNA, 25 bp, Homo sapien
taattccaaccacttgggagcctga

SEQ ID NO: 5673394 - DNA, 25 bp, Homo sapien
gtaattccaaccacttgggagcctg

SEQ ID NO: 5673395 - DNA, 25 bp, Homo sapien
ttatgttgctgtaagatacttgcca

SEQ ID NO: 5673396 - DNA, 25 bp, Homo sapien
gatacttgccattgaaatgaactga

SEQ ID NO: 5673397 - DNA, 25 bp, Homo sapien
taagatacttgccattgaaatgaac

SEQ ID NO: 5673398 - DNA, 25 bp, Homo sapien
gccattgaaatgaactgatttaaaa

SEQ ID NO: 5673399 - DNA, 25 bp, Homo sapien
gctgtaagatacttgccattgaaat

SEQ ID NO: 5673400 - DNA, 25 bp, Homo sapien
gttgctgtaagatacttgccattga

SEQ ID NO: 5673401 - DNA, 25 bp, Homo sapien
tcaatggcaagtatcttacagcaac

SEQ ID NO: 5673402 - DNA, 25 bp, Homo sapien
ggcaagtatcttacagcaacataat

SEQ ID NO: 5673403 - DNA, 25 bp, Homo sapien
tcatttcaatggcaagtatcttaca

SEQ ID NO: 5673404 - DNA, 25 bp, Homo sapien
ttttaaatcagttcatttcaatggc

SEQ ID NO: 5673405 - DNA, 25 bp, Homo sapien
tcagttcatttcaatggcaagtatc

SEQ ID NO: 5673406 - DNA, 25 bp, Homo sapien
taaatcagttcatttcaatggcaag

SEQ ID NO: 5673407 - DNA, 25 bp, Homo sapien
acagtgatgtgatctcggctcaccg

SEQ ID NO: 5673408 - DNA, 25 bp, Homo sapien
cagtgatgtgatctcggctcaccgc

SEQ ID NO: 5673409 - DNA, 25 bp, Homo sapien
ggagtacagtgatgtgatctcggct

SEQ ID NO: 5673410 - DNA, 25 bp, Homo sapien
tacagtgatgtgatctcggctcacc

SEQ ID NO: 5673411 - DNA, 25 bp, Homo sapien
gagtacagtgatgtgatctcggctc

SEQ ID NO: 5673412 - DNA, 25 bp, Homo sapien
agtacagtgatgtgatctcggctca

SEQ ID NO: 5673413 - DNA, 25 bp, Homo sapien
tgagccgagatcacatcactgtact

SEQ ID NO: 5673414 - DNA, 25 bp, Homo sapien
gagccgagatcacatcactgtactc

SEQ ID NO: 5673415 - DNA, 25 bp, Homo sapien
ggtgagccgagatcacatcactgta

SEQ ID NO: 5673416 - DNA, 25 bp, Homo sapien
gcggtgagccgagatcacatcactg

SEQ ID NO: 5673417 - DNA, 25 bp, Homo sapien
agccgagatcacatcactgtactcc

SEQ ID NO: 5673418 - DNA, 25 bp, Homo sapien
cggtgagccgagatcacatcactgt

SEQ ID NO: 5673419 - DNA, 25 bp, Homo sapien
tgtataccagatgattctcagcatc

SEQ ID NO: 5673420 - DNA, 25 bp, Homo sapien
tactttagtgatgtataccagatga

SEQ ID NO: 5673421 - DNA, 25 bp, Homo sapien
tagtgatgtataccagatgattctc

SEQ ID NO: 5673422 - DNA, 25 bp, Homo sapien
gatgtataccagatgattctcagca

SEQ ID NO: 5673423 - DNA, 25 bp, Homo sapien
tatatactttagtgatgtataccag

SEQ ID NO: 5673424 - DNA, 25 bp, Homo sapien
tgatgtataccagatgattctcagc

SEQ ID NO: 5673425 - DNA, 25 bp, Homo sapien
gaatcatctggtatacatcactaaa

SEQ ID NO: 5673426 - DNA, 25 bp, Homo sapien
gagaatcatctggtatacatcacta

SEQ ID NO: 5673427 - DNA, 25 bp, Homo sapien
ctgagaatcatctggtatacatcac

SEQ ID NO: 5673428 - DNA, 25 bp, Homo sapien
tcatctggtatacatcactaaagta

SEQ ID NO: 5673429 - DNA, 25 bp, Homo sapien
gatgctgagaatcatctggtataca

SEQ ID NO: 5673430 - DNA, 25 bp, Homo sapien
tgctgagaatcatctggtatacatc

SEQ ID NO: 5673431 - DNA, 25 bp, Homo sapien
tatcttactttactgttaggctggc

SEQ ID NO: 5673432 - DNA, 25 bp, Homo sapien
ccctttactctcaggctgctatgct

SEQ ID NO: 5673433 - DNA, 25 bp, Homo sapien
tactttactgttaggctggcaacat

SEQ ID NO: 5673434 - DNA, 25 bp, Homo sapien
tttactctcaggctgctatgctttt

SEQ ID NO: 5673435 - DNA, 25 bp, Homo sapien
tcttactttactgttaggctggcaa

SEQ ID NO: 5673436 - DNA, 25 bp, Homo sapien
ttactgttaggctggcaacatttac

SEQ ID NO: 5673437 - DNA, 25 bp, Homo sapien
agcatagcagcctgagagtaaaggg

SEQ ID NO: 5673438 - DNA, 25 bp, Homo sapien
taacagtaaagtaagatagagggaa

SEQ ID NO: 5673439 - DNA, 25 bp, Homo sapien
ttgccagcctaacagtaaagtaaga

SEQ ID NO: 5673440 - DNA, 25 bp, Homo sapien
gccagcctaacagtaaagtaagata

SEQ ID NO: 5673441 - DNA, 25 bp, Homo sapien
gtaaatgttgccagcctaacagtaa

SEQ ID NO: 5673442 - DNA, 25 bp, Homo sapien
aaaagcatagcagcctgagagtaaa

SEQ ID NO: 5673443 - DNA, 25 bp, Homo sapien
agatacaaaacgatttggtataaag

SEQ ID NO: 5673444 - DNA, 25 bp, Homo sapien
ataaaggagtaaaatcttcattctg

SEQ ID NO: 5673445 - DNA, 25 bp, Homo sapien
ttggtataaaggagtaaaatcttca

SEQ ID NO: 5673446 - DNA, 25 bp, Homo sapien
tctgtgtgtaaaagaaatggaatat

SEQ ID NO: 5673447 - DNA, 25 bp, Homo sapien
gtataaaggagtaaaatcttcattc

SEQ ID NO: 5673448 - DNA, 25 bp, Homo sapien
cattctgtgtgtaaaagaaatggaa

SEQ ID NO: 5673449 - DNA, 25 bp, Homo sapien
atattccatttcttttacacacaga

SEQ ID NO: 5673450 - DNA, 25 bp, Homo sapien
ttccatttcttttacacacagaatg

SEQ ID NO: 5673451 - DNA, 25 bp, Homo sapien
gaatgaagattttactcctttatac

SEQ ID NO: 5673452 - DNA, 25 bp, Homo sapien
cagaatgaagattttactcctttat

SEQ ID NO: 5673453 - DNA, 25 bp, Homo sapien
ctttataccaaatcgttttgtatct

SEQ ID NO: 5673454 - DNA, 25 bp, Homo sapien
tgaagattttactcctttataccaa

SEQ ID NO: 5673455 - DNA, 25 bp, Homo sapien
caaagttagcactcagaattaactt

SEQ ID NO: 5673456 - DNA, 25 bp, Homo sapien
aaccaaagttagcactcagaattaa

SEQ ID NO: 5673457 - DNA, 25 bp, Homo sapien
ccaaagttagcactcagaattaact

SEQ ID NO: 5673458 - DNA, 25 bp, Homo sapien
aaaccaaagttagcactcagaatta

SEQ ID NO: 5673459 - DNA, 25 bp, Homo sapien
accaaagttagcactcagaattaac

SEQ ID NO: 5673460 - DNA, 25 bp, Homo sapien
ctcagaattaacttttgaatgtctg

SEQ ID NO: 5673461 - DNA, 25 bp, Homo sapien
cagacattcaaaagttaattctgag

SEQ ID NO: 5673462 - DNA, 25 bp, Homo sapien
gttaattctgagtgctaactttggt

SEQ ID NO: 5673463 - DNA, 25 bp, Homo sapien
agttaattctgagtgctaactttgg

SEQ ID NO: 5673464 - DNA, 25 bp, Homo sapien
ttaattctgagtgctaactttggtt

SEQ ID NO: 5673465 - DNA, 25 bp, Homo sapien
taattctgagtgctaactttggttt

SEQ ID NO: 5673466 - DNA, 25 bp, Homo sapien
aagttaattctgagtgctaactttg

SEQ ID NO: 5673467 - DNA, 25 bp, Homo sapien
gaatggtagatgcatacttaactag

SEQ ID NO: 5673468 - DNA, 25 bp, Homo sapien
gtagatgcatacttaactagaaatc

SEQ ID NO: 5673469 - DNA, 25 bp, Homo sapien
taaattttcattcggattgtgaact

SEQ ID NO: 5673470 - DNA, 25 bp, Homo sapien
taacaagttaagataatgagctttg

SEQ ID NO: 5673471 - DNA, 25 bp, Homo sapien
tcattcggattgtgaactctttgat

SEQ ID NO: 5673472 - DNA, 25 bp, Homo sapien
gatgaatggtagatgcatacttaac

SEQ ID NO: 5673473 - DNA, 25 bp, Homo sapien
taagtatgcatctaccattcatcaa

SEQ ID NO: 5673474 - DNA, 25 bp, Homo sapien
aaacaaagctcattatcttaacttg

SEQ ID NO: 5673475 - DNA, 25 bp, Homo sapien
gatttctagttaagtatgcatctac

SEQ ID NO: 5673476 - DNA, 25 bp, Homo sapien
atcaaagagttcacaatccgaatga

SEQ ID NO: 5673477 - DNA, 25 bp, Homo sapien
caaagctcattatcttaacttgtta

SEQ ID NO: 5673478 - DNA, 25 bp, Homo sapien
caaagagttcacaatccgaatgaaa

SEQ ID NO: 5673479 - DNA, 25 bp, Homo sapien
tgcctaattgggattccaagctgag

SEQ ID NO: 5673480 - DNA, 25 bp, Homo sapien
taagtgcctaattgggattccaagc

SEQ ID NO: 5673481 - DNA, 25 bp, Homo sapien
tgggattccaagctgagcttagtag

SEQ ID NO: 5673482 - DNA, 25 bp, Homo sapien
ctgagcttagtagtttgtggtggat

SEQ ID NO: 5673483 - DNA, 25 bp, Homo sapien
aattgggattccaagctgagcttag

SEQ ID NO: 5673484 - DNA, 25 bp, Homo sapien
ccaagctgagcttagtagtttgtgg

SEQ ID NO: 5673485 - DNA, 25 bp, Homo sapien
ccacaaactactaagctcagcttgg

SEQ ID NO: 5673486 - DNA, 25 bp, Homo sapien
gcttggaatcccaattaggcactta

SEQ ID NO: 5673487 - DNA, 25 bp, Homo sapien
tactaagctcagcttggaatcccaa

SEQ ID NO: 5673488 - DNA, 25 bp, Homo sapien
taagctcagcttggaatcccaatta

SEQ ID NO: 5673489 - DNA, 25 bp, Homo sapien
tcagcttggaatcccaattaggcac

SEQ ID NO: 5673490 - DNA, 25 bp, Homo sapien
atccaccacaaactactaagctcag

SEQ ID NO: 5673491 - DNA, 25 bp, Homo sapien
gcaggcaggttctgtagtttgtact

SEQ ID NO: 5673492 - DNA, 25 bp, Homo sapien
cgcaggcaggttctgtagtttgtac

SEQ ID NO: 5673493 - DNA, 25 bp, Homo sapien
gtacaaactacagaacctgcctgcg

SEQ ID NO: 5673494 - DNA, 25 bp, Homo sapien
agtacaaactacagaacctgcctgc

SEQ ID NO: 5673495 - DNA, 25 bp, Homo sapien
aatatcatggtatattgattttcct

SEQ ID NO: 5673496 - DNA, 25 bp, Homo sapien
tgaatgcaaggtgtacctaatatca

SEQ ID NO: 5673497 - DNA, 25 bp, Homo sapien
attgattttcctggttatctgtttc

SEQ ID NO: 5673498 - DNA, 25 bp, Homo sapien
gaatgcaaggtgtacctaatatcat

SEQ ID NO: 5673499 - DNA, 25 bp, Homo sapien
aatgcaaggtgtacctaatatcatg

SEQ ID NO: 5673500 - DNA, 25 bp, Homo sapien
atgcaaggtgtacctaatatcatgg

SEQ ID NO: 5673501 - DNA, 25 bp, Homo sapien
gaaacagataaccaggaaaatcaat

SEQ ID NO: 5673502 - DNA, 25 bp, Homo sapien
atgatattaggtacaccttgcattc

SEQ ID NO: 5673503 - DNA, 25 bp, Homo sapien
ccatgatattaggtacaccttgcat

SEQ ID NO: 5673504 - DNA, 25 bp, Homo sapien
catgatattaggtacaccttgcatt

SEQ ID NO: 5673505 - DNA, 25 bp, Homo sapien
aggaaaatcaatataccatgatatt

SEQ ID NO: 5673506 - DNA, 25 bp, Homo sapien
tgatattaggtacaccttgcattca

SEQ ID NO: 5673507 - DNA, 25 bp, Homo sapien
aattgggttggtgatggattgctaa

SEQ ID NO: 5673508 - DNA, 25 bp, Homo sapien
tcccctaagaattgggttggtgatg

SEQ ID NO: 5673509 - DNA, 25 bp, Homo sapien
tctgtactccgaagctttcttcagg

SEQ ID NO: 5673510 - DNA, 25 bp, Homo sapien
cagggagttggaagataataacatg

SEQ ID NO: 5673511 - DNA, 25 bp, Homo sapien
taaaagccaagttctctgtactccg

SEQ ID NO: 5673512 - DNA, 25 bp, Homo sapien
cgaagctttcttcagggagttggaa

SEQ ID NO: 5673513 - DNA, 25 bp, Homo sapien
catgttattatcttccaactccctg

SEQ ID NO: 5673514 - DNA, 25 bp, Homo sapien
ttttagcaatccatcaccaacccaa

SEQ ID NO: 5673515 - DNA, 25 bp, Homo sapien
tacagagaacttggcttttagcaat

SEQ ID NO: 5673516 - DNA, 25 bp, Homo sapien
atccatcaccaacccaattcttagg

SEQ ID NO: 5673517 - DNA, 25 bp, Homo sapien
agcttcggagtacagagaacttggc

SEQ ID NO: 5673518 - DNA, 25 bp, Homo sapien
caactccctgaagaaagcttcggag

SEQ ID NO: 5673519 - DNA, 25 bp, Homo sapien
cgtcaaatgctttcgcacctgacct

SEQ ID NO: 5673520 - DNA, 25 bp, Homo sapien
aacttgtccgtcaaatgctttcgca

SEQ ID NO: 5673521 - DNA, 25 bp, Homo sapien
caaatgctttcgcacctgaccttcg

SEQ ID NO: 5673522 - DNA, 25 bp, Homo sapien
aaatgctttcgcacctgaccttcgc

SEQ ID NO: 5673523 - DNA, 25 bp, Homo sapien
tgtccgtcaaatgctttcgcacctg

SEQ ID NO: 5673524 - DNA, 25 bp, Homo sapien
caaaacttgtccgtcaaatgctttc

SEQ ID NO: 5673525 - DNA, 25 bp, Homo sapien
tgcgaaagcatttgacggacaagtt

SEQ ID NO: 5673526 - DNA, 25 bp, Homo sapien
tcaggtgcgaaagcatttgacggac

SEQ ID NO: 5673527 - DNA, 25 bp, Homo sapien
aaggtcaggtgcgaaagcatttgac

SEQ ID NO: 5673528 - DNA, 25 bp, Homo sapien
ggtgcgaaagcatttgacggacaag

SEQ ID NO: 5673529 - DNA, 25 bp, Homo sapien
gcgaaggtcaggtgcgaaagcattt

SEQ ID NO: 5673530 - DNA, 25 bp, Homo sapien
gaaagcatttgacggacaagttttg

SEQ ID NO: 5673531 - DNA, 25 bp, Homo sapien
tcactgcttcggaactgctagggct

SEQ ID NO: 5673532 - DNA, 25 bp, Homo sapien
tcggaactgctagggcttgattaac

SEQ ID NO: 5673533 - DNA, 25 bp, Homo sapien
taatcactgcttcggaactgctagg

SEQ ID NO: 5673534 - DNA, 25 bp, Homo sapien
tgcttcggaactgctagggcttgat

SEQ ID NO: 5673535 - DNA, 25 bp, Homo sapien
gcttcggaactgctagggcttgatt

SEQ ID NO: 5673536 - DNA, 25 bp, Homo sapien
actgcttcggaactgctagggcttg

SEQ ID NO: 5673537 - DNA, 25 bp, Homo sapien
taatcaagccctagcagttccgaag

SEQ ID NO: 5673538 - DNA, 25 bp, Homo sapien
atcaagccctagcagttccgaagca

SEQ ID NO: 5673539 - DNA, 25 bp, Homo sapien
cctagcagttccgaagcagtgatta

SEQ ID NO: 5673540 - DNA, 25 bp, Homo sapien
gttaatcaagccctagcagttccga

SEQ ID NO: 5673541 - DNA, 25 bp, Homo sapien
gccctagcagttccgaagcagtgat

SEQ ID NO: 5673542 - DNA, 25 bp, Homo sapien
aagccctagcagttccgaagcagtg

SEQ ID NO: 5673543 - DNA, 25 bp, Homo sapien
gggaaatggagatgcgggccgtgag

SEQ ID NO: 5673544 - DNA, 25 bp, Homo sapien
ggagatgcgggccgtgaggctcggg

SEQ ID NO: 5673545 - DNA, 25 bp, Homo sapien
ggaaatggagatgcgggccgtgagg

SEQ ID NO: 5673546 - DNA, 25 bp, Homo sapien
tggagatgcgggccgtgaggctcgg

SEQ ID NO: 5673547 - DNA, 25 bp, Homo sapien
aatggagatgcgggccgtgaggctc

SEQ ID NO: 5673548 - DNA, 25 bp, Homo sapien
aaatggagatgcgggccgtgaggct

SEQ ID NO: 5673549 - DNA, 25 bp, Homo sapien
ccccgagcctcacggcccgcatctc

SEQ ID NO: 5673550 - DNA, 25 bp, Homo sapien
cgcatctccatttccccgcctgccc

SEQ ID NO: 5673551 - DNA, 25 bp, Homo sapien
agcctcacggcccgcatctccattt

SEQ ID NO: 5673552 - DNA, 25 bp, Homo sapien
acggcccgcatctccatttccccgc

SEQ ID NO: 5673553 - DNA, 25 bp, Homo sapien
ctcacggcccgcatctccatttccc

SEQ ID NO: 5673554 - DNA, 25 bp, Homo sapien
ggcccgcatctccatttccccgcct

SEQ ID NO: 5673555 - DNA, 25 bp, Homo sapien
gacgggagtcgtggctaggggcgcg

SEQ ID NO: 5673556 - DNA, 25 bp, Homo sapien
gggtctcgttctgccgtcagccgta

SEQ ID NO: 5673557 - DNA, 25 bp, Homo sapien
agctcctcgggggtctcgttctgcc

SEQ ID NO: 5673558 - DNA, 25 bp, Homo sapien
tgccgtcagccgtagttttcgggac

SEQ ID NO: 5673559 - DNA, 25 bp, Homo sapien
gttctgccgtcagccgtagttttcg

SEQ ID NO: 5673560 - DNA, 25 bp, Homo sapien
tctcgttctgccgtcagccgtagtt

SEQ ID NO: 5673561 - DNA, 25 bp, Homo sapien
gtcccgaaaactacggctgacggca

SEQ ID NO: 5673562 - DNA, 25 bp, Homo sapien
gaaaactacggctgacggcagaacg

SEQ ID NO: 5673563 - DNA, 25 bp, Homo sapien
tcccgaaaactacggctgacggcag

SEQ ID NO: 5673564 - DNA, 25 bp, Homo sapien
aactacggctgacggcagaacgaga

SEQ ID NO: 5673565 - DNA, 25 bp, Homo sapien
ggcagaacgagacccccgaggagct

SEQ ID NO: 5673566 - DNA, 25 bp, Homo sapien
cgaaaactacggctgacggcagaac

SEQ ID NO: 5673567 - DNA, 25 bp, Homo sapien
tagtgaggcctcatctcaaaaaaat

SEQ ID NO: 5673568 - DNA, 25 bp, Homo sapien
ggagttaaagtgtagcctgggcaac

SEQ ID NO: 5673569 - DNA, 25 bp, Homo sapien
catagtgaggcctcatctcaaaaaa

SEQ ID NO: 5673570 - DNA, 25 bp, Homo sapien
acatagtgaggcctcatctcaaaaa

SEQ ID NO: 5673571 - DNA, 25 bp, Homo sapien
gcccaggagttaaagtgtagcctgg

SEQ ID NO: 5673572 - DNA, 25 bp, Homo sapien
aggagttaaagtgtagcctgggcaa

SEQ ID NO: 5673573 - DNA, 25 bp, Homo sapien
atttttttgagatgaggcctcacta

SEQ ID NO: 5673574 - DNA, 25 bp, Homo sapien
ttgcccaggctacactttaactcct

SEQ ID NO: 5673575 - DNA, 25 bp, Homo sapien
ttttttgagatgaggcctcactatg

SEQ ID NO: 5673576 - DNA, 25 bp, Homo sapien
gttgcccaggctacactttaactcc

SEQ ID NO: 5673577 - DNA, 25 bp, Homo sapien
ccaggctacactttaactcctgggc

SEQ ID NO: 5673578 - DNA, 25 bp, Homo sapien
tttttgagatgaggcctcactatgt

SEQ ID NO: 5673579 - DNA, 25 bp, Homo sapien
gatgggtgtggtggtacaggcctgt

SEQ ID NO: 5673580 - DNA, 25 bp, Homo sapien
gggtgtggtggtacaggcctgtagt

SEQ ID NO: 5673581 - DNA, 25 bp, Homo sapien
tgggtgtggtggtacaggcctgtag

SEQ ID NO: 5673582 - DNA, 25 bp, Homo sapien
ctcaaaaaaaaattagatgggtgtg

SEQ ID NO: 5673583 - DNA, 25 bp, Homo sapien
atgggtgtggtggtacaggcctgta

SEQ ID NO: 5673584 - DNA, 25 bp, Homo sapien
ggtgtggtggtacaggcctgtagtc

SEQ ID NO: 5673585 - DNA, 25 bp, Homo sapien
acaggcctgtaccaccacacccatc

SEQ ID NO: 5673586 - DNA, 25 bp, Homo sapien
ctacaggcctgtaccaccacaccca

SEQ ID NO: 5673587 - DNA, 25 bp, Homo sapien
cacacccatctaatttttttttgag

SEQ ID NO: 5673588 - DNA, 25 bp, Homo sapien
actacaggcctgtaccaccacaccc

SEQ ID NO: 5673589 - DNA, 25 bp, Homo sapien
tacaggcctgtaccaccacacccat

SEQ ID NO: 5673590 - DNA, 25 bp, Homo sapien
gactacaggcctgtaccaccacacc

SEQ ID NO: 5673591 - DNA, 25 bp, Homo sapien
ttaggattagaggttgactttctcc

SEQ ID NO: 5673592 - DNA, 25 bp, Homo sapien
ttagaggttgactttctccactcag

SEQ ID NO: 5673593 - DNA, 25 bp, Homo sapien
tgtttaggattagaggttgactttc

SEQ ID NO: 5673594 - DNA, 25 bp, Homo sapien
gattagaggttgactttctccactc

SEQ ID NO: 5673595 - DNA, 25 bp, Homo sapien
aggattagaggttgactttctccac

SEQ ID NO: 5673596 - DNA, 25 bp, Homo sapien
tagaggttgactttctccactcagc

SEQ ID NO: 5673597 - DNA, 25 bp, Homo sapien
ggagaaagtcaacctctaatcctaa

SEQ ID NO: 5673598 - DNA, 25 bp, Homo sapien
tgagtggagaaagtcaacctctaat

SEQ ID NO: 5673599 - DNA, 25 bp, Homo sapien
gagtggagaaagtcaacctctaatc

SEQ ID NO: 5673600 - DNA, 25 bp, Homo sapien
gctgagtggagaaagtcaacctcta

SEQ ID NO: 5673601 - DNA, 25 bp, Homo sapien
gaaagtcaacctctaatcctaaaca

SEQ ID NO: 5673602 - DNA, 25 bp, Homo sapien
gtggagaaagtcaacctctaatcct

SEQ ID NO: 5673603 - DNA, 25 bp, Homo sapien
aggagtgagttgctcagatccgtat

SEQ ID NO: 5673604 - DNA, 25 bp, Homo sapien
gaactgtagattgtcttgaggatag

SEQ ID NO: 5673605 - DNA, 25 bp, Homo sapien
tgtcttgaggatagtagggagccat

SEQ ID NO: 5673606 - DNA, 25 bp, Homo sapien
tctctgttaagaactgtagattgtc

SEQ ID NO: 5673607 - DNA, 25 bp, Homo sapien
gtagtctctgttaagaactgtagat

SEQ ID NO: 5673608 - DNA, 25 bp, Homo sapien
ttgaggagtgagttgctcagatccg

SEQ ID NO: 5673609 - DNA, 25 bp, Homo sapien
atctacagttcttaacagagactac

SEQ ID NO: 5673610 - DNA, 25 bp, Homo sapien
gacaatctacagttcttaacagaga

SEQ ID NO: 5673611 - DNA, 25 bp, Homo sapien
atacggatctgagcaactcactcct

SEQ ID NO: 5673612 - DNA, 25 bp, Homo sapien
tatcctcaagacaatctacagttct

SEQ ID NO: 5673613 - DNA, 25 bp, Homo sapien
ggatctgagcaactcactcctcaac

SEQ ID NO: 5673614 - DNA, 25 bp, Homo sapien
atggctccctactatcctcaagaca

SEQ ID NO: 5673615 - DNA, 25 bp, Homo sapien
ttggcttgagcagccagataggtag

SEQ ID NO: 5673616 - DNA, 25 bp, Homo sapien
aattgaggagtagggaagagaagca

SEQ ID NO: 5673617 - DNA, 25 bp, Homo sapien
ccagataggtagtgggtgtcatttc

SEQ ID NO: 5673618 - DNA, 25 bp, Homo sapien
atggaggatgactccttgaattttg

SEQ ID NO: 5673619 - DNA, 25 bp, Homo sapien
cagccagataggtagtgggtgtcat

SEQ ID NO: 5673620 - DNA, 25 bp, Homo sapien
cttgaattttggcttgagcagccag

SEQ ID NO: 5673621 - DNA, 25 bp, Homo sapien
tgcttctcttccctactcctcaatt

SEQ ID NO: 5673622 - DNA, 25 bp, Homo sapien
ctggctgctcaagccaaaattcaag

SEQ ID NO: 5673623 - DNA, 25 bp, Homo sapien
tatctggctgctcaagccaaaattc

SEQ ID NO: 5673624 - DNA, 25 bp, Homo sapien
gaaatgacacccactacctatctgg

SEQ ID NO: 5673625 - DNA, 25 bp, Homo sapien
tacctatctggctgctcaagccaaa

SEQ ID NO: 5673626 - DNA, 25 bp, Homo sapien
caaaattcaaggagtcatcctccat

SEQ ID NO: 5673627 - DNA, 25 bp, Homo sapien
gacagagtaaccaaaaaggcaggaa

SEQ ID NO: 5673628 - DNA, 25 bp, Homo sapien
ttcctgcctttttggttactctgtc

SEQ ID NO: 5673629 - DNA, 25 bp, Homo sapien
cctttgtgtcatgggaactttggga

SEQ ID NO: 5673630 - DNA, 25 bp, Homo sapien
gcaggaaaacctttgtgtcatggga

SEQ ID NO: 5673631 - DNA, 25 bp, Homo sapien
gagtattgttagaaggagggagcga

SEQ ID NO: 5673632 - DNA, 25 bp, Homo sapien
tcatgggaactttgggaagagagta

SEQ ID NO: 5673633 - DNA, 25 bp, Homo sapien
gacagagtaaccaaaaaggcaggaa

SEQ ID NO: 5673634 - DNA, 25 bp, Homo sapien
gatgttaccaaaaaaaggagacaga

SEQ ID NO: 5673635 - DNA, 25 bp, Homo sapien
ttctaacaatactctcttcccaaag

SEQ ID NO: 5673636 - DNA, 25 bp, Homo sapien
catgacacaaaggttttcctgcctt

SEQ ID NO: 5673637 - DNA, 25 bp, Homo sapien
tcccaaagttcccatgacacaaagg

SEQ ID NO: 5673638 - DNA, 25 bp, Homo sapien
tactctcttcccaaagttcccatga

SEQ ID NO: 5673639 - DNA, 25 bp, Homo sapien
ttcctgcctttttggttactctgtc

SEQ ID NO: 5673640 - DNA, 25 bp, Homo sapien
ccaaagttcccatgacacaaaggtt

SEQ ID NO: 5673641 - DNA, 25 bp, Homo sapien
caaagtcttgctccattgcccaggc

SEQ ID NO: 5673642 - DNA, 25 bp, Homo sapien
acaaagtcttgctccattgcccagg

SEQ ID NO: 5673643 - DNA, 25 bp, Homo sapien
gacaaagtcttgctccattgcccag

SEQ ID NO: 5673644 - DNA, 25 bp, Homo sapien
gcctgggcaatggagcaagactttg

SEQ ID NO: 5673645 - DNA, 25 bp, Homo sapien
ctgggcaatggagcaagactttgtc

SEQ ID NO: 5673646 - DNA, 25 bp, Homo sapien
cctgggcaatggagcaagactttgt

SEQ ID NO: 5673647 - DNA, 25 bp, Homo sapien
gggcagagtggtgactacagcagtt

SEQ ID NO: 5673648 - DNA, 25 bp, Homo sapien
agggcagagtggtgactacagcagt

SEQ ID NO: 5673649 - DNA, 25 bp, Homo sapien
gtttggatgtcttgggtcaggaaag

SEQ ID NO: 5673650 - DNA, 25 bp, Homo sapien
ggcagagtggtgactacagcagttt

SEQ ID NO: 5673651 - DNA, 25 bp, Homo sapien
agtttggatgtcttgggtcaggaaa

SEQ ID NO: 5673652 - DNA, 25 bp, Homo sapien
aactgctgtagtcaccactctgccc

SEQ ID NO: 5673653 - DNA, 25 bp, Homo sapien
aaactgctgtagtcaccactctgcc

SEQ ID NO: 5673654 - DNA, 25 bp, Homo sapien
actgctgtagtcaccactctgccct

SEQ ID NO: 5673655 - DNA, 25 bp, Homo sapien
tttcctgacccaagacatccaaact

SEQ ID NO: 5673656 - DNA, 25 bp, Homo sapien
ctttcctgacccaagacatccaaac

SEQ ID NO: 5673657 - DNA, 25 bp, Homo sapien
tgggtcaggaaaggaaggtgcacag

SEQ ID NO: 5673658 - DNA, 25 bp, Homo sapien
agtggtgactacagcagtttggatg

SEQ ID NO: 5673659 - DNA, 25 bp, Homo sapien
gcccagaccttgtctgttaaaaatg

SEQ ID NO: 5673660 - DNA, 25 bp, Homo sapien
ggcagagtggtgactacagcagttt

SEQ ID NO: 5673661 - DNA, 25 bp, Homo sapien
agtttggatgtcttgggtcaggaaa

SEQ ID NO: 5673662 - DNA, 25 bp, Homo sapien
gaccttgtctgttaaaaatgaaaga

SEQ ID NO: 5673663 - DNA, 25 bp, Homo sapien
tctttcatttttaacagacaaggtc

SEQ ID NO: 5673664 - DNA, 25 bp, Homo sapien
aaactgctgtagtcaccactctgcc

SEQ ID NO: 5673665 - DNA, 25 bp, Homo sapien
tttcctgacccaagacatccaaact

SEQ ID NO: 5673666 - DNA, 25 bp, Homo sapien
tgtgcaccttcctttcctgacccaa

SEQ ID NO: 5673667 - DNA, 25 bp, Homo sapien
catttttaacagacaaggtctgggc

SEQ ID NO: 5673668 - DNA, 25 bp, Homo sapien
catccaaactgctgtagtcaccact

SEQ ID NO: 5673669 - DNA, 25 bp, Homo sapien
ttcactggttagacgcagaccaggc

SEQ ID NO: 5673670 - DNA, 25 bp, Homo sapien
tggcattcactggttagacgcagac

SEQ ID NO: 5673671 - DNA, 25 bp, Homo sapien
aaagtggcattcactggttagacgc

SEQ ID NO: 5673672 - DNA, 25 bp, Homo sapien
ctaaaacctaagagtaaagtggcat

SEQ ID NO: 5673673 - DNA, 25 bp, Homo sapien
aacctaagagtaaagtggcattcac

SEQ ID NO: 5673674 - DNA, 25 bp, Homo sapien
ctggttagacgcagaccaggctggt

SEQ ID NO: 5673675 - DNA, 25 bp, Homo sapien
gtgaatgccactttactcttaggtt

SEQ ID NO: 5673676 - DNA, 25 bp, Homo sapien
tctgcgtctaaccagtgaatgccac

SEQ ID NO: 5673677 - DNA, 25 bp, Homo sapien
gcctggtctgcgtctaaccagtgaa

SEQ ID NO: 5673678 - DNA, 25 bp, Homo sapien
tggtctgcgtctaaccagtgaatgc

SEQ ID NO: 5673679 - DNA, 25 bp, Homo sapien
atgccactttactcttaggttttag

SEQ ID NO: 5673680 - DNA, 25 bp, Homo sapien
accagcctggtctgcgtctaaccag

SEQ ID NO: 5673681 - DNA, 25 bp, Homo sapien
tgtgtttgggaccactcactcccac

SEQ ID NO: 5673682 - DNA, 25 bp, Homo sapien
tgtctggaaatgcacatggcaccct

SEQ ID NO: 5673683 - DNA, 25 bp, Homo sapien
tgtctgtctggaaatgcacatggca

SEQ ID NO: 5673684 - DNA, 25 bp, Homo sapien
tggaaatgcacatggcaccctgtgt

SEQ ID NO: 5673685 - DNA, 25 bp, Homo sapien
ggcagactttgtgtttgggaccact

SEQ ID NO: 5673686 - DNA, 25 bp, Homo sapien
atgcacatggcaccctgtgtcttta

SEQ ID NO: 5673687 - DNA, 25 bp, Homo sapien
taaagacacagggtgccatgtgcat

SEQ ID NO: 5673688 - DNA, 25 bp, Homo sapien
gtgggagtgagtggtcccaaacaca

SEQ ID NO: 5673689 - DNA, 25 bp, Homo sapien
caaagtctgccccaggcagcctagg

SEQ ID NO: 5673690 - DNA, 25 bp, Homo sapien
ccatgtgcatttccagacagacaag

SEQ ID NO: 5673691 - DNA, 25 bp, Homo sapien
gagtggtcccaaacacaaagtctgc

SEQ ID NO: 5673692 - DNA, 25 bp, Homo sapien
cagggtgccatgtgcatttccagac

SEQ ID NO: 5673693 - DNA, 25 bp, Homo sapien
acacttgtatctcttgttgtcagca

SEQ ID NO: 5673694 - DNA, 25 bp, Homo sapien
tagcccctaacacttgtatctcttg

SEQ ID NO: 5673695 - DNA, 25 bp, Homo sapien
acttgtatctcttgttgtcagcaaa

SEQ ID NO: 5673696 - DNA, 25 bp, Homo sapien
taacacttgtatctcttgttgtcag

SEQ ID NO: 5673697 - DNA, 25 bp, Homo sapien
cacttgtatctcttgttgtcagcaa

SEQ ID NO: 5673698 - DNA, 25 bp, Homo sapien
gcccctaacacttgtatctcttgtt

SEQ ID NO: 5673699 - DNA, 25 bp, Homo sapien
ctgaaacccttggaggttaatgcca

SEQ ID NO: 5673700 - DNA, 25 bp, Homo sapien
gctgaaacccttggaggttaatgcc

SEQ ID NO: 5673701 - DNA, 25 bp, Homo sapien
ggctgaaacccttggaggttaatgc

SEQ ID NO: 5673702 - DNA, 25 bp, Homo sapien
tggcattaacctccaagggtttcag

SEQ ID NO: 5673703 - DNA, 25 bp, Homo sapien
gcattaacctccaagggtttcagcc

SEQ ID NO: 5673704 - DNA, 25 bp, Homo sapien
ggcattaacctccaagggtttcagc

SEQ ID NO: 5673705 - DNA, 25 bp, Homo sapien
tgacaacaagagatacaagtgttag

SEQ ID NO: 5673706 - DNA, 25 bp, Homo sapien
tgctgacaacaagagatacaagtgt

SEQ ID NO: 5673707 - DNA, 25 bp, Homo sapien
gctgacaacaagagatacaagtgtt

SEQ ID NO: 5673708 - DNA, 25 bp, Homo sapien
ttgctgacaacaagagatacaagtg

SEQ ID NO: 5673709 - DNA, 25 bp, Homo sapien
acaacaagagatacaagtgttaggg

SEQ ID NO: 5673710 - DNA, 25 bp, Homo sapien
tttgctgacaacaagagatacaagt

SEQ ID NO: 5673711 - DNA, 25 bp, Homo sapien
cgctgtgcgggggtgggtttcttgt

SEQ ID NO: 5673712 - DNA, 25 bp, Homo sapien
gctgtgagttgttagatggactgga

SEQ ID NO: 5673713 - DNA, 25 bp, Homo sapien
acttgctgcagactgcgctgtgcgg

SEQ ID NO: 5673714 - DNA, 25 bp, Homo sapien
cttgctgcagactgcgctgtgcggg

SEQ ID NO: 5673715 - DNA, 25 bp, Homo sapien
cagactgcgctgtgcgggggtgggt

SEQ ID NO: 5673716 - DNA, 25 bp, Homo sapien
ctgcagactgcgctgtgcgggggtg

SEQ ID NO: 5673717 - DNA, 25 bp, Homo sapien
cacccccgcacagcgcagtctgcag

SEQ ID NO: 5673718 - DNA, 25 bp, Homo sapien
acaagaaacccacccccgcacagcg

SEQ ID NO: 5673719 - DNA, 25 bp, Homo sapien
ccccgcacagcgcagtctgcagcaa

SEQ ID NO: 5673720 - DNA, 25 bp, Homo sapien
cccgcacagcgcagtctgcagcaag

SEQ ID NO: 5673721 - DNA, 25 bp, Homo sapien
tccagtccatctaacaactcacagc

SEQ ID NO: 5673722 - DNA, 25 bp, Homo sapien
ccgcacagcgcagtctgcagcaagt

SEQ ID NO: 5673723 - DNA, 25 bp, Homo sapien
acttgctgcagactgcgctgtgcgg

SEQ ID NO: 5673724 - DNA, 25 bp, Homo sapien
catactcactctggctgtgagttgt

SEQ ID NO: 5673725 - DNA, 25 bp, Homo sapien
tggactggaagatgtgcacacttgc

SEQ ID NO: 5673726 - DNA, 25 bp, Homo sapien
ctggctgtgagttgttagatggact

SEQ ID NO: 5673727 - DNA, 25 bp, Homo sapien
tagatggactggaagatgtgcacac

SEQ ID NO: 5673728 - DNA, 25 bp, Homo sapien
tggaagatgtgcacacttgctgcag

SEQ ID NO: 5673729 - DNA, 25 bp, Homo sapien
tgtgcacatcttccagtccatctaa

SEQ ID NO: 5673730 - DNA, 25 bp, Homo sapien
caagtgtgcacatcttccagtccat

SEQ ID NO: 5673731 - DNA, 25 bp, Homo sapien
agtccatctaacaactcacagccag

SEQ ID NO: 5673732 - DNA, 25 bp, Homo sapien
acaactcacagccagagtgagtatg

SEQ ID NO: 5673733 - DNA, 25 bp, Homo sapien
gcagcaagtgtgcacatcttccagt

SEQ ID NO: 5673734 - DNA, 25 bp, Homo sapien
ccgcacagcgcagtctgcagcaagt

SEQ ID NO: 5673735 - DNA, 25 bp, Homo sapien
tgtgctgcatgggttggccaggagt

SEQ ID NO: 5673736 - DNA, 25 bp, Homo sapien
agtgtggggacgaagtgggagcagg

SEQ ID NO: 5673737 - DNA, 25 bp, Homo sapien
ttggccaggagtgtggggacgaagt

SEQ ID NO: 5673738 - DNA, 25 bp, Homo sapien
gtgctgcatgggttggccaggagtg

SEQ ID NO: 5673739 - DNA, 25 bp, Homo sapien
tggccaggagtgtggggacgaagtg

SEQ ID NO: 5673740 - DNA, 25 bp, Homo sapien
gagtgtggggacgaagtgggagcag

SEQ ID NO: 5673741 - DNA, 25 bp, Homo sapien
actcctggccaacccatgcagcaca

SEQ ID NO: 5673742 - DNA, 25 bp, Homo sapien
cactcctggccaacccatgcagcac

SEQ ID NO: 5673743 - DNA, 25 bp, Homo sapien
cctgctcccacttcgtccccacact

SEQ ID NO: 5673744 - DNA, 25 bp, Homo sapien
ctcccacttcgtccccacactcctg

SEQ ID NO: 5673745 - DNA, 25 bp, Homo sapien
cacttcgtccccacactcctggcca

SEQ ID NO: 5673746 - DNA, 25 bp, Homo sapien
acttcgtccccacactcctggccaa

SEQ ID NO: 5673747 - DNA, 25 bp, Homo sapien
tgtgctgcatgggttggccaggagt

SEQ ID NO: 5673748 - DNA, 25 bp, Homo sapien
cacagagggtcctgttgtgctgcat

SEQ ID NO: 5673749 - DNA, 25 bp, Homo sapien
tcctgttgtgctgcatgggttggcc

SEQ ID NO: 5673750 - DNA, 25 bp, Homo sapien
cctgttgtgctgcatgggttggcca

SEQ ID NO: 5673751 - DNA, 25 bp, Homo sapien
acgaagtgggagcagggaggtgaag

SEQ ID NO: 5673752 - DNA, 25 bp, Homo sapien
ggctttggaagccacagagggtcct

SEQ ID NO: 5673753 - DNA, 25 bp, Homo sapien
acttcgtccccacactcctggccaa

SEQ ID NO: 5673754 - DNA, 25 bp, Homo sapien
actcctggccaacccatgcagcaca

SEQ ID NO: 5673755 - DNA, 25 bp, Homo sapien
catgcagcacaacaggaccctctgt

SEQ ID NO: 5673756 - DNA, 25 bp, Homo sapien
tggccaacccatgcagcacaacagg

SEQ ID NO: 5673757 - DNA, 25 bp, Homo sapien
caggaccctctgtggcttccaaagc

SEQ ID NO: 5673758 - DNA, 25 bp, Homo sapien
gtggcttccaaagcccctcaaatcg

SEQ ID NO: 5673759 - DNA, 25 bp, Homo sapien
cagccatgggcgggcatagcctcac

SEQ ID NO: 5673760 - DNA, 25 bp, Homo sapien
ccagccatgggcgggcatagcctca

SEQ ID NO: 5673761 - DNA, 25 bp, Homo sapien
caccagccatgggcgggcatagcct

SEQ ID NO: 5673762 - DNA, 25 bp, Homo sapien
accagccatgggcgggcatagcctc

SEQ ID NO: 5673763 - DNA, 25 bp, Homo sapien
ccaccagccatgggcgggcatagcc

SEQ ID NO: 5673764 - DNA, 25 bp, Homo sapien
aggctatgcccgcccatggctggtg

SEQ ID NO: 5673765 - DNA, 25 bp, Homo sapien
tgaggctatgcccgcccatggctgg

SEQ ID NO: 5673766 - DNA, 25 bp, Homo sapien
gtgaggctatgcccgcccatggctg

SEQ ID NO: 5673767 - DNA, 25 bp, Homo sapien
gaggctatgcccgcccatggctggt

SEQ ID NO: 5673768 - DNA, 25 bp, Homo sapien
ggctatgcccgcccatggctggtgg

SEQ ID NO: 5673769 - DNA, 25 bp, Homo sapien
cagccatgggcgggcatagcctcac

SEQ ID NO: 5673770 - DNA, 25 bp, Homo sapien
caccagccatgggcgggcatagcct

SEQ ID NO: 5673771 - DNA, 25 bp, Homo sapien
ttccttcctgtcctgaccccttctg

SEQ ID NO: 5673772 - DNA, 25 bp, Homo sapien
ttcctgtcctgaccccttctggccc

SEQ ID NO: 5673773 - DNA, 25 bp, Homo sapien
cttctggccccctgagctggaaggg

SEQ ID NO: 5673774 - DNA, 25 bp, Homo sapien
ggcagggtgagtggctccctcctct

SEQ ID NO: 5673775 - DNA, 25 bp, Homo sapien
aggctatgcccgcccatggctggtg

SEQ ID NO: 5673776 - DNA, 25 bp, Homo sapien
cccttccagctcagggggccagaag

SEQ ID NO: 5673777 - DNA, 25 bp, Homo sapien
ccagaaggggtcaggacaggaagga

SEQ ID NO: 5673778 - DNA, 25 bp, Homo sapien
gtgaggctatgcccgcccatggctg

SEQ ID NO: 5673779 - DNA, 25 bp, Homo sapien
gggagaggagggagccactcaccct

SEQ ID NO: 5673780 - DNA, 25 bp, Homo sapien
agaggagggagccactcaccctgcc

SEQ ID NO: 5673781 - DNA, 25 bp, Homo sapien
ctatggccttgcgacagcgagagga

SEQ ID NO: 5673782 - DNA, 25 bp, Homo sapien
ccctatggccttgcgacagcgagag

SEQ ID NO: 5673783 - DNA, 25 bp, Homo sapien
acagctgatgtcatcaaccctatgg

SEQ ID NO: 5673784 - DNA, 25 bp, Homo sapien
aaccctatggccttgcgacagcgag

SEQ ID NO: 5673785 - DNA, 25 bp, Homo sapien
cagctgatgtcatcaaccctatggc

SEQ ID NO: 5673786 - DNA, 25 bp, Homo sapien
atggccttgcgacagcgagaggagc

SEQ ID NO: 5673787 - DNA, 25 bp, Homo sapien
ccatagggttgatgacatcagctgt

SEQ ID NO: 5673788 - DNA, 25 bp, Homo sapien
tcgctgtcgcaaggccatagggttg

SEQ ID NO: 5673789 - DNA, 25 bp, Homo sapien
cttggtgcccgcctctggaaggggg

SEQ ID NO: 5673790 - DNA, 25 bp, Homo sapien
tctcgctgtcgcaaggccatagggt

SEQ ID NO: 5673791 - DNA, 25 bp, Homo sapien
gccatagggttgatgacatcagctg

SEQ ID NO: 5673792 - DNA, 25 bp, Homo sapien
tcctctcgctgtcgcaaggccatag

SEQ ID NO: 5673793 - DNA, 25 bp, Homo sapien
gccctttttgcactccgcttggtag

SEQ ID NO: 5673794 - DNA, 25 bp, Homo sapien
cagcagctttcctgcaaggcctgcc

SEQ ID NO: 5673795 - DNA, 25 bp, Homo sapien
tgcactccgcttggtagagccctga

SEQ ID NO: 5673796 - DNA, 25 bp, Homo sapien
tccgcttggtagagccctgagtgtt

SEQ ID NO: 5673797 - DNA, 25 bp, Homo sapien
gccgtggtcggtagcatctactttg

SEQ ID NO: 5673798 - DNA, 25 bp, Homo sapien
aagggccgtggtcggtagcatctac

SEQ ID NO: 5673799 - DNA, 25 bp, Homo sapien
ggcaggccttgcaggaaagctgctg

SEQ ID NO: 5673800 - DNA, 25 bp, Homo sapien
aaagtagatgctaccgaccacggcc

SEQ ID NO: 5673801 - DNA, 25 bp, Homo sapien
tctaccaagcggagtgcaaaaaggg

SEQ ID NO: 5673802 - DNA, 25 bp, Homo sapien
tcagggctctaccaagcggagtgca

SEQ ID NO: 5673803 - DNA, 25 bp, Homo sapien
taccaagcggagtgcaaaaagggca

SEQ ID NO: 5673804 - DNA, 25 bp, Homo sapien
acactcagggctctaccaagcggag

SEQ ID NO: 5673805 - DNA, 25 bp, Homo sapien
tgaagtcctaggtcacccctccctg

SEQ ID NO: 5673806 - DNA, 25 bp, Homo sapien
gagtggcctgaagtcctaggtcacc

SEQ ID NO: 5673807 - DNA, 25 bp, Homo sapien
gtggcctgaagtcctaggtcacccc

SEQ ID NO: 5673808 - DNA, 25 bp, Homo sapien
tggcctgaagtcctaggtcacccct

SEQ ID NO: 5673809 - DNA, 25 bp, Homo sapien
tgagtggcctgaagtcctaggtcac

SEQ ID NO: 5673810 - DNA, 25 bp, Homo sapien
agtggcctgaagtcctaggtcaccc

SEQ ID NO: 5673811 - DNA, 25 bp, Homo sapien
ggagatggaccaagagtttggtgtc

SEQ ID NO: 5673812 - DNA, 25 bp, Homo sapien
aggagatggaccaagagtttggtgt

SEQ ID NO: 5673813 - DNA, 25 bp, Homo sapien
gaggagatggaccaagagtttggtg

SEQ ID NO: 5673814 - DNA, 25 bp, Homo sapien
acaccaaactcttggtccatctcct

SEQ ID NO: 5673815 - DNA, 25 bp, Homo sapien
gacaccaaactcttggtccatctcc

SEQ ID NO: 5673816 - DNA, 25 bp, Homo sapien
caccaaactcttggtccatctcctc

SEQ ID NO: 5673817 - DNA, 25 bp, Homo sapien
cagggaggggtgacctaggacttca

SEQ ID NO: 5673818 - DNA, 25 bp, Homo sapien
ggggtgacctaggacttcaggccac

SEQ ID NO: 5673819 - DNA, 25 bp, Homo sapien
ggtgacctaggacttcaggccactc

SEQ ID NO: 5673820 - DNA, 25 bp, Homo sapien
gggtgacctaggacttcaggccact

SEQ ID NO: 5673821 - DNA, 25 bp, Homo sapien
gtgacctaggacttcaggccactca

SEQ ID NO: 5673822 - DNA, 25 bp, Homo sapien
aggggtgacctaggacttcaggcca

SEQ ID NO: 5673823 - DNA, 25 bp, Homo sapien
gccgattcttcccttaggacctgta

SEQ ID NO: 5673824 - DNA, 25 bp, Homo sapien
ggaggttcctgactcgccgattctt

SEQ ID NO: 5673825 - DNA, 25 bp, Homo sapien
aatcccgaggttgggtgcgtggagg

SEQ ID NO: 5673826 - DNA, 25 bp, Homo sapien
tgactcgccgattcttcccttagga

SEQ ID NO: 5673827 - DNA, 25 bp, Homo sapien
ttcttcccttaggacctgtacagtg

SEQ ID NO: 5673828 - DNA, 25 bp, Homo sapien
gagggaggttcctgactcgccgatt

SEQ ID NO: 5673829 - DNA, 25 bp, Homo sapien
aagaatcggcgagtcaggaacctcc

SEQ ID NO: 5673830 - DNA, 25 bp, Homo sapien
tcctaagggaagaatcggcgagtca

SEQ ID NO: 5673831 - DNA, 25 bp, Homo sapien
tacaggtcctaagggaagaatcggc

SEQ ID NO: 5673832 - DNA, 25 bp, Homo sapien
cactgtacaggtcctaagggaagaa

SEQ ID NO: 5673833 - DNA, 25 bp, Homo sapien
cctccacgcacccaacctcgggatt

SEQ ID NO: 5673834 - DNA, 25 bp, Homo sapien
ggaagaatcggcgagtcaggaacct

SEQ ID NO: 5673835 - DNA, 25 bp, Homo sapien
gggcaccccatctggaatggcagtg

SEQ ID NO: 5673836 - DNA, 25 bp, Homo sapien
ccccatctggaatggcagtgacagg

SEQ ID NO: 5673837 - DNA, 25 bp, Homo sapien
tggcagtgacaggagccgcctcctg

SEQ ID NO: 5673838 - DNA, 25 bp, Homo sapien
gagccgcctcctgaggttgctgtga

SEQ ID NO: 5673839 - DNA, 25 bp, Homo sapien
cgcctcctgaggttgctgtgaggat

SEQ ID NO: 5673840 - DNA, 25 bp, Homo sapien
tgaggatgagtgacagcgtgggtga

SEQ ID NO: 5673841 - DNA, 25 bp, Homo sapien
tcacagcaacctcaggaggcggctc

SEQ ID NO: 5673842 - DNA, 25 bp, Homo sapien
atcctcacagcaacctcaggaggcg

SEQ ID NO: 5673843 - DNA, 25 bp, Homo sapien
ggaggcggctcctgtcactgccatt

SEQ ID NO: 5673844 - DNA, 25 bp, Homo sapien
cccacgctgtcactcatcctcacag

SEQ ID NO: 5673845 - DNA, 25 bp, Homo sapien
tcaggaggcggctcctgtcactgcc

SEQ ID NO: 5673846 - DNA, 25 bp, Homo sapien
tcctgtcactgccattccagatggg

SEQ ID NO: 5673847 - DNA, 25 bp, Homo sapien
tggcgcggtaggcgtcttcctcagt

SEQ ID NO: 5673848 - DNA, 25 bp, Homo sapien
ctgtgtgaacgtgaggtagacagct

SEQ ID NO: 5673849 - DNA, 25 bp, Homo sapien
tgaacgtgaggtagacagctggcgc

SEQ ID NO: 5673850 - DNA, 25 bp, Homo sapien
tgactgtgtgaacgtgaggtagaca

SEQ ID NO: 5673851 - DNA, 25 bp, Homo sapien
gctggcgcggtaggcgtcttcctca

SEQ ID NO: 5673852 - DNA, 25 bp, Homo sapien
acagctggcgcggtaggcgtcttcc

SEQ ID NO: 5673853 - DNA, 25 bp, Homo sapien
ggaagacgcctaccgcgccagctgt

SEQ ID NO: 5673854 - DNA, 25 bp, Homo sapien
gcgccagctgtctacctcacgttca

SEQ ID NO: 5673855 - DNA, 25 bp, Homo sapien
agctgtctacctcacgttcacacag

SEQ ID NO: 5673856 - DNA, 25 bp, Homo sapien
gctgtctacctcacgttcacacagt

SEQ ID NO: 5673857 - DNA, 25 bp, Homo sapien
tgtctacctcacgttcacacagtca

SEQ ID NO: 5673858 - DNA, 25 bp, Homo sapien
tgaggaagacgcctaccgcgccagc

SEQ ID NO: 5673859 - DNA, 25 bp, Homo sapien
ccagctctcccacctaggagctggg

SEQ ID NO: 5673860 - DNA, 25 bp, Homo sapien
tccctagctcaccagtggaattgag

SEQ ID NO: 5673861 - DNA, 25 bp, Homo sapien
cctagctcaccagtggaattgagat

SEQ ID NO: 5673862 - DNA, 25 bp, Homo sapien
agtttccctagctcaccagtggaat

SEQ ID NO: 5673863 - DNA, 25 bp, Homo sapien
tagctcaccagtggaattgagatag

SEQ ID NO: 5673864 - DNA, 25 bp, Homo sapien
tttccctagctcaccagtggaattg

SEQ ID NO: 5673865 - DNA, 25 bp, Homo sapien
aattccactggtgagctagggaaac

SEQ ID NO: 5673866 - DNA, 25 bp, Homo sapien
tctcaattccactggtgagctaggg

SEQ ID NO: 5673867 - DNA, 25 bp, Homo sapien
cccagctcctaggtgggagagctgg

SEQ ID NO: 5673868 - DNA, 25 bp, Homo sapien
tcaattccactggtgagctagggaa

SEQ ID NO: 5673869 - DNA, 25 bp, Homo sapien
ctatctcaattccactggtgagcta

SEQ ID NO: 5673870 - DNA, 25 bp, Homo sapien
tatctcaattccactggtgagctag

SEQ ID NO: 5673871 - DNA, 25 bp, Homo sapien
gaagcgctcaggacgctggctagca

SEQ ID NO: 5673872 - DNA, 25 bp, Homo sapien
taaccaccccacatgttgctcatgt

SEQ ID NO: 5673873 - DNA, 25 bp, Homo sapien
gctcaggacgctggctagcacagag

SEQ ID NO: 5673874 - DNA, 25 bp, Homo sapien
caccaaagaagtgttcaccctcgag

SEQ ID NO: 5673875 - DNA, 25 bp, Homo sapien
aaagaagtgttcaccctcgagggct

SEQ ID NO: 5673876 - DNA, 25 bp, Homo sapien
ccacatgttgctcatgtgtgggaag

SEQ ID NO: 5673877 - DNA, 25 bp, Homo sapien
ctctgtgctagccagcgtcctgagc

SEQ ID NO: 5673878 - DNA, 25 bp, Homo sapien
aagccctcgagggtgaacacttctt

SEQ ID NO: 5673879 - DNA, 25 bp, Homo sapien
tcgagggtgaacacttctttggtgt

SEQ ID NO: 5673880 - DNA, 25 bp, Homo sapien
tgctagccagcgtcctgagcgcttc

SEQ ID NO: 5673881 - DNA, 25 bp, Homo sapien
ttcccacacatgagcaacatgtggg

SEQ ID NO: 5673882 - DNA, 25 bp, Homo sapien
gccctcgagggtgaacacttctttg

SEQ ID NO: 5673883 - DNA, 25 bp, Homo sapien
cccgctccatgtctcgcccctcttc

SEQ ID NO: 5673884 - DNA, 25 bp, Homo sapien
gtggcccccgctccatgtctcgccc

SEQ ID NO: 5673885 - DNA, 25 bp, Homo sapien
ctgtggcccccgctccatgtctcgc

SEQ ID NO: 5673886 - DNA, 25 bp, Homo sapien
ccccgctccatgtctcgcccctctt

SEQ ID NO: 5673887 - DNA, 25 bp, Homo sapien
tgtggcccccgctccatgtctcgcc

SEQ ID NO: 5673888 - DNA, 25 bp, Homo sapien
tggcccccgctccatgtctcgcccc

SEQ ID NO: 5673889 - DNA, 25 bp, Homo sapien
ggggcgagacatggagcgggggcca

SEQ ID NO: 5673890 - DNA, 25 bp, Homo sapien
ggcgagacatggagcgggggccaca

SEQ ID NO: 5673891 - DNA, 25 bp, Homo sapien
gaagaggggcgagacatggagcggg

SEQ ID NO: 5673892 - DNA, 25 bp, Homo sapien
gggcgagacatggagcgggggccac

SEQ ID NO: 5673893 - DNA, 25 bp, Homo sapien
aggggcgagacatggagcgggggcc

SEQ ID NO: 5673894 - DNA, 25 bp, Homo sapien
gaggggcgagacatggagcgggggc

SEQ ID NO: 5673895 - DNA, 25 bp, Homo sapien
tctcgcccctcttcccttaaggtga

SEQ ID NO: 5673896 - DNA, 25 bp, Homo sapien
atgtctcgcccctcttcccttaagg

SEQ ID NO: 5673897 - DNA, 25 bp, Homo sapien
agggtgaagaaaatccgcaagaagg

SEQ ID NO: 5673898 - DNA, 25 bp, Homo sapien
ggtgaagaaaatccgcaagaaggag

SEQ ID NO: 5673899 - DNA, 25 bp, Homo sapien
agaccaagcggagggtgaagaaaat

SEQ ID NO: 5673900 - DNA, 25 bp, Homo sapien
tgtggcccccgctccatgtctcgcc

SEQ ID NO: 5673901 - DNA, 25 bp, Homo sapien
ggcgagacatggagcgggggccaca

SEQ ID NO: 5673902 - DNA, 25 bp, Homo sapien
gaagaggggcgagacatggagcggg

SEQ ID NO: 5673903 - DNA, 25 bp, Homo sapien
ctccttcttgcggattttcttcacc

SEQ ID NO: 5673904 - DNA, 25 bp, Homo sapien
attttcttcaccctccgcttggtct

SEQ ID NO: 5673905 - DNA, 25 bp, Homo sapien
tcaccttaagggaagaggggcgaga

SEQ ID NO: 5673906 - DNA, 25 bp, Homo sapien
ccttcttgcggattttcttcaccct

SEQ ID NO: 5673907 - DNA, 25 bp, Homo sapien
gactgttaatgcaggaacggtaatt

SEQ ID NO: 5673908 - DNA, 25 bp, Homo sapien
tgcaggaacggtaatttctgatggt

SEQ ID NO: 5673909 - DNA, 25 bp, Homo sapien
caggaacggtaatttctgatggtgg

SEQ ID NO: 5673910 - DNA, 25 bp, Homo sapien
ctgttaatgcaggaacggtaatttc

SEQ ID NO: 5673911 - DNA, 25 bp, Homo sapien
ttaatgcaggaacggtaatttctga

SEQ ID NO: 5673912 - DNA, 25 bp, Homo sapien
cagtgactgttaatgcaggaacggt

SEQ ID NO: 5673913 - DNA, 25 bp, Homo sapien
gaaattaccgttcctgcattaacag

SEQ ID NO: 5673914 - DNA, 25 bp, Homo sapien
accaccatcagaaattaccgttcct

SEQ ID NO: 5673915 - DNA, 25 bp, Homo sapien
cagaaattaccgttcctgcattaac

SEQ ID NO: 5673916 - DNA, 25 bp, Homo sapien
accgttcctgcattaacagtcactg

SEQ ID NO: 5673917 - DNA, 25 bp, Homo sapien
ccccacacactctagaaagccagct

SEQ ID NO: 5673918 - DNA, 25 bp, Homo sapien
accatcagaaattaccgttcctgca

SEQ ID NO: 5673919 - DNA, 25 bp, Homo sapien
gaggtttaagggcatatggtctctg

SEQ ID NO: 5673920 - DNA, 25 bp, Homo sapien
aagggcatatggtctctgttaggca

SEQ ID NO: 5673921 - DNA, 25 bp, Homo sapien
gacgtatttgaggtttaagggcata

SEQ ID NO: 5673922 - DNA, 25 bp, Homo sapien
acggaggccaggcttactgttgaag

SEQ ID NO: 5673923 - DNA, 25 bp, Homo sapien
tatggtctctgttaggcaccttgaa

SEQ ID NO: 5673924 - DNA, 25 bp, Homo sapien
ccaggcttactgttgaagggctgga

SEQ ID NO: 5673925 - DNA, 25 bp, Homo sapien
tatgcccttaaacctcaaatacgtc

SEQ ID NO: 5673926 - DNA, 25 bp, Homo sapien
tccagcccttcaacagtaagcctgg

SEQ ID NO: 5673927 - DNA, 25 bp, Homo sapien
tgcctaacagagaccatatgccctt

SEQ ID NO: 5673928 - DNA, 25 bp, Homo sapien
gaccatatgcccttaaacctcaaat

SEQ ID NO: 5673929 - DNA, 25 bp, Homo sapien
ttcaaggtgcctaacagagaccata

SEQ ID NO: 5673930 - DNA, 25 bp, Homo sapien
cttcaacagtaagcctggcctccgt

SEQ ID NO: 5673931 - DNA, 25 bp, Homo sapien
gaactacaggtgcatgccaccacgc

SEQ ID NO: 5673932 - DNA, 25 bp, Homo sapien
cagctgatttttgtattttttagaa

SEQ ID NO: 5673933 - DNA, 25 bp, Homo sapien
tgcatgccaccacgcccagctgatt

SEQ ID NO: 5673934 - DNA, 25 bp, Homo sapien
gctgatttttgtattttttagaaga

SEQ ID NO: 5673935 - DNA, 25 bp, Homo sapien
ggaactacaggtgcatgccaccacg

SEQ ID NO: 5673936 - DNA, 25 bp, Homo sapien
ccagctgatttttgtattttttaga

SEQ ID NO: 5673937 - DNA, 25 bp, Homo sapien
tcttctaaaaaatacaaaaatcagc

SEQ ID NO: 5673938 - DNA, 25 bp, Homo sapien
cttctaaaaaatacaaaaatcagct

SEQ ID NO: 5673939 - DNA, 25 bp, Homo sapien
ttctaaaaaatacaaaaatcagctg

SEQ ID NO: 5673940 - DNA, 25 bp, Homo sapien
tctaaaaaatacaaaaatcagctgg

SEQ ID NO: 5673941 - DNA, 25 bp, Homo sapien
cgtggtggcatgcacctgtagttcc

SEQ ID NO: 5673942 - DNA, 25 bp, Homo sapien
aatcagctgggcgtggtggcatgca

SEQ ID NO: 5673943 - DNA, 25 bp, Homo sapien
tgagtgaagccagctcgtgtcatca

SEQ ID NO: 5673944 - DNA, 25 bp, Homo sapien
gaagccagctcgtgtcatcatttat

SEQ ID NO: 5673945 - DNA, 25 bp, Homo sapien
ttgagtgaagccagctcgtgtcatc

SEQ ID NO: 5673946 - DNA, 25 bp, Homo sapien
gtgaagccagctcgtgtcatcattt

SEQ ID NO: 5673947 - DNA, 25 bp, Homo sapien
gagtgaagccagctcgtgtcatcat

SEQ ID NO: 5673948 - DNA, 25 bp, Homo sapien
aagccagctcgtgtcatcatttatt

SEQ ID NO: 5673949 - DNA, 25 bp, Homo sapien
taaatgatgacacgagctggcttca

SEQ ID NO: 5673950 - DNA, 25 bp, Homo sapien
aatgatgacacgagctggcttcact

SEQ ID NO: 5673951 - DNA, 25 bp, Homo sapien
tgatgacacgagctggcttcactca

SEQ ID NO: 5673952 - DNA, 25 bp, Homo sapien
gatgacacgagctggcttcactcaa

SEQ ID NO: 5673953 - DNA, 25 bp, Homo sapien
aaatgatgacacgagctggcttcac

SEQ ID NO: 5673954 - DNA, 25 bp, Homo sapien
aataaatgatgacacgagctggctt

SEQ ID NO: 5673955 - DNA, 25 bp, Homo sapien
ggatggtgggattcatgagctgagg

SEQ ID NO: 5673956 - DNA, 25 bp, Homo sapien
gatggtgggattcatgagctgagga

SEQ ID NO: 5673957 - DNA, 25 bp, Homo sapien
cctcagctcatgaatcccaccatcc

SEQ ID NO: 5673958 - DNA, 25 bp, Homo sapien
tcctcagctcatgaatcccaccatc

SEQ ID NO: 5673959 - DNA, 25 bp, Homo sapien
cagaaaggatccttggaattgaggg

SEQ ID NO: 5673960 - DNA, 25 bp, Homo sapien
agaaaggatccttggaattgagggg

SEQ ID NO: 5673961 - DNA, 25 bp, Homo sapien
cccctcaattccaaggatcctttct

SEQ ID NO: 5673962 - DNA, 25 bp, Homo sapien
ccctcaattccaaggatcctttctg

SEQ ID NO: 5673963 - DNA, 25 bp, Homo sapien
gaacagaaaggatccttggaattga

SEQ ID NO: 5673964 - DNA, 25 bp, Homo sapien
gagaacagaaaggatccttggaatt

SEQ ID NO: 5673965 - DNA, 25 bp, Homo sapien
cagaaaggatccttggaattgaggg

SEQ ID NO: 5673966 - DNA, 25 bp, Homo sapien
gttttgttttgtgatagtgtctcac

SEQ ID NO: 5673967 - DNA, 25 bp, Homo sapien
agagaacagaaaggatccttggaat

SEQ ID NO: 5673968 - DNA, 25 bp, Homo sapien
gttttgtgatagtgtctcactttgt

SEQ ID NO: 5673969 - DNA, 25 bp, Homo sapien
acaaagtgagacactatcacaaaac

SEQ ID NO: 5673970 - DNA, 25 bp, Homo sapien
agctgagatagagtcactgcacccc

SEQ ID NO: 5673971 - DNA, 25 bp, Homo sapien
aagtgagacactatcacaaaacaaa

SEQ ID NO: 5673972 - DNA, 25 bp, Homo sapien
aattccaaggatcctttctgttctc

SEQ ID NO: 5673973 - DNA, 25 bp, Homo sapien
acaacccctcaattccaaggatcct

SEQ ID NO: 5673974 - DNA, 25 bp, Homo sapien
ccctcaattccaaggatcctttctg

SEQ ID NO: 5673975 - DNA, 25 bp, Homo sapien
aaggcagaccaaaaagagaagatat

SEQ ID NO: 5673976 - DNA, 25 bp, Homo sapien
atatcttctctttttggtctgcctt

SEQ ID NO: 5673977 - DNA, 25 bp, Homo sapien
catgaagaatataaaaaggcagacc

SEQ ID NO: 5673978 - DNA, 25 bp, Homo sapien
gaccaaaaagagaagatatttgccc

SEQ ID NO: 5673979 - DNA, 25 bp, Homo sapien
gagaagatatttgcccatatatacc

SEQ ID NO: 5673980 - DNA, 25 bp, Homo sapien
tacaaaacataccatgaagaatata

SEQ ID NO: 5673981 - DNA, 25 bp, Homo sapien
aaggcagaccaaaaagagaagatat

SEQ ID NO: 5673982 - DNA, 25 bp, Homo sapien
ttttttacaaaacataccatgaaga

SEQ ID NO: 5673983 - DNA, 25 bp, Homo sapien
aaatatcttctctttttggtctgcc

SEQ ID NO: 5673984 - DNA, 25 bp, Homo sapien
tatattcttcatggtatgttttgta

SEQ ID NO: 5673985 - DNA, 25 bp, Homo sapien
tcttcatggtatgttttgtaaaaaa

SEQ ID NO: 5673986 - DNA, 25 bp, Homo sapien
ggtatatatgggcaaatatcttctc

SEQ ID NO: 5673987 - DNA, 25 bp, Homo sapien
atatcttctctttttggtctgcctt

SEQ ID NO: 5673988 - DNA, 25 bp, Homo sapien
ggtctgcctttttatattcttcatg

SEQ ID NO: 5673989 - DNA, 25 bp, Homo sapien
ccatagtggaaactgatgagctaca

SEQ ID NO: 5673990 - DNA, 25 bp, Homo sapien
gagccagatcaaggagcatccagct

SEQ ID NO: 5673991 - DNA, 25 bp, Homo sapien
cacgggctgtgattccatagtggaa

SEQ ID NO: 5673992 - DNA, 25 bp, Homo sapien
aactgatgagctacagccgtgtgca

SEQ ID NO: 5673993 - DNA, 25 bp, Homo sapien
gccgtgtgcatcagggttactctca

SEQ ID NO: 5673994 - DNA, 25 bp, Homo sapien
ggagcatccagctcacgggctgtga

SEQ ID NO: 5673995 - DNA, 25 bp, Homo sapien
tgcacacggctgtagctcatcagtt

SEQ ID NO: 5673996 - DNA, 25 bp, Homo sapien
tcacagcccgtgagctggatgctcc

SEQ ID NO: 5673997 - DNA, 25 bp, Homo sapien
gagctggatgctccttgatctggct

SEQ ID NO: 5673998 - DNA, 25 bp, Homo sapien
ctgagagtaaccctgatgcacacgg

SEQ ID NO: 5673999 - DNA, 25 bp, Homo sapien
tgtagctcatcagtttccactatgg

SEQ ID NO: 5674000 - DNA, 25 bp, Homo sapien
tccactatggaatcacagcccgtga

SEQ ID NO: 5674001 - DNA, 25 bp, Homo sapien
atggagaccatccaggctagtacgg

SEQ ID NO: 5674002 - DNA, 25 bp, Homo sapien
tccaggctagtacggtgaaacccca

SEQ ID NO: 5674003 - DNA, 25 bp, Homo sapien
tggagaccatccaggctagtacggt

SEQ ID NO: 5674004 - DNA, 25 bp, Homo sapien
ggagaccatccaggctagtacggtg

SEQ ID NO: 5674005 - DNA, 25 bp, Homo sapien
gatggagaccatccaggctagtacg

SEQ ID NO: 5674006 - DNA, 25 bp, Homo sapien
agatggagaccatccaggctagtac

SEQ ID NO: 5674007 - DNA, 25 bp, Homo sapien
tggggtttcaccgtactagcctgga

SEQ ID NO: 5674008 - DNA, 25 bp, Homo sapien
cgtactagcctggatggtctccatc

SEQ ID NO: 5674009 - DNA, 25 bp, Homo sapien
gtactagcctggatggtctccatct

SEQ ID NO: 5674010 - DNA, 25 bp, Homo sapien
ccgtactagcctggatggtctccat

SEQ ID NO: 5674011 - DNA, 25 bp, Homo sapien
accgtactagcctggatggtctcca

SEQ ID NO: 5674012 - DNA, 25 bp, Homo sapien
caccgtactagcctggatggtctcc

SEQ ID NO: 5674013 - DNA, 25 bp, Homo sapien
gagcaaccacccggcccctggaaga

SEQ ID NO: 5674014 - DNA, 25 bp, Homo sapien
ttatagatgtgagcaaccacccggc

SEQ ID NO: 5674015 - DNA, 25 bp, Homo sapien
tatagatgtgagcaaccacccggcc

SEQ ID NO: 5674016 - DNA, 25 bp, Homo sapien
tgagcaaccacccggcccctggaag

SEQ ID NO: 5674017 - DNA, 25 bp, Homo sapien
tagatgtgagcaaccacccggcccc

SEQ ID NO: 5674018 - DNA, 25 bp, Homo sapien
atagatgtgagcaaccacccggccc

SEQ ID NO: 5674019 - DNA, 25 bp, Homo sapien
cttccaggggccgggtggttgctca

SEQ ID NO: 5674020 - DNA, 25 bp, Homo sapien
gccgggtggttgctcacatctataa

SEQ ID NO: 5674021 - DNA, 25 bp, Homo sapien
tccaggggccgggtggttgctcaca

SEQ ID NO: 5674022 - DNA, 25 bp, Homo sapien
ggccgggtggttgctcacatctata

SEQ ID NO: 5674023 - DNA, 25 bp, Homo sapien
tcttccaggggccgggtggttgctc

SEQ ID NO: 5674024 - DNA, 25 bp, Homo sapien
gggccgggtggttgctcacatctat

SEQ ID NO: 5674025 - DNA, 25 bp, Homo sapien
tgtgggggtcgctggattcagtgct

SEQ ID NO: 5674026 - DNA, 25 bp, Homo sapien
gtgggggtcgctggattcagtgctg

SEQ ID NO: 5674027 - DNA, 25 bp, Homo sapien
tgggggtcgctggattcagtgctgg

SEQ ID NO: 5674028 - DNA, 25 bp, Homo sapien
ggggtcgctggattcagtgctggca

SEQ ID NO: 5674029 - DNA, 25 bp, Homo sapien
gggggtcgctggattcagtgctggc

SEQ ID NO: 5674030 - DNA, 25 bp, Homo sapien
tgccagcactgaatccagcgacccc

SEQ ID NO: 5674031 - DNA, 25 bp, Homo sapien
ccagcactgaatccagcgaccccca

SEQ ID NO: 5674032 - DNA, 25 bp, Homo sapien
cagcactgaatccagcgacccccac

SEQ ID NO: 5674033 - DNA, 25 bp, Homo sapien
agcactgaatccagcgacccccaca

SEQ ID NO: 5674034 - DNA, 25 bp, Homo sapien
gccagcactgaatccagcgaccccc

SEQ ID NO: 5674035 - DNA, 25 bp, Homo sapien
acggaacctgctttcttggtgaagc

SEQ ID NO: 5674036 - DNA, 25 bp, Homo sapien
gtcgctggattcagtgctggcagca

SEQ ID NO: 5674037 - DNA, 25 bp, Homo sapien
catgtcacggaacctgctttcttgg

SEQ ID NO: 5674038 - DNA, 25 bp, Homo sapien
tttcttggtgaagcaggaagcgaga

SEQ ID NO: 5674039 - DNA, 25 bp, Homo sapien
tgctggcagcatgagtgagttctct

SEQ ID NO: 5674040 - DNA, 25 bp, Homo sapien
gtgagttctcttcccatgtcacgga

SEQ ID NO: 5674041 - DNA, 25 bp, Homo sapien
aagaaagcaggttccgtgacatggg

SEQ ID NO: 5674042 - DNA, 25 bp, Homo sapien
tgctgccagcactgaatccagcgac

SEQ ID NO: 5674043 - DNA, 25 bp, Homo sapien
gaagagaactcactcatgctgccag

SEQ ID NO: 5674044 - DNA, 25 bp, Homo sapien
tctcgcttcctgcttcaccaagaaa

SEQ ID NO: 5674045 - DNA, 25 bp, Homo sapien
gcttcaccaagaaagcaggttccgt

SEQ ID NO: 5674046 - DNA, 25 bp, Homo sapien
tccgtgacatgggaagagaactcac

SEQ ID NO: 5674047 - DNA, 25 bp, Homo sapien
agggcgatctgaggagtaaatgagg

SEQ ID NO: 5674048 - DNA, 25 bp, Homo sapien
ggaaattaaatgttgtggagggctg

SEQ ID NO: 5674049 - DNA, 25 bp, Homo sapien
gaaattaaatgttgtggagggctgg

SEQ ID NO: 5674050 - DNA, 25 bp, Homo sapien
gaggaaattaaatgttgtggagggc

SEQ ID NO: 5674051 - DNA, 25 bp, Homo sapien
aggaaattaaatgttgtggagggct

SEQ ID NO: 5674052 - DNA, 25 bp, Homo sapien
aaattaaatgttgtggagggctggt

SEQ ID NO: 5674053 - DNA, 25 bp, Homo sapien
cctcatttactcctcagatcgccct

SEQ ID NO: 5674054 - DNA, 25 bp, Homo sapien
agccctccacaacatttaatttcct

SEQ ID NO: 5674055 - DNA, 25 bp, Homo sapien
cagccctccacaacatttaatttcc

SEQ ID NO: 5674056 - DNA, 25 bp, Homo sapien
ccagccctccacaacatttaatttc

SEQ ID NO: 5674057 - DNA, 25 bp, Homo sapien
ccctccacaacatttaatttcctca

SEQ ID NO: 5674058 - DNA, 25 bp, Homo sapien
accagccctccacaacatttaattt

SEQ ID NO: 5674059 - DNA, 25 bp, Homo sapien
tctgaggagtaaatgaggaaattaa

SEQ ID NO: 5674060 - DNA, 25 bp, Homo sapien
cctggcaggtggtgaccagtgggtg

SEQ ID NO: 5674061 - DNA, 25 bp, Homo sapien
taaatgttgtggagggctggtgcct

SEQ ID NO: 5674062 - DNA, 25 bp, Homo sapien
aggaaattaaatgttgtggagggct

SEQ ID NO: 5674063 - DNA, 25 bp, Homo sapien
gcgatctgaggagtaaatgaggaaa

SEQ ID NO: 5674064 - DNA, 25 bp, Homo sapien
aaattaaatgttgtggagggctggt

SEQ ID NO: 5674065 - DNA, 25 bp, Homo sapien
cacccactggtcaccacctgccagg

SEQ ID NO: 5674066 - DNA, 25 bp, Homo sapien
ggccataccggctcttctcagcccc

SEQ ID NO: 5674067 - DNA, 25 bp, Homo sapien
agccctccacaacatttaatttcct

SEQ ID NO: 5674068 - DNA, 25 bp, Homo sapien
taatttcctcatttactcctcagat

SEQ ID NO: 5674069 - DNA, 25 bp, Homo sapien
tttcctcatttactcctcagatcgc

SEQ ID NO: 5674070 - DNA, 25 bp, Homo sapien
accagccctccacaacatttaattt

SEQ ID NO: 5674071 - DNA, 25 bp, Homo sapien
agagagccctggtgttaggacccca

SEQ ID NO: 5674072 - DNA, 25 bp, Homo sapien
cacagagagccctggtgttaggacc

SEQ ID NO: 5674073 - DNA, 25 bp, Homo sapien
cagagagccctggtgttaggacccc

SEQ ID NO: 5674074 - DNA, 25 bp, Homo sapien
gacccttggcaaggggctcatttct

SEQ ID NO: 5674075 - DNA, 25 bp, Homo sapien
gagccctggtgttaggaccccagct

SEQ ID NO: 5674076 - DNA, 25 bp, Homo sapien
gagagccctggtgttaggaccccag

SEQ ID NO: 5674077 - DNA, 25 bp, Homo sapien
gggtcctaacaccagggctctctgt

SEQ ID NO: 5674078 - DNA, 25 bp, Homo sapien
cagaaatgagccccttgccaagggt

SEQ ID NO: 5674079 - DNA, 25 bp, Homo sapien
ggtcctaacaccagggctctctgtg

SEQ ID NO: 5674080 - DNA, 25 bp, Homo sapien
gctggggtcctaacaccagggctct

SEQ ID NO: 5674081 - DNA, 25 bp, Homo sapien
gaaatgagccccttgccaagggtca

SEQ ID NO: 5674082 - DNA, 25 bp, Homo sapien
agaaatgagccccttgccaagggtc

SEQ ID NO: 5674083 - DNA, 25 bp, Homo sapien
tctgccttctcaggcggccctggag

SEQ ID NO: 5674084 - DNA, 25 bp, Homo sapien
gatggctttccagaggcaaggaaag

SEQ ID NO: 5674085 - DNA, 25 bp, Homo sapien
tgatggctttccagaggcaaggaaa

SEQ ID NO: 5674086 - DNA, 25 bp, Homo sapien
atggctttccagaggcaaggaaagg

SEQ ID NO: 5674087 - DNA, 25 bp, Homo sapien
ctgatggctttccagaggcaaggaa

SEQ ID NO: 5674088 - DNA, 25 bp, Homo sapien
ctttccttgcctctggaaagccatc

SEQ ID NO: 5674089 - DNA, 25 bp, Homo sapien
cctttccttgcctctggaaagccat

SEQ ID NO: 5674090 - DNA, 25 bp, Homo sapien
tttccttgcctctggaaagccatca

SEQ ID NO: 5674091 - DNA, 25 bp, Homo sapien
ctccagggccgcctgagaaggcaga

SEQ ID NO: 5674092 - DNA, 25 bp, Homo sapien
ttccttgcctctggaaagccatcag

SEQ ID NO: 5674093 - DNA, 25 bp, Homo sapien
tgggagtctcacaacccctccatcc

SEQ ID NO: 5674094 - DNA, 25 bp, Homo sapien
cccccaacaagtcgctgccctcagc

SEQ ID NO: 5674095 - DNA, 25 bp, Homo sapien
ggtgaaggcccccaacaagtcgctg

SEQ ID NO: 5674096 - DNA, 25 bp, Homo sapien
aaggcccccaacaagtcgctgccct

SEQ ID NO: 5674097 - DNA, 25 bp, Homo sapien
tgaaggcccccaacaagtcgctgcc

SEQ ID NO: 5674098 - DNA, 25 bp, Homo sapien
ggcccccaacaagtcgctgccctca

SEQ ID NO: 5674099 - DNA, 25 bp, Homo sapien
gtgaaggcccccaacaagtcgctgc

SEQ ID NO: 5674100 - DNA, 25 bp, Homo sapien
tgagggcagcgacttgttgggggcc

SEQ ID NO: 5674101 - DNA, 25 bp, Homo sapien
gggcagcgacttgttgggggccttc

SEQ ID NO: 5674102 - DNA, 25 bp, Homo sapien
ctgagggcagcgacttgttgggggc

SEQ ID NO: 5674103 - DNA, 25 bp, Homo sapien
gcagcgacttgttgggggccttcac

SEQ ID NO: 5674104 - DNA, 25 bp, Homo sapien
gctgagggcagcgacttgttggggg

SEQ ID NO: 5674105 - DNA, 25 bp, Homo sapien
cagcgacttgttgggggccttcacc

SEQ ID NO: 5674106 - DNA, 25 bp, Homo sapien
ggatggaggggttgtgagactccca

SEQ ID NO: 5674107 - DNA, 25 bp, Homo sapien
atccctagggctgctggagaccaca

SEQ ID NO: 5674108 - DNA, 25 bp, Homo sapien
caacaagtcgctgccctcagccgtg

SEQ ID NO: 5674109 - DNA, 25 bp, Homo sapien
tgggagtctcacaacccctccatcc

SEQ ID NO: 5674110 - DNA, 25 bp, Homo sapien
ggtgaaggcccccaacaagtcgctg

SEQ ID NO: 5674111 - DNA, 25 bp, Homo sapien
gagaccacagtgcagaaggtggccc

SEQ ID NO: 5674112 - DNA, 25 bp, Homo sapien
cctccatccctagggctgctggaga

SEQ ID NO: 5674113 - DNA, 25 bp, Homo sapien
cacggctgagggcagcgacttgttg

SEQ ID NO: 5674114 - DNA, 25 bp, Homo sapien
gggccaccttctgcactgtggtctc

SEQ ID NO: 5674115 - DNA, 25 bp, Homo sapien
tggtctccagcagccctagggatgg

SEQ ID NO: 5674116 - DNA, 25 bp, Homo sapien
tctccagcagccctagggatggagg

SEQ ID NO: 5674117 - DNA, 25 bp, Homo sapien
ggatggaggggttgtgagactccca

SEQ ID NO: 5674118 - DNA, 25 bp, Homo sapien
cagcgacttgttgggggccttcacc

SEQ ID NO: 5674119 - DNA, 25 bp, Homo sapien
gcttggagcttcgggaccacagcag

SEQ ID NO: 5674120 - DNA, 25 bp, Homo sapien
cagcttggagcttcgggaccacagc

SEQ ID NO: 5674121 - DNA, 25 bp, Homo sapien
ccagcttggagcttcgggaccacag

SEQ ID NO: 5674122 - DNA, 25 bp, Homo sapien
agcttggagcttcgggaccacagca

SEQ ID NO: 5674123 - DNA, 25 bp, Homo sapien
ctgtggtcccgaagctccaagctgg

SEQ ID NO: 5674124 - DNA, 25 bp, Homo sapien
ctgctgtggtcccgaagctccaagc

SEQ ID NO: 5674125 - DNA, 25 bp, Homo sapien
gctgtggtcccgaagctccaagctg

SEQ ID NO: 5674126 - DNA, 25 bp, Homo sapien
tgctgtggtcccgaagctccaagct

SEQ ID NO: 5674127 - DNA, 25 bp, Homo sapien
cctgtgccagcttggagcttcggga

SEQ ID NO: 5674128 - DNA, 25 bp, Homo sapien
ccagcttggagcttcgggaccacag

SEQ ID NO: 5674129 - DNA, 25 bp, Homo sapien
ttggagcttcgggaccacagcaggc

SEQ ID NO: 5674130 - DNA, 25 bp, Homo sapien
cgaggataagatgtgagtgtggtgg

SEQ ID NO: 5674131 - DNA, 25 bp, Homo sapien
agcttggagcttcgggaccacagca

SEQ ID NO: 5674132 - DNA, 25 bp, Homo sapien
tactgcatcgaggataagatgtgag

SEQ ID NO: 5674133 - DNA, 25 bp, Homo sapien
aggccccaccacactcacatcttat

SEQ ID NO: 5674134 - DNA, 25 bp, Homo sapien
cactcacatcttatcctcgatgcag

SEQ ID NO: 5674135 - DNA, 25 bp, Homo sapien
ctgtggtcccgaagctccaagctgg

SEQ ID NO: 5674136 - DNA, 25 bp, Homo sapien
tcccgaagctccaagctggcacagg

SEQ ID NO: 5674137 - DNA, 25 bp, Homo sapien
gcctgctgtggtcccgaagctccaa

SEQ ID NO: 5674138 - DNA, 25 bp, Homo sapien
tgctgtggtcccgaagctccaagct

SEQ ID NO: 5674139 - DNA, 25 bp, Homo sapien
ggccagggccatcgatgacaagtac

SEQ ID NO: 5674140 - DNA, 25 bp, Homo sapien
gatgacaagtacagccggagggagg

SEQ ID NO: 5674141 - DNA, 25 bp, Homo sapien
atgacaagtacagccggagggagga

SEQ ID NO: 5674142 - DNA, 25 bp, Homo sapien
cgatgacaagtacagccggagggag

SEQ ID NO: 5674143 - DNA, 25 bp, Homo sapien
tcgatgacaagtacagccggaggga

SEQ ID NO: 5674144 - DNA, 25 bp, Homo sapien
gtacttgtcatcgatggccctggcc

SEQ ID NO: 5674145 - DNA, 25 bp, Homo sapien
tccctccggctgtacttgtcatcga

SEQ ID NO: 5674146 - DNA, 25 bp, Homo sapien
ctccctccggctgtacttgtcatcg

SEQ ID NO: 5674147 - DNA, 25 bp, Homo sapien
cctccctccggctgtacttgtcatc

SEQ ID NO: 5674148 - DNA, 25 bp, Homo sapien
tcctccctccggctgtacttgtcat

SEQ ID NO: 5674149 - DNA, 25 bp, Homo sapien
caagtacagccggagggaggaatac

SEQ ID NO: 5674150 - DNA, 25 bp, Homo sapien
aggcggcagctcctcacactaaggc

SEQ ID NO: 5674151 - DNA, 25 bp, Homo sapien
gggccagggccatcgatgacaagta

SEQ ID NO: 5674152 - DNA, 25 bp, Homo sapien
taaggcctcctctgtctcgggccag

SEQ ID NO: 5674153 - DNA, 25 bp, Homo sapien
acactaaggcctcctctgtctcggg

SEQ ID NO: 5674154 - DNA, 25 bp, Homo sapien
aggcctcctctgtctcgggccaggg

SEQ ID NO: 5674155 - DNA, 25 bp, Homo sapien
cccgagacagaggaggccttagtgt

SEQ ID NO: 5674156 - DNA, 25 bp, Homo sapien
ccctggcccgagacagaggaggcct

SEQ ID NO: 5674157 - DNA, 25 bp, Homo sapien
gtattcctccctccggctgtacttg

SEQ ID NO: 5674158 - DNA, 25 bp, Homo sapien
ctggcccgagacagaggaggcctta

SEQ ID NO: 5674159 - DNA, 25 bp, Homo sapien
tacttgtcatcgatggccctggccc

SEQ ID NO: 5674160 - DNA, 25 bp, Homo sapien
gccttagtgtgaggagctgccgcct

SEQ ID NO: 5674161 - DNA, 25 bp, Homo sapien
gtgaatgccacggatggggaggggg

SEQ ID NO: 5674162 - DNA, 25 bp, Homo sapien
ctggtgaatgccacggatggggagg

SEQ ID NO: 5674163 - DNA, 25 bp, Homo sapien
gggcctggtgaatgccacggatggg

SEQ ID NO: 5674164 - DNA, 25 bp, Homo sapien
cctggtgaatgccacggatggggag

SEQ ID NO: 5674165 - DNA, 25 bp, Homo sapien
tggtgaatgccacggatggggaggg

SEQ ID NO: 5674166 - DNA, 25 bp, Homo sapien
ggcctggtgaatgccacggatgggg

SEQ ID NO: 5674167 - DNA, 25 bp, Homo sapien
ctccccatccgtggcattcaccagg

SEQ ID NO: 5674168 - DNA, 25 bp, Homo sapien
ccctccccatccgtggcattcacca

SEQ ID NO: 5674169 - DNA, 25 bp, Homo sapien
cccatccgtggcattcaccaggccc

SEQ ID NO: 5674170 - DNA, 25 bp, Homo sapien
ccccctccccatccgtggcattcac

SEQ ID NO: 5674171 - DNA, 25 bp, Homo sapien
ccccatccgtggcattcaccaggcc

SEQ ID NO: 5674172 - DNA, 25 bp, Homo sapien
cctccccatccgtggcattcaccag

SEQ ID NO: 5674173 - DNA, 25 bp, Homo sapien
gggcctggtgaatgccacggatggg

SEQ ID NO: 5674174 - DNA, 25 bp, Homo sapien
cctcagggctgaggaaggctgtgcc

SEQ ID NO: 5674175 - DNA, 25 bp, Homo sapien
gaaggctgtgcctcagtttgtctct

SEQ ID NO: 5674176 - DNA, 25 bp, Homo sapien
gaggaaggctgtgcctcagtttgtc

SEQ ID NO: 5674177 - DNA, 25 bp, Homo sapien
tgtgcctcagtttgtctctagtggg

SEQ ID NO: 5674178 - DNA, 25 bp, Homo sapien
cctcagtttgtctctagtgggcaca

SEQ ID NO: 5674179 - DNA, 25 bp, Homo sapien
ctccccatccgtggcattcaccagg

SEQ ID NO: 5674180 - DNA, 25 bp, Homo sapien
tgtgcccactagagacaaactgagg

SEQ ID NO: 5674181 - DNA, 25 bp, Homo sapien
cagccttcctcagccctgagggccc

SEQ ID NO: 5674182 - DNA, 25 bp, Homo sapien
gacaaactgaggcacagccttcctc

SEQ ID NO: 5674183 - DNA, 25 bp, Homo sapien
cactagagacaaactgaggcacagc

SEQ ID NO: 5674184 - DNA, 25 bp, Homo sapien
cccactagagacaaactgaggcaca

SEQ ID NO: 5674185 - DNA, 25 bp, Homo sapien
agggtcagacaggcactcgggacct

SEQ ID NO: 5674186 - DNA, 25 bp, Homo sapien
gggtcagacaggcactcgggacctc

SEQ ID NO: 5674187 - DNA, 25 bp, Homo sapien
ggtcagacaggcactcgggacctct

SEQ ID NO: 5674188 - DNA, 25 bp, Homo sapien
gaggtcccgagtgcctgtctgaccc

SEQ ID NO: 5674189 - DNA, 25 bp, Homo sapien
agaggtcccgagtgcctgtctgacc

SEQ ID NO: 5674190 - DNA, 25 bp, Homo sapien
aggtcccgagtgcctgtctgaccct

SEQ ID NO: 5674191 - DNA, 25 bp, Homo sapien
tcagacaggcactcgggacctctgc

SEQ ID NO: 5674192 - DNA, 25 bp, Homo sapien
tgagcccttcactggctttcctggc

SEQ ID NO: 5674193 - DNA, 25 bp, Homo sapien
cctgcgtgagcccttcactggcttt

SEQ ID NO: 5674194 - DNA, 25 bp, Homo sapien
ctttgcaagcctggcaggagggtca

SEQ ID NO: 5674195 - DNA, 25 bp, Homo sapien
gcagtctctttgcaagcctggcagg

SEQ ID NO: 5674196 - DNA, 25 bp, Homo sapien
ggtcagacaggcactcgggacctct

SEQ ID NO: 5674197 - DNA, 25 bp, Homo sapien
tgaccctcctgccaggcttgcaaag

SEQ ID NO: 5674198 - DNA, 25 bp, Homo sapien
gaaagccagtgaagggctcacgcag

SEQ ID NO: 5674199 - DNA, 25 bp, Homo sapien
agaggtcccgagtgcctgtctgacc

SEQ ID NO: 5674200 - DNA, 25 bp, Homo sapien
ggacaggagggcagaggtcccgagt

SEQ ID NO: 5674201 - DNA, 25 bp, Homo sapien
cctgccaggcttgcaaagagactgc

SEQ ID NO: 5674202 - DNA, 25 bp, Homo sapien
gccaggaaagccagtgaagggctca

SEQ ID NO: 5674203 - DNA, 25 bp, Homo sapien
cagcccctgcgtggcaggtctccag

SEQ ID NO: 5674204 - DNA, 25 bp, Homo sapien
cccctgcgtggcaggtctccaggtt

SEQ ID NO: 5674205 - DNA, 25 bp, Homo sapien
ctgcgtggcaggtctccaggttccc

SEQ ID NO: 5674206 - DNA, 25 bp, Homo sapien
cctgcgtggcaggtctccaggttcc

SEQ ID NO: 5674207 - DNA, 25 bp, Homo sapien
ccctgcgtggcaggtctccaggttc

SEQ ID NO: 5674208 - DNA, 25 bp, Homo sapien
ctggagacctgccacgcaggggctg

SEQ ID NO: 5674209 - DNA, 25 bp, Homo sapien
gaacctggagacctgccacgcaggg

SEQ ID NO: 5674210 - DNA, 25 bp, Homo sapien
aacctggagacctgccacgcagggg

SEQ ID NO: 5674211 - DNA, 25 bp, Homo sapien
gggaacctggagacctgccacgcag

SEQ ID NO: 5674212 - DNA, 25 bp, Homo sapien
ggaacctggagacctgccacgcagg

SEQ ID NO: 5674213 - DNA, 25 bp, Homo sapien
cccctgcgtggcaggtctccaggtt

SEQ ID NO: 5674214 - DNA, 25 bp, Homo sapien
gtggcaggtctccaggttccccatg

SEQ ID NO: 5674215 - DNA, 25 bp, Homo sapien
ctgcgtggcaggtctccaggttccc

SEQ ID NO: 5674216 - DNA, 25 bp, Homo sapien
tctctggggtttgtctccctgcagc

SEQ ID NO: 5674217 - DNA, 25 bp, Homo sapien
aggtctccaggttccccatgctctg

SEQ ID NO: 5674218 - DNA, 25 bp, Homo sapien
cctgcgtggcaggtctccaggttcc

SEQ ID NO: 5674219 - DNA, 25 bp, Homo sapien
cagagcatggggaacctggagacct

SEQ ID NO: 5674220 - DNA, 25 bp, Homo sapien
gggaacctggagacctgccacgcag

SEQ ID NO: 5674221 - DNA, 25 bp, Homo sapien
ggagacaaaccccagagagcaaggg

SEQ ID NO: 5674222 - DNA, 25 bp, Homo sapien
gggctgcagggagacaaaccccaga

SEQ ID NO: 5674223 - DNA, 25 bp, Homo sapien
cagggagacaaaccccagagagcaa

SEQ ID NO: 5674224 - DNA, 25 bp, Homo sapien
gaacctggagacctgccacgcaggg

SEQ ID NO: 5674225 - DNA, 25 bp, Homo sapien
cagcgcatccactagccaagctggt

SEQ ID NO: 5674226 - DNA, 25 bp, Homo sapien
cctgcagggtgccagcgtctgtgct

SEQ ID NO: 5674227 - DNA, 25 bp, Homo sapien
tggcagcgcatccactagccaagct

SEQ ID NO: 5674228 - DNA, 25 bp, Homo sapien
agcgcatccactagccaagctggtc

SEQ ID NO: 5674229 - DNA, 25 bp, Homo sapien
catggcagcgcatccactagccaag

SEQ ID NO: 5674230 - DNA, 25 bp, Homo sapien
gcagcgcatccactagccaagctgg

SEQ ID NO: 5674231 - DNA, 25 bp, Homo sapien
agcttggctagtggatgcgctgcca

SEQ ID NO: 5674232 - DNA, 25 bp, Homo sapien
gaccagcttggctagtggatgcgct

SEQ ID NO: 5674233 - DNA, 25 bp, Homo sapien
ccagcttggctagtggatgcgctgc

SEQ ID NO: 5674234 - DNA, 25 bp, Homo sapien
cagcttggctagtggatgcgctgcc

SEQ ID NO: 5674235 - DNA, 25 bp, Homo sapien
cttggctagtggatgcgctgccatg

SEQ ID NO: 5674236 - DNA, 25 bp, Homo sapien
agcacagacgctggcaccctgcagg

SEQ ID NO: 5674237 - DNA, 25 bp, Homo sapien
attggggtcaatcaacacccgccct

SEQ ID NO: 5674238 - DNA, 25 bp, Homo sapien
tggcattggggtcaatcaacacccg

SEQ ID NO: 5674239 - DNA, 25 bp, Homo sapien
gcattggggtcaatcaacacccgcc

SEQ ID NO: 5674240 - DNA, 25 bp, Homo sapien
ggcattggggtcaatcaacacccgc

SEQ ID NO: 5674241 - DNA, 25 bp, Homo sapien
ttggggtcaatcaacacccgccctg

SEQ ID NO: 5674242 - DNA, 25 bp, Homo sapien
cattggggtcaatcaacacccgccc

SEQ ID NO: 5674243 - DNA, 25 bp, Homo sapien
caacacccgccctgttattatacac

SEQ ID NO: 5674244 - DNA, 25 bp, Homo sapien
acacccgccctgttattatacacct

SEQ ID NO: 5674245 - DNA, 25 bp, Homo sapien
aggtgtataataacagggcgggtgt

SEQ ID NO: 5674246 - DNA, 25 bp, Homo sapien
gtgtataataacagggcgggtgttg

SEQ ID NO: 5674247 - DNA, 25 bp, Homo sapien
cgggtgttgattgaccccaatgcca

SEQ ID NO: 5674248 - DNA, 25 bp, Homo sapien
agggcgggtgttgattgaccccaat

SEQ ID NO: 5674249 - DNA, 25 bp, Homo sapien
ggcgggtgttgattgaccccaatgc

SEQ ID NO: 5674250 - DNA, 25 bp, Homo sapien
gggcgggtgttgattgaccccaatg

SEQ ID NO: 5674251 - DNA, 25 bp, Homo sapien
cagggcgggtgttgattgaccccaa

SEQ ID NO: 5674252 - DNA, 25 bp, Homo sapien
gcgggtgttgattgaccccaatgcc

SEQ ID NO: 5674253 - DNA, 25 bp, Homo sapien
ccaggcctggcattggggtcaatca

SEQ ID NO: 5674254 - DNA, 25 bp, Homo sapien
caccttgtgggcacaggtggctccg

SEQ ID NO: 5674255 - DNA, 25 bp, Homo sapien
tcaacacccgccctgttattataca

SEQ ID NO: 5674256 - DNA, 25 bp, Homo sapien
ttattatacaccttgtgggcacagg

SEQ ID NO: 5674257 - DNA, 25 bp, Homo sapien
ggcattggggtcaatcaacacccgc

SEQ ID NO: 5674258 - DNA, 25 bp, Homo sapien
ttggggtcaatcaacacccgccctg

SEQ ID NO: 5674259 - DNA, 25 bp, Homo sapien
agccaagtttaacagcttttgaaag

SEQ ID NO: 5674260 - DNA, 25 bp, Homo sapien
ccagccaagtttaacagcttttgaa

SEQ ID NO: 5674261 - DNA, 25 bp, Homo sapien
cccagccaagtttaacagcttttga

SEQ ID NO: 5674262 - DNA, 25 bp, Homo sapien
cagccaagtttaacagcttttgaaa

SEQ ID NO: 5674263 - DNA, 25 bp, Homo sapien
ttcaaaagctgttaaacttggctgg

SEQ ID NO: 5674264 - DNA, 25 bp, Homo sapien
tcaaaagctgttaaacttggctggg

SEQ ID NO: 5674265 - DNA, 25 bp, Homo sapien
ctttcaaaagctgttaaacttggct

SEQ ID NO: 5674266 - DNA, 25 bp, Homo sapien
tttcaaaagctgttaaacttggctg

SEQ ID NO: 5674267 - DNA, 25 bp, Homo sapien
agccaagtttaacagcttttgaaag

SEQ ID NO: 5674268 - DNA, 25 bp, Homo sapien
ccagccaagtttaacagcttttgaa

SEQ ID NO: 5674269 - DNA, 25 bp, Homo sapien
cacacccagccaagtttaacagctt

SEQ ID NO: 5674270 - DNA, 25 bp, Homo sapien
cccagccaagtttaacagcttttga

SEQ ID NO: 5674271 - DNA, 25 bp, Homo sapien
cagccaagtttaacagcttttgaaa

SEQ ID NO: 5674272 - DNA, 25 bp, Homo sapien
caagtttaacagcttttgaaagtct

SEQ ID NO: 5674273 - DNA, 25 bp, Homo sapien
aagctgttaaacttggctgggtgtg

SEQ ID NO: 5674274 - DNA, 25 bp, Homo sapien
agactttcaaaagctgttaaacttg

SEQ ID NO: 5674275 - DNA, 25 bp, Homo sapien
ttcaaaagctgttaaacttggctgg

SEQ ID NO: 5674276 - DNA, 25 bp, Homo sapien
ctttcaaaagctgttaaacttggct

SEQ ID NO: 5674277 - DNA, 25 bp, Homo sapien
tcaaaagctgttaaacttggctggg

SEQ ID NO: 5674278 - DNA, 25 bp, Homo sapien
tttcaaaagctgttaaacttggctg

SEQ ID NO: 5674279 - DNA, 25 bp, Homo sapien
actaccacacccaggtgattttttg

SEQ ID NO: 5674280 - DNA, 25 bp, Homo sapien
ccactaccacacccaggtgattttt

SEQ ID NO: 5674281 - DNA, 25 bp, Homo sapien
cccactaccacacccaggtgatttt

SEQ ID NO: 5674282 - DNA, 25 bp, Homo sapien
gcccactaccacacccaggtgattt

SEQ ID NO: 5674283 - DNA, 25 bp, Homo sapien
ctaccacacccaggtgattttttgt

SEQ ID NO: 5674284 - DNA, 25 bp, Homo sapien
cactaccacacccaggtgatttttt

SEQ ID NO: 5674285 - DNA, 25 bp, Homo sapien
caaaaaatcacctgggtgtggtagt

SEQ ID NO: 5674286 - DNA, 25 bp, Homo sapien
aaaaaatcacctgggtgtggtagtg

SEQ ID NO: 5674287 - DNA, 25 bp, Homo sapien
acaaaaaatcacctgggtgtggtag

SEQ ID NO: 5674288 - DNA, 25 bp, Homo sapien
aaaaatcacctgggtgtggtagtgg

SEQ ID NO: 5674289 - DNA, 25 bp, Homo sapien
aaaatcacctgggtgtggtagtggg

SEQ ID NO: 5674290 - DNA, 25 bp, Homo sapien
aaatcacctgggtgtggtagtgggc

SEQ ID NO: 5674291 - DNA, 25 bp, Homo sapien
tggagtgctgtggcacgatcttggc

SEQ ID NO: 5674292 - DNA, 25 bp, Homo sapien
ctggagtgctgtggcacgatcttgg

SEQ ID NO: 5674293 - DNA, 25 bp, Homo sapien
tcttggctcaactgcaacctccgcc

SEQ ID NO: 5674294 - DNA, 25 bp, Homo sapien
ccagatttaagcgattcccctgcct

SEQ ID NO: 5674295 - DNA, 25 bp, Homo sapien
tcccagatttaagcgattcccctgc

SEQ ID NO: 5674296 - DNA, 25 bp, Homo sapien
cccagatttaagcgattcccctgcc

SEQ ID NO: 5674297 - DNA, 25 bp, Homo sapien
aggcaggggaatcgcttaaatctgg

SEQ ID NO: 5674298 - DNA, 25 bp, Homo sapien
ggcggaggttgcagttgagccaaga

SEQ ID NO: 5674299 - DNA, 25 bp, Homo sapien
gccaagatcgtgccacagcactcca

SEQ ID NO: 5674300 - DNA, 25 bp, Homo sapien
ggcaggggaatcgcttaaatctggg

SEQ ID NO: 5674301 - DNA, 25 bp, Homo sapien
gcaggggaatcgcttaaatctggga

SEQ ID NO: 5674302 - DNA, 25 bp, Homo sapien
ccaagatcgtgccacagcactccag

SEQ ID NO: 5674303 - DNA, 25 bp, Homo sapien
ggtagcttgagtaattttgctcttg

SEQ ID NO: 5674304 - DNA, 25 bp, Homo sapien
tagcttgagtaattttgctcttgat

SEQ ID NO: 5674305 - DNA, 25 bp, Homo sapien
agtaattttgctcttgattgactcc

SEQ ID NO: 5674306 - DNA, 25 bp, Homo sapien
attggtagcttgagtaattttgctc

SEQ ID NO: 5674307 - DNA, 25 bp, Homo sapien
ctggattggtagcttgagtaatttt

SEQ ID NO: 5674308 - DNA, 25 bp, Homo sapien
ggattggtagcttgagtaattttgc

SEQ ID NO: 5674309 - DNA, 25 bp, Homo sapien
ggagtcaatcaagagcaaaattact

SEQ ID NO: 5674310 - DNA, 25 bp, Homo sapien
tcaagagcaaaattactcaagctac

SEQ ID NO: 5674311 - DNA, 25 bp, Homo sapien
gcaaaattactcaagctaccaatcc

SEQ ID NO: 5674312 - DNA, 25 bp, Homo sapien
aaaattactcaagctaccaatccag

SEQ ID NO: 5674313 - DNA, 25 bp, Homo sapien
gagcaaaattactcaagctaccaat

SEQ ID NO: 5674314 - DNA, 25 bp, Homo sapien
caatcaagagcaaaattactcaagc

SEQ ID NO: 5674315 - DNA, 25 bp, Homo sapien
agaaagccctaatgccttccctctc

SEQ ID NO: 5674316 - DNA, 25 bp, Homo sapien
ctcctccactcccaatgccttttta

SEQ ID NO: 5674317 - DNA, 25 bp, Homo sapien
tctcctccactcccaatgccttttt

SEQ ID NO: 5674318 - DNA, 25 bp, Homo sapien
gagagggaaggcattagggctttct

SEQ ID NO: 5674319 - DNA, 25 bp, Homo sapien
taaaaaggcattgggagtggaggag

SEQ ID NO: 5674320 - DNA, 25 bp, Homo sapien
aaaaaggcattgggagtggaggaga

SEQ ID NO: 5674321 - DNA, 25 bp, Homo sapien
taaaagtgatgatggatgtggcatc

SEQ ID NO: 5674322 - DNA, 25 bp, Homo sapien
gatagaaagccctaatgccttccct

SEQ ID NO: 5674323 - DNA, 25 bp, Homo sapien
gatgtggcatcttggcctctcagaa

SEQ ID NO: 5674324 - DNA, 25 bp, Homo sapien
ggagtccagatagaaagccctaatg

SEQ ID NO: 5674325 - DNA, 25 bp, Homo sapien
ggcatcttggcctctcagaaaccag

SEQ ID NO: 5674326 - DNA, 25 bp, Homo sapien
cactcccaatgcctttttaaaagtg

SEQ ID NO: 5674327 - DNA, 25 bp, Homo sapien
gagggaaggcattagggctttctat

SEQ ID NO: 5674328 - DNA, 25 bp, Homo sapien
cacttttaaaaaggcattgggagtg

SEQ ID NO: 5674329 - DNA, 25 bp, Homo sapien
ctggtttctgagaggccaagatgcc

SEQ ID NO: 5674330 - DNA, 25 bp, Homo sapien
tctgagaggccaagatgccacatcc

SEQ ID NO: 5674331 - DNA, 25 bp, Homo sapien
cattagggctttctatctggactcc

SEQ ID NO: 5674332 - DNA, 25 bp, Homo sapien
gatgccacatccatcatcactttta

SEQ ID NO: 5674333 - DNA, 25 bp, Homo sapien
accttaggtgatctgcccgccttgg

SEQ ID NO: 5674334 - DNA, 25 bp, Homo sapien
cttaggtgatctgcccgccttggcc

SEQ ID NO: 5674335 - DNA, 25 bp, Homo sapien
ttaggtgatctgcccgccttggcct

SEQ ID NO: 5674336 - DNA, 25 bp, Homo sapien
ccttaggtgatctgcccgccttggc

SEQ ID NO: 5674337 - DNA, 25 bp, Homo sapien
gaccttaggtgatctgcccgccttg

SEQ ID NO: 5674338 - DNA, 25 bp, Homo sapien
taggtgatctgcccgccttggcctc

SEQ ID NO: 5674339 - DNA, 25 bp, Homo sapien
caaggcgggcagatcacctaaggtc

SEQ ID NO: 5674340 - DNA, 25 bp, Homo sapien
ccaaggcgggcagatcacctaaggt

SEQ ID NO: 5674341 - DNA, 25 bp, Homo sapien
gccaaggcgggcagatcacctaagg

SEQ ID NO: 5674342 - DNA, 25 bp, Homo sapien
gaggccaaggcgggcagatcaccta

SEQ ID NO: 5674343 - DNA, 25 bp, Homo sapien
ggccaaggcgggcagatcacctaag

SEQ ID NO: 5674344 - DNA, 25 bp, Homo sapien
aggccaaggcgggcagatcacctaa

SEQ ID NO: 5674345 - DNA, 25 bp, Homo sapien
cctctgttagactctttatttttat

SEQ ID NO: 5674346 - DNA, 25 bp, Homo sapien
tggcctctgttagactctttatttt

SEQ ID NO: 5674347 - DNA, 25 bp, Homo sapien
gcctggcctctgttagactctttat

SEQ ID NO: 5674348 - DNA, 25 bp, Homo sapien
cctggcctctgttagactctttatt

SEQ ID NO: 5674349 - DNA, 25 bp, Homo sapien
gcctctgttagactctttattttta

SEQ ID NO: 5674350 - DNA, 25 bp, Homo sapien
ctggcctctgttagactctttattt

SEQ ID NO: 5674351 - DNA, 25 bp, Homo sapien
ataaagagtctaacagaggccaggc

SEQ ID NO: 5674352 - DNA, 25 bp, Homo sapien
taaaaataaagagtctaacagaggc

SEQ ID NO: 5674353 - DNA, 25 bp, Homo sapien
aataaagagtctaacagaggccagg

SEQ ID NO: 5674354 - DNA, 25 bp, Homo sapien
aataaaaataaagagtctaacagag

SEQ ID NO: 5674355 - DNA, 25 bp, Homo sapien
aaataaagagtctaacagaggccag

SEQ ID NO: 5674356 - DNA, 25 bp, Homo sapien
aaaataaagagtctaacagaggcca

SEQ ID NO: 5674357 - DNA, 25 bp, Homo sapien
tgggactacaggcaccctccaccat

SEQ ID NO: 5674358 - DNA, 25 bp, Homo sapien
gattcttctgcctcagactcccgag

SEQ ID NO: 5674359 - DNA, 25 bp, Homo sapien
cgcctccggggttcaagcgattctt

SEQ ID NO: 5674360 - DNA, 25 bp, Homo sapien
ctccggggttcaagcgattcttctg

SEQ ID NO: 5674361 - DNA, 25 bp, Homo sapien
gggactacaggcaccctccaccatg

SEQ ID NO: 5674362 - DNA, 25 bp, Homo sapien
gcctccggggttcaagcgattcttc

SEQ ID NO: 5674363 - DNA, 25 bp, Homo sapien
cagaagaatcgcttgaaccccggag

SEQ ID NO: 5674364 - DNA, 25 bp, Homo sapien
gaagaatcgcttgaaccccggaggc

SEQ ID NO: 5674365 - DNA, 25 bp, Homo sapien
atggtggagggtgcctgtagtccca

SEQ ID NO: 5674366 - DNA, 25 bp, Homo sapien
aagaatcgcttgaaccccggaggcg

SEQ ID NO: 5674367 - DNA, 25 bp, Homo sapien
ctcgggagtctgaggcagaagaatc

SEQ ID NO: 5674368 - DNA, 25 bp, Homo sapien
catggtggagggtgcctgtagtccc

SEQ ID NO: 5674369 - DNA, 25 bp, Homo sapien
cagaagatccctaagatagttcacc

SEQ ID NO: 5674370 - DNA, 25 bp, Homo sapien
tcttcacagaagatccctaagatag

SEQ ID NO: 5674371 - DNA, 25 bp, Homo sapien
agatccctaagatagttcaccagtc

SEQ ID NO: 5674372 - DNA, 25 bp, Homo sapien
gaagatccctaagatagttcaccag

SEQ ID NO: 5674373 - DNA, 25 bp, Homo sapien
tgaggtagtgctatgcccataagga

SEQ ID NO: 5674374 - DNA, 25 bp, Homo sapien
cacagaagatccctaagatagttca

SEQ ID NO: 5674375 - DNA, 25 bp, Homo sapien
gactggtgaactatcttagggatct

SEQ ID NO: 5674376 - DNA, 25 bp, Homo sapien
ggtgaactatcttagggatcttctg

SEQ ID NO: 5674377 - DNA, 25 bp, Homo sapien
tagggatcttctgtgaagatcccaa

SEQ ID NO: 5674378 - DNA, 25 bp, Homo sapien
tccttatgggcatagcactacctca

SEQ ID NO: 5674379 - DNA, 25 bp, Homo sapien
ctatcttagggatcttctgtgaaga

SEQ ID NO: 5674380 - DNA, 25 bp, Homo sapien
aactatcttagggatcttctgtgaa

SEQ ID NO: 5674381 - DNA, 25 bp, Homo sapien
tgtcgcccaggagtgcagtggcgcg

SEQ ID NO: 5674382 - DNA, 25 bp, Homo sapien
ctcagctcatggcaagctctgcctc

SEQ ID NO: 5674383 - DNA, 25 bp, Homo sapien
tcagctcatggcaagctctgcctcc

SEQ ID NO: 5674384 - DNA, 25 bp, Homo sapien
atctcagctcatggcaagctctgcc

SEQ ID NO: 5674385 - DNA, 25 bp, Homo sapien
gaggcagagcttgccatgagctgag

SEQ ID NO: 5674386 - DNA, 25 bp, Homo sapien
ggcagagcttgccatgagctgagat

SEQ ID NO: 5674387 - DNA, 25 bp, Homo sapien
cgcgccactgcactcctgggcgaca

SEQ ID NO: 5674388 - DNA, 25 bp, Homo sapien
ggaggcagagcttgccatgagctga

SEQ ID NO: 5674389 - DNA, 25 bp, Homo sapien
gcccagcctcttttggttattttca

SEQ ID NO: 5674390 - DNA, 25 bp, Homo sapien
tgaaaataaccaaaagaggctgggc

SEQ ID NO: 5674391 - DNA, 25 bp, Homo sapien
gccttagcctctcaaaagtgctgga

SEQ ID NO: 5674392 - DNA, 25 bp, Homo sapien
ctacttgccttagcctctcaaaagt

SEQ ID NO: 5674393 - DNA, 25 bp, Homo sapien
aattacaagtatgagtcaccacgcc

SEQ ID NO: 5674394 - DNA, 25 bp, Homo sapien
gaattacaagtatgagtcaccacgc

SEQ ID NO: 5674395 - DNA, 25 bp, Homo sapien
ggaattacaagtatgagtcaccacg

SEQ ID NO: 5674396 - DNA, 25 bp, Homo sapien
gcccagcctcttttggttattttca

SEQ ID NO: 5674397 - DNA, 25 bp, Homo sapien
cgtggtgactcatacttgtaattcc

SEQ ID NO: 5674398 - DNA, 25 bp, Homo sapien
acttttgagaggctaaggcaagtag

SEQ ID NO: 5674399 - DNA, 25 bp, Homo sapien
tccagcacttttgagaggctaaggc

SEQ ID NO: 5674400 - DNA, 25 bp, Homo sapien
ggcgtggtgactcatacttgtaatt

SEQ ID NO: 5674401 - DNA, 25 bp, Homo sapien
gcgtggtgactcatacttgtaattc

SEQ ID NO: 5674402 - DNA, 25 bp, Homo sapien
tgaaaataaccaaaagaggctgggc

SEQ ID NO: 5674403 - DNA, 25 bp, Homo sapien
acgagccaccacgctgtctggagat

SEQ ID NO: 5674404 - DNA, 25 bp, Homo sapien
atctccagacagcgtggtggctcgt

SEQ ID NO: 5674405 - DNA, 25 bp, Homo sapien
ccatgttgcataggctgttcttgag

SEQ ID NO: 5674406 - DNA, 25 bp, Homo sapien
tttagccatgttgcataggctgttc

SEQ ID NO: 5674407 - DNA, 25 bp, Homo sapien
gctgttcttgagctcctaggcccaa

SEQ ID NO: 5674408 - DNA, 25 bp, Homo sapien
tcttgagctcctaggcccaagctgt

SEQ ID NO: 5674409 - DNA, 25 bp, Homo sapien
agccaccacgctgtctggagatggg

SEQ ID NO: 5674410 - DNA, 25 bp, Homo sapien
ggcacgagccaccacgctgtctgga

SEQ ID NO: 5674411 - DNA, 25 bp, Homo sapien
aaccccatctccagacagcgtggtg

SEQ ID NO: 5674412 - DNA, 25 bp, Homo sapien
cagcttgggcctaggagctcaagaa

SEQ ID NO: 5674413 - DNA, 25 bp, Homo sapien
gaacagcctatgcaacatggctaaa

SEQ ID NO: 5674414 - DNA, 25 bp, Homo sapien
atggctaaaccccatctccagacag

SEQ ID NO: 5674415 - DNA, 25 bp, Homo sapien
taggagctcaagaacagcctatgca

SEQ ID NO: 5674416 - DNA, 25 bp, Homo sapien
tctccagacagcgtggtggctcgtg

SEQ ID NO: 5674417 - DNA, 25 bp, Homo sapien
attttagtaattttagtagagatga

SEQ ID NO: 5674418 - DNA, 25 bp, Homo sapien
tcatctctactaaaattactaaaat

SEQ ID NO: 5674419 - DNA, 25 bp, Homo sapien
tgggactataggtgcacaccactgc

SEQ ID NO: 5674420 - DNA, 25 bp, Homo sapien
gatctcgactcatcacaacctccac

SEQ ID NO: 5674421 - DNA, 25 bp, Homo sapien
ttgcgatctcgactcatcacaacct

SEQ ID NO: 5674422 - DNA, 25 bp, Homo sapien
cgactcatcacaacctccacctcct

SEQ ID NO: 5674423 - DNA, 25 bp, Homo sapien
tattgcgatctcgactcatcacaac

SEQ ID NO: 5674424 - DNA, 25 bp, Homo sapien
attgcgatctcgactcatcacaacc

SEQ ID NO: 5674425 - DNA, 25 bp, Homo sapien
ggttgtgatgagtcgagatcgcaat

SEQ ID NO: 5674426 - DNA, 25 bp, Homo sapien
tggaggttgtgatgagtcgagatcg

SEQ ID NO: 5674427 - DNA, 25 bp, Homo sapien
aggttgtgatgagtcgagatcgcaa

SEQ ID NO: 5674428 - DNA, 25 bp, Homo sapien
gttgtgatgagtcgagatcgcaata

SEQ ID NO: 5674429 - DNA, 25 bp, Homo sapien
gcagtggtgtgcacctatagtccca

SEQ ID NO: 5674430 - DNA, 25 bp, Homo sapien
ggaggtggaggttgtgatgagtcga

SEQ ID NO: 5674431 - DNA, 25 bp, Homo sapien
gtattgcgatctcgactcatcacaa

SEQ ID NO: 5674432 - DNA, 25 bp, Homo sapien
ttgtgatgagtcgagatcgcaatac

SEQ ID NO: 5674433 - DNA, 25 bp, Homo sapien
gatctcgactcatcacaacctccac

SEQ ID NO: 5674434 - DNA, 25 bp, Homo sapien
ttgcgatctcgactcatcacaacct

SEQ ID NO: 5674435 - DNA, 25 bp, Homo sapien
cgactcatcacaacctccacctcct

SEQ ID NO: 5674436 - DNA, 25 bp, Homo sapien
gtattgcgatctcgactcatcacaa

SEQ ID NO: 5674437 - DNA, 25 bp, Homo sapien
tattgcgatctcgactcatcacaac

SEQ ID NO: 5674438 - DNA, 25 bp, Homo sapien
attgcgatctcgactcatcacaacc

SEQ ID NO: 5674439 - DNA, 25 bp, Homo sapien
tggaggttgtgatgagtcgagatcg

SEQ ID NO: 5674440 - DNA, 25 bp, Homo sapien
aggttgtgatgagtcgagatcgcaa

SEQ ID NO: 5674441 - DNA, 25 bp, Homo sapien
gttgtgatgagtcgagatcgcaata

SEQ ID NO: 5674442 - DNA, 25 bp, Homo sapien
ttgtgatgagtcgagatcgcaatac

SEQ ID NO: 5674443 - DNA, 25 bp, Homo sapien
ggaggtggaggttgtgatgagtcga

SEQ ID NO: 5674444 - DNA, 25 bp, Homo sapien
ggttgtgatgagtcgagatcgcaat

SEQ ID NO: 5674445 - DNA, 25 bp, Homo sapien
taccttgaatcctggactccagtga

SEQ ID NO: 5674446 - DNA, 25 bp, Homo sapien
actgctaccttgaatcctggactcc

SEQ ID NO: 5674447 - DNA, 25 bp, Homo sapien
gctcactgctaccttgaatcctgga

SEQ ID NO: 5674448 - DNA, 25 bp, Homo sapien
tgcagtagtagcgtgatcatagctc

SEQ ID NO: 5674449 - DNA, 25 bp, Homo sapien
gaatcctggactccagtgatcctcc

SEQ ID NO: 5674450 - DNA, 25 bp, Homo sapien
gctaccttgaatcctggactccagt

SEQ ID NO: 5674451 - DNA, 25 bp, Homo sapien
tccaggattcaaggtagcagtgagc

SEQ ID NO: 5674452 - DNA, 25 bp, Homo sapien
actggagtccaggattcaaggtagc

SEQ ID NO: 5674453 - DNA, 25 bp, Homo sapien
tcactggagtccaggattcaaggta

SEQ ID NO: 5674454 - DNA, 25 bp, Homo sapien
ggagtccaggattcaaggtagcagt

SEQ ID NO: 5674455 - DNA, 25 bp, Homo sapien
ggaggatcactggagtccaggattc

SEQ ID NO: 5674456 - DNA, 25 bp, Homo sapien
gagctatgatcacgctactactgca

SEQ ID NO: 5674457 - DNA, 25 bp, Homo sapien
cacccgccccggccttcacagtgct

SEQ ID NO: 5674458 - DNA, 25 bp, Homo sapien
acccgccccggccttcacagtgctg

SEQ ID NO: 5674459 - DNA, 25 bp, Homo sapien
agcactgtgaaggccggggcgggtg

SEQ ID NO: 5674460 - DNA, 25 bp, Homo sapien
cagcactgtgaaggccggggcgggt

SEQ ID NO: 5674461 - DNA, 25 bp, Homo sapien
acccgccccggccttcacagtgctg

SEQ ID NO: 5674462 - DNA, 25 bp, Homo sapien
cccgccccggccttcacagtgctgg

SEQ ID NO: 5674463 - DNA, 25 bp, Homo sapien
ctcccaactcccgacctgaggtgat

SEQ ID NO: 5674464 - DNA, 25 bp, Homo sapien
ttatgctggtctcccaactcccgac

SEQ ID NO: 5674465 - DNA, 25 bp, Homo sapien
gccccggccttcacagtgctgggat

SEQ ID NO: 5674466 - DNA, 25 bp, Homo sapien
gaaccactgcgcctggcaatctttt

SEQ ID NO: 5674467 - DNA, 25 bp, Homo sapien
gtcgggagttgggagaccagcataa

SEQ ID NO: 5674468 - DNA, 25 bp, Homo sapien
atcacctcaggtcgggagttgggag

SEQ ID NO: 5674469 - DNA, 25 bp, Homo sapien
cagcactgtgaaggccggggcgggt

SEQ ID NO: 5674470 - DNA, 25 bp, Homo sapien
atcccagcactgtgaaggccggggc

SEQ ID NO: 5674471 - DNA, 25 bp, Homo sapien
aaaagattgccaggcgcagtggttc

SEQ ID NO: 5674472 - DNA, 25 bp, Homo sapien
ccagcactgtgaaggccggggcggg

SEQ ID NO: 5674473 - DNA, 25 bp, Homo sapien
ctcaaactcctgatccacctgcctc

SEQ ID NO: 5674474 - DNA, 25 bp, Homo sapien
ccactgcacctggtctatttatttt

SEQ ID NO: 5674475 - DNA, 25 bp, Homo sapien
actgcacctggtctatttattttta

SEQ ID NO: 5674476 - DNA, 25 bp, Homo sapien
tacaggcctgatgagccactgcacc

SEQ ID NO: 5674477 - DNA, 25 bp, Homo sapien
tgcacctggtctatttatttttatt

SEQ ID NO: 5674478 - DNA, 25 bp, Homo sapien
gctgagattacaggcctgatgagcc

SEQ ID NO: 5674479 - DNA, 25 bp, Homo sapien
taaaaataaatagaccaggtgcagt

SEQ ID NO: 5674480 - DNA, 25 bp, Homo sapien
gaggcaggtggatcaggagtttgag

SEQ ID NO: 5674481 - DNA, 25 bp, Homo sapien
aataaaaataaatagaccaggtgca

SEQ ID NO: 5674482 - DNA, 25 bp, Homo sapien
ggctcatcaggcctgtaatctcagc

SEQ ID NO: 5674483 - DNA, 25 bp, Homo sapien
ggtgcagtggctcatcaggcctgta

SEQ ID NO: 5674484 - DNA, 25 bp, Homo sapien
aaaataaatagaccaggtgcagtgg

SEQ ID NO: 5674485 - DNA, 25 bp, Homo sapien
gacagacttttgctcttgtcacgca

SEQ ID NO: 5674486 - DNA, 25 bp, Homo sapien
catggttgtatgctgttttgtttta

SEQ ID NO: 5674487 - DNA, 25 bp, Homo sapien
tggttgtatgctgttttgttttatt

SEQ ID NO: 5674488 - DNA, 25 bp, Homo sapien
agacttttgctcttgtcacgcaggc

SEQ ID NO: 5674489 - DNA, 25 bp, Homo sapien
cagacttttgctcttgtcacgcagg

SEQ ID NO: 5674490 - DNA, 25 bp, Homo sapien
atggttgtatgctgttttgttttat

SEQ ID NO: 5674491 - DNA, 25 bp, Homo sapien
cctgcgtgacaagagcaaaagtctg

SEQ ID NO: 5674492 - DNA, 25 bp, Homo sapien
taaataaaacaaaacagcatacaac

SEQ ID NO: 5674493 - DNA, 25 bp, Homo sapien
ataaaacaaaacagcatacaaccat

SEQ ID NO: 5674494 - DNA, 25 bp, Homo sapien
aaaacaaaacagcatacaaccatga

SEQ ID NO: 5674495 - DNA, 25 bp, Homo sapien
taaaacaaaacagcatacaaccatg

SEQ ID NO: 5674496 - DNA, 25 bp, Homo sapien
aataaaacaaaacagcatacaacca

SEQ ID NO: 5674497 - DNA, 25 bp, Homo sapien
accaaaagtggcgacagtcaattta

SEQ ID NO: 5674498 - DNA, 25 bp, Homo sapien
ttcaccaaaagtggcgacagtcaat

SEQ ID NO: 5674499 - DNA, 25 bp, Homo sapien
tggcgacagtcaatttattcaaatt

SEQ ID NO: 5674500 - DNA, 25 bp, Homo sapien
aagtggcgacagtcaatttattcaa

SEQ ID NO: 5674501 - DNA, 25 bp, Homo sapien
caaaagtggcgacagtcaatttatt

SEQ ID NO: 5674502 - DNA, 25 bp, Homo sapien
tattcaccaaaagtggcgacagtca

SEQ ID NO: 5674503 - DNA, 25 bp, Homo sapien
aatttgaataaattgactgtcgcca

SEQ ID NO: 5674504 - DNA, 25 bp, Homo sapien
attgactgtcgccacttttggtgaa

SEQ ID NO: 5674505 - DNA, 25 bp, Homo sapien
tgaataaattgactgtcgccacttt

SEQ ID NO: 5674506 - DNA, 25 bp, Homo sapien
tttgaataaattgactgtcgccact

SEQ ID NO: 5674507 - DNA, 25 bp, Homo sapien
tgactgtcgccacttttggtgaata

SEQ ID NO: 5674508 - DNA, 25 bp, Homo sapien
taaattgactgtcgccacttttggt

SEQ ID NO: 5674509 - DNA, 25 bp, Homo sapien
cttagccaagtatggtggcatgtac

SEQ ID NO: 5674510 - DNA, 25 bp, Homo sapien
caagtatggtggcatgtacctgtaa

SEQ ID NO: 5674511 - DNA, 25 bp, Homo sapien
agccaagtatggtggcatgtacctg

SEQ ID NO: 5674512 - DNA, 25 bp, Homo sapien
tagccaagtatggtggcatgtacct

SEQ ID NO: 5674513 - DNA, 25 bp, Homo sapien
acttagccaagtatggtggcatgta

SEQ ID NO: 5674514 - DNA, 25 bp, Homo sapien
ttagccaagtatggtggcatgtacc

SEQ ID NO: 5674515 - DNA, 25 bp, Homo sapien
tacatgccaccatacttggctaagt

SEQ ID NO: 5674516 - DNA, 25 bp, Homo sapien
caggtacatgccaccatacttggct

SEQ ID NO: 5674517 - DNA, 25 bp, Homo sapien
aggtacatgccaccatacttggcta

SEQ ID NO: 5674518 - DNA, 25 bp, Homo sapien
ggtacatgccaccatacttggctaa

SEQ ID NO: 5674519 - DNA, 25 bp, Homo sapien
gtacatgccaccatacttggctaag

SEQ ID NO: 5674520 - DNA, 25 bp, Homo sapien
ttacaggtacatgccaccatacttg

SEQ ID NO: 5674521 - DNA, 25 bp, Homo sapien
acacactgctgcgcttggttaattt

SEQ ID NO: 5674522 - DNA, 25 bp, Homo sapien
ggcacacactgctgcgcttggttaa

SEQ ID NO: 5674523 - DNA, 25 bp, Homo sapien
cacactgctgcgcttggttaatttt

SEQ ID NO: 5674524 - DNA, 25 bp, Homo sapien
cacacactgctgcgcttggttaatt

SEQ ID NO: 5674525 - DNA, 25 bp, Homo sapien
ttaaccaagcgcagcagtgtgtgcc

SEQ ID NO: 5674526 - DNA, 25 bp, Homo sapien
aattaaccaagcgcagcagtgtgtg

SEQ ID NO: 5674527 - DNA, 25 bp, Homo sapien
aaattaaccaagcgcagcagtgtgt

SEQ ID NO: 5674528 - DNA, 25 bp, Homo sapien
aaaattaaccaagcgcagcagtgtg

SEQ ID NO: 5674529 - DNA, 25 bp, Homo sapien
ctgctgcgcttggttaatttttata

SEQ ID NO: 5674530 - DNA, 25 bp, Homo sapien
tcagtccccacccagtagttggtac

SEQ ID NO: 5674531 - DNA, 25 bp, Homo sapien
ccccacccagtagttggtactacag

SEQ ID NO: 5674532 - DNA, 25 bp, Homo sapien
ggcacacactgctgcgcttggttaa

SEQ ID NO: 5674533 - DNA, 25 bp, Homo sapien
cacactgctgcgcttggttaatttt

SEQ ID NO: 5674534 - DNA, 25 bp, Homo sapien
atctcagtccccacccagtagttgg

SEQ ID NO: 5674535 - DNA, 25 bp, Homo sapien
ttaaccaagcgcagcagtgtgtgcc

SEQ ID NO: 5674536 - DNA, 25 bp, Homo sapien
gcctgtagtaccaactactgggtgg

SEQ ID NO: 5674537 - DNA, 25 bp, Homo sapien
taaaaattaaccaagcgcagcagtg

SEQ ID NO: 5674538 - DNA, 25 bp, Homo sapien
ccaactactgggtggggactgagat

SEQ ID NO: 5674539 - DNA, 25 bp, Homo sapien
tataaaaattaaccaagcgcagcag

SEQ ID NO: 5674540 - DNA, 25 bp, Homo sapien
aaaattaaccaagcgcagcagtgtg

SEQ ID NO: 5674541 - DNA, 25 bp, Homo sapien
tataattcttgagggaaaaaactgc

SEQ ID NO: 5674542 - DNA, 25 bp, Homo sapien
ctgcctccagagcaaaacattttgt

SEQ ID NO: 5674543 - DNA, 25 bp, Homo sapien
tgagggaaaaaactgcctccagagc

SEQ ID NO: 5674544 - DNA, 25 bp, Homo sapien
ttcttgagggaaaaaactgcctcca

SEQ ID NO: 5674545 - DNA, 25 bp, Homo sapien
gaaaaaactgcctccagagcaaaac

SEQ ID NO: 5674546 - DNA, 25 bp, Homo sapien
aacattttgtctcttcagtctcact

SEQ ID NO: 5674547 - DNA, 25 bp, Homo sapien
aaagtgagactgaagagacaaaatg

SEQ ID NO: 5674548 - DNA, 25 bp, Homo sapien
gcagttttttccctcaagaattata

SEQ ID NO: 5674549 - DNA, 25 bp, Homo sapien
tggaggcagttttttccctcaagaa

SEQ ID NO: 5674550 - DNA, 25 bp, Homo sapien
aagaaaaaagtgagactgaagagac

SEQ ID NO: 5674551 - DNA, 25 bp, Homo sapien
acaaaatgttttgctctggaggcag

SEQ ID NO: 5674552 - DNA, 25 bp, Homo sapien
gctctggaggcagttttttccctca

SEQ ID NO: 5674553 - DNA, 25 bp, Homo sapien
gagctagttgacactctcctatcag

SEQ ID NO: 5674554 - DNA, 25 bp, Homo sapien
gagaaaatttgagctagttgacact

SEQ ID NO: 5674555 - DNA, 25 bp, Homo sapien
aaatttgagctagttgacactctcc

SEQ ID NO: 5674556 - DNA, 25 bp, Homo sapien
gttgacactctcctatcagatacac

SEQ ID NO: 5674557 - DNA, 25 bp, Homo sapien
ccacagagaaaatttgagctagttg

SEQ ID NO: 5674558 - DNA, 25 bp, Homo sapien
gctagttgacactctcctatcagat

SEQ ID NO: 5674559 - DNA, 25 bp, Homo sapien
ggagagtgtcaactagctcaaattt

SEQ ID NO: 5674560 - DNA, 25 bp, Homo sapien
caactagctcaaattttctctgtgg

SEQ ID NO: 5674561 - DNA, 25 bp, Homo sapien
gataggagagtgtcaactagctcaa

SEQ ID NO: 5674562 - DNA, 25 bp, Homo sapien
gtgtatctgataggagagtgtcaac

SEQ ID NO: 5674563 - DNA, 25 bp, Homo sapien
tgtcaactagctcaaattttctctg

SEQ ID NO: 5674564 - DNA, 25 bp, Homo sapien
tctgataggagagtgtcaactagct

SEQ ID NO: 5674565 - DNA, 25 bp, Homo sapien
ggcttctctcaaacttctgacctct

SEQ ID NO: 5674566 - DNA, 25 bp, Homo sapien
tctctcaaacttctgacctctggtg

SEQ ID NO: 5674567 - DNA, 25 bp, Homo sapien
cttctctcaaacttctgacctctgg

SEQ ID NO: 5674568 - DNA, 25 bp, Homo sapien
gcttctctcaaacttctgacctctg

SEQ ID NO: 5674569 - DNA, 25 bp, Homo sapien
ttctctcaaacttctgacctctggt

SEQ ID NO: 5674570 - DNA, 25 bp, Homo sapien
gccaggcttctctcaaacttctgac

SEQ ID NO: 5674571 - DNA, 25 bp, Homo sapien
accagaggtcagaagtttgagagaa

SEQ ID NO: 5674572 - DNA, 25 bp, Homo sapien
caccagaggtcagaagtttgagaga

SEQ ID NO: 5674573 - DNA, 25 bp, Homo sapien
gtcagaagtttgagagaagcctggc

SEQ ID NO: 5674574 - DNA, 25 bp, Homo sapien
cagaggtcagaagtttgagagaagc

SEQ ID NO: 5674575 - DNA, 25 bp, Homo sapien
ccagaggtcagaagtttgagagaag

SEQ ID NO: 5674576 - DNA, 25 bp, Homo sapien
agaggtcagaagtttgagagaagcc

SEQ ID NO: 5674577 - DNA, 25 bp, Homo sapien
tcatttcattagcctaaacacagcc

SEQ ID NO: 5674578 - DNA, 25 bp, Homo sapien
gatcatttcattagcctaaacacag

SEQ ID NO: 5674579 - DNA, 25 bp, Homo sapien
atcatttcattagcctaaacacagc

SEQ ID NO: 5674580 - DNA, 25 bp, Homo sapien
tgatcatttcattagcctaaacaca

SEQ ID NO: 5674581 - DNA, 25 bp, Homo sapien
ctgtgtttaggctaatgaaatgatc

SEQ ID NO: 5674582 - DNA, 25 bp, Homo sapien
tgtgtttaggctaatgaaatgatca

SEQ ID NO: 5674583 - DNA, 25 bp, Homo sapien
ggctgtgtttaggctaatgaaatga

SEQ ID NO: 5674584 - DNA, 25 bp, Homo sapien
gctgtgtttaggctaatgaaatgat

SEQ ID NO: 5674585 - DNA, 25 bp, Homo sapien
cagaagtcagtaagtcagtattctt

SEQ ID NO: 5674586 - DNA, 25 bp, Homo sapien
cacagccacataattcagaagtcag

SEQ ID NO: 5674587 - DNA, 25 bp, Homo sapien
gatcatttcattagcctaaacacag

SEQ ID NO: 5674588 - DNA, 25 bp, Homo sapien
tcattagcctaaacacagccacata

SEQ ID NO: 5674589 - DNA, 25 bp, Homo sapien
gaatgtgatcatttcattagcctaa

SEQ ID NO: 5674590 - DNA, 25 bp, Homo sapien
cataattcagaagtcagtaagtcag

SEQ ID NO: 5674591 - DNA, 25 bp, Homo sapien
tatgtggctgtgtttaggctaatga

SEQ ID NO: 5674592 - DNA, 25 bp, Homo sapien
ctgtgtttaggctaatgaaatgatc

SEQ ID NO: 5674593 - DNA, 25 bp, Homo sapien
taggctaatgaaatgatcacattca

SEQ ID NO: 5674594 - DNA, 25 bp, Homo sapien
aagaatactgacttactgacttctg

SEQ ID NO: 5674595 - DNA, 25 bp, Homo sapien
gaatactgacttactgacttctgaa

SEQ ID NO: 5674596 - DNA, 25 bp, Homo sapien
ctgacttctgaattatgtggctgtg

SEQ ID NO: 5674597 - DNA, 25 bp, Homo sapien
tggttgccctgtcttagcctttttc

SEQ ID NO: 5674598 - DNA, 25 bp, Homo sapien
gaaaaaggctaagacagggcaacca

SEQ ID NO: 5674599 - DNA, 25 bp, Homo sapien
caaatgtaaagccatctcttttggg

SEQ ID NO: 5674600 - DNA, 25 bp, Homo sapien
ctgaagtgtcttagctgatagaagc

SEQ ID NO: 5674601 - DNA, 25 bp, Homo sapien
tgtcttagcctttttctgaagtgtc

SEQ ID NO: 5674602 - DNA, 25 bp, Homo sapien
tgccctgtcttagcctttttctgaa

SEQ ID NO: 5674603 - DNA, 25 bp, Homo sapien
tggttgccctgtcttagcctttttc

SEQ ID NO: 5674604 - DNA, 25 bp, Homo sapien
tgagttccaaatgtaaagccatctc

SEQ ID NO: 5674605 - DNA, 25 bp, Homo sapien
gagatggctttacatttggaactca

SEQ ID NO: 5674606 - DNA, 25 bp, Homo sapien
gcttctatcagctaagacacttcag

SEQ ID NO: 5674607 - DNA, 25 bp, Homo sapien
tccccaaaagagatggctttacatt

SEQ ID NO: 5674608 - DNA, 25 bp, Homo sapien
aagtctttccccaaaagagatggct

SEQ ID NO: 5674609 - DNA, 25 bp, Homo sapien
gaaaaaggctaagacagggcaacca

SEQ ID NO: 5674610 - DNA, 25 bp, Homo sapien
gacacttcagaaaaaggctaagaca

SEQ ID NO: 5674611 - DNA, 25 bp, Homo sapien
actgtactgcagactccatctccca

SEQ ID NO: 5674612 - DNA, 25 bp, Homo sapien
tgtactgcagactccatctcccaaa

SEQ ID NO: 5674613 - DNA, 25 bp, Homo sapien
ccaaaaaaaaagatgagcaaactag

SEQ ID NO: 5674614 - DNA, 25 bp, Homo sapien
tactgcagactccatctcccaaaaa

SEQ ID NO: 5674615 - DNA, 25 bp, Homo sapien
gtactgcagactccatctcccaaaa

SEQ ID NO: 5674616 - DNA, 25 bp, Homo sapien
gccactgtactgcagactccatctc

SEQ ID NO: 5674617 - DNA, 25 bp, Homo sapien
ctagtttgctcatctttttttttgg

SEQ ID NO: 5674618 - DNA, 25 bp, Homo sapien
ttttgggagatggagtctgcagtac

SEQ ID NO: 5674619 - DNA, 25 bp, Homo sapien
tttttgggagatggagtctgcagta

SEQ ID NO: 5674620 - DNA, 25 bp, Homo sapien
gagatggagtctgcagtacagtggc

SEQ ID NO: 5674621 - DNA, 25 bp, Homo sapien
tttgggagatggagtctgcagtaca

SEQ ID NO: 5674622 - DNA, 25 bp, Homo sapien
tgggagatggagtctgcagtacagt

SEQ ID NO: 5674623 - DNA, 25 bp, Homo sapien
gctgggtgtggtggcgtgcacttgt

SEQ ID NO: 5674624 - DNA, 25 bp, Homo sapien
ctaggcaacatggtgaaccccttgt

SEQ ID NO: 5674625 - DNA, 25 bp, Homo sapien
cccagctattccaggggctgaggca

SEQ ID NO: 5674626 - DNA, 25 bp, Homo sapien
aacatggtgaaccccttgtctctac

SEQ ID NO: 5674627 - DNA, 25 bp, Homo sapien
aatcccagctattccaggggctgag

SEQ ID NO: 5674628 - DNA, 25 bp, Homo sapien
taggcaacatggtgaaccccttgtc

SEQ ID NO: 5674629 - DNA, 25 bp, Homo sapien
gacaaggggttcaccatgttgccta

SEQ ID NO: 5674630 - DNA, 25 bp, Homo sapien
tgcctcagcccctggaatagctggg

SEQ ID NO: 5674631 - DNA, 25 bp, Homo sapien
acaagtgcacgccaccacacccagc

SEQ ID NO: 5674632 - DNA, 25 bp, Homo sapien
acaaggggttcaccatgttgcctag

SEQ ID NO: 5674633 - DNA, 25 bp, Homo sapien
ctcagcccctggaatagctgggatt

SEQ ID NO: 5674634 - DNA, 25 bp, Homo sapien
gtagagacaaggggttcaccatgtt

SEQ ID NO: 5674635 - DNA, 25 bp, Homo sapien
gtaaactaaggctggtgcggcggct

SEQ ID NO: 5674636 - DNA, 25 bp, Homo sapien
actaaggctggtgcggcggctgaca

SEQ ID NO: 5674637 - DNA, 25 bp, Homo sapien
tgagtaaactaaggctggtgcggcg

SEQ ID NO: 5674638 - DNA, 25 bp, Homo sapien
agtaaactaaggctggtgcggcggc

SEQ ID NO: 5674639 - DNA, 25 bp, Homo sapien
taaactaaggctggtgcggcggctg

SEQ ID NO: 5674640 - DNA, 25 bp, Homo sapien
aaggctggtgcggcggctgacacct

SEQ ID NO: 5674641 - DNA, 25 bp, Homo sapien
aggtgtcagccgccgcaccagcctt

SEQ ID NO: 5674642 - DNA, 25 bp, Homo sapien
agccgccgcaccagccttagtttac

SEQ ID NO: 5674643 - DNA, 25 bp, Homo sapien
gccgccgcaccagccttagtttact

SEQ ID NO: 5674644 - DNA, 25 bp, Homo sapien
cagccgccgcaccagccttagttta

SEQ ID NO: 5674645 - DNA, 25 bp, Homo sapien
cgccgcaccagccttagtttactca

SEQ ID NO: 5674646 - DNA, 25 bp, Homo sapien
tgtcagccgccgcaccagccttagt

SEQ ID NO: 5674647 - DNA, 25 bp, Homo sapien
catggtgaaccccttgtctctacta

SEQ ID NO: 5674648 - DNA, 25 bp, Homo sapien
tggtgaaccccttgtctctactaaa

SEQ ID NO: 5674649 - DNA, 25 bp, Homo sapien
atggtgaaccccttgtctctactaa

SEQ ID NO: 5674650 - DNA, 25 bp, Homo sapien
aacatggtgaaccccttgtctctac

SEQ ID NO: 5674651 - DNA, 25 bp, Homo sapien
acatggtgaaccccttgtctctact

SEQ ID NO: 5674652 - DNA, 25 bp, Homo sapien
taggcaacatggtgaaccccttgtc

SEQ ID NO: 5674653 - DNA, 25 bp, Homo sapien
gacaaggggttcaccatgttgccta

SEQ ID NO: 5674654 - DNA, 25 bp, Homo sapien
tagtagagacaaggggttcaccatg

SEQ ID NO: 5674655 - DNA, 25 bp, Homo sapien
ttagtagagacaaggggttcaccat

SEQ ID NO: 5674656 - DNA, 25 bp, Homo sapien
agtagagacaaggggttcaccatgt

SEQ ID NO: 5674657 - DNA, 25 bp, Homo sapien
tttagtagagacaaggggttcacca

SEQ ID NO: 5674658 - DNA, 25 bp, Homo sapien
gtagagacaaggggttcaccatgtt

SEQ ID NO: 5674659 - DNA, 25 bp, Homo sapien
ctaactgccttgtaaactagatgaa

SEQ ID NO: 5674660 - DNA, 25 bp, Homo sapien
taactgccttgtaaactagatgaat

SEQ ID NO: 5674661 - DNA, 25 bp, Homo sapien
gccttgtaaactagatgaattccag

SEQ ID NO: 5674662 - DNA, 25 bp, Homo sapien
ctgccttgtaaactagatgaattcc

SEQ ID NO: 5674663 - DNA, 25 bp, Homo sapien
cttgtaaactagatgaattccagat

SEQ ID NO: 5674664 - DNA, 25 bp, Homo sapien
ccttgtaaactagatgaattccaga

SEQ ID NO: 5674665 - DNA, 25 bp, Homo sapien
tctggaattcatctagtttacaagg

SEQ ID NO: 5674666 - DNA, 25 bp, Homo sapien
ttcatctagtttacaaggcagttag

SEQ ID NO: 5674667 - DNA, 25 bp, Homo sapien
atctggaattcatctagtttacaag

SEQ ID NO: 5674668 - DNA, 25 bp, Homo sapien
tggaattcatctagtttacaaggca

SEQ ID NO: 5674669 - DNA, 25 bp, Homo sapien
gaattcatctagtttacaaggcagt

SEQ ID NO: 5674670 - DNA, 25 bp, Homo sapien
ggaattcatctagtttacaaggcag

SEQ ID NO: 5674671 - DNA, 25 bp, Homo sapien
gagattatggcactgcattccagac

SEQ ID NO: 5674672 - DNA, 25 bp, Homo sapien
attatggcactgcattccagactga

SEQ ID NO: 5674673 - DNA, 25 bp, Homo sapien
tatggcactgcattccagactgagc

SEQ ID NO: 5674674 - DNA, 25 bp, Homo sapien
tggcactgcattccagactgagcaa

SEQ ID NO: 5674675 - DNA, 25 bp, Homo sapien
ttatggcactgcattccagactgag

SEQ ID NO: 5674676 - DNA, 25 bp, Homo sapien
atggcactgcattccagactgagca

SEQ ID NO: 5674677 - DNA, 25 bp, Homo sapien
tcagtctggaatgcagtgccataat

SEQ ID NO: 5674678 - DNA, 25 bp, Homo sapien
ttgctcagtctggaatgcagtgcca

SEQ ID NO: 5674679 - DNA, 25 bp, Homo sapien
tgctcagtctggaatgcagtgccat

SEQ ID NO: 5674680 - DNA, 25 bp, Homo sapien
gctcagtctggaatgcagtgccata

SEQ ID NO: 5674681 - DNA, 25 bp, Homo sapien
gtctggaatgcagtgccataatctc

SEQ ID NO: 5674682 - DNA, 25 bp, Homo sapien
ctcagtctggaatgcagtgccataa

SEQ ID NO: 5674683 - DNA, 25 bp, Homo sapien
aatgtatccacctaggcagggcacg

SEQ ID NO: 5674684 - DNA, 25 bp, Homo sapien
cctaggtctcccatgggtactgtat

SEQ ID NO: 5674685 - DNA, 25 bp, Homo sapien
tatttaaaatgtatccacctaggca

SEQ ID NO: 5674686 - DNA, 25 bp, Homo sapien
taaaatgtatccacctaggcagggc

SEQ ID NO: 5674687 - DNA, 25 bp, Homo sapien
taggtctcccatgggtactgtattt

SEQ ID NO: 5674688 - DNA, 25 bp, Homo sapien
tgtatccacctaggcagggcacggt

SEQ ID NO: 5674689 - DNA, 25 bp, Homo sapien
gccctgcctaggtggatacatttta

SEQ ID NO: 5674690 - DNA, 25 bp, Homo sapien
aaatacagtacccatgggagaccta

SEQ ID NO: 5674691 - DNA, 25 bp, Homo sapien
cctgcctaggtggatacattttaaa

SEQ ID NO: 5674692 - DNA, 25 bp, Homo sapien
accgtgccctgcctaggtggataca

SEQ ID NO: 5674693 - DNA, 25 bp, Homo sapien
atacagtacccatgggagacctagg

SEQ ID NO: 5674694 - DNA, 25 bp, Homo sapien
cgtgccctgcctaggtggatacatt

SEQ ID NO: 5674695 - DNA, 25 bp, Homo sapien
catcaagtggctgaaaagcagacat

SEQ ID NO: 5674696 - DNA, 25 bp, Homo sapien
atcatcgtcagtggccggagtcctg

SEQ ID NO: 5674697 - DNA, 25 bp, Homo sapien
catctggtttctgggcatcaagtgg

SEQ ID NO: 5674698 - DNA, 25 bp, Homo sapien
tgtgtagctagttggcatctggttt

SEQ ID NO: 5674699 - DNA, 25 bp, Homo sapien
tgaacttcagagaagcaatcatcgt

SEQ ID NO: 5674700 - DNA, 25 bp, Homo sapien
gaagcaatcatcgtcagtggccgga

SEQ ID NO: 5674701 - DNA, 25 bp, Homo sapien
tcatgtctgcttttcagccacttga

SEQ ID NO: 5674702 - DNA, 25 bp, Homo sapien
ggactccggccactgacgatgattg

SEQ ID NO: 5674703 - DNA, 25 bp, Homo sapien
gacgatgattgcttctctgaagttc

SEQ ID NO: 5674704 - DNA, 25 bp, Homo sapien
cacttgatgcccagaaaccagatgc

SEQ ID NO: 5674705 - DNA, 25 bp, Homo sapien
gtctgcttttcagccacttgatgcc

SEQ ID NO: 5674706 - DNA, 25 bp, Homo sapien
aaaccagatgccaactagctacaca

SEQ ID NO: 5674707 - DNA, 25 bp, Homo sapien
acgaaaaattagccaagcgtggtgg

SEQ ID NO: 5674708 - DNA, 25 bp, Homo sapien
cgaaaaattagccaagcgtggtggc

SEQ ID NO: 5674709 - DNA, 25 bp, Homo sapien
gaaaaattagccaagcgtggtggcg

SEQ ID NO: 5674710 - DNA, 25 bp, Homo sapien
agtacgaaaaattagccaagcgtgg

SEQ ID NO: 5674711 - DNA, 25 bp, Homo sapien
aagtacgaaaaattagccaagcgtg

SEQ ID NO: 5674712 - DNA, 25 bp, Homo sapien
tacgaaaaattagccaagcgtggtg

SEQ ID NO: 5674713 - DNA, 25 bp, Homo sapien
caccacgcttggctaatttttcgta

SEQ ID NO: 5674714 - DNA, 25 bp, Homo sapien
cacgcttggctaatttttcgtactt

SEQ ID NO: 5674715 - DNA, 25 bp, Homo sapien
ccaccacgcttggctaatttttcgt

SEQ ID NO: 5674716 - DNA, 25 bp, Homo sapien
cgccaccacgcttggctaatttttc

SEQ ID NO: 5674717 - DNA, 25 bp, Homo sapien
ccacgcttggctaatttttcgtact

SEQ ID NO: 5674718 - DNA, 25 bp, Homo sapien
gccaccacgcttggctaatttttcg

SEQ ID NO: 5674719 - DNA, 25 bp, Homo sapien
gcgcctggccacactcagctaattt

SEQ ID NO: 5674720 - DNA, 25 bp, Homo sapien
ctcaggcagtcagcccgcctcagcc

SEQ ID NO: 5674721 - DNA, 25 bp, Homo sapien
gccacactcagctaatttttaaggt

SEQ ID NO: 5674722 - DNA, 25 bp, Homo sapien
agctcaggcagtcagcccgcctcag

SEQ ID NO: 5674723 - DNA, 25 bp, Homo sapien
tggccacactcagctaatttttaag

SEQ ID NO: 5674724 - DNA, 25 bp, Homo sapien
cactcagctaatttttaaggtgttt

SEQ ID NO: 5674725 - DNA, 25 bp, Homo sapien
aaacaccttaaaaattagctgagtg

SEQ ID NO: 5674726 - DNA, 25 bp, Homo sapien
ggctgaggcgggctgactgcctgag

SEQ ID NO: 5674727 - DNA, 25 bp, Homo sapien
ctgaggcgggctgactgcctgagct

SEQ ID NO: 5674728 - DNA, 25 bp, Homo sapien
ttagctgagtgtggccaggcgcggt

SEQ ID NO: 5674729 - DNA, 25 bp, Homo sapien
ccttaaaaattagctgagtgtggcc

SEQ ID NO: 5674730 - DNA, 25 bp, Homo sapien
aaattagctgagtgtggccaggcgc

SEQ ID NO: 5674731 - DNA, 25 bp, Homo sapien
cacactcagctaagttttattttat

SEQ ID NO: 5674732 - DNA, 25 bp, Homo sapien
gcccacactcagctaagttttattt

SEQ ID NO: 5674733 - DNA, 25 bp, Homo sapien
cagcccacactcagctaagttttat

SEQ ID NO: 5674734 - DNA, 25 bp, Homo sapien
agcccacactcagctaagttttatt

SEQ ID NO: 5674735 - DNA, 25 bp, Homo sapien
tagagatggaggctcgctttgtcgc

SEQ ID NO: 5674736 - DNA, 25 bp, Homo sapien
ccacactcagctaagttttatttta

SEQ ID NO: 5674737 - DNA, 25 bp, Homo sapien
ggcgacaaagcgagcctccatctct

SEQ ID NO: 5674738 - DNA, 25 bp, Homo sapien
ataaaacttagctgagtgtgggctg

SEQ ID NO: 5674739 - DNA, 25 bp, Homo sapien
taaaacttagctgagtgtgggctgg

SEQ ID NO: 5674740 - DNA, 25 bp, Homo sapien
aataaaacttagctgagtgtgggct

SEQ ID NO: 5674741 - DNA, 25 bp, Homo sapien
taaaataaaacttagctgagtgtgg

SEQ ID NO: 5674742 - DNA, 25 bp, Homo sapien
aaataaaacttagctgagtgtgggc

SEQ ID NO: 5674743 - DNA, 25 bp, Homo sapien
gagtgcagtggtgcaatctcagctc

SEQ ID NO: 5674744 - DNA, 25 bp, Homo sapien
taaatggagtttcgctcttgttggc

SEQ ID NO: 5674745 - DNA, 25 bp, Homo sapien
tgcaacctccactcattgcaacctc

SEQ ID NO: 5674746 - DNA, 25 bp, Homo sapien
ttgcaacctccactcattgcaacct

SEQ ID NO: 5674747 - DNA, 25 bp, Homo sapien
gcaacctccactcattgcaacctcc

SEQ ID NO: 5674748 - DNA, 25 bp, Homo sapien
attgcaacctccactcattgcaacc

SEQ ID NO: 5674749 - DNA, 25 bp, Homo sapien
gagctgagattgcaccactgcactc

SEQ ID NO: 5674750 - DNA, 25 bp, Homo sapien
gaggttgcaatgagtggaggttgca

SEQ ID NO: 5674751 - DNA, 25 bp, Homo sapien
ggaggttgcaatgagtggaggttgc

SEQ ID NO: 5674752 - DNA, 25 bp, Homo sapien
ggttgcaatgagtggaggttgcaat

SEQ ID NO: 5674753 - DNA, 25 bp, Homo sapien
aggttgcaatgagtggaggttgcaa

SEQ ID NO: 5674754 - DNA, 25 bp, Homo sapien
ccaacaagagcgaaactccatttaa

SEQ ID NO: 5674755 - DNA, 25 bp, Homo sapien
tgctttctttcctagtagaatgtta

SEQ ID NO: 5674756 - DNA, 25 bp, Homo sapien
cattttgaattatgccacttggttc

SEQ ID NO: 5674757 - DNA, 25 bp, Homo sapien
ctacagagttatttttgacttgaca

SEQ ID NO: 5674758 - DNA, 25 bp, Homo sapien
tttgaattatgccacttggttcagt

SEQ ID NO: 5674759 - DNA, 25 bp, Homo sapien
tgacttgacattttgaattatgcca

SEQ ID NO: 5674760 - DNA, 25 bp, Homo sapien
taaacacttttataagctacagagt

SEQ ID NO: 5674761 - DNA, 25 bp, Homo sapien
ggcataattcaaaatgtcaagtcaa

SEQ ID NO: 5674762 - DNA, 25 bp, Homo sapien
taactctgtagcttataaaagtgtt

SEQ ID NO: 5674763 - DNA, 25 bp, Homo sapien
taacattctactaggaaagaaagca

SEQ ID NO: 5674764 - DNA, 25 bp, Homo sapien
tgtcaagtcaaaaataactctgtag

SEQ ID NO: 5674765 - DNA, 25 bp, Homo sapien
tataaataacattctactaggaaag

SEQ ID NO: 5674766 - DNA, 25 bp, Homo sapien
gaaccaagtggcataattcaaaatg

SEQ ID NO: 5674767 - DNA, 25 bp, Homo sapien
gtcaggttggcattttcatagctta

SEQ ID NO: 5674768 - DNA, 25 bp, Homo sapien
caatgtcaggttggcattttcatag

SEQ ID NO: 5674769 - DNA, 25 bp, Homo sapien
gaagcaatgtcaggttggcattttc

SEQ ID NO: 5674770 - DNA, 25 bp, Homo sapien
caaaagcctagtagtgaatgtatat

SEQ ID NO: 5674771 - DNA, 25 bp, Homo sapien
cattggcttggggaagcaatgtcag

SEQ ID NO: 5674772 - DNA, 25 bp, Homo sapien
ctcaaaagcctagtagtgaatgtat

SEQ ID NO: 5674773 - DNA, 25 bp, Homo sapien
ctgacattgcttccccaagccaatg

SEQ ID NO: 5674774 - DNA, 25 bp, Homo sapien
tatgaaaatgccaacctgacattgc

SEQ ID NO: 5674775 - DNA, 25 bp, Homo sapien
atacattcactactaggcttttgag

SEQ ID NO: 5674776 - DNA, 25 bp, Homo sapien
gaaaatgccaacctgacattgcttc

SEQ ID NO: 5674777 - DNA, 25 bp, Homo sapien
aatatacattcactactaggctttt

SEQ ID NO: 5674778 - DNA, 25 bp, Homo sapien
taagctatgaaaatgccaacctgac

SEQ ID NO: 5674779 - DNA, 25 bp, Homo sapien
tcatcctccggagtagccgggacta

SEQ ID NO: 5674780 - DNA, 25 bp, Homo sapien
cctcatcctccggagtagccgggac

SEQ ID NO: 5674781 - DNA, 25 bp, Homo sapien
tcctccggagtagccgggactacag

SEQ ID NO: 5674782 - DNA, 25 bp, Homo sapien
catcctccggagtagccgggactac

SEQ ID NO: 5674783 - DNA, 25 bp, Homo sapien
atcctccggagtagccgggactaca

SEQ ID NO: 5674784 - DNA, 25 bp, Homo sapien
ctcctgggttcacgccattctcctg

SEQ ID NO: 5674785 - DNA, 25 bp, Homo sapien
tgtagtcccggctactccggaggat

SEQ ID NO: 5674786 - DNA, 25 bp, Homo sapien
gtcccggctactccggaggatgagg

SEQ ID NO: 5674787 - DNA, 25 bp, Homo sapien
caggagaatggcgtgaacccaggag

SEQ ID NO: 5674788 - DNA, 25 bp, Homo sapien
gtagtcccggctactccggaggatg

SEQ ID NO: 5674789 - DNA, 25 bp, Homo sapien
tagtcccggctactccggaggatga

SEQ ID NO: 5674790 - DNA, 25 bp, Homo sapien
ctgtagtcccggctactccggagga

SEQ ID NO: 5674791 - DNA, 25 bp, Homo sapien
gtgcctgccaccaagcccagctaat

SEQ ID NO: 5674792 - DNA, 25 bp, Homo sapien
tgcctgccaccaagcccagctaatc

SEQ ID NO: 5674793 - DNA, 25 bp, Homo sapien
ggtgcctgccaccaagcccagctaa

SEQ ID NO: 5674794 - DNA, 25 bp, Homo sapien
aggtgcctgccaccaagcccagcta

SEQ ID NO: 5674795 - DNA, 25 bp, Homo sapien
ctgccaccaagcccagctaatcttt

SEQ ID NO: 5674796 - DNA, 25 bp, Homo sapien
gcctgccaccaagcccagctaatct

SEQ ID NO: 5674797 - DNA, 25 bp, Homo sapien
gattagctgggcttggtggcaggca

SEQ ID NO: 5674798 - DNA, 25 bp, Homo sapien
ttagctgggcttggtggcaggcacc

SEQ ID NO: 5674799 - DNA, 25 bp, Homo sapien
agattagctgggcttggtggcaggc

SEQ ID NO: 5674800 - DNA, 25 bp, Homo sapien
aaagattagctgggcttggtggcag

SEQ ID NO: 5674801 - DNA, 25 bp, Homo sapien
tagctgggcttggtggcaggcacct

SEQ ID NO: 5674802 - DNA, 25 bp, Homo sapien
attagctgggcttggtggcaggcac

SEQ ID NO: 5674803 - DNA, 25 bp, Homo sapien
gagacagggattgtactttgtctcc

SEQ ID NO: 5674804 - DNA, 25 bp, Homo sapien
aataaagagacagggattgtacttt

SEQ ID NO: 5674805 - DNA, 25 bp, Homo sapien
agagacagggattgtactttgtctc

SEQ ID NO: 5674806 - DNA, 25 bp, Homo sapien
aaagagacagggattgtactttgtc

SEQ ID NO: 5674807 - DNA, 25 bp, Homo sapien
taaagagacagggattgtactttgt

SEQ ID NO: 5674808 - DNA, 25 bp, Homo sapien
aagagacagggattgtactttgtct

SEQ ID NO: 5674809 - DNA, 25 bp, Homo sapien
acaaagtacaatccctgtctcttta

SEQ ID NO: 5674810 - DNA, 25 bp, Homo sapien
gacaaagtacaatccctgtctcttt

SEQ ID NO: 5674811 - DNA, 25 bp, Homo sapien
ggagacaaagtacaatccctgtctc

SEQ ID NO: 5674812 - DNA, 25 bp, Homo sapien
agacaaagtacaatccctgtctctt

SEQ ID NO: 5674813 - DNA, 25 bp, Homo sapien
gagacaaagtacaatccctgtctct

SEQ ID NO: 5674814 - DNA, 25 bp, Homo sapien
aaagtacaatccctgtctctttatt

SEQ ID NO: 5674815 - DNA, 25 bp, Homo sapien
cagggattgtactttgtctcccagg

SEQ ID NO: 5674816 - DNA, 25 bp, Homo sapien
gagacagggattgtactttgtctcc

SEQ ID NO: 5674817 - DNA, 25 bp, Homo sapien
aggcctgcagtgctgtgacatgatc

SEQ ID NO: 5674818 - DNA, 25 bp, Homo sapien
tcttaaataaagagacagggattgt

SEQ ID NO: 5674819 - DNA, 25 bp, Homo sapien
tgacatgatcatgcagccttgaact

SEQ ID NO: 5674820 - DNA, 25 bp, Homo sapien
gtctcccaggcctgcagtgctgtga

SEQ ID NO: 5674821 - DNA, 25 bp, Homo sapien
cctgggagacaaagtacaatccctg

SEQ ID NO: 5674822 - DNA, 25 bp, Homo sapien
tcacagcactgcaggcctgggagac

SEQ ID NO: 5674823 - DNA, 25 bp, Homo sapien
ggagacaaagtacaatccctgtctc

SEQ ID NO: 5674824 - DNA, 25 bp, Homo sapien
caatccctgtctctttatttaagag

SEQ ID NO: 5674825 - DNA, 25 bp, Homo sapien
agttcaaggctgcatgatcatgtca

SEQ ID NO: 5674826 - DNA, 25 bp, Homo sapien
gatcatgtcacagcactgcaggcct

SEQ ID NO: 5674827 - DNA, 25 bp, Homo sapien
tgtatgcttggactttgacaaaaat

SEQ ID NO: 5674828 - DNA, 25 bp, Homo sapien
aagtatttaatcagatgtcccagta

SEQ ID NO: 5674829 - DNA, 25 bp, Homo sapien
gacaaaaattctgtcaaagtattta

SEQ ID NO: 5674830 - DNA, 25 bp, Homo sapien
gcttggactttgacaaaaattctgt

SEQ ID NO: 5674831 - DNA, 25 bp, Homo sapien
tttaatcagatgtcccagtattaga

SEQ ID NO: 5674832 - DNA, 25 bp, Homo sapien
atcagatgtcccagtattagattac

SEQ ID NO: 5674833 - DNA, 25 bp, Homo sapien
tactgggacatctgattaaatactt

SEQ ID NO: 5674834 - DNA, 25 bp, Homo sapien
gacagaatttttgtcaaagtccaag

SEQ ID NO: 5674835 - DNA, 25 bp, Homo sapien
gtaatctaatactgggacatctgat

SEQ ID NO: 5674836 - DNA, 25 bp, Homo sapien
atttttgtcaaagtccaagcataca

SEQ ID NO: 5674837 - DNA, 25 bp, Homo sapien
cagaatttttgtcaaagtccaagca

SEQ ID NO: 5674838 - DNA, 25 bp, Homo sapien
taaatactttgacagaatttttgtc

SEQ ID NO: 5674839 - DNA, 25 bp, Homo sapien
aaatagcagggattacaggcatgtt

SEQ ID NO: 5674840 - DNA, 25 bp, Homo sapien
agtggctcggtcttggctcactgca

SEQ ID NO: 5674841 - DNA, 25 bp, Homo sapien
aatagcagggattacaggcatgttg

SEQ ID NO: 5674842 - DNA, 25 bp, Homo sapien
cagtggctcggtcttggctcactgc

SEQ ID NO: 5674843 - DNA, 25 bp, Homo sapien
ccaaatagcagggattacaggcatg

SEQ ID NO: 5674844 - DNA, 25 bp, Homo sapien
agcagggattacaggcatgttgcca

SEQ ID NO: 5674845 - DNA, 25 bp, Homo sapien
aacatgcctgtaatccctgctattt

SEQ ID NO: 5674846 - DNA, 25 bp, Homo sapien
gcagtgagccaagaccgagccactg

SEQ ID NO: 5674847 - DNA, 25 bp, Homo sapien
tgcagtgagccaagaccgagccact

SEQ ID NO: 5674848 - DNA, 25 bp, Homo sapien
tggcaacatgcctgtaatccctgct

SEQ ID NO: 5674849 - DNA, 25 bp, Homo sapien
catgcctgtaatccctgctatttgg

SEQ ID NO: 5674850 - DNA, 25 bp, Homo sapien
caacatgcctgtaatccctgctatt

SEQ ID NO: 5674851 - DNA, 25 bp, Homo sapien
ctgccatcttagtccaagtttgttc

SEQ ID NO: 5674852 - DNA, 25 bp, Homo sapien
tcatcctgccatcttagtccaagtt

SEQ ID NO: 5674853 - DNA, 25 bp, Homo sapien
atccattctcatcctgccatcttag

SEQ ID NO: 5674854 - DNA, 25 bp, Homo sapien
gccatcttagtccaagtttgttctt

SEQ ID NO: 5674855 - DNA, 25 bp, Homo sapien
tctcatcctgccatcttagtccaag

SEQ ID NO: 5674856 - DNA, 25 bp, Homo sapien
tcctgccatcttagtccaagtttgt

SEQ ID NO: 5674857 - DNA, 25 bp, Homo sapien
ctaagatggcaggatgagaatggat

SEQ ID NO: 5674858 - DNA, 25 bp, Homo sapien
cttggactaagatggcaggatgaga

SEQ ID NO: 5674859 - DNA, 25 bp, Homo sapien
aacttggactaagatggcaggatga

SEQ ID NO: 5674860 - DNA, 25 bp, Homo sapien
caaacttggactaagatggcaggat

SEQ ID NO: 5674861 - DNA, 25 bp, Homo sapien
aagaacaaacttggactaagatggc

SEQ ID NO: 5674862 - DNA, 25 bp, Homo sapien
gaacaaacttggactaagatggcag

SEQ ID NO: 5674863 - DNA, 25 bp, Homo sapien
ttgcctcttcagtataccatataac

SEQ ID NO: 5674864 - DNA, 25 bp, Homo sapien
catgtagagaattagagctttttgc

SEQ ID NO: 5674865 - DNA, 25 bp, Homo sapien
gctttttgcctcttcagtataccat

SEQ ID NO: 5674866 - DNA, 25 bp, Homo sapien
tagagaattagagctttttgcctct

SEQ ID NO: 5674867 - DNA, 25 bp, Homo sapien
tcttcagtataccatataacaaaaa

SEQ ID NO: 5674868 - DNA, 25 bp, Homo sapien
tggagcatgtagagaattagagctt

SEQ ID NO: 5674869 - DNA, 25 bp, Homo sapien
aagctctaattctctacatgctcca

SEQ ID NO: 5674870 - DNA, 25 bp, Homo sapien
atggtatactgaagaggcaaaaagc

SEQ ID NO: 5674871 - DNA, 25 bp, Homo sapien
tgttatatggtatactgaagaggca

SEQ ID NO: 5674872 - DNA, 25 bp, Homo sapien
gcaaaaagctctaattctctacatg

SEQ ID NO: 5674873 - DNA, 25 bp, Homo sapien
gaggcaaaaagctctaattctctac

SEQ ID NO: 5674874 - DNA, 25 bp, Homo sapien
tatatggtatactgaagaggcaaaa

SEQ ID NO: 5674875 - DNA, 25 bp, Homo sapien
tgtatgtgcccacagtgtttgagaa

SEQ ID NO: 5674876 - DNA, 25 bp, Homo sapien
agaggtgtatgtgcccacagtgttt

SEQ ID NO: 5674877 - DNA, 25 bp, Homo sapien
ggtgtatgtgcccacagtgtttgag

SEQ ID NO: 5674878 - DNA, 25 bp, Homo sapien
gtatgtgcccacagtgtttgagaac

SEQ ID NO: 5674879 - DNA, 25 bp, Homo sapien
gaggtgtatgtgcccacagtgtttg

SEQ ID NO: 5674880 - DNA, 25 bp, Homo sapien
gtgtatgtgcccacagtgtttgaga

SEQ ID NO: 5674881 - DNA, 25 bp, Homo sapien
aaacactgtgggcacatacacctct

SEQ ID NO: 5674882 - DNA, 25 bp, Homo sapien
ttctcaaacactgtgggcacataca

SEQ ID NO: 5674883 - DNA, 25 bp, Homo sapien
gttctcaaacactgtgggcacatac

SEQ ID NO: 5674884 - DNA, 25 bp, Homo sapien
tctcaaacactgtgggcacatacac

SEQ ID NO: 5674885 - DNA, 25 bp, Homo sapien
caaacactgtgggcacatacacctc

SEQ ID NO: 5674886 - DNA, 25 bp, Homo sapien
ctcaaacactgtgggcacatacacc

SEQ ID NO: 5674887 - DNA, 25 bp, Homo sapien
ggtgattgttggtgatggagcctgt

SEQ ID NO: 5674888 - DNA, 25 bp, Homo sapien
ctgccatccggaagaaactggtgat

SEQ ID NO: 5674889 - DNA, 25 bp, Homo sapien
ccatccggaagaaactggtgattgt

SEQ ID NO: 5674890 - DNA, 25 bp, Homo sapien
gctgccatccggaagaaactggtga

SEQ ID NO: 5674891 - DNA, 25 bp, Homo sapien
tgccatccggaagaaactggtgatt

SEQ ID NO: 5674892 - DNA, 25 bp, Homo sapien
ggctgccatccggaagaaactggtg

SEQ ID NO: 5674893 - DNA, 25 bp, Homo sapien
acaatcaccagtttcttccggatgg

SEQ ID NO: 5674894 - DNA, 25 bp, Homo sapien
caatcaccagtttcttccggatggc

SEQ ID NO: 5674895 - DNA, 25 bp, Homo sapien
caccagtttcttccggatggcagcc

SEQ ID NO: 5674896 - DNA, 25 bp, Homo sapien
tcaccagtttcttccggatggcagc

SEQ ID NO: 5674897 - DNA, 25 bp, Homo sapien
aatcaccagtttcttccggatggca

SEQ ID NO: 5674898 - DNA, 25 bp, Homo sapien
acaggctccatcaccaacaatcacc

SEQ ID NO: 5674899 - DNA, 25 bp, Homo sapien
tgttttgtgtttcagcaatggctgc

SEQ ID NO: 5674900 - DNA, 25 bp, Homo sapien
gttttgtgtttcagcaatggctgcc

SEQ ID NO: 5674901 - DNA, 25 bp, Homo sapien
tgcaggtaatatctgtgttttgtgt

SEQ ID NO: 5674902 - DNA, 25 bp, Homo sapien
ccatccggaagaaactggtgattgt

SEQ ID NO: 5674903 - DNA, 25 bp, Homo sapien
caatggctgccatccggaagaaact

SEQ ID NO: 5674904 - DNA, 25 bp, Homo sapien
gagcctgtggaaagacatgcttgct

SEQ ID NO: 5674905 - DNA, 25 bp, Homo sapien
gaaacacaaaacacagatattacct

SEQ ID NO: 5674906 - DNA, 25 bp, Homo sapien
cacaaaacacagatattacctgcaa

SEQ ID NO: 5674907 - DNA, 25 bp, Homo sapien
ggcagccattgctgaaacacaaaac

SEQ ID NO: 5674908 - DNA, 25 bp, Homo sapien
cagtttcttccggatggcagccatt

SEQ ID NO: 5674909 - DNA, 25 bp, Homo sapien
caatcaccagtttcttccggatggc

SEQ ID NO: 5674910 - DNA, 25 bp, Homo sapien
gagcaagcatgtctttccacaggct

SEQ ID NO: 5674911 - DNA, 25 bp, Homo sapien
attaagtataatgttagttacgagt

SEQ ID NO: 5674912 - DNA, 25 bp, Homo sapien
ctgatcttagggggcagaccttttt

SEQ ID NO: 5674913 - DNA, 25 bp, Homo sapien
cctgatcttagggggcagacctttt

SEQ ID NO: 5674914 - DNA, 25 bp, Homo sapien
aaaaaggtctgccccctaagatcag

SEQ ID NO: 5674915 - DNA, 25 bp, Homo sapien
aaaaggtctgccccctaagatcagg

SEQ ID NO: 5674916 - DNA, 25 bp, Homo sapien
actcgtaactaacattatacttaat

SEQ ID NO: 5674917 - DNA, 25 bp, Homo sapien
aaagaagtggcaagaacagacattc

SEQ ID NO: 5674918 - DNA, 25 bp, Homo sapien
gcaagaacagacattcttgtcttgt

SEQ ID NO: 5674919 - DNA, 25 bp, Homo sapien
cattaagtataatgttagttacgag

SEQ ID NO: 5674920 - DNA, 25 bp, Homo sapien
gaagtggcaagaacagacattcttg

SEQ ID NO: 5674921 - DNA, 25 bp, Homo sapien
tttcagtcttttaccattaagtata

SEQ ID NO: 5674922 - DNA, 25 bp, Homo sapien
cctgatcttagggggcagacctttt

SEQ ID NO: 5674923 - DNA, 25 bp, Homo sapien
gaatgtctgttcttgccacttcttt

SEQ ID NO: 5674924 - DNA, 25 bp, Homo sapien
aaaaggtctgccccctaagatcagg

SEQ ID NO: 5674925 - DNA, 25 bp, Homo sapien
caggaacaagacaagaatgtctgtt

SEQ ID NO: 5674926 - DNA, 25 bp, Homo sapien
tatacttaatggtaaaagactgaaa

SEQ ID NO: 5674927 - DNA, 25 bp, Homo sapien
tcgtaactaacattatacttaatgg

SEQ ID NO: 5674928 - DNA, 25 bp, Homo sapien
caagaatgtctgttcttgccacttc

SEQ ID NO: 5674929 - DNA, 25 bp, Homo sapien
ctgcgcctggctcaattgatttttt

SEQ ID NO: 5674930 - DNA, 25 bp, Homo sapien
aaaaaatcaattgagccaggcgcag

SEQ ID NO: 5674931 - DNA, 25 bp, Homo sapien
aatgttaatattgtatcctgcaacc

SEQ ID NO: 5674932 - DNA, 25 bp, Homo sapien
tatcctgcaaccttactgaacttgt

SEQ ID NO: 5674933 - DNA, 25 bp, Homo sapien
gcctggctcaattgattttttaatg

SEQ ID NO: 5674934 - DNA, 25 bp, Homo sapien
caaccttactgaacttgtttattct

SEQ ID NO: 5674935 - DNA, 25 bp, Homo sapien
tgcgcctggctcaattgatttttta

SEQ ID NO: 5674936 - DNA, 25 bp, Homo sapien
ctgcgcctggctcaattgatttttt

SEQ ID NO: 5674937 - DNA, 25 bp, Homo sapien
taaaaaatcaattgagccaggcgca

SEQ ID NO: 5674938 - DNA, 25 bp, Homo sapien
agaataaacaagttcagtaaggttg

SEQ ID NO: 5674939 - DNA, 25 bp, Homo sapien
aaacaagttcagtaaggttgcagga

SEQ ID NO: 5674940 - DNA, 25 bp, Homo sapien
acattaaaaaatcaattgagccagg

SEQ ID NO: 5674941 - DNA, 25 bp, Homo sapien
ggttgcaggatacaatattaacatt

SEQ ID NO: 5674942 - DNA, 25 bp, Homo sapien
aaaaaatcaattgagccaggcgcag

SEQ ID NO: 5674943 - DNA, 25 bp, Homo sapien
tgagatggagtcttactctgtcccc

SEQ ID NO: 5674944 - DNA, 25 bp, Homo sapien
gatggagtcttactctgtcccccag

SEQ ID NO: 5674945 - DNA, 25 bp, Homo sapien
ccccaggctggtgtgcagtggcccg

SEQ ID NO: 5674946 - DNA, 25 bp, Homo sapien
gtgagatggagtcttactctgtccc

SEQ ID NO: 5674947 - DNA, 25 bp, Homo sapien
gagatggagtcttactctgtccccc

SEQ ID NO: 5674948 - DNA, 25 bp, Homo sapien
agatggagtcttactctgtccccca

SEQ ID NO: 5674949 - DNA, 25 bp, Homo sapien
gggggacagagtaagactccatctc

SEQ ID NO: 5674950 - DNA, 25 bp, Homo sapien
tgggggacagagtaagactccatct

SEQ ID NO: 5674951 - DNA, 25 bp, Homo sapien
ggggacagagtaagactccatctca

SEQ ID NO: 5674952 - DNA, 25 bp, Homo sapien
gggacagagtaagactccatctcac

SEQ ID NO: 5674953 - DNA, 25 bp, Homo sapien
ctgggggacagagtaagactccatc

SEQ ID NO: 5674954 - DNA, 25 bp, Homo sapien
cgggccactgcacaccagcctgggg

SEQ ID NO: 5674955 - DNA, 25 bp, Homo sapien
ttctttacaaacaaatctagattgg

SEQ ID NO: 5674956 - DNA, 25 bp, Homo sapien
tctttacaaacaaatctagattggt

SEQ ID NO: 5674957 - DNA, 25 bp, Homo sapien
accaatctagatttgtttgtaaaga

SEQ ID NO: 5674958 - DNA, 25 bp, Homo sapien
ccaatctagatttgtttgtaaagaa

SEQ ID NO: 5674959 - DNA, 25 bp, Homo sapien
caagaatgctgtttctttacaaaca

SEQ ID NO: 5674960 - DNA, 25 bp, Homo sapien
accgcgcccagccaagaatgctgtt

SEQ ID NO: 5674961 - DNA, 25 bp, Homo sapien
tctttacaaacaaatctagattggt

SEQ ID NO: 5674962 - DNA, 25 bp, Homo sapien
gcgcccagccaagaatgctgtttct

SEQ ID NO: 5674963 - DNA, 25 bp, Homo sapien
cagccaagaatgctgtttctttaca

SEQ ID NO: 5674964 - DNA, 25 bp, Homo sapien
gcccagccaagaatgctgtttcttt

SEQ ID NO: 5674965 - DNA, 25 bp, Homo sapien
tgtaaagaaacagcattcttggctg

SEQ ID NO: 5674966 - DNA, 25 bp, Homo sapien
aacagcattcttggctgggcgcggt

SEQ ID NO: 5674967 - DNA, 25 bp, Homo sapien
tgtttgtaaagaaacagcattcttg

SEQ ID NO: 5674968 - DNA, 25 bp, Homo sapien
aaagaaacagcattcttggctgggc

SEQ ID NO: 5674969 - DNA, 25 bp, Homo sapien
gaaacagcattcttggctgggcgcg

SEQ ID NO: 5674970 - DNA, 25 bp, Homo sapien
ccaatctagatttgtttgtaaagaa

SEQ ID NO: 5674971 - DNA, 25 bp, Homo sapien
ctgtgctcggcctcaattgattttt

SEQ ID NO: 5674972 - DNA, 25 bp, Homo sapien
actgtgctcggcctcaattgatttt

SEQ ID NO: 5674973 - DNA, 25 bp, Homo sapien
aaaaatcaattgaggccgagcacag

SEQ ID NO: 5674974 - DNA, 25 bp, Homo sapien
aaaatcaattgaggccgagcacagt

SEQ ID NO: 5674975 - DNA, 25 bp, Homo sapien
ctgtgctcggcctcaattgattttt

SEQ ID NO: 5674976 - DNA, 25 bp, Homo sapien
tgctcggcctcaattgatttttctt

SEQ ID NO: 5674977 - DNA, 25 bp, Homo sapien
gctcggcctcaattgatttttcttt

SEQ ID NO: 5674978 - DNA, 25 bp, Homo sapien
tgtgctcggcctcaattgatttttc

SEQ ID NO: 5674979 - DNA, 25 bp, Homo sapien
actgtgctcggcctcaattgatttt

SEQ ID NO: 5674980 - DNA, 25 bp, Homo sapien
gtgctcggcctcaattgatttttct

SEQ ID NO: 5674981 - DNA, 25 bp, Homo sapien
aaaagaaaaatcaattgaggccgag

SEQ ID NO: 5674982 - DNA, 25 bp, Homo sapien
gaaaaatcaattgaggccgagcaca

SEQ ID NO: 5674983 - DNA, 25 bp, Homo sapien
aaagaaaaatcaattgaggccgagc

SEQ ID NO: 5674984 - DNA, 25 bp, Homo sapien
aaaaatcaattgaggccgagcacag

SEQ ID NO: 5674985 - DNA, 25 bp, Homo sapien
aaaatcaattgaggccgagcacagt

SEQ ID NO: 5674986 - DNA, 25 bp, Homo sapien
agaaaaatcaattgaggccgagcac

SEQ ID NO: 5674987 - DNA, 25 bp, Homo sapien
tgctggggaatttgaagtgggagga

SEQ ID NO: 5674988 - DNA, 25 bp, Homo sapien
agctgctggggaatttgaagtggga

SEQ ID NO: 5674989 - DNA, 25 bp, Homo sapien
ctgctggggaatttgaagtgggagg

SEQ ID NO: 5674990 - DNA, 25 bp, Homo sapien
gctggggaatttgaagtgggaggat

SEQ ID NO: 5674991 - DNA, 25 bp, Homo sapien
cagctgctggggaatttgaagtggg

SEQ ID NO: 5674992 - DNA, 25 bp, Homo sapien
gctgctggggaatttgaagtgggag

SEQ ID NO: 5674993 - DNA, 25 bp, Homo sapien
atcctcccacttcaaattccccagc

SEQ ID NO: 5674994 - DNA, 25 bp, Homo sapien
tcctcccacttcaaattccccagca

SEQ ID NO: 5674995 - DNA, 25 bp, Homo sapien
cccacttcaaattccccagcagctg

SEQ ID NO: 5674996 - DNA, 25 bp, Homo sapien
tcccacttcaaattccccagcagct

SEQ ID NO: 5674997 - DNA, 25 bp, Homo sapien
ccacttcaaattccccagcagctgg

SEQ ID NO: 5674998 - DNA, 25 bp, Homo sapien
ctcccacttcaaattccccagcagc

SEQ ID NO: 5674999 - DNA, 25 bp, Homo sapien
ctgaatcgggaggattgcatgagcc

SEQ ID NO: 5675000 - DNA, 25 bp, Homo sapien
tgaatcgggaggattgcatgagccc

SEQ ID NO: 5675001 - DNA, 25 bp, Homo sapien
gctgaatcgggaggattgcatgagc

SEQ ID NO: 5675002 - DNA, 25 bp, Homo sapien
ggctgaatcgggaggattgcatgag

SEQ ID NO: 5675003 - DNA, 25 bp, Homo sapien
aggctgaatcgggaggattgcatga

SEQ ID NO: 5675004 - DNA, 25 bp, Homo sapien
agcctgggtaatatagtgaaacgct

SEQ ID NO: 5675005 - DNA, 25 bp, Homo sapien
ggctcatgcaatcctcccgattcag

SEQ ID NO: 5675006 - DNA, 25 bp, Homo sapien
ctcatgcaatcctcccgattcagcc

SEQ ID NO: 5675007 - DNA, 25 bp, Homo sapien
agcgtttcactatattacccaggct

SEQ ID NO: 5675008 - DNA, 25 bp, Homo sapien
gctcatgcaatcctcccgattcagc

SEQ ID NO: 5675009 - DNA, 25 bp, Homo sapien
tcatgcaatcctcccgattcagcct

SEQ ID NO: 5675010 - DNA, 25 bp, Homo sapien
gggctcatgcaatcctcccgattca

SEQ ID NO: 5675011 - DNA, 25 bp, Homo sapien
catgttggtttttgtgactgggttc

SEQ ID NO: 5675012 - DNA, 25 bp, Homo sapien
tcatgcatgttggtttttgtgactg

SEQ ID NO: 5675013 - DNA, 25 bp, Homo sapien
catgcatgttggtttttgtgactgg

SEQ ID NO: 5675014 - DNA, 25 bp, Homo sapien
gaatcatgcatgttggtttttgtga

SEQ ID NO: 5675015 - DNA, 25 bp, Homo sapien
tgcatgttggtttttgtgactgggt

SEQ ID NO: 5675016 - DNA, 25 bp, Homo sapien
aatcatgcatgttggtttttgtgac

SEQ ID NO: 5675017 - DNA, 25 bp, Homo sapien
gaacccagtcacaaaaaccaacatg

SEQ ID NO: 5675018 - DNA, 25 bp, Homo sapien
cagtcacaaaaaccaacatgcatga

SEQ ID NO: 5675019 - DNA, 25 bp, Homo sapien
cccagtcacaaaaaccaacatgcat

SEQ ID NO: 5675020 - DNA, 25 bp, Homo sapien
ccagtcacaaaaaccaacatgcatg

SEQ ID NO: 5675021 - DNA, 25 bp, Homo sapien
tcacaaaaaccaacatgcatgattc

SEQ ID NO: 5675022 - DNA, 25 bp, Homo sapien
gtcacaaaaaccaacatgcatgatt

SEQ ID NO: 5675023 - DNA, 25 bp, Homo sapien
gagagcagctggggcaacgtggtga

SEQ ID NO: 5675024 - DNA, 25 bp, Homo sapien
tgagagcagctggggcaacgtggtg

SEQ ID NO: 5675025 - DNA, 25 bp, Homo sapien
ctgggagagacaggcaggaggatcg

SEQ ID NO: 5675026 - DNA, 25 bp, Homo sapien
ttgagagcagctggggcaacgtggt

SEQ ID NO: 5675027 - DNA, 25 bp, Homo sapien
agagcagctggggcaacgtggtgaa

SEQ ID NO: 5675028 - DNA, 25 bp, Homo sapien
tgggagagacaggcaggaggatcgc

SEQ ID NO: 5675029 - DNA, 25 bp, Homo sapien
accacgttgccccagctgctctcaa

SEQ ID NO: 5675030 - DNA, 25 bp, Homo sapien
gcgatcctcctgcctgtctctccca

SEQ ID NO: 5675031 - DNA, 25 bp, Homo sapien
ggtttcaccacgttgccccagctgc

SEQ ID NO: 5675032 - DNA, 25 bp, Homo sapien
tcaccacgttgccccagctgctctc

SEQ ID NO: 5675033 - DNA, 25 bp, Homo sapien
cgatcctcctgcctgtctctcccag

SEQ ID NO: 5675034 - DNA, 25 bp, Homo sapien
ttcaccacgttgccccagctgctct

SEQ ID NO: 5675035 - DNA, 25 bp, Homo sapien
attctcacataccaggatggctgct

SEQ ID NO: 5675036 - DNA, 25 bp, Homo sapien
cagcccttactttagatttaagcag

SEQ ID NO: 5675037 - DNA, 25 bp, Homo sapien
cttactttagatttaagcagcagga

SEQ ID NO: 5675038 - DNA, 25 bp, Homo sapien
cattctcacataccaggatggctgc

SEQ ID NO: 5675039 - DNA, 25 bp, Homo sapien
tgcttagaaaccagcccttacttta

SEQ ID NO: 5675040 - DNA, 25 bp, Homo sapien
ttcattctcacataccaggatggct

SEQ ID NO: 5675041 - DNA, 25 bp, Homo sapien
tgctgcttaaatctaaagtaagggc

SEQ ID NO: 5675042 - DNA, 25 bp, Homo sapien
agccatcctggtatgtgagaatgaa

SEQ ID NO: 5675043 - DNA, 25 bp, Homo sapien
tcctgctgcttaaatctaaagtaag

SEQ ID NO: 5675044 - DNA, 25 bp, Homo sapien
tgcttaaatctaaagtaagggctgg

SEQ ID NO: 5675045 - DNA, 25 bp, Homo sapien
aaagtaagggctggtttctaagcag

SEQ ID NO: 5675046 - DNA, 25 bp, Homo sapien
agcagccatcctggtatgtgagaat

SEQ ID NO: 5675047 - DNA, 25 bp, Homo sapien
tgagacaagagtctctgtcacccag

SEQ ID NO: 5675048 - DNA, 25 bp, Homo sapien
gagacaagagtctctgtcacccagg

SEQ ID NO: 5675049 - DNA, 25 bp, Homo sapien
ctgggtgacagagactcttgtctca

SEQ ID NO: 5675050 - DNA, 25 bp, Homo sapien
cctgggtgacagagactcttgtctc

SEQ ID NO: 5675051 - DNA, 25 bp, Homo sapien
attacaggtgcggaccaccatgccc

SEQ ID NO: 5675052 - DNA, 25 bp, Homo sapien
tgagattacaggtgcggaccaccat

SEQ ID NO: 5675053 - DNA, 25 bp, Homo sapien
ggtgcggaccaccatgcccggctaa

SEQ ID NO: 5675054 - DNA, 25 bp, Homo sapien
caggtgcggaccaccatgcccggct

SEQ ID NO: 5675055 - DNA, 25 bp, Homo sapien
ctgagattacaggtgcggaccacca

SEQ ID NO: 5675056 - DNA, 25 bp, Homo sapien
aggtgcggaccaccatgcccggcta

SEQ ID NO: 5675057 - DNA, 25 bp, Homo sapien
attagccgggcatggtggtccgcac

SEQ ID NO: 5675058 - DNA, 25 bp, Homo sapien
atggtggtccgcacctgtaatctca

SEQ ID NO: 5675059 - DNA, 25 bp, Homo sapien
agccgggcatggtggtccgcacctg

SEQ ID NO: 5675060 - DNA, 25 bp, Homo sapien
ttagccgggcatggtggtccgcacc

SEQ ID NO: 5675061 - DNA, 25 bp, Homo sapien
tggtggtccgcacctgtaatctcag

SEQ ID NO: 5675062 - DNA, 25 bp, Homo sapien
gggcatggtggtccgcacctgtaat

SEQ ID NO: 5675063 - DNA, 25 bp, Homo sapien
tcttagctcactgcaagctccacct

SEQ ID NO: 5675064 - DNA, 25 bp, Homo sapien
cctgggttcaccccattctcatgcc

SEQ ID NO: 5675065 - DNA, 25 bp, Homo sapien
tggaactacaggcgcccttcacgac

SEQ ID NO: 5675066 - DNA, 25 bp, Homo sapien
ctcatgcctcagcctcctgagtagc

SEQ ID NO: 5675067 - DNA, 25 bp, Homo sapien
tggcacgatcttagctcactgcaag

SEQ ID NO: 5675068 - DNA, 25 bp, Homo sapien
ggcacgatcttagctcactgcaagc

SEQ ID NO: 5675069 - DNA, 25 bp, Homo sapien
gctactcaggaggctgaggcatgag

SEQ ID NO: 5675070 - DNA, 25 bp, Homo sapien
ggcatgagaatggggtgaacccagg

SEQ ID NO: 5675071 - DNA, 25 bp, Homo sapien
cttgcagtgagctaagatcgtgcca

SEQ ID NO: 5675072 - DNA, 25 bp, Homo sapien
gtcgtgaagggcgcctgtagttcca

SEQ ID NO: 5675073 - DNA, 25 bp, Homo sapien
gcttgcagtgagctaagatcgtgcc

SEQ ID NO: 5675074 - DNA, 25 bp, Homo sapien
aggtggagcttgcagtgagctaaga

SEQ ID NO: 5675075 - DNA, 25 bp, Homo sapien
cgtttctttgcatcccatagggtcc

SEQ ID NO: 5675076 - DNA, 25 bp, Homo sapien
cccatagggtcctggttgtttgact

SEQ ID NO: 5675077 - DNA, 25 bp, Homo sapien
gcatcccatagggtcctggttgttt

SEQ ID NO: 5675078 - DNA, 25 bp, Homo sapien
aaagcccatgcagattaggccttat

SEQ ID NO: 5675079 - DNA, 25 bp, Homo sapien
caaaagcccatgcagattaggcctt

SEQ ID NO: 5675080 - DNA, 25 bp, Homo sapien
tctttgcatcccatagggtcctggt

SEQ ID NO: 5675081 - DNA, 25 bp, Homo sapien
aaacaaccaggaccctatgggatgc

SEQ ID NO: 5675082 - DNA, 25 bp, Homo sapien
agtcaaacaaccaggaccctatggg

SEQ ID NO: 5675083 - DNA, 25 bp, Homo sapien
caaccaggaccctatgggatgcaaa

SEQ ID NO: 5675084 - DNA, 25 bp, Homo sapien
ggaccctatgggatgcaaagaaacg

SEQ ID NO: 5675085 - DNA, 25 bp, Homo sapien
taaggcctaatctgcatgggctttt

SEQ ID NO: 5675086 - DNA, 25 bp, Homo sapien
ccaggaccctatgggatgcaaagaa

SEQ ID NO: 5675087 - DNA, 25 bp, Homo sapien
cgggatggtctcgatctcctgacct

SEQ ID NO: 5675088 - DNA, 25 bp, Homo sapien
gggatggtctcgatctcctgacctc

SEQ ID NO: 5675089 - DNA, 25 bp, Homo sapien
ccaccacacctggccgaaagagatt

SEQ ID NO: 5675090 - DNA, 25 bp, Homo sapien
acctcgtgatctgcccgcctcggcc

SEQ ID NO: 5675091 - DNA, 25 bp, Homo sapien
ctgacctcgtgatctgcccgcctcg

SEQ ID NO: 5675092 - DNA, 25 bp, Homo sapien
aaagtgctggaattacaggcgtgag

SEQ ID NO: 5675093 - DNA, 25 bp, Homo sapien
gaggtcaggagatcgagaccatccc

SEQ ID NO: 5675094 - DNA, 25 bp, Homo sapien
ggccgaggcgggcagatcacgaggt

SEQ ID NO: 5675095 - DNA, 25 bp, Homo sapien
aatctctttcggccaggtgtggtgg

SEQ ID NO: 5675096 - DNA, 25 bp, Homo sapien
ctcacgcctgtaattccagcacttt

SEQ ID NO: 5675097 - DNA, 25 bp, Homo sapien
cgaggcgggcagatcacgaggtcag

SEQ ID NO: 5675098 - DNA, 25 bp, Homo sapien
aggtcaggagatcgagaccatcccg

SEQ ID NO: 5675099 - DNA, 25 bp, Homo sapien
gacacatgcagtaatctcagacaca

SEQ ID NO: 5675100 - DNA, 25 bp, Homo sapien
gaagacacatgcagtaatctcagac

SEQ ID NO: 5675101 - DNA, 25 bp, Homo sapien
aatagaagacacatgcagtaatctc

SEQ ID NO: 5675102 - DNA, 25 bp, Homo sapien
aagacacatgcagtaatctcagaca

SEQ ID NO: 5675103 - DNA, 25 bp, Homo sapien
tagaagacacatgcagtaatctcag

SEQ ID NO: 5675104 - DNA, 25 bp, Homo sapien
catgcagtaatctcagacacaccag

SEQ ID NO: 5675105 - DNA, 25 bp, Homo sapien
gagattactgcatgtgtcttctatt

SEQ ID NO: 5675106 - DNA, 25 bp, Homo sapien
ctggtgtgtctgagattactgcatg

SEQ ID NO: 5675107 - DNA, 25 bp, Homo sapien
tgtgtctgagattactgcatgtgtc

SEQ ID NO: 5675108 - DNA, 25 bp, Homo sapien
tggtgtgtctgagattactgcatgt

SEQ ID NO: 5675109 - DNA, 25 bp, Homo sapien
tctgagattactgcatgtgtcttct

SEQ ID NO: 5675110 - DNA, 25 bp, Homo sapien
gtctgagattactgcatgtgtcttc

SEQ ID NO: 5675111 - DNA, 25 bp, Homo sapien
attttgtccgataatcacttgtaat

SEQ ID NO: 5675112 - DNA, 25 bp, Homo sapien
gctttcattttgtccgataatcact

SEQ ID NO: 5675113 - DNA, 25 bp, Homo sapien
gtgtattgccgcactcccagtatcc

SEQ ID NO: 5675114 - DNA, 25 bp, Homo sapien
cattttgtccgataatcacttgtaa

SEQ ID NO: 5675115 - DNA, 25 bp, Homo sapien
tgtgtattgccgcactcccagtatc

SEQ ID NO: 5675116 - DNA, 25 bp, Homo sapien
gccgcactcccagtatcccagaaat

SEQ ID NO: 5675117 - DNA, 25 bp, Homo sapien
gatactgggagtgcggcaatacaca

SEQ ID NO: 5675118 - DNA, 25 bp, Homo sapien
agtgattatcggacaaaatgaaagc

SEQ ID NO: 5675119 - DNA, 25 bp, Homo sapien
gatttctgggatactgggagtgcgg

SEQ ID NO: 5675120 - DNA, 25 bp, Homo sapien
ggatactgggagtgcggcaatacac

SEQ ID NO: 5675121 - DNA, 25 bp, Homo sapien
attacaagtgattatcggacaaaat

SEQ ID NO: 5675122 - DNA, 25 bp, Homo sapien
tacaagtgattatcggacaaaatga

SEQ ID NO: 5675123 - DNA, 25 bp, Homo sapien
tgagcctcccaaagtacttggatta

SEQ ID NO: 5675124 - DNA, 25 bp, Homo sapien
atctgagcctcccaaagtacttgga

SEQ ID NO: 5675125 - DNA, 25 bp, Homo sapien
aagtgatctgcccatctgagcctcc

SEQ ID NO: 5675126 - DNA, 25 bp, Homo sapien
tctgagcctcccaaagtacttggat

SEQ ID NO: 5675127 - DNA, 25 bp, Homo sapien
ctgagcctcccaaagtacttggatt

SEQ ID NO: 5675128 - DNA, 25 bp, Homo sapien
tggccaggctgctggtttcgaactc

SEQ ID NO: 5675129 - DNA, 25 bp, Homo sapien
ggaggctcagatgggcagatcactt

SEQ ID NO: 5675130 - DNA, 25 bp, Homo sapien
tccaagtactttgggaggctcagat

SEQ ID NO: 5675131 - DNA, 25 bp, Homo sapien
atccaagtactttgggaggctcaga

SEQ ID NO: 5675132 - DNA, 25 bp, Homo sapien
aatccaagtactttgggaggctcag

SEQ ID NO: 5675133 - DNA, 25 bp, Homo sapien
gagttcgaaaccagcagcctggcca

SEQ ID NO: 5675134 - DNA, 25 bp, Homo sapien
taatccaagtactttgggaggctca

SEQ ID NO: 5675135 - DNA, 25 bp, Homo sapien
acagtcttgctgtcacccagactgg

SEQ ID NO: 5675136 - DNA, 25 bp, Homo sapien
cagtcttgctgtcacccagactgga

SEQ ID NO: 5675137 - DNA, 25 bp, Homo sapien
tccagtctgggtgacagcaagactg

SEQ ID NO: 5675138 - DNA, 25 bp, Homo sapien
ccagtctgggtgacagcaagactgt

SEQ ID NO: 5675139 - DNA, 25 bp, Homo sapien
aacacttagggagccaacacgggag

SEQ ID NO: 5675140 - DNA, 25 bp, Homo sapien
acttagggagccaacacgggagaat

SEQ ID NO: 5675141 - DNA, 25 bp, Homo sapien
cacttagggagccaacacgggagaa

SEQ ID NO: 5675142 - DNA, 25 bp, Homo sapien
caacacttagggagccaacacggga

SEQ ID NO: 5675143 - DNA, 25 bp, Homo sapien
ccaacacttagggagccaacacggg

SEQ ID NO: 5675144 - DNA, 25 bp, Homo sapien
acacttagggagccaacacgggaga

SEQ ID NO: 5675145 - DNA, 25 bp, Homo sapien
attctcccgtgttggctccctaagt

SEQ ID NO: 5675146 - DNA, 25 bp, Homo sapien
tctcccgtgttggctccctaagtgt

SEQ ID NO: 5675147 - DNA, 25 bp, Homo sapien
ctcccgtgttggctccctaagtgtt

SEQ ID NO: 5675148 - DNA, 25 bp, Homo sapien
cccgtgttggctccctaagtgttgg

SEQ ID NO: 5675149 - DNA, 25 bp, Homo sapien
ttctcccgtgttggctccctaagtg

SEQ ID NO: 5675150 - DNA, 25 bp, Homo sapien
tcccgtgttggctccctaagtgttg

SEQ ID NO: 5675151 - DNA, 25 bp, Homo sapien
tcaaaattccagctggcttttttgc

SEQ ID NO: 5675152 - DNA, 25 bp, Homo sapien
caaactgttactaaaatacatacca

SEQ ID NO: 5675153 - DNA, 25 bp, Homo sapien
caaatcgatctgtagattcagtgta

SEQ ID NO: 5675154 - DNA, 25 bp, Homo sapien
ccccaaatcgatctgtagattcagt

SEQ ID NO: 5675155 - DNA, 25 bp, Homo sapien
tgcagaaattgacaaactgttacta

SEQ ID NO: 5675156 - DNA, 25 bp, Homo sapien
ctgtagattcagtgtaattcctatc

SEQ ID NO: 5675157 - DNA, 25 bp, Homo sapien
tatgtattttagtaacagtttgtca

SEQ ID NO: 5675158 - DNA, 25 bp, Homo sapien
gataggaattacactgaatctacag

SEQ ID NO: 5675159 - DNA, 25 bp, Homo sapien
cactgaatctacagatcgatttggg

SEQ ID NO: 5675160 - DNA, 25 bp, Homo sapien
caatttctgcaaaaaagccagctgg

SEQ ID NO: 5675161 - DNA, 25 bp, Homo sapien
gcaaaaaagccagctggaattttga

SEQ ID NO: 5675162 - DNA, 25 bp, Homo sapien
tagtaacagtttgtcaatttctgca

SEQ ID NO: 5675163 - DNA, 25 bp, Homo sapien
ggcgtccatgttcatatgtcagaag

SEQ ID NO: 5675164 - DNA, 25 bp, Homo sapien
gaaaggcgtccatgttcatatgtca

SEQ ID NO: 5675165 - DNA, 25 bp, Homo sapien
aaaggcgtccatgttcatatgtcag

SEQ ID NO: 5675166 - DNA, 25 bp, Homo sapien
ggaaaggcgtccatgttcatatgtc

SEQ ID NO: 5675167 - DNA, 25 bp, Homo sapien
cgtccatgttcatatgtcagaagac

SEQ ID NO: 5675168 - DNA, 25 bp, Homo sapien
aaggcgtccatgttcatatgtcaga

SEQ ID NO: 5675169 - DNA, 25 bp, Homo sapien
tcttctgacatatgaacatggacgc

SEQ ID NO: 5675170 - DNA, 25 bp, Homo sapien
gacatatgaacatggacgcctttcc

SEQ ID NO: 5675171 - DNA, 25 bp, Homo sapien
tgacatatgaacatggacgcctttc

SEQ ID NO: 5675172 - DNA, 25 bp, Homo sapien
tctgacatatgaacatggacgcctt

SEQ ID NO: 5675173 - DNA, 25 bp, Homo sapien
ttctgacatatgaacatggacgcct

SEQ ID NO: 5675174 - DNA, 25 bp, Homo sapien
gtcttctgacatatgaacatggacg

SEQ ID NO: 5675175 - DNA, 25 bp, Homo sapien
ggtgggagacaaggcttccctacat

SEQ ID NO: 5675176 - DNA, 25 bp, Homo sapien
gcttccctacatttagtttgatgcc

SEQ ID NO: 5675177 - DNA, 25 bp, Homo sapien
ctcttctacaaagtagtggtgggag

SEQ ID NO: 5675178 - DNA, 25 bp, Homo sapien
caaggcttccctacatttagtttga

SEQ ID NO: 5675179 - DNA, 25 bp, Homo sapien
gcattatttgttagctgtttcttat

SEQ ID NO: 5675180 - DNA, 25 bp, Homo sapien
cctcttctacaaagtagtggtggga

SEQ ID NO: 5675181 - DNA, 25 bp, Homo sapien
aggcatcaaactaaatgtagggaag

SEQ ID NO: 5675182 - DNA, 25 bp, Homo sapien
caaactaaatgtagggaagccttgt

SEQ ID NO: 5675183 - DNA, 25 bp, Homo sapien
tataagaaacagctaacaaataatg

SEQ ID NO: 5675184 - DNA, 25 bp, Homo sapien
atgtagggaagccttgtctcccacc

SEQ ID NO: 5675185 - DNA, 25 bp, Homo sapien
tcccaccactactttgtagaagagg

SEQ ID NO: 5675186 - DNA, 25 bp, Homo sapien
catcaaactaaatgtagggaagcct

SEQ ID NO: 5675187 - DNA, 25 bp, Homo sapien
gagagtattagaacttacaggagga

SEQ ID NO: 5675188 - DNA, 25 bp, Homo sapien
ggctagcagtgcgactgacgttgaa

SEQ ID NO: 5675189 - DNA, 25 bp, Homo sapien
agaacttacaggaggactgttgcga

SEQ ID NO: 5675190 - DNA, 25 bp, Homo sapien
taaatgagagtattagaacttacag

SEQ ID NO: 5675191 - DNA, 25 bp, Homo sapien
gcagtgcgactgacgttgaacaaat

SEQ ID NO: 5675192 - DNA, 25 bp, Homo sapien
tattagaacttacaggaggactgtt

SEQ ID NO: 5675193 - DNA, 25 bp, Homo sapien
gcaacagtcctcctgtaagttctaa

SEQ ID NO: 5675194 - DNA, 25 bp, Homo sapien
tgttcaacgtcagtcgcactgctag

SEQ ID NO: 5675195 - DNA, 25 bp, Homo sapien
tcgcaacagtcctcctgtaagttct

SEQ ID NO: 5675196 - DNA, 25 bp, Homo sapien
taagttctaatactctcatttacaa

SEQ ID NO: 5675197 - DNA, 25 bp, Homo sapien
atttgttcaacgtcagtcgcactgc

SEQ ID NO: 5675198 - DNA, 25 bp, Homo sapien
ttcaacgtcagtcgcactgctagcc

SEQ ID NO: 5675199 - DNA, 25 bp, Homo sapien
gaatcacttctcttgacacggggaa

SEQ ID NO: 5675200 - DNA, 25 bp, Homo sapien
tgtgtactctgaaacggattgctta

SEQ ID NO: 5675201 - DNA, 25 bp, Homo sapien
aaatgtgtactctgaaacggattgc

SEQ ID NO: 5675202 - DNA, 25 bp, Homo sapien
tctgaaacggattgcttaatttact

SEQ ID NO: 5675203 - DNA, 25 bp, Homo sapien
ttagaaatgtgtactctgaaacgga

SEQ ID NO: 5675204 - DNA, 25 bp, Homo sapien
taagacagtggaatgtttagaaatg

SEQ ID NO: 5675205 - DNA, 25 bp, Homo sapien
tccgtttcagagtacacatttctaa

SEQ ID NO: 5675206 - DNA, 25 bp, Homo sapien
catttctaaacattccactgtctta

SEQ ID NO: 5675207 - DNA, 25 bp, Homo sapien
tccccgtgtcaagagaagtgattct

SEQ ID NO: 5675208 - DNA, 25 bp, Homo sapien
ccttccttccccgtgtcaagagaag

SEQ ID NO: 5675209 - DNA, 25 bp, Homo sapien
gtaaattaagcaatccgtttcagag

SEQ ID NO: 5675210 - DNA, 25 bp, Homo sapien
taagcaatccgtttcagagtacaca

SEQ ID NO: 5675211 - DNA, 25 bp, Homo sapien
tagttaatcgccctaagttgcatat

SEQ ID NO: 5675212 - DNA, 25 bp, Homo sapien
tttcagtgtcaccaaggtttgcctg

SEQ ID NO: 5675213 - DNA, 25 bp, Homo sapien
tattcaaactagttaatcgccctaa

SEQ ID NO: 5675214 - DNA, 25 bp, Homo sapien
tcaccaaggtttgcctgagtaggca

SEQ ID NO: 5675215 - DNA, 25 bp, Homo sapien
taatcgagtctttcagtgtcaccaa

SEQ ID NO: 5675216 - DNA, 25 bp, Homo sapien
tcgccctaagttgcatattaattaa

SEQ ID NO: 5675217 - DNA, 25 bp, Homo sapien
caggcaaaccttggtgacactgaaa

SEQ ID NO: 5675218 - DNA, 25 bp, Homo sapien
taattaatatgcaacttagggcgat

SEQ ID NO: 5675219 - DNA, 25 bp, Homo sapien
ccttggtgacactgaaagactcgat

SEQ ID NO: 5675220 - DNA, 25 bp, Homo sapien
gaaagactcgattaattaatatgca

SEQ ID NO: 5675221 - DNA, 25 bp, Homo sapien
cttagggcgattaactagtttgaat

SEQ ID NO: 5675222 - DNA, 25 bp, Homo sapien
tgcctactcaggcaaaccttggtga

SEQ ID NO: 5675223 - DNA, 25 bp, Homo sapien
tgagccaccacgcccggcctgtttt

SEQ ID NO: 5675224 - DNA, 25 bp, Homo sapien
gtgctgggattacaggtgtgagcca

SEQ ID NO: 5675225 - DNA, 25 bp, Homo sapien
agtgctgggattacaggtgtgagcc

SEQ ID NO: 5675226 - DNA, 25 bp, Homo sapien
aaagtgctgggattacaggtgtgag

SEQ ID NO: 5675227 - DNA, 25 bp, Homo sapien
tgctgggattacaggtgtgagccac

SEQ ID NO: 5675228 - DNA, 25 bp, Homo sapien
aagtgctgggattacaggtgtgagc

SEQ ID NO: 5675229 - DNA, 25 bp, Homo sapien
gctcacacctgtaatcccagcactt

SEQ ID NO: 5675230 - DNA, 25 bp, Homo sapien
ggctcacacctgtaatcccagcact

SEQ ID NO: 5675231 - DNA, 25 bp, Homo sapien
tggctcacacctgtaatcccagcac

SEQ ID NO: 5675232 - DNA, 25 bp, Homo sapien
ctcacacctgtaatcccagcacttt

SEQ ID NO: 5675233 - DNA, 25 bp, Homo sapien
aaaacaggccgggcgtggtggctca

SEQ ID NO: 5675234 - DNA, 25 bp, Homo sapien
gtggctcacacctgtaatcccagca

SEQ ID NO: 5675235 - DNA, 25 bp, Homo sapien
gaaatgtatgcaaaaacatcataaa

SEQ ID NO: 5675236 - DNA, 25 bp, Homo sapien
tgtatgcaaaaacatcataaaagca

SEQ ID NO: 5675237 - DNA, 25 bp, Homo sapien
catcataaaagcatagaaaacaaac

SEQ ID NO: 5675238 - DNA, 25 bp, Homo sapien
tgcaaaaacatcataaaagcataga

SEQ ID NO: 5675239 - DNA, 25 bp, Homo sapien
gcatagaaaacaaacataatagggt

SEQ ID NO: 5675240 - DNA, 25 bp, Homo sapien
catagaaaacaaacataatagggtt

SEQ ID NO: 5675241 - DNA, 25 bp, Homo sapien
tctatgcttttatgatgtttttgca

SEQ ID NO: 5675242 - DNA, 25 bp, Homo sapien
tgcttttatgatgtttttgcataca

SEQ ID NO: 5675243 - DNA, 25 bp, Homo sapien
aaccctattatgtttgttttctatg

SEQ ID NO: 5675244 - DNA, 25 bp, Homo sapien
gcttttatgatgtttttgcatacat

SEQ ID NO: 5675245 - DNA, 25 bp, Homo sapien
ccctattatgtttgttttctatgct

SEQ ID NO: 5675246 - DNA, 25 bp, Homo sapien
accctattatgtttgttttctatgc

SEQ ID NO: 5675247 - DNA, 25 bp, Homo sapien
actcaaacatatgtgacattgttat

SEQ ID NO: 5675248 - DNA, 25 bp, Homo sapien
caaacatatgtgacattgttattat

SEQ ID NO: 5675249 - DNA, 25 bp, Homo sapien
tcaaacatatgtgacattgttatta

SEQ ID NO: 5675250 - DNA, 25 bp, Homo sapien
gactcaaacatatgtgacattgtta

SEQ ID NO: 5675251 - DNA, 25 bp, Homo sapien
ctcaaacatatgtgacattgttatt

SEQ ID NO: 5675252 - DNA, 25 bp, Homo sapien
aataacaatgtcacatatgtttgag

SEQ ID NO: 5675253 - DNA, 25 bp, Homo sapien
taacaatgtcacatatgtttgagtc

SEQ ID NO: 5675254 - DNA, 25 bp, Homo sapien
ataataacaatgtcacatatgtttg

SEQ ID NO: 5675255 - DNA, 25 bp, Homo sapien
ataacaatgtcacatatgtttgagt

SEQ ID NO: 5675256 - DNA, 25 bp, Homo sapien
taataacaatgtcacatatgtttga

SEQ ID NO: 5675257 - DNA, 25 bp, Homo sapien
caagagttgatgatttcagagtgac

SEQ ID NO: 5675258 - DNA, 25 bp, Homo sapien
tgtacagaaaaaagatacacacatc

SEQ ID NO: 5675259 - DNA, 25 bp, Homo sapien
gactcaaacatatgtgacattgtta

SEQ ID NO: 5675260 - DNA, 25 bp, Homo sapien
tatttcttcctctggtgtgtacaga

SEQ ID NO: 5675261 - DNA, 25 bp, Homo sapien
tcagagtgactcaaacatatgtgac

SEQ ID NO: 5675262 - DNA, 25 bp, Homo sapien
cctctggtgtgtacagaaaaaagat

SEQ ID NO: 5675263 - DNA, 25 bp, Homo sapien
gtcacatatgtttgagtcactctga

SEQ ID NO: 5675264 - DNA, 25 bp, Homo sapien
tcactctgaaatcatcaactcttgg

SEQ ID NO: 5675265 - DNA, 25 bp, Homo sapien
gaggaagaaataataacaatgtcac

SEQ ID NO: 5675266 - DNA, 25 bp, Homo sapien
tatcttttttctgtacacaccagag

SEQ ID NO: 5675267 - DNA, 25 bp, Homo sapien
tctgtacacaccagaggaagaaata

SEQ ID NO: 5675268 - DNA, 25 bp, Homo sapien
taacaatgtcacatatgtttgagtc

SEQ ID NO: 5675269 - DNA, 25 bp, Homo sapien
aagagaaagccatccccttccttga

SEQ ID NO: 5675270 - DNA, 25 bp, Homo sapien
tcaaggaaggggatggctttctctt

SEQ ID NO: 5675271 - DNA, 25 bp, Homo sapien
tccccttccttgacatcatctgtaa

SEQ ID NO: 5675272 - DNA, 25 bp, Homo sapien
taaacagacattaaaacagtaagag

SEQ ID NO: 5675273 - DNA, 25 bp, Homo sapien
acaggtgtaagacatgctagaacca

SEQ ID NO: 5675274 - DNA, 25 bp, Homo sapien
cagtaagagtaaacaggtgtaagac

SEQ ID NO: 5675275 - DNA, 25 bp, Homo sapien
catcatctgtaatgagtaaacagac

SEQ ID NO: 5675276 - DNA, 25 bp, Homo sapien
aagagaaagccatccccttccttga

SEQ ID NO: 5675277 - DNA, 25 bp, Homo sapien
cattacagatgatgtcaaggaaggg

SEQ ID NO: 5675278 - DNA, 25 bp, Homo sapien
tcaaggaaggggatggctttctctt

SEQ ID NO: 5675279 - DNA, 25 bp, Homo sapien
gtcttacacctgtttactcttactg

SEQ ID NO: 5675280 - DNA, 25 bp, Homo sapien
tactgttttaatgtctgtttactca

SEQ ID NO: 5675281 - DNA, 25 bp, Homo sapien
gtctgtttactcattacagatgatg

SEQ ID NO: 5675282 - DNA, 25 bp, Homo sapien
tggttctagcatgtcttacacctgt

SEQ ID NO: 5675283 - DNA, 25 bp, Homo sapien
cagtgagccttgatgacagcactgc

SEQ ID NO: 5675284 - DNA, 25 bp, Homo sapien
agtgagccttgatgacagcactgca

SEQ ID NO: 5675285 - DNA, 25 bp, Homo sapien
agccttgatgacagcactgcactcc

SEQ ID NO: 5675286 - DNA, 25 bp, Homo sapien
gagccttgatgacagcactgcactc

SEQ ID NO: 5675287 - DNA, 25 bp, Homo sapien
tgagccttgatgacagcactgcact

SEQ ID NO: 5675288 - DNA, 25 bp, Homo sapien
ccttgatgacagcactgcactccag

SEQ ID NO: 5675289 - DNA, 25 bp, Homo sapien
tgcagtgctgtcatcaaggctcact

SEQ ID NO: 5675290 - DNA, 25 bp, Homo sapien
gctggagtgcagtgctgtcatcaag

SEQ ID NO: 5675291 - DNA, 25 bp, Homo sapien
ggagtgcagtgctgtcatcaaggct

SEQ ID NO: 5675292 - DNA, 25 bp, Homo sapien
agtgcagtgctgtcatcaaggctca

SEQ ID NO: 5675293 - DNA, 25 bp, Homo sapien
ctggagtgcagtgctgtcatcaagg

SEQ ID NO: 5675294 - DNA, 25 bp, Homo sapien
gagtgcagtgctgtcatcaaggctc

SEQ ID NO: 5675295 - DNA, 25 bp, Homo sapien
cacacccacacaaatagaaaaaaat

SEQ ID NO: 5675296 - DNA, 25 bp, Homo sapien
aatttagtcgggaatggtggcacac

SEQ ID NO: 5675297 - DNA, 25 bp, Homo sapien
aaccccgtctccacacacacaccca

SEQ ID NO: 5675298 - DNA, 25 bp, Homo sapien
tttagtcgggaatggtggcacacac

SEQ ID NO: 5675299 - DNA, 25 bp, Homo sapien
cacacacccacacaaatagaaaaaa

SEQ ID NO: 5675300 - DNA, 25 bp, Homo sapien
aaatttagtcgggaatggtggcaca

SEQ ID NO: 5675301 - DNA, 25 bp, Homo sapien
gtgtgccaccattcccgactaaatt

SEQ ID NO: 5675302 - DNA, 25 bp, Homo sapien
tgtgccaccattcccgactaaattt

SEQ ID NO: 5675303 - DNA, 25 bp, Homo sapien
gtgtgtgccaccattcccgactaaa

SEQ ID NO: 5675304 - DNA, 25 bp, Homo sapien
ttttttctatttgtgtgggtgtgtg

SEQ ID NO: 5675305 - DNA, 25 bp, Homo sapien
atttttttctatttgtgtgggtgtg

SEQ ID NO: 5675306 - DNA, 25 bp, Homo sapien
tgggtgtgtgtgtggagacggggtt

SEQ ID NO: 5675307 - DNA, 25 bp, Homo sapien
ggagttcatcactgagcccaggagt

SEQ ID NO: 5675308 - DNA, 25 bp, Homo sapien
ccaggagttcatcactgagcccagg

SEQ ID NO: 5675309 - DNA, 25 bp, Homo sapien
aggagttcatcactgagcccaggag

SEQ ID NO: 5675310 - DNA, 25 bp, Homo sapien
ctttggaagacagaggcgggtgggt

SEQ ID NO: 5675311 - DNA, 25 bp, Homo sapien
cccaggagttcatcactgagcccag

SEQ ID NO: 5675312 - DNA, 25 bp, Homo sapien
gcccaggagttcatcactgagccca

SEQ ID NO: 5675313 - DNA, 25 bp, Homo sapien
tcctgggctcagtgatgaactcctg

SEQ ID NO: 5675314 - DNA, 25 bp, Homo sapien
ctcctgggctcagtgatgaactcct

SEQ ID NO: 5675315 - DNA, 25 bp, Homo sapien
actcctgggctcagtgatgaactcc

SEQ ID NO: 5675316 - DNA, 25 bp, Homo sapien
cctgggctcagtgatgaactcctgg

SEQ ID NO: 5675317 - DNA, 25 bp, Homo sapien
ctgggctcagtgatgaactcctggg

SEQ ID NO: 5675318 - DNA, 25 bp, Homo sapien
tgggctcagtgatgaactcctgggc

SEQ ID NO: 5675319 - DNA, 25 bp, Homo sapien
gatattagtcattagtaggctggcc

SEQ ID NO: 5675320 - DNA, 25 bp, Homo sapien
caaagtgtgagatattagtcattag

SEQ ID NO: 5675321 - DNA, 25 bp, Homo sapien
gtcattagtaggctggccattgaac

SEQ ID NO: 5675322 - DNA, 25 bp, Homo sapien
taaattagttattagtgggctggcc

SEQ ID NO: 5675323 - DNA, 25 bp, Homo sapien
aacagctccacatttcaaaatgtga

SEQ ID NO: 5675324 - DNA, 25 bp, Homo sapien
ttagttattagtgggctggcccatt

SEQ ID NO: 5675325 - DNA, 25 bp, Homo sapien
tcacattttgaaatgtggagctgtt

SEQ ID NO: 5675326 - DNA, 25 bp, Homo sapien
gttcaatggccagcctactaatgac

SEQ ID NO: 5675327 - DNA, 25 bp, Homo sapien
aatgggccagcccactaataactaa

SEQ ID NO: 5675328 - DNA, 25 bp, Homo sapien
taatgactaatatctcacactttga

SEQ ID NO: 5675329 - DNA, 25 bp, Homo sapien
tgggccagcccactaataactaatt

SEQ ID NO: 5675330 - DNA, 25 bp, Homo sapien
caatggccagcctactaatgactaa

SEQ ID NO: 5675331 - DNA, 25 bp, Homo sapien
gatatgtagcttagataggattgtt

SEQ ID NO: 5675332 - DNA, 25 bp, Homo sapien
atatgtagcttagataggattgttt

SEQ ID NO: 5675333 - DNA, 25 bp, Homo sapien
tagatatgtagcttagataggattg

SEQ ID NO: 5675334 - DNA, 25 bp, Homo sapien
gctataacacatggttagatatgta

SEQ ID NO: 5675335 - DNA, 25 bp, Homo sapien
taacacatggttagatatgtagctt

SEQ ID NO: 5675336 - DNA, 25 bp, Homo sapien
tataacacatggttagatatgtagc

SEQ ID NO: 5675337 - DNA, 25 bp, Homo sapien
ccactgtatggctataacacatggt

SEQ ID NO: 5675338 - DNA, 25 bp, Homo sapien
accatgtgttatagccatacagtgg

SEQ ID NO: 5675339 - DNA, 25 bp, Homo sapien
aacaatcctatctaagctacatatc

SEQ ID NO: 5675340 - DNA, 25 bp, Homo sapien
tacatatctaaccatgtgttatagc

SEQ ID NO: 5675341 - DNA, 25 bp, Homo sapien
caatcctatctaagctacatatcta

SEQ ID NO: 5675342 - DNA, 25 bp, Homo sapien
aagctacatatctaaccatgtgtta

SEQ ID NO: 5675343 - DNA, 25 bp, Homo sapien
gctacatatctaaccatgtgttata

SEQ ID NO: 5675344 - DNA, 25 bp, Homo sapien
aaacaatcctatctaagctacatat

SEQ ID NO: 5675345 - DNA, 25 bp, Homo sapien
gtttcttttactgagcatagtattt

SEQ ID NO: 5675346 - DNA, 25 bp, Homo sapien
agtacagtactgtacttcgttcctt

SEQ ID NO: 5675347 - DNA, 25 bp, Homo sapien
cagtacagtactgtacttcgttcct

SEQ ID NO: 5675348 - DNA, 25 bp, Homo sapien
tttcttttactgagcatagtatttt

SEQ ID NO: 5675349 - DNA, 25 bp, Homo sapien
aggaacgaagtacagtactgtactg

SEQ ID NO: 5675350 - DNA, 25 bp, Homo sapien
aaaatactatgctcagtaaaagaaa

SEQ ID NO: 5675351 - DNA, 25 bp, Homo sapien
aaatactatgctcagtaaaagaaac

SEQ ID NO: 5675352 - DNA, 25 bp, Homo sapien
aaggaacgaagtacagtactgtact

SEQ ID NO: 5675353 - DNA, 25 bp, Homo sapien
agaaggctgggacacaagaatcgct

SEQ ID NO: 5675354 - DNA, 25 bp, Homo sapien
gaaggctgggacacaagaatcgctt

SEQ ID NO: 5675355 - DNA, 25 bp, Homo sapien
tcagaaggctgggacacaagaatcg

SEQ ID NO: 5675356 - DNA, 25 bp, Homo sapien
aaggctgggacacaagaatcgcttg

SEQ ID NO: 5675357 - DNA, 25 bp, Homo sapien
cagaaggctgggacacaagaatcgc

SEQ ID NO: 5675358 - DNA, 25 bp, Homo sapien
cgattcttgtgtcccagccttctga

SEQ ID NO: 5675359 - DNA, 25 bp, Homo sapien
gcgattcttgtgtcccagccttctg

SEQ ID NO: 5675360 - DNA, 25 bp, Homo sapien
agcgattcttgtgtcccagccttct

SEQ ID NO: 5675361 - DNA, 25 bp, Homo sapien
caagcgattcttgtgtcccagcctt

SEQ ID NO: 5675362 - DNA, 25 bp, Homo sapien
aagcgattcttgtgtcccagccttc

SEQ ID NO: 5675363 - DNA, 25 bp, Homo sapien
aactggctagcatcccaagtaaggt

SEQ ID NO: 5675364 - DNA, 25 bp, Homo sapien
caaactggctagcatcccaagtaag

SEQ ID NO: 5675365 - DNA, 25 bp, Homo sapien
aaactggctagcatcccaagtaagg

SEQ ID NO: 5675366 - DNA, 25 bp, Homo sapien
actggctagcatcccaagtaaggtg

SEQ ID NO: 5675367 - DNA, 25 bp, Homo sapien
gtgaattaaatcctgacatggggct

SEQ ID NO: 5675368 - DNA, 25 bp, Homo sapien
ttacatgttgactggttcaaactgg

SEQ ID NO: 5675369 - DNA, 25 bp, Homo sapien
ccagtttgaaccagtcaacatgtaa

SEQ ID NO: 5675370 - DNA, 25 bp, Homo sapien
ccttacttgggatgctagccagttt

SEQ ID NO: 5675371 - DNA, 25 bp, Homo sapien
cttacttgggatgctagccagtttg

SEQ ID NO: 5675372 - DNA, 25 bp, Homo sapien
agccccatgtcaggatttaattcac

SEQ ID NO: 5675373 - DNA, 25 bp, Homo sapien
caccttacttgggatgctagccagt

SEQ ID NO: 5675374 - DNA, 25 bp, Homo sapien
cagtttgaaccagtcaacatgtaaa

SEQ ID NO: 5675375 - DNA, 25 bp, Homo sapien
gagccactgcatccagcctaatttt

SEQ ID NO: 5675376 - DNA, 25 bp, Homo sapien
catgagccactgcatccagcctaat

SEQ ID NO: 5675377 - DNA, 25 bp, Homo sapien
gcatgagccactgcatccagcctaa

SEQ ID NO: 5675378 - DNA, 25 bp, Homo sapien
tgagccactgcatccagcctaattt

SEQ ID NO: 5675379 - DNA, 25 bp, Homo sapien
atgagccactgcatccagcctaatt

SEQ ID NO: 5675380 - DNA, 25 bp, Homo sapien
gccactgcatccagcctaatttttg

SEQ ID NO: 5675381 - DNA, 25 bp, Homo sapien
aaattaggctggatgcagtggctca

SEQ ID NO: 5675382 - DNA, 25 bp, Homo sapien
caaaaattaggctggatgcagtggc

SEQ ID NO: 5675383 - DNA, 25 bp, Homo sapien
aaaaattaggctggatgcagtggct

SEQ ID NO: 5675384 - DNA, 25 bp, Homo sapien
aaaattaggctggatgcagtggctc

SEQ ID NO: 5675385 - DNA, 25 bp, Homo sapien
ttaggctggatgcagtggctcatgc

SEQ ID NO: 5675386 - DNA, 25 bp, Homo sapien
aattaggctggatgcagtggctcat

SEQ ID NO: 5675387 - DNA, 25 bp, Homo sapien
ttctcactctgtcgctcaagttgga

SEQ ID NO: 5675388 - DNA, 25 bp, Homo sapien
gattctcactctgtcgctcaagttg

SEQ ID NO: 5675389 - DNA, 25 bp, Homo sapien
tctcctgggttcaactgatcttcct

SEQ ID NO: 5675390 - DNA, 25 bp, Homo sapien
tttgacggattctcactctgtcgct

SEQ ID NO: 5675391 - DNA, 25 bp, Homo sapien
gtctcctgggttcaactgatcttcc

SEQ ID NO: 5675392 - DNA, 25 bp, Homo sapien
attctcactctgtcgctcaagttgg

SEQ ID NO: 5675393 - DNA, 25 bp, Homo sapien
ggaagatcagttgaacccaggagac

SEQ ID NO: 5675394 - DNA, 25 bp, Homo sapien
tccaacttgagcgacagagtgagaa

SEQ ID NO: 5675395 - DNA, 25 bp, Homo sapien
aggaagatcagttgaacccaggaga

SEQ ID NO: 5675396 - DNA, 25 bp, Homo sapien
ccaacttgagcgacagagtgagaat

SEQ ID NO: 5675397 - DNA, 25 bp, Homo sapien
agcgacagagtgagaatccgtcaaa

SEQ ID NO: 5675398 - DNA, 25 bp, Homo sapien
caacttgagcgacagagtgagaatc

SEQ ID NO: 5675399 - DNA, 25 bp, Homo sapien
tgggaagttcagaccagcctgacca

SEQ ID NO: 5675400 - DNA, 25 bp, Homo sapien
ttgggaagttcagaccagcctgacc

SEQ ID NO: 5675401 - DNA, 25 bp, Homo sapien
aggttgggaagttcagaccagcctg

SEQ ID NO: 5675402 - DNA, 25 bp, Homo sapien
acctgaggttgggaagttcagacca

SEQ ID NO: 5675403 - DNA, 25 bp, Homo sapien
cctgaggttgggaagttcagaccag

SEQ ID NO: 5675404 - DNA, 25 bp, Homo sapien
gaggttgggaagttcagaccagcct

SEQ ID NO: 5675405 - DNA, 25 bp, Homo sapien
tggtcaggctggtctgaacttccca

SEQ ID NO: 5675406 - DNA, 25 bp, Homo sapien
ggtcaggctggtctgaacttcccaa

SEQ ID NO: 5675407 - DNA, 25 bp, Homo sapien
aggctggtctgaacttcccaacctc

SEQ ID NO: 5675408 - DNA, 25 bp, Homo sapien
ctggtctgaacttcccaacctcagg

SEQ ID NO: 5675409 - DNA, 25 bp, Homo sapien
tggtctgaacttcccaacctcaggt

SEQ ID NO: 5675410 - DNA, 25 bp, Homo sapien
caggctggtctgaacttcccaacct

SEQ ID NO: 5675411 - DNA, 25 bp, Homo sapien
actttgcgggggctgaggctggtgg

SEQ ID NO: 5675412 - DNA, 25 bp, Homo sapien
ggccatgtgtggtggctcacgcctg

SEQ ID NO: 5675413 - DNA, 25 bp, Homo sapien
ttggccatgtgtggtggctcacgcc

SEQ ID NO: 5675414 - DNA, 25 bp, Homo sapien
tggccatgtgtggtggctcacgcct

SEQ ID NO: 5675415 - DNA, 25 bp, Homo sapien
aattggccatgtgtggtggctcacg

SEQ ID NO: 5675416 - DNA, 25 bp, Homo sapien
attggccatgtgtggtggctcacgc

SEQ ID NO: 5675417 - DNA, 25 bp, Homo sapien
cgtgagccaccacacatggccaatt

SEQ ID NO: 5675418 - DNA, 25 bp, Homo sapien
aggcgtgagccaccacacatggcca

SEQ ID NO: 5675419 - DNA, 25 bp, Homo sapien
ggcgtgagccaccacacatggccaa

SEQ ID NO: 5675420 - DNA, 25 bp, Homo sapien
gcgtgagccaccacacatggccaat

SEQ ID NO: 5675421 - DNA, 25 bp, Homo sapien
ccaccagcctcagcccccgcaaagt

SEQ ID NO: 5675422 - DNA, 25 bp, Homo sapien
caggcgtgagccaccacacatggcc

SEQ ID NO: 5675423 - DNA, 25 bp, Homo sapien
catgtttagaacagcgttgtctttc

SEQ ID NO: 5675424 - DNA, 25 bp, Homo sapien
gggagacatgtttagaacagcgttg

SEQ ID NO: 5675425 - DNA, 25 bp, Homo sapien
atgtcttctttgaccaatccagcag

SEQ ID NO: 5675426 - DNA, 25 bp, Homo sapien
gtgggagacatgtttagaacagcgt

SEQ ID NO: 5675427 - DNA, 25 bp, Homo sapien
gagacatgtttagaacagcgttgtc

SEQ ID NO: 5675428 - DNA, 25 bp, Homo sapien
tatgtcttctttgaccaatccagca

SEQ ID NO: 5675429 - DNA, 25 bp, Homo sapien
gacaacgctgttctaaacatgtctc

SEQ ID NO: 5675430 - DNA, 25 bp, Homo sapien
gaaagacaacgctgttctaaacatg

SEQ ID NO: 5675431 - DNA, 25 bp, Homo sapien
ctgctggattggtcaaagaagacat

SEQ ID NO: 5675432 - DNA, 25 bp, Homo sapien
agaaagacaacgctgttctaaacat

SEQ ID NO: 5675433 - DNA, 25 bp, Homo sapien
aacgctgttctaaacatgtctccca

SEQ ID NO: 5675434 - DNA, 25 bp, Homo sapien
gctggattggtcaaagaagacatat

SEQ ID NO: 5675435 - DNA, 25 bp, Homo sapien
gcagagtgactaagaaggaagcgta

SEQ ID NO: 5675436 - DNA, 25 bp, Homo sapien
taagaaggaagcgtaaaagatggat

SEQ ID NO: 5675437 - DNA, 25 bp, Homo sapien
tatactgcagtagtaggtggcagag

SEQ ID NO: 5675438 - DNA, 25 bp, Homo sapien
gagtgactaagaaggaagcgtaaaa

SEQ ID NO: 5675439 - DNA, 25 bp, Homo sapien
attatactgcagtagtaggtggcag

SEQ ID NO: 5675440 - DNA, 25 bp, Homo sapien
tgactaagaaggaagcgtaaaagat

SEQ ID NO: 5675441 - DNA, 25 bp, Homo sapien
tacgcttccttcttagtcactctgc

SEQ ID NO: 5675442 - DNA, 25 bp, Homo sapien
tcttttacgcttccttcttagtcac

SEQ ID NO: 5675443 - DNA, 25 bp, Homo sapien
actctgccacctactactgcagtat

SEQ ID NO: 5675444 - DNA, 25 bp, Homo sapien
tctgccacctactactgcagtataa

SEQ ID NO: 5675445 - DNA, 25 bp, Homo sapien
atccatcttttacgcttccttctta

SEQ ID NO: 5675446 - DNA, 25 bp, Homo sapien
catcttttacgcttccttcttagtc

SEQ ID NO: 5675447 - DNA, 25 bp, Homo sapien
gtggtcctaactgttcttgaggctg

SEQ ID NO: 5675448 - DNA, 25 bp, Homo sapien
ctgtggtcctaactgttcttgaggc

SEQ ID NO: 5675449 - DNA, 25 bp, Homo sapien
cctgtggtcctaactgttcttgagg

SEQ ID NO: 5675450 - DNA, 25 bp, Homo sapien
tgtggtcctaactgttcttgaggct

SEQ ID NO: 5675451 - DNA, 25 bp, Homo sapien
agcctcaagaacagttaggaccaca

SEQ ID NO: 5675452 - DNA, 25 bp, Homo sapien
cagcctcaagaacagttaggaccac

SEQ ID NO: 5675453 - DNA, 25 bp, Homo sapien
cctcaagaacagttaggaccacagg

SEQ ID NO: 5675454 - DNA, 25 bp, Homo sapien
gcctcaagaacagttaggaccacag

SEQ ID NO: 5675455 - DNA, 25 bp, Homo sapien
gtggtcctaactgttcttgaggctg

SEQ ID NO: 5675456 - DNA, 25 bp, Homo sapien
cctgtggtcctaactgttcttgagg

SEQ ID NO: 5675457 - DNA, 25 bp, Homo sapien
aatttgagacaagggacctgtggtc

SEQ ID NO: 5675458 - DNA, 25 bp, Homo sapien
gagagagaatttgagacaagggacc

SEQ ID NO: 5675459 - DNA, 25 bp, Homo sapien
tgagacaagggacctgtggtcctaa

SEQ ID NO: 5675460 - DNA, 25 bp, Homo sapien
gtcctaactgttcttgaggctgagc

SEQ ID NO: 5675461 - DNA, 25 bp, Homo sapien
cagcctcaagaacagttaggaccac

SEQ ID NO: 5675462 - DNA, 25 bp, Homo sapien
cctcaagaacagttaggaccacagg

SEQ ID NO: 5675463 - DNA, 25 bp, Homo sapien
gcctcaagaacagttaggaccacag

SEQ ID NO: 5675464 - DNA, 25 bp, Homo sapien
ggtcccttgtctcaaattctctctc

SEQ ID NO: 5675465 - DNA, 25 bp, Homo sapien
gctcagcctcaagaacagttaggac

SEQ ID NO: 5675466 - DNA, 25 bp, Homo sapien
gaccacaggtcccttgtctcaaatt

SEQ ID NO: 5675467 - DNA, 25 bp, Homo sapien
ccagtttggccaatatggtcaaacc

SEQ ID NO: 5675468 - DNA, 25 bp, Homo sapien
aggtagatcacttgaggtgaagagt

SEQ ID NO: 5675469 - DNA, 25 bp, Homo sapien
gcaggtagatcacttgaggtgaaga

SEQ ID NO: 5675470 - DNA, 25 bp, Homo sapien
cagtttggccaatatggtcaaaccc

SEQ ID NO: 5675471 - DNA, 25 bp, Homo sapien
tagatcacttgaggtgaagagtttg

SEQ ID NO: 5675472 - DNA, 25 bp, Homo sapien
caggtagatcacttgaggtgaagag

SEQ ID NO: 5675473 - DNA, 25 bp, Homo sapien
gggtttgaccatattggccaaactg

SEQ ID NO: 5675474 - DNA, 25 bp, Homo sapien
caaactcttcacctcaagtgatcta

SEQ ID NO: 5675475 - DNA, 25 bp, Homo sapien
ggtttgaccatattggccaaactgg

SEQ ID NO: 5675476 - DNA, 25 bp, Homo sapien
tcttcacctcaagtgatctacctgc

SEQ ID NO: 5675477 - DNA, 25 bp, Homo sapien
ctcttcacctcaagtgatctacctg

SEQ ID NO: 5675478 - DNA, 25 bp, Homo sapien
actcttcacctcaagtgatctacct

SEQ ID NO: 5675479 - DNA, 25 bp, Homo sapien
cgaccgccaaattcttgtgttactg

SEQ ID NO: 5675480 - DNA, 25 bp, Homo sapien
ccgccaaattcttgtgttactggtc

SEQ ID NO: 5675481 - DNA, 25 bp, Homo sapien
ccaaattcttgtgttactggtcatt

SEQ ID NO: 5675482 - DNA, 25 bp, Homo sapien
ccgaccgccaaattcttgtgttact

SEQ ID NO: 5675483 - DNA, 25 bp, Homo sapien
gaccgccaaattcttgtgttactgg

SEQ ID NO: 5675484 - DNA, 25 bp, Homo sapien
cgccaaattcttgtgttactggtca

SEQ ID NO: 5675485 - DNA, 25 bp, Homo sapien
gaccagtaacacaagaatttggcgg

SEQ ID NO: 5675486 - DNA, 25 bp, Homo sapien
aatgaccagtaacacaagaatttgg

SEQ ID NO: 5675487 - DNA, 25 bp, Homo sapien
cagtaacacaagaatttggcggtcg

SEQ ID NO: 5675488 - DNA, 25 bp, Homo sapien
agtaacacaagaatttggcggtcgg

SEQ ID NO: 5675489 - DNA, 25 bp, Homo sapien
tgaccagtaacacaagaatttggcg

SEQ ID NO: 5675490 - DNA, 25 bp, Homo sapien
ccagtaacacaagaatttggcggtc

SEQ ID NO: 5675491 - DNA, 25 bp, Homo sapien
cagagtgctgataactgcacccggc

SEQ ID NO: 5675492 - DNA, 25 bp, Homo sapien
ctcccagagtgctgataactgcacc

SEQ ID NO: 5675493 - DNA, 25 bp, Homo sapien
agtgctgataactgcacccggcctg

SEQ ID NO: 5675494 - DNA, 25 bp, Homo sapien
tgtgtgtgatgttttgctcttgttg

SEQ ID NO: 5675495 - DNA, 25 bp, Homo sapien
cacccggcctgactttttttgtgtg

SEQ ID NO: 5675496 - DNA, 25 bp, Homo sapien
cccagagtgctgataactgcacccg

SEQ ID NO: 5675497 - DNA, 25 bp, Homo sapien
caggccgggtgcagttatcagcact

SEQ ID NO: 5675498 - DNA, 25 bp, Homo sapien
cacacaaaaaaagtcaggccgggtg

SEQ ID NO: 5675499 - DNA, 25 bp, Homo sapien
aacaagagcaaaacatcacacacaa

SEQ ID NO: 5675500 - DNA, 25 bp, Homo sapien
ggtgcagttatcagcactctgggag

SEQ ID NO: 5675501 - DNA, 25 bp, Homo sapien
aagtcaggccgggtgcagttatcag

SEQ ID NO: 5675502 - DNA, 25 bp, Homo sapien
gccgggtgcagttatcagcactctg

SEQ ID NO: 5675503 - DNA, 25 bp, Homo sapien
taatgttgctctagcagttctctgc

SEQ ID NO: 5675504 - DNA, 25 bp, Homo sapien
tttctgcatacagtctgttggtcag

SEQ ID NO: 5675505 - DNA, 25 bp, Homo sapien
ttgctctagcagttctctgctctcc

SEQ ID NO: 5675506 - DNA, 25 bp, Homo sapien
cctctaatctcgtaatgttgctcta

SEQ ID NO: 5675507 - DNA, 25 bp, Homo sapien
gtcagatcttaataccccacctagc

SEQ ID NO: 5675508 - DNA, 25 bp, Homo sapien
tgttggtcagatcttaataccccac

SEQ ID NO: 5675509 - DNA, 25 bp, Homo sapien
tgaccaacagactgtatgcagaaaa

SEQ ID NO: 5675510 - DNA, 25 bp, Homo sapien
gagaactgctagagcaacattacga

SEQ ID NO: 5675511 - DNA, 25 bp, Homo sapien
ctaggtggggtattaagatctgacc

SEQ ID NO: 5675512 - DNA, 25 bp, Homo sapien
ggagagcagagaactgctagagcaa

SEQ ID NO: 5675513 - DNA, 25 bp, Homo sapien
gatctgaccaacagactgtatgcag

SEQ ID NO: 5675514 - DNA, 25 bp, Homo sapien
tagagcaacattacgagattagagg

SEQ ID NO: 5675515 - DNA, 25 bp, Homo sapien
ttcatggtgttttagccaggatggt

SEQ ID NO: 5675516 - DNA, 25 bp, Homo sapien
tcatggtgttttagccaggatggtc

SEQ ID NO: 5675517 - DNA, 25 bp, Homo sapien
tttcatggtgttttagccaggatgg

SEQ ID NO: 5675518 - DNA, 25 bp, Homo sapien
gtttcatggtgttttagccaggatg

SEQ ID NO: 5675519 - DNA, 25 bp, Homo sapien
ggtttcatggtgttttagccaggat

SEQ ID NO: 5675520 - DNA, 25 bp, Homo sapien
atcctggctaaaacaccatgaaacc

SEQ ID NO: 5675521 - DNA, 25 bp, Homo sapien
catcctggctaaaacaccatgaaac

SEQ ID NO: 5675522 - DNA, 25 bp, Homo sapien
accatcctggctaaaacaccatgaa

SEQ ID NO: 5675523 - DNA, 25 bp, Homo sapien
gaccatcctggctaaaacaccatga

SEQ ID NO: 5675524 - DNA, 25 bp, Homo sapien
ccatcctggctaaaacaccatgaaa

SEQ ID NO: 5675525 - DNA, 25 bp, Homo sapien
aaagctcctgtgtactattctagag

SEQ ID NO: 5675526 - DNA, 25 bp, Homo sapien
aaaagctcctgtgtactattctaga

SEQ ID NO: 5675527 - DNA, 25 bp, Homo sapien
aagctcctgtgtactattctagaga

SEQ ID NO: 5675528 - DNA, 25 bp, Homo sapien
ctctagaatagtacacaggagcttt

SEQ ID NO: 5675529 - DNA, 25 bp, Homo sapien
tctagaatagtacacaggagctttt

SEQ ID NO: 5675530 - DNA, 25 bp, Homo sapien
tctctagaatagtacacaggagctt

SEQ ID NO: 5675531 - DNA, 25 bp, Homo sapien
aaaaagctcctgtgtactattctag

SEQ ID NO: 5675532 - DNA, 25 bp, Homo sapien
aaagctcctgtgtactattctagag

SEQ ID NO: 5675533 - DNA, 25 bp, Homo sapien
tccagcactgcagcctgagtgacaa

SEQ ID NO: 5675534 - DNA, 25 bp, Homo sapien
aaaagctcctgtgtactattctaga

SEQ ID NO: 5675535 - DNA, 25 bp, Homo sapien
aagctcctgtgtactattctagaga

SEQ ID NO: 5675536 - DNA, 25 bp, Homo sapien
aaaaaagctcctgtgtactattcta

SEQ ID NO: 5675537 - DNA, 25 bp, Homo sapien
ctctagaatagtacacaggagcttt

SEQ ID NO: 5675538 - DNA, 25 bp, Homo sapien
ttgtcactcaggctgcagtgctgga

SEQ ID NO: 5675539 - DNA, 25 bp, Homo sapien
tctagaatagtacacaggagctttt

SEQ ID NO: 5675540 - DNA, 25 bp, Homo sapien
cactcaggctgcagtgctggagtgc

SEQ ID NO: 5675541 - DNA, 25 bp, Homo sapien
tctctagaatagtacacaggagctt

SEQ ID NO: 5675542 - DNA, 25 bp, Homo sapien
tcactcaggctgcagtgctggagtg

SEQ ID NO: 5675543 - DNA, 25 bp, Homo sapien
ccaagtcctgatacagtcttctctg

SEQ ID NO: 5675544 - DNA, 25 bp, Homo sapien
gtcttctctgtaccagaacaaagta

SEQ ID NO: 5675545 - DNA, 25 bp, Homo sapien
caaagtattcagtgattcaagctca

SEQ ID NO: 5675546 - DNA, 25 bp, Homo sapien
acagacgcatggcaccaagtcctga

SEQ ID NO: 5675547 - DNA, 25 bp, Homo sapien
gattcaagctcacataggcatgaaa

SEQ ID NO: 5675548 - DNA, 25 bp, Homo sapien
gattacagacgcatggcaccaagtc

SEQ ID NO: 5675549 - DNA, 25 bp, Homo sapien
gacttggtgccatgcgtctgtaatc

SEQ ID NO: 5675550 - DNA, 25 bp, Homo sapien
tgagcttgaatcactgaatactttg

SEQ ID NO: 5675551 - DNA, 25 bp, Homo sapien
cagagaagactgtatcaggacttgg

SEQ ID NO: 5675552 - DNA, 25 bp, Homo sapien
tcatgcctatgtgagcttgaatcac

SEQ ID NO: 5675553 - DNA, 25 bp, Homo sapien
tcaggacttggtgccatgcgtctgt

SEQ ID NO: 5675554 - DNA, 25 bp, Homo sapien
tactttgttctggtacagagaagac

SEQ ID NO: 5675555 - DNA, 25 bp, Homo sapien
agacagagtttcattcttgtcgccc

SEQ ID NO: 5675556 - DNA, 25 bp, Homo sapien
gcagtggcccgatctccactcactg

SEQ ID NO: 5675557 - DNA, 25 bp, Homo sapien
ccgatctccactcactgcaaccttt

SEQ ID NO: 5675558 - DNA, 25 bp, Homo sapien
caacctttgcctcccagaggtttcg

SEQ ID NO: 5675559 - DNA, 25 bp, Homo sapien
tgagacagagtttcattcttgtcgc

SEQ ID NO: 5675560 - DNA, 25 bp, Homo sapien
cccgatctccactcactgcaacctt

SEQ ID NO: 5675561 - DNA, 25 bp, Homo sapien
aaggttgcagtgagtggagatcggg

SEQ ID NO: 5675562 - DNA, 25 bp, Homo sapien
cgaaacctctgggaggcaaaggttg

SEQ ID NO: 5675563 - DNA, 25 bp, Homo sapien
gggcgacaagaatgaaactctgtct

SEQ ID NO: 5675564 - DNA, 25 bp, Homo sapien
aaaggttgcagtgagtggagatcgg

SEQ ID NO: 5675565 - DNA, 25 bp, Homo sapien
gcgacaagaatgaaactctgtctca

SEQ ID NO: 5675566 - DNA, 25 bp, Homo sapien
cagtgagtggagatcgggccactgc

SEQ ID NO: 5675567 - DNA, 25 bp, Homo sapien
tacccaagtaattgccactcagtcg

SEQ ID NO: 5675568 - DNA, 25 bp, Homo sapien
gccactcagtcgagttaaagagcat

SEQ ID NO: 5675569 - DNA, 25 bp, Homo sapien
tgatgaatgtgtatacccaagtaat

SEQ ID NO: 5675570 - DNA, 25 bp, Homo sapien
caagtaattgccactcagtcgagtt

SEQ ID NO: 5675571 - DNA, 25 bp, Homo sapien
aatgtgtatacccaagtaattgcca

SEQ ID NO: 5675572 - DNA, 25 bp, Homo sapien
cagtcgagttaaagagcatttcctc

SEQ ID NO: 5675573 - DNA, 25 bp, Homo sapien
attacttgggtatacacattcatca

SEQ ID NO: 5675574 - DNA, 25 bp, Homo sapien
ggaaatgctctttaactcgactgag

SEQ ID NO: 5675575 - DNA, 25 bp, Homo sapien
aactcgactgagtggcaattacttg

SEQ ID NO: 5675576 - DNA, 25 bp, Homo sapien
gctctttaactcgactgagtggcaa

SEQ ID NO: 5675577 - DNA, 25 bp, Homo sapien
cgactgagtggcaattacttgggta

SEQ ID NO: 5675578 - DNA, 25 bp, Homo sapien
tgaggaaatgctctttaactcgact

SEQ ID NO: 5675579 - DNA, 25 bp, Homo sapien
gtagtgggagtagcaccctaagatt

SEQ ID NO: 5675580 - DNA, 25 bp, Homo sapien
gtgggagtagcaccctaagatttct

SEQ ID NO: 5675581 - DNA, 25 bp, Homo sapien
tagtgggagtagcaccctaagattt

SEQ ID NO: 5675582 - DNA, 25 bp, Homo sapien
gagggtagtgggagtagcaccctaa

SEQ ID NO: 5675583 - DNA, 25 bp, Homo sapien
agtgggagtagcaccctaagatttc

SEQ ID NO: 5675584 - DNA, 25 bp, Homo sapien
ggtagtgggagtagcaccctaagat

SEQ ID NO: 5675585 - DNA, 25 bp, Homo sapien
atcttagggtgctactcccactacc

SEQ ID NO: 5675586 - DNA, 25 bp, Homo sapien
aatcttagggtgctactcccactac

SEQ ID NO: 5675587 - DNA, 25 bp, Homo sapien
aaatcttagggtgctactcccacta

SEQ ID NO: 5675588 - DNA, 25 bp, Homo sapien
agaaatcttagggtgctactcccac

SEQ ID NO: 5675589 - DNA, 25 bp, Homo sapien
gaaatcttagggtgctactcccact

SEQ ID NO: 5675590 - DNA, 25 bp, Homo sapien
ttagggtgctactcccactaccctc

SEQ ID NO: 5675591 - DNA, 25 bp, Homo sapien
ctaagatttcttggaataaaacagg

SEQ ID NO: 5675592 - DNA, 25 bp, Homo sapien
gtgggagtagcaccctaagatttct

SEQ ID NO: 5675593 - DNA, 25 bp, Homo sapien
gagtagcaccctaagatttcttgga

SEQ ID NO: 5675594 - DNA, 25 bp, Homo sapien
tagtgggagtagcaccctaagattt

SEQ ID NO: 5675595 - DNA, 25 bp, Homo sapien
aacagggcttactacttggttcctg

SEQ ID NO: 5675596 - DNA, 25 bp, Homo sapien
ggtagtgggagtagcaccctaagat

SEQ ID NO: 5675597 - DNA, 25 bp, Homo sapien
caggaaccaagtagtaagccctgtt

SEQ ID NO: 5675598 - DNA, 25 bp, Homo sapien
accaggaaccaagtagtaagccctg

SEQ ID NO: 5675599 - DNA, 25 bp, Homo sapien
aatcttagggtgctactcccactac

SEQ ID NO: 5675600 - DNA, 25 bp, Homo sapien
tttattccaagaaatcttagggtgc

SEQ ID NO: 5675601 - DNA, 25 bp, Homo sapien
gaaatcttagggtgctactcccact

SEQ ID NO: 5675602 - DNA, 25 bp, Homo sapien
caagaaatcttagggtgctactccc

SEQ ID NO: 5675603 - DNA, 25 bp, Homo sapien
taccagggtgcaagcgattctcctg

SEQ ID NO: 5675604 - DNA, 25 bp, Homo sapien
gcctaccagggtgcaagcgattctc

SEQ ID NO: 5675605 - DNA, 25 bp, Homo sapien
tgcaatctctgcctaccagggtgca

SEQ ID NO: 5675606 - DNA, 25 bp, Homo sapien
caatctctgcctaccagggtgcaag

SEQ ID NO: 5675607 - DNA, 25 bp, Homo sapien
tctctgcctaccagggtgcaagcga

SEQ ID NO: 5675608 - DNA, 25 bp, Homo sapien
ctgcctaccagggtgcaagcgattc

SEQ ID NO: 5675609 - DNA, 25 bp, Homo sapien
ggagaatcgcttgcaccctggtagg

SEQ ID NO: 5675610 - DNA, 25 bp, Homo sapien
gaatcgcttgcaccctggtaggcag

SEQ ID NO: 5675611 - DNA, 25 bp, Homo sapien
caggagaatcgcttgcaccctggta

SEQ ID NO: 5675612 - DNA, 25 bp, Homo sapien
tcgcttgcaccctggtaggcagaga

SEQ ID NO: 5675613 - DNA, 25 bp, Homo sapien
gcttgcaccctggtaggcagagatt

SEQ ID NO: 5675614 - DNA, 25 bp, Homo sapien
tgcaccctggtaggcagagattgca

SEQ ID NO: 5675615 - DNA, 25 bp, Homo sapien
ggcagtagagtatcttatttaagag

SEQ ID NO: 5675616 - DNA, 25 bp, Homo sapien
acttgatggcttgagacccttggca

SEQ ID NO: 5675617 - DNA, 25 bp, Homo sapien
atcttatttaagagcatggattctg

SEQ ID NO: 5675618 - DNA, 25 bp, Homo sapien
acacttgatggcttgagacccttgg

SEQ ID NO: 5675619 - DNA, 25 bp, Homo sapien
aatactagctctgacacttgatggc

SEQ ID NO: 5675620 - DNA, 25 bp, Homo sapien
gttaaatactagctctgacacttga

SEQ ID NO: 5675621 - DNA, 25 bp, Homo sapien
ccaagggtctcaagccatcaagtgt

SEQ ID NO: 5675622 - DNA, 25 bp, Homo sapien
cagaatccatgctcttaaataagat

SEQ ID NO: 5675623 - DNA, 25 bp, Homo sapien
tcaagtgtcagagctagtatttaac

SEQ ID NO: 5675624 - DNA, 25 bp, Homo sapien
tcttaaataagatactctactgcct

SEQ ID NO: 5675625 - DNA, 25 bp, Homo sapien
tgccaagggtctcaagccatcaagt

SEQ ID NO: 5675626 - DNA, 25 bp, Homo sapien
gccatcaagtgtcagagctagtatt

SEQ ID NO: 5675627 - DNA, 25 bp, Homo sapien
tttgtttgggatataggctttgaga

SEQ ID NO: 5675628 - DNA, 25 bp, Homo sapien
gatataggctttgagaggttaagga

SEQ ID NO: 5675629 - DNA, 25 bp, Homo sapien
tatttaatgttgtaacactttgtta

SEQ ID NO: 5675630 - DNA, 25 bp, Homo sapien
tataggctttgagaggttaaggaag

SEQ ID NO: 5675631 - DNA, 25 bp, Homo sapien
ttgggatataggctttgagaggtta

SEQ ID NO: 5675632 - DNA, 25 bp, Homo sapien
aactttgtttgggatataggctttg

SEQ ID NO: 5675633 - DNA, 25 bp, Homo sapien
taacctctcaaagcctatatcccaa

SEQ ID NO: 5675634 - DNA, 25 bp, Homo sapien
cttccttaacctctcaaagcctata

SEQ ID NO: 5675635 - DNA, 25 bp, Homo sapien
tccttaacctctcaaagcctatatc

SEQ ID NO: 5675636 - DNA, 25 bp, Homo sapien
tcaaagcctatatcccaaacaaagt

SEQ ID NO: 5675637 - DNA, 25 bp, Homo sapien
taacaaagtgttacaacattaaata

SEQ ID NO: 5675638 - DNA, 25 bp, Homo sapien
tctcaaagcctatatcccaaacaaa

SEQ ID NO: 5675639 - DNA, 25 bp, Homo sapien
atctttgttcacttcaacctttgtt

SEQ ID NO: 5675640 - DNA, 25 bp, Homo sapien
tgttcacttcaacctttgtttccca

SEQ ID NO: 5675641 - DNA, 25 bp, Homo sapien
gagtgatctttgttcacttcaacct

SEQ ID NO: 5675642 - DNA, 25 bp, Homo sapien
gatctttgttcacttcaacctttgt

SEQ ID NO: 5675643 - DNA, 25 bp, Homo sapien
tgatctttgttcacttcaacctttg

SEQ ID NO: 5675644 - DNA, 25 bp, Homo sapien
tgagtgatctttgttcacttcaacc

SEQ ID NO: 5675645 - DNA, 25 bp, Homo sapien
acaaaggttgaagtgaacaaagatc

SEQ ID NO: 5675646 - DNA, 25 bp, Homo sapien
aggttgaagtgaacaaagatcactc

SEQ ID NO: 5675647 - DNA, 25 bp, Homo sapien
aacaaaggttgaagtgaacaaagat

SEQ ID NO: 5675648 - DNA, 25 bp, Homo sapien
tgggaaacaaaggttgaagtgaaca

SEQ ID NO: 5675649 - DNA, 25 bp, Homo sapien
caaaggttgaagtgaacaaagatca

SEQ ID NO: 5675650 - DNA, 25 bp, Homo sapien
ggttgaagtgaacaaagatcactca

SEQ ID NO: 5675651 - DNA, 25 bp, Homo sapien
tgaagtcattggttcttctcttctc

SEQ ID NO: 5675652 - DNA, 25 bp, Homo sapien
ttgacttagtgacttctgcctattt

SEQ ID NO: 5675653 - DNA, 25 bp, Homo sapien
cttgacttagtgacttctgcctatt

SEQ ID NO: 5675654 - DNA, 25 bp, Homo sapien
ttgaagtcattggttcttctcttct

SEQ ID NO: 5675655 - DNA, 25 bp, Homo sapien
gaagtcattggttcttctcttctct

SEQ ID NO: 5675656 - DNA, 25 bp, Homo sapien
ccttgacttagtgacttctgcctat

SEQ ID NO: 5675657 - DNA, 25 bp, Homo sapien
aaataggcagaagtcactaagtcaa

SEQ ID NO: 5675658 - DNA, 25 bp, Homo sapien
agagaagagaagaaccaatgacttc

SEQ ID NO: 5675659 - DNA, 25 bp, Homo sapien
aataggcagaagtcactaagtcaag

SEQ ID NO: 5675660 - DNA, 25 bp, Homo sapien
agaagagaagaaccaatgacttcaa

SEQ ID NO: 5675661 - DNA, 25 bp, Homo sapien
gagaagagaagaaccaatgacttca

SEQ ID NO: 5675662 - DNA, 25 bp, Homo sapien
ataggcagaagtcactaagtcaagg

SEQ ID NO: 5675663 - DNA, 25 bp, Homo sapien
gagacggtgcaagactcaaaaaaaa

SEQ ID NO: 5675664 - DNA, 25 bp, Homo sapien
tgggagacggtgcaagactcaaaaa

SEQ ID NO: 5675665 - DNA, 25 bp, Homo sapien
acggaaaggatttcataatattaat

SEQ ID NO: 5675666 - DNA, 25 bp, Homo sapien
cggaaaggatttcataatattaatt

SEQ ID NO: 5675667 - DNA, 25 bp, Homo sapien
ctgggagacggtgcaagactcaaaa

SEQ ID NO: 5675668 - DNA, 25 bp, Homo sapien
gggagacggtgcaagactcaaaaaa

SEQ ID NO: 5675669 - DNA, 25 bp, Homo sapien
tttttttgagtcttgcaccgtctcc

SEQ ID NO: 5675670 - DNA, 25 bp, Homo sapien
tttttgagtcttgcaccgtctccca

SEQ ID NO: 5675671 - DNA, 25 bp, Homo sapien
ttttttttgagtcttgcaccgtctc

SEQ ID NO: 5675672 - DNA, 25 bp, Homo sapien
ttttttgagtcttgcaccgtctccc

SEQ ID NO: 5675673 - DNA, 25 bp, Homo sapien
aattaatattatgaaatcctttccg

SEQ ID NO: 5675674 - DNA, 25 bp, Homo sapien
ttttgagtcttgcaccgtctcccag

SEQ ID NO: 5675675 - DNA, 25 bp, Homo sapien
ggcagcaggcgcctataatcccggc

SEQ ID NO: 5675676 - DNA, 25 bp, Homo sapien
ggcgtggcagcaggcgcctataatc

SEQ ID NO: 5675677 - DNA, 25 bp, Homo sapien
gggcgtggcagcaggcgcctataat

SEQ ID NO: 5675678 - DNA, 25 bp, Homo sapien
tggcagcaggcgcctataatcccgg

SEQ ID NO: 5675679 - DNA, 25 bp, Homo sapien
agcaggcgcctataatcccggctat

SEQ ID NO: 5675680 - DNA, 25 bp, Homo sapien
tgggcgtggcagcaggcgcctataa

SEQ ID NO: 5675681 - DNA, 25 bp, Homo sapien
gccgggattataggcgcctgctgcc

SEQ ID NO: 5675682 - DNA, 25 bp, Homo sapien
attataggcgcctgctgccacgccc

SEQ ID NO: 5675683 - DNA, 25 bp, Homo sapien
gattataggcgcctgctgccacgcc

SEQ ID NO: 5675684 - DNA, 25 bp, Homo sapien
ccgggattataggcgcctgctgcca

SEQ ID NO: 5675685 - DNA, 25 bp, Homo sapien
atagccgggattataggcgcctgct

SEQ ID NO: 5675686 - DNA, 25 bp, Homo sapien
ttataggcgcctgctgccacgccca

SEQ ID NO: 5675687 - DNA, 25 bp, Homo sapien
tatgtctggccatatttaagcatat

SEQ ID NO: 5675688 - DNA, 25 bp, Homo sapien
tgtctggccatatttaagcatattt

SEQ ID NO: 5675689 - DNA, 25 bp, Homo sapien
cactatgtctggccatatttaagca

SEQ ID NO: 5675690 - DNA, 25 bp, Homo sapien
atgtctggccatatttaagcatatt

SEQ ID NO: 5675691 - DNA, 25 bp, Homo sapien
actatgtctggccatatttaagcat

SEQ ID NO: 5675692 - DNA, 25 bp, Homo sapien
ctatgtctggccatatttaagcata

SEQ ID NO: 5675693 - DNA, 25 bp, Homo sapien
atatgcttaaatatggccagacata

SEQ ID NO: 5675694 - DNA, 25 bp, Homo sapien
atgcttaaatatggccagacatagt

SEQ ID NO: 5675695 - DNA, 25 bp, Homo sapien
aatatgcttaaatatggccagacat

SEQ ID NO: 5675696 - DNA, 25 bp, Homo sapien
tatgcttaaatatggccagacatag

SEQ ID NO: 5675697 - DNA, 25 bp, Homo sapien
aaatatgcttaaatatggccagaca

SEQ ID NO: 5675698 - DNA, 25 bp, Homo sapien
tgcttaaatatggccagacatagtg

SEQ ID NO: 5675699 - DNA, 25 bp, Homo sapien
ctgaaagtgttgagattgcaggtga

SEQ ID NO: 5675700 - DNA, 25 bp, Homo sapien
tatgtctggccatatttaagcatat

SEQ ID NO: 5675701 - DNA, 25 bp, Homo sapien
tgtctggccatatttaagcatattt

SEQ ID NO: 5675702 - DNA, 25 bp, Homo sapien
ttgcaggtgagagccactatgtctg

SEQ ID NO: 5675703 - DNA, 25 bp, Homo sapien
ggccatatttaagcatatttatgat

SEQ ID NO: 5675704 - DNA, 25 bp, Homo sapien
actatgtctggccatatttaagcat

SEQ ID NO: 5675705 - DNA, 25 bp, Homo sapien
tttaagatactatcataaatatgct

SEQ ID NO: 5675706 - DNA, 25 bp, Homo sapien
tatgcttaaatatggccagacatag

SEQ ID NO: 5675707 - DNA, 25 bp, Homo sapien
aaatatgcttaaatatggccagaca

SEQ ID NO: 5675708 - DNA, 25 bp, Homo sapien
cagacatagtggctctcacctgcaa

SEQ ID NO: 5675709 - DNA, 25 bp, Homo sapien
taaatatgcttaaatatggccagac

SEQ ID NO: 5675710 - DNA, 25 bp, Homo sapien
tcacctgcaatctcaacactttcag

SEQ ID NO: 5675711 - DNA, 25 bp, Homo sapien
gagtaccagcatgcgccactgtgct

SEQ ID NO: 5675712 - DNA, 25 bp, Homo sapien
taccagcatgcgccactgtgctcag

SEQ ID NO: 5675713 - DNA, 25 bp, Homo sapien
agtaccagcatgcgccactgtgctc

SEQ ID NO: 5675714 - DNA, 25 bp, Homo sapien
accagcatgcgccactgtgctcagc

SEQ ID NO: 5675715 - DNA, 25 bp, Homo sapien
gtaccagcatgcgccactgtgctca

SEQ ID NO: 5675716 - DNA, 25 bp, Homo sapien
ggagtaccagcatgcgccactgtgc

SEQ ID NO: 5675717 - DNA, 25 bp, Homo sapien
gctgagcacagtggcgcatgctggt

SEQ ID NO: 5675718 - DNA, 25 bp, Homo sapien
gagcacagtggcgcatgctggtact

SEQ ID NO: 5675719 - DNA, 25 bp, Homo sapien
ctgagcacagtggcgcatgctggta

SEQ ID NO: 5675720 - DNA, 25 bp, Homo sapien
agcacagtggcgcatgctggtactc

SEQ ID NO: 5675721 - DNA, 25 bp, Homo sapien
gcacagtggcgcatgctggtactcc

SEQ ID NO: 5675722 - DNA, 25 bp, Homo sapien
tgagcacagtggcgcatgctggtac

SEQ ID NO: 5675723 - DNA, 25 bp, Homo sapien
ctgtcgtccgggccagagtgcagta

SEQ ID NO: 5675724 - DNA, 25 bp, Homo sapien
gccagagtgcagtagcgccatctcg

SEQ ID NO: 5675725 - DNA, 25 bp, Homo sapien
ttgtgcctcggcctctggagtagtt

SEQ ID NO: 5675726 - DNA, 25 bp, Homo sapien
tccgggccagagtgcagtagcgcca

SEQ ID NO: 5675727 - DNA, 25 bp, Homo sapien
cgggccagagtgcagtagcgccatc

SEQ ID NO: 5675728 - DNA, 25 bp, Homo sapien
gggccagagtgcagtagcgccatct

SEQ ID NO: 5675729 - DNA, 25 bp, Homo sapien
aactactccagaggccgaggcacaa

SEQ ID NO: 5675730 - DNA, 25 bp, Homo sapien
cgagatggcgctactgcactctggc

SEQ ID NO: 5675731 - DNA, 25 bp, Homo sapien
agatggcgctactgcactctggccc

SEQ ID NO: 5675732 - DNA, 25 bp, Homo sapien
tcacttgaactaggaggcggcggtt

SEQ ID NO: 5675733 - DNA, 25 bp, Homo sapien
gatggcgctactgcactctggcccg

SEQ ID NO: 5675734 - DNA, 25 bp, Homo sapien
tggcgctactgcactctggcccgga

SEQ ID NO: 5675735 - DNA, 25 bp, Homo sapien
acgtgtatacgtatatatatgtgta

SEQ ID NO: 5675736 - DNA, 25 bp, Homo sapien
cgtgtatacgtatatatatgtgtac

SEQ ID NO: 5675737 - DNA, 25 bp, Homo sapien
gtacatatacgtgtgtgtatgtgtg

SEQ ID NO: 5675738 - DNA, 25 bp, Homo sapien
tacgtgtatacgtatatatatgtgt

SEQ ID NO: 5675739 - DNA, 25 bp, Homo sapien
tgtacatatacgtgtgtgtatgtgt

SEQ ID NO: 5675740 - DNA, 25 bp, Homo sapien
atgtgtacatatacgtgtgtgtatg

SEQ ID NO: 5675741 - DNA, 25 bp, Homo sapien
cacacatacacacacgtatatgtac

SEQ ID NO: 5675742 - DNA, 25 bp, Homo sapien
catacacacacgtatatgtacacat

SEQ ID NO: 5675743 - DNA, 25 bp, Homo sapien
acatacacacacgtatatgtacaca

SEQ ID NO: 5675744 - DNA, 25 bp, Homo sapien
acacatacacacacgtatatgtaca

SEQ ID NO: 5675745 - DNA, 25 bp, Homo sapien
gtacacatatatatacgtatacacg

SEQ ID NO: 5675746 - DNA, 25 bp, Homo sapien
tacacatatatatacgtatacacgt

SEQ ID NO: 5675747 - DNA, 25 bp, Homo sapien
atatacttgtgtatacgtatatacg

SEQ ID NO: 5675748 - DNA, 25 bp, Homo sapien
cgtatatacgtatacacaagtatat

SEQ ID NO: 5675749 - DNA, 25 bp, Homo sapien
atatacttgtgtatacgtatatacg

SEQ ID NO: 5675750 - DNA, 25 bp, Homo sapien
tacgtatatacgtgtatacgtatat

SEQ ID NO: 5675751 - DNA, 25 bp, Homo sapien
atgtatatttaagcatatgtgtgtg

SEQ ID NO: 5675752 - DNA, 25 bp, Homo sapien
gaggatgagtatgtatatttaagca

SEQ ID NO: 5675753 - DNA, 25 bp, Homo sapien
atacttgtgtatacgtatatacgtg

SEQ ID NO: 5675754 - DNA, 25 bp, Homo sapien
gtgtatacgtatatacgtgtatacg

SEQ ID NO: 5675755 - DNA, 25 bp, Homo sapien
cgtatacacgtatatacgtatacac

SEQ ID NO: 5675756 - DNA, 25 bp, Homo sapien
cgtatatacgtatacacaagtatat

SEQ ID NO: 5675757 - DNA, 25 bp, Homo sapien
gcttaaatatacatactcatcctct

SEQ ID NO: 5675758 - DNA, 25 bp, Homo sapien
tatatacgtatacacgtatatacgt

SEQ ID NO: 5675759 - DNA, 25 bp, Homo sapien
cacacacatatgcttaaatatacat

SEQ ID NO: 5675760 - DNA, 25 bp, Homo sapien
cacgtatatacgtatacacaagtat

SEQ ID NO: 5675761 - DNA, 25 bp, Homo sapien
catcaaatactcttgctaaattgca

SEQ ID NO: 5675762 - DNA, 25 bp, Homo sapien
gcagtttatgccaaacttagcttga

SEQ ID NO: 5675763 - DNA, 25 bp, Homo sapien
gcaatcagtatgcagtttatgccaa

SEQ ID NO: 5675764 - DNA, 25 bp, Homo sapien
aatcagtatgcagtttatgccaaac

SEQ ID NO: 5675765 - DNA, 25 bp, Homo sapien
tatgccaaacttagcttgattttat

SEQ ID NO: 5675766 - DNA, 25 bp, Homo sapien
tcttgctaaattgcaatcagtatgc

SEQ ID NO: 5675767 - DNA, 25 bp, Homo sapien
tgcatactgattgcaatttagcaag

SEQ ID NO: 5675768 - DNA, 25 bp, Homo sapien
taagtttggcataaactgcatactg

SEQ ID NO: 5675769 - DNA, 25 bp, Homo sapien
tgcaatttagcaagagtatttgatg

SEQ ID NO: 5675770 - DNA, 25 bp, Homo sapien
caagctaagtttggcataaactgca

SEQ ID NO: 5675771 - DNA, 25 bp, Homo sapien
ataaaatcaagctaagtttggcata

SEQ ID NO: 5675772 - DNA, 25 bp, Homo sapien
ggcataaactgcatactgattgcaa

SEQ ID NO: 5675773 - DNA, 25 bp, Homo sapien
tcataattacgatagtcatgtgact

SEQ ID NO: 5675774 - DNA, 25 bp, Homo sapien
aaaatccctcatctttaatctgtgg

SEQ ID NO: 5675775 - DNA, 25 bp, Homo sapien
tcatctttaatctgtggagctgtag

SEQ ID NO: 5675776 - DNA, 25 bp, Homo sapien
aatccctcatctttaatctgtggag

SEQ ID NO: 5675777 - DNA, 25 bp, Homo sapien
tccctcatctttaatctgtggagct

SEQ ID NO: 5675778 - DNA, 25 bp, Homo sapien
gccttggtatgttcataattacgat

SEQ ID NO: 5675779 - DNA, 25 bp, Homo sapien
ctacagctccacagattaaagatga

SEQ ID NO: 5675780 - DNA, 25 bp, Homo sapien
tatcgtaattatgaacataccaagg

SEQ ID NO: 5675781 - DNA, 25 bp, Homo sapien
ccacagattaaagatgagggatttt

SEQ ID NO: 5675782 - DNA, 25 bp, Homo sapien
gctccacagattaaagatgagggat

SEQ ID NO: 5675783 - DNA, 25 bp, Homo sapien
agtcacatgactatcgtaattatga

SEQ ID NO: 5675784 - DNA, 25 bp, Homo sapien
atcgtaattatgaacataccaaggc

SEQ ID NO: 5675785 - DNA, 25 bp, Homo sapien
cccaatggaactgtttgcttgtaac

SEQ ID NO: 5675786 - DNA, 25 bp, Homo sapien
tgcccaatggaactgtttgcttgta

SEQ ID NO: 5675787 - DNA, 25 bp, Homo sapien
tgtttacctgcccaatggaactgtt

SEQ ID NO: 5675788 - DNA, 25 bp, Homo sapien
cctgcccaatggaactgtttgcttg

SEQ ID NO: 5675789 - DNA, 25 bp, Homo sapien
ttacctgcccaatggaactgtttgc

SEQ ID NO: 5675790 - DNA, 25 bp, Homo sapien
gcttgtaactacacattaatataac

SEQ ID NO: 5675791 - DNA, 25 bp, Homo sapien
tatattaatgtgtagttacaagcaa

SEQ ID NO: 5675792 - DNA, 25 bp, Homo sapien
gcaaacagttccattgggcaggtaa

SEQ ID NO: 5675793 - DNA, 25 bp, Homo sapien
tacaagcaaacagttccattgggca

SEQ ID NO: 5675794 - DNA, 25 bp, Homo sapien
caagcaaacagttccattgggcagg

SEQ ID NO: 5675795 - DNA, 25 bp, Homo sapien
aacagttccattgggcaggtaaaca

SEQ ID NO: 5675796 - DNA, 25 bp, Homo sapien
gttacaagcaaacagttccattggg

SEQ ID NO: 5675797 - DNA, 25 bp, Homo sapien
taaaaggatcctggcagggcgcggt

SEQ ID NO: 5675798 - DNA, 25 bp, Homo sapien
cacgcccacccatatttgtagtttt

SEQ ID NO: 5675799 - DNA, 25 bp, Homo sapien
accacgcccacccatatttgtagtt

SEQ ID NO: 5675800 - DNA, 25 bp, Homo sapien
tgtagttttaaaaggatcctggcag

SEQ ID NO: 5675801 - DNA, 25 bp, Homo sapien
ttgtagttttaaaaggatcctggca

SEQ ID NO: 5675802 - DNA, 25 bp, Homo sapien
tttaaaaggatcctggcagggcgcg

SEQ ID NO: 5675803 - DNA, 25 bp, Homo sapien
tgccaggatccttttaaaactacaa

SEQ ID NO: 5675804 - DNA, 25 bp, Homo sapien
aactacaaatatgggtgggcgtggt

SEQ ID NO: 5675805 - DNA, 25 bp, Homo sapien
cgcgccctgccaggatccttttaaa

SEQ ID NO: 5675806 - DNA, 25 bp, Homo sapien
aaaactacaaatatgggtgggcgtg

SEQ ID NO: 5675807 - DNA, 25 bp, Homo sapien
ctgccaggatccttttaaaactaca

SEQ ID NO: 5675808 - DNA, 25 bp, Homo sapien
aaactacaaatatgggtgggcgtgg

SEQ ID NO: 5675809 - DNA, 25 bp, Homo sapien
tgcctcggcccctggagtagctggg

SEQ ID NO: 5675810 - DNA, 25 bp, Homo sapien
ccctggagtagctgggactacaggc

SEQ ID NO: 5675811 - DNA, 25 bp, Homo sapien
ctgcctcggcccctggagtagctgg

SEQ ID NO: 5675812 - DNA, 25 bp, Homo sapien
acccaccaccattcctggctaactt

SEQ ID NO: 5675813 - DNA, 25 bp, Homo sapien
ctcggcccctggagtagctgggact

SEQ ID NO: 5675814 - DNA, 25 bp, Homo sapien
tcggcccctggagtagctgggacta

SEQ ID NO: 5675815 - DNA, 25 bp, Homo sapien
agtcccagctactccaggggccgag

SEQ ID NO: 5675816 - DNA, 25 bp, Homo sapien
aagttagccaggaatggtggtgggt

SEQ ID NO: 5675817 - DNA, 25 bp, Homo sapien
cccagctactccaggggccgaggca

SEQ ID NO: 5675818 - DNA, 25 bp, Homo sapien
tagtcccagctactccaggggccga

SEQ ID NO: 5675819 - DNA, 25 bp, Homo sapien
gcctgtagtcccagctactccaggg

SEQ ID NO: 5675820 - DNA, 25 bp, Homo sapien
ccagctactccaggggccgaggcag

SEQ ID NO: 5675821 - DNA, 25 bp, Homo sapien
actgtgggcacttttgactgttgat

SEQ ID NO: 5675822 - DNA, 25 bp, Homo sapien
ttagttaactgtgggcacttttgac

SEQ ID NO: 5675823 - DNA, 25 bp, Homo sapien
gtaaacaattccctgtgcacatgca

SEQ ID NO: 5675824 - DNA, 25 bp, Homo sapien
aacaattccctgtgcacatgcatgt

SEQ ID NO: 5675825 - DNA, 25 bp, Homo sapien
tcaagtaaacaattccctgtgcaca

SEQ ID NO: 5675826 - DNA, 25 bp, Homo sapien
gggtactgcgtgtatcaagtaaaca

SEQ ID NO: 5675827 - DNA, 25 bp, Homo sapien
tgtttacttgatacacgcagtaccc

SEQ ID NO: 5675828 - DNA, 25 bp, Homo sapien
tcaaaagtgcccacagttaactaaa

SEQ ID NO: 5675829 - DNA, 25 bp, Homo sapien
tgtgcacagggaattgtttacttga

SEQ ID NO: 5675830 - DNA, 25 bp, Homo sapien
aatcaacagtcaaaagtgcccacag

SEQ ID NO: 5675831 - DNA, 25 bp, Homo sapien
catgcatgtgcacagggaattgttt

SEQ ID NO: 5675832 - DNA, 25 bp, Homo sapien
gatacacgcagtaccccaaatcaac

SEQ ID NO: 5675833 - DNA, 25 bp, Homo sapien
tgccaaaaaatttcggttcattagc

SEQ ID NO: 5675834 - DNA, 25 bp, Homo sapien
actggatggtcctgccttcaattga

SEQ ID NO: 5675835 - DNA, 25 bp, Homo sapien
cagcactctccccttgttaactgga

SEQ ID NO: 5675836 - DNA, 25 bp, Homo sapien
gggagaaactgttcatttgccaaaa

SEQ ID NO: 5675837 - DNA, 25 bp, Homo sapien
atttcggttcattagcttacacagc

SEQ ID NO: 5675838 - DNA, 25 bp, Homo sapien
tctccccttgttaactggatggtcc

SEQ ID NO: 5675839 - DNA, 25 bp, Homo sapien
ttttggcaaatgaacagtttctccc

SEQ ID NO: 5675840 - DNA, 25 bp, Homo sapien
tcaattgaaggcaggaccatccagt

SEQ ID NO: 5675841 - DNA, 25 bp, Homo sapien
gctgtgtaagctaatgaaccgaaat

SEQ ID NO: 5675842 - DNA, 25 bp, Homo sapien
gaaggcaggaccatccagttaacaa

SEQ ID NO: 5675843 - DNA, 25 bp, Homo sapien
gctaatgaaccgaaattttttggca

SEQ ID NO: 5675844 - DNA, 25 bp, Homo sapien
tccagttaacaaggggagagtgctg

SEQ ID NO: 5675845 - DNA, 25 bp, Homo sapien
ctggttgtccaaccccatttgcaga

SEQ ID NO: 5675846 - DNA, 25 bp, Homo sapien
aggactggttgtccaaccccatttg

SEQ ID NO: 5675847 - DNA, 25 bp, Homo sapien
tggttgtccaaccccatttgcagat

SEQ ID NO: 5675848 - DNA, 25 bp, Homo sapien
ggactggttgtccaaccccatttgc

SEQ ID NO: 5675849 - DNA, 25 bp, Homo sapien
gactggttgtccaaccccatttgca

SEQ ID NO: 5675850 - DNA, 25 bp, Homo sapien
caggactggttgtccaaccccattt

SEQ ID NO: 5675851 - DNA, 25 bp, Homo sapien
atctgcaaatggggttggacaacca

SEQ ID NO: 5675852 - DNA, 25 bp, Homo sapien
tgcaaatggggttggacaaccagtc

SEQ ID NO: 5675853 - DNA, 25 bp, Homo sapien
aaatggggttggacaaccagtcctg

SEQ ID NO: 5675854 - DNA, 25 bp, Homo sapien
caaatggggttggacaaccagtcct

SEQ ID NO: 5675855 - DNA, 25 bp, Homo sapien
gcaaatggggttggacaaccagtcc

SEQ ID NO: 5675856 - DNA, 25 bp, Homo sapien
tctgcaaatggggttggacaaccag

SEQ ID NO: 5675857 - DNA, 25 bp, Homo sapien
aatttacttaagtctctgggactca

SEQ ID NO: 5675858 - DNA, 25 bp, Homo sapien
tcctgaaagattcctcttagatcta

SEQ ID NO: 5675859 - DNA, 25 bp, Homo sapien
cttgggaaatttacttaagtctctg

SEQ ID NO: 5675860 - DNA, 25 bp, Homo sapien
caaccagtcctgaaagattcctctt

SEQ ID NO: 5675861 - DNA, 25 bp, Homo sapien
tctgcaaatggggttggacaaccag

SEQ ID NO: 5675862 - DNA, 25 bp, Homo sapien
gggttggacaaccagtcctgaaaga

SEQ ID NO: 5675863 - DNA, 25 bp, Homo sapien
tgaaggatctctggataacttgtct

SEQ ID NO: 5675864 - DNA, 25 bp, Homo sapien
ggataacttgtcttaattggttcca

SEQ ID NO: 5675865 - DNA, 25 bp, Homo sapien
taattggttccatctacttttgtgg

SEQ ID NO: 5675866 - DNA, 25 bp, Homo sapien
gaatgacttattgaaggatctctgg

SEQ ID NO: 5675867 - DNA, 25 bp, Homo sapien
ggatctctggataacttgtcttaat

SEQ ID NO: 5675868 - DNA, 25 bp, Homo sapien
ggttccatctacttttgtggagcac

SEQ ID NO: 5675869 - DNA, 25 bp, Homo sapien
ccagagatccttcaataagtcattc

SEQ ID NO: 5675870 - DNA, 25 bp, Homo sapien
tggaaccaattaagacaagttatcc

SEQ ID NO: 5675871 - DNA, 25 bp, Homo sapien
ccacaaaagtagatggaaccaatta

SEQ ID NO: 5675872 - DNA, 25 bp, Homo sapien
agtgctccacaaaagtagatggaac

SEQ ID NO: 5675873 - DNA, 25 bp, Homo sapien
ttaagacaagttatccagagatcct

SEQ ID NO: 5675874 - DNA, 25 bp, Homo sapien
ccaattaagacaagttatccagaga

SEQ ID NO: 5675875 - DNA, 25 bp, Homo sapien
gtcttaaacgtttcttgcaggtgtg

SEQ ID NO: 5675876 - DNA, 25 bp, Homo sapien
tcttaaacgtttcttgcaggtgtgt

SEQ ID NO: 5675877 - DNA, 25 bp, Homo sapien
aagtcttaaacgtttcttgcaggtg

SEQ ID NO: 5675878 - DNA, 25 bp, Homo sapien
ttaaacgtttcttgcaggtgtgtaa

SEQ ID NO: 5675879 - DNA, 25 bp, Homo sapien
cttaaacgtttcttgcaggtgtgta

SEQ ID NO: 5675880 - DNA, 25 bp, Homo sapien
agaaagtcttaaacgtttcttgcag

SEQ ID NO: 5675881 - DNA, 25 bp, Homo sapien
ttacacacctgcaagaaacgtttaa

SEQ ID NO: 5675882 - DNA, 25 bp, Homo sapien
cacctgcaagaaacgtttaagactt

SEQ ID NO: 5675883 - DNA, 25 bp, Homo sapien
cacacctgcaagaaacgtttaagac

SEQ ID NO: 5675884 - DNA, 25 bp, Homo sapien
acacacctgcaagaaacgtttaaga

SEQ ID NO: 5675885 - DNA, 25 bp, Homo sapien
tacacacctgcaagaaacgtttaag

SEQ ID NO: 5675886 - DNA, 25 bp, Homo sapien
acacctgcaagaaacgtttaagact

SEQ ID NO: 5675887 - DNA, 25 bp, Homo sapien
gatctacagttacgggtcgtcttca

SEQ ID NO: 5675888 - DNA, 25 bp, Homo sapien
taaatatctgtaccttagttactga

SEQ ID NO: 5675889 - DNA, 25 bp, Homo sapien
tgattggatctacagttacgggtcg

SEQ ID NO: 5675890 - DNA, 25 bp, Homo sapien
ttgaatagcgctattcgcatccaag

SEQ ID NO: 5675891 - DNA, 25 bp, Homo sapien
ccttagttactgattggatctacag

SEQ ID NO: 5675892 - DNA, 25 bp, Homo sapien
tacgggtcgtcttcattgaatagcg

SEQ ID NO: 5675893 - DNA, 25 bp, Homo sapien
gaatagcgctattcaatgaagacga

SEQ ID NO: 5675894 - DNA, 25 bp, Homo sapien
gatccaatcagtaactaaggtacag

SEQ ID NO: 5675895 - DNA, 25 bp, Homo sapien
gacccgtaactgtagatccaatcag

SEQ ID NO: 5675896 - DNA, 25 bp, Homo sapien
tgaagacgacccgtaactgtagatc

SEQ ID NO: 5675897 - DNA, 25 bp, Homo sapien
gctattcaatgaagacgacccgtaa

SEQ ID NO: 5675898 - DNA, 25 bp, Homo sapien
cttggatgcgaatagcgctattcaa

SEQ ID NO: 5675899 - DNA, 25 bp, Homo sapien
attcgttgcctgaggtgagcggaag

SEQ ID NO: 5675900 - DNA, 25 bp, Homo sapien
tcgttgcctgaggtgagcggaaggg

SEQ ID NO: 5675901 - DNA, 25 bp, Homo sapien
cgttgcctgaggtgagcggaagggt

SEQ ID NO: 5675902 - DNA, 25 bp, Homo sapien
tgcctgaggtgagcggaagggttcc

SEQ ID NO: 5675903 - DNA, 25 bp, Homo sapien
ttgcctgaggtgagcggaagggttc

SEQ ID NO: 5675904 - DNA, 25 bp, Homo sapien
gcctgaggtgagcggaagggttccc

SEQ ID NO: 5675905 - DNA, 25 bp, Homo sapien
cttccgctcacctcaggcaacgaat

SEQ ID NO: 5675906 - DNA, 25 bp, Homo sapien
acccttccgctcacctcaggcaacg

SEQ ID NO: 5675907 - DNA, 25 bp, Homo sapien
gggaacccttccgctcacctcaggc

SEQ ID NO: 5675908 - DNA, 25 bp, Homo sapien
ggaacccttccgctcacctcaggca

SEQ ID NO: 5675909 - DNA, 25 bp, Homo sapien
ccttccgctcacctcaggcaacgaa

SEQ ID NO: 5675910 - DNA, 25 bp, Homo sapien
gaacccttccgctcacctcaggcaa

SEQ ID NO: 5675911 - DNA, 25 bp, Homo sapien
attcgttgcctgaggtgagcggaag

SEQ ID NO: 5675912 - DNA, 25 bp, Homo sapien
tccccggcgcgaagaggctggactc

SEQ ID NO: 5675913 - DNA, 25 bp, Homo sapien
gagcggaagggttccctccaggcgc

SEQ ID NO: 5675914 - DNA, 25 bp, Homo sapien
tgcctgaggtgagcggaagggttcc

SEQ ID NO: 5675915 - DNA, 25 bp, Homo sapien
gaggtgagcggaagggttccctcca

SEQ ID NO: 5675916 - DNA, 25 bp, Homo sapien
tggactcggattcgttgcctgaggt

SEQ ID NO: 5675917 - DNA, 25 bp, Homo sapien
cttccgctcacctcaggcaacgaat

SEQ ID NO: 5675918 - DNA, 25 bp, Homo sapien
gcgcctggagggaacccttccgctc

SEQ ID NO: 5675919 - DNA, 25 bp, Homo sapien
gagtccagcctcttcgcgccgggga

SEQ ID NO: 5675920 - DNA, 25 bp, Homo sapien
ctggagggaacccttccgctcacct

SEQ ID NO: 5675921 - DNA, 25 bp, Homo sapien
ggaacccttccgctcacctcaggca

SEQ ID NO: 5675922 - DNA, 25 bp, Homo sapien
acctcaggcaacgaatccgagtcca

SEQ ID NO: 5675923 - DNA, 25 bp, Homo sapien
tccttaatgtgtaaccaacatgctt

SEQ ID NO: 5675924 - DNA, 25 bp, Homo sapien
ctgtcgctggttcggttcagtggta

SEQ ID NO: 5675925 - DNA, 25 bp, Homo sapien
taattgtcaaactaaatgagttctg

SEQ ID NO: 5675926 - DNA, 25 bp, Homo sapien
tcggttcagtggtaattgtcaaact

SEQ ID NO: 5675927 - DNA, 25 bp, Homo sapien
ggtctcagccctgtcgctggttcgg

SEQ ID NO: 5675928 - DNA, 25 bp, Homo sapien
tgagttctgctgtagttccttaatg

SEQ ID NO: 5675929 - DNA, 25 bp, Homo sapien
gacaattaccactgaaccgaaccag

SEQ ID NO: 5675930 - DNA, 25 bp, Homo sapien
tgaaccgaaccagcgacagggctga

SEQ ID NO: 5675931 - DNA, 25 bp, Homo sapien
aaagcatgttggttacacattaagg

SEQ ID NO: 5675932 - DNA, 25 bp, Homo sapien
ggttacacattaaggaactacagca

SEQ ID NO: 5675933 - DNA, 25 bp, Homo sapien
gaactcatttagtttgacaattacc

SEQ ID NO: 5675934 - DNA, 25 bp, Homo sapien
taaggaactacagcagaactcattt

SEQ ID NO: 5675935 - DNA, 25 bp, Homo sapien
aggataaggaaggcaagtagtattt

SEQ ID NO: 5675936 - DNA, 25 bp, Homo sapien
aaatactacttgccttccttatcct

SEQ ID NO: 5675937 - DNA, 25 bp, Homo sapien
gcaagtagtattttgtagttaagaa

SEQ ID NO: 5675938 - DNA, 25 bp, Homo sapien
gaaggcaagtagtattttgtagtta

SEQ ID NO: 5675939 - DNA, 25 bp, Homo sapien
cactttaacactcataggttgaacc

SEQ ID NO: 5675940 - DNA, 25 bp, Homo sapien
ccaggataaggaaggcaagtagtat

SEQ ID NO: 5675941 - DNA, 25 bp, Homo sapien
gataaggaaggcaagtagtattttg

SEQ ID NO: 5675942 - DNA, 25 bp, Homo sapien
ttaacactcataggttgaaccctcg

SEQ ID NO: 5675943 - DNA, 25 bp, Homo sapien
tcttaactacaaaatactacttgcc

SEQ ID NO: 5675944 - DNA, 25 bp, Homo sapien
atactacttgccttccttatcctgg

SEQ ID NO: 5675945 - DNA, 25 bp, Homo sapien
cgagggttcaacctatgagtgttaa

SEQ ID NO: 5675946 - DNA, 25 bp, Homo sapien
taactacaaaatactacttgccttc

SEQ ID NO: 5675947 - DNA, 25 bp, Homo sapien
tacaaaatactacttgccttcctta

SEQ ID NO: 5675948 - DNA, 25 bp, Homo sapien
ggttcaacctatgagtgttaaagtg

SEQ ID NO: 5675949 - DNA, 25 bp, Homo sapien
cagtacctagattggaatccttgag

SEQ ID NO: 5675950 - DNA, 25 bp, Homo sapien
tacctagattggaatccttgaggtg

SEQ ID NO: 5675951 - DNA, 25 bp, Homo sapien
acttgcgtgaatttggacacttatt

SEQ ID NO: 5675952 - DNA, 25 bp, Homo sapien
tgaggtgtatttcacttgcgtgaat

SEQ ID NO: 5675953 - DNA, 25 bp, Homo sapien
tcacttgcgtgaatttggacactta

SEQ ID NO: 5675954 - DNA, 25 bp, Homo sapien
gcacagtacctagattggaatcctt

SEQ ID NO: 5675955 - DNA, 25 bp, Homo sapien
aataagtgtccaaattcacgcaagt

SEQ ID NO: 5675956 - DNA, 25 bp, Homo sapien
aaggattccaatctaggtactgtgc

SEQ ID NO: 5675957 - DNA, 25 bp, Homo sapien
tcaaggattccaatctaggtactgt

SEQ ID NO: 5675958 - DNA, 25 bp, Homo sapien
taagtgtccaaattcacgcaagtga

SEQ ID NO: 5675959 - DNA, 25 bp, Homo sapien
cacctcaaggattccaatctaggta

SEQ ID NO: 5675960 - DNA, 25 bp, Homo sapien
aattcacgcaagtgaaatacacctc

SEQ ID NO: 5675961 - DNA, 25 bp, Homo sapien
ttaccttataagtctggagcacatc

SEQ ID NO: 5675962 - DNA, 25 bp, Homo sapien
gttaccttataagtctggagcacat

SEQ ID NO: 5675963 - DNA, 25 bp, Homo sapien
taccttataagtctggagcacatca

SEQ ID NO: 5675964 - DNA, 25 bp, Homo sapien
accttataagtctggagcacatcac

SEQ ID NO: 5675965 - DNA, 25 bp, Homo sapien
ccttataagtctggagcacatcaca

SEQ ID NO: 5675966 - DNA, 25 bp, Homo sapien
gtgatgtgctccagacttataaggt

SEQ ID NO: 5675967 - DNA, 25 bp, Homo sapien
tgtgatgtgctccagacttataagg

SEQ ID NO: 5675968 - DNA, 25 bp, Homo sapien
gatgtgctccagacttataaggtaa

SEQ ID NO: 5675969 - DNA, 25 bp, Homo sapien
atgtgctccagacttataaggtaac

SEQ ID NO: 5675970 - DNA, 25 bp, Homo sapien
tgatgtgctccagacttataaggta

SEQ ID NO: 5675971 - DNA, 25 bp, Homo sapien
gggtcctaagtgaggccgacagctc

SEQ ID NO: 5675972 - DNA, 25 bp, Homo sapien
ctaagtgaggccgacagctccaaac

SEQ ID NO: 5675973 - DNA, 25 bp, Homo sapien
aagtgaggccgacagctccaaactc

SEQ ID NO: 5675974 - DNA, 25 bp, Homo sapien
cacagggtcctaagtgaggccgaca

SEQ ID NO: 5675975 - DNA, 25 bp, Homo sapien
cagggtcctaagtgaggccgacagc

SEQ ID NO: 5675976 - DNA, 25 bp, Homo sapien
tgaggccgacagctccaaactccgt

SEQ ID NO: 5675977 - DNA, 25 bp, Homo sapien
tgtcggcctcacttaggaccctgtg

SEQ ID NO: 5675978 - DNA, 25 bp, Homo sapien
gctgtcggcctcacttaggaccctg

SEQ ID NO: 5675979 - DNA, 25 bp, Homo sapien
gtttggagctgtcggcctcacttag

SEQ ID NO: 5675980 - DNA, 25 bp, Homo sapien
acggagtttggagctgtcggcctca

SEQ ID NO: 5675981 - DNA, 25 bp, Homo sapien
ggagctgtcggcctcacttaggacc

SEQ ID NO: 5675982 - DNA, 25 bp, Homo sapien
ggagtttggagctgtcggcctcact

SEQ ID NO: 5675983 - DNA, 25 bp, Homo sapien
tgatcttccggaagtcttctctgat

SEQ ID NO: 5675984 - DNA, 25 bp, Homo sapien
aagtcttctctgatcctccagcgca

SEQ ID NO: 5675985 - DNA, 25 bp, Homo sapien
ctccagcgcaggattagggtcctct

SEQ ID NO: 5675986 - DNA, 25 bp, Homo sapien
tagacgtgatcttccggaagtcttc

SEQ ID NO: 5675987 - DNA, 25 bp, Homo sapien
tcctccagcgcaggattagggtcct

SEQ ID NO: 5675988 - DNA, 25 bp, Homo sapien
tagtattttagacgtgatcttccgg

SEQ ID NO: 5675989 - DNA, 25 bp, Homo sapien
atcagagaagacttccggaagatca

SEQ ID NO: 5675990 - DNA, 25 bp, Homo sapien
agaggaccctaatcctgcgctggag

SEQ ID NO: 5675991 - DNA, 25 bp, Homo sapien
ggaagatcacgtctaaaatactacg

SEQ ID NO: 5675992 - DNA, 25 bp, Homo sapien
gaagacttccggaagatcacgtcta

SEQ ID NO: 5675993 - DNA, 25 bp, Homo sapien
aggaccctaatcctgcgctggagga

SEQ ID NO: 5675994 - DNA, 25 bp, Homo sapien
cctgcgctggaggatcagagaagac

SEQ ID NO: 5675995 - DNA, 25 bp, Homo sapien
tgtcatcaaggatggtaaaaaatta

SEQ ID NO: 5675996 - DNA, 25 bp, Homo sapien
attatacccgctggccctttatctc

SEQ ID NO: 5675997 - DNA, 25 bp, Homo sapien
tcttgtcatcaaggatggtaaaaaa

SEQ ID NO: 5675998 - DNA, 25 bp, Homo sapien
tatacccgctggccctttatctctg

SEQ ID NO: 5675999 - DNA, 25 bp, Homo sapien
aattatacccgctggccctttatct

SEQ ID NO: 5676000 - DNA, 25 bp, Homo sapien
tgtcttgtcatcaaggatggtaaaa

SEQ ID NO: 5676001 - DNA, 25 bp, Homo sapien
gagataaagggccagcgggtataat

SEQ ID NO: 5676002 - DNA, 25 bp, Homo sapien
cagagataaagggccagcgggtata

SEQ ID NO: 5676003 - DNA, 25 bp, Homo sapien
ttttttaccatccttgatgacaaga

SEQ ID NO: 5676004 - DNA, 25 bp, Homo sapien
agataaagggccagcgggtataatt

SEQ ID NO: 5676005 - DNA, 25 bp, Homo sapien
ttttaccatccttgatgacaagaca

SEQ ID NO: 5676006 - DNA, 25 bp, Homo sapien
taattttttaccatccttgatgaca

SEQ ID NO: 5676007 - DNA, 25 bp, Homo sapien
attacacattatataggaattactt

SEQ ID NO: 5676008 - DNA, 25 bp, Homo sapien
ttacacattatataggaattacttc

SEQ ID NO: 5676009 - DNA, 25 bp, Homo sapien
tacacattatataggaattacttct

SEQ ID NO: 5676010 - DNA, 25 bp, Homo sapien
agaagtaattcctatataatgtgta

SEQ ID NO: 5676011 - DNA, 25 bp, Homo sapien
gaagtaattcctatataatgtgtaa

SEQ ID NO: 5676012 - DNA, 25 bp, Homo sapien
aagtaattcctatataatgtgtaat

SEQ ID NO: 5676013 - DNA, 25 bp, Homo sapien
tacgtgttgtgtaattacacattat

SEQ ID NO: 5676014 - DNA, 25 bp, Homo sapien
aggaattacttcttccaatagcaaa

SEQ ID NO: 5676015 - DNA, 25 bp, Homo sapien
ttccaatagcaaattaaaacatagg

SEQ ID NO: 5676016 - DNA, 25 bp, Homo sapien
tttatacgtgttgtgtaattacaca

SEQ ID NO: 5676017 - DNA, 25 bp, Homo sapien
cataggaaataagggtaaaatcatc

SEQ ID NO: 5676018 - DNA, 25 bp, Homo sapien
tacacattatataggaattacttct

SEQ ID NO: 5676019 - DNA, 25 bp, Homo sapien
tttgctattggaagaagtaattcct

SEQ ID NO: 5676020 - DNA, 25 bp, Homo sapien
gaagtaattcctatataatgtgtaa

SEQ ID NO: 5676021 - DNA, 25 bp, Homo sapien
tgtgtaattacacaacacgtataaa

SEQ ID NO: 5676022 - DNA, 25 bp, Homo sapien
cctatgttttaatttgctattggaa

SEQ ID NO: 5676023 - DNA, 25 bp, Homo sapien
tataatgtgtaattacacaacacgt

SEQ ID NO: 5676024 - DNA, 25 bp, Homo sapien
gatgattttacccttatttcctatg

SEQ ID NO: 5676025 - DNA, 25 bp, Homo sapien
ggtgcgatctcggctcaccacaacc

SEQ ID NO: 5676026 - DNA, 25 bp, Homo sapien
tggtgcgatctcggctcaccacaac

SEQ ID NO: 5676027 - DNA, 25 bp, Homo sapien
ggctcaccacaacctccgcctcccg

SEQ ID NO: 5676028 - DNA, 25 bp, Homo sapien
gtgcgatctcggctcaccacaacct

SEQ ID NO: 5676029 - DNA, 25 bp, Homo sapien
tgcgatctcggctcaccacaacctc

SEQ ID NO: 5676030 - DNA, 25 bp, Homo sapien
gtggtgcgatctcggctcaccacaa

SEQ ID NO: 5676031 - DNA, 25 bp, Homo sapien
ttgtggtgagccgagatcgcaccac

SEQ ID NO: 5676032 - DNA, 25 bp, Homo sapien
cgggaggcggaggttgtggtgagcc

SEQ ID NO: 5676033 - DNA, 25 bp, Homo sapien
ggttgtggtgagccgagatcgcacc

SEQ ID NO: 5676034 - DNA, 25 bp, Homo sapien
gttgtggtgagccgagatcgcacca

SEQ ID NO: 5676035 - DNA, 25 bp, Homo sapien
gaggttgtggtgagccgagatcgca

SEQ ID NO: 5676036 - DNA, 25 bp, Homo sapien
aggttgtggtgagccgagatcgcac

SEQ ID NO: 5676037 - DNA, 25 bp, Homo sapien
atcccgacttcaggtgatccacccg

SEQ ID NO: 5676038 - DNA, 25 bp, Homo sapien
ttgaaatcccgacttcaggtgatcc

SEQ ID NO: 5676039 - DNA, 25 bp, Homo sapien
tgaaatcccgacttcaggtgatcca

SEQ ID NO: 5676040 - DNA, 25 bp, Homo sapien
aatcccgacttcaggtgatccaccc

SEQ ID NO: 5676041 - DNA, 25 bp, Homo sapien
gaaatcccgacttcaggtgatccac

SEQ ID NO: 5676042 - DNA, 25 bp, Homo sapien
tcccgacttcaggtgatccacccgc

SEQ ID NO: 5676043 - DNA, 25 bp, Homo sapien
gcgggtggatcacctgaagtcggga

SEQ ID NO: 5676044 - DNA, 25 bp, Homo sapien
tggatcacctgaagtcgggatttca

SEQ ID NO: 5676045 - DNA, 25 bp, Homo sapien
gggtggatcacctgaagtcgggatt

SEQ ID NO: 5676046 - DNA, 25 bp, Homo sapien
gtggatcacctgaagtcgggatttc

SEQ ID NO: 5676047 - DNA, 25 bp, Homo sapien
cgggtggatcacctgaagtcgggat

SEQ ID NO: 5676048 - DNA, 25 bp, Homo sapien
ggatcacctgaagtcgggatttcaa

SEQ ID NO: 5676049 - DNA, 25 bp, Homo sapien
gacggagtctcactgttacccaggc

SEQ ID NO: 5676050 - DNA, 25 bp, Homo sapien
agacggagtctcactgttacccagg

SEQ ID NO: 5676051 - DNA, 25 bp, Homo sapien
cctgggtaacagtgagactccgtct

SEQ ID NO: 5676052 - DNA, 25 bp, Homo sapien
gcctgggtaacagtgagactccgtc

SEQ ID NO: 5676053 - DNA, 25 bp, Homo sapien
atgtgccaccatgcacgactgattt

SEQ ID NO: 5676054 - DNA, 25 bp, Homo sapien
gccaccatgcacgactgattttttt

SEQ ID NO: 5676055 - DNA, 25 bp, Homo sapien
accatgcacgactgatttttttttt

SEQ ID NO: 5676056 - DNA, 25 bp, Homo sapien
ccaccatgcacgactgatttttttt

SEQ ID NO: 5676057 - DNA, 25 bp, Homo sapien
tgccaccatgcacgactgatttttt

SEQ ID NO: 5676058 - DNA, 25 bp, Homo sapien
catgtgccaccatgcacgactgatt

SEQ ID NO: 5676059 - DNA, 25 bp, Homo sapien
aaaaaatcagtcgtgcatggtggca

SEQ ID NO: 5676060 - DNA, 25 bp, Homo sapien
aaaaaaaaaatcagtcgtgcatggt

SEQ ID NO: 5676061 - DNA, 25 bp, Homo sapien
aaatcagtcgtgcatggtggcacat

SEQ ID NO: 5676062 - DNA, 25 bp, Homo sapien
aaaaaaaaatcagtcgtgcatggtg

SEQ ID NO: 5676063 - DNA, 25 bp, Homo sapien
aaaaaaatcagtcgtgcatggtggc

SEQ ID NO: 5676064 - DNA, 25 bp, Homo sapien
aaaaaaaatcagtcgtgcatggtgg

SEQ ID NO: 5676065 - DNA, 25 bp, Homo sapien
atgatctgcccgtctcggcggccca

SEQ ID NO: 5676066 - DNA, 25 bp, Homo sapien
aaatgatctgcccgtctcggcggcc

SEQ ID NO: 5676067 - DNA, 25 bp, Homo sapien
ccgtctcggcggcccaaagtgctgg

SEQ ID NO: 5676068 - DNA, 25 bp, Homo sapien
caaatgatctgcccgtctcggcggc

SEQ ID NO: 5676069 - DNA, 25 bp, Homo sapien
tcaaatgatctgcccgtctcggcgg

SEQ ID NO: 5676070 - DNA, 25 bp, Homo sapien
atctgcccgtctcggcggcccaaag

SEQ ID NO: 5676071 - DNA, 25 bp, Homo sapien
ccagcactttgggccgccgagacgg

SEQ ID NO: 5676072 - DNA, 25 bp, Homo sapien
cgccgagacgggcagatcatttgag

SEQ ID NO: 5676073 - DNA, 25 bp, Homo sapien
tgggccgccgagacgggcagatcat

SEQ ID NO: 5676074 - DNA, 25 bp, Homo sapien
ctttgggccgccgagacgggcagat

SEQ ID NO: 5676075 - DNA, 25 bp, Homo sapien
ccgccgagacgggcagatcatttga

SEQ ID NO: 5676076 - DNA, 25 bp, Homo sapien
ggccgccgagacgggcagatcattt

SEQ ID NO: 5676077 - DNA, 25 bp, Homo sapien
gctgagcacagttttaacaaagaaa

SEQ ID NO: 5676078 - DNA, 25 bp, Homo sapien
catacctaaccaagttgcttttagt

SEQ ID NO: 5676079 - DNA, 25 bp, Homo sapien
tgagcacagttttaacaaagaaatc

SEQ ID NO: 5676080 - DNA, 25 bp, Homo sapien
ccatacctaaccaagttgcttttag

SEQ ID NO: 5676081 - DNA, 25 bp, Homo sapien
tgctgagcacagttttaacaaagaa

SEQ ID NO: 5676082 - DNA, 25 bp, Homo sapien
cctgctgagcacagttttaacaaag

SEQ ID NO: 5676083 - DNA, 25 bp, Homo sapien
tttctttgttaaaactgtgctcagc

SEQ ID NO: 5676084 - DNA, 25 bp, Homo sapien
ctaaaagcaacttggttaggtatgg

SEQ ID NO: 5676085 - DNA, 25 bp, Homo sapien
tctttgttaaaactgtgctcagcag

SEQ ID NO: 5676086 - DNA, 25 bp, Homo sapien
ctttgttaaaactgtgctcagcagg

SEQ ID NO: 5676087 - DNA, 25 bp, Homo sapien
actaaaagcaacttggttaggtatg

SEQ ID NO: 5676088 - DNA, 25 bp, Homo sapien
gatttctttgttaaaactgtgctca

SEQ ID NO: 5676089 - DNA, 25 bp, Homo sapien
ttagtgtaccaattaaaataatctc

SEQ ID NO: 5676090 - DNA, 25 bp, Homo sapien
aatctcttgtaccattagtgctgtc

SEQ ID NO: 5676091 - DNA, 25 bp, Homo sapien
aatttgatcaagagaggagtctttg

SEQ ID NO: 5676092 - DNA, 25 bp, Homo sapien
aggagtctttgttagtgtaccaatt

SEQ ID NO: 5676093 - DNA, 25 bp, Homo sapien
ggagtctgactttaatttgatcaag

SEQ ID NO: 5676094 - DNA, 25 bp, Homo sapien
aaataatctcttgtaccattagtgc

SEQ ID NO: 5676095 - DNA, 25 bp, Homo sapien
aattggtacactaacaaagactcct

SEQ ID NO: 5676096 - DNA, 25 bp, Homo sapien
gattattttaattggtacactaaca

SEQ ID NO: 5676097 - DNA, 25 bp, Homo sapien
gacagcactaatggtacaagagatt

SEQ ID NO: 5676098 - DNA, 25 bp, Homo sapien
tgatcaaattaaagtcagactcctt

SEQ ID NO: 5676099 - DNA, 25 bp, Homo sapien
tcttgatcaaattaaagtcagactc

SEQ ID NO: 5676100 - DNA, 25 bp, Homo sapien
caaagactcctctcttgatcaaatt

SEQ ID NO: 5676101 - DNA, 25 bp, Homo sapien
ccaccacaacgcccagctaattttt

SEQ ID NO: 5676102 - DNA, 25 bp, Homo sapien
ccacaacgcccagctaatttttttg

SEQ ID NO: 5676103 - DNA, 25 bp, Homo sapien
tgggatatcaccatgttggccatgc

SEQ ID NO: 5676104 - DNA, 25 bp, Homo sapien
ttttgtatttttagtagagatggga

SEQ ID NO: 5676105 - DNA, 25 bp, Homo sapien
caccacaacgcccagctaatttttt

SEQ ID NO: 5676106 - DNA, 25 bp, Homo sapien
tcccatctctactaaaaatacaaaa

SEQ ID NO: 5676107 - DNA, 25 bp, Homo sapien
aaaaattagctgggcgttgtggtgg

SEQ ID NO: 5676108 - DNA, 25 bp, Homo sapien
gcatggccaacatggtgatatccca

SEQ ID NO: 5676109 - DNA, 25 bp, Homo sapien
caaaaaaattagctgggcgttgtgg

SEQ ID NO: 5676110 - DNA, 25 bp, Homo sapien
aaaaaattagctgggcgttgtggtg

SEQ ID NO: 5676111 - DNA, 25 bp, Homo sapien
gagagagtccccttcccaaattctc

SEQ ID NO: 5676112 - DNA, 25 bp, Homo sapien
tttctggtagttaacactctgatgc

SEQ ID NO: 5676113 - DNA, 25 bp, Homo sapien
cattatatgagagagtccccttccc

SEQ ID NO: 5676114 - DNA, 25 bp, Homo sapien
agcattatatgagagagtccccttc

SEQ ID NO: 5676115 - DNA, 25 bp, Homo sapien
caaattctcactcacacttgattta

SEQ ID NO: 5676116 - DNA, 25 bp, Homo sapien
tatcaaactttctggtagttaacac

SEQ ID NO: 5676117 - DNA, 25 bp, Homo sapien
tttgataaatcaagtgtgagtgaga

SEQ ID NO: 5676118 - DNA, 25 bp, Homo sapien
gaaggggactctctcatataatgct

SEQ ID NO: 5676119 - DNA, 25 bp, Homo sapien
gagtgttaactaccagaaagtttga

SEQ ID NO: 5676120 - DNA, 25 bp, Homo sapien
gagaatttgggaaggggactctctc

SEQ ID NO: 5676121 - DNA, 25 bp, Homo sapien
taaatcaagtgtgagtgagaatttg

SEQ ID NO: 5676122 - DNA, 25 bp, Homo sapien
gcatcagagtgttaactaccagaaa

SEQ ID NO: 5676123 - DNA, 25 bp, Homo sapien
actttgatcagtattctaggtcttt

SEQ ID NO: 5676124 - DNA, 25 bp, Homo sapien
gattgaaagtgttactttgatcagt

SEQ ID NO: 5676125 - DNA, 25 bp, Homo sapien
ctttgatcagtattctaggtctttc

SEQ ID NO: 5676126 - DNA, 25 bp, Homo sapien
tttgatcagtattctaggtctttct

SEQ ID NO: 5676127 - DNA, 25 bp, Homo sapien
tactttgatcagtattctaggtctt

SEQ ID NO: 5676128 - DNA, 25 bp, Homo sapien
ttgatcagtattctaggtctttcta

SEQ ID NO: 5676129 - DNA, 25 bp, Homo sapien
aaatcctcaaggagacttcttgggg

SEQ ID NO: 5676130 - DNA, 25 bp, Homo sapien
ccccaagaagtctccttgaggattt

SEQ ID NO: 5676131 - DNA, 25 bp, Homo sapien
agaaagacctagaatactgatcaaa

SEQ ID NO: 5676132 - DNA, 25 bp, Homo sapien
tactgatcaaagtaacactttcaat

SEQ ID NO: 5676133 - DNA, 25 bp, Homo sapien
actgatcaaagtaacactttcaatc

SEQ ID NO: 5676134 - DNA, 25 bp, Homo sapien
ctgatcaaagtaacactttcaatca

SEQ ID NO: 5676135 - DNA, 25 bp, Homo sapien
gaaagacctagaatactgatcaaag

SEQ ID NO: 5676136 - DNA, 25 bp, Homo sapien
tagaaagacctagaatactgatcaa

SEQ ID NO: 5676137 - DNA, 25 bp, Homo sapien
gatcagtattctaggtctttctaaa

SEQ ID NO: 5676138 - DNA, 25 bp, Homo sapien
aaaatcctcaaggagacttcttggg

SEQ ID NO: 5676139 - DNA, 25 bp, Homo sapien
gattgaaagtgttactttgatcagt

SEQ ID NO: 5676140 - DNA, 25 bp, Homo sapien
ggtgtggatttctgcttgattgaaa

SEQ ID NO: 5676141 - DNA, 25 bp, Homo sapien
ctttgatcagtattctaggtctttc

SEQ ID NO: 5676142 - DNA, 25 bp, Homo sapien
caaatattggtgtggatttctgctt

SEQ ID NO: 5676143 - DNA, 25 bp, Homo sapien
gaagctagaaactaagattttgtct

SEQ ID NO: 5676144 - DNA, 25 bp, Homo sapien
tatgaagctagaaactaagattttg

SEQ ID NO: 5676145 - DNA, 25 bp, Homo sapien
gaagtaggggctaattatgaagcta

SEQ ID NO: 5676146 - DNA, 25 bp, Homo sapien
gaggctctctactttcttaatgaaa

SEQ ID NO: 5676147 - DNA, 25 bp, Homo sapien
aagattttgtcttgaggctctctac

SEQ ID NO: 5676148 - DNA, 25 bp, Homo sapien
aaactaagattttgtcttgaggctc

SEQ ID NO: 5676149 - DNA, 25 bp, Homo sapien
gagagcctcaagacaaaatcttagt

SEQ ID NO: 5676150 - DNA, 25 bp, Homo sapien
tctagcttcataattagcccctact

SEQ ID NO: 5676151 - DNA, 25 bp, Homo sapien
gacaaaatcttagtttctagcttca

SEQ ID NO: 5676152 - DNA, 25 bp, Homo sapien
tttcattaagaaagtagagagcctc

SEQ ID NO: 5676153 - DNA, 25 bp, Homo sapien
gtagagagcctcaagacaaaatctt

SEQ ID NO: 5676154 - DNA, 25 bp, Homo sapien
ttcattaagaaagtagagagcctca

SEQ ID NO: 5676155 - DNA, 25 bp, Homo sapien
tgcttagcctctctaatccacagat

SEQ ID NO: 5676156 - DNA, 25 bp, Homo sapien
gataacctagacatttgcttagcct

SEQ ID NO: 5676157 - DNA, 25 bp, Homo sapien
tagtttcttggtggataacctagac

SEQ ID NO: 5676158 - DNA, 25 bp, Homo sapien
ctctctaatccacagatagaatgga

SEQ ID NO: 5676159 - DNA, 25 bp, Homo sapien
taatctcatcttcgctagtttcttg

SEQ ID NO: 5676160 - DNA, 25 bp, Homo sapien
tggtggataacctagacatttgctt

SEQ ID NO: 5676161 - DNA, 25 bp, Homo sapien
tagagaggctaagcaaatgtctagg

SEQ ID NO: 5676162 - DNA, 25 bp, Homo sapien
cattctatctgtggattagagaggc

SEQ ID NO: 5676163 - DNA, 25 bp, Homo sapien
taagcaaatgtctaggttatccacc

SEQ ID NO: 5676164 - DNA, 25 bp, Homo sapien
taggttatccaccaagaaactagcg

SEQ ID NO: 5676165 - DNA, 25 bp, Homo sapien
tatctgtggattagagaggctaagc

SEQ ID NO: 5676166 - DNA, 25 bp, Homo sapien
caagaaactagcgaagatgagatta

SEQ ID NO: 5676167 - DNA, 25 bp, Homo sapien
tcttgacggccatcatcattattat

SEQ ID NO: 5676168 - DNA, 25 bp, Homo sapien
ataaatcttgacggccatcatcatt

SEQ ID NO: 5676169 - DNA, 25 bp, Homo sapien
aataaatcttgacggccatcatcat

SEQ ID NO: 5676170 - DNA, 25 bp, Homo sapien
atcttgacggccatcatcattatta

SEQ ID NO: 5676171 - DNA, 25 bp, Homo sapien
taaatcttgacggccatcatcatta

SEQ ID NO: 5676172 - DNA, 25 bp, Homo sapien
aatcttgacggccatcatcattatt

SEQ ID NO: 5676173 - DNA, 25 bp, Homo sapien
taatgatgatggccgtcaagattta

SEQ ID NO: 5676174 - DNA, 25 bp, Homo sapien
ataataatgatgatggccgtcaaga

SEQ ID NO: 5676175 - DNA, 25 bp, Homo sapien
taataatgatgatggccgtcaagat

SEQ ID NO: 5676176 - DNA, 25 bp, Homo sapien
aatgatgatggccgtcaagatttat

SEQ ID NO: 5676177 - DNA, 25 bp, Homo sapien
aataatgatgatggccgtcaagatt

SEQ ID NO: 5676178 - DNA, 25 bp, Homo sapien
atgatgatggccgtcaagatttatt

SEQ ID NO: 5676179 - DNA, 25 bp, Homo sapien
tcagctgtgaaagtacatgtaggca

SEQ ID NO: 5676180 - DNA, 25 bp, Homo sapien
tcttgacggccatcatcattattat

SEQ ID NO: 5676181 - DNA, 25 bp, Homo sapien
aataaatcttgacggccatcatcat

SEQ ID NO: 5676182 - DNA, 25 bp, Homo sapien
aaagtacatgtaggcatttagcacc

SEQ ID NO: 5676183 - DNA, 25 bp, Homo sapien
gcatttagcaccaatgcctggcata

SEQ ID NO: 5676184 - DNA, 25 bp, Homo sapien
cctggcatatggtaaccacccaata

SEQ ID NO: 5676185 - DNA, 25 bp, Homo sapien
taataatgatgatggccgtcaagat

SEQ ID NO: 5676186 - DNA, 25 bp, Homo sapien
tatgccaggcattggtgctaaatgc

SEQ ID NO: 5676187 - DNA, 25 bp, Homo sapien
ggtgctaaatgcctacatgtacttt

SEQ ID NO: 5676188 - DNA, 25 bp, Homo sapien
tattgggtggttaccatatgccagg

SEQ ID NO: 5676189 - DNA, 25 bp, Homo sapien
gccgtcaagatttattgggtggtta

SEQ ID NO: 5676190 - DNA, 25 bp, Homo sapien
tgcctacatgtactttcacagctga

SEQ ID NO: 5676191 - DNA, 25 bp, Homo sapien
taatacgttcttttcagctgaaatt

SEQ ID NO: 5676192 - DNA, 25 bp, Homo sapien
cagcaaataatacgttcttttcagc

SEQ ID NO: 5676193 - DNA, 25 bp, Homo sapien
cttttcagctgaaatttagaaggtg

SEQ ID NO: 5676194 - DNA, 25 bp, Homo sapien
gagtggaccagcaaataatacgttc

SEQ ID NO: 5676195 - DNA, 25 bp, Homo sapien
gtggaccagcaaataatacgttctt

SEQ ID NO: 5676196 - DNA, 25 bp, Homo sapien
gaccagcaaataatacgttcttttc

SEQ ID NO: 5676197 - DNA, 25 bp, Homo sapien
gctgaaaagaacgtattatttgctg

SEQ ID NO: 5676198 - DNA, 25 bp, Homo sapien
caccttctaaatttcagctgaaaag

SEQ ID NO: 5676199 - DNA, 25 bp, Homo sapien
gaaaagaacgtattatttgctggtc

SEQ ID NO: 5676200 - DNA, 25 bp, Homo sapien
gaacgtattatttgctggtccactc

SEQ ID NO: 5676201 - DNA, 25 bp, Homo sapien
aagaacgtattatttgctggtccac

SEQ ID NO: 5676202 - DNA, 25 bp, Homo sapien
ctaaatttcagctgaaaagaacgta

SEQ ID NO: 5676203 - DNA, 25 bp, Homo sapien
atggagtgtcccaagttggcactgg

SEQ ID NO: 5676204 - DNA, 25 bp, Homo sapien
aaagttctgaagtgacagatggagt

SEQ ID NO: 5676205 - DNA, 25 bp, Homo sapien
aagttctgaagtgacagatggagtg

SEQ ID NO: 5676206 - DNA, 25 bp, Homo sapien
tggagtgtcccaagttggcactgga

SEQ ID NO: 5676207 - DNA, 25 bp, Homo sapien
tccagtgccaacttgggacactcca

SEQ ID NO: 5676208 - DNA, 25 bp, Homo sapien
actccatctgtcacttcagaacttt

SEQ ID NO: 5676209 - DNA, 25 bp, Homo sapien
ccagtgccaacttgggacactccat

SEQ ID NO: 5676210 - DNA, 25 bp, Homo sapien
cactccatctgtcacttcagaactt

SEQ ID NO: 5676211 - DNA, 25 bp, Homo sapien
tccagtgccaacttgggacactcca

SEQ ID NO: 5676212 - DNA, 25 bp, Homo sapien
tacaacttcttccagcttatagata

SEQ ID NO: 5676213 - DNA, 25 bp, Homo sapien
tacttttccagtgccaacttgggac

SEQ ID NO: 5676214 - DNA, 25 bp, Homo sapien
tcacttcagaactttttaataccac

SEQ ID NO: 5676215 - DNA, 25 bp, Homo sapien
ggacactccatctgtcacttcagaa

SEQ ID NO: 5676216 - DNA, 25 bp, Homo sapien
tatagatatacttttccagtgccaa

SEQ ID NO: 5676217 - DNA, 25 bp, Homo sapien
gcagttctatcaggacagacatgag

SEQ ID NO: 5676218 - DNA, 25 bp, Homo sapien
tccccatagagagtaggttggagat

SEQ ID NO: 5676219 - DNA, 25 bp, Homo sapien
ccatagagagtaggttggagatgta

SEQ ID NO: 5676220 - DNA, 25 bp, Homo sapien
gcttttccccatagagagtaggttg

SEQ ID NO: 5676221 - DNA, 25 bp, Homo sapien
tatcaggacagacatgagcttttcc

SEQ ID NO: 5676222 - DNA, 25 bp, Homo sapien
tgagcttttccccatagagagtagg

SEQ ID NO: 5676223 - DNA, 25 bp, Homo sapien
ctcatgtctgtcctgatagaactgc

SEQ ID NO: 5676224 - DNA, 25 bp, Homo sapien
tacatctccaacctactctctatgg

SEQ ID NO: 5676225 - DNA, 25 bp, Homo sapien
cctactctctatggggaaaagctca

SEQ ID NO: 5676226 - DNA, 25 bp, Homo sapien
gggaaaagctcatgtctgtcctgat

SEQ ID NO: 5676227 - DNA, 25 bp, Homo sapien
gaaaagctcatgtctgtcctgatag

SEQ ID NO: 5676228 - DNA, 25 bp, Homo sapien
aaagctcatgtctgtcctgatagaa

SEQ ID NO: 5676229 - DNA, 25 bp, Homo sapien
agcctacaataagcgatttcagagg

SEQ ID NO: 5676230 - DNA, 25 bp, Homo sapien
ctgccctggagcctacaataagcga

SEQ ID NO: 5676231 - DNA, 25 bp, Homo sapien
cctggagcctacaataagcgatttc

SEQ ID NO: 5676232 - DNA, 25 bp, Homo sapien
tcctcttactttcctgccctggagc

SEQ ID NO: 5676233 - DNA, 25 bp, Homo sapien
gccctggagcctacaataagcgatt

SEQ ID NO: 5676234 - DNA, 25 bp, Homo sapien
ggagcctacaataagcgatttcaga

SEQ ID NO: 5676235 - DNA, 25 bp, Homo sapien
tctgaaatcgcttattgtaggctcc

SEQ ID NO: 5676236 - DNA, 25 bp, Homo sapien
aatcgcttattgtaggctccagggc

SEQ ID NO: 5676237 - DNA, 25 bp, Homo sapien
gctccagggcaggaaagtaagagga

SEQ ID NO: 5676238 - DNA, 25 bp, Homo sapien
gaaatcgcttattgtaggctccagg

SEQ ID NO: 5676239 - DNA, 25 bp, Homo sapien
tcgcttattgtaggctccagggcag

SEQ ID NO: 5676240 - DNA, 25 bp, Homo sapien
cctctgaaatcgcttattgtaggct

SEQ ID NO: 5676241 - DNA, 25 bp, Homo sapien
ttttgagatggagtctcgctctgtc

SEQ ID NO: 5676242 - DNA, 25 bp, Homo sapien
ttggctcatggcaagctccgcctcc

SEQ ID NO: 5676243 - DNA, 25 bp, Homo sapien
atcttggctcatggcaagctccgcc

SEQ ID NO: 5676244 - DNA, 25 bp, Homo sapien
acccaggctggactgcagtggcacg

SEQ ID NO: 5676245 - DNA, 25 bp, Homo sapien
tcttggctcatggcaagctccgcct

SEQ ID NO: 5676246 - DNA, 25 bp, Homo sapien
cttggctcatggcaagctccgcctc

SEQ ID NO: 5676247 - DNA, 25 bp, Homo sapien
gacagagcgagactccatctcaaaa

SEQ ID NO: 5676248 - DNA, 25 bp, Homo sapien
ggaggcggagcttgccatgagccaa

SEQ ID NO: 5676249 - DNA, 25 bp, Homo sapien
ggcggagcttgccatgagccaagat

SEQ ID NO: 5676250 - DNA, 25 bp, Homo sapien
gaggcggagcttgccatgagccaag

SEQ ID NO: 5676251 - DNA, 25 bp, Homo sapien
cgtgccactgcagtccagcctgggt

SEQ ID NO: 5676252 - DNA, 25 bp, Homo sapien
aggcggagcttgccatgagccaaga

SEQ ID NO: 5676253 - DNA, 25 bp, Homo sapien
tgttcaggcgattctcttgcctcag

SEQ ID NO: 5676254 - DNA, 25 bp, Homo sapien
gcctcccatgttcaggcgattctct

SEQ ID NO: 5676255 - DNA, 25 bp, Homo sapien
ctcccatgttcaggcgattctcttg

SEQ ID NO: 5676256 - DNA, 25 bp, Homo sapien
cctcccatgttcaggcgattctctt

SEQ ID NO: 5676257 - DNA, 25 bp, Homo sapien
ccatgttcaggcgattctcttgcct

SEQ ID NO: 5676258 - DNA, 25 bp, Homo sapien
cagcctccgcctcccatgttcaggc

SEQ ID NO: 5676259 - DNA, 25 bp, Homo sapien
aagagaatcgcctgaacatgggagg

SEQ ID NO: 5676260 - DNA, 25 bp, Homo sapien
caagagaatcgcctgaacatgggag

SEQ ID NO: 5676261 - DNA, 25 bp, Homo sapien
agagaatcgcctgaacatgggaggc

SEQ ID NO: 5676262 - DNA, 25 bp, Homo sapien
gcctgaacatgggaggcggaggctg

SEQ ID NO: 5676263 - DNA, 25 bp, Homo sapien
ctgaggcaagagaatcgcctgaaca

SEQ ID NO: 5676264 - DNA, 25 bp, Homo sapien
aggcaagagaatcgcctgaacatgg

SEQ ID NO: 5676265 - DNA, 25 bp, Homo sapien
aggcgtgatccaccacgcctggaca

SEQ ID NO: 5676266 - DNA, 25 bp, Homo sapien
ccttgtgatctgtccgccttgacct

SEQ ID NO: 5676267 - DNA, 25 bp, Homo sapien
cgtgatccaccacgcctggacagta

SEQ ID NO: 5676268 - DNA, 25 bp, Homo sapien
cttgtgatctgtccgccttgacctc

SEQ ID NO: 5676269 - DNA, 25 bp, Homo sapien
gtccgccttgacctcccagagtact

SEQ ID NO: 5676270 - DNA, 25 bp, Homo sapien
gcgtgatccaccacgcctggacagt

SEQ ID NO: 5676271 - DNA, 25 bp, Homo sapien
tactgtccaggcgtggtggatcacg

SEQ ID NO: 5676272 - DNA, 25 bp, Homo sapien
aggtcaaggcggacagatcacaagg

SEQ ID NO: 5676273 - DNA, 25 bp, Homo sapien
agtactctgggaggtcaaggcggac

SEQ ID NO: 5676274 - DNA, 25 bp, Homo sapien
tctgggaggtcaaggcggacagatc

SEQ ID NO: 5676275 - DNA, 25 bp, Homo sapien
tgtccaggcgtggtggatcacgcct

SEQ ID NO: 5676276 - DNA, 25 bp, Homo sapien
gaggtcaaggcggacagatcacaag

SEQ ID NO: 5676277 - DNA, 25 bp, Homo sapien
tagttcctggtacagtgtggtgtag

SEQ ID NO: 5676278 - DNA, 25 bp, Homo sapien
agttcctggtacagtgtggtgtagt

SEQ ID NO: 5676279 - DNA, 25 bp, Homo sapien
cttagttcctggtacagtgtggtgt

SEQ ID NO: 5676280 - DNA, 25 bp, Homo sapien
tcttagttcctggtacagtgtggtg

SEQ ID NO: 5676281 - DNA, 25 bp, Homo sapien
actacaccacactgtaccaggaact

SEQ ID NO: 5676282 - DNA, 25 bp, Homo sapien
acaccacactgtaccaggaactaag

SEQ ID NO: 5676283 - DNA, 25 bp, Homo sapien
caccacactgtaccaggaactaaga

SEQ ID NO: 5676284 - DNA, 25 bp, Homo sapien
ctacaccacactgtaccaggaacta

SEQ ID NO: 5676285 - DNA, 25 bp, Homo sapien
tagttcctggtacagtgtggtgtag

SEQ ID NO: 5676286 - DNA, 25 bp, Homo sapien
aatatataaaatgagtgtcctaacc

SEQ ID NO: 5676287 - DNA, 25 bp, Homo sapien
tggtgtagtggatgttcaataaata

SEQ ID NO: 5676288 - DNA, 25 bp, Homo sapien
gtaagaacaatatctgtcatgttta

SEQ ID NO: 5676289 - DNA, 25 bp, Homo sapien
tcttagttcctggtacagtgtggtg

SEQ ID NO: 5676290 - DNA, 25 bp, Homo sapien
acagtgtggtgtagtggatgttcaa

SEQ ID NO: 5676291 - DNA, 25 bp, Homo sapien
actacaccacactgtaccaggaact

SEQ ID NO: 5676292 - DNA, 25 bp, Homo sapien
tatttattgaacatccactacacca

SEQ ID NO: 5676293 - DNA, 25 bp, Homo sapien
caccacactgtaccaggaactaaga

SEQ ID NO: 5676294 - DNA, 25 bp, Homo sapien
ggttaggacactcattttatatatt

SEQ ID NO: 5676295 - DNA, 25 bp, Homo sapien
taaacatgacagatattgttcttac

SEQ ID NO: 5676296 - DNA, 25 bp, Homo sapien
ttgaacatccactacaccacactgt

SEQ ID NO: 5676297 - DNA, 25 bp, Homo sapien
ggttctctgtgtattgcccaggccg

SEQ ID NO: 5676298 - DNA, 25 bp, Homo sapien
gttctctgtgtattgcccaggccgg

SEQ ID NO: 5676299 - DNA, 25 bp, Homo sapien
gggttctctgtgtattgcccaggcc

SEQ ID NO: 5676300 - DNA, 25 bp, Homo sapien
ttctctgtgtattgcccaggccggt

SEQ ID NO: 5676301 - DNA, 25 bp, Homo sapien
tctctgtgtattgcccaggccggtc

SEQ ID NO: 5676302 - DNA, 25 bp, Homo sapien
ttttttgcagagatggggttctctg

SEQ ID NO: 5676303 - DNA, 25 bp, Homo sapien
ctgggcaatacacagagaaccccat

SEQ ID NO: 5676304 - DNA, 25 bp, Homo sapien
cctgggcaatacacagagaacccca

SEQ ID NO: 5676305 - DNA, 25 bp, Homo sapien
ccggcctgggcaatacacagagaac

SEQ ID NO: 5676306 - DNA, 25 bp, Homo sapien
gggcaatacacagagaaccccatct

SEQ ID NO: 5676307 - DNA, 25 bp, Homo sapien
gaccggcctgggcaatacacagaga

SEQ ID NO: 5676308 - DNA, 25 bp, Homo sapien
ggcctgggcaatacacagagaaccc

SEQ ID NO: 5676309 - DNA, 25 bp, Homo sapien
atgtcatttatgtctcctcaggtag

SEQ ID NO: 5676310 - DNA, 25 bp, Homo sapien
caactaactcccataaaatactcta

SEQ ID NO: 5676311 - DNA, 25 bp, Homo sapien
tttatgtctcctcaggtagattgaa

SEQ ID NO: 5676312 - DNA, 25 bp, Homo sapien
cataaaatactctaataagactcag

SEQ ID NO: 5676313 - DNA, 25 bp, Homo sapien
taagactcagacatagatttaatta

SEQ ID NO: 5676314 - DNA, 25 bp, Homo sapien
gtcatttatgtctcctcaggtagat

SEQ ID NO: 5676315 - DNA, 25 bp, Homo sapien
ctacctgaggagacataaatgacat

SEQ ID NO: 5676316 - DNA, 25 bp, Homo sapien
taattaaatctatgtctgagtctta

SEQ ID NO: 5676317 - DNA, 25 bp, Homo sapien
gagtcttattagagtattttatggg

SEQ ID NO: 5676318 - DNA, 25 bp, Homo sapien
ttcaatctacctgaggagacataaa

SEQ ID NO: 5676319 - DNA, 25 bp, Homo sapien
atctacctgaggagacataaatgac

SEQ ID NO: 5676320 - DNA, 25 bp, Homo sapien
tagagtattttatgggagttagttg

SEQ ID NO: 5676321 - DNA, 25 bp, Homo sapien
aagtgtatgattttaggcaactgac

SEQ ID NO: 5676322 - DNA, 25 bp, Homo sapien
gacctgagtttaaaccttgatgatg

SEQ ID NO: 5676323 - DNA, 25 bp, Homo sapien
cagcactaagtgtatgattttaggc

SEQ ID NO: 5676324 - DNA, 25 bp, Homo sapien
ccttgatgatgaaacagcactaagt

SEQ ID NO: 5676325 - DNA, 25 bp, Homo sapien
gatgatgaaacagcactaagtgtat

SEQ ID NO: 5676326 - DNA, 25 bp, Homo sapien
tgtatgattttaggcaactgacttt

SEQ ID NO: 5676327 - DNA, 25 bp, Homo sapien
acttagtgctgtttcatcatcaagg

SEQ ID NO: 5676328 - DNA, 25 bp, Homo sapien
gcctaaaatcatacacttagtgctg

SEQ ID NO: 5676329 - DNA, 25 bp, Homo sapien
aaagtcagttgcctaaaatcataca

SEQ ID NO: 5676330 - DNA, 25 bp, Homo sapien
tacacttagtgctgtttcatcatca

SEQ ID NO: 5676331 - DNA, 25 bp, Homo sapien
ttcatcatcaaggtttaaactcagg

SEQ ID NO: 5676332 - DNA, 25 bp, Homo sapien
catcatcaaggtttaaactcaggtc

SEQ ID NO: 5676333 - DNA, 25 bp, Homo sapien
gagcaggtagtagagctgttttttc

SEQ ID NO: 5676334 - DNA, 25 bp, Homo sapien
catgcctatcatattgagcaggtag

SEQ ID NO: 5676335 - DNA, 25 bp, Homo sapien
gcctatcatattgagcaggtagtag

SEQ ID NO: 5676336 - DNA, 25 bp, Homo sapien
atcatcatcaatattaccttaaact

SEQ ID NO: 5676337 - DNA, 25 bp, Homo sapien
tgaaatctataacatgcctatcata

SEQ ID NO: 5676338 - DNA, 25 bp, Homo sapien
taacatgcctatcatattgagcagg

SEQ ID NO: 5676339 - DNA, 25 bp, Homo sapien
tactacctgctcaatatgataggca

SEQ ID NO: 5676340 - DNA, 25 bp, Homo sapien
ctactacctgctcaatatgataggc

SEQ ID NO: 5676341 - DNA, 25 bp, Homo sapien
gaaaaaacagctctactacctgctc

SEQ ID NO: 5676342 - DNA, 25 bp, Homo sapien
tatgataggcatgttatagatttca

SEQ ID NO: 5676343 - DNA, 25 bp, Homo sapien
agtttaaggtaatattgatgatgat

SEQ ID NO: 5676344 - DNA, 25 bp, Homo sapien
cctgctcaatatgataggcatgtta

SEQ ID NO: 5676345 - DNA, 25 bp, Homo sapien
aagaggcaatgtagaagagtggaca

SEQ ID NO: 5676346 - DNA, 25 bp, Homo sapien
ctttgctccattacttagtagatac

SEQ ID NO: 5676347 - DNA, 25 bp, Homo sapien
tacatggcctggttccattctttgc

SEQ ID NO: 5676348 - DNA, 25 bp, Homo sapien
atggcctggttccattctttgctcc

SEQ ID NO: 5676349 - DNA, 25 bp, Homo sapien
tacttagtagatacatgactttagg

SEQ ID NO: 5676350 - DNA, 25 bp, Homo sapien
ttggagttacatggcctggttccat

SEQ ID NO: 5676351 - DNA, 25 bp, Homo sapien
gtatctactaagtaatggagcaaag

SEQ ID NO: 5676352 - DNA, 25 bp, Homo sapien
ggagcaaagaatggaaccaggccat

SEQ ID NO: 5676353 - DNA, 25 bp, Homo sapien
cctaaagtcatgtatctactaagta

SEQ ID NO: 5676354 - DNA, 25 bp, Homo sapien
atggaaccaggccatgtaactccaa

SEQ ID NO: 5676355 - DNA, 25 bp, Homo sapien
caaagaatggaaccaggccatgtaa

SEQ ID NO: 5676356 - DNA, 25 bp, Homo sapien
tgtccactcttctacattgcctctt

SEQ ID NO: 5676357 - DNA, 25 bp, Homo sapien
taaatgacgcaaagcttgcatagca

SEQ ID NO: 5676358 - DNA, 25 bp, Homo sapien
caaagattaaatgacgcaaagcttg

SEQ ID NO: 5676359 - DNA, 25 bp, Homo sapien
tggcatggtggctagcacagagtaa

SEQ ID NO: 5676360 - DNA, 25 bp, Homo sapien
tgacgcaaagcttgcatagcacttg

SEQ ID NO: 5676361 - DNA, 25 bp, Homo sapien
taatatccacttcatagggctgttg

SEQ ID NO: 5676362 - DNA, 25 bp, Homo sapien
aatatccacttcatagggctgttgc

SEQ ID NO: 5676363 - DNA, 25 bp, Homo sapien
ttactctgtgctagccaccatgcca

SEQ ID NO: 5676364 - DNA, 25 bp, Homo sapien
caacagccctatgaagtggatatta

SEQ ID NO: 5676365 - DNA, 25 bp, Homo sapien
caagctttgcgtcatttaatctttg

SEQ ID NO: 5676366 - DNA, 25 bp, Homo sapien
caagtgctatgcaagctttgcgtca

SEQ ID NO: 5676367 - DNA, 25 bp, Homo sapien
gcaacagccctatgaagtggatatt

SEQ ID NO: 5676368 - DNA, 25 bp, Homo sapien
gctatgcaagctttgcgtcatttaa

SEQ ID NO: 5676369 - DNA, 25 bp, Homo sapien
ctatttttttagagaccaagtctca

SEQ ID NO: 5676370 - DNA, 25 bp, Homo sapien
tatttttttagagaccaagtctcac

SEQ ID NO: 5676371 - DNA, 25 bp, Homo sapien
tgagacttggtctctaaaaaaatag

SEQ ID NO: 5676372 - DNA, 25 bp, Homo sapien
gtgagacttggtctctaaaaaaata

SEQ ID NO: 5676373 - DNA, 25 bp, Homo sapien
aggcattcatcaccacacctggtta

SEQ ID NO: 5676374 - DNA, 25 bp, Homo sapien
ggcattcatcaccacacctggttaa

SEQ ID NO: 5676375 - DNA, 25 bp, Homo sapien
attcatcaccacacctggttaattt

SEQ ID NO: 5676376 - DNA, 25 bp, Homo sapien
gcattcatcaccacacctggttaat

SEQ ID NO: 5676377 - DNA, 25 bp, Homo sapien
caggcattcatcaccacacctggtt

SEQ ID NO: 5676378 - DNA, 25 bp, Homo sapien
cattcatcaccacacctggttaatt

SEQ ID NO: 5676379 - DNA, 25 bp, Homo sapien
ttaaccaggtgtggtgatgaatgcc

SEQ ID NO: 5676380 - DNA, 25 bp, Homo sapien
aattaaccaggtgtggtgatgaatg

SEQ ID NO: 5676381 - DNA, 25 bp, Homo sapien
attaaccaggtgtggtgatgaatgc

SEQ ID NO: 5676382 - DNA, 25 bp, Homo sapien
taaccaggtgtggtgatgaatgcct

SEQ ID NO: 5676383 - DNA, 25 bp, Homo sapien
aaattaaccaggtgtggtgatgaat

SEQ ID NO: 5676384 - DNA, 25 bp, Homo sapien
aaccaggtgtggtgatgaatgcctg

SEQ ID NO: 5676385 - DNA, 25 bp, Homo sapien
ttggctaggctattcctgacctcaa

SEQ ID NO: 5676386 - DNA, 25 bp, Homo sapien
ttgaggtcaggaatagcctagccaa

SEQ ID NO: 5676387 - DNA, 25 bp, Homo sapien
tggctaggctattcctgacctcaag

SEQ ID NO: 5676388 - DNA, 25 bp, Homo sapien
gagccactgcgccagtcctctggag

SEQ ID NO: 5676389 - DNA, 25 bp, Homo sapien
ttggctaggctattcctgacctcaa

SEQ ID NO: 5676390 - DNA, 25 bp, Homo sapien
ggctaggctattcctgacctcaagt

SEQ ID NO: 5676391 - DNA, 25 bp, Homo sapien
gctaggctattcctgacctcaagtg

SEQ ID NO: 5676392 - DNA, 25 bp, Homo sapien
gccactgcgccagtcctctggagct

SEQ ID NO: 5676393 - DNA, 25 bp, Homo sapien
ttgaggtcaggaatagcctagccaa

SEQ ID NO: 5676394 - DNA, 25 bp, Homo sapien
cttgaggtcaggaatagcctagcca

SEQ ID NO: 5676395 - DNA, 25 bp, Homo sapien
ctccagaggactggcgcagtggctc

SEQ ID NO: 5676396 - DNA, 25 bp, Homo sapien
agctccagaggactggcgcagtggc

SEQ ID NO: 5676397 - DNA, 25 bp, Homo sapien
cacttgaggtcaggaatagcctagc

SEQ ID NO: 5676398 - DNA, 25 bp, Homo sapien
acttgaggtcaggaatagcctagcc

SEQ ID NO: 5676399 - DNA, 25 bp, Homo sapien
tctaattggtttccgcacttccact

SEQ ID NO: 5676400 - DNA, 25 bp, Homo sapien
ggcttctaattggtttccgcacttc

SEQ ID NO: 5676401 - DNA, 25 bp, Homo sapien
tctggtttccgcacttccactctga

SEQ ID NO: 5676402 - DNA, 25 bp, Homo sapien
aattggtttccgcacttccactctg

SEQ ID NO: 5676403 - DNA, 25 bp, Homo sapien
gcttctaattggtttccgcacttcc

SEQ ID NO: 5676404 - DNA, 25 bp, Homo sapien
attggtttccgcacttccactctgg

SEQ ID NO: 5676405 - DNA, 25 bp, Homo sapien
ccagagtggaagtgcggaaaccaat

SEQ ID NO: 5676406 - DNA, 25 bp, Homo sapien
tcagagtggaagtgcggaaaccaga

SEQ ID NO: 5676407 - DNA, 25 bp, Homo sapien
ggaagtgcggaaaccaattagaagc

SEQ ID NO: 5676408 - DNA, 25 bp, Homo sapien
gaagtgcggaaaccaattagaagcc

SEQ ID NO: 5676409 - DNA, 25 bp, Homo sapien
agtggaagtgcggaaaccaattaga

SEQ ID NO: 5676410 - DNA, 25 bp, Homo sapien
tggaagtgcggaaaccaattagaag

SEQ ID NO: 5676411 - DNA, 25 bp, Homo sapien
tgcaacatctggcctttctagaatg

SEQ ID NO: 5676412 - DNA, 25 bp, Homo sapien
aaagagcaaaatctttaccatgact

SEQ ID NO: 5676413 - DNA, 25 bp, Homo sapien
aatgttctagactcctgactttctt

SEQ ID NO: 5676414 - DNA, 25 bp, Homo sapien
aagagcaaaatctttaccatgactt

SEQ ID NO: 5676415 - DNA, 25 bp, Homo sapien
gaatgttctagactcctgactttct

SEQ ID NO: 5676416 - DNA, 25 bp, Homo sapien
taaagagcaaaatctttaccatgac

SEQ ID NO: 5676417 - DNA, 25 bp, Homo sapien
agaaagtcaggagtctagaacattc

SEQ ID NO: 5676418 - DNA, 25 bp, Homo sapien
gtcatggtaaagattttgctcttta

SEQ ID NO: 5676419 - DNA, 25 bp, Homo sapien
aagaaagtcaggagtctagaacatt

SEQ ID NO: 5676420 - DNA, 25 bp, Homo sapien
cattctagaaaggccagatgttgca

SEQ ID NO: 5676421 - DNA, 25 bp, Homo sapien
attctagaaaggccagatgttgcag

SEQ ID NO: 5676422 - DNA, 25 bp, Homo sapien
aagtcatggtaaagattttgctctt

SEQ ID NO: 5676423 - DNA, 25 bp, Homo sapien
ccctcccttcacctactgtattgta

SEQ ID NO: 5676424 - DNA, 25 bp, Homo sapien
tcattttgatgcagggcttttgtgc

SEQ ID NO: 5676425 - DNA, 25 bp, Homo sapien
acagcacttcgtttccctcccttca

SEQ ID NO: 5676426 - DNA, 25 bp, Homo sapien
tcctttcacagcacttcgtttccct

SEQ ID NO: 5676427 - DNA, 25 bp, Homo sapien
cattttgatgcagggcttttgtgca

SEQ ID NO: 5676428 - DNA, 25 bp, Homo sapien
gattcattttgatgcagggcttttg

SEQ ID NO: 5676429 - DNA, 25 bp, Homo sapien
cacaaaagccctgcatcaaaatgaa

SEQ ID NO: 5676430 - DNA, 25 bp, Homo sapien
gggaaacgaagtgctgtgaaaggat

SEQ ID NO: 5676431 - DNA, 25 bp, Homo sapien
caaaagccctgcatcaaaatgaatc

SEQ ID NO: 5676432 - DNA, 25 bp, Homo sapien
tgcacaaaagccctgcatcaaaatg

SEQ ID NO: 5676433 - DNA, 25 bp, Homo sapien
tacaatacagtaggtgaagggaggg

SEQ ID NO: 5676434 - DNA, 25 bp, Homo sapien
tgaagggagggaaacgaagtgctgt

SEQ ID NO: 5676435 - DNA, 25 bp, Homo sapien
tgctgagtggtttaacattcttgtt

SEQ ID NO: 5676436 - DNA, 25 bp, Homo sapien
gctgagtggtttaacattcttgttt

SEQ ID NO: 5676437 - DNA, 25 bp, Homo sapien
ctgctgagtggtttaacattcttgt

SEQ ID NO: 5676438 - DNA, 25 bp, Homo sapien
ctgagtggtttaacattcttgtttc

SEQ ID NO: 5676439 - DNA, 25 bp, Homo sapien
tgagtggtttaacattcttgtttct

SEQ ID NO: 5676440 - DNA, 25 bp, Homo sapien
tctgctgagtggtttaacattcttg

SEQ ID NO: 5676441 - DNA, 25 bp, Homo sapien
caagaatgttaaaccactcagcaga

SEQ ID NO: 5676442 - DNA, 25 bp, Homo sapien
agaaacaagaatgttaaaccactca

SEQ ID NO: 5676443 - DNA, 25 bp, Homo sapien
aacaagaatgttaaaccactcagca

SEQ ID NO: 5676444 - DNA, 25 bp, Homo sapien
aaacaagaatgttaaaccactcagc

SEQ ID NO: 5676445 - DNA, 25 bp, Homo sapien
acaagaatgttaaaccactcagcag

SEQ ID NO: 5676446 - DNA, 25 bp, Homo sapien
gaaacaagaatgttaaaccactcag

SEQ ID NO: 5676447 - DNA, 25 bp, Homo sapien
tcttgtttcttggtattttcaggcc

SEQ ID NO: 5676448 - DNA, 25 bp, Homo sapien
ctgagtggtttaacattcttgtttc

SEQ ID NO: 5676449 - DNA, 25 bp, Homo sapien
tcttggtattttcaggcccagacca

SEQ ID NO: 5676450 - DNA, 25 bp, Homo sapien
taaatgaagagatttctgctgagtg

SEQ ID NO: 5676451 - DNA, 25 bp, Homo sapien
tctgctgagtggtttaacattcttg

SEQ ID NO: 5676452 - DNA, 25 bp, Homo sapien
tcagtctttagtttgttaagtgaat

SEQ ID NO: 5676453 - DNA, 25 bp, Homo sapien
catacctgaggcagggaacccgtaa

SEQ ID NO: 5676454 - DNA, 25 bp, Homo sapien
tacctgaggcagggaacccgtaaca

SEQ ID NO: 5676455 - DNA, 25 bp, Homo sapien
tgaggcagggaacccgtaacaagaa

SEQ ID NO: 5676456 - DNA, 25 bp, Homo sapien
ctgaggcagggaacccgtaacaaga

SEQ ID NO: 5676457 - DNA, 25 bp, Homo sapien
cctgaggcagggaacccgtaacaag

SEQ ID NO: 5676458 - DNA, 25 bp, Homo sapien
cttgttacgggttccctgcctcagg

SEQ ID NO: 5676459 - DNA, 25 bp, Homo sapien
ttacgggttccctgcctcaggtatg

SEQ ID NO: 5676460 - DNA, 25 bp, Homo sapien
ttcttgttacgggttccctgcctca

SEQ ID NO: 5676461 - DNA, 25 bp, Homo sapien
tcttgttacgggttccctgcctcag

SEQ ID NO: 5676462 - DNA, 25 bp, Homo sapien
tgttacgggttccctgcctcaggta

SEQ ID NO: 5676463 - DNA, 25 bp, Homo sapien
agccttacccacagaggacgtttgg

SEQ ID NO: 5676464 - DNA, 25 bp, Homo sapien
ggataaaaccaaggtctcctggagc

SEQ ID NO: 5676465 - DNA, 25 bp, Homo sapien
aggtctcctggagctttctgtctcc

SEQ ID NO: 5676466 - DNA, 25 bp, Homo sapien
gagggttagagagagaagccttacc

SEQ ID NO: 5676467 - DNA, 25 bp, Homo sapien
gagagaagccttacccacagaggac

SEQ ID NO: 5676468 - DNA, 25 bp, Homo sapien
ctgtctccagaatattgagaggctc

SEQ ID NO: 5676469 - DNA, 25 bp, Homo sapien
gagcctctcaatattctggagacag

SEQ ID NO: 5676470 - DNA, 25 bp, Homo sapien
gctccaggagaccttggttttatcc

SEQ ID NO: 5676471 - DNA, 25 bp, Homo sapien
tatccccaaacgtcctctgtgggta

SEQ ID NO: 5676472 - DNA, 25 bp, Homo sapien
ggagacagaaagctccaggagacct

SEQ ID NO: 5676473 - DNA, 25 bp, Homo sapien
ccaaacgtcctctgtgggtaaggct

SEQ ID NO: 5676474 - DNA, 25 bp, Homo sapien
ggtaaggcttctctctctaaccctc

SEQ ID NO: 5676475 - DNA, 25 bp, Homo sapien
ggctctaatacttgaccgacatttt

SEQ ID NO: 5676476 - DNA, 25 bp, Homo sapien
gctctaatacttgaccgacatttta

SEQ ID NO: 5676477 - DNA, 25 bp, Homo sapien
aaaaggctctaatacttgaccgaca

SEQ ID NO: 5676478 - DNA, 25 bp, Homo sapien
tctaatacttgaccgacattttatt

SEQ ID NO: 5676479 - DNA, 25 bp, Homo sapien
aaaggctctaatacttgaccgacat

SEQ ID NO: 5676480 - DNA, 25 bp, Homo sapien
taaaaaggctctaatacttgaccga

SEQ ID NO: 5676481 - DNA, 25 bp, Homo sapien
tgtcggtcaagtattagagcctttt

SEQ ID NO: 5676482 - DNA, 25 bp, Homo sapien
ataaaataaaatgtcggtcaagtat

SEQ ID NO: 5676483 - DNA, 25 bp, Homo sapien
aaatgtcggtcaagtattagagcct

SEQ ID NO: 5676484 - DNA, 25 bp, Homo sapien
tcggtcaagtattagagccttttta

SEQ ID NO: 5676485 - DNA, 25 bp, Homo sapien
taaaatgtcggtcaagtattagagc

SEQ ID NO: 5676486 - DNA, 25 bp, Homo sapien
aataaaatgtcggtcaagtattaga

SEQ ID NO: 5676487 - DNA, 25 bp, Homo sapien
gtaggcactataggcactataggca

SEQ ID NO: 5676488 - DNA, 25 bp, Homo sapien
gcactataggcactataggcacgca

SEQ ID NO: 5676489 - DNA, 25 bp, Homo sapien
agtaggcactataggcactataggc

SEQ ID NO: 5676490 - DNA, 25 bp, Homo sapien
cactataggcactataggcacgcat

SEQ ID NO: 5676491 - DNA, 25 bp, Homo sapien
aagtaggcactataggcactatagg

SEQ ID NO: 5676492 - DNA, 25 bp, Homo sapien
ggcactataggcactataggcacgc

SEQ ID NO: 5676493 - DNA, 25 bp, Homo sapien
tgcgtgcctatagtgcctatagtgc

SEQ ID NO: 5676494 - DNA, 25 bp, Homo sapien
cgtgcctatagtgcctatagtgcct

SEQ ID NO: 5676495 - DNA, 25 bp, Homo sapien
gcctatagtgcctatagtgcctact

SEQ ID NO: 5676496 - DNA, 25 bp, Homo sapien
atgcgtgcctatagtgcctatagtg

SEQ ID NO: 5676497 - DNA, 25 bp, Homo sapien
tgcctatagtgcctatagtgcctac

SEQ ID NO: 5676498 - DNA, 25 bp, Homo sapien
gcgtgcctatagtgcctatagtgcc

SEQ ID NO: 5676499 - DNA, 25 bp, Homo sapien
cgtgcctatagtgcctatagtgcct

SEQ ID NO: 5676500 - DNA, 25 bp, Homo sapien
gcctatagtgcctatagtgcctact

SEQ ID NO: 5676501 - DNA, 25 bp, Homo sapien
atgcgtgcctatagtgcctatagtg

SEQ ID NO: 5676502 - DNA, 25 bp, Homo sapien
ggtgatgcgtgcctatagtgcctat

SEQ ID NO: 5676503 - DNA, 25 bp, Homo sapien
tagtgcctatagtgcctacttggga

SEQ ID NO: 5676504 - DNA, 25 bp, Homo sapien
tgcgtgcctatagtgcctatagtgc

SEQ ID NO: 5676505 - DNA, 25 bp, Homo sapien
acctgccatcacacccggctaattt

SEQ ID NO: 5676506 - DNA, 25 bp, Homo sapien
gcacctgccatcacacccggctaat

SEQ ID NO: 5676507 - DNA, 25 bp, Homo sapien
ctgccatcacacccggctaattttt

SEQ ID NO: 5676508 - DNA, 25 bp, Homo sapien
cctgccatcacacccggctaatttt

SEQ ID NO: 5676509 - DNA, 25 bp, Homo sapien
cacctgccatcacacccggctaatt

SEQ ID NO: 5676510 - DNA, 25 bp, Homo sapien
tgccatcacacccggctaatttttt

SEQ ID NO: 5676511 - DNA, 25 bp, Homo sapien
aattagccgggtgtgatggcaggtg

SEQ ID NO: 5676512 - DNA, 25 bp, Homo sapien
attagccgggtgtgatggcaggtgc

SEQ ID NO: 5676513 - DNA, 25 bp, Homo sapien
aaaaattagccgggtgtgatggcag

SEQ ID NO: 5676514 - DNA, 25 bp, Homo sapien
aaaattagccgggtgtgatggcagg

SEQ ID NO: 5676515 - DNA, 25 bp, Homo sapien
aaaaaattagccgggtgtgatggca

SEQ ID NO: 5676516 - DNA, 25 bp, Homo sapien
aaattagccgggtgtgatggcaggt

SEQ ID NO: 5676517 - DNA, 25 bp, Homo sapien
cgcccgccttggcctcccgaagtgc

SEQ ID NO: 5676518 - DNA, 25 bp, Homo sapien
atccgcccgccttggcctcccgaag

SEQ ID NO: 5676519 - DNA, 25 bp, Homo sapien
gacctcaagtgatccgcccgccttg

SEQ ID NO: 5676520 - DNA, 25 bp, Homo sapien
tgatccgcccgccttggcctcccga

SEQ ID NO: 5676521 - DNA, 25 bp, Homo sapien
ccgcccgccttggcctcccgaagtg

SEQ ID NO: 5676522 - DNA, 25 bp, Homo sapien
ccaccgcacccagccttgacccacg

SEQ ID NO: 5676523 - DNA, 25 bp, Homo sapien
cttcgggaggccaaggcgggcggat

SEQ ID NO: 5676524 - DNA, 25 bp, Homo sapien
cacttcgggaggccaaggcgggcgg

SEQ ID NO: 5676525 - DNA, 25 bp, Homo sapien
gcacttcgggaggccaaggcgggcg

SEQ ID NO: 5676526 - DNA, 25 bp, Homo sapien
cgtgggtcaaggctgggtgcggtgg

SEQ ID NO: 5676527 - DNA, 25 bp, Homo sapien
caaggcgggcggatcacttgaggtc

SEQ ID NO: 5676528 - DNA, 25 bp, Homo sapien
tcgggaggccaaggcgggcggatca

SEQ ID NO: 5676529 - DNA, 25 bp, Homo sapien
aagggcattaagagctggagaggat

SEQ ID NO: 5676530 - DNA, 25 bp, Homo sapien
atcctctccagctcttaatgccctt

SEQ ID NO: 5676531 - DNA, 25 bp, Homo sapien
taactgaggagtatgttcctgactc

SEQ ID NO: 5676532 - DNA, 25 bp, Homo sapien
cagtggaaattaactgaggagtatg

SEQ ID NO: 5676533 - DNA, 25 bp, Homo sapien
taaaagggcattaagagctggagag

SEQ ID NO: 5676534 - DNA, 25 bp, Homo sapien
ggatggtgaagttcagtggaaatta

SEQ ID NO: 5676535 - DNA, 25 bp, Homo sapien
taaacagaagatgtttaaaagggca

SEQ ID NO: 5676536 - DNA, 25 bp, Homo sapien
gtatgttcctgactcctctctttaa

SEQ ID NO: 5676537 - DNA, 25 bp, Homo sapien
taatttccactgaacttcaccatcc

SEQ ID NO: 5676538 - DNA, 25 bp, Homo sapien
ttaaagagaggagtcaggaacatac

SEQ ID NO: 5676539 - DNA, 25 bp, Homo sapien
ctctccagctcttaatgccctttta

SEQ ID NO: 5676540 - DNA, 25 bp, Homo sapien
catactcctcagttaatttccactg

SEQ ID NO: 5676541 - DNA, 25 bp, Homo sapien
taatgcccttttaaacatcttctgt

SEQ ID NO: 5676542 - DNA, 25 bp, Homo sapien
gagtcaggaacatactcctcagtta

SEQ ID NO: 5676543 - DNA, 25 bp, Homo sapien
catgaagtatgtatcctagcccctg

SEQ ID NO: 5676544 - DNA, 25 bp, Homo sapien
agtatgtatcctagcccctggcatc

SEQ ID NO: 5676545 - DNA, 25 bp, Homo sapien
tatcctagcccctggcatctgatca

SEQ ID NO: 5676546 - DNA, 25 bp, Homo sapien
tgaagtatgtatcctagcccctggc

SEQ ID NO: 5676547 - DNA, 25 bp, Homo sapien
ctagcccctggcatctgatcagagg

SEQ ID NO: 5676548 - DNA, 25 bp, Homo sapien
gaagtatgtatcctagcccctggca

SEQ ID NO: 5676549 - DNA, 25 bp, Homo sapien
cctctgatcagatgccaggggctag

SEQ ID NO: 5676550 - DNA, 25 bp, Homo sapien
gatgccaggggctaggatacatact

SEQ ID NO: 5676551 - DNA, 25 bp, Homo sapien
gatcagatgccaggggctaggatac

SEQ ID NO: 5676552 - DNA, 25 bp, Homo sapien
gccaggggctaggatacatacttca

SEQ ID NO: 5676553 - DNA, 25 bp, Homo sapien
tgccaggggctaggatacatacttc

SEQ ID NO: 5676554 - DNA, 25 bp, Homo sapien
caggggctaggatacatacttcatg

SEQ ID NO: 5676555 - DNA, 25 bp, Homo sapien
cctctgatcagatgccaggggctag

SEQ ID NO: 5676556 - DNA, 25 bp, Homo sapien
gggctaggatacatacttcatgtca

SEQ ID NO: 5676557 - DNA, 25 bp, Homo sapien
gatcagatgccaggggctaggatac

SEQ ID NO: 5676558 - DNA, 25 bp, Homo sapien
tacttcatgtcagcctcaggaggtt

SEQ ID NO: 5676559 - DNA, 25 bp, Homo sapien
ccctccctctgatcagatgccaggg

SEQ ID NO: 5676560 - DNA, 25 bp, Homo sapien
tgccaggggctaggatacatacttc

SEQ ID NO: 5676561 - DNA, 25 bp, Homo sapien
tcatggtaacactaacttcacattt

SEQ ID NO: 5676562 - DNA, 25 bp, Homo sapien
tgtgagcaaggttgggtaaggaatt

SEQ ID NO: 5676563 - DNA, 25 bp, Homo sapien
tctcatggtaacactaacttcacat

SEQ ID NO: 5676564 - DNA, 25 bp, Homo sapien
atggtaacactaacttcacattttg

SEQ ID NO: 5676565 - DNA, 25 bp, Homo sapien
ctcatggtaacactaacttcacatt

SEQ ID NO: 5676566 - DNA, 25 bp, Homo sapien
catggtaacactaacttcacatttt

SEQ ID NO: 5676567 - DNA, 25 bp, Homo sapien
aattccttacccaaccttgctcaca

SEQ ID NO: 5676568 - DNA, 25 bp, Homo sapien
caaaatgtgaagttagtgttaccat

SEQ ID NO: 5676569 - DNA, 25 bp, Homo sapien
atgtgaagttagtgttaccatgaga

SEQ ID NO: 5676570 - DNA, 25 bp, Homo sapien
aatgtgaagttagtgttaccatgag

SEQ ID NO: 5676571 - DNA, 25 bp, Homo sapien
aaaatgtgaagttagtgttaccatg

SEQ ID NO: 5676572 - DNA, 25 bp, Homo sapien
aaatgtgaagttagtgttaccatga

SEQ ID NO: 5676573 - DNA, 25 bp, Homo sapien
ggagggatgagtaggaatctctcat

SEQ ID NO: 5676574 - DNA, 25 bp, Homo sapien
gagtaggaatctctcatggtaacac

SEQ ID NO: 5676575 - DNA, 25 bp, Homo sapien
acttcacattttgtgttctttccag

SEQ ID NO: 5676576 - DNA, 25 bp, Homo sapien
tgtgagcaaggttgggtaaggaatt

SEQ ID NO: 5676577 - DNA, 25 bp, Homo sapien
atggtaacactaacttcacattttg

SEQ ID NO: 5676578 - DNA, 25 bp, Homo sapien
tctcatggtaacactaacttcacat

SEQ ID NO: 5676579 - DNA, 25 bp, Homo sapien
ctggaaagaacacaaaatgtgaagt

SEQ ID NO: 5676580 - DNA, 25 bp, Homo sapien
caaaatgtgaagttagtgttaccat

SEQ ID NO: 5676581 - DNA, 25 bp, Homo sapien
tagtgttaccatgagagattcctac

SEQ ID NO: 5676582 - DNA, 25 bp, Homo sapien
aatgtgaagttagtgttaccatgag

SEQ ID NO: 5676583 - DNA, 25 bp, Homo sapien
aattccttacccaaccttgctcaca

SEQ ID NO: 5676584 - DNA, 25 bp, Homo sapien
catgagagattcctactcatccctc

SEQ ID NO: 5676585 - DNA, 25 bp, Homo sapien
ctggataccctaccctcatctcaac

SEQ ID NO: 5676586 - DNA, 25 bp, Homo sapien
gaatgttctggataccctaccctca

SEQ ID NO: 5676587 - DNA, 25 bp, Homo sapien
aaccagagtgactcattaattggag

SEQ ID NO: 5676588 - DNA, 25 bp, Homo sapien
accagagtgactcattaattggagt

SEQ ID NO: 5676589 - DNA, 25 bp, Homo sapien
gaggtgaggtagaggtcaagtatgg

SEQ ID NO: 5676590 - DNA, 25 bp, Homo sapien
tggaatgttctggataccctaccct

SEQ ID NO: 5676591 - DNA, 25 bp, Homo sapien
agggtagggtatccagaacattcca

SEQ ID NO: 5676592 - DNA, 25 bp, Homo sapien
catacttgacctctacctcacctcc

SEQ ID NO: 5676593 - DNA, 25 bp, Homo sapien
ctccaattaatgagtcactctggtt

SEQ ID NO: 5676594 - DNA, 25 bp, Homo sapien
tgagggtagggtatccagaacattc

SEQ ID NO: 5676595 - DNA, 25 bp, Homo sapien
actccaattaatgagtcactctggt

SEQ ID NO: 5676596 - DNA, 25 bp, Homo sapien
gttgagatgagggtagggtatccag

SEQ ID NO: 5676597 - DNA, 25 bp, Homo sapien
tgtgagagcctcagttcaaggtctg

SEQ ID NO: 5676598 - DNA, 25 bp, Homo sapien
ttgtggggaggaggttgtgagagcc

SEQ ID NO: 5676599 - DNA, 25 bp, Homo sapien
tggggaggaggttgtgagagcctca

SEQ ID NO: 5676600 - DNA, 25 bp, Homo sapien
gttgtggggaggaggttgtgagagc

SEQ ID NO: 5676601 - DNA, 25 bp, Homo sapien
gtgagagcctcagttcaaggtctgg

SEQ ID NO: 5676602 - DNA, 25 bp, Homo sapien
tgaggctctcacaacctcctcccca

SEQ ID NO: 5676603 - DNA, 25 bp, Homo sapien
cagaccttgaactgaggctctcaca

SEQ ID NO: 5676604 - DNA, 25 bp, Homo sapien
ggctctcacaacctcctccccacaa

SEQ ID NO: 5676605 - DNA, 25 bp, Homo sapien
gctctcacaacctcctccccacaac

SEQ ID NO: 5676606 - DNA, 25 bp, Homo sapien
ccagaccttgaactgaggctctcac

SEQ ID NO: 5676607 - DNA, 25 bp, Homo sapien
tgtgagagcctcagttcaaggtctg

SEQ ID NO: 5676608 - DNA, 25 bp, Homo sapien
tgttagacaaaagggttctatgcct

SEQ ID NO: 5676609 - DNA, 25 bp, Homo sapien
tagacaaaagggttctatgccttaa

SEQ ID NO: 5676610 - DNA, 25 bp, Homo sapien
ctttgttagacaaaagggttctatg

SEQ ID NO: 5676611 - DNA, 25 bp, Homo sapien
aggaggttgtgagagcctcagttca

SEQ ID NO: 5676612 - DNA, 25 bp, Homo sapien
gtgagagcctcagttcaaggtctgg

SEQ ID NO: 5676613 - DNA, 25 bp, Homo sapien
tgaactgaggctctcacaacctcct

SEQ ID NO: 5676614 - DNA, 25 bp, Homo sapien
cagaccttgaactgaggctctcaca

SEQ ID NO: 5676615 - DNA, 25 bp, Homo sapien
catagaacccttttgtctaacaaag

SEQ ID NO: 5676616 - DNA, 25 bp, Homo sapien
ttaaggcatagaacccttttgtcta

SEQ ID NO: 5676617 - DNA, 25 bp, Homo sapien
ggcatagaacccttttgtctaacaa

SEQ ID NO: 5676618 - DNA, 25 bp, Homo sapien
ccagaccttgaactgaggctctcac

SEQ ID NO: 5676619 - DNA, 25 bp, Homo sapien
ctcttttctcctaggacctgggtct

SEQ ID NO: 5676620 - DNA, 25 bp, Homo sapien
tcttttctcctaggacctgggtcta

SEQ ID NO: 5676621 - DNA, 25 bp, Homo sapien
caagtccatcaatgaaaagtttgct

SEQ ID NO: 5676622 - DNA, 25 bp, Homo sapien
agtccatcaatgaaaagtttgctgg

SEQ ID NO: 5676623 - DNA, 25 bp, Homo sapien
tcaagtccatcaatgaaaagtttgc

SEQ ID NO: 5676624 - DNA, 25 bp, Homo sapien
gttgatcaagtccatcaatgaaaag

SEQ ID NO: 5676625 - DNA, 25 bp, Homo sapien
tgatcaagtccatcaatgaaaagtt

SEQ ID NO: 5676626 - DNA, 25 bp, Homo sapien
gatcaagtccatcaatgaaaagttt

SEQ ID NO: 5676627 - DNA, 25 bp, Homo sapien
agcaaacttttcattgatggacttg

SEQ ID NO: 5676628 - DNA, 25 bp, Homo sapien
ccagcaaacttttcattgatggact

SEQ ID NO: 5676629 - DNA, 25 bp, Homo sapien
caaacttttcattgatggacttgat

SEQ ID NO: 5676630 - DNA, 25 bp, Homo sapien
gcaaacttttcattgatggacttga

SEQ ID NO: 5676631 - DNA, 25 bp, Homo sapien
cttttcattgatggacttgatcaac

SEQ ID NO: 5676632 - DNA, 25 bp, Homo sapien
aacttttcattgatggacttgatca

SEQ ID NO: 5676633 - DNA, 25 bp, Homo sapien
tagacccaggtcctaggagaaaaga

SEQ ID NO: 5676634 - DNA, 25 bp, Homo sapien
agacccaggtcctaggagaaaagag

SEQ ID NO: 5676635 - DNA, 25 bp, Homo sapien
gagttctcttttctcctaggacctg

SEQ ID NO: 5676636 - DNA, 25 bp, Homo sapien
ctcttttctcctaggacctgggtct

SEQ ID NO: 5676637 - DNA, 25 bp, Homo sapien
gctgagttctcttttctcctaggac

SEQ ID NO: 5676638 - DNA, 25 bp, Homo sapien
agttctcttttctcctaggacctgg

SEQ ID NO: 5676639 - DNA, 25 bp, Homo sapien
ctcctaggacctgggtctaccaagg

SEQ ID NO: 5676640 - DNA, 25 bp, Homo sapien
tcttttctcctaggacctgggtcta

SEQ ID NO: 5676641 - DNA, 25 bp, Homo sapien
gtcctaggagaaaagagaactcagc

SEQ ID NO: 5676642 - DNA, 25 bp, Homo sapien
tagacccaggtcctaggagaaaaga

SEQ ID NO: 5676643 - DNA, 25 bp, Homo sapien
ccttggtagacccaggtcctaggag

SEQ ID NO: 5676644 - DNA, 25 bp, Homo sapien
ccaggtcctaggagaaaagagaact

SEQ ID NO: 5676645 - DNA, 25 bp, Homo sapien
caggtcctaggagaaaagagaactc

SEQ ID NO: 5676646 - DNA, 25 bp, Homo sapien
agacccaggtcctaggagaaaagag

SEQ ID NO: 5676647 - DNA, 25 bp, Homo sapien
atacgttcctgggttccagagaact

SEQ ID NO: 5676648 - DNA, 25 bp, Homo sapien
gagaactggtctctttactccaacc

SEQ ID NO: 5676649 - DNA, 25 bp, Homo sapien
cagagaactggtctctttactccaa

SEQ ID NO: 5676650 - DNA, 25 bp, Homo sapien
taatacgttcctgggttccagagaa

SEQ ID NO: 5676651 - DNA, 25 bp, Homo sapien
agagaactggtctctttactccaac

SEQ ID NO: 5676652 - DNA, 25 bp, Homo sapien
ttaatacgttcctgggttccagaga

SEQ ID NO: 5676653 - DNA, 25 bp, Homo sapien
ggttggagtaaagagaccagttctc

SEQ ID NO: 5676654 - DNA, 25 bp, Homo sapien
gttggagtaaagagaccagttctct

SEQ ID NO: 5676655 - DNA, 25 bp, Homo sapien
agttctctggaacccaggaacgtat

SEQ ID NO: 5676656 - DNA, 25 bp, Homo sapien
tctctggaacccaggaacgtattaa

SEQ ID NO: 5676657 - DNA, 25 bp, Homo sapien
ttggagtaaagagaccagttctctg

SEQ ID NO: 5676658 - DNA, 25 bp, Homo sapien
ttctctggaacccaggaacgtatta

SEQ ID NO: 5676659 - DNA, 25 bp, Homo sapien
acgctgaattttgacagaatgaaac

SEQ ID NO: 5676660 - DNA, 25 bp, Homo sapien
tacgctgaattttgacagaatgaaa

SEQ ID NO: 5676661 - DNA, 25 bp, Homo sapien
cgctgaattttgacagaatgaaacc

SEQ ID NO: 5676662 - DNA, 25 bp, Homo sapien
ttacgctgaattttgacagaatgaa

SEQ ID NO: 5676663 - DNA, 25 bp, Homo sapien
tttacgctgaattttgacagaatga

SEQ ID NO: 5676664 - DNA, 25 bp, Homo sapien
ttttacgctgaattttgacagaatg

SEQ ID NO: 5676665 - DNA, 25 bp, Homo sapien
gtttcattctgtcaaaattcagcgt

SEQ ID NO: 5676666 - DNA, 25 bp, Homo sapien
tttcattctgtcaaaattcagcgta

SEQ ID NO: 5676667 - DNA, 25 bp, Homo sapien
ggtttcattctgtcaaaattcagcg

SEQ ID NO: 5676668 - DNA, 25 bp, Homo sapien
cattctgtcaaaattcagcgtaaaa

SEQ ID NO: 5676669 - DNA, 25 bp, Homo sapien
ttcattctgtcaaaattcagcgtaa

SEQ ID NO: 5676670 - DNA, 25 bp, Homo sapien
tcattctgtcaaaattcagcgtaaa

SEQ ID NO: 5676671 - DNA, 25 bp, Homo sapien
tcccttttacgctgaattttgacag

SEQ ID NO: 5676672 - DNA, 25 bp, Homo sapien
cgctgaattttgacagaatgaaacc

SEQ ID NO: 5676673 - DNA, 25 bp, Homo sapien
ctctccttcccttttacgctgaatt

SEQ ID NO: 5676674 - DNA, 25 bp, Homo sapien
tttgacagaatgaaaccatcccttg

SEQ ID NO: 5676675 - DNA, 25 bp, Homo sapien
ttttacgctgaattttgacagaatg

SEQ ID NO: 5676676 - DNA, 25 bp, Homo sapien
gaatgaaaccatcccttgttccttc

SEQ ID NO: 5676677 - DNA, 25 bp, Homo sapien
aattcagcgtaaaagggaaggagag

SEQ ID NO: 5676678 - DNA, 25 bp, Homo sapien
ggtttcattctgtcaaaattcagcg

SEQ ID NO: 5676679 - DNA, 25 bp, Homo sapien
gaaggaacaagggatggtttcattc

SEQ ID NO: 5676680 - DNA, 25 bp, Homo sapien
cattctgtcaaaattcagcgtaaaa

SEQ ID NO: 5676681 - DNA, 25 bp, Homo sapien
tctgtcaaaattcagcgtaaaaggg

SEQ ID NO: 5676682 - DNA, 25 bp, Homo sapien
caagggatggtttcattctgtcaaa

SEQ ID NO: 5676683 - DNA, 25 bp, Homo sapien
ctgggaaaacctcgccactgctatg

SEQ ID NO: 5676684 - DNA, 25 bp, Homo sapien
gaatagtgcatataaggttagaggg

SEQ ID NO: 5676685 - DNA, 25 bp, Homo sapien
ttagagggtgtggtctggctgagat

SEQ ID NO: 5676686 - DNA, 25 bp, Homo sapien
tgttccccactaagttctttgccca

SEQ ID NO: 5676687 - DNA, 25 bp, Homo sapien
actctgggaaaacctcgccactgct

SEQ ID NO: 5676688 - DNA, 25 bp, Homo sapien
gagatgttccccactaagttctttg

SEQ ID NO: 5676689 - DNA, 25 bp, Homo sapien
caccctctaaccttatatgcactat

SEQ ID NO: 5676690 - DNA, 25 bp, Homo sapien
atctcagccagaccacaccctctaa

SEQ ID NO: 5676691 - DNA, 25 bp, Homo sapien
cctctaaccttatatgcactattcc

SEQ ID NO: 5676692 - DNA, 25 bp, Homo sapien
caaagaacttagtggggaacatctc

SEQ ID NO: 5676693 - DNA, 25 bp, Homo sapien
tagcagtggcgaggttttcccagag

SEQ ID NO: 5676694 - DNA, 25 bp, Homo sapien
catagcagtggcgaggttttcccag

SEQ ID NO: 5676695 - DNA, 25 bp, Homo sapien
agatgggcagcttggtgatagacta

SEQ ID NO: 5676696 - DNA, 25 bp, Homo sapien
tcaggtgagcttagatgggcagctt

SEQ ID NO: 5676697 - DNA, 25 bp, Homo sapien
agcttagatgggcagcttggtgata

SEQ ID NO: 5676698 - DNA, 25 bp, Homo sapien
cttagatgggcagcttggtgataga

SEQ ID NO: 5676699 - DNA, 25 bp, Homo sapien
cctcaggtgagcttagatgggcagc

SEQ ID NO: 5676700 - DNA, 25 bp, Homo sapien
tagatgggcagcttggtgatagact

SEQ ID NO: 5676701 - DNA, 25 bp, Homo sapien
gtctatcaccaagctgcccatctaa

SEQ ID NO: 5676702 - DNA, 25 bp, Homo sapien
aagctgcccatctaagctcacctga

SEQ ID NO: 5676703 - DNA, 25 bp, Homo sapien
tatcaccaagctgcccatctaagct

SEQ ID NO: 5676704 - DNA, 25 bp, Homo sapien
gctgcccatctaagctcacctgagg

SEQ ID NO: 5676705 - DNA, 25 bp, Homo sapien
tctatcaccaagctgcccatctaag

SEQ ID NO: 5676706 - DNA, 25 bp, Homo sapien
tagtctatcaccaagctgcccatct

SEQ ID NO: 5676707 - DNA, 25 bp, Homo sapien
ttttcagcgtctatctacggaagct

SEQ ID NO: 5676708 - DNA, 25 bp, Homo sapien
aattttgactttttcagcgtctatc

SEQ ID NO: 5676709 - DNA, 25 bp, Homo sapien
cagcgtctatctacggaagctggta

SEQ ID NO: 5676710 - DNA, 25 bp, Homo sapien
gactttttcagcgtctatctacgga

SEQ ID NO: 5676711 - DNA, 25 bp, Homo sapien
aaaacttcctctattcccagcattt

SEQ ID NO: 5676712 - DNA, 25 bp, Homo sapien
gtctatctacggaagctggtaggat

SEQ ID NO: 5676713 - DNA, 25 bp, Homo sapien
tccgtagatagacgctgaaaaagtc

SEQ ID NO: 5676714 - DNA, 25 bp, Homo sapien
aaaatgctgggaatagaggaagttt

SEQ ID NO: 5676715 - DNA, 25 bp, Homo sapien
gatagacgctgaaaaagtcaaaatt

SEQ ID NO: 5676716 - DNA, 25 bp, Homo sapien
tcctaccagcttccgtagatagacg

SEQ ID NO: 5676717 - DNA, 25 bp, Homo sapien
taccagcttccgtagatagacgctg

SEQ ID NO: 5676718 - DNA, 25 bp, Homo sapien
gcttccgtagatagacgctgaaaaa

SEQ ID NO: 5676719 - DNA, 25 bp, Homo sapien
ctgaagttgctatagagttttaagg

SEQ ID NO: 5676720 - DNA, 25 bp, Homo sapien
ttttaaggttggagcactggcagcc

SEQ ID NO: 5676721 - DNA, 25 bp, Homo sapien
ttaaggttggagcactggcagccag

SEQ ID NO: 5676722 - DNA, 25 bp, Homo sapien
aaggttggagcactggcagccagct

SEQ ID NO: 5676723 - DNA, 25 bp, Homo sapien
gagttttaaggttggagcactggca

SEQ ID NO: 5676724 - DNA, 25 bp, Homo sapien
gttttaaggttggagcactggcagc

SEQ ID NO: 5676725 - DNA, 25 bp, Homo sapien
gctgccagtgctccaaccttaaaac

SEQ ID NO: 5676726 - DNA, 25 bp, Homo sapien
ggctgccagtgctccaaccttaaaa

SEQ ID NO: 5676727 - DNA, 25 bp, Homo sapien
agctggctgccagtgctccaacctt

SEQ ID NO: 5676728 - DNA, 25 bp, Homo sapien
gccagtgctccaaccttaaaactct

SEQ ID NO: 5676729 - DNA, 25 bp, Homo sapien
ctggctgccagtgctccaaccttaa

SEQ ID NO: 5676730 - DNA, 25 bp, Homo sapien
ccttaaaactctatagcaacttcag

SEQ ID NO: 5676731 - DNA, 25 bp, Homo sapien
gccaggcctttgctttcactcagct

SEQ ID NO: 5676732 - DNA, 25 bp, Homo sapien
ccaggcctttgctttcactcagctc

SEQ ID NO: 5676733 - DNA, 25 bp, Homo sapien
ctgccaggcctttgctttcactcag

SEQ ID NO: 5676734 - DNA, 25 bp, Homo sapien
gagctgagtgaaagcaaaggcctgg

SEQ ID NO: 5676735 - DNA, 25 bp, Homo sapien
agctgagtgaaagcaaaggcctggc

SEQ ID NO: 5676736 - DNA, 25 bp, Homo sapien
ctgagtgaaagcaaaggcctggcag

SEQ ID NO: 5676737 - DNA, 25 bp, Homo sapien
gattatttgaatgcatgctgccagg

SEQ ID NO: 5676738 - DNA, 25 bp, Homo sapien
gaagacagggttttggattatttga

SEQ ID NO: 5676739 - DNA, 25 bp, Homo sapien
gctcaagattagaagacagggtttt

SEQ ID NO: 5676740 - DNA, 25 bp, Homo sapien
gccaggcctttgctttcactcagct

SEQ ID NO: 5676741 - DNA, 25 bp, Homo sapien
tgaatgcatgctgccaggcctttgc

SEQ ID NO: 5676742 - DNA, 25 bp, Homo sapien
tgattttattctggttagggaaaga

SEQ ID NO: 5676743 - DNA, 25 bp, Homo sapien
aaaaccctgtcttctaatcttgagc

SEQ ID NO: 5676744 - DNA, 25 bp, Homo sapien
taaaatcaaagagctgagtgaaagc

SEQ ID NO: 5676745 - DNA, 25 bp, Homo sapien
tgcattcaaataatccaaaaccctg

SEQ ID NO: 5676746 - DNA, 25 bp, Homo sapien
agctgagtgaaagcaaaggcctggc

SEQ ID NO: 5676747 - DNA, 25 bp, Homo sapien
tctttccctaaccagaataaaatca

SEQ ID NO: 5676748 - DNA, 25 bp, Homo sapien
aaaggcctggcagcatgcattcaaa

SEQ ID NO: 5676749 - DNA, 25 bp, Homo sapien
agagggtaggcagtcactatttggt

SEQ ID NO: 5676750 - DNA, 25 bp, Homo sapien
ccttaagagagggtaggcagtcact

SEQ ID NO: 5676751 - DNA, 25 bp, Homo sapien
tgagtgttacgcatgggaactgcat

SEQ ID NO: 5676752 - DNA, 25 bp, Homo sapien
tggtggtcttttgcagattaggcac

SEQ ID NO: 5676753 - DNA, 25 bp, Homo sapien
tcttttgcagattaggcactcaatc

SEQ ID NO: 5676754 - DNA, 25 bp, Homo sapien
tgggaactgcatggagaccttaaga

SEQ ID NO: 5676755 - DNA, 25 bp, Homo sapien
tcttaaggtctccatgcagttccca

SEQ ID NO: 5676756 - DNA, 25 bp, Homo sapien
tgcagttcccatgcgtaacactcac

SEQ ID NO: 5676757 - DNA, 25 bp, Homo sapien
accaaatagtgactgcctaccctct

SEQ ID NO: 5676758 - DNA, 25 bp, Homo sapien
agtgactgcctaccctctcttaagg

SEQ ID NO: 5676759 - DNA, 25 bp, Homo sapien
gattgagtgcctaatctgcaaaaga

SEQ ID NO: 5676760 - DNA, 25 bp, Homo sapien
tgcctaatctgcaaaagaccaccac

SEQ ID NO: 5676761 - DNA, 25 bp, Homo sapien
cacttttatactatcacatcatcta

SEQ ID NO: 5676762 - DNA, 25 bp, Homo sapien
actatcacatcatctaaacttgaat

SEQ ID NO: 5676763 - DNA, 25 bp, Homo sapien
tatactatcacatcatctaaacttg

SEQ ID NO: 5676764 - DNA, 25 bp, Homo sapien
catcacttttatactatcacatcat

SEQ ID NO: 5676765 - DNA, 25 bp, Homo sapien
tactatcacatcatctaaacttgaa

SEQ ID NO: 5676766 - DNA, 25 bp, Homo sapien
tcacttttatactatcacatcatct

SEQ ID NO: 5676767 - DNA, 25 bp, Homo sapien
gatgatgtgatagtataaaagtgat

SEQ ID NO: 5676768 - DNA, 25 bp, Homo sapien
attcaagtttagatgatgtgatagt

SEQ ID NO: 5676769 - DNA, 25 bp, Homo sapien
tcaagtttagatgatgtgatagtat

SEQ ID NO: 5676770 - DNA, 25 bp, Homo sapien
ttcaagtttagatgatgtgatagta

SEQ ID NO: 5676771 - DNA, 25 bp, Homo sapien
caagtttagatgatgtgatagtata

SEQ ID NO: 5676772 - DNA, 25 bp, Homo sapien
tagatgatgtgatagtataaaagtg

SEQ ID NO: 5676773 - DNA, 25 bp, Homo sapien
cttccccttcccttgccgagacagg

SEQ ID NO: 5676774 - DNA, 25 bp, Homo sapien
tatactatcacatcatctaaacttg

SEQ ID NO: 5676775 - DNA, 25 bp, Homo sapien
tctaaacttgaatatgtccctcccc

SEQ ID NO: 5676776 - DNA, 25 bp, Homo sapien
caggacatcacttttatactatcac

SEQ ID NO: 5676777 - DNA, 25 bp, Homo sapien
tactatcacatcatctaaacttgaa

SEQ ID NO: 5676778 - DNA, 25 bp, Homo sapien
aaaaagagcttttcaggacatcact

SEQ ID NO: 5676779 - DNA, 25 bp, Homo sapien
agtgatgtcctgaaaagctcttttt

SEQ ID NO: 5676780 - DNA, 25 bp, Homo sapien
gggagggacatattcaagtttagat

SEQ ID NO: 5676781 - DNA, 25 bp, Homo sapien
taaaagtgatgtcctgaaaagctct

SEQ ID NO: 5676782 - DNA, 25 bp, Homo sapien
tgtgatagtataaaagtgatgtcct

SEQ ID NO: 5676783 - DNA, 25 bp, Homo sapien
gtataaaagtgatgtcctgaaaagc

SEQ ID NO: 5676784 - DNA, 25 bp, Homo sapien
caagtttagatgatgtgatagtata

SEQ ID NO: 5676785 - DNA, 25 bp, Homo sapien
accttatctgccagcccgtgggaag

SEQ ID NO: 5676786 - DNA, 25 bp, Homo sapien
gccataacatcaccttatctgccag

SEQ ID NO: 5676787 - DNA, 25 bp, Homo sapien
atcaccttatctgccagcccgtggg

SEQ ID NO: 5676788 - DNA, 25 bp, Homo sapien
gtgtattggtatagttgagagatca

SEQ ID NO: 5676789 - DNA, 25 bp, Homo sapien
ccttatctgccagcccgtgggaagg

SEQ ID NO: 5676790 - DNA, 25 bp, Homo sapien
gaagggaagcctgttgattgtgtat

SEQ ID NO: 5676791 - DNA, 25 bp, Homo sapien
ccttcccacgggctggcagataagg

SEQ ID NO: 5676792 - DNA, 25 bp, Homo sapien
cccacgggctggcagataaggtgat

SEQ ID NO: 5676793 - DNA, 25 bp, Homo sapien
atacacaatcaacaggcttcccttc

SEQ ID NO: 5676794 - DNA, 25 bp, Homo sapien
ttcccacgggctggcagataaggtg

SEQ ID NO: 5676795 - DNA, 25 bp, Homo sapien
tgatctctcaactataccaatacac

SEQ ID NO: 5676796 - DNA, 25 bp, Homo sapien
ctggcagataaggtgatgttatggc

SEQ ID NO: 5676797 - DNA, 25 bp, Homo sapien
aggattgtgtagggagtggtttctt

SEQ ID NO: 5676798 - DNA, 25 bp, Homo sapien
taggattgtgtagggagtggtttct

SEQ ID NO: 5676799 - DNA, 25 bp, Homo sapien
gtaggattgtgtagggagtggtttc

SEQ ID NO: 5676800 - DNA, 25 bp, Homo sapien
gaaaccactccctacacaatcctac

SEQ ID NO: 5676801 - DNA, 25 bp, Homo sapien
aagaaaccactccctacacaatcct

SEQ ID NO: 5676802 - DNA, 25 bp, Homo sapien
agaaaccactccctacacaatccta

SEQ ID NO: 5676803 - DNA, 25 bp, Homo sapien
aatagaccattttaaccatcttaag

SEQ ID NO: 5676804 - DNA, 25 bp, Homo sapien
tgtgtagggagtggtttcttttcca

SEQ ID NO: 5676805 - DNA, 25 bp, Homo sapien
taggattgtgtagggagtggtttct

SEQ ID NO: 5676806 - DNA, 25 bp, Homo sapien
tagaccattttaaccatcttaagtg

SEQ ID NO: 5676807 - DNA, 25 bp, Homo sapien
gtaggattgtgtagggagtggtttc

SEQ ID NO: 5676808 - DNA, 25 bp, Homo sapien
gaccattttaaccatcttaagtgtg

SEQ ID NO: 5676809 - DNA, 25 bp, Homo sapien
cacacttaagatggttaaaatggtc

SEQ ID NO: 5676810 - DNA, 25 bp, Homo sapien
cttaagatggttaaaatggtctatt

SEQ ID NO: 5676811 - DNA, 25 bp, Homo sapien
gaaaccactccctacacaatcctac

SEQ ID NO: 5676812 - DNA, 25 bp, Homo sapien
tggaaaagaaaccactccctacaca

SEQ ID NO: 5676813 - DNA, 25 bp, Homo sapien
agaaaccactccctacacaatccta

SEQ ID NO: 5676814 - DNA, 25 bp, Homo sapien
cacttaagatggttaaaatggtcta

SEQ ID NO: 5676815 - DNA, 25 bp, Homo sapien
catacaatatttggccttcagtgac

SEQ ID NO: 5676816 - DNA, 25 bp, Homo sapien
acaatatttggccttcagtgactgg

SEQ ID NO: 5676817 - DNA, 25 bp, Homo sapien
tataggtatttaataagtggaatca

SEQ ID NO: 5676818 - DNA, 25 bp, Homo sapien
aatatttggccttcagtgactggct

SEQ ID NO: 5676819 - DNA, 25 bp, Homo sapien
ggatttgcttattataggtatttaa

SEQ ID NO: 5676820 - DNA, 25 bp, Homo sapien
actttctgtgtatggatttgcttat

SEQ ID NO: 5676821 - DNA, 25 bp, Homo sapien
agccagtcactgaaggccaaatatt

SEQ ID NO: 5676822 - DNA, 25 bp, Homo sapien
gattccacttattaaatacctataa

SEQ ID NO: 5676823 - DNA, 25 bp, Homo sapien
cactgaaggccaaatattgtatgat

SEQ ID NO: 5676824 - DNA, 25 bp, Homo sapien
ccagtcactgaaggccaaatattgt

SEQ ID NO: 5676825 - DNA, 25 bp, Homo sapien
taaatacctataataagcaaatcca

SEQ ID NO: 5676826 - DNA, 25 bp, Homo sapien
ataagcaaatccatacacagaaagt

SEQ ID NO: 5676827 - DNA, 25 bp, Homo sapien
taccttttggcttgtgtgagtagtg

SEQ ID NO: 5676828 - DNA, 25 bp, Homo sapien
ctaccttttggcttgtgtgagtagt

SEQ ID NO: 5676829 - DNA, 25 bp, Homo sapien
ttctaccttttggcttgtgtgagta

SEQ ID NO: 5676830 - DNA, 25 bp, Homo sapien
tctaccttttggcttgtgtgagtag

SEQ ID NO: 5676831 - DNA, 25 bp, Homo sapien
actactcacacaagccaaaaggtag

SEQ ID NO: 5676832 - DNA, 25 bp, Homo sapien
tactcacacaagccaaaaggtagaa

SEQ ID NO: 5676833 - DNA, 25 bp, Homo sapien
ctactcacacaagccaaaaggtaga

SEQ ID NO: 5676834 - DNA, 25 bp, Homo sapien
cactactcacacaagccaaaaggta

SEQ ID NO: 5676835 - DNA, 25 bp, Homo sapien
tgctatgaacattggcatatgtgta

SEQ ID NO: 5676836 - DNA, 25 bp, Homo sapien
taccttttggcttgtgtgagtagtg

SEQ ID NO: 5676837 - DNA, 25 bp, Homo sapien
gcttgtgtgagtagtgctgctatga

SEQ ID NO: 5676838 - DNA, 25 bp, Homo sapien
cattggcatatgtgtatgagtccct

SEQ ID NO: 5676839 - DNA, 25 bp, Homo sapien
tatgtgtatgagtccctgcttttaa

SEQ ID NO: 5676840 - DNA, 25 bp, Homo sapien
taattcttttgggtgtatacctagc

SEQ ID NO: 5676841 - DNA, 25 bp, Homo sapien
tcatagcagcactactcacacaagc

SEQ ID NO: 5676842 - DNA, 25 bp, Homo sapien
gcagggactcatacacatatgccaa

SEQ ID NO: 5676843 - DNA, 25 bp, Homo sapien
gaattaaaagcagggactcatacac

SEQ ID NO: 5676844 - DNA, 25 bp, Homo sapien
gctaggtatacacccaaaagaatta

SEQ ID NO: 5676845 - DNA, 25 bp, Homo sapien
cactactcacacaagccaaaaggta

SEQ ID NO: 5676846 - DNA, 25 bp, Homo sapien
tacacatatgccaatgttcatagca

SEQ ID NO: 5676847 - DNA, 25 bp, Homo sapien
ggatgggcctatgtgtactacctca

SEQ ID NO: 5676848 - DNA, 25 bp, Homo sapien
atttccattctatgaagtcttagaa

SEQ ID NO: 5676849 - DNA, 25 bp, Homo sapien
tgaagctaaaattggatgggcctat

SEQ ID NO: 5676850 - DNA, 25 bp, Homo sapien
agctaaaattggatgggcctatgtg

SEQ ID NO: 5676851 - DNA, 25 bp, Homo sapien
aattggatgggcctatgtgtactac

SEQ ID NO: 5676852 - DNA, 25 bp, Homo sapien
gggcctatgtgtactacctcatatt

SEQ ID NO: 5676853 - DNA, 25 bp, Homo sapien
ttctaagacttcatagaatggaaat

SEQ ID NO: 5676854 - DNA, 25 bp, Homo sapien
tgaggtagtacacataggcccatcc

SEQ ID NO: 5676855 - DNA, 25 bp, Homo sapien
cataggcccatccaattttagcttc

SEQ ID NO: 5676856 - DNA, 25 bp, Homo sapien
ggtagtacacataggcccatccaat

SEQ ID NO: 5676857 - DNA, 25 bp, Homo sapien
tatgaggtagtacacataggcccat

SEQ ID NO: 5676858 - DNA, 25 bp, Homo sapien
aaatatgaggtagtacacataggcc

SEQ ID NO: 5676859 - DNA, 25 bp, Homo sapien
accaacattagtcttgtctttgctt

SEQ ID NO: 5676860 - DNA, 25 bp, Homo sapien
aaccaacattagtcttgtctttgct

SEQ ID NO: 5676861 - DNA, 25 bp, Homo sapien
aaaccaacattagtcttgtctttgc

SEQ ID NO: 5676862 - DNA, 25 bp, Homo sapien
aaaaccaacattagtcttgtctttg

SEQ ID NO: 5676863 - DNA, 25 bp, Homo sapien
caaagacaagactaatgttggtttt

SEQ ID NO: 5676864 - DNA, 25 bp, Homo sapien
gcaaagacaagactaatgttggttt

SEQ ID NO: 5676865 - DNA, 25 bp, Homo sapien
agcaaagacaagactaatgttggtt

SEQ ID NO: 5676866 - DNA, 25 bp, Homo sapien
aagcaaagacaagactaatgttggt

SEQ ID NO: 5676867 - DNA, 25 bp, Homo sapien
accaacattagtcttgtctttgctt

SEQ ID NO: 5676868 - DNA, 25 bp, Homo sapien
aaccaacattagtcttgtctttgct

SEQ ID NO: 5676869 - DNA, 25 bp, Homo sapien
tgtcttaattcaaaaccaacattag

SEQ ID NO: 5676870 - DNA, 25 bp, Homo sapien
aaaccaacattagtcttgtctttgc

SEQ ID NO: 5676871 - DNA, 25 bp, Homo sapien
caacattagtcttgtctttgctttt

SEQ ID NO: 5676872 - DNA, 25 bp, Homo sapien
taattcaaaaccaacattagtcttg

SEQ ID NO: 5676873 - DNA, 25 bp, Homo sapien
aaaagcaaagacaagactaatgttg

SEQ ID NO: 5676874 - DNA, 25 bp, Homo sapien
agcaaagacaagactaatgttggtt

SEQ ID NO: 5676875 - DNA, 25 bp, Homo sapien
gcaaagacaagactaatgttggttt

SEQ ID NO: 5676876 - DNA, 25 bp, Homo sapien
ctaatgttggttttgaattaagaca

SEQ ID NO: 5676877 - DNA, 25 bp, Homo sapien
aaaaaagcaaagacaagactaatgt

SEQ ID NO: 5676878 - DNA, 25 bp, Homo sapien
aagcaaagacaagactaatgttggt

SEQ ID NO: 5676879 - DNA, 25 bp, Homo sapien
ggcctcaaatgatccccccttcttg

SEQ ID NO: 5676880 - DNA, 25 bp, Homo sapien
tggcctcaaatgatccccccttctt

SEQ ID NO: 5676881 - DNA, 25 bp, Homo sapien
tgatccccccttcttggcttcccaa

SEQ ID NO: 5676882 - DNA, 25 bp, Homo sapien
atgatccccccttcttggcttccca

SEQ ID NO: 5676883 - DNA, 25 bp, Homo sapien
tcaaatgatccccccttcttggctt

SEQ ID NO: 5676884 - DNA, 25 bp, Homo sapien
gcctcaaatgatccccccttcttgg

SEQ ID NO: 5676885 - DNA, 25 bp, Homo sapien
gaagccaagaaggggggatcatttg

SEQ ID NO: 5676886 - DNA, 25 bp, Homo sapien
aagccaagaaggggggatcatttga

SEQ ID NO: 5676887 - DNA, 25 bp, Homo sapien
caagaaggggggatcatttgaggcc

SEQ ID NO: 5676888 - DNA, 25 bp, Homo sapien
ttgggaagccaagaaggggggatca

SEQ ID NO: 5676889 - DNA, 25 bp, Homo sapien
ccaagaaggggggatcatttgaggc

SEQ ID NO: 5676890 - DNA, 25 bp, Homo sapien
aagaaggggggatcatttgaggcca

SEQ ID NO: 5676891 - DNA, 25 bp, Homo sapien
agctagctttgagaggcccaagagg

SEQ ID NO: 5676892 - DNA, 25 bp, Homo sapien
tagctagctttgagaggcccaagag

SEQ ID NO: 5676893 - DNA, 25 bp, Homo sapien
taaagtagctagctttgagaggccc

SEQ ID NO: 5676894 - DNA, 25 bp, Homo sapien
agtagctagctttgagaggcccaag

SEQ ID NO: 5676895 - DNA, 25 bp, Homo sapien
aagtagctagctttgagaggcccaa

SEQ ID NO: 5676896 - DNA, 25 bp, Homo sapien
tccggggggagattgtctcacatgc

SEQ ID NO: 5676897 - DNA, 25 bp, Homo sapien
ttgggcctctcaaagctagctactt

SEQ ID NO: 5676898 - DNA, 25 bp, Homo sapien
tcttgggcctctcaaagctagctac

SEQ ID NO: 5676899 - DNA, 25 bp, Homo sapien
gggcctctcaaagctagctacttta

SEQ ID NO: 5676900 - DNA, 25 bp, Homo sapien
tgtgagacaatctccccccggagta

SEQ ID NO: 5676901 - DNA, 25 bp, Homo sapien
cctcttgggcctctcaaagctagct

SEQ ID NO: 5676902 - DNA, 25 bp, Homo sapien
agcatgtgagacaatctccccccgg

SEQ ID NO: 5676903 - DNA, 25 bp, Homo sapien
cacagctccccaggttgtatcctga

SEQ ID NO: 5676904 - DNA, 25 bp, Homo sapien
tcatttatgcctttgaaagtgactt

SEQ ID NO: 5676905 - DNA, 25 bp, Homo sapien
ggttgtatcctgacaggtaaaggga

SEQ ID NO: 5676906 - DNA, 25 bp, Homo sapien
cacataggaagtaaactggtcattt

SEQ ID NO: 5676907 - DNA, 25 bp, Homo sapien
aactggtcatttatgcctttgaaag

SEQ ID NO: 5676908 - DNA, 25 bp, Homo sapien
ccccaggttgtatcctgacaggtaa

SEQ ID NO: 5676909 - DNA, 25 bp, Homo sapien
aagtcactttcaaaggcataaatga

SEQ ID NO: 5676910 - DNA, 25 bp, Homo sapien
cactttcaaaggcataaatgaccag

SEQ ID NO: 5676911 - DNA, 25 bp, Homo sapien
tccctttacctgtcaggatacaacc

SEQ ID NO: 5676912 - DNA, 25 bp, Homo sapien
aaatgaccagtttacttcctatgtg

SEQ ID NO: 5676913 - DNA, 25 bp, Homo sapien
ctttcaaaggcataaatgaccagtt

SEQ ID NO: 5676914 - DNA, 25 bp, Homo sapien
tttacctgtcaggatacaacctggg

SEQ ID NO: 5676915 - DNA, 25 bp, Homo sapien
tgacctcaccaggcagccggcagca

SEQ ID NO: 5676916 - DNA, 25 bp, Homo sapien
ggctgcttctcttgacctcaccagg

SEQ ID NO: 5676917 - DNA, 25 bp, Homo sapien
acatttgtttgagaccaagtcctgt

SEQ ID NO: 5676918 - DNA, 25 bp, Homo sapien
catttgtttgagaccaagtcctgta

SEQ ID NO: 5676919 - DNA, 25 bp, Homo sapien
tacatttgtttgagaccaagtcctg

SEQ ID NO: 5676920 - DNA, 25 bp, Homo sapien
tttgtttgagaccaagtcctgtatg

SEQ ID NO: 5676921 - DNA, 25 bp, Homo sapien
cctggtgaggtcaagagaagcagcc

SEQ ID NO: 5676922 - DNA, 25 bp, Homo sapien
caggacttggtctcaaacaaatgta

SEQ ID NO: 5676923 - DNA, 25 bp, Homo sapien
gcctggtgaggtcaagagaagcagc

SEQ ID NO: 5676924 - DNA, 25 bp, Homo sapien
catacaggacttggtctcaaacaaa

SEQ ID NO: 5676925 - DNA, 25 bp, Homo sapien
tacaggacttggtctcaaacaaatg

SEQ ID NO: 5676926 - DNA, 25 bp, Homo sapien
tgctgccggctgcctggtgaggtca

SEQ ID NO: 5676927 - DNA, 25 bp, Homo sapien
cagttcaacttgtgtaagcaaagat

SEQ ID NO: 5676928 - DNA, 25 bp, Homo sapien
cagtcagttcaacttgtgtaagcaa

SEQ ID NO: 5676929 - DNA, 25 bp, Homo sapien
aatccttctgttagtataatacacc

SEQ ID NO: 5676930 - DNA, 25 bp, Homo sapien
cagtcgatccgaagtttagcagcag

SEQ ID NO: 5676931 - DNA, 25 bp, Homo sapien
taccctcagtcgatccgaagtttag

SEQ ID NO: 5676932 - DNA, 25 bp, Homo sapien
ccgaagtttagcagcagtcagttca

SEQ ID NO: 5676933 - DNA, 25 bp, Homo sapien
gactgctgctaaacttcggatcgac

SEQ ID NO: 5676934 - DNA, 25 bp, Homo sapien
gctaaacttcggatcgactgagggt

SEQ ID NO: 5676935 - DNA, 25 bp, Homo sapien
aaatctttgcttacacaagttgaac

SEQ ID NO: 5676936 - DNA, 25 bp, Homo sapien
tgaactgactgctgctaaacttcgg

SEQ ID NO: 5676937 - DNA, 25 bp, Homo sapien
ttgcttacacaagttgaactgactg

SEQ ID NO: 5676938 - DNA, 25 bp, Homo sapien
ggtgtattatactaacagaaggatt

SEQ ID NO: 5676939 - DNA, 25 bp, Homo sapien
gtgggtctattaggcagaactgtat

SEQ ID NO: 5676940 - DNA, 25 bp, Homo sapien
ttcctacccagtctacttgcttctt

SEQ ID NO: 5676941 - DNA, 25 bp, Homo sapien
gatattcctacccagtctacttgct

SEQ ID NO: 5676942 - DNA, 25 bp, Homo sapien
cattgtgggtctattaggcagaact

SEQ ID NO: 5676943 - DNA, 25 bp, Homo sapien
tttgcattgtgggtctattaggcag

SEQ ID NO: 5676944 - DNA, 25 bp, Homo sapien
taaatgatattcctacccagtctac

SEQ ID NO: 5676945 - DNA, 25 bp, Homo sapien
agcaagtagactgggtaggaatatc

SEQ ID NO: 5676946 - DNA, 25 bp, Homo sapien
aagaagcaagtagactgggtaggaa

SEQ ID NO: 5676947 - DNA, 25 bp, Homo sapien
tctgcctaatagacccacaatgcaa

SEQ ID NO: 5676948 - DNA, 25 bp, Homo sapien
atacagttctgcctaatagacccac

SEQ ID NO: 5676949 - DNA, 25 bp, Homo sapien
tacagttctgcctaatagacccaca

SEQ ID NO: 5676950 - DNA, 25 bp, Homo sapien
caagtagactgggtaggaatatcat

SEQ ID NO: 5676951 - DNA, 25 bp, Homo sapien
agtagccgggattaggcacccacca

SEQ ID NO: 5676952 - DNA, 25 bp, Homo sapien
agccgggattaggcacccaccacca

SEQ ID NO: 5676953 - DNA, 25 bp, Homo sapien
gtagccgggattaggcacccaccac

SEQ ID NO: 5676954 - DNA, 25 bp, Homo sapien
gcaacctctgccccctgggttcaag

SEQ ID NO: 5676955 - DNA, 25 bp, Homo sapien
gtgattctcttgccccagcctccca

SEQ ID NO: 5676956 - DNA, 25 bp, Homo sapien
tagccgggattaggcacccaccacc

SEQ ID NO: 5676957 - DNA, 25 bp, Homo sapien
gtggtgggtgcctaatcccggctac

SEQ ID NO: 5676958 - DNA, 25 bp, Homo sapien
tgggaggctggggcaagagaatcac

SEQ ID NO: 5676959 - DNA, 25 bp, Homo sapien
tggtggtgggtgcctaatcccggct

SEQ ID NO: 5676960 - DNA, 25 bp, Homo sapien
tggtgggtgcctaatcccggctact

SEQ ID NO: 5676961 - DNA, 25 bp, Homo sapien
cttgaacccagggggcagaggttgc

SEQ ID NO: 5676962 - DNA, 25 bp, Homo sapien
ggtggtgggtgcctaatcccggcta

SEQ ID NO: 5676963 - DNA, 25 bp, Homo sapien
tcagtgaagcttcggcactgtattc

SEQ ID NO: 5676964 - DNA, 25 bp, Homo sapien
cttgagcagtaaatgggaacacaaa

SEQ ID NO: 5676965 - DNA, 25 bp, Homo sapien
agacttgagcagtaaatgggaacac

SEQ ID NO: 5676966 - DNA, 25 bp, Homo sapien
gacttgagcagtaaatgggaacaca

SEQ ID NO: 5676967 - DNA, 25 bp, Homo sapien
caaaaacaaatactcatttggctaa

SEQ ID NO: 5676968 - DNA, 25 bp, Homo sapien
acttgagcagtaaatgggaacacaa

SEQ ID NO: 5676969 - DNA, 25 bp, Homo sapien
tgagcagtaaatgggaacacaaaaa

SEQ ID NO: 5676970 - DNA, 25 bp, Homo sapien
tttgtgttcccatttactgctcaag

SEQ ID NO: 5676971 - DNA, 25 bp, Homo sapien
ttgtgttcccatttactgctcaagt

SEQ ID NO: 5676972 - DNA, 25 bp, Homo sapien
tgtgttcccatttactgctcaagtc

SEQ ID NO: 5676973 - DNA, 25 bp, Homo sapien
tttttgtgttcccatttactgctca

SEQ ID NO: 5676974 - DNA, 25 bp, Homo sapien
ttagccaaatgagtatttgtttttg

SEQ ID NO: 5676975 - DNA, 25 bp, Homo sapien
gtgttcccatttactgctcaagtct

SEQ ID NO: 5676976 - DNA, 25 bp, Homo sapien
gaatacagtgccgaagcttcactga

SEQ ID NO: 5676977 - DNA, 25 bp, Homo sapien
gcttcggcactgtattccctctttt

SEQ ID NO: 5676978 - DNA, 25 bp, Homo sapien
tcagtgaagcttcggcactgtattc

SEQ ID NO: 5676979 - DNA, 25 bp, Homo sapien
ttttctttttcagacttgagcagta

SEQ ID NO: 5676980 - DNA, 25 bp, Homo sapien
ttctcttcagtgaagcttcggcact

SEQ ID NO: 5676981 - DNA, 25 bp, Homo sapien
cagacttgagcagtaaatgggaaca

SEQ ID NO: 5676982 - DNA, 25 bp, Homo sapien
tgaagcttcggcactgtattccctc

SEQ ID NO: 5676983 - DNA, 25 bp, Homo sapien
tactgctcaagtctgaaaaagaaaa

SEQ ID NO: 5676984 - DNA, 25 bp, Homo sapien
agtgccgaagcttcactgaagagaa

SEQ ID NO: 5676985 - DNA, 25 bp, Homo sapien
gagggaatacagtgccgaagcttca

SEQ ID NO: 5676986 - DNA, 25 bp, Homo sapien
gaatacagtgccgaagcttcactga

SEQ ID NO: 5676987 - DNA, 25 bp, Homo sapien
aaaaagagggaatacagtgccgaag

SEQ ID NO: 5676988 - DNA, 25 bp, Homo sapien
tgttcccatttactgctcaagtctg

SEQ ID NO: 5676989 - DNA, 25 bp, Homo sapien
tattaataactgtgagtgccgtttc

SEQ ID NO: 5676990 - DNA, 25 bp, Homo sapien
gtgccgtttctgtaagactgctgct

SEQ ID NO: 5676991 - DNA, 25 bp, Homo sapien
cctctacccctgagtcctgactgtg

SEQ ID NO: 5676992 - DNA, 25 bp, Homo sapien
ttaataactgtgagtgccgtttctg

SEQ ID NO: 5676993 - DNA, 25 bp, Homo sapien
aataactgtgagtgccgtttctgta

SEQ ID NO: 5676994 - DNA, 25 bp, Homo sapien
taataactgtgagtgccgtttctgt

SEQ ID NO: 5676995 - DNA, 25 bp, Homo sapien
agcagcagtcttacagaaacggcac

SEQ ID NO: 5676996 - DNA, 25 bp, Homo sapien
gaaacggcactcacagttattaata

SEQ ID NO: 5676997 - DNA, 25 bp, Homo sapien
tacagaaacggcactcacagttatt

SEQ ID NO: 5676998 - DNA, 25 bp, Homo sapien
cagaaacggcactcacagttattaa

SEQ ID NO: 5676999 - DNA, 25 bp, Homo sapien
acagaaacggcactcacagttatta

SEQ ID NO: 5677000 - DNA, 25 bp, Homo sapien
cacagtcaggactcaggggtagagg

SEQ ID NO: 5677001 - DNA, 25 bp, Homo sapien
gctctggatggtttgctcgttaaac

SEQ ID NO: 5677002 - DNA, 25 bp, Homo sapien
gccctcacattcttgtcgatagttg

SEQ ID NO: 5677003 - DNA, 25 bp, Homo sapien
gtgaccagactgtttacttgacaaa

SEQ ID NO: 5677004 - DNA, 25 bp, Homo sapien
ggaatgtgaccagactgtttacttg

SEQ ID NO: 5677005 - DNA, 25 bp, Homo sapien
gctcgttaaacttcacttcatggaa

SEQ ID NO: 5677006 - DNA, 25 bp, Homo sapien
ggatggtttgctcgttaaacttcac

SEQ ID NO: 5677007 - DNA, 25 bp, Homo sapien
tccatgaagtgaagtttaacgagca

SEQ ID NO: 5677008 - DNA, 25 bp, Homo sapien
caagtaaacagtctggtcacattcc

SEQ ID NO: 5677009 - DNA, 25 bp, Homo sapien
gaagtttaacgagcaaaccatccag

SEQ ID NO: 5677010 - DNA, 25 bp, Homo sapien
caactatcgacaagaatgtgagggc

SEQ ID NO: 5677011 - DNA, 25 bp, Homo sapien
tttgtcaagtaaacagtctggtcac

SEQ ID NO: 5677012 - DNA, 25 bp, Homo sapien
gtttaacgagcaaaccatccagagc

SEQ ID NO: 5677013 - DNA, 25 bp, Homo sapien
taaaggctccattttcctataggaa

SEQ ID NO: 5677014 - DNA, 25 bp, Homo sapien
ttcctataggaaagtatgaattagc

SEQ ID NO: 5677015 - DNA, 25 bp, Homo sapien
aaggctccattttcctataggaaag

SEQ ID NO: 5677016 - DNA, 25 bp, Homo sapien
cataaaataaatctttgctttgcta

SEQ ID NO: 5677017 - DNA, 25 bp, Homo sapien
ctattgtagaaccaaaagggaggtg

SEQ ID NO: 5677018 - DNA, 25 bp, Homo sapien
tgctttgctattgtagaaccaaaag

SEQ ID NO: 5677019 - DNA, 25 bp, Homo sapien
gctaattcatactttcctataggaa

SEQ ID NO: 5677020 - DNA, 25 bp, Homo sapien
tactttcctataggaaaatggagcc

SEQ ID NO: 5677021 - DNA, 25 bp, Homo sapien
cacctcccttttggttctacaatag

SEQ ID NO: 5677022 - DNA, 25 bp, Homo sapien
gcaaagatttattttatgtagtcag

SEQ ID NO: 5677023 - DNA, 25 bp, Homo sapien
ttggttctacaatagcaaagcaaag

SEQ ID NO: 5677024 - DNA, 25 bp, Homo sapien
tcctataggaaaatggagcctttaa

SEQ ID NO: 5677025 - DNA, 25 bp, Homo sapien
agatcccttaacacttaatggatgg

SEQ ID NO: 5677026 - DNA, 25 bp, Homo sapien
taacacttaatggatggtctctcag

SEQ ID NO: 5677027 - DNA, 25 bp, Homo sapien
cacttaatggatggtctctcagggt

SEQ ID NO: 5677028 - DNA, 25 bp, Homo sapien
tcccttaacacttaatggatggtct

SEQ ID NO: 5677029 - DNA, 25 bp, Homo sapien
ccttaacacttaatggatggtctct

SEQ ID NO: 5677030 - DNA, 25 bp, Homo sapien
aacacttaatggatggtctctcagg

SEQ ID NO: 5677031 - DNA, 25 bp, Homo sapien
aggaggatgggcattactgatgatc

SEQ ID NO: 5677032 - DNA, 25 bp, Homo sapien
gtctctcagggtagaggttggaatt

SEQ ID NO: 5677033 - DNA, 25 bp, Homo sapien
gaggatgggcattactgatgatctc

SEQ ID NO: 5677034 - DNA, 25 bp, Homo sapien
attttatgagtttgtgaggaggatg

SEQ ID NO: 5677035 - DNA, 25 bp, Homo sapien
tctcagggtagaggttggaatttta

SEQ ID NO: 5677036 - DNA, 25 bp, Homo sapien
cagggtagaggttggaattttatga

SEQ ID NO: 5677037 - DNA, 25 bp, Homo sapien
aattccaacctctaccctgagagac

SEQ ID NO: 5677038 - DNA, 25 bp, Homo sapien
catcctcctcacaaactcataaaat

SEQ ID NO: 5677039 - DNA, 25 bp, Homo sapien
tcataaaattccaacctctaccctg

SEQ ID NO: 5677040 - DNA, 25 bp, Homo sapien
gatcatcagtaatgcccatcctcct

SEQ ID NO: 5677041 - DNA, 25 bp, Homo sapien
gagatcatcagtaatgcccatcctc

SEQ ID NO: 5677042 - DNA, 25 bp, Homo sapien
taaaattccaacctctaccctgaga

SEQ ID NO: 5677043 - DNA, 25 bp, Homo sapien
cctgagagaccatccattaagtgtt

SEQ ID NO: 5677044 - DNA, 25 bp, Homo sapien
tgagagaccatccattaagtgttaa

SEQ ID NO: 5677045 - DNA, 25 bp, Homo sapien
gagagaccatccattaagtgttaag

SEQ ID NO: 5677046 - DNA, 25 bp, Homo sapien
accctgagagaccatccattaagtg

SEQ ID NO: 5677047 - DNA, 25 bp, Homo sapien
gagaccatccattaagtgttaaggg

SEQ ID NO: 5677048 - DNA, 25 bp, Homo sapien
ccatccattaagtgttaagggatct

SEQ ID NO: 5677049 - DNA, 25 bp, Homo sapien
gactgctaaatgatgataccacttg

SEQ ID NO: 5677050 - DNA, 25 bp, Homo sapien
agcactactcatgctggacccccgg

SEQ ID NO: 5677051 - DNA, 25 bp, Homo sapien
tgctaaatgatgataccacttgagg

SEQ ID NO: 5677052 - DNA, 25 bp, Homo sapien
gacccccgggtgactgctaaatgat

SEQ ID NO: 5677053 - DNA, 25 bp, Homo sapien
taaatgatgataccacttgaggtaa

SEQ ID NO: 5677054 - DNA, 25 bp, Homo sapien
atgatgataccacttgaggtaaaaa

SEQ ID NO: 5677055 - DNA, 25 bp, Homo sapien
ccgggggtccagcatgagtagtgct

SEQ ID NO: 5677056 - DNA, 25 bp, Homo sapien
tacctcaagtggtatcatcatttag

SEQ ID NO: 5677057 - DNA, 25 bp, Homo sapien
tttttacctcaagtggtatcatcat

SEQ ID NO: 5677058 - DNA, 25 bp, Homo sapien
caagtggtatcatcatttagcagtc

SEQ ID NO: 5677059 - DNA, 25 bp, Homo sapien
tcatttagcagtcacccgggggtcc

SEQ ID NO: 5677060 - DNA, 25 bp, Homo sapien
cctcaagtggtatcatcatttagca

SEQ ID NO: 5677061 - DNA, 25 bp, Homo sapien
tcaggtgtgctatttctagactaga

SEQ ID NO: 5677062 - DNA, 25 bp, Homo sapien
ttttgttaaagtggttatggccatg

SEQ ID NO: 5677063 - DNA, 25 bp, Homo sapien
tttctagactagactgttacgtgga

SEQ ID NO: 5677064 - DNA, 25 bp, Homo sapien
ttctagactagactgttacgtggaa

SEQ ID NO: 5677065 - DNA, 25 bp, Homo sapien
atttctagactagactgttacgtgg

SEQ ID NO: 5677066 - DNA, 25 bp, Homo sapien
gtcaggtgtgctatttctagactag

SEQ ID NO: 5677067 - DNA, 25 bp, Homo sapien
tccacgtaacagtctagtctagaaa

SEQ ID NO: 5677068 - DNA, 25 bp, Homo sapien
catggccataaccactttaacaaaa

SEQ ID NO: 5677069 - DNA, 25 bp, Homo sapien
tctagtctagaaatagcacacctga

SEQ ID NO: 5677070 - DNA, 25 bp, Homo sapien
ctagtctagaaatagcacacctgac

SEQ ID NO: 5677071 - DNA, 25 bp, Homo sapien
ttccacgtaacagtctagtctagaa

SEQ ID NO: 5677072 - DNA, 25 bp, Homo sapien
tagtctagaaatagcacacctgact

SEQ ID NO: 5677073 - DNA, 25 bp, Homo sapien
caaagtgtcagtttcgttctgaaac

SEQ ID NO: 5677074 - DNA, 25 bp, Homo sapien
cagtttcgttctgaaacatttcagg

SEQ ID NO: 5677075 - DNA, 25 bp, Homo sapien
gtttcgttctgaaacatttcaggag

SEQ ID NO: 5677076 - DNA, 25 bp, Homo sapien
gaggctctagatgtaaactttggac

SEQ ID NO: 5677077 - DNA, 25 bp, Homo sapien
tctagatgtaaactttggacacttg

SEQ ID NO: 5677078 - DNA, 25 bp, Homo sapien
agagggtgaggctctagatgtaaac

SEQ ID NO: 5677079 - DNA, 25 bp, Homo sapien
gtttacatctagagcctcaccctct

SEQ ID NO: 5677080 - DNA, 25 bp, Homo sapien
cctgaaatgtttcagaacgaaactg

SEQ ID NO: 5677081 - DNA, 25 bp, Homo sapien
caagtgtccaaagtttacatctaga

SEQ ID NO: 5677082 - DNA, 25 bp, Homo sapien
caaagtttacatctagagcctcacc

SEQ ID NO: 5677083 - DNA, 25 bp, Homo sapien
tgtccaaagtttacatctagagcct

SEQ ID NO: 5677084 - DNA, 25 bp, Homo sapien
tttcagaacgaaactgacactttgt

SEQ ID NO: 5677085 - DNA, 25 bp, Homo sapien
gagcgtatgtgtaaaacctcctccc

SEQ ID NO: 5677086 - DNA, 25 bp, Homo sapien
gccaccaatgagagcgtatgtgtaa

SEQ ID NO: 5677087 - DNA, 25 bp, Homo sapien
caatgagagcgtatgtgtaaaacct

SEQ ID NO: 5677088 - DNA, 25 bp, Homo sapien
tgagagcgtatgtgtaaaacctcct

SEQ ID NO: 5677089 - DNA, 25 bp, Homo sapien
ccaatgagagcgtatgtgtaaaacc

SEQ ID NO: 5677090 - DNA, 25 bp, Homo sapien
ccaccaatgagagcgtatgtgtaaa

SEQ ID NO: 5677091 - DNA, 25 bp, Homo sapien
ttacacatacgctctcattggtggc

SEQ ID NO: 5677092 - DNA, 25 bp, Homo sapien
gggaggaggttttacacatacgctc

SEQ ID NO: 5677093 - DNA, 25 bp, Homo sapien
ggaggttttacacatacgctctcat

SEQ ID NO: 5677094 - DNA, 25 bp, Homo sapien
ggttttacacatacgctctcattgg

SEQ ID NO: 5677095 - DNA, 25 bp, Homo sapien
gaggaggttttacacatacgctctc

SEQ ID NO: 5677096 - DNA, 25 bp, Homo sapien
tttacacatacgctctcattggtgg

SEQ ID NO: 5677097 - DNA, 25 bp, Homo sapien
gacagggaaattgatacggaaatct

SEQ ID NO: 5677098 - DNA, 25 bp, Homo sapien
catgaatgagtcttccagacaggga

SEQ ID NO: 5677099 - DNA, 25 bp, Homo sapien
tggattgcctctagtcatgaatgag

SEQ ID NO: 5677100 - DNA, 25 bp, Homo sapien
tacggaaatctgtggaatagcttgt

SEQ ID NO: 5677101 - DNA, 25 bp, Homo sapien
gaatgagtcttccagacagggaaat

SEQ ID NO: 5677102 - DNA, 25 bp, Homo sapien
tctgtggaatagcttgtttgtggtg

SEQ ID NO: 5677103 - DNA, 25 bp, Homo sapien
tccctgtctggaagactcattcatg

SEQ ID NO: 5677104 - DNA, 25 bp, Homo sapien
caagctattccacagatttccgtat

SEQ ID NO: 5677105 - DNA, 25 bp, Homo sapien
cattcatgactagaggcaatccaaa

SEQ ID NO: 5677106 - DNA, 25 bp, Homo sapien
caccacaaacaagctattccacaga

SEQ ID NO: 5677107 - DNA, 25 bp, Homo sapien
gatttccgtatcaatttccctgtct

SEQ ID NO: 5677108 - DNA, 25 bp, Homo sapien
actcattcatgactagaggcaatcc

SEQ ID NO: 5677109 - DNA, 25 bp, Homo sapien
tcaaggacatattgttaacgtgttt

SEQ ID NO: 5677110 - DNA, 25 bp, Homo sapien
tgcctagttcggtggtttagagaat

SEQ ID NO: 5677111 - DNA, 25 bp, Homo sapien
acctacttttactgcacacctgtaa

SEQ ID NO: 5677112 - DNA, 25 bp, Homo sapien
gaatatggagtgtttctgggctttc

SEQ ID NO: 5677113 - DNA, 25 bp, Homo sapien
ttcacctacttttactgcacacctg

SEQ ID NO: 5677114 - DNA, 25 bp, Homo sapien
cctgtaatgcctagttcggtggttt

SEQ ID NO: 5677115 - DNA, 25 bp, Homo sapien
taaaccaccgaactaggcattacag

SEQ ID NO: 5677116 - DNA, 25 bp, Homo sapien
aaacacgttaacaatatgtccttga

SEQ ID NO: 5677117 - DNA, 25 bp, Homo sapien
caggtgtgcagtaaaagtaggtgaa

SEQ ID NO: 5677118 - DNA, 25 bp, Homo sapien
gaaagcccagaaacactccatattc

SEQ ID NO: 5677119 - DNA, 25 bp, Homo sapien
ttacaggtgtgcagtaaaagtaggt

SEQ ID NO: 5677120 - DNA, 25 bp, Homo sapien
attctctaaaccaccgaactaggca

SEQ ID NO: 5677121 - DNA, 25 bp, Homo sapien
tctcccttggtttatgtgtcgtctg

SEQ ID NO: 5677122 - DNA, 25 bp, Homo sapien
gaggctccatacaaggttgctgatg

SEQ ID NO: 5677123 - DNA, 25 bp, Homo sapien
ctccatacaaggttgctgatgattg

SEQ ID NO: 5677124 - DNA, 25 bp, Homo sapien
ggtttatgtgtcgtctggaaactga

SEQ ID NO: 5677125 - DNA, 25 bp, Homo sapien
ggcagaggctccatacaaggttgct

SEQ ID NO: 5677126 - DNA, 25 bp, Homo sapien
cccttggtttatgtgtcgtctggaa

SEQ ID NO: 5677127 - DNA, 25 bp, Homo sapien
catcagcaaccttgtatggagcctc

SEQ ID NO: 5677128 - DNA, 25 bp, Homo sapien
ttccagacgacacataaaccaaggg

SEQ ID NO: 5677129 - DNA, 25 bp, Homo sapien
gcaaccttgtatggagcctctgcct

SEQ ID NO: 5677130 - DNA, 25 bp, Homo sapien
caatcatcagcaaccttgtatggag

SEQ ID NO: 5677131 - DNA, 25 bp, Homo sapien
tcagtttccagacgacacataaacc

SEQ ID NO: 5677132 - DNA, 25 bp, Homo sapien
gacgacacataaaccaagggagaaa

SEQ ID NO: 5677133 - DNA, 25 bp, Homo sapien
ctgtatggtggcgtggaatcgaatg

SEQ ID NO: 5677134 - DNA, 25 bp, Homo sapien
tatggtggcgtggaatcgaatgaaa

SEQ ID NO: 5677135 - DNA, 25 bp, Homo sapien
gtatggtggcgtggaatcgaatgaa

SEQ ID NO: 5677136 - DNA, 25 bp, Homo sapien
tgtatggtggcgtggaatcgaatga

SEQ ID NO: 5677137 - DNA, 25 bp, Homo sapien
ttcattcgattccacgccaccatac

SEQ ID NO: 5677138 - DNA, 25 bp, Homo sapien
tcattcgattccacgccaccataca

SEQ ID NO: 5677139 - DNA, 25 bp, Homo sapien
cattcgattccacgccaccatacag

SEQ ID NO: 5677140 - DNA, 25 bp, Homo sapien
tttcattcgattccacgccaccata

SEQ ID NO: 5677141 - DNA, 25 bp, Homo sapien
tgattttgccaaacatttgagtggg

SEQ ID NO: 5677142 - DNA, 25 bp, Homo sapien
tatggtggcgtggaatcgaatgaaa

SEQ ID NO: 5677143 - DNA, 25 bp, Homo sapien
gaatcgaatgaaatcaggaaggcag

SEQ ID NO: 5677144 - DNA, 25 bp, Homo sapien
aaatcaggaaggcagtgagtgctca

SEQ ID NO: 5677145 - DNA, 25 bp, Homo sapien
cagtagctatgtttgattttgccaa

SEQ ID NO: 5677146 - DNA, 25 bp, Homo sapien
cagtgagtgctcatgttacagtagc

SEQ ID NO: 5677147 - DNA, 25 bp, Homo sapien
catagctactgtaacatgagcactc

SEQ ID NO: 5677148 - DNA, 25 bp, Homo sapien
tactgtaacatgagcactcactgcc

SEQ ID NO: 5677149 - DNA, 25 bp, Homo sapien
tcactgccttcctgatttcattcga

SEQ ID NO: 5677150 - DNA, 25 bp, Homo sapien
ttggcaaaatcaaacatagctactg

SEQ ID NO: 5677151 - DNA, 25 bp, Homo sapien
caccccactcaaatgtttggcaaaa

SEQ ID NO: 5677152 - DNA, 25 bp, Homo sapien
tttcattcgattccacgccaccata

SEQ ID NO: 5677153 - DNA, 25 bp, Homo sapien
gtggcacgcgcctgtagtccagcta

SEQ ID NO: 5677154 - DNA, 25 bp, Homo sapien
tgaggcaggagaatcacttgaacgt

SEQ ID NO: 5677155 - DNA, 25 bp, Homo sapien
tagctggactacaggcgcgtgccac

SEQ ID NO: 5677156 - DNA, 25 bp, Homo sapien
acgttcaagtgattctcctgcctca

SEQ ID NO: 5677157 - DNA, 25 bp, Homo sapien
tttgcacagttgactgttcatggcg

SEQ ID NO: 5677158 - DNA, 25 bp, Homo sapien
ggcagctcttgactgcattagatat

SEQ ID NO: 5677159 - DNA, 25 bp, Homo sapien
ttttgctcatggcagctcttgactg

SEQ ID NO: 5677160 - DNA, 25 bp, Homo sapien
cttgactgcattagatatttttcct

SEQ ID NO: 5677161 - DNA, 25 bp, Homo sapien
tgcacagttgactgttcatggcgca

SEQ ID NO: 5677162 - DNA, 25 bp, Homo sapien
tcatggcagctcttgactgcattag

SEQ ID NO: 5677163 - DNA, 25 bp, Homo sapien
aggaaaaatatctaatgcagtcaag

SEQ ID NO: 5677164 - DNA, 25 bp, Homo sapien
ccatgaacagtcaactgtgcaaaag

SEQ ID NO: 5677165 - DNA, 25 bp, Homo sapien
cagtcaagagctgccatgagcaaaa

SEQ ID NO: 5677166 - DNA, 25 bp, Homo sapien
tgcgccatgaacagtcaactgtgca

SEQ ID NO: 5677167 - DNA, 25 bp, Homo sapien
aaatatctaatgcagtcaagagctg

SEQ ID NO: 5677168 - DNA, 25 bp, Homo sapien
tctaatgcagtcaagagctgccatg

SEQ ID NO: 5677169 - DNA, 25 bp, Homo sapien
tacagtataatgtttggttagcatc

SEQ ID NO: 5677170 - DNA, 25 bp, Homo sapien
tgtgaacataattaagtcattgatt

SEQ ID NO: 5677171 - DNA, 25 bp, Homo sapien
acagtataatgtttggttagcatca

SEQ ID NO: 5677172 - DNA, 25 bp, Homo sapien
gaacataattaagtcattgattcag

SEQ ID NO: 5677173 - DNA, 25 bp, Homo sapien
cagtataatgtttggttagcatcaa

SEQ ID NO: 5677174 - DNA, 25 bp, Homo sapien
tggttatatatgtggggttccagtt

SEQ ID NO: 5677175 - DNA, 25 bp, Homo sapien
tgatgctaaccaaacattatactgt

SEQ ID NO: 5677176 - DNA, 25 bp, Homo sapien
aactggaaccccacatatataacca

SEQ ID NO: 5677177 - DNA, 25 bp, Homo sapien
ttgatgctaaccaaacattatactg

SEQ ID NO: 5677178 - DNA, 25 bp, Homo sapien
gaatcaatgacttaattatgttcac

SEQ ID NO: 5677179 - DNA, 25 bp, Homo sapien
ctgaatcaatgacttaattatgttc

SEQ ID NO: 5677180 - DNA, 25 bp, Homo sapien
gatgctaaccaaacattatactgta

SEQ ID NO: 5677181 - DNA, 25 bp, Homo sapien
ctgagggcagtctagttgggactca

SEQ ID NO: 5677182 - DNA, 25 bp, Homo sapien
ggcagtctagttgggactcaaattc

SEQ ID NO: 5677183 - DNA, 25 bp, Homo sapien
taataattactacaggcatgactgg

SEQ ID NO: 5677184 - DNA, 25 bp, Homo sapien
gagggcagtctagttgggactcaaa

SEQ ID NO: 5677185 - DNA, 25 bp, Homo sapien
tctgccgtaactgtgccaaagataa

SEQ ID NO: 5677186 - DNA, 25 bp, Homo sapien
gataataattactacaggcatgact

SEQ ID NO: 5677187 - DNA, 25 bp, Homo sapien
tgagtcccaactagactgccctcag

SEQ ID NO: 5677188 - DNA, 25 bp, Homo sapien
tttgagtcccaactagactgccctc

SEQ ID NO: 5677189 - DNA, 25 bp, Homo sapien
ccagtcatgcctgtagtaattatta

SEQ ID NO: 5677190 - DNA, 25 bp, Homo sapien
gaatttgagtcccaactagactgcc

SEQ ID NO: 5677191 - DNA, 25 bp, Homo sapien
ttatctttggcacagttacggcaga

SEQ ID NO: 5677192 - DNA, 25 bp, Homo sapien
aatttgagtcccaactagactgccc

SEQ ID NO: 5677193 - DNA, 25 bp, Homo sapien
gaagatagtgtgagtcctacttgga

SEQ ID NO: 5677194 - DNA, 25 bp, Homo sapien
agtgtgaagatagtgtgagtcctac

SEQ ID NO: 5677195 - DNA, 25 bp, Homo sapien
gatgatagattcacgtgactcaaaa

SEQ ID NO: 5677196 - DNA, 25 bp, Homo sapien
gattcacgtgactcaaaagtcaaaa

SEQ ID NO: 5677197 - DNA, 25 bp, Homo sapien
aaggcatgaaaaggtagtgtgaaga

SEQ ID NO: 5677198 - DNA, 25 bp, Homo sapien
atagtgtgagtcctacttggacttc

SEQ ID NO: 5677199 - DNA, 25 bp, Homo sapien
cttttgacttttgagtcacgtgaat

SEQ ID NO: 5677200 - DNA, 25 bp, Homo sapien
gaagtccaagtaggactcacactat

SEQ ID NO: 5677201 - DNA, 25 bp, Homo sapien
gacttttgagtcacgtgaatctatc

SEQ ID NO: 5677202 - DNA, 25 bp, Homo sapien
tatcttcacactaccttttcatgcc

SEQ ID NO: 5677203 - DNA, 25 bp, Homo sapien
gtaggactcacactatcttcacact

SEQ ID NO: 5677204 - DNA, 25 bp, Homo sapien
tttgagtcacgtgaatctatcatct

SEQ ID NO: 5677205 - DNA, 25 bp, Homo sapien
ccttgcgtattactccatggcgtgg

SEQ ID NO: 5677206 - DNA, 25 bp, Homo sapien
gcatgcctttctacccttgcgtatt

SEQ ID NO: 5677207 - DNA, 25 bp, Homo sapien
taatgtgtttagctggtcctctctt

SEQ ID NO: 5677208 - DNA, 25 bp, Homo sapien
ctccatggcgtggataatgtgttta

SEQ ID NO: 5677209 - DNA, 25 bp, Homo sapien
cttgcgtattactccatggcgtgga

SEQ ID NO: 5677210 - DNA, 25 bp, Homo sapien
gtttagctggtcctctcttgatggg

SEQ ID NO: 5677211 - DNA, 25 bp, Homo sapien
ccccatcaagagaggaccagctaaa

SEQ ID NO: 5677212 - DNA, 25 bp, Homo sapien
taaacacattatccacgccatggag

SEQ ID NO: 5677213 - DNA, 25 bp, Homo sapien
gagtaatacgcaagggtagaaaggc

SEQ ID NO: 5677214 - DNA, 25 bp, Homo sapien
tcaagagaggaccagctaaacacat

SEQ ID NO: 5677215 - DNA, 25 bp, Homo sapien
tccacgccatggagtaatacgcaag

SEQ ID NO: 5677216 - DNA, 25 bp, Homo sapien
aatacgcaagggtagaaaggcatgc

SEQ ID NO: 5677217 - DNA, 25 bp, Homo sapien
gtagtgatagttgcatatctctgaa

SEQ ID NO: 5677218 - DNA, 25 bp, Homo sapien
ttcagagatatgcaactatcactac

SEQ ID NO: 5677219 - DNA, 25 bp, Homo sapien
ccaccgaatactttgagttttatgg

SEQ ID NO: 5677220 - DNA, 25 bp, Homo sapien
aatgttctggaattaaatggtagtg

SEQ ID NO: 5677221 - DNA, 25 bp, Homo sapien
gaattaaatggtagtgatagttgca

SEQ ID NO: 5677222 - DNA, 25 bp, Homo sapien
gatagttgcatatctctgaatatac

SEQ ID NO: 5677223 - DNA, 25 bp, Homo sapien
cgaatactttgagttttatggtatg

SEQ ID NO: 5677224 - DNA, 25 bp, Homo sapien
gtagtgatagttgcatatctctgaa

SEQ ID NO: 5677225 - DNA, 25 bp, Homo sapien
cataccataaaactcaaagtattcg

SEQ ID NO: 5677226 - DNA, 25 bp, Homo sapien
cataaaactcaaagtattcggtggt

SEQ ID NO: 5677227 - DNA, 25 bp, Homo sapien
aactatcactaccatttaattccag

SEQ ID NO: 5677228 - DNA, 25 bp, Homo sapien
tattcagagatatgcaactatcact

SEQ ID NO: 5677229 - DNA, 25 bp, Homo sapien
ttcagagatatgcaactatcactac

SEQ ID NO: 5677230 - DNA, 25 bp, Homo sapien
ttagtatattcagagatatgcaact

SEQ ID NO: 5677231 - DNA, 25 bp, Homo sapien
gagtcatagataagccagaggctgg

SEQ ID NO: 5677232 - DNA, 25 bp, Homo sapien
aaatctgtctcgtgacagggaaggc

SEQ ID NO: 5677233 - DNA, 25 bp, Homo sapien
tagtgcagagtcatagataagccag

SEQ ID NO: 5677234 - DNA, 25 bp, Homo sapien
gaaggctagttgatgggctaccaca

SEQ ID NO: 5677235 - DNA, 25 bp, Homo sapien
aagtggcaaatattagtgcagagtc

SEQ ID NO: 5677236 - DNA, 25 bp, Homo sapien
gatgggctaccacataggtagaagt

SEQ ID NO: 5677237 - DNA, 25 bp, Homo sapien
gcctctggcttatctatgactctgc

SEQ ID NO: 5677238 - DNA, 25 bp, Homo sapien
tgtggtagcccatcaactagccttc

SEQ ID NO: 5677239 - DNA, 25 bp, Homo sapien
gccttccctgtcacgagacagattt

SEQ ID NO: 5677240 - DNA, 25 bp, Homo sapien
tatgactctgcactaatatttgcca

SEQ ID NO: 5677241 - DNA, 25 bp, Homo sapien
tccctgtcacgagacagattttcac

SEQ ID NO: 5677242 - DNA, 25 bp, Homo sapien
cacttctacctatgtggtagcccat

SEQ ID NO: 5677243 - DNA, 25 bp, Homo sapien
tgacctccaccaggcgggttgaggg

SEQ ID NO: 5677244 - DNA, 25 bp, Homo sapien
ccctcaacccgcctggtggaggtca

SEQ ID NO: 5677245 - DNA, 25 bp, Homo sapien
tgtgctggggtgacctccaccaggc

SEQ ID NO: 5677246 - DNA, 25 bp, Homo sapien
ctcctggagaagaaagatggatgag

SEQ ID NO: 5677247 - DNA, 25 bp, Homo sapien
ttgagggggcctggtctggagcagc

SEQ ID NO: 5677248 - DNA, 25 bp, Homo sapien
tgacctccaccaggcgggttgaggg

SEQ ID NO: 5677249 - DNA, 25 bp, Homo sapien
atgagggtgagaggcctgtgtgtgc

SEQ ID NO: 5677250 - DNA, 25 bp, Homo sapien
aaagatggatgagggtgagaggcct

SEQ ID NO: 5677251 - DNA, 25 bp, Homo sapien
ccctcaacccgcctggtggaggtca

SEQ ID NO: 5677252 - DNA, 25 bp, Homo sapien
acagcacacacaggcctctcaccct

SEQ ID NO: 5677253 - DNA, 25 bp, Homo sapien
tggtggaggtcaccccagcacagca

SEQ ID NO: 5677254 - DNA, 25 bp, Homo sapien
ctcatccatctttcttctccaggag

SEQ ID NO: 5677255 - DNA, 25 bp, Homo sapien
gcctggtggaggtcaccccagcaca

SEQ ID NO: 5677256 - DNA, 25 bp, Homo sapien
acaggcctctcaccctcatccatct

SEQ ID NO: 5677257 - DNA, 25 bp, Homo sapien
gcaacattagttagagaaggattgc

SEQ ID NO: 5677258 - DNA, 25 bp, Homo sapien
agaaggctcatctgttgaaaggcaa

SEQ ID NO: 5677259 - DNA, 25 bp, Homo sapien
gaaggctcatctgttgaaaggcaac

SEQ ID NO: 5677260 - DNA, 25 bp, Homo sapien
aaggctcatctgttgaaaggcaaca

SEQ ID NO: 5677261 - DNA, 25 bp, Homo sapien
tatcttgaagggaaatctgtggctt

SEQ ID NO: 5677262 - DNA, 25 bp, Homo sapien
ggctcatctgttgaaaggcaacatt

SEQ ID NO: 5677263 - DNA, 25 bp, Homo sapien
ttgcctttcaacagatgagccttct

SEQ ID NO: 5677264 - DNA, 25 bp, Homo sapien
aatgttgcctttcaacagatgagcc

SEQ ID NO: 5677265 - DNA, 25 bp, Homo sapien
gttgcctttcaacagatgagccttc

SEQ ID NO: 5677266 - DNA, 25 bp, Homo sapien
gcaatccttctctaactaatgttgc

SEQ ID NO: 5677267 - DNA, 25 bp, Homo sapien
aagccacagatttcccttcaagata

SEQ ID NO: 5677268 - DNA, 25 bp, Homo sapien
caatccttctctaactaatgttgcc

SEQ ID NO: 5677269 - DNA, 25 bp, Homo sapien
gctccagggagcctgttatccatgg

SEQ ID NO: 5677270 - DNA, 25 bp, Homo sapien
tccagggagcctgttatccatggct

SEQ ID NO: 5677271 - DNA, 25 bp, Homo sapien
agggagcctgttatccatggctctt

SEQ ID NO: 5677272 - DNA, 25 bp, Homo sapien
catggcgatggctcttgttgactct

SEQ ID NO: 5677273 - DNA, 25 bp, Homo sapien
ccatggcgatggctcttgttgactc

SEQ ID NO: 5677274 - DNA, 25 bp, Homo sapien
ggaccatggcgatggctcttgttga

SEQ ID NO: 5677275 - DNA, 25 bp, Homo sapien
agagtcaacaagagccatcgccatg

SEQ ID NO: 5677276 - DNA, 25 bp, Homo sapien
aagagccatggataacaggctccct

SEQ ID NO: 5677277 - DNA, 25 bp, Homo sapien
gccatggataacaggctccctggag

SEQ ID NO: 5677278 - DNA, 25 bp, Homo sapien
gagccatggataacaggctccctgg

SEQ ID NO: 5677279 - DNA, 25 bp, Homo sapien
tcaacaagagccatcgccatggtcc

SEQ ID NO: 5677280 - DNA, 25 bp, Homo sapien
ccatggataacaggctccctggagc

SEQ ID NO: 5677281 - DNA, 25 bp, Homo sapien
aatgttcatcagatgaaacgcctgg

SEQ ID NO: 5677282 - DNA, 25 bp, Homo sapien
gttcatcagatgaaacgcctgggaa

SEQ ID NO: 5677283 - DNA, 25 bp, Homo sapien
tcatcagatgaaacgcctgggaagt

SEQ ID NO: 5677284 - DNA, 25 bp, Homo sapien
tgttcatcagatgaaacgcctggga

SEQ ID NO: 5677285 - DNA, 25 bp, Homo sapien
catcagatgaaacgcctgggaagtg

SEQ ID NO: 5677286 - DNA, 25 bp, Homo sapien
ttcatcagatgaaacgcctgggaag

SEQ ID NO: 5677287 - DNA, 25 bp, Homo sapien
cttcccaggcgtttcatctgatgaa

SEQ ID NO: 5677288 - DNA, 25 bp, Homo sapien
tcccaggcgtttcatctgatgaaca

SEQ ID NO: 5677289 - DNA, 25 bp, Homo sapien
ttcccaggcgtttcatctgatgaac

SEQ ID NO: 5677290 - DNA, 25 bp, Homo sapien
cacttcccaggcgtttcatctgatg

SEQ ID NO: 5677291 - DNA, 25 bp, Homo sapien
ccaggcgtttcatctgatgaacatt

SEQ ID NO: 5677292 - DNA, 25 bp, Homo sapien
acttcccaggcgtttcatctgatga

SEQ ID NO: 5677293 - DNA, 25 bp, Homo sapien
agtagcagcgattacaggcatgtgc

SEQ ID NO: 5677294 - DNA, 25 bp, Homo sapien
aagtagcagcgattacaggcatgtg

SEQ ID NO: 5677295 - DNA, 25 bp, Homo sapien
tccaagtagcagcgattacaggcat

SEQ ID NO: 5677296 - DNA, 25 bp, Homo sapien
caagtagcagcgattacaggcatgt

SEQ ID NO: 5677297 - DNA, 25 bp, Homo sapien
ccaagtagcagcgattacaggcatg

SEQ ID NO: 5677298 - DNA, 25 bp, Homo sapien
ttccaagtagcagcgattacaggca

SEQ ID NO: 5677299 - DNA, 25 bp, Homo sapien
catgcctgtaatcgctgctacttgg

SEQ ID NO: 5677300 - DNA, 25 bp, Homo sapien
cacatgcctgtaatcgctgctactt

SEQ ID NO: 5677301 - DNA, 25 bp, Homo sapien
acatgcctgtaatcgctgctacttg

SEQ ID NO: 5677302 - DNA, 25 bp, Homo sapien
atgcctgtaatcgctgctacttgga

SEQ ID NO: 5677303 - DNA, 25 bp, Homo sapien
gcacatgcctgtaatcgctgctact

SEQ ID NO: 5677304 - DNA, 25 bp, Homo sapien
tgcctgtaatcgctgctacttggaa

SEQ ID NO: 5677305 - DNA, 25 bp, Homo sapien
tatcccaccattgtcagtgttgcat

SEQ ID NO: 5677306 - DNA, 25 bp, Homo sapien
ggaagcccctctatcccaccattgt

SEQ ID NO: 5677307 - DNA, 25 bp, Homo sapien
ctatcccaccattgtcagtgttgca

SEQ ID NO: 5677308 - DNA, 25 bp, Homo sapien
cctctatcccaccattgtcagtgtt

SEQ ID NO: 5677309 - DNA, 25 bp, Homo sapien
tgaccttagactttggtctttgttg

SEQ ID NO: 5677310 - DNA, 25 bp, Homo sapien
tctatcccaccattgtcagtgttgc

SEQ ID NO: 5677311 - DNA, 25 bp, Homo sapien
caacactgacaatggtgggatagag

SEQ ID NO: 5677312 - DNA, 25 bp, Homo sapien
atgcaacactgacaatggtgggata

SEQ ID NO: 5677313 - DNA, 25 bp, Homo sapien
aacactgacaatggtgggatagagg

SEQ ID NO: 5677314 - DNA, 25 bp, Homo sapien
gcaacactgacaatggtgggataga

SEQ ID NO: 5677315 - DNA, 25 bp, Homo sapien
tgcaacactgacaatggtgggatag

SEQ ID NO: 5677316 - DNA, 25 bp, Homo sapien
caacaaagaccaaagtctaaggtca

SEQ ID NO: 5677317 - DNA, 25 bp, Homo sapien
ccatgtctgacatctaaacagaaag

SEQ ID NO: 5677318 - DNA, 25 bp, Homo sapien
catgtctgacatctaaacagaaaga

SEQ ID NO: 5677319 - DNA, 25 bp, Homo sapien
gtctgacatctaaacagaaagactg

SEQ ID NO: 5677320 - DNA, 25 bp, Homo sapien
tgtctgacatctaaacagaaagact

SEQ ID NO: 5677321 - DNA, 25 bp, Homo sapien
ctgacatctaaacagaaagactggg

SEQ ID NO: 5677322 - DNA, 25 bp, Homo sapien
atgtctgacatctaaacagaaagac

SEQ ID NO: 5677323 - DNA, 25 bp, Homo sapien
tctttctgtttagatgtcagacatg

SEQ ID NO: 5677324 - DNA, 25 bp, Homo sapien
gtctttctgtttagatgtcagacat

SEQ ID NO: 5677325 - DNA, 25 bp, Homo sapien
cagtctttctgtttagatgtcagac

SEQ ID NO: 5677326 - DNA, 25 bp, Homo sapien
ctttctgtttagatgtcagacatgg

SEQ ID NO: 5677327 - DNA, 25 bp, Homo sapien
agtctttctgtttagatgtcagaca

SEQ ID NO: 5677328 - DNA, 25 bp, Homo sapien
ccccagtctttctgtttagatgtca

SEQ ID NO: 5677329 - DNA, 25 bp, Homo sapien
ttacaggcatgtgccaccacaccca

SEQ ID NO: 5677330 - DNA, 25 bp, Homo sapien
ttgtatttagtagagacagggtttc

SEQ ID NO: 5677331 - DNA, 25 bp, Homo sapien
caggcatgtgccaccacacccagct

SEQ ID NO: 5677332 - DNA, 25 bp, Homo sapien
catgtgccaccacacccagctaatt

SEQ ID NO: 5677333 - DNA, 25 bp, Homo sapien
aggcatgtgccaccacacccagcta

SEQ ID NO: 5677334 - DNA, 25 bp, Homo sapien
ggcatgtgccaccacacccagctaa

SEQ ID NO: 5677335 - DNA, 25 bp, Homo sapien
gaaaccctgtctctactaaatacaa

SEQ ID NO: 5677336 - DNA, 25 bp, Homo sapien
aattagctgggtgtggtggcacatg

SEQ ID NO: 5677337 - DNA, 25 bp, Homo sapien
agctgggtgtggtggcacatgcctg

SEQ ID NO: 5677338 - DNA, 25 bp, Homo sapien
ttagctgggtgtggtggcacatgcc

SEQ ID NO: 5677339 - DNA, 25 bp, Homo sapien
tagctgggtgtggtggcacatgcct

SEQ ID NO: 5677340 - DNA, 25 bp, Homo sapien
tgggtgtggtggcacatgcctgtaa

SEQ ID NO: 5677341 - DNA, 25 bp, Homo sapien
gtgtcttataattctatttcatgtt

SEQ ID NO: 5677342 - DNA, 25 bp, Homo sapien
aaagtttatgttccatagaatgtgt

SEQ ID NO: 5677343 - DNA, 25 bp, Homo sapien
tgtgtcttataattctatttcatgt

SEQ ID NO: 5677344 - DNA, 25 bp, Homo sapien
aaaagtttatgttccatagaatgtg

SEQ ID NO: 5677345 - DNA, 25 bp, Homo sapien
aagtttatgttccatagaatgtgtc

SEQ ID NO: 5677346 - DNA, 25 bp, Homo sapien
gtcttataattctatttcatgttta

SEQ ID NO: 5677347 - DNA, 25 bp, Homo sapien
cacattctatggaacataaactttt

SEQ ID NO: 5677348 - DNA, 25 bp, Homo sapien
taaacatgaaatagaattataagac

SEQ ID NO: 5677349 - DNA, 25 bp, Homo sapien
aacatgaaatagaattataagacac

SEQ ID NO: 5677350 - DNA, 25 bp, Homo sapien
aaacatgaaatagaattataagaca

SEQ ID NO: 5677351 - DNA, 25 bp, Homo sapien
acatgaaatagaattataagacaca

SEQ ID NO: 5677352 - DNA, 25 bp, Homo sapien
gacacattctatggaacataaactt

SEQ ID NO: 5677353 - DNA, 25 bp, Homo sapien
tgtgtcttataattctatttcatgt

SEQ ID NO: 5677354 - DNA, 25 bp, Homo sapien
aaaagtttatgttccatagaatgtg

SEQ ID NO: 5677355 - DNA, 25 bp, Homo sapien
aagtttatgttccatagaatgtgtc

SEQ ID NO: 5677356 - DNA, 25 bp, Homo sapien
ttatgttccatagaatgtgtcttat

SEQ ID NO: 5677357 - DNA, 25 bp, Homo sapien
agtttatgttccatagaatgtgtct

SEQ ID NO: 5677358 - DNA, 25 bp, Homo sapien
ttctatttcatgtttaatactgcct

SEQ ID NO: 5677359 - DNA, 25 bp, Homo sapien
taagacacattctatggaacataaa

SEQ ID NO: 5677360 - DNA, 25 bp, Homo sapien
ggcagtattaaacatgaaatagaat

SEQ ID NO: 5677361 - DNA, 25 bp, Homo sapien
taaacatgaaatagaattataagac

SEQ ID NO: 5677362 - DNA, 25 bp, Homo sapien
aacatgaaatagaattataagacac

SEQ ID NO: 5677363 - DNA, 25 bp, Homo sapien
acatgaaatagaattataagacaca

SEQ ID NO: 5677364 - DNA, 25 bp, Homo sapien
gacacattctatggaacataaactt

SEQ ID NO: 5677365 - DNA, 25 bp, Homo sapien
tgggatgttgaggctgtagggagct

SEQ ID NO: 5677366 - DNA, 25 bp, Homo sapien
ctgggatgttgaggctgtagggagc

SEQ ID NO: 5677367 - DNA, 25 bp, Homo sapien
ggtgtggtggcgtagtcccagctac

SEQ ID NO: 5677368 - DNA, 25 bp, Homo sapien
cctgggatgttgaggctgtagggag

SEQ ID NO: 5677369 - DNA, 25 bp, Homo sapien
gtgtggtggcgtagtcccagctact

SEQ ID NO: 5677370 - DNA, 25 bp, Homo sapien
ataaaaaaaatcagccaggtgtggt

SEQ ID NO: 5677371 - DNA, 25 bp, Homo sapien
gctccctacagcctcaacatcccag

SEQ ID NO: 5677372 - DNA, 25 bp, Homo sapien
ctccctacagcctcaacatcccagg

SEQ ID NO: 5677373 - DNA, 25 bp, Homo sapien
accacacctggctgattttttttat

SEQ ID NO: 5677374 - DNA, 25 bp, Homo sapien
agctccctacagcctcaacatccca

SEQ ID NO: 5677375 - DNA, 25 bp, Homo sapien
gtagctgggactacgccaccacacc

SEQ ID NO: 5677376 - DNA, 25 bp, Homo sapien
agtagctgggactacgccaccacac

SEQ ID NO: 5677377 - DNA, 25 bp, Homo sapien
agatccctcagaaaaagattagcca

SEQ ID NO: 5677378 - DNA, 25 bp, Homo sapien
ctcagaaaaagattagccaggcgtg

SEQ ID NO: 5677379 - DNA, 25 bp, Homo sapien
ccctcagaaaaagattagccaggcg

SEQ ID NO: 5677380 - DNA, 25 bp, Homo sapien
tccctcagaaaaagattagccaggc

SEQ ID NO: 5677381 - DNA, 25 bp, Homo sapien
atccctcagaaaaagattagccagg

SEQ ID NO: 5677382 - DNA, 25 bp, Homo sapien
gatccctcagaaaaagattagccag

SEQ ID NO: 5677383 - DNA, 25 bp, Homo sapien
cacgcctggctaatctttttctgag

SEQ ID NO: 5677384 - DNA, 25 bp, Homo sapien
ctggctaatctttttctgagggatc

SEQ ID NO: 5677385 - DNA, 25 bp, Homo sapien
cctggctaatctttttctgagggat

SEQ ID NO: 5677386 - DNA, 25 bp, Homo sapien
tggctaatctttttctgagggatct

SEQ ID NO: 5677387 - DNA, 25 bp, Homo sapien
cgcctggctaatctttttctgaggg

SEQ ID NO: 5677388 - DNA, 25 bp, Homo sapien
gcctggctaatctttttctgaggga

SEQ ID NO: 5677389 - DNA, 25 bp, Homo sapien
ttttgctggtttggaattatgcttt

SEQ ID NO: 5677390 - DNA, 25 bp, Homo sapien
ttgctggtttggaattatgcttttt

SEQ ID NO: 5677391 - DNA, 25 bp, Homo sapien
tttgctggtttggaattatgctttt

SEQ ID NO: 5677392 - DNA, 25 bp, Homo sapien
tgctggtttggaattatgcttttta

SEQ ID NO: 5677393 - DNA, 25 bp, Homo sapien
aaaagcataattccaaaccagcaaa

SEQ ID NO: 5677394 - DNA, 25 bp, Homo sapien
aaaaagcataattccaaaccagcaa

SEQ ID NO: 5677395 - DNA, 25 bp, Homo sapien
aaagcataattccaaaccagcaaaa

SEQ ID NO: 5677396 - DNA, 25 bp, Homo sapien
taaaaagcataattccaaaccagca

SEQ ID NO: 5677397 - DNA, 25 bp, Homo sapien
aacgttatttactgctttgacataa

SEQ ID NO: 5677398 - DNA, 25 bp, Homo sapien
agttcaaacgttatttactgctttg

SEQ ID NO: 5677399 - DNA, 25 bp, Homo sapien
cttttgagttcttttgctggtttgg

SEQ ID NO: 5677400 - DNA, 25 bp, Homo sapien
tggaattatgctttttaagttcaaa

SEQ ID NO: 5677401 - DNA, 25 bp, Homo sapien
tgctggtttggaattatgcttttta

SEQ ID NO: 5677402 - DNA, 25 bp, Homo sapien
tgacataattttagtttgcattgac

SEQ ID NO: 5677403 - DNA, 25 bp, Homo sapien
tttgaacttaaaaagcataattcca

SEQ ID NO: 5677404 - DNA, 25 bp, Homo sapien
gcaaactaaaattatgtcaaagcag

SEQ ID NO: 5677405 - DNA, 25 bp, Homo sapien
aaagtcaatgcaaactaaaattatg

SEQ ID NO: 5677406 - DNA, 25 bp, Homo sapien
ccaaaccagcaaaagaactcaaaag

SEQ ID NO: 5677407 - DNA, 25 bp, Homo sapien
taaaaagcataattccaaaccagca

SEQ ID NO: 5677408 - DNA, 25 bp, Homo sapien
tatgtcaaagcagtaaataacgttt

SEQ ID NO: 5677409 - DNA, 25 bp, Homo sapien
ccactccatctctatgcctcttttt

SEQ ID NO: 5677410 - DNA, 25 bp, Homo sapien
gctttttgaagatgggtgattttta

SEQ ID NO: 5677411 - DNA, 25 bp, Homo sapien
cagctttttgaagatgggtgatttt

SEQ ID NO: 5677412 - DNA, 25 bp, Homo sapien
tgcttgtctattcattgagggggtt

SEQ ID NO: 5677413 - DNA, 25 bp, Homo sapien
gaccactccatctctatgcctcttt

SEQ ID NO: 5677414 - DNA, 25 bp, Homo sapien
gtctattcattgagggggttggatc

SEQ ID NO: 5677415 - DNA, 25 bp, Homo sapien
aaaaagaggcatagagatggagtgg

SEQ ID NO: 5677416 - DNA, 25 bp, Homo sapien
aaaatcacccatcttcaaaaagctg

SEQ ID NO: 5677417 - DNA, 25 bp, Homo sapien
aaagaggcatagagatggagtggtc

SEQ ID NO: 5677418 - DNA, 25 bp, Homo sapien
aaccccctcaatgaatagacaagca

SEQ ID NO: 5677419 - DNA, 25 bp, Homo sapien
gatccaaccccctcaatgaatagac

SEQ ID NO: 5677420 - DNA, 25 bp, Homo sapien
taaaaatcacccatcttcaaaaagc

SEQ ID NO: 5677421 - DNA, 25 bp, Homo sapien
ccatctctatgcctctttttgcttg

SEQ ID NO: 5677422 - DNA, 25 bp, Homo sapien
cagctttttgaagatgggtgatttt

SEQ ID NO: 5677423 - DNA, 25 bp, Homo sapien
tttttgcttgtctattcattgaggg

SEQ ID NO: 5677424 - DNA, 25 bp, Homo sapien
gatcagaccagctttttgaagatgg

SEQ ID NO: 5677425 - DNA, 25 bp, Homo sapien
ttgggcagaccactccatctctatg

SEQ ID NO: 5677426 - DNA, 25 bp, Homo sapien
gggttggatcagaccagctttttga

SEQ ID NO: 5677427 - DNA, 25 bp, Homo sapien
gaagataccccagttgaaacatgtg

SEQ ID NO: 5677428 - DNA, 25 bp, Homo sapien
tcttggcagaagataccccagttga

SEQ ID NO: 5677429 - DNA, 25 bp, Homo sapien
aagataccccagttgaaacatgtga

SEQ ID NO: 5677430 - DNA, 25 bp, Homo sapien
tggcagaagataccccagttgaaac

SEQ ID NO: 5677431 - DNA, 25 bp, Homo sapien
taaacttggtaagttcttggcagaa

SEQ ID NO: 5677432 - DNA, 25 bp, Homo sapien
aacttggtaagttcttggcagaaga

SEQ ID NO: 5677433 - DNA, 25 bp, Homo sapien
gtttcaactggggtatcttctgcca

SEQ ID NO: 5677434 - DNA, 25 bp, Homo sapien
tcttctgccaagaacttaccaagtt

SEQ ID NO: 5677435 - DNA, 25 bp, Homo sapien
cacatgtttcaactggggtatcttc

SEQ ID NO: 5677436 - DNA, 25 bp, Homo sapien
cttctgccaagaacttaccaagttt

SEQ ID NO: 5677437 - DNA, 25 bp, Homo sapien
ttctgccaagaacttaccaagttta

SEQ ID NO: 5677438 - DNA, 25 bp, Homo sapien
tcaactggggtatcttctgccaaga

SEQ ID NO: 5677439 - DNA, 25 bp, Homo sapien
ctgcttagtctaagcagtcttgttg

SEQ ID NO: 5677440 - DNA, 25 bp, Homo sapien
tgcttagtctaagcagtcttgttgg

SEQ ID NO: 5677441 - DNA, 25 bp, Homo sapien
caacaagactgcttagactaagcag

SEQ ID NO: 5677442 - DNA, 25 bp, Homo sapien
ccaacaagactgcttagactaagca

SEQ ID NO: 5677443 - DNA, 25 bp, Homo sapien
tggatgatgctgaaatgtgaacctc

SEQ ID NO: 5677444 - DNA, 25 bp, Homo sapien
gaacctctcttgcaggaatggaggg

SEQ ID NO: 5677445 - DNA, 25 bp, Homo sapien
gatgctgaaatgtgaacctctcttg

SEQ ID NO: 5677446 - DNA, 25 bp, Homo sapien
tgcttagtctaagcagtcttgttgg

SEQ ID NO: 5677447 - DNA, 25 bp, Homo sapien
gcagtcttgttggatgatgctgaaa

SEQ ID NO: 5677448 - DNA, 25 bp, Homo sapien
gaaatgtgaacctctcttgcaggaa

SEQ ID NO: 5677449 - DNA, 25 bp, Homo sapien
tttcagcatcatccaacaagactgc

SEQ ID NO: 5677450 - DNA, 25 bp, Homo sapien
cccctccattcctgcaagagaggtt

SEQ ID NO: 5677451 - DNA, 25 bp, Homo sapien
caagagaggttcacatttcagcatc

SEQ ID NO: 5677452 - DNA, 25 bp, Homo sapien
ccaacaagactgcttagactaagca

SEQ ID NO: 5677453 - DNA, 25 bp, Homo sapien
ccattcctgcaagagaggttcacat

SEQ ID NO: 5677454 - DNA, 25 bp, Homo sapien
gaggttcacatttcagcatcatcca

SEQ ID NO: 5677455 - DNA, 25 bp, Homo sapien
ggcaggataaatggtaagcatcgtg

SEQ ID NO: 5677456 - DNA, 25 bp, Homo sapien
aatggtaagcatcgtgttttcttcc

SEQ ID NO: 5677457 - DNA, 25 bp, Homo sapien
tttcactcaccctttgccggctgtt

SEQ ID NO: 5677458 - DNA, 25 bp, Homo sapien
caggataaatggtaagcatcgtgtt

SEQ ID NO: 5677459 - DNA, 25 bp, Homo sapien
ttcactcaccctttgccggctgttg

SEQ ID NO: 5677460 - DNA, 25 bp, Homo sapien
gataaatggtaagcatcgtgttttc

SEQ ID NO: 5677461 - DNA, 25 bp, Homo sapien
atttggatctgggatgaacatgggc

SEQ ID NO: 5677462 - DNA, 25 bp, Homo sapien
tttggatctgggatgaacatgggca

SEQ ID NO: 5677463 - DNA, 25 bp, Homo sapien
tgcccatgttcatcccagatccaaa

SEQ ID NO: 5677464 - DNA, 25 bp, Homo sapien
gcccatgttcatcccagatccaaat

SEQ ID NO: 5677465 - DNA, 25 bp, Homo sapien
caacagccggcaaagggtgagtgaa

SEQ ID NO: 5677466 - DNA, 25 bp, Homo sapien
ggaagaaaacacgatgcttaccatt

SEQ ID NO: 5677467 - DNA, 25 bp, Homo sapien
cacgatgcttaccatttatcctgcc

SEQ ID NO: 5677468 - DNA, 25 bp, Homo sapien
aacagccggcaaagggtgagtgaaa

SEQ ID NO: 5677469 - DNA, 25 bp, Homo sapien
aacacgatgcttaccatttatcctg

SEQ ID NO: 5677470 - DNA, 25 bp, Homo sapien
gaaaacacgatgcttaccatttatc

SEQ ID NO: 5677471 - DNA, 25 bp, Homo sapien
gtgttcccaagctctgcagtaattt

SEQ ID NO: 5677472 - DNA, 25 bp, Homo sapien
cgctagtcttttgagatgtcctgtg

SEQ ID NO: 5677473 - DNA, 25 bp, Homo sapien
gacataatagtagacttacttcact

SEQ ID NO: 5677474 - DNA, 25 bp, Homo sapien
cctgtgttcccaagctctgcagtaa

SEQ ID NO: 5677475 - DNA, 25 bp, Homo sapien
tagtagacttacttcacttggtcgc

SEQ ID NO: 5677476 - DNA, 25 bp, Homo sapien
tcacttggtcgctagtcttttgaga

SEQ ID NO: 5677477 - DNA, 25 bp, Homo sapien
aaattactgcagagcttgggaacac

SEQ ID NO: 5677478 - DNA, 25 bp, Homo sapien
gcgaccaagtgaagtaagtctacta

SEQ ID NO: 5677479 - DNA, 25 bp, Homo sapien
tctcaaaagactagcgaccaagtga

SEQ ID NO: 5677480 - DNA, 25 bp, Homo sapien
ttactgcagagcttgggaacacagg

SEQ ID NO: 5677481 - DNA, 25 bp, Homo sapien
actagcgaccaagtgaagtaagtct

SEQ ID NO: 5677482 - DNA, 25 bp, Homo sapien
cacaggacatctcaaaagactagcg

SEQ ID NO: 5677483 - DNA, 25 bp, Homo sapien
ggtcatctgccccagctacaagttg

SEQ ID NO: 5677484 - DNA, 25 bp, Homo sapien
gttgttcttggtcatctgccccagc

SEQ ID NO: 5677485 - DNA, 25 bp, Homo sapien
gctacaagttgtctatagaggcgtt

SEQ ID NO: 5677486 - DNA, 25 bp, Homo sapien
tctatagaggcgttaataaaaatca

SEQ ID NO: 5677487 - DNA, 25 bp, Homo sapien
tttgtctctgggagtgctgcaaagg

SEQ ID NO: 5677488 - DNA, 25 bp, Homo sapien
caagtttgtctctgggagtgctgca

SEQ ID NO: 5677489 - DNA, 25 bp, Homo sapien
cctctatagacaacttgtagctggg

SEQ ID NO: 5677490 - DNA, 25 bp, Homo sapien
cctttgcagcactcccagagacaaa

SEQ ID NO: 5677491 - DNA, 25 bp, Homo sapien
gatttttattaacgcctctatagac

SEQ ID NO: 5677492 - DNA, 25 bp, Homo sapien
gcagcactcccagagacaaacttga

SEQ ID NO: 5677493 - DNA, 25 bp, Homo sapien
tagctggggcagatgaccaagaaca

SEQ ID NO: 5677494 - DNA, 25 bp, Homo sapien
taacgcctctatagacaacttgtag

SEQ ID NO: 5677495 - DNA, 25 bp, Homo sapien
atatgtttagtagagtcggagtttc

SEQ ID NO: 5677496 - DNA, 25 bp, Homo sapien
ttatatgtttagtagagtcggagtt

SEQ ID NO: 5677497 - DNA, 25 bp, Homo sapien
tatatgtttagtagagtcggagttt

SEQ ID NO: 5677498 - DNA, 25 bp, Homo sapien
tatgtttagtagagtcggagtttca

SEQ ID NO: 5677499 - DNA, 25 bp, Homo sapien
tttatatgtttagtagagtcggagt

SEQ ID NO: 5677500 - DNA, 25 bp, Homo sapien
ttttatatgtttagtagagtcggag

SEQ ID NO: 5677501 - DNA, 25 bp, Homo sapien
aactccgactctactaaacatataa

SEQ ID NO: 5677502 - DNA, 25 bp, Homo sapien
gaaactccgactctactaaacatat

SEQ ID NO: 5677503 - DNA, 25 bp, Homo sapien
aaactccgactctactaaacatata

SEQ ID NO: 5677504 - DNA, 25 bp, Homo sapien
tgaaactccgactctactaaacata

SEQ ID NO: 5677505 - DNA, 25 bp, Homo sapien
actccgactctactaaacatataaa

SEQ ID NO: 5677506 - DNA, 25 bp, Homo sapien
gtgaaactccgactctactaaacat

SEQ ID NO: 5677507 - DNA, 25 bp, Homo sapien
actgctatccttgtttcatctgaaa

SEQ ID NO: 5677508 - DNA, 25 bp, Homo sapien
tatccttgtttcatctgaaactgag

SEQ ID NO: 5677509 - DNA, 25 bp, Homo sapien
ttgtttcatctgaaactgaggcaca

SEQ ID NO: 5677510 - DNA, 25 bp, Homo sapien
tactgctatccttgtttcatctgaa

SEQ ID NO: 5677511 - DNA, 25 bp, Homo sapien
gatatgtacatactgctatccttgt

SEQ ID NO: 5677512 - DNA, 25 bp, Homo sapien
tacatactgctatccttgtttcatc

SEQ ID NO: 5677513 - DNA, 25 bp, Homo sapien
acaaggatagcagtatgtacatatc

SEQ ID NO: 5677514 - DNA, 25 bp, Homo sapien
gatgaaacaaggatagcagtatgta

SEQ ID NO: 5677515 - DNA, 25 bp, Homo sapien
tgtgcctcagtttcagatgaaacaa

SEQ ID NO: 5677516 - DNA, 25 bp, Homo sapien
tttcagatgaaacaaggatagcagt

SEQ ID NO: 5677517 - DNA, 25 bp, Homo sapien
tcagatgaaacaaggatagcagtat

SEQ ID NO: 5677518 - DNA, 25 bp, Homo sapien
cagtttcagatgaaacaaggatagc

SEQ ID NO: 5677519 - DNA, 25 bp, Homo sapien
gaatcctgccttttagaagtgcctc

SEQ ID NO: 5677520 - DNA, 25 bp, Homo sapien
cctgccttttagaagtgcctccagc

SEQ ID NO: 5677521 - DNA, 25 bp, Homo sapien
gggcaccagcagggctgtagagtgt

SEQ ID NO: 5677522 - DNA, 25 bp, Homo sapien
ctggcacttcatcatgtgggaatcc

SEQ ID NO: 5677523 - DNA, 25 bp, Homo sapien
tggcacttcatcatgtgggaatcct

SEQ ID NO: 5677524 - DNA, 25 bp, Homo sapien
ggcaccagcagggctgtagagtgtg

SEQ ID NO: 5677525 - DNA, 25 bp, Homo sapien
ggattcccacatgatgaagtgccag

SEQ ID NO: 5677526 - DNA, 25 bp, Homo sapien
aggattcccacatgatgaagtgcca

SEQ ID NO: 5677527 - DNA, 25 bp, Homo sapien
cacactctacagccctgctggtgcc

SEQ ID NO: 5677528 - DNA, 25 bp, Homo sapien
acactctacagccctgctggtgccc

SEQ ID NO: 5677529 - DNA, 25 bp, Homo sapien
gaggcacttctaaaaggcaggattc

SEQ ID NO: 5677530 - DNA, 25 bp, Homo sapien
gctggaggcacttctaaaaggcagg

SEQ ID NO: 5677531 - DNA, 25 bp, Homo sapien
cattagtaataaagcaacagaggtc

SEQ ID NO: 5677532 - DNA, 25 bp, Homo sapien
taaagcaacagaggtctgcgtttcc

SEQ ID NO: 5677533 - DNA, 25 bp, Homo sapien
gaggtctgcgtttccagtgtacatt

SEQ ID NO: 5677534 - DNA, 25 bp, Homo sapien
gtaggaaagttgtcaccattagtaa

SEQ ID NO: 5677535 - DNA, 25 bp, Homo sapien
tttccagtgtacattcaagcttgcc

SEQ ID NO: 5677536 - DNA, 25 bp, Homo sapien
caagcttgcctgtaacttgtgtgtg

SEQ ID NO: 5677537 - DNA, 25 bp, Homo sapien
ctggaaacgcagacctctgttgctt

SEQ ID NO: 5677538 - DNA, 25 bp, Homo sapien
cagacctctgttgctttattactaa

SEQ ID NO: 5677539 - DNA, 25 bp, Homo sapien
ggcaagcttgaatgtacactggaaa

SEQ ID NO: 5677540 - DNA, 25 bp, Homo sapien
tgaatgtacactggaaacgcagacc

SEQ ID NO: 5677541 - DNA, 25 bp, Homo sapien
cacacacaagttacaggcaagcttg

SEQ ID NO: 5677542 - DNA, 25 bp, Homo sapien
tactaatggtgacaactttcctaca

SEQ ID NO: 5677543 - DNA, 25 bp, Homo sapien
gagcagattagtctgggtgtgctgg

SEQ ID NO: 5677544 - DNA, 25 bp, Homo sapien
agagcagattagtctgggtgtgctg

SEQ ID NO: 5677545 - DNA, 25 bp, Homo sapien
aaagtttcagaaatctggcttggta

SEQ ID NO: 5677546 - DNA, 25 bp, Homo sapien
aaaagtttcagaaatctggcttggt

SEQ ID NO: 5677547 - DNA, 25 bp, Homo sapien
ccagcacacccagactaatctgctc

SEQ ID NO: 5677548 - DNA, 25 bp, Homo sapien
cagcacacccagactaatctgctct

SEQ ID NO: 5677549 - DNA, 25 bp, Homo sapien
accaagccagatttctgaaactttt

SEQ ID NO: 5677550 - DNA, 25 bp, Homo sapien
taccaagccagatttctgaaacttt

SEQ ID NO: 5677551 - DNA, 25 bp, Homo sapien
tgttactcagagcagattagtctgg

SEQ ID NO: 5677552 - DNA, 25 bp, Homo sapien
tctggcttggtaaaatgttactcag

SEQ ID NO: 5677553 - DNA, 25 bp, Homo sapien
agattagtctgggtgtgctggctca

SEQ ID NO: 5677554 - DNA, 25 bp, Homo sapien
tcagaaatctggcttggtaaaatgt

SEQ ID NO: 5677555 - DNA, 25 bp, Homo sapien
tcagagcagattagtctgggtgtgc

SEQ ID NO: 5677556 - DNA, 25 bp, Homo sapien
aaagtttcagaaatctggcttggta

SEQ ID NO: 5677557 - DNA, 25 bp, Homo sapien
gcacacccagactaatctgctctga

SEQ ID NO: 5677558 - DNA, 25 bp, Homo sapien
ccagactaatctgctctgagtaaca

SEQ ID NO: 5677559 - DNA, 25 bp, Homo sapien
tgagccagcacacccagactaatct

SEQ ID NO: 5677560 - DNA, 25 bp, Homo sapien
acattttaccaagccagatttctga

SEQ ID NO: 5677561 - DNA, 25 bp, Homo sapien
ctgagtaacattttaccaagccaga

SEQ ID NO: 5677562 - DNA, 25 bp, Homo sapien
taccaagccagatttctgaaacttt

SEQ ID NO: 5677563 - DNA, 25 bp, Homo sapien
aggcaacactgcgaaaccccatctc

SEQ ID NO: 5677564 - DNA, 25 bp, Homo sapien
tcagcctaggcaacactgcgaaacc

SEQ ID NO: 5677565 - DNA, 25 bp, Homo sapien
ctaggcaacactgcgaaaccccatc

SEQ ID NO: 5677566 - DNA, 25 bp, Homo sapien
taggcaacactgcgaaaccccatct

SEQ ID NO: 5677567 - DNA, 25 bp, Homo sapien
tgggaggctggggtaagaggattgc

SEQ ID NO: 5677568 - DNA, 25 bp, Homo sapien
cctaggcaacactgcgaaaccccat

SEQ ID NO: 5677569 - DNA, 25 bp, Homo sapien
agatggggtttcgcagtgttgccta

SEQ ID NO: 5677570 - DNA, 25 bp, Homo sapien
gagatggggtttcgcagtgttgcct

SEQ ID NO: 5677571 - DNA, 25 bp, Homo sapien
gatggggtttcgcagtgttgcctag

SEQ ID NO: 5677572 - DNA, 25 bp, Homo sapien
ggtttcgcagtgttgcctaggctga

SEQ ID NO: 5677573 - DNA, 25 bp, Homo sapien
gcaatcctcttaccccagcctccca

SEQ ID NO: 5677574 - DNA, 25 bp, Homo sapien
atggggtttcgcagtgttgcctagg

SEQ ID NO: 5677575 - DNA, 25 bp, Homo sapien
tgctgtgaggagtagagtgatgcag

SEQ ID NO: 5677576 - DNA, 25 bp, Homo sapien
aggagtagagtgatgcagtttagaa

SEQ ID NO: 5677577 - DNA, 25 bp, Homo sapien
ggagtagagtgatgcagtttagaag

SEQ ID NO: 5677578 - DNA, 25 bp, Homo sapien
gctgtgaggagtagagtgatgcagt

SEQ ID NO: 5677579 - DNA, 25 bp, Homo sapien
tcattagggaatttgagttgttgct

SEQ ID NO: 5677580 - DNA, 25 bp, Homo sapien
gttgctgtgaggagtagagtgatgc

SEQ ID NO: 5677581 - DNA, 25 bp, Homo sapien
cttctaaactgcatcactctactcc

SEQ ID NO: 5677582 - DNA, 25 bp, Homo sapien
ttctaaactgcatcactctactcct

SEQ ID NO: 5677583 - DNA, 25 bp, Homo sapien
aactgcatcactctactcctcacag

SEQ ID NO: 5677584 - DNA, 25 bp, Homo sapien
gcatcactctactcctcacagcaac

SEQ ID NO: 5677585 - DNA, 25 bp, Homo sapien
agcaacaactcaaattccctaatga

SEQ ID NO: 5677586 - DNA, 25 bp, Homo sapien
tgcatcactctactcctcacagcaa

SEQ ID NO: 5677587 - DNA, 25 bp, Homo sapien
cagcagatagcacccatgaggagca

SEQ ID NO: 5677588 - DNA, 25 bp, Homo sapien
cctgggctctgctatccagcagata

SEQ ID NO: 5677589 - DNA, 25 bp, Homo sapien
gcagatagcacccatgaggagcatg

SEQ ID NO: 5677590 - DNA, 25 bp, Homo sapien
tatccagcagatagcacccatgagg

SEQ ID NO: 5677591 - DNA, 25 bp, Homo sapien
aggagcatgctgacccatgaggtca

SEQ ID NO: 5677592 - DNA, 25 bp, Homo sapien
tgctgacccatgaggtcacttgggt

SEQ ID NO: 5677593 - DNA, 25 bp, Homo sapien
tgacctcatgggtcagcatgctcct

SEQ ID NO: 5677594 - DNA, 25 bp, Homo sapien
catgctcctcatgggtgctatctgc

SEQ ID NO: 5677595 - DNA, 25 bp, Homo sapien
tatctgctggatagcagagcccagg

SEQ ID NO: 5677596 - DNA, 25 bp, Homo sapien
cctcatgggtgctatctgctggata

SEQ ID NO: 5677597 - DNA, 25 bp, Homo sapien
acccaagtgacctcatgggtcagca

SEQ ID NO: 5677598 - DNA, 25 bp, Homo sapien
gctcctcatgggtgctatctgctgg

SEQ ID NO: 5677599 - DNA, 25 bp, Homo sapien
tcaaactaggaatgttaagcccacc

SEQ ID NO: 5677600 - DNA, 25 bp, Homo sapien
tggcagccagtccttgttaattcat

SEQ ID NO: 5677601 - DNA, 25 bp, Homo sapien
actaggaatgttaagcccaccattg

SEQ ID NO: 5677602 - DNA, 25 bp, Homo sapien
cattggcagccagtccttgttaatt

SEQ ID NO: 5677603 - DNA, 25 bp, Homo sapien
ccaccattggcagccagtccttgtt

SEQ ID NO: 5677604 - DNA, 25 bp, Homo sapien
caaactaggaatgttaagcccacca

SEQ ID NO: 5677605 - DNA, 25 bp, Homo sapien
aattaacaaggactggctgccaatg

SEQ ID NO: 5677606 - DNA, 25 bp, Homo sapien
atgaattaacaaggactggctgcca

SEQ ID NO: 5677607 - DNA, 25 bp, Homo sapien
ggtgggcttaacattcctagtttga

SEQ ID NO: 5677608 - DNA, 25 bp, Homo sapien
caatggtgggcttaacattcctagt

SEQ ID NO: 5677609 - DNA, 25 bp, Homo sapien
aacaaggactggctgccaatggtgg

SEQ ID NO: 5677610 - DNA, 25 bp, Homo sapien
tgaattaacaaggactggctgccaa

SEQ ID NO: 5677611 - DNA, 25 bp, Homo sapien
tacatcgcacctatcttacctgaca

SEQ ID NO: 5677612 - DNA, 25 bp, Homo sapien
tgcaaggtgttcattacatcgcacc

SEQ ID NO: 5677613 - DNA, 25 bp, Homo sapien
gggactctggctgtataatgcaagg

SEQ ID NO: 5677614 - DNA, 25 bp, Homo sapien
tctggctgtataatgcaaggtgttc

SEQ ID NO: 5677615 - DNA, 25 bp, Homo sapien
gacatttctaaggagtgagatgatt

SEQ ID NO: 5677616 - DNA, 25 bp, Homo sapien
gatagggactctggctgtataatgc

SEQ ID NO: 5677617 - DNA, 25 bp, Homo sapien
gcattatacagccagagtccctatc

SEQ ID NO: 5677618 - DNA, 25 bp, Homo sapien
ggtgcgatgtaatgaacaccttgca

SEQ ID NO: 5677619 - DNA, 25 bp, Homo sapien
gaacaccttgcattatacagccaga

SEQ ID NO: 5677620 - DNA, 25 bp, Homo sapien
aatgtcaggtaagataggtgcgatg

SEQ ID NO: 5677621 - DNA, 25 bp, Homo sapien
taagataggtgcgatgtaatgaaca

SEQ ID NO: 5677622 - DNA, 25 bp, Homo sapien
aatcatctcactccttagaaatgtc

SEQ ID NO: 5677623 - DNA, 25 bp, Homo sapien
gtgatccccatttcagcctgcgtga

SEQ ID NO: 5677624 - DNA, 25 bp, Homo sapien
gagattcttcaaggacctcgcagca

SEQ ID NO: 5677625 - DNA, 25 bp, Homo sapien
cagcctgcgtgagatggatgcacaa

SEQ ID NO: 5677626 - DNA, 25 bp, Homo sapien
cgcagcatgaaaagtgtgatcccca

SEQ ID NO: 5677627 - DNA, 25 bp, Homo sapien
ggagggagagattcttcaaggacct

SEQ ID NO: 5677628 - DNA, 25 bp, Homo sapien
tcaaggacctcgcagcatgaaaagt

SEQ ID NO: 5677629 - DNA, 25 bp, Homo sapien
gggatcacacttttcatgctgcgag

SEQ ID NO: 5677630 - DNA, 25 bp, Homo sapien
cgaggtccttgaagaatctctccct

SEQ ID NO: 5677631 - DNA, 25 bp, Homo sapien
tgctgcgaggtccttgaagaatctc

SEQ ID NO: 5677632 - DNA, 25 bp, Homo sapien
ttgtgcatccatctcacgcaggctg

SEQ ID NO: 5677633 - DNA, 25 bp, Homo sapien
tccatctcacgcaggctgaaatggg

SEQ ID NO: 5677634 - DNA, 25 bp, Homo sapien
acttttcatgctgcgaggtccttga

SEQ ID NO: 5677635 - DNA, 25 bp, Homo sapien
ctttcccggcagaagctaggacctt

SEQ ID NO: 5677636 - DNA, 25 bp, Homo sapien
cagtaggaatcacgaaaggcttatc

SEQ ID NO: 5677637 - DNA, 25 bp, Homo sapien
cacgaaaggcttatcaagcaagtga

SEQ ID NO: 5677638 - DNA, 25 bp, Homo sapien
gcagaagctaggacctttgttttaa

SEQ ID NO: 5677639 - DNA, 25 bp, Homo sapien
actgtggtgggcctttcccggcaga

SEQ ID NO: 5677640 - DNA, 25 bp, Homo sapien
cagcagtaggaatcacgaaaggctt

SEQ ID NO: 5677641 - DNA, 25 bp, Homo sapien
aaggtcctagcttctgccgggaaag

SEQ ID NO: 5677642 - DNA, 25 bp, Homo sapien
tctgccgggaaaggcccaccacagt

SEQ ID NO: 5677643 - DNA, 25 bp, Homo sapien
gataagcctttcgtgattcctactg

SEQ ID NO: 5677644 - DNA, 25 bp, Homo sapien
tcacttgcttgataagcctttcgtg

SEQ ID NO: 5677645 - DNA, 25 bp, Homo sapien
ttaaaacaaaggtcctagcttctgc

SEQ ID NO: 5677646 - DNA, 25 bp, Homo sapien
aacaaaggtcctagcttctgccggg

SEQ ID NO: 5677647 - DNA, 25 bp, Homo sapien
ttgtaaggctgggtgtagtggctca

SEQ ID NO: 5677648 - DNA, 25 bp, Homo sapien
acattgtaaggctgggtgtagtggc

SEQ ID NO: 5677649 - DNA, 25 bp, Homo sapien
taaggctgggtgtagtggctcacac

SEQ ID NO: 5677650 - DNA, 25 bp, Homo sapien
tgtaaggctgggtgtagtggctcac

SEQ ID NO: 5677651 - DNA, 25 bp, Homo sapien
gtaaggctgggtgtagtggctcaca

SEQ ID NO: 5677652 - DNA, 25 bp, Homo sapien
cattgtaaggctgggtgtagtggct

SEQ ID NO: 5677653 - DNA, 25 bp, Homo sapien
agccactacacccagccttacaatg

SEQ ID NO: 5677654 - DNA, 25 bp, Homo sapien
tgagccactacacccagccttacaa

SEQ ID NO: 5677655 - DNA, 25 bp, Homo sapien
gccactacacccagccttacaatgt

SEQ ID NO: 5677656 - DNA, 25 bp, Homo sapien
gtgagccactacacccagccttaca

SEQ ID NO: 5677657 - DNA, 25 bp, Homo sapien
gtgtgagccactacacccagcctta

SEQ ID NO: 5677658 - DNA, 25 bp, Homo sapien
tgtgagccactacacccagccttac

SEQ ID NO: 5677659 - DNA, 25 bp, Homo sapien
tgtgacccaaaccccgttatgtaga

SEQ ID NO: 5677660 - DNA, 25 bp, Homo sapien
caaaccccgttatgtagatgcagcc

SEQ ID NO: 5677661 - DNA, 25 bp, Homo sapien
cccaaaccccgttatgtagatgcag

SEQ ID NO: 5677662 - DNA, 25 bp, Homo sapien
acccaaaccccgttatgtagatgca

SEQ ID NO: 5677663 - DNA, 25 bp, Homo sapien
ccaaaccccgttatgtagatgcagc

SEQ ID NO: 5677664 - DNA, 25 bp, Homo sapien
gacccaaaccccgttatgtagatgc

SEQ ID NO: 5677665 - DNA, 25 bp, Homo sapien
gctgcatctacataacggggtttgg

SEQ ID NO: 5677666 - DNA, 25 bp, Homo sapien
ctgcatctacataacggggtttggg

SEQ ID NO: 5677667 - DNA, 25 bp, Homo sapien
ggctgcatctacataacggggtttg

SEQ ID NO: 5677668 - DNA, 25 bp, Homo sapien
tgcatctacataacggggtttgggt

SEQ ID NO: 5677669 - DNA, 25 bp, Homo sapien
tctacataacggggtttgggtcaca

SEQ ID NO: 5677670 - DNA, 25 bp, Homo sapien
gcatctacataacggggtttgggtc

SEQ ID NO: 5677671 - DNA, 25 bp, Homo sapien
tctctgctgacaactgcagtggctg

SEQ ID NO: 5677672 - DNA, 25 bp, Homo sapien
cacaactttctcatattttgtaagg

SEQ ID NO: 5677673 - DNA, 25 bp, Homo sapien
gcagtggctgcatctacataacggg

SEQ ID NO: 5677674 - DNA, 25 bp, Homo sapien
gacaactgcagtggctgcatctaca

SEQ ID NO: 5677675 - DNA, 25 bp, Homo sapien
gggtttgggtcacaactttctcata

SEQ ID NO: 5677676 - DNA, 25 bp, Homo sapien
gaaagacctctctgctgacaactgc

SEQ ID NO: 5677677 - DNA, 25 bp, Homo sapien
gcttctgcactggatttgagtccca

SEQ ID NO: 5677678 - DNA, 25 bp, Homo sapien
tcaccagcatgtgaccttggtcaag

SEQ ID NO: 5677679 - DNA, 25 bp, Homo sapien
gatgggcttctgcactggatttgag

SEQ ID NO: 5677680 - DNA, 25 bp, Homo sapien
gatttgagtcccagcctttgcctca

SEQ ID NO: 5677681 - DNA, 25 bp, Homo sapien
caggcttctgtattagaggatgggc

SEQ ID NO: 5677682 - DNA, 25 bp, Homo sapien
tgtattagaggatgggcttctgcac

SEQ ID NO: 5677683 - DNA, 25 bp, Homo sapien
tgaggcaaaggctgggactcaaatc

SEQ ID NO: 5677684 - DNA, 25 bp, Homo sapien
ccaaggtcacatgctggtgagaggt

SEQ ID NO: 5677685 - DNA, 25 bp, Homo sapien
aatacagaagcctgtgccctaacac

SEQ ID NO: 5677686 - DNA, 25 bp, Homo sapien
agaagcccatcctctaatacagaag

SEQ ID NO: 5677687 - DNA, 25 bp, Homo sapien
cttgaccaaggtcacatgctggtga

SEQ ID NO: 5677688 - DNA, 25 bp, Homo sapien
gactcaaatccagtgcagaagccca

SEQ ID NO: 5677689 - DNA, 25 bp, Homo sapien
tgatggaattatacacaaagccttt

SEQ ID NO: 5677690 - DNA, 25 bp, Homo sapien
gtggagggtaacaggcgtgcgtggc

SEQ ID NO: 5677691 - DNA, 25 bp, Homo sapien
cgtgcgtggcatggttgtgaagagt

SEQ ID NO: 5677692 - DNA, 25 bp, Homo sapien
agggtaacaggcgtgcgtggcatgg

SEQ ID NO: 5677693 - DNA, 25 bp, Homo sapien
taacaggcgtgcgtggcatggttgt

SEQ ID NO: 5677694 - DNA, 25 bp, Homo sapien
gatggaattatacacaaagcctttg

SEQ ID NO: 5677695 - DNA, 25 bp, Homo sapien
tgccacgcacgcctgttaccctcca

SEQ ID NO: 5677696 - DNA, 25 bp, Homo sapien
caaaggctttgtgtataattccatc

SEQ ID NO: 5677697 - DNA, 25 bp, Homo sapien
aaaggctttgtgtataattccatca

SEQ ID NO: 5677698 - DNA, 25 bp, Homo sapien
actcttcacaaccatgccacgcacg

SEQ ID NO: 5677699 - DNA, 25 bp, Homo sapien
acaaccatgccacgcacgcctgtta

SEQ ID NO: 5677700 - DNA, 25 bp, Homo sapien
gcactcaacacatgccctaccccaa

SEQ ID NO: 5677701 - DNA, 25 bp, Homo sapien
tgtacccagtattgtggtttgtgtg

SEQ ID NO: 5677702 - DNA, 25 bp, Homo sapien
gggacctcttggttactgtggtagc

SEQ ID NO: 5677703 - DNA, 25 bp, Homo sapien
gcttggtgtacccagtattgtggtt

SEQ ID NO: 5677704 - DNA, 25 bp, Homo sapien
tggttactgtggtagcgaatgcttg

SEQ ID NO: 5677705 - DNA, 25 bp, Homo sapien
tgtggtagcgaatgcttggtgtacc

SEQ ID NO: 5677706 - DNA, 25 bp, Homo sapien
cctcttggttactgtggtagcgaat

SEQ ID NO: 5677707 - DNA, 25 bp, Homo sapien
ttcgctaccacagtaaccaagaggt

SEQ ID NO: 5677708 - DNA, 25 bp, Homo sapien
gtacaccaagcattcgctaccacag

SEQ ID NO: 5677709 - DNA, 25 bp, Homo sapien
gctaccacagtaaccaagaggtccc

SEQ ID NO: 5677710 - DNA, 25 bp, Homo sapien
aaaccacaatactgggtacaccaag

SEQ ID NO: 5677711 - DNA, 25 bp, Homo sapien
caagcattcgctaccacagtaacca

SEQ ID NO: 5677712 - DNA, 25 bp, Homo sapien
cacacaaaccacaatactgggtaca

SEQ ID NO: 5677713 - DNA, 25 bp, Homo sapien
tgcagaagagttaaacatgctgact

SEQ ID NO: 5677714 - DNA, 25 bp, Homo sapien
agagttaaacatgctgacttggtgg

SEQ ID NO: 5677715 - DNA, 25 bp, Homo sapien
tcctgcagaagagttaaacatgctg

SEQ ID NO: 5677716 - DNA, 25 bp, Homo sapien
tttcctgcagaagagttaaacatgc

SEQ ID NO: 5677717 - DNA, 25 bp, Homo sapien
taaacatgctgacttggtggtggct

SEQ ID NO: 5677718 - DNA, 25 bp, Homo sapien
ttaaacatgctgacttggtggtggc

SEQ ID NO: 5677719 - DNA, 25 bp, Homo sapien
gccaccaccaagtcagcatgtttaa

SEQ ID NO: 5677720 - DNA, 25 bp, Homo sapien
cagcatgtttaactcttctgcagga

SEQ ID NO: 5677721 - DNA, 25 bp, Homo sapien
ccaccaagtcagcatgtttaactct

SEQ ID NO: 5677722 - DNA, 25 bp, Homo sapien
gcatgtttaactcttctgcaggaaa

SEQ ID NO: 5677723 - DNA, 25 bp, Homo sapien
agccaccaccaagtcagcatgttta

SEQ ID NO: 5677724 - DNA, 25 bp, Homo sapien
agtcagcatgtttaactcttctgca

SEQ ID NO: 5677725 - DNA, 25 bp, Homo sapien
gatggagcgtggcatgggtggagga

SEQ ID NO: 5677726 - DNA, 25 bp, Homo sapien
tggagcgtggcatgggtggaggact

SEQ ID NO: 5677727 - DNA, 25 bp, Homo sapien
aaggcctagggtgatttttccacag

SEQ ID NO: 5677728 - DNA, 25 bp, Homo sapien
atggagcgtggcatgggtggaggac

SEQ ID NO: 5677729 - DNA, 25 bp, Homo sapien
ggagcgtggcatgggtggaggactt

SEQ ID NO: 5677730 - DNA, 25 bp, Homo sapien
aagtcctccacccatgccacgctcc

SEQ ID NO: 5677731 - DNA, 25 bp, Homo sapien
tcctccacccatgccacgctccatc

SEQ ID NO: 5677732 - DNA, 25 bp, Homo sapien
agtcctccacccatgccacgctcca

SEQ ID NO: 5677733 - DNA, 25 bp, Homo sapien
ctgtggaaaaatcaccctaggcctt

SEQ ID NO: 5677734 - DNA, 25 bp, Homo sapien
gtcctccacccatgccacgctccat

SEQ ID NO: 5677735 - DNA, 25 bp, Homo sapien
tattcctggaaaggcctagggtgat

SEQ ID NO: 5677736 - DNA, 25 bp, Homo sapien
tgaaagagactttgccaggaaggag

SEQ ID NO: 5677737 - DNA, 25 bp, Homo sapien
tggagcgtggcatgggtggaggact

SEQ ID NO: 5677738 - DNA, 25 bp, Homo sapien
aaggcctagggtgatttttccacag

SEQ ID NO: 5677739 - DNA, 25 bp, Homo sapien
tttttccacagagatggagcgtggc

SEQ ID NO: 5677740 - DNA, 25 bp, Homo sapien
tggaggacttgaaagagactttgcc

SEQ ID NO: 5677741 - DNA, 25 bp, Homo sapien
catctccttcctggcaaagtctctt

SEQ ID NO: 5677742 - DNA, 25 bp, Homo sapien
tcaccctaggcctttccaggaatac

SEQ ID NO: 5677743 - DNA, 25 bp, Homo sapien
ctgtggaaaaatcaccctaggcctt

SEQ ID NO: 5677744 - DNA, 25 bp, Homo sapien
gcaaagtctctttcaagtcctccac

SEQ ID NO: 5677745 - DNA, 25 bp, Homo sapien
gccacgctccatctctgtggaaaaa

SEQ ID NO: 5677746 - DNA, 25 bp, Homo sapien
catctctgtggaaaaatcaccctag

SEQ ID NO: 5677747 - DNA, 25 bp, Homo sapien
cctaggcctggagcgtgtttcaaag

SEQ ID NO: 5677748 - DNA, 25 bp, Homo sapien
ggcctggagcgtgtttcaaagccct

SEQ ID NO: 5677749 - DNA, 25 bp, Homo sapien
ccctaggcctggagcgtgtttcaaa

SEQ ID NO: 5677750 - DNA, 25 bp, Homo sapien
taggcctggagcgtgtttcaaagcc

SEQ ID NO: 5677751 - DNA, 25 bp, Homo sapien
tccctaggcctggagcgtgtttcaa

SEQ ID NO: 5677752 - DNA, 25 bp, Homo sapien
tgctaattggggcaggagtttcctt

SEQ ID NO: 5677753 - DNA, 25 bp, Homo sapien
ttgaaacacgctccaggcctaggga

SEQ ID NO: 5677754 - DNA, 25 bp, Homo sapien
tttgaaacacgctccaggcctaggg

SEQ ID NO: 5677755 - DNA, 25 bp, Homo sapien
gaaacacgctccaggcctagggagc

SEQ ID NO: 5677756 - DNA, 25 bp, Homo sapien
aaggaaactcctgccccaattagca

SEQ ID NO: 5677757 - DNA, 25 bp, Homo sapien
agggctttgaaacacgctccaggcc

SEQ ID NO: 5677758 - DNA, 25 bp, Homo sapien
ggctttgaaacacgctccaggccta

SEQ ID NO: 5677759 - DNA, 25 bp, Homo sapien
gtgcacttgctgatgcctttgacag

SEQ ID NO: 5677760 - DNA, 25 bp, Homo sapien
tgacagaggcatctagaccgactag

SEQ ID NO: 5677761 - DNA, 25 bp, Homo sapien
gcatctagaccgactagagaggttt

SEQ ID NO: 5677762 - DNA, 25 bp, Homo sapien
gcctttgacagaggcatctagaccg

SEQ ID NO: 5677763 - DNA, 25 bp, Homo sapien
atggagtgagttgtgcacttgctga

SEQ ID NO: 5677764 - DNA, 25 bp, Homo sapien
tagaccgactagagaggttttctaa

SEQ ID NO: 5677765 - DNA, 25 bp, Homo sapien
tagaaaacctctctagtcggtctag

SEQ ID NO: 5677766 - DNA, 25 bp, Homo sapien
ctagtcggtctagatgcctctgtca

SEQ ID NO: 5677767 - DNA, 25 bp, Homo sapien
tcagcaagtgcacaactcactccat

SEQ ID NO: 5677768 - DNA, 25 bp, Homo sapien
ctgtcaaaggcatcagcaagtgcac

SEQ ID NO: 5677769 - DNA, 25 bp, Homo sapien
ggtctagatgcctctgtcaaaggca

SEQ ID NO: 5677770 - DNA, 25 bp, Homo sapien
tcaaaggcatcagcaagtgcacaac

SEQ ID NO: 5677771 - DNA, 25 bp, Homo sapien
ttttcagttttggttaggtggcaga

SEQ ID NO: 5677772 - DNA, 25 bp, Homo sapien
cctatccgtatgcagagaaattatt

SEQ ID NO: 5677773 - DNA, 25 bp, Homo sapien
aataatttctctgcatacggatagg

SEQ ID NO: 5677774 - DNA, 25 bp, Homo sapien
tctgccacctaaccaaaactgaaaa

SEQ ID NO: 5677775 - DNA, 25 bp, Homo sapien
ttttcagttttggttaggtggcaga

SEQ ID NO: 5677776 - DNA, 25 bp, Homo sapien
cagttttggttaggtggcagagcaa

SEQ ID NO: 5677777 - DNA, 25 bp, Homo sapien
gtggcagagcaatttcctcctcttt

SEQ ID NO: 5677778 - DNA, 25 bp, Homo sapien
gttaggtggcagagcaatttcctcc

SEQ ID NO: 5677779 - DNA, 25 bp, Homo sapien
tccgtatgcagagaaattatttttt

SEQ ID NO: 5677780 - DNA, 25 bp, Homo sapien
cctatccgtatgcagagaaattatt

SEQ ID NO: 5677781 - DNA, 25 bp, Homo sapien
tttcaagacagagtctcgctttgtt

SEQ ID NO: 5677782 - DNA, 25 bp, Homo sapien
tcaagacagagtctcgctttgttgc

SEQ ID NO: 5677783 - DNA, 25 bp, Homo sapien
ttcaagacagagtctcgctttgttg

SEQ ID NO: 5677784 - DNA, 25 bp, Homo sapien
ctgcggcctccacctcccggtttca

SEQ ID NO: 5677785 - DNA, 25 bp, Homo sapien
tgcggcctccacctcccggtttcaa

SEQ ID NO: 5677786 - DNA, 25 bp, Homo sapien
cactgcggcctccacctcccggttt

SEQ ID NO: 5677787 - DNA, 25 bp, Homo sapien
tgaaaccgggaggtggaggccgcag

SEQ ID NO: 5677788 - DNA, 25 bp, Homo sapien
ttgaaaccgggaggtggaggccgca

SEQ ID NO: 5677789 - DNA, 25 bp, Homo sapien
aaaccgggaggtggaggccgcagtg

SEQ ID NO: 5677790 - DNA, 25 bp, Homo sapien
aacaaagcgagactctgtcttgaaa

SEQ ID NO: 5677791 - DNA, 25 bp, Homo sapien
gcaacaaagcgagactctgtcttga

SEQ ID NO: 5677792 - DNA, 25 bp, Homo sapien
caacaaagcgagactctgtcttgaa

SEQ ID NO: 5677793 - DNA, 25 bp, Homo sapien
tcttgagtagctggcactgccgcca

SEQ ID NO: 5677794 - DNA, 25 bp, Homo sapien
ttgagtagctggcactgccgccacc

SEQ ID NO: 5677795 - DNA, 25 bp, Homo sapien
tgagtagctggcactgccgccacca

SEQ ID NO: 5677796 - DNA, 25 bp, Homo sapien
actcttgagtagctggcactgccgc

SEQ ID NO: 5677797 - DNA, 25 bp, Homo sapien
ctcttgagtagctggcactgccgcc

SEQ ID NO: 5677798 - DNA, 25 bp, Homo sapien
gactcttgagtagctggcactgccg

SEQ ID NO: 5677799 - DNA, 25 bp, Homo sapien
tgtggtggcggcagtgccagctact

SEQ ID NO: 5677800 - DNA, 25 bp, Homo sapien
ggtggcggcagtgccagctactcaa

SEQ ID NO: 5677801 - DNA, 25 bp, Homo sapien
tggtggcggcagtgccagctactca

SEQ ID NO: 5677802 - DNA, 25 bp, Homo sapien
cggcagtgccagctactcaagagtc

SEQ ID NO: 5677803 - DNA, 25 bp, Homo sapien
gcggcagtgccagctactcaagagt

SEQ ID NO: 5677804 - DNA, 25 bp, Homo sapien
tggcggcagtgccagctactcaaga

SEQ ID NO: 5677805 - DNA, 25 bp, Homo sapien
ggtgtgagccatcacgccaggtctg

SEQ ID NO: 5677806 - DNA, 25 bp, Homo sapien
ggtctgttgatgtccattttatgtt

SEQ ID NO: 5677807 - DNA, 25 bp, Homo sapien
tcacgccaggtctgttgatgtccat

SEQ ID NO: 5677808 - DNA, 25 bp, Homo sapien
tgtgagccatcacgccaggtctgtt

SEQ ID NO: 5677809 - DNA, 25 bp, Homo sapien
gccaggtctgttgatgtccatttta

SEQ ID NO: 5677810 - DNA, 25 bp, Homo sapien
gagccatcacgccaggtctgttgat

SEQ ID NO: 5677811 - DNA, 25 bp, Homo sapien
aacataaaatggacatcaacagacc

SEQ ID NO: 5677812 - DNA, 25 bp, Homo sapien
taaaatggacatcaacagacctggc

SEQ ID NO: 5677813 - DNA, 25 bp, Homo sapien
gacctggcgtgatggctcacacctg

SEQ ID NO: 5677814 - DNA, 25 bp, Homo sapien
atcaacagacctggcgtgatggctc

SEQ ID NO: 5677815 - DNA, 25 bp, Homo sapien
tggacatcaacagacctggcgtgat

SEQ ID NO: 5677816 - DNA, 25 bp, Homo sapien
aacagacctggcgtgatggctcaca

SEQ ID NO: 5677817 - DNA, 25 bp, Homo sapien
catgagccaccgcacccggccaaag

SEQ ID NO: 5677818 - DNA, 25 bp, Homo sapien
ggcatgagccaccgcacccggccaa

SEQ ID NO: 5677819 - DNA, 25 bp, Homo sapien
caggcatgagccaccgcacccggcc

SEQ ID NO: 5677820 - DNA, 25 bp, Homo sapien
gcatgagccaccgcacccggccaaa

SEQ ID NO: 5677821 - DNA, 25 bp, Homo sapien
caccgcacccggccaaagaaatatt

SEQ ID NO: 5677822 - DNA, 25 bp, Homo sapien
aggcatgagccaccgcacccggcca

SEQ ID NO: 5677823 - DNA, 25 bp, Homo sapien
ctttggccgggtgcggtggctcatg

SEQ ID NO: 5677824 - DNA, 25 bp, Homo sapien
tggccgggtgcggtggctcatgcct

SEQ ID NO: 5677825 - DNA, 25 bp, Homo sapien
ggccgggtgcggtggctcatgcctg

SEQ ID NO: 5677826 - DNA, 25 bp, Homo sapien
aatatttctttggccgggtgcggtg

SEQ ID NO: 5677827 - DNA, 25 bp, Homo sapien
ttggccgggtgcggtggctcatgcc

SEQ ID NO: 5677828 - DNA, 25 bp, Homo sapien
tttggccgggtgcggtggctcatgc

SEQ ID NO: 5677829 - DNA, 25 bp, Homo sapien
ctggtgaatcacgaggttaggagtt

SEQ ID NO: 5677830 - DNA, 25 bp, Homo sapien
tggtgaatcacgaggttaggagttc

SEQ ID NO: 5677831 - DNA, 25 bp, Homo sapien
aactcctaacctcgtgattcaccag

SEQ ID NO: 5677832 - DNA, 25 bp, Homo sapien
gaactcctaacctcgtgattcacca

SEQ ID NO: 5677833 - DNA, 25 bp, Homo sapien
actaatttgtggatagctatggcaa

SEQ ID NO: 5677834 - DNA, 25 bp, Homo sapien
tactaatttgtggatagctatggca

SEQ ID NO: 5677835 - DNA, 25 bp, Homo sapien
gatagctatggcaagaatagatggc

SEQ ID NO: 5677836 - DNA, 25 bp, Homo sapien
tagctatggcaagaatagatggcat

SEQ ID NO: 5677837 - DNA, 25 bp, Homo sapien
taatttgtggatagctatggcaaga

SEQ ID NO: 5677838 - DNA, 25 bp, Homo sapien
ttgtggatagctatggcaagaatag

SEQ ID NO: 5677839 - DNA, 25 bp, Homo sapien
atctattcttgccatagctatccac

SEQ ID NO: 5677840 - DNA, 25 bp, Homo sapien
tgccatagctatccacaaattagta

SEQ ID NO: 5677841 - DNA, 25 bp, Homo sapien
tattcttgccatagctatccacaaa

SEQ ID NO: 5677842 - DNA, 25 bp, Homo sapien
tgccatctattcttgccatagctat

SEQ ID NO: 5677843 - DNA, 25 bp, Homo sapien
atgccatctattcttgccatagcta

SEQ ID NO: 5677844 - DNA, 25 bp, Homo sapien
cttgccatagctatccacaaattag

SEQ ID NO: 5677845 - DNA, 25 bp, Homo sapien
ggtgatctcgtcaggttctcagagt

SEQ ID NO: 5677846 - DNA, 25 bp, Homo sapien
tcagagtggttgggttggtttttca

SEQ ID NO: 5677847 - DNA, 25 bp, Homo sapien
tctttcccgtgtcctttgccatgag

SEQ ID NO: 5677848 - DNA, 25 bp, Homo sapien
gacctacatgagtaaggtgatctcg

SEQ ID NO: 5677849 - DNA, 25 bp, Homo sapien
tcaattcttgacctctttcccgtgt

SEQ ID NO: 5677850 - DNA, 25 bp, Homo sapien
gattcaattcttgacctctttcccg

SEQ ID NO: 5677851 - DNA, 25 bp, Homo sapien
cgagatcaccttactcatgtaggtc

SEQ ID NO: 5677852 - DNA, 25 bp, Homo sapien
caaaggacacgggaaagaggtcaag

SEQ ID NO: 5677853 - DNA, 25 bp, Homo sapien
tgaaaaaccaacccaaccactctga

SEQ ID NO: 5677854 - DNA, 25 bp, Homo sapien
ctcatggcaaaggacacgggaaaga

SEQ ID NO: 5677855 - DNA, 25 bp, Homo sapien
actctgagaacctgacgagatcacc

SEQ ID NO: 5677856 - DNA, 25 bp, Homo sapien
cacgggaaagaggtcaagaattgaa

SEQ ID NO: 5677857 - DNA, 25 bp, Homo sapien
ggcagtagatctttgcactcctttg

SEQ ID NO: 5677858 - DNA, 25 bp, Homo sapien
tttgcactcctttgtgcaaacagct

SEQ ID NO: 5677859 - DNA, 25 bp, Homo sapien
tccatagtgctttcctactcggtgc

SEQ ID NO: 5677860 - DNA, 25 bp, Homo sapien
cggtgccccttcctgtgcctaggca

SEQ ID NO: 5677861 - DNA, 25 bp, Homo sapien
tagtgctttcctactcggtgcccct

SEQ ID NO: 5677862 - DNA, 25 bp, Homo sapien
gaaccattgtggtgctcctttccat

SEQ ID NO: 5677863 - DNA, 25 bp, Homo sapien
atggaaaggagcaccacaatggttc

SEQ ID NO: 5677864 - DNA, 25 bp, Homo sapien
gaaaggagcaccacaatggttcacc

SEQ ID NO: 5677865 - DNA, 25 bp, Homo sapien
agctgtttgcacaaaggagtgcaaa

SEQ ID NO: 5677866 - DNA, 25 bp, Homo sapien
gggcaccgagtaggaaagcactatg

SEQ ID NO: 5677867 - DNA, 25 bp, Homo sapien
caaaggagtgcaaagatctactgcc

SEQ ID NO: 5677868 - DNA, 25 bp, Homo sapien
gagtaggaaagcactatggaaagga

SEQ ID NO: 5677869 - DNA, 25 bp, Homo sapien
tgaggtgtagctgaggcgatactaa

SEQ ID NO: 5677870 - DNA, 25 bp, Homo sapien
caaggatgaggtgtagctgaggcga

SEQ ID NO: 5677871 - DNA, 25 bp, Homo sapien
ctgcttcaaaaatttggataggcct

SEQ ID NO: 5677872 - DNA, 25 bp, Homo sapien
ttcaaaaatttggataggcctgtgg

SEQ ID NO: 5677873 - DNA, 25 bp, Homo sapien
cttcaaaaatttggataggcctgtg

SEQ ID NO: 5677874 - DNA, 25 bp, Homo sapien
cgatactaagggtggcttgggacat

SEQ ID NO: 5677875 - DNA, 25 bp, Homo sapien
tagtatcgcctcagctacacctcat

SEQ ID NO: 5677876 - DNA, 25 bp, Homo sapien
ccacaggcctatccaaatttttgaa

SEQ ID NO: 5677877 - DNA, 25 bp, Homo sapien
aggcctatccaaatttttgaagcag

SEQ ID NO: 5677878 - DNA, 25 bp, Homo sapien
cacaggcctatccaaatttttgaag

SEQ ID NO: 5677879 - DNA, 25 bp, Homo sapien
atgtcccaagccacccttagtatcg

SEQ ID NO: 5677880 - DNA, 25 bp, Homo sapien
ttagtatcgcctcagctacacctca

SEQ ID NO: 5677881 - DNA, 25 bp, Homo sapien
tccaagtggcctagtgaggacgctg

SEQ ID NO: 5677882 - DNA, 25 bp, Homo sapien
acgctggtggagacgttggttgcca

SEQ ID NO: 5677883 - DNA, 25 bp, Homo sapien
tgtgcatccaagtggcctagtgagg

SEQ ID NO: 5677884 - DNA, 25 bp, Homo sapien
gcctagtgaggacgctggtggagac

SEQ ID NO: 5677885 - DNA, 25 bp, Homo sapien
aggtctgtgcatccaagtggcctag

SEQ ID NO: 5677886 - DNA, 25 bp, Homo sapien
catccaagtggcctagtgaggacgc

SEQ ID NO: 5677887 - DNA, 25 bp, Homo sapien
tgctgctcagggcattggctctgct

SEQ ID NO: 5677888 - DNA, 25 bp, Homo sapien
agcagagccaatgccctgagcagca

SEQ ID NO: 5677889 - DNA, 25 bp, Homo sapien
tcactaggccacttggatgcacaga

SEQ ID NO: 5677890 - DNA, 25 bp, Homo sapien
cagcgtcctcactaggccacttgga

SEQ ID NO: 5677891 - DNA, 25 bp, Homo sapien
tggcaaccaacgtctccaccagcgt

SEQ ID NO: 5677892 - DNA, 25 bp, Homo sapien
cctcactaggccacttggatgcaca

SEQ ID NO: 5677893 - DNA, 25 bp, Homo sapien
gcgtcctcactaggccacttggatg

SEQ ID NO: 5677894 - DNA, 25 bp, Homo sapien
ctaggccacttggatgcacagacct

SEQ ID NO: 5677895 - DNA, 25 bp, Homo sapien
ggtgtgcgcagatagagcggctggc

SEQ ID NO: 5677896 - DNA, 25 bp, Homo sapien
caggtctctgtgaggcaggggagga

SEQ ID NO: 5677897 - DNA, 25 bp, Homo sapien
ggtgggtgcaggtctctgtgaggca

SEQ ID NO: 5677898 - DNA, 25 bp, Homo sapien
gcaggtgtgcgcagatagagcggct

SEQ ID NO: 5677899 - DNA, 25 bp, Homo sapien
gcggcggtgggtgcaggtctctgtg

SEQ ID NO: 5677900 - DNA, 25 bp, Homo sapien
gtgcgcagatagagcggctggcggc

SEQ ID NO: 5677901 - DNA, 25 bp, Homo sapien
tgcctcacagagacctgcacccacc

SEQ ID NO: 5677902 - DNA, 25 bp, Homo sapien
tcacagagacctgcacccaccgccg

SEQ ID NO: 5677903 - DNA, 25 bp, Homo sapien
gccgctctatctgcgcacacctgct

SEQ ID NO: 5677904 - DNA, 25 bp, Homo sapien
tcctcccctgcctcacagagacctg

SEQ ID NO: 5677905 - DNA, 25 bp, Homo sapien
cagccgctctatctgcgcacacctg

SEQ ID NO: 5677906 - DNA, 25 bp, Homo sapien
gccgccagccgctctatctgcgcac

SEQ ID NO: 5677907 - DNA, 25 bp, Homo sapien
ggtgggtgcaggtctctgtgaggca

SEQ ID NO: 5677908 - DNA, 25 bp, Homo sapien
catgggcagaacaggctccagttgt

SEQ ID NO: 5677909 - DNA, 25 bp, Homo sapien
gcaggtgtgcgcagatagagcggct

SEQ ID NO: 5677910 - DNA, 25 bp, Homo sapien
cacaggcagcaggtgtgcgcagata

SEQ ID NO: 5677911 - DNA, 25 bp, Homo sapien
gcggcggtgggtgcaggtctctgtg

SEQ ID NO: 5677912 - DNA, 25 bp, Homo sapien
gtgcgcagatagagcggctggcggc

SEQ ID NO: 5677913 - DNA, 25 bp, Homo sapien
gccgccagccgctctatctgcgcac

SEQ ID NO: 5677914 - DNA, 25 bp, Homo sapien
tcctcccctgcctcacagagacctg

SEQ ID NO: 5677915 - DNA, 25 bp, Homo sapien
agccgctctatctgcgcacacctgc

SEQ ID NO: 5677916 - DNA, 25 bp, Homo sapien
aactggagcctgttctgcccatgct

SEQ ID NO: 5677917 - DNA, 25 bp, Homo sapien
tcacagagacctgcacccaccgccg

SEQ ID NO: 5677918 - DNA, 25 bp, Homo sapien
tatctgcgcacacctgctgcctgtg

SEQ ID NO: 5677919 - DNA, 25 bp, Homo sapien
cctgtgaatgccgatgggagaattc

SEQ ID NO: 5677920 - DNA, 25 bp, Homo sapien
ctgtgaatgccgatgggagaattcc

SEQ ID NO: 5677921 - DNA, 25 bp, Homo sapien
tgtgaatgccgatgggagaattccg

SEQ ID NO: 5677922 - DNA, 25 bp, Homo sapien
gtgaatgccgatgggagaattccgc

SEQ ID NO: 5677923 - DNA, 25 bp, Homo sapien
tgaatgccgatgggagaattccgcc

SEQ ID NO: 5677924 - DNA, 25 bp, Homo sapien
gaatgccgatgggagaattccgcca

SEQ ID NO: 5677925 - DNA, 25 bp, Homo sapien
cggaattctcccatcggcattcaca

SEQ ID NO: 5677926 - DNA, 25 bp, Homo sapien
ggaattctcccatcggcattcacag

SEQ ID NO: 5677927 - DNA, 25 bp, Homo sapien
gcggaattctcccatcggcattcac

SEQ ID NO: 5677928 - DNA, 25 bp, Homo sapien
gaattctcccatcggcattcacagg

SEQ ID NO: 5677929 - DNA, 25 bp, Homo sapien
ggcggaattctcccatcggcattca

SEQ ID NO: 5677930 - DNA, 25 bp, Homo sapien
tggcggaattctcccatcggcattc

SEQ ID NO: 5677931 - DNA, 25 bp, Homo sapien
ggcagaacaggctccagttgtggtc

SEQ ID NO: 5677932 - DNA, 25 bp, Homo sapien
ctgtgaatgccgatgggagaattcc

SEQ ID NO: 5677933 - DNA, 25 bp, Homo sapien
cctgtgaatgccgatgggagaattc

SEQ ID NO: 5677934 - DNA, 25 bp, Homo sapien
tgtgaatgccgatgggagaattccg

SEQ ID NO: 5677935 - DNA, 25 bp, Homo sapien
gtgaatgccgatgggagaattccgc

SEQ ID NO: 5677936 - DNA, 25 bp, Homo sapien
gaatgccgatgggagaattccgcca

SEQ ID NO: 5677937 - DNA, 25 bp, Homo sapien
cggaattctcccatcggcattcaca

SEQ ID NO: 5677938 - DNA, 25 bp, Homo sapien
gaccacaactggagcctgttctgcc

SEQ ID NO: 5677939 - DNA, 25 bp, Homo sapien
ggaattctcccatcggcattcacag

SEQ ID NO: 5677940 - DNA, 25 bp, Homo sapien
gcggaattctcccatcggcattcac

SEQ ID NO: 5677941 - DNA, 25 bp, Homo sapien
gaattctcccatcggcattcacagg

SEQ ID NO: 5677942 - DNA, 25 bp, Homo sapien
tggcggaattctcccatcggcattc

SEQ ID NO: 5677943 - DNA, 25 bp, Homo sapien
tggtttctgtttgggtcagtaaagc

SEQ ID NO: 5677944 - DNA, 25 bp, Homo sapien
cagttggtttctgtttgggtcagta

SEQ ID NO: 5677945 - DNA, 25 bp, Homo sapien
tcatgggttctcagttggtttctgt

SEQ ID NO: 5677946 - DNA, 25 bp, Homo sapien
tatccctcttttccacttattacta

SEQ ID NO: 5677947 - DNA, 25 bp, Homo sapien
tagtcatgggttctcagttggtttc

SEQ ID NO: 5677948 - DNA, 25 bp, Homo sapien
ctcagttggtttctgtttgggtcag

SEQ ID NO: 5677949 - DNA, 25 bp, Homo sapien
tactgacccaaacagaaaccaactg

SEQ ID NO: 5677950 - DNA, 25 bp, Homo sapien
gctttactgacccaaacagaaacca

SEQ ID NO: 5677951 - DNA, 25 bp, Homo sapien
agaaaccaactgagaacccatgact

SEQ ID NO: 5677952 - DNA, 25 bp, Homo sapien
gaaaccaactgagaacccatgacta

SEQ ID NO: 5677953 - DNA, 25 bp, Homo sapien
tagtaataagtggaaaagagggata

SEQ ID NO: 5677954 - DNA, 25 bp, Homo sapien
caaacagaaaccaactgagaaccca

SEQ ID NO: 5677955 - DNA, 25 bp, Homo sapien
cctcgtggctaatgtccaagttgct

SEQ ID NO: 5677956 - DNA, 25 bp, Homo sapien
tatactttgagaccagagcgggtgg

SEQ ID NO: 5677957 - DNA, 25 bp, Homo sapien
taatggctttgtggccgtggtcata

SEQ ID NO: 5677958 - DNA, 25 bp, Homo sapien
gttgctgagcatatactttgagacc

SEQ ID NO: 5677959 - DNA, 25 bp, Homo sapien
cgtggtcataaagcgaaatgtgcct

SEQ ID NO: 5677960 - DNA, 25 bp, Homo sapien
aaatgtgcctcgtggctaatgtcca

SEQ ID NO: 5677961 - DNA, 25 bp, Homo sapien
ggtctcaaagtatatgctcagcaac

SEQ ID NO: 5677962 - DNA, 25 bp, Homo sapien
tggacattagccacgaggcacattt

SEQ ID NO: 5677963 - DNA, 25 bp, Homo sapien
agcaacttggacattagccacgagg

SEQ ID NO: 5677964 - DNA, 25 bp, Homo sapien
tatgaccacggccacaaagccatta

SEQ ID NO: 5677965 - DNA, 25 bp, Homo sapien
ggcacatttcgctttatgaccacgg

SEQ ID NO: 5677966 - DNA, 25 bp, Homo sapien
acccgctctggtctcaaagtatatg

SEQ ID NO: 5677967 - DNA, 25 bp, Homo sapien
cagaagcttggaaaggtaatgctat

SEQ ID NO: 5677968 - DNA, 25 bp, Homo sapien
agaagcttggaaaggtaatgctatg

SEQ ID NO: 5677969 - DNA, 25 bp, Homo sapien
aatgctatgatagcatcagacaaac

SEQ ID NO: 5677970 - DNA, 25 bp, Homo sapien
gcaaaagatggaccagaagcttgga

SEQ ID NO: 5677971 - DNA, 25 bp, Homo sapien
tagcaaaagatggaccagaagcttg

SEQ ID NO: 5677972 - DNA, 25 bp, Homo sapien
atgctatgatagcatcagacaaacc

SEQ ID NO: 5677973 - DNA, 25 bp, Homo sapien
tccaagcttctggtccatcttttgc

SEQ ID NO: 5677974 - DNA, 25 bp, Homo sapien
atagcattacctttccaagcttctg

SEQ ID NO: 5677975 - DNA, 25 bp, Homo sapien
ccaagcttctggtccatcttttgct

SEQ ID NO: 5677976 - DNA, 25 bp, Homo sapien
ggtttgtctgatgctatcatagcat

SEQ ID NO: 5677977 - DNA, 25 bp, Homo sapien
caagcttctggtccatcttttgcta

SEQ ID NO: 5677978 - DNA, 25 bp, Homo sapien
catagcattacctttccaagcttct

SEQ ID NO: 5677979 - DNA, 25 bp, Homo sapien
tgttgcctagtcacagcacacccag

SEQ ID NO: 5677980 - DNA, 25 bp, Homo sapien
gggtgcaatttaggtattttcctga

SEQ ID NO: 5677981 - DNA, 25 bp, Homo sapien
accttatctgttgcctagtcacagc

SEQ ID NO: 5677982 - DNA, 25 bp, Homo sapien
tatctgttgcctagtcacagcacac

SEQ ID NO: 5677983 - DNA, 25 bp, Homo sapien
cactgtgtttgggatacttggtggg

SEQ ID NO: 5677984 - DNA, 25 bp, Homo sapien
ggtgcaatttaggtattttcctgaa

SEQ ID NO: 5677985 - DNA, 25 bp, Homo sapien
tcaggaaaatacctaaattgcaccc

SEQ ID NO: 5677986 - DNA, 25 bp, Homo sapien
tgtgctgtgactaggcaacagataa

SEQ ID NO: 5677987 - DNA, 25 bp, Homo sapien
gctgtgactaggcaacagataaggt

SEQ ID NO: 5677988 - DNA, 25 bp, Homo sapien
ttcaggaaaatacctaaattgcacc

SEQ ID NO: 5677989 - DNA, 25 bp, Homo sapien
ctgggtgtgctgtgactaggcaaca

SEQ ID NO: 5677990 - DNA, 25 bp, Homo sapien
cccaccaagtatcccaaacacagtg

SEQ ID NO: 5677991 - DNA, 25 bp, Homo sapien
gctgcagctttaatttgctctatga

SEQ ID NO: 5677992 - DNA, 25 bp, Homo sapien
tccgcgcagagctcatttgttagcg

SEQ ID NO: 5677993 - DNA, 25 bp, Homo sapien
ttgaggttgtccgtggagctgcagc

SEQ ID NO: 5677994 - DNA, 25 bp, Homo sapien
tgctcaaggatttccgcgcagagct

SEQ ID NO: 5677995 - DNA, 25 bp, Homo sapien
ggatttccgcgcagagctcatttgt

SEQ ID NO: 5677996 - DNA, 25 bp, Homo sapien
catttgttagcgttgaggttgtccg

SEQ ID NO: 5677997 - DNA, 25 bp, Homo sapien
caaatgagctctgcgcggaaatcct

SEQ ID NO: 5677998 - DNA, 25 bp, Homo sapien
cggacaacctcaacgctaacaaatg

SEQ ID NO: 5677999 - DNA, 25 bp, Homo sapien
gctaacaaatgagctctgcgcggaa

SEQ ID NO: 5678000 - DNA, 25 bp, Homo sapien
tcatagagcaaattaaagctgcagc

SEQ ID NO: 5678001 - DNA, 25 bp, Homo sapien
agctctgcgcggaaatccttgagca

SEQ ID NO: 5678002 - DNA, 25 bp, Homo sapien
tcaacgctaacaaatgagctctgcg

SEQ ID NO: 5678003 - DNA, 25 bp, Homo sapien
gtgatgctgggcggtcttctgaaca

SEQ ID NO: 5678004 - DNA, 25 bp, Homo sapien
gtgggtgatgctgggcggtcttctg

SEQ ID NO: 5678005 - DNA, 25 bp, Homo sapien
agtgggtgatgctgggcggtcttct

SEQ ID NO: 5678006 - DNA, 25 bp, Homo sapien
tgttcagaagaccgcccagcatcac

SEQ ID NO: 5678007 - DNA, 25 bp, Homo sapien
agaagaccgcccagcatcacccact

SEQ ID NO: 5678008 - DNA, 25 bp, Homo sapien
cagaagaccgcccagcatcacccac

SEQ ID NO: 5678009 - DNA, 25 bp, Homo sapien
taaatgtgggctccaagtgggtgat

SEQ ID NO: 5678010 - DNA, 25 bp, Homo sapien
gatgctgggcggtcttctgaacaag

SEQ ID NO: 5678011 - DNA, 25 bp, Homo sapien
tccaagtgggtgatgctgggcggtc

SEQ ID NO: 5678012 - DNA, 25 bp, Homo sapien
tgctgggcggtcttctgaacaagaa

SEQ ID NO: 5678013 - DNA, 25 bp, Homo sapien
tcttctgaacaagaagttggctggg

SEQ ID NO: 5678014 - DNA, 25 bp, Homo sapien
cctctgggtggataaatgtgggctc

SEQ ID NO: 5678015 - DNA, 25 bp, Homo sapien
tcacccacttggagcccacatttat

SEQ ID NO: 5678016 - DNA, 25 bp, Homo sapien
tggagcccacatttatccacccaga

SEQ ID NO: 5678017 - DNA, 25 bp, Homo sapien
ttgttcagaagaccgcccagcatca

SEQ ID NO: 5678018 - DNA, 25 bp, Homo sapien
ttcttgttcagaagaccgcccagca

SEQ ID NO: 5678019 - DNA, 25 bp, Homo sapien
gagcccacatttatccacccagagg

SEQ ID NO: 5678020 - DNA, 25 bp, Homo sapien
accccagccaacttcttgttcagaa

SEQ ID NO: 5678021 - DNA, 25 bp, Homo sapien
ctttcattcatacacagctttatgg

SEQ ID NO: 5678022 - DNA, 25 bp, Homo sapien
tgactgccggaaacattttgttctg

SEQ ID NO: 5678023 - DNA, 25 bp, Homo sapien
tctgaaaccccatcgcccagtgatg

SEQ ID NO: 5678024 - DNA, 25 bp, Homo sapien
tatggtctgaaaccccatcgcccag

SEQ ID NO: 5678025 - DNA, 25 bp, Homo sapien
catcgcccagtgatgactgccggaa

SEQ ID NO: 5678026 - DNA, 25 bp, Homo sapien
ccagtgatgactgccggaaacattt

SEQ ID NO: 5678027 - DNA, 25 bp, Homo sapien
cagaacaaaatgtttccggcagtca

SEQ ID NO: 5678028 - DNA, 25 bp, Homo sapien
tccggcagtcatcactgggcgatgg

SEQ ID NO: 5678029 - DNA, 25 bp, Homo sapien
aaatgtttccggcagtcatcactgg

SEQ ID NO: 5678030 - DNA, 25 bp, Homo sapien
ccataaagctgtgtatgaatgaaag

SEQ ID NO: 5678031 - DNA, 25 bp, Homo sapien
tgtttccggcagtcatcactgggcg

SEQ ID NO: 5678032 - DNA, 25 bp, Homo sapien
ctgggcgatggggtttcagaccata

SEQ ID NO: 5678033 - DNA, 25 bp, Homo sapien
gtgacctgcatacctccagagtgct

SEQ ID NO: 5678034 - DNA, 25 bp, Homo sapien
agtgacctgcatacctccagagtgc

SEQ ID NO: 5678035 - DNA, 25 bp, Homo sapien
caagtgacctgcatacctccagagt

SEQ ID NO: 5678036 - DNA, 25 bp, Homo sapien
tgacctgcatacctccagagtgctg

SEQ ID NO: 5678037 - DNA, 25 bp, Homo sapien
aagtgacctgcatacctccagagtg

SEQ ID NO: 5678038 - DNA, 25 bp, Homo sapien
tcaagtgacctgcatacctccagag

SEQ ID NO: 5678039 - DNA, 25 bp, Homo sapien
ctctggaggtatgcaggtcacttga

SEQ ID NO: 5678040 - DNA, 25 bp, Homo sapien
gcactctggaggtatgcaggtcact

SEQ ID NO: 5678041 - DNA, 25 bp, Homo sapien
cagcactctggaggtatgcaggtca

SEQ ID NO: 5678042 - DNA, 25 bp, Homo sapien
agcactctggaggtatgcaggtcac

SEQ ID NO: 5678043 - DNA, 25 bp, Homo sapien
cactctggaggtatgcaggtcactt

SEQ ID NO: 5678044 - DNA, 25 bp, Homo sapien
actctggaggtatgcaggtcacttg

SEQ ID NO: 5678045 - DNA, 25 bp, Homo sapien
tacgggcgcacgccaccatacccag

SEQ ID NO: 5678046 - DNA, 25 bp, Homo sapien
acgggcgcacgccaccatacccagc

SEQ ID NO: 5678047 - DNA, 25 bp, Homo sapien
ctacgggcgcacgccaccataccca

SEQ ID NO: 5678048 - DNA, 25 bp, Homo sapien
actacgggcgcacgccaccataccc

SEQ ID NO: 5678049 - DNA, 25 bp, Homo sapien
gggtatggtggcgtgcgcccgtagt

SEQ ID NO: 5678050 - DNA, 25 bp, Homo sapien
ctgggtatggtggcgtgcgcccgta

SEQ ID NO: 5678051 - DNA, 25 bp, Homo sapien
tgggtatggtggcgtgcgcccgtag

SEQ ID NO: 5678052 - DNA, 25 bp, Homo sapien
gctgggtatggtggcgtgcgcccgt

SEQ ID NO: 5678053 - DNA, 25 bp, Homo sapien
actaggctgcttgggtcggtcacag

SEQ ID NO: 5678054 - DNA, 25 bp, Homo sapien
gcccagtttcctcttgaattggtat

SEQ ID NO: 5678055 - DNA, 25 bp, Homo sapien
gactaggctgcttgggtcggtcaca

SEQ ID NO: 5678056 - DNA, 25 bp, Homo sapien
tgaattggtatctttgactaggctg

SEQ ID NO: 5678057 - DNA, 25 bp, Homo sapien
cctcttgaattggtatctttgacta

SEQ ID NO: 5678058 - DNA, 25 bp, Homo sapien
tgcttgggtcggtcacaggctggct

SEQ ID NO: 5678059 - DNA, 25 bp, Homo sapien
cagcctagtcaaagataccaattca

SEQ ID NO: 5678060 - DNA, 25 bp, Homo sapien
tagtcaaagataccaattcaagagg

SEQ ID NO: 5678061 - DNA, 25 bp, Homo sapien
tgtgaccgacccaagcagcctagtc

SEQ ID NO: 5678062 - DNA, 25 bp, Homo sapien
gcctagtcaaagataccaattcaag

SEQ ID NO: 5678063 - DNA, 25 bp, Homo sapien
ctgtgaccgacccaagcagcctagt

SEQ ID NO: 5678064 - DNA, 25 bp, Homo sapien
ataccaattcaagaggaaactgggc

SEQ ID NO: 5678065 - DNA, 25 bp, Homo sapien
acagaggatctctcggtgtgtgttt

SEQ ID NO: 5678066 - DNA, 25 bp, Homo sapien
agctgtgtgcatttgtacacagagg

SEQ ID NO: 5678067 - DNA, 25 bp, Homo sapien
cagaggatctctcggtgtgtgtttt

SEQ ID NO: 5678068 - DNA, 25 bp, Homo sapien
aggatctctcggtgtgtgttttttt

SEQ ID NO: 5678069 - DNA, 25 bp, Homo sapien
ggatctctcggtgtgtgtttttttg

SEQ ID NO: 5678070 - DNA, 25 bp, Homo sapien
gaggatctctcggtgtgtgtttttt

SEQ ID NO: 5678071 - DNA, 25 bp, Homo sapien
cctctgtgtacaaatgcacacagct

SEQ ID NO: 5678072 - DNA, 25 bp, Homo sapien
aaaaaacacacaccgagagatcctc

SEQ ID NO: 5678073 - DNA, 25 bp, Homo sapien
aaacacacaccgagagatcctctgt

SEQ ID NO: 5678074 - DNA, 25 bp, Homo sapien
caaaaaaacacacaccgagagatcc

SEQ ID NO: 5678075 - DNA, 25 bp, Homo sapien
aaaaaaacacacaccgagagatcct

SEQ ID NO: 5678076 - DNA, 25 bp, Homo sapien
aaaacacacaccgagagatcctctg

SEQ ID NO: 5678077 - DNA, 25 bp, Homo sapien
ggaattgacgtccatggttcacaaa

SEQ ID NO: 5678078 - DNA, 25 bp, Homo sapien
gacacacatacaggggtgttcttta

SEQ ID NO: 5678079 - DNA, 25 bp, Homo sapien
aggaattgacgtccatggttcacaa

SEQ ID NO: 5678080 - DNA, 25 bp, Homo sapien
cacatacaggggtgttctttagaag

SEQ ID NO: 5678081 - DNA, 25 bp, Homo sapien
caggaattgacgtccatggttcaca

SEQ ID NO: 5678082 - DNA, 25 bp, Homo sapien
gaattgacgtccatggttcacaaag

SEQ ID NO: 5678083 - DNA, 25 bp, Homo sapien
taaagaacacccctgtatgtgtgtc

SEQ ID NO: 5678084 - DNA, 25 bp, Homo sapien
tttgtgaaccatggacgtcaattcc

SEQ ID NO: 5678085 - DNA, 25 bp, Homo sapien
ctttgtgaaccatggacgtcaattc

SEQ ID NO: 5678086 - DNA, 25 bp, Homo sapien
tgtgaaccatggacgtcaattcctg

SEQ ID NO: 5678087 - DNA, 25 bp, Homo sapien
cttctaaagaacacccctgtatgtg

SEQ ID NO: 5678088 - DNA, 25 bp, Homo sapien
acacaacttctaaagaacacccctg

SEQ ID NO: 5678089 - DNA, 25 bp, Homo sapien
tgtcccaaacgttttatgctagtgg

SEQ ID NO: 5678090 - DNA, 25 bp, Homo sapien
tatgctagtgggacaagtaaggaat

SEQ ID NO: 5678091 - DNA, 25 bp, Homo sapien
ttatgctagtgggacaagtaaggaa

SEQ ID NO: 5678092 - DNA, 25 bp, Homo sapien
aagtcagaggtggcgcccttcaaag

SEQ ID NO: 5678093 - DNA, 25 bp, Homo sapien
agtcagaggtggcgcccttcaaagg

SEQ ID NO: 5678094 - DNA, 25 bp, Homo sapien
tgctagtgggacaagtaaggaatgt

SEQ ID NO: 5678095 - DNA, 25 bp, Homo sapien
ttccttacttgtcccactagcataa

SEQ ID NO: 5678096 - DNA, 25 bp, Homo sapien
cattccttacttgtcccactagcat

SEQ ID NO: 5678097 - DNA, 25 bp, Homo sapien
cctttgaagggcgccacctctgact

SEQ ID NO: 5678098 - DNA, 25 bp, Homo sapien
ccactagcataaaacgtttgggaca

SEQ ID NO: 5678099 - DNA, 25 bp, Homo sapien
ctttgaagggcgccacctctgactt

SEQ ID NO: 5678100 - DNA, 25 bp, Homo sapien
acattccttacttgtcccactagca

SEQ ID NO: 5678101 - DNA, 25 bp, Homo sapien
tgttgcacgatggtccagggaaaga

SEQ ID NO: 5678102 - DNA, 25 bp, Homo sapien
tgcacgatggtccagggaaagaagt

SEQ ID NO: 5678103 - DNA, 25 bp, Homo sapien
ttggttggcttgaagaggcactatg

SEQ ID NO: 5678104 - DNA, 25 bp, Homo sapien
agaagtggctgtaacggaattattt

SEQ ID NO: 5678105 - DNA, 25 bp, Homo sapien
tgtgttgcacgatggtccagggaaa

SEQ ID NO: 5678106 - DNA, 25 bp, Homo sapien
tggttggcttgaagaggcactatgt

SEQ ID NO: 5678107 - DNA, 25 bp, Homo sapien
catagtgcctcttcaagccaaccaa

SEQ ID NO: 5678108 - DNA, 25 bp, Homo sapien
aaataattccgttacagccacttct

SEQ ID NO: 5678109 - DNA, 25 bp, Homo sapien
tttccctggaccatcgtgcaacaca

SEQ ID NO: 5678110 - DNA, 25 bp, Homo sapien
acttctttccctggaccatcgtgca

SEQ ID NO: 5678111 - DNA, 25 bp, Homo sapien
acatagtgcctcttcaagccaacca

SEQ ID NO: 5678112 - DNA, 25 bp, Homo sapien
tctttccctggaccatcgtgcaaca

SEQ ID NO: 5678113 - DNA, 25 bp, Homo sapien
gggcagccagcttctcggtatagtg

SEQ ID NO: 5678114 - DNA, 25 bp, Homo sapien
cagccagcttctcggtatagtgaga

SEQ ID NO: 5678115 - DNA, 25 bp, Homo sapien
cagcttctcggtatagtgagaaatc

SEQ ID NO: 5678116 - DNA, 25 bp, Homo sapien
aatctagcatggccctcagagccag

SEQ ID NO: 5678117 - DNA, 25 bp, Homo sapien
tcggtatagtgagaaatctagcatg

SEQ ID NO: 5678118 - DNA, 25 bp, Homo sapien
tctcggtatagtgagaaatctagca

SEQ ID NO: 5678119 - DNA, 25 bp, Homo sapien
tgcaaggcatgccttaggatttggt

SEQ ID NO: 5678120 - DNA, 25 bp, Homo sapien
caaggcatgccttaggatttggttt

SEQ ID NO: 5678121 - DNA, 25 bp, Homo sapien
gcaaggcatgccttaggatttggtt

SEQ ID NO: 5678122 - DNA, 25 bp, Homo sapien
aaggcatgccttaggatttggttta

SEQ ID NO: 5678123 - DNA, 25 bp, Homo sapien
accaaatcctaaggcatgccttgca

SEQ ID NO: 5678124 - DNA, 25 bp, Homo sapien
aaccaaatcctaaggcatgccttgc

SEQ ID NO: 5678125 - DNA, 25 bp, Homo sapien
taaaccaaatcctaaggcatgcctt

SEQ ID NO: 5678126 - DNA, 25 bp, Homo sapien
aaaccaaatcctaaggcatgccttg

SEQ ID NO: 5678127 - DNA, 25 bp, Homo sapien
gatttctcactataccgagaagctg

SEQ ID NO: 5678128 - DNA, 25 bp, Homo sapien
tcactataccgagaagctggctgcc

SEQ ID NO: 5678129 - DNA, 25 bp, Homo sapien
tctcactataccgagaagctggctg

SEQ ID NO: 5678130 - DNA, 25 bp, Homo sapien
catgctagatttctcactataccga

SEQ ID NO: 5678131 - DNA, 25 bp, Homo sapien
gctagatttctcactataccgagaa

SEQ ID NO: 5678132 - DNA, 25 bp, Homo sapien
ctggctctgagggccatgctagatt

SEQ ID NO: 5678133 - DNA, 25 bp, Homo sapien
tttttagctagaggggcctgagcta

SEQ ID NO: 5678134 - DNA, 25 bp, Homo sapien
tctgttctttttagctagaggggcc

SEQ ID NO: 5678135 - DNA, 25 bp, Homo sapien
cacctctgttctttttagctagagg

SEQ ID NO: 5678136 - DNA, 25 bp, Homo sapien
tctttttagctagaggggcctgagc

SEQ ID NO: 5678137 - DNA, 25 bp, Homo sapien
acctctgttctttttagctagaggg

SEQ ID NO: 5678138 - DNA, 25 bp, Homo sapien
tgggcagctgcttccgcactgtcct

SEQ ID NO: 5678139 - DNA, 25 bp, Homo sapien
caggcccctctagctaaaaagaaca

SEQ ID NO: 5678140 - DNA, 25 bp, Homo sapien
cctctagctaaaaagaacagaggtg

SEQ ID NO: 5678141 - DNA, 25 bp, Homo sapien
gctcaggcccctctagctaaaaaga

SEQ ID NO: 5678142 - DNA, 25 bp, Homo sapien
ggcccctctagctaaaaagaacaga

SEQ ID NO: 5678143 - DNA, 25 bp, Homo sapien
aggacagtgcggaagcagctgccca

SEQ ID NO: 5678144 - DNA, 25 bp, Homo sapien
tagctcaggcccctctagctaaaaa

SEQ ID NO: 5678145 - DNA, 25 bp, Homo sapien
ttcagcagtggctccgatttcacca

SEQ ID NO: 5678146 - DNA, 25 bp, Homo sapien
cagtggctccgatttcaccaccatt

SEQ ID NO: 5678147 - DNA, 25 bp, Homo sapien
gccgttgagtcatgatctgcctctt

SEQ ID NO: 5678148 - DNA, 25 bp, Homo sapien
gggcaagccgttgagtcatgatctg

SEQ ID NO: 5678149 - DNA, 25 bp, Homo sapien
caagccgttgagtcatgatctgcct

SEQ ID NO: 5678150 - DNA, 25 bp, Homo sapien
ttgagtcatgatctgcctctttgct

SEQ ID NO: 5678151 - DNA, 25 bp, Homo sapien
agatcatgactcaacggcttgcccc

SEQ ID NO: 5678152 - DNA, 25 bp, Homo sapien
agcaaagaggcagatcatgactcaa

SEQ ID NO: 5678153 - DNA, 25 bp, Homo sapien
aagaggcagatcatgactcaacggc

SEQ ID NO: 5678154 - DNA, 25 bp, Homo sapien
tggtgaaatcggagccactgctgaa

SEQ ID NO: 5678155 - DNA, 25 bp, Homo sapien
ggcagatcatgactcaacggcttgc

SEQ ID NO: 5678156 - DNA, 25 bp, Homo sapien
aatggtggtgaaatcggagccactg

SEQ ID NO: 5678157 - DNA, 25 bp, Homo sapien
cactcctgagttcccatgttgtagc

SEQ ID NO: 5678158 - DNA, 25 bp, Homo sapien
cctgagttcccatgttgtagctaga

SEQ ID NO: 5678159 - DNA, 25 bp, Homo sapien
gagttcccatgttgtagctagatat

SEQ ID NO: 5678160 - DNA, 25 bp, Homo sapien
tcctgagttcccatgttgtagctag

SEQ ID NO: 5678161 - DNA, 25 bp, Homo sapien
tgagttcccatgttgtagctagata

SEQ ID NO: 5678162 - DNA, 25 bp, Homo sapien
ctcctgagttcccatgttgtagcta

SEQ ID NO: 5678163 - DNA, 25 bp, Homo sapien
gccagtgggatcacagcgcccccag

SEQ ID NO: 5678164 - DNA, 25 bp, Homo sapien
ccagtgggatcacagcgcccccagc

SEQ ID NO: 5678165 - DNA, 25 bp, Homo sapien
ggccagtgggatcacagcgccccca

SEQ ID NO: 5678166 - DNA, 25 bp, Homo sapien
tgggggcgctgtgatcccactggcc

SEQ ID NO: 5678167 - DNA, 25 bp, Homo sapien
gctgggggcgctgtgatcccactgg

SEQ ID NO: 5678168 - DNA, 25 bp, Homo sapien
ctgggggcgctgtgatcccactggc

SEQ ID NO: 5678169 - DNA, 25 bp, Homo sapien
gctacaacatgggaactcaggagtg

SEQ ID NO: 5678170 - DNA, 25 bp, Homo sapien
atatctagctacaacatgggaactc

SEQ ID NO: 5678171 - DNA, 25 bp, Homo sapien
tatctagctacaacatgggaactca

SEQ ID NO: 5678172 - DNA, 25 bp, Homo sapien
tagctacaacatgggaactcaggag

SEQ ID NO: 5678173 - DNA, 25 bp, Homo sapien
ctagctacaacatgggaactcagga

SEQ ID NO: 5678174 - DNA, 25 bp, Homo sapien
tctagctacaacatgggaactcagg

SEQ ID NO: 5678175 - DNA, 25 bp, Homo sapien
gaagtccagactcacaagccccttg

SEQ ID NO: 5678176 - DNA, 25 bp, Homo sapien
aagtccagactcacaagccccttga

SEQ ID NO: 5678177 - DNA, 25 bp, Homo sapien
cttgaagacctggtcctatcctcct

SEQ ID NO: 5678178 - DNA, 25 bp, Homo sapien
ttgaagacctggtcctatcctcctc

SEQ ID NO: 5678179 - DNA, 25 bp, Homo sapien
ggaagtccagactcacaagcccctt

SEQ ID NO: 5678180 - DNA, 25 bp, Homo sapien
aggaggataggaccaggtcttcaag

SEQ ID NO: 5678181 - DNA, 25 bp, Homo sapien
aaggggcttgtgagtctggacttcc

SEQ ID NO: 5678182 - DNA, 25 bp, Homo sapien
tcaaggggcttgtgagtctggactt

SEQ ID NO: 5678183 - DNA, 25 bp, Homo sapien
caaggggcttgtgagtctggacttc

SEQ ID NO: 5678184 - DNA, 25 bp, Homo sapien
gaggaggataggaccaggtcttcaa

SEQ ID NO: 5678185 - DNA, 25 bp, Homo sapien
aaaattcaacgactgtgtaagtagc

SEQ ID NO: 5678186 - DNA, 25 bp, Homo sapien
gatataaagttcatgtcacttaaaa

SEQ ID NO: 5678187 - DNA, 25 bp, Homo sapien
gtcacttaaaattcaacgactgtgt

SEQ ID NO: 5678188 - DNA, 25 bp, Homo sapien
cacttaaaattcaacgactgtgtaa

SEQ ID NO: 5678189 - DNA, 25 bp, Homo sapien
tactaggtgatataaagttcatgtc

SEQ ID NO: 5678190 - DNA, 25 bp, Homo sapien
gattgtactaggtgatataaagttc

SEQ ID NO: 5678191 - DNA, 25 bp, Homo sapien
tgacatgaactttatatcacctagt

SEQ ID NO: 5678192 - DNA, 25 bp, Homo sapien
taagtgacatgaactttatatcacc

SEQ ID NO: 5678193 - DNA, 25 bp, Homo sapien
acacagtcgttgaattttaagtgac

SEQ ID NO: 5678194 - DNA, 25 bp, Homo sapien
gaactttatatcacctagtacaatc

SEQ ID NO: 5678195 - DNA, 25 bp, Homo sapien
gctacttacacagtcgttgaatttt

SEQ ID NO: 5678196 - DNA, 25 bp, Homo sapien
catgaactttatatcacctagtaca

SEQ ID NO: 5678197 - DNA, 25 bp, Homo sapien
ctgcatcctccaccggttgaagcaa

SEQ ID NO: 5678198 - DNA, 25 bp, Homo sapien
actgcatcctccaccggttgaagca

SEQ ID NO: 5678199 - DNA, 25 bp, Homo sapien
tgcttcaaccggtggaggatgcagt

SEQ ID NO: 5678200 - DNA, 25 bp, Homo sapien
ttgcttcaaccggtggaggatgcag

SEQ ID NO: 5678201 - DNA, 25 bp, Homo sapien
tccaccggttgaagcaattcccttg

SEQ ID NO: 5678202 - DNA, 25 bp, Homo sapien
ctgcatcctccaccggttgaagcaa

SEQ ID NO: 5678203 - DNA, 25 bp, Homo sapien
actgcatcctccaccggttgaagca

SEQ ID NO: 5678204 - DNA, 25 bp, Homo sapien
cggttgaagcaattcccttgcctca

SEQ ID NO: 5678205 - DNA, 25 bp, Homo sapien
gagtctcactcacaggagtgcagtg

SEQ ID NO: 5678206 - DNA, 25 bp, Homo sapien
gatggagtctcactcacaggagtgc

SEQ ID NO: 5678207 - DNA, 25 bp, Homo sapien
tgaggcaagggaattgcttcaaccg

SEQ ID NO: 5678208 - DNA, 25 bp, Homo sapien
cactgcactcctgtgagtgagactc

SEQ ID NO: 5678209 - DNA, 25 bp, Homo sapien
tgcttcaaccggtggaggatgcagt

SEQ ID NO: 5678210 - DNA, 25 bp, Homo sapien
ggcaagggaattgcttcaaccggtg

SEQ ID NO: 5678211 - DNA, 25 bp, Homo sapien
caagggaattgcttcaaccggtgga

SEQ ID NO: 5678212 - DNA, 25 bp, Homo sapien
ttgcttcaaccggtggaggatgcag

SEQ ID NO: 5678213 - DNA, 25 bp, Homo sapien
tgaggataattgtacctactcacag

SEQ ID NO: 5678214 - DNA, 25 bp, Homo sapien
gaggataattgtacctactcacagg

SEQ ID NO: 5678215 - DNA, 25 bp, Homo sapien
cctgtgagtaggtacaattatcctc

SEQ ID NO: 5678216 - DNA, 25 bp, Homo sapien
ctgtgagtaggtacaattatcctca

SEQ ID NO: 5678217 - DNA, 25 bp, Homo sapien
aattgtacctactcacagggttgta

SEQ ID NO: 5678218 - DNA, 25 bp, Homo sapien
ataattgtacctactcacagggttg

SEQ ID NO: 5678219 - DNA, 25 bp, Homo sapien
gaggataattgtacctactcacagg

SEQ ID NO: 5678220 - DNA, 25 bp, Homo sapien
ctactcacagggttgtaaaaatgag

SEQ ID NO: 5678221 - DNA, 25 bp, Homo sapien
ggataattgtacctactcacagggt

SEQ ID NO: 5678222 - DNA, 25 bp, Homo sapien
cctactcacagggttgtaaaaatga

SEQ ID NO: 5678223 - DNA, 25 bp, Homo sapien
accctgtgagtaggtacaattatcc

SEQ ID NO: 5678224 - DNA, 25 bp, Homo sapien
cctgtgagtaggtacaattatcctc

SEQ ID NO: 5678225 - DNA, 25 bp, Homo sapien
caaccctgtgagtaggtacaattat

SEQ ID NO: 5678226 - DNA, 25 bp, Homo sapien
taggtacaattatcctcacttccca

SEQ ID NO: 5678227 - DNA, 25 bp, Homo sapien
tacaaccctgtgagtaggtacaatt

SEQ ID NO: 5678228 - DNA, 25 bp, Homo sapien
tcatttttacaaccctgtgagtagg

SEQ ID NO: 5678229 - DNA, 25 bp, Homo sapien
cttagtgattaacagtgaggactct

SEQ ID NO: 5678230 - DNA, 25 bp, Homo sapien
acttagtgattaacagtgaggactc

SEQ ID NO: 5678231 - DNA, 25 bp, Homo sapien
tctaacttagtgattaacagtgagg

SEQ ID NO: 5678232 - DNA, 25 bp, Homo sapien
taggtttctaacttagtgattaaca

SEQ ID NO: 5678233 - DNA, 25 bp, Homo sapien
gtttctaacttagtgattaacagtg

SEQ ID NO: 5678234 - DNA, 25 bp, Homo sapien
taacttagtgattaacagtgaggac

SEQ ID NO: 5678235 - DNA, 25 bp, Homo sapien
gagtcctcactgttaatcactaagt

SEQ ID NO: 5678236 - DNA, 25 bp, Homo sapien
tcctcactgttaatcactaagttag

SEQ ID NO: 5678237 - DNA, 25 bp, Homo sapien
cactgttaatcactaagttagaaac

SEQ ID NO: 5678238 - DNA, 25 bp, Homo sapien
agagtcctcactgttaatcactaag

SEQ ID NO: 5678239 - DNA, 25 bp, Homo sapien
tgttaatcactaagttagaaaccta

SEQ ID NO: 5678240 - DNA, 25 bp, Homo sapien
cctcactgttaatcactaagttaga

SEQ ID NO: 5678241 - DNA, 25 bp, Homo sapien
acctggcctactatttgatgagttg

SEQ ID NO: 5678242 - DNA, 25 bp, Homo sapien
ctcttgacattgtggcccgcctgcc

SEQ ID NO: 5678243 - DNA, 25 bp, Homo sapien
tcttgacattgtggcccgcctgcct

SEQ ID NO: 5678244 - DNA, 25 bp, Homo sapien
cacctggcctactatttgatgagtt

SEQ ID NO: 5678245 - DNA, 25 bp, Homo sapien
cctggcctactatttgatgagttgg

SEQ ID NO: 5678246 - DNA, 25 bp, Homo sapien
ggcaggcgggccacaatgtcaagag

SEQ ID NO: 5678247 - DNA, 25 bp, Homo sapien
aggcaggcgggccacaatgtcaaga

SEQ ID NO: 5678248 - DNA, 25 bp, Homo sapien
caactcatcaaatagtaggccaggt

SEQ ID NO: 5678249 - DNA, 25 bp, Homo sapien
ccaactcatcaaatagtaggccagg

SEQ ID NO: 5678250 - DNA, 25 bp, Homo sapien
aactcatcaaatagtaggccaggtg

SEQ ID NO: 5678251 - DNA, 25 bp, Homo sapien
attataatgacaagaggtattcctg

SEQ ID NO: 5678252 - DNA, 25 bp, Homo sapien
taatgacaagaggtattcctgatca

SEQ ID NO: 5678253 - DNA, 25 bp, Homo sapien
ttaaactgtcagttattataatgac

SEQ ID NO: 5678254 - DNA, 25 bp, Homo sapien
acaagaggtattcctgatcagtaag

SEQ ID NO: 5678255 - DNA, 25 bp, Homo sapien
tataatgacaagaggtattcctgat

SEQ ID NO: 5678256 - DNA, 25 bp, Homo sapien
tgacaagaggtattcctgatcagta

SEQ ID NO: 5678257 - DNA, 25 bp, Homo sapien
gtcattataataactgacagtttaa

SEQ ID NO: 5678258 - DNA, 25 bp, Homo sapien
cttactgatcaggaatacctcttgt

SEQ ID NO: 5678259 - DNA, 25 bp, Homo sapien
tactgatcaggaatacctcttgtca

SEQ ID NO: 5678260 - DNA, 25 bp, Homo sapien
tgatcaggaatacctcttgtcatta

SEQ ID NO: 5678261 - DNA, 25 bp, Homo sapien
caggaatacctcttgtcattataat

SEQ ID NO: 5678262 - DNA, 25 bp, Homo sapien
gatcaggaatacctcttgtcattat

SEQ ID NO: 5678263 - DNA, 25 bp, Homo sapien
tgtttccaaagaggtaacccactgc

SEQ ID NO: 5678264 - DNA, 25 bp, Homo sapien
gcagtgggttacctctttggaaaca

SEQ ID NO: 5678265 - DNA, 25 bp, Homo sapien
tggttatgtcctttttgttctttga

SEQ ID NO: 5678266 - DNA, 25 bp, Homo sapien
tgtttccaaagaggtaacccactgc

SEQ ID NO: 5678267 - DNA, 25 bp, Homo sapien
aaagaggtaacccactgccacagca

SEQ ID NO: 5678268 - DNA, 25 bp, Homo sapien
caggagaaataaggtattgtttcca

SEQ ID NO: 5678269 - DNA, 25 bp, Homo sapien
agcacatcctgtgatttgggccgtt

SEQ ID NO: 5678270 - DNA, 25 bp, Homo sapien
cactgccacagcacatcctgtgatt

SEQ ID NO: 5678271 - DNA, 25 bp, Homo sapien
aacggcccaaatcacaggatgtgct

SEQ ID NO: 5678272 - DNA, 25 bp, Homo sapien
gcagtgggttacctctttggaaaca

SEQ ID NO: 5678273 - DNA, 25 bp, Homo sapien
caaatcacaggatgtgctgtggcag

SEQ ID NO: 5678274 - DNA, 25 bp, Homo sapien
tggaaacaataccttatttctcctg

SEQ ID NO: 5678275 - DNA, 25 bp, Homo sapien
tgctgtggcagtgggttacctcttt

SEQ ID NO: 5678276 - DNA, 25 bp, Homo sapien
tcaaagaacaaaaaggacataacca

SEQ ID NO: 5678277 - DNA, 25 bp, Homo sapien
tgcattgattaaaaattaatggttg

SEQ ID NO: 5678278 - DNA, 25 bp, Homo sapien
cagagctatattctgcattgattaa

SEQ ID NO: 5678279 - DNA, 25 bp, Homo sapien
tgttatttgaggaatagctttctaa

SEQ ID NO: 5678280 - DNA, 25 bp, Homo sapien
gaggaatagctttctaaaattattg

SEQ ID NO: 5678281 - DNA, 25 bp, Homo sapien
tattacagagctatattctgcattg

SEQ ID NO: 5678282 - DNA, 25 bp, Homo sapien
tatttcccttatttatattacagag

SEQ ID NO: 5678283 - DNA, 25 bp, Homo sapien
gctctgtaatataaataagggaaat

SEQ ID NO: 5678284 - DNA, 25 bp, Homo sapien
caataattttagaaagctattcctc

SEQ ID NO: 5678285 - DNA, 25 bp, Homo sapien
caaccattaatttttaatcaatgca

SEQ ID NO: 5678286 - DNA, 25 bp, Homo sapien
ttagaaagctattcctcaaataaca

SEQ ID NO: 5678287 - DNA, 25 bp, Homo sapien
caatgcagaatatagctctgtaata

SEQ ID NO: 5678288 - DNA, 25 bp, Homo sapien
taatcaatgcagaatatagctctgt

SEQ ID NO: 5678289 - DNA, 25 bp, Homo sapien
ggaagtggtgatcagagaatgacat

SEQ ID NO: 5678290 - DNA, 25 bp, Homo sapien
cattagagtgttaggaagtggtgat

SEQ ID NO: 5678291 - DNA, 25 bp, Homo sapien
ttggaaatgacaaggtctagggatc

SEQ ID NO: 5678292 - DNA, 25 bp, Homo sapien
tgaagtagttggaaatgacaaggtc

SEQ ID NO: 5678293 - DNA, 25 bp, Homo sapien
aaatgacaaggtctagggatctggc

SEQ ID NO: 5678294 - DNA, 25 bp, Homo sapien
cacattagagtgttaggaagtggtg

SEQ ID NO: 5678295 - DNA, 25 bp, Homo sapien
atgtcattctctgatcaccacttcc

SEQ ID NO: 5678296 - DNA, 25 bp, Homo sapien
atcaccacttcctaacactctaatg

SEQ ID NO: 5678297 - DNA, 25 bp, Homo sapien
gaccttgtcatttccaactacttca

SEQ ID NO: 5678298 - DNA, 25 bp, Homo sapien
caccacttcctaacactctaatgtg

SEQ ID NO: 5678299 - DNA, 25 bp, Homo sapien
gatccctagaccttgtcatttccaa

SEQ ID NO: 5678300 - DNA, 25 bp, Homo sapien
gccagatccctagaccttgtcattt

SEQ ID NO: 5678301 - DNA, 25 bp, Homo sapien
aattagggaactgcaattaattcag

SEQ ID NO: 5678302 - DNA, 25 bp, Homo sapien
gtcctccaaagtacctatctgatag

SEQ ID NO: 5678303 - DNA, 25 bp, Homo sapien
gggatgcattaagtgtcctccaaag

SEQ ID NO: 5678304 - DNA, 25 bp, Homo sapien
tcagggatgcattaagtgtcctcca

SEQ ID NO: 5678305 - DNA, 25 bp, Homo sapien
taattcagggatgcattaagtgtcc

SEQ ID NO: 5678306 - DNA, 25 bp, Homo sapien
tccaaagtacctatctgatagtgat

SEQ ID NO: 5678307 - DNA, 25 bp, Homo sapien
tatcagataggtactttggaggaca

SEQ ID NO: 5678308 - DNA, 25 bp, Homo sapien
ctgaattaattgcagttccctaatt

SEQ ID NO: 5678309 - DNA, 25 bp, Homo sapien
ctttggaggacacttaatgcatccc

SEQ ID NO: 5678310 - DNA, 25 bp, Homo sapien
tttaaatcactatcagataggtact

SEQ ID NO: 5678311 - DNA, 25 bp, Homo sapien
ggaggacacttaatgcatccctgaa

SEQ ID NO: 5678312 - DNA, 25 bp, Homo sapien
cactatcagataggtactttggagg

SEQ ID NO: 5678313 - DNA, 25 bp, Homo sapien
atggtaagtttgcaggctgatggga

SEQ ID NO: 5678314 - DNA, 25 bp, Homo sapien
aatggtaagtttgcaggctgatggg

SEQ ID NO: 5678315 - DNA, 25 bp, Homo sapien
tggtaagtttgcaggctgatgggat

SEQ ID NO: 5678316 - DNA, 25 bp, Homo sapien
gaaaaatggggttgtagctggagaa

SEQ ID NO: 5678317 - DNA, 25 bp, Homo sapien
ttctccagctacaaccccatttttc

SEQ ID NO: 5678318 - DNA, 25 bp, Homo sapien
cccatcagcctgcaaacttaccatt

SEQ ID NO: 5678319 - DNA, 25 bp, Homo sapien
tcccatcagcctgcaaacttaccat

SEQ ID NO: 5678320 - DNA, 25 bp, Homo sapien
atcccatcagcctgcaaacttacca

SEQ ID NO: 5678321 - DNA, 25 bp, Homo sapien
ttgtagctggagaaagaaattgctt

SEQ ID NO: 5678322 - DNA, 25 bp, Homo sapien
gaaaagtaatggtaagtttgcaggc

SEQ ID NO: 5678323 - DNA, 25 bp, Homo sapien
tggtaagtttgcaggctgatgggat

SEQ ID NO: 5678324 - DNA, 25 bp, Homo sapien
taatggtaagtttgcaggctgatgg

SEQ ID NO: 5678325 - DNA, 25 bp, Homo sapien
tttgcttgaaagaacagaaaaatgg

SEQ ID NO: 5678326 - DNA, 25 bp, Homo sapien
gaaaaatggggttgtagctggagaa

SEQ ID NO: 5678327 - DNA, 25 bp, Homo sapien
aagcaatttctttctccagctacaa

SEQ ID NO: 5678328 - DNA, 25 bp, Homo sapien
ccatttttctgttctttcaagcaaa

SEQ ID NO: 5678329 - DNA, 25 bp, Homo sapien
ttctccagctacaaccccatttttc

SEQ ID NO: 5678330 - DNA, 25 bp, Homo sapien
atcccatcagcctgcaaacttacca

SEQ ID NO: 5678331 - DNA, 25 bp, Homo sapien
catcagcctgcaaacttaccattac

SEQ ID NO: 5678332 - DNA, 25 bp, Homo sapien
tgcaaacttaccattacttttccca

SEQ ID NO: 5678333 - DNA, 25 bp, Homo sapien
gaggaatgagtgaaggagagtgtct

SEQ ID NO: 5678334 - DNA, 25 bp, Homo sapien
agcagggagcaatgatatcctggaa

SEQ ID NO: 5678335 - DNA, 25 bp, Homo sapien
gggagcaatgatatcctggaagcca

SEQ ID NO: 5678336 - DNA, 25 bp, Homo sapien
gagagtgtcttaggagattggagga

SEQ ID NO: 5678337 - DNA, 25 bp, Homo sapien
cagggagcaatgatatcctggaagc

SEQ ID NO: 5678338 - DNA, 25 bp, Homo sapien
agggagcaatgatatcctggaagcc

SEQ ID NO: 5678339 - DNA, 25 bp, Homo sapien
tggcttccaggatatcattgctccc

SEQ ID NO: 5678340 - DNA, 25 bp, Homo sapien
taagacactctccttcactcattcc

SEQ ID NO: 5678341 - DNA, 25 bp, Homo sapien
ggcttccaggatatcattgctccct

SEQ ID NO: 5678342 - DNA, 25 bp, Homo sapien
ttccaggatatcattgctccctgct

SEQ ID NO: 5678343 - DNA, 25 bp, Homo sapien
gcttccaggatatcattgctccctg

SEQ ID NO: 5678344 - DNA, 25 bp, Homo sapien
tccaatctcctaagacactctcctt

SEQ ID NO: 5678345 - DNA, 25 bp, Homo sapien
atgtggctgcaccatgctgtctccc

SEQ ID NO: 5678346 - DNA, 25 bp, Homo sapien
caaaacacgcatttccttgggatgt

SEQ ID NO: 5678347 - DNA, 25 bp, Homo sapien
gaatgtggctgcaccatgctgtctc

SEQ ID NO: 5678348 - DNA, 25 bp, Homo sapien
tgctgtctccccaaaagttccaaaa

SEQ ID NO: 5678349 - DNA, 25 bp, Homo sapien
tggaatgtggctgcaccatgctgtc

SEQ ID NO: 5678350 - DNA, 25 bp, Homo sapien
aaaacacgcatttccttgggatgtt

SEQ ID NO: 5678351 - DNA, 25 bp, Homo sapien
aacatcccaaggaaatgcgtgtttt

SEQ ID NO: 5678352 - DNA, 25 bp, Homo sapien
gagacagcatggtgcagccacattc

SEQ ID NO: 5678353 - DNA, 25 bp, Homo sapien
ttttggaacttttggggagacagca

SEQ ID NO: 5678354 - DNA, 25 bp, Homo sapien
gacagcatggtgcagccacattcca

SEQ ID NO: 5678355 - DNA, 25 bp, Homo sapien
gggagacagcatggtgcagccacat

SEQ ID NO: 5678356 - DNA, 25 bp, Homo sapien
acatcccaaggaaatgcgtgttttg

SEQ ID NO: 5678357 - DNA, 25 bp, Homo sapien
taacaaggagcataaagtgttactg

SEQ ID NO: 5678358 - DNA, 25 bp, Homo sapien
tactaacaaggagcataaagtgtta

SEQ ID NO: 5678359 - DNA, 25 bp, Homo sapien
ctaacaaggagcataaagtgttact

SEQ ID NO: 5678360 - DNA, 25 bp, Homo sapien
tagagtgagattttttaacatattt

SEQ ID NO: 5678361 - DNA, 25 bp, Homo sapien
ttgtattgataatctgcttctgaca

SEQ ID NO: 5678362 - DNA, 25 bp, Homo sapien
gtttgtattgataatctgcttctga

SEQ ID NO: 5678363 - DNA, 25 bp, Homo sapien
taacactttatgctccttgttagta

SEQ ID NO: 5678364 - DNA, 25 bp, Homo sapien
aaatatgttaaaaaatctcactcta

SEQ ID NO: 5678365 - DNA, 25 bp, Homo sapien
tatgttaaaaaatctcactctaaca

SEQ ID NO: 5678366 - DNA, 25 bp, Homo sapien
tcagaagcagattatcaatacaaac

SEQ ID NO: 5678367 - DNA, 25 bp, Homo sapien
tgtcagaagcagattatcaatacaa

SEQ ID NO: 5678368 - DNA, 25 bp, Homo sapien
cagtaacactttatgctccttgtta

SEQ ID NO: 5678369 - DNA, 25 bp, Homo sapien
ggagctaattatgtgcctgatactg

SEQ ID NO: 5678370 - DNA, 25 bp, Homo sapien
ctaattatgtgcctgatactgatct

SEQ ID NO: 5678371 - DNA, 25 bp, Homo sapien
gagctaattatgtgcctgatactga

SEQ ID NO: 5678372 - DNA, 25 bp, Homo sapien
gatttatggtattgggagctaatta

SEQ ID NO: 5678373 - DNA, 25 bp, Homo sapien
tttgaggtgatttatggtattggga

SEQ ID NO: 5678374 - DNA, 25 bp, Homo sapien
gtctgtttgaggtgatttatggtat

SEQ ID NO: 5678375 - DNA, 25 bp, Homo sapien
taattagctcccaataccataaatc

SEQ ID NO: 5678376 - DNA, 25 bp, Homo sapien
acataattagctcccaataccataa

SEQ ID NO: 5678377 - DNA, 25 bp, Homo sapien
cagtatcaggcacataattagctcc

SEQ ID NO: 5678378 - DNA, 25 bp, Homo sapien
agatcagtatcaggcacataattag

SEQ ID NO: 5678379 - DNA, 25 bp, Homo sapien
caataccataaatcacctcaaacag

SEQ ID NO: 5678380 - DNA, 25 bp, Homo sapien
tcagtatcaggcacataattagctc

SEQ ID NO: 5678381 - DNA, 25 bp, Homo sapien
tcagctgcctggtgtaagtattagc

SEQ ID NO: 5678382 - DNA, 25 bp, Homo sapien
cctcagctgcctggtgtaagtatta

SEQ ID NO: 5678383 - DNA, 25 bp, Homo sapien
cagtcagttgtttgatttcatcgat

SEQ ID NO: 5678384 - DNA, 25 bp, Homo sapien
tatcacatatgacatcagtcagttg

SEQ ID NO: 5678385 - DNA, 25 bp, Homo sapien
tttcatcgatgatctggcagacctc

SEQ ID NO: 5678386 - DNA, 25 bp, Homo sapien
gaatgaatcccaacagtccctctat

SEQ ID NO: 5678387 - DNA, 25 bp, Homo sapien
catcgatgaaatcaaacaactgact

SEQ ID NO: 5678388 - DNA, 25 bp, Homo sapien
taatacttacaccaggcagctgagg

SEQ ID NO: 5678389 - DNA, 25 bp, Homo sapien
gctaatacttacaccaggcagctga

SEQ ID NO: 5678390 - DNA, 25 bp, Homo sapien
caactgactgatgtcatatgtgata

SEQ ID NO: 5678391 - DNA, 25 bp, Homo sapien
tcatatgtgatagagggactgttgg

SEQ ID NO: 5678392 - DNA, 25 bp, Homo sapien
gaggtctgccagatcatcgatgaaa

SEQ ID NO: 5678393 - DNA, 25 bp, Homo sapien
taaactgtggggctcaagtgatgct

SEQ ID NO: 5678394 - DNA, 25 bp, Homo sapien
ttaaactgtggggctcaagtgatgc

SEQ ID NO: 5678395 - DNA, 25 bp, Homo sapien
aactgtggggctcaagtgatgctcc

SEQ ID NO: 5678396 - DNA, 25 bp, Homo sapien
ggtcttaaactgtggggctcaagtg

SEQ ID NO: 5678397 - DNA, 25 bp, Homo sapien
ggctggtcttaaactgtggggctca

SEQ ID NO: 5678398 - DNA, 25 bp, Homo sapien
aaactgtggggctcaagtgatgctc

SEQ ID NO: 5678399 - DNA, 25 bp, Homo sapien
cacttgagccccacagtttaagacc

SEQ ID NO: 5678400 - DNA, 25 bp, Homo sapien
gcatcacttgagccccacagtttaa

SEQ ID NO: 5678401 - DNA, 25 bp, Homo sapien
ggagcatcacttgagccccacagtt

SEQ ID NO: 5678402 - DNA, 25 bp, Homo sapien
gagcatcacttgagccccacagttt

SEQ ID NO: 5678403 - DNA, 25 bp, Homo sapien
tgagccccacagtttaagaccagcc

SEQ ID NO: 5678404 - DNA, 25 bp, Homo sapien
agcatcacttgagccccacagttta

SEQ ID NO: 5678405 - DNA, 25 bp, Homo sapien
tgttaagacccacagtgttatttgt

SEQ ID NO: 5678406 - DNA, 25 bp, Homo sapien
ctgtggctttaggaagaattactga

SEQ ID NO: 5678407 - DNA, 25 bp, Homo sapien
ctgaaaaacctgttaagacccacag

SEQ ID NO: 5678408 - DNA, 25 bp, Homo sapien
tttgctctgtggctttaggaagaat

SEQ ID NO: 5678409 - DNA, 25 bp, Homo sapien
ggataatctctttccttgttgccaa

SEQ ID NO: 5678410 - DNA, 25 bp, Homo sapien
aacctgttaagacccacagtgttat

SEQ ID NO: 5678411 - DNA, 25 bp, Homo sapien
acaaataacactgtgggtcttaaca

SEQ ID NO: 5678412 - DNA, 25 bp, Homo sapien
aaataacactgtgggtcttaacagg

SEQ ID NO: 5678413 - DNA, 25 bp, Homo sapien
aaaaattggcaacaaggaaagagat

SEQ ID NO: 5678414 - DNA, 25 bp, Homo sapien
ttggcaacaaggaaagagattatcc

SEQ ID NO: 5678415 - DNA, 25 bp, Homo sapien
aattcttcctaaagccacagagcaa

SEQ ID NO: 5678416 - DNA, 25 bp, Homo sapien
ctgtgggtcttaacaggtttttcag

SEQ ID NO: 5678417 - DNA, 25 bp, Homo sapien
actctatagctaattataattagta

SEQ ID NO: 5678418 - DNA, 25 bp, Homo sapien
attataattagtaatgtgggcttgc

SEQ ID NO: 5678419 - DNA, 25 bp, Homo sapien
ttataattagtaatgtgggcttgct

SEQ ID NO: 5678420 - DNA, 25 bp, Homo sapien
tactctatagctaattataattagt

SEQ ID NO: 5678421 - DNA, 25 bp, Homo sapien
tactaattataattagctatagagt

SEQ ID NO: 5678422 - DNA, 25 bp, Homo sapien
agcaagcccacattactaattataa

SEQ ID NO: 5678423 - DNA, 25 bp, Homo sapien
actaattataattagctatagagta

SEQ ID NO: 5678424 - DNA, 25 bp, Homo sapien
gcaagcccacattactaattataat

SEQ ID NO: 5678425 - DNA, 25 bp, Homo sapien
attataattagtaatgtgggcttgc

SEQ ID NO: 5678426 - DNA, 25 bp, Homo sapien
taaaaactaaatagataatatactc

SEQ ID NO: 5678427 - DNA, 25 bp, Homo sapien
ggagagtattattgaataaaaacta

SEQ ID NO: 5678428 - DNA, 25 bp, Homo sapien
ttataattagtaatgtgggcttgct

SEQ ID NO: 5678429 - DNA, 25 bp, Homo sapien
taaatagataatatactctatagct

SEQ ID NO: 5678430 - DNA, 25 bp, Homo sapien
tactctatagctaattataattagt

SEQ ID NO: 5678431 - DNA, 25 bp, Homo sapien
taattagctatagagtatattatct

SEQ ID NO: 5678432 - DNA, 25 bp, Homo sapien
tactaattataattagctatagagt

SEQ ID NO: 5678433 - DNA, 25 bp, Homo sapien
agcaagcccacattactaattataa

SEQ ID NO: 5678434 - DNA, 25 bp, Homo sapien
gcaagcccacattactaattataat

SEQ ID NO: 5678435 - DNA, 25 bp, Homo sapien
gctatagagtatattatctatttag

SEQ ID NO: 5678436 - DNA, 25 bp, Homo sapien
tagtttttattcaataatactctcc

SEQ ID NO: 5678437 - DNA, 25 bp, Homo sapien
actgaaaaggtgtattctccttttg

SEQ ID NO: 5678438 - DNA, 25 bp, Homo sapien
ggtgtattctccttttgtgggaata

SEQ ID NO: 5678439 - DNA, 25 bp, Homo sapien
tgaaaaggtgtattctccttttgtg

SEQ ID NO: 5678440 - DNA, 25 bp, Homo sapien
tgtattctccttttgtgggaataag

SEQ ID NO: 5678441 - DNA, 25 bp, Homo sapien
aggtgtattctccttttgtgggaat

SEQ ID NO: 5678442 - DNA, 25 bp, Homo sapien
tattctccttttgtgggaataagaa

SEQ ID NO: 5678443 - DNA, 25 bp, Homo sapien
caaaaggagaatacaccttttcagt

SEQ ID NO: 5678444 - DNA, 25 bp, Homo sapien
tcttattcccacaaaaggagaatac

SEQ ID NO: 5678445 - DNA, 25 bp, Homo sapien
tattcccacaaaaggagaatacacc

SEQ ID NO: 5678446 - DNA, 25 bp, Homo sapien
attcccacaaaaggagaatacacct

SEQ ID NO: 5678447 - DNA, 25 bp, Homo sapien
cacaaaaggagaatacaccttttca

SEQ ID NO: 5678448 - DNA, 25 bp, Homo sapien
ttcttattcccacaaaaggagaata

SEQ ID NO: 5678449 - DNA, 25 bp, Homo sapien
aaggagagtatcaggccgggcacga

SEQ ID NO: 5678450 - DNA, 25 bp, Homo sapien
ataagaaaggagagtatcaggccgg

SEQ ID NO: 5678451 - DNA, 25 bp, Homo sapien
aataagaaaggagagtatcaggccg

SEQ ID NO: 5678452 - DNA, 25 bp, Homo sapien
atagactgaaaaggtgtattctcct

SEQ ID NO: 5678453 - DNA, 25 bp, Homo sapien
aggtgtattctccttttgtgggaat

SEQ ID NO: 5678454 - DNA, 25 bp, Homo sapien
tattctccttttgtgggaataagaa

SEQ ID NO: 5678455 - DNA, 25 bp, Homo sapien
actgtgggtcaatgcctttttaaca

SEQ ID NO: 5678456 - DNA, 25 bp, Homo sapien
taactgtgggtcaatgcctttttaa

SEQ ID NO: 5678457 - DNA, 25 bp, Homo sapien
tctttccattcattaactcatgggt

SEQ ID NO: 5678458 - DNA, 25 bp, Homo sapien
gtataactgtgggtcaatgcctttt

SEQ ID NO: 5678459 - DNA, 25 bp, Homo sapien
taacatatacgaatttattttccta

SEQ ID NO: 5678460 - DNA, 25 bp, Homo sapien
aaaagtataactgtgggtcaatgcc

SEQ ID NO: 5678461 - DNA, 25 bp, Homo sapien
cccatgagttaatgaatggaaagaa

SEQ ID NO: 5678462 - DNA, 25 bp, Homo sapien
taaaaaggcattgacccacagttat

SEQ ID NO: 5678463 - DNA, 25 bp, Homo sapien
tgttaaaaaggcattgacccacagt

SEQ ID NO: 5678464 - DNA, 25 bp, Homo sapien
taggaaaataaattcgtatatgtta

SEQ ID NO: 5678465 - DNA, 25 bp, Homo sapien
aaaaggcattgacccacagttatac

SEQ ID NO: 5678466 - DNA, 25 bp, Homo sapien
ggcattgacccacagttatactttt

SEQ ID NO: 5678467 - DNA, 25 bp, Homo sapien
tggctttactttctgcatggcgtgg

SEQ ID NO: 5678468 - DNA, 25 bp, Homo sapien
tactttctgcatggcgtggtggctc

SEQ ID NO: 5678469 - DNA, 25 bp, Homo sapien
tggtggctttactttctgcatggcg

SEQ ID NO: 5678470 - DNA, 25 bp, Homo sapien
ctttactttctgcatggcgtggtgg

SEQ ID NO: 5678471 - DNA, 25 bp, Homo sapien
tttactttctgcatggcgtggtggc

SEQ ID NO: 5678472 - DNA, 25 bp, Homo sapien
tggtgtggtggctttactttctgca

SEQ ID NO: 5678473 - DNA, 25 bp, Homo sapien
tgcagaaagtaaagccaccacacca

SEQ ID NO: 5678474 - DNA, 25 bp, Homo sapien
catgcagaaagtaaagccaccacac

SEQ ID NO: 5678475 - DNA, 25 bp, Homo sapien
gagccaccacgccatgcagaaagta

SEQ ID NO: 5678476 - DNA, 25 bp, Homo sapien
ccacgccatgcagaaagtaaagcca

SEQ ID NO: 5678477 - DNA, 25 bp, Homo sapien
gccaccacgccatgcagaaagtaaa

SEQ ID NO: 5678478 - DNA, 25 bp, Homo sapien
cgccatgcagaaagtaaagccacca

SEQ ID NO: 5678479 - DNA, 25 bp, Homo sapien
tgagtgattatggttaagttttagg

SEQ ID NO: 5678480 - DNA, 25 bp, Homo sapien
cctaaaacttaaccataatcactca

SEQ ID NO: 5678481 - DNA, 25 bp, Homo sapien
tctttattgaggtatccagatcttc

SEQ ID NO: 5678482 - DNA, 25 bp, Homo sapien
ttgccatctgcatctttattgaggt

SEQ ID NO: 5678483 - DNA, 25 bp, Homo sapien
gaggtatccagatcttctgcctatt

SEQ ID NO: 5678484 - DNA, 25 bp, Homo sapien
tattgaggtatccagatcttctgcc

SEQ ID NO: 5678485 - DNA, 25 bp, Homo sapien
tgagtgattatggttaagttttagg

SEQ ID NO: 5678486 - DNA, 25 bp, Homo sapien
ctgcctatttttcattgagtgatta

SEQ ID NO: 5678487 - DNA, 25 bp, Homo sapien
cctaaaacttaaccataatcactca

SEQ ID NO: 5678488 - DNA, 25 bp, Homo sapien
gaagatctggatacctcaataaaga

SEQ ID NO: 5678489 - DNA, 25 bp, Homo sapien
aaataggcagaagatctggatacct

SEQ ID NO: 5678490 - DNA, 25 bp, Homo sapien
ggcagaagatctggatacctcaata

SEQ ID NO: 5678491 - DNA, 25 bp, Homo sapien
acctcaataaagatgcagatggcaa

SEQ ID NO: 5678492 - DNA, 25 bp, Homo sapien
taatcactcaatgaaaaataggcag

SEQ ID NO: 5678493 - DNA, 25 bp, Homo sapien
ggaatgctgtgacgtaatctcagct

SEQ ID NO: 5678494 - DNA, 25 bp, Homo sapien
gaatgctgtgacgtaatctcagctc

SEQ ID NO: 5678495 - DNA, 25 bp, Homo sapien
ttttggcgtgcgagacagagtctta

SEQ ID NO: 5678496 - DNA, 25 bp, Homo sapien
ctggaatgctgtgacgtaatctcag

SEQ ID NO: 5678497 - DNA, 25 bp, Homo sapien
tttttggcgtgcgagacagagtctt

SEQ ID NO: 5678498 - DNA, 25 bp, Homo sapien
tggaatgctgtgacgtaatctcagc

SEQ ID NO: 5678499 - DNA, 25 bp, Homo sapien
gagctgagattacgtcacagcattc

SEQ ID NO: 5678500 - DNA, 25 bp, Homo sapien
agctgagattacgtcacagcattcc

SEQ ID NO: 5678501 - DNA, 25 bp, Homo sapien
aagactctgtctcgcacgccaaaaa

SEQ ID NO: 5678502 - DNA, 25 bp, Homo sapien
gctgagattacgtcacagcattcca

SEQ ID NO: 5678503 - DNA, 25 bp, Homo sapien
taagactctgtctcgcacgccaaaa

SEQ ID NO: 5678504 - DNA, 25 bp, Homo sapien
ctgagattacgtcacagcattccag

SEQ ID NO: 5678505 - DNA, 25 bp, Homo sapien
aatcattatcgtgtgtggctttttc

SEQ ID NO: 5678506 - DNA, 25 bp, Homo sapien
tcattatcgtgtgtggctttttctt

SEQ ID NO: 5678507 - DNA, 25 bp, Homo sapien
ggaatcattatcgtgtgtggctttt

SEQ ID NO: 5678508 - DNA, 25 bp, Homo sapien
tggaatcattatcgtgtgtggcttt

SEQ ID NO: 5678509 - DNA, 25 bp, Homo sapien
gttggaatcattatcgtgtgtggct

SEQ ID NO: 5678510 - DNA, 25 bp, Homo sapien
tagttggaatcattatcgtgtgtgg

SEQ ID NO: 5678511 - DNA, 25 bp, Homo sapien
aagccacacacgataatgattccaa

SEQ ID NO: 5678512 - DNA, 25 bp, Homo sapien
gaaaaagccacacacgataatgatt

SEQ ID NO: 5678513 - DNA, 25 bp, Homo sapien
aaaagccacacacgataatgattcc

SEQ ID NO: 5678514 - DNA, 25 bp, Homo sapien
aagaaaaagccacacacgataatga

SEQ ID NO: 5678515 - DNA, 25 bp, Homo sapien
aaagccacacacgataatgattcca

SEQ ID NO: 5678516 - DNA, 25 bp, Homo sapien
gccacacacgataatgattccaact

SEQ ID NO: 5678517 - DNA, 25 bp, Homo sapien
cttctgccttcttggttcaaatgat

SEQ ID NO: 5678518 - DNA, 25 bp, Homo sapien
atcatttgaaccaagaaggcagaag

SEQ ID NO: 5678519 - DNA, 25 bp, Homo sapien
ttctgccttcttggttcaaatgatt

SEQ ID NO: 5678520 - DNA, 25 bp, Homo sapien
ctgccttcttggttcaaatgattct

SEQ ID NO: 5678521 - DNA, 25 bp, Homo sapien
tctgccttcttggttcaaatgattc

SEQ ID NO: 5678522 - DNA, 25 bp, Homo sapien
cttctgccttcttggttcaaatgat

SEQ ID NO: 5678523 - DNA, 25 bp, Homo sapien
agtggtgcatctcagctcactgcaa

SEQ ID NO: 5678524 - DNA, 25 bp, Homo sapien
ttgcagtgagctgagatgcaccact

SEQ ID NO: 5678525 - DNA, 25 bp, Homo sapien
atcatttgaaccaagaaggcagaag

SEQ ID NO: 5678526 - DNA, 25 bp, Homo sapien
gaatcatttgaaccaagaaggcaga

SEQ ID NO: 5678527 - DNA, 25 bp, Homo sapien
agaatcatttgaaccaagaaggcag

SEQ ID NO: 5678528 - DNA, 25 bp, Homo sapien
aatcatttgaaccaagaaggcagaa

SEQ ID NO: 5678529 - DNA, 25 bp, Homo sapien
cttcttatatagatatatggcatag

SEQ ID NO: 5678530 - DNA, 25 bp, Homo sapien
cttatatagatatatggcatagtag

SEQ ID NO: 5678531 - DNA, 25 bp, Homo sapien
gtcttcttatatagatatatggcat

SEQ ID NO: 5678532 - DNA, 25 bp, Homo sapien
tatatagatatatggcatagtagta

SEQ ID NO: 5678533 - DNA, 25 bp, Homo sapien
ttaagggatacaagtgtagtcttct

SEQ ID NO: 5678534 - DNA, 25 bp, Homo sapien
tagatatatggcatagtagtaaagt

SEQ ID NO: 5678535 - DNA, 25 bp, Homo sapien
tactactatgccatatatctatata

SEQ ID NO: 5678536 - DNA, 25 bp, Homo sapien
ctatgccatatatctatataagaag

SEQ ID NO: 5678537 - DNA, 25 bp, Homo sapien
agaagactacacttgtatcccttaa

SEQ ID NO: 5678538 - DNA, 25 bp, Homo sapien
tatgccatatatctatataagaaga

SEQ ID NO: 5678539 - DNA, 25 bp, Homo sapien
tactatgccatatatctatataaga

SEQ ID NO: 5678540 - DNA, 25 bp, Homo sapien
actttactactatgccatatatcta

SEQ ID NO: 5678541 - DNA, 25 bp, Homo sapien
catagtagtaaagtctgggcctttt

SEQ ID NO: 5678542 - DNA, 25 bp, Homo sapien
cttcttatatagatatatggcatag

SEQ ID NO: 5678543 - DNA, 25 bp, Homo sapien
taatagatttaagggatacaagtgt

SEQ ID NO: 5678544 - DNA, 25 bp, Homo sapien
tacaagtgtagtcttcttatataga

SEQ ID NO: 5678545 - DNA, 25 bp, Homo sapien
tatggcatagtagtaaagtctgggc

SEQ ID NO: 5678546 - DNA, 25 bp, Homo sapien
ttaagggatacaagtgtagtcttct

SEQ ID NO: 5678547 - DNA, 25 bp, Homo sapien
agaagactacacttgtatcccttaa

SEQ ID NO: 5678548 - DNA, 25 bp, Homo sapien
cacttgtatcccttaaatctattaa

SEQ ID NO: 5678549 - DNA, 25 bp, Homo sapien
aaaaggcccagactttactactatg

SEQ ID NO: 5678550 - DNA, 25 bp, Homo sapien
tatgccatatatctatataagaaga

SEQ ID NO: 5678551 - DNA, 25 bp, Homo sapien
gcccagactttactactatgccata

SEQ ID NO: 5678552 - DNA, 25 bp, Homo sapien
tataagaagactacacttgtatccc

SEQ ID NO: 5678553 - DNA, 25 bp, Homo sapien
gattataggcatgggatgccatgcc

SEQ ID NO: 5678554 - DNA, 25 bp, Homo sapien
ttacattttaataactagcaatcat

SEQ ID NO: 5678555 - DNA, 25 bp, Homo sapien
ggatgccatgcctggcctctctaat

SEQ ID NO: 5678556 - DNA, 25 bp, Homo sapien
gcctggcctctctaattacatttta

SEQ ID NO: 5678557 - DNA, 25 bp, Homo sapien
caatcattattgcattacaaatggg

SEQ ID NO: 5678558 - DNA, 25 bp, Homo sapien
catgggatgccatgcctggcctctc

SEQ ID NO: 5678559 - DNA, 25 bp, Homo sapien
aaaaaatccccatttgtaatgcaat

SEQ ID NO: 5678560 - DNA, 25 bp, Homo sapien
aatccccatttgtaatgcaataatg

SEQ ID NO: 5678561 - DNA, 25 bp, Homo sapien
taaaatgtaattagagaggccaggc

SEQ ID NO: 5678562 - DNA, 25 bp, Homo sapien
ggcatggcatcccatgcctataatc

SEQ ID NO: 5678563 - DNA, 25 bp, Homo sapien
gcaataatgattgctagttattaaa

SEQ ID NO: 5678564 - DNA, 25 bp, Homo sapien
ttagagaggccaggcatggcatccc

SEQ ID NO: 5678565 - DNA, 25 bp, Homo sapien
aggcatgcacccggcaaattttatt

SEQ ID NO: 5678566 - DNA, 25 bp, Homo sapien
aataaaatttgccgggtgcatgcct

SEQ ID NO: 5678567 - DNA, 25 bp, Homo sapien
catgcacccggcaaattttattttt

SEQ ID NO: 5678568 - DNA, 25 bp, Homo sapien
aggcatgcacccggcaaattttatt

SEQ ID NO: 5678569 - DNA, 25 bp, Homo sapien
gcatgcacccggcaaattttatttt

SEQ ID NO: 5678570 - DNA, 25 bp, Homo sapien
acaggcatgcacccggcaaatttta

SEQ ID NO: 5678571 - DNA, 25 bp, Homo sapien
caggcatgcacccggcaaattttat

SEQ ID NO: 5678572 - DNA, 25 bp, Homo sapien
tacaggcatgcacccggcaaatttt

SEQ ID NO: 5678573 - DNA, 25 bp, Homo sapien
ataaaatttgccgggtgcatgcctg

SEQ ID NO: 5678574 - DNA, 25 bp, Homo sapien
aataaaatttgccgggtgcatgcct

SEQ ID NO: 5678575 - DNA, 25 bp, Homo sapien
taaaatttgccgggtgcatgcctgt

SEQ ID NO: 5678576 - DNA, 25 bp, Homo sapien
aaaatttgccgggtgcatgcctgta

SEQ ID NO: 5678577 - DNA, 25 bp, Homo sapien
aaaaataaaatttgccgggtgcatg

SEQ ID NO: 5678578 - DNA, 25 bp, Homo sapien
aaaataaaatttgccgggtgcatgc

SEQ ID NO: 5678579 - DNA, 25 bp, Homo sapien
tttgtgggaaaagtatcctaatgac

SEQ ID NO: 5678580 - DNA, 25 bp, Homo sapien
tgtgggaaaagtatcctaatgactt

SEQ ID NO: 5678581 - DNA, 25 bp, Homo sapien
atagggcctcactctccgatgcaat

SEQ ID NO: 5678582 - DNA, 25 bp, Homo sapien
gcctcactctccgatgcaatggtgt

SEQ ID NO: 5678583 - DNA, 25 bp, Homo sapien
ctcactctccgatgcaatggtgtga

SEQ ID NO: 5678584 - DNA, 25 bp, Homo sapien
gggcctcactctccgatgcaatggt

SEQ ID NO: 5678585 - DNA, 25 bp, Homo sapien
acaccattgcatcggagagtgaggc

SEQ ID NO: 5678586 - DNA, 25 bp, Homo sapien
gtcattaggatacttttcccacaaa

SEQ ID NO: 5678587 - DNA, 25 bp, Homo sapien
attgcatcggagagtgaggccctat

SEQ ID NO: 5678588 - DNA, 25 bp, Homo sapien
ccattgcatcggagagtgaggccct

SEQ ID NO: 5678589 - DNA, 25 bp, Homo sapien
tcacaccattgcatcggagagtgag

SEQ ID NO: 5678590 - DNA, 25 bp, Homo sapien
aagtcattaggatacttttcccaca

SEQ ID NO: 5678591 - DNA, 25 bp, Homo sapien
gcttatactgattacttgtaggcag

SEQ ID NO: 5678592 - DNA, 25 bp, Homo sapien
tgattacttgtaggcagtaagtacg

SEQ ID NO: 5678593 - DNA, 25 bp, Homo sapien
tacttgtaggcagtaagtacggtag

SEQ ID NO: 5678594 - DNA, 25 bp, Homo sapien
ggtagcttatactgattacttgtag

SEQ ID NO: 5678595 - DNA, 25 bp, Homo sapien
tgtaggcagtaagtacggtaggact

SEQ ID NO: 5678596 - DNA, 25 bp, Homo sapien
cttgtaggcagtaagtacggtagga

SEQ ID NO: 5678597 - DNA, 25 bp, Homo sapien
taccgtacttactgcctacaagtaa

SEQ ID NO: 5678598 - DNA, 25 bp, Homo sapien
tacttactgcctacaagtaatcagt

SEQ ID NO: 5678599 - DNA, 25 bp, Homo sapien
tgcctacaagtaatcagtataagct

SEQ ID NO: 5678600 - DNA, 25 bp, Homo sapien
tcctaccgtacttactgcctacaag

SEQ ID NO: 5678601 - DNA, 25 bp, Homo sapien
agtcctaccgtacttactgcctaca

SEQ ID NO: 5678602 - DNA, 25 bp, Homo sapien
tacaagtaatcagtataagctacct

SEQ ID NO: 5678603 - DNA, 25 bp, Homo sapien
ttgtttcctttcatcagcccatctg

SEQ ID NO: 5678604 - DNA, 25 bp, Homo sapien
gtttcctttcatcagcccatctgag

SEQ ID NO: 5678605 - DNA, 25 bp, Homo sapien
aaagcttaagttgaaaccatgcttg

SEQ ID NO: 5678606 - DNA, 25 bp, Homo sapien
cttgtgattattatactatttcccc

SEQ ID NO: 5678607 - DNA, 25 bp, Homo sapien
gttgaaaccatgcttgtgattatta

SEQ ID NO: 5678608 - DNA, 25 bp, Homo sapien
gcttaagttgaaaccatgcttgtga

SEQ ID NO: 5678609 - DNA, 25 bp, Homo sapien
ctcagatgggctgatgaaaggaaac

SEQ ID NO: 5678610 - DNA, 25 bp, Homo sapien
taataatcacaagcatggtttcaac

SEQ ID NO: 5678611 - DNA, 25 bp, Homo sapien
atcacaagcatggtttcaacttaag

SEQ ID NO: 5678612 - DNA, 25 bp, Homo sapien
ggggaaatagtataataatcacaag

SEQ ID NO: 5678613 - DNA, 25 bp, Homo sapien
cagatgggctgatgaaaggaaacaa

SEQ ID NO: 5678614 - DNA, 25 bp, Homo sapien
cacaagcatggtttcaacttaagct

SEQ ID NO: 5678615 - DNA, 25 bp, Homo sapien
tctactaggtgaatagtttaatgga

SEQ ID NO: 5678616 - DNA, 25 bp, Homo sapien
tattgctaatttatctactgcttta

SEQ ID NO: 5678617 - DNA, 25 bp, Homo sapien
taaggcaagtcatctactaggtgaa

SEQ ID NO: 5678618 - DNA, 25 bp, Homo sapien
gggtaattcttatgatatgtttata

SEQ ID NO: 5678619 - DNA, 25 bp, Homo sapien
ggcaagtcatctactaggtgaatag

SEQ ID NO: 5678620 - DNA, 25 bp, Homo sapien
agcccagtaaggcaagtcatctact

SEQ ID NO: 5678621 - DNA, 25 bp, Homo sapien
tataaacatatcataagaattaccc

SEQ ID NO: 5678622 - DNA, 25 bp, Homo sapien
ttaaactattcacctagtagatgac

SEQ ID NO: 5678623 - DNA, 25 bp, Homo sapien
taaagcagtagataaattagcaata

SEQ ID NO: 5678624 - DNA, 25 bp, Homo sapien
tagtagatgacttgccttactgggc

SEQ ID NO: 5678625 - DNA, 25 bp, Homo sapien
tattcacctagtagatgacttgcct

SEQ ID NO: 5678626 - DNA, 25 bp, Homo sapien
aaaatccattaaactattcacctag

SEQ ID NO: 5678627 - DNA, 25 bp, Homo sapien
ggactggatttacagtggagttgca

SEQ ID NO: 5678628 - DNA, 25 bp, Homo sapien
ctggatttacagtggagttgcatca

SEQ ID NO: 5678629 - DNA, 25 bp, Homo sapien
gatttgggactggatttacagtgga

SEQ ID NO: 5678630 - DNA, 25 bp, Homo sapien
tgatttgggactggatttacagtgg

SEQ ID NO: 5678631 - DNA, 25 bp, Homo sapien
tttgggactggatttacagtggagt

SEQ ID NO: 5678632 - DNA, 25 bp, Homo sapien
gagttgcatcatacttgcatttaat

SEQ ID NO: 5678633 - DNA, 25 bp, Homo sapien
tgcaactccactgtaaatccagtcc

SEQ ID NO: 5678634 - DNA, 25 bp, Homo sapien
aactccactgtaaatccagtcccaa

SEQ ID NO: 5678635 - DNA, 25 bp, Homo sapien
attaaatgcaagtatgatgcaactc

SEQ ID NO: 5678636 - DNA, 25 bp, Homo sapien
gatgcaactccactgtaaatccagt

SEQ ID NO: 5678637 - DNA, 25 bp, Homo sapien
tgatgcaactccactgtaaatccag

SEQ ID NO: 5678638 - DNA, 25 bp, Homo sapien
ccactgtaaatccagtcccaaatca

SEQ ID NO: 5678639 - DNA, 25 bp, Homo sapien
agaagattcgcttgaacccggaaag

SEQ ID NO: 5678640 - DNA, 25 bp, Homo sapien
agattcgcttgaacccggaaagcag

SEQ ID NO: 5678641 - DNA, 25 bp, Homo sapien
gattcgcttgaacccggaaagcaga

SEQ ID NO: 5678642 - DNA, 25 bp, Homo sapien
aagattcgcttgaacccggaaagca

SEQ ID NO: 5678643 - DNA, 25 bp, Homo sapien
cagaagattcgcttgaacccggaaa

SEQ ID NO: 5678644 - DNA, 25 bp, Homo sapien
gaagattcgcttgaacccggaaagc

SEQ ID NO: 5678645 - DNA, 25 bp, Homo sapien
ctttccgggttcaagcgaatcttct

SEQ ID NO: 5678646 - DNA, 25 bp, Homo sapien
tttccgggttcaagcgaatcttctg

SEQ ID NO: 5678647 - DNA, 25 bp, Homo sapien
ctgctttccgggttcaagcgaatct

SEQ ID NO: 5678648 - DNA, 25 bp, Homo sapien
tgctttccgggttcaagcgaatctt

SEQ ID NO: 5678649 - DNA, 25 bp, Homo sapien
gctttccgggttcaagcgaatcttc

SEQ ID NO: 5678650 - DNA, 25 bp, Homo sapien
tctgctttccgggttcaagcgaatc

SEQ ID NO: 5678651 - DNA, 25 bp, Homo sapien
tttctgttccaatttgatggttaaa

SEQ ID NO: 5678652 - DNA, 25 bp, Homo sapien
tttaaccatcaaattggaacagaaa

SEQ ID NO: 5678653 - DNA, 25 bp, Homo sapien
agctatttctgttccaatttgatgg

SEQ ID NO: 5678654 - DNA, 25 bp, Homo sapien
ttcagaaagtctgggcttcagctat

SEQ ID NO: 5678655 - DNA, 25 bp, Homo sapien
tgggcttcagctatttctgttccaa

SEQ ID NO: 5678656 - DNA, 25 bp, Homo sapien
catgttaaatgtactatttttccat

SEQ ID NO: 5678657 - DNA, 25 bp, Homo sapien
ccaatttgatggttaaaaattctga

SEQ ID NO: 5678658 - DNA, 25 bp, Homo sapien
tccattgtttattcagaaagtctgg

SEQ ID NO: 5678659 - DNA, 25 bp, Homo sapien
caatggaaaaatagtacatttaaca

SEQ ID NO: 5678660 - DNA, 25 bp, Homo sapien
tttaaccatcaaattggaacagaaa

SEQ ID NO: 5678661 - DNA, 25 bp, Homo sapien
gactttctgaataaacaatggaaaa

SEQ ID NO: 5678662 - DNA, 25 bp, Homo sapien
tagctgaagcccagactttctgaat

SEQ ID NO: 5678663 - DNA, 25 bp, Homo sapien
aatgatcagaatttttaaccatcaa

SEQ ID NO: 5678664 - DNA, 25 bp, Homo sapien
ttggaacagaaatagctgaagccca

SEQ ID NO: 5678665 - DNA, 25 bp, Homo sapien
acaaataatctaatatgatgctttc

SEQ ID NO: 5678666 - DNA, 25 bp, Homo sapien
aaactttttgagtagctagcttaca

SEQ ID NO: 5678667 - DNA, 25 bp, Homo sapien
ctgtggcttttaaatcgatttaaca

SEQ ID NO: 5678668 - DNA, 25 bp, Homo sapien
taaatcgatttaacaaaggctttga

SEQ ID NO: 5678669 - DNA, 25 bp, Homo sapien
gacttctgtataacaaataatctaa

SEQ ID NO: 5678670 - DNA, 25 bp, Homo sapien
gtagctagcttacaaagacttctgt

SEQ ID NO: 5678671 - DNA, 25 bp, Homo sapien
acagaagtctttgtaagctagctac

SEQ ID NO: 5678672 - DNA, 25 bp, Homo sapien
gaaagcatcatattagattatttgt

SEQ ID NO: 5678673 - DNA, 25 bp, Homo sapien
tgttaaatcgatttaaaagccacag

SEQ ID NO: 5678674 - DNA, 25 bp, Homo sapien
tgtaagctagctactcaaaaagttt

SEQ ID NO: 5678675 - DNA, 25 bp, Homo sapien
tcaaagcctttgttaaatcgattta

SEQ ID NO: 5678676 - DNA, 25 bp, Homo sapien
tagattatttgttatacagaagtct

SEQ ID NO: 5678677 - DNA, 25 bp, Homo sapien
ccggtgttcattttaagactagata

SEQ ID NO: 5678678 - DNA, 25 bp, Homo sapien
ttgcccggtgttcattttaagacta

SEQ ID NO: 5678679 - DNA, 25 bp, Homo sapien
gcccggtgttcattttaagactaga

SEQ ID NO: 5678680 - DNA, 25 bp, Homo sapien
gctgtatagctttttccattcttac

SEQ ID NO: 5678681 - DNA, 25 bp, Homo sapien
cggtgttcattttaagactagatat

SEQ ID NO: 5678682 - DNA, 25 bp, Homo sapien
tgcccggtgttcattttaagactag

SEQ ID NO: 5678683 - DNA, 25 bp, Homo sapien
tctagtcttaaaatgaacaccgggc

SEQ ID NO: 5678684 - DNA, 25 bp, Homo sapien
tatctagtcttaaaatgaacaccgg

SEQ ID NO: 5678685 - DNA, 25 bp, Homo sapien
taagaatggaaaaagctatacagca

SEQ ID NO: 5678686 - DNA, 25 bp, Homo sapien
atatctagtcttaaaatgaacaccg

SEQ ID NO: 5678687 - DNA, 25 bp, Homo sapien
gtaagaatggaaaaagctatacagc

SEQ ID NO: 5678688 - DNA, 25 bp, Homo sapien
tagtcttaaaatgaacaccgggcaa

SEQ ID NO: 5678689 - DNA, 25 bp, Homo sapien
caaccgggatgatcagtaagctcca

SEQ ID NO: 5678690 - DNA, 25 bp, Homo sapien
gaggctgaaaagtaggctcagctca

SEQ ID NO: 5678691 - DNA, 25 bp, Homo sapien
gggatgatcagtaagctccaattcg

SEQ ID NO: 5678692 - DNA, 25 bp, Homo sapien
gagaccagctctattagaacccaac

SEQ ID NO: 5678693 - DNA, 25 bp, Homo sapien
tattagaacccaaccgggatgatca

SEQ ID NO: 5678694 - DNA, 25 bp, Homo sapien
cagctctattagaacccaaccggga

SEQ ID NO: 5678695 - DNA, 25 bp, Homo sapien
gagcttactgatcatcccggttggg

SEQ ID NO: 5678696 - DNA, 25 bp, Homo sapien
tctgagctgagcctacttttcagcc

SEQ ID NO: 5678697 - DNA, 25 bp, Homo sapien
catcccggttgggttctaatagagc

SEQ ID NO: 5678698 - DNA, 25 bp, Homo sapien
ccagccccaagaggatataaataca

SEQ ID NO: 5678699 - DNA, 25 bp, Homo sapien
gaattggagcttactgatcatcccg

SEQ ID NO: 5678700 - DNA, 25 bp, Homo sapien
gttgggttctaatagagctggtctc

SEQ ID NO: 5678701 - DNA, 25 bp, Homo sapien
gtggcgggatctcagacccctgcaa

SEQ ID NO: 5678702 - DNA, 25 bp, Homo sapien
cgggatctcagacccctgcaacctc

SEQ ID NO: 5678703 - DNA, 25 bp, Homo sapien
ggcgggatctcagacccctgcaacc

SEQ ID NO: 5678704 - DNA, 25 bp, Homo sapien
tggcgggatctcagacccctgcaac

SEQ ID NO: 5678705 - DNA, 25 bp, Homo sapien
gggatctcagacccctgcaacctct

SEQ ID NO: 5678706 - DNA, 25 bp, Homo sapien
gcgggatctcagacccctgcaacct

SEQ ID NO: 5678707 - DNA, 25 bp, Homo sapien
gttgcaggggtctgagatcccgcca

SEQ ID NO: 5678708 - DNA, 25 bp, Homo sapien
ggttgcaggggtctgagatcccgcc

SEQ ID NO: 5678709 - DNA, 25 bp, Homo sapien
ttgcaggggtctgagatcccgccac

SEQ ID NO: 5678710 - DNA, 25 bp, Homo sapien
agaggttgcaggggtctgagatccc

SEQ ID NO: 5678711 - DNA, 25 bp, Homo sapien
gaggttgcaggggtctgagatcccg

SEQ ID NO: 5678712 - DNA, 25 bp, Homo sapien
aggttgcaggggtctgagatcccgc

SEQ ID NO: 5678713 - DNA, 25 bp, Homo sapien
cccgattgttactcggtagagggag

SEQ ID NO: 5678714 - DNA, 25 bp, Homo sapien
ggatgaactctctcccgattgttac

SEQ ID NO: 5678715 - DNA, 25 bp, Homo sapien
ttgttactcggtagagggagacgtg

SEQ ID NO: 5678716 - DNA, 25 bp, Homo sapien
gaactctctcccgattgttactcgg

SEQ ID NO: 5678717 - DNA, 25 bp, Homo sapien
tgaggatgaactctctcccgattgt

SEQ ID NO: 5678718 - DNA, 25 bp, Homo sapien
tgctcgctcgggtccggcgtgcctt

SEQ ID NO: 5678719 - DNA, 25 bp, Homo sapien
aaggcacgccggacccgagcgagca

SEQ ID NO: 5678720 - DNA, 25 bp, Homo sapien
tctaccgagtaacaatcgggagaga

SEQ ID NO: 5678721 - DNA, 25 bp, Homo sapien
caatcgggagagagttcatcctcag

SEQ ID NO: 5678722 - DNA, 25 bp, Homo sapien
ctccctctaccgagtaacaatcggg

SEQ ID NO: 5678723 - DNA, 25 bp, Homo sapien
ccgagtaacaatcgggagagagttc

SEQ ID NO: 5678724 - DNA, 25 bp, Homo sapien
taacaatcgggagagagttcatcct

SEQ ID NO: 5678725 - DNA, 25 bp, Homo sapien
ccgccactctagtcggtggattgac

SEQ ID NO: 5678726 - DNA, 25 bp, Homo sapien
ttgacccttcttcccgccgcaggga

SEQ ID NO: 5678727 - DNA, 25 bp, Homo sapien
ctctagtcggtggattgacccttct

SEQ ID NO: 5678728 - DNA, 25 bp, Homo sapien
tccccgccactctagtcggtggatt

SEQ ID NO: 5678729 - DNA, 25 bp, Homo sapien
cagcgccgcgtgatgctccccgcca

SEQ ID NO: 5678730 - DNA, 25 bp, Homo sapien
cactctagtcggtggattgaccctt

SEQ ID NO: 5678731 - DNA, 25 bp, Homo sapien
ggtcaatccaccgactagagtggcg

SEQ ID NO: 5678732 - DNA, 25 bp, Homo sapien
tccctgcggcgggaagaagggtcaa

SEQ ID NO: 5678733 - DNA, 25 bp, Homo sapien
aagggtcaatccaccgactagagtg

SEQ ID NO: 5678734 - DNA, 25 bp, Homo sapien
agaagggtcaatccaccgactagag

SEQ ID NO: 5678735 - DNA, 25 bp, Homo sapien
tcaatccaccgactagagtggcggg

SEQ ID NO: 5678736 - DNA, 25 bp, Homo sapien
tggcggggagcatcacgcggcgctg

SEQ ID NO: 5678737 - DNA, 25 bp, Homo sapien
ccgagtccgagtccccggcctccag

SEQ ID NO: 5678738 - DNA, 25 bp, Homo sapien
tgagaaaggcctccgcggctacccg

SEQ ID NO: 5678739 - DNA, 25 bp, Homo sapien
ggcgcgatggtgagaaaggcctccg

SEQ ID NO: 5678740 - DNA, 25 bp, Homo sapien
gtgagaaaggcctccgcggctaccc

SEQ ID NO: 5678741 - DNA, 25 bp, Homo sapien
ggtgagaaaggcctccgcggctacc

SEQ ID NO: 5678742 - DNA, 25 bp, Homo sapien
cctccgcggctacccgagtccgagt

SEQ ID NO: 5678743 - DNA, 25 bp, Homo sapien
cgggtagccgcggaggcctttctca

SEQ ID NO: 5678744 - DNA, 25 bp, Homo sapien
ggtagccgcggaggcctttctcacc

SEQ ID NO: 5678745 - DNA, 25 bp, Homo sapien
ggctggggtcgctctggaggccggg

SEQ ID NO: 5678746 - DNA, 25 bp, Homo sapien
gggtagccgcggaggcctttctcac

SEQ ID NO: 5678747 - DNA, 25 bp, Homo sapien
ctggaggccggggactcggactcgg

SEQ ID NO: 5678748 - DNA, 25 bp, Homo sapien
actcggactcgggtagccgcggagg

SEQ ID NO: 5678749 - DNA, 25 bp, Homo sapien
tagttaagctcgtgtaacggcggcg

SEQ ID NO: 5678750 - DNA, 25 bp, Homo sapien
gctgttagcggcgttgtagttaagc

SEQ ID NO: 5678751 - DNA, 25 bp, Homo sapien
gctcctctcgcgaggattggctgtt

SEQ ID NO: 5678752 - DNA, 25 bp, Homo sapien
gcagctgctgtagcgaagagagttt

SEQ ID NO: 5678753 - DNA, 25 bp, Homo sapien
ggctcctctcgcgaggattggctgt

SEQ ID NO: 5678754 - DNA, 25 bp, Homo sapien
taacggcggcggtgtcggcagctgc

SEQ ID NO: 5678755 - DNA, 25 bp, Homo sapien
aacagccaatcctcgcgagaggagc

SEQ ID NO: 5678756 - DNA, 25 bp, Homo sapien
gccgttacacgagcttaactacaac

SEQ ID NO: 5678757 - DNA, 25 bp, Homo sapien
cgccgccgttacacgagcttaacta

SEQ ID NO: 5678758 - DNA, 25 bp, Homo sapien
aaactctcttcgctacagcagctgc

SEQ ID NO: 5678759 - DNA, 25 bp, Homo sapien
gcttaactacaacgccgctaacagc

SEQ ID NO: 5678760 - DNA, 25 bp, Homo sapien
gcagctgccgacaccgccgccgtta

SEQ ID NO: 5678761 - DNA, 25 bp, Homo sapien
aatgaggacgtcagtactaagtaca

SEQ ID NO: 5678762 - DNA, 25 bp, Homo sapien
catcctttcttagccattcagaacc

SEQ ID NO: 5678763 - DNA, 25 bp, Homo sapien
gccattcagaacctttctaaatgca

SEQ ID NO: 5678764 - DNA, 25 bp, Homo sapien
gtaaatgaggacgtcagtactaagt

SEQ ID NO: 5678765 - DNA, 25 bp, Homo sapien
agtacatcctttcttagccattcag

SEQ ID NO: 5678766 - DNA, 25 bp, Homo sapien
cagtactaagtacatcctttcttag

SEQ ID NO: 5678767 - DNA, 25 bp, Homo sapien
tgtacttagtactgacgtcctcatt

SEQ ID NO: 5678768 - DNA, 25 bp, Homo sapien
gaaaggttctgaatggctaagaaag

SEQ ID NO: 5678769 - DNA, 25 bp, Homo sapien
tctgaatggctaagaaaggatgtac

SEQ ID NO: 5678770 - DNA, 25 bp, Homo sapien
ctaagaaaggatgtacttagtactg

SEQ ID NO: 5678771 - DNA, 25 bp, Homo sapien
acttagtactgacgtcctcatttac

SEQ ID NO: 5678772 - DNA, 25 bp, Homo sapien
tgcatttagaaaggttctgaatggc

SEQ ID NO: 5678773 - DNA, 25 bp, Homo sapien
aatcgagaattctatcgttatgcca

SEQ ID NO: 5678774 - DNA, 25 bp, Homo sapien
tgccaactcaaaagtggtttatgtg

SEQ ID NO: 5678775 - DNA, 25 bp, Homo sapien
ggtatacagaccaagtctaatcgag

SEQ ID NO: 5678776 - DNA, 25 bp, Homo sapien
gaccaagtctaatcgagaattctat

SEQ ID NO: 5678777 - DNA, 25 bp, Homo sapien
gagtggtatacagaccaagtctaat

SEQ ID NO: 5678778 - DNA, 25 bp, Homo sapien
tatcgttatgccaactcaaaagtgg

SEQ ID NO: 5678779 - DNA, 25 bp, Homo sapien
aaccacttttgagttggcataacga

SEQ ID NO: 5678780 - DNA, 25 bp, Homo sapien
tggcataacgatagaattctcgatt

SEQ ID NO: 5678781 - DNA, 25 bp, Homo sapien
cgatagaattctcgattagacttgg

SEQ ID NO: 5678782 - DNA, 25 bp, Homo sapien
gaattctcgattagacttggtctgt

SEQ ID NO: 5678783 - DNA, 25 bp, Homo sapien
gattagacttggtctgtataccact

SEQ ID NO: 5678784 - DNA, 25 bp, Homo sapien
cacataaaccacttttgagttggca

SEQ ID NO: 5678785 - DNA, 25 bp, Homo sapien
tatccaaatgattttctatcctgga

SEQ ID NO: 5678786 - DNA, 25 bp, Homo sapien
ctatccaaatgattttctatcctgg

SEQ ID NO: 5678787 - DNA, 25 bp, Homo sapien
atccaaatgattttctatcctggaa

SEQ ID NO: 5678788 - DNA, 25 bp, Homo sapien
ccaggatagaaaatcatttggatag

SEQ ID NO: 5678789 - DNA, 25 bp, Homo sapien
ttccaggatagaaaatcatttggat

SEQ ID NO: 5678790 - DNA, 25 bp, Homo sapien
tccaggatagaaaatcatttggata

SEQ ID NO: 5678791 - DNA, 25 bp, Homo sapien
ggactggacttaatcttccacaagg

SEQ ID NO: 5678792 - DNA, 25 bp, Homo sapien
caaagggactggacttaatcttcca

SEQ ID NO: 5678793 - DNA, 25 bp, Homo sapien
taatcttccacaaggttcccaggcg

SEQ ID NO: 5678794 - DNA, 25 bp, Homo sapien
gacttaatcttccacaaggttccca

SEQ ID NO: 5678795 - DNA, 25 bp, Homo sapien
cacaaggttcccaggcgggtcctgg

SEQ ID NO: 5678796 - DNA, 25 bp, Homo sapien
aagggactggacttaatcttccaca

SEQ ID NO: 5678797 - DNA, 25 bp, Homo sapien
cgcctgggaaccttgtggaagatta

SEQ ID NO: 5678798 - DNA, 25 bp, Homo sapien
gaaccttgtggaagattaagtccag

SEQ ID NO: 5678799 - DNA, 25 bp, Homo sapien
tgggaaccttgtggaagattaagtc

SEQ ID NO: 5678800 - DNA, 25 bp, Homo sapien
caggacccgcctgggaaccttgtgg

SEQ ID NO: 5678801 - DNA, 25 bp, Homo sapien
ccttgtggaagattaagtccagtcc

SEQ ID NO: 5678802 - DNA, 25 bp, Homo sapien
tggaagattaagtccagtccctttg

SEQ ID NO: 5678803 - DNA, 25 bp, Homo sapien
ttgcatccctgtctccaacctgggt

SEQ ID NO: 5678804 - DNA, 25 bp, Homo sapien
tgaggttactgtaagctgtgattgc

SEQ ID NO: 5678805 - DNA, 25 bp, Homo sapien
tgcatccctgtctccaacctgggtg

SEQ ID NO: 5678806 - DNA, 25 bp, Homo sapien
gctgtgattgcatccctgtctccaa

SEQ ID NO: 5678807 - DNA, 25 bp, Homo sapien
gattgcatccctgtctccaacctgg

SEQ ID NO: 5678808 - DNA, 25 bp, Homo sapien
gcatccctgtctccaacctgggtga

SEQ ID NO: 5678809 - DNA, 25 bp, Homo sapien
ccaggttggagacagggatgcaatc

SEQ ID NO: 5678810 - DNA, 25 bp, Homo sapien
gcaatcacagcttacagtaacctca

SEQ ID NO: 5678811 - DNA, 25 bp, Homo sapien
acccaggttggagacagggatgcaa

SEQ ID NO: 5678812 - DNA, 25 bp, Homo sapien
tcacccaggttggagacagggatgc

SEQ ID NO: 5678813 - DNA, 25 bp, Homo sapien
ttggagacagggatgcaatcacagc

SEQ ID NO: 5678814 - DNA, 25 bp, Homo sapien
cacccaggttggagacagggatgca

SEQ ID NO: 5678815 - DNA, 25 bp, Homo sapien
acaaacaaaaatggctaggtgtggt

SEQ ID NO: 5678816 - DNA, 25 bp, Homo sapien
aaacaaacaaaaatggctaggtgtg

SEQ ID NO: 5678817 - DNA, 25 bp, Homo sapien
caaacaaacaaaaatggctaggtgt

SEQ ID NO: 5678818 - DNA, 25 bp, Homo sapien
ggtaacatagtgagagctcgtctct

SEQ ID NO: 5678819 - DNA, 25 bp, Homo sapien
caaacaaaaatggctaggtgtggtg

SEQ ID NO: 5678820 - DNA, 25 bp, Homo sapien
aacaaacaaaaatggctaggtgtgg

SEQ ID NO: 5678821 - DNA, 25 bp, Homo sapien
ccaccacacctagccatttttgttt

SEQ ID NO: 5678822 - DNA, 25 bp, Homo sapien
caccacacctagccatttttgtttg

SEQ ID NO: 5678823 - DNA, 25 bp, Homo sapien
accacacctagccatttttgtttgt

SEQ ID NO: 5678824 - DNA, 25 bp, Homo sapien
ccacacctagccatttttgtttgtt

SEQ ID NO: 5678825 - DNA, 25 bp, Homo sapien
tagagacgagctctcactatgttac

SEQ ID NO: 5678826 - DNA, 25 bp, Homo sapien
agagacgagctctcactatgttacc

SEQ ID NO: 5678827 - DNA, 25 bp, Homo sapien
gtgtacaaatgtctcatcaagacca

SEQ ID NO: 5678828 - DNA, 25 bp, Homo sapien
agaccatgcgtttagttcttttggg

SEQ ID NO: 5678829 - DNA, 25 bp, Homo sapien
tcatcaagaccatgcgtttagttct

SEQ ID NO: 5678830 - DNA, 25 bp, Homo sapien
ggtgtacaaatgtctcatcaagacc

SEQ ID NO: 5678831 - DNA, 25 bp, Homo sapien
tactctgaaaatgggtgtacaaatg

SEQ ID NO: 5678832 - DNA, 25 bp, Homo sapien
tgctactctgaaaatgggtgtacaa

SEQ ID NO: 5678833 - DNA, 25 bp, Homo sapien
agaactaaacgcatggtcttgatga

SEQ ID NO: 5678834 - DNA, 25 bp, Homo sapien
caaaagaactaaacgcatggtcttg

SEQ ID NO: 5678835 - DNA, 25 bp, Homo sapien
ggtcttgatgagacatttgtacacc

SEQ ID NO: 5678836 - DNA, 25 bp, Homo sapien
catttgtacacccattttcagagta

SEQ ID NO: 5678837 - DNA, 25 bp, Homo sapien
cccaaaagaactaaacgcatggtct

SEQ ID NO: 5678838 - DNA, 25 bp, Homo sapien
ttgtacacccattttcagagtagca

SEQ ID NO: 5678839 - DNA, 25 bp, Homo sapien
tggagtctcactctgtcgcccaagc

SEQ ID NO: 5678840 - DNA, 25 bp, Homo sapien
gcagtggcatgatcttggctcactg

SEQ ID NO: 5678841 - DNA, 25 bp, Homo sapien
ggagtctcactctgtcgcccaagct

SEQ ID NO: 5678842 - DNA, 25 bp, Homo sapien
ctcactctgtcgcccaagctggagt

SEQ ID NO: 5678843 - DNA, 25 bp, Homo sapien
caatctctgcctcccgtattcaagt

SEQ ID NO: 5678844 - DNA, 25 bp, Homo sapien
gagtctcactctgtcgcccaagctg

SEQ ID NO: 5678845 - DNA, 25 bp, Homo sapien
agcttgggcgacagagtgagactcc

SEQ ID NO: 5678846 - DNA, 25 bp, Homo sapien
actccagcttgggcgacagagtgag

SEQ ID NO: 5678847 - DNA, 25 bp, Homo sapien
cagcttgggcgacagagtgagactc

SEQ ID NO: 5678848 - DNA, 25 bp, Homo sapien
acttgaatacgggaggcagagattg

SEQ ID NO: 5678849 - DNA, 25 bp, Homo sapien
cagtgagccaagatcatgccactgc

SEQ ID NO: 5678850 - DNA, 25 bp, Homo sapien
gcttgggcgacagagtgagactcca

SEQ ID NO: 5678851 - DNA, 25 bp, Homo sapien
gaagataacagattatattcaaggg

SEQ ID NO: 5678852 - DNA, 25 bp, Homo sapien
aagataacagattatattcaaggga

SEQ ID NO: 5678853 - DNA, 25 bp, Homo sapien
ttaaaacattatagacactgaatat

SEQ ID NO: 5678854 - DNA, 25 bp, Homo sapien
aaaacattatagacactgaatatta

SEQ ID NO: 5678855 - DNA, 25 bp, Homo sapien
taaaacattatagacactgaatatt

SEQ ID NO: 5678856 - DNA, 25 bp, Homo sapien
atattcagtgtctataatgttttaa

SEQ ID NO: 5678857 - DNA, 25 bp, Homo sapien
aatattcagtgtctataatgtttta

SEQ ID NO: 5678858 - DNA, 25 bp, Homo sapien
taatattcagtgtctataatgtttt

SEQ ID NO: 5678859 - DNA, 25 bp, Homo sapien
cccttgaatataatctgttatcttc

SEQ ID NO: 5678860 - DNA, 25 bp, Homo sapien
ccttgaatataatctgttatcttca

SEQ ID NO: 5678861 - DNA, 25 bp, Homo sapien
tcccttgaatataatctgttatctt

SEQ ID NO: 5678862 - DNA, 25 bp, Homo sapien
gatgataaggattttagtctatgta

SEQ ID NO: 5678863 - DNA, 25 bp, Homo sapien
aagatgataaggattttagtctatg

SEQ ID NO: 5678864 - DNA, 25 bp, Homo sapien
gataaggattttagtctatgtagag

SEQ ID NO: 5678865 - DNA, 25 bp, Homo sapien
taaggattttagtctatgtagagta

SEQ ID NO: 5678866 - DNA, 25 bp, Homo sapien
aggattttagtctatgtagagtaca

SEQ ID NO: 5678867 - DNA, 25 bp, Homo sapien
aaggattttagtctatgtagagtac

SEQ ID NO: 5678868 - DNA, 25 bp, Homo sapien
catagactaaaatccttatcatctt

SEQ ID NO: 5678869 - DNA, 25 bp, Homo sapien
ctctacatagactaaaatccttatc

SEQ ID NO: 5678870 - DNA, 25 bp, Homo sapien
tgtactctacatagactaaaatcct

SEQ ID NO: 5678871 - DNA, 25 bp, Homo sapien
tactctacatagactaaaatcctta

SEQ ID NO: 5678872 - DNA, 25 bp, Homo sapien
tacatagactaaaatccttatcatc

SEQ ID NO: 5678873 - DNA, 25 bp, Homo sapien
tctacatagactaaaatccttatca

SEQ ID NO: 5678874 - DNA, 25 bp, Homo sapien
atccaggtccaacaaacttcactca

SEQ ID NO: 5678875 - DNA, 25 bp, Homo sapien
gtatatcagcacaaatagcactgtt

SEQ ID NO: 5678876 - DNA, 25 bp, Homo sapien
tcaggtatatcagcacaaatagcac

SEQ ID NO: 5678877 - DNA, 25 bp, Homo sapien
tagcactgtttaccatccaggtcca

SEQ ID NO: 5678878 - DNA, 25 bp, Homo sapien
taccatccaggtccaacaaacttca

SEQ ID NO: 5678879 - DNA, 25 bp, Homo sapien
tgtttaccatccaggtccaacaaac

SEQ ID NO: 5678880 - DNA, 25 bp, Homo sapien
gtgctatttgtgctgatatacctga

SEQ ID NO: 5678881 - DNA, 25 bp, Homo sapien
gaagtttgttggacctggatggtaa

SEQ ID NO: 5678882 - DNA, 25 bp, Homo sapien
tgagtgaagtttgttggacctggat

SEQ ID NO: 5678883 - DNA, 25 bp, Homo sapien
aacagtgctatttgtgctgatatac

SEQ ID NO: 5678884 - DNA, 25 bp, Homo sapien
tgatactgatgaccccaaccccaca

SEQ ID NO: 5678885 - DNA, 25 bp, Homo sapien
tggacctggatggtaaacagtgcta

SEQ ID NO: 5678886 - DNA, 25 bp, Homo sapien
tcagtcgttatacacctgaggatgt

SEQ ID NO: 5678887 - DNA, 25 bp, Homo sapien
cagccctcagtcgttatacacctga

SEQ ID NO: 5678888 - DNA, 25 bp, Homo sapien
gccctcagtcgttatacacctgagg

SEQ ID NO: 5678889 - DNA, 25 bp, Homo sapien
tcgttatacacctgaggatgtaaat

SEQ ID NO: 5678890 - DNA, 25 bp, Homo sapien
ctgtgctgggtgatgttagatttgt

SEQ ID NO: 5678891 - DNA, 25 bp, Homo sapien
cagtcgttatacacctgaggatgta

SEQ ID NO: 5678892 - DNA, 25 bp, Homo sapien
catcctcaggtgtataacgactgag

SEQ ID NO: 5678893 - DNA, 25 bp, Homo sapien
acaaatctaacatcacccagcacag

SEQ ID NO: 5678894 - DNA, 25 bp, Homo sapien
tacatcctcaggtgtataacgactg

SEQ ID NO: 5678895 - DNA, 25 bp, Homo sapien
tcaggtgtataacgactgagggctg

SEQ ID NO: 5678896 - DNA, 25 bp, Homo sapien
atttacatcctcaggtgtataacga

SEQ ID NO: 5678897 - DNA, 25 bp, Homo sapien
cctcaggtgtataacgactgagggc

SEQ ID NO: 5678898 - DNA, 25 bp, Homo sapien
tcctcagcagagggtttgtgagatg

SEQ ID NO: 5678899 - DNA, 25 bp, Homo sapien
tcagcagagggtttgtgagatgggc

SEQ ID NO: 5678900 - DNA, 25 bp, Homo sapien
gcagagggtttgtgagatgggcagc

SEQ ID NO: 5678901 - DNA, 25 bp, Homo sapien
atcctcagcagagggtttgtgagat

SEQ ID NO: 5678902 - DNA, 25 bp, Homo sapien
catcctcagcagagggtttgtgaga

SEQ ID NO: 5678903 - DNA, 25 bp, Homo sapien
cagcagagggtttgtgagatgggca

SEQ ID NO: 5678904 - DNA, 25 bp, Homo sapien
gctgcccatctcacaaaccctctgc

SEQ ID NO: 5678905 - DNA, 25 bp, Homo sapien
ccatctcacaaaccctctgctgagg

SEQ ID NO: 5678906 - DNA, 25 bp, Homo sapien
tgcccatctcacaaaccctctgctg

SEQ ID NO: 5678907 - DNA, 25 bp, Homo sapien
catctcacaaaccctctgctgagga

SEQ ID NO: 5678908 - DNA, 25 bp, Homo sapien
tctcacaaaccctctgctgaggatg

SEQ ID NO: 5678909 - DNA, 25 bp, Homo sapien
atctcacaaaccctctgctgaggat

SEQ ID NO: 5678910 - DNA, 25 bp, Homo sapien
aaagtaaaaatagtagcgtgtctgg

SEQ ID NO: 5678911 - DNA, 25 bp, Homo sapien
tagtagcgtgtctggatccctgtca

SEQ ID NO: 5678912 - DNA, 25 bp, Homo sapien
aaaaatagtagcgtgtctggatccc

SEQ ID NO: 5678913 - DNA, 25 bp, Homo sapien
tgcttctaatacatggctctgctgg

SEQ ID NO: 5678914 - DNA, 25 bp, Homo sapien
agcgtgtctggatccctgtcaaaga

SEQ ID NO: 5678915 - DNA, 25 bp, Homo sapien
cttctaatacatggctctgctggct

SEQ ID NO: 5678916 - DNA, 25 bp, Homo sapien
agccagcagagccatgtattagaag

SEQ ID NO: 5678917 - DNA, 25 bp, Homo sapien
ccagcagagccatgtattagaagca

SEQ ID NO: 5678918 - DNA, 25 bp, Homo sapien
tctttgacagggatccagacacgct

SEQ ID NO: 5678919 - DNA, 25 bp, Homo sapien
ttgacagggatccagacacgctact

SEQ ID NO: 5678920 - DNA, 25 bp, Homo sapien
cagggatccagacacgctactattt

SEQ ID NO: 5678921 - DNA, 25 bp, Homo sapien
gatccagacacgctactatttttac

SEQ ID NO: 5678922 - DNA, 25 bp, Homo sapien
tccttaatctttcattctcagccac

SEQ ID NO: 5678923 - DNA, 25 bp, Homo sapien
ttccttaatctttcattctcagcca

SEQ ID NO: 5678924 - DNA, 25 bp, Homo sapien
gtggctgagaatgaaagattaagga

SEQ ID NO: 5678925 - DNA, 25 bp, Homo sapien
tggctgagaatgaaagattaaggaa

SEQ ID NO: 5678926 - DNA, 25 bp, Homo sapien
ttctcagccacaaggaattccacat

SEQ ID NO: 5678927 - DNA, 25 bp, Homo sapien
taatctttcattctcagccacaagg

SEQ ID NO: 5678928 - DNA, 25 bp, Homo sapien
caaggaattccacatgcctcttcaa

SEQ ID NO: 5678929 - DNA, 25 bp, Homo sapien
tccacatgcctcttcaaatctgctt

SEQ ID NO: 5678930 - DNA, 25 bp, Homo sapien
ccttttcagccttgagttgtttatt

SEQ ID NO: 5678931 - DNA, 25 bp, Homo sapien
tcaaatctgcttctctataattgtt

SEQ ID NO: 5678932 - DNA, 25 bp, Homo sapien
aagaaaataaacaactcaaggctga

SEQ ID NO: 5678933 - DNA, 25 bp, Homo sapien
gatttgaagaggcatgtggaattcc

SEQ ID NO: 5678934 - DNA, 25 bp, Homo sapien
tagagaagcagatttgaagaggcat

SEQ ID NO: 5678935 - DNA, 25 bp, Homo sapien
aacaattatagagaagcagatttga

SEQ ID NO: 5678936 - DNA, 25 bp, Homo sapien
gcatgtggaattccttgtggctgag

SEQ ID NO: 5678937 - DNA, 25 bp, Homo sapien
tgtggctgagaatgaaagattaagg

SEQ ID NO: 5678938 - DNA, 25 bp, Homo sapien
ccagctccttttctattggaccatt

SEQ ID NO: 5678939 - DNA, 25 bp, Homo sapien
cagctccttttctattggaccattt

SEQ ID NO: 5678940 - DNA, 25 bp, Homo sapien
tccagctccttttctattggaccat

SEQ ID NO: 5678941 - DNA, 25 bp, Homo sapien
gctccttttctattggaccatttag

SEQ ID NO: 5678942 - DNA, 25 bp, Homo sapien
agctccttttctattggaccattta

SEQ ID NO: 5678943 - DNA, 25 bp, Homo sapien
ctccttttctattggaccatttaga

SEQ ID NO: 5678944 - DNA, 25 bp, Homo sapien
ctaaatggtccaatagaaaaggagc

SEQ ID NO: 5678945 - DNA, 25 bp, Homo sapien
taaatggtccaatagaaaaggagct

SEQ ID NO: 5678946 - DNA, 25 bp, Homo sapien
aatggtccaatagaaaaggagctgg

SEQ ID NO: 5678947 - DNA, 25 bp, Homo sapien
tctaaatggtccaatagaaaaggag

SEQ ID NO: 5678948 - DNA, 25 bp, Homo sapien
aaatggtccaatagaaaaggagctg

SEQ ID NO: 5678949 - DNA, 25 bp, Homo sapien
atggtccaatagaaaaggagctgga

SEQ ID NO: 5678950 - DNA, 25 bp, Homo sapien
atcattagctcgagtcagtgaatca

SEQ ID NO: 5678951 - DNA, 25 bp, Homo sapien
ccatgaatttagtgtgtactaagtt

SEQ ID NO: 5678952 - DNA, 25 bp, Homo sapien
ggaatcattagctcgagtcagtgaa

SEQ ID NO: 5678953 - DNA, 25 bp, Homo sapien
cctccatgaatttagtgtgtactaa

SEQ ID NO: 5678954 - DNA, 25 bp, Homo sapien
taagttggaatcattagctcgagtc

SEQ ID NO: 5678955 - DNA, 25 bp, Homo sapien
gttggaatcattagctcgagtcagt

SEQ ID NO: 5678956 - DNA, 25 bp, Homo sapien
ttagtacacactaaattcatggagg

SEQ ID NO: 5678957 - DNA, 25 bp, Homo sapien
ttcactgactcgagctaatgattcc

SEQ ID NO: 5678958 - DNA, 25 bp, Homo sapien
aacttagtacacactaaattcatgg

SEQ ID NO: 5678959 - DNA, 25 bp, Homo sapien
tgattcactgactcgagctaatgat

SEQ ID NO: 5678960 - DNA, 25 bp, Homo sapien
gactcgagctaatgattccaactta

SEQ ID NO: 5678961 - DNA, 25 bp, Homo sapien
cactgactcgagctaatgattccaa

SEQ ID NO: 5678962 - DNA, 25 bp, Homo sapien
ttaaccctgaagacaagacaagtaa

SEQ ID NO: 5678963 - DNA, 25 bp, Homo sapien
ttacttgtcttgtcttcagggttaa

SEQ ID NO: 5678964 - DNA, 25 bp, Homo sapien
taacttttatgcattttaaccctga

SEQ ID NO: 5678965 - DNA, 25 bp, Homo sapien
ccatttggtttgtatctggagaaac

SEQ ID NO: 5678966 - DNA, 25 bp, Homo sapien
tttaaccctgaagacaagacaagta

SEQ ID NO: 5678967 - DNA, 25 bp, Homo sapien
ccctgaagacaagacaagtaattgt

SEQ ID NO: 5678968 - DNA, 25 bp, Homo sapien
aaaattattctatgtagccatttgg

SEQ ID NO: 5678969 - DNA, 25 bp, Homo sapien
gacaagtaattgttgcttgaaaaaa

SEQ ID NO: 5678970 - DNA, 25 bp, Homo sapien
ttttttcaagcaacaattacttgtc

SEQ ID NO: 5678971 - DNA, 25 bp, Homo sapien
acaattacttgtcttgtcttcaggg

SEQ ID NO: 5678972 - DNA, 25 bp, Homo sapien
aaccaaatggctacatagaataatt

SEQ ID NO: 5678973 - DNA, 25 bp, Homo sapien
gtttctccagatacaaaccaaatgg

SEQ ID NO: 5678974 - DNA, 25 bp, Homo sapien
tcagggttaaaatgcataaaagtta

SEQ ID NO: 5678975 - DNA, 25 bp, Homo sapien
tacttgtcttgtcttcagggttaaa

SEQ ID NO: 5678976 - DNA, 25 bp, Homo sapien
ccacccgcctcggcctttcaaagtg

SEQ ID NO: 5678977 - DNA, 25 bp, Homo sapien
cacccgcctcggcctttcaaagtgc

SEQ ID NO: 5678978 - DNA, 25 bp, Homo sapien
atccacccgcctcggcctttcaaag

SEQ ID NO: 5678979 - DNA, 25 bp, Homo sapien
gatccacccgcctcggcctttcaaa

SEQ ID NO: 5678980 - DNA, 25 bp, Homo sapien
acccgcctcggcctttcaaagtgct

SEQ ID NO: 5678981 - DNA, 25 bp, Homo sapien
tgatccacccgcctcggcctttcaa

SEQ ID NO: 5678982 - DNA, 25 bp, Homo sapien
ttgaaaggccgaggcgggtggatca

SEQ ID NO: 5678983 - DNA, 25 bp, Homo sapien
gcactttgaaaggccgaggcgggtg

SEQ ID NO: 5678984 - DNA, 25 bp, Homo sapien
cactttgaaaggccgaggcgggtgg

SEQ ID NO: 5678985 - DNA, 25 bp, Homo sapien
agcactttgaaaggccgaggcgggt

SEQ ID NO: 5678986 - DNA, 25 bp, Homo sapien
ctttgaaaggccgaggcgggtggat

SEQ ID NO: 5678987 - DNA, 25 bp, Homo sapien
tttgaaaggccgaggcgggtggatc

SEQ ID NO: 5678988 - DNA, 25 bp, Homo sapien
tggcgtgagacggtttctcacatgg

SEQ ID NO: 5678989 - DNA, 25 bp, Homo sapien
ggctttttaacgatcaccattccag

SEQ ID NO: 5678990 - DNA, 25 bp, Homo sapien
ccagctggcgtgagacggtttctca

SEQ ID NO: 5678991 - DNA, 25 bp, Homo sapien
tcaccattccagctggcgtgagacg

SEQ ID NO: 5678992 - DNA, 25 bp, Homo sapien
ttccagctggcgtgagacggtttct

SEQ ID NO: 5678993 - DNA, 25 bp, Homo sapien
accattccagctggcgtgagacggt

SEQ ID NO: 5678994 - DNA, 25 bp, Homo sapien
cgtctcacgccagctggaatggtga

SEQ ID NO: 5678995 - DNA, 25 bp, Homo sapien
ctggaatggtgatcgttaaaaagcc

SEQ ID NO: 5678996 - DNA, 25 bp, Homo sapien
ggaatggtgatcgttaaaaagccag

SEQ ID NO: 5678997 - DNA, 25 bp, Homo sapien
tgagaaaccgtctcacgccagctgg

SEQ ID NO: 5678998 - DNA, 25 bp, Homo sapien
gaaaccgtctcacgccagctggaat

SEQ ID NO: 5678999 - DNA, 25 bp, Homo sapien
ccatgtgagaaaccgtctcacgcca

SEQ ID NO: 5679000 - DNA, 25 bp, Homo sapien
tggttctagatccttgaggaatcac

SEQ ID NO: 5679001 - DNA, 25 bp, Homo sapien
ctaatttacactcccaccaacagcg

SEQ ID NO: 5679002 - DNA, 25 bp, Homo sapien
gatggtatttctggttctagatcct

SEQ ID NO: 5679003 - DNA, 25 bp, Homo sapien
tgctgggtcagatggtatttctggt

SEQ ID NO: 5679004 - DNA, 25 bp, Homo sapien
ttgctgggtcagatggtatttctgg

SEQ ID NO: 5679005 - DNA, 25 bp, Homo sapien
cacactgtcttccacagtggttgaa

SEQ ID NO: 5679006 - DNA, 25 bp, Homo sapien
accagaaataccatctgacccagca

SEQ ID NO: 5679007 - DNA, 25 bp, Homo sapien
cgctgttggtgggagtgtaaattag

SEQ ID NO: 5679008 - DNA, 25 bp, Homo sapien
gtgattcctcaaggatctagaacca

SEQ ID NO: 5679009 - DNA, 25 bp, Homo sapien
ccagaaataccatctgacccagcaa

SEQ ID NO: 5679010 - DNA, 25 bp, Homo sapien
ttcaaccactgtggaagacagtgtg

SEQ ID NO: 5679011 - DNA, 25 bp, Homo sapien
aggatctagaaccagaaataccatc

SEQ ID NO: 5679012 - DNA, 25 bp, Homo sapien
acagtgctgcagtaaacataagtgt

SEQ ID NO: 5679013 - DNA, 25 bp, Homo sapien
aagtgtgcatgtgtccttatagtag

SEQ ID NO: 5679014 - DNA, 25 bp, Homo sapien
taagtgtgcatgtgtccttatagta

SEQ ID NO: 5679015 - DNA, 25 bp, Homo sapien
ataagtgtgcatgtgtccttatagt

SEQ ID NO: 5679016 - DNA, 25 bp, Homo sapien
cagtgctgcagtaaacataagtgtg

SEQ ID NO: 5679017 - DNA, 25 bp, Homo sapien
agtgtgcatgtgtccttatagtagc

SEQ ID NO: 5679018 - DNA, 25 bp, Homo sapien
cacacttatgtttactgcagcactg

SEQ ID NO: 5679019 - DNA, 25 bp, Homo sapien
gctactataaggacacatgcacact

SEQ ID NO: 5679020 - DNA, 25 bp, Homo sapien
tactataaggacacatgcacactta

SEQ ID NO: 5679021 - DNA, 25 bp, Homo sapien
gcacacttatgtttactgcagcact

SEQ ID NO: 5679022 - DNA, 25 bp, Homo sapien
acacttatgtttactgcagcactgt

SEQ ID NO: 5679023 - DNA, 25 bp, Homo sapien
actataaggacacatgcacacttat

SEQ ID NO: 5679024 - DNA, 25 bp, Homo sapien
tcccgtctaccattgatggatattt

SEQ ID NO: 5679025 - DNA, 25 bp, Homo sapien
atcccgtctaccattgatggatatt

SEQ ID NO: 5679026 - DNA, 25 bp, Homo sapien
tatcccgtctaccattgatggatat

SEQ ID NO: 5679027 - DNA, 25 bp, Homo sapien
cgtctaccattgatggatatttggg

SEQ ID NO: 5679028 - DNA, 25 bp, Homo sapien
cccgtctaccattgatggatatttg

SEQ ID NO: 5679029 - DNA, 25 bp, Homo sapien
ccgtctaccattgatggatatttgg

SEQ ID NO: 5679030 - DNA, 25 bp, Homo sapien
aatatccatcaatggtagacgggat

SEQ ID NO: 5679031 - DNA, 25 bp, Homo sapien
atatccatcaatggtagacgggata

SEQ ID NO: 5679032 - DNA, 25 bp, Homo sapien
caaatatccatcaatggtagacggg

SEQ ID NO: 5679033 - DNA, 25 bp, Homo sapien
cccaaatatccatcaatggtagacg

SEQ ID NO: 5679034 - DNA, 25 bp, Homo sapien
ccaaatatccatcaatggtagacgg

SEQ ID NO: 5679035 - DNA, 25 bp, Homo sapien
aaatatccatcaatggtagacggga

SEQ ID NO: 5679036 - DNA, 25 bp, Homo sapien
tgaggtgatcattagtagtgcaaag

SEQ ID NO: 5679037 - DNA, 25 bp, Homo sapien
gatagtcttgaggtgatcattagta

SEQ ID NO: 5679038 - DNA, 25 bp, Homo sapien
ggtgatcattagtagtgcaaagtgt

SEQ ID NO: 5679039 - DNA, 25 bp, Homo sapien
gaggtgatcattagtagtgcaaagt

SEQ ID NO: 5679040 - DNA, 25 bp, Homo sapien
tcttgaggtgatcattagtagtgca

SEQ ID NO: 5679041 - DNA, 25 bp, Homo sapien
cttgaggtgatcattagtagtgcaa

SEQ ID NO: 5679042 - DNA, 25 bp, Homo sapien
tactaatgatcacctcaagactatc

SEQ ID NO: 5679043 - DNA, 25 bp, Homo sapien
cactttgcactactaatgatcacct

SEQ ID NO: 5679044 - DNA, 25 bp, Homo sapien
ttgcactactaatgatcacctcaag

SEQ ID NO: 5679045 - DNA, 25 bp, Homo sapien
ctttgcactactaatgatcacctca

SEQ ID NO: 5679046 - DNA, 25 bp, Homo sapien
acactttgcactactaatgatcacc

SEQ ID NO: 5679047 - DNA, 25 bp, Homo sapien
tgcactactaatgatcacctcaaga

SEQ ID NO: 5679048 - DNA, 25 bp, Homo sapien
tgtggagactggattttacaccttg

SEQ ID NO: 5679049 - DNA, 25 bp, Homo sapien
tttggtttgagtaggcagttacatt

SEQ ID NO: 5679050 - DNA, 25 bp, Homo sapien
gtggagactggattttacaccttgt

SEQ ID NO: 5679051 - DNA, 25 bp, Homo sapien
gttttggtttgagtaggcagttaca

SEQ ID NO: 5679052 - DNA, 25 bp, Homo sapien
tggagactggattttacaccttgtt

SEQ ID NO: 5679053 - DNA, 25 bp, Homo sapien
ggagactggattttacaccttgtta

SEQ ID NO: 5679054 - DNA, 25 bp, Homo sapien
tgtaactgcctactcaaaccaaaac

SEQ ID NO: 5679055 - DNA, 25 bp, Homo sapien
caaggtgtaaaatccagtctccaca

SEQ ID NO: 5679056 - DNA, 25 bp, Homo sapien
aaaatgtaactgcctactcaaacca

SEQ ID NO: 5679057 - DNA, 25 bp, Homo sapien
taacaaggtgtaaaatccagtctcc

SEQ ID NO: 5679058 - DNA, 25 bp, Homo sapien
aatgtaactgcctactcaaaccaaa

SEQ ID NO: 5679059 - DNA, 25 bp, Homo sapien
acaaggtgtaaaatccagtctccac

SEQ ID NO: 5679060 - DNA, 25 bp, Homo sapien
gtgatattctctatttacttgactg

SEQ ID NO: 5679061 - DNA, 25 bp, Homo sapien
tctctatttacttgactgttttgag

SEQ ID NO: 5679062 - DNA, 25 bp, Homo sapien
caacatatttatccttgaatatgta

SEQ ID NO: 5679063 - DNA, 25 bp, Homo sapien
tgagtacatttataacaacatattt

SEQ ID NO: 5679064 - DNA, 25 bp, Homo sapien
gatattctctatttacttgactgtt

SEQ ID NO: 5679065 - DNA, 25 bp, Homo sapien
ctctatttacttgactgttttgagt

SEQ ID NO: 5679066 - DNA, 25 bp, Homo sapien
caagtaaatagagaatatcacaaaa

SEQ ID NO: 5679067 - DNA, 25 bp, Homo sapien
aaatatgttgttataaatgtactca

SEQ ID NO: 5679068 - DNA, 25 bp, Homo sapien
tacatattcaaggataaatatgttg

SEQ ID NO: 5679069 - DNA, 25 bp, Homo sapien
tcaaaacagtcaagtaaatagagaa

SEQ ID NO: 5679070 - DNA, 25 bp, Homo sapien
actcaaaacagtcaagtaaatagag

SEQ ID NO: 5679071 - DNA, 25 bp, Homo sapien
cagtcaagtaaatagagaatatcac

SEQ ID NO: 5679072 - DNA, 25 bp, Homo sapien
actgtctagatctagagttctcatt

SEQ ID NO: 5679073 - DNA, 25 bp, Homo sapien
ttatactgtctagatctagagttct

SEQ ID NO: 5679074 - DNA, 25 bp, Homo sapien
tttatactgtctagatctagagttc

SEQ ID NO: 5679075 - DNA, 25 bp, Homo sapien
tatactgtctagatctagagttctc

SEQ ID NO: 5679076 - DNA, 25 bp, Homo sapien
atactgtctagatctagagttctca

SEQ ID NO: 5679077 - DNA, 25 bp, Homo sapien
tactgtctagatctagagttctcat

SEQ ID NO: 5679078 - DNA, 25 bp, Homo sapien
aatgagaactctagatctagacagt

SEQ ID NO: 5679079 - DNA, 25 bp, Homo sapien
atgagaactctagatctagacagta

SEQ ID NO: 5679080 - DNA, 25 bp, Homo sapien
gaactctagatctagacagtataaa

SEQ ID NO: 5679081 - DNA, 25 bp, Homo sapien
tgagaactctagatctagacagtat

SEQ ID NO: 5679082 - DNA, 25 bp, Homo sapien
agaactctagatctagacagtataa

SEQ ID NO: 5679083 - DNA, 25 bp, Homo sapien
gagaactctagatctagacagtata

SEQ ID NO: 5679084 - DNA, 25 bp, Homo sapien
aggcaacctggtgaaaccctgtctc

SEQ ID NO: 5679085 - DNA, 25 bp, Homo sapien
taggcaacctggtgaaaccctgtct

SEQ ID NO: 5679086 - DNA, 25 bp, Homo sapien
gcctaggcaacctggtgaaaccctg

SEQ ID NO: 5679087 - DNA, 25 bp, Homo sapien
cctaggcaacctggtgaaaccctgt

SEQ ID NO: 5679088 - DNA, 25 bp, Homo sapien
ctgtctctagaaaaacacaaaaaat

SEQ ID NO: 5679089 - DNA, 25 bp, Homo sapien
ctaggcaacctggtgaaaccctgtc

SEQ ID NO: 5679090 - DNA, 25 bp, Homo sapien
cagggtttcaccaggttgcctaggc

SEQ ID NO: 5679091 - DNA, 25 bp, Homo sapien
gagacagggtttcaccaggttgcct

SEQ ID NO: 5679092 - DNA, 25 bp, Homo sapien
agacagggtttcaccaggttgccta

SEQ ID NO: 5679093 - DNA, 25 bp, Homo sapien
gacagggtttcaccaggttgcctag

SEQ ID NO: 5679094 - DNA, 25 bp, Homo sapien
attttttgtgtttttctagagacag

SEQ ID NO: 5679095 - DNA, 25 bp, Homo sapien
acagggtttcaccaggttgcctagg

SEQ ID NO: 5679096 - DNA, 25 bp, Homo sapien
agacacgatcttactctgtcaccca

SEQ ID NO: 5679097 - DNA, 25 bp, Homo sapien
ttggagacacgatcttactctgtca

SEQ ID NO: 5679098 - DNA, 25 bp, Homo sapien
tggagacacgatcttactctgtcac

SEQ ID NO: 5679099 - DNA, 25 bp, Homo sapien
gacacgatcttactctgtcacccat

SEQ ID NO: 5679100 - DNA, 25 bp, Homo sapien
gagacacgatcttactctgtcaccc

SEQ ID NO: 5679101 - DNA, 25 bp, Homo sapien
ggagacacgatcttactctgtcacc

SEQ ID NO: 5679102 - DNA, 25 bp, Homo sapien
gggtgacagagtaagatcgtgtctc

SEQ ID NO: 5679103 - DNA, 25 bp, Homo sapien
atgggtgacagagtaagatcgtgtc

SEQ ID NO: 5679104 - DNA, 25 bp, Homo sapien
tgggtgacagagtaagatcgtgtct

SEQ ID NO: 5679105 - DNA, 25 bp, Homo sapien
ggtgacagagtaagatcgtgtctcc

SEQ ID NO: 5679106 - DNA, 25 bp, Homo sapien
gtgacagagtaagatcgtgtctcca

SEQ ID NO: 5679107 - DNA, 25 bp, Homo sapien
tgacagagtaagatcgtgtctccaa

SEQ ID NO: 5679108 - DNA, 25 bp, Homo sapien
tgcgcctggccctattttagaagtc

SEQ ID NO: 5679109 - DNA, 25 bp, Homo sapien
gcgcctggccctattttagaagtct

SEQ ID NO: 5679110 - DNA, 25 bp, Homo sapien
tgacttcatgatccgcctgccttgg

SEQ ID NO: 5679111 - DNA, 25 bp, Homo sapien
ttcatgatccgcctgccttggcctc

SEQ ID NO: 5679112 - DNA, 25 bp, Homo sapien
ctgcgcctggccctattttagaagt

SEQ ID NO: 5679113 - DNA, 25 bp, Homo sapien
cgcctggccctattttagaagtctt

SEQ ID NO: 5679114 - DNA, 25 bp, Homo sapien
ccaaggcaggcggatcatgaagtca

SEQ ID NO: 5679115 - DNA, 25 bp, Homo sapien
aagacttctaaaatagggccaggcg

SEQ ID NO: 5679116 - DNA, 25 bp, Homo sapien
gaggccaaggcaggcggatcatgaa

SEQ ID NO: 5679117 - DNA, 25 bp, Homo sapien
gacttctaaaatagggccaggcgca

SEQ ID NO: 5679118 - DNA, 25 bp, Homo sapien
acttctaaaatagggccaggcgcag

SEQ ID NO: 5679119 - DNA, 25 bp, Homo sapien
agacttctaaaatagggccaggcgc

SEQ ID NO: 5679120 - DNA, 25 bp, Homo sapien
gcctggcctagaagtgttacatttt

SEQ ID NO: 5679121 - DNA, 25 bp, Homo sapien
cattttgatgaagtccagtatatca

SEQ ID NO: 5679122 - DNA, 25 bp, Homo sapien
gaagtgttacattttgatgaagtcc

SEQ ID NO: 5679123 - DNA, 25 bp, Homo sapien
aggcaggagccacagtgcctggcct

SEQ ID NO: 5679124 - DNA, 25 bp, Homo sapien
cagtgcctggcctagaagtgttaca

SEQ ID NO: 5679125 - DNA, 25 bp, Homo sapien
gaagtccagtatatcaaagaaaaaa

SEQ ID NO: 5679126 - DNA, 25 bp, Homo sapien
aattttttctttgatatactggact

SEQ ID NO: 5679127 - DNA, 25 bp, Homo sapien
caaaatgtaacacttctaggccagg

SEQ ID NO: 5679128 - DNA, 25 bp, Homo sapien
gatatactggacttcatcaaaatgt

SEQ ID NO: 5679129 - DNA, 25 bp, Homo sapien
tgtaacacttctaggccaggcactg

SEQ ID NO: 5679130 - DNA, 25 bp, Homo sapien
ggacttcatcaaaatgtaacacttc

SEQ ID NO: 5679131 - DNA, 25 bp, Homo sapien
aggccaggcactgtggctcctgcct

SEQ ID NO: 5679132 - DNA, 25 bp, Homo sapien
acttgtaggagatcttggtgtatga

SEQ ID NO: 5679133 - DNA, 25 bp, Homo sapien
tatgatggtggcaagtcttttgtca

SEQ ID NO: 5679134 - DNA, 25 bp, Homo sapien
agatcttggtgtatgatggtggcaa

SEQ ID NO: 5679135 - DNA, 25 bp, Homo sapien
tctgtttttgacttgtaggagatct

SEQ ID NO: 5679136 - DNA, 25 bp, Homo sapien
tcttggtgtatgatggtggcaagtc

SEQ ID NO: 5679137 - DNA, 25 bp, Homo sapien
ttttgacttgtaggagatcttggtg

SEQ ID NO: 5679138 - DNA, 25 bp, Homo sapien
tacaccaagatctcctacaagtcaa

SEQ ID NO: 5679139 - DNA, 25 bp, Homo sapien
ttgccaccatcatacaccaagatct

SEQ ID NO: 5679140 - DNA, 25 bp, Homo sapien
aaagacttgccaccatcatacacca

SEQ ID NO: 5679141 - DNA, 25 bp, Homo sapien
tcatacaccaagatctcctacaagt

SEQ ID NO: 5679142 - DNA, 25 bp, Homo sapien
agatctcctacaagtcaaaaacaga

SEQ ID NO: 5679143 - DNA, 25 bp, Homo sapien
tgacaaaagacttgccaccatcata

SEQ ID NO: 5679144 - DNA, 25 bp, Homo sapien
tgctgactaatgtggcagatagaag

SEQ ID NO: 5679145 - DNA, 25 bp, Homo sapien
attgctgactaatgtggcagataga

SEQ ID NO: 5679146 - DNA, 25 bp, Homo sapien
gaaattgctgactaatgtggcagat

SEQ ID NO: 5679147 - DNA, 25 bp, Homo sapien
aattgctgactaatgtggcagatag

SEQ ID NO: 5679148 - DNA, 25 bp, Homo sapien
ggtaaatactgggagtgaaattgct

SEQ ID NO: 5679149 - DNA, 25 bp, Homo sapien
tgggtaaatactgggagtgaaattg

SEQ ID NO: 5679150 - DNA, 25 bp, Homo sapien
agcaatttcactcccagtatttacc

SEQ ID NO: 5679151 - DNA, 25 bp, Homo sapien
ttctatctgccacattagtcagcaa

SEQ ID NO: 5679152 - DNA, 25 bp, Homo sapien
cttctatctgccacattagtcagca

SEQ ID NO: 5679153 - DNA, 25 bp, Homo sapien
tctatctgccacattagtcagcaat

SEQ ID NO: 5679154 - DNA, 25 bp, Homo sapien
tatctgccacattagtcagcaattt

SEQ ID NO: 5679155 - DNA, 25 bp, Homo sapien
caatttcactcccagtatttaccca

SEQ ID NO: 5679156 - DNA, 25 bp, Homo sapien
tccaccccctgggttccagtgattc

SEQ ID NO: 5679157 - DNA, 25 bp, Homo sapien
ccctgggttccagtgattctcctgc

SEQ ID NO: 5679158 - DNA, 25 bp, Homo sapien
cccctgggttccagtgattctcctg

SEQ ID NO: 5679159 - DNA, 25 bp, Homo sapien
ccaccccctgggttccagtgattct

SEQ ID NO: 5679160 - DNA, 25 bp, Homo sapien
caccccctgggttccagtgattctc

SEQ ID NO: 5679161 - DNA, 25 bp, Homo sapien
cctccaccccctgggttccagtgat

SEQ ID NO: 5679162 - DNA, 25 bp, Homo sapien
aatcactggaacccagggggtggag

SEQ ID NO: 5679163 - DNA, 25 bp, Homo sapien
agaatcactggaacccagggggtgg

SEQ ID NO: 5679164 - DNA, 25 bp, Homo sapien
gagaatcactggaacccagggggtg

SEQ ID NO: 5679165 - DNA, 25 bp, Homo sapien
gcaggagaatcactggaacccaggg

SEQ ID NO: 5679166 - DNA, 25 bp, Homo sapien
gaatcactggaacccagggggtgga

SEQ ID NO: 5679167 - DNA, 25 bp, Homo sapien
atcactggaacccagggggtggagg

SEQ ID NO: 5679168 - DNA, 25 bp, Homo sapien
gataaatttatagacctatccctgt

SEQ ID NO: 5679169 - DNA, 25 bp, Homo sapien
tgataaatttatagacctatccctg

SEQ ID NO: 5679170 - DNA, 25 bp, Homo sapien
ttatagacctatccctgtcctgggt

SEQ ID NO: 5679171 - DNA, 25 bp, Homo sapien
taaatttatagacctatccctgtcc

SEQ ID NO: 5679172 - DNA, 25 bp, Homo sapien
aatttatagacctatccctgtcctg

SEQ ID NO: 5679173 - DNA, 25 bp, Homo sapien
tttatagacctatccctgtcctggg

SEQ ID NO: 5679174 - DNA, 25 bp, Homo sapien
gacagggataggtctataaatttat

SEQ ID NO: 5679175 - DNA, 25 bp, Homo sapien
acccaggacagggataggtctataa

SEQ ID NO: 5679176 - DNA, 25 bp, Homo sapien
ccaggacagggataggtctataaat

SEQ ID NO: 5679177 - DNA, 25 bp, Homo sapien
cccaggacagggataggtctataaa

SEQ ID NO: 5679178 - DNA, 25 bp, Homo sapien
cagggataggtctataaatttatca

SEQ ID NO: 5679179 - DNA, 25 bp, Homo sapien
aacccaggacagggataggtctata

SEQ ID NO: 5679180 - DNA, 25 bp, Homo sapien
caaatttgagggattaattgaggaa

SEQ ID NO: 5679181 - DNA, 25 bp, Homo sapien
acaaatttgagggattaattgagga

SEQ ID NO: 5679182 - DNA, 25 bp, Homo sapien
aaacaaatttgagggattaattgag

SEQ ID NO: 5679183 - DNA, 25 bp, Homo sapien
tcccaaggaagaagaagaatctaaa

SEQ ID NO: 5679184 - DNA, 25 bp, Homo sapien
aacaaatttgagggattaattgagg

SEQ ID NO: 5679185 - DNA, 25 bp, Homo sapien
caaggaagaagaagaatctaaaagt

SEQ ID NO: 5679186 - DNA, 25 bp, Homo sapien
ctcaattaatccctcaaatttgttt

SEQ ID NO: 5679187 - DNA, 25 bp, Homo sapien
tttagattcttcttcttccttggga

SEQ ID NO: 5679188 - DNA, 25 bp, Homo sapien
cctcaattaatccctcaaatttgtt

SEQ ID NO: 5679189 - DNA, 25 bp, Homo sapien
ttcctcaattaatccctcaaatttg

SEQ ID NO: 5679190 - DNA, 25 bp, Homo sapien
acttttagattcttcttcttccttg

SEQ ID NO: 5679191 - DNA, 25 bp, Homo sapien
tcctcaattaatccctcaaatttgt

SEQ ID NO: 5679192 - DNA, 25 bp, Homo sapien
gaacgcagcctccaataagtttgtt

SEQ ID NO: 5679193 - DNA, 25 bp, Homo sapien
aaaaatgaacgcagcctccaataag

SEQ ID NO: 5679194 - DNA, 25 bp, Homo sapien
aatgaacgcagcctccaataagttt

SEQ ID NO: 5679195 - DNA, 25 bp, Homo sapien
cagcctccaataagtttgttaaaca

SEQ ID NO: 5679196 - DNA, 25 bp, Homo sapien
tgaacgcagcctccaataagtttgt

SEQ ID NO: 5679197 - DNA, 25 bp, Homo sapien
cgcagcctccaataagtttgttaaa

SEQ ID NO: 5679198 - DNA, 25 bp, Homo sapien
acaaacttattggaggctgcgttca

SEQ ID NO: 5679199 - DNA, 25 bp, Homo sapien
tgtttaacaaacttattggaggctg

SEQ ID NO: 5679200 - DNA, 25 bp, Homo sapien
tttaacaaacttattggaggctgcg

SEQ ID NO: 5679201 - DNA, 25 bp, Homo sapien
taacaaacttattggaggctgcgtt

SEQ ID NO: 5679202 - DNA, 25 bp, Homo sapien
cttattggaggctgcgttcattttt

SEQ ID NO: 5679203 - DNA, 25 bp, Homo sapien
caaacttattggaggctgcgttcat

SEQ ID NO: 5679204 - DNA, 25 bp, Homo sapien
aaatttcagagttcgaagacaaggc

SEQ ID NO: 5679205 - DNA, 25 bp, Homo sapien
gccttgtcttcgaactctgaaattt

SEQ ID NO: 5679206 - DNA, 25 bp, Homo sapien
atagcggattgaaatcgcttcaaaa

SEQ ID NO: 5679207 - DNA, 25 bp, Homo sapien
aagatagcggattgaaatcgcttca

SEQ ID NO: 5679208 - DNA, 25 bp, Homo sapien
gatagcggattgaaatcgcttcaaa

SEQ ID NO: 5679209 - DNA, 25 bp, Homo sapien
aagaagatagcggattgaaatcgct

SEQ ID NO: 5679210 - DNA, 25 bp, Homo sapien
agatagcggattgaaatcgcttcaa

SEQ ID NO: 5679211 - DNA, 25 bp, Homo sapien
gaagatagcggattgaaatcgcttc

SEQ ID NO: 5679212 - DNA, 25 bp, Homo sapien
ttgaagcgatttcaatccgctatct

SEQ ID NO: 5679213 - DNA, 25 bp, Homo sapien
agcgatttcaatccgctatcttctt

SEQ ID NO: 5679214 - DNA, 25 bp, Homo sapien
ttttgaagcgatttcaatccgctat

SEQ ID NO: 5679215 - DNA, 25 bp, Homo sapien
tttgaagcgatttcaatccgctatc

SEQ ID NO: 5679216 - DNA, 25 bp, Homo sapien
tgaagcgatttcaatccgctatctt

SEQ ID NO: 5679217 - DNA, 25 bp, Homo sapien
gaagcgatttcaatccgctatcttc

SEQ ID NO: 5679218 - DNA, 25 bp, Homo sapien
tgggcgtaatggcggttgcctataa

SEQ ID NO: 5679219 - DNA, 25 bp, Homo sapien
ttataggcaaccgccattacgccca

SEQ ID NO: 5679220 - DNA, 25 bp, Homo sapien
cagagtcacatttaccttgtaccta

SEQ ID NO: 5679221 - DNA, 25 bp, Homo sapien
ccttgtacctagtaagaaacataat

SEQ ID NO: 5679222 - DNA, 25 bp, Homo sapien
taccttgtacctagtaagaaacata

SEQ ID NO: 5679223 - DNA, 25 bp, Homo sapien
gagtcacatttaccttgtacctagt

SEQ ID NO: 5679224 - DNA, 25 bp, Homo sapien
cacatttaccttgtacctagtaaga

SEQ ID NO: 5679225 - DNA, 25 bp, Homo sapien
gtcacatttaccttgtacctagtaa

SEQ ID NO: 5679226 - DNA, 25 bp, Homo sapien
tatgtttcttactaggtacaaggta

SEQ ID NO: 5679227 - DNA, 25 bp, Homo sapien
taggtacaaggtaaatgtgactctg

SEQ ID NO: 5679228 - DNA, 25 bp, Homo sapien
tcttactaggtacaaggtaaatgtg

SEQ ID NO: 5679229 - DNA, 25 bp, Homo sapien
actaggtacaaggtaaatgtgactc

SEQ ID NO: 5679230 - DNA, 25 bp, Homo sapien
attatgtttcttactaggtacaagg

SEQ ID NO: 5679231 - DNA, 25 bp, Homo sapien
tactaggtacaaggtaaatgtgact

SEQ ID NO: 5679232 - DNA, 25 bp, Homo sapien
taaagtggtaatttgtagcttcttc

SEQ ID NO: 5679233 - DNA, 25 bp, Homo sapien
aagctgaggatttataaagtggtaa

SEQ ID NO: 5679234 - DNA, 25 bp, Homo sapien
tacagcctagtaataaaagctgagg

SEQ ID NO: 5679235 - DNA, 25 bp, Homo sapien
tatgattagttgaaatacagcctag

SEQ ID NO: 5679236 - DNA, 25 bp, Homo sapien
agtggtaatttgtagcttcttcatc

SEQ ID NO: 5679237 - DNA, 25 bp, Homo sapien
gattagttgaaatacagcctagtaa

SEQ ID NO: 5679238 - DNA, 25 bp, Homo sapien
aaattaccactttataaatcctcag

SEQ ID NO: 5679239 - DNA, 25 bp, Homo sapien
ttaccactttataaatcctcagctt

SEQ ID NO: 5679240 - DNA, 25 bp, Homo sapien
tattactaggctgtatttcaactaa

SEQ ID NO: 5679241 - DNA, 25 bp, Homo sapien
cctcagcttttattactaggctgta

SEQ ID NO: 5679242 - DNA, 25 bp, Homo sapien
tactaggctgtatttcaactaatca

SEQ ID NO: 5679243 - DNA, 25 bp, Homo sapien
gatgaagaagctacaaattaccact

SEQ ID NO: 5679244 - DNA, 25 bp, Homo sapien
ccaccctcctcagccttccaaagtg

SEQ ID NO: 5679245 - DNA, 25 bp, Homo sapien
agcgatccaccctcctcagccttcc

SEQ ID NO: 5679246 - DNA, 25 bp, Homo sapien
aagcgatccaccctcctcagccttc

SEQ ID NO: 5679247 - DNA, 25 bp, Homo sapien
cgatccaccctcctcagccttccaa

SEQ ID NO: 5679248 - DNA, 25 bp, Homo sapien
gcgatccaccctcctcagccttcca

SEQ ID NO: 5679249 - DNA, 25 bp, Homo sapien
gatccaccctcctcagccttccaaa

SEQ ID NO: 5679250 - DNA, 25 bp, Homo sapien
gaaggctgaggagggtggatcgctt

SEQ ID NO: 5679251 - DNA, 25 bp, Homo sapien
ggaaggctgaggagggtggatcgct

SEQ ID NO: 5679252 - DNA, 25 bp, Homo sapien
ttggaaggctgaggagggtggatcg

SEQ ID NO: 5679253 - DNA, 25 bp, Homo sapien
tggaaggctgaggagggtggatcgc

SEQ ID NO: 5679254 - DNA, 25 bp, Homo sapien
cactttggaaggctgaggagggtgg

SEQ ID NO: 5679255 - DNA, 25 bp, Homo sapien
tttggaaggctgaggagggtggatc

SEQ ID NO: 5679256 - DNA, 25 bp, Homo sapien
tacattctgtccatttaaaaggctg

SEQ ID NO: 5679257 - DNA, 25 bp, Homo sapien
ctgtgtgtacattctgtccatttaa

SEQ ID NO: 5679258 - DNA, 25 bp, Homo sapien
attctgtccatttaaaaggctgaat

SEQ ID NO: 5679259 - DNA, 25 bp, Homo sapien
cattctgtccatttaaaaggctgaa

SEQ ID NO: 5679260 - DNA, 25 bp, Homo sapien
acattctgtccatttaaaaggctga

SEQ ID NO: 5679261 - DNA, 25 bp, Homo sapien
ttactgtgtgtacattctgtccatt

SEQ ID NO: 5679262 - DNA, 25 bp, Homo sapien
tcagccttttaaatggacagaatgt

SEQ ID NO: 5679263 - DNA, 25 bp, Homo sapien
agccttttaaatggacagaatgtac

SEQ ID NO: 5679264 - DNA, 25 bp, Homo sapien
taaatggacagaatgtacacacagt

SEQ ID NO: 5679265 - DNA, 25 bp, Homo sapien
ttaaatggacagaatgtacacacag

SEQ ID NO: 5679266 - DNA, 25 bp, Homo sapien
ttcagccttttaaatggacagaatg

SEQ ID NO: 5679267 - DNA, 25 bp, Homo sapien
aatggacagaatgtacacacagtaa

SEQ ID NO: 5679268 - DNA, 25 bp, Homo sapien
aacaggagtggcactgatttctatc

SEQ ID NO: 5679269 - DNA, 25 bp, Homo sapien
tctatccctctctgggtaaggatca

SEQ ID NO: 5679270 - DNA, 25 bp, Homo sapien
ctctgggtaaggatcaggtaatgga

SEQ ID NO: 5679271 - DNA, 25 bp, Homo sapien
ccctctctgggtaaggatcaggtaa

SEQ ID NO: 5679272 - DNA, 25 bp, Homo sapien
gtggcactgatttctatccctctct

SEQ ID NO: 5679273 - DNA, 25 bp, Homo sapien
caggagtggcactgatttctatccc

SEQ ID NO: 5679274 - DNA, 25 bp, Homo sapien
tccattacctgatccttacccagag

SEQ ID NO: 5679275 - DNA, 25 bp, Homo sapien
gatccttacccagagagggatagaa

SEQ ID NO: 5679276 - DNA, 25 bp, Homo sapien
agagagggatagaaatcagtgccac

SEQ ID NO: 5679277 - DNA, 25 bp, Homo sapien
tacctgatccttacccagagaggga

SEQ ID NO: 5679278 - DNA, 25 bp, Homo sapien
gagggatagaaatcagtgccactcc

SEQ ID NO: 5679279 - DNA, 25 bp, Homo sapien
gatagaaatcagtgccactcctgtt

SEQ ID NO: 5679280 - DNA, 25 bp, Homo sapien
aaaaattagccaggtctgatggtgc

SEQ ID NO: 5679281 - DNA, 25 bp, Homo sapien
ggtcaggagtttgacaccagcctgt

SEQ ID NO: 5679282 - DNA, 25 bp, Homo sapien
gtcaggagtttgacaccagcctgtc

SEQ ID NO: 5679283 - DNA, 25 bp, Homo sapien
aaaattagccaggtctgatggtgca

SEQ ID NO: 5679284 - DNA, 25 bp, Homo sapien
tgcaccatcagacctggctaatttt

SEQ ID NO: 5679285 - DNA, 25 bp, Homo sapien
gcaccatcagacctggctaattttt

SEQ ID NO: 5679286 - DNA, 25 bp, Homo sapien
acaggctggtgtcaaactcctgacc

SEQ ID NO: 5679287 - DNA, 25 bp, Homo sapien
gacaggctggtgtcaaactcctgac

SEQ ID NO: 5679288 - DNA, 25 bp, Homo sapien
ctgaaagaaaaaacaaacctggctg

SEQ ID NO: 5679289 - DNA, 25 bp, Homo sapien
aaaacaaacctggctgggcatagtg

SEQ ID NO: 5679290 - DNA, 25 bp, Homo sapien
aaacaaacctggctgggcatagtgg

SEQ ID NO: 5679291 - DNA, 25 bp, Homo sapien
aaaaaacaaacctggctgggcatag

SEQ ID NO: 5679292 - DNA, 25 bp, Homo sapien
gaaaaaacaaacctggctgggcata

SEQ ID NO: 5679293 - DNA, 25 bp, Homo sapien
aaaaacaaacctggctgggcatagt

SEQ ID NO: 5679294 - DNA, 25 bp, Homo sapien
ccactatgcccagccaggtttgttt

SEQ ID NO: 5679295 - DNA, 25 bp, Homo sapien
tatgcccagccaggtttgttttttc

SEQ ID NO: 5679296 - DNA, 25 bp, Homo sapien
actatgcccagccaggtttgttttt

SEQ ID NO: 5679297 - DNA, 25 bp, Homo sapien
ctatgcccagccaggtttgtttttt

SEQ ID NO: 5679298 - DNA, 25 bp, Homo sapien
cagccaggtttgttttttctttcag

SEQ ID NO: 5679299 - DNA, 25 bp, Homo sapien
cactatgcccagccaggtttgtttt

SEQ ID NO: 5679300 - DNA, 25 bp, Homo sapien
gacagagatctcatctcaaaaagga

SEQ ID NO: 5679301 - DNA, 25 bp, Homo sapien
acagagatctcatctcaaaaaggaa

SEQ ID NO: 5679302 - DNA, 25 bp, Homo sapien
gagatctcatctcaaaaaggaaaaa

SEQ ID NO: 5679303 - DNA, 25 bp, Homo sapien
agagatctcatctcaaaaaggaaaa

SEQ ID NO: 5679304 - DNA, 25 bp, Homo sapien
cagagatctcatctcaaaaaggaaa

SEQ ID NO: 5679305 - DNA, 25 bp, Homo sapien
agatctcatctcaaaaaggaaaaaa

SEQ ID NO: 5679306 - DNA, 25 bp, Homo sapien
tttttcctttttgagatgagatctc

SEQ ID NO: 5679307 - DNA, 25 bp, Homo sapien
tttcctttttgagatgagatctctg

SEQ ID NO: 5679308 - DNA, 25 bp, Homo sapien
tcctttttgagatgagatctctgtc

SEQ ID NO: 5679309 - DNA, 25 bp, Homo sapien
ttttcctttttgagatgagatctct

SEQ ID NO: 5679310 - DNA, 25 bp, Homo sapien
ttcctttttgagatgagatctctgt

SEQ ID NO: 5679311 - DNA, 25 bp, Homo sapien
ttttttcctttttgagatgagatct

SEQ ID NO: 5679312 - DNA, 25 bp, Homo sapien
gacccctgtatctacaagaaataga

SEQ ID NO: 5679313 - DNA, 25 bp, Homo sapien
tagctgaataccctgtagtcccagc

SEQ ID NO: 5679314 - DNA, 25 bp, Homo sapien
gaaaaattagctgaataccctgtag

SEQ ID NO: 5679315 - DNA, 25 bp, Homo sapien
ccctgtatctacaagaaatagaaga

SEQ ID NO: 5679316 - DNA, 25 bp, Homo sapien
atagtaagacccctgtatctacaag

SEQ ID NO: 5679317 - DNA, 25 bp, Homo sapien
aattagctgaataccctgtagtccc

SEQ ID NO: 5679318 - DNA, 25 bp, Homo sapien
ggactacagggtattcagctaattt

SEQ ID NO: 5679319 - DNA, 25 bp, Homo sapien
tcttctatttcttgtagatacaggg

SEQ ID NO: 5679320 - DNA, 25 bp, Homo sapien
cagggtattcagctaatttttcttc

SEQ ID NO: 5679321 - DNA, 25 bp, Homo sapien
gggactacagggtattcagctaatt

SEQ ID NO: 5679322 - DNA, 25 bp, Homo sapien
gactacagggtattcagctaatttt

SEQ ID NO: 5679323 - DNA, 25 bp, Homo sapien
gctgggactacagggtattcagcta

SEQ ID NO: 5679324 - DNA, 25 bp, Homo sapien
tgattattgtcacatagagttttaa

SEQ ID NO: 5679325 - DNA, 25 bp, Homo sapien
cagataatttactggagaggtgaac

SEQ ID NO: 5679326 - DNA, 25 bp, Homo sapien
agataatttactggagaggtgaact

SEQ ID NO: 5679327 - DNA, 25 bp, Homo sapien
gataatttactggagaggtgaactg

SEQ ID NO: 5679328 - DNA, 25 bp, Homo sapien
gttcacctctccagtaaattatctg

SEQ ID NO: 5679329 - DNA, 25 bp, Homo sapien
ttaaaactctatgtgacaataatca

SEQ ID NO: 5679330 - DNA, 25 bp, Homo sapien
agttcacctctccagtaaattatct

SEQ ID NO: 5679331 - DNA, 25 bp, Homo sapien
cagttcacctctccagtaaattatc

SEQ ID NO: 5679332 - DNA, 25 bp, Homo sapien
ctacgttttactcagtgtttatggt

SEQ ID NO: 5679333 - DNA, 25 bp, Homo sapien
cctgtgggtcctacgttttactcag

SEQ ID NO: 5679334 - DNA, 25 bp, Homo sapien
agtggcattccctgtgggtcctacg

SEQ ID NO: 5679335 - DNA, 25 bp, Homo sapien
cagtggcattccctgtgggtcctac

SEQ ID NO: 5679336 - DNA, 25 bp, Homo sapien
cctacgttttactcagtgtttatgg

SEQ ID NO: 5679337 - DNA, 25 bp, Homo sapien
tgtgggtcctacgttttactcagtg

SEQ ID NO: 5679338 - DNA, 25 bp, Homo sapien
cactgagtaaaacgtaggacccaca

SEQ ID NO: 5679339 - DNA, 25 bp, Homo sapien
accataaacactgagtaaaacgtag

SEQ ID NO: 5679340 - DNA, 25 bp, Homo sapien
cgtaggacccacagggaatgccact

SEQ ID NO: 5679341 - DNA, 25 bp, Homo sapien
gtaggacccacagggaatgccactg

SEQ ID NO: 5679342 - DNA, 25 bp, Homo sapien
ctgagtaaaacgtaggacccacagg

SEQ ID NO: 5679343 - DNA, 25 bp, Homo sapien
cataaacactgagtaaaacgtagga

SEQ ID NO: 5679344 - DNA, 25 bp, Homo sapien
caactgcagccgcagacctgaagtc

SEQ ID NO: 5679345 - DNA, 25 bp, Homo sapien
gaagtcagttggtacgtttcaagga

SEQ ID NO: 5679346 - DNA, 25 bp, Homo sapien
agtcagttggtacgtttcaaggaat

SEQ ID NO: 5679347 - DNA, 25 bp, Homo sapien
aactgcagccgcagacctgaagtca

SEQ ID NO: 5679348 - DNA, 25 bp, Homo sapien
tgaagtcagttggtacgtttcaagg

SEQ ID NO: 5679349 - DNA, 25 bp, Homo sapien
actgcagccgcagacctgaagtcag

SEQ ID NO: 5679350 - DNA, 25 bp, Homo sapien
ctgacttcaggtctgcggctgcagt

SEQ ID NO: 5679351 - DNA, 25 bp, Homo sapien
attccttgaaacgtaccaactgact

SEQ ID NO: 5679352 - DNA, 25 bp, Homo sapien
gacttcaggtctgcggctgcagttg

SEQ ID NO: 5679353 - DNA, 25 bp, Homo sapien
tccttgaaacgtaccaactgacttc

SEQ ID NO: 5679354 - DNA, 25 bp, Homo sapien
ccttgaaacgtaccaactgacttca

SEQ ID NO: 5679355 - DNA, 25 bp, Homo sapien
tgacttcaggtctgcggctgcagtt

SEQ ID NO: 5679356 - DNA, 25 bp, Homo sapien
gtttaggttgtatgtgtatgagatg

SEQ ID NO: 5679357 - DNA, 25 bp, Homo sapien
tttaggttgtatgtgtatgagatga

SEQ ID NO: 5679358 - DNA, 25 bp, Homo sapien
ttaggttgtatgtgtatgagatgaa

SEQ ID NO: 5679359 - DNA, 25 bp, Homo sapien
aagtttaggttgtatgtgtatgaga

SEQ ID NO: 5679360 - DNA, 25 bp, Homo sapien
taggttgtatgtgtatgagatgaat

SEQ ID NO: 5679361 - DNA, 25 bp, Homo sapien
aggttgtatgtgtatgagatgaatt

SEQ ID NO: 5679362 - DNA, 25 bp, Homo sapien
tcatctcatacacatacaacctaaa

SEQ ID NO: 5679363 - DNA, 25 bp, Homo sapien
attcatctcatacacatacaaccta

SEQ ID NO: 5679364 - DNA, 25 bp, Homo sapien
catctcatacacatacaacctaaac

SEQ ID NO: 5679365 - DNA, 25 bp, Homo sapien
aattcatctcatacacatacaacct

SEQ ID NO: 5679366 - DNA, 25 bp, Homo sapien
ttcatctcatacacatacaacctaa

SEQ ID NO: 5679367 - DNA, 25 bp, Homo sapien
tctcatacacatacaacctaaactt

SEQ ID NO: 5679368 - DNA, 25 bp, Homo sapien
taagctatagaaaagacagtgccct

SEQ ID NO: 5679369 - DNA, 25 bp, Homo sapien
cgcacctggccttgtgataatgtat

SEQ ID NO: 5679370 - DNA, 25 bp, Homo sapien
ctatagaaaagacagtgcccttaag

SEQ ID NO: 5679371 - DNA, 25 bp, Homo sapien
tcaagtaagctatagaaaagacagt

SEQ ID NO: 5679372 - DNA, 25 bp, Homo sapien
gtgttcttacaatcaagtaagctat

SEQ ID NO: 5679373 - DNA, 25 bp, Homo sapien
cctggccttgtgataatgtattata

SEQ ID NO: 5679374 - DNA, 25 bp, Homo sapien
atagcttacttgattgtaagaacac

SEQ ID NO: 5679375 - DNA, 25 bp, Homo sapien
ggcactgtcttttctatagcttact

SEQ ID NO: 5679376 - DNA, 25 bp, Homo sapien
tataatacattatcacaaggccagg

SEQ ID NO: 5679377 - DNA, 25 bp, Homo sapien
taatacattatcacaaggccaggtg

SEQ ID NO: 5679378 - DNA, 25 bp, Homo sapien
ttaagggcactgtcttttctatagc

SEQ ID NO: 5679379 - DNA, 25 bp, Homo sapien
gtatataatacattatcacaaggcc

SEQ ID NO: 5679380 - DNA, 25 bp, Homo sapien
cacctgcctcgttctcccaacgtgc

SEQ ID NO: 5679381 - DNA, 25 bp, Homo sapien
acttctgatttcaggtgatccacct

SEQ ID NO: 5679382 - DNA, 25 bp, Homo sapien
ccacctgcctcgttctcccaacgtg

SEQ ID NO: 5679383 - DNA, 25 bp, Homo sapien
acctgcctcgttctcccaacgtgct

SEQ ID NO: 5679384 - DNA, 25 bp, Homo sapien
tgaacttctgatttcaggtgatcca

SEQ ID NO: 5679385 - DNA, 25 bp, Homo sapien
atagagatagggttttaccgtgttg

SEQ ID NO: 5679386 - DNA, 25 bp, Homo sapien
caacacggtaaaaccctatctctat

SEQ ID NO: 5679387 - DNA, 25 bp, Homo sapien
agcacgttgggagaacgaggcaggt

SEQ ID NO: 5679388 - DNA, 25 bp, Homo sapien
aggtggatcacctgaaatcagaagt

SEQ ID NO: 5679389 - DNA, 25 bp, Homo sapien
cacgttgggagaacgaggcaggtgg

SEQ ID NO: 5679390 - DNA, 25 bp, Homo sapien
tggatcacctgaaatcagaagttca

SEQ ID NO: 5679391 - DNA, 25 bp, Homo sapien
gcacgttgggagaacgaggcaggtg

SEQ ID NO: 5679392 - DNA, 25 bp, Homo sapien
ctcagatgatccgtccgccttggcc

SEQ ID NO: 5679393 - DNA, 25 bp, Homo sapien
cctcagatgatccgtccgccttggc

SEQ ID NO: 5679394 - DNA, 25 bp, Homo sapien
acctcagatgatccgtccgccttgg

SEQ ID NO: 5679395 - DNA, 25 bp, Homo sapien
tcagatgatccgtccgccttggcct

SEQ ID NO: 5679396 - DNA, 25 bp, Homo sapien
cgacctcagatgatccgtccgcctt

SEQ ID NO: 5679397 - DNA, 25 bp, Homo sapien
cagatgatccgtccgccttggcctc

SEQ ID NO: 5679398 - DNA, 25 bp, Homo sapien
gaggccaaggcggacggatcatctg

SEQ ID NO: 5679399 - DNA, 25 bp, Homo sapien
aggccaaggcggacggatcatctga

SEQ ID NO: 5679400 - DNA, 25 bp, Homo sapien
gccaaggcggacggatcatctgagg

SEQ ID NO: 5679401 - DNA, 25 bp, Homo sapien
aaggcggacggatcatctgaggtcg

SEQ ID NO: 5679402 - DNA, 25 bp, Homo sapien
ggccaaggcggacggatcatctgag

SEQ ID NO: 5679403 - DNA, 25 bp, Homo sapien
ccaaggcggacggatcatctgaggt

SEQ ID NO: 5679404 - DNA, 25 bp, Homo sapien
tacaggcatgcaccaccacgcctgg

SEQ ID NO: 5679405 - DNA, 25 bp, Homo sapien
gcatgcaccaccacgcctggctaat

SEQ ID NO: 5679406 - DNA, 25 bp, Homo sapien
acaggcatgcaccaccacgcctggc

SEQ ID NO: 5679407 - DNA, 25 bp, Homo sapien
caggcatgcaccaccacgcctggct

SEQ ID NO: 5679408 - DNA, 25 bp, Homo sapien
ggcatgcaccaccacgcctggctaa

SEQ ID NO: 5679409 - DNA, 25 bp, Homo sapien
ctgtctcagcctcccgagtagttgg

SEQ ID NO: 5679410 - DNA, 25 bp, Homo sapien
ccaggcgtggtggtgcatgcctgta

SEQ ID NO: 5679411 - DNA, 25 bp, Homo sapien
agccaggcgtggtggtgcatgcctg

SEQ ID NO: 5679412 - DNA, 25 bp, Homo sapien
attagccaggcgtggtggtgcatgc

SEQ ID NO: 5679413 - DNA, 25 bp, Homo sapien
ccaactactcgggaggctgagacag

SEQ ID NO: 5679414 - DNA, 25 bp, Homo sapien
ttagccaggcgtggtggtgcatgcc

SEQ ID NO: 5679415 - DNA, 25 bp, Homo sapien
gccaggcgtggtggtgcatgcctgt

SEQ ID NO: 5679416 - DNA, 25 bp, Homo sapien
ctgtctcctgagttgaagcaattct

SEQ ID NO: 5679417 - DNA, 25 bp, Homo sapien
tctgtctcctgagttgaagcaattc

SEQ ID NO: 5679418 - DNA, 25 bp, Homo sapien
cctctgtctcctgagttgaagcaat

SEQ ID NO: 5679419 - DNA, 25 bp, Homo sapien
tgtctcctgagttgaagcaattctc

SEQ ID NO: 5679420 - DNA, 25 bp, Homo sapien
ctctgtctcctgagttgaagcaatt

SEQ ID NO: 5679421 - DNA, 25 bp, Homo sapien
acctctgtctcctgagttgaagcaa

SEQ ID NO: 5679422 - DNA, 25 bp, Homo sapien
gaattgcttcaactcaggagacaga

SEQ ID NO: 5679423 - DNA, 25 bp, Homo sapien
agaattgcttcaactcaggagacag

SEQ ID NO: 5679424 - DNA, 25 bp, Homo sapien
ttgcttcaactcaggagacagaggt

SEQ ID NO: 5679425 - DNA, 25 bp, Homo sapien
attgcttcaactcaggagacagagg

SEQ ID NO: 5679426 - DNA, 25 bp, Homo sapien
gagaattgcttcaactcaggagaca

SEQ ID NO: 5679427 - DNA, 25 bp, Homo sapien
aattgcttcaactcaggagacagag

SEQ ID NO: 5679428 - DNA, 25 bp, Homo sapien
aaagtaaatacttgagtctccttag

SEQ ID NO: 5679429 - DNA, 25 bp, Homo sapien
aagtaaatacttgagtctccttagt

SEQ ID NO: 5679430 - DNA, 25 bp, Homo sapien
ttttaacaatgattacataccttct

SEQ ID NO: 5679431 - DNA, 25 bp, Homo sapien
tttaacaatgattacataccttcta

SEQ ID NO: 5679432 - DNA, 25 bp, Homo sapien
actaaggagactcaagtatttactt

SEQ ID NO: 5679433 - DNA, 25 bp, Homo sapien
tagaaggtatgtaatcattgttaaa

SEQ ID NO: 5679434 - DNA, 25 bp, Homo sapien
ctaaggagactcaagtatttacttt

SEQ ID NO: 5679435 - DNA, 25 bp, Homo sapien
agaaggtatgtaatcattgttaaaa

SEQ ID NO: 5679436 - DNA, 25 bp, Homo sapien
atgggtggataagtaccagttgttt

SEQ ID NO: 5679437 - DNA, 25 bp, Homo sapien
gtggataagtaccagttgttttata

SEQ ID NO: 5679438 - DNA, 25 bp, Homo sapien
gatgggtggataagtaccagttgtt

SEQ ID NO: 5679439 - DNA, 25 bp, Homo sapien
tggataagtaccagttgttttataa

SEQ ID NO: 5679440 - DNA, 25 bp, Homo sapien
aacaactggtacttatccacccatc

SEQ ID NO: 5679441 - DNA, 25 bp, Homo sapien
tataaaacaactggtacttatccac

SEQ ID NO: 5679442 - DNA, 25 bp, Homo sapien
ttataaaacaactggtacttatcca

SEQ ID NO: 5679443 - DNA, 25 bp, Homo sapien
aaacaactggtacttatccacccat

SEQ ID NO: 5679444 - DNA, 25 bp, Homo sapien
atagaaattatcgtttggcagtttt

SEQ ID NO: 5679445 - DNA, 25 bp, Homo sapien
tagaaattatcgtttggcagtttta

SEQ ID NO: 5679446 - DNA, 25 bp, Homo sapien
agaaattatcgtttggcagttttat

SEQ ID NO: 5679447 - DNA, 25 bp, Homo sapien
atctaatagaaattatcgtttggca

SEQ ID NO: 5679448 - DNA, 25 bp, Homo sapien
tgccaaacgataatttctattagat

SEQ ID NO: 5679449 - DNA, 25 bp, Homo sapien
aaaactgccaaacgataatttctat

SEQ ID NO: 5679450 - DNA, 25 bp, Homo sapien
taaaactgccaaacgataatttcta

SEQ ID NO: 5679451 - DNA, 25 bp, Homo sapien
ataaaactgccaaacgataatttct

SEQ ID NO: 5679452 - DNA, 25 bp, Homo sapien
aggattgatttaggccaggagttga

SEQ ID NO: 5679453 - DNA, 25 bp, Homo sapien
ttgatttaggccaggagttgaagac

SEQ ID NO: 5679454 - DNA, 25 bp, Homo sapien
tgatttaggccaggagttgaagacc

SEQ ID NO: 5679455 - DNA, 25 bp, Homo sapien
ggattgatttaggccaggagttgaa

SEQ ID NO: 5679456 - DNA, 25 bp, Homo sapien
attgatttaggccaggagttgaaga

SEQ ID NO: 5679457 - DNA, 25 bp, Homo sapien
ctgtctcttcaaaaaataagaaaat

SEQ ID NO: 5679458 - DNA, 25 bp, Homo sapien
gtcttcaactcctggcctaaatcaa

SEQ ID NO: 5679459 - DNA, 25 bp, Homo sapien
ttcaactcctggcctaaatcaatcc

SEQ ID NO: 5679460 - DNA, 25 bp, Homo sapien
attttcttattttttgaagagacag

SEQ ID NO: 5679461 - DNA, 25 bp, Homo sapien
ggtcttcaactcctggcctaaatca

SEQ ID NO: 5679462 - DNA, 25 bp, Homo sapien
tcaactcctggcctaaatcaatcct

SEQ ID NO: 5679463 - DNA, 25 bp, Homo sapien
tcttcaactcctggcctaaatcaat

SEQ ID NO: 5679464 - DNA, 25 bp, Homo sapien
gcagtttcctctattaacttctgat

SEQ ID NO: 5679465 - DNA, 25 bp, Homo sapien
tcatctgtaaacctaatttgaatta

SEQ ID NO: 5679466 - DNA, 25 bp, Homo sapien
taacttctgattaggggagaaaata

SEQ ID NO: 5679467 - DNA, 25 bp, Homo sapien
ggcagtttcctctattaacttctga

SEQ ID NO: 5679468 - DNA, 25 bp, Homo sapien
atcagaagttaatagaggaaactgc

SEQ ID NO: 5679469 - DNA, 25 bp, Homo sapien
tattttctcccctaatcagaagtta

SEQ ID NO: 5679470 - DNA, 25 bp, Homo sapien
taattcaaattaggtttacagatga

SEQ ID NO: 5679471 - DNA, 25 bp, Homo sapien
tcagaagttaatagaggaaactgcc

SEQ ID NO: 5679472 - DNA, 25 bp, Homo sapien
ccaccgcgcccagccttggagtgat

SEQ ID NO: 5679473 - DNA, 25 bp, Homo sapien
gacctcaggtgtttcacctgccttg

SEQ ID NO: 5679474 - DNA, 25 bp, Homo sapien
acctcaggtgtttcacctgccttgg

SEQ ID NO: 5679475 - DNA, 25 bp, Homo sapien
tcaggtgtttcacctgccttggcct

SEQ ID NO: 5679476 - DNA, 25 bp, Homo sapien
ctcaggtgtttcacctgccttggcc

SEQ ID NO: 5679477 - DNA, 25 bp, Homo sapien
cctcaggtgtttcacctgccttggc

SEQ ID NO: 5679478 - DNA, 25 bp, Homo sapien
aggccaaggcaggtgaaacacctga

SEQ ID NO: 5679479 - DNA, 25 bp, Homo sapien
ccaaggcaggtgaaacacctgaggt

SEQ ID NO: 5679480 - DNA, 25 bp, Homo sapien
atcactccaaggctgggcgcggtgg

SEQ ID NO: 5679481 - DNA, 25 bp, Homo sapien
caaggcaggtgaaacacctgaggtc

SEQ ID NO: 5679482 - DNA, 25 bp, Homo sapien
gccaaggcaggtgaaacacctgagg

SEQ ID NO: 5679483 - DNA, 25 bp, Homo sapien
ggccaaggcaggtgaaacacctgag

SEQ ID NO: 5679484 - DNA, 25 bp, Homo sapien
gcttatctagggttaatagtgttct

SEQ ID NO: 5679485 - DNA, 25 bp, Homo sapien
gtatttcctgtgtctaaaggctctg

SEQ ID NO: 5679486 - DNA, 25 bp, Homo sapien
taattcataatagctatgctttctg

SEQ ID NO: 5679487 - DNA, 25 bp, Homo sapien
tggtggatctgagcttatctagggt

SEQ ID NO: 5679488 - DNA, 25 bp, Homo sapien
gagtatttcctgtgtctaaaggctc

SEQ ID NO: 5679489 - DNA, 25 bp, Homo sapien
tcacagtaattcataatagctatgc

SEQ ID NO: 5679490 - DNA, 25 bp, Homo sapien
catagctattatgaattactgtgaa

SEQ ID NO: 5679491 - DNA, 25 bp, Homo sapien
aagaacactattaaccctagataag

SEQ ID NO: 5679492 - DNA, 25 bp, Homo sapien
tattaaccctagataagctcagatc

SEQ ID NO: 5679493 - DNA, 25 bp, Homo sapien
accctagataagctcagatccacca

SEQ ID NO: 5679494 - DNA, 25 bp, Homo sapien
cagagcctttagacacaggaaatac

SEQ ID NO: 5679495 - DNA, 25 bp, Homo sapien
cagaaagcatagctattatgaatta

SEQ ID NO: 5679496 - DNA, 25 bp, Homo sapien
tgatcatctatagatcatgtacctt

SEQ ID NO: 5679497 - DNA, 25 bp, Homo sapien
aatgatcatctatagatcatgtacc

SEQ ID NO: 5679498 - DNA, 25 bp, Homo sapien
tcatctatagatcatgtaccttgtg

SEQ ID NO: 5679499 - DNA, 25 bp, Homo sapien
gatcatctatagatcatgtaccttg

SEQ ID NO: 5679500 - DNA, 25 bp, Homo sapien
attcctacccgtttgaagcttagag

SEQ ID NO: 5679501 - DNA, 25 bp, Homo sapien
catctatagatcatgtaccttgtgg

SEQ ID NO: 5679502 - DNA, 25 bp, Homo sapien
ccacaaggtacatgatctatagatg

SEQ ID NO: 5679503 - DNA, 25 bp, Homo sapien
aaggtacatgatctatagatgatca

SEQ ID NO: 5679504 - DNA, 25 bp, Homo sapien
cacaaggtacatgatctatagatga

SEQ ID NO: 5679505 - DNA, 25 bp, Homo sapien
caaggtacatgatctatagatgatc

SEQ ID NO: 5679506 - DNA, 25 bp, Homo sapien
ctctaagcttcaaacgggtaggaat

SEQ ID NO: 5679507 - DNA, 25 bp, Homo sapien
acaaggtacatgatctatagatgat

SEQ ID NO: 5679508 - DNA, 25 bp, Homo sapien
atgagattttatactggaaaagagt

SEQ ID NO: 5679509 - DNA, 25 bp, Homo sapien
actcttttccagtataaaatctcat

SEQ ID NO: 5679510 - DNA, 25 bp, Homo sapien
tagagaggacccagtcaacaaatat

SEQ ID NO: 5679511 - DNA, 25 bp, Homo sapien
gagtcttagagaggacccagtcaac

SEQ ID NO: 5679512 - DNA, 25 bp, Homo sapien
tggaaaagagtcttagagaggaccc

SEQ ID NO: 5679513 - DNA, 25 bp, Homo sapien
tgagattttatactggaaaagagtc

SEQ ID NO: 5679514 - DNA, 25 bp, Homo sapien
aatgtctatcatgtgccagacactg

SEQ ID NO: 5679515 - DNA, 25 bp, Homo sapien
tattgaatgtctatcatgtgccaga

SEQ ID NO: 5679516 - DNA, 25 bp, Homo sapien
tatttgttgactgggtcctctctaa

SEQ ID NO: 5679517 - DNA, 25 bp, Homo sapien
cagtataaaatctcattattctgag

SEQ ID NO: 5679518 - DNA, 25 bp, Homo sapien
gactgggtcctctctaagactcttt

SEQ ID NO: 5679519 - DNA, 25 bp, Homo sapien
gactcttttccagtataaaatctca

SEQ ID NO: 5679520 - DNA, 25 bp, Homo sapien
cagtgtctggcacatgatagacatt

SEQ ID NO: 5679521 - DNA, 25 bp, Homo sapien
tctggcacatgatagacattcaata

SEQ ID NO: 5679522 - DNA, 25 bp, Homo sapien
ccctggcatctagtaagtagtttta

SEQ ID NO: 5679523 - DNA, 25 bp, Homo sapien
aaaatctacaaggttccttccactg

SEQ ID NO: 5679524 - DNA, 25 bp, Homo sapien
tccttccactgaagcagaagccctg

SEQ ID NO: 5679525 - DNA, 25 bp, Homo sapien
cctggcatctagtaagtagttttat

SEQ ID NO: 5679526 - DNA, 25 bp, Homo sapien
gcatctagtaagtagttttattttc

SEQ ID NO: 5679527 - DNA, 25 bp, Homo sapien
gtctataagggtggaaaaatctaca

SEQ ID NO: 5679528 - DNA, 25 bp, Homo sapien
ataaaactacttactagatgccagg

SEQ ID NO: 5679529 - DNA, 25 bp, Homo sapien
cagggcttctgcttcagtggaagga

SEQ ID NO: 5679530 - DNA, 25 bp, Homo sapien
aataaaactacttactagatgccag

SEQ ID NO: 5679531 - DNA, 25 bp, Homo sapien
taaaactacttactagatgccaggg

SEQ ID NO: 5679532 - DNA, 25 bp, Homo sapien
tgtagatttttccacccttatagac

SEQ ID NO: 5679533 - DNA, 25 bp, Homo sapien
gaaaataaaactacttactagatgc

SEQ ID NO: 5679534 - DNA, 25 bp, Homo sapien
taagatgctgctttatacagaggta

SEQ ID NO: 5679535 - DNA, 25 bp, Homo sapien
ctaggtcagctggttaagatgctgc

SEQ ID NO: 5679536 - DNA, 25 bp, Homo sapien
tatgtgacttttctaggtcagctgg

SEQ ID NO: 5679537 - DNA, 25 bp, Homo sapien
ggtaactcgctatctggattttaaa

SEQ ID NO: 5679538 - DNA, 25 bp, Homo sapien
tatacagaggtaactcgctatctgg

SEQ ID NO: 5679539 - DNA, 25 bp, Homo sapien
ctggattttaaagtgactgaaggga

SEQ ID NO: 5679540 - DNA, 25 bp, Homo sapien
gcagcatcttaaccagctgacctag

SEQ ID NO: 5679541 - DNA, 25 bp, Homo sapien
ccagctgacctagaaaagtcacata

SEQ ID NO: 5679542 - DNA, 25 bp, Homo sapien
tataaagcagcatcttaaccagctg

SEQ ID NO: 5679543 - DNA, 25 bp, Homo sapien
gcgagttacctctgtataaagcagc

SEQ ID NO: 5679544 - DNA, 25 bp, Homo sapien
tttaaaatccagatagcgagttacc

SEQ ID NO: 5679545 - DNA, 25 bp, Homo sapien
tcccttcagtcactttaaaatccag

SEQ ID NO: 5679546 - DNA, 25 bp, Homo sapien
gagttattgaacatcgttagaaaaa

SEQ ID NO: 5679547 - DNA, 25 bp, Homo sapien
tttttctaacgatgttcaataactc

SEQ ID NO: 5679548 - DNA, 25 bp, Homo sapien
tagtagtgccaggtactcaggagcg

SEQ ID NO: 5679549 - DNA, 25 bp, Homo sapien
caggcatagtagtgccaggtactca

SEQ ID NO: 5679550 - DNA, 25 bp, Homo sapien
ggagcgtcaggctggaagcttgcat

SEQ ID NO: 5679551 - DNA, 25 bp, Homo sapien
agtgccaggtactcaggagcgtcag

SEQ ID NO: 5679552 - DNA, 25 bp, Homo sapien
tagtgccaggtactcaggagcgtca

SEQ ID NO: 5679553 - DNA, 25 bp, Homo sapien
gcatagtagtgccaggtactcagga

SEQ ID NO: 5679554 - DNA, 25 bp, Homo sapien
ctgacgctcctgagtacctggcact

SEQ ID NO: 5679555 - DNA, 25 bp, Homo sapien
tgacgctcctgagtacctggcacta

SEQ ID NO: 5679556 - DNA, 25 bp, Homo sapien
tgagtacctggcactactatgcctg

SEQ ID NO: 5679557 - DNA, 25 bp, Homo sapien
atgcaagcttccagcctgacgctcc

SEQ ID NO: 5679558 - DNA, 25 bp, Homo sapien
tcctgagtacctggcactactatgc

SEQ ID NO: 5679559 - DNA, 25 bp, Homo sapien
gctcctgagtacctggcactactat

SEQ ID NO: 5679560 - DNA, 25 bp, Homo sapien
ctatgtattcaaccttgaataggaa

SEQ ID NO: 5679561 - DNA, 25 bp, Homo sapien
tgtattcaaccttgaataggaaaaa

SEQ ID NO: 5679562 - DNA, 25 bp, Homo sapien
aaaacgtgtaatatgcagtgcaata

SEQ ID NO: 5679563 - DNA, 25 bp, Homo sapien
aaaaacgtgtaatatgcagtgcaat

SEQ ID NO: 5679564 - DNA, 25 bp, Homo sapien
acaaaaacgtgtaatatgcagtgca

SEQ ID NO: 5679565 - DNA, 25 bp, Homo sapien
caaaaacgtgtaatatgcagtgcaa

SEQ ID NO: 5679566 - DNA, 25 bp, Homo sapien
ttgcactgcatattacacgtttttg

SEQ ID NO: 5679567 - DNA, 25 bp, Homo sapien
tttttcctattcaaggttgaataca

SEQ ID NO: 5679568 - DNA, 25 bp, Homo sapien
tattgcactgcatattacacgtttt

SEQ ID NO: 5679569 - DNA, 25 bp, Homo sapien
ttcctattcaaggttgaatacatag

SEQ ID NO: 5679570 - DNA, 25 bp, Homo sapien
attgcactgcatattacacgttttt

SEQ ID NO: 5679571 - DNA, 25 bp, Homo sapien
tgcactgcatattacacgtttttgt

SEQ ID NO: 5679572 - DNA, 25 bp, Homo sapien
gtgttgtgtgggttggtcttggact

SEQ ID NO: 5679573 - DNA, 25 bp, Homo sapien
agtccaagaccaacccacacaacac

SEQ ID NO: 5679574 - DNA, 25 bp, Homo sapien
tttttgtgttatggtagagatgagg

SEQ ID NO: 5679575 - DNA, 25 bp, Homo sapien
tcactgtgttgtgtgggttggtctt

SEQ ID NO: 5679576 - DNA, 25 bp, Homo sapien
ttgtgttatggtagagatgaggtct

SEQ ID NO: 5679577 - DNA, 25 bp, Homo sapien
caccacacctgggtgttccaccaca

SEQ ID NO: 5679578 - DNA, 25 bp, Homo sapien
ttgtgtgggttggtcttggactctt

SEQ ID NO: 5679579 - DNA, 25 bp, Homo sapien
cacctgggtgttccaccacacctgg

SEQ ID NO: 5679580 - DNA, 25 bp, Homo sapien
ggtggaacacccaggtgtggtggga

SEQ ID NO: 5679581 - DNA, 25 bp, Homo sapien
cctcatctctaccataacacaaaaa

SEQ ID NO: 5679582 - DNA, 25 bp, Homo sapien
aagaccaacccacacaacacagtga

SEQ ID NO: 5679583 - DNA, 25 bp, Homo sapien
tgtggtggaacacccaggtgtggtg

SEQ ID NO: 5679584 - DNA, 25 bp, Homo sapien
aagagtccaagaccaacccacacaa

SEQ ID NO: 5679585 - DNA, 25 bp, Homo sapien
ccaggtgtggtggaacacccaggtg

SEQ ID NO: 5679586 - DNA, 25 bp, Homo sapien
ttaaattgctgtaatattagtactt

SEQ ID NO: 5679587 - DNA, 25 bp, Homo sapien
aagtactaatattacagcaatttaa

SEQ ID NO: 5679588 - DNA, 25 bp, Homo sapien
gtttgtgcacatgaaataaagcatc

SEQ ID NO: 5679589 - DNA, 25 bp, Homo sapien
ttggttataggtctgtttgtgcaca

SEQ ID NO: 5679590 - DNA, 25 bp, Homo sapien
tacttttttctgagatgacattgaa

SEQ ID NO: 5679591 - DNA, 25 bp, Homo sapien
ctgagatgacattgaaaaactaaat

SEQ ID NO: 5679592 - DNA, 25 bp, Homo sapien
gtgcacatgaaataaagcatctgct

SEQ ID NO: 5679593 - DNA, 25 bp, Homo sapien
taaattgctgtaatattagtacttt

SEQ ID NO: 5679594 - DNA, 25 bp, Homo sapien
ttagtttttcaatgtcatctcagaa

SEQ ID NO: 5679595 - DNA, 25 bp, Homo sapien
tgtgcacaaacagacctataaccaa

SEQ ID NO: 5679596 - DNA, 25 bp, Homo sapien
gaaaaaagtactaatattacagcaa

SEQ ID NO: 5679597 - DNA, 25 bp, Homo sapien
gcagatgctttatttcatgtgcaca

SEQ ID NO: 5679598 - DNA, 25 bp, Homo sapien
tatttcatgtgcacaaacagaccta

SEQ ID NO: 5679599 - DNA, 25 bp, Homo sapien
tcaatgtcatctcagaaaaaagtac

SEQ ID NO: 5679600 - DNA, 25 bp, Homo sapien
gcatgatcttggctcactacaacct

SEQ ID NO: 5679601 - DNA, 25 bp, Homo sapien
tccgccttctggttcaagcaattct

SEQ ID NO: 5679602 - DNA, 25 bp, Homo sapien
tggcatgatcttggctcactacaac

SEQ ID NO: 5679603 - DNA, 25 bp, Homo sapien
catgatcttggctcactacaacctc

SEQ ID NO: 5679604 - DNA, 25 bp, Homo sapien
aacctccgccttctggttcaagcaa

SEQ ID NO: 5679605 - DNA, 25 bp, Homo sapien
atgatcttggctcactacaacctcc

SEQ ID NO: 5679606 - DNA, 25 bp, Homo sapien
ttgcttgaaccagaaggcggaggtt

SEQ ID NO: 5679607 - DNA, 25 bp, Homo sapien
aggttgtagtgagccaagatcatgc

SEQ ID NO: 5679608 - DNA, 25 bp, Homo sapien
gttgtagtgagccaagatcatgcca

SEQ ID NO: 5679609 - DNA, 25 bp, Homo sapien
ggaggttgtagtgagccaagatcat

SEQ ID NO: 5679610 - DNA, 25 bp, Homo sapien
gaggttgtagtgagccaagatcatg

SEQ ID NO: 5679611 - DNA, 25 bp, Homo sapien
agaattgcttgaaccagaaggcgga

SEQ ID NO: 5679612 - DNA, 25 bp, Homo sapien
atacataacaagattgtaagccttt

SEQ ID NO: 5679613 - DNA, 25 bp, Homo sapien
gtggcataatacataacaagattgt

SEQ ID NO: 5679614 - DNA, 25 bp, Homo sapien
ggcataatacataacaagattgtaa

SEQ ID NO: 5679615 - DNA, 25 bp, Homo sapien
tggcataatacataacaagattgta

SEQ ID NO: 5679616 - DNA, 25 bp, Homo sapien
cataatacataacaagattgtaagc

SEQ ID NO: 5679617 - DNA, 25 bp, Homo sapien
taatacataacaagattgtaagcct

SEQ ID NO: 5679618 - DNA, 25 bp, Homo sapien
aggcttacaatcttgttatgtatta

SEQ ID NO: 5679619 - DNA, 25 bp, Homo sapien
aaaggcttacaatcttgttatgtat

SEQ ID NO: 5679620 - DNA, 25 bp, Homo sapien
acaatcttgttatgtattatgccac

SEQ ID NO: 5679621 - DNA, 25 bp, Homo sapien
gcttacaatcttgttatgtattatg

SEQ ID NO: 5679622 - DNA, 25 bp, Homo sapien
tacaatcttgttatgtattatgcca

SEQ ID NO: 5679623 - DNA, 25 bp, Homo sapien
ttacaatcttgttatgtattatgcc

SEQ ID NO: 5679624 - DNA, 25 bp, Homo sapien
tcaagggatccacccgcctcatgga

SEQ ID NO: 5679625 - DNA, 25 bp, Homo sapien
gcatgagccattgcgtctggccttg

SEQ ID NO: 5679626 - DNA, 25 bp, Homo sapien
tgcgtctggccttgttttatattct

SEQ ID NO: 5679627 - DNA, 25 bp, Homo sapien
tccacccgcctcatggattacaaag

SEQ ID NO: 5679628 - DNA, 25 bp, Homo sapien
gcctcatggattacaaagtgctggg

SEQ ID NO: 5679629 - DNA, 25 bp, Homo sapien
tcatggattacaaagtgctgggatt

SEQ ID NO: 5679630 - DNA, 25 bp, Homo sapien
taaaacaaggccagacgcaatggct

SEQ ID NO: 5679631 - DNA, 25 bp, Homo sapien
aatcccagcactttgtaatccatga

SEQ ID NO: 5679632 - DNA, 25 bp, Homo sapien
caaggccagacgcaatggctcatgc

SEQ ID NO: 5679633 - DNA, 25 bp, Homo sapien
gcactttgtaatccatgaggcgggt

SEQ ID NO: 5679634 - DNA, 25 bp, Homo sapien
tccatgaggcgggtggatcccttga

SEQ ID NO: 5679635 - DNA, 25 bp, Homo sapien
aagaatataaaacaaggccagacgc

SEQ ID NO: 5679636 - DNA, 25 bp, Homo sapien
gagccaccatgcttggccaattttt

SEQ ID NO: 5679637 - DNA, 25 bp, Homo sapien
agccaccatgcttggccaatttttg

SEQ ID NO: 5679638 - DNA, 25 bp, Homo sapien
atgagccaccatgcttggccaattt

SEQ ID NO: 5679639 - DNA, 25 bp, Homo sapien
gccaccatgcttggccaatttttgt

SEQ ID NO: 5679640 - DNA, 25 bp, Homo sapien
tgagccaccatgcttggccaatttt

SEQ ID NO: 5679641 - DNA, 25 bp, Homo sapien
ccaccatgcttggccaatttttgta

SEQ ID NO: 5679642 - DNA, 25 bp, Homo sapien
aaattggccaagcatggtggctcat

SEQ ID NO: 5679643 - DNA, 25 bp, Homo sapien
caaaaattggccaagcatggtggct

SEQ ID NO: 5679644 - DNA, 25 bp, Homo sapien
acaaaaattggccaagcatggtggc

SEQ ID NO: 5679645 - DNA, 25 bp, Homo sapien
aaaaattggccaagcatggtggctc

SEQ ID NO: 5679646 - DNA, 25 bp, Homo sapien
tacaaaaattggccaagcatggtgg

SEQ ID NO: 5679647 - DNA, 25 bp, Homo sapien
aaaattggccaagcatggtggctca

SEQ ID NO: 5679648 - DNA, 25 bp, Homo sapien
gcctggcttttcttgtactcctgac

SEQ ID NO: 5679649 - DNA, 25 bp, Homo sapien
gtcaggagtacaagaaaagccaggc

SEQ ID NO: 5679650 - DNA, 25 bp, Homo sapien
tgcaacctctgcctcgcatgttgaa

SEQ ID NO: 5679651 - DNA, 25 bp, Homo sapien
gcctcgcatgttgaaacgattctcc

SEQ ID NO: 5679652 - DNA, 25 bp, Homo sapien
tcgcatgttgaaacgattctcctgc

SEQ ID NO: 5679653 - DNA, 25 bp, Homo sapien
gtgcagtcacgctatctcggctcac

SEQ ID NO: 5679654 - DNA, 25 bp, Homo sapien
acctctgcctcgcatgttgaaacga

SEQ ID NO: 5679655 - DNA, 25 bp, Homo sapien
tctgcctcgcatgttgaaacgattc

SEQ ID NO: 5679656 - DNA, 25 bp, Homo sapien
tcgtttcaacatgcgaggcagaggt

SEQ ID NO: 5679657 - DNA, 25 bp, Homo sapien
ttcaacatgcgaggcagaggttgca

SEQ ID NO: 5679658 - DNA, 25 bp, Homo sapien
gcaggagaatcgtttcaacatgcga

SEQ ID NO: 5679659 - DNA, 25 bp, Homo sapien
gtgagccgagatagcgtgactgcac

SEQ ID NO: 5679660 - DNA, 25 bp, Homo sapien
ggagaatcgtttcaacatgcgaggc

SEQ ID NO: 5679661 - DNA, 25 bp, Homo sapien
gaatcgtttcaacatgcgaggcaga

SEQ ID NO: 5679662 - DNA, 25 bp, Homo sapien
ctcgagtagctgggcttacaggcac

SEQ ID NO: 5679663 - DNA, 25 bp, Homo sapien
cacacaccacaccccgctaattttt

SEQ ID NO: 5679664 - DNA, 25 bp, Homo sapien
tcgagtagctgggcttacaggcaca

SEQ ID NO: 5679665 - DNA, 25 bp, Homo sapien
gcacacaccacaccccgctaatttt

SEQ ID NO: 5679666 - DNA, 25 bp, Homo sapien
tctcgagtagctgggcttacaggca

SEQ ID NO: 5679667 - DNA, 25 bp, Homo sapien
ctctcgagtagctgggcttacaggc

SEQ ID NO: 5679668 - DNA, 25 bp, Homo sapien
gtgcctgtaagcccagctactcgag

SEQ ID NO: 5679669 - DNA, 25 bp, Homo sapien
gcctgtaagcccagctactcgagag

SEQ ID NO: 5679670 - DNA, 25 bp, Homo sapien
aaaattagcggggtgtggtgtgtgc

SEQ ID NO: 5679671 - DNA, 25 bp, Homo sapien
aaaaattagcggggtgtggtgtgtg

SEQ ID NO: 5679672 - DNA, 25 bp, Homo sapien
tgcctgtaagcccagctactcgaga

SEQ ID NO: 5679673 - DNA, 25 bp, Homo sapien
tgtgcctgtaagcccagctactcga

SEQ ID NO: 5679674 - DNA, 25 bp, Homo sapien
ttcatgtgattctccacctcccaga

SEQ ID NO: 5679675 - DNA, 25 bp, Homo sapien
tcccagattcatgtgattctccacc

SEQ ID NO: 5679676 - DNA, 25 bp, Homo sapien
cagattcatgtgattctccacctcc

SEQ ID NO: 5679677 - DNA, 25 bp, Homo sapien
cccagattcatgtgattctccacct

SEQ ID NO: 5679678 - DNA, 25 bp, Homo sapien
ccagattcatgtgattctccacctc

SEQ ID NO: 5679679 - DNA, 25 bp, Homo sapien
tcatgtgattctccacctcccagat

SEQ ID NO: 5679680 - DNA, 25 bp, Homo sapien
tctgggaggtggagaatcacatgaa

SEQ ID NO: 5679681 - DNA, 25 bp, Homo sapien
aggtggagaatcacatgaatctggg

SEQ ID NO: 5679682 - DNA, 25 bp, Homo sapien
atctgggaggtggagaatcacatga

SEQ ID NO: 5679683 - DNA, 25 bp, Homo sapien
gaggtggagaatcacatgaatctgg

SEQ ID NO: 5679684 - DNA, 25 bp, Homo sapien
ggtggagaatcacatgaatctggga

SEQ ID NO: 5679685 - DNA, 25 bp, Homo sapien
ggaggtggagaatcacatgaatctg

SEQ ID NO: 5679686 - DNA, 25 bp, Homo sapien
tccgtatagagaactatacagtgtc

SEQ ID NO: 5679687 - DNA, 25 bp, Homo sapien
gaactatacagtgtcattgacaaat

SEQ ID NO: 5679688 - DNA, 25 bp, Homo sapien
gagaactatacagtgtcattgacaa

SEQ ID NO: 5679689 - DNA, 25 bp, Homo sapien
tatagagaactatacagtgtcattg

SEQ ID NO: 5679690 - DNA, 25 bp, Homo sapien
agtccgtatagagaactatacagtg

SEQ ID NO: 5679691 - DNA, 25 bp, Homo sapien
tagagaactatacagtgtcattgac

SEQ ID NO: 5679692 - DNA, 25 bp, Homo sapien
gacactgtatagttctctatacgga

SEQ ID NO: 5679693 - DNA, 25 bp, Homo sapien
caatgacactgtatagttctctata

SEQ ID NO: 5679694 - DNA, 25 bp, Homo sapien
tttgtcaatgacactgtatagttct

SEQ ID NO: 5679695 - DNA, 25 bp, Homo sapien
tatttgtcaatgacactgtatagtt

SEQ ID NO: 5679696 - DNA, 25 bp, Homo sapien
cactgtatagttctctatacggact

SEQ ID NO: 5679697 - DNA, 25 bp, Homo sapien
tgtcaatgacactgtatagttctct

SEQ ID NO: 5679698 - DNA, 25 bp, Homo sapien
tgctatttgtcagtgacaccctagt

SEQ ID NO: 5679699 - DNA, 25 bp, Homo sapien
gattgctatttgtcagtgacaccct

SEQ ID NO: 5679700 - DNA, 25 bp, Homo sapien
tatttgtcagtgacaccctagttct

SEQ ID NO: 5679701 - DNA, 25 bp, Homo sapien
tagatgattgctatttgtcagtgac

SEQ ID NO: 5679702 - DNA, 25 bp, Homo sapien
gatgattgctatttgtcagtgacac

SEQ ID NO: 5679703 - DNA, 25 bp, Homo sapien
tgattgctatttgtcagtgacaccc

SEQ ID NO: 5679704 - DNA, 25 bp, Homo sapien
agaactagggtgtcactgacaaata

SEQ ID NO: 5679705 - DNA, 25 bp, Homo sapien
gggtgtcactgacaaatagcaatca

SEQ ID NO: 5679706 - DNA, 25 bp, Homo sapien
tagggtgtcactgacaaatagcaat

SEQ ID NO: 5679707 - DNA, 25 bp, Homo sapien
tgtcactgacaaatagcaatcatct

SEQ ID NO: 5679708 - DNA, 25 bp, Homo sapien
aactagggtgtcactgacaaatagc

SEQ ID NO: 5679709 - DNA, 25 bp, Homo sapien
gacaaatagcaatcatctaaattca

SEQ ID NO: 5679710 - DNA, 25 bp, Homo sapien
tttgaattccttacataatacaaaa

SEQ ID NO: 5679711 - DNA, 25 bp, Homo sapien
attttgaattccttacataatacaa

SEQ ID NO: 5679712 - DNA, 25 bp, Homo sapien
tattttgaattccttacataataca

SEQ ID NO: 5679713 - DNA, 25 bp, Homo sapien
ttttgaattccttacataatacaaa

SEQ ID NO: 5679714 - DNA, 25 bp, Homo sapien
ttgtattatgtaaggaattcaaaat

SEQ ID NO: 5679715 - DNA, 25 bp, Homo sapien
tgtattatgtaaggaattcaaaata

SEQ ID NO: 5679716 - DNA, 25 bp, Homo sapien
tttgtattatgtaaggaattcaaaa

SEQ ID NO: 5679717 - DNA, 25 bp, Homo sapien
ttttgtattatgtaaggaattcaaa

SEQ ID NO: 5679718 - DNA, 25 bp, Homo sapien
gcttttgtattatgtaaggaattca

SEQ ID NO: 5679719 - DNA, 25 bp, Homo sapien
gataattaaaattagttctagttca

SEQ ID NO: 5679720 - DNA, 25 bp, Homo sapien
aaaccttagattcttcctaatcaga

SEQ ID NO: 5679721 - DNA, 25 bp, Homo sapien
tagattcttcctaatcagaaaagat

SEQ ID NO: 5679722 - DNA, 25 bp, Homo sapien
gattcttcctaatcagaaaagataa

SEQ ID NO: 5679723 - DNA, 25 bp, Homo sapien
accttagattcttcctaatcagaaa

SEQ ID NO: 5679724 - DNA, 25 bp, Homo sapien
tatgattggtaccttatggtgatgt

SEQ ID NO: 5679725 - DNA, 25 bp, Homo sapien
ggtgtaccttgtgtctagactcacc

SEQ ID NO: 5679726 - DNA, 25 bp, Homo sapien
tggatatgattggtaccttatggtg

SEQ ID NO: 5679727 - DNA, 25 bp, Homo sapien
ggatatgattggtaccttatggtga

SEQ ID NO: 5679728 - DNA, 25 bp, Homo sapien
gtaccttgtgtctagactcaccaaa

SEQ ID NO: 5679729 - DNA, 25 bp, Homo sapien
tgtaccttgtgtctagactcaccaa

SEQ ID NO: 5679730 - DNA, 25 bp, Homo sapien
aacatcaccataaggtaccaatcat

SEQ ID NO: 5679731 - DNA, 25 bp, Homo sapien
ggtgagtctagacacaaggtacacc

SEQ ID NO: 5679732 - DNA, 25 bp, Homo sapien
tttggtgagtctagacacaaggtac

SEQ ID NO: 5679733 - DNA, 25 bp, Homo sapien
caccataaggtaccaatcatatcca

SEQ ID NO: 5679734 - DNA, 25 bp, Homo sapien
tcaccataaggtaccaatcatatcc

SEQ ID NO: 5679735 - DNA, 25 bp, Homo sapien
tggtgagtctagacacaaggtacac

SEQ ID NO: 5679736 - DNA, 25 bp, Homo sapien
aatctgagcttcatttcaattcatg

SEQ ID NO: 5679737 - DNA, 25 bp, Homo sapien
atctgagcttcatttcaattcatgt

SEQ ID NO: 5679738 - DNA, 25 bp, Homo sapien
catgaattgaaatgaagctcagatt

SEQ ID NO: 5679739 - DNA, 25 bp, Homo sapien
acatgaattgaaatgaagctcagat

SEQ ID NO: 5679740 - DNA, 25 bp, Homo sapien
atacttactaattttgcttattctt

SEQ ID NO: 5679741 - DNA, 25 bp, Homo sapien
aatacttactaattttgcttattct

SEQ ID NO: 5679742 - DNA, 25 bp, Homo sapien
aagaataagcaaaattagtaagtat

SEQ ID NO: 5679743 - DNA, 25 bp, Homo sapien
tgaataaatacttactaattttgct

SEQ ID NO: 5679744 - DNA, 25 bp, Homo sapien
acccagccagaatttttattgaata

SEQ ID NO: 5679745 - DNA, 25 bp, Homo sapien
cttattcttttccaccttagcagta

SEQ ID NO: 5679746 - DNA, 25 bp, Homo sapien
gcttattcttttccaccttagcagt

SEQ ID NO: 5679747 - DNA, 25 bp, Homo sapien
aatacttactaattttgcttattct

SEQ ID NO: 5679748 - DNA, 25 bp, Homo sapien
ccagccagaatttttattgaataaa

SEQ ID NO: 5679749 - DNA, 25 bp, Homo sapien
aagaataagcaaaattagtaagtat

SEQ ID NO: 5679750 - DNA, 25 bp, Homo sapien
tattcaataaaaattctggctgggt

SEQ ID NO: 5679751 - DNA, 25 bp, Homo sapien
tatttattcaataaaaattctggct

SEQ ID NO: 5679752 - DNA, 25 bp, Homo sapien
tactgctaaggtggaaaagaataag

SEQ ID NO: 5679753 - DNA, 25 bp, Homo sapien
actgctaaggtggaaaagaataagc

SEQ ID NO: 5679754 - DNA, 25 bp, Homo sapien
ttattcaataaaaattctggctggg

SEQ ID NO: 5679755 - DNA, 25 bp, Homo sapien
aggcgtacatcatcacgtctggcta

SEQ ID NO: 5679756 - DNA, 25 bp, Homo sapien
caggcgtacatcatcacgtctggct

SEQ ID NO: 5679757 - DNA, 25 bp, Homo sapien
ttacaggcgtacatcatcacgtctg

SEQ ID NO: 5679758 - DNA, 25 bp, Homo sapien
agccagacgtgatgatgtacgcctg

SEQ ID NO: 5679759 - DNA, 25 bp, Homo sapien
tagccagacgtgatgatgtacgcct

SEQ ID NO: 5679760 - DNA, 25 bp, Homo sapien
cagacgtgatgatgtacgcctgtaa

SEQ ID NO: 5679761 - DNA, 25 bp, Homo sapien
cgatcttagctcagtgcaacctcca

SEQ ID NO: 5679762 - DNA, 25 bp, Homo sapien
caggctgcagtgcagtggcacgatc

SEQ ID NO: 5679763 - DNA, 25 bp, Homo sapien
tgagatggagtctttctctgtcacc

SEQ ID NO: 5679764 - DNA, 25 bp, Homo sapien
tcctaggctcaaacgattctcgtgc

SEQ ID NO: 5679765 - DNA, 25 bp, Homo sapien
ctcctaggctcaaacgattctcgtg

SEQ ID NO: 5679766 - DNA, 25 bp, Homo sapien
cctcctaggctcaaacgattctcgt

SEQ ID NO: 5679767 - DNA, 25 bp, Homo sapien
cacgagaatcgtttgagcctaggag

SEQ ID NO: 5679768 - DNA, 25 bp, Homo sapien
ggaggttgcactgagctaagatcgt

SEQ ID NO: 5679769 - DNA, 25 bp, Homo sapien
gatcgtgccactgcactgcagcctg

SEQ ID NO: 5679770 - DNA, 25 bp, Homo sapien
cgagaatcgtttgagcctaggaggt

SEQ ID NO: 5679771 - DNA, 25 bp, Homo sapien
gcacgagaatcgtttgagcctagga

SEQ ID NO: 5679772 - DNA, 25 bp, Homo sapien
acgagaatcgtttgagcctaggagg

SEQ ID NO: 5679773 - DNA, 25 bp, Homo sapien
gtgattttcatgctcagccttctga

SEQ ID NO: 5679774 - DNA, 25 bp, Homo sapien
aagtgattttcatgctcagccttct

SEQ ID NO: 5679775 - DNA, 25 bp, Homo sapien
ccatctcttgggttcaagtgatttt

SEQ ID NO: 5679776 - DNA, 25 bp, Homo sapien
agtgattttcatgctcagccttctg

SEQ ID NO: 5679777 - DNA, 25 bp, Homo sapien
gattttcatgctcagccttctgagt

SEQ ID NO: 5679778 - DNA, 25 bp, Homo sapien
tgattttcatgctcagccttctgag

SEQ ID NO: 5679779 - DNA, 25 bp, Homo sapien
ctcagaaggctgagcatgaaaatca

SEQ ID NO: 5679780 - DNA, 25 bp, Homo sapien
tcagaaggctgagcatgaaaatcac

SEQ ID NO: 5679781 - DNA, 25 bp, Homo sapien
actcagaaggctgagcatgaaaatc

SEQ ID NO: 5679782 - DNA, 25 bp, Homo sapien
agaaggctgagcatgaaaatcactt

SEQ ID NO: 5679783 - DNA, 25 bp, Homo sapien
cagaaggctgagcatgaaaatcact

SEQ ID NO: 5679784 - DNA, 25 bp, Homo sapien
aaaatcacttgaacccaagagatgg

SEQ ID NO: 5679785 - DNA, 25 bp, Homo sapien
tgcataccacctgcctggcttattt

SEQ ID NO: 5679786 - DNA, 25 bp, Homo sapien
agatgcataccacctgcctggctta

SEQ ID NO: 5679787 - DNA, 25 bp, Homo sapien
taaagatgcataccacctgcctggc

SEQ ID NO: 5679788 - DNA, 25 bp, Homo sapien
aaagatgcataccacctgcctggct

SEQ ID NO: 5679789 - DNA, 25 bp, Homo sapien
gatgcataccacctgcctggcttat

SEQ ID NO: 5679790 - DNA, 25 bp, Homo sapien
ggctaaagatgcataccacctgcct

SEQ ID NO: 5679791 - DNA, 25 bp, Homo sapien
aaataagccaggcaggtggtatgca

SEQ ID NO: 5679792 - DNA, 25 bp, Homo sapien
caggcaggtggtatgcatctttagc

SEQ ID NO: 5679793 - DNA, 25 bp, Homo sapien
taagccaggcaggtggtatgcatct

SEQ ID NO: 5679794 - DNA, 25 bp, Homo sapien
ataagccaggcaggtggtatgcatc

SEQ ID NO: 5679795 - DNA, 25 bp, Homo sapien
gccaggcaggtggtatgcatcttta

SEQ ID NO: 5679796 - DNA, 25 bp, Homo sapien
aggcaggtggtatgcatctttagcc

SEQ ID NO: 5679797 - DNA, 25 bp, Homo sapien
acctcatgtgatctgtctgccttgg

SEQ ID NO: 5679798 - DNA, 25 bp, Homo sapien
atgcctggctaatttttgtattttt

SEQ ID NO: 5679799 - DNA, 25 bp, Homo sapien
ggtctggaacccctgacctcatgtg

SEQ ID NO: 5679800 - DNA, 25 bp, Homo sapien
catgcctggctaatttttgtatttt

SEQ ID NO: 5679801 - DNA, 25 bp, Homo sapien
ccaccatgatggccaggctggtctg

SEQ ID NO: 5679802 - DNA, 25 bp, Homo sapien
ttagtagagacggggttccaccatg

SEQ ID NO: 5679803 - DNA, 25 bp, Homo sapien
cacatgaggtcaggggttccagacc

SEQ ID NO: 5679804 - DNA, 25 bp, Homo sapien
ccaaggcagacagatcacatgaggt

SEQ ID NO: 5679805 - DNA, 25 bp, Homo sapien
aaaatacaaaaattagccaggcatg

SEQ ID NO: 5679806 - DNA, 25 bp, Homo sapien
aaaaatacaaaaattagccaggcat

SEQ ID NO: 5679807 - DNA, 25 bp, Homo sapien
cagaccagcctggccatcatggtgg

SEQ ID NO: 5679808 - DNA, 25 bp, Homo sapien
catggtggaaccccgtctctactaa

SEQ ID NO: 5679809 - DNA, 25 bp, Homo sapien
tatcatatccagaaccatattcaaa

SEQ ID NO: 5679810 - DNA, 25 bp, Homo sapien
tatatcatatccagaaccatattca

SEQ ID NO: 5679811 - DNA, 25 bp, Homo sapien
cattctcctgcataagcataatacc

SEQ ID NO: 5679812 - DNA, 25 bp, Homo sapien
aataccattatatcatatccagaac

SEQ ID NO: 5679813 - DNA, 25 bp, Homo sapien
ccagaaccatattcaaatttcccag

SEQ ID NO: 5679814 - DNA, 25 bp, Homo sapien
attctcctgcataagcataatacca

SEQ ID NO: 5679815 - DNA, 25 bp, Homo sapien
ctgggaaatttgaatatggttctgg

SEQ ID NO: 5679816 - DNA, 25 bp, Homo sapien
ggtattatgcttatgcaggagaatg

SEQ ID NO: 5679817 - DNA, 25 bp, Homo sapien
gaatatggttctggatatgatataa

SEQ ID NO: 5679818 - DNA, 25 bp, Homo sapien
gttctggatatgatataatggtatt

SEQ ID NO: 5679819 - DNA, 25 bp, Homo sapien
gggaaatttgaatatggttctggat

SEQ ID NO: 5679820 - DNA, 25 bp, Homo sapien
tggtattatgcttatgcaggagaat

SEQ ID NO: 5679821 - DNA, 25 bp, Homo sapien
tatggatatgatgtgtactgtgtct

SEQ ID NO: 5679822 - DNA, 25 bp, Homo sapien
tatgatgtgtactgtgtcttatggg

SEQ ID NO: 5679823 - DNA, 25 bp, Homo sapien
ctacgtatatggatatgatgtgtac

SEQ ID NO: 5679824 - DNA, 25 bp, Homo sapien
tgtactgtgtcttatgggagataga

SEQ ID NO: 5679825 - DNA, 25 bp, Homo sapien
cacctacgtatatggatatgatgtg

SEQ ID NO: 5679826 - DNA, 25 bp, Homo sapien
gatgtgtactgtgtcttatgggaga

SEQ ID NO: 5679827 - DNA, 25 bp, Homo sapien
tcccataagacacagtacacatcat

SEQ ID NO: 5679828 - DNA, 25 bp, Homo sapien
gacacagtacacatcatatccatat

SEQ ID NO: 5679829 - DNA, 25 bp, Homo sapien
cacatcatatccatatacgtaggtg

SEQ ID NO: 5679830 - DNA, 25 bp, Homo sapien
atctatctcccataagacacagtac

SEQ ID NO: 5679831 - DNA, 25 bp, Homo sapien
taagacacagtacacatcatatcca

SEQ ID NO: 5679832 - DNA, 25 bp, Homo sapien
tatctcccataagacacagtacaca

SEQ ID NO: 5679833 - DNA, 25 bp, Homo sapien
tgccagcgcaagtccagtgctttcc

SEQ ID NO: 5679834 - DNA, 25 bp, Homo sapien
taacagagaatagtctaggaaggga

SEQ ID NO: 5679835 - DNA, 25 bp, Homo sapien
gatgtgccagcgcaagtccagtgct

SEQ ID NO: 5679836 - DNA, 25 bp, Homo sapien
tagaggatcgtctgatgtgccagcg

SEQ ID NO: 5679837 - DNA, 25 bp, Homo sapien
cgtctgatgtgccagcgcaagtcca

SEQ ID NO: 5679838 - DNA, 25 bp, Homo sapien
ggatcgtctgatgtgccagcgcaag

SEQ ID NO: 5679839 - DNA, 25 bp, Homo sapien
ttgcgctggcacatcagacgatcct

SEQ ID NO: 5679840 - DNA, 25 bp, Homo sapien
tcccttcctagactattctctgtta

SEQ ID NO: 5679841 - DNA, 25 bp, Homo sapien
aaagcactggacttgcgctggcaca

SEQ ID NO: 5679842 - DNA, 25 bp, Homo sapien
ggaaagcactggacttgcgctggca

SEQ ID NO: 5679843 - DNA, 25 bp, Homo sapien
gctggcacatcagacgatcctctac

SEQ ID NO: 5679844 - DNA, 25 bp, Homo sapien
tggacttgcgctggcacatcagacg

SEQ ID NO: 5679845 - DNA, 25 bp, Homo sapien
aagtgtcaacactgaaaaggtgact

SEQ ID NO: 5679846 - DNA, 25 bp, Homo sapien
tgtcaacactgaaaaggtgactagg

SEQ ID NO: 5679847 - DNA, 25 bp, Homo sapien
caacactgaaaaggtgactaggctg

SEQ ID NO: 5679848 - DNA, 25 bp, Homo sapien
acactgaaaaggtgactaggctggg

SEQ ID NO: 5679849 - DNA, 25 bp, Homo sapien
tccaccattgattttacatcatcag

SEQ ID NO: 5679850 - DNA, 25 bp, Homo sapien
tcaacactgaaaaggtgactaggct

SEQ ID NO: 5679851 - DNA, 25 bp, Homo sapien
tagtcaccttttcagtgttgacact

SEQ ID NO: 5679852 - DNA, 25 bp, Homo sapien
gcctagtcaccttttcagtgttgac

SEQ ID NO: 5679853 - DNA, 25 bp, Homo sapien
ctgatgatgtaaaatcaatggtgga

SEQ ID NO: 5679854 - DNA, 25 bp, Homo sapien
cccagcctagtcaccttttcagtgt

SEQ ID NO: 5679855 - DNA, 25 bp, Homo sapien
actgatgatgtaaaatcaatggtgg

SEQ ID NO: 5679856 - DNA, 25 bp, Homo sapien
cagcctagtcaccttttcagtgttg

SEQ ID NO: 5679857 - DNA, 25 bp, Homo sapien
cctgctaatttttgtgtatttagta

SEQ ID NO: 5679858 - DNA, 25 bp, Homo sapien
gccctgctaatttttgtgtatttag

SEQ ID NO: 5679859 - DNA, 25 bp, Homo sapien
tctgcctcagcctcctgagttgctg

SEQ ID NO: 5679860 - DNA, 25 bp, Homo sapien
tggaattacaggcatgcaccaccat

SEQ ID NO: 5679861 - DNA, 25 bp, Homo sapien
gttctgcctcagcctcctgagttgc

SEQ ID NO: 5679862 - DNA, 25 bp, Homo sapien
ttctgcctcagcctcctgagttgct

SEQ ID NO: 5679863 - DNA, 25 bp, Homo sapien
tactaaatacacaaaaattagcagg

SEQ ID NO: 5679864 - DNA, 25 bp, Homo sapien
cagcaactcaggaggctgaggcaga

SEQ ID NO: 5679865 - DNA, 25 bp, Homo sapien
ctaaatacacaaaaattagcagggc

SEQ ID NO: 5679866 - DNA, 25 bp, Homo sapien
agcaactcaggaggctgaggcagaa

SEQ ID NO: 5679867 - DNA, 25 bp, Homo sapien
atggtggtgcatgcctgtaattcca

SEQ ID NO: 5679868 - DNA, 25 bp, Homo sapien
gcaactcaggaggctgaggcagaac

SEQ ID NO: 5679869 - DNA, 25 bp, Homo sapien
accatgcccagctaagttttgtatt

SEQ ID NO: 5679870 - DNA, 25 bp, Homo sapien
gcgccaccatgcccagctaagtttt

SEQ ID NO: 5679871 - DNA, 25 bp, Homo sapien
atgcgccaccatgcccagctaagtt

SEQ ID NO: 5679872 - DNA, 25 bp, Homo sapien
tgcgccaccatgcccagctaagttt

SEQ ID NO: 5679873 - DNA, 25 bp, Homo sapien
cgccaccatgcccagctaagttttg

SEQ ID NO: 5679874 - DNA, 25 bp, Homo sapien
ccatgcccagctaagttttgtattt

SEQ ID NO: 5679875 - DNA, 25 bp, Homo sapien
aatacaaaacttagctgggcatggt

SEQ ID NO: 5679876 - DNA, 25 bp, Homo sapien
aaatacaaaacttagctgggcatgg

SEQ ID NO: 5679877 - DNA, 25 bp, Homo sapien
aaaacttagctgggcatggtggcgc

SEQ ID NO: 5679878 - DNA, 25 bp, Homo sapien
aaacttagctgggcatggtggcgca

SEQ ID NO: 5679879 - DNA, 25 bp, Homo sapien
aacttagctgggcatggtggcgcat

SEQ ID NO: 5679880 - DNA, 25 bp, Homo sapien
caaaacttagctgggcatggtggcg

SEQ ID NO: 5679881 - DNA, 25 bp, Homo sapien
aattcacatacatgcttctgtgttc

SEQ ID NO: 5679882 - DNA, 25 bp, Homo sapien
aaaactgaattcacatacatgcttc

SEQ ID NO: 5679883 - DNA, 25 bp, Homo sapien
ttctgttgcgatatattgtctaggc

SEQ ID NO: 5679884 - DNA, 25 bp, Homo sapien
tgttcagttctgttgcgatatattg

SEQ ID NO: 5679885 - DNA, 25 bp, Homo sapien
ctgaattcacatacatgcttctgtg

SEQ ID NO: 5679886 - DNA, 25 bp, Homo sapien
cagttctgttgcgatatattgtcta

SEQ ID NO: 5679887 - DNA, 25 bp, Homo sapien
gaacacagaagcatgtatgtgaatt

SEQ ID NO: 5679888 - DNA, 25 bp, Homo sapien
gcctagacaatatatcgcaacagaa

SEQ ID NO: 5679889 - DNA, 25 bp, Homo sapien
tagacaatatatcgcaacagaactg

SEQ ID NO: 5679890 - DNA, 25 bp, Homo sapien
caatatatcgcaacagaactgaaca

SEQ ID NO: 5679891 - DNA, 25 bp, Homo sapien
cagaagcatgtatgtgaattcagtt

SEQ ID NO: 5679892 - DNA, 25 bp, Homo sapien
cacagaagcatgtatgtgaattcag

SEQ ID NO: 5679893 - DNA, 25 bp, Homo sapien
ttatacttttcggttgatggtcaat

SEQ ID NO: 5679894 - DNA, 25 bp, Homo sapien
catttatacttttcggttgatggtc

SEQ ID NO: 5679895 - DNA, 25 bp, Homo sapien
tggtcaatttattggtggttgtcct

SEQ ID NO: 5679896 - DNA, 25 bp, Homo sapien
tcctgagagtggtcatttatacttt

SEQ ID NO: 5679897 - DNA, 25 bp, Homo sapien
tgtcttagtgtattcatgcttgctt

SEQ ID NO: 5679898 - DNA, 25 bp, Homo sapien
tacttttcggttgatggtcaattta

SEQ ID NO: 5679899 - DNA, 25 bp, Homo sapien
tgaccatcaaccgaaaagtataaat

SEQ ID NO: 5679900 - DNA, 25 bp, Homo sapien
tcaaccgaaaagtataaatgaccac

SEQ ID NO: 5679901 - DNA, 25 bp, Homo sapien
aggacaaccaccaataaattgacca

SEQ ID NO: 5679902 - DNA, 25 bp, Homo sapien
taaattgaccatcaaccgaaaagta

SEQ ID NO: 5679903 - DNA, 25 bp, Homo sapien
aagcaagcatgaatacactaagaca

SEQ ID NO: 5679904 - DNA, 25 bp, Homo sapien
aagtataaatgaccactctcaggaa

SEQ ID NO: 5679905 - DNA, 25 bp, Homo sapien
tgggctacatagtgatatcctgttg

SEQ ID NO: 5679906 - DNA, 25 bp, Homo sapien
gggctacatagtgatatcctgttgc

SEQ ID NO: 5679907 - DNA, 25 bp, Homo sapien
ggctacatagtgatatcctgttgct

SEQ ID NO: 5679908 - DNA, 25 bp, Homo sapien
ctacatagtgatatcctgttgctac

SEQ ID NO: 5679909 - DNA, 25 bp, Homo sapien
gctacatagtgatatcctgttgcta

SEQ ID NO: 5679910 - DNA, 25 bp, Homo sapien
gcaacaggatatcactatgtagccc

SEQ ID NO: 5679911 - DNA, 25 bp, Homo sapien
gtagcaacaggatatcactatgtag

SEQ ID NO: 5679912 - DNA, 25 bp, Homo sapien
agcaacaggatatcactatgtagcc

SEQ ID NO: 5679913 - DNA, 25 bp, Homo sapien
caacaggatatcactatgtagccca

SEQ ID NO: 5679914 - DNA, 25 bp, Homo sapien
tagcaacaggatatcactatgtagc

SEQ ID NO: 5679915 - DNA, 25 bp, Homo sapien
ggccccaactcggatattacacaga

SEQ ID NO: 5679916 - DNA, 25 bp, Homo sapien
gccccaactcggatattacacagaa

SEQ ID NO: 5679917 - DNA, 25 bp, Homo sapien
ccccaactcggatattacacagaat

SEQ ID NO: 5679918 - DNA, 25 bp, Homo sapien
ccaactcggatattacacagaatca

SEQ ID NO: 5679919 - DNA, 25 bp, Homo sapien
acagtttaacaggatctccaggtta

SEQ ID NO: 5679920 - DNA, 25 bp, Homo sapien
gatctccaggttattcttatatata

SEQ ID NO: 5679921 - DNA, 25 bp, Homo sapien
gattctgtgtaatatccgagttggg

SEQ ID NO: 5679922 - DNA, 25 bp, Homo sapien
taacctggagatcctgttaaactgt

SEQ ID NO: 5679923 - DNA, 25 bp, Homo sapien
tatatataagaataacctggagatc

SEQ ID NO: 5679924 - DNA, 25 bp, Homo sapien
tgattctgtgtaatatccgagttgg

SEQ ID NO: 5679925 - DNA, 25 bp, Homo sapien
cacatgcgagaatgttgatagagca

SEQ ID NO: 5679926 - DNA, 25 bp, Homo sapien
ttagaagacacatgcgagaatgttg

SEQ ID NO: 5679927 - DNA, 25 bp, Homo sapien
gaatgttgatagagcattatttgta

SEQ ID NO: 5679928 - DNA, 25 bp, Homo sapien
gaagacacatgcgagaatgttgata

SEQ ID NO: 5679929 - DNA, 25 bp, Homo sapien
gcgagaatgttgatagagcattatt

SEQ ID NO: 5679930 - DNA, 25 bp, Homo sapien
catgcgagaatgttgatagagcatt

SEQ ID NO: 5679931 - DNA, 25 bp, Homo sapien
tacaaataatgctctatcaacattc

SEQ ID NO: 5679932 - DNA, 25 bp, Homo sapien
caacattctcgcatgtgtcttctaa

SEQ ID NO: 5679933 - DNA, 25 bp, Homo sapien
aataatgctctatcaacattctcgc

SEQ ID NO: 5679934 - DNA, 25 bp, Homo sapien
tatcaacattctcgcatgtgtcttc

SEQ ID NO: 5679935 - DNA, 25 bp, Homo sapien
tgctctatcaacattctcgcatgtg

SEQ ID NO: 5679936 - DNA, 25 bp, Homo sapien
aatgctctatcaacattctcgcatg

SEQ ID NO: 5679937 - DNA, 25 bp, Homo sapien
gcaaattaaatcacttcttaactag

SEQ ID NO: 5679938 - DNA, 25 bp, Homo sapien
ttaaatcacttcttaactagaatgg

SEQ ID NO: 5679939 - DNA, 25 bp, Homo sapien
cggtccctaatcattaatcaactat

SEQ ID NO: 5679940 - DNA, 25 bp, Homo sapien
accatgcccggtccctaatcattaa

SEQ ID NO: 5679941 - DNA, 25 bp, Homo sapien
catgcccggtccctaatcattaatc

SEQ ID NO: 5679942 - DNA, 25 bp, Homo sapien
tgcccggtccctaatcattaatcaa

SEQ ID NO: 5679943 - DNA, 25 bp, Homo sapien
tgattaatgattagggaccgggcat

SEQ ID NO: 5679944 - DNA, 25 bp, Homo sapien
ttaatgattagggaccgggcatggt

SEQ ID NO: 5679945 - DNA, 25 bp, Homo sapien
gattaatgattagggaccgggcatg

SEQ ID NO: 5679946 - DNA, 25 bp, Homo sapien
gttgattaatgattagggaccgggc

SEQ ID NO: 5679947 - DNA, 25 bp, Homo sapien
atagttgattaatgattagggaccg

SEQ ID NO: 5679948 - DNA, 25 bp, Homo sapien
ccattctagttaagaagtgatttaa

SEQ ID NO: 5679949 - DNA, 25 bp, Homo sapien
acttttataaagcagcgagaaaaag

SEQ ID NO: 5679950 - DNA, 25 bp, Homo sapien
gcacttatcataagtgccttatcac

SEQ ID NO: 5679951 - DNA, 25 bp, Homo sapien
ttgaataggcacttatcataagtgc

SEQ ID NO: 5679952 - DNA, 25 bp, Homo sapien
tgaataggcacttatcataagtgcc

SEQ ID NO: 5679953 - DNA, 25 bp, Homo sapien
tatcataagtgccttatcacttagc

SEQ ID NO: 5679954 - DNA, 25 bp, Homo sapien
cacttatcataagtgccttatcact

SEQ ID NO: 5679955 - DNA, 25 bp, Homo sapien
ctttttctcgctgctttataaaagt

SEQ ID NO: 5679956 - DNA, 25 bp, Homo sapien
gtgataaggcacttatgataagtgc

SEQ ID NO: 5679957 - DNA, 25 bp, Homo sapien
gctaagtgataaggcacttatgata

SEQ ID NO: 5679958 - DNA, 25 bp, Homo sapien
taagtgataaggcacttatgataag

SEQ ID NO: 5679959 - DNA, 25 bp, Homo sapien
agtgataaggcacttatgataagtg

SEQ ID NO: 5679960 - DNA, 25 bp, Homo sapien
gcacttatgataagtgcctattcaa

SEQ ID NO: 5679961 - DNA, 25 bp, Homo sapien
gttggtgctgctttaggttgttttc

SEQ ID NO: 5679962 - DNA, 25 bp, Homo sapien
tatgtggaactatatgttggtgctg

SEQ ID NO: 5679963 - DNA, 25 bp, Homo sapien
atgtggaactatatgttggtgctgc

SEQ ID NO: 5679964 - DNA, 25 bp, Homo sapien
gtggaactatatgttggtgctgctt

SEQ ID NO: 5679965 - DNA, 25 bp, Homo sapien
ggaactatatgttggtgctgcttta

SEQ ID NO: 5679966 - DNA, 25 bp, Homo sapien
catatgtggaactatatgttggtgc

SEQ ID NO: 5679967 - DNA, 25 bp, Homo sapien
aagcagcaccaacatatagttccac

SEQ ID NO: 5679968 - DNA, 25 bp, Homo sapien
gcaccaacatatagttccacatatg

SEQ ID NO: 5679969 - DNA, 25 bp, Homo sapien
gcagcaccaacatatagttccacat

SEQ ID NO: 5679970 - DNA, 25 bp, Homo sapien
gaaaacaacctaaagcagcaccaac

SEQ ID NO: 5679971 - DNA, 25 bp, Homo sapien
taaagcagcaccaacatatagttcc

SEQ ID NO: 5679972 - DNA, 25 bp, Homo sapien
caacatatagttccacatatgaaaa

SEQ ID NO: 5679973 - DNA, 25 bp, Homo sapien
gagaacgtcagtatcgctgatggtt

SEQ ID NO: 5679974 - DNA, 25 bp, Homo sapien
tctacacgtactagcactttggtgc

SEQ ID NO: 5679975 - DNA, 25 bp, Homo sapien
cagtatcgctgatggttctgtcccc

SEQ ID NO: 5679976 - DNA, 25 bp, Homo sapien
tgaaggaagagaacgtcagtatcgc

SEQ ID NO: 5679977 - DNA, 25 bp, Homo sapien
agcactttggtgcaattaaatatta

SEQ ID NO: 5679978 - DNA, 25 bp, Homo sapien
cacatccacatatctacacgtacta

SEQ ID NO: 5679979 - DNA, 25 bp, Homo sapien
gcaccaaagtgctagtacgtgtaga

SEQ ID NO: 5679980 - DNA, 25 bp, Homo sapien
taatatttaattgcaccaaagtgct

SEQ ID NO: 5679981 - DNA, 25 bp, Homo sapien
gaaccatcagcgatactgacgttct

SEQ ID NO: 5679982 - DNA, 25 bp, Homo sapien
gggacagaaccatcagcgatactga

SEQ ID NO: 5679983 - DNA, 25 bp, Homo sapien
tagtacgtgtagatatgtggatgtg

SEQ ID NO: 5679984 - DNA, 25 bp, Homo sapien
gcgatactgacgttctcttccttca

SEQ ID NO: 5679985 - DNA, 25 bp, Homo sapien
tttggctctattcccttccaagtct

SEQ ID NO: 5679986 - DNA, 25 bp, Homo sapien
taaattttggctctattcccttcca

SEQ ID NO: 5679987 - DNA, 25 bp, Homo sapien
gtttgtcactaggaaggtatatcaa

SEQ ID NO: 5679988 - DNA, 25 bp, Homo sapien
tgtcactaggaaggtatatcaaaat

SEQ ID NO: 5679989 - DNA, 25 bp, Homo sapien
tagtttgtcactaggaaggtatatc

SEQ ID NO: 5679990 - DNA, 25 bp, Homo sapien
tccaagtctaaattgctctgtaatc

SEQ ID NO: 5679991 - DNA, 25 bp, Homo sapien
gatataccttcctagtgacaaacta

SEQ ID NO: 5679992 - DNA, 25 bp, Homo sapien
attttgatataccttcctagtgaca

SEQ ID NO: 5679993 - DNA, 25 bp, Homo sapien
gattacagagcaatttagacttgga

SEQ ID NO: 5679994 - DNA, 25 bp, Homo sapien
ttgatataccttcctagtgacaaac

SEQ ID NO: 5679995 - DNA, 25 bp, Homo sapien
agacttggaagggaatagagccaaa

SEQ ID NO: 5679996 - DNA, 25 bp, Homo sapien
tggaagggaatagagccaaaattta

SEQ ID NO: 5679997 - DNA, 25 bp, Homo sapien
gagacagggtctcggtctcttaccc

SEQ ID NO: 5679998 - DNA, 25 bp, Homo sapien
cagggtctcggtctcttacccaggc

SEQ ID NO: 5679999 - DNA, 25 bp, Homo sapien
ggtctcggtctcttacccaggctgg

SEQ ID NO: 5680000 - DNA, 25 bp, Homo sapien
tgagacagggtctcggtctcttacc

SEQ ID NO: 5680001 - DNA, 25 bp, Homo sapien
acagggtctcggtctcttacccagg

SEQ ID NO: 5680002 - DNA, 25 bp, Homo sapien
agggtctcggtctcttacccaggct

SEQ ID NO: 5680003 - DNA, 25 bp, Homo sapien
gggtaagagaccgagaccctgtctc

SEQ ID NO: 5680004 - DNA, 25 bp, Homo sapien
ggtaagagaccgagaccctgtctca

SEQ ID NO: 5680005 - DNA, 25 bp, Homo sapien
gcctgggtaagagaccgagaccctg

SEQ ID NO: 5680006 - DNA, 25 bp, Homo sapien
cctgggtaagagaccgagaccctgt

SEQ ID NO: 5680007 - DNA, 25 bp, Homo sapien
ccagcctgggtaagagaccgagacc

SEQ ID NO: 5680008 - DNA, 25 bp, Homo sapien
agcctgggtaagagaccgagaccct

SEQ ID NO: 5680009 - DNA, 25 bp, Homo sapien
caagtggttggaattacaggtgctc

SEQ ID NO: 5680010 - DNA, 25 bp, Homo sapien
aggctcccaagtggttggaattaca

SEQ ID NO: 5680011 - DNA, 25 bp, Homo sapien
ggctcccaagtggttggaattacag

SEQ ID NO: 5680012 - DNA, 25 bp, Homo sapien
tcaggctcccaagtggttggaatta

SEQ ID NO: 5680013 - DNA, 25 bp, Homo sapien
ctcaggctcccaagtggttggaatt

SEQ ID NO: 5680014 - DNA, 25 bp, Homo sapien
caggctcccaagtggttggaattac

SEQ ID NO: 5680015 - DNA, 25 bp, Homo sapien
tgtaattccaaccacttgggagcct

SEQ ID NO: 5680016 - DNA, 25 bp, Homo sapien
ctgtaattccaaccacttgggagcc

SEQ ID NO: 5680017 - DNA, 25 bp, Homo sapien
aattccaaccacttgggagcctgag

SEQ ID NO: 5680018 - DNA, 25 bp, Homo sapien
gagcacctgtaattccaaccacttg

SEQ ID NO: 5680019 - DNA, 25 bp, Homo sapien
taattccaaccacttgggagcctga

SEQ ID NO: 5680020 - DNA, 25 bp, Homo sapien
gtaattccaaccacttgggagcctg

SEQ ID NO: 5680021 - DNA, 25 bp, Homo sapien
ttatgttgctgtaagatacttgcca

SEQ ID NO: 5680022 - DNA, 25 bp, Homo sapien
gatacttgccattgaaatgaactga

SEQ ID NO: 5680023 - DNA, 25 bp, Homo sapien
taagatacttgccattgaaatgaac

SEQ ID NO: 5680024 - DNA, 25 bp, Homo sapien
gccattgaaatgaactgatttaaaa

SEQ ID NO: 5680025 - DNA, 25 bp, Homo sapien
gctgtaagatacttgccattgaaat

SEQ ID NO: 5680026 - DNA, 25 bp, Homo sapien
gttgctgtaagatacttgccattga

SEQ ID NO: 5680027 - DNA, 25 bp, Homo sapien
tcaatggcaagtatcttacagcaac

SEQ ID NO: 5680028 - DNA, 25 bp, Homo sapien
taaatcagttcatttcaatggcaag

SEQ ID NO: 5680029 - DNA, 25 bp, Homo sapien
ggcaagtatcttacagcaacataat

SEQ ID NO: 5680030 - DNA, 25 bp, Homo sapien
tcatttcaatggcaagtatcttaca

SEQ ID NO: 5680031 - DNA, 25 bp, Homo sapien
ttttaaatcagttcatttcaatggc

SEQ ID NO: 5680032 - DNA, 25 bp, Homo sapien
tcagttcatttcaatggcaagtatc

SEQ ID NO: 5680033 - DNA, 25 bp, Homo sapien
cagtgatgtgatctcggctcaccgc

SEQ ID NO: 5680034 - DNA, 25 bp, Homo sapien
ggagtacagtgatgtgatctcggct

SEQ ID NO: 5680035 - DNA, 25 bp, Homo sapien
tacagtgatgtgatctcggctcacc

SEQ ID NO: 5680036 - DNA, 25 bp, Homo sapien
gagtacagtgatgtgatctcggctc

SEQ ID NO: 5680037 - DNA, 25 bp, Homo sapien
agtacagtgatgtgatctcggctca

SEQ ID NO: 5680038 - DNA, 25 bp, Homo sapien
acagtgatgtgatctcggctcaccg

SEQ ID NO: 5680039 - DNA, 25 bp, Homo sapien
tgagccgagatcacatcactgtact

SEQ ID NO: 5680040 - DNA, 25 bp, Homo sapien
ggtgagccgagatcacatcactgta

SEQ ID NO: 5680041 - DNA, 25 bp, Homo sapien
gagccgagatcacatcactgtactc

SEQ ID NO: 5680042 - DNA, 25 bp, Homo sapien
gcggtgagccgagatcacatcactg

SEQ ID NO: 5680043 - DNA, 25 bp, Homo sapien
agccgagatcacatcactgtactcc

SEQ ID NO: 5680044 - DNA, 25 bp, Homo sapien
cggtgagccgagatcacatcactgt

SEQ ID NO: 5680045 - DNA, 25 bp, Homo sapien
tgtataccagatgattctcagcatc

SEQ ID NO: 5680046 - DNA, 25 bp, Homo sapien
tactttagtgatgtataccagatga

SEQ ID NO: 5680047 - DNA, 25 bp, Homo sapien
tagtgatgtataccagatgattctc

SEQ ID NO: 5680048 - DNA, 25 bp, Homo sapien
gatgtataccagatgattctcagca

SEQ ID NO: 5680049 - DNA, 25 bp, Homo sapien
tatatactttagtgatgtataccag

SEQ ID NO: 5680050 - DNA, 25 bp, Homo sapien
tgatgtataccagatgattctcagc

SEQ ID NO: 5680051 - DNA, 25 bp, Homo sapien
gagaatcatctggtatacatcacta

SEQ ID NO: 5680052 - DNA, 25 bp, Homo sapien
ctgagaatcatctggtatacatcac

SEQ ID NO: 5680053 - DNA, 25 bp, Homo sapien
tcatctggtatacatcactaaagta

SEQ ID NO: 5680054 - DNA, 25 bp, Homo sapien
gatgctgagaatcatctggtataca

SEQ ID NO: 5680055 - DNA, 25 bp, Homo sapien
tgctgagaatcatctggtatacatc

SEQ ID NO: 5680056 - DNA, 25 bp, Homo sapien
gaatcatctggtatacatcactaaa

SEQ ID NO: 5680057 - DNA, 25 bp, Homo sapien
ccctttactctcaggctgctatgct

SEQ ID NO: 5680058 - DNA, 25 bp, Homo sapien
tatcttactttactgttaggctggc

SEQ ID NO: 5680059 - DNA, 25 bp, Homo sapien
tactttactgttaggctggcaacat

SEQ ID NO: 5680060 - DNA, 25 bp, Homo sapien
tttactctcaggctgctatgctttt

SEQ ID NO: 5680061 - DNA, 25 bp, Homo sapien
tcttactttactgttaggctggcaa

SEQ ID NO: 5680062 - DNA, 25 bp, Homo sapien
ttactgttaggctggcaacatttac

SEQ ID NO: 5680063 - DNA, 25 bp, Homo sapien
agcatagcagcctgagagtaaaggg

SEQ ID NO: 5680064 - DNA, 25 bp, Homo sapien
taacagtaaagtaagatagagggaa

SEQ ID NO: 5680065 - DNA, 25 bp, Homo sapien
ttgccagcctaacagtaaagtaaga

SEQ ID NO: 5680066 - DNA, 25 bp, Homo sapien
gccagcctaacagtaaagtaagata

SEQ ID NO: 5680067 - DNA, 25 bp, Homo sapien
gtaaatgttgccagcctaacagtaa

SEQ ID NO: 5680068 - DNA, 25 bp, Homo sapien
aaaagcatagcagcctgagagtaaa

SEQ ID NO: 5680069 - DNA, 25 bp, Homo sapien
agatacaaaacgatttggtataaag

SEQ ID NO: 5680070 - DNA, 25 bp, Homo sapien
ataaaggagtaaaatcttcattctg

SEQ ID NO: 5680071 - DNA, 25 bp, Homo sapien
ttggtataaaggagtaaaatcttca

SEQ ID NO: 5680072 - DNA, 25 bp, Homo sapien
tctgtgtgtaaaagaaatggaatat

SEQ ID NO: 5680073 - DNA, 25 bp, Homo sapien
gtataaaggagtaaaatcttcattc

SEQ ID NO: 5680074 - DNA, 25 bp, Homo sapien
cattctgtgtgtaaaagaaatggaa

SEQ ID NO: 5680075 - DNA, 25 bp, Homo sapien
gaatgaagattttactcctttatac

SEQ ID NO: 5680076 - DNA, 25 bp, Homo sapien
cagaatgaagattttactcctttat

SEQ ID NO: 5680077 - DNA, 25 bp, Homo sapien
ctttataccaaatcgttttgtatct

SEQ ID NO: 5680078 - DNA, 25 bp, Homo sapien
tgaagattttactcctttataccaa

SEQ ID NO: 5680079 - DNA, 25 bp, Homo sapien
ttccatttcttttacacacagaatg

SEQ ID NO: 5680080 - DNA, 25 bp, Homo sapien
atattccatttcttttacacacaga

SEQ ID NO: 5680081 - DNA, 25 bp, Homo sapien
aaccaaagttagcactcagaattaa

SEQ ID NO: 5680082 - DNA, 25 bp, Homo sapien
caaagttagcactcagaattaactt

SEQ ID NO: 5680083 - DNA, 25 bp, Homo sapien
ccaaagttagcactcagaattaact

SEQ ID NO: 5680084 - DNA, 25 bp, Homo sapien
aaaccaaagttagcactcagaatta

SEQ ID NO: 5680085 - DNA, 25 bp, Homo sapien
accaaagttagcactcagaattaac

SEQ ID NO: 5680086 - DNA, 25 bp, Homo sapien
ctcagaattaacttttgaatgtctg

SEQ ID NO: 5680087 - DNA, 25 bp, Homo sapien
cagacattcaaaagttaattctgag

SEQ ID NO: 5680088 - DNA, 25 bp, Homo sapien
gttaattctgagtgctaactttggt

SEQ ID NO: 5680089 - DNA, 25 bp, Homo sapien
agttaattctgagtgctaactttgg

SEQ ID NO: 5680090 - DNA, 25 bp, Homo sapien
ttaattctgagtgctaactttggtt

SEQ ID NO: 5680091 - DNA, 25 bp, Homo sapien
taattctgagtgctaactttggttt

SEQ ID NO: 5680092 - DNA, 25 bp, Homo sapien
aagttaattctgagtgctaactttg

SEQ ID NO: 5680093 - DNA, 25 bp, Homo sapien
gaatggtagatgcatacttaactag

SEQ ID NO: 5680094 - DNA, 25 bp, Homo sapien
gtagatgcatacttaactagaaatc

SEQ ID NO: 5680095 - DNA, 25 bp, Homo sapien
taaattttcattcggattgtgaact

SEQ ID NO: 5680096 - DNA, 25 bp, Homo sapien
taacaagttaagataatgagctttg

SEQ ID NO: 5680097 - DNA, 25 bp, Homo sapien
tcattcggattgtgaactctttgat

SEQ ID NO: 5680098 - DNA, 25 bp, Homo sapien
gatgaatggtagatgcatacttaac

SEQ ID NO: 5680099 - DNA, 25 bp, Homo sapien
taagtatgcatctaccattcatcaa

SEQ ID NO: 5680100 - DNA, 25 bp, Homo sapien
aaacaaagctcattatcttaacttg

SEQ ID NO: 5680101 - DNA, 25 bp, Homo sapien
gatttctagttaagtatgcatctac

SEQ ID NO: 5680102 - DNA, 25 bp, Homo sapien
atcaaagagttcacaatccgaatga

SEQ ID NO: 5680103 - DNA, 25 bp, Homo sapien
caaagctcattatcttaacttgtta

SEQ ID NO: 5680104 - DNA, 25 bp, Homo sapien
caaagagttcacaatccgaatgaaa

SEQ ID NO: 5680105 - DNA, 25 bp, Homo sapien
tgcctaattgggattccaagctgag

SEQ ID NO: 5680106 - DNA, 25 bp, Homo sapien
taagtgcctaattgggattccaagc

SEQ ID NO: 5680107 - DNA, 25 bp, Homo sapien
tgggattccaagctgagcttagtag

SEQ ID NO: 5680108 - DNA, 25 bp, Homo sapien
ctgagcttagtagtttgtggtggat

SEQ ID NO: 5680109 - DNA, 25 bp, Homo sapien
aattgggattccaagctgagcttag

SEQ ID NO: 5680110 - DNA, 25 bp, Homo sapien
ccaagctgagcttagtagtttgtgg

SEQ ID NO: 5680111 - DNA, 25 bp, Homo sapien
ccacaaactactaagctcagcttgg

SEQ ID NO: 5680112 - DNA, 25 bp, Homo sapien
gcttggaatcccaattaggcactta

SEQ ID NO: 5680113 - DNA, 25 bp, Homo sapien
tactaagctcagcttggaatcccaa

SEQ ID NO: 5680114 - DNA, 25 bp, Homo sapien
taagctcagcttggaatcccaatta

SEQ ID NO: 5680115 - DNA, 25 bp, Homo sapien
tcagcttggaatcccaattaggcac

SEQ ID NO: 5680116 - DNA, 25 bp, Homo sapien
atccaccacaaactactaagctcag

SEQ ID NO: 5680117 - DNA, 25 bp, Homo sapien
gcaggcaggttctgtagtttgtact

SEQ ID NO: 5680118 - DNA, 25 bp, Homo sapien
cgcaggcaggttctgtagtttgtac

SEQ ID NO: 5680119 - DNA, 25 bp, Homo sapien
gtacaaactacagaacctgcctgcg

SEQ ID NO: 5680120 - DNA, 25 bp, Homo sapien
agtacaaactacagaacctgcctgc

SEQ ID NO: 5680121 - DNA, 25 bp, Homo sapien
aatatcatggtatattgattttcct

SEQ ID NO: 5680122 - DNA, 25 bp, Homo sapien
tgaatgcaaggtgtacctaatatca

SEQ ID NO: 5680123 - DNA, 25 bp, Homo sapien
attgattttcctggttatctgtttc

SEQ ID NO: 5680124 - DNA, 25 bp, Homo sapien
gaatgcaaggtgtacctaatatcat

SEQ ID NO: 5680125 - DNA, 25 bp, Homo sapien
aatgcaaggtgtacctaatatcatg

SEQ ID NO: 5680126 - DNA, 25 bp, Homo sapien
atgcaaggtgtacctaatatcatgg

SEQ ID NO: 5680127 - DNA, 25 bp, Homo sapien
gaaacagataaccaggaaaatcaat

SEQ ID NO: 5680128 - DNA, 25 bp, Homo sapien
atgatattaggtacaccttgcattc

SEQ ID NO: 5680129 - DNA, 25 bp, Homo sapien
ccatgatattaggtacaccttgcat

SEQ ID NO: 5680130 - DNA, 25 bp, Homo sapien
catgatattaggtacaccttgcatt

SEQ ID NO: 5680131 - DNA, 25 bp, Homo sapien
aggaaaatcaatataccatgatatt

SEQ ID NO: 5680132 - DNA, 25 bp, Homo sapien
tgatattaggtacaccttgcattca

SEQ ID NO: 5680133 - DNA, 25 bp, Homo sapien
aattgggttggtgatggattgctaa

SEQ ID NO: 5680134 - DNA, 25 bp, Homo sapien
tcccctaagaattgggttggtgatg

SEQ ID NO: 5680135 - DNA, 25 bp, Homo sapien
tctgtactccgaagctttcttcagg

SEQ ID NO: 5680136 - DNA, 25 bp, Homo sapien
cagggagttggaagataataacatg

SEQ ID NO: 5680137 - DNA, 25 bp, Homo sapien
taaaagccaagttctctgtactccg

SEQ ID NO: 5680138 - DNA, 25 bp, Homo sapien
cgaagctttcttcagggagttggaa

SEQ ID NO: 5680139 - DNA, 25 bp, Homo sapien
catgttattatcttccaactccctg

SEQ ID NO: 5680140 - DNA, 25 bp, Homo sapien
ttttagcaatccatcaccaacccaa

SEQ ID NO: 5680141 - DNA, 25 bp, Homo sapien
tacagagaacttggcttttagcaat

SEQ ID NO: 5680142 - DNA, 25 bp, Homo sapien
agcttcggagtacagagaacttggc

SEQ ID NO: 5680143 - DNA, 25 bp, Homo sapien
atccatcaccaacccaattcttagg

SEQ ID NO: 5680144 - DNA, 25 bp, Homo sapien
caactccctgaagaaagcttcggag

SEQ ID NO: 5680145 - DNA, 25 bp, Homo sapien
cgtcaaatgctttcgcacctgacct

SEQ ID NO: 5680146 - DNA, 25 bp, Homo sapien
aacttgtccgtcaaatgctttcgca

SEQ ID NO: 5680147 - DNA, 25 bp, Homo sapien
caaatgctttcgcacctgaccttcg

SEQ ID NO: 5680148 - DNA, 25 bp, Homo sapien
aaatgctttcgcacctgaccttcgc

SEQ ID NO: 5680149 - DNA, 25 bp, Homo sapien
tgtccgtcaaatgctttcgcacctg

SEQ ID NO: 5680150 - DNA, 25 bp, Homo sapien
caaaacttgtccgtcaaatgctttc

SEQ ID NO: 5680151 - DNA, 25 bp, Homo sapien
tgcgaaagcatttgacggacaagtt

SEQ ID NO: 5680152 - DNA, 25 bp, Homo sapien
tcaggtgcgaaagcatttgacggac

SEQ ID NO: 5680153 - DNA, 25 bp, Homo sapien
aaggtcaggtgcgaaagcatttgac

SEQ ID NO: 5680154 - DNA, 25 bp, Homo sapien
ggtgcgaaagcatttgacggacaag

SEQ ID NO: 5680155 - DNA, 25 bp, Homo sapien
gcgaaggtcaggtgcgaaagcattt

SEQ ID NO: 5680156 - DNA, 25 bp, Homo sapien
gaaagcatttgacggacaagttttg

SEQ ID NO: 5680157 - DNA, 25 bp, Homo sapien
tcactgcttcggaactgctagggct

SEQ ID NO: 5680158 - DNA, 25 bp, Homo sapien
tcggaactgctagggcttgattaac

SEQ ID NO: 5680159 - DNA, 25 bp, Homo sapien
taatcactgcttcggaactgctagg

SEQ ID NO: 5680160 - DNA, 25 bp, Homo sapien
tgcttcggaactgctagggcttgat

SEQ ID NO: 5680161 - DNA, 25 bp, Homo sapien
gcttcggaactgctagggcttgatt

SEQ ID NO: 5680162 - DNA, 25 bp, Homo sapien
actgcttcggaactgctagggcttg

SEQ ID NO: 5680163 - DNA, 25 bp, Homo sapien
taatcaagccctagcagttccgaag

SEQ ID NO: 5680164 - DNA, 25 bp, Homo sapien
atcaagccctagcagttccgaagca

SEQ ID NO: 5680165 - DNA, 25 bp, Homo sapien
cctagcagttccgaagcagtgatta

SEQ ID NO: 5680166 - DNA, 25 bp, Homo sapien
gttaatcaagccctagcagttccga

SEQ ID NO: 5680167 - DNA, 25 bp, Homo sapien
gccctagcagttccgaagcagtgat

SEQ ID NO: 5680168 - DNA, 25 bp, Homo sapien
aagccctagcagttccgaagcagtg

SEQ ID NO: 5680169 - DNA, 25 bp, Homo sapien
gggaaatggagatgcgggccgtgag

SEQ ID NO: 5680170 - DNA, 25 bp, Homo sapien
ggagatgcgggccgtgaggctcggg

SEQ ID NO: 5680171 - DNA, 25 bp, Homo sapien
ggaaatggagatgcgggccgtgagg

SEQ ID NO: 5680172 - DNA, 25 bp, Homo sapien
tggagatgcgggccgtgaggctcgg

SEQ ID NO: 5680173 - DNA, 25 bp, Homo sapien
aatggagatgcgggccgtgaggctc

SEQ ID NO: 5680174 - DNA, 25 bp, Homo sapien
aaatggagatgcgggccgtgaggct

SEQ ID NO: 5680175 - DNA, 25 bp, Homo sapien
cgcatctccatttccccgcctgccc

SEQ ID NO: 5680176 - DNA, 25 bp, Homo sapien
ccccgagcctcacggcccgcatctc

SEQ ID NO: 5680177 - DNA, 25 bp, Homo sapien
agcctcacggcccgcatctccattt

SEQ ID NO: 5680178 - DNA, 25 bp, Homo sapien
acggcccgcatctccatttccccgc

SEQ ID NO: 5680179 - DNA, 25 bp, Homo sapien
ctcacggcccgcatctccatttccc

SEQ ID NO: 5680180 - DNA, 25 bp, Homo sapien
ggcccgcatctccatttccccgcct

SEQ ID NO: 5680181 - DNA, 25 bp, Homo sapien
gacgggagtcgtggctaggggcgcg

SEQ ID NO: 5680182 - DNA, 25 bp, Homo sapien
gggtctcgttctgccgtcagccgta

SEQ ID NO: 5680183 - DNA, 25 bp, Homo sapien
agctcctcgggggtctcgttctgcc

SEQ ID NO: 5680184 - DNA, 25 bp, Homo sapien
tgccgtcagccgtagttttcgggac

SEQ ID NO: 5680185 - DNA, 25 bp, Homo sapien
gttctgccgtcagccgtagttttcg

SEQ ID NO: 5680186 - DNA, 25 bp, Homo sapien
tctcgttctgccgtcagccgtagtt

SEQ ID NO: 5680187 - DNA, 25 bp, Homo sapien
cgaaaactacggctgacggcagaac

SEQ ID NO: 5680188 - DNA, 25 bp, Homo sapien
gtcccgaaaactacggctgacggca

SEQ ID NO: 5680189 - DNA, 25 bp, Homo sapien
gaaaactacggctgacggcagaacg

SEQ ID NO: 5680190 - DNA, 25 bp, Homo sapien
tcccgaaaactacggctgacggcag

SEQ ID NO: 5680191 - DNA, 25 bp, Homo sapien
aactacggctgacggcagaacgaga

SEQ ID NO: 5680192 - DNA, 25 bp, Homo sapien
ggcagaacgagacccccgaggagct

SEQ ID NO: 5680193 - DNA, 25 bp, Homo sapien
gaagtcagccgtgagaccgggccta

SEQ ID NO: 5680194 - DNA, 25 bp, Homo sapien
gtcagccgtgagaccgggcctagtc

SEQ ID NO: 5680195 - DNA, 25 bp, Homo sapien
tgagaccgggcctagtcctgcccga

SEQ ID NO: 5680196 - DNA, 25 bp, Homo sapien
ctcggcttctgcattggggcggccc

SEQ ID NO: 5680197 - DNA, 25 bp, Homo sapien
acgcagcggcttcggaccctgcccc

SEQ ID NO: 5680198 - DNA, 25 bp, Homo sapien
ccccgggaagtcagccgtgagaccg

SEQ ID NO: 5680199 - DNA, 25 bp, Homo sapien
actaggcccggtctcacggctgact

SEQ ID NO: 5680200 - DNA, 25 bp, Homo sapien
gggccgccccaatgcagaagccgag

SEQ ID NO: 5680201 - DNA, 25 bp, Homo sapien
tcgggcaggactaggcccggtctca

SEQ ID NO: 5680202 - DNA, 25 bp, Homo sapien
ggggcagggtccgaagccgctgcgt

SEQ ID NO: 5680203 - DNA, 25 bp, Homo sapien
ggactaggcccggtctcacggctga

SEQ ID NO: 5680204 - DNA, 25 bp, Homo sapien
taggcccggtctcacggctgacttc

SEQ ID NO: 5680205 - DNA, 25 bp, Homo sapien
ggacccggacagtgccggagccttc

SEQ ID NO: 5680206 - DNA, 25 bp, Homo sapien
acccggacagtgccggagccttcgg

SEQ ID NO: 5680207 - DNA, 25 bp, Homo sapien
gcggtgccgcgtagcctgaggcgga

SEQ ID NO: 5680208 - DNA, 25 bp, Homo sapien
cggacccggacagtgccggagcctt

SEQ ID NO: 5680209 - DNA, 25 bp, Homo sapien
tgccgcgtagcctgaggcggaggtt

SEQ ID NO: 5680210 - DNA, 25 bp, Homo sapien
gacccggacagtgccggagccttcg

SEQ ID NO: 5680211 - DNA, 25 bp, Homo sapien
gaaggctccggcactgtccgggtcc

SEQ ID NO: 5680212 - DNA, 25 bp, Homo sapien
aacctccgcctcaggctacgcggca

SEQ ID NO: 5680213 - DNA, 25 bp, Homo sapien
cgaaggctccggcactgtccgggtc

SEQ ID NO: 5680214 - DNA, 25 bp, Homo sapien
aaggctccggcactgtccgggtccg

SEQ ID NO: 5680215 - DNA, 25 bp, Homo sapien
cgcctcaggctacgcggcaccgcgg

SEQ ID NO: 5680216 - DNA, 25 bp, Homo sapien
ccgaaggctccggcactgtccgggt

SEQ ID NO: 5680217 - DNA, 25 bp, Homo sapien
gcacgcgcgggcttctgggaggcga

SEQ ID NO: 5680218 - DNA, 25 bp, Homo sapien
gggcttctgggaggcgacggccggc

SEQ ID NO: 5680219 - DNA, 25 bp, Homo sapien
cctcggctggcacgcgcgggcttct

SEQ ID NO: 5680220 - DNA, 25 bp, Homo sapien
ttctgggaggcgacggccggcaccg

SEQ ID NO: 5680221 - DNA, 25 bp, Homo sapien
gccgcgccgagaaactcctccctcg

SEQ ID NO: 5680222 - DNA, 25 bp, Homo sapien
gcgcgggcttctgggaggcgacggc

SEQ ID NO: 5680223 - DNA, 25 bp, Homo sapien
gagggaggagtttctcggcgcggcc

SEQ ID NO: 5680224 - DNA, 25 bp, Homo sapien
gtcgcctcccagaagcccgcgcgtg

SEQ ID NO: 5680225 - DNA, 25 bp, Homo sapien
agaagcccgcgcgtgccagccgagg

SEQ ID NO: 5680226 - DNA, 25 bp, Homo sapien
gcggtgccggccgtcgcctcccaga

SEQ ID NO: 5680227 - DNA, 25 bp, Homo sapien
ggtgccggccgtcgcctcccagaag

SEQ ID NO: 5680228 - DNA, 25 bp, Homo sapien
cgagggaggagtttctcggcgcggc

SEQ ID NO: 5680229 - DNA, 25 bp, Homo sapien
gcacgcgcgggcttctgggaggcga

SEQ ID NO: 5680230 - DNA, 25 bp, Homo sapien
gcgggcttctgggaggcgacggccg

SEQ ID NO: 5680231 - DNA, 25 bp, Homo sapien
cctcggctggcacgcgcgggcttct

SEQ ID NO: 5680232 - DNA, 25 bp, Homo sapien
ttctgggaggcgacggccggcaccg

SEQ ID NO: 5680233 - DNA, 25 bp, Homo sapien
gccgcgccgagaaactcctccctcg

SEQ ID NO: 5680234 - DNA, 25 bp, Homo sapien
cgagaaactcctccctcggctggca

SEQ ID NO: 5680235 - DNA, 25 bp, Homo sapien
gagggaggagtttctcggcgcggcc

SEQ ID NO: 5680236 - DNA, 25 bp, Homo sapien
gtcgcctcccagaagcccgcgcgtg

SEQ ID NO: 5680237 - DNA, 25 bp, Homo sapien
agaagcccgcgcgtgccagccgagg

SEQ ID NO: 5680238 - DNA, 25 bp, Homo sapien
cgtgccagccgagggaggagtttct

SEQ ID NO: 5680239 - DNA, 25 bp, Homo sapien
ggtgccggccgtcgcctcccagaag

SEQ ID NO: 5680240 - DNA, 25 bp, Homo sapien
aggtcctggcggtgccggccgtcgc

SEQ ID NO: 5680241 - DNA, 25 bp, Homo sapien
ctgttctttacacctggttcactgc

SEQ ID NO: 5680242 - DNA, 25 bp, Homo sapien
ccggaagccccaaaatgaggaacag

SEQ ID NO: 5680243 - DNA, 25 bp, Homo sapien
gttcactgcccatattcagtcttca

SEQ ID NO: 5680244 - DNA, 25 bp, Homo sapien
tggttcactgcccatattcagtctt

SEQ ID NO: 5680245 - DNA, 25 bp, Homo sapien
cacctggttcactgcccatattcag

SEQ ID NO: 5680246 - DNA, 25 bp, Homo sapien
ggaagccccaaaatgaggaacagag

SEQ ID NO: 5680247 - DNA, 25 bp, Homo sapien
tgaagactgaatatgggcagtgaac

SEQ ID NO: 5680248 - DNA, 25 bp, Homo sapien
actgaatatgggcagtgaaccaggt

SEQ ID NO: 5680249 - DNA, 25 bp, Homo sapien
aagactgaatatgggcagtgaacca

SEQ ID NO: 5680250 - DNA, 25 bp, Homo sapien
ctgaatatgggcagtgaaccaggtg

SEQ ID NO: 5680251 - DNA, 25 bp, Homo sapien
ctgttcctcattttggggcttccgg

SEQ ID NO: 5680252 - DNA, 25 bp, Homo sapien
gcagtgaaccaggtgtaaagaacag

SEQ ID NO: 5680253 - DNA, 25 bp, Homo sapien
tacttaacgactaacccgattgtca

SEQ ID NO: 5680254 - DNA, 25 bp, Homo sapien
agctactgtttattgttcccttgca

SEQ ID NO: 5680255 - DNA, 25 bp, Homo sapien
tactgtttattgttcccttgcatac

SEQ ID NO: 5680256 - DNA, 25 bp, Homo sapien
tgcctcagccagttaggctcctcct

SEQ ID NO: 5680257 - DNA, 25 bp, Homo sapien
cttaacgactaacccgattgtcata

SEQ ID NO: 5680258 - DNA, 25 bp, Homo sapien
acgactaacccgattgtcataaaat

SEQ ID NO: 5680259 - DNA, 25 bp, Homo sapien
attttatgacaatcgggttagtcgt

SEQ ID NO: 5680260 - DNA, 25 bp, Homo sapien
gtatgcaagggaacaataaacagta

SEQ ID NO: 5680261 - DNA, 25 bp, Homo sapien
tgacaatcgggttagtcgttaagta

SEQ ID NO: 5680262 - DNA, 25 bp, Homo sapien
tatgacaatcgggttagtcgttaag

SEQ ID NO: 5680263 - DNA, 25 bp, Homo sapien
tgcaagggaacaataaacagtagct

SEQ ID NO: 5680264 - DNA, 25 bp, Homo sapien
aggaggagcctaactggctgaggca

SEQ ID NO: 5680265 - DNA, 25 bp, Homo sapien
cagtacctgacgcatcataagcctt

SEQ ID NO: 5680266 - DNA, 25 bp, Homo sapien
cacattttgataggaaatcactacc

SEQ ID NO: 5680267 - DNA, 25 bp, Homo sapien
aatgaatgaactggcgaggcatcac

SEQ ID NO: 5680268 - DNA, 25 bp, Homo sapien
gacgcatcataagccttcagggaaa

SEQ ID NO: 5680269 - DNA, 25 bp, Homo sapien
cagtttcagtacctgacgcatcata

SEQ ID NO: 5680270 - DNA, 25 bp, Homo sapien
gaactggcgaggcatcacattttga

SEQ ID NO: 5680271 - DNA, 25 bp, Homo sapien
tttccctgaaggcttatgatgcgtc

SEQ ID NO: 5680272 - DNA, 25 bp, Homo sapien
tcaaaatgtgatgcctcgccagttc

SEQ ID NO: 5680273 - DNA, 25 bp, Homo sapien
tatgatgcgtcaggtactgaaactg

SEQ ID NO: 5680274 - DNA, 25 bp, Homo sapien
ggtagtgatttcctatcaaaatgtg

SEQ ID NO: 5680275 - DNA, 25 bp, Homo sapien
gtgatgcctcgccagttcattcatt

SEQ ID NO: 5680276 - DNA, 25 bp, Homo sapien
tgaaggcttatgatgcgtcaggtac

SEQ ID NO: 5680277 - DNA, 25 bp, Homo sapien
tctgacatgaatgttgttcattcat

SEQ ID NO: 5680278 - DNA, 25 bp, Homo sapien
atgaatgaacaacattcatgtcaga

SEQ ID NO: 5680279 - DNA, 25 bp, Homo sapien
tctgacatgaatgttgttcattcat

SEQ ID NO: 5680280 - DNA, 25 bp, Homo sapien
catatctcttttctctttaggaaaa

SEQ ID NO: 5680281 - DNA, 25 bp, Homo sapien
catgaatgttgttcattcatatctc

SEQ ID NO: 5680282 - DNA, 25 bp, Homo sapien
taaggaaacagttattctgacatga

SEQ ID NO: 5680283 - DNA, 25 bp, Homo sapien
cattcatatctcttttctctttagg

SEQ ID NO: 5680284 - DNA, 25 bp, Homo sapien
gttattctgacatgaatgttgttca

SEQ ID NO: 5680285 - DNA, 25 bp, Homo sapien
catgtcagaataactgtttccttat

SEQ ID NO: 5680286 - DNA, 25 bp, Homo sapien
cctaaagagaaaagagatatgaatg

SEQ ID NO: 5680287 - DNA, 25 bp, Homo sapien
ttttcctaaagagaaaagagatatg

SEQ ID NO: 5680288 - DNA, 25 bp, Homo sapien
gagaaaagagatatgaatgaacaac

SEQ ID NO: 5680289 - DNA, 25 bp, Homo sapien
gaacaacattcatgtcagaataact

SEQ ID NO: 5680290 - DNA, 25 bp, Homo sapien
atgaatgaacaacattcatgtcaga

SEQ ID NO: 5680291 - DNA, 25 bp, Homo sapien
tggtattgcaacaaagtccatcaaa

SEQ ID NO: 5680292 - DNA, 25 bp, Homo sapien
ccttttattataacttggtattgca

SEQ ID NO: 5680293 - DNA, 25 bp, Homo sapien
tagtagtcgatctgtctgtgtgttc

SEQ ID NO: 5680294 - DNA, 25 bp, Homo sapien
gtgctgttagtagtcgatctgtctg

SEQ ID NO: 5680295 - DNA, 25 bp, Homo sapien
gtagtcgatctgtctgtgtgttcct

SEQ ID NO: 5680296 - DNA, 25 bp, Homo sapien
taacttggtattgcaacaaagtcca

SEQ ID NO: 5680297 - DNA, 25 bp, Homo sapien
cacagacagatcgactactaacagc

SEQ ID NO: 5680298 - DNA, 25 bp, Homo sapien
cagacagatcgactactaacagcac

SEQ ID NO: 5680299 - DNA, 25 bp, Homo sapien
ggaacacacagacagatcgactact

SEQ ID NO: 5680300 - DNA, 25 bp, Homo sapien
gatggactttgttgcaataccaagt

SEQ ID NO: 5680301 - DNA, 25 bp, Homo sapien
tttgatggactttgttgcaatacca

SEQ ID NO: 5680302 - DNA, 25 bp, Homo sapien
tgcaataccaagttataataaaagg

SEQ ID NO: 5680303 - DNA, 25 bp, Homo sapien
gtatgcaagacacccttttacatgt

SEQ ID NO: 5680304 - DNA, 25 bp, Homo sapien
tttggtcagtatgcaagacaccctt

SEQ ID NO: 5680305 - DNA, 25 bp, Homo sapien
tacatgtctaggaaaactttagggc

SEQ ID NO: 5680306 - DNA, 25 bp, Homo sapien
ggtcagtatgcaagacaccctttta

SEQ ID NO: 5680307 - DNA, 25 bp, Homo sapien
tcagtatgcaagacacccttttaca

SEQ ID NO: 5680308 - DNA, 25 bp, Homo sapien
catgtctaggaaaactttagggcta

SEQ ID NO: 5680309 - DNA, 25 bp, Homo sapien
gccctaaagttttcctagacatgta

SEQ ID NO: 5680310 - DNA, 25 bp, Homo sapien
acatgtaaaagggtgtcttgcatac

SEQ ID NO: 5680311 - DNA, 25 bp, Homo sapien
aagggtgtcttgcatactgaccaaa

SEQ ID NO: 5680312 - DNA, 25 bp, Homo sapien
tgtaaaagggtgtcttgcatactga

SEQ ID NO: 5680313 - DNA, 25 bp, Homo sapien
taaaagggtgtcttgcatactgacc

SEQ ID NO: 5680314 - DNA, 25 bp, Homo sapien
tagccctaaagttttcctagacatg

SEQ ID NO: 5680315 - DNA, 25 bp, Homo sapien
cacaaaatctctggatgtggtggtg

SEQ ID NO: 5680316 - DNA, 25 bp, Homo sapien
tcaaaaacacaaaatctctggatgt

SEQ ID NO: 5680317 - DNA, 25 bp, Homo sapien
atcaaaaacacaaaatctctggatg

SEQ ID NO: 5680318 - DNA, 25 bp, Homo sapien
atctctatcaaaaacacaaaatctc

SEQ ID NO: 5680319 - DNA, 25 bp, Homo sapien
tctatcaaaaacacaaaatctctgg

SEQ ID NO: 5680320 - DNA, 25 bp, Homo sapien
ctatcaaaaacacaaaatctctgga

SEQ ID NO: 5680321 - DNA, 25 bp, Homo sapien
catccagagattttgtgtttttgat

SEQ ID NO: 5680322 - DNA, 25 bp, Homo sapien
cagagattttgtgtttttgatagag

SEQ ID NO: 5680323 - DNA, 25 bp, Homo sapien
caccaccacatccagagattttgtg

SEQ ID NO: 5680324 - DNA, 25 bp, Homo sapien
ccagagattttgtgtttttgataga

SEQ ID NO: 5680325 - DNA, 25 bp, Homo sapien
gagattttgtgtttttgatagagat

SEQ ID NO: 5680326 - DNA, 25 bp, Homo sapien
tccagagattttgtgtttttgatag

SEQ ID NO: 5680327 - DNA, 25 bp, Homo sapien
tgtaatactagctactcaggaggca

SEQ ID NO: 5680328 - DNA, 25 bp, Homo sapien
aatactagctactcaggaggcagac

SEQ ID NO: 5680329 - DNA, 25 bp, Homo sapien
tagctactcaggaggcagacgcagg

SEQ ID NO: 5680330 - DNA, 25 bp, Homo sapien
gtaatactagctactcaggaggcag

SEQ ID NO: 5680331 - DNA, 25 bp, Homo sapien
taatactagctactcaggaggcaga

SEQ ID NO: 5680332 - DNA, 25 bp, Homo sapien
tactagctactcaggaggcagacgc

SEQ ID NO: 5680333 - DNA, 25 bp, Homo sapien
tgcctcctgagtagctagtattaca

SEQ ID NO: 5680334 - DNA, 25 bp, Homo sapien
cctgcgtctgcctcctgagtagcta

SEQ ID NO: 5680335 - DNA, 25 bp, Homo sapien
gtctgcctcctgagtagctagtatt

SEQ ID NO: 5680336 - DNA, 25 bp, Homo sapien
tgcgtctgcctcctgagtagctagt

SEQ ID NO: 5680337 - DNA, 25 bp, Homo sapien
tctgcctcctgagtagctagtatta

SEQ ID NO: 5680338 - DNA, 25 bp, Homo sapien
ctgcctcctgagtagctagtattac

SEQ ID NO: 5680339 - DNA, 25 bp, Homo sapien
attggcgtggtggcgggggcctgta

SEQ ID NO: 5680340 - DNA, 25 bp, Homo sapien
aaattggcgtggtggcgggggcctg

SEQ ID NO: 5680341 - DNA, 25 bp, Homo sapien
aattggcgtggtggcgggggcctgt

SEQ ID NO: 5680342 - DNA, 25 bp, Homo sapien
tacaggcccccgccaccacgccaat

SEQ ID NO: 5680343 - DNA, 25 bp, Homo sapien
caggcccccgccaccacgccaattt

SEQ ID NO: 5680344 - DNA, 25 bp, Homo sapien
acaggcccccgccaccacgccaatt

SEQ ID NO: 5680345 - DNA, 25 bp, Homo sapien
cgcctgtagtctcagttatttggga

SEQ ID NO: 5680346 - DNA, 25 bp, Homo sapien
gcctgtagtctcagttatttgggag

SEQ ID NO: 5680347 - DNA, 25 bp, Homo sapien
ggtggttcgcgcctgtagtctcagt

SEQ ID NO: 5680348 - DNA, 25 bp, Homo sapien
gtggttcgcgcctgtagtctcagtt

SEQ ID NO: 5680349 - DNA, 25 bp, Homo sapien
aaaattagccaggcgtggtggttcg

SEQ ID NO: 5680350 - DNA, 25 bp, Homo sapien
tggttcgcgcctgtagtctcagtta

SEQ ID NO: 5680351 - DNA, 25 bp, Homo sapien
taactgagactacaggcgcgaacca

SEQ ID NO: 5680352 - DNA, 25 bp, Homo sapien
ctcccaaataactgagactacaggc

SEQ ID NO: 5680353 - DNA, 25 bp, Homo sapien
actgagactacaggcgcgaaccacc

SEQ ID NO: 5680354 - DNA, 25 bp, Homo sapien
tcccaaataactgagactacaggcg

SEQ ID NO: 5680355 - DNA, 25 bp, Homo sapien
aactgagactacaggcgcgaaccac

SEQ ID NO: 5680356 - DNA, 25 bp, Homo sapien
cgaaccaccacgcctggctaatttt

SEQ ID NO: 5680357 - DNA, 25 bp, Homo sapien
gtgccactgctctctggcctggcag

SEQ ID NO: 5680358 - DNA, 25 bp, Homo sapien
gctctctggcctggcagcagagcga

SEQ ID NO: 5680359 - DNA, 25 bp, Homo sapien
tctctggcctggcagcagagcgaga

SEQ ID NO: 5680360 - DNA, 25 bp, Homo sapien
tgctctctggcctggcagcagagcg

SEQ ID NO: 5680361 - DNA, 25 bp, Homo sapien
cactgctctctggcctggcagcaga

SEQ ID NO: 5680362 - DNA, 25 bp, Homo sapien
ccactgctctctggcctggcagcag

SEQ ID NO: 5680363 - DNA, 25 bp, Homo sapien
ctgctgccaggccagagagcagtgg

SEQ ID NO: 5680364 - DNA, 25 bp, Homo sapien
cgctctgctgccaggccagagagca

SEQ ID NO: 5680365 - DNA, 25 bp, Homo sapien
tctcgctctgctgccaggccagaga

SEQ ID NO: 5680366 - DNA, 25 bp, Homo sapien
tcgctctgctgccaggccagagagc

SEQ ID NO: 5680367 - DNA, 25 bp, Homo sapien
ctgccaggccagagagcagtggcac

SEQ ID NO: 5680368 - DNA, 25 bp, Homo sapien
tctgctgccaggccagagagcagtg

SEQ ID NO: 5680369 - DNA, 25 bp, Homo sapien
atttaatttatctccccaggctgga

SEQ ID NO: 5680370 - DNA, 25 bp, Homo sapien
tgtcatttaatttatctccccaggc

SEQ ID NO: 5680371 - DNA, 25 bp, Homo sapien
tttatctccccaggctggacatggt

SEQ ID NO: 5680372 - DNA, 25 bp, Homo sapien
aatttatctccccaggctggacatg

SEQ ID NO: 5680373 - DNA, 25 bp, Homo sapien
catttaatttatctccccaggctgg

SEQ ID NO: 5680374 - DNA, 25 bp, Homo sapien
tttaatttatctccccaggctggac

SEQ ID NO: 5680375 - DNA, 25 bp, Homo sapien
catgtccagcctggggagataaatt

SEQ ID NO: 5680376 - DNA, 25 bp, Homo sapien
tccagcctggggagataaattaaat

SEQ ID NO: 5680377 - DNA, 25 bp, Homo sapien
accatgtccagcctggggagataaa

SEQ ID NO: 5680378 - DNA, 25 bp, Homo sapien
cagcctggggagataaattaaatga

SEQ ID NO: 5680379 - DNA, 25 bp, Homo sapien
gtccagcctggggagataaattaaa

SEQ ID NO: 5680380 - DNA, 25 bp, Homo sapien
gcctggggagataaattaaatgaca

SEQ ID NO: 5680381 - DNA, 25 bp, Homo sapien
gaggttgcagagaggggagattgcg

SEQ ID NO: 5680382 - DNA, 25 bp, Homo sapien
ttgcagagaggggagattgcgccac

SEQ ID NO: 5680383 - DNA, 25 bp, Homo sapien
gttgcagagaggggagattgcgcca

SEQ ID NO: 5680384 - DNA, 25 bp, Homo sapien
tgcagagaggggagattgcgccact

SEQ ID NO: 5680385 - DNA, 25 bp, Homo sapien
agaggttgcagagaggggagattgc

SEQ ID NO: 5680386 - DNA, 25 bp, Homo sapien
aggttgcagagaggggagattgcgc

SEQ ID NO: 5680387 - DNA, 25 bp, Homo sapien
cgcaatctcccctctctgcaacctc

SEQ ID NO: 5680388 - DNA, 25 bp, Homo sapien
tggcgcaatctcccctctctgcaac

SEQ ID NO: 5680389 - DNA, 25 bp, Homo sapien
gcaatctcccctctctgcaacctct

SEQ ID NO: 5680390 - DNA, 25 bp, Homo sapien
gtggcgcaatctcccctctctgcaa

SEQ ID NO: 5680391 - DNA, 25 bp, Homo sapien
agtggcgcaatctcccctctctgca

SEQ ID NO: 5680392 - DNA, 25 bp, Homo sapien
gcgcaatctcccctctctgcaacct

SEQ ID NO: 5680393 - DNA, 25 bp, Homo sapien
gcctcagcctcatgagtagctggga

SEQ ID NO: 5680394 - DNA, 25 bp, Homo sapien
ttctctgcctcagcctcatgagtag

SEQ ID NO: 5680395 - DNA, 25 bp, Homo sapien
ttacaggtgcctgccaccacgcctg

SEQ ID NO: 5680396 - DNA, 25 bp, Homo sapien
attctctgcctcagcctcatgagta

SEQ ID NO: 5680397 - DNA, 25 bp, Homo sapien
aattctctgcctcagcctcatgagt

SEQ ID NO: 5680398 - DNA, 25 bp, Homo sapien
tctctgcctcagcctcatgagtagc

SEQ ID NO: 5680399 - DNA, 25 bp, Homo sapien
tcccagctactcatgaggctgaggc

SEQ ID NO: 5680400 - DNA, 25 bp, Homo sapien
ctactcatgaggctgaggcagagaa

SEQ ID NO: 5680401 - DNA, 25 bp, Homo sapien
caggcgtggtggcaggcacctgtaa

SEQ ID NO: 5680402 - DNA, 25 bp, Homo sapien
gctactcatgaggctgaggcagaga

SEQ ID NO: 5680403 - DNA, 25 bp, Homo sapien
actcatgaggctgaggcagagaatt

SEQ ID NO: 5680404 - DNA, 25 bp, Homo sapien
tactcatgaggctgaggcagagaat

SEQ ID NO: 5680405 - DNA, 25 bp, Homo sapien
tttagacgaagtctcgcccttgtcg

SEQ ID NO: 5680406 - DNA, 25 bp, Homo sapien
ttagacgaagtctcgcccttgtcgc

SEQ ID NO: 5680407 - DNA, 25 bp, Homo sapien
tagacgaagtctcgcccttgtcgcc

SEQ ID NO: 5680408 - DNA, 25 bp, Homo sapien
cgacaagggcgagacttcgtctaaa

SEQ ID NO: 5680409 - DNA, 25 bp, Homo sapien
ggcgacaagggcgagacttcgtcta

SEQ ID NO: 5680410 - DNA, 25 bp, Homo sapien
gcgacaagggcgagacttcgtctaa

SEQ ID NO: 5680411 - DNA, 25 bp, Homo sapien
acgaagtctcgcccttgtcgcccag

SEQ ID NO: 5680412 - DNA, 25 bp, Homo sapien
gacgaagtctcgcccttgtcgccca

SEQ ID NO: 5680413 - DNA, 25 bp, Homo sapien
tttagacgaagtctcgcccttgtcg

SEQ ID NO: 5680414 - DNA, 25 bp, Homo sapien
ttagacgaagtctcgcccttgtcgc

SEQ ID NO: 5680415 - DNA, 25 bp, Homo sapien
agacgaagtctcgcccttgtcgccc

SEQ ID NO: 5680416 - DNA, 25 bp, Homo sapien
tagacgaagtctcgcccttgtcgcc

SEQ ID NO: 5680417 - DNA, 25 bp, Homo sapien
tgggcgacaagggcgagacttcgtc

SEQ ID NO: 5680418 - DNA, 25 bp, Homo sapien
cgacaagggcgagacttcgtctaaa

SEQ ID NO: 5680419 - DNA, 25 bp, Homo sapien
cctgggcgacaagggcgagacttcg

SEQ ID NO: 5680420 - DNA, 25 bp, Homo sapien
ggcgacaagggcgagacttcgtcta

SEQ ID NO: 5680421 - DNA, 25 bp, Homo sapien
ctgggcgacaagggcgagacttcgt

SEQ ID NO: 5680422 - DNA, 25 bp, Homo sapien
gcgacaagggcgagacttcgtctaa

SEQ ID NO: 5680423 - DNA, 25 bp, Homo sapien
gtatagacggcgtttcaccatcttg

SEQ ID NO: 5680424 - DNA, 25 bp, Homo sapien
ttacaggcacctgccaccacgcccg

SEQ ID NO: 5680425 - DNA, 25 bp, Homo sapien
tagtatagacggcgtttcaccatct

SEQ ID NO: 5680426 - DNA, 25 bp, Homo sapien
acaggcacctgccaccacgcccggc

SEQ ID NO: 5680427 - DNA, 25 bp, Homo sapien
agtatagacggcgtttcaccatctt

SEQ ID NO: 5680428 - DNA, 25 bp, Homo sapien
ttagtatagacggcgtttcaccatc

SEQ ID NO: 5680429 - DNA, 25 bp, Homo sapien
cgggcgtggtggcaggtgcctgtaa

SEQ ID NO: 5680430 - DNA, 25 bp, Homo sapien
agatggtgaaacgccgtctatacta

SEQ ID NO: 5680431 - DNA, 25 bp, Homo sapien
aagatggtgaaacgccgtctatact

SEQ ID NO: 5680432 - DNA, 25 bp, Homo sapien
gccgggcgtggtggcaggtgcctgt

SEQ ID NO: 5680433 - DNA, 25 bp, Homo sapien
gatggtgaaacgccgtctatactaa

SEQ ID NO: 5680434 - DNA, 25 bp, Homo sapien
caagatggtgaaacgccgtctatac

SEQ ID NO: 5680435 - DNA, 25 bp, Homo sapien
agccaccgcgcccagccagttatgt

SEQ ID NO: 5680436 - DNA, 25 bp, Homo sapien
ccacctgcctcagactcccaaagtg

SEQ ID NO: 5680437 - DNA, 25 bp, Homo sapien
tgatccacctgcctcagactcccaa

SEQ ID NO: 5680438 - DNA, 25 bp, Homo sapien
tgtgatccacctgcctcagactccc

SEQ ID NO: 5680439 - DNA, 25 bp, Homo sapien
ccaaagtgctgggattacaagtgtg

SEQ ID NO: 5680440 - DNA, 25 bp, Homo sapien
ttgtgatccacctgcctcagactcc

SEQ ID NO: 5680441 - DNA, 25 bp, Homo sapien
agtctgaggcaggtggatcacaagg

SEQ ID NO: 5680442 - DNA, 25 bp, Homo sapien
ggagtctgaggcaggtggatcacaa

SEQ ID NO: 5680443 - DNA, 25 bp, Homo sapien
gggagtctgaggcaggtggatcaca

SEQ ID NO: 5680444 - DNA, 25 bp, Homo sapien
gagtctgaggcaggtggatcacaag

SEQ ID NO: 5680445 - DNA, 25 bp, Homo sapien
acataactggctgggcgcggtggct

SEQ ID NO: 5680446 - DNA, 25 bp, Homo sapien
gtctgaggcaggtggatcacaaggt

SEQ ID NO: 5680447 - DNA, 25 bp, Homo sapien
tcaggatatacaagttgctgatatt

SEQ ID NO: 5680448 - DNA, 25 bp, Homo sapien
aagtcaaagtgaagtagaattattt

SEQ ID NO: 5680449 - DNA, 25 bp, Homo sapien
catcaggatatacaagttgctgata

SEQ ID NO: 5680450 - DNA, 25 bp, Homo sapien
ttcatcaggatatacaagttgctga

SEQ ID NO: 5680451 - DNA, 25 bp, Homo sapien
tcatcaggatatacaagttgctgat

SEQ ID NO: 5680452 - DNA, 25 bp, Homo sapien
gttgctgatatttaaagtcaaagtg

SEQ ID NO: 5680453 - DNA, 25 bp, Homo sapien
aatatcagcaacttgtatatcctga

SEQ ID NO: 5680454 - DNA, 25 bp, Homo sapien
atcagcaacttgtatatcctgatga

SEQ ID NO: 5680455 - DNA, 25 bp, Homo sapien
aaataattctacttcactttgactt

SEQ ID NO: 5680456 - DNA, 25 bp, Homo sapien
tatcagcaacttgtatatcctgatg

SEQ ID NO: 5680457 - DNA, 25 bp, Homo sapien
cactttgactttaaatatcagcaac

SEQ ID NO: 5680458 - DNA, 25 bp, Homo sapien
tcagcaacttgtatatcctgatgaa

SEQ ID NO: 5680459 - DNA, 25 bp, Homo sapien
ctcagacactaaacttaagccttta

SEQ ID NO: 5680460 - DNA, 25 bp, Homo sapien
aaacaaacttggaaatcactgaatt

SEQ ID NO: 5680461 - DNA, 25 bp, Homo sapien
tattctgtcctctagagcaaacatc

SEQ ID NO: 5680462 - DNA, 25 bp, Homo sapien
tttattctgtcctctagagcaaaca

SEQ ID NO: 5680463 - DNA, 25 bp, Homo sapien
attctgtcctctagagcaaacatca

SEQ ID NO: 5680464 - DNA, 25 bp, Homo sapien
cagacactaaacttaagcctttatt

SEQ ID NO: 5680465 - DNA, 25 bp, Homo sapien
aattcagtgatttccaagtttgttt

SEQ ID NO: 5680466 - DNA, 25 bp, Homo sapien
gatgtttgctctagaggacagaata

SEQ ID NO: 5680467 - DNA, 25 bp, Homo sapien
taaaggcttaagtttagtgtctgag

SEQ ID NO: 5680468 - DNA, 25 bp, Homo sapien
tgtttgctctagaggacagaataaa

SEQ ID NO: 5680469 - DNA, 25 bp, Homo sapien
aataaaggcttaagtttagtgtctg

SEQ ID NO: 5680470 - DNA, 25 bp, Homo sapien
tgatgtttgctctagaggacagaat

SEQ ID NO: 5680471 - DNA, 25 bp, Homo sapien
gtcttattcttcttagagtcttctt

SEQ ID NO: 5680472 - DNA, 25 bp, Homo sapien
aagaagactctaagaagaataagac

SEQ ID NO: 5680473 - DNA, 25 bp, Homo sapien
ttcttgccaagttttcagtgtctta

SEQ ID NO: 5680474 - DNA, 25 bp, Homo sapien
cagtgtcttattcttcttagagtct

SEQ ID NO: 5680475 - DNA, 25 bp, Homo sapien
gcttctcatttctagatgtaggagg

SEQ ID NO: 5680476 - DNA, 25 bp, Homo sapien
cttagagtcttctttttgcttctca

SEQ ID NO: 5680477 - DNA, 25 bp, Homo sapien
gtgtttttaaagaagtgctaagtga

SEQ ID NO: 5680478 - DNA, 25 bp, Homo sapien
tctagatgtaggaggtagtgttttt

SEQ ID NO: 5680479 - DNA, 25 bp, Homo sapien
cctcctacatctagaaatgagaagc

SEQ ID NO: 5680480 - DNA, 25 bp, Homo sapien
aagaagactctaagaagaataagac

SEQ ID NO: 5680481 - DNA, 25 bp, Homo sapien
taagacactgaaaacttggcaagaa

SEQ ID NO: 5680482 - DNA, 25 bp, Homo sapien
taaaaacactacctcctacatctag

SEQ ID NO: 5680483 - DNA, 25 bp, Homo sapien
tcacttagcacttctttaaaaacac

SEQ ID NO: 5680484 - DNA, 25 bp, Homo sapien
tgagaagcaaaaagaagactctaag

SEQ ID NO: 5680485 - DNA, 25 bp, Homo sapien
tgctcgttttatttagataacaaaa

SEQ ID NO: 5680486 - DNA, 25 bp, Homo sapien
ctgctcgttttatttagataacaaa

SEQ ID NO: 5680487 - DNA, 25 bp, Homo sapien
ggtttctgctcgttttatttagata

SEQ ID NO: 5680488 - DNA, 25 bp, Homo sapien
agatttctaaaaggtttctgctcgt

SEQ ID NO: 5680489 - DNA, 25 bp, Homo sapien
tttctgctcgttttatttagataac

SEQ ID NO: 5680490 - DNA, 25 bp, Homo sapien
tctgctcgttttatttagataacaa

SEQ ID NO: 5680491 - DNA, 25 bp, Homo sapien
tgttatctaaataaaacgagcagaa

SEQ ID NO: 5680492 - DNA, 25 bp, Homo sapien
ttttgttatctaaataaaacgagca

SEQ ID NO: 5680493 - DNA, 25 bp, Homo sapien
tttgttatctaaataaaacgagcag

SEQ ID NO: 5680494 - DNA, 25 bp, Homo sapien
ttatctaaataaaacgagcagaaac

SEQ ID NO: 5680495 - DNA, 25 bp, Homo sapien
tatctaaataaaacgagcagaaacc

SEQ ID NO: 5680496 - DNA, 25 bp, Homo sapien
acgagcagaaaccttttagaaatct

SEQ ID NO: 5680497 - DNA, 25 bp, Homo sapien
tccgatttaatagtgttgggtctcc

SEQ ID NO: 5680498 - DNA, 25 bp, Homo sapien
ggagacccaacactattaaatcgga

SEQ ID NO: 5680499 - DNA, 25 bp, Homo sapien
agccacaatcttgttacctttcttt

SEQ ID NO: 5680500 - DNA, 25 bp, Homo sapien
aaagaaaggtaacaagattgtggct

SEQ ID NO: 5680501 - DNA, 25 bp, Homo sapien
atgcccagccacaatcttgttacct

SEQ ID NO: 5680502 - DNA, 25 bp, Homo sapien
gcccagccacaatcttgttaccttt

SEQ ID NO: 5680503 - DNA, 25 bp, Homo sapien
ccagccacaatcttgttacctttct

SEQ ID NO: 5680504 - DNA, 25 bp, Homo sapien
tgcccagccacaatcttgttacctt

SEQ ID NO: 5680505 - DNA, 25 bp, Homo sapien
cagccacaatcttgttacctttctt

SEQ ID NO: 5680506 - DNA, 25 bp, Homo sapien
agccacaatcttgttacctttcttt

SEQ ID NO: 5680507 - DNA, 25 bp, Homo sapien
aaggtaacaagattgtggctgggca

SEQ ID NO: 5680508 - DNA, 25 bp, Homo sapien
aggtaacaagattgtggctgggcat

SEQ ID NO: 5680509 - DNA, 25 bp, Homo sapien
agaaaggtaacaagattgtggctgg

SEQ ID NO: 5680510 - DNA, 25 bp, Homo sapien
cagcaaagtgagacttggtctccaa

SEQ ID NO: 5680511 - DNA, 25 bp, Homo sapien
aaaggtaacaagattgtggctgggc

SEQ ID NO: 5680512 - DNA, 25 bp, Homo sapien
aaagaaaggtaacaagattgtggct

SEQ ID NO: 5680513 - DNA, 25 bp, Homo sapien
cgcgcccggccacattcttgttatt

SEQ ID NO: 5680514 - DNA, 25 bp, Homo sapien
gcgcccggccacattcttgttattt

SEQ ID NO: 5680515 - DNA, 25 bp, Homo sapien
ttcttgttattttaatggcactgtc

SEQ ID NO: 5680516 - DNA, 25 bp, Homo sapien
ccggccacattcttgttattttaat

SEQ ID NO: 5680517 - DNA, 25 bp, Homo sapien
gcccggccacattcttgttatttta

SEQ ID NO: 5680518 - DNA, 25 bp, Homo sapien
cacattcttgttattttaatggcac

SEQ ID NO: 5680519 - DNA, 25 bp, Homo sapien
aaataacaagaatgtggccgggcgc

SEQ ID NO: 5680520 - DNA, 25 bp, Homo sapien
taaaataacaagaatgtggccgggc

SEQ ID NO: 5680521 - DNA, 25 bp, Homo sapien
gacagtgccattaaaataacaagaa

SEQ ID NO: 5680522 - DNA, 25 bp, Homo sapien
aataacaagaatgtggccgggcgcg

SEQ ID NO: 5680523 - DNA, 25 bp, Homo sapien
tgccattaaaataacaagaatgtgg

SEQ ID NO: 5680524 - DNA, 25 bp, Homo sapien
cattaaaataacaagaatgtggccg

SEQ ID NO: 5680525 - DNA, 25 bp, Homo sapien
ttctgttaaaatcctgttgtggtgg

SEQ ID NO: 5680526 - DNA, 25 bp, Homo sapien
tctgttaaaatcctgttgtggtggc

SEQ ID NO: 5680527 - DNA, 25 bp, Homo sapien
ctgttaaaatcctgttgtggtggct

SEQ ID NO: 5680528 - DNA, 25 bp, Homo sapien
gccaccacaacaggattttaacaga

SEQ ID NO: 5680529 - DNA, 25 bp, Homo sapien
agccaccacaacaggattttaacag

SEQ ID NO: 5680530 - DNA, 25 bp, Homo sapien
ccaccacaacaggattttaacagaa

SEQ ID NO: 5680531 - DNA, 25 bp, Homo sapien
tctgttaaaatcctgttgtggtggc

SEQ ID NO: 5680532 - DNA, 25 bp, Homo sapien
tctttgaattcattctaagacattc

SEQ ID NO: 5680533 - DNA, 25 bp, Homo sapien
cattctaagacattctgttaaaatc

SEQ ID NO: 5680534 - DNA, 25 bp, Homo sapien
ttaaaatcctgttgtggtggctcat

SEQ ID NO: 5680535 - DNA, 25 bp, Homo sapien
aaaatcctgttgtggtggctcatgc

SEQ ID NO: 5680536 - DNA, 25 bp, Homo sapien
ctgttaaaatcctgttgtggtggct

SEQ ID NO: 5680537 - DNA, 25 bp, Homo sapien
gccaccacaacaggattttaacaga

SEQ ID NO: 5680538 - DNA, 25 bp, Homo sapien
agccaccacaacaggattttaacag

SEQ ID NO: 5680539 - DNA, 25 bp, Homo sapien
ttttaacagaatgtcttagaatgaa

SEQ ID NO: 5680540 - DNA, 25 bp, Homo sapien
tgagccaccacaacaggattttaac

SEQ ID NO: 5680541 - DNA, 25 bp, Homo sapien
gaatgaattcaaagataaactaaat

SEQ ID NO: 5680542 - DNA, 25 bp, Homo sapien
gcatgagccaccacaacaggatttt

SEQ ID NO: 5680543 - DNA, 25 bp, Homo sapien
gcttcccgggttcatgccattctcc

SEQ ID NO: 5680544 - DNA, 25 bp, Homo sapien
aagctccgcttcccgggttcatgcc

SEQ ID NO: 5680545 - DNA, 25 bp, Homo sapien
cgcttcccgggttcatgccattctc

SEQ ID NO: 5680546 - DNA, 25 bp, Homo sapien
caagctccgcttcccgggttcatgc

SEQ ID NO: 5680547 - DNA, 25 bp, Homo sapien
tgcaagctccgcttcccgggttcat

SEQ ID NO: 5680548 - DNA, 25 bp, Homo sapien
gcaagctccgcttcccgggttcatg

SEQ ID NO: 5680549 - DNA, 25 bp, Homo sapien
atgaacccgggaagcggagcttgca

SEQ ID NO: 5680550 - DNA, 25 bp, Homo sapien
catgaacccgggaagcggagcttgc

SEQ ID NO: 5680551 - DNA, 25 bp, Homo sapien
ggagaatggcatgaacccgggaagc

SEQ ID NO: 5680552 - DNA, 25 bp, Homo sapien
ggcatgaacccgggaagcggagctt

SEQ ID NO: 5680553 - DNA, 25 bp, Homo sapien
gcatgaacccgggaagcggagcttg

SEQ ID NO: 5680554 - DNA, 25 bp, Homo sapien
gagaatggcatgaacccgggaagcg

SEQ ID NO: 5680555 - DNA, 25 bp, Homo sapien
tctgtcagtcaggctctagagtgca

SEQ ID NO: 5680556 - DNA, 25 bp, Homo sapien
tgcactctagagcctgactgacaga

SEQ ID NO: 5680557 - DNA, 25 bp, Homo sapien
ctctgtcagtcaggctctagagtgc

SEQ ID NO: 5680558 - DNA, 25 bp, Homo sapien
ggctctgtcagtcaggctctagagt

SEQ ID NO: 5680559 - DNA, 25 bp, Homo sapien
tctggctctgtcagtcaggctctag

SEQ ID NO: 5680560 - DNA, 25 bp, Homo sapien
ggtctggctctgtcagtcaggctct

SEQ ID NO: 5680561 - DNA, 25 bp, Homo sapien
tgtcagtcaggctctagagtgcagt

SEQ ID NO: 5680562 - DNA, 25 bp, Homo sapien
tcagtcaggctctagagtgcagtgg

SEQ ID NO: 5680563 - DNA, 25 bp, Homo sapien
gcactctagagcctgactgacagag

SEQ ID NO: 5680564 - DNA, 25 bp, Homo sapien
tagagcctgactgacagagccagac

SEQ ID NO: 5680565 - DNA, 25 bp, Homo sapien
ccactgcactctagagcctgactga

SEQ ID NO: 5680566 - DNA, 25 bp, Homo sapien
tctagagcctgactgacagagccag

SEQ ID NO: 5680567 - DNA, 25 bp, Homo sapien
actgcactctagagcctgactgaca

SEQ ID NO: 5680568 - DNA, 25 bp, Homo sapien
actctagagcctgactgacagagcc

SEQ ID NO: 5680569 - DNA, 25 bp, Homo sapien
gctctgttgttaacacagtatggat

SEQ ID NO: 5680570 - DNA, 25 bp, Homo sapien
agttttgctctgttgttaacacagt

SEQ ID NO: 5680571 - DNA, 25 bp, Homo sapien
tttgctctgttgttaacacagtatg

SEQ ID NO: 5680572 - DNA, 25 bp, Homo sapien
gttttgctctgttgttaacacagta

SEQ ID NO: 5680573 - DNA, 25 bp, Homo sapien
tgctctgttgttaacacagtatgga

SEQ ID NO: 5680574 - DNA, 25 bp, Homo sapien
ctctgttgttaacacagtatggatt

SEQ ID NO: 5680575 - DNA, 25 bp, Homo sapien
tccatactgtgttaacaacagagca

SEQ ID NO: 5680576 - DNA, 25 bp, Homo sapien
tactgtgttaacaacagagcaaaac

SEQ ID NO: 5680577 - DNA, 25 bp, Homo sapien
atccatactgtgttaacaacagagc

SEQ ID NO: 5680578 - DNA, 25 bp, Homo sapien
catactgtgttaacaacagagcaaa

SEQ ID NO: 5680579 - DNA, 25 bp, Homo sapien
aatccatactgtgttaacaacagag

SEQ ID NO: 5680580 - DNA, 25 bp, Homo sapien
ccatactgtgttaacaacagagcaa

SEQ ID NO: 5680581 - DNA, 25 bp, Homo sapien
aaaacatttctgttgtataagtgag

SEQ ID NO: 5680582 - DNA, 25 bp, Homo sapien
gctctgttgttaacacagtatggat

SEQ ID NO: 5680583 - DNA, 25 bp, Homo sapien
agttttgctctgttgttaacacagt

SEQ ID NO: 5680584 - DNA, 25 bp, Homo sapien
tctgttgtataagtgagttttgctc

SEQ ID NO: 5680585 - DNA, 25 bp, Homo sapien
ttgctctgttgttaacacagtatgg

SEQ ID NO: 5680586 - DNA, 25 bp, Homo sapien
ctctgttgttaacacagtatggatt

SEQ ID NO: 5680587 - DNA, 25 bp, Homo sapien
cacttagaaaagatagcggcagggt

SEQ ID NO: 5680588 - DNA, 25 bp, Homo sapien
tttgtcttgttgaagtctttggccc

SEQ ID NO: 5680589 - DNA, 25 bp, Homo sapien
ggtgtgttcatgaaatccttttgtc

SEQ ID NO: 5680590 - DNA, 25 bp, Homo sapien
cacacttagaaaagatagcggcagg

SEQ ID NO: 5680591 - DNA, 25 bp, Homo sapien
aaaagatagcggcagggtgtgttca

SEQ ID NO: 5680592 - DNA, 25 bp, Homo sapien
aagtctttggcccttagtgcatgct

SEQ ID NO: 5680593 - DNA, 25 bp, Homo sapien
cctgccgctatcttttctaagtgtg

SEQ ID NO: 5680594 - DNA, 25 bp, Homo sapien
agcatgcactaagggccaaagactt

SEQ ID NO: 5680595 - DNA, 25 bp, Homo sapien
gacaaaaggatttcatgaacacacc

SEQ ID NO: 5680596 - DNA, 25 bp, Homo sapien
agggccaaagacttcaacaagacaa

SEQ ID NO: 5680597 - DNA, 25 bp, Homo sapien
tgaacacaccctgccgctatctttt

SEQ ID NO: 5680598 - DNA, 25 bp, Homo sapien
gccaaagacttcaacaagacaaaag

SEQ ID NO: 5680599 - DNA, 25 bp, Homo sapien
catacattaattgttataaagacct

SEQ ID NO: 5680600 - DNA, 25 bp, Homo sapien
taacattggcttatttggaacatca

SEQ ID NO: 5680601 - DNA, 25 bp, Homo sapien
atcatcatctttgccaagagattgc

SEQ ID NO: 5680602 - DNA, 25 bp, Homo sapien
ttatttggaacatcatcatctttgc

SEQ ID NO: 5680603 - DNA, 25 bp, Homo sapien
cattggcttatttggaacatcatca

SEQ ID NO: 5680604 - DNA, 25 bp, Homo sapien
ttccaagcaaacaaataacattggc

SEQ ID NO: 5680605 - DNA, 25 bp, Homo sapien
gatgttccaaataagccaatgttat

SEQ ID NO: 5680606 - DNA, 25 bp, Homo sapien
tgatgatgttccaaataagccaatg

SEQ ID NO: 5680607 - DNA, 25 bp, Homo sapien
aggtctttataacaattaatgtatg

SEQ ID NO: 5680608 - DNA, 25 bp, Homo sapien
gcaatctcttggcaaagatgatgat

SEQ ID NO: 5680609 - DNA, 25 bp, Homo sapien
gcaaagatgatgatgttccaaataa

SEQ ID NO: 5680610 - DNA, 25 bp, Homo sapien
gccaatgttatttgtttgcttggaa

SEQ ID NO: 5680611 - DNA, 25 bp, Homo sapien
tgttatagtcgcctacagtgttgag

SEQ ID NO: 5680612 - DNA, 25 bp, Homo sapien
taccatcatgttatagtcgcctaca

SEQ ID NO: 5680613 - DNA, 25 bp, Homo sapien
acagtgttgagtacagtaacttgaa

SEQ ID NO: 5680614 - DNA, 25 bp, Homo sapien
cctacagtgttgagtacagtaactt

SEQ ID NO: 5680615 - DNA, 25 bp, Homo sapien
tagtcgcctacagtgttgagtacag

SEQ ID NO: 5680616 - DNA, 25 bp, Homo sapien
tatagtcgcctacagtgttgagtac

SEQ ID NO: 5680617 - DNA, 25 bp, Homo sapien
tgtaggcgactataacatgatggta

SEQ ID NO: 5680618 - DNA, 25 bp, Homo sapien
ctgtactcaacactgtaggcgacta

SEQ ID NO: 5680619 - DNA, 25 bp, Homo sapien
ttcaagttactgtactcaacactgt

SEQ ID NO: 5680620 - DNA, 25 bp, Homo sapien
aagttactgtactcaacactgtagg

SEQ ID NO: 5680621 - DNA, 25 bp, Homo sapien
aacactgtaggcgactataacatga

SEQ ID NO: 5680622 - DNA, 25 bp, Homo sapien
tactcaacactgtaggcgactataa

SEQ ID NO: 5680623 - DNA, 25 bp, Homo sapien
atccgcccatctcgggctcccaaag

SEQ ID NO: 5680624 - DNA, 25 bp, Homo sapien
cgcccatctcgggctcccaaagtgc

SEQ ID NO: 5680625 - DNA, 25 bp, Homo sapien
ccgcccatctcgggctcccaaagtg

SEQ ID NO: 5680626 - DNA, 25 bp, Homo sapien
tgagccaccgcacctggcccttttt

SEQ ID NO: 5680627 - DNA, 25 bp, Homo sapien
tccgcccatctcgggctcccaaagt

SEQ ID NO: 5680628 - DNA, 25 bp, Homo sapien
tttgagatggagtttcactcttatt

SEQ ID NO: 5680629 - DNA, 25 bp, Homo sapien
actttgggagcccgagatgggcgga

SEQ ID NO: 5680630 - DNA, 25 bp, Homo sapien
ctttgggagcccgagatgggcggat

SEQ ID NO: 5680631 - DNA, 25 bp, Homo sapien
aataagagtgaaactccatctcaaa

SEQ ID NO: 5680632 - DNA, 25 bp, Homo sapien
gcactttgggagcccgagatgggcg

SEQ ID NO: 5680633 - DNA, 25 bp, Homo sapien
cactttgggagcccgagatgggcgg

SEQ ID NO: 5680634 - DNA, 25 bp, Homo sapien
aaaaagggccaggtgcggtggctca

SEQ ID NO: 5680635 - DNA, 25 bp, Homo sapien
ttagtagaggtggggtttcaccatg

SEQ ID NO: 5680636 - DNA, 25 bp, Homo sapien
tattagtagaggtggggtttcacca

SEQ ID NO: 5680637 - DNA, 25 bp, Homo sapien
ttgtattagtagaggtggggtttca

SEQ ID NO: 5680638 - DNA, 25 bp, Homo sapien
tgtattagtagaggtggggtttcac

SEQ ID NO: 5680639 - DNA, 25 bp, Homo sapien
acacccggctgatttttgtattagt

SEQ ID NO: 5680640 - DNA, 25 bp, Homo sapien
attagtagaggtggggtttcaccat

SEQ ID NO: 5680641 - DNA, 25 bp, Homo sapien
gtgaaaccccacctctactaataca

SEQ ID NO: 5680642 - DNA, 25 bp, Homo sapien
atggtgaaaccccacctctactaat

SEQ ID NO: 5680643 - DNA, 25 bp, Homo sapien
tgaaaccccacctctactaatacaa

SEQ ID NO: 5680644 - DNA, 25 bp, Homo sapien
catggtgaaaccccacctctactaa

SEQ ID NO: 5680645 - DNA, 25 bp, Homo sapien
actaatacaaaaatcagccgggtgt

SEQ ID NO: 5680646 - DNA, 25 bp, Homo sapien
tggtgaaaccccacctctactaata

SEQ ID NO: 5680647 - DNA, 25 bp, Homo sapien
taaaacgttactcttcactgaagcc

SEQ ID NO: 5680648 - DNA, 25 bp, Homo sapien
aacgttactcttcactgaagcctta

SEQ ID NO: 5680649 - DNA, 25 bp, Homo sapien
cgttactcttcactgaagccttaca

SEQ ID NO: 5680650 - DNA, 25 bp, Homo sapien
aaacgttactcttcactgaagcctt

SEQ ID NO: 5680651 - DNA, 25 bp, Homo sapien
ttaaaacgttactcttcactgaagc

SEQ ID NO: 5680652 - DNA, 25 bp, Homo sapien
aaaacgttactcttcactgaagcct

SEQ ID NO: 5680653 - DNA, 25 bp, Homo sapien
ggcttcagtgaagagtaacgtttta

SEQ ID NO: 5680654 - DNA, 25 bp, Homo sapien
taaggcttcagtgaagagtaacgtt

SEQ ID NO: 5680655 - DNA, 25 bp, Homo sapien
aggcttcagtgaagagtaacgtttt

SEQ ID NO: 5680656 - DNA, 25 bp, Homo sapien
gcttcagtgaagagtaacgttttaa

SEQ ID NO: 5680657 - DNA, 25 bp, Homo sapien
gtaaggcttcagtgaagagtaacgt

SEQ ID NO: 5680658 - DNA, 25 bp, Homo sapien
tgtaaggcttcagtgaagagtaacg

SEQ ID NO: 5680659 - DNA, 25 bp, Homo sapien
gaggtggcagtgaactgagatcaca

SEQ ID NO: 5680660 - DNA, 25 bp, Homo sapien
tctggagcctgaggcaggggaatcg

SEQ ID NO: 5680661 - DNA, 25 bp, Homo sapien
ggtgcacgcctgtggtcccagctac

SEQ ID NO: 5680662 - DNA, 25 bp, Homo sapien
tggagcctgaggcaggggaatcgct

SEQ ID NO: 5680663 - DNA, 25 bp, Homo sapien
ctggagcctgaggcaggggaatcgc

SEQ ID NO: 5680664 - DNA, 25 bp, Homo sapien
ggtgtggtggtgcacgcctgtggtc

SEQ ID NO: 5680665 - DNA, 25 bp, Homo sapien
cgattcccctgcctcaggctccaga

SEQ ID NO: 5680666 - DNA, 25 bp, Homo sapien
agcgattcccctgcctcaggctcca

SEQ ID NO: 5680667 - DNA, 25 bp, Homo sapien
gtagctgggaccacaggcgtgcacc

SEQ ID NO: 5680668 - DNA, 25 bp, Homo sapien
gaccacaggcgtgcaccaccacacc

SEQ ID NO: 5680669 - DNA, 25 bp, Homo sapien
gcgattcccctgcctcaggctccag

SEQ ID NO: 5680670 - DNA, 25 bp, Homo sapien
tgtgatctcagttcactgccacctc

SEQ ID NO: 5680671 - DNA, 25 bp, Homo sapien
catgcagctaattgctattcttagc

SEQ ID NO: 5680672 - DNA, 25 bp, Homo sapien
ttgctattcttagctaagttttctg

SEQ ID NO: 5680673 - DNA, 25 bp, Homo sapien
gcagctaattgctattcttagctaa

SEQ ID NO: 5680674 - DNA, 25 bp, Homo sapien
gcccatgcagctaattgctattctt

SEQ ID NO: 5680675 - DNA, 25 bp, Homo sapien
tttctcttgaacattgcccatgcag

SEQ ID NO: 5680676 - DNA, 25 bp, Homo sapien
ctcttgaacattgcccatgcagcta

SEQ ID NO: 5680677 - DNA, 25 bp, Homo sapien
cagaaaacttagctaagaatagcaa

SEQ ID NO: 5680678 - DNA, 25 bp, Homo sapien
tagctgcatgggcaatgttcaagag

SEQ ID NO: 5680679 - DNA, 25 bp, Homo sapien
ttagctaagaatagcaattagctgc

SEQ ID NO: 5680680 - DNA, 25 bp, Homo sapien
gctgcatgggcaatgttcaagagaa

SEQ ID NO: 5680681 - DNA, 25 bp, Homo sapien
gctaagaatagcaattagctgcatg

SEQ ID NO: 5680682 - DNA, 25 bp, Homo sapien
taagaatagcaattagctgcatggg

SEQ ID NO: 5680683 - DNA, 25 bp, Homo sapien
gtaaatatgcctttagataattttc

SEQ ID NO: 5680684 - DNA, 25 bp, Homo sapien
agtaaatatgcctttagataatttt

SEQ ID NO: 5680685 - DNA, 25 bp, Homo sapien
aagtaaatatgcctttagataattt

SEQ ID NO: 5680686 - DNA, 25 bp, Homo sapien
aaattatctaaaggcatatttactt

SEQ ID NO: 5680687 - DNA, 25 bp, Homo sapien
gaaaattatctaaaggcatatttac

SEQ ID NO: 5680688 - DNA, 25 bp, Homo sapien
aaaattatctaaaggcatatttact

SEQ ID NO: 5680689 - DNA, 25 bp, Homo sapien
taattttcagtatgtggcatttggg

SEQ ID NO: 5680690 - DNA, 25 bp, Homo sapien
cagtatgtggcatttgggaatgtta

SEQ ID NO: 5680691 - DNA, 25 bp, Homo sapien
gtaaatatgcctttagataattttc

SEQ ID NO: 5680692 - DNA, 25 bp, Homo sapien
ggcatttgggaatgttatatacttt

SEQ ID NO: 5680693 - DNA, 25 bp, Homo sapien
ttaagaaatctaaaagtaaatatgc

SEQ ID NO: 5680694 - DNA, 25 bp, Homo sapien
tgtatctgatatcacaaatacaaca

SEQ ID NO: 5680695 - DNA, 25 bp, Homo sapien
gcatatttacttttagatttcttaa

SEQ ID NO: 5680696 - DNA, 25 bp, Homo sapien
taacattcccaaatgccacatactg

SEQ ID NO: 5680697 - DNA, 25 bp, Homo sapien
caaatgccacatactgaaaattatc

SEQ ID NO: 5680698 - DNA, 25 bp, Homo sapien
gaaaattatctaaaggcatatttac

SEQ ID NO: 5680699 - DNA, 25 bp, Homo sapien
aaagtatataacattcccaaatgcc

SEQ ID NO: 5680700 - DNA, 25 bp, Homo sapien
gttgtatttgtgatatcagatacag

SEQ ID NO: 5680701 - DNA, 25 bp, Homo sapien
cgctgcatcctccacctcatgggtt

SEQ ID NO: 5680702 - DNA, 25 bp, Homo sapien
ccgggctggagtgtgatggcgcgat

SEQ ID NO: 5680703 - DNA, 25 bp, Homo sapien
agcgattgtcttggctcagcctcct

SEQ ID NO: 5680704 - DNA, 25 bp, Homo sapien
ttggctcgctgcatcctccacctca

SEQ ID NO: 5680705 - DNA, 25 bp, Homo sapien
tggctcgctgcatcctccacctcat

SEQ ID NO: 5680706 - DNA, 25 bp, Homo sapien
cgggctggagtgtgatggcgcgatc

SEQ ID NO: 5680707 - DNA, 25 bp, Homo sapien
tgaggtggaggatgcagcgagccaa

SEQ ID NO: 5680708 - DNA, 25 bp, Homo sapien
aacccatgaggtggaggatgcagcg

SEQ ID NO: 5680709 - DNA, 25 bp, Homo sapien
aggaggctgagccaagacaatcgct

SEQ ID NO: 5680710 - DNA, 25 bp, Homo sapien
atcgcgccatcacactccagcccgg

SEQ ID NO: 5680711 - DNA, 25 bp, Homo sapien
catgaggtggaggatgcagcgagcc

SEQ ID NO: 5680712 - DNA, 25 bp, Homo sapien
atgaggtggaggatgcagcgagcca

SEQ ID NO: 5680713 - DNA, 25 bp, Homo sapien
tgatctgcccatctcagcctcccaa

SEQ ID NO: 5680714 - DNA, 25 bp, Homo sapien
ggtgatctgcccatctcagcctccc

SEQ ID NO: 5680715 - DNA, 25 bp, Homo sapien
aggtgatctgcccatctcagcctcc

SEQ ID NO: 5680716 - DNA, 25 bp, Homo sapien
gacctcaggtgatctgcccatctca

SEQ ID NO: 5680717 - DNA, 25 bp, Homo sapien
acctcaggtgatctgcccatctcag

SEQ ID NO: 5680718 - DNA, 25 bp, Homo sapien
caggtgatctgcccatctcagcctc

SEQ ID NO: 5680719 - DNA, 25 bp, Homo sapien
ctgagatgggcagatcacctgaggt

SEQ ID NO: 5680720 - DNA, 25 bp, Homo sapien
tgagatgggcagatcacctgaggtc

SEQ ID NO: 5680721 - DNA, 25 bp, Homo sapien
gaggctgagatgggcagatcacctg

SEQ ID NO: 5680722 - DNA, 25 bp, Homo sapien
ggaggctgagatgggcagatcacct

SEQ ID NO: 5680723 - DNA, 25 bp, Homo sapien
ttgggaggctgagatgggcagatca

SEQ ID NO: 5680724 - DNA, 25 bp, Homo sapien
gggaggctgagatgggcagatcacc

SEQ ID NO: 5680725 - DNA, 25 bp, Homo sapien
ggctgtgggcaaattgaacctatct

SEQ ID NO: 5680726 - DNA, 25 bp, Homo sapien
ctcatcactttagctagtaggctgt

SEQ ID NO: 5680727 - DNA, 25 bp, Homo sapien
ggtcgtcttacttcaaagctcatca

SEQ ID NO: 5680728 - DNA, 25 bp, Homo sapien
cactttagctagtaggctgtgggca

SEQ ID NO: 5680729 - DNA, 25 bp, Homo sapien
gacccaggtcgtcttacttcaaagc

SEQ ID NO: 5680730 - DNA, 25 bp, Homo sapien
ggcaaattgaacctatctaatcatg

SEQ ID NO: 5680731 - DNA, 25 bp, Homo sapien
tgatgagctttgaagtaagacgacc

SEQ ID NO: 5680732 - DNA, 25 bp, Homo sapien
acagcctactagctaaagtgatgag

SEQ ID NO: 5680733 - DNA, 25 bp, Homo sapien
gctttgaagtaagacgacctgggtc

SEQ ID NO: 5680734 - DNA, 25 bp, Homo sapien
agataggttcaatttgcccacagcc

SEQ ID NO: 5680735 - DNA, 25 bp, Homo sapien
catgattagataggttcaatttgcc

SEQ ID NO: 5680736 - DNA, 25 bp, Homo sapien
tgcccacagcctactagctaaagtg

SEQ ID NO: 5680737 - DNA, 25 bp, Homo sapien
taagggaagtgggctctggacactt

SEQ ID NO: 5680738 - DNA, 25 bp, Homo sapien
tggatatctcaagaaaggaggaggt

SEQ ID NO: 5680739 - DNA, 25 bp, Homo sapien
ggacacttggatatctcaagaaagg

SEQ ID NO: 5680740 - DNA, 25 bp, Homo sapien
cacttggatatctcaagaaaggagg

SEQ ID NO: 5680741 - DNA, 25 bp, Homo sapien
tgggggatcctcagagggaataaaa

SEQ ID NO: 5680742 - DNA, 25 bp, Homo sapien
ctctggacacttggatatctcaaga

SEQ ID NO: 5680743 - DNA, 25 bp, Homo sapien
ttttattccctctgaggatccccca

SEQ ID NO: 5680744 - DNA, 25 bp, Homo sapien
cctcctcctttcttgagatatccaa

SEQ ID NO: 5680745 - DNA, 25 bp, Homo sapien
cctttcttgagatatccaagtgtcc

SEQ ID NO: 5680746 - DNA, 25 bp, Homo sapien
cctcctttcttgagatatccaagtg

SEQ ID NO: 5680747 - DNA, 25 bp, Homo sapien
gagatatccaagtgtccagagccca

SEQ ID NO: 5680748 - DNA, 25 bp, Homo sapien
tcttgagatatccaagtgtccagag

SEQ ID NO: 5680749 - DNA, 25 bp, Homo sapien
tagtagagaagggatctcattatgt

SEQ ID NO: 5680750 - DNA, 25 bp, Homo sapien
agtagagaagggatctcattatgtt

SEQ ID NO: 5680751 - DNA, 25 bp, Homo sapien
gagaagggatctcattatgttgccc

SEQ ID NO: 5680752 - DNA, 25 bp, Homo sapien
gtagagaagggatctcattatgttg

SEQ ID NO: 5680753 - DNA, 25 bp, Homo sapien
agaagggatctcattatgttgccca

SEQ ID NO: 5680754 - DNA, 25 bp, Homo sapien
agagaagggatctcattatgttgcc

SEQ ID NO: 5680755 - DNA, 25 bp, Homo sapien
ggcaacataatgagatcccttctct

SEQ ID NO: 5680756 - DNA, 25 bp, Homo sapien
gggcaacataatgagatcccttctc

SEQ ID NO: 5680757 - DNA, 25 bp, Homo sapien
aacataatgagatcccttctctact

SEQ ID NO: 5680758 - DNA, 25 bp, Homo sapien
acataatgagatcccttctctacta

SEQ ID NO: 5680759 - DNA, 25 bp, Homo sapien
caacataatgagatcccttctctac

SEQ ID NO: 5680760 - DNA, 25 bp, Homo sapien
tgggcaacataatgagatcccttct

SEQ ID NO: 5680761 - DNA, 25 bp, Homo sapien
tagcgacggagtttcaccacgttgg

SEQ ID NO: 5680762 - DNA, 25 bp, Homo sapien
tagtagcgacggagtttcaccacgt

SEQ ID NO: 5680763 - DNA, 25 bp, Homo sapien
cacctgccaccacgcgcagctaatt

SEQ ID NO: 5680764 - DNA, 25 bp, Homo sapien
ttagtagcgacggagtttcaccacg

SEQ ID NO: 5680765 - DNA, 25 bp, Homo sapien
cacgcgcagctaattttttgtattt

SEQ ID NO: 5680766 - DNA, 25 bp, Homo sapien
tcccaagtagctgggatcacaggca

SEQ ID NO: 5680767 - DNA, 25 bp, Homo sapien
ccaacgtggtgaaactccgtcgcta

SEQ ID NO: 5680768 - DNA, 25 bp, Homo sapien
aattagctgcgcgtggtggcaggtg

SEQ ID NO: 5680769 - DNA, 25 bp, Homo sapien
tgcctgtgatcccagctacttggga

SEQ ID NO: 5680770 - DNA, 25 bp, Homo sapien
cgtggtgaaactccgtcgctactaa

SEQ ID NO: 5680771 - DNA, 25 bp, Homo sapien
gtgcctgtgatcccagctacttggg

SEQ ID NO: 5680772 - DNA, 25 bp, Homo sapien
aaatacaaaaaattagctgcgcgtg

SEQ ID NO: 5680773 - DNA, 25 bp, Homo sapien
cagcctctcagtagttgggactaca

SEQ ID NO: 5680774 - DNA, 25 bp, Homo sapien
agcctctcagtagttgggactacag

SEQ ID NO: 5680775 - DNA, 25 bp, Homo sapien
tcagcctctcagtagttgggactac

SEQ ID NO: 5680776 - DNA, 25 bp, Homo sapien
ctctcagtagttgggactacaggcg

SEQ ID NO: 5680777 - DNA, 25 bp, Homo sapien
cctcagcctctcagtagttgggact

SEQ ID NO: 5680778 - DNA, 25 bp, Homo sapien
gcctcagcctctcagtagttgggac

SEQ ID NO: 5680779 - DNA, 25 bp, Homo sapien
gtcccaactactgagaggctgaggc

SEQ ID NO: 5680780 - DNA, 25 bp, Homo sapien
agtcccaactactgagaggctgagg

SEQ ID NO: 5680781 - DNA, 25 bp, Homo sapien
gtagtcccaactactgagaggctga

SEQ ID NO: 5680782 - DNA, 25 bp, Homo sapien
tgtagtcccaactactgagaggctg

SEQ ID NO: 5680783 - DNA, 25 bp, Homo sapien
ctgtagtcccaactactgagaggct

SEQ ID NO: 5680784 - DNA, 25 bp, Homo sapien
cgcctgtagtcccaactactgagag

SEQ ID NO: 5680785 - DNA, 25 bp, Homo sapien
catatatgtccatttcataagtcgg

SEQ ID NO: 5680786 - DNA, 25 bp, Homo sapien
tagtttgctgtaagtcgaaatgcaa

SEQ ID NO: 5680787 - DNA, 25 bp, Homo sapien
tgggattccctagattatccctagt

SEQ ID NO: 5680788 - DNA, 25 bp, Homo sapien
cctagattatccctagtttgctgta

SEQ ID NO: 5680789 - DNA, 25 bp, Homo sapien
gataccatatatgtccatttcataa

SEQ ID NO: 5680790 - DNA, 25 bp, Homo sapien
gctgtaagtcgaaatgcaagttatt

SEQ ID NO: 5680791 - DNA, 25 bp, Homo sapien
tccgacttatgaaatggacatatat

SEQ ID NO: 5680792 - DNA, 25 bp, Homo sapien
tacagcaaactagggataatctagg

SEQ ID NO: 5680793 - DNA, 25 bp, Homo sapien
tatgaaatggacatatatggtatct

SEQ ID NO: 5680794 - DNA, 25 bp, Homo sapien
aataacttgcatttcgacttacagc

SEQ ID NO: 5680795 - DNA, 25 bp, Homo sapien
cttgcatttcgacttacagcaaact

SEQ ID NO: 5680796 - DNA, 25 bp, Homo sapien
ctagggataatctagggaatcccag

SEQ ID NO: 5680797 - DNA, 25 bp, Homo sapien
tagaatcccagtctaagagtgtggc

SEQ ID NO: 5680798 - DNA, 25 bp, Homo sapien
aagctagaatcccagtctaagagtg

SEQ ID NO: 5680799 - DNA, 25 bp, Homo sapien
tacagacaggtaagctagaatccca

SEQ ID NO: 5680800 - DNA, 25 bp, Homo sapien
cccagtctaagagtgtggcttggga

SEQ ID NO: 5680801 - DNA, 25 bp, Homo sapien
gctagaatcccagtctaagagtgtg

SEQ ID NO: 5680802 - DNA, 25 bp, Homo sapien
gaatcccagtctaagagtgtggctt

SEQ ID NO: 5680803 - DNA, 25 bp, Homo sapien
tcccaagccacactcttagactggg

SEQ ID NO: 5680804 - DNA, 25 bp, Homo sapien
cacactcttagactgggattctagc

SEQ ID NO: 5680805 - DNA, 25 bp, Homo sapien
ccaagccacactcttagactgggat

SEQ ID NO: 5680806 - DNA, 25 bp, Homo sapien
cactcttagactgggattctagctt

SEQ ID NO: 5680807 - DNA, 25 bp, Homo sapien
gccacactcttagactgggattcta

SEQ ID NO: 5680808 - DNA, 25 bp, Homo sapien
tgggattctagcttacctgtctgta

SEQ ID NO: 5680809 - DNA, 25 bp, Homo sapien
aagtggtgagttttggagagctaaa

SEQ ID NO: 5680810 - DNA, 25 bp, Homo sapien
taaagggagctctgtaatgaaggaa

SEQ ID NO: 5680811 - DNA, 25 bp, Homo sapien
ttttggagagctaaagggagctctg

SEQ ID NO: 5680812 - DNA, 25 bp, Homo sapien
gggagctctgtaatgaaggaatggt

SEQ ID NO: 5680813 - DNA, 25 bp, Homo sapien
aagggagctctgtaatgaaggaatg

SEQ ID NO: 5680814 - DNA, 25 bp, Homo sapien
agttttggagagctaaagggagctc

SEQ ID NO: 5680815 - DNA, 25 bp, Homo sapien
tttagctctccaaaactcaccactt

SEQ ID NO: 5680816 - DNA, 25 bp, Homo sapien
gagctccctttagctctccaaaact

SEQ ID NO: 5680817 - DNA, 25 bp, Homo sapien
cattccttcattacagagctccctt

SEQ ID NO: 5680818 - DNA, 25 bp, Homo sapien
accattccttcattacagagctccc

SEQ ID NO: 5680819 - DNA, 25 bp, Homo sapien
ttccttcattacagagctcccttta

SEQ ID NO: 5680820 - DNA, 25 bp, Homo sapien
cagagctccctttagctctccaaaa

SEQ ID NO: 5680821 - DNA, 25 bp, Homo sapien
ttcccagtcccagagcatctgtctc

SEQ ID NO: 5680822 - DNA, 25 bp, Homo sapien
gcagatgggtggggcgttttctagg

SEQ ID NO: 5680823 - DNA, 25 bp, Homo sapien
cctggactccctttcccagtcccag

SEQ ID NO: 5680824 - DNA, 25 bp, Homo sapien
tcccagtcccagagcatctgtctcc

SEQ ID NO: 5680825 - DNA, 25 bp, Homo sapien
tttcccagtcccagagcatctgtct

SEQ ID NO: 5680826 - DNA, 25 bp, Homo sapien
gagacagatgctctgggactgggaa

SEQ ID NO: 5680827 - DNA, 25 bp, Homo sapien
ctgggactgggaaagggagtccagg

SEQ ID NO: 5680828 - DNA, 25 bp, Homo sapien
cctagaaaacgccccacccatctgc

SEQ ID NO: 5680829 - DNA, 25 bp, Homo sapien
agacagatgctctgggactgggaaa

SEQ ID NO: 5680830 - DNA, 25 bp, Homo sapien
ggagacagatgctctgggactggga

SEQ ID NO: 5680831 - DNA, 25 bp, Homo sapien
tgtctccatccgctggcaccagtgt

SEQ ID NO: 5680832 - DNA, 25 bp, Homo sapien
tttcccagtcccagagcatctgtct

SEQ ID NO: 5680833 - DNA, 25 bp, Homo sapien
tccgctggcaccagtgtcagcctgg

SEQ ID NO: 5680834 - DNA, 25 bp, Homo sapien
cagagcatctgtctccatccgctgg

SEQ ID NO: 5680835 - DNA, 25 bp, Homo sapien
ctggcaccagtgtcagcctggagga

SEQ ID NO: 5680836 - DNA, 25 bp, Homo sapien
tggaggagggaagcagatgggtggg

SEQ ID NO: 5680837 - DNA, 25 bp, Homo sapien
acactggtgccagcggatggagaca

SEQ ID NO: 5680838 - DNA, 25 bp, Homo sapien
tcctccaggctgacactggtgccag

SEQ ID NO: 5680839 - DNA, 25 bp, Homo sapien
caggctgacactggtgccagcggat

SEQ ID NO: 5680840 - DNA, 25 bp, Homo sapien
tagaaaacgccccacccatctgctt

SEQ ID NO: 5680841 - DNA, 25 bp, Homo sapien
tgccagcggatggagacagatgctc

SEQ ID NO: 5680842 - DNA, 25 bp, Homo sapien
agacagatgctctgggactgggaaa

SEQ ID NO: 5680843 - DNA, 25 bp, Homo sapien
tagggagagaaacaacttaagataa

SEQ ID NO: 5680844 - DNA, 25 bp, Homo sapien
ttagggagagaaacaacttaagata

SEQ ID NO: 5680845 - DNA, 25 bp, Homo sapien
gagagaaacaacttaagataattcc

SEQ ID NO: 5680846 - DNA, 25 bp, Homo sapien
agggagagaaacaacttaagataat

SEQ ID NO: 5680847 - DNA, 25 bp, Homo sapien
ttcattttaattagggagagaaaca

SEQ ID NO: 5680848 - DNA, 25 bp, Homo sapien
ggagagaaacaacttaagataattc

SEQ ID NO: 5680849 - DNA, 25 bp, Homo sapien
tgtttctctccctaattaaaatgaa

SEQ ID NO: 5680850 - DNA, 25 bp, Homo sapien
attatcttaagttgtttctctccct

SEQ ID NO: 5680851 - DNA, 25 bp, Homo sapien
tatcttaagttgtttctctccctaa

SEQ ID NO: 5680852 - DNA, 25 bp, Homo sapien
ttatcttaagttgtttctctcccta

SEQ ID NO: 5680853 - DNA, 25 bp, Homo sapien
ggaattatcttaagttgtttctctc

SEQ ID NO: 5680854 - DNA, 25 bp, Homo sapien
gaattatcttaagttgtttctctcc

SEQ ID NO: 5680855 - DNA, 25 bp, Homo sapien
gagaattgcttgaacctgggaggtg

SEQ ID NO: 5680856 - DNA, 25 bp, Homo sapien
gcaatggagtgagactcccttctca

SEQ ID NO: 5680857 - DNA, 25 bp, Homo sapien
caatggagtgagactcccttctcaa

SEQ ID NO: 5680858 - DNA, 25 bp, Homo sapien
ggcaatggagtgagactcccttctc

SEQ ID NO: 5680859 - DNA, 25 bp, Homo sapien
ggagaattgcttgaacctgggaggt

SEQ ID NO: 5680860 - DNA, 25 bp, Homo sapien
tgagaagggagtctcactccattgc

SEQ ID NO: 5680861 - DNA, 25 bp, Homo sapien
cacctcccaggttcaagcaattctc

SEQ ID NO: 5680862 - DNA, 25 bp, Homo sapien
acctcccaggttcaagcaattctcc

SEQ ID NO: 5680863 - DNA, 25 bp, Homo sapien
ttgagaagggagtctcactccattg

SEQ ID NO: 5680864 - DNA, 25 bp, Homo sapien
gagaagggagtctcactccattgcc

SEQ ID NO: 5680865 - DNA, 25 bp, Homo sapien
gggctgaggttctctgaacttgtga

SEQ ID NO: 5680866 - DNA, 25 bp, Homo sapien
tctctgaacttgtgacttggctaga

SEQ ID NO: 5680867 - DNA, 25 bp, Homo sapien
gtgttctttgcctcaccctgggtac

SEQ ID NO: 5680868 - DNA, 25 bp, Homo sapien
tgttctttgcctcaccctgggtacc

SEQ ID NO: 5680869 - DNA, 25 bp, Homo sapien
ggtacccagggtgaggcaaagaaca

SEQ ID NO: 5680870 - DNA, 25 bp, Homo sapien
tctagccaagtcacaagttcagaga

SEQ ID NO: 5680871 - DNA, 25 bp, Homo sapien
tcacaagttcagagaacctcagccc

SEQ ID NO: 5680872 - DNA, 25 bp, Homo sapien
gtacccagggtgaggcaaagaacac

SEQ ID NO: 5680873 - DNA, 25 bp, Homo sapien
catcagttttctgggcatacggagt

SEQ ID NO: 5680874 - DNA, 25 bp, Homo sapien
cacaggttacttccaaaattgctct

SEQ ID NO: 5680875 - DNA, 25 bp, Homo sapien
caaaattgctctcctttgggcagca

SEQ ID NO: 5680876 - DNA, 25 bp, Homo sapien
cgttctcgctccaacacatcagttt

SEQ ID NO: 5680877 - DNA, 25 bp, Homo sapien
tgacgttctcgctccaacacatcag

SEQ ID NO: 5680878 - DNA, 25 bp, Homo sapien
tcagctcatccacaggttacttcca

SEQ ID NO: 5680879 - DNA, 25 bp, Homo sapien
tggaagtaacctgtggatgagctga

SEQ ID NO: 5680880 - DNA, 25 bp, Homo sapien
actccgtatgcccagaaaactgatg

SEQ ID NO: 5680881 - DNA, 25 bp, Homo sapien
ctgatgtgttggagcgagaacgtca

SEQ ID NO: 5680882 - DNA, 25 bp, Homo sapien
gagcaattttggaagtaacctgtgg

SEQ ID NO: 5680883 - DNA, 25 bp, Homo sapien
tgctgcccaaaggagagcaattttg

SEQ ID NO: 5680884 - DNA, 25 bp, Homo sapien
aaactgatgtgttggagcgagaacg

SEQ ID NO: 5680885 - DNA, 25 bp, Homo sapien
gtagtggtggttgatttaactgatt

SEQ ID NO: 5680886 - DNA, 25 bp, Homo sapien
ggtagtggtggttgatttaactgat

SEQ ID NO: 5680887 - DNA, 25 bp, Homo sapien
atcagttaaatcaaccaccactacc

SEQ ID NO: 5680888 - DNA, 25 bp, Homo sapien
aatcagttaaatcaaccaccactac

SEQ ID NO: 5680889 - DNA, 25 bp, Homo sapien
taactgatttgggagaatgggtctg

SEQ ID NO: 5680890 - DNA, 25 bp, Homo sapien
ggtagtggtggttgatttaactgat

SEQ ID NO: 5680891 - DNA, 25 bp, Homo sapien
aatgggtctggccttgggttcattc

SEQ ID NO: 5680892 - DNA, 25 bp, Homo sapien
aaagccctcagtggtagtggtggtt

SEQ ID NO: 5680893 - DNA, 25 bp, Homo sapien
gggttcattctgtcctttaccagtc

SEQ ID NO: 5680894 - DNA, 25 bp, Homo sapien
aatttccagaaagccctcagtggta

SEQ ID NO: 5680895 - DNA, 25 bp, Homo sapien
gacccattctcccaaatcagttaaa

SEQ ID NO: 5680896 - DNA, 25 bp, Homo sapien
aatcagttaaatcaaccaccactac

SEQ ID NO: 5680897 - DNA, 25 bp, Homo sapien
ggaagcagactggtaaaggacagaa

SEQ ID NO: 5680898 - DNA, 25 bp, Homo sapien
gaatgaacccaaggccagacccatt

SEQ ID NO: 5680899 - DNA, 25 bp, Homo sapien
taaaggacagaatgaacccaaggcc

SEQ ID NO: 5680900 - DNA, 25 bp, Homo sapien
cactaccactgagggctttctggaa

SEQ ID NO: 5680901 - DNA, 25 bp, Homo sapien
gaaacgcctgcggttcccattaaga

SEQ ID NO: 5680902 - DNA, 25 bp, Homo sapien
ggagaaacgcctgcggttcccatta

SEQ ID NO: 5680903 - DNA, 25 bp, Homo sapien
gaaagccctgggtgtgaaggagaaa

SEQ ID NO: 5680904 - DNA, 25 bp, Homo sapien
aacgcctgcggttcccattaagaga

SEQ ID NO: 5680905 - DNA, 25 bp, Homo sapien
aaacgcctgcggttcccattaagag

SEQ ID NO: 5680906 - DNA, 25 bp, Homo sapien
agccctgggtgtgaaggagaaacgc

SEQ ID NO: 5680907 - DNA, 25 bp, Homo sapien
ctcttaatgggaaccgcaggcgttt

SEQ ID NO: 5680908 - DNA, 25 bp, Homo sapien
tttctccttcacacccagggctttc

SEQ ID NO: 5680909 - DNA, 25 bp, Homo sapien
taatgggaaccgcaggcgtttctcc

SEQ ID NO: 5680910 - DNA, 25 bp, Homo sapien
tctcttaatgggaaccgcaggcgtt

SEQ ID NO: 5680911 - DNA, 25 bp, Homo sapien
tcttaatgggaaccgcaggcgtttc

SEQ ID NO: 5680912 - DNA, 25 bp, Homo sapien
gcgtttctccttcacacccagggct

SEQ ID NO: 5680913 - DNA, 25 bp, Homo sapien
gagacaacttttgatagtattaaaa

SEQ ID NO: 5680914 - DNA, 25 bp, Homo sapien
aaaattaagtctgtttgagacaact

SEQ ID NO: 5680915 - DNA, 25 bp, Homo sapien
ctgtttgagacaacttttgatagta

SEQ ID NO: 5680916 - DNA, 25 bp, Homo sapien
taagtctgtttgagacaacttttga

SEQ ID NO: 5680917 - DNA, 25 bp, Homo sapien
tgtttgagacaacttttgatagtat

SEQ ID NO: 5680918 - DNA, 25 bp, Homo sapien
gtctgtttgagacaacttttgatag

SEQ ID NO: 5680919 - DNA, 25 bp, Homo sapien
ttttaatactatcaaaagttgtctc

SEQ ID NO: 5680920 - DNA, 25 bp, Homo sapien
tactatcaaaagttgtctcaaacag

SEQ ID NO: 5680921 - DNA, 25 bp, Homo sapien
ctatcaaaagttgtctcaaacagac

SEQ ID NO: 5680922 - DNA, 25 bp, Homo sapien
caaaagttgtctcaaacagacttaa

SEQ ID NO: 5680923 - DNA, 25 bp, Homo sapien
taatactatcaaaagttgtctcaaa

SEQ ID NO: 5680924 - DNA, 25 bp, Homo sapien
tatcaaaagttgtctcaaacagact

SEQ ID NO: 5680925 - DNA, 25 bp, Homo sapien
tctggcagatttgccttgtacttaa

SEQ ID NO: 5680926 - DNA, 25 bp, Homo sapien
catctggcagatttgccttgtactt

SEQ ID NO: 5680927 - DNA, 25 bp, Homo sapien
cccagcctaagctttttctcatctg

SEQ ID NO: 5680928 - DNA, 25 bp, Homo sapien
ggcagatttgccttgtacttaaaag

SEQ ID NO: 5680929 - DNA, 25 bp, Homo sapien
ctcatctggcagatttgccttgtac

SEQ ID NO: 5680930 - DNA, 25 bp, Homo sapien
cagatttgccttgtacttaaaagta

SEQ ID NO: 5680931 - DNA, 25 bp, Homo sapien
cttttaagtacaaggcaaatctgcc

SEQ ID NO: 5680932 - DNA, 25 bp, Homo sapien
taagtacaaggcaaatctgccagat

SEQ ID NO: 5680933 - DNA, 25 bp, Homo sapien
gtacaaggcaaatctgccagatgag

SEQ ID NO: 5680934 - DNA, 25 bp, Homo sapien
cagatgagaaaaagcttaggctggg

SEQ ID NO: 5680935 - DNA, 25 bp, Homo sapien
tacttttaagtacaaggcaaatctg

SEQ ID NO: 5680936 - DNA, 25 bp, Homo sapien
ttaagtacaaggcaaatctgccaga

SEQ ID NO: 5680937 - DNA, 25 bp, Homo sapien
cgcctcccggaatcacgccatcctc

SEQ ID NO: 5680938 - DNA, 25 bp, Homo sapien
ccgcctcccggaatcacgccatcct

SEQ ID NO: 5680939 - DNA, 25 bp, Homo sapien
ggaatcacgccatcctcctgcctca

SEQ ID NO: 5680940 - DNA, 25 bp, Homo sapien
ctcccggaatcacgccatcctcctg

SEQ ID NO: 5680941 - DNA, 25 bp, Homo sapien
ccggaatcacgccatcctcctgcct

SEQ ID NO: 5680942 - DNA, 25 bp, Homo sapien
gcctcccggaatcacgccatcctcc

SEQ ID NO: 5680943 - DNA, 25 bp, Homo sapien
caggaggatggcgtgattccgggag

SEQ ID NO: 5680944 - DNA, 25 bp, Homo sapien
aggcaggaggatggcgtgattccgg

SEQ ID NO: 5680945 - DNA, 25 bp, Homo sapien
tgaggcaggaggatggcgtgattcc

SEQ ID NO: 5680946 - DNA, 25 bp, Homo sapien
gaggatggcgtgattccgggaggcg

SEQ ID NO: 5680947 - DNA, 25 bp, Homo sapien
aggatggcgtgattccgggaggcgg

SEQ ID NO: 5680948 - DNA, 25 bp, Homo sapien
ggaggatggcgtgattccgggaggc

SEQ ID NO: 5680949 - DNA, 25 bp, Homo sapien
gactgcttttaactgggactcttcg

SEQ ID NO: 5680950 - DNA, 25 bp, Homo sapien
aaactaattgtttcaaggctctgag

SEQ ID NO: 5680951 - DNA, 25 bp, Homo sapien
cgtctttgtgacagcggggcagccc

SEQ ID NO: 5680952 - DNA, 25 bp, Homo sapien
taactgggactcttcgtctttgtga

SEQ ID NO: 5680953 - DNA, 25 bp, Homo sapien
ttcaaggctctgagtaaagactgct

SEQ ID NO: 5680954 - DNA, 25 bp, Homo sapien
taaagactgcttttaactgggactc

SEQ ID NO: 5680955 - DNA, 25 bp, Homo sapien
cgaagagtcccagttaaaagcagtc

SEQ ID NO: 5680956 - DNA, 25 bp, Homo sapien
ctgccccgctgtcacaaagacgaag

SEQ ID NO: 5680957 - DNA, 25 bp, Homo sapien
gcagtctttactcagagccttgaaa

SEQ ID NO: 5680958 - DNA, 25 bp, Homo sapien
taaaagcagtctttactcagagcct

SEQ ID NO: 5680959 - DNA, 25 bp, Homo sapien
tcacaaagacgaagagtcccagtta

SEQ ID NO: 5680960 - DNA, 25 bp, Homo sapien
gagccttgaaacaattagtttacag

SEQ ID NO: 5680961 - DNA, 25 bp, Homo sapien
ttgtctttaactccgatggctgcag

SEQ ID NO: 5680962 - DNA, 25 bp, Homo sapien
catttgtctttaactccgatggctg

SEQ ID NO: 5680963 - DNA, 25 bp, Homo sapien
gtctttaactccgatggctgcagga

SEQ ID NO: 5680964 - DNA, 25 bp, Homo sapien
taagatgcatttgtctttaactccg

SEQ ID NO: 5680965 - DNA, 25 bp, Homo sapien
tgtgtagtattgtccatctctctga

SEQ ID NO: 5680966 - DNA, 25 bp, Homo sapien
gatgcatttgtctttaactccgatg

SEQ ID NO: 5680967 - DNA, 25 bp, Homo sapien
gcagccatcggagttaaagacaaat

SEQ ID NO: 5680968 - DNA, 25 bp, Homo sapien
gccatcggagttaaagacaaatgca

SEQ ID NO: 5680969 - DNA, 25 bp, Homo sapien
gtcagagagatggacaatactacac

SEQ ID NO: 5680970 - DNA, 25 bp, Homo sapien
tcggagttaaagacaaatgcatctt

SEQ ID NO: 5680971 - DNA, 25 bp, Homo sapien
tcctgcagccatcggagttaaagac

SEQ ID NO: 5680972 - DNA, 25 bp, Homo sapien
tcagagagatggacaatactacaca

SEQ ID NO: 5680973 - DNA, 25 bp, Homo sapien
aaattagctgtgcgtggtggtgggc

SEQ ID NO: 5680974 - DNA, 25 bp, Homo sapien
ggaggttgagtcaggagaatggtgt

SEQ ID NO: 5680975 - DNA, 25 bp, Homo sapien
aggaggttgagtcaggagaatggtg

SEQ ID NO: 5680976 - DNA, 25 bp, Homo sapien
aaaattagctgtgcgtggtggtggg

SEQ ID NO: 5680977 - DNA, 25 bp, Homo sapien
acaccattctcctgactcaacctcc

SEQ ID NO: 5680978 - DNA, 25 bp, Homo sapien
gcccaccaccacgcacagctaattt

SEQ ID NO: 5680979 - DNA, 25 bp, Homo sapien
cccaccaccacgcacagctaatttt

SEQ ID NO: 5680980 - DNA, 25 bp, Homo sapien
caccattctcctgactcaacctcct

SEQ ID NO: 5680981 - DNA, 25 bp, Homo sapien
cattggctaggtgcttggtacaagg

SEQ ID NO: 5680982 - DNA, 25 bp, Homo sapien
actttagactgataatcagctcaca

SEQ ID NO: 5680983 - DNA, 25 bp, Homo sapien
tgcttggtacaagggcacactgtcc

SEQ ID NO: 5680984 - DNA, 25 bp, Homo sapien
cctgagggagggaaactttagactg

SEQ ID NO: 5680985 - DNA, 25 bp, Homo sapien
tatccattggctaggtgcttggtac

SEQ ID NO: 5680986 - DNA, 25 bp, Homo sapien
gggaaactttagactgataatcagc

SEQ ID NO: 5680987 - DNA, 25 bp, Homo sapien
ccttgtaccaagcacctagccaatg

SEQ ID NO: 5680988 - DNA, 25 bp, Homo sapien
cagtctaaagtttccctccctcagg

SEQ ID NO: 5680989 - DNA, 25 bp, Homo sapien
gattatcagtctaaagtttccctcc

SEQ ID NO: 5680990 - DNA, 25 bp, Homo sapien
tgtgagctgattatcagtctaaagt

SEQ ID NO: 5680991 - DNA, 25 bp, Homo sapien
ggacagtgtgcccttgtaccaagca

SEQ ID NO: 5680992 - DNA, 25 bp, Homo sapien
tgtaccaagcacctagccaatggat

SEQ ID NO: 5680993 - DNA, 25 bp, Homo sapien
acatgcctcagggtgttgaagggct

SEQ ID NO: 5680994 - DNA, 25 bp, Homo sapien
ccacatgcctcagggtgttgaaggg

SEQ ID NO: 5680995 - DNA, 25 bp, Homo sapien
cccacatgcctcagggtgttgaagg

SEQ ID NO: 5680996 - DNA, 25 bp, Homo sapien
cacatgcctcagggtgttgaagggc

SEQ ID NO: 5680997 - DNA, 25 bp, Homo sapien
acccacatgcctcagggtgttgaag

SEQ ID NO: 5680998 - DNA, 25 bp, Homo sapien
catgcctcagggtgttgaagggctg

SEQ ID NO: 5680999 - DNA, 25 bp, Homo sapien
cccttcaacaccctgaggcatgtgg

SEQ ID NO: 5681000 - DNA, 25 bp, Homo sapien
agcccttcaacaccctgaggcatgt

SEQ ID NO: 5681001 - DNA, 25 bp, Homo sapien
cagcccttcaacaccctgaggcatg

SEQ ID NO: 5681002 - DNA, 25 bp, Homo sapien
cttcaacaccctgaggcatgtgggt

SEQ ID NO: 5681003 - DNA, 25 bp, Homo sapien
gcccttcaacaccctgaggcatgtg

SEQ ID NO: 5681004 - DNA, 25 bp, Homo sapien
ccttcaacaccctgaggcatgtggg

SEQ ID NO: 5681005 - DNA, 25 bp, Homo sapien
taggtctcacacagggaccatgccc

SEQ ID NO: 5681006 - DNA, 25 bp, Homo sapien
tattagttaggtctcacacagggac

SEQ ID NO: 5681007 - DNA, 25 bp, Homo sapien
ccattttggtattagttaggtctca

SEQ ID NO: 5681008 - DNA, 25 bp, Homo sapien
ggaccatgccctgttgatttgccct

SEQ ID NO: 5681009 - DNA, 25 bp, Homo sapien
tgatgcactttctaaatgtgtggct

SEQ ID NO: 5681010 - DNA, 25 bp, Homo sapien
catgccctgttgatttgcccttggc

SEQ ID NO: 5681011 - DNA, 25 bp, Homo sapien
ggccaagggcaaatcaacagggcat

SEQ ID NO: 5681012 - DNA, 25 bp, Homo sapien
gccacacatttagaaagtgcatcac

SEQ ID NO: 5681013 - DNA, 25 bp, Homo sapien
gagacctaactaataccaaaatgga

SEQ ID NO: 5681014 - DNA, 25 bp, Homo sapien
ccctgtgtgagacctaactaatacc

SEQ ID NO: 5681015 - DNA, 25 bp, Homo sapien
ggcaaatcaacagggcatggtccct

SEQ ID NO: 5681016 - DNA, 25 bp, Homo sapien
ggcatggtccctgtgtgagacctaa

SEQ ID NO: 5681017 - DNA, 25 bp, Homo sapien
tgtgacgagcctgccacccacatgg

SEQ ID NO: 5681018 - DNA, 25 bp, Homo sapien
tttgtgacgagcctgccacccacat

SEQ ID NO: 5681019 - DNA, 25 bp, Homo sapien
tacacaattcttttgtgacgagcct

SEQ ID NO: 5681020 - DNA, 25 bp, Homo sapien
ttcttttgtgacgagcctgccaccc

SEQ ID NO: 5681021 - DNA, 25 bp, Homo sapien
tctgcctctcttatttacacaattc

SEQ ID NO: 5681022 - DNA, 25 bp, Homo sapien
caattcttttgtgacgagcctgcca

SEQ ID NO: 5681023 - DNA, 25 bp, Homo sapien
ggtggcaggctcgtcacaaaagaat

SEQ ID NO: 5681024 - DNA, 25 bp, Homo sapien
tgggtggcaggctcgtcacaaaaga

SEQ ID NO: 5681025 - DNA, 25 bp, Homo sapien
aagaattgtgtaaataagagaggca

SEQ ID NO: 5681026 - DNA, 25 bp, Homo sapien
ccatgtgggtggcaggctcgtcaca

SEQ ID NO: 5681027 - DNA, 25 bp, Homo sapien
ggcaggctcgtcacaaaagaattgt

SEQ ID NO: 5681028 - DNA, 25 bp, Homo sapien
gaattgtgtaaataagagaggcaga

SEQ ID NO: 5681029 - DNA, 25 bp, Homo sapien
tcttggatccgtagcctcagaatgg

SEQ ID NO: 5681030 - DNA, 25 bp, Homo sapien
gagcctcttggatccgtagcctcag

SEQ ID NO: 5681031 - DNA, 25 bp, Homo sapien
catggagcctcttggatccgtagcc

SEQ ID NO: 5681032 - DNA, 25 bp, Homo sapien
ccaagaaggtcagtcctagactcat

SEQ ID NO: 5681033 - DNA, 25 bp, Homo sapien
tccgtagcctcagaatggattcttt

SEQ ID NO: 5681034 - DNA, 25 bp, Homo sapien
aaggtcagtcctagactcatggagc

SEQ ID NO: 5681035 - DNA, 25 bp, Homo sapien
tgaggctacggatccaagaggctcc

SEQ ID NO: 5681036 - DNA, 25 bp, Homo sapien
ggctacggatccaagaggctccatg

SEQ ID NO: 5681037 - DNA, 25 bp, Homo sapien
taaagaatccattctgaggctacgg

SEQ ID NO: 5681038 - DNA, 25 bp, Homo sapien
tccattctgaggctacggatccaag

SEQ ID NO: 5681039 - DNA, 25 bp, Homo sapien
gctccatgagtctaggactgacctt

SEQ ID NO: 5681040 - DNA, 25 bp, Homo sapien
catgagtctaggactgaccttcttg

SEQ ID NO: 5681041 - DNA, 25 bp, Homo sapien
tggattaccccatctatgacgtgct

SEQ ID NO: 5681042 - DNA, 25 bp, Homo sapien
gcttcagatggtgggccacgccaac

SEQ ID NO: 5681043 - DNA, 25 bp, Homo sapien
gggccacgccaaccgccctttgcag

SEQ ID NO: 5681044 - DNA, 25 bp, Homo sapien
gcgctgtgtcatcatgtgtcagggc

SEQ ID NO: 5681045 - DNA, 25 bp, Homo sapien
gtggattaccccatctatgacgtgc

SEQ ID NO: 5681046 - DNA, 25 bp, Homo sapien
cctttgcaggacgatgaggggcgct

SEQ ID NO: 5681047 - DNA, 25 bp, Homo sapien
tgacacatgatgacacagcgcccct

SEQ ID NO: 5681048 - DNA, 25 bp, Homo sapien
gttggcgtggcccaccatctgaagc

SEQ ID NO: 5681049 - DNA, 25 bp, Homo sapien
gcgcccctcatcgtcctgcaaaggg

SEQ ID NO: 5681050 - DNA, 25 bp, Homo sapien
tgcaaagggcggttggcgtggccca

SEQ ID NO: 5681051 - DNA, 25 bp, Homo sapien
gcacgtcatagatggggtaatccac

SEQ ID NO: 5681052 - DNA, 25 bp, Homo sapien
gccctgacacatgatgacacagcgc

SEQ ID NO: 5681053 - DNA, 25 bp, Homo sapien
gcaacagagtggtaccccgtctcaa

SEQ ID NO: 5681054 - DNA, 25 bp, Homo sapien
caacagagtggtaccccgtctcaaa

SEQ ID NO: 5681055 - DNA, 25 bp, Homo sapien
gggcaacagagtggtaccccgtctc

SEQ ID NO: 5681056 - DNA, 25 bp, Homo sapien
gagacggggtaccactctgttgccc

SEQ ID NO: 5681057 - DNA, 25 bp, Homo sapien
tttgagacggggtaccactctgttg

SEQ ID NO: 5681058 - DNA, 25 bp, Homo sapien
ttgagacggggtaccactctgttgc

SEQ ID NO: 5681059 - DNA, 25 bp, Homo sapien
ggtgcctgttattcaagccactcac

SEQ ID NO: 5681060 - DNA, 25 bp, Homo sapien
atggcaggtgcctgttattcaagcc

SEQ ID NO: 5681061 - DNA, 25 bp, Homo sapien
gtgcctgttattcaagccactcacc

SEQ ID NO: 5681062 - DNA, 25 bp, Homo sapien
ggcttgaataacaggcacctgccat

SEQ ID NO: 5681063 - DNA, 25 bp, Homo sapien
gtgagtggcttgaataacaggcacc

SEQ ID NO: 5681064 - DNA, 25 bp, Homo sapien
ggtgagtggcttgaataacaggcac

SEQ ID NO: 5681065 - DNA, 25 bp, Homo sapien
ggtgcctgttattcaagccactcac

SEQ ID NO: 5681066 - DNA, 25 bp, Homo sapien
tcaagccactcacctgtaattcaag

SEQ ID NO: 5681067 - DNA, 25 bp, Homo sapien
atggcaggtgcctgttattcaagcc

SEQ ID NO: 5681068 - DNA, 25 bp, Homo sapien
ggcaggtgcctgttattcaagccac

SEQ ID NO: 5681069 - DNA, 25 bp, Homo sapien
actcacctgtaattcaagccacttg

SEQ ID NO: 5681070 - DNA, 25 bp, Homo sapien
gcctgttattcaagccactcacctg

SEQ ID NO: 5681071 - DNA, 25 bp, Homo sapien
gagatcccaccattgcactctagcc

SEQ ID NO: 5681072 - DNA, 25 bp, Homo sapien
tgagatcccaccattgcactctagc

SEQ ID NO: 5681073 - DNA, 25 bp, Homo sapien
agatcccaccattgcactctagcct

SEQ ID NO: 5681074 - DNA, 25 bp, Homo sapien
ggctacagtgagctgagatcccacc

SEQ ID NO: 5681075 - DNA, 25 bp, Homo sapien
gatcccaccattgcactctagcctg

SEQ ID NO: 5681076 - DNA, 25 bp, Homo sapien
ctacagtgagctgagatcccaccat

SEQ ID NO: 5681077 - DNA, 25 bp, Homo sapien
ggctagagtgcaatggtgggatctc

SEQ ID NO: 5681078 - DNA, 25 bp, Homo sapien
gctagagtgcaatggtgggatctca

SEQ ID NO: 5681079 - DNA, 25 bp, Homo sapien
aggctagagtgcaatggtgggatct

SEQ ID NO: 5681080 - DNA, 25 bp, Homo sapien
caggctagagtgcaatggtgggatc

SEQ ID NO: 5681081 - DNA, 25 bp, Homo sapien
atggtgggatctcagctcactgtag

SEQ ID NO: 5681082 - DNA, 25 bp, Homo sapien
ggtgggatctcagctcactgtagcc

SEQ ID NO: 5681083 - DNA, 25 bp, Homo sapien
agaccagtgtggctaacatagtgaa

SEQ ID NO: 5681084 - DNA, 25 bp, Homo sapien
aagaccagtgtggctaacatagtga

SEQ ID NO: 5681085 - DNA, 25 bp, Homo sapien
ccagtgtggctaacatagtgaaacc

SEQ ID NO: 5681086 - DNA, 25 bp, Homo sapien
gaccagtgtggctaacatagtgaaa

SEQ ID NO: 5681087 - DNA, 25 bp, Homo sapien
accagtgtggctaacatagtgaaac

SEQ ID NO: 5681088 - DNA, 25 bp, Homo sapien
ttcactatgttagccacactggtct

SEQ ID NO: 5681089 - DNA, 25 bp, Homo sapien
tttcactatgttagccacactggtc

SEQ ID NO: 5681090 - DNA, 25 bp, Homo sapien
tcactatgttagccacactggtctt

SEQ ID NO: 5681091 - DNA, 25 bp, Homo sapien
ggtttcactatgttagccacactgg

SEQ ID NO: 5681092 - DNA, 25 bp, Homo sapien
gtttcactatgttagccacactggt

SEQ ID NO: 5681093 - DNA, 25 bp, Homo sapien
tatgccttacgggactaagtggacc

SEQ ID NO: 5681094 - DNA, 25 bp, Homo sapien
gactaagtggacctcatttgcttca

SEQ ID NO: 5681095 - DNA, 25 bp, Homo sapien
tgttctggagcattcatgattaccg

SEQ ID NO: 5681096 - DNA, 25 bp, Homo sapien
agctagacaaaacgggccactgaga

SEQ ID NO: 5681097 - DNA, 25 bp, Homo sapien
catgattaccgtatgccttacggga

SEQ ID NO: 5681098 - DNA, 25 bp, Homo sapien
gcttcagagctagacaaaacgggcc

SEQ ID NO: 5681099 - DNA, 25 bp, Homo sapien
cccgttttgtctagctctgaagcaa

SEQ ID NO: 5681100 - DNA, 25 bp, Homo sapien
tcccgtaaggcatacggtaatcatg

SEQ ID NO: 5681101 - DNA, 25 bp, Homo sapien
tgaagcaaatgaggtccacttagtc

SEQ ID NO: 5681102 - DNA, 25 bp, Homo sapien
ggtaatcatgaatgctccagaacat

SEQ ID NO: 5681103 - DNA, 25 bp, Homo sapien
ggtccacttagtcccgtaaggcata

SEQ ID NO: 5681104 - DNA, 25 bp, Homo sapien
tctcagtggcccgttttgtctagct

SEQ ID NO: 5681105 - DNA, 25 bp, Homo sapien
aaagaagggtagataacaggagagt

SEQ ID NO: 5681106 - DNA, 25 bp, Homo sapien
gattgattacaacaggaaagaaggg

SEQ ID NO: 5681107 - DNA, 25 bp, Homo sapien
ggagagtttaaagataagtgtcatt

SEQ ID NO: 5681108 - DNA, 25 bp, Homo sapien
catcgaaggcataactgattgatta

SEQ ID NO: 5681109 - DNA, 25 bp, Homo sapien
gtgtcattagtaatatactctgtgt

SEQ ID NO: 5681110 - DNA, 25 bp, Homo sapien
tgattacaacaggaaagaagggtag

SEQ ID NO: 5681111 - DNA, 25 bp, Homo sapien
tgtaatcaatcagttatgccttcga

SEQ ID NO: 5681112 - DNA, 25 bp, Homo sapien
tacccttctttcctgttgtaatcaa

SEQ ID NO: 5681113 - DNA, 25 bp, Homo sapien
taatcaatcagttatgccttcgatg

SEQ ID NO: 5681114 - DNA, 25 bp, Homo sapien
taatgacacttatctttaaactctc

SEQ ID NO: 5681115 - DNA, 25 bp, Homo sapien
acacagagtatattactaatgacac

SEQ ID NO: 5681116 - DNA, 25 bp, Homo sapien
actctcctgttatctacccttcttt

SEQ ID NO: 5681117 - DNA, 25 bp, Homo sapien
ccaggtgtgcttacacttaccagtt

SEQ ID NO: 5681118 - DNA, 25 bp, Homo sapien
accagtttgacattggttatttgtc

SEQ ID NO: 5681119 - DNA, 25 bp, Homo sapien
tattccaggtgtgcttacacttacc

SEQ ID NO: 5681120 - DNA, 25 bp, Homo sapien
tacacttaccagtttgacattggtt

SEQ ID NO: 5681121 - DNA, 25 bp, Homo sapien
actattccaggtgtgcttacactta

SEQ ID NO: 5681122 - DNA, 25 bp, Homo sapien
gttatttgtcttatgattgtgtctg

SEQ ID NO: 5681123 - DNA, 25 bp, Homo sapien
gcttaagtcatcatctaacattgtt

SEQ ID NO: 5681124 - DNA, 25 bp, Homo sapien
tgtttgggtaactattccaggtgtg

SEQ ID NO: 5681125 - DNA, 25 bp, Homo sapien
cattgtttgggtaactattccaggt

SEQ ID NO: 5681126 - DNA, 25 bp, Homo sapien
aacattgtttgggtaactattccag

SEQ ID NO: 5681127 - DNA, 25 bp, Homo sapien
catcatctaacattgtttgggtaac

SEQ ID NO: 5681128 - DNA, 25 bp, Homo sapien
gcgcttaagtcatcatctaacattg

SEQ ID NO: 5681129 - DNA, 25 bp, Homo sapien
cacacctggaatagttacccaaaca

SEQ ID NO: 5681130 - DNA, 25 bp, Homo sapien
tacccaaacaatgttagatgatgac

SEQ ID NO: 5681131 - DNA, 25 bp, Homo sapien
caaacaatgttagatgatgacttaa

SEQ ID NO: 5681132 - DNA, 25 bp, Homo sapien
caatgttagatgatgacttaagcgc

SEQ ID NO: 5681133 - DNA, 25 bp, Homo sapien
cctggaatagttacccaaacaatgt

SEQ ID NO: 5681134 - DNA, 25 bp, Homo sapien
gaatagttacccaaacaatgttaga

SEQ ID NO: 5681135 - DNA, 25 bp, Homo sapien
cagacacaatcataagacaaataac

SEQ ID NO: 5681136 - DNA, 25 bp, Homo sapien
taaccaatgtcaaactggtaagtgt

SEQ ID NO: 5681137 - DNA, 25 bp, Homo sapien
taagtgtaagcacacctggaatagt

SEQ ID NO: 5681138 - DNA, 25 bp, Homo sapien
gacacaatcataagacaaataacca

SEQ ID NO: 5681139 - DNA, 25 bp, Homo sapien
gacaaataaccaatgtcaaactggt

SEQ ID NO: 5681140 - DNA, 25 bp, Homo sapien
aactggtaagtgtaagcacacctgg

SEQ ID NO: 5681141 - DNA, 25 bp, Homo sapien
gctaaatgcctaggcaggacaatgg

SEQ ID NO: 5681142 - DNA, 25 bp, Homo sapien
ggagcctgtcagcatttactataca

SEQ ID NO: 5681143 - DNA, 25 bp, Homo sapien
gagctaaatgcctaggcaggacaat

SEQ ID NO: 5681144 - DNA, 25 bp, Homo sapien
acattgctactgttccacacacatg

SEQ ID NO: 5681145 - DNA, 25 bp, Homo sapien
gggagcctgtcagcatttactatac

SEQ ID NO: 5681146 - DNA, 25 bp, Homo sapien
catgaggacactagagtggatacat

SEQ ID NO: 5681147 - DNA, 25 bp, Homo sapien
atgtatccactctagtgtcctcatg

SEQ ID NO: 5681148 - DNA, 25 bp, Homo sapien
tgtatagtaaatgctgacaggctcc

SEQ ID NO: 5681149 - DNA, 25 bp, Homo sapien
gtatagtaaatgctgacaggctccc

SEQ ID NO: 5681150 - DNA, 25 bp, Homo sapien
cattgtcctgcctaggcatttagct

SEQ ID NO: 5681151 - DNA, 25 bp, Homo sapien
tgtgtgtggaacagtagcaatgtat

SEQ ID NO: 5681152 - DNA, 25 bp, Homo sapien
catgtgtgtggaacagtagcaatgt

SEQ ID NO: 5681153 - DNA, 25 bp, Homo sapien
ttttgcaagattgtggggactaccg

SEQ ID NO: 5681154 - DNA, 25 bp, Homo sapien
ccttatctctaccttggaagtaaca

SEQ ID NO: 5681155 - DNA, 25 bp, Homo sapien
tctctaccttggaagtaacatctgt

SEQ ID NO: 5681156 - DNA, 25 bp, Homo sapien
aggttccttatctctaccttggaag

SEQ ID NO: 5681157 - DNA, 25 bp, Homo sapien
tctaccttggaagtaacatctgttt

SEQ ID NO: 5681158 - DNA, 25 bp, Homo sapien
tatctctaccttggaagtaacatct

SEQ ID NO: 5681159 - DNA, 25 bp, Homo sapien
tgttacttccaaggtagagataagg

SEQ ID NO: 5681160 - DNA, 25 bp, Homo sapien
cggtagtccccacaatcttgcaaaa

SEQ ID NO: 5681161 - DNA, 25 bp, Homo sapien
aaacagatgttacttccaaggtaga

SEQ ID NO: 5681162 - DNA, 25 bp, Homo sapien
tagtccccacaatcttgcaaaacag

SEQ ID NO: 5681163 - DNA, 25 bp, Homo sapien
cttccaaggtagagataaggaacct

SEQ ID NO: 5681164 - DNA, 25 bp, Homo sapien
cagatgttacttccaaggtagagat

SEQ ID NO: 5681165 - DNA, 25 bp, Homo sapien
tgtattgagaacttgcatactttta

SEQ ID NO: 5681166 - DNA, 25 bp, Homo sapien
cagcctatgaattcagtttatgatg

SEQ ID NO: 5681167 - DNA, 25 bp, Homo sapien
ttttgtattgagaacttgcatactt

SEQ ID NO: 5681168 - DNA, 25 bp, Homo sapien
gcctatgaattcagtttatgatgta

SEQ ID NO: 5681169 - DNA, 25 bp, Homo sapien
tgcccagcctatgaattcagtttat

SEQ ID NO: 5681170 - DNA, 25 bp, Homo sapien
cccagcctatgaattcagtttatga

SEQ ID NO: 5681171 - DNA, 25 bp, Homo sapien
tacatcataaactgaattcataggc

SEQ ID NO: 5681172 - DNA, 25 bp, Homo sapien
aagtatgcaagttctcaatacaaaa

SEQ ID NO: 5681173 - DNA, 25 bp, Homo sapien
catcataaactgaattcataggctg

SEQ ID NO: 5681174 - DNA, 25 bp, Homo sapien
taaaagtatgcaagttctcaataca

SEQ ID NO: 5681175 - DNA, 25 bp, Homo sapien
cataaactgaattcataggctgggc

SEQ ID NO: 5681176 - DNA, 25 bp, Homo sapien
tcataaactgaattcataggctggg

SEQ ID NO: 5681177 - DNA, 25 bp, Homo sapien
gcatttaaccattacttacataata

SEQ ID NO: 5681178 - DNA, 25 bp, Homo sapien
tgtgcatttaaccattacttacata

SEQ ID NO: 5681179 - DNA, 25 bp, Homo sapien
cctgtgcatttaaccattacttaca

SEQ ID NO: 5681180 - DNA, 25 bp, Homo sapien
tcctgtgcatttaaccattacttac

SEQ ID NO: 5681181 - DNA, 25 bp, Homo sapien
gtgcatttaaccattacttacataa

SEQ ID NO: 5681182 - DNA, 25 bp, Homo sapien
ctgtgcatttaaccattacttacat

SEQ ID NO: 5681183 - DNA, 25 bp, Homo sapien
atgtaagtaatggttaaatgcacag

SEQ ID NO: 5681184 - DNA, 25 bp, Homo sapien
tattatgtaagtaatggttaaatgc

SEQ ID NO: 5681185 - DNA, 25 bp, Homo sapien
ttatgtaagtaatggttaaatgcac

SEQ ID NO: 5681186 - DNA, 25 bp, Homo sapien
tgtaagtaatggttaaatgcacagg

SEQ ID NO: 5681187 - DNA, 25 bp, Homo sapien
tatgtaagtaatggttaaatgcaca

SEQ ID NO: 5681188 - DNA, 25 bp, Homo sapien
gtaagtaatggttaaatgcacagga

SEQ ID NO: 5681189 - DNA, 25 bp, Homo sapien
tacataatatttgcacatctaattg

SEQ ID NO: 5681190 - DNA, 25 bp, Homo sapien
gcacatctaattgttttacagttga

SEQ ID NO: 5681191 - DNA, 25 bp, Homo sapien
tgaaatgtgtgtagatgctgctaac

SEQ ID NO: 5681192 - DNA, 25 bp, Homo sapien
tcctgtgcatttaaccattacttac

SEQ ID NO: 5681193 - DNA, 25 bp, Homo sapien
gtgcatttaaccattacttacataa

SEQ ID NO: 5681194 - DNA, 25 bp, Homo sapien
tagatgctgctaactagttttgggt

SEQ ID NO: 5681195 - DNA, 25 bp, Homo sapien
gttagcagcatctacacacatttca

SEQ ID NO: 5681196 - DNA, 25 bp, Homo sapien
taaaacccaaaactagttagcagca

SEQ ID NO: 5681197 - DNA, 25 bp, Homo sapien
tcaactgtaaaacaattagatgtgc

SEQ ID NO: 5681198 - DNA, 25 bp, Homo sapien
caattagatgtgcaaatattatgta

SEQ ID NO: 5681199 - DNA, 25 bp, Homo sapien
ttatgtaagtaatggttaaatgcac

SEQ ID NO: 5681200 - DNA, 25 bp, Homo sapien
gtaagtaatggttaaatgcacagga

SEQ ID NO: 5681201 - DNA, 25 bp, Homo sapien
tcatagctggctacaaccttgaact

SEQ ID NO: 5681202 - DNA, 25 bp, Homo sapien
attggtgcgatcatagctggctaca

SEQ ID NO: 5681203 - DNA, 25 bp, Homo sapien
ggctacaaccttgaactccagagtt

SEQ ID NO: 5681204 - DNA, 25 bp, Homo sapien
gcgatcatagctggctacaaccttg

SEQ ID NO: 5681205 - DNA, 25 bp, Homo sapien
gaactccagagttcaagtgttcctc

SEQ ID NO: 5681206 - DNA, 25 bp, Homo sapien
tcaagtgttcctcctacatcagcct

SEQ ID NO: 5681207 - DNA, 25 bp, Homo sapien
aactctggagttcaaggttgtagcc

SEQ ID NO: 5681208 - DNA, 25 bp, Homo sapien
gagttcaaggttgtagccagctatg

SEQ ID NO: 5681209 - DNA, 25 bp, Homo sapien
tgtagccagctatgatcgcaccaat

SEQ ID NO: 5681210 - DNA, 25 bp, Homo sapien
aggctgatgtaggaggaacacttga

SEQ ID NO: 5681211 - DNA, 25 bp, Homo sapien
aacacttgaactctggagttcaagg

SEQ ID NO: 5681212 - DNA, 25 bp, Homo sapien
caaggttgtagccagctatgatcgc

SEQ ID NO: 5681213 - DNA, 25 bp, Homo sapien
cttcttaatgtggaaggcgagaaag

SEQ ID NO: 5681214 - DNA, 25 bp, Homo sapien
ttcttaatgtggaaggcgagaaaga

SEQ ID NO: 5681215 - DNA, 25 bp, Homo sapien
cttaatgtggaaggcgagaaagaag

SEQ ID NO: 5681216 - DNA, 25 bp, Homo sapien
tcttaatgtggaaggcgagaaagaa

SEQ ID NO: 5681217 - DNA, 25 bp, Homo sapien
tctttctcgccttccacattaagaa

SEQ ID NO: 5681218 - DNA, 25 bp, Homo sapien
cttctttctcgccttccacattaag

SEQ ID NO: 5681219 - DNA, 25 bp, Homo sapien
ttctttctcgccttccacattaaga

SEQ ID NO: 5681220 - DNA, 25 bp, Homo sapien
ctttctcgccttccacattaagaag

SEQ ID NO: 5681221 - DNA, 25 bp, Homo sapien
aacagtgatttaaaacttcttaatg

SEQ ID NO: 5681222 - DNA, 25 bp, Homo sapien
cttcttaatgtggaaggcgagaaag

SEQ ID NO: 5681223 - DNA, 25 bp, Homo sapien
tgtgcttttaaaaagaggttcatcc

SEQ ID NO: 5681224 - DNA, 25 bp, Homo sapien
aatgtggaaggcgagaaagaagata

SEQ ID NO: 5681225 - DNA, 25 bp, Homo sapien
cttaatgtggaaggcgagaaagaag

SEQ ID NO: 5681226 - DNA, 25 bp, Homo sapien
ttttctggagaatgtatcttgtgct

SEQ ID NO: 5681227 - DNA, 25 bp, Homo sapien
cattaagaagttttaaatcactgtt

SEQ ID NO: 5681228 - DNA, 25 bp, Homo sapien
taaaagcacaagatacattctccag

SEQ ID NO: 5681229 - DNA, 25 bp, Homo sapien
cttctttctcgccttccacattaag

SEQ ID NO: 5681230 - DNA, 25 bp, Homo sapien
agcacaagatacattctccagaaaa

SEQ ID NO: 5681231 - DNA, 25 bp, Homo sapien
ggatgaacctctttttaaaagcaca

SEQ ID NO: 5681232 - DNA, 25 bp, Homo sapien
ctttctcgccttccacattaagaag

SEQ ID NO: 5681233 - DNA, 25 bp, Homo sapien
ccaagtgtgagtttctaagctgcct

SEQ ID NO: 5681234 - DNA, 25 bp, Homo sapien
tgagccaccgcttctggccaagtgt

SEQ ID NO: 5681235 - DNA, 25 bp, Homo sapien
gccaccgcttctggccaagtgtgag

SEQ ID NO: 5681236 - DNA, 25 bp, Homo sapien
tctggccaagtgtgagtttctaagc

SEQ ID NO: 5681237 - DNA, 25 bp, Homo sapien
gtgtgagtttctaagctgccttcat

SEQ ID NO: 5681238 - DNA, 25 bp, Homo sapien
ccgcttctggccaagtgtgagtttc

SEQ ID NO: 5681239 - DNA, 25 bp, Homo sapien
acacttggccagaagcggtggctca

SEQ ID NO: 5681240 - DNA, 25 bp, Homo sapien
gaaactcacacttggccagaagcgg

SEQ ID NO: 5681241 - DNA, 25 bp, Homo sapien
tcacacttggccagaagcggtggct

SEQ ID NO: 5681242 - DNA, 25 bp, Homo sapien
ggcagcttagaaactcacacttggc

SEQ ID NO: 5681243 - DNA, 25 bp, Homo sapien
tgaaggcagcttagaaactcacact

SEQ ID NO: 5681244 - DNA, 25 bp, Homo sapien
gcttagaaactcacacttggccaga

SEQ ID NO: 5681245 - DNA, 25 bp, Homo sapien
ccacccagtaagcgtaagtgagttt

SEQ ID NO: 5681246 - DNA, 25 bp, Homo sapien
accacccagtaagcgtaagtgagtt

SEQ ID NO: 5681247 - DNA, 25 bp, Homo sapien
ccagtaagcgtaagtgagtttcttt

SEQ ID NO: 5681248 - DNA, 25 bp, Homo sapien
acccagtaagcgtaagtgagtttct

SEQ ID NO: 5681249 - DNA, 25 bp, Homo sapien
cacccagtaagcgtaagtgagtttc

SEQ ID NO: 5681250 - DNA, 25 bp, Homo sapien
cccagtaagcgtaagtgagtttctt

SEQ ID NO: 5681251 - DNA, 25 bp, Homo sapien
gaaactcacttacgcttactgggtg

SEQ ID NO: 5681252 - DNA, 25 bp, Homo sapien
agaaactcacttacgcttactgggt

SEQ ID NO: 5681253 - DNA, 25 bp, Homo sapien
aagaaactcacttacgcttactggg

SEQ ID NO: 5681254 - DNA, 25 bp, Homo sapien
aaagaaactcacttacgcttactgg

SEQ ID NO: 5681255 - DNA, 25 bp, Homo sapien
aaactcacttacgcttactgggtgg

SEQ ID NO: 5681256 - DNA, 25 bp, Homo sapien
aactcacttacgcttactgggtggt

SEQ ID NO: 5681257 - DNA, 25 bp, Homo sapien
cacacctcactgaagtaatacttta

SEQ ID NO: 5681258 - DNA, 25 bp, Homo sapien
tcactgaagtaatactttataatag

SEQ ID NO: 5681259 - DNA, 25 bp, Homo sapien
caccacacctcactgaagtaatact

SEQ ID NO: 5681260 - DNA, 25 bp, Homo sapien
tgagccaccacacctcactgaagta

SEQ ID NO: 5681261 - DNA, 25 bp, Homo sapien
gccaccacacctcactgaagtaata

SEQ ID NO: 5681262 - DNA, 25 bp, Homo sapien
gagccaccacacctcactgaagtaa

SEQ ID NO: 5681263 - DNA, 25 bp, Homo sapien
tattacttcagtgaggtgtggtggc

SEQ ID NO: 5681264 - DNA, 25 bp, Homo sapien
tataaagtattacttcagtgaggtg

SEQ ID NO: 5681265 - DNA, 25 bp, Homo sapien
tacttcagtgaggtgtggtggctca

SEQ ID NO: 5681266 - DNA, 25 bp, Homo sapien
tattataaagtattacttcagtgag

SEQ ID NO: 5681267 - DNA, 25 bp, Homo sapien
ttacttcagtgaggtgtggtggctc

SEQ ID NO: 5681268 - DNA, 25 bp, Homo sapien
taaagtattacttcagtgaggtgtg

SEQ ID NO: 5681269 - DNA, 25 bp, Homo sapien
catagttttctagtctgaagttata

SEQ ID NO: 5681270 - DNA, 25 bp, Homo sapien
aatgtctacatagttttctagtctg

SEQ ID NO: 5681271 - DNA, 25 bp, Homo sapien
ctacatagttttctagtctgaagtt

SEQ ID NO: 5681272 - DNA, 25 bp, Homo sapien
tagttttctagtctgaagttatata

SEQ ID NO: 5681273 - DNA, 25 bp, Homo sapien
ttccattttaggaatgtctacatag

SEQ ID NO: 5681274 - DNA, 25 bp, Homo sapien
ttttaggaatgtctacatagttttc

SEQ ID NO: 5681275 - DNA, 25 bp, Homo sapien
tcagactagaaaactatgtagacat

SEQ ID NO: 5681276 - DNA, 25 bp, Homo sapien
tataacttcagactagaaaactatg

SEQ ID NO: 5681277 - DNA, 25 bp, Homo sapien
ctatgtagacattcctaaaatggaa

SEQ ID NO: 5681278 - DNA, 25 bp, Homo sapien
aacttcagactagaaaactatgtag

SEQ ID NO: 5681279 - DNA, 25 bp, Homo sapien
tatataacttcagactagaaaacta

SEQ ID NO: 5681280 - DNA, 25 bp, Homo sapien
gaaaactatgtagacattcctaaaa

SEQ ID NO: 5681281 - DNA, 25 bp, Homo sapien
aatttgatgttagtcactgtcaata

SEQ ID NO: 5681282 - DNA, 25 bp, Homo sapien
ttgatgttagtcactgtcaataatt

SEQ ID NO: 5681283 - DNA, 25 bp, Homo sapien
atttgatgttagtcactgtcaataa

SEQ ID NO: 5681284 - DNA, 25 bp, Homo sapien
tttgatgttagtcactgtcaataat

SEQ ID NO: 5681285 - DNA, 25 bp, Homo sapien
gaatttgatgttagtcactgtcaat

SEQ ID NO: 5681286 - DNA, 25 bp, Homo sapien
attattgacagtgactaacatcaaa

SEQ ID NO: 5681287 - DNA, 25 bp, Homo sapien
attgacagtgactaacatcaaattc

SEQ ID NO: 5681288 - DNA, 25 bp, Homo sapien
tattgacagtgactaacatcaaatt

SEQ ID NO: 5681289 - DNA, 25 bp, Homo sapien
aattattgacagtgactaacatcaa

SEQ ID NO: 5681290 - DNA, 25 bp, Homo sapien
ttattgacagtgactaacatcaaat

SEQ ID NO: 5681291 - DNA, 25 bp, Homo sapien
cttggtgagctgaaataagtgacta

SEQ ID NO: 5681292 - DNA, 25 bp, Homo sapien
gtgactaattattttgaagactaga

SEQ ID NO: 5681293 - DNA, 25 bp, Homo sapien
gatgttagtcactgtcaataatttt

SEQ ID NO: 5681294 - DNA, 25 bp, Homo sapien
tattttgaagactagaatttgatgt

SEQ ID NO: 5681295 - DNA, 25 bp, Homo sapien
ttgtagatttgatggcttggtgagc

SEQ ID NO: 5681296 - DNA, 25 bp, Homo sapien
gaatttgatgttagtcactgtcaat

SEQ ID NO: 5681297 - DNA, 25 bp, Homo sapien
tctagtcttcaaaataattagtcac

SEQ ID NO: 5681298 - DNA, 25 bp, Homo sapien
tattgacagtgactaacatcaaatt

SEQ ID NO: 5681299 - DNA, 25 bp, Homo sapien
tataaaattattgacagtgactaac

SEQ ID NO: 5681300 - DNA, 25 bp, Homo sapien
gctcaccaagccatcaaatctacaa

SEQ ID NO: 5681301 - DNA, 25 bp, Homo sapien
taacatcaaattctagtcttcaaaa

SEQ ID NO: 5681302 - DNA, 25 bp, Homo sapien
tagtcacttatttcagctcaccaag

SEQ ID NO: 5681303 - DNA, 25 bp, Homo sapien
gctcaacccggtaggtgcagtgttt

SEQ ID NO: 5681304 - DNA, 25 bp, Homo sapien
caacccggtaggtgcagtgtttatg

SEQ ID NO: 5681305 - DNA, 25 bp, Homo sapien
tccttttttggaagacaatgaagtc

SEQ ID NO: 5681306 - DNA, 25 bp, Homo sapien
ggaagacaatgaagtcttcaccctc

SEQ ID NO: 5681307 - DNA, 25 bp, Homo sapien
gagctcaacccggtaggtgcagtgt

SEQ ID NO: 5681308 - DNA, 25 bp, Homo sapien
acagtccttttttggaagacaatga

SEQ ID NO: 5681309 - DNA, 25 bp, Homo sapien
cagggagcatagtgcatgagctcaa

SEQ ID NO: 5681310 - DNA, 25 bp, Homo sapien
gcagggagcatagtgcatgagctca

SEQ ID NO: 5681311 - DNA, 25 bp, Homo sapien
agggagcatagtgcatgagctcaac

SEQ ID NO: 5681312 - DNA, 25 bp, Homo sapien
gagcatagtgcatgagctcaacccg

SEQ ID NO: 5681313 - DNA, 25 bp, Homo sapien
agcatagtgcatgagctcaacccgg

SEQ ID NO: 5681314 - DNA, 25 bp, Homo sapien
ggagcatagtgcatgagctcaaccc

SEQ ID NO: 5681315 - DNA, 25 bp, Homo sapien
cgggttgagctcatgcactatgctc

SEQ ID NO: 5681316 - DNA, 25 bp, Homo sapien
ttgagctcatgcactatgctccctg

SEQ ID NO: 5681317 - DNA, 25 bp, Homo sapien
gggttgagctcatgcactatgctcc

SEQ ID NO: 5681318 - DNA, 25 bp, Homo sapien
ccgggttgagctcatgcactatgct

SEQ ID NO: 5681319 - DNA, 25 bp, Homo sapien
tgagctcatgcactatgctccctgc

SEQ ID NO: 5681320 - DNA, 25 bp, Homo sapien
ggttgagctcatgcactatgctccc

SEQ ID NO: 5681321 - DNA, 25 bp, Homo sapien
tcattgtcttccaaaaaaggactgt

SEQ ID NO: 5681322 - DNA, 25 bp, Homo sapien
taaacactgcacctaccgggttgag

SEQ ID NO: 5681323 - DNA, 25 bp, Homo sapien
cataaacactgcacctaccgggttg

SEQ ID NO: 5681324 - DNA, 25 bp, Homo sapien
acactgcacctaccgggttgagctc

SEQ ID NO: 5681325 - DNA, 25 bp, Homo sapien
gagggtgaagacttcattgtcttcc

SEQ ID NO: 5681326 - DNA, 25 bp, Homo sapien
gacttcattgtcttccaaaaaagga

SEQ ID NO: 5681327 - DNA, 25 bp, Homo sapien
ctttcctgacttttgacgacctcct

SEQ ID NO: 5681328 - DNA, 25 bp, Homo sapien
tgtgatgtggtagatcgaatattga

SEQ ID NO: 5681329 - DNA, 25 bp, Homo sapien
tgtcctttcctgacttttgacgacc

SEQ ID NO: 5681330 - DNA, 25 bp, Homo sapien
gtggtagatcgaatattgaagtcac

SEQ ID NO: 5681331 - DNA, 25 bp, Homo sapien
cctcctgaaccggttggaggacttg

SEQ ID NO: 5681332 - DNA, 25 bp, Homo sapien
tcctttcctgacttttgacgacctc

SEQ ID NO: 5681333 - DNA, 25 bp, Homo sapien
ggtcgtcaaaagtcaggaaaggaca

SEQ ID NO: 5681334 - DNA, 25 bp, Homo sapien
aggaggtcgtcaaaagtcaggaaag

SEQ ID NO: 5681335 - DNA, 25 bp, Homo sapien
gacttcaatattcgatctaccacat

SEQ ID NO: 5681336 - DNA, 25 bp, Homo sapien
caagtcctccaaccggttcaggagg

SEQ ID NO: 5681337 - DNA, 25 bp, Homo sapien
caatattcgatctaccacatcacaa

SEQ ID NO: 5681338 - DNA, 25 bp, Homo sapien
gtgacttcaatattcgatctaccac

SEQ ID NO: 5681339 - DNA, 25 bp, Homo sapien
ttcccaatgttaaaagccttgctgg

SEQ ID NO: 5681340 - DNA, 25 bp, Homo sapien
ggacagcttcccaatgttaaaagcc

SEQ ID NO: 5681341 - DNA, 25 bp, Homo sapien
cagcttcccaatgttaaaagccttg

SEQ ID NO: 5681342 - DNA, 25 bp, Homo sapien
ccaatgttaaaagccttgctggata

SEQ ID NO: 5681343 - DNA, 25 bp, Homo sapien
gctattgtctcgttcttcaggtaca

SEQ ID NO: 5681344 - DNA, 25 bp, Homo sapien
gagctattgtctcgttcttcaggta

SEQ ID NO: 5681345 - DNA, 25 bp, Homo sapien
gcaaggcttttaacattgggaagct

SEQ ID NO: 5681346 - DNA, 25 bp, Homo sapien
tatccagcaaggcttttaacattgg

SEQ ID NO: 5681347 - DNA, 25 bp, Homo sapien
ggcttttaacattgggaagctgtcc

SEQ ID NO: 5681348 - DNA, 25 bp, Homo sapien
tgtacctgaagaacgagacaatagc

SEQ ID NO: 5681349 - DNA, 25 bp, Homo sapien
tacctgaagaacgagacaatagctc

SEQ ID NO: 5681350 - DNA, 25 bp, Homo sapien
ccagcaaggcttttaacattgggaa

SEQ ID NO: 5681351 - DNA, 25 bp, Homo sapien
agctgagaattaggaggttcttaaa

SEQ ID NO: 5681352 - DNA, 25 bp, Homo sapien
aatataaaactaaactaaagctgag

SEQ ID NO: 5681353 - DNA, 25 bp, Homo sapien
cagaaagaacattggtaaaaatatc

SEQ ID NO: 5681354 - DNA, 25 bp, Homo sapien
ctaaagctgagaattaggaggttct

SEQ ID NO: 5681355 - DNA, 25 bp, Homo sapien
gtatttatccagaaagaacattggt

SEQ ID NO: 5681356 - DNA, 25 bp, Homo sapien
tgtgtatgtgagtgtgtatttatcc

SEQ ID NO: 5681357 - DNA, 25 bp, Homo sapien
ggataaatacacactcacatacaca

SEQ ID NO: 5681358 - DNA, 25 bp, Homo sapien
tttaagaacctcctaattctcagct

SEQ ID NO: 5681359 - DNA, 25 bp, Homo sapien
cagctttagtttagttttatattga

SEQ ID NO: 5681360 - DNA, 25 bp, Homo sapien
gatatttttaccaatgttctttctg

SEQ ID NO: 5681361 - DNA, 25 bp, Homo sapien
caatgttctttctggataaatacac

SEQ ID NO: 5681362 - DNA, 25 bp, Homo sapien
gaacctcctaattctcagctttagt

SEQ ID NO: 5681363 - DNA, 25 bp, Homo sapien
gaccagttttgccaacatggtgaaa

SEQ ID NO: 5681364 - DNA, 25 bp, Homo sapien
tcgagaccagttttgccaacatggt

SEQ ID NO: 5681365 - DNA, 25 bp, Homo sapien
gagatcgagaccagttttgccaaca

SEQ ID NO: 5681366 - DNA, 25 bp, Homo sapien
agaccagttttgccaacatggtgaa

SEQ ID NO: 5681367 - DNA, 25 bp, Homo sapien
actaaatatacaaaaattagccaga

SEQ ID NO: 5681368 - DNA, 25 bp, Homo sapien
atcgagaccagttttgccaacatgg

SEQ ID NO: 5681369 - DNA, 25 bp, Homo sapien
tgttggcaaaactggtctcgatctc

SEQ ID NO: 5681370 - DNA, 25 bp, Homo sapien
ttcaccatgttggcaaaactggtct

SEQ ID NO: 5681371 - DNA, 25 bp, Homo sapien
accatgttggcaaaactggtctcga

SEQ ID NO: 5681372 - DNA, 25 bp, Homo sapien
tttcaccatgttggcaaaactggtc

SEQ ID NO: 5681373 - DNA, 25 bp, Homo sapien
ccatgttggcaaaactggtctcgat

SEQ ID NO: 5681374 - DNA, 25 bp, Homo sapien
tctggctaatttttgtatatttagt

SEQ ID NO: 5681375 - DNA, 25 bp, Homo sapien
ttcaccttgttggccaggatggtct

SEQ ID NO: 5681376 - DNA, 25 bp, Homo sapien
tgatttcctgacctcgttatccacc

SEQ ID NO: 5681377 - DNA, 25 bp, Homo sapien
ccacccgcctcagtgagccaccgtg

SEQ ID NO: 5681378 - DNA, 25 bp, Homo sapien
cacccgcctcagtgagccaccgtgc

SEQ ID NO: 5681379 - DNA, 25 bp, Homo sapien
acccgcctcagtgagccaccgtgcc

SEQ ID NO: 5681380 - DNA, 25 bp, Homo sapien
caccgtgcccagacacaaatatctt

SEQ ID NO: 5681381 - DNA, 25 bp, Homo sapien
cacggtggctcactgaggcgggtgg

SEQ ID NO: 5681382 - DNA, 25 bp, Homo sapien
agaccatcctggccaacaaggtgaa

SEQ ID NO: 5681383 - DNA, 25 bp, Homo sapien
gcacggtggctcactgaggcgggtg

SEQ ID NO: 5681384 - DNA, 25 bp, Homo sapien
ggcacggtggctcactgaggcgggt

SEQ ID NO: 5681385 - DNA, 25 bp, Homo sapien
ggtggataacgaggtcaggaaatca

SEQ ID NO: 5681386 - DNA, 25 bp, Homo sapien
aagatatttgtgtctgggcacggtg

SEQ ID NO: 5681387 - DNA, 25 bp, Homo sapien
ggtgcgatctccactcaccacaacc

SEQ ID NO: 5681388 - DNA, 25 bp, Homo sapien
gcgatctccactcaccacaacctct

SEQ ID NO: 5681389 - DNA, 25 bp, Homo sapien
tggtgcgatctccactcaccacaac

SEQ ID NO: 5681390 - DNA, 25 bp, Homo sapien
gtgcgatctccactcaccacaacct

SEQ ID NO: 5681391 - DNA, 25 bp, Homo sapien
cgatctccactcaccacaacctctg

SEQ ID NO: 5681392 - DNA, 25 bp, Homo sapien
gatctccactcaccacaacctctgc

SEQ ID NO: 5681393 - DNA, 25 bp, Homo sapien
gttgtggtgagtggagatcgcacca

SEQ ID NO: 5681394 - DNA, 25 bp, Homo sapien
cagaggttgtggtgagtggagatcg

SEQ ID NO: 5681395 - DNA, 25 bp, Homo sapien
aggttgtggtgagtggagatcgcac

SEQ ID NO: 5681396 - DNA, 25 bp, Homo sapien
gcagaggttgtggtgagtggagatc

SEQ ID NO: 5681397 - DNA, 25 bp, Homo sapien
ggttgtggtgagtggagatcgcacc

SEQ ID NO: 5681398 - DNA, 25 bp, Homo sapien
agaggttgtggtgagtggagatcgc

SEQ ID NO: 5681399 - DNA, 25 bp, Homo sapien
cagccttacggaattcctgaatcat

SEQ ID NO: 5681400 - DNA, 25 bp, Homo sapien
gatttccagccttacggaattcctg

SEQ ID NO: 5681401 - DNA, 25 bp, Homo sapien
aatacaatgatttccagccttacgg

SEQ ID NO: 5681402 - DNA, 25 bp, Homo sapien
catcctcatgggctataatatagcc

SEQ ID NO: 5681403 - DNA, 25 bp, Homo sapien
ctataatatagccactgtgctgtag

SEQ ID NO: 5681404 - DNA, 25 bp, Homo sapien
tacaatgatttccagccttacggaa

SEQ ID NO: 5681405 - DNA, 25 bp, Homo sapien
ggctatattatagcccatgaggatg

SEQ ID NO: 5681406 - DNA, 25 bp, Homo sapien
atgattcaggaattccgtaaggctg

SEQ ID NO: 5681407 - DNA, 25 bp, Homo sapien
caggaattccgtaaggctggaaatc

SEQ ID NO: 5681408 - DNA, 25 bp, Homo sapien
ctacagcacagtggctatattatag

SEQ ID NO: 5681409 - DNA, 25 bp, Homo sapien
ccgtaaggctggaaatcattgtatt

SEQ ID NO: 5681410 - DNA, 25 bp, Homo sapien
gattcaggaattccgtaaggctgga

SEQ ID NO: 5681411 - DNA, 25 bp, Homo sapien
ttaatcttctctggcaacacccaga

SEQ ID NO: 5681412 - DNA, 25 bp, Homo sapien
tcaggttgactcttaatattaacca

SEQ ID NO: 5681413 - DNA, 25 bp, Homo sapien
cagatacacccagaaaatactttgt

SEQ ID NO: 5681414 - DNA, 25 bp, Homo sapien
tggcaacacccagatacacccagaa

SEQ ID NO: 5681415 - DNA, 25 bp, Homo sapien
tcattccaatcaggttgactcttaa

SEQ ID NO: 5681416 - DNA, 25 bp, Homo sapien
acttaaatgttaatcttctctggca

SEQ ID NO: 5681417 - DNA, 25 bp, Homo sapien
tggttaatattaagagtcaacctga

SEQ ID NO: 5681418 - DNA, 25 bp, Homo sapien
aagagtcaacctgattggaatgaag

SEQ ID NO: 5681419 - DNA, 25 bp, Homo sapien
tgccagagaagattaacatttaagt

SEQ ID NO: 5681420 - DNA, 25 bp, Homo sapien
ttctgggtgtatctgggtgttgcca

SEQ ID NO: 5681421 - DNA, 25 bp, Homo sapien
caaagtattttctgggtgtatctgg

SEQ ID NO: 5681422 - DNA, 25 bp, Homo sapien
tctgggtgttgccagagaagattaa

SEQ ID NO: 5681423 - DNA, 25 bp, Homo sapien
aagacctagcaagtctgctcttcca

SEQ ID NO: 5681424 - DNA, 25 bp, Homo sapien
gctggaagacctagcaagtctgctc

SEQ ID NO: 5681425 - DNA, 25 bp, Homo sapien
atccagcaccggaggaagatgaagg

SEQ ID NO: 5681426 - DNA, 25 bp, Homo sapien
ctgatgttcaatgacaggaagcatc

SEQ ID NO: 5681427 - DNA, 25 bp, Homo sapien
tgaaggctggaagacctagcaagtc

SEQ ID NO: 5681428 - DNA, 25 bp, Homo sapien
tagcaagtctgctcttccaccttct

SEQ ID NO: 5681429 - DNA, 25 bp, Homo sapien
ccttcatcttcctccggtgctggat

SEQ ID NO: 5681430 - DNA, 25 bp, Homo sapien
gtggaagagcagacttgctaggtct

SEQ ID NO: 5681431 - DNA, 25 bp, Homo sapien
gagcagacttgctaggtcttccagc

SEQ ID NO: 5681432 - DNA, 25 bp, Homo sapien
gacttgctaggtcttccagccttca

SEQ ID NO: 5681433 - DNA, 25 bp, Homo sapien
gatgcttcctgtcattgaacatcag

SEQ ID NO: 5681434 - DNA, 25 bp, Homo sapien
agaaggtggaagagcagacttgcta

SEQ ID NO: 5681435 - DNA, 25 bp, Homo sapien
tgtatatgtgaaagggagtttttaa

SEQ ID NO: 5681436 - DNA, 25 bp, Homo sapien
tgtacatttggcatatgtattaggg

SEQ ID NO: 5681437 - DNA, 25 bp, Homo sapien
gtattagggttcttcagagggacag

SEQ ID NO: 5681438 - DNA, 25 bp, Homo sapien
tgtctttgtttgtacatttggcata

SEQ ID NO: 5681439 - DNA, 25 bp, Homo sapien
tatgtattagggttcttcagaggga

SEQ ID NO: 5681440 - DNA, 25 bp, Homo sapien
tcagagggacagaactagtaggata

SEQ ID NO: 5681441 - DNA, 25 bp, Homo sapien
ttaaaaactccctttcacatataca

SEQ ID NO: 5681442 - DNA, 25 bp, Homo sapien
tccctctgaagaaccctaatacata

SEQ ID NO: 5681443 - DNA, 25 bp, Homo sapien
tatcctactagttctgtccctctga

SEQ ID NO: 5681444 - DNA, 25 bp, Homo sapien
catatgccaaatgtacaaacaaaga

SEQ ID NO: 5681445 - DNA, 25 bp, Homo sapien
ccctaatacatatgccaaatgtaca

SEQ ID NO: 5681446 - DNA, 25 bp, Homo sapien
tatgccaaatgtacaaacaaagaca

SEQ ID NO: 5681447 - DNA, 25 bp, Homo sapien
tgagtttcgcactgggtgaatgaat

SEQ ID NO: 5681448 - DNA, 25 bp, Homo sapien
tggattgagtttcgcactgggtgaa

SEQ ID NO: 5681449 - DNA, 25 bp, Homo sapien
gcactgggtgaatgaatagtttatt

SEQ ID NO: 5681450 - DNA, 25 bp, Homo sapien
gattgagtttcgcactgggtgaatg

SEQ ID NO: 5681451 - DNA, 25 bp, Homo sapien
gtttcgcactgggtgaatgaatagt

SEQ ID NO: 5681452 - DNA, 25 bp, Homo sapien
tcgcactgggtgaatgaatagttta

SEQ ID NO: 5681453 - DNA, 25 bp, Homo sapien
tgctaaatcttaccccaaagggcaa

SEQ ID NO: 5681454 - DNA, 25 bp, Homo sapien
tgtatggaatgctaaatcttacccc

SEQ ID NO: 5681455 - DNA, 25 bp, Homo sapien
tggaatgctaaatcttaccccaaag

SEQ ID NO: 5681456 - DNA, 25 bp, Homo sapien
gtatggaatgctaaatcttacccca

SEQ ID NO: 5681457 - DNA, 25 bp, Homo sapien
tatggaatgctaaatcttaccccaa

SEQ ID NO: 5681458 - DNA, 25 bp, Homo sapien
atgctaaatcttaccccaaagggca

SEQ ID NO: 5681459 - DNA, 25 bp, Homo sapien
tgccctttggggtaagatttagcat

SEQ ID NO: 5681460 - DNA, 25 bp, Homo sapien
ctttggggtaagatttagcattcca

SEQ ID NO: 5681461 - DNA, 25 bp, Homo sapien
ggggtaagatttagcattccataca

SEQ ID NO: 5681462 - DNA, 25 bp, Homo sapien
tggggtaagatttagcattccatac

SEQ ID NO: 5681463 - DNA, 25 bp, Homo sapien
gggtaagatttagcattccatacac

SEQ ID NO: 5681464 - DNA, 25 bp, Homo sapien
ttgccctttggggtaagatttagca

SEQ ID NO: 5681465 - DNA, 25 bp, Homo sapien
aactattcattcacccagtgcgaaa

SEQ ID NO: 5681466 - DNA, 25 bp, Homo sapien
tattcattcacccagtgcgaaactc

SEQ ID NO: 5681467 - DNA, 25 bp, Homo sapien
ttcacccagtgcgaaactcaatcca

SEQ ID NO: 5681468 - DNA, 25 bp, Homo sapien
taaactattcattcacccagtgcga

SEQ ID NO: 5681469 - DNA, 25 bp, Homo sapien
aataaactattcattcacccagtgc

SEQ ID NO: 5681470 - DNA, 25 bp, Homo sapien
tcattcacccagtgcgaaactcaat

SEQ ID NO: 5681471 - DNA, 25 bp, Homo sapien
tatatatagataaacctctgtcttc

SEQ ID NO: 5681472 - DNA, 25 bp, Homo sapien
ctatatatagataaacctctgtctt

SEQ ID NO: 5681473 - DNA, 25 bp, Homo sapien
atatatagataaacctctgtcttcc

SEQ ID NO: 5681474 - DNA, 25 bp, Homo sapien
ggaagacagaggtttatctatatat

SEQ ID NO: 5681475 - DNA, 25 bp, Homo sapien
gaagacagaggtttatctatatata

SEQ ID NO: 5681476 - DNA, 25 bp, Homo sapien
aagacagaggtttatctatatatag

SEQ ID NO: 5681477 - DNA, 25 bp, Homo sapien
gataaacctctgtcttccacaaaaa

SEQ ID NO: 5681478 - DNA, 25 bp, Homo sapien
tttatccatgtatgtaaaatgtgta

SEQ ID NO: 5681479 - DNA, 25 bp, Homo sapien
tatatatagataaacctctgtcttc

SEQ ID NO: 5681480 - DNA, 25 bp, Homo sapien
tatagataaacctctgtcttccaca

SEQ ID NO: 5681481 - DNA, 25 bp, Homo sapien
acctctgtcttccacaaaaatatct

SEQ ID NO: 5681482 - DNA, 25 bp, Homo sapien
atatatagataaacctctgtcttcc

SEQ ID NO: 5681483 - DNA, 25 bp, Homo sapien
tacacattttacatacatggataaa

SEQ ID NO: 5681484 - DNA, 25 bp, Homo sapien
agatatttttgtggaagacagaggt

SEQ ID NO: 5681485 - DNA, 25 bp, Homo sapien
tgtggaagacagaggtttatctata

SEQ ID NO: 5681486 - DNA, 25 bp, Homo sapien
tttttgtggaagacagaggtttatc

SEQ ID NO: 5681487 - DNA, 25 bp, Homo sapien
aagacagaggtttatctatatatag

SEQ ID NO: 5681488 - DNA, 25 bp, Homo sapien
ggaagacagaggtttatctatatat

SEQ ID NO: 5681489 - DNA, 25 bp, Homo sapien
gtatgttactttaatagtctagatt

SEQ ID NO: 5681490 - DNA, 25 bp, Homo sapien
ctgtatgttactttaatagtctaga

SEQ ID NO: 5681491 - DNA, 25 bp, Homo sapien
gatatttttaagtgatgtgggtcag

SEQ ID NO: 5681492 - DNA, 25 bp, Homo sapien
tttttaagtgatgtgggtcagtgtc

SEQ ID NO: 5681493 - DNA, 25 bp, Homo sapien
tatttttaagtgatgtgggtcagtg

SEQ ID NO: 5681494 - DNA, 25 bp, Homo sapien
cctgtatgttactttaatagtctag

SEQ ID NO: 5681495 - DNA, 25 bp, Homo sapien
aatctagactattaaagtaacatac

SEQ ID NO: 5681496 - DNA, 25 bp, Homo sapien
tctagactattaaagtaacatacag

SEQ ID NO: 5681497 - DNA, 25 bp, Homo sapien
ctgacccacatcacttaaaaatatc

SEQ ID NO: 5681498 - DNA, 25 bp, Homo sapien
aaaatctagactattaaagtaacat

SEQ ID NO: 5681499 - DNA, 25 bp, Homo sapien
gacactgacccacatcacttaaaaa

SEQ ID NO: 5681500 - DNA, 25 bp, Homo sapien
tagactattaaagtaacatacaggt

SEQ ID NO: 5681501 - DNA, 25 bp, Homo sapien
ctcaacttagcctccttcatgggat

SEQ ID NO: 5681502 - DNA, 25 bp, Homo sapien
tcaacttagcctccttcatgggatt

SEQ ID NO: 5681503 - DNA, 25 bp, Homo sapien
aatcccatgaaggaggctaagttga

SEQ ID NO: 5681504 - DNA, 25 bp, Homo sapien
atcccatgaaggaggctaagttgag

SEQ ID NO: 5681505 - DNA, 25 bp, Homo sapien
tccagtgagcctctcaacttagcct

SEQ ID NO: 5681506 - DNA, 25 bp, Homo sapien
atttatctctccctttgttgtccag

SEQ ID NO: 5681507 - DNA, 25 bp, Homo sapien
acttagcctccttcatgggattaca

SEQ ID NO: 5681508 - DNA, 25 bp, Homo sapien
ctcaacttagcctccttcatgggat

SEQ ID NO: 5681509 - DNA, 25 bp, Homo sapien
tgggctccagtgagcctctcaactt

SEQ ID NO: 5681510 - DNA, 25 bp, Homo sapien
tcaacttagcctccttcatgggatt

SEQ ID NO: 5681511 - DNA, 25 bp, Homo sapien
tgtaatcccatgaaggaggctaagt

SEQ ID NO: 5681512 - DNA, 25 bp, Homo sapien
aatcccatgaaggaggctaagttga

SEQ ID NO: 5681513 - DNA, 25 bp, Homo sapien
taagttgagaggctcactggagccc

SEQ ID NO: 5681514 - DNA, 25 bp, Homo sapien
atcccatgaaggaggctaagttgag

SEQ ID NO: 5681515 - DNA, 25 bp, Homo sapien
gcctggacaacaaagggagagataa

SEQ ID NO: 5681516 - DNA, 25 bp, Homo sapien
caacaaagggagagataaataaaat

SEQ ID NO: 5681517 - DNA, 25 bp, Homo sapien
tctcagaaagagtacagtggcatca

SEQ ID NO: 5681518 - DNA, 25 bp, Homo sapien
ggtttctcagaaagagtacagtggc

SEQ ID NO: 5681519 - DNA, 25 bp, Homo sapien
gagacacagggtttctcagaaagag

SEQ ID NO: 5681520 - DNA, 25 bp, Homo sapien
cacagggtttctcagaaagagtaca

SEQ ID NO: 5681521 - DNA, 25 bp, Homo sapien
tgttgttttgagacacagggtttct

SEQ ID NO: 5681522 - DNA, 25 bp, Homo sapien
cagaaagagtacagtggcatcatca

SEQ ID NO: 5681523 - DNA, 25 bp, Homo sapien
tgatgatgccactgtactctttctg

SEQ ID NO: 5681524 - DNA, 25 bp, Homo sapien
tctgagaaaccctgtgtctcaaaac

SEQ ID NO: 5681525 - DNA, 25 bp, Homo sapien
gatgccactgtactctttctgagaa

SEQ ID NO: 5681526 - DNA, 25 bp, Homo sapien
tgtactctttctgagaaaccctgtg

SEQ ID NO: 5681527 - DNA, 25 bp, Homo sapien
tactctttctgagaaaccctgtgtc

SEQ ID NO: 5681528 - DNA, 25 bp, Homo sapien
agaaaccctgtgtctcaaaacaaca

SEQ ID NO: 5681529 - DNA, 25 bp, Homo sapien
tgattatagtgtagatgggctctgt

SEQ ID NO: 5681530 - DNA, 25 bp, Homo sapien
aagtgattatagtgtagatgggctc

SEQ ID NO: 5681531 - DNA, 25 bp, Homo sapien
agaagtgattatagtgtagatgggc

SEQ ID NO: 5681532 - DNA, 25 bp, Homo sapien
ttcctaatgactttagtaagaagtg

SEQ ID NO: 5681533 - DNA, 25 bp, Homo sapien
tatagtgtagatgggctctgtatgg

SEQ ID NO: 5681534 - DNA, 25 bp, Homo sapien
gattatagtgtagatgggctctgta

SEQ ID NO: 5681535 - DNA, 25 bp, Homo sapien
tacactataatcacttcttactaaa

SEQ ID NO: 5681536 - DNA, 25 bp, Homo sapien
tacagagcccatctacactataatc

SEQ ID NO: 5681537 - DNA, 25 bp, Homo sapien
ccatacagagcccatctacactata

SEQ ID NO: 5681538 - DNA, 25 bp, Homo sapien
gagcccatctacactataatcactt

SEQ ID NO: 5681539 - DNA, 25 bp, Homo sapien
catacagagcccatctacactataa

SEQ ID NO: 5681540 - DNA, 25 bp, Homo sapien
cacttcttactaaagtcattaggaa

SEQ ID NO: 5681541 - DNA, 25 bp, Homo sapien
cagttgtcttttttatgactagtgg

SEQ ID NO: 5681542 - DNA, 25 bp, Homo sapien
tgtcttttttatgactagtgggttc

SEQ ID NO: 5681543 - DNA, 25 bp, Homo sapien
tgcccggccagttgtcttttttatg

SEQ ID NO: 5681544 - DNA, 25 bp, Homo sapien
tgtgagccgccgtgcccggccagtt

SEQ ID NO: 5681545 - DNA, 25 bp, Homo sapien
cggccagttgtcttttttatgacta

SEQ ID NO: 5681546 - DNA, 25 bp, Homo sapien
gcccggccagttgtcttttttatga

SEQ ID NO: 5681547 - DNA, 25 bp, Homo sapien
tagtcataaaaaagacaactggccg

SEQ ID NO: 5681548 - DNA, 25 bp, Homo sapien
gaacccactagtcataaaaaagaca

SEQ ID NO: 5681549 - DNA, 25 bp, Homo sapien
aactggccgggcacggcggctcaca

SEQ ID NO: 5681550 - DNA, 25 bp, Homo sapien
tcataaaaaagacaactggccgggc

SEQ ID NO: 5681551 - DNA, 25 bp, Homo sapien
cactagtcataaaaaagacaactgg

SEQ ID NO: 5681552 - DNA, 25 bp, Homo sapien
cataaaaaagacaactggccgggca

SEQ ID NO: 5681553 - DNA, 25 bp, Homo sapien
gcatgccaccatacccagctaactt

SEQ ID NO: 5681554 - DNA, 25 bp, Homo sapien
tgccaccatacccagctaacttttg

SEQ ID NO: 5681555 - DNA, 25 bp, Homo sapien
tgcatgccaccatacccagctaact

SEQ ID NO: 5681556 - DNA, 25 bp, Homo sapien
atgccaccatacccagctaactttt

SEQ ID NO: 5681557 - DNA, 25 bp, Homo sapien
gtgcatgccaccatacccagctaac

SEQ ID NO: 5681558 - DNA, 25 bp, Homo sapien
tagagacaggtttttgccatgttgg

SEQ ID NO: 5681559 - DNA, 25 bp, Homo sapien
agttagctgggtatggtggcatgca

SEQ ID NO: 5681560 - DNA, 25 bp, Homo sapien
ccaacatggcaaaaacctgtctcta

SEQ ID NO: 5681561 - DNA, 25 bp, Homo sapien
ttagctgggtatggtggcatgcacc

SEQ ID NO: 5681562 - DNA, 25 bp, Homo sapien
aagttagctgggtatggtggcatgc

SEQ ID NO: 5681563 - DNA, 25 bp, Homo sapien
gttagctgggtatggtggcatgcac

SEQ ID NO: 5681564 - DNA, 25 bp, Homo sapien
aaaagttagctgggtatggtggcat

SEQ ID NO: 5681565 - DNA, 25 bp, Homo sapien
cagattcaagtgattctcttgcttc

SEQ ID NO: 5681566 - DNA, 25 bp, Homo sapien
tgcatgccaccatacccagctaact

SEQ ID NO: 5681567 - DNA, 25 bp, Homo sapien
cccagattcaagtgattctcttgct

SEQ ID NO: 5681568 - DNA, 25 bp, Homo sapien
gtgcatgccaccatacccagctaac

SEQ ID NO: 5681569 - DNA, 25 bp, Homo sapien
gtgattctcttgcttcagcctcccg

SEQ ID NO: 5681570 - DNA, 25 bp, Homo sapien
gcatgccaccatacccagctaactt

SEQ ID NO: 5681571 - DNA, 25 bp, Homo sapien
agttagctgggtatggtggcatgca

SEQ ID NO: 5681572 - DNA, 25 bp, Homo sapien
agcaagagaatcacttgaatctggg

SEQ ID NO: 5681573 - DNA, 25 bp, Homo sapien
ttagctgggtatggtggcatgcacc

SEQ ID NO: 5681574 - DNA, 25 bp, Homo sapien
aagttagctgggtatggtggcatgc

SEQ ID NO: 5681575 - DNA, 25 bp, Homo sapien
gttagctgggtatggtggcatgcac

SEQ ID NO: 5681576 - DNA, 25 bp, Homo sapien
cgggaggctgaagcaagagaatcac

SEQ ID NO: 5681577 - DNA, 25 bp, Homo sapien
tttataaattggaggttaggtctga

SEQ ID NO: 5681578 - DNA, 25 bp, Homo sapien
gttttttggcacaactacttcatgg

SEQ ID NO: 5681579 - DNA, 25 bp, Homo sapien
aattggaggttaggtctgattaggt

SEQ ID NO: 5681580 - DNA, 25 bp, Homo sapien
tggcacaactacttcatgggcaaag

SEQ ID NO: 5681581 - DNA, 25 bp, Homo sapien
gttcttctagtgtctgcatttttta

SEQ ID NO: 5681582 - DNA, 25 bp, Homo sapien
tagcatgttcttctagtgtctgcat

SEQ ID NO: 5681583 - DNA, 25 bp, Homo sapien
aacctaatcagacctaacctccaat

SEQ ID NO: 5681584 - DNA, 25 bp, Homo sapien
tcagacctaacctccaatttataaa

SEQ ID NO: 5681585 - DNA, 25 bp, Homo sapien
ccatgaagtagttgtgccaaaaaac

SEQ ID NO: 5681586 - DNA, 25 bp, Homo sapien
cagacactagaagaacatgctaaag

SEQ ID NO: 5681587 - DNA, 25 bp, Homo sapien
ctttgcccatgaagtagttgtgcca

SEQ ID NO: 5681588 - DNA, 25 bp, Homo sapien
taaaaaatgcagacactagaagaac

SEQ ID NO: 5681589 - DNA, 25 bp, Homo sapien
gattctgacaagactaacatgctgc

SEQ ID NO: 5681590 - DNA, 25 bp, Homo sapien
gattgatttgaacgaggattctgac

SEQ ID NO: 5681591 - DNA, 25 bp, Homo sapien
aacatgctgcgtttagtgatatgac

SEQ ID NO: 5681592 - DNA, 25 bp, Homo sapien
gctgcgtttagtgatatgactttga

SEQ ID NO: 5681593 - DNA, 25 bp, Homo sapien
gacaagactaacatgctgcgtttag

SEQ ID NO: 5681594 - DNA, 25 bp, Homo sapien
aattttctttataactctgctgctc

SEQ ID NO: 5681595 - DNA, 25 bp, Homo sapien
gtcagaatcctcgttcaaatcaatc

SEQ ID NO: 5681596 - DNA, 25 bp, Homo sapien
gtcatatcactaaacgcagcatgtt

SEQ ID NO: 5681597 - DNA, 25 bp, Homo sapien
gagcagcagagttataaagaaaatt

SEQ ID NO: 5681598 - DNA, 25 bp, Homo sapien
taaacgcagcatgttagtcttgtca

SEQ ID NO: 5681599 - DNA, 25 bp, Homo sapien
ttcaaagtcatatcactaaacgcag

SEQ ID NO: 5681600 - DNA, 25 bp, Homo sapien
cagcatgttagtcttgtcagaatcc

SEQ ID NO: 5681601 - DNA, 25 bp, Homo sapien
caagatgatgccaccaccttccagc

SEQ ID NO: 5681602 - DNA, 25 bp, Homo sapien
tgatgccaccaccttccagcctggg

SEQ ID NO: 5681603 - DNA, 25 bp, Homo sapien
atgatgccaccaccttccagcctgg

SEQ ID NO: 5681604 - DNA, 25 bp, Homo sapien
aagatgatgccaccaccttccagcc

SEQ ID NO: 5681605 - DNA, 25 bp, Homo sapien
gatgatgccaccaccttccagcctg

SEQ ID NO: 5681606 - DNA, 25 bp, Homo sapien
ccaagatgatgccaccaccttccag

SEQ ID NO: 5681607 - DNA, 25 bp, Homo sapien
caggctggaaggtggtggcatcatc

SEQ ID NO: 5681608 - DNA, 25 bp, Homo sapien
ctggaaggtggtggcatcatcttgg

SEQ ID NO: 5681609 - DNA, 25 bp, Homo sapien
cccaggctggaaggtggtggcatca

SEQ ID NO: 5681610 - DNA, 25 bp, Homo sapien
ccaggctggaaggtggtggcatcat

SEQ ID NO: 5681611 - DNA, 25 bp, Homo sapien
gctggaaggtggtggcatcatcttg

SEQ ID NO: 5681612 - DNA, 25 bp, Homo sapien
ggctggaaggtggtggcatcatctt

SEQ ID NO: 5681613 - DNA, 25 bp, Homo sapien
agaaaaataatgtggctgggcatgg

SEQ ID NO: 5681614 - DNA, 25 bp, Homo sapien
tgcttatgcatctctaagaaaaata

SEQ ID NO: 5681615 - DNA, 25 bp, Homo sapien
tctaagaaaaataatgtggctgggc

SEQ ID NO: 5681616 - DNA, 25 bp, Homo sapien
ctaagaaaaataatgtggctgggca

SEQ ID NO: 5681617 - DNA, 25 bp, Homo sapien
gcatctctaagaaaaataatgtggc

SEQ ID NO: 5681618 - DNA, 25 bp, Homo sapien
gctgaagtgggcagactgcttgagc

SEQ ID NO: 5681619 - DNA, 25 bp, Homo sapien
ccagccacattatttttcttagaga

SEQ ID NO: 5681620 - DNA, 25 bp, Homo sapien
ccacattatttttcttagagatgca

SEQ ID NO: 5681621 - DNA, 25 bp, Homo sapien
gctcaagcagtctgcccacttcagc

SEQ ID NO: 5681622 - DNA, 25 bp, Homo sapien
tgcccagccacattatttttcttag

SEQ ID NO: 5681623 - DNA, 25 bp, Homo sapien
ccatgcccagccacattatttttct

SEQ ID NO: 5681624 - DNA, 25 bp, Homo sapien
tatttttcttagagatgcataagca

SEQ ID NO: 5681625 - DNA, 25 bp, Homo sapien
taccttaataaggctagagggagaa

SEQ ID NO: 5681626 - DNA, 25 bp, Homo sapien
attataccttaataaggctagaggg

SEQ ID NO: 5681627 - DNA, 25 bp, Homo sapien
ttataccttaataaggctagaggga

SEQ ID NO: 5681628 - DNA, 25 bp, Homo sapien
tataccttaataaggctagagggag

SEQ ID NO: 5681629 - DNA, 25 bp, Homo sapien
ataccttaataaggctagagggaga

SEQ ID NO: 5681630 - DNA, 25 bp, Homo sapien
tattataccttaataaggctagagg

SEQ ID NO: 5681631 - DNA, 25 bp, Homo sapien
tccctctagccttattaaggtataa

SEQ ID NO: 5681632 - DNA, 25 bp, Homo sapien
ttctccctctagccttattaaggta

SEQ ID NO: 5681633 - DNA, 25 bp, Homo sapien
tagccttattaaggtataataaaca

SEQ ID NO: 5681634 - DNA, 25 bp, Homo sapien
ccctctagccttattaaggtataat

SEQ ID NO: 5681635 - DNA, 25 bp, Homo sapien
cctctagccttattaaggtataata

SEQ ID NO: 5681636 - DNA, 25 bp, Homo sapien
tctccctctagccttattaaggtat

SEQ ID NO: 5681637 - DNA, 25 bp, Homo sapien
gctagagggagaaaacttttgtgga

SEQ ID NO: 5681638 - DNA, 25 bp, Homo sapien
cacattgtataccataaacatgcaa

SEQ ID NO: 5681639 - DNA, 25 bp, Homo sapien
gtggaaaatttccagcacattacaa

SEQ ID NO: 5681640 - DNA, 25 bp, Homo sapien
ataccttaataaggctagagggaga

SEQ ID NO: 5681641 - DNA, 25 bp, Homo sapien
tattataccttaataaggctagagg

SEQ ID NO: 5681642 - DNA, 25 bp, Homo sapien
acttttgtggaaaatttccagcaca

SEQ ID NO: 5681643 - DNA, 25 bp, Homo sapien
tgcatgtttatggtatacaatgtga

SEQ ID NO: 5681644 - DNA, 25 bp, Homo sapien
ttgtaatgtgctggaaattttccac

SEQ ID NO: 5681645 - DNA, 25 bp, Homo sapien
tgtgctggaaattttccacaaaagt

SEQ ID NO: 5681646 - DNA, 25 bp, Homo sapien
taaaaattgcatgtttatggtatac

SEQ ID NO: 5681647 - DNA, 25 bp, Homo sapien
cacaaaagttttctccctctagcct

SEQ ID NO: 5681648 - DNA, 25 bp, Homo sapien
tctccctctagccttattaaggtat

SEQ ID NO: 5681649 - DNA, 25 bp, Homo sapien
gacccttgtcactacaaaataatta

SEQ ID NO: 5681650 - DNA, 25 bp, Homo sapien
cagctatctgggagggtaaggtgag

SEQ ID NO: 5681651 - DNA, 25 bp, Homo sapien
cccttgtcactacaaaataattagc

SEQ ID NO: 5681652 - DNA, 25 bp, Homo sapien
ctcagtgagacccttgtcactacaa

SEQ ID NO: 5681653 - DNA, 25 bp, Homo sapien
agggtaaggtgagaggtttgcttga

SEQ ID NO: 5681654 - DNA, 25 bp, Homo sapien
tcagtgagacccttgtcactacaaa

SEQ ID NO: 5681655 - DNA, 25 bp, Homo sapien
ttgtagtgacaagggtctcactgag

SEQ ID NO: 5681656 - DNA, 25 bp, Homo sapien
gctaattattttgtagtgacaaggg

SEQ ID NO: 5681657 - DNA, 25 bp, Homo sapien
tttgtagtgacaagggtctcactga

SEQ ID NO: 5681658 - DNA, 25 bp, Homo sapien
ctcaccttaccctcccagatagctg

SEQ ID NO: 5681659 - DNA, 25 bp, Homo sapien
taattattttgtagtgacaagggtc

SEQ ID NO: 5681660 - DNA, 25 bp, Homo sapien
tcaagcaaacctctcaccttaccct

SEQ ID NO: 5681661 - DNA, 25 bp, Homo sapien
acctgtaatatcagcgctttgggag

SEQ ID NO: 5681662 - DNA, 25 bp, Homo sapien
acacctgtaatatcagcgctttggg

SEQ ID NO: 5681663 - DNA, 25 bp, Homo sapien
ctcacacctgtaatatcagcgcttt

SEQ ID NO: 5681664 - DNA, 25 bp, Homo sapien
gctcacacctgtaatatcagcgctt

SEQ ID NO: 5681665 - DNA, 25 bp, Homo sapien
cacacctgtaatatcagcgctttgg

SEQ ID NO: 5681666 - DNA, 25 bp, Homo sapien
tcacacctgtaatatcagcgctttg

SEQ ID NO: 5681667 - DNA, 25 bp, Homo sapien
aaagcgctgatattacaggtgtgag

SEQ ID NO: 5681668 - DNA, 25 bp, Homo sapien
aagcgctgatattacaggtgtgagc

SEQ ID NO: 5681669 - DNA, 25 bp, Homo sapien
cccaaagcgctgatattacaggtgt

SEQ ID NO: 5681670 - DNA, 25 bp, Homo sapien
caaagcgctgatattacaggtgtga

SEQ ID NO: 5681671 - DNA, 25 bp, Homo sapien
ccaaagcgctgatattacaggtgtg

SEQ ID NO: 5681672 - DNA, 25 bp, Homo sapien
ctcccaaagcgctgatattacaggt

SEQ ID NO: 5681673 - DNA, 25 bp, Homo sapien
tactgagtagtggtattaccagtgg

SEQ ID NO: 5681674 - DNA, 25 bp, Homo sapien
ctgagtagtggtattaccagtgggt

SEQ ID NO: 5681675 - DNA, 25 bp, Homo sapien
aaatactgagtagtggtattaccag

SEQ ID NO: 5681676 - DNA, 25 bp, Homo sapien
ttaccagtgggtacttcaggggcag

SEQ ID NO: 5681677 - DNA, 25 bp, Homo sapien
gagccatgtgggaggtctgaacttg

SEQ ID NO: 5681678 - DNA, 25 bp, Homo sapien
ggagccatgtgggaggtctgaactt

SEQ ID NO: 5681679 - DNA, 25 bp, Homo sapien
acccactggtaataccactactcag

SEQ ID NO: 5681680 - DNA, 25 bp, Homo sapien
tccctgcccctgaagtacccactgg

SEQ ID NO: 5681681 - DNA, 25 bp, Homo sapien
aagttcagacctcccacatggctcc

SEQ ID NO: 5681682 - DNA, 25 bp, Homo sapien
ctgcccctgaagtacccactggtaa

SEQ ID NO: 5681683 - DNA, 25 bp, Homo sapien
tgcccctgaagtacccactggtaat

SEQ ID NO: 5681684 - DNA, 25 bp, Homo sapien
cactggtaataccactactcagtat

SEQ ID NO: 5681685 - DNA, 25 bp, Homo sapien
catttatgtatcaccgagtgcacag

SEQ ID NO: 5681686 - DNA, 25 bp, Homo sapien
gaacatttatgtatcaccgagtgca

SEQ ID NO: 5681687 - DNA, 25 bp, Homo sapien
ttaagcggatttcagtaattggacc

SEQ ID NO: 5681688 - DNA, 25 bp, Homo sapien
tggacctttaggacataaataagaa

SEQ ID NO: 5681689 - DNA, 25 bp, Homo sapien
cagtaattggacctttaggacataa

SEQ ID NO: 5681690 - DNA, 25 bp, Homo sapien
taagaaaaagtgattttgttcaaga

SEQ ID NO: 5681691 - DNA, 25 bp, Homo sapien
taaaggtccaattactgaaatccgc

SEQ ID NO: 5681692 - DNA, 25 bp, Homo sapien
tgcactcggtgatacataaatgttc

SEQ ID NO: 5681693 - DNA, 25 bp, Homo sapien
actgtgcactcggtgatacataaat

SEQ ID NO: 5681694 - DNA, 25 bp, Homo sapien
ggtccaattactgaaatccgcttaa

SEQ ID NO: 5681695 - DNA, 25 bp, Homo sapien
tcttatttatgtcctaaaggtccaa

SEQ ID NO: 5681696 - DNA, 25 bp, Homo sapien
taaatgttcttgaacaaaatcactt

SEQ ID NO: 5681697 - DNA, 25 bp, Homo sapien
gggtgtggttgtgagcacctgtaat

SEQ ID NO: 5681698 - DNA, 25 bp, Homo sapien
tgggtgtggttgtgagcacctgtaa

SEQ ID NO: 5681699 - DNA, 25 bp, Homo sapien
ggtgtggttgtgagcacctgtaatc

SEQ ID NO: 5681700 - DNA, 25 bp, Homo sapien
ttacaggtgctcacaaccacaccca

SEQ ID NO: 5681701 - DNA, 25 bp, Homo sapien
gattacaggtgctcacaaccacacc

SEQ ID NO: 5681702 - DNA, 25 bp, Homo sapien
attacaggtgctcacaaccacaccc

SEQ ID NO: 5681703 - DNA, 25 bp, Homo sapien
ctatttattgtaagggattagcaaa

SEQ ID NO: 5681704 - DNA, 25 bp, Homo sapien
attgtaagggattagcaaatctttc

SEQ ID NO: 5681705 - DNA, 25 bp, Homo sapien
tattgtaagggattagcaaatcttt

SEQ ID NO: 5681706 - DNA, 25 bp, Homo sapien
ttgtaagggattagcaaatctttca

SEQ ID NO: 5681707 - DNA, 25 bp, Homo sapien
tttattgtaagggattagcaaatct

SEQ ID NO: 5681708 - DNA, 25 bp, Homo sapien
tactatttattgtaagggattagca

SEQ ID NO: 5681709 - DNA, 25 bp, Homo sapien
agatttgctaatcccttacaataaa

SEQ ID NO: 5681710 - DNA, 25 bp, Homo sapien
gctaatcccttacaataaatagtaa

SEQ ID NO: 5681711 - DNA, 25 bp, Homo sapien
tttgctaatcccttacaataaatag

SEQ ID NO: 5681712 - DNA, 25 bp, Homo sapien
tgctaatcccttacaataaatagta

SEQ ID NO: 5681713 - DNA, 25 bp, Homo sapien
tgaaagatttgctaatcccttacaa

SEQ ID NO: 5681714 - DNA, 25 bp, Homo sapien
gaaagatttgctaatcccttacaat

SEQ ID NO: 5681715 - DNA, 25 bp, Homo sapien
ctatttattgtaagggattagcaaa

SEQ ID NO: 5681716 - DNA, 25 bp, Homo sapien
gattagcaaatctttcattgaaaag

SEQ ID NO: 5681717 - DNA, 25 bp, Homo sapien
ttgtaagggattagcaaatctttca

SEQ ID NO: 5681718 - DNA, 25 bp, Homo sapien
tttattgtaagggattagcaaatct

SEQ ID NO: 5681719 - DNA, 25 bp, Homo sapien
catgtcacttttactatttattgta

SEQ ID NO: 5681720 - DNA, 25 bp, Homo sapien
tactatttattgtaagggattagca

SEQ ID NO: 5681721 - DNA, 25 bp, Homo sapien
gctaatcccttacaataaatagtaa

SEQ ID NO: 5681722 - DNA, 25 bp, Homo sapien
tacaataaatagtaaaagtgacatg

SEQ ID NO: 5681723 - DNA, 25 bp, Homo sapien
tttgctaatcccttacaataaatag

SEQ ID NO: 5681724 - DNA, 25 bp, Homo sapien
tttcaatgaaagatttgctaatccc

SEQ ID NO: 5681725 - DNA, 25 bp, Homo sapien
tgaaagatttgctaatcccttacaa

SEQ ID NO: 5681726 - DNA, 25 bp, Homo sapien
gaaagatttgctaatcccttacaat

SEQ ID NO: 5681727 - DNA, 25 bp, Homo sapien
attatagtgatgaagatgcgtccag

SEQ ID NO: 5681728 - DNA, 25 bp, Homo sapien
gatgaagatgcgtccagtaaatatt

SEQ ID NO: 5681729 - DNA, 25 bp, Homo sapien
tggttagcaattatagtgatgaaga

SEQ ID NO: 5681730 - DNA, 25 bp, Homo sapien
tagtgatgaagatgcgtccagtaaa

SEQ ID NO: 5681731 - DNA, 25 bp, Homo sapien
caattatagtgatgaagatgcgtcc

SEQ ID NO: 5681732 - DNA, 25 bp, Homo sapien
tatagtgatgaagatgcgtccagta

SEQ ID NO: 5681733 - DNA, 25 bp, Homo sapien
ggacgcatcttcatcactataattg

SEQ ID NO: 5681734 - DNA, 25 bp, Homo sapien
tttactggacgcatcttcatcacta

SEQ ID NO: 5681735 - DNA, 25 bp, Homo sapien
aaatatttactggacgcatcttcat

SEQ ID NO: 5681736 - DNA, 25 bp, Homo sapien
tcttcatcactataattgctaacca

SEQ ID NO: 5681737 - DNA, 25 bp, Homo sapien
atatttactggacgcatcttcatca

SEQ ID NO: 5681738 - DNA, 25 bp, Homo sapien
tactggacgcatcttcatcactata

SEQ ID NO: 5681739 - DNA, 25 bp, Homo sapien
ttttttggtatgctggctagacttg

SEQ ID NO: 5681740 - DNA, 25 bp, Homo sapien
tttttttggtatgctggctagactt

SEQ ID NO: 5681741 - DNA, 25 bp, Homo sapien
tttggtatgctggctagacttgaac

SEQ ID NO: 5681742 - DNA, 25 bp, Homo sapien
tttttggtatgctggctagacttga

SEQ ID NO: 5681743 - DNA, 25 bp, Homo sapien
ttttggtatgctggctagacttgaa

SEQ ID NO: 5681744 - DNA, 25 bp, Homo sapien
ttggtatgctggctagacttgaact

SEQ ID NO: 5681745 - DNA, 25 bp, Homo sapien
aagtctagccagcataccaaaaaaa

SEQ ID NO: 5681746 - DNA, 25 bp, Homo sapien
agttcaagtctagccagcataccaa

SEQ ID NO: 5681747 - DNA, 25 bp, Homo sapien
tcaagtctagccagcataccaaaaa

SEQ ID NO: 5681748 - DNA, 25 bp, Homo sapien
gttcaagtctagccagcataccaaa

SEQ ID NO: 5681749 - DNA, 25 bp, Homo sapien
ttcaagtctagccagcataccaaaa

SEQ ID NO: 5681750 - DNA, 25 bp, Homo sapien
caagtctagccagcataccaaaaaa

SEQ ID NO: 5681751 - DNA, 25 bp, Homo sapien
tatgctggctagacttgaactcccc

SEQ ID NO: 5681752 - DNA, 25 bp, Homo sapien
ttttttggtatgctggctagacttg

SEQ ID NO: 5681753 - DNA, 25 bp, Homo sapien
ttacaggtatgagccgctgcgcccg

SEQ ID NO: 5681754 - DNA, 25 bp, Homo sapien
ttttggtatgctggctagacttgaa

SEQ ID NO: 5681755 - DNA, 25 bp, Homo sapien
ggtatgctggctagacttgaactcc

SEQ ID NO: 5681756 - DNA, 25 bp, Homo sapien
ttggtatgctggctagacttgaact

SEQ ID NO: 5681757 - DNA, 25 bp, Homo sapien
gggagttcaagtctagccagcatac

SEQ ID NO: 5681758 - DNA, 25 bp, Homo sapien
agttcaagtctagccagcataccaa

SEQ ID NO: 5681759 - DNA, 25 bp, Homo sapien
gagggccgggcgcagcggctcatac

SEQ ID NO: 5681760 - DNA, 25 bp, Homo sapien
cgggcgcagcggctcatacctgtaa

SEQ ID NO: 5681761 - DNA, 25 bp, Homo sapien
ttcaagtctagccagcataccaaaa

SEQ ID NO: 5681762 - DNA, 25 bp, Homo sapien
caagtctagccagcataccaaaaaa

SEQ ID NO: 5681763 - DNA, 25 bp, Homo sapien
cagtggtgctatctcggctcactgc

SEQ ID NO: 5681764 - DNA, 25 bp, Homo sapien
acctccgcctctcaggttcaagcaa

SEQ ID NO: 5681765 - DNA, 25 bp, Homo sapien
cctccgcctctcaggttcaagcaat

SEQ ID NO: 5681766 - DNA, 25 bp, Homo sapien
cgcctctcaggttcaagcaattctc

SEQ ID NO: 5681767 - DNA, 25 bp, Homo sapien
ccgcctctcaggttcaagcaattct

SEQ ID NO: 5681768 - DNA, 25 bp, Homo sapien
ctccgcctctcaggttcaagcaatt

SEQ ID NO: 5681769 - DNA, 25 bp, Homo sapien
attgcttgaacctgagaggcggagg

SEQ ID NO: 5681770 - DNA, 25 bp, Homo sapien
gagaattgcttgaacctgagaggcg

SEQ ID NO: 5681771 - DNA, 25 bp, Homo sapien
aattgcttgaacctgagaggcggag

SEQ ID NO: 5681772 - DNA, 25 bp, Homo sapien
agaattgcttgaacctgagaggcgg

SEQ ID NO: 5681773 - DNA, 25 bp, Homo sapien
ttgcttgaacctgagaggcggaggt

SEQ ID NO: 5681774 - DNA, 25 bp, Homo sapien
gcagtgagccgagatagcaccactg

SEQ ID NO: 5681775 - DNA, 25 bp, Homo sapien
actgggattgttgctgttgtgggaa

SEQ ID NO: 5681776 - DNA, 25 bp, Homo sapien
agcaagtgctccacttatgacaaag

SEQ ID NO: 5681777 - DNA, 25 bp, Homo sapien
aattaattttatctagcaatatctg

SEQ ID NO: 5681778 - DNA, 25 bp, Homo sapien
gcaagtgctccacttatgacaaagg

SEQ ID NO: 5681779 - DNA, 25 bp, Homo sapien
ctttgtcataagtggagcacttgct

SEQ ID NO: 5681780 - DNA, 25 bp, Homo sapien
ttcccacaacagcaacaatcccagt

SEQ ID NO: 5681781 - DNA, 25 bp, Homo sapien
cctttgtcataagtggagcacttgc

SEQ ID NO: 5681782 - DNA, 25 bp, Homo sapien
cagatattgctagataaaattaatt

SEQ ID NO: 5681783 - DNA, 25 bp, Homo sapien
actgggattgttgctgttgtgggaa

SEQ ID NO: 5681784 - DNA, 25 bp, Homo sapien
gcaagtgctccacttatgacaaagg

SEQ ID NO: 5681785 - DNA, 25 bp, Homo sapien
aattaattttatctagcaatatctg

SEQ ID NO: 5681786 - DNA, 25 bp, Homo sapien
gctgttgtgggaagcaagtgctcca

SEQ ID NO: 5681787 - DNA, 25 bp, Homo sapien
tagcaatatctgaaattcttctggg

SEQ ID NO: 5681788 - DNA, 25 bp, Homo sapien
gctccacttatgacaaaggaattca

SEQ ID NO: 5681789 - DNA, 25 bp, Homo sapien
ttcccacaacagcaacaatcccagt

SEQ ID NO: 5681790 - DNA, 25 bp, Homo sapien
tgaattcctttgtcataagtggagc

SEQ ID NO: 5681791 - DNA, 25 bp, Homo sapien
ggagcacttgcttcccacaacagca

SEQ ID NO: 5681792 - DNA, 25 bp, Homo sapien
cctttgtcataagtggagcacttgc

SEQ ID NO: 5681793 - DNA, 25 bp, Homo sapien
cccagaagaatttcagatattgcta

SEQ ID NO: 5681794 - DNA, 25 bp, Homo sapien
cagatattgctagataaaattaatt

SEQ ID NO: 5681795 - DNA, 25 bp, Homo sapien
tcaggtgatctgccctccttagcct

SEQ ID NO: 5681796 - DNA, 25 bp, Homo sapien
cacgcccagccagatttccagtagt

SEQ ID NO: 5681797 - DNA, 25 bp, Homo sapien
acgcccagccagatttccagtagtt

SEQ ID NO: 5681798 - DNA, 25 bp, Homo sapien
aggtgatctgccctccttagcctcc

SEQ ID NO: 5681799 - DNA, 25 bp, Homo sapien
caggtgatctgccctccttagcctc

SEQ ID NO: 5681800 - DNA, 25 bp, Homo sapien
cgcccagccagatttccagtagttc

SEQ ID NO: 5681801 - DNA, 25 bp, Homo sapien
aggctaaggagggcagatcacctga

SEQ ID NO: 5681802 - DNA, 25 bp, Homo sapien
ggaggctaaggagggcagatcacct

SEQ ID NO: 5681803 - DNA, 25 bp, Homo sapien
gaggctaaggagggcagatcacctg

SEQ ID NO: 5681804 - DNA, 25 bp, Homo sapien
gaactactggaaatctggctgggcg

SEQ ID NO: 5681805 - DNA, 25 bp, Homo sapien
actactggaaatctggctgggcgtg

SEQ ID NO: 5681806 - DNA, 25 bp, Homo sapien
aactactggaaatctggctgggcgt

SEQ ID NO: 5681807 - DNA, 25 bp, Homo sapien
ggaacccaaatagattgctggacta

SEQ ID NO: 5681808 - DNA, 25 bp, Homo sapien
tggaacccaaatagattgctggact

SEQ ID NO: 5681809 - DNA, 25 bp, Homo sapien
gaacccaaatagattgctggactat

SEQ ID NO: 5681810 - DNA, 25 bp, Homo sapien
ctggaacccaaatagattgctggac

SEQ ID NO: 5681811 - DNA, 25 bp, Homo sapien
aatggtttgatttccagtagttctt

SEQ ID NO: 5681812 - DNA, 25 bp, Homo sapien
tagtccagcaatctatttgggttcc

SEQ ID NO: 5681813 - DNA, 25 bp, Homo sapien
gtccagcaatctatttgggttccag

SEQ ID NO: 5681814 - DNA, 25 bp, Homo sapien
atagtccagcaatctatttgggttc

SEQ ID NO: 5681815 - DNA, 25 bp, Homo sapien
agtccagcaatctatttgggttcca

SEQ ID NO: 5681816 - DNA, 25 bp, Homo sapien
aagaactactggaaatcaaaccatt

SEQ ID NO: 5681817 - DNA, 25 bp, Homo sapien
aatgttttagagttatgaggctagt

SEQ ID NO: 5681818 - DNA, 25 bp, Homo sapien
aataatgttttagagttatgaggct

SEQ ID NO: 5681819 - DNA, 25 bp, Homo sapien
tgaggctagttctttaggggttcat

SEQ ID NO: 5681820 - DNA, 25 bp, Homo sapien
taatgttttagagttatgaggctag

SEQ ID NO: 5681821 - DNA, 25 bp, Homo sapien
gttttagagttatgaggctagttct

SEQ ID NO: 5681822 - DNA, 25 bp, Homo sapien
tgttttagagttatgaggctagttc

SEQ ID NO: 5681823 - DNA, 25 bp, Homo sapien
tgaacccctaaagaactagcctcat

SEQ ID NO: 5681824 - DNA, 25 bp, Homo sapien
ctagcctcataactctaaaacatta

SEQ ID NO: 5681825 - DNA, 25 bp, Homo sapien
tagcctcataactctaaaacattat

SEQ ID NO: 5681826 - DNA, 25 bp, Homo sapien
agaactagcctcataactctaaaac

SEQ ID NO: 5681827 - DNA, 25 bp, Homo sapien
atgaacccctaaagaactagcctca

SEQ ID NO: 5681828 - DNA, 25 bp, Homo sapien
gaactagcctcataactctaaaaca

SEQ ID NO: 5681829 - DNA, 25 bp, Homo sapien
gcatgttgaatgaattctgtcccaa

SEQ ID NO: 5681830 - DNA, 25 bp, Homo sapien
cacagttaagtaaatgcatgttgaa

SEQ ID NO: 5681831 - DNA, 25 bp, Homo sapien
gagttatgaggctagttctttaggg

SEQ ID NO: 5681832 - DNA, 25 bp, Homo sapien
gttcattttattacacagttaagta

SEQ ID NO: 5681833 - DNA, 25 bp, Homo sapien
taatgttttagagttatgaggctag

SEQ ID NO: 5681834 - DNA, 25 bp, Homo sapien
tgttttagagttatgaggctagttc

SEQ ID NO: 5681835 - DNA, 25 bp, Homo sapien
gctctaacgatcctcccaagtaggg

SEQ ID NO: 5681836 - DNA, 25 bp, Homo sapien
ctctaacgatcctcccaagtagggg

SEQ ID NO: 5681837 - DNA, 25 bp, Homo sapien
tgggctctaacgatcctcccaagta

SEQ ID NO: 5681838 - DNA, 25 bp, Homo sapien
ggctctaacgatcctcccaagtagg

SEQ ID NO: 5681839 - DNA, 25 bp, Homo sapien
gggctctaacgatcctcccaagtag

SEQ ID NO: 5681840 - DNA, 25 bp, Homo sapien
gtggtgcagtttctgctcactgcaa

SEQ ID NO: 5681841 - DNA, 25 bp, Homo sapien
tacttgggaggatcgttagagccca

SEQ ID NO: 5681842 - DNA, 25 bp, Homo sapien
ttgcagtgagcagaaactgcaccac

SEQ ID NO: 5681843 - DNA, 25 bp, Homo sapien
cctacttgggaggatcgttagagcc

SEQ ID NO: 5681844 - DNA, 25 bp, Homo sapien
ctacttgggaggatcgttagagccc

SEQ ID NO: 5681845 - DNA, 25 bp, Homo sapien
ccctacttgggaggatcgttagagc

SEQ ID NO: 5681846 - DNA, 25 bp, Homo sapien
cccctacttgggaggatcgttagag

SEQ ID NO: 5681847 - DNA, 25 bp, Homo sapien
cctcccgagtagctgggactacagg

SEQ ID NO: 5681848 - DNA, 25 bp, Homo sapien
cgccaccacgcccggctaatgtttt

SEQ ID NO: 5681849 - DNA, 25 bp, Homo sapien
ccgccaccacgcccggctaatgttt

SEQ ID NO: 5681850 - DNA, 25 bp, Homo sapien
cgcccgccaccacgcccggctaatg

SEQ ID NO: 5681851 - DNA, 25 bp, Homo sapien
cccgccaccacgcccggctaatgtt

SEQ ID NO: 5681852 - DNA, 25 bp, Homo sapien
gcccgccaccacgcccggctaatgt

SEQ ID NO: 5681853 - DNA, 25 bp, Homo sapien
cctgtagtcccagctactcgggagg

SEQ ID NO: 5681854 - DNA, 25 bp, Homo sapien
aaacattagccgggcgtggtggcgg

SEQ ID NO: 5681855 - DNA, 25 bp, Homo sapien
aacattagccgggcgtggtggcggg

SEQ ID NO: 5681856 - DNA, 25 bp, Homo sapien
cattagccgggcgtggtggcgggcg

SEQ ID NO: 5681857 - DNA, 25 bp, Homo sapien
aaaacattagccgggcgtggtggcg

SEQ ID NO: 5681858 - DNA, 25 bp, Homo sapien
acattagccgggcgtggtggcgggc

SEQ ID NO: 5681859 - DNA, 25 bp, Homo sapien
ttgtccttgtacctgtgctggttgc

SEQ ID NO: 5681860 - DNA, 25 bp, Homo sapien
tctgttgtccttgtacctgtgctgg

SEQ ID NO: 5681861 - DNA, 25 bp, Homo sapien
gatctgttgcttatagtctgctttt

SEQ ID NO: 5681862 - DNA, 25 bp, Homo sapien
tgctggttgctacagccacttaaga

SEQ ID NO: 5681863 - DNA, 25 bp, Homo sapien
ggttgctacagccacttaagatctg

SEQ ID NO: 5681864 - DNA, 25 bp, Homo sapien
cagccacttaagatctgttgcttat

SEQ ID NO: 5681865 - DNA, 25 bp, Homo sapien
taagcaacagatcttaagtggctgt

SEQ ID NO: 5681866 - DNA, 25 bp, Homo sapien
cagatcttaagtggctgtagcaacc

SEQ ID NO: 5681867 - DNA, 25 bp, Homo sapien
aaaagcagactataagcaacagatc

SEQ ID NO: 5681868 - DNA, 25 bp, Homo sapien
tcttaagtggctgtagcaaccagca

SEQ ID NO: 5681869 - DNA, 25 bp, Homo sapien
gcacaggtacaaggacaacagaaga

SEQ ID NO: 5681870 - DNA, 25 bp, Homo sapien
gcaaccagcacaggtacaaggacaa

SEQ ID NO: 5681871 - DNA, 25 bp, Homo sapien
atcttttatgtactttgaactattt

SEQ ID NO: 5681872 - DNA, 25 bp, Homo sapien
tttcttgtttgattcaataacttgg

SEQ ID NO: 5681873 - DNA, 25 bp, Homo sapien
ccaagttattgaatcaaacaagaaa

SEQ ID NO: 5681874 - DNA, 25 bp, Homo sapien
aaatagttcaaagtacataaaagat

SEQ ID NO: 5681875 - DNA, 25 bp, Homo sapien
catcttttatgtactttgaactatt

SEQ ID NO: 5681876 - DNA, 25 bp, Homo sapien
caataacttggaagagattttgaaa

SEQ ID NO: 5681877 - DNA, 25 bp, Homo sapien
tatttgaggctttaaaatattcatc

SEQ ID NO: 5681878 - DNA, 25 bp, Homo sapien
gattttgaaagattatttgaggctt

SEQ ID NO: 5681879 - DNA, 25 bp, Homo sapien
tgtttgattcaataacttggaagag

SEQ ID NO: 5681880 - DNA, 25 bp, Homo sapien
tcactgcatttcttgtttgattcaa

SEQ ID NO: 5681881 - DNA, 25 bp, Homo sapien
ccaagttattgaatcaaacaagaaa

SEQ ID NO: 5681882 - DNA, 25 bp, Homo sapien
ttgaatcaaacaagaaatgcagtga

SEQ ID NO: 5681883 - DNA, 25 bp, Homo sapien
aaatagttcaaagtacataaaagat

SEQ ID NO: 5681884 - DNA, 25 bp, Homo sapien
ttttaaagcctcaaataatctttca

SEQ ID NO: 5681885 - DNA, 25 bp, Homo sapien
aaagatgaatattttaaagcctcaa

SEQ ID NO: 5681886 - DNA, 25 bp, Homo sapien
caaaatctcttccaagttattgaat

SEQ ID NO: 5681887 - DNA, 25 bp, Homo sapien
accacaggcgtgtgccaccacacct

SEQ ID NO: 5681888 - DNA, 25 bp, Homo sapien
ccacaggcgtgtgccaccacacctg

SEQ ID NO: 5681889 - DNA, 25 bp, Homo sapien
gaccacaggcgtgtgccaccacacc

SEQ ID NO: 5681890 - DNA, 25 bp, Homo sapien
cacaggcgtgtgccaccacacctgg

SEQ ID NO: 5681891 - DNA, 25 bp, Homo sapien
cgtgtgccaccacacctggccaatt

SEQ ID NO: 5681892 - DNA, 25 bp, Homo sapien
ggaccacaggcgtgtgccaccacac

SEQ ID NO: 5681893 - DNA, 25 bp, Homo sapien
caggtgtggtggcacacgcctgtgg

SEQ ID NO: 5681894 - DNA, 25 bp, Homo sapien
aggtgtggtggcacacgcctgtggt

SEQ ID NO: 5681895 - DNA, 25 bp, Homo sapien
gtgtggtggcacacgcctgtggtcc

SEQ ID NO: 5681896 - DNA, 25 bp, Homo sapien
ccaggtgtggtggcacacgcctgtg

SEQ ID NO: 5681897 - DNA, 25 bp, Homo sapien
ggtgtggtggcacacgcctgtggtc

SEQ ID NO: 5681898 - DNA, 25 bp, Homo sapien
aattggccaggtgtggtggcacacg

SEQ ID NO: 5681899 - DNA, 25 bp, Homo sapien
tgcattttcatcaatggctatcttt

SEQ ID NO: 5681900 - DNA, 25 bp, Homo sapien
taagtgaattccgaacgacctacat

SEQ ID NO: 5681901 - DNA, 25 bp, Homo sapien
gttttgcattttcatcaatggctat

SEQ ID NO: 5681902 - DNA, 25 bp, Homo sapien
taataagtgaattccgaacgaccta

SEQ ID NO: 5681903 - DNA, 25 bp, Homo sapien
attccgaacgacctacatgtattca

SEQ ID NO: 5681904 - DNA, 25 bp, Homo sapien
tgaattccgaacgacctacatgtat

SEQ ID NO: 5681905 - DNA, 25 bp, Homo sapien
taggtcgttcggaattcacttatta

SEQ ID NO: 5681906 - DNA, 25 bp, Homo sapien
gatagccattgatgaaaatgcaaaa

SEQ ID NO: 5681907 - DNA, 25 bp, Homo sapien
aatacatgtaggtcgttcggaattc

SEQ ID NO: 5681908 - DNA, 25 bp, Homo sapien
tacatgtaggtcgttcggaattcac

SEQ ID NO: 5681909 - DNA, 25 bp, Homo sapien
aaagatagccattgatgaaaatgca

SEQ ID NO: 5681910 - DNA, 25 bp, Homo sapien
tgaatacatgtaggtcgttcggaat

SEQ ID NO: 5681911 - DNA, 25 bp, Homo sapien
cataccatatggttataaactttgg

SEQ ID NO: 5681912 - DNA, 25 bp, Homo sapien
ccatatggttataaactttggtgtg

SEQ ID NO: 5681913 - DNA, 25 bp, Homo sapien
taaactttggtgtgtcatacatggg

SEQ ID NO: 5681914 - DNA, 25 bp, Homo sapien
gtcatacatgggtacttgtttttaa

SEQ ID NO: 5681915 - DNA, 25 bp, Homo sapien
ctttggtgtgtcatacatgggtact

SEQ ID NO: 5681916 - DNA, 25 bp, Homo sapien
ggtgtgtcatacatgggtacttgtt

SEQ ID NO: 5681917 - DNA, 25 bp, Homo sapien
cacaccaaagtttataaccatatgg

SEQ ID NO: 5681918 - DNA, 25 bp, Homo sapien
aagtttataaccatatggtatgacc

SEQ ID NO: 5681919 - DNA, 25 bp, Homo sapien
aaacaagtacccatgtatgacacac

SEQ ID NO: 5681920 - DNA, 25 bp, Homo sapien
caagtacccatgtatgacacaccaa

SEQ ID NO: 5681921 - DNA, 25 bp, Homo sapien
cccatgtatgacacaccaaagttta

SEQ ID NO: 5681922 - DNA, 25 bp, Homo sapien
ttaaaaacaagtacccatgtatgac

SEQ ID NO: 5681923 - DNA, 25 bp, Homo sapien
aactgccacataaggaagatggtta

SEQ ID NO: 5681924 - DNA, 25 bp, Homo sapien
actgccacataaggaagatggttaa

SEQ ID NO: 5681925 - DNA, 25 bp, Homo sapien
taaccatcttccttatgtggcagtt

SEQ ID NO: 5681926 - DNA, 25 bp, Homo sapien
ttaaccatcttccttatgtggcagt

SEQ ID NO: 5681927 - DNA, 25 bp, Homo sapien
ttccttgggtctgggctttggtgcc

SEQ ID NO: 5681928 - DNA, 25 bp, Homo sapien
ccacataaggaagatggttaaaagt

SEQ ID NO: 5681929 - DNA, 25 bp, Homo sapien
actgccacataaggaagatggttaa

SEQ ID NO: 5681930 - DNA, 25 bp, Homo sapien
aactgccacataaggaagatggtta

SEQ ID NO: 5681931 - DNA, 25 bp, Homo sapien
ggctttggtgcctcacgtttgtaat

SEQ ID NO: 5681932 - DNA, 25 bp, Homo sapien
ccttccttgggtctgggctttggtg

SEQ ID NO: 5681933 - DNA, 25 bp, Homo sapien
taaccatcttccttatgtggcagtt

SEQ ID NO: 5681934 - DNA, 25 bp, Homo sapien
attacaaacgtgaggcaccaaagcc

SEQ ID NO: 5681935 - DNA, 25 bp, Homo sapien
caccaaagcccagacccaaggaagg

SEQ ID NO: 5681936 - DNA, 25 bp, Homo sapien
gattacaaacgtgaggcaccaaagc

SEQ ID NO: 5681937 - DNA, 25 bp, Homo sapien
ttaaccatcttccttatgtggcagt

SEQ ID NO: 5681938 - DNA, 25 bp, Homo sapien
acttttaaccatcttccttatgtgg

SEQ ID NO: 5681939 - DNA, 25 bp, Homo sapien
atgagactgcatttattaatgagtt

SEQ ID NO: 5681940 - DNA, 25 bp, Homo sapien
aatgagactgcatttattaatgagt

SEQ ID NO: 5681941 - DNA, 25 bp, Homo sapien
atgtcaattttcttgtgacttgcca

SEQ ID NO: 5681942 - DNA, 25 bp, Homo sapien
aaatgagactgcatttattaatgag

SEQ ID NO: 5681943 - DNA, 25 bp, Homo sapien
tgtcaattttcttgtgacttgccaa

SEQ ID NO: 5681944 - DNA, 25 bp, Homo sapien
aactcattaataaatgcagtctcat

SEQ ID NO: 5681945 - DNA, 25 bp, Homo sapien
actcattaataaatgcagtctcatt

SEQ ID NO: 5681946 - DNA, 25 bp, Homo sapien
ttggcaagtcacaagaaaattgaca

SEQ ID NO: 5681947 - DNA, 25 bp, Homo sapien
ctcattaataaatgcagtctcattt

SEQ ID NO: 5681948 - DNA, 25 bp, Homo sapien
tggcaagtcacaagaaaattgacat

SEQ ID NO: 5681949 - DNA, 25 bp, Homo sapien
caagaacttaatttcaaacactagg

SEQ ID NO: 5681950 - DNA, 25 bp, Homo sapien
gacttgccaagaacttaatttcaaa

SEQ ID NO: 5681951 - DNA, 25 bp, Homo sapien
aatgagactgcatttattaatgagt

SEQ ID NO: 5681952 - DNA, 25 bp, Homo sapien
agtctcttctcattaggaaaatgag

SEQ ID NO: 5681953 - DNA, 25 bp, Homo sapien
tgtcaattttcttgtgacttgccaa

SEQ ID NO: 5681954 - DNA, 25 bp, Homo sapien
tctcattaggaaaatgagactgcat

SEQ ID NO: 5681955 - DNA, 25 bp, Homo sapien
gacataactcattaataaatgcagt

SEQ ID NO: 5681956 - DNA, 25 bp, Homo sapien
cctagtgtttgaaattaagttcttg

SEQ ID NO: 5681957 - DNA, 25 bp, Homo sapien
actcattaataaatgcagtctcatt

SEQ ID NO: 5681958 - DNA, 25 bp, Homo sapien
ttggcaagtcacaagaaaattgaca

SEQ ID NO: 5681959 - DNA, 25 bp, Homo sapien
gaaattaagttcttggcaagtcaca

SEQ ID NO: 5681960 - DNA, 25 bp, Homo sapien
ctcattttcctaatgagaagagact

SEQ ID NO: 5681961 - DNA, 25 bp, Homo sapien
atgccacgggagatggaaccaagga

SEQ ID NO: 5681962 - DNA, 25 bp, Homo sapien
tctctgaccgagagggaagcgatgc

SEQ ID NO: 5681963 - DNA, 25 bp, Homo sapien
ctgaccgagagggaagcgatgccac

SEQ ID NO: 5681964 - DNA, 25 bp, Homo sapien
agctgtacgtctctgaccgagaggg

SEQ ID NO: 5681965 - DNA, 25 bp, Homo sapien
tgtacgtctctgaccgagagggaag

SEQ ID NO: 5681966 - DNA, 25 bp, Homo sapien
gcgatgccacgggagatggaaccaa

SEQ ID NO: 5681967 - DNA, 25 bp, Homo sapien
gtggcatcgcttccctctcggtcag

SEQ ID NO: 5681968 - DNA, 25 bp, Homo sapien
gcatcgcttccctctcggtcagaga

SEQ ID NO: 5681969 - DNA, 25 bp, Homo sapien
ccctctcggtcagagacgtacagct

SEQ ID NO: 5681970 - DNA, 25 bp, Homo sapien
ttggttccatctcccgtggcatcgc

SEQ ID NO: 5681971 - DNA, 25 bp, Homo sapien
gcttccctctcggtcagagacgtac

SEQ ID NO: 5681972 - DNA, 25 bp, Homo sapien
tccttggttccatctcccgtggcat

SEQ ID NO: 5681973 - DNA, 25 bp, Homo sapien
ttaatggccagaccataacttaccc

SEQ ID NO: 5681974 - DNA, 25 bp, Homo sapien
gtaaggtgactaatagttaatggcc

SEQ ID NO: 5681975 - DNA, 25 bp, Homo sapien
gactaatagttaatggccagaccat

SEQ ID NO: 5681976 - DNA, 25 bp, Homo sapien
gttctgtttacaaagataaggaatg

SEQ ID NO: 5681977 - DNA, 25 bp, Homo sapien
taatcgatgcttgttctgtttacaa

SEQ ID NO: 5681978 - DNA, 25 bp, Homo sapien
gaatgaataaagtagtaaggtgact

SEQ ID NO: 5681979 - DNA, 25 bp, Homo sapien
cagaacaagcatcgattaataaaaa

SEQ ID NO: 5681980 - DNA, 25 bp, Homo sapien
ggtctggccattaactattagtcac

SEQ ID NO: 5681981 - DNA, 25 bp, Homo sapien
agtcaccttactactttattcattc

SEQ ID NO: 5681982 - DNA, 25 bp, Homo sapien
cattccttatctttgtaaacagaac

SEQ ID NO: 5681983 - DNA, 25 bp, Homo sapien
ggtaagttatggtctggccattaac

SEQ ID NO: 5681984 - DNA, 25 bp, Homo sapien
ttgtaaacagaacaagcatcgatta

SEQ ID NO: 5681985 - DNA, 25 bp, Homo sapien
tggagtggggaaataactaggatat

SEQ ID NO: 5681986 - DNA, 25 bp, Homo sapien
atggagtggggaaataactaggata

SEQ ID NO: 5681987 - DNA, 25 bp, Homo sapien
atatcctagttatttccccactcca

SEQ ID NO: 5681988 - DNA, 25 bp, Homo sapien
tatcctagttatttccccactccat

SEQ ID NO: 5681989 - DNA, 25 bp, Homo sapien
tgatcagagttcattttgaaaacct

SEQ ID NO: 5681990 - DNA, 25 bp, Homo sapien
cagagttcattttgaaaacctggat

SEQ ID NO: 5681991 - DNA, 25 bp, Homo sapien
aactaatgtttttatgagatggatg

SEQ ID NO: 5681992 - DNA, 25 bp, Homo sapien
tgagatggatgttattgaaatggag

SEQ ID NO: 5681993 - DNA, 25 bp, Homo sapien
tggagtggggaaataactaggatat

SEQ ID NO: 5681994 - DNA, 25 bp, Homo sapien
tgaaaacctggattattaactaatg

SEQ ID NO: 5681995 - DNA, 25 bp, Homo sapien
catccatctcataaaaacattagtt

SEQ ID NO: 5681996 - DNA, 25 bp, Homo sapien
ggttttcaaaatgaactctgatcat

SEQ ID NO: 5681997 - DNA, 25 bp, Homo sapien
atatcctagttatttccccactcca

SEQ ID NO: 5681998 - DNA, 25 bp, Homo sapien
tccatttcaataacatccatctcat

SEQ ID NO: 5681999 - DNA, 25 bp, Homo sapien
cattagttaataatccaggttttca

SEQ ID NO: 5682000 - DNA, 25 bp, Homo sapien
tagttatttccccactccatttcaa

SEQ ID NO: 5682001 - DNA, 25 bp, Homo sapien
ggtacaaaatccaacattccagcgt

SEQ ID NO: 5682002 - DNA, 25 bp, Homo sapien
taaggtacaaaatccaacattccag

SEQ ID NO: 5682003 - DNA, 25 bp, Homo sapien
aacattccagcgtatgtctgatcaa

SEQ ID NO: 5682004 - DNA, 25 bp, Homo sapien
caaaatccaacattccagcgtatgt

SEQ ID NO: 5682005 - DNA, 25 bp, Homo sapien
ccagcgtatgtctgatcaacttcaa

SEQ ID NO: 5682006 - DNA, 25 bp, Homo sapien
tatgtctgatcaacttcaaagccca

SEQ ID NO: 5682007 - DNA, 25 bp, Homo sapien
gaagttgatcagacatacgctggaa

SEQ ID NO: 5682008 - DNA, 25 bp, Homo sapien
cgctggaatgttggattttgtacct

SEQ ID NO: 5682009 - DNA, 25 bp, Homo sapien
tgatcagacatacgctggaatgttg

SEQ ID NO: 5682010 - DNA, 25 bp, Homo sapien
tgggctttgaagttgatcagacata

SEQ ID NO: 5682011 - DNA, 25 bp, Homo sapien
cagacatacgctggaatgttggatt

SEQ ID NO: 5682012 - DNA, 25 bp, Homo sapien
gctttgaagttgatcagacatacgc

SEQ ID NO: 5682013 - DNA, 25 bp, Homo sapien
tataggtaaagaaataagctcagaa

SEQ ID NO: 5682014 - DNA, 25 bp, Homo sapien
ttataggtaaagaaataagctcaga

SEQ ID NO: 5682015 - DNA, 25 bp, Homo sapien
ttctgagcttatttctttacctata

SEQ ID NO: 5682016 - DNA, 25 bp, Homo sapien
tctgagcttatttctttacctataa

SEQ ID NO: 5682017 - DNA, 25 bp, Homo sapien
tataggtaaagaaataagctcagaa

SEQ ID NO: 5682018 - DNA, 25 bp, Homo sapien
cctcagcacagcctttcaagatggg

SEQ ID NO: 5682019 - DNA, 25 bp, Homo sapien
ttataggtaaagaaataagctcaga

SEQ ID NO: 5682020 - DNA, 25 bp, Homo sapien
caagatggggattgtttttcctatt

SEQ ID NO: 5682021 - DNA, 25 bp, Homo sapien
gatatctgatttgtatgtgttattt

SEQ ID NO: 5682022 - DNA, 25 bp, Homo sapien
tattttatttcatcctcagcacagc

SEQ ID NO: 5682023 - DNA, 25 bp, Homo sapien
tctgagcttatttctttacctataa

SEQ ID NO: 5682024 - DNA, 25 bp, Homo sapien
aaggctgtgctgaggatgaaataaa

SEQ ID NO: 5682025 - DNA, 25 bp, Homo sapien
aaataacacatacaaatcagatatc

SEQ ID NO: 5682026 - DNA, 25 bp, Homo sapien
aaaacaatccccatcttgaaaggct

SEQ ID NO: 5682027 - DNA, 25 bp, Homo sapien
caatccccatcttgaaaggctgtgc

SEQ ID NO: 5682028 - DNA, 25 bp, Homo sapien
aataggaaaaacaatccccatcttg

SEQ ID NO: 5682029 - DNA, 25 bp, Homo sapien
aattttctaacctcagagcttctgt

SEQ ID NO: 5682030 - DNA, 25 bp, Homo sapien
aaattttctaacctcagagcttctg

SEQ ID NO: 5682031 - DNA, 25 bp, Homo sapien
attttctaacctcagagcttctgtt

SEQ ID NO: 5682032 - DNA, 25 bp, Homo sapien
cagaagctctgaggttagaaaattt

SEQ ID NO: 5682033 - DNA, 25 bp, Homo sapien
aacagaagctctgaggttagaaaat

SEQ ID NO: 5682034 - DNA, 25 bp, Homo sapien
acagaagctctgaggttagaaaatt

SEQ ID NO: 5682035 - DNA, 25 bp, Homo sapien
cagagggagctggtgtttatttgcc

SEQ ID NO: 5682036 - DNA, 25 bp, Homo sapien
tcagacctactagttgtgaggcctt

SEQ ID NO: 5682037 - DNA, 25 bp, Homo sapien
aaattttctaacctcagagcttctg

SEQ ID NO: 5682038 - DNA, 25 bp, Homo sapien
tactagttgtgaggccttctgaaat

SEQ ID NO: 5682039 - DNA, 25 bp, Homo sapien
gctggtgtttatttgccatctctac

SEQ ID NO: 5682040 - DNA, 25 bp, Homo sapien
ttcctttaaagtccagagggagctg

SEQ ID NO: 5682041 - DNA, 25 bp, Homo sapien
gaaaatttcagaaggcctcacaact

SEQ ID NO: 5682042 - DNA, 25 bp, Homo sapien
cagctccctctggactttaaaggaa

SEQ ID NO: 5682043 - DNA, 25 bp, Homo sapien
cagaagctctgaggttagaaaattt

SEQ ID NO: 5682044 - DNA, 25 bp, Homo sapien
gatggcaaataaacaccagctccct

SEQ ID NO: 5682045 - DNA, 25 bp, Homo sapien
gaaggcctcacaactagtaggtctg

SEQ ID NO: 5682046 - DNA, 25 bp, Homo sapien
taaaggaaacagaagctctgaggtt

SEQ ID NO: 5682047 - DNA, 25 bp, Homo sapien
tccggggagaccatactgtgcagta

SEQ ID NO: 5682048 - DNA, 25 bp, Homo sapien
gggagaccatactgtgcagtaggaa

SEQ ID NO: 5682049 - DNA, 25 bp, Homo sapien
gtttccggggagaccatactgtgca

SEQ ID NO: 5682050 - DNA, 25 bp, Homo sapien
ctagttgtttttctcccaccctcat

SEQ ID NO: 5682051 - DNA, 25 bp, Homo sapien
tttccggggagaccatactgtgcag

SEQ ID NO: 5682052 - DNA, 25 bp, Homo sapien
ggagaccatactgtgcagtaggaaa

SEQ ID NO: 5682053 - DNA, 25 bp, Homo sapien
ctactgcacagtatggtctccccgg

SEQ ID NO: 5682054 - DNA, 25 bp, Homo sapien
atgagggtgggagaaaaacaactag

SEQ ID NO: 5682055 - DNA, 25 bp, Homo sapien
tttcctactgcacagtatggtctcc

SEQ ID NO: 5682056 - DNA, 25 bp, Homo sapien
ctgcacagtatggtctccccggaaa

SEQ ID NO: 5682057 - DNA, 25 bp, Homo sapien
cacagtatggtctccccggaaacct

SEQ ID NO: 5682058 - DNA, 25 bp, Homo sapien
actgcacagtatggtctccccggaa

SEQ ID NO: 5682059 - DNA, 25 bp, Homo sapien
tgctccagtcgggtttcggcgcttt

SEQ ID NO: 5682060 - DNA, 25 bp, Homo sapien
cagagtgggcgccccgcgaatgttt

SEQ ID NO: 5682061 - DNA, 25 bp, Homo sapien
tccttagtgcctaccagagtgggcg

SEQ ID NO: 5682062 - DNA, 25 bp, Homo sapien
ttagtgcctaccagagtgggcgccc

SEQ ID NO: 5682063 - DNA, 25 bp, Homo sapien
gctccagtcgggtttcggcgctttc

SEQ ID NO: 5682064 - DNA, 25 bp, Homo sapien
agtgcctaccagagtgggcgccccg

SEQ ID NO: 5682065 - DNA, 25 bp, Homo sapien
cgcccactctggtaggcactaagga

SEQ ID NO: 5682066 - DNA, 25 bp, Homo sapien
gaaagcgccgaaacccgactggagc

SEQ ID NO: 5682067 - DNA, 25 bp, Homo sapien
aaagcgccgaaacccgactggagca

SEQ ID NO: 5682068 - DNA, 25 bp, Homo sapien
ggcgcccactctggtaggcactaag

SEQ ID NO: 5682069 - DNA, 25 bp, Homo sapien
gcccactctggtaggcactaaggaa

SEQ ID NO: 5682070 - DNA, 25 bp, Homo sapien
gggcgcccactctggtaggcactaa

SEQ ID NO: 5682071 - DNA, 25 bp, Homo sapien
gctaggtgggtgagactcagtgtat

SEQ ID NO: 5682072 - DNA, 25 bp, Homo sapien
ggtgctaggtgggtgagactcagtg

SEQ ID NO: 5682073 - DNA, 25 bp, Homo sapien
tgctaggtgggtgagactcagtgta

SEQ ID NO: 5682074 - DNA, 25 bp, Homo sapien
tggtgctaggtgggtgagactcagt

SEQ ID NO: 5682075 - DNA, 25 bp, Homo sapien
gtgctaggtgggtgagactcagtgt

SEQ ID NO: 5682076 - DNA, 25 bp, Homo sapien
ctaggtgggtgagactcagtgtatg

SEQ ID NO: 5682077 - DNA, 25 bp, Homo sapien
cgtcggtgttgcagtctgtgtcctt

SEQ ID NO: 5682078 - DNA, 25 bp, Homo sapien
tcataagacggcgtcggtgttgcag

SEQ ID NO: 5682079 - DNA, 25 bp, Homo sapien
ttggagtcataagacggcgtcggtg

SEQ ID NO: 5682080 - DNA, 25 bp, Homo sapien
gcgtcggtgttgcagtctgtgtcct

SEQ ID NO: 5682081 - DNA, 25 bp, Homo sapien
gtcggtgttgcagtctgtgtccttg

SEQ ID NO: 5682082 - DNA, 25 bp, Homo sapien
ataagacggcgtcggtgttgcagtc

SEQ ID NO: 5682083 - DNA, 25 bp, Homo sapien
caccgacgccgtcttatgactccaa

SEQ ID NO: 5682084 - DNA, 25 bp, Homo sapien
actgcaacaccgacgccgtcttatg

SEQ ID NO: 5682085 - DNA, 25 bp, Homo sapien
gactgcaacaccgacgccgtcttat

SEQ ID NO: 5682086 - DNA, 25 bp, Homo sapien
caaggacacagactgcaacaccgac

SEQ ID NO: 5682087 - DNA, 25 bp, Homo sapien
ctgcaacaccgacgccgtcttatga

SEQ ID NO: 5682088 - DNA, 25 bp, Homo sapien
aaggacacagactgcaacaccgacg

SEQ ID NO: 5682089 - DNA, 25 bp, Homo sapien
acactgagtctcacccacctagcac

SEQ ID NO: 5682090 - DNA, 25 bp, Homo sapien
cactgagtctcacccacctagcacc

SEQ ID NO: 5682091 - DNA, 25 bp, Homo sapien
actgagtctcacccacctagcacca

SEQ ID NO: 5682092 - DNA, 25 bp, Homo sapien
atacactgagtctcacccacctagc

SEQ ID NO: 5682093 - DNA, 25 bp, Homo sapien
catacactgagtctcacccacctag

SEQ ID NO: 5682094 - DNA, 25 bp, Homo sapien
tacactgagtctcacccacctagca

SEQ ID NO: 5682095 - DNA, 25 bp, Homo sapien
agaccatagtaggacagcattttct

SEQ ID NO: 5682096 - DNA, 25 bp, Homo sapien
gacaggtacagaccatagtaggaca

SEQ ID NO: 5682097 - DNA, 25 bp, Homo sapien
caggtacagaccatagtaggacagc

SEQ ID NO: 5682098 - DNA, 25 bp, Homo sapien
ggtacagaccatagtaggacagcat

SEQ ID NO: 5682099 - DNA, 25 bp, Homo sapien
tgggacaggtacagaccatagtagg

SEQ ID NO: 5682100 - DNA, 25 bp, Homo sapien
cagaccatagtaggacagcattttc

SEQ ID NO: 5682101 - DNA, 25 bp, Homo sapien
gaaaatgctgtcctactatggtctg

SEQ ID NO: 5682102 - DNA, 25 bp, Homo sapien
agaaaatgctgtcctactatggtct

SEQ ID NO: 5682103 - DNA, 25 bp, Homo sapien
cctactatggtctgtacctgtccca

SEQ ID NO: 5682104 - DNA, 25 bp, Homo sapien
aatgctgtcctactatggtctgtac

SEQ ID NO: 5682105 - DNA, 25 bp, Homo sapien
tgtcctactatggtctgtacctgtc

SEQ ID NO: 5682106 - DNA, 25 bp, Homo sapien
gctgtcctactatggtctgtacctg

SEQ ID NO: 5682107 - DNA, 25 bp, Homo sapien
agccttgtctgccatttttggaaga

SEQ ID NO: 5682108 - DNA, 25 bp, Homo sapien
gccttgtctgccatttttggaagaa

SEQ ID NO: 5682109 - DNA, 25 bp, Homo sapien
cagccttgtctgccatttttggaag

SEQ ID NO: 5682110 - DNA, 25 bp, Homo sapien
ccagccttgtctgccatttttggaa

SEQ ID NO: 5682111 - DNA, 25 bp, Homo sapien
ttcttccaaaaatggcagacaaggc

SEQ ID NO: 5682112 - DNA, 25 bp, Homo sapien
tcttccaaaaatggcagacaaggct

SEQ ID NO: 5682113 - DNA, 25 bp, Homo sapien
cttccaaaaatggcagacaaggctg

SEQ ID NO: 5682114 - DNA, 25 bp, Homo sapien
ttccaaaaatggcagacaaggctgg

SEQ ID NO: 5682115 - DNA, 25 bp, Homo sapien
cttgtctgccatttttggaagaagt

SEQ ID NO: 5682116 - DNA, 25 bp, Homo sapien
agccttgtctgccatttttggaaga

SEQ ID NO: 5682117 - DNA, 25 bp, Homo sapien
ccagccttgtctgccatttttggaa

SEQ ID NO: 5682118 - DNA, 25 bp, Homo sapien
ttggaagaagttatttacagaaata

SEQ ID NO: 5682119 - DNA, 25 bp, Homo sapien
gccttgtctgccatttttggaagaa

SEQ ID NO: 5682120 - DNA, 25 bp, Homo sapien
ccaaagtcgggggattacagatgtg

SEQ ID NO: 5682121 - DNA, 25 bp, Homo sapien
tatttctgtaaataacttcttccaa

SEQ ID NO: 5682122 - DNA, 25 bp, Homo sapien
ttcttccaaaaatggcagacaaggc

SEQ ID NO: 5682123 - DNA, 25 bp, Homo sapien
cacatctgtaatcccccgactttgg

SEQ ID NO: 5682124 - DNA, 25 bp, Homo sapien
tcttccaaaaatggcagacaaggct

SEQ ID NO: 5682125 - DNA, 25 bp, Homo sapien
acttcttccaaaaatggcagacaag

SEQ ID NO: 5682126 - DNA, 25 bp, Homo sapien
ttccaaaaatggcagacaaggctgg

SEQ ID NO: 5682127 - DNA, 25 bp, Homo sapien
actcctgacctcatgcaaaccaagg

SEQ ID NO: 5682128 - DNA, 25 bp, Homo sapien
tatttttagtagagacagggttcca

SEQ ID NO: 5682129 - DNA, 25 bp, Homo sapien
accatgttggccaggcttgtcttga

SEQ ID NO: 5682130 - DNA, 25 bp, Homo sapien
ctcctgacctcatgcaaaccaaggc

SEQ ID NO: 5682131 - DNA, 25 bp, Homo sapien
gaaccctgtctctactaaaaataca

SEQ ID NO: 5682132 - DNA, 25 bp, Homo sapien
gccttggtttgcatgaggtcaggag

SEQ ID NO: 5682133 - DNA, 25 bp, Homo sapien
tggaaccctgtctctactaaaaata

SEQ ID NO: 5682134 - DNA, 25 bp, Homo sapien
ttcaagacaagcctggccaacatgg

SEQ ID NO: 5682135 - DNA, 25 bp, Homo sapien
tgagagaggtgacgcatggaagcca

SEQ ID NO: 5682136 - DNA, 25 bp, Homo sapien
cttgagagaggtgacgcatggaagc

SEQ ID NO: 5682137 - DNA, 25 bp, Homo sapien
ttgagagaggtgacgcatggaagcc

SEQ ID NO: 5682138 - DNA, 25 bp, Homo sapien
gcttccatgcgtcacctctctcaag

SEQ ID NO: 5682139 - DNA, 25 bp, Homo sapien
ggcttccatgcgtcacctctctcaa

SEQ ID NO: 5682140 - DNA, 25 bp, Homo sapien
tggcttccatgcgtcacctctctca

SEQ ID NO: 5682141 - DNA, 25 bp, Homo sapien
ggaagccagtggcttggaggctggg

SEQ ID NO: 5682142 - DNA, 25 bp, Homo sapien
aaaatgtcttgagagaggtgacgca

SEQ ID NO: 5682143 - DNA, 25 bp, Homo sapien
gaaggttgaggactcagttttgctg

SEQ ID NO: 5682144 - DNA, 25 bp, Homo sapien
tgagagaggtgacgcatggaagcca

SEQ ID NO: 5682145 - DNA, 25 bp, Homo sapien
taaaattggaaggttgaggactcag

SEQ ID NO: 5682146 - DNA, 25 bp, Homo sapien
cagttttgctgaaaatgtcttgaga

SEQ ID NO: 5682147 - DNA, 25 bp, Homo sapien
tcacctctctcaagacattttcagc

SEQ ID NO: 5682148 - DNA, 25 bp, Homo sapien
tggcttccatgcgtcacctctctca

SEQ ID NO: 5682149 - DNA, 25 bp, Homo sapien
tgagtcctcaaccttccaattttaa

SEQ ID NO: 5682150 - DNA, 25 bp, Homo sapien
gacattttcagcaaaactgagtcct

SEQ ID NO: 5682151 - DNA, 25 bp, Homo sapien
tcagcaaaactgagtcctcaacctt

SEQ ID NO: 5682152 - DNA, 25 bp, Homo sapien
catgcgtcacctctctcaagacatt

SEQ ID NO: 5682153 - DNA, 25 bp, Homo sapien
cagtagctggaattataggcgccca

SEQ ID NO: 5682154 - DNA, 25 bp, Homo sapien
ggaattataggcgcccaccaccaca

SEQ ID NO: 5682155 - DNA, 25 bp, Homo sapien
ccagtagctggaattataggcgccc

SEQ ID NO: 5682156 - DNA, 25 bp, Homo sapien
tagctggaattataggcgcccacca

SEQ ID NO: 5682157 - DNA, 25 bp, Homo sapien
agctggaattataggcgcccaccac

SEQ ID NO: 5682158 - DNA, 25 bp, Homo sapien
gtagctggaattataggcgcccacc

SEQ ID NO: 5682159 - DNA, 25 bp, Homo sapien
ggtgggcgcctataattccagctac

SEQ ID NO: 5682160 - DNA, 25 bp, Homo sapien
tggtgggcgcctataattccagcta

SEQ ID NO: 5682161 - DNA, 25 bp, Homo sapien
gggcgcctataattccagctactgg

SEQ ID NO: 5682162 - DNA, 25 bp, Homo sapien
tgtggtggtgggcgcctataattcc

SEQ ID NO: 5682163 - DNA, 25 bp, Homo sapien
tgggcgcctataattccagctactg

SEQ ID NO: 5682164 - DNA, 25 bp, Homo sapien
gtggtgggcgcctataattccagct

SEQ ID NO: 5682165 - DNA, 25 bp, Homo sapien
gttacctgcagtccagaactgttat

SEQ ID NO: 5682166 - DNA, 25 bp, Homo sapien
cttctcccttatccaaggttttgct

SEQ ID NO: 5682167 - DNA, 25 bp, Homo sapien
agggtctcgcctggtgccagataca

SEQ ID NO: 5682168 - DNA, 25 bp, Homo sapien
ttacctgcagtccagaactgttata

SEQ ID NO: 5682169 - DNA, 25 bp, Homo sapien
tacagtagtccctacttctccctta

SEQ ID NO: 5682170 - DNA, 25 bp, Homo sapien
tacctgcagtccagaactgttatat

SEQ ID NO: 5682171 - DNA, 25 bp, Homo sapien
tgtatctggcaccaggcgagaccct

SEQ ID NO: 5682172 - DNA, 25 bp, Homo sapien
agcaaaaccttggataagggagaag

SEQ ID NO: 5682173 - DNA, 25 bp, Homo sapien
atataacagttctggactgcaggta

SEQ ID NO: 5682174 - DNA, 25 bp, Homo sapien
tataacagttctggactgcaggtaa

SEQ ID NO: 5682175 - DNA, 25 bp, Homo sapien
ataacagttctggactgcaggtaac

SEQ ID NO: 5682176 - DNA, 25 bp, Homo sapien
taagggagaagtagggactactgta

SEQ ID NO: 5682177 - DNA, 25 bp, Homo sapien
gagaagctaaggtaggaggatccct

SEQ ID NO: 5682178 - DNA, 25 bp, Homo sapien
ggcacacgcctgtggtcccagctac

SEQ ID NO: 5682179 - DNA, 25 bp, Homo sapien
ttttaaacagtagctgagcatggtg

SEQ ID NO: 5682180 - DNA, 25 bp, Homo sapien
tgagaagctaaggtaggaggatccc

SEQ ID NO: 5682181 - DNA, 25 bp, Homo sapien
agaagctaaggtaggaggatccctt

SEQ ID NO: 5682182 - DNA, 25 bp, Homo sapien
ttgagaagctaaggtaggaggatcc

SEQ ID NO: 5682183 - DNA, 25 bp, Homo sapien
gtagctgggaccacaggcgtgtgcc

SEQ ID NO: 5682184 - DNA, 25 bp, Homo sapien
ggatcctcctaccttagcttctcaa

SEQ ID NO: 5682185 - DNA, 25 bp, Homo sapien
gggatcctcctaccttagcttctca

SEQ ID NO: 5682186 - DNA, 25 bp, Homo sapien
caccatgctcagctactgtttaaaa

SEQ ID NO: 5682187 - DNA, 25 bp, Homo sapien
agggatcctcctaccttagcttctc

SEQ ID NO: 5682188 - DNA, 25 bp, Homo sapien
aagggatcctcctaccttagcttct

SEQ ID NO: 5682189 - DNA, 25 bp, Homo sapien
ggttatttgaagccgagttcgagac

SEQ ID NO: 5682190 - DNA, 25 bp, Homo sapien
agggttatttgaagccgagttcgag

SEQ ID NO: 5682191 - DNA, 25 bp, Homo sapien
gagggttatttgaagccgagttcga

SEQ ID NO: 5682192 - DNA, 25 bp, Homo sapien
gggttatttgaagccgagttcgaga

SEQ ID NO: 5682193 - DNA, 25 bp, Homo sapien
ctcgaactcggcttcaaataaccct

SEQ ID NO: 5682194 - DNA, 25 bp, Homo sapien
tctcgaactcggcttcaaataaccc

SEQ ID NO: 5682195 - DNA, 25 bp, Homo sapien
tcgaactcggcttcaaataaccctc

SEQ ID NO: 5682196 - DNA, 25 bp, Homo sapien
gtctcgaactcggcttcaaataacc

SEQ ID NO: 5682197 - DNA, 25 bp, Homo sapien
aaggctttcaagcaatttgagaggc

SEQ ID NO: 5682198 - DNA, 25 bp, Homo sapien
gaccagcctgggcccacacttgtaa

SEQ ID NO: 5682199 - DNA, 25 bp, Homo sapien
gggttatttgaagccgagttcgaga

SEQ ID NO: 5682200 - DNA, 25 bp, Homo sapien
gggtgcagaggctcaaggctttcaa

SEQ ID NO: 5682201 - DNA, 25 bp, Homo sapien
gagggttatttgaagccgagttcga

SEQ ID NO: 5682202 - DNA, 25 bp, Homo sapien
gcagaggctcaaggctttcaagcaa

SEQ ID NO: 5682203 - DNA, 25 bp, Homo sapien
gcctctcaaattgcttgaaagcctt

SEQ ID NO: 5682204 - DNA, 25 bp, Homo sapien
tctcgaactcggcttcaaataaccc

SEQ ID NO: 5682205 - DNA, 25 bp, Homo sapien
ttacaagtgtgggcccaggctggtc

SEQ ID NO: 5682206 - DNA, 25 bp, Homo sapien
ttgaaagccttgagcctctgcaccc

SEQ ID NO: 5682207 - DNA, 25 bp, Homo sapien
tcgaactcggcttcaaataaccctc

SEQ ID NO: 5682208 - DNA, 25 bp, Homo sapien
ttgcttgaaagccttgagcctctgc

SEQ ID NO: 5682209 - DNA, 25 bp, Homo sapien
tctttgaggccagggtcttagtctg

SEQ ID NO: 5682210 - DNA, 25 bp, Homo sapien
ctttcctgtgtaaacgagatgacag

SEQ ID NO: 5682211 - DNA, 25 bp, Homo sapien
cctgtgtaaacgagatgacagactc

SEQ ID NO: 5682212 - DNA, 25 bp, Homo sapien
tgtgtaaacgagatgacagactctt

SEQ ID NO: 5682213 - DNA, 25 bp, Homo sapien
aacgagatgacagactctttgaggc

SEQ ID NO: 5682214 - DNA, 25 bp, Homo sapien
agatgacagactctttgaggccagg

SEQ ID NO: 5682215 - DNA, 25 bp, Homo sapien
ctgtcatctcgtttacacaggaaag

SEQ ID NO: 5682216 - DNA, 25 bp, Homo sapien
gagtctgtcatctcgtttacacagg

SEQ ID NO: 5682217 - DNA, 25 bp, Homo sapien
ggcctcaaagagtctgtcatctcgt

SEQ ID NO: 5682218 - DNA, 25 bp, Homo sapien
cagactaagaccctggcctcaaaga

SEQ ID NO: 5682219 - DNA, 25 bp, Homo sapien
caaagagtctgtcatctcgtttaca

SEQ ID NO: 5682220 - DNA, 25 bp, Homo sapien
cctggcctcaaagagtctgtcatct

SEQ ID NO: 5682221 - DNA, 25 bp, Homo sapien
aagatggggtctcgggcatcttcag

SEQ ID NO: 5682222 - DNA, 25 bp, Homo sapien
ggtctcgggcatcttcaggcaagag

SEQ ID NO: 5682223 - DNA, 25 bp, Homo sapien
tctcgggcatcttcaggcaagaggc

SEQ ID NO: 5682224 - DNA, 25 bp, Homo sapien
gggtctcgggcatcttcaggcaaga

SEQ ID NO: 5682225 - DNA, 25 bp, Homo sapien
aaagatggggtctcgggcatcttca

SEQ ID NO: 5682226 - DNA, 25 bp, Homo sapien
gtctcgggcatcttcaggcaagagg

SEQ ID NO: 5682227 - DNA, 25 bp, Homo sapien
ctcttgcctgaagatgcccgagacc

SEQ ID NO: 5682228 - DNA, 25 bp, Homo sapien
tgaagatgcccgagaccccatcttt

SEQ ID NO: 5682229 - DNA, 25 bp, Homo sapien
ctgaagatgcccgagaccccatctt

SEQ ID NO: 5682230 - DNA, 25 bp, Homo sapien
cctcttgcctgaagatgcccgagac

SEQ ID NO: 5682231 - DNA, 25 bp, Homo sapien
gcctcttgcctgaagatgcccgaga

SEQ ID NO: 5682232 - DNA, 25 bp, Homo sapien
ttgcctgaagatgcccgagacccca

SEQ ID NO: 5682233 - DNA, 25 bp, Homo sapien
gaggcagaggggatctggcgcagag

SEQ ID NO: 5682234 - DNA, 25 bp, Homo sapien
cagaggcaggatctaaggaagagga

SEQ ID NO: 5682235 - DNA, 25 bp, Homo sapien
ctctgcgccagatcccctctgcctc

SEQ ID NO: 5682236 - DNA, 25 bp, Homo sapien
tcctcttccttagatcctgcctctg

SEQ ID NO: 5682237 - DNA, 25 bp, Homo sapien
gaagacaggcaagcatggagggccc

SEQ ID NO: 5682238 - DNA, 25 bp, Homo sapien
atctggcgcagaggcaggatctaag

SEQ ID NO: 5682239 - DNA, 25 bp, Homo sapien
gatctggcgcagaggcaggatctaa

SEQ ID NO: 5682240 - DNA, 25 bp, Homo sapien
cagaggcaggatctaaggaagagga

SEQ ID NO: 5682241 - DNA, 25 bp, Homo sapien
gaggcaggatctaaggaagaggaag

SEQ ID NO: 5682242 - DNA, 25 bp, Homo sapien
ggcaagcatggagggcccgggttag

SEQ ID NO: 5682243 - DNA, 25 bp, Homo sapien
cttagatcctgcctctgcgccagat

SEQ ID NO: 5682244 - DNA, 25 bp, Homo sapien
ctctgcgccagatcccctctgcctc

SEQ ID NO: 5682245 - DNA, 25 bp, Homo sapien
ctaacccgggccctccatgcttgcc

SEQ ID NO: 5682246 - DNA, 25 bp, Homo sapien
gggccctccatgcttgcctgtcttc

SEQ ID NO: 5682247 - DNA, 25 bp, Homo sapien
cagatcccctctgcctctggaggag

SEQ ID NO: 5682248 - DNA, 25 bp, Homo sapien
tcctcttccttagatcctgcctctg

SEQ ID NO: 5682249 - DNA, 25 bp, Homo sapien
atggggagaggttcagtgcagctgg

SEQ ID NO: 5682250 - DNA, 25 bp, Homo sapien
aggattcagatcctggggaagaagg

SEQ ID NO: 5682251 - DNA, 25 bp, Homo sapien
agaggattcagatcctggggaagaa

SEQ ID NO: 5682252 - DNA, 25 bp, Homo sapien
gaggattcagatcctggggaagaag

SEQ ID NO: 5682253 - DNA, 25 bp, Homo sapien
gctggagaggattcagatcctgggg

SEQ ID NO: 5682254 - DNA, 25 bp, Homo sapien
agaaggaggccttaaagatgtaaag

SEQ ID NO: 5682255 - DNA, 25 bp, Homo sapien
tccccaggatctgaatcctctccag

SEQ ID NO: 5682256 - DNA, 25 bp, Homo sapien
ctttacatctttaaggcctccttct

SEQ ID NO: 5682257 - DNA, 25 bp, Homo sapien
cttcttccccaggatctgaatcctc

SEQ ID NO: 5682258 - DNA, 25 bp, Homo sapien
ccagctgcactgaacctctccccat

SEQ ID NO: 5682259 - DNA, 25 bp, Homo sapien
ttcttccccaggatctgaatcctct

SEQ ID NO: 5682260 - DNA, 25 bp, Homo sapien
ccttcttccccaggatctgaatcct

SEQ ID NO: 5682261 - DNA, 25 bp, Homo sapien
tgcagctggagaggattcagatcct

SEQ ID NO: 5682262 - DNA, 25 bp, Homo sapien
cagctggagaggattcagatcctgg

SEQ ID NO: 5682263 - DNA, 25 bp, Homo sapien
atggggagaggttcagtgcagctgg

SEQ ID NO: 5682264 - DNA, 25 bp, Homo sapien
aggaggccttaaagatgtaaaggat

SEQ ID NO: 5682265 - DNA, 25 bp, Homo sapien
agaggattcagatcctggggaagaa

SEQ ID NO: 5682266 - DNA, 25 bp, Homo sapien
agaaggaggccttaaagatgtaaag

SEQ ID NO: 5682267 - DNA, 25 bp, Homo sapien
ctttacatctttaaggcctccttct

SEQ ID NO: 5682268 - DNA, 25 bp, Homo sapien
atcctttacatctttaaggcctcct

SEQ ID NO: 5682269 - DNA, 25 bp, Homo sapien
gaacctctccccatcatttatttat

SEQ ID NO: 5682270 - DNA, 25 bp, Homo sapien
aggatctgaatcctctccagctgca

SEQ ID NO: 5682271 - DNA, 25 bp, Homo sapien
ccagctgcactgaacctctccccat

SEQ ID NO: 5682272 - DNA, 25 bp, Homo sapien
ttcttccccaggatctgaatcctct

SEQ ID NO: 5682273 - DNA, 25 bp, Homo sapien
aactgaacagtagatcaacagggtc

SEQ ID NO: 5682274 - DNA, 25 bp, Homo sapien
tgaaatgcgctgatggtcagtgagg

SEQ ID NO: 5682275 - DNA, 25 bp, Homo sapien
tggggctccagaggataactgaaca

SEQ ID NO: 5682276 - DNA, 25 bp, Homo sapien
taactgaacagtagatcaacagggt

SEQ ID NO: 5682277 - DNA, 25 bp, Homo sapien
ggatgagagctcataagctgtcagg

SEQ ID NO: 5682278 - DNA, 25 bp, Homo sapien
atgagagctcataagctgtcaggcc

SEQ ID NO: 5682279 - DNA, 25 bp, Homo sapien
cctgacagcttatgagctctcatcc

SEQ ID NO: 5682280 - DNA, 25 bp, Homo sapien
gaccctgttgatctactgttcagtt

SEQ ID NO: 5682281 - DNA, 25 bp, Homo sapien
cctcactgaccatcagcgcatttca

SEQ ID NO: 5682282 - DNA, 25 bp, Homo sapien
ctgttcagttatcctctggagcccc

SEQ ID NO: 5682283 - DNA, 25 bp, Homo sapien
tgttcagttatcctctggagcccca

SEQ ID NO: 5682284 - DNA, 25 bp, Homo sapien
ggcctgacagcttatgagctctcat

SEQ ID NO: 5682285 - DNA, 25 bp, Homo sapien
actccattttgggcgatgaagttga

SEQ ID NO: 5682286 - DNA, 25 bp, Homo sapien
cattttgggcgatgaagttgagact

SEQ ID NO: 5682287 - DNA, 25 bp, Homo sapien
ctccattttgggcgatgaagttgag

SEQ ID NO: 5682288 - DNA, 25 bp, Homo sapien
cactccattttgggcgatgaagttg

SEQ ID NO: 5682289 - DNA, 25 bp, Homo sapien
ccattttgggcgatgaagttgagac

SEQ ID NO: 5682290 - DNA, 25 bp, Homo sapien
tccattttgggcgatgaagttgaga

SEQ ID NO: 5682291 - DNA, 25 bp, Homo sapien
tcaacttcatcgcccaaaatggagt

SEQ ID NO: 5682292 - DNA, 25 bp, Homo sapien
agtctcaacttcatcgcccaaaatg

SEQ ID NO: 5682293 - DNA, 25 bp, Homo sapien
tctcaacttcatcgcccaaaatgga

SEQ ID NO: 5682294 - DNA, 25 bp, Homo sapien
gtctcaacttcatcgcccaaaatgg

SEQ ID NO: 5682295 - DNA, 25 bp, Homo sapien
caacttcatcgcccaaaatggagtg

SEQ ID NO: 5682296 - DNA, 25 bp, Homo sapien
ctcaacttcatcgcccaaaatggag

SEQ ID NO: 5682297 - DNA, 25 bp, Homo sapien
ttttgggcgatgaagttgagactgt

SEQ ID NO: 5682298 - DNA, 25 bp, Homo sapien
tgagactgtttccaacaacaaaaga

SEQ ID NO: 5682299 - DNA, 25 bp, Homo sapien
cattttgggcgatgaagttgagact

SEQ ID NO: 5682300 - DNA, 25 bp, Homo sapien
tgcactccattttgggcgatgaagt

SEQ ID NO: 5682301 - DNA, 25 bp, Homo sapien
ccattttgggcgatgaagttgagac

SEQ ID NO: 5682302 - DNA, 25 bp, Homo sapien
gaagttgagactgtttccaacaaca

SEQ ID NO: 5682303 - DNA, 25 bp, Homo sapien
agtctcaacttcatcgcccaaaatg

SEQ ID NO: 5682304 - DNA, 25 bp, Homo sapien
cttcatcgcccaaaatggagtgcag

SEQ ID NO: 5682305 - DNA, 25 bp, Homo sapien
tcttttgttgttggaaacagtctca

SEQ ID NO: 5682306 - DNA, 25 bp, Homo sapien
tctcaacttcatcgcccaaaatgga

SEQ ID NO: 5682307 - DNA, 25 bp, Homo sapien
acagtctcaacttcatcgcccaaaa

SEQ ID NO: 5682308 - DNA, 25 bp, Homo sapien
tggaaacagtctcaacttcatcgcc

SEQ ID NO: 5682309 - DNA, 25 bp, Homo sapien
gtggcgcgctcctatggtcccaatt

SEQ ID NO: 5682310 - DNA, 25 bp, Homo sapien
gctcctatggtcccaattctcggga

SEQ ID NO: 5682311 - DNA, 25 bp, Homo sapien
tggcgcgctcctatggtcccaattc

SEQ ID NO: 5682312 - DNA, 25 bp, Homo sapien
gcgctcctatggtcccaattctcgg

SEQ ID NO: 5682313 - DNA, 25 bp, Homo sapien
cgctcctatggtcccaattctcggg

SEQ ID NO: 5682314 - DNA, 25 bp, Homo sapien
ggcgcgctcctatggtcccaattct

SEQ ID NO: 5682315 - DNA, 25 bp, Homo sapien
agaattgggaccataggagcgcgcc

SEQ ID NO: 5682316 - DNA, 25 bp, Homo sapien
tcccgagaattgggaccataggagc

SEQ ID NO: 5682317 - DNA, 25 bp, Homo sapien
gaattgggaccataggagcgcgcca

SEQ ID NO: 5682318 - DNA, 25 bp, Homo sapien
aattgggaccataggagcgcgccac

SEQ ID NO: 5682319 - DNA, 25 bp, Homo sapien
cccgagaattgggaccataggagcg

SEQ ID NO: 5682320 - DNA, 25 bp, Homo sapien
ccgagaattgggaccataggagcgc

SEQ ID NO: 5682321 - DNA, 25 bp, Homo sapien
agcccgccgctttcgtagtcagatt

SEQ ID NO: 5682322 - DNA, 25 bp, Homo sapien
agttcctctgcatatccagagcccg

SEQ ID NO: 5682323 - DNA, 25 bp, Homo sapien
gagcccgccgctttcgtagtcagat

SEQ ID NO: 5682324 - DNA, 25 bp, Homo sapien
gaaagttcctctgcatatccagagc

SEQ ID NO: 5682325 - DNA, 25 bp, Homo sapien
tggggcccctcaagcgatatttctt

SEQ ID NO: 5682326 - DNA, 25 bp, Homo sapien
ggaaagttcctctgcatatccagag

SEQ ID NO: 5682327 - DNA, 25 bp, Homo sapien
atctgactacgaaagcggcgggctc

SEQ ID NO: 5682328 - DNA, 25 bp, Homo sapien
ctctggatatgcagaggaactttcc

SEQ ID NO: 5682329 - DNA, 25 bp, Homo sapien
gctctggatatgcagaggaactttc

SEQ ID NO: 5682330 - DNA, 25 bp, Homo sapien
aagaaatatcgcttgaggggcccca

SEQ ID NO: 5682331 - DNA, 25 bp, Homo sapien
cgggctctggatatgcagaggaact

SEQ ID NO: 5682332 - DNA, 25 bp, Homo sapien
aatctgactacgaaagcggcgggct

SEQ ID NO: 5682333 - DNA, 25 bp, Homo sapien
tcttaccataacctgacacgtttct

SEQ ID NO: 5682334 - DNA, 25 bp, Homo sapien
actcttaccataacctgacacgttt

SEQ ID NO: 5682335 - DNA, 25 bp, Homo sapien
tcgcatcgagtattttattttccag

SEQ ID NO: 5682336 - DNA, 25 bp, Homo sapien
tatggatttcgcatcgagtatttta

SEQ ID NO: 5682337 - DNA, 25 bp, Homo sapien
aaactcttaccataacctgacacgt

SEQ ID NO: 5682338 - DNA, 25 bp, Homo sapien
aaatttatggatttcgcatcgagta

SEQ ID NO: 5682339 - DNA, 25 bp, Homo sapien
gaaacgtgtcaggttatggtaagag

SEQ ID NO: 5682340 - DNA, 25 bp, Homo sapien
tactcgatgcgaaatccataaattt

SEQ ID NO: 5682341 - DNA, 25 bp, Homo sapien
agaaacgtgtcaggttatggtaaga

SEQ ID NO: 5682342 - DNA, 25 bp, Homo sapien
ctggaaaataaaatactcgatgcga

SEQ ID NO: 5682343 - DNA, 25 bp, Homo sapien
taaaatactcgatgcgaaatccata

SEQ ID NO: 5682344 - DNA, 25 bp, Homo sapien
aataaaatactcgatgcgaaatcca

SEQ ID NO: 5682345 - DNA, 25 bp, Homo sapien
cagtcttgtaaatttataccagatt

SEQ ID NO: 5682346 - DNA, 25 bp, Homo sapien
agtcttgtaaatttataccagattt

SEQ ID NO: 5682347 - DNA, 25 bp, Homo sapien
gtcttgtaaatttataccagattta

SEQ ID NO: 5682348 - DNA, 25 bp, Homo sapien
aaatctggtataaatttacaagact

SEQ ID NO: 5682349 - DNA, 25 bp, Homo sapien
taaatctggtataaatttacaagac

SEQ ID NO: 5682350 - DNA, 25 bp, Homo sapien
aatctggtataaatttacaagactg

SEQ ID NO: 5682351 - DNA, 25 bp, Homo sapien
cagtcttgtaaatttataccagatt

SEQ ID NO: 5682352 - DNA, 25 bp, Homo sapien
ccagatttagatttcagatatgtgt

SEQ ID NO: 5682353 - DNA, 25 bp, Homo sapien
cattttacagctttcaggctggcca

SEQ ID NO: 5682354 - DNA, 25 bp, Homo sapien
catccaggcagccatctcagtcttg

SEQ ID NO: 5682355 - DNA, 25 bp, Homo sapien
gaaggaccttagttcattttacagc

SEQ ID NO: 5682356 - DNA, 25 bp, Homo sapien
agctttcaggctggccatccaggca

SEQ ID NO: 5682357 - DNA, 25 bp, Homo sapien
cacatatctgaaatctaaatctggt

SEQ ID NO: 5682358 - DNA, 25 bp, Homo sapien
gctgtaaaatgaactaaggtccttc

SEQ ID NO: 5682359 - DNA, 25 bp, Homo sapien
tgcctggatggccagcctgaaagct

SEQ ID NO: 5682360 - DNA, 25 bp, Homo sapien
aatctggtataaatttacaagactg

SEQ ID NO: 5682361 - DNA, 25 bp, Homo sapien
gatggccagcctgaaagctgtaaaa

SEQ ID NO: 5682362 - DNA, 25 bp, Homo sapien
caagactgagatggctgcctggatg

SEQ ID NO: 5682363 - DNA, 25 bp, Homo sapien
taactgtagcatgcccagtggttag

SEQ ID NO: 5682364 - DNA, 25 bp, Homo sapien
gcccagtggttagagtctttctcaa

SEQ ID NO: 5682365 - DNA, 25 bp, Homo sapien
tctttctcaaccagcaatacgtgtt

SEQ ID NO: 5682366 - DNA, 25 bp, Homo sapien
ccagcaatacgtgttttctctcaaa

SEQ ID NO: 5682367 - DNA, 25 bp, Homo sapien
agtgtttggtcctctacctaaacat

SEQ ID NO: 5682368 - DNA, 25 bp, Homo sapien
catttgtttaactgtagcatgccca

SEQ ID NO: 5682369 - DNA, 25 bp, Homo sapien
tttgagagaaaacacgtattgctgg

SEQ ID NO: 5682370 - DNA, 25 bp, Homo sapien
atgtttaggtagaggaccaaacact

SEQ ID NO: 5682371 - DNA, 25 bp, Homo sapien
tgggcatgctacagttaaacaaatg

SEQ ID NO: 5682372 - DNA, 25 bp, Homo sapien
ttgagaaagactctaaccactgggc

SEQ ID NO: 5682373 - DNA, 25 bp, Homo sapien
aacacgtattgctggttgagaaaga

SEQ ID NO: 5682374 - DNA, 25 bp, Homo sapien
gactctaaccactgggcatgctaca

SEQ ID NO: 5682375 - DNA, 25 bp, Homo sapien
ctttgctgctgatcttcgtgctgtg

SEQ ID NO: 5682376 - DNA, 25 bp, Homo sapien
ttcatcaggattattagtctcaggg

SEQ ID NO: 5682377 - DNA, 25 bp, Homo sapien
catcaggattattagtctcagggac

SEQ ID NO: 5682378 - DNA, 25 bp, Homo sapien
gctgatcttcgtgctgtgttctctt

SEQ ID NO: 5682379 - DNA, 25 bp, Homo sapien
gctgctgatcttcgtgctgtgttct

SEQ ID NO: 5682380 - DNA, 25 bp, Homo sapien
caggattattagtctcagggacaca

SEQ ID NO: 5682381 - DNA, 25 bp, Homo sapien
ccctgagactaataatcctgatgaa

SEQ ID NO: 5682382 - DNA, 25 bp, Homo sapien
gagaacacagcacgaagatcagcag

SEQ ID NO: 5682383 - DNA, 25 bp, Homo sapien
cacagcacgaagatcagcagcaaag

SEQ ID NO: 5682384 - DNA, 25 bp, Homo sapien
gtccctgagactaataatcctgatg

SEQ ID NO: 5682385 - DNA, 25 bp, Homo sapien
aagagaacacagcacgaagatcagc

SEQ ID NO: 5682386 - DNA, 25 bp, Homo sapien
tgtgtccctgagactaataatcctg

SEQ ID NO: 5682387 - DNA, 25 bp, Homo sapien
aatttattactctgaagagggttct

SEQ ID NO: 5682388 - DNA, 25 bp, Homo sapien
tattggtggtcatcagaagtaggtg

SEQ ID NO: 5682389 - DNA, 25 bp, Homo sapien
agtgaatttattactctgaagaggg

SEQ ID NO: 5682390 - DNA, 25 bp, Homo sapien
tggtcatcagaagtaggtgatagga

SEQ ID NO: 5682391 - DNA, 25 bp, Homo sapien
tggtggtcatcagaagtaggtgata

SEQ ID NO: 5682392 - DNA, 25 bp, Homo sapien
ccaaattatattggtggtcatcaga

SEQ ID NO: 5682393 - DNA, 25 bp, Homo sapien
tcctatcacctacttctgatgacca

SEQ ID NO: 5682394 - DNA, 25 bp, Homo sapien
ccctcttcagagtaataaattcact

SEQ ID NO: 5682395 - DNA, 25 bp, Homo sapien
cacctacttctgatgaccaccaata

SEQ ID NO: 5682396 - DNA, 25 bp, Homo sapien
tctgatgaccaccaatataatttgg

SEQ ID NO: 5682397 - DNA, 25 bp, Homo sapien
agaaccctcttcagagtaataaatt

SEQ ID NO: 5682398 - DNA, 25 bp, Homo sapien
tatcacctacttctgatgaccacca

SEQ ID NO: 5682399 - DNA, 25 bp, Homo sapien
atgatagtcttcactagtgcattcc

SEQ ID NO: 5682400 - DNA, 25 bp, Homo sapien
tagtcttcactagtgcattccatcc

SEQ ID NO: 5682401 - DNA, 25 bp, Homo sapien
agtcttcactagtgcattccatcct

SEQ ID NO: 5682402 - DNA, 25 bp, Homo sapien
tgatagtcttcactagtgcattcca

SEQ ID NO: 5682403 - DNA, 25 bp, Homo sapien
gatagtcttcactagtgcattccat

SEQ ID NO: 5682404 - DNA, 25 bp, Homo sapien
tatgatagtcttcactagtgcattc

SEQ ID NO: 5682405 - DNA, 25 bp, Homo sapien
ggatggaatgcactagtgaagacta

SEQ ID NO: 5682406 - DNA, 25 bp, Homo sapien
ggaatgcactagtgaagactatcat

SEQ ID NO: 5682407 - DNA, 25 bp, Homo sapien
gatggaatgcactagtgaagactat

SEQ ID NO: 5682408 - DNA, 25 bp, Homo sapien
gaatgcactagtgaagactatcata

SEQ ID NO: 5682409 - DNA, 25 bp, Homo sapien
tggaatgcactagtgaagactatca

SEQ ID NO: 5682410 - DNA, 25 bp, Homo sapien
aggatggaatgcactagtgaagact

SEQ ID NO: 5682411 - DNA, 25 bp, Homo sapien
atttactgcagcgttataataggaa

SEQ ID NO: 5682412 - DNA, 25 bp, Homo sapien
tttactgcagcgttataataggaaa

SEQ ID NO: 5682413 - DNA, 25 bp, Homo sapien
ttactgcagcgttataataggaaaa

SEQ ID NO: 5682414 - DNA, 25 bp, Homo sapien
ttttcctattataacgctgcagtaa

SEQ ID NO: 5682415 - DNA, 25 bp, Homo sapien
ttcctattataacgctgcagtaaat

SEQ ID NO: 5682416 - DNA, 25 bp, Homo sapien
tttcctattataacgctgcagtaaa

SEQ ID NO: 5682417 - DNA, 25 bp, Homo sapien
gaagacatttactgcagcgttataa

SEQ ID NO: 5682418 - DNA, 25 bp, Homo sapien
tggaaataaagctgaaagccagaag

SEQ ID NO: 5682419 - DNA, 25 bp, Homo sapien
ctgcagcgttataataggaaaagcc

SEQ ID NO: 5682420 - DNA, 25 bp, Homo sapien
tttactgcagcgttataataggaaa

SEQ ID NO: 5682421 - DNA, 25 bp, Homo sapien
cagcgttataataggaaaagccaaa

SEQ ID NO: 5682422 - DNA, 25 bp, Homo sapien
gaaagccagaagacatttactgcag

SEQ ID NO: 5682423 - DNA, 25 bp, Homo sapien
ctgcagtaaatgtcttctggctttc

SEQ ID NO: 5682424 - DNA, 25 bp, Homo sapien
tttggcttttcctattataacgctg

SEQ ID NO: 5682425 - DNA, 25 bp, Homo sapien
cttctggctttcagctttatttcca

SEQ ID NO: 5682426 - DNA, 25 bp, Homo sapien
tataacgctgcagtaaatgtcttct

SEQ ID NO: 5682427 - DNA, 25 bp, Homo sapien
tttcctattataacgctgcagtaaa

SEQ ID NO: 5682428 - DNA, 25 bp, Homo sapien
ggcttttcctattataacgctgcag

SEQ ID NO: 5682429 - DNA, 25 bp, Homo sapien
tacataaattaatgactagaaggat

SEQ ID NO: 5682430 - DNA, 25 bp, Homo sapien
tatttttagtggcaggtctatggat

SEQ ID NO: 5682431 - DNA, 25 bp, Homo sapien
gtgactatttttagtggcaggtcta

SEQ ID NO: 5682432 - DNA, 25 bp, Homo sapien
aaattaatgactagaaggatatacc

SEQ ID NO: 5682433 - DNA, 25 bp, Homo sapien
tttttagtggcaggtctatggattt

SEQ ID NO: 5682434 - DNA, 25 bp, Homo sapien
gactatttttagtggcaggtctatg

SEQ ID NO: 5682435 - DNA, 25 bp, Homo sapien
ggtatatccttctagtcattaattt

SEQ ID NO: 5682436 - DNA, 25 bp, Homo sapien
catagacctgccactaaaaatagtc

SEQ ID NO: 5682437 - DNA, 25 bp, Homo sapien
aatccatagacctgccactaaaaat

SEQ ID NO: 5682438 - DNA, 25 bp, Homo sapien
tagacctgccactaaaaatagtcac

SEQ ID NO: 5682439 - DNA, 25 bp, Homo sapien
aaatccatagacctgccactaaaaa

SEQ ID NO: 5682440 - DNA, 25 bp, Homo sapien
ccatagacctgccactaaaaatagt

SEQ ID NO: 5682441 - DNA, 25 bp, Homo sapien
ttttttgaatgaaatcgtgaattga

SEQ ID NO: 5682442 - DNA, 25 bp, Homo sapien
tcagtaacctaaaagcaatgcagtt

SEQ ID NO: 5682443 - DNA, 25 bp, Homo sapien
ttatcagtaacctaaaagcaatgca

SEQ ID NO: 5682444 - DNA, 25 bp, Homo sapien
aattatcagtaacctaaaagcaatg

SEQ ID NO: 5682445 - DNA, 25 bp, Homo sapien
tttgaatgaaatcgtgaattgaaaa

SEQ ID NO: 5682446 - DNA, 25 bp, Homo sapien
tatcagtaacctaaaagcaatgcag

SEQ ID NO: 5682447 - DNA, 25 bp, Homo sapien
ttttcaattcacgatttcattcaaa

SEQ ID NO: 5682448 - DNA, 25 bp, Homo sapien
tcaattcacgatttcattcaaaaaa

SEQ ID NO: 5682449 - DNA, 25 bp, Homo sapien
tgcattgcttttaggttactgataa

SEQ ID NO: 5682450 - DNA, 25 bp, Homo sapien
ctgcattgcttttaggttactgata

SEQ ID NO: 5682451 - DNA, 25 bp, Homo sapien
aactgcattgcttttaggttactga

SEQ ID NO: 5682452 - DNA, 25 bp, Homo sapien
gcattgcttttaggttactgataat

SEQ ID NO: 5682453 - DNA, 25 bp, Homo sapien
caatagttaccaagcctttgtcgca

SEQ ID NO: 5682454 - DNA, 25 bp, Homo sapien
taccaagcctttgtcgcatttcttt

SEQ ID NO: 5682455 - DNA, 25 bp, Homo sapien
agtattcccgtatactcatcatcaa

SEQ ID NO: 5682456 - DNA, 25 bp, Homo sapien
cacttgaaagtattcccgtatactc

SEQ ID NO: 5682457 - DNA, 25 bp, Homo sapien
tcaaaatcaatagttaccaagcctt

SEQ ID NO: 5682458 - DNA, 25 bp, Homo sapien
tcatcatcaaaatcaatagttacca

SEQ ID NO: 5682459 - DNA, 25 bp, Homo sapien
gcgacaaaggcttggtaactattga

SEQ ID NO: 5682460 - DNA, 25 bp, Homo sapien
gaaatgcgacaaaggcttggtaact

SEQ ID NO: 5682461 - DNA, 25 bp, Homo sapien
gagtatacgggaatactttcaagtg

SEQ ID NO: 5682462 - DNA, 25 bp, Homo sapien
ttgatgatgagtatacgggaatact

SEQ ID NO: 5682463 - DNA, 25 bp, Homo sapien
aaagaaatgcgacaaaggcttggta

SEQ ID NO: 5682464 - DNA, 25 bp, Homo sapien
gcttggtaactattgattttgatga

SEQ ID NO: 5682465 - DNA, 25 bp, Homo sapien
tacaggtgcaagctaccacacccgg

SEQ ID NO: 5682466 - DNA, 25 bp, Homo sapien
ggtgcaagctaccacacccggctaa

SEQ ID NO: 5682467 - DNA, 25 bp, Homo sapien
gtgcaagctaccacacccggctaat

SEQ ID NO: 5682468 - DNA, 25 bp, Homo sapien
caagctaccacacccggctaatttt

SEQ ID NO: 5682469 - DNA, 25 bp, Homo sapien
tgcaagctaccacacccggctaatt

SEQ ID NO: 5682470 - DNA, 25 bp, Homo sapien
aggtgcaagctaccacacccggcta

SEQ ID NO: 5682471 - DNA, 25 bp, Homo sapien
ccgggtgtggtagcttgcacctgta

SEQ ID NO: 5682472 - DNA, 25 bp, Homo sapien
aattagccgggtgtggtagcttgca

SEQ ID NO: 5682473 - DNA, 25 bp, Homo sapien
ttagccgggtgtggtagcttgcacc

SEQ ID NO: 5682474 - DNA, 25 bp, Homo sapien
aaaattagccgggtgtggtagcttg

SEQ ID NO: 5682475 - DNA, 25 bp, Homo sapien
tagccgggtgtggtagcttgcacct

SEQ ID NO: 5682476 - DNA, 25 bp, Homo sapien
attagccgggtgtggtagcttgcac

SEQ ID NO: 5682477 - DNA, 25 bp, Homo sapien
tatttcaacgtttgggagcacagag

SEQ ID NO: 5682478 - DNA, 25 bp, Homo sapien
ttatttcaacgtttgggagcacaga

SEQ ID NO: 5682479 - DNA, 25 bp, Homo sapien
tttatttcaacgtttgggagcacag

SEQ ID NO: 5682480 - DNA, 25 bp, Homo sapien
ttttatttcaacgtttgggagcaca

SEQ ID NO: 5682481 - DNA, 25 bp, Homo sapien
tgtgctcccaaacgttgaaataaaa

SEQ ID NO: 5682482 - DNA, 25 bp, Homo sapien
tctgtgctcccaaacgttgaaataa

SEQ ID NO: 5682483 - DNA, 25 bp, Homo sapien
ctctgtgctcccaaacgttgaaata

SEQ ID NO: 5682484 - DNA, 25 bp, Homo sapien
ctgtgctcccaaacgttgaaataaa

SEQ ID NO: 5682485 - DNA, 25 bp, Homo sapien
aacgtttgggagcacagagcacttg

SEQ ID NO: 5682486 - DNA, 25 bp, Homo sapien
ttcaacgtttgggagcacagagcac

SEQ ID NO: 5682487 - DNA, 25 bp, Homo sapien
tatttcaacgtttgggagcacagag

SEQ ID NO: 5682488 - DNA, 25 bp, Homo sapien
tttatttcaacgtttgggagcacag

SEQ ID NO: 5682489 - DNA, 25 bp, Homo sapien
ttttatttcaacgtttgggagcaca

SEQ ID NO: 5682490 - DNA, 25 bp, Homo sapien
tttgggagcacagagcacttgtttt

SEQ ID NO: 5682491 - DNA, 25 bp, Homo sapien
tgtgctcccaaacgttgaaataaaa

SEQ ID NO: 5682492 - DNA, 25 bp, Homo sapien
tctgtgctcccaaacgttgaaataa

SEQ ID NO: 5682493 - DNA, 25 bp, Homo sapien
ctctgtgctcccaaacgttgaaata

SEQ ID NO: 5682494 - DNA, 25 bp, Homo sapien
agtgctctgtgctcccaaacgttga

SEQ ID NO: 5682495 - DNA, 25 bp, Homo sapien
aaaacaagtgctctgtgctcccaaa

SEQ ID NO: 5682496 - DNA, 25 bp, Homo sapien
aaaaaatgaagccagcatggtggct

SEQ ID NO: 5682497 - DNA, 25 bp, Homo sapien
tgtgcctggccagatttttattttt

SEQ ID NO: 5682498 - DNA, 25 bp, Homo sapien
gtgcctggccagatttttattttta

SEQ ID NO: 5682499 - DNA, 25 bp, Homo sapien
tgacctcgtgatctgcctgcctcag

SEQ ID NO: 5682500 - DNA, 25 bp, Homo sapien
ctgtgcctggccagatttttatttt

SEQ ID NO: 5682501 - DNA, 25 bp, Homo sapien
tgcctggccagatttttatttttat

SEQ ID NO: 5682502 - DNA, 25 bp, Homo sapien
ctcgtgatctgcctgcctcagcctc

SEQ ID NO: 5682503 - DNA, 25 bp, Homo sapien
taaaaataaaaatctggccaggcac

SEQ ID NO: 5682504 - DNA, 25 bp, Homo sapien
gaggctgaggcaggcagatcacgag

SEQ ID NO: 5682505 - DNA, 25 bp, Homo sapien
ataaaaataaaaatctggccaggca

SEQ ID NO: 5682506 - DNA, 25 bp, Homo sapien
aaaataaaaatctggccaggcacag

SEQ ID NO: 5682507 - DNA, 25 bp, Homo sapien
ctgaggcaggcagatcacgaggtca

SEQ ID NO: 5682508 - DNA, 25 bp, Homo sapien
aaaaataaaaatctggccaggcaca

SEQ ID NO: 5682509 - DNA, 25 bp, Homo sapien
caccactatgcctgggtagtgtttt

SEQ ID NO: 5682510 - DNA, 25 bp, Homo sapien
actatgcctgggtagtgtttttttg

SEQ ID NO: 5682511 - DNA, 25 bp, Homo sapien
ctatgcctgggtagtgtttttttgt

SEQ ID NO: 5682512 - DNA, 25 bp, Homo sapien
ccactatgcctgggtagtgtttttt

SEQ ID NO: 5682513 - DNA, 25 bp, Homo sapien
caagtgaacctccagctccagcctc

SEQ ID NO: 5682514 - DNA, 25 bp, Homo sapien
accactatgcctgggtagtgttttt

SEQ ID NO: 5682515 - DNA, 25 bp, Homo sapien
gaggctggagctggaggttcacttg

SEQ ID NO: 5682516 - DNA, 25 bp, Homo sapien
aaaaacactacccaggcatagtggt

SEQ ID NO: 5682517 - DNA, 25 bp, Homo sapien
aaaaaacactacccaggcatagtgg

SEQ ID NO: 5682518 - DNA, 25 bp, Homo sapien
acaaaaaaacactacccaggcatag

SEQ ID NO: 5682519 - DNA, 25 bp, Homo sapien
caaaaaaacactacccaggcatagt

SEQ ID NO: 5682520 - DNA, 25 bp, Homo sapien
aaaacactacccaggcatagtggtg

SEQ ID NO: 5682521 - DNA, 25 bp, Homo sapien
gctaccattcctgggtagttgtatt

SEQ ID NO: 5682522 - DNA, 25 bp, Homo sapien
gcccgctaccattcctgggtagttg

SEQ ID NO: 5682523 - DNA, 25 bp, Homo sapien
ccgctaccattcctgggtagttgta

SEQ ID NO: 5682524 - DNA, 25 bp, Homo sapien
gcgcccgctaccattcctgggtagt

SEQ ID NO: 5682525 - DNA, 25 bp, Homo sapien
ctgggtagttgtatttttagtatag

SEQ ID NO: 5682526 - DNA, 25 bp, Homo sapien
aggcgcccgctaccattcctgggta

SEQ ID NO: 5682527 - DNA, 25 bp, Homo sapien
cacatctatactaaaaatacaacta

SEQ ID NO: 5682528 - DNA, 25 bp, Homo sapien
aatacaactacccaggaatggtagc

SEQ ID NO: 5682529 - DNA, 25 bp, Homo sapien
ctatactaaaaatacaactacccag

SEQ ID NO: 5682530 - DNA, 25 bp, Homo sapien
tacaactacccaggaatggtagcgg

SEQ ID NO: 5682531 - DNA, 25 bp, Homo sapien
tacccaggaatggtagcgggcgcct

SEQ ID NO: 5682532 - DNA, 25 bp, Homo sapien
aactacccaggaatggtagcgggcg

SEQ ID NO: 5682533 - DNA, 25 bp, Homo sapien
ggtcatttttaaatgttgttgtaga

SEQ ID NO: 5682534 - DNA, 25 bp, Homo sapien
tgggtcatttttaaatgttgttgta

SEQ ID NO: 5682535 - DNA, 25 bp, Homo sapien
catttttaaatgttgttgtagagat

SEQ ID NO: 5682536 - DNA, 25 bp, Homo sapien
gatgggggtctcacggtgttgtcta

SEQ ID NO: 5682537 - DNA, 25 bp, Homo sapien
atgggggtctcacggtgttgtctag

SEQ ID NO: 5682538 - DNA, 25 bp, Homo sapien
gtcatttttaaatgttgttgtagag

SEQ ID NO: 5682539 - DNA, 25 bp, Homo sapien
ctctacaacaacatttaaaaatgac

SEQ ID NO: 5682540 - DNA, 25 bp, Homo sapien
ctagacaacaccgtgagacccccat

SEQ ID NO: 5682541 - DNA, 25 bp, Homo sapien
tctacaacaacatttaaaaatgacc

SEQ ID NO: 5682542 - DNA, 25 bp, Homo sapien
tagacaacaccgtgagacccccatc

SEQ ID NO: 5682543 - DNA, 25 bp, Homo sapien
atctctacaacaacatttaaaaatg

SEQ ID NO: 5682544 - DNA, 25 bp, Homo sapien
tacaacaacatttaaaaatgaccca

SEQ ID NO: 5682545 - DNA, 25 bp, Homo sapien
tcctggactccagcagtcctcccac

SEQ ID NO: 5682546 - DNA, 25 bp, Homo sapien
tctcaaactcctggactccagcagt

SEQ ID NO: 5682547 - DNA, 25 bp, Homo sapien
aaactcctggactccagcagtcctc

SEQ ID NO: 5682548 - DNA, 25 bp, Homo sapien
actcctggactccagcagtcctccc

SEQ ID NO: 5682549 - DNA, 25 bp, Homo sapien
gtctcaaactcctggactccagcag

SEQ ID NO: 5682550 - DNA, 25 bp, Homo sapien
caaactcctggactccagcagtcct

SEQ ID NO: 5682551 - DNA, 25 bp, Homo sapien
ctgctggagtccaggagtttgagac

SEQ ID NO: 5682552 - DNA, 25 bp, Homo sapien
gaggactgctggagtccaggagttt

SEQ ID NO: 5682553 - DNA, 25 bp, Homo sapien
ggtgggaggactgctggagtccagg

SEQ ID NO: 5682554 - DNA, 25 bp, Homo sapien
aggactgctggagtccaggagtttg

SEQ ID NO: 5682555 - DNA, 25 bp, Homo sapien
actgctggagtccaggagtttgaga

SEQ ID NO: 5682556 - DNA, 25 bp, Homo sapien
tgggaggactgctggagtccaggag

SEQ ID NO: 5682557 - DNA, 25 bp, Homo sapien
catggttgttcaaagtaacaaattg

SEQ ID NO: 5682558 - DNA, 25 bp, Homo sapien
gcctctgacaaaagccagagcactt

SEQ ID NO: 5682559 - DNA, 25 bp, Homo sapien
tgtcatggttgttcaaagtaacaaa

SEQ ID NO: 5682560 - DNA, 25 bp, Homo sapien
cctctgacaaaagccagagcactta

SEQ ID NO: 5682561 - DNA, 25 bp, Homo sapien
tcttctttgtcatggttgttcaaag

SEQ ID NO: 5682562 - DNA, 25 bp, Homo sapien
ctttgtcatggttgttcaaagtaac

SEQ ID NO: 5682563 - DNA, 25 bp, Homo sapien
tttgttactttgaacaaccatgaca

SEQ ID NO: 5682564 - DNA, 25 bp, Homo sapien
caatttgttactttgaacaaccatg

SEQ ID NO: 5682565 - DNA, 25 bp, Homo sapien
aagtgctctggcttttgtcagaggc

SEQ ID NO: 5682566 - DNA, 25 bp, Homo sapien
taagtgctctggcttttgtcagagg

SEQ ID NO: 5682567 - DNA, 25 bp, Homo sapien
ctttgaacaaccatgacaaagaaga

SEQ ID NO: 5682568 - DNA, 25 bp, Homo sapien
gttactttgaacaaccatgacaaag

SEQ ID NO: 5682569 - DNA, 25 bp, Homo sapien
tgtacttttagccttgagcctgtac

SEQ ID NO: 5682570 - DNA, 25 bp, Homo sapien
tacttttagccttgagcctgtacca

SEQ ID NO: 5682571 - DNA, 25 bp, Homo sapien
actgtacttttagccttgagcctgt

SEQ ID NO: 5682572 - DNA, 25 bp, Homo sapien
tactgtacttttagccttgagcctg

SEQ ID NO: 5682573 - DNA, 25 bp, Homo sapien
taaatggagaagtctggtactgaat

SEQ ID NO: 5682574 - DNA, 25 bp, Homo sapien
cttaaatggagaagtctggtactga

SEQ ID NO: 5682575 - DNA, 25 bp, Homo sapien
caggctcaaggctaaaagtacagta

SEQ ID NO: 5682576 - DNA, 25 bp, Homo sapien
tcagtaccagacttctccatttaag

SEQ ID NO: 5682577 - DNA, 25 bp, Homo sapien
tggtacaggctcaaggctaaaagta

SEQ ID NO: 5682578 - DNA, 25 bp, Homo sapien
attcagtaccagacttctccattta

SEQ ID NO: 5682579 - DNA, 25 bp, Homo sapien
acaggctcaaggctaaaagtacagt

SEQ ID NO: 5682580 - DNA, 25 bp, Homo sapien
gtacaggctcaaggctaaaagtaca

SEQ ID NO: 5682581 - DNA, 25 bp, Homo sapien
tctaagactagaaccaatcccaact

SEQ ID NO: 5682582 - DNA, 25 bp, Homo sapien
cagagattactataaagagttgctc

SEQ ID NO: 5682583 - DNA, 25 bp, Homo sapien
agactagaaccaatcccaactttgt

SEQ ID NO: 5682584 - DNA, 25 bp, Homo sapien
tatttccagagattactataaagag

SEQ ID NO: 5682585 - DNA, 25 bp, Homo sapien
attgtgtgcctctaagactagaacc

SEQ ID NO: 5682586 - DNA, 25 bp, Homo sapien
attactataaagagttgctctttcc

SEQ ID NO: 5682587 - DNA, 25 bp, Homo sapien
caactctttatagtaatctctggaa

SEQ ID NO: 5682588 - DNA, 25 bp, Homo sapien
gagcaactctttatagtaatctctg

SEQ ID NO: 5682589 - DNA, 25 bp, Homo sapien
ggttctagtcttagaggcacacaat

SEQ ID NO: 5682590 - DNA, 25 bp, Homo sapien
acaaagttgggattggttctagtct

SEQ ID NO: 5682591 - DNA, 25 bp, Homo sapien
gattggttctagtcttagaggcaca

SEQ ID NO: 5682592 - DNA, 25 bp, Homo sapien
ggaaagagcaactctttatagtaat

SEQ ID NO: 5682593 - DNA, 25 bp, Homo sapien
aaaattggtgagagattaggaaaat

SEQ ID NO: 5682594 - DNA, 25 bp, Homo sapien
attttcctaatctctcaccaatttt

SEQ ID NO: 5682595 - DNA, 25 bp, Homo sapien
ctgttgcccccagcctgaaagaatg

SEQ ID NO: 5682596 - DNA, 25 bp, Homo sapien
gagattaggaaaatggaacagttac

SEQ ID NO: 5682597 - DNA, 25 bp, Homo sapien
tggtgagagattaggaaaatggaac

SEQ ID NO: 5682598 - DNA, 25 bp, Homo sapien
ttgcccccagcctgaaagaatggga

SEQ ID NO: 5682599 - DNA, 25 bp, Homo sapien
aaaattggtgagagattaggaaaat

SEQ ID NO: 5682600 - DNA, 25 bp, Homo sapien
ggttatgaaaattggtgagagatta

SEQ ID NO: 5682601 - DNA, 25 bp, Homo sapien
gttccattttcctaatctctcacca

SEQ ID NO: 5682602 - DNA, 25 bp, Homo sapien
actgttccattttcctaatctctca

SEQ ID NO: 5682603 - DNA, 25 bp, Homo sapien
cccattctttcaggctgggggcaac

SEQ ID NO: 5682604 - DNA, 25 bp, Homo sapien
tcataaccttaacagttcccattct

SEQ ID NO: 5682605 - DNA, 25 bp, Homo sapien
agtaactgttccattttcctaatct

SEQ ID NO: 5682606 - DNA, 25 bp, Homo sapien
taatctctcaccaattttcataacc

SEQ ID NO: 5682607 - DNA, 25 bp, Homo sapien
tcgtagagctgttcagatgtcctct

SEQ ID NO: 5682608 - DNA, 25 bp, Homo sapien
tctaaggcacaatttactcataagt

SEQ ID NO: 5682609 - DNA, 25 bp, Homo sapien
gcatactgctttcacattctaaggc

SEQ ID NO: 5682610 - DNA, 25 bp, Homo sapien
tttactcataagtggttaggttgcc

SEQ ID NO: 5682611 - DNA, 25 bp, Homo sapien
actcataagtggttaggttgccttg

SEQ ID NO: 5682612 - DNA, 25 bp, Homo sapien
gatgtcctctgcatactgctttcac

SEQ ID NO: 5682613 - DNA, 25 bp, Homo sapien
agaggacatctgaacagctctacga

SEQ ID NO: 5682614 - DNA, 25 bp, Homo sapien
gccttagaatgtgaaagcagtatgc

SEQ ID NO: 5682615 - DNA, 25 bp, Homo sapien
gtgaaagcagtatgcagaggacatc

SEQ ID NO: 5682616 - DNA, 25 bp, Homo sapien
caaggcaacctaaccacttatgagt

SEQ ID NO: 5682617 - DNA, 25 bp, Homo sapien
cacttatgagtaaattgtgccttag

SEQ ID NO: 5682618 - DNA, 25 bp, Homo sapien
gcagaggacatctgaacagctctac

SEQ ID NO: 5682619 - DNA, 25 bp, Homo sapien
ttccccagtcttttaagtgactgtg

SEQ ID NO: 5682620 - DNA, 25 bp, Homo sapien
ggttataggtctttgaggatacgac

SEQ ID NO: 5682621 - DNA, 25 bp, Homo sapien
tatcagtggttataggtctttgagg

SEQ ID NO: 5682622 - DNA, 25 bp, Homo sapien
catttatcagtggttataggtcttt

SEQ ID NO: 5682623 - DNA, 25 bp, Homo sapien
gatacgactataattctatttcccc

SEQ ID NO: 5682624 - DNA, 25 bp, Homo sapien
tctttgaggatacgactataattct

SEQ ID NO: 5682625 - DNA, 25 bp, Homo sapien
tagtcgtatcctcaaagacctataa

SEQ ID NO: 5682626 - DNA, 25 bp, Homo sapien
gggaaatagaattatagtcgtatcc

SEQ ID NO: 5682627 - DNA, 25 bp, Homo sapien
aaagacctataaccactgataaatg

SEQ ID NO: 5682628 - DNA, 25 bp, Homo sapien
cacagtcacttaaaagactggggaa

SEQ ID NO: 5682629 - DNA, 25 bp, Homo sapien
tatcctcaaagacctataaccactg

SEQ ID NO: 5682630 - DNA, 25 bp, Homo sapien
gaattatagtcgtatcctcaaagac

SEQ ID NO: 5682631 - DNA, 25 bp, Homo sapien
ggcttgactattgacctgaagaatt

SEQ ID NO: 5682632 - DNA, 25 bp, Homo sapien
aggcttgactattgacctgaagaat

SEQ ID NO: 5682633 - DNA, 25 bp, Homo sapien
tgaaggcttgactattgacctgaag

SEQ ID NO: 5682634 - DNA, 25 bp, Homo sapien
aaggcttgactattgacctgaagaa

SEQ ID NO: 5682635 - DNA, 25 bp, Homo sapien
gaaggcttgactattgacctgaaga

SEQ ID NO: 5682636 - DNA, 25 bp, Homo sapien
atgaaggcttgactattgacctgaa

SEQ ID NO: 5682637 - DNA, 25 bp, Homo sapien
ttcttcaggtcaatagtcaagcctt

SEQ ID NO: 5682638 - DNA, 25 bp, Homo sapien
ttcaggtcaatagtcaagccttcat

SEQ ID NO: 5682639 - DNA, 25 bp, Homo sapien
tcttcaggtcaatagtcaagccttc

SEQ ID NO: 5682640 - DNA, 25 bp, Homo sapien
aattcttcaggtcaatagtcaagcc

SEQ ID NO: 5682641 - DNA, 25 bp, Homo sapien
cttcaggtcaatagtcaagccttca

SEQ ID NO: 5682642 - DNA, 25 bp, Homo sapien
attcttcaggtcaatagtcaagcct

SEQ ID NO: 5682643 - DNA, 25 bp, Homo sapien
cccgacatcactgaggaagaaatga

SEQ ID NO: 5682644 - DNA, 25 bp, Homo sapien
tcctcccgacatcactgaggaagaa

SEQ ID NO: 5682645 - DNA, 25 bp, Homo sapien
aaggcaggcgaagtcttcattcata

SEQ ID NO: 5682646 - DNA, 25 bp, Homo sapien
gcaggcgaagtcttcattcataagg

SEQ ID NO: 5682647 - DNA, 25 bp, Homo sapien
tcccgacatcactgaggaagaaatg

SEQ ID NO: 5682648 - DNA, 25 bp, Homo sapien
ggaaaggcaggcgaagtcttcattc

SEQ ID NO: 5682649 - DNA, 25 bp, Homo sapien
ttcttcctcagtgatgtcgggagga

SEQ ID NO: 5682650 - DNA, 25 bp, Homo sapien
ccttatgaatgaagacttcgcctgc

SEQ ID NO: 5682651 - DNA, 25 bp, Homo sapien
gaatgaagacttcgcctgcctttcc

SEQ ID NO: 5682652 - DNA, 25 bp, Homo sapien
tcatttcttcctcagtgatgtcggg

SEQ ID NO: 5682653 - DNA, 25 bp, Homo sapien
catttcttcctcagtgatgtcggga

SEQ ID NO: 5682654 - DNA, 25 bp, Homo sapien
tatgaatgaagacttcgcctgcctt

SEQ ID NO: 5682655 - DNA, 25 bp, Homo sapien
ggaggatattcgtgattctggtaca

SEQ ID NO: 5682656 - DNA, 25 bp, Homo sapien
cgtgattctggtacatacctagcaa

SEQ ID NO: 5682657 - DNA, 25 bp, Homo sapien
gatattcgtgattctggtacatacc

SEQ ID NO: 5682658 - DNA, 25 bp, Homo sapien
ggtacatacctagcaaaaattagac

SEQ ID NO: 5682659 - DNA, 25 bp, Homo sapien
gcttcttggaggatattcgtgattc

SEQ ID NO: 5682660 - DNA, 25 bp, Homo sapien
ctagcaaaaattagactgagcatgg

SEQ ID NO: 5682661 - DNA, 25 bp, Homo sapien
tgctaggtatgtaccagaatcacga

SEQ ID NO: 5682662 - DNA, 25 bp, Homo sapien
ggtatgtaccagaatcacgaatatc

SEQ ID NO: 5682663 - DNA, 25 bp, Homo sapien
tgtaccagaatcacgaatatcctcc

SEQ ID NO: 5682664 - DNA, 25 bp, Homo sapien
taatttttgctaggtatgtaccaga

SEQ ID NO: 5682665 - DNA, 25 bp, Homo sapien
gaatcacgaatatcctccaagaagc

SEQ ID NO: 5682666 - DNA, 25 bp, Homo sapien
ccatgctcagtctaatttttgctag

SEQ ID NO: 5682667 - DNA, 25 bp, Homo sapien
tcgcctgaacctgggaagcagaggt

SEQ ID NO: 5682668 - DNA, 25 bp, Homo sapien
gaatcgcctgaacctgggaagcaga

SEQ ID NO: 5682669 - DNA, 25 bp, Homo sapien
tggtaagcgcctgtaatcccacctg

SEQ ID NO: 5682670 - DNA, 25 bp, Homo sapien
aatcgcctgaacctgggaagcagag

SEQ ID NO: 5682671 - DNA, 25 bp, Homo sapien
gtaagcgcctgtaatcccacctgct

SEQ ID NO: 5682672 - DNA, 25 bp, Homo sapien
ggtggtaagcgcctgtaatcccacc

SEQ ID NO: 5682673 - DNA, 25 bp, Homo sapien
agcaggtgggattacaggcgcttac

SEQ ID NO: 5682674 - DNA, 25 bp, Homo sapien
caggtgggattacaggcgcttacca

SEQ ID NO: 5682675 - DNA, 25 bp, Homo sapien
ggtgggattacaggcgcttaccacc

SEQ ID NO: 5682676 - DNA, 25 bp, Homo sapien
tctgcttcccaggttcaggcgattc

SEQ ID NO: 5682677 - DNA, 25 bp, Homo sapien
ctgagcaggtgggattacaggcgct

SEQ ID NO: 5682678 - DNA, 25 bp, Homo sapien
acctctgcttcccaggttcaggcga

SEQ ID NO: 5682679 - DNA, 25 bp, Homo sapien
tgatgatcacctaagtgttattgac

SEQ ID NO: 5682680 - DNA, 25 bp, Homo sapien
cacctaagtgttattgacttctaga

SEQ ID NO: 5682681 - DNA, 25 bp, Homo sapien
tgtcattgggagaataatacctatg

SEQ ID NO: 5682682 - DNA, 25 bp, Homo sapien
tattgacttctagaactacatgtga

SEQ ID NO: 5682683 - DNA, 25 bp, Homo sapien
tacctatgaaattgatgatcaccta

SEQ ID NO: 5682684 - DNA, 25 bp, Homo sapien
cattgggagaataatacctatgaaa

SEQ ID NO: 5682685 - DNA, 25 bp, Homo sapien
ctacatgtgatttattgcaaggcca

SEQ ID NO: 5682686 - DNA, 25 bp, Homo sapien
catgtgatttattgcaaggccatca

SEQ ID NO: 5682687 - DNA, 25 bp, Homo sapien
gaactacatgtgatttattgcaagg

SEQ ID NO: 5682688 - DNA, 25 bp, Homo sapien
tacatgtgatttattgcaaggccat

SEQ ID NO: 5682689 - DNA, 25 bp, Homo sapien
actacatgtgatttattgcaaggcc

SEQ ID NO: 5682690 - DNA, 25 bp, Homo sapien
tgtgatttattgcaaggccatcaga

SEQ ID NO: 5682691 - DNA, 25 bp, Homo sapien
tggccttgcaataaatcacatgtag

SEQ ID NO: 5682692 - DNA, 25 bp, Homo sapien
tgatggccttgcaataaatcacatg

SEQ ID NO: 5682693 - DNA, 25 bp, Homo sapien
ccttgcaataaatcacatgtagttc

SEQ ID NO: 5682694 - DNA, 25 bp, Homo sapien
tctgatggccttgcaataaatcaca

SEQ ID NO: 5682695 - DNA, 25 bp, Homo sapien
gatggccttgcaataaatcacatgt

SEQ ID NO: 5682696 - DNA, 25 bp, Homo sapien
ggccttgcaataaatcacatgtagt

SEQ ID NO: 5682697 - DNA, 25 bp, Homo sapien
aatcacatgtagttctagaagtcaa

SEQ ID NO: 5682698 - DNA, 25 bp, Homo sapien
tctagaagtcaataacacttaggtg

SEQ ID NO: 5682699 - DNA, 25 bp, Homo sapien
taggtgatcatcaatttcataggta

SEQ ID NO: 5682700 - DNA, 25 bp, Homo sapien
aatttcataggtattattctcccaa

SEQ ID NO: 5682701 - DNA, 25 bp, Homo sapien
gtcaataacacttaggtgatcatca

SEQ ID NO: 5682702 - DNA, 25 bp, Homo sapien
cataggtattattctcccaatgaca

SEQ ID NO: 5682703 - DNA, 25 bp, Homo sapien
gactgggcaaaacagcggctcacgc

SEQ ID NO: 5682704 - DNA, 25 bp, Homo sapien
actgggcaaaacagcggctcacgcc

SEQ ID NO: 5682705 - DNA, 25 bp, Homo sapien
agactgggcaaaacagcggctcacg

SEQ ID NO: 5682706 - DNA, 25 bp, Homo sapien
cgtgagccgctgttttgcccagtct

SEQ ID NO: 5682707 - DNA, 25 bp, Homo sapien
gcgtgagccgctgttttgcccagtc

SEQ ID NO: 5682708 - DNA, 25 bp, Homo sapien
ggcgtgagccgctgttttgcccagt

SEQ ID NO: 5682709 - DNA, 25 bp, Homo sapien
taaataaaagactgggcaaaacagc

SEQ ID NO: 5682710 - DNA, 25 bp, Homo sapien
taaaagactgggcaaaacagcggct

SEQ ID NO: 5682711 - DNA, 25 bp, Homo sapien
gactgggcaaaacagcggctcacgc

SEQ ID NO: 5682712 - DNA, 25 bp, Homo sapien
actgggcaaaacagcggctcacgcc

SEQ ID NO: 5682713 - DNA, 25 bp, Homo sapien
aaaagactgggcaaaacagcggctc

SEQ ID NO: 5682714 - DNA, 25 bp, Homo sapien
agactgggcaaaacagcggctcacg

SEQ ID NO: 5682715 - DNA, 25 bp, Homo sapien
agccgctgttttgcccagtctttta

SEQ ID NO: 5682716 - DNA, 25 bp, Homo sapien
gcgtgagccgctgttttgcccagtc

SEQ ID NO: 5682717 - DNA, 25 bp, Homo sapien
cgtgagccgctgttttgcccagtct

SEQ ID NO: 5682718 - DNA, 25 bp, Homo sapien
ggcgtgagccgctgttttgcccagt

SEQ ID NO: 5682719 - DNA, 25 bp, Homo sapien
gagccgctgttttgcccagtctttt

SEQ ID NO: 5682720 - DNA, 25 bp, Homo sapien
gctgttttgcccagtcttttattta

SEQ ID NO: 5682721 - DNA, 25 bp, Homo sapien
ataccaaaattagcgcacatgtagt

SEQ ID NO: 5682722 - DNA, 25 bp, Homo sapien
accaaaattagcgcacatgtagtcc

SEQ ID NO: 5682723 - DNA, 25 bp, Homo sapien
caaaattagcgcacatgtagtccca

SEQ ID NO: 5682724 - DNA, 25 bp, Homo sapien
aataccaaaattagcgcacatgtag

SEQ ID NO: 5682725 - DNA, 25 bp, Homo sapien
taccaaaattagcgcacatgtagtc

SEQ ID NO: 5682726 - DNA, 25 bp, Homo sapien
ccaaaattagcgcacatgtagtccc

SEQ ID NO: 5682727 - DNA, 25 bp, Homo sapien
tgggactacatgtgcgctaattttg

SEQ ID NO: 5682728 - DNA, 25 bp, Homo sapien
ctacatgtgcgctaattttggtatt

SEQ ID NO: 5682729 - DNA, 25 bp, Homo sapien
gggactacatgtgcgctaattttgg

SEQ ID NO: 5682730 - DNA, 25 bp, Homo sapien
gactacatgtgcgctaattttggta

SEQ ID NO: 5682731 - DNA, 25 bp, Homo sapien
actacatgtgcgctaattttggtat

SEQ ID NO: 5682732 - DNA, 25 bp, Homo sapien
ggactacatgtgcgctaattttggt

SEQ ID NO: 5682733 - DNA, 25 bp, Homo sapien
gcaggagaatcacttgaacctggaa

SEQ ID NO: 5682734 - DNA, 25 bp, Homo sapien
gcctggcgatagagcaagactctgt

SEQ ID NO: 5682735 - DNA, 25 bp, Homo sapien
caggagaatcacttgaacctggaag

SEQ ID NO: 5682736 - DNA, 25 bp, Homo sapien
acagagtcttgctctatcgccaggc

SEQ ID NO: 5682737 - DNA, 25 bp, Homo sapien
ttccaggttcaagtgattctcctgc

SEQ ID NO: 5682738 - DNA, 25 bp, Homo sapien
cttccaggttcaagtgattctcctg

SEQ ID NO: 5682739 - DNA, 25 bp, Homo sapien
gcccaggcgggacagatcaccaggt

SEQ ID NO: 5682740 - DNA, 25 bp, Homo sapien
ccaggcgggacagatcaccaggtca

SEQ ID NO: 5682741 - DNA, 25 bp, Homo sapien
acttttggcccaggcgggacagatc

SEQ ID NO: 5682742 - DNA, 25 bp, Homo sapien
gacttttggcccaggcgggacagat

SEQ ID NO: 5682743 - DNA, 25 bp, Homo sapien
cttttggcccaggcgggacagatca

SEQ ID NO: 5682744 - DNA, 25 bp, Homo sapien
agacttttggcccaggcgggacaga

SEQ ID NO: 5682745 - DNA, 25 bp, Homo sapien
gacctggtgatctgtcccgcctggg

SEQ ID NO: 5682746 - DNA, 25 bp, Homo sapien
tgacctggtgatctgtcccgcctgg

SEQ ID NO: 5682747 - DNA, 25 bp, Homo sapien
gatctgtcccgcctgggccaaaagt

SEQ ID NO: 5682748 - DNA, 25 bp, Homo sapien
atctgtcccgcctgggccaaaagtc

SEQ ID NO: 5682749 - DNA, 25 bp, Homo sapien
tctgtcccgcctgggccaaaagtct

SEQ ID NO: 5682750 - DNA, 25 bp, Homo sapien
acctggtgatctgtcccgcctgggc

SEQ ID NO: 5682751 - DNA, 25 bp, Homo sapien
aagagaacaagactccgtctccaaa

SEQ ID NO: 5682752 - DNA, 25 bp, Homo sapien
gagaacaagactccgtctccaaaaa

SEQ ID NO: 5682753 - DNA, 25 bp, Homo sapien
gcaagagaacaagactccgtctcca

SEQ ID NO: 5682754 - DNA, 25 bp, Homo sapien
agagaacaagactccgtctccaaaa

SEQ ID NO: 5682755 - DNA, 25 bp, Homo sapien
caagagaacaagactccgtctccaa

SEQ ID NO: 5682756 - DNA, 25 bp, Homo sapien
ggcaagagaacaagactccgtctcc

SEQ ID NO: 5682757 - DNA, 25 bp, Homo sapien
tttttggagacggagtcttgttctc

SEQ ID NO: 5682758 - DNA, 25 bp, Homo sapien
ttggagacggagtcttgttctcttg

SEQ ID NO: 5682759 - DNA, 25 bp, Homo sapien
ttttggagacggagtcttgttctct

SEQ ID NO: 5682760 - DNA, 25 bp, Homo sapien
tggagacggagtcttgttctcttgc

SEQ ID NO: 5682761 - DNA, 25 bp, Homo sapien
tttggagacggagtcttgttctctt

SEQ ID NO: 5682762 - DNA, 25 bp, Homo sapien
ggagacggagtcttgttctcttgcc

SEQ ID NO: 5682763 - DNA, 25 bp, Homo sapien
cgggtgaatcacgaggtcctgagtt

SEQ ID NO: 5682764 - DNA, 25 bp, Homo sapien
aatcacgaggtcctgagtttgagac

SEQ ID NO: 5682765 - DNA, 25 bp, Homo sapien
ataccaacacttcaggaggctgagg

SEQ ID NO: 5682766 - DNA, 25 bp, Homo sapien
tgaatcacgaggtcctgagtttgag

SEQ ID NO: 5682767 - DNA, 25 bp, Homo sapien
tgtaataccaacacttcaggaggct

SEQ ID NO: 5682768 - DNA, 25 bp, Homo sapien
tggtattagcctgggcatggtggct

SEQ ID NO: 5682769 - DNA, 25 bp, Homo sapien
caaactcaggacctcgtgattcacc

SEQ ID NO: 5682770 - DNA, 25 bp, Homo sapien
aactcaggacctcgtgattcacccg

SEQ ID NO: 5682771 - DNA, 25 bp, Homo sapien
gtctcaaactcaggacctcgtgatt

SEQ ID NO: 5682772 - DNA, 25 bp, Homo sapien
cctgaagtgttggtattacaggcat

SEQ ID NO: 5682773 - DNA, 25 bp, Homo sapien
agccaccatgcccaggctaatacca

SEQ ID NO: 5682774 - DNA, 25 bp, Homo sapien
cctcagcctcctgaagtgttggtat

SEQ ID NO: 5682775 - DNA, 25 bp, Homo sapien
taagtcctgatttcgtcctgtcaac

SEQ ID NO: 5682776 - DNA, 25 bp, Homo sapien
cagagatctaagtcctgatttcgtc

SEQ ID NO: 5682777 - DNA, 25 bp, Homo sapien
agtcctgatttcgtcctgtcaaccc

SEQ ID NO: 5682778 - DNA, 25 bp, Homo sapien
tgatttcgtcctgtcaaccccagat

SEQ ID NO: 5682779 - DNA, 25 bp, Homo sapien
gatctaagtcctgatttcgtcctgt

SEQ ID NO: 5682780 - DNA, 25 bp, Homo sapien
gagatctaagtcctgatttcgtcct

SEQ ID NO: 5682781 - DNA, 25 bp, Homo sapien
tgacaggacgaaatcaggacttaga

SEQ ID NO: 5682782 - DNA, 25 bp, Homo sapien
tctggggttgacaggacgaaatcag

SEQ ID NO: 5682783 - DNA, 25 bp, Homo sapien
gggttgacaggacgaaatcaggact

SEQ ID NO: 5682784 - DNA, 25 bp, Homo sapien
gacgaaatcaggacttagatctctg

SEQ ID NO: 5682785 - DNA, 25 bp, Homo sapien
cgaaatcaggacttagatctctgaa

SEQ ID NO: 5682786 - DNA, 25 bp, Homo sapien
caggacgaaatcaggacttagatct

SEQ ID NO: 5682787 - DNA, 25 bp, Homo sapien
atgattcacccgcctcgtcctccca

SEQ ID NO: 5682788 - DNA, 25 bp, Homo sapien
gtgagccaccacccccagcccaacc

SEQ ID NO: 5682789 - DNA, 25 bp, Homo sapien
acctcatgattcacccgcctcgtcc

SEQ ID NO: 5682790 - DNA, 25 bp, Homo sapien
cgtgagccaccacccccagcccaac

SEQ ID NO: 5682791 - DNA, 25 bp, Homo sapien
gacctcatgattcacccgcctcgtc

SEQ ID NO: 5682792 - DNA, 25 bp, Homo sapien
cctcatgattcacccgcctcgtcct

SEQ ID NO: 5682793 - DNA, 25 bp, Homo sapien
tgggaggacgaggcgggtgaatcat

SEQ ID NO: 5682794 - DNA, 25 bp, Homo sapien
gttgggctgggggtggtggctcacg

SEQ ID NO: 5682795 - DNA, 25 bp, Homo sapien
gacgaggcgggtgaatcatgaggtc

SEQ ID NO: 5682796 - DNA, 25 bp, Homo sapien
aggacgaggcgggtgaatcatgagg

SEQ ID NO: 5682797 - DNA, 25 bp, Homo sapien
ggttgggctgggggtggtggctcac

SEQ ID NO: 5682798 - DNA, 25 bp, Homo sapien
gggttgggctgggggtggtggctca

SEQ ID NO: 5682799 - DNA, 25 bp, Homo sapien
tcattgtgccagtgacatgtgtaga

SEQ ID NO: 5682800 - DNA, 25 bp, Homo sapien
caatcctgagccctagctaattcat

SEQ ID NO: 5682801 - DNA, 25 bp, Homo sapien
tgagccctagctaattcattgtgcc

SEQ ID NO: 5682802 - DNA, 25 bp, Homo sapien
ttgtgccagtgacatgtgtagagaa

SEQ ID NO: 5682803 - DNA, 25 bp, Homo sapien
tcctgagccctagctaattcattgt

SEQ ID NO: 5682804 - DNA, 25 bp, Homo sapien
gtgccagtgacatgtgtagagaaga

SEQ ID NO: 5682805 - DNA, 25 bp, Homo sapien
cacaatgaattagctagggctcagg

SEQ ID NO: 5682806 - DNA, 25 bp, Homo sapien
ggcacaatgaattagctagggctca

SEQ ID NO: 5682807 - DNA, 25 bp, Homo sapien
caatgaattagctagggctcaggat

SEQ ID NO: 5682808 - DNA, 25 bp, Homo sapien
ttctctacacatgtcactggcacaa

SEQ ID NO: 5682809 - DNA, 25 bp, Homo sapien
tcttctctacacatgtcactggcac

SEQ ID NO: 5682810 - DNA, 25 bp, Homo sapien
tctacacatgtcactggcacaatga

SEQ ID NO: 5682811 - DNA, 25 bp, Homo sapien
ggtatgatttgattaacactgaact

SEQ ID NO: 5682812 - DNA, 25 bp, Homo sapien
gggtatgatttgattaacactgaac

SEQ ID NO: 5682813 - DNA, 25 bp, Homo sapien
tatgatttgattaacactgaacttt

SEQ ID NO: 5682814 - DNA, 25 bp, Homo sapien
tggggtatgatttgattaacactga

SEQ ID NO: 5682815 - DNA, 25 bp, Homo sapien
gtatgatttgattaacactgaactt

SEQ ID NO: 5682816 - DNA, 25 bp, Homo sapien
ggggtatgatttgattaacactgaa

SEQ ID NO: 5682817 - DNA, 25 bp, Homo sapien
tcagtgttaatcaaatcatacccca

SEQ ID NO: 5682818 - DNA, 25 bp, Homo sapien
agttcagtgttaatcaaatcatacc

SEQ ID NO: 5682819 - DNA, 25 bp, Homo sapien
aagttcagtgttaatcaaatcatac

SEQ ID NO: 5682820 - DNA, 25 bp, Homo sapien
ttcagtgttaatcaaatcatacccc

SEQ ID NO: 5682821 - DNA, 25 bp, Homo sapien
aaagttcagtgttaatcaaatcata

SEQ ID NO: 5682822 - DNA, 25 bp, Homo sapien
gttcagtgttaatcaaatcataccc

SEQ ID NO: 5682823 - DNA, 25 bp, Homo sapien
ggtatgatttgattaacactgaact

SEQ ID NO: 5682824 - DNA, 25 bp, Homo sapien
gggtatgatttgattaacactgaac

SEQ ID NO: 5682825 - DNA, 25 bp, Homo sapien
tatgatttgattaacactgaacttt

SEQ ID NO: 5682826 - DNA, 25 bp, Homo sapien
tgttctttcttccagatttcctcgt

SEQ ID NO: 5682827 - DNA, 25 bp, Homo sapien
cactgaactttgttctttcttccag

SEQ ID NO: 5682828 - DNA, 25 bp, Homo sapien
gatttcctcgtcctgtgactgtgga

SEQ ID NO: 5682829 - DNA, 25 bp, Homo sapien
tcagtgttaatcaaatcatacccca

SEQ ID NO: 5682830 - DNA, 25 bp, Homo sapien
tctggaagaaagaacaaagttcagt

SEQ ID NO: 5682831 - DNA, 25 bp, Homo sapien
tccacagtcacaggacgaggaaatc

SEQ ID NO: 5682832 - DNA, 25 bp, Homo sapien
aaagttcagtgttaatcaaatcata

SEQ ID NO: 5682833 - DNA, 25 bp, Homo sapien
cgaggaaatctggaagaaagaacaa

SEQ ID NO: 5682834 - DNA, 25 bp, Homo sapien
gttcagtgttaatcaaatcataccc

SEQ ID NO: 5682835 - DNA, 25 bp, Homo sapien
aattagatcctctttgctttctgga

SEQ ID NO: 5682836 - DNA, 25 bp, Homo sapien
tctggatctttatttgaagaaagtc

SEQ ID NO: 5682837 - DNA, 25 bp, Homo sapien
cattttggaatctggacaccacagg

SEQ ID NO: 5682838 - DNA, 25 bp, Homo sapien
caccacaggtggttccaaaggaatt

SEQ ID NO: 5682839 - DNA, 25 bp, Homo sapien
tggttccaaaggaattagatcctct

SEQ ID NO: 5682840 - DNA, 25 bp, Homo sapien
tgataggtataacttcattttggaa

SEQ ID NO: 5682841 - DNA, 25 bp, Homo sapien
gactttcttcaaataaagatccaga

SEQ ID NO: 5682842 - DNA, 25 bp, Homo sapien
cacctgtggtgtccagattccaaaa

SEQ ID NO: 5682843 - DNA, 25 bp, Homo sapien
gaggatctaattcctttggaaccac

SEQ ID NO: 5682844 - DNA, 25 bp, Homo sapien
tccagaaagcaaagaggatctaatt

SEQ ID NO: 5682845 - DNA, 25 bp, Homo sapien
tccaaaatgaagttatacctatcat

SEQ ID NO: 5682846 - DNA, 25 bp, Homo sapien
aattcctttggaaccacctgtggtg

SEQ ID NO: 5682847 - DNA, 25 bp, Homo sapien
gacaatgaggaatattcttagtctg

SEQ ID NO: 5682848 - DNA, 25 bp, Homo sapien
gaggaatattcttagtctgttgttt

SEQ ID NO: 5682849 - DNA, 25 bp, Homo sapien
tgaggaatattcttagtctgttgtt

SEQ ID NO: 5682850 - DNA, 25 bp, Homo sapien
caatgaggaatattcttagtctgtt

SEQ ID NO: 5682851 - DNA, 25 bp, Homo sapien
aagacaatgaggaatattcttagtc

SEQ ID NO: 5682852 - DNA, 25 bp, Homo sapien
aatgaggaatattcttagtctgttg

SEQ ID NO: 5682853 - DNA, 25 bp, Homo sapien
ggcgccaagaagaacttcggaggat

SEQ ID NO: 5682854 - DNA, 25 bp, Homo sapien
cgccaagaagaacttcggaggatgg

SEQ ID NO: 5682855 - DNA, 25 bp, Homo sapien
ccaagaagaacttcggaggatggaa

SEQ ID NO: 5682856 - DNA, 25 bp, Homo sapien
tgaggcgccaagaagaacttcggag

SEQ ID NO: 5682857 - DNA, 25 bp, Homo sapien
aggcgccaagaagaacttcggagga

SEQ ID NO: 5682858 - DNA, 25 bp, Homo sapien
atgaggcgccaagaagaacttcgga

SEQ ID NO: 5682859 - DNA, 25 bp, Homo sapien
catcctccgaagttcttcttggcgc

SEQ ID NO: 5682860 - DNA, 25 bp, Homo sapien
tccgaagttcttcttggcgcctcat

SEQ ID NO: 5682861 - DNA, 25 bp, Homo sapien
ctccgaagttcttcttggcgcctca

SEQ ID NO: 5682862 - DNA, 25 bp, Homo sapien
ccatcctccgaagttcttcttggcg

SEQ ID NO: 5682863 - DNA, 25 bp, Homo sapien
ttccatcctccgaagttcttcttgg

SEQ ID NO: 5682864 - DNA, 25 bp, Homo sapien
tcctccgaagttcttcttggcgcct

SEQ ID NO: 5682865 - DNA, 25 bp, Homo sapien
aacagactaagaatattcctcattg

SEQ ID NO: 5682866 - DNA, 25 bp, Homo sapien
caacagactaagaatattcctcatt

SEQ ID NO: 5682867 - DNA, 25 bp, Homo sapien
aaaacaacagactaagaatattcct

SEQ ID NO: 5682868 - DNA, 25 bp, Homo sapien
cagactaagaatattcctcattgtc

SEQ ID NO: 5682869 - DNA, 25 bp, Homo sapien
aacaacagactaagaatattcctca

SEQ ID NO: 5682870 - DNA, 25 bp, Homo sapien
gactaagaatattcctcattgtctt

SEQ ID NO: 5682871 - DNA, 25 bp, Homo sapien
gacaatgaggaatattcttagtctg

SEQ ID NO: 5682872 - DNA, 25 bp, Homo sapien
agatctatatgaagacaatgaggaa

SEQ ID NO: 5682873 - DNA, 25 bp, Homo sapien
gaggaatattcttagtctgttgttt

SEQ ID NO: 5682874 - DNA, 25 bp, Homo sapien
tgaggaatattcttagtctgttgtt

SEQ ID NO: 5682875 - DNA, 25 bp, Homo sapien
caatgaggaatattcttagtctgtt

SEQ ID NO: 5682876 - DNA, 25 bp, Homo sapien
tgtttttttagatttgatgaggcgc

SEQ ID NO: 5682877 - DNA, 25 bp, Homo sapien
aacagactaagaatattcctcattg

SEQ ID NO: 5682878 - DNA, 25 bp, Homo sapien
aaaacaacagactaagaatattcct

SEQ ID NO: 5682879 - DNA, 25 bp, Homo sapien
cagactaagaatattcctcattgtc

SEQ ID NO: 5682880 - DNA, 25 bp, Homo sapien
aacaacagactaagaatattcctca

SEQ ID NO: 5682881 - DNA, 25 bp, Homo sapien
ttcctcattgtcttcatatagatct

SEQ ID NO: 5682882 - DNA, 25 bp, Homo sapien
gcgcctcatcaaatctaaaaaaaca

SEQ ID NO: 5682883 - DNA, 25 bp, Homo sapien
tagcttctgctgcctactttaaggg

SEQ ID NO: 5682884 - DNA, 25 bp, Homo sapien
gaattgtttcctttggcatagaaag

SEQ ID NO: 5682885 - DNA, 25 bp, Homo sapien
attgtttcctttggcatagaaagag

SEQ ID NO: 5682886 - DNA, 25 bp, Homo sapien
tatatgtcttacttagcccagaggt

SEQ ID NO: 5682887 - DNA, 25 bp, Homo sapien
gacatatatgtcttacttagcccag

SEQ ID NO: 5682888 - DNA, 25 bp, Homo sapien
atgtcttacttagcccagaggtctt

SEQ ID NO: 5682889 - DNA, 25 bp, Homo sapien
ccccttaaagtaggcagcagaagct

SEQ ID NO: 5682890 - DNA, 25 bp, Homo sapien
ctaagtaagacatatatgtcacccc

SEQ ID NO: 5682891 - DNA, 25 bp, Homo sapien
ctttctatgccaaaggaaacaattc

SEQ ID NO: 5682892 - DNA, 25 bp, Homo sapien
aagacctctgggctaagtaagacat

SEQ ID NO: 5682893 - DNA, 25 bp, Homo sapien
cctctgggctaagtaagacatatat

SEQ ID NO: 5682894 - DNA, 25 bp, Homo sapien
ctctttctatgccaaaggaaacaat

SEQ ID NO: 5682895 - DNA, 25 bp, Homo sapien
agagtgcaatggcatggtcttggct

SEQ ID NO: 5682896 - DNA, 25 bp, Homo sapien
ctagagtgcaatggcatggtcttgg

SEQ ID NO: 5682897 - DNA, 25 bp, Homo sapien
tagagtgcaatggcatggtcttggc

SEQ ID NO: 5682898 - DNA, 25 bp, Homo sapien
agtgcaatggcatggtcttggctca

SEQ ID NO: 5682899 - DNA, 25 bp, Homo sapien
ggctagagtgcaatggcatggtctt

SEQ ID NO: 5682900 - DNA, 25 bp, Homo sapien
gctagagtgcaatggcatggtcttg

SEQ ID NO: 5682901 - DNA, 25 bp, Homo sapien
aagaccatgccattgcactctagcc

SEQ ID NO: 5682902 - DNA, 25 bp, Homo sapien
caagaccatgccattgcactctagc

SEQ ID NO: 5682903 - DNA, 25 bp, Homo sapien
ccaagaccatgccattgcactctag

SEQ ID NO: 5682904 - DNA, 25 bp, Homo sapien
tgagccaagaccatgccattgcact

SEQ ID NO: 5682905 - DNA, 25 bp, Homo sapien
agccaagaccatgccattgcactct

SEQ ID NO: 5682906 - DNA, 25 bp, Homo sapien
gccaagaccatgccattgcactcta

SEQ ID NO: 5682907 - DNA, 25 bp, Homo sapien
tattagagactgagtttgaccacgt

SEQ ID NO: 5682908 - DNA, 25 bp, Homo sapien
ttagagactgagtttgaccacgttg

SEQ ID NO: 5682909 - DNA, 25 bp, Homo sapien
gactgagtttgaccacgttggtcag

SEQ ID NO: 5682910 - DNA, 25 bp, Homo sapien
attagagactgagtttgaccacgtt

SEQ ID NO: 5682911 - DNA, 25 bp, Homo sapien
agactgagtttgaccacgttggtca

SEQ ID NO: 5682912 - DNA, 25 bp, Homo sapien
aacgtggtcaaactcagtctctaat

SEQ ID NO: 5682913 - DNA, 25 bp, Homo sapien
caacgtggtcaaactcagtctctaa

SEQ ID NO: 5682914 - DNA, 25 bp, Homo sapien
acgtggtcaaactcagtctctaata

SEQ ID NO: 5682915 - DNA, 25 bp, Homo sapien
ctgaccaacgtggtcaaactcagtc

SEQ ID NO: 5682916 - DNA, 25 bp, Homo sapien
tgaccaacgtggtcaaactcagtct

SEQ ID NO: 5682917 - DNA, 25 bp, Homo sapien
caccaagcccggcccagatagcaat

SEQ ID NO: 5682918 - DNA, 25 bp, Homo sapien
attgctatctgggccgggcttggtg

SEQ ID NO: 5682919 - DNA, 25 bp, Homo sapien
ttactggcgtgagccaccaagcccg

SEQ ID NO: 5682920 - DNA, 25 bp, Homo sapien
caccaagcccggcccagatagcaat

SEQ ID NO: 5682921 - DNA, 25 bp, Homo sapien
tcagataatctgcccgcctcggttt

SEQ ID NO: 5682922 - DNA, 25 bp, Homo sapien
gtgagccaccaagcccggcccagat

SEQ ID NO: 5682923 - DNA, 25 bp, Homo sapien
ctcagataatctgcccgcctcggtt

SEQ ID NO: 5682924 - DNA, 25 bp, Homo sapien
agataatctgcccgcctcggtttcc

SEQ ID NO: 5682925 - DNA, 25 bp, Homo sapien
cgggcttggtggctcacgccagtaa

SEQ ID NO: 5682926 - DNA, 25 bp, Homo sapien
aaccgaggcgggcagattatctgag

SEQ ID NO: 5682927 - DNA, 25 bp, Homo sapien
gccgggcttggtggctcacgccagt

SEQ ID NO: 5682928 - DNA, 25 bp, Homo sapien
atctgggccgggcttggtggctcac

SEQ ID NO: 5682929 - DNA, 25 bp, Homo sapien
ggaaaccgaggcgggcagattatct

SEQ ID NO: 5682930 - DNA, 25 bp, Homo sapien
attgctatctgggccgggcttggtg

SEQ ID NO: 5682931 - DNA, 25 bp, Homo sapien
aaactggatagtttggttgtttctg

SEQ ID NO: 5682932 - DNA, 25 bp, Homo sapien
taaaatgccaaaactggatagtttg

SEQ ID NO: 5682933 - DNA, 25 bp, Homo sapien
aatgccaaaactggatagtttggtt

SEQ ID NO: 5682934 - DNA, 25 bp, Homo sapien
aaaatgccaaaactggatagtttgg

SEQ ID NO: 5682935 - DNA, 25 bp, Homo sapien
aaatgccaaaactggatagtttggt

SEQ ID NO: 5682936 - DNA, 25 bp, Homo sapien
caaactatccagttttggcatttta

SEQ ID NO: 5682937 - DNA, 25 bp, Homo sapien
ccaaactatccagttttggcatttt

SEQ ID NO: 5682938 - DNA, 25 bp, Homo sapien
cagaaacaaccaaactatccagttt

SEQ ID NO: 5682939 - DNA, 25 bp, Homo sapien
aaccaaactatccagttttggcatt

SEQ ID NO: 5682940 - DNA, 25 bp, Homo sapien
accaaactatccagttttggcattt

SEQ ID NO: 5682941 - DNA, 25 bp, Homo sapien
ttttggttatggtgttaaaatgcca

SEQ ID NO: 5682942 - DNA, 25 bp, Homo sapien
taaaatgccaaaactggatagtttg

SEQ ID NO: 5682943 - DNA, 25 bp, Homo sapien
aaactggatagtttggttgtttctg

SEQ ID NO: 5682944 - DNA, 25 bp, Homo sapien
aatgccaaaactggatagtttggtt

SEQ ID NO: 5682945 - DNA, 25 bp, Homo sapien
actggatagtttggttgtttctgtt

SEQ ID NO: 5682946 - DNA, 25 bp, Homo sapien
aaatgccaaaactggatagtttggt

SEQ ID NO: 5682947 - DNA, 25 bp, Homo sapien
caaactatccagttttggcatttta

SEQ ID NO: 5682948 - DNA, 25 bp, Homo sapien
gcattttaacaccataaccaaaaca

SEQ ID NO: 5682949 - DNA, 25 bp, Homo sapien
aaacagaaacaaccaaactatccag

SEQ ID NO: 5682950 - DNA, 25 bp, Homo sapien
cagaaacaaccaaactatccagttt

SEQ ID NO: 5682951 - DNA, 25 bp, Homo sapien
aaccaaactatccagttttggcatt

SEQ ID NO: 5682952 - DNA, 25 bp, Homo sapien
acaaccaaactatccagttttggca

SEQ ID NO: 5682953 - DNA, 25 bp, Homo sapien
aatcttggctccctgcaacctccgc

SEQ ID NO: 5682954 - DNA, 25 bp, Homo sapien
tgcaatcttggctccctgcaacctc

SEQ ID NO: 5682955 - DNA, 25 bp, Homo sapien
gtgcaatcttggctccctgcaacct

SEQ ID NO: 5682956 - DNA, 25 bp, Homo sapien
caatcttggctccctgcaacctccg

SEQ ID NO: 5682957 - DNA, 25 bp, Homo sapien
gcaatcttggctccctgcaacctcc

SEQ ID NO: 5682958 - DNA, 25 bp, Homo sapien
gaggttgcagggagccaagattgca

SEQ ID NO: 5682959 - DNA, 25 bp, Homo sapien
ggaggttgcagggagccaagattgc

SEQ ID NO: 5682960 - DNA, 25 bp, Homo sapien
gcggaggttgcagggagccaagatt

SEQ ID NO: 5682961 - DNA, 25 bp, Homo sapien
aggttgcagggagccaagattgcac

SEQ ID NO: 5682962 - DNA, 25 bp, Homo sapien
cggaggttgcagggagccaagattg

SEQ ID NO: 5682963 - DNA, 25 bp, Homo sapien
ggttatccactagagttctaaacag

SEQ ID NO: 5682964 - DNA, 25 bp, Homo sapien
gagttctaaacagacttagtcaccc

SEQ ID NO: 5682965 - DNA, 25 bp, Homo sapien
gggttatccactagagttctaaaca

SEQ ID NO: 5682966 - DNA, 25 bp, Homo sapien
tctaaacagacttagtcacccactc

SEQ ID NO: 5682967 - DNA, 25 bp, Homo sapien
aaacagacttagtcacccactccta

SEQ ID NO: 5682968 - DNA, 25 bp, Homo sapien
gcatgcgccaccacttttggggtta

SEQ ID NO: 5682969 - DNA, 25 bp, Homo sapien
taaccccaaaagtggtggcgcatgc

SEQ ID NO: 5682970 - DNA, 25 bp, Homo sapien
ataaccccaaaagtggtggcgcatg

SEQ ID NO: 5682971 - DNA, 25 bp, Homo sapien
tagaactctagtggataaccccaaa

SEQ ID NO: 5682972 - DNA, 25 bp, Homo sapien
gggtgactaagtctgtttagaactc

SEQ ID NO: 5682973 - DNA, 25 bp, Homo sapien
tgtttagaactctagtggataaccc

SEQ ID NO: 5682974 - DNA, 25 bp, Homo sapien
taggagtgggtgactaagtctgttt

SEQ ID NO: 5682975 - DNA, 25 bp, Homo sapien
aatggaaatagcctccagtggaggg

SEQ ID NO: 5682976 - DNA, 25 bp, Homo sapien
gatgggtgggaagcttccaacaatg

SEQ ID NO: 5682977 - DNA, 25 bp, Homo sapien
ccctccactggaggctatttccatt

SEQ ID NO: 5682978 - DNA, 25 bp, Homo sapien
cattgttggaagcttcccacccatc

SEQ ID NO: 5682979 - DNA, 25 bp, Homo sapien
aacaactgaacgctttggtcaggct

SEQ ID NO: 5682980 - DNA, 25 bp, Homo sapien
acaactgaacgctttggtcaggctg

SEQ ID NO: 5682981 - DNA, 25 bp, Homo sapien
aactgaacgctttggtcaggctgct

SEQ ID NO: 5682982 - DNA, 25 bp, Homo sapien
ctgaacgctttggtcaggctgctac

SEQ ID NO: 5682983 - DNA, 25 bp, Homo sapien
actgaacgctttggtcaggctgcta

SEQ ID NO: 5682984 - DNA, 25 bp, Homo sapien
caactgaacgctttggtcaggctgc

SEQ ID NO: 5682985 - DNA, 25 bp, Homo sapien
cagcctgaccaaagcgttcagttgt

SEQ ID NO: 5682986 - DNA, 25 bp, Homo sapien
gcagcctgaccaaagcgttcagttg

SEQ ID NO: 5682987 - DNA, 25 bp, Homo sapien
agcagcctgaccaaagcgttcagtt

SEQ ID NO: 5682988 - DNA, 25 bp, Homo sapien
gtagcagcctgaccaaagcgttcag

SEQ ID NO: 5682989 - DNA, 25 bp, Homo sapien
agcctgaccaaagcgttcagttgtt

SEQ ID NO: 5682990 - DNA, 25 bp, Homo sapien
tagcagcctgaccaaagcgttcagt

SEQ ID NO: 5682991 - DNA, 25 bp, Homo sapien
catgcgtgccgtgggcccgggagga

SEQ ID NO: 5682992 - DNA, 25 bp, Homo sapien
aagagatccagatgtcgcacgtgac

SEQ ID NO: 5682993 - DNA, 25 bp, Homo sapien
gagatccagatgtcgcacgtgacct

SEQ ID NO: 5682994 - DNA, 25 bp, Homo sapien
atccagatgtcgcacgtgacctaag

SEQ ID NO: 5682995 - DNA, 25 bp, Homo sapien
agatccagatgtcgcacgtgaccta

SEQ ID NO: 5682996 - DNA, 25 bp, Homo sapien
agagatccagatgtcgcacgtgacc

SEQ ID NO: 5682997 - DNA, 25 bp, Homo sapien
aggtcacgtgcgacatctggatctc

SEQ ID NO: 5682998 - DNA, 25 bp, Homo sapien
cttaggtcacgtgcgacatctggat

SEQ ID NO: 5682999 - DNA, 25 bp, Homo sapien
ggtcacgtgcgacatctggatctct

SEQ ID NO: 5683000 - DNA, 25 bp, Homo sapien
ctcccgggcccacggcacgcatgcg

SEQ ID NO: 5683001 - DNA, 25 bp, Homo sapien
taggtcacgtgcgacatctggatct

SEQ ID NO: 5683002 - DNA, 25 bp, Homo sapien
gtcacgtgcgacatctggatctctt

SEQ ID NO: 5683003 - DNA, 25 bp, Homo sapien
gcgcatacacacaccttgggagcct

SEQ ID NO: 5683004 - DNA, 25 bp, Homo sapien
ccaggaatatatgagccctgcctcg

SEQ ID NO: 5683005 - DNA, 25 bp, Homo sapien
aggaatatatgagccctgcctcgac

SEQ ID NO: 5683006 - DNA, 25 bp, Homo sapien
cgcatacacacaccttgggagcctg

SEQ ID NO: 5683007 - DNA, 25 bp, Homo sapien
ggagcctgtgatcccccttgtttct

SEQ ID NO: 5683008 - DNA, 25 bp, Homo sapien
aatatatgagccctgcctcgacctc

SEQ ID NO: 5683009 - DNA, 25 bp, Homo sapien
gaggcagggctcatatattcctggt

SEQ ID NO: 5683010 - DNA, 25 bp, Homo sapien
gaggtcgaggcagggctcatatatt

SEQ ID NO: 5683011 - DNA, 25 bp, Homo sapien
gtcgaggcagggctcatatattcct

SEQ ID NO: 5683012 - DNA, 25 bp, Homo sapien
caggctcccaaggtgtgtgtatgcg

SEQ ID NO: 5683013 - DNA, 25 bp, Homo sapien
agaaacaagggggatcacaggctcc

SEQ ID NO: 5683014 - DNA, 25 bp, Homo sapien
caagggggatcacaggctcccaagg

SEQ ID NO: 5683015 - DNA, 25 bp, Homo sapien
tgaagatatcctcccagggttgaag

SEQ ID NO: 5683016 - DNA, 25 bp, Homo sapien
atgaagatatcctcccagggttgaa

SEQ ID NO: 5683017 - DNA, 25 bp, Homo sapien
catgaagatatcctcccagggttga

SEQ ID NO: 5683018 - DNA, 25 bp, Homo sapien
acatgaagatatcctcccagggttg

SEQ ID NO: 5683019 - DNA, 25 bp, Homo sapien
aacatgaagatatcctcccagggtt

SEQ ID NO: 5683020 - DNA, 25 bp, Homo sapien
aaacatgaagatatcctcccagggt

SEQ ID NO: 5683021 - DNA, 25 bp, Homo sapien
acttcaaccctgggaggatatcttc

SEQ ID NO: 5683022 - DNA, 25 bp, Homo sapien
caaccctgggaggatatcttcatgt

SEQ ID NO: 5683023 - DNA, 25 bp, Homo sapien
tcaaccctgggaggatatcttcatg

SEQ ID NO: 5683024 - DNA, 25 bp, Homo sapien
ttcaaccctgggaggatatcttcat

SEQ ID NO: 5683025 - DNA, 25 bp, Homo sapien
cttcaaccctgggaggatatcttca

SEQ ID NO: 5683026 - DNA, 25 bp, Homo sapien
accctgggaggatatcttcatgttt

SEQ ID NO: 5683027 - DNA, 25 bp, Homo sapien
agataagactttccctcaagggaca

SEQ ID NO: 5683028 - DNA, 25 bp, Homo sapien
gataagactttccctcaagggacaa

SEQ ID NO: 5683029 - DNA, 25 bp, Homo sapien
ccctcaagggacaacccagtatggt

SEQ ID NO: 5683030 - DNA, 25 bp, Homo sapien
ttgtcccttgagggaaagtcttatc

SEQ ID NO: 5683031 - DNA, 25 bp, Homo sapien
accatactgggttgtcccttgaggg

SEQ ID NO: 5683032 - DNA, 25 bp, Homo sapien
tgtcccttgagggaaagtcttatct

SEQ ID NO: 5683033 - DNA, 25 bp, Homo sapien
tctggttaatgctctgacccttcac

SEQ ID NO: 5683034 - DNA, 25 bp, Homo sapien
tgacccttcaccatactgggttgtc

SEQ ID NO: 5683035 - DNA, 25 bp, Homo sapien
tcatactctgacaaccactgtctgt

SEQ ID NO: 5683036 - DNA, 25 bp, Homo sapien
actgtctgtctggttaatgctctga

SEQ ID NO: 5683037 - DNA, 25 bp, Homo sapien
accatactgggttgtcccttgaggg

SEQ ID NO: 5683038 - DNA, 25 bp, Homo sapien
tgtcccttgagggaaagtcttatct

SEQ ID NO: 5683039 - DNA, 25 bp, Homo sapien
ctgggtttaaaggatcttcctgcct

SEQ ID NO: 5683040 - DNA, 25 bp, Homo sapien
tcctgggtttaaaggatcttcctgc

SEQ ID NO: 5683041 - DNA, 25 bp, Homo sapien
gggtttaaaggatcttcctgcctca

SEQ ID NO: 5683042 - DNA, 25 bp, Homo sapien
tgggtttaaaggatcttcctgcctc

SEQ ID NO: 5683043 - DNA, 25 bp, Homo sapien
cacattgtagctccatcacccaggc

SEQ ID NO: 5683044 - DNA, 25 bp, Homo sapien
cattgtagctccatcacccaggctg

SEQ ID NO: 5683045 - DNA, 25 bp, Homo sapien
caggaagatcctttaaacccaggag

SEQ ID NO: 5683046 - DNA, 25 bp, Homo sapien
gcctgggtgatggagctacaatgtg

SEQ ID NO: 5683047 - DNA, 25 bp, Homo sapien
gaggcaggaagatcctttaaaccca

SEQ ID NO: 5683048 - DNA, 25 bp, Homo sapien
tgaggcaggaagatcctttaaaccc

SEQ ID NO: 5683049 - DNA, 25 bp, Homo sapien
aggcaggaagatcctttaaacccag

SEQ ID NO: 5683050 - DNA, 25 bp, Homo sapien
gcaggaagatcctttaaacccagga

SEQ ID NO: 5683051 - DNA, 25 bp, Homo sapien
tcttgaaagatcatcgtgaattagc

SEQ ID NO: 5683052 - DNA, 25 bp, Homo sapien
tattcttgaaagatcatcgtgaatt

SEQ ID NO: 5683053 - DNA, 25 bp, Homo sapien
attcttgaaagatcatcgtgaatta

SEQ ID NO: 5683054 - DNA, 25 bp, Homo sapien
ttattcttgaaagatcatcgtgaat

SEQ ID NO: 5683055 - DNA, 25 bp, Homo sapien
ttcttgaaagatcatcgtgaattag

SEQ ID NO: 5683056 - DNA, 25 bp, Homo sapien
cttgaaagatcatcgtgaattagca

SEQ ID NO: 5683057 - DNA, 25 bp, Homo sapien
gctaattcacgatgatctttcaaga

SEQ ID NO: 5683058 - DNA, 25 bp, Homo sapien
taattcacgatgatctttcaagaat

SEQ ID NO: 5683059 - DNA, 25 bp, Homo sapien
tgctaattcacgatgatctttcaag

SEQ ID NO: 5683060 - DNA, 25 bp, Homo sapien
ctaattcacgatgatctttcaagaa

SEQ ID NO: 5683061 - DNA, 25 bp, Homo sapien
attcacgatgatctttcaagaataa

SEQ ID NO: 5683062 - DNA, 25 bp, Homo sapien
aattcacgatgatctttcaagaata

SEQ ID NO: 5683063 - DNA, 25 bp, Homo sapien
gctccccagagtttattcttgaaag

SEQ ID NO: 5683064 - DNA, 25 bp, Homo sapien
tcttgaaagatcatcgtgaattagc

SEQ ID NO: 5683065 - DNA, 25 bp, Homo sapien
cccagagtttattcttgaaagatca

SEQ ID NO: 5683066 - DNA, 25 bp, Homo sapien
cactacatctgctccccagagttta

SEQ ID NO: 5683067 - DNA, 25 bp, Homo sapien
aggcgtgagccactacatctgctcc

SEQ ID NO: 5683068 - DNA, 25 bp, Homo sapien
cttgaaagatcatcgtgaattagca

SEQ ID NO: 5683069 - DNA, 25 bp, Homo sapien
gctaattcacgatgatctttcaaga

SEQ ID NO: 5683070 - DNA, 25 bp, Homo sapien
taaactctggggagcagatgtagtg

SEQ ID NO: 5683071 - DNA, 25 bp, Homo sapien
tgatctttcaagaataaactctggg

SEQ ID NO: 5683072 - DNA, 25 bp, Homo sapien
tgctaattcacgatgatctttcaag

SEQ ID NO: 5683073 - DNA, 25 bp, Homo sapien
gatgatctttcaagaataaactctg

SEQ ID NO: 5683074 - DNA, 25 bp, Homo sapien
ggagcagatgtagtggctcacgcct

SEQ ID NO: 5683075 - DNA, 25 bp, Homo sapien
aggctgaagagatgagactgagaaa

SEQ ID NO: 5683076 - DNA, 25 bp, Homo sapien
gtgggaaccctaaagaacttcagca

SEQ ID NO: 5683077 - DNA, 25 bp, Homo sapien
gaagagatgagactgagaaaggcaa

SEQ ID NO: 5683078 - DNA, 25 bp, Homo sapien
gaacttcagcaattgcaggaagcag

SEQ ID NO: 5683079 - DNA, 25 bp, Homo sapien
gaaccctaaagaacttcagcaattg

SEQ ID NO: 5683080 - DNA, 25 bp, Homo sapien
cttcagcaattgcaggaagcaggtg

SEQ ID NO: 5683081 - DNA, 25 bp, Homo sapien
gcctttctcagtctcatctcttcag

SEQ ID NO: 5683082 - DNA, 25 bp, Homo sapien
tgctgaagttctttagggttcccac

SEQ ID NO: 5683083 - DNA, 25 bp, Homo sapien
caattgctgaagttctttagggttc

SEQ ID NO: 5683084 - DNA, 25 bp, Homo sapien
cacctgcttcctgcaattgctgaag

SEQ ID NO: 5683085 - DNA, 25 bp, Homo sapien
ttgctgaagttctttagggttccca

SEQ ID NO: 5683086 - DNA, 25 bp, Homo sapien
tgcttcctgcaattgctgaagttct

SEQ ID NO: 5683087 - DNA, 25 bp, Homo sapien
tgacggagcctcactccaggctgga

SEQ ID NO: 5683088 - DNA, 25 bp, Homo sapien
gacggagcctcactccaggctggag

SEQ ID NO: 5683089 - DNA, 25 bp, Homo sapien
ttgtgacggagcctcactccaggct

SEQ ID NO: 5683090 - DNA, 25 bp, Homo sapien
tcaagccatcttcccttgtagctgg

SEQ ID NO: 5683091 - DNA, 25 bp, Homo sapien
aagccatcttcccttgtagctggga

SEQ ID NO: 5683092 - DNA, 25 bp, Homo sapien
ctcaatcgcaggctcaagccatctt

SEQ ID NO: 5683093 - DNA, 25 bp, Homo sapien
aagatggcttgagcctgcgattgag

SEQ ID NO: 5683094 - DNA, 25 bp, Homo sapien
agcctggagtgaggctccgtcacaa

SEQ ID NO: 5683095 - DNA, 25 bp, Homo sapien
ctccagcctggagtgaggctccgtc

SEQ ID NO: 5683096 - DNA, 25 bp, Homo sapien
ccagctacaagggaagatggcttga

SEQ ID NO: 5683097 - DNA, 25 bp, Homo sapien
tccagcctggagtgaggctccgtca

SEQ ID NO: 5683098 - DNA, 25 bp, Homo sapien
tcccagctacaagggaagatggctt

SEQ ID NO: 5683099 - DNA, 25 bp, Homo sapien
agcgtgcctgggacttcataaagga

SEQ ID NO: 5683100 - DNA, 25 bp, Homo sapien
aagccagtatcgagaccagaggtgt

SEQ ID NO: 5683101 - DNA, 25 bp, Homo sapien
agatagggtagggccattttagtct

SEQ ID NO: 5683102 - DNA, 25 bp, Homo sapien
gtgcctgggacttcataaaggaaca

SEQ ID NO: 5683103 - DNA, 25 bp, Homo sapien
agccagtatcgagaccagaggtgtg

SEQ ID NO: 5683104 - DNA, 25 bp, Homo sapien
cagaaaagatagggtagggccattt

SEQ ID NO: 5683105 - DNA, 25 bp, Homo sapien
tcctttatgaagtcccaggcacgct

SEQ ID NO: 5683106 - DNA, 25 bp, Homo sapien
cacacctctggtctcgatactggct

SEQ ID NO: 5683107 - DNA, 25 bp, Homo sapien
tgttcctttatgaagtcccaggcac

SEQ ID NO: 5683108 - DNA, 25 bp, Homo sapien
gttcctttatgaagtcccaggcacg

SEQ ID NO: 5683109 - DNA, 25 bp, Homo sapien
agactaaaatggccctaccctatct

SEQ ID NO: 5683110 - DNA, 25 bp, Homo sapien
aaatggccctaccctatcttttctg

SEQ ID NO: 5683111 - DNA, 25 bp, Homo sapien
agggaaatcatgaggctgcctccag

SEQ ID NO: 5683112 - DNA, 25 bp, Homo sapien
ctgaagggaaatcatgaggctgcct

SEQ ID NO: 5683113 - DNA, 25 bp, Homo sapien
gaaatcatgaggctgcctccagtag

SEQ ID NO: 5683114 - DNA, 25 bp, Homo sapien
gaagggaaatcatgaggctgcctcc

SEQ ID NO: 5683115 - DNA, 25 bp, Homo sapien
gacatggtcctctaccttcagggaa

SEQ ID NO: 5683116 - DNA, 25 bp, Homo sapien
aaatcatgaggctgcctccagtagg

SEQ ID NO: 5683117 - DNA, 25 bp, Homo sapien
aggcagcctcatgatttcccttcag

SEQ ID NO: 5683118 - DNA, 25 bp, Homo sapien
tggaggcagcctcatgatttccctt

SEQ ID NO: 5683119 - DNA, 25 bp, Homo sapien
ctggaggcagcctcatgatttccct

SEQ ID NO: 5683120 - DNA, 25 bp, Homo sapien
cctactggaggcagcctcatgattt

SEQ ID NO: 5683121 - DNA, 25 bp, Homo sapien
ttccctgaaggtagaggaccatgtc

SEQ ID NO: 5683122 - DNA, 25 bp, Homo sapien
gaggaccatgtccaactccctcccc

SEQ ID NO: 5683123 - DNA, 25 bp, Homo sapien
cacatatctcccaaattgaatttat

SEQ ID NO: 5683124 - DNA, 25 bp, Homo sapien
tctacacatatctcccaaattgaat

SEQ ID NO: 5683125 - DNA, 25 bp, Homo sapien
acacatatctcccaaattgaattta

SEQ ID NO: 5683126 - DNA, 25 bp, Homo sapien
ctacacatatctcccaaattgaatt

SEQ ID NO: 5683127 - DNA, 25 bp, Homo sapien
tacacatatctcccaaattgaattt

SEQ ID NO: 5683128 - DNA, 25 bp, Homo sapien
attcaatttgggagatatgtgtaga

SEQ ID NO: 5683129 - DNA, 25 bp, Homo sapien
aaattcaatttgggagatatgtgta

SEQ ID NO: 5683130 - DNA, 25 bp, Homo sapien
taaattcaatttgggagatatgtgt

SEQ ID NO: 5683131 - DNA, 25 bp, Homo sapien
ataaattcaatttgggagatatgtg

SEQ ID NO: 5683132 - DNA, 25 bp, Homo sapien
aattcaatttgggagatatgtgtag

SEQ ID NO: 5683133 - DNA, 25 bp, Homo sapien
gtgtatctacacatatctcccaaat

SEQ ID NO: 5683134 - DNA, 25 bp, Homo sapien
cacatatctcccaaattgaatttat

SEQ ID NO: 5683135 - DNA, 25 bp, Homo sapien
taatatcttcttccttcctataaga

SEQ ID NO: 5683136 - DNA, 25 bp, Homo sapien
tataagaccttctcttccactgcct

SEQ ID NO: 5683137 - DNA, 25 bp, Homo sapien
tctacacatatctcccaaattgaat

SEQ ID NO: 5683138 - DNA, 25 bp, Homo sapien
gtatacatgtgtgtgtatctacaca

SEQ ID NO: 5683139 - DNA, 25 bp, Homo sapien
caatttgggagatatgtgtagatac

SEQ ID NO: 5683140 - DNA, 25 bp, Homo sapien
taaattcaatttgggagatatgtgt

SEQ ID NO: 5683141 - DNA, 25 bp, Homo sapien
taaggaggcagtggaagagaaggtc

SEQ ID NO: 5683142 - DNA, 25 bp, Homo sapien
taggaaggaagaagatattataaat

SEQ ID NO: 5683143 - DNA, 25 bp, Homo sapien
tgtgtagatacacacacatgtatac

SEQ ID NO: 5683144 - DNA, 25 bp, Homo sapien
aagagaaggtcttataggaaggaag

SEQ ID NO: 5683145 - DNA, 25 bp, Homo sapien
cattccttaaccttgctacaaggcc

SEQ ID NO: 5683146 - DNA, 25 bp, Homo sapien
tctcccctcagtctgtaagcttagc

SEQ ID NO: 5683147 - DNA, 25 bp, Homo sapien
ttctcccctcagtctgtaagcttag

SEQ ID NO: 5683148 - DNA, 25 bp, Homo sapien
aagtgatcataccaataaagtcccc

SEQ ID NO: 5683149 - DNA, 25 bp, Homo sapien
cccattccttaaccttgctacaagg

SEQ ID NO: 5683150 - DNA, 25 bp, Homo sapien
gtgatcataccaataaagtccccat

SEQ ID NO: 5683151 - DNA, 25 bp, Homo sapien
ccttgtagcaaggttaaggaatggg

SEQ ID NO: 5683152 - DNA, 25 bp, Homo sapien
ggccttgtagcaaggttaaggaatg

SEQ ID NO: 5683153 - DNA, 25 bp, Homo sapien
gccttgtagcaaggttaaggaatgg

SEQ ID NO: 5683154 - DNA, 25 bp, Homo sapien
gctaagcttacagactgaggggaga

SEQ ID NO: 5683155 - DNA, 25 bp, Homo sapien
atggggactttattggtatgatcac

SEQ ID NO: 5683156 - DNA, 25 bp, Homo sapien
ggggactttattggtatgatcactt

SEQ ID NO: 5683157 - DNA, 25 bp, Homo sapien
atttgagacctgcacactccattct

SEQ ID NO: 5683158 - DNA, 25 bp, Homo sapien
aatttgagacctgcacactccattc

SEQ ID NO: 5683159 - DNA, 25 bp, Homo sapien
gaatttgagacctgcacactccatt

SEQ ID NO: 5683160 - DNA, 25 bp, Homo sapien
tgagacctgcacactccattctcca

SEQ ID NO: 5683161 - DNA, 25 bp, Homo sapien
cctgcacactccattctccacaaaa

SEQ ID NO: 5683162 - DNA, 25 bp, Homo sapien
gacctgcacactccattctccacaa

SEQ ID NO: 5683163 - DNA, 25 bp, Homo sapien
ttgtggagaatggagtgtgcaggtc

SEQ ID NO: 5683164 - DNA, 25 bp, Homo sapien
aatggagtgtgcaggtctcaaattc

SEQ ID NO: 5683165 - DNA, 25 bp, Homo sapien
gaatggagtgtgcaggtctcaaatt

SEQ ID NO: 5683166 - DNA, 25 bp, Homo sapien
ttttgtggagaatggagtgtgcagg

SEQ ID NO: 5683167 - DNA, 25 bp, Homo sapien
tggagaatggagtgtgcaggtctca

SEQ ID NO: 5683168 - DNA, 25 bp, Homo sapien
agaatggagtgtgcaggtctcaaat

SEQ ID NO: 5683169 - DNA, 25 bp, Homo sapien
atttgagacctgcacactccattct

SEQ ID NO: 5683170 - DNA, 25 bp, Homo sapien
gaggtaaggtgagggtggagtggag

SEQ ID NO: 5683171 - DNA, 25 bp, Homo sapien
tgcacactccattctccacaaaaag

SEQ ID NO: 5683172 - DNA, 25 bp, Homo sapien
gtggagggccagtgggccaatgtgt

SEQ ID NO: 5683173 - DNA, 25 bp, Homo sapien
gaatttgagacctgcacactccatt

SEQ ID NO: 5683174 - DNA, 25 bp, Homo sapien
aagagagagacaggaggtaaggtga

SEQ ID NO: 5683175 - DNA, 25 bp, Homo sapien
gagaatggagtgtgcaggtctcaaa

SEQ ID NO: 5683176 - DNA, 25 bp, Homo sapien
aatggagtgtgcaggtctcaaattc

SEQ ID NO: 5683177 - DNA, 25 bp, Homo sapien
acacattggcccactggccctccac

SEQ ID NO: 5683178 - DNA, 25 bp, Homo sapien
ctttttgtggagaatggagtgtgca

SEQ ID NO: 5683179 - DNA, 25 bp, Homo sapien
cctcaccttacctcctgtctctctc

SEQ ID NO: 5683180 - DNA, 25 bp, Homo sapien
agaatggagtgtgcaggtctcaaat

SEQ ID NO: 5683181 - DNA, 25 bp, Homo sapien
acatgtttacctgtagcttaactcc

SEQ ID NO: 5683182 - DNA, 25 bp, Homo sapien
atgtttacctgtagcttaactccct

SEQ ID NO: 5683183 - DNA, 25 bp, Homo sapien
cctgtagcttaactccctttatagt

SEQ ID NO: 5683184 - DNA, 25 bp, Homo sapien
acctgtagcttaactccctttatag

SEQ ID NO: 5683185 - DNA, 25 bp, Homo sapien
catgtttacctgtagcttaactccc

SEQ ID NO: 5683186 - DNA, 25 bp, Homo sapien
tgtagcttaactccctttatagttc

SEQ ID NO: 5683187 - DNA, 25 bp, Homo sapien
gggagttaagctacaggtaaacatg

SEQ ID NO: 5683188 - DNA, 25 bp, Homo sapien
actataaagggagttaagctacagg

SEQ ID NO: 5683189 - DNA, 25 bp, Homo sapien
ggagttaagctacaggtaaacatgt

SEQ ID NO: 5683190 - DNA, 25 bp, Homo sapien
agggagttaagctacaggtaaacat

SEQ ID NO: 5683191 - DNA, 25 bp, Homo sapien
gaactataaagggagttaagctaca

SEQ ID NO: 5683192 - DNA, 25 bp, Homo sapien
ctataaagggagttaagctacaggt

SEQ ID NO: 5683193 - DNA, 25 bp, Homo sapien
agtgccacagggcccaccaatcctg

SEQ ID NO: 5683194 - DNA, 25 bp, Homo sapien
gtgccacagggcccaccaatcctgg

SEQ ID NO: 5683195 - DNA, 25 bp, Homo sapien
tgccacagggcccaccaatcctggg

SEQ ID NO: 5683196 - DNA, 25 bp, Homo sapien
gccacagggcccaccaatcctggga

SEQ ID NO: 5683197 - DNA, 25 bp, Homo sapien
tcccaggattggtgggccctgtggc

SEQ ID NO: 5683198 - DNA, 25 bp, Homo sapien
ccaggattggtgggccctgtggcac

SEQ ID NO: 5683199 - DNA, 25 bp, Homo sapien
caggattggtgggccctgtggcact

SEQ ID NO: 5683200 - DNA, 25 bp, Homo sapien
cccaggattggtgggccctgtggca

SEQ ID NO: 5683201 - DNA, 25 bp, Homo sapien
aacagcaacagcaggtacaagtgcc

SEQ ID NO: 5683202 - DNA, 25 bp, Homo sapien
acagcaggtacaagtgccacagggc

SEQ ID NO: 5683203 - DNA, 25 bp, Homo sapien
gcaggtacaagtgccacagggccca

SEQ ID NO: 5683204 - DNA, 25 bp, Homo sapien
cagggcccaccaatcctgggaggca

SEQ ID NO: 5683205 - DNA, 25 bp, Homo sapien
tacaagtgccacagggcccaccaat

SEQ ID NO: 5683206 - DNA, 25 bp, Homo sapien
gcaacagcaggtacaagtgccacag

SEQ ID NO: 5683207 - DNA, 25 bp, Homo sapien
attggtgggccctgtggcacttgta

SEQ ID NO: 5683208 - DNA, 25 bp, Homo sapien
tgggccctgtggcacttgtacctgc

SEQ ID NO: 5683209 - DNA, 25 bp, Homo sapien
gccctgtggcacttgtacctgctgt

SEQ ID NO: 5683210 - DNA, 25 bp, Homo sapien
tgcctcccaggattggtgggccctg

SEQ ID NO: 5683211 - DNA, 25 bp, Homo sapien
ggcacttgtacctgctgttgctgtt

SEQ ID NO: 5683212 - DNA, 25 bp, Homo sapien
tgtggcacttgtacctgctgttgct

SEQ ID NO: 5683213 - DNA, 25 bp, Homo sapien
ccagcccatgttgctccattcagct

SEQ ID NO: 5683214 - DNA, 25 bp, Homo sapien
gctgatggggaaccctctgtgaggc

SEQ ID NO: 5683215 - DNA, 25 bp, Homo sapien
cagctgatggggaaccctctgtgag

SEQ ID NO: 5683216 - DNA, 25 bp, Homo sapien
tccagcccatgttgctccattcagc

SEQ ID NO: 5683217 - DNA, 25 bp, Homo sapien
tcagctgatggggaaccctctgtga

SEQ ID NO: 5683218 - DNA, 25 bp, Homo sapien
ctgatggggaaccctctgtgaggca

SEQ ID NO: 5683219 - DNA, 25 bp, Homo sapien
gctgaatggagcaacatgggctgga

SEQ ID NO: 5683220 - DNA, 25 bp, Homo sapien
ctcacagagggttccccatcagctg

SEQ ID NO: 5683221 - DNA, 25 bp, Homo sapien
agctgaatggagcaacatgggctgg

SEQ ID NO: 5683222 - DNA, 25 bp, Homo sapien
cctcacagagggttccccatcagct

SEQ ID NO: 5683223 - DNA, 25 bp, Homo sapien
tgcctcacagagggttccccatcag

SEQ ID NO: 5683224 - DNA, 25 bp, Homo sapien
tcacagagggttccccatcagctga

SEQ ID NO: 5683225 - DNA, 25 bp, Homo sapien
tctgtgaggcagaaatacagcaggg

SEQ ID NO: 5683226 - DNA, 25 bp, Homo sapien
ttccagcccatgttgctccattcag

SEQ ID NO: 5683227 - DNA, 25 bp, Homo sapien
gggcctgggcttcattttctcactg

SEQ ID NO: 5683228 - DNA, 25 bp, Homo sapien
ccctctgtgaggcagaaatacagca

SEQ ID NO: 5683229 - DNA, 25 bp, Homo sapien
tcagctgatggggaaccctctgtga

SEQ ID NO: 5683230 - DNA, 25 bp, Homo sapien
catgttgctccattcagctgatggg

SEQ ID NO: 5683231 - DNA, 25 bp, Homo sapien
tacctcataccctgatcttcaagtt

SEQ ID NO: 5683232 - DNA, 25 bp, Homo sapien
ttggattcaattggggggccagaca

SEQ ID NO: 5683233 - DNA, 25 bp, Homo sapien
cctcataccctgatcttcaagttgg

SEQ ID NO: 5683234 - DNA, 25 bp, Homo sapien
tcaagttggattcaattggggggcc

SEQ ID NO: 5683235 - DNA, 25 bp, Homo sapien
gtgatacctcataccctgatcttca

SEQ ID NO: 5683236 - DNA, 25 bp, Homo sapien
tgttctccccctgtcatttcagtac

SEQ ID NO: 5683237 - DNA, 25 bp, Homo sapien
ccaacttgaagatcagggtatgagg

SEQ ID NO: 5683238 - DNA, 25 bp, Homo sapien
tgaagatcagggtatgaggtatcac

SEQ ID NO: 5683239 - DNA, 25 bp, Homo sapien
tgtctggccccccaattgaatccaa

SEQ ID NO: 5683240 - DNA, 25 bp, Homo sapien
acttgaagatcagggtatgaggtat

SEQ ID NO: 5683241 - DNA, 25 bp, Homo sapien
cagggggagaacatgagataggaaa

SEQ ID NO: 5683242 - DNA, 25 bp, Homo sapien
ggccccccaattgaatccaacttga

SEQ ID NO: 5683243 - DNA, 25 bp, Homo sapien
aacaaagccccaggtccttgctctt

SEQ ID NO: 5683244 - DNA, 25 bp, Homo sapien
ggtccttgctcttctacttgtgact

SEQ ID NO: 5683245 - DNA, 25 bp, Homo sapien
caggtccttgctcttctacttgtga

SEQ ID NO: 5683246 - DNA, 25 bp, Homo sapien
tccttgctcttctacttgtgactct

SEQ ID NO: 5683247 - DNA, 25 bp, Homo sapien
gaaacaaagccccaggtccttgctc

SEQ ID NO: 5683248 - DNA, 25 bp, Homo sapien
tgctcttctacttgtgactcttctg

SEQ ID NO: 5683249 - DNA, 25 bp, Homo sapien
cagaagagtcacaagtagaagagca

SEQ ID NO: 5683250 - DNA, 25 bp, Homo sapien
gtcacaagtagaagagcaaggacct

SEQ ID NO: 5683251 - DNA, 25 bp, Homo sapien
tcacaagtagaagagcaaggacctg

SEQ ID NO: 5683252 - DNA, 25 bp, Homo sapien
gaagagtcacaagtagaagagcaag

SEQ ID NO: 5683253 - DNA, 25 bp, Homo sapien
gagtcacaagtagaagagcaaggac

SEQ ID NO: 5683254 - DNA, 25 bp, Homo sapien
acaagtagaagagcaaggacctggg

SEQ ID NO: 5683255 - DNA, 25 bp, Homo sapien
gtgcatcttagtccatgtccatttg

SEQ ID NO: 5683256 - DNA, 25 bp, Homo sapien
tgcatcttagtccatgtccatttga

SEQ ID NO: 5683257 - DNA, 25 bp, Homo sapien
gcatcttagtccatgtccatttgag

SEQ ID NO: 5683258 - DNA, 25 bp, Homo sapien
gtgtgcatcttagtccatgtccatt

SEQ ID NO: 5683259 - DNA, 25 bp, Homo sapien
tgtgcatcttagtccatgtccattt

SEQ ID NO: 5683260 - DNA, 25 bp, Homo sapien
catcttagtccatgtccatttgagc

SEQ ID NO: 5683261 - DNA, 25 bp, Homo sapien
cagtgctagtgccactcactctggt

SEQ ID NO: 5683262 - DNA, 25 bp, Homo sapien
tctggtggcgcacttgcctgactta

SEQ ID NO: 5683263 - DNA, 25 bp, Homo sapien
gagctcttgagaaagcctccagtgc

SEQ ID NO: 5683264 - DNA, 25 bp, Homo sapien
tgagaaagcctccagtgctagtgcc

SEQ ID NO: 5683265 - DNA, 25 bp, Homo sapien
ggtggcgcacttgcctgacttataa

SEQ ID NO: 5683266 - DNA, 25 bp, Homo sapien
actcactctggtggcgcacttgcct

SEQ ID NO: 5683267 - DNA, 25 bp, Homo sapien
cactagcactggaggctttctcaag

SEQ ID NO: 5683268 - DNA, 25 bp, Homo sapien
ttataagtcaggcaagtgcgccacc

SEQ ID NO: 5683269 - DNA, 25 bp, Homo sapien
cagagtgagtggcactagcactgga

SEQ ID NO: 5683270 - DNA, 25 bp, Homo sapien
aggcaagtgcgccaccagagtgagt

SEQ ID NO: 5683271 - DNA, 25 bp, Homo sapien
gcactggaggctttctcaagagctc

SEQ ID NO: 5683272 - DNA, 25 bp, Homo sapien
ggcactagcactggaggctttctca

SEQ ID NO: 5683273 - DNA, 25 bp, Homo sapien
aaatggacatggactaagatgcaca

SEQ ID NO: 5683274 - DNA, 25 bp, Homo sapien
gctcaaatggacatggactaagatg

SEQ ID NO: 5683275 - DNA, 25 bp, Homo sapien
caaatggacatggactaagatgcac

SEQ ID NO: 5683276 - DNA, 25 bp, Homo sapien
ctcaaatggacatggactaagatgc

SEQ ID NO: 5683277 - DNA, 25 bp, Homo sapien
aatggacatggactaagatgcacac

SEQ ID NO: 5683278 - DNA, 25 bp, Homo sapien
tcaaatggacatggactaagatgca

SEQ ID NO: 5683279 - DNA, 25 bp, Homo sapien
tgacgttccctagttatctcttcgc

SEQ ID NO: 5683280 - DNA, 25 bp, Homo sapien
tatctagtctgaagctggagggtag

SEQ ID NO: 5683281 - DNA, 25 bp, Homo sapien
cttgctgacgttccctagttatctc

SEQ ID NO: 5683282 - DNA, 25 bp, Homo sapien
tcttcgctatctagtctgaagctgg

SEQ ID NO: 5683283 - DNA, 25 bp, Homo sapien
cgctatctagtctgaagctggaggg

SEQ ID NO: 5683284 - DNA, 25 bp, Homo sapien
cgttccctagttatctcttcgctat

SEQ ID NO: 5683285 - DNA, 25 bp, Homo sapien
tagatagcgaagagataactaggga

SEQ ID NO: 5683286 - DNA, 25 bp, Homo sapien
gaagagataactagggaacgtcagc

SEQ ID NO: 5683287 - DNA, 25 bp, Homo sapien
taccctccagcttcagactagatag

SEQ ID NO: 5683288 - DNA, 25 bp, Homo sapien
gagataactagggaacgtcagcaag

SEQ ID NO: 5683289 - DNA, 25 bp, Homo sapien
tagcgaagagataactagggaacgt

SEQ ID NO: 5683290 - DNA, 25 bp, Homo sapien
tccagcttcagactagatagcgaag

SEQ ID NO: 5683291 - DNA, 25 bp, Homo sapien
tcttgatcttgtgatccacctgcct

SEQ ID NO: 5683292 - DNA, 25 bp, Homo sapien
gatctcttgatcttgtgatccacct

SEQ ID NO: 5683293 - DNA, 25 bp, Homo sapien
cgcccggccaagaactatcattttt

SEQ ID NO: 5683294 - DNA, 25 bp, Homo sapien
acgcccggccaagaactatcatttt

SEQ ID NO: 5683295 - DNA, 25 bp, Homo sapien
cacgcccggccaagaactatcattt

SEQ ID NO: 5683296 - DNA, 25 bp, Homo sapien
atctcttgatcttgtgatccacctg

SEQ ID NO: 5683297 - DNA, 25 bp, Homo sapien
caggtggatcacaagatcaagagat

SEQ ID NO: 5683298 - DNA, 25 bp, Homo sapien
aggcaggtggatcacaagatcaaga

SEQ ID NO: 5683299 - DNA, 25 bp, Homo sapien
aggtggatcacaagatcaagagatc

SEQ ID NO: 5683300 - DNA, 25 bp, Homo sapien
aaaatgatagttcttggccgggcgt

SEQ ID NO: 5683301 - DNA, 25 bp, Homo sapien
aaaaatgatagttcttggccgggcg

SEQ ID NO: 5683302 - DNA, 25 bp, Homo sapien
aaatgatagttcttggccgggcgtg

SEQ ID NO: 5683303 - DNA, 25 bp, Homo sapien
gcaacctgtcgtaaatggaggagca

SEQ ID NO: 5683304 - DNA, 25 bp, Homo sapien
gatgcaacctgtcgtaaatggagga

SEQ ID NO: 5683305 - DNA, 25 bp, Homo sapien
acctgtcgtaaatggaggagcatgt

SEQ ID NO: 5683306 - DNA, 25 bp, Homo sapien
tatggttaacacagtagactctcta

SEQ ID NO: 5683307 - DNA, 25 bp, Homo sapien
gactctctagaaatgcttattacac

SEQ ID NO: 5683308 - DNA, 25 bp, Homo sapien
gaggagcatgtgtatggttaacaca

SEQ ID NO: 5683309 - DNA, 25 bp, Homo sapien
tcctccatttacgacaggttgcatc

SEQ ID NO: 5683310 - DNA, 25 bp, Homo sapien
gagagtctactgtgttaaccataca

SEQ ID NO: 5683311 - DNA, 25 bp, Homo sapien
catgctcctccatttacgacaggtt

SEQ ID NO: 5683312 - DNA, 25 bp, Homo sapien
gtgtaataagcatttctagagagtc

SEQ ID NO: 5683313 - DNA, 25 bp, Homo sapien
tgtgttaaccatacacatgctcctc

SEQ ID NO: 5683314 - DNA, 25 bp, Homo sapien
tagagagtctactgtgttaaccata

SEQ ID NO: 5683315 - DNA, 25 bp, Homo sapien
cagcctgcactcaagggcaaaaagg

SEQ ID NO: 5683316 - DNA, 25 bp, Homo sapien
gtgtctcctccaggccgtatctgag

SEQ ID NO: 5683317 - DNA, 25 bp, Homo sapien
gtgtatgtgtgtctcctccaggccg

SEQ ID NO: 5683318 - DNA, 25 bp, Homo sapien
tccaggccgtatctgaggaacagca

SEQ ID NO: 5683319 - DNA, 25 bp, Homo sapien
tatgtgtgtctcctccaggccgtat

SEQ ID NO: 5683320 - DNA, 25 bp, Homo sapien
caaagtagcacaataatttgtatgt

SEQ ID NO: 5683321 - DNA, 25 bp, Homo sapien
agatacggcctggaggagacacaca

SEQ ID NO: 5683322 - DNA, 25 bp, Homo sapien
tgctgttcctcagatacggcctgga

SEQ ID NO: 5683323 - DNA, 25 bp, Homo sapien
acggcctggaggagacacacataca

SEQ ID NO: 5683324 - DNA, 25 bp, Homo sapien
cctttttgcccttgagtgcaggctg

SEQ ID NO: 5683325 - DNA, 25 bp, Homo sapien
acatacatacaaattattgtgctac

SEQ ID NO: 5683326 - DNA, 25 bp, Homo sapien
ctcagatacggcctggaggagacac

SEQ ID NO: 5683327 - DNA, 25 bp, Homo sapien
aggtgagagagtaactagcaggagg

SEQ ID NO: 5683328 - DNA, 25 bp, Homo sapien
ggtgagagagtaactagcaggagga

SEQ ID NO: 5683329 - DNA, 25 bp, Homo sapien
cctcctgctagttactctctcacct

SEQ ID NO: 5683330 - DNA, 25 bp, Homo sapien
tcctcctgctagttactctctcacc

SEQ ID NO: 5683331 - DNA, 25 bp, Homo sapien
agagtaactagcaggaggaggtatt

SEQ ID NO: 5683332 - DNA, 25 bp, Homo sapien
taaaacatttcatcagggctgggcg

SEQ ID NO: 5683333 - DNA, 25 bp, Homo sapien
taaggtgagagagtaactagcagga

SEQ ID NO: 5683334 - DNA, 25 bp, Homo sapien
gaaggctaaggtgagagagtaacta

SEQ ID NO: 5683335 - DNA, 25 bp, Homo sapien
ggcccaggaattaaaacatttcatc

SEQ ID NO: 5683336 - DNA, 25 bp, Homo sapien
gaagagaagtcaaaagggaaggcta

SEQ ID NO: 5683337 - DNA, 25 bp, Homo sapien
cgcccagccctgatgaaatgtttta

SEQ ID NO: 5683338 - DNA, 25 bp, Homo sapien
tagccttcccttttgacttctcttc

SEQ ID NO: 5683339 - DNA, 25 bp, Homo sapien
aatacctcctcctgctagttactct

SEQ ID NO: 5683340 - DNA, 25 bp, Homo sapien
gatgaaatgttttaattcctgggcc

SEQ ID NO: 5683341 - DNA, 25 bp, Homo sapien
tgggccccaatacctcctcctgcta

SEQ ID NO: 5683342 - DNA, 25 bp, Homo sapien
tgctagttactctctcaccttagcc

SEQ ID NO: 5683343 - DNA, 25 bp, Homo sapien
gtttacacaggatcttactctgtca

SEQ ID NO: 5683344 - DNA, 25 bp, Homo sapien
ttttgtttacacaggatcttactct

SEQ ID NO: 5683345 - DNA, 25 bp, Homo sapien
tgtttttgtttacacaggatcttac

SEQ ID NO: 5683346 - DNA, 25 bp, Homo sapien
ttgtttacacaggatcttactctgt

SEQ ID NO: 5683347 - DNA, 25 bp, Homo sapien
tttgtttacacaggatcttactctg

SEQ ID NO: 5683348 - DNA, 25 bp, Homo sapien
tttttgtttacacaggatcttactc

SEQ ID NO: 5683349 - DNA, 25 bp, Homo sapien
agagtaagatcctgtgtaaacaaaa

SEQ ID NO: 5683350 - DNA, 25 bp, Homo sapien
gagtaagatcctgtgtaaacaaaaa

SEQ ID NO: 5683351 - DNA, 25 bp, Homo sapien
cagagtaagatcctgtgtaaacaaa

SEQ ID NO: 5683352 - DNA, 25 bp, Homo sapien
tgacagagtaagatcctgtgtaaac

SEQ ID NO: 5683353 - DNA, 25 bp, Homo sapien
gtaagatcctgtgtaaacaaaaaca

SEQ ID NO: 5683354 - DNA, 25 bp, Homo sapien
gacagagtaagatcctgtgtaaaca

SEQ ID NO: 5683355 - DNA, 25 bp, Homo sapien
gccagcatgccagccagcaaacttt

SEQ ID NO: 5683356 - DNA, 25 bp, Homo sapien
ggtgtgagccagcatgccagccagc

SEQ ID NO: 5683357 - DNA, 25 bp, Homo sapien
gccagccagcaaactttttctataa

SEQ ID NO: 5683358 - DNA, 25 bp, Homo sapien
agggccatatagtaaatgtttttgg

SEQ ID NO: 5683359 - DNA, 25 bp, Homo sapien
gcatgccagccagcaaactttttct

SEQ ID NO: 5683360 - DNA, 25 bp, Homo sapien
tctataaagggccatatagtaaatg

SEQ ID NO: 5683361 - DNA, 25 bp, Homo sapien
aaagtttgctggctggcatgctggc

SEQ ID NO: 5683362 - DNA, 25 bp, Homo sapien
tagaaaaagtttgctggctggcatg

SEQ ID NO: 5683363 - DNA, 25 bp, Homo sapien
ccaaaaacatttactatatggccct

SEQ ID NO: 5683364 - DNA, 25 bp, Homo sapien
agaaaaagtttgctggctggcatgc

SEQ ID NO: 5683365 - DNA, 25 bp, Homo sapien
aaaaagtttgctggctggcatgctg

SEQ ID NO: 5683366 - DNA, 25 bp, Homo sapien
ttatagaaaaagtttgctggctggc

SEQ ID NO: 5683367 - DNA, 25 bp, Homo sapien
gaaagggcctggaatttatctcaga

SEQ ID NO: 5683368 - DNA, 25 bp, Homo sapien
aagaaagggcctggaatttatctca

SEQ ID NO: 5683369 - DNA, 25 bp, Homo sapien
agaaagggcctggaatttatctcag

SEQ ID NO: 5683370 - DNA, 25 bp, Homo sapien
ctgagataaattccaggccctttct

SEQ ID NO: 5683371 - DNA, 25 bp, Homo sapien
tctgagataaattccaggccctttc

SEQ ID NO: 5683372 - DNA, 25 bp, Homo sapien
tgagataaattccaggccctttctt

SEQ ID NO: 5683373 - DNA, 25 bp, Homo sapien
gaaagggcctggaatttatctcaga

SEQ ID NO: 5683374 - DNA, 25 bp, Homo sapien
aatccagtgaagaaagggcctggaa

SEQ ID NO: 5683375 - DNA, 25 bp, Homo sapien
tatctcagatgatctgggtcctggc

SEQ ID NO: 5683376 - DNA, 25 bp, Homo sapien
tggctctgccttcactggctgtgtg

SEQ ID NO: 5683377 - DNA, 25 bp, Homo sapien
gatgatctgggtcctggctctgcct

SEQ ID NO: 5683378 - DNA, 25 bp, Homo sapien
gtgtgaccttgaatacatcttccca

SEQ ID NO: 5683379 - DNA, 25 bp, Homo sapien
tctgagataaattccaggccctttc

SEQ ID NO: 5683380 - DNA, 25 bp, Homo sapien
gatcatctgagataaattccaggcc

SEQ ID NO: 5683381 - DNA, 25 bp, Homo sapien
gatgggaagatgtattcaaggtcac

SEQ ID NO: 5683382 - DNA, 25 bp, Homo sapien
tgagataaattccaggccctttctt

SEQ ID NO: 5683383 - DNA, 25 bp, Homo sapien
agagccaggacccagatcatctgag

SEQ ID NO: 5683384 - DNA, 25 bp, Homo sapien
acagccagtgaaggcagagccagga

SEQ ID NO: 5683385 - DNA, 25 bp, Homo sapien
tgcccggacggctacctgatctttt

SEQ ID NO: 5683386 - DNA, 25 bp, Homo sapien
ccggacggctacctgatcttttctt

SEQ ID NO: 5683387 - DNA, 25 bp, Homo sapien
cccggacggctacctgatcttttct

SEQ ID NO: 5683388 - DNA, 25 bp, Homo sapien
gcccggacggctacctgatcttttc

SEQ ID NO: 5683389 - DNA, 25 bp, Homo sapien
cggacggctacctgatcttttcttt

SEQ ID NO: 5683390 - DNA, 25 bp, Homo sapien
gtgcccggacggctacctgatcttt

SEQ ID NO: 5683391 - DNA, 25 bp, Homo sapien
agaaaagatcaggtagccgtccggg

SEQ ID NO: 5683392 - DNA, 25 bp, Homo sapien
gaaaagatcaggtagccgtccgggc

SEQ ID NO: 5683393 - DNA, 25 bp, Homo sapien
aaagatcaggtagccgtccgggcac

SEQ ID NO: 5683394 - DNA, 25 bp, Homo sapien
aaagaaaagatcaggtagccgtccg

SEQ ID NO: 5683395 - DNA, 25 bp, Homo sapien
aagaaaagatcaggtagccgtccgg

SEQ ID NO: 5683396 - DNA, 25 bp, Homo sapien
aaaagatcaggtagccgtccgggca

SEQ ID NO: 5683397 - DNA, 25 bp, Homo sapien
gaatgagagaggatcccaagatatt

SEQ ID NO: 5683398 - DNA, 25 bp, Homo sapien
atgagagaggatcccaagatatttt

SEQ ID NO: 5683399 - DNA, 25 bp, Homo sapien
gggctgggtatgagaatgagagagg

SEQ ID NO: 5683400 - DNA, 25 bp, Homo sapien
aatatcttgggatcctctctcattc

SEQ ID NO: 5683401 - DNA, 25 bp, Homo sapien
aaaatatcttgggatcctctctcat

SEQ ID NO: 5683402 - DNA, 25 bp, Homo sapien
cctctctcattctcatacccagccc

SEQ ID NO: 5683403 - DNA, 25 bp, Homo sapien
tcccaagatattttaggactctgag

SEQ ID NO: 5683404 - DNA, 25 bp, Homo sapien
taggactctgagtagtgaaggaaag

SEQ ID NO: 5683405 - DNA, 25 bp, Homo sapien
ggtatgagaatgagagaggatccca

SEQ ID NO: 5683406 - DNA, 25 bp, Homo sapien
ctctgagtagtgaaggaaagagctg

SEQ ID NO: 5683407 - DNA, 25 bp, Homo sapien
gaatgagagaggatcccaagatatt

SEQ ID NO: 5683408 - DNA, 25 bp, Homo sapien
atgagagaggatcccaagatatttt

SEQ ID NO: 5683409 - DNA, 25 bp, Homo sapien
tgggatcctctctcattctcatacc

SEQ ID NO: 5683410 - DNA, 25 bp, Homo sapien
cattctcatacccagcccctggtct

SEQ ID NO: 5683411 - DNA, 25 bp, Homo sapien
tactcagagtcctaaaatatcttgg

SEQ ID NO: 5683412 - DNA, 25 bp, Homo sapien
aaaatatcttgggatcctctctcat

SEQ ID NO: 5683413 - DNA, 25 bp, Homo sapien
cagctctttccttcactactcagag

SEQ ID NO: 5683414 - DNA, 25 bp, Homo sapien
aatatcttgggatcctctctcattc

SEQ ID NO: 5683415 - DNA, 25 bp, Homo sapien
aatagctgagactatgggtggcacc

SEQ ID NO: 5683416 - DNA, 25 bp, Homo sapien
atagctgagactatgggtggcacca

SEQ ID NO: 5683417 - DNA, 25 bp, Homo sapien
gagactatgggtggcaccaccatgc

SEQ ID NO: 5683418 - DNA, 25 bp, Homo sapien
ctgagactatgggtggcaccaccat

SEQ ID NO: 5683419 - DNA, 25 bp, Homo sapien
gaatagctgagactatgggtggcac

SEQ ID NO: 5683420 - DNA, 25 bp, Homo sapien
gactatgggtggcaccaccatgcct

SEQ ID NO: 5683421 - DNA, 25 bp, Homo sapien
tggtgccacccatagtctcagctat

SEQ ID NO: 5683422 - DNA, 25 bp, Homo sapien
aggcatggtggtgccacccatagtc

SEQ ID NO: 5683423 - DNA, 25 bp, Homo sapien
atggtggtgccacccatagtctcag

SEQ ID NO: 5683424 - DNA, 25 bp, Homo sapien
caggcatggtggtgccacccatagt

SEQ ID NO: 5683425 - DNA, 25 bp, Homo sapien
gcatggtggtgccacccatagtctc

SEQ ID NO: 5683426 - DNA, 25 bp, Homo sapien
ggtgccacccatagtctcagctatt

SEQ ID NO: 5683427 - DNA, 25 bp, Homo sapien
tgtagagacagtattttagcatgtt

SEQ ID NO: 5683428 - DNA, 25 bp, Homo sapien
gagacagtattttagcatgttggcc

SEQ ID NO: 5683429 - DNA, 25 bp, Homo sapien
tttgtagagacagtattttagcatg

SEQ ID NO: 5683430 - DNA, 25 bp, Homo sapien
ttgtagagacagtattttagcatgt

SEQ ID NO: 5683431 - DNA, 25 bp, Homo sapien
acagtattttagcatgttggccagg

SEQ ID NO: 5683432 - DNA, 25 bp, Homo sapien
tagagacagtattttagcatgttgg

SEQ ID NO: 5683433 - DNA, 25 bp, Homo sapien
ggccaacatgctaaaatactgtctc

SEQ ID NO: 5683434 - DNA, 25 bp, Homo sapien
aacatgctaaaatactgtctctaca

SEQ ID NO: 5683435 - DNA, 25 bp, Homo sapien
cctggccaacatgctaaaatactgt

SEQ ID NO: 5683436 - DNA, 25 bp, Homo sapien
ccaacatgctaaaatactgtctcta

SEQ ID NO: 5683437 - DNA, 25 bp, Homo sapien
acatgctaaaatactgtctctacaa

SEQ ID NO: 5683438 - DNA, 25 bp, Homo sapien
catgctaaaatactgtctctacaaa

SEQ ID NO: 5683439 - DNA, 25 bp, Homo sapien
aactggtagactgtggcttcaaatg

SEQ ID NO: 5683440 - DNA, 25 bp, Homo sapien
aaactggtagactgtggcttcaaat

SEQ ID NO: 5683441 - DNA, 25 bp, Homo sapien
gggaaactggtagactgtggcttca

SEQ ID NO: 5683442 - DNA, 25 bp, Homo sapien
tgggaaactggtagactgtggcttc

SEQ ID NO: 5683443 - DNA, 25 bp, Homo sapien
ggaaactggtagactgtggcttcaa

SEQ ID NO: 5683444 - DNA, 25 bp, Homo sapien
gaaactggtagactgtggcttcaaa

SEQ ID NO: 5683445 - DNA, 25 bp, Homo sapien
tttgaagccacagtctaccagtttc

SEQ ID NO: 5683446 - DNA, 25 bp, Homo sapien
catttgaagccacagtctaccagtt

SEQ ID NO: 5683447 - DNA, 25 bp, Homo sapien
ttgaagccacagtctaccagtttcc

SEQ ID NO: 5683448 - DNA, 25 bp, Homo sapien
atttgaagccacagtctaccagttt

SEQ ID NO: 5683449 - DNA, 25 bp, Homo sapien
gaagccacagtctaccagtttccca

SEQ ID NO: 5683450 - DNA, 25 bp, Homo sapien
tgaagccacagtctaccagtttccc

SEQ ID NO: 5683451 - DNA, 25 bp, Homo sapien
gagtatgagcgccaagtggcttcat

SEQ ID NO: 5683452 - DNA, 25 bp, Homo sapien
cccaggcggagatgtcctcccgcca

SEQ ID NO: 5683453 - DNA, 25 bp, Homo sapien
gtgtcccaggcggagatgtcctccc

SEQ ID NO: 5683454 - DNA, 25 bp, Homo sapien
ctccgtgtcccaggcggagatgtcc

SEQ ID NO: 5683455 - DNA, 25 bp, Homo sapien
tgtcccaggcggagatgtcctcccg

SEQ ID NO: 5683456 - DNA, 25 bp, Homo sapien
gtcccaggcggagatgtcctcccgc

SEQ ID NO: 5683457 - DNA, 25 bp, Homo sapien
tggcgggaggacatctccgcctggg

SEQ ID NO: 5683458 - DNA, 25 bp, Homo sapien
gggaggacatctccgcctgggacac

SEQ ID NO: 5683459 - DNA, 25 bp, Homo sapien
gcgggaggacatctccgcctgggac

SEQ ID NO: 5683460 - DNA, 25 bp, Homo sapien
atgaagccacttggcgctcatactc

SEQ ID NO: 5683461 - DNA, 25 bp, Homo sapien
cgggaggacatctccgcctgggaca

SEQ ID NO: 5683462 - DNA, 25 bp, Homo sapien
ggacatctccgcctgggacacggag

SEQ ID NO: 5683463 - DNA, 25 bp, Homo sapien
tgacatcaaggtaaggtctcaaggg

SEQ ID NO: 5683464 - DNA, 25 bp, Homo sapien
agagccagttctctcatcttccctg

SEQ ID NO: 5683465 - DNA, 25 bp, Homo sapien
cacttacctagggaagagccagttc

SEQ ID NO: 5683466 - DNA, 25 bp, Homo sapien
ttacctagggaagagccagttctct

SEQ ID NO: 5683467 - DNA, 25 bp, Homo sapien
catctgacatcaaggtaaggtctca

SEQ ID NO: 5683468 - DNA, 25 bp, Homo sapien
cttacctagggaagagccagttctc

SEQ ID NO: 5683469 - DNA, 25 bp, Homo sapien
cagggaagatgagagaactggctct

SEQ ID NO: 5683470 - DNA, 25 bp, Homo sapien
gccccttgagaccttaccttgatgt

SEQ ID NO: 5683471 - DNA, 25 bp, Homo sapien
gagaactggctcttccctaggtaag

SEQ ID NO: 5683472 - DNA, 25 bp, Homo sapien
ccttgagaccttaccttgatgtcag

SEQ ID NO: 5683473 - DNA, 25 bp, Homo sapien
gaactggctcttccctaggtaagtg

SEQ ID NO: 5683474 - DNA, 25 bp, Homo sapien
tgagaccttaccttgatgtcagatg

SEQ ID NO: 5683475 - DNA, 25 bp, Homo sapien
caccttaggttctgccaacttgagc

SEQ ID NO: 5683476 - DNA, 25 bp, Homo sapien
ggaagaaagattggaggcattttcc

SEQ ID NO: 5683477 - DNA, 25 bp, Homo sapien
tctgccaacttgagcaagaagatag

SEQ ID NO: 5683478 - DNA, 25 bp, Homo sapien
gaagtggggtccacccttggcagaa

SEQ ID NO: 5683479 - DNA, 25 bp, Homo sapien
agatagaaaaaccagtagaagtggg

SEQ ID NO: 5683480 - DNA, 25 bp, Homo sapien
tggaggcattttccacaccttaggt

SEQ ID NO: 5683481 - DNA, 25 bp, Homo sapien
ggaaaatgcctccaatctttcttcc

SEQ ID NO: 5683482 - DNA, 25 bp, Homo sapien
gctcaagttggcagaacctaaggtg

SEQ ID NO: 5683483 - DNA, 25 bp, Homo sapien
ttctgccaagggtggaccccacttc

SEQ ID NO: 5683484 - DNA, 25 bp, Homo sapien
tctatcttcttgctcaagttggcag

SEQ ID NO: 5683485 - DNA, 25 bp, Homo sapien
gaacctaaggtgtggaaaatgcctc

SEQ ID NO: 5683486 - DNA, 25 bp, Homo sapien
cccacttctactggtttttctatct

SEQ ID NO: 5683487 - DNA, 25 bp, Homo sapien
actagactagctgaggatgcatggg

SEQ ID NO: 5683488 - DNA, 25 bp, Homo sapien
atggggctcccattacaggcagcga

SEQ ID NO: 5683489 - DNA, 25 bp, Homo sapien
tagtgtgggacagactagactagct

SEQ ID NO: 5683490 - DNA, 25 bp, Homo sapien
tgtgggacagactagactagctgag

SEQ ID NO: 5683491 - DNA, 25 bp, Homo sapien
cagactagactagctgaggatgcat

SEQ ID NO: 5683492 - DNA, 25 bp, Homo sapien
actagctgaggatgcatggggctcc

SEQ ID NO: 5683493 - DNA, 25 bp, Homo sapien
ggagccccatgcatcctcagctagt

SEQ ID NO: 5683494 - DNA, 25 bp, Homo sapien
ggtccccgccctgttcgctgcctgt

SEQ ID NO: 5683495 - DNA, 25 bp, Homo sapien
catgcatcctcagctagtctagtct

SEQ ID NO: 5683496 - DNA, 25 bp, Homo sapien
tcgctgcctgtaatgggagccccat

SEQ ID NO: 5683497 - DNA, 25 bp, Homo sapien
tcagctagtctagtctgtcccacac

SEQ ID NO: 5683498 - DNA, 25 bp, Homo sapien
cctgtaatgggagccccatgcatcc

SEQ ID NO: 5683499 - DNA, 25 bp, Homo sapien
gaattttcatgtgatcatcccttcc

SEQ ID NO: 5683500 - DNA, 25 bp, Homo sapien
attttcatgtgatcatcccttccct

SEQ ID NO: 5683501 - DNA, 25 bp, Homo sapien
aattttcatgtgatcatcccttccc

SEQ ID NO: 5683502 - DNA, 25 bp, Homo sapien
ttttcatgtgatcatcccttccctc

SEQ ID NO: 5683503 - DNA, 25 bp, Homo sapien
agaattttcatgtgatcatcccttc

SEQ ID NO: 5683504 - DNA, 25 bp, Homo sapien
gagaagttcagcatctccgctcatg

SEQ ID NO: 5683505 - DNA, 25 bp, Homo sapien
aagttcagcatctccgctcatggca

SEQ ID NO: 5683506 - DNA, 25 bp, Homo sapien
agttcagcatctccgctcatggcaa

SEQ ID NO: 5683507 - DNA, 25 bp, Homo sapien
gaagttcagcatctccgctcatggc

SEQ ID NO: 5683508 - DNA, 25 bp, Homo sapien
ggagaagttcagcatctccgctcat

SEQ ID NO: 5683509 - DNA, 25 bp, Homo sapien
agaagttcagcatctccgctcatgg

SEQ ID NO: 5683510 - DNA, 25 bp, Homo sapien
tgccatgagcggagatgctgaactt

SEQ ID NO: 5683511 - DNA, 25 bp, Homo sapien
cttgccatgagcggagatgctgaac

SEQ ID NO: 5683512 - DNA, 25 bp, Homo sapien
ttgccatgagcggagatgctgaact

SEQ ID NO: 5683513 - DNA, 25 bp, Homo sapien
catgagcggagatgctgaacttctc

SEQ ID NO: 5683514 - DNA, 25 bp, Homo sapien
gccatgagcggagatgctgaacttc

SEQ ID NO: 5683515 - DNA, 25 bp, Homo sapien
ccatgagcggagatgctgaacttct

SEQ ID NO: 5683516 - DNA, 25 bp, Homo sapien
ggaagggatgatcacatgaaaattc

SEQ ID NO: 5683517 - DNA, 25 bp, Homo sapien
gagggaagggatgatcacatgaaaa

SEQ ID NO: 5683518 - DNA, 25 bp, Homo sapien
gggaagggatgatcacatgaaaatt

SEQ ID NO: 5683519 - DNA, 25 bp, Homo sapien
gaagggatgatcacatgaaaattct

SEQ ID NO: 5683520 - DNA, 25 bp, Homo sapien
agggaagggatgatcacatgaaaat

SEQ ID NO: 5683521 - DNA, 25 bp, Homo sapien
gaattttcatgtgatcatcccttcc

SEQ ID NO: 5683522 - DNA, 25 bp, Homo sapien
tgtcccaaagggagaattttcatgt

SEQ ID NO: 5683523 - DNA, 25 bp, Homo sapien
tctgccacctctttcctgatggctg

SEQ ID NO: 5683524 - DNA, 25 bp, Homo sapien
cctctttcctgatggctgcagctgg

SEQ ID NO: 5683525 - DNA, 25 bp, Homo sapien
ttttcatgtgatcatcccttccctc

SEQ ID NO: 5683526 - DNA, 25 bp, Homo sapien
gaagttcagcatctccgctcatggc

SEQ ID NO: 5683527 - DNA, 25 bp, Homo sapien
acatgaaaattctccctttgggaca

SEQ ID NO: 5683528 - DNA, 25 bp, Homo sapien
tgccatgagcggagatgctgaactt

SEQ ID NO: 5683529 - DNA, 25 bp, Homo sapien
gagggaagggatgatcacatgaaaa

SEQ ID NO: 5683530 - DNA, 25 bp, Homo sapien
cagccatcaggaaagaggtggcaga

SEQ ID NO: 5683531 - DNA, 25 bp, Homo sapien
gaagggatgatcacatgaaaattct

SEQ ID NO: 5683532 - DNA, 25 bp, Homo sapien
ccagctgcagccatcaggaaagagg

SEQ ID NO: 5683533 - DNA, 25 bp, Homo sapien
tttggaacaagtacaaagagctggg

SEQ ID NO: 5683534 - DNA, 25 bp, Homo sapien
atttggaacaagtacaaagagctgg

SEQ ID NO: 5683535 - DNA, 25 bp, Homo sapien
tatttggaacaagtacaaagagctg

SEQ ID NO: 5683536 - DNA, 25 bp, Homo sapien
tttatttggaacaagtacaaagagc

SEQ ID NO: 5683537 - DNA, 25 bp, Homo sapien
ttatttggaacaagtacaaagagct

SEQ ID NO: 5683538 - DNA, 25 bp, Homo sapien
ttggaacaagtacaaagagctgggc

SEQ ID NO: 5683539 - DNA, 25 bp, Homo sapien
cccagctctttgtacttgttccaaa

SEQ ID NO: 5683540 - DNA, 25 bp, Homo sapien
cagctctttgtacttgttccaaata

SEQ ID NO: 5683541 - DNA, 25 bp, Homo sapien
ccagctctttgtacttgttccaaat

SEQ ID NO: 5683542 - DNA, 25 bp, Homo sapien
gctctttgtacttgttccaaataaa

SEQ ID NO: 5683543 - DNA, 25 bp, Homo sapien
gcccagctctttgtacttgttccaa

SEQ ID NO: 5683544 - DNA, 25 bp, Homo sapien
agctctttgtacttgttccaaataa

SEQ ID NO: 5683545 - DNA, 25 bp, Homo sapien
aacactctcaagttcctcattgacc

SEQ ID NO: 5683546 - DNA, 25 bp, Homo sapien
tgttccaaataaaacactctcaagt

SEQ ID NO: 5683547 - DNA, 25 bp, Homo sapien
tacatttctgttttgcctgaccctg

SEQ ID NO: 5683548 - DNA, 25 bp, Homo sapien
gaccctgcccagctctttgtacttg

SEQ ID NO: 5683549 - DNA, 25 bp, Homo sapien
tctttcccttcaattacatttctgt

SEQ ID NO: 5683550 - DNA, 25 bp, Homo sapien
gcccagctctttgtacttgttccaa

SEQ ID NO: 5683551 - DNA, 25 bp, Homo sapien
gagactcttggctcttgaggctgcc

SEQ ID NO: 5683552 - DNA, 25 bp, Homo sapien
tgagactcttggctcttgaggctgc

SEQ ID NO: 5683553 - DNA, 25 bp, Homo sapien
ggcagcctcaagagccaagagtctc

SEQ ID NO: 5683554 - DNA, 25 bp, Homo sapien
gcagcctcaagagccaagagtctca

SEQ ID NO: 5683555 - DNA, 25 bp, Homo sapien
gagactcttggctcttgaggctgcc

SEQ ID NO: 5683556 - DNA, 25 bp, Homo sapien
tctgcctcccagaggtggtagcaga

SEQ ID NO: 5683557 - DNA, 25 bp, Homo sapien
tcttgaggctgcctgactgttctcc

SEQ ID NO: 5683558 - DNA, 25 bp, Homo sapien
tgagactcttggctcttgaggctgc

SEQ ID NO: 5683559 - DNA, 25 bp, Homo sapien
aggctgcctgactgttctccctctg

SEQ ID NO: 5683560 - DNA, 25 bp, Homo sapien
tcttggctcttgaggctgcctgact

SEQ ID NO: 5683561 - DNA, 25 bp, Homo sapien
aacagtcaggcagcctcaagagcca

SEQ ID NO: 5683562 - DNA, 25 bp, Homo sapien
tcaggcagcctcaagagccaagagt

SEQ ID NO: 5683563 - DNA, 25 bp, Homo sapien
ggcagcctcaagagccaagagtctc

SEQ ID NO: 5683564 - DNA, 25 bp, Homo sapien
cagagggagaacagtcaggcagcct

SEQ ID NO: 5683565 - DNA, 25 bp, Homo sapien
tctgctaccacctctgggaggcaga

SEQ ID NO: 5683566 - DNA, 25 bp, Homo sapien
gcagcctcaagagccaagagtctca

SEQ ID NO: 5683567 - DNA, 25 bp, Homo sapien
ctggaacaaggggatgacacagctg

SEQ ID NO: 5683568 - DNA, 25 bp, Homo sapien
atgacacagctgctgagaggctaga

SEQ ID NO: 5683569 - DNA, 25 bp, Homo sapien
tctagcctctcagcagctgtgtcat

SEQ ID NO: 5683570 - DNA, 25 bp, Homo sapien
cagctgtgtcatccccttgttccag

SEQ ID NO: 5683571 - DNA, 25 bp, Homo sapien
gagactctatcttcacaaaaggggg

SEQ ID NO: 5683572 - DNA, 25 bp, Homo sapien
ctctatcttcacaaaagggggaaga

SEQ ID NO: 5683573 - DNA, 25 bp, Homo sapien
agactctatcttcacaaaaggggga

SEQ ID NO: 5683574 - DNA, 25 bp, Homo sapien
gactctatcttcacaaaagggggaa

SEQ ID NO: 5683575 - DNA, 25 bp, Homo sapien
actctatcttcacaaaagggggaag

SEQ ID NO: 5683576 - DNA, 25 bp, Homo sapien
cttcccccttttgtgaagatagagt

SEQ ID NO: 5683577 - DNA, 25 bp, Homo sapien
tcttcccccttttgtgaagatagag

SEQ ID NO: 5683578 - DNA, 25 bp, Homo sapien
cccccttttgtgaagatagagtctc

SEQ ID NO: 5683579 - DNA, 25 bp, Homo sapien
tcccccttttgtgaagatagagtct

SEQ ID NO: 5683580 - DNA, 25 bp, Homo sapien
ttcccccttttgtgaagatagagtc

SEQ ID NO: 5683581 - DNA, 25 bp, Homo sapien
ctctatcttcacaaaagggggaaga

SEQ ID NO: 5683582 - DNA, 25 bp, Homo sapien
gggaagaaaacatatcctagcctgg

SEQ ID NO: 5683583 - DNA, 25 bp, Homo sapien
gactctatcttcacaaaagggggaa

SEQ ID NO: 5683584 - DNA, 25 bp, Homo sapien
gaaaacatatcctagcctgggcaac

SEQ ID NO: 5683585 - DNA, 25 bp, Homo sapien
gaagaaaacatatcctagcctgggc

SEQ ID NO: 5683586 - DNA, 25 bp, Homo sapien
gtgagactctatcttcacaaaaggg

SEQ ID NO: 5683587 - DNA, 25 bp, Homo sapien
tcttcccccttttgtgaagatagag

SEQ ID NO: 5683588 - DNA, 25 bp, Homo sapien
ccccttttgtgaagatagagtctca

SEQ ID NO: 5683589 - DNA, 25 bp, Homo sapien
caggctaggatatgttttcttcccc

SEQ ID NO: 5683590 - DNA, 25 bp, Homo sapien
ttcccccttttgtgaagatagagtc

SEQ ID NO: 5683591 - DNA, 25 bp, Homo sapien
gcccaggctaggatatgttttcttc

SEQ ID NO: 5683592 - DNA, 25 bp, Homo sapien
gttgcccaggctaggatatgttttc

SEQ ID NO: 5683593 - DNA, 25 bp, Homo sapien
tagaagtatcacttagacctgggag

SEQ ID NO: 5683594 - DNA, 25 bp, Homo sapien
gtagaagtatcacttagacctggga

SEQ ID NO: 5683595 - DNA, 25 bp, Homo sapien
gaagtagaagtatcacttagacctg

SEQ ID NO: 5683596 - DNA, 25 bp, Homo sapien
aagtatcacttagacctgggagatt

SEQ ID NO: 5683597 - DNA, 25 bp, Homo sapien
agtagaagtatcacttagacctggg

SEQ ID NO: 5683598 - DNA, 25 bp, Homo sapien
gaagtatcacttagacctgggagat

SEQ ID NO: 5683599 - DNA, 25 bp, Homo sapien
tcccaggtctaagtgatacttctac

SEQ ID NO: 5683600 - DNA, 25 bp, Homo sapien
atctcccaggtctaagtgatacttc

SEQ ID NO: 5683601 - DNA, 25 bp, Homo sapien
ctcccaggtctaagtgatacttcta

SEQ ID NO: 5683602 - DNA, 25 bp, Homo sapien
cccaggtctaagtgatacttctact

SEQ ID NO: 5683603 - DNA, 25 bp, Homo sapien
caggtctaagtgatacttctacttc

SEQ ID NO: 5683604 - DNA, 25 bp, Homo sapien
aatctcccaggtctaagtgatactt

SEQ ID NO: 5683605 - DNA, 25 bp, Homo sapien
cctgcccgagaacttctctgaggag

SEQ ID NO: 5683606 - DNA, 25 bp, Homo sapien
tatcctgcccgagaacttctctgag

SEQ ID NO: 5683607 - DNA, 25 bp, Homo sapien
ctgcccgagaacttctctgaggaga

SEQ ID NO: 5683608 - DNA, 25 bp, Homo sapien
atcctgcccgagaacttctctgagg

SEQ ID NO: 5683609 - DNA, 25 bp, Homo sapien
cgtatcctgcccgagaacttctctg

SEQ ID NO: 5683610 - DNA, 25 bp, Homo sapien
gtatcctgcccgagaacttctctga

SEQ ID NO: 5683611 - DNA, 25 bp, Homo sapien
ctcagagaagttctcgggcaggata

SEQ ID NO: 5683612 - DNA, 25 bp, Homo sapien
tcagagaagttctcgggcaggatac

SEQ ID NO: 5683613 - DNA, 25 bp, Homo sapien
cagagaagttctcgggcaggatacg

SEQ ID NO: 5683614 - DNA, 25 bp, Homo sapien
cctcagagaagttctcgggcaggat

SEQ ID NO: 5683615 - DNA, 25 bp, Homo sapien
ctcctcagagaagttctcgggcagg

SEQ ID NO: 5683616 - DNA, 25 bp, Homo sapien
tctcctcagagaagttctcgggcag

SEQ ID NO: 5683617 - DNA, 25 bp, Homo sapien
gctctatctccgagttttctctggg

SEQ ID NO: 5683618 - DNA, 25 bp, Homo sapien
caggctctatctccgagttttctct

SEQ ID NO: 5683619 - DNA, 25 bp, Homo sapien
tcaggctctatctccgagttttctc

SEQ ID NO: 5683620 - DNA, 25 bp, Homo sapien
ggctctatctccgagttttctctgg

SEQ ID NO: 5683621 - DNA, 25 bp, Homo sapien
gttttctctggggttgtctgagcaa

SEQ ID NO: 5683622 - DNA, 25 bp, Homo sapien
ctcaggctctatctccgagttttct

SEQ ID NO: 5683623 - DNA, 25 bp, Homo sapien
ccagagaaaactcggagatagagcc

SEQ ID NO: 5683624 - DNA, 25 bp, Homo sapien
ttgctcagacaaccccagagaaaac

SEQ ID NO: 5683625 - DNA, 25 bp, Homo sapien
ccccagagaaaactcggagatagag

SEQ ID NO: 5683626 - DNA, 25 bp, Homo sapien
agaaaactcggagatagagcctgag

SEQ ID NO: 5683627 - DNA, 25 bp, Homo sapien
cccagagaaaactcggagatagagc

SEQ ID NO: 5683628 - DNA, 25 bp, Homo sapien
gagaaaactcggagatagagcctga

SEQ ID NO: 5683629 - DNA, 25 bp, Homo sapien
aataagtgcgttacggcctttgcat

SEQ ID NO: 5683630 - DNA, 25 bp, Homo sapien
ttaataagtgcgttacggcctttgc

SEQ ID NO: 5683631 - DNA, 25 bp, Homo sapien
taataagtgcgttacggcctttgca

SEQ ID NO: 5683632 - DNA, 25 bp, Homo sapien
tggcttaataagtgcgttacggcct

SEQ ID NO: 5683633 - DNA, 25 bp, Homo sapien
ataagtgcgttacggcctttgcatc

SEQ ID NO: 5683634 - DNA, 25 bp, Homo sapien
aagtgcgttacggcctttgcatcat

SEQ ID NO: 5683635 - DNA, 25 bp, Homo sapien
aaccacctggacctcaacgctgtca

SEQ ID NO: 5683636 - DNA, 25 bp, Homo sapien
tcatggagcccacactgctgatgct

SEQ ID NO: 5683637 - DNA, 25 bp, Homo sapien
ttcatggagcccacactgctgatgc

SEQ ID NO: 5683638 - DNA, 25 bp, Homo sapien
ccacctggacctcaacgctgtcatc

SEQ ID NO: 5683639 - DNA, 25 bp, Homo sapien
accacctggacctcaacgctgtcat

SEQ ID NO: 5683640 - DNA, 25 bp, Homo sapien
gatgacagcgttgaggtccaggtgg

SEQ ID NO: 5683641 - DNA, 25 bp, Homo sapien
gcatcagcagtgtgggctccatgaa

SEQ ID NO: 5683642 - DNA, 25 bp, Homo sapien
agcatcagcagtgtgggctccatga

SEQ ID NO: 5683643 - DNA, 25 bp, Homo sapien
atgacagcgttgaggtccaggtggt

SEQ ID NO: 5683644 - DNA, 25 bp, Homo sapien
tgacagcgttgaggtccaggtggtt

SEQ ID NO: 5683645 - DNA, 25 bp, Homo sapien
aggccgtaacgcacttattaagcca

SEQ ID NO: 5683646 - DNA, 25 bp, Homo sapien
atgatgcaaaggccgtaacgcactt

SEQ ID NO: 5683647 - DNA, 25 bp, Homo sapien
caaaggccgtaacgcacttattaag

SEQ ID NO: 5683648 - DNA, 25 bp, Homo sapien
gcaaaggccgtaacgcacttattaa

SEQ ID NO: 5683649 - DNA, 25 bp, Homo sapien
tgcaaaggccgtaacgcacttatta

SEQ ID NO: 5683650 - DNA, 25 bp, Homo sapien
gatgcaaaggccgtaacgcacttat

SEQ ID NO: 5683651 - DNA, 25 bp, Homo sapien
gtgagtggagctctattcagacccc

SEQ ID NO: 5683652 - DNA, 25 bp, Homo sapien
tgtgagtggagctctattcagaccc

SEQ ID NO: 5683653 - DNA, 25 bp, Homo sapien
ctgtgagtggagctctattcagacc

SEQ ID NO: 5683654 - DNA, 25 bp, Homo sapien
tgagtggagctctattcagaccccc

SEQ ID NO: 5683655 - DNA, 25 bp, Homo sapien
gggtctgaatagagctccactcaca

SEQ ID NO: 5683656 - DNA, 25 bp, Homo sapien
ggggtctgaatagagctccactcac

SEQ ID NO: 5683657 - DNA, 25 bp, Homo sapien
ggtctgaatagagctccactcacag

SEQ ID NO: 5683658 - DNA, 25 bp, Homo sapien
gggggtctgaatagagctccactca

SEQ ID NO: 5683659 - DNA, 25 bp, Homo sapien
gtgagtggagctctattcagacccc

SEQ ID NO: 5683660 - DNA, 25 bp, Homo sapien
tttcctttagcccttctccactgtg

SEQ ID NO: 5683661 - DNA, 25 bp, Homo sapien
tgtgagtggagctctattcagaccc

SEQ ID NO: 5683662 - DNA, 25 bp, Homo sapien
tagcccttctccactgtgcctgtga

SEQ ID NO: 5683663 - DNA, 25 bp, Homo sapien
cttctccactgtgcctgtgagtgga

SEQ ID NO: 5683664 - DNA, 25 bp, Homo sapien
tggttcccattctgcactttcttcc

SEQ ID NO: 5683665 - DNA, 25 bp, Homo sapien
cacagtggagaagggctaaaggaaa

SEQ ID NO: 5683666 - DNA, 25 bp, Homo sapien
cactcacaggcacagtggagaaggg

SEQ ID NO: 5683667 - DNA, 25 bp, Homo sapien
gggtctgaatagagctccactcaca

SEQ ID NO: 5683668 - DNA, 25 bp, Homo sapien
ggtctgaatagagctccactcacag

SEQ ID NO: 5683669 - DNA, 25 bp, Homo sapien
cacaggcacagtggagaagggctaa

SEQ ID NO: 5683670 - DNA, 25 bp, Homo sapien
ggaagaaagtgcagaatgggaacca

SEQ ID NO: 5683671 - DNA, 25 bp, Homo sapien
tgcttcctctgaattctctctcact

SEQ ID NO: 5683672 - DNA, 25 bp, Homo sapien
ctgcttcctctgaattctctctcac

SEQ ID NO: 5683673 - DNA, 25 bp, Homo sapien
agtgagagagaattcagaggaagca

SEQ ID NO: 5683674 - DNA, 25 bp, Homo sapien
gtgagagagaattcagaggaagcag

SEQ ID NO: 5683675 - DNA, 25 bp, Homo sapien
cactgtgacacttacaccctgttct

SEQ ID NO: 5683676 - DNA, 25 bp, Homo sapien
acttgaccactgtgacacttacacc

SEQ ID NO: 5683677 - DNA, 25 bp, Homo sapien
tgaattctctctcacttgaccactg

SEQ ID NO: 5683678 - DNA, 25 bp, Homo sapien
tgaccactgtgacacttacaccctg

SEQ ID NO: 5683679 - DNA, 25 bp, Homo sapien
tgcttcctctgaattctctctcact

SEQ ID NO: 5683680 - DNA, 25 bp, Homo sapien
ccgttgtctgcctgcttcctctgaa

SEQ ID NO: 5683681 - DNA, 25 bp, Homo sapien
agtgagagagaattcagaggaagca

SEQ ID NO: 5683682 - DNA, 25 bp, Homo sapien
cagggtgtaagtgtcacagtggtca

SEQ ID NO: 5683683 - DNA, 25 bp, Homo sapien
gaattcagaggaagcaggcagacaa

SEQ ID NO: 5683684 - DNA, 25 bp, Homo sapien
taagtgtcacagtggtcaagtgaga

SEQ ID NO: 5683685 - DNA, 25 bp, Homo sapien
agaacagggtgtaagtgtcacagtg

SEQ ID NO: 5683686 - DNA, 25 bp, Homo sapien
cagtggtcaagtgagagagaattca

SEQ ID NO: 5683687 - DNA, 25 bp, Homo sapien
tgctgatcgtctcccatgaccaggg

SEQ ID NO: 5683688 - DNA, 25 bp, Homo sapien
gtctcccatgaccagggcttcttgg

SEQ ID NO: 5683689 - DNA, 25 bp, Homo sapien
gtctgcactgatatcatccacctcg

SEQ ID NO: 5683690 - DNA, 25 bp, Homo sapien
ggaagaccttgctgatcgtctccca

SEQ ID NO: 5683691 - DNA, 25 bp, Homo sapien
ggcttcttggatgatgtctgcactg

SEQ ID NO: 5683692 - DNA, 25 bp, Homo sapien
cagctacctccagggctggcggaag

SEQ ID NO: 5683693 - DNA, 25 bp, Homo sapien
cgaggtggatgatatcagtgcagac

SEQ ID NO: 5683694 - DNA, 25 bp, Homo sapien
ccaagaagccctggtcatgggagac

SEQ ID NO: 5683695 - DNA, 25 bp, Homo sapien
cttccgccagccctggaggtagctg

SEQ ID NO: 5683696 - DNA, 25 bp, Homo sapien
cctggtcatgggagacgatcagcaa

SEQ ID NO: 5683697 - DNA, 25 bp, Homo sapien
tgggagacgatcagcaaggtcttcc

SEQ ID NO: 5683698 - DNA, 25 bp, Homo sapien
cagtgcagacatcatccaagaagcc

SEQ ID NO: 5683699 - DNA, 25 bp, Homo sapien
tgaatcctgtcagaattccagacag

SEQ ID NO: 5683700 - DNA, 25 bp, Homo sapien
gacagtgatgcctaccccatcacca

SEQ ID NO: 5683701 - DNA, 25 bp, Homo sapien
gagtgggagggcctatttagataaa

SEQ ID NO: 5683702 - DNA, 25 bp, Homo sapien
tgggagggcctatttagataaactg

SEQ ID NO: 5683703 - DNA, 25 bp, Homo sapien
ggagggcctatttagataaactgaa

SEQ ID NO: 5683704 - DNA, 25 bp, Homo sapien
catcaccaccagtccctggttgtcc

SEQ ID NO: 5683705 - DNA, 25 bp, Homo sapien
cagtttatctaaataggccctccca

SEQ ID NO: 5683706 - DNA, 25 bp, Homo sapien
gacaaccagggactggtggtgatgg

SEQ ID NO: 5683707 - DNA, 25 bp, Homo sapien
tttatctaaataggccctcccactc

SEQ ID NO: 5683708 - DNA, 25 bp, Homo sapien
ttcagtttatctaaataggccctcc

SEQ ID NO: 5683709 - DNA, 25 bp, Homo sapien
tgtctggaattctgacaggattcag

SEQ ID NO: 5683710 - DNA, 25 bp, Homo sapien
ctgtctggaattctgacaggattca

SEQ ID NO: 5683711 - DNA, 25 bp, Homo sapien
ctacatttcaaggactgccgtgcag

SEQ ID NO: 5683712 - DNA, 25 bp, Homo sapien
cctacatttcaaggactgccgtgca

SEQ ID NO: 5683713 - DNA, 25 bp, Homo sapien
tctggaacgctggcctacatttcaa

SEQ ID NO: 5683714 - DNA, 25 bp, Homo sapien
ttgaaatgtaggccagcgttccaga

SEQ ID NO: 5683715 - DNA, 25 bp, Homo sapien
tgcacggcagtccttgaaatgtagg

SEQ ID NO: 5683716 - DNA, 25 bp, Homo sapien
ctgcacggcagtccttgaaatgtag

SEQ ID NO: 5683717 - DNA, 25 bp, Homo sapien
tcctcttcctctccaggaaaaacaa

SEQ ID NO: 5683718 - DNA, 25 bp, Homo sapien
ctacatttcaaggactgccgtgcag

SEQ ID NO: 5683719 - DNA, 25 bp, Homo sapien
cgtgcagggctcaggtttctctttt

SEQ ID NO: 5683720 - DNA, 25 bp, Homo sapien
tcaaggactgccgtgcagggctcag

SEQ ID NO: 5683721 - DNA, 25 bp, Homo sapien
aagaaggagactctggaacgctggc

SEQ ID NO: 5683722 - DNA, 25 bp, Homo sapien
ggaacgctggcctacatttcaagga

SEQ ID NO: 5683723 - DNA, 25 bp, Homo sapien
ctgagccctgcacggcagtccttga

SEQ ID NO: 5683724 - DNA, 25 bp, Homo sapien
tgcacggcagtccttgaaatgtagg

SEQ ID NO: 5683725 - DNA, 25 bp, Homo sapien
gaaaaaagagaaacctgagccctgc

SEQ ID NO: 5683726 - DNA, 25 bp, Homo sapien
taggccagcgttccagagtctcctt

SEQ ID NO: 5683727 - DNA, 25 bp, Homo sapien
tgaaatgtaggccagcgttccagag

SEQ ID NO: 5683728 - DNA, 25 bp, Homo sapien
tgtttttcctggagaggaagaggaa

SEQ ID NO: 5683729 - DNA, 25 bp, Homo sapien
attgcttcttttcgtggctttcagg

SEQ ID NO: 5683730 - DNA, 25 bp, Homo sapien
tgcttcttttcgtggctttcaggtg

SEQ ID NO: 5683731 - DNA, 25 bp, Homo sapien
ctttgcagggactgaaaagaatata

SEQ ID NO: 5683732 - DNA, 25 bp, Homo sapien
cacatgagagggactttgcagggac

SEQ ID NO: 5683733 - DNA, 25 bp, Homo sapien
acatgagagggactttgcagggact

SEQ ID NO: 5683734 - DNA, 25 bp, Homo sapien
ttgcagggactgaaaagaatataaa

SEQ ID NO: 5683735 - DNA, 25 bp, Homo sapien
tatattcttttcagtccctgcaaag

SEQ ID NO: 5683736 - DNA, 25 bp, Homo sapien
tttatattcttttcagtccctgcaa

SEQ ID NO: 5683737 - DNA, 25 bp, Homo sapien
agtccctgcaaagtccctctcatgt

SEQ ID NO: 5683738 - DNA, 25 bp, Homo sapien
gtccctgcaaagtccctctcatgtg

SEQ ID NO: 5683739 - DNA, 25 bp, Homo sapien
cctgaaagccacgaaaagaagcaat

SEQ ID NO: 5683740 - DNA, 25 bp, Homo sapien
cacctgaaagccacgaaaagaagca

SEQ ID NO: 5683741 - DNA, 25 bp, Homo sapien
gatgattcatttccctaagaggggc

SEQ ID NO: 5683742 - DNA, 25 bp, Homo sapien
tacagaactcatgatagatgattca

SEQ ID NO: 5683743 - DNA, 25 bp, Homo sapien
ggaaagagcttagatcagttcaggg

SEQ ID NO: 5683744 - DNA, 25 bp, Homo sapien
aggaggaaagagcttagatcagttc

SEQ ID NO: 5683745 - DNA, 25 bp, Homo sapien
gaggaaagagcttagatcagttcag

SEQ ID NO: 5683746 - DNA, 25 bp, Homo sapien
aactcatgatagatgattcatttcc

SEQ ID NO: 5683747 - DNA, 25 bp, Homo sapien
cccctgaactgatctaagctctttc

SEQ ID NO: 5683748 - DNA, 25 bp, Homo sapien
gaaatgaatcatctatcatgagttc

SEQ ID NO: 5683749 - DNA, 25 bp, Homo sapien
ctgcccctcttagggaaatgaatca

SEQ ID NO: 5683750 - DNA, 25 bp, Homo sapien
gcccctcttagggaaatgaatcatc

SEQ ID NO: 5683751 - DNA, 25 bp, Homo sapien
gaactgatctaagctctttcctcct

SEQ ID NO: 5683752 - DNA, 25 bp, Homo sapien
gaatcatctatcatgagttctgtat

SEQ ID NO: 5683753 - DNA, 25 bp, Homo sapien
ggcacacccacgtgttttggttata

SEQ ID NO: 5683754 - DNA, 25 bp, Homo sapien
gcacacccacgtgttttggttatac

SEQ ID NO: 5683755 - DNA, 25 bp, Homo sapien
ctagggggcacacccacgtgttttg

SEQ ID NO: 5683756 - DNA, 25 bp, Homo sapien
agaactagggggcacacccacgtgt

SEQ ID NO: 5683757 - DNA, 25 bp, Homo sapien
taaaaattgcataaacgggccaggc

SEQ ID NO: 5683758 - DNA, 25 bp, Homo sapien
aaaaattgcataaacgggccaggca

SEQ ID NO: 5683759 - DNA, 25 bp, Homo sapien
aaaattgcataaacgggccaggcac

SEQ ID NO: 5683760 - DNA, 25 bp, Homo sapien
aaattgcataaacgggccaggcaca

SEQ ID NO: 5683761 - DNA, 25 bp, Homo sapien
tgcctggcccgtttatgcaattttt

SEQ ID NO: 5683762 - DNA, 25 bp, Homo sapien
gcctggcccgtttatgcaattttta

SEQ ID NO: 5683763 - DNA, 25 bp, Homo sapien
tgtgcctggcccgtttatgcaattt

SEQ ID NO: 5683764 - DNA, 25 bp, Homo sapien
gtgcctggcccgtttatgcaatttt

SEQ ID NO: 5683765 - DNA, 25 bp, Homo sapien
acacgtgggtgtgccccctagttct

SEQ ID NO: 5683766 - DNA, 25 bp, Homo sapien
tataaccaaaacacgtgggtgtgcc

SEQ ID NO: 5683767 - DNA, 25 bp, Homo sapien
gtataaccaaaacacgtgggtgtgc

SEQ ID NO: 5683768 - DNA, 25 bp, Homo sapien
caaaacacgtgggtgtgccccctag

SEQ ID NO: 5683769 - DNA, 25 bp, Homo sapien
ggcacacccacgtgttttggttata

SEQ ID NO: 5683770 - DNA, 25 bp, Homo sapien
gaaatatatgtcttttatagaacga

SEQ ID NO: 5683771 - DNA, 25 bp, Homo sapien
cacccacgtgttttggttatacaag

SEQ ID NO: 5683772 - DNA, 25 bp, Homo sapien
agaactagggggcacacccacgtgt

SEQ ID NO: 5683773 - DNA, 25 bp, Homo sapien
taaaaattgcataaacgggccaggc

SEQ ID NO: 5683774 - DNA, 25 bp, Homo sapien
tttggttatacaagaaatatatgtc

SEQ ID NO: 5683775 - DNA, 25 bp, Homo sapien
cttgtataaccaaaacacgtgggtg

SEQ ID NO: 5683776 - DNA, 25 bp, Homo sapien
tcgttctataaaagacatatatttc

SEQ ID NO: 5683777 - DNA, 25 bp, Homo sapien
acacgtgggtgtgccccctagttct

SEQ ID NO: 5683778 - DNA, 25 bp, Homo sapien
tataaccaaaacacgtgggtgtgcc

SEQ ID NO: 5683779 - DNA, 25 bp, Homo sapien
gcctggcccgtttatgcaattttta

SEQ ID NO: 5683780 - DNA, 25 bp, Homo sapien
gacatatatttcttgtataaccaaa

SEQ ID NO: 5683781 - DNA, 25 bp, Homo sapien
tttgagaccaacatgaagaaacccc

SEQ ID NO: 5683782 - DNA, 25 bp, Homo sapien
tgagaccaacatgaagaaaccccat

SEQ ID NO: 5683783 - DNA, 25 bp, Homo sapien
ttgagaccaacatgaagaaacccca

SEQ ID NO: 5683784 - DNA, 25 bp, Homo sapien
agtttgagaccaacatgaagaaacc

SEQ ID NO: 5683785 - DNA, 25 bp, Homo sapien
gtttgagaccaacatgaagaaaccc

SEQ ID NO: 5683786 - DNA, 25 bp, Homo sapien
gagtttgagaccaacatgaagaaac

SEQ ID NO: 5683787 - DNA, 25 bp, Homo sapien
ggtttcttcatgttggtctcaaact

SEQ ID NO: 5683788 - DNA, 25 bp, Homo sapien
tggggtttcttcatgttggtctcaa

SEQ ID NO: 5683789 - DNA, 25 bp, Homo sapien
atggggtttcttcatgttggtctca

SEQ ID NO: 5683790 - DNA, 25 bp, Homo sapien
ggggtttcttcatgttggtctcaaa

SEQ ID NO: 5683791 - DNA, 25 bp, Homo sapien
gggtttcttcatgttggtctcaaac

SEQ ID NO: 5683792 - DNA, 25 bp, Homo sapien
gtttcttcatgttggtctcaaactc

SEQ ID NO: 5683793 - DNA, 25 bp, Homo sapien
tccagttagccgaggtcgtgccact

SEQ ID NO: 5683794 - DNA, 25 bp, Homo sapien
ttccagttagccgaggtcgtgccac

SEQ ID NO: 5683795 - DNA, 25 bp, Homo sapien
aggttccagttagccgaggtcgtgc

SEQ ID NO: 5683796 - DNA, 25 bp, Homo sapien
agaggttccagttagccgaggtcgt

SEQ ID NO: 5683797 - DNA, 25 bp, Homo sapien
gggcagaggttccagttagccgagg

SEQ ID NO: 5683798 - DNA, 25 bp, Homo sapien
ggttccagttagccgaggtcgtgcc

SEQ ID NO: 5683799 - DNA, 25 bp, Homo sapien
acgacctcggctaactggaacctct

SEQ ID NO: 5683800 - DNA, 25 bp, Homo sapien
ggcacgacctcggctaactggaacc

SEQ ID NO: 5683801 - DNA, 25 bp, Homo sapien
gtggcacgacctcggctaactggaa

SEQ ID NO: 5683802 - DNA, 25 bp, Homo sapien
gcacgacctcggctaactggaacct

SEQ ID NO: 5683803 - DNA, 25 bp, Homo sapien
agtggcacgacctcggctaactgga

SEQ ID NO: 5683804 - DNA, 25 bp, Homo sapien
cctcggctaactggaacctctgccc

SEQ ID NO: 5683805 - DNA, 25 bp, Homo sapien
agctgggattataggtacgccccac

SEQ ID NO: 5683806 - DNA, 25 bp, Homo sapien
tgggattataggtacgccccaccat

SEQ ID NO: 5683807 - DNA, 25 bp, Homo sapien
taggtacgccccaccatgcccagct

SEQ ID NO: 5683808 - DNA, 25 bp, Homo sapien
gggattataggtacgccccaccatg

SEQ ID NO: 5683809 - DNA, 25 bp, Homo sapien
gctgggattataggtacgccccacc

SEQ ID NO: 5683810 - DNA, 25 bp, Homo sapien
ggattataggtacgccccaccatgc

SEQ ID NO: 5683811 - DNA, 25 bp, Homo sapien
gcatggtggggcgtacctataatcc

SEQ ID NO: 5683812 - DNA, 25 bp, Homo sapien
agctgggcatggtggggcgtaccta

SEQ ID NO: 5683813 - DNA, 25 bp, Homo sapien
gtggggcgtacctataatcccagct

SEQ ID NO: 5683814 - DNA, 25 bp, Homo sapien
ggtggggcgtacctataatcccagc

SEQ ID NO: 5683815 - DNA, 25 bp, Homo sapien
catggtggggcgtacctataatccc

SEQ ID NO: 5683816 - DNA, 25 bp, Homo sapien
tggtggggcgtacctataatcccag

SEQ ID NO: 5683817 - DNA, 25 bp, Homo sapien
caattacttatttcatatgagtcta

SEQ ID NO: 5683818 - DNA, 25 bp, Homo sapien
ttatttcatatgagtctaccttttt

SEQ ID NO: 5683819 - DNA, 25 bp, Homo sapien
tatatcaagcatttttccatgcaat

SEQ ID NO: 5683820 - DNA, 25 bp, Homo sapien
tacttatttcatatgagtctacctt

SEQ ID NO: 5683821 - DNA, 25 bp, Homo sapien
cttatttcatatgagtctacctttt

SEQ ID NO: 5683822 - DNA, 25 bp, Homo sapien
attacttatttcatatgagtctacc

SEQ ID NO: 5683823 - DNA, 25 bp, Homo sapien
aaaggtagactcatatgaaataagt

SEQ ID NO: 5683824 - DNA, 25 bp, Homo sapien
ttgcatggaaaaatgcttgatatat

SEQ ID NO: 5683825 - DNA, 25 bp, Homo sapien
ggtagactcatatgaaataagtaat

SEQ ID NO: 5683826 - DNA, 25 bp, Homo sapien
aaaaaggtagactcatatgaaataa

SEQ ID NO: 5683827 - DNA, 25 bp, Homo sapien
attgcatggaaaaatgcttgatata

SEQ ID NO: 5683828 - DNA, 25 bp, Homo sapien
tagactcatatgaaataagtaattg

SEQ ID NO: 5683829 - DNA, 25 bp, Homo sapien
caattacttatttcatatgagtcta

SEQ ID NO: 5683830 - DNA, 25 bp, Homo sapien
caagcatttttccatgcaattactt

SEQ ID NO: 5683831 - DNA, 25 bp, Homo sapien
tagatttttccaaatatatcaagca

SEQ ID NO: 5683832 - DNA, 25 bp, Homo sapien
tatatcaagcatttttccatgcaat

SEQ ID NO: 5683833 - DNA, 25 bp, Homo sapien
tacttatttcatatgagtctacctt

SEQ ID NO: 5683834 - DNA, 25 bp, Homo sapien
cttatttcatatgagtctacctttt

SEQ ID NO: 5683835 - DNA, 25 bp, Homo sapien
gcttgatatatttggaaaaatctag

SEQ ID NO: 5683836 - DNA, 25 bp, Homo sapien
aaaaggtagactcatatgaaataag

SEQ ID NO: 5683837 - DNA, 25 bp, Homo sapien
taagtaattgcatggaaaaatgctt

SEQ ID NO: 5683838 - DNA, 25 bp, Homo sapien
ttgcatggaaaaatgcttgatatat

SEQ ID NO: 5683839 - DNA, 25 bp, Homo sapien
ggtagactcatatgaaataagtaat

SEQ ID NO: 5683840 - DNA, 25 bp, Homo sapien
tagactcatatgaaataagtaattg

SEQ ID NO: 5683841 - DNA, 25 bp, Homo sapien
tatttgaacttttgtaatatattgc

SEQ ID NO: 5683842 - DNA, 25 bp, Homo sapien
gcaatatattacaaaagttcaaata

SEQ ID NO: 5683843 - DNA, 25 bp, Homo sapien
tatttgaacttttgtaatatattgc

SEQ ID NO: 5683844 - DNA, 25 bp, Homo sapien
ccggcaaactctaccattttatttg

SEQ ID NO: 5683845 - DNA, 25 bp, Homo sapien
ctctaccattttatttgaacttttg

SEQ ID NO: 5683846 - DNA, 25 bp, Homo sapien
cgcccggcaaactctaccattttat

SEQ ID NO: 5683847 - DNA, 25 bp, Homo sapien
ggcaaactctaccattttatttgaa

SEQ ID NO: 5683848 - DNA, 25 bp, Homo sapien
caaactctaccattttatttgaact

SEQ ID NO: 5683849 - DNA, 25 bp, Homo sapien
gcaatatattacaaaagttcaaata

SEQ ID NO: 5683850 - DNA, 25 bp, Homo sapien
ataaaatggtagagtttgccgggcg

SEQ ID NO: 5683851 - DNA, 25 bp, Homo sapien
caaaagttcaaataaaatggtagag

SEQ ID NO: 5683852 - DNA, 25 bp, Homo sapien
ttcaaataaaatggtagagtttgcc

SEQ ID NO: 5683853 - DNA, 25 bp, Homo sapien
caaataaaatggtagagtttgccgg

SEQ ID NO: 5683854 - DNA, 25 bp, Homo sapien
tcaaataaaatggtagagtttgccg

SEQ ID NO: 5683855 - DNA, 25 bp, Homo sapien
ctgtggttagtccctcctgcttgtc

SEQ ID NO: 5683856 - DNA, 25 bp, Homo sapien
gtggttagtccctcctgcttgtccc

SEQ ID NO: 5683857 - DNA, 25 bp, Homo sapien
tgtggttagtccctcctgcttgtcc

SEQ ID NO: 5683858 - DNA, 25 bp, Homo sapien
gtccctcttgtcctccattttgctt

SEQ ID NO: 5683859 - DNA, 25 bp, Homo sapien
aagcaaaatggaggacaagagggac

SEQ ID NO: 5683860 - DNA, 25 bp, Homo sapien
ggacaagcaggagggactaaccaca

SEQ ID NO: 5683861 - DNA, 25 bp, Homo sapien
gacaagcaggagggactaaccacag

SEQ ID NO: 5683862 - DNA, 25 bp, Homo sapien
gggacaagcaggagggactaaccac

SEQ ID NO: 5683863 - DNA, 25 bp, Homo sapien
taactcttttactttgctcaccatg

SEQ ID NO: 5683864 - DNA, 25 bp, Homo sapien
gtggttagtccctcctgcttgtccc

SEQ ID NO: 5683865 - DNA, 25 bp, Homo sapien
ttgtcctccattttgcttaactccc

SEQ ID NO: 5683866 - DNA, 25 bp, Homo sapien
tgtggttagtccctcctgcttgtcc

SEQ ID NO: 5683867 - DNA, 25 bp, Homo sapien
gtccctcttgtcctccattttgctt

SEQ ID NO: 5683868 - DNA, 25 bp, Homo sapien
ttttactttgctcaccatgcctttg

SEQ ID NO: 5683869 - DNA, 25 bp, Homo sapien
cagtctcgggtctctggttctgttc

SEQ ID NO: 5683870 - DNA, 25 bp, Homo sapien
gggtctcctgcatttgtattttcag

SEQ ID NO: 5683871 - DNA, 25 bp, Homo sapien
tcagcctctaggctgtgtacagctc

SEQ ID NO: 5683872 - DNA, 25 bp, Homo sapien
tgtattttcagcctctaggctgtgt

SEQ ID NO: 5683873 - DNA, 25 bp, Homo sapien
cagggtctcctgcatttgtattttc

SEQ ID NO: 5683874 - DNA, 25 bp, Homo sapien
ctgtgtacagctcgggagtggagcc

SEQ ID NO: 5683875 - DNA, 25 bp, Homo sapien
gagctgtacacagcctagaggctga

SEQ ID NO: 5683876 - DNA, 25 bp, Homo sapien
gaaaatacaaatgcaggagaccctg

SEQ ID NO: 5683877 - DNA, 25 bp, Homo sapien
gaacagaaccagagacccgagactg

SEQ ID NO: 5683878 - DNA, 25 bp, Homo sapien
ctgaaaatacaaatgcaggagaccc

SEQ ID NO: 5683879 - DNA, 25 bp, Homo sapien
tacacagcctagaggctgaaaatac

SEQ ID NO: 5683880 - DNA, 25 bp, Homo sapien
ggctccactcccgagctgtacacag

SEQ ID NO: 5683881 - DNA, 25 bp, Homo sapien
cctagaaactttcaattcgatgttt

SEQ ID NO: 5683882 - DNA, 25 bp, Homo sapien
ttagatacaaaacagttaatatgta

SEQ ID NO: 5683883 - DNA, 25 bp, Homo sapien
tagaaactttcaattcgatgtttat

SEQ ID NO: 5683884 - DNA, 25 bp, Homo sapien
ctagaaactttcaattcgatgttta

SEQ ID NO: 5683885 - DNA, 25 bp, Homo sapien
tttagatacaaaacagttaatatgt

SEQ ID NO: 5683886 - DNA, 25 bp, Homo sapien
aactttcaattcgatgtttatttct

SEQ ID NO: 5683887 - DNA, 25 bp, Homo sapien
aaacatcgaattgaaagtttctagg

SEQ ID NO: 5683888 - DNA, 25 bp, Homo sapien
agaaataaacatcgaattgaaagtt

SEQ ID NO: 5683889 - DNA, 25 bp, Homo sapien
acatattaactgttttgtatctaaa

SEQ ID NO: 5683890 - DNA, 25 bp, Homo sapien
aataaacatcgaattgaaagtttct

SEQ ID NO: 5683891 - DNA, 25 bp, Homo sapien
tacatattaactgttttgtatctaa

SEQ ID NO: 5683892 - DNA, 25 bp, Homo sapien
taaacatcgaattgaaagtttctag

SEQ ID NO: 5683893 - DNA, 25 bp, Homo sapien
cctagaaactttcaattcgatgttt

SEQ ID NO: 5683894 - DNA, 25 bp, Homo sapien
tttcaaaaatgtataaccacctaga

SEQ ID NO: 5683895 - DNA, 25 bp, Homo sapien
tttagatacaaaacagttaatatgt

SEQ ID NO: 5683896 - DNA, 25 bp, Homo sapien
tgtataaccacctagaaactttcaa

SEQ ID NO: 5683897 - DNA, 25 bp, Homo sapien
gatttatgttaatggtgtttttcaa

SEQ ID NO: 5683898 - DNA, 25 bp, Homo sapien
aactttcaattcgatgtttatttct

SEQ ID NO: 5683899 - DNA, 25 bp, Homo sapien
catattaactgttttgtatctaaag

SEQ ID NO: 5683900 - DNA, 25 bp, Homo sapien
tgaaagtttctaggtggttatacat

SEQ ID NO: 5683901 - DNA, 25 bp, Homo sapien
aaacatcgaattgaaagtttctagg

SEQ ID NO: 5683902 - DNA, 25 bp, Homo sapien
agaaataaacatcgaattgaaagtt

SEQ ID NO: 5683903 - DNA, 25 bp, Homo sapien
tgaaaaacaccattaacataaatct

SEQ ID NO: 5683904 - DNA, 25 bp, Homo sapien
tctaggtggttatacatttttgaaa

SEQ ID NO: 5683905 - DNA, 25 bp, Homo sapien
taagtactacctcatgtatttcctg

SEQ ID NO: 5683906 - DNA, 25 bp, Homo sapien
tgtgaaaagatagttaagtactacc

SEQ ID NO: 5683907 - DNA, 25 bp, Homo sapien
aagtactacctcatgtatttcctgt

SEQ ID NO: 5683908 - DNA, 25 bp, Homo sapien
agtactacctcatgtatttcctgtt

SEQ ID NO: 5683909 - DNA, 25 bp, Homo sapien
atgtgaaaagatagttaagtactac

SEQ ID NO: 5683910 - DNA, 25 bp, Homo sapien
gtagtacttaactatcttttcacat

SEQ ID NO: 5683911 - DNA, 25 bp, Homo sapien
acaggaaatacatgaggtagtactt

SEQ ID NO: 5683912 - DNA, 25 bp, Homo sapien
aacaggaaatacatgaggtagtact

SEQ ID NO: 5683913 - DNA, 25 bp, Homo sapien
ggtagtacttaactatcttttcaca

SEQ ID NO: 5683914 - DNA, 25 bp, Homo sapien
caggaaatacatgaggtagtactta

SEQ ID NO: 5683915 - DNA, 25 bp, Homo sapien
taagtactacctcatgtatttcctg

SEQ ID NO: 5683916 - DNA, 25 bp, Homo sapien
tgtgaaaagatagttaagtactacc

SEQ ID NO: 5683917 - DNA, 25 bp, Homo sapien
tacctcatgtatttcctgtttagaa

SEQ ID NO: 5683918 - DNA, 25 bp, Homo sapien
caggagaatttagtttgtattttgc

SEQ ID NO: 5683919 - DNA, 25 bp, Homo sapien
tcctgtttagaaaaatttcaggaga

SEQ ID NO: 5683920 - DNA, 25 bp, Homo sapien
ttgcaagtatatgaaagctccggtt

SEQ ID NO: 5683921 - DNA, 25 bp, Homo sapien
aaaccggagctttcatatacttgca

SEQ ID NO: 5683922 - DNA, 25 bp, Homo sapien
tctcctgaaatttttctaaacagga

SEQ ID NO: 5683923 - DNA, 25 bp, Homo sapien
tctaaacaggaaatacatgaggtag

SEQ ID NO: 5683924 - DNA, 25 bp, Homo sapien
ggtagtacttaactatcttttcaca

SEQ ID NO: 5683925 - DNA, 25 bp, Homo sapien
gcaaaatacaaactaaattctcctg

SEQ ID NO: 5683926 - DNA, 25 bp, Homo sapien
caggaaatacatgaggtagtactta

SEQ ID NO: 5683927 - DNA, 25 bp, Homo sapien
ctccctaattgttacactagatggt

SEQ ID NO: 5683928 - DNA, 25 bp, Homo sapien
tctccctaattgttacactagatgg

SEQ ID NO: 5683929 - DNA, 25 bp, Homo sapien
tccctaattgttacactagatggta

SEQ ID NO: 5683930 - DNA, 25 bp, Homo sapien
cattctccctaattgttacactaga

SEQ ID NO: 5683931 - DNA, 25 bp, Homo sapien
tcattctccctaattgttacactag

SEQ ID NO: 5683932 - DNA, 25 bp, Homo sapien
ttcatgtacttaccaaaattataaa

SEQ ID NO: 5683933 - DNA, 25 bp, Homo sapien
tctagtgtaacaattagggagaatg

SEQ ID NO: 5683934 - DNA, 25 bp, Homo sapien
tttataattttggtaagtacatgaa

SEQ ID NO: 5683935 - DNA, 25 bp, Homo sapien
tagtgtaacaattagggagaatgaa

SEQ ID NO: 5683936 - DNA, 25 bp, Homo sapien
ccatctagtgtaacaattagggaga

SEQ ID NO: 5683937 - DNA, 25 bp, Homo sapien
catctagtgtaacaattagggagaa

SEQ ID NO: 5683938 - DNA, 25 bp, Homo sapien
taccatctagtgtaacaattaggga

SEQ ID NO: 5683939 - DNA, 25 bp, Homo sapien
tcacagtggtacagcaacatattat

SEQ ID NO: 5683940 - DNA, 25 bp, Homo sapien
ttcacagtggtacagcaacatatta

SEQ ID NO: 5683941 - DNA, 25 bp, Homo sapien
attatgtttctcaccctgtaaagtc

SEQ ID NO: 5683942 - DNA, 25 bp, Homo sapien
atgtttctcaccctgtaaagtctga

SEQ ID NO: 5683943 - DNA, 25 bp, Homo sapien
cctgtaaagtctgattagaactgta

SEQ ID NO: 5683944 - DNA, 25 bp, Homo sapien
taaagtctgattagaactgtatatt

SEQ ID NO: 5683945 - DNA, 25 bp, Homo sapien
taatatgttgctgtaccactgtgaa

SEQ ID NO: 5683946 - DNA, 25 bp, Homo sapien
gactttacagggtgagaaacataat

SEQ ID NO: 5683947 - DNA, 25 bp, Homo sapien
tcagactttacagggtgagaaacat

SEQ ID NO: 5683948 - DNA, 25 bp, Homo sapien
tacagttctaatcagactttacagg

SEQ ID NO: 5683949 - DNA, 25 bp, Homo sapien
ataatatgttgctgtaccactgtga

SEQ ID NO: 5683950 - DNA, 25 bp, Homo sapien
aaatatacagttctaatcagacttt

SEQ ID NO: 5683951 - DNA, 25 bp, Homo sapien
ttgtttttaagcagtgatcagtctt

SEQ ID NO: 5683952 - DNA, 25 bp, Homo sapien
ctgcattaactatgttgattatttt

SEQ ID NO: 5683953 - DNA, 25 bp, Homo sapien
tctgcattaactatgttgattattt

SEQ ID NO: 5683954 - DNA, 25 bp, Homo sapien
tgcattaactatgttgattatttta

SEQ ID NO: 5683955 - DNA, 25 bp, Homo sapien
tgtttttaagcagtgatcagtcttt

SEQ ID NO: 5683956 - DNA, 25 bp, Homo sapien
gtttttaagcagtgatcagtctttt

SEQ ID NO: 5683957 - DNA, 25 bp, Homo sapien
aagactgatcactgcttaaaaacaa

SEQ ID NO: 5683958 - DNA, 25 bp, Homo sapien
taaaataatcaacatagttaatgca

SEQ ID NO: 5683959 - DNA, 25 bp, Homo sapien
aaaataatcaacatagttaatgcag

SEQ ID NO: 5683960 - DNA, 25 bp, Homo sapien
aataatcaacatagttaatgcagaa

SEQ ID NO: 5683961 - DNA, 25 bp, Homo sapien
aaaagactgatcactgcttaaaaac

SEQ ID NO: 5683962 - DNA, 25 bp, Homo sapien
aaagactgatcactgcttaaaaaca

SEQ ID NO: 5683963 - DNA, 25 bp, Homo sapien
ctgctgttttatggctgtcatcaac

SEQ ID NO: 5683964 - DNA, 25 bp, Homo sapien
cagtgatcagtcttttactctgctg

SEQ ID NO: 5683965 - DNA, 25 bp, Homo sapien
tactctgctgttttatggctgtcat

SEQ ID NO: 5683966 - DNA, 25 bp, Homo sapien
tctgcattaactatgttgattattt

SEQ ID NO: 5683967 - DNA, 25 bp, Homo sapien
tgtttttaagcagtgatcagtcttt

SEQ ID NO: 5683968 - DNA, 25 bp, Homo sapien
taagattctgcattaactatgttga

SEQ ID NO: 5683969 - DNA, 25 bp, Homo sapien
tgtgtgctgtagctagtatccacca

SEQ ID NO: 5683970 - DNA, 25 bp, Homo sapien
ctgtgcttttttattcagacagaaa

SEQ ID NO: 5683971 - DNA, 25 bp, Homo sapien
gtgtgtgctgtagctagtatccacc

SEQ ID NO: 5683972 - DNA, 25 bp, Homo sapien
tgctgtagctagtatccaccatcat

SEQ ID NO: 5683973 - DNA, 25 bp, Homo sapien
tgtgcttttttattcagacagaaat

SEQ ID NO: 5683974 - DNA, 25 bp, Homo sapien
tgtgctgtagctagtatccaccatc

SEQ ID NO: 5683975 - DNA, 25 bp, Homo sapien
gatggtggatactagctacagcaca

SEQ ID NO: 5683976 - DNA, 25 bp, Homo sapien
ggtggatactagctacagcacacac

SEQ ID NO: 5683977 - DNA, 25 bp, Homo sapien
tggtggatactagctacagcacaca

SEQ ID NO: 5683978 - DNA, 25 bp, Homo sapien
atgatggtggatactagctacagca

SEQ ID NO: 5683979 - DNA, 25 bp, Homo sapien
atttctgtctgaataaaaaagcaca

SEQ ID NO: 5683980 - DNA, 25 bp, Homo sapien
tttctgtctgaataaaaaagcacag

SEQ ID NO: 5683981 - DNA, 25 bp, Homo sapien
actggagtgcttggataggactgca

SEQ ID NO: 5683982 - DNA, 25 bp, Homo sapien
gggcctcaatgacaaggttaacatt

SEQ ID NO: 5683983 - DNA, 25 bp, Homo sapien
gtgcttggataggactgcagtttta

SEQ ID NO: 5683984 - DNA, 25 bp, Homo sapien
aacatttgagtagactggaaggaag

SEQ ID NO: 5683985 - DNA, 25 bp, Homo sapien
cctcaatgacaaggttaacatttga

SEQ ID NO: 5683986 - DNA, 25 bp, Homo sapien
taaatgctgaagtcagggcctcaat

SEQ ID NO: 5683987 - DNA, 25 bp, Homo sapien
aatgttaaccttgtcattgaggccc

SEQ ID NO: 5683988 - DNA, 25 bp, Homo sapien
tgcagtcctatccaagcactccagt

SEQ ID NO: 5683989 - DNA, 25 bp, Homo sapien
cattgaggccctgacttcagcattt

SEQ ID NO: 5683990 - DNA, 25 bp, Homo sapien
tcaaatgttaaccttgtcattgagg

SEQ ID NO: 5683991 - DNA, 25 bp, Homo sapien
taaaactgcagtcctatccaagcac

SEQ ID NO: 5683992 - DNA, 25 bp, Homo sapien
cttccttccagtctactcaaatgtt

SEQ ID NO: 5683993 - DNA, 25 bp, Homo sapien
tgtgagtaatgctgatccctgccct

SEQ ID NO: 5683994 - DNA, 25 bp, Homo sapien
gagtaatgctgatccctgcccttgt

SEQ ID NO: 5683995 - DNA, 25 bp, Homo sapien
ctgtgagtaatgctgatccctgccc

SEQ ID NO: 5683996 - DNA, 25 bp, Homo sapien
tctgtgagtaatgctgatccctgcc

SEQ ID NO: 5683997 - DNA, 25 bp, Homo sapien
cctctgtgagtaatgctgatccctg

SEQ ID NO: 5683998 - DNA, 25 bp, Homo sapien
tgagtaatgctgatccctgcccttg

SEQ ID NO: 5683999 - DNA, 25 bp, Homo sapien
caagggcagggatcagcattactca

SEQ ID NO: 5684000 - DNA, 25 bp, Homo sapien
cagggatcagcattactcacagagg

SEQ ID NO: 5684001 - DNA, 25 bp, Homo sapien
agggcagggatcagcattactcaca

SEQ ID NO: 5684002 - DNA, 25 bp, Homo sapien
ggcagggatcagcattactcacaga

SEQ ID NO: 5684003 - DNA, 25 bp, Homo sapien
gcagggatcagcattactcacagag

SEQ ID NO: 5684004 - DNA, 25 bp, Homo sapien
acaagggcagggatcagcattactc

SEQ ID NO: 5684005 - DNA, 25 bp, Homo sapien
tttgccgtatgtatcacaaatggga

SEQ ID NO: 5684006 - DNA, 25 bp, Homo sapien
gccgtatgtatcacaaatgggaaaa

SEQ ID NO: 5684007 - DNA, 25 bp, Homo sapien
ggaaacttatttgccgtatgtatca

SEQ ID NO: 5684008 - DNA, 25 bp, Homo sapien
cacagacttagtgtatgataggaaa

SEQ ID NO: 5684009 - DNA, 25 bp, Homo sapien
gtatgataggaaacttatttgccgt

SEQ ID NO: 5684010 - DNA, 25 bp, Homo sapien
atgggaaaagtcagtttactcattc

SEQ ID NO: 5684011 - DNA, 25 bp, Homo sapien
acggcaaataagtttcctatcatac

SEQ ID NO: 5684012 - DNA, 25 bp, Homo sapien
ttttcccatttgtgatacatacggc

SEQ ID NO: 5684013 - DNA, 25 bp, Homo sapien
tcccatttgtgatacatacggcaaa

SEQ ID NO: 5684014 - DNA, 25 bp, Homo sapien
ttcctatcatacactaagtctgtga

SEQ ID NO: 5684015 - DNA, 25 bp, Homo sapien
gaatgagtaaactgacttttcccat

SEQ ID NO: 5684016 - DNA, 25 bp, Homo sapien
tgatacatacggcaaataagtttcc

SEQ ID NO: 5684017 - DNA, 25 bp, Homo sapien
aatacttgatactgtctttgtgaaa

SEQ ID NO: 5684018 - DNA, 25 bp, Homo sapien
caacttcctaatatagactttgcat

SEQ ID NO: 5684019 - DNA, 25 bp, Homo sapien
gttatttggaatacttgatactgtc

SEQ ID NO: 5684020 - DNA, 25 bp, Homo sapien
cttcctaatatagactttgcataca

SEQ ID NO: 5684021 - DNA, 25 bp, Homo sapien
ttcaacttcctaatatagactttgc

SEQ ID NO: 5684022 - DNA, 25 bp, Homo sapien
ggaatacttgatactgtctttgtga

SEQ ID NO: 5684023 - DNA, 25 bp, Homo sapien
gacagtatcaagtattccaaataac

SEQ ID NO: 5684024 - DNA, 25 bp, Homo sapien
tcacaaagacagtatcaagtattcc

SEQ ID NO: 5684025 - DNA, 25 bp, Homo sapien
gcaaagtctatattaggaagttgaa

SEQ ID NO: 5684026 - DNA, 25 bp, Homo sapien
tgtatgcaaagtctatattaggaag

SEQ ID NO: 5684027 - DNA, 25 bp, Homo sapien
tttcacaaagacagtatcaagtatt

SEQ ID NO: 5684028 - DNA, 25 bp, Homo sapien
caaagacagtatcaagtattccaaa

SEQ ID NO: 5684029 - DNA, 25 bp, Homo sapien
tcaacatgtagtctaagacatttcc

SEQ ID NO: 5684030 - DNA, 25 bp, Homo sapien
catgtagtctaagacatttccttat

SEQ ID NO: 5684031 - DNA, 25 bp, Homo sapien
cagtttttcaacatgtagtctaaga

SEQ ID NO: 5684032 - DNA, 25 bp, Homo sapien
aatgagtaagccagatctgttgtct

SEQ ID NO: 5684033 - DNA, 25 bp, Homo sapien
ttaaaaatgagtaagccagatctgt

SEQ ID NO: 5684034 - DNA, 25 bp, Homo sapien
aaatgagtaagccagatctgttgtc

SEQ ID NO: 5684035 - DNA, 25 bp, Homo sapien
acagatctggcttactcatttttaa

SEQ ID NO: 5684036 - DNA, 25 bp, Homo sapien
agacaacagatctggcttactcatt

SEQ ID NO: 5684037 - DNA, 25 bp, Homo sapien
ggaaatgtcttagactacatgttga

SEQ ID NO: 5684038 - DNA, 25 bp, Homo sapien
taaggaaatgtcttagactacatgt

SEQ ID NO: 5684039 - DNA, 25 bp, Homo sapien
aaataaggaaatgtcttagactaca

SEQ ID NO: 5684040 - DNA, 25 bp, Homo sapien
tcttagactacatgttgaaaaactg

SEQ ID NO: 5684041 - DNA, 25 bp, Homo sapien
tcaaacttatggttaccttcttgac

SEQ ID NO: 5684042 - DNA, 25 bp, Homo sapien
acttatggttaccttcttgacttgg

SEQ ID NO: 5684043 - DNA, 25 bp, Homo sapien
caaacttatggttaccttcttgact

SEQ ID NO: 5684044 - DNA, 25 bp, Homo sapien
aatcaaacttatggttaccttcttg

SEQ ID NO: 5684045 - DNA, 25 bp, Homo sapien
aacttatggttaccttcttgacttg

SEQ ID NO: 5684046 - DNA, 25 bp, Homo sapien
cttatggttaccttcttgacttggt

SEQ ID NO: 5684047 - DNA, 25 bp, Homo sapien
ccaagtcaagaaggtaaccataagt

SEQ ID NO: 5684048 - DNA, 25 bp, Homo sapien
caagtcaagaaggtaaccataagtt

SEQ ID NO: 5684049 - DNA, 25 bp, Homo sapien
accaagtcaagaaggtaaccataag

SEQ ID NO: 5684050 - DNA, 25 bp, Homo sapien
caagaaggtaaccataagtttgatt

SEQ ID NO: 5684051 - DNA, 25 bp, Homo sapien
agtcaagaaggtaaccataagtttg

SEQ ID NO: 5684052 - DNA, 25 bp, Homo sapien
tcaagaaggtaaccataagtttgat

SEQ ID NO: 5684053 - DNA, 25 bp, Homo sapien
taccttcttgacttggttttatgaa

SEQ ID NO: 5684054 - DNA, 25 bp, Homo sapien
caaacttatggttaccttcttgact

SEQ ID NO: 5684055 - DNA, 25 bp, Homo sapien
aatcaaacttatggttaccttcttg

SEQ ID NO: 5684056 - DNA, 25 bp, Homo sapien
aaatcaaatcattcaatttgaagag

SEQ ID NO: 5684057 - DNA, 25 bp, Homo sapien
cttgacttggttttatgaataagaa

SEQ ID NO: 5684058 - DNA, 25 bp, Homo sapien
cttatggttaccttcttgacttggt

SEQ ID NO: 5684059 - DNA, 25 bp, Homo sapien
ccaagtcaagaaggtaaccataagt

SEQ ID NO: 5684060 - DNA, 25 bp, Homo sapien
accaagtcaagaaggtaaccataag

SEQ ID NO: 5684061 - DNA, 25 bp, Homo sapien
caagaaggtaaccataagtttgatt

SEQ ID NO: 5684062 - DNA, 25 bp, Homo sapien
ttcataaaaccaagtcaagaaggta

SEQ ID NO: 5684063 - DNA, 25 bp, Homo sapien
tattcataaaaccaagtcaagaagg

SEQ ID NO: 5684064 - DNA, 25 bp, Homo sapien
tattcttattcataaaaccaagtca

SEQ ID NO: 5684065 - DNA, 25 bp, Homo sapien
ttctcagcagtaaagaatccagttc

SEQ ID NO: 5684066 - DNA, 25 bp, Homo sapien
ctcagcagtaaagaatccagttcag

SEQ ID NO: 5684067 - DNA, 25 bp, Homo sapien
tctcagcagtaaagaatccagttca

SEQ ID NO: 5684068 - DNA, 25 bp, Homo sapien
caccttttcaattcctccattaatt

SEQ ID NO: 5684069 - DNA, 25 bp, Homo sapien
tttctcagcagtaaagaatccagtt

SEQ ID NO: 5684070 - DNA, 25 bp, Homo sapien
ccttttcaattcctccattaattca

SEQ ID NO: 5684071 - DNA, 25 bp, Homo sapien
ctgaactggattctttactgctgag

SEQ ID NO: 5684072 - DNA, 25 bp, Homo sapien
gaactggattctttactgctgagaa

SEQ ID NO: 5684073 - DNA, 25 bp, Homo sapien
tgaactggattctttactgctgaga

SEQ ID NO: 5684074 - DNA, 25 bp, Homo sapien
aactggattctttactgctgagaaa

SEQ ID NO: 5684075 - DNA, 25 bp, Homo sapien
aattaatggaggaattgaaaaggtg

SEQ ID NO: 5684076 - DNA, 25 bp, Homo sapien
tgaattaatggaggaattgaaaagg

SEQ ID NO: 5684077 - DNA, 25 bp, Homo sapien
ttcagataattggtattccatatat

SEQ ID NO: 5684078 - DNA, 25 bp, Homo sapien
tataaatctcggaatgggaaaatgt

SEQ ID NO: 5684079 - DNA, 25 bp, Homo sapien
taaatctcggaatgggaaaatgtta

SEQ ID NO: 5684080 - DNA, 25 bp, Homo sapien
gaaaatgttacgattctagtaatta

SEQ ID NO: 5684081 - DNA, 25 bp, Homo sapien
tttttcagataattggtattccata

SEQ ID NO: 5684082 - DNA, 25 bp, Homo sapien
tgggaaaatgttacgattctagtaa

SEQ ID NO: 5684083 - DNA, 25 bp, Homo sapien
tataaataattactagaatcgtaac

SEQ ID NO: 5684084 - DNA, 25 bp, Homo sapien
tatatggaataccaattatctgaaa

SEQ ID NO: 5684085 - DNA, 25 bp, Homo sapien
acattttcccattccgagatttata

SEQ ID NO: 5684086 - DNA, 25 bp, Homo sapien
taacattttcccattccgagattta

SEQ ID NO: 5684087 - DNA, 25 bp, Homo sapien
tactagaatcgtaacattttcccat

SEQ ID NO: 5684088 - DNA, 25 bp, Homo sapien
tatggaataccaattatctgaaaaa

SEQ ID NO: 5684089 - DNA, 25 bp, Homo sapien
caaattacttattgtgtgaaagatg

SEQ ID NO: 5684090 - DNA, 25 bp, Homo sapien
tactttggaattaattagaaagcaa

SEQ ID NO: 5684091 - DNA, 25 bp, Homo sapien
taaaatgctaacaatttatttacaa

SEQ ID NO: 5684092 - DNA, 25 bp, Homo sapien
tgtgtgttactttggaattaattag

SEQ ID NO: 5684093 - DNA, 25 bp, Homo sapien
tacttattgtgtgaaagatgattta

SEQ ID NO: 5684094 - DNA, 25 bp, Homo sapien
gaaagcaaattacttattgtgtgaa

SEQ ID NO: 5684095 - DNA, 25 bp, Homo sapien
aataaatcatctttcacacaataag

SEQ ID NO: 5684096 - DNA, 25 bp, Homo sapien
ctaattaattccaaagtaacacaca

SEQ ID NO: 5684097 - DNA, 25 bp, Homo sapien
catctttcacacaataagtaatttg

SEQ ID NO: 5684098 - DNA, 25 bp, Homo sapien
tataattgtaaataaattgttagca

SEQ ID NO: 5684099 - DNA, 25 bp, Homo sapien
tgctttctaattaattccaaagtaa

SEQ ID NO: 5684100 - DNA, 25 bp, Homo sapien
cacacaataagtaatttgctttcta

SEQ ID NO: 5684101 - DNA, 25 bp, Homo sapien
cttttttaacagttggatccacttg

SEQ ID NO: 5684102 - DNA, 25 bp, Homo sapien
caagtggatccaactgttaaaaaag

SEQ ID NO: 5684103 - DNA, 25 bp, Homo sapien
acagttggatccacttgaacaagca

SEQ ID NO: 5684104 - DNA, 25 bp, Homo sapien
cttttttaacagttggatccacttg

SEQ ID NO: 5684105 - DNA, 25 bp, Homo sapien
agcaaaagtggatttggtttctgca

SEQ ID NO: 5684106 - DNA, 25 bp, Homo sapien
taacagttggatccacttgaacaag

SEQ ID NO: 5684107 - DNA, 25 bp, Homo sapien
ggtttctgcatacacattaaattca

SEQ ID NO: 5684108 - DNA, 25 bp, Homo sapien
tggatccacttgaacaagcaaaagt

SEQ ID NO: 5684109 - DNA, 25 bp, Homo sapien
ccaaatccacttttgcttgttcaag

SEQ ID NO: 5684110 - DNA, 25 bp, Homo sapien
tgttcaagtggatccaactgttaaa

SEQ ID NO: 5684111 - DNA, 25 bp, Homo sapien
taatgtgtatgcagaaaccaaatcc

SEQ ID NO: 5684112 - DNA, 25 bp, Homo sapien
tgcttgttcaagtggatccaactgt

SEQ ID NO: 5684113 - DNA, 25 bp, Homo sapien
ccccaaaacattgaatttaatgtgt

SEQ ID NO: 5684114 - DNA, 25 bp, Homo sapien
caagtggatccaactgttaaaaaag

SEQ ID NO: 5684115 - DNA, 25 bp, Homo sapien
tgatacattgtacttggtaaaagtc

SEQ ID NO: 5684116 - DNA, 25 bp, Homo sapien
aaaaacttctttgatacattgtact

SEQ ID NO: 5684117 - DNA, 25 bp, Homo sapien
gttatcagatggtgttcaaagtttg

SEQ ID NO: 5684118 - DNA, 25 bp, Homo sapien
atcagatggtgttcaaagtttgtgt

SEQ ID NO: 5684119 - DNA, 25 bp, Homo sapien
tgttatcagatggtgttcaaagttt

SEQ ID NO: 5684120 - DNA, 25 bp, Homo sapien
tatcagatggtgttcaaagtttgtg

SEQ ID NO: 5684121 - DNA, 25 bp, Homo sapien
aaactttgaacaccatctgataaca

SEQ ID NO: 5684122 - DNA, 25 bp, Homo sapien
agtacaatgtatcaaagaagttttt

SEQ ID NO: 5684123 - DNA, 25 bp, Homo sapien
acacaaactttgaacaccatctgat

SEQ ID NO: 5684124 - DNA, 25 bp, Homo sapien
cacaaactttgaacaccatctgata

SEQ ID NO: 5684125 - DNA, 25 bp, Homo sapien
gacttttaccaagtacaatgtatca

SEQ ID NO: 5684126 - DNA, 25 bp, Homo sapien
caaactttgaacaccatctgataac

SEQ ID NO: 5684127 - DNA, 25 bp, Homo sapien
aagtcactcattaagaaaacttctt

SEQ ID NO: 5684128 - DNA, 25 bp, Homo sapien
taccctaaggtgaaaatgtgtggac

SEQ ID NO: 5684129 - DNA, 25 bp, Homo sapien
gataccctaaggtgaaaatgtgtgg

SEQ ID NO: 5684130 - DNA, 25 bp, Homo sapien
gatgataccctaaggtgaaaatgtg

SEQ ID NO: 5684131 - DNA, 25 bp, Homo sapien
cctaaggtgaaaatgtgtggacaaa

SEQ ID NO: 5684132 - DNA, 25 bp, Homo sapien
ccttgtctaactaaagatgataccc

SEQ ID NO: 5684133 - DNA, 25 bp, Homo sapien
gggtatcatctttagttagacaagg

SEQ ID NO: 5684134 - DNA, 25 bp, Homo sapien
aaagaagttttcttaatgagtgact

SEQ ID NO: 5684135 - DNA, 25 bp, Homo sapien
tttgtccacacattttcaccttagg

SEQ ID NO: 5684136 - DNA, 25 bp, Homo sapien
cacattttcaccttagggtatcatc

SEQ ID NO: 5684137 - DNA, 25 bp, Homo sapien
cacacattttcaccttagggtatca

SEQ ID NO: 5684138 - DNA, 25 bp, Homo sapien
tgtccacacattttcaccttagggt

SEQ ID NO: 5684139 - DNA, 25 bp, Homo sapien
aatgcatcatgtacaatgtttatat

SEQ ID NO: 5684140 - DNA, 25 bp, Homo sapien
agcccagatcgtaactcccgaaatt

SEQ ID NO: 5684141 - DNA, 25 bp, Homo sapien
caaagcccagatcgtaactcccgaa

SEQ ID NO: 5684142 - DNA, 25 bp, Homo sapien
gcccagatcgtaactcccgaaatta

SEQ ID NO: 5684143 - DNA, 25 bp, Homo sapien
cataaatgcatcatgtacaatgttt

SEQ ID NO: 5684144 - DNA, 25 bp, Homo sapien
aagcccagatcgtaactcccgaaat

SEQ ID NO: 5684145 - DNA, 25 bp, Homo sapien
ttcgggagttacgatctgggctttg

SEQ ID NO: 5684146 - DNA, 25 bp, Homo sapien
aatttcgggagttacgatctgggct

SEQ ID NO: 5684147 - DNA, 25 bp, Homo sapien
atttcgggagttacgatctgggctt

SEQ ID NO: 5684148 - DNA, 25 bp, Homo sapien
taatttcgggagttacgatctgggc

SEQ ID NO: 5684149 - DNA, 25 bp, Homo sapien
tataaacattgtacatgatgcattt

SEQ ID NO: 5684150 - DNA, 25 bp, Homo sapien
aaacattgtacatgatgcatttatg

SEQ ID NO: 5684151 - DNA, 25 bp, Homo sapien
caatgatgttatcagggtttctgga

SEQ ID NO: 5684152 - DNA, 25 bp, Homo sapien
attacaatgatgttatcagggtttc

SEQ ID NO: 5684153 - DNA, 25 bp, Homo sapien
atgatgttatcagggtttctggaaa

SEQ ID NO: 5684154 - DNA, 25 bp, Homo sapien
tacaatgatgttatcagggtttctg

SEQ ID NO: 5684155 - DNA, 25 bp, Homo sapien
ttacaatgatgttatcagggtttct

SEQ ID NO: 5684156 - DNA, 25 bp, Homo sapien
acaatgatgttatcagggtttctgg

SEQ ID NO: 5684157 - DNA, 25 bp, Homo sapien
tccagaaaccctgataacatcattg

SEQ ID NO: 5684158 - DNA, 25 bp, Homo sapien
ccagaaaccctgataacatcattgt

SEQ ID NO: 5684159 - DNA, 25 bp, Homo sapien
tttccagaaaccctgataacatcat

SEQ ID NO: 5684160 - DNA, 25 bp, Homo sapien
agaaaccctgataacatcattgtaa

SEQ ID NO: 5684161 - DNA, 25 bp, Homo sapien
cagaaaccctgataacatcattgta

SEQ ID NO: 5684162 - DNA, 25 bp, Homo sapien
gaaaccctgataacatcattgtaat

SEQ ID NO: 5684163 - DNA, 25 bp, Homo sapien
cctataggacaaaaacagtaaattg

SEQ ID NO: 5684164 - DNA, 25 bp, Homo sapien
cagtaaattgactttgacagtctaa

SEQ ID NO: 5684165 - DNA, 25 bp, Homo sapien
caatgatgttatcagggtttctgga

SEQ ID NO: 5684166 - DNA, 25 bp, Homo sapien
gacagtctaaaacaaatctcattat

SEQ ID NO: 5684167 - DNA, 25 bp, Homo sapien
gatgttatcagggtttctggaaacc

SEQ ID NO: 5684168 - DNA, 25 bp, Homo sapien
tacaatgatgttatcagggtttctg

SEQ ID NO: 5684169 - DNA, 25 bp, Homo sapien
ctatagggtttccagaaaccctgat

SEQ ID NO: 5684170 - DNA, 25 bp, Homo sapien
caatttactgtttttgtcctatagg

SEQ ID NO: 5684171 - DNA, 25 bp, Homo sapien
tttccagaaaccctgataacatcat

SEQ ID NO: 5684172 - DNA, 25 bp, Homo sapien
gaaaccctgataacatcattgtaat

SEQ ID NO: 5684173 - DNA, 25 bp, Homo sapien
ttagactgtcaaagtcaatttactg

SEQ ID NO: 5684174 - DNA, 25 bp, Homo sapien
aatgagatttgttttagactgtcaa

SEQ ID NO: 5684175 - DNA, 25 bp, Homo sapien
tccagccttaggaaatacctcctaa

SEQ ID NO: 5684176 - DNA, 25 bp, Homo sapien
actccagccttaggaaatacctcct

SEQ ID NO: 5684177 - DNA, 25 bp, Homo sapien
gagcactcacggtattctttttgac

SEQ ID NO: 5684178 - DNA, 25 bp, Homo sapien
ccttaggaaatacctcctaactatg

SEQ ID NO: 5684179 - DNA, 25 bp, Homo sapien
cagccttaggaaatacctcctaact

SEQ ID NO: 5684180 - DNA, 25 bp, Homo sapien
ggagcactcacggtattctttttga

SEQ ID NO: 5684181 - DNA, 25 bp, Homo sapien
taggaggtatttcctaaggctggag

SEQ ID NO: 5684182 - DNA, 25 bp, Homo sapien
catagttaggaggtatttcctaagg

SEQ ID NO: 5684183 - DNA, 25 bp, Homo sapien
gtcaaaaagaataccgtgagtgctc

SEQ ID NO: 5684184 - DNA, 25 bp, Homo sapien
aggaggtatttcctaaggctggagt

SEQ ID NO: 5684185 - DNA, 25 bp, Homo sapien
ttaggaggtatttcctaaggctgga

SEQ ID NO: 5684186 - DNA, 25 bp, Homo sapien
tcaaaaagaataccgtgagtgctcc

SEQ ID NO: 5684187 - DNA, 25 bp, Homo sapien
tgctattttatgaaacatgtggaag

SEQ ID NO: 5684188 - DNA, 25 bp, Homo sapien
tgaatttcataaaacagaatgctat

SEQ ID NO: 5684189 - DNA, 25 bp, Homo sapien
aaacagaatgctattttatgaaaca

SEQ ID NO: 5684190 - DNA, 25 bp, Homo sapien
tatgaaacatgtggaagaagaaaca

SEQ ID NO: 5684191 - DNA, 25 bp, Homo sapien
gattaatgacctatgccccttttcc

SEQ ID NO: 5684192 - DNA, 25 bp, Homo sapien
gaaacagattaatgacctatgcccc

SEQ ID NO: 5684193 - DNA, 25 bp, Homo sapien
catgtttcataaaatagcattctgt

SEQ ID NO: 5684194 - DNA, 25 bp, Homo sapien
tgtttcttcttccacatgtttcata

SEQ ID NO: 5684195 - DNA, 25 bp, Homo sapien
tcttccacatgtttcataaaatagc

SEQ ID NO: 5684196 - DNA, 25 bp, Homo sapien
ggaaaaggggcataggtcattaatc

SEQ ID NO: 5684197 - DNA, 25 bp, Homo sapien
gggcataggtcattaatctgtttct

SEQ ID NO: 5684198 - DNA, 25 bp, Homo sapien
atagcattctgttttatgaaattca

SEQ ID NO: 5684199 - DNA, 25 bp, Homo sapien
ctagagatgttacctatggcttgga

SEQ ID NO: 5684200 - DNA, 25 bp, Homo sapien
atggcttggaattgcttctaaaatt

SEQ ID NO: 5684201 - DNA, 25 bp, Homo sapien
tagagatgttacctatggcttggaa

SEQ ID NO: 5684202 - DNA, 25 bp, Homo sapien
agagatgttacctatggcttggaat

SEQ ID NO: 5684203 - DNA, 25 bp, Homo sapien
atttggacttagatactttaataat

SEQ ID NO: 5684204 - DNA, 25 bp, Homo sapien
gcttctaaaatttggacttagatac

SEQ ID NO: 5684205 - DNA, 25 bp, Homo sapien
attattaaagtatctaagtccaaat

SEQ ID NO: 5684206 - DNA, 25 bp, Homo sapien
tatctaagtccaaattttagaagca

SEQ ID NO: 5684207 - DNA, 25 bp, Homo sapien
attccaagccataggtaacatctct

SEQ ID NO: 5684208 - DNA, 25 bp, Homo sapien
agtatctaagtccaaattttagaag

SEQ ID NO: 5684209 - DNA, 25 bp, Homo sapien
tccaagccataggtaacatctctag

SEQ ID NO: 5684210 - DNA, 25 bp, Homo sapien
aattttagaagcaattccaagccat

SEQ ID NO: 5684211 - DNA, 25 bp, Homo sapien
ttctccttacctatgtgataaagga

SEQ ID NO: 5684212 - DNA, 25 bp, Homo sapien
gcaatgctatttgctgtcatacaca

SEQ ID NO: 5684213 - DNA, 25 bp, Homo sapien
tttacttccattctgcaatgctatt

SEQ ID NO: 5684214 - DNA, 25 bp, Homo sapien
tgctgttctccttacctatgtgata

SEQ ID NO: 5684215 - DNA, 25 bp, Homo sapien
tgttctccttacctatgtgataaag

SEQ ID NO: 5684216 - DNA, 25 bp, Homo sapien
tatttgctgtcatacacattcatgc

SEQ ID NO: 5684217 - DNA, 25 bp, Homo sapien
tatcacataggtaaggagaacagca

SEQ ID NO: 5684218 - DNA, 25 bp, Homo sapien
tgtatgacagcaaatagcattgcag

SEQ ID NO: 5684219 - DNA, 25 bp, Homo sapien
cctttatcacataggtaaggagaac

SEQ ID NO: 5684220 - DNA, 25 bp, Homo sapien
gcatgaatgtgtatgacagcaaata

SEQ ID NO: 5684221 - DNA, 25 bp, Homo sapien
aatagcattgcagaatggaagtaaa

SEQ ID NO: 5684222 - DNA, 25 bp, Homo sapien
tgtgtatgacagcaaatagcattgc

SEQ ID NO: 5684223 - DNA, 25 bp, Homo sapien
tgtccagcccaatttgctctttagc

SEQ ID NO: 5684224 - DNA, 25 bp, Homo sapien
agcccaatttgctctttagcttaca

SEQ ID NO: 5684225 - DNA, 25 bp, Homo sapien
ccaatttgctctttagcttacacag

SEQ ID NO: 5684226 - DNA, 25 bp, Homo sapien
ccgtgtccagcccaatttgctcttt

SEQ ID NO: 5684227 - DNA, 25 bp, Homo sapien
ccagcccaatttgctctttagctta

SEQ ID NO: 5684228 - DNA, 25 bp, Homo sapien
attatagcgggagccaccgtgtcca

SEQ ID NO: 5684229 - DNA, 25 bp, Homo sapien
gctaaagagcaaattgggctggaca

SEQ ID NO: 5684230 - DNA, 25 bp, Homo sapien
tggacacggtggctcccgctataat

SEQ ID NO: 5684231 - DNA, 25 bp, Homo sapien
aaagagcaaattgggctggacacgg

SEQ ID NO: 5684232 - DNA, 25 bp, Homo sapien
taagctaaagagcaaattgggctgg

SEQ ID NO: 5684233 - DNA, 25 bp, Homo sapien
tgtaagctaaagagcaaattgggct

SEQ ID NO: 5684234 - DNA, 25 bp, Homo sapien
ctgtgtaagctaaagagcaaattgg

SEQ ID NO: 5684235 - DNA, 25 bp, Homo sapien
aataccataggagttaactgtttct

SEQ ID NO: 5684236 - DNA, 25 bp, Homo sapien
gctaaataccataggagttaactgt

SEQ ID NO: 5684237 - DNA, 25 bp, Homo sapien
ctaaataccataggagttaactgtt

SEQ ID NO: 5684238 - DNA, 25 bp, Homo sapien
cagctaaataccataggagttaact

SEQ ID NO: 5684239 - DNA, 25 bp, Homo sapien
taccataggagttaactgtttcttg

SEQ ID NO: 5684240 - DNA, 25 bp, Homo sapien
accataggagttaactgtttcttga

SEQ ID NO: 5684241 - DNA, 25 bp, Homo sapien
cagttaactcctatggtatttagct

SEQ ID NO: 5684242 - DNA, 25 bp, Homo sapien
tcaagaaacagttaactcctatggt

SEQ ID NO: 5684243 - DNA, 25 bp, Homo sapien
acagttaactcctatggtatttagc

SEQ ID NO: 5684244 - DNA, 25 bp, Homo sapien
agttaactcctatggtatttagctg

SEQ ID NO: 5684245 - DNA, 25 bp, Homo sapien
caagaaacagttaactcctatggta

SEQ ID NO: 5684246 - DNA, 25 bp, Homo sapien
aacagttaactcctatggtatttag

SEQ ID NO: 5684247 - DNA, 25 bp, Homo sapien
atctaatatgtttatacgtttacat

SEQ ID NO: 5684248 - DNA, 25 bp, Homo sapien
tctaatatgtttatacgtttacatt

SEQ ID NO: 5684249 - DNA, 25 bp, Homo sapien
tataatctaatatgtttatacgttt

SEQ ID NO: 5684250 - DNA, 25 bp, Homo sapien
aatctaatatgtttatacgtttaca

SEQ ID NO: 5684251 - DNA, 25 bp, Homo sapien
ctaatatgtttatacgtttacattt

SEQ ID NO: 5684252 - DNA, 25 bp, Homo sapien
taatctaatatgtttatacgtttac

SEQ ID NO: 5684253 - DNA, 25 bp, Homo sapien
tgtaaacgtataaacatattagatt

SEQ ID NO: 5684254 - DNA, 25 bp, Homo sapien
gtaaacgtataaacatattagatta

SEQ ID NO: 5684255 - DNA, 25 bp, Homo sapien
atgtaaacgtataaacatattagat

SEQ ID NO: 5684256 - DNA, 25 bp, Homo sapien
taaacgtataaacatattagattat

SEQ ID NO: 5684257 - DNA, 25 bp, Homo sapien
aaatgtaaacgtataaacatattag

SEQ ID NO: 5684258 - DNA, 25 bp, Homo sapien
aatgtaaacgtataaacatattaga

SEQ ID NO: 5684259 - DNA, 25 bp, Homo sapien
tatgttatgaaaaaggttttccatc

SEQ ID NO: 5684260 - DNA, 25 bp, Homo sapien
catttttaattcatttggagtttat

SEQ ID NO: 5684261 - DNA, 25 bp, Homo sapien
aatctaatatgtttatacgtttaca

SEQ ID NO: 5684262 - DNA, 25 bp, Homo sapien
tgtatgttatgaaaaaggttttcca

SEQ ID NO: 5684263 - DNA, 25 bp, Homo sapien
tgtgtatgttatgaaaaaggttttc

SEQ ID NO: 5684264 - DNA, 25 bp, Homo sapien
taatctaatatgtttatacgtttac

SEQ ID NO: 5684265 - DNA, 25 bp, Homo sapien
tgtaaacgtataaacatattagatt

SEQ ID NO: 5684266 - DNA, 25 bp, Homo sapien
ataaactccaaatgaattaaaaatg

SEQ ID NO: 5684267 - DNA, 25 bp, Homo sapien
cacaaaaataaactccaaatgaatt

SEQ ID NO: 5684268 - DNA, 25 bp, Homo sapien
gatggaaaacctttttcataacata

SEQ ID NO: 5684269 - DNA, 25 bp, Homo sapien
aaatgtaaacgtataaacatattag

SEQ ID NO: 5684270 - DNA, 25 bp, Homo sapien
gaaaacctttttcataacatacaca

SEQ ID NO: 5684271 - DNA, 25 bp, Homo sapien
gcacatgtgcaaggatttttatagg

SEQ ID NO: 5684272 - DNA, 25 bp, Homo sapien
gatttttataggctagattcttaaa

SEQ ID NO: 5684273 - DNA, 25 bp, Homo sapien
tttaagaatctagcctataaaaatc

SEQ ID NO: 5684274 - DNA, 25 bp, Homo sapien
cctataaaaatccttgcacatgtgc

SEQ ID NO: 5684275 - DNA, 25 bp, Homo sapien
tttaatttataagcacatgtgcaag

SEQ ID NO: 5684276 - DNA, 25 bp, Homo sapien
gcacatgtgcaaggatttttatagg

SEQ ID NO: 5684277 - DNA, 25 bp, Homo sapien
caagtttgaggaggacattttaatt

SEQ ID NO: 5684278 - DNA, 25 bp, Homo sapien
tttcctgagtcaaagggtatgtgca

SEQ ID NO: 5684279 - DNA, 25 bp, Homo sapien
gatttttataggctagattcttaaa

SEQ ID NO: 5684280 - DNA, 25 bp, Homo sapien
gattcttaaaaggatttcctgagtc

SEQ ID NO: 5684281 - DNA, 25 bp, Homo sapien
gaatctagcctataaaaatccttgc

SEQ ID NO: 5684282 - DNA, 25 bp, Homo sapien
caggaaatccttttaagaatctagc

SEQ ID NO: 5684283 - DNA, 25 bp, Homo sapien
aatgcacataccctttgactcagga

SEQ ID NO: 5684284 - DNA, 25 bp, Homo sapien
cctataaaaatccttgcacatgtgc

SEQ ID NO: 5684285 - DNA, 25 bp, Homo sapien
aattaaaatgtcctcctcaaacttg

SEQ ID NO: 5684286 - DNA, 25 bp, Homo sapien
cataccctttgactcaggaaatcct

SEQ ID NO: 5684287 - DNA, 25 bp, Homo sapien
ggttaaggggctgaggatgtgagaa

SEQ ID NO: 5684288 - DNA, 25 bp, Homo sapien
gttaaggggctgaggatgtgagaag

SEQ ID NO: 5684289 - DNA, 25 bp, Homo sapien
cttctcacatcctcagccccttaac

SEQ ID NO: 5684290 - DNA, 25 bp, Homo sapien
ttctcacatcctcagccccttaacc

SEQ ID NO: 5684291 - DNA, 25 bp, Homo sapien
tgtgagaaggatgcatcgaagagac

SEQ ID NO: 5684292 - DNA, 25 bp, Homo sapien
gagtcaggaacagcctctgggcact

SEQ ID NO: 5684293 - DNA, 25 bp, Homo sapien
cagcctctgggcacttcaaacttgg

SEQ ID NO: 5684294 - DNA, 25 bp, Homo sapien
ctgggcacttcaaacttggttaagg

SEQ ID NO: 5684295 - DNA, 25 bp, Homo sapien
gatgcatcgaagagaccaagaaagg

SEQ ID NO: 5684296 - DNA, 25 bp, Homo sapien
taaattagagaagagagtcaggaac

SEQ ID NO: 5684297 - DNA, 25 bp, Homo sapien
gctgttcctgactctcttctctaat

SEQ ID NO: 5684298 - DNA, 25 bp, Homo sapien
tcctcagccccttaaccaagtttga

SEQ ID NO: 5684299 - DNA, 25 bp, Homo sapien
gaagtgcccagaggctgttcctgac

SEQ ID NO: 5684300 - DNA, 25 bp, Homo sapien
cctttcttggtctcttcgatgcatc

SEQ ID NO: 5684301 - DNA, 25 bp, Homo sapien
ggtctcttcgatgcatccttctcac

SEQ ID NO: 5684302 - DNA, 25 bp, Homo sapien
taaccaagtttgaagtgcccagagg

SEQ ID NO: 5684303 - DNA, 25 bp, Homo sapien
cagaagcatggcataatcttattta

SEQ ID NO: 5684304 - DNA, 25 bp, Homo sapien
attcttgataatagactttggccag

SEQ ID NO: 5684305 - DNA, 25 bp, Homo sapien
gaagcatggcataatcttatttaca

SEQ ID NO: 5684306 - DNA, 25 bp, Homo sapien
tgagcagaagcatggcataatctta

SEQ ID NO: 5684307 - DNA, 25 bp, Homo sapien
gcagaagcatggcataatcttattt

SEQ ID NO: 5684308 - DNA, 25 bp, Homo sapien
gagcagaagcatggcataatcttat

SEQ ID NO: 5684309 - DNA, 25 bp, Homo sapien
tgtaaataagattatgccatgcttc

SEQ ID NO: 5684310 - DNA, 25 bp, Homo sapien
ataagattatgccatgcttctgctc

SEQ ID NO: 5684311 - DNA, 25 bp, Homo sapien
ctggccaaagtctattatcaagaat

SEQ ID NO: 5684312 - DNA, 25 bp, Homo sapien
aaataagattatgccatgcttctgc

SEQ ID NO: 5684313 - DNA, 25 bp, Homo sapien
taagattatgccatgcttctgctca

SEQ ID NO: 5684314 - DNA, 25 bp, Homo sapien
taaataagattatgccatgcttctg

SEQ ID NO: 5684315 - DNA, 25 bp, Homo sapien
aagggaggtaggcatgtgcctgatg

SEQ ID NO: 5684316 - DNA, 25 bp, Homo sapien
gaggtaggcatgtgcctgatgtcgt

SEQ ID NO: 5684317 - DNA, 25 bp, Homo sapien
gcatgtgcctgatgtcgtgggggaa

SEQ ID NO: 5684318 - DNA, 25 bp, Homo sapien
gggaggtaggcatgtgcctgatgtc

SEQ ID NO: 5684319 - DNA, 25 bp, Homo sapien
gtaggcatgtgcctgatgtcgtggg

SEQ ID NO: 5684320 - DNA, 25 bp, Homo sapien
cctgatgtcgtgggggaagaacaat

SEQ ID NO: 5684321 - DNA, 25 bp, Homo sapien
ccccacgacatcaggcacatgccta

SEQ ID NO: 5684322 - DNA, 25 bp, Homo sapien
gacatcaggcacatgcctacctccc

SEQ ID NO: 5684323 - DNA, 25 bp, Homo sapien
catcaggcacatgcctacctccctt

SEQ ID NO: 5684324 - DNA, 25 bp, Homo sapien
cccacgacatcaggcacatgcctac

SEQ ID NO: 5684325 - DNA, 25 bp, Homo sapien
cacgacatcaggcacatgcctacct

SEQ ID NO: 5684326 - DNA, 25 bp, Homo sapien
attgttcttcccccacgacatcagg

SEQ ID NO: 5684327 - DNA, 25 bp, Homo sapien
gcaagggagagtgggagatgaagtc

SEQ ID NO: 5684328 - DNA, 25 bp, Homo sapien
gaagaacaatgtggctggaatgaaa

SEQ ID NO: 5684329 - DNA, 25 bp, Homo sapien
gagatgaagtcacagaaggtgacgg

SEQ ID NO: 5684330 - DNA, 25 bp, Homo sapien
tggaatgaaataagcaagggagagt

SEQ ID NO: 5684331 - DNA, 25 bp, Homo sapien
caatgtggctggaatgaaataagca

SEQ ID NO: 5684332 - DNA, 25 bp, Homo sapien
gtaggcatgtgcctgatgtcgtggg

SEQ ID NO: 5684333 - DNA, 25 bp, Homo sapien
tgcttatttcattccagccacattg

SEQ ID NO: 5684334 - DNA, 25 bp, Homo sapien
tatttcattccagccacattgttct

SEQ ID NO: 5684335 - DNA, 25 bp, Homo sapien
ctctcccttgcttatttcattccag

SEQ ID NO: 5684336 - DNA, 25 bp, Homo sapien
cacgacatcaggcacatgcctacct

SEQ ID NO: 5684337 - DNA, 25 bp, Homo sapien
attgttcttcccccacgacatcagg

SEQ ID NO: 5684338 - DNA, 25 bp, Homo sapien
gacttcatctcccactctcccttgc

SEQ ID NO: 5684339 - DNA, 25 bp, Homo sapien
cttctcattgtgtgtcactatatat

SEQ ID NO: 5684340 - DNA, 25 bp, Homo sapien
gtgtcactatatatagatttacttc

SEQ ID NO: 5684341 - DNA, 25 bp, Homo sapien
ttccttctcattgtgtgtcactata

SEQ ID NO: 5684342 - DNA, 25 bp, Homo sapien
tccttctcattgtgtgtcactatat

SEQ ID NO: 5684343 - DNA, 25 bp, Homo sapien
ttttccttctcattgtgtgtcacta

SEQ ID NO: 5684344 - DNA, 25 bp, Homo sapien
ccttctcattgtgtgtcactatata

SEQ ID NO: 5684345 - DNA, 25 bp, Homo sapien
atatatagtgacacacaatgagaag

SEQ ID NO: 5684346 - DNA, 25 bp, Homo sapien
tagtgacacacaatgagaaggaaaa

SEQ ID NO: 5684347 - DNA, 25 bp, Homo sapien
gaagtaaatctatatatagtgacac

SEQ ID NO: 5684348 - DNA, 25 bp, Homo sapien
atatagtgacacacaatgagaagga

SEQ ID NO: 5684349 - DNA, 25 bp, Homo sapien
tatatagtgacacacaatgagaagg

SEQ ID NO: 5684350 - DNA, 25 bp, Homo sapien
tatagtgacacacaatgagaaggaa

SEQ ID NO: 5684351 - DNA, 25 bp, Homo sapien
gtgtcactatatatagatttacttc

SEQ ID NO: 5684352 - DNA, 25 bp, Homo sapien
ttttccttctcattgtgtgtcacta

SEQ ID NO: 5684353 - DNA, 25 bp, Homo sapien
ccttctcattgtgtgtcactatata

SEQ ID NO: 5684354 - DNA, 25 bp, Homo sapien
tatacaatgttctctgttctctgac

SEQ ID NO: 5684355 - DNA, 25 bp, Homo sapien
tttttagaagacatgtaatattctc

SEQ ID NO: 5684356 - DNA, 25 bp, Homo sapien
tctgttctctgactttttccttctc

SEQ ID NO: 5684357 - DNA, 25 bp, Homo sapien
tacttactaccatgctttcagtgtt

SEQ ID NO: 5684358 - DNA, 25 bp, Homo sapien
tcaccctaacctgttctaacaataa

SEQ ID NO: 5684359 - DNA, 25 bp, Homo sapien
actaccatgctttcagtgttcaccc

SEQ ID NO: 5684360 - DNA, 25 bp, Homo sapien
tactaccatgctttcagtgttcacc

SEQ ID NO: 5684361 - DNA, 25 bp, Homo sapien
cagtgttcaccctaacctgttctaa

SEQ ID NO: 5684362 - DNA, 25 bp, Homo sapien
tgttcaccctaacctgttctaacaa

SEQ ID NO: 5684363 - DNA, 25 bp, Homo sapien
acactgaaagcatggtagtaagtaa

SEQ ID NO: 5684364 - DNA, 25 bp, Homo sapien
gggtgaacactgaaagcatggtagt

SEQ ID NO: 5684365 - DNA, 25 bp, Homo sapien
tgttagaacaggttagggtgaacac

SEQ ID NO: 5684366 - DNA, 25 bp, Homo sapien
tgaacactgaaagcatggtagtaag

SEQ ID NO: 5684367 - DNA, 25 bp, Homo sapien
ttagaacaggttagggtgaacactg

SEQ ID NO: 5684368 - DNA, 25 bp, Homo sapien
tattgttagaacaggttagggtgaa

SEQ ID NO: 5684369 - DNA, 25 bp, Homo sapien
ttttaaacagaggagtaccatgacc

SEQ ID NO: 5684370 - DNA, 25 bp, Homo sapien
ggaactgttgcagaattttaaacag

SEQ ID NO: 5684371 - DNA, 25 bp, Homo sapien
atgaccagactgtttaaagcatatt

SEQ ID NO: 5684372 - DNA, 25 bp, Homo sapien
gaattttaaacagaggagtaccatg

SEQ ID NO: 5684373 - DNA, 25 bp, Homo sapien
gcagaattttaaacagaggagtacc

SEQ ID NO: 5684374 - DNA, 25 bp, Homo sapien
tgttgcagaattttaaacagaggag

SEQ ID NO: 5684375 - DNA, 25 bp, Homo sapien
ctgtttaaaattctgcaacagttcc

SEQ ID NO: 5684376 - DNA, 25 bp, Homo sapien
aatatgctttaaacagtctggtcat

SEQ ID NO: 5684377 - DNA, 25 bp, Homo sapien
ggtcatggtactcctctgtttaaaa

SEQ ID NO: 5684378 - DNA, 25 bp, Homo sapien
catggtactcctctgtttaaaattc

SEQ ID NO: 5684379 - DNA, 25 bp, Homo sapien
tcctctgtttaaaattctgcaacag

SEQ ID NO: 5684380 - DNA, 25 bp, Homo sapien
ggtactcctctgtttaaaattctgc

SEQ ID NO: 5684381 - DNA, 25 bp, Homo sapien
taggcagacaagcaagggccacatc

SEQ ID NO: 5684382 - DNA, 25 bp, Homo sapien
ggttaggcagacaagcaagggccac

SEQ ID NO: 5684383 - DNA, 25 bp, Homo sapien
ccacatcataatgggccttgcatct

SEQ ID NO: 5684384 - DNA, 25 bp, Homo sapien
caagcaagggccacatcataatggg

SEQ ID NO: 5684385 - DNA, 25 bp, Homo sapien
tgcatctacgctgaggggtttggaa

SEQ ID NO: 5684386 - DNA, 25 bp, Homo sapien
gcaagggccacatcataatgggcct

SEQ ID NO: 5684387 - DNA, 25 bp, Homo sapien
gatgtggcccttgcttgtctgccta

SEQ ID NO: 5684388 - DNA, 25 bp, Homo sapien
ttccaaacccctcagcgtagatgca

SEQ ID NO: 5684389 - DNA, 25 bp, Homo sapien
cacatggaagacagttccaaacccc

SEQ ID NO: 5684390 - DNA, 25 bp, Homo sapien
aaacccctcagcgtagatgcaaggc

SEQ ID NO: 5684391 - DNA, 25 bp, Homo sapien
cccattatgatgtggcccttgcttg

SEQ ID NO: 5684392 - DNA, 25 bp, Homo sapien
gatgcaaggcccattatgatgtggc

SEQ ID NO: 5684393 - DNA, 25 bp, Homo sapien
agagtgagagagcacggcacatttg

SEQ ID NO: 5684394 - DNA, 25 bp, Homo sapien
tttcaggcttagagaatcacacagg

SEQ ID NO: 5684395 - DNA, 25 bp, Homo sapien
tcacacaggtgaaagttgagagtga

SEQ ID NO: 5684396 - DNA, 25 bp, Homo sapien
ggccacagctctaggattggaagag

SEQ ID NO: 5684397 - DNA, 25 bp, Homo sapien
ccatcatggccacagctctaggatt

SEQ ID NO: 5684398 - DNA, 25 bp, Homo sapien
gagagcacggcacatttggaaaact

SEQ ID NO: 5684399 - DNA, 25 bp, Homo sapien
tcttccaatcctagagctgtggcca

SEQ ID NO: 5684400 - DNA, 25 bp, Homo sapien
caaatgtgccgtgctctctcactct

SEQ ID NO: 5684401 - DNA, 25 bp, Homo sapien
agttttccaaatgtgccgtgctctc

SEQ ID NO: 5684402 - DNA, 25 bp, Homo sapien
cactctcaactttcacctgtgtgat

SEQ ID NO: 5684403 - DNA, 25 bp, Homo sapien
aatcctagagctgtggccatgatgg

SEQ ID NO: 5684404 - DNA, 25 bp, Homo sapien
cctgtgtgattctctaagcctgaaa

SEQ ID NO: 5684405 - DNA, 25 bp, Homo sapien
gataagcagcgtttgaaaaaagtgg

SEQ ID NO: 5684406 - DNA, 25 bp, Homo sapien
tacctccaaagataagcagcgtttg

SEQ ID NO: 5684407 - DNA, 25 bp, Homo sapien
ataagcagcgtttgaaaaaagtgga

SEQ ID NO: 5684408 - DNA, 25 bp, Homo sapien
ctccaaagataagcagcgtttgaaa

SEQ ID NO: 5684409 - DNA, 25 bp, Homo sapien
ccaaagataagcagcgtttgaaaaa

SEQ ID NO: 5684410 - DNA, 25 bp, Homo sapien
cctccaaagataagcagcgtttgaa

SEQ ID NO: 5684411 - DNA, 25 bp, Homo sapien
cttcactggccgaactggaacctat

SEQ ID NO: 5684412 - DNA, 25 bp, Homo sapien
ttcactggccgaactggaacctatt

SEQ ID NO: 5684413 - DNA, 25 bp, Homo sapien
aaggagagcatgcagagaagtcttc

SEQ ID NO: 5684414 - DNA, 25 bp, Homo sapien
tcttcactggccgaactggaaccta

SEQ ID NO: 5684415 - DNA, 25 bp, Homo sapien
aggagagcatgcagagaagtcttca

SEQ ID NO: 5684416 - DNA, 25 bp, Homo sapien
tgaagacttctctgcatgctctcct

SEQ ID NO: 5684417 - DNA, 25 bp, Homo sapien
ataggttccagttcggccagtgaag

SEQ ID NO: 5684418 - DNA, 25 bp, Homo sapien
aataggttccagttcggccagtgaa

SEQ ID NO: 5684419 - DNA, 25 bp, Homo sapien
gaagacttctctgcatgctctcctt

SEQ ID NO: 5684420 - DNA, 25 bp, Homo sapien
taggttccagttcggccagtgaaga

SEQ ID NO: 5684421 - DNA, 25 bp, Homo sapien
caaacgctgcttatctttggaggta

SEQ ID NO: 5684422 - DNA, 25 bp, Homo sapien
tttcaaacgctgcttatctttggag

SEQ ID NO: 5684423 - DNA, 25 bp, Homo sapien
tttttcaaacgctgcttatctttgg

SEQ ID NO: 5684424 - DNA, 25 bp, Homo sapien
cacttttttcaaacgctgcttatct

SEQ ID NO: 5684425 - DNA, 25 bp, Homo sapien
tccacttttttcaaacgctgcttat

SEQ ID NO: 5684426 - DNA, 25 bp, Homo sapien
ttcaaacgctgcttatctttggagg

SEQ ID NO: 5684427 - DNA, 25 bp, Homo sapien
ttatagttgttgtatttgtccagac

SEQ ID NO: 5684428 - DNA, 25 bp, Homo sapien
tagtgttttaagtgacatgacagct

SEQ ID NO: 5684429 - DNA, 25 bp, Homo sapien
taagtgacatgacagcttatagttg

SEQ ID NO: 5684430 - DNA, 25 bp, Homo sapien
ttgttgtatttgtccagacagagag

SEQ ID NO: 5684431 - DNA, 25 bp, Homo sapien
tagttgttgtatttgtccagacaga

SEQ ID NO: 5684432 - DNA, 25 bp, Homo sapien
gatagtgttttaagtgacatgacag

SEQ ID NO: 5684433 - DNA, 25 bp, Homo sapien
ctctctgtctggacaaatacaacaa

SEQ ID NO: 5684434 - DNA, 25 bp, Homo sapien
gtctggacaaatacaacaactataa

SEQ ID NO: 5684435 - DNA, 25 bp, Homo sapien
taagctgtcatgtcacttaaaacac

SEQ ID NO: 5684436 - DNA, 25 bp, Homo sapien
caactataagctgtcatgtcactta

SEQ ID NO: 5684437 - DNA, 25 bp, Homo sapien
gctgtcatgtcacttaaaacactat

SEQ ID NO: 5684438 - DNA, 25 bp, Homo sapien
tctgtctggacaaatacaacaacta

SEQ ID NO: 5684439 - DNA, 25 bp, Homo sapien
ggtcagttatcctgtagagtactgt

SEQ ID NO: 5684440 - DNA, 25 bp, Homo sapien
catgctgttgacttgttatggaaac

SEQ ID NO: 5684441 - DNA, 25 bp, Homo sapien
ttttttgcttcatgctgttgacttg

SEQ ID NO: 5684442 - DNA, 25 bp, Homo sapien
tgtagagtactgtatttctcactcc

SEQ ID NO: 5684443 - DNA, 25 bp, Homo sapien
cctggtcagttatcctgtagagtac

SEQ ID NO: 5684444 - DNA, 25 bp, Homo sapien
tatcctgtagagtactgtatttctc

SEQ ID NO: 5684445 - DNA, 25 bp, Homo sapien
tactctacaggataactgaccaggt

SEQ ID NO: 5684446 - DNA, 25 bp, Homo sapien
ggagtgagaaatacagtactctaca

SEQ ID NO: 5684447 - DNA, 25 bp, Homo sapien
caagtcaacagcatgaagcaaaaaa

SEQ ID NO: 5684448 - DNA, 25 bp, Homo sapien
gaaatacagtactctacaggataac

SEQ ID NO: 5684449 - DNA, 25 bp, Homo sapien
ggtttccataacaagtcaacagcat

SEQ ID NO: 5684450 - DNA, 25 bp, Homo sapien
cataacaagtcaacagcatgaagca

SEQ ID NO: 5684451 - DNA, 25 bp, Homo sapien
ttgacattagtcttgggtgtttgtt

SEQ ID NO: 5684452 - DNA, 25 bp, Homo sapien
tgacattagtcttgggtgtttgttt

SEQ ID NO: 5684453 - DNA, 25 bp, Homo sapien
tttgacattagtcttgggtgtttgt

SEQ ID NO: 5684454 - DNA, 25 bp, Homo sapien
gacattagtcttgggtgtttgttta

SEQ ID NO: 5684455 - DNA, 25 bp, Homo sapien
aacaaacacccaagactaatgtcaa

SEQ ID NO: 5684456 - DNA, 25 bp, Homo sapien
taaacaaacacccaagactaatgtc

SEQ ID NO: 5684457 - DNA, 25 bp, Homo sapien
acaaacacccaagactaatgtcaaa

SEQ ID NO: 5684458 - DNA, 25 bp, Homo sapien
aaacaaacacccaagactaatgtca

SEQ ID NO: 5684459 - DNA, 25 bp, Homo sapien
ttttatttgacattagtcttgggtg

SEQ ID NO: 5684460 - DNA, 25 bp, Homo sapien
gcctgcatttttaagggccaggtaa

SEQ ID NO: 5684461 - DNA, 25 bp, Homo sapien
tattttgcctgcatttttaagggcc

SEQ ID NO: 5684462 - DNA, 25 bp, Homo sapien
tttgcctgcatttttaagggccagg

SEQ ID NO: 5684463 - DNA, 25 bp, Homo sapien
gacattagtcttgggtgtttgttta

SEQ ID NO: 5684464 - DNA, 25 bp, Homo sapien
tctttgtgttgcatatgtctttttt

SEQ ID NO: 5684465 - DNA, 25 bp, Homo sapien
ggcccttaaaaatgcaggcaaaata

SEQ ID NO: 5684466 - DNA, 25 bp, Homo sapien
ttacctggcccttaaaaatgcaggc

SEQ ID NO: 5684467 - DNA, 25 bp, Homo sapien
taaacaaacacccaagactaatgtc

SEQ ID NO: 5684468 - DNA, 25 bp, Homo sapien
acaaacacccaagactaatgtcaaa

SEQ ID NO: 5684469 - DNA, 25 bp, Homo sapien
aaaaaagacatatgcaacacaaaga

SEQ ID NO: 5684470 - DNA, 25 bp, Homo sapien
aataaacaaacacccaagactaatg

SEQ ID NO: 5684471 - DNA, 25 bp, Homo sapien
ttgtttcccagaagtgaccacagtt

SEQ ID NO: 5684472 - DNA, 25 bp, Homo sapien
aagaaaacttacatgcatataccat

SEQ ID NO: 5684473 - DNA, 25 bp, Homo sapien
agaaaacttacatgcatataccata

SEQ ID NO: 5684474 - DNA, 25 bp, Homo sapien
atggtatatgcatgtaagttttctt

SEQ ID NO: 5684475 - DNA, 25 bp, Homo sapien
aactgtggtcacttctgggaaacaa

SEQ ID NO: 5684476 - DNA, 25 bp, Homo sapien
tatggtatatgcatgtaagttttct

SEQ ID NO: 5684477 - DNA, 25 bp, Homo sapien
ttgtttcccagaagtgaccacagtt

SEQ ID NO: 5684478 - DNA, 25 bp, Homo sapien
cactttcttgctttttgtttcccag

SEQ ID NO: 5684479 - DNA, 25 bp, Homo sapien
cagttaacagcttcttttggatcct

SEQ ID NO: 5684480 - DNA, 25 bp, Homo sapien
ccagaagtgaccacagttaacagct

SEQ ID NO: 5684481 - DNA, 25 bp, Homo sapien
aagaaaacttacatgcatataccat

SEQ ID NO: 5684482 - DNA, 25 bp, Homo sapien
acagcttcttttggatcctttaaga

SEQ ID NO: 5684483 - DNA, 25 bp, Homo sapien
tatggtatatgcatgtaagttttct

SEQ ID NO: 5684484 - DNA, 25 bp, Homo sapien
tcttaaaggatccaaaagaagctgt

SEQ ID NO: 5684485 - DNA, 25 bp, Homo sapien
aactgtggtcacttctgggaaacaa

SEQ ID NO: 5684486 - DNA, 25 bp, Homo sapien
catgtaagttttcttaaaggatcca

SEQ ID NO: 5684487 - DNA, 25 bp, Homo sapien
caaaagaagctgttaactgtggtca

SEQ ID NO: 5684488 - DNA, 25 bp, Homo sapien
ctgggaaacaaaaagcaagaaagtg

SEQ ID NO: 5684489 - DNA, 25 bp, Homo sapien
caaatccactgatgggatttgtgag

SEQ ID NO: 5684490 - DNA, 25 bp, Homo sapien
tcctccattcgatttgagttccatt

SEQ ID NO: 5684491 - DNA, 25 bp, Homo sapien
tgagttccattctgccgaactttac

SEQ ID NO: 5684492 - DNA, 25 bp, Homo sapien
ccattctgccgaactttaccactta

SEQ ID NO: 5684493 - DNA, 25 bp, Homo sapien
gatttgtgagggatgttcctcctcc

SEQ ID NO: 5684494 - DNA, 25 bp, Homo sapien
gttcctcctccattcgatttgagtt

SEQ ID NO: 5684495 - DNA, 25 bp, Homo sapien
cctcacaaatcccatcagtggattt

SEQ ID NO: 5684496 - DNA, 25 bp, Homo sapien
aatggaactcaaatcgaatggagga

SEQ ID NO: 5684497 - DNA, 25 bp, Homo sapien
taagtggtaaagttcggcagaatgg

SEQ ID NO: 5684498 - DNA, 25 bp, Homo sapien
taaagttcggcagaatggaactcaa

SEQ ID NO: 5684499 - DNA, 25 bp, Homo sapien
ggaggaggaacatccctcacaaatc

SEQ ID NO: 5684500 - DNA, 25 bp, Homo sapien
aactcaaatcgaatggaggaggaac

SEQ ID NO: 5684501 - DNA, 25 bp, Homo sapien
aatttacagtagagtagtatgttca

SEQ ID NO: 5684502 - DNA, 25 bp, Homo sapien
gaatttacagtagagtagtatgttc

SEQ ID NO: 5684503 - DNA, 25 bp, Homo sapien
atttacagtagagtagtatgttcag

SEQ ID NO: 5684504 - DNA, 25 bp, Homo sapien
caattttgagtctggtgttgtagaa

SEQ ID NO: 5684505 - DNA, 25 bp, Homo sapien
gtgcagctgatggatcaggtgaaat

SEQ ID NO: 5684506 - DNA, 25 bp, Homo sapien
tttacagtagagtagtatgttcagt

SEQ ID NO: 5684507 - DNA, 25 bp, Homo sapien
tgaacatactactctactgtaaatt

SEQ ID NO: 5684508 - DNA, 25 bp, Homo sapien
ctgaacatactactctactgtaaat

SEQ ID NO: 5684509 - DNA, 25 bp, Homo sapien
atttcacctgatccatcagctgcac

SEQ ID NO: 5684510 - DNA, 25 bp, Homo sapien
gaacatactactctactgtaaattc

SEQ ID NO: 5684511 - DNA, 25 bp, Homo sapien
actgaacatactactctactgtaaa

SEQ ID NO: 5684512 - DNA, 25 bp, Homo sapien
ttctacaacaccagactcaaaattg

SEQ ID NO: 5684513 - DNA, 25 bp, Homo sapien
gaggagtgacatgatctgacttagg

SEQ ID NO: 5684514 - DNA, 25 bp, Homo sapien
tgatctgacttaggtttgttttatt

SEQ ID NO: 5684515 - DNA, 25 bp, Homo sapien
tcttttgtttcctttcctgccctgc

SEQ ID NO: 5684516 - DNA, 25 bp, Homo sapien
ttgtttcctttcctgccctgctctg

SEQ ID NO: 5684517 - DNA, 25 bp, Homo sapien
ggagtgacatgatctgacttaggtt

SEQ ID NO: 5684518 - DNA, 25 bp, Homo sapien
catgatctgacttaggtttgtttta

SEQ ID NO: 5684519 - DNA, 25 bp, Homo sapien
gcagggcaggaaaggaaacaaaaga

SEQ ID NO: 5684520 - DNA, 25 bp, Homo sapien
cagagcagggcaggaaaggaaacaa

SEQ ID NO: 5684521 - DNA, 25 bp, Homo sapien
aaaacaaacctaagtcagatcatgt

SEQ ID NO: 5684522 - DNA, 25 bp, Homo sapien
aataaaacaaacctaagtcagatca

SEQ ID NO: 5684523 - DNA, 25 bp, Homo sapien
taaaacaaacctaagtcagatcatg

SEQ ID NO: 5684524 - DNA, 25 bp, Homo sapien
aacctaagtcagatcatgtcactcc

SEQ ID NO: 5684525 - DNA, 25 bp, Homo sapien
aataaaattctcagtcaaaagatac

SEQ ID NO: 5684526 - DNA, 25 bp, Homo sapien
tctcagtcaaaagatactacagctg

SEQ ID NO: 5684527 - DNA, 25 bp, Homo sapien
gatagtgacaagtgtgaataacggt

SEQ ID NO: 5684528 - DNA, 25 bp, Homo sapien
ctcagtcaaaagatactacagctgc

SEQ ID NO: 5684529 - DNA, 25 bp, Homo sapien
gccttcagttagctgtgttgtatgt

SEQ ID NO: 5684530 - DNA, 25 bp, Homo sapien
gacaagtgtgaataacggtttttca

SEQ ID NO: 5684531 - DNA, 25 bp, Homo sapien
gcagctgtagtatcttttgactgag

SEQ ID NO: 5684532 - DNA, 25 bp, Homo sapien
gaaaaaccgttattcacacttgtca

SEQ ID NO: 5684533 - DNA, 25 bp, Homo sapien
cagctgtagtatcttttgactgaga

SEQ ID NO: 5684534 - DNA, 25 bp, Homo sapien
cgttattcacacttgtcactatctt

SEQ ID NO: 5684535 - DNA, 25 bp, Homo sapien
acatacaacacagctaactgaaggc

SEQ ID NO: 5684536 - DNA, 25 bp, Homo sapien
tgaaaaaccgttattcacacttgtc

SEQ ID NO: 5684537 - DNA, 25 bp, Homo sapien
gattagccctattgaagtacagaga

SEQ ID NO: 5684538 - DNA, 25 bp, Homo sapien
ttagccctattgaagtacagagaaa

SEQ ID NO: 5684539 - DNA, 25 bp, Homo sapien
aacagattagccctattgaagtaca

SEQ ID NO: 5684540 - DNA, 25 bp, Homo sapien
cagattagccctattgaagtacaga

SEQ ID NO: 5684541 - DNA, 25 bp, Homo sapien
agccctattgaagtacagagaaatg

SEQ ID NO: 5684542 - DNA, 25 bp, Homo sapien
aaaacaacagattagccctattgaa

SEQ ID NO: 5684543 - DNA, 25 bp, Homo sapien
catttctctgtacttcaatagggct

SEQ ID NO: 5684544 - DNA, 25 bp, Homo sapien
tctgtacttcaatagggctaatctg

SEQ ID NO: 5684545 - DNA, 25 bp, Homo sapien
tttctctgtacttcaatagggctaa

SEQ ID NO: 5684546 - DNA, 25 bp, Homo sapien
tctctgtacttcaatagggctaatc

SEQ ID NO: 5684547 - DNA, 25 bp, Homo sapien
tgtacttcaatagggctaatctgtt

SEQ ID NO: 5684548 - DNA, 25 bp, Homo sapien
ttcaatagggctaatctgttgtttt

SEQ ID NO: 5684549 - DNA, 25 bp, Homo sapien
aaattttgtgggtacataggtgtat

SEQ ID NO: 5684550 - DNA, 25 bp, Homo sapien
gcatgcaatatgtaagaatcacatg

SEQ ID NO: 5684551 - DNA, 25 bp, Homo sapien
aattttgtgggtacataggtgtata

SEQ ID NO: 5684552 - DNA, 25 bp, Homo sapien
catgcaatatgtaagaatcacatgg

SEQ ID NO: 5684553 - DNA, 25 bp, Homo sapien
attttgtgggtacataggtgtatat

SEQ ID NO: 5684554 - DNA, 25 bp, Homo sapien
ttgtgggtacataggtgtatatatt

SEQ ID NO: 5684555 - DNA, 25 bp, Homo sapien
ctgtatcaaaacatctcgtgtaccc

SEQ ID NO: 5684556 - DNA, 25 bp, Homo sapien
catgtgattcttacatattgcatgc

SEQ ID NO: 5684557 - DNA, 25 bp, Homo sapien
tatacacctatgtacccacaaaatt

SEQ ID NO: 5684558 - DNA, 25 bp, Homo sapien
aatatatacacctatgtacccacaa

SEQ ID NO: 5684559 - DNA, 25 bp, Homo sapien
atatacacctatgtacccacaaaat

SEQ ID NO: 5684560 - DNA, 25 bp, Homo sapien
ccatgtgattcttacatattgcatg

SEQ ID NO: 5684561 - DNA, 25 bp, Homo sapien
tccacttattaacctattaggactg

SEQ ID NO: 5684562 - DNA, 25 bp, Homo sapien
gctatccacttattaacctattagg

SEQ ID NO: 5684563 - DNA, 25 bp, Homo sapien
tatttgtcgcaatgagatgtttgct

SEQ ID NO: 5684564 - DNA, 25 bp, Homo sapien
gatgtttgctatccacttattaacc

SEQ ID NO: 5684565 - DNA, 25 bp, Homo sapien
ttattaacctattaggactgtctga

SEQ ID NO: 5684566 - DNA, 25 bp, Homo sapien
aagatgtatttgtcgcaatgagatg

SEQ ID NO: 5684567 - DNA, 25 bp, Homo sapien
catctcattgcgacaaatacatctt

SEQ ID NO: 5684568 - DNA, 25 bp, Homo sapien
gcaaacatctcattgcgacaaatac

SEQ ID NO: 5684569 - DNA, 25 bp, Homo sapien
ggttaataagtggatagcaaacatc

SEQ ID NO: 5684570 - DNA, 25 bp, Homo sapien
cagtcctaataggttaataagtgga

SEQ ID NO: 5684571 - DNA, 25 bp, Homo sapien
cctaataggttaataagtggatagc

SEQ ID NO: 5684572 - DNA, 25 bp, Homo sapien
tcagacagtcctaataggttaataa

SEQ ID NO: 5684573 - DNA, 25 bp, Homo sapien
gtagtgggtaatccaagagagcagt

SEQ ID NO: 5684574 - DNA, 25 bp, Homo sapien
gctgaaatctgtagtgggtaatcca

SEQ ID NO: 5684575 - DNA, 25 bp, Homo sapien
gggctaatttcgacctttagctgaa

SEQ ID NO: 5684576 - DNA, 25 bp, Homo sapien
tgagatagtgggctaatttcgacct

SEQ ID NO: 5684577 - DNA, 25 bp, Homo sapien
tagctcatctgagatagtgggctaa

SEQ ID NO: 5684578 - DNA, 25 bp, Homo sapien
ttttcttgatgacccggataagttc

SEQ ID NO: 5684579 - DNA, 25 bp, Homo sapien
taaaggtcgaaattagcccactatc

SEQ ID NO: 5684580 - DNA, 25 bp, Homo sapien
tgctctcttggattacccactacag

SEQ ID NO: 5684581 - DNA, 25 bp, Homo sapien
ggattacccactacagatttcagct

SEQ ID NO: 5684582 - DNA, 25 bp, Homo sapien
aattagcccactatctcagatgagc

SEQ ID NO: 5684583 - DNA, 25 bp, Homo sapien
ttcagctaaaggtcgaaattagccc

SEQ ID NO: 5684584 - DNA, 25 bp, Homo sapien
gaacttatccgggtcatcaagaaaa

SEQ ID NO: 5684585 - DNA, 25 bp, Homo sapien
tgttttcaatcttgcttagggagag

SEQ ID NO: 5684586 - DNA, 25 bp, Homo sapien
tcagctgttttcaatcttgcttagg

SEQ ID NO: 5684587 - DNA, 25 bp, Homo sapien
gctgttttcaatcttgcttagggag

SEQ ID NO: 5684588 - DNA, 25 bp, Homo sapien
cagctgttttcaatcttgcttaggg

SEQ ID NO: 5684589 - DNA, 25 bp, Homo sapien
ctgttttcaatcttgcttagggaga

SEQ ID NO: 5684590 - DNA, 25 bp, Homo sapien
agctgttttcaatcttgcttaggga

SEQ ID NO: 5684591 - DNA, 25 bp, Homo sapien
ctctccctaagcaagattgaaaaca

SEQ ID NO: 5684592 - DNA, 25 bp, Homo sapien
tctccctaagcaagattgaaaacag

SEQ ID NO: 5684593 - DNA, 25 bp, Homo sapien
ccctaagcaagattgaaaacagctg

SEQ ID NO: 5684594 - DNA, 25 bp, Homo sapien
tccctaagcaagattgaaaacagct

SEQ ID NO: 5684595 - DNA, 25 bp, Homo sapien
cctaagcaagattgaaaacagctga

SEQ ID NO: 5684596 - DNA, 25 bp, Homo sapien
ctccctaagcaagattgaaaacagc

SEQ ID NO: 5684597 - DNA, 25 bp, Homo sapien
gacgcatgcgcttgcgatttcctag

SEQ ID NO: 5684598 - DNA, 25 bp, Homo sapien
caagcctttgttgcgcgtgcgtcgg

SEQ ID NO: 5684599 - DNA, 25 bp, Homo sapien
ttgtggagatgcacccctaccgccc

SEQ ID NO: 5684600 - DNA, 25 bp, Homo sapien
gcatgcgcttgcgatttcctagcac

SEQ ID NO: 5684601 - DNA, 25 bp, Homo sapien
tcggaaggcgactagggacgcatgc

SEQ ID NO: 5684602 - DNA, 25 bp, Homo sapien
taccgcccaagcctttgttgcgcgt

SEQ ID NO: 5684603 - DNA, 25 bp, Homo sapien
atgcgtccctagtcgccttccgacg

SEQ ID NO: 5684604 - DNA, 25 bp, Homo sapien
cacgcgcaacaaaggcttgggcggt

SEQ ID NO: 5684605 - DNA, 25 bp, Homo sapien
acgcacgcgcaacaaaggcttgggc

SEQ ID NO: 5684606 - DNA, 25 bp, Homo sapien
ccgacgcacgcgcaacaaaggcttg

SEQ ID NO: 5684607 - DNA, 25 bp, Homo sapien
gtgctaggaaatcgcaagcgcatgc

SEQ ID NO: 5684608 - DNA, 25 bp, Homo sapien
taggaaatcgcaagcgcatgcgtcc

SEQ ID NO: 5684609 - DNA, 25 bp, Homo sapien
cgaacaataagtgctaggtacacag

SEQ ID NO: 5684610 - DNA, 25 bp, Homo sapien
cttgataggcagaagcacgtgtctt

SEQ ID NO: 5684611 - DNA, 25 bp, Homo sapien
tgctaggtacacagttggtgtctag

SEQ ID NO: 5684612 - DNA, 25 bp, Homo sapien
tgcgacctgaacgaacaataagtgc

SEQ ID NO: 5684613 - DNA, 25 bp, Homo sapien
cacgtgtcttgttgcgacctgaacg

SEQ ID NO: 5684614 - DNA, 25 bp, Homo sapien
catacggcctcccttgataggcaga

SEQ ID NO: 5684615 - DNA, 25 bp, Homo sapien
tagacaccaactgtgtacctagcac

SEQ ID NO: 5684616 - DNA, 25 bp, Homo sapien
aagacacgtgcttctgcctatcaag

SEQ ID NO: 5684617 - DNA, 25 bp, Homo sapien
cctatcaagggaggccgtatgctgg

SEQ ID NO: 5684618 - DNA, 25 bp, Homo sapien
cacttattgttcgttcaggtcgcaa

SEQ ID NO: 5684619 - DNA, 25 bp, Homo sapien
cgttcaggtcgcaacaagacacgtg

SEQ ID NO: 5684620 - DNA, 25 bp, Homo sapien
tacctagcacttattgttcgttcag

SEQ ID NO: 5684621 - DNA, 25 bp, Homo sapien
tccccccactctagtctcctaaaga

SEQ ID NO: 5684622 - DNA, 25 bp, Homo sapien
ggaaattgtttcgtgttgtagccca

SEQ ID NO: 5684623 - DNA, 25 bp, Homo sapien
ttgtttcgtgttgtagcccatttaa

SEQ ID NO: 5684624 - DNA, 25 bp, Homo sapien
tcctcgatggaaattgtttcgtgtt

SEQ ID NO: 5684625 - DNA, 25 bp, Homo sapien
cttttcctcgatggaaattgtttcg

SEQ ID NO: 5684626 - DNA, 25 bp, Homo sapien
gaaattgtttcgtgttgtagcccat

SEQ ID NO: 5684627 - DNA, 25 bp, Homo sapien
tgggctacaacacgaaacaatttcc

SEQ ID NO: 5684628 - DNA, 25 bp, Homo sapien
ttaaatgggctacaacacgaaacaa

SEQ ID NO: 5684629 - DNA, 25 bp, Homo sapien
caacacgaaacaatttccatcgagg

SEQ ID NO: 5684630 - DNA, 25 bp, Homo sapien
gaaacaatttccatcgaggaaaaga

SEQ ID NO: 5684631 - DNA, 25 bp, Homo sapien
cacgaaacaatttccatcgaggaaa

SEQ ID NO: 5684632 - DNA, 25 bp, Homo sapien
taaatgggctacaacacgaaacaat

SEQ ID NO: 5684633 - DNA, 25 bp, Homo sapien
aaacaactgatgagagcctgaggag

SEQ ID NO: 5684634 - DNA, 25 bp, Homo sapien
aatggggaacgctcacggactgtgt

SEQ ID NO: 5684635 - DNA, 25 bp, Homo sapien
gggttgagctttgaaacaactgatg

SEQ ID NO: 5684636 - DNA, 25 bp, Homo sapien
ggagggttgagctttgaaacaactg

SEQ ID NO: 5684637 - DNA, 25 bp, Homo sapien
cggactgtgtggtaagatttggaag

SEQ ID NO: 5684638 - DNA, 25 bp, Homo sapien
ttgagcaatggggaacgctcacgga

SEQ ID NO: 5684639 - DNA, 25 bp, Homo sapien
ctcctcaggctctcatcagttgttt

SEQ ID NO: 5684640 - DNA, 25 bp, Homo sapien
acacagtccgtgagcgttccccatt

SEQ ID NO: 5684641 - DNA, 25 bp, Homo sapien
cttccaaatcttaccacacagtccg

SEQ ID NO: 5684642 - DNA, 25 bp, Homo sapien
tccgtgagcgttccccattgctcaa

SEQ ID NO: 5684643 - DNA, 25 bp, Homo sapien
cagttgtttcaaagctcaaccctcc

SEQ ID NO: 5684644 - DNA, 25 bp, Homo sapien
gtccgtgagcgttccccattgctca

SEQ ID NO: 5684645 - DNA, 25 bp, Homo sapien
tttgggaccttaggcgcttagttga

SEQ ID NO: 5684646 - DNA, 25 bp, Homo sapien
ggaccttaggcgcttagttgatgta

SEQ ID NO: 5684647 - DNA, 25 bp, Homo sapien
gttgatgtatccaagatacttctgc

SEQ ID NO: 5684648 - DNA, 25 bp, Homo sapien
cttaggcgcttagttgatgtatcca

SEQ ID NO: 5684649 - DNA, 25 bp, Homo sapien
ccttaggcgcttagttgatgtatcc

SEQ ID NO: 5684650 - DNA, 25 bp, Homo sapien
ctcctttgggaccttaggcgcttag

SEQ ID NO: 5684651 - DNA, 25 bp, Homo sapien
ctaagcgcctaaggtcccaaaggag

SEQ ID NO: 5684652 - DNA, 25 bp, Homo sapien
gcagaagtatcttggatacatcaac

SEQ ID NO: 5684653 - DNA, 25 bp, Homo sapien
gatacatcaactaagcgcctaaggt

SEQ ID NO: 5684654 - DNA, 25 bp, Homo sapien
caactaagcgcctaaggtcccaaag

SEQ ID NO: 5684655 - DNA, 25 bp, Homo sapien
tggatacatcaactaagcgcctaag

SEQ ID NO: 5684656 - DNA, 25 bp, Homo sapien
tacatcaactaagcgcctaaggtcc

SEQ ID NO: 5684657 - DNA, 25 bp, Homo sapien
ccttcaaggctgaagggtatgcttg

SEQ ID NO: 5684658 - DNA, 25 bp, Homo sapien
tatgtcatggtgagttaggccagtt

SEQ ID NO: 5684659 - DNA, 25 bp, Homo sapien
gtcatggtgagttaggccagttttc

SEQ ID NO: 5684660 - DNA, 25 bp, Homo sapien
aaggctgaagggtatgcttgtgcca

SEQ ID NO: 5684661 - DNA, 25 bp, Homo sapien
ctgaagggtatgcttgtgccactct

SEQ ID NO: 5684662 - DNA, 25 bp, Homo sapien
attttatgtcatggtgagttaggcc

SEQ ID NO: 5684663 - DNA, 25 bp, Homo sapien
agagtggcacaagcatacccttcag

SEQ ID NO: 5684664 - DNA, 25 bp, Homo sapien
ggcctaactcaccatgacataaaat

SEQ ID NO: 5684665 - DNA, 25 bp, Homo sapien
gagtggcacaagcatacccttcagc

SEQ ID NO: 5684666 - DNA, 25 bp, Homo sapien
gaaaactggcctaactcaccatgac

SEQ ID NO: 5684667 - DNA, 25 bp, Homo sapien
tggcacaagcatacccttcagcctt

SEQ ID NO: 5684668 - DNA, 25 bp, Homo sapien
caagcatacccttcagccttgaagg

SEQ ID NO: 5684669 - DNA, 25 bp, Homo sapien
cctttcccagagaatgaaatgcaaa

SEQ ID NO: 5684670 - DNA, 25 bp, Homo sapien
aatgcaaagattggagtcaccatag

SEQ ID NO: 5684671 - DNA, 25 bp, Homo sapien
ctatggtgactccaatctttgcatt

SEQ ID NO: 5684672 - DNA, 25 bp, Homo sapien
tttgcatttcattctctgggaaagg

SEQ ID NO: 5684673 - DNA, 25 bp, Homo sapien
cctttcccagagaatgaaatgcaaa

SEQ ID NO: 5684674 - DNA, 25 bp, Homo sapien
tggagtcaccatagtttgggagaaa

SEQ ID NO: 5684675 - DNA, 25 bp, Homo sapien
tcccagagaatgaaatgcaaagatt

SEQ ID NO: 5684676 - DNA, 25 bp, Homo sapien
aatgcaaagattggagtcaccatag

SEQ ID NO: 5684677 - DNA, 25 bp, Homo sapien
tattcaactgaatgcctttcccaga

SEQ ID NO: 5684678 - DNA, 25 bp, Homo sapien
tcaccatagtttgggagaaaggaag

SEQ ID NO: 5684679 - DNA, 25 bp, Homo sapien
caatctttgcatttcattctctggg

SEQ ID NO: 5684680 - DNA, 25 bp, Homo sapien
cttcctttctcccaaactatggtga

SEQ ID NO: 5684681 - DNA, 25 bp, Homo sapien
ctatggtgactccaatctttgcatt

SEQ ID NO: 5684682 - DNA, 25 bp, Homo sapien
tttctcccaaactatggtgactcca

SEQ ID NO: 5684683 - DNA, 25 bp, Homo sapien
tttgcatttcattctctgggaaagg

SEQ ID NO: 5684684 - DNA, 25 bp, Homo sapien
tctgggaaaggcattcagttgaata

SEQ ID NO: 5684685 - DNA, 25 bp, Homo sapien
cctctttcccattcataggaagcaa

SEQ ID NO: 5684686 - DNA, 25 bp, Homo sapien
aggccctctttcccattcataggaa

SEQ ID NO: 5684687 - DNA, 25 bp, Homo sapien
atcctcaggtaacagataaaggccc

SEQ ID NO: 5684688 - DNA, 25 bp, Homo sapien
gccctctttcccattcataggaagc

SEQ ID NO: 5684689 - DNA, 25 bp, Homo sapien
ggccctctttcccattcataggaag

SEQ ID NO: 5684690 - DNA, 25 bp, Homo sapien
aaggccctctttcccattcatagga

SEQ ID NO: 5684691 - DNA, 25 bp, Homo sapien
ttgcttcctatgaatgggaaagagg

SEQ ID NO: 5684692 - DNA, 25 bp, Homo sapien
gggcctttatctgttacctgaggat

SEQ ID NO: 5684693 - DNA, 25 bp, Homo sapien
cttcctatgaatgggaaagagggcc

SEQ ID NO: 5684694 - DNA, 25 bp, Homo sapien
ttcctatgaatgggaaagagggcct

SEQ ID NO: 5684695 - DNA, 25 bp, Homo sapien
gcttcctatgaatgggaaagagggc

SEQ ID NO: 5684696 - DNA, 25 bp, Homo sapien
tcctatgaatgggaaagagggcctt

SEQ ID NO: 5684697 - DNA, 25 bp, Homo sapien
gaaatgcgaacatgaggctccgaga

SEQ ID NO: 5684698 - DNA, 25 bp, Homo sapien
caatccaataagtccttggcttgac

SEQ ID NO: 5684699 - DNA, 25 bp, Homo sapien
cagaggagaaatgcgaacatgaggc

SEQ ID NO: 5684700 - DNA, 25 bp, Homo sapien
gagaaatgcgaacatgaggctccga

SEQ ID NO: 5684701 - DNA, 25 bp, Homo sapien
tttccagaggagaaatgcgaacatg

SEQ ID NO: 5684702 - DNA, 25 bp, Homo sapien
tgaaggcatagcgtgggttttgaag

SEQ ID NO: 5684703 - DNA, 25 bp, Homo sapien
caagccaaggacttattggattgaa

SEQ ID NO: 5684704 - DNA, 25 bp, Homo sapien
tctcggagcctcatgttcgcatttc

SEQ ID NO: 5684705 - DNA, 25 bp, Homo sapien
cttcaaaacccacgctatgccttca

SEQ ID NO: 5684706 - DNA, 25 bp, Homo sapien
gcctcatgttcgcatttctcctctg

SEQ ID NO: 5684707 - DNA, 25 bp, Homo sapien
catgttcgcatttctcctctggaaa

SEQ ID NO: 5684708 - DNA, 25 bp, Homo sapien
gtcaagccaaggacttattggattg

SEQ ID NO: 5684709 - DNA, 25 bp, Homo sapien
aagagtcttatttcgcggctgtggt

SEQ ID NO: 5684710 - DNA, 25 bp, Homo sapien
ttagggaagagtcttatttcgcggc

SEQ ID NO: 5684711 - DNA, 25 bp, Homo sapien
aaagatgatttagggaagagtctta

SEQ ID NO: 5684712 - DNA, 25 bp, Homo sapien
tgcatagcccagagccttaaagatg

SEQ ID NO: 5684713 - DNA, 25 bp, Homo sapien
ggccagctgcatagcccagagcctt

SEQ ID NO: 5684714 - DNA, 25 bp, Homo sapien
atagcccagagccttaaagatgatt

SEQ ID NO: 5684715 - DNA, 25 bp, Homo sapien
aaggctctgggctatgcagctggcc

SEQ ID NO: 5684716 - DNA, 25 bp, Homo sapien
taagactcttccctaaatcatcttt

SEQ ID NO: 5684717 - DNA, 25 bp, Homo sapien
aatcatctttaaggctctgggctat

SEQ ID NO: 5684718 - DNA, 25 bp, Homo sapien
tctttaaggctctgggctatgcagc

SEQ ID NO: 5684719 - DNA, 25 bp, Homo sapien
cacagccgcgaaataagactcttcc

SEQ ID NO: 5684720 - DNA, 25 bp, Homo sapien
caccacagccgcgaaataagactct

SEQ ID NO: 5684721 - DNA, 25 bp, Homo sapien
gggacgttcattcttgcccaggatt

SEQ ID NO: 5684722 - DNA, 25 bp, Homo sapien
aatcctgggcaagaatgaacgtccc

SEQ ID NO: 5684723 - DNA, 25 bp, Homo sapien
cccaggattggctttcagagtctaa

SEQ ID NO: 5684724 - DNA, 25 bp, Homo sapien
gggacgttcattcttgcccaggatt

SEQ ID NO: 5684725 - DNA, 25 bp, Homo sapien
tggctttcagagtctaatcatgttt

SEQ ID NO: 5684726 - DNA, 25 bp, Homo sapien
tctgtgtgtctagtatgctcaggct

SEQ ID NO: 5684727 - DNA, 25 bp, Homo sapien
tcttgcccaggattggctttcagag

SEQ ID NO: 5684728 - DNA, 25 bp, Homo sapien
aatcatgttttctgtgtgtctagta

SEQ ID NO: 5684729 - DNA, 25 bp, Homo sapien
tgagcatactagacacacagaaaac

SEQ ID NO: 5684730 - DNA, 25 bp, Homo sapien
aaacatgattagactctgaaagcca

SEQ ID NO: 5684731 - DNA, 25 bp, Homo sapien
tagactctgaaagccaatcctgggc

SEQ ID NO: 5684732 - DNA, 25 bp, Homo sapien
atcctgggcaagaatgaacgtcccc

SEQ ID NO: 5684733 - DNA, 25 bp, Homo sapien
aagcctgagcatactagacacacag

SEQ ID NO: 5684734 - DNA, 25 bp, Homo sapien
ggcaagaatgaacgtccccatcaag

SEQ ID NO: 5684735 - DNA, 25 bp, Homo sapien
gccaactcccgtgagtacctgggat

SEQ ID NO: 5684736 - DNA, 25 bp, Homo sapien
tgccaactcccgtgagtacctggga

SEQ ID NO: 5684737 - DNA, 25 bp, Homo sapien
ccaactcccgtgagtacctgggatc

SEQ ID NO: 5684738 - DNA, 25 bp, Homo sapien
atcccaggtactcacgggagttggc

SEQ ID NO: 5684739 - DNA, 25 bp, Homo sapien
gatcccaggtactcacgggagttgg

SEQ ID NO: 5684740 - DNA, 25 bp, Homo sapien
tcccaggtactcacgggagttggca

SEQ ID NO: 5684741 - DNA, 25 bp, Homo sapien
gccaactcccgtgagtacctgggat

SEQ ID NO: 5684742 - DNA, 25 bp, Homo sapien
tcccgtgagtacctgggatctgtct

SEQ ID NO: 5684743 - DNA, 25 bp, Homo sapien
aactcccgtgagtacctgggatctg

SEQ ID NO: 5684744 - DNA, 25 bp, Homo sapien
ccgtgagtacctgggatctgtctct

SEQ ID NO: 5684745 - DNA, 25 bp, Homo sapien
tgccaactcccgtgagtacctggga

SEQ ID NO: 5684746 - DNA, 25 bp, Homo sapien
ccaactcccgtgagtacctgggatc

SEQ ID NO: 5684747 - DNA, 25 bp, Homo sapien
gacagatcccaggtactcacgggag

SEQ ID NO: 5684748 - DNA, 25 bp, Homo sapien
gagacagatcccaggtactcacggg

SEQ ID NO: 5684749 - DNA, 25 bp, Homo sapien
atcccaggtactcacgggagttggc

SEQ ID NO: 5684750 - DNA, 25 bp, Homo sapien
agagacagatcccaggtactcacgg

SEQ ID NO: 5684751 - DNA, 25 bp, Homo sapien
gatcccaggtactcacgggagttgg

SEQ ID NO: 5684752 - DNA, 25 bp, Homo sapien
tcccaggtactcacgggagttggca

SEQ ID NO: 5684753 - DNA, 25 bp, Homo sapien
gattaatgataacacaattgtgttg

SEQ ID NO: 5684754 - DNA, 25 bp, Homo sapien
tctcctgcgtcagattaatgataac

SEQ ID NO: 5684755 - DNA, 25 bp, Homo sapien
cgtcagattaatgataacacaattg

SEQ ID NO: 5684756 - DNA, 25 bp, Homo sapien
gataacacaattgtgttgacttttt

SEQ ID NO: 5684757 - DNA, 25 bp, Homo sapien
cttttctcctgcgtcagattaatga

SEQ ID NO: 5684758 - DNA, 25 bp, Homo sapien
cctgcgtcagattaatgataacaca

SEQ ID NO: 5684759 - DNA, 25 bp, Homo sapien
tgtgttatcattaatctgacgcagg

SEQ ID NO: 5684760 - DNA, 25 bp, Homo sapien
tcattaatctgacgcaggagaaaag

SEQ ID NO: 5684761 - DNA, 25 bp, Homo sapien
aaaagtcaacacaattgtgttatca

SEQ ID NO: 5684762 - DNA, 25 bp, Homo sapien
tgttatcattaatctgacgcaggag

SEQ ID NO: 5684763 - DNA, 25 bp, Homo sapien
tatcattaatctgacgcaggagaaa

SEQ ID NO: 5684764 - DNA, 25 bp, Homo sapien
caattgtgttatcattaatctgacg

SEQ ID NO: 5684765 - DNA, 25 bp, Homo sapien
tctcccacctcagcctcctgagtag

SEQ ID NO: 5684766 - DNA, 25 bp, Homo sapien
aagtgattctcccacctcagcctcc

SEQ ID NO: 5684767 - DNA, 25 bp, Homo sapien
cacccagctaatttactctttatat

SEQ ID NO: 5684768 - DNA, 25 bp, Homo sapien
ccagctaatttactctttatatttt

SEQ ID NO: 5684769 - DNA, 25 bp, Homo sapien
ctgggattagaggtgtgcaccacca

SEQ ID NO: 5684770 - DNA, 25 bp, Homo sapien
cagctaatttactctttatatttta

SEQ ID NO: 5684771 - DNA, 25 bp, Homo sapien
tggtggtgcacacctctaatcccag

SEQ ID NO: 5684772 - DNA, 25 bp, Homo sapien
atataaagagtaaattagctgggtg

SEQ ID NO: 5684773 - DNA, 25 bp, Homo sapien
taaaatataaagagtaaattagctg

SEQ ID NO: 5684774 - DNA, 25 bp, Homo sapien
ctactcaggaggctgaggtgggaga

SEQ ID NO: 5684775 - DNA, 25 bp, Homo sapien
ataaaatataaagagtaaattagct

SEQ ID NO: 5684776 - DNA, 25 bp, Homo sapien
ggaggctgaggtgggagaatcactt

SEQ ID NO: 5684777 - DNA, 25 bp, Homo sapien
tggtaggatctcagctcaccgcaac

SEQ ID NO: 5684778 - DNA, 25 bp, Homo sapien
agtagctgggactaaggcacgtgcc

SEQ ID NO: 5684779 - DNA, 25 bp, Homo sapien
gtggtaggatctcagctcaccgcaa

SEQ ID NO: 5684780 - DNA, 25 bp, Homo sapien
aagtagctgggactaaggcacgtgc

SEQ ID NO: 5684781 - DNA, 25 bp, Homo sapien
gtaggatctcagctcaccgcaacct

SEQ ID NO: 5684782 - DNA, 25 bp, Homo sapien
ggtaggatctcagctcaccgcaacc

SEQ ID NO: 5684783 - DNA, 25 bp, Homo sapien
ggttgcggtgagctgagatcctacc

SEQ ID NO: 5684784 - DNA, 25 bp, Homo sapien
gcacgtgccttagtcccagctactt

SEQ ID NO: 5684785 - DNA, 25 bp, Homo sapien
aggttgcggtgagctgagatcctac

SEQ ID NO: 5684786 - DNA, 25 bp, Homo sapien
gttgcggtgagctgagatcctacca

SEQ ID NO: 5684787 - DNA, 25 bp, Homo sapien
ggcacgtgccttagtcccagctact

SEQ ID NO: 5684788 - DNA, 25 bp, Homo sapien
ttgcggtgagctgagatcctaccac

SEQ ID NO: 5684789 - DNA, 25 bp, Homo sapien
aggtcatccatccacctcagcctcc

SEQ ID NO: 5684790 - DNA, 25 bp, Homo sapien
agagtgctgggattatcgacgtgag

SEQ ID NO: 5684791 - DNA, 25 bp, Homo sapien
tgacctcaggtcatccatccacctc

SEQ ID NO: 5684792 - DNA, 25 bp, Homo sapien
gagtgctgggattatcgacgtgagc

SEQ ID NO: 5684793 - DNA, 25 bp, Homo sapien
gacctcaggtcatccatccacctca

SEQ ID NO: 5684794 - DNA, 25 bp, Homo sapien
tcaggtcatccatccacctcagcct

SEQ ID NO: 5684795 - DNA, 25 bp, Homo sapien
aggctgaggtggatggatgacctga

SEQ ID NO: 5684796 - DNA, 25 bp, Homo sapien
gaggtggatggatgacctgaggtca

SEQ ID NO: 5684797 - DNA, 25 bp, Homo sapien
tgaggtggatggatgacctgaggtc

SEQ ID NO: 5684798 - DNA, 25 bp, Homo sapien
ctcacgtcgataatcccagcactct

SEQ ID NO: 5684799 - DNA, 25 bp, Homo sapien
gctcacgtcgataatcccagcactc

SEQ ID NO: 5684800 - DNA, 25 bp, Homo sapien
ggaggctgaggtggatggatgacct

SEQ ID NO: 5684801 - DNA, 25 bp, Homo sapien
tgttcttttgagtgtgctttcatat

SEQ ID NO: 5684802 - DNA, 25 bp, Homo sapien
atcaggcttgttcttttgagtgtgc

SEQ ID NO: 5684803 - DNA, 25 bp, Homo sapien
gcttgttcttttgagtgtgctttca

SEQ ID NO: 5684804 - DNA, 25 bp, Homo sapien
tcaggcttgttcttttgagtgtgct

SEQ ID NO: 5684805 - DNA, 25 bp, Homo sapien
tcttttgagtgtgctttcatatatt

SEQ ID NO: 5684806 - DNA, 25 bp, Homo sapien
caggcttgttcttttgagtgtgctt

SEQ ID NO: 5684807 - DNA, 25 bp, Homo sapien
tgaaagcacactcaaaagaacaagc

SEQ ID NO: 5684808 - DNA, 25 bp, Homo sapien
tatgaaagcacactcaaaagaacaa

SEQ ID NO: 5684809 - DNA, 25 bp, Homo sapien
aatatatgaaagcacactcaaaaga

SEQ ID NO: 5684810 - DNA, 25 bp, Homo sapien
aagcacactcaaaagaacaagcctg

SEQ ID NO: 5684811 - DNA, 25 bp, Homo sapien
gcacactcaaaagaacaagcctgat

SEQ ID NO: 5684812 - DNA, 25 bp, Homo sapien
tatatgaaagcacactcaaaagaac

SEQ ID NO: 5684813 - DNA, 25 bp, Homo sapien
gacaaagggtatttctcacaacctc

SEQ ID NO: 5684814 - DNA, 25 bp, Homo sapien
agacaaagggtatttctcacaacct

SEQ ID NO: 5684815 - DNA, 25 bp, Homo sapien
gaggttgtgagaaataccctttgtc

SEQ ID NO: 5684816 - DNA, 25 bp, Homo sapien
aggttgtgagaaataccctttgtct

SEQ ID NO: 5684817 - DNA, 25 bp, Homo sapien
ggagactgtctcaaagacaaagggt

SEQ ID NO: 5684818 - DNA, 25 bp, Homo sapien
gacaaagggtatttctcacaacctc

SEQ ID NO: 5684819 - DNA, 25 bp, Homo sapien
tgtctcaaagacaaagggtatttct

SEQ ID NO: 5684820 - DNA, 25 bp, Homo sapien
tctcaaagacaaagggtatttctca

SEQ ID NO: 5684821 - DNA, 25 bp, Homo sapien
agacaaagggtatttctcacaacct

SEQ ID NO: 5684822 - DNA, 25 bp, Homo sapien
caaagacaaagggtatttctcacaa

SEQ ID NO: 5684823 - DNA, 25 bp, Homo sapien
tgagaaataccctttgtctttgaga

SEQ ID NO: 5684824 - DNA, 25 bp, Homo sapien
gaggttgtgagaaataccctttgtc

SEQ ID NO: 5684825 - DNA, 25 bp, Homo sapien
gaaataccctttgtctttgagacag

SEQ ID NO: 5684826 - DNA, 25 bp, Homo sapien
aggttgtgagaaataccctttgtct

SEQ ID NO: 5684827 - DNA, 25 bp, Homo sapien
gtgagaaataccctttgtctttgag

SEQ ID NO: 5684828 - DNA, 25 bp, Homo sapien
gagaaataccctttgtctttgagac

SEQ ID NO: 5684829 - DNA, 25 bp, Homo sapien
gcatgtgccaccatacctggctaat

SEQ ID NO: 5684830 - DNA, 25 bp, Homo sapien
accatacctggctaattttttgcat

SEQ ID NO: 5684831 - DNA, 25 bp, Homo sapien
catacctggctaattttttgcattt

SEQ ID NO: 5684832 - DNA, 25 bp, Homo sapien
catgtgccaccatacctggctaatt

SEQ ID NO: 5684833 - DNA, 25 bp, Homo sapien
ccaccatacctggctaattttttgc

SEQ ID NO: 5684834 - DNA, 25 bp, Homo sapien
ggcatgtgccaccatacctggctaa

SEQ ID NO: 5684835 - DNA, 25 bp, Homo sapien
aatgcaaaaaattagccaggtatgg

SEQ ID NO: 5684836 - DNA, 25 bp, Homo sapien
aattagccaggtatggtggcacatg

SEQ ID NO: 5684837 - DNA, 25 bp, Homo sapien
ttagccaggtatggtggcacatgcc

SEQ ID NO: 5684838 - DNA, 25 bp, Homo sapien
attagccaggtatggtggcacatgc

SEQ ID NO: 5684839 - DNA, 25 bp, Homo sapien
aaaatgcaaaaaattagccaggtat

SEQ ID NO: 5684840 - DNA, 25 bp, Homo sapien
gcaaaaaattagccaggtatggtgg

SEQ ID NO: 5684841 - DNA, 25 bp, Homo sapien
caccacgcgtggcccacagagatct

SEQ ID NO: 5684842 - DNA, 25 bp, Homo sapien
gccaccacgcgtggcccacagagat

SEQ ID NO: 5684843 - DNA, 25 bp, Homo sapien
accacgcgtggcccacagagatctg

SEQ ID NO: 5684844 - DNA, 25 bp, Homo sapien
ccaccacgcgtggcccacagagatc

SEQ ID NO: 5684845 - DNA, 25 bp, Homo sapien
atctctgtgggccacgcgtggtggc

SEQ ID NO: 5684846 - DNA, 25 bp, Homo sapien
agatctctgtgggccacgcgtggtg

SEQ ID NO: 5684847 - DNA, 25 bp, Homo sapien
cagatctctgtgggccacgcgtggt

SEQ ID NO: 5684848 - DNA, 25 bp, Homo sapien
gatctctgtgggccacgcgtggtgg

SEQ ID NO: 5684849 - DNA, 25 bp, Homo sapien
caaagtgctggggttataggcatga

SEQ ID NO: 5684850 - DNA, 25 bp, Homo sapien
ctggccttgtgatccgcccgccttg

SEQ ID NO: 5684851 - DNA, 25 bp, Homo sapien
gccaccacgcgtggcccacagagat

SEQ ID NO: 5684852 - DNA, 25 bp, Homo sapien
accacgcgtggcccacagagatctg

SEQ ID NO: 5684853 - DNA, 25 bp, Homo sapien
ccaccacgcgtggcccacagagatc

SEQ ID NO: 5684854 - DNA, 25 bp, Homo sapien
cctggccttgtgatccgcccgcctt

SEQ ID NO: 5684855 - DNA, 25 bp, Homo sapien
tcttactggccttgggtagggagct

SEQ ID NO: 5684856 - DNA, 25 bp, Homo sapien
cttactggccttgggtagggagctt

SEQ ID NO: 5684857 - DNA, 25 bp, Homo sapien
agctccctacccaaggccagtaaga

SEQ ID NO: 5684858 - DNA, 25 bp, Homo sapien
aagctccctacccaaggccagtaag

SEQ ID NO: 5684859 - DNA, 25 bp, Homo sapien
tatgtggatcggagcttgaggtttc

SEQ ID NO: 5684860 - DNA, 25 bp, Homo sapien
ggtaaccgcagcttaagttgctggg

SEQ ID NO: 5684861 - DNA, 25 bp, Homo sapien
cgaatcagatttccgactaaggctg

SEQ ID NO: 5684862 - DNA, 25 bp, Homo sapien
tgaggtttccgaatcagatttccga

SEQ ID NO: 5684863 - DNA, 25 bp, Homo sapien
gagcgatttatgtggatcggagctt

SEQ ID NO: 5684864 - DNA, 25 bp, Homo sapien
cggacttagcggtaaccgcagctta

SEQ ID NO: 5684865 - DNA, 25 bp, Homo sapien
ggaaatctgattcggaaacctcaag

SEQ ID NO: 5684866 - DNA, 25 bp, Homo sapien
taagctgcggttaccgctaagtccg

SEQ ID NO: 5684867 - DNA, 25 bp, Homo sapien
ccagcaacttaagctgcggttaccg

SEQ ID NO: 5684868 - DNA, 25 bp, Homo sapien
ggaaacctcaagctccgatccacat

SEQ ID NO: 5684869 - DNA, 25 bp, Homo sapien
caagctccgatccacataaatcgct

SEQ ID NO: 5684870 - DNA, 25 bp, Homo sapien
cagccttagtcggaaatctgattcg

SEQ ID NO: 5684871 - DNA, 25 bp, Homo sapien
ttcccaacgagatggacagaaattg

SEQ ID NO: 5684872 - DNA, 25 bp, Homo sapien
aaatgggacgatagggactcccgcg

SEQ ID NO: 5684873 - DNA, 25 bp, Homo sapien
cagtgaaatgggacgatagggactc

SEQ ID NO: 5684874 - DNA, 25 bp, Homo sapien
gaagtaaccctagagacagtgaaat

SEQ ID NO: 5684875 - DNA, 25 bp, Homo sapien
catgacgtttcccaacgagatggac

SEQ ID NO: 5684876 - DNA, 25 bp, Homo sapien
ggactcccgcgtagttcacatgacg

SEQ ID NO: 5684877 - DNA, 25 bp, Homo sapien
caatttctgtccatctcgttgggaa

SEQ ID NO: 5684878 - DNA, 25 bp, Homo sapien
catttcactgtctctagggttactt

SEQ ID NO: 5684879 - DNA, 25 bp, Homo sapien
tgaactacgcgggagtccctatcgt

SEQ ID NO: 5684880 - DNA, 25 bp, Homo sapien
gagtccctatcgtcccatttcactg

SEQ ID NO: 5684881 - DNA, 25 bp, Homo sapien
gtccatctcgttgggaaacgtcatg

SEQ ID NO: 5684882 - DNA, 25 bp, Homo sapien
gaaacgtcatgtgaactacgcggga

SEQ ID NO: 5684883 - DNA, 25 bp, Homo sapien
gttctgtaggttagcgctcttttcc

SEQ ID NO: 5684884 - DNA, 25 bp, Homo sapien
tggccaatcacctagtcgctctgat

SEQ ID NO: 5684885 - DNA, 25 bp, Homo sapien
tcttttcctcatcagcactggccaa

SEQ ID NO: 5684886 - DNA, 25 bp, Homo sapien
ctagtcgctctgatttttccctaaa

SEQ ID NO: 5684887 - DNA, 25 bp, Homo sapien
tcagcactggccaatcacctagtcg

SEQ ID NO: 5684888 - DNA, 25 bp, Homo sapien
gaaatgagagtctttgttctgtagg

SEQ ID NO: 5684889 - DNA, 25 bp, Homo sapien
gattggccagtgctgatgaggaaaa

SEQ ID NO: 5684890 - DNA, 25 bp, Homo sapien
taacctacagaacaaagactctcat

SEQ ID NO: 5684891 - DNA, 25 bp, Homo sapien
gctgatgaggaaaagagcgctaacc

SEQ ID NO: 5684892 - DNA, 25 bp, Homo sapien
ggaaaagagcgctaacctacagaac

SEQ ID NO: 5684893 - DNA, 25 bp, Homo sapien
tcagagcgactaggtgattggccag

SEQ ID NO: 5684894 - DNA, 25 bp, Homo sapien
tttagggaaaaatcagagcgactag

SEQ ID NO: 5684895 - DNA, 25 bp, Homo sapien
aatgagtagttggactctttggcaa

SEQ ID NO: 5684896 - DNA, 25 bp, Homo sapien
actgaatgagtagttggactctttg

SEQ ID NO: 5684897 - DNA, 25 bp, Homo sapien
ctttggcaaggttaatataatggac

SEQ ID NO: 5684898 - DNA, 25 bp, Homo sapien
taatggacagttcattatgaaaata

SEQ ID NO: 5684899 - DNA, 25 bp, Homo sapien
tggcaaggttaatataatggacagt

SEQ ID NO: 5684900 - DNA, 25 bp, Homo sapien
ggactctttggcaaggttaatataa

SEQ ID NO: 5684901 - DNA, 25 bp, Homo sapien
ttatattaaccttgccaaagagtcc

SEQ ID NO: 5684902 - DNA, 25 bp, Homo sapien
ttgccaaagagtccaactactcatt

SEQ ID NO: 5684903 - DNA, 25 bp, Homo sapien
gtccattatattaaccttgccaaag

SEQ ID NO: 5684904 - DNA, 25 bp, Homo sapien
tattttcataatgaactgtccatta

SEQ ID NO: 5684905 - DNA, 25 bp, Homo sapien
caaagagtccaactactcattcagt

SEQ ID NO: 5684906 - DNA, 25 bp, Homo sapien
actgtccattatattaaccttgcca

SEQ ID NO: 5684907 - DNA, 25 bp, Homo sapien
tctcccctcactgcttaactaagag

SEQ ID NO: 5684908 - DNA, 25 bp, Homo sapien
ctcccctcactgcttaactaagaga

SEQ ID NO: 5684909 - DNA, 25 bp, Homo sapien
ttaattttcagtctcccctcactgc

SEQ ID NO: 5684910 - DNA, 25 bp, Homo sapien
gcagtgaggggagactgaaaattaa

SEQ ID NO: 5684911 - DNA, 25 bp, Homo sapien
ctcttagttaagcagtgaggggaga

SEQ ID NO: 5684912 - DNA, 25 bp, Homo sapien
tctcttagttaagcagtgaggggag

SEQ ID NO: 5684913 - DNA, 25 bp, Homo sapien
gataactgtcaaaaactgttgatcc

SEQ ID NO: 5684914 - DNA, 25 bp, Homo sapien
tctcccctcactgcttaactaagag

SEQ ID NO: 5684915 - DNA, 25 bp, Homo sapien
ctcccctcactgcttaactaagaga

SEQ ID NO: 5684916 - DNA, 25 bp, Homo sapien
tgtcaaaaactgttgatccttaaaa

SEQ ID NO: 5684917 - DNA, 25 bp, Homo sapien
ttaattttcagtctcccctcactgc

SEQ ID NO: 5684918 - DNA, 25 bp, Homo sapien
tatgctttcttaagataactgtcaa

SEQ ID NO: 5684919 - DNA, 25 bp, Homo sapien
caacagtttttgacagttatcttaa

SEQ ID NO: 5684920 - DNA, 25 bp, Homo sapien
ttaagaaagcataaaagatgaacac

SEQ ID NO: 5684921 - DNA, 25 bp, Homo sapien
gacagttatcttaagaaagcataaa

SEQ ID NO: 5684922 - DNA, 25 bp, Homo sapien
tttaaggatcaacagtttttgacag

SEQ ID NO: 5684923 - DNA, 25 bp, Homo sapien
gcagtgaggggagactgaaaattaa

SEQ ID NO: 5684924 - DNA, 25 bp, Homo sapien
tctcttagttaagcagtgaggggag

SEQ ID NO: 5684925 - DNA, 25 bp, Homo sapien
tctagcatggataagtgttaatata

SEQ ID NO: 5684926 - DNA, 25 bp, Homo sapien
aggttactgttggtttgggatgtat

SEQ ID NO: 5684927 - DNA, 25 bp, Homo sapien
tctttctagcatggataagtgttaa

SEQ ID NO: 5684928 - DNA, 25 bp, Homo sapien
aatatatgttgagcctggcttttaa

SEQ ID NO: 5684929 - DNA, 25 bp, Homo sapien
tgttaatatatgttgagcctggctt

SEQ ID NO: 5684930 - DNA, 25 bp, Homo sapien
tgtgattgaggttactgttggtttg

SEQ ID NO: 5684931 - DNA, 25 bp, Homo sapien
caaaccaacagtaacctcaatcaca

SEQ ID NO: 5684932 - DNA, 25 bp, Homo sapien
tatattaacacttatccatgctaga

SEQ ID NO: 5684933 - DNA, 25 bp, Homo sapien
aagccaggctcaacatatattaaca

SEQ ID NO: 5684934 - DNA, 25 bp, Homo sapien
ttaaaagccaggctcaacatatatt

SEQ ID NO: 5684935 - DNA, 25 bp, Homo sapien
taacacttatccatgctagaaagaa

SEQ ID NO: 5684936 - DNA, 25 bp, Homo sapien
atacatcccaaaccaacagtaacct

SEQ ID NO: 5684937 - DNA, 25 bp, Homo sapien
gagtctactgcttgggactgtggct

SEQ ID NO: 5684938 - DNA, 25 bp, Homo sapien
ccagagagcagagtctactgcttgg

SEQ ID NO: 5684939 - DNA, 25 bp, Homo sapien
gcagagtctactgcttgggactgtg

SEQ ID NO: 5684940 - DNA, 25 bp, Homo sapien
gaccattcccaataaggtaccgtga

SEQ ID NO: 5684941 - DNA, 25 bp, Homo sapien
caggcacctttgaccattcccaata

SEQ ID NO: 5684942 - DNA, 25 bp, Homo sapien
gagagcagagtctactgcttgggac

SEQ ID NO: 5684943 - DNA, 25 bp, Homo sapien
cacagtcccaagcagtagactctgc

SEQ ID NO: 5684944 - DNA, 25 bp, Homo sapien
tattgggaatggtcaaaggtgcctg

SEQ ID NO: 5684945 - DNA, 25 bp, Homo sapien
gccacagtcccaagcagtagactct

SEQ ID NO: 5684946 - DNA, 25 bp, Homo sapien
ccaagcagtagactctgctctctgg

SEQ ID NO: 5684947 - DNA, 25 bp, Homo sapien
tcacggtaccttattgggaatggtc

SEQ ID NO: 5684948 - DNA, 25 bp, Homo sapien
agccacagtcccaagcagtagactc

SEQ ID NO: 5684949 - DNA, 25 bp, Homo sapien
agataccagtgttctttttctactt

SEQ ID NO: 5684950 - DNA, 25 bp, Homo sapien
aaatgctgttgtatagataccagtg

SEQ ID NO: 5684951 - DNA, 25 bp, Homo sapien
gctgttgtatagataccagtgttct

SEQ ID NO: 5684952 - DNA, 25 bp, Homo sapien
taaaatgctgttgtatagataccag

SEQ ID NO: 5684953 - DNA, 25 bp, Homo sapien
gtatagataccagtgttctttttct

SEQ ID NO: 5684954 - DNA, 25 bp, Homo sapien
tatatagtaagtaaaatgctgttgt

SEQ ID NO: 5684955 - DNA, 25 bp, Homo sapien
gaaaaagaacactggtatctataca

SEQ ID NO: 5684956 - DNA, 25 bp, Homo sapien
aagaacactggtatctatacaacag

SEQ ID NO: 5684957 - DNA, 25 bp, Homo sapien
caacagcattttacttactatataa

SEQ ID NO: 5684958 - DNA, 25 bp, Homo sapien
gaacactggtatctatacaacagca

SEQ ID NO: 5684959 - DNA, 25 bp, Homo sapien
cactggtatctatacaacagcattt

SEQ ID NO: 5684960 - DNA, 25 bp, Homo sapien
aagtagaaaaagaacactggtatct

SEQ ID NO: 5684961 - DNA, 25 bp, Homo sapien
cttcaaaagcatacagtggaaaaca

SEQ ID NO: 5684962 - DNA, 25 bp, Homo sapien
aagcatacagtggaaaacatttaca

SEQ ID NO: 5684963 - DNA, 25 bp, Homo sapien
tccttcaaaagcatacagtggaaaa

SEQ ID NO: 5684964 - DNA, 25 bp, Homo sapien
ccttcaaaagcatacagtggaaaac

SEQ ID NO: 5684965 - DNA, 25 bp, Homo sapien
tcaaaagcatacagtggaaaacatt

SEQ ID NO: 5684966 - DNA, 25 bp, Homo sapien
caaaagcatacagtggaaaacattt

SEQ ID NO: 5684967 - DNA, 25 bp, Homo sapien
tgttttccactgtatgcttttgaag

SEQ ID NO: 5684968 - DNA, 25 bp, Homo sapien
tgtaaatgttttccactgtatgctt

SEQ ID NO: 5684969 - DNA, 25 bp, Homo sapien
gttttccactgtatgcttttgaagg

SEQ ID NO: 5684970 - DNA, 25 bp, Homo sapien
ttttccactgtatgcttttgaagga

SEQ ID NO: 5684971 - DNA, 25 bp, Homo sapien
aatgttttccactgtatgcttttga

SEQ ID NO: 5684972 - DNA, 25 bp, Homo sapien
aaatgttttccactgtatgcttttg

SEQ ID NO: 5684973 - DNA, 25 bp, Homo sapien
gcttgagccctagtgagagcttgtc

SEQ ID NO: 5684974 - DNA, 25 bp, Homo sapien
gacaagctctcactagggctcaagc

SEQ ID NO: 5684975 - DNA, 25 bp, Homo sapien
gagccctagtgagagcttgtctcta

SEQ ID NO: 5684976 - DNA, 25 bp, Homo sapien
cttgagccctagtgagagcttgtct

SEQ ID NO: 5684977 - DNA, 25 bp, Homo sapien
gcttgagccctagtgagagcttgtc

SEQ ID NO: 5684978 - DNA, 25 bp, Homo sapien
tgagccctagtgagagcttgtctct

SEQ ID NO: 5684979 - DNA, 25 bp, Homo sapien
agccctagtgagagcttgtctctac

SEQ ID NO: 5684980 - DNA, 25 bp, Homo sapien
ttgagccctagtgagagcttgtctc

SEQ ID NO: 5684981 - DNA, 25 bp, Homo sapien
gtagagacaagctctcactagggct

SEQ ID NO: 5684982 - DNA, 25 bp, Homo sapien
agacaagctctcactagggctcaag

SEQ ID NO: 5684983 - DNA, 25 bp, Homo sapien
tagagacaagctctcactagggctc

SEQ ID NO: 5684984 - DNA, 25 bp, Homo sapien
gagacaagctctcactagggctcaa

SEQ ID NO: 5684985 - DNA, 25 bp, Homo sapien
gacaagctctcactagggctcaagc

SEQ ID NO: 5684986 - DNA, 25 bp, Homo sapien
agagacaagctctcactagggctca

SEQ ID NO: 5684987 - DNA, 25 bp, Homo sapien
gatcacaagagaattaagctgagtg

SEQ ID NO: 5684988 - DNA, 25 bp, Homo sapien
agctgagtgaagaaagccaatctca

SEQ ID NO: 5684989 - DNA, 25 bp, Homo sapien
taacattcttgaagaaacagaatag

SEQ ID NO: 5684990 - DNA, 25 bp, Homo sapien
ttgatcacaagagaattaagctgag

SEQ ID NO: 5684991 - DNA, 25 bp, Homo sapien
caagagaattaagctgagtgaagaa

SEQ ID NO: 5684992 - DNA, 25 bp, Homo sapien
taagctgagtgaagaaagccaatct

SEQ ID NO: 5684993 - DNA, 25 bp, Homo sapien
taatgaaatcatatagtatgtaacc

SEQ ID NO: 5684994 - DNA, 25 bp, Homo sapien
tcttcactcagcttaattctcttgt

SEQ ID NO: 5684995 - DNA, 25 bp, Homo sapien
tgagattggctttcttcactcagct

SEQ ID NO: 5684996 - DNA, 25 bp, Homo sapien
ctattctgtttcttcaagaatgtta

SEQ ID NO: 5684997 - DNA, 25 bp, Homo sapien
agattggctttcttcactcagctta

SEQ ID NO: 5684998 - DNA, 25 bp, Homo sapien
ctcagcttaattctcttgtgatcaa

SEQ ID NO: 5684999 - DNA, 25 bp, Homo sapien
ccatagtcaatatgacagagttttc

SEQ ID NO: 5685000 - DNA, 25 bp, Homo sapien
gaccatagtcaatatgacagagttt

SEQ ID NO: 5685001 - DNA, 25 bp, Homo sapien
aattgagcccatatgaaagggcttg

SEQ ID NO: 5685002 - DNA, 25 bp, Homo sapien
aaagatttgggagaccatagtcaat

SEQ ID NO: 5685003 - DNA, 25 bp, Homo sapien
agtcaatatgacagagttttctact

SEQ ID NO: 5685004 - DNA, 25 bp, Homo sapien
ctactgtcctggaatgtaaaaattg

SEQ ID NO: 5685005 - DNA, 25 bp, Homo sapien
acaagccctttcatatgggctcaat

SEQ ID NO: 5685006 - DNA, 25 bp, Homo sapien
caagccctttcatatgggctcaatt

SEQ ID NO: 5685007 - DNA, 25 bp, Homo sapien
caatttttacattccaggacagtag

SEQ ID NO: 5685008 - DNA, 25 bp, Homo sapien
attgactatggtctcccaaatcttt

SEQ ID NO: 5685009 - DNA, 25 bp, Homo sapien
gaaaactctgtcatattgactatgg

SEQ ID NO: 5685010 - DNA, 25 bp, Homo sapien
agtagaaaactctgtcatattgact

SEQ ID NO: 5685011 - DNA, 25 bp, Homo sapien
ttacaggcgcatgacaccacacctg

SEQ ID NO: 5685012 - DNA, 25 bp, Homo sapien
gcctcagcctctcaagtaactggga

SEQ ID NO: 5685013 - DNA, 25 bp, Homo sapien
ttgtgcctcagcctctcaagtaact

SEQ ID NO: 5685014 - DNA, 25 bp, Homo sapien
tctgcttcccgggttcaagcgattc

SEQ ID NO: 5685015 - DNA, 25 bp, Homo sapien
gctcactgcaacctctgcttcccgg

SEQ ID NO: 5685016 - DNA, 25 bp, Homo sapien
agttacttgagaggctgaggcacaa

SEQ ID NO: 5685017 - DNA, 25 bp, Homo sapien
tcccagttacttgagaggctgaggc

SEQ ID NO: 5685018 - DNA, 25 bp, Homo sapien
gaatcgcttgaacccgggaagcaga

SEQ ID NO: 5685019 - DNA, 25 bp, Homo sapien
ccgggaagcagaggttgcagtgagc

SEQ ID NO: 5685020 - DNA, 25 bp, Homo sapien
caggtgtggtgtcatgcgcctgtaa

SEQ ID NO: 5685021 - DNA, 25 bp, Homo sapien
agtctcgatctcctgcccaccttgg

SEQ ID NO: 5685022 - DNA, 25 bp, Homo sapien
tctcgatctcctgcccaccttggcc

SEQ ID NO: 5685023 - DNA, 25 bp, Homo sapien
gatagtctcgatctcctgcccacct

SEQ ID NO: 5685024 - DNA, 25 bp, Homo sapien
caggatagtctcgatctcctgccca

SEQ ID NO: 5685025 - DNA, 25 bp, Homo sapien
ccatagtagaaacagggtttcacca

SEQ ID NO: 5685026 - DNA, 25 bp, Homo sapien
aggatagtctcgatctcctgcccac

SEQ ID NO: 5685027 - DNA, 25 bp, Homo sapien
ggccaaggtgggcaggagatcgaga

SEQ ID NO: 5685028 - DNA, 25 bp, Homo sapien
tgggcaggagatcgagactatcctg

SEQ ID NO: 5685029 - DNA, 25 bp, Homo sapien
tggtgaaaccctgtttctactatgg

SEQ ID NO: 5685030 - DNA, 25 bp, Homo sapien
gtgggcaggagatcgagactatcct

SEQ ID NO: 5685031 - DNA, 25 bp, Homo sapien
aggtgggcaggagatcgagactatc

SEQ ID NO: 5685032 - DNA, 25 bp, Homo sapien
ccaaggtgggcaggagatcgagact

SEQ ID NO: 5685033 - DNA, 25 bp, Homo sapien
ggcatgcgcctatagtcaccagcta

SEQ ID NO: 5685034 - DNA, 25 bp, Homo sapien
gcatgcgcctatagtcaccagctac

SEQ ID NO: 5685035 - DNA, 25 bp, Homo sapien
aaaaattagccaggtgtggtggcat

SEQ ID NO: 5685036 - DNA, 25 bp, Homo sapien
atgccaccacacctggctaattttt

SEQ ID NO: 5685037 - DNA, 25 bp, Homo sapien
tagctggtgactataggcgcatgcc

SEQ ID NO: 5685038 - DNA, 25 bp, Homo sapien
gaggtagggagaattgcttgaacct

SEQ ID NO: 5685039 - DNA, 25 bp, Homo sapien
ctgaggtagggagaattgcttgaac

SEQ ID NO: 5685040 - DNA, 25 bp, Homo sapien
tgaggtagggagaattgcttgaacc

SEQ ID NO: 5685041 - DNA, 25 bp, Homo sapien
gctgaggtagggagaattgcttgaa

SEQ ID NO: 5685042 - DNA, 25 bp, Homo sapien
ggaggctgaggtagggagaattgct

SEQ ID NO: 5685043 - DNA, 25 bp, Homo sapien
aggtagggagaattgcttgaacctg

SEQ ID NO: 5685044 - DNA, 25 bp, Homo sapien
aggttcaagcaattctccctacctc

SEQ ID NO: 5685045 - DNA, 25 bp, Homo sapien
caggttcaagcaattctccctacct

SEQ ID NO: 5685046 - DNA, 25 bp, Homo sapien
agcaattctccctacctcagcctcc

SEQ ID NO: 5685047 - DNA, 25 bp, Homo sapien
ggttcaagcaattctccctacctca

SEQ ID NO: 5685048 - DNA, 25 bp, Homo sapien
gttcaagcaattctccctacctcag

SEQ ID NO: 5685049 - DNA, 25 bp, Homo sapien
ttcaagcaattctccctacctcagc

SEQ ID NO: 5685050 - DNA, 25 bp, Homo sapien
cctcagatgtaagtaactcagttca

SEQ ID NO: 5685051 - DNA, 25 bp, Homo sapien
gacctagagatagttatttaacctc

SEQ ID NO: 5685052 - DNA, 25 bp, Homo sapien
caattttatgacctagagatagtta

SEQ ID NO: 5685053 - DNA, 25 bp, Homo sapien
gcctcagatgtaagtaactcagttc

SEQ ID NO: 5685054 - DNA, 25 bp, Homo sapien
tgagtttttgttgcctcagatgtaa

SEQ ID NO: 5685055 - DNA, 25 bp, Homo sapien
tatgacctagagatagttatttaac

SEQ ID NO: 5685056 - DNA, 25 bp, Homo sapien
tgaactgagttacttacatctgagg

SEQ ID NO: 5685057 - DNA, 25 bp, Homo sapien
ggttaaataactatctctaggtcat

SEQ ID NO: 5685058 - DNA, 25 bp, Homo sapien
taactatctctaggtcataaaattg

SEQ ID NO: 5685059 - DNA, 25 bp, Homo sapien
tacatctgaggcaacaaaaactcaa

SEQ ID NO: 5685060 - DNA, 25 bp, Homo sapien
gaactgagttacttacatctgaggc

SEQ ID NO: 5685061 - DNA, 25 bp, Homo sapien
gaggttaaataactatctctaggtc

SEQ ID NO: 5685062 - DNA, 25 bp, Homo sapien
tatggttgcacctactgggggtgct

SEQ ID NO: 5685063 - DNA, 25 bp, Homo sapien
ctatggttgcacctactgggggtgc

SEQ ID NO: 5685064 - DNA, 25 bp, Homo sapien
cctatggttgcacctactgggggtg

SEQ ID NO: 5685065 - DNA, 25 bp, Homo sapien
gcctatggttgcacctactgggggt

SEQ ID NO: 5685066 - DNA, 25 bp, Homo sapien
acccccagtaggtgcaaccataggc

SEQ ID NO: 5685067 - DNA, 25 bp, Homo sapien
gcacccccagtaggtgcaaccatag

SEQ ID NO: 5685068 - DNA, 25 bp, Homo sapien
cacccccagtaggtgcaaccatagg

SEQ ID NO: 5685069 - DNA, 25 bp, Homo sapien
agcacccccagtaggtgcaaccata

SEQ ID NO: 5685070 - DNA, 25 bp, Homo sapien
gagccattattgtgccactcattcc

SEQ ID NO: 5685071 - DNA, 25 bp, Homo sapien
tatggttgcacctactgggggtgct

SEQ ID NO: 5685072 - DNA, 25 bp, Homo sapien
cctatggttgcacctactgggggtg

SEQ ID NO: 5685073 - DNA, 25 bp, Homo sapien
ctatggttgcacctactgggggtgc

SEQ ID NO: 5685074 - DNA, 25 bp, Homo sapien
cattattgtgccactcattccagcc

SEQ ID NO: 5685075 - DNA, 25 bp, Homo sapien
gcctatggttgcacctactgggggt

SEQ ID NO: 5685076 - DNA, 25 bp, Homo sapien
acccccagtaggtgcaaccataggc

SEQ ID NO: 5685077 - DNA, 25 bp, Homo sapien
gcacccccagtaggtgcaaccatag

SEQ ID NO: 5685078 - DNA, 25 bp, Homo sapien
cacccccagtaggtgcaaccatagg

SEQ ID NO: 5685079 - DNA, 25 bp, Homo sapien
gaatgagtggcacaataatggctca

SEQ ID NO: 5685080 - DNA, 25 bp, Homo sapien
agcacccccagtaggtgcaaccata

SEQ ID NO: 5685081 - DNA, 25 bp, Homo sapien
ggctggaatgagtggcacaataatg

SEQ ID NO: 5685082 - DNA, 25 bp, Homo sapien
ctgcctcccttcctgccccctccct

SEQ ID NO: 5685083 - DNA, 25 bp, Homo sapien
tgcttccttttcttccctctccctc

SEQ ID NO: 5685084 - DNA, 25 bp, Homo sapien
tctgcttgcttccttttcttccctc

SEQ ID NO: 5685085 - DNA, 25 bp, Homo sapien
tccctctcccttcatcccctccctg

SEQ ID NO: 5685086 - DNA, 25 bp, Homo sapien
tgcttgcttccttttcttccctctc

SEQ ID NO: 5685087 - DNA, 25 bp, Homo sapien
gcttgcttccttttcttccctctcc

SEQ ID NO: 5685088 - DNA, 25 bp, Homo sapien
gagagggaagaaaaggaagcaagca

SEQ ID NO: 5685089 - DNA, 25 bp, Homo sapien
gagggaagaaaaggaagcaagcaga

SEQ ID NO: 5685090 - DNA, 25 bp, Homo sapien
agggagggggcaggaagggaggcag

SEQ ID NO: 5685091 - DNA, 25 bp, Homo sapien
ggagagggaagaaaaggaagcaagc

SEQ ID NO: 5685092 - DNA, 25 bp, Homo sapien
gagggagagggaagaaaaggaagca

SEQ ID NO: 5685093 - DNA, 25 bp, Homo sapien
cagggaggggatgaagggagaggga

SEQ ID NO: 5685094 - DNA, 25 bp, Homo sapien
tctctaaaaatgctttcctttgctt

SEQ ID NO: 5685095 - DNA, 25 bp, Homo sapien
tctgaattctctaaaaatgctttcc

SEQ ID NO: 5685096 - DNA, 25 bp, Homo sapien
aaatgctttcctttgcttttttgag

SEQ ID NO: 5685097 - DNA, 25 bp, Homo sapien
ccttctctgaattctctaaaaatgc

SEQ ID NO: 5685098 - DNA, 25 bp, Homo sapien
ctctaaaaatgctttcctttgcttt

SEQ ID NO: 5685099 - DNA, 25 bp, Homo sapien
gatccttctctgaattctctaaaaa

SEQ ID NO: 5685100 - DNA, 25 bp, Homo sapien
gcatttttagagaattcagagaagg

SEQ ID NO: 5685101 - DNA, 25 bp, Homo sapien
tttttagagaattcagagaaggatc

SEQ ID NO: 5685102 - DNA, 25 bp, Homo sapien
ctcaaaaaagcaaaggaaagcattt

SEQ ID NO: 5685103 - DNA, 25 bp, Homo sapien
gaaagcatttttagagaattcagag

SEQ ID NO: 5685104 - DNA, 25 bp, Homo sapien
aaagcaaaggaaagcatttttagag

SEQ ID NO: 5685105 - DNA, 25 bp, Homo sapien
catttttagagaattcagagaagga

SEQ ID NO: 5685106 - DNA, 25 bp, Homo sapien
gaacagactttgaatcgtcttgcac

SEQ ID NO: 5685107 - DNA, 25 bp, Homo sapien
gctgaaaggtctaactcaatggtag

SEQ ID NO: 5685108 - DNA, 25 bp, Homo sapien
tgaatcgtcttgcactgaccaaggt

SEQ ID NO: 5685109 - DNA, 25 bp, Homo sapien
gactttgaatcgtcttgcactgacc

SEQ ID NO: 5685110 - DNA, 25 bp, Homo sapien
gcagatgaacagactttgaatcgtc

SEQ ID NO: 5685111 - DNA, 25 bp, Homo sapien
atcgtcttgcactgaccaaggtttc

SEQ ID NO: 5685112 - DNA, 25 bp, Homo sapien
gaaaccttggtcagtgcaagacgat

SEQ ID NO: 5685113 - DNA, 25 bp, Homo sapien
ggtcagtgcaagacgattcaaagtc

SEQ ID NO: 5685114 - DNA, 25 bp, Homo sapien
gctaccattgagttagacctttcag

SEQ ID NO: 5685115 - DNA, 25 bp, Homo sapien
ccttggtcagtgcaagacgattcaa

SEQ ID NO: 5685116 - DNA, 25 bp, Homo sapien
cagtgcaagacgattcaaagtctgt

SEQ ID NO: 5685117 - DNA, 25 bp, Homo sapien
gacgattcaaagtctgttcatctgc

SEQ ID NO: 5685118 - DNA, 25 bp, Homo sapien
gaggcgagtggatcatctgaagtca

SEQ ID NO: 5685119 - DNA, 25 bp, Homo sapien
cgaggcgagtggatcatctgaagtc

SEQ ID NO: 5685120 - DNA, 25 bp, Homo sapien
ccgaggcgagtggatcatctgaagt

SEQ ID NO: 5685121 - DNA, 25 bp, Homo sapien
tgacttcagatgatccactcgcctc

SEQ ID NO: 5685122 - DNA, 25 bp, Homo sapien
acttcagatgatccactcgcctcgg

SEQ ID NO: 5685123 - DNA, 25 bp, Homo sapien
gacttcagatgatccactcgcctcg

SEQ ID NO: 5685124 - DNA, 25 bp, Homo sapien
tggaccagcaatatcagaattacct

SEQ ID NO: 5685125 - DNA, 25 bp, Homo sapien
attcctaacacaaatcccagactgg

SEQ ID NO: 5685126 - DNA, 25 bp, Homo sapien
atcccagactggctttgaagcccag

SEQ ID NO: 5685127 - DNA, 25 bp, Homo sapien
ggaccagcaatatcagaattacctg

SEQ ID NO: 5685128 - DNA, 25 bp, Homo sapien
ctggaccagcaatatcagaattacc

SEQ ID NO: 5685129 - DNA, 25 bp, Homo sapien
cccagactggctttgaagcccagca

SEQ ID NO: 5685130 - DNA, 25 bp, Homo sapien
tgctgggcttcaaagccagtctggg

SEQ ID NO: 5685131 - DNA, 25 bp, Homo sapien
ggtaattctgatattgctggtccag

SEQ ID NO: 5685132 - DNA, 25 bp, Homo sapien
caggtaattctgatattgctggtcc

SEQ ID NO: 5685133 - DNA, 25 bp, Homo sapien
ctgggcttcaaagccagtctgggat

SEQ ID NO: 5685134 - DNA, 25 bp, Homo sapien
ccagtctgggatttgtgttaggaat

SEQ ID NO: 5685135 - DNA, 25 bp, Homo sapien
gctgggcttcaaagccagtctggga

SEQ ID NO: 5685136 - DNA, 25 bp, Homo sapien
gtgcccaccgccacgcccggctaaa

SEQ ID NO: 5685137 - DNA, 25 bp, Homo sapien
tgcccaccgccacgcccggctaaat

SEQ ID NO: 5685138 - DNA, 25 bp, Homo sapien
gcctccctagtagctgggactacag

SEQ ID NO: 5685139 - DNA, 25 bp, Homo sapien
cctcctgggttcatgccattctcct

SEQ ID NO: 5685140 - DNA, 25 bp, Homo sapien
ctcctgggttcatgccattctcctg

SEQ ID NO: 5685141 - DNA, 25 bp, Homo sapien
gggttcatgccattctcctgcccca

SEQ ID NO: 5685142 - DNA, 25 bp, Homo sapien
caggagaatggcatgaacccaggag

SEQ ID NO: 5685143 - DNA, 25 bp, Homo sapien
tttagccgggcgtggcggtgggcac

SEQ ID NO: 5685144 - DNA, 25 bp, Homo sapien
tggggcaggagaatggcatgaaccc

SEQ ID NO: 5685145 - DNA, 25 bp, Homo sapien
atttagccgggcgtggcggtgggca

SEQ ID NO: 5685146 - DNA, 25 bp, Homo sapien
ctgtagtcccagctactagggaggc

SEQ ID NO: 5685147 - DNA, 25 bp, Homo sapien
aggagaatggcatgaacccaggagg

SEQ ID NO: 5685148 - DNA, 25 bp, Homo sapien
ggctcttattaagtcctccatagtg

SEQ ID NO: 5685149 - DNA, 25 bp, Homo sapien
gactcgctctattgtatctcctgtg

SEQ ID NO: 5685150 - DNA, 25 bp, Homo sapien
tgtgctttgcaagacagatgtctgg

SEQ ID NO: 5685151 - DNA, 25 bp, Homo sapien
gaagacaagagaccagtctgactcg

SEQ ID NO: 5685152 - DNA, 25 bp, Homo sapien
tgcaagacagatgtctggctcttat

SEQ ID NO: 5685153 - DNA, 25 bp, Homo sapien
taagtcctccatagtggttaatgat

SEQ ID NO: 5685154 - DNA, 25 bp, Homo sapien
ccagacatctgtcttgcaaagcaca

SEQ ID NO: 5685155 - DNA, 25 bp, Homo sapien
cactatggaggacttaataagagcc

SEQ ID NO: 5685156 - DNA, 25 bp, Homo sapien
tcattaaccactatggaggacttaa

SEQ ID NO: 5685157 - DNA, 25 bp, Homo sapien
tagagcgagtcagactggtctcttg

SEQ ID NO: 5685158 - DNA, 25 bp, Homo sapien
cacaggagatacaatagagcgagtc

SEQ ID NO: 5685159 - DNA, 25 bp, Homo sapien
taagagccagacatctgtcttgcaa

SEQ ID NO: 5685160 - DNA, 25 bp, Homo sapien
taaaaagtacctggtggctgggcgc

SEQ ID NO: 5685161 - DNA, 25 bp, Homo sapien
aaaagtacctggtggctgggcgcgg

SEQ ID NO: 5685162 - DNA, 25 bp, Homo sapien
aaagtacctggtggctgggcgcggt

SEQ ID NO: 5685163 - DNA, 25 bp, Homo sapien
aagtacctggtggctgggcgcggtg

SEQ ID NO: 5685164 - DNA, 25 bp, Homo sapien
aaaaagtacctggtggctgggcgcg

SEQ ID NO: 5685165 - DNA, 25 bp, Homo sapien
accgcgcccagccaccaggtacttt

SEQ ID NO: 5685166 - DNA, 25 bp, Homo sapien
caccgcgcccagccaccaggtactt

SEQ ID NO: 5685167 - DNA, 25 bp, Homo sapien
ccgcgcccagccaccaggtactttt

SEQ ID NO: 5685168 - DNA, 25 bp, Homo sapien
gcgcccagccaccaggtacttttta

SEQ ID NO: 5685169 - DNA, 25 bp, Homo sapien
cgcgcccagccaccaggtacttttt

SEQ ID NO: 5685170 - DNA, 25 bp, Homo sapien
tgaatttgggctagataacggtaac

SEQ ID NO: 5685171 - DNA, 25 bp, Homo sapien
taggcattggctgaatttgggctag

SEQ ID NO: 5685172 - DNA, 25 bp, Homo sapien
gaaaaattggccttaattaggcata

SEQ ID NO: 5685173 - DNA, 25 bp, Homo sapien
gataacggtaacgatatattaagta

SEQ ID NO: 5685174 - DNA, 25 bp, Homo sapien
tgggctagataacggtaacgatata

SEQ ID NO: 5685175 - DNA, 25 bp, Homo sapien
taggcatatctacgtattttattaa

SEQ ID NO: 5685176 - DNA, 25 bp, Homo sapien
tctagcccaaattcagccaatgcct

SEQ ID NO: 5685177 - DNA, 25 bp, Homo sapien
tatgcctaattaaggccaatttttc

SEQ ID NO: 5685178 - DNA, 25 bp, Homo sapien
taataaaatacgtagatatgcctaa

SEQ ID NO: 5685179 - DNA, 25 bp, Homo sapien
tacttaatatatcgttaccgttatc

SEQ ID NO: 5685180 - DNA, 25 bp, Homo sapien
taccgttatctagcccaaattcagc

SEQ ID NO: 5685181 - DNA, 25 bp, Homo sapien
tatatcgttaccgttatctagccca

SEQ ID NO: 5685182 - DNA, 25 bp, Homo sapien
tgaaattggcacatttgtgtgaact

SEQ ID NO: 5685183 - DNA, 25 bp, Homo sapien
tagtcaacttcatatagctttagtg

SEQ ID NO: 5685184 - DNA, 25 bp, Homo sapien
tggcacatttgtgtgaactatttgg

SEQ ID NO: 5685185 - DNA, 25 bp, Homo sapien
tgtgaactatttggtttcactatat

SEQ ID NO: 5685186 - DNA, 25 bp, Homo sapien
agtgctttcagctagtttctttctg

SEQ ID NO: 5685187 - DNA, 25 bp, Homo sapien
catatagctttagtgctttcagcta

SEQ ID NO: 5685188 - DNA, 25 bp, Homo sapien
ccaaatagttcacacaaatgtgcca

SEQ ID NO: 5685189 - DNA, 25 bp, Homo sapien
tcagaaagaaactagctgaaagcac

SEQ ID NO: 5685190 - DNA, 25 bp, Homo sapien
cactaaagctatatgaagttgacta

SEQ ID NO: 5685191 - DNA, 25 bp, Homo sapien
gaaactagctgaaagcactaaagct

SEQ ID NO: 5685192 - DNA, 25 bp, Homo sapien
tagttcacacaaatgtgccaatttc

SEQ ID NO: 5685193 - DNA, 25 bp, Homo sapien
atatagtgaaaccaaatagttcaca

SEQ ID NO: 5685194 - DNA, 25 bp, Homo sapien
ggaagagcaccagaatacatcagaa

SEQ ID NO: 5685195 - DNA, 25 bp, Homo sapien
aaattcaggtctaggaactgccact

SEQ ID NO: 5685196 - DNA, 25 bp, Homo sapien
aattcaggtctaggaactgccactt

SEQ ID NO: 5685197 - DNA, 25 bp, Homo sapien
ttaatgtattatggaagagcaccag

SEQ ID NO: 5685198 - DNA, 25 bp, Homo sapien
tcttaatgtattatggaagagcacc

SEQ ID NO: 5685199 - DNA, 25 bp, Homo sapien
tagtaaaggtcttaatgtattatgg

SEQ ID NO: 5685200 - DNA, 25 bp, Homo sapien
tctgatgtattctggtgctcttcca

SEQ ID NO: 5685201 - DNA, 25 bp, Homo sapien
aagtggcagttcctagacctgaatt

SEQ ID NO: 5685202 - DNA, 25 bp, Homo sapien
tggtgctcttccataatacattaag

SEQ ID NO: 5685203 - DNA, 25 bp, Homo sapien
ccataatacattaagacctttacta

SEQ ID NO: 5685204 - DNA, 25 bp, Homo sapien
ttctgatgtattctggtgctcttcc

SEQ ID NO: 5685205 - DNA, 25 bp, Homo sapien
agtggcagttcctagacctgaattt

SEQ ID NO: 5685206 - DNA, 25 bp, Homo sapien
tcataaccttaagctaatcacttta

SEQ ID NO: 5685207 - DNA, 25 bp, Homo sapien
ggaatggtaatactctacctttgca

SEQ ID NO: 5685208 - DNA, 25 bp, Homo sapien
tagtttcataaccttaagctaatca

SEQ ID NO: 5685209 - DNA, 25 bp, Homo sapien
tactctacctttgcagggttgttta

SEQ ID NO: 5685210 - DNA, 25 bp, Homo sapien
gctaatcactttattaatatggctt

SEQ ID NO: 5685211 - DNA, 25 bp, Homo sapien
gtaatactctacctttgcagggttg

SEQ ID NO: 5685212 - DNA, 25 bp, Homo sapien
taaacaaccctgcaaaggtagagta

SEQ ID NO: 5685213 - DNA, 25 bp, Homo sapien
aagccatattaataaagtgattagc

SEQ ID NO: 5685214 - DNA, 25 bp, Homo sapien
tgattagcttaaggttatgaaacta

SEQ ID NO: 5685215 - DNA, 25 bp, Homo sapien
tgcaaaggtagagtattaccattcc

SEQ ID NO: 5685216 - DNA, 25 bp, Homo sapien
caaccctgcaaaggtagagtattac

SEQ ID NO: 5685217 - DNA, 25 bp, Homo sapien
taaagtgattagcttaaggttatga

SEQ ID NO: 5685218 - DNA, 25 bp, Homo sapien
ttatatagtagcatgtatatttaga

SEQ ID NO: 5685219 - DNA, 25 bp, Homo sapien
tatatagtagcatgtatatttagaa

SEQ ID NO: 5685220 - DNA, 25 bp, Homo sapien
tattttctgtcagttcaattttgtg

SEQ ID NO: 5685221 - DNA, 25 bp, Homo sapien
aatcctctattttctgtcagttcaa

SEQ ID NO: 5685222 - DNA, 25 bp, Homo sapien
tcctctattttctgtcagttcaatt

SEQ ID NO: 5685223 - DNA, 25 bp, Homo sapien
cctctattttctgtcagttcaattt

SEQ ID NO: 5685224 - DNA, 25 bp, Homo sapien
attttctgtcagttcaattttgtgg

SEQ ID NO: 5685225 - DNA, 25 bp, Homo sapien
aaatcctctattttctgtcagttca

SEQ ID NO: 5685226 - DNA, 25 bp, Homo sapien
aattgaactgacagaaaatagagga

SEQ ID NO: 5685227 - DNA, 25 bp, Homo sapien
aaattgaactgacagaaaatagagg

SEQ ID NO: 5685228 - DNA, 25 bp, Homo sapien
tgaactgacagaaaatagaggattt

SEQ ID NO: 5685229 - DNA, 25 bp, Homo sapien
ccacaaaattgaactgacagaaaat

SEQ ID NO: 5685230 - DNA, 25 bp, Homo sapien
ttgaactgacagaaaatagaggatt

SEQ ID NO: 5685231 - DNA, 25 bp, Homo sapien
caaaattgaactgacagaaaataga

SEQ ID NO: 5685232 - DNA, 25 bp, Homo sapien
ttctaaatatacatgctactatata

SEQ ID NO: 5685233 - DNA, 25 bp, Homo sapien
tctaaatatacatgctactatataa

SEQ ID NO: 5685234 - DNA, 25 bp, Homo sapien
ggaaatgtttttatatagtagcatg

SEQ ID NO: 5685235 - DNA, 25 bp, Homo sapien
tagtagcatgtatatttagaaatcc

SEQ ID NO: 5685236 - DNA, 25 bp, Homo sapien
tcaagtgaggtaatttatgtggaaa

SEQ ID NO: 5685237 - DNA, 25 bp, Homo sapien
gaaatcctctattttctgtcagttc

SEQ ID NO: 5685238 - DNA, 25 bp, Homo sapien
attttctgtcagttcaattttgtgg

SEQ ID NO: 5685239 - DNA, 25 bp, Homo sapien
gcatgtatatttagaaatcctctat

SEQ ID NO: 5685240 - DNA, 25 bp, Homo sapien
ggatttctaaatatacatgctacta

SEQ ID NO: 5685241 - DNA, 25 bp, Homo sapien
tttccacataaattacctcacttga

SEQ ID NO: 5685242 - DNA, 25 bp, Homo sapien
ccacaaaattgaactgacagaaaat

SEQ ID NO: 5685243 - DNA, 25 bp, Homo sapien
gaactgacagaaaatagaggatttc

SEQ ID NO: 5685244 - DNA, 25 bp, Homo sapien
catgctactatataaaaacatttcc

SEQ ID NO: 5685245 - DNA, 25 bp, Homo sapien
tagaggatttctaaatatacatgct

SEQ ID NO: 5685246 - DNA, 25 bp, Homo sapien
aaagatctctgtattgggaaagggc

SEQ ID NO: 5685247 - DNA, 25 bp, Homo sapien
gactggtgcaaagatctctgtattg

SEQ ID NO: 5685248 - DNA, 25 bp, Homo sapien
ggtgcaaagatctctgtattgggaa

SEQ ID NO: 5685249 - DNA, 25 bp, Homo sapien
gaagagactggtgcaaagatctctg

SEQ ID NO: 5685250 - DNA, 25 bp, Homo sapien
gcaaagatctctgtattgggaaagg

SEQ ID NO: 5685251 - DNA, 25 bp, Homo sapien
aggaagagactggtgcaaagatctc

SEQ ID NO: 5685252 - DNA, 25 bp, Homo sapien
caatacagagatctttgcaccagtc

SEQ ID NO: 5685253 - DNA, 25 bp, Homo sapien
tacagagatctttgcaccagtctct

SEQ ID NO: 5685254 - DNA, 25 bp, Homo sapien
gagatctttgcaccagtctcttcct

SEQ ID NO: 5685255 - DNA, 25 bp, Homo sapien
tttcccaatacagagatctttgcac

SEQ ID NO: 5685256 - DNA, 25 bp, Homo sapien
cccaatacagagatctttgcaccag

SEQ ID NO: 5685257 - DNA, 25 bp, Homo sapien
gccctttcccaatacagagatcttt

SEQ ID NO: 5685258 - DNA, 25 bp, Homo sapien
caccaagttaatttacttggcttgg

SEQ ID NO: 5685259 - DNA, 25 bp, Homo sapien
gtgtgccctggtgatagttttcttt

SEQ ID NO: 5685260 - DNA, 25 bp, Homo sapien
ggtgtgccctggtgatagttttctt

SEQ ID NO: 5685261 - DNA, 25 bp, Homo sapien
tgtgccctggtgatagttttctttt

SEQ ID NO: 5685262 - DNA, 25 bp, Homo sapien
caagttaatttacttggcttggcaa

SEQ ID NO: 5685263 - DNA, 25 bp, Homo sapien
ccaagttaatttacttggcttggca

SEQ ID NO: 5685264 - DNA, 25 bp, Homo sapien
tgccaagccaagtaaattaacttgg

SEQ ID NO: 5685265 - DNA, 25 bp, Homo sapien
aagaaaactatcaccagggcacacc

SEQ ID NO: 5685266 - DNA, 25 bp, Homo sapien
caagccaagtaaattaacttggtgt

SEQ ID NO: 5685267 - DNA, 25 bp, Homo sapien
aaagaaaactatcaccagggcacac

SEQ ID NO: 5685268 - DNA, 25 bp, Homo sapien
ttgccaagccaagtaaattaacttg

SEQ ID NO: 5685269 - DNA, 25 bp, Homo sapien
aaaagaaaactatcaccagggcaca

SEQ ID NO: 5685270 - DNA, 25 bp, Homo sapien
ttatagccggtttggaatgtgaggc

SEQ ID NO: 5685271 - DNA, 25 bp, Homo sapien
tttatagccggtttggaatgtgagg

SEQ ID NO: 5685272 - DNA, 25 bp, Homo sapien
tgttttatagccggtttggaatgtg

SEQ ID NO: 5685273 - DNA, 25 bp, Homo sapien
gttttatagccggtttggaatgtga

SEQ ID NO: 5685274 - DNA, 25 bp, Homo sapien
ttttatagccggtttggaatgtgag

SEQ ID NO: 5685275 - DNA, 25 bp, Homo sapien
ctcacattccaaaccggctataaaa

SEQ ID NO: 5685276 - DNA, 25 bp, Homo sapien
tcacattccaaaccggctataaaac

SEQ ID NO: 5685277 - DNA, 25 bp, Homo sapien
gcctcacattccaaaccggctataa

SEQ ID NO: 5685278 - DNA, 25 bp, Homo sapien
cctcacattccaaaccggctataaa

SEQ ID NO: 5685279 - DNA, 25 bp, Homo sapien
cacattccaaaccggctataaaaca

SEQ ID NO: 5685280 - DNA, 25 bp, Homo sapien
caataatgtgagagcagatgagttt

SEQ ID NO: 5685281 - DNA, 25 bp, Homo sapien
ccggtttggaatgtgaggctcacta

SEQ ID NO: 5685282 - DNA, 25 bp, Homo sapien
ttatagccggtttggaatgtgaggc

SEQ ID NO: 5685283 - DNA, 25 bp, Homo sapien
gtgagaacaataatgtgagagcaga

SEQ ID NO: 5685284 - DNA, 25 bp, Homo sapien
cagatgagtttgaggattagttggt

SEQ ID NO: 5685285 - DNA, 25 bp, Homo sapien
tgtaacctggaaaagtgagaacaat

SEQ ID NO: 5685286 - DNA, 25 bp, Homo sapien
tattgttctcacttttccaggttac

SEQ ID NO: 5685287 - DNA, 25 bp, Homo sapien
tcacattccaaaccggctataaaac

SEQ ID NO: 5685288 - DNA, 25 bp, Homo sapien
tagtgagcctcacattccaaaccgg

SEQ ID NO: 5685289 - DNA, 25 bp, Homo sapien
tctgctctcacattattgttctcac

SEQ ID NO: 5685290 - DNA, 25 bp, Homo sapien
taatcctcaaactcatctgctctca

SEQ ID NO: 5685291 - DNA, 25 bp, Homo sapien
tataaaacaaaccaactaatcctca

SEQ ID NO: 5685292 - DNA, 25 bp, Homo sapien
tgctacagtccaaaaaccaattctt

SEQ ID NO: 5685293 - DNA, 25 bp, Homo sapien
tacagtccaaaaaccaattctttca

SEQ ID NO: 5685294 - DNA, 25 bp, Homo sapien
gatgagatattcctgctacagtcca

SEQ ID NO: 5685295 - DNA, 25 bp, Homo sapien
gagatattcctgctacagtccaaaa

SEQ ID NO: 5685296 - DNA, 25 bp, Homo sapien
accctccttttatgtagtctaatgg

SEQ ID NO: 5685297 - DNA, 25 bp, Homo sapien
tgtagtctaatggacacatgtttgt

SEQ ID NO: 5685298 - DNA, 25 bp, Homo sapien
gaattggtttttggactgtagcagg

SEQ ID NO: 5685299 - DNA, 25 bp, Homo sapien
ccattagactacataaaaggagggt

SEQ ID NO: 5685300 - DNA, 25 bp, Homo sapien
caaacatgtgtccattagactacat

SEQ ID NO: 5685301 - DNA, 25 bp, Homo sapien
aaaacaaacatgtgtccattagact

SEQ ID NO: 5685302 - DNA, 25 bp, Homo sapien
tggactgtagcaggaatatctcatc

SEQ ID NO: 5685303 - DNA, 25 bp, Homo sapien
tgaaagaattggtttttggactgta

SEQ ID NO: 5685304 - DNA, 25 bp, Homo sapien
taaaaacaaatgcttggcaaacagc

SEQ ID NO: 5685305 - DNA, 25 bp, Homo sapien
gctcgtggtgattaacagctctacc

SEQ ID NO: 5685306 - DNA, 25 bp, Homo sapien
aagcagagctcgtggtgattaacag

SEQ ID NO: 5685307 - DNA, 25 bp, Homo sapien
tctgaatagactagaattaagtttt

SEQ ID NO: 5685308 - DNA, 25 bp, Homo sapien
tgcttggcaaacagctattatctga

SEQ ID NO: 5685309 - DNA, 25 bp, Homo sapien
ggtgattaacagctctacctgtgat

SEQ ID NO: 5685310 - DNA, 25 bp, Homo sapien
gctgttaatcaccacgagctctgct

SEQ ID NO: 5685311 - DNA, 25 bp, Homo sapien
ggtagagctgttaatcaccacgagc

SEQ ID NO: 5685312 - DNA, 25 bp, Homo sapien
aaaacttaattctagtctattcaga

SEQ ID NO: 5685313 - DNA, 25 bp, Homo sapien
gctgtttgccaagcatttgttttta

SEQ ID NO: 5685314 - DNA, 25 bp, Homo sapien
tcagataatagctgtttgccaagca

SEQ ID NO: 5685315 - DNA, 25 bp, Homo sapien
tcacaggtagagctgttaatcacca

SEQ ID NO: 5685316 - DNA, 25 bp, Homo sapien
cttgagagggagccttgctctattg

SEQ ID NO: 5685317 - DNA, 25 bp, Homo sapien
tgagagggagccttgctctattgcc

SEQ ID NO: 5685318 - DNA, 25 bp, Homo sapien
tttcttgagagggagccttgctcta

SEQ ID NO: 5685319 - DNA, 25 bp, Homo sapien
tcttgagagggagccttgctctatt

SEQ ID NO: 5685320 - DNA, 25 bp, Homo sapien
gagagggagccttgctctattgccc

SEQ ID NO: 5685321 - DNA, 25 bp, Homo sapien
ttcttgagagggagccttgctctat

SEQ ID NO: 5685322 - DNA, 25 bp, Homo sapien
tagagcaaggctccctctcaagaaa

SEQ ID NO: 5685323 - DNA, 25 bp, Homo sapien
caatagagcaaggctccctctcaag

SEQ ID NO: 5685324 - DNA, 25 bp, Homo sapien
aatagagcaaggctccctctcaaga

SEQ ID NO: 5685325 - DNA, 25 bp, Homo sapien
atagagcaaggctccctctcaagaa

SEQ ID NO: 5685326 - DNA, 25 bp, Homo sapien
gggcaatagagcaaggctccctctc

SEQ ID NO: 5685327 - DNA, 25 bp, Homo sapien
ggcaatagagcaaggctccctctca

SEQ ID NO: 5685328 - DNA, 25 bp, Homo sapien
ctggctgcttgttttactttcttaa

SEQ ID NO: 5685329 - DNA, 25 bp, Homo sapien
tggctgcttgttttactttcttaaa

SEQ ID NO: 5685330 - DNA, 25 bp, Homo sapien
gcctggctgcttgttttactttctt

SEQ ID NO: 5685331 - DNA, 25 bp, Homo sapien
cctggctgcttgttttactttctta

SEQ ID NO: 5685332 - DNA, 25 bp, Homo sapien
cgcctggctgcttgttttactttct

SEQ ID NO: 5685333 - DNA, 25 bp, Homo sapien
gcgcctggctgcttgttttactttc

SEQ ID NO: 5685334 - DNA, 25 bp, Homo sapien
agaaagtaaaacaagcagccaggcg

SEQ ID NO: 5685335 - DNA, 25 bp, Homo sapien
ttaagaaagtaaaacaagcagccag

SEQ ID NO: 5685336 - DNA, 25 bp, Homo sapien
aagaaagtaaaacaagcagccaggc

SEQ ID NO: 5685337 - DNA, 25 bp, Homo sapien
tttaagaaagtaaaacaagcagcca

SEQ ID NO: 5685338 - DNA, 25 bp, Homo sapien
taagaaagtaaaacaagcagccagg

SEQ ID NO: 5685339 - DNA, 25 bp, Homo sapien
gaaagtaaaacaagcagccaggcgc

SEQ ID NO: 5685340 - DNA, 25 bp, Homo sapien
ttgggttaaattctgacctgagcac

SEQ ID NO: 5685341 - DNA, 25 bp, Homo sapien
tttgctgaggacgagtttagtttgg

SEQ ID NO: 5685342 - DNA, 25 bp, Homo sapien
tgggttaaattctgacctgagcaca

SEQ ID NO: 5685343 - DNA, 25 bp, Homo sapien
tattgggttaaattctgacctgagc

SEQ ID NO: 5685344 - DNA, 25 bp, Homo sapien
tgctgaggacgagtttagtttggaa

SEQ ID NO: 5685345 - DNA, 25 bp, Homo sapien
gagtttgctgaggacgagtttagtt

SEQ ID NO: 5685346 - DNA, 25 bp, Homo sapien
tccaaactaaactcgtcctcagcaa

SEQ ID NO: 5685347 - DNA, 25 bp, Homo sapien
tgtgctcaggtcagaatttaaccca

SEQ ID NO: 5685348 - DNA, 25 bp, Homo sapien
ttccaaactaaactcgtcctcagca

SEQ ID NO: 5685349 - DNA, 25 bp, Homo sapien
aactaaactcgtcctcagcaaactc

SEQ ID NO: 5685350 - DNA, 25 bp, Homo sapien
gctcaggtcagaatttaacccaata

SEQ ID NO: 5685351 - DNA, 25 bp, Homo sapien
caaactaaactcgtcctcagcaaac

SEQ ID NO: 5685352 - DNA, 25 bp, Homo sapien
aaagactagcatcatctattgaagc

SEQ ID NO: 5685353 - DNA, 25 bp, Homo sapien
caagcagcggtaatgtgtaaggtag

SEQ ID NO: 5685354 - DNA, 25 bp, Homo sapien
tgagtctcaagcagcggtaatgtgt

SEQ ID NO: 5685355 - DNA, 25 bp, Homo sapien
ctattgaagctgtatacgcctggga

SEQ ID NO: 5685356 - DNA, 25 bp, Homo sapien
tctcaagcagcggtaatgtgtaagg

SEQ ID NO: 5685357 - DNA, 25 bp, Homo sapien
gggcatcaaagactagcatcatcta

SEQ ID NO: 5685358 - DNA, 25 bp, Homo sapien
agatgatgctagtctttgatgcccc

SEQ ID NO: 5685359 - DNA, 25 bp, Homo sapien
gcttcaatagatgatgctagtcttt

SEQ ID NO: 5685360 - DNA, 25 bp, Homo sapien
taccttacacattaccgctgcttga

SEQ ID NO: 5685361 - DNA, 25 bp, Homo sapien
tacacattaccgctgcttgagactc

SEQ ID NO: 5685362 - DNA, 25 bp, Homo sapien
tcccaggcgtatacagcttcaatag

SEQ ID NO: 5685363 - DNA, 25 bp, Homo sapien
cgtatacagcttcaatagatgatgc

SEQ ID NO: 5685364 - DNA, 25 bp, Homo sapien
gagacacttatttaggcaagtcttg

SEQ ID NO: 5685365 - DNA, 25 bp, Homo sapien
gagaaagtttttcaagagacactta

SEQ ID NO: 5685366 - DNA, 25 bp, Homo sapien
tatttaggcaagtcttgtaaggatg

SEQ ID NO: 5685367 - DNA, 25 bp, Homo sapien
ggtggcatcaagagaaagtttttca

SEQ ID NO: 5685368 - DNA, 25 bp, Homo sapien
cacttatttaggcaagtcttgtaag

SEQ ID NO: 5685369 - DNA, 25 bp, Homo sapien
gggtggcatcaagagaaagtttttc

SEQ ID NO: 5685370 - DNA, 25 bp, Homo sapien
taagtgtctcttgaaaaactttctc

SEQ ID NO: 5685371 - DNA, 25 bp, Homo sapien
tcatccttacaagacttgcctaaat

SEQ ID NO: 5685372 - DNA, 25 bp, Homo sapien
aaactttctcttgatgccaccccta

SEQ ID NO: 5685373 - DNA, 25 bp, Homo sapien
gaaaaactttctcttgatgccaccc

SEQ ID NO: 5685374 - DNA, 25 bp, Homo sapien
caagacttgcctaaataagtgtctc

SEQ ID NO: 5685375 - DNA, 25 bp, Homo sapien
cttacaagacttgcctaaataagtg

SEQ ID NO: 5685376 - DNA, 25 bp, Homo sapien
ccactgcacccggccctcattttga

SEQ ID NO: 5685377 - DNA, 25 bp, Homo sapien
ggtggtctcgatctcctgacctcgt

SEQ ID NO: 5685378 - DNA, 25 bp, Homo sapien
cactgcacccggccctcattttgaa

SEQ ID NO: 5685379 - DNA, 25 bp, Homo sapien
aaagtgctgggattacaggcgtgag

SEQ ID NO: 5685380 - DNA, 25 bp, Homo sapien
gtggtctcgatctcctgacctcgtg

SEQ ID NO: 5685381 - DNA, 25 bp, Homo sapien
gggtggtctcgatctcctgacctcg

SEQ ID NO: 5685382 - DNA, 25 bp, Homo sapien
ctcacgcctgtaatcccagcacttt

SEQ ID NO: 5685383 - DNA, 25 bp, Homo sapien
cacgaggtcaggagatcgagaccac

SEQ ID NO: 5685384 - DNA, 25 bp, Homo sapien
ttcaaaatgagggccgggtgcagtg

SEQ ID NO: 5685385 - DNA, 25 bp, Homo sapien
acgaggtcaggagatcgagaccacc

SEQ ID NO: 5685386 - DNA, 25 bp, Homo sapien
tcaaaatgagggccgggtgcagtgg

SEQ ID NO: 5685387 - DNA, 25 bp, Homo sapien
cgaggtcaggagatcgagaccaccc

SEQ ID NO: 5685388 - DNA, 25 bp, Homo sapien
aatttgactactagtgtcatctctt

SEQ ID NO: 5685389 - DNA, 25 bp, Homo sapien
gaatttgactactagtgtcatctct

SEQ ID NO: 5685390 - DNA, 25 bp, Homo sapien
gtgaatttgactactagtgtcatct

SEQ ID NO: 5685391 - DNA, 25 bp, Homo sapien
atttgactactagtgtcatctcttt

SEQ ID NO: 5685392 - DNA, 25 bp, Homo sapien
tttgactactagtgtcatctctttt

SEQ ID NO: 5685393 - DNA, 25 bp, Homo sapien
aagagatgacactagtagtcaaatt

SEQ ID NO: 5685394 - DNA, 25 bp, Homo sapien
agatgacactagtagtcaaattcac

SEQ ID NO: 5685395 - DNA, 25 bp, Homo sapien
agagatgacactagtagtcaaattc

SEQ ID NO: 5685396 - DNA, 25 bp, Homo sapien
aaaagagatgacactagtagtcaaa

SEQ ID NO: 5685397 - DNA, 25 bp, Homo sapien
aaagagatgacactagtagtcaaat

SEQ ID NO: 5685398 - DNA, 25 bp, Homo sapien
ttttagtggtgctcttatgtctagc

SEQ ID NO: 5685399 - DNA, 25 bp, Homo sapien
ctagtgtcatctcttttagtggtgc

SEQ ID NO: 5685400 - DNA, 25 bp, Homo sapien
tatgttgcataaagaacagaattct

SEQ ID NO: 5685401 - DNA, 25 bp, Homo sapien
gtgaatttgactactagtgtcatct

SEQ ID NO: 5685402 - DNA, 25 bp, Homo sapien
tatgtctagcttaggaagggtctca

SEQ ID NO: 5685403 - DNA, 25 bp, Homo sapien
aagggtctcaggatttgtatgttgc

SEQ ID NO: 5685404 - DNA, 25 bp, Homo sapien
agatgacactagtagtcaaattcac

SEQ ID NO: 5685405 - DNA, 25 bp, Homo sapien
taagagcaccactaaaagagatgac

SEQ ID NO: 5685406 - DNA, 25 bp, Homo sapien
gaattctgttctttatgcaacatac

SEQ ID NO: 5685407 - DNA, 25 bp, Homo sapien
taagctagacataagagcaccacta

SEQ ID NO: 5685408 - DNA, 25 bp, Homo sapien
tatgcaacatacaaatcctgagacc

SEQ ID NO: 5685409 - DNA, 25 bp, Homo sapien
cctgagacccttcctaagctagaca

SEQ ID NO: 5685410 - DNA, 25 bp, Homo sapien
caactgacatttggagtttgagacc

SEQ ID NO: 5685411 - DNA, 25 bp, Homo sapien
ggcggatcaactgacatttggagtt

SEQ ID NO: 5685412 - DNA, 25 bp, Homo sapien
gatcaactgacatttggagtttgag

SEQ ID NO: 5685413 - DNA, 25 bp, Homo sapien
gcggatcaactgacatttggagttt

SEQ ID NO: 5685414 - DNA, 25 bp, Homo sapien
aggcggatcaactgacatttggagt

SEQ ID NO: 5685415 - DNA, 25 bp, Homo sapien
ggatcaactgacatttggagtttga

SEQ ID NO: 5685416 - DNA, 25 bp, Homo sapien
aaactccaaatgtcagttgatccgc

SEQ ID NO: 5685417 - DNA, 25 bp, Homo sapien
aactccaaatgtcagttgatccgcc

SEQ ID NO: 5685418 - DNA, 25 bp, Homo sapien
tctcaaactccaaatgtcagttgat

SEQ ID NO: 5685419 - DNA, 25 bp, Homo sapien
ggtctcaaactccaaatgtcagttg

SEQ ID NO: 5685420 - DNA, 25 bp, Homo sapien
tcaaactccaaatgtcagttgatcc

SEQ ID NO: 5685421 - DNA, 25 bp, Homo sapien
actccaaatgtcagttgatccgcct

SEQ ID NO: 5685422 - DNA, 25 bp, Homo sapien
cactactcaggaggctggggcaaga

SEQ ID NO: 5685423 - DNA, 25 bp, Homo sapien
ccacactactcaggaggctggggca

SEQ ID NO: 5685424 - DNA, 25 bp, Homo sapien
actactcaggaggctggggcaagag

SEQ ID NO: 5685425 - DNA, 25 bp, Homo sapien
acactactcaggaggctggggcaag

SEQ ID NO: 5685426 - DNA, 25 bp, Homo sapien
cacactactcaggaggctggggcaa

SEQ ID NO: 5685427 - DNA, 25 bp, Homo sapien
gccactgcacttcagcctgggagat

SEQ ID NO: 5685428 - DNA, 25 bp, Homo sapien
cttgccccagcctcctgagtagtgt

SEQ ID NO: 5685429 - DNA, 25 bp, Homo sapien
tcttgccccagcctcctgagtagtg

SEQ ID NO: 5685430 - DNA, 25 bp, Homo sapien
ctcttgccccagcctcctgagtagt

SEQ ID NO: 5685431 - DNA, 25 bp, Homo sapien
tgccccagcctcctgagtagtgtgg

SEQ ID NO: 5685432 - DNA, 25 bp, Homo sapien
ttgccccagcctcctgagtagtgtg

SEQ ID NO: 5685433 - DNA, 25 bp, Homo sapien
atctcccaggctgaagtgcagtggc

SEQ ID NO: 5685434 - DNA, 25 bp, Homo sapien
tgcagtctagctgaaacttttggtc

SEQ ID NO: 5685435 - DNA, 25 bp, Homo sapien
tagatcttgggcactttgaccatag

SEQ ID NO: 5685436 - DNA, 25 bp, Homo sapien
tcttctaattttggacagtcttagc

SEQ ID NO: 5685437 - DNA, 25 bp, Homo sapien
cactttgaccatagccaagtgctgc

SEQ ID NO: 5685438 - DNA, 25 bp, Homo sapien
aatagagttctagatcttgggcact

SEQ ID NO: 5685439 - DNA, 25 bp, Homo sapien
tctagctgaaacttttggtcttcta

SEQ ID NO: 5685440 - DNA, 25 bp, Homo sapien
tatggtcaaagtgcccaagatctag

SEQ ID NO: 5685441 - DNA, 25 bp, Homo sapien
tagaagaccaaaagtttcagctaga

SEQ ID NO: 5685442 - DNA, 25 bp, Homo sapien
gcagcacttggctatggtcaaagtg

SEQ ID NO: 5685443 - DNA, 25 bp, Homo sapien
aagtgcccaagatctagaactctat

SEQ ID NO: 5685444 - DNA, 25 bp, Homo sapien
gaccaaaagtttcagctagactgca

SEQ ID NO: 5685445 - DNA, 25 bp, Homo sapien
gctaagactgtccaaaattagaaga

SEQ ID NO: 5685446 - DNA, 25 bp, Homo sapien
atagagtattcagactctccagacc

SEQ ID NO: 5685447 - DNA, 25 bp, Homo sapien
agacctacccaaggcagtgcagtga

SEQ ID NO: 5685448 - DNA, 25 bp, Homo sapien
gatgaattggtcctctataggacct

SEQ ID NO: 5685449 - DNA, 25 bp, Homo sapien
agtgatgaattggtcctctatagga

SEQ ID NO: 5685450 - DNA, 25 bp, Homo sapien
tatagagtattcagactctccagac

SEQ ID NO: 5685451 - DNA, 25 bp, Homo sapien
gaattggtcctctataggacctggg

SEQ ID NO: 5685452 - DNA, 25 bp, Homo sapien
caggtcctatagaggaccaattcat

SEQ ID NO: 5685453 - DNA, 25 bp, Homo sapien
cccaggtcctatagaggaccaattc

SEQ ID NO: 5685454 - DNA, 25 bp, Homo sapien
ggtcctatagaggaccaattcatca

SEQ ID NO: 5685455 - DNA, 25 bp, Homo sapien
tcactgcactgccttgggtaggtct

SEQ ID NO: 5685456 - DNA, 25 bp, Homo sapien
tcctatagaggaccaattcatcact

SEQ ID NO: 5685457 - DNA, 25 bp, Homo sapien
ggtctggagagtctgaatactctat

SEQ ID NO: 5685458 - DNA, 25 bp, Homo sapien
gcctagttaaggcttcataaaatct

SEQ ID NO: 5685459 - DNA, 25 bp, Homo sapien
ttcataaaatctgcctaattccaga

SEQ ID NO: 5685460 - DNA, 25 bp, Homo sapien
ctagttaaggcttcataaaatctgc

SEQ ID NO: 5685461 - DNA, 25 bp, Homo sapien
ctctgtgctttaataatagcctagt

SEQ ID NO: 5685462 - DNA, 25 bp, Homo sapien
tcagaacataaaagtggcctgttta

SEQ ID NO: 5685463 - DNA, 25 bp, Homo sapien
gctttaataatagcctagttaaggc

SEQ ID NO: 5685464 - DNA, 25 bp, Homo sapien
agattttatgaagccttaactaggc

SEQ ID NO: 5685465 - DNA, 25 bp, Homo sapien
tctggaattaggcagattttatgaa

SEQ ID NO: 5685466 - DNA, 25 bp, Homo sapien
gcagattttatgaagccttaactag

SEQ ID NO: 5685467 - DNA, 25 bp, Homo sapien
gccttaactaggctattattaaagc

SEQ ID NO: 5685468 - DNA, 25 bp, Homo sapien
actaggctattattaaagcacagag

SEQ ID NO: 5685469 - DNA, 25 bp, Homo sapien
taaacaggccacttttatgttctga

SEQ ID NO: 5685470 - DNA, 25 bp, Homo sapien
gctcgattttgtactttacttcctg

SEQ ID NO: 5685471 - DNA, 25 bp, Homo sapien
tcgattttgtactttacttcctgcc

SEQ ID NO: 5685472 - DNA, 25 bp, Homo sapien
ctagtactgataatactaaagctcg

SEQ ID NO: 5685473 - DNA, 25 bp, Homo sapien
taatactaaagctcgattttgtact

SEQ ID NO: 5685474 - DNA, 25 bp, Homo sapien
tgataatactaaagctcgattttgt

SEQ ID NO: 5685475 - DNA, 25 bp, Homo sapien
gtactgataatactaaagctcgatt

SEQ ID NO: 5685476 - DNA, 25 bp, Homo sapien
ggcaggaagtaaagtacaaaatcga

SEQ ID NO: 5685477 - DNA, 25 bp, Homo sapien
caggaagtaaagtacaaaatcgagc

SEQ ID NO: 5685478 - DNA, 25 bp, Homo sapien
caaaatcgagctttagtattatcag

SEQ ID NO: 5685479 - DNA, 25 bp, Homo sapien
tacaaaatcgagctttagtattatc

SEQ ID NO: 5685480 - DNA, 25 bp, Homo sapien
aatcgagctttagtattatcagtac

SEQ ID NO: 5685481 - DNA, 25 bp, Homo sapien
gctttagtattatcagtactagtag

SEQ ID NO: 5685482 - DNA, 25 bp, Homo sapien
tgactattctacagtaggcattaac

SEQ ID NO: 5685483 - DNA, 25 bp, Homo sapien
actattctacagtaggcattaacat

SEQ ID NO: 5685484 - DNA, 25 bp, Homo sapien
gactattctacagtaggcattaaca

SEQ ID NO: 5685485 - DNA, 25 bp, Homo sapien
tttgactattctacagtaggcatta

SEQ ID NO: 5685486 - DNA, 25 bp, Homo sapien
cttttgactattctacagtaggcat

SEQ ID NO: 5685487 - DNA, 25 bp, Homo sapien
tattctacagtaggcattaacattt

SEQ ID NO: 5685488 - DNA, 25 bp, Homo sapien
atgcctactgtagaatagtcaaaag

SEQ ID NO: 5685489 - DNA, 25 bp, Homo sapien
aaatgttaatgcctactgtagaata

SEQ ID NO: 5685490 - DNA, 25 bp, Homo sapien
taatgcctactgtagaatagtcaaa

SEQ ID NO: 5685491 - DNA, 25 bp, Homo sapien
tgttaatgcctactgtagaatagtc

SEQ ID NO: 5685492 - DNA, 25 bp, Homo sapien
aatgttaatgcctactgtagaatag

SEQ ID NO: 5685493 - DNA, 25 bp, Homo sapien
gttaatgcctactgtagaatagtca

SEQ ID NO: 5685494 - DNA, 25 bp, Homo sapien
gttctagggatatgatgatacatac

SEQ ID NO: 5685495 - DNA, 25 bp, Homo sapien
gatgtaattacctttcctactctct

SEQ ID NO: 5685496 - DNA, 25 bp, Homo sapien
tgttgttctagggatatgatgatac

SEQ ID NO: 5685497 - DNA, 25 bp, Homo sapien
tttcctactctctatgattttgatc

SEQ ID NO: 5685498 - DNA, 25 bp, Homo sapien
gttgttctagggatatgatgataca

SEQ ID NO: 5685499 - DNA, 25 bp, Homo sapien
gtaattacctttcctactctctatg

SEQ ID NO: 5685500 - DNA, 25 bp, Homo sapien
gtatgtatcatcatatccctagaac

SEQ ID NO: 5685501 - DNA, 25 bp, Homo sapien
agagagtaggaaaggtaattacatc

SEQ ID NO: 5685502 - DNA, 25 bp, Homo sapien
tgtatcatcatatccctagaacaac

SEQ ID NO: 5685503 - DNA, 25 bp, Homo sapien
gatcaaaatcatagagagtaggaaa

SEQ ID NO: 5685504 - DNA, 25 bp, Homo sapien
gtatcatcatatccctagaacaaca

SEQ ID NO: 5685505 - DNA, 25 bp, Homo sapien
catagagagtaggaaaggtaattac

SEQ ID NO: 5685506 - DNA, 25 bp, Homo sapien
attttataagtacatagtctataca

SEQ ID NO: 5685507 - DNA, 25 bp, Homo sapien
caattattttataagtacatagtct

SEQ ID NO: 5685508 - DNA, 25 bp, Homo sapien
ttattttataagtacatagtctata

SEQ ID NO: 5685509 - DNA, 25 bp, Homo sapien
attattttataagtacatagtctat

SEQ ID NO: 5685510 - DNA, 25 bp, Homo sapien
aattattttataagtacatagtcta

SEQ ID NO: 5685511 - DNA, 25 bp, Homo sapien
tattttataagtacatagtctatac

SEQ ID NO: 5685512 - DNA, 25 bp, Homo sapien
tatagactatgtacttataaaataa

SEQ ID NO: 5685513 - DNA, 25 bp, Homo sapien
atagactatgtacttataaaataat

SEQ ID NO: 5685514 - DNA, 25 bp, Homo sapien
gtatagactatgtacttataaaata

SEQ ID NO: 5685515 - DNA, 25 bp, Homo sapien
tagactatgtacttataaaataatt

SEQ ID NO: 5685516 - DNA, 25 bp, Homo sapien
agactatgtacttataaaataattg

SEQ ID NO: 5685517 - DNA, 25 bp, Homo sapien
tgtatagactatgtacttataaaat

SEQ ID NO: 5685518 - DNA, 25 bp, Homo sapien
gggcagaatgagtattttcctgtat

SEQ ID NO: 5685519 - DNA, 25 bp, Homo sapien
catagtctatacatattttggaaat

SEQ ID NO: 5685520 - DNA, 25 bp, Homo sapien
gtacatagtctatacatattttgga

SEQ ID NO: 5685521 - DNA, 25 bp, Homo sapien
caattattttataagtacatagtct

SEQ ID NO: 5685522 - DNA, 25 bp, Homo sapien
gaatgagtattttcctgtattaata

SEQ ID NO: 5685523 - DNA, 25 bp, Homo sapien
tattttataagtacatagtctatac

SEQ ID NO: 5685524 - DNA, 25 bp, Homo sapien
tattaatacaggaaaatactcattc

SEQ ID NO: 5685525 - DNA, 25 bp, Homo sapien
tccaaaatatgtatagactatgtac

SEQ ID NO: 5685526 - DNA, 25 bp, Homo sapien
gtatagactatgtacttataaaata

SEQ ID NO: 5685527 - DNA, 25 bp, Homo sapien
cattctgccccatccctaaaccgta

SEQ ID NO: 5685528 - DNA, 25 bp, Homo sapien
tacaggaaaatactcattctgcccc

SEQ ID NO: 5685529 - DNA, 25 bp, Homo sapien
tgtacttataaaataattgacaact

SEQ ID NO: 5685530 - DNA, 25 bp, Homo sapien
tagcttcctaacactctgcctttgg

SEQ ID NO: 5685531 - DNA, 25 bp, Homo sapien
tctgtagcttcctaacactctgcct

SEQ ID NO: 5685532 - DNA, 25 bp, Homo sapien
tactctgtagcttcctaacactctg

SEQ ID NO: 5685533 - DNA, 25 bp, Homo sapien
gcttcctaacactctgcctttggct

SEQ ID NO: 5685534 - DNA, 25 bp, Homo sapien
tagtaaaatgactgacttatggaag

SEQ ID NO: 5685535 - DNA, 25 bp, Homo sapien
taaaatgactgacttatggaagtat

SEQ ID NO: 5685536 - DNA, 25 bp, Homo sapien
aaaggcagagtgttaggaagctaca

SEQ ID NO: 5685537 - DNA, 25 bp, Homo sapien
ccaaaggcagagtgttaggaagcta

SEQ ID NO: 5685538 - DNA, 25 bp, Homo sapien
tacttccataagtcagtcattttac

SEQ ID NO: 5685539 - DNA, 25 bp, Homo sapien
agccaaaggcagagtgttaggaagc

SEQ ID NO: 5685540 - DNA, 25 bp, Homo sapien
gcagagtgttaggaagctacagagt

SEQ ID NO: 5685541 - DNA, 25 bp, Homo sapien
cagagtgttaggaagctacagagta

SEQ ID NO: 5685542 - DNA, 25 bp, Homo sapien
gtcagacaaacacacctacggataa

SEQ ID NO: 5685543 - DNA, 25 bp, Homo sapien
cagacaaacacacctacggataaac

SEQ ID NO: 5685544 - DNA, 25 bp, Homo sapien
gagtcagacaaacacacctacggat

SEQ ID NO: 5685545 - DNA, 25 bp, Homo sapien
tgctggtgactaaagtattgagagt

SEQ ID NO: 5685546 - DNA, 25 bp, Homo sapien
tgagagtcagacaaacacacctacg

SEQ ID NO: 5685547 - DNA, 25 bp, Homo sapien
tggtgactaaagtattgagagtcag

SEQ ID NO: 5685548 - DNA, 25 bp, Homo sapien
gtttatccgtaggtgtgtttgtctg

SEQ ID NO: 5685549 - DNA, 25 bp, Homo sapien
tgactctcaatactttagtcaccag

SEQ ID NO: 5685550 - DNA, 25 bp, Homo sapien
cgtaggtgtgtttgtctgactctca

SEQ ID NO: 5685551 - DNA, 25 bp, Homo sapien
tatccgtaggtgtgtttgtctgact

SEQ ID NO: 5685552 - DNA, 25 bp, Homo sapien
ctctcaatactttagtcaccagcat

SEQ ID NO: 5685553 - DNA, 25 bp, Homo sapien
tccgtaggtgtgtttgtctgactct

SEQ ID NO: 5685554 - DNA, 25 bp, Homo sapien
gaggtggggtatcgttactcttgga

SEQ ID NO: 5685555 - DNA, 25 bp, Homo sapien
gaccagcttggccctggttggagca

SEQ ID NO: 5685556 - DNA, 25 bp, Homo sapien
tcttggaagggtagtgtttgtctta

SEQ ID NO: 5685557 - DNA, 25 bp, Homo sapien
aagtgaggtggggtatcgttactct

SEQ ID NO: 5685558 - DNA, 25 bp, Homo sapien
ctcttggaagggtagtgtttgtctt

SEQ ID NO: 5685559 - DNA, 25 bp, Homo sapien
agaccagcttggccctggttggagc

SEQ ID NO: 5685560 - DNA, 25 bp, Homo sapien
aagagtaacgataccccacctcact

SEQ ID NO: 5685561 - DNA, 25 bp, Homo sapien
agagtaacgataccccacctcactt

SEQ ID NO: 5685562 - DNA, 25 bp, Homo sapien
aagacaaacactacccttccaagag

SEQ ID NO: 5685563 - DNA, 25 bp, Homo sapien
tgctccaaccagggccaagctggtc

SEQ ID NO: 5685564 - DNA, 25 bp, Homo sapien
taagacaaacactacccttccaaga

SEQ ID NO: 5685565 - DNA, 25 bp, Homo sapien
tccaagagtaacgataccccacctc

SEQ ID NO: 5685566 - DNA, 25 bp, Homo sapien
gataacaagaacttaatcgtacaca

SEQ ID NO: 5685567 - DNA, 25 bp, Homo sapien
tgggcctttgctgccgatatctagg

SEQ ID NO: 5685568 - DNA, 25 bp, Homo sapien
tagacctgggttgtatttctgggcc

SEQ ID NO: 5685569 - DNA, 25 bp, Homo sapien
taatcgtacacaactgtactcatct

SEQ ID NO: 5685570 - DNA, 25 bp, Homo sapien
taggccactttggtagataacaaga

SEQ ID NO: 5685571 - DNA, 25 bp, Homo sapien
gctgccgatatctaggccactttgg

SEQ ID NO: 5685572 - DNA, 25 bp, Homo sapien
cagttgtgtacgattaagttcttgt

SEQ ID NO: 5685573 - DNA, 25 bp, Homo sapien
ggcccagaaatacaacccaggtcta

SEQ ID NO: 5685574 - DNA, 25 bp, Homo sapien
cttgttatctaccaaagtggcctag

SEQ ID NO: 5685575 - DNA, 25 bp, Homo sapien
cctagatatcggcagcaaaggccca

SEQ ID NO: 5685576 - DNA, 25 bp, Homo sapien
caaagtggcctagatatcggcagca

SEQ ID NO: 5685577 - DNA, 25 bp, Homo sapien
gatgagtacagttgtgtacgattaa

SEQ ID NO: 5685578 - DNA, 25 bp, Homo sapien
caagaatagtgcctattagggccgg

SEQ ID NO: 5685579 - DNA, 25 bp, Homo sapien
tcagctgaaagggacctagatggca

SEQ ID NO: 5685580 - DNA, 25 bp, Homo sapien
cctagatggcaagcagctagccaga

SEQ ID NO: 5685581 - DNA, 25 bp, Homo sapien
gcagctagccagaccaggttgcggg

SEQ ID NO: 5685582 - DNA, 25 bp, Homo sapien
aatgtcagctgaaagggacctagat

SEQ ID NO: 5685583 - DNA, 25 bp, Homo sapien
aatagtgcctattagggccgggcgt

SEQ ID NO: 5685584 - DNA, 25 bp, Homo sapien
taataggcactattcttgccccgca

SEQ ID NO: 5685585 - DNA, 25 bp, Homo sapien
acgcccggccctaataggcactatt

SEQ ID NO: 5685586 - DNA, 25 bp, Homo sapien
tctggctagctgcttgccatctagg

SEQ ID NO: 5685587 - DNA, 25 bp, Homo sapien
ttgccccgcaacctggtctggctag

SEQ ID NO: 5685588 - DNA, 25 bp, Homo sapien
tgccatctaggtccctttcagctga

SEQ ID NO: 5685589 - DNA, 25 bp, Homo sapien
catctaggtccctttcagctgacat

SEQ ID NO: 5685590 - DNA, 25 bp, Homo sapien
caacgagctgagaccgtgccattgc

SEQ ID NO: 5685591 - DNA, 25 bp, Homo sapien
aacgagctgagaccgtgccattgca

SEQ ID NO: 5685592 - DNA, 25 bp, Homo sapien
cctgggcaacaaaagtccgtctcaa

SEQ ID NO: 5685593 - DNA, 25 bp, Homo sapien
ctgggcaacaaaagtccgtctcaaa

SEQ ID NO: 5685594 - DNA, 25 bp, Homo sapien
gcaacgagctgagaccgtgccattg

SEQ ID NO: 5685595 - DNA, 25 bp, Homo sapien
ctgagaccgtgccattgcactccag

SEQ ID NO: 5685596 - DNA, 25 bp, Homo sapien
ttgagacggacttttgttgcccagg

SEQ ID NO: 5685597 - DNA, 25 bp, Homo sapien
gcaatggcacggtctcagctcgttg

SEQ ID NO: 5685598 - DNA, 25 bp, Homo sapien
tgcaatggcacggtctcagctcgtt

SEQ ID NO: 5685599 - DNA, 25 bp, Homo sapien
ctggagtgcaatggcacggtctcag

SEQ ID NO: 5685600 - DNA, 25 bp, Homo sapien
caatggcacggtctcagctcgttgc

SEQ ID NO: 5685601 - DNA, 25 bp, Homo sapien
tttgagacggacttttgttgcccag

SEQ ID NO: 5685602 - DNA, 25 bp, Homo sapien
tgtgggaagaataaatttaacgcaa

SEQ ID NO: 5685603 - DNA, 25 bp, Homo sapien
cacctctagaattatgtgatcatat

SEQ ID NO: 5685604 - DNA, 25 bp, Homo sapien
atatgatcacataattctagaggtg

SEQ ID NO: 5685605 - DNA, 25 bp, Homo sapien
ttgcgttaaatttattcttcccaca

SEQ ID NO: 5685606 - DNA, 25 bp, Homo sapien
tatgtgatcatattcctcaggcttt

SEQ ID NO: 5685607 - DNA, 25 bp, Homo sapien
tgtgggaagaataaatttaacgcaa

SEQ ID NO: 5685608 - DNA, 25 bp, Homo sapien
cacctctagaattatgtgatcatat

SEQ ID NO: 5685609 - DNA, 25 bp, Homo sapien
aagaggtcacctctagaattatgtg

SEQ ID NO: 5685610 - DNA, 25 bp, Homo sapien
cctcaggcttttccctgtcacaaag

SEQ ID NO: 5685611 - DNA, 25 bp, Homo sapien
tttattttcataagaggtcacctct

SEQ ID NO: 5685612 - DNA, 25 bp, Homo sapien
ctttgtgacagggaaaagcctgagg

SEQ ID NO: 5685613 - DNA, 25 bp, Homo sapien
tcacataattctagaggtgacctct

SEQ ID NO: 5685614 - DNA, 25 bp, Homo sapien
atatgatcacataattctagaggtg

SEQ ID NO: 5685615 - DNA, 25 bp, Homo sapien
ttgcgttaaatttattcttcccaca

SEQ ID NO: 5685616 - DNA, 25 bp, Homo sapien
gaaaagcctgaggaatatgatcaca

SEQ ID NO: 5685617 - DNA, 25 bp, Homo sapien
agaggtgacctcttatgaaaataaa

SEQ ID NO: 5685618 - DNA, 25 bp, Homo sapien
ttgaggatgtgaaccacattgtctg

SEQ ID NO: 5685619 - DNA, 25 bp, Homo sapien
tttgaggatgtgaaccacattgtct

SEQ ID NO: 5685620 - DNA, 25 bp, Homo sapien
gaaccatttgaggatgtgaaccaca

SEQ ID NO: 5685621 - DNA, 25 bp, Homo sapien
agaaccatttgaggatgtgaaccac

SEQ ID NO: 5685622 - DNA, 25 bp, Homo sapien
agacaatgtggttcacatcctcaaa

SEQ ID NO: 5685623 - DNA, 25 bp, Homo sapien
cagacaatgtggttcacatcctcaa

SEQ ID NO: 5685624 - DNA, 25 bp, Homo sapien
gtggttcacatcctcaaatggttct

SEQ ID NO: 5685625 - DNA, 25 bp, Homo sapien
tgtggttcacatcctcaaatggttc

SEQ ID NO: 5685626 - DNA, 25 bp, Homo sapien
agtctggctctgttgtccaggctgg

SEQ ID NO: 5685627 - DNA, 25 bp, Homo sapien
tggagtctggctctgttgtccaggc

SEQ ID NO: 5685628 - DNA, 25 bp, Homo sapien
gagtctggctctgttgtccaggctg

SEQ ID NO: 5685629 - DNA, 25 bp, Homo sapien
atggagtctggctctgttgtccagg

SEQ ID NO: 5685630 - DNA, 25 bp, Homo sapien
gtctggctctgttgtccaggctgga

SEQ ID NO: 5685631 - DNA, 25 bp, Homo sapien
ggagtctggctctgttgtccaggct

SEQ ID NO: 5685632 - DNA, 25 bp, Homo sapien
agcctggacaacagagccagactcc

SEQ ID NO: 5685633 - DNA, 25 bp, Homo sapien
tccagcctggacaacagagccagac

SEQ ID NO: 5685634 - DNA, 25 bp, Homo sapien
cagcctggacaacagagccagactc

SEQ ID NO: 5685635 - DNA, 25 bp, Homo sapien
cctggacaacagagccagactccat

SEQ ID NO: 5685636 - DNA, 25 bp, Homo sapien
ccagcctggacaacagagccagact

SEQ ID NO: 5685637 - DNA, 25 bp, Homo sapien
gcctggacaacagagccagactcca

SEQ ID NO: 5685638 - DNA, 25 bp, Homo sapien
atgcgccaccacgcctggctaattt

SEQ ID NO: 5685639 - DNA, 25 bp, Homo sapien
gcatgcgccaccacgcctggctaat

SEQ ID NO: 5685640 - DNA, 25 bp, Homo sapien
aatttttgtatttttagtagagatg

SEQ ID NO: 5685641 - DNA, 25 bp, Homo sapien
catgcgccaccacgcctggctaatt

SEQ ID NO: 5685642 - DNA, 25 bp, Homo sapien
ggcatgcgccaccacgcctggctaa

SEQ ID NO: 5685643 - DNA, 25 bp, Homo sapien
agagatggggtttcaccctgttggt

SEQ ID NO: 5685644 - DNA, 25 bp, Homo sapien
aattagccaggcgtggtggcgcatg

SEQ ID NO: 5685645 - DNA, 25 bp, Homo sapien
accaacagggtgaaaccccatctct

SEQ ID NO: 5685646 - DNA, 25 bp, Homo sapien
attagccaggcgtggtggcgcatgc

SEQ ID NO: 5685647 - DNA, 25 bp, Homo sapien
ttagccaggcgtggtggcgcatgcc

SEQ ID NO: 5685648 - DNA, 25 bp, Homo sapien
aaattagccaggcgtggtggcgcat

SEQ ID NO: 5685649 - DNA, 25 bp, Homo sapien
catctctactaaaaatacaaaaatt

SEQ ID NO: 5685650 - DNA, 25 bp, Homo sapien
gccatatttccttcagacccatttc

SEQ ID NO: 5685651 - DNA, 25 bp, Homo sapien
tcttgccatatttccttcagaccca

SEQ ID NO: 5685652 - DNA, 25 bp, Homo sapien
tcttttgttttgagctctgtcgtcc

SEQ ID NO: 5685653 - DNA, 25 bp, Homo sapien
tccttcagacccatttctcttttgt

SEQ ID NO: 5685654 - DNA, 25 bp, Homo sapien
tttgttttgagctctgtcgtccagg

SEQ ID NO: 5685655 - DNA, 25 bp, Homo sapien
taatgtcttgccatatttccttcag

SEQ ID NO: 5685656 - DNA, 25 bp, Homo sapien
cctggacgacagagctcaaaacaaa

SEQ ID NO: 5685657 - DNA, 25 bp, Homo sapien
gacgacagagctcaaaacaaaagag

SEQ ID NO: 5685658 - DNA, 25 bp, Homo sapien
caaaagagaaatgggtctgaaggaa

SEQ ID NO: 5685659 - DNA, 25 bp, Homo sapien
aatgggtctgaaggaaatatggcaa

SEQ ID NO: 5685660 - DNA, 25 bp, Homo sapien
aaacaaaagagaaatgggtctgaag

SEQ ID NO: 5685661 - DNA, 25 bp, Homo sapien
tctgaaggaaatatggcaagacatt

SEQ ID NO: 5685662 - DNA, 25 bp, Homo sapien
gcactgtccttagacccatttcttt

SEQ ID NO: 5685663 - DNA, 25 bp, Homo sapien
cactgtccttagacccatttctttt

SEQ ID NO: 5685664 - DNA, 25 bp, Homo sapien
aaagaaatgggtctaaggacagtgc

SEQ ID NO: 5685665 - DNA, 25 bp, Homo sapien
aaaagaaatgggtctaaggacagtg

SEQ ID NO: 5685666 - DNA, 25 bp, Homo sapien
ctgcactgtccttagacccatttct

SEQ ID NO: 5685667 - DNA, 25 bp, Homo sapien
cactgcactgtccttagacccattt

SEQ ID NO: 5685668 - DNA, 25 bp, Homo sapien
actgcactgtccttagacccatttc

SEQ ID NO: 5685669 - DNA, 25 bp, Homo sapien
gcactgtccttagacccatttcttt

SEQ ID NO: 5685670 - DNA, 25 bp, Homo sapien
tgcactgtccttagacccatttctt

SEQ ID NO: 5685671 - DNA, 25 bp, Homo sapien
cactgtccttagacccatttctttt

SEQ ID NO: 5685672 - DNA, 25 bp, Homo sapien
aaagaaatgggtctaaggacagtgc

SEQ ID NO: 5685673 - DNA, 25 bp, Homo sapien
aaaagaaatgggtctaaggacagtg

SEQ ID NO: 5685674 - DNA, 25 bp, Homo sapien
aagaaatgggtctaaggacagtgca

SEQ ID NO: 5685675 - DNA, 25 bp, Homo sapien
gaaatgggtctaaggacagtgcagt

SEQ ID NO: 5685676 - DNA, 25 bp, Homo sapien
aaatgggtctaaggacagtgcagtg

SEQ ID NO: 5685677 - DNA, 25 bp, Homo sapien
agaaatgggtctaaggacagtgcag

SEQ ID NO: 5685678 - DNA, 25 bp, Homo sapien
catgcccggcccctcagactcgttt

SEQ ID NO: 5685679 - DNA, 25 bp, Homo sapien
aaacgagtctgaggggccgggcatg

SEQ ID NO: 5685680 - DNA, 25 bp, Homo sapien
cccgccttagccttttacagtgctg

SEQ ID NO: 5685681 - DNA, 25 bp, Homo sapien
cgccttagccttttacagtgctggg

SEQ ID NO: 5685682 - DNA, 25 bp, Homo sapien
gcccgccttagccttttacagtgct

SEQ ID NO: 5685683 - DNA, 25 bp, Homo sapien
ccttagccttttacagtgctgggat

SEQ ID NO: 5685684 - DNA, 25 bp, Homo sapien
gccttagccttttacagtgctggga

SEQ ID NO: 5685685 - DNA, 25 bp, Homo sapien
catgcccggcccctcagactcgttt

SEQ ID NO: 5685686 - DNA, 25 bp, Homo sapien
atcccagcactgtaaaaggctaagg

SEQ ID NO: 5685687 - DNA, 25 bp, Homo sapien
aaacgagtctgaggggccgggcatg

SEQ ID NO: 5685688 - DNA, 25 bp, Homo sapien
agcactgtaaaaggctaaggcgggc

SEQ ID NO: 5685689 - DNA, 25 bp, Homo sapien
cccagcactgtaaaaggctaaggcg

SEQ ID NO: 5685690 - DNA, 25 bp, Homo sapien
tcccagcactgtaaaaggctaaggc

SEQ ID NO: 5685691 - DNA, 25 bp, Homo sapien
cagcactgtaaaaggctaaggcggg

SEQ ID NO: 5685692 - DNA, 25 bp, Homo sapien
tgggttcaagcagttctctgcctca

SEQ ID NO: 5685693 - DNA, 25 bp, Homo sapien
cctgggttcaagcagttctctgcct

SEQ ID NO: 5685694 - DNA, 25 bp, Homo sapien
tcctgggttcaagcagttctctgcc

SEQ ID NO: 5685695 - DNA, 25 bp, Homo sapien
gggttcaagcagttctctgcctcag

SEQ ID NO: 5685696 - DNA, 25 bp, Homo sapien
gtggtgtgacctcagctcactgcaa

SEQ ID NO: 5685697 - DNA, 25 bp, Homo sapien
ctgggttcaagcagttctctgcctc

SEQ ID NO: 5685698 - DNA, 25 bp, Homo sapien
aggcagagaactgcttgaacccagg

SEQ ID NO: 5685699 - DNA, 25 bp, Homo sapien
gaggcagagaactgcttgaacccag

SEQ ID NO: 5685700 - DNA, 25 bp, Homo sapien
tgaggcagagaactgcttgaaccca

SEQ ID NO: 5685701 - DNA, 25 bp, Homo sapien
ctgaggcagagaactgcttgaaccc

SEQ ID NO: 5685702 - DNA, 25 bp, Homo sapien
ggcagagaactgcttgaacccagga

SEQ ID NO: 5685703 - DNA, 25 bp, Homo sapien
ttgcagtgagctgaggtcacaccac

SEQ ID NO: 5685704 - DNA, 25 bp, Homo sapien
ggttctcattttgcgtgtttatata

SEQ ID NO: 5685705 - DNA, 25 bp, Homo sapien
gaccgtggttctcattttgcgtgtt

SEQ ID NO: 5685706 - DNA, 25 bp, Homo sapien
gtgaagtagaactaactctgtgcca

SEQ ID NO: 5685707 - DNA, 25 bp, Homo sapien
tcattttgcgtgtttatatattatc

SEQ ID NO: 5685708 - DNA, 25 bp, Homo sapien
gaagtgaagtagaactaactctgtg

SEQ ID NO: 5685709 - DNA, 25 bp, Homo sapien
ccgtggttctcattttgcgtgttta

SEQ ID NO: 5685710 - DNA, 25 bp, Homo sapien
tatataaacacgcaaaatgagaacc

SEQ ID NO: 5685711 - DNA, 25 bp, Homo sapien
aacacgcaaaatgagaaccacggtc

SEQ ID NO: 5685712 - DNA, 25 bp, Homo sapien
tggcacagagttagttctacttcac

SEQ ID NO: 5685713 - DNA, 25 bp, Homo sapien
gataatatataaacacgcaaaatga

SEQ ID NO: 5685714 - DNA, 25 bp, Homo sapien
taaacacgcaaaatgagaaccacgg

SEQ ID NO: 5685715 - DNA, 25 bp, Homo sapien
cacagagttagttctacttcacttc

SEQ ID NO: 5685716 - DNA, 25 bp, Homo sapien
gcttggtgttgcactgaatgccaca

SEQ ID NO: 5685717 - DNA, 25 bp, Homo sapien
tgtcgattaagtttatccacttaaa

SEQ ID NO: 5685718 - DNA, 25 bp, Homo sapien
ttggtgttgcactgaatgccacaat

SEQ ID NO: 5685719 - DNA, 25 bp, Homo sapien
tcagaaatgaagatacatgtcgatt

SEQ ID NO: 5685720 - DNA, 25 bp, Homo sapien
gaaatgaagatacatgtcgattaag

SEQ ID NO: 5685721 - DNA, 25 bp, Homo sapien
tacatgtcgattaagtttatccact

SEQ ID NO: 5685722 - DNA, 25 bp, Homo sapien
taagtggataaacttaatcgacatg

SEQ ID NO: 5685723 - DNA, 25 bp, Homo sapien
tttaagtggataaacttaatcgaca

SEQ ID NO: 5685724 - DNA, 25 bp, Homo sapien
attgtggcattcagtgcaacaccaa

SEQ ID NO: 5685725 - DNA, 25 bp, Homo sapien
tgtggcattcagtgcaacaccaagc

SEQ ID NO: 5685726 - DNA, 25 bp, Homo sapien
taatcgacatgtatcttcatttctg

SEQ ID NO: 5685727 - DNA, 25 bp, Homo sapien
ggataaacttaatcgacatgtatct

SEQ ID NO: 5685728 - DNA, 25 bp, Homo sapien
gatgatcatataactggtcacccaa

SEQ ID NO: 5685729 - DNA, 25 bp, Homo sapien
gatcatataactggtcacccaaacc

SEQ ID NO: 5685730 - DNA, 25 bp, Homo sapien
atataactggtcacccaaaccagaa

SEQ ID NO: 5685731 - DNA, 25 bp, Homo sapien
taataggatgatcatataactggtc

SEQ ID NO: 5685732 - DNA, 25 bp, Homo sapien
taggatgatcatataactggtcacc

SEQ ID NO: 5685733 - DNA, 25 bp, Homo sapien
ttgcaagatgagttattaataggat

SEQ ID NO: 5685734 - DNA, 25 bp, Homo sapien
gaccagttatatgatcatcctatta

SEQ ID NO: 5685735 - DNA, 25 bp, Homo sapien
tgggtgaccagttatatgatcatcc

SEQ ID NO: 5685736 - DNA, 25 bp, Homo sapien
ggtgaccagttatatgatcatccta

SEQ ID NO: 5685737 - DNA, 25 bp, Homo sapien
atcctattaataactcatcttgcaa

SEQ ID NO: 5685738 - DNA, 25 bp, Homo sapien
gtttgggtgaccagttatatgatca

SEQ ID NO: 5685739 - DNA, 25 bp, Homo sapien
tctggtttgggtgaccagttatatg

SEQ ID NO: 5685740 - DNA, 25 bp, Homo sapien
cagctataagtagggtctgtcccgg

SEQ ID NO: 5685741 - DNA, 25 bp, Homo sapien
gccagtgtattagcttaaatttggt

SEQ ID NO: 5685742 - DNA, 25 bp, Homo sapien
tatttagccagtgtattagcttaaa

SEQ ID NO: 5685743 - DNA, 25 bp, Homo sapien
taaatatatttagccagtgtattag

SEQ ID NO: 5685744 - DNA, 25 bp, Homo sapien
cagcagctataagtagggtctgtcc

SEQ ID NO: 5685745 - DNA, 25 bp, Homo sapien
cagggcagcagctataagtagggtc

SEQ ID NO: 5685746 - DNA, 25 bp, Homo sapien
ggacagaccctacttatagctgctg

SEQ ID NO: 5685747 - DNA, 25 bp, Homo sapien
taagctaatacactggctaaatata

SEQ ID NO: 5685748 - DNA, 25 bp, Homo sapien
gaccctacttatagctgctgccctg

SEQ ID NO: 5685749 - DNA, 25 bp, Homo sapien
ccgggacagaccctacttatagctg

SEQ ID NO: 5685750 - DNA, 25 bp, Homo sapien
accaaatttaagctaatacactggc

SEQ ID NO: 5685751 - DNA, 25 bp, Homo sapien
caaatttaagctaatacactggcta

SEQ ID NO: 5685752 - DNA, 25 bp, Homo sapien
tgtgtaaacgttactctagctgggt

SEQ ID NO: 5685753 - DNA, 25 bp, Homo sapien
gctgtgtaaacgttactctagctgg

SEQ ID NO: 5685754 - DNA, 25 bp, Homo sapien
gtaaacgttactctagctgggtgtg

SEQ ID NO: 5685755 - DNA, 25 bp, Homo sapien
tgtaaacgttactctagctgggtgt

SEQ ID NO: 5685756 - DNA, 25 bp, Homo sapien
cagctgtgtaaacgttactctagct

SEQ ID NO: 5685757 - DNA, 25 bp, Homo sapien
gtatttcctgtcatgttactttcaa

SEQ ID NO: 5685758 - DNA, 25 bp, Homo sapien
gtttgaaagtaacatgacaggaaat

SEQ ID NO: 5685759 - DNA, 25 bp, Homo sapien
cccagctagagtaacgtttacacag

SEQ ID NO: 5685760 - DNA, 25 bp, Homo sapien
agctagagtaacgtttacacagctg

SEQ ID NO: 5685761 - DNA, 25 bp, Homo sapien
cacacccagctagagtaacgtttac

SEQ ID NO: 5685762 - DNA, 25 bp, Homo sapien
ttgaaagtaacatgacaggaaatac

SEQ ID NO: 5685763 - DNA, 25 bp, Homo sapien
cacccagctagagtaacgtttacac

SEQ ID NO: 5685764 - DNA, 25 bp, Homo sapien
tgtgtcactgccctctagcccaggt

SEQ ID NO: 5685765 - DNA, 25 bp, Homo sapien
tgccctctagcccaggtgacagggt

SEQ ID NO: 5685766 - DNA, 25 bp, Homo sapien
tgtcactgccctctagcccaggtga

SEQ ID NO: 5685767 - DNA, 25 bp, Homo sapien
ccctctagcccaggtgacagggtga

SEQ ID NO: 5685768 - DNA, 25 bp, Homo sapien
cctctagcccaggtgacagggtgag

SEQ ID NO: 5685769 - DNA, 25 bp, Homo sapien
gtgtcactgccctctagcccaggtg

SEQ ID NO: 5685770 - DNA, 25 bp, Homo sapien
ctcaccctgtcacctgggctagagg

SEQ ID NO: 5685771 - DNA, 25 bp, Homo sapien
tcacctgggctagagggcagtgaca

SEQ ID NO: 5685772 - DNA, 25 bp, Homo sapien
accctgtcacctgggctagagggca

SEQ ID NO: 5685773 - DNA, 25 bp, Homo sapien
tcaccctgtcacctgggctagaggg

SEQ ID NO: 5685774 - DNA, 25 bp, Homo sapien
cacctgggctagagggcagtgacac

SEQ ID NO: 5685775 - DNA, 25 bp, Homo sapien
acctgggctagagggcagtgacaca

SEQ ID NO: 5685776 - DNA, 25 bp, Homo sapien
aacatctttctcgtagattaaggtc

SEQ ID NO: 5685777 - DNA, 25 bp, Homo sapien
aatatgataacatctttctcgtaga

SEQ ID NO: 5685778 - DNA, 25 bp, Homo sapien
catctttctcgtagattaaggtcac

SEQ ID NO: 5685779 - DNA, 25 bp, Homo sapien
atctttctcgtagattaaggtcacc

SEQ ID NO: 5685780 - DNA, 25 bp, Homo sapien
aaatatgataacatctttctcgtag

SEQ ID NO: 5685781 - DNA, 25 bp, Homo sapien
gataacatctttctcgtagattaag

SEQ ID NO: 5685782 - DNA, 25 bp, Homo sapien
gaccttaatctacgagaaagatgtt

SEQ ID NO: 5685783 - DNA, 25 bp, Homo sapien
gtgaccttaatctacgagaaagatg

SEQ ID NO: 5685784 - DNA, 25 bp, Homo sapien
taatctacgagaaagatgttatcat

SEQ ID NO: 5685785 - DNA, 25 bp, Homo sapien
ggtgaccttaatctacgagaaagat

SEQ ID NO: 5685786 - DNA, 25 bp, Homo sapien
tctacgagaaagatgttatcatatt

SEQ ID NO: 5685787 - DNA, 25 bp, Homo sapien
ccttaatctacgagaaagatgttat

SEQ ID NO: 5685788 - DNA, 25 bp, Homo sapien
ggtttgtaatccatacatggagtta

SEQ ID NO: 5685789 - DNA, 25 bp, Homo sapien
aggtttgtaatccatacatggagtt

SEQ ID NO: 5685790 - DNA, 25 bp, Homo sapien
aagaggtttgtaatccatacatgga

SEQ ID NO: 5685791 - DNA, 25 bp, Homo sapien
gtttgtaatccatacatggagttat

SEQ ID NO: 5685792 - DNA, 25 bp, Homo sapien
agaggtttgtaatccatacatggag

SEQ ID NO: 5685793 - DNA, 25 bp, Homo sapien
gaggtttgtaatccatacatggagt

SEQ ID NO: 5685794 - DNA, 25 bp, Homo sapien
agtacagtgtagccgtgatgtggtc

SEQ ID NO: 5685795 - DNA, 25 bp, Homo sapien
acagtgtagccgtgatgtggtcatt

SEQ ID NO: 5685796 - DNA, 25 bp, Homo sapien
cagtacagtgtagccgtgatgtggt

SEQ ID NO: 5685797 - DNA, 25 bp, Homo sapien
tacagtgtagccgtgatgtggtcat

SEQ ID NO: 5685798 - DNA, 25 bp, Homo sapien
gtacagtgtagccgtgatgtggtca

SEQ ID NO: 5685799 - DNA, 25 bp, Homo sapien
cagtgtagccgtgatgtggtcattt

SEQ ID NO: 5685800 - DNA, 25 bp, Homo sapien
aatgaccacatcacggctacactgt

SEQ ID NO: 5685801 - DNA, 25 bp, Homo sapien
gaccacatcacggctacactgtact

SEQ ID NO: 5685802 - DNA, 25 bp, Homo sapien
atgaccacatcacggctacactgta

SEQ ID NO: 5685803 - DNA, 25 bp, Homo sapien
aaatgaccacatcacggctacactg

SEQ ID NO: 5685804 - DNA, 25 bp, Homo sapien
tgaccacatcacggctacactgtac

SEQ ID NO: 5685805 - DNA, 25 bp, Homo sapien
accacatcacggctacactgtactg

SEQ ID NO: 5685806 - DNA, 25 bp, Homo sapien
aactccatgtatggattacaaacct

SEQ ID NO: 5685807 - DNA, 25 bp, Homo sapien
tccatgtatggattacaaacctctt

SEQ ID NO: 5685808 - DNA, 25 bp, Homo sapien
actccatgtatggattacaaacctc

SEQ ID NO: 5685809 - DNA, 25 bp, Homo sapien
taactccatgtatggattacaaacc

SEQ ID NO: 5685810 - DNA, 25 bp, Homo sapien
ataactccatgtatggattacaaac

SEQ ID NO: 5685811 - DNA, 25 bp, Homo sapien
ctccatgtatggattacaaacctct

SEQ ID NO: 5685812 - DNA, 25 bp, Homo sapien
ggtttgtaatccatacatggagtta

SEQ ID NO: 5685813 - DNA, 25 bp, Homo sapien
tacagtgtagccgtgatgtggtcat

SEQ ID NO: 5685814 - DNA, 25 bp, Homo sapien
aagaggtttgtaatccatacatgga

SEQ ID NO: 5685815 - DNA, 25 bp, Homo sapien
gtttgtaatccatacatggagttat

SEQ ID NO: 5685816 - DNA, 25 bp, Homo sapien
agaggtttgtaatccatacatggag

SEQ ID NO: 5685817 - DNA, 25 bp, Homo sapien
gaggtttgtaatccatacatggagt

SEQ ID NO: 5685818 - DNA, 25 bp, Homo sapien
tccatgtatggattacaaacctctt

SEQ ID NO: 5685819 - DNA, 25 bp, Homo sapien
tcaggacaaatgaccacatcacggc

SEQ ID NO: 5685820 - DNA, 25 bp, Homo sapien
actccatgtatggattacaaacctc

SEQ ID NO: 5685821 - DNA, 25 bp, Homo sapien
taactccatgtatggattacaaacc

SEQ ID NO: 5685822 - DNA, 25 bp, Homo sapien
ataactccatgtatggattacaaac

SEQ ID NO: 5685823 - DNA, 25 bp, Homo sapien
accacatcacggctacactgtactg

SEQ ID NO: 5685824 - DNA, 25 bp, Homo sapien
tgttgttagcacagactcattttag

SEQ ID NO: 5685825 - DNA, 25 bp, Homo sapien
tgtcttcccctgacagattaagagg

SEQ ID NO: 5685826 - DNA, 25 bp, Homo sapien
taagagtgttgttagcacagactca

SEQ ID NO: 5685827 - DNA, 25 bp, Homo sapien
tcttaagagtgttgttagcacagac

SEQ ID NO: 5685828 - DNA, 25 bp, Homo sapien
ttgttagcacagactcattttagaa

SEQ ID NO: 5685829 - DNA, 25 bp, Homo sapien
aatgtcttaagagtgttgttagcac

SEQ ID NO: 5685830 - DNA, 25 bp, Homo sapien
tgctaacaacactcttaagacattt

SEQ ID NO: 5685831 - DNA, 25 bp, Homo sapien
taaaatgagtctgtgctaacaacac

SEQ ID NO: 5685832 - DNA, 25 bp, Homo sapien
gagtctgtgctaacaacactcttaa

SEQ ID NO: 5685833 - DNA, 25 bp, Homo sapien
tctaaaatgagtctgtgctaacaac

SEQ ID NO: 5685834 - DNA, 25 bp, Homo sapien
cctcttaatctgtcaggggaagaca

SEQ ID NO: 5685835 - DNA, 25 bp, Homo sapien
tctgtgctaacaacactcttaagac

SEQ ID NO: 5685836 - DNA, 25 bp, Homo sapien
acagaatgtgcttagtaagtgggtg

SEQ ID NO: 5685837 - DNA, 25 bp, Homo sapien
aatgtggcaattgcttgatacagaa

SEQ ID NO: 5685838 - DNA, 25 bp, Homo sapien
ggcaattgcttgatacagaatgtgc

SEQ ID NO: 5685839 - DNA, 25 bp, Homo sapien
taggtggccggttggatgtgtggcc

SEQ ID NO: 5685840 - DNA, 25 bp, Homo sapien
tgcttagtaagtgggtggctggatg

SEQ ID NO: 5685841 - DNA, 25 bp, Homo sapien
tggctggatgggtaggtggccggtt

SEQ ID NO: 5685842 - DNA, 25 bp, Homo sapien
gcacattctgtatcaagcaattgcc

SEQ ID NO: 5685843 - DNA, 25 bp, Homo sapien
tggccacacatccaaccggccacct

SEQ ID NO: 5685844 - DNA, 25 bp, Homo sapien
catccagccacccacttactaagca

SEQ ID NO: 5685845 - DNA, 25 bp, Homo sapien
ttctgtatcaagcaattgccacatt

SEQ ID NO: 5685846 - DNA, 25 bp, Homo sapien
cattctgtatcaagcaattgccaca

SEQ ID NO: 5685847 - DNA, 25 bp, Homo sapien
cacccacttactaagcacattctgt

SEQ ID NO: 5685848 - DNA, 25 bp, Homo sapien
gcctcctattacacatttttacctg

SEQ ID NO: 5685849 - DNA, 25 bp, Homo sapien
ggctgcattgttttcccatcagtat

SEQ ID NO: 5685850 - DNA, 25 bp, Homo sapien
tttttctggcttacacaggcatcct

SEQ ID NO: 5685851 - DNA, 25 bp, Homo sapien
ctggcttacacaggcatccttgcct

SEQ ID NO: 5685852 - DNA, 25 bp, Homo sapien
tggctgcattgttttcccatcagta

SEQ ID NO: 5685853 - DNA, 25 bp, Homo sapien
ttctggcttacacaggcatccttgc

SEQ ID NO: 5685854 - DNA, 25 bp, Homo sapien
aggcaaggatgcctgtgtaagccag

SEQ ID NO: 5685855 - DNA, 25 bp, Homo sapien
atactgatgggaaaacaatgcagcc

SEQ ID NO: 5685856 - DNA, 25 bp, Homo sapien
caggtaaaaatgtgtaataggaggc

SEQ ID NO: 5685857 - DNA, 25 bp, Homo sapien
tactgatgggaaaacaatgcagcca

SEQ ID NO: 5685858 - DNA, 25 bp, Homo sapien
aggatgcctgtgtaagccagaaaaa

SEQ ID NO: 5685859 - DNA, 25 bp, Homo sapien
gcaaggatgcctgtgtaagccagaa

SEQ ID NO: 5685860 - DNA, 25 bp, Homo sapien
tttgtttagaggaatggtcccactc

SEQ ID NO: 5685861 - DNA, 25 bp, Homo sapien
ttgtttagaggaatggtcccactct

SEQ ID NO: 5685862 - DNA, 25 bp, Homo sapien
agagtgggaccattcctctaaacaa

SEQ ID NO: 5685863 - DNA, 25 bp, Homo sapien
gagtgggaccattcctctaaacaaa

SEQ ID NO: 5685864 - DNA, 25 bp, Homo sapien
tttagaggaatggtcccactctctc

SEQ ID NO: 5685865 - DNA, 25 bp, Homo sapien
tttgtttagaggaatggtcccactc

SEQ ID NO: 5685866 - DNA, 25 bp, Homo sapien
ttgtttagaggaatggtcccactct

SEQ ID NO: 5685867 - DNA, 25 bp, Homo sapien
tagaggaatggtcccactctctccc

SEQ ID NO: 5685868 - DNA, 25 bp, Homo sapien
atggtcccactctctcccctaggct

SEQ ID NO: 5685869 - DNA, 25 bp, Homo sapien
tgtttagaggaatggtcccactctc

SEQ ID NO: 5685870 - DNA, 25 bp, Homo sapien
agagtgggaccattcctctaaacaa

SEQ ID NO: 5685871 - DNA, 25 bp, Homo sapien
gagagagtgggaccattcctctaaa

SEQ ID NO: 5685872 - DNA, 25 bp, Homo sapien
gagagtgggaccattcctctaaaca

SEQ ID NO: 5685873 - DNA, 25 bp, Homo sapien
gggagagagtgggaccattcctcta

SEQ ID NO: 5685874 - DNA, 25 bp, Homo sapien
ggagagagtgggaccattcctctaa

SEQ ID NO: 5685875 - DNA, 25 bp, Homo sapien
gagtgggaccattcctctaaacaaa

SEQ ID NO: 5685876 - DNA, 25 bp, Homo sapien
gagttccactgtagttgtgttgttt

SEQ ID NO: 5685877 - DNA, 25 bp, Homo sapien
aagatactttcagagttccactgta

SEQ ID NO: 5685878 - DNA, 25 bp, Homo sapien
aaacaacacaactacagtggaactc

SEQ ID NO: 5685879 - DNA, 25 bp, Homo sapien
tacagtggaactctgaaagtatctt

SEQ ID NO: 5685880 - DNA, 25 bp, Homo sapien
tctaaagatactttcagagttccac

SEQ ID NO: 5685881 - DNA, 25 bp, Homo sapien
gagttccactgtagttgtgttgttt

SEQ ID NO: 5685882 - DNA, 25 bp, Homo sapien
tactttcagagttccactgtagttg

SEQ ID NO: 5685883 - DNA, 25 bp, Homo sapien
catgtgccatgcccggccattattt

SEQ ID NO: 5685884 - DNA, 25 bp, Homo sapien
catgcccggccattattttttctaa

SEQ ID NO: 5685885 - DNA, 25 bp, Homo sapien
aagatactttcagagttccactgta

SEQ ID NO: 5685886 - DNA, 25 bp, Homo sapien
aaataatggccgggcatggcacatg

SEQ ID NO: 5685887 - DNA, 25 bp, Homo sapien
aaacaacacaactacagtggaactc

SEQ ID NO: 5685888 - DNA, 25 bp, Homo sapien
tacagtggaactctgaaagtatctt

SEQ ID NO: 5685889 - DNA, 25 bp, Homo sapien
ttagaaaaaataatggccgggcatg

SEQ ID NO: 5685890 - DNA, 25 bp, Homo sapien
caactacagtggaactctgaaagta

SEQ ID NO: 5685891 - DNA, 25 bp, Homo sapien
tagtccgagctacgtggggggttga

SEQ ID NO: 5685892 - DNA, 25 bp, Homo sapien
ccctttcctcagaaacatgctcccc

SEQ ID NO: 5685893 - DNA, 25 bp, Homo sapien
ctttaaggacgatggacacttttgg

SEQ ID NO: 5685894 - DNA, 25 bp, Homo sapien
acaggcgcttttgcacactccgtcg

SEQ ID NO: 5685895 - DNA, 25 bp, Homo sapien
tttaaggacgatggacacttttgga

SEQ ID NO: 5685896 - DNA, 25 bp, Homo sapien
tttggaagctagcatccctttcctc

SEQ ID NO: 5685897 - DNA, 25 bp, Homo sapien
aggcgcttttgcacactccgtcgtg

SEQ ID NO: 5685898 - DNA, 25 bp, Homo sapien
tccaaaagtgtccatcgtccttaaa

SEQ ID NO: 5685899 - DNA, 25 bp, Homo sapien
ccaaaagtgtccatcgtccttaaag

SEQ ID NO: 5685900 - DNA, 25 bp, Homo sapien
cgacggagtgtgcaaaagcgcctgt

SEQ ID NO: 5685901 - DNA, 25 bp, Homo sapien
cacgacggagtgtgcaaaagcgcct

SEQ ID NO: 5685902 - DNA, 25 bp, Homo sapien
cgcctgtgggggagcatgtttctga

SEQ ID NO: 5685903 - DNA, 25 bp, Homo sapien
gaggaaagggatgctagcttccaaa

SEQ ID NO: 5685904 - DNA, 25 bp, Homo sapien
atagcgagaccgtttctctttaaat

SEQ ID NO: 5685905 - DNA, 25 bp, Homo sapien
atttaaagagaaacggtctcgctat

SEQ ID NO: 5685906 - DNA, 25 bp, Homo sapien
aatttgtaaaagccaggtgtggtgg

SEQ ID NO: 5685907 - DNA, 25 bp, Homo sapien
atttgtaaaagccaggtgtggtggt

SEQ ID NO: 5685908 - DNA, 25 bp, Homo sapien
catagcgagaccgtttctctttaaa

SEQ ID NO: 5685909 - DNA, 25 bp, Homo sapien
atagcgagaccgtttctctttaaat

SEQ ID NO: 5685910 - DNA, 25 bp, Homo sapien
aaatttgtaaaagccaggtgtggtg

SEQ ID NO: 5685911 - DNA, 25 bp, Homo sapien
caccacacctggcttttacaaattt

SEQ ID NO: 5685912 - DNA, 25 bp, Homo sapien
tttaaagagaaacggtctcgctatg

SEQ ID NO: 5685913 - DNA, 25 bp, Homo sapien
taaagagaaacggtctcgctatgtt

SEQ ID NO: 5685914 - DNA, 25 bp, Homo sapien
ccaccacacctggcttttacaaatt

SEQ ID NO: 5685915 - DNA, 25 bp, Homo sapien
atttaaagagaaacggtctcgctat

SEQ ID NO: 5685916 - DNA, 25 bp, Homo sapien
ttcaatatcctccttgctatttgaa

SEQ ID NO: 5685917 - DNA, 25 bp, Homo sapien
cgttcaatatcctccttgctatttg

SEQ ID NO: 5685918 - DNA, 25 bp, Homo sapien
ggaacgttcaatatcctccttgcta

SEQ ID NO: 5685919 - DNA, 25 bp, Homo sapien
taactatagtcattctacgggggta

SEQ ID NO: 5685920 - DNA, 25 bp, Homo sapien
gaacgttcaatatcctccttgctat

SEQ ID NO: 5685921 - DNA, 25 bp, Homo sapien
cattctacgggggtatagaacacca

SEQ ID NO: 5685922 - DNA, 25 bp, Homo sapien
tctggtgttctatacccccgtagaa

SEQ ID NO: 5685923 - DNA, 25 bp, Homo sapien
tggtgttctatacccccgtagaatg

SEQ ID NO: 5685924 - DNA, 25 bp, Homo sapien
tacccccgtagaatgactatagtta

SEQ ID NO: 5685925 - DNA, 25 bp, Homo sapien
tagcaaggaggatattgaacgttcc

SEQ ID NO: 5685926 - DNA, 25 bp, Homo sapien
caaatagcaaggaggatattgaacg

SEQ ID NO: 5685927 - DNA, 25 bp, Homo sapien
tcaaatagcaaggaggatattgaac

SEQ ID NO: 5685928 - DNA, 25 bp, Homo sapien
cctttccattggatacatgccaagt

SEQ ID NO: 5685929 - DNA, 25 bp, Homo sapien
tttccattggatacatgccaagtag

SEQ ID NO: 5685930 - DNA, 25 bp, Homo sapien
ctgttggtgtagtaaacaagggagt

SEQ ID NO: 5685931 - DNA, 25 bp, Homo sapien
tcctttccattggatacatgccaag

SEQ ID NO: 5685932 - DNA, 25 bp, Homo sapien
ccattggatacatgccaagtagtgg

SEQ ID NO: 5685933 - DNA, 25 bp, Homo sapien
tgactgttggtgtagtaaacaaggg

SEQ ID NO: 5685934 - DNA, 25 bp, Homo sapien
actcccttgtttactacaccaacag

SEQ ID NO: 5685935 - DNA, 25 bp, Homo sapien
ccactacttggcatgtatccaatgg

SEQ ID NO: 5685936 - DNA, 25 bp, Homo sapien
actacttggcatgtatccaatggaa

SEQ ID NO: 5685937 - DNA, 25 bp, Homo sapien
ccttgtttactacaccaacagtcac

SEQ ID NO: 5685938 - DNA, 25 bp, Homo sapien
acttggcatgtatccaatggaaagg

SEQ ID NO: 5685939 - DNA, 25 bp, Homo sapien
tggcatgtatccaatggaaaggaaa

SEQ ID NO: 5685940 - DNA, 25 bp, Homo sapien
ctagctcctgcagaggctgaagtgg

SEQ ID NO: 5685941 - DNA, 25 bp, Homo sapien
tcctagctcctgcagaggctgaagt

SEQ ID NO: 5685942 - DNA, 25 bp, Homo sapien
agtcctagctcctgcagaggctgaa

SEQ ID NO: 5685943 - DNA, 25 bp, Homo sapien
ctgtagtcctagctcctgcagaggc

SEQ ID NO: 5685944 - DNA, 25 bp, Homo sapien
cctgtagtcctagctcctgcagagg

SEQ ID NO: 5685945 - DNA, 25 bp, Homo sapien
cctagctcctgcagaggctgaagtg

SEQ ID NO: 5685946 - DNA, 25 bp, Homo sapien
cacttcagcctctgcaggagctagg

SEQ ID NO: 5685947 - DNA, 25 bp, Homo sapien
gcctctgcaggagctaggactacag

SEQ ID NO: 5685948 - DNA, 25 bp, Homo sapien
ttcagcctctgcaggagctaggact

SEQ ID NO: 5685949 - DNA, 25 bp, Homo sapien
cctctgcaggagctaggactacagg

SEQ ID NO: 5685950 - DNA, 25 bp, Homo sapien
acttcagcctctgcaggagctagga

SEQ ID NO: 5685951 - DNA, 25 bp, Homo sapien
ccacttcagcctctgcaggagctag

SEQ ID NO: 5685952 - DNA, 25 bp, Homo sapien
cgcttgaatccgggagacggaagtt

SEQ ID NO: 5685953 - DNA, 25 bp, Homo sapien
atccgggagacggaagttgcagtga

SEQ ID NO: 5685954 - DNA, 25 bp, Homo sapien
tgagatcactgcactctaacctggg

SEQ ID NO: 5685955 - DNA, 25 bp, Homo sapien
aatcgcttgaatccgggagacggaa

SEQ ID NO: 5685956 - DNA, 25 bp, Homo sapien
ctgagatcactgcactctaacctgg

SEQ ID NO: 5685957 - DNA, 25 bp, Homo sapien
gagatcactgcactctaacctgggt

SEQ ID NO: 5685958 - DNA, 25 bp, Homo sapien
acccaggttagagtgcagtgatctc

SEQ ID NO: 5685959 - DNA, 25 bp, Homo sapien
cccaggttagagtgcagtgatctca

SEQ ID NO: 5685960 - DNA, 25 bp, Homo sapien
aacttccgtctcccggattcaagcg

SEQ ID NO: 5685961 - DNA, 25 bp, Homo sapien
ccaggttagagtgcagtgatctcag

SEQ ID NO: 5685962 - DNA, 25 bp, Homo sapien
tcactgcaacttccgtctcccggat

SEQ ID NO: 5685963 - DNA, 25 bp, Homo sapien
ttccgtctcccggattcaagcgatt

SEQ ID NO: 5685964 - DNA, 25 bp, Homo sapien
attttcatatttttagtagaaatgg

SEQ ID NO: 5685965 - DNA, 25 bp, Homo sapien
agtagaaatgggggttttgccatgt

SEQ ID NO: 5685966 - DNA, 25 bp, Homo sapien
gaccacaggtgtgcaccaccacacc

SEQ ID NO: 5685967 - DNA, 25 bp, Homo sapien
atgggaccacaggtgtgcaccacca

SEQ ID NO: 5685968 - DNA, 25 bp, Homo sapien
tagtagaaatgggggttttgccatg

SEQ ID NO: 5685969 - DNA, 25 bp, Homo sapien
accacaggtgtgcaccaccacaccc

SEQ ID NO: 5685970 - DNA, 25 bp, Homo sapien
tgtggtggtgcacacctgtggtccc

SEQ ID NO: 5685971 - DNA, 25 bp, Homo sapien
ggtgtggtggtgcacacctgtggtc

SEQ ID NO: 5685972 - DNA, 25 bp, Homo sapien
catggcaaaacccccatttctacta

SEQ ID NO: 5685973 - DNA, 25 bp, Homo sapien
ccatttctactaaaaatatgaaaat

SEQ ID NO: 5685974 - DNA, 25 bp, Homo sapien
acatggcaaaacccccatttctact

SEQ ID NO: 5685975 - DNA, 25 bp, Homo sapien
tggtggtgcacacctgtggtcccat

SEQ ID NO: 5685976 - DNA, 25 bp, Homo sapien
tattggactgtcaatttaatgcaca

SEQ ID NO: 5685977 - DNA, 25 bp, Homo sapien
agataggctatctcctgtacttccc

SEQ ID NO: 5685978 - DNA, 25 bp, Homo sapien
ctgttctattggcagataggctatc

SEQ ID NO: 5685979 - DNA, 25 bp, Homo sapien
tattggcagataggctatctcctgt

SEQ ID NO: 5685980 - DNA, 25 bp, Homo sapien
gcagataggctatctcctgtacttc

SEQ ID NO: 5685981 - DNA, 25 bp, Homo sapien
ttctattggcagataggctatctcc

SEQ ID NO: 5685982 - DNA, 25 bp, Homo sapien
gaagtacaggagatagcctatctgc

SEQ ID NO: 5685983 - DNA, 25 bp, Homo sapien
gggaagtacaggagatagcctatct

SEQ ID NO: 5685984 - DNA, 25 bp, Homo sapien
tgtgcattaaattgacagtccaata

SEQ ID NO: 5685985 - DNA, 25 bp, Homo sapien
gatagcctatctgccaatagaacag

SEQ ID NO: 5685986 - DNA, 25 bp, Homo sapien
ggagatagcctatctgccaatagaa

SEQ ID NO: 5685987 - DNA, 25 bp, Homo sapien
gtacaggagatagcctatctgccaa

SEQ ID NO: 5685988 - DNA, 25 bp, Homo sapien
cagcatctgcttatgttctgttaat

SEQ ID NO: 5685989 - DNA, 25 bp, Homo sapien
gaggaggctgtgaaaaaaaaataga

SEQ ID NO: 5685990 - DNA, 25 bp, Homo sapien
caaatatttcgggaggaggctgtga

SEQ ID NO: 5685991 - DNA, 25 bp, Homo sapien
tatttcgggaggaggctgtgaaaaa

SEQ ID NO: 5685992 - DNA, 25 bp, Homo sapien
taaagaatttcagcatctgcttatg

SEQ ID NO: 5685993 - DNA, 25 bp, Homo sapien
ttattcaaatatttcgggaggaggc

SEQ ID NO: 5685994 - DNA, 25 bp, Homo sapien
taagcagatgctgaaattctttagt

SEQ ID NO: 5685995 - DNA, 25 bp, Homo sapien
aattaacagaacataagcagatgct

SEQ ID NO: 5685996 - DNA, 25 bp, Homo sapien
acaaaattaacagaacataagcaga

SEQ ID NO: 5685997 - DNA, 25 bp, Homo sapien
tttttcacagcctcctcccgaaata

SEQ ID NO: 5685998 - DNA, 25 bp, Homo sapien
gcctcctcccgaaatatttgaataa

SEQ ID NO: 5685999 - DNA, 25 bp, Homo sapien
tcacagcctcctcccgaaatatttg

SEQ ID NO: 5686000 - DNA, 25 bp, Homo sapien
aaactcctgacctcgtgatccgccc

SEQ ID NO: 5686001 - DNA, 25 bp, Homo sapien
ccatgttggccagtctggtctcaaa

SEQ ID NO: 5686002 - DNA, 25 bp, Homo sapien
gttggccagtctggtctcaaactcc

SEQ ID NO: 5686003 - DNA, 25 bp, Homo sapien
accatgttggccagtctggtctcaa

SEQ ID NO: 5686004 - DNA, 25 bp, Homo sapien
atgttggccagtctggtctcaaact

SEQ ID NO: 5686005 - DNA, 25 bp, Homo sapien
catgttggccagtctggtctcaaac

SEQ ID NO: 5686006 - DNA, 25 bp, Homo sapien
ttgagaccagactggccaacatggt

SEQ ID NO: 5686007 - DNA, 25 bp, Homo sapien
ggagtttgagaccagactggccaac

SEQ ID NO: 5686008 - DNA, 25 bp, Homo sapien
gggcggatcacgaggtcaggagttt

SEQ ID NO: 5686009 - DNA, 25 bp, Homo sapien
agtttgagaccagactggccaacat

SEQ ID NO: 5686010 - DNA, 25 bp, Homo sapien
gtttgagaccagactggccaacatg

SEQ ID NO: 5686011 - DNA, 25 bp, Homo sapien
tttgagaccagactggccaacatgg

SEQ ID NO: 5686012 - DNA, 25 bp, Homo sapien
cagcctaagtaacacatcgagacgc

SEQ ID NO: 5686013 - DNA, 25 bp, Homo sapien
gcctaagtaacacatcgagacgcca

SEQ ID NO: 5686014 - DNA, 25 bp, Homo sapien
gtaacacatcgagacgccatctcta

SEQ ID NO: 5686015 - DNA, 25 bp, Homo sapien
ccagcctaagtaacacatcgagacg

SEQ ID NO: 5686016 - DNA, 25 bp, Homo sapien
cctaagtaacacatcgagacgccat

SEQ ID NO: 5686017 - DNA, 25 bp, Homo sapien
taagtaacacatcgagacgccatct

SEQ ID NO: 5686018 - DNA, 25 bp, Homo sapien
gagatggcgtctcgatgtgttactt

SEQ ID NO: 5686019 - DNA, 25 bp, Homo sapien
tggcgtctcgatgtgttacttaggc

SEQ ID NO: 5686020 - DNA, 25 bp, Homo sapien
gcgtctcgatgtgttacttaggctg

SEQ ID NO: 5686021 - DNA, 25 bp, Homo sapien
tagagatggcgtctcgatgtgttac

SEQ ID NO: 5686022 - DNA, 25 bp, Homo sapien
gatggcgtctcgatgtgttacttag

SEQ ID NO: 5686023 - DNA, 25 bp, Homo sapien
cgtctcgatgtgttacttaggctgg

SEQ ID NO: 5686024 - DNA, 25 bp, Homo sapien
aaaaaatgttgccatggaagtaagc

SEQ ID NO: 5686025 - DNA, 25 bp, Homo sapien
aaatgttgccatggaagtaagctga

SEQ ID NO: 5686026 - DNA, 25 bp, Homo sapien
aatgttgccatggaagtaagctgaa

SEQ ID NO: 5686027 - DNA, 25 bp, Homo sapien
aaaatgttgccatggaagtaagctg

SEQ ID NO: 5686028 - DNA, 25 bp, Homo sapien
caagaacctgtcttatcagaaaaaa

SEQ ID NO: 5686029 - DNA, 25 bp, Homo sapien
aaaaatgttgccatggaagtaagct

SEQ ID NO: 5686030 - DNA, 25 bp, Homo sapien
ttcagcttacttccatggcaacatt

SEQ ID NO: 5686031 - DNA, 25 bp, Homo sapien
cagcttacttccatggcaacatttt

SEQ ID NO: 5686032 - DNA, 25 bp, Homo sapien
agcttacttccatggcaacattttt

SEQ ID NO: 5686033 - DNA, 25 bp, Homo sapien
gcttacttccatggcaacatttttt

SEQ ID NO: 5686034 - DNA, 25 bp, Homo sapien
ttttttctgataagacaggttcttg

SEQ ID NO: 5686035 - DNA, 25 bp, Homo sapien
tcagcttacttccatggcaacattt

SEQ ID NO: 5686036 - DNA, 25 bp, Homo sapien
gaagctgtggggctagggctgccag

SEQ ID NO: 5686037 - DNA, 25 bp, Homo sapien
ggcaaattgtctactcaaagtctta

SEQ ID NO: 5686038 - DNA, 25 bp, Homo sapien
ttgtctactcaaagtcttaactggg

SEQ ID NO: 5686039 - DNA, 25 bp, Homo sapien
agaagggcaaattgtctactcaaag

SEQ ID NO: 5686040 - DNA, 25 bp, Homo sapien
aagggcaaattgtctactcaaagtc

SEQ ID NO: 5686041 - DNA, 25 bp, Homo sapien
ctcaaagtcttaactgggggaagct

SEQ ID NO: 5686042 - DNA, 25 bp, Homo sapien
taagactttgagtagacaatttgcc

SEQ ID NO: 5686043 - DNA, 25 bp, Homo sapien
gactttgagtagacaatttgccctt

SEQ ID NO: 5686044 - DNA, 25 bp, Homo sapien
agcttcccccagttaagactttgag

SEQ ID NO: 5686045 - DNA, 25 bp, Homo sapien
gctggcagccctagccccacagctt

SEQ ID NO: 5686046 - DNA, 25 bp, Homo sapien
ccagttaagactttgagtagacaat

SEQ ID NO: 5686047 - DNA, 25 bp, Homo sapien
ccccagttaagactttgagtagaca

SEQ ID NO: 5686048 - DNA, 25 bp, Homo sapien
gtgtcagacacaagggatcttttcc

SEQ ID NO: 5686049 - DNA, 25 bp, Homo sapien
agaagtgggttgtgtcagacacaag

SEQ ID NO: 5686050 - DNA, 25 bp, Homo sapien
cacaagggatcttttcctgctagat

SEQ ID NO: 5686051 - DNA, 25 bp, Homo sapien
tttcctgctagattctgttcctctc

SEQ ID NO: 5686052 - DNA, 25 bp, Homo sapien
tgtgtcagacacaagggatcttttc

SEQ ID NO: 5686053 - DNA, 25 bp, Homo sapien
gacacaagggatcttttcctgctag

SEQ ID NO: 5686054 - DNA, 25 bp, Homo sapien
gagaggaacagaatctagcaggaaa

SEQ ID NO: 5686055 - DNA, 25 bp, Homo sapien
aatctagcaggaaaagatcccttgt

SEQ ID NO: 5686056 - DNA, 25 bp, Homo sapien
cttgtgtctgacacaacccacttct

SEQ ID NO: 5686057 - DNA, 25 bp, Homo sapien
tctagcaggaaaagatcccttgtgt

SEQ ID NO: 5686058 - DNA, 25 bp, Homo sapien
gaaaagatcccttgtgtctgacaca

SEQ ID NO: 5686059 - DNA, 25 bp, Homo sapien
tagcaggaaaagatcccttgtgtct

SEQ ID NO: 5686060 - DNA, 25 bp, Homo sapien
tggaaaataggtcagagagcttgtg

SEQ ID NO: 5686061 - DNA, 25 bp, Homo sapien
ttgttggaaaataggtcagagagct

SEQ ID NO: 5686062 - DNA, 25 bp, Homo sapien
ttggaaaataggtcagagagcttgt

SEQ ID NO: 5686063 - DNA, 25 bp, Homo sapien
tgttggaaaataggtcagagagctt

SEQ ID NO: 5686064 - DNA, 25 bp, Homo sapien
gttggaaaataggtcagagagcttg

SEQ ID NO: 5686065 - DNA, 25 bp, Homo sapien
attgttggaaaataggtcagagagc

SEQ ID NO: 5686066 - DNA, 25 bp, Homo sapien
aagctctctgacctattttccaaca

SEQ ID NO: 5686067 - DNA, 25 bp, Homo sapien
caagctctctgacctattttccaac

SEQ ID NO: 5686068 - DNA, 25 bp, Homo sapien
acaagctctctgacctattttccaa

SEQ ID NO: 5686069 - DNA, 25 bp, Homo sapien
cacaagctctctgacctattttcca

SEQ ID NO: 5686070 - DNA, 25 bp, Homo sapien
agctctctgacctattttccaacaa

SEQ ID NO: 5686071 - DNA, 25 bp, Homo sapien
gctctctgacctattttccaacaat

SEQ ID NO: 5686072 - DNA, 25 bp, Homo sapien
tatattatattcttaaacccaagca

SEQ ID NO: 5686073 - DNA, 25 bp, Homo sapien
ggtataaaaatgatcaaaatgtgtc

SEQ ID NO: 5686074 - DNA, 25 bp, Homo sapien
cacaagctctctgacctattttcca

SEQ ID NO: 5686075 - DNA, 25 bp, Homo sapien
tatattcttaaacccaagcaaggca

SEQ ID NO: 5686076 - DNA, 25 bp, Homo sapien
tccaacaatatttctaaatcattgg

SEQ ID NO: 5686077 - DNA, 25 bp, Homo sapien
gctctctgacctattttccaacaat

SEQ ID NO: 5686078 - DNA, 25 bp, Homo sapien
ctgttgctattttgttcaatacagt

SEQ ID NO: 5686079 - DNA, 25 bp, Homo sapien
gttgctattttgttcaatacagtag

SEQ ID NO: 5686080 - DNA, 25 bp, Homo sapien
tgttgctattttgttcaatacagta

SEQ ID NO: 5686081 - DNA, 25 bp, Homo sapien
gctgttgctattttgttcaatacag

SEQ ID NO: 5686082 - DNA, 25 bp, Homo sapien
ttgctattttgttcaatacagtagg

SEQ ID NO: 5686083 - DNA, 25 bp, Homo sapien
ctactgtattgaacaaaatagcaac

SEQ ID NO: 5686084 - DNA, 25 bp, Homo sapien
ctgtattgaacaaaatagcaacagc

SEQ ID NO: 5686085 - DNA, 25 bp, Homo sapien
tactgtattgaacaaaatagcaaca

SEQ ID NO: 5686086 - DNA, 25 bp, Homo sapien
actgtattgaacaaaatagcaacag

SEQ ID NO: 5686087 - DNA, 25 bp, Homo sapien
cctactgtattgaacaaaatagcaa

SEQ ID NO: 5686088 - DNA, 25 bp, Homo sapien
taaacgaatgaatgagtggatggtt

SEQ ID NO: 5686089 - DNA, 25 bp, Homo sapien
gctgttgctattttgttcaatacag

SEQ ID NO: 5686090 - DNA, 25 bp, Homo sapien
catcaaaacatgttgctgttgctat

SEQ ID NO: 5686091 - DNA, 25 bp, Homo sapien
tggtaaacatcaacatcaaaacatg

SEQ ID NO: 5686092 - DNA, 25 bp, Homo sapien
gaatgagtggatggtttggtaaaca

SEQ ID NO: 5686093 - DNA, 25 bp, Homo sapien
ttgctattttgttcaatacagtagg

SEQ ID NO: 5686094 - DNA, 25 bp, Homo sapien
tgtttaccaaaccatccactcattc

SEQ ID NO: 5686095 - DNA, 25 bp, Homo sapien
tagcaacagcaacatgttttgatgt

SEQ ID NO: 5686096 - DNA, 25 bp, Homo sapien
ctgtattgaacaaaatagcaacagc

SEQ ID NO: 5686097 - DNA, 25 bp, Homo sapien
tgaacaaaatagcaacagcaacatg

SEQ ID NO: 5686098 - DNA, 25 bp, Homo sapien
cctactgtattgaacaaaatagcaa

SEQ ID NO: 5686099 - DNA, 25 bp, Homo sapien
catgttttgatgttgatgtttacca

SEQ ID NO: 5686100 - DNA, 25 bp, Homo sapien
ttagctgggcagttagctgggtatg

SEQ ID NO: 5686101 - DNA, 25 bp, Homo sapien
agttagctgggcagttagctgggta

SEQ ID NO: 5686102 - DNA, 25 bp, Homo sapien
aagttagctgggcagttagctgggt

SEQ ID NO: 5686103 - DNA, 25 bp, Homo sapien
gttagctgggcagttagctgggtat

SEQ ID NO: 5686104 - DNA, 25 bp, Homo sapien
tacccagctaactgcccagctaact

SEQ ID NO: 5686105 - DNA, 25 bp, Homo sapien
atacccagctaactgcccagctaac

SEQ ID NO: 5686106 - DNA, 25 bp, Homo sapien
catacccagctaactgcccagctaa

SEQ ID NO: 5686107 - DNA, 25 bp, Homo sapien
acccagctaactgcccagctaactt

SEQ ID NO: 5686108 - DNA, 25 bp, Homo sapien
ttagctgggcagttagctgggtatg

SEQ ID NO: 5686109 - DNA, 25 bp, Homo sapien
tagctgggcagttagctgggtatgg

SEQ ID NO: 5686110 - DNA, 25 bp, Homo sapien
agttagctgggcagttagctgggta

SEQ ID NO: 5686111 - DNA, 25 bp, Homo sapien
agctgggcagttagctgggtatggt

SEQ ID NO: 5686112 - DNA, 25 bp, Homo sapien
aagttagctgggcagttagctgggt

SEQ ID NO: 5686113 - DNA, 25 bp, Homo sapien
gttagctgggcagttagctgggtat

SEQ ID NO: 5686114 - DNA, 25 bp, Homo sapien
tacccagctaactgcccagctaact

SEQ ID NO: 5686115 - DNA, 25 bp, Homo sapien
atacccagctaactgcccagctaac

SEQ ID NO: 5686116 - DNA, 25 bp, Homo sapien
catacccagctaactgcccagctaa

SEQ ID NO: 5686117 - DNA, 25 bp, Homo sapien
ccatacccagctaactgcccagcta

SEQ ID NO: 5686118 - DNA, 25 bp, Homo sapien
acccagctaactgcccagctaactt

SEQ ID NO: 5686119 - DNA, 25 bp, Homo sapien
accatacccagctaactgcccagct

SEQ ID NO: 5686120 - DNA, 25 bp, Homo sapien
gaatctattgaacccgggcggcgga

SEQ ID NO: 5686121 - DNA, 25 bp, Homo sapien
agaatctattgaacccgggcggcgg

SEQ ID NO: 5686122 - DNA, 25 bp, Homo sapien
ccagctatcaggaggctgaggcagg

SEQ ID NO: 5686123 - DNA, 25 bp, Homo sapien
gagaatctattgaacccgggcggcg

SEQ ID NO: 5686124 - DNA, 25 bp, Homo sapien
aatctattgaacccgggcggcggag

SEQ ID NO: 5686125 - DNA, 25 bp, Homo sapien
atctattgaacccgggcggcggagg

SEQ ID NO: 5686126 - DNA, 25 bp, Homo sapien
cgccgcccgggttcaatagattctc

SEQ ID NO: 5686127 - DNA, 25 bp, Homo sapien
ctccgccgcccgggttcaatagatt

SEQ ID NO: 5686128 - DNA, 25 bp, Homo sapien
tccgccgcccgggttcaatagattc

SEQ ID NO: 5686129 - DNA, 25 bp, Homo sapien
cctgcctcagcctcctgatagctgg

SEQ ID NO: 5686130 - DNA, 25 bp, Homo sapien
ccgccgcccgggttcaatagattct

SEQ ID NO: 5686131 - DNA, 25 bp, Homo sapien
cctccgccgcccgggttcaatagat

SEQ ID NO: 5686132 - DNA, 25 bp, Homo sapien
atggcagatgttcatagatataacc

SEQ ID NO: 5686133 - DNA, 25 bp, Homo sapien
ggcagatgttcatagatataaccca

SEQ ID NO: 5686134 - DNA, 25 bp, Homo sapien
taatatggcagatgttcatagatat

SEQ ID NO: 5686135 - DNA, 25 bp, Homo sapien
tatggcagatgttcatagatataac

SEQ ID NO: 5686136 - DNA, 25 bp, Homo sapien
tggcagatgttcatagatataaccc

SEQ ID NO: 5686137 - DNA, 25 bp, Homo sapien
gcagatgttcatagatataacccac

SEQ ID NO: 5686138 - DNA, 25 bp, Homo sapien
tatatctatgaacatctgccatatt

SEQ ID NO: 5686139 - DNA, 25 bp, Homo sapien
gttatatctatgaacatctgccata

SEQ ID NO: 5686140 - DNA, 25 bp, Homo sapien
ggttatatctatgaacatctgccat

SEQ ID NO: 5686141 - DNA, 25 bp, Homo sapien
tgggttatatctatgaacatctgcc

SEQ ID NO: 5686142 - DNA, 25 bp, Homo sapien
gggttatatctatgaacatctgcca

SEQ ID NO: 5686143 - DNA, 25 bp, Homo sapien
gtgggttatatctatgaacatctgc

SEQ ID NO: 5686144 - DNA, 25 bp, Homo sapien
ggcagatgttcatagatataaccca

SEQ ID NO: 5686145 - DNA, 25 bp, Homo sapien
ccacataaaagctaaagggattcta

SEQ ID NO: 5686146 - DNA, 25 bp, Homo sapien
tatggcagatgttcatagatataac

SEQ ID NO: 5686147 - DNA, 25 bp, Homo sapien
tggcagatgttcatagatataaccc

SEQ ID NO: 5686148 - DNA, 25 bp, Homo sapien
taatttttaatatggcagatgttca

SEQ ID NO: 5686149 - DNA, 25 bp, Homo sapien
gcagatgttcatagatataacccac

SEQ ID NO: 5686150 - DNA, 25 bp, Homo sapien
ggttatatctatgaacatctgccat

SEQ ID NO: 5686151 - DNA, 25 bp, Homo sapien
tgggttatatctatgaacatctgcc

SEQ ID NO: 5686152 - DNA, 25 bp, Homo sapien
tagaatccctttagcttttatgtgg

SEQ ID NO: 5686153 - DNA, 25 bp, Homo sapien
tgaacatctgccatattaaaaatta

SEQ ID NO: 5686154 - DNA, 25 bp, Homo sapien
gggttatatctatgaacatctgcca

SEQ ID NO: 5686155 - DNA, 25 bp, Homo sapien
gtgggttatatctatgaacatctgc

SEQ ID NO: 5686156 - DNA, 25 bp, Homo sapien
acagaggttgaccaccctggcaggt

SEQ ID NO: 5686157 - DNA, 25 bp, Homo sapien
tttgagaaccgtggcattaggggct

SEQ ID NO: 5686158 - DNA, 25 bp, Homo sapien
cctaaatgtttgagaaccgtggcat

SEQ ID NO: 5686159 - DNA, 25 bp, Homo sapien
gacctaaatgtttgagaaccgtggc

SEQ ID NO: 5686160 - DNA, 25 bp, Homo sapien
aatgtttgagaaccgtggcattagg

SEQ ID NO: 5686161 - DNA, 25 bp, Homo sapien
cagaggttgaccaccctggcaggtc

SEQ ID NO: 5686162 - DNA, 25 bp, Homo sapien
cctggcaggtcttgtacgtgggctt

SEQ ID NO: 5686163 - DNA, 25 bp, Homo sapien
tacgtgggcttactacaagagtcac

SEQ ID NO: 5686164 - DNA, 25 bp, Homo sapien
gcaggtcttgtacgtgggcttacta

SEQ ID NO: 5686165 - DNA, 25 bp, Homo sapien
aggtcttgtacgtgggcttactaca

SEQ ID NO: 5686166 - DNA, 25 bp, Homo sapien
tgtacgtgggcttactacaagagtc

SEQ ID NO: 5686167 - DNA, 25 bp, Homo sapien
accctggcaggtcttgtacgtgggc

SEQ ID NO: 5686168 - DNA, 25 bp, Homo sapien
ttgtagtaagcccacgtacaagacc

SEQ ID NO: 5686169 - DNA, 25 bp, Homo sapien
tagtaagcccacgtacaagacctgc

SEQ ID NO: 5686170 - DNA, 25 bp, Homo sapien
gtagtaagcccacgtacaagacctg

SEQ ID NO: 5686171 - DNA, 25 bp, Homo sapien
gtgactcttgtagtaagcccacgta

SEQ ID NO: 5686172 - DNA, 25 bp, Homo sapien
gactcttgtagtaagcccacgtaca

SEQ ID NO: 5686173 - DNA, 25 bp, Homo sapien
gcccacgtacaagacctgccagggt

SEQ ID NO: 5686174 - DNA, 25 bp, Homo sapien
atgccacggttctcaaacatttagg

SEQ ID NO: 5686175 - DNA, 25 bp, Homo sapien
gacctgccagggtggtcaacctctg

SEQ ID NO: 5686176 - DNA, 25 bp, Homo sapien
agcccctaatgccacggttctcaaa

SEQ ID NO: 5686177 - DNA, 25 bp, Homo sapien
cctaatgccacggttctcaaacatt

SEQ ID NO: 5686178 - DNA, 25 bp, Homo sapien
cttcccagcccctaatgccacggtt

SEQ ID NO: 5686179 - DNA, 25 bp, Homo sapien
ccacggttctcaaacatttaggtct

SEQ ID NO: 5686180 - DNA, 25 bp, Homo sapien
ctgccctgaggctcaggtaattatc

SEQ ID NO: 5686181 - DNA, 25 bp, Homo sapien
gataattacctgagcctcagggcag

SEQ ID NO: 5686182 - DNA, 25 bp, Homo sapien
gccaaagggcactgcagtcactgca

SEQ ID NO: 5686183 - DNA, 25 bp, Homo sapien
actagccttttgacctgccctgagg

SEQ ID NO: 5686184 - DNA, 25 bp, Homo sapien
tgcagtcactgcagcccaagcagct

SEQ ID NO: 5686185 - DNA, 25 bp, Homo sapien
gccctgaggctcaggtaattatctc

SEQ ID NO: 5686186 - DNA, 25 bp, Homo sapien
cagctgctcccctctttggagagaa

SEQ ID NO: 5686187 - DNA, 25 bp, Homo sapien
aggtaattatctctgccaaagggca

SEQ ID NO: 5686188 - DNA, 25 bp, Homo sapien
agctgcttgggctgcagtgactgca

SEQ ID NO: 5686189 - DNA, 25 bp, Homo sapien
ctcagggcaggtcaaaaggctagtg

SEQ ID NO: 5686190 - DNA, 25 bp, Homo sapien
gataattacctgagcctcagggcag

SEQ ID NO: 5686191 - DNA, 25 bp, Homo sapien
ttctctccaaagaggggagcagctg

SEQ ID NO: 5686192 - DNA, 25 bp, Homo sapien
tgcagtgactgcagtgccctttggc

SEQ ID NO: 5686193 - DNA, 25 bp, Homo sapien
tgccctttggcagagataattacct

SEQ ID NO: 5686194 - DNA, 25 bp, Homo sapien
gtcacagatccttgagtttggtttt

SEQ ID NO: 5686195 - DNA, 25 bp, Homo sapien
aagcctcagtcctagattctttgac

SEQ ID NO: 5686196 - DNA, 25 bp, Homo sapien
agtcacagatccttgagtttggttt

SEQ ID NO: 5686197 - DNA, 25 bp, Homo sapien
gcctcagtcctagattctttgacca

SEQ ID NO: 5686198 - DNA, 25 bp, Homo sapien
caagcctcagtcctagattctttga

SEQ ID NO: 5686199 - DNA, 25 bp, Homo sapien
ctcagtcctagattctttgaccaaa

SEQ ID NO: 5686200 - DNA, 25 bp, Homo sapien
tggtcaaagaatctaggactgaggc

SEQ ID NO: 5686201 - DNA, 25 bp, Homo sapien
tttggtcaaagaatctaggactgag

SEQ ID NO: 5686202 - DNA, 25 bp, Homo sapien
aaaaccaaactcaaggatctgtgac

SEQ ID NO: 5686203 - DNA, 25 bp, Homo sapien
tcaaagaatctaggactgaggcttg

SEQ ID NO: 5686204 - DNA, 25 bp, Homo sapien
ggtcaaagaatctaggactgaggct

SEQ ID NO: 5686205 - DNA, 25 bp, Homo sapien
aaaccaaactcaaggatctgtgact

SEQ ID NO: 5686206 - DNA, 25 bp, Homo sapien
tgtgctgaggctagatggaatgcca

SEQ ID NO: 5686207 - DNA, 25 bp, Homo sapien
tgccatgctaagaagcatgggcctt

SEQ ID NO: 5686208 - DNA, 25 bp, Homo sapien
gccatgctaagaagcatgggcctta

SEQ ID NO: 5686209 - DNA, 25 bp, Homo sapien
atgccatgctaagaagcatgggcct

SEQ ID NO: 5686210 - DNA, 25 bp, Homo sapien
aatgccatgctaagaagcatgggcc

SEQ ID NO: 5686211 - DNA, 25 bp, Homo sapien
gaatgccatgctaagaagcatgggc

SEQ ID NO: 5686212 - DNA, 25 bp, Homo sapien
gcccatgcttcttagcatggcattc

SEQ ID NO: 5686213 - DNA, 25 bp, Homo sapien
tggcattccatctagcctcagcaca

SEQ ID NO: 5686214 - DNA, 25 bp, Homo sapien
aggcccatgcttcttagcatggcat

SEQ ID NO: 5686215 - DNA, 25 bp, Homo sapien
aaggcccatgcttcttagcatggca

SEQ ID NO: 5686216 - DNA, 25 bp, Homo sapien
ggcccatgcttcttagcatggcatt

SEQ ID NO: 5686217 - DNA, 25 bp, Homo sapien
taaggcccatgcttcttagcatggc

SEQ ID NO: 5686218 - DNA, 25 bp, Homo sapien
aaaaaataaacaggctggctgtggt

SEQ ID NO: 5686219 - DNA, 25 bp, Homo sapien
aataaacaggctggctgtggtggct

SEQ ID NO: 5686220 - DNA, 25 bp, Homo sapien
aaataaacaggctggctgtggtggc

SEQ ID NO: 5686221 - DNA, 25 bp, Homo sapien
taaaaaataaacaggctggctgtgg

SEQ ID NO: 5686222 - DNA, 25 bp, Homo sapien
aaaataaacaggctggctgtggtgg

SEQ ID NO: 5686223 - DNA, 25 bp, Homo sapien
aaaaataaacaggctggctgtggtg

SEQ ID NO: 5686224 - DNA, 25 bp, Homo sapien
ccacagccagcctgtttatttttta

SEQ ID NO: 5686225 - DNA, 25 bp, Homo sapien
caccacagccagcctgtttattttt

SEQ ID NO: 5686226 - DNA, 25 bp, Homo sapien
ccaccacagccagcctgtttatttt

SEQ ID NO: 5686227 - DNA, 25 bp, Homo sapien
gccaccacagccagcctgtttattt

SEQ ID NO: 5686228 - DNA, 25 bp, Homo sapien
accacagccagcctgtttatttttt

SEQ ID NO: 5686229 - DNA, 25 bp, Homo sapien
agccaccacagccagcctgtttatt

SEQ ID NO: 5686230 - DNA, 25 bp, Homo sapien
caggctcccgagtagctagaattac

SEQ ID NO: 5686231 - DNA, 25 bp, Homo sapien
ggctcccgagtagctagaattacag

SEQ ID NO: 5686232 - DNA, 25 bp, Homo sapien
gctcccgagtagctagaattacagg

SEQ ID NO: 5686233 - DNA, 25 bp, Homo sapien
aggttcaagcgattctcctgcctca

SEQ ID NO: 5686234 - DNA, 25 bp, Homo sapien
ctcccgagtagctagaattacaggc

SEQ ID NO: 5686235 - DNA, 25 bp, Homo sapien
tgaggcaggagaatcgcttgaacct

SEQ ID NO: 5686236 - DNA, 25 bp, Homo sapien
ctgtaattctagctactcgggagcc

SEQ ID NO: 5686237 - DNA, 25 bp, Homo sapien
gcctgtaattctagctactcgggag

SEQ ID NO: 5686238 - DNA, 25 bp, Homo sapien
cctgtaattctagctactcgggagc

SEQ ID NO: 5686239 - DNA, 25 bp, Homo sapien
gtaattctagctactcgggagcctg

SEQ ID NO: 5686240 - DNA, 25 bp, Homo sapien
gaaacgtctcttctccagtattcca

SEQ ID NO: 5686241 - DNA, 25 bp, Homo sapien
gagtgaaacgtctcttctccagtat

SEQ ID NO: 5686242 - DNA, 25 bp, Homo sapien
gtgaaacgtctcttctccagtattc

SEQ ID NO: 5686243 - DNA, 25 bp, Homo sapien
gtacagagcgttttcatccatcaga

SEQ ID NO: 5686244 - DNA, 25 bp, Homo sapien
agtacagagcgttttcatccatcag

SEQ ID NO: 5686245 - DNA, 25 bp, Homo sapien
gagtacagagcgttttcatccatca

SEQ ID NO: 5686246 - DNA, 25 bp, Homo sapien
atactggagaagagacgtttcactc

SEQ ID NO: 5686247 - DNA, 25 bp, Homo sapien
ctgatggatgaaaacgctctgtact

SEQ ID NO: 5686248 - DNA, 25 bp, Homo sapien
tgatggatgaaaacgctctgtactc

SEQ ID NO: 5686249 - DNA, 25 bp, Homo sapien
tggaatactggagaagagacgtttc

SEQ ID NO: 5686250 - DNA, 25 bp, Homo sapien
gaatactggagaagagacgtttcac

SEQ ID NO: 5686251 - DNA, 25 bp, Homo sapien
tctgatggatgaaaacgctctgtac

SEQ ID NO: 5686252 - DNA, 25 bp, Homo sapien
gatcttcctgtttgtaacagctacg

SEQ ID NO: 5686253 - DNA, 25 bp, Homo sapien
atattatataattccttccttggag

SEQ ID NO: 5686254 - DNA, 25 bp, Homo sapien
gaaagcttatgtaattaggtagtat

SEQ ID NO: 5686255 - DNA, 25 bp, Homo sapien
tgtttgtaacagctacggtctgagt

SEQ ID NO: 5686256 - DNA, 25 bp, Homo sapien
ctgagtagcttgtgggtatattata

SEQ ID NO: 5686257 - DNA, 25 bp, Homo sapien
acggtctgagtagcttgtgggtata

SEQ ID NO: 5686258 - DNA, 25 bp, Homo sapien
tataatatacccacaagctactcag

SEQ ID NO: 5686259 - DNA, 25 bp, Homo sapien
tactcagaccgtagctgttacaaac

SEQ ID NO: 5686260 - DNA, 25 bp, Homo sapien
cgtagctgttacaaacaggaagatc

SEQ ID NO: 5686261 - DNA, 25 bp, Homo sapien
tatacccacaagctactcagaccgt

SEQ ID NO: 5686262 - DNA, 25 bp, Homo sapien
ctccaaggaaggaattatataatat

SEQ ID NO: 5686263 - DNA, 25 bp, Homo sapien
atactacctaattacataagctttc

SEQ ID NO: 5686264 - DNA, 25 bp, Homo sapien
gacagtgtgctgtccattttaatcc

SEQ ID NO: 5686265 - DNA, 25 bp, Homo sapien
gtgctgtccattttaatcctaccac

SEQ ID NO: 5686266 - DNA, 25 bp, Homo sapien
tgctagtgcctttatatctcacact

SEQ ID NO: 5686267 - DNA, 25 bp, Homo sapien
cagtgtgctgtccattttaatccta

SEQ ID NO: 5686268 - DNA, 25 bp, Homo sapien
tgtgctgtccattttaatcctacca

SEQ ID NO: 5686269 - DNA, 25 bp, Homo sapien
tccaggcacttcacaggctatctcc

SEQ ID NO: 5686270 - DNA, 25 bp, Homo sapien
ggagatagcctgtgaagtgcctgga

SEQ ID NO: 5686271 - DNA, 25 bp, Homo sapien
taggattaaaatggacagcacactg

SEQ ID NO: 5686272 - DNA, 25 bp, Homo sapien
ggtaggattaaaatggacagcacac

SEQ ID NO: 5686273 - DNA, 25 bp, Homo sapien
ggattaaaatggacagcacactgtc

SEQ ID NO: 5686274 - DNA, 25 bp, Homo sapien
gtggtaggattaaaatggacagcac

SEQ ID NO: 5686275 - DNA, 25 bp, Homo sapien
gtgtgagatataaaggcactagcat

SEQ ID NO: 5686276 - DNA, 25 bp, Homo sapien
ctggtatatgtggtccctgttctgg

SEQ ID NO: 5686277 - DNA, 25 bp, Homo sapien
ctcctggtatatgtggtccctgttc

SEQ ID NO: 5686278 - DNA, 25 bp, Homo sapien
gaggtaagaagttgagcccgcccca

SEQ ID NO: 5686279 - DNA, 25 bp, Homo sapien
gtaagaagttgagcccgccccagtg

SEQ ID NO: 5686280 - DNA, 25 bp, Homo sapien
tccttttactaagagtgaggtaaga

SEQ ID NO: 5686281 - DNA, 25 bp, Homo sapien
aagttgagcccgccccagtgatcct

SEQ ID NO: 5686282 - DNA, 25 bp, Homo sapien
caacttcttacctcactcttagtaa

SEQ ID NO: 5686283 - DNA, 25 bp, Homo sapien
gaacagggaccacatataccaggag

SEQ ID NO: 5686284 - DNA, 25 bp, Homo sapien
tcttacctcactcttagtaaaagga

SEQ ID NO: 5686285 - DNA, 25 bp, Homo sapien
cactggggcgggctcaacttcttac

SEQ ID NO: 5686286 - DNA, 25 bp, Homo sapien
ccagaacagggaccacatataccag

SEQ ID NO: 5686287 - DNA, 25 bp, Homo sapien
cagaacagggaccacatataccagg

SEQ ID NO: 5686288 - DNA, 25 bp, Homo sapien
gagtgccatggtgcgttctctgctc

SEQ ID NO: 5686289 - DNA, 25 bp, Homo sapien
tggagtgccatggtgcgttctctgc

SEQ ID NO: 5686290 - DNA, 25 bp, Homo sapien
gccatggtgcgttctctgctcactg

SEQ ID NO: 5686291 - DNA, 25 bp, Homo sapien
catggtgcgttctctgctcactgca

SEQ ID NO: 5686292 - DNA, 25 bp, Homo sapien
gtgccatggtgcgttctctgctcac

SEQ ID NO: 5686293 - DNA, 25 bp, Homo sapien
gctggagtgccatggtgcgttctct

SEQ ID NO: 5686294 - DNA, 25 bp, Homo sapien
gcagtgagcagagaacgcaccatgg

SEQ ID NO: 5686295 - DNA, 25 bp, Homo sapien
agtgagcagagaacgcaccatggca

SEQ ID NO: 5686296 - DNA, 25 bp, Homo sapien
agagaacgcaccatggcactccagc

SEQ ID NO: 5686297 - DNA, 25 bp, Homo sapien
gtgagcagagaacgcaccatggcac

SEQ ID NO: 5686298 - DNA, 25 bp, Homo sapien
gagcagagaacgcaccatggcactc

SEQ ID NO: 5686299 - DNA, 25 bp, Homo sapien
tgcagtgagcagagaacgcaccatg

SEQ ID NO: 5686300 - DNA, 25 bp, Homo sapien
cccagtctcgaactcttgaccttgt

SEQ ID NO: 5686301 - DNA, 25 bp, Homo sapien
gcccagtctcgaactcttgaccttg

SEQ ID NO: 5686302 - DNA, 25 bp, Homo sapien
ccagtctcgaactcttgaccttgtg

SEQ ID NO: 5686303 - DNA, 25 bp, Homo sapien
agccaccgcgcccagtctcgaactc

SEQ ID NO: 5686304 - DNA, 25 bp, Homo sapien
cagtctcgaactcttgaccttgtga

SEQ ID NO: 5686305 - DNA, 25 bp, Homo sapien
accgcgcccagtctcgaactcttga

SEQ ID NO: 5686306 - DNA, 25 bp, Homo sapien
tcaagagttcgagactgggcgcggt

SEQ ID NO: 5686307 - DNA, 25 bp, Homo sapien
aagagttcgagactgggcgcggtgg

SEQ ID NO: 5686308 - DNA, 25 bp, Homo sapien
tcacaaggtcaagagttcgagactg

SEQ ID NO: 5686309 - DNA, 25 bp, Homo sapien
caaggtcaagagttcgagactgggc

SEQ ID NO: 5686310 - DNA, 25 bp, Homo sapien
cacaaggtcaagagttcgagactgg

SEQ ID NO: 5686311 - DNA, 25 bp, Homo sapien
gagttcgagactgggcgcggtggct

SEQ ID NO: 5686312 - DNA, 25 bp, Homo sapien
gtgccaccacaagtttcttgtagac

SEQ ID NO: 5686313 - DNA, 25 bp, Homo sapien
tgtgccaccacaagtttcttgtaga

SEQ ID NO: 5686314 - DNA, 25 bp, Homo sapien
atgtgccaccacaagtttcttgtag

SEQ ID NO: 5686315 - DNA, 25 bp, Homo sapien
gtctacaagaaacttgtggtggcac

SEQ ID NO: 5686316 - DNA, 25 bp, Homo sapien
ctacaagaaacttgtggtggcacat

SEQ ID NO: 5686317 - DNA, 25 bp, Homo sapien
tctacaagaaacttgtggtggcaca

SEQ ID NO: 5686318 - DNA, 25 bp, Homo sapien
gtgccaccacaagtttcttgtagac

SEQ ID NO: 5686319 - DNA, 25 bp, Homo sapien
tgtgccaccacaagtttcttgtaga

SEQ ID NO: 5686320 - DNA, 25 bp, Homo sapien
gcatgtgccaccacaagtttcttgt

SEQ ID NO: 5686321 - DNA, 25 bp, Homo sapien
atgtgccaccacaagtttcttgtag

SEQ ID NO: 5686322 - DNA, 25 bp, Homo sapien
catgtgccaccacaagtttcttgta

SEQ ID NO: 5686323 - DNA, 25 bp, Homo sapien
gggactctcctgtctcagcctcccg

SEQ ID NO: 5686324 - DNA, 25 bp, Homo sapien
gtctacaagaaacttgtggtggcac

SEQ ID NO: 5686325 - DNA, 25 bp, Homo sapien
tcgggaggctgagacaggagagtcc

SEQ ID NO: 5686326 - DNA, 25 bp, Homo sapien
tacaagaaacttgtggtggcacatg

SEQ ID NO: 5686327 - DNA, 25 bp, Homo sapien
ctacaagaaacttgtggtggcacat

SEQ ID NO: 5686328 - DNA, 25 bp, Homo sapien
acaagaaacttgtggtggcacatgc

SEQ ID NO: 5686329 - DNA, 25 bp, Homo sapien
tctacaagaaacttgtggtggcaca

SEQ ID NO: 5686330 - DNA, 25 bp, Homo sapien
tctactaaatgtattgttctgcagc

SEQ ID NO: 5686331 - DNA, 25 bp, Homo sapien
taactaaaatgagatctactaaatg

SEQ ID NO: 5686332 - DNA, 25 bp, Homo sapien
tgtgtacctgtagaattttatctat

SEQ ID NO: 5686333 - DNA, 25 bp, Homo sapien
tactaaatgtattgttctgcagctt

SEQ ID NO: 5686334 - DNA, 25 bp, Homo sapien
gatctactaaatgtattgttctgca

SEQ ID NO: 5686335 - DNA, 25 bp, Homo sapien
cttgtgtacctgtagaattttatct

SEQ ID NO: 5686336 - DNA, 25 bp, Homo sapien
gaacaatacatttagtagatctcat

SEQ ID NO: 5686337 - DNA, 25 bp, Homo sapien
catttagtagatctcattttagtta

SEQ ID NO: 5686338 - DNA, 25 bp, Homo sapien
gctgcagaacaatacatttagtaga

SEQ ID NO: 5686339 - DNA, 25 bp, Homo sapien
atagataaaattctacaggtacaca

SEQ ID NO: 5686340 - DNA, 25 bp, Homo sapien
agataaaattctacaggtacacaag

SEQ ID NO: 5686341 - DNA, 25 bp, Homo sapien
aagctgcagaacaatacatttagta

SEQ ID NO: 5686342 - DNA, 25 bp, Homo sapien
ttgacccactcgccactccccaggc

SEQ ID NO: 5686343 - DNA, 25 bp, Homo sapien
attcccgtctaccttgacccactcg

SEQ ID NO: 5686344 - DNA, 25 bp, Homo sapien
ttcccgtctaccttgacccactcgc

SEQ ID NO: 5686345 - DNA, 25 bp, Homo sapien
tgacccactcgccactccccaggcc

SEQ ID NO: 5686346 - DNA, 25 bp, Homo sapien
cttgacccactcgccactccccagg

SEQ ID NO: 5686347 - DNA, 25 bp, Homo sapien
gcctggggagtggcgagtgggtcaa

SEQ ID NO: 5686348 - DNA, 25 bp, Homo sapien
ggcctggggagtggcgagtgggtca

SEQ ID NO: 5686349 - DNA, 25 bp, Homo sapien
gcgagtgggtcaaggtagacgggaa

SEQ ID NO: 5686350 - DNA, 25 bp, Homo sapien
cctggggagtggcgagtgggtcaag

SEQ ID NO: 5686351 - DNA, 25 bp, Homo sapien
cgagtgggtcaaggtagacgggaat

SEQ ID NO: 5686352 - DNA, 25 bp, Homo sapien
ctatcaacatcctgcaccagaatct

SEQ ID NO: 5686353 - DNA, 25 bp, Homo sapien
cccgcccctggccatgcatagcctc

SEQ ID NO: 5686354 - DNA, 25 bp, Homo sapien
attcccgtctaccttgacccactcg

SEQ ID NO: 5686355 - DNA, 25 bp, Homo sapien
tgacccactcgccactccccaggcc

SEQ ID NO: 5686356 - DNA, 25 bp, Homo sapien
tactatcaacatcctgcaccagaat

SEQ ID NO: 5686357 - DNA, 25 bp, Homo sapien
tggccatgcatagcctcccctacta

SEQ ID NO: 5686358 - DNA, 25 bp, Homo sapien
agattctggtgcaggatgttgatag

SEQ ID NO: 5686359 - DNA, 25 bp, Homo sapien
gggagtggcgagtgggtcaaggtag

SEQ ID NO: 5686360 - DNA, 25 bp, Homo sapien
gcgagtgggtcaaggtagacgggaa

SEQ ID NO: 5686361 - DNA, 25 bp, Homo sapien
ttctggtgcaggatgttgatagtag

SEQ ID NO: 5686362 - DNA, 25 bp, Homo sapien
tagtaggggaggctatgcatggcca

SEQ ID NO: 5686363 - DNA, 25 bp, Homo sapien
cgagtgggtcaaggtagacgggaat

SEQ ID NO: 5686364 - DNA, 25 bp, Homo sapien
ggtctaaccatattgcacagtctgg

SEQ ID NO: 5686365 - DNA, 25 bp, Homo sapien
gggtctaaccatattgcacagtctg

SEQ ID NO: 5686366 - DNA, 25 bp, Homo sapien
ctaaccatattgcacagtctggtct

SEQ ID NO: 5686367 - DNA, 25 bp, Homo sapien
cagggtctaaccatattgcacagtc

SEQ ID NO: 5686368 - DNA, 25 bp, Homo sapien
gacagggtctaaccatattgcacag

SEQ ID NO: 5686369 - DNA, 25 bp, Homo sapien
tctaaccatattgcacagtctggtc

SEQ ID NO: 5686370 - DNA, 25 bp, Homo sapien
gaccagactgtgcaatatggttaga

SEQ ID NO: 5686371 - DNA, 25 bp, Homo sapien
gactgtgcaatatggttagaccctg

SEQ ID NO: 5686372 - DNA, 25 bp, Homo sapien
agaccagactgtgcaatatggttag

SEQ ID NO: 5686373 - DNA, 25 bp, Homo sapien
cagactgtgcaatatggttagaccc

SEQ ID NO: 5686374 - DNA, 25 bp, Homo sapien
ccagactgtgcaatatggttagacc

SEQ ID NO: 5686375 - DNA, 25 bp, Homo sapien
tgtgcaatatggttagaccctgtct

SEQ ID NO: 5686376 - DNA, 25 bp, Homo sapien
cccagcaaggcaggtggcatcatcc

SEQ ID NO: 5686377 - DNA, 25 bp, Homo sapien
ggatgatgccacctgccttgctggg

SEQ ID NO: 5686378 - DNA, 25 bp, Homo sapien
gcatcatcctggcttcacaaacaag

SEQ ID NO: 5686379 - DNA, 25 bp, Homo sapien
cccagcaaggcaggtggcatcatcc

SEQ ID NO: 5686380 - DNA, 25 bp, Homo sapien
ggcttcacaaacaaggagagactga

SEQ ID NO: 5686381 - DNA, 25 bp, Homo sapien
cagtgcccagcaaggcaggtggcat

SEQ ID NO: 5686382 - DNA, 25 bp, Homo sapien
agactgaggccagagctcaagccca

SEQ ID NO: 5686383 - DNA, 25 bp, Homo sapien
aggtggcatcatcctggcttcacaa

SEQ ID NO: 5686384 - DNA, 25 bp, Homo sapien
tgtttgtgaagccaggatgatgcca

SEQ ID NO: 5686385 - DNA, 25 bp, Homo sapien
tcagtctctccttgtttgtgaagcc

SEQ ID NO: 5686386 - DNA, 25 bp, Homo sapien
ttgtgaagccaggatgatgccacct

SEQ ID NO: 5686387 - DNA, 25 bp, Homo sapien
tctctccttgtttgtgaagccagga

SEQ ID NO: 5686388 - DNA, 25 bp, Homo sapien
ggatgatgccacctgccttgctggg

SEQ ID NO: 5686389 - DNA, 25 bp, Homo sapien
gctgggcttgagctctggcctcagt

SEQ ID NO: 5686390 - DNA, 25 bp, Homo sapien
gttgcctgaggataaacctgcttca

SEQ ID NO: 5686391 - DNA, 25 bp, Homo sapien
tcatccgttgcctgaggataaacct

SEQ ID NO: 5686392 - DNA, 25 bp, Homo sapien
aaacctgcttcaggattgttggtga

SEQ ID NO: 5686393 - DNA, 25 bp, Homo sapien
cctgtttcctcatccgttgcctgag

SEQ ID NO: 5686394 - DNA, 25 bp, Homo sapien
tgaggataaacctgcttcaggattg

SEQ ID NO: 5686395 - DNA, 25 bp, Homo sapien
tccgttgcctgaggataaacctgct

SEQ ID NO: 5686396 - DNA, 25 bp, Homo sapien
tcaccaacaatcctgaagcaggttt

SEQ ID NO: 5686397 - DNA, 25 bp, Homo sapien
agcaggtttatcctcaggcaacgga

SEQ ID NO: 5686398 - DNA, 25 bp, Homo sapien
ctcaggcaacggatgaggaaacagg

SEQ ID NO: 5686399 - DNA, 25 bp, Homo sapien
caatcctgaagcaggtttatcctca

SEQ ID NO: 5686400 - DNA, 25 bp, Homo sapien
tgaagcaggtttatcctcaggcaac

SEQ ID NO: 5686401 - DNA, 25 bp, Homo sapien
ggtttatcctcaggcaacggatgag

SEQ ID NO: 5686402 - DNA, 25 bp, Homo sapien
agatctctggcagctactcaactgt

SEQ ID NO: 5686403 - DNA, 25 bp, Homo sapien
tcaactgttgcacctccacaatagc

SEQ ID NO: 5686404 - DNA, 25 bp, Homo sapien
ctgttgcacctccacaatagctaca

SEQ ID NO: 5686405 - DNA, 25 bp, Homo sapien
tccacaatagctacagacagtacta

SEQ ID NO: 5686406 - DNA, 25 bp, Homo sapien
tctggcagctactcaactgttgcac

SEQ ID NO: 5686407 - DNA, 25 bp, Homo sapien
caggtggtaaatattgcaggctttc

SEQ ID NO: 5686408 - DNA, 25 bp, Homo sapien
gctattgtggaggtgcaacagttga

SEQ ID NO: 5686409 - DNA, 25 bp, Homo sapien
ggtgcaacagttgagtagctgccag

SEQ ID NO: 5686410 - DNA, 25 bp, Homo sapien
tagtactgtctgtagctattgtgga

SEQ ID NO: 5686411 - DNA, 25 bp, Homo sapien
gaaagcctgcaatatttaccacctg

SEQ ID NO: 5686412 - DNA, 25 bp, Homo sapien
acagttgagtagctgccagagatct

SEQ ID NO: 5686413 - DNA, 25 bp, Homo sapien
tgtagctattgtggaggtgcaacag

SEQ ID NO: 5686414 - DNA, 25 bp, Homo sapien
cacgcctggcttattttttgtattt

SEQ ID NO: 5686415 - DNA, 25 bp, Homo sapien
gcccgccaccacgcctggcttattt

SEQ ID NO: 5686416 - DNA, 25 bp, Homo sapien
ccgccaccacgcctggcttattttt

SEQ ID NO: 5686417 - DNA, 25 bp, Homo sapien
ggtgcccgccaccacgcctggctta

SEQ ID NO: 5686418 - DNA, 25 bp, Homo sapien
tgcccgccaccacgcctggcttatt

SEQ ID NO: 5686419 - DNA, 25 bp, Homo sapien
gtgcccgccaccacgcctggcttat

SEQ ID NO: 5686420 - DNA, 25 bp, Homo sapien
aaaaataagccaggcgtggtggcgg

SEQ ID NO: 5686421 - DNA, 25 bp, Homo sapien
taagccaggcgtggtggcgggcacc

SEQ ID NO: 5686422 - DNA, 25 bp, Homo sapien
aaatacaaaaaataagccaggcgtg

SEQ ID NO: 5686423 - DNA, 25 bp, Homo sapien
aataagccaggcgtggtggcgggca

SEQ ID NO: 5686424 - DNA, 25 bp, Homo sapien
ataagccaggcgtggtggcgggcac

SEQ ID NO: 5686425 - DNA, 25 bp, Homo sapien
aaataagccaggcgtggtggcgggc

SEQ ID NO: 5686426 - DNA, 25 bp, Homo sapien
ctgcaacctccgcctcccgggttca

SEQ ID NO: 5686427 - DNA, 25 bp, Homo sapien
tgcagtgacgcatctcggctcactg

SEQ ID NO: 5686428 - DNA, 25 bp, Homo sapien
ctcactgcaacctccgcctcccggg

SEQ ID NO: 5686429 - DNA, 25 bp, Homo sapien
cactgcaacctccgcctcccgggtt

SEQ ID NO: 5686430 - DNA, 25 bp, Homo sapien
tcactgcaacctccgcctcccgggt

SEQ ID NO: 5686431 - DNA, 25 bp, Homo sapien
gaagtgcagtgacgcatctcggctc

SEQ ID NO: 5686432 - DNA, 25 bp, Homo sapien
gagccgagatgcgtcactgcacttc

SEQ ID NO: 5686433 - DNA, 25 bp, Homo sapien
aacccgggaggcggaggttgcagtg

SEQ ID NO: 5686434 - DNA, 25 bp, Homo sapien
cccgggaggcggaggttgcagtgag

SEQ ID NO: 5686435 - DNA, 25 bp, Homo sapien
cagtgagccgagatgcgtcactgca

SEQ ID NO: 5686436 - DNA, 25 bp, Homo sapien
tgaacccgggaggcggaggttgcag

SEQ ID NO: 5686437 - DNA, 25 bp, Homo sapien
acccgggaggcggaggttgcagtga

SEQ ID NO: 5686438 - DNA, 25 bp, Homo sapien
tctgctggttgaacgggaagtgtaa

SEQ ID NO: 5686439 - DNA, 25 bp, Homo sapien
ttctgctggttgaacgggaagtgta

SEQ ID NO: 5686440 - DNA, 25 bp, Homo sapien
gttgaacgggaagtgtaaaatctga

SEQ ID NO: 5686441 - DNA, 25 bp, Homo sapien
ccttctgctggttgaacgggaagtg

SEQ ID NO: 5686442 - DNA, 25 bp, Homo sapien
ctgctggttgaacgggaagtgtaaa

SEQ ID NO: 5686443 - DNA, 25 bp, Homo sapien
tgccttctgctggttgaacgggaag

SEQ ID NO: 5686444 - DNA, 25 bp, Homo sapien
tttacacttcccgttcaaccagcag

SEQ ID NO: 5686445 - DNA, 25 bp, Homo sapien
tcagattttacacttcccgttcaac

SEQ ID NO: 5686446 - DNA, 25 bp, Homo sapien
cttcccgttcaaccagcagaaggca

SEQ ID NO: 5686447 - DNA, 25 bp, Homo sapien
cacttcccgttcaaccagcagaagg

SEQ ID NO: 5686448 - DNA, 25 bp, Homo sapien
ttacacttcccgttcaaccagcaga

SEQ ID NO: 5686449 - DNA, 25 bp, Homo sapien
tacacttcccgttcaaccagcagaa

SEQ ID NO: 5686450 - DNA, 25 bp, Homo sapien
gaaccatttacagttgtgcctcgcg

SEQ ID NO: 5686451 - DNA, 25 bp, Homo sapien
tttagccacaaagatactgttcagt

SEQ ID NO: 5686452 - DNA, 25 bp, Homo sapien
cacaaagatactgttcagtgaacca

SEQ ID NO: 5686453 - DNA, 25 bp, Homo sapien
tctcagctgtgcatctcactgtcgc

SEQ ID NO: 5686454 - DNA, 25 bp, Homo sapien
tcactgtcgctctggaagacctagc

SEQ ID NO: 5686455 - DNA, 25 bp, Homo sapien
gttgtgcctcgcgttgtcccactct

SEQ ID NO: 5686456 - DNA, 25 bp, Homo sapien
ttccagagcgacagtgagatgcaca

SEQ ID NO: 5686457 - DNA, 25 bp, Homo sapien
gtgggacaacgcgaggcacaactgt

SEQ ID NO: 5686458 - DNA, 25 bp, Homo sapien
cactgaacagtatctttgtggctaa

SEQ ID NO: 5686459 - DNA, 25 bp, Homo sapien
gcgacagtgagatgcacagctgaga

SEQ ID NO: 5686460 - DNA, 25 bp, Homo sapien
ggctaggtcttccagagcgacagtg

SEQ ID NO: 5686461 - DNA, 25 bp, Homo sapien
cgcgaggcacaactgtaaatggttc

SEQ ID NO: 5686462 - DNA, 25 bp, Homo sapien
gtgttctcaggtccgcactgagcgg

SEQ ID NO: 5686463 - DNA, 25 bp, Homo sapien
ttctcaggtccgcactgagcggtgg

SEQ ID NO: 5686464 - DNA, 25 bp, Homo sapien
ggtgttctcaggtccgcactgagcg

SEQ ID NO: 5686465 - DNA, 25 bp, Homo sapien
tctcaggtccgcactgagcggtggt

SEQ ID NO: 5686466 - DNA, 25 bp, Homo sapien
gggtgttctcaggtccgcactgagc

SEQ ID NO: 5686467 - DNA, 25 bp, Homo sapien
ccgcactgagcggtggtgaccagag

SEQ ID NO: 5686468 - DNA, 25 bp, Homo sapien
tctggtcaccaccgctcagtgcgga

SEQ ID NO: 5686469 - DNA, 25 bp, Homo sapien
cgctcagtgcggacctgagaacacc

SEQ ID NO: 5686470 - DNA, 25 bp, Homo sapien
accaccgctcagtgcggacctgaga

SEQ ID NO: 5686471 - DNA, 25 bp, Homo sapien
ccaccgctcagtgcggacctgagaa

SEQ ID NO: 5686472 - DNA, 25 bp, Homo sapien
ccgctcagtgcggacctgagaacac

SEQ ID NO: 5686473 - DNA, 25 bp, Homo sapien
gctcagtgcggacctgagaacaccc

SEQ ID NO: 5686474 - DNA, 25 bp, Homo sapien
gtcaccagcctagtgcaggcaccac

SEQ ID NO: 5686475 - DNA, 25 bp, Homo sapien
ccagcttctacccagagagcaggtt

SEQ ID NO: 5686476 - DNA, 25 bp, Homo sapien
tgtcaccagcctagtgcaggcacca

SEQ ID NO: 5686477 - DNA, 25 bp, Homo sapien
aacctgctctctgggtagaagctgg

SEQ ID NO: 5686478 - DNA, 25 bp, Homo sapien
gtggtgcctgcactaggctggtgac

SEQ ID NO: 5686479 - DNA, 25 bp, Homo sapien
tggtgcctgcactaggctggtgaca

SEQ ID NO: 5686480 - DNA, 25 bp, Homo sapien
catgcagagatccttcccctttaaa

SEQ ID NO: 5686481 - DNA, 25 bp, Homo sapien
caggcgagaaaggagatcgagtcaa

SEQ ID NO: 5686482 - DNA, 25 bp, Homo sapien
tgtaatcatgcagagatccttcccc

SEQ ID NO: 5686483 - DNA, 25 bp, Homo sapien
gaagggagagctgtaatcatgcaga

SEQ ID NO: 5686484 - DNA, 25 bp, Homo sapien
gagagctgtaatcatgcagagatcc

SEQ ID NO: 5686485 - DNA, 25 bp, Homo sapien
aaggagatcgagtcaagaatggtgt

SEQ ID NO: 5686486 - DNA, 25 bp, Homo sapien
aacaccattcttgactcgatctcct

SEQ ID NO: 5686487 - DNA, 25 bp, Homo sapien
gatctctgcatgattacagctctcc

SEQ ID NO: 5686488 - DNA, 25 bp, Homo sapien
ttgactcgatctcctttctcgcctg

SEQ ID NO: 5686489 - DNA, 25 bp, Homo sapien
tctgcatgattacagctctcccttc

SEQ ID NO: 5686490 - DNA, 25 bp, Homo sapien
gggaaggatctctgcatgattacag

SEQ ID NO: 5686491 - DNA, 25 bp, Homo sapien
tttaaaggggaaggatctctgcatg

SEQ ID NO: 5686492 - DNA, 25 bp, Homo sapien
ttgttgatgctgaaactgaaggagc

SEQ ID NO: 5686493 - DNA, 25 bp, Homo sapien
gggtttttgttgatgctgaaactga

SEQ ID NO: 5686494 - DNA, 25 bp, Homo sapien
tggtcacagataccctctctgaggg

SEQ ID NO: 5686495 - DNA, 25 bp, Homo sapien
gggtggtcacagataccctctctga

SEQ ID NO: 5686496 - DNA, 25 bp, Homo sapien
ctgaaggagcaaggaactggaaaga

SEQ ID NO: 5686497 - DNA, 25 bp, Homo sapien
gaaactgaaggagcaaggaactgga

SEQ ID NO: 5686498 - DNA, 25 bp, Homo sapien
ccctcagagagggtatctgtgacca

SEQ ID NO: 5686499 - DNA, 25 bp, Homo sapien
tctttccagttccttgctccttcag

SEQ ID NO: 5686500 - DNA, 25 bp, Homo sapien
gcatcaacaaaaacccctcagagag

SEQ ID NO: 5686501 - DNA, 25 bp, Homo sapien
cagagagggtatctgtgaccacccc

SEQ ID NO: 5686502 - DNA, 25 bp, Homo sapien
cagttccttgctccttcagtttcag

SEQ ID NO: 5686503 - DNA, 25 bp, Homo sapien
gctccttcagtttcagcatcaacaa

SEQ ID NO: 5686504 - DNA, 25 bp, Homo sapien
aaatagccaaccggcgggcctggag

SEQ ID NO: 5686505 - DNA, 25 bp, Homo sapien
agaaatagccaaccggcgggcctgg

SEQ ID NO: 5686506 - DNA, 25 bp, Homo sapien
tgccaagaaatagccaaccggcggg

SEQ ID NO: 5686507 - DNA, 25 bp, Homo sapien
atgcggaaggaaagtagtccttgag

SEQ ID NO: 5686508 - DNA, 25 bp, Homo sapien
caagaaatagccaaccggcgggcct

SEQ ID NO: 5686509 - DNA, 25 bp, Homo sapien
gatgcggaaggaaagtagtccttga

SEQ ID NO: 5686510 - DNA, 25 bp, Homo sapien
ctccaggcccgccggttggctattt

SEQ ID NO: 5686511 - DNA, 25 bp, Homo sapien
aggcccgccggttggctatttcttg

SEQ ID NO: 5686512 - DNA, 25 bp, Homo sapien
cccgccggttggctatttcttggca

SEQ ID NO: 5686513 - DNA, 25 bp, Homo sapien
tcaaggactactttccttccgcatc

SEQ ID NO: 5686514 - DNA, 25 bp, Homo sapien
ctcaaggactactttccttccgcat

SEQ ID NO: 5686515 - DNA, 25 bp, Homo sapien
ccaggcccgccggttggctatttct

SEQ ID NO: 5686516 - DNA, 25 bp, Homo sapien
tcttagcagctgcatttaactcacg

SEQ ID NO: 5686517 - DNA, 25 bp, Homo sapien
taaagtcttagcagctgcatttaac

SEQ ID NO: 5686518 - DNA, 25 bp, Homo sapien
gcagctgcatttaactcacgcatat

SEQ ID NO: 5686519 - DNA, 25 bp, Homo sapien
caacacttaaagtcttagcagctgc

SEQ ID NO: 5686520 - DNA, 25 bp, Homo sapien
tgatgtgagtaactgtcattcaccg

SEQ ID NO: 5686521 - DNA, 25 bp, Homo sapien
gagtaactgtcattcaccgacatct

SEQ ID NO: 5686522 - DNA, 25 bp, Homo sapien
ggtgaatgacagttactcacatcac

SEQ ID NO: 5686523 - DNA, 25 bp, Homo sapien
gagatgtcggtgaatgacagttact

SEQ ID NO: 5686524 - DNA, 25 bp, Homo sapien
cgtgagttaaatgcagctgctaaga

SEQ ID NO: 5686525 - DNA, 25 bp, Homo sapien
cagctgctaagactttaagtgttgg

SEQ ID NO: 5686526 - DNA, 25 bp, Homo sapien
tatgcgtgagttaaatgcagctgct

SEQ ID NO: 5686527 - DNA, 25 bp, Homo sapien
aaatatgcgtgagttaaatgcagct

SEQ ID NO: 5686528 - DNA, 25 bp, Homo sapien
gacgcgcccgccgtgagcgaggagg

SEQ ID NO: 5686529 - DNA, 25 bp, Homo sapien
cgaggaggcccgaatccgggcgtct

SEQ ID NO: 5686530 - DNA, 25 bp, Homo sapien
tcttgagggcccaggccctggccga

SEQ ID NO: 5686531 - DNA, 25 bp, Homo sapien
gctggctcttgagggcccaggccct

SEQ ID NO: 5686532 - DNA, 25 bp, Homo sapien
ggtcgggctggctcttgagggccca

SEQ ID NO: 5686533 - DNA, 25 bp, Homo sapien
cgccgtgagcgaggaggcccgaatc

SEQ ID NO: 5686534 - DNA, 25 bp, Homo sapien
acggcgggcgcgtcggccagggcct

SEQ ID NO: 5686535 - DNA, 25 bp, Homo sapien
agacgcccggattcgggcctcctcg

SEQ ID NO: 5686536 - DNA, 25 bp, Homo sapien
attcgggcctcctcgctcacggcgg

SEQ ID NO: 5686537 - DNA, 25 bp, Homo sapien
tcggccagggcctgggccctcaaga

SEQ ID NO: 5686538 - DNA, 25 bp, Homo sapien
gcctcctcgctcacggcgggcgcgt

SEQ ID NO: 5686539 - DNA, 25 bp, Homo sapien
agggcctgggccctcaagagccagc

SEQ ID NO: 5686540 - DNA, 25 bp, Homo sapien
ggaaagctgacttattcctatggct

SEQ ID NO: 5686541 - DNA, 25 bp, Homo sapien
ccgacagccttctttgacctctggg

SEQ ID NO: 5686542 - DNA, 25 bp, Homo sapien
gaaagctgacttattcctatggctt

SEQ ID NO: 5686543 - DNA, 25 bp, Homo sapien
tgggaaagctgacttattcctatgg

SEQ ID NO: 5686544 - DNA, 25 bp, Homo sapien
aagctgacttattcctatggctttg

SEQ ID NO: 5686545 - DNA, 25 bp, Homo sapien
tctgggaaagctgacttattcctat

SEQ ID NO: 5686546 - DNA, 25 bp, Homo sapien
cccagaggtcaaagaaggctgtcgg

SEQ ID NO: 5686547 - DNA, 25 bp, Homo sapien
agccataggaataagtcagctttcc

SEQ ID NO: 5686548 - DNA, 25 bp, Homo sapien
caaagccataggaataagtcagctt

SEQ ID NO: 5686549 - DNA, 25 bp, Homo sapien
gccataggaataagtcagctttccc

SEQ ID NO: 5686550 - DNA, 25 bp, Homo sapien
ataggaataagtcagctttcccaga

SEQ ID NO: 5686551 - DNA, 25 bp, Homo sapien
cataggaataagtcagctttcccag

SEQ ID NO: 5686552 - DNA, 25 bp, Homo sapien
ggaagtccgacatttagtaactgct

SEQ ID NO: 5686553 - DNA, 25 bp, Homo sapien
tagtaactgctcgatgatcattgcg

SEQ ID NO: 5686554 - DNA, 25 bp, Homo sapien
caataagacagggaagtccgacatt

SEQ ID NO: 5686555 - DNA, 25 bp, Homo sapien
tcgatgatcattgcggtacgttatt

SEQ ID NO: 5686556 - DNA, 25 bp, Homo sapien
tacccgatggatttgtgaggattaa

SEQ ID NO: 5686557 - DNA, 25 bp, Homo sapien
actgctcgatgatcattgcggtacg

SEQ ID NO: 5686558 - DNA, 25 bp, Homo sapien
ttaatcctcacaaatccatcgggta

SEQ ID NO: 5686559 - DNA, 25 bp, Homo sapien
catcgagcagttactaaatgtcgga

SEQ ID NO: 5686560 - DNA, 25 bp, Homo sapien
taacgtaccgcaatgatcatcgagc

SEQ ID NO: 5686561 - DNA, 25 bp, Homo sapien
aatgtcggacttccctgtcttattg

SEQ ID NO: 5686562 - DNA, 25 bp, Homo sapien
gcagttactaaatgtcggacttccc

SEQ ID NO: 5686563 - DNA, 25 bp, Homo sapien
caatgatcatcgagcagttactaaa

SEQ ID NO: 5686564 - DNA, 25 bp, Homo sapien
tagcgcattatcttctcagggccac

SEQ ID NO: 5686565 - DNA, 25 bp, Homo sapien
tactccccagttcatttagcgcatt

SEQ ID NO: 5686566 - DNA, 25 bp, Homo sapien
tccccagttcatttagcgcattatc

SEQ ID NO: 5686567 - DNA, 25 bp, Homo sapien
ttactatccttactccccagttcat

SEQ ID NO: 5686568 - DNA, 25 bp, Homo sapien
gctgtcagcattccccgacacctta

SEQ ID NO: 5686569 - DNA, 25 bp, Homo sapien
catttagcgcattatcttctcaggg

SEQ ID NO: 5686570 - DNA, 25 bp, Homo sapien
gaagataatgcgctaaatgaactgg

SEQ ID NO: 5686571 - DNA, 25 bp, Homo sapien
tgagaagataatgcgctaaatgaac

SEQ ID NO: 5686572 - DNA, 25 bp, Homo sapien
aatgaactggggagtaaggatagta

SEQ ID NO: 5686573 - DNA, 25 bp, Homo sapien
gtggccctgagaagataatgcgcta

SEQ ID NO: 5686574 - DNA, 25 bp, Homo sapien
ccctgagaagataatgcgctaaatg

SEQ ID NO: 5686575 - DNA, 25 bp, Homo sapien
ggccctgagaagataatgcgctaaa

SEQ ID NO: 5686576 - DNA, 25 bp, Homo sapien
ctcacctttagggggcaattgggag

SEQ ID NO: 5686577 - DNA, 25 bp, Homo sapien
attgggaggggcagataaaatggtg

SEQ ID NO: 5686578 - DNA, 25 bp, Homo sapien
caccattttatctgcccctcccaat

SEQ ID NO: 5686579 - DNA, 25 bp, Homo sapien
ctcccaattgccccctaaaggtgag

SEQ ID NO: 5686580 - DNA, 25 bp, Homo sapien
ctcacctttagggggcaattgggag

SEQ ID NO: 5686581 - DNA, 25 bp, Homo sapien
agtctcctgggttcctcacctttag

SEQ ID NO: 5686582 - DNA, 25 bp, Homo sapien
tggtgaacatgaaactactttaaaa

SEQ ID NO: 5686583 - DNA, 25 bp, Homo sapien
aaaaagtgtaatgaattggctgggc

SEQ ID NO: 5686584 - DNA, 25 bp, Homo sapien
ctttaaaaagtgtaatgaattggct

SEQ ID NO: 5686585 - DNA, 25 bp, Homo sapien
gggcagataaaatggtgaacatgaa

SEQ ID NO: 5686586 - DNA, 25 bp, Homo sapien
tttaaagtagtttcatgttcaccat

SEQ ID NO: 5686587 - DNA, 25 bp, Homo sapien
caccattttatctgcccctcccaat

SEQ ID NO: 5686588 - DNA, 25 bp, Homo sapien
ctcccaattgccccctaaaggtgag

SEQ ID NO: 5686589 - DNA, 25 bp, Homo sapien
gcccagccaattcattacacttttt

SEQ ID NO: 5686590 - DNA, 25 bp, Homo sapien
agccaattcattacactttttaaag

SEQ ID NO: 5686591 - DNA, 25 bp, Homo sapien
ctaaaggtgaggaacccaggagact

SEQ ID NO: 5686592 - DNA, 25 bp, Homo sapien
tcagcctcccaagtagctgggacta

SEQ ID NO: 5686593 - DNA, 25 bp, Homo sapien
ttctcctgcctcagcctcccaagta

SEQ ID NO: 5686594 - DNA, 25 bp, Homo sapien
ctcctgcctcagcctcccaagtagc

SEQ ID NO: 5686595 - DNA, 25 bp, Homo sapien
tcctgcctcagcctcccaagtagct

SEQ ID NO: 5686596 - DNA, 25 bp, Homo sapien
tctcctgcctcagcctcccaagtag

SEQ ID NO: 5686597 - DNA, 25 bp, Homo sapien
caggtgcccaccaccacacccggcc

SEQ ID NO: 5686598 - DNA, 25 bp, Homo sapien
ggccgggtgtggtggtgggcacctg

SEQ ID NO: 5686599 - DNA, 25 bp, Homo sapien
ctacttgggaggctgaggcaggaga

SEQ ID NO: 5686600 - DNA, 25 bp, Homo sapien
agctacttgggaggctgaggcagga

SEQ ID NO: 5686601 - DNA, 25 bp, Homo sapien
tagtcccagctacttgggaggctga

SEQ ID NO: 5686602 - DNA, 25 bp, Homo sapien
gctacttgggaggctgaggcaggag

SEQ ID NO: 5686603 - DNA, 25 bp, Homo sapien
tacttgggaggctgaggcaggagaa

SEQ ID NO: 5686604 - DNA, 25 bp, Homo sapien
atccatgttatagccggtgatggga

SEQ ID NO: 5686605 - DNA, 25 bp, Homo sapien
catccatgttatagccggtgatggg

SEQ ID NO: 5686606 - DNA, 25 bp, Homo sapien
tccatgttatagccggtgatgggat

SEQ ID NO: 5686607 - DNA, 25 bp, Homo sapien
tgttatagccggtgatgggatttcc

SEQ ID NO: 5686608 - DNA, 25 bp, Homo sapien
atgttatagccggtgatgggatttc

SEQ ID NO: 5686609 - DNA, 25 bp, Homo sapien
ccatgttatagccggtgatgggatt

SEQ ID NO: 5686610 - DNA, 25 bp, Homo sapien
tcccatcaccggctataacatggat

SEQ ID NO: 5686611 - DNA, 25 bp, Homo sapien
ggaaatcccatcaccggctataaca

SEQ ID NO: 5686612 - DNA, 25 bp, Homo sapien
atcccatcaccggctataacatgga

SEQ ID NO: 5686613 - DNA, 25 bp, Homo sapien
cccatcaccggctataacatggatg

SEQ ID NO: 5686614 - DNA, 25 bp, Homo sapien
gaaatcccatcaccggctataacat

SEQ ID NO: 5686615 - DNA, 25 bp, Homo sapien
aatcccatcaccggctataacatgg

SEQ ID NO: 5686616 - DNA, 25 bp, Homo sapien
ggtctcgaattcctgacctcagatg

SEQ ID NO: 5686617 - DNA, 25 bp, Homo sapien
gacagggttttgccatgttggccag

SEQ ID NO: 5686618 - DNA, 25 bp, Homo sapien
agggttttgccatgttggccaggct

SEQ ID NO: 5686619 - DNA, 25 bp, Homo sapien
acagggttttgccatgttggccagg

SEQ ID NO: 5686620 - DNA, 25 bp, Homo sapien
actcccaatgtgctgggattattgg

SEQ ID NO: 5686621 - DNA, 25 bp, Homo sapien
atctgcctgccttggactcccaatg

SEQ ID NO: 5686622 - DNA, 25 bp, Homo sapien
cctggccaacatggcaaaaccctgt

SEQ ID NO: 5686623 - DNA, 25 bp, Homo sapien
agcctggccaacatggcaaaaccct

SEQ ID NO: 5686624 - DNA, 25 bp, Homo sapien
ctggccaacatggcaaaaccctgtc

SEQ ID NO: 5686625 - DNA, 25 bp, Homo sapien
catctgaggtcaggaattcgagacc

SEQ ID NO: 5686626 - DNA, 25 bp, Homo sapien
cattgggagtccaaggcaggcagat

SEQ ID NO: 5686627 - DNA, 25 bp, Homo sapien
ccaataatcccagcacattgggagt

SEQ ID NO: 5686628 - DNA, 25 bp, Homo sapien
aaaggagcttgttttggccaggtgc

SEQ ID NO: 5686629 - DNA, 25 bp, Homo sapien
aggagcttgttttggccaggtgcag

SEQ ID NO: 5686630 - DNA, 25 bp, Homo sapien
aaggagcttgttttggccaggtgca

SEQ ID NO: 5686631 - DNA, 25 bp, Homo sapien
aaaaggagcttgttttggccaggtg

SEQ ID NO: 5686632 - DNA, 25 bp, Homo sapien
gcacctggccaaaacaagctccttt

SEQ ID NO: 5686633 - DNA, 25 bp, Homo sapien
tgcacctggccaaaacaagctcctt

SEQ ID NO: 5686634 - DNA, 25 bp, Homo sapien
ctgcacctggccaaaacaagctcct

SEQ ID NO: 5686635 - DNA, 25 bp, Homo sapien
cacctggccaaaacaagctcctttt

SEQ ID NO: 5686636 - DNA, 25 bp, Homo sapien
tcacagctactcaagaggctgaggt

SEQ ID NO: 5686637 - DNA, 25 bp, Homo sapien
atggcgaaaccctgtctatactaaa

SEQ ID NO: 5686638 - DNA, 25 bp, Homo sapien
ctgtctatactaaaagtacaaaaat

SEQ ID NO: 5686639 - DNA, 25 bp, Homo sapien
atggtggtgggtgcctgtaatcaca

SEQ ID NO: 5686640 - DNA, 25 bp, Homo sapien
ggtgggtgcctgtaatcacagctac

SEQ ID NO: 5686641 - DNA, 25 bp, Homo sapien
catggcgaaaccctgtctatactaa

SEQ ID NO: 5686642 - DNA, 25 bp, Homo sapien
tgtgattacaggcacccaccaccat

SEQ ID NO: 5686643 - DNA, 25 bp, Homo sapien
tttagtatagacagggtttcgccat

SEQ ID NO: 5686644 - DNA, 25 bp, Homo sapien
atttttgtacttttagtatagacag

SEQ ID NO: 5686645 - DNA, 25 bp, Homo sapien
gtagctgtgattacaggcacccacc

SEQ ID NO: 5686646 - DNA, 25 bp, Homo sapien
acctcagcctcttgagtagctgtga

SEQ ID NO: 5686647 - DNA, 25 bp, Homo sapien
ttagtatagacagggtttcgccatg

SEQ ID NO: 5686648 - DNA, 25 bp, Homo sapien
acagagggagaatccatcacaaaat

SEQ ID NO: 5686649 - DNA, 25 bp, Homo sapien
cagagggagaatccatcacaaaata

SEQ ID NO: 5686650 - DNA, 25 bp, Homo sapien
ggagaatccatcacaaaataaataa

SEQ ID NO: 5686651 - DNA, 25 bp, Homo sapien
gagggagaatccatcacaaaataaa

SEQ ID NO: 5686652 - DNA, 25 bp, Homo sapien
gggagaatccatcacaaaataaata

SEQ ID NO: 5686653 - DNA, 25 bp, Homo sapien
agagggagaatccatcacaaaataa

SEQ ID NO: 5686654 - DNA, 25 bp, Homo sapien
ttatttattttgtgatggattctcc

SEQ ID NO: 5686655 - DNA, 25 bp, Homo sapien
tattttgtgatggattctccctctg

SEQ ID NO: 5686656 - DNA, 25 bp, Homo sapien
tttattttgtgatggattctccctc

SEQ ID NO: 5686657 - DNA, 25 bp, Homo sapien
attttgtgatggattctccctctgt

SEQ ID NO: 5686658 - DNA, 25 bp, Homo sapien
ttattttgtgatggattctccctct

SEQ ID NO: 5686659 - DNA, 25 bp, Homo sapien
tatttattttgtgatggattctccc

SEQ ID NO: 5686660 - DNA, 25 bp, Homo sapien
tgagcaaccgtatccatattaagcc

SEQ ID NO: 5686661 - DNA, 25 bp, Homo sapien
tctaaaacgctaatttgaaaacatg

SEQ ID NO: 5686662 - DNA, 25 bp, Homo sapien
tgatatttgagcaaccgtatccata

SEQ ID NO: 5686663 - DNA, 25 bp, Homo sapien
accgtatccatattaagccttaata

SEQ ID NO: 5686664 - DNA, 25 bp, Homo sapien
ttgagttctaaaacgctaatttgaa

SEQ ID NO: 5686665 - DNA, 25 bp, Homo sapien
gcaaccgtatccatattaagcctta

SEQ ID NO: 5686666 - DNA, 25 bp, Homo sapien
tatggatacggttgctcaaatatca

SEQ ID NO: 5686667 - DNA, 25 bp, Homo sapien
gcttaatatggatacggttgctcaa

SEQ ID NO: 5686668 - DNA, 25 bp, Homo sapien
tcaaattagcgttttagaactcaaa

SEQ ID NO: 5686669 - DNA, 25 bp, Homo sapien
tattaaggcttaatatggatacggt

SEQ ID NO: 5686670 - DNA, 25 bp, Homo sapien
taaggcttaatatggatacggttgc

SEQ ID NO: 5686671 - DNA, 25 bp, Homo sapien
catgttttcaaattagcgttttaga

SEQ ID NO: 5686672 - DNA, 25 bp, Homo sapien
agacgaactcttgctctgtcacgca

SEQ ID NO: 5686673 - DNA, 25 bp, Homo sapien
gtgtagtggcgtgctcactgcaacc

SEQ ID NO: 5686674 - DNA, 25 bp, Homo sapien
ctagagtgtagtggcgtgctcactg

SEQ ID NO: 5686675 - DNA, 25 bp, Homo sapien
gagtgtagtggcgtgctcactgcaa

SEQ ID NO: 5686676 - DNA, 25 bp, Homo sapien
agtgtagtggcgtgctcactgcaac

SEQ ID NO: 5686677 - DNA, 25 bp, Homo sapien
tgtagtggcgtgctcactgcaacct

SEQ ID NO: 5686678 - DNA, 25 bp, Homo sapien
cagtgagcacgccactacactctag

SEQ ID NO: 5686679 - DNA, 25 bp, Homo sapien
aggttgcagtgagcacgccactaca

SEQ ID NO: 5686680 - DNA, 25 bp, Homo sapien
tgcgtgacagagcaagagttcgtct

SEQ ID NO: 5686681 - DNA, 25 bp, Homo sapien
ggttgcagtgagcacgccactacac

SEQ ID NO: 5686682 - DNA, 25 bp, Homo sapien
ttgcagtgagcacgccactacactc

SEQ ID NO: 5686683 - DNA, 25 bp, Homo sapien
gttgcagtgagcacgccactacact

SEQ ID NO: 5686684 - DNA, 25 bp, Homo sapien
gttgtgaactcctgacctagtgagc

SEQ ID NO: 5686685 - DNA, 25 bp, Homo sapien
ttgtgaactcctgacctagtgagcc

SEQ ID NO: 5686686 - DNA, 25 bp, Homo sapien
ccgctatcgctcccagctaattttt

SEQ ID NO: 5686687 - DNA, 25 bp, Homo sapien
tgtgaactcctgacctagtgagcca

SEQ ID NO: 5686688 - DNA, 25 bp, Homo sapien
gtgaactcctgacctagtgagccac

SEQ ID NO: 5686689 - DNA, 25 bp, Homo sapien
cgctatcgctcccagctaatttttg

SEQ ID NO: 5686690 - DNA, 25 bp, Homo sapien
ggctcactaggtcaggagttcacaa

SEQ ID NO: 5686691 - DNA, 25 bp, Homo sapien
gtggctcactaggtcaggagttcac

SEQ ID NO: 5686692 - DNA, 25 bp, Homo sapien
aaaaattagctgggagcgatagcgg

SEQ ID NO: 5686693 - DNA, 25 bp, Homo sapien
gctcactaggtcaggagttcacaac

SEQ ID NO: 5686694 - DNA, 25 bp, Homo sapien
tggctcactaggtcaggagttcaca

SEQ ID NO: 5686695 - DNA, 25 bp, Homo sapien
caaaaattagctgggagcgatagcg

SEQ ID NO: 5686696 - DNA, 25 bp, Homo sapien
tgctctttatgtgtagatcatggaa

SEQ ID NO: 5686697 - DNA, 25 bp, Homo sapien
ttgctctttatgtgtagatcatgga

SEQ ID NO: 5686698 - DNA, 25 bp, Homo sapien
tttgctctttatgtgtagatcatgg

SEQ ID NO: 5686699 - DNA, 25 bp, Homo sapien
ttttgctctttatgtgtagatcatg

SEQ ID NO: 5686700 - DNA, 25 bp, Homo sapien
ttccatgatctacacataaagagca

SEQ ID NO: 5686701 - DNA, 25 bp, Homo sapien
catgatctacacataaagagcaaaa

SEQ ID NO: 5686702 - DNA, 25 bp, Homo sapien
ccatgatctacacataaagagcaaa

SEQ ID NO: 5686703 - DNA, 25 bp, Homo sapien
tccatgatctacacataaagagcaa

SEQ ID NO: 5686704 - DNA, 25 bp, Homo sapien
gagagtggttagtgatcttcatgaa

SEQ ID NO: 5686705 - DNA, 25 bp, Homo sapien
tgctctttatgtgtagatcatggaa

SEQ ID NO: 5686706 - DNA, 25 bp, Homo sapien
ttaaatgagagagtggttagtgatc

SEQ ID NO: 5686707 - DNA, 25 bp, Homo sapien
catgaagtttgataggtggcaatac

SEQ ID NO: 5686708 - DNA, 25 bp, Homo sapien
gataggtggcaatacatttaactga

SEQ ID NO: 5686709 - DNA, 25 bp, Homo sapien
catttaactgattttgctctttatg

SEQ ID NO: 5686710 - DNA, 25 bp, Homo sapien
ttccatgatctacacataaagagca

SEQ ID NO: 5686711 - DNA, 25 bp, Homo sapien
gaagatcactaaccactctctcatt

SEQ ID NO: 5686712 - DNA, 25 bp, Homo sapien
aaacttcatgaagatcactaaccac

SEQ ID NO: 5686713 - DNA, 25 bp, Homo sapien
cagttaaatgtattgccacctatca

SEQ ID NO: 5686714 - DNA, 25 bp, Homo sapien
gtattgccacctatcaaacttcatg

SEQ ID NO: 5686715 - DNA, 25 bp, Homo sapien
cataaagagcaaaatcagttaaatg

SEQ ID NO: 5686716 - DNA, 25 bp, Homo sapien
aagcaaaattcgtgaaaatacttat

SEQ ID NO: 5686717 - DNA, 25 bp, Homo sapien
tgaagataaatttggaacgttttca

SEQ ID NO: 5686718 - DNA, 25 bp, Homo sapien
ataagtattttcacgaattttgctt

SEQ ID NO: 5686719 - DNA, 25 bp, Homo sapien
tgaaaacgttccaaatttatcttca

SEQ ID NO: 5686720 - DNA, 25 bp, Homo sapien
taaaagaaaaacatggtgaagataa

SEQ ID NO: 5686721 - DNA, 25 bp, Homo sapien
acttattgatctctctggcagcctt

SEQ ID NO: 5686722 - DNA, 25 bp, Homo sapien
aagcaaaattcgtgaaaatacttat

SEQ ID NO: 5686723 - DNA, 25 bp, Homo sapien
ttcaaagggaaagcaaaattcgtga

SEQ ID NO: 5686724 - DNA, 25 bp, Homo sapien
tgaagataaatttggaacgttttca

SEQ ID NO: 5686725 - DNA, 25 bp, Homo sapien
aaatacttattgatctctctggcag

SEQ ID NO: 5686726 - DNA, 25 bp, Homo sapien
tgaaaacgttccaaatttatcttca

SEQ ID NO: 5686727 - DNA, 25 bp, Homo sapien
gttccaaatttatcttcaccatgtt

SEQ ID NO: 5686728 - DNA, 25 bp, Homo sapien
caataagtattttcacgaattttgc

SEQ ID NO: 5686729 - DNA, 25 bp, Homo sapien
tcacgaattttgctttccctttgaa

SEQ ID NO: 5686730 - DNA, 25 bp, Homo sapien
gctgccagagagatcaataagtatt

SEQ ID NO: 5686731 - DNA, 25 bp, Homo sapien
aaggctgccagagagatcaataagt

SEQ ID NO: 5686732 - DNA, 25 bp, Homo sapien
ccaggagaatagattctagataaaa

SEQ ID NO: 5686733 - DNA, 25 bp, Homo sapien
gaaatttttgtgacagttgaaagca

SEQ ID NO: 5686734 - DNA, 25 bp, Homo sapien
ctatgaaatttttgtgacagttgaa

SEQ ID NO: 5686735 - DNA, 25 bp, Homo sapien
gcaaaccaggagaatagattctaga

SEQ ID NO: 5686736 - DNA, 25 bp, Homo sapien
caaaccaggagaatagattctagat

SEQ ID NO: 5686737 - DNA, 25 bp, Homo sapien
aaatttttgtgacagttgaaagcaa

SEQ ID NO: 5686738 - DNA, 25 bp, Homo sapien
gctttcaactgtcacaaaaatttca

SEQ ID NO: 5686739 - DNA, 25 bp, Homo sapien
tctagaatctattctcctggtttgc

SEQ ID NO: 5686740 - DNA, 25 bp, Homo sapien
ttcaactgtcacaaaaatttcatag

SEQ ID NO: 5686741 - DNA, 25 bp, Homo sapien
tatctagaatctattctcctggttt

SEQ ID NO: 5686742 - DNA, 25 bp, Homo sapien
ttttatctagaatctattctcctgg

SEQ ID NO: 5686743 - DNA, 25 bp, Homo sapien
ttgctttcaactgtcacaaaaattt

SEQ ID NO: 5686744 - DNA, 25 bp, Homo sapien
catttatgtatttaacacaggttac

SEQ ID NO: 5686745 - DNA, 25 bp, Homo sapien
ccagttccaacaggggaagtatatt

SEQ ID NO: 5686746 - DNA, 25 bp, Homo sapien
tccagttccaacaggggaagtatat

SEQ ID NO: 5686747 - DNA, 25 bp, Homo sapien
cagttccaacaggggaagtatattt

SEQ ID NO: 5686748 - DNA, 25 bp, Homo sapien
aaatatacttcccctgttggaactg

SEQ ID NO: 5686749 - DNA, 25 bp, Homo sapien
atatacttcccctgttggaactgga

SEQ ID NO: 5686750 - DNA, 25 bp, Homo sapien
aatatacttcccctgttggaactgg

SEQ ID NO: 5686751 - DNA, 25 bp, Homo sapien
gtaacctgtgttaaatacataaatg

SEQ ID NO: 5686752 - DNA, 25 bp, Homo sapien
tgtatttaacacaggttacttacaa

SEQ ID NO: 5686753 - DNA, 25 bp, Homo sapien
catttatgtatttaacacaggttac

SEQ ID NO: 5686754 - DNA, 25 bp, Homo sapien
ttacaaagctccagttccaacaggg

SEQ ID NO: 5686755 - DNA, 25 bp, Homo sapien
taacacaggttacttacaaagctcc

SEQ ID NO: 5686756 - DNA, 25 bp, Homo sapien
tatgtatttaacacaggttacttac

SEQ ID NO: 5686757 - DNA, 25 bp, Homo sapien
aggcatgttgctgaaaatttaaatt

SEQ ID NO: 5686758 - DNA, 25 bp, Homo sapien
aatttaaattttcagcaacatgcct

SEQ ID NO: 5686759 - DNA, 25 bp, Homo sapien
aaatttaaattttcagcaacatgcc

SEQ ID NO: 5686760 - DNA, 25 bp, Homo sapien
gtaacctgtgttaaatacataaatg

SEQ ID NO: 5686761 - DNA, 25 bp, Homo sapien
tgtaagtaacctgtgttaaatacat

SEQ ID NO: 5686762 - DNA, 25 bp, Homo sapien
gaactggagctttgtaagtaacctg

SEQ ID NO: 5686763 - DNA, 25 bp, Homo sapien
aatatacttcccctgttggaactgg

SEQ ID NO: 5686764 - DNA, 25 bp, Homo sapien
agatgggatagtagattcctttttg

SEQ ID NO: 5686765 - DNA, 25 bp, Homo sapien
aagatgggatagtagattccttttt

SEQ ID NO: 5686766 - DNA, 25 bp, Homo sapien
ttggatagcatcttttatagtgaaa

SEQ ID NO: 5686767 - DNA, 25 bp, Homo sapien
gatgggatagtagattcctttttgg

SEQ ID NO: 5686768 - DNA, 25 bp, Homo sapien
taagatgggatagtagattcctttt

SEQ ID NO: 5686769 - DNA, 25 bp, Homo sapien
aaaaggaatctactatcccatctta

SEQ ID NO: 5686770 - DNA, 25 bp, Homo sapien
aaaaaggaatctactatcccatctt

SEQ ID NO: 5686771 - DNA, 25 bp, Homo sapien
tttcactataaaagatgctatccaa

SEQ ID NO: 5686772 - DNA, 25 bp, Homo sapien
caaaaaggaatctactatcccatct

SEQ ID NO: 5686773 - DNA, 25 bp, Homo sapien
ccaaaaaggaatctactatcccatc

SEQ ID NO: 5686774 - DNA, 25 bp, Homo sapien
catcttttatagtgaaatgtctaac

SEQ ID NO: 5686775 - DNA, 25 bp, Homo sapien
ttggatagcatcttttatagtgaaa

SEQ ID NO: 5686776 - DNA, 25 bp, Homo sapien
ggcagacatgtaaataagatgggat

SEQ ID NO: 5686777 - DNA, 25 bp, Homo sapien
gatgggatagtagattcctttttgg

SEQ ID NO: 5686778 - DNA, 25 bp, Homo sapien
agtagattcctttttggatagcatc

SEQ ID NO: 5686779 - DNA, 25 bp, Homo sapien
taagatgggatagtagattcctttt

SEQ ID NO: 5686780 - DNA, 25 bp, Homo sapien
tatcccatcttatttacatgtctgc

SEQ ID NO: 5686781 - DNA, 25 bp, Homo sapien
taaaataaagttagacatttcacta

SEQ ID NO: 5686782 - DNA, 25 bp, Homo sapien
gatgctatccaaaaaggaatctact

SEQ ID NO: 5686783 - DNA, 25 bp, Homo sapien
tttcactataaaagatgctatccaa

SEQ ID NO: 5686784 - DNA, 25 bp, Homo sapien
caaaaaggaatctactatcccatct

SEQ ID NO: 5686785 - DNA, 25 bp, Homo sapien
gttagacatttcactataaaagatg

SEQ ID NO: 5686786 - DNA, 25 bp, Homo sapien
taccggctcattgccacctccgtct

SEQ ID NO: 5686787 - DNA, 25 bp, Homo sapien
tggcgtgataccggctcattgccac

SEQ ID NO: 5686788 - DNA, 25 bp, Homo sapien
aatggcgtgataccggctcattgcc

SEQ ID NO: 5686789 - DNA, 25 bp, Homo sapien
ataccggctcattgccacctccgtc

SEQ ID NO: 5686790 - DNA, 25 bp, Homo sapien
gcgtgataccggctcattgccacct

SEQ ID NO: 5686791 - DNA, 25 bp, Homo sapien
tgataccggctcattgccacctccg

SEQ ID NO: 5686792 - DNA, 25 bp, Homo sapien
aggtggcaatgagccggtatcacgc

SEQ ID NO: 5686793 - DNA, 25 bp, Homo sapien
cggaggtggcaatgagccggtatca

SEQ ID NO: 5686794 - DNA, 25 bp, Homo sapien
gacggaggtggcaatgagccggtat

SEQ ID NO: 5686795 - DNA, 25 bp, Homo sapien
tggcaatgagccggtatcacgccat

SEQ ID NO: 5686796 - DNA, 25 bp, Homo sapien
ggcaatgagccggtatcacgccatt

SEQ ID NO: 5686797 - DNA, 25 bp, Homo sapien
agacggaggtggcaatgagccggta

SEQ ID NO: 5686798 - DNA, 25 bp, Homo sapien
tgtgtgttgttatttttttagtaga

SEQ ID NO: 5686799 - DNA, 25 bp, Homo sapien
cctcaggtggtccacttgccttagc

SEQ ID NO: 5686800 - DNA, 25 bp, Homo sapien
caggtggtccacttgccttagcctc

SEQ ID NO: 5686801 - DNA, 25 bp, Homo sapien
ggtggtccacttgccttagcctccc

SEQ ID NO: 5686802 - DNA, 25 bp, Homo sapien
aggtggtccacttgccttagcctcc

SEQ ID NO: 5686803 - DNA, 25 bp, Homo sapien
ctcaggtggtccacttgccttagcc

SEQ ID NO: 5686804 - DNA, 25 bp, Homo sapien
gggaggctaaggcaagtggaccacc

SEQ ID NO: 5686805 - DNA, 25 bp, Homo sapien
gctaaggcaagtggaccacctgagg

SEQ ID NO: 5686806 - DNA, 25 bp, Homo sapien
tctactaaaaaaataacaacacaca

SEQ ID NO: 5686807 - DNA, 25 bp, Homo sapien
gaggctaaggcaagtggaccacctg

SEQ ID NO: 5686808 - DNA, 25 bp, Homo sapien
ggaggctaaggcaagtggaccacct

SEQ ID NO: 5686809 - DNA, 25 bp, Homo sapien
ggctaaggcaagtggaccacctgag

SEQ ID NO: 5686810 - DNA, 25 bp, Homo sapien
cagtgttaacatccatgcaggaaaa

SEQ ID NO: 5686811 - DNA, 25 bp, Homo sapien
cctggcctgaaatttctagctttaa

SEQ ID NO: 5686812 - DNA, 25 bp, Homo sapien
ccatgcaggaaaatagtcttttgga

SEQ ID NO: 5686813 - DNA, 25 bp, Homo sapien
cgcacctggcctgaaatttctagct

SEQ ID NO: 5686814 - DNA, 25 bp, Homo sapien
atttctagctttaatatcttcagtg

SEQ ID NO: 5686815 - DNA, 25 bp, Homo sapien
tcttcagtgttaacatccatgcagg

SEQ ID NO: 5686816 - DNA, 25 bp, Homo sapien
caaaagactattttcctgcatggat

SEQ ID NO: 5686817 - DNA, 25 bp, Homo sapien
caaattccaaaagactattttcctg

SEQ ID NO: 5686818 - DNA, 25 bp, Homo sapien
taacactgaagatattaaagctaga

SEQ ID NO: 5686819 - DNA, 25 bp, Homo sapien
tcctgcatggatgttaacactgaag

SEQ ID NO: 5686820 - DNA, 25 bp, Homo sapien
agctagaaatttcaggccaggtgcg

SEQ ID NO: 5686821 - DNA, 25 bp, Homo sapien
tattaaagctagaaatttcaggcca

SEQ ID NO: 5686822 - DNA, 25 bp, Homo sapien
cataggtttggtactttttcatata

SEQ ID NO: 5686823 - DNA, 25 bp, Homo sapien
tatctcataggtttggtactttttc

SEQ ID NO: 5686824 - DNA, 25 bp, Homo sapien
gaattatctcataggtttggtactt

SEQ ID NO: 5686825 - DNA, 25 bp, Homo sapien
tggaattatctcataggtttggtac

SEQ ID NO: 5686826 - DNA, 25 bp, Homo sapien
tggtactttttcatataggtttgtg

SEQ ID NO: 5686827 - DNA, 25 bp, Homo sapien
tctcataggtttggtactttttcat

SEQ ID NO: 5686828 - DNA, 25 bp, Homo sapien
gtaccaaacctatgagataattcca

SEQ ID NO: 5686829 - DNA, 25 bp, Homo sapien
gaaaaagtaccaaacctatgagata

SEQ ID NO: 5686830 - DNA, 25 bp, Homo sapien
agtaccaaacctatgagataattcc

SEQ ID NO: 5686831 - DNA, 25 bp, Homo sapien
tatgaaaaagtaccaaacctatgag

SEQ ID NO: 5686832 - DNA, 25 bp, Homo sapien
tatatgaaaaagtaccaaacctatg

SEQ ID NO: 5686833 - DNA, 25 bp, Homo sapien
cacaaacctatatgaaaaagtacca

SEQ ID NO: 5686834 - DNA, 25 bp, Homo sapien
ttggaagtagagtggttaaataggc

SEQ ID NO: 5686835 - DNA, 25 bp, Homo sapien
tccctcacaagtcaactgtcatttt

SEQ ID NO: 5686836 - DNA, 25 bp, Homo sapien
ggctaagagcagaataggtcctact

SEQ ID NO: 5686837 - DNA, 25 bp, Homo sapien
gagcagaataggtcctactttaatg

SEQ ID NO: 5686838 - DNA, 25 bp, Homo sapien
ctaagagcagaataggtcctacttt

SEQ ID NO: 5686839 - DNA, 25 bp, Homo sapien
tagagtggttaaataggctaagagc

SEQ ID NO: 5686840 - DNA, 25 bp, Homo sapien
aaaatgacagttgacttgtgaggga

SEQ ID NO: 5686841 - DNA, 25 bp, Homo sapien
gctcttagcctatttaaccactcta

SEQ ID NO: 5686842 - DNA, 25 bp, Homo sapien
gcctatttaaccactctacttccaa

SEQ ID NO: 5686843 - DNA, 25 bp, Homo sapien
agtaggacctattctgctcttagcc

SEQ ID NO: 5686844 - DNA, 25 bp, Homo sapien
cattaaagtaggacctattctgctc

SEQ ID NO: 5686845 - DNA, 25 bp, Homo sapien
aaagtaggacctattctgctcttag

SEQ ID NO: 5686846 - DNA, 25 bp, Homo sapien
tagtaggctttaagatttttccagc

SEQ ID NO: 5686847 - DNA, 25 bp, Homo sapien
ctagtttaaaaggacatagtaggct

SEQ ID NO: 5686848 - DNA, 25 bp, Homo sapien
catagtaggctttaagatttttcca

SEQ ID NO: 5686849 - DNA, 25 bp, Homo sapien
taaaaggacatagtaggctttaaga

SEQ ID NO: 5686850 - DNA, 25 bp, Homo sapien
tttaagatttttccagccaggtgcg

SEQ ID NO: 5686851 - DNA, 25 bp, Homo sapien
ctaagactagtttaaaaggacatag

SEQ ID NO: 5686852 - DNA, 25 bp, Homo sapien
cgcacctggctggaaaaatcttaaa

SEQ ID NO: 5686853 - DNA, 25 bp, Homo sapien
gctggaaaaatcttaaagcctacta

SEQ ID NO: 5686854 - DNA, 25 bp, Homo sapien
aaatcttaaagcctactatgtcctt

SEQ ID NO: 5686855 - DNA, 25 bp, Homo sapien
tggaaaaatcttaaagcctactatg

SEQ ID NO: 5686856 - DNA, 25 bp, Homo sapien
ctatgtccttttaaactagtcttag

SEQ ID NO: 5686857 - DNA, 25 bp, Homo sapien
agcctactatgtccttttaaactag

SEQ ID NO: 5686858 - DNA, 25 bp, Homo sapien
gtggcagcgtgcatctgtagtccca

SEQ ID NO: 5686859 - DNA, 25 bp, Homo sapien
gggcgtggcagcgtgcatctgtagt

SEQ ID NO: 5686860 - DNA, 25 bp, Homo sapien
ctgggcgtggcagcgtgcatctgta

SEQ ID NO: 5686861 - DNA, 25 bp, Homo sapien
tgggcgtggcagcgtgcatctgtag

SEQ ID NO: 5686862 - DNA, 25 bp, Homo sapien
cgtggcagcgtgcatctgtagtccc

SEQ ID NO: 5686863 - DNA, 25 bp, Homo sapien
gcgtggcagcgtgcatctgtagtcc

SEQ ID NO: 5686864 - DNA, 25 bp, Homo sapien
gggactacagatgcacgctgccacg

SEQ ID NO: 5686865 - DNA, 25 bp, Homo sapien
ggactacagatgcacgctgccacgc

SEQ ID NO: 5686866 - DNA, 25 bp, Homo sapien
tgggactacagatgcacgctgccac

SEQ ID NO: 5686867 - DNA, 25 bp, Homo sapien
tacagatgcacgctgccacgcccag

SEQ ID NO: 5686868 - DNA, 25 bp, Homo sapien
actacagatgcacgctgccacgccc

SEQ ID NO: 5686869 - DNA, 25 bp, Homo sapien
ctacagatgcacgctgccacgccca

SEQ ID NO: 5686870 - DNA, 25 bp, Homo sapien
cacctttgtgtgttgcctaattttt

SEQ ID NO: 5686871 - DNA, 25 bp, Homo sapien
gccacctttgtgtgttgcctaattt

SEQ ID NO: 5686872 - DNA, 25 bp, Homo sapien
tgccacctttgtgtgttgcctaatt

SEQ ID NO: 5686873 - DNA, 25 bp, Homo sapien
ccacctttgtgtgttgcctaatttt

SEQ ID NO: 5686874 - DNA, 25 bp, Homo sapien
ttgccacctttgtgtgttgcctaat

SEQ ID NO: 5686875 - DNA, 25 bp, Homo sapien
aaattaggcaacacacaaaggtggc

SEQ ID NO: 5686876 - DNA, 25 bp, Homo sapien
attaggcaacacacaaaggtggcaa

SEQ ID NO: 5686877 - DNA, 25 bp, Homo sapien
aaaaattaggcaacacacaaaggtg

SEQ ID NO: 5686878 - DNA, 25 bp, Homo sapien
aaaattaggcaacacacaaaggtgg

SEQ ID NO: 5686879 - DNA, 25 bp, Homo sapien
aattaggcaacacacaaaggtggca

SEQ ID NO: 5686880 - DNA, 25 bp, Homo sapien
tgccacctttgtgtgttgcctaatt

SEQ ID NO: 5686881 - DNA, 25 bp, Homo sapien
cacctttgtgtgttgcctaattttt

SEQ ID NO: 5686882 - DNA, 25 bp, Homo sapien
gccacctttgtgtgttgcctaattt

SEQ ID NO: 5686883 - DNA, 25 bp, Homo sapien
ttgccacctttgtgtgttgcctaat

SEQ ID NO: 5686884 - DNA, 25 bp, Homo sapien
ttccatggaagttttgccacctttg

SEQ ID NO: 5686885 - DNA, 25 bp, Homo sapien
gatttttccatggaagttttgccac

SEQ ID NO: 5686886 - DNA, 25 bp, Homo sapien
ggaaatttctagacagtagtataat

SEQ ID NO: 5686887 - DNA, 25 bp, Homo sapien
ttggaaatttctagacagtagtata

SEQ ID NO: 5686888 - DNA, 25 bp, Homo sapien
tttctagacagtagtataatacact

SEQ ID NO: 5686889 - DNA, 25 bp, Homo sapien
tctagacagtagtataatacactac

SEQ ID NO: 5686890 - DNA, 25 bp, Homo sapien
gacagtagtataatacactacagtt

SEQ ID NO: 5686891 - DNA, 25 bp, Homo sapien
tagacagtagtataatacactacag

SEQ ID NO: 5686892 - DNA, 25 bp, Homo sapien
aactgtagtgtattatactactgtc

SEQ ID NO: 5686893 - DNA, 25 bp, Homo sapien
tgtagtgtattatactactgtctag

SEQ ID NO: 5686894 - DNA, 25 bp, Homo sapien
tatactactgtctagaaatttccaa

SEQ ID NO: 5686895 - DNA, 25 bp, Homo sapien
tattatactactgtctagaaatttc

SEQ ID NO: 5686896 - DNA, 25 bp, Homo sapien
ttatactactgtctagaaatttcca

SEQ ID NO: 5686897 - DNA, 25 bp, Homo sapien
tagtgtattatactactgtctagaa

SEQ ID NO: 5686898 - DNA, 25 bp, Homo sapien
agccatatctgaataatatttgcca

SEQ ID NO: 5686899 - DNA, 25 bp, Homo sapien
tggaaatttctagacagtagtataa

SEQ ID NO: 5686900 - DNA, 25 bp, Homo sapien
ttctagacagtagtataatacacta

SEQ ID NO: 5686901 - DNA, 25 bp, Homo sapien
cagttttaaaaagccatatctgaat

SEQ ID NO: 5686902 - DNA, 25 bp, Homo sapien
gacagtagtataatacactacagtt

SEQ ID NO: 5686903 - DNA, 25 bp, Homo sapien
atatttgccaaataaagtgtgttta

SEQ ID NO: 5686904 - DNA, 25 bp, Homo sapien
attcagatatggctttttaaaactg

SEQ ID NO: 5686905 - DNA, 25 bp, Homo sapien
aactgtagtgtattatactactgtc

SEQ ID NO: 5686906 - DNA, 25 bp, Homo sapien
tatactactgtctagaaatttccaa

SEQ ID NO: 5686907 - DNA, 25 bp, Homo sapien
tggcaaatattattcagatatggct

SEQ ID NO: 5686908 - DNA, 25 bp, Homo sapien
taaacacactttatttggcaaatat

SEQ ID NO: 5686909 - DNA, 25 bp, Homo sapien
tagtgtattatactactgtctagaa

SEQ ID NO: 5686910 - DNA, 25 bp, Homo sapien
tcaccgcaacctctgtttcttgggt

SEQ ID NO: 5686911 - DNA, 25 bp, Homo sapien
ccgcaacctctgtttcttgggttca

SEQ ID NO: 5686912 - DNA, 25 bp, Homo sapien
acctctgtttcttgggttcaagcga

SEQ ID NO: 5686913 - DNA, 25 bp, Homo sapien
aacctctgtttcttgggttcaagcg

SEQ ID NO: 5686914 - DNA, 25 bp, Homo sapien
caccgcaacctctgtttcttgggtt

SEQ ID NO: 5686915 - DNA, 25 bp, Homo sapien
caacctctgtttcttgggttcaagc

SEQ ID NO: 5686916 - DNA, 25 bp, Homo sapien
cgcttgaacccaagaaacagaggtt

SEQ ID NO: 5686917 - DNA, 25 bp, Homo sapien
acccaagaaacagaggttgcggtga

SEQ ID NO: 5686918 - DNA, 25 bp, Homo sapien
tcgcttgaacccaagaaacagaggt

SEQ ID NO: 5686919 - DNA, 25 bp, Homo sapien
gcttgaacccaagaaacagaggttg

SEQ ID NO: 5686920 - DNA, 25 bp, Homo sapien
tgaacccaagaaacagaggttgcgg

SEQ ID NO: 5686921 - DNA, 25 bp, Homo sapien
aacccaagaaacagaggttgcggtg

SEQ ID NO: 5686922 - DNA, 25 bp, Homo sapien
aatatatttatgcaactaggaggtg

SEQ ID NO: 5686923 - DNA, 25 bp, Homo sapien
cggctgccccagtataatatattta

SEQ ID NO: 5686924 - DNA, 25 bp, Homo sapien
acggctgccccagtataatatattt

SEQ ID NO: 5686925 - DNA, 25 bp, Homo sapien
cacggctgccccagtataatatatt

SEQ ID NO: 5686926 - DNA, 25 bp, Homo sapien
taatatatttatgcaactaggaggt

SEQ ID NO: 5686927 - DNA, 25 bp, Homo sapien
ccacggctgccccagtataatatat

SEQ ID NO: 5686928 - DNA, 25 bp, Homo sapien
aaatatattatactggggcagccgt

SEQ ID NO: 5686929 - DNA, 25 bp, Homo sapien
aatatattatactggggcagccgtg

SEQ ID NO: 5686930 - DNA, 25 bp, Homo sapien
atatattatactggggcagccgtgg

SEQ ID NO: 5686931 - DNA, 25 bp, Homo sapien
cacctcctagttgcataaatatatt

SEQ ID NO: 5686932 - DNA, 25 bp, Homo sapien
acctcctagttgcataaatatatta

SEQ ID NO: 5686933 - DNA, 25 bp, Homo sapien
taaatatattatactggggcagccg

SEQ ID NO: 5686934 - DNA, 25 bp, Homo sapien
aatatattatactggggcagccgtg

SEQ ID NO: 5686935 - DNA, 25 bp, Homo sapien
gggcagccgtggtcgctcacaccta

SEQ ID NO: 5686936 - DNA, 25 bp, Homo sapien
cacctcctagttgcataaatatatt

SEQ ID NO: 5686937 - DNA, 25 bp, Homo sapien
ggcagccgtggtcgctcacacctat

SEQ ID NO: 5686938 - DNA, 25 bp, Homo sapien
aacacctcctagttgcataaatata

SEQ ID NO: 5686939 - DNA, 25 bp, Homo sapien
taaatatattatactggggcagccg

SEQ ID NO: 5686940 - DNA, 25 bp, Homo sapien
gagattgagactatctggctaacat

SEQ ID NO: 5686941 - DNA, 25 bp, Homo sapien
ttgagactatctggctaacatggtg

SEQ ID NO: 5686942 - DNA, 25 bp, Homo sapien
cccagcactttgggaagccaaggca

SEQ ID NO: 5686943 - DNA, 25 bp, Homo sapien
ccagcactttgggaagccaaggcag

SEQ ID NO: 5686944 - DNA, 25 bp, Homo sapien
tgccttggcttcccaaagtgctggg

SEQ ID NO: 5686945 - DNA, 25 bp, Homo sapien
ctgccttggcttcccaaagtgctgg

SEQ ID NO: 5686946 - DNA, 25 bp, Homo sapien
atgttagccagatagtctcaatctc

SEQ ID NO: 5686947 - DNA, 25 bp, Homo sapien
caccatgttagccagatagtctcaa

SEQ ID NO: 5686948 - DNA, 25 bp, Homo sapien
tgaaaataaaggcttcctcccctgc

SEQ ID NO: 5686949 - DNA, 25 bp, Homo sapien
gtttaactcttttgatgagttggga

SEQ ID NO: 5686950 - DNA, 25 bp, Homo sapien
cctcccctgctgtttaactcttttg

SEQ ID NO: 5686951 - DNA, 25 bp, Homo sapien
ccctgctgtttaactcttttgatga

SEQ ID NO: 5686952 - DNA, 25 bp, Homo sapien
aaagagaattttgtaataattgtga

SEQ ID NO: 5686953 - DNA, 25 bp, Homo sapien
taattgtgaaaataaaggcttcctc

SEQ ID NO: 5686954 - DNA, 25 bp, Homo sapien
gcaggggaggaagcctttattttca

SEQ ID NO: 5686955 - DNA, 25 bp, Homo sapien
tcatcaaaagagttaaacagcaggg

SEQ ID NO: 5686956 - DNA, 25 bp, Homo sapien
tcacaattattacaaaattctcttt

SEQ ID NO: 5686957 - DNA, 25 bp, Homo sapien
actcatcaaaagagttaaacagcag

SEQ ID NO: 5686958 - DNA, 25 bp, Homo sapien
gaggaagcctttattttcacaatta

SEQ ID NO: 5686959 - DNA, 25 bp, Homo sapien
tcccaactcatcaaaagagttaaac

SEQ ID NO: 5686960 - DNA, 25 bp, Homo sapien
caactgtttttatctgaatttctgg

SEQ ID NO: 5686961 - DNA, 25 bp, Homo sapien
gttgttaccaactgtttttatctga

SEQ ID NO: 5686962 - DNA, 25 bp, Homo sapien
cgtgctttttatttgaagtgtaaat

SEQ ID NO: 5686963 - DNA, 25 bp, Homo sapien
tgtgtaagttttagttttggcaagc

SEQ ID NO: 5686964 - DNA, 25 bp, Homo sapien
atttctggttttgcttctgtgtaag

SEQ ID NO: 5686965 - DNA, 25 bp, Homo sapien
tgaagtgtaaattacaaagttgtta

SEQ ID NO: 5686966 - DNA, 25 bp, Homo sapien
taaaacttacacagaagcaaaacca

SEQ ID NO: 5686967 - DNA, 25 bp, Homo sapien
cagataaaaacagttggtaacaact

SEQ ID NO: 5686968 - DNA, 25 bp, Homo sapien
gcttgccaaaactaaaacttacaca

SEQ ID NO: 5686969 - DNA, 25 bp, Homo sapien
atttacacttcaaataaaaagcacg

SEQ ID NO: 5686970 - DNA, 25 bp, Homo sapien
taacaactttgtaatttacacttca

SEQ ID NO: 5686971 - DNA, 25 bp, Homo sapien
cagaaattcagataaaaacagttgg

SEQ ID NO: 5686972 - DNA, 25 bp, Homo sapien
tttactgatgattgctggttattcc

SEQ ID NO: 5686973 - DNA, 25 bp, Homo sapien
taaatttactgatgattgctggtta

SEQ ID NO: 5686974 - DNA, 25 bp, Homo sapien
gatgattgctggttattccttttta

SEQ ID NO: 5686975 - DNA, 25 bp, Homo sapien
gtctagatgtgtgcattactttttt

SEQ ID NO: 5686976 - DNA, 25 bp, Homo sapien
tactgatgattgctggttattcctt

SEQ ID NO: 5686977 - DNA, 25 bp, Homo sapien
atgattgctggttattcctttttac

SEQ ID NO: 5686978 - DNA, 25 bp, Homo sapien
aaggaataaccagcaatcatcagta

SEQ ID NO: 5686979 - DNA, 25 bp, Homo sapien
taaccagcaatcatcagtaaattta

SEQ ID NO: 5686980 - DNA, 25 bp, Homo sapien
aaaaggaataaccagcaatcatcag

SEQ ID NO: 5686981 - DNA, 25 bp, Homo sapien
gtaaaaaggaataaccagcaatcat

SEQ ID NO: 5686982 - DNA, 25 bp, Homo sapien
aaaaaagtaatgcacacatctagac

SEQ ID NO: 5686983 - DNA, 25 bp, Homo sapien
ggaataaccagcaatcatcagtaaa

SEQ ID NO: 5686984 - DNA, 25 bp, Homo sapien
ttatcatacacttttgaaacgttgc

SEQ ID NO: 5686985 - DNA, 25 bp, Homo sapien
cactttgagtacagtgacttcaaat

SEQ ID NO: 5686986 - DNA, 25 bp, Homo sapien
tacacttttgaaacgttgcttttga

SEQ ID NO: 5686987 - DNA, 25 bp, Homo sapien
aacactttgagtacagtgacttcaa

SEQ ID NO: 5686988 - DNA, 25 bp, Homo sapien
tgaacactttgagtacagtgacttc

SEQ ID NO: 5686989 - DNA, 25 bp, Homo sapien
ctttaactgtcactaatatatttgg

SEQ ID NO: 5686990 - DNA, 25 bp, Homo sapien
atttgaagtcactgtactcaaagtg

SEQ ID NO: 5686991 - DNA, 25 bp, Homo sapien
gcaacgtttcaaaagtgtatgataa

SEQ ID NO: 5686992 - DNA, 25 bp, Homo sapien
tcaaaagcaacgtttcaaaagtgta

SEQ ID NO: 5686993 - DNA, 25 bp, Homo sapien
aagtcactgtactcaaagtgttcaa

SEQ ID NO: 5686994 - DNA, 25 bp, Homo sapien
tgaagtcactgtactcaaagtgttc

SEQ ID NO: 5686995 - DNA, 25 bp, Homo sapien
ccaaatatattagtgacagttaaag

SEQ ID NO: 5686996 - DNA, 25 bp, Homo sapien
cagaggaagattctgtaccccctcc

SEQ ID NO: 5686997 - DNA, 25 bp, Homo sapien
ccctccacgaaagaaaagaatctct

SEQ ID NO: 5686998 - DNA, 25 bp, Homo sapien
agaggaagattctgtaccccctcca

SEQ ID NO: 5686999 - DNA, 25 bp, Homo sapien
gcagaggaagattctgtaccccctc

SEQ ID NO: 5687000 - DNA, 25 bp, Homo sapien
tggagggggtacagaatcttcctct

SEQ ID NO: 5687001 - DNA, 25 bp, Homo sapien
gagggggtacagaatcttcctctgc

SEQ ID NO: 5687002 - DNA, 25 bp, Homo sapien
agagattcttttctttcgtggaggg

SEQ ID NO: 5687003 - DNA, 25 bp, Homo sapien
ggagggggtacagaatcttcctctg

SEQ ID NO: 5687004 - DNA, 25 bp, Homo sapien
ggtggcagaggaagattctgtaccc

SEQ ID NO: 5687005 - DNA, 25 bp, Homo sapien
cttcactttagtatcttagttggga

SEQ ID NO: 5687006 - DNA, 25 bp, Homo sapien
tccacgaaagaaaagaatctcttca

SEQ ID NO: 5687007 - DNA, 25 bp, Homo sapien
ccctccacgaaagaaaagaatctct

SEQ ID NO: 5687008 - DNA, 25 bp, Homo sapien
agaggaagattctgtaccccctcca

SEQ ID NO: 5687009 - DNA, 25 bp, Homo sapien
gaaaagaatctcttcactttagtat

SEQ ID NO: 5687010 - DNA, 25 bp, Homo sapien
tggagggggtacagaatcttcctct

SEQ ID NO: 5687011 - DNA, 25 bp, Homo sapien
gaagagattcttttctttcgtggag

SEQ ID NO: 5687012 - DNA, 25 bp, Homo sapien
gggtacagaatcttcctctgccacc

SEQ ID NO: 5687013 - DNA, 25 bp, Homo sapien
agagattcttttctttcgtggaggg

SEQ ID NO: 5687014 - DNA, 25 bp, Homo sapien
tcccaactaagatactaaagtgaag

SEQ ID NO: 5687015 - DNA, 25 bp, Homo sapien
tactaaagtgaagagattcttttct

SEQ ID NO: 5687016 - DNA, 25 bp, Homo sapien
aagaagcttcttggccacgtatggt

SEQ ID NO: 5687017 - DNA, 25 bp, Homo sapien
gaccttaatttgtcagcattaaaag

SEQ ID NO: 5687018 - DNA, 25 bp, Homo sapien
aaagaagcttcttggccacgtatgg

SEQ ID NO: 5687019 - DNA, 25 bp, Homo sapien
gcttcttggccacgtatggtggccc

SEQ ID NO: 5687020 - DNA, 25 bp, Homo sapien
tcttggccacgtatggtggcccaca

SEQ ID NO: 5687021 - DNA, 25 bp, Homo sapien
ccttaatttgtcagcattaaaagaa

SEQ ID NO: 5687022 - DNA, 25 bp, Homo sapien
tgtgggccaccatacgtggccaaga

SEQ ID NO: 5687023 - DNA, 25 bp, Homo sapien
ttcttttaatgctgacaaattaagg

SEQ ID NO: 5687024 - DNA, 25 bp, Homo sapien
tttaatgctgacaaattaaggtcat

SEQ ID NO: 5687025 - DNA, 25 bp, Homo sapien
accatacgtggccaagaagcttctt

SEQ ID NO: 5687026 - DNA, 25 bp, Homo sapien
ccatacgtggccaagaagcttcttt

SEQ ID NO: 5687027 - DNA, 25 bp, Homo sapien
tgggccaccatacgtggccaagaag

SEQ ID NO: 5687028 - DNA, 25 bp, Homo sapien
cttaagaattaactgagtatagtgg

SEQ ID NO: 5687029 - DNA, 25 bp, Homo sapien
ttaagaattaactgagtatagtggc

SEQ ID NO: 5687030 - DNA, 25 bp, Homo sapien
aagaattaactgagtatagtggcat

SEQ ID NO: 5687031 - DNA, 25 bp, Homo sapien
taagaattaactgagtatagtggca

SEQ ID NO: 5687032 - DNA, 25 bp, Homo sapien
atgccactatactcagttaattctt

SEQ ID NO: 5687033 - DNA, 25 bp, Homo sapien
tgccactatactcagttaattctta

SEQ ID NO: 5687034 - DNA, 25 bp, Homo sapien
ccactatactcagttaattcttaag

SEQ ID NO: 5687035 - DNA, 25 bp, Homo sapien
gccactatactcagttaattcttaa

SEQ ID NO: 5687036 - DNA, 25 bp, Homo sapien
ggagttccaaaccagcctgacaaca

SEQ ID NO: 5687037 - DNA, 25 bp, Homo sapien
cttaagaattaactgagtatagtgg

SEQ ID NO: 5687038 - DNA, 25 bp, Homo sapien
ttaactgagtatagtggcatgtgcc

SEQ ID NO: 5687039 - DNA, 25 bp, Homo sapien
aagaattaactgagtatagtggcat

SEQ ID NO: 5687040 - DNA, 25 bp, Homo sapien
gcctgacaacatagtcagaccctgt

SEQ ID NO: 5687041 - DNA, 25 bp, Homo sapien
taagaattaactgagtatagtggca

SEQ ID NO: 5687042 - DNA, 25 bp, Homo sapien
ggcacatgccactatactcagttaa

SEQ ID NO: 5687043 - DNA, 25 bp, Homo sapien
tgttgtcaggctggtttggaactcc

SEQ ID NO: 5687044 - DNA, 25 bp, Homo sapien
tgccactatactcagttaattctta

SEQ ID NO: 5687045 - DNA, 25 bp, Homo sapien
ccactatactcagttaattcttaag

SEQ ID NO: 5687046 - DNA, 25 bp, Homo sapien
acagggtctgactatgttgtcaggc

SEQ ID NO: 5687047 - DNA, 25 bp, Homo sapien
gccactatactcagttaattcttaa

SEQ ID NO: 5687048 - DNA, 25 bp, Homo sapien
gaagtcgagactgtagtgagccatg

SEQ ID NO: 5687049 - DNA, 25 bp, Homo sapien
agcccaggaagtcgagactgtagtg

SEQ ID NO: 5687050 - DNA, 25 bp, Homo sapien
caggaagtcgagactgtagtgagcc

SEQ ID NO: 5687051 - DNA, 25 bp, Homo sapien
tcgagactgtagtgagccatgatct

SEQ ID NO: 5687052 - DNA, 25 bp, Homo sapien
catgatcttgccactgcactgtagc

SEQ ID NO: 5687053 - DNA, 25 bp, Homo sapien
actgtagtgagccatgatcttgcca

SEQ ID NO: 5687054 - DNA, 25 bp, Homo sapien
tcatggctcactacagtctcgactt

SEQ ID NO: 5687055 - DNA, 25 bp, Homo sapien
gctacagtgcagtggcaagatcatg

SEQ ID NO: 5687056 - DNA, 25 bp, Homo sapien
ggctcactacagtctcgacttcctg

SEQ ID NO: 5687057 - DNA, 25 bp, Homo sapien
tggcaagatcatggctcactacagt

SEQ ID NO: 5687058 - DNA, 25 bp, Homo sapien
aagatcatggctcactacagtctcg

SEQ ID NO: 5687059 - DNA, 25 bp, Homo sapien
cactacagtctcgacttcctgggct

SEQ ID NO: 5687060 - DNA, 25 bp, Homo sapien
ccacaggaactgaggttcgagataa

SEQ ID NO: 5687061 - DNA, 25 bp, Homo sapien
cacaggaactgaggttcgagataat

SEQ ID NO: 5687062 - DNA, 25 bp, Homo sapien
gaactgaggttcgagataattttaa

SEQ ID NO: 5687063 - DNA, 25 bp, Homo sapien
acaggaactgaggttcgagataatt

SEQ ID NO: 5687064 - DNA, 25 bp, Homo sapien
attatctcgaacctcagttcctgtg

SEQ ID NO: 5687065 - DNA, 25 bp, Homo sapien
ttatctcgaacctcagttcctgtgg

SEQ ID NO: 5687066 - DNA, 25 bp, Homo sapien
ttaaaattatctcgaacctcagttc

SEQ ID NO: 5687067 - DNA, 25 bp, Homo sapien
aattatctcgaacctcagttcctgt

SEQ ID NO: 5687068 - DNA, 25 bp, Homo sapien
caaagagctttgctgatctaatttc

SEQ ID NO: 5687069 - DNA, 25 bp, Homo sapien
ctttgctgatctaatttcttccttt

SEQ ID NO: 5687070 - DNA, 25 bp, Homo sapien
ttttctacaaagagctttgctgatc

SEQ ID NO: 5687071 - DNA, 25 bp, Homo sapien
gagctttgctgatctaatttcttcc

SEQ ID NO: 5687072 - DNA, 25 bp, Homo sapien
gctttgctgatctaatttcttcctt

SEQ ID NO: 5687073 - DNA, 25 bp, Homo sapien
agagctttgctgatctaatttcttc

SEQ ID NO: 5687074 - DNA, 25 bp, Homo sapien
aaggaagaaattagatcagcaaagc

SEQ ID NO: 5687075 - DNA, 25 bp, Homo sapien
gaaattagatcagcaaagctctttg

SEQ ID NO: 5687076 - DNA, 25 bp, Homo sapien
aaaaaaggaagaaattagatcagca

SEQ ID NO: 5687077 - DNA, 25 bp, Homo sapien
gatcagcaaagctctttgtagaaaa

SEQ ID NO: 5687078 - DNA, 25 bp, Homo sapien
aaaggaagaaattagatcagcaaag

SEQ ID NO: 5687079 - DNA, 25 bp, Homo sapien
gaagaaattagatcagcaaagctct

SEQ ID NO: 5687080 - DNA, 25 bp, Homo sapien
tgagatcataaataggcatgcctct

SEQ ID NO: 5687081 - DNA, 25 bp, Homo sapien
cttttcctgctagtttgagatcata

SEQ ID NO: 5687082 - DNA, 25 bp, Homo sapien
ttgagatcataaataggcatgcctc

SEQ ID NO: 5687083 - DNA, 25 bp, Homo sapien
gtttgagatcataaataggcatgcc

SEQ ID NO: 5687084 - DNA, 25 bp, Homo sapien
tttgagatcataaataggcatgcct

SEQ ID NO: 5687085 - DNA, 25 bp, Homo sapien
gagatcataaataggcatgcctctt

SEQ ID NO: 5687086 - DNA, 25 bp, Homo sapien
gaggcatgcctatttatgatctcaa

SEQ ID NO: 5687087 - DNA, 25 bp, Homo sapien
aagaggcatgcctatttatgatctc

SEQ ID NO: 5687088 - DNA, 25 bp, Homo sapien
tatgatctcaaactagcaggaaaag

SEQ ID NO: 5687089 - DNA, 25 bp, Homo sapien
ggcatgcctatttatgatctcaaac

SEQ ID NO: 5687090 - DNA, 25 bp, Homo sapien
aggcatgcctatttatgatctcaaa

SEQ ID NO: 5687091 - DNA, 25 bp, Homo sapien
agaggcatgcctatttatgatctca

SEQ ID NO: 5687092 - DNA, 25 bp, Homo sapien
atgtgccaccacgcctggctaattt

SEQ ID NO: 5687093 - DNA, 25 bp, Homo sapien
gcatgtgccaccacgcctggctaat

SEQ ID NO: 5687094 - DNA, 25 bp, Homo sapien
aggcatgtgccaccacgcctggcta

SEQ ID NO: 5687095 - DNA, 25 bp, Homo sapien
gccttggcctcccaagtagctggga

SEQ ID NO: 5687096 - DNA, 25 bp, Homo sapien
catgtgccaccacgcctggctaatt

SEQ ID NO: 5687097 - DNA, 25 bp, Homo sapien
ggcatgtgccaccacgcctggctaa

SEQ ID NO: 5687098 - DNA, 25 bp, Homo sapien
aattagccaggcgtggtggcacatg

SEQ ID NO: 5687099 - DNA, 25 bp, Homo sapien
ttagccaggcgtggtggcacatgcc

SEQ ID NO: 5687100 - DNA, 25 bp, Homo sapien
aaattagccaggcgtggtggcacat

SEQ ID NO: 5687101 - DNA, 25 bp, Homo sapien
tcccagctacttgggaggccaaggc

SEQ ID NO: 5687102 - DNA, 25 bp, Homo sapien
attagccaggcgtggtggcacatgc

SEQ ID NO: 5687103 - DNA, 25 bp, Homo sapien
tagccaggcgtggtggcacatgcct

SEQ ID NO: 5687104 - DNA, 25 bp, Homo sapien
tgatcttggcctactgtgacgtctg

SEQ ID NO: 5687105 - DNA, 25 bp, Homo sapien
gtgatcttggcctactgtgacgtct

SEQ ID NO: 5687106 - DNA, 25 bp, Homo sapien
agacgtcacagtaggccaagatcac

SEQ ID NO: 5687107 - DNA, 25 bp, Homo sapien
cagacgtcacagtaggccaagatca

SEQ ID NO: 5687108 - DNA, 25 bp, Homo sapien
tcttggcctactgtgacgtctgcct

SEQ ID NO: 5687109 - DNA, 25 bp, Homo sapien
gatcttggcctactgtgacgtctgc

SEQ ID NO: 5687110 - DNA, 25 bp, Homo sapien
ttggcctactgtgacgtctgcctcc

SEQ ID NO: 5687111 - DNA, 25 bp, Homo sapien
tactgtgacgtctgcctcccgggtt

SEQ ID NO: 5687112 - DNA, 25 bp, Homo sapien
tgatcttggcctactgtgacgtctg

SEQ ID NO: 5687113 - DNA, 25 bp, Homo sapien
gtgatcttggcctactgtgacgtct

SEQ ID NO: 5687114 - DNA, 25 bp, Homo sapien
aggcagacgtcacagtaggccaaga

SEQ ID NO: 5687115 - DNA, 25 bp, Homo sapien
ggaggcagacgtcacagtaggccaa

SEQ ID NO: 5687116 - DNA, 25 bp, Homo sapien
agacgtcacagtaggccaagatcac

SEQ ID NO: 5687117 - DNA, 25 bp, Homo sapien
acccgggaggcagacgtcacagtag

SEQ ID NO: 5687118 - DNA, 25 bp, Homo sapien
cagacgtcacagtaggccaagatca

SEQ ID NO: 5687119 - DNA, 25 bp, Homo sapien
gcagacgtcacagtaggccaagatc

SEQ ID NO: 5687120 - DNA, 25 bp, Homo sapien
cgcctcagctcctgaaagtgctggg

SEQ ID NO: 5687121 - DNA, 25 bp, Homo sapien
ccgcctcagctcctgaaagtgctgg

SEQ ID NO: 5687122 - DNA, 25 bp, Homo sapien
tctgcccgcctcagctcctgaaagt

SEQ ID NO: 5687123 - DNA, 25 bp, Homo sapien
ctgcccgcctcagctcctgaaagtg

SEQ ID NO: 5687124 - DNA, 25 bp, Homo sapien
ctcagctcctgaaagtgctgggatt

SEQ ID NO: 5687125 - DNA, 25 bp, Homo sapien
tgcccgcctcagctcctgaaagtgc

SEQ ID NO: 5687126 - DNA, 25 bp, Homo sapien
gcactttcaggagctgaggcgggca

SEQ ID NO: 5687127 - DNA, 25 bp, Homo sapien
cactttcaggagctgaggcgggcag

SEQ ID NO: 5687128 - DNA, 25 bp, Homo sapien
cccagcactttcaggagctgaggcg

SEQ ID NO: 5687129 - DNA, 25 bp, Homo sapien
aatcccagcactttcaggagctgag

SEQ ID NO: 5687130 - DNA, 25 bp, Homo sapien
ccagcactttcaggagctgaggcgg

SEQ ID NO: 5687131 - DNA, 25 bp, Homo sapien
actttcaggagctgaggcgggcaga

SEQ ID NO: 5687132 - DNA, 25 bp, Homo sapien
agtccaggattcgagattgcagtga

SEQ ID NO: 5687133 - DNA, 25 bp, Homo sapien
ggaggctgtggtataaaaggatccc

SEQ ID NO: 5687134 - DNA, 25 bp, Homo sapien
gctgtggtataaaaggatcccttga

SEQ ID NO: 5687135 - DNA, 25 bp, Homo sapien
tgagtccaggattcgagattgcagt

SEQ ID NO: 5687136 - DNA, 25 bp, Homo sapien
gtggtataaaaggatcccttgagtc

SEQ ID NO: 5687137 - DNA, 25 bp, Homo sapien
tccaggattcgagattgcagtgagc

SEQ ID NO: 5687138 - DNA, 25 bp, Homo sapien
gctcactgcaatctcgaatcctgga

SEQ ID NO: 5687139 - DNA, 25 bp, Homo sapien
gactcaagggatccttttataccac

SEQ ID NO: 5687140 - DNA, 25 bp, Homo sapien
actgcaatctcgaatcctggactca

SEQ ID NO: 5687141 - DNA, 25 bp, Homo sapien
tcaagggatccttttataccacagc

SEQ ID NO: 5687142 - DNA, 25 bp, Homo sapien
tcactgcaatctcgaatcctggact

SEQ ID NO: 5687143 - DNA, 25 bp, Homo sapien
gggatccttttataccacagcctcc

SEQ ID NO: 5687144 - DNA, 25 bp, Homo sapien
atagttgggactataggcatgcgcc

SEQ ID NO: 5687145 - DNA, 25 bp, Homo sapien
atgcccggccaatttttttgtatgt

SEQ ID NO: 5687146 - DNA, 25 bp, Homo sapien
gaatagttgggactataggcatgcg

SEQ ID NO: 5687147 - DNA, 25 bp, Homo sapien
catgcccggccaatttttttgtatg

SEQ ID NO: 5687148 - DNA, 25 bp, Homo sapien
cctgaatagttgggactataggcat

SEQ ID NO: 5687149 - DNA, 25 bp, Homo sapien
aatagttgggactataggcatgcgc

SEQ ID NO: 5687150 - DNA, 25 bp, Homo sapien
gcgcatgcctatagtcccaactatt

SEQ ID NO: 5687151 - DNA, 25 bp, Homo sapien
catacaaaaaaattggccgggcatg

SEQ ID NO: 5687152 - DNA, 25 bp, Homo sapien
atgcctatagtcccaactattcagg

SEQ ID NO: 5687153 - DNA, 25 bp, Homo sapien
cgcatgcctatagtcccaactattc

SEQ ID NO: 5687154 - DNA, 25 bp, Homo sapien
acatacaaaaaaattggccgggcat

SEQ ID NO: 5687155 - DNA, 25 bp, Homo sapien
ggcgcatgcctatagtcccaactat

SEQ ID NO: 5687156 - DNA, 25 bp, Homo sapien
acacatatacaactttacatgctat

SEQ ID NO: 5687157 - DNA, 25 bp, Homo sapien
atacacatatacaactttacatgct

SEQ ID NO: 5687158 - DNA, 25 bp, Homo sapien
tatacacatatacaactttacatgc

SEQ ID NO: 5687159 - DNA, 25 bp, Homo sapien
cacatatacaactttacatgctata

SEQ ID NO: 5687160 - DNA, 25 bp, Homo sapien
tacacatatacaactttacatgcta

SEQ ID NO: 5687161 - DNA, 25 bp, Homo sapien
tagcatgtaaagttgtatatgtgta

SEQ ID NO: 5687162 - DNA, 25 bp, Homo sapien
atagcatgtaaagttgtatatgtgt

SEQ ID NO: 5687163 - DNA, 25 bp, Homo sapien
tatagcatgtaaagttgtatatgtg

SEQ ID NO: 5687164 - DNA, 25 bp, Homo sapien
agcatgtaaagttgtatatgtgtat

SEQ ID NO: 5687165 - DNA, 25 bp, Homo sapien
gcatgtaaagttgtatatgtgtata

SEQ ID NO: 5687166 - DNA, 25 bp, Homo sapien
tatacacatatacaactttacatgc

SEQ ID NO: 5687167 - DNA, 25 bp, Homo sapien
tacaactttacatgctatatctaac

SEQ ID NO: 5687168 - DNA, 25 bp, Homo sapien
tgtgatatatatttgtcaatatgtg

SEQ ID NO: 5687169 - DNA, 25 bp, Homo sapien
cacatatacaactttacatgctata

SEQ ID NO: 5687170 - DNA, 25 bp, Homo sapien
aattatcttaaacatcagcattgtg

SEQ ID NO: 5687171 - DNA, 25 bp, Homo sapien
tcttaaacatcagcattgtgatata

SEQ ID NO: 5687172 - DNA, 25 bp, Homo sapien
cacatattgacaaatatatatcaca

SEQ ID NO: 5687173 - DNA, 25 bp, Homo sapien
aagttagatatagcatgtaaagttg

SEQ ID NO: 5687174 - DNA, 25 bp, Homo sapien
tatatcacaatgctgatgtttaaga

SEQ ID NO: 5687175 - DNA, 25 bp, Homo sapien
tcacaatgctgatgtttaagataat

SEQ ID NO: 5687176 - DNA, 25 bp, Homo sapien
tatagcatgtaaagttgtatatgtg

SEQ ID NO: 5687177 - DNA, 25 bp, Homo sapien
gcatgtaaagttgtatatgtgtata

SEQ ID NO: 5687178 - DNA, 25 bp, Homo sapien
gacctcgtgattcgcccgtctcggc

SEQ ID NO: 5687179 - DNA, 25 bp, Homo sapien
cgtgattcgcccgtctcggcctccc

SEQ ID NO: 5687180 - DNA, 25 bp, Homo sapien
ctgacctcgtgattcgcccgtctcg

SEQ ID NO: 5687181 - DNA, 25 bp, Homo sapien
cctgacctcgtgattcgcccgtctc

SEQ ID NO: 5687182 - DNA, 25 bp, Homo sapien
ctcgtgattcgcccgtctcggcctc

SEQ ID NO: 5687183 - DNA, 25 bp, Homo sapien
tgacctcgtgattcgcccgtctcgg

SEQ ID NO: 5687184 - DNA, 25 bp, Homo sapien
gggaggccgagacgggcgaatcacg

SEQ ID NO: 5687185 - DNA, 25 bp, Homo sapien
gccgagacgggcgaatcacgaggtc

SEQ ID NO: 5687186 - DNA, 25 bp, Homo sapien
ccgagacgggcgaatcacgaggtca

SEQ ID NO: 5687187 - DNA, 25 bp, Homo sapien
gaggccgagacgggcgaatcacgag

SEQ ID NO: 5687188 - DNA, 25 bp, Homo sapien
cgagacgggcgaatcacgaggtcag

SEQ ID NO: 5687189 - DNA, 25 bp, Homo sapien
gagacgggcgaatcacgaggtcagg

SEQ ID NO: 5687190 - DNA, 25 bp, Homo sapien
gagtgtgaagttcttcctcacagaa

SEQ ID NO: 5687191 - DNA, 25 bp, Homo sapien
ttctgtgaggaagaacttcacactc

SEQ ID NO: 5687192 - DNA, 25 bp, Homo sapien
caacaaaagagtgtgaagttcttcc

SEQ ID NO: 5687193 - DNA, 25 bp, Homo sapien
gagtgtgaagttcttcctcacagaa

SEQ ID NO: 5687194 - DNA, 25 bp, Homo sapien
caaaagagtgtgaagttcttcctca

SEQ ID NO: 5687195 - DNA, 25 bp, Homo sapien
cgtttcttaacaacaaaagagtgtg

SEQ ID NO: 5687196 - DNA, 25 bp, Homo sapien
tgaagttcttcctcacagaaatatt

SEQ ID NO: 5687197 - DNA, 25 bp, Homo sapien
taacaacaaaagagtgtgaagttct

SEQ ID NO: 5687198 - DNA, 25 bp, Homo sapien
ggaagaacttcacactcttttgttg

SEQ ID NO: 5687199 - DNA, 25 bp, Homo sapien
cacactcttttgttgttaagaaacg

SEQ ID NO: 5687200 - DNA, 25 bp, Homo sapien
tgaggaagaacttcacactcttttg

SEQ ID NO: 5687201 - DNA, 25 bp, Homo sapien
ttctgtgaggaagaacttcacactc

SEQ ID NO: 5687202 - DNA, 25 bp, Homo sapien
aatatttctgtgaggaagaacttca

SEQ ID NO: 5687203 - DNA, 25 bp, Homo sapien
tatttctgtgaggaagaacttcaca

SEQ ID NO: 5687204 - DNA, 25 bp, Homo sapien
taattcttagaaagccgagggacta

SEQ ID NO: 5687205 - DNA, 25 bp, Homo sapien
taaagattttaactatcatttgctg

SEQ ID NO: 5687206 - DNA, 25 bp, Homo sapien
tgtaattcttagaaagccgagggac

SEQ ID NO: 5687207 - DNA, 25 bp, Homo sapien
tcttagaaagccgagggactaatca

SEQ ID NO: 5687208 - DNA, 25 bp, Homo sapien
agaaagccgagggactaatcattta

SEQ ID NO: 5687209 - DNA, 25 bp, Homo sapien
gtgtctataagtcaagtctttggtg

SEQ ID NO: 5687210 - DNA, 25 bp, Homo sapien
gtccctcggctttctaagaattaca

SEQ ID NO: 5687211 - DNA, 25 bp, Homo sapien
cagcaaatgatagttaaaatcttta

SEQ ID NO: 5687212 - DNA, 25 bp, Homo sapien
tgattagtccctcggctttctaaga

SEQ ID NO: 5687213 - DNA, 25 bp, Homo sapien
tagtccctcggctttctaagaatta

SEQ ID NO: 5687214 - DNA, 25 bp, Homo sapien
taaatgattagtccctcggctttct

SEQ ID NO: 5687215 - DNA, 25 bp, Homo sapien
caccaaagacttgacttatagacac

SEQ ID NO: 5687216 - DNA, 25 bp, Homo sapien
gccaggcattgttcttaccccaaag

SEQ ID NO: 5687217 - DNA, 25 bp, Homo sapien
caggagccaggcattgttcttaccc

SEQ ID NO: 5687218 - DNA, 25 bp, Homo sapien
cgtgcataaggaaatgggcgttagc

SEQ ID NO: 5687219 - DNA, 25 bp, Homo sapien
gcattgttcttaccccaaagcctca

SEQ ID NO: 5687220 - DNA, 25 bp, Homo sapien
gaaatgggcgttagcttccccaaga

SEQ ID NO: 5687221 - DNA, 25 bp, Homo sapien
tgtttcgtgcataaggaaatgggcg

SEQ ID NO: 5687222 - DNA, 25 bp, Homo sapien
gctaacgcccatttccttatgcacg

SEQ ID NO: 5687223 - DNA, 25 bp, Homo sapien
taacgcccatttccttatgcacgaa

SEQ ID NO: 5687224 - DNA, 25 bp, Homo sapien
tcttggggaagctaacgcccatttc

SEQ ID NO: 5687225 - DNA, 25 bp, Homo sapien
gaggctttggggtaagaacaatgcc

SEQ ID NO: 5687226 - DNA, 25 bp, Homo sapien
gaagctaacgcccatttccttatgc

SEQ ID NO: 5687227 - DNA, 25 bp, Homo sapien
gggtaagaacaatgcctggctcctg

SEQ ID NO: 5687228 - DNA, 25 bp, Homo sapien
gttagaagtcatgatcttttgtatt

SEQ ID NO: 5687229 - DNA, 25 bp, Homo sapien
tttgtattatggtaaagggagcttg

SEQ ID NO: 5687230 - DNA, 25 bp, Homo sapien
tgtattatggtaaagggagcttgga

SEQ ID NO: 5687231 - DNA, 25 bp, Homo sapien
gtattatggtaaagggagcttggaa

SEQ ID NO: 5687232 - DNA, 25 bp, Homo sapien
tattatggtaaagggagcttggaaa

SEQ ID NO: 5687233 - DNA, 25 bp, Homo sapien
ttgtattatggtaaagggagcttgg

SEQ ID NO: 5687234 - DNA, 25 bp, Homo sapien
ccaagctccctttaccataatacaa

SEQ ID NO: 5687235 - DNA, 25 bp, Homo sapien
taatacaaaagatcatgacttctaa

SEQ ID NO: 5687236 - DNA, 25 bp, Homo sapien
aatacaaaagatcatgacttctaac

SEQ ID NO: 5687237 - DNA, 25 bp, Homo sapien
tccaagctccctttaccataataca

SEQ ID NO: 5687238 - DNA, 25 bp, Homo sapien
caagctccctttaccataatacaaa

SEQ ID NO: 5687239 - DNA, 25 bp, Homo sapien
tttccaagctccctttaccataata

SEQ ID NO: 5687240 - DNA, 25 bp, Homo sapien
gactcctcctgtaaatccttcacgt

SEQ ID NO: 5687241 - DNA, 25 bp, Homo sapien
ccttcacgtgaaattgaggacccag

SEQ ID NO: 5687242 - DNA, 25 bp, Homo sapien
gaaatctgctcaatgacatgactcc

SEQ ID NO: 5687243 - DNA, 25 bp, Homo sapien
tactggttgaccaatctgtggtgaa

SEQ ID NO: 5687244 - DNA, 25 bp, Homo sapien
gaatagtggaaatctgctcaatgac

SEQ ID NO: 5687245 - DNA, 25 bp, Homo sapien
gttttgaaatactggttgaccaatc

SEQ ID NO: 5687246 - DNA, 25 bp, Homo sapien
ttcaccacagattggtcaaccagta

SEQ ID NO: 5687247 - DNA, 25 bp, Homo sapien
catgtcattgagcagatttccacta

SEQ ID NO: 5687248 - DNA, 25 bp, Homo sapien
gattggtcaaccagtatttcaaaac

SEQ ID NO: 5687249 - DNA, 25 bp, Homo sapien
gaggagtcatgtcattgagcagatt

SEQ ID NO: 5687250 - DNA, 25 bp, Homo sapien
cacgtgaaggatttacaggaggagt

SEQ ID NO: 5687251 - DNA, 25 bp, Homo sapien
tgggtcctcaatttcacgtgaagga

SEQ ID NO: 5687252 - DNA, 25 bp, Homo sapien
aaagccacaaggacaccaccatctg

SEQ ID NO: 5687253 - DNA, 25 bp, Homo sapien
aagccacaaggacaccaccatctgc

SEQ ID NO: 5687254 - DNA, 25 bp, Homo sapien
atgttggcatgtggtatcgtaaggg

SEQ ID NO: 5687255 - DNA, 25 bp, Homo sapien
gcctacacagagcttgaagtccagt

SEQ ID NO: 5687256 - DNA, 25 bp, Homo sapien
agccacaaggacaccaccatctgcc

SEQ ID NO: 5687257 - DNA, 25 bp, Homo sapien
tgcctacacagagcttgaagtccag

SEQ ID NO: 5687258 - DNA, 25 bp, Homo sapien
ctggacttcaagctctgtgtaggca

SEQ ID NO: 5687259 - DNA, 25 bp, Homo sapien
actggacttcaagctctgtgtaggc

SEQ ID NO: 5687260 - DNA, 25 bp, Homo sapien
cccttacgataccacatgccaacat

SEQ ID NO: 5687261 - DNA, 25 bp, Homo sapien
cagatggtggtgtccttgtggcttt

SEQ ID NO: 5687262 - DNA, 25 bp, Homo sapien
ggcagatggtggtgtccttgtggct

SEQ ID NO: 5687263 - DNA, 25 bp, Homo sapien
gcagatggtggtgtccttgtggctt

SEQ ID NO: 5687264 - DNA, 25 bp, Homo sapien
tttgtactgcactagtataaatgcc

SEQ ID NO: 5687265 - DNA, 25 bp, Homo sapien
gaacttttgtactgcactagtataa

SEQ ID NO: 5687266 - DNA, 25 bp, Homo sapien
aatgccaagtttacttgtatatttg

SEQ ID NO: 5687267 - DNA, 25 bp, Homo sapien
actgaacttttgtactgcactagta

SEQ ID NO: 5687268 - DNA, 25 bp, Homo sapien
ggtaagatacatataactgaacttt

SEQ ID NO: 5687269 - DNA, 25 bp, Homo sapien
ccttgaaaggtaagatacatataac

SEQ ID NO: 5687270 - DNA, 25 bp, Homo sapien
tactagtgcagtacaaaagttcagt

SEQ ID NO: 5687271 - DNA, 25 bp, Homo sapien
aaagttcagttatatgtatcttacc

SEQ ID NO: 5687272 - DNA, 25 bp, Homo sapien
caaatatacaagtaaacttggcatt

SEQ ID NO: 5687273 - DNA, 25 bp, Homo sapien
ggcatttatactagtgcagtacaaa

SEQ ID NO: 5687274 - DNA, 25 bp, Homo sapien
gttatatgtatcttacctttcaagg

SEQ ID NO: 5687275 - DNA, 25 bp, Homo sapien
ttatactagtgcagtacaaaagttc

SEQ ID NO: 5687276 - DNA, 25 bp, Homo sapien
cataaatatgttttttcttttcttg

SEQ ID NO: 5687277 - DNA, 25 bp, Homo sapien
tgtactggtttttacataaatatgt

SEQ ID NO: 5687278 - DNA, 25 bp, Homo sapien
catatttatgtaaaaaccagtacat

SEQ ID NO: 5687279 - DNA, 25 bp, Homo sapien
caagaaaagaaaaaacatatttatg

SEQ ID NO: 5687280 - DNA, 25 bp, Homo sapien
acatatttatgtaaaaaccagtaca

SEQ ID NO: 5687281 - DNA, 25 bp, Homo sapien
ttttttgtttgtttgttgagacaga

SEQ ID NO: 5687282 - DNA, 25 bp, Homo sapien
acagagtctcgttttgtcacccagg

SEQ ID NO: 5687283 - DNA, 25 bp, Homo sapien
tgagacagagtctcgttttgtcacc

SEQ ID NO: 5687284 - DNA, 25 bp, Homo sapien
ctggagtgcagtggcacgatctcgt

SEQ ID NO: 5687285 - DNA, 25 bp, Homo sapien
acgatctcgtctcattgcaacctct

SEQ ID NO: 5687286 - DNA, 25 bp, Homo sapien
cgatctcgtctcattgcaacctctg

SEQ ID NO: 5687287 - DNA, 25 bp, Homo sapien
agaggttgcaatgagacgagatcgt

SEQ ID NO: 5687288 - DNA, 25 bp, Homo sapien
cagaggttgcaatgagacgagatcg

SEQ ID NO: 5687289 - DNA, 25 bp, Homo sapien
ggtgacaaaacgagactctgtctca

SEQ ID NO: 5687290 - DNA, 25 bp, Homo sapien
cctgggtgacaaaacgagactctgt

SEQ ID NO: 5687291 - DNA, 25 bp, Homo sapien
tctgtctcaacaaacaaacaaaaaa

SEQ ID NO: 5687292 - DNA, 25 bp, Homo sapien
acgagatcgtgccactgcactccag

SEQ ID NO: 5687293 - DNA, 25 bp, Homo sapien
gcatgtgccaccacgcccagctaat

SEQ ID NO: 5687294 - DNA, 25 bp, Homo sapien
gtgccaccacgcccagctaattttg

SEQ ID NO: 5687295 - DNA, 25 bp, Homo sapien
gccaccacgcccagctaattttgta

SEQ ID NO: 5687296 - DNA, 25 bp, Homo sapien
tcaaactcccgacctcaggtgatct

SEQ ID NO: 5687297 - DNA, 25 bp, Homo sapien
catgtgccaccacgcccagctaatt

SEQ ID NO: 5687298 - DNA, 25 bp, Homo sapien
tgccaccacgcccagctaattttgt

SEQ ID NO: 5687299 - DNA, 25 bp, Homo sapien
caaaattagctgggcgtggtggcac

SEQ ID NO: 5687300 - DNA, 25 bp, Homo sapien
tacaaaattagctgggcgtggtggc

SEQ ID NO: 5687301 - DNA, 25 bp, Homo sapien
attagctgggcgtggtggcacatgc

SEQ ID NO: 5687302 - DNA, 25 bp, Homo sapien
acaaaattagctgggcgtggtggca

SEQ ID NO: 5687303 - DNA, 25 bp, Homo sapien
aattagctgggcgtggtggcacatg

SEQ ID NO: 5687304 - DNA, 25 bp, Homo sapien
agatcacctgaggtcgggagtttga

SEQ ID NO: 5687305 - DNA, 25 bp, Homo sapien
tgttttccaaatgagcagtaccatt

SEQ ID NO: 5687306 - DNA, 25 bp, Homo sapien
ggtttcagtttctctgcgttctttc

SEQ ID NO: 5687307 - DNA, 25 bp, Homo sapien
tccaaatgagcagtaccattttact

SEQ ID NO: 5687308 - DNA, 25 bp, Homo sapien
cagtgtatgagggtttcagtttctc

SEQ ID NO: 5687309 - DNA, 25 bp, Homo sapien
gagcagtaccattttactttcccac

SEQ ID NO: 5687310 - DNA, 25 bp, Homo sapien
caaatgagcagtaccattttacttt

SEQ ID NO: 5687311 - DNA, 25 bp, Homo sapien
tgggaaagtaaaatggtactgctca

SEQ ID NO: 5687312 - DNA, 25 bp, Homo sapien
aatggtactgctcatttggaaaaca

SEQ ID NO: 5687313 - DNA, 25 bp, Homo sapien
gagaaactgaaaccctcatacactg

SEQ ID NO: 5687314 - DNA, 25 bp, Homo sapien
ggaaagaacgcagagaaactgaaac

SEQ ID NO: 5687315 - DNA, 25 bp, Homo sapien
gaaagaacgcagagaaactgaaacc

SEQ ID NO: 5687316 - DNA, 25 bp, Homo sapien
aagtaaaatggtactgctcatttgg

SEQ ID NO: 5687317 - DNA, 25 bp, Homo sapien
tattgaagtcaatcttaatacttaa

SEQ ID NO: 5687318 - DNA, 25 bp, Homo sapien
tcttaatacttaaatatagccaagt

SEQ ID NO: 5687319 - DNA, 25 bp, Homo sapien
accacacccagcataagttacctgt

SEQ ID NO: 5687320 - DNA, 25 bp, Homo sapien
ttacctgtttttattgaagtcaatc

SEQ ID NO: 5687321 - DNA, 25 bp, Homo sapien
cataagttacctgtttttattgaag

SEQ ID NO: 5687322 - DNA, 25 bp, Homo sapien
cacccagcataagttacctgttttt

SEQ ID NO: 5687323 - DNA, 25 bp, Homo sapien
aaaaacaggtaacttatgctgggtg

SEQ ID NO: 5687324 - DNA, 25 bp, Homo sapien
taagattgacttcaataaaaacagg

SEQ ID NO: 5687325 - DNA, 25 bp, Homo sapien
acaggtaacttatgctgggtgtggt

SEQ ID NO: 5687326 - DNA, 25 bp, Homo sapien
gctatatttaagtattaagattgac

SEQ ID NO: 5687327 - DNA, 25 bp, Homo sapien
caataaaaacaggtaacttatgctg

SEQ ID NO: 5687328 - DNA, 25 bp, Homo sapien
gattgacttcaataaaaacaggtaa

SEQ ID NO: 5687329 - DNA, 25 bp, Homo sapien
cctaatttcagggtagaatttgaca

SEQ ID NO: 5687330 - DNA, 25 bp, Homo sapien
ttcctgaaaaactgttattactgga

SEQ ID NO: 5687331 - DNA, 25 bp, Homo sapien
ctgaaaaactgttattactggaaat

SEQ ID NO: 5687332 - DNA, 25 bp, Homo sapien
tccctaatttcagggtagaatttga

SEQ ID NO: 5687333 - DNA, 25 bp, Homo sapien
tcagggtagaatttgacaattttaa

SEQ ID NO: 5687334 - DNA, 25 bp, Homo sapien
aactgttattactggaaatacagga

SEQ ID NO: 5687335 - DNA, 25 bp, Homo sapien
tgtcaaattctaccctgaaattagg

SEQ ID NO: 5687336 - DNA, 25 bp, Homo sapien
tcaaattctaccctgaaattaggga

SEQ ID NO: 5687337 - DNA, 25 bp, Homo sapien
tcctgtatttccagtaataacagtt

SEQ ID NO: 5687338 - DNA, 25 bp, Homo sapien
taaaattgtcaaattctaccctgaa

SEQ ID NO: 5687339 - DNA, 25 bp, Homo sapien
tccagtaataacagtttttcaggaa

SEQ ID NO: 5687340 - DNA, 25 bp, Homo sapien
tatttccagtaataacagtttttca

SEQ ID NO: 5687341 - DNA, 25 bp, Homo sapien
tcctgcatcacagaacctgtttata

SEQ ID NO: 5687342 - DNA, 25 bp, Homo sapien
tataaacaggttctgtgatgcagga

SEQ ID NO: 5687343 - DNA, 25 bp, Homo sapien
tcatagtcctgcatcacagaacctg

SEQ ID NO: 5687344 - DNA, 25 bp, Homo sapien
cagctgttcatagtcctgcatcaca

SEQ ID NO: 5687345 - DNA, 25 bp, Homo sapien
tgggccagccagctgttcatagtcc

SEQ ID NO: 5687346 - DNA, 25 bp, Homo sapien
aagctggtctgggatactgtgaaaa

SEQ ID NO: 5687347 - DNA, 25 bp, Homo sapien
tcctgcatcacagaacctgtttata

SEQ ID NO: 5687348 - DNA, 25 bp, Homo sapien
caggatcttggcagccctgggccag

SEQ ID NO: 5687349 - DNA, 25 bp, Homo sapien
ggactatgaacagctggctggccca

SEQ ID NO: 5687350 - DNA, 25 bp, Homo sapien
tgatgcaggactatgaacagctggc

SEQ ID NO: 5687351 - DNA, 25 bp, Homo sapien
tctgtgatgcaggactatgaacagc

SEQ ID NO: 5687352 - DNA, 25 bp, Homo sapien
ttttcacagtatcccagaccagctt

SEQ ID NO: 5687353 - DNA, 25 bp, Homo sapien
tataaacaggttctgtgatgcagga

SEQ ID NO: 5687354 - DNA, 25 bp, Homo sapien
ctggcccagggctgccaagatcctg

SEQ ID NO: 5687355 - DNA, 25 bp, Homo sapien
tgtacctccgtagggatgaagacat

SEQ ID NO: 5687356 - DNA, 25 bp, Homo sapien
ttgtttgtacctccgtagggatgaa

SEQ ID NO: 5687357 - DNA, 25 bp, Homo sapien
tttgtacctccgtagggatgaagac

SEQ ID NO: 5687358 - DNA, 25 bp, Homo sapien
tacctccgtagggatgaagacatgg

SEQ ID NO: 5687359 - DNA, 25 bp, Homo sapien
tgttgtttgtacctccgtagggatg

SEQ ID NO: 5687360 - DNA, 25 bp, Homo sapien
ttgtacctccgtagggatgaagaca

SEQ ID NO: 5687361 - DNA, 25 bp, Homo sapien
tcctcagattgccaaccctagatgt

SEQ ID NO: 5687362 - DNA, 25 bp, Homo sapien
agattgccaaccctagatgtgagtc

SEQ ID NO: 5687363 - DNA, 25 bp, Homo sapien
cctcagattgccaaccctagatgtg

SEQ ID NO: 5687364 - DNA, 25 bp, Homo sapien
gctcctcagattgccaaccctagat

SEQ ID NO: 5687365 - DNA, 25 bp, Homo sapien
tcagattgccaaccctagatgtgag

SEQ ID NO: 5687366 - DNA, 25 bp, Homo sapien
aggctcctcagattgccaaccctag

SEQ ID NO: 5687367 - DNA, 25 bp, Homo sapien
acatctagggttggcaatctgagga

SEQ ID NO: 5687368 - DNA, 25 bp, Homo sapien
gactcacatctagggttggcaatct

SEQ ID NO: 5687369 - DNA, 25 bp, Homo sapien
cacatctagggttggcaatctgagg

SEQ ID NO: 5687370 - DNA, 25 bp, Homo sapien
ctcacatctagggttggcaatctga

SEQ ID NO: 5687371 - DNA, 25 bp, Homo sapien
ctagggttggcaatctgaggagcct

SEQ ID NO: 5687372 - DNA, 25 bp, Homo sapien
tctagggttggcaatctgaggagcc

SEQ ID NO: 5687373 - DNA, 25 bp, Homo sapien
ttcatccctacggaggtacaaacaa

SEQ ID NO: 5687374 - DNA, 25 bp, Homo sapien
tcatccctacggaggtacaaacaac

SEQ ID NO: 5687375 - DNA, 25 bp, Homo sapien
ccatgtcttcatccctacggaggta

SEQ ID NO: 5687376 - DNA, 25 bp, Homo sapien
tcttcatccctacggaggtacaaac

SEQ ID NO: 5687377 - DNA, 25 bp, Homo sapien
tgtcttcatccctacggaggtacaa

SEQ ID NO: 5687378 - DNA, 25 bp, Homo sapien
catccctacggaggtacaaacaaca

SEQ ID NO: 5687379 - DNA, 25 bp, Homo sapien
tgacaaccccaattataaaggcaaa

SEQ ID NO: 5687380 - DNA, 25 bp, Homo sapien
tatgattgacaatcccagttaccag

SEQ ID NO: 5687381 - DNA, 25 bp, Homo sapien
aatggaagcctcctatgattgacaa

SEQ ID NO: 5687382 - DNA, 25 bp, Homo sapien
atggaagcctcctatgattgacaat

SEQ ID NO: 5687383 - DNA, 25 bp, Homo sapien
ttgacaaccccaattataaaggcaa

SEQ ID NO: 5687384 - DNA, 25 bp, Homo sapien
tttgcctttataattggggttgtca

SEQ ID NO: 5687385 - DNA, 25 bp, Homo sapien
attgtcaatcataggaggcttccat

SEQ ID NO: 5687386 - DNA, 25 bp, Homo sapien
ctggtaactgggattgtcaatcata

SEQ ID NO: 5687387 - DNA, 25 bp, Homo sapien
ttgtcaatcataggaggcttccatt

SEQ ID NO: 5687388 - DNA, 25 bp, Homo sapien
ttgcctttataattggggttgtcaa

SEQ ID NO: 5687389 - DNA, 25 bp, Homo sapien
cccagttaccaggtttgtgcctctt

SEQ ID NO: 5687390 - DNA, 25 bp, Homo sapien
caggtttgtgcctcttgatggttga

SEQ ID NO: 5687391 - DNA, 25 bp, Homo sapien
aatggaagcctcctatgattgacaa

SEQ ID NO: 5687392 - DNA, 25 bp, Homo sapien
ttaccaggtttgtgcctcttgatgg

SEQ ID NO: 5687393 - DNA, 25 bp, Homo sapien
cagcgacctgtgattgacaacccca

SEQ ID NO: 5687394 - DNA, 25 bp, Homo sapien
cagttaccaggtttgtgcctcttga

SEQ ID NO: 5687395 - DNA, 25 bp, Homo sapien
gattgtcaatcataggaggcttcca

SEQ ID NO: 5687396 - DNA, 25 bp, Homo sapien
ccatcaagaggcacaaacctggtaa

SEQ ID NO: 5687397 - DNA, 25 bp, Homo sapien
tcaagaggcacaaacctggtaactg

SEQ ID NO: 5687398 - DNA, 25 bp, Homo sapien
ggttgtcaatcacaggtcgctgcca

SEQ ID NO: 5687399 - DNA, 25 bp, Homo sapien
aagaggcacaaacctggtaactggg

SEQ ID NO: 5687400 - DNA, 25 bp, Homo sapien
tcaaccatcaagaggcacaaacctg

SEQ ID NO: 5687401 - DNA, 25 bp, Homo sapien
cagatagaagttttatctagagtaa

SEQ ID NO: 5687402 - DNA, 25 bp, Homo sapien
taaggctgccaggttggtcattata

SEQ ID NO: 5687403 - DNA, 25 bp, Homo sapien
gctgccaggttggtcattatattca

SEQ ID NO: 5687404 - DNA, 25 bp, Homo sapien
tggtcattatattcaagctgttgaa

SEQ ID NO: 5687405 - DNA, 25 bp, Homo sapien
ccaggttggtcattatattcaagct

SEQ ID NO: 5687406 - DNA, 25 bp, Homo sapien
ctagagtaaggctgccaggttggtc

SEQ ID NO: 5687407 - DNA, 25 bp, Homo sapien
gaatataatgaccaacctggcagcc

SEQ ID NO: 5687408 - DNA, 25 bp, Homo sapien
taatgaccaacctggcagccttact

SEQ ID NO: 5687409 - DNA, 25 bp, Homo sapien
tcaacagcttgaatataatgaccaa

SEQ ID NO: 5687410 - DNA, 25 bp, Homo sapien
ttactctagataaaacttctatctg

SEQ ID NO: 5687411 - DNA, 25 bp, Homo sapien
cttgaatataatgaccaacctggca

SEQ ID NO: 5687412 - DNA, 25 bp, Homo sapien
gaccaacctggcagccttactctag

SEQ ID NO: 5687413 - DNA, 25 bp, Homo sapien
aatgggttaggtattgcaaagataa

SEQ ID NO: 5687414 - DNA, 25 bp, Homo sapien
agagcttaatgggttaggtattgca

SEQ ID NO: 5687415 - DNA, 25 bp, Homo sapien
gcttaatgggttaggtattgcaaag

SEQ ID NO: 5687416 - DNA, 25 bp, Homo sapien
gagcttaatgggttaggtattgcaa

SEQ ID NO: 5687417 - DNA, 25 bp, Homo sapien
aaagagagcttaatgggttaggtat

SEQ ID NO: 5687418 - DNA, 25 bp, Homo sapien
cttaatgggttaggtattgcaaaga

SEQ ID NO: 5687419 - DNA, 25 bp, Homo sapien
ttatctttgcaatacctaacccatt

SEQ ID NO: 5687420 - DNA, 25 bp, Homo sapien
atacctaacccattaagctctcttt

SEQ ID NO: 5687421 - DNA, 25 bp, Homo sapien
tttgcaatacctaacccattaagct

SEQ ID NO: 5687422 - DNA, 25 bp, Homo sapien
tatctttgcaatacctaacccatta

SEQ ID NO: 5687423 - DNA, 25 bp, Homo sapien
tctttgcaatacctaacccattaag

SEQ ID NO: 5687424 - DNA, 25 bp, Homo sapien
tgcaatacctaacccattaagctct

SEQ ID NO: 5687425 - DNA, 25 bp, Homo sapien
ttccggtttcaagcgattctcttgc

SEQ ID NO: 5687426 - DNA, 25 bp, Homo sapien
ccttccggtttcaagcgattctctt

SEQ ID NO: 5687427 - DNA, 25 bp, Homo sapien
cttccggtttcaagcgattctcttg

SEQ ID NO: 5687428 - DNA, 25 bp, Homo sapien
tccggtttcaagcgattctcttgcc

SEQ ID NO: 5687429 - DNA, 25 bp, Homo sapien
gccttccggtttcaagcgattctct

SEQ ID NO: 5687430 - DNA, 25 bp, Homo sapien
ccggtttcaagcgattctcttgcct

SEQ ID NO: 5687431 - DNA, 25 bp, Homo sapien
gcaagagaatcgcttgaaaccggaa

SEQ ID NO: 5687432 - DNA, 25 bp, Homo sapien
ggcaagagaatcgcttgaaaccgga

SEQ ID NO: 5687433 - DNA, 25 bp, Homo sapien
aggcaagagaatcgcttgaaaccgg

SEQ ID NO: 5687434 - DNA, 25 bp, Homo sapien
aagagaatcgcttgaaaccggaagg

SEQ ID NO: 5687435 - DNA, 25 bp, Homo sapien
agagaatcgcttgaaaccggaaggc

SEQ ID NO: 5687436 - DNA, 25 bp, Homo sapien
caagagaatcgcttgaaaccggaag

SEQ ID NO: 5687437 - DNA, 25 bp, Homo sapien
gccactgcatctggtcaactttctt

SEQ ID NO: 5687438 - DNA, 25 bp, Homo sapien
tctcactctagtggccaggctggag

SEQ ID NO: 5687439 - DNA, 25 bp, Homo sapien
cactgcatctggtcaactttctttt

SEQ ID NO: 5687440 - DNA, 25 bp, Homo sapien
tgagtctcactctagtggccaggct

SEQ ID NO: 5687441 - DNA, 25 bp, Homo sapien
gcgtgagccactgcatctggtcaac

SEQ ID NO: 5687442 - DNA, 25 bp, Homo sapien
ctgcatctggtcaactttctttttt

SEQ ID NO: 5687443 - DNA, 25 bp, Homo sapien
ctccagcctggccactagagtgaga

SEQ ID NO: 5687444 - DNA, 25 bp, Homo sapien
aaaaaagaaagttgaccagatgcag

SEQ ID NO: 5687445 - DNA, 25 bp, Homo sapien
agcctggccactagagtgagactca

SEQ ID NO: 5687446 - DNA, 25 bp, Homo sapien
gcctggccactagagtgagactcag

SEQ ID NO: 5687447 - DNA, 25 bp, Homo sapien
aaaagaaagttgaccagatgcagtg

SEQ ID NO: 5687448 - DNA, 25 bp, Homo sapien
aagaaagttgaccagatgcagtggc

SEQ ID NO: 5687449 - DNA, 25 bp, Homo sapien
agagacggggcttcgccatgttggc

SEQ ID NO: 5687450 - DNA, 25 bp, Homo sapien
ctcacctggctgattttttgtattt

SEQ ID NO: 5687451 - DNA, 25 bp, Homo sapien
cacctggctgattttttgtattttt

SEQ ID NO: 5687452 - DNA, 25 bp, Homo sapien
tcacctggctgattttttgtatttt

SEQ ID NO: 5687453 - DNA, 25 bp, Homo sapien
acggggcttcgccatgttggccagg

SEQ ID NO: 5687454 - DNA, 25 bp, Homo sapien
gagacggggcttcgccatgttggcc

SEQ ID NO: 5687455 - DNA, 25 bp, Homo sapien
gcctggccaacatggcgaagccccg

SEQ ID NO: 5687456 - DNA, 25 bp, Homo sapien
aaaatacaaaaaatcagccaggtga

SEQ ID NO: 5687457 - DNA, 25 bp, Homo sapien
aaatacaaaaaatcagccaggtgag

SEQ ID NO: 5687458 - DNA, 25 bp, Homo sapien
gccaacatggcgaagccccgtctct

SEQ ID NO: 5687459 - DNA, 25 bp, Homo sapien
cctggccaacatggcgaagccccgt

SEQ ID NO: 5687460 - DNA, 25 bp, Homo sapien
aaaaatacaaaaaatcagccaggtg

SEQ ID NO: 5687461 - DNA, 25 bp, Homo sapien
cctgctcttgggtgctagggttgct

SEQ ID NO: 5687462 - DNA, 25 bp, Homo sapien
tcttgggtgctagggttgcttcagc

SEQ ID NO: 5687463 - DNA, 25 bp, Homo sapien
gctcttgggtgctagggttgcttca

SEQ ID NO: 5687464 - DNA, 25 bp, Homo sapien
gtgctagggttgcttcagccatagg

SEQ ID NO: 5687465 - DNA, 25 bp, Homo sapien
gcttcagccataggatccacagctg

SEQ ID NO: 5687466 - DNA, 25 bp, Homo sapien
gggtgctagggttgcttcagccata

SEQ ID NO: 5687467 - DNA, 25 bp, Homo sapien
cctatggctgaagcaaccctagcac

SEQ ID NO: 5687468 - DNA, 25 bp, Homo sapien
ctgaagcaaccctagcacccaagag

SEQ ID NO: 5687469 - DNA, 25 bp, Homo sapien
atggctgaagcaaccctagcaccca

SEQ ID NO: 5687470 - DNA, 25 bp, Homo sapien
agcaaccctagcacccaagagcagg

SEQ ID NO: 5687471 - DNA, 25 bp, Homo sapien
cagctgtggatcctatggctgaagc

SEQ ID NO: 5687472 - DNA, 25 bp, Homo sapien
tcagctgtggatcctatggctgaag

SEQ ID NO: 5687473 - DNA, 25 bp, Homo sapien
taaggatacaagtagtaaggttgtg

SEQ ID NO: 5687474 - DNA, 25 bp, Homo sapien
aaggttgtgaggctttaggcctcat

SEQ ID NO: 5687475 - DNA, 25 bp, Homo sapien
aatgtacaccctcagacctttgttc

SEQ ID NO: 5687476 - DNA, 25 bp, Homo sapien
tagtaaggttgtgaggctttaggcc

SEQ ID NO: 5687477 - DNA, 25 bp, Homo sapien
tacaagtagtaaggttgtgaggctt

SEQ ID NO: 5687478 - DNA, 25 bp, Homo sapien
gagatggtaaggatacaagtagtaa

SEQ ID NO: 5687479 - DNA, 25 bp, Homo sapien
gaacaaaggtctgagggtgtacatt

SEQ ID NO: 5687480 - DNA, 25 bp, Homo sapien
taaagcctcacaaccttactacttg

SEQ ID NO: 5687481 - DNA, 25 bp, Homo sapien
ggcctaaagcctcacaaccttacta

SEQ ID NO: 5687482 - DNA, 25 bp, Homo sapien
atgaggcctaaagcctcacaacctt

SEQ ID NO: 5687483 - DNA, 25 bp, Homo sapien
ggaacaaaggtctgagggtgtacat

SEQ ID NO: 5687484 - DNA, 25 bp, Homo sapien
ttactacttgtatccttaccatctc

SEQ ID NO: 5687485 - DNA, 25 bp, Homo sapien
tttcatgaagttggcatttctctcc

SEQ ID NO: 5687486 - DNA, 25 bp, Homo sapien
ttcctgttgcttatttcaagtttca

SEQ ID NO: 5687487 - DNA, 25 bp, Homo sapien
tttcctgttgcttatttcaagtttc

SEQ ID NO: 5687488 - DNA, 25 bp, Homo sapien
agtttcatgaagttggcatttctct

SEQ ID NO: 5687489 - DNA, 25 bp, Homo sapien
gtttcatgaagttggcatttctctc

SEQ ID NO: 5687490 - DNA, 25 bp, Homo sapien
tcctgttgcttatttcaagtttcat

SEQ ID NO: 5687491 - DNA, 25 bp, Homo sapien
gagagaaatgccaacttcatgaaac

SEQ ID NO: 5687492 - DNA, 25 bp, Homo sapien
ggagagaaatgccaacttcatgaaa

SEQ ID NO: 5687493 - DNA, 25 bp, Homo sapien
agagaaatgccaacttcatgaaact

SEQ ID NO: 5687494 - DNA, 25 bp, Homo sapien
tgaaacttgaaataagcaacaggaa

SEQ ID NO: 5687495 - DNA, 25 bp, Homo sapien
gaaacttgaaataagcaacaggaaa

SEQ ID NO: 5687496 - DNA, 25 bp, Homo sapien
atgaaacttgaaataagcaacagga

SEQ ID NO: 5687497 - DNA, 25 bp, Homo sapien
tttcatgaagttggcatttctctcc

SEQ ID NO: 5687498 - DNA, 25 bp, Homo sapien
cagagtgcgtaaaataatctgtagc

SEQ ID NO: 5687499 - DNA, 25 bp, Homo sapien
atgaagttggcatttctctccattg

SEQ ID NO: 5687500 - DNA, 25 bp, Homo sapien
gcgtaaaataatctgtagcatttgt

SEQ ID NO: 5687501 - DNA, 25 bp, Homo sapien
tcctgttgcttatttcaagtttcat

SEQ ID NO: 5687502 - DNA, 25 bp, Homo sapien
cagtcttagaggcagagtgcgtaaa

SEQ ID NO: 5687503 - DNA, 25 bp, Homo sapien
atttctcttacggtagattcaccat

SEQ ID NO: 5687504 - DNA, 25 bp, Homo sapien
ttctcttacggtagattcaccataa

SEQ ID NO: 5687505 - DNA, 25 bp, Homo sapien
tctcttacggtagattcaccataaa

SEQ ID NO: 5687506 - DNA, 25 bp, Homo sapien
aaacttttgttgatcattatctgaa

SEQ ID NO: 5687507 - DNA, 25 bp, Homo sapien
tcttacggtagattcaccataaact

SEQ ID NO: 5687508 - DNA, 25 bp, Homo sapien
taaacttttgttgatcattatctga

SEQ ID NO: 5687509 - DNA, 25 bp, Homo sapien
tatggtgaatctaccgtaagagaaa

SEQ ID NO: 5687510 - DNA, 25 bp, Homo sapien
agtttatggtgaatctaccgtaaga

SEQ ID NO: 5687511 - DNA, 25 bp, Homo sapien
cagataatgatcaacaaaagtttat

SEQ ID NO: 5687512 - DNA, 25 bp, Homo sapien
ttcagataatgatcaacaaaagttt

SEQ ID NO: 5687513 - DNA, 25 bp, Homo sapien
gtttatggtgaatctaccgtaagag

SEQ ID NO: 5687514 - DNA, 25 bp, Homo sapien
ttatggtgaatctaccgtaagagaa

SEQ ID NO: 5687515 - DNA, 25 bp, Homo sapien
aagtataaccatatgcctgcaaaag

SEQ ID NO: 5687516 - DNA, 25 bp, Homo sapien
agtggctttagagtctgtttgtgtt

SEQ ID NO: 5687517 - DNA, 25 bp, Homo sapien
gggcatgatttcattagtctaatgt

SEQ ID NO: 5687518 - DNA, 25 bp, Homo sapien
gatttcattagtctaatgtagtggc

SEQ ID NO: 5687519 - DNA, 25 bp, Homo sapien
cattagtctaatgtagtggctttag

SEQ ID NO: 5687520 - DNA, 25 bp, Homo sapien
gtataaccatatgcctgcaaaagac

SEQ ID NO: 5687521 - DNA, 25 bp, Homo sapien
cattagactaatgaaatcatgcccc

SEQ ID NO: 5687522 - DNA, 25 bp, Homo sapien
aacacaaacagactctaaagccact

SEQ ID NO: 5687523 - DNA, 25 bp, Homo sapien
cttttgcaggcatatggttatactt

SEQ ID NO: 5687524 - DNA, 25 bp, Homo sapien
ctaatgaaatcatgccccaaaaccc

SEQ ID NO: 5687525 - DNA, 25 bp, Homo sapien
taaagccactacattagactaatga

SEQ ID NO: 5687526 - DNA, 25 bp, Homo sapien
gtcttttgcaggcatatggttatac

SEQ ID NO: 5687527 - DNA, 25 bp, Homo sapien
catttaggctatattttaatacact

SEQ ID NO: 5687528 - DNA, 25 bp, Homo sapien
gtctgggtatatatttcgaaatttg

SEQ ID NO: 5687529 - DNA, 25 bp, Homo sapien
cactcttatatgttgaatctcggtt

SEQ ID NO: 5687530 - DNA, 25 bp, Homo sapien
tatatgttgaatctcggtttacact

SEQ ID NO: 5687531 - DNA, 25 bp, Homo sapien
gggtatatatttcgaaatttgtcat

SEQ ID NO: 5687532 - DNA, 25 bp, Homo sapien
tacactcttatatgttgaatctcgg

SEQ ID NO: 5687533 - DNA, 25 bp, Homo sapien
gacaaatttcgaaatatatacccag

SEQ ID NO: 5687534 - DNA, 25 bp, Homo sapien
taaaccgagattcaacatataagag

SEQ ID NO: 5687535 - DNA, 25 bp, Homo sapien
agtgtaaaccgagattcaacatata

SEQ ID NO: 5687536 - DNA, 25 bp, Homo sapien
ccgagattcaacatataagagtgta

SEQ ID NO: 5687537 - DNA, 25 bp, Homo sapien
caaatttcgaaatatatacccagac

SEQ ID NO: 5687538 - DNA, 25 bp, Homo sapien
agtgtattaaaatatagcctaaatg

SEQ ID NO: 5687539 - DNA, 25 bp, Homo sapien
aaaaaattgttggccgagcaaggtg

SEQ ID NO: 5687540 - DNA, 25 bp, Homo sapien
caccttgctcggccaacaatttttt

SEQ ID NO: 5687541 - DNA, 25 bp, Homo sapien
ttgttggccgagcaaggtggctcac

SEQ ID NO: 5687542 - DNA, 25 bp, Homo sapien
aaaaattgttggccgagcaaggtgg

SEQ ID NO: 5687543 - DNA, 25 bp, Homo sapien
aaattgttggccgagcaaggtggct

SEQ ID NO: 5687544 - DNA, 25 bp, Homo sapien
aattgttggccgagcaaggtggctc

SEQ ID NO: 5687545 - DNA, 25 bp, Homo sapien
aaaaaattgttggccgagcaaggtg

SEQ ID NO: 5687546 - DNA, 25 bp, Homo sapien
attgttggccgagcaaggtggctca

SEQ ID NO: 5687547 - DNA, 25 bp, Homo sapien
ccaccttgctcggccaacaattttt

SEQ ID NO: 5687548 - DNA, 25 bp, Homo sapien
gagccaccttgctcggccaacaatt

SEQ ID NO: 5687549 - DNA, 25 bp, Homo sapien
agccaccttgctcggccaacaattt

SEQ ID NO: 5687550 - DNA, 25 bp, Homo sapien
tgagccaccttgctcggccaacaat

SEQ ID NO: 5687551 - DNA, 25 bp, Homo sapien
caccttgctcggccaacaatttttt

SEQ ID NO: 5687552 - DNA, 25 bp, Homo sapien
gtgagccaccttgctcggccaacaa

SEQ ID NO: 5687553 - DNA, 25 bp, Homo sapien
acctgtaatcccggctactccggag

SEQ ID NO: 5687554 - DNA, 25 bp, Homo sapien
gctgaggtaggagatccacttgaac

SEQ ID NO: 5687555 - DNA, 25 bp, Homo sapien
aattagccaggcgtggtggtgggca

SEQ ID NO: 5687556 - DNA, 25 bp, Homo sapien
gttcaagtggatctcctacctcagc

SEQ ID NO: 5687557 - DNA, 25 bp, Homo sapien
tgcccaccaccacgcctggctaatt

SEQ ID NO: 5687558 - DNA, 25 bp, Homo sapien
ctccggagtagccgggattacaggt

SEQ ID NO: 5687559 - DNA, 25 bp, Homo sapien
gacaagcaaagtcgatctcaaaaaa

SEQ ID NO: 5687560 - DNA, 25 bp, Homo sapien
ttttttgagatcgactttgcttgtc

SEQ ID NO: 5687561 - DNA, 25 bp, Homo sapien
tgggtgacaagcaaagtcgatctca

SEQ ID NO: 5687562 - DNA, 25 bp, Homo sapien
ggtgacaagcaaagtcgatctcaaa

SEQ ID NO: 5687563 - DNA, 25 bp, Homo sapien
gacaagcaaagtcgatctcaaaaaa

SEQ ID NO: 5687564 - DNA, 25 bp, Homo sapien
gggtgacaagcaaagtcgatctcaa

SEQ ID NO: 5687565 - DNA, 25 bp, Homo sapien
gtgacaagcaaagtcgatctcaaaa

SEQ ID NO: 5687566 - DNA, 25 bp, Homo sapien
acaagcaaagtcgatctcaaaaaaa

SEQ ID NO: 5687567 - DNA, 25 bp, Homo sapien
gagatcgactttgcttgtcacccag

SEQ ID NO: 5687568 - DNA, 25 bp, Homo sapien
ttttttgagatcgactttgcttgtc

SEQ ID NO: 5687569 - DNA, 25 bp, Homo sapien
ttttgagatcgactttgcttgtcac

SEQ ID NO: 5687570 - DNA, 25 bp, Homo sapien
tgagatcgactttgcttgtcaccca

SEQ ID NO: 5687571 - DNA, 25 bp, Homo sapien
ttgagatcgactttgcttgtcaccc

SEQ ID NO: 5687572 - DNA, 25 bp, Homo sapien
tttgagatcgactttgcttgtcacc

SEQ ID NO: 5687573 - DNA, 25 bp, Homo sapien
aaaaaaattgtagatctagagatgt

SEQ ID NO: 5687574 - DNA, 25 bp, Homo sapien
acatctctagatctacaattttttt

SEQ ID NO: 5687575 - DNA, 25 bp, Homo sapien
tcttatacaaatcactgtgttctaa

SEQ ID NO: 5687576 - DNA, 25 bp, Homo sapien
tatttcttatacaaatcactgtgtt

SEQ ID NO: 5687577 - DNA, 25 bp, Homo sapien
tgtccccgttgtccatagatgggtt

SEQ ID NO: 5687578 - DNA, 25 bp, Homo sapien
cgttgtccatagatgggttcattca

SEQ ID NO: 5687579 - DNA, 25 bp, Homo sapien
ttttgtccccgttgtccatagatgg

SEQ ID NO: 5687580 - DNA, 25 bp, Homo sapien
ccccgttgtccatagatgggttcat

SEQ ID NO: 5687581 - DNA, 25 bp, Homo sapien
aatgaacccatctatggacaacggg

SEQ ID NO: 5687582 - DNA, 25 bp, Homo sapien
tttagaacacagtgatttgtataag

SEQ ID NO: 5687583 - DNA, 25 bp, Homo sapien
tgaatgaacccatctatggacaacg

SEQ ID NO: 5687584 - DNA, 25 bp, Homo sapien
gaatgaacccatctatggacaacgg

SEQ ID NO: 5687585 - DNA, 25 bp, Homo sapien
aatgaatgaacccatctatggacaa

SEQ ID NO: 5687586 - DNA, 25 bp, Homo sapien
gaacacagtgatttgtataagaaat

SEQ ID NO: 5687587 - DNA, 25 bp, Homo sapien
gatactctgcctttagggagcttaa

SEQ ID NO: 5687588 - DNA, 25 bp, Homo sapien
cattgtcagtgagtaagacagacaa

SEQ ID NO: 5687589 - DNA, 25 bp, Homo sapien
gtgccaggcattgtcagtgagtaag

SEQ ID NO: 5687590 - DNA, 25 bp, Homo sapien
tctgcctttagggagcttaaattct

SEQ ID NO: 5687591 - DNA, 25 bp, Homo sapien
tactctgcctttagggagcttaaat

SEQ ID NO: 5687592 - DNA, 25 bp, Homo sapien
ccaggcattgtcagtgagtaagaca

SEQ ID NO: 5687593 - DNA, 25 bp, Homo sapien
aatttaagctccctaaaggcagagt

SEQ ID NO: 5687594 - DNA, 25 bp, Homo sapien
tgtcttactcactgacaatgcctgg

SEQ ID NO: 5687595 - DNA, 25 bp, Homo sapien
ttaagctccctaaaggcagagtatc

SEQ ID NO: 5687596 - DNA, 25 bp, Homo sapien
agaatttaagctccctaaaggcaga

SEQ ID NO: 5687597 - DNA, 25 bp, Homo sapien
tgtctgtcttactcactgacaatgc

SEQ ID NO: 5687598 - DNA, 25 bp, Homo sapien
cttactcactgacaatgcctggcac

SEQ ID NO: 5687599 - DNA, 25 bp, Homo sapien
acaggaaaagatactaaaagtgcta

SEQ ID NO: 5687600 - DNA, 25 bp, Homo sapien
tagcacttttagtatcttttcctgt

SEQ ID NO: 5687601 - DNA, 25 bp, Homo sapien
cgtattaggaagtaagaaacgatga

SEQ ID NO: 5687602 - DNA, 25 bp, Homo sapien
acaggaaaagatactaaaagtgcta

SEQ ID NO: 5687603 - DNA, 25 bp, Homo sapien
caacacagcgtattaggaagtaaga

SEQ ID NO: 5687604 - DNA, 25 bp, Homo sapien
gcaatgagcagtaaacattttaagg

SEQ ID NO: 5687605 - DNA, 25 bp, Homo sapien
gaaacgatgaataattaaaacagga

SEQ ID NO: 5687606 - DNA, 25 bp, Homo sapien
taaggaagtaaacaacacagcgtat

SEQ ID NO: 5687607 - DNA, 25 bp, Homo sapien
tcttacttcctaatacgctgtgttg

SEQ ID NO: 5687608 - DNA, 25 bp, Homo sapien
tcatcgtttcttacttcctaatacg

SEQ ID NO: 5687609 - DNA, 25 bp, Homo sapien
tacgctgtgttgtttacttccttaa

SEQ ID NO: 5687610 - DNA, 25 bp, Homo sapien
tcctgttttaattattcatcgtttc

SEQ ID NO: 5687611 - DNA, 25 bp, Homo sapien
cttaaaatgtttactgctcattgcc

SEQ ID NO: 5687612 - DNA, 25 bp, Homo sapien
tagcacttttagtatcttttcctgt

SEQ ID NO: 5687613 - DNA, 25 bp, Homo sapien
tgttaaaaccttactcgaaagatga

SEQ ID NO: 5687614 - DNA, 25 bp, Homo sapien
acatcgaaccaaacacttgaaagag

SEQ ID NO: 5687615 - DNA, 25 bp, Homo sapien
tactcgaaagatgacatcgaaccaa

SEQ ID NO: 5687616 - DNA, 25 bp, Homo sapien
aaaccttactcgaaagatgacatcg

SEQ ID NO: 5687617 - DNA, 25 bp, Homo sapien
gtcaccatgttaaaaccttactcga

SEQ ID NO: 5687618 - DNA, 25 bp, Homo sapien
gatgacatcgaaccaaacacttgaa

SEQ ID NO: 5687619 - DNA, 25 bp, Homo sapien
tctttcaagtgtttggttcgatgtc

SEQ ID NO: 5687620 - DNA, 25 bp, Homo sapien
ggttcgatgtcatctttcgagtaag

SEQ ID NO: 5687621 - DNA, 25 bp, Homo sapien
tcatctttcgagtaaggttttaaca

SEQ ID NO: 5687622 - DNA, 25 bp, Homo sapien
tcgagtaaggttttaacatggtgac

SEQ ID NO: 5687623 - DNA, 25 bp, Homo sapien
tcaagtgtttggttcgatgtcatct

SEQ ID NO: 5687624 - DNA, 25 bp, Homo sapien
cgatgtcatctttcgagtaaggttt

SEQ ID NO: 5687625 - DNA, 25 bp, Homo sapien
aacagccagtattgaggcctaaagt

SEQ ID NO: 5687626 - DNA, 25 bp, Homo sapien
cagccagtattgaggcctaaagtgg

SEQ ID NO: 5687627 - DNA, 25 bp, Homo sapien
agccagtattgaggcctaaagtggt

SEQ ID NO: 5687628 - DNA, 25 bp, Homo sapien
gaacagccagtattgaggcctaaag

SEQ ID NO: 5687629 - DNA, 25 bp, Homo sapien
cagtattgaggcctaaagtggttgt

SEQ ID NO: 5687630 - DNA, 25 bp, Homo sapien
acagccagtattgaggcctaaagtg

SEQ ID NO: 5687631 - DNA, 25 bp, Homo sapien
agtattgaggcctaaagtggttgtc

SEQ ID NO: 5687632 - DNA, 25 bp, Homo sapien
tattgaggcctaaagtggttgtcta

SEQ ID NO: 5687633 - DNA, 25 bp, Homo sapien
ttgaggcctaaagtggttgtctaca

SEQ ID NO: 5687634 - DNA, 25 bp, Homo sapien
aggcctaaagtggttgtctacaagg

SEQ ID NO: 5687635 - DNA, 25 bp, Homo sapien
gaggcctaaagtggttgtctacaag

SEQ ID NO: 5687636 - DNA, 25 bp, Homo sapien
cctaaagtggttgtctacaaggcca

SEQ ID NO: 5687637 - DNA, 25 bp, Homo sapien
tggccttgtagacaaccactttagg

SEQ ID NO: 5687638 - DNA, 25 bp, Homo sapien
ccttgtagacaaccactttaggcct

SEQ ID NO: 5687639 - DNA, 25 bp, Homo sapien
gacaaccactttaggcctcaatact

SEQ ID NO: 5687640 - DNA, 25 bp, Homo sapien
tagacaaccactttaggcctcaata

SEQ ID NO: 5687641 - DNA, 25 bp, Homo sapien
tgtagacaaccactttaggcctcaa

SEQ ID NO: 5687642 - DNA, 25 bp, Homo sapien
ttgtagacaaccactttaggcctca

SEQ ID NO: 5687643 - DNA, 25 bp, Homo sapien
ccactttaggcctcaatactggctg

SEQ ID NO: 5687644 - DNA, 25 bp, Homo sapien
ctttaggcctcaatactggctgttc

SEQ ID NO: 5687645 - DNA, 25 bp, Homo sapien
cactttaggcctcaatactggctgt

SEQ ID NO: 5687646 - DNA, 25 bp, Homo sapien
accactttaggcctcaatactggct

SEQ ID NO: 5687647 - DNA, 25 bp, Homo sapien
actttaggcctcaatactggctgtt

SEQ ID NO: 5687648 - DNA, 25 bp, Homo sapien
acaaccactttaggcctcaatactg

SEQ ID NO: 5687649 - DNA, 25 bp, Homo sapien
tggacttggctttccctcctagtga

SEQ ID NO: 5687650 - DNA, 25 bp, Homo sapien
ccctcctagtgaagcgggcagccat

SEQ ID NO: 5687651 - DNA, 25 bp, Homo sapien
cctcctagtgaagcgggcagccatc

SEQ ID NO: 5687652 - DNA, 25 bp, Homo sapien
ggctactggacacaggtgtcacagg

SEQ ID NO: 5687653 - DNA, 25 bp, Homo sapien
ggacttggctttccctcctagtgaa

SEQ ID NO: 5687654 - DNA, 25 bp, Homo sapien
tgtggacttggctttccctcctagt

SEQ ID NO: 5687655 - DNA, 25 bp, Homo sapien
gaaggctccaggttagacaggctgt

SEQ ID NO: 5687656 - DNA, 25 bp, Homo sapien
agaaggctccaggttagacaggctg

SEQ ID NO: 5687657 - DNA, 25 bp, Homo sapien
cagcctgtctaacctggagccttct

SEQ ID NO: 5687658 - DNA, 25 bp, Homo sapien
acagcctgtctaacctggagccttc

SEQ ID NO: 5687659 - DNA, 25 bp, Homo sapien
actaggagggaaagccaagtccaca

SEQ ID NO: 5687660 - DNA, 25 bp, Homo sapien
gatggctgcccgcttcactaggagg

SEQ ID NO: 5687661 - DNA, 25 bp, Homo sapien
ttcactaggagggaaagccaagtcc

SEQ ID NO: 5687662 - DNA, 25 bp, Homo sapien
tcactaggagggaaagccaagtcca

SEQ ID NO: 5687663 - DNA, 25 bp, Homo sapien
atggctgcccgcttcactaggaggg

SEQ ID NO: 5687664 - DNA, 25 bp, Homo sapien
cctgtgacacctgtgtccagtagcc

SEQ ID NO: 5687665 - DNA, 25 bp, Homo sapien
agtattgaggcctaaagtggttgtc

SEQ ID NO: 5687666 - DNA, 25 bp, Homo sapien
tattgaggcctaaagtggttgtcta

SEQ ID NO: 5687667 - DNA, 25 bp, Homo sapien
ttgaggcctaaagtggttgtctaca

SEQ ID NO: 5687668 - DNA, 25 bp, Homo sapien
aggcctaaagtggttgtctacaagg

SEQ ID NO: 5687669 - DNA, 25 bp, Homo sapien
gaggcctaaagtggttgtctacaag

SEQ ID NO: 5687670 - DNA, 25 bp, Homo sapien
cctaaagtggttgtctacaaggcca

SEQ ID NO: 5687671 - DNA, 25 bp, Homo sapien
tggccttgtagacaaccactttagg

SEQ ID NO: 5687672 - DNA, 25 bp, Homo sapien
ccttgtagacaaccactttaggcct

SEQ ID NO: 5687673 - DNA, 25 bp, Homo sapien
tagacaaccactttaggcctcaata

SEQ ID NO: 5687674 - DNA, 25 bp, Homo sapien
gacaaccactttaggcctcaatact

SEQ ID NO: 5687675 - DNA, 25 bp, Homo sapien
tgtagacaaccactttaggcctcaa

SEQ ID NO: 5687676 - DNA, 25 bp, Homo sapien
ttgtagacaaccactttaggcctca

SEQ ID NO: 5687677 - DNA, 25 bp, Homo sapien
tctaggaaagatacggtggccccac

SEQ ID NO: 5687678 - DNA, 25 bp, Homo sapien
tatataccagggagaatcagggcga

SEQ ID NO: 5687679 - DNA, 25 bp, Homo sapien
taggaggtccctgtaatcatctagg

SEQ ID NO: 5687680 - DNA, 25 bp, Homo sapien
tcagggcgaccagttaggaggtccc

SEQ ID NO: 5687681 - DNA, 25 bp, Homo sapien
gctgtgtttcctatataccagggag

SEQ ID NO: 5687682 - DNA, 25 bp, Homo sapien
cagggagaatcagggcgaccagtta

SEQ ID NO: 5687683 - DNA, 25 bp, Homo sapien
ggacctcctaactggtcgccctgat

SEQ ID NO: 5687684 - DNA, 25 bp, Homo sapien
tcctagatgattacagggacctcct

SEQ ID NO: 5687685 - DNA, 25 bp, Homo sapien
ggtcgccctgattctccctggtata

SEQ ID NO: 5687686 - DNA, 25 bp, Homo sapien
ggccaccgtatctttcctagatgat

SEQ ID NO: 5687687 - DNA, 25 bp, Homo sapien
ccctggtatataggaaacacagcag

SEQ ID NO: 5687688 - DNA, 25 bp, Homo sapien
tgattacagggacctcctaactggt

SEQ ID NO: 5687689 - DNA, 25 bp, Homo sapien
tgtgtctaaatctggtctctcccgg

SEQ ID NO: 5687690 - DNA, 25 bp, Homo sapien
gaaagggaacagtcactgtctgtat

SEQ ID NO: 5687691 - DNA, 25 bp, Homo sapien
tatgtaccattgcttactaaagtcc

SEQ ID NO: 5687692 - DNA, 25 bp, Homo sapien
aatctggtctctcccggaaagctct

SEQ ID NO: 5687693 - DNA, 25 bp, Homo sapien
gcttactaaagtcctttacccagca

SEQ ID NO: 5687694 - DNA, 25 bp, Homo sapien
cctctgtgtctaaatctggtctctc

SEQ ID NO: 5687695 - DNA, 25 bp, Homo sapien
tgctgggtaaaggactttagtaagc

SEQ ID NO: 5687696 - DNA, 25 bp, Homo sapien
agagctttccgggagagaccagatt

SEQ ID NO: 5687697 - DNA, 25 bp, Homo sapien
gactttagtaagcaatggtacatac

SEQ ID NO: 5687698 - DNA, 25 bp, Homo sapien
ccgggagagaccagatttagacaca

SEQ ID NO: 5687699 - DNA, 25 bp, Homo sapien
gagagaccagatttagacacagagg

SEQ ID NO: 5687700 - DNA, 25 bp, Homo sapien
atacagacagtgactgttccctttc

SEQ ID NO: 5687701 - DNA, 25 bp, Homo sapien
tccctcacacgttaaaaagttgctg

SEQ ID NO: 5687702 - DNA, 25 bp, Homo sapien
ttctgtcttaactagaatgcaattc

SEQ ID NO: 5687703 - DNA, 25 bp, Homo sapien
ctccctcacacgttaaaaagttgct

SEQ ID NO: 5687704 - DNA, 25 bp, Homo sapien
cagcaactttttaacgtgtgaggga

SEQ ID NO: 5687705 - DNA, 25 bp, Homo sapien
gaattgcattctagttaagacagaa

SEQ ID NO: 5687706 - DNA, 25 bp, Homo sapien
agcaactttttaacgtgtgagggag

SEQ ID NO: 5687707 - DNA, 25 bp, Homo sapien
cacacgttaaaaagttgctggtgca

SEQ ID NO: 5687708 - DNA, 25 bp, Homo sapien
tccctcacacgttaaaaagttgctg

SEQ ID NO: 5687709 - DNA, 25 bp, Homo sapien
ttctgtcttaactagaatgcaattc

SEQ ID NO: 5687710 - DNA, 25 bp, Homo sapien
tagagaccatgtttcccccaaactc

SEQ ID NO: 5687711 - DNA, 25 bp, Homo sapien
tcttaaaagtagagaccatgtttcc

SEQ ID NO: 5687712 - DNA, 25 bp, Homo sapien
aatgcaattcttaaaagtagagacc

SEQ ID NO: 5687713 - DNA, 25 bp, Homo sapien
tcttatcctcagaatggggctagtg

SEQ ID NO: 5687714 - DNA, 25 bp, Homo sapien
cttggtttcttatcctcagaatggg

SEQ ID NO: 5687715 - DNA, 25 bp, Homo sapien
aatccttggtttcttatcctcagaa

SEQ ID NO: 5687716 - DNA, 25 bp, Homo sapien
ggctagtgtgccataggccagtaga

SEQ ID NO: 5687717 - DNA, 25 bp, Homo sapien
tagtgtgccataggccagtagattg

SEQ ID NO: 5687718 - DNA, 25 bp, Homo sapien
gctagtgtgccataggccagtagat

SEQ ID NO: 5687719 - DNA, 25 bp, Homo sapien
cactagccccattctgaggataaga

SEQ ID NO: 5687720 - DNA, 25 bp, Homo sapien
gccccattctgaggataagaaacca

SEQ ID NO: 5687721 - DNA, 25 bp, Homo sapien
caatctactggcctatggcacacta

SEQ ID NO: 5687722 - DNA, 25 bp, Homo sapien
tctactggcctatggcacactagcc

SEQ ID NO: 5687723 - DNA, 25 bp, Homo sapien
tggcctatggcacactagccccatt

SEQ ID NO: 5687724 - DNA, 25 bp, Homo sapien
cattctgaggataagaaaccaagga

SEQ ID NO: 5687725 - DNA, 25 bp, Homo sapien
aattagagtaggcataattccacca

SEQ ID NO: 5687726 - DNA, 25 bp, Homo sapien
cctctgagacaaccattcttcttgg

SEQ ID NO: 5687727 - DNA, 25 bp, Homo sapien
tgaattagagtaggcataattccac

SEQ ID NO: 5687728 - DNA, 25 bp, Homo sapien
acctctgagacaaccattcttcttg

SEQ ID NO: 5687729 - DNA, 25 bp, Homo sapien
actgaattagagtaggcataattcc

SEQ ID NO: 5687730 - DNA, 25 bp, Homo sapien
tctgagacaaccattcttcttggtg

SEQ ID NO: 5687731 - DNA, 25 bp, Homo sapien
tggtggaattatgcctactctaatt

SEQ ID NO: 5687732 - DNA, 25 bp, Homo sapien
caagaagaatggttgtctcagaggt

SEQ ID NO: 5687733 - DNA, 25 bp, Homo sapien
caccaagaagaatggttgtctcaga

SEQ ID NO: 5687734 - DNA, 25 bp, Homo sapien
ggaattatgcctactctaattcagt

SEQ ID NO: 5687735 - DNA, 25 bp, Homo sapien
accaagaagaatggttgtctcagag

SEQ ID NO: 5687736 - DNA, 25 bp, Homo sapien
ccaagaagaatggttgtctcagagg

SEQ ID NO: 5687737 - DNA, 25 bp, Homo sapien
accttccacaacagtggaggcttat

SEQ ID NO: 5687738 - DNA, 25 bp, Homo sapien
aattaccttccacaacagtggaggc

SEQ ID NO: 5687739 - DNA, 25 bp, Homo sapien
taagacttactcagggtcacccatc

SEQ ID NO: 5687740 - DNA, 25 bp, Homo sapien
ttaccttccacaacagtggaggctt

SEQ ID NO: 5687741 - DNA, 25 bp, Homo sapien
gtaagacttactcagggtcacccat

SEQ ID NO: 5687742 - DNA, 25 bp, Homo sapien
gacttactcagggtcacccatctgg

SEQ ID NO: 5687743 - DNA, 25 bp, Homo sapien
ccagatgggtgaccctgagtaagtc

SEQ ID NO: 5687744 - DNA, 25 bp, Homo sapien
gcctccactgttgtggaaggtaatt

SEQ ID NO: 5687745 - DNA, 25 bp, Homo sapien
gatgggtgaccctgagtaagtctta

SEQ ID NO: 5687746 - DNA, 25 bp, Homo sapien
tacacctcccctacgattcagtttc

SEQ ID NO: 5687747 - DNA, 25 bp, Homo sapien
agtcttacacctcccctacgattca

SEQ ID NO: 5687748 - DNA, 25 bp, Homo sapien
ataagcctccactgttgtggaaggt

SEQ ID NO: 5687749 - DNA, 25 bp, Homo sapien
tggtaagaaatctgttaagaatcag

SEQ ID NO: 5687750 - DNA, 25 bp, Homo sapien
taagaaatctgttaagaatcagttt

SEQ ID NO: 5687751 - DNA, 25 bp, Homo sapien
tgggtggtaagaaatctgttaagaa

SEQ ID NO: 5687752 - DNA, 25 bp, Homo sapien
ggtggtaagaaatctgttaagaatc

SEQ ID NO: 5687753 - DNA, 25 bp, Homo sapien
ttgggtggtaagaaatctgttaaga

SEQ ID NO: 5687754 - DNA, 25 bp, Homo sapien
ggtaagaaatctgttaagaatcagt

SEQ ID NO: 5687755 - DNA, 25 bp, Homo sapien
tcttaacagatttcttaccacccaa

SEQ ID NO: 5687756 - DNA, 25 bp, Homo sapien
tgattcttaacagatttcttaccac

SEQ ID NO: 5687757 - DNA, 25 bp, Homo sapien
ttcttaacagatttcttaccaccca

SEQ ID NO: 5687758 - DNA, 25 bp, Homo sapien
aaactgattcttaacagatttctta

SEQ ID NO: 5687759 - DNA, 25 bp, Homo sapien
actgattcttaacagatttcttacc

SEQ ID NO: 5687760 - DNA, 25 bp, Homo sapien
gattcttaacagatttcttaccacc

SEQ ID NO: 5687761 - DNA, 25 bp, Homo sapien
gagttgggtggtaagaaatctgtta

SEQ ID NO: 5687762 - DNA, 25 bp, Homo sapien
taagaaatctgttaagaatcagttt

SEQ ID NO: 5687763 - DNA, 25 bp, Homo sapien
ggtggtaagaaatctgttaagaatc

SEQ ID NO: 5687764 - DNA, 25 bp, Homo sapien
ttgggtggtaagaaatctgttaaga

SEQ ID NO: 5687765 - DNA, 25 bp, Homo sapien
ggtaagaaatctgttaagaatcagt

SEQ ID NO: 5687766 - DNA, 25 bp, Homo sapien
tctgttaagaatcagttttgttacg

SEQ ID NO: 5687767 - DNA, 25 bp, Homo sapien
tcttaacagatttcttaccacccaa

SEQ ID NO: 5687768 - DNA, 25 bp, Homo sapien
tgattcttaacagatttcttaccac

SEQ ID NO: 5687769 - DNA, 25 bp, Homo sapien
aaactgattcttaacagatttctta

SEQ ID NO: 5687770 - DNA, 25 bp, Homo sapien
tacgtaacaaaactgattcttaaca

SEQ ID NO: 5687771 - DNA, 25 bp, Homo sapien
actgattcttaacagatttcttacc

SEQ ID NO: 5687772 - DNA, 25 bp, Homo sapien
gattcttaacagatttcttaccacc

SEQ ID NO: 5687773 - DNA, 25 bp, Homo sapien
cctcttaactatcactccaagactt

SEQ ID NO: 5687774 - DNA, 25 bp, Homo sapien
ctcttaactatcactccaagactta

SEQ ID NO: 5687775 - DNA, 25 bp, Homo sapien
aagtcttggagtgatagttaagagg

SEQ ID NO: 5687776 - DNA, 25 bp, Homo sapien
taagtcttggagtgatagttaagag

SEQ ID NO: 5687777 - DNA, 25 bp, Homo sapien
ctccaagacttaggtttgacacaga

SEQ ID NO: 5687778 - DNA, 25 bp, Homo sapien
agacttaagtttgacacagaaagct

SEQ ID NO: 5687779 - DNA, 25 bp, Homo sapien
ttaactatcactccaagacttaagt

SEQ ID NO: 5687780 - DNA, 25 bp, Homo sapien
cacagaaagcttttgttgaaatttt

SEQ ID NO: 5687781 - DNA, 25 bp, Homo sapien
taagtttgacacagaaagcttttgt

SEQ ID NO: 5687782 - DNA, 25 bp, Homo sapien
ttaactatcactccaagacttaggt

SEQ ID NO: 5687783 - DNA, 25 bp, Homo sapien
tctgtgtcaaacctaagtcttggag

SEQ ID NO: 5687784 - DNA, 25 bp, Homo sapien
aaaatttcaacaaaagctttctgtg

SEQ ID NO: 5687785 - DNA, 25 bp, Homo sapien
cctaagtcttggagtgatagttaag

SEQ ID NO: 5687786 - DNA, 25 bp, Homo sapien
caaacttaagtcttggagtgatagt

SEQ ID NO: 5687787 - DNA, 25 bp, Homo sapien
aaaagctttctgtgtcaaacttaag

SEQ ID NO: 5687788 - DNA, 25 bp, Homo sapien
caacaaaagctttctgtgtcaaact

SEQ ID NO: 5687789 - DNA, 25 bp, Homo sapien
ccttaatgtacaacagtttctattt

SEQ ID NO: 5687790 - DNA, 25 bp, Homo sapien
agaccttaatgtacaacagtttcta

SEQ ID NO: 5687791 - DNA, 25 bp, Homo sapien
caataataaacagtgataagcataa

SEQ ID NO: 5687792 - DNA, 25 bp, Homo sapien
gaccttaatgtacaacagtttctat

SEQ ID NO: 5687793 - DNA, 25 bp, Homo sapien
taataaacagtgataagcataaact

SEQ ID NO: 5687794 - DNA, 25 bp, Homo sapien
gaacaataataaacagtgataagca

SEQ ID NO: 5687795 - DNA, 25 bp, Homo sapien
agtttatgcttatcactgtttatta

SEQ ID NO: 5687796 - DNA, 25 bp, Homo sapien
aaatagaaactgttgtacattaagg

SEQ ID NO: 5687797 - DNA, 25 bp, Homo sapien
atagaaactgttgtacattaaggtc

SEQ ID NO: 5687798 - DNA, 25 bp, Homo sapien
taaatagaaactgttgtacattaag

SEQ ID NO: 5687799 - DNA, 25 bp, Homo sapien
tagaaactgttgtacattaaggtct

SEQ ID NO: 5687800 - DNA, 25 bp, Homo sapien
tgcttatcactgtttattattgttc

SEQ ID NO: 5687801 - DNA, 25 bp, Homo sapien
acttttattagtttatgcttatcac

SEQ ID NO: 5687802 - DNA, 25 bp, Homo sapien
agtttatgcttatcactgtttatta

SEQ ID NO: 5687803 - DNA, 25 bp, Homo sapien
tgattacttttataaatagaaactg

SEQ ID NO: 5687804 - DNA, 25 bp, Homo sapien
aaatagaaactgttgtacattaagg

SEQ ID NO: 5687805 - DNA, 25 bp, Homo sapien
tagaaactgttgtacattaaggtct

SEQ ID NO: 5687806 - DNA, 25 bp, Homo sapien
tgcttatcactgtttattattgttc

SEQ ID NO: 5687807 - DNA, 25 bp, Homo sapien
gatgtcagttgaccttggataactg

SEQ ID NO: 5687808 - DNA, 25 bp, Homo sapien
atgtcagttgaccttggataactga

SEQ ID NO: 5687809 - DNA, 25 bp, Homo sapien
agatgtcagttgaccttggataact

SEQ ID NO: 5687810 - DNA, 25 bp, Homo sapien
cagatgtcagttgaccttggataac

SEQ ID NO: 5687811 - DNA, 25 bp, Homo sapien
gttatccaaggtcaactgacatctg

SEQ ID NO: 5687812 - DNA, 25 bp, Homo sapien
cagttatccaaggtcaactgacatc

SEQ ID NO: 5687813 - DNA, 25 bp, Homo sapien
agttatccaaggtcaactgacatct

SEQ ID NO: 5687814 - DNA, 25 bp, Homo sapien
tcagttatccaaggtcaactgacat

SEQ ID NO: 5687815 - DNA, 25 bp, Homo sapien
agttcctcactcaaaatatcttaat

SEQ ID NO: 5687816 - DNA, 25 bp, Homo sapien
tggataactgaagccacagaaaatg

SEQ ID NO: 5687817 - DNA, 25 bp, Homo sapien
gatgtcagttgaccttggataactg

SEQ ID NO: 5687818 - DNA, 25 bp, Homo sapien
tgaccttggataactgaagccacag

SEQ ID NO: 5687819 - DNA, 25 bp, Homo sapien
cagatgtcagttgaccttggataac

SEQ ID NO: 5687820 - DNA, 25 bp, Homo sapien
ccacagaaaatgaactcttggataa

SEQ ID NO: 5687821 - DNA, 25 bp, Homo sapien
gttatccaaggtcaactgacatctg

SEQ ID NO: 5687822 - DNA, 25 bp, Homo sapien
tatccaagagttcattttctgtggc

SEQ ID NO: 5687823 - DNA, 25 bp, Homo sapien
tctgtggcttcagttatccaaggtc

SEQ ID NO: 5687824 - DNA, 25 bp, Homo sapien
cagttatccaaggtcaactgacatc

SEQ ID NO: 5687825 - DNA, 25 bp, Homo sapien
caactgacatctgaaaatattaaga

SEQ ID NO: 5687826 - DNA, 25 bp, Homo sapien
tattaagatattttgagtgaggaac

SEQ ID NO: 5687827 - DNA, 25 bp, Homo sapien
tgtagtggtgccatcgtggctcact

SEQ ID NO: 5687828 - DNA, 25 bp, Homo sapien
ggagtcttgctctgctgcccaggct

SEQ ID NO: 5687829 - DNA, 25 bp, Homo sapien
ggagtgtagtggtgccatcgtggct

SEQ ID NO: 5687830 - DNA, 25 bp, Homo sapien
agtgtagtggtgccatcgtggctca

SEQ ID NO: 5687831 - DNA, 25 bp, Homo sapien
gagtgtagtggtgccatcgtggctc

SEQ ID NO: 5687832 - DNA, 25 bp, Homo sapien
gtgtagtggtgccatcgtggctcac

SEQ ID NO: 5687833 - DNA, 25 bp, Homo sapien
gagccacgatggcaccactacactc

SEQ ID NO: 5687834 - DNA, 25 bp, Homo sapien
agtgagccacgatggcaccactaca

SEQ ID NO: 5687835 - DNA, 25 bp, Homo sapien
gtgagccacgatggcaccactacac

SEQ ID NO: 5687836 - DNA, 25 bp, Homo sapien
tgagccacgatggcaccactacact

SEQ ID NO: 5687837 - DNA, 25 bp, Homo sapien
agcctgggcagcagagcaagactcc

SEQ ID NO: 5687838 - DNA, 25 bp, Homo sapien
agccacgatggcaccactacactcc

SEQ ID NO: 5687839 - DNA, 25 bp, Homo sapien
tcaagcgattgttctgtctcaccct

SEQ ID NO: 5687840 - DNA, 25 bp, Homo sapien
agcgattgttctgtctcaccctcac

SEQ ID NO: 5687841 - DNA, 25 bp, Homo sapien
caccatgcccgtccaattttttgta

SEQ ID NO: 5687842 - DNA, 25 bp, Homo sapien
gtctcaccctcaccctcccgagtag

SEQ ID NO: 5687843 - DNA, 25 bp, Homo sapien
aagcgattgttctgtctcaccctca

SEQ ID NO: 5687844 - DNA, 25 bp, Homo sapien
gctcaagcgattgttctgtctcacc

SEQ ID NO: 5687845 - DNA, 25 bp, Homo sapien
agctactcgggagggtgagggtgag

SEQ ID NO: 5687846 - DNA, 25 bp, Homo sapien
tgagggtgagacagaacaatcgctt

SEQ ID NO: 5687847 - DNA, 25 bp, Homo sapien
attggacgggcatggtggcgtgcac

SEQ ID NO: 5687848 - DNA, 25 bp, Homo sapien
tacaaaaaattggacgggcatggtg

SEQ ID NO: 5687849 - DNA, 25 bp, Homo sapien
tactcgggagggtgagggtgagaca

SEQ ID NO: 5687850 - DNA, 25 bp, Homo sapien
ggtgagacagaacaatcgcttgagc

SEQ ID NO: 5687851 - DNA, 25 bp, Homo sapien
acctcatgatccgcccaccttggcc

SEQ ID NO: 5687852 - DNA, 25 bp, Homo sapien
gacctcatgatccgcccaccttggc

SEQ ID NO: 5687853 - DNA, 25 bp, Homo sapien
tcatgatccgcccaccttggcctcc

SEQ ID NO: 5687854 - DNA, 25 bp, Homo sapien
cctcatgatccgcccaccttggcct

SEQ ID NO: 5687855 - DNA, 25 bp, Homo sapien
tgagccaccgcacccggcttctttt

SEQ ID NO: 5687856 - DNA, 25 bp, Homo sapien
ctcatgatccgcccaccttggcctc

SEQ ID NO: 5687857 - DNA, 25 bp, Homo sapien
ggccaaggtgggcggatcatgaggt

SEQ ID NO: 5687858 - DNA, 25 bp, Homo sapien
gaggccaaggtgggcggatcatgag

SEQ ID NO: 5687859 - DNA, 25 bp, Homo sapien
gccaaggtgggcggatcatgaggtc

SEQ ID NO: 5687860 - DNA, 25 bp, Homo sapien
aggccaaggtgggcggatcatgagg

SEQ ID NO: 5687861 - DNA, 25 bp, Homo sapien
ggaggccaaggtgggcggatcatga

SEQ ID NO: 5687862 - DNA, 25 bp, Homo sapien
aaaagaagccgggtgcggtggctca

SEQ ID NO: 5687863 - DNA, 25 bp, Homo sapien
gttgtccaggctggagtgcaatggc

SEQ ID NO: 5687864 - DNA, 25 bp, Homo sapien
ttgtccaggctggagtgcaatggca

SEQ ID NO: 5687865 - DNA, 25 bp, Homo sapien
tgttgtccaggctggagtgcaatgg

SEQ ID NO: 5687866 - DNA, 25 bp, Homo sapien
ctccgcctcccaggttcaagtgatt

SEQ ID NO: 5687867 - DNA, 25 bp, Homo sapien
gtcctgcctcagcctgctgaatagc

SEQ ID NO: 5687868 - DNA, 25 bp, Homo sapien
tggcactatctcagctcactgcaac

SEQ ID NO: 5687869 - DNA, 25 bp, Homo sapien
ccattgcactccagcctggacaaca

SEQ ID NO: 5687870 - DNA, 25 bp, Homo sapien
gctattcagcaggctgaggcaggac

SEQ ID NO: 5687871 - DNA, 25 bp, Homo sapien
tgccattgcactccagcctggacaa

SEQ ID NO: 5687872 - DNA, 25 bp, Homo sapien
gttgcagtgagctgagatagtgcca

SEQ ID NO: 5687873 - DNA, 25 bp, Homo sapien
gccattgcactccagcctggacaac

SEQ ID NO: 5687874 - DNA, 25 bp, Homo sapien
aatcacttgaacctgggaggcggag

SEQ ID NO: 5687875 - DNA, 25 bp, Homo sapien
acaccgcgtctggctgtgaacttca

SEQ ID NO: 5687876 - DNA, 25 bp, Homo sapien
tgaagttcacagccagacgcggtgt

SEQ ID NO: 5687877 - DNA, 25 bp, Homo sapien
tgagacaccgcgtctggctgtgaac

SEQ ID NO: 5687878 - DNA, 25 bp, Homo sapien
cattttttagtattaagcctaccag

SEQ ID NO: 5687879 - DNA, 25 bp, Homo sapien
caggcgtgagacaccgcgtctggct

SEQ ID NO: 5687880 - DNA, 25 bp, Homo sapien
ccgcgtctggctgtgaacttcattt

SEQ ID NO: 5687881 - DNA, 25 bp, Homo sapien
gacaccgcgtctggctgtgaacttc

SEQ ID NO: 5687882 - DNA, 25 bp, Homo sapien
tctggctgtgaacttcattttttag

SEQ ID NO: 5687883 - DNA, 25 bp, Homo sapien
taaaaaatgaagttcacagccagac

SEQ ID NO: 5687884 - DNA, 25 bp, Homo sapien
aatactaaaaaatgaagttcacagc

SEQ ID NO: 5687885 - DNA, 25 bp, Homo sapien
aaaatgaagttcacagccagacgcg

SEQ ID NO: 5687886 - DNA, 25 bp, Homo sapien
ctggtaggcttaatactaaaaaatg

SEQ ID NO: 5687887 - DNA, 25 bp, Homo sapien
ttcacagccagacgcggtgtctcac

SEQ ID NO: 5687888 - DNA, 25 bp, Homo sapien
aatgaagttcacagccagacgcggt

SEQ ID NO: 5687889 - DNA, 25 bp, Homo sapien
tatgtagaacataaacttgagaggt

SEQ ID NO: 5687890 - DNA, 25 bp, Homo sapien
taatgtctatttacctgtatgtaga

SEQ ID NO: 5687891 - DNA, 25 bp, Homo sapien
gaggtaaagataagttaatacatgg

SEQ ID NO: 5687892 - DNA, 25 bp, Homo sapien
gaacataaacttgagaggtaaagat

SEQ ID NO: 5687893 - DNA, 25 bp, Homo sapien
tacctgtatgtagaacataaacttg

SEQ ID NO: 5687894 - DNA, 25 bp, Homo sapien
tgtagaacataaacttgagaggtaa

SEQ ID NO: 5687895 - DNA, 25 bp, Homo sapien
ccatgtattaacttatctttacctc

SEQ ID NO: 5687896 - DNA, 25 bp, Homo sapien
tctttacctctcaagtttatgttct

SEQ ID NO: 5687897 - DNA, 25 bp, Homo sapien
tacctctcaagtttatgttctacat

SEQ ID NO: 5687898 - DNA, 25 bp, Homo sapien
tacatacaggtaaatagacattaaa

SEQ ID NO: 5687899 - DNA, 25 bp, Homo sapien
tgttctacatacaggtaaatagaca

SEQ ID NO: 5687900 - DNA, 25 bp, Homo sapien
caagtttatgttctacatacaggta

SEQ ID NO: 5687901 - DNA, 25 bp, Homo sapien
tcacagttaagaatttccatgacca

SEQ ID NO: 5687902 - DNA, 25 bp, Homo sapien
tagtatccttgtgatctattcacag

SEQ ID NO: 5687903 - DNA, 25 bp, Homo sapien
ccttgtgatctattcacagttaaga

SEQ ID NO: 5687904 - DNA, 25 bp, Homo sapien
tagggagggcttgttagtatccttg

SEQ ID NO: 5687905 - DNA, 25 bp, Homo sapien
gggcttgttagtatccttgtgatct

SEQ ID NO: 5687906 - DNA, 25 bp, Homo sapien
gaatttccatgaccacaacatgctt

SEQ ID NO: 5687907 - DNA, 25 bp, Homo sapien
tcttaactgtgaatagatcacaagg

SEQ ID NO: 5687908 - DNA, 25 bp, Homo sapien
aagcatgttgtggtcatggaaattc

SEQ ID NO: 5687909 - DNA, 25 bp, Homo sapien
tagatcacaaggatactaacaagcc

SEQ ID NO: 5687910 - DNA, 25 bp, Homo sapien
caaggatactaacaagccctcccta

SEQ ID NO: 5687911 - DNA, 25 bp, Homo sapien
tggtcatggaaattcttaactgtga

SEQ ID NO: 5687912 - DNA, 25 bp, Homo sapien
gatcacaaggatactaacaagccct

SEQ ID NO: 5687913 - DNA, 25 bp, Homo sapien
tggttccagtagtcaaagaaacatc

SEQ ID NO: 5687914 - DNA, 25 bp, Homo sapien
gtttcttgtggttccagtagtcaaa

SEQ ID NO: 5687915 - DNA, 25 bp, Homo sapien
tcaaagaaacatccagcaacttttt

SEQ ID NO: 5687916 - DNA, 25 bp, Homo sapien
cttgtggttccagtagtcaaagaaa

SEQ ID NO: 5687917 - DNA, 25 bp, Homo sapien
cttgaactgagttccacttgtaaac

SEQ ID NO: 5687918 - DNA, 25 bp, Homo sapien
tgagttccacttgtaaacttcttgt

SEQ ID NO: 5687919 - DNA, 25 bp, Homo sapien
gatgtttctttgactactggaacca

SEQ ID NO: 5687920 - DNA, 25 bp, Homo sapien
tttgactactggaaccacaagaaac

SEQ ID NO: 5687921 - DNA, 25 bp, Homo sapien
gtttacaagtggaactcagttcaag

SEQ ID NO: 5687922 - DNA, 25 bp, Homo sapien
aaaaagttgctggatgtttctttga

SEQ ID NO: 5687923 - DNA, 25 bp, Homo sapien
tttctttgactactggaaccacaag

SEQ ID NO: 5687924 - DNA, 25 bp, Homo sapien
caagaagtttacaagtggaactcag

SEQ ID NO: 5687925 - DNA, 25 bp, Homo sapien
tatcaggactcgactcgtgtgcgga

SEQ ID NO: 5687926 - DNA, 25 bp, Homo sapien
tgttactatcaggactcgactcgtg

SEQ ID NO: 5687927 - DNA, 25 bp, Homo sapien
gactcgactcgtgtgcggacatttc

SEQ ID NO: 5687928 - DNA, 25 bp, Homo sapien
tgccatttgttactatcaggactcg

SEQ ID NO: 5687929 - DNA, 25 bp, Homo sapien
cagtctctgatagatgagtgtatgc

SEQ ID NO: 5687930 - DNA, 25 bp, Homo sapien
cgtgtgcggacatttctgttaataa

SEQ ID NO: 5687931 - DNA, 25 bp, Homo sapien
taacagaaatgtccgcacacgagtc

SEQ ID NO: 5687932 - DNA, 25 bp, Homo sapien
aaatgtccgcacacgagtcgagtcc

SEQ ID NO: 5687933 - DNA, 25 bp, Homo sapien
gcatacactcatctatcagagactg

SEQ ID NO: 5687934 - DNA, 25 bp, Homo sapien
gtcctgatagtaacaaatggcagca

SEQ ID NO: 5687935 - DNA, 25 bp, Homo sapien
cacgagtcgagtcctgatagtaaca

SEQ ID NO: 5687936 - DNA, 25 bp, Homo sapien
cattattaacagaaatgtccgcaca

SEQ ID NO: 5687937 - DNA, 25 bp, Homo sapien
ttgatttcctagattctacaagggg

SEQ ID NO: 5687938 - DNA, 25 bp, Homo sapien
cttgatttcctagattctacaaggg

SEQ ID NO: 5687939 - DNA, 25 bp, Homo sapien
tcttgatttcctagattctacaagg

SEQ ID NO: 5687940 - DNA, 25 bp, Homo sapien
gagacagataccatacaccatgatg

SEQ ID NO: 5687941 - DNA, 25 bp, Homo sapien
ttcgcctgctttgaacgtactgttg

SEQ ID NO: 5687942 - DNA, 25 bp, Homo sapien
tggatgagacagataccatacacca

SEQ ID NO: 5687943 - DNA, 25 bp, Homo sapien
gacagataccatacaccatgatgaa

SEQ ID NO: 5687944 - DNA, 25 bp, Homo sapien
gatgagacagataccatacaccatg

SEQ ID NO: 5687945 - DNA, 25 bp, Homo sapien
gaagttcgcctgctttgaacgtact

SEQ ID NO: 5687946 - DNA, 25 bp, Homo sapien
tggtgtatggtatctgtctcatcca

SEQ ID NO: 5687947 - DNA, 25 bp, Homo sapien
agtacgttcaaagcaggcgaacttc

SEQ ID NO: 5687948 - DNA, 25 bp, Homo sapien
ttcatcatggtgtatggtatctgtc

SEQ ID NO: 5687949 - DNA, 25 bp, Homo sapien
catcatggtgtatggtatctgtctc

SEQ ID NO: 5687950 - DNA, 25 bp, Homo sapien
catggtgtatggtatctgtctcatc

SEQ ID NO: 5687951 - DNA, 25 bp, Homo sapien
caacagtacgttcaaagcaggcgaa

SEQ ID NO: 5687952 - DNA, 25 bp, Homo sapien
ccccttgtagaatctaggaaatcaa

SEQ ID NO: 5687953 - DNA, 25 bp, Homo sapien
ccttgtagaatctaggaaatcaaga

SEQ ID NO: 5687954 - DNA, 25 bp, Homo sapien
cccttgtagaatctaggaaatcaag

SEQ ID NO: 5687955 - DNA, 25 bp, Homo sapien
tctgtctctggaaaagaaaatgtag

SEQ ID NO: 5687956 - DNA, 25 bp, Homo sapien
agaaaatgtagaagaaacgggcgcg

SEQ ID NO: 5687957 - DNA, 25 bp, Homo sapien
gccttttctcattaggtctcatttc

SEQ ID NO: 5687958 - DNA, 25 bp, Homo sapien
atgtagaagaaacgggcgcgggccg

SEQ ID NO: 5687959 - DNA, 25 bp, Homo sapien
cattaggtctcatttctgtctctgg

SEQ ID NO: 5687960 - DNA, 25 bp, Homo sapien
atagtgccccgcggcctgggccttt

SEQ ID NO: 5687961 - DNA, 25 bp, Homo sapien
tccagagacagaaatgagacctaat

SEQ ID NO: 5687962 - DNA, 25 bp, Homo sapien
taatgagaaaaggcccaggccgcgg

SEQ ID NO: 5687963 - DNA, 25 bp, Homo sapien
gagacagaaatgagacctaatgaga

SEQ ID NO: 5687964 - DNA, 25 bp, Homo sapien
tctacattttcttttccagagacag

SEQ ID NO: 5687965 - DNA, 25 bp, Homo sapien
cgcgcccgtttcttctacattttct

SEQ ID NO: 5687966 - DNA, 25 bp, Homo sapien
gaaatgagacctaatgagaaaaggc

SEQ ID NO: 5687967 - DNA, 25 bp, Homo sapien
ttcatactgtcggtcaagaatcgaa

SEQ ID NO: 5687968 - DNA, 25 bp, Homo sapien
atttcttagggacacgatgccctct

SEQ ID NO: 5687969 - DNA, 25 bp, Homo sapien
agccttcatactgtcggtcaagaat

SEQ ID NO: 5687970 - DNA, 25 bp, Homo sapien
tcatactgtcggtcaagaatcgaaa

SEQ ID NO: 5687971 - DNA, 25 bp, Homo sapien
cccgtaatagcagcccctagagcct

SEQ ID NO: 5687972 - DNA, 25 bp, Homo sapien
ccttcatactgtcggtcaagaatcg

SEQ ID NO: 5687973 - DNA, 25 bp, Homo sapien
gattcttgaccgacagtatgaaggc

SEQ ID NO: 5687974 - DNA, 25 bp, Homo sapien
aggctctaggggctgctattacggg

SEQ ID NO: 5687975 - DNA, 25 bp, Homo sapien
ttcgattcttgaccgacagtatgaa

SEQ ID NO: 5687976 - DNA, 25 bp, Homo sapien
tttcgattcttgaccgacagtatga

SEQ ID NO: 5687977 - DNA, 25 bp, Homo sapien
agagggcatcgtgtccctaagaaat

SEQ ID NO: 5687978 - DNA, 25 bp, Homo sapien
cgattcttgaccgacagtatgaagg

SEQ ID NO: 5687979 - DNA, 25 bp, Homo sapien
gagccattataccttggtcccagtg

SEQ ID NO: 5687980 - DNA, 25 bp, Homo sapien
ttgactggtggctgccaagtcttgg

SEQ ID NO: 5687981 - DNA, 25 bp, Homo sapien
ttataccttggtcccagtgcagcag

SEQ ID NO: 5687982 - DNA, 25 bp, Homo sapien
agctgttgactggtggctgccaagt

SEQ ID NO: 5687983 - DNA, 25 bp, Homo sapien
tatggcatctgctgagccattatac

SEQ ID NO: 5687984 - DNA, 25 bp, Homo sapien
gcccaggggttctaggtgaaagaca

SEQ ID NO: 5687985 - DNA, 25 bp, Homo sapien
gtataatggctcagcagatgccata

SEQ ID NO: 5687986 - DNA, 25 bp, Homo sapien
ccaagacttggcagccaccagtcaa

SEQ ID NO: 5687987 - DNA, 25 bp, Homo sapien
acttggcagccaccagtcaacagct

SEQ ID NO: 5687988 - DNA, 25 bp, Homo sapien
tgtctttcacctagaacccctgggc

SEQ ID NO: 5687989 - DNA, 25 bp, Homo sapien
cactgggaccaaggtataatggctc

SEQ ID NO: 5687990 - DNA, 25 bp, Homo sapien
ctgctgcactgggaccaaggtataa

SEQ ID NO: 5687991 - DNA, 25 bp, Homo sapien
tgtcataaatcagctggccgtagtt

SEQ ID NO: 5687992 - DNA, 25 bp, Homo sapien
ttgtcataaatcagctggccgtagt

SEQ ID NO: 5687993 - DNA, 25 bp, Homo sapien
cacttgtcataaatcagctggccgt

SEQ ID NO: 5687994 - DNA, 25 bp, Homo sapien
acttgtcataaatcagctggccgta

SEQ ID NO: 5687995 - DNA, 25 bp, Homo sapien
gtcataaatcagctggccgtagttt

SEQ ID NO: 5687996 - DNA, 25 bp, Homo sapien
cataaatcagctggccgtagttttt

SEQ ID NO: 5687997 - DNA, 25 bp, Homo sapien
tacggccagctgatttatgacaagt

SEQ ID NO: 5687998 - DNA, 25 bp, Homo sapien
cggccagctgatttatgacaagtgg

SEQ ID NO: 5687999 - DNA, 25 bp, Homo sapien
aaaaactacggccagctgatttatg

SEQ ID NO: 5688000 - DNA, 25 bp, Homo sapien
actacggccagctgatttatgacaa

SEQ ID NO: 5688001 - DNA, 25 bp, Homo sapien
aaactacggccagctgatttatgac

SEQ ID NO: 5688002 - DNA, 25 bp, Homo sapien
aactacggccagctgatttatgaca

SEQ ID NO: 5688003 - DNA, 25 bp, Homo sapien
agtgacgcgatctgcctaccgggtt

SEQ ID NO: 5688004 - DNA, 25 bp, Homo sapien
cagtgacgcgatctgcctaccgggt

SEQ ID NO: 5688005 - DNA, 25 bp, Homo sapien
aacccggtaggcagatcgcgtcact

SEQ ID NO: 5688006 - DNA, 25 bp, Homo sapien
acccggtaggcagatcgcgtcactg

SEQ ID NO: 5688007 - DNA, 25 bp, Homo sapien
ggagtgcagtgacgcgatctgccta

SEQ ID NO: 5688008 - DNA, 25 bp, Homo sapien
gtgacgcgatctgcctaccgggttc

SEQ ID NO: 5688009 - DNA, 25 bp, Homo sapien
acgcgatctgcctaccgggttcaca

SEQ ID NO: 5688010 - DNA, 25 bp, Homo sapien
agtgacgcgatctgcctaccgggtt

SEQ ID NO: 5688011 - DNA, 25 bp, Homo sapien
tgcagtgacgcgatctgcctaccgg

SEQ ID NO: 5688012 - DNA, 25 bp, Homo sapien
cagtgacgcgatctgcctaccgggt

SEQ ID NO: 5688013 - DNA, 25 bp, Homo sapien
aacccggtaggcagatcgcgtcact

SEQ ID NO: 5688014 - DNA, 25 bp, Homo sapien
tgtgaacccggtaggcagatcgcgt

SEQ ID NO: 5688015 - DNA, 25 bp, Homo sapien
taggcagatcgcgtcactgcactcc

SEQ ID NO: 5688016 - DNA, 25 bp, Homo sapien
cggtaggcagatcgcgtcactgcac

SEQ ID NO: 5688017 - DNA, 25 bp, Homo sapien
acccggtaggcagatcgcgtcactg

SEQ ID NO: 5688018 - DNA, 25 bp, Homo sapien
ggtgtgaacccggtaggcagatcgc

SEQ ID NO: 5688019 - DNA, 25 bp, Homo sapien
taacttgggttgcactttattcact

SEQ ID NO: 5688020 - DNA, 25 bp, Homo sapien
tgaatataacttgggttgcacttta

SEQ ID NO: 5688021 - DNA, 25 bp, Homo sapien
ataacttgggttgcactttattcac

SEQ ID NO: 5688022 - DNA, 25 bp, Homo sapien
gatgaatataacttgggttgcactt

SEQ ID NO: 5688023 - DNA, 25 bp, Homo sapien
agatgaatataacttgggttgcact

SEQ ID NO: 5688024 - DNA, 25 bp, Homo sapien
tataacttgggttgcactttattca

SEQ ID NO: 5688025 - DNA, 25 bp, Homo sapien
gaataaagtgcaacccaagttatat

SEQ ID NO: 5688026 - DNA, 25 bp, Homo sapien
agtgcaacccaagttatattcatct

SEQ ID NO: 5688027 - DNA, 25 bp, Homo sapien
agtgaataaagtgcaacccaagtta

SEQ ID NO: 5688028 - DNA, 25 bp, Homo sapien
aagtgcaacccaagttatattcatc

SEQ ID NO: 5688029 - DNA, 25 bp, Homo sapien
taaagtgcaacccaagttatattca

SEQ ID NO: 5688030 - DNA, 25 bp, Homo sapien
gtgaataaagtgcaacccaagttat

SEQ ID NO: 5688031 - DNA, 25 bp, Homo sapien
tcagcctcccaagtagcggggatta

SEQ ID NO: 5688032 - DNA, 25 bp, Homo sapien
cctgggttcaagcgattctcctgtc

SEQ ID NO: 5688033 - DNA, 25 bp, Homo sapien
gcaacctctgcctcctgggttcaag

SEQ ID NO: 5688034 - DNA, 25 bp, Homo sapien
caggcacatgccaccgcacccagct

SEQ ID NO: 5688035 - DNA, 25 bp, Homo sapien
cacatgccaccgcacccagctaatt

SEQ ID NO: 5688036 - DNA, 25 bp, Homo sapien
caacctctgcctcctgggttcaagc

SEQ ID NO: 5688037 - DNA, 25 bp, Homo sapien
gacaggagaatcgcttgaacccagg

SEQ ID NO: 5688038 - DNA, 25 bp, Homo sapien
gcttgaacccaggaggcagaggttg

SEQ ID NO: 5688039 - DNA, 25 bp, Homo sapien
aattagctgggtgcggtggcatgtg

SEQ ID NO: 5688040 - DNA, 25 bp, Homo sapien
taatccccgctacttgggaggctga

SEQ ID NO: 5688041 - DNA, 25 bp, Homo sapien
agctgggtgcggtggcatgtgcctg

SEQ ID NO: 5688042 - DNA, 25 bp, Homo sapien
cttgaacccaggaggcagaggttgc

SEQ ID NO: 5688043 - DNA, 25 bp, Homo sapien
cattataggcccagataatgtttta

SEQ ID NO: 5688044 - DNA, 25 bp, Homo sapien
attataggcccagataatgttttag

SEQ ID NO: 5688045 - DNA, 25 bp, Homo sapien
ataggcccagataatgttttagact

SEQ ID NO: 5688046 - DNA, 25 bp, Homo sapien
tcattataggcccagataatgtttt

SEQ ID NO: 5688047 - DNA, 25 bp, Homo sapien
taggcccagataatgttttagactt

SEQ ID NO: 5688048 - DNA, 25 bp, Homo sapien
tataggcccagataatgttttagac

SEQ ID NO: 5688049 - DNA, 25 bp, Homo sapien
tctaaaacattatctgggcctataa

SEQ ID NO: 5688050 - DNA, 25 bp, Homo sapien
aagtctaaaacattatctgggccta

SEQ ID NO: 5688051 - DNA, 25 bp, Homo sapien
gtctaaaacattatctgggcctata

SEQ ID NO: 5688052 - DNA, 25 bp, Homo sapien
ctaaaacattatctgggcctataat

SEQ ID NO: 5688053 - DNA, 25 bp, Homo sapien
aaaacattatctgggcctataatga

SEQ ID NO: 5688054 - DNA, 25 bp, Homo sapien
agtctaaaacattatctgggcctat

SEQ ID NO: 5688055 - DNA, 25 bp, Homo sapien
aacattttcattataggcccagata

SEQ ID NO: 5688056 - DNA, 25 bp, Homo sapien
atgttttagactttgtgggccacac

SEQ ID NO: 5688057 - DNA, 25 bp, Homo sapien
taggcccagataatgttttagactt

SEQ ID NO: 5688058 - DNA, 25 bp, Homo sapien
gactttgtgggccacactggccact

SEQ ID NO: 5688059 - DNA, 25 bp, Homo sapien
ccacactggccactgttactttttt

SEQ ID NO: 5688060 - DNA, 25 bp, Homo sapien
tataggcccagataatgttttagac

SEQ ID NO: 5688061 - DNA, 25 bp, Homo sapien
aagtctaaaacattatctgggccta

SEQ ID NO: 5688062 - DNA, 25 bp, Homo sapien
gtctaaaacattatctgggcctata

SEQ ID NO: 5688063 - DNA, 25 bp, Homo sapien
agtggccagtgtggcccacaaagtc

SEQ ID NO: 5688064 - DNA, 25 bp, Homo sapien
tatctgggcctataatgaaaatgtt

SEQ ID NO: 5688065 - DNA, 25 bp, Homo sapien
aaaaaagtaacagtggccagtgtgg

SEQ ID NO: 5688066 - DNA, 25 bp, Homo sapien
gtgtggcccacaaagtctaaaacat

SEQ ID NO: 5688067 - DNA, 25 bp, Homo sapien
gccctgcgtgaatgcccttcacgag

SEQ ID NO: 5688068 - DNA, 25 bp, Homo sapien
atgcccttcacgagactgtgagttt

SEQ ID NO: 5688069 - DNA, 25 bp, Homo sapien
agtgaaagccctgcgtgaatgccct

SEQ ID NO: 5688070 - DNA, 25 bp, Homo sapien
aaagccctgcgtgaatgcccttcac

SEQ ID NO: 5688071 - DNA, 25 bp, Homo sapien
tgaaagccctgcgtgaatgcccttc

SEQ ID NO: 5688072 - DNA, 25 bp, Homo sapien
tagtgaaagccctgcgtgaatgccc

SEQ ID NO: 5688073 - DNA, 25 bp, Homo sapien
cgtgaagggcattcacgcagggctt

SEQ ID NO: 5688074 - DNA, 25 bp, Homo sapien
tgaagggcattcacgcagggctttc

SEQ ID NO: 5688075 - DNA, 25 bp, Homo sapien
gaagggcattcacgcagggctttca

SEQ ID NO: 5688076 - DNA, 25 bp, Homo sapien
gggcattcacgcagggctttcacta

SEQ ID NO: 5688077 - DNA, 25 bp, Homo sapien
aaactcacagtctcgtgaagggcat

SEQ ID NO: 5688078 - DNA, 25 bp, Homo sapien
ctcgtgaagggcattcacgcagggc

SEQ ID NO: 5688079 - DNA, 25 bp, Homo sapien
gggccgggcgccgtaatcccagcac

SEQ ID NO: 5688080 - DNA, 25 bp, Homo sapien
ctgggccgggcgccgtaatcccagc

SEQ ID NO: 5688081 - DNA, 25 bp, Homo sapien
ttctgggccgggcgccgtaatccca

SEQ ID NO: 5688082 - DNA, 25 bp, Homo sapien
tgggccgggcgccgtaatcccagca

SEQ ID NO: 5688083 - DNA, 25 bp, Homo sapien
tctgggccgggcgccgtaatcccag

SEQ ID NO: 5688084 - DNA, 25 bp, Homo sapien
aactgtggttctgggccgggcgccg

SEQ ID NO: 5688085 - DNA, 25 bp, Homo sapien
tgctgggattacggcgcccggccca

SEQ ID NO: 5688086 - DNA, 25 bp, Homo sapien
tgggattacggcgcccggcccagaa

SEQ ID NO: 5688087 - DNA, 25 bp, Homo sapien
gtgctgggattacggcgcccggccc

SEQ ID NO: 5688088 - DNA, 25 bp, Homo sapien
gctgggattacggcgcccggcccag

SEQ ID NO: 5688089 - DNA, 25 bp, Homo sapien
ctgggattacggcgcccggcccaga

SEQ ID NO: 5688090 - DNA, 25 bp, Homo sapien
cggcgcccggcccagaaccacagtt

SEQ ID NO: 5688091 - DNA, 25 bp, Homo sapien
ccaacatgtccaaaccccagctcta

SEQ ID NO: 5688092 - DNA, 25 bp, Homo sapien
ggccaacatgtccaaaccccagctc

SEQ ID NO: 5688093 - DNA, 25 bp, Homo sapien
tggccaacatgtccaaaccccagct

SEQ ID NO: 5688094 - DNA, 25 bp, Homo sapien
gccaacatgtccaaaccccagctct

SEQ ID NO: 5688095 - DNA, 25 bp, Homo sapien
agagctggggtttggacatgttggc

SEQ ID NO: 5688096 - DNA, 25 bp, Homo sapien
gagctggggtttggacatgttggcc

SEQ ID NO: 5688097 - DNA, 25 bp, Homo sapien
agctggggtttggacatgttggcca

SEQ ID NO: 5688098 - DNA, 25 bp, Homo sapien
tagagctggggtttggacatgttgg

SEQ ID NO: 5688099 - DNA, 25 bp, Homo sapien
aaactgtggttcctactctggggtg

SEQ ID NO: 5688100 - DNA, 25 bp, Homo sapien
aactgtggttcctactctggggtgg

SEQ ID NO: 5688101 - DNA, 25 bp, Homo sapien
caccccagagtaggaaccacagttt

SEQ ID NO: 5688102 - DNA, 25 bp, Homo sapien
ccaccccagagtaggaaccacagtt

SEQ ID NO: 5688103 - DNA, 25 bp, Homo sapien
gcctggaaggcagtgagactccatc

SEQ ID NO: 5688104 - DNA, 25 bp, Homo sapien
aaactgtggttcctactctggggtg

SEQ ID NO: 5688105 - DNA, 25 bp, Homo sapien
ctgtggttcctactctggggtggtt

SEQ ID NO: 5688106 - DNA, 25 bp, Homo sapien
ctactctggggtggttggtttcctg

SEQ ID NO: 5688107 - DNA, 25 bp, Homo sapien
aactgtggttcctactctggggtgg

SEQ ID NO: 5688108 - DNA, 25 bp, Homo sapien
caaaaaactgtggttcctactctgg

SEQ ID NO: 5688109 - DNA, 25 bp, Homo sapien
accaccccagagtaggaaccacagt

SEQ ID NO: 5688110 - DNA, 25 bp, Homo sapien
caggaaaccaaccaccccagagtag

SEQ ID NO: 5688111 - DNA, 25 bp, Homo sapien
caccccagagtaggaaccacagttt

SEQ ID NO: 5688112 - DNA, 25 bp, Homo sapien
aaccaccccagagtaggaaccacag

SEQ ID NO: 5688113 - DNA, 25 bp, Homo sapien
gatggagtctcactgccttccaggc

SEQ ID NO: 5688114 - DNA, 25 bp, Homo sapien
ccaccccagagtaggaaccacagtt

SEQ ID NO: 5688115 - DNA, 25 bp, Homo sapien
gaccagcctgctcaaaacagtgaaa

SEQ ID NO: 5688116 - DNA, 25 bp, Homo sapien
cctgctcaaaacagtgaaacccctt

SEQ ID NO: 5688117 - DNA, 25 bp, Homo sapien
ctgctcaaaacagtgaaaccccttt

SEQ ID NO: 5688118 - DNA, 25 bp, Homo sapien
accagcctgctcaaaacagtgaaac

SEQ ID NO: 5688119 - DNA, 25 bp, Homo sapien
gcctgctcaaaacagtgaaacccct

SEQ ID NO: 5688120 - DNA, 25 bp, Homo sapien
cagcctgctcaaaacagtgaaaccc

SEQ ID NO: 5688121 - DNA, 25 bp, Homo sapien
aggggtttcactgttttgagcaggc

SEQ ID NO: 5688122 - DNA, 25 bp, Homo sapien
gggtttcactgttttgagcaggctg

SEQ ID NO: 5688123 - DNA, 25 bp, Homo sapien
gtttcactgttttgagcaggctggt

SEQ ID NO: 5688124 - DNA, 25 bp, Homo sapien
tttcactgttttgagcaggctggtc

SEQ ID NO: 5688125 - DNA, 25 bp, Homo sapien
aaaggggtttcactgttttgagcag

SEQ ID NO: 5688126 - DNA, 25 bp, Homo sapien
aaggggtttcactgttttgagcagg

SEQ ID NO: 5688127 - DNA, 25 bp, Homo sapien
aaaaaaactaggccaggcgcagtgg

SEQ ID NO: 5688128 - DNA, 25 bp, Homo sapien
aaaaaactaggccaggcgcagtggc

SEQ ID NO: 5688129 - DNA, 25 bp, Homo sapien
gggaggccaagacaggcggatcaca

SEQ ID NO: 5688130 - DNA, 25 bp, Homo sapien
aaaaaaaactaggccaggcgcagtg

SEQ ID NO: 5688131 - DNA, 25 bp, Homo sapien
aaaaactaggccaggcgcagtggct

SEQ ID NO: 5688132 - DNA, 25 bp, Homo sapien
aaaactaggccaggcgcagtggctc

SEQ ID NO: 5688133 - DNA, 25 bp, Homo sapien
gagccactgcgcctggcctagtttt

SEQ ID NO: 5688134 - DNA, 25 bp, Homo sapien
ccactgcgcctggcctagttttttt

SEQ ID NO: 5688135 - DNA, 25 bp, Homo sapien
cactgcgcctggcctagtttttttt

SEQ ID NO: 5688136 - DNA, 25 bp, Homo sapien
agccactgcgcctggcctagttttt

SEQ ID NO: 5688137 - DNA, 25 bp, Homo sapien
gccactgcgcctggcctagtttttt

SEQ ID NO: 5688138 - DNA, 25 bp, Homo sapien
tgtgatccgcctgtcttggcctccc

SEQ ID NO: 5688139 - DNA, 25 bp, Homo sapien
atttgaacctcggagtcgtaggttg

SEQ ID NO: 5688140 - DNA, 25 bp, Homo sapien
tttgaacctcggagtcgtaggttgc

SEQ ID NO: 5688141 - DNA, 25 bp, Homo sapien
caacctacgactccgaggttcaaat

SEQ ID NO: 5688142 - DNA, 25 bp, Homo sapien
gcaacctacgactccgaggttcaaa

SEQ ID NO: 5688143 - DNA, 25 bp, Homo sapien
accatttgaacctcggagtcgtagg

SEQ ID NO: 5688144 - DNA, 25 bp, Homo sapien
gaaccatttgaacctcggagtcgta

SEQ ID NO: 5688145 - DNA, 25 bp, Homo sapien
aaccatttgaacctcggagtcgtag

SEQ ID NO: 5688146 - DNA, 25 bp, Homo sapien
agaaccatttgaacctcggagtcgt

SEQ ID NO: 5688147 - DNA, 25 bp, Homo sapien
atttgaacctcggagtcgtaggttg

SEQ ID NO: 5688148 - DNA, 25 bp, Homo sapien
tttgaacctcggagtcgtaggttgc

SEQ ID NO: 5688149 - DNA, 25 bp, Homo sapien
cctacgactccgaggttcaaatggt

SEQ ID NO: 5688150 - DNA, 25 bp, Homo sapien
tacgactccgaggttcaaatggttc

SEQ ID NO: 5688151 - DNA, 25 bp, Homo sapien
caacctacgactccgaggttcaaat

SEQ ID NO: 5688152 - DNA, 25 bp, Homo sapien
ctacgactccgaggttcaaatggtt

SEQ ID NO: 5688153 - DNA, 25 bp, Homo sapien
gcaacctacgactccgaggttcaaa

SEQ ID NO: 5688154 - DNA, 25 bp, Homo sapien
acgactccgaggttcaaatggttct

SEQ ID NO: 5688155 - DNA, 25 bp, Homo sapien
gacttggtaaagtcacctgttcagg

SEQ ID NO: 5688156 - DNA, 25 bp, Homo sapien
tttagcgacttggtaaagtcacctg

SEQ ID NO: 5688157 - DNA, 25 bp, Homo sapien
gtggatggggcttacatccaagtcc

SEQ ID NO: 5688158 - DNA, 25 bp, Homo sapien
aggaagtgtactttttagcgacttg

SEQ ID NO: 5688159 - DNA, 25 bp, Homo sapien
gcgacttggtaaagtcacctgttca

SEQ ID NO: 5688160 - DNA, 25 bp, Homo sapien
tagcgacttggtaaagtcacctgtt

SEQ ID NO: 5688161 - DNA, 25 bp, Homo sapien
caggtgactttaccaagtcgctaaa

SEQ ID NO: 5688162 - DNA, 25 bp, Homo sapien
cctgaacaggtgactttaccaagtc

SEQ ID NO: 5688163 - DNA, 25 bp, Homo sapien
gacttggatgtaagccccatccacc

SEQ ID NO: 5688164 - DNA, 25 bp, Homo sapien
caagtcgctaaaaagtacacttcct

SEQ ID NO: 5688165 - DNA, 25 bp, Homo sapien
gaacaggtgactttaccaagtcgct

SEQ ID NO: 5688166 - DNA, 25 bp, Homo sapien
ggacttggatgtaagccccatccac

SEQ ID NO: 5688167 - DNA, 25 bp, Homo sapien
tgtcaggctcatatcccccttctct

SEQ ID NO: 5688168 - DNA, 25 bp, Homo sapien
tggatgtcaggctcatatccccctt

SEQ ID NO: 5688169 - DNA, 25 bp, Homo sapien
gtcaggctcatatcccccttctctc

SEQ ID NO: 5688170 - DNA, 25 bp, Homo sapien
ggatgtcaggctcatatcccccttc

SEQ ID NO: 5688171 - DNA, 25 bp, Homo sapien
ctggatgtcaggctcatatccccct

SEQ ID NO: 5688172 - DNA, 25 bp, Homo sapien
gatgtcaggctcatatcccccttct

SEQ ID NO: 5688173 - DNA, 25 bp, Homo sapien
agggggatatgagcctgacatccag

SEQ ID NO: 5688174 - DNA, 25 bp, Homo sapien
gaagggggatatgagcctgacatcc

SEQ ID NO: 5688175 - DNA, 25 bp, Homo sapien
gagagaagggggatatgagcctgac

SEQ ID NO: 5688176 - DNA, 25 bp, Homo sapien
agaagggggatatgagcctgacatc

SEQ ID NO: 5688177 - DNA, 25 bp, Homo sapien
aagggggatatgagcctgacatcca

SEQ ID NO: 5688178 - DNA, 25 bp, Homo sapien
gagaagggggatatgagcctgacat

SEQ ID NO: 5688179 - DNA, 25 bp, Homo sapien
ggctggatgtcaggctcatatcccc

SEQ ID NO: 5688180 - DNA, 25 bp, Homo sapien
tgtcaggctcatatcccccttctct

SEQ ID NO: 5688181 - DNA, 25 bp, Homo sapien
tggatgtcaggctcatatccccctt

SEQ ID NO: 5688182 - DNA, 25 bp, Homo sapien
ccccttctctctagaaccctctgca

SEQ ID NO: 5688183 - DNA, 25 bp, Homo sapien
ctggatgtcaggctcatatccccct

SEQ ID NO: 5688184 - DNA, 25 bp, Homo sapien
gatgtcaggctcatatcccccttct

SEQ ID NO: 5688185 - DNA, 25 bp, Homo sapien
cctgcagagggttctagagagaagg

SEQ ID NO: 5688186 - DNA, 25 bp, Homo sapien
ggatatgagcctgacatccagcccc

SEQ ID NO: 5688187 - DNA, 25 bp, Homo sapien
agaagggggatatgagcctgacatc

SEQ ID NO: 5688188 - DNA, 25 bp, Homo sapien
gcattcctcccctttcctcatacct

SEQ ID NO: 5688189 - DNA, 25 bp, Homo sapien
gacatccagccccatgcattcctcc

SEQ ID NO: 5688190 - DNA, 25 bp, Homo sapien
aagggggatatgagcctgacatcca

SEQ ID NO: 5688191 - DNA, 25 bp, Homo sapien
gaatttatattcacagcaatagtcg

SEQ ID NO: 5688192 - DNA, 25 bp, Homo sapien
cctgaacactgcaggtgtctttaaa

SEQ ID NO: 5688193 - DNA, 25 bp, Homo sapien
tgtgttttccctgaacactgcaggt

SEQ ID NO: 5688194 - DNA, 25 bp, Homo sapien
ccccaggaaggaatttatattcaca

SEQ ID NO: 5688195 - DNA, 25 bp, Homo sapien
aacactgcaggtgtctttaaaaaca

SEQ ID NO: 5688196 - DNA, 25 bp, Homo sapien
ttttccctgaacactgcaggtgtct

SEQ ID NO: 5688197 - DNA, 25 bp, Homo sapien
cacctgcagtgttcagggaaaacac

SEQ ID NO: 5688198 - DNA, 25 bp, Homo sapien
tgtttttaaagacacctgcagtgtt

SEQ ID NO: 5688199 - DNA, 25 bp, Homo sapien
ttaaagacacctgcagtgttcaggg

SEQ ID NO: 5688200 - DNA, 25 bp, Homo sapien
gactattgctgtgaatataaattcc

SEQ ID NO: 5688201 - DNA, 25 bp, Homo sapien
cctgcagtgttcagggaaaacacaa

SEQ ID NO: 5688202 - DNA, 25 bp, Homo sapien
ctgtgaatataaattccttcctggg

SEQ ID NO: 5688203 - DNA, 25 bp, Homo sapien
gtgcccggccgtctagcagtttgct

SEQ ID NO: 5688204 - DNA, 25 bp, Homo sapien
tcagcatcccgaagtgttacaggcg

SEQ ID NO: 5688205 - DNA, 25 bp, Homo sapien
gccgtctagcagtttgctgttgagg

SEQ ID NO: 5688206 - DNA, 25 bp, Homo sapien
tcccgaagtgttacaggcgcaagcc

SEQ ID NO: 5688207 - DNA, 25 bp, Homo sapien
gcatcccgaagtgttacaggcgcaa

SEQ ID NO: 5688208 - DNA, 25 bp, Homo sapien
gcccggccgtctagcagtttgctgt

SEQ ID NO: 5688209 - DNA, 25 bp, Homo sapien
tgcgcctgtaacacttcgggatgct

SEQ ID NO: 5688210 - DNA, 25 bp, Homo sapien
tcaacagcaaactgctagacggccg

SEQ ID NO: 5688211 - DNA, 25 bp, Homo sapien
cctcaacagcaaactgctagacggc

SEQ ID NO: 5688212 - DNA, 25 bp, Homo sapien
ggcttgcgcctgtaacacttcggga

SEQ ID NO: 5688213 - DNA, 25 bp, Homo sapien
gcctgtaacacttcgggatgctgag

SEQ ID NO: 5688214 - DNA, 25 bp, Homo sapien
agcaaactgctagacggccgggcac

SEQ ID NO: 5688215 - DNA, 25 bp, Homo sapien
cctgtcactggggacgcaacttcag

SEQ ID NO: 5688216 - DNA, 25 bp, Homo sapien
tcttgtgaccctctatctgattgca

SEQ ID NO: 5688217 - DNA, 25 bp, Homo sapien
ctggggacgcaacttcagcctgtgt

SEQ ID NO: 5688218 - DNA, 25 bp, Homo sapien
gctcttgtgaccctctatctgattg

SEQ ID NO: 5688219 - DNA, 25 bp, Homo sapien
gtgtgtctggacacttgctcttgtg

SEQ ID NO: 5688220 - DNA, 25 bp, Homo sapien
tgtgaccctctatctgattgcaaat

SEQ ID NO: 5688221 - DNA, 25 bp, Homo sapien
caggctgaagttgcgtccccagtga

SEQ ID NO: 5688222 - DNA, 25 bp, Homo sapien
ctgaagttgcgtccccagtgacagg

SEQ ID NO: 5688223 - DNA, 25 bp, Homo sapien
acacaggctgaagttgcgtccccag

SEQ ID NO: 5688224 - DNA, 25 bp, Homo sapien
cacaagagcaagtgtccagacacac

SEQ ID NO: 5688225 - DNA, 25 bp, Homo sapien
caatcagatagagggtcacaagagc

SEQ ID NO: 5688226 - DNA, 25 bp, Homo sapien
atttgcaatcagatagagggtcaca

SEQ ID NO: 5688227 - DNA, 25 bp, Homo sapien
tctcagtgggcctatgggtgacaac

SEQ ID NO: 5688228 - DNA, 25 bp, Homo sapien
tcttgtctcagtgggcctatgggtg

SEQ ID NO: 5688229 - DNA, 25 bp, Homo sapien
tcagtgggcctatgggtgacaacgt

SEQ ID NO: 5688230 - DNA, 25 bp, Homo sapien
ctggaggaccgcagtctgtccttct

SEQ ID NO: 5688231 - DNA, 25 bp, Homo sapien
gaggaccgcagtctgtccttctagc

SEQ ID NO: 5688232 - DNA, 25 bp, Homo sapien
tatgggtgacaacgtggctggcagc

SEQ ID NO: 5688233 - DNA, 25 bp, Homo sapien
agaaggacagactgcggtcctccag

SEQ ID NO: 5688234 - DNA, 25 bp, Homo sapien
cacccataggcccactgagacaaga

SEQ ID NO: 5688235 - DNA, 25 bp, Homo sapien
gttgtcacccataggcccactgaga

SEQ ID NO: 5688236 - DNA, 25 bp, Homo sapien
gctgccagccacgttgtcacccata

SEQ ID NO: 5688237 - DNA, 25 bp, Homo sapien
acgttgtcacccataggcccactga

SEQ ID NO: 5688238 - DNA, 25 bp, Homo sapien
gctagaaggacagactgcggtcctc

SEQ ID NO: 5688239 - DNA, 25 bp, Homo sapien
tgcacaggcgctcgtgaggctgcct

SEQ ID NO: 5688240 - DNA, 25 bp, Homo sapien
gctgtcttcctaggccatctggctg

SEQ ID NO: 5688241 - DNA, 25 bp, Homo sapien
ctgctgtcttcctaggccatctggc

SEQ ID NO: 5688242 - DNA, 25 bp, Homo sapien
tgctgtcttcctaggccatctggct

SEQ ID NO: 5688243 - DNA, 25 bp, Homo sapien
ctgtcttcctaggccatctggctgc

SEQ ID NO: 5688244 - DNA, 25 bp, Homo sapien
cctgctgtcttcctaggccatctgg

SEQ ID NO: 5688245 - DNA, 25 bp, Homo sapien
gccagatggcctaggaagacagcag

SEQ ID NO: 5688246 - DNA, 25 bp, Homo sapien
ccagatggcctaggaagacagcagg

SEQ ID NO: 5688247 - DNA, 25 bp, Homo sapien
gcagccagatggcctaggaagacag

SEQ ID NO: 5688248 - DNA, 25 bp, Homo sapien
agccagatggcctaggaagacagca

SEQ ID NO: 5688249 - DNA, 25 bp, Homo sapien
ggaaggcagcctcacgagcgcctgt

SEQ ID NO: 5688250 - DNA, 25 bp, Homo sapien
cagccagatggcctaggaagacagc

SEQ ID NO: 5688251 - DNA, 25 bp, Homo sapien
aggtgggtgagggcactccggttgg

SEQ ID NO: 5688252 - DNA, 25 bp, Homo sapien
aaggtgggtgagggcactccggttg

SEQ ID NO: 5688253 - DNA, 25 bp, Homo sapien
caaggtgggtgagggcactccggtt

SEQ ID NO: 5688254 - DNA, 25 bp, Homo sapien
caaccggagtgccctcacccacctt

SEQ ID NO: 5688255 - DNA, 25 bp, Homo sapien
ccaaccggagtgccctcacccacct

SEQ ID NO: 5688256 - DNA, 25 bp, Homo sapien
aaccggagtgccctcacccaccttg

SEQ ID NO: 5688257 - DNA, 25 bp, Homo sapien
gttgggcatttgtgggggtccttca

SEQ ID NO: 5688258 - DNA, 25 bp, Homo sapien
tcagaattcagagctgtgtgtctcc

SEQ ID NO: 5688259 - DNA, 25 bp, Homo sapien
agaattcagagctgtgtgtctcctt

SEQ ID NO: 5688260 - DNA, 25 bp, Homo sapien
catcaatgctgccaaggtgggtgag

SEQ ID NO: 5688261 - DNA, 25 bp, Homo sapien
gtccttcagaattcagagctgtgtg

SEQ ID NO: 5688262 - DNA, 25 bp, Homo sapien
gggtccttcagaattcagagctgtg

SEQ ID NO: 5688263 - DNA, 25 bp, Homo sapien
acagctctgaattctgaaggacccc

SEQ ID NO: 5688264 - DNA, 25 bp, Homo sapien
gagacacacagctctgaattctgaa

SEQ ID NO: 5688265 - DNA, 25 bp, Homo sapien
aaggagacacacagctctgaattct

SEQ ID NO: 5688266 - DNA, 25 bp, Homo sapien
cacacagctctgaattctgaaggac

SEQ ID NO: 5688267 - DNA, 25 bp, Homo sapien
cacagctctgaattctgaaggaccc

SEQ ID NO: 5688268 - DNA, 25 bp, Homo sapien
aattctgaaggacccccacaaatgc

SEQ ID NO: 5688269 - DNA, 25 bp, Homo sapien
ttgtccgggaacccagagctcacag

SEQ ID NO: 5688270 - DNA, 25 bp, Homo sapien
attgtccgggaacccagagctcaca

SEQ ID NO: 5688271 - DNA, 25 bp, Homo sapien
gatctgtgcccccagttccagcggg

SEQ ID NO: 5688272 - DNA, 25 bp, Homo sapien
cacagccacgatcttagacccgagc

SEQ ID NO: 5688273 - DNA, 25 bp, Homo sapien
cgatcttagacccgagcccacagag

SEQ ID NO: 5688274 - DNA, 25 bp, Homo sapien
ccattgtccgggaacccagagctca

SEQ ID NO: 5688275 - DNA, 25 bp, Homo sapien
tgtgagctctgggttcccggacaat

SEQ ID NO: 5688276 - DNA, 25 bp, Homo sapien
ctctgtgggctcgggtctaagatcg

SEQ ID NO: 5688277 - DNA, 25 bp, Homo sapien
cccgctggaactgggggcacagatc

SEQ ID NO: 5688278 - DNA, 25 bp, Homo sapien
gctcgggtctaagatcgtggctgtg

SEQ ID NO: 5688279 - DNA, 25 bp, Homo sapien
tgagctctgggttcccggacaatgg

SEQ ID NO: 5688280 - DNA, 25 bp, Homo sapien
gttccccgctggaactgggggcaca

SEQ ID NO: 5688281 - DNA, 25 bp, Homo sapien
gccctttaggccgtggatgtttgct

SEQ ID NO: 5688282 - DNA, 25 bp, Homo sapien
ctaaattctcaagcccacatttggg

SEQ ID NO: 5688283 - DNA, 25 bp, Homo sapien
aatcctgccgctgggaatacctaaa

SEQ ID NO: 5688284 - DNA, 25 bp, Homo sapien
cctttaggccgtggatgtttgctcc

SEQ ID NO: 5688285 - DNA, 25 bp, Homo sapien
cctgccgctgggaatacctaaattc

SEQ ID NO: 5688286 - DNA, 25 bp, Homo sapien
gaatacctaaattctcaagcccaca

SEQ ID NO: 5688287 - DNA, 25 bp, Homo sapien
tgtgggcttgagaatttaggtattc

SEQ ID NO: 5688288 - DNA, 25 bp, Homo sapien
gaatttaggtattcccagcggcagg

SEQ ID NO: 5688289 - DNA, 25 bp, Homo sapien
cccaaatgtgggcttgagaatttag

SEQ ID NO: 5688290 - DNA, 25 bp, Homo sapien
gagcaaacatccacggcctaaaggg

SEQ ID NO: 5688291 - DNA, 25 bp, Homo sapien
tttaggtattcccagcggcaggatt

SEQ ID NO: 5688292 - DNA, 25 bp, Homo sapien
ggagcaaacatccacggcctaaagg

SEQ ID NO: 5688293 - DNA, 25 bp, Homo sapien
tggatctcacattctagcgcccaga

SEQ ID NO: 5688294 - DNA, 25 bp, Homo sapien
acatgtcgggaacgccttacgccaa

SEQ ID NO: 5688295 - DNA, 25 bp, Homo sapien
gcccagacatgtcgggaacgcctta

SEQ ID NO: 5688296 - DNA, 25 bp, Homo sapien
cattctagcgcccagacatgtcggg

SEQ ID NO: 5688297 - DNA, 25 bp, Homo sapien
acctctacattcaggctgggctctg

SEQ ID NO: 5688298 - DNA, 25 bp, Homo sapien
tgccaaggacctctacattcaggct

SEQ ID NO: 5688299 - DNA, 25 bp, Homo sapien
cagagcccagcctgaatgtagaggt

SEQ ID NO: 5688300 - DNA, 25 bp, Homo sapien
tcccgacatgtctgggcgctagaat

SEQ ID NO: 5688301 - DNA, 25 bp, Homo sapien
taaggcgttcccgacatgtctgggc

SEQ ID NO: 5688302 - DNA, 25 bp, Homo sapien
cagcctgaatgtagaggtccttggc

SEQ ID NO: 5688303 - DNA, 25 bp, Homo sapien
ttggcgtaaggcgttcccgacatgt

SEQ ID NO: 5688304 - DNA, 25 bp, Homo sapien
tctgggcgctagaatgtgagatcca

SEQ ID NO: 5688305 - DNA, 25 bp, Homo sapien
tggagtagggtcttgggcagatggc

SEQ ID NO: 5688306 - DNA, 25 bp, Homo sapien
ccatggagtagggtcttgggcagat

SEQ ID NO: 5688307 - DNA, 25 bp, Homo sapien
gaagcgggccatggagtagggtctt

SEQ ID NO: 5688308 - DNA, 25 bp, Homo sapien
cgggccatggagtagggtcttgggc

SEQ ID NO: 5688309 - DNA, 25 bp, Homo sapien
aagcgggccatggagtagggtcttg

SEQ ID NO: 5688310 - DNA, 25 bp, Homo sapien
gagtagggtcttgggcagatggcac

SEQ ID NO: 5688311 - DNA, 25 bp, Homo sapien
caagaccctactccatggcccgctt

SEQ ID NO: 5688312 - DNA, 25 bp, Homo sapien
ggtgccatctgcccaagaccctact

SEQ ID NO: 5688313 - DNA, 25 bp, Homo sapien
catctgcccaagaccctactccatg

SEQ ID NO: 5688314 - DNA, 25 bp, Homo sapien
gtgccatctgcccaagaccctactc

SEQ ID NO: 5688315 - DNA, 25 bp, Homo sapien
aagaccctactccatggcccgcttc

SEQ ID NO: 5688316 - DNA, 25 bp, Homo sapien
atctgcccaagaccctactccatgg

SEQ ID NO: 5688317 - DNA, 25 bp, Homo sapien
gggcagagcctctatgaagtgagcc

SEQ ID NO: 5688318 - DNA, 25 bp, Homo sapien
gaagcgggccatggagtagggtctt

SEQ ID NO: 5688319 - DNA, 25 bp, Homo sapien
gaggataaggccttgggaagctggg

SEQ ID NO: 5688320 - DNA, 25 bp, Homo sapien
cagagcctctatgaagtgagccctc

SEQ ID NO: 5688321 - DNA, 25 bp, Homo sapien
tggcacctgaggaggataaggcctt

SEQ ID NO: 5688322 - DNA, 25 bp, Homo sapien
gagtagggtcttgggcagatggcac

SEQ ID NO: 5688323 - DNA, 25 bp, Homo sapien
tcaggtgccatctgcccaagaccct

SEQ ID NO: 5688324 - DNA, 25 bp, Homo sapien
gagggctcacttcatagaggctctg

SEQ ID NO: 5688325 - DNA, 25 bp, Homo sapien
tcacttcatagaggctctgccccag

SEQ ID NO: 5688326 - DNA, 25 bp, Homo sapien
aaggccttatcctcctcaggtgcca

SEQ ID NO: 5688327 - DNA, 25 bp, Homo sapien
aagaccctactccatggcccgcttc

SEQ ID NO: 5688328 - DNA, 25 bp, Homo sapien
atctgcccaagaccctactccatgg

SEQ ID NO: 5688329 - DNA, 25 bp, Homo sapien
aaatctgccactgggtaggtgtgcc

SEQ ID NO: 5688330 - DNA, 25 bp, Homo sapien
actgaaatctgccactgggtaggtg

SEQ ID NO: 5688331 - DNA, 25 bp, Homo sapien
gaaatctgccactgggtaggtgtgc

SEQ ID NO: 5688332 - DNA, 25 bp, Homo sapien
atctgccactgggtaggtgtgcctg

SEQ ID NO: 5688333 - DNA, 25 bp, Homo sapien
ctgccactgggtaggtgtgcctggc

SEQ ID NO: 5688334 - DNA, 25 bp, Homo sapien
tgaaatctgccactgggtaggtgtg

SEQ ID NO: 5688335 - DNA, 25 bp, Homo sapien
acacctacccagtggcagatttcag

SEQ ID NO: 5688336 - DNA, 25 bp, Homo sapien
cacctacccagtggcagatttcagt

SEQ ID NO: 5688337 - DNA, 25 bp, Homo sapien
gccaggcacacctacccagtggcag

SEQ ID NO: 5688338 - DNA, 25 bp, Homo sapien
ggcacacctacccagtggcagattt

SEQ ID NO: 5688339 - DNA, 25 bp, Homo sapien
cacacctacccagtggcagatttca

SEQ ID NO: 5688340 - DNA, 25 bp, Homo sapien
caggcacacctacccagtggcagat

SEQ ID NO: 5688341 - DNA, 25 bp, Homo sapien
aagaggggcacgaccagggcagtgt

SEQ ID NO: 5688342 - DNA, 25 bp, Homo sapien
gaagaggggcacgaccagggcagtg

SEQ ID NO: 5688343 - DNA, 25 bp, Homo sapien
gaggggcacgaccagggcagtgtgg

SEQ ID NO: 5688344 - DNA, 25 bp, Homo sapien
agaggggcacgaccagggcagtgtg

SEQ ID NO: 5688345 - DNA, 25 bp, Homo sapien
agaagaggggcacgaccagggcagt

SEQ ID NO: 5688346 - DNA, 25 bp, Homo sapien
ggagaagaggggcacgaccagggca

SEQ ID NO: 5688347 - DNA, 25 bp, Homo sapien
cacactgccctggtcgtgcccctct

SEQ ID NO: 5688348 - DNA, 25 bp, Homo sapien
tgccctggtcgtgcccctcttctcc

SEQ ID NO: 5688349 - DNA, 25 bp, Homo sapien
acactgccctggtcgtgcccctctt

SEQ ID NO: 5688350 - DNA, 25 bp, Homo sapien
ctgccctggtcgtgcccctcttctc

SEQ ID NO: 5688351 - DNA, 25 bp, Homo sapien
ccacactgccctggtcgtgcccctc

SEQ ID NO: 5688352 - DNA, 25 bp, Homo sapien
actgccctggtcgtgcccctcttct

SEQ ID NO: 5688353 - DNA, 25 bp, Homo sapien
agcctcccaggggaccggtctctgg

SEQ ID NO: 5688354 - DNA, 25 bp, Homo sapien
cggtctctgggtttcctcgagggtg

SEQ ID NO: 5688355 - DNA, 25 bp, Homo sapien
ttcctcgagggtggggttggcctga

SEQ ID NO: 5688356 - DNA, 25 bp, Homo sapien
gcacgaccagggcagtgtggattgg

SEQ ID NO: 5688357 - DNA, 25 bp, Homo sapien
ccagggcagtgtggattgggacaga

SEQ ID NO: 5688358 - DNA, 25 bp, Homo sapien
ggagaagaggggcacgaccagggca

SEQ ID NO: 5688359 - DNA, 25 bp, Homo sapien
ccagagaccggtcccctgggaggct

SEQ ID NO: 5688360 - DNA, 25 bp, Homo sapien
caccctcgaggaaacccagagaccg

SEQ ID NO: 5688361 - DNA, 25 bp, Homo sapien
atctgtcccaatccacactgccctg

SEQ ID NO: 5688362 - DNA, 25 bp, Homo sapien
acactgccctggtcgtgcccctctt

SEQ ID NO: 5688363 - DNA, 25 bp, Homo sapien
tcaggccaaccccaccctcgaggaa

SEQ ID NO: 5688364 - DNA, 25 bp, Homo sapien
actgccctggtcgtgcccctcttct

SEQ ID NO: 5688365 - DNA, 25 bp, Homo sapien
tgatggttctgtagtgctgcccgtt

SEQ ID NO: 5688366 - DNA, 25 bp, Homo sapien
gatggttctgtagtgctgcccgttg

SEQ ID NO: 5688367 - DNA, 25 bp, Homo sapien
ttctgtagtgctgcccgttggaggc

SEQ ID NO: 5688368 - DNA, 25 bp, Homo sapien
ggaagataacggctggggtctggag

SEQ ID NO: 5688369 - DNA, 25 bp, Homo sapien
tggttctgtagtgctgcccgttgga

SEQ ID NO: 5688370 - DNA, 25 bp, Homo sapien
tagtgctgcccgttggaggccccgc

SEQ ID NO: 5688371 - DNA, 25 bp, Homo sapien
caacgggcagcactacagaaccatc

SEQ ID NO: 5688372 - DNA, 25 bp, Homo sapien
tccaacgggcagcactacagaacca

SEQ ID NO: 5688373 - DNA, 25 bp, Homo sapien
gcctccaacgggcagcactacagaa

SEQ ID NO: 5688374 - DNA, 25 bp, Homo sapien
ctccagaccccagccgttatcttcc

SEQ ID NO: 5688375 - DNA, 25 bp, Homo sapien
aacgggcagcactacagaaccatca

SEQ ID NO: 5688376 - DNA, 25 bp, Homo sapien
gcggggcctccaacgggcagcacta

SEQ ID NO: 5688377 - DNA, 25 bp, Homo sapien
ctgcaaccagacccccttctcctgc

SEQ ID NO: 5688378 - DNA, 25 bp, Homo sapien
ctgcgcagtacaacccggagccccc

SEQ ID NO: 5688379 - DNA, 25 bp, Homo sapien
tgcgcagtacaacccggagcccccg

SEQ ID NO: 5688380 - DNA, 25 bp, Homo sapien
cggctgcgcagtacaacccggagcc

SEQ ID NO: 5688381 - DNA, 25 bp, Homo sapien
ggctgcgcagtacaacccggagccc

SEQ ID NO: 5688382 - DNA, 25 bp, Homo sapien
gctgcgcagtacaacccggagcccc

SEQ ID NO: 5688383 - DNA, 25 bp, Homo sapien
cgggggctccgggttgtactgcgca

SEQ ID NO: 5688384 - DNA, 25 bp, Homo sapien
gggctccgggttgtactgcgcagcc

SEQ ID NO: 5688385 - DNA, 25 bp, Homo sapien
ggggctccgggttgtactgcgcagc

SEQ ID NO: 5688386 - DNA, 25 bp, Homo sapien
ggctccgggttgtactgcgcagccg

SEQ ID NO: 5688387 - DNA, 25 bp, Homo sapien
gggggctccgggttgtactgcgcag

SEQ ID NO: 5688388 - DNA, 25 bp, Homo sapien
gcaggagaagggggtctggttgcag

SEQ ID NO: 5688389 - DNA, 25 bp, Homo sapien
ggtaagccccctctgcaaccagacc

SEQ ID NO: 5688390 - DNA, 25 bp, Homo sapien
ctgccaaggcctcttcgaggtccca

SEQ ID NO: 5688391 - DNA, 25 bp, Homo sapien
aggcggctgcgcagtacaacccgga

SEQ ID NO: 5688392 - DNA, 25 bp, Homo sapien
tcctgccaaggcctcttcgaggtcc

SEQ ID NO: 5688393 - DNA, 25 bp, Homo sapien
ttctcctgccaaggcctcttcgagg

SEQ ID NO: 5688394 - DNA, 25 bp, Homo sapien
tctgcaaccagacccccttctcctg

SEQ ID NO: 5688395 - DNA, 25 bp, Homo sapien
ggacctcgaagaggccttggcagga

SEQ ID NO: 5688396 - DNA, 25 bp, Homo sapien
tgggacctcgaagaggccttggcag

SEQ ID NO: 5688397 - DNA, 25 bp, Homo sapien
tctggttgcagagggggcttaccgg

SEQ ID NO: 5688398 - DNA, 25 bp, Homo sapien
caggagaagggggtctggttgcaga

SEQ ID NO: 5688399 - DNA, 25 bp, Homo sapien
cctcgaagaggccttggcaggagaa

SEQ ID NO: 5688400 - DNA, 25 bp, Homo sapien
tccgggttgtactgcgcagccgcct

SEQ ID NO: 5688401 - DNA, 25 bp, Homo sapien
tcttttcctcatcaagctgcccagc

SEQ ID NO: 5688402 - DNA, 25 bp, Homo sapien
cacatacgtgcaccccattcactac

SEQ ID NO: 5688403 - DNA, 25 bp, Homo sapien
cttttcctcatcaagctgcccagcc

SEQ ID NO: 5688404 - DNA, 25 bp, Homo sapien
ttagccatgccccacatacgtgcac

SEQ ID NO: 5688405 - DNA, 25 bp, Homo sapien
atgccccacatacgtgcaccccatt

SEQ ID NO: 5688406 - DNA, 25 bp, Homo sapien
ccacatacgtgcaccccattcacta

SEQ ID NO: 5688407 - DNA, 25 bp, Homo sapien
gggtgcacgtatgtggggcatggct

SEQ ID NO: 5688408 - DNA, 25 bp, Homo sapien
ggctgggcagcttgatgaggaaaag

SEQ ID NO: 5688409 - DNA, 25 bp, Homo sapien
gctgggcagcttgatgaggaaaaga

SEQ ID NO: 5688410 - DNA, 25 bp, Homo sapien
gtgcacgtatgtggggcatggctaa

SEQ ID NO: 5688411 - DNA, 25 bp, Homo sapien
aatggggtgcacgtatgtggggcat

SEQ ID NO: 5688412 - DNA, 25 bp, Homo sapien
tagtgaatggggtgcacgtatgtgg

SEQ ID NO: 5688413 - DNA, 25 bp, Homo sapien
tcattcttttcctcatcaagctgcc

SEQ ID NO: 5688414 - DNA, 25 bp, Homo sapien
cttttcctcatcaagctgcccagcc

SEQ ID NO: 5688415 - DNA, 25 bp, Homo sapien
ttagccatgccccacatacgtgcac

SEQ ID NO: 5688416 - DNA, 25 bp, Homo sapien
ccacatacgtgcaccccattcacta

SEQ ID NO: 5688417 - DNA, 25 bp, Homo sapien
ttcttttcctcatcaagctgcccag

SEQ ID NO: 5688418 - DNA, 25 bp, Homo sapien
ccactctgacttccccacccagggt

SEQ ID NO: 5688419 - DNA, 25 bp, Homo sapien
tcagagtgggctgggcagcttgatg

SEQ ID NO: 5688420 - DNA, 25 bp, Homo sapien
ggctgggcagcttgatgaggaaaag

SEQ ID NO: 5688421 - DNA, 25 bp, Homo sapien
gcagcttgatgaggaaaagaatgag

SEQ ID NO: 5688422 - DNA, 25 bp, Homo sapien
gtgcacgtatgtggggcatggctaa

SEQ ID NO: 5688423 - DNA, 25 bp, Homo sapien
ctgggcagcttgatgaggaaaagaa

SEQ ID NO: 5688424 - DNA, 25 bp, Homo sapien
tagtgaatggggtgcacgtatgtgg

SEQ ID NO: 5688425 - DNA, 25 bp, Homo sapien
ctgagctctcctccctttgcagccc

SEQ ID NO: 5688426 - DNA, 25 bp, Homo sapien
tctgagctctcctccctttgcagcc

SEQ ID NO: 5688427 - DNA, 25 bp, Homo sapien
cacgcacacattactccaacattga

SEQ ID NO: 5688428 - DNA, 25 bp, Homo sapien
tgctctgagctctcctccctttgca

SEQ ID NO: 5688429 - DNA, 25 bp, Homo sapien
cacacattactccaacattgaggcc

SEQ ID NO: 5688430 - DNA, 25 bp, Homo sapien
gctctgagctctcctccctttgcag

SEQ ID NO: 5688431 - DNA, 25 bp, Homo sapien
tcaatgttggagtaatgtgtgcgtg

SEQ ID NO: 5688432 - DNA, 25 bp, Homo sapien
tgcaaagggaggagagctcagagca

SEQ ID NO: 5688433 - DNA, 25 bp, Homo sapien
ggcctcaatgttggagtaatgtgtg

SEQ ID NO: 5688434 - DNA, 25 bp, Homo sapien
tgtgcgtgggggctgcaaagggagg

SEQ ID NO: 5688435 - DNA, 25 bp, Homo sapien
gggctgcaaagggaggagagctcag

SEQ ID NO: 5688436 - DNA, 25 bp, Homo sapien
gctgcaaagggaggagagctcagag

SEQ ID NO: 5688437 - DNA, 25 bp, Homo sapien
ctcagacccctttcagtcacccctg

SEQ ID NO: 5688438 - DNA, 25 bp, Homo sapien
atgacattctcagacccctttcagt

SEQ ID NO: 5688439 - DNA, 25 bp, Homo sapien
gacattctcagacccctttcagtca

SEQ ID NO: 5688440 - DNA, 25 bp, Homo sapien
ttctcagacccctttcagtcacccc

SEQ ID NO: 5688441 - DNA, 25 bp, Homo sapien
catgacattctcagacccctttcag

SEQ ID NO: 5688442 - DNA, 25 bp, Homo sapien
tgacattctcagacccctttcagtc

SEQ ID NO: 5688443 - DNA, 25 bp, Homo sapien
gactgaaaggggtctgagaatgtca

SEQ ID NO: 5688444 - DNA, 25 bp, Homo sapien
gggtgactgaaaggggtctgagaat

SEQ ID NO: 5688445 - DNA, 25 bp, Homo sapien
caggggtgactgaaaggggtctgag

SEQ ID NO: 5688446 - DNA, 25 bp, Homo sapien
ctgaaaggggtctgagaatgtcatg

SEQ ID NO: 5688447 - DNA, 25 bp, Homo sapien
actgaaaggggtctgagaatgtcat

SEQ ID NO: 5688448 - DNA, 25 bp, Homo sapien
tgactgaaaggggtctgagaatgtc

SEQ ID NO: 5688449 - DNA, 25 bp, Homo sapien
gacattctcagacccctttcagtca

SEQ ID NO: 5688450 - DNA, 25 bp, Homo sapien
ttgtggctgcccttgcacacacacc

SEQ ID NO: 5688451 - DNA, 25 bp, Homo sapien
catgacattctcagacccctttcag

SEQ ID NO: 5688452 - DNA, 25 bp, Homo sapien
gaccatgacaatcccagtgttccca

SEQ ID NO: 5688453 - DNA, 25 bp, Homo sapien
aatcccagtgttcccattctccatg

SEQ ID NO: 5688454 - DNA, 25 bp, Homo sapien
acccttgaccatgacaatcccagtg

SEQ ID NO: 5688455 - DNA, 25 bp, Homo sapien
ggtgtgtgtgcaagggcagccacaa

SEQ ID NO: 5688456 - DNA, 25 bp, Homo sapien
cactgggattgtcatggtcaagggt

SEQ ID NO: 5688457 - DNA, 25 bp, Homo sapien
tctgagaatgtcatggagaatggga

SEQ ID NO: 5688458 - DNA, 25 bp, Homo sapien
tgggaacactgggattgtcatggtc

SEQ ID NO: 5688459 - DNA, 25 bp, Homo sapien
catggagaatgggaacactgggatt

SEQ ID NO: 5688460 - DNA, 25 bp, Homo sapien
tgactgaaaggggtctgagaatgtc

SEQ ID NO: 5688461 - DNA, 25 bp, Homo sapien
agcagtcatttgtctcaagttatag

SEQ ID NO: 5688462 - DNA, 25 bp, Homo sapien
tcaagttatagataaaggtcaggca

SEQ ID NO: 5688463 - DNA, 25 bp, Homo sapien
aagaagcagtcatttgtctcaagtt

SEQ ID NO: 5688464 - DNA, 25 bp, Homo sapien
cagtcatttgtctcaagttatagat

SEQ ID NO: 5688465 - DNA, 25 bp, Homo sapien
gaagcagtcatttgtctcaagttat

SEQ ID NO: 5688466 - DNA, 25 bp, Homo sapien
gcagtcatttgtctcaagttataga

SEQ ID NO: 5688467 - DNA, 25 bp, Homo sapien
atctataacttgagacaaatgactg

SEQ ID NO: 5688468 - DNA, 25 bp, Homo sapien
tgcctgacctttatctataacttga

SEQ ID NO: 5688469 - DNA, 25 bp, Homo sapien
ctataacttgagacaaatgactgct

SEQ ID NO: 5688470 - DNA, 25 bp, Homo sapien
taacttgagacaaatgactgcttct

SEQ ID NO: 5688471 - DNA, 25 bp, Homo sapien
tataacttgagacaaatgactgctt

SEQ ID NO: 5688472 - DNA, 25 bp, Homo sapien
tctataacttgagacaaatgactgc

SEQ ID NO: 5688473 - DNA, 25 bp, Homo sapien
aataacaataacaaaaattagctgg

SEQ ID NO: 5688474 - DNA, 25 bp, Homo sapien
aaataacaataacaaaaattagctg

SEQ ID NO: 5688475 - DNA, 25 bp, Homo sapien
cagctaatttttgttattgttattt

SEQ ID NO: 5688476 - DNA, 25 bp, Homo sapien
ccagctaatttttgttattgttatt

SEQ ID NO: 5688477 - DNA, 25 bp, Homo sapien
cacatacgtgaaggtgtatgaggca

SEQ ID NO: 5688478 - DNA, 25 bp, Homo sapien
ccagccattagctgatcttggatac

SEQ ID NO: 5688479 - DNA, 25 bp, Homo sapien
ctgatcttggatacatgcatatttt

SEQ ID NO: 5688480 - DNA, 25 bp, Homo sapien
gaaggtgtatgaggcagtgtgcaca

SEQ ID NO: 5688481 - DNA, 25 bp, Homo sapien
cagggacacacgtgttatctgtaca

SEQ ID NO: 5688482 - DNA, 25 bp, Homo sapien
gtgttatctgtacatgggccagcca

SEQ ID NO: 5688483 - DNA, 25 bp, Homo sapien
tgtgcacactgcctcatacaccttc

SEQ ID NO: 5688484 - DNA, 25 bp, Homo sapien
gcctcatacaccttcacgtatgtgg

SEQ ID NO: 5688485 - DNA, 25 bp, Homo sapien
tggctggcccatgtacagataacac

SEQ ID NO: 5688486 - DNA, 25 bp, Homo sapien
gtatccaagatcagctaatggctgg

SEQ ID NO: 5688487 - DNA, 25 bp, Homo sapien
catgtacagataacacgtgtgtccc

SEQ ID NO: 5688488 - DNA, 25 bp, Homo sapien
aaaatatgcatgtatccaagatcag

SEQ ID NO: 5688489 - DNA, 25 bp, Homo sapien
caactctacctcttaaccaggttat

SEQ ID NO: 5688490 - DNA, 25 bp, Homo sapien
actctacctcttaaccaggttattg

SEQ ID NO: 5688491 - DNA, 25 bp, Homo sapien
tatacatgtcatgtaatcacagaca

SEQ ID NO: 5688492 - DNA, 25 bp, Homo sapien
tgtaatcacagacatattgcataga

SEQ ID NO: 5688493 - DNA, 25 bp, Homo sapien
gagcaaagcaatcccaactctacct

SEQ ID NO: 5688494 - DNA, 25 bp, Homo sapien
tctacctcttaaccaggttattgaa

SEQ ID NO: 5688495 - DNA, 25 bp, Homo sapien
aggtagagttgggattgctttgctc

SEQ ID NO: 5688496 - DNA, 25 bp, Homo sapien
ttcaataacctggttaagaggtaga

SEQ ID NO: 5688497 - DNA, 25 bp, Homo sapien
tcaataacctggttaagaggtagag

SEQ ID NO: 5688498 - DNA, 25 bp, Homo sapien
tgtctgtgattacatgacatgtata

SEQ ID NO: 5688499 - DNA, 25 bp, Homo sapien
tctatgcaatatgtctgtgattaca

SEQ ID NO: 5688500 - DNA, 25 bp, Homo sapien
caataacctggttaagaggtagagt

SEQ ID NO: 5688501 - DNA, 25 bp, Homo sapien
ctgaagtgcggtggtgccatcttgg

SEQ ID NO: 5688502 - DNA, 25 bp, Homo sapien
gaagtgcggtggtgccatcttggct

SEQ ID NO: 5688503 - DNA, 25 bp, Homo sapien
tgaagtgcggtggtgccatcttggc

SEQ ID NO: 5688504 - DNA, 25 bp, Homo sapien
gctgaagtgcggtggtgccatcttg

SEQ ID NO: 5688505 - DNA, 25 bp, Homo sapien
gctcactgctaactccacctcctag

SEQ ID NO: 5688506 - DNA, 25 bp, Homo sapien
aagtgcggtggtgccatcttggctc

SEQ ID NO: 5688507 - DNA, 25 bp, Homo sapien
caagatggcaccaccgcacttcagc

SEQ ID NO: 5688508 - DNA, 25 bp, Homo sapien
taggaggtggagttagcagtgagcc

SEQ ID NO: 5688509 - DNA, 25 bp, Homo sapien
gagccaagatggcaccaccgcactt

SEQ ID NO: 5688510 - DNA, 25 bp, Homo sapien
ccaagatggcaccaccgcacttcag

SEQ ID NO: 5688511 - DNA, 25 bp, Homo sapien
ctaggaggtggagttagcagtgagc

SEQ ID NO: 5688512 - DNA, 25 bp, Homo sapien
gccaagatggcaccaccgcacttca

SEQ ID NO: 5688513 - DNA, 25 bp, Homo sapien
caggtgtgcgctactacagctggcc

SEQ ID NO: 5688514 - DNA, 25 bp, Homo sapien
cgctactacagctggccaatttttg

SEQ ID NO: 5688515 - DNA, 25 bp, Homo sapien
aggtgtgcgctactacagctggcca

SEQ ID NO: 5688516 - DNA, 25 bp, Homo sapien
ggtgtgcgctactacagctggccaa

SEQ ID NO: 5688517 - DNA, 25 bp, Homo sapien
gtgcgctactacagctggccaattt

SEQ ID NO: 5688518 - DNA, 25 bp, Homo sapien
tgtgcgctactacagctggccaatt

SEQ ID NO: 5688519 - DNA, 25 bp, Homo sapien
aaattggccagctgtagtagcgcac

SEQ ID NO: 5688520 - DNA, 25 bp, Homo sapien
aaaaattggccagctgtagtagcgc

SEQ ID NO: 5688521 - DNA, 25 bp, Homo sapien
ttggccagctgtagtagcgcacacc

SEQ ID NO: 5688522 - DNA, 25 bp, Homo sapien
tggccagctgtagtagcgcacacct

SEQ ID NO: 5688523 - DNA, 25 bp, Homo sapien
caaaaattggccagctgtagtagcg

SEQ ID NO: 5688524 - DNA, 25 bp, Homo sapien
aattggccagctgtagtagcgcaca

SEQ ID NO: 5688525 - DNA, 25 bp, Homo sapien
tgctggattgcaggcgggagccacc

SEQ ID NO: 5688526 - DNA, 25 bp, Homo sapien
aagtgctggattgcaggcgggagcc

SEQ ID NO: 5688527 - DNA, 25 bp, Homo sapien
attgcaggcgggagccaccgtgcgt

SEQ ID NO: 5688528 - DNA, 25 bp, Homo sapien
caaagtgctggattgcaggcgggag

SEQ ID NO: 5688529 - DNA, 25 bp, Homo sapien
aagtgaaccgcctgcttcggcctcc

SEQ ID NO: 5688530 - DNA, 25 bp, Homo sapien
acctcaagtgaaccgcctgcttcgg

SEQ ID NO: 5688531 - DNA, 25 bp, Homo sapien
ccgaagcaggcggttcacttgaggt

SEQ ID NO: 5688532 - DNA, 25 bp, Homo sapien
ctcccgcctgcaatccagcactttg

SEQ ID NO: 5688533 - DNA, 25 bp, Homo sapien
gggaggccgaagcaggcggttcact

SEQ ID NO: 5688534 - DNA, 25 bp, Homo sapien
acgcacggtggctcccgcctgcaat

SEQ ID NO: 5688535 - DNA, 25 bp, Homo sapien
ggtggctcccgcctgcaatccagca

SEQ ID NO: 5688536 - DNA, 25 bp, Homo sapien
gaggccgaagcaggcggttcacttg

SEQ ID NO: 5688537 - DNA, 25 bp, Homo sapien
gcacagtggtgattgaatcagttcc

SEQ ID NO: 5688538 - DNA, 25 bp, Homo sapien
ggcacagtggtgattgaatcagttc

SEQ ID NO: 5688539 - DNA, 25 bp, Homo sapien
ctgactttgaggtgggcgatgctag

SEQ ID NO: 5688540 - DNA, 25 bp, Homo sapien
tgggcgatgctaggggcacagtggt

SEQ ID NO: 5688541 - DNA, 25 bp, Homo sapien
tgactttgaggtgggcgatgctagg

SEQ ID NO: 5688542 - DNA, 25 bp, Homo sapien
tgaggtgggcgatgctaggggcaca

SEQ ID NO: 5688543 - DNA, 25 bp, Homo sapien
actgtgcccctagcatcgcccacct

SEQ ID NO: 5688544 - DNA, 25 bp, Homo sapien
ggaactgattcaatcaccactgtgc

SEQ ID NO: 5688545 - DNA, 25 bp, Homo sapien
ctagcatcgcccacctcaaagtcag

SEQ ID NO: 5688546 - DNA, 25 bp, Homo sapien
gaactgattcaatcaccactgtgcc

SEQ ID NO: 5688547 - DNA, 25 bp, Homo sapien
cctagcatcgcccacctcaaagtca

SEQ ID NO: 5688548 - DNA, 25 bp, Homo sapien
accactgtgcccctagcatcgccca

SEQ ID NO: 5688549 - DNA, 25 bp, Homo sapien
gcacagtggtgattgaatcagttcc

SEQ ID NO: 5688550 - DNA, 25 bp, Homo sapien
ctaagcctgactttgaggtgggcga

SEQ ID NO: 5688551 - DNA, 25 bp, Homo sapien
agctcacagtctggtggaggagaca

SEQ ID NO: 5688552 - DNA, 25 bp, Homo sapien
cctgactttgaggtgggcgatgcta

SEQ ID NO: 5688553 - DNA, 25 bp, Homo sapien
agttccagtttctgccctcatggag

SEQ ID NO: 5688554 - DNA, 25 bp, Homo sapien
gaatcagttccagtttctgccctca

SEQ ID NO: 5688555 - DNA, 25 bp, Homo sapien
tgagggcagaaactggaactgattc

SEQ ID NO: 5688556 - DNA, 25 bp, Homo sapien
tcgcccacctcaaagtcaggcttag

SEQ ID NO: 5688557 - DNA, 25 bp, Homo sapien
ggaactgattcaatcaccactgtgc

SEQ ID NO: 5688558 - DNA, 25 bp, Homo sapien
tgtctcctccaccagactgtgagct

SEQ ID NO: 5688559 - DNA, 25 bp, Homo sapien
gattcaatcaccactgtgcccctag

SEQ ID NO: 5688560 - DNA, 25 bp, Homo sapien
tagcatcgcccacctcaaagtcagg

SEQ ID NO: 5688561 - DNA, 25 bp, Homo sapien
cagagcgtgctcagattgtgcttgg

SEQ ID NO: 5688562 - DNA, 25 bp, Homo sapien
tgctcagattgtgcttggggaagcc

SEQ ID NO: 5688563 - DNA, 25 bp, Homo sapien
gcagagcgtgctcagattgtgcttg

SEQ ID NO: 5688564 - DNA, 25 bp, Homo sapien
agcagagcgtgctcagattgtgctt

SEQ ID NO: 5688565 - DNA, 25 bp, Homo sapien
gagcagagcgtgctcagattgtgct

SEQ ID NO: 5688566 - DNA, 25 bp, Homo sapien
gatgggggcagcacaggccgagggt

SEQ ID NO: 5688567 - DNA, 25 bp, Homo sapien
ggcttccccaagcacaatctgagca

SEQ ID NO: 5688568 - DNA, 25 bp, Homo sapien
agcacaatctgagcacgctctgctc

SEQ ID NO: 5688569 - DNA, 25 bp, Homo sapien
caagcacaatctgagcacgctctgc

SEQ ID NO: 5688570 - DNA, 25 bp, Homo sapien
aagcacaatctgagcacgctctgct

SEQ ID NO: 5688571 - DNA, 25 bp, Homo sapien
accctcggcctgtgctgcccccatc

SEQ ID NO: 5688572 - DNA, 25 bp, Homo sapien
ccaagcacaatctgagcacgctctg

SEQ ID NO: 5688573 - DNA, 25 bp, Homo sapien
gaaggtagggaatactgttgcaggc

SEQ ID NO: 5688574 - DNA, 25 bp, Homo sapien
tgagaaggtagggaatactgttgca

SEQ ID NO: 5688575 - DNA, 25 bp, Homo sapien
gaacattgagacctgaggggatgag

SEQ ID NO: 5688576 - DNA, 25 bp, Homo sapien
agggaatactgttgcaggctgaggg

SEQ ID NO: 5688577 - DNA, 25 bp, Homo sapien
agagaacttagtgagaaggtaggga

SEQ ID NO: 5688578 - DNA, 25 bp, Homo sapien
ggagagaacttagtgagaaggtagg

SEQ ID NO: 5688579 - DNA, 25 bp, Homo sapien
gcctgcaacagtattccctaccttc

SEQ ID NO: 5688580 - DNA, 25 bp, Homo sapien
tgcaacagtattccctaccttctca

SEQ ID NO: 5688581 - DNA, 25 bp, Homo sapien
atcccctcaggtctcaatgttccct

SEQ ID NO: 5688582 - DNA, 25 bp, Homo sapien
ctcatcccctcaggtctcaatgttc

SEQ ID NO: 5688583 - DNA, 25 bp, Homo sapien
ccctcagcctgcaacagtattccct

SEQ ID NO: 5688584 - DNA, 25 bp, Homo sapien
cctaccttctcactaagttctctcc

SEQ ID NO: 5688585 - DNA, 25 bp, Homo sapien
tgagaaggtagggaatactgttgca

SEQ ID NO: 5688586 - DNA, 25 bp, Homo sapien
ctgttgcaggctgagggaacagcct

SEQ ID NO: 5688587 - DNA, 25 bp, Homo sapien
aacagcctgtgcaaaggcctagaag

SEQ ID NO: 5688588 - DNA, 25 bp, Homo sapien
aaggtagggaatactgttgcaggct

SEQ ID NO: 5688589 - DNA, 25 bp, Homo sapien
gaatactgttgcaggctgagggaac

SEQ ID NO: 5688590 - DNA, 25 bp, Homo sapien
ggagagaacttagtgagaaggtagg

SEQ ID NO: 5688591 - DNA, 25 bp, Homo sapien
agtattccctaccttctcactaagt

SEQ ID NO: 5688592 - DNA, 25 bp, Homo sapien
ccttctaggcctttgcacaggctgt

SEQ ID NO: 5688593 - DNA, 25 bp, Homo sapien
tgcaacagtattccctaccttctca

SEQ ID NO: 5688594 - DNA, 25 bp, Homo sapien
agcctgcaacagtattccctacctt

SEQ ID NO: 5688595 - DNA, 25 bp, Homo sapien
tcatcccctcaggtctcaatgttcc

SEQ ID NO: 5688596 - DNA, 25 bp, Homo sapien
tgttccctcagcctgcaacagtatt

SEQ ID NO: 5688597 - DNA, 25 bp, Homo sapien
ctcaactcctaggctccagcagtcc

SEQ ID NO: 5688598 - DNA, 25 bp, Homo sapien
caactcctaggctccagcagtcctc

SEQ ID NO: 5688599 - DNA, 25 bp, Homo sapien
gcctcaactcctaggctccagcagt

SEQ ID NO: 5688600 - DNA, 25 bp, Homo sapien
agcctcaactcctaggctccagcag

SEQ ID NO: 5688601 - DNA, 25 bp, Homo sapien
tcaactcctaggctccagcagtcct

SEQ ID NO: 5688602 - DNA, 25 bp, Homo sapien
cctcaactcctaggctccagcagtc

SEQ ID NO: 5688603 - DNA, 25 bp, Homo sapien
ggactgctggagcctaggagttgag

SEQ ID NO: 5688604 - DNA, 25 bp, Homo sapien
aggactgctggagcctaggagttga

SEQ ID NO: 5688605 - DNA, 25 bp, Homo sapien
gactgctggagcctaggagttgagg

SEQ ID NO: 5688606 - DNA, 25 bp, Homo sapien
actgctggagcctaggagttgaggc

SEQ ID NO: 5688607 - DNA, 25 bp, Homo sapien
gaggactgctggagcctaggagttg

SEQ ID NO: 5688608 - DNA, 25 bp, Homo sapien
ctgctggagcctaggagttgaggct

SEQ ID NO: 5688609 - DNA, 25 bp, Homo sapien
ccaaagctttggtgttacaggcatg

SEQ ID NO: 5688610 - DNA, 25 bp, Homo sapien
caaagctttggtgttacaggcatga

SEQ ID NO: 5688611 - DNA, 25 bp, Homo sapien
gggctccagcaatcctcctacctca

SEQ ID NO: 5688612 - DNA, 25 bp, Homo sapien
aaagctttggtgttacaggcatgag

SEQ ID NO: 5688613 - DNA, 25 bp, Homo sapien
cccaaagctttggtgttacaggcat

SEQ ID NO: 5688614 - DNA, 25 bp, Homo sapien
tccagcaatcctcctacctcagcct

SEQ ID NO: 5688615 - DNA, 25 bp, Homo sapien
tcatgcctgtaacaccaaagctttg

SEQ ID NO: 5688616 - DNA, 25 bp, Homo sapien
ctcatgcctgtaacaccaaagcttt

SEQ ID NO: 5688617 - DNA, 25 bp, Homo sapien
catgcctgtaacaccaaagctttgg

SEQ ID NO: 5688618 - DNA, 25 bp, Homo sapien
atgcctgtaacaccaaagctttggg

SEQ ID NO: 5688619 - DNA, 25 bp, Homo sapien
tgaggtaggaggattgctggagccc

SEQ ID NO: 5688620 - DNA, 25 bp, Homo sapien
aggctgaggtaggaggattgctgga

SEQ ID NO: 5688621 - DNA, 25 bp, Homo sapien
tcatagtcacccagctaggaagttg

SEQ ID NO: 5688622 - DNA, 25 bp, Homo sapien
aattttcatgctcatagtcacccag

SEQ ID NO: 5688623 - DNA, 25 bp, Homo sapien
gtgaaggaggaacttaggattcaag

SEQ ID NO: 5688624 - DNA, 25 bp, Homo sapien
catagtcacccagctaggaagttgt

SEQ ID NO: 5688625 - DNA, 25 bp, Homo sapien
tcatgctcatagtcacccagctagg

SEQ ID NO: 5688626 - DNA, 25 bp, Homo sapien
aggcaaattttcatgctcatagtca

SEQ ID NO: 5688627 - DNA, 25 bp, Homo sapien
cctagctgggtgactatgagcatga

SEQ ID NO: 5688628 - DNA, 25 bp, Homo sapien
gctgggtgactatgagcatgaaaat

SEQ ID NO: 5688629 - DNA, 25 bp, Homo sapien
tgactatgagcatgaaaatttgcct

SEQ ID NO: 5688630 - DNA, 25 bp, Homo sapien
cttgaatcctaagttcctccttcac

SEQ ID NO: 5688631 - DNA, 25 bp, Homo sapien
aacttcctagctgggtgactatgag

SEQ ID NO: 5688632 - DNA, 25 bp, Homo sapien
acaacttcctagctgggtgactatg

SEQ ID NO: 5688633 - DNA, 25 bp, Homo sapien
gaggtgggcgtaaaacctgaggtca

SEQ ID NO: 5688634 - DNA, 25 bp, Homo sapien
aggctgaggtgggcgtaaaacctga

SEQ ID NO: 5688635 - DNA, 25 bp, Homo sapien
tgggcgtaaaacctgaggtcaggag

SEQ ID NO: 5688636 - DNA, 25 bp, Homo sapien
ggctgaggtgggcgtaaaacctgag

SEQ ID NO: 5688637 - DNA, 25 bp, Homo sapien
gtgggcgtaaaacctgaggtcagga

SEQ ID NO: 5688638 - DNA, 25 bp, Homo sapien
tgaggtgggcgtaaaacctgaggtc

SEQ ID NO: 5688639 - DNA, 25 bp, Homo sapien
gacctcaggttttacgcccacctca

SEQ ID NO: 5688640 - DNA, 25 bp, Homo sapien
tcaggttttacgcccacctcagcct

SEQ ID NO: 5688641 - DNA, 25 bp, Homo sapien
ctcaggttttacgcccacctcagcc

SEQ ID NO: 5688642 - DNA, 25 bp, Homo sapien
tcctgacctcaggttttacgcccac

SEQ ID NO: 5688643 - DNA, 25 bp, Homo sapien
ctcctgacctcaggttttacgccca

SEQ ID NO: 5688644 - DNA, 25 bp, Homo sapien
tgacctcaggttttacgcccacctc

SEQ ID NO: 5688645 - DNA, 25 bp, Homo sapien
ctcaggaggtttagggagggagaat

SEQ ID NO: 5688646 - DNA, 25 bp, Homo sapien
aggtttagggagggagaattgcttg

SEQ ID NO: 5688647 - DNA, 25 bp, Homo sapien
caggaggtttagggagggagaattg

SEQ ID NO: 5688648 - DNA, 25 bp, Homo sapien
caattctccctccctaaacctcctg

SEQ ID NO: 5688649 - DNA, 25 bp, Homo sapien
attctccctccctaaacctcctgag

SEQ ID NO: 5688650 - DNA, 25 bp, Homo sapien
caagcaattctccctccctaaacct

SEQ ID NO: 5688651 - DNA, 25 bp, Homo sapien
aggtatgtgagatagcagggaggtg

SEQ ID NO: 5688652 - DNA, 25 bp, Homo sapien
caggtatgtgagatagcagggaggt

SEQ ID NO: 5688653 - DNA, 25 bp, Homo sapien
gcaggtatgtgagatagcagggagg

SEQ ID NO: 5688654 - DNA, 25 bp, Homo sapien
cctccctgctatctcacatacctgc

SEQ ID NO: 5688655 - DNA, 25 bp, Homo sapien
acctccctgctatctcacatacctg

SEQ ID NO: 5688656 - DNA, 25 bp, Homo sapien
cacctccctgctatctcacatacct

SEQ ID NO: 5688657 - DNA, 25 bp, Homo sapien
gcccacaatgcatgaaaagtaacag

SEQ ID NO: 5688658 - DNA, 25 bp, Homo sapien
aaaaaagatcccttggcctccagag

SEQ ID NO: 5688659 - DNA, 25 bp, Homo sapien
caggtatgtgagatagcagggaggt

SEQ ID NO: 5688660 - DNA, 25 bp, Homo sapien
aaaagaagcaggtatgtgagatagc

SEQ ID NO: 5688661 - DNA, 25 bp, Homo sapien
ctccagagagcccacaatgcatgaa

SEQ ID NO: 5688662 - DNA, 25 bp, Homo sapien
gaaaagtaacagaggaaaagaagca

SEQ ID NO: 5688663 - DNA, 25 bp, Homo sapien
gcttcttttcctctgttacttttca

SEQ ID NO: 5688664 - DNA, 25 bp, Homo sapien
tgctatctcacatacctgcttcttt

SEQ ID NO: 5688665 - DNA, 25 bp, Homo sapien
ttcatgcattgtgggctctctggag

SEQ ID NO: 5688666 - DNA, 25 bp, Homo sapien
acctccctgctatctcacatacctg

SEQ ID NO: 5688667 - DNA, 25 bp, Homo sapien
ctctggaggccaagggatctttttt

SEQ ID NO: 5688668 - DNA, 25 bp, Homo sapien
tgttacttttcatgcattgtgggct

SEQ ID NO: 5688669 - DNA, 25 bp, Homo sapien
aagaaggctgatagtcgggaggatc

SEQ ID NO: 5688670 - DNA, 25 bp, Homo sapien
agccactggatctaccagcaagaag

SEQ ID NO: 5688671 - DNA, 25 bp, Homo sapien
aatagccactggatctaccagcaag

SEQ ID NO: 5688672 - DNA, 25 bp, Homo sapien
tagccactggatctaccagcaagaa

SEQ ID NO: 5688673 - DNA, 25 bp, Homo sapien
aggaaatagccactggatctaccag

SEQ ID NO: 5688674 - DNA, 25 bp, Homo sapien
gaaatagccactggatctaccagca

SEQ ID NO: 5688675 - DNA, 25 bp, Homo sapien
tgctggtagatccagtggctatttc

SEQ ID NO: 5688676 - DNA, 25 bp, Homo sapien
gatcctcccgactatcagccttctt

SEQ ID NO: 5688677 - DNA, 25 bp, Homo sapien
tcttgctggtagatccagtggctat

SEQ ID NO: 5688678 - DNA, 25 bp, Homo sapien
ttcttgctggtagatccagtggcta

SEQ ID NO: 5688679 - DNA, 25 bp, Homo sapien
ctggtagatccagtggctatttcct

SEQ ID NO: 5688680 - DNA, 25 bp, Homo sapien
cttcttgctggtagatccagtggct

SEQ ID NO: 5688681 - DNA, 25 bp, Homo sapien
gcctgtggtctcagttgctcgggag

SEQ ID NO: 5688682 - DNA, 25 bp, Homo sapien
ctgtggtctcagttgctcgggaggc

SEQ ID NO: 5688683 - DNA, 25 bp, Homo sapien
cctgtggtctcagttgctcgggagg

SEQ ID NO: 5688684 - DNA, 25 bp, Homo sapien
tggtctcagttgctcgggaggctga

SEQ ID NO: 5688685 - DNA, 25 bp, Homo sapien
tgtggtctcagttgctcgggaggct

SEQ ID NO: 5688686 - DNA, 25 bp, Homo sapien
tgcctgtggtctcagttgctcggga

SEQ ID NO: 5688687 - DNA, 25 bp, Homo sapien
ctcccgagcaactgagaccacaggc

SEQ ID NO: 5688688 - DNA, 25 bp, Homo sapien
gcctcccgagcaactgagaccacag

SEQ ID NO: 5688689 - DNA, 25 bp, Homo sapien
tcagcctcccgagcaactgagacca

SEQ ID NO: 5688690 - DNA, 25 bp, Homo sapien
cctcccgagcaactgagaccacagg

SEQ ID NO: 5688691 - DNA, 25 bp, Homo sapien
agcctcccgagcaactgagaccaca

SEQ ID NO: 5688692 - DNA, 25 bp, Homo sapien
tcccgagcaactgagaccacaggca

SEQ ID NO: 5688693 - DNA, 25 bp, Homo sapien
agcctgttaggcttagaactggaga

SEQ ID NO: 5688694 - DNA, 25 bp, Homo sapien
gagcctccctctagtagcctgttag

SEQ ID NO: 5688695 - DNA, 25 bp, Homo sapien
tgcagagcctccctctagtagcctg

SEQ ID NO: 5688696 - DNA, 25 bp, Homo sapien
tggagcatagatgtcagtaggaggc

SEQ ID NO: 5688697 - DNA, 25 bp, Homo sapien
cctgttaggcttagaactggagagg

SEQ ID NO: 5688698 - DNA, 25 bp, Homo sapien
agaggatggagcatagatgtcagta

SEQ ID NO: 5688699 - DNA, 25 bp, Homo sapien
aagcctaacaggctactagagggag

SEQ ID NO: 5688700 - DNA, 25 bp, Homo sapien
tactgacatctatgctccatcctct

SEQ ID NO: 5688701 - DNA, 25 bp, Homo sapien
tgcacactctacttcctgcccctag

SEQ ID NO: 5688702 - DNA, 25 bp, Homo sapien
tctccagttctaagcctaacaggct

SEQ ID NO: 5688703 - DNA, 25 bp, Homo sapien
caggctactagagggaggctctgca

SEQ ID NO: 5688704 - DNA, 25 bp, Homo sapien
ctaacaggctactagagggaggctc

SEQ ID NO: 5688705 - DNA, 25 bp, Homo sapien
ggccattattgaggagggtaacaga

SEQ ID NO: 5688706 - DNA, 25 bp, Homo sapien
ttattgaggagggtaacagattgga

SEQ ID NO: 5688707 - DNA, 25 bp, Homo sapien
ggattccaatcctgatttcttcact

SEQ ID NO: 5688708 - DNA, 25 bp, Homo sapien
ggtgatatcagtacacagaggccat

SEQ ID NO: 5688709 - DNA, 25 bp, Homo sapien
cacagaggccattattgaggagggt

SEQ ID NO: 5688710 - DNA, 25 bp, Homo sapien
ctgggcagaggtgatatcagtacac

SEQ ID NO: 5688711 - DNA, 25 bp, Homo sapien
tctgttaccctcctcaataatggcc

SEQ ID NO: 5688712 - DNA, 25 bp, Homo sapien
aatggcctctgtgtactgatatcac

SEQ ID NO: 5688713 - DNA, 25 bp, Homo sapien
tcaggattggaatccaatctgttac

SEQ ID NO: 5688714 - DNA, 25 bp, Homo sapien
agtgaagaaatcaggattggaatcc

SEQ ID NO: 5688715 - DNA, 25 bp, Homo sapien
gtgtactgatatcacctctgcccag

SEQ ID NO: 5688716 - DNA, 25 bp, Homo sapien
ttaccctcctcaataatggcctctg

SEQ ID NO: 5688717 - DNA, 25 bp, Homo sapien
ctggggcatggcccctcccttcctg

SEQ ID NO: 5688718 - DNA, 25 bp, Homo sapien
taaaaagcagagatgaggtctctgt

SEQ ID NO: 5688719 - DNA, 25 bp, Homo sapien
ttaaaaagcagagatgaggtctctg

SEQ ID NO: 5688720 - DNA, 25 bp, Homo sapien
aaaaagcagagatgaggtctctgtt

SEQ ID NO: 5688721 - DNA, 25 bp, Homo sapien
tttaaaaagcagagatgaggtctct

SEQ ID NO: 5688722 - DNA, 25 bp, Homo sapien
ccctcccttcctgcctcatttcttt

SEQ ID NO: 5688723 - DNA, 25 bp, Homo sapien
cagagacctcatctctgctttttaa

SEQ ID NO: 5688724 - DNA, 25 bp, Homo sapien
aacagagacctcatctctgcttttt

SEQ ID NO: 5688725 - DNA, 25 bp, Homo sapien
caggaagggaggggccatgccccag

SEQ ID NO: 5688726 - DNA, 25 bp, Homo sapien
agagacctcatctctgctttttaaa

SEQ ID NO: 5688727 - DNA, 25 bp, Homo sapien
aaagaaatgaggcaggaagggaggg

SEQ ID NO: 5688728 - DNA, 25 bp, Homo sapien
aaaaagaaatgaggcaggaagggag

SEQ ID NO: 5688729 - DNA, 25 bp, Homo sapien
tgatcctcccatcttggccttccaa

SEQ ID NO: 5688730 - DNA, 25 bp, Homo sapien
aagtgttgggattataggtgtgagc

SEQ ID NO: 5688731 - DNA, 25 bp, Homo sapien
atcctcccatcttggccttccaaag

SEQ ID NO: 5688732 - DNA, 25 bp, Homo sapien
ctcccatcttggccttccaaagtgt

SEQ ID NO: 5688733 - DNA, 25 bp, Homo sapien
caccacgcccagcctgtgcctcatt

SEQ ID NO: 5688734 - DNA, 25 bp, Homo sapien
gatcctcccatcttggccttccaaa

SEQ ID NO: 5688735 - DNA, 25 bp, Homo sapien
ttggaaggccaagatgggaggatca

SEQ ID NO: 5688736 - DNA, 25 bp, Homo sapien
ctttggaaggccaagatgggaggat

SEQ ID NO: 5688737 - DNA, 25 bp, Homo sapien
aatgaggcacaggctgggcgtggtg

SEQ ID NO: 5688738 - DNA, 25 bp, Homo sapien
tttggaaggccaagatgggaggatc

SEQ ID NO: 5688739 - DNA, 25 bp, Homo sapien
acactttggaaggccaagatgggag

SEQ ID NO: 5688740 - DNA, 25 bp, Homo sapien
gctcacacctataatcccaacactt

SEQ ID NO: 5688741 - DNA, 25 bp, Homo sapien
ttaaatcagccaatacctggaaagc

SEQ ID NO: 5688742 - DNA, 25 bp, Homo sapien
gacacttatctcacagagttggatt

SEQ ID NO: 5688743 - DNA, 25 bp, Homo sapien
tggaaagcactttaccccatgcttg

SEQ ID NO: 5688744 - DNA, 25 bp, Homo sapien
cacttatctcacagagttggattaa

SEQ ID NO: 5688745 - DNA, 25 bp, Homo sapien
acttatctcacagagttggattaaa

SEQ ID NO: 5688746 - DNA, 25 bp, Homo sapien
agcactttaccccatgcttggcaca

SEQ ID NO: 5688747 - DNA, 25 bp, Homo sapien
taatccaactctgtgagataagtgt

SEQ ID NO: 5688748 - DNA, 25 bp, Homo sapien
caagcatggggtaaagtgctttcca

SEQ ID NO: 5688749 - DNA, 25 bp, Homo sapien
tttaatccaactctgtgagataagt

SEQ ID NO: 5688750 - DNA, 25 bp, Homo sapien
tgtgccaagcatggggtaaagtgct

SEQ ID NO: 5688751 - DNA, 25 bp, Homo sapien
aatccaactctgtgagataagtgtc

SEQ ID NO: 5688752 - DNA, 25 bp, Homo sapien
gctttccaggtattggctgatttaa

SEQ ID NO: 5688753 - DNA, 25 bp, Homo sapien
agctgctatgattgtcatcccatgt

SEQ ID NO: 5688754 - DNA, 25 bp, Homo sapien
attgtcatcccatgtatttgtgtaa

SEQ ID NO: 5688755 - DNA, 25 bp, Homo sapien
gattgtcatcccatgtatttgtgta

SEQ ID NO: 5688756 - DNA, 25 bp, Homo sapien
gctgctatgattgtcatcccatgta

SEQ ID NO: 5688757 - DNA, 25 bp, Homo sapien
gctatgattgtcatcccatgtattt

SEQ ID NO: 5688758 - DNA, 25 bp, Homo sapien
tatgattgtcatcccatgtatttgt

SEQ ID NO: 5688759 - DNA, 25 bp, Homo sapien
ttacacaaatacatgggatgacaat

SEQ ID NO: 5688760 - DNA, 25 bp, Homo sapien
acatgggatgacaatcatagcagct

SEQ ID NO: 5688761 - DNA, 25 bp, Homo sapien
tacacaaatacatgggatgacaatc

SEQ ID NO: 5688762 - DNA, 25 bp, Homo sapien
caaatacatgggatgacaatcatag

SEQ ID NO: 5688763 - DNA, 25 bp, Homo sapien
tacatgggatgacaatcatagcagc

SEQ ID NO: 5688764 - DNA, 25 bp, Homo sapien
aatacatgggatgacaatcatagca

SEQ ID NO: 5688765 - DNA, 25 bp, Homo sapien
catatagagtattgcttggtatgag

SEQ ID NO: 5688766 - DNA, 25 bp, Homo sapien
agattcctgaatgacgcttccagtc

SEQ ID NO: 5688767 - DNA, 25 bp, Homo sapien
tagacatatagagtattgcttggta

SEQ ID NO: 5688768 - DNA, 25 bp, Homo sapien
tcctgaatgacgcttccagtcatca

SEQ ID NO: 5688769 - DNA, 25 bp, Homo sapien
gattcctgaatgacgcttccagtca

SEQ ID NO: 5688770 - DNA, 25 bp, Homo sapien
gaatgacgcttccagtcatcatttt

SEQ ID NO: 5688771 - DNA, 25 bp, Homo sapien
aatgatgactggaagcgtcattcag

SEQ ID NO: 5688772 - DNA, 25 bp, Homo sapien
aaaatgatgactggaagcgtcattc

SEQ ID NO: 5688773 - DNA, 25 bp, Homo sapien
tctcataccaagcaatactctatat

SEQ ID NO: 5688774 - DNA, 25 bp, Homo sapien
gactggaagcgtcattcaggaatct

SEQ ID NO: 5688775 - DNA, 25 bp, Homo sapien
tgatgactggaagcgtcattcagga

SEQ ID NO: 5688776 - DNA, 25 bp, Homo sapien
taccaagcaatactctatatgtcta

SEQ ID NO: 5688777 - DNA, 25 bp, Homo sapien
ctgtcctcacacattgtcctttata

SEQ ID NO: 5688778 - DNA, 25 bp, Homo sapien
taccttttcctgtcctcacacattg

SEQ ID NO: 5688779 - DNA, 25 bp, Homo sapien
ttttcctgtcctcacacattgtcct

SEQ ID NO: 5688780 - DNA, 25 bp, Homo sapien
tttcctgtcctcacacattgtcctt

SEQ ID NO: 5688781 - DNA, 25 bp, Homo sapien
tcctgtcctcacacattgtccttta

SEQ ID NO: 5688782 - DNA, 25 bp, Homo sapien
accttttcctgtcctcacacattgt

SEQ ID NO: 5688783 - DNA, 25 bp, Homo sapien
aggacaatgtgtgaggacaggaaaa

SEQ ID NO: 5688784 - DNA, 25 bp, Homo sapien
caatgtgtgaggacaggaaaaggta

SEQ ID NO: 5688785 - DNA, 25 bp, Homo sapien
acaatgtgtgaggacaggaaaaggt

SEQ ID NO: 5688786 - DNA, 25 bp, Homo sapien
aaaggacaatgtgtgaggacaggaa

SEQ ID NO: 5688787 - DNA, 25 bp, Homo sapien
taaaggacaatgtgtgaggacagga

SEQ ID NO: 5688788 - DNA, 25 bp, Homo sapien
tataaaggacaatgtgtgaggacag

SEQ ID NO: 5688789 - DNA, 25 bp, Homo sapien
gtgccgccactgtggtggctgttct

SEQ ID NO: 5688790 - DNA, 25 bp, Homo sapien
taccttttcctgtcctcacacattg

SEQ ID NO: 5688791 - DNA, 25 bp, Homo sapien
gtaaaaccttacatattgtctgata

SEQ ID NO: 5688792 - DNA, 25 bp, Homo sapien
tcctgtcctcacacattgtccttta

SEQ ID NO: 5688793 - DNA, 25 bp, Homo sapien
tggctgttctccttcatccacatac

SEQ ID NO: 5688794 - DNA, 25 bp, Homo sapien
cacattgtcctttatactttgtaaa

SEQ ID NO: 5688795 - DNA, 25 bp, Homo sapien
tgccatcgtagatccatggactcct

SEQ ID NO: 5688796 - DNA, 25 bp, Homo sapien
tctgccatcgtagatccatggactc

SEQ ID NO: 5688797 - DNA, 25 bp, Homo sapien
tagatccatggactcctctgcctac

SEQ ID NO: 5688798 - DNA, 25 bp, Homo sapien
tcgtagatccatggactcctctgcc

SEQ ID NO: 5688799 - DNA, 25 bp, Homo sapien
catctctgccatcgtagatccatgg

SEQ ID NO: 5688800 - DNA, 25 bp, Homo sapien
tgttctcacacttcccgttgtcttc

SEQ ID NO: 5688801 - DNA, 25 bp, Homo sapien
taggcagaggagtccatggatctac

SEQ ID NO: 5688802 - DNA, 25 bp, Homo sapien
catggatctacgatggcagagatga

SEQ ID NO: 5688803 - DNA, 25 bp, Homo sapien
gagtccatggatctacgatggcaga

SEQ ID NO: 5688804 - DNA, 25 bp, Homo sapien
gaaaggtaggcagaggagtccatgg

SEQ ID NO: 5688805 - DNA, 25 bp, Homo sapien
gaagacaacgggaagtgtgagaaca

SEQ ID NO: 5688806 - DNA, 25 bp, Homo sapien
gaggagtccatggatctacgatggc

SEQ ID NO: 5688807 - DNA, 25 bp, Homo sapien
tctcctcttaactcttgactcttag

SEQ ID NO: 5688808 - DNA, 25 bp, Homo sapien
cctcagactcccgaaaaaatctcct

SEQ ID NO: 5688809 - DNA, 25 bp, Homo sapien
cagactcccgaaaaaatctcctctt

SEQ ID NO: 5688810 - DNA, 25 bp, Homo sapien
ctcagactcccgaaaaaatctcctc

SEQ ID NO: 5688811 - DNA, 25 bp, Homo sapien
tcagactcccgaaaaaatctcctct

SEQ ID NO: 5688812 - DNA, 25 bp, Homo sapien
ctcctcttaactcttgactcttagt

SEQ ID NO: 5688813 - DNA, 25 bp, Homo sapien
actaagagtcaagagttaagaggag

SEQ ID NO: 5688814 - DNA, 25 bp, Homo sapien
gaggagattttttcgggagtctgag

SEQ ID NO: 5688815 - DNA, 25 bp, Homo sapien
ctaagagtcaagagttaagaggaga

SEQ ID NO: 5688816 - DNA, 25 bp, Homo sapien
aagaggagattttttcgggagtctg

SEQ ID NO: 5688817 - DNA, 25 bp, Homo sapien
aggagattttttcgggagtctgagg

SEQ ID NO: 5688818 - DNA, 25 bp, Homo sapien
agaggagattttttcgggagtctga

SEQ ID NO: 5688819 - DNA, 25 bp, Homo sapien
tctcctcttaactcttgactcttag

SEQ ID NO: 5688820 - DNA, 25 bp, Homo sapien
agcttcctggcctgaagtggtcctc

SEQ ID NO: 5688821 - DNA, 25 bp, Homo sapien
taactcttgactcttagtcctgcag

SEQ ID NO: 5688822 - DNA, 25 bp, Homo sapien
actgtggcctcagcttcctggcctg

SEQ ID NO: 5688823 - DNA, 25 bp, Homo sapien
gaaaaaatctcctcttaactcttga

SEQ ID NO: 5688824 - DNA, 25 bp, Homo sapien
tcagactcccgaaaaaatctcctct

SEQ ID NO: 5688825 - DNA, 25 bp, Homo sapien
tatatatacatataagccctaattt

SEQ ID NO: 5688826 - DNA, 25 bp, Homo sapien
tatctatgctgcaaatatatataca

SEQ ID NO: 5688827 - DNA, 25 bp, Homo sapien
tccttttcatataaatggtggtata

SEQ ID NO: 5688828 - DNA, 25 bp, Homo sapien
aaatggtggtatattatatattcta

SEQ ID NO: 5688829 - DNA, 25 bp, Homo sapien
tttccttttcatataaatggtggta

SEQ ID NO: 5688830 - DNA, 25 bp, Homo sapien
atatacatataagccctaatttttc

SEQ ID NO: 5688831 - DNA, 25 bp, Homo sapien
tataccaccatttatatgaaaagga

SEQ ID NO: 5688832 - DNA, 25 bp, Homo sapien
gaatatataatataccaccatttat

SEQ ID NO: 5688833 - DNA, 25 bp, Homo sapien
taatagaatatataatataccacca

SEQ ID NO: 5688834 - DNA, 25 bp, Homo sapien
tgtatatatatttgcagcatagata

SEQ ID NO: 5688835 - DNA, 25 bp, Homo sapien
taccaccatttatatgaaaaggaaa

SEQ ID NO: 5688836 - DNA, 25 bp, Homo sapien
gaaaaattagggcttatatgtatat

SEQ ID NO: 5688837 - DNA, 25 bp, Homo sapien
cccaggtggcagtgcagtggcacag

SEQ ID NO: 5688838 - DNA, 25 bp, Homo sapien
ccaggtggcagtgcagtggcacagt

SEQ ID NO: 5688839 - DNA, 25 bp, Homo sapien
caggtggcagtgcagtggcacagtc

SEQ ID NO: 5688840 - DNA, 25 bp, Homo sapien
aggtggcagtgcagtggcacagtct

SEQ ID NO: 5688841 - DNA, 25 bp, Homo sapien
ggtggcagtgcagtggcacagtctt

SEQ ID NO: 5688842 - DNA, 25 bp, Homo sapien
gtggcagtgcagtggcacagtcttg

SEQ ID NO: 5688843 - DNA, 25 bp, Homo sapien
agactgtgccactgcactgccacct

SEQ ID NO: 5688844 - DNA, 25 bp, Homo sapien
ctgtgccactgcactgccacctggg

SEQ ID NO: 5688845 - DNA, 25 bp, Homo sapien
aagactgtgccactgcactgccacc

SEQ ID NO: 5688846 - DNA, 25 bp, Homo sapien
caagactgtgccactgcactgccac

SEQ ID NO: 5688847 - DNA, 25 bp, Homo sapien
actgtgccactgcactgccacctgg

SEQ ID NO: 5688848 - DNA, 25 bp, Homo sapien
gactgtgccactgcactgccacctg

SEQ ID NO: 5688849 - DNA, 25 bp, Homo sapien
gtgcccaccaccacacccggctaat

SEQ ID NO: 5688850 - DNA, 25 bp, Homo sapien
ggtgcccaccaccacacccggctaa

SEQ ID NO: 5688851 - DNA, 25 bp, Homo sapien
caggtgcccaccaccacacccggct

SEQ ID NO: 5688852 - DNA, 25 bp, Homo sapien
ttggtaaccagttttcaccatgttg

SEQ ID NO: 5688853 - DNA, 25 bp, Homo sapien
acaggtgcccaccaccacacccggc

SEQ ID NO: 5688854 - DNA, 25 bp, Homo sapien
aggtgcccaccaccacacccggcta

SEQ ID NO: 5688855 - DNA, 25 bp, Homo sapien
agccgggtgtggtggtgggcacctg

SEQ ID NO: 5688856 - DNA, 25 bp, Homo sapien
attagccgggtgtggtggtgggcac

SEQ ID NO: 5688857 - DNA, 25 bp, Homo sapien
caacatggtgaaaactggttaccaa

SEQ ID NO: 5688858 - DNA, 25 bp, Homo sapien
ttagccgggtgtggtggtgggcacc

SEQ ID NO: 5688859 - DNA, 25 bp, Homo sapien
gccgggtgtggtggtgggcacctgt

SEQ ID NO: 5688860 - DNA, 25 bp, Homo sapien
tagccgggtgtggtggtgggcacct

SEQ ID NO: 5688861 - DNA, 25 bp, Homo sapien
gaggttgcagtgagctgagactgca

SEQ ID NO: 5688862 - DNA, 25 bp, Homo sapien
atgcacacctatcgtcccagctact

SEQ ID NO: 5688863 - DNA, 25 bp, Homo sapien
tgcacacctatcgtcccagctactc

SEQ ID NO: 5688864 - DNA, 25 bp, Homo sapien
gatgcacacctatcgtcccagctac

SEQ ID NO: 5688865 - DNA, 25 bp, Homo sapien
gcacacctatcgtcccagctactcg

SEQ ID NO: 5688866 - DNA, 25 bp, Homo sapien
cacacctatcgtcccagctactcgg

SEQ ID NO: 5688867 - DNA, 25 bp, Homo sapien
gtagctgggacgataggtgtgcatc

SEQ ID NO: 5688868 - DNA, 25 bp, Homo sapien
tgcagtctcagctcactgcaacctc

SEQ ID NO: 5688869 - DNA, 25 bp, Homo sapien
ccgagtagctgggacgataggtgtg

SEQ ID NO: 5688870 - DNA, 25 bp, Homo sapien
agtagctgggacgataggtgtgcat

SEQ ID NO: 5688871 - DNA, 25 bp, Homo sapien
gagtagctgggacgataggtgtgca

SEQ ID NO: 5688872 - DNA, 25 bp, Homo sapien
cgagtagctgggacgataggtgtgc

SEQ ID NO: 5688873 - DNA, 25 bp, Homo sapien
gcttgtcttaaactcttggccccac

SEQ ID NO: 5688874 - DNA, 25 bp, Homo sapien
ggcttgtcttaaactcttggcccca

SEQ ID NO: 5688875 - DNA, 25 bp, Homo sapien
actcttggccccacagtgctgggat

SEQ ID NO: 5688876 - DNA, 25 bp, Homo sapien
aactcttggccccacagtgctggga

SEQ ID NO: 5688877 - DNA, 25 bp, Homo sapien
tgtcttaaactcttggccccacagt

SEQ ID NO: 5688878 - DNA, 25 bp, Homo sapien
tcttaaactcttggccccacagtgc

SEQ ID NO: 5688879 - DNA, 25 bp, Homo sapien
gggccaagagtttaagacaagcctg

SEQ ID NO: 5688880 - DNA, 25 bp, Homo sapien
cactgtggggccaagagtttaagac

SEQ ID NO: 5688881 - DNA, 25 bp, Homo sapien
atcccagcactgtggggccaagagt

SEQ ID NO: 5688882 - DNA, 25 bp, Homo sapien
tggggccaagagtttaagacaagcc

SEQ ID NO: 5688883 - DNA, 25 bp, Homo sapien
ccaagagtttaagacaagcctggcc

SEQ ID NO: 5688884 - DNA, 25 bp, Homo sapien
tcccagcactgtggggccaagagtt

SEQ ID NO: 5688885 - DNA, 25 bp, Homo sapien
cctctcaagaggaccggcctcttga

SEQ ID NO: 5688886 - DNA, 25 bp, Homo sapien
tcaagaggccggtcctcttgagagg

SEQ ID NO: 5688887 - DNA, 25 bp, Homo sapien
ctctcaagaggaccggcctcttgag

SEQ ID NO: 5688888 - DNA, 25 bp, Homo sapien
cctctcaagaggaccggcctcttga

SEQ ID NO: 5688889 - DNA, 25 bp, Homo sapien
tattgatcattatcgggcgtttctc

SEQ ID NO: 5688890 - DNA, 25 bp, Homo sapien
cattatcgggcgtttctcggagagg

SEQ ID NO: 5688891 - DNA, 25 bp, Homo sapien
agaggaccggcctcttgagttccct

SEQ ID NO: 5688892 - DNA, 25 bp, Homo sapien
cggcctcttgagttcccttagtatt

SEQ ID NO: 5688893 - DNA, 25 bp, Homo sapien
tcaagaggccggtcctcttgagagg

SEQ ID NO: 5688894 - DNA, 25 bp, Homo sapien
agggaactcaagaggccggtcctct

SEQ ID NO: 5688895 - DNA, 25 bp, Homo sapien
aatactaagggaactcaagaggccg

SEQ ID NO: 5688896 - DNA, 25 bp, Homo sapien
gagaaacgcccgataatgatcaata

SEQ ID NO: 5688897 - DNA, 25 bp, Homo sapien
cctctccgagaaacgcccgataatg

SEQ ID NO: 5688898 - DNA, 25 bp, Homo sapien
ctcaagaggccggtcctcttgagag

SEQ ID NO: 5688899 - DNA, 25 bp, Homo sapien
ggagtctcttatgtctacttctttc

SEQ ID NO: 5688900 - DNA, 25 bp, Homo sapien
gcatctcaaggcagaataatttttc

SEQ ID NO: 5688901 - DNA, 25 bp, Homo sapien
catctcaaggcagaataatttttct

SEQ ID NO: 5688902 - DNA, 25 bp, Homo sapien
acaaaatggagtctcttatgtctac

SEQ ID NO: 5688903 - DNA, 25 bp, Homo sapien
cacagtaacagtctgatctctcttt

SEQ ID NO: 5688904 - DNA, 25 bp, Homo sapien
aatggagtctcttatgtctacttct

SEQ ID NO: 5688905 - DNA, 25 bp, Homo sapien
gtagacataagagactccattttgt

SEQ ID NO: 5688906 - DNA, 25 bp, Homo sapien
agaagtagacataagagactccatt

SEQ ID NO: 5688907 - DNA, 25 bp, Homo sapien
gaaagaagtagacataagagactcc

SEQ ID NO: 5688908 - DNA, 25 bp, Homo sapien
gaaaaattattctgccttgagatgc

SEQ ID NO: 5688909 - DNA, 25 bp, Homo sapien
agaaaaattattctgccttgagatg

SEQ ID NO: 5688910 - DNA, 25 bp, Homo sapien
aaagagagatcagactgttactgtg

SEQ ID NO: 5688911 - DNA, 25 bp, Homo sapien
agcacttgttggttgatctattcct

SEQ ID NO: 5688912 - DNA, 25 bp, Homo sapien
gaagcacttgttggttgatctattc

SEQ ID NO: 5688913 - DNA, 25 bp, Homo sapien
aagcacttgttggttgatctattcc

SEQ ID NO: 5688914 - DNA, 25 bp, Homo sapien
gcacttgttggttgatctattcctt

SEQ ID NO: 5688915 - DNA, 25 bp, Homo sapien
aggaatagatcaaccaacaagtgct

SEQ ID NO: 5688916 - DNA, 25 bp, Homo sapien
aaggaatagatcaaccaacaagtgc

SEQ ID NO: 5688917 - DNA, 25 bp, Homo sapien
gaatagatcaaccaacaagtgcttc

SEQ ID NO: 5688918 - DNA, 25 bp, Homo sapien
ggaatagatcaaccaacaagtgctt

SEQ ID NO: 5688919 - DNA, 25 bp, Homo sapien
cacttgttggttgatctattccttt

SEQ ID NO: 5688920 - DNA, 25 bp, Homo sapien
catcctttattccttttgaataagg

SEQ ID NO: 5688921 - DNA, 25 bp, Homo sapien
gaatttgtaccattttctccttata

SEQ ID NO: 5688922 - DNA, 25 bp, Homo sapien
gaagcacttgttggttgatctattc

SEQ ID NO: 5688923 - DNA, 25 bp, Homo sapien
aagcacttgttggttgatctattcc

SEQ ID NO: 5688924 - DNA, 25 bp, Homo sapien
gcacttgttggttgatctattcctt

SEQ ID NO: 5688925 - DNA, 25 bp, Homo sapien
ccttattcaaaaggaataaaggatg

SEQ ID NO: 5688926 - DNA, 25 bp, Homo sapien
tataaggagaaaatggtacaaattc

SEQ ID NO: 5688927 - DNA, 25 bp, Homo sapien
aaggaatagatcaaccaacaagtgc

SEQ ID NO: 5688928 - DNA, 25 bp, Homo sapien
gaatagatcaaccaacaagtgcttc

SEQ ID NO: 5688929 - DNA, 25 bp, Homo sapien
caagtgcttcctcccaaaaccccat

SEQ ID NO: 5688930 - DNA, 25 bp, Homo sapien
ggaatagatcaaccaacaagtgctt

SEQ ID NO: 5688931 - DNA, 25 bp, Homo sapien
tggaacctgggttgagcattttgtt

SEQ ID NO: 5688932 - DNA, 25 bp, Homo sapien
cctggaacctgggttgagcattttg

SEQ ID NO: 5688933 - DNA, 25 bp, Homo sapien
ctggaacctgggttgagcattttgt

SEQ ID NO: 5688934 - DNA, 25 bp, Homo sapien
ttctctatttcctaatggggaaata

SEQ ID NO: 5688935 - DNA, 25 bp, Homo sapien
caagtatacagggcctggaacctgg

SEQ ID NO: 5688936 - DNA, 25 bp, Homo sapien
tctctatttcctaatggggaaataa

SEQ ID NO: 5688937 - DNA, 25 bp, Homo sapien
ttatttccccattaggaaatagaga

SEQ ID NO: 5688938 - DNA, 25 bp, Homo sapien
ccaggttccaggccctgtatacttg

SEQ ID NO: 5688939 - DNA, 25 bp, Homo sapien
aacaaaatgctcaacccaggttcca

SEQ ID NO: 5688940 - DNA, 25 bp, Homo sapien
caaaatgctcaacccaggttccagg

SEQ ID NO: 5688941 - DNA, 25 bp, Homo sapien
acaaaatgctcaacccaggttccag

SEQ ID NO: 5688942 - DNA, 25 bp, Homo sapien
tatttccccattaggaaatagagaa

SEQ ID NO: 5688943 - DNA, 25 bp, Homo sapien
tggaacctgggttgagcattttgtt

SEQ ID NO: 5688944 - DNA, 25 bp, Homo sapien
ataaaacgtctcttctggttcttct

SEQ ID NO: 5688945 - DNA, 25 bp, Homo sapien
cctggaacctgggttgagcattttg

SEQ ID NO: 5688946 - DNA, 25 bp, Homo sapien
atggggaaataaaacgtctcttctg

SEQ ID NO: 5688947 - DNA, 25 bp, Homo sapien
caagtatacagggcctggaacctgg

SEQ ID NO: 5688948 - DNA, 25 bp, Homo sapien
cctgggttgagcattttgtttttct

SEQ ID NO: 5688949 - DNA, 25 bp, Homo sapien
aaacggtgtttcctcgctactgtgt

SEQ ID NO: 5688950 - DNA, 25 bp, Homo sapien
ggtgtttcctcgctactgtgttagt

SEQ ID NO: 5688951 - DNA, 25 bp, Homo sapien
tactgtgttagttggatggtttcca

SEQ ID NO: 5688952 - DNA, 25 bp, Homo sapien
gactacttactaacatacagtgaca

SEQ ID NO: 5688953 - DNA, 25 bp, Homo sapien
tcctcgctactgtgttagttggatg

SEQ ID NO: 5688954 - DNA, 25 bp, Homo sapien
ccaaacggtgtttcctcgctactgt

SEQ ID NO: 5688955 - DNA, 25 bp, Homo sapien
tcactgtatgttagtaagtagtcaa

SEQ ID NO: 5688956 - DNA, 25 bp, Homo sapien
cagtagcgaggaaacaccgtttggg

SEQ ID NO: 5688957 - DNA, 25 bp, Homo sapien
taacacagtagcgaggaaacaccgt

SEQ ID NO: 5688958 - DNA, 25 bp, Homo sapien
ggaaaccatccaactaacacagtag

SEQ ID NO: 5688959 - DNA, 25 bp, Homo sapien
caactaacacagtagcgaggaaaca

SEQ ID NO: 5688960 - DNA, 25 bp, Homo sapien
catccaactaacacagtagcgagga

SEQ ID NO: 5688961 - DNA, 25 bp, Homo sapien
tacagtggctcaatctgtgctcact

SEQ ID NO: 5688962 - DNA, 25 bp, Homo sapien
tgtcacccaggctggagtacagtgg

SEQ ID NO: 5688963 - DNA, 25 bp, Homo sapien
acagtggctcaatctgtgctcactg

SEQ ID NO: 5688964 - DNA, 25 bp, Homo sapien
tggctcaatctgtgctcactgcaac

SEQ ID NO: 5688965 - DNA, 25 bp, Homo sapien
ggctcaatctgtgctcactgcaacc

SEQ ID NO: 5688966 - DNA, 25 bp, Homo sapien
gtcacccaggctggagtacagtggc

SEQ ID NO: 5688967 - DNA, 25 bp, Homo sapien
ggttgcagtgagcacagattgagcc

SEQ ID NO: 5688968 - DNA, 25 bp, Homo sapien
ccactgtactccagcctgggtgaca

SEQ ID NO: 5688969 - DNA, 25 bp, Homo sapien
gccactgtactccagcctgggtgac

SEQ ID NO: 5688970 - DNA, 25 bp, Homo sapien
gttgcagtgagcacagattgagcca

SEQ ID NO: 5688971 - DNA, 25 bp, Homo sapien
agtgagcacagattgagccactgta

SEQ ID NO: 5688972 - DNA, 25 bp, Homo sapien
cagtgagcacagattgagccactgt

SEQ ID NO: 5688973 - DNA, 25 bp, Homo sapien
ctggtgtgtgccaccacacctggct

SEQ ID NO: 5688974 - DNA, 25 bp, Homo sapien
attactggtgtgtgccaccacacct

SEQ ID NO: 5688975 - DNA, 25 bp, Homo sapien
ttactggtgtgtgccaccacacctg

SEQ ID NO: 5688976 - DNA, 25 bp, Homo sapien
actggtgtgtgccaccacacctggc

SEQ ID NO: 5688977 - DNA, 25 bp, Homo sapien
tggtgtgtgccaccacacctggcta

SEQ ID NO: 5688978 - DNA, 25 bp, Homo sapien
tactggtgtgtgccaccacacctgg

SEQ ID NO: 5688979 - DNA, 25 bp, Homo sapien
ccaggtgtggtggcacacaccagta

SEQ ID NO: 5688980 - DNA, 25 bp, Homo sapien
tagccaggtgtggtggcacacacca

SEQ ID NO: 5688981 - DNA, 25 bp, Homo sapien
aggtgtggtggcacacaccagtaat

SEQ ID NO: 5688982 - DNA, 25 bp, Homo sapien
gccaggtgtggtggcacacaccagt

SEQ ID NO: 5688983 - DNA, 25 bp, Homo sapien
agccaggtgtggtggcacacaccag

SEQ ID NO: 5688984 - DNA, 25 bp, Homo sapien
caggtgtggtggcacacaccagtaa

SEQ ID NO: 5688985 - DNA, 25 bp, Homo sapien
ggctgtactgagtcgagattgcatc

SEQ ID NO: 5688986 - DNA, 25 bp, Homo sapien
aggctgtactgagtcgagattgcat

SEQ ID NO: 5688987 - DNA, 25 bp, Homo sapien
atgcaatctcgactcagtacagcct

SEQ ID NO: 5688988 - DNA, 25 bp, Homo sapien
gatgcaatctcgactcagtacagcc

SEQ ID NO: 5688989 - DNA, 25 bp, Homo sapien
ggcaacacagggaagacccagtctc

SEQ ID NO: 5688990 - DNA, 25 bp, Homo sapien
aattagttgtggtggtagtgcatgc

SEQ ID NO: 5688991 - DNA, 25 bp, Homo sapien
attagttgtggtggtagtgcatgcc

SEQ ID NO: 5688992 - DNA, 25 bp, Homo sapien
acacagggaagacccagtctctgca

SEQ ID NO: 5688993 - DNA, 25 bp, Homo sapien
gggaagacccagtctctgcaaaaaa

SEQ ID NO: 5688994 - DNA, 25 bp, Homo sapien
caacacagggaagacccagtctctg

SEQ ID NO: 5688995 - DNA, 25 bp, Homo sapien
tttgcagagactgggtcttccctgt

SEQ ID NO: 5688996 - DNA, 25 bp, Homo sapien
ggcatgcactaccaccacaactaat

SEQ ID NO: 5688997 - DNA, 25 bp, Homo sapien
tgcagagactgggtcttccctgtgt

SEQ ID NO: 5688998 - DNA, 25 bp, Homo sapien
ttttttgcagagactgggtcttccc

SEQ ID NO: 5688999 - DNA, 25 bp, Homo sapien
gcatgcactaccaccacaactaatt

SEQ ID NO: 5689000 - DNA, 25 bp, Homo sapien
gagactgggtcttccctgtgttgcc

SEQ ID NO: 5689001 - DNA, 25 bp, Homo sapien
agaaatttaacactctggctgagca

SEQ ID NO: 5689002 - DNA, 25 bp, Homo sapien
ttagaaatttaacactctggctgag

SEQ ID NO: 5689003 - DNA, 25 bp, Homo sapien
aaatttaacactctggctgagcacg

SEQ ID NO: 5689004 - DNA, 25 bp, Homo sapien
attagaaatttaacactctggctga

SEQ ID NO: 5689005 - DNA, 25 bp, Homo sapien
gaaatttaacactctggctgagcac

SEQ ID NO: 5689006 - DNA, 25 bp, Homo sapien
tagaaatttaacactctggctgagc

SEQ ID NO: 5689007 - DNA, 25 bp, Homo sapien
gctcagccagagtgttaaatttcta

SEQ ID NO: 5689008 - DNA, 25 bp, Homo sapien
gtgctcagccagagtgttaaatttc

SEQ ID NO: 5689009 - DNA, 25 bp, Homo sapien
cgtgctcagccagagtgttaaattt

SEQ ID NO: 5689010 - DNA, 25 bp, Homo sapien
tgctcagccagagtgttaaatttct

SEQ ID NO: 5689011 - DNA, 25 bp, Homo sapien
tcagccagagtgttaaatttctaat

SEQ ID NO: 5689012 - DNA, 25 bp, Homo sapien
ctcagccagagtgttaaatttctaa

SEQ ID NO: 5689013 - DNA, 25 bp, Homo sapien
gctcagccagagtgttaaatttcta

SEQ ID NO: 5689014 - DNA, 25 bp, Homo sapien
atttctaatggccttcctaaacaga

SEQ ID NO: 5689015 - DNA, 25 bp, Homo sapien
ctaccgtgctcagccagagtgttaa

SEQ ID NO: 5689016 - DNA, 25 bp, Homo sapien
cgtgctcagccagagtgttaaattt

SEQ ID NO: 5689017 - DNA, 25 bp, Homo sapien
tcagccagagtgttaaatttctaat

SEQ ID NO: 5689018 - DNA, 25 bp, Homo sapien
ttctaatggccttcctaaacagaaa

SEQ ID NO: 5689019 - DNA, 25 bp, Homo sapien
tgacagtgtcagagtaaagatatgc

SEQ ID NO: 5689020 - DNA, 25 bp, Homo sapien
gacagtgtcagagtaaagatatgca

SEQ ID NO: 5689021 - DNA, 25 bp, Homo sapien
gcatatctttactctgacactgtca

SEQ ID NO: 5689022 - DNA, 25 bp, Homo sapien
tgcatatctttactctgacactgtc

SEQ ID NO: 5689023 - DNA, 25 bp, Homo sapien
cagagtaaagatatgcagctggatc

SEQ ID NO: 5689024 - DNA, 25 bp, Homo sapien
cagctggatcataagagaaaaaggc

SEQ ID NO: 5689025 - DNA, 25 bp, Homo sapien
ccccagctaagatttatgacagtgt

SEQ ID NO: 5689026 - DNA, 25 bp, Homo sapien
cagctaagatttatgacagtgtcag

SEQ ID NO: 5689027 - DNA, 25 bp, Homo sapien
gatatgcagctggatcataagagaa

SEQ ID NO: 5689028 - DNA, 25 bp, Homo sapien
gacagtgtcagagtaaagatatgca

SEQ ID NO: 5689029 - DNA, 25 bp, Homo sapien
gcctttttctcttatgatccagctg

SEQ ID NO: 5689030 - DNA, 25 bp, Homo sapien
gcatatctttactctgacactgtca

SEQ ID NO: 5689031 - DNA, 25 bp, Homo sapien
taaatcttagctgggggctgggcac

SEQ ID NO: 5689032 - DNA, 25 bp, Homo sapien
tctcttatgatccagctgcatatct

SEQ ID NO: 5689033 - DNA, 25 bp, Homo sapien
gacactgtcataaatcttagctggg

SEQ ID NO: 5689034 - DNA, 25 bp, Homo sapien
gatccagctgcatatctttactctg

SEQ ID NO: 5689035 - DNA, 25 bp, Homo sapien
gacggagtctcgttctgttgtgcag

SEQ ID NO: 5689036 - DNA, 25 bp, Homo sapien
acggagtctcgttctgttgtgcagg

SEQ ID NO: 5689037 - DNA, 25 bp, Homo sapien
gagtctcgttctgttgtgcaggctg

SEQ ID NO: 5689038 - DNA, 25 bp, Homo sapien
cacttgcaacctccacctgccaggt

SEQ ID NO: 5689039 - DNA, 25 bp, Homo sapien
ggagtctcgttctgttgtgcaggct

SEQ ID NO: 5689040 - DNA, 25 bp, Homo sapien
cggagtctcgttctgttgtgcaggc

SEQ ID NO: 5689041 - DNA, 25 bp, Homo sapien
agcctgcacaacagaacgagactcc

SEQ ID NO: 5689042 - DNA, 25 bp, Homo sapien
cctgcacaacagaacgagactccgt

SEQ ID NO: 5689043 - DNA, 25 bp, Homo sapien
ctgcacaacagaacgagactccgtc

SEQ ID NO: 5689044 - DNA, 25 bp, Homo sapien
cctggcaggtggaggttgcaagtga

SEQ ID NO: 5689045 - DNA, 25 bp, Homo sapien
cagcctgcacaacagaacgagactc

SEQ ID NO: 5689046 - DNA, 25 bp, Homo sapien
gcctgcacaacagaacgagactccg

SEQ ID NO: 5689047 - DNA, 25 bp, Homo sapien
aaattcaggactatggagtttttat

SEQ ID NO: 5689048 - DNA, 25 bp, Homo sapien
caaattcaggactatggagttttta

SEQ ID NO: 5689049 - DNA, 25 bp, Homo sapien
aattcaggactatggagtttttatt

SEQ ID NO: 5689050 - DNA, 25 bp, Homo sapien
taaaaactccatagtcctgaatttg

SEQ ID NO: 5689051 - DNA, 25 bp, Homo sapien
aataaaaactccatagtcctgaatt

SEQ ID NO: 5689052 - DNA, 25 bp, Homo sapien
ataaaaactccatagtcctgaattt

SEQ ID NO: 5689053 - DNA, 25 bp, Homo sapien
ggagtttttatttctatcttctatc

SEQ ID NO: 5689054 - DNA, 25 bp, Homo sapien
tctttccctgtactgtagaactcaa

SEQ ID NO: 5689055 - DNA, 25 bp, Homo sapien
caaattcaggactatggagttttta

SEQ ID NO: 5689056 - DNA, 25 bp, Homo sapien
taatacttttaattcaaattcagga

SEQ ID NO: 5689057 - DNA, 25 bp, Homo sapien
aattcaggactatggagtttttatt

SEQ ID NO: 5689058 - DNA, 25 bp, Homo sapien
tttgtctttccctgtactgtagaac

SEQ ID NO: 5689059 - DNA, 25 bp, Homo sapien
cctgaatttgaattaaaagtattag

SEQ ID NO: 5689060 - DNA, 25 bp, Homo sapien
tacagggaaagacaaaagatagaag

SEQ ID NO: 5689061 - DNA, 25 bp, Homo sapien
taaaaactccatagtcctgaatttg

SEQ ID NO: 5689062 - DNA, 25 bp, Homo sapien
gatagaagatagaaataaaaactcc

SEQ ID NO: 5689063 - DNA, 25 bp, Homo sapien
tgagttctacagtacagggaaagac

SEQ ID NO: 5689064 - DNA, 25 bp, Homo sapien
aataaaaactccatagtcctgaatt

SEQ ID NO: 5689065 - DNA, 25 bp, Homo sapien
ggtgttacaagatgttgtaggttca

SEQ ID NO: 5689066 - DNA, 25 bp, Homo sapien
tttctggtgttacaagatgttgtag

SEQ ID NO: 5689067 - DNA, 25 bp, Homo sapien
caagatgttgtaggttcatcttgta

SEQ ID NO: 5689068 - DNA, 25 bp, Homo sapien
gttacaagatgttgtaggttcatct

SEQ ID NO: 5689069 - DNA, 25 bp, Homo sapien
tctggtgttacaagatgttgtaggt

SEQ ID NO: 5689070 - DNA, 25 bp, Homo sapien
tgttacaagatgttgtaggttcatc

SEQ ID NO: 5689071 - DNA, 25 bp, Homo sapien
gatgaacctacaacatcttgtaaca

SEQ ID NO: 5689072 - DNA, 25 bp, Homo sapien
tacaagatgaacctacaacatcttg

SEQ ID NO: 5689073 - DNA, 25 bp, Homo sapien
acctacaacatcttgtaacaccaga

SEQ ID NO: 5689074 - DNA, 25 bp, Homo sapien
ctacaacatcttgtaacaccagaaa

SEQ ID NO: 5689075 - DNA, 25 bp, Homo sapien
aagatgaacctacaacatcttgtaa

SEQ ID NO: 5689076 - DNA, 25 bp, Homo sapien
gaacctacaacatcttgtaacacca

SEQ ID NO: 5689077 - DNA, 25 bp, Homo sapien
gctgtcttgctttctggtgttacaa

SEQ ID NO: 5689078 - DNA, 25 bp, Homo sapien
caagatgttgtaggttcatcttgta

SEQ ID NO: 5689079 - DNA, 25 bp, Homo sapien
gaccccagaagctgtcttgctttct

SEQ ID NO: 5689080 - DNA, 25 bp, Homo sapien
cacctggaaattaacatttctttag

SEQ ID NO: 5689081 - DNA, 25 bp, Homo sapien
tctggtgttacaagatgttgtaggt

SEQ ID NO: 5689082 - DNA, 25 bp, Homo sapien
tgttacaagatgttgtaggttcatc

SEQ ID NO: 5689083 - DNA, 25 bp, Homo sapien
gaggcaggagagaatggcttgaacc

SEQ ID NO: 5689084 - DNA, 25 bp, Homo sapien
agatcgtgccgctgcaccccagcgt

SEQ ID NO: 5689085 - DNA, 25 bp, Homo sapien
aagatcgtgccgctgcaccccagcg

SEQ ID NO: 5689086 - DNA, 25 bp, Homo sapien
aggcaggagagaatggcttgaacct

SEQ ID NO: 5689087 - DNA, 25 bp, Homo sapien
cgctggggtgcagcggcacgatctt

SEQ ID NO: 5689088 - DNA, 25 bp, Homo sapien
acgctggggtgcagcggcacgatct

SEQ ID NO: 5689089 - DNA, 25 bp, Homo sapien
ggttcaagccattctctcctgcctc

SEQ ID NO: 5689090 - DNA, 25 bp, Homo sapien
aggttcaagccattctctcctgcct

SEQ ID NO: 5689091 - DNA, 25 bp, Homo sapien
gggcaacagtttgagacccttctca

SEQ ID NO: 5689092 - DNA, 25 bp, Homo sapien
ggcaacagtttgagacccttctcaa

SEQ ID NO: 5689093 - DNA, 25 bp, Homo sapien
tgggcaacagtttgagacccttctc

SEQ ID NO: 5689094 - DNA, 25 bp, Homo sapien
gcaacagtttgagacccttctcaaa

SEQ ID NO: 5689095 - DNA, 25 bp, Homo sapien
tcaaggctgcattaagccgtgtttg

SEQ ID NO: 5689096 - DNA, 25 bp, Homo sapien
caacagtttgagacccttctcaaaa

SEQ ID NO: 5689097 - DNA, 25 bp, Homo sapien
caaacacggcttaatgcagccttga

SEQ ID NO: 5689098 - DNA, 25 bp, Homo sapien
tgagaagggtctcaaactgttgccc

SEQ ID NO: 5689099 - DNA, 25 bp, Homo sapien
ttttgagaagggtctcaaactgttg

SEQ ID NO: 5689100 - DNA, 25 bp, Homo sapien
ttgagaagggtctcaaactgttgcc

SEQ ID NO: 5689101 - DNA, 25 bp, Homo sapien
tttgagaagggtctcaaactgttgc

SEQ ID NO: 5689102 - DNA, 25 bp, Homo sapien
gagaagggtctcaaactgttgccca

SEQ ID NO: 5689103 - DNA, 25 bp, Homo sapien
gagactcacatgcttagagaggaaa

SEQ ID NO: 5689104 - DNA, 25 bp, Homo sapien
cttagagaggaaagtagaggttagg

SEQ ID NO: 5689105 - DNA, 25 bp, Homo sapien
gataaattgcattgactgtgtacag

SEQ ID NO: 5689106 - DNA, 25 bp, Homo sapien
aggttagggagaagtgataaattgc

SEQ ID NO: 5689107 - DNA, 25 bp, Homo sapien
tagaggttagggagaagtgataaat

SEQ ID NO: 5689108 - DNA, 25 bp, Homo sapien
gttagggagaagtgataaattgcat

SEQ ID NO: 5689109 - DNA, 25 bp, Homo sapien
cctaacctctactttcctctctaag

SEQ ID NO: 5689110 - DNA, 25 bp, Homo sapien
gcaatttatcacttctccctaacct

SEQ ID NO: 5689111 - DNA, 25 bp, Homo sapien
tttcctctctaagcatgtgagtctc

SEQ ID NO: 5689112 - DNA, 25 bp, Homo sapien
atgcaatttatcacttctccctaac

SEQ ID NO: 5689113 - DNA, 25 bp, Homo sapien
ctgtacacagtcaatgcaatttatc

SEQ ID NO: 5689114 - DNA, 25 bp, Homo sapien
tgtacacagtcaatgcaatttatca

SEQ ID NO: 5689115 - DNA, 25 bp, Homo sapien
aggcagggcactagggttagaagac

SEQ ID NO: 5689116 - DNA, 25 bp, Homo sapien
agcaggcagggcactagggttagaa

SEQ ID NO: 5689117 - DNA, 25 bp, Homo sapien
gcaggcagggcactagggttagaag

SEQ ID NO: 5689118 - DNA, 25 bp, Homo sapien
caggcagggcactagggttagaaga

SEQ ID NO: 5689119 - DNA, 25 bp, Homo sapien
aagcaggcagggcactagggttaga

SEQ ID NO: 5689120 - DNA, 25 bp, Homo sapien
ggcagggcactagggttagaagaca

SEQ ID NO: 5689121 - DNA, 25 bp, Homo sapien
cttctaaccctagtgccctgcctgc

SEQ ID NO: 5689122 - DNA, 25 bp, Homo sapien
tcttctaaccctagtgccctgcctg

SEQ ID NO: 5689123 - DNA, 25 bp, Homo sapien
gtcttctaaccctagtgccctgcct

SEQ ID NO: 5689124 - DNA, 25 bp, Homo sapien
tctaaccctagtgccctgcctgctt

SEQ ID NO: 5689125 - DNA, 25 bp, Homo sapien
ttctaaccctagtgccctgcctgct

SEQ ID NO: 5689126 - DNA, 25 bp, Homo sapien
tgtcttctaaccctagtgccctgcc

SEQ ID NO: 5689127 - DNA, 25 bp, Homo sapien
gggttagaagacatgattcaagcaa

SEQ ID NO: 5689128 - DNA, 25 bp, Homo sapien
cagggcactagggttagaagacatg

SEQ ID NO: 5689129 - DNA, 25 bp, Homo sapien
aagcaggcagggcactagggttaga

SEQ ID NO: 5689130 - DNA, 25 bp, Homo sapien
tagaagacatgattcaagcaaagac

SEQ ID NO: 5689131 - DNA, 25 bp, Homo sapien
cactagggttagaagacatgattca

SEQ ID NO: 5689132 - DNA, 25 bp, Homo sapien
gacatgattcaagcaaagacaaaga

SEQ ID NO: 5689133 - DNA, 25 bp, Homo sapien
catgtcttctaaccctagtgccctg

SEQ ID NO: 5689134 - DNA, 25 bp, Homo sapien
tgaatcatgtcttctaaccctagtg

SEQ ID NO: 5689135 - DNA, 25 bp, Homo sapien
tgcttgaatcatgtcttctaaccct

SEQ ID NO: 5689136 - DNA, 25 bp, Homo sapien
tctaaccctagtgccctgcctgctt

SEQ ID NO: 5689137 - DNA, 25 bp, Homo sapien
gtctttgcttgaatcatgtcttcta

SEQ ID NO: 5689138 - DNA, 25 bp, Homo sapien
tctttgtctttgcttgaatcatgtc

SEQ ID NO: 5689139 - DNA, 25 bp, Homo sapien
tgttggtaatcaaaagaagtgctgt

SEQ ID NO: 5689140 - DNA, 25 bp, Homo sapien
taatgttggtaatcaaaagaagtgc

SEQ ID NO: 5689141 - DNA, 25 bp, Homo sapien
tgggttctttaatgttggtaatcaa

SEQ ID NO: 5689142 - DNA, 25 bp, Homo sapien
aatgttggtaatcaaaagaagtgct

SEQ ID NO: 5689143 - DNA, 25 bp, Homo sapien
gagatacaagcttttagttaaactg

SEQ ID NO: 5689144 - DNA, 25 bp, Homo sapien
agatacaagcttttagttaaactgt

SEQ ID NO: 5689145 - DNA, 25 bp, Homo sapien
cagtttaactaaaagcttgtatctc

SEQ ID NO: 5689146 - DNA, 25 bp, Homo sapien
acagcacttcttttgattaccaaca

SEQ ID NO: 5689147 - DNA, 25 bp, Homo sapien
tgattaccaacattaaagaacccaa

SEQ ID NO: 5689148 - DNA, 25 bp, Homo sapien
ttgattaccaacattaaagaaccca

SEQ ID NO: 5689149 - DNA, 25 bp, Homo sapien
gcacttcttttgattaccaacatta

SEQ ID NO: 5689150 - DNA, 25 bp, Homo sapien
acagtttaactaaaagcttgtatct

SEQ ID NO: 5689151 - DNA, 25 bp, Homo sapien
tgccccttccatccagctagaagat

SEQ ID NO: 5689152 - DNA, 25 bp, Homo sapien
agtgccccttccatccagctagaag

SEQ ID NO: 5689153 - DNA, 25 bp, Homo sapien
gtgccccttccatccagctagaaga

SEQ ID NO: 5689154 - DNA, 25 bp, Homo sapien
atcttctagctggatggaaggggca

SEQ ID NO: 5689155 - DNA, 25 bp, Homo sapien
cttctagctggatggaaggggcact

SEQ ID NO: 5689156 - DNA, 25 bp, Homo sapien
tcttctagctggatggaaggggcac

SEQ ID NO: 5689157 - DNA, 25 bp, Homo sapien
tatgagtctcccacaggcttccctg

SEQ ID NO: 5689158 - DNA, 25 bp, Homo sapien
tgccccttccatccagctagaagat

SEQ ID NO: 5689159 - DNA, 25 bp, Homo sapien
tagtgtcctatgagtctcccacagg

SEQ ID NO: 5689160 - DNA, 25 bp, Homo sapien
ctgagtttgtatattcttagtgtcc

SEQ ID NO: 5689161 - DNA, 25 bp, Homo sapien
ccagctagaagatgagggactctga

SEQ ID NO: 5689162 - DNA, 25 bp, Homo sapien
agtgccccttccatccagctagaag

SEQ ID NO: 5689163 - DNA, 25 bp, Homo sapien
ctcatcttctagctggatggaaggg

SEQ ID NO: 5689164 - DNA, 25 bp, Homo sapien
tcagagtccctcatcttctagctgg

SEQ ID NO: 5689165 - DNA, 25 bp, Homo sapien
cagggaagcctgtgggagactcata

SEQ ID NO: 5689166 - DNA, 25 bp, Homo sapien
gactcataggacactaagaatatac

SEQ ID NO: 5689167 - DNA, 25 bp, Homo sapien
gacactaagaatatacaaactcagg

SEQ ID NO: 5689168 - DNA, 25 bp, Homo sapien
cctgtgggagactcataggacacta

SEQ ID NO: 5689169 - DNA, 25 bp, Homo sapien
tgttgccgagttcctttagctgtgg

SEQ ID NO: 5689170 - DNA, 25 bp, Homo sapien
tcctttagctgtggccttcattcct

SEQ ID NO: 5689171 - DNA, 25 bp, Homo sapien
gtggctgttgccgagttcctttagc

SEQ ID NO: 5689172 - DNA, 25 bp, Homo sapien
tgccgagttcctttagctgtggcct

SEQ ID NO: 5689173 - DNA, 25 bp, Homo sapien
cgagttcctttagctgtggccttca

SEQ ID NO: 5689174 - DNA, 25 bp, Homo sapien
tgtcgcggtatgtatggctgcctgt

SEQ ID NO: 5689175 - DNA, 25 bp, Homo sapien
aggaatgaaggccacagctaaagga

SEQ ID NO: 5689176 - DNA, 25 bp, Homo sapien
gctaaaggaactcggcaacagccac

SEQ ID NO: 5689177 - DNA, 25 bp, Homo sapien
acaggcagccatacataccgcgaca

SEQ ID NO: 5689178 - DNA, 25 bp, Homo sapien
gaaggccacagctaaaggaactcgg

SEQ ID NO: 5689179 - DNA, 25 bp, Homo sapien
cacagctaaaggaactcggcaacag

SEQ ID NO: 5689180 - DNA, 25 bp, Homo sapien
gaatgaaggccacagctaaaggaac

SEQ ID NO: 5689181 - DNA, 25 bp, Homo sapien
tgtactcacgggattatgtttatgt

SEQ ID NO: 5689182 - DNA, 25 bp, Homo sapien
gctcctccatttctttagtatccaa

SEQ ID NO: 5689183 - DNA, 25 bp, Homo sapien
ccaatgtactcacgggattatgttt

SEQ ID NO: 5689184 - DNA, 25 bp, Homo sapien
ccatttctttagtatccaatgtact

SEQ ID NO: 5689185 - DNA, 25 bp, Homo sapien
tatccaatgtactcacgggattatg

SEQ ID NO: 5689186 - DNA, 25 bp, Homo sapien
ggattatgtttatgttcggcggtat

SEQ ID NO: 5689187 - DNA, 25 bp, Homo sapien
aacataatcccgtgagtacattgga

SEQ ID NO: 5689188 - DNA, 25 bp, Homo sapien
ttggatactaaagaaatggaggagc

SEQ ID NO: 5689189 - DNA, 25 bp, Homo sapien
tacattggatactaaagaaatggag

SEQ ID NO: 5689190 - DNA, 25 bp, Homo sapien
cataaacataatcccgtgagtacat

SEQ ID NO: 5689191 - DNA, 25 bp, Homo sapien
ataccgccgaacataaacataatcc

SEQ ID NO: 5689192 - DNA, 25 bp, Homo sapien
ggatactaaagaaatggaggagcag

SEQ ID NO: 5689193 - DNA, 25 bp, Homo sapien
attttccccagatgtgtctattaaa

SEQ ID NO: 5689194 - DNA, 25 bp, Homo sapien
ttgtcttacccttacacattcatat

SEQ ID NO: 5689195 - DNA, 25 bp, Homo sapien
aattgtcttacccttacacattcat

SEQ ID NO: 5689196 - DNA, 25 bp, Homo sapien
tccccagatgtgtctattaaaatat

SEQ ID NO: 5689197 - DNA, 25 bp, Homo sapien
cacttttccttggtttgtctaatga

SEQ ID NO: 5689198 - DNA, 25 bp, Homo sapien
ttccccagatgtgtctattaaaata

SEQ ID NO: 5689199 - DNA, 25 bp, Homo sapien
atattttaatagacacatctgggga

SEQ ID NO: 5689200 - DNA, 25 bp, Homo sapien
tattttaatagacacatctggggaa

SEQ ID NO: 5689201 - DNA, 25 bp, Homo sapien
tatgaatgtgtaagggtaagacaat

SEQ ID NO: 5689202 - DNA, 25 bp, Homo sapien
cattagacaaaccaaggaaaagtgt

SEQ ID NO: 5689203 - DNA, 25 bp, Homo sapien
tcattagacaaaccaaggaaaagtg

SEQ ID NO: 5689204 - DNA, 25 bp, Homo sapien
atatgaatgtgtaagggtaagacaa

SEQ ID NO: 5689205 - DNA, 25 bp, Homo sapien
tttaaaaaaatatgctgcttgcatt

SEQ ID NO: 5689206 - DNA, 25 bp, Homo sapien
gtgtgtgaagtgtctacttaatact

SEQ ID NO: 5689207 - DNA, 25 bp, Homo sapien
gtgtgaagtgtctacttaatacttt

SEQ ID NO: 5689208 - DNA, 25 bp, Homo sapien
tgtgtgaagtgtctacttaatactt

SEQ ID NO: 5689209 - DNA, 25 bp, Homo sapien
aaagtattaagtagacacttcacac

SEQ ID NO: 5689210 - DNA, 25 bp, Homo sapien
aatgcaagcagcatatttttttaaa

SEQ ID NO: 5689211 - DNA, 25 bp, Homo sapien
aagtattaagtagacacttcacaca

SEQ ID NO: 5689212 - DNA, 25 bp, Homo sapien
agtattaagtagacacttcacacac

SEQ ID NO: 5689213 - DNA, 25 bp, Homo sapien
gcatttttgtgtgtgaagtgtctac

SEQ ID NO: 5689214 - DNA, 25 bp, Homo sapien
gaagtgtctacttaatacttttgga

SEQ ID NO: 5689215 - DNA, 25 bp, Homo sapien
tttaaaaaaatatgctgcttgcatt

SEQ ID NO: 5689216 - DNA, 25 bp, Homo sapien
actagtgatgccagaaatttaaaaa

SEQ ID NO: 5689217 - DNA, 25 bp, Homo sapien
aatatgctgcttgcatttttgtgtg

SEQ ID NO: 5689218 - DNA, 25 bp, Homo sapien
tgtgtgaagtgtctacttaatactt

SEQ ID NO: 5689219 - DNA, 25 bp, Homo sapien
agtccaaaagtattaagtagacact

SEQ ID NO: 5689220 - DNA, 25 bp, Homo sapien
cacacaaaaatgcaagcagcatatt

SEQ ID NO: 5689221 - DNA, 25 bp, Homo sapien
aaagtattaagtagacacttcacac

SEQ ID NO: 5689222 - DNA, 25 bp, Homo sapien
agtattaagtagacacttcacacac

SEQ ID NO: 5689223 - DNA, 25 bp, Homo sapien
tttttaaatttctggcatcactagt

SEQ ID NO: 5689224 - DNA, 25 bp, Homo sapien
cttcacacacaaaaatgcaagcagc

SEQ ID NO: 5689225 - DNA, 25 bp, Homo sapien
tgcactttccctgaggtactggatc

SEQ ID NO: 5689226 - DNA, 25 bp, Homo sapien
agtgcactttccctgaggtactgga

SEQ ID NO: 5689227 - DNA, 25 bp, Homo sapien
gtactggatcttgttaatttgtagt

SEQ ID NO: 5689228 - DNA, 25 bp, Homo sapien
tatctgtcttaagttgaaaatcttc

SEQ ID NO: 5689229 - DNA, 25 bp, Homo sapien
tatggtatatctgtcttaagttgaa

SEQ ID NO: 5689230 - DNA, 25 bp, Homo sapien
actttccctgaggtactggatcttg

SEQ ID NO: 5689231 - DNA, 25 bp, Homo sapien
gaagattttcaacttaagacagata

SEQ ID NO: 5689232 - DNA, 25 bp, Homo sapien
tcaacttaagacagatataccatat

SEQ ID NO: 5689233 - DNA, 25 bp, Homo sapien
gatccagtacctcagggaaagtgca

SEQ ID NO: 5689234 - DNA, 25 bp, Homo sapien
actacaaattaacaagatccagtac

SEQ ID NO: 5689235 - DNA, 25 bp, Homo sapien
tccagtacctcagggaaagtgcact

SEQ ID NO: 5689236 - DNA, 25 bp, Homo sapien
caagatccagtacctcagggaaagt

SEQ ID NO: 5689237 - DNA, 25 bp, Homo sapien
tccgataactacttcgttggttata

SEQ ID NO: 5689238 - DNA, 25 bp, Homo sapien
tggttataacactcactctaacgtg

SEQ ID NO: 5689239 - DNA, 25 bp, Homo sapien
gttataacactcactctaacgtgca

SEQ ID NO: 5689240 - DNA, 25 bp, Homo sapien
tacttcgttggttataacactcact

SEQ ID NO: 5689241 - DNA, 25 bp, Homo sapien
tcgttggttataacactcactctaa

SEQ ID NO: 5689242 - DNA, 25 bp, Homo sapien
gttttgctgacttccgataactact

SEQ ID NO: 5689243 - DNA, 25 bp, Homo sapien
tgcacgttagagtgagtgttataac

SEQ ID NO: 5689244 - DNA, 25 bp, Homo sapien
tgagtgttataaccaacgaagtagt

SEQ ID NO: 5689245 - DNA, 25 bp, Homo sapien
agtagttatcggaagtcagcaaaac

SEQ ID NO: 5689246 - DNA, 25 bp, Homo sapien
tataaccaacgaagtagttatcgga

SEQ ID NO: 5689247 - DNA, 25 bp, Homo sapien
tagagtgagtgttataaccaacgaa

SEQ ID NO: 5689248 - DNA, 25 bp, Homo sapien
cacgttagagtgagtgttataacca

SEQ ID NO: 5689249 - DNA, 25 bp, Homo sapien
agtacatccatctatctacctgtca

SEQ ID NO: 5689250 - DNA, 25 bp, Homo sapien
aagtacatccatctatctacctgtc

SEQ ID NO: 5689251 - DNA, 25 bp, Homo sapien
gtgacattggcttaagtacatccat

SEQ ID NO: 5689252 - DNA, 25 bp, Homo sapien
tgacaggtagatagatggatgtact

SEQ ID NO: 5689253 - DNA, 25 bp, Homo sapien
gacaggtagatagatggatgtactt

SEQ ID NO: 5689254 - DNA, 25 bp, Homo sapien
atggatgtacttaagccaatgtcac

SEQ ID NO: 5689255 - DNA, 25 bp, Homo sapien
agaatttctttatctgtcccatggg

SEQ ID NO: 5689256 - DNA, 25 bp, Homo sapien
gcatttaggtaaacatttgacttag

SEQ ID NO: 5689257 - DNA, 25 bp, Homo sapien
agtacatccatctatctacctgtca

SEQ ID NO: 5689258 - DNA, 25 bp, Homo sapien
cacattgcatagcatttaggtaaac

SEQ ID NO: 5689259 - DNA, 25 bp, Homo sapien
tctacctgtcatccacattgcatag

SEQ ID NO: 5689260 - DNA, 25 bp, Homo sapien
gtgacattggcttaagtacatccat

SEQ ID NO: 5689261 - DNA, 25 bp, Homo sapien
tgacaggtagatagatggatgtact

SEQ ID NO: 5689262 - DNA, 25 bp, Homo sapien
cccatgggacagataaagaaattct

SEQ ID NO: 5689263 - DNA, 25 bp, Homo sapien
atggatgtacttaagccaatgtcac

SEQ ID NO: 5689264 - DNA, 25 bp, Homo sapien
tatgcaatgtggatgacaggtagat

SEQ ID NO: 5689265 - DNA, 25 bp, Homo sapien
ctaagtcaaatgtttacctaaatgc

SEQ ID NO: 5689266 - DNA, 25 bp, Homo sapien
tttacctaaatgctatgcaatgtgg

SEQ ID NO: 5689267 - DNA, 25 bp, Homo sapien
tccagatttggagcctcctagcata

SEQ ID NO: 5689268 - DNA, 25 bp, Homo sapien
tggagcctcctagcatatcaattgc

SEQ ID NO: 5689269 - DNA, 25 bp, Homo sapien
ctgtctacatgaatcatttatctga

SEQ ID NO: 5689270 - DNA, 25 bp, Homo sapien
caattgctactgtctacatgaatca

SEQ ID NO: 5689271 - DNA, 25 bp, Homo sapien
gcatatcaattgctactgtctacat

SEQ ID NO: 5689272 - DNA, 25 bp, Homo sapien
caatgttcaggtgagttaatttttc

SEQ ID NO: 5689273 - DNA, 25 bp, Homo sapien
tcagataaatgattcatgtagacag

SEQ ID NO: 5689274 - DNA, 25 bp, Homo sapien
gattcatgtagacagtagcaattga

SEQ ID NO: 5689275 - DNA, 25 bp, Homo sapien
gcaattgatatgctaggaggctcca

SEQ ID NO: 5689276 - DNA, 25 bp, Homo sapien
gaaaaattaactcacctgaacattg

SEQ ID NO: 5689277 - DNA, 25 bp, Homo sapien
gacagtagcaattgatatgctagga

SEQ ID NO: 5689278 - DNA, 25 bp, Homo sapien
tatgctaggaggctccaaatctgga

SEQ ID NO: 5689279 - DNA, 25 bp, Homo sapien
agtgagcccagatcatggcactcta

SEQ ID NO: 5689280 - DNA, 25 bp, Homo sapien
tcatggcactctattctagcctggg

SEQ ID NO: 5689281 - DNA, 25 bp, Homo sapien
atggcactctattctagcctgggtg

SEQ ID NO: 5689282 - DNA, 25 bp, Homo sapien
gatcatggcactctattctagcctg

SEQ ID NO: 5689283 - DNA, 25 bp, Homo sapien
gagcccagatcatggcactctattc

SEQ ID NO: 5689284 - DNA, 25 bp, Homo sapien
cccagatcatggcactctattctag

SEQ ID NO: 5689285 - DNA, 25 bp, Homo sapien
gctagaatagagtgccatgatctgg

SEQ ID NO: 5689286 - DNA, 25 bp, Homo sapien
cacccaggctagaatagagtgccat

SEQ ID NO: 5689287 - DNA, 25 bp, Homo sapien
gaatagagtgccatgatctgggctc

SEQ ID NO: 5689288 - DNA, 25 bp, Homo sapien
caggctagaatagagtgccatgatc

SEQ ID NO: 5689289 - DNA, 25 bp, Homo sapien
tagagtgccatgatctgggctcact

SEQ ID NO: 5689290 - DNA, 25 bp, Homo sapien
cccaggctagaatagagtgccatga

SEQ ID NO: 5689291 - DNA, 25 bp, Homo sapien
tacatacttataataagacaaccca

SEQ ID NO: 5689292 - DNA, 25 bp, Homo sapien
acatacttataataagacaacccaa

SEQ ID NO: 5689293 - DNA, 25 bp, Homo sapien
catacatacttataataagacaacc

SEQ ID NO: 5689294 - DNA, 25 bp, Homo sapien
tacatacatacttataataagacaa

SEQ ID NO: 5689295 - DNA, 25 bp, Homo sapien
acatacatacttataataagacaac

SEQ ID NO: 5689296 - DNA, 25 bp, Homo sapien
ttgggttgtcttattataagtatgt

SEQ ID NO: 5689297 - DNA, 25 bp, Homo sapien
ggttgtcttattataagtatgtatg

SEQ ID NO: 5689298 - DNA, 25 bp, Homo sapien
gttgtcttattataagtatgtatgt

SEQ ID NO: 5689299 - DNA, 25 bp, Homo sapien
tgggttgtcttattataagtatgta

SEQ ID NO: 5689300 - DNA, 25 bp, Homo sapien
tacatacttataataagacaaccca

SEQ ID NO: 5689301 - DNA, 25 bp, Homo sapien
acatacttataataagacaacccaa

SEQ ID NO: 5689302 - DNA, 25 bp, Homo sapien
tacttataataagacaacccaataa

SEQ ID NO: 5689303 - DNA, 25 bp, Homo sapien
catacatacttataataagacaacc

SEQ ID NO: 5689304 - DNA, 25 bp, Homo sapien
agaatgaatcttatggtatgtgaat

SEQ ID NO: 5689305 - DNA, 25 bp, Homo sapien
caaaggggaaaaatacatacatact

SEQ ID NO: 5689306 - DNA, 25 bp, Homo sapien
agtatgtatgtatttttcccctttg

SEQ ID NO: 5689307 - DNA, 25 bp, Homo sapien
attcacataccataagattcattct

SEQ ID NO: 5689308 - DNA, 25 bp, Homo sapien
tcacataccataagattcattcttt

SEQ ID NO: 5689309 - DNA, 25 bp, Homo sapien
ttattgggttgtcttattataagta

SEQ ID NO: 5689310 - DNA, 25 bp, Homo sapien
taaattgataaattcacataccata

SEQ ID NO: 5689311 - DNA, 25 bp, Homo sapien
tgggttgtcttattataagtatgta

SEQ ID NO: 5689312 - DNA, 25 bp, Homo sapien
ttagggaaataccagtcaagacgca

SEQ ID NO: 5689313 - DNA, 25 bp, Homo sapien
acccactaagttggctggaataaca

SEQ ID NO: 5689314 - DNA, 25 bp, Homo sapien
cactaagttggctggaataacaaag

SEQ ID NO: 5689315 - DNA, 25 bp, Homo sapien
taccagtcaagacgcaatgagatac

SEQ ID NO: 5689316 - DNA, 25 bp, Homo sapien
gaaataccagtcaagacgcaatgag

SEQ ID NO: 5689317 - DNA, 25 bp, Homo sapien
aagttggctggaataacaaagatgg

SEQ ID NO: 5689318 - DNA, 25 bp, Homo sapien
tttgttattccagccaacttagtgg

SEQ ID NO: 5689319 - DNA, 25 bp, Homo sapien
gtatctcattgcgtcttgactggta

SEQ ID NO: 5689320 - DNA, 25 bp, Homo sapien
tgttattccagccaacttagtgggt

SEQ ID NO: 5689321 - DNA, 25 bp, Homo sapien
ccatctttgttattccagccaactt

SEQ ID NO: 5689322 - DNA, 25 bp, Homo sapien
gcgtcttgactggtatttccctaac

SEQ ID NO: 5689323 - DNA, 25 bp, Homo sapien
cattgcgtcttgactggtatttccc

SEQ ID NO: 5689324 - DNA, 25 bp, Homo sapien
taaccaatgaaatcaggcaacataa

SEQ ID NO: 5689325 - DNA, 25 bp, Homo sapien
aaccaatgaaatcaggcaacataag

SEQ ID NO: 5689326 - DNA, 25 bp, Homo sapien
cataaccaatgaaatcaggcaacat

SEQ ID NO: 5689327 - DNA, 25 bp, Homo sapien
gtcataaccaatgaaatcaggcaac

SEQ ID NO: 5689328 - DNA, 25 bp, Homo sapien
tcataaccaatgaaatcaggcaaca

SEQ ID NO: 5689329 - DNA, 25 bp, Homo sapien
accaatgaaatcaggcaacataagg

SEQ ID NO: 5689330 - DNA, 25 bp, Homo sapien
tgttgcctgatttcattggttatga

SEQ ID NO: 5689331 - DNA, 25 bp, Homo sapien
gttgcctgatttcattggttatgac

SEQ ID NO: 5689332 - DNA, 25 bp, Homo sapien
cttatgttgcctgatttcattggtt

SEQ ID NO: 5689333 - DNA, 25 bp, Homo sapien
ccttatgttgcctgatttcattggt

SEQ ID NO: 5689334 - DNA, 25 bp, Homo sapien
tatgttgcctgatttcattggttat

SEQ ID NO: 5689335 - DNA, 25 bp, Homo sapien
atgttgcctgatttcattggttatg

SEQ ID NO: 5689336 - DNA, 25 bp, Homo sapien
gactttcatttccttatgttgcctg

SEQ ID NO: 5689337 - DNA, 25 bp, Homo sapien
gttgcctgatttcattggttatgac

SEQ ID NO: 5689338 - DNA, 25 bp, Homo sapien
ttctttccaatctaaatgactttca

SEQ ID NO: 5689339 - DNA, 25 bp, Homo sapien
tataagatcatgtcagctgcaaata

SEQ ID NO: 5689340 - DNA, 25 bp, Homo sapien
ccttatgttgcctgatttcattggt

SEQ ID NO: 5689341 - DNA, 25 bp, Homo sapien
catgtcagctgcaaatagagatagt

SEQ ID NO: 5689342 - DNA, 25 bp, Homo sapien
tataaaatgtttcagatatataaaa

SEQ ID NO: 5689343 - DNA, 25 bp, Homo sapien
aatgtttcagatatataaaaaaggt

SEQ ID NO: 5689344 - DNA, 25 bp, Homo sapien
aaatgtttcagatatataaaaaagg

SEQ ID NO: 5689345 - DNA, 25 bp, Homo sapien
tctcaaaaaagaagaggttatggga

SEQ ID NO: 5689346 - DNA, 25 bp, Homo sapien
gaggttatgggaaaaatacaagcca

SEQ ID NO: 5689347 - DNA, 25 bp, Homo sapien
atgtttcagatatataaaaaaggtt

SEQ ID NO: 5689348 - DNA, 25 bp, Homo sapien
tggcttgtatttttcccataacctc

SEQ ID NO: 5689349 - DNA, 25 bp, Homo sapien
accttttttatatatctgaaacatt

SEQ ID NO: 5689350 - DNA, 25 bp, Homo sapien
aaccttttttatatatctgaaacat

SEQ ID NO: 5689351 - DNA, 25 bp, Homo sapien
ccttttttatatatctgaaacattt

SEQ ID NO: 5689352 - DNA, 25 bp, Homo sapien
tcccataacctcttcttttttgaga

SEQ ID NO: 5689353 - DNA, 25 bp, Homo sapien
tatctgaaacattttataataataa

SEQ ID NO: 5689354 - DNA, 25 bp, Homo sapien
atctcctgggttcaacagattcttg

SEQ ID NO: 5689355 - DNA, 25 bp, Homo sapien
catctcctgggttcaacagattctt

SEQ ID NO: 5689356 - DNA, 25 bp, Homo sapien
acctccatctcctgggttcaacaga

SEQ ID NO: 5689357 - DNA, 25 bp, Homo sapien
cctccatctcctgggttcaacagat

SEQ ID NO: 5689358 - DNA, 25 bp, Homo sapien
ccatctcctgggttcaacagattct

SEQ ID NO: 5689359 - DNA, 25 bp, Homo sapien
tccatctcctgggttcaacagattc

SEQ ID NO: 5689360 - DNA, 25 bp, Homo sapien
atctgttgaacccaggagatggagg

SEQ ID NO: 5689361 - DNA, 25 bp, Homo sapien
agaatctgttgaacccaggagatgg

SEQ ID NO: 5689362 - DNA, 25 bp, Homo sapien
gaatctgttgaacccaggagatgga

SEQ ID NO: 5689363 - DNA, 25 bp, Homo sapien
caagaatctgttgaacccaggagat

SEQ ID NO: 5689364 - DNA, 25 bp, Homo sapien
tctgttgaacccaggagatggaggt

SEQ ID NO: 5689365 - DNA, 25 bp, Homo sapien
aagaatctgttgaacccaggagatg

SEQ ID NO: 5689366 - DNA, 25 bp, Homo sapien
gtgaatgactttgtgctcctgtatg

SEQ ID NO: 5689367 - DNA, 25 bp, Homo sapien
tctccacatatatgttagtgaatga

SEQ ID NO: 5689368 - DNA, 25 bp, Homo sapien
ccacatatatgttagtgaatgactt

SEQ ID NO: 5689369 - DNA, 25 bp, Homo sapien
gttagtgaatgactttgtgctcctg

SEQ ID NO: 5689370 - DNA, 25 bp, Homo sapien
tatgttagtgaatgactttgtgctc

SEQ ID NO: 5689371 - DNA, 25 bp, Homo sapien
tagtgaatgactttgtgctcctgta

SEQ ID NO: 5689372 - DNA, 25 bp, Homo sapien
catacaggagcacaaagtcattcac

SEQ ID NO: 5689373 - DNA, 25 bp, Homo sapien
aagtcattcactaacatatatgtgg

SEQ ID NO: 5689374 - DNA, 25 bp, Homo sapien
ggagcacaaagtcattcactaacat

SEQ ID NO: 5689375 - DNA, 25 bp, Homo sapien
tacaggagcacaaagtcattcacta

SEQ ID NO: 5689376 - DNA, 25 bp, Homo sapien
tcattcactaacatatatgtggaga

SEQ ID NO: 5689377 - DNA, 25 bp, Homo sapien
caggagcacaaagtcattcactaac

SEQ ID NO: 5689378 - DNA, 25 bp, Homo sapien
tgctgattttactattttgggaata

SEQ ID NO: 5689379 - DNA, 25 bp, Homo sapien
gaaagaaaggcatggtctctctttt

SEQ ID NO: 5689380 - DNA, 25 bp, Homo sapien
aaagaaaggcatggtctctcttttc

SEQ ID NO: 5689381 - DNA, 25 bp, Homo sapien
aaaggcatggtctctcttttcttga

SEQ ID NO: 5689382 - DNA, 25 bp, Homo sapien
aggcatggtctctcttttcttgatc

SEQ ID NO: 5689383 - DNA, 25 bp, Homo sapien
tgattttactattttgggaataatc

SEQ ID NO: 5689384 - DNA, 25 bp, Homo sapien
gattattcccaaaatagtaaaatca

SEQ ID NO: 5689385 - DNA, 25 bp, Homo sapien
tcaagaaaagagagaccatgccttt

SEQ ID NO: 5689386 - DNA, 25 bp, Homo sapien
aaaagagagaccatgcctttctttc

SEQ ID NO: 5689387 - DNA, 25 bp, Homo sapien
tattcccaaaatagtaaaatcagca

SEQ ID NO: 5689388 - DNA, 25 bp, Homo sapien
gaaaagagagaccatgcctttcttt

SEQ ID NO: 5689389 - DNA, 25 bp, Homo sapien
gatcaagaaaagagagaccatgcct

SEQ ID NO: 5689390 - DNA, 25 bp, Homo sapien
caggacccctagatgaaccaaatgt

SEQ ID NO: 5689391 - DNA, 25 bp, Homo sapien
gcaggacccctagatgaaccaaatg

SEQ ID NO: 5689392 - DNA, 25 bp, Homo sapien
caaatgttgtttcacttactttgtt

SEQ ID NO: 5689393 - DNA, 25 bp, Homo sapien
ggacccctagatgaaccaaatgttg

SEQ ID NO: 5689394 - DNA, 25 bp, Homo sapien
aggacccctagatgaaccaaatgtt

SEQ ID NO: 5689395 - DNA, 25 bp, Homo sapien
accaaatgttgtttcacttactttg

SEQ ID NO: 5689396 - DNA, 25 bp, Homo sapien
caaagtaagtgaaacaacatttggt

SEQ ID NO: 5689397 - DNA, 25 bp, Homo sapien
catttggttcatctaggggtcctgc

SEQ ID NO: 5689398 - DNA, 25 bp, Homo sapien
acatttggttcatctaggggtcctg

SEQ ID NO: 5689399 - DNA, 25 bp, Homo sapien
aacaaagtaagtgaaacaacatttg

SEQ ID NO: 5689400 - DNA, 25 bp, Homo sapien
acaaagtaagtgaaacaacatttgg

SEQ ID NO: 5689401 - DNA, 25 bp, Homo sapien
caacatttggttcatctaggggtcc

SEQ ID NO: 5689402 - DNA, 25 bp, Homo sapien
caaagtaagtgaaacaacatttggt

SEQ ID NO: 5689403 - DNA, 25 bp, Homo sapien
gaaacaacatttggttcatctaggg

SEQ ID NO: 5689404 - DNA, 25 bp, Homo sapien
ggctggaccgaaagctatagaaact

SEQ ID NO: 5689405 - DNA, 25 bp, Homo sapien
gaaactgaaagcaaacaaaccatga

SEQ ID NO: 5689406 - DNA, 25 bp, Homo sapien
caaaccatgaaaacaaagtaagtga

SEQ ID NO: 5689407 - DNA, 25 bp, Homo sapien
gaccgaaagctatagaaactgaaag

SEQ ID NO: 5689408 - DNA, 25 bp, Homo sapien
tgaaattcctaattgtagggatggt

SEQ ID NO: 5689409 - DNA, 25 bp, Homo sapien
gaacctgactttgacaataacttgg

SEQ ID NO: 5689410 - DNA, 25 bp, Homo sapien
tatgtgaagtgaggctgttgtctga

SEQ ID NO: 5689411 - DNA, 25 bp, Homo sapien
ctgactgaaattcctaattgtaggg

SEQ ID NO: 5689412 - DNA, 25 bp, Homo sapien
gaagtgaggctgttgtctgactgaa

SEQ ID NO: 5689413 - DNA, 25 bp, Homo sapien
gctgttgtctgactgaaattcctaa

SEQ ID NO: 5689414 - DNA, 25 bp, Homo sapien
ccatccctacaattaggaatttcag

SEQ ID NO: 5689415 - DNA, 25 bp, Homo sapien
cagacaacagcctcacttcacataa

SEQ ID NO: 5689416 - DNA, 25 bp, Homo sapien
ccctacaattaggaatttcagtcag

SEQ ID NO: 5689417 - DNA, 25 bp, Homo sapien
caattaggaatttcagtcagacaac

SEQ ID NO: 5689418 - DNA, 25 bp, Homo sapien
gaatttcagtcagacaacagcctca

SEQ ID NO: 5689419 - DNA, 25 bp, Homo sapien
ccaagttattgtcaaagtcaggttc

SEQ ID NO: 5689420 - DNA, 25 bp, Homo sapien
gctgatctccaactcctgatctcaa

SEQ ID NO: 5689421 - DNA, 25 bp, Homo sapien
gcataagccactgcgcctgactcct

SEQ ID NO: 5689422 - DNA, 25 bp, Homo sapien
tgatctccaactcctgatctcaagt

SEQ ID NO: 5689423 - DNA, 25 bp, Homo sapien
aggcataagccactgcgcctgactc

SEQ ID NO: 5689424 - DNA, 25 bp, Homo sapien
ggcataagccactgcgcctgactcc

SEQ ID NO: 5689425 - DNA, 25 bp, Homo sapien
caggcataagccactgcgcctgact

SEQ ID NO: 5689426 - DNA, 25 bp, Homo sapien
aggagtcaggcgcagtggcttatgc

SEQ ID NO: 5689427 - DNA, 25 bp, Homo sapien
agtcaggcgcagtggcttatgcctg

SEQ ID NO: 5689428 - DNA, 25 bp, Homo sapien
acttgagatcaggagttggagatca

SEQ ID NO: 5689429 - DNA, 25 bp, Homo sapien
ttgagatcaggagttggagatcagc

SEQ ID NO: 5689430 - DNA, 25 bp, Homo sapien
gagtcaggcgcagtggcttatgcct

SEQ ID NO: 5689431 - DNA, 25 bp, Homo sapien
ggagtcaggcgcagtggcttatgcc

SEQ ID NO: 5689432 - DNA, 25 bp, Homo sapien
gaagcatccacctcctggtttcaag

SEQ ID NO: 5689433 - DNA, 25 bp, Homo sapien
tactgaagcatccacctcctggttt

SEQ ID NO: 5689434 - DNA, 25 bp, Homo sapien
catccacctcctggtttcaagcagt

SEQ ID NO: 5689435 - DNA, 25 bp, Homo sapien
actgaagcatccacctcctggtttc

SEQ ID NO: 5689436 - DNA, 25 bp, Homo sapien
tgaagcatccacctcctggtttcaa

SEQ ID NO: 5689437 - DNA, 25 bp, Homo sapien
aagcatccacctcctggtttcaagc

SEQ ID NO: 5689438 - DNA, 25 bp, Homo sapien
aaaccaggaggtggatgcttcagta

SEQ ID NO: 5689439 - DNA, 25 bp, Homo sapien
ttgaaaccaggaggtggatgcttca

SEQ ID NO: 5689440 - DNA, 25 bp, Homo sapien
gaaaccaggaggtggatgcttcagt

SEQ ID NO: 5689441 - DNA, 25 bp, Homo sapien
tgaaaccaggaggtggatgcttcag

SEQ ID NO: 5689442 - DNA, 25 bp, Homo sapien
gcttgaaaccaggaggtggatgctt

SEQ ID NO: 5689443 - DNA, 25 bp, Homo sapien
cttgaaaccaggaggtggatgcttc

SEQ ID NO: 5689444 - DNA, 25 bp, Homo sapien
tctttcagggcattcgggatatgtt

SEQ ID NO: 5689445 - DNA, 25 bp, Homo sapien
gtgccattaaagttgcataaagaaa

SEQ ID NO: 5689446 - DNA, 25 bp, Homo sapien
ttctgtctttcagggcattcgggat

SEQ ID NO: 5689447 - DNA, 25 bp, Homo sapien
taagtgccattaaagttgcataaag

SEQ ID NO: 5689448 - DNA, 25 bp, Homo sapien
cgggatatgttaaacttcagtgtgt

SEQ ID NO: 5689449 - DNA, 25 bp, Homo sapien
ggcattcgggatatgttaaacttca

SEQ ID NO: 5689450 - DNA, 25 bp, Homo sapien
tttctttatgcaactttaatggcac

SEQ ID NO: 5689451 - DNA, 25 bp, Homo sapien
atcccgaatgccctgaaagacagaa

SEQ ID NO: 5689452 - DNA, 25 bp, Homo sapien
tgaagtttaacatatcccgaatgcc

SEQ ID NO: 5689453 - DNA, 25 bp, Homo sapien
taacatatcccgaatgccctgaaag

SEQ ID NO: 5689454 - DNA, 25 bp, Homo sapien
catatcccgaatgccctgaaagaca

SEQ ID NO: 5689455 - DNA, 25 bp, Homo sapien
cacactgaagtttaacatatcccga

SEQ ID NO: 5689456 - DNA, 25 bp, Homo sapien
ctaattctaacatagctgttttggt

SEQ ID NO: 5689457 - DNA, 25 bp, Homo sapien
aacatagctgttttggttaagcggg

SEQ ID NO: 5689458 - DNA, 25 bp, Homo sapien
tgcagggtgtctttttgaatgtgtg

SEQ ID NO: 5689459 - DNA, 25 bp, Homo sapien
catagctgttttggttaagcgggtg

SEQ ID NO: 5689460 - DNA, 25 bp, Homo sapien
tgtgcagggtgtctttttgaatgtg

SEQ ID NO: 5689461 - DNA, 25 bp, Homo sapien
gttaagcgggtggaatgtgcagggt

SEQ ID NO: 5689462 - DNA, 25 bp, Homo sapien
cacattcaaaaagacaccctgcaca

SEQ ID NO: 5689463 - DNA, 25 bp, Homo sapien
cacacattcaaaaagacaccctgca

SEQ ID NO: 5689464 - DNA, 25 bp, Homo sapien
accaaaacagctatgttagaattag

SEQ ID NO: 5689465 - DNA, 25 bp, Homo sapien
cacccgcttaaccaaaacagctatg

SEQ ID NO: 5689466 - DNA, 25 bp, Homo sapien
accctgcacattccacccgcttaac

SEQ ID NO: 5689467 - DNA, 25 bp, Homo sapien
cccgcttaaccaaaacagctatgtt

SEQ ID NO: 5689468 - DNA, 25 bp, Homo sapien
tgtttggttcatgcttgaatttggt

SEQ ID NO: 5689469 - DNA, 25 bp, Homo sapien
agctgcactttgacccttcttaggg

SEQ ID NO: 5689470 - DNA, 25 bp, Homo sapien
caagctgcactttgacccttcttag

SEQ ID NO: 5689471 - DNA, 25 bp, Homo sapien
ttgttatagtaaaggccctcattta

SEQ ID NO: 5689472 - DNA, 25 bp, Homo sapien
tgcactttgacccttcttagggttg

SEQ ID NO: 5689473 - DNA, 25 bp, Homo sapien
catttaacatttcattgtttggttc

SEQ ID NO: 5689474 - DNA, 25 bp, Homo sapien
ccctaagaagggtcaaagtgcagct

SEQ ID NO: 5689475 - DNA, 25 bp, Homo sapien
caaccctaagaagggtcaaagtgca

SEQ ID NO: 5689476 - DNA, 25 bp, Homo sapien
gaaccaaacaatgaaatgttaaatg

SEQ ID NO: 5689477 - DNA, 25 bp, Homo sapien
ctaagaagggtcaaagtgcagcttg

SEQ ID NO: 5689478 - DNA, 25 bp, Homo sapien
aaccaaattcaagcatgaaccaaac

SEQ ID NO: 5689479 - DNA, 25 bp, Homo sapien
taaatgagggcctttactataacaa

SEQ ID NO: 5689480 - DNA, 25 bp, Homo sapien
aatatccttgttccacagttaagtt

SEQ ID NO: 5689481 - DNA, 25 bp, Homo sapien
gatgatgaaatatccttgttccaca

SEQ ID NO: 5689482 - DNA, 25 bp, Homo sapien
tgatgatgaaatatccttgttccac

SEQ ID NO: 5689483 - DNA, 25 bp, Homo sapien
gatgaaatatccttgttccacagtt

SEQ ID NO: 5689484 - DNA, 25 bp, Homo sapien
gaaatatccttgttccacagttaag

SEQ ID NO: 5689485 - DNA, 25 bp, Homo sapien
tttgatgatgaaatatccttgttcc

SEQ ID NO: 5689486 - DNA, 25 bp, Homo sapien
ggaacaaggatatttcatcatcaaa

SEQ ID NO: 5689487 - DNA, 25 bp, Homo sapien
aacttaactgtggaacaaggatatt

SEQ ID NO: 5689488 - DNA, 25 bp, Homo sapien
cttaactgtggaacaaggatatttc

SEQ ID NO: 5689489 - DNA, 25 bp, Homo sapien
tgtggaacaaggatatttcatcatc

SEQ ID NO: 5689490 - DNA, 25 bp, Homo sapien
aactgtggaacaaggatatttcatc

SEQ ID NO: 5689491 - DNA, 25 bp, Homo sapien
taactgtggaacaaggatatttcat

SEQ ID NO: 5689492 - DNA, 25 bp, Homo sapien
tattttgcctagttcctattagtat

SEQ ID NO: 5689493 - DNA, 25 bp, Homo sapien
tgcctagttcctattagtattcttt

SEQ ID NO: 5689494 - DNA, 25 bp, Homo sapien
gttaagctatcaaagcgtgataggt

SEQ ID NO: 5689495 - DNA, 25 bp, Homo sapien
taaccacaaacaaccttattcacaa

SEQ ID NO: 5689496 - DNA, 25 bp, Homo sapien
caaaaaagttaagctatcaaagcgt

SEQ ID NO: 5689497 - DNA, 25 bp, Homo sapien
tatcaaagcgtgataggtattttgc

SEQ ID NO: 5689498 - DNA, 25 bp, Homo sapien
cacgctttgatagcttaactttttt

SEQ ID NO: 5689499 - DNA, 25 bp, Homo sapien
gaatactaataggaactaggcaaaa

SEQ ID NO: 5689500 - DNA, 25 bp, Homo sapien
ttgtgaataaggttgtttgtggtta

SEQ ID NO: 5689501 - DNA, 25 bp, Homo sapien
gcaaaatacctatcacgctttgata

SEQ ID NO: 5689502 - DNA, 25 bp, Homo sapien
aaagaatactaataggaactaggca

SEQ ID NO: 5689503 - DNA, 25 bp, Homo sapien
cctatcacgctttgatagcttaact

SEQ ID NO: 5689504 - DNA, 25 bp, Homo sapien
tgcgacgttaactagaactttggga

SEQ ID NO: 5689505 - DNA, 25 bp, Homo sapien
tagtgtcccattagactctgaagtc

SEQ ID NO: 5689506 - DNA, 25 bp, Homo sapien
tctgaagtcatgctgtcgtcatcaa

SEQ ID NO: 5689507 - DNA, 25 bp, Homo sapien
aactttgggaatagtgtcccattag

SEQ ID NO: 5689508 - DNA, 25 bp, Homo sapien
catgctgtcgtcatcaaaactgtga

SEQ ID NO: 5689509 - DNA, 25 bp, Homo sapien
tgtcgtcatcaaaactgtgaaaagc

SEQ ID NO: 5689510 - DNA, 25 bp, Homo sapien
tttgatgacgacagcatgacttcag

SEQ ID NO: 5689511 - DNA, 25 bp, Homo sapien
gagtctaatgggacactattcccaa

SEQ ID NO: 5689512 - DNA, 25 bp, Homo sapien
gacttcagagtctaatgggacacta

SEQ ID NO: 5689513 - DNA, 25 bp, Homo sapien
tcccaaagttctagttaacgtcgca

SEQ ID NO: 5689514 - DNA, 25 bp, Homo sapien
tcacagttttgatgacgacagcatg

SEQ ID NO: 5689515 - DNA, 25 bp, Homo sapien
gcttttcacagttttgatgacgaca

SEQ ID NO: 5689516 - DNA, 25 bp, Homo sapien
taagtcagccttatgaggtgtagaa

SEQ ID NO: 5689517 - DNA, 25 bp, Homo sapien
tcagccttatgaggtgtagaaactg

SEQ ID NO: 5689518 - DNA, 25 bp, Homo sapien
aggatccagggaagtctccgtgcat

SEQ ID NO: 5689519 - DNA, 25 bp, Homo sapien
gatccagggaagtctccgtgcatta

SEQ ID NO: 5689520 - DNA, 25 bp, Homo sapien
ttcagctaattaagtcagccttatg

SEQ ID NO: 5689521 - DNA, 25 bp, Homo sapien
ccagggaagtctccgtgcattattt

SEQ ID NO: 5689522 - DNA, 25 bp, Homo sapien
aaataatgcacggagacttccctgg

SEQ ID NO: 5689523 - DNA, 25 bp, Homo sapien
cacctcataaggctgacttaattag

SEQ ID NO: 5689524 - DNA, 25 bp, Homo sapien
cagtttctacacctcataaggctga

SEQ ID NO: 5689525 - DNA, 25 bp, Homo sapien
cataaggctgacttaattagctgaa

SEQ ID NO: 5689526 - DNA, 25 bp, Homo sapien
gtttctacacctcataaggctgact

SEQ ID NO: 5689527 - DNA, 25 bp, Homo sapien
aatgcacggagacttccctggatcc

SEQ ID NO: 5689528 - DNA, 25 bp, Homo sapien
gaggagttccatgccactcacagga

SEQ ID NO: 5689529 - DNA, 25 bp, Homo sapien
agttccatgccactcacaggagggc

SEQ ID NO: 5689530 - DNA, 25 bp, Homo sapien
ggagttccatgccactcacaggagg

SEQ ID NO: 5689531 - DNA, 25 bp, Homo sapien
aggagttccatgccactcacaggag

SEQ ID NO: 5689532 - DNA, 25 bp, Homo sapien
gagttccatgccactcacaggaggg

SEQ ID NO: 5689533 - DNA, 25 bp, Homo sapien
tcctgtgagtggcatggaactcctc

SEQ ID NO: 5689534 - DNA, 25 bp, Homo sapien
ctcctgtgagtggcatggaactcct

SEQ ID NO: 5689535 - DNA, 25 bp, Homo sapien
ccctcctgtgagtggcatggaactc

SEQ ID NO: 5689536 - DNA, 25 bp, Homo sapien
gccctcctgtgagtggcatggaact

SEQ ID NO: 5689537 - DNA, 25 bp, Homo sapien
cctcctgtgagtggcatggaactcc

SEQ ID NO: 5689538 - DNA, 25 bp, Homo sapien
ctgcattgtgttggagccagggcat

SEQ ID NO: 5689539 - DNA, 25 bp, Homo sapien
atgccctggctccaacacaatgcag

SEQ ID NO: 5689540 - DNA, 25 bp, Homo sapien
tgggcctggaggataaaattaagga

SEQ ID NO: 5689541 - DNA, 25 bp, Homo sapien
catggtgggcctggaggataaaatt

SEQ ID NO: 5689542 - DNA, 25 bp, Homo sapien
tttgggctgggaagaggagcaggca

SEQ ID NO: 5689543 - DNA, 25 bp, Homo sapien
aggaagggctttgggctgggaagag

SEQ ID NO: 5689544 - DNA, 25 bp, Homo sapien
cacttcctgaggaagctgcattgtg

SEQ ID NO: 5689545 - DNA, 25 bp, Homo sapien
ctgcattgtgttggagccagggcat

SEQ ID NO: 5689546 - DNA, 25 bp, Homo sapien
ctcttcccagcccaaagcccttcct

SEQ ID NO: 5689547 - DNA, 25 bp, Homo sapien
tccttaattttatcctccaggccca

SEQ ID NO: 5689548 - DNA, 25 bp, Homo sapien
atgccctggctccaacacaatgcag

SEQ ID NO: 5689549 - DNA, 25 bp, Homo sapien
aacacaatgcagcttcctcaggaag

SEQ ID NO: 5689550 - DNA, 25 bp, Homo sapien
aattttatcctccaggcccaccatg

SEQ ID NO: 5689551 - DNA, 25 bp, Homo sapien
ttaattttatcctccaggcccacca

SEQ ID NO: 5689552 - DNA, 25 bp, Homo sapien
gccatgtttctcacggactccaaca

SEQ ID NO: 5689553 - DNA, 25 bp, Homo sapien
tgggcattgatcgagtcgccatgtt

SEQ ID NO: 5689554 - DNA, 25 bp, Homo sapien
gatcgagtcgccatgtttctcacgg

SEQ ID NO: 5689555 - DNA, 25 bp, Homo sapien
aacatcaaggtacgtagcaaccctc

SEQ ID NO: 5689556 - DNA, 25 bp, Homo sapien
ccaacaacatcaaggtacgtagcaa

SEQ ID NO: 5689557 - DNA, 25 bp, Homo sapien
aaggtacgtagcaaccctccacaga

SEQ ID NO: 5689558 - DNA, 25 bp, Homo sapien
tgttggagtccgtgagaaacatggc

SEQ ID NO: 5689559 - DNA, 25 bp, Homo sapien
aacatggcgactcgatcaatgccca

SEQ ID NO: 5689560 - DNA, 25 bp, Homo sapien
tctgtggagggttgctacgtacctt

SEQ ID NO: 5689561 - DNA, 25 bp, Homo sapien
ttgctacgtaccttgatgttgttgg

SEQ ID NO: 5689562 - DNA, 25 bp, Homo sapien
tccgtgagaaacatggcgactcgat

SEQ ID NO: 5689563 - DNA, 25 bp, Homo sapien
tggagtccgtgagaaacatggcgac

SEQ ID NO: 5689564 - DNA, 25 bp, Homo sapien
aaaacttctgtactgccctggaata

SEQ ID NO: 5689565 - DNA, 25 bp, Homo sapien
gaaaacttctgtactgccctggaat

SEQ ID NO: 5689566 - DNA, 25 bp, Homo sapien
tgaaaacttctgtactgccctggaa

SEQ ID NO: 5689567 - DNA, 25 bp, Homo sapien
tattccagggcagtacagaagtttt

SEQ ID NO: 5689568 - DNA, 25 bp, Homo sapien
ttccagggcagtacagaagttttca

SEQ ID NO: 5689569 - DNA, 25 bp, Homo sapien
attccagggcagtacagaagttttc

SEQ ID NO: 5689570 - DNA, 25 bp, Homo sapien
tgtcgtacataagaggaacttcatt

SEQ ID NO: 5689571 - DNA, 25 bp, Homo sapien
aacttcattattaatctccgtatgg

SEQ ID NO: 5689572 - DNA, 25 bp, Homo sapien
catctggtattgagtctgtcgtaca

SEQ ID NO: 5689573 - DNA, 25 bp, Homo sapien
gtctgtcgtacataagaggaacttc

SEQ ID NO: 5689574 - DNA, 25 bp, Homo sapien
atggtgacttcatctggtattgagt

SEQ ID NO: 5689575 - DNA, 25 bp, Homo sapien
taatctccgtatggaaagcgtgacg

SEQ ID NO: 5689576 - DNA, 25 bp, Homo sapien
tgtacgacagactcaataccagatg

SEQ ID NO: 5689577 - DNA, 25 bp, Homo sapien
gcgtcacgctttccatacggagatt

SEQ ID NO: 5689578 - DNA, 25 bp, Homo sapien
actcaataccagatgaagtcaccat

SEQ ID NO: 5689579 - DNA, 25 bp, Homo sapien
tccatacggagattaataatgaagt

SEQ ID NO: 5689580 - DNA, 25 bp, Homo sapien
aatgaagttcctcttatgtacgaca

SEQ ID NO: 5689581 - DNA, 25 bp, Homo sapien
gaagttcctcttatgtacgacagac

SEQ ID NO: 5689582 - DNA, 25 bp, Homo sapien
cagcgtatacgttcttggtgacttc

SEQ ID NO: 5689583 - DNA, 25 bp, Homo sapien
actcaccaggaaataccagccttaa

SEQ ID NO: 5689584 - DNA, 25 bp, Homo sapien
gccttaaccctgatctgtgtcagcg

SEQ ID NO: 5689585 - DNA, 25 bp, Homo sapien
tgatctgtgtcagcgtatacgttct

SEQ ID NO: 5689586 - DNA, 25 bp, Homo sapien
gtgccaactcaccaggaaataccag

SEQ ID NO: 5689587 - DNA, 25 bp, Homo sapien
ataccagccttaaccctgatctgtg

SEQ ID NO: 5689588 - DNA, 25 bp, Homo sapien
caagaacgtatacgctgacacagat

SEQ ID NO: 5689589 - DNA, 25 bp, Homo sapien
tacgctgacacagatcagggttaag

SEQ ID NO: 5689590 - DNA, 25 bp, Homo sapien
cacagatcagggttaaggctggtat

SEQ ID NO: 5689591 - DNA, 25 bp, Homo sapien
ttaaggctggtatttcctggtgagt

SEQ ID NO: 5689592 - DNA, 25 bp, Homo sapien
gaagtcaccaagaacgtatacgctg

SEQ ID NO: 5689593 - DNA, 25 bp, Homo sapien
tggtatttcctggtgagttggcaca

SEQ ID NO: 5689594 - DNA, 25 bp, Homo sapien
gatatgcaatgcgtatactgagctg

SEQ ID NO: 5689595 - DNA, 25 bp, Homo sapien
gcaatgcgtatactgagctgaatga

SEQ ID NO: 5689596 - DNA, 25 bp, Homo sapien
aaagagatatgcaatgcgtatactg

SEQ ID NO: 5689597 - DNA, 25 bp, Homo sapien
tgaatgatcccatgcggcagcggca

SEQ ID NO: 5689598 - DNA, 25 bp, Homo sapien
tgcgtatactgagctgaatgatccc

SEQ ID NO: 5689599 - DNA, 25 bp, Homo sapien
gctgaatgatcccatgcggcagcgg

SEQ ID NO: 5689600 - DNA, 25 bp, Homo sapien
cagtatacgcattgcatatctcttt

SEQ ID NO: 5689601 - DNA, 25 bp, Homo sapien
gccgctgccgcatgggatcattcag

SEQ ID NO: 5689602 - DNA, 25 bp, Homo sapien
cagctcagtatacgcattgcatatc

SEQ ID NO: 5689603 - DNA, 25 bp, Homo sapien
tgccgctgccgcatgggatcattca

SEQ ID NO: 5689604 - DNA, 25 bp, Homo sapien
gggatcattcagctcagtatacgca

SEQ ID NO: 5689605 - DNA, 25 bp, Homo sapien
cattcagctcagtatacgcattgca

SEQ ID NO: 5689606 - DNA, 25 bp, Homo sapien
ctcctgtccctaggcaccgctctaa

SEQ ID NO: 5689607 - DNA, 25 bp, Homo sapien
cctgtccctaggcaccgctctaaag

SEQ ID NO: 5689608 - DNA, 25 bp, Homo sapien
tcctgtccctaggcaccgctctaaa

SEQ ID NO: 5689609 - DNA, 25 bp, Homo sapien
aaagagggtctgactgagcgctttg

SEQ ID NO: 5689610 - DNA, 25 bp, Homo sapien
caccgctctaaagagggtctgactg

SEQ ID NO: 5689611 - DNA, 25 bp, Homo sapien
ccgctctaaagagggtctgactgag

SEQ ID NO: 5689612 - DNA, 25 bp, Homo sapien
accgctctaaagagggtctgactga

SEQ ID NO: 5689613 - DNA, 25 bp, Homo sapien
gactgagcgctttgagctgtttgtc

SEQ ID NO: 5689614 - DNA, 25 bp, Homo sapien
gacaaacagctcaaagcgctcagtc

SEQ ID NO: 5689615 - DNA, 25 bp, Homo sapien
ctcagtcagaccctctttagagcgg

SEQ ID NO: 5689616 - DNA, 25 bp, Homo sapien
caaagcgctcagtcagaccctcttt

SEQ ID NO: 5689617 - DNA, 25 bp, Homo sapien
cagtcagaccctctttagagcggtg

SEQ ID NO: 5689618 - DNA, 25 bp, Homo sapien
tcagtcagaccctctttagagcggt

SEQ ID NO: 5689619 - DNA, 25 bp, Homo sapien
ttagagcggtgcctagggacaggag

SEQ ID NO: 5689620 - DNA, 25 bp, Homo sapien
tttagagcggtgcctagggacagga

SEQ ID NO: 5689621 - DNA, 25 bp, Homo sapien
ctttagagcggtgcctagggacagg

SEQ ID NO: 5689622 - DNA, 25 bp, Homo sapien
tattcagcctcctctttggtctcct

SEQ ID NO: 5689623 - DNA, 25 bp, Homo sapien
cctgtccctaggcaccgctctaaag

SEQ ID NO: 5689624 - DNA, 25 bp, Homo sapien
gggcctctatattcagcctcctctt

SEQ ID NO: 5689625 - DNA, 25 bp, Homo sapien
tttggtctcctgtccctaggcaccg

SEQ ID NO: 5689626 - DNA, 25 bp, Homo sapien
gactgagcgctttgagctgtttgtc

SEQ ID NO: 5689627 - DNA, 25 bp, Homo sapien
tctaaagagggtctgactgagcgct

SEQ ID NO: 5689628 - DNA, 25 bp, Homo sapien
cggtgcctagggacaggagaccaaa

SEQ ID NO: 5689629 - DNA, 25 bp, Homo sapien
gaggctgaatatagaggcccctaat

SEQ ID NO: 5689630 - DNA, 25 bp, Homo sapien
gagaccaaagaggaggctgaatata

SEQ ID NO: 5689631 - DNA, 25 bp, Homo sapien
tgcctagggacaggagaccaaagag

SEQ ID NO: 5689632 - DNA, 25 bp, Homo sapien
aagaggaggctgaatatagaggccc

SEQ ID NO: 5689633 - DNA, 25 bp, Homo sapien
ctttagagcggtgcctagggacagg

SEQ ID NO: 5689634 - DNA, 25 bp, Homo sapien
tgtgatcccggctactcaaggctga

SEQ ID NO: 5689635 - DNA, 25 bp, Homo sapien
atacaaaaattagccaggcatagtg

SEQ ID NO: 5689636 - DNA, 25 bp, Homo sapien
ctgtgatcccggctactcaaggctg

SEQ ID NO: 5689637 - DNA, 25 bp, Homo sapien
gcatagtggcatgggcctgtgatcc

SEQ ID NO: 5689638 - DNA, 25 bp, Homo sapien
catagtggcatgggcctgtgatccc

SEQ ID NO: 5689639 - DNA, 25 bp, Homo sapien
aggcaggagaagtgcttgaacccag

SEQ ID NO: 5689640 - DNA, 25 bp, Homo sapien
cagccttgagtagccgggatcacag

SEQ ID NO: 5689641 - DNA, 25 bp, Homo sapien
ctgggttcaagcacttctcctgcct

SEQ ID NO: 5689642 - DNA, 25 bp, Homo sapien
ggatcacaggcccatgccactatgc

SEQ ID NO: 5689643 - DNA, 25 bp, Homo sapien
tcagccttgagtagccgggatcaca

SEQ ID NO: 5689644 - DNA, 25 bp, Homo sapien
gggatcacaggcccatgccactatg

SEQ ID NO: 5689645 - DNA, 25 bp, Homo sapien
cactatgcctggctaatttttgtat

SEQ ID NO: 5689646 - DNA, 25 bp, Homo sapien
tgtttgatcgttagaccaacctggc

SEQ ID NO: 5689647 - DNA, 25 bp, Homo sapien
tgagtccactagaattcaattattg

SEQ ID NO: 5689648 - DNA, 25 bp, Homo sapien
tgcaatcagtaacacttttgagtcc

SEQ ID NO: 5689649 - DNA, 25 bp, Homo sapien
tattagatgtttgatcgttagacca

SEQ ID NO: 5689650 - DNA, 25 bp, Homo sapien
caggcttctgactgcaatcagtaac

SEQ ID NO: 5689651 - DNA, 25 bp, Homo sapien
actgcatgcaggcttctgactgcaa

SEQ ID NO: 5689652 - DNA, 25 bp, Homo sapien
caataattgaattctagtggactca

SEQ ID NO: 5689653 - DNA, 25 bp, Homo sapien
tgttactgattgcagtcagaagcct

SEQ ID NO: 5689654 - DNA, 25 bp, Homo sapien
gccaggttggtctaacgatcaaaca

SEQ ID NO: 5689655 - DNA, 25 bp, Homo sapien
gactcaaaagtgttactgattgcag

SEQ ID NO: 5689656 - DNA, 25 bp, Homo sapien
ggtctaacgatcaaacatctaatac

SEQ ID NO: 5689657 - DNA, 25 bp, Homo sapien
ttgcagtcagaagcctgcatgcagt

SEQ ID NO: 5689658 - DNA, 25 bp, Homo sapien
gcaagaggtgtggtccattttaaca

SEQ ID NO: 5689659 - DNA, 25 bp, Homo sapien
cattttaacagtctgcccgctggcc

SEQ ID NO: 5689660 - DNA, 25 bp, Homo sapien
ggcctgttaggaagatcattaaacc

SEQ ID NO: 5689661 - DNA, 25 bp, Homo sapien
tggtccattttaacagtctgcccgc

SEQ ID NO: 5689662 - DNA, 25 bp, Homo sapien
gatcattaaaccttcctggtctctc

SEQ ID NO: 5689663 - DNA, 25 bp, Homo sapien
gcccgctggcctgttaggaagatca

SEQ ID NO: 5689664 - DNA, 25 bp, Homo sapien
tgttaaaatggaccacacctcttgc

SEQ ID NO: 5689665 - DNA, 25 bp, Homo sapien
atgatcttcctaacaggccagcggg

SEQ ID NO: 5689666 - DNA, 25 bp, Homo sapien
ggccagcgggcagactgttaaaatg

SEQ ID NO: 5689667 - DNA, 25 bp, Homo sapien
ggtttaatgatcttcctaacaggcc

SEQ ID NO: 5689668 - DNA, 25 bp, Homo sapien
gagagaccaggaaggtttaatgatc

SEQ ID NO: 5689669 - DNA, 25 bp, Homo sapien
gcgggcagactgttaaaatggacca

SEQ ID NO: 5689670 - DNA, 25 bp, Homo sapien
tgtgcaaacacgtatcaagcctctg

SEQ ID NO: 5689671 - DNA, 25 bp, Homo sapien
tatcaagcctctggtgataacccat

SEQ ID NO: 5689672 - DNA, 25 bp, Homo sapien
caaacacgtatcaagcctctggtga

SEQ ID NO: 5689673 - DNA, 25 bp, Homo sapien
aacagacctcattgtgcaaacacgt

SEQ ID NO: 5689674 - DNA, 25 bp, Homo sapien
gacctcattgtgcaaacacgtatca

SEQ ID NO: 5689675 - DNA, 25 bp, Homo sapien
tgcaaacacgtatcaagcctctggt

SEQ ID NO: 5689676 - DNA, 25 bp, Homo sapien
cagaggcttgatacgtgtttgcaca

SEQ ID NO: 5689677 - DNA, 25 bp, Homo sapien
tgatacgtgtttgcacaatgaggtc

SEQ ID NO: 5689678 - DNA, 25 bp, Homo sapien
acgtgtttgcacaatgaggtctgtt

SEQ ID NO: 5689679 - DNA, 25 bp, Homo sapien
ggttatcaccagaggcttgatacgt

SEQ ID NO: 5689680 - DNA, 25 bp, Homo sapien
atgggttatcaccagaggcttgata

SEQ ID NO: 5689681 - DNA, 25 bp, Homo sapien
caccagaggcttgatacgtgtttgc

SEQ ID NO: 5689682 - DNA, 25 bp, Homo sapien
cacatacgatcttatcctccagggc

SEQ ID NO: 5689683 - DNA, 25 bp, Homo sapien
tccacgtggtcactccacatacgat

SEQ ID NO: 5689684 - DNA, 25 bp, Homo sapien
catacgatcttatcctccagggcct

SEQ ID NO: 5689685 - DNA, 25 bp, Homo sapien
atacgatcttatcctccagggcctc

SEQ ID NO: 5689686 - DNA, 25 bp, Homo sapien
tggtcactccacatacgatcttatc

SEQ ID NO: 5689687 - DNA, 25 bp, Homo sapien
cgtggtcactccacatacgatctta

SEQ ID NO: 5689688 - DNA, 25 bp, Homo sapien
cctggaggataagatcgtatgtgga

SEQ ID NO: 5689689 - DNA, 25 bp, Homo sapien
gataagatcgtatgtggagtgacca

SEQ ID NO: 5689690 - DNA, 25 bp, Homo sapien
atcgtatgtggagtgaccacgtgga

SEQ ID NO: 5689691 - DNA, 25 bp, Homo sapien
taagatcgtatgtggagtgaccacg

SEQ ID NO: 5689692 - DNA, 25 bp, Homo sapien
gaggccctggaggataagatcgtat

SEQ ID NO: 5689693 - DNA, 25 bp, Homo sapien
ggccctggaggataagatcgtatgt

SEQ ID NO: 5689694 - DNA, 25 bp, Homo sapien
tttgactggtggtctttctgctggg

SEQ ID NO: 5689695 - DNA, 25 bp, Homo sapien
ttgactggtggtctttctgctgggt

SEQ ID NO: 5689696 - DNA, 25 bp, Homo sapien
actggtggtctttctgctgggtggt

SEQ ID NO: 5689697 - DNA, 25 bp, Homo sapien
aagattttgtggtttgactggtggt

SEQ ID NO: 5689698 - DNA, 25 bp, Homo sapien
ggtggtctttctgctgggtggtgtt

SEQ ID NO: 5689699 - DNA, 25 bp, Homo sapien
ttaacaatttattgtcaagattttg

SEQ ID NO: 5689700 - DNA, 25 bp, Homo sapien
acccagcagaaagaccaccagtcaa

SEQ ID NO: 5689701 - DNA, 25 bp, Homo sapien
accaccagtcaaaccacaaaatctt

SEQ ID NO: 5689702 - DNA, 25 bp, Homo sapien
accacccagcagaaagaccaccagt

SEQ ID NO: 5689703 - DNA, 25 bp, Homo sapien
caaaatcttgacaataaattgttaa

SEQ ID NO: 5689704 - DNA, 25 bp, Homo sapien
cccagcagaaagaccaccagtcaaa

SEQ ID NO: 5689705 - DNA, 25 bp, Homo sapien
aacaccacccagcagaaagaccacc

SEQ ID NO: 5689706 - DNA, 25 bp, Homo sapien
tactaagctctgtgccaaataattt

SEQ ID NO: 5689707 - DNA, 25 bp, Homo sapien
gatctcagttaatcccgtccagctt

SEQ ID NO: 5689708 - DNA, 25 bp, Homo sapien
tcagttaatcccgtccagcttttaa

SEQ ID NO: 5689709 - DNA, 25 bp, Homo sapien
tatgtgtgtgatctcagttaatccc

SEQ ID NO: 5689710 - DNA, 25 bp, Homo sapien
aaaagctatagggtagggtgggcat

SEQ ID NO: 5689711 - DNA, 25 bp, Homo sapien
tgtgatctcagttaatcccgtccag

SEQ ID NO: 5689712 - DNA, 25 bp, Homo sapien
gggattaactgagatcacacacata

SEQ ID NO: 5689713 - DNA, 25 bp, Homo sapien
catgcccaccctaccctatagcttt

SEQ ID NO: 5689714 - DNA, 25 bp, Homo sapien
aagctggacgggattaactgagatc

SEQ ID NO: 5689715 - DNA, 25 bp, Homo sapien
tggacgggattaactgagatcacac

SEQ ID NO: 5689716 - DNA, 25 bp, Homo sapien
ttaaaagctggacgggattaactga

SEQ ID NO: 5689717 - DNA, 25 bp, Homo sapien
taaattatttggcacagagcttagt

SEQ ID NO: 5689718 - DNA, 25 bp, Homo sapien
gagagaacaagagaattaacagact

SEQ ID NO: 5689719 - DNA, 25 bp, Homo sapien
agagaattaacagacttttaactgt

SEQ ID NO: 5689720 - DNA, 25 bp, Homo sapien
agagaacaagagaattaacagactt

SEQ ID NO: 5689721 - DNA, 25 bp, Homo sapien
gagaattaacagacttttaactgtc

SEQ ID NO: 5689722 - DNA, 25 bp, Homo sapien
aagtctgttaattctcttgttctct

SEQ ID NO: 5689723 - DNA, 25 bp, Homo sapien
acagttaaaagtctgttaattctct

SEQ ID NO: 5689724 - DNA, 25 bp, Homo sapien
gacagttaaaagtctgttaattctc

SEQ ID NO: 5689725 - DNA, 25 bp, Homo sapien
agtctgttaattctcttgttctctc

SEQ ID NO: 5689726 - DNA, 25 bp, Homo sapien
gcttcacaggaaaaccctagagaga

SEQ ID NO: 5689727 - DNA, 25 bp, Homo sapien
tctgcagcttcacaggaaaacccta

SEQ ID NO: 5689728 - DNA, 25 bp, Homo sapien
gagagaacaagagaattaacagact

SEQ ID NO: 5689729 - DNA, 25 bp, Homo sapien
gggagagttcatttctgcagcttca

SEQ ID NO: 5689730 - DNA, 25 bp, Homo sapien
caggaaaaccctagagagagaacaa

SEQ ID NO: 5689731 - DNA, 25 bp, Homo sapien
gagaattaacagacttttaactgtc

SEQ ID NO: 5689732 - DNA, 25 bp, Homo sapien
gaagctgcagaaatgaactctcccc

SEQ ID NO: 5689733 - DNA, 25 bp, Homo sapien
gcagaaatgaactctccccagtggg

SEQ ID NO: 5689734 - DNA, 25 bp, Homo sapien
tctctctagggttttcctgtgaagc

SEQ ID NO: 5689735 - DNA, 25 bp, Homo sapien
gacagttaaaagtctgttaattctc

SEQ ID NO: 5689736 - DNA, 25 bp, Homo sapien
agtctgttaattctcttgttctctc

SEQ ID NO: 5689737 - DNA, 25 bp, Homo sapien
tagggttttcctgtgaagctgcaga

SEQ ID NO: 5689738 - DNA, 25 bp, Homo sapien
cttgacaaggtgagaaggccctgcc

SEQ ID NO: 5689739 - DNA, 25 bp, Homo sapien
gccttcttgtacatgtcctcatctg

SEQ ID NO: 5689740 - DNA, 25 bp, Homo sapien
tcatctggtgctgaatggttccctc

SEQ ID NO: 5689741 - DNA, 25 bp, Homo sapien
tccttgacaaggtgagaaggccctg

SEQ ID NO: 5689742 - DNA, 25 bp, Homo sapien
gctccttgacaaggtgagaaggccc

SEQ ID NO: 5689743 - DNA, 25 bp, Homo sapien
tcctcatctggtgctgaatggttcc

SEQ ID NO: 5689744 - DNA, 25 bp, Homo sapien
gggccttctcaccttgtcaaggagc

SEQ ID NO: 5689745 - DNA, 25 bp, Homo sapien
cagatgaggacatgtacaagaaggc

SEQ ID NO: 5689746 - DNA, 25 bp, Homo sapien
ggaaccattcagcaccagatgagga

SEQ ID NO: 5689747 - DNA, 25 bp, Homo sapien
gagggaaccattcagcaccagatga

SEQ ID NO: 5689748 - DNA, 25 bp, Homo sapien
ggcagggccttctcaccttgtcaag

SEQ ID NO: 5689749 - DNA, 25 bp, Homo sapien
aaccattcagcaccagatgaggaca

SEQ ID NO: 5689750 - DNA, 25 bp, Homo sapien
ttacttggctagtgtgatgtctcct

SEQ ID NO: 5689751 - DNA, 25 bp, Homo sapien
ttttacttggctagtgtgatgtctc

SEQ ID NO: 5689752 - DNA, 25 bp, Homo sapien
atttttacttggctagtgtgatgtc

SEQ ID NO: 5689753 - DNA, 25 bp, Homo sapien
tttttacttggctagtgtgatgtct

SEQ ID NO: 5689754 - DNA, 25 bp, Homo sapien
tttacttggctagtgtgatgtctcc

SEQ ID NO: 5689755 - DNA, 25 bp, Homo sapien
acatttttacttggctagtgtgatg

SEQ ID NO: 5689756 - DNA, 25 bp, Homo sapien
gacatcacactagccaagtaaaaat

SEQ ID NO: 5689757 - DNA, 25 bp, Homo sapien
catcacactagccaagtaaaaatgt

SEQ ID NO: 5689758 - DNA, 25 bp, Homo sapien
aggagacatcacactagccaagtaa

SEQ ID NO: 5689759 - DNA, 25 bp, Homo sapien
ggagacatcacactagccaagtaaa

SEQ ID NO: 5689760 - DNA, 25 bp, Homo sapien
gagacatcacactagccaagtaaaa

SEQ ID NO: 5689761 - DNA, 25 bp, Homo sapien
agacatcacactagccaagtaaaaa

SEQ ID NO: 5689762 - DNA, 25 bp, Homo sapien
tttacttggctagtgtgatgtctcc

SEQ ID NO: 5689763 - DNA, 25 bp, Homo sapien
catttgtgtcccagaaactcgcaaa

SEQ ID NO: 5689764 - DNA, 25 bp, Homo sapien
taacttttgcatttgtgtcccagaa

SEQ ID NO: 5689765 - DNA, 25 bp, Homo sapien
acatttttacttggctagtgtgatg

SEQ ID NO: 5689766 - DNA, 25 bp, Homo sapien
gctagtgtgatgtctcctgccctaa

SEQ ID NO: 5689767 - DNA, 25 bp, Homo sapien
gtgatgtctcctgccctaacttttg

SEQ ID NO: 5689768 - DNA, 25 bp, Homo sapien
agaatttcccacactattctcttta

SEQ ID NO: 5689769 - DNA, 25 bp, Homo sapien
atttcccacactattctctttatgt

SEQ ID NO: 5689770 - DNA, 25 bp, Homo sapien
gaatttcccacactattctctttat

SEQ ID NO: 5689771 - DNA, 25 bp, Homo sapien
aatttcccacactattctctttatg

SEQ ID NO: 5689772 - DNA, 25 bp, Homo sapien
tcctgttcagctctgaatttgattg

SEQ ID NO: 5689773 - DNA, 25 bp, Homo sapien
ttcagctctgaatttgattgggtca

SEQ ID NO: 5689774 - DNA, 25 bp, Homo sapien
cactcctccgttgtaaggccctcct

SEQ ID NO: 5689775 - DNA, 25 bp, Homo sapien
agtgacaacactcactcctccgttg

SEQ ID NO: 5689776 - DNA, 25 bp, Homo sapien
cagctctgaatttgattgggtcaga

SEQ ID NO: 5689777 - DNA, 25 bp, Homo sapien
aacactcactcctccgttgtaaggc

SEQ ID NO: 5689778 - DNA, 25 bp, Homo sapien
caacggaggagtgagtgttgtcact

SEQ ID NO: 5689779 - DNA, 25 bp, Homo sapien
gccttacaacggaggagtgagtgtt

SEQ ID NO: 5689780 - DNA, 25 bp, Homo sapien
gacccaatcaaattcagagctgaac

SEQ ID NO: 5689781 - DNA, 25 bp, Homo sapien
aggagggccttacaacggaggagtg

SEQ ID NO: 5689782 - DNA, 25 bp, Homo sapien
caatcaaattcagagctgaacagga

SEQ ID NO: 5689783 - DNA, 25 bp, Homo sapien
tctgacccaatcaaattcagagctg

SEQ ID NO: 5689784 - DNA, 25 bp, Homo sapien
acataaagagaatagtgtgggaaat

SEQ ID NO: 5689785 - DNA, 25 bp, Homo sapien
taaagagaatagtgtgggaaattct

SEQ ID NO: 5689786 - DNA, 25 bp, Homo sapien
ataaagagaatagtgtgggaaattc

SEQ ID NO: 5689787 - DNA, 25 bp, Homo sapien
cataaagagaatagtgtgggaaatt

SEQ ID NO: 5689788 - DNA, 25 bp, Homo sapien
gttgtaaggccctccttcctgttca

SEQ ID NO: 5689789 - DNA, 25 bp, Homo sapien
cagagctagaatttcccacactatt

SEQ ID NO: 5689790 - DNA, 25 bp, Homo sapien
aatttcccacactattctctttatg

SEQ ID NO: 5689791 - DNA, 25 bp, Homo sapien
gggtcagagctagaatttcccacac

SEQ ID NO: 5689792 - DNA, 25 bp, Homo sapien
tgattgggtcagagctagaatttcc

SEQ ID NO: 5689793 - DNA, 25 bp, Homo sapien
aacactcactcctccgttgtaaggc

SEQ ID NO: 5689794 - DNA, 25 bp, Homo sapien
tgaacaggaaggagggccttacaac

SEQ ID NO: 5689795 - DNA, 25 bp, Homo sapien
ggaaattctagctctgacccaatca

SEQ ID NO: 5689796 - DNA, 25 bp, Homo sapien
tgtgggaaattctagctctgaccca

SEQ ID NO: 5689797 - DNA, 25 bp, Homo sapien
gccttacaacggaggagtgagtgtt

SEQ ID NO: 5689798 - DNA, 25 bp, Homo sapien
aatagtgtgggaaattctagctctg

SEQ ID NO: 5689799 - DNA, 25 bp, Homo sapien
cataaagagaatagtgtgggaaatt

SEQ ID NO: 5689800 - DNA, 25 bp, Homo sapien
aaagtgacaacactcactcctccgt

SEQ ID NO: 5689801 - DNA, 25 bp, Homo sapien
aagtgacaacactcactcctccgtt

SEQ ID NO: 5689802 - DNA, 25 bp, Homo sapien
tcctgttcagctctgaatttgattg

SEQ ID NO: 5689803 - DNA, 25 bp, Homo sapien
ttcagctctgaatttgattgggtca

SEQ ID NO: 5689804 - DNA, 25 bp, Homo sapien
cactcctccgttgtaaggccctcct

SEQ ID NO: 5689805 - DNA, 25 bp, Homo sapien
agtgacaacactcactcctccgttg

SEQ ID NO: 5689806 - DNA, 25 bp, Homo sapien
cagctctgaatttgattgggtcaga

SEQ ID NO: 5689807 - DNA, 25 bp, Homo sapien
aacactcactcctccgttgtaaggc

SEQ ID NO: 5689808 - DNA, 25 bp, Homo sapien
caatcaaattcagagctgaacagga

SEQ ID NO: 5689809 - DNA, 25 bp, Homo sapien
caacggaggagtgagtgttgtcact

SEQ ID NO: 5689810 - DNA, 25 bp, Homo sapien
gccttacaacggaggagtgagtgtt

SEQ ID NO: 5689811 - DNA, 25 bp, Homo sapien
gacccaatcaaattcagagctgaac

SEQ ID NO: 5689812 - DNA, 25 bp, Homo sapien
aggagggccttacaacggaggagtg

SEQ ID NO: 5689813 - DNA, 25 bp, Homo sapien
tctgacccaatcaaattcagagctg

SEQ ID NO: 5689814 - DNA, 25 bp, Homo sapien
aacggaggagtgagtgttgtcactt

SEQ ID NO: 5689815 - DNA, 25 bp, Homo sapien
acggaggagtgagtgttgtcacttt

SEQ ID NO: 5689816 - DNA, 25 bp, Homo sapien
tgaaactgaaggtaaagtgacaaca

SEQ ID NO: 5689817 - DNA, 25 bp, Homo sapien
aactgaaggtaaagtgacaacactc

SEQ ID NO: 5689818 - DNA, 25 bp, Homo sapien
tcagctctgaatttgattgggtcag

SEQ ID NO: 5689819 - DNA, 25 bp, Homo sapien
tctttgaaactgaaggtaaagtgac

SEQ ID NO: 5689820 - DNA, 25 bp, Homo sapien
aaagtgacaacactcactcctccgt

SEQ ID NO: 5689821 - DNA, 25 bp, Homo sapien
aagtgacaacactcactcctccgtt

SEQ ID NO: 5689822 - DNA, 25 bp, Homo sapien
tgaacaggaaggagggccttacaac

SEQ ID NO: 5689823 - DNA, 25 bp, Homo sapien
gagtgttgtcactttaccttcagtt

SEQ ID NO: 5689824 - DNA, 25 bp, Homo sapien
tgacccaatcaaattcagagctgaa

SEQ ID NO: 5689825 - DNA, 25 bp, Homo sapien
aacggaggagtgagtgttgtcactt

SEQ ID NO: 5689826 - DNA, 25 bp, Homo sapien
tgttgtcactttaccttcagtttca

SEQ ID NO: 5689827 - DNA, 25 bp, Homo sapien
tgtcactttaccttcagtttcaaag

SEQ ID NO: 5689828 - DNA, 25 bp, Homo sapien
gaccaatacagagaaaccctgtctc

SEQ ID NO: 5689829 - DNA, 25 bp, Homo sapien
tgaccaatacagagaaaccctgtct

SEQ ID NO: 5689830 - DNA, 25 bp, Homo sapien
accaatacagagaaaccctgtctct

SEQ ID NO: 5689831 - DNA, 25 bp, Homo sapien
agagacagggtttctctgtattggt

SEQ ID NO: 5689832 - DNA, 25 bp, Homo sapien
gagacagggtttctctgtattggtc

SEQ ID NO: 5689833 - DNA, 25 bp, Homo sapien
agacagggtttctctgtattggtca

SEQ ID NO: 5689834 - DNA, 25 bp, Homo sapien
cgagaagtcctaggcagccaaaaaa

SEQ ID NO: 5689835 - DNA, 25 bp, Homo sapien
agaagtcctaggcagccaaaaaagg

SEQ ID NO: 5689836 - DNA, 25 bp, Homo sapien
agacaggaagagtatcgagaagtcc

SEQ ID NO: 5689837 - DNA, 25 bp, Homo sapien
ctatccacactacaagggtataaag

SEQ ID NO: 5689838 - DNA, 25 bp, Homo sapien
agagcagggtgcttggcaatttgac

SEQ ID NO: 5689839 - DNA, 25 bp, Homo sapien
agcagggtgcttggcaatttgacca

SEQ ID NO: 5689840 - DNA, 25 bp, Homo sapien
gtcaaattgccaagcaccctgctct

SEQ ID NO: 5689841 - DNA, 25 bp, Homo sapien
ggacttctcgatactcttcctgtct

SEQ ID NO: 5689842 - DNA, 25 bp, Homo sapien
ttttttggctgcctaggacttctcg

SEQ ID NO: 5689843 - DNA, 25 bp, Homo sapien
ctttatacccttgtagtgtggatag

SEQ ID NO: 5689844 - DNA, 25 bp, Homo sapien
tggtcaaattgccaagcaccctgct

SEQ ID NO: 5689845 - DNA, 25 bp, Homo sapien
ccttttttggctgcctaggacttct

SEQ ID NO: 5689846 - DNA, 25 bp, Homo sapien
cctggcactaggcacaagtcattgc

SEQ ID NO: 5689847 - DNA, 25 bp, Homo sapien
aagtcattgccgctaggacctctgc

SEQ ID NO: 5689848 - DNA, 25 bp, Homo sapien
taggcacagttactacagctcataa

SEQ ID NO: 5689849 - DNA, 25 bp, Homo sapien
tacagctcataatcctggcactagg

SEQ ID NO: 5689850 - DNA, 25 bp, Homo sapien
tctaaaagctacgtgtgactggccc

SEQ ID NO: 5689851 - DNA, 25 bp, Homo sapien
ggacctctgcaatctaaaagctacg

SEQ ID NO: 5689852 - DNA, 25 bp, Homo sapien
cgtagcttttagattgcagaggtcc

SEQ ID NO: 5689853 - DNA, 25 bp, Homo sapien
gcaatgacttgtgcctagtgccagg

SEQ ID NO: 5689854 - DNA, 25 bp, Homo sapien
gcagaggtcctagcggcaatgactt

SEQ ID NO: 5689855 - DNA, 25 bp, Homo sapien
cctagtgccaggattatgagctgta

SEQ ID NO: 5689856 - DNA, 25 bp, Homo sapien
tatgagctgtagtaactgtgcctac

SEQ ID NO: 5689857 - DNA, 25 bp, Homo sapien
gggccagtcacacgtagcttttaga

SEQ ID NO: 5689858 - DNA, 25 bp, Homo sapien
cctgttcagttattacaagctacgt

SEQ ID NO: 5689859 - DNA, 25 bp, Homo sapien
tcagttattacaagctacgtaacct

SEQ ID NO: 5689860 - DNA, 25 bp, Homo sapien
cagttattacaagctacgtaacctt

SEQ ID NO: 5689861 - DNA, 25 bp, Homo sapien
tgttcagttattacaagctacgtaa

SEQ ID NO: 5689862 - DNA, 25 bp, Homo sapien
gcctgttcagttattacaagctacg

SEQ ID NO: 5689863 - DNA, 25 bp, Homo sapien
ttcagttattacaagctacgtaacc

SEQ ID NO: 5689864 - DNA, 25 bp, Homo sapien
aaggttacgtagcttgtaataactg

SEQ ID NO: 5689865 - DNA, 25 bp, Homo sapien
cgtagcttgtaataactgaacaggc

SEQ ID NO: 5689866 - DNA, 25 bp, Homo sapien
ttacgtagcttgtaataactgaaca

SEQ ID NO: 5689867 - DNA, 25 bp, Homo sapien
ggttacgtagcttgtaataactgaa

SEQ ID NO: 5689868 - DNA, 25 bp, Homo sapien
acgtagcttgtaataactgaacagg

SEQ ID NO: 5689869 - DNA, 25 bp, Homo sapien
tacgtagcttgtaataactgaacag

SEQ ID NO: 5689870 - DNA, 25 bp, Homo sapien
tatttagtatagaattaacaacaga

SEQ ID NO: 5689871 - DNA, 25 bp, Homo sapien
tggataattaacatcgtaagagagg

SEQ ID NO: 5689872 - DNA, 25 bp, Homo sapien
aattaacatcgtaagagaggagttc

SEQ ID NO: 5689873 - DNA, 25 bp, Homo sapien
taacatcgtaagagaggagttctag

SEQ ID NO: 5689874 - DNA, 25 bp, Homo sapien
acatcgtaagagaggagttctagga

SEQ ID NO: 5689875 - DNA, 25 bp, Homo sapien
gataattaacatcgtaagagaggag

SEQ ID NO: 5689876 - DNA, 25 bp, Homo sapien
tagaactcctctcttacgatgttaa

SEQ ID NO: 5689877 - DNA, 25 bp, Homo sapien
tcctctcttacgatgttaattatcc

SEQ ID NO: 5689878 - DNA, 25 bp, Homo sapien
tcctagaactcctctcttacgatgt

SEQ ID NO: 5689879 - DNA, 25 bp, Homo sapien
tctgttgttaattctatactaaata

SEQ ID NO: 5689880 - DNA, 25 bp, Homo sapien
ctagaactcctctcttacgatgtta

SEQ ID NO: 5689881 - DNA, 25 bp, Homo sapien
ctctcttacgatgttaattatccac

SEQ ID NO: 5689882 - DNA, 25 bp, Homo sapien
gctctataggtgaggtattgctcct

SEQ ID NO: 5689883 - DNA, 25 bp, Homo sapien
ggtgaggtattgctcctcacaagag

SEQ ID NO: 5689884 - DNA, 25 bp, Homo sapien
aatttattcagctctataggtgagg

SEQ ID NO: 5689885 - DNA, 25 bp, Homo sapien
tataggtgaggtattgctcctcaca

SEQ ID NO: 5689886 - DNA, 25 bp, Homo sapien
ctcctcacaagagggcattagctgc

SEQ ID NO: 5689887 - DNA, 25 bp, Homo sapien
tcagctctataggtgaggtattgct

SEQ ID NO: 5689888 - DNA, 25 bp, Homo sapien
gcagctaatgccctcttgtgaggag

SEQ ID NO: 5689889 - DNA, 25 bp, Homo sapien
gagcaatacctcacctatagagctg

SEQ ID NO: 5689890 - DNA, 25 bp, Homo sapien
gcaatacctcacctatagagctgaa

SEQ ID NO: 5689891 - DNA, 25 bp, Homo sapien
tcttgtgaggagcaatacctcacct

SEQ ID NO: 5689892 - DNA, 25 bp, Homo sapien
tcacctatagagctgaataaatttt

SEQ ID NO: 5689893 - DNA, 25 bp, Homo sapien
gaggagcaatacctcacctatagag

SEQ ID NO: 5689894 - DNA, 25 bp, Homo sapien
gtgtgtggatgtgagtaacacttcc

SEQ ID NO: 5689895 - DNA, 25 bp, Homo sapien
tgtggatgtgagtaacacttccaga

SEQ ID NO: 5689896 - DNA, 25 bp, Homo sapien
tggatgtgagtaacacttccagaat

SEQ ID NO: 5689897 - DNA, 25 bp, Homo sapien
aagaaagtgttctgatgggtcaggt

SEQ ID NO: 5689898 - DNA, 25 bp, Homo sapien
gatgtgagtaacacttccagaattt

SEQ ID NO: 5689899 - DNA, 25 bp, Homo sapien
caagaaagtgttctgatgggtcagg

SEQ ID NO: 5689900 - DNA, 25 bp, Homo sapien
tctggaagtgttactcacatccaca

SEQ ID NO: 5689901 - DNA, 25 bp, Homo sapien
cacacctgacccatcagaacacttt

SEQ ID NO: 5689902 - DNA, 25 bp, Homo sapien
aaattctggaagtgttactcacatc

SEQ ID NO: 5689903 - DNA, 25 bp, Homo sapien
aattctggaagtgttactcacatcc

SEQ ID NO: 5689904 - DNA, 25 bp, Homo sapien
gaagtgttactcacatccacacacc

SEQ ID NO: 5689905 - DNA, 25 bp, Homo sapien
cctgacccatcagaacactttcttg

SEQ ID NO: 5689906 - DNA, 25 bp, Homo sapien
ctggaataccactggctagatgggt

SEQ ID NO: 5689907 - DNA, 25 bp, Homo sapien
gctggaataccactggctagatggg

SEQ ID NO: 5689908 - DNA, 25 bp, Homo sapien
tagtcagtaatagtacacccttttc

SEQ ID NO: 5689909 - DNA, 25 bp, Homo sapien
taaggtagtcagtaatagtacaccc

SEQ ID NO: 5689910 - DNA, 25 bp, Homo sapien
cataaggtagtcagtaatagtacac

SEQ ID NO: 5689911 - DNA, 25 bp, Homo sapien
ctctatcataaggtagtcagtaata

SEQ ID NO: 5689912 - DNA, 25 bp, Homo sapien
cccatctagccagtggtattccagc

SEQ ID NO: 5689913 - DNA, 25 bp, Homo sapien
tgtactattactgactaccttatga

SEQ ID NO: 5689914 - DNA, 25 bp, Homo sapien
acccatctagccagtggtattccag

SEQ ID NO: 5689915 - DNA, 25 bp, Homo sapien
gggtgtactattactgactacctta

SEQ ID NO: 5689916 - DNA, 25 bp, Homo sapien
gaaaagggtgtactattactgacta

SEQ ID NO: 5689917 - DNA, 25 bp, Homo sapien
tattactgactaccttatgatagag

SEQ ID NO: 5689918 - DNA, 25 bp, Homo sapien
aagcacttgcacattactgttgaac

SEQ ID NO: 5689919 - DNA, 25 bp, Homo sapien
catagtgtccttttttgtcaagcac

SEQ ID NO: 5689920 - DNA, 25 bp, Homo sapien
tgtccttttttgtcaagcacttgca

SEQ ID NO: 5689921 - DNA, 25 bp, Homo sapien
gcacattactgttgaacttattaac

SEQ ID NO: 5689922 - DNA, 25 bp, Homo sapien
gggtataacaggcttagactatatt

SEQ ID NO: 5689923 - DNA, 25 bp, Homo sapien
aacaggcttagactatattacatgc

SEQ ID NO: 5689924 - DNA, 25 bp, Homo sapien
tagtctaagcctgttataccccaaa

SEQ ID NO: 5689925 - DNA, 25 bp, Homo sapien
tgcaagtgcttgacaaaaaaggaca

SEQ ID NO: 5689926 - DNA, 25 bp, Homo sapien
gttaataagttcaacagtaatgtgc

SEQ ID NO: 5689927 - DNA, 25 bp, Homo sapien
gcatgtaatatagtctaagcctgtt

SEQ ID NO: 5689928 - DNA, 25 bp, Homo sapien
gcttgacaaaaaaggacactatgat

SEQ ID NO: 5689929 - DNA, 25 bp, Homo sapien
gttcaacagtaatgtgcaagtgctt

SEQ ID NO: 5689930 - DNA, 25 bp, Homo sapien
aattgaactcaagaaaggctatatc

SEQ ID NO: 5689931 - DNA, 25 bp, Homo sapien
attgaactcaagaaaggctatatcc

SEQ ID NO: 5689932 - DNA, 25 bp, Homo sapien
ggctatatccatttagattctaatt

SEQ ID NO: 5689933 - DNA, 25 bp, Homo sapien
gaactcaagaaaggctatatccatt

SEQ ID NO: 5689934 - DNA, 25 bp, Homo sapien
ttgaactcaagaaaggctatatcca

SEQ ID NO: 5689935 - DNA, 25 bp, Homo sapien
tgaactcaagaaaggctatatccat

SEQ ID NO: 5689936 - DNA, 25 bp, Homo sapien
ggatatagcctttcttgagttcaat

SEQ ID NO: 5689937 - DNA, 25 bp, Homo sapien
aatggatatagcctttcttgagttc

SEQ ID NO: 5689938 - DNA, 25 bp, Homo sapien
gatatagcctttcttgagttcaatt

SEQ ID NO: 5689939 - DNA, 25 bp, Homo sapien
aattagaatctaaatggatatagcc

SEQ ID NO: 5689940 - DNA, 25 bp, Homo sapien
aaattagaatctaaatggatatagc

SEQ ID NO: 5689941 - DNA, 25 bp, Homo sapien
tggatatagcctttcttgagttcaa

SEQ ID NO: 5689942 - DNA, 25 bp, Homo sapien
aggcgtggtggcaggcacctgtagt

SEQ ID NO: 5689943 - DNA, 25 bp, Homo sapien
aattagccaggcgtggtggcaggca

SEQ ID NO: 5689944 - DNA, 25 bp, Homo sapien
cccagctactttggagtctgagtca

SEQ ID NO: 5689945 - DNA, 25 bp, Homo sapien
tgcctgccaccacgcctggctaatt

SEQ ID NO: 5689946 - DNA, 25 bp, Homo sapien
actacaggtgcctgccaccacgcct

SEQ ID NO: 5689947 - DNA, 25 bp, Homo sapien
tgactcagactccaaagtagctggg

SEQ ID NO: 5689948 - DNA, 25 bp, Homo sapien
ttttaaacaatcagttgagataact

SEQ ID NO: 5689949 - DNA, 25 bp, Homo sapien
tttttaaacaatcagttgagataac

SEQ ID NO: 5689950 - DNA, 25 bp, Homo sapien
gttatctcaactgattgtttaaaaa

SEQ ID NO: 5689951 - DNA, 25 bp, Homo sapien
agttatctcaactgattgtttaaaa

SEQ ID NO: 5689952 - DNA, 25 bp, Homo sapien
gataactcactaccttcagaccagc

SEQ ID NO: 5689953 - DNA, 25 bp, Homo sapien
tttttaaacaatcagttgagataac

SEQ ID NO: 5689954 - DNA, 25 bp, Homo sapien
ctaccttcagaccagcctaaatttt

SEQ ID NO: 5689955 - DNA, 25 bp, Homo sapien
tcagaccagcctaaatttttaataa

SEQ ID NO: 5689956 - DNA, 25 bp, Homo sapien
aatactgggaattgggccgggcgca

SEQ ID NO: 5689957 - DNA, 25 bp, Homo sapien
taaacaatcagttgagataactcac

SEQ ID NO: 5689958 - DNA, 25 bp, Homo sapien
cagtatttattaaaaatttaggctg

SEQ ID NO: 5689959 - DNA, 25 bp, Homo sapien
aaaatttaggctggtctgaaggtag

SEQ ID NO: 5689960 - DNA, 25 bp, Homo sapien
gctggtctgaaggtagtgagttatc

SEQ ID NO: 5689961 - DNA, 25 bp, Homo sapien
tattaaaaatttaggctggtctgaa

SEQ ID NO: 5689962 - DNA, 25 bp, Homo sapien
tgcgcccggcccaattcccagtatt

SEQ ID NO: 5689963 - DNA, 25 bp, Homo sapien
agttatctcaactgattgtttaaaa

SEQ ID NO: 5689964 - DNA, 25 bp, Homo sapien
tttcacttaagatattctggatctc

SEQ ID NO: 5689965 - DNA, 25 bp, Homo sapien
tagatagatactctttcttaatgct

SEQ ID NO: 5689966 - DNA, 25 bp, Homo sapien
ttaatgctgcattatttgttccaac

SEQ ID NO: 5689967 - DNA, 25 bp, Homo sapien
acttaagatattctggatctctttg

SEQ ID NO: 5689968 - DNA, 25 bp, Homo sapien
gagatagatagatactctttcttaa

SEQ ID NO: 5689969 - DNA, 25 bp, Homo sapien
tcacttaagatattctggatctctt

SEQ ID NO: 5689970 - DNA, 25 bp, Homo sapien
gagatccagaatatcttaagtgaaa

SEQ ID NO: 5689971 - DNA, 25 bp, Homo sapien
ttaagaaagagtatctatctatctc

SEQ ID NO: 5689972 - DNA, 25 bp, Homo sapien
caaagagatccagaatatcttaagt

SEQ ID NO: 5689973 - DNA, 25 bp, Homo sapien
gttggaacaaataatgcagcattaa

SEQ ID NO: 5689974 - DNA, 25 bp, Homo sapien
gcattaagaaagagtatctatctat

SEQ ID NO: 5689975 - DNA, 25 bp, Homo sapien
aataatgcagcattaagaaagagta

SEQ ID NO: 5689976 - DNA, 25 bp, Homo sapien
ttactgggcatatatacgtatgtac

SEQ ID NO: 5689977 - DNA, 25 bp, Homo sapien
tccacaccatttactgggcatatat

SEQ ID NO: 5689978 - DNA, 25 bp, Homo sapien
catttactgggcatatatacgtatg

SEQ ID NO: 5689979 - DNA, 25 bp, Homo sapien
ccatttactgggcatatatacgtat

SEQ ID NO: 5689980 - DNA, 25 bp, Homo sapien
tactgggcatatatacgtatgtaca

SEQ ID NO: 5689981 - DNA, 25 bp, Homo sapien
actgggcatatatacgtatgtacat

SEQ ID NO: 5689982 - DNA, 25 bp, Homo sapien
tgtacatacgtatatatgcccagta

SEQ ID NO: 5689983 - DNA, 25 bp, Homo sapien
atatatgcccagtaaatggtgtgga

SEQ ID NO: 5689984 - DNA, 25 bp, Homo sapien
atacgtatatatgcccagtaaatgg

SEQ ID NO: 5689985 - DNA, 25 bp, Homo sapien
atgtacatacgtatatatgcccagt

SEQ ID NO: 5689986 - DNA, 25 bp, Homo sapien
tacatacgtatatatgcccagtaaa

SEQ ID NO: 5689987 - DNA, 25 bp, Homo sapien
catacgtatatatgcccagtaaatg

SEQ ID NO: 5689988 - DNA, 25 bp, Homo sapien
tcacctgtaaagtaatgactactct

SEQ ID NO: 5689989 - DNA, 25 bp, Homo sapien
tggcccctgaatctgacgtccttct

SEQ ID NO: 5689990 - DNA, 25 bp, Homo sapien
gtaaagtaatgactactctcaagtt

SEQ ID NO: 5689991 - DNA, 25 bp, Homo sapien
caagttatatgacagtaaagtaaag

SEQ ID NO: 5689992 - DNA, 25 bp, Homo sapien
actctcaagttatatgacagtaaag

SEQ ID NO: 5689993 - DNA, 25 bp, Homo sapien
ctgaatctgacgtccttcttgggct

SEQ ID NO: 5689994 - DNA, 25 bp, Homo sapien
cctttactttactgtcatataactt

SEQ ID NO: 5689995 - DNA, 25 bp, Homo sapien
aacttgagagtagtcattactttac

SEQ ID NO: 5689996 - DNA, 25 bp, Homo sapien
cccaagaaggacgtcagattcaggg

SEQ ID NO: 5689997 - DNA, 25 bp, Homo sapien
actttactgtcatataacttgagag

SEQ ID NO: 5689998 - DNA, 25 bp, Homo sapien
gagagtagtcattactttacaggtg

SEQ ID NO: 5689999 - DNA, 25 bp, Homo sapien
agcccaagaaggacgtcagattcag

SEQ ID NO: 5690000 - DNA, 25 bp, Homo sapien
agaagaggataatgtggccacctgg

SEQ ID NO: 5690001 - DNA, 25 bp, Homo sapien
tgagaagaggataatgtggccacct

SEQ ID NO: 5690002 - DNA, 25 bp, Homo sapien
gttagagtaagaaggagtgggacat

SEQ ID NO: 5690003 - DNA, 25 bp, Homo sapien
gctgagaagaggataatgtggccac

SEQ ID NO: 5690004 - DNA, 25 bp, Homo sapien
gagaagaggataatgtggccacctg

SEQ ID NO: 5690005 - DNA, 25 bp, Homo sapien
ctgagaagaggataatgtggccacc

SEQ ID NO: 5690006 - DNA, 25 bp, Homo sapien
ggtcttactggtatttgaagttaga

SEQ ID NO: 5690007 - DNA, 25 bp, Homo sapien
gtggtcttactggtatttgaagtta

SEQ ID NO: 5690008 - DNA, 25 bp, Homo sapien
tgtggtcttactggtatttgaagtt

SEQ ID NO: 5690009 - DNA, 25 bp, Homo sapien
tggtcttactggtatttgaagttag

SEQ ID NO: 5690010 - DNA, 25 bp, Homo sapien
aacttcaaataccagtaagaccaca

SEQ ID NO: 5690011 - DNA, 25 bp, Homo sapien
tctaacttcaaataccagtaagacc

SEQ ID NO: 5690012 - DNA, 25 bp, Homo sapien
taacttcaaataccagtaagaccac

SEQ ID NO: 5690013 - DNA, 25 bp, Homo sapien
ctaacttcaaataccagtaagacca

SEQ ID NO: 5690014 - DNA, 25 bp, Homo sapien
ggtggccacattatcctcttctcag

SEQ ID NO: 5690015 - DNA, 25 bp, Homo sapien
aggtggccacattatcctcttctca

SEQ ID NO: 5690016 - DNA, 25 bp, Homo sapien
tgtcccactccttcttactctaact

SEQ ID NO: 5690017 - DNA, 25 bp, Homo sapien
atgtcccactccttcttactctaac

SEQ ID NO: 5690018 - DNA, 25 bp, Homo sapien
caggtggccacattatcctcttctc

SEQ ID NO: 5690019 - DNA, 25 bp, Homo sapien
ccaggtggccacattatcctcttct

SEQ ID NO: 5690020 - DNA, 25 bp, Homo sapien
caggccgggtgtgggggctcacacc

SEQ ID NO: 5690021 - DNA, 25 bp, Homo sapien
gcaggccgggtgtgggggctcacac

SEQ ID NO: 5690022 - DNA, 25 bp, Homo sapien
aggccgggtgtgggggctcacacct

SEQ ID NO: 5690023 - DNA, 25 bp, Homo sapien
gtgggtggatcacttcagcccagga

SEQ ID NO: 5690024 - DNA, 25 bp, Homo sapien
atgcaggccgggtgtgggggctcac

SEQ ID NO: 5690025 - DNA, 25 bp, Homo sapien
aatgcaggccgggtgtgggggctca

SEQ ID NO: 5690026 - DNA, 25 bp, Homo sapien
gtgtgagcccccacacccggcctgc

SEQ ID NO: 5690027 - DNA, 25 bp, Homo sapien
gtgagcccccacacccggcctgcat

SEQ ID NO: 5690028 - DNA, 25 bp, Homo sapien
aggtgtgagcccccacacccggcct

SEQ ID NO: 5690029 - DNA, 25 bp, Homo sapien
ggtgtgagcccccacacccggcctg

SEQ ID NO: 5690030 - DNA, 25 bp, Homo sapien
tgagcccccacacccggcctgcatt

SEQ ID NO: 5690031 - DNA, 25 bp, Homo sapien
tcctgggctgaagtgatccacccac

SEQ ID NO: 5690032 - DNA, 25 bp, Homo sapien
tgctttgcattgtgccctgaccaaa

SEQ ID NO: 5690033 - DNA, 25 bp, Homo sapien
actgctttgcattgtgccctgacca

SEQ ID NO: 5690034 - DNA, 25 bp, Homo sapien
ttgcattgtgccctgaccaaaaaaa

SEQ ID NO: 5690035 - DNA, 25 bp, Homo sapien
gtactgctttgcattgtgccctgac

SEQ ID NO: 5690036 - DNA, 25 bp, Homo sapien
gctttgcattgtgccctgaccaaaa

SEQ ID NO: 5690037 - DNA, 25 bp, Homo sapien
tactgctttgcattgtgccctgacc

SEQ ID NO: 5690038 - DNA, 25 bp, Homo sapien
gatggggattaaacctcaagctaaa

SEQ ID NO: 5690039 - DNA, 25 bp, Homo sapien
agatggggattaaacctcaagctaa

SEQ ID NO: 5690040 - DNA, 25 bp, Homo sapien
aagatggggattaaacctcaagcta

SEQ ID NO: 5690041 - DNA, 25 bp, Homo sapien
gggattaaacctcaagctaaaatca

SEQ ID NO: 5690042 - DNA, 25 bp, Homo sapien
aaagatggggattaaacctcaagct

SEQ ID NO: 5690043 - DNA, 25 bp, Homo sapien
agcttgaggtttaatccccatcttt

SEQ ID NO: 5690044 - DNA, 25 bp, Homo sapien
tttagcttgaggtttaatccccatc

SEQ ID NO: 5690045 - DNA, 25 bp, Homo sapien
ttagcttgaggtttaatccccatct

SEQ ID NO: 5690046 - DNA, 25 bp, Homo sapien
tgattttagcttgaggtttaatccc

SEQ ID NO: 5690047 - DNA, 25 bp, Homo sapien
tagcttgaggtttaatccccatctt

SEQ ID NO: 5690048 - DNA, 25 bp, Homo sapien
ttttggtcagggcacaatgcaaagc

SEQ ID NO: 5690049 - DNA, 25 bp, Homo sapien
gtcagggcacaatgcaaagcagtac

SEQ ID NO: 5690050 - DNA, 25 bp, Homo sapien
tttttttggtcagggcacaatgcaa

SEQ ID NO: 5690051 - DNA, 25 bp, Homo sapien
ttggtcagggcacaatgcaaagcag

SEQ ID NO: 5690052 - DNA, 25 bp, Homo sapien
tttggtcagggcacaatgcaaagca

SEQ ID NO: 5690053 - DNA, 25 bp, Homo sapien
tggtcagggcacaatgcaaagcagt

SEQ ID NO: 5690054 - DNA, 25 bp, Homo sapien
atcttctaggcatccagtgacttaa

SEQ ID NO: 5690055 - DNA, 25 bp, Homo sapien
cctgaaagcatgtctttaactggtt

SEQ ID NO: 5690056 - DNA, 25 bp, Homo sapien
tgacttaatcttgaaagctagatcc

SEQ ID NO: 5690057 - DNA, 25 bp, Homo sapien
tcctgaaagcatgtctttaactggt

SEQ ID NO: 5690058 - DNA, 25 bp, Homo sapien
ttaatcttgaaagctagatcctgaa

SEQ ID NO: 5690059 - DNA, 25 bp, Homo sapien
tctaggcatccagtgacttaatctt

SEQ ID NO: 5690060 - DNA, 25 bp, Homo sapien
aaccagttaaagacatgctttcagg

SEQ ID NO: 5690061 - DNA, 25 bp, Homo sapien
aagattaagtcactggatgcctaga

SEQ ID NO: 5690062 - DNA, 25 bp, Homo sapien
ttaagtcactggatgcctagaagat

SEQ ID NO: 5690063 - DNA, 25 bp, Homo sapien
gatctagctttcaagattaagtcac

SEQ ID NO: 5690064 - DNA, 25 bp, Homo sapien
tcaggatctagctttcaagattaag

SEQ ID NO: 5690065 - DNA, 25 bp, Homo sapien
ccagttaaagacatgctttcaggat

SEQ ID NO: 5690066 - DNA, 25 bp, Homo sapien
gaactcccagccttacgtgatctgc

SEQ ID NO: 5690067 - DNA, 25 bp, Homo sapien
tcttgaactcccagccttacgtgat

SEQ ID NO: 5690068 - DNA, 25 bp, Homo sapien
tcccagccttacgtgatctgcctgc

SEQ ID NO: 5690069 - DNA, 25 bp, Homo sapien
tgaactcccagccttacgtgatctg

SEQ ID NO: 5690070 - DNA, 25 bp, Homo sapien
gtcttgaactcccagccttacgtga

SEQ ID NO: 5690071 - DNA, 25 bp, Homo sapien
gagccacagcacctggcctccttta

SEQ ID NO: 5690072 - DNA, 25 bp, Homo sapien
gatcacgtaaggctgggagttcaag

SEQ ID NO: 5690073 - DNA, 25 bp, Homo sapien
gcagatcacgtaaggctgggagttc

SEQ ID NO: 5690074 - DNA, 25 bp, Homo sapien
tcacgtaaggctgggagttcaagac

SEQ ID NO: 5690075 - DNA, 25 bp, Homo sapien
taaaggaggccaggtgctgtggctc

SEQ ID NO: 5690076 - DNA, 25 bp, Homo sapien
ggcaggcagatcacgtaaggctggg

SEQ ID NO: 5690077 - DNA, 25 bp, Homo sapien
cagatcacgtaaggctgggagttca

SEQ ID NO: 5690078 - DNA, 25 bp, Homo sapien
tttttgagatttcctggttctcttc

SEQ ID NO: 5690079 - DNA, 25 bp, Homo sapien
gaagagaaccaggaaatctcaaaaa

SEQ ID NO: 5690080 - DNA, 25 bp, Homo sapien
ttgagatttcctggttctcttcttc

SEQ ID NO: 5690081 - DNA, 25 bp, Homo sapien
gatttcctggttctcttcttcttcc

SEQ ID NO: 5690082 - DNA, 25 bp, Homo sapien
tttttgagatttcctggttctcttc

SEQ ID NO: 5690083 - DNA, 25 bp, Homo sapien
tgagatttcctggttctcttcttct

SEQ ID NO: 5690084 - DNA, 25 bp, Homo sapien
gagatttcctggttctcttcttctt

SEQ ID NO: 5690085 - DNA, 25 bp, Homo sapien
ttttgagatttcctggttctcttct

SEQ ID NO: 5690086 - DNA, 25 bp, Homo sapien
agaagaagagaaccaggaaatctca

SEQ ID NO: 5690087 - DNA, 25 bp, Homo sapien
gaagagaaccaggaaatctcaaaaa

SEQ ID NO: 5690088 - DNA, 25 bp, Homo sapien
gaagaagagaaccaggaaatctcaa

SEQ ID NO: 5690089 - DNA, 25 bp, Homo sapien
ggaagaagaagagaaccaggaaatc

SEQ ID NO: 5690090 - DNA, 25 bp, Homo sapien
caaaaaaagtgaggaagaagaagag

SEQ ID NO: 5690091 - DNA, 25 bp, Homo sapien
agaagagaaccaggaaatctcaaaa

SEQ ID NO: 5690092 - DNA, 25 bp, Homo sapien
ctatatgacaaatctgcgtgttctg

SEQ ID NO: 5690093 - DNA, 25 bp, Homo sapien
tatatgacaaatctgcgtgttctgc

SEQ ID NO: 5690094 - DNA, 25 bp, Homo sapien
cctatatgacaaatctgcgtgttct

SEQ ID NO: 5690095 - DNA, 25 bp, Homo sapien
acctatatgacaaatctgcgtgttc

SEQ ID NO: 5690096 - DNA, 25 bp, Homo sapien
atatgacaaatctgcgtgttctgca

SEQ ID NO: 5690097 - DNA, 25 bp, Homo sapien
tgcagaacacgcagatttgtcatat

SEQ ID NO: 5690098 - DNA, 25 bp, Homo sapien
agaacacgcagatttgtcatatagg

SEQ ID NO: 5690099 - DNA, 25 bp, Homo sapien
gcagaacacgcagatttgtcatata

SEQ ID NO: 5690100 - DNA, 25 bp, Homo sapien
gaacacgcagatttgtcatataggt

SEQ ID NO: 5690101 - DNA, 25 bp, Homo sapien
cagaacacgcagatttgtcatatag

SEQ ID NO: 5690102 - DNA, 25 bp, Homo sapien
acctatatgacaaatctgcgtgttc

SEQ ID NO: 5690103 - DNA, 25 bp, Homo sapien
ctatatgacaaatctgcgtgttctg

SEQ ID NO: 5690104 - DNA, 25 bp, Homo sapien
tatatgacaaatctgcgtgttctgc

SEQ ID NO: 5690105 - DNA, 25 bp, Homo sapien
tatgacaaatctgcgtgttctgcac

SEQ ID NO: 5690106 - DNA, 25 bp, Homo sapien
cctatatgacaaatctgcgtgttct

SEQ ID NO: 5690107 - DNA, 25 bp, Homo sapien
atatgacaaatctgcgtgttctgca

SEQ ID NO: 5690108 - DNA, 25 bp, Homo sapien
tctcttaaggcattatttgttgtat

SEQ ID NO: 5690109 - DNA, 25 bp, Homo sapien
ttctcttaaggcattatttgttgta

SEQ ID NO: 5690110 - DNA, 25 bp, Homo sapien
tatttagtcactattatttccttat

SEQ ID NO: 5690111 - DNA, 25 bp, Homo sapien
gtatttagtcactattatttcctta

SEQ ID NO: 5690112 - DNA, 25 bp, Homo sapien
aataatagtgactaaatacaacaaa

SEQ ID NO: 5690113 - DNA, 25 bp, Homo sapien
atacaacaaataatgccttaagaga

SEQ ID NO: 5690114 - DNA, 25 bp, Homo sapien
taaggaaataatagtgactaaatac

SEQ ID NO: 5690115 - DNA, 25 bp, Homo sapien
tacaacaaataatgccttaagagaa

SEQ ID NO: 5690116 - DNA, 25 bp, Homo sapien
ataaggaaataatagtgactaaata

SEQ ID NO: 5690117 - DNA, 25 bp, Homo sapien
tctcttaaggcattatttgttgtat

SEQ ID NO: 5690118 - DNA, 25 bp, Homo sapien
ttcactttctgtttctcttaaggca

SEQ ID NO: 5690119 - DNA, 25 bp, Homo sapien
attttatcctccttttcactttctg

SEQ ID NO: 5690120 - DNA, 25 bp, Homo sapien
gtatttagtcactattatttcctta

SEQ ID NO: 5690121 - DNA, 25 bp, Homo sapien
ttccttatagcttagtctgcatttt

SEQ ID NO: 5690122 - DNA, 25 bp, Homo sapien
ttatttccttatagcttagtctgca

SEQ ID NO: 5690123 - DNA, 25 bp, Homo sapien
tgccttaagagaaacagaaagtgaa

SEQ ID NO: 5690124 - DNA, 25 bp, Homo sapien
aaaatgcagactaagctataaggaa

SEQ ID NO: 5690125 - DNA, 25 bp, Homo sapien
taaggaaataatagtgactaaatac

SEQ ID NO: 5690126 - DNA, 25 bp, Homo sapien
tacaacaaataatgccttaagagaa

SEQ ID NO: 5690127 - DNA, 25 bp, Homo sapien
tgcagactaagctataaggaaataa

SEQ ID NO: 5690128 - DNA, 25 bp, Homo sapien
cagaaagtgaaaaggaggataaaat

SEQ ID NO: 5690129 - DNA, 25 bp, Homo sapien
cctccgccttccgggttcaagcgat

SEQ ID NO: 5690130 - DNA, 25 bp, Homo sapien
cgccttccgggttcaagcgattctc

SEQ ID NO: 5690131 - DNA, 25 bp, Homo sapien
tccgccttccgggttcaagcgattc

SEQ ID NO: 5690132 - DNA, 25 bp, Homo sapien
ccgccttccgggttcaagcgattct

SEQ ID NO: 5690133 - DNA, 25 bp, Homo sapien
gccttccgggttcaagcgattctcc

SEQ ID NO: 5690134 - DNA, 25 bp, Homo sapien
gattacaggcgcctgccaccacgcc

SEQ ID NO: 5690135 - DNA, 25 bp, Homo sapien
agaatcgcttgaacccggaaggcgg

SEQ ID NO: 5690136 - DNA, 25 bp, Homo sapien
gaatcgcttgaacccggaaggcgga

SEQ ID NO: 5690137 - DNA, 25 bp, Homo sapien
ggcgtggtggcaggcgcctgtaatc

SEQ ID NO: 5690138 - DNA, 25 bp, Homo sapien
gagaatcgcttgaacccggaaggcg

SEQ ID NO: 5690139 - DNA, 25 bp, Homo sapien
ggagaatcgcttgaacccggaaggc

SEQ ID NO: 5690140 - DNA, 25 bp, Homo sapien
atcgcttgaacccggaaggcggagg

SEQ ID NO: 5690141 - DNA, 25 bp, Homo sapien
aagtctgatgtgtcgccagaggtag

SEQ ID NO: 5690142 - DNA, 25 bp, Homo sapien
tgtgtcgccagaggtaggagagtag

SEQ ID NO: 5690143 - DNA, 25 bp, Homo sapien
tgtgagaaaggctgctgtagagtat

SEQ ID NO: 5690144 - DNA, 25 bp, Homo sapien
gaaaagtctgatgtgtcgccagagg

SEQ ID NO: 5690145 - DNA, 25 bp, Homo sapien
gctgctgtagagtattccttgttta

SEQ ID NO: 5690146 - DNA, 25 bp, Homo sapien
gaaaggctgctgtagagtattcctt

SEQ ID NO: 5690147 - DNA, 25 bp, Homo sapien
actactctcctacctctggcgacac

SEQ ID NO: 5690148 - DNA, 25 bp, Homo sapien
tactctacagcagcctttctcacaa

SEQ ID NO: 5690149 - DNA, 25 bp, Homo sapien
gcgacacatcagacttttccccaag

SEQ ID NO: 5690150 - DNA, 25 bp, Homo sapien
tacctctggcgacacatcagacttt

SEQ ID NO: 5690151 - DNA, 25 bp, Homo sapien
aaacaaggaatactctacagcagcc

SEQ ID NO: 5690152 - DNA, 25 bp, Homo sapien
tgtaaacaaggaatactctacagca

SEQ ID NO: 5690153 - DNA, 25 bp, Homo sapien
acacagctgtgctcatttgtttacg

SEQ ID NO: 5690154 - DNA, 25 bp, Homo sapien
tactagtaaaattgtattggaacac

SEQ ID NO: 5690155 - DNA, 25 bp, Homo sapien
ttgtttacgtatttctgaggctgct

SEQ ID NO: 5690156 - DNA, 25 bp, Homo sapien
tagtaaaattgtattggaacacagc

SEQ ID NO: 5690157 - DNA, 25 bp, Homo sapien
aaaattgtattggaacacagctgtg

SEQ ID NO: 5690158 - DNA, 25 bp, Homo sapien
catttgtttacgtatttctgaggct

SEQ ID NO: 5690159 - DNA, 25 bp, Homo sapien
agcagcctcagaaatacgtaaacaa

SEQ ID NO: 5690160 - DNA, 25 bp, Homo sapien
cgtaaacaaatgagcacagctgtgt

SEQ ID NO: 5690161 - DNA, 25 bp, Homo sapien
tgtgttccaatacaattttactagt

SEQ ID NO: 5690162 - DNA, 25 bp, Homo sapien
gcagcctcagaaatacgtaaacaaa

SEQ ID NO: 5690163 - DNA, 25 bp, Homo sapien
cagaaatacgtaaacaaatgagcac

SEQ ID NO: 5690164 - DNA, 25 bp, Homo sapien
cacagctgtgttccaatacaatttt

SEQ ID NO: 5690165 - DNA, 25 bp, Homo sapien
taactggtattagaggcgcacacca

SEQ ID NO: 5690166 - DNA, 25 bp, Homo sapien
tacaccctgttaatgttggccaggc

SEQ ID NO: 5690167 - DNA, 25 bp, Homo sapien
cagcctcccaagtaactggtattag

SEQ ID NO: 5690168 - DNA, 25 bp, Homo sapien
gtattagaggcgcacaccactacac

SEQ ID NO: 5690169 - DNA, 25 bp, Homo sapien
gcacaccactacaccctgttaatgt

SEQ ID NO: 5690170 - DNA, 25 bp, Homo sapien
caagtaactggtattagaggcgcac

SEQ ID NO: 5690171 - DNA, 25 bp, Homo sapien
acattaacagggtgtagtggtgtgc

SEQ ID NO: 5690172 - DNA, 25 bp, Homo sapien
gcctggccaacattaacagggtgta

SEQ ID NO: 5690173 - DNA, 25 bp, Homo sapien
ggtgtagtggtgtgcgcctctaata

SEQ ID NO: 5690174 - DNA, 25 bp, Homo sapien
ggtgtgcgcctctaataccagttac

SEQ ID NO: 5690175 - DNA, 25 bp, Homo sapien
tctaataccagttacttgggaggct

SEQ ID NO: 5690176 - DNA, 25 bp, Homo sapien
gcgcctctaataccagttacttggg

SEQ ID NO: 5690177 - DNA, 25 bp, Homo sapien
tccatgcccccactttatccttccc

SEQ ID NO: 5690178 - DNA, 25 bp, Homo sapien
catgcccccactttatccttccctc

SEQ ID NO: 5690179 - DNA, 25 bp, Homo sapien
ccatgcccccactttatccttccct

SEQ ID NO: 5690180 - DNA, 25 bp, Homo sapien
gggaaggataaagtgggggcatgga

SEQ ID NO: 5690181 - DNA, 25 bp, Homo sapien
agggaaggataaagtgggggcatgg

SEQ ID NO: 5690182 - DNA, 25 bp, Homo sapien
gagggaaggataaagtgggggcatg

SEQ ID NO: 5690183 - DNA, 25 bp, Homo sapien
tccatgcccccactttatccttccc

SEQ ID NO: 5690184 - DNA, 25 bp, Homo sapien
catgcccccactttatccttccctc

SEQ ID NO: 5690185 - DNA, 25 bp, Homo sapien
ccatgcccccactttatccttccct

SEQ ID NO: 5690186 - DNA, 25 bp, Homo sapien
acccactctccatgcccccacttta

SEQ ID NO: 5690187 - DNA, 25 bp, Homo sapien
aacccactctccatgcccccacttt

SEQ ID NO: 5690188 - DNA, 25 bp, Homo sapien
gtttttttgaggcaaagtctcattc

SEQ ID NO: 5690189 - DNA, 25 bp, Homo sapien
gaaggataaagtgggggcatggaga

SEQ ID NO: 5690190 - DNA, 25 bp, Homo sapien
agggaaggataaagtgggggcatgg

SEQ ID NO: 5690191 - DNA, 25 bp, Homo sapien
ataaagtgggggcatggagagtggg

SEQ ID NO: 5690192 - DNA, 25 bp, Homo sapien
gagggaaggataaagtgggggcatg

SEQ ID NO: 5690193 - DNA, 25 bp, Homo sapien
aaagtgggggcatggagagtgggtt

SEQ ID NO: 5690194 - DNA, 25 bp, Homo sapien
gaatgagactttgcctcaaaaaaac

SEQ ID NO: 5690195 - DNA, 25 bp, Homo sapien
cagcattcaagtgaattaaccttcc

SEQ ID NO: 5690196 - DNA, 25 bp, Homo sapien
tgaattaaccttccttggaattagc

SEQ ID NO: 5690197 - DNA, 25 bp, Homo sapien
tggaattagcttgaccttgaggccc

SEQ ID NO: 5690198 - DNA, 25 bp, Homo sapien
aattagcttgaccttgaggccccag

SEQ ID NO: 5690199 - DNA, 25 bp, Homo sapien
gaattagcttgaccttgaggcccca

SEQ ID NO: 5690200 - DNA, 25 bp, Homo sapien
tcaagtgaattaaccttccttggaa

SEQ ID NO: 5690201 - DNA, 25 bp, Homo sapien
gggcctcaaggtcaagctaattcca

SEQ ID NO: 5690202 - DNA, 25 bp, Homo sapien
tccaaggaaggttaattcacttgaa

SEQ ID NO: 5690203 - DNA, 25 bp, Homo sapien
caagctaattccaaggaaggttaat

SEQ ID NO: 5690204 - DNA, 25 bp, Homo sapien
ggcctcaaggtcaagctaattccaa

SEQ ID NO: 5690205 - DNA, 25 bp, Homo sapien
ggaaggttaattcacttgaatgctg

SEQ ID NO: 5690206 - DNA, 25 bp, Homo sapien
gctaattccaaggaaggttaattca

SEQ ID NO: 5690207 - DNA, 25 bp, Homo sapien
ctggcagattctttgggactggaca

SEQ ID NO: 5690208 - DNA, 25 bp, Homo sapien
tctggcagattctttgggactggac

SEQ ID NO: 5690209 - DNA, 25 bp, Homo sapien
gagggaccagtacgcctgaggtcac

SEQ ID NO: 5690210 - DNA, 25 bp, Homo sapien
acagtaggagggaccagtacgcctg

SEQ ID NO: 5690211 - DNA, 25 bp, Homo sapien
ggaccagtacgcctgaggtcactgc

SEQ ID NO: 5690212 - DNA, 25 bp, Homo sapien
actggacagtaggagggaccagtac

SEQ ID NO: 5690213 - DNA, 25 bp, Homo sapien
tgtccagtcccaaagaatctgccag

SEQ ID NO: 5690214 - DNA, 25 bp, Homo sapien
gtactggtccctcctactgtccagt

SEQ ID NO: 5690215 - DNA, 25 bp, Homo sapien
gcagtgacctcaggcgtactggtcc

SEQ ID NO: 5690216 - DNA, 25 bp, Homo sapien
gtgacctcaggcgtactggtccctc

SEQ ID NO: 5690217 - DNA, 25 bp, Homo sapien
tcaggcgtactggtccctcctactg

SEQ ID NO: 5690218 - DNA, 25 bp, Homo sapien
aggcgtactggtccctcctactgtc

SEQ ID NO: 5690219 - DNA, 25 bp, Homo sapien
taacctaattagctcaagaaaagcc

SEQ ID NO: 5690220 - DNA, 25 bp, Homo sapien
aaggagctccctaacctaattagct

SEQ ID NO: 5690221 - DNA, 25 bp, Homo sapien
gctccctaacctaattagctcaaga

SEQ ID NO: 5690222 - DNA, 25 bp, Homo sapien
tcaaggagctccctaacctaattag

SEQ ID NO: 5690223 - DNA, 25 bp, Homo sapien
taattagctcaagaaaagcctattc

SEQ ID NO: 5690224 - DNA, 25 bp, Homo sapien
cctattcaaaactaatgcataggat

SEQ ID NO: 5690225 - DNA, 25 bp, Homo sapien
ctaattaggttagggagctccttga

SEQ ID NO: 5690226 - DNA, 25 bp, Homo sapien
tcttgagctaattaggttagggagc

SEQ ID NO: 5690227 - DNA, 25 bp, Homo sapien
ggcttttcttgagctaattaggtta

SEQ ID NO: 5690228 - DNA, 25 bp, Homo sapien
gaataggcttttcttgagctaatta

SEQ ID NO: 5690229 - DNA, 25 bp, Homo sapien
aatcctatgcattagttttgaatag

SEQ ID NO: 5690230 - DNA, 25 bp, Homo sapien
gagctaattaggttagggagctcct

SEQ ID NO: 5690231 - DNA, 25 bp, Homo sapien
actgttggaacttcaccttctaggg

SEQ ID NO: 5690232 - DNA, 25 bp, Homo sapien
gcactgttggaacttcaccttctag

SEQ ID NO: 5690233 - DNA, 25 bp, Homo sapien
aagacctggcactgttggaacttca

SEQ ID NO: 5690234 - DNA, 25 bp, Homo sapien
agacctggcactgttggaacttcac

SEQ ID NO: 5690235 - DNA, 25 bp, Homo sapien
ggcactgttggaacttcaccttcta

SEQ ID NO: 5690236 - DNA, 25 bp, Homo sapien
tggaacttcaccttctagggggata

SEQ ID NO: 5690237 - DNA, 25 bp, Homo sapien
tagaaggtgaagttccaacagtgcc

SEQ ID NO: 5690238 - DNA, 25 bp, Homo sapien
tgaagttccaacagtgccaggtctt

SEQ ID NO: 5690239 - DNA, 25 bp, Homo sapien
cccctagaaggtgaagttccaacag

SEQ ID NO: 5690240 - DNA, 25 bp, Homo sapien
gtgaagttccaacagtgccaggtct

SEQ ID NO: 5690241 - DNA, 25 bp, Homo sapien
tatccccctagaaggtgaagttcca

SEQ ID NO: 5690242 - DNA, 25 bp, Homo sapien
cctagaaggtgaagttccaacagtg

SEQ ID NO: 5690243 - DNA, 25 bp, Homo sapien
ggcacgagaatctcttgaaacccgg

SEQ ID NO: 5690244 - DNA, 25 bp, Homo sapien
gcacgagaatctcttgaaacccggg

SEQ ID NO: 5690245 - DNA, 25 bp, Homo sapien
cttgaaacccgggaggcagagattg

SEQ ID NO: 5690246 - DNA, 25 bp, Homo sapien
cagtaagctgagattgtgactgcac

SEQ ID NO: 5690247 - DNA, 25 bp, Homo sapien
aggcacgagaatctcttgaaacccg

SEQ ID NO: 5690248 - DNA, 25 bp, Homo sapien
cacgagaatctcttgaaacccggga

SEQ ID NO: 5690249 - DNA, 25 bp, Homo sapien
cgggtttcaagagattctcgtgcct

SEQ ID NO: 5690250 - DNA, 25 bp, Homo sapien
caatctctgcctcccgggtttcaag

SEQ ID NO: 5690251 - DNA, 25 bp, Homo sapien
cccgggtttcaagagattctcgtgc

SEQ ID NO: 5690252 - DNA, 25 bp, Homo sapien
gtgcagtcacaatctcagcttactg

SEQ ID NO: 5690253 - DNA, 25 bp, Homo sapien
tcccgggtttcaagagattctcgtg

SEQ ID NO: 5690254 - DNA, 25 bp, Homo sapien
ccgggtttcaagagattctcgtgcc

SEQ ID NO: 5690255 - DNA, 25 bp, Homo sapien
taaattagttgactgtggtggtaca

SEQ ID NO: 5690256 - DNA, 25 bp, Homo sapien
ataaattagttgactgtggtggtac

SEQ ID NO: 5690257 - DNA, 25 bp, Homo sapien
attagttgactgtggtggtacacac

SEQ ID NO: 5690258 - DNA, 25 bp, Homo sapien
aattagttgactgtggtggtacaca

SEQ ID NO: 5690259 - DNA, 25 bp, Homo sapien
acataaattagttgactgtggtggt

SEQ ID NO: 5690260 - DNA, 25 bp, Homo sapien
cataaattagttgactgtggtggta

SEQ ID NO: 5690261 - DNA, 25 bp, Homo sapien
gtaccaccacagtcaactaatttat

SEQ ID NO: 5690262 - DNA, 25 bp, Homo sapien
taccaccacagtcaactaatttatg

SEQ ID NO: 5690263 - DNA, 25 bp, Homo sapien
tgtaccaccacagtcaactaattta

SEQ ID NO: 5690264 - DNA, 25 bp, Homo sapien
gtgtgtaccaccacagtcaactaat

SEQ ID NO: 5690265 - DNA, 25 bp, Homo sapien
tgtgtaccaccacagtcaactaatt

SEQ ID NO: 5690266 - DNA, 25 bp, Homo sapien
accaccacagtcaactaatttatgt

SEQ ID NO: 5690267 - DNA, 25 bp, Homo sapien
catgtattagatctggcattggagg

SEQ ID NO: 5690268 - DNA, 25 bp, Homo sapien
tcatgtattagatctggcattggag

SEQ ID NO: 5690269 - DNA, 25 bp, Homo sapien
atcatgtattagatctggcattgga

SEQ ID NO: 5690270 - DNA, 25 bp, Homo sapien
ttggaggggtcaggtggctcacacc

SEQ ID NO: 5690271 - DNA, 25 bp, Homo sapien
tattagatctggcattggaggggtc

SEQ ID NO: 5690272 - DNA, 25 bp, Homo sapien
atgtattagatctggcattggaggg

SEQ ID NO: 5690273 - DNA, 25 bp, Homo sapien
tccaatgccagatctaatacatgat

SEQ ID NO: 5690274 - DNA, 25 bp, Homo sapien
gacccctccaatgccagatctaata

SEQ ID NO: 5690275 - DNA, 25 bp, Homo sapien
tgacccctccaatgccagatctaat

SEQ ID NO: 5690276 - DNA, 25 bp, Homo sapien
aggtgtgagccacctgacccctcca

SEQ ID NO: 5690277 - DNA, 25 bp, Homo sapien
ccctccaatgccagatctaatacat

SEQ ID NO: 5690278 - DNA, 25 bp, Homo sapien
cctccaatgccagatctaatacatg

SEQ ID NO: 5690279 - DNA, 25 bp, Homo sapien
tcttccttactatcatcctaactca

SEQ ID NO: 5690280 - DNA, 25 bp, Homo sapien
taaagagccggctcttccttactat

SEQ ID NO: 5690281 - DNA, 25 bp, Homo sapien
aactcactcttaggggagggataga

SEQ ID NO: 5690282 - DNA, 25 bp, Homo sapien
ttgagtgctaaagagccggctcttc

SEQ ID NO: 5690283 - DNA, 25 bp, Homo sapien
gagtgctaaagagccggctcttcct

SEQ ID NO: 5690284 - DNA, 25 bp, Homo sapien
cttgagtgctaaagagccggctctt

SEQ ID NO: 5690285 - DNA, 25 bp, Homo sapien
tgagttaggatgatagtaaggaaga

SEQ ID NO: 5690286 - DNA, 25 bp, Homo sapien
gaagagccggctctttagcactcaa

SEQ ID NO: 5690287 - DNA, 25 bp, Homo sapien
tagtaaggaagagccggctctttag

SEQ ID NO: 5690288 - DNA, 25 bp, Homo sapien
ggaagagccggctctttagcactca

SEQ ID NO: 5690289 - DNA, 25 bp, Homo sapien
aagagccggctctttagcactcaag

SEQ ID NO: 5690290 - DNA, 25 bp, Homo sapien
tctatccctcccctaagagtgagtt

SEQ ID NO: 5690291 - DNA, 25 bp, Homo sapien
taaatctatatgaggcacagagagt

SEQ ID NO: 5690292 - DNA, 25 bp, Homo sapien
aggcacagagagtaaagggttaaga

SEQ ID NO: 5690293 - DNA, 25 bp, Homo sapien
acagagagtaaagggttaagatact

SEQ ID NO: 5690294 - DNA, 25 bp, Homo sapien
gcacagagagtaaagggttaagata

SEQ ID NO: 5690295 - DNA, 25 bp, Homo sapien
ggcacagagagtaaagggttaagat

SEQ ID NO: 5690296 - DNA, 25 bp, Homo sapien
cacagagagtaaagggttaagatac

SEQ ID NO: 5690297 - DNA, 25 bp, Homo sapien
actctctgtgcctcatatagattta

SEQ ID NO: 5690298 - DNA, 25 bp, Homo sapien
gtatcttaaccctttactctctgtg

SEQ ID NO: 5690299 - DNA, 25 bp, Homo sapien
tatcttaaccctttactctctgtgc

SEQ ID NO: 5690300 - DNA, 25 bp, Homo sapien
tcttaaccctttactctctgtgcct

SEQ ID NO: 5690301 - DNA, 25 bp, Homo sapien
atcttaaccctttactctctgtgcc

SEQ ID NO: 5690302 - DNA, 25 bp, Homo sapien
agtatcttaaccctttactctctgt

SEQ ID NO: 5690303 - DNA, 25 bp, Homo sapien
aagtgataagtatcaagagtttgga

SEQ ID NO: 5690304 - DNA, 25 bp, Homo sapien
caagtgataagtatcaagagtttgg

SEQ ID NO: 5690305 - DNA, 25 bp, Homo sapien
tcaagtgataagtatcaagagtttg

SEQ ID NO: 5690306 - DNA, 25 bp, Homo sapien
gctcagagttgtccgcattactttg

SEQ ID NO: 5690307 - DNA, 25 bp, Homo sapien
cagctcagagttgtccgcattactt

SEQ ID NO: 5690308 - DNA, 25 bp, Homo sapien
cagagttgtccgcattactttggtt

SEQ ID NO: 5690309 - DNA, 25 bp, Homo sapien
ctcagagttgtccgcattactttgg

SEQ ID NO: 5690310 - DNA, 25 bp, Homo sapien
agctcagagttgtccgcattacttt

SEQ ID NO: 5690311 - DNA, 25 bp, Homo sapien
agagttgtccgcattactttggttt

SEQ ID NO: 5690312 - DNA, 25 bp, Homo sapien
ccaaagtaatgcggacaactctgag

SEQ ID NO: 5690313 - DNA, 25 bp, Homo sapien
aagtaatgcggacaactctgagctg

SEQ ID NO: 5690314 - DNA, 25 bp, Homo sapien
aaaccaaagtaatgcggacaactct

SEQ ID NO: 5690315 - DNA, 25 bp, Homo sapien
caaagtaatgcggacaactctgagc

SEQ ID NO: 5690316 - DNA, 25 bp, Homo sapien
aaccaaagtaatgcggacaactctg

SEQ ID NO: 5690317 - DNA, 25 bp, Homo sapien
aaagtaatgcggacaactctgagct

SEQ ID NO: 5690318 - DNA, 25 bp, Homo sapien
ccaaactcttgatacttatcacttg

SEQ ID NO: 5690319 - DNA, 25 bp, Homo sapien
caaactcttgatacttatcacttga

SEQ ID NO: 5690320 - DNA, 25 bp, Homo sapien
tccaaactcttgatacttatcactt

SEQ ID NO: 5690321 - DNA, 25 bp, Homo sapien
gcattactttggtttttcaggttca

SEQ ID NO: 5690322 - DNA, 25 bp, Homo sapien
caagtgataagtatcaagagtttgg

SEQ ID NO: 5690323 - DNA, 25 bp, Homo sapien
aagtgataagtatcaagagtttgga

SEQ ID NO: 5690324 - DNA, 25 bp, Homo sapien
gaacatatcatacagaacagctcag

SEQ ID NO: 5690325 - DNA, 25 bp, Homo sapien
gaacagctcagagttgtccgcatta

SEQ ID NO: 5690326 - DNA, 25 bp, Homo sapien
tcaggttcaagtgataagtatcaag

SEQ ID NO: 5690327 - DNA, 25 bp, Homo sapien
cttgatacttatcacttgaacctga

SEQ ID NO: 5690328 - DNA, 25 bp, Homo sapien
caaactcttgatacttatcacttga

SEQ ID NO: 5690329 - DNA, 25 bp, Homo sapien
tatgttcatgtctcttatagtctga

SEQ ID NO: 5690330 - DNA, 25 bp, Homo sapien
caaagtaatgcggacaactctgagc

SEQ ID NO: 5690331 - DNA, 25 bp, Homo sapien
tgaacctgaaaaaccaaagtaatgc

SEQ ID NO: 5690332 - DNA, 25 bp, Homo sapien
tccaaactcttgatacttatcactt

SEQ ID NO: 5690333 - DNA, 25 bp, Homo sapien
attctaaattcatatcgaaaatgaa

SEQ ID NO: 5690334 - DNA, 25 bp, Homo sapien
agttattctaaattcatatcgaaaa

SEQ ID NO: 5690335 - DNA, 25 bp, Homo sapien
ttattctaaattcatatcgaaaatg

SEQ ID NO: 5690336 - DNA, 25 bp, Homo sapien
gttattctaaattcatatcgaaaat

SEQ ID NO: 5690337 - DNA, 25 bp, Homo sapien
tattctaaattcatatcgaaaatga

SEQ ID NO: 5690338 - DNA, 25 bp, Homo sapien
ttttcgatatgaatttagaataact

SEQ ID NO: 5690339 - DNA, 25 bp, Homo sapien
tcattttcgatatgaatttagaata

SEQ ID NO: 5690340 - DNA, 25 bp, Homo sapien
ttcattttcgatatgaatttagaat

SEQ ID NO: 5690341 - DNA, 25 bp, Homo sapien
cattttcgatatgaatttagaataa

SEQ ID NO: 5690342 - DNA, 25 bp, Homo sapien
attttcgatatgaatttagaataac

SEQ ID NO: 5690343 - DNA, 25 bp, Homo sapien
gaaagattcaaaacctcaattcatt

SEQ ID NO: 5690344 - DNA, 25 bp, Homo sapien
ggtgaaagattcaaaacctcaattc

SEQ ID NO: 5690345 - DNA, 25 bp, Homo sapien
tctaaattcatatcgaaaatgaagg

SEQ ID NO: 5690346 - DNA, 25 bp, Homo sapien
attcatatcgaaaatgaaggatgtg

SEQ ID NO: 5690347 - DNA, 25 bp, Homo sapien
taaagttattctaaattcatatcga

SEQ ID NO: 5690348 - DNA, 25 bp, Homo sapien
tattctaaattcatatcgaaaatga

SEQ ID NO: 5690349 - DNA, 25 bp, Homo sapien
gaattgaggttttgaatctttcacc

SEQ ID NO: 5690350 - DNA, 25 bp, Homo sapien
ccttcattttcgatatgaatttaga

SEQ ID NO: 5690351 - DNA, 25 bp, Homo sapien
cgatatgaatttagaataactttaa

SEQ ID NO: 5690352 - DNA, 25 bp, Homo sapien
aaaaatgaattgaggttttgaatct

SEQ ID NO: 5690353 - DNA, 25 bp, Homo sapien
cattttcgatatgaatttagaataa

SEQ ID NO: 5690354 - DNA, 25 bp, Homo sapien
cacatccttcattttcgatatgaat

SEQ ID NO: 5690355 - DNA, 25 bp, Homo sapien
aagatgaaagattcggccaggcgtg

SEQ ID NO: 5690356 - DNA, 25 bp, Homo sapien
caagatgaaagattcggccaggcgt

SEQ ID NO: 5690357 - DNA, 25 bp, Homo sapien
cacgcctggccgaatctttcatctt

SEQ ID NO: 5690358 - DNA, 25 bp, Homo sapien
acgcctggccgaatctttcatcttg

SEQ ID NO: 5690359 - DNA, 25 bp, Homo sapien
caagatgaaagattcggccaggcgt

SEQ ID NO: 5690360 - DNA, 25 bp, Homo sapien
aagatgaaagattcggccaggcgtg

SEQ ID NO: 5690361 - DNA, 25 bp, Homo sapien
gaaaccattcagaatctgtttttct

SEQ ID NO: 5690362 - DNA, 25 bp, Homo sapien
ttttacaagatgaaagattcggcca

SEQ ID NO: 5690363 - DNA, 25 bp, Homo sapien
gtcaactttgaaaccattcagaatc

SEQ ID NO: 5690364 - DNA, 25 bp, Homo sapien
aactttgaaaccattcagaatctgt

SEQ ID NO: 5690365 - DNA, 25 bp, Homo sapien
gattctgaatggtttcaaagttgac

SEQ ID NO: 5690366 - DNA, 25 bp, Homo sapien
cacgcctggccgaatctttcatctt

SEQ ID NO: 5690367 - DNA, 25 bp, Homo sapien
tggccgaatctttcatcttgtaaaa

SEQ ID NO: 5690368 - DNA, 25 bp, Homo sapien
gaaaaacagattctgaatggtttca

SEQ ID NO: 5690369 - DNA, 25 bp, Homo sapien
cagattctgaatggtttcaaagttg

SEQ ID NO: 5690370 - DNA, 25 bp, Homo sapien
acgcctggccgaatctttcatcttg

SEQ ID NO: 5690371 - DNA, 25 bp, Homo sapien
agcctaatcttagcagtccactgac

SEQ ID NO: 5690372 - DNA, 25 bp, Homo sapien
agcagtccactgactgaattatagc

SEQ ID NO: 5690373 - DNA, 25 bp, Homo sapien
tagacagcctaatcttagcagtcca

SEQ ID NO: 5690374 - DNA, 25 bp, Homo sapien
aattctagaagaactagacagccta

SEQ ID NO: 5690375 - DNA, 25 bp, Homo sapien
taatcttagcagtccactgactgaa

SEQ ID NO: 5690376 - DNA, 25 bp, Homo sapien
gaactagacagcctaatcttagcag

SEQ ID NO: 5690377 - DNA, 25 bp, Homo sapien
gctataattcagtcagtggactgct

SEQ ID NO: 5690378 - DNA, 25 bp, Homo sapien
tcagtggactgctaagattaggctg

SEQ ID NO: 5690379 - DNA, 25 bp, Homo sapien
cagtcagtggactgctaagattagg

SEQ ID NO: 5690380 - DNA, 25 bp, Homo sapien
ggactgctaagattaggctgtctag

SEQ ID NO: 5690381 - DNA, 25 bp, Homo sapien
taggctgtctagttcttctagaatt

SEQ ID NO: 5690382 - DNA, 25 bp, Homo sapien
agattaggctgtctagttcttctag

SEQ ID NO: 5690383 - DNA, 25 bp, Homo sapien
aataatttctaatgccagctatttc

SEQ ID NO: 5690384 - DNA, 25 bp, Homo sapien
aatttctaatgccagctatttccct

SEQ ID NO: 5690385 - DNA, 25 bp, Homo sapien
tttctaatgccagctatttcccttt

SEQ ID NO: 5690386 - DNA, 25 bp, Homo sapien
ataatttctaatgccagctatttcc

SEQ ID NO: 5690387 - DNA, 25 bp, Homo sapien
taatttctaatgccagctatttccc

SEQ ID NO: 5690388 - DNA, 25 bp, Homo sapien
atttctaatgccagctatttccctt

SEQ ID NO: 5690389 - DNA, 25 bp, Homo sapien
agggaaatagctggcattagaaatt

SEQ ID NO: 5690390 - DNA, 25 bp, Homo sapien
aaagggaaatagctggcattagaaa

SEQ ID NO: 5690391 - DNA, 25 bp, Homo sapien
gggaaatagctggcattagaaatta

SEQ ID NO: 5690392 - DNA, 25 bp, Homo sapien
ggaaatagctggcattagaaattat

SEQ ID NO: 5690393 - DNA, 25 bp, Homo sapien
aagggaaatagctggcattagaaat

SEQ ID NO: 5690394 - DNA, 25 bp, Homo sapien
gaaatagctggcattagaaattatt

SEQ ID NO: 5690395 - DNA, 25 bp, Homo sapien
tctgtctttctggagttttgtgtgc

SEQ ID NO: 5690396 - DNA, 25 bp, Homo sapien
gtgctcttgagattaatttggtttc

SEQ ID NO: 5690397 - DNA, 25 bp, Homo sapien
aatttctaatgccagctatttccct

SEQ ID NO: 5690398 - DNA, 25 bp, Homo sapien
taatgccagctatttcccttttctg

SEQ ID NO: 5690399 - DNA, 25 bp, Homo sapien
tctggagttttgtgtgctcttgaga

SEQ ID NO: 5690400 - DNA, 25 bp, Homo sapien
gaacaaataatttctaatgccagct

SEQ ID NO: 5690401 - DNA, 25 bp, Homo sapien
taatctcaagagcacacaaaactcc

SEQ ID NO: 5690402 - DNA, 25 bp, Homo sapien
aaagggaaatagctggcattagaaa

SEQ ID NO: 5690403 - DNA, 25 bp, Homo sapien
gcacacaaaactccagaaagacaga

SEQ ID NO: 5690404 - DNA, 25 bp, Homo sapien
gacagaaaagggaaatagctggcat

SEQ ID NO: 5690405 - DNA, 25 bp, Homo sapien
ggaaatagctggcattagaaattat

SEQ ID NO: 5690406 - DNA, 25 bp, Homo sapien
gaaaccaaattaatctcaagagcac

SEQ ID NO: 5690407 - DNA, 25 bp, Homo sapien
cgttaagcctctggctaagtctttg

SEQ ID NO: 5690408 - DNA, 25 bp, Homo sapien
gctaagtctttggacttgttgctaa

SEQ ID NO: 5690409 - DNA, 25 bp, Homo sapien
taccaaaaccaatagtcctttctca

SEQ ID NO: 5690410 - DNA, 25 bp, Homo sapien
ggctaagtctttggacttgttgcta

SEQ ID NO: 5690411 - DNA, 25 bp, Homo sapien
tccgttaagcctctggctaagtctt

SEQ ID NO: 5690412 - DNA, 25 bp, Homo sapien
ttccgttaagcctctggctaagtct

SEQ ID NO: 5690413 - DNA, 25 bp, Homo sapien
aagacttagccagaggcttaacgga

SEQ ID NO: 5690414 - DNA, 25 bp, Homo sapien
ttagcaacaagtccaaagacttagc

SEQ ID NO: 5690415 - DNA, 25 bp, Homo sapien
caaagacttagccagaggcttaacg

SEQ ID NO: 5690416 - DNA, 25 bp, Homo sapien
agacttagccagaggcttaacggaa

SEQ ID NO: 5690417 - DNA, 25 bp, Homo sapien
tgagaaaggactattggttttggta

SEQ ID NO: 5690418 - DNA, 25 bp, Homo sapien
tagcaacaagtccaaagacttagcc

SEQ ID NO: 5690419 - DNA, 25 bp, Homo sapien
aggtagtagaagcatggtccccctc

SEQ ID NO: 5690420 - DNA, 25 bp, Homo sapien
taaaaggtagtagaagcatggtccc

SEQ ID NO: 5690421 - DNA, 25 bp, Homo sapien
cctccccaacccataagagagttgg

SEQ ID NO: 5690422 - DNA, 25 bp, Homo sapien
ccccaacccataagagagttggttg

SEQ ID NO: 5690423 - DNA, 25 bp, Homo sapien
caacccataagagagttggttgggt

SEQ ID NO: 5690424 - DNA, 25 bp, Homo sapien
acccataagagagttggttgggtat

SEQ ID NO: 5690425 - DNA, 25 bp, Homo sapien
gacagtcttaagttaaatgggacta

SEQ ID NO: 5690426 - DNA, 25 bp, Homo sapien
gttgctatcagttaagacagtctta

SEQ ID NO: 5690427 - DNA, 25 bp, Homo sapien
tgctatcagttaagacagtcttaag

SEQ ID NO: 5690428 - DNA, 25 bp, Homo sapien
taagacagtcttaagttaaatggga

SEQ ID NO: 5690429 - DNA, 25 bp, Homo sapien
gggttgctatcagttaagacagtct

SEQ ID NO: 5690430 - DNA, 25 bp, Homo sapien
cagggttgctatcagttaagacagt

SEQ ID NO: 5690431 - DNA, 25 bp, Homo sapien
gactgtcttaactgatagcaaccct

SEQ ID NO: 5690432 - DNA, 25 bp, Homo sapien
actgtcttaactgatagcaaccctg

SEQ ID NO: 5690433 - DNA, 25 bp, Homo sapien
cttaagactgtcttaactgatagca

SEQ ID NO: 5690434 - DNA, 25 bp, Homo sapien
tagtcccatttaacttaagactgtc

SEQ ID NO: 5690435 - DNA, 25 bp, Homo sapien
taagactgtcttaactgatagcaac

SEQ ID NO: 5690436 - DNA, 25 bp, Homo sapien
agactgtcttaactgatagcaaccc

SEQ ID NO: 5690437 - DNA, 25 bp, Homo sapien
gggaccatgcttctactacctttta

SEQ ID NO: 5690438 - DNA, 25 bp, Homo sapien
acccaaccaactctcttatgggttg

SEQ ID NO: 5690439 - DNA, 25 bp, Homo sapien
atacccaaccaactctcttatgggt

SEQ ID NO: 5690440 - DNA, 25 bp, Homo sapien
ggaccatgcttctactaccttttag

SEQ ID NO: 5690441 - DNA, 25 bp, Homo sapien
ggagggggaccatgcttctactacc

SEQ ID NO: 5690442 - DNA, 25 bp, Homo sapien
ccaaccaactctcttatgggttggg

SEQ ID NO: 5690443 - DNA, 25 bp, Homo sapien
gccttccagtgttgataatgtataa

SEQ ID NO: 5690444 - DNA, 25 bp, Homo sapien
gatctctgtaattctgttgccttcc

SEQ ID NO: 5690445 - DNA, 25 bp, Homo sapien
tatttgaacacggtaaagaaggtga

SEQ ID NO: 5690446 - DNA, 25 bp, Homo sapien
cacggtaaagaaggtgatctctgta

SEQ ID NO: 5690447 - DNA, 25 bp, Homo sapien
tgtataaacataacgcagtctaagg

SEQ ID NO: 5690448 - DNA, 25 bp, Homo sapien
taacgcagtctaaggaccttcctga

SEQ ID NO: 5690449 - DNA, 25 bp, Homo sapien
aacactggaaggcaacagaattaca

SEQ ID NO: 5690450 - DNA, 25 bp, Homo sapien
tacagagatcaccttctttaccgtg

SEQ ID NO: 5690451 - DNA, 25 bp, Homo sapien
ccttagactgcgttatgtttataca

SEQ ID NO: 5690452 - DNA, 25 bp, Homo sapien
gaaggcaacagaattacagagatca

SEQ ID NO: 5690453 - DNA, 25 bp, Homo sapien
tcaggaaggtccttagactgcgtta

SEQ ID NO: 5690454 - DNA, 25 bp, Homo sapien
ttatacattatcaacactggaaggc

SEQ ID NO: 5690455 - DNA, 25 bp, Homo sapien
tcagtaataaccttgcaagaggagt

SEQ ID NO: 5690456 - DNA, 25 bp, Homo sapien
gtctagtgtcagtaataaccttgca

SEQ ID NO: 5690457 - DNA, 25 bp, Homo sapien
aaccttgcaagaggagttattgtcc

SEQ ID NO: 5690458 - DNA, 25 bp, Homo sapien
tcaaattaataaactgaggtcctag

SEQ ID NO: 5690459 - DNA, 25 bp, Homo sapien
cttgcaagaggagttattgtccatt

SEQ ID NO: 5690460 - DNA, 25 bp, Homo sapien
aactgaggtcctagtaattaaatgc

SEQ ID NO: 5690461 - DNA, 25 bp, Homo sapien
tgcaaggttattactgacactagac

SEQ ID NO: 5690462 - DNA, 25 bp, Homo sapien
ctaggacctcagtttattaatttga

SEQ ID NO: 5690463 - DNA, 25 bp, Homo sapien
ggacaataactcctcttgcaaggtt

SEQ ID NO: 5690464 - DNA, 25 bp, Homo sapien
aaatggacaataactcctcttgcaa

SEQ ID NO: 5690465 - DNA, 25 bp, Homo sapien
gcatttaattactaggacctcagtt

SEQ ID NO: 5690466 - DNA, 25 bp, Homo sapien
cctcttgcaaggttattactgacac

SEQ ID NO: 5690467 - DNA, 25 bp, Homo sapien
ggaggcagagtcgttgttgccccgg

SEQ ID NO: 5690468 - DNA, 25 bp, Homo sapien
tttggaggcagagtcgttgttgccc

SEQ ID NO: 5690469 - DNA, 25 bp, Homo sapien
tggaggcagagtcgttgttgccccg

SEQ ID NO: 5690470 - DNA, 25 bp, Homo sapien
ttggaggcagagtcgttgttgcccc

SEQ ID NO: 5690471 - DNA, 25 bp, Homo sapien
ggggcaacaacgactctgcctccaa

SEQ ID NO: 5690472 - DNA, 25 bp, Homo sapien
cggggcaacaacgactctgcctcca

SEQ ID NO: 5690473 - DNA, 25 bp, Homo sapien
ccggggcaacaacgactctgcctcc

SEQ ID NO: 5690474 - DNA, 25 bp, Homo sapien
gggcaacaacgactctgcctccaaa

SEQ ID NO: 5690475 - DNA, 25 bp, Homo sapien
actggttaattcctctttactgact

SEQ ID NO: 5690476 - DNA, 25 bp, Homo sapien
ctggttaattcctctttactgactt

SEQ ID NO: 5690477 - DNA, 25 bp, Homo sapien
tttggaggcagagtcgttgttgccc

SEQ ID NO: 5690478 - DNA, 25 bp, Homo sapien
aggcagagtcgttgttgccccggct

SEQ ID NO: 5690479 - DNA, 25 bp, Homo sapien
ttggaggcagagtcgttgttgcccc

SEQ ID NO: 5690480 - DNA, 25 bp, Homo sapien
ccggctggattgcagcggtgcgatt

SEQ ID NO: 5690481 - DNA, 25 bp, Homo sapien
ggggcaacaacgactctgcctccaa

SEQ ID NO: 5690482 - DNA, 25 bp, Homo sapien
aagtcagtaaagaggaattaaccag

SEQ ID NO: 5690483 - DNA, 25 bp, Homo sapien
agtcagtaaagaggaattaaccagt

SEQ ID NO: 5690484 - DNA, 25 bp, Homo sapien
agccggggcaacaacgactctgcct

SEQ ID NO: 5690485 - DNA, 25 bp, Homo sapien
aaatcgcaccgctgcaatccagccg

SEQ ID NO: 5690486 - DNA, 25 bp, Homo sapien
gggcaacaacgactctgcctccaaa

SEQ ID NO: 5690487 - DNA, 25 bp, Homo sapien
acccctggcctgatgtttccttttg

SEQ ID NO: 5690488 - DNA, 25 bp, Homo sapien
tgtgtccctggctttgtgcttcaaa

SEQ ID NO: 5690489 - DNA, 25 bp, Homo sapien
gatgacaggcgtgagcctgagccac

SEQ ID NO: 5690490 - DNA, 25 bp, Homo sapien
gatgtttccttttgtgtccctggct

SEQ ID NO: 5690491 - DNA, 25 bp, Homo sapien
tgacaggcgtgagcctgagccacca

SEQ ID NO: 5690492 - DNA, 25 bp, Homo sapien
tggctttgtgcttcaaatatcttag

SEQ ID NO: 5690493 - DNA, 25 bp, Homo sapien
gatatttgaagcacaaagccaggga

SEQ ID NO: 5690494 - DNA, 25 bp, Homo sapien
tggtggctcaggctcacgcctgtca

SEQ ID NO: 5690495 - DNA, 25 bp, Homo sapien
ctaagatatttgaagcacaaagcca

SEQ ID NO: 5690496 - DNA, 25 bp, Homo sapien
cacaaaaggaaacatcaggccaggg

SEQ ID NO: 5690497 - DNA, 25 bp, Homo sapien
cagggacacaaaaggaaacatcagg

SEQ ID NO: 5690498 - DNA, 25 bp, Homo sapien
tttgaagcacaaagccagggacaca

SEQ ID NO: 5690499 - DNA, 25 bp, Homo sapien
gctgcgtgagcgagcccttctccat

SEQ ID NO: 5690500 - DNA, 25 bp, Homo sapien
agacttgaggtagtggtccttcagg

SEQ ID NO: 5690501 - DNA, 25 bp, Homo sapien
gacttgaggtagtggtccttcaggg

SEQ ID NO: 5690502 - DNA, 25 bp, Homo sapien
tgcgtgagcgagcccttctccatcg

SEQ ID NO: 5690503 - DNA, 25 bp, Homo sapien
tgctgcgtgagcgagcccttctcca

SEQ ID NO: 5690504 - DNA, 25 bp, Homo sapien
cctgggagacttgaggtagtggtcc

SEQ ID NO: 5690505 - DNA, 25 bp, Homo sapien
cgatggagaagggctcgctcacgca

SEQ ID NO: 5690506 - DNA, 25 bp, Homo sapien
ccctgaaggaccactacctcaagtc

SEQ ID NO: 5690507 - DNA, 25 bp, Homo sapien
tggagaagggctcgctcacgcagca

SEQ ID NO: 5690508 - DNA, 25 bp, Homo sapien
atggagaagggctcgctcacgcagc

SEQ ID NO: 5690509 - DNA, 25 bp, Homo sapien
ggaccactacctcaagtctcccagg

SEQ ID NO: 5690510 - DNA, 25 bp, Homo sapien
cctgaaggaccactacctcaagtct

SEQ ID NO: 5690511 - DNA, 25 bp, Homo sapien
tgtcatgcatctacccgtatgggtt

SEQ ID NO: 5690512 - DNA, 25 bp, Homo sapien
gcatctacccgtatgggttattcag

SEQ ID NO: 5690513 - DNA, 25 bp, Homo sapien
taaaactgtcatgcatctacccgta

SEQ ID NO: 5690514 - DNA, 25 bp, Homo sapien
gggttattcagtagatacctgtgag

SEQ ID NO: 5690515 - DNA, 25 bp, Homo sapien
actgtcatgcatctacccgtatggg

SEQ ID NO: 5690516 - DNA, 25 bp, Homo sapien
tctaaaactgtcatgcatctacccg

SEQ ID NO: 5690517 - DNA, 25 bp, Homo sapien
tactgaataacccatacgggtagat

SEQ ID NO: 5690518 - DNA, 25 bp, Homo sapien
gaataacccatacgggtagatgcat

SEQ ID NO: 5690519 - DNA, 25 bp, Homo sapien
taacccatacgggtagatgcatgac

SEQ ID NO: 5690520 - DNA, 25 bp, Homo sapien
actcacaggtatctactgaataacc

SEQ ID NO: 5690521 - DNA, 25 bp, Homo sapien
cgggtagatgcatgacagttttaga

SEQ ID NO: 5690522 - DNA, 25 bp, Homo sapien
cccatacgggtagatgcatgacagt

SEQ ID NO: 5690523 - DNA, 25 bp, Homo sapien
cccatttcatagttgggaactttgg

SEQ ID NO: 5690524 - DNA, 25 bp, Homo sapien
ccatttcatagttgggaactttggg

SEQ ID NO: 5690525 - DNA, 25 bp, Homo sapien
ccccatttcatagttgggaactttg

SEQ ID NO: 5690526 - DNA, 25 bp, Homo sapien
catttcatagttgggaactttgggg

SEQ ID NO: 5690527 - DNA, 25 bp, Homo sapien
atgttttgaaggccttgagagcctc

SEQ ID NO: 5690528 - DNA, 25 bp, Homo sapien
catgttttgaaggccttgagagcct

SEQ ID NO: 5690529 - DNA, 25 bp, Homo sapien
gaggctctcaaggccttcaaaacat

SEQ ID NO: 5690530 - DNA, 25 bp, Homo sapien
aggctctcaaggccttcaaaacatg

SEQ ID NO: 5690531 - DNA, 25 bp, Homo sapien
cccaaagttcccaactatgaaatgg

SEQ ID NO: 5690532 - DNA, 25 bp, Homo sapien
ccaaagttcccaactatgaaatggg

SEQ ID NO: 5690533 - DNA, 25 bp, Homo sapien
ccccaaagttcccaactatgaaatg

SEQ ID NO: 5690534 - DNA, 25 bp, Homo sapien
caaagttcccaactatgaaatgggg

SEQ ID NO: 5690535 - DNA, 25 bp, Homo sapien
gggctttatccccatttcatagttg

SEQ ID NO: 5690536 - DNA, 25 bp, Homo sapien
tctgcactgggctttatccccattt

SEQ ID NO: 5690537 - DNA, 25 bp, Homo sapien
ccatttcatagttgggaactttggg

SEQ ID NO: 5690538 - DNA, 25 bp, Homo sapien
cactgggctttatccccatttcata

SEQ ID NO: 5690539 - DNA, 25 bp, Homo sapien
gcatgttttgaaggccttgagagcc

SEQ ID NO: 5690540 - DNA, 25 bp, Homo sapien
ccccatttcatagttgggaactttg

SEQ ID NO: 5690541 - DNA, 25 bp, Homo sapien
cccaaagttcccaactatgaaatgg

SEQ ID NO: 5690542 - DNA, 25 bp, Homo sapien
ccaaagttcccaactatgaaatggg

SEQ ID NO: 5690543 - DNA, 25 bp, Homo sapien
taaagcccagtgcagaggctctcaa

SEQ ID NO: 5690544 - DNA, 25 bp, Homo sapien
ccccaaagttcccaactatgaaatg

SEQ ID NO: 5690545 - DNA, 25 bp, Homo sapien
tgaaatggggataaagcccagtgca

SEQ ID NO: 5690546 - DNA, 25 bp, Homo sapien
gctctcaaggccttcaaaacatgct

SEQ ID NO: 5690547 - DNA, 25 bp, Homo sapien
tcataggggagattctaaactgaaa

SEQ ID NO: 5690548 - DNA, 25 bp, Homo sapien
tcatatactgggagtcataggggag

SEQ ID NO: 5690549 - DNA, 25 bp, Homo sapien
gagaagacagtacccttctggcatc

SEQ ID NO: 5690550 - DNA, 25 bp, Homo sapien
agattcatatactgggagtcatagg

SEQ ID NO: 5690551 - DNA, 25 bp, Homo sapien
gattcatatactgggagtcataggg

SEQ ID NO: 5690552 - DNA, 25 bp, Homo sapien
tagattcatatactgggagtcatag

SEQ ID NO: 5690553 - DNA, 25 bp, Homo sapien
tttcagtttagaatctcccctatga

SEQ ID NO: 5690554 - DNA, 25 bp, Homo sapien
tcccctatgactcccagtatatgaa

SEQ ID NO: 5690555 - DNA, 25 bp, Homo sapien
tatgactcccagtatatgaatctat

SEQ ID NO: 5690556 - DNA, 25 bp, Homo sapien
cctatgactcccagtatatgaatct

SEQ ID NO: 5690557 - DNA, 25 bp, Homo sapien
cagtttagaatctcccctatgactc

SEQ ID NO: 5690558 - DNA, 25 bp, Homo sapien
gatgccagaagggtactgtcttctc

SEQ ID NO: 5690559 - DNA, 25 bp, Homo sapien
aagggtgtcatctatcatctttcta

SEQ ID NO: 5690560 - DNA, 25 bp, Homo sapien
ggtgtcatctatcatctttctatga

SEQ ID NO: 5690561 - DNA, 25 bp, Homo sapien
cctttgagaataggggactttgata

SEQ ID NO: 5690562 - DNA, 25 bp, Homo sapien
gggtgtcatctatcatctttctatg

SEQ ID NO: 5690563 - DNA, 25 bp, Homo sapien
attttaggcataagtcatcaccacc

SEQ ID NO: 5690564 - DNA, 25 bp, Homo sapien
ttttaggcataagtcatcaccacca

SEQ ID NO: 5690565 - DNA, 25 bp, Homo sapien
tatcaaagtcccctattctcaaagg

SEQ ID NO: 5690566 - DNA, 25 bp, Homo sapien
ggtggtgatgacttatgcctaaaat

SEQ ID NO: 5690567 - DNA, 25 bp, Homo sapien
tcatagaaagatgatagatgacacc

SEQ ID NO: 5690568 - DNA, 25 bp, Homo sapien
tagaaagatgatagatgacaccctt

SEQ ID NO: 5690569 - DNA, 25 bp, Homo sapien
tggtggtgatgacttatgcctaaaa

SEQ ID NO: 5690570 - DNA, 25 bp, Homo sapien
catagaaagatgatagatgacaccc

SEQ ID NO: 5690571 - DNA, 25 bp, Homo sapien
tgatggctctgggttccctggttgg

SEQ ID NO: 5690572 - DNA, 25 bp, Homo sapien
tggctctgggttccctggttggtct

SEQ ID NO: 5690573 - DNA, 25 bp, Homo sapien
atggctctgggttccctggttggtc

SEQ ID NO: 5690574 - DNA, 25 bp, Homo sapien
gatggctctgggttccctggttggt

SEQ ID NO: 5690575 - DNA, 25 bp, Homo sapien
ggacgactcttatctatcacccatg

SEQ ID NO: 5690576 - DNA, 25 bp, Homo sapien
gactcttatctatcacccatgactg

SEQ ID NO: 5690577 - DNA, 25 bp, Homo sapien
cctcagtgcaaggacgactcttatc

SEQ ID NO: 5690578 - DNA, 25 bp, Homo sapien
gcaaggacgactcttatctatcacc

SEQ ID NO: 5690579 - DNA, 25 bp, Homo sapien
cagtgcaaggacgactcttatctat

SEQ ID NO: 5690580 - DNA, 25 bp, Homo sapien
cacctcagtgcaaggacgactctta

SEQ ID NO: 5690581 - DNA, 25 bp, Homo sapien
gataagagtcgtccttgcactgagg

SEQ ID NO: 5690582 - DNA, 25 bp, Homo sapien
gatagataagagtcgtccttgcact

SEQ ID NO: 5690583 - DNA, 25 bp, Homo sapien
ggtgatagataagagtcgtccttgc

SEQ ID NO: 5690584 - DNA, 25 bp, Homo sapien
cagtcatgggtgatagataagagtc

SEQ ID NO: 5690585 - DNA, 25 bp, Homo sapien
taagagtcgtccttgcactgaggtg

SEQ ID NO: 5690586 - DNA, 25 bp, Homo sapien
catgggtgatagataagagtcgtcc

SEQ ID NO: 5690587 - DNA, 25 bp, Homo sapien
accaaccagggaacccagagccatc

SEQ ID NO: 5690588 - DNA, 25 bp, Homo sapien
ccaaccagggaacccagagccatca

SEQ ID NO: 5690589 - DNA, 25 bp, Homo sapien
agaccaaccagggaacccagagcca

SEQ ID NO: 5690590 - DNA, 25 bp, Homo sapien
gaccaaccagggaacccagagccat

SEQ ID NO: 5690591 - DNA, 25 bp, Homo sapien
tccctggttggtctttattatgctt

SEQ ID NO: 5690592 - DNA, 25 bp, Homo sapien
catgactgatggctctgggttccct

SEQ ID NO: 5690593 - DNA, 25 bp, Homo sapien
tggctctgggttccctggttggtct

SEQ ID NO: 5690594 - DNA, 25 bp, Homo sapien
ggtctttattatgcttttaagcaca

SEQ ID NO: 5690595 - DNA, 25 bp, Homo sapien
gactgatggctctgggttccctggt

SEQ ID NO: 5690596 - DNA, 25 bp, Homo sapien
cacctcagtgcaaggacgactctta

SEQ ID NO: 5690597 - DNA, 25 bp, Homo sapien
tgtgcttaaaagcataataaagacc

SEQ ID NO: 5690598 - DNA, 25 bp, Homo sapien
gcataataaagaccaaccagggaac

SEQ ID NO: 5690599 - DNA, 25 bp, Homo sapien
aaagcataataaagaccaaccaggg

SEQ ID NO: 5690600 - DNA, 25 bp, Homo sapien
agggaacccagagccatcagtcatg

SEQ ID NO: 5690601 - DNA, 25 bp, Homo sapien
taagagtcgtccttgcactgaggtg

SEQ ID NO: 5690602 - DNA, 25 bp, Homo sapien
gaccaaccagggaacccagagccat

SEQ ID NO: 5690603 - DNA, 25 bp, Homo sapien
tgactgctccgactagccatgtaac

SEQ ID NO: 5690604 - DNA, 25 bp, Homo sapien
tgtcctgactgctccgactagccat

SEQ ID NO: 5690605 - DNA, 25 bp, Homo sapien
cctgactgctccgactagccatgta

SEQ ID NO: 5690606 - DNA, 25 bp, Homo sapien
gtcctgactgctccgactagccatg

SEQ ID NO: 5690607 - DNA, 25 bp, Homo sapien
attgtcctgactgctccgactagcc

SEQ ID NO: 5690608 - DNA, 25 bp, Homo sapien
actgctccgactagccatgtaactt

SEQ ID NO: 5690609 - DNA, 25 bp, Homo sapien
aagttacatggctagtcggagcagt

SEQ ID NO: 5690610 - DNA, 25 bp, Homo sapien
catggctagtcggagcagtcaggac

SEQ ID NO: 5690611 - DNA, 25 bp, Homo sapien
ggctagtcggagcagtcaggacaat

SEQ ID NO: 5690612 - DNA, 25 bp, Homo sapien
tacatggctagtcggagcagtcagg

SEQ ID NO: 5690613 - DNA, 25 bp, Homo sapien
tggctagtcggagcagtcaggacaa

SEQ ID NO: 5690614 - DNA, 25 bp, Homo sapien
gttacatggctagtcggagcagtca

SEQ ID NO: 5690615 - DNA, 25 bp, Homo sapien
gccactgggcctggctttattttat

SEQ ID NO: 5690616 - DNA, 25 bp, Homo sapien
atttctttttgagatggagtatcac

SEQ ID NO: 5690617 - DNA, 25 bp, Homo sapien
cactgggcctggctttattttattt

SEQ ID NO: 5690618 - DNA, 25 bp, Homo sapien
gagccactgggcctggctttatttt

SEQ ID NO: 5690619 - DNA, 25 bp, Homo sapien
ccactgggcctggctttattttatt

SEQ ID NO: 5690620 - DNA, 25 bp, Homo sapien
agccactgggcctggctttatttta

SEQ ID NO: 5690621 - DNA, 25 bp, Homo sapien
aaataaaataaagccaggcccagtg

SEQ ID NO: 5690622 - DNA, 25 bp, Homo sapien
ataaaataaagccaggcccagtggc

SEQ ID NO: 5690623 - DNA, 25 bp, Homo sapien
taaaataaagccaggcccagtggct

SEQ ID NO: 5690624 - DNA, 25 bp, Homo sapien
aaaataaagccaggcccagtggctc

SEQ ID NO: 5690625 - DNA, 25 bp, Homo sapien
gatactccatctcaaaaagaaataa

SEQ ID NO: 5690626 - DNA, 25 bp, Homo sapien
gtgatactccatctcaaaaagaaat

SEQ ID NO: 5690627 - DNA, 25 bp, Homo sapien
acagtggctcaatctcgcctcactg

SEQ ID NO: 5690628 - DNA, 25 bp, Homo sapien
ctcagcctcccggctaaattttgta

SEQ ID NO: 5690629 - DNA, 25 bp, Homo sapien
tcagcctcccggctaaattttgtat

SEQ ID NO: 5690630 - DNA, 25 bp, Homo sapien
cctcagcctcccggctaaattttgt

SEQ ID NO: 5690631 - DNA, 25 bp, Homo sapien
gcctcagcctcccggctaaattttg

SEQ ID NO: 5690632 - DNA, 25 bp, Homo sapien
cagcctcccggctaaattttgtatt

SEQ ID NO: 5690633 - DNA, 25 bp, Homo sapien
aatacaaaatttagccgggaggctg

SEQ ID NO: 5690634 - DNA, 25 bp, Homo sapien
atacaaaatttagccgggaggctga

SEQ ID NO: 5690635 - DNA, 25 bp, Homo sapien
tacaaaatttagccgggaggctgag

SEQ ID NO: 5690636 - DNA, 25 bp, Homo sapien
caaaatttagccgggaggctgaggc

SEQ ID NO: 5690637 - DNA, 25 bp, Homo sapien
acaaaatttagccgggaggctgagg

SEQ ID NO: 5690638 - DNA, 25 bp, Homo sapien
cagtgaggcgagattgagccactgt

SEQ ID NO: 5690639 - DNA, 25 bp, Homo sapien
tgataatatttagcccgaagcagta

SEQ ID NO: 5690640 - DNA, 25 bp, Homo sapien
tatttagcccgaagcagtaatttca

SEQ ID NO: 5690641 - DNA, 25 bp, Homo sapien
aatgataatatttagcccgaagcag

SEQ ID NO: 5690642 - DNA, 25 bp, Homo sapien
ggtttgtgtgaaaagagtttgagat

SEQ ID NO: 5690643 - DNA, 25 bp, Homo sapien
gaaatgataatatttagcccgaagc

SEQ ID NO: 5690644 - DNA, 25 bp, Homo sapien
tagcccgaagcagtaatttcatggg

SEQ ID NO: 5690645 - DNA, 25 bp, Homo sapien
catgaaattactgcttcgggctaaa

SEQ ID NO: 5690646 - DNA, 25 bp, Homo sapien
aaccccatgaaattactgcttcggg

SEQ ID NO: 5690647 - DNA, 25 bp, Homo sapien
aaactcttttcacacaaaccccatg

SEQ ID NO: 5690648 - DNA, 25 bp, Homo sapien
gcttcgggctaaatattatcatttc

SEQ ID NO: 5690649 - DNA, 25 bp, Homo sapien
tactgcttcgggctaaatattatca

SEQ ID NO: 5690650 - DNA, 25 bp, Homo sapien
acacaaaccccatgaaattactgct

SEQ ID NO: 5690651 - DNA, 25 bp, Homo sapien
acctcaagtgatccacccacctcgg

SEQ ID NO: 5690652 - DNA, 25 bp, Homo sapien
gattacaggagtgagccactgcacc

SEQ ID NO: 5690653 - DNA, 25 bp, Homo sapien
ccactgcacctggcctcattaatga

SEQ ID NO: 5690654 - DNA, 25 bp, Homo sapien
cctcaagtgatccacccacctcggc

SEQ ID NO: 5690655 - DNA, 25 bp, Homo sapien
ccacctcggcctcccaaagtgctgg

SEQ ID NO: 5690656 - DNA, 25 bp, Homo sapien
aagtgatccacccacctcggcctcc

SEQ ID NO: 5690657 - DNA, 25 bp, Homo sapien
ccgaggtgggtggatcacttgaggt

SEQ ID NO: 5690658 - DNA, 25 bp, Homo sapien
gccgaggtgggtggatcacttgagg

SEQ ID NO: 5690659 - DNA, 25 bp, Homo sapien
tcattaatgaggccaggtgcagtgg

SEQ ID NO: 5690660 - DNA, 25 bp, Homo sapien
ggtgcagtggctcactcctgtaatc

SEQ ID NO: 5690661 - DNA, 25 bp, Homo sapien
ccagcactttgggaggccgaggtgg

SEQ ID NO: 5690662 - DNA, 25 bp, Homo sapien
ggaggccgaggtgggtggatcactt

SEQ ID NO: 5690663 - DNA, 25 bp, Homo sapien
ctgtgtccttcaggctgtgagtgta

SEQ ID NO: 5690664 - DNA, 25 bp, Homo sapien
tgtccttcaggctgtgagtgtagtg

SEQ ID NO: 5690665 - DNA, 25 bp, Homo sapien
gctgtgtccttcaggctgtgagtgt

SEQ ID NO: 5690666 - DNA, 25 bp, Homo sapien
cgctgtgtccttcaggctgtgagtg

SEQ ID NO: 5690667 - DNA, 25 bp, Homo sapien
tcgctgtgtccttcaggctgtgagt

SEQ ID NO: 5690668 - DNA, 25 bp, Homo sapien
ctcgctgtgtccttcaggctgtgag

SEQ ID NO: 5690669 - DNA, 25 bp, Homo sapien
cactacactcacagcctgaaggaca

SEQ ID NO: 5690670 - DNA, 25 bp, Homo sapien
actacactcacagcctgaaggacac

SEQ ID NO: 5690671 - DNA, 25 bp, Homo sapien
ctcacagcctgaaggacacagcgag

SEQ ID NO: 5690672 - DNA, 25 bp, Homo sapien
acactcacagcctgaaggacacagc

SEQ ID NO: 5690673 - DNA, 25 bp, Homo sapien
actcacagcctgaaggacacagcga

SEQ ID NO: 5690674 - DNA, 25 bp, Homo sapien
tacactcacagcctgaaggacacag

SEQ ID NO: 5690675 - DNA, 25 bp, Homo sapien
gtcctaactacatgatgcttgcaga

SEQ ID NO: 5690676 - DNA, 25 bp, Homo sapien
taactacatgatgcttgcagagcca

SEQ ID NO: 5690677 - DNA, 25 bp, Homo sapien
cctaactacatgatgcttgcagagc

SEQ ID NO: 5690678 - DNA, 25 bp, Homo sapien
tcctaactacatgatgcttgcagag

SEQ ID NO: 5690679 - DNA, 25 bp, Homo sapien
tttgtcctaactacatgatgcttgc

SEQ ID NO: 5690680 - DNA, 25 bp, Homo sapien
tgtcctaactacatgatgcttgcag

SEQ ID NO: 5690681 - DNA, 25 bp, Homo sapien
gctctgcaagcatcatgtagttagg

SEQ ID NO: 5690682 - DNA, 25 bp, Homo sapien
tggctctgcaagcatcatgtagtta

SEQ ID NO: 5690683 - DNA, 25 bp, Homo sapien
gcaagcatcatgtagttaggacaaa

SEQ ID NO: 5690684 - DNA, 25 bp, Homo sapien
ggctctgcaagcatcatgtagttag

SEQ ID NO: 5690685 - DNA, 25 bp, Homo sapien
tctgcaagcatcatgtagttaggac

SEQ ID NO: 5690686 - DNA, 25 bp, Homo sapien
tgcaagcatcatgtagttaggacaa

SEQ ID NO: 5690687 - DNA, 25 bp, Homo sapien
ccaggccaagtcgggcatgggaaag

SEQ ID NO: 5690688 - DNA, 25 bp, Homo sapien
tgccaggccaagtcgggcatgggaa

SEQ ID NO: 5690689 - DNA, 25 bp, Homo sapien
ccaagtcgggcatgggaaagacagc

SEQ ID NO: 5690690 - DNA, 25 bp, Homo sapien
gtgccaggccaagtcgggcatggga

SEQ ID NO: 5690691 - DNA, 25 bp, Homo sapien
caggccaagtcgggcatgggaaaga

SEQ ID NO: 5690692 - DNA, 25 bp, Homo sapien
gccaggccaagtcgggcatgggaaa

SEQ ID NO: 5690693 - DNA, 25 bp, Homo sapien
gctgtctttcccatgcccgacttgg

SEQ ID NO: 5690694 - DNA, 25 bp, Homo sapien
tttcccatgcccgacttggcctggc

SEQ ID NO: 5690695 - DNA, 25 bp, Homo sapien
tcccatgcccgacttggcctggcac

SEQ ID NO: 5690696 - DNA, 25 bp, Homo sapien
ttcccatgcccgacttggcctggca

SEQ ID NO: 5690697 - DNA, 25 bp, Homo sapien
tgtggccaagacaaacactgctgtc

SEQ ID NO: 5690698 - DNA, 25 bp, Homo sapien
gctgtctttcccatgcccgacttgg

SEQ ID NO: 5690699 - DNA, 25 bp, Homo sapien
gacttggcctggcacaggacatcca

SEQ ID NO: 5690700 - DNA, 25 bp, Homo sapien
cagctgttgcagtgtggccaagaca

SEQ ID NO: 5690701 - DNA, 25 bp, Homo sapien
aatatacctgcccagtaactggctc

SEQ ID NO: 5690702 - DNA, 25 bp, Homo sapien
cagtaactggctccagctgttgcag

SEQ ID NO: 5690703 - DNA, 25 bp, Homo sapien
gttggcaagaaccaggtaaatacta

SEQ ID NO: 5690704 - DNA, 25 bp, Homo sapien
tactagactttgagaattgagtggt

SEQ ID NO: 5690705 - DNA, 25 bp, Homo sapien
gaaccaggtaaatactagactttga

SEQ ID NO: 5690706 - DNA, 25 bp, Homo sapien
ccaggtaaatactagactttgagaa

SEQ ID NO: 5690707 - DNA, 25 bp, Homo sapien
gactttgagaattgagtggtaagaa

SEQ ID NO: 5690708 - DNA, 25 bp, Homo sapien
taaatactagactttgagaattgag

SEQ ID NO: 5690709 - DNA, 25 bp, Homo sapien
ttaccactcaattctcaaagtctag

SEQ ID NO: 5690710 - DNA, 25 bp, Homo sapien
caattctcaaagtctagtatttacc

SEQ ID NO: 5690711 - DNA, 25 bp, Homo sapien
tagtatttacctggttcttgccaac

SEQ ID NO: 5690712 - DNA, 25 bp, Homo sapien
tttcttaccactcaattctcaaagt

SEQ ID NO: 5690713 - DNA, 25 bp, Homo sapien
ttctcaaagtctagtatttacctgg

SEQ ID NO: 5690714 - DNA, 25 bp, Homo sapien
tcaaagtctagtatttacctggttc

SEQ ID NO: 5690715 - DNA, 25 bp, Homo sapien
gactgggaaggcctagatctggagg

SEQ ID NO: 5690716 - DNA, 25 bp, Homo sapien
cattgaaggtgagcggttggtagat

SEQ ID NO: 5690717 - DNA, 25 bp, Homo sapien
aaggtgagcggttggtagatgcaag

SEQ ID NO: 5690718 - DNA, 25 bp, Homo sapien
tgcaaggggtttgttactaggactg

SEQ ID NO: 5690719 - DNA, 25 bp, Homo sapien
gacagagctaggatcattgaaggtg

SEQ ID NO: 5690720 - DNA, 25 bp, Homo sapien
ggacagagctaggatcattgaaggt

SEQ ID NO: 5690721 - DNA, 25 bp, Homo sapien
agtaacaaaccccttgcatctacca

SEQ ID NO: 5690722 - DNA, 25 bp, Homo sapien
cctccagatctaggccttcccagtc

SEQ ID NO: 5690723 - DNA, 25 bp, Homo sapien
cagtcctagtaacaaaccccttgca

SEQ ID NO: 5690724 - DNA, 25 bp, Homo sapien
caccttcaatgatcctagctctgtc

SEQ ID NO: 5690725 - DNA, 25 bp, Homo sapien
tctaccaaccgctcaccttcaatga

SEQ ID NO: 5690726 - DNA, 25 bp, Homo sapien
gtcctagtaacaaaccccttgcatc

SEQ ID NO: 5690727 - DNA, 25 bp, Homo sapien
ctgggtcaggtaccaagtccttcat

SEQ ID NO: 5690728 - DNA, 25 bp, Homo sapien
gacccgaagtatagcaacctaagca

SEQ ID NO: 5690729 - DNA, 25 bp, Homo sapien
tgtagtagttacgtgacccgaagta

SEQ ID NO: 5690730 - DNA, 25 bp, Homo sapien
tccagggttgtagtagttacgtgac

SEQ ID NO: 5690731 - DNA, 25 bp, Homo sapien
aagtccttcattttgtccagggttg

SEQ ID NO: 5690732 - DNA, 25 bp, Homo sapien
taccaagtccttcattttgtccagg

SEQ ID NO: 5690733 - DNA, 25 bp, Homo sapien
atgaaggacttggtacctgacccag

SEQ ID NO: 5690734 - DNA, 25 bp, Homo sapien
gcttaggttgctatacttcgggtca

SEQ ID NO: 5690735 - DNA, 25 bp, Homo sapien
caaccctggacaaaatgaaggactt

SEQ ID NO: 5690736 - DNA, 25 bp, Homo sapien
gacaaaatgaaggacttggtacctg

SEQ ID NO: 5690737 - DNA, 25 bp, Homo sapien
tacttcgggtcacgtaactactaca

SEQ ID NO: 5690738 - DNA, 25 bp, Homo sapien
gtcacgtaactactacaaccctgga

SEQ ID NO: 5690739 - DNA, 25 bp, Homo sapien
taaatttccagaaaggtcctgcttg

SEQ ID NO: 5690740 - DNA, 25 bp, Homo sapien
aatttccagaaaggtcctgcttgga

SEQ ID NO: 5690741 - DNA, 25 bp, Homo sapien
cattcattcttgtgactggcttttc

SEQ ID NO: 5690742 - DNA, 25 bp, Homo sapien
tgtcacttgacttctaattttaaat

SEQ ID NO: 5690743 - DNA, 25 bp, Homo sapien
gactggcttttcttgtctgcttatt

SEQ ID NO: 5690744 - DNA, 25 bp, Homo sapien
ttccagaaaggtcctgcttggacct

SEQ ID NO: 5690745 - DNA, 25 bp, Homo sapien
taaaaataagcagacaagaaaagcc

SEQ ID NO: 5690746 - DNA, 25 bp, Homo sapien
aataagcagacaagaaaagccagtc

SEQ ID NO: 5690747 - DNA, 25 bp, Homo sapien
aggtccaagcaggacctttctggaa

SEQ ID NO: 5690748 - DNA, 25 bp, Homo sapien
tttaaaattagaagtcaagtgacaa

SEQ ID NO: 5690749 - DNA, 25 bp, Homo sapien
gaaaagccagtcacaagaatgaatg

SEQ ID NO: 5690750 - DNA, 25 bp, Homo sapien
caagcaggacctttctggaaattta

SEQ ID NO: 5690751 - DNA, 25 bp, Homo sapien
tagaggaggcttatacaggcttatt

SEQ ID NO: 5690752 - DNA, 25 bp, Homo sapien
gaggaggcttatacaggcttattct

SEQ ID NO: 5690753 - DNA, 25 bp, Homo sapien
agaggaggcttatacaggcttattc

SEQ ID NO: 5690754 - DNA, 25 bp, Homo sapien
aataagcctgtataagcctcctcta

SEQ ID NO: 5690755 - DNA, 25 bp, Homo sapien
agaataagcctgtataagcctcctc

SEQ ID NO: 5690756 - DNA, 25 bp, Homo sapien
gaataagcctgtataagcctcctct

SEQ ID NO: 5690757 - DNA, 25 bp, Homo sapien
gataagtatcaaaaacaattttgga

SEQ ID NO: 5690758 - DNA, 25 bp, Homo sapien
tagaggaggcttatacaggcttatt

SEQ ID NO: 5690759 - DNA, 25 bp, Homo sapien
aaaacaattttggatagaggaggct

SEQ ID NO: 5690760 - DNA, 25 bp, Homo sapien
gaggaggcttatacaggcttattct

SEQ ID NO: 5690761 - DNA, 25 bp, Homo sapien
gaagaaaaaattgggataagtatca

SEQ ID NO: 5690762 - DNA, 25 bp, Homo sapien
ggcgacagtgaggaagaaaaaattg

SEQ ID NO: 5690763 - DNA, 25 bp, Homo sapien
agaataagcctgtataagcctcctc

SEQ ID NO: 5690764 - DNA, 25 bp, Homo sapien
tgatacttatcccaattttttcttc

SEQ ID NO: 5690765 - DNA, 25 bp, Homo sapien
taagcctcctctatccaaaattgtt

SEQ ID NO: 5690766 - DNA, 25 bp, Homo sapien
caattttttcttcctcactgtcgcc

SEQ ID NO: 5690767 - DNA, 25 bp, Homo sapien
gaataagcctgtataagcctcctct

SEQ ID NO: 5690768 - DNA, 25 bp, Homo sapien
gccccggctggtgcacagtggtgca

SEQ ID NO: 5690769 - DNA, 25 bp, Homo sapien
ggtggccacttgagctcaaaagtgc

SEQ ID NO: 5690770 - DNA, 25 bp, Homo sapien
ggagggtggccacttgagctcaaaa

SEQ ID NO: 5690771 - DNA, 25 bp, Homo sapien
ggccacttgagctcaaaagtgcaag

SEQ ID NO: 5690772 - DNA, 25 bp, Homo sapien
tgagctcaaaagtgcaagagaagcc

SEQ ID NO: 5690773 - DNA, 25 bp, Homo sapien
ttgagctcaaaagtgcaagagaagc

SEQ ID NO: 5690774 - DNA, 25 bp, Homo sapien
caaaagtgcaagagaagcctgggca

SEQ ID NO: 5690775 - DNA, 25 bp, Homo sapien
gcttctcttgcacttttgagctcaa

SEQ ID NO: 5690776 - DNA, 25 bp, Homo sapien
tgcccaggcttctcttgcacttttg

SEQ ID NO: 5690777 - DNA, 25 bp, Homo sapien
acttttgagctcaagtggccaccct

SEQ ID NO: 5690778 - DNA, 25 bp, Homo sapien
ttttgagctcaagtggccaccctcc

SEQ ID NO: 5690779 - DNA, 25 bp, Homo sapien
tgcacttttgagctcaagtggccac

SEQ ID NO: 5690780 - DNA, 25 bp, Homo sapien
ggcttctcttgcacttttgagctca

SEQ ID NO: 5690781 - DNA, 25 bp, Homo sapien
gccacaccgttagggattccagtta

SEQ ID NO: 5690782 - DNA, 25 bp, Homo sapien
ccgttagggattccagttagaaatg

SEQ ID NO: 5690783 - DNA, 25 bp, Homo sapien
ggactaaataacatactcatttggg

SEQ ID NO: 5690784 - DNA, 25 bp, Homo sapien
aaagccacaccgttagggattccag

SEQ ID NO: 5690785 - DNA, 25 bp, Homo sapien
aagccacaccgttagggattccagt

SEQ ID NO: 5690786 - DNA, 25 bp, Homo sapien
cacaccgttagggattccagttaga

SEQ ID NO: 5690787 - DNA, 25 bp, Homo sapien
taactggaatccctaacggtgtggc

SEQ ID NO: 5690788 - DNA, 25 bp, Homo sapien
tctaactggaatccctaacggtgtg

SEQ ID NO: 5690789 - DNA, 25 bp, Homo sapien
catttctaactggaatccctaacgg

SEQ ID NO: 5690790 - DNA, 25 bp, Homo sapien
ttccccaaatgagtatgttatttag

SEQ ID NO: 5690791 - DNA, 25 bp, Homo sapien
ctggaatccctaacggtgtggcttt

SEQ ID NO: 5690792 - DNA, 25 bp, Homo sapien
ccaaatgagtatgttatttagtcca

SEQ ID NO: 5690793 - DNA, 25 bp, Homo sapien
gtaaatgatgtgcccccatttctat

SEQ ID NO: 5690794 - DNA, 25 bp, Homo sapien
tacttgagatcttatatttagctac

SEQ ID NO: 5690795 - DNA, 25 bp, Homo sapien
tcttatatttagctaccttactaaa

SEQ ID NO: 5690796 - DNA, 25 bp, Homo sapien
tgagatcttatatttagctacctta

SEQ ID NO: 5690797 - DNA, 25 bp, Homo sapien
cttgagatcttatatttagctacct

SEQ ID NO: 5690798 - DNA, 25 bp, Homo sapien
acttgagatcttatatttagctacc

SEQ ID NO: 5690799 - DNA, 25 bp, Homo sapien
aggtagctaaatataagatctcaag

SEQ ID NO: 5690800 - DNA, 25 bp, Homo sapien
ggtagctaaatataagatctcaagt

SEQ ID NO: 5690801 - DNA, 25 bp, Homo sapien
taaggtagctaaatataagatctca

SEQ ID NO: 5690802 - DNA, 25 bp, Homo sapien
aaggtagctaaatataagatctcaa

SEQ ID NO: 5690803 - DNA, 25 bp, Homo sapien
tttagtaaggtagctaaatataaga

SEQ ID NO: 5690804 - DNA, 25 bp, Homo sapien
gaatagaaatgggggcacatcattt

SEQ ID NO: 5690805 - DNA, 25 bp, Homo sapien
tagctaccttactaaattatcgtat

SEQ ID NO: 5690806 - DNA, 25 bp, Homo sapien
ccccatttctattccttgatatttg

SEQ ID NO: 5690807 - DNA, 25 bp, Homo sapien
tgatatttgttgctggtacttgact

SEQ ID NO: 5690808 - DNA, 25 bp, Homo sapien
tgagatcttatatttagctacctta

SEQ ID NO: 5690809 - DNA, 25 bp, Homo sapien
gctggtacttgacttacttgagatc

SEQ ID NO: 5690810 - DNA, 25 bp, Homo sapien
acttgagatcttatatttagctacc

SEQ ID NO: 5690811 - DNA, 25 bp, Homo sapien
ggtagctaaatataagatctcaagt

SEQ ID NO: 5690812 - DNA, 25 bp, Homo sapien
gatctcaagtaagtcaagtaccagc

SEQ ID NO: 5690813 - DNA, 25 bp, Homo sapien
taaggtagctaaatataagatctca

SEQ ID NO: 5690814 - DNA, 25 bp, Homo sapien
gaatacgataatttagtaaggtagc

SEQ ID NO: 5690815 - DNA, 25 bp, Homo sapien
acaaatatcaaggaatagaaatggg

SEQ ID NO: 5690816 - DNA, 25 bp, Homo sapien
caagtaccagcaacaaatatcaagg

SEQ ID NO: 5690817 - DNA, 25 bp, Homo sapien
acctcgtgatatgcccgtcttggcc

SEQ ID NO: 5690818 - DNA, 25 bp, Homo sapien
tcgtgatatgcccgtcttggcctcc

SEQ ID NO: 5690819 - DNA, 25 bp, Homo sapien
ggatggtctcaatcttttgacctcg

SEQ ID NO: 5690820 - DNA, 25 bp, Homo sapien
tcttttgacctcgtgatatgcccgt

SEQ ID NO: 5690821 - DNA, 25 bp, Homo sapien
caatcttttgacctcgtgatatgcc

SEQ ID NO: 5690822 - DNA, 25 bp, Homo sapien
gacctcgtgatatgcccgtcttggc

SEQ ID NO: 5690823 - DNA, 25 bp, Homo sapien
gacgggcatatcacgaggtcaaaag

SEQ ID NO: 5690824 - DNA, 25 bp, Homo sapien
gccaagacgggcatatcacgaggtc

SEQ ID NO: 5690825 - DNA, 25 bp, Homo sapien
gcatatcacgaggtcaaaagattga

SEQ ID NO: 5690826 - DNA, 25 bp, Homo sapien
cgggcatatcacgaggtcaaaagat

SEQ ID NO: 5690827 - DNA, 25 bp, Homo sapien
ggccaagacgggcatatcacgaggt

SEQ ID NO: 5690828 - DNA, 25 bp, Homo sapien
ggaggccaagacgggcatatcacga

SEQ ID NO: 5690829 - DNA, 25 bp, Homo sapien
cagtaaactcaccaaggtagtatta

SEQ ID NO: 5690830 - DNA, 25 bp, Homo sapien
tgcaatatctggatcttacttggat

SEQ ID NO: 5690831 - DNA, 25 bp, Homo sapien
attcagtaaactcaccaaggtagta

SEQ ID NO: 5690832 - DNA, 25 bp, Homo sapien
tcagtaaactcaccaaggtagtatt

SEQ ID NO: 5690833 - DNA, 25 bp, Homo sapien
atccaagtaagatccagatattgca

SEQ ID NO: 5690834 - DNA, 25 bp, Homo sapien
taatactaccttggtgagtttactg

SEQ ID NO: 5690835 - DNA, 25 bp, Homo sapien
tactaccttggtgagtttactgaat

SEQ ID NO: 5690836 - DNA, 25 bp, Homo sapien
aatactaccttggtgagtttactga

SEQ ID NO: 5690837 - DNA, 25 bp, Homo sapien
ttttagatatgtgtagtggaatata

SEQ ID NO: 5690838 - DNA, 25 bp, Homo sapien
tgttacatctcgtatttgcttcata

SEQ ID NO: 5690839 - DNA, 25 bp, Homo sapien
gttacatctcgtatttgcttcataa

SEQ ID NO: 5690840 - DNA, 25 bp, Homo sapien
aatgttacatctcgtatttgcttca

SEQ ID NO: 5690841 - DNA, 25 bp, Homo sapien
tacatctcgtatttgcttcataatc

SEQ ID NO: 5690842 - DNA, 25 bp, Homo sapien
tgaaatgttacatctcgtatttgct

SEQ ID NO: 5690843 - DNA, 25 bp, Homo sapien
tatattccactacacatatctaaaa

SEQ ID NO: 5690844 - DNA, 25 bp, Homo sapien
ttatgaagcaaatacgagatgtaac

SEQ ID NO: 5690845 - DNA, 25 bp, Homo sapien
gattatgaagcaaatacgagatgta

SEQ ID NO: 5690846 - DNA, 25 bp, Homo sapien
tatgaagcaaatacgagatgtaaca

SEQ ID NO: 5690847 - DNA, 25 bp, Homo sapien
gaagcaaatacgagatgtaacattt

SEQ ID NO: 5690848 - DNA, 25 bp, Homo sapien
gcaaatacgagatgtaacatttcat

SEQ ID NO: 5690849 - DNA, 25 bp, Homo sapien
ccttatttttagatatgtgtagtgg

SEQ ID NO: 5690850 - DNA, 25 bp, Homo sapien
tacatctcgtatttgcttcataatc

SEQ ID NO: 5690851 - DNA, 25 bp, Homo sapien
ttaggagcccttatttttagatatg

SEQ ID NO: 5690852 - DNA, 25 bp, Homo sapien
atttgcttcataatcatccaggcag

SEQ ID NO: 5690853 - DNA, 25 bp, Homo sapien
tgaaatgttacatctcgtatttgct

SEQ ID NO: 5690854 - DNA, 25 bp, Homo sapien
tgtgtagtggaatataaatgaaatg

SEQ ID NO: 5690855 - DNA, 25 bp, Homo sapien
tgagattggcctatggcgttcattc

SEQ ID NO: 5690856 - DNA, 25 bp, Homo sapien
agattggcctatggcgttcattcat

SEQ ID NO: 5690857 - DNA, 25 bp, Homo sapien
gtgagattggcctatggcgttcatt

SEQ ID NO: 5690858 - DNA, 25 bp, Homo sapien
gattggcctatggcgttcattcatt

SEQ ID NO: 5690859 - DNA, 25 bp, Homo sapien
agtgagattggcctatggcgttcat

SEQ ID NO: 5690860 - DNA, 25 bp, Homo sapien
gagattggcctatggcgttcattca

SEQ ID NO: 5690861 - DNA, 25 bp, Homo sapien
atgaacgccataggccaatctcact

SEQ ID NO: 5690862 - DNA, 25 bp, Homo sapien
gaatgaacgccataggccaatctca

SEQ ID NO: 5690863 - DNA, 25 bp, Homo sapien
tgaatgaacgccataggccaatctc

SEQ ID NO: 5690864 - DNA, 25 bp, Homo sapien
aatgaatgaacgccataggccaatc

SEQ ID NO: 5690865 - DNA, 25 bp, Homo sapien
atgaatgaacgccataggccaatct

SEQ ID NO: 5690866 - DNA, 25 bp, Homo sapien
aatgaacgccataggccaatctcac

SEQ ID NO: 5690867 - DNA, 25 bp, Homo sapien
ggcgttcattcattcctttgttcct

SEQ ID NO: 5690868 - DNA, 25 bp, Homo sapien
gagattggcctatggcgttcattca

SEQ ID NO: 5690869 - DNA, 25 bp, Homo sapien
tatatttgtgagtgagattggccta

SEQ ID NO: 5690870 - DNA, 25 bp, Homo sapien
tcctttcttatgtctccatctgggt

SEQ ID NO: 5690871 - DNA, 25 bp, Homo sapien
tggcctatggcgttcattcattcct

SEQ ID NO: 5690872 - DNA, 25 bp, Homo sapien
gtctccatctgggtttgttattaaa

SEQ ID NO: 5690873 - DNA, 25 bp, Homo sapien
ttttctctgtagaggcttggaatag

SEQ ID NO: 5690874 - DNA, 25 bp, Homo sapien
gtcttgtccaaggttagatggagtt

SEQ ID NO: 5690875 - DNA, 25 bp, Homo sapien
tgtccaaggttagatggagttcaac

SEQ ID NO: 5690876 - DNA, 25 bp, Homo sapien
ttgtccaaggttagatggagttcaa

SEQ ID NO: 5690877 - DNA, 25 bp, Homo sapien
tcttgtccaaggttagatggagttc

SEQ ID NO: 5690878 - DNA, 25 bp, Homo sapien
cttgtccaaggttagatggagttca

SEQ ID NO: 5690879 - DNA, 25 bp, Homo sapien
aactccatctaaccttggacaagac

SEQ ID NO: 5690880 - DNA, 25 bp, Homo sapien
ttgaactccatctaaccttggacaa

SEQ ID NO: 5690881 - DNA, 25 bp, Homo sapien
gaactccatctaaccttggacaaga

SEQ ID NO: 5690882 - DNA, 25 bp, Homo sapien
tgaactccatctaaccttggacaag

SEQ ID NO: 5690883 - DNA, 25 bp, Homo sapien
gttgaactccatctaaccttggaca

SEQ ID NO: 5690884 - DNA, 25 bp, Homo sapien
ctattccaagcctctacagagaaaa

SEQ ID NO: 5690885 - DNA, 25 bp, Homo sapien
ttttctctgtagaggcttggaatag

SEQ ID NO: 5690886 - DNA, 25 bp, Homo sapien
cccttttctctgtagaggcttggaa

SEQ ID NO: 5690887 - DNA, 25 bp, Homo sapien
gctgtcttcataaaacaaattgttt

SEQ ID NO: 5690888 - DNA, 25 bp, Homo sapien
tgtgctgtcttcataaaacaaattg

SEQ ID NO: 5690889 - DNA, 25 bp, Homo sapien
tgtccaaggttagatggagttcaac

SEQ ID NO: 5690890 - DNA, 25 bp, Homo sapien
attgttttcccttttctctgtagag

SEQ ID NO: 5690891 - DNA, 25 bp, Homo sapien
ctattccaagcctctacagagaaaa

SEQ ID NO: 5690892 - DNA, 25 bp, Homo sapien
ctctacagagaaaagggaaaacaat

SEQ ID NO: 5690893 - DNA, 25 bp, Homo sapien
gaactccatctaaccttggacaaga

SEQ ID NO: 5690894 - DNA, 25 bp, Homo sapien
aaacaatttgttttatgaagacagc

SEQ ID NO: 5690895 - DNA, 25 bp, Homo sapien
aatttgttttatgaagacagcacag

SEQ ID NO: 5690896 - DNA, 25 bp, Homo sapien
ttccaagcctctacagagaaaaggg

SEQ ID NO: 5690897 - DNA, 25 bp, Homo sapien
cagcttttgcggccaagcacggtgg

SEQ ID NO: 5690898 - DNA, 25 bp, Homo sapien
gaaaaccagcttttgcggccaagca

SEQ ID NO: 5690899 - DNA, 25 bp, Homo sapien
aaaaccagcttttgcggccaagcac

SEQ ID NO: 5690900 - DNA, 25 bp, Homo sapien
tagaaaaccagcttttgcggccaag

SEQ ID NO: 5690901 - DNA, 25 bp, Homo sapien
aaaccagcttttgcggccaagcacg

SEQ ID NO: 5690902 - DNA, 25 bp, Homo sapien
ttagaaaaccagcttttgcggccaa

SEQ ID NO: 5690903 - DNA, 25 bp, Homo sapien
caccgtgcttggccgcaaaagctgg

SEQ ID NO: 5690904 - DNA, 25 bp, Homo sapien
gtgcttggccgcaaaagctggtttt

SEQ ID NO: 5690905 - DNA, 25 bp, Homo sapien
tgcttggccgcaaaagctggttttc

SEQ ID NO: 5690906 - DNA, 25 bp, Homo sapien
cttggccgcaaaagctggttttcta

SEQ ID NO: 5690907 - DNA, 25 bp, Homo sapien
cgtgcttggccgcaaaagctggttt

SEQ ID NO: 5690908 - DNA, 25 bp, Homo sapien
ttggccgcaaaagctggttttctaa

SEQ ID NO: 5690909 - DNA, 25 bp, Homo sapien
cccctcataattcattttttctctt

SEQ ID NO: 5690910 - DNA, 25 bp, Homo sapien
ccccctcataattcattttttctct

SEQ ID NO: 5690911 - DNA, 25 bp, Homo sapien
attttttctctttattgatttcctg

SEQ ID NO: 5690912 - DNA, 25 bp, Homo sapien
cattttttctctttattgatttcct

SEQ ID NO: 5690913 - DNA, 25 bp, Homo sapien
tcattttttctctttattgatttcc

SEQ ID NO: 5690914 - DNA, 25 bp, Homo sapien
aagagaaaaaatgaattatgagggg

SEQ ID NO: 5690915 - DNA, 25 bp, Homo sapien
agagaaaaaatgaattatgaggggg

SEQ ID NO: 5690916 - DNA, 25 bp, Homo sapien
ggaaatcaataaagagaaaaaatga

SEQ ID NO: 5690917 - DNA, 25 bp, Homo sapien
aggaaatcaataaagagaaaaaatg

SEQ ID NO: 5690918 - DNA, 25 bp, Homo sapien
caggaaatcaataaagagaaaaaat

SEQ ID NO: 5690919 - DNA, 25 bp, Homo sapien
tttctctatgtctgctaaatcagat

SEQ ID NO: 5690920 - DNA, 25 bp, Homo sapien
tttaaggtattgattcaaatttctc

SEQ ID NO: 5690921 - DNA, 25 bp, Homo sapien
taaggtattgattcaaatttctcta

SEQ ID NO: 5690922 - DNA, 25 bp, Homo sapien
aaggtattgattcaaatttctctat

SEQ ID NO: 5690923 - DNA, 25 bp, Homo sapien
tggtagatacatgacttcaaacatt

SEQ ID NO: 5690924 - DNA, 25 bp, Homo sapien
ggtagatacatgacttcaaacattt

SEQ ID NO: 5690925 - DNA, 25 bp, Homo sapien
aaatgtttgaagtcatgtatctacc

SEQ ID NO: 5690926 - DNA, 25 bp, Homo sapien
atagagaaatttgaatcaatacctt

SEQ ID NO: 5690927 - DNA, 25 bp, Homo sapien
gagaaatttgaatcaataccttaaa

SEQ ID NO: 5690928 - DNA, 25 bp, Homo sapien
tagagaaatttgaatcaatacctta

SEQ ID NO: 5690929 - DNA, 25 bp, Homo sapien
aatgtttgaagtcatgtatctacca

SEQ ID NO: 5690930 - DNA, 25 bp, Homo sapien
atctgatttagcagacatagagaaa

SEQ ID NO: 5690931 - DNA, 25 bp, Homo sapien
gctgatagtagtgttgtctctcctc

SEQ ID NO: 5690932 - DNA, 25 bp, Homo sapien
ttatcattatagcttgttatccctg

SEQ ID NO: 5690933 - DNA, 25 bp, Homo sapien
atagcttgttatccctgttattctg

SEQ ID NO: 5690934 - DNA, 25 bp, Homo sapien
tcccaccttggctgatagtagtgtt

SEQ ID NO: 5690935 - DNA, 25 bp, Homo sapien
taattcccaccttggctgatagtag

SEQ ID NO: 5690936 - DNA, 25 bp, Homo sapien
ccttggctgatagtagtgttgtctc

SEQ ID NO: 5690937 - DNA, 25 bp, Homo sapien
tactatcagccaaggtgggaattaa

SEQ ID NO: 5690938 - DNA, 25 bp, Homo sapien
gagacaacactactatcagccaagg

SEQ ID NO: 5690939 - DNA, 25 bp, Homo sapien
cagaataacagggataacaagctat

SEQ ID NO: 5690940 - DNA, 25 bp, Homo sapien
cagggataacaagctataatgataa

SEQ ID NO: 5690941 - DNA, 25 bp, Homo sapien
gaggagagacaacactactatcagc

SEQ ID NO: 5690942 - DNA, 25 bp, Homo sapien
aacactactatcagccaaggtggga

SEQ ID NO: 5690943 - DNA, 25 bp, Homo sapien
tgctggtttgatgaagttgctgttt

SEQ ID NO: 5690944 - DNA, 25 bp, Homo sapien
aaacagcaacttcatcaaaccagca

SEQ ID NO: 5690945 - DNA, 25 bp, Homo sapien
tgtcttgatttaggattacttctga

SEQ ID NO: 5690946 - DNA, 25 bp, Homo sapien
tgtttcttcttgttccttttccata

SEQ ID NO: 5690947 - DNA, 25 bp, Homo sapien
tgttccttttccatatttttgctgg

SEQ ID NO: 5690948 - DNA, 25 bp, Homo sapien
ccccattgtcttgatttaggattac

SEQ ID NO: 5690949 - DNA, 25 bp, Homo sapien
gaattttgtccccattgtcttgatt

SEQ ID NO: 5690950 - DNA, 25 bp, Homo sapien
tgctggtttgatgaagttgctgttt

SEQ ID NO: 5690951 - DNA, 25 bp, Homo sapien
agtaatcctaaatcaagacaatggg

SEQ ID NO: 5690952 - DNA, 25 bp, Homo sapien
gcaaaaatatggaaaaggaacaaga

SEQ ID NO: 5690953 - DNA, 25 bp, Homo sapien
tcatcaaaccagcaaaaatatggaa

SEQ ID NO: 5690954 - DNA, 25 bp, Homo sapien
tatggaaaaggaacaagaagaaaca

SEQ ID NO: 5690955 - DNA, 25 bp, Homo sapien
aaatcagaagtaatcctaaatcaag

SEQ ID NO: 5690956 - DNA, 25 bp, Homo sapien
aaacagcaacttcatcaaaccagca

SEQ ID NO: 5690957 - DNA, 25 bp, Homo sapien
tgctactatcccttggttaaccaag

SEQ ID NO: 5690958 - DNA, 25 bp, Homo sapien
tgaaattaaaggctcttgaacctta

SEQ ID NO: 5690959 - DNA, 25 bp, Homo sapien
tactatcccttggttaaccaagcca

SEQ ID NO: 5690960 - DNA, 25 bp, Homo sapien
attaaaggctcttgaaccttactgc

SEQ ID NO: 5690961 - DNA, 25 bp, Homo sapien
ccaaataacactggggatgcaggga

SEQ ID NO: 5690962 - DNA, 25 bp, Homo sapien
tactgctactatcccttggttaacc

SEQ ID NO: 5690963 - DNA, 25 bp, Homo sapien
gcagtaaggttcaagagcctttaat

SEQ ID NO: 5690964 - DNA, 25 bp, Homo sapien
ggttaaccaagggatagtagcagta

SEQ ID NO: 5690965 - DNA, 25 bp, Homo sapien
tccctgcatccccagtgttatttgg

SEQ ID NO: 5690966 - DNA, 25 bp, Homo sapien
cttggttaaccaagggatagtagca

SEQ ID NO: 5690967 - DNA, 25 bp, Homo sapien
tggcttggttaaccaagggatagta

SEQ ID NO: 5690968 - DNA, 25 bp, Homo sapien
tgcatccccagtgttatttggcttg

SEQ ID NO: 5690969 - DNA, 25 bp, Homo sapien
accatgcctggctgaatcagtattt

SEQ ID NO: 5690970 - DNA, 25 bp, Homo sapien
tggctgaatcagtatttttagtaga

SEQ ID NO: 5690971 - DNA, 25 bp, Homo sapien
tcctgacctcaagcgccaccatgcc

SEQ ID NO: 5690972 - DNA, 25 bp, Homo sapien
catgcctggctgaatcagtattttt

SEQ ID NO: 5690973 - DNA, 25 bp, Homo sapien
gcctggctgaatcagtatttttagt

SEQ ID NO: 5690974 - DNA, 25 bp, Homo sapien
tgcctggctgaatcagtatttttag

SEQ ID NO: 5690975 - DNA, 25 bp, Homo sapien
aaatactgattcagccaggcatggt

SEQ ID NO: 5690976 - DNA, 25 bp, Homo sapien
taaaaatactgattcagccaggcat

SEQ ID NO: 5690977 - DNA, 25 bp, Homo sapien
actaaaaatactgattcagccaggc

SEQ ID NO: 5690978 - DNA, 25 bp, Homo sapien
ggcatggtggcgcttgaggtcagga

SEQ ID NO: 5690979 - DNA, 25 bp, Homo sapien
aaaatactgattcagccaggcatgg

SEQ ID NO: 5690980 - DNA, 25 bp, Homo sapien
tctactaaaaatactgattcagcca

SEQ ID NO: 5690981 - DNA, 25 bp, Homo sapien
gcttgtcttattcctagggaaatat

SEQ ID NO: 5690982 - DNA, 25 bp, Homo sapien
cttgtcttattcctagggaaatatt

SEQ ID NO: 5690983 - DNA, 25 bp, Homo sapien
aatatttccctaggaataagacaag

SEQ ID NO: 5690984 - DNA, 25 bp, Homo sapien
atatttccctaggaataagacaagc

SEQ ID NO: 5690985 - DNA, 25 bp, Homo sapien
gatgcttgtcttattcctagggaaa

SEQ ID NO: 5690986 - DNA, 25 bp, Homo sapien
gcttgtcttattcctagggaaatat

SEQ ID NO: 5690987 - DNA, 25 bp, Homo sapien
tgtcttattcctagggaaatatttg

SEQ ID NO: 5690988 - DNA, 25 bp, Homo sapien
atttttgtaatgatagatgcttgtc

SEQ ID NO: 5690989 - DNA, 25 bp, Homo sapien
gtgagcatcacgtctggcctaattt

SEQ ID NO: 5690990 - DNA, 25 bp, Homo sapien
caggcgtgagcatcacgtctggcct

SEQ ID NO: 5690991 - DNA, 25 bp, Homo sapien
gacaagcatctatcattacaaaaat

SEQ ID NO: 5690992 - DNA, 25 bp, Homo sapien
aatatttccctaggaataagacaag

SEQ ID NO: 5690993 - DNA, 25 bp, Homo sapien
tttccctaggaataagacaagcatc

SEQ ID NO: 5690994 - DNA, 25 bp, Homo sapien
aaattaggccagacgtgatgctcac

SEQ ID NO: 5690995 - DNA, 25 bp, Homo sapien
caaatatttccctaggaataagaca

SEQ ID NO: 5690996 - DNA, 25 bp, Homo sapien
taggccagacgtgatgctcacgcct

SEQ ID NO: 5690997 - DNA, 25 bp, Homo sapien
aaagaatggtgattagcgctcccag

SEQ ID NO: 5690998 - DNA, 25 bp, Homo sapien
tgtaagcgagctacaccaaagaatg

SEQ ID NO: 5690999 - DNA, 25 bp, Homo sapien
taagcgagctacaccaaagaatggt

SEQ ID NO: 5691000 - DNA, 25 bp, Homo sapien
ccaaagaatggtgattagcgctccc

SEQ ID NO: 5691001 - DNA, 25 bp, Homo sapien
tacagagtgtaagcgagctacacca

SEQ ID NO: 5691002 - DNA, 25 bp, Homo sapien
gaatggtgattagcgctcccagggt

SEQ ID NO: 5691003 - DNA, 25 bp, Homo sapien
gggagcgctaatcaccattctttgg

SEQ ID NO: 5691004 - DNA, 25 bp, Homo sapien
cctgggagcgctaatcaccattctt

SEQ ID NO: 5691005 - DNA, 25 bp, Homo sapien
cattctttggtgtagctcgcttaca

SEQ ID NO: 5691006 - DNA, 25 bp, Homo sapien
tcaccattctttggtgtagctcgct

SEQ ID NO: 5691007 - DNA, 25 bp, Homo sapien
tggtgtagctcgcttacactctgta

SEQ ID NO: 5691008 - DNA, 25 bp, Homo sapien
accctgggagcgctaatcaccattc

SEQ ID NO: 5691009 - DNA, 25 bp, Homo sapien
cccagtcatttagtctagttttgaa

SEQ ID NO: 5691010 - DNA, 25 bp, Homo sapien
ataaggatctctcatctcccagtca

SEQ ID NO: 5691011 - DNA, 25 bp, Homo sapien
taaggatctctcatctcccagtcat

SEQ ID NO: 5691012 - DNA, 25 bp, Homo sapien
gatctctcatctcccagtcatttag

SEQ ID NO: 5691013 - DNA, 25 bp, Homo sapien
catctcccagtcatttagtctagtt

SEQ ID NO: 5691014 - DNA, 25 bp, Homo sapien
ctcatctcccagtcatttagtctag

SEQ ID NO: 5691015 - DNA, 25 bp, Homo sapien
caaaactagactaaatgactgggag

SEQ ID NO: 5691016 - DNA, 25 bp, Homo sapien
ctagactaaatgactgggagatgag

SEQ ID NO: 5691017 - DNA, 25 bp, Homo sapien
ttcaaaactagactaaatgactggg

SEQ ID NO: 5691018 - DNA, 25 bp, Homo sapien
gactaaatgactgggagatgagaga

SEQ ID NO: 5691019 - DNA, 25 bp, Homo sapien
tgactgggagatgagagatccttat

SEQ ID NO: 5691020 - DNA, 25 bp, Homo sapien
taaatgactgggagatgagagatcc

SEQ ID NO: 5691021 - DNA, 25 bp, Homo sapien
tttctttttacattgcctatgtatg

SEQ ID NO: 5691022 - DNA, 25 bp, Homo sapien
gcctatgtatgtgtaagtcttcttc

SEQ ID NO: 5691023 - DNA, 25 bp, Homo sapien
cctatgtatgtgtaagtcttcttca

SEQ ID NO: 5691024 - DNA, 25 bp, Homo sapien
ctatgtatgtgtaagtcttcttcag

SEQ ID NO: 5691025 - DNA, 25 bp, Homo sapien
tttccctttggcctaatgcatttgg

SEQ ID NO: 5691026 - DNA, 25 bp, Homo sapien
tatgtatgtgtaagtcttcttcagg

SEQ ID NO: 5691027 - DNA, 25 bp, Homo sapien
ccaaatgcattaggccaaagggaaa

SEQ ID NO: 5691028 - DNA, 25 bp, Homo sapien
gaagaagacttacacatacataggc

SEQ ID NO: 5691029 - DNA, 25 bp, Homo sapien
cctgaagaagacttacacatacata

SEQ ID NO: 5691030 - DNA, 25 bp, Homo sapien
catacataggcaatgtaaaaagaaa

SEQ ID NO: 5691031 - DNA, 25 bp, Homo sapien
ctgaagaagacttacacatacatag

SEQ ID NO: 5691032 - DNA, 25 bp, Homo sapien
tgaagaagacttacacatacatagg

SEQ ID NO: 5691033 - DNA, 25 bp, Homo sapien
ttgtgtcagctaggctccaaaatgg

SEQ ID NO: 5691034 - DNA, 25 bp, Homo sapien
tactcattgtgtcagctaggctcca

SEQ ID NO: 5691035 - DNA, 25 bp, Homo sapien
tcattgtgtcagctaggctccaaaa

SEQ ID NO: 5691036 - DNA, 25 bp, Homo sapien
actcattgtgtcagctaggctccaa

SEQ ID NO: 5691037 - DNA, 25 bp, Homo sapien
tttactcattgtgtcagctaggctc

SEQ ID NO: 5691038 - DNA, 25 bp, Homo sapien
atgtagtgaaagtttactcattgtg

SEQ ID NO: 5691039 - DNA, 25 bp, Homo sapien
cacaatgagtaaactttcactacat

SEQ ID NO: 5691040 - DNA, 25 bp, Homo sapien
ccattttggagcctagctgacacaa

SEQ ID NO: 5691041 - DNA, 25 bp, Homo sapien
ttttggagcctagctgacacaatga

SEQ ID NO: 5691042 - DNA, 25 bp, Homo sapien
gagcctagctgacacaatgagtaaa

SEQ ID NO: 5691043 - DNA, 25 bp, Homo sapien
ttggagcctagctgacacaatgagt

SEQ ID NO: 5691044 - DNA, 25 bp, Homo sapien
tggagcctagctgacacaatgagta

SEQ ID NO: 5691045 - DNA, 25 bp, Homo sapien
aatagggttttacctgtgtagccag

SEQ ID NO: 5691046 - DNA, 25 bp, Homo sapien
cctgtgtagccagtaggacattgtg

SEQ ID NO: 5691047 - DNA, 25 bp, Homo sapien
acctgtgtagccagtaggacattgt

SEQ ID NO: 5691048 - DNA, 25 bp, Homo sapien
gaatagggttttacctgtgtagcca

SEQ ID NO: 5691049 - DNA, 25 bp, Homo sapien
ctggctacacaggtaaaaccctatt

SEQ ID NO: 5691050 - DNA, 25 bp, Homo sapien
cacaatgtcctactggctacacagg

SEQ ID NO: 5691051 - DNA, 25 bp, Homo sapien
tggctacacaggtaaaaccctattc

SEQ ID NO: 5691052 - DNA, 25 bp, Homo sapien
acaatgtcctactggctacacaggt

SEQ ID NO: 5691053 - DNA, 25 bp, Homo sapien
gcccttcctgcattgaatagggttt

SEQ ID NO: 5691054 - DNA, 25 bp, Homo sapien
cagcccttcctgcattgaatagggt

SEQ ID NO: 5691055 - DNA, 25 bp, Homo sapien
ccttcctgcattgaatagggtttta

SEQ ID NO: 5691056 - DNA, 25 bp, Homo sapien
aatagggttttacctgtgtagccag

SEQ ID NO: 5691057 - DNA, 25 bp, Homo sapien
cctgtgtagccagtaggacattgtg

SEQ ID NO: 5691058 - DNA, 25 bp, Homo sapien
acctgtgtagccagtaggacattgt

SEQ ID NO: 5691059 - DNA, 25 bp, Homo sapien
cctgcattgaatagggttttacctg

SEQ ID NO: 5691060 - DNA, 25 bp, Homo sapien
tgaatagggttttacctgtgtagcc

SEQ ID NO: 5691061 - DNA, 25 bp, Homo sapien
caggtaaaaccctattcaatgcagg

SEQ ID NO: 5691062 - DNA, 25 bp, Homo sapien
ctggctacacaggtaaaaccctatt

SEQ ID NO: 5691063 - DNA, 25 bp, Homo sapien
cacaatgtcctactggctacacagg

SEQ ID NO: 5691064 - DNA, 25 bp, Homo sapien
taaaaccctattcaatgcaggaagg

SEQ ID NO: 5691065 - DNA, 25 bp, Homo sapien
ggtaaaaccctattcaatgcaggaa

SEQ ID NO: 5691066 - DNA, 25 bp, Homo sapien
ggctacacaggtaaaaccctattca

SEQ ID NO: 5691067 - DNA, 25 bp, Homo sapien
accctattcaatgcaggaagggctg

SEQ ID NO: 5691068 - DNA, 25 bp, Homo sapien
aaaccctattcaatgcaggaagggc

SEQ ID NO: 5691069 - DNA, 25 bp, Homo sapien
tggaggaagccagcccttcctgcat

SEQ ID NO: 5691070 - DNA, 25 bp, Homo sapien
cctgtgtagccagtaggacattgtg

SEQ ID NO: 5691071 - DNA, 25 bp, Homo sapien
gaatagggttttacctgtgtagcca

SEQ ID NO: 5691072 - DNA, 25 bp, Homo sapien
gcccttcctgcattgaatagggttt

SEQ ID NO: 5691073 - DNA, 25 bp, Homo sapien
ggaagccagcccttcctgcattgaa

SEQ ID NO: 5691074 - DNA, 25 bp, Homo sapien
cagcccttcctgcattgaatagggt

SEQ ID NO: 5691075 - DNA, 25 bp, Homo sapien
accctattcaatgcaggaagggctg

SEQ ID NO: 5691076 - DNA, 25 bp, Homo sapien
tattcaatgcaggaagggctggctt

SEQ ID NO: 5691077 - DNA, 25 bp, Homo sapien
aaaccctattcaatgcaggaagggc

SEQ ID NO: 5691078 - DNA, 25 bp, Homo sapien
cacaatgtcctactggctacacagg

SEQ ID NO: 5691079 - DNA, 25 bp, Homo sapien
tcaatgcaggaagggctggcttcct

SEQ ID NO: 5691080 - DNA, 25 bp, Homo sapien
tggctacacaggtaaaaccctattc

SEQ ID NO: 5691081 - DNA, 25 bp, Homo sapien
cttctcaaattactcactctggagg

SEQ ID NO: 5691082 - DNA, 25 bp, Homo sapien
tcttctcaaattactcactctggag

SEQ ID NO: 5691083 - DNA, 25 bp, Homo sapien
gcctcttctcaaattactcactctg

SEQ ID NO: 5691084 - DNA, 25 bp, Homo sapien
cctcttctcaaattactcactctgg

SEQ ID NO: 5691085 - DNA, 25 bp, Homo sapien
ctcttctcaaattactcactctgga

SEQ ID NO: 5691086 - DNA, 25 bp, Homo sapien
ccagagtgagtaatttgagaagagg

SEQ ID NO: 5691087 - DNA, 25 bp, Homo sapien
cctccagagtgagtaatttgagaag

SEQ ID NO: 5691088 - DNA, 25 bp, Homo sapien
cagagtgagtaatttgagaagaggc

SEQ ID NO: 5691089 - DNA, 25 bp, Homo sapien
tccagagtgagtaatttgagaagag

SEQ ID NO: 5691090 - DNA, 25 bp, Homo sapien
ctccagagtgagtaatttgagaaga

SEQ ID NO: 5691091 - DNA, 25 bp, Homo sapien
aaaaaataatgcctgggaattgtgc

SEQ ID NO: 5691092 - DNA, 25 bp, Homo sapien
cctgggaattgtgcaattttcagca

SEQ ID NO: 5691093 - DNA, 25 bp, Homo sapien
gttgtaaatgcacagatccaagaag

SEQ ID NO: 5691094 - DNA, 25 bp, Homo sapien
gcaaagttgtaaatgcacagatcca

SEQ ID NO: 5691095 - DNA, 25 bp, Homo sapien
tccaagaagcttgacaaataccagg

SEQ ID NO: 5691096 - DNA, 25 bp, Homo sapien
ttgtgcaattttcagcaaagttgta

SEQ ID NO: 5691097 - DNA, 25 bp, Homo sapien
cctggtatttgtcaagcttcttgga

SEQ ID NO: 5691098 - DNA, 25 bp, Homo sapien
tacaactttgctgaaaattgcacaa

SEQ ID NO: 5691099 - DNA, 25 bp, Homo sapien
tgctgaaaattgcacaattcccagg

SEQ ID NO: 5691100 - DNA, 25 bp, Homo sapien
cttcttggatctgtgcatttacaac

SEQ ID NO: 5691101 - DNA, 25 bp, Homo sapien
tggatctgtgcatttacaactttgc

SEQ ID NO: 5691102 - DNA, 25 bp, Homo sapien
gcacaattcccaggcattatttttt

SEQ ID NO: 5691103 - DNA, 25 bp, Homo sapien
cacaccaaagcctgtaataagcaaa

SEQ ID NO: 5691104 - DNA, 25 bp, Homo sapien
ccaaagcctgtaataagcaaataga

SEQ ID NO: 5691105 - DNA, 25 bp, Homo sapien
gcacaccaaagcctgtaataagcaa

SEQ ID NO: 5691106 - DNA, 25 bp, Homo sapien
caccaaagcctgtaataagcaaata

SEQ ID NO: 5691107 - DNA, 25 bp, Homo sapien
gaaaagcacaccaaagcctgtaata

SEQ ID NO: 5691108 - DNA, 25 bp, Homo sapien
aaagcacaccaaagcctgtaataag

SEQ ID NO: 5691109 - DNA, 25 bp, Homo sapien
tttgcttattacaggctttggtgtg

SEQ ID NO: 5691110 - DNA, 25 bp, Homo sapien
tattacaggctttggtgtgcttttc

SEQ ID NO: 5691111 - DNA, 25 bp, Homo sapien
tatttgcttattacaggctttggtg

SEQ ID NO: 5691112 - DNA, 25 bp, Homo sapien
cttattacaggctttggtgtgcttt

SEQ ID NO: 5691113 - DNA, 25 bp, Homo sapien
tctatttgcttattacaggctttgg

SEQ ID NO: 5691114 - DNA, 25 bp, Homo sapien
ttgcttattacaggctttggtgtgc

SEQ ID NO: 5691115 - DNA, 25 bp, Homo sapien
catgggtggatcacttcagcccagg

SEQ ID NO: 5691116 - DNA, 25 bp, Homo sapien
agttcaagaccagttcaagagcaac

SEQ ID NO: 5691117 - DNA, 25 bp, Homo sapien
atgggtggatcacttcagcccagga

SEQ ID NO: 5691118 - DNA, 25 bp, Homo sapien
ttcaagaccagttcaagagcaacat

SEQ ID NO: 5691119 - DNA, 25 bp, Homo sapien
gagttcaagaccagttcaagagcaa

SEQ ID NO: 5691120 - DNA, 25 bp, Homo sapien
caacatgggtggatcacttcagccc

SEQ ID NO: 5691121 - DNA, 25 bp, Homo sapien
tcctgggctgaagtgatccacccat

SEQ ID NO: 5691122 - DNA, 25 bp, Homo sapien
gggctgaagtgatccacccatgttg

SEQ ID NO: 5691123 - DNA, 25 bp, Homo sapien
ttgctcttgaactggtcttgaactc

SEQ ID NO: 5691124 - DNA, 25 bp, Homo sapien
atgttgctcttgaactggtcttgaa

SEQ ID NO: 5691125 - DNA, 25 bp, Homo sapien
tgggctgaagtgatccacccatgtt

SEQ ID NO: 5691126 - DNA, 25 bp, Homo sapien
gttgctcttgaactggtcttgaact

SEQ ID NO: 5691127 - DNA, 25 bp, Homo sapien
ctcagcctgagacgtcaggcctatg

SEQ ID NO: 5691128 - DNA, 25 bp, Homo sapien
cttggtgggggatgccggtagtcac

SEQ ID NO: 5691129 - DNA, 25 bp, Homo sapien
ttggtgggggatgccggtagtcaca

SEQ ID NO: 5691130 - DNA, 25 bp, Homo sapien
cctcagcctgagacgtcaggcctat

SEQ ID NO: 5691131 - DNA, 25 bp, Homo sapien
acctcagcctgagacgtcaggccta

SEQ ID NO: 5691132 - DNA, 25 bp, Homo sapien
ataggcctgacgtctcaggctgagg

SEQ ID NO: 5691133 - DNA, 25 bp, Homo sapien
gtgactaccggcatcccccaccaag

SEQ ID NO: 5691134 - DNA, 25 bp, Homo sapien
tgtgactaccggcatcccccaccaa

SEQ ID NO: 5691135 - DNA, 25 bp, Homo sapien
cataggcctgacgtctcaggctgag

SEQ ID NO: 5691136 - DNA, 25 bp, Homo sapien
taggcctgacgtctcaggctgaggt

SEQ ID NO: 5691137 - DNA, 25 bp, Homo sapien
ttggtgggggatgccggtagtcaca

SEQ ID NO: 5691138 - DNA, 25 bp, Homo sapien
cctcagcctgagacgtcaggcctat

SEQ ID NO: 5691139 - DNA, 25 bp, Homo sapien
acctcagcctgagacgtcaggccta

SEQ ID NO: 5691140 - DNA, 25 bp, Homo sapien
gatcacctcagcctgagacgtcagg

SEQ ID NO: 5691141 - DNA, 25 bp, Homo sapien
ggggatgccggtagtcacagctact

SEQ ID NO: 5691142 - DNA, 25 bp, Homo sapien
ctcagcctgagacgtcaggcctatg

SEQ ID NO: 5691143 - DNA, 25 bp, Homo sapien
ataggcctgacgtctcaggctgagg

SEQ ID NO: 5691144 - DNA, 25 bp, Homo sapien
cctgacgtctcaggctgaggtgatc

SEQ ID NO: 5691145 - DNA, 25 bp, Homo sapien
agtagctgtgactaccggcatcccc

SEQ ID NO: 5691146 - DNA, 25 bp, Homo sapien
tgacgtctcaggctgaggtgatcct

SEQ ID NO: 5691147 - DNA, 25 bp, Homo sapien
cataggcctgacgtctcaggctgag

SEQ ID NO: 5691148 - DNA, 25 bp, Homo sapien
taggcctgacgtctcaggctgaggt

SEQ ID NO: 5691149 - DNA, 25 bp, Homo sapien
catacaggggattgaagataagagg

SEQ ID NO: 5691150 - DNA, 25 bp, Homo sapien
aagtagccagaacaaagaaatttat

SEQ ID NO: 5691151 - DNA, 25 bp, Homo sapien
gccagaacaaagaaatttattacat

SEQ ID NO: 5691152 - DNA, 25 bp, Homo sapien
acaaagaaatttattacatacaggg

SEQ ID NO: 5691153 - DNA, 25 bp, Homo sapien
tagccagaacaaagaaatttattac

SEQ ID NO: 5691154 - DNA, 25 bp, Homo sapien
agtagccagaacaaagaaatttatt

SEQ ID NO: 5691155 - DNA, 25 bp, Homo sapien
taataaatttctttgttctggctac

SEQ ID NO: 5691156 - DNA, 25 bp, Homo sapien
caatcccctgtatgtaataaatttc

SEQ ID NO: 5691157 - DNA, 25 bp, Homo sapien
tcctcttatcttcaatcccctgtat

SEQ ID NO: 5691158 - DNA, 25 bp, Homo sapien
cccctgtatgtaataaatttctttg

SEQ ID NO: 5691159 - DNA, 25 bp, Homo sapien
tcttatcttcaatcccctgtatgta

SEQ ID NO: 5691160 - DNA, 25 bp, Homo sapien
tcttcaatcccctgtatgtaataaa

SEQ ID NO: 5691161 - DNA, 25 bp, Homo sapien
taacataactggtcgggcgtgatgg

SEQ ID NO: 5691162 - DNA, 25 bp, Homo sapien
aacataactggtcgggcgtgatggc

SEQ ID NO: 5691163 - DNA, 25 bp, Homo sapien
gccatcacgcccgaccagttatgtt

SEQ ID NO: 5691164 - DNA, 25 bp, Homo sapien
ccatcacgcccgaccagttatgtta

SEQ ID NO: 5691165 - DNA, 25 bp, Homo sapien
ataactggtcgggcgtgatggctca

SEQ ID NO: 5691166 - DNA, 25 bp, Homo sapien
taacataactggtcgggcgtgatgg

SEQ ID NO: 5691167 - DNA, 25 bp, Homo sapien
acataactggtcgggcgtgatggct

SEQ ID NO: 5691168 - DNA, 25 bp, Homo sapien
taactggtcgggcgtgatggctcat

SEQ ID NO: 5691169 - DNA, 25 bp, Homo sapien
aacataactggtcgggcgtgatggc

SEQ ID NO: 5691170 - DNA, 25 bp, Homo sapien
cataactggtcgggcgtgatggctc

SEQ ID NO: 5691171 - DNA, 25 bp, Homo sapien
agccatcacgcccgaccagttatgt

SEQ ID NO: 5691172 - DNA, 25 bp, Homo sapien
gccatcacgcccgaccagttatgtt

SEQ ID NO: 5691173 - DNA, 25 bp, Homo sapien
ccatcacgcccgaccagttatgtta

SEQ ID NO: 5691174 - DNA, 25 bp, Homo sapien
tgagccatcacgcccgaccagttat

SEQ ID NO: 5691175 - DNA, 25 bp, Homo sapien
gagccatcacgcccgaccagttatg

SEQ ID NO: 5691176 - DNA, 25 bp, Homo sapien
atgagccatcacgcccgaccagtta

SEQ ID NO: 5691177 - DNA, 25 bp, Homo sapien
cttgaggaggctaggcgggtggatc

SEQ ID NO: 5691178 - DNA, 25 bp, Homo sapien
ctgaggtggcaagttcgagaccagc

SEQ ID NO: 5691179 - DNA, 25 bp, Homo sapien
tcacctgaggtggcaagttcgagac

SEQ ID NO: 5691180 - DNA, 25 bp, Homo sapien
acttgaggaggctaggcgggtggat

SEQ ID NO: 5691181 - DNA, 25 bp, Homo sapien
tggatcacctgaggtggcaagttcg

SEQ ID NO: 5691182 - DNA, 25 bp, Homo sapien
cacttgaggaggctaggcgggtgga

SEQ ID NO: 5691183 - DNA, 25 bp, Homo sapien
tccacccgcctagcctcctcaagtg

SEQ ID NO: 5691184 - DNA, 25 bp, Homo sapien
atccacccgcctagcctcctcaagt

SEQ ID NO: 5691185 - DNA, 25 bp, Homo sapien
cgaacttgccacctcaggtgatcca

SEQ ID NO: 5691186 - DNA, 25 bp, Homo sapien
gtctcgaacttgccacctcaggtga

SEQ ID NO: 5691187 - DNA, 25 bp, Homo sapien
gctggtctcgaacttgccacctcag

SEQ ID NO: 5691188 - DNA, 25 bp, Homo sapien
gatccacccgcctagcctcctcaag

SEQ ID NO: 5691189 - DNA, 25 bp, Homo sapien
gagtagaagtaatgtaaatcttttg

SEQ ID NO: 5691190 - DNA, 25 bp, Homo sapien
gaaaaggtgtatgtggcggggagta

SEQ ID NO: 5691191 - DNA, 25 bp, Homo sapien
aaaaggtgtatgtggcggggagtag

SEQ ID NO: 5691192 - DNA, 25 bp, Homo sapien
agtagaagtaatgtaaatcttttgt

SEQ ID NO: 5691193 - DNA, 25 bp, Homo sapien
gcggggagtagaagtaatgtaaatc

SEQ ID NO: 5691194 - DNA, 25 bp, Homo sapien
cggggagtagaagtaatgtaaatct

SEQ ID NO: 5691195 - DNA, 25 bp, Homo sapien
actccccgccacatacaccttttct

SEQ ID NO: 5691196 - DNA, 25 bp, Homo sapien
agatttacattacttctactccccg

SEQ ID NO: 5691197 - DNA, 25 bp, Homo sapien
acaaaagatttacattacttctact

SEQ ID NO: 5691198 - DNA, 25 bp, Homo sapien
ctactccccgccacatacacctttt

SEQ ID NO: 5691199 - DNA, 25 bp, Homo sapien
caaaagatttacattacttctactc

SEQ ID NO: 5691200 - DNA, 25 bp, Homo sapien
gatttacattacttctactccccgc

SEQ ID NO: 5691201 - DNA, 25 bp, Homo sapien
gagtagaagtaatgtaaatcttttg

SEQ ID NO: 5691202 - DNA, 25 bp, Homo sapien
gaaaaggtgtatgtggcggggagta

SEQ ID NO: 5691203 - DNA, 25 bp, Homo sapien
tagaagtaatgtaaatcttttgttg

SEQ ID NO: 5691204 - DNA, 25 bp, Homo sapien
cacacacaaaaaaggtagagattta

SEQ ID NO: 5691205 - DNA, 25 bp, Homo sapien
gcggggagtagaagtaatgtaaatc

SEQ ID NO: 5691206 - DNA, 25 bp, Homo sapien
aaaatgagaaaaggtgtatgtggcg

SEQ ID NO: 5691207 - DNA, 25 bp, Homo sapien
cgccacatacaccttttctcatttt

SEQ ID NO: 5691208 - DNA, 25 bp, Homo sapien
agatttacattacttctactccccg

SEQ ID NO: 5691209 - DNA, 25 bp, Homo sapien
tactccccgccacatacaccttttc

SEQ ID NO: 5691210 - DNA, 25 bp, Homo sapien
caaaagatttacattacttctactc

SEQ ID NO: 5691211 - DNA, 25 bp, Homo sapien
taaatctctaccttttttgtgtgtg

SEQ ID NO: 5691212 - DNA, 25 bp, Homo sapien
gatttacattacttctactccccgc

SEQ ID NO: 5691213 - DNA, 25 bp, Homo sapien
cgcctcggcctctcaaagcgctagg

SEQ ID NO: 5691214 - DNA, 25 bp, Homo sapien
cgatctcctgacttcgtgatccgcc

SEQ ID NO: 5691215 - DNA, 25 bp, Homo sapien
ttcaccgtgttagccatgatggtct

SEQ ID NO: 5691216 - DNA, 25 bp, Homo sapien
gcctcggcctctcaaagcgctagga

SEQ ID NO: 5691217 - DNA, 25 bp, Homo sapien
ctcggcctctcaaagcgctaggatt

SEQ ID NO: 5691218 - DNA, 25 bp, Homo sapien
acggggtttcaccgtgttagccatg

SEQ ID NO: 5691219 - DNA, 25 bp, Homo sapien
aatcctagcgctttgagaggccgag

SEQ ID NO: 5691220 - DNA, 25 bp, Homo sapien
agaccatcatggctaacacggtgaa

SEQ ID NO: 5691221 - DNA, 25 bp, Homo sapien
ggcggatcacgaagtcaggagatcg

SEQ ID NO: 5691222 - DNA, 25 bp, Homo sapien
catggctaacacggtgaaaccccgt

SEQ ID NO: 5691223 - DNA, 25 bp, Homo sapien
tcctagcgctttgagaggccgaggc

SEQ ID NO: 5691224 - DNA, 25 bp, Homo sapien
cctagcgctttgagaggccgaggcg

SEQ ID NO: 5691225 - DNA, 25 bp, Homo sapien
agccctgaggttggtttgtgcaagt

SEQ ID NO: 5691226 - DNA, 25 bp, Homo sapien
gaagccctgaggttggtttgtgcaa

SEQ ID NO: 5691227 - DNA, 25 bp, Homo sapien
ataatgactgcaccatagaagccct

SEQ ID NO: 5691228 - DNA, 25 bp, Homo sapien
ccatagaagccctgaggttggtttg

SEQ ID NO: 5691229 - DNA, 25 bp, Homo sapien
gttggtttgtgcaagtggacatcag

SEQ ID NO: 5691230 - DNA, 25 bp, Homo sapien
aataatgactgcaccatagaagccc

SEQ ID NO: 5691231 - DNA, 25 bp, Homo sapien
caaaccaacctcagggcttctatgg

SEQ ID NO: 5691232 - DNA, 25 bp, Homo sapien
ctgatgtccacttgcacaaaccaac

SEQ ID NO: 5691233 - DNA, 25 bp, Homo sapien
tgcacaaaccaacctcagggcttct

SEQ ID NO: 5691234 - DNA, 25 bp, Homo sapien
gggcttctatggtgcagtcattatt

SEQ ID NO: 5691235 - DNA, 25 bp, Homo sapien
acttgcacaaaccaacctcagggct

SEQ ID NO: 5691236 - DNA, 25 bp, Homo sapien
gatgtccacttgcacaaaccaacct

SEQ ID NO: 5691237 - DNA, 25 bp, Homo sapien
tggaaagtcataacactacgtgtaa

SEQ ID NO: 5691238 - DNA, 25 bp, Homo sapien
taacactacgtgtaaatgggtgtgg

SEQ ID NO: 5691239 - DNA, 25 bp, Homo sapien
tcataacactacgtgtaaatgggtg

SEQ ID NO: 5691240 - DNA, 25 bp, Homo sapien
taaagttggaaagtcataacactac

SEQ ID NO: 5691241 - DNA, 25 bp, Homo sapien
agtcataacactacgtgtaaatggg

SEQ ID NO: 5691242 - DNA, 25 bp, Homo sapien
gttggaaagtcataacactacgtgt

SEQ ID NO: 5691243 - DNA, 25 bp, Homo sapien
cacccatttacacgtagtgttatga

SEQ ID NO: 5691244 - DNA, 25 bp, Homo sapien
ccacacccatttacacgtagtgtta

SEQ ID NO: 5691245 - DNA, 25 bp, Homo sapien
cacgtagtgttatgactttccaact

SEQ ID NO: 5691246 - DNA, 25 bp, Homo sapien
tacacgtagtgttatgactttccaa

SEQ ID NO: 5691247 - DNA, 25 bp, Homo sapien
tttacacgtagtgttatgactttcc

SEQ ID NO: 5691248 - DNA, 25 bp, Homo sapien
cgtagtgttatgactttccaacttt

SEQ ID NO: 5691249 - DNA, 25 bp, Homo sapien
ggaatatccccaagtggtttgattc

SEQ ID NO: 5691250 - DNA, 25 bp, Homo sapien
tgtgttgggaatatccccaagtggt

SEQ ID NO: 5691251 - DNA, 25 bp, Homo sapien
gtgtgttgggaatatccccaagtgg

SEQ ID NO: 5691252 - DNA, 25 bp, Homo sapien
aatatccccaagtggtttgattctg

SEQ ID NO: 5691253 - DNA, 25 bp, Homo sapien
tatccccaagtggtttgattctgtt

SEQ ID NO: 5691254 - DNA, 25 bp, Homo sapien
tgggaatatccccaagtggtttgat

SEQ ID NO: 5691255 - DNA, 25 bp, Homo sapien
gaatcaaaccacttggggatattcc

SEQ ID NO: 5691256 - DNA, 25 bp, Homo sapien
cagaatcaaaccacttggggatatt

SEQ ID NO: 5691257 - DNA, 25 bp, Homo sapien
ccacttggggatattcccaacacac

SEQ ID NO: 5691258 - DNA, 25 bp, Homo sapien
atcaaaccacttggggatattccca

SEQ ID NO: 5691259 - DNA, 25 bp, Homo sapien
accacttggggatattcccaacaca

SEQ ID NO: 5691260 - DNA, 25 bp, Homo sapien
aacagaatcaaaccacttggggata

SEQ ID NO: 5691261 - DNA, 25 bp, Homo sapien
gcatccaacagaatcaaaccacttg

SEQ ID NO: 5691262 - DNA, 25 bp, Homo sapien
ggagaatacagaagacagtgtttaa

SEQ ID NO: 5691263 - DNA, 25 bp, Homo sapien
gaagacagtgtttaattctgcatcc

SEQ ID NO: 5691264 - DNA, 25 bp, Homo sapien
ccacttggggatattcccaacacac

SEQ ID NO: 5691265 - DNA, 25 bp, Homo sapien
cattggtgagaaactaggagaatac

SEQ ID NO: 5691266 - DNA, 25 bp, Homo sapien
cagtgtttaattctgcatccaacag

SEQ ID NO: 5691267 - DNA, 25 bp, Homo sapien
cgtaatgtatcaatcccattggaac

SEQ ID NO: 5691268 - DNA, 25 bp, Homo sapien
tccgtaatgtatcaatcccattgga

SEQ ID NO: 5691269 - DNA, 25 bp, Homo sapien
tctgctattgttccgtaatgtatca

SEQ ID NO: 5691270 - DNA, 25 bp, Homo sapien
gtattactctgctattgttccgtaa

SEQ ID NO: 5691271 - DNA, 25 bp, Homo sapien
tttgtattactctgctattgttccg

SEQ ID NO: 5691272 - DNA, 25 bp, Homo sapien
ttgttccgtaatgtatcaatcccat

SEQ ID NO: 5691273 - DNA, 25 bp, Homo sapien
caatgggattgatacattacggaac

SEQ ID NO: 5691274 - DNA, 25 bp, Homo sapien
gttccaatgggattgatacattacg

SEQ ID NO: 5691275 - DNA, 25 bp, Homo sapien
tgatacattacggaacaatagcaga

SEQ ID NO: 5691276 - DNA, 25 bp, Homo sapien
gatacattacggaacaatagcagag

SEQ ID NO: 5691277 - DNA, 25 bp, Homo sapien
tacggaacaatagcagagtaataca

SEQ ID NO: 5691278 - DNA, 25 bp, Homo sapien
gaacaatagcagagtaatacaaatt

SEQ ID NO: 5691279 - DNA, 25 bp, Homo sapien
ggaatacatgatgcaacattcaaag

SEQ ID NO: 5691280 - DNA, 25 bp, Homo sapien
gcagtgtagttatcaaggaggaaga

SEQ ID NO: 5691281 - DNA, 25 bp, Homo sapien
tcatgcagtgtagttatcaaggagg

SEQ ID NO: 5691282 - DNA, 25 bp, Homo sapien
tatcttaggaatacatgatgcaaca

SEQ ID NO: 5691283 - DNA, 25 bp, Homo sapien
caaatggagtttatcttaggaatac

SEQ ID NO: 5691284 - DNA, 25 bp, Homo sapien
gatgcaacattcaaagtcattgtca

SEQ ID NO: 5691285 - DNA, 25 bp, Homo sapien
gtattcctaagataaactccatttg

SEQ ID NO: 5691286 - DNA, 25 bp, Homo sapien
tgcatcatgtattcctaagataaac

SEQ ID NO: 5691287 - DNA, 25 bp, Homo sapien
cctccttgataactacactgcatga

SEQ ID NO: 5691288 - DNA, 25 bp, Homo sapien
tcttcctccttgataactacactgc

SEQ ID NO: 5691289 - DNA, 25 bp, Homo sapien
gacaatgactttgaatgttgcatca

SEQ ID NO: 5691290 - DNA, 25 bp, Homo sapien
gaatgttgcatcatgtattcctaag

SEQ ID NO: 5691291 - DNA, 25 bp, Homo sapien
aaatccaggacccactaaagataag

SEQ ID NO: 5691292 - DNA, 25 bp, Homo sapien
cttatctttagtgggtcctggattt

SEQ ID NO: 5691293 - DNA, 25 bp, Homo sapien
tccaggacccactaaagataagaaa

SEQ ID NO: 5691294 - DNA, 25 bp, Homo sapien
aaatccaggacccactaaagataag

SEQ ID NO: 5691295 - DNA, 25 bp, Homo sapien
agataagaaattaggctgagtgcag

SEQ ID NO: 5691296 - DNA, 25 bp, Homo sapien
cccactaaagataagaaattaggct

SEQ ID NO: 5691297 - DNA, 25 bp, Homo sapien
caggacccactaaagataagaaatt

SEQ ID NO: 5691298 - DNA, 25 bp, Homo sapien
ccaggacccactaaagataagaaat

SEQ ID NO: 5691299 - DNA, 25 bp, Homo sapien
tttcttatctttagtgggtcctgga

SEQ ID NO: 5691300 - DNA, 25 bp, Homo sapien
ctgcactcagcctaatttcttatct

SEQ ID NO: 5691301 - DNA, 25 bp, Homo sapien
aatttcttatctttagtgggtcctg

SEQ ID NO: 5691302 - DNA, 25 bp, Homo sapien
tcttatctttagtgggtcctggatt

SEQ ID NO: 5691303 - DNA, 25 bp, Homo sapien
cagcctaatttcttatctttagtgg

SEQ ID NO: 5691304 - DNA, 25 bp, Homo sapien
cttatctttagtgggtcctggattt

SEQ ID NO: 5691305 - DNA, 25 bp, Homo sapien
taggctgagtgcagtggctaacacc

SEQ ID NO: 5691306 - DNA, 25 bp, Homo sapien
attaggctgagtgcagtggctaaca

SEQ ID NO: 5691307 - DNA, 25 bp, Homo sapien
aaattaggctgagtgcagtggctaa

SEQ ID NO: 5691308 - DNA, 25 bp, Homo sapien
ttaggctgagtgcagtggctaacac

SEQ ID NO: 5691309 - DNA, 25 bp, Homo sapien
aattaggctgagtgcagtggctaac

SEQ ID NO: 5691310 - DNA, 25 bp, Homo sapien
tgttagccactgcactcagcctaat

SEQ ID NO: 5691311 - DNA, 25 bp, Homo sapien
gttagccactgcactcagcctaatt

SEQ ID NO: 5691312 - DNA, 25 bp, Homo sapien
ttagccactgcactcagcctaattt

SEQ ID NO: 5691313 - DNA, 25 bp, Homo sapien
ggtgttagccactgcactcagccta

SEQ ID NO: 5691314 - DNA, 25 bp, Homo sapien
gtgttagccactgcactcagcctaa

SEQ ID NO: 5691315 - DNA, 25 bp, Homo sapien
actgaaattagccggccgtgatggt

SEQ ID NO: 5691316 - DNA, 25 bp, Homo sapien
atttcagctatgctggaggctgagg

SEQ ID NO: 5691317 - DNA, 25 bp, Homo sapien
ctgaaattagccggccgtgatggtg

SEQ ID NO: 5691318 - DNA, 25 bp, Homo sapien
aatttcagctatgctggaggctgag

SEQ ID NO: 5691319 - DNA, 25 bp, Homo sapien
tgtaatttcagctatgctggaggct

SEQ ID NO: 5691320 - DNA, 25 bp, Homo sapien
ctgtaatttcagctatgctggaggc

SEQ ID NO: 5691321 - DNA, 25 bp, Homo sapien
agcctccagcatagctgaaattaca

SEQ ID NO: 5691322 - DNA, 25 bp, Homo sapien
accatcacggccggctaatttcagt

SEQ ID NO: 5691323 - DNA, 25 bp, Homo sapien
caccatcacggccggctaatttcag

SEQ ID NO: 5691324 - DNA, 25 bp, Homo sapien
ctcagcctccagcatagctgaaatt

SEQ ID NO: 5691325 - DNA, 25 bp, Homo sapien
cctcagcctccagcatagctgaaat

SEQ ID NO: 5691326 - DNA, 25 bp, Homo sapien
gcctccagcatagctgaaattacag

SEQ ID NO: 5691327 - DNA, 25 bp, Homo sapien
gacagtaccacttaacagtcacaaa

SEQ ID NO: 5691328 - DNA, 25 bp, Homo sapien
cagtaccacttaacagtcacaaaaa

SEQ ID NO: 5691329 - DNA, 25 bp, Homo sapien
acagtaccacttaacagtcacaaaa

SEQ ID NO: 5691330 - DNA, 25 bp, Homo sapien
agacagtaccacttaacagtcacaa

SEQ ID NO: 5691331 - DNA, 25 bp, Homo sapien
ttgtgactgttaagtggtactgtct

SEQ ID NO: 5691332 - DNA, 25 bp, Homo sapien
tttgtgactgttaagtggtactgtc

SEQ ID NO: 5691333 - DNA, 25 bp, Homo sapien
ttttgtgactgttaagtggtactgt

SEQ ID NO: 5691334 - DNA, 25 bp, Homo sapien
tttttgtgactgttaagtggtactg

SEQ ID NO: 5691335 - DNA, 25 bp, Homo sapien
gacagtaccacttaacagtcacaaa

SEQ ID NO: 5691336 - DNA, 25 bp, Homo sapien
cacttaacagtcacaaaaaatattg

SEQ ID NO: 5691337 - DNA, 25 bp, Homo sapien
cagtaccacttaacagtcacaaaaa

SEQ ID NO: 5691338 - DNA, 25 bp, Homo sapien
tattaataattttaagacagtacca

SEQ ID NO: 5691339 - DNA, 25 bp, Homo sapien
ttaacagtcacaaaaaatattgttc

SEQ ID NO: 5691340 - DNA, 25 bp, Homo sapien
aatcacaaacaagagtattaataat

SEQ ID NO: 5691341 - DNA, 25 bp, Homo sapien
ttgtgactgttaagtggtactgtct

SEQ ID NO: 5691342 - DNA, 25 bp, Homo sapien
tggtactgtcttaaaattattaata

SEQ ID NO: 5691343 - DNA, 25 bp, Homo sapien
tttgtgactgttaagtggtactgtc

SEQ ID NO: 5691344 - DNA, 25 bp, Homo sapien
gaacaatattttttgtgactgttaa

SEQ ID NO: 5691345 - DNA, 25 bp, Homo sapien
caatattttttgtgactgttaagtg

SEQ ID NO: 5691346 - DNA, 25 bp, Homo sapien
tttttgtgactgttaagtggtactg

SEQ ID NO: 5691347 - DNA, 25 bp, Homo sapien
tctaaagttgttaagatctgcccca

SEQ ID NO: 5691348 - DNA, 25 bp, Homo sapien
tgtggattggaactattatgccctt

SEQ ID NO: 5691349 - DNA, 25 bp, Homo sapien
taagatctgccccatttgtggattg

SEQ ID NO: 5691350 - DNA, 25 bp, Homo sapien
gttgttaagatctgccccatttgtg

SEQ ID NO: 5691351 - DNA, 25 bp, Homo sapien
tctgccccatttgtggattggaact

SEQ ID NO: 5691352 - DNA, 25 bp, Homo sapien
gattggaactattatgccctttctc

SEQ ID NO: 5691353 - DNA, 25 bp, Homo sapien
gagaaagggcataatagttccaatc

SEQ ID NO: 5691354 - DNA, 25 bp, Homo sapien
gggcagatcttaacaactttagatt

SEQ ID NO: 5691355 - DNA, 25 bp, Homo sapien
tccaatccacaaatggggcagatct

SEQ ID NO: 5691356 - DNA, 25 bp, Homo sapien
caaatggggcagatcttaacaactt

SEQ ID NO: 5691357 - DNA, 25 bp, Homo sapien
gaaagggcataatagttccaatcca

SEQ ID NO: 5691358 - DNA, 25 bp, Homo sapien
aagggcataatagttccaatccaca

SEQ ID NO: 5691359 - DNA, 25 bp, Homo sapien
tggtatgattttggcaacctccacc

SEQ ID NO: 5691360 - DNA, 25 bp, Homo sapien
aatggtatgattttggcaacctcca

SEQ ID NO: 5691361 - DNA, 25 bp, Homo sapien
caatggtatgattttggcaacctcc

SEQ ID NO: 5691362 - DNA, 25 bp, Homo sapien
gcaatggtatgattttggcaacctc

SEQ ID NO: 5691363 - DNA, 25 bp, Homo sapien
tgcaatggtatgattttggcaacct

SEQ ID NO: 5691364 - DNA, 25 bp, Homo sapien
gtgcaatggtatgattttggcaacc

SEQ ID NO: 5691365 - DNA, 25 bp, Homo sapien
gaggttgccaaaatcataccattgc

SEQ ID NO: 5691366 - DNA, 25 bp, Homo sapien
aggttgccaaaatcataccattgca

SEQ ID NO: 5691367 - DNA, 25 bp, Homo sapien
ggaggttgccaaaatcataccattg

SEQ ID NO: 5691368 - DNA, 25 bp, Homo sapien
ggttgccaaaatcataccattgcac

SEQ ID NO: 5691369 - DNA, 25 bp, Homo sapien
ggtggaggttgccaaaatcatacca

SEQ ID NO: 5691370 - DNA, 25 bp, Homo sapien
tggaggttgccaaaatcataccatt

SEQ ID NO: 5691371 - DNA, 25 bp, Homo sapien
aaagtacaaggattactactggcat

SEQ ID NO: 5691372 - DNA, 25 bp, Homo sapien
aagtacaaggattactactggcatg

SEQ ID NO: 5691373 - DNA, 25 bp, Homo sapien
gtacaaggattactactggcatgag

SEQ ID NO: 5691374 - DNA, 25 bp, Homo sapien
agtacaaggattactactggcatga

SEQ ID NO: 5691375 - DNA, 25 bp, Homo sapien
ccaaagtacaaggattactactggc

SEQ ID NO: 5691376 - DNA, 25 bp, Homo sapien
caaagtacaaggattactactggca

SEQ ID NO: 5691377 - DNA, 25 bp, Homo sapien
tcatgccagtagtaatccttgtact

SEQ ID NO: 5691378 - DNA, 25 bp, Homo sapien
catgccagtagtaatccttgtactt

SEQ ID NO: 5691379 - DNA, 25 bp, Homo sapien
ctcatgccagtagtaatccttgtac

SEQ ID NO: 5691380 - DNA, 25 bp, Homo sapien
tgccagtagtaatccttgtactttg

SEQ ID NO: 5691381 - DNA, 25 bp, Homo sapien
atgccagtagtaatccttgtacttt

SEQ ID NO: 5691382 - DNA, 25 bp, Homo sapien
gccagtagtaatccttgtactttgg

SEQ ID NO: 5691383 - DNA, 25 bp, Homo sapien
gccagtagtaatccttgtactttgg

SEQ ID NO: 5691384 - DNA, 25 bp, Homo sapien
tcacttcaggctaggagtttaacac

SEQ ID NO: 5691385 - DNA, 25 bp, Homo sapien
catgccagtagtaatccttgtactt

SEQ ID NO: 5691386 - DNA, 25 bp, Homo sapien
ctcatgccagtagtaatccttgtac

SEQ ID NO: 5691387 - DNA, 25 bp, Homo sapien
tggctcatgccagtagtaatccttg

SEQ ID NO: 5691388 - DNA, 25 bp, Homo sapien
tgccagtagtaatccttgtactttg

SEQ ID NO: 5691389 - DNA, 25 bp, Homo sapien
acaaaggatatgtgtccagaatata

SEQ ID NO: 5691390 - DNA, 25 bp, Homo sapien
cagtaagacgaatgacccacttaca

SEQ ID NO: 5691391 - DNA, 25 bp, Homo sapien
tattgcacagatcagtaagacgaat

SEQ ID NO: 5691392 - DNA, 25 bp, Homo sapien
ttcatagtaccatatctgacaaagg

SEQ ID NO: 5691393 - DNA, 25 bp, Homo sapien
cagatcagtaagacgaatgacccac

SEQ ID NO: 5691394 - DNA, 25 bp, Homo sapien
gaaagtattcatagtaccatatctg

SEQ ID NO: 5691395 - DNA, 25 bp, Homo sapien
tatattctggacacatatcctttgt

SEQ ID NO: 5691396 - DNA, 25 bp, Homo sapien
cattcgtcttactgatctgtgcaat

SEQ ID NO: 5691397 - DNA, 25 bp, Homo sapien
cctttgtcagatatggtactatgaa

SEQ ID NO: 5691398 - DNA, 25 bp, Homo sapien
tgtaagtgggtcattcgtcttactg

SEQ ID NO: 5691399 - DNA, 25 bp, Homo sapien
cagatatggtactatgaatactttc

SEQ ID NO: 5691400 - DNA, 25 bp, Homo sapien
aagtgggtcattcgtcttactgatc

SEQ ID NO: 5691401 - DNA, 25 bp, Homo sapien
gccaataaacccacataaaggtgtc

SEQ ID NO: 5691402 - DNA, 25 bp, Homo sapien
gtgtccacatctttggtggtcaggg

SEQ ID NO: 5691403 - DNA, 25 bp, Homo sapien
tagacatttcactaaggaagataaa

SEQ ID NO: 5691404 - DNA, 25 bp, Homo sapien
gataaacaaatagccaataaaccca

SEQ ID NO: 5691405 - DNA, 25 bp, Homo sapien
cacataaaggtgtccacatctttgg

SEQ ID NO: 5691406 - DNA, 25 bp, Homo sapien
taaacccacataaaggtgtccacat

SEQ ID NO: 5691407 - DNA, 25 bp, Homo sapien
ttatcttccttagtgaaatgtctat

SEQ ID NO: 5691408 - DNA, 25 bp, Homo sapien
tgggtttattggctatttgtttatc

SEQ ID NO: 5691409 - DNA, 25 bp, Homo sapien
ccaaagatgtggacacctttatgtg

SEQ ID NO: 5691410 - DNA, 25 bp, Homo sapien
gacacctttatgtgggtttattggc

SEQ ID NO: 5691411 - DNA, 25 bp, Homo sapien
gatgtggacacctttatgtgggttt

SEQ ID NO: 5691412 - DNA, 25 bp, Homo sapien
cccctgaccaccaaagatgtggaca

SEQ ID NO: 5691413 - DNA, 25 bp, Homo sapien
agaggcaggcactccaggtgtcagc

SEQ ID NO: 5691414 - DNA, 25 bp, Homo sapien
ctccaggtgtcagcaaggatgtgaa

SEQ ID NO: 5691415 - DNA, 25 bp, Homo sapien
tacgcattgaaaccatgagatgcca

SEQ ID NO: 5691416 - DNA, 25 bp, Homo sapien
caggcactccaggtgtcagcaagga

SEQ ID NO: 5691417 - DNA, 25 bp, Homo sapien
atgagatgccactacccagccacta

SEQ ID NO: 5691418 - DNA, 25 bp, Homo sapien
gagatgccactacccagccactaag

SEQ ID NO: 5691419 - DNA, 25 bp, Homo sapien
tggcatctcatggtttcaatgcgta

SEQ ID NO: 5691420 - DNA, 25 bp, Homo sapien
ttcacatccttgctgacacctggag

SEQ ID NO: 5691421 - DNA, 25 bp, Homo sapien
tccttgctgacacctggagtgcctg

SEQ ID NO: 5691422 - DNA, 25 bp, Homo sapien
tagtggctgggtagtggcatctcat

SEQ ID NO: 5691423 - DNA, 25 bp, Homo sapien
ttgctgacacctggagtgcctgcct

SEQ ID NO: 5691424 - DNA, 25 bp, Homo sapien
cttagtggctgggtagtggcatctc

SEQ ID NO: 5691425 - DNA, 25 bp, Homo sapien
cttttaaattgtagtattaatagct

SEQ ID NO: 5691426 - DNA, 25 bp, Homo sapien
tgaaaagtaaaactagaaagccaca

SEQ ID NO: 5691427 - DNA, 25 bp, Homo sapien
agctattaatactacaatttaaaag

SEQ ID NO: 5691428 - DNA, 25 bp, Homo sapien
tgtggctttctagttttacttttca

SEQ ID NO: 5691429 - DNA, 25 bp, Homo sapien
taaattgtagtattaatagctcaag

SEQ ID NO: 5691430 - DNA, 25 bp, Homo sapien
gaaagccacaagaatcctcaacttt

SEQ ID NO: 5691431 - DNA, 25 bp, Homo sapien
tgagggtgagtagtgaaaagtaaaa

SEQ ID NO: 5691432 - DNA, 25 bp, Homo sapien
ttaatagctcaagaaaaatgggtgt

SEQ ID NO: 5691433 - DNA, 25 bp, Homo sapien
caagaaaaatgggtgtatcaggaaa

SEQ ID NO: 5691434 - DNA, 25 bp, Homo sapien
tgaaaagtaaaactagaaagccaca

SEQ ID NO: 5691435 - DNA, 25 bp, Homo sapien
ttttacttttcactactcaccctca

SEQ ID NO: 5691436 - DNA, 25 bp, Homo sapien
tcctgatacacccatttttcttgag

SEQ ID NO: 5691437 - DNA, 25 bp, Homo sapien
ttttcttgagctattaatactacaa

SEQ ID NO: 5691438 - DNA, 25 bp, Homo sapien
ctacaatttaaaagttgaggattct

SEQ ID NO: 5691439 - DNA, 25 bp, Homo sapien
taaaagttgaggattcttgtggctt

SEQ ID NO: 5691440 - DNA, 25 bp, Homo sapien
tgtggctttctagttttacttttca

SEQ ID NO: 5691441 - DNA, 25 bp, Homo sapien
gggcattgcaccaccgtttattaaa

SEQ ID NO: 5691442 - DNA, 25 bp, Homo sapien
agaaacaggtaaaggggcattgcac

SEQ ID NO: 5691443 - DNA, 25 bp, Homo sapien
ggatgacttaatgggataacaggca

SEQ ID NO: 5691444 - DNA, 25 bp, Homo sapien
taaaaggatgacttaatgggataac

SEQ ID NO: 5691445 - DNA, 25 bp, Homo sapien
cattgcaccaccgtttattaaaagg

SEQ ID NO: 5691446 - DNA, 25 bp, Homo sapien
gcaccaccgtttattaaaaggatga

SEQ ID NO: 5691447 - DNA, 25 bp, Homo sapien
tgcctgttatcccattaagtcatcc

SEQ ID NO: 5691448 - DNA, 25 bp, Homo sapien
tttaataaacggtggtgcaatgccc

SEQ ID NO: 5691449 - DNA, 25 bp, Homo sapien
catccttttaataaacggtggtgca

SEQ ID NO: 5691450 - DNA, 25 bp, Homo sapien
cattaagtcatccttttaataaacg

SEQ ID NO: 5691451 - DNA, 25 bp, Homo sapien
taataaacggtggtgcaatgcccct

SEQ ID NO: 5691452 - DNA, 25 bp, Homo sapien
gtgcaatgcccctttacctgtttct

SEQ ID NO: 5691453 - DNA, 25 bp, Homo sapien
cttaaaatgcagtcctaattttgta

SEQ ID NO: 5691454 - DNA, 25 bp, Homo sapien
tacaaaattaggactgcattttaag

SEQ ID NO: 5691455 - DNA, 25 bp, Homo sapien
gttcacttaaaatgcagtcctaatt

SEQ ID NO: 5691456 - DNA, 25 bp, Homo sapien
cttaaaatgcagtcctaattttgta

SEQ ID NO: 5691457 - DNA, 25 bp, Homo sapien
gtcctaattttgtatgtctgcatgt

SEQ ID NO: 5691458 - DNA, 25 bp, Homo sapien
cagttcacttaaaatgcagtcctaa

SEQ ID NO: 5691459 - DNA, 25 bp, Homo sapien
tgtatgtctgcatgtttctttttgt

SEQ ID NO: 5691460 - DNA, 25 bp, Homo sapien
tgcagttcacttaaaatgcagtcct

SEQ ID NO: 5691461 - DNA, 25 bp, Homo sapien
aacaaaaagaaacatgcagacatac

SEQ ID NO: 5691462 - DNA, 25 bp, Homo sapien
acatgcagacatacaaaattaggac

SEQ ID NO: 5691463 - DNA, 25 bp, Homo sapien
tacaaaattaggactgcattttaag

SEQ ID NO: 5691464 - DNA, 25 bp, Homo sapien
gaaacatgcagacatacaaaattag

SEQ ID NO: 5691465 - DNA, 25 bp, Homo sapien
aattaggactgcattttaagtgaac

SEQ ID NO: 5691466 - DNA, 25 bp, Homo sapien
taggactgcattttaagtgaactgc

SEQ ID NO: 5691467 - DNA, 25 bp, Homo sapien
ttctcctgcctcccgagtagctggg

SEQ ID NO: 5691468 - DNA, 25 bp, Homo sapien
attctcctgcctcccgagtagctgg

SEQ ID NO: 5691469 - DNA, 25 bp, Homo sapien
tcctgcctcccgagtagctgggact

SEQ ID NO: 5691470 - DNA, 25 bp, Homo sapien
cctgcctcccgagtagctgggacta

SEQ ID NO: 5691471 - DNA, 25 bp, Homo sapien
tctcctgcctcccgagtagctggga

SEQ ID NO: 5691472 - DNA, 25 bp, Homo sapien
ctcctgcctcccgagtagctgggac

SEQ ID NO: 5691473 - DNA, 25 bp, Homo sapien
ccagctactcgggaggcaggagaat

SEQ ID NO: 5691474 - DNA, 25 bp, Homo sapien
agtcccagctactcgggaggcagga

SEQ ID NO: 5691475 - DNA, 25 bp, Homo sapien
tcccagctactcgggaggcaggaga

SEQ ID NO: 5691476 - DNA, 25 bp, Homo sapien
gtcccagctactcgggaggcaggag

SEQ ID NO: 5691477 - DNA, 25 bp, Homo sapien
cccagctactcgggaggcaggagaa

SEQ ID NO: 5691478 - DNA, 25 bp, Homo sapien
tagtcccagctactcgggaggcagg

SEQ ID NO: 5691479 - DNA, 25 bp, Homo sapien
gctgtgcgtctgcacattgcaaatt

SEQ ID NO: 5691480 - DNA, 25 bp, Homo sapien
tgcacattgcaaattcacttatttg

SEQ ID NO: 5691481 - DNA, 25 bp, Homo sapien
tgcgtctgcacattgcaaattcact

SEQ ID NO: 5691482 - DNA, 25 bp, Homo sapien
cttgattttcccagaattgttttat

SEQ ID NO: 5691483 - DNA, 25 bp, Homo sapien
cacttatttgttcttgattttccca

SEQ ID NO: 5691484 - DNA, 25 bp, Homo sapien
gcgcccggctgtgcgtctgcacatt

SEQ ID NO: 5691485 - DNA, 25 bp, Homo sapien
aatgtgcagacgcacagccgggcgc

SEQ ID NO: 5691486 - DNA, 25 bp, Homo sapien
gaataaaacaattctgggaaaatca

SEQ ID NO: 5691487 - DNA, 25 bp, Homo sapien
tgaatttgcaatgtgcagacgcaca

SEQ ID NO: 5691488 - DNA, 25 bp, Homo sapien
taagtgaatttgcaatgtgcagacg

SEQ ID NO: 5691489 - DNA, 25 bp, Homo sapien
caaataagtgaatttgcaatgtgca

SEQ ID NO: 5691490 - DNA, 25 bp, Homo sapien
tgggaaaatcaagaacaaataagtg

SEQ ID NO: 5691491 - DNA, 25 bp, Homo sapien
gggactctaggtacaagccacaaca

SEQ ID NO: 5691492 - DNA, 25 bp, Homo sapien
ggactctaggtacaagccacaacac

SEQ ID NO: 5691493 - DNA, 25 bp, Homo sapien
ctctaggtacaagccacaacacctg

SEQ ID NO: 5691494 - DNA, 25 bp, Homo sapien
tgggactctaggtacaagccacaac

SEQ ID NO: 5691495 - DNA, 25 bp, Homo sapien
gactctaggtacaagccacaacacc

SEQ ID NO: 5691496 - DNA, 25 bp, Homo sapien
tctaggtacaagccacaacacctgg

SEQ ID NO: 5691497 - DNA, 25 bp, Homo sapien
gtgttgtggcttgtacctagagtcc

SEQ ID NO: 5691498 - DNA, 25 bp, Homo sapien
caggtgttgtggcttgtacctagag

SEQ ID NO: 5691499 - DNA, 25 bp, Homo sapien
ggtgttgtggcttgtacctagagtc

SEQ ID NO: 5691500 - DNA, 25 bp, Homo sapien
gttgtggcttgtacctagagtccca

SEQ ID NO: 5691501 - DNA, 25 bp, Homo sapien
ccaggtgttgtggcttgtacctaga

SEQ ID NO: 5691502 - DNA, 25 bp, Homo sapien
tgttgtggcttgtacctagagtccc

SEQ ID NO: 5691503 - DNA, 25 bp, Homo sapien
tattcagaatatgtagtcacagtag

SEQ ID NO: 5691504 - DNA, 25 bp, Homo sapien
tcacagtagttcaagagagattctc

SEQ ID NO: 5691505 - DNA, 25 bp, Homo sapien
gagattctcacctcattgaaagctt

SEQ ID NO: 5691506 - DNA, 25 bp, Homo sapien
ttctcacctcattgaaagcttacat

SEQ ID NO: 5691507 - DNA, 25 bp, Homo sapien
aaagcttacatggatatgtgtcacc

SEQ ID NO: 5691508 - DNA, 25 bp, Homo sapien
cagtagttcaagagagattctcacc

SEQ ID NO: 5691509 - DNA, 25 bp, Homo sapien
aactactgtgactacatattctgaa

SEQ ID NO: 5691510 - DNA, 25 bp, Homo sapien
gagaatctctcttgaactactgtga

SEQ ID NO: 5691511 - DNA, 25 bp, Homo sapien
aagctttcaatgaggtgagaatctc

SEQ ID NO: 5691512 - DNA, 25 bp, Homo sapien
tgtaagctttcaatgaggtgagaat

SEQ ID NO: 5691513 - DNA, 25 bp, Homo sapien
ggtgacacatatccatgtaagcttt

SEQ ID NO: 5691514 - DNA, 25 bp, Homo sapien
ggtgagaatctctcttgaactactg

SEQ ID NO: 5691515 - DNA, 25 bp, Homo sapien
tgacagttgccagtgctgggaaacg

SEQ ID NO: 5691516 - DNA, 25 bp, Homo sapien
aagttgcccgacatatgacagttgc

SEQ ID NO: 5691517 - DNA, 25 bp, Homo sapien
gaattagtcgtgtgaactcaacaaa

SEQ ID NO: 5691518 - DNA, 25 bp, Homo sapien
catatgacagttgccagtgctggga

SEQ ID NO: 5691519 - DNA, 25 bp, Homo sapien
caaagtgagcgggaaagttgcccga

SEQ ID NO: 5691520 - DNA, 25 bp, Homo sapien
gcccgacatatgacagttgccagtg

SEQ ID NO: 5691521 - DNA, 25 bp, Homo sapien
ttgttgagttcacacgactaattca

SEQ ID NO: 5691522 - DNA, 25 bp, Homo sapien
cgtttcccagcactggcaactgtca

SEQ ID NO: 5691523 - DNA, 25 bp, Homo sapien
tcccagcactggcaactgtcatatg

SEQ ID NO: 5691524 - DNA, 25 bp, Homo sapien
gcaactgtcatatgtcgggcaactt

SEQ ID NO: 5691525 - DNA, 25 bp, Homo sapien
tcgggcaactttcccgctcactttg

SEQ ID NO: 5691526 - DNA, 25 bp, Homo sapien
cactggcaactgtcatatgtcgggc

SEQ ID NO: 5691527 - DNA, 25 bp, Homo sapien
ctgtcctgctcacacgtttctgcag

SEQ ID NO: 5691528 - DNA, 25 bp, Homo sapien
gagtgagggtgtgcatgtgagccca

SEQ ID NO: 5691529 - DNA, 25 bp, Homo sapien
ctgcagaaacgtgtgagcaggacag

SEQ ID NO: 5691530 - DNA, 25 bp, Homo sapien
tgggctcacatgcacaccctcactc

SEQ ID NO: 5691531 - DNA, 25 bp, Homo sapien
ctgtcctgctcacacgtttctgcag

SEQ ID NO: 5691532 - DNA, 25 bp, Homo sapien
tgctcacacgtttctgcagctcggg

SEQ ID NO: 5691533 - DNA, 25 bp, Homo sapien
tgagggtgtgcatgtgagcccacca

SEQ ID NO: 5691534 - DNA, 25 bp, Homo sapien
tgcatgtgagcccaccagaccacag

SEQ ID NO: 5691535 - DNA, 25 bp, Homo sapien
ggtgtgcatgtgagcccaccagacc

SEQ ID NO: 5691536 - DNA, 25 bp, Homo sapien
ctcacacgtttctgcagctcgggaa

SEQ ID NO: 5691537 - DNA, 25 bp, Homo sapien
ctgcagaaacgtgtgagcaggacag

SEQ ID NO: 5691538 - DNA, 25 bp, Homo sapien
tggtgggctcacatgcacaccctca

SEQ ID NO: 5691539 - DNA, 25 bp, Homo sapien
ttcccgagctgcagaaacgtgtgag

SEQ ID NO: 5691540 - DNA, 25 bp, Homo sapien
tggtctggtgggctcacatgcacac

SEQ ID NO: 5691541 - DNA, 25 bp, Homo sapien
cctgtggtctggtgggctcacatgc

SEQ ID NO: 5691542 - DNA, 25 bp, Homo sapien
cccgagctgcagaaacgtgtgagca

SEQ ID NO: 5691543 - DNA, 25 bp, Homo sapien
caagggttgttgacactatgggata

SEQ ID NO: 5691544 - DNA, 25 bp, Homo sapien
cactatgggatagatatgttcagtt

SEQ ID NO: 5691545 - DNA, 25 bp, Homo sapien
gggttgttgacactatgggatagat

SEQ ID NO: 5691546 - DNA, 25 bp, Homo sapien
gacactatgggatagatatgttcag

SEQ ID NO: 5691547 - DNA, 25 bp, Homo sapien
gcacaagggttgttgacactatggg

SEQ ID NO: 5691548 - DNA, 25 bp, Homo sapien
gggatagatatgttcagttttctga

SEQ ID NO: 5691549 - DNA, 25 bp, Homo sapien
gtttagtgactagcagaactgataa

SEQ ID NO: 5691550 - DNA, 25 bp, Homo sapien
gagtttagtgactagcagaactgat

SEQ ID NO: 5691551 - DNA, 25 bp, Homo sapien
gtggtgagtttagtgactagcagaa

SEQ ID NO: 5691552 - DNA, 25 bp, Homo sapien
gaactgataattgaaaacctgcttt

SEQ ID NO: 5691553 - DNA, 25 bp, Homo sapien
cagaactgataattgaaaacctgct

SEQ ID NO: 5691554 - DNA, 25 bp, Homo sapien
ggtgagtttagtgactagcagaact

SEQ ID NO: 5691555 - DNA, 25 bp, Homo sapien
aaagcaggttttcaattatcagttc

SEQ ID NO: 5691556 - DNA, 25 bp, Homo sapien
agttctgctagtcactaaactcacc

SEQ ID NO: 5691557 - DNA, 25 bp, Homo sapien
tcagttctgctagtcactaaactca

SEQ ID NO: 5691558 - DNA, 25 bp, Homo sapien
ttatcagttctgctagtcactaaac

SEQ ID NO: 5691559 - DNA, 25 bp, Homo sapien
caggttttcaattatcagttctgct

SEQ ID NO: 5691560 - DNA, 25 bp, Homo sapien
ttctgctagtcactaaactcaccac

SEQ ID NO: 5691561 - DNA, 25 bp, Homo sapien
aactgaacatatctatcccatagtg

SEQ ID NO: 5691562 - DNA, 25 bp, Homo sapien
gaacatatctatcccatagtgtcaa

SEQ ID NO: 5691563 - DNA, 25 bp, Homo sapien
cccatagtgtcaacaacccttgtgc

SEQ ID NO: 5691564 - DNA, 25 bp, Homo sapien
tatctatcccatagtgtcaacaacc

SEQ ID NO: 5691565 - DNA, 25 bp, Homo sapien
tcagaaaactgaacatatctatccc

SEQ ID NO: 5691566 - DNA, 25 bp, Homo sapien
tatcccatagtgtcaacaacccttg

SEQ ID NO: 5691567 - DNA, 25 bp, Homo sapien
caacctctaaagtacattcctcaca

SEQ ID NO: 5691568 - DNA, 25 bp, Homo sapien
aaagtacattcctcacatttgtgaa

SEQ ID NO: 5691569 - DNA, 25 bp, Homo sapien
cagttatgtttctaattatatgatg

SEQ ID NO: 5691570 - DNA, 25 bp, Homo sapien
tatatgatgttcaagttctgtagtc

SEQ ID NO: 5691571 - DNA, 25 bp, Homo sapien
tatgatgttcaagttctgtagtctc

SEQ ID NO: 5691572 - DNA, 25 bp, Homo sapien
accaacctctaaagtacattcctca

SEQ ID NO: 5691573 - DNA, 25 bp, Homo sapien
catcatataattagaaacataactg

SEQ ID NO: 5691574 - DNA, 25 bp, Homo sapien
gaacatcatataattagaaacataa

SEQ ID NO: 5691575 - DNA, 25 bp, Homo sapien
caaatgtgaggaatgtactttagag

SEQ ID NO: 5691576 - DNA, 25 bp, Homo sapien
tgaggaatgtactttagaggttggt

SEQ ID NO: 5691577 - DNA, 25 bp, Homo sapien
ttcacaaatgtgaggaatgtacttt

SEQ ID NO: 5691578 - DNA, 25 bp, Homo sapien
gagactacagaacttgaacatcata

SEQ ID NO: 5691579 - DNA, 25 bp, Homo sapien
agagtttctttgagtaccctcaaag

SEQ ID NO: 5691580 - DNA, 25 bp, Homo sapien
tctttgagtaccctcaaagatcata

SEQ ID NO: 5691581 - DNA, 25 bp, Homo sapien
tggatagtactctgaccttgggcaa

SEQ ID NO: 5691582 - DNA, 25 bp, Homo sapien
cctgctctggatagtactctgacct

SEQ ID NO: 5691583 - DNA, 25 bp, Homo sapien
ccttgggcaaattagagtttctttg

SEQ ID NO: 5691584 - DNA, 25 bp, Homo sapien
attcaaatcttggccctgctctgga

SEQ ID NO: 5691585 - DNA, 25 bp, Homo sapien
tatgatctttgagggtactcaaaga

SEQ ID NO: 5691586 - DNA, 25 bp, Homo sapien
caaggtcagagtactatccagagca

SEQ ID NO: 5691587 - DNA, 25 bp, Homo sapien
ctttgagggtactcaaagaaactct

SEQ ID NO: 5691588 - DNA, 25 bp, Homo sapien
caaagaaactctaatttgcccaagg

SEQ ID NO: 5691589 - DNA, 25 bp, Homo sapien
tccagagcagggccaagatttgaat

SEQ ID NO: 5691590 - DNA, 25 bp, Homo sapien
ttgcccaaggtcagagtactatcca

SEQ ID NO: 5691591 - DNA, 25 bp, Homo sapien
tatgtatatttgggcggaggcactt

SEQ ID NO: 5691592 - DNA, 25 bp, Homo sapien
ttatgtatatttgggcggaggcact

SEQ ID NO: 5691593 - DNA, 25 bp, Homo sapien
atgtatatttgggcggaggcacttg

SEQ ID NO: 5691594 - DNA, 25 bp, Homo sapien
tgtatatttgggcggaggcacttgt

SEQ ID NO: 5691595 - DNA, 25 bp, Homo sapien
tatatttgggcggaggcacttgttt

SEQ ID NO: 5691596 - DNA, 25 bp, Homo sapien
atatttgggcggaggcacttgtttt

SEQ ID NO: 5691597 - DNA, 25 bp, Homo sapien
cctgttttataccctatgattattg

SEQ ID NO: 5691598 - DNA, 25 bp, Homo sapien
ccctgttttataccctatgattatt

SEQ ID NO: 5691599 - DNA, 25 bp, Homo sapien
cccctgttttataccctatgattat

SEQ ID NO: 5691600 - DNA, 25 bp, Homo sapien
ctgttttataccctatgattattgt

SEQ ID NO: 5691601 - DNA, 25 bp, Homo sapien
tgttttataccctatgattattgtt

SEQ ID NO: 5691602 - DNA, 25 bp, Homo sapien
acaataatcatagggtataaaacag

SEQ ID NO: 5691603 - DNA, 25 bp, Homo sapien
aataatcatagggtataaaacaggg

SEQ ID NO: 5691604 - DNA, 25 bp, Homo sapien
caataatcatagggtataaaacagg

SEQ ID NO: 5691605 - DNA, 25 bp, Homo sapien
aacaataatcatagggtataaaaca

SEQ ID NO: 5691606 - DNA, 25 bp, Homo sapien
aaaacaagtgcctccgcccaaatat

SEQ ID NO: 5691607 - DNA, 25 bp, Homo sapien
acaagtgcctccgcccaaatataca

SEQ ID NO: 5691608 - DNA, 25 bp, Homo sapien
agtgcctccgcccaaatatacataa

SEQ ID NO: 5691609 - DNA, 25 bp, Homo sapien
aaacaagtgcctccgcccaaatata

SEQ ID NO: 5691610 - DNA, 25 bp, Homo sapien
aagtgcctccgcccaaatatacata

SEQ ID NO: 5691611 - DNA, 25 bp, Homo sapien
caagtgcctccgcccaaatatacat

SEQ ID NO: 5691612 - DNA, 25 bp, Homo sapien
tttgagagagaagagttttgtatgt

SEQ ID NO: 5691613 - DNA, 25 bp, Homo sapien
acatacaaaactcttctctctcaaa

SEQ ID NO: 5691614 - DNA, 25 bp, Homo sapien
tagacttaagcccttagatgtggcg

SEQ ID NO: 5691615 - DNA, 25 bp, Homo sapien
gagagagaagagttttgtatgtatt

SEQ ID NO: 5691616 - DNA, 25 bp, Homo sapien
aattttagacttaagcccttagatg

SEQ ID NO: 5691617 - DNA, 25 bp, Homo sapien
gagagaagagttttgtatgtatttt

SEQ ID NO: 5691618 - DNA, 25 bp, Homo sapien
gaattaagataatttgagagagaag

SEQ ID NO: 5691619 - DNA, 25 bp, Homo sapien
tttgagagagaagagttttgtatgt

SEQ ID NO: 5691620 - DNA, 25 bp, Homo sapien
aatacatacaaaactcttctctctc

SEQ ID NO: 5691621 - DNA, 25 bp, Homo sapien
cgccacatctaagggcttaagtcta

SEQ ID NO: 5691622 - DNA, 25 bp, Homo sapien
tacatacaaaactcttctctctcaa

SEQ ID NO: 5691623 - DNA, 25 bp, Homo sapien
acatacaaaactcttctctctcaaa

SEQ ID NO: 5691624 - DNA, 25 bp, Homo sapien
aaaatacatacaaaactcttctctc

SEQ ID NO: 5691625 - DNA, 25 bp, Homo sapien
catctaagggcttaagtctaaaatt

SEQ ID NO: 5691626 - DNA, 25 bp, Homo sapien
gaaggtatcaaatttctattcttta

SEQ ID NO: 5691627 - DNA, 25 bp, Homo sapien
tttttgccttcatgaaggtatcaaa

SEQ ID NO: 5691628 - DNA, 25 bp, Homo sapien
atttttgccttcatgaaggtatcaa

SEQ ID NO: 5691629 - DNA, 25 bp, Homo sapien
tgaaggtatcaaatttctattcttt

SEQ ID NO: 5691630 - DNA, 25 bp, Homo sapien
taaagaatagaaatttgataccttc

SEQ ID NO: 5691631 - DNA, 25 bp, Homo sapien
ttgataccttcatgaaggcaaaaat

SEQ ID NO: 5691632 - DNA, 25 bp, Homo sapien
aaagaatagaaatttgataccttca

SEQ ID NO: 5691633 - DNA, 25 bp, Homo sapien
tttgataccttcatgaaggcaaaaa

SEQ ID NO: 5691634 - DNA, 25 bp, Homo sapien
gaaggtatcaaatttctattcttta

SEQ ID NO: 5691635 - DNA, 25 bp, Homo sapien
tggtggttttcaaggagaacctgat

SEQ ID NO: 5691636 - DNA, 25 bp, Homo sapien
ttttcaaggagaacctgatggttac

SEQ ID NO: 5691637 - DNA, 25 bp, Homo sapien
gccttcatgaaggtatcaaatttct

SEQ ID NO: 5691638 - DNA, 25 bp, Homo sapien
atttttgccttcatgaaggtatcaa

SEQ ID NO: 5691639 - DNA, 25 bp, Homo sapien
gagaacctgatggttacaaatttta

SEQ ID NO: 5691640 - DNA, 25 bp, Homo sapien
tcaggttctccttgaaaaccaccac

SEQ ID NO: 5691641 - DNA, 25 bp, Homo sapien
taaagaatagaaatttgataccttc

SEQ ID NO: 5691642 - DNA, 25 bp, Homo sapien
ttgataccttcatgaaggcaaaaat

SEQ ID NO: 5691643 - DNA, 25 bp, Homo sapien
taaccatcaggttctccttgaaaac

SEQ ID NO: 5691644 - DNA, 25 bp, Homo sapien
gaaatttgataccttcatgaaggca

SEQ ID NO: 5691645 - DNA, 25 bp, Homo sapien
taaaatttgtaaccatcaggttctc

SEQ ID NO: 5691646 - DNA, 25 bp, Homo sapien
ccatgggagttaaatgactcaaata

SEQ ID NO: 5691647 - DNA, 25 bp, Homo sapien
gcagttggttacacacaagtacctt

SEQ ID NO: 5691648 - DNA, 25 bp, Homo sapien
cacacaagtaccttccatgggagtt

SEQ ID NO: 5691649 - DNA, 25 bp, Homo sapien
taccttccatgggagttaaatgact

SEQ ID NO: 5691650 - DNA, 25 bp, Homo sapien
cacaagtaccttccatgggagttaa

SEQ ID NO: 5691651 - DNA, 25 bp, Homo sapien
ccttccatgggagttaaatgactca

SEQ ID NO: 5691652 - DNA, 25 bp, Homo sapien
aaggtacttgtgtgtaaccaactgc

SEQ ID NO: 5691653 - DNA, 25 bp, Homo sapien
tgagtcatttaactcccatggaagg

SEQ ID NO: 5691654 - DNA, 25 bp, Homo sapien
ttaactcccatggaaggtacttgtg

SEQ ID NO: 5691655 - DNA, 25 bp, Homo sapien
tcatttaactcccatggaaggtact

SEQ ID NO: 5691656 - DNA, 25 bp, Homo sapien
aactcccatggaaggtacttgtgtg

SEQ ID NO: 5691657 - DNA, 25 bp, Homo sapien
tatttgagtcatttaactcccatgg

SEQ ID NO: 5691658 - DNA, 25 bp, Homo sapien
atcacatagtaatactattctgcca

SEQ ID NO: 5691659 - DNA, 25 bp, Homo sapien
tggcagaatagtattactatgtgat

SEQ ID NO: 5691660 - DNA, 25 bp, Homo sapien
tatactgtatcctaattcttcctgg

SEQ ID NO: 5691661 - DNA, 25 bp, Homo sapien
gaagcatcctcatatatatactgta

SEQ ID NO: 5691662 - DNA, 25 bp, Homo sapien
tagtaatactattctgccatttgat

SEQ ID NO: 5691663 - DNA, 25 bp, Homo sapien
tggaagcatcctcatatatatactg

SEQ ID NO: 5691664 - DNA, 25 bp, Homo sapien
atcacatagtaatactattctgcca

SEQ ID NO: 5691665 - DNA, 25 bp, Homo sapien
taaaaatatttggaagcatcctcat

SEQ ID NO: 5691666 - DNA, 25 bp, Homo sapien
tacagtatatatatgaggatgcttc

SEQ ID NO: 5691667 - DNA, 25 bp, Homo sapien
cagtatatatatgaggatgcttcca

SEQ ID NO: 5691668 - DNA, 25 bp, Homo sapien
atccaggaagaattaggatacagta

SEQ ID NO: 5691669 - DNA, 25 bp, Homo sapien
ccaggaagaattaggatacagtata

SEQ ID NO: 5691670 - DNA, 25 bp, Homo sapien
tggcagaatagtattactatgtgat

SEQ ID NO: 5691671 - DNA, 25 bp, Homo sapien
aaatcaaatggcagaatagtattac

SEQ ID NO: 5691672 - DNA, 25 bp, Homo sapien
tgcttttgctagtgataccctctgc

SEQ ID NO: 5691673 - DNA, 25 bp, Homo sapien
gctagtgataccctctgcctggaac

SEQ ID NO: 5691674 - DNA, 25 bp, Homo sapien
ttttgctagtgataccctctgcctg

SEQ ID NO: 5691675 - DNA, 25 bp, Homo sapien
tttgctagtgataccctctgcctgg

SEQ ID NO: 5691676 - DNA, 25 bp, Homo sapien
gcttttgctagtgataccctctgcc

SEQ ID NO: 5691677 - DNA, 25 bp, Homo sapien
tgtttctttgccccttgctcgctgc

SEQ ID NO: 5691678 - DNA, 25 bp, Homo sapien
caggcagagggtatcactagcaaaa

SEQ ID NO: 5691679 - DNA, 25 bp, Homo sapien
gcagagggtatcactagcaaaagca

SEQ ID NO: 5691680 - DNA, 25 bp, Homo sapien
ggcagagggtatcactagcaaaagc

SEQ ID NO: 5691681 - DNA, 25 bp, Homo sapien
ccaggcagagggtatcactagcaaa

SEQ ID NO: 5691682 - DNA, 25 bp, Homo sapien
gttccaggcagagggtatcactagc

SEQ ID NO: 5691683 - DNA, 25 bp, Homo sapien
gcagcgagcaaggggcaaagaaaca

SEQ ID NO: 5691684 - DNA, 25 bp, Homo sapien
cctgagatcaggaatctgctttgtt

SEQ ID NO: 5691685 - DNA, 25 bp, Homo sapien
cttatgtattcccagagttccgaat

SEQ ID NO: 5691686 - DNA, 25 bp, Homo sapien
tgtattcccagagttccgaataatg

SEQ ID NO: 5691687 - DNA, 25 bp, Homo sapien
ctctagcgtgttttttggcttctcc

SEQ ID NO: 5691688 - DNA, 25 bp, Homo sapien
tcacttatgtattcccagagttccg

SEQ ID NO: 5691689 - DNA, 25 bp, Homo sapien
tgaccccaggtcctgagatcaggaa

SEQ ID NO: 5691690 - DNA, 25 bp, Homo sapien
tcctgatctcaggacctggggtcag

SEQ ID NO: 5691691 - DNA, 25 bp, Homo sapien
cggaactctgggaatacataagtga

SEQ ID NO: 5691692 - DNA, 25 bp, Homo sapien
ggagaagccaaaaaacacgctagag

SEQ ID NO: 5691693 - DNA, 25 bp, Homo sapien
gaacaaagcagattcctgatctcag

SEQ ID NO: 5691694 - DNA, 25 bp, Homo sapien
attcggaactctgggaatacataag

SEQ ID NO: 5691695 - DNA, 25 bp, Homo sapien
cattattcggaactctgggaataca

SEQ ID NO: 5691696 - DNA, 25 bp, Homo sapien
tgactaaatttgctctaaagtaagt

SEQ ID NO: 5691697 - DNA, 25 bp, Homo sapien
atttccaaagtgtactcttctctcc

SEQ ID NO: 5691698 - DNA, 25 bp, Homo sapien
ggagagaagagtacactttggaaat

SEQ ID NO: 5691699 - DNA, 25 bp, Homo sapien
acttactttagagcaaatttagtca

SEQ ID NO: 5691700 - DNA, 25 bp, Homo sapien
tgtaacaatttacatttccaaagtg

SEQ ID NO: 5691701 - DNA, 25 bp, Homo sapien
gaaggatgactaaatttgctctaaa

SEQ ID NO: 5691702 - DNA, 25 bp, Homo sapien
ttttgaaggatgactaaatttgctc

SEQ ID NO: 5691703 - DNA, 25 bp, Homo sapien
tgactaaatttgctctaaagtaagt

SEQ ID NO: 5691704 - DNA, 25 bp, Homo sapien
tgctctaaagtaagtttgtaacaat

SEQ ID NO: 5691705 - DNA, 25 bp, Homo sapien
atttccaaagtgtactcttctctcc

SEQ ID NO: 5691706 - DNA, 25 bp, Homo sapien
attgttacaaacttactttagagca

SEQ ID NO: 5691707 - DNA, 25 bp, Homo sapien
tgttacaaacttactttagagcaaa

SEQ ID NO: 5691708 - DNA, 25 bp, Homo sapien
gagcaaatttagtcatccttcaaaa

SEQ ID NO: 5691709 - DNA, 25 bp, Homo sapien
ggagagaagagtacactttggaaat

SEQ ID NO: 5691710 - DNA, 25 bp, Homo sapien
cactttggaaatgtaaattgttaca

SEQ ID NO: 5691711 - DNA, 25 bp, Homo sapien
acttactttagagcaaatttagtca

SEQ ID NO: 5691712 - DNA, 25 bp, Homo sapien
gatgccggttggtgtattctctcag

SEQ ID NO: 5691713 - DNA, 25 bp, Homo sapien
tattctctcaggttgcagggacttg

SEQ ID NO: 5691714 - DNA, 25 bp, Homo sapien
cagggacttggctcttgctttttta

SEQ ID NO: 5691715 - DNA, 25 bp, Homo sapien
ctctcaggttgcagggacttggctc

SEQ ID NO: 5691716 - DNA, 25 bp, Homo sapien
ggtgtattctctcaggttgcaggga

SEQ ID NO: 5691717 - DNA, 25 bp, Homo sapien
acttggctcttgcttttttattgac

SEQ ID NO: 5691718 - DNA, 25 bp, Homo sapien
aagtcaataaaaaagcaagagccaa

SEQ ID NO: 5691719 - DNA, 25 bp, Homo sapien
gccaagtccctgcaacctgagagaa

SEQ ID NO: 5691720 - DNA, 25 bp, Homo sapien
tcaataaaaaagcaagagccaagtc

SEQ ID NO: 5691721 - DNA, 25 bp, Homo sapien
taaaaaagcaagagccaagtccctg

SEQ ID NO: 5691722 - DNA, 25 bp, Homo sapien
tccctgcaacctgagagaatacacc

SEQ ID NO: 5691723 - DNA, 25 bp, Homo sapien
ctgagagaatacaccaaccggcatc

SEQ ID NO: 5691724 - DNA, 25 bp, Homo sapien
cagccttttcctaaattgtctcaag

SEQ ID NO: 5691725 - DNA, 25 bp, Homo sapien
gcagccttttcctaaattgtctcaa

SEQ ID NO: 5691726 - DNA, 25 bp, Homo sapien
ggcagccttttcctaaattgtctca

SEQ ID NO: 5691727 - DNA, 25 bp, Homo sapien
ttgagacaatttaggaaaaggctgc

SEQ ID NO: 5691728 - DNA, 25 bp, Homo sapien
cttgagacaatttaggaaaaggctg

SEQ ID NO: 5691729 - DNA, 25 bp, Homo sapien
tgagacaatttaggaaaaggctgcc

SEQ ID NO: 5691730 - DNA, 25 bp, Homo sapien
catgtagtcatgtttggcagccttt

SEQ ID NO: 5691731 - DNA, 25 bp, Homo sapien
aagtgcctgccagttttttagaaag

SEQ ID NO: 5691732 - DNA, 25 bp, Homo sapien
taagcagcatgtagtcatgtttggc

SEQ ID NO: 5691733 - DNA, 25 bp, Homo sapien
taaattgtctcaagtgcctgccagt

SEQ ID NO: 5691734 - DNA, 25 bp, Homo sapien
ggcagccttttcctaaattgtctca

SEQ ID NO: 5691735 - DNA, 25 bp, Homo sapien
tagaaagtatttgaacctttgaaga

SEQ ID NO: 5691736 - DNA, 25 bp, Homo sapien
tcttcaaaggttcaaatactttcta

SEQ ID NO: 5691737 - DNA, 25 bp, Homo sapien
gaaaaggctgccaaacatgactaca

SEQ ID NO: 5691738 - DNA, 25 bp, Homo sapien
gccaaacatgactacatgctgctta

SEQ ID NO: 5691739 - DNA, 25 bp, Homo sapien
tgagacaatttaggaaaaggctgcc

SEQ ID NO: 5691740 - DNA, 25 bp, Homo sapien
tactttctaaaaaactggcaggcac

SEQ ID NO: 5691741 - DNA, 25 bp, Homo sapien
aaaactggcaggcacttgagacaat

SEQ ID NO: 5691742 - DNA, 25 bp, Homo sapien
cagtgcacagtttgaggtcgggata

SEQ ID NO: 5691743 - DNA, 25 bp, Homo sapien
taggtcacattaaggctttccattc

SEQ ID NO: 5691744 - DNA, 25 bp, Homo sapien
ttttaggtcacattaaggctttcca

SEQ ID NO: 5691745 - DNA, 25 bp, Homo sapien
cacagtttgaggtcgggatattttc

SEQ ID NO: 5691746 - DNA, 25 bp, Homo sapien
cagaaagcaaatccagtgcacagtt

SEQ ID NO: 5691747 - DNA, 25 bp, Homo sapien
aaccagaaagcaaatccagtgcaca

SEQ ID NO: 5691748 - DNA, 25 bp, Homo sapien
gaatggaaagccttaatgtgaccta

SEQ ID NO: 5691749 - DNA, 25 bp, Homo sapien
gaaaatatcccgacctcaaactgtg

SEQ ID NO: 5691750 - DNA, 25 bp, Homo sapien
tggaaagccttaatgtgacctaaaa

SEQ ID NO: 5691751 - DNA, 25 bp, Homo sapien
tgtgcactggatttgctttctggtt

SEQ ID NO: 5691752 - DNA, 25 bp, Homo sapien
aactgtgcactggatttgctttctg

SEQ ID NO: 5691753 - DNA, 25 bp, Homo sapien
tatcccgacctcaaactgtgcactg

SEQ ID NO: 5691754 - DNA, 25 bp, Homo sapien
agtgctagggttttaattgattgac

SEQ ID NO: 5691755 - DNA, 25 bp, Homo sapien
gaatgcattcgtatttcaacttcag

SEQ ID NO: 5691756 - DNA, 25 bp, Homo sapien
aatgcattcgtatttcaacttcagc

SEQ ID NO: 5691757 - DNA, 25 bp, Homo sapien
gctagggttttaattgattgactga

SEQ ID NO: 5691758 - DNA, 25 bp, Homo sapien
gactgatgaatgcattcgtatttca

SEQ ID NO: 5691759 - DNA, 25 bp, Homo sapien
tgattgactgatgaatgcattcgta

SEQ ID NO: 5691760 - DNA, 25 bp, Homo sapien
gtcaatcaattaaaaccctagcact

SEQ ID NO: 5691761 - DNA, 25 bp, Homo sapien
tcagtcaatcaattaaaaccctagc

SEQ ID NO: 5691762 - DNA, 25 bp, Homo sapien
gctgaagttgaaatacgaatgcatt

SEQ ID NO: 5691763 - DNA, 25 bp, Homo sapien
gttgaaatacgaatgcattcatcag

SEQ ID NO: 5691764 - DNA, 25 bp, Homo sapien
tacgaatgcattcatcagtcaatca

SEQ ID NO: 5691765 - DNA, 25 bp, Homo sapien
gaaatacgaatgcattcatcagtca

SEQ ID NO: 5691766 - DNA, 25 bp, Homo sapien
ttttgtttccttatccaactggatg

SEQ ID NO: 5691767 - DNA, 25 bp, Homo sapien
gatgtcttagattccaaccttttga

SEQ ID NO: 5691768 - DNA, 25 bp, Homo sapien
caactggatgtcttagattccaacc

SEQ ID NO: 5691769 - DNA, 25 bp, Homo sapien
atgcaccccatgtgtcctctctgtg

SEQ ID NO: 5691770 - DNA, 25 bp, Homo sapien
ttattctcaaaatgcaccccatgtg

SEQ ID NO: 5691771 - DNA, 25 bp, Homo sapien
tctcaaaatgcaccccatgtgtcct

SEQ ID NO: 5691772 - DNA, 25 bp, Homo sapien
cacagagaggacacatggggtgcat

SEQ ID NO: 5691773 - DNA, 25 bp, Homo sapien
catccagttggataaggaaacaaaa

SEQ ID NO: 5691774 - DNA, 25 bp, Homo sapien
caaaaggttggaatctaagacatcc

SEQ ID NO: 5691775 - DNA, 25 bp, Homo sapien
cacatggggtgcattttgagaataa

SEQ ID NO: 5691776 - DNA, 25 bp, Homo sapien
attcaaaaggttggaatctaagaca

SEQ ID NO: 5691777 - DNA, 25 bp, Homo sapien
gttggaatctaagacatccagttgg

SEQ ID NO: 5691778 - DNA, 25 bp, Homo sapien
ctgtggcaattacccttcttgaggc

SEQ ID NO: 5691779 - DNA, 25 bp, Homo sapien
ggctatcgttagtcttcctgctgct

SEQ ID NO: 5691780 - DNA, 25 bp, Homo sapien
tctgtggcaattacccttcttgagg

SEQ ID NO: 5691781 - DNA, 25 bp, Homo sapien
gggctatcgttagtcttcctgctgc

SEQ ID NO: 5691782 - DNA, 25 bp, Homo sapien
tgtgctggggctatcgttagtcttc

SEQ ID NO: 5691783 - DNA, 25 bp, Homo sapien
gctatcgttagtcttcctgctgctt

SEQ ID NO: 5691784 - DNA, 25 bp, Homo sapien
gcctcaagaagggtaattgccacag

SEQ ID NO: 5691785 - DNA, 25 bp, Homo sapien
aagactaacgatagccccagcacaa

SEQ ID NO: 5691786 - DNA, 25 bp, Homo sapien
gcagcaggaagactaacgatagccc

SEQ ID NO: 5691787 - DNA, 25 bp, Homo sapien
gcaggaagactaacgatagccccag

SEQ ID NO: 5691788 - DNA, 25 bp, Homo sapien
aagcagcaggaagactaacgatagc

SEQ ID NO: 5691789 - DNA, 25 bp, Homo sapien
ctcaagaagggtaattgccacagag

SEQ ID NO: 5691790 - DNA, 25 bp, Homo sapien
ttgagacggagtcttgctccgtcac

SEQ ID NO: 5691791 - DNA, 25 bp, Homo sapien
gagacggagtcttgctccgtcaccc

SEQ ID NO: 5691792 - DNA, 25 bp, Homo sapien
tttgagacggagtcttgctccgtca

SEQ ID NO: 5691793 - DNA, 25 bp, Homo sapien
ctgaagtgcagtggtctcagctcac

SEQ ID NO: 5691794 - DNA, 25 bp, Homo sapien
acggagtcttgctccgtcacccagg

SEQ ID NO: 5691795 - DNA, 25 bp, Homo sapien
tgagacggagtcttgctccgtcacc

SEQ ID NO: 5691796 - DNA, 25 bp, Homo sapien
gtgagctgagaccactgcacttcag

SEQ ID NO: 5691797 - DNA, 25 bp, Homo sapien
tgacggagcaagactccgtctcaaa

SEQ ID NO: 5691798 - DNA, 25 bp, Homo sapien
gggtgacggagcaagactccgtctc

SEQ ID NO: 5691799 - DNA, 25 bp, Homo sapien
gtgacggagcaagactccgtctcaa

SEQ ID NO: 5691800 - DNA, 25 bp, Homo sapien
ggtgacggagcaagactccgtctca

SEQ ID NO: 5691801 - DNA, 25 bp, Homo sapien
cctgggtgacggagcaagactccgt

SEQ ID NO: 5691802 - DNA, 25 bp, Homo sapien
cacacccggccgcagttttataaat

SEQ ID NO: 5691803 - DNA, 25 bp, Homo sapien
atttataaaactgcggccgggtgtg

SEQ ID NO: 5691804 - DNA, 25 bp, Homo sapien
cgcagttttataaatttatttgaca

SEQ ID NO: 5691805 - DNA, 25 bp, Homo sapien
gcagttttataaatttatttgacag

SEQ ID NO: 5691806 - DNA, 25 bp, Homo sapien
ttacagacgtgagccaccacacccg

SEQ ID NO: 5691807 - DNA, 25 bp, Homo sapien
gccgcagttttataaatttatttga

SEQ ID NO: 5691808 - DNA, 25 bp, Homo sapien
cagttttataaatttatttgacagt

SEQ ID NO: 5691809 - DNA, 25 bp, Homo sapien
cacacccggccgcagttttataaat

SEQ ID NO: 5691810 - DNA, 25 bp, Homo sapien
tcaaataaatttataaaactgcggc

SEQ ID NO: 5691811 - DNA, 25 bp, Homo sapien
actgtcaaataaatttataaaactg

SEQ ID NO: 5691812 - DNA, 25 bp, Homo sapien
cgggtgtggtggctcacgtctgtaa

SEQ ID NO: 5691813 - DNA, 25 bp, Homo sapien
ctgtcaaataaatttataaaactgc

SEQ ID NO: 5691814 - DNA, 25 bp, Homo sapien
atttataaaactgcggccgggtgtg

SEQ ID NO: 5691815 - DNA, 25 bp, Homo sapien
tgtcaaataaatttataaaactgcg

SEQ ID NO: 5691816 - DNA, 25 bp, Homo sapien
tttcgtacaatttgtcccatgtaga

SEQ ID NO: 5691817 - DNA, 25 bp, Homo sapien
cagctatcacctaaagcttagaaat

SEQ ID NO: 5691818 - DNA, 25 bp, Homo sapien
gctatcacctaaagcttagaaattt

SEQ ID NO: 5691819 - DNA, 25 bp, Homo sapien
tgttttcgtacaatttgtcccatgt

SEQ ID NO: 5691820 - DNA, 25 bp, Homo sapien
tacagctatcacctaaagcttagaa

SEQ ID NO: 5691821 - DNA, 25 bp, Homo sapien
tatcacctaaagcttagaaatttta

SEQ ID NO: 5691822 - DNA, 25 bp, Homo sapien
tctacatgggacaaattgtacgaaa

SEQ ID NO: 5691823 - DNA, 25 bp, Homo sapien
tttctaagctttaggtgatagctgt

SEQ ID NO: 5691824 - DNA, 25 bp, Homo sapien
tacatgggacaaattgtacgaaaac

SEQ ID NO: 5691825 - DNA, 25 bp, Homo sapien
aaatttctaagctttaggtgatagc

SEQ ID NO: 5691826 - DNA, 25 bp, Homo sapien
tctaagctttaggtgatagctgtat

SEQ ID NO: 5691827 - DNA, 25 bp, Homo sapien
taaaatttctaagctttaggtgata

SEQ ID NO: 5691828 - DNA, 25 bp, Homo sapien
taagtctgtgctaatgttctcgtgt

SEQ ID NO: 5691829 - DNA, 25 bp, Homo sapien
ttaagtctgtgctaatgttctcgtg

SEQ ID NO: 5691830 - DNA, 25 bp, Homo sapien
tgttaagtctgtgctaatgttctcg

SEQ ID NO: 5691831 - DNA, 25 bp, Homo sapien
atacccccagctttccaattcagtt

SEQ ID NO: 5691832 - DNA, 25 bp, Homo sapien
aagaaaatgttacatacccccagct

SEQ ID NO: 5691833 - DNA, 25 bp, Homo sapien
agtctgtgctaatgttctcgtgttg

SEQ ID NO: 5691834 - DNA, 25 bp, Homo sapien
aagctgggggtatgtaacattttct

SEQ ID NO: 5691835 - DNA, 25 bp, Homo sapien
agaacattagcacagacttaacaca

SEQ ID NO: 5691836 - DNA, 25 bp, Homo sapien
cgagaacattagcacagacttaaca

SEQ ID NO: 5691837 - DNA, 25 bp, Homo sapien
cacgagaacattagcacagacttaa

SEQ ID NO: 5691838 - DNA, 25 bp, Homo sapien
caacacgagaacattagcacagact

SEQ ID NO: 5691839 - DNA, 25 bp, Homo sapien
aactgaattggaaagctgggggtat

SEQ ID NO: 5691840 - DNA, 25 bp, Homo sapien
ggagcctgtctactctgtgtgtctc

SEQ ID NO: 5691841 - DNA, 25 bp, Homo sapien
ggttccctgtgtggagcctgtctac

SEQ ID NO: 5691842 - DNA, 25 bp, Homo sapien
aggctagcatcccattctctgtggt

SEQ ID NO: 5691843 - DNA, 25 bp, Homo sapien
ccagtgaactctggggttccctgtg

SEQ ID NO: 5691844 - DNA, 25 bp, Homo sapien
tgtgtggagcctgtctactctgtgt

SEQ ID NO: 5691845 - DNA, 25 bp, Homo sapien
ctgtgtgtctctttctaggctagca

SEQ ID NO: 5691846 - DNA, 25 bp, Homo sapien
cacagggaaccccagagttcactgg

SEQ ID NO: 5691847 - DNA, 25 bp, Homo sapien
tgctagcctagaaagagacacacag

SEQ ID NO: 5691848 - DNA, 25 bp, Homo sapien
gaaagagacacacagagtagacagg

SEQ ID NO: 5691849 - DNA, 25 bp, Homo sapien
gagacacacagagtagacaggctcc

SEQ ID NO: 5691850 - DNA, 25 bp, Homo sapien
tccacacagggaaccccagagttca

SEQ ID NO: 5691851 - DNA, 25 bp, Homo sapien
agtagacaggctccacacagggaac

SEQ ID NO: 5691852 - DNA, 25 bp, Homo sapien
agaaggtcagaggccgcctctaccc

SEQ ID NO: 5691853 - DNA, 25 bp, Homo sapien
gttgtggaagtggagaacccagagc

SEQ ID NO: 5691854 - DNA, 25 bp, Homo sapien
gtgttgtggaagtggagaacccaga

SEQ ID NO: 5691855 - DNA, 25 bp, Homo sapien
tgttgtggaagtggagaacccagag

SEQ ID NO: 5691856 - DNA, 25 bp, Homo sapien
gggtgttgtggaagtggagaaccca

SEQ ID NO: 5691857 - DNA, 25 bp, Homo sapien
ggtgttgtggaagtggagaacccag

SEQ ID NO: 5691858 - DNA, 25 bp, Homo sapien
ctctgggttctccacttccacaaca

SEQ ID NO: 5691859 - DNA, 25 bp, Homo sapien
tctgggttctccacttccacaacac

SEQ ID NO: 5691860 - DNA, 25 bp, Homo sapien
gggtagaggcggcctctgaccttct

SEQ ID NO: 5691861 - DNA, 25 bp, Homo sapien
ctgggttctccacttccacaacacc

SEQ ID NO: 5691862 - DNA, 25 bp, Homo sapien
gctctgggttctccacttccacaac

SEQ ID NO: 5691863 - DNA, 25 bp, Homo sapien
tgggttctccacttccacaacaccc

SEQ ID NO: 5691864 - DNA, 25 bp, Homo sapien
ctggcagaatttggcgtgaagaata

SEQ ID NO: 5691865 - DNA, 25 bp, Homo sapien
ttcagacggggtgtacacttggccc

SEQ ID NO: 5691866 - DNA, 25 bp, Homo sapien
ttggcccccaagatagttgcagcca

SEQ ID NO: 5691867 - DNA, 25 bp, Homo sapien
tatggatttcagacggggtgtacac

SEQ ID NO: 5691868 - DNA, 25 bp, Homo sapien
cagaatttggcgtgaagaatatgga

SEQ ID NO: 5691869 - DNA, 25 bp, Homo sapien
cacttggcccccaagatagttgcag

SEQ ID NO: 5691870 - DNA, 25 bp, Homo sapien
tattcttcacgccaaattctgccag

SEQ ID NO: 5691871 - DNA, 25 bp, Homo sapien
tccatattcttcacgccaaattctg

SEQ ID NO: 5691872 - DNA, 25 bp, Homo sapien
agtgtacaccccgtctgaaatccat

SEQ ID NO: 5691873 - DNA, 25 bp, Homo sapien
ggctgcaactatcttgggggccaag

SEQ ID NO: 5691874 - DNA, 25 bp, Homo sapien
gggccaagtgtacaccccgtctgaa

SEQ ID NO: 5691875 - DNA, 25 bp, Homo sapien
tgtacaccccgtctgaaatccatat

SEQ ID NO: 5691876 - DNA, 25 bp, Homo sapien
taaactggggtctgagaggtcccca

SEQ ID NO: 5691877 - DNA, 25 bp, Homo sapien
ggtccccagtgctggtaaggaaaca

SEQ ID NO: 5691878 - DNA, 25 bp, Homo sapien
ccccagtgctggtaaggaaacagtc

SEQ ID NO: 5691879 - DNA, 25 bp, Homo sapien
gtccccagtgctggtaaggaaacag

SEQ ID NO: 5691880 - DNA, 25 bp, Homo sapien
gactagaacctaaactggggtctga

SEQ ID NO: 5691881 - DNA, 25 bp, Homo sapien
tccccagtgctggtaaggaaacagt

SEQ ID NO: 5691882 - DNA, 25 bp, Homo sapien
tggggacctctcagaccccagttta

SEQ ID NO: 5691883 - DNA, 25 bp, Homo sapien
cagaccccagtttaggttctagtct

SEQ ID NO: 5691884 - DNA, 25 bp, Homo sapien
tcagaccccagtttaggttctagtc

SEQ ID NO: 5691885 - DNA, 25 bp, Homo sapien
tctcagaccccagtttaggttctag

SEQ ID NO: 5691886 - DNA, 25 bp, Homo sapien
cctctcagaccccagtttaggttct

SEQ ID NO: 5691887 - DNA, 25 bp, Homo sapien
gactgtttccttaccagcactgggg

SEQ ID NO: 5691888 - DNA, 25 bp, Homo sapien
taaatttcacatattgtaacatgca

SEQ ID NO: 5691889 - DNA, 25 bp, Homo sapien
ataaatttcacatattgtaacatgc

SEQ ID NO: 5691890 - DNA, 25 bp, Homo sapien
aaatttcacatattgtaacatgcat

SEQ ID NO: 5691891 - DNA, 25 bp, Homo sapien
tgcatgttacaatatgtgaaattta

SEQ ID NO: 5691892 - DNA, 25 bp, Homo sapien
gcatgttacaatatgtgaaatttat

SEQ ID NO: 5691893 - DNA, 25 bp, Homo sapien
atgcatgttacaatatgtgaaattt

SEQ ID NO: 5691894 - DNA, 25 bp, Homo sapien
taaatttcacatattgtaacatgca

SEQ ID NO: 5691895 - DNA, 25 bp, Homo sapien
tcttgaaaaaagaggctgaggccgg

SEQ ID NO: 5691896 - DNA, 25 bp, Homo sapien
gcatacattgcttttactcttgaaa

SEQ ID NO: 5691897 - DNA, 25 bp, Homo sapien
catacattgcttttactcttgaaaa

SEQ ID NO: 5691898 - DNA, 25 bp, Homo sapien
catattgtaacatgcatacattgct

SEQ ID NO: 5691899 - DNA, 25 bp, Homo sapien
aaatttcacatattgtaacatgcat

SEQ ID NO: 5691900 - DNA, 25 bp, Homo sapien
tttcaagagtaaaagcaatgtatgc

SEQ ID NO: 5691901 - DNA, 25 bp, Homo sapien
caagagtaaaagcaatgtatgcatg

SEQ ID NO: 5691902 - DNA, 25 bp, Homo sapien
gcatgttacaatatgtgaaatttat

SEQ ID NO: 5691903 - DNA, 25 bp, Homo sapien
tttttcaagagtaaaagcaatgtat

SEQ ID NO: 5691904 - DNA, 25 bp, Homo sapien
ccggcctcagcctcttttttcaaga

SEQ ID NO: 5691905 - DNA, 25 bp, Homo sapien
tgtatgcatgttacaatatgtgaaa

SEQ ID NO: 5691906 - DNA, 25 bp, Homo sapien
ggtgccggtattctcagctacttgg

SEQ ID NO: 5691907 - DNA, 25 bp, Homo sapien
tgggtgccggtattctcagctactt

SEQ ID NO: 5691908 - DNA, 25 bp, Homo sapien
gggtgccggtattctcagctacttg

SEQ ID NO: 5691909 - DNA, 25 bp, Homo sapien
gtgggtgccggtattctcagctact

SEQ ID NO: 5691910 - DNA, 25 bp, Homo sapien
gtgccggtattctcagctacttggg

SEQ ID NO: 5691911 - DNA, 25 bp, Homo sapien
aagtagctgagaataccggcaccca

SEQ ID NO: 5691912 - DNA, 25 bp, Homo sapien
caagtagctgagaataccggcaccc

SEQ ID NO: 5691913 - DNA, 25 bp, Homo sapien
cccaagtagctgagaataccggcac

SEQ ID NO: 5691914 - DNA, 25 bp, Homo sapien
ccaagtagctgagaataccggcacc

SEQ ID NO: 5691915 - DNA, 25 bp, Homo sapien
tgtgtcaaacacaatttaatggttg

SEQ ID NO: 5691916 - DNA, 25 bp, Homo sapien
taccatccaagctgtgtcaaacaca

SEQ ID NO: 5691917 - DNA, 25 bp, Homo sapien
tggttgtgtaagaagttaagcgcac

SEQ ID NO: 5691918 - DNA, 25 bp, Homo sapien
taagtaagcatgttaccatccaagc

SEQ ID NO: 5691919 - DNA, 25 bp, Homo sapien
gtttagcaatttgtagtgagttaaa

SEQ ID NO: 5691920 - DNA, 25 bp, Homo sapien
gtgtaagaagttaagcgcactcagc

SEQ ID NO: 5691921 - DNA, 25 bp, Homo sapien
gacacagcttggatggtaacatgct

SEQ ID NO: 5691922 - DNA, 25 bp, Homo sapien
tgtgtttgacacagcttggatggta

SEQ ID NO: 5691923 - DNA, 25 bp, Homo sapien
tttaactcactacaaattgctaaac

SEQ ID NO: 5691924 - DNA, 25 bp, Homo sapien
gcttggatggtaacatgcttactta

SEQ ID NO: 5691925 - DNA, 25 bp, Homo sapien
gctgagtgcgcttaacttcttacac

SEQ ID NO: 5691926 - DNA, 25 bp, Homo sapien
caaccattaaattgtgtttgacaca

SEQ ID NO: 5691927 - DNA, 25 bp, Homo sapien
tttttaagagtgcttcataagatga

SEQ ID NO: 5691928 - DNA, 25 bp, Homo sapien
tttgaataagctaggcaattaaaaa

SEQ ID NO: 5691929 - DNA, 25 bp, Homo sapien
ttttgaataagctaggcaattaaaa

SEQ ID NO: 5691930 - DNA, 25 bp, Homo sapien
tattttgaataagctaggcaattaa

SEQ ID NO: 5691931 - DNA, 25 bp, Homo sapien
ttgaataagctaggcaattaaaaaa

SEQ ID NO: 5691932 - DNA, 25 bp, Homo sapien
attttgaataagctaggcaattaaa

SEQ ID NO: 5691933 - DNA, 25 bp, Homo sapien
ttttttaattgcctagcttattcaa

SEQ ID NO: 5691934 - DNA, 25 bp, Homo sapien
ttttaattgcctagcttattcaaaa

SEQ ID NO: 5691935 - DNA, 25 bp, Homo sapien
tttaattgcctagcttattcaaaat

SEQ ID NO: 5691936 - DNA, 25 bp, Homo sapien
ttaattgcctagcttattcaaaata

SEQ ID NO: 5691937 - DNA, 25 bp, Homo sapien
tttttaattgcctagcttattcaaa

SEQ ID NO: 5691938 - DNA, 25 bp, Homo sapien
tcatcttatgaagcactcttaaaaa

SEQ ID NO: 5691939 - DNA, 25 bp, Homo sapien
tcttgcctgcttttaagtattttga

SEQ ID NO: 5691940 - DNA, 25 bp, Homo sapien
taagagtgcttcataagatgaatgg

SEQ ID NO: 5691941 - DNA, 25 bp, Homo sapien
tacaatgtttgctcattcttgcctg

SEQ ID NO: 5691942 - DNA, 25 bp, Homo sapien
tttttaagagtgcttcataagatga

SEQ ID NO: 5691943 - DNA, 25 bp, Homo sapien
tattttgaataagctaggcaattaa

SEQ ID NO: 5691944 - DNA, 25 bp, Homo sapien
ttgaataagctaggcaattaaaaaa

SEQ ID NO: 5691945 - DNA, 25 bp, Homo sapien
tcaaaatacttaaaagcaggcaaga

SEQ ID NO: 5691946 - DNA, 25 bp, Homo sapien
taaaagcaggcaagaatgagcaaac

SEQ ID NO: 5691947 - DNA, 25 bp, Homo sapien
ttaattgcctagcttattcaaaata

SEQ ID NO: 5691948 - DNA, 25 bp, Homo sapien
aagaatgagcaaacattgtaacacg

SEQ ID NO: 5691949 - DNA, 25 bp, Homo sapien
ccattcatcttatgaagcactctta

SEQ ID NO: 5691950 - DNA, 25 bp, Homo sapien
tcatcttatgaagcactcttaaaaa

SEQ ID NO: 5691951 - DNA, 25 bp, Homo sapien
gcactttatcctgggcaataaaaca

SEQ ID NO: 5691952 - DNA, 25 bp, Homo sapien
cactttatcctgggcaataaaacaa

SEQ ID NO: 5691953 - DNA, 25 bp, Homo sapien
tttatcctgggcaataaaacaagac

SEQ ID NO: 5691954 - DNA, 25 bp, Homo sapien
ttatcctgggcaataaaacaagacc

SEQ ID NO: 5691955 - DNA, 25 bp, Homo sapien
tgcactttatcctgggcaataaaac

SEQ ID NO: 5691956 - DNA, 25 bp, Homo sapien
ctttatcctgggcaataaaacaaga

SEQ ID NO: 5691957 - DNA, 25 bp, Homo sapien
tgttttattgcccaggataaagtgc

SEQ ID NO: 5691958 - DNA, 25 bp, Homo sapien
gttttattgcccaggataaagtgca

SEQ ID NO: 5691959 - DNA, 25 bp, Homo sapien
agggtcttgttttattgcccaggat

SEQ ID NO: 5691960 - DNA, 25 bp, Homo sapien
gtcttgttttattgcccaggataaa

SEQ ID NO: 5691961 - DNA, 25 bp, Homo sapien
ggtcttgttttattgcccaggataa

SEQ ID NO: 5691962 - DNA, 25 bp, Homo sapien
tcttgttttattgcccaggataaag

SEQ ID NO: 5691963 - DNA, 25 bp, Homo sapien
cagcttcgatcctcgcaaagtcctg

SEQ ID NO: 5691964 - DNA, 25 bp, Homo sapien
cagcagcttcgatcctcgcaaagtc

SEQ ID NO: 5691965 - DNA, 25 bp, Homo sapien
agcagcagcttcgatcctcgcaaag

SEQ ID NO: 5691966 - DNA, 25 bp, Homo sapien
gaagcagcagcttcgatcctcgcaa

SEQ ID NO: 5691967 - DNA, 25 bp, Homo sapien
gccagtggccgttgaagcagcagct

SEQ ID NO: 5691968 - DNA, 25 bp, Homo sapien
ctcgcaaagtcctgcagccatcctc

SEQ ID NO: 5691969 - DNA, 25 bp, Homo sapien
gactttgcgaggatcgaagctgctg

SEQ ID NO: 5691970 - DNA, 25 bp, Homo sapien
ctttgcgaggatcgaagctgctgct

SEQ ID NO: 5691971 - DNA, 25 bp, Homo sapien
gaggatggctgcaggactttgcgag

SEQ ID NO: 5691972 - DNA, 25 bp, Homo sapien
ttgcgaggatcgaagctgctgcttc

SEQ ID NO: 5691973 - DNA, 25 bp, Homo sapien
caggactttgcgaggatcgaagctg

SEQ ID NO: 5691974 - DNA, 25 bp, Homo sapien
agctgctgcttcaacggccactggc

SEQ ID NO: 5691975 - DNA, 25 bp, Homo sapien
tccttgagcccagtaggtccaggct

SEQ ID NO: 5691976 - DNA, 25 bp, Homo sapien
agctactagggggaggattccttga

SEQ ID NO: 5691977 - DNA, 25 bp, Homo sapien
gctactagggggaggattccttgag

SEQ ID NO: 5691978 - DNA, 25 bp, Homo sapien
ttccttgagcccagtaggtccaggc

SEQ ID NO: 5691979 - DNA, 25 bp, Homo sapien
ccttgagcccagtaggtccaggctg

SEQ ID NO: 5691980 - DNA, 25 bp, Homo sapien
attccttgagcccagtaggtccagg

SEQ ID NO: 5691981 - DNA, 25 bp, Homo sapien
gcctggacctactgggctcaaggaa

SEQ ID NO: 5691982 - DNA, 25 bp, Homo sapien
cagcctggacctactgggctcaagg

SEQ ID NO: 5691983 - DNA, 25 bp, Homo sapien
ctcaaggaatcctccccctagtagc

SEQ ID NO: 5691984 - DNA, 25 bp, Homo sapien
tcaaggaatcctccccctagtagct

SEQ ID NO: 5691985 - DNA, 25 bp, Homo sapien
cctggacctactgggctcaaggaat

SEQ ID NO: 5691986 - DNA, 25 bp, Homo sapien
agcctggacctactgggctcaagga

SEQ ID NO: 5691987 - DNA, 25 bp, Homo sapien
tagatacatatgttgtacacattga

SEQ ID NO: 5691988 - DNA, 25 bp, Homo sapien
catatgttgtacacattgaagtcta

SEQ ID NO: 5691989 - DNA, 25 bp, Homo sapien
tatgttgtacacattgaagtctaat

SEQ ID NO: 5691990 - DNA, 25 bp, Homo sapien
tgaagtctaattatgagtttggaaa

SEQ ID NO: 5691991 - DNA, 25 bp, Homo sapien
gatacatatgttgtacacattgaag

SEQ ID NO: 5691992 - DNA, 25 bp, Homo sapien
aagtctaattatgagtttggaaatg

SEQ ID NO: 5691993 - DNA, 25 bp, Homo sapien
tttccaaactcataattagacttca

SEQ ID NO: 5691994 - DNA, 25 bp, Homo sapien
aattagacttcaatgtgtacaacat

SEQ ID NO: 5691995 - DNA, 25 bp, Homo sapien
catttccaaactcataattagactt

SEQ ID NO: 5691996 - DNA, 25 bp, Homo sapien
tagacttcaatgtgtacaacatatg

SEQ ID NO: 5691997 - DNA, 25 bp, Homo sapien
gacttcaatgtgtacaacatatgta

SEQ ID NO: 5691998 - DNA, 25 bp, Homo sapien
tcaatgtgtacaacatatgtatcta

SEQ ID NO: 5691999 - DNA, 25 bp, Homo sapien
tacattcgcattaataaagaataac

SEQ ID NO: 5692000 - DNA, 25 bp, Homo sapien
cttaaatgtggtgactacattcgca

SEQ ID NO: 5692001 - DNA, 25 bp, Homo sapien
caaagcaaattcttcagataatacc

SEQ ID NO: 5692002 - DNA, 25 bp, Homo sapien
ctcgttcactcacgcagatcctgct

SEQ ID NO: 5692003 - DNA, 25 bp, Homo sapien
ggtgactacattcgcattaataaag

SEQ ID NO: 5692004 - DNA, 25 bp, Homo sapien
acgcagatcctgctccttaaatgtg

SEQ ID NO: 5692005 - DNA, 25 bp, Homo sapien
ggtattatctgaagaatttgctttg

SEQ ID NO: 5692006 - DNA, 25 bp, Homo sapien
ctttattaatgcgaatgtagtcacc

SEQ ID NO: 5692007 - DNA, 25 bp, Homo sapien
gcaggatctgcgtgagtgaacgagg

SEQ ID NO: 5692008 - DNA, 25 bp, Homo sapien
tgcgaatgtagtcaccacatttaag

SEQ ID NO: 5692009 - DNA, 25 bp, Homo sapien
tattaatgcgaatgtagtcaccaca

SEQ ID NO: 5692010 - DNA, 25 bp, Homo sapien
cacatttaaggagcaggatctgcgt

SEQ ID NO: 5692011 - DNA, 25 bp, Homo sapien
ctttaattagaaaaatgataggctg

SEQ ID NO: 5692012 - DNA, 25 bp, Homo sapien
aattagaaaaatgataggctgggcg

SEQ ID NO: 5692013 - DNA, 25 bp, Homo sapien
tttaattagaaaaatgataggctgg

SEQ ID NO: 5692014 - DNA, 25 bp, Homo sapien
attagaaaaatgataggctgggcgt

SEQ ID NO: 5692015 - DNA, 25 bp, Homo sapien
ttaattagaaaaatgataggctggg

SEQ ID NO: 5692016 - DNA, 25 bp, Homo sapien
taattagaaaaatgataggctgggc

SEQ ID NO: 5692017 - DNA, 25 bp, Homo sapien
acgcccagcctatcatttttctaat

SEQ ID NO: 5692018 - DNA, 25 bp, Homo sapien
cgcccagcctatcatttttctaatt

SEQ ID NO: 5692019 - DNA, 25 bp, Homo sapien
gcccagcctatcatttttctaatta

SEQ ID NO: 5692020 - DNA, 25 bp, Homo sapien
cccagcctatcatttttctaattaa

SEQ ID NO: 5692021 - DNA, 25 bp, Homo sapien
ccagcctatcatttttctaattaaa

SEQ ID NO: 5692022 - DNA, 25 bp, Homo sapien
cagcctatcatttttctaattaaag

SEQ ID NO: 5692023 - DNA, 25 bp, Homo sapien
ttttagtagagacggggtttcatca

SEQ ID NO: 5692024 - DNA, 25 bp, Homo sapien
accatgcctggctagttgtttttgt

SEQ ID NO: 5692025 - DNA, 25 bp, Homo sapien
atgcctggctagttgtttttgtatt

SEQ ID NO: 5692026 - DNA, 25 bp, Homo sapien
tttagtagagacggggtttcatcat

SEQ ID NO: 5692027 - DNA, 25 bp, Homo sapien
tgcctggctagttgtttttgtattt

SEQ ID NO: 5692028 - DNA, 25 bp, Homo sapien
caccatgcctggctagttgtttttg

SEQ ID NO: 5692029 - DNA, 25 bp, Homo sapien
acaaaaacaactagccaggcatggt

SEQ ID NO: 5692030 - DNA, 25 bp, Homo sapien
atgatgaaaccccgtctctactaaa

SEQ ID NO: 5692031 - DNA, 25 bp, Homo sapien
tgatgaaaccccgtctctactaaaa

SEQ ID NO: 5692032 - DNA, 25 bp, Homo sapien
caaaaacaactagccaggcatggtg

SEQ ID NO: 5692033 - DNA, 25 bp, Homo sapien
aaatacaaaaacaactagccaggca

SEQ ID NO: 5692034 - DNA, 25 bp, Homo sapien
aatacaaaaacaactagccaggcat

SEQ ID NO: 5692035 - DNA, 25 bp, Homo sapien
tagcatacatgatgcttcatatatt

SEQ ID NO: 5692036 - DNA, 25 bp, Homo sapien
tatttacatagcatacatgatgctt

SEQ ID NO: 5692037 - DNA, 25 bp, Homo sapien
tttacatagcatacatgatgcttca

SEQ ID NO: 5692038 - DNA, 25 bp, Homo sapien
catagcatacatgatgcttcatata

SEQ ID NO: 5692039 - DNA, 25 bp, Homo sapien
tacatagcatacatgatgcttcata

SEQ ID NO: 5692040 - DNA, 25 bp, Homo sapien
taataaacatggatatttacatagc

SEQ ID NO: 5692041 - DNA, 25 bp, Homo sapien
tatatgaagcatcatgtatgctatg

SEQ ID NO: 5692042 - DNA, 25 bp, Homo sapien
tatgaagcatcatgtatgctatgta

SEQ ID NO: 5692043 - DNA, 25 bp, Homo sapien
gaagcatcatgtatgctatgtaaat

SEQ ID NO: 5692044 - DNA, 25 bp, Homo sapien
aaatatatgaagcatcatgtatgct

SEQ ID NO: 5692045 - DNA, 25 bp, Homo sapien
gctatgtaaatatccatgtttatta

SEQ ID NO: 5692046 - DNA, 25 bp, Homo sapien
tgaagcatcatgtatgctatgtaaa

SEQ ID NO: 5692047 - DNA, 25 bp, Homo sapien
taataaacatggatatttacatagc

SEQ ID NO: 5692048 - DNA, 25 bp, Homo sapien
tttacatagcatacatgatgcttca

SEQ ID NO: 5692049 - DNA, 25 bp, Homo sapien
catagcatacatgatgcttcatata

SEQ ID NO: 5692050 - DNA, 25 bp, Homo sapien
gaaagactttggagacaatttagta

SEQ ID NO: 5692051 - DNA, 25 bp, Homo sapien
tatttagctgaaagactttggagac

SEQ ID NO: 5692052 - DNA, 25 bp, Homo sapien
catgatgcttcatatatttagctga

SEQ ID NO: 5692053 - DNA, 25 bp, Homo sapien
tatatgaagcatcatgtatgctatg

SEQ ID NO: 5692054 - DNA, 25 bp, Homo sapien
taaattgtctccaaagtctttcagc

SEQ ID NO: 5692055 - DNA, 25 bp, Homo sapien
tcagctaaatatatgaagcatcatg

SEQ ID NO: 5692056 - DNA, 25 bp, Homo sapien
gctatgtaaatatccatgtttatta

SEQ ID NO: 5692057 - DNA, 25 bp, Homo sapien
tgaagcatcatgtatgctatgtaaa

SEQ ID NO: 5692058 - DNA, 25 bp, Homo sapien
ccaaagtctttcagctaaatatatg

SEQ ID NO: 5692059 - DNA, 25 bp, Homo sapien
taaaaataaccacaaagtcacctga

SEQ ID NO: 5692060 - DNA, 25 bp, Homo sapien
gttttataatactttcctggaggca

SEQ ID NO: 5692061 - DNA, 25 bp, Homo sapien
ttttataatactttcctggaggcat

SEQ ID NO: 5692062 - DNA, 25 bp, Homo sapien
atgcctccaggaaagtattataaaa

SEQ ID NO: 5692063 - DNA, 25 bp, Homo sapien
tcaggtgactttgtggttattttta

SEQ ID NO: 5692064 - DNA, 25 bp, Homo sapien
tgcctccaggaaagtattataaaac

SEQ ID NO: 5692065 - DNA, 25 bp, Homo sapien
tgatttgtatgtgttcagaaatgcc

SEQ ID NO: 5692066 - DNA, 25 bp, Homo sapien
tcagaaatgcctccaggaaagtatt

SEQ ID NO: 5692067 - DNA, 25 bp, Homo sapien
tcaggtgactttgtggttattttta

SEQ ID NO: 5692068 - DNA, 25 bp, Homo sapien
aaattttcttcaggtgactttgtgg

SEQ ID NO: 5692069 - DNA, 25 bp, Homo sapien
tgcctccaggaaagtattataaaac

SEQ ID NO: 5692070 - DNA, 25 bp, Homo sapien
tgtatgtgttcagaaatgcctccag

SEQ ID NO: 5692071 - DNA, 25 bp, Homo sapien
ccatgcatgtcggcatgcacctgta

SEQ ID NO: 5692072 - DNA, 25 bp, Homo sapien
gccatgcatgtcggcatgcacctgt

SEQ ID NO: 5692073 - DNA, 25 bp, Homo sapien
agccatgcatgtcggcatgcacctg

SEQ ID NO: 5692074 - DNA, 25 bp, Homo sapien
tacaggtgcatgccgacatgcatgg

SEQ ID NO: 5692075 - DNA, 25 bp, Homo sapien
caggtgcatgccgacatgcatggct

SEQ ID NO: 5692076 - DNA, 25 bp, Homo sapien
acaggtgcatgccgacatgcatggc

SEQ ID NO: 5692077 - DNA, 25 bp, Homo sapien
ccatgcatgtcggcatgcacctgta

SEQ ID NO: 5692078 - DNA, 25 bp, Homo sapien
ttagccatgcatgtcggcatgcacc

SEQ ID NO: 5692079 - DNA, 25 bp, Homo sapien
gccatgcatgtcggcatgcacctgt

SEQ ID NO: 5692080 - DNA, 25 bp, Homo sapien
agccatgcatgtcggcatgcacctg

SEQ ID NO: 5692081 - DNA, 25 bp, Homo sapien
tagccatgcatgtcggcatgcacct

SEQ ID NO: 5692082 - DNA, 25 bp, Homo sapien
catgcatgtcggcatgcacctgtag

SEQ ID NO: 5692083 - DNA, 25 bp, Homo sapien
tacaggtgcatgccgacatgcatgg

SEQ ID NO: 5692084 - DNA, 25 bp, Homo sapien
caggtgcatgccgacatgcatggct

SEQ ID NO: 5692085 - DNA, 25 bp, Homo sapien
acaggtgcatgccgacatgcatggc

SEQ ID NO: 5692086 - DNA, 25 bp, Homo sapien
gactacaggtgcatgccgacatgca

SEQ ID NO: 5692087 - DNA, 25 bp, Homo sapien
ctacaggtgcatgccgacatgcatg

SEQ ID NO: 5692088 - DNA, 25 bp, Homo sapien
actacaggtgcatgccgacatgcat

SEQ ID NO: 5692089 - DNA, 25 bp, Homo sapien
gttagaaaacttctcatattggccg

SEQ ID NO: 5692090 - DNA, 25 bp, Homo sapien
ttagaaaacttctcatattggccgg

SEQ ID NO: 5692091 - DNA, 25 bp, Homo sapien
agaaaacttctcatattggccgggc

SEQ ID NO: 5692092 - DNA, 25 bp, Homo sapien
taggttagaaaacttctcatattgg

SEQ ID NO: 5692093 - DNA, 25 bp, Homo sapien
tagaaaacttctcatattggccggg

SEQ ID NO: 5692094 - DNA, 25 bp, Homo sapien
ggttagaaaacttctcatattggcc

SEQ ID NO: 5692095 - DNA, 25 bp, Homo sapien
gccaatatgagaagttttctaacct

SEQ ID NO: 5692096 - DNA, 25 bp, Homo sapien
caatatgagaagttttctaacctaa

SEQ ID NO: 5692097 - DNA, 25 bp, Homo sapien
gcccggccaatatgagaagttttct

SEQ ID NO: 5692098 - DNA, 25 bp, Homo sapien
ggccaatatgagaagttttctaacc

SEQ ID NO: 5692099 - DNA, 25 bp, Homo sapien
ccggccaatatgagaagttttctaa

SEQ ID NO: 5692100 - DNA, 25 bp, Homo sapien
cccggccaatatgagaagttttcta

SEQ ID NO: 5692101 - DNA, 25 bp, Homo sapien
atcatattgtcttatctttctttgg

SEQ ID NO: 5692102 - DNA, 25 bp, Homo sapien
ggttattgtttctgtttggcttgca

SEQ ID NO: 5692103 - DNA, 25 bp, Homo sapien
tcttaagaaaatttatcatattgtc

SEQ ID NO: 5692104 - DNA, 25 bp, Homo sapien
ttgtttctgtttggcttgcatattc

SEQ ID NO: 5692105 - DNA, 25 bp, Homo sapien
tctttggttattgtttctgtttggc

SEQ ID NO: 5692106 - DNA, 25 bp, Homo sapien
gactctgtcttaagaaaatttatca

SEQ ID NO: 5692107 - DNA, 25 bp, Homo sapien
cagaaacaataaccaaagaaagata

SEQ ID NO: 5692108 - DNA, 25 bp, Homo sapien
gccaaacagaaacaataaccaaaga

SEQ ID NO: 5692109 - DNA, 25 bp, Homo sapien
gaatatgcaagccaaacagaaacaa

SEQ ID NO: 5692110 - DNA, 25 bp, Homo sapien
gacaatatgataaattttcttaaga

SEQ ID NO: 5692111 - DNA, 25 bp, Homo sapien
ccaaagaaagataagacaatatgat

SEQ ID NO: 5692112 - DNA, 25 bp, Homo sapien
tgataaattttcttaagacagagtc

SEQ ID NO: 5692113 - DNA, 25 bp, Homo sapien
atttgcaggttattttctaagcttg

SEQ ID NO: 5692114 - DNA, 25 bp, Homo sapien
ttgcaggttattttctaagcttgca

SEQ ID NO: 5692115 - DNA, 25 bp, Homo sapien
tttgcaggttattttctaagcttgc

SEQ ID NO: 5692116 - DNA, 25 bp, Homo sapien
tgcaggttattttctaagcttgcaa

SEQ ID NO: 5692117 - DNA, 25 bp, Homo sapien
ttgcaagcttagaaaataacctgca

SEQ ID NO: 5692118 - DNA, 25 bp, Homo sapien
gcaagcttagaaaataacctgcaaa

SEQ ID NO: 5692119 - DNA, 25 bp, Homo sapien
caagcttagaaaataacctgcaaat

SEQ ID NO: 5692120 - DNA, 25 bp, Homo sapien
tgcaagcttagaaaataacctgcaa

SEQ ID NO: 5692121 - DNA, 25 bp, Homo sapien
ttttctaagcttgcaaataccaaca

SEQ ID NO: 5692122 - DNA, 25 bp, Homo sapien
atttgcaggttattttctaagcttg

SEQ ID NO: 5692123 - DNA, 25 bp, Homo sapien
tattttattggggtacatttgcagg

SEQ ID NO: 5692124 - DNA, 25 bp, Homo sapien
agcttgcaaataccaacattagaag

SEQ ID NO: 5692125 - DNA, 25 bp, Homo sapien
tgcaggttattttctaagcttgcaa

SEQ ID NO: 5692126 - DNA, 25 bp, Homo sapien
gcaggttattttctaagcttgcaaa

SEQ ID NO: 5692127 - DNA, 25 bp, Homo sapien
ttgcaagcttagaaaataacctgca

SEQ ID NO: 5692128 - DNA, 25 bp, Homo sapien
gaaaataacctgcaaatgtacccca

SEQ ID NO: 5692129 - DNA, 25 bp, Homo sapien
caagcttagaaaataacctgcaaat

SEQ ID NO: 5692130 - DNA, 25 bp, Homo sapien
cttctaatgttggtatttgcaagct

SEQ ID NO: 5692131 - DNA, 25 bp, Homo sapien
taacctgcaaatgtaccccaataaa

SEQ ID NO: 5692132 - DNA, 25 bp, Homo sapien
cctgcaaatgtaccccaataaaata

SEQ ID NO: 5692133 - DNA, 25 bp, Homo sapien
cacttttattagttgtattattgga

SEQ ID NO: 5692134 - DNA, 25 bp, Homo sapien
gaaattatgtattaaagcactttta

SEQ ID NO: 5692135 - DNA, 25 bp, Homo sapien
tgttaattgttaaaacatctcttta

SEQ ID NO: 5692136 - DNA, 25 bp, Homo sapien
ttatgtattaaagcacttttattag

SEQ ID NO: 5692137 - DNA, 25 bp, Homo sapien
tattagttgtattattggaaatttg

SEQ ID NO: 5692138 - DNA, 25 bp, Homo sapien
gcacttttattagttgtattattgg

SEQ ID NO: 5692139 - DNA, 25 bp, Homo sapien
caaatttccaataatacaactaata

SEQ ID NO: 5692140 - DNA, 25 bp, Homo sapien
ccaataatacaactaataaaagtgc

SEQ ID NO: 5692141 - DNA, 25 bp, Homo sapien
caattaacaaatttccaataataca

SEQ ID NO: 5692142 - DNA, 25 bp, Homo sapien
taacaaatttccaataatacaacta

SEQ ID NO: 5692143 - DNA, 25 bp, Homo sapien
taaagagatgttttaacaattaaca

SEQ ID NO: 5692144 - DNA, 25 bp, Homo sapien
taaaagtgctttaatacataatttc

SEQ ID NO: 5692145 - DNA, 25 bp, Homo sapien
gaagaattatgtgaggtagataagg

SEQ ID NO: 5692146 - DNA, 25 bp, Homo sapien
tatgtgaggtagataagggttccct

SEQ ID NO: 5692147 - DNA, 25 bp, Homo sapien
attatgtgaggtagataagggttcc

SEQ ID NO: 5692148 - DNA, 25 bp, Homo sapien
aagaattatgtgaggtagataaggg

SEQ ID NO: 5692149 - DNA, 25 bp, Homo sapien
ttatgtgaggtagataagggttccc

SEQ ID NO: 5692150 - DNA, 25 bp, Homo sapien
gtagagatggcacaaggaagaagaa

SEQ ID NO: 5692151 - DNA, 25 bp, Homo sapien
cccttatctacctcacataattctt

SEQ ID NO: 5692152 - DNA, 25 bp, Homo sapien
gggaacccttatctacctcacataa

SEQ ID NO: 5692153 - DNA, 25 bp, Homo sapien
agggaacccttatctacctcacata

SEQ ID NO: 5692154 - DNA, 25 bp, Homo sapien
ccttatctacctcacataattcttc

SEQ ID NO: 5692155 - DNA, 25 bp, Homo sapien
ggaacccttatctacctcacataat

SEQ ID NO: 5692156 - DNA, 25 bp, Homo sapien
ttcttcttccttgtgccatctctac

SEQ ID NO: 5692157 - DNA, 25 bp, Homo sapien
gcctgcttgaaaagaatctgcagac

SEQ ID NO: 5692158 - DNA, 25 bp, Homo sapien
tggtgtatgctggtctgcctgcttg

SEQ ID NO: 5692159 - DNA, 25 bp, Homo sapien
catggtgtatgctggtctgcctgct

SEQ ID NO: 5692160 - DNA, 25 bp, Homo sapien
gatctgtctggcatggtgtatgctg

SEQ ID NO: 5692161 - DNA, 25 bp, Homo sapien
tagtgaatagatctgtctggcatgg

SEQ ID NO: 5692162 - DNA, 25 bp, Homo sapien
gcttgaaaagaatctgcagactcca

SEQ ID NO: 5692163 - DNA, 25 bp, Homo sapien
agctttgtcccgactgatggtcatt

SEQ ID NO: 5692164 - DNA, 25 bp, Homo sapien
ttgtcccgactgatggtcattagtg

SEQ ID NO: 5692165 - DNA, 25 bp, Homo sapien
gtcccgactgatggtcattagtgaa

SEQ ID NO: 5692166 - DNA, 25 bp, Homo sapien
gctttgtcccgactgatggtcatta

SEQ ID NO: 5692167 - DNA, 25 bp, Homo sapien
ccgactgatggtcattagtgaatag

SEQ ID NO: 5692168 - DNA, 25 bp, Homo sapien
cccgactgatggtcattagtgaata

SEQ ID NO: 5692169 - DNA, 25 bp, Homo sapien
cactaatgaccatcagtcgggacaa

SEQ ID NO: 5692170 - DNA, 25 bp, Homo sapien
ttcactaatgaccatcagtcgggac

SEQ ID NO: 5692171 - DNA, 25 bp, Homo sapien
tattcactaatgaccatcagtcggg

SEQ ID NO: 5692172 - DNA, 25 bp, Homo sapien
aatgaccatcagtcgggacaaagct

SEQ ID NO: 5692173 - DNA, 25 bp, Homo sapien
ctattcactaatgaccatcagtcgg

SEQ ID NO: 5692174 - DNA, 25 bp, Homo sapien
taatgaccatcagtcgggacaaagc

SEQ ID NO: 5692175 - DNA, 25 bp, Homo sapien
cagcatacaccatgccagacagatc

SEQ ID NO: 5692176 - DNA, 25 bp, Homo sapien
tacaccatgccagacagatctattc

SEQ ID NO: 5692177 - DNA, 25 bp, Homo sapien
aagcaggcagaccagcatacaccat

SEQ ID NO: 5692178 - DNA, 25 bp, Homo sapien
ccatgccagacagatctattcacta

SEQ ID NO: 5692179 - DNA, 25 bp, Homo sapien
gtctgcagattcttttcaagcaggc

SEQ ID NO: 5692180 - DNA, 25 bp, Homo sapien
tggagtctgcagattcttttcaagc

SEQ ID NO: 5692181 - DNA, 25 bp, Homo sapien
gatctgattagagcttgaaagagag

SEQ ID NO: 5692182 - DNA, 25 bp, Homo sapien
agatctgaggatgaaacgctgggaa

SEQ ID NO: 5692183 - DNA, 25 bp, Homo sapien
caaacctcatacaagagatctgatt

SEQ ID NO: 5692184 - DNA, 25 bp, Homo sapien
tgggaatttggtagaaggtctctac

SEQ ID NO: 5692185 - DNA, 25 bp, Homo sapien
catacaagagatctgattagagctt

SEQ ID NO: 5692186 - DNA, 25 bp, Homo sapien
ctgaggatgaaacgctgggaatttg

SEQ ID NO: 5692187 - DNA, 25 bp, Homo sapien
aaattcccagcgtttcatcctcaga

SEQ ID NO: 5692188 - DNA, 25 bp, Homo sapien
taccaaattcccagcgtttcatcct

SEQ ID NO: 5692189 - DNA, 25 bp, Homo sapien
tctctttcaagctctaatcagatct

SEQ ID NO: 5692190 - DNA, 25 bp, Homo sapien
gtagagaccttctaccaaattccca

SEQ ID NO: 5692191 - DNA, 25 bp, Homo sapien
aatcagatctcttgtatgaggtttg

SEQ ID NO: 5692192 - DNA, 25 bp, Homo sapien
aagctctaatcagatctcttgtatg

SEQ ID NO: 5692193 - DNA, 25 bp, Homo sapien
gacttgagccttcaacgacatacgg

SEQ ID NO: 5692194 - DNA, 25 bp, Homo sapien
gccttcaacgacatacggcagggtg

SEQ ID NO: 5692195 - DNA, 25 bp, Homo sapien
tgagccttcaacgacatacggcagg

SEQ ID NO: 5692196 - DNA, 25 bp, Homo sapien
gggacttgagccttcaacgacatac

SEQ ID NO: 5692197 - DNA, 25 bp, Homo sapien
ttcaacgacatacggcagggtgggt

SEQ ID NO: 5692198 - DNA, 25 bp, Homo sapien
catacggcagggtgggttaggcaga

SEQ ID NO: 5692199 - DNA, 25 bp, Homo sapien
cctgccgtatgtcgttgaaggctca

SEQ ID NO: 5692200 - DNA, 25 bp, Homo sapien
acccaccctgccgtatgtcgttgaa

SEQ ID NO: 5692201 - DNA, 25 bp, Homo sapien
caccctgccgtatgtcgttgaaggc

SEQ ID NO: 5692202 - DNA, 25 bp, Homo sapien
tgccgtatgtcgttgaaggctcaag

SEQ ID NO: 5692203 - DNA, 25 bp, Homo sapien
ttctgcctaacccaccctgccgtat

SEQ ID NO: 5692204 - DNA, 25 bp, Homo sapien
gtatgtcgttgaaggctcaagtccc

SEQ ID NO: 5692205 - DNA, 25 bp, Homo sapien
ttagtcaccaaacgctcttgcagct

SEQ ID NO: 5692206 - DNA, 25 bp, Homo sapien
gccttagtcaccaaacgctcttgca

SEQ ID NO: 5692207 - DNA, 25 bp, Homo sapien
tggagccttagtcaccaaacgctct

SEQ ID NO: 5692208 - DNA, 25 bp, Homo sapien
gctggagccttagtcaccaaacgct

SEQ ID NO: 5692209 - DNA, 25 bp, Homo sapien
cttgctggagccttagtcaccaaac

SEQ ID NO: 5692210 - DNA, 25 bp, Homo sapien
agtcaccaaacgctcttgcagctta

SEQ ID NO: 5692211 - DNA, 25 bp, Homo sapien
tgcaagagcgtttggtgactaaggc

SEQ ID NO: 5692212 - DNA, 25 bp, Homo sapien
taagctgcaagagcgtttggtgact

SEQ ID NO: 5692213 - DNA, 25 bp, Homo sapien
gagcgtttggtgactaaggctccag

SEQ ID NO: 5692214 - DNA, 25 bp, Homo sapien
gtttggtgactaaggctccagcaag

SEQ ID NO: 5692215 - DNA, 25 bp, Homo sapien
gctgcaagagcgtttggtgactaag

SEQ ID NO: 5692216 - DNA, 25 bp, Homo sapien
gcgtttggtgactaaggctccagca

SEQ ID NO: 5692217 - DNA, 25 bp, Homo sapien
tgctggagccttagtcaccaaacgc

SEQ ID NO: 5692218 - DNA, 25 bp, Homo sapien
gcagggagtcttgaggcctccacag

SEQ ID NO: 5692219 - DNA, 25 bp, Homo sapien
gaggcctccacagcatgtggacagg

SEQ ID NO: 5692220 - DNA, 25 bp, Homo sapien
ccacagcatgtggacaggtggctga

SEQ ID NO: 5692221 - DNA, 25 bp, Homo sapien
gtcttgaggcctccacagcatgtgg

SEQ ID NO: 5692222 - DNA, 25 bp, Homo sapien
gaggaaggacccagagtgacttgct

SEQ ID NO: 5692223 - DNA, 25 bp, Homo sapien
taaggctccagcaagtcactctggg

SEQ ID NO: 5692224 - DNA, 25 bp, Homo sapien
tcagccacctgtccacatgctgtgg

SEQ ID NO: 5692225 - DNA, 25 bp, Homo sapien
tgcaagagcgtttggtgactaaggc

SEQ ID NO: 5692226 - DNA, 25 bp, Homo sapien
gctgtggaggcctcaagactccctg

SEQ ID NO: 5692227 - DNA, 25 bp, Homo sapien
agcaagtcactctgggtccttcctc

SEQ ID NO: 5692228 - DNA, 25 bp, Homo sapien
ccacatgctgtggaggcctcaagac

SEQ ID NO: 5692229 - DNA, 25 bp, Homo sapien
cattgtaaaatacggtatttacaca

SEQ ID NO: 5692230 - DNA, 25 bp, Homo sapien
tgtgtaaataccgtattttacaatg

SEQ ID NO: 5692231 - DNA, 25 bp, Homo sapien
cacaaaatgcacaaaaatacgtatg

SEQ ID NO: 5692232 - DNA, 25 bp, Homo sapien
gcacaaaaatacgtatgtacagttt

SEQ ID NO: 5692233 - DNA, 25 bp, Homo sapien
tactgtaaggaaaacatccatgtca

SEQ ID NO: 5692234 - DNA, 25 bp, Homo sapien
aatacggtatttacacaaaatgcac

SEQ ID NO: 5692235 - DNA, 25 bp, Homo sapien
taagttactgtaaggaaaacatcca

SEQ ID NO: 5692236 - DNA, 25 bp, Homo sapien
aggtgttcattgtaaaatacggtat

SEQ ID NO: 5692237 - DNA, 25 bp, Homo sapien
agtaacttattaaactgtacatacg

SEQ ID NO: 5692238 - DNA, 25 bp, Homo sapien
catacgtatttttgtgcattttgtg

SEQ ID NO: 5692239 - DNA, 25 bp, Homo sapien
tgtgcattttgtgtaaataccgtat

SEQ ID NO: 5692240 - DNA, 25 bp, Homo sapien
tattttacaatgaacacctttccca

SEQ ID NO: 5692241 - DNA, 25 bp, Homo sapien
taaataccgtattttacaatgaaca

SEQ ID NO: 5692242 - DNA, 25 bp, Homo sapien
gacatggatgttttccttacagtaa

SEQ ID NO: 5692243 - DNA, 25 bp, Homo sapien
gtccaagttggttgctttagtttca

SEQ ID NO: 5692244 - DNA, 25 bp, Homo sapien
gaatagtcctgagggtatgtgctta

SEQ ID NO: 5692245 - DNA, 25 bp, Homo sapien
gacaccttagaatagtcctgagggt

SEQ ID NO: 5692246 - DNA, 25 bp, Homo sapien
ccttagaatagtcctgagggtatgt

SEQ ID NO: 5692247 - DNA, 25 bp, Homo sapien
catcatcacagtgacaccttagaat

SEQ ID NO: 5692248 - DNA, 25 bp, Homo sapien
gtcctgagggtatgtgcttagttca

SEQ ID NO: 5692249 - DNA, 25 bp, Homo sapien
acataccctcaggactattctaagg

SEQ ID NO: 5692250 - DNA, 25 bp, Homo sapien
taccctcaggactattctaaggtgt

SEQ ID NO: 5692251 - DNA, 25 bp, Homo sapien
attctaaggtgtcactgtgatgatg

SEQ ID NO: 5692252 - DNA, 25 bp, Homo sapien
tgaactaagcacataccctcaggac

SEQ ID NO: 5692253 - DNA, 25 bp, Homo sapien
tgaaactaaagcaaccaacttggac

SEQ ID NO: 5692254 - DNA, 25 bp, Homo sapien
actaaagcaaccaacttggactcag

SEQ ID NO: 5692255 - DNA, 25 bp, Homo sapien
tgaaatattcatctaggggagagac

SEQ ID NO: 5692256 - DNA, 25 bp, Homo sapien
ctagaaatcgccaagtagtactggg

SEQ ID NO: 5692257 - DNA, 25 bp, Homo sapien
gaatttcatctgattgccaggagct

SEQ ID NO: 5692258 - DNA, 25 bp, Homo sapien
tgccaggagctagaaatcgccaagt

SEQ ID NO: 5692259 - DNA, 25 bp, Homo sapien
ccagtggaatttcatctgattgcca

SEQ ID NO: 5692260 - DNA, 25 bp, Homo sapien
ggagctagaaatcgccaagtagtac

SEQ ID NO: 5692261 - DNA, 25 bp, Homo sapien
gtctctcccctagatgaatatttca

SEQ ID NO: 5692262 - DNA, 25 bp, Homo sapien
gctcctggcaatcagatgaaattcc

SEQ ID NO: 5692263 - DNA, 25 bp, Homo sapien
ccccagtactacttggcgatttcta

SEQ ID NO: 5692264 - DNA, 25 bp, Homo sapien
tggcaatcagatgaaattccactgg

SEQ ID NO: 5692265 - DNA, 25 bp, Homo sapien
tactacttggcgatttctagctcct

SEQ ID NO: 5692266 - DNA, 25 bp, Homo sapien
acttggcgatttctagctcctggca

SEQ ID NO: 5692267 - DNA, 25 bp, Homo sapien
atagtaaggtcagcaagtgagagtg

SEQ ID NO: 5692268 - DNA, 25 bp, Homo sapien
ttacatagtaaggtcagcaagtgag

SEQ ID NO: 5692269 - DNA, 25 bp, Homo sapien
gcatgtttatgaatattctggctgc

SEQ ID NO: 5692270 - DNA, 25 bp, Homo sapien
catagtaaggtcagcaagtgagagt

SEQ ID NO: 5692271 - DNA, 25 bp, Homo sapien
tattacatagtaaggtcagcaagtg

SEQ ID NO: 5692272 - DNA, 25 bp, Homo sapien
catgtttatgaatattctggctgct

SEQ ID NO: 5692273 - DNA, 25 bp, Homo sapien
actctcacttgctgaccttactatg

SEQ ID NO: 5692274 - DNA, 25 bp, Homo sapien
cactctcacttgctgaccttactat

SEQ ID NO: 5692275 - DNA, 25 bp, Homo sapien
agcagccagaatattcataaacatg

SEQ ID NO: 5692276 - DNA, 25 bp, Homo sapien
gcagccagaatattcataaacatgc

SEQ ID NO: 5692277 - DNA, 25 bp, Homo sapien
cacttgctgaccttactatgtaata

SEQ ID NO: 5692278 - DNA, 25 bp, Homo sapien
ctcacttgctgaccttactatgtaa

SEQ ID NO: 5692279 - DNA, 25 bp, Homo sapien
aggagagaaggtatagatacagata

SEQ ID NO: 5692280 - DNA, 25 bp, Homo sapien
taaaaggagagaaggtatagataca

SEQ ID NO: 5692281 - DNA, 25 bp, Homo sapien
gcctgtagtctcagtgagctatgat

SEQ ID NO: 5692282 - DNA, 25 bp, Homo sapien
tgccactggactcaaccttgggtga

SEQ ID NO: 5692283 - DNA, 25 bp, Homo sapien
actggactcaaccttgggtgacaga

SEQ ID NO: 5692284 - DNA, 25 bp, Homo sapien
tgtgccactggactcaaccttgggt

SEQ ID NO: 5692285 - DNA, 25 bp, Homo sapien
tatctgtatctataccttctctcct

SEQ ID NO: 5692286 - DNA, 25 bp, Homo sapien
atcatagctcactgagactacaggc

SEQ ID NO: 5692287 - DNA, 25 bp, Homo sapien
tgtcacccaaggttgagtccagtgg

SEQ ID NO: 5692288 - DNA, 25 bp, Homo sapien
tgtatctataccttctctcctttta

SEQ ID NO: 5692289 - DNA, 25 bp, Homo sapien
tctgtcacccaaggttgagtccagt

SEQ ID NO: 5692290 - DNA, 25 bp, Homo sapien
tcacccaaggttgagtccagtggca

SEQ ID NO: 5692291 - DNA, 25 bp, Homo sapien
tgagagtatcgcttaaagccaggag

SEQ ID NO: 5692292 - DNA, 25 bp, Homo sapien
aggtgagagtatcgcttaaagccag

SEQ ID NO: 5692293 - DNA, 25 bp, Homo sapien
gaggtgagagtatcgcttaaagcca

SEQ ID NO: 5692294 - DNA, 25 bp, Homo sapien
tgaggtgagagtatcgcttaaagcc

SEQ ID NO: 5692295 - DNA, 25 bp, Homo sapien
gtgagagtatcgcttaaagccagga

SEQ ID NO: 5692296 - DNA, 25 bp, Homo sapien
ctgaggtgagagtatcgcttaaagc

SEQ ID NO: 5692297 - DNA, 25 bp, Homo sapien
tggctttaagcgatactctcacctc

SEQ ID NO: 5692298 - DNA, 25 bp, Homo sapien
ggctttaagcgatactctcacctca

SEQ ID NO: 5692299 - DNA, 25 bp, Homo sapien
gctttaagcgatactctcacctcag

SEQ ID NO: 5692300 - DNA, 25 bp, Homo sapien
ctcctggctttaagcgatactctca

SEQ ID NO: 5692301 - DNA, 25 bp, Homo sapien
ctggctttaagcgatactctcacct

SEQ ID NO: 5692302 - DNA, 25 bp, Homo sapien
tcctggctttaagcgatactctcac

SEQ ID NO: 5692303 - DNA, 25 bp, Homo sapien
gctaggagcacagataattcatcct

SEQ ID NO: 5692304 - DNA, 25 bp, Homo sapien
ggagcacagataattcatcctttat

SEQ ID NO: 5692305 - DNA, 25 bp, Homo sapien
tggtctttgctaggagcacagataa

SEQ ID NO: 5692306 - DNA, 25 bp, Homo sapien
ttcatcctttataaaaggagagaag

SEQ ID NO: 5692307 - DNA, 25 bp, Homo sapien
aaggagagaagaagctgagcacagt

SEQ ID NO: 5692308 - DNA, 25 bp, Homo sapien
ggttggtctttgctaggagcacaga

SEQ ID NO: 5692309 - DNA, 25 bp, Homo sapien
cttctctccttttataaaggatgaa

SEQ ID NO: 5692310 - DNA, 25 bp, Homo sapien
tctgtgctcctagcaaagaccaacc

SEQ ID NO: 5692311 - DNA, 25 bp, Homo sapien
tataaaggatgaattatctgtgctc

SEQ ID NO: 5692312 - DNA, 25 bp, Homo sapien
actgtgctcagcttcttctctcctt

SEQ ID NO: 5692313 - DNA, 25 bp, Homo sapien
gatgaattatctgtgctcctagcaa

SEQ ID NO: 5692314 - DNA, 25 bp, Homo sapien
aaggatgaattatctgtgctcctag

SEQ ID NO: 5692315 - DNA, 25 bp, Homo sapien
ggagaagtgtccttgaatagatgag

SEQ ID NO: 5692316 - DNA, 25 bp, Homo sapien
tggagaagtgtccttgaatagatga

SEQ ID NO: 5692317 - DNA, 25 bp, Homo sapien
gagaagtgtccttgaatagatgaga

SEQ ID NO: 5692318 - DNA, 25 bp, Homo sapien
agtgtccttgaatagatgagaggag

SEQ ID NO: 5692319 - DNA, 25 bp, Homo sapien
ctcctctcatctattcaaggacact

SEQ ID NO: 5692320 - DNA, 25 bp, Homo sapien
ctcatctattcaaggacacttctcc

SEQ ID NO: 5692321 - DNA, 25 bp, Homo sapien
tcatctattcaaggacacttctcca

SEQ ID NO: 5692322 - DNA, 25 bp, Homo sapien
tctcatctattcaaggacacttctc

SEQ ID NO: 5692323 - DNA, 25 bp, Homo sapien
ctacaagagaaattaatgatgcaga

SEQ ID NO: 5692324 - DNA, 25 bp, Homo sapien
tagatgagaggagatagagtctgat

SEQ ID NO: 5692325 - DNA, 25 bp, Homo sapien
ttaatgatgcagaaaagagggagga

SEQ ID NO: 5692326 - DNA, 25 bp, Homo sapien
ggagaagtgtccttgaatagatgag

SEQ ID NO: 5692327 - DNA, 25 bp, Homo sapien
tagagtctgatgtacaagtggatgg

SEQ ID NO: 5692328 - DNA, 25 bp, Homo sapien
agtgtccttgaatagatgagaggag

SEQ ID NO: 5692329 - DNA, 25 bp, Homo sapien
ccatccacttgtacatcagactcta

SEQ ID NO: 5692330 - DNA, 25 bp, Homo sapien
ctcctctcatctattcaaggacact

SEQ ID NO: 5692331 - DNA, 25 bp, Homo sapien
tctgcatcattaatttctcttgtag

SEQ ID NO: 5692332 - DNA, 25 bp, Homo sapien
tctcatctattcaaggacacttctc

SEQ ID NO: 5692333 - DNA, 25 bp, Homo sapien
tcatctattcaaggacacttctcca

SEQ ID NO: 5692334 - DNA, 25 bp, Homo sapien
tcagactctatctcctctcatctat

SEQ ID NO: 5692335 - DNA, 25 bp, Homo sapien
aagatttggaatatactggccaggt

SEQ ID NO: 5692336 - DNA, 25 bp, Homo sapien
gatttggaatatactggccaggtgc

SEQ ID NO: 5692337 - DNA, 25 bp, Homo sapien
aaagatttggaatatactggccagg

SEQ ID NO: 5692338 - DNA, 25 bp, Homo sapien
atttggaatatactggccaggtgca

SEQ ID NO: 5692339 - DNA, 25 bp, Homo sapien
tttggaatatactggccaggtgcag

SEQ ID NO: 5692340 - DNA, 25 bp, Homo sapien
agatttggaatatactggccaggtg

SEQ ID NO: 5692341 - DNA, 25 bp, Homo sapien
gcacctggccagtatattccaaatc

SEQ ID NO: 5692342 - DNA, 25 bp, Homo sapien
acctggccagtatattccaaatctt

SEQ ID NO: 5692343 - DNA, 25 bp, Homo sapien
cacctggccagtatattccaaatct

SEQ ID NO: 5692344 - DNA, 25 bp, Homo sapien
ctgcacctggccagtatattccaaa

SEQ ID NO: 5692345 - DNA, 25 bp, Homo sapien
tgcacctggccagtatattccaaat

SEQ ID NO: 5692346 - DNA, 25 bp, Homo sapien
cctggccagtatattccaaatcttt

SEQ ID NO: 5692347 - DNA, 25 bp, Homo sapien
caagattagtttggccaaagattag

SEQ ID NO: 5692348 - DNA, 25 bp, Homo sapien
gattagtttggccaaagattagcca

SEQ ID NO: 5692349 - DNA, 25 bp, Homo sapien
ttcaagattagtttggccaaagatt

SEQ ID NO: 5692350 - DNA, 25 bp, Homo sapien
ttagtttggccaaagattagccagg

SEQ ID NO: 5692351 - DNA, 25 bp, Homo sapien
attagtttggccaaagattagccag

SEQ ID NO: 5692352 - DNA, 25 bp, Homo sapien
tcaagattagtttggccaaagatta

SEQ ID NO: 5692353 - DNA, 25 bp, Homo sapien
aatctttggccaaactaatcttgaa

SEQ ID NO: 5692354 - DNA, 25 bp, Homo sapien
taatctttggccaaactaatcttga

SEQ ID NO: 5692355 - DNA, 25 bp, Homo sapien
ctaatctttggccaaactaatcttg

SEQ ID NO: 5692356 - DNA, 25 bp, Homo sapien
tggctaatctttggccaaactaatc

SEQ ID NO: 5692357 - DNA, 25 bp, Homo sapien
cctggctaatctttggccaaactaa

SEQ ID NO: 5692358 - DNA, 25 bp, Homo sapien
ctggctaatctttggccaaactaat

SEQ ID NO: 5692359 - DNA, 25 bp, Homo sapien
accttactttctgcctgtagtggac

SEQ ID NO: 5692360 - DNA, 25 bp, Homo sapien
ttgctgaatattccaccagctgagt

SEQ ID NO: 5692361 - DNA, 25 bp, Homo sapien
agtaccttactttctgcctgtagtg

SEQ ID NO: 5692362 - DNA, 25 bp, Homo sapien
cttactttctgcctgtagtggacat

SEQ ID NO: 5692363 - DNA, 25 bp, Homo sapien
tgagtaccttactttctgcctgtag

SEQ ID NO: 5692364 - DNA, 25 bp, Homo sapien
actttctgcctgtagtggacattta

SEQ ID NO: 5692365 - DNA, 25 bp, Homo sapien
gtccactacaggcagaaagtaaggt

SEQ ID NO: 5692366 - DNA, 25 bp, Homo sapien
tacaggcagaaagtaaggtactcag

SEQ ID NO: 5692367 - DNA, 25 bp, Homo sapien
atgtccactacaggcagaaagtaag

SEQ ID NO: 5692368 - DNA, 25 bp, Homo sapien
actcagctggtggaatattcagcaa

SEQ ID NO: 5692369 - DNA, 25 bp, Homo sapien
cactacaggcagaaagtaaggtact

SEQ ID NO: 5692370 - DNA, 25 bp, Homo sapien
taaatgtccactacaggcagaaagt

SEQ ID NO: 5692371 - DNA, 25 bp, Homo sapien
atggtggtggacacccataatcgca

SEQ ID NO: 5692372 - DNA, 25 bp, Homo sapien
tggtggtggacacccataatcgcag

SEQ ID NO: 5692373 - DNA, 25 bp, Homo sapien
ggtggacacccataatcgcagctac

SEQ ID NO: 5692374 - DNA, 25 bp, Homo sapien
gtggacacccataatcgcagctact

SEQ ID NO: 5692375 - DNA, 25 bp, Homo sapien
tggtggacacccataatcgcagcta

SEQ ID NO: 5692376 - DNA, 25 bp, Homo sapien
gtggtggacacccataatcgcagct

SEQ ID NO: 5692377 - DNA, 25 bp, Homo sapien
tgcgattatgggtgtccaccaccat

SEQ ID NO: 5692378 - DNA, 25 bp, Homo sapien
gtagctgcgattatgggtgtccacc

SEQ ID NO: 5692379 - DNA, 25 bp, Homo sapien
gagtagctgcgattatgggtgtcca

SEQ ID NO: 5692380 - DNA, 25 bp, Homo sapien
agtagctgcgattatgggtgtccac

SEQ ID NO: 5692381 - DNA, 25 bp, Homo sapien
agctgcgattatgggtgtccaccac

SEQ ID NO: 5692382 - DNA, 25 bp, Homo sapien
tagctgcgattatgggtgtccacca

SEQ ID NO: 5692383 - DNA, 25 bp, Homo sapien
aaagcaatataattccttaatgatt

SEQ ID NO: 5692384 - DNA, 25 bp, Homo sapien
caatgccctgacacagttattacct

SEQ ID NO: 5692385 - DNA, 25 bp, Homo sapien
tcaatgccctgacacagttattacc

SEQ ID NO: 5692386 - DNA, 25 bp, Homo sapien
actcaatgccctgacacagttatta

SEQ ID NO: 5692387 - DNA, 25 bp, Homo sapien
ctcaatgccctgacacagttattac

SEQ ID NO: 5692388 - DNA, 25 bp, Homo sapien
gcaatataattccttaatgatttaa

SEQ ID NO: 5692389 - DNA, 25 bp, Homo sapien
ttaaatcattaaggaattatattgc

SEQ ID NO: 5692390 - DNA, 25 bp, Homo sapien
gtaataactgtgtcagggcattgag

SEQ ID NO: 5692391 - DNA, 25 bp, Homo sapien
aggtaataactgtgtcagggcattg

SEQ ID NO: 5692392 - DNA, 25 bp, Homo sapien
taaatcattaaggaattatattgct

SEQ ID NO: 5692393 - DNA, 25 bp, Homo sapien
ggtaataactgtgtcagggcattga

SEQ ID NO: 5692394 - DNA, 25 bp, Homo sapien
taataactgtgtcagggcattgagt

SEQ ID NO: 5692395 - DNA, 25 bp, Homo sapien
ttcatttatagtctccatctacata

SEQ ID NO: 5692396 - DNA, 25 bp, Homo sapien
gttcatttatagtctccatctacat

SEQ ID NO: 5692397 - DNA, 25 bp, Homo sapien
tatgtagatggagactataaatgaa

SEQ ID NO: 5692398 - DNA, 25 bp, Homo sapien
atgtagatggagactataaatgaac

SEQ ID NO: 5692399 - DNA, 25 bp, Homo sapien
ccttaagaatgatttttactgttca

SEQ ID NO: 5692400 - DNA, 25 bp, Homo sapien
tatagtctccatctacatattaagc

SEQ ID NO: 5692401 - DNA, 25 bp, Homo sapien
gagccaagtccttaagaatgatttt

SEQ ID NO: 5692402 - DNA, 25 bp, Homo sapien
aattacgagccaagtccttaagaat

SEQ ID NO: 5692403 - DNA, 25 bp, Homo sapien
gtctccatctacatattaagctttt

SEQ ID NO: 5692404 - DNA, 25 bp, Homo sapien
gttcatttatagtctccatctacat

SEQ ID NO: 5692405 - DNA, 25 bp, Homo sapien
gatggagactataaatgaacagtaa

SEQ ID NO: 5692406 - DNA, 25 bp, Homo sapien
tgaacagtaaaaatcattcttaagg

SEQ ID NO: 5692407 - DNA, 25 bp, Homo sapien
aaaagcttaatatgtagatggagac

SEQ ID NO: 5692408 - DNA, 25 bp, Homo sapien
cattcttaaggacttggctcgtaat

SEQ ID NO: 5692409 - DNA, 25 bp, Homo sapien
atgtagatggagactataaatgaac

SEQ ID NO: 5692410 - DNA, 25 bp, Homo sapien
taaaaatcattcttaaggacttggc

SEQ ID NO: 5692411 - DNA, 25 bp, Homo sapien
ggtcttagaggcgagggatgctgct

SEQ ID NO: 5692412 - DNA, 25 bp, Homo sapien
gggatgctgctgaatacactgcgct

SEQ ID NO: 5692413 - DNA, 25 bp, Homo sapien
tagtgggagttgctattggcattta

SEQ ID NO: 5692414 - DNA, 25 bp, Homo sapien
gtcatggtttagtgggagttgctat

SEQ ID NO: 5692415 - DNA, 25 bp, Homo sapien
gctgaatacactgcgctgcgctgct

SEQ ID NO: 5692416 - DNA, 25 bp, Homo sapien
ggcatttagtgggtcttagaggcga

SEQ ID NO: 5692417 - DNA, 25 bp, Homo sapien
tcgcctctaagacccactaaatgcc

SEQ ID NO: 5692418 - DNA, 25 bp, Homo sapien
gcgcagtgtattcagcagcatccct

SEQ ID NO: 5692419 - DNA, 25 bp, Homo sapien
agcagcgcagcgcagtgtattcagc

SEQ ID NO: 5692420 - DNA, 25 bp, Homo sapien
aatagcaactcccactaaaccatga

SEQ ID NO: 5692421 - DNA, 25 bp, Homo sapien
taaatgccaatagcaactcccacta

SEQ ID NO: 5692422 - DNA, 25 bp, Homo sapien
agcgcagcgcagtgtattcagcagc

SEQ ID NO: 5692423 - DNA, 25 bp, Homo sapien
aaggagatccccctaccgccatggg

SEQ ID NO: 5692424 - DNA, 25 bp, Homo sapien
ggagatccccctaccgccatgggga

SEQ ID NO: 5692425 - DNA, 25 bp, Homo sapien
ccctaccgccatggggacattgaca

SEQ ID NO: 5692426 - DNA, 25 bp, Homo sapien
gagatccccctaccgccatggggac

SEQ ID NO: 5692427 - DNA, 25 bp, Homo sapien
tcaacaaaggagatccccctaccgc

SEQ ID NO: 5692428 - DNA, 25 bp, Homo sapien
aggagatccccctaccgccatgggg

SEQ ID NO: 5692429 - DNA, 25 bp, Homo sapien
gtccccatggcggtagggggatctc

SEQ ID NO: 5692430 - DNA, 25 bp, Homo sapien
ccccatggcggtagggggatctcct

SEQ ID NO: 5692431 - DNA, 25 bp, Homo sapien
tgtcaatgtccccatggcggtaggg

SEQ ID NO: 5692432 - DNA, 25 bp, Homo sapien
gcggtagggggatctcctttgttga

SEQ ID NO: 5692433 - DNA, 25 bp, Homo sapien
cccatggcggtagggggatctcctt

SEQ ID NO: 5692434 - DNA, 25 bp, Homo sapien
tccccatggcggtagggggatctcc

SEQ ID NO: 5692435 - DNA, 25 bp, Homo sapien
aaggagatccccctaccgccatggg

SEQ ID NO: 5692436 - DNA, 25 bp, Homo sapien
catggggacattgacaatttctgga

SEQ ID NO: 5692437 - DNA, 25 bp, Homo sapien
cagtagttttcaacaaaggagatcc

SEQ ID NO: 5692438 - DNA, 25 bp, Homo sapien
ccctaccgccatggggacattgaca

SEQ ID NO: 5692439 - DNA, 25 bp, Homo sapien
gtttctcatttctagctgcctccca

SEQ ID NO: 5692440 - DNA, 25 bp, Homo sapien
gctgcctcccaactcctaattttaa

SEQ ID NO: 5692441 - DNA, 25 bp, Homo sapien
taaaattaggagttgggaggcagct

SEQ ID NO: 5692442 - DNA, 25 bp, Homo sapien
tccagaaattgtcaatgtccccatg

SEQ ID NO: 5692443 - DNA, 25 bp, Homo sapien
gaaattgtcaatgtccccatggcgg

SEQ ID NO: 5692444 - DNA, 25 bp, Homo sapien
tgggaggcagctagaaatgagaaac

SEQ ID NO: 5692445 - DNA, 25 bp, Homo sapien
tgtcaatgtccccatggcggtaggg

SEQ ID NO: 5692446 - DNA, 25 bp, Homo sapien
ggatctcctttgttgaaaactactg

SEQ ID NO: 5692447 - DNA, 25 bp, Homo sapien
tgtctagagtaccttctcctaggac

SEQ ID NO: 5692448 - DNA, 25 bp, Homo sapien
gaaactgtctagagtaccttctcct

SEQ ID NO: 5692449 - DNA, 25 bp, Homo sapien
actgtctagagtaccttctcctagg

SEQ ID NO: 5692450 - DNA, 25 bp, Homo sapien
ctgtctagagtaccttctcctagga

SEQ ID NO: 5692451 - DNA, 25 bp, Homo sapien
aactgtctagagtaccttctcctag

SEQ ID NO: 5692452 - DNA, 25 bp, Homo sapien
tctagagtaccttctcctaggacag

SEQ ID NO: 5692453 - DNA, 25 bp, Homo sapien
taggagaaggtactctagacagttt

SEQ ID NO: 5692454 - DNA, 25 bp, Homo sapien
aggagaaggtactctagacagtttc

SEQ ID NO: 5692455 - DNA, 25 bp, Homo sapien
ctgtcctaggagaaggtactctaga

SEQ ID NO: 5692456 - DNA, 25 bp, Homo sapien
tcctaggagaaggtactctagacag

SEQ ID NO: 5692457 - DNA, 25 bp, Homo sapien
cctaggagaaggtactctagacagt

SEQ ID NO: 5692458 - DNA, 25 bp, Homo sapien
tgtcctaggagaaggtactctagac

SEQ ID NO: 5692459 - DNA, 25 bp, Homo sapien
ttggcccatacaccgtagtttgccg

SEQ ID NO: 5692460 - DNA, 25 bp, Homo sapien
ggcccatacaccgtagtttgccggc

SEQ ID NO: 5692461 - DNA, 25 bp, Homo sapien
ccatatttggcccatacaccgtagt

SEQ ID NO: 5692462 - DNA, 25 bp, Homo sapien
tatttggcccatacaccgtagtttg

SEQ ID NO: 5692463 - DNA, 25 bp, Homo sapien
tgccggccccttttctaagccatcc

SEQ ID NO: 5692464 - DNA, 25 bp, Homo sapien
catacaccgtagtttgccggcccct

SEQ ID NO: 5692465 - DNA, 25 bp, Homo sapien
cggcaaactacggtgtatgggccaa

SEQ ID NO: 5692466 - DNA, 25 bp, Homo sapien
caaactacggtgtatgggccaaata

SEQ ID NO: 5692467 - DNA, 25 bp, Homo sapien
gccggcaaactacggtgtatgggcc

SEQ ID NO: 5692468 - DNA, 25 bp, Homo sapien
actacggtgtatgggccaaatatgg

SEQ ID NO: 5692469 - DNA, 25 bp, Homo sapien
gatggcttagaaaaggggccggcaa

SEQ ID NO: 5692470 - DNA, 25 bp, Homo sapien
ggcaaactacggtgtatgggccaaa

SEQ ID NO: 5692471 - DNA, 25 bp, Homo sapien
gtatctctgcctcagtgagatctgg

SEQ ID NO: 5692472 - DNA, 25 bp, Homo sapien
tccagactgggaaattgtcacacta

SEQ ID NO: 5692473 - DNA, 25 bp, Homo sapien
tagtatctctgcctcagtgagatct

SEQ ID NO: 5692474 - DNA, 25 bp, Homo sapien
tgagatctggtagggttagggaccg

SEQ ID NO: 5692475 - DNA, 25 bp, Homo sapien
atctctgcctcagtgagatctggta

SEQ ID NO: 5692476 - DNA, 25 bp, Homo sapien
gttagggaccgtttcttatctctgc

SEQ ID NO: 5692477 - DNA, 25 bp, Homo sapien
taccagatctcactgaggcagagat

SEQ ID NO: 5692478 - DNA, 25 bp, Homo sapien
agtgtgacaatttcccagtctggat

SEQ ID NO: 5692479 - DNA, 25 bp, Homo sapien
cagatctcactgaggcagagatact

SEQ ID NO: 5692480 - DNA, 25 bp, Homo sapien
gcagagataagaaacggtccctaac

SEQ ID NO: 5692481 - DNA, 25 bp, Homo sapien
ggtccctaaccctaccagatctcac

SEQ ID NO: 5692482 - DNA, 25 bp, Homo sapien
tagtgtgacaatttcccagtctgga

SEQ ID NO: 5692483 - DNA, 25 bp, Homo sapien
gtatactatttagtgaactgactgg

SEQ ID NO: 5692484 - DNA, 25 bp, Homo sapien
gtcttgtacttcaaattgttcccca

SEQ ID NO: 5692485 - DNA, 25 bp, Homo sapien
caaattgttccccataatgtatact

SEQ ID NO: 5692486 - DNA, 25 bp, Homo sapien
gggcctatcatgtcttgtacttcaa

SEQ ID NO: 5692487 - DNA, 25 bp, Homo sapien
acagagttgagacttgggcctatca

SEQ ID NO: 5692488 - DNA, 25 bp, Homo sapien
gctgattgaacattaacagagttga

SEQ ID NO: 5692489 - DNA, 25 bp, Homo sapien
tcaactctgttaatgttcaatcagc

SEQ ID NO: 5692490 - DNA, 25 bp, Homo sapien
tgataggcccaagtctcaactctgt

SEQ ID NO: 5692491 - DNA, 25 bp, Homo sapien
agtacaagacatgataggcccaagt

SEQ ID NO: 5692492 - DNA, 25 bp, Homo sapien
gggaacaatttgaagtacaagacat

SEQ ID NO: 5692493 - DNA, 25 bp, Homo sapien
ttgaagtacaagacatgataggccc

SEQ ID NO: 5692494 - DNA, 25 bp, Homo sapien
ccagtcagttcactaaatagtatac

SEQ ID NO: 5692495 - DNA, 25 bp, Homo sapien
aatgctctcttcagtttagctatgg

SEQ ID NO: 5692496 - DNA, 25 bp, Homo sapien
tgtcatggagcggtaaggaaaacag

SEQ ID NO: 5692497 - DNA, 25 bp, Homo sapien
gaaatgctctcttcagtttagctat

SEQ ID NO: 5692498 - DNA, 25 bp, Homo sapien
tgctctcttcagtttagctatggtt

SEQ ID NO: 5692499 - DNA, 25 bp, Homo sapien
ctctcttcagtttagctatggtttt

SEQ ID NO: 5692500 - DNA, 25 bp, Homo sapien
gctctcttcagtttagctatggttt

SEQ ID NO: 5692501 - DNA, 25 bp, Homo sapien
cctttggaacaacctgtcatggagc

SEQ ID NO: 5692502 - DNA, 25 bp, Homo sapien
ctttggaacaacctgtcatggagcg

SEQ ID NO: 5692503 - DNA, 25 bp, Homo sapien
agacctttggaacaacctgtcatgg

SEQ ID NO: 5692504 - DNA, 25 bp, Homo sapien
gacctttggaacaacctgtcatgga

SEQ ID NO: 5692505 - DNA, 25 bp, Homo sapien
acctttggaacaacctgtcatggag

SEQ ID NO: 5692506 - DNA, 25 bp, Homo sapien
tccatgacaggttgttccaaaggtc

SEQ ID NO: 5692507 - DNA, 25 bp, Homo sapien
gctccatgacaggttgttccaaagg

SEQ ID NO: 5692508 - DNA, 25 bp, Homo sapien
cgctccatgacaggttgttccaaag

SEQ ID NO: 5692509 - DNA, 25 bp, Homo sapien
ctccatgacaggttgttccaaaggt

SEQ ID NO: 5692510 - DNA, 25 bp, Homo sapien
ccatgacaggttgttccaaaggtct

SEQ ID NO: 5692511 - DNA, 25 bp, Homo sapien
ctgttttccttaccgctccatgaca

SEQ ID NO: 5692512 - DNA, 25 bp, Homo sapien
aaccatagctaaactgaagagagca

SEQ ID NO: 5692513 - DNA, 25 bp, Homo sapien
aaaccatagctaaactgaagagagc

SEQ ID NO: 5692514 - DNA, 25 bp, Homo sapien
atagctaaactgaagagagcatttc

SEQ ID NO: 5692515 - DNA, 25 bp, Homo sapien
aaaaccatagctaaactgaagagag

SEQ ID NO: 5692516 - DNA, 25 bp, Homo sapien
ccatagctaaactgaagagagcatt

SEQ ID NO: 5692517 - DNA, 25 bp, Homo sapien
actggcactgaacagggcatgactg

SEQ ID NO: 5692518 - DNA, 25 bp, Homo sapien
cagtcatgccctgttcagtgccagt

SEQ ID NO: 5692519 - DNA, 25 bp, Homo sapien
tactggcactgaacagggcatgact

SEQ ID NO: 5692520 - DNA, 25 bp, Homo sapien
gtggcaccatgggaacctgtagtta

SEQ ID NO: 5692521 - DNA, 25 bp, Homo sapien
tatgtgcatcctcagctcactggac

SEQ ID NO: 5692522 - DNA, 25 bp, Homo sapien
cctgtagttatgttcttactggcac

SEQ ID NO: 5692523 - DNA, 25 bp, Homo sapien
tttatgtgcatcctcagctcactgg

SEQ ID NO: 5692524 - DNA, 25 bp, Homo sapien
gacagccagtgctcattggtggcac

SEQ ID NO: 5692525 - DNA, 25 bp, Homo sapien
gtccagtgagctgaggatgcacata

SEQ ID NO: 5692526 - DNA, 25 bp, Homo sapien
catggtgccaccaatgagcactggc

SEQ ID NO: 5692527 - DNA, 25 bp, Homo sapien
taactacaggttcccatggtgccac

SEQ ID NO: 5692528 - DNA, 25 bp, Homo sapien
cagtcatgccctgttcagtgccagt

SEQ ID NO: 5692529 - DNA, 25 bp, Homo sapien
gtgccagtaagaacataactacagg

SEQ ID NO: 5692530 - DNA, 25 bp, Homo sapien
ccagtgagctgaggatgcacataaa

SEQ ID NO: 5692531 - DNA, 25 bp, Homo sapien
gcaaatcacgagttcgggagatcga

SEQ ID NO: 5692532 - DNA, 25 bp, Homo sapien
caaatcacgagttcgggagatcgag

SEQ ID NO: 5692533 - DNA, 25 bp, Homo sapien
aaatcacgagttcgggagatcgaga

SEQ ID NO: 5692534 - DNA, 25 bp, Homo sapien
tcgatctcccgaactcgtgatttgc

SEQ ID NO: 5692535 - DNA, 25 bp, Homo sapien
tctcgatctcccgaactcgtgattt

SEQ ID NO: 5692536 - DNA, 25 bp, Homo sapien
ctcgatctcccgaactcgtgatttg

SEQ ID NO: 5692537 - DNA, 25 bp, Homo sapien
tactagccgcgcgtttagaagtctg

SEQ ID NO: 5692538 - DNA, 25 bp, Homo sapien
caaagaatcaaagtactatcttaat

SEQ ID NO: 5692539 - DNA, 25 bp, Homo sapien
tagccgcgcgtttagaagtctgggt

SEQ ID NO: 5692540 - DNA, 25 bp, Homo sapien
taatatagtttactagccgcgcgtt

SEQ ID NO: 5692541 - DNA, 25 bp, Homo sapien
tcttaatatagtttactagccgcgc

SEQ ID NO: 5692542 - DNA, 25 bp, Homo sapien
tatagtttactagccgcgcgtttag

SEQ ID NO: 5692543 - DNA, 25 bp, Homo sapien
aacccagacttctaaacgcgcggct

SEQ ID NO: 5692544 - DNA, 25 bp, Homo sapien
taaacgcgcggctagtaaactatat

SEQ ID NO: 5692545 - DNA, 25 bp, Homo sapien
ccagacttctaaacgcgcggctagt

SEQ ID NO: 5692546 - DNA, 25 bp, Homo sapien
cagacttctaaacgcgcggctagta

SEQ ID NO: 5692547 - DNA, 25 bp, Homo sapien
cgcgcggctagtaaactatattaag

SEQ ID NO: 5692548 - DNA, 25 bp, Homo sapien
ctatattaagatagtactttgattc

SEQ ID NO: 5692549 - DNA, 25 bp, Homo sapien
gatggtggttctagcaacacttctc

SEQ ID NO: 5692550 - DNA, 25 bp, Homo sapien
ggttctagcaacacttctctacact

SEQ ID NO: 5692551 - DNA, 25 bp, Homo sapien
ctagcaacacttctctacacttttg

SEQ ID NO: 5692552 - DNA, 25 bp, Homo sapien
acaagcaccttgctcaggatggtgg

SEQ ID NO: 5692553 - DNA, 25 bp, Homo sapien
ggatggtggttctagcaacacttct

SEQ ID NO: 5692554 - DNA, 25 bp, Homo sapien
ggtggttctagcaacacttctctac

SEQ ID NO: 5692555 - DNA, 25 bp, Homo sapien
tgtagagaagtgttgctagaaccac

SEQ ID NO: 5692556 - DNA, 25 bp, Homo sapien
agtgtagagaagtgttgctagaacc

SEQ ID NO: 5692557 - DNA, 25 bp, Homo sapien
agaagtgttgctagaaccaccatcc

SEQ ID NO: 5692558 - DNA, 25 bp, Homo sapien
ccaccatcctgagcaaggtgcttgt

SEQ ID NO: 5692559 - DNA, 25 bp, Homo sapien
tagagaagtgttgctagaaccacca

SEQ ID NO: 5692560 - DNA, 25 bp, Homo sapien
caaaagtgtagagaagtgttgctag

SEQ ID NO: 5692561 - DNA, 25 bp, Homo sapien
caggagtaactcagttacagaagac

SEQ ID NO: 5692562 - DNA, 25 bp, Homo sapien
tgaattagtggaagacaggagtaac

SEQ ID NO: 5692563 - DNA, 25 bp, Homo sapien
gtgtattttactccactaccgtgaa

SEQ ID NO: 5692564 - DNA, 25 bp, Homo sapien
tactccactaccgtgaattgaggcc

SEQ ID NO: 5692565 - DNA, 25 bp, Homo sapien
taactcagttacagaagacagagta

SEQ ID NO: 5692566 - DNA, 25 bp, Homo sapien
ccactaccgtgaattgaggcctttg

SEQ ID NO: 5692567 - DNA, 25 bp, Homo sapien
tactctgtcttctgtaactgagtta

SEQ ID NO: 5692568 - DNA, 25 bp, Homo sapien
caaaggcctcaattcacggtagtgg

SEQ ID NO: 5692569 - DNA, 25 bp, Homo sapien
gtcttctgtaactgagttactcctg

SEQ ID NO: 5692570 - DNA, 25 bp, Homo sapien
ttcacggtagtggagtaaaatacac

SEQ ID NO: 5692571 - DNA, 25 bp, Homo sapien
ggcctcaattcacggtagtggagta

SEQ ID NO: 5692572 - DNA, 25 bp, Homo sapien
gttactcctgtcttccactaattca

SEQ ID NO: 5692573 - DNA, 25 bp, Homo sapien
aaatactctgtcactcatgagaaca

SEQ ID NO: 5692574 - DNA, 25 bp, Homo sapien
gagaacagtgattcccaatcttctc

SEQ ID NO: 5692575 - DNA, 25 bp, Homo sapien
gaaaatactctgtcactcatgagaa

SEQ ID NO: 5692576 - DNA, 25 bp, Homo sapien
catgagaacagtgattcccaatctt

SEQ ID NO: 5692577 - DNA, 25 bp, Homo sapien
aacagtgattcccaatcttctctga

SEQ ID NO: 5692578 - DNA, 25 bp, Homo sapien
tgagaacagtgattcccaatcttct

SEQ ID NO: 5692579 - DNA, 25 bp, Homo sapien
aagattgggaatcactgttctcatg

SEQ ID NO: 5692580 - DNA, 25 bp, Homo sapien
tcagagaagattgggaatcactgtt

SEQ ID NO: 5692581 - DNA, 25 bp, Homo sapien
ttctcatgagtgacagagtattttc

SEQ ID NO: 5692582 - DNA, 25 bp, Homo sapien
tgttctcatgagtgacagagtattt

SEQ ID NO: 5692583 - DNA, 25 bp, Homo sapien
agaagattgggaatcactgttctca

SEQ ID NO: 5692584 - DNA, 25 bp, Homo sapien
gagaagattgggaatcactgttctc

SEQ ID NO: 5692585 - DNA, 25 bp, Homo sapien
cagagtatcaggcatgagaaatgag

SEQ ID NO: 5692586 - DNA, 25 bp, Homo sapien
ctagaatttgtcttgaacagcatag

SEQ ID NO: 5692587 - DNA, 25 bp, Homo sapien
aactaaatcatcagagtatcaggca

SEQ ID NO: 5692588 - DNA, 25 bp, Homo sapien
gagtatcaggcatgagaaatgagag

SEQ ID NO: 5692589 - DNA, 25 bp, Homo sapien
aatcatcagagtatcaggcatgaga

SEQ ID NO: 5692590 - DNA, 25 bp, Homo sapien
tcctagaatttgtcttgaacagcat

SEQ ID NO: 5692591 - DNA, 25 bp, Homo sapien
tatgctgttcaagacaaattctagg

SEQ ID NO: 5692592 - DNA, 25 bp, Homo sapien
ctctcatttctcatgcctgatactc

SEQ ID NO: 5692593 - DNA, 25 bp, Homo sapien
catgcctgatactctgatgatttag

SEQ ID NO: 5692594 - DNA, 25 bp, Homo sapien
ctatgctgttcaagacaaattctag

SEQ ID NO: 5692595 - DNA, 25 bp, Homo sapien
catttctcatgcctgatactctgat

SEQ ID NO: 5692596 - DNA, 25 bp, Homo sapien
ttctcatgcctgatactctgatgat

SEQ ID NO: 5692597 - DNA, 25 bp, Homo sapien
tagttaactttcaaaataccagaga

SEQ ID NO: 5692598 - DNA, 25 bp, Homo sapien
tgcagtccagtcaaagcctatggtg

SEQ ID NO: 5692599 - DNA, 25 bp, Homo sapien
agaaaaaaacatcgtgcagtccagt

SEQ ID NO: 5692600 - DNA, 25 bp, Homo sapien
cagtcaaagcctatggtgtttggtt

SEQ ID NO: 5692601 - DNA, 25 bp, Homo sapien
cagtccagtcaaagcctatggtgtt

SEQ ID NO: 5692602 - DNA, 25 bp, Homo sapien
ggaaattcacatagttaactttcaa

SEQ ID NO: 5692603 - DNA, 25 bp, Homo sapien
caccataggctttgactggactgca

SEQ ID NO: 5692604 - DNA, 25 bp, Homo sapien
aaccaaacaccataggctttgactg

SEQ ID NO: 5692605 - DNA, 25 bp, Homo sapien
aaacaccataggctttgactggact

SEQ ID NO: 5692606 - DNA, 25 bp, Homo sapien
tctctggtattttgaaagttaacta

SEQ ID NO: 5692607 - DNA, 25 bp, Homo sapien
actggactgcacgatgtttttttct

SEQ ID NO: 5692608 - DNA, 25 bp, Homo sapien
ttgaaagttaactatgtgaatttcc

SEQ ID NO: 5692609 - DNA, 25 bp, Homo sapien
atggtgtgaacctggaaagtggagc

SEQ ID NO: 5692610 - DNA, 25 bp, Homo sapien
tgtgaacctggaaagtggagcttgc

SEQ ID NO: 5692611 - DNA, 25 bp, Homo sapien
gtgaacctggaaagtggagcttgca

SEQ ID NO: 5692612 - DNA, 25 bp, Homo sapien
tggtgtgaacctggaaagtggagct

SEQ ID NO: 5692613 - DNA, 25 bp, Homo sapien
ggtgtgaacctggaaagtggagctt

SEQ ID NO: 5692614 - DNA, 25 bp, Homo sapien
tgaacctggaaagtggagcttgcag

SEQ ID NO: 5692615 - DNA, 25 bp, Homo sapien
aagctccactttccaggttcacacc

SEQ ID NO: 5692616 - DNA, 25 bp, Homo sapien
ctgcaagctccactttccaggttca

SEQ ID NO: 5692617 - DNA, 25 bp, Homo sapien
gctccactttccaggttcacaccat

SEQ ID NO: 5692618 - DNA, 25 bp, Homo sapien
agctccactttccaggttcacacca

SEQ ID NO: 5692619 - DNA, 25 bp, Homo sapien
tgcaagctccactttccaggttcac

SEQ ID NO: 5692620 - DNA, 25 bp, Homo sapien
gcaagctccactttccaggttcaca

SEQ ID NO: 5692621 - DNA, 25 bp, Homo sapien
aaaaattagcttagctggtcgtcgt

SEQ ID NO: 5692622 - DNA, 25 bp, Homo sapien
aaattagcttagctggtcgtcgtgg

SEQ ID NO: 5692623 - DNA, 25 bp, Homo sapien
aaaattagcttagctggtcgtcgtg

SEQ ID NO: 5692624 - DNA, 25 bp, Homo sapien
ccacgacgaccagctaagctaattt

SEQ ID NO: 5692625 - DNA, 25 bp, Homo sapien
acgacgaccagctaagctaattttt

SEQ ID NO: 5692626 - DNA, 25 bp, Homo sapien
cacgacgaccagctaagctaatttt

SEQ ID NO: 5692627 - DNA, 25 bp, Homo sapien
attagcttagctggtcgtcgtggcg

SEQ ID NO: 5692628 - DNA, 25 bp, Homo sapien
aattagcttagctggtcgtcgtggc

SEQ ID NO: 5692629 - DNA, 25 bp, Homo sapien
aaaaattagcttagctggtcgtcgt

SEQ ID NO: 5692630 - DNA, 25 bp, Homo sapien
gctggtcgtcgtggcgggtgcatgt

SEQ ID NO: 5692631 - DNA, 25 bp, Homo sapien
aaaattagcttagctggtcgtcgtg

SEQ ID NO: 5692632 - DNA, 25 bp, Homo sapien
aaattagcttagctggtcgtcgtgg

SEQ ID NO: 5692633 - DNA, 25 bp, Homo sapien
acgacgaccagctaagctaattttt

SEQ ID NO: 5692634 - DNA, 25 bp, Homo sapien
ccacgacgaccagctaagctaattt

SEQ ID NO: 5692635 - DNA, 25 bp, Homo sapien
cgccacgacgaccagctaagctaat

SEQ ID NO: 5692636 - DNA, 25 bp, Homo sapien
ccgccacgacgaccagctaagctaa

SEQ ID NO: 5692637 - DNA, 25 bp, Homo sapien
gccacgacgaccagctaagctaatt

SEQ ID NO: 5692638 - DNA, 25 bp, Homo sapien
cacgacgaccagctaagctaatttt

SEQ ID NO: 5692639 - DNA, 25 bp, Homo sapien
gtgcagtccaggctggacacggtgg

SEQ ID NO: 5692640 - DNA, 25 bp, Homo sapien
atagtgcagtccaggctggacacgg

SEQ ID NO: 5692641 - DNA, 25 bp, Homo sapien
acatagtgcagtccaggctggacac

SEQ ID NO: 5692642 - DNA, 25 bp, Homo sapien
tagtgcagtccaggctggacacggt

SEQ ID NO: 5692643 - DNA, 25 bp, Homo sapien
agtgcagtccaggctggacacggtg

SEQ ID NO: 5692644 - DNA, 25 bp, Homo sapien
catagtgcagtccaggctggacacg

SEQ ID NO: 5692645 - DNA, 25 bp, Homo sapien
ccgtgtccagcctggactgcactat

SEQ ID NO: 5692646 - DNA, 25 bp, Homo sapien
accgtgtccagcctggactgcacta

SEQ ID NO: 5692647 - DNA, 25 bp, Homo sapien
caccgtgtccagcctggactgcact

SEQ ID NO: 5692648 - DNA, 25 bp, Homo sapien
ccaccgtgtccagcctggactgcac

SEQ ID NO: 5692649 - DNA, 25 bp, Homo sapien
gtgtccagcctggactgcactatgt

SEQ ID NO: 5692650 - DNA, 25 bp, Homo sapien
cgtgtccagcctggactgcactatg

SEQ ID NO: 5692651 - DNA, 25 bp, Homo sapien
tgttccgagtcattcatgatgatgt

SEQ ID NO: 5692652 - DNA, 25 bp, Homo sapien
tcaggtacagtagaagttgctcttc

SEQ ID NO: 5692653 - DNA, 25 bp, Homo sapien
gtagaagttgctcttctgttccgag

SEQ ID NO: 5692654 - DNA, 25 bp, Homo sapien
cttaacccgtcaggtacagtagaag

SEQ ID NO: 5692655 - DNA, 25 bp, Homo sapien
tcttctgttccgagtcattcatgat

SEQ ID NO: 5692656 - DNA, 25 bp, Homo sapien
cccgtcaggtacagtagaagttgct

SEQ ID NO: 5692657 - DNA, 25 bp, Homo sapien
gaagagcaacttctactgtacctga

SEQ ID NO: 5692658 - DNA, 25 bp, Homo sapien
gagcaacttctactgtacctgacgg

SEQ ID NO: 5692659 - DNA, 25 bp, Homo sapien
cttctactgtacctgacgggttaag

SEQ ID NO: 5692660 - DNA, 25 bp, Homo sapien
tcatcatgaatgactcggaacagaa

SEQ ID NO: 5692661 - DNA, 25 bp, Homo sapien
tcggaacagaagagcaacttctact

SEQ ID NO: 5692662 - DNA, 25 bp, Homo sapien
aacatcatcatgaatgactcggaac

SEQ ID NO: 5692663 - DNA, 25 bp, Homo sapien
tgttccgagtcattcatgatgatgt

SEQ ID NO: 5692664 - DNA, 25 bp, Homo sapien
ctgttccgagtcattcatgatgatg

SEQ ID NO: 5692665 - DNA, 25 bp, Homo sapien
gttccgagtcattcatgatgatgtt

SEQ ID NO: 5692666 - DNA, 25 bp, Homo sapien
tctgttccgagtcattcatgatgat

SEQ ID NO: 5692667 - DNA, 25 bp, Homo sapien
atcatcatgaatgactcggaacaga

SEQ ID NO: 5692668 - DNA, 25 bp, Homo sapien
acatcatcatgaatgactcggaaca

SEQ ID NO: 5692669 - DNA, 25 bp, Homo sapien
aacatcatcatgaatgactcggaac

SEQ ID NO: 5692670 - DNA, 25 bp, Homo sapien
catcatcatgaatgactcggaacag

SEQ ID NO: 5692671 - DNA, 25 bp, Homo sapien
tatgcctgggtcaaccgctcttcca

SEQ ID NO: 5692672 - DNA, 25 bp, Homo sapien
tgcctgggtcaaccgctcttccatg

SEQ ID NO: 5692673 - DNA, 25 bp, Homo sapien
aactatgcctgggtcaaccgctctt

SEQ ID NO: 5692674 - DNA, 25 bp, Homo sapien
actatgcctgggtcaaccgctcttc

SEQ ID NO: 5692675 - DNA, 25 bp, Homo sapien
ctatgcctgggtcaaccgctcttcc

SEQ ID NO: 5692676 - DNA, 25 bp, Homo sapien
cagctgctgggaactatgcctgggt

SEQ ID NO: 5692677 - DNA, 25 bp, Homo sapien
ggaagagcggttgacccaggcatag

SEQ ID NO: 5692678 - DNA, 25 bp, Homo sapien
acccaggcatagttcccagcagctg

SEQ ID NO: 5692679 - DNA, 25 bp, Homo sapien
catggaagagcggttgacccaggca

SEQ ID NO: 5692680 - DNA, 25 bp, Homo sapien
gaagagcggttgacccaggcatagt

SEQ ID NO: 5692681 - DNA, 25 bp, Homo sapien
tggaagagcggttgacccaggcata

SEQ ID NO: 5692682 - DNA, 25 bp, Homo sapien
aagagcggttgacccaggcatagtt

SEQ ID NO: 5692683 - DNA, 25 bp, Homo sapien
cattcccctgagtacttctctgcat

SEQ ID NO: 5692684 - DNA, 25 bp, Homo sapien
attttgctactactattcccatgca

SEQ ID NO: 5692685 - DNA, 25 bp, Homo sapien
tttcagaacattcccctgagtactt

SEQ ID NO: 5692686 - DNA, 25 bp, Homo sapien
acattcccctgagtacttctctgca

SEQ ID NO: 5692687 - DNA, 25 bp, Homo sapien
tgtttcagaacattcccctgagtac

SEQ ID NO: 5692688 - DNA, 25 bp, Homo sapien
gaacattcccctgagtacttctctg

SEQ ID NO: 5692689 - DNA, 25 bp, Homo sapien
cagagaagtactcaggggaatgttc

SEQ ID NO: 5692690 - DNA, 25 bp, Homo sapien
gagaagtactcaggggaatgttctg

SEQ ID NO: 5692691 - DNA, 25 bp, Homo sapien
atgcagagaagtactcaggggaatg

SEQ ID NO: 5692692 - DNA, 25 bp, Homo sapien
tgcatgggaatagtagtagcaaaat

SEQ ID NO: 5692693 - DNA, 25 bp, Homo sapien
tgcagagaagtactcaggggaatgt

SEQ ID NO: 5692694 - DNA, 25 bp, Homo sapien
gtactcaggggaatgttctgaaaca

SEQ ID NO: 5692695 - DNA, 25 bp, Homo sapien
cattttgttgccttcatgattaatc

SEQ ID NO: 5692696 - DNA, 25 bp, Homo sapien
tgcatgggaatagtagtagcaaaat

SEQ ID NO: 5692697 - DNA, 25 bp, Homo sapien
acaaaatgcagagaagtactcaggg

SEQ ID NO: 5692698 - DNA, 25 bp, Homo sapien
taatcaaatccatgacaaaatgcag

SEQ ID NO: 5692699 - DNA, 25 bp, Homo sapien
gccttcatgattaatcaaatccatg

SEQ ID NO: 5692700 - DNA, 25 bp, Homo sapien
gtactcaggggaatgttctgaaaca

SEQ ID NO: 5692701 - DNA, 25 bp, Homo sapien
ctccaacagcgaatcaatgaaaagg

SEQ ID NO: 5692702 - DNA, 25 bp, Homo sapien
ccaacagcgaatcaatgaaaaggta

SEQ ID NO: 5692703 - DNA, 25 bp, Homo sapien
tcaatgaaaaggtatatagatgcct

SEQ ID NO: 5692704 - DNA, 25 bp, Homo sapien
aatgaaaaggtatatagatgcctgg

SEQ ID NO: 5692705 - DNA, 25 bp, Homo sapien
cagcgaatcaatgaaaaggtatata

SEQ ID NO: 5692706 - DNA, 25 bp, Homo sapien
gcctccaacagcgaatcaatgaaaa

SEQ ID NO: 5692707 - DNA, 25 bp, Homo sapien
ttttcattgattcgctgttggaggc

SEQ ID NO: 5692708 - DNA, 25 bp, Homo sapien
taccttttcattgattcgctgttgg

SEQ ID NO: 5692709 - DNA, 25 bp, Homo sapien
tctatataccttttcattgattcgc

SEQ ID NO: 5692710 - DNA, 25 bp, Homo sapien
tatataccttttcattgattcgctg

SEQ ID NO: 5692711 - DNA, 25 bp, Homo sapien
ccttttcattgattcgctgttggag

SEQ ID NO: 5692712 - DNA, 25 bp, Homo sapien
caggcatctatataccttttcattg

SEQ ID NO: 5692713 - DNA, 25 bp, Homo sapien
ggtaactattggtcagctgcttgat

SEQ ID NO: 5692714 - DNA, 25 bp, Homo sapien
gtatttattgggtagaaagagcagg

SEQ ID NO: 5692715 - DNA, 25 bp, Homo sapien
gctgcttgattgatcccaggttcat

SEQ ID NO: 5692716 - DNA, 25 bp, Homo sapien
gaggtaactattggtcagctgcttg

SEQ ID NO: 5692717 - DNA, 25 bp, Homo sapien
tccacagccctttgtatttattggg

SEQ ID NO: 5692718 - DNA, 25 bp, Homo sapien
tgatcccaggttcatattattgcta

SEQ ID NO: 5692719 - DNA, 25 bp, Homo sapien
taatatgaacctgggatcaatcaag

SEQ ID NO: 5692720 - DNA, 25 bp, Homo sapien
tagcaataatatgaacctgggatca

SEQ ID NO: 5692721 - DNA, 25 bp, Homo sapien
cctgctctttctacccaataaatac

SEQ ID NO: 5692722 - DNA, 25 bp, Homo sapien
tatgaacctgggatcaatcaagcag

SEQ ID NO: 5692723 - DNA, 25 bp, Homo sapien
tcaagcagctgaccaatagttacct

SEQ ID NO: 5692724 - DNA, 25 bp, Homo sapien
caataaatacaaagggctgtggaag

SEQ ID NO: 5692725 - DNA, 25 bp, Homo sapien
gataggtccttttggatagcttgga

SEQ ID NO: 5692726 - DNA, 25 bp, Homo sapien
gcaggaagcagcgaaatattggata

SEQ ID NO: 5692727 - DNA, 25 bp, Homo sapien
gcagcgaaatattggataggtcctt

SEQ ID NO: 5692728 - DNA, 25 bp, Homo sapien
tattggataggtccttttggatagc

SEQ ID NO: 5692729 - DNA, 25 bp, Homo sapien
aattacacacaaagactggtgacaa

SEQ ID NO: 5692730 - DNA, 25 bp, Homo sapien
aagcagcgaaatattggataggtcc

SEQ ID NO: 5692731 - DNA, 25 bp, Homo sapien
aaaggacctatccaatatttcgctg

SEQ ID NO: 5692732 - DNA, 25 bp, Homo sapien
tatccaatatttcgctgcttcctgc

SEQ ID NO: 5692733 - DNA, 25 bp, Homo sapien
tccaagctatccaaaaggacctatc

SEQ ID NO: 5692734 - DNA, 25 bp, Homo sapien
ttgtcaccagtctttgtgtgtaatt

SEQ ID NO: 5692735 - DNA, 25 bp, Homo sapien
ggacctatccaatatttcgctgctt

SEQ ID NO: 5692736 - DNA, 25 bp, Homo sapien
caagctatccaaaaggacctatcca

SEQ ID NO: 5692737 - DNA, 25 bp, Homo sapien
ctctgcaacagtagatgtgatggtg

SEQ ID NO: 5692738 - DNA, 25 bp, Homo sapien
cagtagatgtgatggtggatttgct

SEQ ID NO: 5692739 - DNA, 25 bp, Homo sapien
tgatggtggatttgctgatgaaaga

SEQ ID NO: 5692740 - DNA, 25 bp, Homo sapien
gcaacagtagatgtgatggtggatt

SEQ ID NO: 5692741 - DNA, 25 bp, Homo sapien
ctcaaattgtctcatgaagtaaagg

SEQ ID NO: 5692742 - DNA, 25 bp, Homo sapien
tatgtatcatatacctgctctgcaa

SEQ ID NO: 5692743 - DNA, 25 bp, Homo sapien
gcaaatccaccatcacatctactgt

SEQ ID NO: 5692744 - DNA, 25 bp, Homo sapien
tgcagagcaggtatatgatacataa

SEQ ID NO: 5692745 - DNA, 25 bp, Homo sapien
ttcatcagcaaatccaccatcacat

SEQ ID NO: 5692746 - DNA, 25 bp, Homo sapien
tctttcatcagcaaatccaccatca

SEQ ID NO: 5692747 - DNA, 25 bp, Homo sapien
caccatcacatctactgttgcagag

SEQ ID NO: 5692748 - DNA, 25 bp, Homo sapien
cctttacttcatgagacaatttgag

SEQ ID NO: 5692749 - DNA, 25 bp, Homo sapien
catatagaattatcatggaaagtta

SEQ ID NO: 5692750 - DNA, 25 bp, Homo sapien
tatgtaaagcacttaatgtttgaca

SEQ ID NO: 5692751 - DNA, 25 bp, Homo sapien
cataactttcttgtctaaaaaaatg

SEQ ID NO: 5692752 - DNA, 25 bp, Homo sapien
tatcatggaaagttaataatatatg

SEQ ID NO: 5692753 - DNA, 25 bp, Homo sapien
gagtataatagttatttcatataga

SEQ ID NO: 5692754 - DNA, 25 bp, Homo sapien
gttatttcatatagaattatcatgg

SEQ ID NO: 5692755 - DNA, 25 bp, Homo sapien
ccatgataattctatatgaaataac

SEQ ID NO: 5692756 - DNA, 25 bp, Homo sapien
tgtcaaacattaagtgctttacata

SEQ ID NO: 5692757 - DNA, 25 bp, Homo sapien
catttttttagacaagaaagttatg

SEQ ID NO: 5692758 - DNA, 25 bp, Homo sapien
tctatatgaaataactattatactc

SEQ ID NO: 5692759 - DNA, 25 bp, Homo sapien
taactttccatgataattctatatg

SEQ ID NO: 5692760 - DNA, 25 bp, Homo sapien
tacatatattattaactttccatga

SEQ ID NO: 5692761 - DNA, 25 bp, Homo sapien
acacttctatagcttaggaattttt

SEQ ID NO: 5692762 - DNA, 25 bp, Homo sapien
cttctatagcttaggaatttttttg

SEQ ID NO: 5692763 - DNA, 25 bp, Homo sapien
aaacacttctatagcttaggaattt

SEQ ID NO: 5692764 - DNA, 25 bp, Homo sapien
aacacttctatagcttaggaatttt

SEQ ID NO: 5692765 - DNA, 25 bp, Homo sapien
cacttctatagcttaggaatttttt

SEQ ID NO: 5692766 - DNA, 25 bp, Homo sapien
caaaaaaattcctaagctatagaag

SEQ ID NO: 5692767 - DNA, 25 bp, Homo sapien
aaaaattcctaagctatagaagtgt

SEQ ID NO: 5692768 - DNA, 25 bp, Homo sapien
aaaattcctaagctatagaagtgtt

SEQ ID NO: 5692769 - DNA, 25 bp, Homo sapien
aaaaaattcctaagctatagaagtg

SEQ ID NO: 5692770 - DNA, 25 bp, Homo sapien
aaattcctaagctatagaagtgttt

SEQ ID NO: 5692771 - DNA, 25 bp, Homo sapien
cttctatagcttaggaatttttttg

SEQ ID NO: 5692772 - DNA, 25 bp, Homo sapien
ttgttactgaaacactatttgtatg

SEQ ID NO: 5692773 - DNA, 25 bp, Homo sapien
aaacacttctatagcttaggaattt

SEQ ID NO: 5692774 - DNA, 25 bp, Homo sapien
aacacttctatagcttaggaatttt

SEQ ID NO: 5692775 - DNA, 25 bp, Homo sapien
tactgaaacactatttgtatgttta

SEQ ID NO: 5692776 - DNA, 25 bp, Homo sapien
cacttctatagcttaggaatttttt

SEQ ID NO: 5692777 - DNA, 25 bp, Homo sapien
caaaaaaattcctaagctatagaag

SEQ ID NO: 5692778 - DNA, 25 bp, Homo sapien
taaacatacaaatagtgtttcagta

SEQ ID NO: 5692779 - DNA, 25 bp, Homo sapien
aaaaattcctaagctatagaagtgt

SEQ ID NO: 5692780 - DNA, 25 bp, Homo sapien
aaaaaattcctaagctatagaagtg

SEQ ID NO: 5692781 - DNA, 25 bp, Homo sapien
catacaaatagtgtttcagtaacaa

SEQ ID NO: 5692782 - DNA, 25 bp, Homo sapien
aaattcctaagctatagaagtgttt

SEQ ID NO: 5692783 - DNA, 25 bp, Homo sapien
gatacatgtgctggtttgtgacata

SEQ ID NO: 5692784 - DNA, 25 bp, Homo sapien
gggatacatgtgctggtttgtgaca

SEQ ID NO: 5692785 - DNA, 25 bp, Homo sapien
tacatgtgctggtttgtgacatagg

SEQ ID NO: 5692786 - DNA, 25 bp, Homo sapien
ctggtttgtgacataggtatacatt

SEQ ID NO: 5692787 - DNA, 25 bp, Homo sapien
atacatgtgctggtttgtgacatag

SEQ ID NO: 5692788 - DNA, 25 bp, Homo sapien
tggtttgtgacataggtatacattt

SEQ ID NO: 5692789 - DNA, 25 bp, Homo sapien
aaatgtatacctatgtcacaaacca

SEQ ID NO: 5692790 - DNA, 25 bp, Homo sapien
tatgtcacaaaccagcacatgtatc

SEQ ID NO: 5692791 - DNA, 25 bp, Homo sapien
cctatgtcacaaaccagcacatgta

SEQ ID NO: 5692792 - DNA, 25 bp, Homo sapien
tgtcacaaaccagcacatgtatccc

SEQ ID NO: 5692793 - DNA, 25 bp, Homo sapien
ctatgtcacaaaccagcacatgtat

SEQ ID NO: 5692794 - DNA, 25 bp, Homo sapien
aatgtatacctatgtcacaaaccag

SEQ ID NO: 5692795 - DNA, 25 bp, Homo sapien
tgtctaagagtcaacatttaccaac

SEQ ID NO: 5692796 - DNA, 25 bp, Homo sapien
gttggtaaatgttgactcttagaca

SEQ ID NO: 5692797 - DNA, 25 bp, Homo sapien
caacatttaccaacatttatcccaa

SEQ ID NO: 5692798 - DNA, 25 bp, Homo sapien
tgtctaagagtcaacatttaccaac

SEQ ID NO: 5692799 - DNA, 25 bp, Homo sapien
tcccaaaatttgactctttgtgatg

SEQ ID NO: 5692800 - DNA, 25 bp, Homo sapien
cccatgaaccatttaaaagcttgat

SEQ ID NO: 5692801 - DNA, 25 bp, Homo sapien
cttggaccttgtctaagagtcaaca

SEQ ID NO: 5692802 - DNA, 25 bp, Homo sapien
tgatgtttaaaatatcccatgaacc

SEQ ID NO: 5692803 - DNA, 25 bp, Homo sapien
tcaagcttttaaatggttcatggga

SEQ ID NO: 5692804 - DNA, 25 bp, Homo sapien
ggttcatgggatattttaaacatca

SEQ ID NO: 5692805 - DNA, 25 bp, Homo sapien
catcacaaagagtcaaattttggga

SEQ ID NO: 5692806 - DNA, 25 bp, Homo sapien
gttggtaaatgttgactcttagaca

SEQ ID NO: 5692807 - DNA, 25 bp, Homo sapien
tgttgactcttagacaaggtccaag

SEQ ID NO: 5692808 - DNA, 25 bp, Homo sapien
gataaatgttggtaaatgttgactc

SEQ ID NO: 5692809 - DNA, 25 bp, Homo sapien
taatattagctgtagttgtggtata

SEQ ID NO: 5692810 - DNA, 25 bp, Homo sapien
tattaatattagctgtagttgtggt

SEQ ID NO: 5692811 - DNA, 25 bp, Homo sapien
atgaactcatagatgtttcaaaatc

SEQ ID NO: 5692812 - DNA, 25 bp, Homo sapien
ctattaatattagctgtagttgtgg

SEQ ID NO: 5692813 - DNA, 25 bp, Homo sapien
tattagctgtagttgtggtatatgt

SEQ ID NO: 5692814 - DNA, 25 bp, Homo sapien
ttagctgtagttgtggtatatgttc

SEQ ID NO: 5692815 - DNA, 25 bp, Homo sapien
tataccacaactacagctaatatta

SEQ ID NO: 5692816 - DNA, 25 bp, Homo sapien
ccacaactacagctaatattaatag

SEQ ID NO: 5692817 - DNA, 25 bp, Homo sapien
gaacatataccacaactacagctaa

SEQ ID NO: 5692818 - DNA, 25 bp, Homo sapien
gattttgaaacatctatgagttcat

SEQ ID NO: 5692819 - DNA, 25 bp, Homo sapien
cacaactacagctaatattaataga

SEQ ID NO: 5692820 - DNA, 25 bp, Homo sapien
taccacaactacagctaatattaat

SEQ ID NO: 5692821 - DNA, 25 bp, Homo sapien
gaactcatagatgtttcaaaatcat

SEQ ID NO: 5692822 - DNA, 25 bp, Homo sapien
gtagttgtggtatatgttctttcag

SEQ ID NO: 5692823 - DNA, 25 bp, Homo sapien
tggtggatgtccatgaactcataga

SEQ ID NO: 5692824 - DNA, 25 bp, Homo sapien
cagttataaataatggtggatgtcc

SEQ ID NO: 5692825 - DNA, 25 bp, Homo sapien
ctattaatattagctgtagttgtgg

SEQ ID NO: 5692826 - DNA, 25 bp, Homo sapien
ttagctgtagttgtggtatatgttc

SEQ ID NO: 5692827 - DNA, 25 bp, Homo sapien
aactaggcaacctctaaagactctt

SEQ ID NO: 5692828 - DNA, 25 bp, Homo sapien
aaactaggcaacctctaaagactct

SEQ ID NO: 5692829 - DNA, 25 bp, Homo sapien
taggcaacctctaaagactcttcca

SEQ ID NO: 5692830 - DNA, 25 bp, Homo sapien
actaggcaacctctaaagactcttc

SEQ ID NO: 5692831 - DNA, 25 bp, Homo sapien
ttcttatggaaaactgggatggtta

SEQ ID NO: 5692832 - DNA, 25 bp, Homo sapien
tcttatggaaaactgggatggttaa

SEQ ID NO: 5692833 - DNA, 25 bp, Homo sapien
aagagtctttagaggttgcctagtt

SEQ ID NO: 5692834 - DNA, 25 bp, Homo sapien
ggaagagtctttagaggttgcctag

SEQ ID NO: 5692835 - DNA, 25 bp, Homo sapien
ttaaccatcccagttttccataaga

SEQ ID NO: 5692836 - DNA, 25 bp, Homo sapien
gaagagtctttagaggttgcctagt

SEQ ID NO: 5692837 - DNA, 25 bp, Homo sapien
taaccatcccagttttccataagaa

SEQ ID NO: 5692838 - DNA, 25 bp, Homo sapien
tggaagagtctttagaggttgccta

SEQ ID NO: 5692839 - DNA, 25 bp, Homo sapien
gaaattacagctagttgtgaaggct

SEQ ID NO: 5692840 - DNA, 25 bp, Homo sapien
ctacagatggtatccatgagataag

SEQ ID NO: 5692841 - DNA, 25 bp, Homo sapien
tgaaattacagctagttgtgaaggc

SEQ ID NO: 5692842 - DNA, 25 bp, Homo sapien
cagatggtatccatgagataagaat

SEQ ID NO: 5692843 - DNA, 25 bp, Homo sapien
aattacagctagttgtgaaggcttt

SEQ ID NO: 5692844 - DNA, 25 bp, Homo sapien
tgtttgaaattacagctagttgtga

SEQ ID NO: 5692845 - DNA, 25 bp, Homo sapien
tcttatctcatggataccatctgta

SEQ ID NO: 5692846 - DNA, 25 bp, Homo sapien
gccttcacaactagctgtaatttca

SEQ ID NO: 5692847 - DNA, 25 bp, Homo sapien
cttatctcatggataccatctgtag

SEQ ID NO: 5692848 - DNA, 25 bp, Homo sapien
tcacaactagctgtaatttcaaaca

SEQ ID NO: 5692849 - DNA, 25 bp, Homo sapien
aaagccttcacaactagctgtaatt

SEQ ID NO: 5692850 - DNA, 25 bp, Homo sapien
attcttatctcatggataccatctg

SEQ ID NO: 5692851 - DNA, 25 bp, Homo sapien
tatcaggttcatacgtcaaaattac

SEQ ID NO: 5692852 - DNA, 25 bp, Homo sapien
atcaggttcatacgtcaaaattaca

SEQ ID NO: 5692853 - DNA, 25 bp, Homo sapien
tcaggttcatacgtcaaaattacat

SEQ ID NO: 5692854 - DNA, 25 bp, Homo sapien
atgtaattttgacgtatgaacctga

SEQ ID NO: 5692855 - DNA, 25 bp, Homo sapien
gtaattttgacgtatgaacctgata

SEQ ID NO: 5692856 - DNA, 25 bp, Homo sapien
tgtaattttgacgtatgaacctgat

SEQ ID NO: 5692857 - DNA, 25 bp, Homo sapien
tatcaggttcatacgtcaaaattac

SEQ ID NO: 5692858 - DNA, 25 bp, Homo sapien
gaatgggagaaaaatagaatatgtt

SEQ ID NO: 5692859 - DNA, 25 bp, Homo sapien
atcaggttcatacgtcaaaattaca

SEQ ID NO: 5692860 - DNA, 25 bp, Homo sapien
tcaggttcatacgtcaaaattacat

SEQ ID NO: 5692861 - DNA, 25 bp, Homo sapien
taatgaattagaagtgaatgggaga

SEQ ID NO: 5692862 - DNA, 25 bp, Homo sapien
agaatatgtttatcaggttcatacg

SEQ ID NO: 5692863 - DNA, 25 bp, Homo sapien
atgtaattttgacgtatgaacctga

SEQ ID NO: 5692864 - DNA, 25 bp, Homo sapien
gtaattttgacgtatgaacctgata

SEQ ID NO: 5692865 - DNA, 25 bp, Homo sapien
tctcccattcacttctaattcatta

SEQ ID NO: 5692866 - DNA, 25 bp, Homo sapien
tgtaattttgacgtatgaacctgat

SEQ ID NO: 5692867 - DNA, 25 bp, Homo sapien
catattctatttttctcccattcac

SEQ ID NO: 5692868 - DNA, 25 bp, Homo sapien
cgtatgaacctgataaacatattct

SEQ ID NO: 5692869 - DNA, 25 bp, Homo sapien
gctcacaccagctttgagaggccaa

SEQ ID NO: 5692870 - DNA, 25 bp, Homo sapien
gtggctcacaccagctttgagaggc

SEQ ID NO: 5692871 - DNA, 25 bp, Homo sapien
ggctcacaccagctttgagaggcca

SEQ ID NO: 5692872 - DNA, 25 bp, Homo sapien
tggctcacaccagctttgagaggcc

SEQ ID NO: 5692873 - DNA, 25 bp, Homo sapien
cctgggcaacataagaagacttagt

SEQ ID NO: 5692874 - DNA, 25 bp, Homo sapien
ggtggctcacaccagctttgagagg

SEQ ID NO: 5692875 - DNA, 25 bp, Homo sapien
actaagtcttcttatgttgcccagg

SEQ ID NO: 5692876 - DNA, 25 bp, Homo sapien
ggcctctcaaagctggtgtgagcca

SEQ ID NO: 5692877 - DNA, 25 bp, Homo sapien
tctcaaagctggtgtgagccaccgc

SEQ ID NO: 5692878 - DNA, 25 bp, Homo sapien
tggcctctcaaagctggtgtgagcc

SEQ ID NO: 5692879 - DNA, 25 bp, Homo sapien
cttggcctctcaaagctggtgtgag

SEQ ID NO: 5692880 - DNA, 25 bp, Homo sapien
gcctctcaaagctggtgtgagccac

SEQ ID NO: 5692881 - DNA, 25 bp, Homo sapien
acatttagcaaacatattcccaggt

SEQ ID NO: 5692882 - DNA, 25 bp, Homo sapien
catttagcaaacatattcccaggtt

SEQ ID NO: 5692883 - DNA, 25 bp, Homo sapien
tacatttagcaaacatattcccagg

SEQ ID NO: 5692884 - DNA, 25 bp, Homo sapien
tcttacatttagcaaacatattccc

SEQ ID NO: 5692885 - DNA, 25 bp, Homo sapien
tcccaggtttttttatggtatatca

SEQ ID NO: 5692886 - DNA, 25 bp, Homo sapien
atttagcaaacatattcccaggttt

SEQ ID NO: 5692887 - DNA, 25 bp, Homo sapien
acctgggaatatgtttgctaaatgt

SEQ ID NO: 5692888 - DNA, 25 bp, Homo sapien
cctgggaatatgtttgctaaatgta

SEQ ID NO: 5692889 - DNA, 25 bp, Homo sapien
gggaatatgtttgctaaatgtaaga

SEQ ID NO: 5692890 - DNA, 25 bp, Homo sapien
aacctgggaatatgtttgctaaatg

SEQ ID NO: 5692891 - DNA, 25 bp, Homo sapien
tgatataccataaaaaaacctggga

SEQ ID NO: 5692892 - DNA, 25 bp, Homo sapien
aaacctgggaatatgtttgctaaat

SEQ ID NO: 5692893 - DNA, 25 bp, Homo sapien
tcctcaggtaactcactttggaggg

SEQ ID NO: 5692894 - DNA, 25 bp, Homo sapien
cctcaggtaactcactttggagggg

SEQ ID NO: 5692895 - DNA, 25 bp, Homo sapien
ctttggaggggcaacatgttaattt

SEQ ID NO: 5692896 - DNA, 25 bp, Homo sapien
actttggaggggcaacatgttaatt

SEQ ID NO: 5692897 - DNA, 25 bp, Homo sapien
gggcgaagaaaagaggccttcctca

SEQ ID NO: 5692898 - DNA, 25 bp, Homo sapien
tgaggaaggcctcttttcttcgccc

SEQ ID NO: 5692899 - DNA, 25 bp, Homo sapien
cccctccaaagtgagttacctgagg

SEQ ID NO: 5692900 - DNA, 25 bp, Homo sapien
aattaacatgttgcccctccaaagt

SEQ ID NO: 5692901 - DNA, 25 bp, Homo sapien
aaattaacatgttgcccctccaaag

SEQ ID NO: 5692902 - DNA, 25 bp, Homo sapien
ccctccaaagtgagttacctgagga

SEQ ID NO: 5692903 - DNA, 25 bp, Homo sapien
ctttggaggggcaacatgttaattt

SEQ ID NO: 5692904 - DNA, 25 bp, Homo sapien
gccttcctcaggtaactcactttgg

SEQ ID NO: 5692905 - DNA, 25 bp, Homo sapien
tcctcaggtaactcactttggaggg

SEQ ID NO: 5692906 - DNA, 25 bp, Homo sapien
gggcgaagaaaagaggccttcctca

SEQ ID NO: 5692907 - DNA, 25 bp, Homo sapien
taactcactttggaggggcaacatg

SEQ ID NO: 5692908 - DNA, 25 bp, Homo sapien
caggtaactcactttggaggggcaa

SEQ ID NO: 5692909 - DNA, 25 bp, Homo sapien
cgaggagtacggaaggatgctgcag

SEQ ID NO: 5692910 - DNA, 25 bp, Homo sapien
agacaaggagcactgcgaggagtac

SEQ ID NO: 5692911 - DNA, 25 bp, Homo sapien
ctgaagacaaggagcactgcgagga

SEQ ID NO: 5692912 - DNA, 25 bp, Homo sapien
cactgcgaggagtacggaaggatgc

SEQ ID NO: 5692913 - DNA, 25 bp, Homo sapien
aaggagcactgcgaggagtacggaa

SEQ ID NO: 5692914 - DNA, 25 bp, Homo sapien
aagggtatgcctgggctgaagacaa

SEQ ID NO: 5692915 - DNA, 25 bp, Homo sapien
gtactcctcgcagtgctccttgtct

SEQ ID NO: 5692916 - DNA, 25 bp, Homo sapien
tcctcgcagtgctccttgtcttcag

SEQ ID NO: 5692917 - DNA, 25 bp, Homo sapien
ttgtcttcagcccaggcataccctt

SEQ ID NO: 5692918 - DNA, 25 bp, Homo sapien
gcatccttccgtactcctcgcagtg

SEQ ID NO: 5692919 - DNA, 25 bp, Homo sapien
tactcctcgcagtgctccttgtctt

SEQ ID NO: 5692920 - DNA, 25 bp, Homo sapien
ctgcagcatccttccgtactcctcg

SEQ ID NO: 5692921 - DNA, 25 bp, Homo sapien
tagcaccttttatacttatccagag

SEQ ID NO: 5692922 - DNA, 25 bp, Homo sapien
cttttatacttatccagagacttgg

SEQ ID NO: 5692923 - DNA, 25 bp, Homo sapien
tgagatgactagcaccttttatact

SEQ ID NO: 5692924 - DNA, 25 bp, Homo sapien
tttatacttatccagagacttggag

SEQ ID NO: 5692925 - DNA, 25 bp, Homo sapien
ctgtgagatgactagcaccttttat

SEQ ID NO: 5692926 - DNA, 25 bp, Homo sapien
gatgactagcaccttttatacttat

SEQ ID NO: 5692927 - DNA, 25 bp, Homo sapien
tggataagtataaaaggtgctagtc

SEQ ID NO: 5692928 - DNA, 25 bp, Homo sapien
tctctggataagtataaaaggtgct

SEQ ID NO: 5692929 - DNA, 25 bp, Homo sapien
ctccaagtctctggataagtataaa

SEQ ID NO: 5692930 - DNA, 25 bp, Homo sapien
ccaagtctctggataagtataaaag

SEQ ID NO: 5692931 - DNA, 25 bp, Homo sapien
tataaaaggtgctagtcatctcaca

SEQ ID NO: 5692932 - DNA, 25 bp, Homo sapien
taagtataaaaggtgctagtcatct

SEQ ID NO: 5692933 - DNA, 25 bp, Homo sapien
actaatactgaaatgggtctactct

SEQ ID NO: 5692934 - DNA, 25 bp, Homo sapien
ggaattttgtctactaatactgaaa

SEQ ID NO: 5692935 - DNA, 25 bp, Homo sapien
tgtctactaatactgaaatgggtct

SEQ ID NO: 5692936 - DNA, 25 bp, Homo sapien
tctactaatactgaaatgggtctac

SEQ ID NO: 5692937 - DNA, 25 bp, Homo sapien
tactaatactgaaatgggtctactc

SEQ ID NO: 5692938 - DNA, 25 bp, Homo sapien
gtctactaatactgaaatgggtcta

SEQ ID NO: 5692939 - DNA, 25 bp, Homo sapien
gagtagacccatttcagtattagta

SEQ ID NO: 5692940 - DNA, 25 bp, Homo sapien
gtagacccatttcagtattagtaga

SEQ ID NO: 5692941 - DNA, 25 bp, Homo sapien
tttcagtattagtagacaaaattcc

SEQ ID NO: 5692942 - DNA, 25 bp, Homo sapien
agacccatttcagtattagtagaca

SEQ ID NO: 5692943 - DNA, 25 bp, Homo sapien
tagacccatttcagtattagtagac

SEQ ID NO: 5692944 - DNA, 25 bp, Homo sapien
agagtagacccatttcagtattagt

SEQ ID NO: 5692945 - DNA, 25 bp, Homo sapien
tatacttggatgatgcgtggtctgt

SEQ ID NO: 5692946 - DNA, 25 bp, Homo sapien
tggtctgtgatttcacatgatccct

SEQ ID NO: 5692947 - DNA, 25 bp, Homo sapien
tacttggatgatgcgtggtctgtga

SEQ ID NO: 5692948 - DNA, 25 bp, Homo sapien
gatgatgcgtggtctgtgatttcac

SEQ ID NO: 5692949 - DNA, 25 bp, Homo sapien
gatgcgtggtctgtgatttcacatg

SEQ ID NO: 5692950 - DNA, 25 bp, Homo sapien
cttggatgatgcgtggtctgtgatt

SEQ ID NO: 5692951 - DNA, 25 bp, Homo sapien
catgtgaaatcacagaccacgcatc

SEQ ID NO: 5692952 - DNA, 25 bp, Homo sapien
agggatcatgtgaaatcacagacca

SEQ ID NO: 5692953 - DNA, 25 bp, Homo sapien
gatcatgtgaaatcacagaccacgc

SEQ ID NO: 5692954 - DNA, 25 bp, Homo sapien
tgtgaaatcacagaccacgcatcat

SEQ ID NO: 5692955 - DNA, 25 bp, Homo sapien
aatcacagaccacgcatcatccaag

SEQ ID NO: 5692956 - DNA, 25 bp, Homo sapien
acagaccacgcatcatccaagtata

SEQ ID NO: 5692957 - DNA, 25 bp, Homo sapien
catattaatggcgagaaactgcagg

SEQ ID NO: 5692958 - DNA, 25 bp, Homo sapien
gcaggtaacagtgccttaccagctg

SEQ ID NO: 5692959 - DNA, 25 bp, Homo sapien
tattaatggcgagaaactgcaggta

SEQ ID NO: 5692960 - DNA, 25 bp, Homo sapien
tctttatagttccatattaatggcg

SEQ ID NO: 5692961 - DNA, 25 bp, Homo sapien
tgcaggtaacagtgccttaccagct

SEQ ID NO: 5692962 - DNA, 25 bp, Homo sapien
tagttccatattaatggcgagaaac

SEQ ID NO: 5692963 - DNA, 25 bp, Homo sapien
gcagtttctcgccattaatatggaa

SEQ ID NO: 5692964 - DNA, 25 bp, Homo sapien
cagctggtaaggcactgttacctgc

SEQ ID NO: 5692965 - DNA, 25 bp, Homo sapien
tcgccattaatatggaactataaag

SEQ ID NO: 5692966 - DNA, 25 bp, Homo sapien
cctgcagtttctcgccattaatatg

SEQ ID NO: 5692967 - DNA, 25 bp, Homo sapien
tacctgcagtttctcgccattaata

SEQ ID NO: 5692968 - DNA, 25 bp, Homo sapien
agctggtaaggcactgttacctgca

SEQ ID NO: 5692969 - DNA, 25 bp, Homo sapien
ttacatgttactcaatgttcattgc

SEQ ID NO: 5692970 - DNA, 25 bp, Homo sapien
gttactttagattatcttggtgtca

SEQ ID NO: 5692971 - DNA, 25 bp, Homo sapien
tccataaagtgcctttagtgtgtat

SEQ ID NO: 5692972 - DNA, 25 bp, Homo sapien
tcccttgtccataaagtgcctttag

SEQ ID NO: 5692973 - DNA, 25 bp, Homo sapien
tgttactcaatgttcattgctgcct

SEQ ID NO: 5692974 - DNA, 25 bp, Homo sapien
tgctgcctcccttgtccataaagtg

SEQ ID NO: 5692975 - DNA, 25 bp, Homo sapien
gataatctaaagtaacatacacact

SEQ ID NO: 5692976 - DNA, 25 bp, Homo sapien
ggcagcaatgaacattgagtaacat

SEQ ID NO: 5692977 - DNA, 25 bp, Homo sapien
cactttatggacaagggaggcagca

SEQ ID NO: 5692978 - DNA, 25 bp, Homo sapien
tgacaccaagataatctaaagtaac

SEQ ID NO: 5692979 - DNA, 25 bp, Homo sapien
taaaggcactttatggacaagggag

SEQ ID NO: 5692980 - DNA, 25 bp, Homo sapien
cacactaaaggcactttatggacaa

SEQ ID NO: 5692981 - DNA, 25 bp, Homo sapien
tgttatagaaaggaccaagaaacgc

SEQ ID NO: 5692982 - DNA, 25 bp, Homo sapien
gactgaaaaaattcatgaacctgtg

SEQ ID NO: 5692983 - DNA, 25 bp, Homo sapien
ggaaagatatgttatagaaaggacc

SEQ ID NO: 5692984 - DNA, 25 bp, Homo sapien
tatagaaaggaccaagaaacgcaaa

SEQ ID NO: 5692985 - DNA, 25 bp, Homo sapien
aattagtgaaatggaaagatatgtt

SEQ ID NO: 5692986 - DNA, 25 bp, Homo sapien
aaattcatgaacctgtgaaaacagt

SEQ ID NO: 5692987 - DNA, 25 bp, Homo sapien
cacaggttcatgaattttttcagtc

SEQ ID NO: 5692988 - DNA, 25 bp, Homo sapien
tcttggtcctttctataacatatct

SEQ ID NO: 5692989 - DNA, 25 bp, Homo sapien
gcgtttcttggtcctttctataaca

SEQ ID NO: 5692990 - DNA, 25 bp, Homo sapien
taacatatctttccatttcactaat

SEQ ID NO: 5692991 - DNA, 25 bp, Homo sapien
actgttttcacaggttcatgaattt

SEQ ID NO: 5692992 - DNA, 25 bp, Homo sapien
tttgcgtttcttggtcctttctata

SEQ ID NO: 5692993 - DNA, 25 bp, Homo sapien
tatcagtgaccctagaaagcacaac

SEQ ID NO: 5692994 - DNA, 25 bp, Homo sapien
gaaagcacaacaaattataccctaa

SEQ ID NO: 5692995 - DNA, 25 bp, Homo sapien
aagaaaggctggaatatcagtgacc

SEQ ID NO: 5692996 - DNA, 25 bp, Homo sapien
gcagccttaaatgcacaaattggga

SEQ ID NO: 5692997 - DNA, 25 bp, Homo sapien
taaatgcacaaattgggaaagaaga

SEQ ID NO: 5692998 - DNA, 25 bp, Homo sapien
gaatggaaacatgcagccttaaatg

SEQ ID NO: 5692999 - DNA, 25 bp, Homo sapien
tttctagggtcactgatattccagc

SEQ ID NO: 5693000 - DNA, 25 bp, Homo sapien
ttaaggctgcatgtttccattcaaa

SEQ ID NO: 5693001 - DNA, 25 bp, Homo sapien
taatttgttgtgctttctagggtca

SEQ ID NO: 5693002 - DNA, 25 bp, Homo sapien
tctttcccaatttgtgcatttaagg

SEQ ID NO: 5693003 - DNA, 25 bp, Homo sapien
gggtcactgatattccagcctttct

SEQ ID NO: 5693004 - DNA, 25 bp, Homo sapien
cccaatttgtgcatttaaggctgca

SEQ ID NO: 5693005 - DNA, 25 bp, Homo sapien
cagtgagccgagatcaccccactgt

SEQ ID NO: 5693006 - DNA, 25 bp, Homo sapien
acagagtgagactccgtctcaaaaa

SEQ ID NO: 5693007 - DNA, 25 bp, Homo sapien
accccactgtactccagcctgggcg

SEQ ID NO: 5693008 - DNA, 25 bp, Homo sapien
tgaaaaataaaagtacttatgtcta

SEQ ID NO: 5693009 - DNA, 25 bp, Homo sapien
tagacataagtacttttatttttca

SEQ ID NO: 5693010 - DNA, 25 bp, Homo sapien
cgcccaggctggagtacagtggggt

SEQ ID NO: 5693011 - DNA, 25 bp, Homo sapien
tttttgagacggagtctcactctgt

SEQ ID NO: 5693012 - DNA, 25 bp, Homo sapien
acagtggggtgatctcggctcactg

SEQ ID NO: 5693013 - DNA, 25 bp, Homo sapien
catacctataattccagcatcttgg

SEQ ID NO: 5693014 - DNA, 25 bp, Homo sapien
atacctataattccagcatcttggg

SEQ ID NO: 5693015 - DNA, 25 bp, Homo sapien
gctcatacctataattccagcatct

SEQ ID NO: 5693016 - DNA, 25 bp, Homo sapien
ctcatacctataattccagcatctt

SEQ ID NO: 5693017 - DNA, 25 bp, Homo sapien
tcatacctataattccagcatcttg

SEQ ID NO: 5693018 - DNA, 25 bp, Homo sapien
tacctataattccagcatcttggga

SEQ ID NO: 5693019 - DNA, 25 bp, Homo sapien
ccaagatgctggaattataggtatg

SEQ ID NO: 5693020 - DNA, 25 bp, Homo sapien
caagatgctggaattataggtatga

SEQ ID NO: 5693021 - DNA, 25 bp, Homo sapien
cccaagatgctggaattataggtat

SEQ ID NO: 5693022 - DNA, 25 bp, Homo sapien
agatgctggaattataggtatgagc

SEQ ID NO: 5693023 - DNA, 25 bp, Homo sapien
aagatgctggaattataggtatgag

SEQ ID NO: 5693024 - DNA, 25 bp, Homo sapien
tcccaagatgctggaattataggta

SEQ ID NO: 5693025 - DNA, 25 bp, Homo sapien
gcaccctgccaatatatacagtttt

SEQ ID NO: 5693026 - DNA, 25 bp, Homo sapien
cggtcatctctcaagctgaggagaa

SEQ ID NO: 5693027 - DNA, 25 bp, Homo sapien
ctcaagctgaggagaaaatgattta

SEQ ID NO: 5693028 - DNA, 25 bp, Homo sapien
tatttgccggtcatctctcaagctg

SEQ ID NO: 5693029 - DNA, 25 bp, Homo sapien
cctgcaccctgccaatatatacagt

SEQ ID NO: 5693030 - DNA, 25 bp, Homo sapien
tttatttgccatttatttgccggtc

SEQ ID NO: 5693031 - DNA, 25 bp, Homo sapien
actgtatatattggcagggtgcagg

SEQ ID NO: 5693032 - DNA, 25 bp, Homo sapien
taaatcattttctcctcagcttgag

SEQ ID NO: 5693033 - DNA, 25 bp, Homo sapien
gcttgagagatgaccggcaaataaa

SEQ ID NO: 5693034 - DNA, 25 bp, Homo sapien
aaaactgtatatattggcagggtgc

SEQ ID NO: 5693035 - DNA, 25 bp, Homo sapien
gaccggcaaataaatggcaaataaa

SEQ ID NO: 5693036 - DNA, 25 bp, Homo sapien
tctcctcagcttgagagatgaccgg

SEQ ID NO: 5693037 - DNA, 25 bp, Homo sapien
cgttagccaggatgttctcgatctc

SEQ ID NO: 5693038 - DNA, 25 bp, Homo sapien
actgcgttagccaggatgttctcga

SEQ ID NO: 5693039 - DNA, 25 bp, Homo sapien
tgcgttagccaggatgttctcgatc

SEQ ID NO: 5693040 - DNA, 25 bp, Homo sapien
ctgcgttagccaggatgttctcgat

SEQ ID NO: 5693041 - DNA, 25 bp, Homo sapien
gcgttagccaggatgttctcgatct

SEQ ID NO: 5693042 - DNA, 25 bp, Homo sapien
cactgcgttagccaggatgttctcg

SEQ ID NO: 5693043 - DNA, 25 bp, Homo sapien
atcgagaacatcctggctaacgcag

SEQ ID NO: 5693044 - DNA, 25 bp, Homo sapien
gatcgagaacatcctggctaacgca

SEQ ID NO: 5693045 - DNA, 25 bp, Homo sapien
gagatcgagaacatcctggctaacg

SEQ ID NO: 5693046 - DNA, 25 bp, Homo sapien
cgagaacatcctggctaacgcagtg

SEQ ID NO: 5693047 - DNA, 25 bp, Homo sapien
tcgagaacatcctggctaacgcagt

SEQ ID NO: 5693048 - DNA, 25 bp, Homo sapien
agatcgagaacatcctggctaacgc

SEQ ID NO: 5693049 - DNA, 25 bp, Homo sapien
gcaagctccgccttctgggttcacg

SEQ ID NO: 5693050 - DNA, 25 bp, Homo sapien
gcacccgccaccataccccgctaat

SEQ ID NO: 5693051 - DNA, 25 bp, Homo sapien
caagctccgccttctgggttcacgc

SEQ ID NO: 5693052 - DNA, 25 bp, Homo sapien
gcctcctgagtggctgggactacag

SEQ ID NO: 5693053 - DNA, 25 bp, Homo sapien
gggttcacgccattctcctgcctca

SEQ ID NO: 5693054 - DNA, 25 bp, Homo sapien
cacccgccaccataccccgctaatt

SEQ ID NO: 5693055 - DNA, 25 bp, Homo sapien
attagcggggtatggtggcgggtgc

SEQ ID NO: 5693056 - DNA, 25 bp, Homo sapien
cgtgaacccagaaggcggagcttgc

SEQ ID NO: 5693057 - DNA, 25 bp, Homo sapien
tgaggcaggagaatggcgtgaaccc

SEQ ID NO: 5693058 - DNA, 25 bp, Homo sapien
gcgtgaacccagaaggcggagcttg

SEQ ID NO: 5693059 - DNA, 25 bp, Homo sapien
aattagcggggtatggtggcgggtg

SEQ ID NO: 5693060 - DNA, 25 bp, Homo sapien
ctgtagtcccagccactcaggaggc

SEQ ID NO: 5693061 - DNA, 25 bp, Homo sapien
tgattgtgataattacttcacaatg

SEQ ID NO: 5693062 - DNA, 25 bp, Homo sapien
tgtgataattacttcacaatgtaaa

SEQ ID NO: 5693063 - DNA, 25 bp, Homo sapien
attgtgataattacttcacaatgta

SEQ ID NO: 5693064 - DNA, 25 bp, Homo sapien
ttgtgataattacttcacaatgtaa

SEQ ID NO: 5693065 - DNA, 25 bp, Homo sapien
tacattgtgaagtaattatcacaat

SEQ ID NO: 5693066 - DNA, 25 bp, Homo sapien
tttacattgtgaagtaattatcaca

SEQ ID NO: 5693067 - DNA, 25 bp, Homo sapien
ttacattgtgaagtaattatcacaa

SEQ ID NO: 5693068 - DNA, 25 bp, Homo sapien
cattgtgaagtaattatcacaatca

SEQ ID NO: 5693069 - DNA, 25 bp, Homo sapien
taattacttcacaatgtaaatgtac

SEQ ID NO: 5693070 - DNA, 25 bp, Homo sapien
tgattgtgataattacttcacaatg

SEQ ID NO: 5693071 - DNA, 25 bp, Homo sapien
tgtgataattacttcacaatgtaaa

SEQ ID NO: 5693072 - DNA, 25 bp, Homo sapien
tgtacattgtgtacacctaaatata

SEQ ID NO: 5693073 - DNA, 25 bp, Homo sapien
tgtaaatgtacattgtgtacaccta

SEQ ID NO: 5693074 - DNA, 25 bp, Homo sapien
acattgtgtacacctaaatatatac

SEQ ID NO: 5693075 - DNA, 25 bp, Homo sapien
caatgtacatttacattgtgaagta

SEQ ID NO: 5693076 - DNA, 25 bp, Homo sapien
tttacattgtgaagtaattatcaca

SEQ ID NO: 5693077 - DNA, 25 bp, Homo sapien
tatatttaggtgtacacaatgtaca

SEQ ID NO: 5693078 - DNA, 25 bp, Homo sapien
catttacattgtgaagtaattatca

SEQ ID NO: 5693079 - DNA, 25 bp, Homo sapien
gtatatatttaggtgtacacaatgt

SEQ ID NO: 5693080 - DNA, 25 bp, Homo sapien
cattgtgaagtaattatcacaatca

SEQ ID NO: 5693081 - DNA, 25 bp, Homo sapien
tgcaccagcctaatacctatagtcc

SEQ ID NO: 5693082 - DNA, 25 bp, Homo sapien
caccagcctaatacctatagtccca

SEQ ID NO: 5693083 - DNA, 25 bp, Homo sapien
gcaccagcctaatacctatagtccc

SEQ ID NO: 5693084 - DNA, 25 bp, Homo sapien
gggactataggtattaggctggtgc

SEQ ID NO: 5693085 - DNA, 25 bp, Homo sapien
tgggactataggtattaggctggtg

SEQ ID NO: 5693086 - DNA, 25 bp, Homo sapien
ggactataggtattaggctggtgca

SEQ ID NO: 5693087 - DNA, 25 bp, Homo sapien
gtcccaggcaattcagaggctgagg

SEQ ID NO: 5693088 - DNA, 25 bp, Homo sapien
tgcaccagcctaatacctatagtcc

SEQ ID NO: 5693089 - DNA, 25 bp, Homo sapien
caccagcctaatacctatagtccca

SEQ ID NO: 5693090 - DNA, 25 bp, Homo sapien
atagtcccaggcaattcagaggctg

SEQ ID NO: 5693091 - DNA, 25 bp, Homo sapien
tatagtcccaggcaattcagaggct

SEQ ID NO: 5693092 - DNA, 25 bp, Homo sapien
tcccaggcaattcagaggctgaggt

SEQ ID NO: 5693093 - DNA, 25 bp, Homo sapien
cctcagcctctgaattgcctgggac

SEQ ID NO: 5693094 - DNA, 25 bp, Homo sapien
acctcagcctctgaattgcctggga

SEQ ID NO: 5693095 - DNA, 25 bp, Homo sapien
agcctctgaattgcctgggactata

SEQ ID NO: 5693096 - DNA, 25 bp, Homo sapien
tgggactataggtattaggctggtg

SEQ ID NO: 5693097 - DNA, 25 bp, Homo sapien
cagcctctgaattgcctgggactat

SEQ ID NO: 5693098 - DNA, 25 bp, Homo sapien
ggactataggtattaggctggtgca

SEQ ID NO: 5693099 - DNA, 25 bp, Homo sapien
gattttgcccatatgtgcaatctaa

SEQ ID NO: 5693100 - DNA, 25 bp, Homo sapien
attttgcccatatgtgcaatctaaa

SEQ ID NO: 5693101 - DNA, 25 bp, Homo sapien
tactacatgattttgcccatatgtg

SEQ ID NO: 5693102 - DNA, 25 bp, Homo sapien
aatactacatgattttgcccatatg

SEQ ID NO: 5693103 - DNA, 25 bp, Homo sapien
ctacatgattttgcccatatgtgca

SEQ ID NO: 5693104 - DNA, 25 bp, Homo sapien
catgattttgcccatatgtgcaatc

SEQ ID NO: 5693105 - DNA, 25 bp, Homo sapien
gattgcacatatgggcaaaatcatg

SEQ ID NO: 5693106 - DNA, 25 bp, Homo sapien
tagattgcacatatgggcaaaatca

SEQ ID NO: 5693107 - DNA, 25 bp, Homo sapien
tgcacatatgggcaaaatcatgtag

SEQ ID NO: 5693108 - DNA, 25 bp, Homo sapien
catatgggcaaaatcatgtagtatt

SEQ ID NO: 5693109 - DNA, 25 bp, Homo sapien
cacatatgggcaaaatcatgtagta

SEQ ID NO: 5693110 - DNA, 25 bp, Homo sapien
tttagattgcacatatgggcaaaat

SEQ ID NO: 5693111 - DNA, 25 bp, Homo sapien
agcaattgcatcactgggtgtatat

SEQ ID NO: 5693112 - DNA, 25 bp, Homo sapien
gcaattgcatcactgggtgtatatc

SEQ ID NO: 5693113 - DNA, 25 bp, Homo sapien
caattgcatcactgggtgtatatcc

SEQ ID NO: 5693114 - DNA, 25 bp, Homo sapien
atatacacccagtgatgcaattgct

SEQ ID NO: 5693115 - DNA, 25 bp, Homo sapien
ggatatacacccagtgatgcaattg

SEQ ID NO: 5693116 - DNA, 25 bp, Homo sapien
gatatacacccagtgatgcaattgc

SEQ ID NO: 5693117 - DNA, 25 bp, Homo sapien
gatccagcaattgcatcactgggtg

SEQ ID NO: 5693118 - DNA, 25 bp, Homo sapien
tatgatccagcaattgcatcactgg

SEQ ID NO: 5693119 - DNA, 25 bp, Homo sapien
agcaattgcatcactgggtgtatat

SEQ ID NO: 5693120 - DNA, 25 bp, Homo sapien
gcatcactgggtgtatatccaaagg

SEQ ID NO: 5693121 - DNA, 25 bp, Homo sapien
tatggagattcctcaaaaaatcgaa

SEQ ID NO: 5693122 - DNA, 25 bp, Homo sapien
caattgcatcactgggtgtatatcc

SEQ ID NO: 5693123 - DNA, 25 bp, Homo sapien
cacccagtgatgcaattgctggatc

SEQ ID NO: 5693124 - DNA, 25 bp, Homo sapien
ttcgattttttgaggaatctccata

SEQ ID NO: 5693125 - DNA, 25 bp, Homo sapien
atatacacccagtgatgcaattgct

SEQ ID NO: 5693126 - DNA, 25 bp, Homo sapien
cctttggatatacacccagtgatgc

SEQ ID NO: 5693127 - DNA, 25 bp, Homo sapien
ggatatacacccagtgatgcaattg

SEQ ID NO: 5693128 - DNA, 25 bp, Homo sapien
gatatacacccagtgatgcaattgc

SEQ ID NO: 5693129 - DNA, 25 bp, Homo sapien
ctctagtctggcatgatctcaaaaa

SEQ ID NO: 5693130 - DNA, 25 bp, Homo sapien
tttttgagatcatgccagactagag

SEQ ID NO: 5693131 - DNA, 25 bp, Homo sapien
gaaaatccatatatttggaaattaa

SEQ ID NO: 5693132 - DNA, 25 bp, Homo sapien
tagtctggcatgatctcaaaaaaga

SEQ ID NO: 5693133 - DNA, 25 bp, Homo sapien
ctagtctggcatgatctcaaaaaag

SEQ ID NO: 5693134 - DNA, 25 bp, Homo sapien
gtctggcatgatctcaaaaaagaaa

SEQ ID NO: 5693135 - DNA, 25 bp, Homo sapien
ctctagtctggcatgatctcaaaaa

SEQ ID NO: 5693136 - DNA, 25 bp, Homo sapien
tctagtctggcatgatctcaaaaaa

SEQ ID NO: 5693137 - DNA, 25 bp, Homo sapien
tttcttttttgagatcatgccagac

SEQ ID NO: 5693138 - DNA, 25 bp, Homo sapien
tttttgagatcatgccagactagag

SEQ ID NO: 5693139 - DNA, 25 bp, Homo sapien
tcttttttgagatcatgccagacta

SEQ ID NO: 5693140 - DNA, 25 bp, Homo sapien
ttttttgagatcatgccagactaga

SEQ ID NO: 5693141 - DNA, 25 bp, Homo sapien
taatttccaaatatatggattttct

SEQ ID NO: 5693142 - DNA, 25 bp, Homo sapien
cttttttgagatcatgccagactag

SEQ ID NO: 5693143 - DNA, 25 bp, Homo sapien
aaaatgtgtgtagcttctctctatg

SEQ ID NO: 5693144 - DNA, 25 bp, Homo sapien
aatgtgtgtagcttctctctatgga

SEQ ID NO: 5693145 - DNA, 25 bp, Homo sapien
aaaaaatgtgtgtagcttctctcta

SEQ ID NO: 5693146 - DNA, 25 bp, Homo sapien
atgtgtgtagcttctctctatggac

SEQ ID NO: 5693147 - DNA, 25 bp, Homo sapien
aaaaatgtgtgtagcttctctctat

SEQ ID NO: 5693148 - DNA, 25 bp, Homo sapien
aaatgtgtgtagcttctctctatgg

SEQ ID NO: 5693149 - DNA, 25 bp, Homo sapien
ccatagagagaagctacacacattt

SEQ ID NO: 5693150 - DNA, 25 bp, Homo sapien
atagagagaagctacacacattttt

SEQ ID NO: 5693151 - DNA, 25 bp, Homo sapien
gtccatagagagaagctacacacat

SEQ ID NO: 5693152 - DNA, 25 bp, Homo sapien
tagagagaagctacacacatttttt

SEQ ID NO: 5693153 - DNA, 25 bp, Homo sapien
tccatagagagaagctacacacatt

SEQ ID NO: 5693154 - DNA, 25 bp, Homo sapien
catagagagaagctacacacatttt

SEQ ID NO: 5693155 - DNA, 25 bp, Homo sapien
tgggggtggtgacgcgcacctgtac

SEQ ID NO: 5693156 - DNA, 25 bp, Homo sapien
gtggtgacgcgcacctgtactccca

SEQ ID NO: 5693157 - DNA, 25 bp, Homo sapien
gggtggtgacgcgcacctgtactcc

SEQ ID NO: 5693158 - DNA, 25 bp, Homo sapien
ggtggtgacgcgcacctgtactccc

SEQ ID NO: 5693159 - DNA, 25 bp, Homo sapien
tggtgacgcgcacctgtactcccag

SEQ ID NO: 5693160 - DNA, 25 bp, Homo sapien
aggtgcgcgtcaccacccccagcta

SEQ ID NO: 5693161 - DNA, 25 bp, Homo sapien
tacaggtgcgcgtcaccacccccag

SEQ ID NO: 5693162 - DNA, 25 bp, Homo sapien
acaggtgcgcgtcaccacccccagc

SEQ ID NO: 5693163 - DNA, 25 bp, Homo sapien
caggtgcgcgtcaccacccccagct

SEQ ID NO: 5693164 - DNA, 25 bp, Homo sapien
tgaggtcaagagatcaaaaccatct

SEQ ID NO: 5693165 - DNA, 25 bp, Homo sapien
aagagatcaaaaccatcttggccaa

SEQ ID NO: 5693166 - DNA, 25 bp, Homo sapien
ggtcaagagatcaaaaccatcttgg

SEQ ID NO: 5693167 - DNA, 25 bp, Homo sapien
gtcaagagatcaaaaccatcttggc

SEQ ID NO: 5693168 - DNA, 25 bp, Homo sapien
aggtcaagagatcaaaaccatcttg

SEQ ID NO: 5693169 - DNA, 25 bp, Homo sapien
gaggtcaagagatcaaaaccatctt

SEQ ID NO: 5693170 - DNA, 25 bp, Homo sapien
agatggttttgatctcttgacctca

SEQ ID NO: 5693171 - DNA, 25 bp, Homo sapien
ttggccaagatggttttgatctctt

SEQ ID NO: 5693172 - DNA, 25 bp, Homo sapien
caagatggttttgatctcttgacct

SEQ ID NO: 5693173 - DNA, 25 bp, Homo sapien
ccaagatggttttgatctcttgacc

SEQ ID NO: 5693174 - DNA, 25 bp, Homo sapien
gccaagatggttttgatctcttgac

SEQ ID NO: 5693175 - DNA, 25 bp, Homo sapien
aagatggttttgatctcttgacctc

SEQ ID NO: 5693176 - DNA, 25 bp, Homo sapien
atccccaggtaagatcactgtggac

SEQ ID NO: 5693177 - DNA, 25 bp, Homo sapien
gaccctgaagcagtagtatccccag

SEQ ID NO: 5693178 - DNA, 25 bp, Homo sapien
aatgaccctgaagcagtagtatccc

SEQ ID NO: 5693179 - DNA, 25 bp, Homo sapien
atgaccctgaagcagtagtatcccc

SEQ ID NO: 5693180 - DNA, 25 bp, Homo sapien
tgaccctgaagcagtagtatcccca

SEQ ID NO: 5693181 - DNA, 25 bp, Homo sapien
gaatgaccctgaagcagtagtatcc

SEQ ID NO: 5693182 - DNA, 25 bp, Homo sapien
ggatactactgcttcagggtcattc

SEQ ID NO: 5693183 - DNA, 25 bp, Homo sapien
gggatactactgcttcagggtcatt

SEQ ID NO: 5693184 - DNA, 25 bp, Homo sapien
tggggatactactgcttcagggtca

SEQ ID NO: 5693185 - DNA, 25 bp, Homo sapien
ctggggatactactgcttcagggtc

SEQ ID NO: 5693186 - DNA, 25 bp, Homo sapien
ggggatactactgcttcagggtcat

SEQ ID NO: 5693187 - DNA, 25 bp, Homo sapien
gtccacagtgatcttacctggggat

SEQ ID NO: 5693188 - DNA, 25 bp, Homo sapien
gatcactgtggacatctgctgttaa

SEQ ID NO: 5693189 - DNA, 25 bp, Homo sapien
gaccctgaagcagtagtatccccag

SEQ ID NO: 5693190 - DNA, 25 bp, Homo sapien
atccccaggtaagatcactgtggac

SEQ ID NO: 5693191 - DNA, 25 bp, Homo sapien
taagtgtgtagcattggccgggcac

SEQ ID NO: 5693192 - DNA, 25 bp, Homo sapien
ggacatctgctgttaagtgtgtagc

SEQ ID NO: 5693193 - DNA, 25 bp, Homo sapien
ccaggtaagatcactgtggacatct

SEQ ID NO: 5693194 - DNA, 25 bp, Homo sapien
gggtcattcatatcaaaggctgcca

SEQ ID NO: 5693195 - DNA, 25 bp, Homo sapien
gccaatgctacacacttaacagcag

SEQ ID NO: 5693196 - DNA, 25 bp, Homo sapien
gatgtccacagtgatcttacctggg

SEQ ID NO: 5693197 - DNA, 25 bp, Homo sapien
gtgcccggccaatgctacacactta

SEQ ID NO: 5693198 - DNA, 25 bp, Homo sapien
ttaacagcagatgtccacagtgatc

SEQ ID NO: 5693199 - DNA, 25 bp, Homo sapien
gctacacacttaacagcagatgtcc

SEQ ID NO: 5693200 - DNA, 25 bp, Homo sapien
caggatatgggtttgctattgggaa

SEQ ID NO: 5693201 - DNA, 25 bp, Homo sapien
ttcccaatagcaaacccatatcctg

SEQ ID NO: 5693202 - DNA, 25 bp, Homo sapien
ggtagcaggtcaagacacttgtatt

SEQ ID NO: 5693203 - DNA, 25 bp, Homo sapien
cagcgatctattgggcttcctgatg

SEQ ID NO: 5693204 - DNA, 25 bp, Homo sapien
caggatatgggtttgctattgggaa

SEQ ID NO: 5693205 - DNA, 25 bp, Homo sapien
caagacacttgtatttcattttcta

SEQ ID NO: 5693206 - DNA, 25 bp, Homo sapien
aattctttttcagcgatctattggg

SEQ ID NO: 5693207 - DNA, 25 bp, Homo sapien
gcaggtcaagacacttgtatttcat

SEQ ID NO: 5693208 - DNA, 25 bp, Homo sapien
aatacaagtgtcttgacctgctacc

SEQ ID NO: 5693209 - DNA, 25 bp, Homo sapien
gaaaatgaaatacaagtgtcttgac

SEQ ID NO: 5693210 - DNA, 25 bp, Homo sapien
catcaggaagcccaatagatcgctg

SEQ ID NO: 5693211 - DNA, 25 bp, Homo sapien
aattagaaaatgaaatacaagtgtc

SEQ ID NO: 5693212 - DNA, 25 bp, Homo sapien
cccaatagatcgctgaaaaagaatt

SEQ ID NO: 5693213 - DNA, 25 bp, Homo sapien
tgaaatacaagtgtcttgacctgct

SEQ ID NO: 5693214 - DNA, 25 bp, Homo sapien
tttgtgaaaacacagtcttgattta

SEQ ID NO: 5693215 - DNA, 25 bp, Homo sapien
cttgatttagggaaagcttcagcct

SEQ ID NO: 5693216 - DNA, 25 bp, Homo sapien
agctttgtgattaggagttcttact

SEQ ID NO: 5693217 - DNA, 25 bp, Homo sapien
gctttgtgattaggagttcttacta

SEQ ID NO: 5693218 - DNA, 25 bp, Homo sapien
gtgattaggagttcttactatttcc

SEQ ID NO: 5693219 - DNA, 25 bp, Homo sapien
gattttgtgaaaacacagtcttgat

SEQ ID NO: 5693220 - DNA, 25 bp, Homo sapien
ggaaatagtaagaactcctaatcac

SEQ ID NO: 5693221 - DNA, 25 bp, Homo sapien
agtaagaactcctaatcacaaagct

SEQ ID NO: 5693222 - DNA, 25 bp, Homo sapien
atcaagactgtgttttcacaaaatc

SEQ ID NO: 5693223 - DNA, 25 bp, Homo sapien
taaatcaagactgtgttttcacaaa

SEQ ID NO: 5693224 - DNA, 25 bp, Homo sapien
tagtaagaactcctaatcacaaagc

SEQ ID NO: 5693225 - DNA, 25 bp, Homo sapien
aggctgaagctttccctaaatcaag

SEQ ID NO: 5693226 - DNA, 25 bp, Homo sapien
aaagtttgtcagtgtcttaagatta

SEQ ID NO: 5693227 - DNA, 25 bp, Homo sapien
taaacttagtatgtgttactcctat

SEQ ID NO: 5693228 - DNA, 25 bp, Homo sapien
caaagtttgtcagtgtcttaagatt

SEQ ID NO: 5693229 - DNA, 25 bp, Homo sapien
cttagtatgtgttactcctatatca

SEQ ID NO: 5693230 - DNA, 25 bp, Homo sapien
aatagtacattaaacttagtatgtg

SEQ ID NO: 5693231 - DNA, 25 bp, Homo sapien
cattaaacttagtatgtgttactcc

SEQ ID NO: 5693232 - DNA, 25 bp, Homo sapien
taacacatactaagtttaatgtact

SEQ ID NO: 5693233 - DNA, 25 bp, Homo sapien
taatcttaagacactgacaaacttt

SEQ ID NO: 5693234 - DNA, 25 bp, Homo sapien
tataggagtaacacatactaagttt

SEQ ID NO: 5693235 - DNA, 25 bp, Homo sapien
aatcttaagacactgacaaactttg

SEQ ID NO: 5693236 - DNA, 25 bp, Homo sapien
tgatataggagtaacacatactaag

SEQ ID NO: 5693237 - DNA, 25 bp, Homo sapien
ggagtaacacatactaagtttaatg

SEQ ID NO: 5693238 - DNA, 25 bp, Homo sapien
gttagtgtctgggtatctccatata

SEQ ID NO: 5693239 - DNA, 25 bp, Homo sapien
tccatatatcctgtgtttgacctgc

SEQ ID NO: 5693240 - DNA, 25 bp, Homo sapien
ctgggtcagggtccttttctaggct

SEQ ID NO: 5693241 - DNA, 25 bp, Homo sapien
tcagggtccttttctaggctccaca

SEQ ID NO: 5693242 - DNA, 25 bp, Homo sapien
ttttctaggctccacatgtaggaag

SEQ ID NO: 5693243 - DNA, 25 bp, Homo sapien
ggctccacatgtaggaagtctacag

SEQ ID NO: 5693244 - DNA, 25 bp, Homo sapien
gacttcctacatgtggagcctagaa

SEQ ID NO: 5693245 - DNA, 25 bp, Homo sapien
tacatgtggagcctagaaaaggacc

SEQ ID NO: 5693246 - DNA, 25 bp, Homo sapien
gcaggtcaaacacaggatatatgga

SEQ ID NO: 5693247 - DNA, 25 bp, Homo sapien
agcctagaaaaggaccctgacccag

SEQ ID NO: 5693248 - DNA, 25 bp, Homo sapien
tatatggagatacccagacactaac

SEQ ID NO: 5693249 - DNA, 25 bp, Homo sapien
ctgtagacttcctacatgtggagcc

SEQ ID NO: 5693250 - DNA, 25 bp, Homo sapien
tgttgaaaatggatctattcggcag

SEQ ID NO: 5693251 - DNA, 25 bp, Homo sapien
gatgttgaaaatggatctattcggc

SEQ ID NO: 5693252 - DNA, 25 bp, Homo sapien
tgaaaatggatctattcggcagaca

SEQ ID NO: 5693253 - DNA, 25 bp, Homo sapien
aaaatggatctattcggcagacatt

SEQ ID NO: 5693254 - DNA, 25 bp, Homo sapien
ccccaccacagtttaacattcatat

SEQ ID NO: 5693255 - DNA, 25 bp, Homo sapien
cacagtttaacattcatattctatc

SEQ ID NO: 5693256 - DNA, 25 bp, Homo sapien
tctgccgaatagatccattttcaac

SEQ ID NO: 5693257 - DNA, 25 bp, Homo sapien
gatagaatatgaatgttaaactgtg

SEQ ID NO: 5693258 - DNA, 25 bp, Homo sapien
aatgtctgccgaatagatccatttt

SEQ ID NO: 5693259 - DNA, 25 bp, Homo sapien
gccgaatagatccattttcaacatc

SEQ ID NO: 5693260 - DNA, 25 bp, Homo sapien
tgtctgccgaatagatccattttca

SEQ ID NO: 5693261 - DNA, 25 bp, Homo sapien
aatatgaatgttaaactgtggtggg

SEQ ID NO: 5693262 - DNA, 25 bp, Homo sapien
gtttcacttcactgtttcaatgtaa

SEQ ID NO: 5693263 - DNA, 25 bp, Homo sapien
tcctggatcagtgcaccaccattgt

SEQ ID NO: 5693264 - DNA, 25 bp, Homo sapien
tggatcagtgcaccaccattgtaag

SEQ ID NO: 5693265 - DNA, 25 bp, Homo sapien
ttatcatggtaacattattcctgga

SEQ ID NO: 5693266 - DNA, 25 bp, Homo sapien
gatcagtgcaccaccattgtaagtt

SEQ ID NO: 5693267 - DNA, 25 bp, Homo sapien
ttattcctggatcagtgcaccacca

SEQ ID NO: 5693268 - DNA, 25 bp, Homo sapien
caatggtggtgcactgatccaggaa

SEQ ID NO: 5693269 - DNA, 25 bp, Homo sapien
tccaggaataatgttaccatgataa

SEQ ID NO: 5693270 - DNA, 25 bp, Homo sapien
tacaatggtggtgcactgatccagg

SEQ ID NO: 5693271 - DNA, 25 bp, Homo sapien
tacattgaaacagtgaagtgaaact

SEQ ID NO: 5693272 - DNA, 25 bp, Homo sapien
ggtggtgcactgatccaggaataat

SEQ ID NO: 5693273 - DNA, 25 bp, Homo sapien
aacttacaatggtggtgcactgatc

SEQ ID NO: 5693274 - DNA, 25 bp, Homo sapien
cacttttagcgtggatggcagagtg

SEQ ID NO: 5693275 - DNA, 25 bp, Homo sapien
gcacttttagcgtggatggcagagt

SEQ ID NO: 5693276 - DNA, 25 bp, Homo sapien
tgcacttttagcgtggatggcagag

SEQ ID NO: 5693277 - DNA, 25 bp, Homo sapien
ctgcacttttagcgtggatggcaga

SEQ ID NO: 5693278 - DNA, 25 bp, Homo sapien
actctgccatccacgctaaaagtgc

SEQ ID NO: 5693279 - DNA, 25 bp, Homo sapien
tctgccatccacgctaaaagtgcag

SEQ ID NO: 5693280 - DNA, 25 bp, Homo sapien
ctctgccatccacgctaaaagtgca

SEQ ID NO: 5693281 - DNA, 25 bp, Homo sapien
cactctgccatccacgctaaaagtg

SEQ ID NO: 5693282 - DNA, 25 bp, Homo sapien
cacttttagcgtggatggcagagtg

SEQ ID NO: 5693283 - DNA, 25 bp, Homo sapien
gcacttttagcgtggatggcagagt

SEQ ID NO: 5693284 - DNA, 25 bp, Homo sapien
catggacctaaagaaataattgaat

SEQ ID NO: 5693285 - DNA, 25 bp, Homo sapien
tgcacttttagcgtggatggcagag

SEQ ID NO: 5693286 - DNA, 25 bp, Homo sapien
taaagaaataattgaatctggatgg

SEQ ID NO: 5693287 - DNA, 25 bp, Homo sapien
aaccatggacctaaagaaataattg

SEQ ID NO: 5693288 - DNA, 25 bp, Homo sapien
gattcaattatttctttaggtccat

SEQ ID NO: 5693289 - DNA, 25 bp, Homo sapien
actctgccatccacgctaaaagtgc

SEQ ID NO: 5693290 - DNA, 25 bp, Homo sapien
caattatttctttaggtccatggtt

SEQ ID NO: 5693291 - DNA, 25 bp, Homo sapien
ctctgccatccacgctaaaagtgca

SEQ ID NO: 5693292 - DNA, 25 bp, Homo sapien
catccagattcaattatttctttag

SEQ ID NO: 5693293 - DNA, 25 bp, Homo sapien
cactctgccatccacgctaaaagtg

SEQ ID NO: 5693294 - DNA, 25 bp, Homo sapien
gaacttgtttctcagctaaccttga

SEQ ID NO: 5693295 - DNA, 25 bp, Homo sapien
tgaagctgggtagaacttgtttctc

SEQ ID NO: 5693296 - DNA, 25 bp, Homo sapien
agttggcgttatagaacggatttga

SEQ ID NO: 5693297 - DNA, 25 bp, Homo sapien
gtttctcagctaaccttgaacaata

SEQ ID NO: 5693298 - DNA, 25 bp, Homo sapien
ccttgaacaataatagcaagtgacc

SEQ ID NO: 5693299 - DNA, 25 bp, Homo sapien
gccagttggcgttatagaacggatt

SEQ ID NO: 5693300 - DNA, 25 bp, Homo sapien
tcaaatccgttctataacgccaact

SEQ ID NO: 5693301 - DNA, 25 bp, Homo sapien
gagaaacaagttctacccagcttca

SEQ ID NO: 5693302 - DNA, 25 bp, Homo sapien
ggtcacttgctattattgttcaagg

SEQ ID NO: 5693303 - DNA, 25 bp, Homo sapien
aatccgttctataacgccaactggc

SEQ ID NO: 5693304 - DNA, 25 bp, Homo sapien
caaggttagctgagaaacaagttct

SEQ ID NO: 5693305 - DNA, 25 bp, Homo sapien
tattgttcaaggttagctgagaaac

SEQ ID NO: 5693306 - DNA, 25 bp, Homo sapien
aagcacttacttatttgtgatcaca

SEQ ID NO: 5693307 - DNA, 25 bp, Homo sapien
tcaaggagtgattacaacttaaaag

SEQ ID NO: 5693308 - DNA, 25 bp, Homo sapien
ttacttatttgtgatcacattgtca

SEQ ID NO: 5693309 - DNA, 25 bp, Homo sapien
aaagcacttacttatttgtgatcac

SEQ ID NO: 5693310 - DNA, 25 bp, Homo sapien
cacttacttatttgtgatcacattg

SEQ ID NO: 5693311 - DNA, 25 bp, Homo sapien
atattgtcaaggagtgattacaact

SEQ ID NO: 5693312 - DNA, 25 bp, Homo sapien
ttttaagttgtaatcactccttgac

SEQ ID NO: 5693313 - DNA, 25 bp, Homo sapien
cttttaagttgtaatcactccttga

SEQ ID NO: 5693314 - DNA, 25 bp, Homo sapien
aatgtgatcacaaataagtaagtgc

SEQ ID NO: 5693315 - DNA, 25 bp, Homo sapien
gacaatgtgatcacaaataagtaag

SEQ ID NO: 5693316 - DNA, 25 bp, Homo sapien
agttgtaatcactccttgacaatat

SEQ ID NO: 5693317 - DNA, 25 bp, Homo sapien
tgtgatcacaaataagtaagtgctt

SEQ ID NO: 5693318 - DNA, 25 bp, Homo sapien
tcacttgtgttagtacggtagtgcc

SEQ ID NO: 5693319 - DNA, 25 bp, Homo sapien
tagtacggtagtgccttccctgtgg

SEQ ID NO: 5693320 - DNA, 25 bp, Homo sapien
tgtgttagtacggtagtgccttccc

SEQ ID NO: 5693321 - DNA, 25 bp, Homo sapien
tggtggtaagtacattagagtttca

SEQ ID NO: 5693322 - DNA, 25 bp, Homo sapien
aagtacattagagtttcacttgtgt

SEQ ID NO: 5693323 - DNA, 25 bp, Homo sapien
tgttagtacggtagtgccttccctg

SEQ ID NO: 5693324 - DNA, 25 bp, Homo sapien
gaaactctaatgtacttaccaccac

SEQ ID NO: 5693325 - DNA, 25 bp, Homo sapien
cagggaaggcactaccgtactaaca

SEQ ID NO: 5693326 - DNA, 25 bp, Homo sapien
ggcactaccgtactaacacaagtga

SEQ ID NO: 5693327 - DNA, 25 bp, Homo sapien
aacacaagtgaaactctaatgtact

SEQ ID NO: 5693328 - DNA, 25 bp, Homo sapien
gaaggcactaccgtactaacacaag

SEQ ID NO: 5693329 - DNA, 25 bp, Homo sapien
cacagggaaggcactaccgtactaa

SEQ ID NO: 5693330 - DNA, 25 bp, Homo sapien
gtgcctacacttgccgcgcatgtac

SEQ ID NO: 5693331 - DNA, 25 bp, Homo sapien
ttgccgcgcatgtactcagacattg

SEQ ID NO: 5693332 - DNA, 25 bp, Homo sapien
agtgcctacacttgccgcgcatgta

SEQ ID NO: 5693333 - DNA, 25 bp, Homo sapien
cactttccttggtactaggttgaag

SEQ ID NO: 5693334 - DNA, 25 bp, Homo sapien
cacttgccgcgcatgtactcagaca

SEQ ID NO: 5693335 - DNA, 25 bp, Homo sapien
gccgcgcatgtactcagacattgct

SEQ ID NO: 5693336 - DNA, 25 bp, Homo sapien
ttttctatgtgaatgatgctctgga

SEQ ID NO: 5693337 - DNA, 25 bp, Homo sapien
gttttctatgtgaatgatgctctgg

SEQ ID NO: 5693338 - DNA, 25 bp, Homo sapien
tttctatgtgaatgatgctctggag

SEQ ID NO: 5693339 - DNA, 25 bp, Homo sapien
ccagagcatcattcacatagaaaac

SEQ ID NO: 5693340 - DNA, 25 bp, Homo sapien
ctccagagcatcattcacatagaaa

SEQ ID NO: 5693341 - DNA, 25 bp, Homo sapien
tccagagcatcattcacatagaaaa

SEQ ID NO: 5693342 - DNA, 25 bp, Homo sapien
cttcaacctagtaccaaggaaagtg

SEQ ID NO: 5693343 - DNA, 25 bp, Homo sapien
tgtctgagtacatgcgcggcaagtg

SEQ ID NO: 5693344 - DNA, 25 bp, Homo sapien
tcaacctagtaccaaggaaagtgaa

SEQ ID NO: 5693345 - DNA, 25 bp, Homo sapien
agcaatgtctgagtacatgcgcggc

SEQ ID NO: 5693346 - DNA, 25 bp, Homo sapien
caatgtctgagtacatgcgcggcaa

SEQ ID NO: 5693347 - DNA, 25 bp, Homo sapien
tacatgcgcggcaagtgtaggcact

SEQ ID NO: 5693348 - DNA, 25 bp, Homo sapien
aatattgcatacagtgcattctgtc

SEQ ID NO: 5693349 - DNA, 25 bp, Homo sapien
ctgtgtgcttaaggtaacgtgaaag

SEQ ID NO: 5693350 - DNA, 25 bp, Homo sapien
tgtgcttaaggtaacgtgaaagtgt

SEQ ID NO: 5693351 - DNA, 25 bp, Homo sapien
ctttgataggaagttttctgtgtgc

SEQ ID NO: 5693352 - DNA, 25 bp, Homo sapien
cacagtaaatattgcatacagtgca

SEQ ID NO: 5693353 - DNA, 25 bp, Homo sapien
tcgtagtctttgataggaagttttc

SEQ ID NO: 5693354 - DNA, 25 bp, Homo sapien
cactgtatgcaatatttactgtgct

SEQ ID NO: 5693355 - DNA, 25 bp, Homo sapien
gacagaatgcactgtatgcaatatt

SEQ ID NO: 5693356 - DNA, 25 bp, Homo sapien
ctttcacgttaccttaagcacacag

SEQ ID NO: 5693357 - DNA, 25 bp, Homo sapien
gcacacagaaaacttcctatcaaag

SEQ ID NO: 5693358 - DNA, 25 bp, Homo sapien
gaaaacttcctatcaaagactacga

SEQ ID NO: 5693359 - DNA, 25 bp, Homo sapien
acactttcacgttaccttaagcaca

SEQ ID NO: 5693360 - DNA, 25 bp, Homo sapien
aaaagatgctgaatctgttgaattc

SEQ ID NO: 5693361 - DNA, 25 bp, Homo sapien
aaagatgctgaatctgttgaattct

SEQ ID NO: 5693362 - DNA, 25 bp, Homo sapien
aaaaagatgctgaatctgttgaatt

SEQ ID NO: 5693363 - DNA, 25 bp, Homo sapien
aattcaacagattcagcatcttttt

SEQ ID NO: 5693364 - DNA, 25 bp, Homo sapien
agaattcaacagattcagcatcttt

SEQ ID NO: 5693365 - DNA, 25 bp, Homo sapien
gaattcaacagattcagcatctttt

SEQ ID NO: 5693366 - DNA, 25 bp, Homo sapien
tatcacaaaaagatgctgaatctgt

SEQ ID NO: 5693367 - DNA, 25 bp, Homo sapien
aaaagatgctgaatctgttgaattc

SEQ ID NO: 5693368 - DNA, 25 bp, Homo sapien
taaatgtggttttgagggtatgaga

SEQ ID NO: 5693369 - DNA, 25 bp, Homo sapien
cctttgggctttgtgagagtatagt

SEQ ID NO: 5693370 - DNA, 25 bp, Homo sapien
tgagagtatagttggaagatttttc

SEQ ID NO: 5693371 - DNA, 25 bp, Homo sapien
gaatctgttgaattcttaaatgtgg

SEQ ID NO: 5693372 - DNA, 25 bp, Homo sapien
actatactctcacaaagcccaaagg

SEQ ID NO: 5693373 - DNA, 25 bp, Homo sapien
catttaagaattcaacagattcagc

SEQ ID NO: 5693374 - DNA, 25 bp, Homo sapien
gaaaaatcttccaactatactctca

SEQ ID NO: 5693375 - DNA, 25 bp, Homo sapien
gattcagcatctttttgtgataaag

SEQ ID NO: 5693376 - DNA, 25 bp, Homo sapien
tcataccctcaaaaccacatttaag

SEQ ID NO: 5693377 - DNA, 25 bp, Homo sapien
gaattcaacagattcagcatctttt

SEQ ID NO: 5693378 - DNA, 25 bp, Homo sapien
tgtgtgctgcctctattgtcaagct

SEQ ID NO: 5693379 - DNA, 25 bp, Homo sapien
gtgtgctgcctctattgtcaagctt

SEQ ID NO: 5693380 - DNA, 25 bp, Homo sapien
tgtgctgcctctattgtcaagcttt

SEQ ID NO: 5693381 - DNA, 25 bp, Homo sapien
tctgtgtgctgcctctattgtcaag

SEQ ID NO: 5693382 - DNA, 25 bp, Homo sapien
ctgtgtgctgcctctattgtcaagc

SEQ ID NO: 5693383 - DNA, 25 bp, Homo sapien
gtgctgcctctattgtcaagcttta

SEQ ID NO: 5693384 - DNA, 25 bp, Homo sapien
cttgacaatagaggcagcacacaga

SEQ ID NO: 5693385 - DNA, 25 bp, Homo sapien
taaagcttgacaatagaggcagcac

SEQ ID NO: 5693386 - DNA, 25 bp, Homo sapien
aagcttgacaatagaggcagcacac

SEQ ID NO: 5693387 - DNA, 25 bp, Homo sapien
agcttgacaatagaggcagcacaca

SEQ ID NO: 5693388 - DNA, 25 bp, Homo sapien
gcttgacaatagaggcagcacacag

SEQ ID NO: 5693389 - DNA, 25 bp, Homo sapien
aaagcttgacaatagaggcagcaca

SEQ ID NO: 5693390 - DNA, 25 bp, Homo sapien
tgcttcatgcatagtaaatcctcag

SEQ ID NO: 5693391 - DNA, 25 bp, Homo sapien
ccctagtgcccaggacagtgcttca

SEQ ID NO: 5693392 - DNA, 25 bp, Homo sapien
tagtgcccaggacagtgcttcatgc

SEQ ID NO: 5693393 - DNA, 25 bp, Homo sapien
agtgcccaggacagtgcttcatgca

SEQ ID NO: 5693394 - DNA, 25 bp, Homo sapien
cctagtgcccaggacagtgcttcat

SEQ ID NO: 5693395 - DNA, 25 bp, Homo sapien
cttcatgcatagtaaatcctcagtt

SEQ ID NO: 5693396 - DNA, 25 bp, Homo sapien
catgaagcactgtcctgggcactag

SEQ ID NO: 5693397 - DNA, 25 bp, Homo sapien
aactgaggatttactatgcatgaag

SEQ ID NO: 5693398 - DNA, 25 bp, Homo sapien
gcatgaagcactgtcctgggcacta

SEQ ID NO: 5693399 - DNA, 25 bp, Homo sapien
tgaagcactgtcctgggcactaggg

SEQ ID NO: 5693400 - DNA, 25 bp, Homo sapien
tgcatgaagcactgtcctgggcact

SEQ ID NO: 5693401 - DNA, 25 bp, Homo sapien
ctgaggatttactatgcatgaagca

SEQ ID NO: 5693402 - DNA, 25 bp, Homo sapien
gggctgtactggctgggtgcggtgg

SEQ ID NO: 5693403 - DNA, 25 bp, Homo sapien
ccaccgcacccagccagtacagccc

SEQ ID NO: 5693404 - DNA, 25 bp, Homo sapien
caagacccacatgttggactaaaaa

SEQ ID NO: 5693405 - DNA, 25 bp, Homo sapien
aagacccacatgttggactaaaaat

SEQ ID NO: 5693406 - DNA, 25 bp, Homo sapien
cccaagacccacatgttggactaaa

SEQ ID NO: 5693407 - DNA, 25 bp, Homo sapien
ccaagacccacatgttggactaaaa

SEQ ID NO: 5693408 - DNA, 25 bp, Homo sapien
agacccacatgttggactaaaaatt

SEQ ID NO: 5693409 - DNA, 25 bp, Homo sapien
tttagtccaacatgtgggtcttggg

SEQ ID NO: 5693410 - DNA, 25 bp, Homo sapien
tttttagtccaacatgtgggtcttg

SEQ ID NO: 5693411 - DNA, 25 bp, Homo sapien
aatttttagtccaacatgtgggtct

SEQ ID NO: 5693412 - DNA, 25 bp, Homo sapien
ttttagtccaacatgtgggtcttgg

SEQ ID NO: 5693413 - DNA, 25 bp, Homo sapien
atttttagtccaacatgtgggtctt

SEQ ID NO: 5693414 - DNA, 25 bp, Homo sapien
cccaagacccacatgttggactaaa

SEQ ID NO: 5693415 - DNA, 25 bp, Homo sapien
tgttactaaatctccatttctcccc

SEQ ID NO: 5693416 - DNA, 25 bp, Homo sapien
cagtgaatttcacacagataatcat

SEQ ID NO: 5693417 - DNA, 25 bp, Homo sapien
gataatcatctgttactaaatctcc

SEQ ID NO: 5693418 - DNA, 25 bp, Homo sapien
agacccacatgttggactaaaaatt

SEQ ID NO: 5693419 - DNA, 25 bp, Homo sapien
cacatgttggactaaaaatttctct

SEQ ID NO: 5693420 - DNA, 25 bp, Homo sapien
tttagtccaacatgtgggtcttggg

SEQ ID NO: 5693421 - DNA, 25 bp, Homo sapien
gatgattatctgtgtgaaattcact

SEQ ID NO: 5693422 - DNA, 25 bp, Homo sapien
gggagaaatggagatttagtaacag

SEQ ID NO: 5693423 - DNA, 25 bp, Homo sapien
aatttttagtccaacatgtgggtct

SEQ ID NO: 5693424 - DNA, 25 bp, Homo sapien
gagaaatttttagtccaacatgtgg

SEQ ID NO: 5693425 - DNA, 25 bp, Homo sapien
ggagatttagtaacagatgattatc

SEQ ID NO: 5693426 - DNA, 25 bp, Homo sapien
tgacatgattatctgtaggatctaa

SEQ ID NO: 5693427 - DNA, 25 bp, Homo sapien
ccatgacatgattatctgtaggatc

SEQ ID NO: 5693428 - DNA, 25 bp, Homo sapien
gacatgattatctgtaggatctaat

SEQ ID NO: 5693429 - DNA, 25 bp, Homo sapien
catgattatctgtaggatctaataa

SEQ ID NO: 5693430 - DNA, 25 bp, Homo sapien
tgattatctgtaggatctaataaca

SEQ ID NO: 5693431 - DNA, 25 bp, Homo sapien
catgacatgattatctgtaggatct

SEQ ID NO: 5693432 - DNA, 25 bp, Homo sapien
tgttattagatcctacagataatca

SEQ ID NO: 5693433 - DNA, 25 bp, Homo sapien
ttagatcctacagataatcatgtca

SEQ ID NO: 5693434 - DNA, 25 bp, Homo sapien
agatcctacagataatcatgtcatg

SEQ ID NO: 5693435 - DNA, 25 bp, Homo sapien
tagatcctacagataatcatgtcat

SEQ ID NO: 5693436 - DNA, 25 bp, Homo sapien
tattagatcctacagataatcatgt

SEQ ID NO: 5693437 - DNA, 25 bp, Homo sapien
gatcctacagataatcatgtcatgg

SEQ ID NO: 5693438 - DNA, 25 bp, Homo sapien
tgcttcaaaggtttaccgtctcgtc

SEQ ID NO: 5693439 - DNA, 25 bp, Homo sapien
tatgaagttttgcaacgtattttta

SEQ ID NO: 5693440 - DNA, 25 bp, Homo sapien
aatgcttcaaaggtttaccgtctcg

SEQ ID NO: 5693441 - DNA, 25 bp, Homo sapien
ttcaaaggtttaccgtctcgtctca

SEQ ID NO: 5693442 - DNA, 25 bp, Homo sapien
tttgaaatccctgaaggtgccaagt

SEQ ID NO: 5693443 - DNA, 25 bp, Homo sapien
caaaggtttaccgtctcgtctcacg

SEQ ID NO: 5693444 - DNA, 25 bp, Homo sapien
gacgagacggtaaacctttgaagca

SEQ ID NO: 5693445 - DNA, 25 bp, Homo sapien
cgtgagacgagacggtaaacctttg

SEQ ID NO: 5693446 - DNA, 25 bp, Homo sapien
tgagacgagacggtaaacctttgaa

SEQ ID NO: 5693447 - DNA, 25 bp, Homo sapien
cgagacggtaaacctttgaagcatt

SEQ ID NO: 5693448 - DNA, 25 bp, Homo sapien
acttggcaccttcagggatttcaaa

SEQ ID NO: 5693449 - DNA, 25 bp, Homo sapien
taaaaatacgttgcaaaacttcata

SEQ ID NO: 5693450 - DNA, 25 bp, Homo sapien
ctctgtatctctcggccttcatcac

SEQ ID NO: 5693451 - DNA, 25 bp, Homo sapien
tcagatagtttgaaagcctgggctc

SEQ ID NO: 5693452 - DNA, 25 bp, Homo sapien
gctcaggatcatcagatagtttgaa

SEQ ID NO: 5693453 - DNA, 25 bp, Homo sapien
gatcatcagatagtttgaaagcctg

SEQ ID NO: 5693454 - DNA, 25 bp, Homo sapien
catctgtgctcatatttttattaat

SEQ ID NO: 5693455 - DNA, 25 bp, Homo sapien
ggccttcatcaccatctgtgctcat

SEQ ID NO: 5693456 - DNA, 25 bp, Homo sapien
atgagcacagatggtgatgaaggcc

SEQ ID NO: 5693457 - DNA, 25 bp, Homo sapien
ttcaaactatctgatgatcctgagc

SEQ ID NO: 5693458 - DNA, 25 bp, Homo sapien
gagcccaggctttcaaactatctga

SEQ ID NO: 5693459 - DNA, 25 bp, Homo sapien
aaatatgagcacagatggtgatgaa

SEQ ID NO: 5693460 - DNA, 25 bp, Homo sapien
attaataaaaatatgagcacagatg

SEQ ID NO: 5693461 - DNA, 25 bp, Homo sapien
gtgatgaaggccgagagatacagag

SEQ ID NO: 5693462 - DNA, 25 bp, Homo sapien
atagcttcctctacccacctaggaa

SEQ ID NO: 5693463 - DNA, 25 bp, Homo sapien
aagaagctcagccaggacttgatgt

SEQ ID NO: 5693464 - DNA, 25 bp, Homo sapien
tacttctttgacgtcccagatggag

SEQ ID NO: 5693465 - DNA, 25 bp, Homo sapien
tcagccaggacttgatgtccggttt

SEQ ID NO: 5693466 - DNA, 25 bp, Homo sapien
tgatgtccggtttacttctttgacg

SEQ ID NO: 5693467 - DNA, 25 bp, Homo sapien
caggacttgatgtccggtttacttc

SEQ ID NO: 5693468 - DNA, 25 bp, Homo sapien
ctcgaggatctgtcggtgacatagc

SEQ ID NO: 5693469 - DNA, 25 bp, Homo sapien
tcgaggatctgtcggtgacatagct

SEQ ID NO: 5693470 - DNA, 25 bp, Homo sapien
cgaggatctgtcggtgacatagctt

SEQ ID NO: 5693471 - DNA, 25 bp, Homo sapien
gctatgtcaccgacagatcctcgag

SEQ ID NO: 5693472 - DNA, 25 bp, Homo sapien
aagctatgtcaccgacagatcctcg

SEQ ID NO: 5693473 - DNA, 25 bp, Homo sapien
agctatgtcaccgacagatcctcga

SEQ ID NO: 5693474 - DNA, 25 bp, Homo sapien
tcaaagaagtaaaccggacatcaag

SEQ ID NO: 5693475 - DNA, 25 bp, Homo sapien
gacatcaagtcctggctgagcttct

SEQ ID NO: 5693476 - DNA, 25 bp, Homo sapien
catctgggacgtcaaagaagtaaac

SEQ ID NO: 5693477 - DNA, 25 bp, Homo sapien
tctccatctgggacgtcaaagaagt

SEQ ID NO: 5693478 - DNA, 25 bp, Homo sapien
ttcctaggtgggtagaggaagctat

SEQ ID NO: 5693479 - DNA, 25 bp, Homo sapien
gaagtaaaccggacatcaagtcctg

SEQ ID NO: 5693480 - DNA, 25 bp, Homo sapien
tcagtatcgcatgttggtttttaat

SEQ ID NO: 5693481 - DNA, 25 bp, Homo sapien
taaagcgatgtcatttcttgcagta

SEQ ID NO: 5693482 - DNA, 25 bp, Homo sapien
gtcatttcttgcagtagcgcagggc

SEQ ID NO: 5693483 - DNA, 25 bp, Homo sapien
aaagcgatgtcatttcttgcagtag

SEQ ID NO: 5693484 - DNA, 25 bp, Homo sapien
tgtcatttcttgcagtagcgcaggg

SEQ ID NO: 5693485 - DNA, 25 bp, Homo sapien
gttggtttttaataaagcgatgtca

SEQ ID NO: 5693486 - DNA, 25 bp, Homo sapien
attaaaaaccaacatgcgatactga

SEQ ID NO: 5693487 - DNA, 25 bp, Homo sapien
ctactgcaagaaatgacatcgcttt

SEQ ID NO: 5693488 - DNA, 25 bp, Homo sapien
gccctgcgctactgcaagaaatgac

SEQ ID NO: 5693489 - DNA, 25 bp, Homo sapien
tactgcaagaaatgacatcgcttta

SEQ ID NO: 5693490 - DNA, 25 bp, Homo sapien
tgacatcgctttattaaaaaccaac

SEQ ID NO: 5693491 - DNA, 25 bp, Homo sapien
ccctgcgctactgcaagaaatgaca

SEQ ID NO: 5693492 - DNA, 25 bp, Homo sapien
cggacctcgattgggtggcccgaat

SEQ ID NO: 5693493 - DNA, 25 bp, Homo sapien
ggacgctgataggtgcagaggcggg

SEQ ID NO: 5693494 - DNA, 25 bp, Homo sapien
gcctttccgagcggggacgctgata

SEQ ID NO: 5693495 - DNA, 25 bp, Homo sapien
gacctcgattgggtggcccgaatcc

SEQ ID NO: 5693496 - DNA, 25 bp, Homo sapien
gggacgctgataggtgcagaggcgg

SEQ ID NO: 5693497 - DNA, 25 bp, Homo sapien
tcgattgggtggcccgaatccccgc

SEQ ID NO: 5693498 - DNA, 25 bp, Homo sapien
aaccccgcctctgcacctatcagcg

SEQ ID NO: 5693499 - DNA, 25 bp, Homo sapien
attcgggccacccaatcgaggtccg

SEQ ID NO: 5693500 - DNA, 25 bp, Homo sapien
gcctctgcacctatcagcgtccccg

SEQ ID NO: 5693501 - DNA, 25 bp, Homo sapien
ggattcgggccacccaatcgaggtc

SEQ ID NO: 5693502 - DNA, 25 bp, Homo sapien
acctatcagcgtccccgctcggaaa

SEQ ID NO: 5693503 - DNA, 25 bp, Homo sapien
tatcagcgtccccgctcggaaaggc

SEQ ID NO: 5693504 - DNA, 25 bp, Homo sapien
ggtgggaagccagcgcccactcgca

SEQ ID NO: 5693505 - DNA, 25 bp, Homo sapien
gcgcccactcgcaggggatccctct

SEQ ID NO: 5693506 - DNA, 25 bp, Homo sapien
aagccagcgcccactcgcaggggat

SEQ ID NO: 5693507 - DNA, 25 bp, Homo sapien
gtgggaagccagcgcccactcgcag

SEQ ID NO: 5693508 - DNA, 25 bp, Homo sapien
tgggaagccagcgcccactcgcagg

SEQ ID NO: 5693509 - DNA, 25 bp, Homo sapien
tggtgggaagccagcgcccactcgc

SEQ ID NO: 5693510 - DNA, 25 bp, Homo sapien
atcccctgcgagtgggcgctggctt

SEQ ID NO: 5693511 - DNA, 25 bp, Homo sapien
gcgagtgggcgctggcttcccacca

SEQ ID NO: 5693512 - DNA, 25 bp, Homo sapien
tgcgagtgggcgctggcttcccacc

SEQ ID NO: 5693513 - DNA, 25 bp, Homo sapien
gggatcccctgcgagtgggcgctgg

SEQ ID NO: 5693514 - DNA, 25 bp, Homo sapien
gagagggatcccctgcgagtgggcg

SEQ ID NO: 5693515 - DNA, 25 bp, Homo sapien
tcccctgcgagtgggcgctggcttc

SEQ ID NO: 5693516 - DNA, 25 bp, Homo sapien
ggccagttgcctctttccttatttg

SEQ ID NO: 5693517 - DNA, 25 bp, Homo sapien
cacaacaaagcagaagactgggtgg

SEQ ID NO: 5693518 - DNA, 25 bp, Homo sapien
ggcacaacaaagcagaagactgggt

SEQ ID NO: 5693519 - DNA, 25 bp, Homo sapien
acaacaaagcagaagactgggtggt

SEQ ID NO: 5693520 - DNA, 25 bp, Homo sapien
tggtgggaagccagcgcccactcgc

SEQ ID NO: 5693521 - DNA, 25 bp, Homo sapien
gggcacaacaaagcagaagactggg

SEQ ID NO: 5693522 - DNA, 25 bp, Homo sapien
gtcttctgctttgttgtgcccctca

SEQ ID NO: 5693523 - DNA, 25 bp, Homo sapien
atcccctgcgagtgggcgctggctt

SEQ ID NO: 5693524 - DNA, 25 bp, Homo sapien
accacccagtcttctgctttgttgt

SEQ ID NO: 5693525 - DNA, 25 bp, Homo sapien
cacccagtcttctgctttgttgtgc

SEQ ID NO: 5693526 - DNA, 25 bp, Homo sapien
ccagtcttctgctttgttgtgcccc

SEQ ID NO: 5693527 - DNA, 25 bp, Homo sapien
caaataaggaaagaggcaactggcc

SEQ ID NO: 5693528 - DNA, 25 bp, Homo sapien
tcagctggtgggtggtatgtatgtg

SEQ ID NO: 5693529 - DNA, 25 bp, Homo sapien
cacatacataccacccaccagctga

SEQ ID NO: 5693530 - DNA, 25 bp, Homo sapien
tcagctggtgggtggtatgtatgtg

SEQ ID NO: 5693531 - DNA, 25 bp, Homo sapien
taaaatgacctcagctggtgggtgg

SEQ ID NO: 5693532 - DNA, 25 bp, Homo sapien
gtctcctaaaatgacctcagctggt

SEQ ID NO: 5693533 - DNA, 25 bp, Homo sapien
tcctaaaatgacctcagctggtggg

SEQ ID NO: 5693534 - DNA, 25 bp, Homo sapien
aaatgacctcagctggtgggtggta

SEQ ID NO: 5693535 - DNA, 25 bp, Homo sapien
acctcagctggtgggtggtatgtat

SEQ ID NO: 5693536 - DNA, 25 bp, Homo sapien
aaaacacatacataccacccaccag

SEQ ID NO: 5693537 - DNA, 25 bp, Homo sapien
ccaccagctgaggtcattttaggag

SEQ ID NO: 5693538 - DNA, 25 bp, Homo sapien
accagctgaggtcattttaggagac

SEQ ID NO: 5693539 - DNA, 25 bp, Homo sapien
cacccaccagctgaggtcattttag

SEQ ID NO: 5693540 - DNA, 25 bp, Homo sapien
taccacccaccagctgaggtcattt

SEQ ID NO: 5693541 - DNA, 25 bp, Homo sapien
atacataccacccaccagctgaggt

SEQ ID NO: 5693542 - DNA, 25 bp, Homo sapien
cgcccggccggtggtatgtatgtaa

SEQ ID NO: 5693543 - DNA, 25 bp, Homo sapien
gtatgtaaaggctcaccaaatgcag

SEQ ID NO: 5693544 - DNA, 25 bp, Homo sapien
gcccggccggtggtatgtatgtaaa

SEQ ID NO: 5693545 - DNA, 25 bp, Homo sapien
cccggccggtggtatgtatgtaaag

SEQ ID NO: 5693546 - DNA, 25 bp, Homo sapien
tatgtatgtaaaggctcaccaaatg

SEQ ID NO: 5693547 - DNA, 25 bp, Homo sapien
cacgcccggccggtggtatgtatgt

SEQ ID NO: 5693548 - DNA, 25 bp, Homo sapien
catttggtgagcctttacatacata

SEQ ID NO: 5693549 - DNA, 25 bp, Homo sapien
tttacatacataccaccggccgggc

SEQ ID NO: 5693550 - DNA, 25 bp, Homo sapien
ctgcatttggtgagcctttacatac

SEQ ID NO: 5693551 - DNA, 25 bp, Homo sapien
tgcatttggtgagcctttacataca

SEQ ID NO: 5693552 - DNA, 25 bp, Homo sapien
ctttacatacataccaccggccggg

SEQ ID NO: 5693553 - DNA, 25 bp, Homo sapien
acatacataccaccggccgggcgtg

SEQ ID NO: 5693554 - DNA, 25 bp, Homo sapien
tacatgcaaagtactccccttctaa

SEQ ID NO: 5693555 - DNA, 25 bp, Homo sapien
tttgttattgggtggtatttgcagg

SEQ ID NO: 5693556 - DNA, 25 bp, Homo sapien
tgttttgttattgggtggtatttgc

SEQ ID NO: 5693557 - DNA, 25 bp, Homo sapien
tggtatttgcaggatacatgcaaag

SEQ ID NO: 5693558 - DNA, 25 bp, Homo sapien
caaattctaaacacaactggccctc

SEQ ID NO: 5693559 - DNA, 25 bp, Homo sapien
catgcaaagtactccccttctaaaa

SEQ ID NO: 5693560 - DNA, 25 bp, Homo sapien
tttgcatgtatcctgcaaataccac

SEQ ID NO: 5693561 - DNA, 25 bp, Homo sapien
gcaaataccacccaataacaaaaca

SEQ ID NO: 5693562 - DNA, 25 bp, Homo sapien
gagggccagttgtgtttagaatttg

SEQ ID NO: 5693563 - DNA, 25 bp, Homo sapien
cctgcaaataccacccaataacaaa

SEQ ID NO: 5693564 - DNA, 25 bp, Homo sapien
tactttgcatgtatcctgcaaatac

SEQ ID NO: 5693565 - DNA, 25 bp, Homo sapien
ttagaaggggagtactttgcatgta

SEQ ID NO: 5693566 - DNA, 25 bp, Homo sapien
ctgtttttgaatacccatgagtctt

SEQ ID NO: 5693567 - DNA, 25 bp, Homo sapien
tgagtcttcatgtgcaagctgcctt

SEQ ID NO: 5693568 - DNA, 25 bp, Homo sapien
gaatacccatgagtcttcatgtgca

SEQ ID NO: 5693569 - DNA, 25 bp, Homo sapien
tcttcatgtgcaagctgcctttttg

SEQ ID NO: 5693570 - DNA, 25 bp, Homo sapien
tacccatgagtcttcatgtgcaagc

SEQ ID NO: 5693571 - DNA, 25 bp, Homo sapien
catgagtcttcatgtgcaagctgcc

SEQ ID NO: 5693572 - DNA, 25 bp, Homo sapien
cacatgaagactcatgggtattcaa

SEQ ID NO: 5693573 - DNA, 25 bp, Homo sapien
gcttgcacatgaagactcatgggta

SEQ ID NO: 5693574 - DNA, 25 bp, Homo sapien
aagactcatgggtattcaaaaacag

SEQ ID NO: 5693575 - DNA, 25 bp, Homo sapien
aaggcagcttgcacatgaagactca

SEQ ID NO: 5693576 - DNA, 25 bp, Homo sapien
caaaaaggcagcttgcacatgaaga

SEQ ID NO: 5693577 - DNA, 25 bp, Homo sapien
gcagcttgcacatgaagactcatgg

SEQ ID NO: 5693578 - DNA, 25 bp, Homo sapien
gatattgatctccaaatggtcttgg

SEQ ID NO: 5693579 - DNA, 25 bp, Homo sapien
ttgtgatattgatctccaaatggtc

SEQ ID NO: 5693580 - DNA, 25 bp, Homo sapien
tacttagtactaatacagtaagaat

SEQ ID NO: 5693581 - DNA, 25 bp, Homo sapien
tggtcttggttaatacttagtacta

SEQ ID NO: 5693582 - DNA, 25 bp, Homo sapien
tattgatctccaaatggtcttggtt

SEQ ID NO: 5693583 - DNA, 25 bp, Homo sapien
caaatggtcttggttaatacttagt

SEQ ID NO: 5693584 - DNA, 25 bp, Homo sapien
caagaccatttggagatcaatatca

SEQ ID NO: 5693585 - DNA, 25 bp, Homo sapien
gaccatttggagatcaatatcacaa

SEQ ID NO: 5693586 - DNA, 25 bp, Homo sapien
taagtattaaccaagaccatttgga

SEQ ID NO: 5693587 - DNA, 25 bp, Homo sapien
tactgtattagtactaagtattaac

SEQ ID NO: 5693588 - DNA, 25 bp, Homo sapien
tagtactaagtattaaccaagacca

SEQ ID NO: 5693589 - DNA, 25 bp, Homo sapien
taaccaagaccatttggagatcaat

SEQ ID NO: 5693590 - DNA, 25 bp, Homo sapien
aatgagagcgaatgaaacggaagct

SEQ ID NO: 5693591 - DNA, 25 bp, Homo sapien
tgagagcgaatgaaacggaagctct

SEQ ID NO: 5693592 - DNA, 25 bp, Homo sapien
caatgagagcgaatgaaacggaagc

SEQ ID NO: 5693593 - DNA, 25 bp, Homo sapien
gcaatgagagcgaatgaaacggaag

SEQ ID NO: 5693594 - DNA, 25 bp, Homo sapien
atgagagcgaatgaaacggaagctc

SEQ ID NO: 5693595 - DNA, 25 bp, Homo sapien
cttccgtttcattcgctctcattgc

SEQ ID NO: 5693596 - DNA, 25 bp, Homo sapien
agcttccgtttcattcgctctcatt

SEQ ID NO: 5693597 - DNA, 25 bp, Homo sapien
agagcttccgtttcattcgctctca

SEQ ID NO: 5693598 - DNA, 25 bp, Homo sapien
gagcttccgtttcattcgctctcat

SEQ ID NO: 5693599 - DNA, 25 bp, Homo sapien
gcttccgtttcattcgctctcattg

SEQ ID NO: 5693600 - DNA, 25 bp, Homo sapien
tgttaaataaatgaagagcttccgt

SEQ ID NO: 5693601 - DNA, 25 bp, Homo sapien
tgaagagcttccgtttcattcgctc

SEQ ID NO: 5693602 - DNA, 25 bp, Homo sapien
aaatgaagagcttccgtttcattcg

SEQ ID NO: 5693603 - DNA, 25 bp, Homo sapien
agagcttccgtttcattcgctctca

SEQ ID NO: 5693604 - DNA, 25 bp, Homo sapien
gagcttccgtttcattcgctctcat

SEQ ID NO: 5693605 - DNA, 25 bp, Homo sapien
gcttccgtttcattcgctctcattg

SEQ ID NO: 5693606 - DNA, 25 bp, Homo sapien
tggggggctactatccaatctgtag

SEQ ID NO: 5693607 - DNA, 25 bp, Homo sapien
ggggggctactatccaatctgtaga

SEQ ID NO: 5693608 - DNA, 25 bp, Homo sapien
ctgtggggggctactatccaatctg

SEQ ID NO: 5693609 - DNA, 25 bp, Homo sapien
tgtggggggctactatccaatctgt

SEQ ID NO: 5693610 - DNA, 25 bp, Homo sapien
ctctgtggggggctactatccaatc

SEQ ID NO: 5693611 - DNA, 25 bp, Homo sapien
gtggggggctactatccaatctgta

SEQ ID NO: 5693612 - DNA, 25 bp, Homo sapien
tctacagattggatagtagcccccc

SEQ ID NO: 5693613 - DNA, 25 bp, Homo sapien
agattggatagtagccccccacaga

SEQ ID NO: 5693614 - DNA, 25 bp, Homo sapien
tacagattggatagtagccccccac

SEQ ID NO: 5693615 - DNA, 25 bp, Homo sapien
ctacagattggatagtagcccccca

SEQ ID NO: 5693616 - DNA, 25 bp, Homo sapien
cagattggatagtagccccccacag

SEQ ID NO: 5693617 - DNA, 25 bp, Homo sapien
acagattggatagtagccccccaca

SEQ ID NO: 5693618 - DNA, 25 bp, Homo sapien
tgtagagtgaatgcagagttgtcag

SEQ ID NO: 5693619 - DNA, 25 bp, Homo sapien
gggctactatccaatctgtagaccc

SEQ ID NO: 5693620 - DNA, 25 bp, Homo sapien
gagttgtcaggtctttaacaatgcc

SEQ ID NO: 5693621 - DNA, 25 bp, Homo sapien
aggtctttaacaatgcctctgtggg

SEQ ID NO: 5693622 - DNA, 25 bp, Homo sapien
cccaaaggaactgcggatggtataa

SEQ ID NO: 5693623 - DNA, 25 bp, Homo sapien
tctgtagacccaaaggaactgcgga

SEQ ID NO: 5693624 - DNA, 25 bp, Homo sapien
ttataccatccgcagttcctttggg

SEQ ID NO: 5693625 - DNA, 25 bp, Homo sapien
ccccacagaggcattgttaaagacc

SEQ ID NO: 5693626 - DNA, 25 bp, Homo sapien
tgttaaagacctgacaactctgcat

SEQ ID NO: 5693627 - DNA, 25 bp, Homo sapien
ggtctacagattggatagtagcccc

SEQ ID NO: 5693628 - DNA, 25 bp, Homo sapien
tccgcagttcctttgggtctacaga

SEQ ID NO: 5693629 - DNA, 25 bp, Homo sapien
agattggatagtagccccccacaga

SEQ ID NO: 5693630 - DNA, 25 bp, Homo sapien
tggtatctgatttatggtggcttga

SEQ ID NO: 5693631 - DNA, 25 bp, Homo sapien
gatggtatctgatttatggtggctt

SEQ ID NO: 5693632 - DNA, 25 bp, Homo sapien
ctttacagtggtgctaaaacaatat

SEQ ID NO: 5693633 - DNA, 25 bp, Homo sapien
tctgatttatggtggcttgatttaa

SEQ ID NO: 5693634 - DNA, 25 bp, Homo sapien
ttaactttacagtggtgctaaaaca

SEQ ID NO: 5693635 - DNA, 25 bp, Homo sapien
actttacagtggtgctaaaacaata

SEQ ID NO: 5693636 - DNA, 25 bp, Homo sapien
taaatcaagccaccataaatcagat

SEQ ID NO: 5693637 - DNA, 25 bp, Homo sapien
attaaatcaagccaccataaatcag

SEQ ID NO: 5693638 - DNA, 25 bp, Homo sapien
tgttttagcaccactgtaaagttaa

SEQ ID NO: 5693639 - DNA, 25 bp, Homo sapien
atattgttttagcaccactgtaaag

SEQ ID NO: 5693640 - DNA, 25 bp, Homo sapien
tattgttttagcaccactgtaaagt

SEQ ID NO: 5693641 - DNA, 25 bp, Homo sapien
caagccaccataaatcagataccat

SEQ ID NO: 5693642 - DNA, 25 bp, Homo sapien
tgtgttagatgattgtgcacaattg

SEQ ID NO: 5693643 - DNA, 25 bp, Homo sapien
gtgttagatgattgtgcacaattgt

SEQ ID NO: 5693644 - DNA, 25 bp, Homo sapien
ttgtgttagatgattgtgcacaatt

SEQ ID NO: 5693645 - DNA, 25 bp, Homo sapien
caattgtgcacaatcatctaacaca

SEQ ID NO: 5693646 - DNA, 25 bp, Homo sapien
aattgtgcacaatcatctaacacaa

SEQ ID NO: 5693647 - DNA, 25 bp, Homo sapien
acaattgtgcacaatcatctaacac

SEQ ID NO: 5693648 - DNA, 25 bp, Homo sapien
tcagtgtactgtctttaataaatta

SEQ ID NO: 5693649 - DNA, 25 bp, Homo sapien
taaaccagtactcttcagtgtactg

SEQ ID NO: 5693650 - DNA, 25 bp, Homo sapien
gtactcttcagtgtactgtctttaa

SEQ ID NO: 5693651 - DNA, 25 bp, Homo sapien
tgtgttagatgattgtgcacaattg

SEQ ID NO: 5693652 - DNA, 25 bp, Homo sapien
gtgttagatgattgtgcacaattgt

SEQ ID NO: 5693653 - DNA, 25 bp, Homo sapien
taaattatatgcaatattcaacact

SEQ ID NO: 5693654 - DNA, 25 bp, Homo sapien
caattgtgcacaatcatctaacaca

SEQ ID NO: 5693655 - DNA, 25 bp, Homo sapien
taaagtgttgaatattgcatataat

SEQ ID NO: 5693656 - DNA, 25 bp, Homo sapien
acaattgtgcacaatcatctaacac

SEQ ID NO: 5693657 - DNA, 25 bp, Homo sapien
taatttattaaagacagtacactga

SEQ ID NO: 5693658 - DNA, 25 bp, Homo sapien
cagtacactgaagagtactggttta

SEQ ID NO: 5693659 - DNA, 25 bp, Homo sapien
ttaaagacagtacactgaagagtac

SEQ ID NO: 5693660 - DNA, 25 bp, Homo sapien
cttgacctccttggctcaagtgatc

SEQ ID NO: 5693661 - DNA, 25 bp, Homo sapien
gccttgacctccttggctcaagtga

SEQ ID NO: 5693662 - DNA, 25 bp, Homo sapien
agccttgacctccttggctcaagtg

SEQ ID NO: 5693663 - DNA, 25 bp, Homo sapien
cagccttgacctccttggctcaagt

SEQ ID NO: 5693664 - DNA, 25 bp, Homo sapien
tgacctccttggctcaagtgatcct

SEQ ID NO: 5693665 - DNA, 25 bp, Homo sapien
ccttgacctccttggctcaagtgat

SEQ ID NO: 5693666 - DNA, 25 bp, Homo sapien
cacttgagccaaggaggtcaaggct

SEQ ID NO: 5693667 - DNA, 25 bp, Homo sapien
aggatcacttgagccaaggaggtca

SEQ ID NO: 5693668 - DNA, 25 bp, Homo sapien
acttgagccaaggaggtcaaggctg

SEQ ID NO: 5693669 - DNA, 25 bp, Homo sapien
gatcacttgagccaaggaggtcaag

SEQ ID NO: 5693670 - DNA, 25 bp, Homo sapien
atcacttgagccaaggaggtcaagg

SEQ ID NO: 5693671 - DNA, 25 bp, Homo sapien
tcacttgagccaaggaggtcaaggc

SEQ ID NO: 5693672 - DNA, 25 bp, Homo sapien
ccattacaagtcaaggagcatctgt

SEQ ID NO: 5693673 - DNA, 25 bp, Homo sapien
caacttatgatagttttattgagac

SEQ ID NO: 5693674 - DNA, 25 bp, Homo sapien
cttaaccccattacaagtcaaggag

SEQ ID NO: 5693675 - DNA, 25 bp, Homo sapien
accatgttcagcctgtaaatgcatt

SEQ ID NO: 5693676 - DNA, 25 bp, Homo sapien
tattgagacttaaccccattacaag

SEQ ID NO: 5693677 - DNA, 25 bp, Homo sapien
aacttataatactttcaacttatga

SEQ ID NO: 5693678 - DNA, 25 bp, Homo sapien
tcataagttgaaagtattataagtt

SEQ ID NO: 5693679 - DNA, 25 bp, Homo sapien
gggttaagtctcaataaaactatca

SEQ ID NO: 5693680 - DNA, 25 bp, Homo sapien
aatgcatttacaggctgaacatggt

SEQ ID NO: 5693681 - DNA, 25 bp, Homo sapien
gtctcaataaaactatcataagttg

SEQ ID NO: 5693682 - DNA, 25 bp, Homo sapien
cagatgctccttgacttgtaatggg

SEQ ID NO: 5693683 - DNA, 25 bp, Homo sapien
ttaaaaatgcatttacaggctgaac

SEQ ID NO: 5693684 - DNA, 25 bp, Homo sapien
ggaaggtagtttgaactatctctag

SEQ ID NO: 5693685 - DNA, 25 bp, Homo sapien
gttggaaggtagtttgaactatctc

SEQ ID NO: 5693686 - DNA, 25 bp, Homo sapien
gaactatctctagtgcatttaggca

SEQ ID NO: 5693687 - DNA, 25 bp, Homo sapien
ggtagtttgaactatctctagtgca

SEQ ID NO: 5693688 - DNA, 25 bp, Homo sapien
catttaggcatctggggttagattt

SEQ ID NO: 5693689 - DNA, 25 bp, Homo sapien
ctatctctagtgcatttaggcatct

SEQ ID NO: 5693690 - DNA, 25 bp, Homo sapien
gcctaaatgcactagagatagttca

SEQ ID NO: 5693691 - DNA, 25 bp, Homo sapien
tgcactagagatagttcaaactacc

SEQ ID NO: 5693692 - DNA, 25 bp, Homo sapien
gatgcctaaatgcactagagatagt

SEQ ID NO: 5693693 - DNA, 25 bp, Homo sapien
aaccccaagattctcaattccttat

SEQ ID NO: 5693694 - DNA, 25 bp, Homo sapien
gagatagttcaaactaccttccaac

SEQ ID NO: 5693695 - DNA, 25 bp, Homo sapien
aaatctaaccccagatgcctaaatg

SEQ ID NO: 5693696 - DNA, 25 bp, Homo sapien
tagggcagcactcccacaatgatga

SEQ ID NO: 5693697 - DNA, 25 bp, Homo sapien
tagagtactacataagcccagaggt

SEQ ID NO: 5693698 - DNA, 25 bp, Homo sapien
agtactacataagcccagaggtggg

SEQ ID NO: 5693699 - DNA, 25 bp, Homo sapien
gagaggggtttgcatagagtactac

SEQ ID NO: 5693700 - DNA, 25 bp, Homo sapien
aacttagggcagcactcccacaatg

SEQ ID NO: 5693701 - DNA, 25 bp, Homo sapien
gggacagccaacttagggcagcact

SEQ ID NO: 5693702 - DNA, 25 bp, Homo sapien
tcatcattgtgggagtgctgcccta

SEQ ID NO: 5693703 - DNA, 25 bp, Homo sapien
acctctgggcttatgtagtactcta

SEQ ID NO: 5693704 - DNA, 25 bp, Homo sapien
cccacctctgggcttatgtagtact

SEQ ID NO: 5693705 - DNA, 25 bp, Homo sapien
tagtactctatgcaaacccctctca

SEQ ID NO: 5693706 - DNA, 25 bp, Homo sapien
gagtgctgccctaagttggctgtcc

SEQ ID NO: 5693707 - DNA, 25 bp, Homo sapien
cattgtgggagtgctgccctaagtt

SEQ ID NO: 5693708 - DNA, 25 bp, Homo sapien
caggcgagcaccaccatacctggct

SEQ ID NO: 5693709 - DNA, 25 bp, Homo sapien
attacaggcgagcaccaccatacct

SEQ ID NO: 5693710 - DNA, 25 bp, Homo sapien
gcgagcaccaccatacctggctatt

SEQ ID NO: 5693711 - DNA, 25 bp, Homo sapien
acaggcgagcaccaccatacctggc

SEQ ID NO: 5693712 - DNA, 25 bp, Homo sapien
tacaggcgagcaccaccatacctgg

SEQ ID NO: 5693713 - DNA, 25 bp, Homo sapien
gagcaccaccatacctggctatttt

SEQ ID NO: 5693714 - DNA, 25 bp, Homo sapien
ccaggtatggtggtgctcgcctgta

SEQ ID NO: 5693715 - DNA, 25 bp, Homo sapien
aggtatggtggtgctcgcctgtaat

SEQ ID NO: 5693716 - DNA, 25 bp, Homo sapien
aaaaatagccaggtatggtggtgct

SEQ ID NO: 5693717 - DNA, 25 bp, Homo sapien
aatagccaggtatggtggtgctcgc

SEQ ID NO: 5693718 - DNA, 25 bp, Homo sapien
agccaggtatggtggtgctcgcctg

SEQ ID NO: 5693719 - DNA, 25 bp, Homo sapien
gccaggtatggtggtgctcgcctgt

SEQ ID NO: 5693720 - DNA, 25 bp, Homo sapien
gaatatgttattctcggcagatgga

SEQ ID NO: 5693721 - DNA, 25 bp, Homo sapien
agctgcacactgagatgtcttaaag

SEQ ID NO: 5693722 - DNA, 25 bp, Homo sapien
ggctctgataggaatttacaagttg

SEQ ID NO: 5693723 - DNA, 25 bp, Homo sapien
ctctgataggaatttacaagttgaa

SEQ ID NO: 5693724 - DNA, 25 bp, Homo sapien
gctgcacactgagatgtcttaaagg

SEQ ID NO: 5693725 - DNA, 25 bp, Homo sapien
tgataggaatttacaagttgaaaga

SEQ ID NO: 5693726 - DNA, 25 bp, Homo sapien
caacttgtaaattcctatcagagcc

SEQ ID NO: 5693727 - DNA, 25 bp, Homo sapien
cctttaagacatctcagtgtgcagc

SEQ ID NO: 5693728 - DNA, 25 bp, Homo sapien
tccatctgccgagaataacatattc

SEQ ID NO: 5693729 - DNA, 25 bp, Homo sapien
ttcaacttgtaaattcctatcagag

SEQ ID NO: 5693730 - DNA, 25 bp, Homo sapien
catctgccgagaataacatattccc

SEQ ID NO: 5693731 - DNA, 25 bp, Homo sapien
tctttcaacttgtaaattcctatca

SEQ ID NO: 5693732 - DNA, 25 bp, Homo sapien
cctcatgaccacagagttgcacaac

SEQ ID NO: 5693733 - DNA, 25 bp, Homo sapien
caggggtaccatttacaatgtcagc

SEQ ID NO: 5693734 - DNA, 25 bp, Homo sapien
tgagtctctttctggttatcatacc

SEQ ID NO: 5693735 - DNA, 25 bp, Homo sapien
ggttatcatacctcatgaccacaga

SEQ ID NO: 5693736 - DNA, 25 bp, Homo sapien
catacctcatgaccacagagttgca

SEQ ID NO: 5693737 - DNA, 25 bp, Homo sapien
caatgtcagcaatgtaaggtggtcc

SEQ ID NO: 5693738 - DNA, 25 bp, Homo sapien
gttgtgcaactctgtggtcatgagg

SEQ ID NO: 5693739 - DNA, 25 bp, Homo sapien
ggaccaccttacattgctgacattg

SEQ ID NO: 5693740 - DNA, 25 bp, Homo sapien
tctgtggtcatgaggtatgataacc

SEQ ID NO: 5693741 - DNA, 25 bp, Homo sapien
tgctgacattgtaaatggtacccct

SEQ ID NO: 5693742 - DNA, 25 bp, Homo sapien
ggtatgataaccagaaagagactca

SEQ ID NO: 5693743 - DNA, 25 bp, Homo sapien
gacattgtaaatggtacccctggag

SEQ ID NO: 5693744 - DNA, 25 bp, Homo sapien
agagaatctataagatttcttcaga

SEQ ID NO: 5693745 - DNA, 25 bp, Homo sapien
atacgttggggggtgcagccgtgag

SEQ ID NO: 5693746 - DNA, 25 bp, Homo sapien
gagaatctataagatttcttcagat

SEQ ID NO: 5693747 - DNA, 25 bp, Homo sapien
aatatacgttggggggtgcagccgt

SEQ ID NO: 5693748 - DNA, 25 bp, Homo sapien
tacgttggggggtgcagccgtgaga

SEQ ID NO: 5693749 - DNA, 25 bp, Homo sapien
tagagaatctataagatttcttcag

SEQ ID NO: 5693750 - DNA, 25 bp, Homo sapien
tgaagaaatcttatagattctctaa

SEQ ID NO: 5693751 - DNA, 25 bp, Homo sapien
tctcacggctgcaccccccaacgta

SEQ ID NO: 5693752 - DNA, 25 bp, Homo sapien
atctgaagaaatcttatagattctc

SEQ ID NO: 5693753 - DNA, 25 bp, Homo sapien
ctgaagaaatcttatagattctcta

SEQ ID NO: 5693754 - DNA, 25 bp, Homo sapien
acggctgcaccccccaacgtatatt

SEQ ID NO: 5693755 - DNA, 25 bp, Homo sapien
tctgaagaaatcttatagattctct

SEQ ID NO: 5693756 - DNA, 25 bp, Homo sapien
agagaatctataagatttcttcaga

SEQ ID NO: 5693757 - DNA, 25 bp, Homo sapien
gagaatctataagatttcttcagat

SEQ ID NO: 5693758 - DNA, 25 bp, Homo sapien
taaatatacgttggggggtgcagcc

SEQ ID NO: 5693759 - DNA, 25 bp, Homo sapien
cagttttcttctttagagaatctat

SEQ ID NO: 5693760 - DNA, 25 bp, Homo sapien
tacgttggggggtgcagccgtgaga

SEQ ID NO: 5693761 - DNA, 25 bp, Homo sapien
tagagaatctataagatttcttcag

SEQ ID NO: 5693762 - DNA, 25 bp, Homo sapien
atctgaagaaatcttatagattctc

SEQ ID NO: 5693763 - DNA, 25 bp, Homo sapien
gattctctaaagaagaaaactgaaa

SEQ ID NO: 5693764 - DNA, 25 bp, Homo sapien
gctgcaccccccaacgtatatttaa

SEQ ID NO: 5693765 - DNA, 25 bp, Homo sapien
ggctgcaccccccaacgtatattta

SEQ ID NO: 5693766 - DNA, 25 bp, Homo sapien
tctgaagaaatcttatagattctct

SEQ ID NO: 5693767 - DNA, 25 bp, Homo sapien
tatagattctctaaagaagaaaact

SEQ ID NO: 5693768 - DNA, 25 bp, Homo sapien
acacaatgtatacgtctatcagaac

SEQ ID NO: 5693769 - DNA, 25 bp, Homo sapien
gttctgatagacgtatacattgtgt

SEQ ID NO: 5693770 - DNA, 25 bp, Homo sapien
acaagtgtttgagatatggatatgc

SEQ ID NO: 5693771 - DNA, 25 bp, Homo sapien
acacaatgtatacgtctatcagaac

SEQ ID NO: 5693772 - DNA, 25 bp, Homo sapien
aaatgacaagtgtttgagatatgga

SEQ ID NO: 5693773 - DNA, 25 bp, Homo sapien
ggatatgctaattattttgatttca

SEQ ID NO: 5693774 - DNA, 25 bp, Homo sapien
caagtgtttgagatatggatatgct

SEQ ID NO: 5693775 - DNA, 25 bp, Homo sapien
gaaatgacaagtgtttgagatatgg

SEQ ID NO: 5693776 - DNA, 25 bp, Homo sapien
agcatatccatatctcaaacacttg

SEQ ID NO: 5693777 - DNA, 25 bp, Homo sapien
gcatatccatatctcaaacacttgt

SEQ ID NO: 5693778 - DNA, 25 bp, Homo sapien
tgatgaaatcaaaataattagcata

SEQ ID NO: 5693779 - DNA, 25 bp, Homo sapien
tatccatatctcaaacacttgtcat

SEQ ID NO: 5693780 - DNA, 25 bp, Homo sapien
gaaatcaaaataattagcatatcca

SEQ ID NO: 5693781 - DNA, 25 bp, Homo sapien
gttctgatagacgtatacattgtgt

SEQ ID NO: 5693782 - DNA, 25 bp, Homo sapien
gtttttacttttggccacatagcta

SEQ ID NO: 5693783 - DNA, 25 bp, Homo sapien
cctacactaggtgttttcacataag

SEQ ID NO: 5693784 - DNA, 25 bp, Homo sapien
acttttggccacatagctaggtttc

SEQ ID NO: 5693785 - DNA, 25 bp, Homo sapien
catagctaggtttctggttccccta

SEQ ID NO: 5693786 - DNA, 25 bp, Homo sapien
tggtttttacttttggccacatagc

SEQ ID NO: 5693787 - DNA, 25 bp, Homo sapien
caccaattaaccactgaattgttat

SEQ ID NO: 5693788 - DNA, 25 bp, Homo sapien
ataacaattcagtggttaattggtg

SEQ ID NO: 5693789 - DNA, 25 bp, Homo sapien
gaaacctagctatgtggccaaaagt

SEQ ID NO: 5693790 - DNA, 25 bp, Homo sapien
gggaaccagaaacctagctatgtgg

SEQ ID NO: 5693791 - DNA, 25 bp, Homo sapien
tagctatgtggccaaaagtaaaaac

SEQ ID NO: 5693792 - DNA, 25 bp, Homo sapien
tcttatgtgaaaacacctagtgtag

SEQ ID NO: 5693793 - DNA, 25 bp, Homo sapien
gctatgtggccaaaagtaaaaacca

SEQ ID NO: 5693794 - DNA, 25 bp, Homo sapien
gtcctcaggttggagatataaaagg

SEQ ID NO: 5693795 - DNA, 25 bp, Homo sapien
ccttttatatctccaacctgaggac

SEQ ID NO: 5693796 - DNA, 25 bp, Homo sapien
tcatttcctttgtcctcaggttgga

SEQ ID NO: 5693797 - DNA, 25 bp, Homo sapien
taaaaatgctttaatttcagctttg

SEQ ID NO: 5693798 - DNA, 25 bp, Homo sapien
cagctttgaattttccttcatttcc

SEQ ID NO: 5693799 - DNA, 25 bp, Homo sapien
ctcaggttggagatataaaagggct

SEQ ID NO: 5693800 - DNA, 25 bp, Homo sapien
ttggagatataaaagggctgctgag

SEQ ID NO: 5693801 - DNA, 25 bp, Homo sapien
gtcctcaggttggagatataaaagg

SEQ ID NO: 5693802 - DNA, 25 bp, Homo sapien
tatctccaacctgaggacaaaggaa

SEQ ID NO: 5693803 - DNA, 25 bp, Homo sapien
gaaatgaaggaaaattcaaagctga

SEQ ID NO: 5693804 - DNA, 25 bp, Homo sapien
cctgaggacaaaggaaatgaaggaa

SEQ ID NO: 5693805 - DNA, 25 bp, Homo sapien
tcagcagcccttttatatctccaac

SEQ ID NO: 5693806 - DNA, 25 bp, Homo sapien
caaagctgaaattaaagcattttta

SEQ ID NO: 5693807 - DNA, 25 bp, Homo sapien
ccttttatatctccaacctgaggac

SEQ ID NO: 5693808 - DNA, 25 bp, Homo sapien
tacctttatgaatctattatgacag

SEQ ID NO: 5693809 - DNA, 25 bp, Homo sapien
tgcattcctgctttacctttatgaa

SEQ ID NO: 5693810 - DNA, 25 bp, Homo sapien
ttatgaatctattatgacagtgcca

SEQ ID NO: 5693811 - DNA, 25 bp, Homo sapien
gcattcctgctttacctttatgaat

SEQ ID NO: 5693812 - DNA, 25 bp, Homo sapien
tttatgaatctattatgacagtgcc

SEQ ID NO: 5693813 - DNA, 25 bp, Homo sapien
tcctgctttacctttatgaatctat

SEQ ID NO: 5693814 - DNA, 25 bp, Homo sapien
tggcactgtcataatagattcataa

SEQ ID NO: 5693815 - DNA, 25 bp, Homo sapien
ttcataaaggtaaagcaggaatgca

SEQ ID NO: 5693816 - DNA, 25 bp, Homo sapien
atagattcataaaggtaaagcagga

SEQ ID NO: 5693817 - DNA, 25 bp, Homo sapien
cactgtcataatagattcataaagg

SEQ ID NO: 5693818 - DNA, 25 bp, Homo sapien
tcataaaggtaaagcaggaatgcag

SEQ ID NO: 5693819 - DNA, 25 bp, Homo sapien
gattcataaaggtaaagcaggaatg

SEQ ID NO: 5693820 - DNA, 25 bp, Homo sapien
aatatctgttttatggtgggttaga

SEQ ID NO: 5693821 - DNA, 25 bp, Homo sapien
agaatgagaggatgcagttaatatt

SEQ ID NO: 5693822 - DNA, 25 bp, Homo sapien
tataaagcactctgtaccacggatc

SEQ ID NO: 5693823 - DNA, 25 bp, Homo sapien
ctttggtaatagaatatctgtttta

SEQ ID NO: 5693824 - DNA, 25 bp, Homo sapien
tatctgttttatggtgggttagaaa

SEQ ID NO: 5693825 - DNA, 25 bp, Homo sapien
ttataaagcactctgtaccacggat

SEQ ID NO: 5693826 - DNA, 25 bp, Homo sapien
ttctaacccaccataaaacagatat

SEQ ID NO: 5693827 - DNA, 25 bp, Homo sapien
tttctaacccaccataaaacagata

SEQ ID NO: 5693828 - DNA, 25 bp, Homo sapien
taaaacagatattctattaccaaag

SEQ ID NO: 5693829 - DNA, 25 bp, Homo sapien
gatccgtggtacagagtgctttata

SEQ ID NO: 5693830 - DNA, 25 bp, Homo sapien
aatattaactgcatcctctcattct

SEQ ID NO: 5693831 - DNA, 25 bp, Homo sapien
tctaacccaccataaaacagatatt

SEQ ID NO: 5693832 - DNA, 25 bp, Homo sapien
aggaatgtgctactagtattttcct

SEQ ID NO: 5693833 - DNA, 25 bp, Homo sapien
atgaggaatgtgctactagtatttt

SEQ ID NO: 5693834 - DNA, 25 bp, Homo sapien
gaggaatgtgctactagtattttcc

SEQ ID NO: 5693835 - DNA, 25 bp, Homo sapien
ggaatgtgctactagtattttcctt

SEQ ID NO: 5693836 - DNA, 25 bp, Homo sapien
ctattcctcaccacagtgttatgag

SEQ ID NO: 5693837 - DNA, 25 bp, Homo sapien
tgaggaatgtgctactagtattttc

SEQ ID NO: 5693838 - DNA, 25 bp, Homo sapien
aaggaaaatactagtagcacattcc

SEQ ID NO: 5693839 - DNA, 25 bp, Homo sapien
aaaatactagtagcacattcctcat

SEQ ID NO: 5693840 - DNA, 25 bp, Homo sapien
ctcataacactgtggtgaggaatag

SEQ ID NO: 5693841 - DNA, 25 bp, Homo sapien
aggaaaatactagtagcacattcct

SEQ ID NO: 5693842 - DNA, 25 bp, Homo sapien
gaaaatactagtagcacattcctca

SEQ ID NO: 5693843 - DNA, 25 bp, Homo sapien
ggaaaatactagtagcacattcctc

SEQ ID NO: 5693844 - DNA, 25 bp, Homo sapien
ttacatctgtatacctgagctaggc

SEQ ID NO: 5693845 - DNA, 25 bp, Homo sapien
catctgtatacctgagctaggctct

SEQ ID NO: 5693846 - DNA, 25 bp, Homo sapien
tatacctgagctaggctcttttgct

SEQ ID NO: 5693847 - DNA, 25 bp, Homo sapien
tctgtatacctgagctaggctcttt

SEQ ID NO: 5693848 - DNA, 25 bp, Homo sapien
aatgctgtactacattacatctgta

SEQ ID NO: 5693849 - DNA, 25 bp, Homo sapien
gaacctaaacttattaatgctgtac

SEQ ID NO: 5693850 - DNA, 25 bp, Homo sapien
tatacagatgtaatgtagtacagca

SEQ ID NO: 5693851 - DNA, 25 bp, Homo sapien
gtagtacagcattaataagtttagg

SEQ ID NO: 5693852 - DNA, 25 bp, Homo sapien
tacagcattaataagtttaggttct

SEQ ID NO: 5693853 - DNA, 25 bp, Homo sapien
gcctagctcaggtatacagatgtaa

SEQ ID NO: 5693854 - DNA, 25 bp, Homo sapien
aaagagcctagctcaggtatacaga

SEQ ID NO: 5693855 - DNA, 25 bp, Homo sapien
agcaaaagagcctagctcaggtata

SEQ ID NO: 5693856 - DNA, 25 bp, Homo sapien
ggaggagcgatattctgataaatta

SEQ ID NO: 5693857 - DNA, 25 bp, Homo sapien
gaggagcgatattctgataaattat

SEQ ID NO: 5693858 - DNA, 25 bp, Homo sapien
ggaggaggagcgatattctgataaa

SEQ ID NO: 5693859 - DNA, 25 bp, Homo sapien
aggagcgatattctgataaattata

SEQ ID NO: 5693860 - DNA, 25 bp, Homo sapien
ataatttatcagaatatcgctcctc

SEQ ID NO: 5693861 - DNA, 25 bp, Homo sapien
tttatcagaatatcgctcctcctcc

SEQ ID NO: 5693862 - DNA, 25 bp, Homo sapien
taatttatcagaatatcgctcctcc

SEQ ID NO: 5693863 - DNA, 25 bp, Homo sapien
tataatttatcagaatatcgctcct

SEQ ID NO: 5693864 - DNA, 25 bp, Homo sapien
taaggatttgttggattttgtgaaa

SEQ ID NO: 5693865 - DNA, 25 bp, Homo sapien
gaggagcgatattctgataaattat

SEQ ID NO: 5693866 - DNA, 25 bp, Homo sapien
tatatggataggaagtaaaacagat

SEQ ID NO: 5693867 - DNA, 25 bp, Homo sapien
ggaggaggagcgatattctgataaa

SEQ ID NO: 5693868 - DNA, 25 bp, Homo sapien
gattttgtgaaatatgaagaggagg

SEQ ID NO: 5693869 - DNA, 25 bp, Homo sapien
taggaagtaaaacagatttccatct

SEQ ID NO: 5693870 - DNA, 25 bp, Homo sapien
tttatcagaatatcgctcctcctcc

SEQ ID NO: 5693871 - DNA, 25 bp, Homo sapien
aagatggaaatctgttttacttcct

SEQ ID NO: 5693872 - DNA, 25 bp, Homo sapien
tctgttttacttcctatccatataa

SEQ ID NO: 5693873 - DNA, 25 bp, Homo sapien
ttcacaaaatccaacaaatccttaa

SEQ ID NO: 5693874 - DNA, 25 bp, Homo sapien
taatttatcagaatatcgctcctcc

SEQ ID NO: 5693875 - DNA, 25 bp, Homo sapien
tataatttatcagaatatcgctcct

SEQ ID NO: 5693876 - DNA, 25 bp, Homo sapien
tgtttgcttgcttcctttcttatgt

SEQ ID NO: 5693877 - DNA, 25 bp, Homo sapien
cttgcttcctttcttatgtcttttt

SEQ ID NO: 5693878 - DNA, 25 bp, Homo sapien
gtttgcttgcttcctttcttatgtc

SEQ ID NO: 5693879 - DNA, 25 bp, Homo sapien
gcttgcttcctttcttatgtctttt

SEQ ID NO: 5693880 - DNA, 25 bp, Homo sapien
ctgtttgcttgcttcctttcttatg

SEQ ID NO: 5693881 - DNA, 25 bp, Homo sapien
tgcttgcttcctttcttatgtcttt

SEQ ID NO: 5693882 - DNA, 25 bp, Homo sapien
aagacataagaaaggaagcaagcaa

SEQ ID NO: 5693883 - DNA, 25 bp, Homo sapien
gacataagaaaggaagcaagcaaac

SEQ ID NO: 5693884 - DNA, 25 bp, Homo sapien
cataagaaaggaagcaagcaaacag

SEQ ID NO: 5693885 - DNA, 25 bp, Homo sapien
aaagacataagaaaggaagcaagca

SEQ ID NO: 5693886 - DNA, 25 bp, Homo sapien
aaaaagacataagaaaggaagcaag

SEQ ID NO: 5693887 - DNA, 25 bp, Homo sapien
acataagaaaggaagcaagcaaaca

SEQ ID NO: 5693888 - DNA, 25 bp, Homo sapien
cactgtgttagtcaggatggtctcg

SEQ ID NO: 5693889 - DNA, 25 bp, Homo sapien
actgtgttagtcaggatggtctcga

SEQ ID NO: 5693890 - DNA, 25 bp, Homo sapien
tgtgttagtcaggatggtctcgatc

SEQ ID NO: 5693891 - DNA, 25 bp, Homo sapien
ctgtgttagtcaggatggtctcgat

SEQ ID NO: 5693892 - DNA, 25 bp, Homo sapien
gtgttagtcaggatggtctcgatct

SEQ ID NO: 5693893 - DNA, 25 bp, Homo sapien
tcactgtgttagtcaggatggtctc

SEQ ID NO: 5693894 - DNA, 25 bp, Homo sapien
cgagaccatcctgactaacacagtg

SEQ ID NO: 5693895 - DNA, 25 bp, Homo sapien
agatcgagaccatcctgactaacac

SEQ ID NO: 5693896 - DNA, 25 bp, Homo sapien
gagaccatcctgactaacacagtga

SEQ ID NO: 5693897 - DNA, 25 bp, Homo sapien
atcgagaccatcctgactaacacag

SEQ ID NO: 5693898 - DNA, 25 bp, Homo sapien
tcgagaccatcctgactaacacagt

SEQ ID NO: 5693899 - DNA, 25 bp, Homo sapien
gatcgagaccatcctgactaacaca

SEQ ID NO: 5693900 - DNA, 25 bp, Homo sapien
tatagccatacttctcagtccattt

SEQ ID NO: 5693901 - DNA, 25 bp, Homo sapien
ttcttatagccatacttctcagtcc

SEQ ID NO: 5693902 - DNA, 25 bp, Homo sapien
cacatttgaaaagggcttgaagcag

SEQ ID NO: 5693903 - DNA, 25 bp, Homo sapien
gccatacttctcagtccatttatct

SEQ ID NO: 5693904 - DNA, 25 bp, Homo sapien
ccacatttgaaaagggcttgaagca

SEQ ID NO: 5693905 - DNA, 25 bp, Homo sapien
tatctccaaatttcttaatgcagag

SEQ ID NO: 5693906 - DNA, 25 bp, Homo sapien
ctctgcattaagaaatttggagata

SEQ ID NO: 5693907 - DNA, 25 bp, Homo sapien
ttaagaaatttggagataaatggac

SEQ ID NO: 5693908 - DNA, 25 bp, Homo sapien
taaatggactgagaagtatggctat

SEQ ID NO: 5693909 - DNA, 25 bp, Homo sapien
gactgagaagtatggctataagaaa

SEQ ID NO: 5693910 - DNA, 25 bp, Homo sapien
agataaatggactgagaagtatggc

SEQ ID NO: 5693911 - DNA, 25 bp, Homo sapien
tgcttcaagcccttttcaaatgtgg

SEQ ID NO: 5693912 - DNA, 25 bp, Homo sapien
agatctgggaacactgggcggccaa

SEQ ID NO: 5693913 - DNA, 25 bp, Homo sapien
gatctgggaacactgggcggccaat

SEQ ID NO: 5693914 - DNA, 25 bp, Homo sapien
tgggcggccaatcacccatagtaat

SEQ ID NO: 5693915 - DNA, 25 bp, Homo sapien
actgggcggccaatcacccatagta

SEQ ID NO: 5693916 - DNA, 25 bp, Homo sapien
ggcggccaatcacccatagtaataa

SEQ ID NO: 5693917 - DNA, 25 bp, Homo sapien
aaacaatgaaaagatctgggaacac

SEQ ID NO: 5693918 - DNA, 25 bp, Homo sapien
ttattactatgggtgattggccgcc

SEQ ID NO: 5693919 - DNA, 25 bp, Homo sapien
ttggccgcccagtgttcccagatct

SEQ ID NO: 5693920 - DNA, 25 bp, Homo sapien
gtgttcccagatcttttcattgttt

SEQ ID NO: 5693921 - DNA, 25 bp, Homo sapien
tattactatgggtgattggccgccc

SEQ ID NO: 5693922 - DNA, 25 bp, Homo sapien
attggccgcccagtgttcccagatc

SEQ ID NO: 5693923 - DNA, 25 bp, Homo sapien
tactatgggtgattggccgcccagt

SEQ ID NO: 5693924 - DNA, 25 bp, Homo sapien
ggctcactcaagactctaagtccat

SEQ ID NO: 5693925 - DNA, 25 bp, Homo sapien
aaacaggctcactcaagactctaag

SEQ ID NO: 5693926 - DNA, 25 bp, Homo sapien
tcaagactctaagtccattcacatc

SEQ ID NO: 5693927 - DNA, 25 bp, Homo sapien
catccagaaagataatcactgtcac

SEQ ID NO: 5693928 - DNA, 25 bp, Homo sapien
gactctaagtccattcacatcttac

SEQ ID NO: 5693929 - DNA, 25 bp, Homo sapien
cacatcttacaccaagcctgttcag

SEQ ID NO: 5693930 - DNA, 25 bp, Homo sapien
tgacagtgattatctttctggatga

SEQ ID NO: 5693931 - DNA, 25 bp, Homo sapien
taagatgtgaatggacttagagtct

SEQ ID NO: 5693932 - DNA, 25 bp, Homo sapien
cttagagtcttgagtgagcctgttt

SEQ ID NO: 5693933 - DNA, 25 bp, Homo sapien
tggacttagagtcttgagtgagcct

SEQ ID NO: 5693934 - DNA, 25 bp, Homo sapien
actgaacaggcttggtgtaagatgt

SEQ ID NO: 5693935 - DNA, 25 bp, Homo sapien
gaacaggcttggtgtaagatgtgaa

SEQ ID NO: 5693936 - DNA, 25 bp, Homo sapien
catttagccatctagcagatgaata

SEQ ID NO: 5693937 - DNA, 25 bp, Homo sapien
tgcacaaaatggatggtgtagaagt

SEQ ID NO: 5693938 - DNA, 25 bp, Homo sapien
aaagttgcacaaaatggatggtgta

SEQ ID NO: 5693939 - DNA, 25 bp, Homo sapien
tccatttagccatctagcagatgaa

SEQ ID NO: 5693940 - DNA, 25 bp, Homo sapien
ttaaagttgcacaaaatggatggtg

SEQ ID NO: 5693941 - DNA, 25 bp, Homo sapien
gcacaaaatggatggtgtagaagtg

SEQ ID NO: 5693942 - DNA, 25 bp, Homo sapien
tattcatctgctagatggctaaatg

SEQ ID NO: 5693943 - DNA, 25 bp, Homo sapien
ttcatctgctagatggctaaatgga

SEQ ID NO: 5693944 - DNA, 25 bp, Homo sapien
cacttctacaccatccattttgtgc

SEQ ID NO: 5693945 - DNA, 25 bp, Homo sapien
tacaccatccattttgtgcaacttt

SEQ ID NO: 5693946 - DNA, 25 bp, Homo sapien
acttctacaccatccattttgtgca

SEQ ID NO: 5693947 - DNA, 25 bp, Homo sapien
caccatccattttgtgcaactttaa

SEQ ID NO: 5693948 - DNA, 25 bp, Homo sapien
tcttcttggccgatggtccataata

SEQ ID NO: 5693949 - DNA, 25 bp, Homo sapien
taataatagatctggttgtaaggaa

SEQ ID NO: 5693950 - DNA, 25 bp, Homo sapien
gccgatggtccataataatagatct

SEQ ID NO: 5693951 - DNA, 25 bp, Homo sapien
tcttggccgatggtccataataata

SEQ ID NO: 5693952 - DNA, 25 bp, Homo sapien
ggtccataataatagatctggttgt

SEQ ID NO: 5693953 - DNA, 25 bp, Homo sapien
atgagttgctcacttgaataaaagc

SEQ ID NO: 5693954 - DNA, 25 bp, Homo sapien
tttccttacaaccagatctattatt

SEQ ID NO: 5693955 - DNA, 25 bp, Homo sapien
gcttttattcaagtgagcaactcat

SEQ ID NO: 5693956 - DNA, 25 bp, Homo sapien
acaaccagatctattattatggacc

SEQ ID NO: 5693957 - DNA, 25 bp, Homo sapien
gatctattattatggaccatcggcc

SEQ ID NO: 5693958 - DNA, 25 bp, Homo sapien
tattattatggaccatcggccaaga

SEQ ID NO: 5693959 - DNA, 25 bp, Homo sapien
tattatggaccatcggccaagaaga

SEQ ID NO: 5693960 - DNA, 25 bp, Homo sapien
ctagttaaggataaggtagtgcaga

SEQ ID NO: 5693961 - DNA, 25 bp, Homo sapien
gaatagtggttgcacggccatagct

SEQ ID NO: 5693962 - DNA, 25 bp, Homo sapien
tgcatggcacatagctcgtactcag

SEQ ID NO: 5693963 - DNA, 25 bp, Homo sapien
gataaggtagtgcagaatagtggtt

SEQ ID NO: 5693964 - DNA, 25 bp, Homo sapien
cacatagctcgtactcagtgaggac

SEQ ID NO: 5693965 - DNA, 25 bp, Homo sapien
tactcagtgaggactagttaaggat

SEQ ID NO: 5693966 - DNA, 25 bp, Homo sapien
tctgcactaccttatccttaactag

SEQ ID NO: 5693967 - DNA, 25 bp, Homo sapien
cagctatggccgtgcaaccactatt

SEQ ID NO: 5693968 - DNA, 25 bp, Homo sapien
caaccactattctgcactaccttat

SEQ ID NO: 5693969 - DNA, 25 bp, Homo sapien
taactagtcctcactgagtacgagc

SEQ ID NO: 5693970 - DNA, 25 bp, Homo sapien
tatccttaactagtcctcactgagt

SEQ ID NO: 5693971 - DNA, 25 bp, Homo sapien
ctgagtacgagctatgtgccatgca

SEQ ID NO: 5693972 - DNA, 25 bp, Homo sapien
tgtacttagtaagtatgaacaagat

SEQ ID NO: 5693973 - DNA, 25 bp, Homo sapien
ttgctttgtgtacttagtaagtatg

SEQ ID NO: 5693974 - DNA, 25 bp, Homo sapien
gctttgtgtacttagtaagtatgaa

SEQ ID NO: 5693975 - DNA, 25 bp, Homo sapien
gtacttagtaagtatgaacaagata

SEQ ID NO: 5693976 - DNA, 25 bp, Homo sapien
tgtgtacttagtaagtatgaacaag

SEQ ID NO: 5693977 - DNA, 25 bp, Homo sapien
ctttgtgtacttagtaagtatgaac

SEQ ID NO: 5693978 - DNA, 25 bp, Homo sapien
tgttcatacttactaagtacacaaa

SEQ ID NO: 5693979 - DNA, 25 bp, Homo sapien
tcttgttcatacttactaagtacac

SEQ ID NO: 5693980 - DNA, 25 bp, Homo sapien
tcatacttactaagtacacaaagca

SEQ ID NO: 5693981 - DNA, 25 bp, Homo sapien
catacttactaagtacacaaagcaa

SEQ ID NO: 5693982 - DNA, 25 bp, Homo sapien
gttcatacttactaagtacacaaag

SEQ ID NO: 5693983 - DNA, 25 bp, Homo sapien
tatcttgttcatacttactaagtac

SEQ ID NO: 5693984 - DNA, 25 bp, Homo sapien
tgtacttagtaagtatgaacaagat

SEQ ID NO: 5693985 - DNA, 25 bp, Homo sapien
cttagtaagtatgaacaagataaaa

SEQ ID NO: 5693986 - DNA, 25 bp, Homo sapien
tattatattcttatgagttttaccc

SEQ ID NO: 5693987 - DNA, 25 bp, Homo sapien
tcttctgtgataaataagtatctta

SEQ ID NO: 5693988 - DNA, 25 bp, Homo sapien
ccttgctttgtgtacttagtaagta

SEQ ID NO: 5693989 - DNA, 25 bp, Homo sapien
ctttgtgtacttagtaagtatgaac

SEQ ID NO: 5693990 - DNA, 25 bp, Homo sapien
gggtaaaactcataagaatataata

SEQ ID NO: 5693991 - DNA, 25 bp, Homo sapien
cttactaagtacacaaagcaaggaa

SEQ ID NO: 5693992 - DNA, 25 bp, Homo sapien
taagatacttatttatcacagaaga

SEQ ID NO: 5693993 - DNA, 25 bp, Homo sapien
catacttactaagtacacaaagcaa

SEQ ID NO: 5693994 - DNA, 25 bp, Homo sapien
gttcatacttactaagtacacaaag

SEQ ID NO: 5693995 - DNA, 25 bp, Homo sapien
tatcttgttcatacttactaagtac

SEQ ID NO: 5693996 - DNA, 25 bp, Homo sapien
gatgctgattgggaggtaaggggcc

SEQ ID NO: 5693997 - DNA, 25 bp, Homo sapien
tgattgggaggtaaggggcctttca

SEQ ID NO: 5693998 - DNA, 25 bp, Homo sapien
atgctgattgggaggtaaggggcct

SEQ ID NO: 5693999 - DNA, 25 bp, Homo sapien
tgctgattgggaggtaaggggcctt

SEQ ID NO: 5694000 - DNA, 25 bp, Homo sapien
tgaaaggccccttacctcccaatca

SEQ ID NO: 5694001 - DNA, 25 bp, Homo sapien
aaggccccttacctcccaatcagca

SEQ ID NO: 5694002 - DNA, 25 bp, Homo sapien
aggccccttacctcccaatcagcat

SEQ ID NO: 5694003 - DNA, 25 bp, Homo sapien
ggccccttacctcccaatcagcatc

SEQ ID NO: 5694004 - DNA, 25 bp, Homo sapien
tcaaattcaccctttgcatgtggct

SEQ ID NO: 5694005 - DNA, 25 bp, Homo sapien
ctagagttggaagatgctgattggg

SEQ ID NO: 5694006 - DNA, 25 bp, Homo sapien
tactgggtctacttctcaaattcac

SEQ ID NO: 5694007 - DNA, 25 bp, Homo sapien
ttcactactgggtctacttctcaaa

SEQ ID NO: 5694008 - DNA, 25 bp, Homo sapien
tgcatgtggctatcaagtttgaaaa

SEQ ID NO: 5694009 - DNA, 25 bp, Homo sapien
ggcctttcactactgggtctacttc

SEQ ID NO: 5694010 - DNA, 25 bp, Homo sapien
gaagtagacccagtagtgaaaggcc

SEQ ID NO: 5694011 - DNA, 25 bp, Homo sapien
tgaatttgagaagtagacccagtag

SEQ ID NO: 5694012 - DNA, 25 bp, Homo sapien
ttttcaaacttgatagccacatgca

SEQ ID NO: 5694013 - DNA, 25 bp, Homo sapien
tgaaaggccccttacctcccaatca

SEQ ID NO: 5694014 - DNA, 25 bp, Homo sapien
cccaatcagcatcttccaactctag

SEQ ID NO: 5694015 - DNA, 25 bp, Homo sapien
gccacatgcaaagggtgaatttgag

SEQ ID NO: 5694016 - DNA, 25 bp, Homo sapien
ttacaggcatgagccttttgtttgt

SEQ ID NO: 5694017 - DNA, 25 bp, Homo sapien
gacctcatgatctgcacgccttggc

SEQ ID NO: 5694018 - DNA, 25 bp, Homo sapien
ggcatgagccttttgtttgttttta

SEQ ID NO: 5694019 - DNA, 25 bp, Homo sapien
tgtttgtttttatagagagacaggg

SEQ ID NO: 5694020 - DNA, 25 bp, Homo sapien
cctcatgatctgcacgccttggcct

SEQ ID NO: 5694021 - DNA, 25 bp, Homo sapien
caggcatgagccttttgtttgtttt

SEQ ID NO: 5694022 - DNA, 25 bp, Homo sapien
ccctgtctctctataaaaacaaaca

SEQ ID NO: 5694023 - DNA, 25 bp, Homo sapien
aggccaaggcgtgcagatcatgagg

SEQ ID NO: 5694024 - DNA, 25 bp, Homo sapien
gccaaggcgtgcagatcatgaggtc

SEQ ID NO: 5694025 - DNA, 25 bp, Homo sapien
acaaacaaaaggctcatgcctgtaa

SEQ ID NO: 5694026 - DNA, 25 bp, Homo sapien
aaaacaaacaaaaggctcatgcctg

SEQ ID NO: 5694027 - DNA, 25 bp, Homo sapien
taaaaacaaacaaaaggctcatgcc

SEQ ID NO: 5694028 - DNA, 25 bp, Homo sapien
aaggcaaatagatagacgtgtaata

SEQ ID NO: 5694029 - DNA, 25 bp, Homo sapien
caaatagatagacgtgtaatatatc

SEQ ID NO: 5694030 - DNA, 25 bp, Homo sapien
gcttatagtctagctgagaaaggca

SEQ ID NO: 5694031 - DNA, 25 bp, Homo sapien
tagatagacgtgtaatatatcaact

SEQ ID NO: 5694032 - DNA, 25 bp, Homo sapien
aaaggcaaatagatagacgtgtaat

SEQ ID NO: 5694033 - DNA, 25 bp, Homo sapien
ggcaaatagatagacgtgtaatata

SEQ ID NO: 5694034 - DNA, 25 bp, Homo sapien
tatattacacgtctatctatttgcc

SEQ ID NO: 5694035 - DNA, 25 bp, Homo sapien
gcctttctcagctagactataagct

SEQ ID NO: 5694036 - DNA, 25 bp, Homo sapien
gatatattacacgtctatctatttg

SEQ ID NO: 5694037 - DNA, 25 bp, Homo sapien
tattacacgtctatctatttgcctt

SEQ ID NO: 5694038 - DNA, 25 bp, Homo sapien
agttgatatattacacgtctatcta

SEQ ID NO: 5694039 - DNA, 25 bp, Homo sapien
tgcctttctcagctagactataagc

SEQ ID NO: 5694040 - DNA, 25 bp, Homo sapien
aaatatgaacccgagcttccaaagt

SEQ ID NO: 5694041 - DNA, 25 bp, Homo sapien
tgaaaaatatgaacccgagcttcca

SEQ ID NO: 5694042 - DNA, 25 bp, Homo sapien
aatatgaacccgagcttccaaagta

SEQ ID NO: 5694043 - DNA, 25 bp, Homo sapien
ttgaaaaatatgaacccgagcttcc

SEQ ID NO: 5694044 - DNA, 25 bp, Homo sapien
gaaaaatatgaacccgagcttccaa

SEQ ID NO: 5694045 - DNA, 25 bp, Homo sapien
tatgaacccgagcttccaaagtatc

SEQ ID NO: 5694046 - DNA, 25 bp, Homo sapien
gatactttggaagctcgggttcata

SEQ ID NO: 5694047 - DNA, 25 bp, Homo sapien
tggaagctcgggttcatatttttca

SEQ ID NO: 5694048 - DNA, 25 bp, Homo sapien
ttggaagctcgggttcatatttttc

SEQ ID NO: 5694049 - DNA, 25 bp, Homo sapien
tactttggaagctcgggttcatatt

SEQ ID NO: 5694050 - DNA, 25 bp, Homo sapien
ggaagctcgggttcatatttttcaa

SEQ ID NO: 5694051 - DNA, 25 bp, Homo sapien
actttggaagctcgggttcatattt

SEQ ID NO: 5694052 - DNA, 25 bp, Homo sapien
tctcatttttagcttttttgaacaa

SEQ ID NO: 5694053 - DNA, 25 bp, Homo sapien
cagagaatttcattatattgatagt

SEQ ID NO: 5694054 - DNA, 25 bp, Homo sapien
aattatttaaattgtctcattgaca

SEQ ID NO: 5694055 - DNA, 25 bp, Homo sapien
aaaagatacagagaatttcattata

SEQ ID NO: 5694056 - DNA, 25 bp, Homo sapien
aattgtctcattgacatttagattg

SEQ ID NO: 5694057 - DNA, 25 bp, Homo sapien
tcattgacatttagattgtttctca

SEQ ID NO: 5694058 - DNA, 25 bp, Homo sapien
aacaatctaaatgtcaatgagacaa

SEQ ID NO: 5694059 - DNA, 25 bp, Homo sapien
actatcaatataatgaaattctctg

SEQ ID NO: 5694060 - DNA, 25 bp, Homo sapien
tgtcaatgagacaatttaaataatt

SEQ ID NO: 5694061 - DNA, 25 bp, Homo sapien
gctaaaaatgagaaacaatctaaat

SEQ ID NO: 5694062 - DNA, 25 bp, Homo sapien
tataatgaaattctctgtatctttt

SEQ ID NO: 5694063 - DNA, 25 bp, Homo sapien
ttgttcaaaaaagctaaaaatgaga

SEQ ID NO: 5694064 - DNA, 25 bp, Homo sapien
gtagccaggactacgggcatggact

SEQ ID NO: 5694065 - DNA, 25 bp, Homo sapien
agtccatgcccgtagtcctggctac

SEQ ID NO: 5694066 - DNA, 25 bp, Homo sapien
tagccaggactacgggcatggacta

SEQ ID NO: 5694067 - DNA, 25 bp, Homo sapien
tacgggcatggactaccgtgcctgg

SEQ ID NO: 5694068 - DNA, 25 bp, Homo sapien
gtagccaggactacgggcatggact

SEQ ID NO: 5694069 - DNA, 25 bp, Homo sapien
gggcatggactaccgtgcctggcta

SEQ ID NO: 5694070 - DNA, 25 bp, Homo sapien
ggactacgggcatggactaccgtgc

SEQ ID NO: 5694071 - DNA, 25 bp, Homo sapien
caggactacgggcatggactaccgt

SEQ ID NO: 5694072 - DNA, 25 bp, Homo sapien
caggcacggtagtccatgcccgtag

SEQ ID NO: 5694073 - DNA, 25 bp, Homo sapien
gcacggtagtccatgcccgtagtcc

SEQ ID NO: 5694074 - DNA, 25 bp, Homo sapien
tagtccatgcccgtagtcctggcta

SEQ ID NO: 5694075 - DNA, 25 bp, Homo sapien
agtccatgcccgtagtcctggctac

SEQ ID NO: 5694076 - DNA, 25 bp, Homo sapien
tagccaggcacggtagtccatgccc

SEQ ID NO: 5694077 - DNA, 25 bp, Homo sapien
acggtagtccatgcccgtagtcctg

SEQ ID NO: 5694078 - DNA, 25 bp, Homo sapien
caggcacccgccaccacacccggct

SEQ ID NO: 5694079 - DNA, 25 bp, Homo sapien
ctacaggcacccgccaccacacccg

SEQ ID NO: 5694080 - DNA, 25 bp, Homo sapien
tcaccgcaagctccgcctcccgggt

SEQ ID NO: 5694081 - DNA, 25 bp, Homo sapien
cacccgccaccacacccggctaatt

SEQ ID NO: 5694082 - DNA, 25 bp, Homo sapien
acaggcacccgccaccacacccggc

SEQ ID NO: 5694083 - DNA, 25 bp, Homo sapien
aggcacccgccaccacacccggcta

SEQ ID NO: 5694084 - DNA, 25 bp, Homo sapien
attagccgggtgtggtggcgggtgc

SEQ ID NO: 5694085 - DNA, 25 bp, Homo sapien
tagccgggtgtggtggcgggtgcct

SEQ ID NO: 5694086 - DNA, 25 bp, Homo sapien
cgggtgtggtggcgggtgcctgtag

SEQ ID NO: 5694087 - DNA, 25 bp, Homo sapien
gccgggtgtggtggcgggtgcctgt

SEQ ID NO: 5694088 - DNA, 25 bp, Homo sapien
agccgggtgtggtggcgggtgcctg

SEQ ID NO: 5694089 - DNA, 25 bp, Homo sapien
aattagccgggtgtggtggcgggtg

SEQ ID NO: 5694090 - DNA, 25 bp, Homo sapien
gtcttagagaaacatactactttct

SEQ ID NO: 5694091 - DNA, 25 bp, Homo sapien
gatgtagcaaaaaaacaggtttgtc

SEQ ID NO: 5694092 - DNA, 25 bp, Homo sapien
tagagaaacatactactttctaagc

SEQ ID NO: 5694093 - DNA, 25 bp, Homo sapien
tactactttctaagcttgtcttctt

SEQ ID NO: 5694094 - DNA, 25 bp, Homo sapien
gaaacatactactttctaagcttgt

SEQ ID NO: 5694095 - DNA, 25 bp, Homo sapien
catactactttctaagcttgtcttc

SEQ ID NO: 5694096 - DNA, 25 bp, Homo sapien
gacaagcttagaaagtagtatgttt

SEQ ID NO: 5694097 - DNA, 25 bp, Homo sapien
gaagacaagcttagaaagtagtatg

SEQ ID NO: 5694098 - DNA, 25 bp, Homo sapien
agaaagtagtatgtttctctaagac

SEQ ID NO: 5694099 - DNA, 25 bp, Homo sapien
gcttagaaagtagtatgtttctcta

SEQ ID NO: 5694100 - DNA, 25 bp, Homo sapien
gacaaacctgtttttttgctacatc

SEQ ID NO: 5694101 - DNA, 25 bp, Homo sapien
aagaagacaagcttagaaagtagta

SEQ ID NO: 5694102 - DNA, 25 bp, Homo sapien
taaattcttgaaacctagctcctaa

SEQ ID NO: 5694103 - DNA, 25 bp, Homo sapien
aattcttgaaacctagctcctaaat

SEQ ID NO: 5694104 - DNA, 25 bp, Homo sapien
ctagctcctaaataacctttgggat

SEQ ID NO: 5694105 - DNA, 25 bp, Homo sapien
tcttgaaacctagctcctaaataac

SEQ ID NO: 5694106 - DNA, 25 bp, Homo sapien
ttcttgaaacctagctcctaaataa

SEQ ID NO: 5694107 - DNA, 25 bp, Homo sapien
ttaaattcttgaaacctagctccta

SEQ ID NO: 5694108 - DNA, 25 bp, Homo sapien
taggagctaggtttcaagaatttaa

SEQ ID NO: 5694109 - DNA, 25 bp, Homo sapien
ttaggagctaggtttcaagaattta

SEQ ID NO: 5694110 - DNA, 25 bp, Homo sapien
ttatttaggagctaggtttcaagaa

SEQ ID NO: 5694111 - DNA, 25 bp, Homo sapien
atcccaaaggttatttaggagctag

SEQ ID NO: 5694112 - DNA, 25 bp, Homo sapien
tatttaggagctaggtttcaagaat

SEQ ID NO: 5694113 - DNA, 25 bp, Homo sapien
gttatttaggagctaggtttcaaga

SEQ ID NO: 5694114 - DNA, 25 bp, Homo sapien
tattctgggactaaatcaaaacaga

SEQ ID NO: 5694115 - DNA, 25 bp, Homo sapien
taagtggcaattccttctgctctgt

SEQ ID NO: 5694116 - DNA, 25 bp, Homo sapien
gatcttcccattgtcctcccattat

SEQ ID NO: 5694117 - DNA, 25 bp, Homo sapien
ccattgtcctcccattattctggga

SEQ ID NO: 5694118 - DNA, 25 bp, Homo sapien
taaaagtgagttgtagatcttccca

SEQ ID NO: 5694119 - DNA, 25 bp, Homo sapien
tcattttataagtggcaattccttc

SEQ ID NO: 5694120 - DNA, 25 bp, Homo sapien
gatttagtcccagaataatgggagg

SEQ ID NO: 5694121 - DNA, 25 bp, Homo sapien
tctgttttgatttagtcccagaata

SEQ ID NO: 5694122 - DNA, 25 bp, Homo sapien
cagaataatgggaggacaatgggaa

SEQ ID NO: 5694123 - DNA, 25 bp, Homo sapien
acagagcagaaggaattgccactta

SEQ ID NO: 5694124 - DNA, 25 bp, Homo sapien
gaaggaattgccacttataaaatga

SEQ ID NO: 5694125 - DNA, 25 bp, Homo sapien
acaatgggaagatctacaactcact

SEQ ID NO: 5694126 - DNA, 25 bp, Homo sapien
attgctcttgagtttcccaggacac

SEQ ID NO: 5694127 - DNA, 25 bp, Homo sapien
tgctcttgagtttcccaggacaccc

SEQ ID NO: 5694128 - DNA, 25 bp, Homo sapien
tccccacatttattaacagctctag

SEQ ID NO: 5694129 - DNA, 25 bp, Homo sapien
catgattgctcttgagtttcccagg

SEQ ID NO: 5694130 - DNA, 25 bp, Homo sapien
taacagctctagtgtttttgaagaa

SEQ ID NO: 5694131 - DNA, 25 bp, Homo sapien
acctgcatatacatgattgctcttg

SEQ ID NO: 5694132 - DNA, 25 bp, Homo sapien
ttcttcaaaaacactagagctgtta

SEQ ID NO: 5694133 - DNA, 25 bp, Homo sapien
caagagcaatcatgtatatgcaggt

SEQ ID NO: 5694134 - DNA, 25 bp, Homo sapien
gtgtcctgggaaactcaagagcaat

SEQ ID NO: 5694135 - DNA, 25 bp, Homo sapien
cactagagctgttaataaatgtggg

SEQ ID NO: 5694136 - DNA, 25 bp, Homo sapien
cctgggaaactcaagagcaatcatg

SEQ ID NO: 5694137 - DNA, 25 bp, Homo sapien
gggtgtcctgggaaactcaagagca

SEQ ID NO: 5694138 - DNA, 25 bp, Homo sapien
ttttgttctgatagaatgagaagca

SEQ ID NO: 5694139 - DNA, 25 bp, Homo sapien
taaaggaccttgtggaccttggcac

SEQ ID NO: 5694140 - DNA, 25 bp, Homo sapien
ggaccttggcacaggagtatatttt

SEQ ID NO: 5694141 - DNA, 25 bp, Homo sapien
tctgatagaatgagaagcatttggg

SEQ ID NO: 5694142 - DNA, 25 bp, Homo sapien
ccttgtggaccttggcacaggagta

SEQ ID NO: 5694143 - DNA, 25 bp, Homo sapien
gcacaggagtatatttttgttctga

SEQ ID NO: 5694144 - DNA, 25 bp, Homo sapien
aaaatatactcctgtgccaaggtcc

SEQ ID NO: 5694145 - DNA, 25 bp, Homo sapien
tgcttctcattctatcagaacaaaa

SEQ ID NO: 5694146 - DNA, 25 bp, Homo sapien
tcagaacaaaaatatactcctgtgc

SEQ ID NO: 5694147 - DNA, 25 bp, Homo sapien
tgtgccaaggtccacaaggtccttt

SEQ ID NO: 5694148 - DNA, 25 bp, Homo sapien
cccaaatgcttctcattctatcaga

SEQ ID NO: 5694149 - DNA, 25 bp, Homo sapien
tactcctgtgccaaggtccacaagg

SEQ ID NO: 5694150 - DNA, 25 bp, Homo sapien
atttgtctgaggtcatgtaactaca

SEQ ID NO: 5694151 - DNA, 25 bp, Homo sapien
tgatttgtctgaggtcatgtaacta

SEQ ID NO: 5694152 - DNA, 25 bp, Homo sapien
gatttgtctgaggtcatgtaactac

SEQ ID NO: 5694153 - DNA, 25 bp, Homo sapien
tagttacatgacctcagacaaatca

SEQ ID NO: 5694154 - DNA, 25 bp, Homo sapien
gtagttacatgacctcagacaaatc

SEQ ID NO: 5694155 - DNA, 25 bp, Homo sapien
tgtagttacatgacctcagacaaat

SEQ ID NO: 5694156 - DNA, 25 bp, Homo sapien
tacagaattaagtttccctggagac

SEQ ID NO: 5694157 - DNA, 25 bp, Homo sapien
agtttccctggagacttgaacccag

SEQ ID NO: 5694158 - DNA, 25 bp, Homo sapien
gatttgtctgaggtcatgtaactac

SEQ ID NO: 5694159 - DNA, 25 bp, Homo sapien
ctggagacttgaacccaggttttct

SEQ ID NO: 5694160 - DNA, 25 bp, Homo sapien
ctgttgagagctgatgtgatttgtc

SEQ ID NO: 5694161 - DNA, 25 bp, Homo sapien
ctgaggtcatgtaactacagaatta

SEQ ID NO: 5694162 - DNA, 25 bp, Homo sapien
tctccagggaaacttaattctgtag

SEQ ID NO: 5694163 - DNA, 25 bp, Homo sapien
tagttacatgacctcagacaaatca

SEQ ID NO: 5694164 - DNA, 25 bp, Homo sapien
agaaaacctgggttcaagtctccag

SEQ ID NO: 5694165 - DNA, 25 bp, Homo sapien
ctgggttcaagtctccagggaaact

SEQ ID NO: 5694166 - DNA, 25 bp, Homo sapien
taattctgtagttacatgacctcag

SEQ ID NO: 5694167 - DNA, 25 bp, Homo sapien
gacaaatcacatcagctctcaacag

SEQ ID NO: 5694168 - DNA, 25 bp, Homo sapien
gagtagcggggatcacaggcgcctg

SEQ ID NO: 5694169 - DNA, 25 bp, Homo sapien
cgagtagcggggatcacaggcgcct

SEQ ID NO: 5694170 - DNA, 25 bp, Homo sapien
caggcgcctgtgatccccgctactc

SEQ ID NO: 5694171 - DNA, 25 bp, Homo sapien
aggcgcctgtgatccccgctactcg

SEQ ID NO: 5694172 - DNA, 25 bp, Homo sapien
tcgcatcctttaagactattgtagc

SEQ ID NO: 5694173 - DNA, 25 bp, Homo sapien
tgaaagattacacttgctgcttcat

SEQ ID NO: 5694174 - DNA, 25 bp, Homo sapien
taagactattgtagctttcaaacct

SEQ ID NO: 5694175 - DNA, 25 bp, Homo sapien
tcctcacttcgcatcctttaagact

SEQ ID NO: 5694176 - DNA, 25 bp, Homo sapien
actattgtagctttcaaacctctcc

SEQ ID NO: 5694177 - DNA, 25 bp, Homo sapien
catttcctcacttcgcatcctttaa

SEQ ID NO: 5694178 - DNA, 25 bp, Homo sapien
gagaggtttgaaagctacaatagtc

SEQ ID NO: 5694179 - DNA, 25 bp, Homo sapien
tagtcttaaaggatgcgaagtgagg

SEQ ID NO: 5694180 - DNA, 25 bp, Homo sapien
gctacaatagtcttaaaggatgcga

SEQ ID NO: 5694181 - DNA, 25 bp, Homo sapien
tgaaagctacaatagtcttaaagga

SEQ ID NO: 5694182 - DNA, 25 bp, Homo sapien
ttaaaggatgcgaagtgaggaaatg

SEQ ID NO: 5694183 - DNA, 25 bp, Homo sapien
tgaagcagcaagtgtaatctttcaa

SEQ ID NO: 5694184 - DNA, 25 bp, Homo sapien
tttctttcaaggcccgtgcagttct

SEQ ID NO: 5694185 - DNA, 25 bp, Homo sapien
attttctttcaaggcccgtgcagtt

SEQ ID NO: 5694186 - DNA, 25 bp, Homo sapien
ttttctttcaaggcccgtgcagttc

SEQ ID NO: 5694187 - DNA, 25 bp, Homo sapien
gaactgcacgggccttgaaagaaaa

SEQ ID NO: 5694188 - DNA, 25 bp, Homo sapien
aactgcacgggccttgaaagaaaat

SEQ ID NO: 5694189 - DNA, 25 bp, Homo sapien
agaactgcacgggccttgaaagaaa

SEQ ID NO: 5694190 - DNA, 25 bp, Homo sapien
tttcaaggcccgtgcagttctcagc

SEQ ID NO: 5694191 - DNA, 25 bp, Homo sapien
ccaagaacagatggtattttctttc

SEQ ID NO: 5694192 - DNA, 25 bp, Homo sapien
cagctgttggaggaatttttcccaa

SEQ ID NO: 5694193 - DNA, 25 bp, Homo sapien
caaggcccgtgcagttctcagctgt

SEQ ID NO: 5694194 - DNA, 25 bp, Homo sapien
cgtgcagttctcagctgttggagga

SEQ ID NO: 5694195 - DNA, 25 bp, Homo sapien
attttctttcaaggcccgtgcagtt

SEQ ID NO: 5694196 - DNA, 25 bp, Homo sapien
tccaacagctgagaactgcacgggc

SEQ ID NO: 5694197 - DNA, 25 bp, Homo sapien
agctgagaactgcacgggccttgaa

SEQ ID NO: 5694198 - DNA, 25 bp, Homo sapien
gggaaaaattcctccaacagctgag

SEQ ID NO: 5694199 - DNA, 25 bp, Homo sapien
tcctccaacagctgagaactgcacg

SEQ ID NO: 5694200 - DNA, 25 bp, Homo sapien
aactgcacgggccttgaaagaaaat

SEQ ID NO: 5694201 - DNA, 25 bp, Homo sapien
gaaagaaaataccatctgttcttgg

SEQ ID NO: 5694202 - DNA, 25 bp, Homo sapien
aggtaaaaagcactccataagtggt

SEQ ID NO: 5694203 - DNA, 25 bp, Homo sapien
aaaagcactccataagtggtaacta

SEQ ID NO: 5694204 - DNA, 25 bp, Homo sapien
tacctggcaggggagtcagctaaat

SEQ ID NO: 5694205 - DNA, 25 bp, Homo sapien
gtacctatacccagtgcttggcagg

SEQ ID NO: 5694206 - DNA, 25 bp, Homo sapien
tatgtaaagtacctatacccagtgc

SEQ ID NO: 5694207 - DNA, 25 bp, Homo sapien
taaagtacctatacccagtgcttgg

SEQ ID NO: 5694208 - DNA, 25 bp, Homo sapien
caagcactgggtataggtactttac

SEQ ID NO: 5694209 - DNA, 25 bp, Homo sapien
acataatttagctgactcccctgcc

SEQ ID NO: 5694210 - DNA, 25 bp, Homo sapien
atttagctgactcccctgccaggta

SEQ ID NO: 5694211 - DNA, 25 bp, Homo sapien
cctgccaagcactgggtataggtac

SEQ ID NO: 5694212 - DNA, 25 bp, Homo sapien
taccacttatggagtgctttttacc

SEQ ID NO: 5694213 - DNA, 25 bp, Homo sapien
tagttaccacttatggagtgctttt

SEQ ID NO: 5694214 - DNA, 25 bp, Homo sapien
tgacctccagtaatccacctgcctt

SEQ ID NO: 5694215 - DNA, 25 bp, Homo sapien
taagcatgagccacggtgcccaacc

SEQ ID NO: 5694216 - DNA, 25 bp, Homo sapien
acctccagtaatccacctgccttgg

SEQ ID NO: 5694217 - DNA, 25 bp, Homo sapien
ataagcatgagccacggtgcccaac

SEQ ID NO: 5694218 - DNA, 25 bp, Homo sapien
gggattataagcatgagccacggtg

SEQ ID NO: 5694219 - DNA, 25 bp, Homo sapien
taaactcctgacctccagtaatcca

SEQ ID NO: 5694220 - DNA, 25 bp, Homo sapien
tactggaggtcaggagtttaagacc

SEQ ID NO: 5694221 - DNA, 25 bp, Homo sapien
aaggcaggtggattactggaggtca

SEQ ID NO: 5694222 - DNA, 25 bp, Homo sapien
ggttgggcaccgtggctcatgctta

SEQ ID NO: 5694223 - DNA, 25 bp, Homo sapien
gttgggcaccgtggctcatgcttat

SEQ ID NO: 5694224 - DNA, 25 bp, Homo sapien
caccgtggctcatgcttataatccc

SEQ ID NO: 5694225 - DNA, 25 bp, Homo sapien
tggattactggaggtcaggagttta

SEQ ID NO: 5694226 - DNA, 25 bp, Homo sapien
gtgatgagaacctgatttggaattt

SEQ ID NO: 5694227 - DNA, 25 bp, Homo sapien
ggtgatgagaacctgatttggaatt

SEQ ID NO: 5694228 - DNA, 25 bp, Homo sapien
aattccaaatcaggttctcatcacc

SEQ ID NO: 5694229 - DNA, 25 bp, Homo sapien
aaattccaaatcaggttctcatcac

SEQ ID NO: 5694230 - DNA, 25 bp, Homo sapien
catattcatgaaaaatttagctggg

SEQ ID NO: 5694231 - DNA, 25 bp, Homo sapien
tgagaacctgatttggaatttttaa

SEQ ID NO: 5694232 - DNA, 25 bp, Homo sapien
gccatattcatgaaaaatttagctg

SEQ ID NO: 5694233 - DNA, 25 bp, Homo sapien
gtgatgagaacctgatttggaattt

SEQ ID NO: 5694234 - DNA, 25 bp, Homo sapien
ggtgatgagaacctgatttggaatt

SEQ ID NO: 5694235 - DNA, 25 bp, Homo sapien
gaatttttaaattgccatattcatg

SEQ ID NO: 5694236 - DNA, 25 bp, Homo sapien
catgaatatggcaatttaaaaattc

SEQ ID NO: 5694237 - DNA, 25 bp, Homo sapien
aaaattccaaatcaggttctcatca

SEQ ID NO: 5694238 - DNA, 25 bp, Homo sapien
ttaaaaattccaaatcaggttctca

SEQ ID NO: 5694239 - DNA, 25 bp, Homo sapien
cagctaaatttttcatgaatatggc

SEQ ID NO: 5694240 - DNA, 25 bp, Homo sapien
aattccaaatcaggttctcatcacc

SEQ ID NO: 5694241 - DNA, 25 bp, Homo sapien
aaattccaaatcaggttctcatcac

SEQ ID NO: 5694242 - DNA, 25 bp, Homo sapien
tcccaggttcaggtgattctcccac

SEQ ID NO: 5694243 - DNA, 25 bp, Homo sapien
cccaggttcaggtgattctcccacc

SEQ ID NO: 5694244 - DNA, 25 bp, Homo sapien
aggttcaggtgattctcccacctca

SEQ ID NO: 5694245 - DNA, 25 bp, Homo sapien
ctggagtgcagtggcatgactggct

SEQ ID NO: 5694246 - DNA, 25 bp, Homo sapien
ccaggttcaggtgattctcccacct

SEQ ID NO: 5694247 - DNA, 25 bp, Homo sapien
gctcactgcaacctctgcctcccag

SEQ ID NO: 5694248 - DNA, 25 bp, Homo sapien
ctgggaggcagaggttgcagtgagc

SEQ ID NO: 5694249 - DNA, 25 bp, Homo sapien
gtgggagaatcacctgaacctggga

SEQ ID NO: 5694250 - DNA, 25 bp, Homo sapien
agccagtcatgccactgcactccag

SEQ ID NO: 5694251 - DNA, 25 bp, Homo sapien
aggtgggagaatcacctgaacctgg

SEQ ID NO: 5694252 - DNA, 25 bp, Homo sapien
tgaggtgggagaatcacctgaacct

SEQ ID NO: 5694253 - DNA, 25 bp, Homo sapien
ggtgggagaatcacctgaacctggg

SEQ ID NO: 5694254 - DNA, 25 bp, Homo sapien
ccaaaactgaattgttgagagtgga

SEQ ID NO: 5694255 - DNA, 25 bp, Homo sapien
ctcttctatggcacttagagtttat

SEQ ID NO: 5694256 - DNA, 25 bp, Homo sapien
ggcacttagagtttatttcatcccc

SEQ ID NO: 5694257 - DNA, 25 bp, Homo sapien
acaggaggtcttgggaaaatgaaat

SEQ ID NO: 5694258 - DNA, 25 bp, Homo sapien
gaaacaggaggtcttgggaaaatga

SEQ ID NO: 5694259 - DNA, 25 bp, Homo sapien
cccaaaactgaattgttgagagtgg

SEQ ID NO: 5694260 - DNA, 25 bp, Homo sapien
tcattttcccaagacctcctgtttc

SEQ ID NO: 5694261 - DNA, 25 bp, Homo sapien
gggatgaaataaactctaagtgcca

SEQ ID NO: 5694262 - DNA, 25 bp, Homo sapien
ccactctcaacaattcagttttggg

SEQ ID NO: 5694263 - DNA, 25 bp, Homo sapien
tgaaataaactctaagtgccataga

SEQ ID NO: 5694264 - DNA, 25 bp, Homo sapien
atttcattttcccaagacctcctgt

SEQ ID NO: 5694265 - DNA, 25 bp, Homo sapien
ataaactctaagtgccatagaagag

SEQ ID NO: 5694266 - DNA, 25 bp, Homo sapien
aatagatttcctccatgattaaaag

SEQ ID NO: 5694267 - DNA, 25 bp, Homo sapien
tgattaaaaggtattaattgggtga

SEQ ID NO: 5694268 - DNA, 25 bp, Homo sapien
atagatttcctccatgattaaaagg

SEQ ID NO: 5694269 - DNA, 25 bp, Homo sapien
ccatgattaaaaggtattaattggg

SEQ ID NO: 5694270 - DNA, 25 bp, Homo sapien
tcctccatgattaaaaggtattaat

SEQ ID NO: 5694271 - DNA, 25 bp, Homo sapien
tttcctccatgattaaaaggtatta

SEQ ID NO: 5694272 - DNA, 25 bp, Homo sapien
aattaataccttttaatcatggagg

SEQ ID NO: 5694273 - DNA, 25 bp, Homo sapien
tcacccaattaataccttttaatca

SEQ ID NO: 5694274 - DNA, 25 bp, Homo sapien
cccaattaataccttttaatcatgg

SEQ ID NO: 5694275 - DNA, 25 bp, Homo sapien
ccttttaatcatggaggaaatctat

SEQ ID NO: 5694276 - DNA, 25 bp, Homo sapien
taataccttttaatcatggaggaaa

SEQ ID NO: 5694277 - DNA, 25 bp, Homo sapien
ttaataccttttaatcatggaggaa

SEQ ID NO: 5694278 - DNA, 25 bp, Homo sapien
ggatatatcctagctttttcacaat

SEQ ID NO: 5694279 - DNA, 25 bp, Homo sapien
attaccttcttactgtatgtagcac

SEQ ID NO: 5694280 - DNA, 25 bp, Homo sapien
tatttacataattaccttcttactg

SEQ ID NO: 5694281 - DNA, 25 bp, Homo sapien
tatatcctagctttttcacaatctc

SEQ ID NO: 5694282 - DNA, 25 bp, Homo sapien
taattaccttcttactgtatgtagc

SEQ ID NO: 5694283 - DNA, 25 bp, Homo sapien
cctagctttttcacaatctcttatt

SEQ ID NO: 5694284 - DNA, 25 bp, Homo sapien
gtgctacatacagtaagaaggtaat

SEQ ID NO: 5694285 - DNA, 25 bp, Homo sapien
aataagagattgtgaaaaagctagg

SEQ ID NO: 5694286 - DNA, 25 bp, Homo sapien
ttgtgaaaaagctaggatatatcca

SEQ ID NO: 5694287 - DNA, 25 bp, Homo sapien
cagtaagaaggtaattatgtaaata

SEQ ID NO: 5694288 - DNA, 25 bp, Homo sapien
taagagattgtgaaaaagctaggat

SEQ ID NO: 5694289 - DNA, 25 bp, Homo sapien
gattgtgaaaaagctaggatatatc

SEQ ID NO: 5694290 - DNA, 25 bp, Homo sapien
acatgtgccaccacgcccagctaat

SEQ ID NO: 5694291 - DNA, 25 bp, Homo sapien
cagacatgtgccaccacgcccagct

SEQ ID NO: 5694292 - DNA, 25 bp, Homo sapien
tacagacatgtgccaccacgcccag

SEQ ID NO: 5694293 - DNA, 25 bp, Homo sapien
agacatgtgccaccacgcccagcta

SEQ ID NO: 5694294 - DNA, 25 bp, Homo sapien
ccacgcccagctaatttgtgtattt

SEQ ID NO: 5694295 - DNA, 25 bp, Homo sapien
acagacatgtgccaccacgcccagc

SEQ ID NO: 5694296 - DNA, 25 bp, Homo sapien
gctgggcgtggtggcacatgtctgt

SEQ ID NO: 5694297 - DNA, 25 bp, Homo sapien
ttagctgggcgtggtggcacatgtc

SEQ ID NO: 5694298 - DNA, 25 bp, Homo sapien
ctgggcgtggtggcacatgtctgta

SEQ ID NO: 5694299 - DNA, 25 bp, Homo sapien
attagctgggcgtggtggcacatgt

SEQ ID NO: 5694300 - DNA, 25 bp, Homo sapien
tagctgggcgtggtggcacatgtct

SEQ ID NO: 5694301 - DNA, 25 bp, Homo sapien
agctgggcgtggtggcacatgtctg

SEQ ID NO: 5694302 - DNA, 25 bp, Homo sapien
cattttgatgtgtgttctttcacag

SEQ ID NO: 5694303 - DNA, 25 bp, Homo sapien
tatagagaagaaacattccaataaa

SEQ ID NO: 5694304 - DNA, 25 bp, Homo sapien
aattgtccttcaagatacaaaccac

SEQ ID NO: 5694305 - DNA, 25 bp, Homo sapien
caaaccactgcttaacattttgatg

SEQ ID NO: 5694306 - DNA, 25 bp, Homo sapien
gtccttcaagatacaaaccactgct

SEQ ID NO: 5694307 - DNA, 25 bp, Homo sapien
gaaaataccaaaaatatagagaaga

SEQ ID NO: 5694308 - DNA, 25 bp, Homo sapien
cacacatcaaaatgttaagcagtgg

SEQ ID NO: 5694309 - DNA, 25 bp, Homo sapien
ctgtgaaagaacacacatcaaaatg

SEQ ID NO: 5694310 - DNA, 25 bp, Homo sapien
tttattggaatgtttcttctctata

SEQ ID NO: 5694311 - DNA, 25 bp, Homo sapien
agcagtggtttgtatcttgaaggac

SEQ ID NO: 5694312 - DNA, 25 bp, Homo sapien
tggtttgtatcttgaaggacaattt

SEQ ID NO: 5694313 - DNA, 25 bp, Homo sapien
catcaaaatgttaagcagtggtttg

SEQ ID NO: 5694314 - DNA, 25 bp, Homo sapien
gcgcccaccaccacacccggctaat

SEQ ID NO: 5694315 - DNA, 25 bp, Homo sapien
ggcgcccaccaccacacccggctaa

SEQ ID NO: 5694316 - DNA, 25 bp, Homo sapien
caggcgcccaccaccacacccggct

SEQ ID NO: 5694317 - DNA, 25 bp, Homo sapien
ttacaggcgcccaccaccacacccg

SEQ ID NO: 5694318 - DNA, 25 bp, Homo sapien
cgcccaccaccacacccggctaatt

SEQ ID NO: 5694319 - DNA, 25 bp, Homo sapien
aggcgcccaccaccacacccggcta

SEQ ID NO: 5694320 - DNA, 25 bp, Homo sapien
tagccgggtgtggtggtgggcgcct

SEQ ID NO: 5694321 - DNA, 25 bp, Homo sapien
aattagccgggtgtggtggtgggcg

SEQ ID NO: 5694322 - DNA, 25 bp, Homo sapien
ttagccgggtgtggtggtgggcgcc

SEQ ID NO: 5694323 - DNA, 25 bp, Homo sapien
attagccgggtgtggtggtgggcgc

SEQ ID NO: 5694324 - DNA, 25 bp, Homo sapien
agccgggtgtggtggtgggcgcctg

SEQ ID NO: 5694325 - DNA, 25 bp, Homo sapien
acttgggaggctgaggcagagaact

SEQ ID NO: 5694326 - DNA, 25 bp, Homo sapien
ttttatggctgctcttttagatttt

SEQ ID NO: 5694327 - DNA, 25 bp, Homo sapien
tttttatggctgctcttttagattt

SEQ ID NO: 5694328 - DNA, 25 bp, Homo sapien
ttttttatggctgctcttttagatt

SEQ ID NO: 5694329 - DNA, 25 bp, Homo sapien
aatctaaaagagcagccataaaaaa

SEQ ID NO: 5694330 - DNA, 25 bp, Homo sapien
aaatctaaaagagcagccataaaaa

SEQ ID NO: 5694331 - DNA, 25 bp, Homo sapien
aaaatctaaaagagcagccataaaa

SEQ ID NO: 5694332 - DNA, 25 bp, Homo sapien
ttttatggctgctcttttagatttt

SEQ ID NO: 5694333 - DNA, 25 bp, Homo sapien
aattggaatgttttcttattcagcc

SEQ ID NO: 5694334 - DNA, 25 bp, Homo sapien
attggaatgttttcttattcagcca

SEQ ID NO: 5694335 - DNA, 25 bp, Homo sapien
ttatggctgctcttttagatttttt

SEQ ID NO: 5694336 - DNA, 25 bp, Homo sapien
tttttcatagaattggaatgttttc

SEQ ID NO: 5694337 - DNA, 25 bp, Homo sapien
ttttttatggctgctcttttagatt

SEQ ID NO: 5694338 - DNA, 25 bp, Homo sapien
aatctaaaagagcagccataaaaaa

SEQ ID NO: 5694339 - DNA, 25 bp, Homo sapien
tctatgaaaaaaactaaaatgtcag

SEQ ID NO: 5694340 - DNA, 25 bp, Homo sapien
tggctgaataagaaaacattccaat

SEQ ID NO: 5694341 - DNA, 25 bp, Homo sapien
gaaaacattccaattctatgaaaaa

SEQ ID NO: 5694342 - DNA, 25 bp, Homo sapien
aaaatctaaaagagcagccataaaa

SEQ ID NO: 5694343 - DNA, 25 bp, Homo sapien
aaaaaatctaaaagagcagccataa

SEQ ID NO: 5694344 - DNA, 25 bp, Homo sapien
tagttgacccttcgtatccatggat

SEQ ID NO: 5694345 - DNA, 25 bp, Homo sapien
ttgacccttcgtatccatggatttt

SEQ ID NO: 5694346 - DNA, 25 bp, Homo sapien
caaaaatatgccagactatgcatag

SEQ ID NO: 5694347 - DNA, 25 bp, Homo sapien
gcatagttgacccttcgtatccatg

SEQ ID NO: 5694348 - DNA, 25 bp, Homo sapien
tatgccagactatgcatagttgacc

SEQ ID NO: 5694349 - DNA, 25 bp, Homo sapien
gactatgcatagttgacccttcgta

SEQ ID NO: 5694350 - DNA, 25 bp, Homo sapien
aaaatccatggatacgaagggtcaa

SEQ ID NO: 5694351 - DNA, 25 bp, Homo sapien
catggatacgaagggtcaactatgc

SEQ ID NO: 5694352 - DNA, 25 bp, Homo sapien
tacgaagggtcaactatgcatagtc

SEQ ID NO: 5694353 - DNA, 25 bp, Homo sapien
ggtcaactatgcatagtctggcata

SEQ ID NO: 5694354 - DNA, 25 bp, Homo sapien
gatacgaagggtcaactatgcatag

SEQ ID NO: 5694355 - DNA, 25 bp, Homo sapien
aatccatggatacgaagggtcaact

SEQ ID NO: 5694356 - DNA, 25 bp, Homo sapien
agtatactgctggatgtgcccaggt

SEQ ID NO: 5694357 - DNA, 25 bp, Homo sapien
aagtatactgctggatgtgcccagg

SEQ ID NO: 5694358 - DNA, 25 bp, Homo sapien
tctgaaatagtagtgttaacagcta

SEQ ID NO: 5694359 - DNA, 25 bp, Homo sapien
atagtagtgttaacagctatttaca

SEQ ID NO: 5694360 - DNA, 25 bp, Homo sapien
ctgaaatagtagtgttaacagctat

SEQ ID NO: 5694361 - DNA, 25 bp, Homo sapien
aaagtatactgctggatgtgcccag

SEQ ID NO: 5694362 - DNA, 25 bp, Homo sapien
cctgggcacatccagcagtatactt

SEQ ID NO: 5694363 - DNA, 25 bp, Homo sapien
atagctgttaacactactatttcag

SEQ ID NO: 5694364 - DNA, 25 bp, Homo sapien
acctgggcacatccagcagtatact

SEQ ID NO: 5694365 - DNA, 25 bp, Homo sapien
tgtaaatagctgttaacactactat

SEQ ID NO: 5694366 - DNA, 25 bp, Homo sapien
ctgggcacatccagcagtatacttt

SEQ ID NO: 5694367 - DNA, 25 bp, Homo sapien
tagctgttaacactactatttcaga

SEQ ID NO: 5694368 - DNA, 25 bp, Homo sapien
aactggtcccccagggatatcaaga

SEQ ID NO: 5694369 - DNA, 25 bp, Homo sapien
actggtcccccagggatatcaagag

SEQ ID NO: 5694370 - DNA, 25 bp, Homo sapien
ctcttgatatccctgggggaccagt

SEQ ID NO: 5694371 - DNA, 25 bp, Homo sapien
tcttgatatccctgggggaccagtt

SEQ ID NO: 5694372 - DNA, 25 bp, Homo sapien
ccccagggatatcaagagatgactg

SEQ ID NO: 5694373 - DNA, 25 bp, Homo sapien
tgtgggggcgttcctggaactggtc

SEQ ID NO: 5694374 - DNA, 25 bp, Homo sapien
ccagggatatcaagagatgactgta

SEQ ID NO: 5694375 - DNA, 25 bp, Homo sapien
gatatcaagagatgactgtatttcc

SEQ ID NO: 5694376 - DNA, 25 bp, Homo sapien
aactggtcccccagggatatcaaga

SEQ ID NO: 5694377 - DNA, 25 bp, Homo sapien
tcaagagatgactgtatttcctttt

SEQ ID NO: 5694378 - DNA, 25 bp, Homo sapien
acagtcatctcttgatatccctggg

SEQ ID NO: 5694379 - DNA, 25 bp, Homo sapien
tacagtcatctcttgatatccctgg

SEQ ID NO: 5694380 - DNA, 25 bp, Homo sapien
gaccagttccaggaacgcccccaca

SEQ ID NO: 5694381 - DNA, 25 bp, Homo sapien
gaaatacagtcatctcttgatatcc

SEQ ID NO: 5694382 - DNA, 25 bp, Homo sapien
tcttgatatccctgggggaccagtt

SEQ ID NO: 5694383 - DNA, 25 bp, Homo sapien
aaaaggaaatacagtcatctcttga

SEQ ID NO: 5694384 - DNA, 25 bp, Homo sapien
gctggaataataggtgtgggccacc

SEQ ID NO: 5694385 - DNA, 25 bp, Homo sapien
tggaataataggtgtgggccaccac

SEQ ID NO: 5694386 - DNA, 25 bp, Homo sapien
tagctggaataataggtgtgggcca

SEQ ID NO: 5694387 - DNA, 25 bp, Homo sapien
gcctcctgggttctgggttcaagca

SEQ ID NO: 5694388 - DNA, 25 bp, Homo sapien
ctgagtagctggaataataggtgtg

SEQ ID NO: 5694389 - DNA, 25 bp, Homo sapien
tgcctcctgggttctgggttcaagc

SEQ ID NO: 5694390 - DNA, 25 bp, Homo sapien
gtggtggcccacacctattattcca

SEQ ID NO: 5694391 - DNA, 25 bp, Homo sapien
gcttgaacccagaacccaggaggca

SEQ ID NO: 5694392 - DNA, 25 bp, Homo sapien
attgcttgaacccagaacccaggag

SEQ ID NO: 5694393 - DNA, 25 bp, Homo sapien
cacacctattattccagctactcag

SEQ ID NO: 5694394 - DNA, 25 bp, Homo sapien
ggtggcccacacctattattccagc

SEQ ID NO: 5694395 - DNA, 25 bp, Homo sapien
tgcttgaacccagaacccaggaggc

SEQ ID NO: 5694396 - DNA, 25 bp, Homo sapien
gtgtgagccagcacacctggcctgt

SEQ ID NO: 5694397 - DNA, 25 bp, Homo sapien
aagtgatttgcccacttcggcctcc

SEQ ID NO: 5694398 - DNA, 25 bp, Homo sapien
cctcaagtgatttgcccacttcggc

SEQ ID NO: 5694399 - DNA, 25 bp, Homo sapien
gccagcacacctggcctgtatttac

SEQ ID NO: 5694400 - DNA, 25 bp, Homo sapien
atttgcccacttcggcctcccaagg

SEQ ID NO: 5694401 - DNA, 25 bp, Homo sapien
tgagccagcacacctggcctgtatt

SEQ ID NO: 5694402 - DNA, 25 bp, Homo sapien
gtaaatacaggccaggtgtgctggc

SEQ ID NO: 5694403 - DNA, 25 bp, Homo sapien
ccttgggaggccgaagtgggcaaat

SEQ ID NO: 5694404 - DNA, 25 bp, Homo sapien
gccgaagtgggcaaatcacttgagg

SEQ ID NO: 5694405 - DNA, 25 bp, Homo sapien
aaatacaggccaggtgtgctggctc

SEQ ID NO: 5694406 - DNA, 25 bp, Homo sapien
tacaggccaggtgtgctggctcaca

SEQ ID NO: 5694407 - DNA, 25 bp, Homo sapien
ggaggccgaagtgggcaaatcactt

SEQ ID NO: 5694408 - DNA, 25 bp, Homo sapien
gatggaatcagattaaccggaagaa

SEQ ID NO: 5694409 - DNA, 25 bp, Homo sapien
aagatactgatgaatggtctcttca

SEQ ID NO: 5694410 - DNA, 25 bp, Homo sapien
aaagatactgatgaatggtctcttc

SEQ ID NO: 5694411 - DNA, 25 bp, Homo sapien
tgaagagaccattcatcagtatctt

SEQ ID NO: 5694412 - DNA, 25 bp, Homo sapien
gaagagaccattcatcagtatcttt

SEQ ID NO: 5694413 - DNA, 25 bp, Homo sapien
ttcttccggttaatctgattccatc

SEQ ID NO: 5694414 - DNA, 25 bp, Homo sapien
tttaatagggataaagatactgatg

SEQ ID NO: 5694415 - DNA, 25 bp, Homo sapien
gaatggtctcttcatatggtaatat

SEQ ID NO: 5694416 - DNA, 25 bp, Homo sapien
gatggaatcagattaaccggaagaa

SEQ ID NO: 5694417 - DNA, 25 bp, Homo sapien
tatggtaatatgtgtgtgaaatcta

SEQ ID NO: 5694418 - DNA, 25 bp, Homo sapien
tggaatcagattaaccggaagaaat

SEQ ID NO: 5694419 - DNA, 25 bp, Homo sapien
aagatactgatgaatggtctcttca

SEQ ID NO: 5694420 - DNA, 25 bp, Homo sapien
tccggttaatctgattccatctgct

SEQ ID NO: 5694421 - DNA, 25 bp, Homo sapien
tgaagagaccattcatcagtatctt

SEQ ID NO: 5694422 - DNA, 25 bp, Homo sapien
cacatattaccatatgaagagacca

SEQ ID NO: 5694423 - DNA, 25 bp, Homo sapien
catcagtatctttatccctattaaa

SEQ ID NO: 5694424 - DNA, 25 bp, Homo sapien
ttcttccggttaatctgattccatc

SEQ ID NO: 5694425 - DNA, 25 bp, Homo sapien
tatagatttcacacacatattacca

SEQ ID NO: 5694426 - DNA, 25 bp, Homo sapien
cctgagataagccatccactccact

SEQ ID NO: 5694427 - DNA, 25 bp, Homo sapien
tcctattctctggatgggaggtgga

SEQ ID NO: 5694428 - DNA, 25 bp, Homo sapien
tccacctcccatccagagaatagga

SEQ ID NO: 5694429 - DNA, 25 bp, Homo sapien
agtggagtggatggcttatctcagg

SEQ ID NO: 5694430 - DNA, 25 bp, Homo sapien
cctacaacagagtgggaagggctga

SEQ ID NO: 5694431 - DNA, 25 bp, Homo sapien
tccacttaactaccattatctccta

SEQ ID NO: 5694432 - DNA, 25 bp, Homo sapien
gagataagccatccactccacttaa

SEQ ID NO: 5694433 - DNA, 25 bp, Homo sapien
tcctattctctggatgggaggtgga

SEQ ID NO: 5694434 - DNA, 25 bp, Homo sapien
tttcctgagataagccatccactcc

SEQ ID NO: 5694435 - DNA, 25 bp, Homo sapien
acagagtgggaagggctgaaatcaa

SEQ ID NO: 5694436 - DNA, 25 bp, Homo sapien
ttaagtggagtggatggcttatctc

SEQ ID NO: 5694437 - DNA, 25 bp, Homo sapien
tcagcccttcccactctgttgtagg

SEQ ID NO: 5694438 - DNA, 25 bp, Homo sapien
ccagagaataggagataatggtagt

SEQ ID NO: 5694439 - DNA, 25 bp, Homo sapien
ggagtggatggcttatctcaggaaa

SEQ ID NO: 5694440 - DNA, 25 bp, Homo sapien
ttgatttcagcccttcccactctgt

SEQ ID NO: 5694441 - DNA, 25 bp, Homo sapien
tccacctcccatccagagaatagga

SEQ ID NO: 5694442 - DNA, 25 bp, Homo sapien
catggtaagattagggaattattta

SEQ ID NO: 5694443 - DNA, 25 bp, Homo sapien
gattagggaattatttaagactgga

SEQ ID NO: 5694444 - DNA, 25 bp, Homo sapien
actgccatggtaagattagggaatt

SEQ ID NO: 5694445 - DNA, 25 bp, Homo sapien
ctgccatggtaagattagggaatta

SEQ ID NO: 5694446 - DNA, 25 bp, Homo sapien
attagggaattatttaagactggat

SEQ ID NO: 5694447 - DNA, 25 bp, Homo sapien
gccatggtaagattagggaattatt

SEQ ID NO: 5694448 - DNA, 25 bp, Homo sapien
aaataattccctaatcttaccatgg

SEQ ID NO: 5694449 - DNA, 25 bp, Homo sapien
taattccctaatcttaccatggcag

SEQ ID NO: 5694450 - DNA, 25 bp, Homo sapien
aattccctaatcttaccatggcagt

SEQ ID NO: 5694451 - DNA, 25 bp, Homo sapien
tccagtcttaaataattccctaatc

SEQ ID NO: 5694452 - DNA, 25 bp, Homo sapien
taaataattccctaatcttaccatg

SEQ ID NO: 5694453 - DNA, 25 bp, Homo sapien
aataattccctaatcttaccatggc

SEQ ID NO: 5694454 - DNA, 25 bp, Homo sapien
gcttttaattttctatggctttcac

SEQ ID NO: 5694455 - DNA, 25 bp, Homo sapien
gtgaaagccatagaaaattaaaagc

SEQ ID NO: 5694456 - DNA, 25 bp, Homo sapien
ttttctatggctttcacctgtctta

SEQ ID NO: 5694457 - DNA, 25 bp, Homo sapien
gagagtccagcctatttttctgtgt

SEQ ID NO: 5694458 - DNA, 25 bp, Homo sapien
catttttagagagtccagcctattt

SEQ ID NO: 5694459 - DNA, 25 bp, Homo sapien
gcttttaattttctatggctttcac

SEQ ID NO: 5694460 - DNA, 25 bp, Homo sapien
tcacctgtcttattcttgcttaata

SEQ ID NO: 5694461 - DNA, 25 bp, Homo sapien
taagtcatttttagagagtccagcc

SEQ ID NO: 5694462 - DNA, 25 bp, Homo sapien
cacatacacagaaaaataggctgga

SEQ ID NO: 5694463 - DNA, 25 bp, Homo sapien
gaaaaataggctggactctctaaaa

SEQ ID NO: 5694464 - DNA, 25 bp, Homo sapien
tattaagcaagaataagacaggtga

SEQ ID NO: 5694465 - DNA, 25 bp, Homo sapien
gtgaaagccatagaaaattaaaagc

SEQ ID NO: 5694466 - DNA, 25 bp, Homo sapien
taagacaggtgaaagccatagaaaa

SEQ ID NO: 5694467 - DNA, 25 bp, Homo sapien
gctggactctctaaaaatgacttac

SEQ ID NO: 5694468 - DNA, 25 bp, Homo sapien
gtttgagggtagcacgccttttgca

SEQ ID NO: 5694469 - DNA, 25 bp, Homo sapien
ttgagggtagcacgccttttgcaga

SEQ ID NO: 5694470 - DNA, 25 bp, Homo sapien
tagcacgccttttgcagacagcata

SEQ ID NO: 5694471 - DNA, 25 bp, Homo sapien
gagtttgagggtagcacgccttttg

SEQ ID NO: 5694472 - DNA, 25 bp, Homo sapien
gggtagcacgccttttgcagacagc

SEQ ID NO: 5694473 - DNA, 25 bp, Homo sapien
agggtagcacgccttttgcagacag

SEQ ID NO: 5694474 - DNA, 25 bp, Homo sapien
agcacgccttttgcagacagcataa

SEQ ID NO: 5694475 - DNA, 25 bp, Homo sapien
ggtggctggagcaattcaagtgaaa

SEQ ID NO: 5694476 - DNA, 25 bp, Homo sapien
aagttacaaaggactgcttcatcca

SEQ ID NO: 5694477 - DNA, 25 bp, Homo sapien
gaaagaagttacaaaggactgcttc

SEQ ID NO: 5694478 - DNA, 25 bp, Homo sapien
cagacagcataatggtggctggagc

SEQ ID NO: 5694479 - DNA, 25 bp, Homo sapien
cttttgcagacagcataatggtggc

SEQ ID NO: 5694480 - DNA, 25 bp, Homo sapien
gaagcagtcctttgtaacttctttc

SEQ ID NO: 5694481 - DNA, 25 bp, Homo sapien
gccaccattatgctgtctgcaaaag

SEQ ID NO: 5694482 - DNA, 25 bp, Homo sapien
tttcacttgaattgctccagccacc

SEQ ID NO: 5694483 - DNA, 25 bp, Homo sapien
gctccagccaccattatgctgtctg

SEQ ID NO: 5694484 - DNA, 25 bp, Homo sapien
ttatgctgtctgcaaaaggcgtgct

SEQ ID NO: 5694485 - DNA, 25 bp, Homo sapien
tggatgaagcagtcctttgtaactt

SEQ ID NO: 5694486 - DNA, 25 bp, Homo sapien
ctgtctgcaaaaggcgtgctaccct

SEQ ID NO: 5694487 - DNA, 25 bp, Homo sapien
tctgcaaaaggcgtgctaccctcaa

SEQ ID NO: 5694488 - DNA, 25 bp, Homo sapien
caaaaggcgtgctaccctcaaactc

SEQ ID NO: 5694489 - DNA, 25 bp, Homo sapien
tgcaaaaggcgtgctaccctcaaac

SEQ ID NO: 5694490 - DNA, 25 bp, Homo sapien
tatgctgtctgcaaaaggcgtgcta

SEQ ID NO: 5694491 - DNA, 25 bp, Homo sapien
gctgtctgcaaaaggcgtgctaccc

SEQ ID NO: 5694492 - DNA, 25 bp, Homo sapien
agcacgccttttgcagacagcataa

SEQ ID NO: 5694493 - DNA, 25 bp, Homo sapien
ggtggctggagcaattcaagtgaaa

SEQ ID NO: 5694494 - DNA, 25 bp, Homo sapien
aagttacaaaggactgcttcatcca

SEQ ID NO: 5694495 - DNA, 25 bp, Homo sapien
gaaagaagttacaaaggactgcttc

SEQ ID NO: 5694496 - DNA, 25 bp, Homo sapien
cttttgcagacagcataatggtggc

SEQ ID NO: 5694497 - DNA, 25 bp, Homo sapien
cagacagcataatggtggctggagc

SEQ ID NO: 5694498 - DNA, 25 bp, Homo sapien
gaagcagtcctttgtaacttctttc

SEQ ID NO: 5694499 - DNA, 25 bp, Homo sapien
gccaccattatgctgtctgcaaaag

SEQ ID NO: 5694500 - DNA, 25 bp, Homo sapien
tttcacttgaattgctccagccacc

SEQ ID NO: 5694501 - DNA, 25 bp, Homo sapien
gctccagccaccattatgctgtctg

SEQ ID NO: 5694502 - DNA, 25 bp, Homo sapien
ttatgctgtctgcaaaaggcgtgct

SEQ ID NO: 5694503 - DNA, 25 bp, Homo sapien
tggatgaagcagtcctttgtaactt

SEQ ID NO: 5694504 - DNA, 25 bp, Homo sapien
aaaatcttagacactaaggcttaga

SEQ ID NO: 5694505 - DNA, 25 bp, Homo sapien
gagtctaaaatcttagacactaagg

SEQ ID NO: 5694506 - DNA, 25 bp, Homo sapien
taaatcggggagtatctaccaaagc

SEQ ID NO: 5694507 - DNA, 25 bp, Homo sapien
cttagacactaaggcttagaaaatc

SEQ ID NO: 5694508 - DNA, 25 bp, Homo sapien
tctaaaatcttagacactaaggctt

SEQ ID NO: 5694509 - DNA, 25 bp, Homo sapien
cttttgagtctaaaatcttagacac

SEQ ID NO: 5694510 - DNA, 25 bp, Homo sapien
gattttctaagccttagtgtctaag

SEQ ID NO: 5694511 - DNA, 25 bp, Homo sapien
gccttagtgtctaagattttagact

SEQ ID NO: 5694512 - DNA, 25 bp, Homo sapien
gctttggtagatactccccgattta

SEQ ID NO: 5694513 - DNA, 25 bp, Homo sapien
ggagctttggtagatactccccgat

SEQ ID NO: 5694514 - DNA, 25 bp, Homo sapien
gagctttggtagatactccccgatt

SEQ ID NO: 5694515 - DNA, 25 bp, Homo sapien
gtgtctaagattttagactcaaaag

SEQ ID NO: 5694516 - DNA, 25 bp, Homo sapien
tgtagtgtctctgggtttgttgtac

SEQ ID NO: 5694517 - DNA, 25 bp, Homo sapien
tagtgtctctgggtttgttgtactt

SEQ ID NO: 5694518 - DNA, 25 bp, Homo sapien
gtagtgtctctgggtttgttgtact

SEQ ID NO: 5694519 - DNA, 25 bp, Homo sapien
aatttttacatgaaggaacagcgtt

SEQ ID NO: 5694520 - DNA, 25 bp, Homo sapien
agtgtctctgggtttgttgtacttt

SEQ ID NO: 5694521 - DNA, 25 bp, Homo sapien
aaagtacaacaaacccagagacact

SEQ ID NO: 5694522 - DNA, 25 bp, Homo sapien
aagtacaacaaacccagagacacta

SEQ ID NO: 5694523 - DNA, 25 bp, Homo sapien
gtacaacaaacccagagacactaca

SEQ ID NO: 5694524 - DNA, 25 bp, Homo sapien
agtacaacaaacccagagacactac

SEQ ID NO: 5694525 - DNA, 25 bp, Homo sapien
aacgctgttccttcatgtaaaaatt

SEQ ID NO: 5694526 - DNA, 25 bp, Homo sapien
taacctgataagtagtatgtcttgt

SEQ ID NO: 5694527 - DNA, 25 bp, Homo sapien
tatgtcttgtgctcaatccctagca

SEQ ID NO: 5694528 - DNA, 25 bp, Homo sapien
tgtggcattaacctgataagtagta

SEQ ID NO: 5694529 - DNA, 25 bp, Homo sapien
agtcttgtggcattaacctgataag

SEQ ID NO: 5694530 - DNA, 25 bp, Homo sapien
caatccctagcacctagtatgtagg

SEQ ID NO: 5694531 - DNA, 25 bp, Homo sapien
gcacctagtatgtaggcactaaata

SEQ ID NO: 5694532 - DNA, 25 bp, Homo sapien
tatttagtgcctacatactaggtgc

SEQ ID NO: 5694533 - DNA, 25 bp, Homo sapien
tactacttatcaggttaatgccaca

SEQ ID NO: 5694534 - DNA, 25 bp, Homo sapien
caagacatactacttatcaggttaa

SEQ ID NO: 5694535 - DNA, 25 bp, Homo sapien
tgctagggattgagcacaagacata

SEQ ID NO: 5694536 - DNA, 25 bp, Homo sapien
catactaggtgctagggattgagca

SEQ ID NO: 5694537 - DNA, 25 bp, Homo sapien
cttatcaggttaatgccacaagact

SEQ ID NO: 5694538 - DNA, 25 bp, Homo sapien
gagtatcacgctctggttattttcc

SEQ ID NO: 5694539 - DNA, 25 bp, Homo sapien
gcagagagtatcagagtatcacgct

SEQ ID NO: 5694540 - DNA, 25 bp, Homo sapien
cagagagtatcagagtatcacgctc

SEQ ID NO: 5694541 - DNA, 25 bp, Homo sapien
gagtatcagagtatcacgctctggt

SEQ ID NO: 5694542 - DNA, 25 bp, Homo sapien
tatcacgctctggttattttcctag

SEQ ID NO: 5694543 - DNA, 25 bp, Homo sapien
tatcagagtatcacgctctggttat

SEQ ID NO: 5694544 - DNA, 25 bp, Homo sapien
agcgtgatactctgatactctctgc

SEQ ID NO: 5694545 - DNA, 25 bp, Homo sapien
taggaaaataaccagagcgtgatac

SEQ ID NO: 5694546 - DNA, 25 bp, Homo sapien
gaaaataaccagagcgtgatactct

SEQ ID NO: 5694547 - DNA, 25 bp, Homo sapien
cagagcgtgatactctgatactctc

SEQ ID NO: 5694548 - DNA, 25 bp, Homo sapien
ctaggaaaataaccagagcgtgata

SEQ ID NO: 5694549 - DNA, 25 bp, Homo sapien
taaccagagcgtgatactctgatac

SEQ ID NO: 5694550 - DNA, 25 bp, Homo sapien
cttttccgaagagcacaagcccggg

SEQ ID NO: 5694551 - DNA, 25 bp, Homo sapien
tggatcttttccgaagagcacaagc

SEQ ID NO: 5694552 - DNA, 25 bp, Homo sapien
tcttttccgaagagcacaagcccgg

SEQ ID NO: 5694553 - DNA, 25 bp, Homo sapien
gatcttttccgaagagcacaagccc

SEQ ID NO: 5694554 - DNA, 25 bp, Homo sapien
tttccgaagagcacaagcccgggct

SEQ ID NO: 5694555 - DNA, 25 bp, Homo sapien
gacttggatcttttccgaagagcac

SEQ ID NO: 5694556 - DNA, 25 bp, Homo sapien
gcccgggcttgtgctcttcggaaaa

SEQ ID NO: 5694557 - DNA, 25 bp, Homo sapien
gcttgtgctcttcggaaaagatcca

SEQ ID NO: 5694558 - DNA, 25 bp, Homo sapien
ccgggcttgtgctcttcggaaaaga

SEQ ID NO: 5694559 - DNA, 25 bp, Homo sapien
gggcttgtgctcttcggaaaagatc

SEQ ID NO: 5694560 - DNA, 25 bp, Homo sapien
gtgctcttcggaaaagatccaagtc

SEQ ID NO: 5694561 - DNA, 25 bp, Homo sapien
agcccgggcttgtgctcttcggaaa

SEQ ID NO: 5694562 - DNA, 25 bp, Homo sapien
taggcgcccctttgtctcagctggg

SEQ ID NO: 5694563 - DNA, 25 bp, Homo sapien
cataggcgcccctttgtctcagctg

SEQ ID NO: 5694564 - DNA, 25 bp, Homo sapien
gtctcagctgggcaatttgcaattc

SEQ ID NO: 5694565 - DNA, 25 bp, Homo sapien
caattctgagaacctgtagcctagg

SEQ ID NO: 5694566 - DNA, 25 bp, Homo sapien
catctctgttgttttcttaatccca

SEQ ID NO: 5694567 - DNA, 25 bp, Homo sapien
cagctgggcaatttgcaattctgag

SEQ ID NO: 5694568 - DNA, 25 bp, Homo sapien
tgttgggattaagaaaacaacagag

SEQ ID NO: 5694569 - DNA, 25 bp, Homo sapien
gaattgcaaattgcccagctgagac

SEQ ID NO: 5694570 - DNA, 25 bp, Homo sapien
cctaggctacaggttctcagaattg

SEQ ID NO: 5694571 - DNA, 25 bp, Homo sapien
gggattaagaaaacaacagagatga

SEQ ID NO: 5694572 - DNA, 25 bp, Homo sapien
ccagctgagacaaaggggcgcctat

SEQ ID NO: 5694573 - DNA, 25 bp, Homo sapien
ctcagaattgcaaattgcccagctg

SEQ ID NO: 5694574 - DNA, 25 bp, Homo sapien
tataacagattaaatgtgttcaggg

SEQ ID NO: 5694575 - DNA, 25 bp, Homo sapien
ataacagattaaatgtgttcaggga

SEQ ID NO: 5694576 - DNA, 25 bp, Homo sapien
ccctgaacacatttaatctgttata

SEQ ID NO: 5694577 - DNA, 25 bp, Homo sapien
tccctgaacacatttaatctgttat

SEQ ID NO: 5694578 - DNA, 25 bp, Homo sapien
gcagaatttttaacaactttgcttg

SEQ ID NO: 5694579 - DNA, 25 bp, Homo sapien
caactttgcttgaagaaaattctgg

SEQ ID NO: 5694580 - DNA, 25 bp, Homo sapien
gattgagtttacctctgatataaca

SEQ ID NO: 5694581 - DNA, 25 bp, Homo sapien
tataacagattaaatgtgttcaggg

SEQ ID NO: 5694582 - DNA, 25 bp, Homo sapien
taaatgtgttcagggaagctcagtt

SEQ ID NO: 5694583 - DNA, 25 bp, Homo sapien
gaaaattctggtgattgagtttacc

SEQ ID NO: 5694584 - DNA, 25 bp, Homo sapien
ccctgaacacatttaatctgttata

SEQ ID NO: 5694585 - DNA, 25 bp, Homo sapien
ccagaattttcttcaagcaaagttg

SEQ ID NO: 5694586 - DNA, 25 bp, Homo sapien
tgttatatcagaggtaaactcaatc

SEQ ID NO: 5694587 - DNA, 25 bp, Homo sapien
aaaactgagcttccctgaacacatt

SEQ ID NO: 5694588 - DNA, 25 bp, Homo sapien
gaggtaaactcaatcaccagaattt

SEQ ID NO: 5694589 - DNA, 25 bp, Homo sapien
caagcaaagttgttaaaaattctgc

SEQ ID NO: 5694590 - DNA, 25 bp, Homo sapien
cctggttatgcttacaaattatact

SEQ ID NO: 5694591 - DNA, 25 bp, Homo sapien
acttttgtagccaactcagagccac

SEQ ID NO: 5694592 - DNA, 25 bp, Homo sapien
caactttacacctggttatgcttac

SEQ ID NO: 5694593 - DNA, 25 bp, Homo sapien
ctgaatggagatggatatccgaatt

SEQ ID NO: 5694594 - DNA, 25 bp, Homo sapien
tacacctggttatgcttacaaatta

SEQ ID NO: 5694595 - DNA, 25 bp, Homo sapien
ttgtagccaactcagagccactgaa

SEQ ID NO: 5694596 - DNA, 25 bp, Homo sapien
taatttgtaagcataaccaggtgta

SEQ ID NO: 5694597 - DNA, 25 bp, Homo sapien
taagcataaccaggtgtaaagttgt

SEQ ID NO: 5694598 - DNA, 25 bp, Homo sapien
aattcggatatccatctccattcag

SEQ ID NO: 5694599 - DNA, 25 bp, Homo sapien
agtataatttgtaagcataaccagg

SEQ ID NO: 5694600 - DNA, 25 bp, Homo sapien
tcagtggctctgagttggctacaaa

SEQ ID NO: 5694601 - DNA, 25 bp, Homo sapien
gtggctctgagttggctacaaaagt

SEQ ID NO: 5694602 - DNA, 25 bp, Homo sapien
tgtggatatatttcacggagattca

SEQ ID NO: 5694603 - DNA, 25 bp, Homo sapien
tctaagtgaccattgtggatatatt

SEQ ID NO: 5694604 - DNA, 25 bp, Homo sapien
ttctaagtgaccattgtggatatat

SEQ ID NO: 5694605 - DNA, 25 bp, Homo sapien
aatatatccacaatggtcacttaga

SEQ ID NO: 5694606 - DNA, 25 bp, Homo sapien
tgaatctccgtgaaatatatccaca

SEQ ID NO: 5694607 - DNA, 25 bp, Homo sapien
atatatccacaatggtcacttagaa

SEQ ID NO: 5694608 - DNA, 25 bp, Homo sapien
tgtggatatatttcacggagattca

SEQ ID NO: 5694609 - DNA, 25 bp, Homo sapien
ctagaattatcatgcacatttcaaa

SEQ ID NO: 5694610 - DNA, 25 bp, Homo sapien
tctaagtgaccattgtggatatatt

SEQ ID NO: 5694611 - DNA, 25 bp, Homo sapien
ttttttctaagtgaccattgtggat

SEQ ID NO: 5694612 - DNA, 25 bp, Homo sapien
ttctaagtgaccattgtggatatat

SEQ ID NO: 5694613 - DNA, 25 bp, Homo sapien
tagattctagaattatcatgcacat

SEQ ID NO: 5694614 - DNA, 25 bp, Homo sapien
aatatatccacaatggtcacttaga

SEQ ID NO: 5694615 - DNA, 25 bp, Homo sapien
tgaaatgtgcatgataattctagaa

SEQ ID NO: 5694616 - DNA, 25 bp, Homo sapien
tgaatctccgtgaaatatatccaca

SEQ ID NO: 5694617 - DNA, 25 bp, Homo sapien
tgcatgataattctagaatctaaac

SEQ ID NO: 5694618 - DNA, 25 bp, Homo sapien
atatatccacaatggtcacttagaa

SEQ ID NO: 5694619 - DNA, 25 bp, Homo sapien
tatccacaatggtcacttagaaaaa

SEQ ID NO: 5694620 - DNA, 25 bp, Homo sapien
ctctgggcagtatgggtagtaagtt

SEQ ID NO: 5694621 - DNA, 25 bp, Homo sapien
ggcccagaatgtgggaggtagcaga

SEQ ID NO: 5694622 - DNA, 25 bp, Homo sapien
gaatgtgggaggtagcagagaaacc

SEQ ID NO: 5694623 - DNA, 25 bp, Homo sapien
gtagtaagttttctgtacacctgtg

SEQ ID NO: 5694624 - DNA, 25 bp, Homo sapien
tatgggtagtaagttttctgtacac

SEQ ID NO: 5694625 - DNA, 25 bp, Homo sapien
taagttttctgtacacctgtgtgat

SEQ ID NO: 5694626 - DNA, 25 bp, Homo sapien
aacttactacccatactgcccagag

SEQ ID NO: 5694627 - DNA, 25 bp, Homo sapien
cacaggtgtacagaaaacttactac

SEQ ID NO: 5694628 - DNA, 25 bp, Homo sapien
tcacacaggtgtacagaaaacttac

SEQ ID NO: 5694629 - DNA, 25 bp, Homo sapien
aatcacacaggtgtacagaaaactt

SEQ ID NO: 5694630 - DNA, 25 bp, Homo sapien
tctctgctacctcccacattctggg

SEQ ID NO: 5694631 - DNA, 25 bp, Homo sapien
gaaaacttactacccatactgccca

SEQ ID NO: 5694632 - DNA, 25 bp, Homo sapien
ttacaattgtttgccaccacacctt

SEQ ID NO: 5694633 - DNA, 25 bp, Homo sapien
gggattacaattgtttgccaccaca

SEQ ID NO: 5694634 - DNA, 25 bp, Homo sapien
ctgcctcttgggcgattcttctgcc

SEQ ID NO: 5694635 - DNA, 25 bp, Homo sapien
acaattgtttgccaccacaccttgc

SEQ ID NO: 5694636 - DNA, 25 bp, Homo sapien
gcctcttgggcgattcttctgcctt

SEQ ID NO: 5694637 - DNA, 25 bp, Homo sapien
ctctgcctcttgggcgattcttctg

SEQ ID NO: 5694638 - DNA, 25 bp, Homo sapien
aaggcagaagaatcgcccaagaggc

SEQ ID NO: 5694639 - DNA, 25 bp, Homo sapien
aaggtgtggtggcaaacaattgtaa

SEQ ID NO: 5694640 - DNA, 25 bp, Homo sapien
cagaagaatcgcccaagaggcagag

SEQ ID NO: 5694641 - DNA, 25 bp, Homo sapien
tgtggtggcaaacaattgtaatccc

SEQ ID NO: 5694642 - DNA, 25 bp, Homo sapien
gcaaggtgtggtggcaaacaattgt

SEQ ID NO: 5694643 - DNA, 25 bp, Homo sapien
ggcagaagaatcgcccaagaggcag

SEQ ID NO: 5694644 - DNA, 25 bp, Homo sapien
agtacctgggactacagtcgcacac

SEQ ID NO: 5694645 - DNA, 25 bp, Homo sapien
tgagtacctgggactacagtcgcac

SEQ ID NO: 5694646 - DNA, 25 bp, Homo sapien
ctacagtcgcacaccaccacacctg

SEQ ID NO: 5694647 - DNA, 25 bp, Homo sapien
ctgagtacctgggactacagtcgca

SEQ ID NO: 5694648 - DNA, 25 bp, Homo sapien
gtacctgggactacagtcgcacacc

SEQ ID NO: 5694649 - DNA, 25 bp, Homo sapien
gagtacctgggactacagtcgcaca

SEQ ID NO: 5694650 - DNA, 25 bp, Homo sapien
gtgcgactgtagtcccaggtactca

SEQ ID NO: 5694651 - DNA, 25 bp, Homo sapien
caggtgtggtggtgtgcgactgtag

SEQ ID NO: 5694652 - DNA, 25 bp, Homo sapien
ggtgtgcgactgtagtcccaggtac

SEQ ID NO: 5694653 - DNA, 25 bp, Homo sapien
tgtgcgactgtagtcccaggtactc

SEQ ID NO: 5694654 - DNA, 25 bp, Homo sapien
tgcgactgtagtcccaggtactcag

SEQ ID NO: 5694655 - DNA, 25 bp, Homo sapien
gtgtgcgactgtagtcccaggtact

SEQ ID NO: 5694656 - DNA, 25 bp, Homo sapien
gtcattatactcttctccccagttt

SEQ ID NO: 5694657 - DNA, 25 bp, Homo sapien
cctgtgatttctgtcattatactct

SEQ ID NO: 5694658 - DNA, 25 bp, Homo sapien
tcctgtgatttctgtcattatactc

SEQ ID NO: 5694659 - DNA, 25 bp, Homo sapien
tcattatactcttctccccagtttg

SEQ ID NO: 5694660 - DNA, 25 bp, Homo sapien
tgtcattatactcttctccccagtt

SEQ ID NO: 5694661 - DNA, 25 bp, Homo sapien
aaactggggagaagagtataatgac

SEQ ID NO: 5694662 - DNA, 25 bp, Homo sapien
gagtataatgacagaaatcacagga

SEQ ID NO: 5694663 - DNA, 25 bp, Homo sapien
agagtataatgacagaaatcacagg

SEQ ID NO: 5694664 - DNA, 25 bp, Homo sapien
caaactggggagaagagtataatga

SEQ ID NO: 5694665 - DNA, 25 bp, Homo sapien
aactggggagaagagtataatgaca

SEQ ID NO: 5694666 - DNA, 25 bp, Homo sapien
tatgttcccagttcaggagcatgtg

SEQ ID NO: 5694667 - DNA, 25 bp, Homo sapien
tcctgtgatttctgtcattatactc

SEQ ID NO: 5694668 - DNA, 25 bp, Homo sapien
ccccagtttggttggtgataactgc

SEQ ID NO: 5694669 - DNA, 25 bp, Homo sapien
gataactgcttttttatgttcccag

SEQ ID NO: 5694670 - DNA, 25 bp, Homo sapien
tcattatactcttctccccagtttg

SEQ ID NO: 5694671 - DNA, 25 bp, Homo sapien
ccagttcaggagcatgtggtctgta

SEQ ID NO: 5694672 - DNA, 25 bp, Homo sapien
gagtataatgacagaaatcacagga

SEQ ID NO: 5694673 - DNA, 25 bp, Homo sapien
cctgaactgggaacataaaaaagca

SEQ ID NO: 5694674 - DNA, 25 bp, Homo sapien
cataaaaaagcagttatcaccaacc

SEQ ID NO: 5694675 - DNA, 25 bp, Homo sapien
agcagttatcaccaaccaaactggg

SEQ ID NO: 5694676 - DNA, 25 bp, Homo sapien
tacagaccacatgctcctgaactgg

SEQ ID NO: 5694677 - DNA, 25 bp, Homo sapien
caaactggggagaagagtataatga

SEQ ID NO: 5694678 - DNA, 25 bp, Homo sapien
caaaagggcaagaaatagtaataga

SEQ ID NO: 5694679 - DNA, 25 bp, Homo sapien
ggttgttgagtgacacaaaccaatg

SEQ ID NO: 5694680 - DNA, 25 bp, Homo sapien
ccaaaagggcaagaaatagtaatag

SEQ ID NO: 5694681 - DNA, 25 bp, Homo sapien
ccttttcgtttctggttgttgagtg

SEQ ID NO: 5694682 - DNA, 25 bp, Homo sapien
cattggtttgtgtcactcaacaacc

SEQ ID NO: 5694683 - DNA, 25 bp, Homo sapien
ctattactatttcttgcccttttgg

SEQ ID NO: 5694684 - DNA, 25 bp, Homo sapien
cactcaacaaccagaaacgaaaagg

SEQ ID NO: 5694685 - DNA, 25 bp, Homo sapien
tctattactatttcttgcccttttg

SEQ ID NO: 5694686 - DNA, 25 bp, Homo sapien
gagataggaacaaactacagatgga

SEQ ID NO: 5694687 - DNA, 25 bp, Homo sapien
agagccagcatgagtaaaggggtag

SEQ ID NO: 5694688 - DNA, 25 bp, Homo sapien
agataggaacaaactacagatggaa

SEQ ID NO: 5694689 - DNA, 25 bp, Homo sapien
gataggaacaaactacagatggaat

SEQ ID NO: 5694690 - DNA, 25 bp, Homo sapien
taggaacaaactacagatggaattt

SEQ ID NO: 5694691 - DNA, 25 bp, Homo sapien
tagagataggaacaaactacagatg

SEQ ID NO: 5694692 - DNA, 25 bp, Homo sapien
aattccatctgtagtttgttcctat

SEQ ID NO: 5694693 - DNA, 25 bp, Homo sapien
tccatctgtagtttgttcctatctc

SEQ ID NO: 5694694 - DNA, 25 bp, Homo sapien
ttccatctgtagtttgttcctatct

SEQ ID NO: 5694695 - DNA, 25 bp, Homo sapien
ctacccctttactcatgctggctct

SEQ ID NO: 5694696 - DNA, 25 bp, Homo sapien
catctgtagtttgttcctatctcta

SEQ ID NO: 5694697 - DNA, 25 bp, Homo sapien
aaattccatctgtagtttgttccta

SEQ ID NO: 5694698 - DNA, 25 bp, Homo sapien
tacccctttactcatgctggctctt

SEQ ID NO: 5694699 - DNA, 25 bp, Homo sapien
tatttattaactggaatccatccaa

SEQ ID NO: 5694700 - DNA, 25 bp, Homo sapien
catctgtagtttgttcctatctcta

SEQ ID NO: 5694701 - DNA, 25 bp, Homo sapien
gaatccatccaagaaaattccatct

SEQ ID NO: 5694702 - DNA, 25 bp, Homo sapien
tatctctacccctttactcatgctg

SEQ ID NO: 5694703 - DNA, 25 bp, Homo sapien
aaattccatctgtagtttgttccta

SEQ ID NO: 5694704 - DNA, 25 bp, Homo sapien
tgcgcctataatcttagctacatgg

SEQ ID NO: 5694705 - DNA, 25 bp, Homo sapien
aatcttagctacatgggaggatctt

SEQ ID NO: 5694706 - DNA, 25 bp, Homo sapien
gagctatgatcgtgctatttcagcc

SEQ ID NO: 5694707 - DNA, 25 bp, Homo sapien
gctatgatcgtgctatttcagcctg

SEQ ID NO: 5694708 - DNA, 25 bp, Homo sapien
taatcttagctacatgggaggatct

SEQ ID NO: 5694709 - DNA, 25 bp, Homo sapien
tcttagctacatgggaggatctttt

SEQ ID NO: 5694710 - DNA, 25 bp, Homo sapien
gatcctcccatgtagctaagattat

SEQ ID NO: 5694711 - DNA, 25 bp, Homo sapien
caggctgaaatagcacgatcatagc

SEQ ID NO: 5694712 - DNA, 25 bp, Homo sapien
aaaagatcctcccatgtagctaaga

SEQ ID NO: 5694713 - DNA, 25 bp, Homo sapien
aagatcctcccatgtagctaagatt

SEQ ID NO: 5694714 - DNA, 25 bp, Homo sapien
ccatgtagctaagattataggcgca

SEQ ID NO: 5694715 - DNA, 25 bp, Homo sapien
ggctgaaatagcacgatcatagctc

SEQ ID NO: 5694716 - DNA, 25 bp, Homo sapien
gccaggctgctgtcaaactcctgac

SEQ ID NO: 5694717 - DNA, 25 bp, Homo sapien
tggccaggctgctgtcaaactcctg

SEQ ID NO: 5694718 - DNA, 25 bp, Homo sapien
ccaggctgctgtcaaactcctgacc

SEQ ID NO: 5694719 - DNA, 25 bp, Homo sapien
caggctgctgtcaaactcctgacct

SEQ ID NO: 5694720 - DNA, 25 bp, Homo sapien
gctgctgtcaaactcctgacctcag

SEQ ID NO: 5694721 - DNA, 25 bp, Homo sapien
ggccaggctgctgtcaaactcctga

SEQ ID NO: 5694722 - DNA, 25 bp, Homo sapien
ggtcaggagtttgacagcagcctgg

SEQ ID NO: 5694723 - DNA, 25 bp, Homo sapien
caggagtttgacagcagcctggcca

SEQ ID NO: 5694724 - DNA, 25 bp, Homo sapien
aggtcaggagtttgacagcagcctg

SEQ ID NO: 5694725 - DNA, 25 bp, Homo sapien
ctgaggtcaggagtttgacagcagc

SEQ ID NO: 5694726 - DNA, 25 bp, Homo sapien
gtcaggagtttgacagcagcctggc

SEQ ID NO: 5694727 - DNA, 25 bp, Homo sapien
tcaggagtttgacagcagcctggcc

SEQ ID NO: 5694728 - DNA, 25 bp, Homo sapien
gactggagctgcctattaataactg

SEQ ID NO: 5694729 - DNA, 25 bp, Homo sapien
catcttgtagtcaaaccagttctgc

SEQ ID NO: 5694730 - DNA, 25 bp, Homo sapien
aagcccacatcttgtagtcaaacca

SEQ ID NO: 5694731 - DNA, 25 bp, Homo sapien
agaattgtggactggagctgcctat

SEQ ID NO: 5694732 - DNA, 25 bp, Homo sapien
agagccctccctagtaactcacaag

SEQ ID NO: 5694733 - DNA, 25 bp, Homo sapien
gcctattaataactggccagagccc

SEQ ID NO: 5694734 - DNA, 25 bp, Homo sapien
tggtttgactacaagatgtgggctt

SEQ ID NO: 5694735 - DNA, 25 bp, Homo sapien
cagttattaataggcagctccagtc

SEQ ID NO: 5694736 - DNA, 25 bp, Homo sapien
cttgtgagttactagggagggctct

SEQ ID NO: 5694737 - DNA, 25 bp, Homo sapien
gcagaactggtttgactacaagatg

SEQ ID NO: 5694738 - DNA, 25 bp, Homo sapien
taataggcagctccagtccacaatt

SEQ ID NO: 5694739 - DNA, 25 bp, Homo sapien
gggctctggccagttattaataggc

SEQ ID NO: 5694740 - DNA, 25 bp, Homo sapien
tacagaggtatgaccttgactcact

SEQ ID NO: 5694741 - DNA, 25 bp, Homo sapien
ctggagtacagaggtatgaccttga

SEQ ID NO: 5694742 - DNA, 25 bp, Homo sapien
tgcgccttttaaagacccaaggcca

SEQ ID NO: 5694743 - DNA, 25 bp, Homo sapien
tggagtacagaggtatgaccttgac

SEQ ID NO: 5694744 - DNA, 25 bp, Homo sapien
agtacagaggtatgaccttgactca

SEQ ID NO: 5694745 - DNA, 25 bp, Homo sapien
gagtacagaggtatgaccttgactc

SEQ ID NO: 5694746 - DNA, 25 bp, Homo sapien
tcaaggtcatacctctgtactccag

SEQ ID NO: 5694747 - DNA, 25 bp, Homo sapien
tgagtcaaggtcatacctctgtact

SEQ ID NO: 5694748 - DNA, 25 bp, Homo sapien
tggccttgggtctttaaaaggcgca

SEQ ID NO: 5694749 - DNA, 25 bp, Homo sapien
agtgagtcaaggtcatacctctgta

SEQ ID NO: 5694750 - DNA, 25 bp, Homo sapien
gagtcaaggtcatacctctgtactc

SEQ ID NO: 5694751 - DNA, 25 bp, Homo sapien
gtcaaggtcatacctctgtactcca

SEQ ID NO: 5694752 - DNA, 25 bp, Homo sapien
tccactcgccttagcctcctaaagt

SEQ ID NO: 5694753 - DNA, 25 bp, Homo sapien
tgattttagtagagatggtgtttta

SEQ ID NO: 5694754 - DNA, 25 bp, Homo sapien
aatccactcgccttagcctcctaaa

SEQ ID NO: 5694755 - DNA, 25 bp, Homo sapien
gtaatccactcgccttagcctccta

SEQ ID NO: 5694756 - DNA, 25 bp, Homo sapien
gctggtctcgaactcctgacctcaa

SEQ ID NO: 5694757 - DNA, 25 bp, Homo sapien
taatccactcgccttagcctcctaa

SEQ ID NO: 5694758 - DNA, 25 bp, Homo sapien
ttaggaggctaaggcgagtggatta

SEQ ID NO: 5694759 - DNA, 25 bp, Homo sapien
ttgaggtcaggagttcgagaccagc

SEQ ID NO: 5694760 - DNA, 25 bp, Homo sapien
taaaacaccatctctactaaaatca

SEQ ID NO: 5694761 - DNA, 25 bp, Homo sapien
actttaggaggctaaggcgagtgga

SEQ ID NO: 5694762 - DNA, 25 bp, Homo sapien
tttaggaggctaaggcgagtggatt

SEQ ID NO: 5694763 - DNA, 25 bp, Homo sapien
taggaggctaaggcgagtggattac

SEQ ID NO: 5694764 - DNA, 25 bp, Homo sapien
gttgtgcaatcaacccagtttgcat

SEQ ID NO: 5694765 - DNA, 25 bp, Homo sapien
agttgtgcaatcaacccagtttgca

SEQ ID NO: 5694766 - DNA, 25 bp, Homo sapien
ttgtgcaatcaacccagtttgcatt

SEQ ID NO: 5694767 - DNA, 25 bp, Homo sapien
gagttgtgcaatcaacccagtttgc

SEQ ID NO: 5694768 - DNA, 25 bp, Homo sapien
gcaatcaacccagtttgcattatcc

SEQ ID NO: 5694769 - DNA, 25 bp, Homo sapien
gtgcaatcaacccagtttgcattat

SEQ ID NO: 5694770 - DNA, 25 bp, Homo sapien
aatgcaaactgggttgattgcacaa

SEQ ID NO: 5694771 - DNA, 25 bp, Homo sapien
ggataatgcaaactgggttgattgc

SEQ ID NO: 5694772 - DNA, 25 bp, Homo sapien
ataatgcaaactgggttgattgcac

SEQ ID NO: 5694773 - DNA, 25 bp, Homo sapien
gcaaactgggttgattgcacaactc

SEQ ID NO: 5694774 - DNA, 25 bp, Homo sapien
atgcaaactgggttgattgcacaac

SEQ ID NO: 5694775 - DNA, 25 bp, Homo sapien
tgcaaactgggttgattgcacaact

SEQ ID NO: 5694776 - DNA, 25 bp, Homo sapien
atggggacttacagtggtgtttcct

SEQ ID NO: 5694777 - DNA, 25 bp, Homo sapien
gaatggggacttacagtggtgtttc

SEQ ID NO: 5694778 - DNA, 25 bp, Homo sapien
taatccctttgcagaatggggactt

SEQ ID NO: 5694779 - DNA, 25 bp, Homo sapien
cagaatggggacttacagtggtgtt

SEQ ID NO: 5694780 - DNA, 25 bp, Homo sapien
ttgcagaatggggacttacagtggt

SEQ ID NO: 5694781 - DNA, 25 bp, Homo sapien
cctttgcagaatggggacttacagt

SEQ ID NO: 5694782 - DNA, 25 bp, Homo sapien
tgtaagtccccattctgcaaaggga

SEQ ID NO: 5694783 - DNA, 25 bp, Homo sapien
aagtccccattctgcaaagggatta

SEQ ID NO: 5694784 - DNA, 25 bp, Homo sapien
aacaccactgtaagtccccattctg

SEQ ID NO: 5694785 - DNA, 25 bp, Homo sapien
accactgtaagtccccattctgcaa

SEQ ID NO: 5694786 - DNA, 25 bp, Homo sapien
actgtaagtccccattctgcaaagg

SEQ ID NO: 5694787 - DNA, 25 bp, Homo sapien
aggaaacaccactgtaagtccccat

SEQ ID NO: 5694788 - DNA, 25 bp, Homo sapien
ttcccttctcttccagtaggcagct

SEQ ID NO: 5694789 - DNA, 25 bp, Homo sapien
cagaatggggacttacagtggtgtt

SEQ ID NO: 5694790 - DNA, 25 bp, Homo sapien
ggcagctccttttcaaaaattgcgt

SEQ ID NO: 5694791 - DNA, 25 bp, Homo sapien
tacagtggtgtttccttcccttctc

SEQ ID NO: 5694792 - DNA, 25 bp, Homo sapien
tcttccagtaggcagctccttttca

SEQ ID NO: 5694793 - DNA, 25 bp, Homo sapien
cctttgcagaatggggacttacagt

SEQ ID NO: 5694794 - DNA, 25 bp, Homo sapien
ctttggccatgataaagggtgtggt

SEQ ID NO: 5694795 - DNA, 25 bp, Homo sapien
gataaagggtgtggttataacagct

SEQ ID NO: 5694796 - DNA, 25 bp, Homo sapien
tcaactagggaaatcctgggatgat

SEQ ID NO: 5694797 - DNA, 25 bp, Homo sapien
cctgggatgattaatggctttggcc

SEQ ID NO: 5694798 - DNA, 25 bp, Homo sapien
tggctttggccatgataaagggtgt

SEQ ID NO: 5694799 - DNA, 25 bp, Homo sapien
ccatgataaagggtgtggttataac

SEQ ID NO: 5694800 - DNA, 25 bp, Homo sapien
taaccacaccctttatcatggccaa

SEQ ID NO: 5694801 - DNA, 25 bp, Homo sapien
ggccaaagccattaatcatcccagg

SEQ ID NO: 5694802 - DNA, 25 bp, Homo sapien
atcatcccaggatttccctagttga

SEQ ID NO: 5694803 - DNA, 25 bp, Homo sapien
cagctgttataaccacaccctttat

SEQ ID NO: 5694804 - DNA, 25 bp, Homo sapien
gttataaccacaccctttatcatgg

SEQ ID NO: 5694805 - DNA, 25 bp, Homo sapien
caccctttatcatggccaaagccat

SEQ ID NO: 5694806 - DNA, 25 bp, Homo sapien
cagcaaaaagtaagagtcatggatg

SEQ ID NO: 5694807 - DNA, 25 bp, Homo sapien
tcagagttttcagctcttacactgt

SEQ ID NO: 5694808 - DNA, 25 bp, Homo sapien
gacttcagagttttcagctcttaca

SEQ ID NO: 5694809 - DNA, 25 bp, Homo sapien
ttcagagttttcagctcttacactg

SEQ ID NO: 5694810 - DNA, 25 bp, Homo sapien
acttcagagttttcagctcttacac

SEQ ID NO: 5694811 - DNA, 25 bp, Homo sapien
agcaaaaagtaagagtcatggatgc

SEQ ID NO: 5694812 - DNA, 25 bp, Homo sapien
tgtaagagctgaaaactctgaagtc

SEQ ID NO: 5694813 - DNA, 25 bp, Homo sapien
gtgtaagagctgaaaactctgaagt

SEQ ID NO: 5694814 - DNA, 25 bp, Homo sapien
catccatgactcttactttttgctg

SEQ ID NO: 5694815 - DNA, 25 bp, Homo sapien
cagtgtaagagctgaaaactctgaa

SEQ ID NO: 5694816 - DNA, 25 bp, Homo sapien
acagtgtaagagctgaaaactctga

SEQ ID NO: 5694817 - DNA, 25 bp, Homo sapien
gcatccatgactcttactttttgct

SEQ ID NO: 5694818 - DNA, 25 bp, Homo sapien
taaatggcccctatgagtagtactg

SEQ ID NO: 5694819 - DNA, 25 bp, Homo sapien
ccctatgagtagtactgatgtgtct

SEQ ID NO: 5694820 - DNA, 25 bp, Homo sapien
gtagtactgatgtgtctggtgttcc

SEQ ID NO: 5694821 - DNA, 25 bp, Homo sapien
gttgattttaaatggcccctatgag

SEQ ID NO: 5694822 - DNA, 25 bp, Homo sapien
gtgtctggtgttcctaatctcagga

SEQ ID NO: 5694823 - DNA, 25 bp, Homo sapien
ggtgttcctaatctcaggaatacct

SEQ ID NO: 5694824 - DNA, 25 bp, Homo sapien
tcctgagattaggaacaccagacac

SEQ ID NO: 5694825 - DNA, 25 bp, Homo sapien
ctcataggggccatttaaaatcaac

SEQ ID NO: 5694826 - DNA, 25 bp, Homo sapien
tgtaaggtaccccaggtattcctga

SEQ ID NO: 5694827 - DNA, 25 bp, Homo sapien
agacacatcagtactactcataggg

SEQ ID NO: 5694828 - DNA, 25 bp, Homo sapien
ggaacaccagacacatcagtactac

SEQ ID NO: 5694829 - DNA, 25 bp, Homo sapien
ggtattcctgagattaggaacacca

SEQ ID NO: 5694830 - DNA, 25 bp, Homo sapien
tagagagttgctggcagtgagttca

SEQ ID NO: 5694831 - DNA, 25 bp, Homo sapien
atcaacagtgtatattaaataaggc

SEQ ID NO: 5694832 - DNA, 25 bp, Homo sapien
gttgctggcagtgagttcaatgtta

SEQ ID NO: 5694833 - DNA, 25 bp, Homo sapien
taaggcatttttaaacagaaacata

SEQ ID NO: 5694834 - DNA, 25 bp, Homo sapien
caatgttaatgatatcaacagtgta

SEQ ID NO: 5694835 - DNA, 25 bp, Homo sapien
aattagagagttgctggcagtgagt

SEQ ID NO: 5694836 - DNA, 25 bp, Homo sapien
taacattgaactcactgccagcaac

SEQ ID NO: 5694837 - DNA, 25 bp, Homo sapien
gaactcactgccagcaactctctaa

SEQ ID NO: 5694838 - DNA, 25 bp, Homo sapien
tcattaacattgaactcactgccag

SEQ ID NO: 5694839 - DNA, 25 bp, Homo sapien
tatgtttctgtttaaaaatgcctta

SEQ ID NO: 5694840 - DNA, 25 bp, Homo sapien
tacactgttgatatcattaacattg

SEQ ID NO: 5694841 - DNA, 25 bp, Homo sapien
gccttatttaatatacactgttgat

SEQ ID NO: 5694842 - DNA, 25 bp, Homo sapien
cctgtatttcccgtaggagtagtgg

SEQ ID NO: 5694843 - DNA, 25 bp, Homo sapien
tatttcccgtaggagtagtggttca

SEQ ID NO: 5694844 - DNA, 25 bp, Homo sapien
ctccctgtatttcccgtaggagtag

SEQ ID NO: 5694845 - DNA, 25 bp, Homo sapien
cactaattcaggttctcagtgactt

SEQ ID NO: 5694846 - DNA, 25 bp, Homo sapien
cccgtaggagtagtggttcaatatt

SEQ ID NO: 5694847 - DNA, 25 bp, Homo sapien
tattcactaattcaggttctcagtg

SEQ ID NO: 5694848 - DNA, 25 bp, Homo sapien
ccactactcctacgggaaatacagg

SEQ ID NO: 5694849 - DNA, 25 bp, Homo sapien
tattgaaccactactcctacgggaa

SEQ ID NO: 5694850 - DNA, 25 bp, Homo sapien
aatattgaaccactactcctacggg

SEQ ID NO: 5694851 - DNA, 25 bp, Homo sapien
aaagtcactgagaacctgaattagt

SEQ ID NO: 5694852 - DNA, 25 bp, Homo sapien
cactgagaacctgaattagtgaata

SEQ ID NO: 5694853 - DNA, 25 bp, Homo sapien
ctactcctacgggaaatacagggag

SEQ ID NO: 5694854 - DNA, 25 bp, Homo sapien
tgatgtccactgtcataggacaggg

SEQ ID NO: 5694855 - DNA, 25 bp, Homo sapien
tgtcataggacagggtatattgtaa

SEQ ID NO: 5694856 - DNA, 25 bp, Homo sapien
tgtaatcaaaattggaattcctaga

SEQ ID NO: 5694857 - DNA, 25 bp, Homo sapien
tattctatatttgatgtccactgtc

SEQ ID NO: 5694858 - DNA, 25 bp, Homo sapien
cctagaattagccttccaagccttc

SEQ ID NO: 5694859 - DNA, 25 bp, Homo sapien
gaattcctagaattagccttccaag

SEQ ID NO: 5694860 - DNA, 25 bp, Homo sapien
gacagtggacatcaaatatagaata

SEQ ID NO: 5694861 - DNA, 25 bp, Homo sapien
gaaggcttggaaggctaattctagg

SEQ ID NO: 5694862 - DNA, 25 bp, Homo sapien
tacaatataccctgtcctatgacag

SEQ ID NO: 5694863 - DNA, 25 bp, Homo sapien
cttggaaggctaattctaggaattc

SEQ ID NO: 5694864 - DNA, 25 bp, Homo sapien
tctaggaattccaattttgattaca

SEQ ID NO: 5694865 - DNA, 25 bp, Homo sapien
tataccctgtcctatgacagtggac

SEQ ID NO: 5694866 - DNA, 25 bp, Homo sapien
ggagcacaatggcccaatgttggct

SEQ ID NO: 5694867 - DNA, 25 bp, Homo sapien
gagcacaatggcccaatgttggctc

SEQ ID NO: 5694868 - DNA, 25 bp, Homo sapien
tggagcacaatggcccaatgttggc

SEQ ID NO: 5694869 - DNA, 25 bp, Homo sapien
ctggagcacaatggcccaatgttgg

SEQ ID NO: 5694870 - DNA, 25 bp, Homo sapien
agccaacattgggccattgtgctcc

SEQ ID NO: 5694871 - DNA, 25 bp, Homo sapien
gagccaacattgggccattgtgctc

SEQ ID NO: 5694872 - DNA, 25 bp, Homo sapien
gccaacattgggccattgtgctcca

SEQ ID NO: 5694873 - DNA, 25 bp, Homo sapien
ccaacattgggccattgtgctccag

SEQ ID NO: 5694874 - DNA, 25 bp, Homo sapien
cacaatggcccaatgttggctcact

SEQ ID NO: 5694875 - DNA, 25 bp, Homo sapien
ggagcacaatggcccaatgttggct

SEQ ID NO: 5694876 - DNA, 25 bp, Homo sapien
tggagcacaatggcccaatgttggc

SEQ ID NO: 5694877 - DNA, 25 bp, Homo sapien
agcacaatggcccaatgttggctca

SEQ ID NO: 5694878 - DNA, 25 bp, Homo sapien
gcacaatggcccaatgttggctcac

SEQ ID NO: 5694879 - DNA, 25 bp, Homo sapien
ctggagcacaatggcccaatgttgg

SEQ ID NO: 5694880 - DNA, 25 bp, Homo sapien
tgagccaacattgggccattgtgct

SEQ ID NO: 5694881 - DNA, 25 bp, Homo sapien
agccaacattgggccattgtgctcc

SEQ ID NO: 5694882 - DNA, 25 bp, Homo sapien
agtgagccaacattgggccattgtg

SEQ ID NO: 5694883 - DNA, 25 bp, Homo sapien
gccaacattgggccattgtgctcca

SEQ ID NO: 5694884 - DNA, 25 bp, Homo sapien
ccaacattgggccattgtgctccag

SEQ ID NO: 5694885 - DNA, 25 bp, Homo sapien
gtgagccaacattgggccattgtgc

SEQ ID NO: 5694886 - DNA, 25 bp, Homo sapien
tctaaaagataaggtctattacacc

SEQ ID NO: 5694887 - DNA, 25 bp, Homo sapien
tcacttgccattattttggtatctc

SEQ ID NO: 5694888 - DNA, 25 bp, Homo sapien
gccattattttggtatctctaaaag

SEQ ID NO: 5694889 - DNA, 25 bp, Homo sapien
ctaaaagataaggtctattacacct

SEQ ID NO: 5694890 - DNA, 25 bp, Homo sapien
taatcttgttttacctacattttca

SEQ ID NO: 5694891 - DNA, 25 bp, Homo sapien
gttttacctacattttcacttgcca

SEQ ID NO: 5694892 - DNA, 25 bp, Homo sapien
tgaaaatgtaggtaaaacaagatta

SEQ ID NO: 5694893 - DNA, 25 bp, Homo sapien
gagataccaaaataatggcaagtga

SEQ ID NO: 5694894 - DNA, 25 bp, Homo sapien
tggcaagtgaaaatgtaggtaaaac

SEQ ID NO: 5694895 - DNA, 25 bp, Homo sapien
tagagataccaaaataatggcaagt

SEQ ID NO: 5694896 - DNA, 25 bp, Homo sapien
tcttttagagataccaaaataatgg

SEQ ID NO: 5694897 - DNA, 25 bp, Homo sapien
ggtgtaatagaccttatcttttaga

SEQ ID NO: 5694898 - DNA, 25 bp, Homo sapien
aatgtggctcataattcacttttag

SEQ ID NO: 5694899 - DNA, 25 bp, Homo sapien
gtctaaaactttccactcccatcat

SEQ ID NO: 5694900 - DNA, 25 bp, Homo sapien
tagtctaaaactttccactcccatc

SEQ ID NO: 5694901 - DNA, 25 bp, Homo sapien
tcataattcacttttagtctaaaac

SEQ ID NO: 5694902 - DNA, 25 bp, Homo sapien
gagaaatgtggctcataattcactt

SEQ ID NO: 5694903 - DNA, 25 bp, Homo sapien
ggctcataattcacttttagtctaa

SEQ ID NO: 5694904 - DNA, 25 bp, Homo sapien
gactaaaagtgaattatgagccaca

SEQ ID NO: 5694905 - DNA, 25 bp, Homo sapien
tagactaaaagtgaattatgagcca

SEQ ID NO: 5694906 - DNA, 25 bp, Homo sapien
atgatgggagtggaaagttttagac

SEQ ID NO: 5694907 - DNA, 25 bp, Homo sapien
tttagactaaaagtgaattatgagc

SEQ ID NO: 5694908 - DNA, 25 bp, Homo sapien
aagtgaattatgagccacatttctc

SEQ ID NO: 5694909 - DNA, 25 bp, Homo sapien
gatgggagtggaaagttttagacta

SEQ ID NO: 5694910 - DNA, 25 bp, Homo sapien
tttacaccccgcactatctcatagg

SEQ ID NO: 5694911 - DNA, 25 bp, Homo sapien
tctcataggtggtactgagctaatc

SEQ ID NO: 5694912 - DNA, 25 bp, Homo sapien
accccgcactatctcataggtggta

SEQ ID NO: 5694913 - DNA, 25 bp, Homo sapien
ggtggtactgagctaatctgttctt

SEQ ID NO: 5694914 - DNA, 25 bp, Homo sapien
tgtttagactttacaactagaggct

SEQ ID NO: 5694915 - DNA, 25 bp, Homo sapien
caactagaggcttcatcatttgggt

SEQ ID NO: 5694916 - DNA, 25 bp, Homo sapien
aacccaaatgatgaagcctctagtt

SEQ ID NO: 5694917 - DNA, 25 bp, Homo sapien
tctagttgtaaagtctaaacaccta

SEQ ID NO: 5694918 - DNA, 25 bp, Homo sapien
aagaacagattagctcagtaccacc

SEQ ID NO: 5694919 - DNA, 25 bp, Homo sapien
gattagctcagtaccacctatgaga

SEQ ID NO: 5694920 - DNA, 25 bp, Homo sapien
cctatgagatagtgcggggtgtaaa

SEQ ID NO: 5694921 - DNA, 25 bp, Homo sapien
ccaaatgatgaagcctctagttgta

SEQ ID NO: 5694922 - DNA, 25 bp, Homo sapien
tagtgccctccttatctgccatttc

SEQ ID NO: 5694923 - DNA, 25 bp, Homo sapien
tttagtgcctattacagtagtgccc

SEQ ID NO: 5694924 - DNA, 25 bp, Homo sapien
agtagtgccctccttatctgccatt

SEQ ID NO: 5694925 - DNA, 25 bp, Homo sapien
gcctattacagtagtgccctcctta

SEQ ID NO: 5694926 - DNA, 25 bp, Homo sapien
tagtgcctattacagtagtgccctc

SEQ ID NO: 5694927 - DNA, 25 bp, Homo sapien
ccagagttcttttagtgcctattac

SEQ ID NO: 5694928 - DNA, 25 bp, Homo sapien
aatggcagataaggagggcactact

SEQ ID NO: 5694929 - DNA, 25 bp, Homo sapien
gaaatggcagataaggagggcacta

SEQ ID NO: 5694930 - DNA, 25 bp, Homo sapien
taataggcactaaaagaactctgga

SEQ ID NO: 5694931 - DNA, 25 bp, Homo sapien
gggcactactgtaataggcactaaa

SEQ ID NO: 5694932 - DNA, 25 bp, Homo sapien
tgtaataggcactaaaagaactctg

SEQ ID NO: 5694933 - DNA, 25 bp, Homo sapien
taaggagggcactactgtaataggc

SEQ ID NO: 5694934 - DNA, 25 bp, Homo sapien
tagcatagatatgtgttgataggaa

SEQ ID NO: 5694935 - DNA, 25 bp, Homo sapien
gcatagatatgtgttgataggaaaa

SEQ ID NO: 5694936 - DNA, 25 bp, Homo sapien
tagatatgtgttgataggaaaatac

SEQ ID NO: 5694937 - DNA, 25 bp, Homo sapien
tatgtgttgataggaaaatacatag

SEQ ID NO: 5694938 - DNA, 25 bp, Homo sapien
aagttaaactgtagcatagatatgt

SEQ ID NO: 5694939 - DNA, 25 bp, Homo sapien
taagttaaactgtagcatagatatg

SEQ ID NO: 5694940 - DNA, 25 bp, Homo sapien
tgtattttcctatcaacacatatct

SEQ ID NO: 5694941 - DNA, 25 bp, Homo sapien
ttttcctatcaacacatatctatgc

SEQ ID NO: 5694942 - DNA, 25 bp, Homo sapien
actatgtattttcctatcaacacat

SEQ ID NO: 5694943 - DNA, 25 bp, Homo sapien
tttcctatcaacacatatctatgct

SEQ ID NO: 5694944 - DNA, 25 bp, Homo sapien
catatctatgctacagtttaactta

SEQ ID NO: 5694945 - DNA, 25 bp, Homo sapien
acatatctatgctacagtttaactt

SEQ ID NO: 5694946 - DNA, 25 bp, Homo sapien
tgactaaatcctaatggagtggact

SEQ ID NO: 5694947 - DNA, 25 bp, Homo sapien
cagtattccattgaatgactaaatc

SEQ ID NO: 5694948 - DNA, 25 bp, Homo sapien
gaatgactaaatcctaatggagtgg

SEQ ID NO: 5694949 - DNA, 25 bp, Homo sapien
gactaaatcctaatggagtggactg

SEQ ID NO: 5694950 - DNA, 25 bp, Homo sapien
actaaatcctaatggagtggactgt

SEQ ID NO: 5694951 - DNA, 25 bp, Homo sapien
cacagtattccattgaatgactaaa

SEQ ID NO: 5694952 - DNA, 25 bp, Homo sapien
acagtccactccattaggatttagt

SEQ ID NO: 5694953 - DNA, 25 bp, Homo sapien
gtccactccattaggatttagtcat

SEQ ID NO: 5694954 - DNA, 25 bp, Homo sapien
ttagtcattcaatggaatactgtgt

SEQ ID NO: 5694955 - DNA, 25 bp, Homo sapien
cagtccactccattaggatttagtc

SEQ ID NO: 5694956 - DNA, 25 bp, Homo sapien
gatttagtcattcaatggaatactg

SEQ ID NO: 5694957 - DNA, 25 bp, Homo sapien
cactccattaggatttagtcattca

SEQ ID NO: 5694958 - DNA, 25 bp, Homo sapien
gtgtatttatgcaagggtggaacaa

SEQ ID NO: 5694959 - DNA, 25 bp, Homo sapien
ttctgagaaagacatccctgtgtat

SEQ ID NO: 5694960 - DNA, 25 bp, Homo sapien
gggtggaacaatttagtttgatcta

SEQ ID NO: 5694961 - DNA, 25 bp, Homo sapien
ctttctgagaaagacatccctgtgt

SEQ ID NO: 5694962 - DNA, 25 bp, Homo sapien
tcctgatttctaaggggccaagagt

SEQ ID NO: 5694963 - DNA, 25 bp, Homo sapien
tatatttgatcctgatttctaaggg

SEQ ID NO: 5694964 - DNA, 25 bp, Homo sapien
tcttggccccttagaaatcaggatc

SEQ ID NO: 5694965 - DNA, 25 bp, Homo sapien
ttgttccacccttgcataaatacac

SEQ ID NO: 5694966 - DNA, 25 bp, Homo sapien
aatcaggatcaaatatagatcaaac

SEQ ID NO: 5694967 - DNA, 25 bp, Homo sapien
tactcttggccccttagaaatcagg

SEQ ID NO: 5694968 - DNA, 25 bp, Homo sapien
tacacagggatgtctttctcagaaa

SEQ ID NO: 5694969 - DNA, 25 bp, Homo sapien
tagatcaaactaaattgttccaccc

SEQ ID NO: 5694970 - DNA, 25 bp, Homo sapien
agattgggttgagtacagaagattc

SEQ ID NO: 5694971 - DNA, 25 bp, Homo sapien
ggttatttggactggtcaaatgaat

SEQ ID NO: 5694972 - DNA, 25 bp, Homo sapien
tctaaacagattgggttgagtacag

SEQ ID NO: 5694973 - DNA, 25 bp, Homo sapien
ccttctaaacagattgggttgagta

SEQ ID NO: 5694974 - DNA, 25 bp, Homo sapien
aactccttctaaacagattgggttg

SEQ ID NO: 5694975 - DNA, 25 bp, Homo sapien
aacagattgggttgagtacagaaga

SEQ ID NO: 5694976 - DNA, 25 bp, Homo sapien
tattcatttgaccagtccaaataac

SEQ ID NO: 5694977 - DNA, 25 bp, Homo sapien
tcaacccaatctgtttagaaggagt

SEQ ID NO: 5694978 - DNA, 25 bp, Homo sapien
gaatcttctgtactcaacccaatct

SEQ ID NO: 5694979 - DNA, 25 bp, Homo sapien
tactcaacccaatctgtttagaagg

SEQ ID NO: 5694980 - DNA, 25 bp, Homo sapien
tcttctgtactcaacccaatctgtt

SEQ ID NO: 5694981 - DNA, 25 bp, Homo sapien
ctgtactcaacccaatctgtttaga

SEQ ID NO: 5694982 - DNA, 25 bp, Homo sapien
ttggccaggttgtcagtacttcttc

SEQ ID NO: 5694983 - DNA, 25 bp, Homo sapien
ctttggccaggttgtcagtacttct

SEQ ID NO: 5694984 - DNA, 25 bp, Homo sapien
cactttggccaggttgtcagtactt

SEQ ID NO: 5694985 - DNA, 25 bp, Homo sapien
tttggccaggttgtcagtacttctt

SEQ ID NO: 5694986 - DNA, 25 bp, Homo sapien
gcactttggccaggttgtcagtact

SEQ ID NO: 5694987 - DNA, 25 bp, Homo sapien
actttggccaggttgtcagtacttc

SEQ ID NO: 5694988 - DNA, 25 bp, Homo sapien
agtactgacaacctggccaaagtgc

SEQ ID NO: 5694989 - DNA, 25 bp, Homo sapien
aagtactgacaacctggccaaagtg

SEQ ID NO: 5694990 - DNA, 25 bp, Homo sapien
gaagaagtactgacaacctggccaa

SEQ ID NO: 5694991 - DNA, 25 bp, Homo sapien
agaagtactgacaacctggccaaag

SEQ ID NO: 5694992 - DNA, 25 bp, Homo sapien
gaagtactgacaacctggccaaagt

SEQ ID NO: 5694993 - DNA, 25 bp, Homo sapien
aagaagtactgacaacctggccaaa

SEQ ID NO: 5694994 - DNA, 25 bp, Homo sapien
gacattgtcagcactctgcaagccc

SEQ ID NO: 5694995 - DNA, 25 bp, Homo sapien
agacggctgtgaatcctgtggacat

SEQ ID NO: 5694996 - DNA, 25 bp, Homo sapien
gagacggctgtgaatcctgtggaca

SEQ ID NO: 5694997 - DNA, 25 bp, Homo sapien
cattgtcagcactctgcaagccctt

SEQ ID NO: 5694998 - DNA, 25 bp, Homo sapien
ggacattgtcagcactctgcaagcc

SEQ ID NO: 5694999 - DNA, 25 bp, Homo sapien
attgtcagcactctgcaagcccttc

SEQ ID NO: 5695000 - DNA, 25 bp, Homo sapien
atgtccacaggattcacagccgtct

SEQ ID NO: 5695001 - DNA, 25 bp, Homo sapien
gggcttgcagagtgctgacaatgtc

SEQ ID NO: 5695002 - DNA, 25 bp, Homo sapien
aagggcttgcagagtgctgacaatg

SEQ ID NO: 5695003 - DNA, 25 bp, Homo sapien
gaagggcttgcagagtgctgacaat

SEQ ID NO: 5695004 - DNA, 25 bp, Homo sapien
tgtccacaggattcacagccgtctc

SEQ ID NO: 5695005 - DNA, 25 bp, Homo sapien
ggcttgcagagtgctgacaatgtcc

SEQ ID NO: 5695006 - DNA, 25 bp, Homo sapien
cattgctggatgtccttcaagactt

SEQ ID NO: 5695007 - DNA, 25 bp, Homo sapien
agacttagcagagcaaagtatgggc

SEQ ID NO: 5695008 - DNA, 25 bp, Homo sapien
tgctcattgctggatgtccttcaag

SEQ ID NO: 5695009 - DNA, 25 bp, Homo sapien
gcttgctcattgctggatgtccttc

SEQ ID NO: 5695010 - DNA, 25 bp, Homo sapien
gctcattgctggatgtccttcaaga

SEQ ID NO: 5695011 - DNA, 25 bp, Homo sapien
gggcttgctcattgctggatgtcct

SEQ ID NO: 5695012 - DNA, 25 bp, Homo sapien
aggacatccagcaatgagcaagccc

SEQ ID NO: 5695013 - DNA, 25 bp, Homo sapien
aagtcttgaaggacatccagcaatg

SEQ ID NO: 5695014 - DNA, 25 bp, Homo sapien
tgaaggacatccagcaatgagcaag

SEQ ID NO: 5695015 - DNA, 25 bp, Homo sapien
tcttgaaggacatccagcaatgagc

SEQ ID NO: 5695016 - DNA, 25 bp, Homo sapien
gaaggacatccagcaatgagcaagc

SEQ ID NO: 5695017 - DNA, 25 bp, Homo sapien
gcccatactttgctctgctaagtct

SEQ ID NO: 5695018 - DNA, 25 bp, Homo sapien
tatatacaataaaggtcggtgagcg

SEQ ID NO: 5695019 - DNA, 25 bp, Homo sapien
tatacaataaaggtcggtgagcgat

SEQ ID NO: 5695020 - DNA, 25 bp, Homo sapien
gtctcaactcaaactcacatctaat

SEQ ID NO: 5695021 - DNA, 25 bp, Homo sapien
caataaaggtcggtgagcgatgatt

SEQ ID NO: 5695022 - DNA, 25 bp, Homo sapien
gaatcttcacaaatgctgtctcaac

SEQ ID NO: 5695023 - DNA, 25 bp, Homo sapien
aatgctgtctcaactcaaactcaca

SEQ ID NO: 5695024 - DNA, 25 bp, Homo sapien
attagatgtgagtttgagttgagac

SEQ ID NO: 5695025 - DNA, 25 bp, Homo sapien
tcatcgctcaccgacctttattgta

SEQ ID NO: 5695026 - DNA, 25 bp, Homo sapien
gttgagacagcatttgtgaagattc

SEQ ID NO: 5695027 - DNA, 25 bp, Homo sapien
gatgtgagtttgagttgagacagca

SEQ ID NO: 5695028 - DNA, 25 bp, Homo sapien
cgctcaccgacctttattgtatata

SEQ ID NO: 5695029 - DNA, 25 bp, Homo sapien
aaatcatcgctcaccgacctttatt

SEQ ID NO: 5695030 - DNA, 25 bp, Homo sapien
tctcactgagggtaaagtaggaaga

SEQ ID NO: 5695031 - DNA, 25 bp, Homo sapien
catttctcactgagggtaaagtagg

SEQ ID NO: 5695032 - DNA, 25 bp, Homo sapien
tcactgagggtaaagtaggaagaat

SEQ ID NO: 5695033 - DNA, 25 bp, Homo sapien
ttctcactgagggtaaagtaggaag

SEQ ID NO: 5695034 - DNA, 25 bp, Homo sapien
taggaaagcagtttataagtcaaaa

SEQ ID NO: 5695035 - DNA, 25 bp, Homo sapien
tcatttctcactgagggtaaagtag

SEQ ID NO: 5695036 - DNA, 25 bp, Homo sapien
attttgacttataaactgctttcct

SEQ ID NO: 5695037 - DNA, 25 bp, Homo sapien
tcttcctactttaccctcagtgaga

SEQ ID NO: 5695038 - DNA, 25 bp, Homo sapien
attcttcctactttaccctcagtga

SEQ ID NO: 5695039 - DNA, 25 bp, Homo sapien
ctactttaccctcagtgagaaatga

SEQ ID NO: 5695040 - DNA, 25 bp, Homo sapien
tcctactttaccctcagtgagaaat

SEQ ID NO: 5695041 - DNA, 25 bp, Homo sapien
ttttgacttataaactgctttccta

SEQ ID NO: 5695042 - DNA, 25 bp, Homo sapien
tttggaatctatgtaaaggcacttg

SEQ ID NO: 5695043 - DNA, 25 bp, Homo sapien
gcaattccttcttggcggttagtta

SEQ ID NO: 5695044 - DNA, 25 bp, Homo sapien
cacttgagttgaaagtatgtaatcc

SEQ ID NO: 5695045 - DNA, 25 bp, Homo sapien
tatgtaatcctttttcccattgttc

SEQ ID NO: 5695046 - DNA, 25 bp, Homo sapien
taaaggcacttgagttgaaagtatg

SEQ ID NO: 5695047 - DNA, 25 bp, Homo sapien
tctatgtaaaggcacttgagttgaa

SEQ ID NO: 5695048 - DNA, 25 bp, Homo sapien
taactaaccgccaagaaggaattgc

SEQ ID NO: 5695049 - DNA, 25 bp, Homo sapien
gaacaatgggaaaaaggattacata

SEQ ID NO: 5695050 - DNA, 25 bp, Homo sapien
ttcaactcaagtgcctttacataga

SEQ ID NO: 5695051 - DNA, 25 bp, Homo sapien
gattacatactttcaactcaagtgc

SEQ ID NO: 5695052 - DNA, 25 bp, Homo sapien
caagtgcctttacatagattccaaa

SEQ ID NO: 5695053 - DNA, 25 bp, Homo sapien
caatgggaaaaaggattacatactt

SEQ ID NO: 5695054 - DNA, 25 bp, Homo sapien
cagctgcttaaaatggacccctccc

SEQ ID NO: 5695055 - DNA, 25 bp, Homo sapien
agaggccaaaaggtccaactccaat

SEQ ID NO: 5695056 - DNA, 25 bp, Homo sapien
aggtccaactccaataaaaccatgg

SEQ ID NO: 5695057 - DNA, 25 bp, Homo sapien
aataaaaccatggatcccagctgct

SEQ ID NO: 5695058 - DNA, 25 bp, Homo sapien
caataaaaccatggatcccagctgc

SEQ ID NO: 5695059 - DNA, 25 bp, Homo sapien
gaggccaaaaggtccaactccaata

SEQ ID NO: 5695060 - DNA, 25 bp, Homo sapien
catggttttattggagttggacctt

SEQ ID NO: 5695061 - DNA, 25 bp, Homo sapien
tattggagttggaccttttggcctc

SEQ ID NO: 5695062 - DNA, 25 bp, Homo sapien
gcagctgggatccatggttttattg

SEQ ID NO: 5695063 - DNA, 25 bp, Homo sapien
ccatggttttattggagttggacct

SEQ ID NO: 5695064 - DNA, 25 bp, Homo sapien
gggaggggtccattttaagcagctg

SEQ ID NO: 5695065 - DNA, 25 bp, Homo sapien
agcagctgggatccatggttttatt

SEQ ID NO: 5695066 - DNA, 25 bp, Homo sapien
gacctgtcattccgagccagcgaac

SEQ ID NO: 5695067 - DNA, 25 bp, Homo sapien
acctgtcattccgagccagcgaacc

SEQ ID NO: 5695068 - DNA, 25 bp, Homo sapien
gagccagcgaaccccagcagtagga

SEQ ID NO: 5695069 - DNA, 25 bp, Homo sapien
gttcgctggctcggaatgacaggtc

SEQ ID NO: 5695070 - DNA, 25 bp, Homo sapien
ggttcgctggctcggaatgacaggt

SEQ ID NO: 5695071 - DNA, 25 bp, Homo sapien
tcctactgctggggttcgctggctc

SEQ ID NO: 5695072 - DNA, 25 bp, Homo sapien
cagtatcctttgggaaggccatccc

SEQ ID NO: 5695073 - DNA, 25 bp, Homo sapien
acagtatcctttgggaaggccatcc

SEQ ID NO: 5695074 - DNA, 25 bp, Homo sapien
ggatggccttcccaaaggatactgt

SEQ ID NO: 5695075 - DNA, 25 bp, Homo sapien
gggatggccttcccaaaggatactg

SEQ ID NO: 5695076 - DNA, 25 bp, Homo sapien
tgctttcttctctgcttccacaaca

SEQ ID NO: 5695077 - DNA, 25 bp, Homo sapien
ggttaagattttgtgctccgcttcc

SEQ ID NO: 5695078 - DNA, 25 bp, Homo sapien
gttaagattttgtgctccgcttccc

SEQ ID NO: 5695079 - DNA, 25 bp, Homo sapien
gctttcttctctgcttccacaacag

SEQ ID NO: 5695080 - DNA, 25 bp, Homo sapien
taagattttgtgctccgcttccctg

SEQ ID NO: 5695081 - DNA, 25 bp, Homo sapien
gggttaagattttgtgctccgcttc

SEQ ID NO: 5695082 - DNA, 25 bp, Homo sapien
gggaagcggagcacaaaatcttaac

SEQ ID NO: 5695083 - DNA, 25 bp, Homo sapien
ggagcacaaaatcttaacccctcaa

SEQ ID NO: 5695084 - DNA, 25 bp, Homo sapien
ctgttgtggaagcagagaagaaagc

SEQ ID NO: 5695085 - DNA, 25 bp, Homo sapien
cagggaagcggagcacaaaatctta

SEQ ID NO: 5695086 - DNA, 25 bp, Homo sapien
tgttgtggaagcagagaagaaagca

SEQ ID NO: 5695087 - DNA, 25 bp, Homo sapien
gaagcggagcacaaaatcttaaccc

SEQ ID NO: 5695088 - DNA, 25 bp, Homo sapien
cctaatctctaccactaccagcatc

SEQ ID NO: 5695089 - DNA, 25 bp, Homo sapien
ctaatctctaccactaccagcatca

SEQ ID NO: 5695090 - DNA, 25 bp, Homo sapien
ccctaatctctaccactaccagcat

SEQ ID NO: 5695091 - DNA, 25 bp, Homo sapien
tgatgctggtagtggtagagattag

SEQ ID NO: 5695092 - DNA, 25 bp, Homo sapien
gatgctggtagtggtagagattagg

SEQ ID NO: 5695093 - DNA, 25 bp, Homo sapien
atgctggtagtggtagagattaggg

SEQ ID NO: 5695094 - DNA, 25 bp, Homo sapien
tctctaccactaccagcatcatctt

SEQ ID NO: 5695095 - DNA, 25 bp, Homo sapien
ttccactccttacccctaatctcta

SEQ ID NO: 5695096 - DNA, 25 bp, Homo sapien
gcaggaaggacggtttctttctcat

SEQ ID NO: 5695097 - DNA, 25 bp, Homo sapien
ctaccagcatcatcttctgtgaggc

SEQ ID NO: 5695098 - DNA, 25 bp, Homo sapien
taatctctaccactaccagcatcat

SEQ ID NO: 5695099 - DNA, 25 bp, Homo sapien
caggaaggacggtttctttctcatt

SEQ ID NO: 5695100 - DNA, 25 bp, Homo sapien
gcctcacagaagatgatgctggtag

SEQ ID NO: 5695101 - DNA, 25 bp, Homo sapien
atgagaaagaaaccgtccttcctgc

SEQ ID NO: 5695102 - DNA, 25 bp, Homo sapien
gatgctggtagtggtagagattagg

SEQ ID NO: 5695103 - DNA, 25 bp, Homo sapien
atgatgctggtagtggtagagatta

SEQ ID NO: 5695104 - DNA, 25 bp, Homo sapien
aatgagaaagaaaccgtccttcctg

SEQ ID NO: 5695105 - DNA, 25 bp, Homo sapien
aagatgatgctggtagtggtagaga

SEQ ID NO: 5695106 - DNA, 25 bp, Homo sapien
ggatggggtgcatcaggatggtttc

SEQ ID NO: 5695107 - DNA, 25 bp, Homo sapien
gatggggtgcatcaggatggtttct

SEQ ID NO: 5695108 - DNA, 25 bp, Homo sapien
cacagaccccaaggccatcggccat

SEQ ID NO: 5695109 - DNA, 25 bp, Homo sapien
cagaccccaaggccatcggccatcg

SEQ ID NO: 5695110 - DNA, 25 bp, Homo sapien
acagaccccaaggccatcggccatc

SEQ ID NO: 5695111 - DNA, 25 bp, Homo sapien
agaccccaaggccatcggccatcgg

SEQ ID NO: 5695112 - DNA, 25 bp, Homo sapien
cgatggccgatggccttggggtctg

SEQ ID NO: 5695113 - DNA, 25 bp, Homo sapien
gatggccgatggccttggggtctgt

SEQ ID NO: 5695114 - DNA, 25 bp, Homo sapien
ccgatggccgatggccttggggtct

SEQ ID NO: 5695115 - DNA, 25 bp, Homo sapien
atggccgatggccttggggtctgtg

SEQ ID NO: 5695116 - DNA, 25 bp, Homo sapien
agaaaccatcctgatgcaccccatc

SEQ ID NO: 5695117 - DNA, 25 bp, Homo sapien
gaaaccatcctgatgcaccccatcc

SEQ ID NO: 5695118 - DNA, 25 bp, Homo sapien
ccttagagattggatggggtgcatc

SEQ ID NO: 5695119 - DNA, 25 bp, Homo sapien
tgcatcaggatggtttctgattact

SEQ ID NO: 5695120 - DNA, 25 bp, Homo sapien
gattacttttcttcttccctcagcc

SEQ ID NO: 5695121 - DNA, 25 bp, Homo sapien
ttcttcttccctcagcctttcagtg

SEQ ID NO: 5695122 - DNA, 25 bp, Homo sapien
gggtgcatcaggatggtttctgatt

SEQ ID NO: 5695123 - DNA, 25 bp, Homo sapien
tcaggatggtttctgattacttttc

SEQ ID NO: 5695124 - DNA, 25 bp, Homo sapien
ggctgagggaagaagaaaagtaatc

SEQ ID NO: 5695125 - DNA, 25 bp, Homo sapien
taatcagaaaccatcctgatgcacc

SEQ ID NO: 5695126 - DNA, 25 bp, Homo sapien
gaaaagtaatcagaaaccatcctga

SEQ ID NO: 5695127 - DNA, 25 bp, Homo sapien
cactgaaaggctgagggaagaagaa

SEQ ID NO: 5695128 - DNA, 25 bp, Homo sapien
gatgcaccccatccaatctctaagg

SEQ ID NO: 5695129 - DNA, 25 bp, Homo sapien
gaagaaaagtaatcagaaaccatcc

SEQ ID NO: 5695130 - DNA, 25 bp, Homo sapien
gacagtgttcagtatgttgattttt

SEQ ID NO: 5695131 - DNA, 25 bp, Homo sapien
cagacagtgttcagtatgttgattt

SEQ ID NO: 5695132 - DNA, 25 bp, Homo sapien
ttttctatattgaactcctcctgta

SEQ ID NO: 5695133 - DNA, 25 bp, Homo sapien
aaactaaaattcagacagtgttcag

SEQ ID NO: 5695134 - DNA, 25 bp, Homo sapien
taacttttctatattgaactcctcc

SEQ ID NO: 5695135 - DNA, 25 bp, Homo sapien
ttcagacagtgttcagtatgttgat

SEQ ID NO: 5695136 - DNA, 25 bp, Homo sapien
caggaggagttcaatatagaaaagt

SEQ ID NO: 5695137 - DNA, 25 bp, Homo sapien
atcaacatactgaacactgtctgaa

SEQ ID NO: 5695138 - DNA, 25 bp, Homo sapien
tacaggaggagttcaatatagaaaa

SEQ ID NO: 5695139 - DNA, 25 bp, Homo sapien
aaaaaatcaacatactgaacactgt

SEQ ID NO: 5695140 - DNA, 25 bp, Homo sapien
taaataacacaaaaaaatctcagga

SEQ ID NO: 5695141 - DNA, 25 bp, Homo sapien
aaatcaacatactgaacactgtctg

SEQ ID NO: 5695142 - DNA, 25 bp, Homo sapien
gacaagattgtgattgagtggccaa

SEQ ID NO: 5695143 - DNA, 25 bp, Homo sapien
acaagattgtgattgagtggccaat

SEQ ID NO: 5695144 - DNA, 25 bp, Homo sapien
ttggccactcaatcacaatcttgtc

SEQ ID NO: 5695145 - DNA, 25 bp, Homo sapien
attggccactcaatcacaatcttgt

SEQ ID NO: 5695146 - DNA, 25 bp, Homo sapien
gacaagattgtgattgagtggccaa

SEQ ID NO: 5695147 - DNA, 25 bp, Homo sapien
aatccaaaataacagaggagacaag

SEQ ID NO: 5695148 - DNA, 25 bp, Homo sapien
tccaaaataacagaggagacaagat

SEQ ID NO: 5695149 - DNA, 25 bp, Homo sapien
aaaatccaaaataacagaggagaca

SEQ ID NO: 5695150 - DNA, 25 bp, Homo sapien
acaagattgtgattgagtggccaat

SEQ ID NO: 5695151 - DNA, 25 bp, Homo sapien
caaaataacagaggagacaagattg

SEQ ID NO: 5695152 - DNA, 25 bp, Homo sapien
ttggccactcaatcacaatcttgtc

SEQ ID NO: 5695153 - DNA, 25 bp, Homo sapien
attggccactcaatcacaatcttgt

SEQ ID NO: 5695154 - DNA, 25 bp, Homo sapien
tgtctcctctgttattttggatttt

SEQ ID NO: 5695155 - DNA, 25 bp, Homo sapien
caatcttgtctcctctgttattttg

SEQ ID NO: 5695156 - DNA, 25 bp, Homo sapien
tcttgtctcctctgttattttggat

SEQ ID NO: 5695157 - DNA, 25 bp, Homo sapien
cttgtctcctctgttattttggatt

SEQ ID NO: 5695158 - DNA, 25 bp, Homo sapien
ttctttgcattaattcccatgaatg

SEQ ID NO: 5695159 - DNA, 25 bp, Homo sapien
cccatgaatggattaaactaagaga

SEQ ID NO: 5695160 - DNA, 25 bp, Homo sapien
gaatggattaaactaagagattaac

SEQ ID NO: 5695161 - DNA, 25 bp, Homo sapien
ggattaaactaagagattaaccata

SEQ ID NO: 5695162 - DNA, 25 bp, Homo sapien
tcaaaatgggaaagtagtgataata

SEQ ID NO: 5695163 - DNA, 25 bp, Homo sapien
tgtcaaaatgggaaagtagtgataa

SEQ ID NO: 5695164 - DNA, 25 bp, Homo sapien
tattatcactactttcccattttga

SEQ ID NO: 5695165 - DNA, 25 bp, Homo sapien
ttatcactactttcccattttgaca

SEQ ID NO: 5695166 - DNA, 25 bp, Homo sapien
tcttagtttaatccattcatgggaa

SEQ ID NO: 5695167 - DNA, 25 bp, Homo sapien
cattcatgggaattaatgcaaagaa

SEQ ID NO: 5695168 - DNA, 25 bp, Homo sapien
tatggttaatctcttagtttaatcc

SEQ ID NO: 5695169 - DNA, 25 bp, Homo sapien
tctcttagtttaatccattcatggg

SEQ ID NO: 5695170 - DNA, 25 bp, Homo sapien
tgagactgttacatagattcaaaac

SEQ ID NO: 5695171 - DNA, 25 bp, Homo sapien
tcctaattgtgttcatgagactgtt

SEQ ID NO: 5695172 - DNA, 25 bp, Homo sapien
taattgtgttcatgagactgttaca

SEQ ID NO: 5695173 - DNA, 25 bp, Homo sapien
catgagactgttacatagattcaaa

SEQ ID NO: 5695174 - DNA, 25 bp, Homo sapien
tgtgttcatgagactgttacataga

SEQ ID NO: 5695175 - DNA, 25 bp, Homo sapien
gtagagaatttgactcctaattgtg

SEQ ID NO: 5695176 - DNA, 25 bp, Homo sapien
tctatgtaacagtctcatgaacaca

SEQ ID NO: 5695177 - DNA, 25 bp, Homo sapien
cagtctcatgaacacaattaggagt

SEQ ID NO: 5695178 - DNA, 25 bp, Homo sapien
gttttgaatctatgtaacagtctca

SEQ ID NO: 5695179 - DNA, 25 bp, Homo sapien
gaatctatgtaacagtctcatgaac

SEQ ID NO: 5695180 - DNA, 25 bp, Homo sapien
taacagtctcatgaacacaattagg

SEQ ID NO: 5695181 - DNA, 25 bp, Homo sapien
cacaattaggagtcaaattctctac

SEQ ID NO: 5695182 - DNA, 25 bp, Homo sapien
aatctgttcaggtgattaatgtctc

SEQ ID NO: 5695183 - DNA, 25 bp, Homo sapien
gattaatgtctctagagtgttttaa

SEQ ID NO: 5695184 - DNA, 25 bp, Homo sapien
taatctgactagattttataccaac

SEQ ID NO: 5695185 - DNA, 25 bp, Homo sapien
gattttataccaacaccatcaagtt

SEQ ID NO: 5695186 - DNA, 25 bp, Homo sapien
tgttcaggtgattaatgtctctaga

SEQ ID NO: 5695187 - DNA, 25 bp, Homo sapien
caggtgattaatgtctctagagtgt

SEQ ID NO: 5695188 - DNA, 25 bp, Homo sapien
cactctagagacattaatcacctga

SEQ ID NO: 5695189 - DNA, 25 bp, Homo sapien
gttggtataaaatctagtcagatta

SEQ ID NO: 5695190 - DNA, 25 bp, Homo sapien
ttaaaacactctagagacattaatc

SEQ ID NO: 5695191 - DNA, 25 bp, Homo sapien
cattaatcacctgaacagattaaga

SEQ ID NO: 5695192 - DNA, 25 bp, Homo sapien
aacttgatggtgttggtataaaatc

SEQ ID NO: 5695193 - DNA, 25 bp, Homo sapien
tagagacattaatcacctgaacaga

SEQ ID NO: 5695194 - DNA, 25 bp, Homo sapien
ctgcaacccccacttccttcctggg

SEQ ID NO: 5695195 - DNA, 25 bp, Homo sapien
atggctgtctgcaacccccacttcc

SEQ ID NO: 5695196 - DNA, 25 bp, Homo sapien
gtctgcaacccccacttccttcctg

SEQ ID NO: 5695197 - DNA, 25 bp, Homo sapien
aatggctgtctgcaacccccacttc

SEQ ID NO: 5695198 - DNA, 25 bp, Homo sapien
ggctgtctgcaacccccacttcctt

SEQ ID NO: 5695199 - DNA, 25 bp, Homo sapien
tggctgtctgcaacccccacttcct

SEQ ID NO: 5695200 - DNA, 25 bp, Homo sapien
ggaagtgggggttgcagacagccat

SEQ ID NO: 5695201 - DNA, 25 bp, Homo sapien
caggaaggaagtgggggttgcagac

SEQ ID NO: 5695202 - DNA, 25 bp, Homo sapien
aggaagtgggggttgcagacagcca

SEQ ID NO: 5695203 - DNA, 25 bp, Homo sapien
ccaggaaggaagtgggggttgcaga

SEQ ID NO: 5695204 - DNA, 25 bp, Homo sapien
aaggaagtgggggttgcagacagcc

SEQ ID NO: 5695205 - DNA, 25 bp, Homo sapien
gaagtgggggttgcagacagccatt

SEQ ID NO: 5695206 - DNA, 25 bp, Homo sapien
ttggtcaggcccgtctccatgtcct

SEQ ID NO: 5695207 - DNA, 25 bp, Homo sapien
tggtcaggcccgtctccatgtcctg

SEQ ID NO: 5695208 - DNA, 25 bp, Homo sapien
aaatgagccgctcgccttagcctcc

SEQ ID NO: 5695209 - DNA, 25 bp, Homo sapien
cccgtctccatgtcctggcctcaaa

SEQ ID NO: 5695210 - DNA, 25 bp, Homo sapien
ggtcaggcccgtctccatgtcctgg

SEQ ID NO: 5695211 - DNA, 25 bp, Homo sapien
tcaaatgagccgctcgccttagcct

SEQ ID NO: 5695212 - DNA, 25 bp, Homo sapien
tttgaggccaggacatggagacggg

SEQ ID NO: 5695213 - DNA, 25 bp, Homo sapien
caggacatggagacgggcctgacca

SEQ ID NO: 5695214 - DNA, 25 bp, Homo sapien
aggacatggagacgggcctgaccaa

SEQ ID NO: 5695215 - DNA, 25 bp, Homo sapien
ccaggacatggagacgggcctgacc

SEQ ID NO: 5695216 - DNA, 25 bp, Homo sapien
aggctaaggcgagcggctcatttga

SEQ ID NO: 5695217 - DNA, 25 bp, Homo sapien
ggaggctaaggcgagcggctcattt

SEQ ID NO: 5695218 - DNA, 25 bp, Homo sapien
gtgatagtacggaactagctagcta

SEQ ID NO: 5695219 - DNA, 25 bp, Homo sapien
cggatttattgttttcggtcacaat

SEQ ID NO: 5695220 - DNA, 25 bp, Homo sapien
ccagtgatagtacggaactagctag

SEQ ID NO: 5695221 - DNA, 25 bp, Homo sapien
ttttcggtcacaatttgacatattg

SEQ ID NO: 5695222 - DNA, 25 bp, Homo sapien
tcggtcacaatttgacatattgtta

SEQ ID NO: 5695223 - DNA, 25 bp, Homo sapien
ttccagtgatagtacggaactagct

SEQ ID NO: 5695224 - DNA, 25 bp, Homo sapien
attgtgaccgaaaacaataaatccg

SEQ ID NO: 5695225 - DNA, 25 bp, Homo sapien
agctagttccgtactatcactggaa

SEQ ID NO: 5695226 - DNA, 25 bp, Homo sapien
tagctagctagttccgtactatcac

SEQ ID NO: 5695227 - DNA, 25 bp, Homo sapien
taacaatatgtcaaattgtgaccga

SEQ ID NO: 5695228 - DNA, 25 bp, Homo sapien
caatatgtcaaattgtgaccgaaaa

SEQ ID NO: 5695229 - DNA, 25 bp, Homo sapien
ctagctagttccgtactatcactgg

SEQ ID NO: 5695230 - DNA, 25 bp, Homo sapien
aaaacagtcttgaatccagtcaagt

SEQ ID NO: 5695231 - DNA, 25 bp, Homo sapien
ttaaaacagtcttgaatccagtcaa

SEQ ID NO: 5695232 - DNA, 25 bp, Homo sapien
taaaacagtcttgaatccagtcaag

SEQ ID NO: 5695233 - DNA, 25 bp, Homo sapien
aaacagtcttgaatccagtcaagtt

SEQ ID NO: 5695234 - DNA, 25 bp, Homo sapien
cagtcttgaatccagtcaagtttca

SEQ ID NO: 5695235 - DNA, 25 bp, Homo sapien
cttaaaacagtcttgaatccagtca

SEQ ID NO: 5695236 - DNA, 25 bp, Homo sapien
acttgactggattcaagactgtttt

SEQ ID NO: 5695237 - DNA, 25 bp, Homo sapien
gaaacttgactggattcaagactgt

SEQ ID NO: 5695238 - DNA, 25 bp, Homo sapien
tgactggattcaagactgttttaag

SEQ ID NO: 5695239 - DNA, 25 bp, Homo sapien
cttgactggattcaagactgtttta

SEQ ID NO: 5695240 - DNA, 25 bp, Homo sapien
tgaaacttgactggattcaagactg

SEQ ID NO: 5695241 - DNA, 25 bp, Homo sapien
aacttgactggattcaagactgttt

SEQ ID NO: 5695242 - DNA, 25 bp, Homo sapien
gaataccatgacaaatgagtaatgt

SEQ ID NO: 5695243 - DNA, 25 bp, Homo sapien
gtattgttgaataccatgacaaatg

SEQ ID NO: 5695244 - DNA, 25 bp, Homo sapien
gtgtattgttgaataccatgacaaa

SEQ ID NO: 5695245 - DNA, 25 bp, Homo sapien
catgacaaatgagtaatgttaaagt

SEQ ID NO: 5695246 - DNA, 25 bp, Homo sapien
tgttgaataccatgacaaatgagta

SEQ ID NO: 5695247 - DNA, 25 bp, Homo sapien
tgaataccatgacaaatgagtaatg

SEQ ID NO: 5695248 - DNA, 25 bp, Homo sapien
acattactcatttgtcatggtattc

SEQ ID NO: 5695249 - DNA, 25 bp, Homo sapien
actttaacattactcatttgtcatg

SEQ ID NO: 5695250 - DNA, 25 bp, Homo sapien
cattactcatttgtcatggtattca

SEQ ID NO: 5695251 - DNA, 25 bp, Homo sapien
tactcatttgtcatggtattcaaca

SEQ ID NO: 5695252 - DNA, 25 bp, Homo sapien
tttgtcatggtattcaacaatacac

SEQ ID NO: 5695253 - DNA, 25 bp, Homo sapien
catttgtcatggtattcaacaatac

SEQ ID NO: 5695254 - DNA, 25 bp, Homo sapien
ggctagtctcttaactcatgatctc

SEQ ID NO: 5695255 - DNA, 25 bp, Homo sapien
gctagtctcttaactcatgatctca

SEQ ID NO: 5695256 - DNA, 25 bp, Homo sapien
gagatcatgagttaagagactagcc

SEQ ID NO: 5695257 - DNA, 25 bp, Homo sapien
tgagatcatgagttaagagactagc

SEQ ID NO: 5695258 - DNA, 25 bp, Homo sapien
taactcatgatctcaggcaatccac

SEQ ID NO: 5695259 - DNA, 25 bp, Homo sapien
ggctagtctcttaactcatgatctc

SEQ ID NO: 5695260 - DNA, 25 bp, Homo sapien
tcttaactcatgatctcaggcaatc

SEQ ID NO: 5695261 - DNA, 25 bp, Homo sapien
gctagtctcttaactcatgatctca

SEQ ID NO: 5695262 - DNA, 25 bp, Homo sapien
ctagtctcttaactcatgatctcag

SEQ ID NO: 5695263 - DNA, 25 bp, Homo sapien
gtctcttaactcatgatctcaggca

SEQ ID NO: 5695264 - DNA, 25 bp, Homo sapien
tgcctgagatcatgagttaagagac

SEQ ID NO: 5695265 - DNA, 25 bp, Homo sapien
gagatcatgagttaagagactagcc

SEQ ID NO: 5695266 - DNA, 25 bp, Homo sapien
ctgagatcatgagttaagagactag

SEQ ID NO: 5695267 - DNA, 25 bp, Homo sapien
tggattgcctgagatcatgagttaa

SEQ ID NO: 5695268 - DNA, 25 bp, Homo sapien
gattgcctgagatcatgagttaaga

SEQ ID NO: 5695269 - DNA, 25 bp, Homo sapien
tgagatcatgagttaagagactagc

SEQ ID NO: 5695270 - DNA, 25 bp, Homo sapien
gccactgcatgtgactcaatttcag

SEQ ID NO: 5695271 - DNA, 25 bp, Homo sapien
gcatgtgactcaatttcagtttttt

SEQ ID NO: 5695272 - DNA, 25 bp, Homo sapien
gagccactgcatgtgactcaatttc

SEQ ID NO: 5695273 - DNA, 25 bp, Homo sapien
cactgcatgtgactcaatttcagtt

SEQ ID NO: 5695274 - DNA, 25 bp, Homo sapien
agccactgcatgtgactcaatttca

SEQ ID NO: 5695275 - DNA, 25 bp, Homo sapien
ccactgcatgtgactcaatttcagt

SEQ ID NO: 5695276 - DNA, 25 bp, Homo sapien
aactgaaattgagtcacatgcagtg

SEQ ID NO: 5695277 - DNA, 25 bp, Homo sapien
gaaattgagtcacatgcagtggctc

SEQ ID NO: 5695278 - DNA, 25 bp, Homo sapien
aaaactgaaattgagtcacatgcag

SEQ ID NO: 5695279 - DNA, 25 bp, Homo sapien
ctgaaattgagtcacatgcagtggc

SEQ ID NO: 5695280 - DNA, 25 bp, Homo sapien
aaaaaactgaaattgagtcacatgc

SEQ ID NO: 5695281 - DNA, 25 bp, Homo sapien
tgaaattgagtcacatgcagtggct

SEQ ID NO: 5695282 - DNA, 25 bp, Homo sapien
actacaagcatgtgccaccatgccc

SEQ ID NO: 5695283 - DNA, 25 bp, Homo sapien
gggactacaagcatgtgccaccatg

SEQ ID NO: 5695284 - DNA, 25 bp, Homo sapien
tacaagcatgtgccaccatgcccag

SEQ ID NO: 5695285 - DNA, 25 bp, Homo sapien
acaagcatgtgccaccatgcccagc

SEQ ID NO: 5695286 - DNA, 25 bp, Homo sapien
tgggactacaagcatgtgccaccat

SEQ ID NO: 5695287 - DNA, 25 bp, Homo sapien
ctacaagcatgtgccaccatgccca

SEQ ID NO: 5695288 - DNA, 25 bp, Homo sapien
tgggcatggtggcacatgcttgtag

SEQ ID NO: 5695289 - DNA, 25 bp, Homo sapien
gctgggcatggtggcacatgcttgt

SEQ ID NO: 5695290 - DNA, 25 bp, Homo sapien
ctgggcatggtggcacatgcttgta

SEQ ID NO: 5695291 - DNA, 25 bp, Homo sapien
atggtggcacatgcttgtagtccca

SEQ ID NO: 5695292 - DNA, 25 bp, Homo sapien
catggtggcacatgcttgtagtccc

SEQ ID NO: 5695293 - DNA, 25 bp, Homo sapien
gggcatggtggcacatgcttgtagt

SEQ ID NO: 5695294 - DNA, 25 bp, Homo sapien
tctgttgcctagcaatcatatctgt

SEQ ID NO: 5695295 - DNA, 25 bp, Homo sapien
cagttctctgaaatgcaccttcact

SEQ ID NO: 5695296 - DNA, 25 bp, Homo sapien
gaaatgcaccttcactctgttgcct

SEQ ID NO: 5695297 - DNA, 25 bp, Homo sapien
tctgaaatgcaccttcactctgttg

SEQ ID NO: 5695298 - DNA, 25 bp, Homo sapien
cctagcaatcatatctgttccttaa

SEQ ID NO: 5695299 - DNA, 25 bp, Homo sapien
gttgcctagcaatcatatctgttcc

SEQ ID NO: 5695300 - DNA, 25 bp, Homo sapien
agtgaaggtgcatttcagagaactg

SEQ ID NO: 5695301 - DNA, 25 bp, Homo sapien
taaggaacagatatgattgctaggc

SEQ ID NO: 5695302 - DNA, 25 bp, Homo sapien
aggcaacagagtgaaggtgcatttc

SEQ ID NO: 5695303 - DNA, 25 bp, Homo sapien
gaacagatatgattgctaggcaaca

SEQ ID NO: 5695304 - DNA, 25 bp, Homo sapien
cagatatgattgctaggcaacagag

SEQ ID NO: 5695305 - DNA, 25 bp, Homo sapien
caacagagtgaaggtgcatttcaga

SEQ ID NO: 5695306 - DNA, 25 bp, Homo sapien
taaggtgaggagcagatatcataaa

SEQ ID NO: 5695307 - DNA, 25 bp, Homo sapien
tgtggacatgttaaagttgatccgt

SEQ ID NO: 5695308 - DNA, 25 bp, Homo sapien
gttaaagttgatccgtttggagaga

SEQ ID NO: 5695309 - DNA, 25 bp, Homo sapien
gacatgttaaagttgatccgtttgg

SEQ ID NO: 5695310 - DNA, 25 bp, Homo sapien
tatggaatttacagtgacagtgatt

SEQ ID NO: 5695311 - DNA, 25 bp, Homo sapien
gagctaaggtgaggagcagatatca

SEQ ID NO: 5695312 - DNA, 25 bp, Homo sapien
tgatatctgctcctcaccttagctc

SEQ ID NO: 5695313 - DNA, 25 bp, Homo sapien
acggatcaactttaacatgtccaca

SEQ ID NO: 5695314 - DNA, 25 bp, Homo sapien
tccaaacggatcaactttaacatgt

SEQ ID NO: 5695315 - DNA, 25 bp, Homo sapien
tctctccaaacggatcaactttaac

SEQ ID NO: 5695316 - DNA, 25 bp, Homo sapien
aatcactgtcactgtaaattccata

SEQ ID NO: 5695317 - DNA, 25 bp, Homo sapien
ttatgatatctgctcctcaccttag

SEQ ID NO: 5695318 - DNA, 25 bp, Homo sapien
gaaagataatgggtggctgttcaga

SEQ ID NO: 5695319 - DNA, 25 bp, Homo sapien
aagataatgggtggctgttcagaga

SEQ ID NO: 5695320 - DNA, 25 bp, Homo sapien
gagaaatggcaatgggagtgatgaa

SEQ ID NO: 5695321 - DNA, 25 bp, Homo sapien
gatttttggtgggaccagagaaatg

SEQ ID NO: 5695322 - DNA, 25 bp, Homo sapien
gataatgggtggctgttcagagaag

SEQ ID NO: 5695323 - DNA, 25 bp, Homo sapien
cagtgatttttggtgggaccagaga

SEQ ID NO: 5695324 - DNA, 25 bp, Homo sapien
tctctggtcccaccaaaaatcactg

SEQ ID NO: 5695325 - DNA, 25 bp, Homo sapien
tttctctggtcccaccaaaaatcac

SEQ ID NO: 5695326 - DNA, 25 bp, Homo sapien
tctgaacagccacccattatctttc

SEQ ID NO: 5695327 - DNA, 25 bp, Homo sapien
catttctctggtcccaccaaaaatc

SEQ ID NO: 5695328 - DNA, 25 bp, Homo sapien
tctctgaacagccacccattatctt

SEQ ID NO: 5695329 - DNA, 25 bp, Homo sapien
ttcatcactcccattgccatttctc

SEQ ID NO: 5695330 - DNA, 25 bp, Homo sapien
tgggttaaagacatcacgtgacgca

SEQ ID NO: 5695331 - DNA, 25 bp, Homo sapien
ttgggttaaagacatcacgtgacgc

SEQ ID NO: 5695332 - DNA, 25 bp, Homo sapien
ggttaaagacatcacgtgacgcata

SEQ ID NO: 5695333 - DNA, 25 bp, Homo sapien
gggttaaagacatcacgtgacgcat

SEQ ID NO: 5695334 - DNA, 25 bp, Homo sapien
gcgtcacgtgatgtctttaacccaa

SEQ ID NO: 5695335 - DNA, 25 bp, Homo sapien
tgcgtcacgtgatgtctttaaccca

SEQ ID NO: 5695336 - DNA, 25 bp, Homo sapien
atgcgtcacgtgatgtctttaaccc

SEQ ID NO: 5695337 - DNA, 25 bp, Homo sapien
tatgcgtcacgtgatgtctttaacc

SEQ ID NO: 5695338 - DNA, 25 bp, Homo sapien
ctagaagtcagttgggaacttcatt

SEQ ID NO: 5695339 - DNA, 25 bp, Homo sapien
cctagaagtcagttgggaacttcat

SEQ ID NO: 5695340 - DNA, 25 bp, Homo sapien
tcctagaagtcagttgggaacttca

SEQ ID NO: 5695341 - DNA, 25 bp, Homo sapien
agaagtcagttgggaacttcattta

SEQ ID NO: 5695342 - DNA, 25 bp, Homo sapien
ttcctagaagtcagttgggaacttc

SEQ ID NO: 5695343 - DNA, 25 bp, Homo sapien
tagaagtcagttgggaacttcattt

SEQ ID NO: 5695344 - DNA, 25 bp, Homo sapien
gaagttcccaactgacttctaggaa

SEQ ID NO: 5695345 - DNA, 25 bp, Homo sapien
atgaagttcccaactgacttctagg

SEQ ID NO: 5695346 - DNA, 25 bp, Homo sapien
taaatgaagttcccaactgacttct

SEQ ID NO: 5695347 - DNA, 25 bp, Homo sapien
tgaagttcccaactgacttctagga

SEQ ID NO: 5695348 - DNA, 25 bp, Homo sapien
aaatgaagttcccaactgacttcta

SEQ ID NO: 5695349 - DNA, 25 bp, Homo sapien
aatgaagttcccaactgacttctag

SEQ ID NO: 5695350 - DNA, 25 bp, Homo sapien
atatttgttatgatcctgctgtgag

SEQ ID NO: 5695351 - DNA, 25 bp, Homo sapien
tcctagaagtcagttgggaacttca

SEQ ID NO: 5695352 - DNA, 25 bp, Homo sapien
tggattattatttcctagaagtcag

SEQ ID NO: 5695353 - DNA, 25 bp, Homo sapien
cgttgttgattgtgtgatttatgga

SEQ ID NO: 5695354 - DNA, 25 bp, Homo sapien
tagaagtcagttgggaacttcattt

SEQ ID NO: 5695355 - DNA, 25 bp, Homo sapien
gggaacttcatttatttactcaaca

SEQ ID NO: 5695356 - DNA, 25 bp, Homo sapien
ctcacagcaggatcataacaaatat

SEQ ID NO: 5695357 - DNA, 25 bp, Homo sapien
gaagttcccaactgacttctaggaa

SEQ ID NO: 5695358 - DNA, 25 bp, Homo sapien
tgttgagtaaataaatgaagttccc

SEQ ID NO: 5695359 - DNA, 25 bp, Homo sapien
tccataaatcacacaatcaacaacg

SEQ ID NO: 5695360 - DNA, 25 bp, Homo sapien
aatgaagttcccaactgacttctag

SEQ ID NO: 5695361 - DNA, 25 bp, Homo sapien
gacttctaggaaataataatccata

SEQ ID NO: 5695362 - DNA, 25 bp, Homo sapien
ttttggtaaagtatgatattcaact

SEQ ID NO: 5695363 - DNA, 25 bp, Homo sapien
attcaacttttattcgattttcatt

SEQ ID NO: 5695364 - DNA, 25 bp, Homo sapien
ttcaacttttattcgattttcattg

SEQ ID NO: 5695365 - DNA, 25 bp, Homo sapien
tttttggtaaagtatgatattcaac

SEQ ID NO: 5695366 - DNA, 25 bp, Homo sapien
aataccttgaaaacagatagaattt

SEQ ID NO: 5695367 - DNA, 25 bp, Homo sapien
tttggtaaagtatgatattcaactt

SEQ ID NO: 5695368 - DNA, 25 bp, Homo sapien
aagttgaatatcatactttaccaaa

SEQ ID NO: 5695369 - DNA, 25 bp, Homo sapien
gttgaatatcatactttaccaaaaa

SEQ ID NO: 5695370 - DNA, 25 bp, Homo sapien
aaattctatctgttttcaaggtatt

SEQ ID NO: 5695371 - DNA, 25 bp, Homo sapien
caatgaaaatcgaataaaagttgaa

SEQ ID NO: 5695372 - DNA, 25 bp, Homo sapien
agttgaatatcatactttaccaaaa

SEQ ID NO: 5695373 - DNA, 25 bp, Homo sapien
aatgaaaatcgaataaaagttgaat

SEQ ID NO: 5695374 - DNA, 25 bp, Homo sapien
cagatagaattttttggtaaagtat

SEQ ID NO: 5695375 - DNA, 25 bp, Homo sapien
ctggccaatagctgatttttttttt

SEQ ID NO: 5695376 - DNA, 25 bp, Homo sapien
ttcaacttttattcgattttcattg

SEQ ID NO: 5695377 - DNA, 25 bp, Homo sapien
tttttggtaaagtatgatattcaac

SEQ ID NO: 5695378 - DNA, 25 bp, Homo sapien
aataccttgaaaacagatagaattt

SEQ ID NO: 5695379 - DNA, 25 bp, Homo sapien
agtatgatattcaacttttattcga

SEQ ID NO: 5695380 - DNA, 25 bp, Homo sapien
aagttgaatatcatactttaccaaa

SEQ ID NO: 5695381 - DNA, 25 bp, Homo sapien
gttgaatatcatactttaccaaaaa

SEQ ID NO: 5695382 - DNA, 25 bp, Homo sapien
aaattctatctgttttcaaggtatt

SEQ ID NO: 5695383 - DNA, 25 bp, Homo sapien
caatgaaaatcgaataaaagttgaa

SEQ ID NO: 5695384 - DNA, 25 bp, Homo sapien
aaaaaaaaaatcagctattggccag

SEQ ID NO: 5695385 - DNA, 25 bp, Homo sapien
caaaaaattctatctgttttcaagg

SEQ ID NO: 5695386 - DNA, 25 bp, Homo sapien
ggattatgggttttgtaatagacag

SEQ ID NO: 5695387 - DNA, 25 bp, Homo sapien
taattacatataagcggtagatgga

SEQ ID NO: 5695388 - DNA, 25 bp, Homo sapien
taaattatagattactggactctgg

SEQ ID NO: 5695389 - DNA, 25 bp, Homo sapien
tataagcggtagatggaagtttgtg

SEQ ID NO: 5695390 - DNA, 25 bp, Homo sapien
tatgggttttgtaatagacagtaaa

SEQ ID NO: 5695391 - DNA, 25 bp, Homo sapien
ctctggtaattacatataagcggta

SEQ ID NO: 5695392 - DNA, 25 bp, Homo sapien
taccgcttatatgtaattaccagag

SEQ ID NO: 5695393 - DNA, 25 bp, Homo sapien
tttactgtctattacaaaacccata

SEQ ID NO: 5695394 - DNA, 25 bp, Homo sapien
cacaaacttccatctaccgcttata

SEQ ID NO: 5695395 - DNA, 25 bp, Homo sapien
catctaccgcttatatgtaattacc

SEQ ID NO: 5695396 - DNA, 25 bp, Homo sapien
tctattacaaaacccataatcctta

SEQ ID NO: 5695397 - DNA, 25 bp, Homo sapien
ccagagtccagtaatctataattta

SEQ ID NO: 5695398 - DNA, 25 bp, Homo sapien
gagtacaacatctgatactgttaga

SEQ ID NO: 5695399 - DNA, 25 bp, Homo sapien
ctgagtacaacatctgatactgtta

SEQ ID NO: 5695400 - DNA, 25 bp, Homo sapien
gtaggattcgttatatattctggaa

SEQ ID NO: 5695401 - DNA, 25 bp, Homo sapien
agaattagttgtaggattcgttata

SEQ ID NO: 5695402 - DNA, 25 bp, Homo sapien
tacaacatctgatactgttagaaaa

SEQ ID NO: 5695403 - DNA, 25 bp, Homo sapien
tgtaggattcgttatatattctgga

SEQ ID NO: 5695404 - DNA, 25 bp, Homo sapien
gaatatataacgaatcctacaacta

SEQ ID NO: 5695405 - DNA, 25 bp, Homo sapien
tttctaacagtatcagatgttgtac

SEQ ID NO: 5695406 - DNA, 25 bp, Homo sapien
ttccagaatatataacgaatcctac

SEQ ID NO: 5695407 - DNA, 25 bp, Homo sapien
taacagtatcagatgttgtactcag

SEQ ID NO: 5695408 - DNA, 25 bp, Homo sapien
tctaacagtatcagatgttgtactc

SEQ ID NO: 5695409 - DNA, 25 bp, Homo sapien
tataacgaatcctacaactaattct

SEQ ID NO: 5695410 - DNA, 25 bp, Homo sapien
ccatgtttgccaggatggtcttgat

SEQ ID NO: 5695411 - DNA, 25 bp, Homo sapien
gcctcggcctcaaagtgctgagatt

SEQ ID NO: 5695412 - DNA, 25 bp, Homo sapien
gatctcctgacctcgtgatctgcct

SEQ ID NO: 5695413 - DNA, 25 bp, Homo sapien
caccatgtttgccaggatggtcttg

SEQ ID NO: 5695414 - DNA, 25 bp, Homo sapien
tcaccatgtttgccaggatggtctt

SEQ ID NO: 5695415 - DNA, 25 bp, Homo sapien
accatgtttgccaggatggtcttga

SEQ ID NO: 5695416 - DNA, 25 bp, Homo sapien
atcaagaccatcctggcaaacatgg

SEQ ID NO: 5695417 - DNA, 25 bp, Homo sapien
tcaagaccatcctggcaaacatggt

SEQ ID NO: 5695418 - DNA, 25 bp, Homo sapien
aagaccatcctggcaaacatggtga

SEQ ID NO: 5695419 - DNA, 25 bp, Homo sapien
aatctcagcactttgaggccgaggc

SEQ ID NO: 5695420 - DNA, 25 bp, Homo sapien
aggcagatcacgaggtcaggagatc

SEQ ID NO: 5695421 - DNA, 25 bp, Homo sapien
caagaccatcctggcaaacatggtg

SEQ ID NO: 5695422 - DNA, 25 bp, Homo sapien
tggtgtgatctcaagagccccgtct

SEQ ID NO: 5695423 - DNA, 25 bp, Homo sapien
ggtgtgatctcaagagccccgtctc

SEQ ID NO: 5695424 - DNA, 25 bp, Homo sapien
gtgtgatctcaagagccccgtctcc

SEQ ID NO: 5695425 - DNA, 25 bp, Homo sapien
gtggtgtgatctcaagagccccgtc

SEQ ID NO: 5695426 - DNA, 25 bp, Homo sapien
tctcaagagccccgtctcctgagtt

SEQ ID NO: 5695427 - DNA, 25 bp, Homo sapien
gtgatctcaagagccccgtctcctg

SEQ ID NO: 5695428 - DNA, 25 bp, Homo sapien
gaactcaggagacggggctcttgag

SEQ ID NO: 5695429 - DNA, 25 bp, Homo sapien
agacggggctcttgagatcacacca

SEQ ID NO: 5695430 - DNA, 25 bp, Homo sapien
gacggggctcttgagatcacaccac

SEQ ID NO: 5695431 - DNA, 25 bp, Homo sapien
ggagacggggctcttgagatcacac

SEQ ID NO: 5695432 - DNA, 25 bp, Homo sapien
gagacggggctcttgagatcacacc

SEQ ID NO: 5695433 - DNA, 25 bp, Homo sapien
caggagacggggctcttgagatcac

SEQ ID NO: 5695434 - DNA, 25 bp, Homo sapien
agacggggctcttgagatcacacca

SEQ ID NO: 5695435 - DNA, 25 bp, Homo sapien
tgtgaactcaggagacggggctctt

SEQ ID NO: 5695436 - DNA, 25 bp, Homo sapien
gacggggctcttgagatcacaccac

SEQ ID NO: 5695437 - DNA, 25 bp, Homo sapien
ggagacggggctcttgagatcacac

SEQ ID NO: 5695438 - DNA, 25 bp, Homo sapien
gagacggggctcttgagatcacacc

SEQ ID NO: 5695439 - DNA, 25 bp, Homo sapien
caggagacggggctcttgagatcac

SEQ ID NO: 5695440 - DNA, 25 bp, Homo sapien
cattctagtctagtgagagtgtggt

SEQ ID NO: 5695441 - DNA, 25 bp, Homo sapien
ccattctagtctagtgagagtgtgg

SEQ ID NO: 5695442 - DNA, 25 bp, Homo sapien
tccattctagtctagtgagagtgtg

SEQ ID NO: 5695443 - DNA, 25 bp, Homo sapien
accacactctcactagactagaatg

SEQ ID NO: 5695444 - DNA, 25 bp, Homo sapien
ccacactctcactagactagaatgg

SEQ ID NO: 5695445 - DNA, 25 bp, Homo sapien
cacactctcactagactagaatgga

SEQ ID NO: 5695446 - DNA, 25 bp, Homo sapien
tatctcagtcaggatttaattgcat

SEQ ID NO: 5695447 - DNA, 25 bp, Homo sapien
cattctagtctagtgagagtgtggt

SEQ ID NO: 5695448 - DNA, 25 bp, Homo sapien
tgtcttttgcttttatccattctag

SEQ ID NO: 5695449 - DNA, 25 bp, Homo sapien
ggtatctcagtcaggatttaattgc

SEQ ID NO: 5695450 - DNA, 25 bp, Homo sapien
tgagagtgtggtggtatctcagtca

SEQ ID NO: 5695451 - DNA, 25 bp, Homo sapien
tccattctagtctagtgagagtgtg

SEQ ID NO: 5695452 - DNA, 25 bp, Homo sapien
taaacaaaatgcaattaaatcctga

SEQ ID NO: 5695453 - DNA, 25 bp, Homo sapien
accacactctcactagactagaatg

SEQ ID NO: 5695454 - DNA, 25 bp, Homo sapien
gcaattaaatcctgactgagatacc

SEQ ID NO: 5695455 - DNA, 25 bp, Homo sapien
cacactctcactagactagaatgga

SEQ ID NO: 5695456 - DNA, 25 bp, Homo sapien
tgactgagataccaccacactctca

SEQ ID NO: 5695457 - DNA, 25 bp, Homo sapien
tagaatggataaaagcaaaagacag

SEQ ID NO: 5695458 - DNA, 25 bp, Homo sapien
tatatatacctaggagaagtgctgg

SEQ ID NO: 5695459 - DNA, 25 bp, Homo sapien
tatggtcaacctgaccaacagctaa

SEQ ID NO: 5695460 - DNA, 25 bp, Homo sapien
aagtgctgggttgtatggtgattat

SEQ ID NO: 5695461 - DNA, 25 bp, Homo sapien
gagtatatatacctaggagaagtgc

SEQ ID NO: 5695462 - DNA, 25 bp, Homo sapien
tggtgattatatggtcaacctgacc

SEQ ID NO: 5695463 - DNA, 25 bp, Homo sapien
tacctaggagaagtgctgggttgta

SEQ ID NO: 5695464 - DNA, 25 bp, Homo sapien
atgaaaacacatgaccacacaaaaa

SEQ ID NO: 5695465 - DNA, 25 bp, Homo sapien
tataatcaccatacaacccagcact

SEQ ID NO: 5695466 - DNA, 25 bp, Homo sapien
tacaacccagcacttctcctaggta

SEQ ID NO: 5695467 - DNA, 25 bp, Homo sapien
gcacttctcctaggtatatatactc

SEQ ID NO: 5695468 - DNA, 25 bp, Homo sapien
ggtcaggttgaccatataatcacca

SEQ ID NO: 5695469 - DNA, 25 bp, Homo sapien
ttagctgttggtcaggttgaccata

SEQ ID NO: 5695470 - DNA, 25 bp, Homo sapien
ggcatgagctatagcatctggctgg

SEQ ID NO: 5695471 - DNA, 25 bp, Homo sapien
tgagctatagcatctggctggactt

SEQ ID NO: 5695472 - DNA, 25 bp, Homo sapien
gcatgagctatagcatctggctgga

SEQ ID NO: 5695473 - DNA, 25 bp, Homo sapien
catgagctatagcatctggctggac

SEQ ID NO: 5695474 - DNA, 25 bp, Homo sapien
agctatagcatctggctggacttaa

SEQ ID NO: 5695475 - DNA, 25 bp, Homo sapien
gagctatagcatctggctggactta

SEQ ID NO: 5695476 - DNA, 25 bp, Homo sapien
tccagccagatgctatagctcatgc

SEQ ID NO: 5695477 - DNA, 25 bp, Homo sapien
aagtccagccagatgctatagctca

SEQ ID NO: 5695478 - DNA, 25 bp, Homo sapien
ttaagtccagccagatgctatagct

SEQ ID NO: 5695479 - DNA, 25 bp, Homo sapien
gtccagccagatgctatagctcatg

SEQ ID NO: 5695480 - DNA, 25 bp, Homo sapien
ccagccagatgctatagctcatgcc

SEQ ID NO: 5695481 - DNA, 25 bp, Homo sapien
taagtccagccagatgctatagctc

SEQ ID NO: 5695482 - DNA, 25 bp, Homo sapien
tttgttttttgagacctgatgtggc

SEQ ID NO: 5695483 - DNA, 25 bp, Homo sapien
gttttttgagacctgatgtggctct

SEQ ID NO: 5695484 - DNA, 25 bp, Homo sapien
tgagacctgatgtggctctcttgcc

SEQ ID NO: 5695485 - DNA, 25 bp, Homo sapien
agtggcgcatcactgctcacggcaa

SEQ ID NO: 5695486 - DNA, 25 bp, Homo sapien
gtggcgcatcactgctcacggcaac

SEQ ID NO: 5695487 - DNA, 25 bp, Homo sapien
gacctgatgtggctctcttgcccag

SEQ ID NO: 5695488 - DNA, 25 bp, Homo sapien
gagagccacatcaggtctcaaaaaa

SEQ ID NO: 5695489 - DNA, 25 bp, Homo sapien
gttgccgtgagcagtgatgcgccac

SEQ ID NO: 5695490 - DNA, 25 bp, Homo sapien
cctgggcaagagagccacatcaggt

SEQ ID NO: 5695491 - DNA, 25 bp, Homo sapien
gaggttgccgtgagcagtgatgcgc

SEQ ID NO: 5695492 - DNA, 25 bp, Homo sapien
ggcaagagagccacatcaggtctca

SEQ ID NO: 5695493 - DNA, 25 bp, Homo sapien
gccacatcaggtctcaaaaaacaaa

SEQ ID NO: 5695494 - DNA, 25 bp, Homo sapien
gagacttctaggctactttgaaaag

SEQ ID NO: 5695495 - DNA, 25 bp, Homo sapien
tcacagagcaggagacttctaggct

SEQ ID NO: 5695496 - DNA, 25 bp, Homo sapien
aaggcatgtgtttcacagagcagga

SEQ ID NO: 5695497 - DNA, 25 bp, Homo sapien
attctgcattgaaaggcatgtgttt

SEQ ID NO: 5695498 - DNA, 25 bp, Homo sapien
gcaggagacttctaggctactttga

SEQ ID NO: 5695499 - DNA, 25 bp, Homo sapien
tgtgtttcacagagcaggagacttc

SEQ ID NO: 5695500 - DNA, 25 bp, Homo sapien
gaagtctcctgctctgtgaaacaca

SEQ ID NO: 5695501 - DNA, 25 bp, Homo sapien
tcaaagtagcctagaagtctcctgc

SEQ ID NO: 5695502 - DNA, 25 bp, Homo sapien
gcctagaagtctcctgctctgtgaa

SEQ ID NO: 5695503 - DNA, 25 bp, Homo sapien
tcctgctctgtgaaacacatgcctt

SEQ ID NO: 5695504 - DNA, 25 bp, Homo sapien
aaacacatgcctttcaatgcagaat

SEQ ID NO: 5695505 - DNA, 25 bp, Homo sapien
gcttttcaaagtagcctagaagtct

SEQ ID NO: 5695506 - DNA, 25 bp, Homo sapien
aagacagaactgtcaaaccatcatt

SEQ ID NO: 5695507 - DNA, 25 bp, Homo sapien
gaactgtcaaaccatcatttcttca

SEQ ID NO: 5695508 - DNA, 25 bp, Homo sapien
gacagaactgtcaaaccatcatttc

SEQ ID NO: 5695509 - DNA, 25 bp, Homo sapien
cagaactgtcaaaccatcatttctt

SEQ ID NO: 5695510 - DNA, 25 bp, Homo sapien
agttaatatccctaattttgttctg

SEQ ID NO: 5695511 - DNA, 25 bp, Homo sapien
acagaactgtcaaaccatcatttct

SEQ ID NO: 5695512 - DNA, 25 bp, Homo sapien
aagaaatgatggtttgacagttctg

SEQ ID NO: 5695513 - DNA, 25 bp, Homo sapien
tgaagaaatgatggtttgacagttc

SEQ ID NO: 5695514 - DNA, 25 bp, Homo sapien
gaaatgatggtttgacagttctgtc

SEQ ID NO: 5695515 - DNA, 25 bp, Homo sapien
gaagaaatgatggtttgacagttct

SEQ ID NO: 5695516 - DNA, 25 bp, Homo sapien
agaaatgatggtttgacagttctgt

SEQ ID NO: 5695517 - DNA, 25 bp, Homo sapien
cagaacaaaattagggatattaact

SEQ ID NO: 5695518 - DNA, 25 bp, Homo sapien
gaatttctgaagtagattggtcttg

SEQ ID NO: 5695519 - DNA, 25 bp, Homo sapien
ctgaagtagattggtcttgatgtga

SEQ ID NO: 5695520 - DNA, 25 bp, Homo sapien
cttgatgtgattggttggactaaag

SEQ ID NO: 5695521 - DNA, 25 bp, Homo sapien
gactaaaggtatgaaagtaggtgct

SEQ ID NO: 5695522 - DNA, 25 bp, Homo sapien
aagtaggtgcttgtaggaaaataat

SEQ ID NO: 5695523 - DNA, 25 bp, Homo sapien
tggttggactaaaggtatgaaagta

SEQ ID NO: 5695524 - DNA, 25 bp, Homo sapien
tcacatcaagaccaatctacttcag

SEQ ID NO: 5695525 - DNA, 25 bp, Homo sapien
caagaccaatctacttcagaaattc

SEQ ID NO: 5695526 - DNA, 25 bp, Homo sapien
attattttcctacaagcacctactt

SEQ ID NO: 5695527 - DNA, 25 bp, Homo sapien
caagcacctactttcatacctttag

SEQ ID NO: 5695528 - DNA, 25 bp, Homo sapien
tactttcatacctttagtccaacca

SEQ ID NO: 5695529 - DNA, 25 bp, Homo sapien
ctttagtccaaccaatcacatcaag

SEQ ID NO: 5695530 - DNA, 25 bp, Homo sapien
tattaatatgtcagtgcattagaaa

SEQ ID NO: 5695531 - DNA, 25 bp, Homo sapien
tgacacatgtaacaaagattgagtt

SEQ ID NO: 5695532 - DNA, 25 bp, Homo sapien
gacacatgtaacaaagattgagttg

SEQ ID NO: 5695533 - DNA, 25 bp, Homo sapien
catgtaacaaagattgagttgtgag

SEQ ID NO: 5695534 - DNA, 25 bp, Homo sapien
tgtaacaaagattgagttgtgaggg

SEQ ID NO: 5695535 - DNA, 25 bp, Homo sapien
aatatgtcagtgcattagaaataga

SEQ ID NO: 5695536 - DNA, 25 bp, Homo sapien
tctatttctaatgcactgacatatt

SEQ ID NO: 5695537 - DNA, 25 bp, Homo sapien
aactcaatctttgttacatgtgtca

SEQ ID NO: 5695538 - DNA, 25 bp, Homo sapien
tatttctaatgcactgacatattaa

SEQ ID NO: 5695539 - DNA, 25 bp, Homo sapien
cacaactcaatctttgttacatgtg

SEQ ID NO: 5695540 - DNA, 25 bp, Homo sapien
ccctcacaactcaatctttgttaca

SEQ ID NO: 5695541 - DNA, 25 bp, Homo sapien
caactcaatctttgttacatgtgtc

SEQ ID NO: 5695542 - DNA, 25 bp, Homo sapien
cagctcttttcttgagtcgtctcat

SEQ ID NO: 5695543 - DNA, 25 bp, Homo sapien
tcttttcttgagtcgtctcatctct

SEQ ID NO: 5695544 - DNA, 25 bp, Homo sapien
tcagctcttttcttgagtcgtctca

SEQ ID NO: 5695545 - DNA, 25 bp, Homo sapien
gctcttttcttgagtcgtctcatct

SEQ ID NO: 5695546 - DNA, 25 bp, Homo sapien
tttcttgagtcgtctcatctctctc

SEQ ID NO: 5695547 - DNA, 25 bp, Homo sapien
tcttgagtcgtctcatctctctctg

SEQ ID NO: 5695548 - DNA, 25 bp, Homo sapien
gatgagacgactcaagaaaagagct

SEQ ID NO: 5695549 - DNA, 25 bp, Homo sapien
gagagatgagacgactcaagaaaag

SEQ ID NO: 5695550 - DNA, 25 bp, Homo sapien
tgagacgactcaagaaaagagctga

SEQ ID NO: 5695551 - DNA, 25 bp, Homo sapien
gagatgagacgactcaagaaaagag

SEQ ID NO: 5695552 - DNA, 25 bp, Homo sapien
gagagagatgagacgactcaagaaa

SEQ ID NO: 5695553 - DNA, 25 bp, Homo sapien
cagagagagatgagacgactcaaga

SEQ ID NO: 5695554 - DNA, 25 bp, Homo sapien
tttgtcatatctcgtggaccctacc

SEQ ID NO: 5695555 - DNA, 25 bp, Homo sapien
ttagagacatagatgaaacccgtct

SEQ ID NO: 5695556 - DNA, 25 bp, Homo sapien
tcatatctcgtggaccctacctaca

SEQ ID NO: 5695557 - DNA, 25 bp, Homo sapien
tgtcatatctcgtggaccctaccta

SEQ ID NO: 5695558 - DNA, 25 bp, Homo sapien
gagacatagatgaaacccgtctggt

SEQ ID NO: 5695559 - DNA, 25 bp, Homo sapien
ttttttgtcatatctcgtggaccct

SEQ ID NO: 5695560 - DNA, 25 bp, Homo sapien
accagacgggtttcatctatgtctc

SEQ ID NO: 5695561 - DNA, 25 bp, Homo sapien
tagggtccacgagatatgacaaaaa

SEQ ID NO: 5695562 - DNA, 25 bp, Homo sapien
ggtagggtccacgagatatgacaaa

SEQ ID NO: 5695563 - DNA, 25 bp, Homo sapien
cagacgggtttcatctatgtctcta

SEQ ID NO: 5695564 - DNA, 25 bp, Homo sapien
tgtaggtagggtccacgagatatga

SEQ ID NO: 5695565 - DNA, 25 bp, Homo sapien
taggtagggtccacgagatatgaca

SEQ ID NO: 5695566 - DNA, 25 bp, Homo sapien
attgatcacccatgaaattgttctc

SEQ ID NO: 5695567 - DNA, 25 bp, Homo sapien
ttgatcacccatgaaattgttctca

SEQ ID NO: 5695568 - DNA, 25 bp, Homo sapien
tgagaacaatttcatgggtgatcaa

SEQ ID NO: 5695569 - DNA, 25 bp, Homo sapien
gagaacaatttcatgggtgatcaat

SEQ ID NO: 5695570 - DNA, 25 bp, Homo sapien
tttcccttataattgatcacccatg

SEQ ID NO: 5695571 - DNA, 25 bp, Homo sapien
cagattgtaataaattggaacccca

SEQ ID NO: 5695572 - DNA, 25 bp, Homo sapien
ccccactttcccttataattgatca

SEQ ID NO: 5695573 - DNA, 25 bp, Homo sapien
ttgatcacccatgaaattgttctca

SEQ ID NO: 5695574 - DNA, 25 bp, Homo sapien
gttctcaaattagataatggtgata

SEQ ID NO: 5695575 - DNA, 25 bp, Homo sapien
cccatgaaattgttctcaaattaga

SEQ ID NO: 5695576 - DNA, 25 bp, Homo sapien
ggttccaatttattacaatctgaag

SEQ ID NO: 5695577 - DNA, 25 bp, Homo sapien
tatcaccattatctaatttgagaac

SEQ ID NO: 5695578 - DNA, 25 bp, Homo sapien
tacaatctgaagaaaatatatctag

SEQ ID NO: 5695579 - DNA, 25 bp, Homo sapien
tctaatttgagaacaatttcatggg

SEQ ID NO: 5695580 - DNA, 25 bp, Homo sapien
catgggtgatcaattataagggaaa

SEQ ID NO: 5695581 - DNA, 25 bp, Homo sapien
tgagaacaatttcatgggtgatcaa

SEQ ID NO: 5695582 - DNA, 25 bp, Homo sapien
tgacttcatgatccatccaccttgg

SEQ ID NO: 5695583 - DNA, 25 bp, Homo sapien
gacttcatgatccatccaccttggc

SEQ ID NO: 5695584 - DNA, 25 bp, Homo sapien
tggtctcaaactcctcacctgactt

SEQ ID NO: 5695585 - DNA, 25 bp, Homo sapien
tcaaactcctcacctgacttcatga

SEQ ID NO: 5695586 - DNA, 25 bp, Homo sapien
aaactcctcacctgacttcatgatc

SEQ ID NO: 5695587 - DNA, 25 bp, Homo sapien
caaactcctcacctgacttcatgat

SEQ ID NO: 5695588 - DNA, 25 bp, Homo sapien
ccaaggtggatggatcatgaagtca

SEQ ID NO: 5695589 - DNA, 25 bp, Homo sapien
gccaaggtggatggatcatgaagtc

SEQ ID NO: 5695590 - DNA, 25 bp, Homo sapien
gatcatgaagtcaggtgaggagttt

SEQ ID NO: 5695591 - DNA, 25 bp, Homo sapien
aagtcaggtgaggagtttgagacca

SEQ ID NO: 5695592 - DNA, 25 bp, Homo sapien
tcatgaagtcaggtgaggagtttga

SEQ ID NO: 5695593 - DNA, 25 bp, Homo sapien
caaggtggatggatcatgaagtcag

SEQ ID NO: 5695594 - DNA, 25 bp, Homo sapien
aaacgagtctcgtgctgtctcccgg

SEQ ID NO: 5695595 - DNA, 25 bp, Homo sapien
aacgagtctcgtgctgtctcccggg

SEQ ID NO: 5695596 - DNA, 25 bp, Homo sapien
tttcttttggaaacgagtctcgtgc

SEQ ID NO: 5695597 - DNA, 25 bp, Homo sapien
cgagtctcgtgctgtctcccgggct

SEQ ID NO: 5695598 - DNA, 25 bp, Homo sapien
tcttttggaaacgagtctcgtgctg

SEQ ID NO: 5695599 - DNA, 25 bp, Homo sapien
gaaacgagtctcgtgctgtctcccg

SEQ ID NO: 5695600 - DNA, 25 bp, Homo sapien
ccgggagacagcacgagactcgttt

SEQ ID NO: 5695601 - DNA, 25 bp, Homo sapien
ggagacagcacgagactcgtttcca

SEQ ID NO: 5695602 - DNA, 25 bp, Homo sapien
gacagcacgagactcgtttccaaaa

SEQ ID NO: 5695603 - DNA, 25 bp, Homo sapien
agcacgagactcgtttccaaaagaa

SEQ ID NO: 5695604 - DNA, 25 bp, Homo sapien
agcccgggagacagcacgagactcg

SEQ ID NO: 5695605 - DNA, 25 bp, Homo sapien
gcacgagactcgtttccaaaagaaa

SEQ ID NO: 5695606 - DNA, 25 bp, Homo sapien
aattttaggaggtgtccacatgatg

SEQ ID NO: 5695607 - DNA, 25 bp, Homo sapien
gacttttagagtactgagatctttg

SEQ ID NO: 5695608 - DNA, 25 bp, Homo sapien
gctgacttttagagtactgagatct

SEQ ID NO: 5695609 - DNA, 25 bp, Homo sapien
tttaggaggtgtccacatgatggga

SEQ ID NO: 5695610 - DNA, 25 bp, Homo sapien
gaggtgtccacatgatgggaactta

SEQ ID NO: 5695611 - DNA, 25 bp, Homo sapien
taggaggtgtccacatgatgggaac

SEQ ID NO: 5695612 - DNA, 25 bp, Homo sapien
taagttcccatcatgtggacacctc

SEQ ID NO: 5695613 - DNA, 25 bp, Homo sapien
tcccatcatgtggacacctcctaaa

SEQ ID NO: 5695614 - DNA, 25 bp, Homo sapien
agatctcagtactctaaaagtcagc

SEQ ID NO: 5695615 - DNA, 25 bp, Homo sapien
caaagatctcagtactctaaaagtc

SEQ ID NO: 5695616 - DNA, 25 bp, Homo sapien
catcatgtggacacctcctaaaatt

SEQ ID NO: 5695617 - DNA, 25 bp, Homo sapien
gttcccatcatgtggacacctccta

SEQ ID NO: 5695618 - DNA, 25 bp, Homo sapien
gtatcaagttttagcagtatacagt

SEQ ID NO: 5695619 - DNA, 25 bp, Homo sapien
agggatgtcatggactcttagttga

SEQ ID NO: 5695620 - DNA, 25 bp, Homo sapien
gggatgtcatggactcttagttgat

SEQ ID NO: 5695621 - DNA, 25 bp, Homo sapien
tgagtgtatcaagttttagcagtat

SEQ ID NO: 5695622 - DNA, 25 bp, Homo sapien
ggatgtcatggactcttagttgatg

SEQ ID NO: 5695623 - DNA, 25 bp, Homo sapien
gagtgtatcaagttttagcagtata

SEQ ID NO: 5695624 - DNA, 25 bp, Homo sapien
actgtatactgctaaaacttgatac

SEQ ID NO: 5695625 - DNA, 25 bp, Homo sapien
tatactgctaaaacttgatacactc

SEQ ID NO: 5695626 - DNA, 25 bp, Homo sapien
tgtatactgctaaaacttgatacac

SEQ ID NO: 5695627 - DNA, 25 bp, Homo sapien
catcaactaagagtccatgacatcc

SEQ ID NO: 5695628 - DNA, 25 bp, Homo sapien
tcaactaagagtccatgacatccct

SEQ ID NO: 5695629 - DNA, 25 bp, Homo sapien
atcaactaagagtccatgacatccc

SEQ ID NO: 5695630 - DNA, 25 bp, Homo sapien
ctagtgaactcagcccatttattcc

SEQ ID NO: 5695631 - DNA, 25 bp, Homo sapien
tagtgaactcagcccatttattcct

SEQ ID NO: 5695632 - DNA, 25 bp, Homo sapien
tactagtgaactcagcccatttatt

SEQ ID NO: 5695633 - DNA, 25 bp, Homo sapien
actagtgaactcagcccatttattc

SEQ ID NO: 5695634 - DNA, 25 bp, Homo sapien
gaataaatgggctgagttcactagt

SEQ ID NO: 5695635 - DNA, 25 bp, Homo sapien
ggaataaatgggctgagttcactag

SEQ ID NO: 5695636 - DNA, 25 bp, Homo sapien
aggaataaatgggctgagttcacta

SEQ ID NO: 5695637 - DNA, 25 bp, Homo sapien
aataaatgggctgagttcactagta

SEQ ID NO: 5695638 - DNA, 25 bp, Homo sapien
tcaggacattactagtgaactcagc

SEQ ID NO: 5695639 - DNA, 25 bp, Homo sapien
gcccatttattcctgaaattgcaat

SEQ ID NO: 5695640 - DNA, 25 bp, Homo sapien
tggagaacttccagttgaaaataaa

SEQ ID NO: 5695641 - DNA, 25 bp, Homo sapien
tccagttgaaaataaatcaggacat

SEQ ID NO: 5695642 - DNA, 25 bp, Homo sapien
tactagtgaactcagcccatttatt

SEQ ID NO: 5695643 - DNA, 25 bp, Homo sapien
gaactcagcccatttattcctgaaa

SEQ ID NO: 5695644 - DNA, 25 bp, Homo sapien
gctgagttcactagtaatgtcctga

SEQ ID NO: 5695645 - DNA, 25 bp, Homo sapien
tcaaaaaattgcaatttcaggaata

SEQ ID NO: 5695646 - DNA, 25 bp, Homo sapien
tttattttcaactggaagttctcca

SEQ ID NO: 5695647 - DNA, 25 bp, Homo sapien
ggaataaatgggctgagttcactag

SEQ ID NO: 5695648 - DNA, 25 bp, Homo sapien
tgcaatttcaggaataaatgggctg

SEQ ID NO: 5695649 - DNA, 25 bp, Homo sapien
aataaatgggctgagttcactagta

SEQ ID NO: 5695650 - DNA, 25 bp, Homo sapien
actgtgtccagccctttcctcagat

SEQ ID NO: 5695651 - DNA, 25 bp, Homo sapien
tgtgagccactgtgtccagcccttt

SEQ ID NO: 5695652 - DNA, 25 bp, Homo sapien
cgaactcctgaactgaggtgatcta

SEQ ID NO: 5695653 - DNA, 25 bp, Homo sapien
aggtgatctactcgccttgacctcc

SEQ ID NO: 5695654 - DNA, 25 bp, Homo sapien
cctgaactgaggtgatctactcgcc

SEQ ID NO: 5695655 - DNA, 25 bp, Homo sapien
actgaggtgatctactcgccttgac

SEQ ID NO: 5695656 - DNA, 25 bp, Homo sapien
ggcgagtagatcacctcagttcagg

SEQ ID NO: 5695657 - DNA, 25 bp, Homo sapien
aaagggctggacacagtggctcaca

SEQ ID NO: 5695658 - DNA, 25 bp, Homo sapien
ggaggtcaaggcgagtagatcacct

SEQ ID NO: 5695659 - DNA, 25 bp, Homo sapien
tagatcacctcagttcaggagttcg

SEQ ID NO: 5695660 - DNA, 25 bp, Homo sapien
atctgaggaaagggctggacacagt

SEQ ID NO: 5695661 - DNA, 25 bp, Homo sapien
ggtcaaggcgagtagatcacctcag

SEQ ID NO: 5695662 - DNA, 25 bp, Homo sapien
ttggcttgtcgcgttcaaactcatg

SEQ ID NO: 5695663 - DNA, 25 bp, Homo sapien
caaactcatgcagtatatgtaagta

SEQ ID NO: 5695664 - DNA, 25 bp, Homo sapien
cgcgttcaaactcatgcagtatatg

SEQ ID NO: 5695665 - DNA, 25 bp, Homo sapien
tatatgtaagtatatggagcaaact

SEQ ID NO: 5695666 - DNA, 25 bp, Homo sapien
gcttgtcgcgttcaaactcatgcag

SEQ ID NO: 5695667 - DNA, 25 bp, Homo sapien
gtatatggagcaaactattgtatgc

SEQ ID NO: 5695668 - DNA, 25 bp, Homo sapien
catgagtttgaacgcgacaagccaa

SEQ ID NO: 5695669 - DNA, 25 bp, Homo sapien
gcatacaatagtttgctccatatac

SEQ ID NO: 5695670 - DNA, 25 bp, Homo sapien
catatactgcatgagtttgaacgcg

SEQ ID NO: 5695671 - DNA, 25 bp, Homo sapien
tagtttgctccatatacttacatat

SEQ ID NO: 5695672 - DNA, 25 bp, Homo sapien
tacttacatatactgcatgagtttg

SEQ ID NO: 5695673 - DNA, 25 bp, Homo sapien
tactgcatgagtttgaacgcgacaa

SEQ ID NO: 5695674 - DNA, 25 bp, Homo sapien
tgttttatctgtgtataaataaggt

SEQ ID NO: 5695675 - DNA, 25 bp, Homo sapien
gtgttttatctgtgtataaataagg

SEQ ID NO: 5695676 - DNA, 25 bp, Homo sapien
ccttatttatacacagataaaacac

SEQ ID NO: 5695677 - DNA, 25 bp, Homo sapien
accttatttatacacagataaaaca

SEQ ID NO: 5695678 - DNA, 25 bp, Homo sapien
tgttttatctgtgtataaataaggt

SEQ ID NO: 5695679 - DNA, 25 bp, Homo sapien
gtgtccatcagtgggcatcttctct

SEQ ID NO: 5695680 - DNA, 25 bp, Homo sapien
tctctttctgttttctgggtgtggg

SEQ ID NO: 5695681 - DNA, 25 bp, Homo sapien
taagtgtactgtgttttatctgtgt

SEQ ID NO: 5695682 - DNA, 25 bp, Homo sapien
ttgtgtccatcagtgggcatcttct

SEQ ID NO: 5695683 - DNA, 25 bp, Homo sapien
ccatcagtgggcatcttctctttct

SEQ ID NO: 5695684 - DNA, 25 bp, Homo sapien
ccttatttatacacagataaaacac

SEQ ID NO: 5695685 - DNA, 25 bp, Homo sapien
ccccacacccagaaaacagaaagag

SEQ ID NO: 5695686 - DNA, 25 bp, Homo sapien
agaaagagaagatgcccactgatgg

SEQ ID NO: 5695687 - DNA, 25 bp, Homo sapien
cagataaaacacagtacacttaaac

SEQ ID NO: 5695688 - DNA, 25 bp, Homo sapien
gagaagatgcccactgatggacaca

SEQ ID NO: 5695689 - DNA, 25 bp, Homo sapien
tatacacagataaaacacagtacac

SEQ ID NO: 5695690 - DNA, 25 bp, Homo sapien
gcctgagcgagaaagcgaaactatg

SEQ ID NO: 5695691 - DNA, 25 bp, Homo sapien
agcctgagcgagaaagcgaaactat

SEQ ID NO: 5695692 - DNA, 25 bp, Homo sapien
atagtttcgctttctcgctcaggct

SEQ ID NO: 5695693 - DNA, 25 bp, Homo sapien
catagtttcgctttctcgctcaggc

SEQ ID NO: 5695694 - DNA, 25 bp, Homo sapien
gagcgagaaagcgaaactatgtctc

SEQ ID NO: 5695695 - DNA, 25 bp, Homo sapien
gcctgagcgagaaagcgaaactatg

SEQ ID NO: 5695696 - DNA, 25 bp, Homo sapien
cctgagcgagaaagcgaaactatgt

SEQ ID NO: 5695697 - DNA, 25 bp, Homo sapien
agcgagaaagcgaaactatgtctca

SEQ ID NO: 5695698 - DNA, 25 bp, Homo sapien
ctgagcgagaaagcgaaactatgtc

SEQ ID NO: 5695699 - DNA, 25 bp, Homo sapien
agcctgagcgagaaagcgaaactat

SEQ ID NO: 5695700 - DNA, 25 bp, Homo sapien
acatagtttcgctttctcgctcagg

SEQ ID NO: 5695701 - DNA, 25 bp, Homo sapien
gagacatagtttcgctttctcgctc

SEQ ID NO: 5695702 - DNA, 25 bp, Homo sapien
tgagacatagtttcgctttctcgct

SEQ ID NO: 5695703 - DNA, 25 bp, Homo sapien
atagtttcgctttctcgctcaggct

SEQ ID NO: 5695704 - DNA, 25 bp, Homo sapien
catagtttcgctttctcgctcaggc

SEQ ID NO: 5695705 - DNA, 25 bp, Homo sapien
gacatagtttcgctttctcgctcag

SEQ ID NO: 5695706 - DNA, 25 bp, Homo sapien
agagttgagttgaagtggtatctga

SEQ ID NO: 5695707 - DNA, 25 bp, Homo sapien
gggtggagagtaccaaagacagact

SEQ ID NO: 5695708 - DNA, 25 bp, Homo sapien
ccaaagacagacttaatgttagtct

SEQ ID NO: 5695709 - DNA, 25 bp, Homo sapien
tatctgagggtggagagtaccaaag

SEQ ID NO: 5695710 - DNA, 25 bp, Homo sapien
cacttgaatggtaaagaacagacta

SEQ ID NO: 5695711 - DNA, 25 bp, Homo sapien
gttagtctcaggaacacttgaatgg

SEQ ID NO: 5695712 - DNA, 25 bp, Homo sapien
gactaacattaagtctgtctttggt

SEQ ID NO: 5695713 - DNA, 25 bp, Homo sapien
tttggtactctccaccctcagatac

SEQ ID NO: 5695714 - DNA, 25 bp, Homo sapien
cattcaagtgttcctgagactaaca

SEQ ID NO: 5695715 - DNA, 25 bp, Homo sapien
tcagataccacttcaactcaactct

SEQ ID NO: 5695716 - DNA, 25 bp, Homo sapien
tagtctgttctttaccattcaagtg

SEQ ID NO: 5695717 - DNA, 25 bp, Homo sapien
agtctgtctttggtactctccaccc

SEQ ID NO: 5695718 - DNA, 25 bp, Homo sapien
atagtaactgagtgaacagtcagta

SEQ ID NO: 5695719 - DNA, 25 bp, Homo sapien
taattcggaatgagctgaaccattc

SEQ ID NO: 5695720 - DNA, 25 bp, Homo sapien
taatagtaactgagtgaacagtcag

SEQ ID NO: 5695721 - DNA, 25 bp, Homo sapien
tcggaatgagctgaaccattcttgg

SEQ ID NO: 5695722 - DNA, 25 bp, Homo sapien
tttgtaataattcggaatgagctga

SEQ ID NO: 5695723 - DNA, 25 bp, Homo sapien
taataattcggaatgagctgaacca

SEQ ID NO: 5695724 - DNA, 25 bp, Homo sapien
tgactgttcactcagttactattac

SEQ ID NO: 5695725 - DNA, 25 bp, Homo sapien
gaatggttcagctcattccgaatta

SEQ ID NO: 5695726 - DNA, 25 bp, Homo sapien
ccaagaatggttcagctcattccga

SEQ ID NO: 5695727 - DNA, 25 bp, Homo sapien
tactgactgttcactcagttactat

SEQ ID NO: 5695728 - DNA, 25 bp, Homo sapien
tcagctcattccgaattattacaaa

SEQ ID NO: 5695729 - DNA, 25 bp, Homo sapien
ggttcagctcattccgaattattac

SEQ ID NO: 5695730 - DNA, 25 bp, Homo sapien
cctttgaggatgatttgaggttgtc

SEQ ID NO: 5695731 - DNA, 25 bp, Homo sapien
tgaggatgatttgaggttgtcacac

SEQ ID NO: 5695732 - DNA, 25 bp, Homo sapien
atgatttgaggttgtcacacttcac

SEQ ID NO: 5695733 - DNA, 25 bp, Homo sapien
tgtcacacttcactatgttaatttg

SEQ ID NO: 5695734 - DNA, 25 bp, Homo sapien
aatttgtgaattggcatatatttta

SEQ ID NO: 5695735 - DNA, 25 bp, Homo sapien
ggatgatttgaggttgtcacacttc

SEQ ID NO: 5695736 - DNA, 25 bp, Homo sapien
taaaatatatgccaattcacaaatt

SEQ ID NO: 5695737 - DNA, 25 bp, Homo sapien
gaagtgtgacaacctcaaatcatcc

SEQ ID NO: 5695738 - DNA, 25 bp, Homo sapien
caaattaacatagtgaagtgtgaca

SEQ ID NO: 5695739 - DNA, 25 bp, Homo sapien
gtgaagtgtgacaacctcaaatcat

SEQ ID NO: 5695740 - DNA, 25 bp, Homo sapien
gtgtgacaacctcaaatcatcctca

SEQ ID NO: 5695741 - DNA, 25 bp, Homo sapien
gacaacctcaaatcatcctcaaagg

SEQ ID NO: 5695742 - DNA, 25 bp, Homo sapien
attttacgtgtagaacagctaatcc

SEQ ID NO: 5695743 - DNA, 25 bp, Homo sapien
aaagcagtcgttaacccaggatatt

SEQ ID NO: 5695744 - DNA, 25 bp, Homo sapien
cccaggatattttacgtgtagaaca

SEQ ID NO: 5695745 - DNA, 25 bp, Homo sapien
gaaagcagtcgttaacccaggatat

SEQ ID NO: 5695746 - DNA, 25 bp, Homo sapien
caggatattttacgtgtagaacagc

SEQ ID NO: 5695747 - DNA, 25 bp, Homo sapien
cagaaagcagtcgttaacccaggat

SEQ ID NO: 5695748 - DNA, 25 bp, Homo sapien
tggtgtgtgtaaaggttgtttaagc

SEQ ID NO: 5695749 - DNA, 25 bp, Homo sapien
gcttaaacaacctttacacacacca

SEQ ID NO: 5695750 - DNA, 25 bp, Homo sapien
gctgttctacacgtaaaatatcctg

SEQ ID NO: 5695751 - DNA, 25 bp, Homo sapien
aatatcctgggttaacgactgcttt

SEQ ID NO: 5695752 - DNA, 25 bp, Homo sapien
tatcctgggttaacgactgctttct

SEQ ID NO: 5695753 - DNA, 25 bp, Homo sapien
ggattagctgttctacacgtaaaat

SEQ ID NO: 5695754 - DNA, 25 bp, Homo sapien
tgttctacacgtaaaatatcctggg

SEQ ID NO: 5695755 - DNA, 25 bp, Homo sapien
tagctgttctacacgtaaaatatcc

SEQ ID NO: 5695756 - DNA, 25 bp, Homo sapien
gggtaggtagctgggcatacgtgtt

SEQ ID NO: 5695757 - DNA, 25 bp, Homo sapien
agggtaggtagctgggcatacgtgt

SEQ ID NO: 5695758 - DNA, 25 bp, Homo sapien
cagggtaggtagctgggcatacgtg

SEQ ID NO: 5695759 - DNA, 25 bp, Homo sapien
gcagggtaggtagctgggcatacgt

SEQ ID NO: 5695760 - DNA, 25 bp, Homo sapien
acacgtatgcccagctacctaccct

SEQ ID NO: 5695761 - DNA, 25 bp, Homo sapien
cacgtatgcccagctacctaccctg

SEQ ID NO: 5695762 - DNA, 25 bp, Homo sapien
acgtatgcccagctacctaccctgc

SEQ ID NO: 5695763 - DNA, 25 bp, Homo sapien
aacacgtatgcccagctacctaccc

SEQ ID NO: 5695764 - DNA, 25 bp, Homo sapien
ctgggcatacgtgttacaaattgta

SEQ ID NO: 5695765 - DNA, 25 bp, Homo sapien
tagctgggcatacgtgttacaaatt

SEQ ID NO: 5695766 - DNA, 25 bp, Homo sapien
taggtagctgggcatacgtgttaca

SEQ ID NO: 5695767 - DNA, 25 bp, Homo sapien
tgtttggtaggcagtgggtggcagg

SEQ ID NO: 5695768 - DNA, 25 bp, Homo sapien
gcagggtaggtagctgggcatacgt

SEQ ID NO: 5695769 - DNA, 25 bp, Homo sapien
ggtagctgggcatacgtgttacaaa

SEQ ID NO: 5695770 - DNA, 25 bp, Homo sapien
atttgtaacacgtatgcccagctac

SEQ ID NO: 5695771 - DNA, 25 bp, Homo sapien
cctgccacccactgcctaccaaaca

SEQ ID NO: 5695772 - DNA, 25 bp, Homo sapien
tgtaacacgtatgcccagctaccta

SEQ ID NO: 5695773 - DNA, 25 bp, Homo sapien
tacaatttgtaacacgtatgcccag

SEQ ID NO: 5695774 - DNA, 25 bp, Homo sapien
caatttgtaacacgtatgcccagct

SEQ ID NO: 5695775 - DNA, 25 bp, Homo sapien
tttgtaacacgtatgcccagctacc

SEQ ID NO: 5695776 - DNA, 25 bp, Homo sapien
ctcgagtgctgtagcatgactggga

SEQ ID NO: 5695777 - DNA, 25 bp, Homo sapien
tgactcgagtgctgtagcatgactg

SEQ ID NO: 5695778 - DNA, 25 bp, Homo sapien
gactcgagtgctgtagcatgactgg

SEQ ID NO: 5695779 - DNA, 25 bp, Homo sapien
actcgagtgctgtagcatgactggg

SEQ ID NO: 5695780 - DNA, 25 bp, Homo sapien
tcgagtgctgtagcatgactgggaa

SEQ ID NO: 5695781 - DNA, 25 bp, Homo sapien
gagtgctgtagcatgactgggaagg

SEQ ID NO: 5695782 - DNA, 25 bp, Homo sapien
atgggctttttagaacaaggagaag

SEQ ID NO: 5695783 - DNA, 25 bp, Homo sapien
tgctgtagcatgactgggaaggtaa

SEQ ID NO: 5695784 - DNA, 25 bp, Homo sapien
ttaccttcccagtcatgctacagca

SEQ ID NO: 5695785 - DNA, 25 bp, Homo sapien
cttctccttgttctaaaaagcccat

SEQ ID NO: 5695786 - DNA, 25 bp, Homo sapien
cccagtcatgctacagcactcgagt

SEQ ID NO: 5695787 - DNA, 25 bp, Homo sapien
tcccagtcatgctacagcactcgag

SEQ ID NO: 5695788 - DNA, 25 bp, Homo sapien
ccagtcatgctacagcactcgagtc

SEQ ID NO: 5695789 - DNA, 25 bp, Homo sapien
ttcccagtcatgctacagcactcga

SEQ ID NO: 5695790 - DNA, 25 bp, Homo sapien
cagtcatgctacagcactcgagtca

SEQ ID NO: 5695791 - DNA, 25 bp, Homo sapien
ccttcccagtcatgctacagcactc

SEQ ID NO: 5695792 - DNA, 25 bp, Homo sapien
tggtgtgtgtaaaggttgtttaagc

SEQ ID NO: 5695793 - DNA, 25 bp, Homo sapien
gcttaaacaacctttacacacacca

SEQ ID NO: 5695794 - DNA, 25 bp, Homo sapien
atgggctttttagaacaaggagaag

SEQ ID NO: 5695795 - DNA, 25 bp, Homo sapien
tgctgtagcatgactgggaaggtaa

SEQ ID NO: 5695796 - DNA, 25 bp, Homo sapien
cttctccttgttctaaaaagcccat

SEQ ID NO: 5695797 - DNA, 25 bp, Homo sapien
ttaccttcccagtcatgctacagca

SEQ ID NO: 5695798 - DNA, 25 bp, Homo sapien
cccacactcatctagttaatggttt

SEQ ID NO: 5695799 - DNA, 25 bp, Homo sapien
tacccacactcatctagttaatggt

SEQ ID NO: 5695800 - DNA, 25 bp, Homo sapien
taatggtttgaggtggaatttggaa

SEQ ID NO: 5695801 - DNA, 25 bp, Homo sapien
atggtttgaggtggaatttggaatt

SEQ ID NO: 5695802 - DNA, 25 bp, Homo sapien
ccacactcatctagttaatggtttg

SEQ ID NO: 5695803 - DNA, 25 bp, Homo sapien
aatacccacactcatctagttaatg

SEQ ID NO: 5695804 - DNA, 25 bp, Homo sapien
aattccaaattccacctcaaaccat

SEQ ID NO: 5695805 - DNA, 25 bp, Homo sapien
ccattaactagatgagtgtgggtat

SEQ ID NO: 5695806 - DNA, 25 bp, Homo sapien
caaattccacctcaaaccattaact

SEQ ID NO: 5695807 - DNA, 25 bp, Homo sapien
caaaccattaactagatgagtgtgg

SEQ ID NO: 5695808 - DNA, 25 bp, Homo sapien
tccaaattccacctcaaaccattaa

SEQ ID NO: 5695809 - DNA, 25 bp, Homo sapien
aaccattaactagatgagtgtgggt

SEQ ID NO: 5695810 - DNA, 25 bp, Homo sapien
tgggtaccggtaatcccagccgctc

SEQ ID NO: 5695811 - DNA, 25 bp, Homo sapien
taccggtaatcccagccgctcagga

SEQ ID NO: 5695812 - DNA, 25 bp, Homo sapien
ctgggtaccggtaatcccagccgct

SEQ ID NO: 5695813 - DNA, 25 bp, Homo sapien
gggtaccggtaatcccagccgctca

SEQ ID NO: 5695814 - DNA, 25 bp, Homo sapien
ggtaccggtaatcccagccgctcag

SEQ ID NO: 5695815 - DNA, 25 bp, Homo sapien
tctgggtaccggtaatcccagccgc

SEQ ID NO: 5695816 - DNA, 25 bp, Homo sapien
tcctgagcggctgggattaccggta

SEQ ID NO: 5695817 - DNA, 25 bp, Homo sapien
agcggctgggattaccggtacccag

SEQ ID NO: 5695818 - DNA, 25 bp, Homo sapien
gagcggctgggattaccggtaccca

SEQ ID NO: 5695819 - DNA, 25 bp, Homo sapien
gcggctgggattaccggtacccaga

SEQ ID NO: 5695820 - DNA, 25 bp, Homo sapien
tgagcggctgggattaccggtaccc

SEQ ID NO: 5695821 - DNA, 25 bp, Homo sapien
ctgagcggctgggattaccggtacc

SEQ ID NO: 5695822 - DNA, 25 bp, Homo sapien
ggaggcttgagttgggcaggccatg

SEQ ID NO: 5695823 - DNA, 25 bp, Homo sapien
cttgagttgggcaggccatgaggtc

SEQ ID NO: 5695824 - DNA, 25 bp, Homo sapien
aggcttgagttgggcaggccatgag

SEQ ID NO: 5695825 - DNA, 25 bp, Homo sapien
gggaggcttgagttgggcaggccat

SEQ ID NO: 5695826 - DNA, 25 bp, Homo sapien
gaggcttgagttgggcaggccatga

SEQ ID NO: 5695827 - DNA, 25 bp, Homo sapien
gcttgagttgggcaggccatgaggt

SEQ ID NO: 5695828 - DNA, 25 bp, Homo sapien
tcatggcctgcccaactcaagcctc

SEQ ID NO: 5695829 - DNA, 25 bp, Homo sapien
ctcatggcctgcccaactcaagcct

SEQ ID NO: 5695830 - DNA, 25 bp, Homo sapien
catggcctgcccaactcaagcctcc

SEQ ID NO: 5695831 - DNA, 25 bp, Homo sapien
atggcctgcccaactcaagcctccc

SEQ ID NO: 5695832 - DNA, 25 bp, Homo sapien
acctcatggcctgcccaactcaagc

SEQ ID NO: 5695833 - DNA, 25 bp, Homo sapien
gacctcatggcctgcccaactcaag

SEQ ID NO: 5695834 - DNA, 25 bp, Homo sapien
ggaggcttgagttgggcaggccatg

SEQ ID NO: 5695835 - DNA, 25 bp, Homo sapien
cttgagttgggcaggccatgaggtc

SEQ ID NO: 5695836 - DNA, 25 bp, Homo sapien
gggaggcttgagttgggcaggccat

SEQ ID NO: 5695837 - DNA, 25 bp, Homo sapien
agttgggcaggccatgaggtcagga

SEQ ID NO: 5695838 - DNA, 25 bp, Homo sapien
gaggcttgagttgggcaggccatga

SEQ ID NO: 5695839 - DNA, 25 bp, Homo sapien
gcttgagttgggcaggccatgaggt

SEQ ID NO: 5695840 - DNA, 25 bp, Homo sapien
tcatggcctgcccaactcaagcctc

SEQ ID NO: 5695841 - DNA, 25 bp, Homo sapien
atggcctgcccaactcaagcctccc

SEQ ID NO: 5695842 - DNA, 25 bp, Homo sapien
tgacctcatggcctgcccaactcaa

SEQ ID NO: 5695843 - DNA, 25 bp, Homo sapien
tcctgacctcatggcctgcccaact

SEQ ID NO: 5695844 - DNA, 25 bp, Homo sapien
acctcatggcctgcccaactcaagc

SEQ ID NO: 5695845 - DNA, 25 bp, Homo sapien
gacctcatggcctgcccaactcaag

SEQ ID NO: 5695846 - DNA, 25 bp, Homo sapien
ggacctggcctgagtcagttttcag

SEQ ID NO: 5695847 - DNA, 25 bp, Homo sapien
gcctgagtcagttttcagttggtca

SEQ ID NO: 5695848 - DNA, 25 bp, Homo sapien
gatgagctgcttttgtataaaaagg

SEQ ID NO: 5695849 - DNA, 25 bp, Homo sapien
acaggcgtcagccattggacctggc

SEQ ID NO: 5695850 - DNA, 25 bp, Homo sapien
tcagccattggacctggcctgagtc

SEQ ID NO: 5695851 - DNA, 25 bp, Homo sapien
tcagttggtcatttgatgagctgct

SEQ ID NO: 5695852 - DNA, 25 bp, Homo sapien
gactcaggccaggtccaatggctga

SEQ ID NO: 5695853 - DNA, 25 bp, Homo sapien
gctcatcaaatgaccaactgaaaac

SEQ ID NO: 5695854 - DNA, 25 bp, Homo sapien
tcttccctttttatacaaaagcagc

SEQ ID NO: 5695855 - DNA, 25 bp, Homo sapien
tacaaaagcagctcatcaaatgacc

SEQ ID NO: 5695856 - DNA, 25 bp, Homo sapien
gccaggtccaatggctgacgcctgt

SEQ ID NO: 5695857 - DNA, 25 bp, Homo sapien
caactgaaaactgactcaggccagg

SEQ ID NO: 5695858 - DNA, 25 bp, Homo sapien
tggctaattgtaacctcagcctccc

SEQ ID NO: 5695859 - DNA, 25 bp, Homo sapien
cagtcttggctaattgtaacctcag

SEQ ID NO: 5695860 - DNA, 25 bp, Homo sapien
gtcttggctaattgtaacctcagcc

SEQ ID NO: 5695861 - DNA, 25 bp, Homo sapien
tgcagtcttggctaattgtaacctc

SEQ ID NO: 5695862 - DNA, 25 bp, Homo sapien
tagtgcagtcttggctaattgtaac

SEQ ID NO: 5695863 - DNA, 25 bp, Homo sapien
gcagtcttggctaattgtaacctca

SEQ ID NO: 5695864 - DNA, 25 bp, Homo sapien
ctgaggttacaattagccaagactg

SEQ ID NO: 5695865 - DNA, 25 bp, Homo sapien
gttacaattagccaagactgcacta

SEQ ID NO: 5695866 - DNA, 25 bp, Homo sapien
ggctgaggttacaattagccaagac

SEQ ID NO: 5695867 - DNA, 25 bp, Homo sapien
gggaggctgaggttacaattagcca

SEQ ID NO: 5695868 - DNA, 25 bp, Homo sapien
tgaggttacaattagccaagactgc

SEQ ID NO: 5695869 - DNA, 25 bp, Homo sapien
gaggttacaattagccaagactgca

SEQ ID NO: 5695870 - DNA, 25 bp, Homo sapien
ggttattcatgtaatggtgttcagc

SEQ ID NO: 5695871 - DNA, 25 bp, Homo sapien
gaaggttattcatgtaatggtgttc

SEQ ID NO: 5695872 - DNA, 25 bp, Homo sapien
cctgaaggttattcatgtaatggtg

SEQ ID NO: 5695873 - DNA, 25 bp, Homo sapien
gttattcatgtaatggtgttcagca

SEQ ID NO: 5695874 - DNA, 25 bp, Homo sapien
tatatggtttcaaagtcagaattgt

SEQ ID NO: 5695875 - DNA, 25 bp, Homo sapien
tgaggttaatgtaccaaaacctgaa

SEQ ID NO: 5695876 - DNA, 25 bp, Homo sapien
tgctgaacaccattacatgaataac

SEQ ID NO: 5695877 - DNA, 25 bp, Homo sapien
caattctgactttgaaaccatataa

SEQ ID NO: 5695878 - DNA, 25 bp, Homo sapien
caccattacatgaataaccttcagg

SEQ ID NO: 5695879 - DNA, 25 bp, Homo sapien
tgaaaccatataaagtgtttcaaaa

SEQ ID NO: 5695880 - DNA, 25 bp, Homo sapien
tgaacaccattacatgaataacctt

SEQ ID NO: 5695881 - DNA, 25 bp, Homo sapien
ttcaggttttggtacattaacctca

SEQ ID NO: 5695882 - DNA, 25 bp, Homo sapien
tattgactcaaagcatggtaggtta

SEQ ID NO: 5695883 - DNA, 25 bp, Homo sapien
gactcaaagcatggtaggttagagt

SEQ ID NO: 5695884 - DNA, 25 bp, Homo sapien
tgactcaaagcatggtaggttagag

SEQ ID NO: 5695885 - DNA, 25 bp, Homo sapien
ttgactcaaagcatggtaggttaga

SEQ ID NO: 5695886 - DNA, 25 bp, Homo sapien
attgactcaaagcatggtaggttag

SEQ ID NO: 5695887 - DNA, 25 bp, Homo sapien
tctaacctaccatgctttgagtcaa

SEQ ID NO: 5695888 - DNA, 25 bp, Homo sapien
ctaacctaccatgctttgagtcaat

SEQ ID NO: 5695889 - DNA, 25 bp, Homo sapien
taacctaccatgctttgagtcaata

SEQ ID NO: 5695890 - DNA, 25 bp, Homo sapien
actctaacctaccatgctttgagtc

SEQ ID NO: 5695891 - DNA, 25 bp, Homo sapien
ctctaacctaccatgctttgagtca

SEQ ID NO: 5695892 - DNA, 25 bp, Homo sapien
catagtagaatgtatacaaagaata

SEQ ID NO: 5695893 - DNA, 25 bp, Homo sapien
tctaacctaccatgctttgagtcaa

SEQ ID NO: 5695894 - DNA, 25 bp, Homo sapien
gctttgagtcaatatacatagtaga

SEQ ID NO: 5695895 - DNA, 25 bp, Homo sapien
taacctaccatgctttgagtcaata

SEQ ID NO: 5695896 - DNA, 25 bp, Homo sapien
caaagaattgtttcacataactcta

SEQ ID NO: 5695897 - DNA, 25 bp, Homo sapien
tcacataactctaacctaccatgct

SEQ ID NO: 5695898 - DNA, 25 bp, Homo sapien
gaatccagtgtccacatgtttattt

SEQ ID NO: 5695899 - DNA, 25 bp, Homo sapien
acctatgatttggtttattcaagcc

SEQ ID NO: 5695900 - DNA, 25 bp, Homo sapien
atttggtttattcaagccagaatcc

SEQ ID NO: 5695901 - DNA, 25 bp, Homo sapien
actagatgtctgttttaacttctca

SEQ ID NO: 5695902 - DNA, 25 bp, Homo sapien
ttttattagttgtactagatgtctg

SEQ ID NO: 5695903 - DNA, 25 bp, Homo sapien
tatgatttggtttattcaagccaga

SEQ ID NO: 5695904 - DNA, 25 bp, Homo sapien
cagacatctagtacaactaataaaa

SEQ ID NO: 5695905 - DNA, 25 bp, Homo sapien
tctggcttgaataaaccaaatcata

SEQ ID NO: 5695906 - DNA, 25 bp, Homo sapien
aataaacatgtggacactggattct

SEQ ID NO: 5695907 - DNA, 25 bp, Homo sapien
tgagaagttaaaacagacatctagt

SEQ ID NO: 5695908 - DNA, 25 bp, Homo sapien
ggattctggcttgaataaaccaaat

SEQ ID NO: 5695909 - DNA, 25 bp, Homo sapien
ggcttgaataaaccaaatcataggt

SEQ ID NO: 5695910 - DNA, 25 bp, Homo sapien
ttgcctaaatggttgtgtcctgccc

SEQ ID NO: 5695911 - DNA, 25 bp, Homo sapien
ggaggagccctctagtgttgattgc

SEQ ID NO: 5695912 - DNA, 25 bp, Homo sapien
gttgattgcttgtctccccattggg

SEQ ID NO: 5695913 - DNA, 25 bp, Homo sapien
ctagtgttgattgcttgtctcccca

SEQ ID NO: 5695914 - DNA, 25 bp, Homo sapien
tctccccattgggatttcactccat

SEQ ID NO: 5695915 - DNA, 25 bp, Homo sapien
aacgttgcctaaatggttgtgtcct

SEQ ID NO: 5695916 - DNA, 25 bp, Homo sapien
aatcaacactagagggctcctccag

SEQ ID NO: 5695917 - DNA, 25 bp, Homo sapien
gggcaggacacaaccatttaggcaa

SEQ ID NO: 5695918 - DNA, 25 bp, Homo sapien
atggagtgaaatcccaatggggaga

SEQ ID NO: 5695919 - DNA, 25 bp, Homo sapien
gcaatcaacactagagggctcctcc

SEQ ID NO: 5695920 - DNA, 25 bp, Homo sapien
caggacacaaccatttaggcaacgt

SEQ ID NO: 5695921 - DNA, 25 bp, Homo sapien
cccaatggggagacaagcaatcaac

SEQ ID NO: 5695922 - DNA, 25 bp, Homo sapien
tctggatattgcgactgtttagcct

SEQ ID NO: 5695923 - DNA, 25 bp, Homo sapien
tattgcgactgtttagcctaataaa

SEQ ID NO: 5695924 - DNA, 25 bp, Homo sapien
agtaaaggatattcttcattgtacc

SEQ ID NO: 5695925 - DNA, 25 bp, Homo sapien
gttataattggctaagtaaaggata

SEQ ID NO: 5695926 - DNA, 25 bp, Homo sapien
cattaggcttatagttataattggc

SEQ ID NO: 5695927 - DNA, 25 bp, Homo sapien
gatattctggatattgcgactgttt

SEQ ID NO: 5695928 - DNA, 25 bp, Homo sapien
ggtacaatgaagaatatcctttact

SEQ ID NO: 5695929 - DNA, 25 bp, Homo sapien
gccaattataactataagcctaatg

SEQ ID NO: 5695930 - DNA, 25 bp, Homo sapien
tttattaggctaaacagtcgcaata

SEQ ID NO: 5695931 - DNA, 25 bp, Homo sapien
taggctaaacagtcgcaatatccag

SEQ ID NO: 5695932 - DNA, 25 bp, Homo sapien
tatcctttacttagccaattataac

SEQ ID NO: 5695933 - DNA, 25 bp, Homo sapien
taaacagtcgcaatatccagaatat

SEQ ID NO: 5695934 - DNA, 25 bp, Homo sapien
ttattgatggcagggaatagttagc

SEQ ID NO: 5695935 - DNA, 25 bp, Homo sapien
tacagaaccggtgaaactcaataaa

SEQ ID NO: 5695936 - DNA, 25 bp, Homo sapien
caacgtgaatcaagattattgatgg

SEQ ID NO: 5695937 - DNA, 25 bp, Homo sapien
gcatgacctgtaatgtgaaaaacag

SEQ ID NO: 5695938 - DNA, 25 bp, Homo sapien
ggtgaaactcaataaaagcaacgtg

SEQ ID NO: 5695939 - DNA, 25 bp, Homo sapien
tggcagggaatagttagcatgacct

SEQ ID NO: 5695940 - DNA, 25 bp, Homo sapien
tgtttttcacattacaggtcatgct

SEQ ID NO: 5695941 - DNA, 25 bp, Homo sapien
tttattgagtttcaccggttctgta

SEQ ID NO: 5695942 - DNA, 25 bp, Homo sapien
gctaactattccctgccatcaataa

SEQ ID NO: 5695943 - DNA, 25 bp, Homo sapien
cacgttgcttttattgagtttcacc

SEQ ID NO: 5695944 - DNA, 25 bp, Homo sapien
aggtcatgctaactattccctgcca

SEQ ID NO: 5695945 - DNA, 25 bp, Homo sapien
catcaataatcttgattcacgttgc

SEQ ID NO: 5695946 - DNA, 25 bp, Homo sapien
gaatggcttgggacagaatttgacg

SEQ ID NO: 5695947 - DNA, 25 bp, Homo sapien
ggacagaatttgacgtttgctatgc

SEQ ID NO: 5695948 - DNA, 25 bp, Homo sapien
aatttgacgtttgctatgctgtgtg

SEQ ID NO: 5695949 - DNA, 25 bp, Homo sapien
gcttgggacagaatttgacgtttgc

SEQ ID NO: 5695950 - DNA, 25 bp, Homo sapien
catattaatctagctaatgaatggc

SEQ ID NO: 5695951 - DNA, 25 bp, Homo sapien
gggtaagtgtaagctatccatatta

SEQ ID NO: 5695952 - DNA, 25 bp, Homo sapien
cattagctagattaatatggatagc

SEQ ID NO: 5695953 - DNA, 25 bp, Homo sapien
taatatggatagcttacacttaccc

SEQ ID NO: 5695954 - DNA, 25 bp, Homo sapien
aaacgtcaaattctgtcccaagcca

SEQ ID NO: 5695955 - DNA, 25 bp, Homo sapien
cacacagcatagcaaacgtcaaatt

SEQ ID NO: 5695956 - DNA, 25 bp, Homo sapien
gccattcattagctagattaatatg

SEQ ID NO: 5695957 - DNA, 25 bp, Homo sapien
gcatagcaaacgtcaaattctgtcc

SEQ ID NO: 5695958 - DNA, 25 bp, Homo sapien
cactggctagttttatcatcatcac

SEQ ID NO: 5695959 - DNA, 25 bp, Homo sapien
taatttgattcatgccgtgttccac

SEQ ID NO: 5695960 - DNA, 25 bp, Homo sapien
gattcatgccgtgttccactggcta

SEQ ID NO: 5695961 - DNA, 25 bp, Homo sapien
catgccgtgttccactggctagttt

SEQ ID NO: 5695962 - DNA, 25 bp, Homo sapien
caccatccgatattattaaatgtcc

SEQ ID NO: 5695963 - DNA, 25 bp, Homo sapien
tccccaatctttaatttgattcatg

SEQ ID NO: 5695964 - DNA, 25 bp, Homo sapien
taataatatcggatggtgatgatga

SEQ ID NO: 5695965 - DNA, 25 bp, Homo sapien
aaaactagccagtggaacacggcat

SEQ ID NO: 5695966 - DNA, 25 bp, Homo sapien
ggacatttaataatatcggatggtg

SEQ ID NO: 5695967 - DNA, 25 bp, Homo sapien
gtggaacacggcatgaatcaaatta

SEQ ID NO: 5695968 - DNA, 25 bp, Homo sapien
tagccagtggaacacggcatgaatc

SEQ ID NO: 5695969 - DNA, 25 bp, Homo sapien
gtgatgatgataaaactagccagtg

SEQ ID NO: 5695970 - DNA, 25 bp, Homo sapien
taaataatgcgtggaaagttgtgta

SEQ ID NO: 5695971 - DNA, 25 bp, Homo sapien
ggattgagcctccatcacatacata

SEQ ID NO: 5695972 - DNA, 25 bp, Homo sapien
tggtaggattgagcctccatcacat

SEQ ID NO: 5695973 - DNA, 25 bp, Homo sapien
taatgcgtggaaagttgtgtatttt

SEQ ID NO: 5695974 - DNA, 25 bp, Homo sapien
gaatctgcatatggttatggtagga

SEQ ID NO: 5695975 - DNA, 25 bp, Homo sapien
catatggttatggtaggattgagcc

SEQ ID NO: 5695976 - DNA, 25 bp, Homo sapien
tatgtatgtgatggaggctcaatcc

SEQ ID NO: 5695977 - DNA, 25 bp, Homo sapien
aaaatacacaactttccacgcatta

SEQ ID NO: 5695978 - DNA, 25 bp, Homo sapien
ggctcaatcctaccataaccatatg

SEQ ID NO: 5695979 - DNA, 25 bp, Homo sapien
tcctaccataaccatatgcagattc

SEQ ID NO: 5695980 - DNA, 25 bp, Homo sapien
cacaactttccacgcattatttaaa

SEQ ID NO: 5695981 - DNA, 25 bp, Homo sapien
atgtgatggaggctcaatcctacca

SEQ ID NO: 5695982 - DNA, 25 bp, Homo sapien
cttgttcaagattgggggttggagt

SEQ ID NO: 5695983 - DNA, 25 bp, Homo sapien
tcttgttcaagattgggggttggag

SEQ ID NO: 5695984 - DNA, 25 bp, Homo sapien
ttgttcaagattgggggttggagtg

SEQ ID NO: 5695985 - DNA, 25 bp, Homo sapien
ctccaacccccaatcttgaacaaga

SEQ ID NO: 5695986 - DNA, 25 bp, Homo sapien
actccaacccccaatcttgaacaag

SEQ ID NO: 5695987 - DNA, 25 bp, Homo sapien
cactccaacccccaatcttgaacaa

SEQ ID NO: 5695988 - DNA, 25 bp, Homo sapien
caggaaacaaaatgctaaaagaatg

SEQ ID NO: 5695989 - DNA, 25 bp, Homo sapien
gaaggggaaatcaatcttaagaatg

SEQ ID NO: 5695990 - DNA, 25 bp, Homo sapien
gaatgtttttaaatcttgttcaaga

SEQ ID NO: 5695991 - DNA, 25 bp, Homo sapien
gaaatcaatcttaagaatgttttta

SEQ ID NO: 5695992 - DNA, 25 bp, Homo sapien
ggaagaggcaggaaacaaaatgcta

SEQ ID NO: 5695993 - DNA, 25 bp, Homo sapien
atcttgttcaagattgggggttgga

SEQ ID NO: 5695994 - DNA, 25 bp, Homo sapien
cattcttaagattgatttccccttc

SEQ ID NO: 5695995 - DNA, 25 bp, Homo sapien
tccaacccccaatcttgaacaagat

SEQ ID NO: 5695996 - DNA, 25 bp, Homo sapien
tcttgaacaagatttaaaaacattc

SEQ ID NO: 5695997 - DNA, 25 bp, Homo sapien
cattcttttagcattttgtttcctg

SEQ ID NO: 5695998 - DNA, 25 bp, Homo sapien
aacattcttaagattgatttcccct

SEQ ID NO: 5695999 - DNA, 25 bp, Homo sapien
tagcattttgtttcctgcctcttcc

SEQ ID NO: 5696000 - DNA, 25 bp, Homo sapien
cgtgagaactagtttgtcatgattc

SEQ ID NO: 5696001 - DNA, 25 bp, Homo sapien
catccgtgagaactagtttgtcatg

SEQ ID NO: 5696002 - DNA, 25 bp, Homo sapien
catcatccgtgagaactagtttgtc

SEQ ID NO: 5696003 - DNA, 25 bp, Homo sapien
tgagaactagtttgtcatgattcac

SEQ ID NO: 5696004 - DNA, 25 bp, Homo sapien
tcatccgtgagaactagtttgtcat

SEQ ID NO: 5696005 - DNA, 25 bp, Homo sapien
tccgtgagaactagtttgtcatgat

SEQ ID NO: 5696006 - DNA, 25 bp, Homo sapien
gaatcatgacaaactagttctcacg

SEQ ID NO: 5696007 - DNA, 25 bp, Homo sapien
gacaaactagttctcacggatgatg

SEQ ID NO: 5696008 - DNA, 25 bp, Homo sapien
catgacaaactagttctcacggatg

SEQ ID NO: 5696009 - DNA, 25 bp, Homo sapien
tcatgacaaactagttctcacggat

SEQ ID NO: 5696010 - DNA, 25 bp, Homo sapien
tgacaaactagttctcacggatgat

SEQ ID NO: 5696011 - DNA, 25 bp, Homo sapien
gtgaatcatgacaaactagttctca

SEQ ID NO: 5696012 - DNA, 25 bp, Homo sapien
taaagatatactttagaaagtaaca

SEQ ID NO: 5696013 - DNA, 25 bp, Homo sapien
ttgtaaagatatactttagaaagta

SEQ ID NO: 5696014 - DNA, 25 bp, Homo sapien
tgtaaagatatactttagaaagtaa

SEQ ID NO: 5696015 - DNA, 25 bp, Homo sapien
tgttactttctaaagtatatcttta

SEQ ID NO: 5696016 - DNA, 25 bp, Homo sapien
tactttctaaagtatatctttacaa

SEQ ID NO: 5696017 - DNA, 25 bp, Homo sapien
ttactttctaaagtatatctttaca

SEQ ID NO: 5696018 - DNA, 25 bp, Homo sapien
caaagacagacttttgaatttcaga

SEQ ID NO: 5696019 - DNA, 25 bp, Homo sapien
tttcagaaagatttggaaggaagtg

SEQ ID NO: 5696020 - DNA, 25 bp, Homo sapien
ctttagaaagtaacaaagacagact

SEQ ID NO: 5696021 - DNA, 25 bp, Homo sapien
gacagacttttgaatttcagaaaga

SEQ ID NO: 5696022 - DNA, 25 bp, Homo sapien
aaagacagacttttgaatttcagaa

SEQ ID NO: 5696023 - DNA, 25 bp, Homo sapien
tgtaaagatatactttagaaagtaa

SEQ ID NO: 5696024 - DNA, 25 bp, Homo sapien
agtctgtctttgttactttctaaag

SEQ ID NO: 5696025 - DNA, 25 bp, Homo sapien
tctgaaattcaaaagtctgtctttg

SEQ ID NO: 5696026 - DNA, 25 bp, Homo sapien
tctttctgaaattcaaaagtctgtc

SEQ ID NO: 5696027 - DNA, 25 bp, Homo sapien
tactttctaaagtatatctttacaa

SEQ ID NO: 5696028 - DNA, 25 bp, Homo sapien
cacttccttccaaatctttctgaaa

SEQ ID NO: 5696029 - DNA, 25 bp, Homo sapien
ttctgaaattcaaaagtctgtcttt

SEQ ID NO: 5696030 - DNA, 25 bp, Homo sapien
aaggctgttggtggatttcagtggc

SEQ ID NO: 5696031 - DNA, 25 bp, Homo sapien
ttctggcatacttaatagctgaaag

SEQ ID NO: 5696032 - DNA, 25 bp, Homo sapien
gactttctggcatacttaatagctg

SEQ ID NO: 5696033 - DNA, 25 bp, Homo sapien
ctttctggcatacttaatagctgaa

SEQ ID NO: 5696034 - DNA, 25 bp, Homo sapien
gtcctcagactttctggcatactta

SEQ ID NO: 5696035 - DNA, 25 bp, Homo sapien
cagactttctggcatacttaatagc

SEQ ID NO: 5696036 - DNA, 25 bp, Homo sapien
gctattaagtatgccagaaagtctg

SEQ ID NO: 5696037 - DNA, 25 bp, Homo sapien
gccactgaaatccaccaacagcctt

SEQ ID NO: 5696038 - DNA, 25 bp, Homo sapien
cagctattaagtatgccagaaagtc

SEQ ID NO: 5696039 - DNA, 25 bp, Homo sapien
taagtatgccagaaagtctgaggac

SEQ ID NO: 5696040 - DNA, 25 bp, Homo sapien
ctttcagctattaagtatgccagaa

SEQ ID NO: 5696041 - DNA, 25 bp, Homo sapien
tattaagtatgccagaaagtctgag

SEQ ID NO: 5696042 - DNA, 25 bp, Homo sapien
cagttaggcctcaatgcagattttt

SEQ ID NO: 5696043 - DNA, 25 bp, Homo sapien
cagtagtatctgaaaccagttaggc

SEQ ID NO: 5696044 - DNA, 25 bp, Homo sapien
tatacctccacttgtaataatggga

SEQ ID NO: 5696045 - DNA, 25 bp, Homo sapien
aatcttaataaccagcagtagtatc

SEQ ID NO: 5696046 - DNA, 25 bp, Homo sapien
cacttgtaataatgggaaatcttaa

SEQ ID NO: 5696047 - DNA, 25 bp, Homo sapien
tgaaaccagttaggcctcaatgcag

SEQ ID NO: 5696048 - DNA, 25 bp, Homo sapien
gcattgaggcctaactggtttcaga

SEQ ID NO: 5696049 - DNA, 25 bp, Homo sapien
aactggtttcagatactactgctgg

SEQ ID NO: 5696050 - DNA, 25 bp, Homo sapien
gatactactgctggttattaagatt

SEQ ID NO: 5696051 - DNA, 25 bp, Homo sapien
taagatttcccattattacaagtgg

SEQ ID NO: 5696052 - DNA, 25 bp, Homo sapien
tcccattattacaagtggaggtata

SEQ ID NO: 5696053 - DNA, 25 bp, Homo sapien
aaaaatctgcattgaggcctaactg

SEQ ID NO: 5696054 - DNA, 25 bp, Homo sapien
cctcacccctggtaatttcttctca

SEQ ID NO: 5696055 - DNA, 25 bp, Homo sapien
tttcttctcattaaacctatggaga

SEQ ID NO: 5696056 - DNA, 25 bp, Homo sapien
tgtgttggcttacggagcccctcac

SEQ ID NO: 5696057 - DNA, 25 bp, Homo sapien
tctattgataaacctatttgtgaaa

SEQ ID NO: 5696058 - DNA, 25 bp, Homo sapien
ctgtgttggcttacggagcccctca

SEQ ID NO: 5696059 - DNA, 25 bp, Homo sapien
ctcattaaacctatggagattatat

SEQ ID NO: 5696060 - DNA, 25 bp, Homo sapien
tttcacaaataggtttatcaataga

SEQ ID NO: 5696061 - DNA, 25 bp, Homo sapien
tgagaagaaattaccaggggtgagg

SEQ ID NO: 5696062 - DNA, 25 bp, Homo sapien
tgaggggctccgtaagccaacacag

SEQ ID NO: 5696063 - DNA, 25 bp, Homo sapien
taatctccataggtttaatgagaag

SEQ ID NO: 5696064 - DNA, 25 bp, Homo sapien
tctccataggtttaatgagaagaaa

SEQ ID NO: 5696065 - DNA, 25 bp, Homo sapien
atataatctccataggtttaatgag

SEQ ID NO: 5696066 - DNA, 25 bp, Homo sapien
tgaagtgtgacttgacatcatttgg

SEQ ID NO: 5696067 - DNA, 25 bp, Homo sapien
gaagtgtgacttgacatcatttggt

SEQ ID NO: 5696068 - DNA, 25 bp, Homo sapien
gacttgacatcatttggttatttct

SEQ ID NO: 5696069 - DNA, 25 bp, Homo sapien
agtgtgacttgacatcatttggtta

SEQ ID NO: 5696070 - DNA, 25 bp, Homo sapien
aagtgtgacttgacatcatttggtt

SEQ ID NO: 5696071 - DNA, 25 bp, Homo sapien
gtgtgacttgacatcatttggttat

SEQ ID NO: 5696072 - DNA, 25 bp, Homo sapien
taaccaaatgatgtcaagtcacact

SEQ ID NO: 5696073 - DNA, 25 bp, Homo sapien
aaataaccaaatgatgtcaagtcac

SEQ ID NO: 5696074 - DNA, 25 bp, Homo sapien
ataaccaaatgatgtcaagtcacac

SEQ ID NO: 5696075 - DNA, 25 bp, Homo sapien
accaaatgatgtcaagtcacacttc

SEQ ID NO: 5696076 - DNA, 25 bp, Homo sapien
agaaataaccaaatgatgtcaagtc

SEQ ID NO: 5696077 - DNA, 25 bp, Homo sapien
ccaaatgatgtcaagtcacacttca

SEQ ID NO: 5696078 - DNA, 25 bp, Homo sapien
agaatcccagttcttttccagtagt

SEQ ID NO: 5696079 - DNA, 25 bp, Homo sapien
tgctgaccccttccaagaatcccag

SEQ ID NO: 5696080 - DNA, 25 bp, Homo sapien
tccaagaatcccagttcttttccag

SEQ ID NO: 5696081 - DNA, 25 bp, Homo sapien
gttacagtatcgtcctccctttatg

SEQ ID NO: 5696082 - DNA, 25 bp, Homo sapien
tacagtatcgtcctccctttatgga

SEQ ID NO: 5696083 - DNA, 25 bp, Homo sapien
cagtatcgtcctccctttatggaaa

SEQ ID NO: 5696084 - DNA, 25 bp, Homo sapien
tggaaaagaactgggattcttggaa

SEQ ID NO: 5696085 - DNA, 25 bp, Homo sapien
tccataaagggaggacgatactgta

SEQ ID NO: 5696086 - DNA, 25 bp, Homo sapien
actactggaaaagaactgggattct

SEQ ID NO: 5696087 - DNA, 25 bp, Homo sapien
cataaagggaggacgatactgtaac

SEQ ID NO: 5696088 - DNA, 25 bp, Homo sapien
tttccataaagggaggacgatactg

SEQ ID NO: 5696089 - DNA, 25 bp, Homo sapien
tactggaaaagaactgggattcttg

SEQ ID NO: 5696090 - DNA, 25 bp, Homo sapien
gtctgtaggatagtgattttgccat

SEQ ID NO: 5696091 - DNA, 25 bp, Homo sapien
gctgtctgtaggatagtgattttgc

SEQ ID NO: 5696092 - DNA, 25 bp, Homo sapien
cttattttgggagtcagagattcaa

SEQ ID NO: 5696093 - DNA, 25 bp, Homo sapien
tattttgggagtcagagattcaaaa

SEQ ID NO: 5696094 - DNA, 25 bp, Homo sapien
tcttattttgggagtcagagattca

SEQ ID NO: 5696095 - DNA, 25 bp, Homo sapien
ctgtctgtaggatagtgattttgcc

SEQ ID NO: 5696096 - DNA, 25 bp, Homo sapien
gcaaaatcactatcctacagacagc

SEQ ID NO: 5696097 - DNA, 25 bp, Homo sapien
atggcaaaatcactatcctacagac

SEQ ID NO: 5696098 - DNA, 25 bp, Homo sapien
gaatctctgactcccaaaataagac

SEQ ID NO: 5696099 - DNA, 25 bp, Homo sapien
ggcaaaatcactatcctacagacag

SEQ ID NO: 5696100 - DNA, 25 bp, Homo sapien
ttttgaatctctgactcccaaaata

SEQ ID NO: 5696101 - DNA, 25 bp, Homo sapien
ttgaatctctgactcccaaaataag

SEQ ID NO: 5696102 - DNA, 25 bp, Homo sapien
aataaataactgctggttattttgg

SEQ ID NO: 5696103 - DNA, 25 bp, Homo sapien
aatttcgttcctgttgcttttcaat

SEQ ID NO: 5696104 - DNA, 25 bp, Homo sapien
gagcaggtgaaacttctaagtttta

SEQ ID NO: 5696105 - DNA, 25 bp, Homo sapien
ttcgttcctgttgcttttcaataaa

SEQ ID NO: 5696106 - DNA, 25 bp, Homo sapien
tggagcaggtgaaacttctaagttt

SEQ ID NO: 5696107 - DNA, 25 bp, Homo sapien
ttcaataaataactgctggttattt

SEQ ID NO: 5696108 - DNA, 25 bp, Homo sapien
tattgaaaagcaacaggaacgaaat

SEQ ID NO: 5696109 - DNA, 25 bp, Homo sapien
aaacttagaagtttcacctgctcca

SEQ ID NO: 5696110 - DNA, 25 bp, Homo sapien
tttattgaaaagcaacaggaacgaa

SEQ ID NO: 5696111 - DNA, 25 bp, Homo sapien
taaaacttagaagtttcacctgctc

SEQ ID NO: 5696112 - DNA, 25 bp, Homo sapien
ccaaaataaccagcagttatttatt

SEQ ID NO: 5696113 - DNA, 25 bp, Homo sapien
aaataaccagcagttatttattgaa

SEQ ID NO: 5696114 - DNA, 25 bp, Homo sapien
gcagtggaatcaaccacatagggtt

SEQ ID NO: 5696115 - DNA, 25 bp, Homo sapien
tatgagactttacagggatgcaact

SEQ ID NO: 5696116 - DNA, 25 bp, Homo sapien
gaatcaaccacatagggtttgttta

SEQ ID NO: 5696117 - DNA, 25 bp, Homo sapien
tacttatgagactttacagggatgc

SEQ ID NO: 5696118 - DNA, 25 bp, Homo sapien
tacagggatgcaactgctcttgcac

SEQ ID NO: 5696119 - DNA, 25 bp, Homo sapien
gactttacagggatgcaactgctct

SEQ ID NO: 5696120 - DNA, 25 bp, Homo sapien
tccctgtaaagtctcataagtaaac

SEQ ID NO: 5696121 - DNA, 25 bp, Homo sapien
aaccctatgtggttgattccactgc

SEQ ID NO: 5696122 - DNA, 25 bp, Homo sapien
agtaaacaaaccctatgtggttgat

SEQ ID NO: 5696123 - DNA, 25 bp, Homo sapien
gcagttgcatccctgtaaagtctca

SEQ ID NO: 5696124 - DNA, 25 bp, Homo sapien
caagagcagttgcatccctgtaaag

SEQ ID NO: 5696125 - DNA, 25 bp, Homo sapien
ggtgcaagagcagttgcatccctgt

SEQ ID NO: 5696126 - DNA, 25 bp, Homo sapien
gcttcaaatgcatcacgtttatttt

SEQ ID NO: 5696127 - DNA, 25 bp, Homo sapien
gactagaatgtctatagttatacat

SEQ ID NO: 5696128 - DNA, 25 bp, Homo sapien
aatgcttcaaatgcatcacgtttat

SEQ ID NO: 5696129 - DNA, 25 bp, Homo sapien
caaatgcatcacgtttatttttctg

SEQ ID NO: 5696130 - DNA, 25 bp, Homo sapien
aaaaatgcttcaaatgcatcacgtt

SEQ ID NO: 5696131 - DNA, 25 bp, Homo sapien
tatagttatacatttaggcattaga

SEQ ID NO: 5696132 - DNA, 25 bp, Homo sapien
tctaatgcctaaatgtataactata

SEQ ID NO: 5696133 - DNA, 25 bp, Homo sapien
aaataaacgtgatgcatttgaagca

SEQ ID NO: 5696134 - DNA, 25 bp, Homo sapien
cagaaaaataaacgtgatgcatttg

SEQ ID NO: 5696135 - DNA, 25 bp, Homo sapien
taaacgtgatgcatttgaagcattt

SEQ ID NO: 5696136 - DNA, 25 bp, Homo sapien
aatgcctaaatgtataactatagac

SEQ ID NO: 5696137 - DNA, 25 bp, Homo sapien
tgtataactatagacattctagtct

SEQ ID NO: 5696138 - DNA, 25 bp, Homo sapien
ttgttctgagagtatcaatcctgga

SEQ ID NO: 5696139 - DNA, 25 bp, Homo sapien
actgggaaactacaagttaatactg

SEQ ID NO: 5696140 - DNA, 25 bp, Homo sapien
agctgctgctttcaagagttacaga

SEQ ID NO: 5696141 - DNA, 25 bp, Homo sapien
tacagactgggaaactacaagttaa

SEQ ID NO: 5696142 - DNA, 25 bp, Homo sapien
tgctgctttcaagagttacagaaga

SEQ ID NO: 5696143 - DNA, 25 bp, Homo sapien
tgagagtatcaatcctggaaaatac

SEQ ID NO: 5696144 - DNA, 25 bp, Homo sapien
tattttccaggattgatactctcag

SEQ ID NO: 5696145 - DNA, 25 bp, Homo sapien
tcttctgtaactcttgaaagcagca

SEQ ID NO: 5696146 - DNA, 25 bp, Homo sapien
tccaggattgatactctcagaacaa

SEQ ID NO: 5696147 - DNA, 25 bp, Homo sapien
ttaacttgtagtttcccagtctgta

SEQ ID NO: 5696148 - DNA, 25 bp, Homo sapien
tctgtaactcttgaaagcagcagct

SEQ ID NO: 5696149 - DNA, 25 bp, Homo sapien
cagtattaacttgtagtttcccagt

SEQ ID NO: 5696150 - DNA, 25 bp, Homo sapien
gtttaagcatcaataacaccacaaa

SEQ ID NO: 5696151 - DNA, 25 bp, Homo sapien
caccacaaaaaggtattgccacttg

SEQ ID NO: 5696152 - DNA, 25 bp, Homo sapien
cttgtaggacgaggtagtcttgaca

SEQ ID NO: 5696153 - DNA, 25 bp, Homo sapien
gaaaccacaccatactacctagaga

SEQ ID NO: 5696154 - DNA, 25 bp, Homo sapien
cacaccatactacctagagagaaat

SEQ ID NO: 5696155 - DNA, 25 bp, Homo sapien
tattgccacttgtaggacgaggtag

SEQ ID NO: 5696156 - DNA, 25 bp, Homo sapien
tttgtggtgttattgatgcttaaac

SEQ ID NO: 5696157 - DNA, 25 bp, Homo sapien
gactacctcgtcctacaagtggcaa

SEQ ID NO: 5696158 - DNA, 25 bp, Homo sapien
tttctctctaggtagtatggtgtgg

SEQ ID NO: 5696159 - DNA, 25 bp, Homo sapien
tgtcaagactacctcgtcctacaag

SEQ ID NO: 5696160 - DNA, 25 bp, Homo sapien
caagtggcaatacctttttgtggtg

SEQ ID NO: 5696161 - DNA, 25 bp, Homo sapien
tctctaggtagtatggtgtggtttc

SEQ ID NO: 5696162 - DNA, 25 bp, Homo sapien
tacttatctaaactattgtactact

SEQ ID NO: 5696163 - DNA, 25 bp, Homo sapien
actactataaaaggatgctggcaac

SEQ ID NO: 5696164 - DNA, 25 bp, Homo sapien
tactactataaaaggatgctggcaa

SEQ ID NO: 5696165 - DNA, 25 bp, Homo sapien
tgagggactgttcttaggatttcta

SEQ ID NO: 5696166 - DNA, 25 bp, Homo sapien
gagggactgttcttaggatttctaa

SEQ ID NO: 5696167 - DNA, 25 bp, Homo sapien
gtactactataaaaggatgctggca

SEQ ID NO: 5696168 - DNA, 25 bp, Homo sapien
tagaaatcctaagaacagtccctca

SEQ ID NO: 5696169 - DNA, 25 bp, Homo sapien
tgccagcatccttttatagtagtac

SEQ ID NO: 5696170 - DNA, 25 bp, Homo sapien
gttgccagcatccttttatagtagt

SEQ ID NO: 5696171 - DNA, 25 bp, Homo sapien
tagtagtacaatagtttagataagt

SEQ ID NO: 5696172 - DNA, 25 bp, Homo sapien
ttagaaatcctaagaacagtccctc

SEQ ID NO: 5696173 - DNA, 25 bp, Homo sapien
ttgccagcatccttttatagtagta

SEQ ID NO: 5696174 - DNA, 25 bp, Homo sapien
tgtaaagggagtaacaaggcaagaa

SEQ ID NO: 5696175 - DNA, 25 bp, Homo sapien
cagatgtaaagggagtaacaaggca

SEQ ID NO: 5696176 - DNA, 25 bp, Homo sapien
gatgtaaagggagtaacaaggcaag

SEQ ID NO: 5696177 - DNA, 25 bp, Homo sapien
caagtggtttttacaccttccagat

SEQ ID NO: 5696178 - DNA, 25 bp, Homo sapien
agatgtaaagggagtaacaaggcaa

SEQ ID NO: 5696179 - DNA, 25 bp, Homo sapien
ttccagatgtaaagggagtaacaag

SEQ ID NO: 5696180 - DNA, 25 bp, Homo sapien
tgccttgttactccctttacatctg

SEQ ID NO: 5696181 - DNA, 25 bp, Homo sapien
tcttgccttgttactccctttacat

SEQ ID NO: 5696182 - DNA, 25 bp, Homo sapien
cttgttactccctttacatctggaa

SEQ ID NO: 5696183 - DNA, 25 bp, Homo sapien
ttcttgccttgttactccctttaca

SEQ ID NO: 5696184 - DNA, 25 bp, Homo sapien
atctggaaggtgtaaaaaccacttg

SEQ ID NO: 5696185 - DNA, 25 bp, Homo sapien
ttgccttgttactccctttacatct

SEQ ID NO: 5696186 - DNA, 25 bp, Homo sapien
cacaagcagagtacccacagaacat

SEQ ID NO: 5696187 - DNA, 25 bp, Homo sapien
tgtactgtccgttcttaaatgattt

SEQ ID NO: 5696188 - DNA, 25 bp, Homo sapien
tgtgtttctgtactgtccgttctta

SEQ ID NO: 5696189 - DNA, 25 bp, Homo sapien
tatgtagttcatttatgtctcctat

SEQ ID NO: 5696190 - DNA, 25 bp, Homo sapien
tctgtactgtccgttcttaaatgat

SEQ ID NO: 5696191 - DNA, 25 bp, Homo sapien
acaagcagagtacccacagaacatt

SEQ ID NO: 5696192 - DNA, 25 bp, Homo sapien
taagaacggacagtacagaaacaca

SEQ ID NO: 5696193 - DNA, 25 bp, Homo sapien
aaatcatttaagaacggacagtaca

SEQ ID NO: 5696194 - DNA, 25 bp, Homo sapien
aatgttctgtgggtactctgcttgt

SEQ ID NO: 5696195 - DNA, 25 bp, Homo sapien
catttaagaacggacagtacagaaa

SEQ ID NO: 5696196 - DNA, 25 bp, Homo sapien
cataggagacataaatgaactacat

SEQ ID NO: 5696197 - DNA, 25 bp, Homo sapien
aatcatttaagaacggacagtacag

SEQ ID NO: 5696198 - DNA, 25 bp, Homo sapien
ggggcattgacctcaaaatatttga

SEQ ID NO: 5696199 - DNA, 25 bp, Homo sapien
aattctagaccccttcaactagaag

SEQ ID NO: 5696200 - DNA, 25 bp, Homo sapien
tgatgaggggcattgacctcaaaat

SEQ ID NO: 5696201 - DNA, 25 bp, Homo sapien
tctagaccccttcaactagaagagg

SEQ ID NO: 5696202 - DNA, 25 bp, Homo sapien
aatatgatgatgaggggcattgacc

SEQ ID NO: 5696203 - DNA, 25 bp, Homo sapien
ctagaccccttcaactagaagaggg

SEQ ID NO: 5696204 - DNA, 25 bp, Homo sapien
ggtcaatgcccctcatcatcatatt

SEQ ID NO: 5696205 - DNA, 25 bp, Homo sapien
cctcttctagttgaaggggtctaga

SEQ ID NO: 5696206 - DNA, 25 bp, Homo sapien
tattttgaggtcaatgcccctcatc

SEQ ID NO: 5696207 - DNA, 25 bp, Homo sapien
aaatattttgaggtcaatgcccctc

SEQ ID NO: 5696208 - DNA, 25 bp, Homo sapien
tttgaggtcaatgcccctcatcatc

SEQ ID NO: 5696209 - DNA, 25 bp, Homo sapien
tcaaatattttgaggtcaatgcccc

SEQ ID NO: 5696210 - DNA, 25 bp, Homo sapien
tgcaggccaccacgcatggctgatt

SEQ ID NO: 5696211 - DNA, 25 bp, Homo sapien
aggccaccacgcatggctgattttt

SEQ ID NO: 5696212 - DNA, 25 bp, Homo sapien
ggccaccacgcatggctgatttttg

SEQ ID NO: 5696213 - DNA, 25 bp, Homo sapien
gccaccacgcatggctgatttttgt

SEQ ID NO: 5696214 - DNA, 25 bp, Homo sapien
gcaggccaccacgcatggctgattt

SEQ ID NO: 5696215 - DNA, 25 bp, Homo sapien
caggccaccacgcatggctgatttt

SEQ ID NO: 5696216 - DNA, 25 bp, Homo sapien
aaaaatcagccatgcgtggtggcct

SEQ ID NO: 5696217 - DNA, 25 bp, Homo sapien
caaaaatcagccatgcgtggtggcc

SEQ ID NO: 5696218 - DNA, 25 bp, Homo sapien
aaaatcagccatgcgtggtggcctg

SEQ ID NO: 5696219 - DNA, 25 bp, Homo sapien
agccatgcgtggtggcctgcacctg

SEQ ID NO: 5696220 - DNA, 25 bp, Homo sapien
aatcagccatgcgtggtggcctgca

SEQ ID NO: 5696221 - DNA, 25 bp, Homo sapien
gccatgcgtggtggcctgcacctgt

SEQ ID NO: 5696222 - DNA, 25 bp, Homo sapien
gatactgtctcgttctgacctcatg

SEQ ID NO: 5696223 - DNA, 25 bp, Homo sapien
taggatactgtctcgttctgacctc

SEQ ID NO: 5696224 - DNA, 25 bp, Homo sapien
tgttagctaggatactgtctcgttc

SEQ ID NO: 5696225 - DNA, 25 bp, Homo sapien
catgttagctaggatactgtctcgt

SEQ ID NO: 5696226 - DNA, 25 bp, Homo sapien
gctaggatactgtctcgttctgacc

SEQ ID NO: 5696227 - DNA, 25 bp, Homo sapien
tagctaggatactgtctcgttctga

SEQ ID NO: 5696228 - DNA, 25 bp, Homo sapien
tcagaacgagacagtatcctagcta

SEQ ID NO: 5696229 - DNA, 25 bp, Homo sapien
gaacgagacagtatcctagctaaca

SEQ ID NO: 5696230 - DNA, 25 bp, Homo sapien
tgaggtcagaacgagacagtatcct

SEQ ID NO: 5696231 - DNA, 25 bp, Homo sapien
ggtcagaacgagacagtatcctagc

SEQ ID NO: 5696232 - DNA, 25 bp, Homo sapien
acgagacagtatcctagctaacatg

SEQ ID NO: 5696233 - DNA, 25 bp, Homo sapien
catgaggtcagaacgagacagtatc

SEQ ID NO: 5696234 - DNA, 25 bp, Homo sapien
tttaaagtctatccttttcatgaca

SEQ ID NO: 5696235 - DNA, 25 bp, Homo sapien
ttaaagtctatccttttcatgacag

SEQ ID NO: 5696236 - DNA, 25 bp, Homo sapien
tgtcatgaaaaggatagactttaaa

SEQ ID NO: 5696237 - DNA, 25 bp, Homo sapien
ctgtcatgaaaaggatagactttaa

SEQ ID NO: 5696238 - DNA, 25 bp, Homo sapien
ttaaagtctatccttttcatgacag

SEQ ID NO: 5696239 - DNA, 25 bp, Homo sapien
aagtctatccttttcatgacagagc

SEQ ID NO: 5696240 - DNA, 25 bp, Homo sapien
gtctatccttttcatgacagagctt

SEQ ID NO: 5696241 - DNA, 25 bp, Homo sapien
tatccttttcatgacagagcttttc

SEQ ID NO: 5696242 - DNA, 25 bp, Homo sapien
aaagtctatccttttcatgacagag

SEQ ID NO: 5696243 - DNA, 25 bp, Homo sapien
tccttttcatgacagagcttttcat

SEQ ID NO: 5696244 - DNA, 25 bp, Homo sapien
aaaagctctgtcatgaaaaggatag

SEQ ID NO: 5696245 - DNA, 25 bp, Homo sapien
atgaaaagctctgtcatgaaaagga

SEQ ID NO: 5696246 - DNA, 25 bp, Homo sapien
gctctgtcatgaaaaggatagactt

SEQ ID NO: 5696247 - DNA, 25 bp, Homo sapien
aagctctgtcatgaaaaggatagac

SEQ ID NO: 5696248 - DNA, 25 bp, Homo sapien
tgaaaagctctgtcatgaaaaggat

SEQ ID NO: 5696249 - DNA, 25 bp, Homo sapien
ctgtcatgaaaaggatagactttaa

SEQ ID NO: 5696250 - DNA, 25 bp, Homo sapien
catacagtgcccagataaaaaagga

SEQ ID NO: 5696251 - DNA, 25 bp, Homo sapien
ggcatacagtgcccagataaaaaag

SEQ ID NO: 5696252 - DNA, 25 bp, Homo sapien
gcatacagtgcccagataaaaaagg

SEQ ID NO: 5696253 - DNA, 25 bp, Homo sapien
cttttttatctgggcactgtatgcc

SEQ ID NO: 5696254 - DNA, 25 bp, Homo sapien
ccttttttatctgggcactgtatgc

SEQ ID NO: 5696255 - DNA, 25 bp, Homo sapien
tccttttttatctgggcactgtatg

SEQ ID NO: 5696256 - DNA, 25 bp, Homo sapien
catacagtgcccagataaaaaagga

SEQ ID NO: 5696257 - DNA, 25 bp, Homo sapien
tgactccatgttcaaattcattttg

SEQ ID NO: 5696258 - DNA, 25 bp, Homo sapien
ggaagctgaagtcttgactccatgt

SEQ ID NO: 5696259 - DNA, 25 bp, Homo sapien
tgtgacctgaactctatcaaagctg

SEQ ID NO: 5696260 - DNA, 25 bp, Homo sapien
tctatcaaagctggcatacagtgcc

SEQ ID NO: 5696261 - DNA, 25 bp, Homo sapien
ggcacctatctcctgtgacctgaac

SEQ ID NO: 5696262 - DNA, 25 bp, Homo sapien
caaaatgaatttgaacatggagtca

SEQ ID NO: 5696263 - DNA, 25 bp, Homo sapien
ccagctttgatagagttcaggtcac

SEQ ID NO: 5696264 - DNA, 25 bp, Homo sapien
ccttttttatctgggcactgtatgc

SEQ ID NO: 5696265 - DNA, 25 bp, Homo sapien
ggcactgtatgccagctttgataga

SEQ ID NO: 5696266 - DNA, 25 bp, Homo sapien
acatggagtcaagacttcagcttcc

SEQ ID NO: 5696267 - DNA, 25 bp, Homo sapien
gttcaggtcacaggagataggtgcc

SEQ ID NO: 5696268 - DNA, 25 bp, Homo sapien
aatgcccagtagaaacatcttgtac

SEQ ID NO: 5696269 - DNA, 25 bp, Homo sapien
ttaacttgtatacttttgcactaaa

SEQ ID NO: 5696270 - DNA, 25 bp, Homo sapien
tgcactaaataagccaagatatact

SEQ ID NO: 5696271 - DNA, 25 bp, Homo sapien
caagatatactgaaaacagttgggt

SEQ ID NO: 5696272 - DNA, 25 bp, Homo sapien
acttttgcactaaataagccaagat

SEQ ID NO: 5696273 - DNA, 25 bp, Homo sapien
gcccagtagaaacatcttgtacttt

SEQ ID NO: 5696274 - DNA, 25 bp, Homo sapien
tatcttggcttatttagtgcaaaag

SEQ ID NO: 5696275 - DNA, 25 bp, Homo sapien
cccaactgttttcagtatatcttgg

SEQ ID NO: 5696276 - DNA, 25 bp, Homo sapien
agtatatcttggcttatttagtgca

SEQ ID NO: 5696277 - DNA, 25 bp, Homo sapien
tacaagatgtttctactgggcattt

SEQ ID NO: 5696278 - DNA, 25 bp, Homo sapien
tttagtgcaaaagtatacaagttaa

SEQ ID NO: 5696279 - DNA, 25 bp, Homo sapien
aaagtacaagatgtttctactgggc

SEQ ID NO: 5696280 - DNA, 25 bp, Homo sapien
tttctcctggaccattggataatgt

SEQ ID NO: 5696281 - DNA, 25 bp, Homo sapien
attaacccatgtggagaggtggcca

SEQ ID NO: 5696282 - DNA, 25 bp, Homo sapien
gattaacccatgtggagaggtggcc

SEQ ID NO: 5696283 - DNA, 25 bp, Homo sapien
taatgtgattaacccatgtggagag

SEQ ID NO: 5696284 - DNA, 25 bp, Homo sapien
ttttttctcctggaccattggataa

SEQ ID NO: 5696285 - DNA, 25 bp, Homo sapien
ttaagtataatgtgattaacccatg

SEQ ID NO: 5696286 - DNA, 25 bp, Homo sapien
catgggttaatcacattatacttaa

SEQ ID NO: 5696287 - DNA, 25 bp, Homo sapien
cacctctccacatgggttaatcaca

SEQ ID NO: 5696288 - DNA, 25 bp, Homo sapien
acattatccaatggtccaggagaaa

SEQ ID NO: 5696289 - DNA, 25 bp, Homo sapien
tggccacctctccacatgggttaat

SEQ ID NO: 5696290 - DNA, 25 bp, Homo sapien
tccacatgggttaatcacattatac

SEQ ID NO: 5696291 - DNA, 25 bp, Homo sapien
ttatccaatggtccaggagaaaaaa

SEQ ID NO: 5696292 - DNA, 25 bp, Homo sapien
agtaataaaggaaattgtaaggcag

SEQ ID NO: 5696293 - DNA, 25 bp, Homo sapien
tgtctctagtgtgagataatgtctg

SEQ ID NO: 5696294 - DNA, 25 bp, Homo sapien
ttgtctctagtgtgagataatgtct

SEQ ID NO: 5696295 - DNA, 25 bp, Homo sapien
cagacattatctcacactagagaca

SEQ ID NO: 5696296 - DNA, 25 bp, Homo sapien
ctgccttacaatttcctttattact

SEQ ID NO: 5696297 - DNA, 25 bp, Homo sapien
agacattatctcacactagagacaa

SEQ ID NO: 5696298 - DNA, 25 bp, Homo sapien
tatatattttcctttgtctctagtg

SEQ ID NO: 5696299 - DNA, 25 bp, Homo sapien
gcagggttttgaatttccaaatctg

SEQ ID NO: 5696300 - DNA, 25 bp, Homo sapien
agtaataaaggaaattgtaaggcag

SEQ ID NO: 5696301 - DNA, 25 bp, Homo sapien
tgtctctagtgtgagataatgtctg

SEQ ID NO: 5696302 - DNA, 25 bp, Homo sapien
tgtaaggcagggttttgaatttcca

SEQ ID NO: 5696303 - DNA, 25 bp, Homo sapien
ttccaaatctgaggtaatatatatt

SEQ ID NO: 5696304 - DNA, 25 bp, Homo sapien
cagacattatctcacactagagaca

SEQ ID NO: 5696305 - DNA, 25 bp, Homo sapien
tgccttacaatttcctttattactg

SEQ ID NO: 5696306 - DNA, 25 bp, Homo sapien
tggaaattcaaaaccctgccttaca

SEQ ID NO: 5696307 - DNA, 25 bp, Homo sapien
cagatttggaaattcaaaaccctgc

SEQ ID NO: 5696308 - DNA, 25 bp, Homo sapien
cactagagacaaaggaaaatatata

SEQ ID NO: 5696309 - DNA, 25 bp, Homo sapien
aatatatattacctcagatttggaa

SEQ ID NO: 5696310 - DNA, 25 bp, Homo sapien
gagccttcgcacctggcctagttga

SEQ ID NO: 5696311 - DNA, 25 bp, Homo sapien
gccttcgcacctggcctagttgagg

SEQ ID NO: 5696312 - DNA, 25 bp, Homo sapien
ttcgcacctggcctagttgaggttt

SEQ ID NO: 5696313 - DNA, 25 bp, Homo sapien
tcgcacctggcctagttgaggtttt

SEQ ID NO: 5696314 - DNA, 25 bp, Homo sapien
tgaactcgtgacctcatgatctacc

SEQ ID NO: 5696315 - DNA, 25 bp, Homo sapien
gtgagccttcgcacctggcctagtt

SEQ ID NO: 5696316 - DNA, 25 bp, Homo sapien
gatcatgaggtcacgagttcaaaac

SEQ ID NO: 5696317 - DNA, 25 bp, Homo sapien
aactaggccaggtgcgaaggctcac

SEQ ID NO: 5696318 - DNA, 25 bp, Homo sapien
cctcaactaggccaggtgcgaaggc

SEQ ID NO: 5696319 - DNA, 25 bp, Homo sapien
aaacctcaactaggccaggtgcgaa

SEQ ID NO: 5696320 - DNA, 25 bp, Homo sapien
tcaactaggccaggtgcgaaggctc

SEQ ID NO: 5696321 - DNA, 25 bp, Homo sapien
aaaacctcaactaggccaggtgcga

SEQ ID NO: 5696322 - DNA, 25 bp, Homo sapien
ctgccaccaccaatttttgtcttta

SEQ ID NO: 5696323 - DNA, 25 bp, Homo sapien
gacgcctgccaccaccaatttttgt

SEQ ID NO: 5696324 - DNA, 25 bp, Homo sapien
cctgccaccaccaatttttgtcttt

SEQ ID NO: 5696325 - DNA, 25 bp, Homo sapien
caccaccaatttttgtctttagtag

SEQ ID NO: 5696326 - DNA, 25 bp, Homo sapien
tgccaccaccaatttttgtctttag

SEQ ID NO: 5696327 - DNA, 25 bp, Homo sapien
gcctgccaccaccaatttttgtctt

SEQ ID NO: 5696328 - DNA, 25 bp, Homo sapien
aagacaaaaattggtggtggcaggc

SEQ ID NO: 5696329 - DNA, 25 bp, Homo sapien
taaagacaaaaattggtggtggcag

SEQ ID NO: 5696330 - DNA, 25 bp, Homo sapien
aaagacaaaaattggtggtggcagg

SEQ ID NO: 5696331 - DNA, 25 bp, Homo sapien
acaaaaattggtggtggcaggcgtc

SEQ ID NO: 5696332 - DNA, 25 bp, Homo sapien
ctaaagacaaaaattggtggtggca

SEQ ID NO: 5696333 - DNA, 25 bp, Homo sapien
ctactaaagacaaaaattggtggtg

SEQ ID NO: 5696334 - DNA, 25 bp, Homo sapien
cctgggttcaggcagttctttgcct

SEQ ID NO: 5696335 - DNA, 25 bp, Homo sapien
ttcaggcagttctttgcctcagccc

SEQ ID NO: 5696336 - DNA, 25 bp, Homo sapien
gacatagtcttgctctgttcccagg

SEQ ID NO: 5696337 - DNA, 25 bp, Homo sapien
caggggtgcaatctcggcttactac

SEQ ID NO: 5696338 - DNA, 25 bp, Homo sapien
ctgggttcaggcagttctttgcctc

SEQ ID NO: 5696339 - DNA, 25 bp, Homo sapien
tgggttcaggcagttctttgcctca

SEQ ID NO: 5696340 - DNA, 25 bp, Homo sapien
ttgtagtaagccgagattgcacccc

SEQ ID NO: 5696341 - DNA, 25 bp, Homo sapien
gtagtaagccgagattgcacccctg

SEQ ID NO: 5696342 - DNA, 25 bp, Homo sapien
tgaggcaaagaactgcctgaaccca

SEQ ID NO: 5696343 - DNA, 25 bp, Homo sapien
aggcaaagaactgcctgaacccagg

SEQ ID NO: 5696344 - DNA, 25 bp, Homo sapien
gggctgaggcaaagaactgcctgaa

SEQ ID NO: 5696345 - DNA, 25 bp, Homo sapien
gaggcaaagaactgcctgaacccag

SEQ ID NO: 5696346 - DNA, 25 bp, Homo sapien
tagggtagccggacctaaataggca

SEQ ID NO: 5696347 - DNA, 25 bp, Homo sapien
taagacttgaagtgtgttcaacaac

SEQ ID NO: 5696348 - DNA, 25 bp, Homo sapien
aatgaagatcatccaagtatgcaga

SEQ ID NO: 5696349 - DNA, 25 bp, Homo sapien
tagccggacctaaataggcaaaata

SEQ ID NO: 5696350 - DNA, 25 bp, Homo sapien
gttgttgaacacacttcaagtctta

SEQ ID NO: 5696351 - DNA, 25 bp, Homo sapien
tgcctatttaggtccggctacccta

SEQ ID NO: 5696352 - DNA, 25 bp, Homo sapien
tattttgcctatttaggtccggcta

SEQ ID NO: 5696353 - DNA, 25 bp, Homo sapien
tctgcatacttggatgatcttcatt

SEQ ID NO: 5696354 - DNA, 25 bp, Homo sapien
tcccaccatgatgtacaaggtctta

SEQ ID NO: 5696355 - DNA, 25 bp, Homo sapien
ccatgatgtacaaggtcttaggtat

SEQ ID NO: 5696356 - DNA, 25 bp, Homo sapien
cttagttctaatacttaaacatagc

SEQ ID NO: 5696357 - DNA, 25 bp, Homo sapien
ccaccatgatgtacaaggtcttagg

SEQ ID NO: 5696358 - DNA, 25 bp, Homo sapien
cttaaacatagcagttaacataatg

SEQ ID NO: 5696359 - DNA, 25 bp, Homo sapien
tgtacaaggtcttaggtattcttag

SEQ ID NO: 5696360 - DNA, 25 bp, Homo sapien
taagaatacctaagaccttgtacat

SEQ ID NO: 5696361 - DNA, 25 bp, Homo sapien
tacctaagaccttgtacatcatggt

SEQ ID NO: 5696362 - DNA, 25 bp, Homo sapien
tattagaactaagaatacctaagac

SEQ ID NO: 5696363 - DNA, 25 bp, Homo sapien
gctatgtttaagtattagaactaag

SEQ ID NO: 5696364 - DNA, 25 bp, Homo sapien
taagaccttgtacatcatggtggga

SEQ ID NO: 5696365 - DNA, 25 bp, Homo sapien
cattatgttaactgctatgtttaag

SEQ ID NO: 5696366 - DNA, 25 bp, Homo sapien
tgaccagtttggtctccacctcttg

SEQ ID NO: 5696367 - DNA, 25 bp, Homo sapien
agtttggtctccacctcttgacctc

SEQ ID NO: 5696368 - DNA, 25 bp, Homo sapien
cagtttggtctccacctcttgacct

SEQ ID NO: 5696369 - DNA, 25 bp, Homo sapien
accagtttggtctccacctcttgac

SEQ ID NO: 5696370 - DNA, 25 bp, Homo sapien
gaccagtttggtctccacctcttga

SEQ ID NO: 5696371 - DNA, 25 bp, Homo sapien
tgttgaccagtttggtctccacctc

SEQ ID NO: 5696372 - DNA, 25 bp, Homo sapien
caagaggtggagaccaaactggtca

SEQ ID NO: 5696373 - DNA, 25 bp, Homo sapien
gaggtcaagaggtggagaccaaact

SEQ ID NO: 5696374 - DNA, 25 bp, Homo sapien
tcaagaggtggagaccaaactggtc

SEQ ID NO: 5696375 - DNA, 25 bp, Homo sapien
gtcaagaggtggagaccaaactggt

SEQ ID NO: 5696376 - DNA, 25 bp, Homo sapien
aggtcaagaggtggagaccaaactg

SEQ ID NO: 5696377 - DNA, 25 bp, Homo sapien
gaggtggagaccaaactggtcaaca

SEQ ID NO: 5696378 - DNA, 25 bp, Homo sapien
ccttagtttaggttgagacctccag

SEQ ID NO: 5696379 - DNA, 25 bp, Homo sapien
cccctatgtaattatagagtatctg

SEQ ID NO: 5696380 - DNA, 25 bp, Homo sapien
tagtttaggttgagacctccaggtc

SEQ ID NO: 5696381 - DNA, 25 bp, Homo sapien
gagacctccaggtcttcattgtaaa

SEQ ID NO: 5696382 - DNA, 25 bp, Homo sapien
ccaggtcttcattgtaaagatacat

SEQ ID NO: 5696383 - DNA, 25 bp, Homo sapien
gacctccaggtcttcattgtaaaga

SEQ ID NO: 5696384 - DNA, 25 bp, Homo sapien
tctttacaatgaagacctggaggtc

SEQ ID NO: 5696385 - DNA, 25 bp, Homo sapien
ctggaggtctcaacctaaactaagg

SEQ ID NO: 5696386 - DNA, 25 bp, Homo sapien
gacctggaggtctcaacctaaacta

SEQ ID NO: 5696387 - DNA, 25 bp, Homo sapien
gatactctataattacataggggga

SEQ ID NO: 5696388 - DNA, 25 bp, Homo sapien
atgtatctttacaatgaagacctgg

SEQ ID NO: 5696389 - DNA, 25 bp, Homo sapien
tatctttacaatgaagacctggagg

SEQ ID NO: 5696390 - DNA, 25 bp, Homo sapien
ctacaggtatgtgccaccacaccca

SEQ ID NO: 5696391 - DNA, 25 bp, Homo sapien
cacacccagcttatctttgtattgt

SEQ ID NO: 5696392 - DNA, 25 bp, Homo sapien
acccagcttatctttgtattgttag

SEQ ID NO: 5696393 - DNA, 25 bp, Homo sapien
acacccagcttatctttgtattgtt

SEQ ID NO: 5696394 - DNA, 25 bp, Homo sapien
tccacttctagggttcaagcaattc

SEQ ID NO: 5696395 - DNA, 25 bp, Homo sapien
cacccagcttatctttgtattgtta

SEQ ID NO: 5696396 - DNA, 25 bp, Homo sapien
acaatacaaagataagctgggtgtg

SEQ ID NO: 5696397 - DNA, 25 bp, Homo sapien
taacaatacaaagataagctgggtg

SEQ ID NO: 5696398 - DNA, 25 bp, Homo sapien
ctaacaatacaaagataagctgggt

SEQ ID NO: 5696399 - DNA, 25 bp, Homo sapien
tgggtgtggtggcacatacctgtag

SEQ ID NO: 5696400 - DNA, 25 bp, Homo sapien
aacaatacaaagataagctgggtgt

SEQ ID NO: 5696401 - DNA, 25 bp, Homo sapien
gaattgcttgaaccctagaagtgga

SEQ ID NO: 5696402 - DNA, 25 bp, Homo sapien
ttggtgaagtgtgcaatctggtgta

SEQ ID NO: 5696403 - DNA, 25 bp, Homo sapien
tggaaatttggtgaagtgtgcaatc

SEQ ID NO: 5696404 - DNA, 25 bp, Homo sapien
caatctggtgtatatcatttttgaa

SEQ ID NO: 5696405 - DNA, 25 bp, Homo sapien
aatttggtgaagtgtgcaatctggt

SEQ ID NO: 5696406 - DNA, 25 bp, Homo sapien
gcaatctggtgtatatcatttttga

SEQ ID NO: 5696407 - DNA, 25 bp, Homo sapien
gaaatttggtgaagtgtgcaatctg

SEQ ID NO: 5696408 - DNA, 25 bp, Homo sapien
caccagattgcacacttcaccaaat

SEQ ID NO: 5696409 - DNA, 25 bp, Homo sapien
caaaaatgatatacaccagattgca

SEQ ID NO: 5696410 - DNA, 25 bp, Homo sapien
gattgcacacttcaccaaatttcca

SEQ ID NO: 5696411 - DNA, 25 bp, Homo sapien
cagattgcacacttcaccaaatttc

SEQ ID NO: 5696412 - DNA, 25 bp, Homo sapien
tacaccagattgcacacttcaccaa

SEQ ID NO: 5696413 - DNA, 25 bp, Homo sapien
ttcaaaaatgatatacaccagattg

SEQ ID NO: 5696414 - DNA, 25 bp, Homo sapien
tagggacctaccgtcccattgcttg

SEQ ID NO: 5696415 - DNA, 25 bp, Homo sapien
tatgagcctacaaaacgtgtactgg

SEQ ID NO: 5696416 - DNA, 25 bp, Homo sapien
ttgagaattttcatatgagcctaca

SEQ ID NO: 5696417 - DNA, 25 bp, Homo sapien
tgagcctacaaaacgtgtactggtt

SEQ ID NO: 5696418 - DNA, 25 bp, Homo sapien
ctaccgtcccattgcttgatacctt

SEQ ID NO: 5696419 - DNA, 25 bp, Homo sapien
cagatatagggacctaccgtcccat

SEQ ID NO: 5696420 - DNA, 25 bp, Homo sapien
tgtaggctcatatgaaaattctcaa

SEQ ID NO: 5696421 - DNA, 25 bp, Homo sapien
tcaagcaatgggacggtaggtccct

SEQ ID NO: 5696422 - DNA, 25 bp, Homo sapien
aaggtatcaagcaatgggacggtag

SEQ ID NO: 5696423 - DNA, 25 bp, Homo sapien
tacacgttttgtaggctcatatgaa

SEQ ID NO: 5696424 - DNA, 25 bp, Homo sapien
caatgggacggtaggtccctatatc

SEQ ID NO: 5696425 - DNA, 25 bp, Homo sapien
aaccagtacacgttttgtaggctca

SEQ ID NO: 5696426 - DNA, 25 bp, Homo sapien
tgtttaatggctgtcaagtatcttt

SEQ ID NO: 5696427 - DNA, 25 bp, Homo sapien
tccagtcagtaagtattctaccatg

SEQ ID NO: 5696428 - DNA, 25 bp, Homo sapien
tgttttccagtcagtaagtattcta

SEQ ID NO: 5696429 - DNA, 25 bp, Homo sapien
ccagtcagtaagtattctaccatgt

SEQ ID NO: 5696430 - DNA, 25 bp, Homo sapien
taatggctgtcaagtatcttttgtc

SEQ ID NO: 5696431 - DNA, 25 bp, Homo sapien
ttttccagtcagtaagtattctacc

SEQ ID NO: 5696432 - DNA, 25 bp, Homo sapien
gacaaaagatacttgacagccatta

SEQ ID NO: 5696433 - DNA, 25 bp, Homo sapien
acatggtagaatacttactgactgg

SEQ ID NO: 5696434 - DNA, 25 bp, Homo sapien
ggtagaatacttactgactggaaaa

SEQ ID NO: 5696435 - DNA, 25 bp, Homo sapien
aaagatacttgacagccattaaaca

SEQ ID NO: 5696436 - DNA, 25 bp, Homo sapien
catggtagaatacttactgactgga

SEQ ID NO: 5696437 - DNA, 25 bp, Homo sapien
tagaatacttactgactggaaaaca

SEQ ID NO: 5696438 - DNA, 25 bp, Homo sapien
tgttctctgtcttatgtagctacag

SEQ ID NO: 5696439 - DNA, 25 bp, Homo sapien
tgtcttatgtagctacaggtatata

SEQ ID NO: 5696440 - DNA, 25 bp, Homo sapien
gttctctgtcttatgtagctacagg

SEQ ID NO: 5696441 - DNA, 25 bp, Homo sapien
tctgtcttatgtagctacaggtata

SEQ ID NO: 5696442 - DNA, 25 bp, Homo sapien
catcagcactcagaggtaaccacca

SEQ ID NO: 5696443 - DNA, 25 bp, Homo sapien
tctctgtcttatgtagctacaggta

SEQ ID NO: 5696444 - DNA, 25 bp, Homo sapien
tggtggttacctctgagtgctgatg

SEQ ID NO: 5696445 - DNA, 25 bp, Homo sapien
tacctgtagctacataagacagaga

SEQ ID NO: 5696446 - DNA, 25 bp, Homo sapien
cctgtagctacataagacagagaac

SEQ ID NO: 5696447 - DNA, 25 bp, Homo sapien
ctgtagctacataagacagagaaca

SEQ ID NO: 5696448 - DNA, 25 bp, Homo sapien
tatacctgtagctacataagacaga

SEQ ID NO: 5696449 - DNA, 25 bp, Homo sapien
tatatacctgtagctacataagaca

SEQ ID NO: 5696450 - DNA, 25 bp, Homo sapien
gcaacaagagctaagcttcgtctta

SEQ ID NO: 5696451 - DNA, 25 bp, Homo sapien
caagagctaagcttcgtcttaaaaa

SEQ ID NO: 5696452 - DNA, 25 bp, Homo sapien
caacaagagctaagcttcgtcttaa

SEQ ID NO: 5696453 - DNA, 25 bp, Homo sapien
aacaagagctaagcttcgtcttaaa

SEQ ID NO: 5696454 - DNA, 25 bp, Homo sapien
gcagtgatcgaagatcgcaacactg

SEQ ID NO: 5696455 - DNA, 25 bp, Homo sapien
acaagagctaagcttcgtcttaaaa

SEQ ID NO: 5696456 - DNA, 25 bp, Homo sapien
cagtgttgcgatcttcgatcactgc

SEQ ID NO: 5696457 - DNA, 25 bp, Homo sapien
ttttaagacgaagcttagctcttgt

SEQ ID NO: 5696458 - DNA, 25 bp, Homo sapien
ttaagacgaagcttagctcttgttg

SEQ ID NO: 5696459 - DNA, 25 bp, Homo sapien
taagacgaagcttagctcttgttgc

SEQ ID NO: 5696460 - DNA, 25 bp, Homo sapien
tttttaagacgaagcttagctcttg

SEQ ID NO: 5696461 - DNA, 25 bp, Homo sapien
tttaagacgaagcttagctcttgtt

SEQ ID NO: 5696462 - DNA, 25 bp, Homo sapien
ttggaacgtggaggtcggcggatca

SEQ ID NO: 5696463 - DNA, 25 bp, Homo sapien
tgatccgccgacctccacgttccaa

SEQ ID NO: 5696464 - DNA, 25 bp, Homo sapien
taatccctgcacttttggaacgtgg

SEQ ID NO: 5696465 - DNA, 25 bp, Homo sapien
ctgcacttttggaacgtggaggtcg

SEQ ID NO: 5696466 - DNA, 25 bp, Homo sapien
cctgcacttttggaacgtggaggtc

SEQ ID NO: 5696467 - DNA, 25 bp, Homo sapien
ccctgcacttttggaacgtggaggt

SEQ ID NO: 5696468 - DNA, 25 bp, Homo sapien
ttggaacgtggaggtcggcggatca

SEQ ID NO: 5696469 - DNA, 25 bp, Homo sapien
tccctgcacttttggaacgtggagg

SEQ ID NO: 5696470 - DNA, 25 bp, Homo sapien
gacctccacgttccaaaagtgcagg

SEQ ID NO: 5696471 - DNA, 25 bp, Homo sapien
cctccacgttccaaaagtgcaggga

SEQ ID NO: 5696472 - DNA, 25 bp, Homo sapien
acctccacgttccaaaagtgcaggg

SEQ ID NO: 5696473 - DNA, 25 bp, Homo sapien
cgacctccacgttccaaaagtgcag

SEQ ID NO: 5696474 - DNA, 25 bp, Homo sapien
tgatccgccgacctccacgttccaa

SEQ ID NO: 5696475 - DNA, 25 bp, Homo sapien
tccacgttccaaaagtgcagggatt

SEQ ID NO: 5696476 - DNA, 25 bp, Homo sapien
atacgatacaggctaggtgtgtggt

SEQ ID NO: 5696477 - DNA, 25 bp, Homo sapien
gcttggtattgggtaactacactct

SEQ ID NO: 5696478 - DNA, 25 bp, Homo sapien
tattgggtaactacactcttacgac

SEQ ID NO: 5696479 - DNA, 25 bp, Homo sapien
actcttacgacattaacacagtgac

SEQ ID NO: 5696480 - DNA, 25 bp, Homo sapien
cactatctagcttggtattgggtaa

SEQ ID NO: 5696481 - DNA, 25 bp, Homo sapien
tggtaggctacactatctagcttgg

SEQ ID NO: 5696482 - DNA, 25 bp, Homo sapien
tacccaataccaagctagatagtgt

SEQ ID NO: 5696483 - DNA, 25 bp, Homo sapien
accacacacctagcctgtatcgtat

SEQ ID NO: 5696484 - DNA, 25 bp, Homo sapien
aagagtgtagttacccaataccaag

SEQ ID NO: 5696485 - DNA, 25 bp, Homo sapien
gtcactgtgttaatgtcgtaagagt

SEQ ID NO: 5696486 - DNA, 25 bp, Homo sapien
caagctagatagtgtagcctaccac

SEQ ID NO: 5696487 - DNA, 25 bp, Homo sapien
taatgtcgtaagagtgtagttaccc

SEQ ID NO: 5696488 - DNA, 25 bp, Homo sapien
ttggtctcaaactccgtgttgggat

SEQ ID NO: 5696489 - DNA, 25 bp, Homo sapien
tctcaaactccgtgttgggattaca

SEQ ID NO: 5696490 - DNA, 25 bp, Homo sapien
ggtctcaaactccgtgttgggatta

SEQ ID NO: 5696491 - DNA, 25 bp, Homo sapien
ctcaaactccgtgttgggattacag

SEQ ID NO: 5696492 - DNA, 25 bp, Homo sapien
gtctcaaactccgtgttgggattac

SEQ ID NO: 5696493 - DNA, 25 bp, Homo sapien
tggtctcaaactccgtgttgggatt

SEQ ID NO: 5696494 - DNA, 25 bp, Homo sapien
ctgtaatcccaacacggagtttgag

SEQ ID NO: 5696495 - DNA, 25 bp, Homo sapien
aatcccaacacggagtttgagacca

SEQ ID NO: 5696496 - DNA, 25 bp, Homo sapien
atcccaacacggagtttgagaccaa

SEQ ID NO: 5696497 - DNA, 25 bp, Homo sapien
tgtaatcccaacacggagtttgaga

SEQ ID NO: 5696498 - DNA, 25 bp, Homo sapien
gtaatcccaacacggagtttgagac

SEQ ID NO: 5696499 - DNA, 25 bp, Homo sapien
taatcccaacacggagtttgagacc

SEQ ID NO: 5696500 - DNA, 25 bp, Homo sapien
ctgctcccagcccatttttgaaatc

SEQ ID NO: 5696501 - DNA, 25 bp, Homo sapien
gctcccagcccatttttgaaatctt

SEQ ID NO: 5696502 - DNA, 25 bp, Homo sapien
tgctcccagcccatttttgaaatct

SEQ ID NO: 5696503 - DNA, 25 bp, Homo sapien
agccactgctcccagcccatttttg

SEQ ID NO: 5696504 - DNA, 25 bp, Homo sapien
ctcccagcccatttttgaaatcttt

SEQ ID NO: 5696505 - DNA, 25 bp, Homo sapien
gccactgctcccagcccatttttga

SEQ ID NO: 5696506 - DNA, 25 bp, Homo sapien
agatttcaaaaatgggctgggagca

SEQ ID NO: 5696507 - DNA, 25 bp, Homo sapien
tcaaaaatgggctgggagcagtggc

SEQ ID NO: 5696508 - DNA, 25 bp, Homo sapien
aagatttcaaaaatgggctgggagc

SEQ ID NO: 5696509 - DNA, 25 bp, Homo sapien
caaaaatgggctgggagcagtggct

SEQ ID NO: 5696510 - DNA, 25 bp, Homo sapien
aaagatttcaaaaatgggctgggag

SEQ ID NO: 5696511 - DNA, 25 bp, Homo sapien
gatttcaaaaatgggctgggagcag

SEQ ID NO: 5696512 - DNA, 25 bp, Homo sapien
gatttctcctgcctccgcctcgcga

SEQ ID NO: 5696513 - DNA, 25 bp, Homo sapien
agcgatttctcctgcctccgcctcg

SEQ ID NO: 5696514 - DNA, 25 bp, Homo sapien
tccgcctcgcgagtagctaggatta

SEQ ID NO: 5696515 - DNA, 25 bp, Homo sapien
ctccgcctcgcgagtagctaggatt

SEQ ID NO: 5696516 - DNA, 25 bp, Homo sapien
gcgatttctcctgcctccgcctcgc

SEQ ID NO: 5696517 - DNA, 25 bp, Homo sapien
cctccgcctcgcgagtagctaggat

SEQ ID NO: 5696518 - DNA, 25 bp, Homo sapien
cgcgaggcggaggcaggagaaatcg

SEQ ID NO: 5696519 - DNA, 25 bp, Homo sapien
cgaggcggaggcaggagaaatcgct

SEQ ID NO: 5696520 - DNA, 25 bp, Homo sapien
atcctagctactcgcgaggcggagg

SEQ ID NO: 5696521 - DNA, 25 bp, Homo sapien
tcgcgaggcggaggcaggagaaatc

SEQ ID NO: 5696522 - DNA, 25 bp, Homo sapien
gcgaggcggaggcaggagaaatcgc

SEQ ID NO: 5696523 - DNA, 25 bp, Homo sapien
aatcctagctactcgcgaggcggag

SEQ ID NO: 5696524 - DNA, 25 bp, Homo sapien
tagtgtatggtaatgtcttagggct

SEQ ID NO: 5696525 - DNA, 25 bp, Homo sapien
tggtaatgtcttagggcttcaaacc

SEQ ID NO: 5696526 - DNA, 25 bp, Homo sapien
gtcaccaaaagcaacgttcagtcct

SEQ ID NO: 5696527 - DNA, 25 bp, Homo sapien
cgttcagtcctaaaagctccattca

SEQ ID NO: 5696528 - DNA, 25 bp, Homo sapien
aaacccaccactcactcagtacagt

SEQ ID NO: 5696529 - DNA, 25 bp, Homo sapien
tccacagtagtgtatggtaatgtct

SEQ ID NO: 5696530 - DNA, 25 bp, Homo sapien
gacattaccatacactactgtggac

SEQ ID NO: 5696531 - DNA, 25 bp, Homo sapien
ggtttgaagccctaagacattacca

SEQ ID NO: 5696532 - DNA, 25 bp, Homo sapien
tgaatggagcttttaggactgaacg

SEQ ID NO: 5696533 - DNA, 25 bp, Homo sapien
ctgagtgagtggtgggtttgaagcc

SEQ ID NO: 5696534 - DNA, 25 bp, Homo sapien
aggactgaacgttgcttttggtgac

SEQ ID NO: 5696535 - DNA, 25 bp, Homo sapien
taagacattaccatacactactgtg

SEQ ID NO: 5696536 - DNA, 25 bp, Homo sapien
caaatgtcttcttcattgtcctcac

SEQ ID NO: 5696537 - DNA, 25 bp, Homo sapien
aaatgtcttcttcattgtcctcaca

SEQ ID NO: 5696538 - DNA, 25 bp, Homo sapien
tatattgactttgttaagtagaagt

SEQ ID NO: 5696539 - DNA, 25 bp, Homo sapien
acaaatgtcttcttcattgtcctca

SEQ ID NO: 5696540 - DNA, 25 bp, Homo sapien
tgaggacaatgaagaagacatttgt

SEQ ID NO: 5696541 - DNA, 25 bp, Homo sapien
tgtgaggacaatgaagaagacattt

SEQ ID NO: 5696542 - DNA, 25 bp, Homo sapien
gtgaggacaatgaagaagacatttg

SEQ ID NO: 5696543 - DNA, 25 bp, Homo sapien
acttctacttaacaaagtcaatata

SEQ ID NO: 5696544 - DNA, 25 bp, Homo sapien
ttaaggagcagaagatatattgact

SEQ ID NO: 5696545 - DNA, 25 bp, Homo sapien
tgtcctcacattgaataggctgagg

SEQ ID NO: 5696546 - DNA, 25 bp, Homo sapien
aaatgtcttcttcattgtcctcaca

SEQ ID NO: 5696547 - DNA, 25 bp, Homo sapien
tatattgactttgttaagtagaagt

SEQ ID NO: 5696548 - DNA, 25 bp, Homo sapien
gtagaagtaaatcatcacaaatgtc

SEQ ID NO: 5696549 - DNA, 25 bp, Homo sapien
gaaaaagttattaaggagcagaaga

SEQ ID NO: 5696550 - DNA, 25 bp, Homo sapien
tgtgaggacaatgaagaagacattt

SEQ ID NO: 5696551 - DNA, 25 bp, Homo sapien
gacatttgtgatgatttacttctac

SEQ ID NO: 5696552 - DNA, 25 bp, Homo sapien
cctcagcctattcaatgtgaggaca

SEQ ID NO: 5696553 - DNA, 25 bp, Homo sapien
gatgatttacttctacttaacaaag

SEQ ID NO: 5696554 - DNA, 25 bp, Homo sapien
ttaacaaagtcaatatatcttctgc

SEQ ID NO: 5696555 - DNA, 25 bp, Homo sapien
tatcttctgctccttaataactttt

SEQ ID NO: 5696556 - DNA, 25 bp, Homo sapien
aaggggtattaaggcaccagctgcc

SEQ ID NO: 5696557 - DNA, 25 bp, Homo sapien
acacaaggggtattaaggcaccagc

SEQ ID NO: 5696558 - DNA, 25 bp, Homo sapien
cacaaggggtattaaggcaccagct

SEQ ID NO: 5696559 - DNA, 25 bp, Homo sapien
caaaaactttactgatgagctcctg

SEQ ID NO: 5696560 - DNA, 25 bp, Homo sapien
ccaaaaactttactgatgagctcct

SEQ ID NO: 5696561 - DNA, 25 bp, Homo sapien
tccaaaaactttactgatgagctcc

SEQ ID NO: 5696562 - DNA, 25 bp, Homo sapien
caggagctcatcagtaaagtttttg

SEQ ID NO: 5696563 - DNA, 25 bp, Homo sapien
ggagctcatcagtaaagtttttgga

SEQ ID NO: 5696564 - DNA, 25 bp, Homo sapien
gcagctggtgccttaataccccttg

SEQ ID NO: 5696565 - DNA, 25 bp, Homo sapien
ggcagctggtgccttaatacccctt

SEQ ID NO: 5696566 - DNA, 25 bp, Homo sapien
agctggtgccttaataccccttgtg

SEQ ID NO: 5696567 - DNA, 25 bp, Homo sapien
gctggtgccttaataccccttgtgt

SEQ ID NO: 5696568 - DNA, 25 bp, Homo sapien
aggatgaaatacgaactgctaagcc

SEQ ID NO: 5696569 - DNA, 25 bp, Homo sapien
taacgctggagctatatgtgatctt

SEQ ID NO: 5696570 - DNA, 25 bp, Homo sapien
tgaaattttcttaacgctggagcta

SEQ ID NO: 5696571 - DNA, 25 bp, Homo sapien
gattatgaactaggtagaagaggat

SEQ ID NO: 5696572 - DNA, 25 bp, Homo sapien
gaagaggatgaaatacgaactgcta

SEQ ID NO: 5696573 - DNA, 25 bp, Homo sapien
tatgtgatctttagtgattatgaac

SEQ ID NO: 5696574 - DNA, 25 bp, Homo sapien
tagcagttcgtatttcatcctcttc

SEQ ID NO: 5696575 - DNA, 25 bp, Homo sapien
taaagatcacatatagctccagcgt

SEQ ID NO: 5696576 - DNA, 25 bp, Homo sapien
tagctccagcgttaagaaaatttca

SEQ ID NO: 5696577 - DNA, 25 bp, Homo sapien
ggcttagcagttcgtatttcatcct

SEQ ID NO: 5696578 - DNA, 25 bp, Homo sapien
catcctcttctacctagttcataat

SEQ ID NO: 5696579 - DNA, 25 bp, Homo sapien
gttcataatcactaaagatcacata

SEQ ID NO: 5696580 - DNA, 25 bp, Homo sapien
gacagcttcttatttgagattgact

SEQ ID NO: 5696581 - DNA, 25 bp, Homo sapien
ggacagcttcttatttgagattgac

SEQ ID NO: 5696582 - DNA, 25 bp, Homo sapien
taggacagcttcttatttgagattg

SEQ ID NO: 5696583 - DNA, 25 bp, Homo sapien
aggacagcttcttatttgagattga

SEQ ID NO: 5696584 - DNA, 25 bp, Homo sapien
agtcaatctcaaataagaagctgtc

SEQ ID NO: 5696585 - DNA, 25 bp, Homo sapien
gtcaatctcaaataagaagctgtcc

SEQ ID NO: 5696586 - DNA, 25 bp, Homo sapien
caatctcaaataagaagctgtccta

SEQ ID NO: 5696587 - DNA, 25 bp, Homo sapien
tcaatctcaaataagaagctgtcct

SEQ ID NO: 5696588 - DNA, 25 bp, Homo sapien
gacagcttcttatttgagattgact

SEQ ID NO: 5696589 - DNA, 25 bp, Homo sapien
caaaaaataatgtaggacagcttct

SEQ ID NO: 5696590 - DNA, 25 bp, Homo sapien
tgttcaaaaattgaaatatgtcacg

SEQ ID NO: 5696591 - DNA, 25 bp, Homo sapien
aaattgaaatatgtcacgaaaaact

SEQ ID NO: 5696592 - DNA, 25 bp, Homo sapien
taggacagcttcttatttgagattg

SEQ ID NO: 5696593 - DNA, 25 bp, Homo sapien
tcagggtacaaaaaataatgtagga

SEQ ID NO: 5696594 - DNA, 25 bp, Homo sapien
tcgtgacatatttcaatttttgaac

SEQ ID NO: 5696595 - DNA, 25 bp, Homo sapien
agtcaatctcaaataagaagctgtc

SEQ ID NO: 5696596 - DNA, 25 bp, Homo sapien
taataattagtaaagtcaatctcaa

SEQ ID NO: 5696597 - DNA, 25 bp, Homo sapien
gaagctgtcctacattattttttgt

SEQ ID NO: 5696598 - DNA, 25 bp, Homo sapien
gtcaatctcaaataagaagctgtcc

SEQ ID NO: 5696599 - DNA, 25 bp, Homo sapien
caatctcaaataagaagctgtccta

SEQ ID NO: 5696600 - DNA, 25 bp, Homo sapien
tgtatccactttcagtttacttcaa

SEQ ID NO: 5696601 - DNA, 25 bp, Homo sapien
taggtatttttgtatccactttcag

SEQ ID NO: 5696602 - DNA, 25 bp, Homo sapien
ccagccaaggataggtatttttgta

SEQ ID NO: 5696603 - DNA, 25 bp, Homo sapien
cactttcagtttacttcaatttgga

SEQ ID NO: 5696604 - DNA, 25 bp, Homo sapien
caatttggaagtatgagttacctaa

SEQ ID NO: 5696605 - DNA, 25 bp, Homo sapien
ccacacccagccaaggataggtatt

SEQ ID NO: 5696606 - DNA, 25 bp, Homo sapien
tccaaattgaagtaaactgaaagtg

SEQ ID NO: 5696607 - DNA, 25 bp, Homo sapien
taggtaactcatacttccaaattga

SEQ ID NO: 5696608 - DNA, 25 bp, Homo sapien
aatacctatccttggctgggtgtgg

SEQ ID NO: 5696609 - DNA, 25 bp, Homo sapien
tgaagtaaactgaaagtggatacaa

SEQ ID NO: 5696610 - DNA, 25 bp, Homo sapien
actgaaagtggatacaaaaatacct

SEQ ID NO: 5696611 - DNA, 25 bp, Homo sapien
tacaaaaatacctatccttggctgg

SEQ ID NO: 5696612 - DNA, 25 bp, Homo sapien
tactggcgcttgccaccatgcttgg

SEQ ID NO: 5696613 - DNA, 25 bp, Homo sapien
ctggcgcttgccaccatgcttggct

SEQ ID NO: 5696614 - DNA, 25 bp, Homo sapien
actggcgcttgccaccatgcttggc

SEQ ID NO: 5696615 - DNA, 25 bp, Homo sapien
cattactggcgcttgccaccatgct

SEQ ID NO: 5696616 - DNA, 25 bp, Homo sapien
ttactggcgcttgccaccatgcttg

SEQ ID NO: 5696617 - DNA, 25 bp, Homo sapien
attactggcgcttgccaccatgctt

SEQ ID NO: 5696618 - DNA, 25 bp, Homo sapien
aagcatggtggcaagcgccagtaat

SEQ ID NO: 5696619 - DNA, 25 bp, Homo sapien
agccaagcatggtggcaagcgccag

SEQ ID NO: 5696620 - DNA, 25 bp, Homo sapien
gccaagcatggtggcaagcgccagt

SEQ ID NO: 5696621 - DNA, 25 bp, Homo sapien
caagcatggtggcaagcgccagtaa

SEQ ID NO: 5696622 - DNA, 25 bp, Homo sapien
ccaagcatggtggcaagcgccagta

SEQ ID NO: 5696623 - DNA, 25 bp, Homo sapien
agcatggtggcaagcgccagtaatg

SEQ ID NO: 5696624 - DNA, 25 bp, Homo sapien
aattactgagtcaaaaaacacgcag

SEQ ID NO: 5696625 - DNA, 25 bp, Homo sapien
aaacttttgatgtaatgatcccgtt

SEQ ID NO: 5696626 - DNA, 25 bp, Homo sapien
tactgagtcaaaaaacacgcagttt

SEQ ID NO: 5696627 - DNA, 25 bp, Homo sapien
actgagtcaaaaaacacgcagtttt

SEQ ID NO: 5696628 - DNA, 25 bp, Homo sapien
taatgatcccgttttctggaaatgc

SEQ ID NO: 5696629 - DNA, 25 bp, Homo sapien
cttttgatgtaatgatcccgttttc

SEQ ID NO: 5696630 - DNA, 25 bp, Homo sapien
gcatttccagaaaacgggatcatta

SEQ ID NO: 5696631 - DNA, 25 bp, Homo sapien
cagaaaacgggatcattacatcaaa

SEQ ID NO: 5696632 - DNA, 25 bp, Homo sapien
aacgggatcattacatcaaaagttt

SEQ ID NO: 5696633 - DNA, 25 bp, Homo sapien
gaaaacgggatcattacatcaaaag

SEQ ID NO: 5696634 - DNA, 25 bp, Homo sapien
aactgcgtgttttttgactcagtaa

SEQ ID NO: 5696635 - DNA, 25 bp, Homo sapien
aaaactgcgtgttttttgactcagt

SEQ ID NO: 5696636 - DNA, 25 bp, Homo sapien
gactaagtttcagggtagcattttg

SEQ ID NO: 5696637 - DNA, 25 bp, Homo sapien
catgatgactaagtttcagggtagc

SEQ ID NO: 5696638 - DNA, 25 bp, Homo sapien
tgcttagggttttgcagaagagctt

SEQ ID NO: 5696639 - DNA, 25 bp, Homo sapien
taagtttcagggtagcattttgcta

SEQ ID NO: 5696640 - DNA, 25 bp, Homo sapien
tgtatcatgatgactaagtttcagg

SEQ ID NO: 5696641 - DNA, 25 bp, Homo sapien
ccagtttttgcttagggttttgcag

SEQ ID NO: 5696642 - DNA, 25 bp, Homo sapien
aagctcttctgcaaaaccctaagca

SEQ ID NO: 5696643 - DNA, 25 bp, Homo sapien
gaaacttagtcatcatgatacacag

SEQ ID NO: 5696644 - DNA, 25 bp, Homo sapien
tagcaaaatgctaccctgaaactta

SEQ ID NO: 5696645 - DNA, 25 bp, Homo sapien
ctgcaaaaccctaagcaaaaactgg

SEQ ID NO: 5696646 - DNA, 25 bp, Homo sapien
caaaatgctaccctgaaacttagtc

SEQ ID NO: 5696647 - DNA, 25 bp, Homo sapien
gctaccctgaaacttagtcatcatg

SEQ ID NO: 5696648 - DNA, 25 bp, Homo sapien
tggcgagatctaggctccctgctat

SEQ ID NO: 5696649 - DNA, 25 bp, Homo sapien
gagatctaggctccctgctatctct

SEQ ID NO: 5696650 - DNA, 25 bp, Homo sapien
gcgagatctaggctccctgctatct

SEQ ID NO: 5696651 - DNA, 25 bp, Homo sapien
atctaggctccctgctatctctgct

SEQ ID NO: 5696652 - DNA, 25 bp, Homo sapien
agtggcgagatctaggctccctgct

SEQ ID NO: 5696653 - DNA, 25 bp, Homo sapien
gtggcgagatctaggctccctgcta

SEQ ID NO: 5696654 - DNA, 25 bp, Homo sapien
agagatagcagggagcctagatctc

SEQ ID NO: 5696655 - DNA, 25 bp, Homo sapien
agatagcagggagcctagatctcgc

SEQ ID NO: 5696656 - DNA, 25 bp, Homo sapien
agcagagatagcagggagcctagat

SEQ ID NO: 5696657 - DNA, 25 bp, Homo sapien
atagcagggagcctagatctcgcca

SEQ ID NO: 5696658 - DNA, 25 bp, Homo sapien
agcagggagcctagatctcgccact

SEQ ID NO: 5696659 - DNA, 25 bp, Homo sapien
gagatagcagggagcctagatctcg

SEQ ID NO: 5696660 - DNA, 25 bp, Homo sapien
taaagatgtattgaccttactgaag

SEQ ID NO: 5696661 - DNA, 25 bp, Homo sapien
gatgtattgaccttactgaagtcat

SEQ ID NO: 5696662 - DNA, 25 bp, Homo sapien
ttctcagtaaagatgtattgacctt

SEQ ID NO: 5696663 - DNA, 25 bp, Homo sapien
tgtattgaccttactgaagtcattt

SEQ ID NO: 5696664 - DNA, 25 bp, Homo sapien
gcatattctcttgattcagttctca

SEQ ID NO: 5696665 - DNA, 25 bp, Homo sapien
catattgcatattctcttgattcag

SEQ ID NO: 5696666 - DNA, 25 bp, Homo sapien
aaatgacttcagtaaggtcaataca

SEQ ID NO: 5696667 - DNA, 25 bp, Homo sapien
tgaatcaagagaatatgcaatatgc

SEQ ID NO: 5696668 - DNA, 25 bp, Homo sapien
gaactgaatcaagagaatatgcaat

SEQ ID NO: 5696669 - DNA, 25 bp, Homo sapien
gacttcagtaaggtcaatacatctt

SEQ ID NO: 5696670 - DNA, 25 bp, Homo sapien
taaggtcaatacatctttactgaga

SEQ ID NO: 5696671 - DNA, 25 bp, Homo sapien
tgagaactgaatcaagagaatatgc

SEQ ID NO: 5696672 - DNA, 25 bp, Homo sapien
cctaagtatttaaatgtggatttct

SEQ ID NO: 5696673 - DNA, 25 bp, Homo sapien
gaaccatttgcaaggaaattgctga

SEQ ID NO: 5696674 - DNA, 25 bp, Homo sapien
ggaaattgctgactgaagacaaaag

SEQ ID NO: 5696675 - DNA, 25 bp, Homo sapien
ctgaagacaaaagacccctaagtat

SEQ ID NO: 5696676 - DNA, 25 bp, Homo sapien
ttttttgctgaaccatttgcaagga

SEQ ID NO: 5696677 - DNA, 25 bp, Homo sapien
tgctgactgaagacaaaagacccct

SEQ ID NO: 5696678 - DNA, 25 bp, Homo sapien
agaaatccacatttaaatacttagg

SEQ ID NO: 5696679 - DNA, 25 bp, Homo sapien
cagcaatttccttgcaaatggttca

SEQ ID NO: 5696680 - DNA, 25 bp, Homo sapien
tccttgcaaatggttcagcaaaaaa

SEQ ID NO: 5696681 - DNA, 25 bp, Homo sapien
atacttaggggtcttttgtcttcag

SEQ ID NO: 5696682 - DNA, 25 bp, Homo sapien
gggtcttttgtcttcagtcagcaat

SEQ ID NO: 5696683 - DNA, 25 bp, Homo sapien
tgtcttcagtcagcaatttccttgc

SEQ ID NO: 5696684 - DNA, 25 bp, Homo sapien
taatacaatataaaacatgacattt

SEQ ID NO: 5696685 - DNA, 25 bp, Homo sapien
cagtgtagccacatttactttacat

SEQ ID NO: 5696686 - DNA, 25 bp, Homo sapien
tttactttacattggaaataataca

SEQ ID NO: 5696687 - DNA, 25 bp, Homo sapien
gactacagtgtagccacatttactt

SEQ ID NO: 5696688 - DNA, 25 bp, Homo sapien
tgcaaaatttgaaataatgacttct

SEQ ID NO: 5696689 - DNA, 25 bp, Homo sapien
ttgaagactacagtgtagccacatt

SEQ ID NO: 5696690 - DNA, 25 bp, Homo sapien
tgtaaagtaaatgtggctacactgt

SEQ ID NO: 5696691 - DNA, 25 bp, Homo sapien
gaagtcattatttcaaattttgcaa

SEQ ID NO: 5696692 - DNA, 25 bp, Homo sapien
tgtattatttccaatgtaaagtaaa

SEQ ID NO: 5696693 - DNA, 25 bp, Homo sapien
aatgtggctacactgtagtcttcaa

SEQ ID NO: 5696694 - DNA, 25 bp, Homo sapien
aagtaaatgtggctacactgtagtc

SEQ ID NO: 5696695 - DNA, 25 bp, Homo sapien
taaatgtggctacactgtagtcttc

SEQ ID NO: 5696696 - DNA, 25 bp, Homo sapien
tcaccgtgtaggccaggctggtctg

SEQ ID NO: 5696697 - DNA, 25 bp, Homo sapien
agttatctgcccgcctctgcctccc

SEQ ID NO: 5696698 - DNA, 25 bp, Homo sapien
caggctggtctggaactcctgacct

SEQ ID NO: 5696699 - DNA, 25 bp, Homo sapien
aagttatctgcccgcctctgcctcc

SEQ ID NO: 5696700 - DNA, 25 bp, Homo sapien
caagttatctgcccgcctctgcctc

SEQ ID NO: 5696701 - DNA, 25 bp, Homo sapien
accgtgtaggccaggctggtctgga

SEQ ID NO: 5696702 - DNA, 25 bp, Homo sapien
gggaggcagaggcgggcagataact

SEQ ID NO: 5696703 - DNA, 25 bp, Homo sapien
gaggcagaggcgggcagataacttg

SEQ ID NO: 5696704 - DNA, 25 bp, Homo sapien
tccagaccagcctggcctacacggt

SEQ ID NO: 5696705 - DNA, 25 bp, Homo sapien
aggtcaggagttccagaccagcctg

SEQ ID NO: 5696706 - DNA, 25 bp, Homo sapien
cagaccagcctggcctacacggtga

SEQ ID NO: 5696707 - DNA, 25 bp, Homo sapien
ggaggcagaggcgggcagataactt

SEQ ID NO: 5696708 - DNA, 25 bp, Homo sapien
tgtggtaactgtgctctcccagatg

SEQ ID NO: 5696709 - DNA, 25 bp, Homo sapien
tttgatgtggtaactgtgctctccc

SEQ ID NO: 5696710 - DNA, 25 bp, Homo sapien
gatgtggtaactgtgctctcccaga

SEQ ID NO: 5696711 - DNA, 25 bp, Homo sapien
aatatttgatgtggtaactgtgctc

SEQ ID NO: 5696712 - DNA, 25 bp, Homo sapien
tatttgatgtggtaactgtgctctc

SEQ ID NO: 5696713 - DNA, 25 bp, Homo sapien
gctctcccagatgctacacaacaaa

SEQ ID NO: 5696714 - DNA, 25 bp, Homo sapien
tctgggagagcacagttaccacatc

SEQ ID NO: 5696715 - DNA, 25 bp, Homo sapien
gagcacagttaccacatcaaatatt

SEQ ID NO: 5696716 - DNA, 25 bp, Homo sapien
tgggagagcacagttaccacatcaa

SEQ ID NO: 5696717 - DNA, 25 bp, Homo sapien
tttgttgtgtagcatctgggagagc

SEQ ID NO: 5696718 - DNA, 25 bp, Homo sapien
catctgggagagcacagttaccaca

SEQ ID NO: 5696719 - DNA, 25 bp, Homo sapien
ggagagcacagttaccacatcaaat

SEQ ID NO: 5696720 - DNA, 25 bp, Homo sapien
atactgtaataactttaagccaaat

SEQ ID NO: 5696721 - DNA, 25 bp, Homo sapien
caaatttagatataatctcctgttt

SEQ ID NO: 5696722 - DNA, 25 bp, Homo sapien
ctcaaatttagatataatctcctgt

SEQ ID NO: 5696723 - DNA, 25 bp, Homo sapien
tctcaaatttagatataatctcctg

SEQ ID NO: 5696724 - DNA, 25 bp, Homo sapien
tcaaatttagatataatctcctgtt

SEQ ID NO: 5696725 - DNA, 25 bp, Homo sapien
gaatactgtaataactttaagccaa

SEQ ID NO: 5696726 - DNA, 25 bp, Homo sapien
aacaggagattatatctaaatttga

SEQ ID NO: 5696727 - DNA, 25 bp, Homo sapien
aaacaggagattatatctaaatttg

SEQ ID NO: 5696728 - DNA, 25 bp, Homo sapien
ttggcttaaagttattacagtattc

SEQ ID NO: 5696729 - DNA, 25 bp, Homo sapien
acaggagattatatctaaatttgag

SEQ ID NO: 5696730 - DNA, 25 bp, Homo sapien
atttggcttaaagttattacagtat

SEQ ID NO: 5696731 - DNA, 25 bp, Homo sapien
caggagattatatctaaatttgaga

SEQ ID NO: 5696732 - DNA, 25 bp, Homo sapien
atatccttgttaaaaattattctgg

SEQ ID NO: 5696733 - DNA, 25 bp, Homo sapien
ataactttaagccaaatatccttgt

SEQ ID NO: 5696734 - DNA, 25 bp, Homo sapien
tttggctgtttaagagaatactgta

SEQ ID NO: 5696735 - DNA, 25 bp, Homo sapien
taatctcctgttttggctgtttaag

SEQ ID NO: 5696736 - DNA, 25 bp, Homo sapien
tctcaaatttagatataatctcctg

SEQ ID NO: 5696737 - DNA, 25 bp, Homo sapien
gaatactgtaataactttaagccaa

SEQ ID NO: 5696738 - DNA, 25 bp, Homo sapien
ccagaataatttttaacaaggatat

SEQ ID NO: 5696739 - DNA, 25 bp, Homo sapien
ttctcttaaacagccaaaacaggag

SEQ ID NO: 5696740 - DNA, 25 bp, Homo sapien
tacagtattctcttaaacagccaaa

SEQ ID NO: 5696741 - DNA, 25 bp, Homo sapien
ttggcttaaagttattacagtattc

SEQ ID NO: 5696742 - DNA, 25 bp, Homo sapien
caggagattatatctaaatttgaga

SEQ ID NO: 5696743 - DNA, 25 bp, Homo sapien
acaaggatatttggcttaaagttat

SEQ ID NO: 5696744 - DNA, 25 bp, Homo sapien
caagtccatttagtatcagaagtac

SEQ ID NO: 5696745 - DNA, 25 bp, Homo sapien
tatcagaagtactaccctgagaact

SEQ ID NO: 5696746 - DNA, 25 bp, Homo sapien
tgagtaaggcattcctcaatgctgt

SEQ ID NO: 5696747 - DNA, 25 bp, Homo sapien
cctgagaactgagtaaggcattcct

SEQ ID NO: 5696748 - DNA, 25 bp, Homo sapien
gaccaacaagtccatttagtatcag

SEQ ID NO: 5696749 - DNA, 25 bp, Homo sapien
tactaccctgagaactgagtaaggc

SEQ ID NO: 5696750 - DNA, 25 bp, Homo sapien
gttctcagggtagtacttctgatac

SEQ ID NO: 5696751 - DNA, 25 bp, Homo sapien
ctgatactaaatggacttgttggtc

SEQ ID NO: 5696752 - DNA, 25 bp, Homo sapien
gtacttctgatactaaatggacttg

SEQ ID NO: 5696753 - DNA, 25 bp, Homo sapien
acagcattgaggaatgccttactca

SEQ ID NO: 5696754 - DNA, 25 bp, Homo sapien
ggaatgccttactcagttctcaggg

SEQ ID NO: 5696755 - DNA, 25 bp, Homo sapien
gccttactcagttctcagggtagta

SEQ ID NO: 5696756 - DNA, 25 bp, Homo sapien
aggtgggcacatcacttcaggccag

SEQ ID NO: 5696757 - DNA, 25 bp, Homo sapien
caaggtgggcacatcacttcaggcc

SEQ ID NO: 5696758 - DNA, 25 bp, Homo sapien
cacatcacttcaggccaggagttcg

SEQ ID NO: 5696759 - DNA, 25 bp, Homo sapien
acatcacttcaggccaggagttcga

SEQ ID NO: 5696760 - DNA, 25 bp, Homo sapien
ccaaggtgggcacatcacttcaggc

SEQ ID NO: 5696761 - DNA, 25 bp, Homo sapien
aaggtgggcacatcacttcaggcca

SEQ ID NO: 5696762 - DNA, 25 bp, Homo sapien
tcgaactcctggcctgaagtgatgt

SEQ ID NO: 5696763 - DNA, 25 bp, Homo sapien
tggcctgaagtgatgtgcccacctt

SEQ ID NO: 5696764 - DNA, 25 bp, Homo sapien
ggcctgaagtgatgtgcccaccttg

SEQ ID NO: 5696765 - DNA, 25 bp, Homo sapien
gcctgaagtgatgtgcccaccttgg

SEQ ID NO: 5696766 - DNA, 25 bp, Homo sapien
cgaactcctggcctgaagtgatgtg

SEQ ID NO: 5696767 - DNA, 25 bp, Homo sapien
ctggcctgaagtgatgtgcccacct

SEQ ID NO: 5696768 - DNA, 25 bp, Homo sapien
acttccatgtacttgtctcacttta

SEQ ID NO: 5696769 - DNA, 25 bp, Homo sapien
catgtacttgtctcactttaataat

SEQ ID NO: 5696770 - DNA, 25 bp, Homo sapien
aatgaacttccatgtacttgtctca

SEQ ID NO: 5696771 - DNA, 25 bp, Homo sapien
gaacttccatgtacttgtctcactt

SEQ ID NO: 5696772 - DNA, 25 bp, Homo sapien
taatgaacttccatgtacttgtctc

SEQ ID NO: 5696773 - DNA, 25 bp, Homo sapien
tccatgtacttgtctcactttaata

SEQ ID NO: 5696774 - DNA, 25 bp, Homo sapien
gagacaagtacatggaagttcatta

SEQ ID NO: 5696775 - DNA, 25 bp, Homo sapien
tattaaagtgagacaagtacatgga

SEQ ID NO: 5696776 - DNA, 25 bp, Homo sapien
taaagtgagacaagtacatggaagt

SEQ ID NO: 5696777 - DNA, 25 bp, Homo sapien
gtgagacaagtacatggaagttcat

SEQ ID NO: 5696778 - DNA, 25 bp, Homo sapien
aagtgagacaagtacatggaagttc

SEQ ID NO: 5696779 - DNA, 25 bp, Homo sapien
attattaaagtgagacaagtacatg

SEQ ID NO: 5696780 - DNA, 25 bp, Homo sapien
gaaacattgatacaatgttgtctat

SEQ ID NO: 5696781 - DNA, 25 bp, Homo sapien
ttgatagattttgagtgaaacattg

SEQ ID NO: 5696782 - DNA, 25 bp, Homo sapien
tgagtgaaacattgatacaatgttg

SEQ ID NO: 5696783 - DNA, 25 bp, Homo sapien
agtgaaacattgatacaatgttgtc

SEQ ID NO: 5696784 - DNA, 25 bp, Homo sapien
aatgttgatagattttgagtgaaac

SEQ ID NO: 5696785 - DNA, 25 bp, Homo sapien
acattgatacaatgttgtctatatt

SEQ ID NO: 5696786 - DNA, 25 bp, Homo sapien
gtttcactcaaaatctatcaacatt

SEQ ID NO: 5696787 - DNA, 25 bp, Homo sapien
caacattgtatcaatgtttcactca

SEQ ID NO: 5696788 - DNA, 25 bp, Homo sapien
gacaacattgtatcaatgtttcact

SEQ ID NO: 5696789 - DNA, 25 bp, Homo sapien
caatgtttcactcaaaatctatcaa

SEQ ID NO: 5696790 - DNA, 25 bp, Homo sapien
aatatagacaacattgtatcaatgt

SEQ ID NO: 5696791 - DNA, 25 bp, Homo sapien
aatgtttcactcaaaatctatcaac

SEQ ID NO: 5696792 - DNA, 25 bp, Homo sapien
tgagtgaaacattgatacaatgttg

SEQ ID NO: 5696793 - DNA, 25 bp, Homo sapien
gatacaatgttgtctatatttctgt

SEQ ID NO: 5696794 - DNA, 25 bp, Homo sapien
gtattattctgaaggatttgctaag

SEQ ID NO: 5696795 - DNA, 25 bp, Homo sapien
aatgttgatagattttgagtgaaac

SEQ ID NO: 5696796 - DNA, 25 bp, Homo sapien
ctgaaggatttgctaagtttttaag

SEQ ID NO: 5696797 - DNA, 25 bp, Homo sapien
taagttgaatagtaaaaatgttgat

SEQ ID NO: 5696798 - DNA, 25 bp, Homo sapien
cacagaaatatagacaacattgtat

SEQ ID NO: 5696799 - DNA, 25 bp, Homo sapien
caacattgtatcaatgtttcactca

SEQ ID NO: 5696800 - DNA, 25 bp, Homo sapien
caatgtttcactcaaaatctatcaa

SEQ ID NO: 5696801 - DNA, 25 bp, Homo sapien
cttagcaaatccttcagaataatac

SEQ ID NO: 5696802 - DNA, 25 bp, Homo sapien
taaaaacttagcaaatccttcagaa

SEQ ID NO: 5696803 - DNA, 25 bp, Homo sapien
tactattcaacttaaaaacttagca

SEQ ID NO: 5696804 - DNA, 25 bp, Homo sapien
atttattggcagtgttagcggccac

SEQ ID NO: 5696805 - DNA, 25 bp, Homo sapien
ttggcagtgttagcggccactaata

SEQ ID NO: 5696806 - DNA, 25 bp, Homo sapien
taagtttagcaatttattggcagtg

SEQ ID NO: 5696807 - DNA, 25 bp, Homo sapien
gtgttagcggccactaatacttaat

SEQ ID NO: 5696808 - DNA, 25 bp, Homo sapien
gcggccactaatacttaatttctag

SEQ ID NO: 5696809 - DNA, 25 bp, Homo sapien
tattggcagtgttagcggccactaa

SEQ ID NO: 5696810 - DNA, 25 bp, Homo sapien
gaaattaagtattagtggccgctaa

SEQ ID NO: 5696811 - DNA, 25 bp, Homo sapien
ctagaaattaagtattagtggccgc

SEQ ID NO: 5696812 - DNA, 25 bp, Homo sapien
cactgccaataaattgctaaactta

SEQ ID NO: 5696813 - DNA, 25 bp, Homo sapien
ttaagtattagtggccgctaacact

SEQ ID NO: 5696814 - DNA, 25 bp, Homo sapien
tattagtggccgctaacactgccaa

SEQ ID NO: 5696815 - DNA, 25 bp, Homo sapien
tagtggccgctaacactgccaataa

SEQ ID NO: 5696816 - DNA, 25 bp, Homo sapien
ggtctcactgcaagctccctctccc

SEQ ID NO: 5696817 - DNA, 25 bp, Homo sapien
catggtctcactgcaagctccctct

SEQ ID NO: 5696818 - DNA, 25 bp, Homo sapien
tggtctcactgcaagctccctctcc

SEQ ID NO: 5696819 - DNA, 25 bp, Homo sapien
atggtctcactgcaagctccctctc

SEQ ID NO: 5696820 - DNA, 25 bp, Homo sapien
gcatggtctcactgcaagctccctc

SEQ ID NO: 5696821 - DNA, 25 bp, Homo sapien
gtctcactgcaagctccctctcccg

SEQ ID NO: 5696822 - DNA, 25 bp, Homo sapien
ggagagggagcttgcagtgagacca

SEQ ID NO: 5696823 - DNA, 25 bp, Homo sapien
cgggagagggagcttgcagtgagac

SEQ ID NO: 5696824 - DNA, 25 bp, Homo sapien
agagggagcttgcagtgagaccatg

SEQ ID NO: 5696825 - DNA, 25 bp, Homo sapien
gagggagcttgcagtgagaccatgc

SEQ ID NO: 5696826 - DNA, 25 bp, Homo sapien
gggagagggagcttgcagtgagacc

SEQ ID NO: 5696827 - DNA, 25 bp, Homo sapien
gagagggagcttgcagtgagaccat

SEQ ID NO: 5696828 - DNA, 25 bp, Homo sapien
gaatagcttatgttagtagatacag

SEQ ID NO: 5696829 - DNA, 25 bp, Homo sapien
gcttatgttagtagatacagatctc

SEQ ID NO: 5696830 - DNA, 25 bp, Homo sapien
tagtagatacagatctctgaaaaat

SEQ ID NO: 5696831 - DNA, 25 bp, Homo sapien
tatactctataatactacatggtac

SEQ ID NO: 5696832 - DNA, 25 bp, Homo sapien
tatgttagtagatacagatctctga

SEQ ID NO: 5696833 - DNA, 25 bp, Homo sapien
ctctataatactacatggtacattg

SEQ ID NO: 5696834 - DNA, 25 bp, Homo sapien
tatataatactatgtaactactaca

SEQ ID NO: 5696835 - DNA, 25 bp, Homo sapien
gagatctgtatctactaacataagc

SEQ ID NO: 5696836 - DNA, 25 bp, Homo sapien
ctgtatctactaacataagctattc

SEQ ID NO: 5696837 - DNA, 25 bp, Homo sapien
tcagagatctgtatctactaacata

SEQ ID NO: 5696838 - DNA, 25 bp, Homo sapien
aatttttcagagatctgtatctact

SEQ ID NO: 5696839 - DNA, 25 bp, Homo sapien
caatgtaccatgtagtattatagag

SEQ ID NO: 5696840 - DNA, 25 bp, Homo sapien
aaagcactgtcatacagcatatata

SEQ ID NO: 5696841 - DNA, 25 bp, Homo sapien
acatttggggtgttcttccaggctt

SEQ ID NO: 5696842 - DNA, 25 bp, Homo sapien
aagcactgtcatacagcatatatat

SEQ ID NO: 5696843 - DNA, 25 bp, Homo sapien
taacatttggggtgttcttccaggc

SEQ ID NO: 5696844 - DNA, 25 bp, Homo sapien
caaagataacatttggggtgttctt

SEQ ID NO: 5696845 - DNA, 25 bp, Homo sapien
catttggggtgttcttccaggcttt

SEQ ID NO: 5696846 - DNA, 25 bp, Homo sapien
tatatatgctgtatgacagtgcttt

SEQ ID NO: 5696847 - DNA, 25 bp, Homo sapien
aagcctggaagaacaccccaaatgt

SEQ ID NO: 5696848 - DNA, 25 bp, Homo sapien
aaagcctggaagaacaccccaaatg

SEQ ID NO: 5696849 - DNA, 25 bp, Homo sapien
gcctggaagaacaccccaaatgtta

SEQ ID NO: 5696850 - DNA, 25 bp, Homo sapien
aagaacaccccaaatgttatctttg

SEQ ID NO: 5696851 - DNA, 25 bp, Homo sapien
cctggaagaacaccccaaatgttat

SEQ ID NO: 5696852 - DNA, 25 bp, Homo sapien
tatataaacttcaaaaagcactgtc

SEQ ID NO: 5696853 - DNA, 25 bp, Homo sapien
aagcactgtcatacagcatatatat

SEQ ID NO: 5696854 - DNA, 25 bp, Homo sapien
taacatttggggtgttcttccaggc

SEQ ID NO: 5696855 - DNA, 25 bp, Homo sapien
catttggggtgttcttccaggcttt

SEQ ID NO: 5696856 - DNA, 25 bp, Homo sapien
acttcaaaaagcactgtcatacagc

SEQ ID NO: 5696857 - DNA, 25 bp, Homo sapien
tccaggctttttggggcttatataa

SEQ ID NO: 5696858 - DNA, 25 bp, Homo sapien
catctttatcttacctttgatccga

SEQ ID NO: 5696859 - DNA, 25 bp, Homo sapien
tctttatcttacctttgatccgaat

SEQ ID NO: 5696860 - DNA, 25 bp, Homo sapien
cctttgatccgaataaagtaataca

SEQ ID NO: 5696861 - DNA, 25 bp, Homo sapien
tcttacctttgatccgaataaagta

SEQ ID NO: 5696862 - DNA, 25 bp, Homo sapien
ctttgatccgaataaagtaatacat

SEQ ID NO: 5696863 - DNA, 25 bp, Homo sapien
tatcttacctttgatccgaataaag

SEQ ID NO: 5696864 - DNA, 25 bp, Homo sapien
tcggatcaaaggtaagataaagatg

SEQ ID NO: 5696865 - DNA, 25 bp, Homo sapien
ggatcaaaggtaagataaagatgag

SEQ ID NO: 5696866 - DNA, 25 bp, Homo sapien
tattcggatcaaaggtaagataaag

SEQ ID NO: 5696867 - DNA, 25 bp, Homo sapien
tactttattcggatcaaaggtaaga

SEQ ID NO: 5696868 - DNA, 25 bp, Homo sapien
tgtattactttattcggatcaaagg

SEQ ID NO: 5696869 - DNA, 25 bp, Homo sapien
ctttattcggatcaaaggtaagata

SEQ ID NO: 5696870 - DNA, 25 bp, Homo sapien
aggaatactagtcaagtgactgaag

SEQ ID NO: 5696871 - DNA, 25 bp, Homo sapien
gaatactagtcaagtgactgaagat

SEQ ID NO: 5696872 - DNA, 25 bp, Homo sapien
aaggaatactagtcaagtgactgaa

SEQ ID NO: 5696873 - DNA, 25 bp, Homo sapien
ggaatactagtcaagtgactgaaga

SEQ ID NO: 5696874 - DNA, 25 bp, Homo sapien
tcttcagtcacttgactagtattcc

SEQ ID NO: 5696875 - DNA, 25 bp, Homo sapien
cttcagtcacttgactagtattcct

SEQ ID NO: 5696876 - DNA, 25 bp, Homo sapien
atcttcagtcacttgactagtattc

SEQ ID NO: 5696877 - DNA, 25 bp, Homo sapien
ttcagtcacttgactagtattcctt

SEQ ID NO: 5696878 - DNA, 25 bp, Homo sapien
ctcctttgaaaaggaatactagtca

SEQ ID NO: 5696879 - DNA, 25 bp, Homo sapien
gccaccgcagcttgctaaaatggag

SEQ ID NO: 5696880 - DNA, 25 bp, Homo sapien
ccgcagcttgctaaaatggagtttt

SEQ ID NO: 5696881 - DNA, 25 bp, Homo sapien
ggaatactagtcaagtgactgaaga

SEQ ID NO: 5696882 - DNA, 25 bp, Homo sapien
cgtgagccaccgcagcttgctaaaa

SEQ ID NO: 5696883 - DNA, 25 bp, Homo sapien
tgctaaaatggagttttattactcc

SEQ ID NO: 5696884 - DNA, 25 bp, Homo sapien
aaaactccattttagcaagctgcgg

SEQ ID NO: 5696885 - DNA, 25 bp, Homo sapien
tcttcagtcacttgactagtattcc

SEQ ID NO: 5696886 - DNA, 25 bp, Homo sapien
tgactagtattccttttcaaaggag

SEQ ID NO: 5696887 - DNA, 25 bp, Homo sapien
ggagtaataaaactccattttagca

SEQ ID NO: 5696888 - DNA, 25 bp, Homo sapien
tccattttagcaagctgcggtggct

SEQ ID NO: 5696889 - DNA, 25 bp, Homo sapien
ttttagcaagctgcggtggctcacg

SEQ ID NO: 5696890 - DNA, 25 bp, Homo sapien
cccggattcaagtgattctcctgcc

SEQ ID NO: 5696891 - DNA, 25 bp, Homo sapien
cgcctcccggattcaagtgattctc

SEQ ID NO: 5696892 - DNA, 25 bp, Homo sapien
gcctcccggattcaagtgattctcc

SEQ ID NO: 5696893 - DNA, 25 bp, Homo sapien
acaggcgcctgccaccacgcctggc

SEQ ID NO: 5696894 - DNA, 25 bp, Homo sapien
ttacaggcgcctgccaccacgcctg

SEQ ID NO: 5696895 - DNA, 25 bp, Homo sapien
attacaggcgcctgccaccacgcct

SEQ ID NO: 5696896 - DNA, 25 bp, Homo sapien
ggcaggagaatcacttgaatccggg

SEQ ID NO: 5696897 - DNA, 25 bp, Homo sapien
aggcgtggtggcaggcgcctgtaat

SEQ ID NO: 5696898 - DNA, 25 bp, Homo sapien
gccaggcgtggtggcaggcgcctgt

SEQ ID NO: 5696899 - DNA, 25 bp, Homo sapien
caggcgtggtggcaggcgcctgtaa

SEQ ID NO: 5696900 - DNA, 25 bp, Homo sapien
ggagaatcacttgaatccgggaggc

SEQ ID NO: 5696901 - DNA, 25 bp, Homo sapien
gagaatcacttgaatccgggaggcg

SEQ ID NO: 5696902 - DNA, 25 bp, Homo sapien
taaaataggtattctgaagaggata

SEQ ID NO: 5696903 - DNA, 25 bp, Homo sapien
taaactattcataatgcattgtcac

SEQ ID NO: 5696904 - DNA, 25 bp, Homo sapien
taatgcattgtcactccctatattg

SEQ ID NO: 5696905 - DNA, 25 bp, Homo sapien
tcctctaactaaaataggtattctg

SEQ ID NO: 5696906 - DNA, 25 bp, Homo sapien
tcctccagtcctctaactaaaatag

SEQ ID NO: 5696907 - DNA, 25 bp, Homo sapien
cactccctatattgatcctttaaat

SEQ ID NO: 5696908 - DNA, 25 bp, Homo sapien
cagaatacctattttagttagagga

SEQ ID NO: 5696909 - DNA, 25 bp, Homo sapien
caatatagggagtgacaatgcatta

SEQ ID NO: 5696910 - DNA, 25 bp, Homo sapien
tatttaaaggatcaatatagggagt

SEQ ID NO: 5696911 - DNA, 25 bp, Homo sapien
tatcctcttcagaatacctatttta

SEQ ID NO: 5696912 - DNA, 25 bp, Homo sapien
cctattttagttagaggactggagg

SEQ ID NO: 5696913 - DNA, 25 bp, Homo sapien
gtgacaatgcattatgaatagttta

SEQ ID NO: 5696914 - DNA, 25 bp, Homo sapien
catttgggagagcttgaccatttta

SEQ ID NO: 5696915 - DNA, 25 bp, Homo sapien
accgtgttgcctgtatcaacatttg

SEQ ID NO: 5696916 - DNA, 25 bp, Homo sapien
gagcacatagactaccgtgttgcct

SEQ ID NO: 5696917 - DNA, 25 bp, Homo sapien
gcacatagactaccgtgttgcctgt

SEQ ID NO: 5696918 - DNA, 25 bp, Homo sapien
tagactaccgtgttgcctgtatcaa

SEQ ID NO: 5696919 - DNA, 25 bp, Homo sapien
gactaccgtgttgcctgtatcaaca

SEQ ID NO: 5696920 - DNA, 25 bp, Homo sapien
taaaatggtcaagctctcccaaatg

SEQ ID NO: 5696921 - DNA, 25 bp, Homo sapien
ttgatacaggcaacacggtagtcta

SEQ ID NO: 5696922 - DNA, 25 bp, Homo sapien
caggcaacacggtagtctatgtgct

SEQ ID NO: 5696923 - DNA, 25 bp, Homo sapien
gatacaggcaacacggtagtctatg

SEQ ID NO: 5696924 - DNA, 25 bp, Homo sapien
tgttgatacaggcaacacggtagtc

SEQ ID NO: 5696925 - DNA, 25 bp, Homo sapien
caaatgttgatacaggcaacacggt

SEQ ID NO: 5696926 - DNA, 25 bp, Homo sapien
tgtaaagacataagagatatgtcca

SEQ ID NO: 5696927 - DNA, 25 bp, Homo sapien
aacaattaacattgattgcctctgg

SEQ ID NO: 5696928 - DNA, 25 bp, Homo sapien
cataagagatatgtccagaaataca

SEQ ID NO: 5696929 - DNA, 25 bp, Homo sapien
gatatgtccagaaatacatatgcca

SEQ ID NO: 5696930 - DNA, 25 bp, Homo sapien
tgccaaacaattaacattgattgcc

SEQ ID NO: 5696931 - DNA, 25 bp, Homo sapien
tacatatgccaaacaattaacattg

SEQ ID NO: 5696932 - DNA, 25 bp, Homo sapien
ggcaatcaatgttaattgtttggca

SEQ ID NO: 5696933 - DNA, 25 bp, Homo sapien
tggacatatctcttatgtctttaca

SEQ ID NO: 5696934 - DNA, 25 bp, Homo sapien
caatgttaattgtttggcatatgta

SEQ ID NO: 5696935 - DNA, 25 bp, Homo sapien
tggcatatgtatttctggacatatc

SEQ ID NO: 5696936 - DNA, 25 bp, Homo sapien
tgtatttctggacatatctcttatg

SEQ ID NO: 5696937 - DNA, 25 bp, Homo sapien
ccagaggcaatcaatgttaattgtt

SEQ ID NO: 5696938 - DNA, 25 bp, Homo sapien
agggcatcccacgtgatttgttgtg

SEQ ID NO: 5696939 - DNA, 25 bp, Homo sapien
cacgtgatttgttgtgtcccttccc

SEQ ID NO: 5696940 - DNA, 25 bp, Homo sapien
cagcattgaagtcaaaaatttttct

SEQ ID NO: 5696941 - DNA, 25 bp, Homo sapien
gatttgttgtgtcccttcccttgct

SEQ ID NO: 5696942 - DNA, 25 bp, Homo sapien
tcccttgctgttaatatactgtgct

SEQ ID NO: 5696943 - DNA, 25 bp, Homo sapien
aaatttttctgtgatttacagggca

SEQ ID NO: 5696944 - DNA, 25 bp, Homo sapien
gaagggacacaacaaatcacgtggg

SEQ ID NO: 5696945 - DNA, 25 bp, Homo sapien
agaaaaatttttgacttcaatgctg

SEQ ID NO: 5696946 - DNA, 25 bp, Homo sapien
cacaacaaatcacgtgggatgccct

SEQ ID NO: 5696947 - DNA, 25 bp, Homo sapien
gcaagggaagggacacaacaaatca

SEQ ID NO: 5696948 - DNA, 25 bp, Homo sapien
tgccctgtaaatcacagaaaaattt

SEQ ID NO: 5696949 - DNA, 25 bp, Homo sapien
cacagtatattaacagcaagggaag

SEQ ID NO: 5696950 - DNA, 25 bp, Homo sapien
ctctttgcccaggctgtagtgcagt

SEQ ID NO: 5696951 - DNA, 25 bp, Homo sapien
gctctctttgcccaggctgtagtgc

SEQ ID NO: 5696952 - DNA, 25 bp, Homo sapien
ctctctttgcccaggctgtagtgca

SEQ ID NO: 5696953 - DNA, 25 bp, Homo sapien
tgctctctttgcccaggctgtagtg

SEQ ID NO: 5696954 - DNA, 25 bp, Homo sapien
tctttgcccaggctgtagtgcagtg

SEQ ID NO: 5696955 - DNA, 25 bp, Homo sapien
tctctttgcccaggctgtagtgcag

SEQ ID NO: 5696956 - DNA, 25 bp, Homo sapien
cactacagcctgggcaaagagagca

SEQ ID NO: 5696957 - DNA, 25 bp, Homo sapien
cactgcactacagcctgggcaaaga

SEQ ID NO: 5696958 - DNA, 25 bp, Homo sapien
tgcactacagcctgggcaaagagag

SEQ ID NO: 5696959 - DNA, 25 bp, Homo sapien
gcactacagcctgggcaaagagagc

SEQ ID NO: 5696960 - DNA, 25 bp, Homo sapien
ctgcactacagcctgggcaaagaga

SEQ ID NO: 5696961 - DNA, 25 bp, Homo sapien
actgcactacagcctgggcaaagag

SEQ ID NO: 5696962 - DNA, 25 bp, Homo sapien
aaatatgtttatatttttgcccttg

SEQ ID NO: 5696963 - DNA, 25 bp, Homo sapien
aatatgtttatatttttgcccttga

SEQ ID NO: 5696964 - DNA, 25 bp, Homo sapien
atatgtttatatttttgcccttgat

SEQ ID NO: 5696965 - DNA, 25 bp, Homo sapien
tatgtttatatttttgcccttgatt

SEQ ID NO: 5696966 - DNA, 25 bp, Homo sapien
ctaaatatgtttatatttttgccct

SEQ ID NO: 5696967 - DNA, 25 bp, Homo sapien
caagggcaaaaatataaacatattt

SEQ ID NO: 5696968 - DNA, 25 bp, Homo sapien
tcaagggcaaaaatataaacatatt

SEQ ID NO: 5696969 - DNA, 25 bp, Homo sapien
aatcaagggcaaaaatataaacata

SEQ ID NO: 5696970 - DNA, 25 bp, Homo sapien
agggcaaaaatataaacatatttag

SEQ ID NO: 5696971 - DNA, 25 bp, Homo sapien
atcaagggcaaaaatataaacatat

SEQ ID NO: 5696972 - DNA, 25 bp, Homo sapien
cgcccacctcgatttcccaaagtgc

SEQ ID NO: 5696973 - DNA, 25 bp, Homo sapien
gatccgcccacctcgatttcccaaa

SEQ ID NO: 5696974 - DNA, 25 bp, Homo sapien
cacctcgatttcccaaagtgctggg

SEQ ID NO: 5696975 - DNA, 25 bp, Homo sapien
ctggtctagaaatcctgacctcgtg

SEQ ID NO: 5696976 - DNA, 25 bp, Homo sapien
tggtctagaaatcctgacctcgtga

SEQ ID NO: 5696977 - DNA, 25 bp, Homo sapien
ggtctagaaatcctgacctcgtgat

SEQ ID NO: 5696978 - DNA, 25 bp, Homo sapien
cccagcactttgggaaatcgaggtg

SEQ ID NO: 5696979 - DNA, 25 bp, Homo sapien
tcacgaggtcaggatttctagacca

SEQ ID NO: 5696980 - DNA, 25 bp, Homo sapien
cacgaggtcaggatttctagaccag

SEQ ID NO: 5696981 - DNA, 25 bp, Homo sapien
gcactttgggaaatcgaggtgggcg

SEQ ID NO: 5696982 - DNA, 25 bp, Homo sapien
atcacgaggtcaggatttctagacc

SEQ ID NO: 5696983 - DNA, 25 bp, Homo sapien
tttgggaaatcgaggtgggcggatc

SEQ ID NO: 5696984 - DNA, 25 bp, Homo sapien
catgatctctggctcactgcaacct

SEQ ID NO: 5696985 - DNA, 25 bp, Homo sapien
gattcttgtgcctccgcctcctgag

SEQ ID NO: 5696986 - DNA, 25 bp, Homo sapien
gcaacctccgcctcctgggttcaag

SEQ ID NO: 5696987 - DNA, 25 bp, Homo sapien
ctcactgcaacctccgcctcctggg

SEQ ID NO: 5696988 - DNA, 25 bp, Homo sapien
cgattcttgtgcctccgcctcctga

SEQ ID NO: 5696989 - DNA, 25 bp, Homo sapien
aggttgcagtgagccagagatcatg

SEQ ID NO: 5696990 - DNA, 25 bp, Homo sapien
cccaggaggcggaggttgcagtgag

SEQ ID NO: 5696991 - DNA, 25 bp, Homo sapien
tcaggaggcggaggcacaagaatcg

SEQ ID NO: 5696992 - DNA, 25 bp, Homo sapien
cttgaacccaggaggcggaggttgc

SEQ ID NO: 5696993 - DNA, 25 bp, Homo sapien
ctcaggaggcggaggcacaagaatc

SEQ ID NO: 5696994 - DNA, 25 bp, Homo sapien
tcaacacttaatgatagtagactcc

SEQ ID NO: 5696995 - DNA, 25 bp, Homo sapien
aatgatagtagactcctttcgtcac

SEQ ID NO: 5696996 - DNA, 25 bp, Homo sapien
gatttcaacacttaatgatagtaga

SEQ ID NO: 5696997 - DNA, 25 bp, Homo sapien
tgggattaagggtgcagatttcaac

SEQ ID NO: 5696998 - DNA, 25 bp, Homo sapien
acttaatgatagtagactcctttcg

SEQ ID NO: 5696999 - DNA, 25 bp, Homo sapien
agtagactcctttcgtcactttgat

SEQ ID NO: 5697000 - DNA, 25 bp, Homo sapien
aagtgacgaaaggagtctactatca

SEQ ID NO: 5697001 - DNA, 25 bp, Homo sapien
gaaaggagtctactatcattaagtg

SEQ ID NO: 5697002 - DNA, 25 bp, Homo sapien
tgttgaaatctgcacccttaatccc

SEQ ID NO: 5697003 - DNA, 25 bp, Homo sapien
atcaaagtgacgaaaggagtctact

SEQ ID NO: 5697004 - DNA, 25 bp, Homo sapien
gagtctactatcattaagtgttgaa

SEQ ID NO: 5697005 - DNA, 25 bp, Homo sapien
gttgaaatctgcacccttaatccca

SEQ ID NO: 5697006 - DNA, 25 bp, Homo sapien
ccttgagtaggagtagatactgtta

SEQ ID NO: 5697007 - DNA, 25 bp, Homo sapien
aaccttgagtaggagtagatactgt

SEQ ID NO: 5697008 - DNA, 25 bp, Homo sapien
tcaaaaccttgagtaggagtagata

SEQ ID NO: 5697009 - DNA, 25 bp, Homo sapien
gagtaggagtagatactgttattca

SEQ ID NO: 5697010 - DNA, 25 bp, Homo sapien
caaaaccttgagtaggagtagatac

SEQ ID NO: 5697011 - DNA, 25 bp, Homo sapien
aaaccttgagtaggagtagatactg

SEQ ID NO: 5697012 - DNA, 25 bp, Homo sapien
tatctactcctactcaaggttttga

SEQ ID NO: 5697013 - DNA, 25 bp, Homo sapien
cagtatctactcctactcaaggttt

SEQ ID NO: 5697014 - DNA, 25 bp, Homo sapien
taacagtatctactcctactcaagg

SEQ ID NO: 5697015 - DNA, 25 bp, Homo sapien
tgaataacagtatctactcctactc

SEQ ID NO: 5697016 - DNA, 25 bp, Homo sapien
gtatctactcctactcaaggttttg

SEQ ID NO: 5697017 - DNA, 25 bp, Homo sapien
gaataacagtatctactcctactca

SEQ ID NO: 5697018 - DNA, 25 bp, Homo sapien
ttgactatgtccaacactgttaaag

SEQ ID NO: 5697019 - DNA, 25 bp, Homo sapien
acttgactatgtccaacactgttaa

SEQ ID NO: 5697020 - DNA, 25 bp, Homo sapien
ggcagaaaaaagtagcaggacatta

SEQ ID NO: 5697021 - DNA, 25 bp, Homo sapien
cagaaaaaagtagcaggacattaat

SEQ ID NO: 5697022 - DNA, 25 bp, Homo sapien
tggcagaaaaaagtagcaggacatt

SEQ ID NO: 5697023 - DNA, 25 bp, Homo sapien
actatgtccaacactgttaaagttg

SEQ ID NO: 5697024 - DNA, 25 bp, Homo sapien
taatgtcctgctacttttttctgcc

SEQ ID NO: 5697025 - DNA, 25 bp, Homo sapien
aatgtcctgctacttttttctgcca

SEQ ID NO: 5697026 - DNA, 25 bp, Homo sapien
attaatgtcctgctacttttttctg

SEQ ID NO: 5697027 - DNA, 25 bp, Homo sapien
ctttaacagtgttggacatagtcaa

SEQ ID NO: 5697028 - DNA, 25 bp, Homo sapien
caactttaacagtgttggacatagt

SEQ ID NO: 5697029 - DNA, 25 bp, Homo sapien
ttaacagtgttggacatagtcaagt

SEQ ID NO: 5697030 - DNA, 25 bp, Homo sapien
ggatcacaggtgtgagctgccgcac

SEQ ID NO: 5697031 - DNA, 25 bp, Homo sapien
agcctcctgaagttttgggatcaca

SEQ ID NO: 5697032 - DNA, 25 bp, Homo sapien
cctgaagttttgggatcacaggtgt

SEQ ID NO: 5697033 - DNA, 25 bp, Homo sapien
tgaagttttgggatcacaggtgtga

SEQ ID NO: 5697034 - DNA, 25 bp, Homo sapien
ctgaagttttgggatcacaggtgtg

SEQ ID NO: 5697035 - DNA, 25 bp, Homo sapien
tcctgaagttttgggatcacaggtg

SEQ ID NO: 5697036 - DNA, 25 bp, Homo sapien
cacacctgtgatcccaaaacttcag

SEQ ID NO: 5697037 - DNA, 25 bp, Homo sapien
acacctgtgatcccaaaacttcagg

SEQ ID NO: 5697038 - DNA, 25 bp, Homo sapien
tcacacctgtgatcccaaaacttca

SEQ ID NO: 5697039 - DNA, 25 bp, Homo sapien
cacctgtgatcccaaaacttcagga

SEQ ID NO: 5697040 - DNA, 25 bp, Homo sapien
tgtgatcccaaaacttcaggaggct

SEQ ID NO: 5697041 - DNA, 25 bp, Homo sapien
gtgcggcagctcacacctgtgatcc

SEQ ID NO: 5697042 - DNA, 25 bp, Homo sapien
ctgcacctggccttaaatttttcta

SEQ ID NO: 5697043 - DNA, 25 bp, Homo sapien
aaactcctgatctcatggtctgccc

SEQ ID NO: 5697044 - DNA, 25 bp, Homo sapien
tgcacctggccttaaatttttctat

SEQ ID NO: 5697045 - DNA, 25 bp, Homo sapien
actgcacctggccttaaatttttct

SEQ ID NO: 5697046 - DNA, 25 bp, Homo sapien
gatctcatggtctgcccgcctcggc

SEQ ID NO: 5697047 - DNA, 25 bp, Homo sapien
tgatctcatggtctgcccgcctcgg

SEQ ID NO: 5697048 - DNA, 25 bp, Homo sapien
agaaaaatttaaggccaggtgcagt

SEQ ID NO: 5697049 - DNA, 25 bp, Homo sapien
ccgaggcgggcagaccatgagatca

SEQ ID NO: 5697050 - DNA, 25 bp, Homo sapien
atagaaaaatttaaggccaggtgca

SEQ ID NO: 5697051 - DNA, 25 bp, Homo sapien
tagaaaaatttaaggccaggtgcag

SEQ ID NO: 5697052 - DNA, 25 bp, Homo sapien
gggcagaccatgagatcaggagttt

SEQ ID NO: 5697053 - DNA, 25 bp, Homo sapien
gccgaggcgggcagaccatgagatc

SEQ ID NO: 5697054 - DNA, 25 bp, Homo sapien
tgagactacaggcacggaccaccat

SEQ ID NO: 5697055 - DNA, 25 bp, Homo sapien
caccatgcacggctaatttctgtat

SEQ ID NO: 5697056 - DNA, 25 bp, Homo sapien
aggcacggaccaccatgcacggcta

SEQ ID NO: 5697057 - DNA, 25 bp, Homo sapien
ggcacggaccaccatgcacggctaa

SEQ ID NO: 5697058 - DNA, 25 bp, Homo sapien
tacaggcacggaccaccatgcacgg

SEQ ID NO: 5697059 - DNA, 25 bp, Homo sapien
gaccaccatgcacggctaatttctg

SEQ ID NO: 5697060 - DNA, 25 bp, Homo sapien
atggtggtccgtgcctgtagtctca

SEQ ID NO: 5697061 - DNA, 25 bp, Homo sapien
tagccgtgcatggtggtccgtgcct

SEQ ID NO: 5697062 - DNA, 25 bp, Homo sapien
atacagaaattagccgtgcatggtg

SEQ ID NO: 5697063 - DNA, 25 bp, Homo sapien
cagaaattagccgtgcatggtggtc

SEQ ID NO: 5697064 - DNA, 25 bp, Homo sapien
ttagccgtgcatggtggtccgtgcc

SEQ ID NO: 5697065 - DNA, 25 bp, Homo sapien
ccgtgcatggtggtccgtgcctgta

SEQ ID NO: 5697066 - DNA, 25 bp, Homo sapien
cactccaggctgggcaacataatga

SEQ ID NO: 5697067 - DNA, 25 bp, Homo sapien
tgcactccaggctgggcaacataat

SEQ ID NO: 5697068 - DNA, 25 bp, Homo sapien
ctccaggctgggcaacataatgaga

SEQ ID NO: 5697069 - DNA, 25 bp, Homo sapien
actccaggctgggcaacataatgag

SEQ ID NO: 5697070 - DNA, 25 bp, Homo sapien
cataatgagaccccatctttttttt

SEQ ID NO: 5697071 - DNA, 25 bp, Homo sapien
gcactccaggctgggcaacataatg

SEQ ID NO: 5697072 - DNA, 25 bp, Homo sapien
tctcattatgttgcccagcctggag

SEQ ID NO: 5697073 - DNA, 25 bp, Homo sapien
aaaaaaaagatggggtctcattatg

SEQ ID NO: 5697074 - DNA, 25 bp, Homo sapien
cattatgttgcccagcctggagtgc

SEQ ID NO: 5697075 - DNA, 25 bp, Homo sapien
ctcattatgttgcccagcctggagt

SEQ ID NO: 5697076 - DNA, 25 bp, Homo sapien
attatgttgcccagcctggagtgca

SEQ ID NO: 5697077 - DNA, 25 bp, Homo sapien
tcattatgttgcccagcctggagtg

SEQ ID NO: 5697078 - DNA, 25 bp, Homo sapien
aagctgggggcgttggtacctgcct

SEQ ID NO: 5697079 - DNA, 25 bp, Homo sapien
ctgggggcgttggtacctgcctgta

SEQ ID NO: 5697080 - DNA, 25 bp, Homo sapien
taagctgggggcgttggtacctgcc

SEQ ID NO: 5697081 - DNA, 25 bp, Homo sapien
agctgggggcgttggtacctgcctg

SEQ ID NO: 5697082 - DNA, 25 bp, Homo sapien
gctgggggcgttggtacctgcctgt

SEQ ID NO: 5697083 - DNA, 25 bp, Homo sapien
gtacctgcctgtaagcctgtagtca

SEQ ID NO: 5697084 - DNA, 25 bp, Homo sapien
gcaggtaccaacgcccccagcttat

SEQ ID NO: 5697085 - DNA, 25 bp, Homo sapien
caggcaggtaccaacgcccccagct

SEQ ID NO: 5697086 - DNA, 25 bp, Homo sapien
caggtaccaacgcccccagcttatt

SEQ ID NO: 5697087 - DNA, 25 bp, Homo sapien
ggcaggtaccaacgcccccagctta

SEQ ID NO: 5697088 - DNA, 25 bp, Homo sapien
aggcaggtaccaacgcccccagctt

SEQ ID NO: 5697089 - DNA, 25 bp, Homo sapien
tgactacaggcttacaggcaggtac

SEQ ID NO: 5697090 - DNA, 25 bp, Homo sapien
caggagggtcccttggcccaggatt

SEQ ID NO: 5697091 - DNA, 25 bp, Homo sapien
tcccttggcccaggatttgagagac

SEQ ID NO: 5697092 - DNA, 25 bp, Homo sapien
ctgcctgtaagcctgtagtcacaac

SEQ ID NO: 5697093 - DNA, 25 bp, Homo sapien
agcctgtagtcacaactaattggaa

SEQ ID NO: 5697094 - DNA, 25 bp, Homo sapien
gtacctgcctgtaagcctgtagtca

SEQ ID NO: 5697095 - DNA, 25 bp, Homo sapien
gggcgttggtacctgcctgtaagcc

SEQ ID NO: 5697096 - DNA, 25 bp, Homo sapien
ggcttacaggcaggtaccaacgccc

SEQ ID NO: 5697097 - DNA, 25 bp, Homo sapien
gtctctcaaatcctgggccaaggga

SEQ ID NO: 5697098 - DNA, 25 bp, Homo sapien
aatcctgggccaagggaccctcctg

SEQ ID NO: 5697099 - DNA, 25 bp, Homo sapien
ttccaattagttgtgactacaggct

SEQ ID NO: 5697100 - DNA, 25 bp, Homo sapien
gttgtgactacaggcttacaggcag

SEQ ID NO: 5697101 - DNA, 25 bp, Homo sapien
tgactacaggcttacaggcaggtac

SEQ ID NO: 5697102 - DNA, 25 bp, Homo sapien
gtgagggagacacatgaatgaaata

SEQ ID NO: 5697103 - DNA, 25 bp, Homo sapien
agggcttcgcagcttagtgagggag

SEQ ID NO: 5697104 - DNA, 25 bp, Homo sapien
aagggcttcgcagcttagtgaggga

SEQ ID NO: 5697105 - DNA, 25 bp, Homo sapien
gggcttcgcagcttagtgagggaga

SEQ ID NO: 5697106 - DNA, 25 bp, Homo sapien
tatttcattcatgtgtctccctcac

SEQ ID NO: 5697107 - DNA, 25 bp, Homo sapien
tccctcactaagctgcgaagccctt

SEQ ID NO: 5697108 - DNA, 25 bp, Homo sapien
tctccctcactaagctgcgaagccc

SEQ ID NO: 5697109 - DNA, 25 bp, Homo sapien
ctccctcactaagctgcgaagccct

SEQ ID NO: 5697110 - DNA, 25 bp, Homo sapien
gcttcgcagcttagtgagggagaca

SEQ ID NO: 5697111 - DNA, 25 bp, Homo sapien
tgtttaagggcttcgcagcttagtg

SEQ ID NO: 5697112 - DNA, 25 bp, Homo sapien
gagacacatgaatgaaataatgtcc

SEQ ID NO: 5697113 - DNA, 25 bp, Homo sapien
gtttattatgtttaagggcttcgca

SEQ ID NO: 5697114 - DNA, 25 bp, Homo sapien
gtgagggagacacatgaatgaaata

SEQ ID NO: 5697115 - DNA, 25 bp, Homo sapien
aataatgtccatatatgatgagagg

SEQ ID NO: 5697116 - DNA, 25 bp, Homo sapien
tgcgaagcccttaaacataataaac

SEQ ID NO: 5697117 - DNA, 25 bp, Homo sapien
tatttcattcatgtgtctccctcac

SEQ ID NO: 5697118 - DNA, 25 bp, Homo sapien
cattatttcattcatgtgtctccct

SEQ ID NO: 5697119 - DNA, 25 bp, Homo sapien
cctctcatcatatatggacattatt

SEQ ID NO: 5697120 - DNA, 25 bp, Homo sapien
gtgtctccctcactaagctgcgaag

SEQ ID NO: 5697121 - DNA, 25 bp, Homo sapien
cactaagctgcgaagcccttaaaca

SEQ ID NO: 5697122 - DNA, 25 bp, Homo sapien
gaaagtggcttgttttaatgattag

SEQ ID NO: 5697123 - DNA, 25 bp, Homo sapien
aagtggcttgttttaatgattagca

SEQ ID NO: 5697124 - DNA, 25 bp, Homo sapien
aaagtggcttgttttaatgattagc

SEQ ID NO: 5697125 - DNA, 25 bp, Homo sapien
tgctaatcattaaaacaagccactt

SEQ ID NO: 5697126 - DNA, 25 bp, Homo sapien
ctaatcattaaaacaagccactttc

SEQ ID NO: 5697127 - DNA, 25 bp, Homo sapien
gctaatcattaaaacaagccacttt

SEQ ID NO: 5697128 - DNA, 25 bp, Homo sapien
gaaagtggcttgttttaatgattag

SEQ ID NO: 5697129 - DNA, 25 bp, Homo sapien
caagaaaacatattggggagtccct

SEQ ID NO: 5697130 - DNA, 25 bp, Homo sapien
tagattgttacaaatcagtaaacat

SEQ ID NO: 5697131 - DNA, 25 bp, Homo sapien
cagtaaacattttctgtcatttaac

SEQ ID NO: 5697132 - DNA, 25 bp, Homo sapien
aagtggcttgttttaatgattagca

SEQ ID NO: 5697133 - DNA, 25 bp, Homo sapien
tttaatgattagcaacaagaaaaca

SEQ ID NO: 5697134 - DNA, 25 bp, Homo sapien
gttaaatgacagaaaatgtttactg

SEQ ID NO: 5697135 - DNA, 25 bp, Homo sapien
agggactccccaatatgttttcttg

SEQ ID NO: 5697136 - DNA, 25 bp, Homo sapien
gttgctaatcattaaaacaagccac

SEQ ID NO: 5697137 - DNA, 25 bp, Homo sapien
gctaatcattaaaacaagccacttt

SEQ ID NO: 5697138 - DNA, 25 bp, Homo sapien
tgtttactgatttgtaacaatctaa

SEQ ID NO: 5697139 - DNA, 25 bp, Homo sapien
tgttttcttgttgctaatcattaaa

SEQ ID NO: 5697140 - DNA, 25 bp, Homo sapien
gagttgctaattaacttgggctgat

SEQ ID NO: 5697141 - DNA, 25 bp, Homo sapien
aattaacttgggctgattagaacat

SEQ ID NO: 5697142 - DNA, 25 bp, Homo sapien
acttgggctgattagaacattttgg

SEQ ID NO: 5697143 - DNA, 25 bp, Homo sapien
ttgggctgattagaacattttggat

SEQ ID NO: 5697144 - DNA, 25 bp, Homo sapien
tatgagttgctaattaacttgggct

SEQ ID NO: 5697145 - DNA, 25 bp, Homo sapien
ttggatacttggaaagagcagctga

SEQ ID NO: 5697146 - DNA, 25 bp, Homo sapien
tcagctgctctttccaagtatccaa

SEQ ID NO: 5697147 - DNA, 25 bp, Homo sapien
tcagcccaagttaattagcaactca

SEQ ID NO: 5697148 - DNA, 25 bp, Homo sapien
gcccaagttaattagcaactcatat

SEQ ID NO: 5697149 - DNA, 25 bp, Homo sapien
aatgttctaatcagcccaagttaat

SEQ ID NO: 5697150 - DNA, 25 bp, Homo sapien
taatcagcccaagttaattagcaac

SEQ ID NO: 5697151 - DNA, 25 bp, Homo sapien
tccaaaatgttctaatcagcccaag

SEQ ID NO: 5697152 - DNA, 25 bp, Homo sapien
gcatcttgaggtgtttcccaagggg

SEQ ID NO: 5697153 - DNA, 25 bp, Homo sapien
gtgcatcttgaggtgtttcccaagg

SEQ ID NO: 5697154 - DNA, 25 bp, Homo sapien
tgcatcttgaggtgtttcccaaggg

SEQ ID NO: 5697155 - DNA, 25 bp, Homo sapien
tgtgcatcttgaggtgtttcccaag

SEQ ID NO: 5697156 - DNA, 25 bp, Homo sapien
ccttgggaaacacctcaagatgcac

SEQ ID NO: 5697157 - DNA, 25 bp, Homo sapien
cccttgggaaacacctcaagatgca

SEQ ID NO: 5697158 - DNA, 25 bp, Homo sapien
cttgggaaacacctcaagatgcaca

SEQ ID NO: 5697159 - DNA, 25 bp, Homo sapien
ccccttgggaaacacctcaagatgc

SEQ ID NO: 5697160 - DNA, 25 bp, Homo sapien
gaaacttttgtgtgtgcatcttgag

SEQ ID NO: 5697161 - DNA, 25 bp, Homo sapien
cagtttagctgatgtgtataggtca

SEQ ID NO: 5697162 - DNA, 25 bp, Homo sapien
tataggtcatagcatctggaagtgt

SEQ ID NO: 5697163 - DNA, 25 bp, Homo sapien
aacccgtttaacagtttagctgatg

SEQ ID NO: 5697164 - DNA, 25 bp, Homo sapien
catagcatctggaagtgtttgaaac

SEQ ID NO: 5697165 - DNA, 25 bp, Homo sapien
tgcatcttgaggtgtttcccaaggg

SEQ ID NO: 5697166 - DNA, 25 bp, Homo sapien
ccttgggaaacacctcaagatgcac

SEQ ID NO: 5697167 - DNA, 25 bp, Homo sapien
tgacctatacacatcagctaaactg

SEQ ID NO: 5697168 - DNA, 25 bp, Homo sapien
gtttcaaacacttccagatgctatg

SEQ ID NO: 5697169 - DNA, 25 bp, Homo sapien
caagatgcacacacaaaagtttcaa

SEQ ID NO: 5697170 - DNA, 25 bp, Homo sapien
cacttccagatgctatgacctatac

SEQ ID NO: 5697171 - DNA, 25 bp, Homo sapien
catcagctaaactgttaaacgggtt

SEQ ID NO: 5697172 - DNA, 25 bp, Homo sapien
cccttcctgggtgatggtaagaggt

SEQ ID NO: 5697173 - DNA, 25 bp, Homo sapien
atggtaagaggtgtgaggtccactt

SEQ ID NO: 5697174 - DNA, 25 bp, Homo sapien
gccttcggaacagatgcacaccctt

SEQ ID NO: 5697175 - DNA, 25 bp, Homo sapien
tgtgaggtccacttggattcattac

SEQ ID NO: 5697176 - DNA, 25 bp, Homo sapien
gaggtgtgaggtccacttggattca

SEQ ID NO: 5697177 - DNA, 25 bp, Homo sapien
gggccttcggaacagatgcacaccc

SEQ ID NO: 5697178 - DNA, 25 bp, Homo sapien
aagtggacctcacacctcttaccat

SEQ ID NO: 5697179 - DNA, 25 bp, Homo sapien
gaatccaagtggacctcacacctct

SEQ ID NO: 5697180 - DNA, 25 bp, Homo sapien
aagggtgtgcatctgttccgaaggc

SEQ ID NO: 5697181 - DNA, 25 bp, Homo sapien
acctcttaccatcacccaggaaggg

SEQ ID NO: 5697182 - DNA, 25 bp, Homo sapien
gtaatgaatccaagtggacctcaca

SEQ ID NO: 5697183 - DNA, 25 bp, Homo sapien
ggtgtgcatctgttccgaaggcccc

SEQ ID NO: 5697184 - DNA, 25 bp, Homo sapien
attagcttggcgtgctggcgctcgc

SEQ ID NO: 5697185 - DNA, 25 bp, Homo sapien
cttggcgtgctggcgctcgcctgta

SEQ ID NO: 5697186 - DNA, 25 bp, Homo sapien
agcttggcgtgctggcgctcgcctg

SEQ ID NO: 5697187 - DNA, 25 bp, Homo sapien
gcttggcgtgctggcgctcgcctgt

SEQ ID NO: 5697188 - DNA, 25 bp, Homo sapien
tagcttggcgtgctggcgctcgcct

SEQ ID NO: 5697189 - DNA, 25 bp, Homo sapien
ttagcttggcgtgctggcgctcgcc

SEQ ID NO: 5697190 - DNA, 25 bp, Homo sapien
gcgagcgccagcacgccaagctaat

SEQ ID NO: 5697191 - DNA, 25 bp, Homo sapien
ggcgagcgccagcacgccaagctaa

SEQ ID NO: 5697192 - DNA, 25 bp, Homo sapien
tacaggcgagcgccagcacgccaag

SEQ ID NO: 5697193 - DNA, 25 bp, Homo sapien
acaggcgagcgccagcacgccaagc

SEQ ID NO: 5697194 - DNA, 25 bp, Homo sapien
aggcgagcgccagcacgccaagcta

SEQ ID NO: 5697195 - DNA, 25 bp, Homo sapien
caggcgagcgccagcacgccaagct

SEQ ID NO: 5697196 - DNA, 25 bp, Homo sapien
agaattgattctaaggccgggtgtg

SEQ ID NO: 5697197 - DNA, 25 bp, Homo sapien
tacactggaaggtcaggcattttgt

SEQ ID NO: 5697198 - DNA, 25 bp, Homo sapien
ggtgctctaacttgattctgtcaca

SEQ ID NO: 5697199 - DNA, 25 bp, Homo sapien
aacattatttggtgctctaacttga

SEQ ID NO: 5697200 - DNA, 25 bp, Homo sapien
tcacagtacactggaaggtcaggca

SEQ ID NO: 5697201 - DNA, 25 bp, Homo sapien
acttgattctgtcacagtacactgg

SEQ ID NO: 5697202 - DNA, 25 bp, Homo sapien
tgacagaatcaagttagagcaccaa

SEQ ID NO: 5697203 - DNA, 25 bp, Homo sapien
caaaatgcctgaccttccagtgtac

SEQ ID NO: 5697204 - DNA, 25 bp, Homo sapien
tcaagttagagcaccaaataatgtt

SEQ ID NO: 5697205 - DNA, 25 bp, Homo sapien
tgaccttccagtgtactgtgacaga

SEQ ID NO: 5697206 - DNA, 25 bp, Homo sapien
ccagtgtactgtgacagaatcaagt

SEQ ID NO: 5697207 - DNA, 25 bp, Homo sapien
cacacccggccttagaatcaattct

SEQ ID NO: 5697208 - DNA, 25 bp, Homo sapien
gaggtgtagcataactacaggtatt

SEQ ID NO: 5697209 - DNA, 25 bp, Homo sapien
tagatttactagaggattggtgaga

SEQ ID NO: 5697210 - DNA, 25 bp, Homo sapien
ctttgaggtgtagcataactacagg

SEQ ID NO: 5697211 - DNA, 25 bp, Homo sapien
gaactttgaggtgtagcataactac

SEQ ID NO: 5697212 - DNA, 25 bp, Homo sapien
ccagaactttgaggtgtagcataac

SEQ ID NO: 5697213 - DNA, 25 bp, Homo sapien
tgtagcataactacaggtattctcg

SEQ ID NO: 5697214 - DNA, 25 bp, Homo sapien
gttatgctacacctcaaagttctgg

SEQ ID NO: 5697215 - DNA, 25 bp, Homo sapien
gaatacctgtagttatgctacacct

SEQ ID NO: 5697216 - DNA, 25 bp, Homo sapien
cctgtagttatgctacacctcaaag

SEQ ID NO: 5697217 - DNA, 25 bp, Homo sapien
tctcaccaatcctctagtaaatcta

SEQ ID NO: 5697218 - DNA, 25 bp, Homo sapien
gtagttatgctacacctcaaagttc

SEQ ID NO: 5697219 - DNA, 25 bp, Homo sapien
cgagaatacctgtagttatgctaca

SEQ ID NO: 5697220 - DNA, 25 bp, Homo sapien
gctcagggagtcctcctgccttggc

SEQ ID NO: 5697221 - DNA, 25 bp, Homo sapien
tcagggagtcctcctgccttggcct

SEQ ID NO: 5697222 - DNA, 25 bp, Homo sapien
ctcagggagtcctcctgccttggcc

SEQ ID NO: 5697223 - DNA, 25 bp, Homo sapien
agctcagggagtcctcctgccttgg

SEQ ID NO: 5697224 - DNA, 25 bp, Homo sapien
cagggagtcctcctgccttggcctc

SEQ ID NO: 5697225 - DNA, 25 bp, Homo sapien
gagctcagggagtcctcctgccttg

SEQ ID NO: 5697226 - DNA, 25 bp, Homo sapien
gaggccaaggcaggaggactccctg

SEQ ID NO: 5697227 - DNA, 25 bp, Homo sapien
aggccaaggcaggaggactccctga

SEQ ID NO: 5697228 - DNA, 25 bp, Homo sapien
gccaaggcaggaggactccctgagc

SEQ ID NO: 5697229 - DNA, 25 bp, Homo sapien
ggccaaggcaggaggactccctgag

SEQ ID NO: 5697230 - DNA, 25 bp, Homo sapien
caaggcaggaggactccctgagctc

SEQ ID NO: 5697231 - DNA, 25 bp, Homo sapien
ccaaggcaggaggactccctgagct

SEQ ID NO: 5697232 - DNA, 25 bp, Homo sapien
catgtcgtggcacaatctcggttca

SEQ ID NO: 5697233 - DNA, 25 bp, Homo sapien
tgcatgtcgtggcacaatctcggtt

SEQ ID NO: 5697234 - DNA, 25 bp, Homo sapien
gtgcatgtcgtggcacaatctcggt

SEQ ID NO: 5697235 - DNA, 25 bp, Homo sapien
atgtcgtggcacaatctcggttcac

SEQ ID NO: 5697236 - DNA, 25 bp, Homo sapien
agtgcatgtcgtggcacaatctcgg

SEQ ID NO: 5697237 - DNA, 25 bp, Homo sapien
gagtgcatgtcgtggcacaatctcg

SEQ ID NO: 5697238 - DNA, 25 bp, Homo sapien
gtgaaccgagattgtgccacgacat

SEQ ID NO: 5697239 - DNA, 25 bp, Homo sapien
accgagattgtgccacgacatgcac

SEQ ID NO: 5697240 - DNA, 25 bp, Homo sapien
tgaaccgagattgtgccacgacatg

SEQ ID NO: 5697241 - DNA, 25 bp, Homo sapien
ccgagattgtgccacgacatgcact

SEQ ID NO: 5697242 - DNA, 25 bp, Homo sapien
cgagattgtgccacgacatgcactc

SEQ ID NO: 5697243 - DNA, 25 bp, Homo sapien
gaaccgagattgtgccacgacatgc

SEQ ID NO: 5697244 - DNA, 25 bp, Homo sapien
agtttgcctaggagttaggagaaat

SEQ ID NO: 5697245 - DNA, 25 bp, Homo sapien
tagattttaatcctccttaggcaaa

SEQ ID NO: 5697246 - DNA, 25 bp, Homo sapien
gattttaatcctccttaggcaaata

SEQ ID NO: 5697247 - DNA, 25 bp, Homo sapien
taagtttgcctaggagttaggagaa

SEQ ID NO: 5697248 - DNA, 25 bp, Homo sapien
aatagattttaatcctccttaggca

SEQ ID NO: 5697249 - DNA, 25 bp, Homo sapien
gagtaagtttgcctaggagttagga

SEQ ID NO: 5697250 - DNA, 25 bp, Homo sapien
atttctcctaactcctaggcaaact

SEQ ID NO: 5697251 - DNA, 25 bp, Homo sapien
tttgcctaaggaggattaaaatcta

SEQ ID NO: 5697252 - DNA, 25 bp, Homo sapien
ttgcctaaggaggattaaaatctat

SEQ ID NO: 5697253 - DNA, 25 bp, Homo sapien
tctcctaactcctaggcaaacttac

SEQ ID NO: 5697254 - DNA, 25 bp, Homo sapien
tcctaactcctaggcaaacttactc

SEQ ID NO: 5697255 - DNA, 25 bp, Homo sapien
tatttgcctaaggaggattaaaatc

SEQ ID NO: 5697256 - DNA, 25 bp, Homo sapien
gattgacgggcacttttctttgagg

SEQ ID NO: 5697257 - DNA, 25 bp, Homo sapien
aaatgggttccttccggtcagtatg

SEQ ID NO: 5697258 - DNA, 25 bp, Homo sapien
tcagtatgtatatcagcgcaccaaa

SEQ ID NO: 5697259 - DNA, 25 bp, Homo sapien
tgaaattgattgacgggcacttttc

SEQ ID NO: 5697260 - DNA, 25 bp, Homo sapien
tccggtcagtatgtatatcagcgca

SEQ ID NO: 5697261 - DNA, 25 bp, Homo sapien
gggttccttccggtcagtatgtata

SEQ ID NO: 5697262 - DNA, 25 bp, Homo sapien
gaaaagtgcccgtcaatcaatttca

SEQ ID NO: 5697263 - DNA, 25 bp, Homo sapien
tttggtgcgctgatatacatactga

SEQ ID NO: 5697264 - DNA, 25 bp, Homo sapien
acctcaaagaaaagtgcccgtcaat

SEQ ID NO: 5697265 - DNA, 25 bp, Homo sapien
tatacatactgaccggaaggaaccc

SEQ ID NO: 5697266 - DNA, 25 bp, Homo sapien
gcgctgatatacatactgaccggaa

SEQ ID NO: 5697267 - DNA, 25 bp, Homo sapien
catactgaccggaaggaacccattt

SEQ ID NO: 5697268 - DNA, 25 bp, Homo sapien
tttatcattgtgctgaactgttaga

SEQ ID NO: 5697269 - DNA, 25 bp, Homo sapien
tctaacagttcagcacaatgataaa

SEQ ID NO: 5697270 - DNA, 25 bp, Homo sapien
tgttggcaaggagaaatgtcagaaa

SEQ ID NO: 5697271 - DNA, 25 bp, Homo sapien
tcatgaagtaaaaatgttggcaagg

SEQ ID NO: 5697272 - DNA, 25 bp, Homo sapien
caaggagaaatgtcagaaattagta

SEQ ID NO: 5697273 - DNA, 25 bp, Homo sapien
ggtaaaaatgggaaatcatgaagta

SEQ ID NO: 5697274 - DNA, 25 bp, Homo sapien
gctgaactgttagaaatgaggttag

SEQ ID NO: 5697275 - DNA, 25 bp, Homo sapien
ttagggtaaaaatgggaaatcatga

SEQ ID NO: 5697276 - DNA, 25 bp, Homo sapien
tttctgacatttctccttgccaaca

SEQ ID NO: 5697277 - DNA, 25 bp, Homo sapien
aaatactaatttctgacatttctcc

SEQ ID NO: 5697278 - DNA, 25 bp, Homo sapien
taacctcatttctaacagttcagca

SEQ ID NO: 5697279 - DNA, 25 bp, Homo sapien
tcatgatttcccatttttaccctaa

SEQ ID NO: 5697280 - DNA, 25 bp, Homo sapien
taatttctgacatttctccttgcca

SEQ ID NO: 5697281 - DNA, 25 bp, Homo sapien
ccttgccaacatttttacttcatga

SEQ ID NO: 5697282 - DNA, 25 bp, Homo sapien
acatcgcgacccctttcttaaggct

SEQ ID NO: 5697283 - DNA, 25 bp, Homo sapien
catcgcgacccctttcttaaggctt

SEQ ID NO: 5697284 - DNA, 25 bp, Homo sapien
aagccttaagaaaggggtcgcgatg

SEQ ID NO: 5697285 - DNA, 25 bp, Homo sapien
agccttaagaaaggggtcgcgatgt

SEQ ID NO: 5697286 - DNA, 25 bp, Homo sapien
tatacatgtttaagccttaagaaag

SEQ ID NO: 5697287 - DNA, 25 bp, Homo sapien
agccttaagaaaggggtcgcgatgt

SEQ ID NO: 5697288 - DNA, 25 bp, Homo sapien
ttaagttcctgtaataatatacatg

SEQ ID NO: 5697289 - DNA, 25 bp, Homo sapien
tttacttcctatcaaatagattgcc

SEQ ID NO: 5697290 - DNA, 25 bp, Homo sapien
taatatacatgtttaagccttaaga

SEQ ID NO: 5697291 - DNA, 25 bp, Homo sapien
tgacccttattttacttcctatcaa

SEQ ID NO: 5697292 - DNA, 25 bp, Homo sapien
catgatctgtcagcctcgacctccc

SEQ ID NO: 5697293 - DNA, 25 bp, Homo sapien
cctcatgatctgtcagcctcgacct

SEQ ID NO: 5697294 - DNA, 25 bp, Homo sapien
tcatgatctgtcagcctcgacctcc

SEQ ID NO: 5697295 - DNA, 25 bp, Homo sapien
acctcatgatctgtcagcctcgacc

SEQ ID NO: 5697296 - DNA, 25 bp, Homo sapien
atgatctgtcagcctcgacctccca

SEQ ID NO: 5697297 - DNA, 25 bp, Homo sapien
ctcatgatctgtcagcctcgacctc

SEQ ID NO: 5697298 - DNA, 25 bp, Homo sapien
ggtcgaggctgacagatcatgaggt

SEQ ID NO: 5697299 - DNA, 25 bp, Homo sapien
gaggtcgaggctgacagatcatgag

SEQ ID NO: 5697300 - DNA, 25 bp, Homo sapien
aggtcgaggctgacagatcatgagg

SEQ ID NO: 5697301 - DNA, 25 bp, Homo sapien
ggaggtcgaggctgacagatcatga

SEQ ID NO: 5697302 - DNA, 25 bp, Homo sapien
tgggaggtcgaggctgacagatcat

SEQ ID NO: 5697303 - DNA, 25 bp, Homo sapien
gggaggtcgaggctgacagatcatg

SEQ ID NO: 5697304 - DNA, 25 bp, Homo sapien
tgacaccaaatgcaggcttcattct

SEQ ID NO: 5697305 - DNA, 25 bp, Homo sapien
accgcacccagtcctagctgagttt

SEQ ID NO: 5697306 - DNA, 25 bp, Homo sapien
caaaccttttgacaccaaatgcagg

SEQ ID NO: 5697307 - DNA, 25 bp, Homo sapien
ttttgacaccaaatgcaggcttcat

SEQ ID NO: 5697308 - DNA, 25 bp, Homo sapien
cacccagtcctagctgagtttttaa

SEQ ID NO: 5697309 - DNA, 25 bp, Homo sapien
aaccttttgacaccaaatgcaggct

SEQ ID NO: 5697310 - DNA, 25 bp, Homo sapien
ttaaaaactcagctaggactgggtg

SEQ ID NO: 5697311 - DNA, 25 bp, Homo sapien
gaagcctgcatttggtgtcaaaagg

SEQ ID NO: 5697312 - DNA, 25 bp, Homo sapien
agaatgaagcctgcatttggtgtca

SEQ ID NO: 5697313 - DNA, 25 bp, Homo sapien
taaaaactcagctaggactgggtgc

SEQ ID NO: 5697314 - DNA, 25 bp, Homo sapien
cctgcatttggtgtcaaaaggtttg

SEQ ID NO: 5697315 - DNA, 25 bp, Homo sapien
aaactcagctaggactgggtgcggt

SEQ ID NO: 5697316 - DNA, 25 bp, Homo sapien
gagaacagtaggagatactacatta

SEQ ID NO: 5697317 - DNA, 25 bp, Homo sapien
ttgtaagagaacagtaggagatact

SEQ ID NO: 5697318 - DNA, 25 bp, Homo sapien
tacacagcaaagcttaactatgatt

SEQ ID NO: 5697319 - DNA, 25 bp, Homo sapien
atatagcttctgtgatacacagcaa

SEQ ID NO: 5697320 - DNA, 25 bp, Homo sapien
taaatatagcttctgtgatacacag

SEQ ID NO: 5697321 - DNA, 25 bp, Homo sapien
acagcaaagcttaactatgattgaa

SEQ ID NO: 5697322 - DNA, 25 bp, Homo sapien
taatgtagtatctcctactgttctc

SEQ ID NO: 5697323 - DNA, 25 bp, Homo sapien
gaagctatatttatcccctatttgt

SEQ ID NO: 5697324 - DNA, 25 bp, Homo sapien
tatcccctatttgtattaatgtagt

SEQ ID NO: 5697325 - DNA, 25 bp, Homo sapien
agtatctcctactgttctcttacaa

SEQ ID NO: 5697326 - DNA, 25 bp, Homo sapien
gctgtgtatcacagaagctatattt

SEQ ID NO: 5697327 - DNA, 25 bp, Homo sapien
caatcatagttaagctttgctgtgt

SEQ ID NO: 5697328 - DNA, 25 bp, Homo sapien
gaatggcatttgagttggaacctaa

SEQ ID NO: 5697329 - DNA, 25 bp, Homo sapien
gttggaacctaaatgatgggcaaat

SEQ ID NO: 5697330 - DNA, 25 bp, Homo sapien
ttgagttggaacctaaatgatgggc

SEQ ID NO: 5697331 - DNA, 25 bp, Homo sapien
gagttggaacctaaatgatgggcaa

SEQ ID NO: 5697332 - DNA, 25 bp, Homo sapien
aacctaaatgatgggcaaattttgg

SEQ ID NO: 5697333 - DNA, 25 bp, Homo sapien
tggaacctaaatgatgggcaaattt

SEQ ID NO: 5697334 - DNA, 25 bp, Homo sapien
taggttccaactcaaatgccattcc

SEQ ID NO: 5697335 - DNA, 25 bp, Homo sapien
aaatttgcccatcatttaggttcca

SEQ ID NO: 5697336 - DNA, 25 bp, Homo sapien
ccaaaatttgcccatcatttaggtt

SEQ ID NO: 5697337 - DNA, 25 bp, Homo sapien
gcccatcatttaggttccaactcaa

SEQ ID NO: 5697338 - DNA, 25 bp, Homo sapien
ttaggttccaactcaaatgccattc

SEQ ID NO: 5697339 - DNA, 25 bp, Homo sapien
catttaggttccaactcaaatgcca

SEQ ID NO: 5697340 - DNA, 25 bp, Homo sapien
cttgcaaataactaggaatggcatt

SEQ ID NO: 5697341 - DNA, 25 bp, Homo sapien
gagaaattacttgcaaataactagg

SEQ ID NO: 5697342 - DNA, 25 bp, Homo sapien
ttacttgcaaataactaggaatggc

SEQ ID NO: 5697343 - DNA, 25 bp, Homo sapien
gcaaataactaggaatggcatttga

SEQ ID NO: 5697344 - DNA, 25 bp, Homo sapien
tgagttggaacctaaatgatgggca

SEQ ID NO: 5697345 - DNA, 25 bp, Homo sapien
taggaatggcatttgagttggaacc

SEQ ID NO: 5697346 - DNA, 25 bp, Homo sapien
aagtacggactgatctggcacattg

SEQ ID NO: 5697347 - DNA, 25 bp, Homo sapien
tacggactgatctggcacattgtgg

SEQ ID NO: 5697348 - DNA, 25 bp, Homo sapien
tgatctggcacattgtgggtgagaa

SEQ ID NO: 5697349 - DNA, 25 bp, Homo sapien
tgtacattggagataagtcatgagt

SEQ ID NO: 5697350 - DNA, 25 bp, Homo sapien
taagtcatgagttttaagctgaaga

SEQ ID NO: 5697351 - DNA, 25 bp, Homo sapien
gagaaatggaagtgtacattggaga

SEQ ID NO: 5697352 - DNA, 25 bp, Homo sapien
taaaactcatgacttatctccaatg

SEQ ID NO: 5697353 - DNA, 25 bp, Homo sapien
cccacaatgtgccagatcagtccgt

SEQ ID NO: 5697354 - DNA, 25 bp, Homo sapien
caatgtgccagatcagtccgtactt

SEQ ID NO: 5697355 - DNA, 25 bp, Homo sapien
tcttcagcttaaaactcatgactta

SEQ ID NO: 5697356 - DNA, 25 bp, Homo sapien
tctcacccacaatgtgccagatcag

SEQ ID NO: 5697357 - DNA, 25 bp, Homo sapien
tctccaatgtacacttccatttctc

SEQ ID NO: 5697358 - DNA, 25 bp, Homo sapien
taaacaggttctaaaatccttgctc

SEQ ID NO: 5697359 - DNA, 25 bp, Homo sapien
gagcaaggattttagaacctgttta

SEQ ID NO: 5697360 - DNA, 25 bp, Homo sapien
tctcttgctaatatccctttacctt

SEQ ID NO: 5697361 - DNA, 25 bp, Homo sapien
gtgaggtgtctcttgctaatatccc

SEQ ID NO: 5697362 - DNA, 25 bp, Homo sapien
taaacaggttctaaaatccttgctc

SEQ ID NO: 5697363 - DNA, 25 bp, Homo sapien
taattttagttcttaacacatagcc

SEQ ID NO: 5697364 - DNA, 25 bp, Homo sapien
gctcttggtgaggtgtctcttgcta

SEQ ID NO: 5697365 - DNA, 25 bp, Homo sapien
aaatccttgctcttggtgaggtgtc

SEQ ID NO: 5697366 - DNA, 25 bp, Homo sapien
gggatattagcaagagacacctcac

SEQ ID NO: 5697367 - DNA, 25 bp, Homo sapien
tagcaagagacacctcaccaagagc

SEQ ID NO: 5697368 - DNA, 25 bp, Homo sapien
gagcaaggattttagaacctgttta

SEQ ID NO: 5697369 - DNA, 25 bp, Homo sapien
taaagggatattagcaagagacacc

SEQ ID NO: 5697370 - DNA, 25 bp, Homo sapien
aaaggtaaagggatattagcaagag

SEQ ID NO: 5697371 - DNA, 25 bp, Homo sapien
gagacacctcaccaagagcaaggat

SEQ ID NO: 5697372 - DNA, 25 bp, Homo sapien
ggaacgacctgctcgcagactctag

SEQ ID NO: 5697373 - DNA, 25 bp, Homo sapien
cctgggtggttacggcgtgtgagat

SEQ ID NO: 5697374 - DNA, 25 bp, Homo sapien
gaacgacctgctcgcagactctagg

SEQ ID NO: 5697375 - DNA, 25 bp, Homo sapien
tgctcgcagactctaggccgcagag

SEQ ID NO: 5697376 - DNA, 25 bp, Homo sapien
agcacagcctgggtggttacggcgt

SEQ ID NO: 5697377 - DNA, 25 bp, Homo sapien
tcgcagactctaggccgcagaggcc

SEQ ID NO: 5697378 - DNA, 25 bp, Homo sapien
ctagagtctgcgagcaggtcgttcc

SEQ ID NO: 5697379 - DNA, 25 bp, Homo sapien
cctagagtctgcgagcaggtcgttc

SEQ ID NO: 5697380 - DNA, 25 bp, Homo sapien
agccccaatctcacacgccgtaacc

SEQ ID NO: 5697381 - DNA, 25 bp, Homo sapien
acgccgtaaccacccaggctgtgct

SEQ ID NO: 5697382 - DNA, 25 bp, Homo sapien
tctgcggcctagagtctgcgagcag

SEQ ID NO: 5697383 - DNA, 25 bp, Homo sapien
ggcctctgcggcctagagtctgcga

SEQ ID NO: 5697384 - DNA, 25 bp, Homo sapien
ggcacctcctggcactccctttcag

SEQ ID NO: 5697385 - DNA, 25 bp, Homo sapien
gtgttaaataaccattccgacggca

SEQ ID NO: 5697386 - DNA, 25 bp, Homo sapien
gccgtgcgcacctagagtgttaaat

SEQ ID NO: 5697387 - DNA, 25 bp, Homo sapien
cgtgcgcacctagagtgttaaataa

SEQ ID NO: 5697388 - DNA, 25 bp, Homo sapien
taaataaccattccgacggcacctc

SEQ ID NO: 5697389 - DNA, 25 bp, Homo sapien
gcgcacctagagtgttaaataacca

SEQ ID NO: 5697390 - DNA, 25 bp, Homo sapien
gaggtgccgtcggaatggttattta

SEQ ID NO: 5697391 - DNA, 25 bp, Homo sapien
tggttatttaacactctaggtgcgc

SEQ ID NO: 5697392 - DNA, 25 bp, Homo sapien
ttatttaacactctaggtgcgcacg

SEQ ID NO: 5697393 - DNA, 25 bp, Homo sapien
tgccgtcggaatggttatttaacac

SEQ ID NO: 5697394 - DNA, 25 bp, Homo sapien
ctgaaagggagtgccaggaggtgcc

SEQ ID NO: 5697395 - DNA, 25 bp, Homo sapien
atttaacactctaggtgcgcacggc

SEQ ID NO: 5697396 - DNA, 25 bp, Homo sapien
gaagtcgccgcctagttgagagctg

SEQ ID NO: 5697397 - DNA, 25 bp, Homo sapien
ttgagagctgtagagttggtgccac

SEQ ID NO: 5697398 - DNA, 25 bp, Homo sapien
gccgcctagttgagagctgtagagt

SEQ ID NO: 5697399 - DNA, 25 bp, Homo sapien
gctttggatggtccccgaagtcgcc

SEQ ID NO: 5697400 - DNA, 25 bp, Homo sapien
ctcggaatcgcgggcaggaaaagaa

SEQ ID NO: 5697401 - DNA, 25 bp, Homo sapien
aaatgcactcggaatcgcgggcagg

SEQ ID NO: 5697402 - DNA, 25 bp, Homo sapien
gtggcaccaactctacagctctcaa

SEQ ID NO: 5697403 - DNA, 25 bp, Homo sapien
aactctacagctctcaactaggcgg

SEQ ID NO: 5697404 - DNA, 25 bp, Homo sapien
tctacagctctcaactaggcggcga

SEQ ID NO: 5697405 - DNA, 25 bp, Homo sapien
tcctgcccgcgattccgagtgcatt

SEQ ID NO: 5697406 - DNA, 25 bp, Homo sapien
acagctctcaactaggcggcgactt

SEQ ID NO: 5697407 - DNA, 25 bp, Homo sapien
ggcgacttcggggaccatccaaagc

SEQ ID NO: 5697408 - DNA, 25 bp, Homo sapien
ggaatatgctgttgcctgtgaggca

SEQ ID NO: 5697409 - DNA, 25 bp, Homo sapien
ttgtcttcaggcgtatcttgttgaa

SEQ ID NO: 5697410 - DNA, 25 bp, Homo sapien
cagtaggaatatgctgttgcctgtg

SEQ ID NO: 5697411 - DNA, 25 bp, Homo sapien
gaatatgctgttgcctgtgaggcag

SEQ ID NO: 5697412 - DNA, 25 bp, Homo sapien
gcctgtgaggcagattttcggattt

SEQ ID NO: 5697413 - DNA, 25 bp, Homo sapien
cttcaggcgtatcttgttgaaaata

SEQ ID NO: 5697414 - DNA, 25 bp, Homo sapien
aatccgaaaatctgcctcacaggca

SEQ ID NO: 5697415 - DNA, 25 bp, Homo sapien
tattttcaacaagatacgcctgaag

SEQ ID NO: 5697416 - DNA, 25 bp, Homo sapien
aaatccgaaaatctgcctcacaggc

SEQ ID NO: 5697417 - DNA, 25 bp, Homo sapien
cacaggcaacagcatattcctactg

SEQ ID NO: 5697418 - DNA, 25 bp, Homo sapien
tgcctcacaggcaacagcatattcc

SEQ ID NO: 5697419 - DNA, 25 bp, Homo sapien
ttcaacaagatacgcctgaagacaa

SEQ ID NO: 5697420 - DNA, 25 bp, Homo sapien
tgagtcacacaatgactgtgagtga

SEQ ID NO: 5697421 - DNA, 25 bp, Homo sapien
gtcacacaatgactgtgagtgaaaa

SEQ ID NO: 5697422 - DNA, 25 bp, Homo sapien
acacaatgactgtgagtgaaaagca

SEQ ID NO: 5697423 - DNA, 25 bp, Homo sapien
gagtcacacaatgactgtgagtgaa

SEQ ID NO: 5697424 - DNA, 25 bp, Homo sapien
agtcacacaatgactgtgagtgaaa

SEQ ID NO: 5697425 - DNA, 25 bp, Homo sapien
cacacaatgactgtgagtgaaaagc

SEQ ID NO: 5697426 - DNA, 25 bp, Homo sapien
tttcactcacagtcattgtgtgact

SEQ ID NO: 5697427 - DNA, 25 bp, Homo sapien
ttttcactcacagtcattgtgtgac

SEQ ID NO: 5697428 - DNA, 25 bp, Homo sapien
tcactcacagtcattgtgtgactca

SEQ ID NO: 5697429 - DNA, 25 bp, Homo sapien
ttcactcacagtcattgtgtgactc

SEQ ID NO: 5697430 - DNA, 25 bp, Homo sapien
tgcttttcactcacagtcattgtgt

SEQ ID NO: 5697431 - DNA, 25 bp, Homo sapien
gcttttcactcacagtcattgtgtg

SEQ ID NO: 5697432 - DNA, 25 bp, Homo sapien
ttgaaacagttggtttggacaacag

SEQ ID NO: 5697433 - DNA, 25 bp, Homo sapien
ttggtttggacaacagctgagtcac

SEQ ID NO: 5697434 - DNA, 25 bp, Homo sapien
caaaaactggttctgtgcccctcac

SEQ ID NO: 5697435 - DNA, 25 bp, Homo sapien
tgtgcccctcacagttctggttttg

SEQ ID NO: 5697436 - DNA, 25 bp, Homo sapien
cacacaatgactgtgagtgaaaagc

SEQ ID NO: 5697437 - DNA, 25 bp, Homo sapien
agatttgaaacagttggtttggaca

SEQ ID NO: 5697438 - DNA, 25 bp, Homo sapien
gtgactcagctgttgtccaaaccaa

SEQ ID NO: 5697439 - DNA, 25 bp, Homo sapien
cattgtgtgactcagctgttgtcca

SEQ ID NO: 5697440 - DNA, 25 bp, Homo sapien
tgtccaaaccaactgtttcaaatct

SEQ ID NO: 5697441 - DNA, 25 bp, Homo sapien
gcttttcactcacagtcattgtgtg

SEQ ID NO: 5697442 - DNA, 25 bp, Homo sapien
ggcacagaaccagtttttgcttttc

SEQ ID NO: 5697443 - DNA, 25 bp, Homo sapien
ctgttgtccaaaccaactgtttcaa

SEQ ID NO: 5697444 - DNA, 25 bp, Homo sapien
aggtagcgccgtgtctcttccctca

SEQ ID NO: 5697445 - DNA, 25 bp, Homo sapien
tcatacaccgcccactgcatctctc

SEQ ID NO: 5697446 - DNA, 25 bp, Homo sapien
aaaggtagcgccgtgtctcttccct

SEQ ID NO: 5697447 - DNA, 25 bp, Homo sapien
gtagcgccgtgtctcttccctcata

SEQ ID NO: 5697448 - DNA, 25 bp, Homo sapien
gccgtgtctcttccctcatacaccg

SEQ ID NO: 5697449 - DNA, 25 bp, Homo sapien
aaggtagcgccgtgtctcttccctc

SEQ ID NO: 5697450 - DNA, 25 bp, Homo sapien
gcagtgggcggtgtatgagggaaga

SEQ ID NO: 5697451 - DNA, 25 bp, Homo sapien
gagagatgcagtgggcggtgtatga

SEQ ID NO: 5697452 - DNA, 25 bp, Homo sapien
agggaagagacacggcgctaccttt

SEQ ID NO: 5697453 - DNA, 25 bp, Homo sapien
tatgagggaagagacacggcgctac

SEQ ID NO: 5697454 - DNA, 25 bp, Homo sapien
tgagggaagagacacggcgctacct

SEQ ID NO: 5697455 - DNA, 25 bp, Homo sapien
tgtatgagggaagagacacggcgct

SEQ ID NO: 5697456 - DNA, 25 bp, Homo sapien
gaattgaactgaattaaacgacacc

SEQ ID NO: 5697457 - DNA, 25 bp, Homo sapien
gaacgcagaactggttgcttgcttg

SEQ ID NO: 5697458 - DNA, 25 bp, Homo sapien
gctgcagaacgcagaactggttgct

SEQ ID NO: 5697459 - DNA, 25 bp, Homo sapien
cttgcttggcatgtagggagaaacc

SEQ ID NO: 5697460 - DNA, 25 bp, Homo sapien
tgaattaaacgacacctagctggtg

SEQ ID NO: 5697461 - DNA, 25 bp, Homo sapien
tgtctgctgcagaacgcagaactgg

SEQ ID NO: 5697462 - DNA, 25 bp, Homo sapien
aagcaaccagttctgcgttctgcag

SEQ ID NO: 5697463 - DNA, 25 bp, Homo sapien
caagcaagcaaccagttctgcgttc

SEQ ID NO: 5697464 - DNA, 25 bp, Homo sapien
ccagttctgcgttctgcagcagaca

SEQ ID NO: 5697465 - DNA, 25 bp, Homo sapien
ggtttctccctacatgccaagcaag

SEQ ID NO: 5697466 - DNA, 25 bp, Homo sapien
gctaggtgtcgtttaattcagttca

SEQ ID NO: 5697467 - DNA, 25 bp, Homo sapien
caccagctaggtgtcgtttaattca

SEQ ID NO: 5697468 - DNA, 25 bp, Homo sapien
ccagcaagctagaaagattcatttc

SEQ ID NO: 5697469 - DNA, 25 bp, Homo sapien
ttgtgtcatacagcaagttattttt

SEQ ID NO: 5697470 - DNA, 25 bp, Homo sapien
tccatttgtgtcatacagcaagtta

SEQ ID NO: 5697471 - DNA, 25 bp, Homo sapien
gcaagctagaaagattcatttccaa

SEQ ID NO: 5697472 - DNA, 25 bp, Homo sapien
ggtagcatggctagacatgagacat

SEQ ID NO: 5697473 - DNA, 25 bp, Homo sapien
ttccagtggtagcatggctagacat

SEQ ID NO: 5697474 - DNA, 25 bp, Homo sapien
tgtctcatgtctagccatgctacca

SEQ ID NO: 5697475 - DNA, 25 bp, Homo sapien
atgtctagccatgctaccactggaa

SEQ ID NO: 5697476 - DNA, 25 bp, Homo sapien
gaaatgaatctttctagcttgctgg

SEQ ID NO: 5697477 - DNA, 25 bp, Homo sapien
ttggaaatgaatctttctagcttgc

SEQ ID NO: 5697478 - DNA, 25 bp, Homo sapien
aacttgctgtatgacacaaatggaa

SEQ ID NO: 5697479 - DNA, 25 bp, Homo sapien
aaaaataacttgctgtatgacacaa

SEQ ID NO: 5697480 - DNA, 25 bp, Homo sapien
ctggcaattttggtggtgacatttt

SEQ ID NO: 5697481 - DNA, 25 bp, Homo sapien
gttgctcactcaccaatcaaattta

SEQ ID NO: 5697482 - DNA, 25 bp, Homo sapien
tcttctggcaattttggtggtgaca

SEQ ID NO: 5697483 - DNA, 25 bp, Homo sapien
ggaatgcagttgctcactcaccaat

SEQ ID NO: 5697484 - DNA, 25 bp, Homo sapien
tgcagttgctcactcaccaatcaaa

SEQ ID NO: 5697485 - DNA, 25 bp, Homo sapien
tgaatacatcttctggcaattttgg

SEQ ID NO: 5697486 - DNA, 25 bp, Homo sapien
attggtgagtgagcaactgcattcc

SEQ ID NO: 5697487 - DNA, 25 bp, Homo sapien
aaaatgtcaccaccaaaattgccag

SEQ ID NO: 5697488 - DNA, 25 bp, Homo sapien
tttgattggtgagtgagcaactgca

SEQ ID NO: 5697489 - DNA, 25 bp, Homo sapien
ccaaaattgccagaagatgtattca

SEQ ID NO: 5697490 - DNA, 25 bp, Homo sapien
tgtcaccaccaaaattgccagaaga

SEQ ID NO: 5697491 - DNA, 25 bp, Homo sapien
taaatttgattggtgagtgagcaac

SEQ ID NO: 5697492 - DNA, 25 bp, Homo sapien
aaaatttatacctactcatcagctg

SEQ ID NO: 5697493 - DNA, 25 bp, Homo sapien
tatacctactcatcagctgaggacc

SEQ ID NO: 5697494 - DNA, 25 bp, Homo sapien
cctactcatcagctgaggacctggg

SEQ ID NO: 5697495 - DNA, 25 bp, Homo sapien
cagagcaggacccttagctcttaaa

SEQ ID NO: 5697496 - DNA, 25 bp, Homo sapien
gagcaggacccttagctcttaaaaa

SEQ ID NO: 5697497 - DNA, 25 bp, Homo sapien
tacctactcatcagctgaggacctg

SEQ ID NO: 5697498 - DNA, 25 bp, Homo sapien
ccccaggtcctcagctgatgagtag

SEQ ID NO: 5697499 - DNA, 25 bp, Homo sapien
tcctcagctgatgagtaggtataaa

SEQ ID NO: 5697500 - DNA, 25 bp, Homo sapien
tttttaagagctaagggtcctgctc

SEQ ID NO: 5697501 - DNA, 25 bp, Homo sapien
tttaagagctaagggtcctgctctg

SEQ ID NO: 5697502 - DNA, 25 bp, Homo sapien
cagctgatgagtaggtataaatttt

SEQ ID NO: 5697503 - DNA, 25 bp, Homo sapien
caggtcctcagctgatgagtaggta

SEQ ID NO: 5697504 - DNA, 25 bp, Homo sapien
caattccttgttgatgcgataggtt

SEQ ID NO: 5697505 - DNA, 25 bp, Homo sapien
tgcgataggtttttcgtgacgaact

SEQ ID NO: 5697506 - DNA, 25 bp, Homo sapien
gatgcgataggtttttcgtgacgaa

SEQ ID NO: 5697507 - DNA, 25 bp, Homo sapien
ccttgttgatgcgataggtttttcg

SEQ ID NO: 5697508 - DNA, 25 bp, Homo sapien
ttgatgcgataggtttttcgtgacg

SEQ ID NO: 5697509 - DNA, 25 bp, Homo sapien
gcaattccttgttgatgcgataggt

SEQ ID NO: 5697510 - DNA, 25 bp, Homo sapien
cgaaaaacctatcgcatcaacaagg

SEQ ID NO: 5697511 - DNA, 25 bp, Homo sapien
acctatcgcatcaacaaggaattgc

SEQ ID NO: 5697512 - DNA, 25 bp, Homo sapien
tcgtcacgaaaaacctatcgcatca

SEQ ID NO: 5697513 - DNA, 25 bp, Homo sapien
agttcgtcacgaaaaacctatcgca

SEQ ID NO: 5697514 - DNA, 25 bp, Homo sapien
gttcgtcacgaaaaacctatcgcat

SEQ ID NO: 5697515 - DNA, 25 bp, Homo sapien
tcacgaaaaacctatcgcatcaaca

SEQ ID NO: 5697516 - DNA, 25 bp, Homo sapien
gatgactgtgtattgttctcttcag

SEQ ID NO: 5697517 - DNA, 25 bp, Homo sapien
gaaaagctacagtagttgcttcatg

SEQ ID NO: 5697518 - DNA, 25 bp, Homo sapien
agatgactgtgtattgttctcttca

SEQ ID NO: 5697519 - DNA, 25 bp, Homo sapien
aggaaaagctacagtagttgcttca

SEQ ID NO: 5697520 - DNA, 25 bp, Homo sapien
ggaaaagctacagtagttgcttcat

SEQ ID NO: 5697521 - DNA, 25 bp, Homo sapien
aaggaaaagctacagtagttgcttc

SEQ ID NO: 5697522 - DNA, 25 bp, Homo sapien
tgaagcaactactgtagcttttcct

SEQ ID NO: 5697523 - DNA, 25 bp, Homo sapien
ctgaagagaacaatacacagtcatc

SEQ ID NO: 5697524 - DNA, 25 bp, Homo sapien
tgaagagaacaatacacagtcatct

SEQ ID NO: 5697525 - DNA, 25 bp, Homo sapien
gaagagaacaatacacagtcatctt

SEQ ID NO: 5697526 - DNA, 25 bp, Homo sapien
catgaagcaactactgtagcttttc

SEQ ID NO: 5697527 - DNA, 25 bp, Homo sapien
gaagcaactactgtagcttttcctt

SEQ ID NO: 5697528 - DNA, 25 bp, Homo sapien
gccacccttggtcctctagcgtggt

SEQ ID NO: 5697529 - DNA, 25 bp, Homo sapien
cttggtcctctagcgtggttgtgaa

SEQ ID NO: 5697530 - DNA, 25 bp, Homo sapien
cacccttggtcctctagcgtggttg

SEQ ID NO: 5697531 - DNA, 25 bp, Homo sapien
cctggtaagggtggttctctggccg

SEQ ID NO: 5697532 - DNA, 25 bp, Homo sapien
tggtaagggtggttctctggccgcc

SEQ ID NO: 5697533 - DNA, 25 bp, Homo sapien
ccttggtcctctagcgtggttgtga

SEQ ID NO: 5697534 - DNA, 25 bp, Homo sapien
cggccagagaaccacccttaccagg

SEQ ID NO: 5697535 - DNA, 25 bp, Homo sapien
caaccacgctagaggaccaagggtg

SEQ ID NO: 5697536 - DNA, 25 bp, Homo sapien
ttcacaaccacgctagaggaccaag

SEQ ID NO: 5697537 - DNA, 25 bp, Homo sapien
accacgctagaggaccaagggtggc

SEQ ID NO: 5697538 - DNA, 25 bp, Homo sapien
acaaccacgctagaggaccaagggt

SEQ ID NO: 5697539 - DNA, 25 bp, Homo sapien
tcacaaccacgctagaggaccaagg

SEQ ID NO: 5697540 - DNA, 25 bp, Homo sapien
cattgcatcatagttgggacagagc

SEQ ID NO: 5697541 - DNA, 25 bp, Homo sapien
cgagtgctgggatgctgtctctact

SEQ ID NO: 5697542 - DNA, 25 bp, Homo sapien
tcctttactccccattgcatcatag

SEQ ID NO: 5697543 - DNA, 25 bp, Homo sapien
tactccccattgcatcatagttggg

SEQ ID NO: 5697544 - DNA, 25 bp, Homo sapien
tctctgccgtcttgtgcgagtgctg

SEQ ID NO: 5697545 - DNA, 25 bp, Homo sapien
tgcatcatagttgggacagagcagt

SEQ ID NO: 5697546 - DNA, 25 bp, Homo sapien
agtagagacagcatcccagcactcg

SEQ ID NO: 5697547 - DNA, 25 bp, Homo sapien
tctgtcccaactatgatgcaatggg

SEQ ID NO: 5697548 - DNA, 25 bp, Homo sapien
gctctgtcccaactatgatgcaatg

SEQ ID NO: 5697549 - DNA, 25 bp, Homo sapien
agcactcgcacaagacggcagagaa

SEQ ID NO: 5697550 - DNA, 25 bp, Homo sapien
ccagcactcgcacaagacggcagag

SEQ ID NO: 5697551 - DNA, 25 bp, Homo sapien
actgctctgtcccaactatgatgca

SEQ ID NO: 5697552 - DNA, 25 bp, Homo sapien
cagtgtgggcattatgttgtggacc

SEQ ID NO: 5697553 - DNA, 25 bp, Homo sapien
ggcagcctattgcaaggacctgatc

SEQ ID NO: 5697554 - DNA, 25 bp, Homo sapien
gcagcctattgcaaggacctgatcg

SEQ ID NO: 5697555 - DNA, 25 bp, Homo sapien
ggcattatgttgtggaccaaggcag

SEQ ID NO: 5697556 - DNA, 25 bp, Homo sapien
tgggcattatgttgtggaccaaggc

SEQ ID NO: 5697557 - DNA, 25 bp, Homo sapien
caaggacctgatcgggcggcagccg

SEQ ID NO: 5697558 - DNA, 25 bp, Homo sapien
gatcaggtccttgcaataggctgcc

SEQ ID NO: 5697559 - DNA, 25 bp, Homo sapien
ggtccacaacataatgcccacactg

SEQ ID NO: 5697560 - DNA, 25 bp, Homo sapien
ctgccttggtccacaacataatgcc

SEQ ID NO: 5697561 - DNA, 25 bp, Homo sapien
cggctgccgcccgatcaggtccttg

SEQ ID NO: 5697562 - DNA, 25 bp, Homo sapien
cgatcaggtccttgcaataggctgc

SEQ ID NO: 5697563 - DNA, 25 bp, Homo sapien
gccttggtccacaacataatgccca

SEQ ID NO: 5697564 - DNA, 25 bp, Homo sapien
tgctgagaacacgcaggaggaggct

SEQ ID NO: 5697565 - DNA, 25 bp, Homo sapien
tgtgctgagaacacgcaggaggagg

SEQ ID NO: 5697566 - DNA, 25 bp, Homo sapien
gctgagaacacgcaggaggaggctg

SEQ ID NO: 5697567 - DNA, 25 bp, Homo sapien
gctggagacggggttcttgcctggg

SEQ ID NO: 5697568 - DNA, 25 bp, Homo sapien
cccaggcaagaaccccgtctccagc

SEQ ID NO: 5697569 - DNA, 25 bp, Homo sapien
ccaggcaagaaccccgtctccagcc

SEQ ID NO: 5697570 - DNA, 25 bp, Homo sapien
aggcaagaaccccgtctccagcctc

SEQ ID NO: 5697571 - DNA, 25 bp, Homo sapien
caggcaagaaccccgtctccagcct

SEQ ID NO: 5697572 - DNA, 25 bp, Homo sapien
cctcctcctgcgtgttctcagcaca

SEQ ID NO: 5697573 - DNA, 25 bp, Homo sapien
agcctcctcctgcgtgttctcagca

SEQ ID NO: 5697574 - DNA, 25 bp, Homo sapien
cagcctcctcctgcgtgttctcagc

SEQ ID NO: 5697575 - DNA, 25 bp, Homo sapien
aacatcgggtcacctggctgactgg

SEQ ID NO: 5697576 - DNA, 25 bp, Homo sapien
actggtgtgctgagaacacgcagga

SEQ ID NO: 5697577 - DNA, 25 bp, Homo sapien
gctgagaacacgcaggaggaggctg

SEQ ID NO: 5697578 - DNA, 25 bp, Homo sapien
gtcacctggctgactggtgtgctga

SEQ ID NO: 5697579 - DNA, 25 bp, Homo sapien
agaacatcgggtcacctggctgact

SEQ ID NO: 5697580 - DNA, 25 bp, Homo sapien
cctggctgactggtgtgctgagaac

SEQ ID NO: 5697581 - DNA, 25 bp, Homo sapien
ttctcagcacaccagtcagccaggt

SEQ ID NO: 5697582 - DNA, 25 bp, Homo sapien
agtcagccaggtgacccgatgttct

SEQ ID NO: 5697583 - DNA, 25 bp, Homo sapien
tcctgcgtgttctcagcacaccagt

SEQ ID NO: 5697584 - DNA, 25 bp, Homo sapien
accagtcagccaggtgacccgatgt

SEQ ID NO: 5697585 - DNA, 25 bp, Homo sapien
tcagcacaccagtcagccaggtgac

SEQ ID NO: 5697586 - DNA, 25 bp, Homo sapien
cagcctcctcctgcgtgttctcagc

SEQ ID NO: 5697587 - DNA, 25 bp, Homo sapien
tttcggctgcaaagctggctgtcaa

SEQ ID NO: 5697588 - DNA, 25 bp, Homo sapien
attgggaggagggtctaaagtcttg

SEQ ID NO: 5697589 - DNA, 25 bp, Homo sapien
gtttcggctgcaaagctggctgtca

SEQ ID NO: 5697590 - DNA, 25 bp, Homo sapien
ttgggaggagggtctaaagtcttga

SEQ ID NO: 5697591 - DNA, 25 bp, Homo sapien
acagcggagaatgcctgttgggttt

SEQ ID NO: 5697592 - DNA, 25 bp, Homo sapien
cacagcggagaatgcctgttgggtt

SEQ ID NO: 5697593 - DNA, 25 bp, Homo sapien
cagcggagaatgcctgttgggtttg

SEQ ID NO: 5697594 - DNA, 25 bp, Homo sapien
caaacccaacaggcattctccgctg

SEQ ID NO: 5697595 - DNA, 25 bp, Homo sapien
aacccaacaggcattctccgctgtg

SEQ ID NO: 5697596 - DNA, 25 bp, Homo sapien
aaacccaacaggcattctccgctgt

SEQ ID NO: 5697597 - DNA, 25 bp, Homo sapien
tcaagactttagaccctcctcccaa

SEQ ID NO: 5697598 - DNA, 25 bp, Homo sapien
tgacagccagctttgcagccgaaac

SEQ ID NO: 5697599 - DNA, 25 bp, Homo sapien
caagactttagaccctcctcccaat

SEQ ID NO: 5697600 - DNA, 25 bp, Homo sapien
ttgacagccagctttgcagccgaaa

SEQ ID NO: 5697601 - DNA, 25 bp, Homo sapien
cgcatcacagcggagaatgcctgtt

SEQ ID NO: 5697602 - DNA, 25 bp, Homo sapien
cacagcggagaatgcctgttgggtt

SEQ ID NO: 5697603 - DNA, 25 bp, Homo sapien
gaggctactcgcatcacagcggaga

SEQ ID NO: 5697604 - DNA, 25 bp, Homo sapien
acaggagggaggctactcgcatcac

SEQ ID NO: 5697605 - DNA, 25 bp, Homo sapien
tactcgcatcacagcggagaatgcc

SEQ ID NO: 5697606 - DNA, 25 bp, Homo sapien
agggaggctactcgcatcacagcgg

SEQ ID NO: 5697607 - DNA, 25 bp, Homo sapien
tctccgctgtgatgcgagtagcctc

SEQ ID NO: 5697608 - DNA, 25 bp, Homo sapien
aacaggcattctccgctgtgatgcg

SEQ ID NO: 5697609 - DNA, 25 bp, Homo sapien
aaacccaacaggcattctccgctgt

SEQ ID NO: 5697610 - DNA, 25 bp, Homo sapien
ccgctgtgatgcgagtagcctccct

SEQ ID NO: 5697611 - DNA, 25 bp, Homo sapien
gtgatgcgagtagcctccctcctgt

SEQ ID NO: 5697612 - DNA, 25 bp, Homo sapien
cattctccgctgtgatgcgagtagc

SEQ ID NO: 5697613 - DNA, 25 bp, Homo sapien
gggcagatgccagcgtgtgtgtgag

SEQ ID NO: 5697614 - DNA, 25 bp, Homo sapien
cagggcagatgccagcgtgtgtgtg

SEQ ID NO: 5697615 - DNA, 25 bp, Homo sapien
agggcagatgccagcgtgtgtgtga

SEQ ID NO: 5697616 - DNA, 25 bp, Homo sapien
ggcagatgccagcgtgtgtgtgaga

SEQ ID NO: 5697617 - DNA, 25 bp, Homo sapien
gcagatgccagcgtgtgtgtgagaa

SEQ ID NO: 5697618 - DNA, 25 bp, Homo sapien
ttctcacacacacgctggcatctgc

SEQ ID NO: 5697619 - DNA, 25 bp, Homo sapien
cacacacacgctggcatctgccctg

SEQ ID NO: 5697620 - DNA, 25 bp, Homo sapien
tcacacacacgctggcatctgccct

SEQ ID NO: 5697621 - DNA, 25 bp, Homo sapien
ctcacacacacgctggcatctgccc

SEQ ID NO: 5697622 - DNA, 25 bp, Homo sapien
tctcacacacacgctggcatctgcc

SEQ ID NO: 5697623 - DNA, 25 bp, Homo sapien
gggccaccatcacctggagagcagg

SEQ ID NO: 5697624 - DNA, 25 bp, Homo sapien
cagcgtgtgtgtgagaactaggtca

SEQ ID NO: 5697625 - DNA, 25 bp, Homo sapien
ggtcgttgtgtaggggccaccatca

SEQ ID NO: 5697626 - DNA, 25 bp, Homo sapien
tcacctggagagcagggcagatgcc

SEQ ID NO: 5697627 - DNA, 25 bp, Homo sapien
cagatgccagcgtgtgtgtgagaac

SEQ ID NO: 5697628 - DNA, 25 bp, Homo sapien
tctaaagtcttgaagagaaatgtgg

SEQ ID NO: 5697629 - DNA, 25 bp, Homo sapien
tgacctagttctcacacacacgctg

SEQ ID NO: 5697630 - DNA, 25 bp, Homo sapien
ggcatctgccctgctctccaggtga

SEQ ID NO: 5697631 - DNA, 25 bp, Homo sapien
gttctcacacacacgctggcatctg

SEQ ID NO: 5697632 - DNA, 25 bp, Homo sapien
gaccccacatttctcttcaagactt

SEQ ID NO: 5697633 - DNA, 25 bp, Homo sapien
tgctctccaggtgatggtggcccct

SEQ ID NO: 5697634 - DNA, 25 bp, Homo sapien
tgatggtggcccctacacaacgacc

SEQ ID NO: 5697635 - DNA, 25 bp, Homo sapien
agtgcctccagaagcgaggatttcc

SEQ ID NO: 5697636 - DNA, 25 bp, Homo sapien
gggcatccccgtctctttacatgtc

SEQ ID NO: 5697637 - DNA, 25 bp, Homo sapien
cagaagcgaggatttcctgcaaggg

SEQ ID NO: 5697638 - DNA, 25 bp, Homo sapien
acctaggtctggagtgcctccagaa

SEQ ID NO: 5697639 - DNA, 25 bp, Homo sapien
tccagaagcgaggatttcctgcaag

SEQ ID NO: 5697640 - DNA, 25 bp, Homo sapien
tggagtgcctccagaagcgaggatt

SEQ ID NO: 5697641 - DNA, 25 bp, Homo sapien
tgcaggaaatcctcgcttctggagg

SEQ ID NO: 5697642 - DNA, 25 bp, Homo sapien
ggaaatcctcgcttctggaggcact

SEQ ID NO: 5697643 - DNA, 25 bp, Homo sapien
aatcctcgcttctggaggcactcca

SEQ ID NO: 5697644 - DNA, 25 bp, Homo sapien
cccttgcaggaaatcctcgcttctg

SEQ ID NO: 5697645 - DNA, 25 bp, Homo sapien
ttctggaggcactccagacctaggt

SEQ ID NO: 5697646 - DNA, 25 bp, Homo sapien
acatgtaaagagacggggatgcccc

SEQ ID NO: 5697647 - DNA, 25 bp, Homo sapien
aacctggtgatggttcccactccca

SEQ ID NO: 5697648 - DNA, 25 bp, Homo sapien
gcacttcgcttttgatttctctgga

SEQ ID NO: 5697649 - DNA, 25 bp, Homo sapien
acctggtgatggttcccactcccat

SEQ ID NO: 5697650 - DNA, 25 bp, Homo sapien
tgcacttcgcttttgatttctctgg

SEQ ID NO: 5697651 - DNA, 25 bp, Homo sapien
atgggagtgggaaccatcaccaggt

SEQ ID NO: 5697652 - DNA, 25 bp, Homo sapien
ccagagaaatcaaaagcgaagtgca

SEQ ID NO: 5697653 - DNA, 25 bp, Homo sapien
tccagagaaatcaaaagcgaagtgc

SEQ ID NO: 5697654 - DNA, 25 bp, Homo sapien
tgggagtgggaaccatcaccaggtt

SEQ ID NO: 5697655 - DNA, 25 bp, Homo sapien
aagttttaggcattggctcaatcac

SEQ ID NO: 5697656 - DNA, 25 bp, Homo sapien
tctttaacctggtgcggagaagcta

SEQ ID NO: 5697657 - DNA, 25 bp, Homo sapien
ggctcaatcactggtgcagccattg

SEQ ID NO: 5697658 - DNA, 25 bp, Homo sapien
ctttaacctggtgcggagaagctac

SEQ ID NO: 5697659 - DNA, 25 bp, Homo sapien
gcattggctcaatcactggtgcagc

SEQ ID NO: 5697660 - DNA, 25 bp, Homo sapien
taggcattggctcaatcactggtgc

SEQ ID NO: 5697661 - DNA, 25 bp, Homo sapien
gctgcaccagtgattgagccaatgc

SEQ ID NO: 5697662 - DNA, 25 bp, Homo sapien
caccagtgattgagccaatgcctaa

SEQ ID NO: 5697663 - DNA, 25 bp, Homo sapien
caatggctgcaccagtgattgagcc

SEQ ID NO: 5697664 - DNA, 25 bp, Homo sapien
gtagcttctccgcaccaggttaaag

SEQ ID NO: 5697665 - DNA, 25 bp, Homo sapien
gtgattgagccaatgcctaaaactt

SEQ ID NO: 5697666 - DNA, 25 bp, Homo sapien
tgcaccagtgattgagccaatgcct

SEQ ID NO: 5697667 - DNA, 25 bp, Homo sapien
tcaagtggtgtagaaaggggccttc

SEQ ID NO: 5697668 - DNA, 25 bp, Homo sapien
gaaggcccctttctacaccacttga

SEQ ID NO: 5697669 - DNA, 25 bp, Homo sapien
tcaagtggtgtagaaaggggccttc

SEQ ID NO: 5697670 - DNA, 25 bp, Homo sapien
gcagtgtgctgttccagttcccctt

SEQ ID NO: 5697671 - DNA, 25 bp, Homo sapien
cagcagtgtgctgttccagttcccc

SEQ ID NO: 5697672 - DNA, 25 bp, Homo sapien
cccagccccacacaatggtgggcct

SEQ ID NO: 5697673 - DNA, 25 bp, Homo sapien
agcagtgtgctgttccagttcccct

SEQ ID NO: 5697674 - DNA, 25 bp, Homo sapien
agtgtgctgttccagttcccctttt

SEQ ID NO: 5697675 - DNA, 25 bp, Homo sapien
ctgggggatccagggccctgaaggc

SEQ ID NO: 5697676 - DNA, 25 bp, Homo sapien
tgaaggcccctttctacaccacttg

SEQ ID NO: 5697677 - DNA, 25 bp, Homo sapien
gaaggcccctttctacaccacttga

SEQ ID NO: 5697678 - DNA, 25 bp, Homo sapien
ggggaactggaacagcacactgctg

SEQ ID NO: 5697679 - DNA, 25 bp, Homo sapien
cctgaaggcccctttctacaccact

SEQ ID NO: 5697680 - DNA, 25 bp, Homo sapien
aaaaggggaactggaacagcacact

SEQ ID NO: 5697681 - DNA, 25 bp, Homo sapien
tcttagctgttcctcgttgcagtgt

SEQ ID NO: 5697682 - DNA, 25 bp, Homo sapien
tagctgttcctcgttgcagtgttaa

SEQ ID NO: 5697683 - DNA, 25 bp, Homo sapien
gctgttcctcgttgcagtgttaaat

SEQ ID NO: 5697684 - DNA, 25 bp, Homo sapien
ttcttagctgttcctcgttgcagtg

SEQ ID NO: 5697685 - DNA, 25 bp, Homo sapien
gtttcttagctgttcctcgttgcag

SEQ ID NO: 5697686 - DNA, 25 bp, Homo sapien
tgttcctcgttgcagtgttaaatcc

SEQ ID NO: 5697687 - DNA, 25 bp, Homo sapien
tctcagcttgtgttgtgagtttcag

SEQ ID NO: 5697688 - DNA, 25 bp, Homo sapien
tcagcttgtgttgtgagtttcagtg

SEQ ID NO: 5697689 - DNA, 25 bp, Homo sapien
cttgtgttgtgagtttcagtgttgg

SEQ ID NO: 5697690 - DNA, 25 bp, Homo sapien
cagcttgtgttgtgagtttcagtgt

SEQ ID NO: 5697691 - DNA, 25 bp, Homo sapien
ctcagcttgtgttgtgagtttcagt

SEQ ID NO: 5697692 - DNA, 25 bp, Homo sapien
gcttgtgttgtgagtttcagtgttg

SEQ ID NO: 5697693 - DNA, 25 bp, Homo sapien
caacactgaaactcacaacacaagc

SEQ ID NO: 5697694 - DNA, 25 bp, Homo sapien
tgaaactcacaacacaagctgagaa

SEQ ID NO: 5697695 - DNA, 25 bp, Homo sapien
acactgaaactcacaacacaagctg

SEQ ID NO: 5697696 - DNA, 25 bp, Homo sapien
cactgaaactcacaacacaagctga

SEQ ID NO: 5697697 - DNA, 25 bp, Homo sapien
ccaacactgaaactcacaacacaag

SEQ ID NO: 5697698 - DNA, 25 bp, Homo sapien
actgaaactcacaacacaagctgag

SEQ ID NO: 5697699 - DNA, 25 bp, Homo sapien
gatttaacactgcaacgaggaacag

SEQ ID NO: 5697700 - DNA, 25 bp, Homo sapien
taacactgcaacgaggaacagctaa

SEQ ID NO: 5697701 - DNA, 25 bp, Homo sapien
tttaacactgcaacgaggaacagct

SEQ ID NO: 5697702 - DNA, 25 bp, Homo sapien
ggatttaacactgcaacgaggaaca

SEQ ID NO: 5697703 - DNA, 25 bp, Homo sapien
ctgcaacgaggaacagctaagaaac

SEQ ID NO: 5697704 - DNA, 25 bp, Homo sapien
cactgcaacgaggaacagctaagaa

SEQ ID NO: 5697705 - DNA, 25 bp, Homo sapien
caatgggctgtgatcgaaccactga

SEQ ID NO: 5697706 - DNA, 25 bp, Homo sapien
aatgggctgtgatcgaaccactgaa

SEQ ID NO: 5697707 - DNA, 25 bp, Homo sapien
atgggctgtgatcgaaccactgaat

SEQ ID NO: 5697708 - DNA, 25 bp, Homo sapien
tgggctgtgatcgaaccactgaatt

SEQ ID NO: 5697709 - DNA, 25 bp, Homo sapien
tcagtggttcgatcacagcccattg

SEQ ID NO: 5697710 - DNA, 25 bp, Homo sapien
attcagtggttcgatcacagcccat

SEQ ID NO: 5697711 - DNA, 25 bp, Homo sapien
ttcagtggttcgatcacagcccatt

SEQ ID NO: 5697712 - DNA, 25 bp, Homo sapien
aattcagtggttcgatcacagccca

SEQ ID NO: 5697713 - DNA, 25 bp, Homo sapien
tcagtggttcgatcacagcccattg

SEQ ID NO: 5697714 - DNA, 25 bp, Homo sapien
gaattcagtggttcgatcacagccc

SEQ ID NO: 5697715 - DNA, 25 bp, Homo sapien
ttcagtggttcgatcacagcccatt

SEQ ID NO: 5697716 - DNA, 25 bp, Homo sapien
ggttggaattcagtggttcgatcac

SEQ ID NO: 5697717 - DNA, 25 bp, Homo sapien
cccaggttggaattcagtggttcga

SEQ ID NO: 5697718 - DNA, 25 bp, Homo sapien
aattcagtggttcgatcacagccca

SEQ ID NO: 5697719 - DNA, 25 bp, Homo sapien
agccccattcgtggatgtcagtcag

SEQ ID NO: 5697720 - DNA, 25 bp, Homo sapien
gagccccattcgtggatgtcagtca

SEQ ID NO: 5697721 - DNA, 25 bp, Homo sapien
tgtgagccccattcgtggatgtcag

SEQ ID NO: 5697722 - DNA, 25 bp, Homo sapien
tcatgtgagccccattcgtggatgt

SEQ ID NO: 5697723 - DNA, 25 bp, Homo sapien
catgtgagccccattcgtggatgtc

SEQ ID NO: 5697724 - DNA, 25 bp, Homo sapien
tgagccccattcgtggatgtcagtc

SEQ ID NO: 5697725 - DNA, 25 bp, Homo sapien
tgactgacatccacgaatggggctc

SEQ ID NO: 5697726 - DNA, 25 bp, Homo sapien
ctgactgacatccacgaatggggct

SEQ ID NO: 5697727 - DNA, 25 bp, Homo sapien
tgacatccacgaatggggctcacat

SEQ ID NO: 5697728 - DNA, 25 bp, Homo sapien
gactgacatccacgaatggggctca

SEQ ID NO: 5697729 - DNA, 25 bp, Homo sapien
gacatccacgaatggggctcacatg

SEQ ID NO: 5697730 - DNA, 25 bp, Homo sapien
acatccacgaatggggctcacatga

SEQ ID NO: 5697731 - DNA, 25 bp, Homo sapien
aacctctagcacaggacaaacaagc

SEQ ID NO: 5697732 - DNA, 25 bp, Homo sapien
caaacaagctccaggtccaagattc

SEQ ID NO: 5697733 - DNA, 25 bp, Homo sapien
tctgctgactgacatccacgaatgg

SEQ ID NO: 5697734 - DNA, 25 bp, Homo sapien
catgatgtgctctgcttacatggaa

SEQ ID NO: 5697735 - DNA, 25 bp, Homo sapien
gggctcacatgatgtgctctgctta

SEQ ID NO: 5697736 - DNA, 25 bp, Homo sapien
caagattctgttctgctgactgaca

SEQ ID NO: 5697737 - DNA, 25 bp, Homo sapien
caggtcacttagagattctgttaca

SEQ ID NO: 5697738 - DNA, 25 bp, Homo sapien
acatacaccagctctgacaggttgg

SEQ ID NO: 5697739 - DNA, 25 bp, Homo sapien
cacttagagattctgttacatacac

SEQ ID NO: 5697740 - DNA, 25 bp, Homo sapien
gttacatacaccagctctgacaggt

SEQ ID NO: 5697741 - DNA, 25 bp, Homo sapien
tctgttacatacaccagctctgaca

SEQ ID NO: 5697742 - DNA, 25 bp, Homo sapien
agttcaggtcacttagagattctgt

SEQ ID NO: 5697743 - DNA, 25 bp, Homo sapien
acagaatctctaagtgacctgaact

SEQ ID NO: 5697744 - DNA, 25 bp, Homo sapien
ccaacctgtcagagctggtgtatgt

SEQ ID NO: 5697745 - DNA, 25 bp, Homo sapien
ggtgtatgtaacagaatctctaagt

SEQ ID NO: 5697746 - DNA, 25 bp, Homo sapien
acctgtcagagctggtgtatgtaac

SEQ ID NO: 5697747 - DNA, 25 bp, Homo sapien
tgtaacagaatctctaagtgacctg

SEQ ID NO: 5697748 - DNA, 25 bp, Homo sapien
tgtcagagctggtgtatgtaacaga

SEQ ID NO: 5697749 - DNA, 25 bp, Homo sapien
aagggaccgaggacagtactggctg

SEQ ID NO: 5697750 - DNA, 25 bp, Homo sapien
cccatgtgcatctggaccagtttgg

SEQ ID NO: 5697751 - DNA, 25 bp, Homo sapien
tggaccccatgtgcatctggaccag

SEQ ID NO: 5697752 - DNA, 25 bp, Homo sapien
gaccccatgtgcatctggaccagtt

SEQ ID NO: 5697753 - DNA, 25 bp, Homo sapien
acagtactggctggtggtctgggta

SEQ ID NO: 5697754 - DNA, 25 bp, Homo sapien
catctggaccccatgtgcatctgga

SEQ ID NO: 5697755 - DNA, 25 bp, Homo sapien
accaccagccagtactgtcctcggt

SEQ ID NO: 5697756 - DNA, 25 bp, Homo sapien
tacccagaccaccagccagtactgt

SEQ ID NO: 5697757 - DNA, 25 bp, Homo sapien
cagccagtactgtcctcggtccctt

SEQ ID NO: 5697758 - DNA, 25 bp, Homo sapien
agaccaccagccagtactgtcctcg

SEQ ID NO: 5697759 - DNA, 25 bp, Homo sapien
ccaaactggtccagatgcacatggg

SEQ ID NO: 5697760 - DNA, 25 bp, Homo sapien
tccagatgcacatggggtccagatg

SEQ ID NO: 5697761 - DNA, 25 bp, Homo sapien
tagctgccagagttgactgtcccgt

SEQ ID NO: 5697762 - DNA, 25 bp, Homo sapien
cagagttgactgtcccgttctttgg

SEQ ID NO: 5697763 - DNA, 25 bp, Homo sapien
cctgttcaggcacagtgaggtgtcg

SEQ ID NO: 5697764 - DNA, 25 bp, Homo sapien
ttgactgtcccgttctttggtgtaa

SEQ ID NO: 5697765 - DNA, 25 bp, Homo sapien
gaatgtagctgccagagttgactgt

SEQ ID NO: 5697766 - DNA, 25 bp, Homo sapien
tgcccctgttcaggcacagtgaggt

SEQ ID NO: 5697767 - DNA, 25 bp, Homo sapien
caaagaacgggacagtcaactctgg

SEQ ID NO: 5697768 - DNA, 25 bp, Homo sapien
ttacaccaaagaacgggacagtcaa

SEQ ID NO: 5697769 - DNA, 25 bp, Homo sapien
gctacattccccgacacctcactgt

SEQ ID NO: 5697770 - DNA, 25 bp, Homo sapien
gacacctcactgtgcctgaacaggg

SEQ ID NO: 5697771 - DNA, 25 bp, Homo sapien
gaacgggacagtcaactctggcagc

SEQ ID NO: 5697772 - DNA, 25 bp, Homo sapien
ggacagtcaactctggcagctacat

SEQ ID NO: 5697773 - DNA, 25 bp, Homo sapien
tggtctgtggtcctcactgaagaaa

SEQ ID NO: 5697774 - DNA, 25 bp, Homo sapien
gcccacagcgtggtcaggaaagaga

SEQ ID NO: 5697775 - DNA, 25 bp, Homo sapien
tttttcctcagagttggagcccaca

SEQ ID NO: 5697776 - DNA, 25 bp, Homo sapien
cactgaagaaagaaacattcttcct

SEQ ID NO: 5697777 - DNA, 25 bp, Homo sapien
cgtggtcaggaaagagaagtagcca

SEQ ID NO: 5697778 - DNA, 25 bp, Homo sapien
ttggagcccacagcgtggtcaggaa

SEQ ID NO: 5697779 - DNA, 25 bp, Homo sapien
acgctgtgggctccaactctgagga

SEQ ID NO: 5697780 - DNA, 25 bp, Homo sapien
tttcttcagtgaggaccacagacca

SEQ ID NO: 5697781 - DNA, 25 bp, Homo sapien
ttcctgaccacgctgtgggctccaa

SEQ ID NO: 5697782 - DNA, 25 bp, Homo sapien
tggctacttctctttcctgaccacg

SEQ ID NO: 5697783 - DNA, 25 bp, Homo sapien
tctctttcctgaccacgctgtgggc

SEQ ID NO: 5697784 - DNA, 25 bp, Homo sapien
tgtgggctccaactctgaggaaaaa

SEQ ID NO: 5697785 - DNA, 25 bp, Homo sapien
aagccaccaatggggagggcctggg

SEQ ID NO: 5697786 - DNA, 25 bp, Homo sapien
aaaagccaccaatggggagggcctg

SEQ ID NO: 5697787 - DNA, 25 bp, Homo sapien
caccaatggggagggcctgggatta

SEQ ID NO: 5697788 - DNA, 25 bp, Homo sapien
aaagccaccaatggggagggcctgg

SEQ ID NO: 5697789 - DNA, 25 bp, Homo sapien
gccaccaatggggagggcctgggat

SEQ ID NO: 5697790 - DNA, 25 bp, Homo sapien
ccaccaatggggagggcctgggatt

SEQ ID NO: 5697791 - DNA, 25 bp, Homo sapien
caggccctccccattggtggctttt

SEQ ID NO: 5697792 - DNA, 25 bp, Homo sapien
atcccaggccctccccattggtggc

SEQ ID NO: 5697793 - DNA, 25 bp, Homo sapien
cccaggccctccccattggtggctt

SEQ ID NO: 5697794 - DNA, 25 bp, Homo sapien
ccaggccctccccattggtggcttt

SEQ ID NO: 5697795 - DNA, 25 bp, Homo sapien
aatcccaggccctccccattggtgg

SEQ ID NO: 5697796 - DNA, 25 bp, Homo sapien
taatcccaggccctccccattggtg

SEQ ID NO: 5697797 - DNA, 25 bp, Homo sapien
aactggcaggcgacccttattcctg

SEQ ID NO: 5697798 - DNA, 25 bp, Homo sapien
tgcttcagtggtcgtggcagtctgg

SEQ ID NO: 5697799 - DNA, 25 bp, Homo sapien
tgtgcttcagtggtcgtggcagtct

SEQ ID NO: 5697800 - DNA, 25 bp, Homo sapien
agtggtcgtggcagtctggtgctgc

SEQ ID NO: 5697801 - DNA, 25 bp, Homo sapien
ttcagtggtcgtggcagtctggtgc

SEQ ID NO: 5697802 - DNA, 25 bp, Homo sapien
actggcaggcgacccttattcctga

SEQ ID NO: 5697803 - DNA, 25 bp, Homo sapien
ggcagcaccagactgccacgaccac

SEQ ID NO: 5697804 - DNA, 25 bp, Homo sapien
agactgccacgaccactgaagcaca

SEQ ID NO: 5697805 - DNA, 25 bp, Homo sapien
accagactgccacgaccactgaagc

SEQ ID NO: 5697806 - DNA, 25 bp, Homo sapien
caggaataagggtcgcctgccagtt

SEQ ID NO: 5697807 - DNA, 25 bp, Homo sapien
tcaggaataagggtcgcctgccagt

SEQ ID NO: 5697808 - DNA, 25 bp, Homo sapien
gcaccagactgccacgaccactgaa

SEQ ID NO: 5697809 - DNA, 25 bp, Homo sapien
cttttcgttccatttcatgcttggg

SEQ ID NO: 5697810 - DNA, 25 bp, Homo sapien
ggccctcttttcgttccatttcatg

SEQ ID NO: 5697811 - DNA, 25 bp, Homo sapien
catgcgaacctgtcattattagttt

SEQ ID NO: 5697812 - DNA, 25 bp, Homo sapien
gcttgggtttttcatgcgaacctgt

SEQ ID NO: 5697813 - DNA, 25 bp, Homo sapien
tccgcattgcctagagttgcccaac

SEQ ID NO: 5697814 - DNA, 25 bp, Homo sapien
ttagtttttccgcattgcctagagt

SEQ ID NO: 5697815 - DNA, 25 bp, Homo sapien
cccaagcatgaaatggaacgaaaag

SEQ ID NO: 5697816 - DNA, 25 bp, Homo sapien
gttgggcaactctaggcaatgcgga

SEQ ID NO: 5697817 - DNA, 25 bp, Homo sapien
gacaggttcgcatgaaaaacccaag

SEQ ID NO: 5697818 - DNA, 25 bp, Homo sapien
gaaaaactaataatgacaggttcgc

SEQ ID NO: 5697819 - DNA, 25 bp, Homo sapien
catgaaatggaacgaaaagagggcc

SEQ ID NO: 5697820 - DNA, 25 bp, Homo sapien
caactctaggcaatgcggaaaaact

SEQ ID NO: 5697821 - DNA, 25 bp, Homo sapien
ctgggggagcttcttagggagggag

SEQ ID NO: 5697822 - DNA, 25 bp, Homo sapien
tgagagatctgaggccctgcagttt

SEQ ID NO: 5697823 - DNA, 25 bp, Homo sapien
ttctcccctaacacttgttggatac

SEQ ID NO: 5697824 - DNA, 25 bp, Homo sapien
tctcccctaacacttgttggatact

SEQ ID NO: 5697825 - DNA, 25 bp, Homo sapien
gagggagcatgtgagagatctgagg

SEQ ID NO: 5697826 - DNA, 25 bp, Homo sapien
attctcccctaacacttgttggata

SEQ ID NO: 5697827 - DNA, 25 bp, Homo sapien
tgctccctccctaagaagctccccc

SEQ ID NO: 5697828 - DNA, 25 bp, Homo sapien
tatccaacaagtgttaggggagaat

SEQ ID NO: 5697829 - DNA, 25 bp, Homo sapien
gtatccaacaagtgttaggggagaa

SEQ ID NO: 5697830 - DNA, 25 bp, Homo sapien
aaactgcagggcctcagatctctca

SEQ ID NO: 5697831 - DNA, 25 bp, Homo sapien
cctcagatctctcacatgctccctc

SEQ ID NO: 5697832 - DNA, 25 bp, Homo sapien
agtatccaacaagtgttaggggaga

SEQ ID NO: 5697833 - DNA, 25 bp, Homo sapien
agggcctcagatctctcacatgctc

SEQ ID NO: 5697834 - DNA, 25 bp, Homo sapien
tatccaacaagtgttaggggagaat

SEQ ID NO: 5697835 - DNA, 25 bp, Homo sapien
atgaaaataactcccaaactgcagg

SEQ ID NO: 5697836 - DNA, 25 bp, Homo sapien
tcacatgctccctccctaagaagct

SEQ ID NO: 5697837 - DNA, 25 bp, Homo sapien
aaactgcagggcctcagatctctca

SEQ ID NO: 5697838 - DNA, 25 bp, Homo sapien
gagaatgaaaataactcccaaactg

SEQ ID NO: 5697839 - DNA, 25 bp, Homo sapien
cactctggaacagggaaaaatttca

SEQ ID NO: 5697840 - DNA, 25 bp, Homo sapien
gaggccgaagcccagattcctgggt

SEQ ID NO: 5697841 - DNA, 25 bp, Homo sapien
cctgggtccccactctggaacaggg

SEQ ID NO: 5697842 - DNA, 25 bp, Homo sapien
tgggtccccactctggaacagggaa

SEQ ID NO: 5697843 - DNA, 25 bp, Homo sapien
aggccgaagcccagattcctgggtc

SEQ ID NO: 5697844 - DNA, 25 bp, Homo sapien
ctgggtccccactctggaacaggga

SEQ ID NO: 5697845 - DNA, 25 bp, Homo sapien
acccaggaatctgggcttcggcctc

SEQ ID NO: 5697846 - DNA, 25 bp, Homo sapien
gggacccaggaatctgggcttcggc

SEQ ID NO: 5697847 - DNA, 25 bp, Homo sapien
ggacccaggaatctgggcttcggcc

SEQ ID NO: 5697848 - DNA, 25 bp, Homo sapien
ttccagagtggggacccaggaatct

SEQ ID NO: 5697849 - DNA, 25 bp, Homo sapien
tgaaatttttccctgttccagagtg

SEQ ID NO: 5697850 - DNA, 25 bp, Homo sapien
gacccaggaatctgggcttcggcct

SEQ ID NO: 5697851 - DNA, 25 bp, Homo sapien
gggtctcttatgttggtggcctttc

SEQ ID NO: 5697852 - DNA, 25 bp, Homo sapien
tttgggtctcttatgttggtggcct

SEQ ID NO: 5697853 - DNA, 25 bp, Homo sapien
ggtctcttatgttggtggcctttca

SEQ ID NO: 5697854 - DNA, 25 bp, Homo sapien
gtctcttatgttggtggcctttcaa

SEQ ID NO: 5697855 - DNA, 25 bp, Homo sapien
ttgggtctcttatgttggtggcctt

SEQ ID NO: 5697856 - DNA, 25 bp, Homo sapien
tgggtctcttatgttggtggccttt

SEQ ID NO: 5697857 - DNA, 25 bp, Homo sapien
aggccaccaacataagagacccaaa

SEQ ID NO: 5697858 - DNA, 25 bp, Homo sapien
tgaaaggccaccaacataagagacc

SEQ ID NO: 5697859 - DNA, 25 bp, Homo sapien
ttgaaaggccaccaacataagagac

SEQ ID NO: 5697860 - DNA, 25 bp, Homo sapien
gaaaggccaccaacataagagaccc

SEQ ID NO: 5697861 - DNA, 25 bp, Homo sapien
aaaggccaccaacataagagaccca

SEQ ID NO: 5697862 - DNA, 25 bp, Homo sapien
aaggccaccaacataagagacccaa

SEQ ID NO: 5697863 - DNA, 25 bp, Homo sapien
gaatatcagttccacaaaagcaggg

SEQ ID NO: 5697864 - DNA, 25 bp, Homo sapien
gcacatagaacttagtaatcatttg

SEQ ID NO: 5697865 - DNA, 25 bp, Homo sapien
aatatcagttccacaaaagcaggga

SEQ ID NO: 5697866 - DNA, 25 bp, Homo sapien
ctggcacatagaacttagtaatcat

SEQ ID NO: 5697867 - DNA, 25 bp, Homo sapien
atatcagttccacaaaagcagggat

SEQ ID NO: 5697868 - DNA, 25 bp, Homo sapien
tatcagttccacaaaagcagggatt

SEQ ID NO: 5697869 - DNA, 25 bp, Homo sapien
atgattactaagttctatgtgccag

SEQ ID NO: 5697870 - DNA, 25 bp, Homo sapien
ccctgcttttgtggaactgatattc

SEQ ID NO: 5697871 - DNA, 25 bp, Homo sapien
tccctgcttttgtggaactgatatt

SEQ ID NO: 5697872 - DNA, 25 bp, Homo sapien
cctgcttttgtggaactgatattct

SEQ ID NO: 5697873 - DNA, 25 bp, Homo sapien
aatccctgcttttgtggaactgata

SEQ ID NO: 5697874 - DNA, 25 bp, Homo sapien
caaatgattactaagttctatgtgc

SEQ ID NO: 5697875 - DNA, 25 bp, Homo sapien
acaggctcttagttgcacctcccag

SEQ ID NO: 5697876 - DNA, 25 bp, Homo sapien
gagacaggctcttagttgcacctcc

SEQ ID NO: 5697877 - DNA, 25 bp, Homo sapien
gacaggctcttagttgcacctccca

SEQ ID NO: 5697878 - DNA, 25 bp, Homo sapien
caggctcttagttgcacctcccagt

SEQ ID NO: 5697879 - DNA, 25 bp, Homo sapien
cctctaccactagagtactagtgcc

SEQ ID NO: 5697880 - DNA, 25 bp, Homo sapien
aggctcttagttgcacctcccagtt

SEQ ID NO: 5697881 - DNA, 25 bp, Homo sapien
ggaggtgcaactaagagcctgtctc

SEQ ID NO: 5697882 - DNA, 25 bp, Homo sapien
ctgggaggtgcaactaagagcctgt

SEQ ID NO: 5697883 - DNA, 25 bp, Homo sapien
tgggaggtgcaactaagagcctgtc

SEQ ID NO: 5697884 - DNA, 25 bp, Homo sapien
gcactagtactctagtggtagaggg

SEQ ID NO: 5697885 - DNA, 25 bp, Homo sapien
aactgggaggtgcaactaagagcct

SEQ ID NO: 5697886 - DNA, 25 bp, Homo sapien
ggcactagtactctagtggtagagg

SEQ ID NO: 5697887 - DNA, 25 bp, Homo sapien
taccagactgatgggtaacagacta

SEQ ID NO: 5697888 - DNA, 25 bp, Homo sapien
tattatcttgagacattttaagaga

SEQ ID NO: 5697889 - DNA, 25 bp, Homo sapien
taagagagacgtctgtgtttaccag

SEQ ID NO: 5697890 - DNA, 25 bp, Homo sapien
agactgatgggtaacagactatggg

SEQ ID NO: 5697891 - DNA, 25 bp, Homo sapien
tctgtgtttaccagactgatgggta

SEQ ID NO: 5697892 - DNA, 25 bp, Homo sapien
cattttaagagagacgtctgtgttt

SEQ ID NO: 5697893 - DNA, 25 bp, Homo sapien
catagtctgttacccatcagtctgg

SEQ ID NO: 5697894 - DNA, 25 bp, Homo sapien
ggtaaacacagacgtctctcttaaa

SEQ ID NO: 5697895 - DNA, 25 bp, Homo sapien
ctggtaaacacagacgtctctctta

SEQ ID NO: 5697896 - DNA, 25 bp, Homo sapien
tacccatcagtctggtaaacacaga

SEQ ID NO: 5697897 - DNA, 25 bp, Homo sapien
tctctcttaaaatgtctcaagataa

SEQ ID NO: 5697898 - DNA, 25 bp, Homo sapien
tgttccccatagtctgttacccatc

SEQ ID NO: 5697899 - DNA, 25 bp, Homo sapien
aagatattcttccacctcaacctcc

SEQ ID NO: 5697900 - DNA, 25 bp, Homo sapien
agatattcttccacctcaacctccc

SEQ ID NO: 5697901 - DNA, 25 bp, Homo sapien
tcaacctcccaattacaggcctgag

SEQ ID NO: 5697902 - DNA, 25 bp, Homo sapien
gagccacagctcctggcctctgctt

SEQ ID NO: 5697903 - DNA, 25 bp, Homo sapien
tcaagatattcttccacctcaacct

SEQ ID NO: 5697904 - DNA, 25 bp, Homo sapien
gctcaagatattcttccacctcaac

SEQ ID NO: 5697905 - DNA, 25 bp, Homo sapien
gttgaggtggaagaatatcttgagc

SEQ ID NO: 5697906 - DNA, 25 bp, Homo sapien
gggaggttgaggtggaagaatatct

SEQ ID NO: 5697907 - DNA, 25 bp, Homo sapien
ggaggttgaggtggaagaatatctt

SEQ ID NO: 5697908 - DNA, 25 bp, Homo sapien
aagcagaggccaggagctgtggctc

SEQ ID NO: 5697909 - DNA, 25 bp, Homo sapien
ctcaggcctgtaattgggaggttga

SEQ ID NO: 5697910 - DNA, 25 bp, Homo sapien
aggttgaggtggaagaatatcttga

SEQ ID NO: 5697911 - DNA, 25 bp, Homo sapien
tggatttctggaactcaagcgatcc

SEQ ID NO: 5697912 - DNA, 25 bp, Homo sapien
gcagcctggatttctggaactcaag

SEQ ID NO: 5697913 - DNA, 25 bp, Homo sapien
tgcagcctggatttctggaactcaa

SEQ ID NO: 5697914 - DNA, 25 bp, Homo sapien
gcctggatttctggaactcaagcga

SEQ ID NO: 5697915 - DNA, 25 bp, Homo sapien
ctggatttctggaactcaagcgatc

SEQ ID NO: 5697916 - DNA, 25 bp, Homo sapien
cactgcagcctggatttctggaact

SEQ ID NO: 5697917 - DNA, 25 bp, Homo sapien
ttgagttccagaaatccaggctgca

SEQ ID NO: 5697918 - DNA, 25 bp, Homo sapien
catggtggtgcctgtctgtagtctc

SEQ ID NO: 5697919 - DNA, 25 bp, Homo sapien
ggatcgcttgagttccagaaatcca

SEQ ID NO: 5697920 - DNA, 25 bp, Homo sapien
gatcgcttgagttccagaaatccag

SEQ ID NO: 5697921 - DNA, 25 bp, Homo sapien
agttccagaaatccaggctgcagtg

SEQ ID NO: 5697922 - DNA, 25 bp, Homo sapien
cgcttgagttccagaaatccaggct

SEQ ID NO: 5697923 - DNA, 25 bp, Homo sapien
tttgttttcagtccacagtgcccac

SEQ ID NO: 5697924 - DNA, 25 bp, Homo sapien
ccttttgttttcagtccacagtgcc

SEQ ID NO: 5697925 - DNA, 25 bp, Homo sapien
aaccttttgttttcagtccacagtg

SEQ ID NO: 5697926 - DNA, 25 bp, Homo sapien
ttgttttcagtccacagtgcccacc

SEQ ID NO: 5697927 - DNA, 25 bp, Homo sapien
caaaccttttgttttcagtccacag

SEQ ID NO: 5697928 - DNA, 25 bp, Homo sapien
ttttcagtccacagtgcccacccca

SEQ ID NO: 5697929 - DNA, 25 bp, Homo sapien
ggcactgtggactgaaaacaaaagg

SEQ ID NO: 5697930 - DNA, 25 bp, Homo sapien
cactgtggactgaaaacaaaaggtt

SEQ ID NO: 5697931 - DNA, 25 bp, Homo sapien
ggtgggcactgtggactgaaaacaa

SEQ ID NO: 5697932 - DNA, 25 bp, Homo sapien
gtgggcactgtggactgaaaacaaa

SEQ ID NO: 5697933 - DNA, 25 bp, Homo sapien
ctgtggactgaaaacaaaaggtttg

SEQ ID NO: 5697934 - DNA, 25 bp, Homo sapien
gggtgggcactgtggactgaaaaca

SEQ ID NO: 5697935 - DNA, 25 bp, Homo sapien
gaatggggaggtcaaaaaccagcca

SEQ ID NO: 5697936 - DNA, 25 bp, Homo sapien
taacactactccttagagtctaagg

SEQ ID NO: 5697937 - DNA, 25 bp, Homo sapien
tactccttagagtctaaggctttgg

SEQ ID NO: 5697938 - DNA, 25 bp, Homo sapien
tagagtctaaggctttgggtataga

SEQ ID NO: 5697939 - DNA, 25 bp, Homo sapien
taaggctttgggtatagatggagaa

SEQ ID NO: 5697940 - DNA, 25 bp, Homo sapien
cttagagtctaaggctttgggtata

SEQ ID NO: 5697941 - DNA, 25 bp, Homo sapien
tgtggctggtttttgacctccccat

SEQ ID NO: 5697942 - DNA, 25 bp, Homo sapien
tatacccaaagccttagactctaag

SEQ ID NO: 5697943 - DNA, 25 bp, Homo sapien
tagactctaaggagtagtgttagaa

SEQ ID NO: 5697944 - DNA, 25 bp, Homo sapien
tctccatctatacccaaagccttag

SEQ ID NO: 5697945 - DNA, 25 bp, Homo sapien
attctccatctatacccaaagcctt

SEQ ID NO: 5697946 - DNA, 25 bp, Homo sapien
tggctggtttttgacctccccattc

SEQ ID NO: 5697947 - DNA, 25 bp, Homo sapien
cctgtaattgccatactgcctgctc

SEQ ID NO: 5697948 - DNA, 25 bp, Homo sapien
tgttcttgtgccacctgtaattgcc

SEQ ID NO: 5697949 - DNA, 25 bp, Homo sapien
tgtgccacctgtaattgccatactg

SEQ ID NO: 5697950 - DNA, 25 bp, Homo sapien
tctgtgagaaaaagcctcccctaag

SEQ ID NO: 5697951 - DNA, 25 bp, Homo sapien
tgcctgctcccttaatagtgctcga

SEQ ID NO: 5697952 - DNA, 25 bp, Homo sapien
gctcgagtctttgtaatctgtgaga

SEQ ID NO: 5697953 - DNA, 25 bp, Homo sapien
tcacagattacaaagactcgagcac

SEQ ID NO: 5697954 - DNA, 25 bp, Homo sapien
gagcaggcagtatggcaattacagg

SEQ ID NO: 5697955 - DNA, 25 bp, Homo sapien
gcactattaagggagcaggcagtat

SEQ ID NO: 5697956 - DNA, 25 bp, Homo sapien
cagtatggcaattacaggtggcaca

SEQ ID NO: 5697957 - DNA, 25 bp, Homo sapien
aattacaggtggcacaagaacagag

SEQ ID NO: 5697958 - DNA, 25 bp, Homo sapien
gactcgagcactattaagggagcag

SEQ ID NO: 5697959 - DNA, 25 bp, Homo sapien
catgcccggctagttttttgtattt

SEQ ID NO: 5697960 - DNA, 25 bp, Homo sapien
accatgcccggctagttttttgtat

SEQ ID NO: 5697961 - DNA, 25 bp, Homo sapien
ccatgcccggctagttttttgtatt

SEQ ID NO: 5697962 - DNA, 25 bp, Homo sapien
aatacaaaaaactagccgggcatgg

SEQ ID NO: 5697963 - DNA, 25 bp, Homo sapien
atacaaaaaactagccgggcatggt

SEQ ID NO: 5697964 - DNA, 25 bp, Homo sapien
aaatacaaaaaactagccgggcatg

SEQ ID NO: 5697965 - DNA, 25 bp, Homo sapien
agaacttctgctctagactttattt

SEQ ID NO: 5697966 - DNA, 25 bp, Homo sapien
gaagaacttctgctctagactttat

SEQ ID NO: 5697967 - DNA, 25 bp, Homo sapien
acttctgctctagactttatttttt

SEQ ID NO: 5697968 - DNA, 25 bp, Homo sapien
gaacttctgctctagactttatttt

SEQ ID NO: 5697969 - DNA, 25 bp, Homo sapien
tgaagaacttctgctctagacttta

SEQ ID NO: 5697970 - DNA, 25 bp, Homo sapien
aagaacttctgctctagactttatt

SEQ ID NO: 5697971 - DNA, 25 bp, Homo sapien
aaaaaataaagtctagagcagaagt

SEQ ID NO: 5697972 - DNA, 25 bp, Homo sapien
taaagtctagagcagaagttcttca

SEQ ID NO: 5697973 - DNA, 25 bp, Homo sapien
ataaagtctagagcagaagttcttc

SEQ ID NO: 5697974 - DNA, 25 bp, Homo sapien
aataaagtctagagcagaagttctt

SEQ ID NO: 5697975 - DNA, 25 bp, Homo sapien
aaataaagtctagagcagaagttct

SEQ ID NO: 5697976 - DNA, 25 bp, Homo sapien
aaaataaagtctagagcagaagttc

SEQ ID NO: 5697977 - DNA, 25 bp, Homo sapien
caattctgagtccactgttctgagg

SEQ ID NO: 5697978 - DNA, 25 bp, Homo sapien
ttctgagtccactgttctgaggtac

SEQ ID NO: 5697979 - DNA, 25 bp, Homo sapien
gtgtaagtatcacctgggaaacctg

SEQ ID NO: 5697980 - DNA, 25 bp, Homo sapien
tagtgtgtgtaagtatcacctggga

SEQ ID NO: 5697981 - DNA, 25 bp, Homo sapien
tttagtgtgtgtaagtatcacctgg

SEQ ID NO: 5697982 - DNA, 25 bp, Homo sapien
gtgtgtaagtatcacctgggaaacc

SEQ ID NO: 5697983 - DNA, 25 bp, Homo sapien
gtacctcagaacagtggactcagaa

SEQ ID NO: 5697984 - DNA, 25 bp, Homo sapien
caggtgatacttacacacactaaaa

SEQ ID NO: 5697985 - DNA, 25 bp, Homo sapien
ggtttcccaggtgatacttacacac

SEQ ID NO: 5697986 - DNA, 25 bp, Homo sapien
tcagaacagtggactcagaattgag

SEQ ID NO: 5697987 - DNA, 25 bp, Homo sapien
caggtttcccaggtgatacttacac

SEQ ID NO: 5697988 - DNA, 25 bp, Homo sapien
cctcagaacagtggactcagaattg

SEQ ID NO: 5697989 - DNA, 25 bp, Homo sapien
catacccactaaccagatgtgaagt

SEQ ID NO: 5697990 - DNA, 25 bp, Homo sapien
tgccagaaggtgtaatacataccca

SEQ ID NO: 5697991 - DNA, 25 bp, Homo sapien
aagttgctaccagggatagagtttg

SEQ ID NO: 5697992 - DNA, 25 bp, Homo sapien
gtgaagttgctaccagggatagagt

SEQ ID NO: 5697993 - DNA, 25 bp, Homo sapien
gatttttgccagaaggtgtaataca

SEQ ID NO: 5697994 - DNA, 25 bp, Homo sapien
ggtgtaatacatacccactaaccag

SEQ ID NO: 5697995 - DNA, 25 bp, Homo sapien
catctggttagtgggtatgtattac

SEQ ID NO: 5697996 - DNA, 25 bp, Homo sapien
aacttcacatctggttagtgggtat

SEQ ID NO: 5697997 - DNA, 25 bp, Homo sapien
actctatccctggtagcaacttcac

SEQ ID NO: 5697998 - DNA, 25 bp, Homo sapien
tgtattacaccttctggcaaaaatc

SEQ ID NO: 5697999 - DNA, 25 bp, Homo sapien
caaactctatccctggtagcaactt

SEQ ID NO: 5698000 - DNA, 25 bp, Homo sapien
gggtatgtattacaccttctggcaa

SEQ ID NO: 5698001 - DNA, 25 bp, Homo sapien
catgtggagtaagttgattgcaggc

SEQ ID NO: 5698002 - DNA, 25 bp, Homo sapien
atgtggagtaagttgattgcaggct

SEQ ID NO: 5698003 - DNA, 25 bp, Homo sapien
gcatgtggagtaagttgattgcagg

SEQ ID NO: 5698004 - DNA, 25 bp, Homo sapien
tgcatgtggagtaagttgattgcag

SEQ ID NO: 5698005 - DNA, 25 bp, Homo sapien
cctgcaatcaacttactccacatgc

SEQ ID NO: 5698006 - DNA, 25 bp, Homo sapien
agcctgcaatcaacttactccacat

SEQ ID NO: 5698007 - DNA, 25 bp, Homo sapien
ctgcaatcaacttactccacatgca

SEQ ID NO: 5698008 - DNA, 25 bp, Homo sapien
gcctgcaatcaacttactccacatg

SEQ ID NO: 5698009 - DNA, 25 bp, Homo sapien
tgcaggctagaaggcaaagcatttt

SEQ ID NO: 5698010 - DNA, 25 bp, Homo sapien
cccagctgcatgtggagtaagttga

SEQ ID NO: 5698011 - DNA, 25 bp, Homo sapien
ccttttacgtttgtgtggcactgag

SEQ ID NO: 5698012 - DNA, 25 bp, Homo sapien
catgtggagtaagttgattgcaggc

SEQ ID NO: 5698013 - DNA, 25 bp, Homo sapien
taagttgattgcaggctagaaggca

SEQ ID NO: 5698014 - DNA, 25 bp, Homo sapien
gctagaaggcaaagcattttttgcc

SEQ ID NO: 5698015 - DNA, 25 bp, Homo sapien
aaaatgctttgccttctagcctgca

SEQ ID NO: 5698016 - DNA, 25 bp, Homo sapien
ggcaaaaaatgctttgccttctagc

SEQ ID NO: 5698017 - DNA, 25 bp, Homo sapien
gcctgcaatcaacttactccacatg

SEQ ID NO: 5698018 - DNA, 25 bp, Homo sapien
tcaacttactccacatgcagctggg

SEQ ID NO: 5698019 - DNA, 25 bp, Homo sapien
tcagtgccacacaaacgtaaaaggc

SEQ ID NO: 5698020 - DNA, 25 bp, Homo sapien
tctagcctgcaatcaacttactcca

SEQ ID NO: 5698021 - DNA, 25 bp, Homo sapien
ggtgggttatgataaagagagacag

SEQ ID NO: 5698022 - DNA, 25 bp, Homo sapien
ggttatgataaagagagacaggctg

SEQ ID NO: 5698023 - DNA, 25 bp, Homo sapien
gggtgggttatgataaagagagaca

SEQ ID NO: 5698024 - DNA, 25 bp, Homo sapien
gggttatgataaagagagacaggct

SEQ ID NO: 5698025 - DNA, 25 bp, Homo sapien
gttatgataaagagagacaggctgc

SEQ ID NO: 5698026 - DNA, 25 bp, Homo sapien
tgggttatgataaagagagacaggc

SEQ ID NO: 5698027 - DNA, 25 bp, Homo sapien
gcagcctgtctctctttatcataac

SEQ ID NO: 5698028 - DNA, 25 bp, Homo sapien
gcctgtctctctttatcataaccca

SEQ ID NO: 5698029 - DNA, 25 bp, Homo sapien
cagcctgtctctctttatcataacc

SEQ ID NO: 5698030 - DNA, 25 bp, Homo sapien
tctctctttatcataacccacccct

SEQ ID NO: 5698031 - DNA, 25 bp, Homo sapien
gtctctctttatcataacccacccc

SEQ ID NO: 5698032 - DNA, 25 bp, Homo sapien
agcctgtctctctttatcataaccc

SEQ ID NO: 5698033 - DNA, 25 bp, Homo sapien
ttcttcagaggtgggccctggccag

SEQ ID NO: 5698034 - DNA, 25 bp, Homo sapien
agacaggctgctggacttcttcaga

SEQ ID NO: 5698035 - DNA, 25 bp, Homo sapien
tgctggacttcttcagaggtgggcc

SEQ ID NO: 5698036 - DNA, 25 bp, Homo sapien
tgataaagagagacaggctgctgga

SEQ ID NO: 5698037 - DNA, 25 bp, Homo sapien
gttatgataaagagagacaggctgc

SEQ ID NO: 5698038 - DNA, 25 bp, Homo sapien
tgggttatgataaagagagacaggc

SEQ ID NO: 5698039 - DNA, 25 bp, Homo sapien
ctggccagggcccacctctgaagaa

SEQ ID NO: 5698040 - DNA, 25 bp, Homo sapien
gcagcctgtctctctttatcataac

SEQ ID NO: 5698041 - DNA, 25 bp, Homo sapien
cacctctgaagaagtccagcagcct

SEQ ID NO: 5698042 - DNA, 25 bp, Homo sapien
gcctgtctctctttatcataaccca

SEQ ID NO: 5698043 - DNA, 25 bp, Homo sapien
tctgaagaagtccagcagcctgtct

SEQ ID NO: 5698044 - DNA, 25 bp, Homo sapien
cagggcccacctctgaagaagtcca

SEQ ID NO: 5698045 - DNA, 25 bp, Homo sapien
catcctatgaattctcttcccattg

SEQ ID NO: 5698046 - DNA, 25 bp, Homo sapien
cacagacagttcctttggctcctat

SEQ ID NO: 5698047 - DNA, 25 bp, Homo sapien
gaattctcttcccattgttaaacag

SEQ ID NO: 5698048 - DNA, 25 bp, Homo sapien
ccacagacagttcctttggctccta

SEQ ID NO: 5698049 - DNA, 25 bp, Homo sapien
tcagccccatcctatgaattctctt

SEQ ID NO: 5698050 - DNA, 25 bp, Homo sapien
gacagttcctttggctcctatttgg

SEQ ID NO: 5698051 - DNA, 25 bp, Homo sapien
caatgggaagagaattcataggatg

SEQ ID NO: 5698052 - DNA, 25 bp, Homo sapien
taggagccaaaggaactgtctgtgg

SEQ ID NO: 5698053 - DNA, 25 bp, Homo sapien
ctgtttaacaatgggaagagaattc

SEQ ID NO: 5698054 - DNA, 25 bp, Homo sapien
aataggagccaaaggaactgtctgt

SEQ ID NO: 5698055 - DNA, 25 bp, Homo sapien
caaataggagccaaaggaactgtct

SEQ ID NO: 5698056 - DNA, 25 bp, Homo sapien
ccaaataggagccaaaggaactgtc

SEQ ID NO: 5698057 - DNA, 25 bp, Homo sapien
tcttgatttggcatctgtcagtaat

SEQ ID NO: 5698058 - DNA, 25 bp, Homo sapien
gatttggcatctgtcagtaatacag

SEQ ID NO: 5698059 - DNA, 25 bp, Homo sapien
agtgactttcttgatttggcatctg

SEQ ID NO: 5698060 - DNA, 25 bp, Homo sapien
ccaggccacatcctgaaaagaatta

SEQ ID NO: 5698061 - DNA, 25 bp, Homo sapien
ttggcatctgtcagtaatacagctg

SEQ ID NO: 5698062 - DNA, 25 bp, Homo sapien
ggcatctgtcagtaatacagctgat

SEQ ID NO: 5698063 - DNA, 25 bp, Homo sapien
taattcttttcaggatgtggcctgg

SEQ ID NO: 5698064 - DNA, 25 bp, Homo sapien
tattactgacagatgccaaatcaag

SEQ ID NO: 5698065 - DNA, 25 bp, Homo sapien
gctgtattactgacagatgccaaat

SEQ ID NO: 5698066 - DNA, 25 bp, Homo sapien
cagctgtattactgacagatgccaa

SEQ ID NO: 5698067 - DNA, 25 bp, Homo sapien
cagatgccaaatcaagaaagtcact

SEQ ID NO: 5698068 - DNA, 25 bp, Homo sapien
atcagctgtattactgacagatgcc

SEQ ID NO: 5698069 - DNA, 25 bp, Homo sapien
gaagcacagataaccacttctctcc

SEQ ID NO: 5698070 - DNA, 25 bp, Homo sapien
cttagcttttacagactatagatga

SEQ ID NO: 5698071 - DNA, 25 bp, Homo sapien
cgactttagcctctgtgggcagtgg

SEQ ID NO: 5698072 - DNA, 25 bp, Homo sapien
acctcgactttagcctctgtgggca

SEQ ID NO: 5698073 - DNA, 25 bp, Homo sapien
tctgtgggcagtgggtactttggaa

SEQ ID NO: 5698074 - DNA, 25 bp, Homo sapien
ctatagatgaagcacagataaccac

SEQ ID NO: 5698075 - DNA, 25 bp, Homo sapien
gtggttatctgtgcttcatctatag

SEQ ID NO: 5698076 - DNA, 25 bp, Homo sapien
ccactgcccacagaggctaaagtcg

SEQ ID NO: 5698077 - DNA, 25 bp, Homo sapien
tgcccacagaggctaaagtcgaggt

SEQ ID NO: 5698078 - DNA, 25 bp, Homo sapien
tcatctatagtctgtaaaagctaag

SEQ ID NO: 5698079 - DNA, 25 bp, Homo sapien
gagagaagtggttatctgtgcttca

SEQ ID NO: 5698080 - DNA, 25 bp, Homo sapien
ttccaaagtacccactgcccacaga

SEQ ID NO: 5698081 - DNA, 25 bp, Homo sapien
gacttcctgctttccaattggggta

SEQ ID NO: 5698082 - DNA, 25 bp, Homo sapien
tgctttccaattggggtactctatt

SEQ ID NO: 5698083 - DNA, 25 bp, Homo sapien
cctgctttccaattggggtactcta

SEQ ID NO: 5698084 - DNA, 25 bp, Homo sapien
tgacttcctgctttccaattggggt

SEQ ID NO: 5698085 - DNA, 25 bp, Homo sapien
tccaattggggtactctatttcctc

SEQ ID NO: 5698086 - DNA, 25 bp, Homo sapien
cttcctgctttccaattggggtact

SEQ ID NO: 5698087 - DNA, 25 bp, Homo sapien
tagagtaccccaattggaaagcagg

SEQ ID NO: 5698088 - DNA, 25 bp, Homo sapien
taccccaattggaaagcaggaagtc

SEQ ID NO: 5698089 - DNA, 25 bp, Homo sapien
aatagagtaccccaattggaaagca

SEQ ID NO: 5698090 - DNA, 25 bp, Homo sapien
gagtaccccaattggaaagcaggaa

SEQ ID NO: 5698091 - DNA, 25 bp, Homo sapien
accccaattggaaagcaggaagtca

SEQ ID NO: 5698092 - DNA, 25 bp, Homo sapien
gaggaaatagagtaccccaattgga

SEQ ID NO: 5698093 - DNA, 25 bp, Homo sapien
gggacatttgacttcctgctttcca

SEQ ID NO: 5698094 - DNA, 25 bp, Homo sapien
tcatctgcaaatagggacatttgac

SEQ ID NO: 5698095 - DNA, 25 bp, Homo sapien
tatttcctccccttgcctaagtgct

SEQ ID NO: 5698096 - DNA, 25 bp, Homo sapien
ggtttttctatatagaagatcatgt

SEQ ID NO: 5698097 - DNA, 25 bp, Homo sapien
tccaattggggtactctatttcctc

SEQ ID NO: 5698098 - DNA, 25 bp, Homo sapien
tttgacttcctgctttccaattggg

SEQ ID NO: 5698099 - DNA, 25 bp, Homo sapien
aagtctggtagtggtatcaactacc

SEQ ID NO: 5698100 - DNA, 25 bp, Homo sapien
gaagtctggtagtggtatcaactac

SEQ ID NO: 5698101 - DNA, 25 bp, Homo sapien
ttgaagtctggtagtggtatcaact

SEQ ID NO: 5698102 - DNA, 25 bp, Homo sapien
agtctggtagtggtatcaactacca

SEQ ID NO: 5698103 - DNA, 25 bp, Homo sapien
tgaagtctggtagtggtatcaacta

SEQ ID NO: 5698104 - DNA, 25 bp, Homo sapien
ggtagttgataccactaccagactt

SEQ ID NO: 5698105 - DNA, 25 bp, Homo sapien
gtagttgataccactaccagacttc

SEQ ID NO: 5698106 - DNA, 25 bp, Homo sapien
agttgataccactaccagacttcaa

SEQ ID NO: 5698107 - DNA, 25 bp, Homo sapien
tagttgataccactaccagacttca

SEQ ID NO: 5698108 - DNA, 25 bp, Homo sapien
tggtagttgataccactaccagact

SEQ ID NO: 5698109 - DNA, 25 bp, Homo sapien
aagtctggtagtggtatcaactacc

SEQ ID NO: 5698110 - DNA, 25 bp, Homo sapien
tcagagtcttttgtggttccttaca

SEQ ID NO: 5698111 - DNA, 25 bp, Homo sapien
ttgaagtctggtagtggtatcaact

SEQ ID NO: 5698112 - DNA, 25 bp, Homo sapien
ggtatcaactaccagatttgttctt

SEQ ID NO: 5698113 - DNA, 25 bp, Homo sapien
ggattgctttagctattcagagtct

SEQ ID NO: 5698114 - DNA, 25 bp, Homo sapien
ttgtggttccttacaaatcttagga

SEQ ID NO: 5698115 - DNA, 25 bp, Homo sapien
gaacaaatctggtagttgataccac

SEQ ID NO: 5698116 - DNA, 25 bp, Homo sapien
agctaaagcaatcctgaacaaaaag

SEQ ID NO: 5698117 - DNA, 25 bp, Homo sapien
caaaagactctgaatagctaaagca

SEQ ID NO: 5698118 - DNA, 25 bp, Homo sapien
tagttgataccactaccagacttca

SEQ ID NO: 5698119 - DNA, 25 bp, Homo sapien
tgtaaggaaccacaaaagactctga

SEQ ID NO: 5698120 - DNA, 25 bp, Homo sapien
tcctaagatttgtaaggaaccacaa

SEQ ID NO: 5698121 - DNA, 25 bp, Homo sapien
ttgcctgtgttcatgagattattca

SEQ ID NO: 5698122 - DNA, 25 bp, Homo sapien
tgcctgtgttcatgagattattcat

SEQ ID NO: 5698123 - DNA, 25 bp, Homo sapien
gttgcctgtgttcatgagattattc

SEQ ID NO: 5698124 - DNA, 25 bp, Homo sapien
gaataatctcatgaacacaggcaac

SEQ ID NO: 5698125 - DNA, 25 bp, Homo sapien
tgaataatctcatgaacacaggcaa

SEQ ID NO: 5698126 - DNA, 25 bp, Homo sapien
atgaataatctcatgaacacaggca

SEQ ID NO: 5698127 - DNA, 25 bp, Homo sapien
gagattattcataaaatctttttcc

SEQ ID NO: 5698128 - DNA, 25 bp, Homo sapien
tgcctgtgttcatgagattattcat

SEQ ID NO: 5698129 - DNA, 25 bp, Homo sapien
ttgcctgtgttcatgagattattca

SEQ ID NO: 5698130 - DNA, 25 bp, Homo sapien
agtttgatgtaatcctgtttgttta

SEQ ID NO: 5698131 - DNA, 25 bp, Homo sapien
cctgtgttcatgagattattcataa

SEQ ID NO: 5698132 - DNA, 25 bp, Homo sapien
gttgcctgtgttcatgagattattc

SEQ ID NO: 5698133 - DNA, 25 bp, Homo sapien
gaataatctcatgaacacaggcaac

SEQ ID NO: 5698134 - DNA, 25 bp, Homo sapien
ggaaaaagattttatgaataatctc

SEQ ID NO: 5698135 - DNA, 25 bp, Homo sapien
taaacaaacaggattacatcaaact

SEQ ID NO: 5698136 - DNA, 25 bp, Homo sapien
tgaataatctcatgaacacaggcaa

SEQ ID NO: 5698137 - DNA, 25 bp, Homo sapien
ttatgaataatctcatgaacacagg

SEQ ID NO: 5698138 - DNA, 25 bp, Homo sapien
atgaataatctcatgaacacaggca

SEQ ID NO: 5698139 - DNA, 25 bp, Homo sapien
gaccgccatactgtcctccctagtg

SEQ ID NO: 5698140 - DNA, 25 bp, Homo sapien
tccctagtggctatactagtttgca

SEQ ID NO: 5698141 - DNA, 25 bp, Homo sapien
gggaccgccatactgtcctccctag

SEQ ID NO: 5698142 - DNA, 25 bp, Homo sapien
ttgagggaccgccatactgtcctcc

SEQ ID NO: 5698143 - DNA, 25 bp, Homo sapien
cctccctagtggctatactagtttg

SEQ ID NO: 5698144 - DNA, 25 bp, Homo sapien
ctccctagtggctatactagtttgc

SEQ ID NO: 5698145 - DNA, 25 bp, Homo sapien
tgcaaactagtatagccactaggga

SEQ ID NO: 5698146 - DNA, 25 bp, Homo sapien
gcaaactagtatagccactagggag

SEQ ID NO: 5698147 - DNA, 25 bp, Homo sapien
caaactagtatagccactagggagg

SEQ ID NO: 5698148 - DNA, 25 bp, Homo sapien
ctagggaggacagtatggcggtccc

SEQ ID NO: 5698149 - DNA, 25 bp, Homo sapien
cactagggaggacagtatggcggtc

SEQ ID NO: 5698150 - DNA, 25 bp, Homo sapien
ggaggacagtatggcggtccctcaa

SEQ ID NO: 5698151 - DNA, 25 bp, Homo sapien
catcccttacagaggatttctcagc

SEQ ID NO: 5698152 - DNA, 25 bp, Homo sapien
ccccatcccttacagaggatttctc

SEQ ID NO: 5698153 - DNA, 25 bp, Homo sapien
ctcagcctctagtatcctctattct

SEQ ID NO: 5698154 - DNA, 25 bp, Homo sapien
tctcagcctctagtatcctctattc

SEQ ID NO: 5698155 - DNA, 25 bp, Homo sapien
cccatcccttacagaggatttctca

SEQ ID NO: 5698156 - DNA, 25 bp, Homo sapien
ccatcccttacagaggatttctcag

SEQ ID NO: 5698157 - DNA, 25 bp, Homo sapien
ctgagaaatcctctgtaagggatgg

SEQ ID NO: 5698158 - DNA, 25 bp, Homo sapien
gaatagaggatactagaggctgaga

SEQ ID NO: 5698159 - DNA, 25 bp, Homo sapien
tgagaaatcctctgtaagggatggg

SEQ ID NO: 5698160 - DNA, 25 bp, Homo sapien
gctgagaaatcctctgtaagggatg

SEQ ID NO: 5698161 - DNA, 25 bp, Homo sapien
gagaaatcctctgtaagggatgggg

SEQ ID NO: 5698162 - DNA, 25 bp, Homo sapien
agaatagaggatactagaggctgag

SEQ ID NO: 5698163 - DNA, 25 bp, Homo sapien
tcagcctctagtatcctctattcta

SEQ ID NO: 5698164 - DNA, 25 bp, Homo sapien
catcccttacagaggatttctcagc

SEQ ID NO: 5698165 - DNA, 25 bp, Homo sapien
gatcagcttttttagcttctacata

SEQ ID NO: 5698166 - DNA, 25 bp, Homo sapien
tctcagcctctagtatcctctattc

SEQ ID NO: 5698167 - DNA, 25 bp, Homo sapien
tcccttacagaggatttctcagcct

SEQ ID NO: 5698168 - DNA, 25 bp, Homo sapien
cccatcccttacagaggatttctca

SEQ ID NO: 5698169 - DNA, 25 bp, Homo sapien
attgttagccatagtaattttacag

SEQ ID NO: 5698170 - DNA, 25 bp, Homo sapien
ccatagtaattttacagtggtatag

SEQ ID NO: 5698171 - DNA, 25 bp, Homo sapien
gccatagtaattttacagtggtata

SEQ ID NO: 5698172 - DNA, 25 bp, Homo sapien
gttagccatagtaattttacagtgg

SEQ ID NO: 5698173 - DNA, 25 bp, Homo sapien
tagccatagtaattttacagtggta

SEQ ID NO: 5698174 - DNA, 25 bp, Homo sapien
tgttagccatagtaattttacagtg

SEQ ID NO: 5698175 - DNA, 25 bp, Homo sapien
ccactgtaaaattactatggctaac

SEQ ID NO: 5698176 - DNA, 25 bp, Homo sapien
cactgtaaaattactatggctaaca

SEQ ID NO: 5698177 - DNA, 25 bp, Homo sapien
tataccactgtaaaattactatggc

SEQ ID NO: 5698178 - DNA, 25 bp, Homo sapien
ctgtaaaattactatggctaacaat

SEQ ID NO: 5698179 - DNA, 25 bp, Homo sapien
taccactgtaaaattactatggcta

SEQ ID NO: 5698180 - DNA, 25 bp, Homo sapien
ctataccactgtaaaattactatgg

SEQ ID NO: 5698181 - DNA, 25 bp, Homo sapien
atttagtatcctccttctagctatt

SEQ ID NO: 5698182 - DNA, 25 bp, Homo sapien
ccatagtaattttacagtggtatag

SEQ ID NO: 5698183 - DNA, 25 bp, Homo sapien
agaacttattcctctgtctatccat

SEQ ID NO: 5698184 - DNA, 25 bp, Homo sapien
ttacagtggtatagaacaatagaac

SEQ ID NO: 5698185 - DNA, 25 bp, Homo sapien
tgttagccatagtaattttacagtg

SEQ ID NO: 5698186 - DNA, 25 bp, Homo sapien
tagaacaatagaacttattcctctg

SEQ ID NO: 5698187 - DNA, 25 bp, Homo sapien
cactgtaaaattactatggctaaca

SEQ ID NO: 5698188 - DNA, 25 bp, Homo sapien
atggatagacagaggaataagttct

SEQ ID NO: 5698189 - DNA, 25 bp, Homo sapien
aatagctagaaggaggatactaaat

SEQ ID NO: 5698190 - DNA, 25 bp, Homo sapien
tataccactgtaaaattactatggc

SEQ ID NO: 5698191 - DNA, 25 bp, Homo sapien
gttctattgttctataccactgtaa

SEQ ID NO: 5698192 - DNA, 25 bp, Homo sapien
tatggctaacaatatatagtttcaa

SEQ ID NO: 5698193 - DNA, 25 bp, Homo sapien
taaagaatgagtgggtaaagcaagt

SEQ ID NO: 5698194 - DNA, 25 bp, Homo sapien
aaagaatgagtgggtaaagcaagta

SEQ ID NO: 5698195 - DNA, 25 bp, Homo sapien
gggtaaagcaagtagctgtatattt

SEQ ID NO: 5698196 - DNA, 25 bp, Homo sapien
gtaaagaatgagtgggtaaagcaag

SEQ ID NO: 5698197 - DNA, 25 bp, Homo sapien
ggtaaagcaagtagctgtatatttg

SEQ ID NO: 5698198 - DNA, 25 bp, Homo sapien
tgggtaaagcaagtagctgtatatt

SEQ ID NO: 5698199 - DNA, 25 bp, Homo sapien
acttgctttacccactcattcttta

SEQ ID NO: 5698200 - DNA, 25 bp, Homo sapien
aaatatacagctacttgctttaccc

SEQ ID NO: 5698201 - DNA, 25 bp, Homo sapien
cttgctttacccactcattctttac

SEQ ID NO: 5698202 - DNA, 25 bp, Homo sapien
aatatacagctacttgctttaccca

SEQ ID NO: 5698203 - DNA, 25 bp, Homo sapien
caaatatacagctacttgctttacc

SEQ ID NO: 5698204 - DNA, 25 bp, Homo sapien
tacttgctttacccactcattcttt

SEQ ID NO: 5698205 - DNA, 25 bp, Homo sapien
acttgctttacccactcattcttta

SEQ ID NO: 5698206 - DNA, 25 bp, Homo sapien
cactcattctttactgagatgccaa

SEQ ID NO: 5698207 - DNA, 25 bp, Homo sapien
ccttgcaagttccaaacaaatatac

SEQ ID NO: 5698208 - DNA, 25 bp, Homo sapien
caaatatacagctacttgctttacc

SEQ ID NO: 5698209 - DNA, 25 bp, Homo sapien
gagatgccaaaaatctaggcaaagc

SEQ ID NO: 5698210 - DNA, 25 bp, Homo sapien
ctgttcatccttgcaagttccaaac

SEQ ID NO: 5698211 - DNA, 25 bp, Homo sapien
caagtggccgtgttaatcagtgttc

SEQ ID NO: 5698212 - DNA, 25 bp, Homo sapien
catgagttttttaaggctgccaagt

SEQ ID NO: 5698213 - DNA, 25 bp, Homo sapien
aaccatgagttttttaaggctgcca

SEQ ID NO: 5698214 - DNA, 25 bp, Homo sapien
ccatgagttttttaaggctgccaag

SEQ ID NO: 5698215 - DNA, 25 bp, Homo sapien
gtggccgtgttaatcagtgttcaaa

SEQ ID NO: 5698216 - DNA, 25 bp, Homo sapien
tgccaagtggccgtgttaatcagtg

SEQ ID NO: 5698217 - DNA, 25 bp, Homo sapien
acttggcagccttaaaaaactcatg

SEQ ID NO: 5698218 - DNA, 25 bp, Homo sapien
cactgattaacacggccacttggca

SEQ ID NO: 5698219 - DNA, 25 bp, Homo sapien
cttggcagccttaaaaaactcatgg

SEQ ID NO: 5698220 - DNA, 25 bp, Homo sapien
tggcagccttaaaaaactcatggtt

SEQ ID NO: 5698221 - DNA, 25 bp, Homo sapien
gaacactgattaacacggccacttg

SEQ ID NO: 5698222 - DNA, 25 bp, Homo sapien
tttgaacactgattaacacggccac

SEQ ID NO: 5698223 - DNA, 25 bp, Homo sapien
agatctttggtggagcattgtcaga

SEQ ID NO: 5698224 - DNA, 25 bp, Homo sapien
gagatctttggtggagcattgtcag

SEQ ID NO: 5698225 - DNA, 25 bp, Homo sapien
ttttacaaactgcaagttgttgcac

SEQ ID NO: 5698226 - DNA, 25 bp, Homo sapien
gccagagatctttggtggagcattg

SEQ ID NO: 5698227 - DNA, 25 bp, Homo sapien
cagagatctttggtggagcattgtc

SEQ ID NO: 5698228 - DNA, 25 bp, Homo sapien
ggagcattgtcagaagaattttaca

SEQ ID NO: 5698229 - DNA, 25 bp, Homo sapien
tgacaatgctccaccaaagatctct

SEQ ID NO: 5698230 - DNA, 25 bp, Homo sapien
gtgcaacaacttgcagtttgtaaaa

SEQ ID NO: 5698231 - DNA, 25 bp, Homo sapien
tctgacaatgctccaccaaagatct

SEQ ID NO: 5698232 - DNA, 25 bp, Homo sapien
tgtaaaattcttctgacaatgctcc

SEQ ID NO: 5698233 - DNA, 25 bp, Homo sapien
aatgctccaccaaagatctctggct

SEQ ID NO: 5698234 - DNA, 25 bp, Homo sapien
gacaatgctccaccaaagatctctg

SEQ ID NO: 5698235 - DNA, 25 bp, Homo sapien
tcttcttaaatttgatcttttagta

SEQ ID NO: 5698236 - DNA, 25 bp, Homo sapien
cacttcttgatcttactatctagtc

SEQ ID NO: 5698237 - DNA, 25 bp, Homo sapien
cccacttcttgatcttactatctag

SEQ ID NO: 5698238 - DNA, 25 bp, Homo sapien
gtagcccacttcttgatcttactat

SEQ ID NO: 5698239 - DNA, 25 bp, Homo sapien
gcccacttcttgatcttactatcta

SEQ ID NO: 5698240 - DNA, 25 bp, Homo sapien
tagcccacttcttgatcttactatc

SEQ ID NO: 5698241 - DNA, 25 bp, Homo sapien
atagtaagatcaagaagtgggctac

SEQ ID NO: 5698242 - DNA, 25 bp, Homo sapien
gatagtaagatcaagaagtgggcta

SEQ ID NO: 5698243 - DNA, 25 bp, Homo sapien
tagatagtaagatcaagaagtgggc

SEQ ID NO: 5698244 - DNA, 25 bp, Homo sapien
ctagatagtaagatcaagaagtggg

SEQ ID NO: 5698245 - DNA, 25 bp, Homo sapien
tactaaaagatcaaatttaagaaga

SEQ ID NO: 5698246 - DNA, 25 bp, Homo sapien
gactagatagtaagatcaagaagtg

SEQ ID NO: 5698247 - DNA, 25 bp, Homo sapien
cacttcttgatcttactatctagtc

SEQ ID NO: 5698248 - DNA, 25 bp, Homo sapien
ttttattggctctctgtagcccact

SEQ ID NO: 5698249 - DNA, 25 bp, Homo sapien
gtagcccacttcttgatcttactat

SEQ ID NO: 5698250 - DNA, 25 bp, Homo sapien
caaaagttggacaattttattggct

SEQ ID NO: 5698251 - DNA, 25 bp, Homo sapien
gcccacttcttgatcttactatcta

SEQ ID NO: 5698252 - DNA, 25 bp, Homo sapien
ccctgtcttcttaaatttgatcttt

SEQ ID NO: 5698253 - DNA, 25 bp, Homo sapien
tatactttcggagaatgacctaagg

SEQ ID NO: 5698254 - DNA, 25 bp, Homo sapien
attgtttagacagtctcattttcag

SEQ ID NO: 5698255 - DNA, 25 bp, Homo sapien
tactttcggagaatgacctaaggca

SEQ ID NO: 5698256 - DNA, 25 bp, Homo sapien
caaatatactttcggagaatgacct

SEQ ID NO: 5698257 - DNA, 25 bp, Homo sapien
taccaaatatactttcggagaatga

SEQ ID NO: 5698258 - DNA, 25 bp, Homo sapien
tttcggagaatgacctaaggcaagg

SEQ ID NO: 5698259 - DNA, 25 bp, Homo sapien
ccttgccttaggtcattctccgaaa

SEQ ID NO: 5698260 - DNA, 25 bp, Homo sapien
gccttaggtcattctccgaaagtat

SEQ ID NO: 5698261 - DNA, 25 bp, Homo sapien
ttgccttaggtcattctccgaaagt

SEQ ID NO: 5698262 - DNA, 25 bp, Homo sapien
ctgaaaatgagactgtctaaacaat

SEQ ID NO: 5698263 - DNA, 25 bp, Homo sapien
tcattctccgaaagtatatttggta

SEQ ID NO: 5698264 - DNA, 25 bp, Homo sapien
ggtcattctccgaaagtatatttgg

SEQ ID NO: 5698265 - DNA, 25 bp, Homo sapien
caaaatagggctctactgattaaaa

SEQ ID NO: 5698266 - DNA, 25 bp, Homo sapien
acaaaatagggctctactgattaaa

SEQ ID NO: 5698267 - DNA, 25 bp, Homo sapien
ataaaatcgataatctaaagtcagc

SEQ ID NO: 5698268 - DNA, 25 bp, Homo sapien
catacataaaatcgataatctaaag

SEQ ID NO: 5698269 - DNA, 25 bp, Homo sapien
cataaaatcgataatctaaagtcag

SEQ ID NO: 5698270 - DNA, 25 bp, Homo sapien
tacaaaatagggctctactgattaa

SEQ ID NO: 5698271 - DNA, 25 bp, Homo sapien
ttttaatcagtagagccctattttg

SEQ ID NO: 5698272 - DNA, 25 bp, Homo sapien
gactttagattatcgattttatgta

SEQ ID NO: 5698273 - DNA, 25 bp, Homo sapien
tttaatcagtagagccctattttgt

SEQ ID NO: 5698274 - DNA, 25 bp, Homo sapien
ttaatcagtagagccctattttgta

SEQ ID NO: 5698275 - DNA, 25 bp, Homo sapien
gctgactttagattatcgattttat

SEQ ID NO: 5698276 - DNA, 25 bp, Homo sapien
ctgactttagattatcgattttatg

SEQ ID NO: 5698277 - DNA, 25 bp, Homo sapien
ttttaatcagtagagccctattttg

SEQ ID NO: 5698278 - DNA, 25 bp, Homo sapien
ttaatcagtagagccctattttgta

SEQ ID NO: 5698279 - DNA, 25 bp, Homo sapien
ttgtttttaatcagtagagccctat

SEQ ID NO: 5698280 - DNA, 25 bp, Homo sapien
tttaatcagtagagccctattttgt

SEQ ID NO: 5698281 - DNA, 25 bp, Homo sapien
gctgactttagattatcgattttat

SEQ ID NO: 5698282 - DNA, 25 bp, Homo sapien
gattatcgattttatgtatgtagta

SEQ ID NO: 5698283 - DNA, 25 bp, Homo sapien
tcccttatacactaccaaccatttg

SEQ ID NO: 5698284 - DNA, 25 bp, Homo sapien
ccttatacactaccaaccatttgtt

SEQ ID NO: 5698285 - DNA, 25 bp, Homo sapien
ttgtcccttatacactaccaaccat

SEQ ID NO: 5698286 - DNA, 25 bp, Homo sapien
acagatggcccaggtgaaaccctga

SEQ ID NO: 5698287 - DNA, 25 bp, Homo sapien
tatcagtgaggtcctgtgaacagat

SEQ ID NO: 5698288 - DNA, 25 bp, Homo sapien
atcagtgaggtcctgtgaacagatg

SEQ ID NO: 5698289 - DNA, 25 bp, Homo sapien
aacaaatggttggtagtgtataagg

SEQ ID NO: 5698290 - DNA, 25 bp, Homo sapien
catctgttcacaggacctcactgat

SEQ ID NO: 5698291 - DNA, 25 bp, Homo sapien
caaatggttggtagtgtataaggga

SEQ ID NO: 5698292 - DNA, 25 bp, Homo sapien
tcagggtttcacctgggccatctgt

SEQ ID NO: 5698293 - DNA, 25 bp, Homo sapien
atctgttcacaggacctcactgata

SEQ ID NO: 5698294 - DNA, 25 bp, Homo sapien
aatggttggtagtgtataagggaca

SEQ ID NO: 5698295 - DNA, 25 bp, Homo sapien
gaccaaagcttatccccacactctg

SEQ ID NO: 5698296 - DNA, 25 bp, Homo sapien
tgaccaaagcttatccccacactct

SEQ ID NO: 5698297 - DNA, 25 bp, Homo sapien
cagtgaccaaagcttatccccacac

SEQ ID NO: 5698298 - DNA, 25 bp, Homo sapien
gtgaccaaagcttatccccacactc

SEQ ID NO: 5698299 - DNA, 25 bp, Homo sapien
agtgaccaaagcttatccccacact

SEQ ID NO: 5698300 - DNA, 25 bp, Homo sapien
gcagtgaccaaagcttatccccaca

SEQ ID NO: 5698301 - DNA, 25 bp, Homo sapien
agtgtggggataagctttggtcact

SEQ ID NO: 5698302 - DNA, 25 bp, Homo sapien
gagtgtggggataagctttggtcac

SEQ ID NO: 5698303 - DNA, 25 bp, Homo sapien
cagagtgtggggataagctttggtc

SEQ ID NO: 5698304 - DNA, 25 bp, Homo sapien
gtgtggggataagctttggtcactg

SEQ ID NO: 5698305 - DNA, 25 bp, Homo sapien
tgtggggataagctttggtcactgc

SEQ ID NO: 5698306 - DNA, 25 bp, Homo sapien
agagtgtggggataagctttggtca

SEQ ID NO: 5698307 - DNA, 25 bp, Homo sapien
tcaggtcttagtcatttccagcagt

SEQ ID NO: 5698308 - DNA, 25 bp, Homo sapien
tagtcatttccagcagtgaccaaag

SEQ ID NO: 5698309 - DNA, 25 bp, Homo sapien
agtgaccaaagcttatccccacact

SEQ ID NO: 5698310 - DNA, 25 bp, Homo sapien
gcagtgaccaaagcttatccccaca

SEQ ID NO: 5698311 - DNA, 25 bp, Homo sapien
taggaaaggatttcaggtcttagtc

SEQ ID NO: 5698312 - DNA, 25 bp, Homo sapien
ttagggaatgggaaagaatatgtag

SEQ ID NO: 5698313 - DNA, 25 bp, Homo sapien
tacatattctttcccattccctaaa

SEQ ID NO: 5698314 - DNA, 25 bp, Homo sapien
tgtggggataagctttggtcactgc

SEQ ID NO: 5698315 - DNA, 25 bp, Homo sapien
gggataagctttggtcactgctgga

SEQ ID NO: 5698316 - DNA, 25 bp, Homo sapien
taagctttggtcactgctggaaatg

SEQ ID NO: 5698317 - DNA, 25 bp, Homo sapien
tcactgctggaaatgactaagacct

SEQ ID NO: 5698318 - DNA, 25 bp, Homo sapien
gactaagacctgaaatcctttccta

SEQ ID NO: 5698319 - DNA, 25 bp, Homo sapien
gatagataggaattctaggtaaagt

SEQ ID NO: 5698320 - DNA, 25 bp, Homo sapien
ttcccttaccaccaaagagccctgc

SEQ ID NO: 5698321 - DNA, 25 bp, Homo sapien
cctgcaataggagggttaatactag

SEQ ID NO: 5698322 - DNA, 25 bp, Homo sapien
tatttgatagataggaattctaggt

SEQ ID NO: 5698323 - DNA, 25 bp, Homo sapien
ttttatttgaaaaggtgccatcact

SEQ ID NO: 5698324 - DNA, 25 bp, Homo sapien
aagagccctgcaataggagggttaa

SEQ ID NO: 5698325 - DNA, 25 bp, Homo sapien
agtgatggcaccttttcaaataaaa

SEQ ID NO: 5698326 - DNA, 25 bp, Homo sapien
ctagtattaaccctcctattgcagg

SEQ ID NO: 5698327 - DNA, 25 bp, Homo sapien
tattaaccctcctattgcagggctc

SEQ ID NO: 5698328 - DNA, 25 bp, Homo sapien
gcagggctctttggtggtaagggaa

SEQ ID NO: 5698329 - DNA, 25 bp, Homo sapien
aactttacctagaattcctatctat

SEQ ID NO: 5698330 - DNA, 25 bp, Homo sapien
tacctagaattcctatctatcaaat

SEQ ID NO: 5698331 - DNA, 25 bp, Homo sapien
tcctgcatcagcctcctgagtagct

SEQ ID NO: 5698332 - DNA, 25 bp, Homo sapien
aggcatgcatcaccatgcctggcta

SEQ ID NO: 5698333 - DNA, 25 bp, Homo sapien
gcatcagcctcctgagtagctggga

SEQ ID NO: 5698334 - DNA, 25 bp, Homo sapien
atgcatcaccatgcctggctaattt

SEQ ID NO: 5698335 - DNA, 25 bp, Homo sapien
ttacaggcatgcatcaccatgcctg

SEQ ID NO: 5698336 - DNA, 25 bp, Homo sapien
ggcatgcatcaccatgcctggctaa

SEQ ID NO: 5698337 - DNA, 25 bp, Homo sapien
caggcatggtgatgcatgcctgtaa

SEQ ID NO: 5698338 - DNA, 25 bp, Homo sapien
aaaattagccaggcatggtgatgca

SEQ ID NO: 5698339 - DNA, 25 bp, Homo sapien
tagccaggcatggtgatgcatgcct

SEQ ID NO: 5698340 - DNA, 25 bp, Homo sapien
ttagccaggcatggtgatgcatgcc

SEQ ID NO: 5698341 - DNA, 25 bp, Homo sapien
tcccagctactcaggaggctgatgc

SEQ ID NO: 5698342 - DNA, 25 bp, Homo sapien
aaattagccaggcatggtgatgcat

SEQ ID NO: 5698343 - DNA, 25 bp, Homo sapien
agacggggtttcatcgtgttagcca

SEQ ID NO: 5698344 - DNA, 25 bp, Homo sapien
gagacggggtttcatcgtgttagcc

SEQ ID NO: 5698345 - DNA, 25 bp, Homo sapien
gacggggtttcatcgtgttagccag

SEQ ID NO: 5698346 - DNA, 25 bp, Homo sapien
acggggtttcatcgtgttagccagg

SEQ ID NO: 5698347 - DNA, 25 bp, Homo sapien
catcgtgttagccaggatggtctcg

SEQ ID NO: 5698348 - DNA, 25 bp, Homo sapien
cggggtttcatcgtgttagccagga

SEQ ID NO: 5698349 - DNA, 25 bp, Homo sapien
atcctggctaacacgatgaaacccc

SEQ ID NO: 5698350 - DNA, 25 bp, Homo sapien
tcctggctaacacgatgaaaccccg

SEQ ID NO: 5698351 - DNA, 25 bp, Homo sapien
ggctaacacgatgaaaccccgtctc

SEQ ID NO: 5698352 - DNA, 25 bp, Homo sapien
cctggctaacacgatgaaaccccgt

SEQ ID NO: 5698353 - DNA, 25 bp, Homo sapien
tggctaacacgatgaaaccccgtct

SEQ ID NO: 5698354 - DNA, 25 bp, Homo sapien
ctggctaacacgatgaaaccccgtc

SEQ ID NO: 5698355 - DNA, 25 bp, Homo sapien
tgcttcaggatactcaccaaggaag

SEQ ID NO: 5698356 - DNA, 25 bp, Homo sapien
ctgcttcaggatactcaccaaggaa

SEQ ID NO: 5698357 - DNA, 25 bp, Homo sapien
ttccttggtgagtatcctgaagcag

SEQ ID NO: 5698358 - DNA, 25 bp, Homo sapien
cttccttggtgagtatcctgaagca

SEQ ID NO: 5698359 - DNA, 25 bp, Homo sapien
ctgcttcaggatactcaccaaggaa

SEQ ID NO: 5698360 - DNA, 25 bp, Homo sapien
actttattctgtgaagctgcttcag

SEQ ID NO: 5698361 - DNA, 25 bp, Homo sapien
ctgatgtagtggttttcaaacttta

SEQ ID NO: 5698362 - DNA, 25 bp, Homo sapien
ccaaggaagaccagtgtgcaatgct

SEQ ID NO: 5698363 - DNA, 25 bp, Homo sapien
gatactcaccaaggaagaccagtgt

SEQ ID NO: 5698364 - DNA, 25 bp, Homo sapien
gaagaccagtgtgcaatgctttttt

SEQ ID NO: 5698365 - DNA, 25 bp, Homo sapien
gcagcttcacagaataaagtttgaa

SEQ ID NO: 5698366 - DNA, 25 bp, Homo sapien
aaaaaagcattgcacactggtcttc

SEQ ID NO: 5698367 - DNA, 25 bp, Homo sapien
cctgaagcagcttcacagaataaag

SEQ ID NO: 5698368 - DNA, 25 bp, Homo sapien
ttccttggtgagtatcctgaagcag

SEQ ID NO: 5698369 - DNA, 25 bp, Homo sapien
cactggtcttccttggtgagtatcc

SEQ ID NO: 5698370 - DNA, 25 bp, Homo sapien
taaagtttgaaaaccactacatcag

SEQ ID NO: 5698371 - DNA, 25 bp, Homo sapien
cgcccgtcaccatgcctggctactt

SEQ ID NO: 5698372 - DNA, 25 bp, Homo sapien
caccatgcctggctacttttttgta

SEQ ID NO: 5698373 - DNA, 25 bp, Homo sapien
gtcaccatgcctggctacttttttg

SEQ ID NO: 5698374 - DNA, 25 bp, Homo sapien
cgtcaccatgcctggctactttttt

SEQ ID NO: 5698375 - DNA, 25 bp, Homo sapien
tcaccatgcctggctacttttttgt

SEQ ID NO: 5698376 - DNA, 25 bp, Homo sapien
gcccgtcaccatgcctggctacttt

SEQ ID NO: 5698377 - DNA, 25 bp, Homo sapien
aaagtagccaggcatggtgacgggc

SEQ ID NO: 5698378 - DNA, 25 bp, Homo sapien
tacaaaaaagtagccaggcatggtg

SEQ ID NO: 5698379 - DNA, 25 bp, Homo sapien
aagtagccaggcatggtgacgggcg

SEQ ID NO: 5698380 - DNA, 25 bp, Homo sapien
acaaaaaagtagccaggcatggtga

SEQ ID NO: 5698381 - DNA, 25 bp, Homo sapien
aaaaaagtagccaggcatggtgacg

SEQ ID NO: 5698382 - DNA, 25 bp, Homo sapien
caaaaaagtagccaggcatggtgac

SEQ ID NO: 5698383 - DNA, 25 bp, Homo sapien
tgcaggggcacgatctcggctcact

SEQ ID NO: 5698384 - DNA, 25 bp, Homo sapien
aagctccacctcccgggttcatgcc

SEQ ID NO: 5698385 - DNA, 25 bp, Homo sapien
cacctcccgggttcatgccattctc

SEQ ID NO: 5698386 - DNA, 25 bp, Homo sapien
acctcccgggttcatgccattctcc

SEQ ID NO: 5698387 - DNA, 25 bp, Homo sapien
gtgcaggggcacgatctcggctcac

SEQ ID NO: 5698388 - DNA, 25 bp, Homo sapien
agctccacctcccgggttcatgcca

SEQ ID NO: 5698389 - DNA, 25 bp, Homo sapien
agtgagccgagatcgtgcccctgca

SEQ ID NO: 5698390 - DNA, 25 bp, Homo sapien
gagaatggcatgaacccgggaggtg

SEQ ID NO: 5698391 - DNA, 25 bp, Homo sapien
tggcatgaacccgggaggtggagct

SEQ ID NO: 5698392 - DNA, 25 bp, Homo sapien
gtgagccgagatcgtgcccctgcac

SEQ ID NO: 5698393 - DNA, 25 bp, Homo sapien
ggcatgaacccgggaggtggagctt

SEQ ID NO: 5698394 - DNA, 25 bp, Homo sapien
ggagaatggcatgaacccgggaggt

SEQ ID NO: 5698395 - DNA, 25 bp, Homo sapien
ttgactaatgtcagaggatgatgag

SEQ ID NO: 5698396 - DNA, 25 bp, Homo sapien
caaattctccttacagtttgactaa

SEQ ID NO: 5698397 - DNA, 25 bp, Homo sapien
aatgtcagaggatgatgagttatgg

SEQ ID NO: 5698398 - DNA, 25 bp, Homo sapien
ctccttacagtttgactaatgtcag

SEQ ID NO: 5698399 - DNA, 25 bp, Homo sapien
aaggcttcctttctcaaattctcct

SEQ ID NO: 5698400 - DNA, 25 bp, Homo sapien
tacagtttgactaatgtcagaggat

SEQ ID NO: 5698401 - DNA, 25 bp, Homo sapien
gaaatagccccataactcatcatcc

SEQ ID NO: 5698402 - DNA, 25 bp, Homo sapien
ctcatcatcctctgacattagtcaa

SEQ ID NO: 5698403 - DNA, 25 bp, Homo sapien
cctctgacattagtcaaactgtaag

SEQ ID NO: 5698404 - DNA, 25 bp, Homo sapien
agaaaagaaatagccccataactca

SEQ ID NO: 5698405 - DNA, 25 bp, Homo sapien
gacattagtcaaactgtaaggagaa

SEQ ID NO: 5698406 - DNA, 25 bp, Homo sapien
taaggagaatttgagaaaggaagcc

SEQ ID NO: 5698407 - DNA, 25 bp, Homo sapien
atagcttgaacccagaaggtggagg

SEQ ID NO: 5698408 - DNA, 25 bp, Homo sapien
gagaatagcttgaacccagaaggtg

SEQ ID NO: 5698409 - DNA, 25 bp, Homo sapien
tagcttgaacccagaaggtggaggt

SEQ ID NO: 5698410 - DNA, 25 bp, Homo sapien
gaatagcttgaacccagaaggtgga

SEQ ID NO: 5698411 - DNA, 25 bp, Homo sapien
ggagaatagcttgaacccagaaggt

SEQ ID NO: 5698412 - DNA, 25 bp, Homo sapien
agcttgaacccagaaggtggaggtt

SEQ ID NO: 5698413 - DNA, 25 bp, Homo sapien
tccaccttctgggttcaagctattc

SEQ ID NO: 5698414 - DNA, 25 bp, Homo sapien
caccttctgggttcaagctattctc

SEQ ID NO: 5698415 - DNA, 25 bp, Homo sapien
accttctgggttcaagctattctcc

SEQ ID NO: 5698416 - DNA, 25 bp, Homo sapien
cctccaccttctgggttcaagctat

SEQ ID NO: 5698417 - DNA, 25 bp, Homo sapien
aacctccaccttctgggttcaagct

SEQ ID NO: 5698418 - DNA, 25 bp, Homo sapien
acctccaccttctgggttcaagcta

SEQ ID NO: 5698419 - DNA, 25 bp, Homo sapien
ttagccagatgtggtggcacacacc

SEQ ID NO: 5698420 - DNA, 25 bp, Homo sapien
tagccagatgtggtggcacacacct

SEQ ID NO: 5698421 - DNA, 25 bp, Homo sapien
agccagatgtggtggcacacacctg

SEQ ID NO: 5698422 - DNA, 25 bp, Homo sapien
attagccagatgtggtggcacacac

SEQ ID NO: 5698423 - DNA, 25 bp, Homo sapien
gccagatgtggtggcacacacctgt

SEQ ID NO: 5698424 - DNA, 25 bp, Homo sapien
cagatgtggtggcacacacctgtaa

SEQ ID NO: 5698425 - DNA, 25 bp, Homo sapien
ttacaggtgtgtgccaccacatctg

SEQ ID NO: 5698426 - DNA, 25 bp, Homo sapien
gtgtgtgccaccacatctggctaat

SEQ ID NO: 5698427 - DNA, 25 bp, Homo sapien
aggtgtgtgccaccacatctggcta

SEQ ID NO: 5698428 - DNA, 25 bp, Homo sapien
acaggtgtgtgccaccacatctggc

SEQ ID NO: 5698429 - DNA, 25 bp, Homo sapien
ggtgtgtgccaccacatctggctaa

SEQ ID NO: 5698430 - DNA, 25 bp, Homo sapien
caggtgtgtgccaccacatctggct

SEQ ID NO: 5698431 - DNA, 25 bp, Homo sapien
attagtggactaatgtacaagtgta

SEQ ID NO: 5698432 - DNA, 25 bp, Homo sapien
tcttctttattaattagtggactaa

SEQ ID NO: 5698433 - DNA, 25 bp, Homo sapien
catggtgtcttctttattaattagt

SEQ ID NO: 5698434 - DNA, 25 bp, Homo sapien
taattagtggactaatgtacaagtg

SEQ ID NO: 5698435 - DNA, 25 bp, Homo sapien
ttagtggactaatgtacaagtgtat

SEQ ID NO: 5698436 - DNA, 25 bp, Homo sapien
ggtgtcttctttattaattagtgga

SEQ ID NO: 5698437 - DNA, 25 bp, Homo sapien
tccactaattaataaagaagacacc

SEQ ID NO: 5698438 - DNA, 25 bp, Homo sapien
tagtccactaattaataaagaagac

SEQ ID NO: 5698439 - DNA, 25 bp, Homo sapien
atacacttgtacattagtccactaa

SEQ ID NO: 5698440 - DNA, 25 bp, Homo sapien
attagtccactaattaataaagaag

SEQ ID NO: 5698441 - DNA, 25 bp, Homo sapien
tacacttgtacattagtccactaat

SEQ ID NO: 5698442 - DNA, 25 bp, Homo sapien
actaattaataaagaagacaccatg

SEQ ID NO: 5698443 - DNA, 25 bp, Homo sapien
caagtgtatttgtgcatttagggaa

SEQ ID NO: 5698444 - DNA, 25 bp, Homo sapien
tcttctttattaattagtggactaa

SEQ ID NO: 5698445 - DNA, 25 bp, Homo sapien
tgttcagttttgttaaaatgtcgaa

SEQ ID NO: 5698446 - DNA, 25 bp, Homo sapien
tgtgcatttagggaaacatgaaatg

SEQ ID NO: 5698447 - DNA, 25 bp, Homo sapien
catggtgtcttctttattaattagt

SEQ ID NO: 5698448 - DNA, 25 bp, Homo sapien
ttagtggactaatgtacaagtgtat

SEQ ID NO: 5698449 - DNA, 25 bp, Homo sapien
gtgtttttatgctgcgattgctgtt

SEQ ID NO: 5698450 - DNA, 25 bp, Homo sapien
atgctgcgattgctgtttggtcaaa

SEQ ID NO: 5698451 - DNA, 25 bp, Homo sapien
tatgctgcgattgctgtttggtcaa

SEQ ID NO: 5698452 - DNA, 25 bp, Homo sapien
tttatgctgcgattgctgtttggtc

SEQ ID NO: 5698453 - DNA, 25 bp, Homo sapien
ttatgctgcgattgctgtttggtca

SEQ ID NO: 5698454 - DNA, 25 bp, Homo sapien
tttttatgctgcgattgctgtttgg

SEQ ID NO: 5698455 - DNA, 25 bp, Homo sapien
tgaccaaacagcaatcgcagcataa

SEQ ID NO: 5698456 - DNA, 25 bp, Homo sapien
gaccaaacagcaatcgcagcataaa

SEQ ID NO: 5698457 - DNA, 25 bp, Homo sapien
ttgaccaaacagcaatcgcagcata

SEQ ID NO: 5698458 - DNA, 25 bp, Homo sapien
tttgaccaaacagcaatcgcagcat

SEQ ID NO: 5698459 - DNA, 25 bp, Homo sapien
aacagcaatcgcagcataaaaacac

SEQ ID NO: 5698460 - DNA, 25 bp, Homo sapien
ccaaacagcaatcgcagcataaaaa

SEQ ID NO: 5698461 - DNA, 25 bp, Homo sapien
ttccagtaggtccaatctctgctcc

SEQ ID NO: 5698462 - DNA, 25 bp, Homo sapien
ggagcagagattggacctactggaa

SEQ ID NO: 5698463 - DNA, 25 bp, Homo sapien
tgagcttttccagtaggtccaatct

SEQ ID NO: 5698464 - DNA, 25 bp, Homo sapien
tagattcttagttctaaaatatgaa

SEQ ID NO: 5698465 - DNA, 25 bp, Homo sapien
tctgcctgagcttttccagtaggtc

SEQ ID NO: 5698466 - DNA, 25 bp, Homo sapien
tctccttatcaaaatagattcttag

SEQ ID NO: 5698467 - DNA, 25 bp, Homo sapien
ttccagtaggtccaatctctgctcc

SEQ ID NO: 5698468 - DNA, 25 bp, Homo sapien
gcctgagcttttccagtaggtccaa

SEQ ID NO: 5698469 - DNA, 25 bp, Homo sapien
gaactaagaatctattttgataagg

SEQ ID NO: 5698470 - DNA, 25 bp, Homo sapien
ggagcagagattggacctactggaa

SEQ ID NO: 5698471 - DNA, 25 bp, Homo sapien
gaatctattttgataaggagatggg

SEQ ID NO: 5698472 - DNA, 25 bp, Homo sapien
acctactggaaaagctcaggcagag

SEQ ID NO: 5698473 - DNA, 25 bp, Homo sapien
tggacctactggaaaagctcaggca

SEQ ID NO: 5698474 - DNA, 25 bp, Homo sapien
gattggacctactggaaaagctcag

SEQ ID NO: 5698475 - DNA, 25 bp, Homo sapien
tcatctgtacttgcttaaaataaca

SEQ ID NO: 5698476 - DNA, 25 bp, Homo sapien
ttcagtagtgtttctagaacactga

SEQ ID NO: 5698477 - DNA, 25 bp, Homo sapien
agtagtgtttctagaacactgatgc

SEQ ID NO: 5698478 - DNA, 25 bp, Homo sapien
gcctttggttcttcagtagtgtttc

SEQ ID NO: 5698479 - DNA, 25 bp, Homo sapien
ttggttcttcagtagtgtttctaga

SEQ ID NO: 5698480 - DNA, 25 bp, Homo sapien
catctgtacttgcttaaaataacaa

SEQ ID NO: 5698481 - DNA, 25 bp, Homo sapien
tctagaaacactactgaagaaccaa

SEQ ID NO: 5698482 - DNA, 25 bp, Homo sapien
gcatcagtgttctagaaacactact

SEQ ID NO: 5698483 - DNA, 25 bp, Homo sapien
tagaaacactactgaagaaccaaag

SEQ ID NO: 5698484 - DNA, 25 bp, Homo sapien
gaaacactactgaagaaccaaaggc

SEQ ID NO: 5698485 - DNA, 25 bp, Homo sapien
tgttattttaagcaagtacagatga

SEQ ID NO: 5698486 - DNA, 25 bp, Homo sapien
tcagtgttctagaaacactactgaa

SEQ ID NO: 5698487 - DNA, 25 bp, Homo sapien
gcttactgaagcctcaacttcccgg

SEQ ID NO: 5698488 - DNA, 25 bp, Homo sapien
cttactgaagcctcaacttcccggg

SEQ ID NO: 5698489 - DNA, 25 bp, Homo sapien
tctcagcttactgaagcctcaactt

SEQ ID NO: 5698490 - DNA, 25 bp, Homo sapien
tgaagcctcaacttcccgggttcag

SEQ ID NO: 5698491 - DNA, 25 bp, Homo sapien
agcttactgaagcctcaacttcccg

SEQ ID NO: 5698492 - DNA, 25 bp, Homo sapien
ctcagcttactgaagcctcaacttc

SEQ ID NO: 5698493 - DNA, 25 bp, Homo sapien
ccgggaagttgaggcttcagtaagc

SEQ ID NO: 5698494 - DNA, 25 bp, Homo sapien
cgggaagttgaggcttcagtaagct

SEQ ID NO: 5698495 - DNA, 25 bp, Homo sapien
ctgaacccgggaagttgaggcttca

SEQ ID NO: 5698496 - DNA, 25 bp, Homo sapien
aagttgaggcttcagtaagctgaga

SEQ ID NO: 5698497 - DNA, 25 bp, Homo sapien
gaagttgaggcttcagtaagctgag

SEQ ID NO: 5698498 - DNA, 25 bp, Homo sapien
cccgggaagttgaggcttcagtaag

SEQ ID NO: 5698499 - DNA, 25 bp, Homo sapien
taacattgaaaaatactccattgtc

SEQ ID NO: 5698500 - DNA, 25 bp, Homo sapien
tgaaaaatactccattgtctagata

SEQ ID NO: 5698501 - DNA, 25 bp, Homo sapien
cattgaaaaatactccattgtctag

SEQ ID NO: 5698502 - DNA, 25 bp, Homo sapien
aggttaccctatgtcttttcatggc

SEQ ID NO: 5698503 - DNA, 25 bp, Homo sapien
tttaacattgaaaaatactccattg

SEQ ID NO: 5698504 - DNA, 25 bp, Homo sapien
taaggttaccctatgtcttttcatg

SEQ ID NO: 5698505 - DNA, 25 bp, Homo sapien
catgaaaagacatagggtaacctta

SEQ ID NO: 5698506 - DNA, 25 bp, Homo sapien
caatggagtatttttcaatgttaaa

SEQ ID NO: 5698507 - DNA, 25 bp, Homo sapien
tatctagacaatggagtatttttca

SEQ ID NO: 5698508 - DNA, 25 bp, Homo sapien
ttttcaatgttaaaaagaaatgagc

SEQ ID NO: 5698509 - DNA, 25 bp, Homo sapien
ctagacaatggagtatttttcaatg

SEQ ID NO: 5698510 - DNA, 25 bp, Homo sapien
gccatgaaaagacatagggtaacct

SEQ ID NO: 5698511 - DNA, 25 bp, Homo sapien
ttccttctacggcagaaaccacagt

SEQ ID NO: 5698512 - DNA, 25 bp, Homo sapien
ttcacttcttgtgtattcgtgttcc

SEQ ID NO: 5698513 - DNA, 25 bp, Homo sapien
aaaccacagtgtgttgatgaatgaa

SEQ ID NO: 5698514 - DNA, 25 bp, Homo sapien
tagtttaagcaaggctgctagaagt

SEQ ID NO: 5698515 - DNA, 25 bp, Homo sapien
cgtgttcctttccttctacggcaga

SEQ ID NO: 5698516 - DNA, 25 bp, Homo sapien
caaggctgctagaagtttcattcca

SEQ ID NO: 5698517 - DNA, 25 bp, Homo sapien
tagaaggaaaggaacacgaatacac

SEQ ID NO: 5698518 - DNA, 25 bp, Homo sapien
tctgccgtagaaggaaaggaacacg

SEQ ID NO: 5698519 - DNA, 25 bp, Homo sapien
gaatgaaacttctagcagccttgct

SEQ ID NO: 5698520 - DNA, 25 bp, Homo sapien
ttcattcatcaacacactgtggttt

SEQ ID NO: 5698521 - DNA, 25 bp, Homo sapien
ggaacacgaatacacaagaagtgaa

SEQ ID NO: 5698522 - DNA, 25 bp, Homo sapien
actgtggtttctgccgtagaaggaa

SEQ ID NO: 5698523 - DNA, 25 bp, Homo sapien
agtcataactcacttgaacttctgg

SEQ ID NO: 5698524 - DNA, 25 bp, Homo sapien
ccagaagttcaagtgagttatgact

SEQ ID NO: 5698525 - DNA, 25 bp, Homo sapien
tcataactcacttgaacttctgggg

SEQ ID NO: 5698526 - DNA, 25 bp, Homo sapien
agtcataactcacttgaacttctgg

SEQ ID NO: 5698527 - DNA, 25 bp, Homo sapien
gtcataactcacttgaacttctggg

SEQ ID NO: 5698528 - DNA, 25 bp, Homo sapien
ggtcaattgatcctctccactcagc

SEQ ID NO: 5698529 - DNA, 25 bp, Homo sapien
gggtcaattgatcctctccactcag

SEQ ID NO: 5698530 - DNA, 25 bp, Homo sapien
tcacttgaacttctggggtcaattg

SEQ ID NO: 5698531 - DNA, 25 bp, Homo sapien
aattgaccccagaagttcaagtgag

SEQ ID NO: 5698532 - DNA, 25 bp, Homo sapien
ccagaagttcaagtgagttatgact

SEQ ID NO: 5698533 - DNA, 25 bp, Homo sapien
tgagtggagaggatcaattgacccc

SEQ ID NO: 5698534 - DNA, 25 bp, Homo sapien
gtggagaggatcaattgaccccaga

SEQ ID NO: 5698535 - DNA, 25 bp, Homo sapien
ccccagaagttcaagtgagttatga

SEQ ID NO: 5698536 - DNA, 25 bp, Homo sapien
gctgagtggagaggatcaattgacc

SEQ ID NO: 5698537 - DNA, 25 bp, Homo sapien
cacctgatgctattcctctgggttg

SEQ ID NO: 5698538 - DNA, 25 bp, Homo sapien
gcacacctgatgctattcctctggg

SEQ ID NO: 5698539 - DNA, 25 bp, Homo sapien
ctattcctctgggttgtacctttgt

SEQ ID NO: 5698540 - DNA, 25 bp, Homo sapien
tgcacacctgatgctattcctctgg

SEQ ID NO: 5698541 - DNA, 25 bp, Homo sapien
cctgatgctattcctctgggttgta

SEQ ID NO: 5698542 - DNA, 25 bp, Homo sapien
gatgctattcctctgggttgtacct

SEQ ID NO: 5698543 - DNA, 25 bp, Homo sapien
ggtacaacccagaggaatagcatca

SEQ ID NO: 5698544 - DNA, 25 bp, Homo sapien
ccagaggaatagcatcaggtgtgca

SEQ ID NO: 5698545 - DNA, 25 bp, Homo sapien
acaaaggtacaacccagaggaatag

SEQ ID NO: 5698546 - DNA, 25 bp, Homo sapien
tacaacccagaggaatagcatcagg

SEQ ID NO: 5698547 - DNA, 25 bp, Homo sapien
aaaggtacaacccagaggaatagca

SEQ ID NO: 5698548 - DNA, 25 bp, Homo sapien
cccagaggaatagcatcaggtgtgc

SEQ ID NO: 5698549 - DNA, 25 bp, Homo sapien
aatatgcactaatagacttgtgagg

SEQ ID NO: 5698550 - DNA, 25 bp, Homo sapien
accctgaaacatagttgctgctcaa

SEQ ID NO: 5698551 - DNA, 25 bp, Homo sapien
ctgaaacatagttgctgctcaataa

SEQ ID NO: 5698552 - DNA, 25 bp, Homo sapien
cctgaaacatagttgctgctcaata

SEQ ID NO: 5698553 - DNA, 25 bp, Homo sapien
aaagtacaataatacatgtgaaaac

SEQ ID NO: 5698554 - DNA, 25 bp, Homo sapien
atatgcactaatagacttgtgagga

SEQ ID NO: 5698555 - DNA, 25 bp, Homo sapien
ttattgagcagcaactatgtttcag

SEQ ID NO: 5698556 - DNA, 25 bp, Homo sapien
tgttttcacatgtattattgtactt

SEQ ID NO: 5698557 - DNA, 25 bp, Homo sapien
tcctcacaagtctattagtgcatat

SEQ ID NO: 5698558 - DNA, 25 bp, Homo sapien
ttgagcagcaactatgtttcagggt

SEQ ID NO: 5698559 - DNA, 25 bp, Homo sapien
cctcacaagtctattagtgcatatt

SEQ ID NO: 5698560 - DNA, 25 bp, Homo sapien
tattgagcagcaactatgtttcagg

SEQ ID NO: 5698561 - DNA, 25 bp, Homo sapien
gggtctcactcctgtcgcctgggct

SEQ ID NO: 5698562 - DNA, 25 bp, Homo sapien
cactcctgtcgcctgggctggagtg

SEQ ID NO: 5698563 - DNA, 25 bp, Homo sapien
cagcctcgaattcccaggctcaggt

SEQ ID NO: 5698564 - DNA, 25 bp, Homo sapien
gtctcactcctgtcgcctgggctgg

SEQ ID NO: 5698565 - DNA, 25 bp, Homo sapien
ggtctcactcctgtcgcctgggctg

SEQ ID NO: 5698566 - DNA, 25 bp, Homo sapien
tctcactcctgtcgcctgggctgga

SEQ ID NO: 5698567 - DNA, 25 bp, Homo sapien
tccagcccaggcgacaggagtgaga

SEQ ID NO: 5698568 - DNA, 25 bp, Homo sapien
ccagcccaggcgacaggagtgagac

SEQ ID NO: 5698569 - DNA, 25 bp, Homo sapien
cagcccaggcgacaggagtgagacc

SEQ ID NO: 5698570 - DNA, 25 bp, Homo sapien
agcccaggcgacaggagtgagaccc

SEQ ID NO: 5698571 - DNA, 25 bp, Homo sapien
acctgagcctgggaattcgaggctg

SEQ ID NO: 5698572 - DNA, 25 bp, Homo sapien
cactccagcccaggcgacaggagtg

SEQ ID NO: 5698573 - DNA, 25 bp, Homo sapien
acttccagctcctgggtgcaagtga

SEQ ID NO: 5698574 - DNA, 25 bp, Homo sapien
tcgttctgttgctcagattggagtg

SEQ ID NO: 5698575 - DNA, 25 bp, Homo sapien
tctcgttctgttgctcagattggag

SEQ ID NO: 5698576 - DNA, 25 bp, Homo sapien
caacttccagctcctgggtgcaagt

SEQ ID NO: 5698577 - DNA, 25 bp, Homo sapien
aacttccagctcctgggtgcaagtg

SEQ ID NO: 5698578 - DNA, 25 bp, Homo sapien
ctcgttctgttgctcagattggagt

SEQ ID NO: 5698579 - DNA, 25 bp, Homo sapien
cactccaatctgagcaacagaacga

SEQ ID NO: 5698580 - DNA, 25 bp, Homo sapien
acttgcacccaggagctggaagttg

SEQ ID NO: 5698581 - DNA, 25 bp, Homo sapien
cacttgcacccaggagctggaagtt

SEQ ID NO: 5698582 - DNA, 25 bp, Homo sapien
tcacttgcacccaggagctggaagt

SEQ ID NO: 5698583 - DNA, 25 bp, Homo sapien
actccaatctgagcaacagaacgag

SEQ ID NO: 5698584 - DNA, 25 bp, Homo sapien
ctccaatctgagcaacagaacgaga

SEQ ID NO: 5698585 - DNA, 25 bp, Homo sapien
tgccataaaagggttctgccttact

SEQ ID NO: 5698586 - DNA, 25 bp, Homo sapien
aagcattgtgtaactaactataagt

SEQ ID NO: 5698587 - DNA, 25 bp, Homo sapien
ttttgtaaacctaaagcattgtgta

SEQ ID NO: 5698588 - DNA, 25 bp, Homo sapien
cattgtgtaactaactataagtatt

SEQ ID NO: 5698589 - DNA, 25 bp, Homo sapien
ttgtaaacctaaagcattgtgtaac

SEQ ID NO: 5698590 - DNA, 25 bp, Homo sapien
gcattgtgtaactaactataagtat

SEQ ID NO: 5698591 - DNA, 25 bp, Homo sapien
tacacaatgctttaggtttacaaaa

SEQ ID NO: 5698592 - DNA, 25 bp, Homo sapien
atacttatagttagttacacaatgc

SEQ ID NO: 5698593 - DNA, 25 bp, Homo sapien
tacttatagttagttacacaatgct

SEQ ID NO: 5698594 - DNA, 25 bp, Homo sapien
gttacacaatgctttaggtttacaa

SEQ ID NO: 5698595 - DNA, 25 bp, Homo sapien
aatacttatagttagttacacaatg

SEQ ID NO: 5698596 - DNA, 25 bp, Homo sapien
agtaaggcagaacccttttatggca

SEQ ID NO: 5698597 - DNA, 25 bp, Homo sapien
ataaaaatatttacctgggtgcagt

SEQ ID NO: 5698598 - DNA, 25 bp, Homo sapien
aaaaatatttacctgggtgcagtgg

SEQ ID NO: 5698599 - DNA, 25 bp, Homo sapien
gtgcagtggtgcacacccatagtcc

SEQ ID NO: 5698600 - DNA, 25 bp, Homo sapien
aataaaaatatttacctgggtgcag

SEQ ID NO: 5698601 - DNA, 25 bp, Homo sapien
aaatatttacctgggtgcagtggtg

SEQ ID NO: 5698602 - DNA, 25 bp, Homo sapien
aaaatatttacctgggtgcagtggt

SEQ ID NO: 5698603 - DNA, 25 bp, Homo sapien
ccactgcacccaggtaaatattttt

SEQ ID NO: 5698604 - DNA, 25 bp, Homo sapien
caccactgcacccaggtaaatattt

SEQ ID NO: 5698605 - DNA, 25 bp, Homo sapien
accactgcacccaggtaaatatttt

SEQ ID NO: 5698606 - DNA, 25 bp, Homo sapien
actgcacccaggtaaatatttttat

SEQ ID NO: 5698607 - DNA, 25 bp, Homo sapien
ctgcacccaggtaaatatttttatt

SEQ ID NO: 5698608 - DNA, 25 bp, Homo sapien
ggactatgggtgtgcaccactgcac

SEQ ID NO: 5698609 - DNA, 25 bp, Homo sapien
gcatgcacctatagccctagctact

SEQ ID NO: 5698610 - DNA, 25 bp, Homo sapien
agtttttaaaaattagctgagtgtg

SEQ ID NO: 5698611 - DNA, 25 bp, Homo sapien
catgcacctatagccctagctactc

SEQ ID NO: 5698612 - DNA, 25 bp, Homo sapien
tgcacctatagccctagctactcag

SEQ ID NO: 5698613 - DNA, 25 bp, Homo sapien
gcacctatagccctagctactcagg

SEQ ID NO: 5698614 - DNA, 25 bp, Homo sapien
ggcatgcacctatagccctagctac

SEQ ID NO: 5698615 - DNA, 25 bp, Homo sapien
cctgagtagctagggctataggtgc

SEQ ID NO: 5698616 - DNA, 25 bp, Homo sapien
agtagctagggctataggtgcatgc

SEQ ID NO: 5698617 - DNA, 25 bp, Homo sapien
gagtagctagggctataggtgcatg

SEQ ID NO: 5698618 - DNA, 25 bp, Homo sapien
ctgagtagctagggctataggtgca

SEQ ID NO: 5698619 - DNA, 25 bp, Homo sapien
cacactcagctaatttttaaaaact

SEQ ID NO: 5698620 - DNA, 25 bp, Homo sapien
gtagctagggctataggtgcatgcc

SEQ ID NO: 5698621 - DNA, 25 bp, Homo sapien
tagcctgagcaatgtagtgacacct

SEQ ID NO: 5698622 - DNA, 25 bp, Homo sapien
agcaatgtagtgacacctcatctct

SEQ ID NO: 5698623 - DNA, 25 bp, Homo sapien
gcctgagcaatgtagtgacacctca

SEQ ID NO: 5698624 - DNA, 25 bp, Homo sapien
actagcctgagcaatgtagtgacac

SEQ ID NO: 5698625 - DNA, 25 bp, Homo sapien
cctgagcaatgtagtgacacctcat

SEQ ID NO: 5698626 - DNA, 25 bp, Homo sapien
gactagcctgagcaatgtagtgaca

SEQ ID NO: 5698627 - DNA, 25 bp, Homo sapien
gatgaggtgtcactacattgctcag

SEQ ID NO: 5698628 - DNA, 25 bp, Homo sapien
ggtgtcactacattgctcaggctag

SEQ ID NO: 5698629 - DNA, 25 bp, Homo sapien
gtgtcactacattgctcaggctagt

SEQ ID NO: 5698630 - DNA, 25 bp, Homo sapien
tgtcactacattgctcaggctagtc

SEQ ID NO: 5698631 - DNA, 25 bp, Homo sapien
tgaggtgtcactacattgctcaggc

SEQ ID NO: 5698632 - DNA, 25 bp, Homo sapien
agagatgaggtgtcactacattgct

SEQ ID NO: 5698633 - DNA, 25 bp, Homo sapien
accacgttgaccaggatggtctcca

SEQ ID NO: 5698634 - DNA, 25 bp, Homo sapien
ccacgttgaccaggatggtctccat

SEQ ID NO: 5698635 - DNA, 25 bp, Homo sapien
atttttgtatttttagtagagacag

SEQ ID NO: 5698636 - DNA, 25 bp, Homo sapien
tatttttagtagagacagggtttca

SEQ ID NO: 5698637 - DNA, 25 bp, Homo sapien
ctgtctctactaaaaatacaaaaat

SEQ ID NO: 5698638 - DNA, 25 bp, Homo sapien
tggagaccatcctggtcaacgtggt

SEQ ID NO: 5698639 - DNA, 25 bp, Homo sapien
atggagaccatcctggtcaacgtgg

SEQ ID NO: 5698640 - DNA, 25 bp, Homo sapien
tgaaaccctgtctctactaaaaata

SEQ ID NO: 5698641 - DNA, 25 bp, Homo sapien
catactaaagtactagggattaaga

SEQ ID NO: 5698642 - DNA, 25 bp, Homo sapien
taacctcttaaggatcccttctcca

SEQ ID NO: 5698643 - DNA, 25 bp, Homo sapien
tcttaatccctagtactttagtatg

SEQ ID NO: 5698644 - DNA, 25 bp, Homo sapien
tggagaagggatccttaagaggtta

SEQ ID NO: 5698645 - DNA, 25 bp, Homo sapien
catactaaagtactagggattaaga

SEQ ID NO: 5698646 - DNA, 25 bp, Homo sapien
caaatacagtcacatactaaagtac

SEQ ID NO: 5698647 - DNA, 25 bp, Homo sapien
taacctcttaaggatcccttctcca

SEQ ID NO: 5698648 - DNA, 25 bp, Homo sapien
taaagtactagggattaagacttca

SEQ ID NO: 5698649 - DNA, 25 bp, Homo sapien
taaggatcccttctccaaatacagt

SEQ ID NO: 5698650 - DNA, 25 bp, Homo sapien
agtactagggattaagacttcaaca

SEQ ID NO: 5698651 - DNA, 25 bp, Homo sapien
gactgtatttggagaagggatcctt

SEQ ID NO: 5698652 - DNA, 25 bp, Homo sapien
tcttaatccctagtactttagtatg

SEQ ID NO: 5698653 - DNA, 25 bp, Homo sapien
cctagtactttagtatgtgactgta

SEQ ID NO: 5698654 - DNA, 25 bp, Homo sapien
tgttgaagtcttaatccctagtact

SEQ ID NO: 5698655 - DNA, 25 bp, Homo sapien
tggagaagggatccttaagaggtta

SEQ ID NO: 5698656 - DNA, 25 bp, Homo sapien
tgtatttggagaagggatccttaag

SEQ ID NO: 5698657 - DNA, 25 bp, Homo sapien
tggttacataaataatgacggtcaa

SEQ ID NO: 5698658 - DNA, 25 bp, Homo sapien
aataatgacggtcaatgtctgttaa

SEQ ID NO: 5698659 - DNA, 25 bp, Homo sapien
taaataatgacggtcaatgtctgtt

SEQ ID NO: 5698660 - DNA, 25 bp, Homo sapien
tacataaataatgacggtcaatgtc

SEQ ID NO: 5698661 - DNA, 25 bp, Homo sapien
cataaataatgacggtcaatgtctg

SEQ ID NO: 5698662 - DNA, 25 bp, Homo sapien
gttacataaataatgacggtcaatg

SEQ ID NO: 5698663 - DNA, 25 bp, Homo sapien
ttaacagacattgaccgtcattatt

SEQ ID NO: 5698664 - DNA, 25 bp, Homo sapien
taacagacattgaccgtcattattt

SEQ ID NO: 5698665 - DNA, 25 bp, Homo sapien
tgaccgtcattatttatgtaaccat

SEQ ID NO: 5698666 - DNA, 25 bp, Homo sapien
cattgaccgtcattatttatgtaac

SEQ ID NO: 5698667 - DNA, 25 bp, Homo sapien
gacattgaccgtcattatttatgta

SEQ ID NO: 5698668 - DNA, 25 bp, Homo sapien
cagacattgaccgtcattatttatg

SEQ ID NO: 5698669 - DNA, 25 bp, Homo sapien
ttaacagacattgaccgtcattatt

SEQ ID NO: 5698670 - DNA, 25 bp, Homo sapien
tatgtaaccataaacaggtttatta

SEQ ID NO: 5698671 - DNA, 25 bp, Homo sapien
ggccttccatatacatggattctga

SEQ ID NO: 5698672 - DNA, 25 bp, Homo sapien
cattgaccgtcattatttatgtaac

SEQ ID NO: 5698673 - DNA, 25 bp, Homo sapien
tattaattactacagttggccttcc

SEQ ID NO: 5698674 - DNA, 25 bp, Homo sapien
caggtttattaattactacagttgg

SEQ ID NO: 5698675 - DNA, 25 bp, Homo sapien
atgttcaggatagatgcaagcatcc

SEQ ID NO: 5698676 - DNA, 25 bp, Homo sapien
ttcaggatagatgcaagcatccatt

SEQ ID NO: 5698677 - DNA, 25 bp, Homo sapien
gttcaggatagatgcaagcatccat

SEQ ID NO: 5698678 - DNA, 25 bp, Homo sapien
tgttcaggatagatgcaagcatcca

SEQ ID NO: 5698679 - DNA, 25 bp, Homo sapien
tcaggatagatgcaagcatccattt

SEQ ID NO: 5698680 - DNA, 25 bp, Homo sapien
aaatggatgcttgcatctatcctga

SEQ ID NO: 5698681 - DNA, 25 bp, Homo sapien
atggatgcttgcatctatcctgaac

SEQ ID NO: 5698682 - DNA, 25 bp, Homo sapien
aatggatgcttgcatctatcctgaa

SEQ ID NO: 5698683 - DNA, 25 bp, Homo sapien
tggatgcttgcatctatcctgaaca

SEQ ID NO: 5698684 - DNA, 25 bp, Homo sapien
ggatgcttgcatctatcctgaacat

SEQ ID NO: 5698685 - DNA, 25 bp, Homo sapien
ggatagatgcaagcatccatttttt

SEQ ID NO: 5698686 - DNA, 25 bp, Homo sapien
tgttcaggatagatgcaagcatcca

SEQ ID NO: 5698687 - DNA, 25 bp, Homo sapien
gttcaggatagatgcaagcatccat

SEQ ID NO: 5698688 - DNA, 25 bp, Homo sapien
taatgaccagaaaaaaagtcagtac

SEQ ID NO: 5698689 - DNA, 25 bp, Homo sapien
tcaggatagatgcaagcatccattt

SEQ ID NO: 5698690 - DNA, 25 bp, Homo sapien
aaaagtcagtacatgttcaggatag

SEQ ID NO: 5698691 - DNA, 25 bp, Homo sapien
aaatggatgcttgcatctatcctga

SEQ ID NO: 5698692 - DNA, 25 bp, Homo sapien
catctatcctgaacatgtactgact

SEQ ID NO: 5698693 - DNA, 25 bp, Homo sapien
aaaaaatggatgcttgcatctatcc

SEQ ID NO: 5698694 - DNA, 25 bp, Homo sapien
aatggatgcttgcatctatcctgaa

SEQ ID NO: 5698695 - DNA, 25 bp, Homo sapien
tggatgcttgcatctatcctgaaca

SEQ ID NO: 5698696 - DNA, 25 bp, Homo sapien
ctatcctgaacatgtactgactttt

SEQ ID NO: 5698697 - DNA, 25 bp, Homo sapien
tattacctatgcaggtactcctgtg

SEQ ID NO: 5698698 - DNA, 25 bp, Homo sapien
gatacccaaatccatagatgcttaa

SEQ ID NO: 5698699 - DNA, 25 bp, Homo sapien
acctatgcaggtactcctgtgtact

SEQ ID NO: 5698700 - DNA, 25 bp, Homo sapien
tagatgcttaaagtccattatatac

SEQ ID NO: 5698701 - DNA, 25 bp, Homo sapien
caaatccatagatgcttaaagtcca

SEQ ID NO: 5698702 - DNA, 25 bp, Homo sapien
tgcatattacctatgcaggtactcc

SEQ ID NO: 5698703 - DNA, 25 bp, Homo sapien
gagtacctgcataggtaatatgcaa

SEQ ID NO: 5698704 - DNA, 25 bp, Homo sapien
tataatggactttaagcatctatgg

SEQ ID NO: 5698705 - DNA, 25 bp, Homo sapien
gactttaagcatctatggatttggg

SEQ ID NO: 5698706 - DNA, 25 bp, Homo sapien
agtacacaggagtacctgcataggt

SEQ ID NO: 5698707 - DNA, 25 bp, Homo sapien
ttaagcatctatggatttgggtatc

SEQ ID NO: 5698708 - DNA, 25 bp, Homo sapien
catgtatataatggactttaagcat

SEQ ID NO: 5698709 - DNA, 25 bp, Homo sapien
aaattattcaatatacagtcgtccc

SEQ ID NO: 5698710 - DNA, 25 bp, Homo sapien
gggacgactgtatattgaataattt

SEQ ID NO: 5698711 - DNA, 25 bp, Homo sapien
ggtttaacatgaagagtgaaagaga

SEQ ID NO: 5698712 - DNA, 25 bp, Homo sapien
gagaaaaattgataccattacctat

SEQ ID NO: 5698713 - DNA, 25 bp, Homo sapien
tacctattaaaatcttctaaaagca

SEQ ID NO: 5698714 - DNA, 25 bp, Homo sapien
tcttctaaaagcaataattagttaa

SEQ ID NO: 5698715 - DNA, 25 bp, Homo sapien
aaattattcaatatacagtcgtccc

SEQ ID NO: 5698716 - DNA, 25 bp, Homo sapien
gataccattacctattaaaatcttc

SEQ ID NO: 5698717 - DNA, 25 bp, Homo sapien
gaagattttaataggtaatggtatc

SEQ ID NO: 5698718 - DNA, 25 bp, Homo sapien
taggtaatggtatcaatttttctct

SEQ ID NO: 5698719 - DNA, 25 bp, Homo sapien
taactaattattgcttttagaagat

SEQ ID NO: 5698720 - DNA, 25 bp, Homo sapien
tctctttcactcttcatgttaaacc

SEQ ID NO: 5698721 - DNA, 25 bp, Homo sapien
tgcttttagaagattttaataggta

SEQ ID NO: 5698722 - DNA, 25 bp, Homo sapien
gggacgactgtatattgaataattt

SEQ ID NO: 5698723 - DNA, 25 bp, Homo sapien
cttctgtcgttctgttccttgcatt

SEQ ID NO: 5698724 - DNA, 25 bp, Homo sapien
tctgtcgttctgttccttgcatttc

SEQ ID NO: 5698725 - DNA, 25 bp, Homo sapien
ttctgtcgttctgttccttgcattt

SEQ ID NO: 5698726 - DNA, 25 bp, Homo sapien
ctgtcgttctgttccttgcatttca

SEQ ID NO: 5698727 - DNA, 25 bp, Homo sapien
tgtcgttctgttccttgcatttcaa

SEQ ID NO: 5698728 - DNA, 25 bp, Homo sapien
attgtattttcaattggtagctttc

SEQ ID NO: 5698729 - DNA, 25 bp, Homo sapien
aaatgcaaggaacagaacgacagaa

SEQ ID NO: 5698730 - DNA, 25 bp, Homo sapien
tgaaatgcaaggaacagaacgacag

SEQ ID NO: 5698731 - DNA, 25 bp, Homo sapien
ttgaaatgcaaggaacagaacgaca

SEQ ID NO: 5698732 - DNA, 25 bp, Homo sapien
gaaatgcaaggaacagaacgacaga

SEQ ID NO: 5698733 - DNA, 25 bp, Homo sapien
aatgcaaggaacagaacgacagaag

SEQ ID NO: 5698734 - DNA, 25 bp, Homo sapien
gaaagctaccaattgaaaatacaat

SEQ ID NO: 5698735 - DNA, 25 bp, Homo sapien
ggattccttcagtttcttctgtcgt

SEQ ID NO: 5698736 - DNA, 25 bp, Homo sapien
attggtagctttcatgtatattctc

SEQ ID NO: 5698737 - DNA, 25 bp, Homo sapien
cttctgtcgttctgttccttgcatt

SEQ ID NO: 5698738 - DNA, 25 bp, Homo sapien
tctgttccttgcatttcaaatgcct

SEQ ID NO: 5698739 - DNA, 25 bp, Homo sapien
tgtcgttctgttccttgcatttcaa

SEQ ID NO: 5698740 - DNA, 25 bp, Homo sapien
attgtattttcaattggtagctttc

SEQ ID NO: 5698741 - DNA, 25 bp, Homo sapien
tttaattatagcaccagtccttttc

SEQ ID NO: 5698742 - DNA, 25 bp, Homo sapien
ttaattatagcaccagtccttttca

SEQ ID NO: 5698743 - DNA, 25 bp, Homo sapien
taactaacatttgtagttgtggaaa

SEQ ID NO: 5698744 - DNA, 25 bp, Homo sapien
tagcaccagtccttttcatatatgc

SEQ ID NO: 5698745 - DNA, 25 bp, Homo sapien
attttaattatagcaccagtccttt

SEQ ID NO: 5698746 - DNA, 25 bp, Homo sapien
aattatagcaccagtccttttcata

SEQ ID NO: 5698747 - DNA, 25 bp, Homo sapien
catatatgaaaaggactggtgctat

SEQ ID NO: 5698748 - DNA, 25 bp, Homo sapien
tatgaaaaggactggtgctataatt

SEQ ID NO: 5698749 - DNA, 25 bp, Homo sapien
tttccacaactacaaatgttagtta

SEQ ID NO: 5698750 - DNA, 25 bp, Homo sapien
gcatatatgaaaaggactggtgcta

SEQ ID NO: 5698751 - DNA, 25 bp, Homo sapien
aaaggactggtgctataattaaaat

SEQ ID NO: 5698752 - DNA, 25 bp, Homo sapien
gaaaaggactggtgctataattaaa

SEQ ID NO: 5698753 - DNA, 25 bp, Homo sapien
cgtaagttcctcgtcaagaatcaga

SEQ ID NO: 5698754 - DNA, 25 bp, Homo sapien
gatctcgtaagttcctcgtcaagaa

SEQ ID NO: 5698755 - DNA, 25 bp, Homo sapien
tgtggatctcgtaagttcctcgtca

SEQ ID NO: 5698756 - DNA, 25 bp, Homo sapien
tggccatttgtttcatgtatgtgga

SEQ ID NO: 5698757 - DNA, 25 bp, Homo sapien
catgtatgtggatctcgtaagttcc

SEQ ID NO: 5698758 - DNA, 25 bp, Homo sapien
aagttcctcgtcaagaatcagaaat

SEQ ID NO: 5698759 - DNA, 25 bp, Homo sapien
atttctgattcttgacgaggaactt

SEQ ID NO: 5698760 - DNA, 25 bp, Homo sapien
tctgattcttgacgaggaacttacg

SEQ ID NO: 5698761 - DNA, 25 bp, Homo sapien
tccacatacatgaaacaaatggcca

SEQ ID NO: 5698762 - DNA, 25 bp, Homo sapien
gacgaggaacttacgagatccacat

SEQ ID NO: 5698763 - DNA, 25 bp, Homo sapien
ggaacttacgagatccacatacatg

SEQ ID NO: 5698764 - DNA, 25 bp, Homo sapien
tcttgacgaggaacttacgagatcc

SEQ ID NO: 5698765 - DNA, 25 bp, Homo sapien
aggattgccaccttattaagtggta

SEQ ID NO: 5698766 - DNA, 25 bp, Homo sapien
tgccaccttattaagtggtataact

SEQ ID NO: 5698767 - DNA, 25 bp, Homo sapien
tctcttggcctatgtagaattgctt

SEQ ID NO: 5698768 - DNA, 25 bp, Homo sapien
gcttatatgccgcatttcatgtctc

SEQ ID NO: 5698769 - DNA, 25 bp, Homo sapien
gtttgcttatatgccgcatttcatg

SEQ ID NO: 5698770 - DNA, 25 bp, Homo sapien
tggtataacttttggtttgcttata

SEQ ID NO: 5698771 - DNA, 25 bp, Homo sapien
tataagcaaaccaaaagttatacca

SEQ ID NO: 5698772 - DNA, 25 bp, Homo sapien
gagacatgaaatgcggcatataagc

SEQ ID NO: 5698773 - DNA, 25 bp, Homo sapien
aagcaattctacataggccaagaga

SEQ ID NO: 5698774 - DNA, 25 bp, Homo sapien
catgaaatgcggcatataagcaaac

SEQ ID NO: 5698775 - DNA, 25 bp, Homo sapien
agttataccacttaataaggtggca

SEQ ID NO: 5698776 - DNA, 25 bp, Homo sapien
taccacttaataaggtggcaatcct

SEQ ID NO: 5698777 - DNA, 25 bp, Homo sapien
ctcctgcctcggccttccaagtagc

SEQ ID NO: 5698778 - DNA, 25 bp, Homo sapien
cctcggccttccaagtagctgggat

SEQ ID NO: 5698779 - DNA, 25 bp, Homo sapien
gggattacaggcgcccgtcaccatg

SEQ ID NO: 5698780 - DNA, 25 bp, Homo sapien
ggattacaggcgcccgtcaccatgc

SEQ ID NO: 5698781 - DNA, 25 bp, Homo sapien
gattctcctgcctcggccttccaag

SEQ ID NO: 5698782 - DNA, 25 bp, Homo sapien
cgattctcctgcctcggccttccaa

SEQ ID NO: 5698783 - DNA, 25 bp, Homo sapien
catggtgacgggcgcctgtaatccc

SEQ ID NO: 5698784 - DNA, 25 bp, Homo sapien
cttggaaggccgaggcaggagaatc

SEQ ID NO: 5698785 - DNA, 25 bp, Homo sapien
atcccagctacttggaaggccgagg

SEQ ID NO: 5698786 - DNA, 25 bp, Homo sapien
gctacttggaaggccgaggcaggag

SEQ ID NO: 5698787 - DNA, 25 bp, Homo sapien
gcatggtgacgggcgcctgtaatcc

SEQ ID NO: 5698788 - DNA, 25 bp, Homo sapien
ttggaaggccgaggcaggagaatcg

SEQ ID NO: 5698789 - DNA, 25 bp, Homo sapien
tgtacacagtacttttagtcattat

SEQ ID NO: 5698790 - DNA, 25 bp, Homo sapien
gtatattacttataacccatagaag

SEQ ID NO: 5698791 - DNA, 25 bp, Homo sapien
taacccatagaagagtccaagacat

SEQ ID NO: 5698792 - DNA, 25 bp, Homo sapien
catagaagagtccaagacattaaga

SEQ ID NO: 5698793 - DNA, 25 bp, Homo sapien
tataacccatagaagagtccaagac

SEQ ID NO: 5698794 - DNA, 25 bp, Homo sapien
ctttaagcctacttatgtacacagt

SEQ ID NO: 5698795 - DNA, 25 bp, Homo sapien
tcttaatgtcttggactcttctatg

SEQ ID NO: 5698796 - DNA, 25 bp, Homo sapien
taatgtcttggactcttctatgggt

SEQ ID NO: 5698797 - DNA, 25 bp, Homo sapien
taatgactaaaagtactgtgtacat

SEQ ID NO: 5698798 - DNA, 25 bp, Homo sapien
actgtgtacataagtaggcttaaag

SEQ ID NO: 5698799 - DNA, 25 bp, Homo sapien
tactgcatcccctataatgactaaa

SEQ ID NO: 5698800 - DNA, 25 bp, Homo sapien
ggactcttctatgggttataagtaa

SEQ ID NO: 5698801 - DNA, 25 bp, Homo sapien
gactcactgcataggttgaacccag

SEQ ID NO: 5698802 - DNA, 25 bp, Homo sapien
tctggactcactgcataggttgaac

SEQ ID NO: 5698803 - DNA, 25 bp, Homo sapien
tcactgcataggttgaacccaggtt

SEQ ID NO: 5698804 - DNA, 25 bp, Homo sapien
tatattatagtacttaggggcaaaa

SEQ ID NO: 5698805 - DNA, 25 bp, Homo sapien
ggggcaaaatgtctggactcactgc

SEQ ID NO: 5698806 - DNA, 25 bp, Homo sapien
actgcataggttgaacccaggttct

SEQ ID NO: 5698807 - DNA, 25 bp, Homo sapien
agaacctgggttcaacctatgcagt

SEQ ID NO: 5698808 - DNA, 25 bp, Homo sapien
tgcccctaagtactataatatacta

SEQ ID NO: 5698809 - DNA, 25 bp, Homo sapien
ggttcaacctatgcagtgagtccag

SEQ ID NO: 5698810 - DNA, 25 bp, Homo sapien
gcagtgagtccagacattttgcccc

SEQ ID NO: 5698811 - DNA, 25 bp, Homo sapien
cctgggttcaacctatgcagtgagt

SEQ ID NO: 5698812 - DNA, 25 bp, Homo sapien
cattttgcccctaagtactataata

SEQ ID NO: 5698813 - DNA, 25 bp, Homo sapien
agttaagagattggagccctgtcat

SEQ ID NO: 5698814 - DNA, 25 bp, Homo sapien
gagttaagagattggagccctgtca

SEQ ID NO: 5698815 - DNA, 25 bp, Homo sapien
gttaagagattggagccctgtcatt

SEQ ID NO: 5698816 - DNA, 25 bp, Homo sapien
taagagattggagccctgtcattta

SEQ ID NO: 5698817 - DNA, 25 bp, Homo sapien
aatggagttaagagattggagccct

SEQ ID NO: 5698818 - DNA, 25 bp, Homo sapien
taatggagttaagagattggagccc

SEQ ID NO: 5698819 - DNA, 25 bp, Homo sapien
aaatgacagggctccaatctcttaa

SEQ ID NO: 5698820 - DNA, 25 bp, Homo sapien
aatgacagggctccaatctcttaac

SEQ ID NO: 5698821 - DNA, 25 bp, Homo sapien
tgacagggctccaatctcttaactc

SEQ ID NO: 5698822 - DNA, 25 bp, Homo sapien
ggctccaatctcttaactccattaa

SEQ ID NO: 5698823 - DNA, 25 bp, Homo sapien
taaatgacagggctccaatctctta

SEQ ID NO: 5698824 - DNA, 25 bp, Homo sapien
agggctccaatctcttaactccatt

SEQ ID NO: 5698825 - DNA, 25 bp, Homo sapien
ttagcacagtctttgtctcccgggt

SEQ ID NO: 5698826 - DNA, 25 bp, Homo sapien
gcgatctcggcttagcacagtcttt

SEQ ID NO: 5698827 - DNA, 25 bp, Homo sapien
tctcggcttagcacagtctttgtct

SEQ ID NO: 5698828 - DNA, 25 bp, Homo sapien
tcggcttagcacagtctttgtctcc

SEQ ID NO: 5698829 - DNA, 25 bp, Homo sapien
gatctcggcttagcacagtctttgt

SEQ ID NO: 5698830 - DNA, 25 bp, Homo sapien
gcttagcacagtctttgtctcccgg

SEQ ID NO: 5698831 - DNA, 25 bp, Homo sapien
ccgggagacaaagactgtgctaagc

SEQ ID NO: 5698832 - DNA, 25 bp, Homo sapien
gagacaaagactgtgctaagccgag

SEQ ID NO: 5698833 - DNA, 25 bp, Homo sapien
acccgggagacaaagactgtgctaa

SEQ ID NO: 5698834 - DNA, 25 bp, Homo sapien
gggagacaaagactgtgctaagccg

SEQ ID NO: 5698835 - DNA, 25 bp, Homo sapien
aaagactgtgctaagccgagatcgc

SEQ ID NO: 5698836 - DNA, 25 bp, Homo sapien
gacaaagactgtgctaagccgagat

SEQ ID NO: 5698837 - DNA, 25 bp, Homo sapien
cggcctgccctgcccgtacttattt

SEQ ID NO: 5698838 - DNA, 25 bp, Homo sapien
ctgccctgcccgtacttattttatt

SEQ ID NO: 5698839 - DNA, 25 bp, Homo sapien
cctgccctgcccgtacttattttat

SEQ ID NO: 5698840 - DNA, 25 bp, Homo sapien
gcctgccctgcccgtacttatttta

SEQ ID NO: 5698841 - DNA, 25 bp, Homo sapien
taaaataagtacgggcagggcaggc

SEQ ID NO: 5698842 - DNA, 25 bp, Homo sapien
ataaaataagtacgggcagggcagg

SEQ ID NO: 5698843 - DNA, 25 bp, Homo sapien
aaataagtacgggcagggcaggccg

SEQ ID NO: 5698844 - DNA, 25 bp, Homo sapien
aataaaataagtacgggcagggcag

SEQ ID NO: 5698845 - DNA, 25 bp, Homo sapien
taagtaccagggaggatctgagaga

SEQ ID NO: 5698846 - DNA, 25 bp, Homo sapien
gttgaataagtaccagggaggatct

SEQ ID NO: 5698847 - DNA, 25 bp, Homo sapien
atctgagagatggaagccggcctgc

SEQ ID NO: 5698848 - DNA, 25 bp, Homo sapien
tgagagatggaagccggcctgccct

SEQ ID NO: 5698849 - DNA, 25 bp, Homo sapien
ctgccctgcccgtacttattttatt

SEQ ID NO: 5698850 - DNA, 25 bp, Homo sapien
cctgccctgcccgtacttattttat

SEQ ID NO: 5698851 - DNA, 25 bp, Homo sapien
agggcaggccggcttccatctctca

SEQ ID NO: 5698852 - DNA, 25 bp, Homo sapien
ataaaataagtacgggcagggcagg

SEQ ID NO: 5698853 - DNA, 25 bp, Homo sapien
aataaaataagtacgggcagggcag

SEQ ID NO: 5698854 - DNA, 25 bp, Homo sapien
agatcctccctggtacttattcaac

SEQ ID NO: 5698855 - DNA, 25 bp, Homo sapien
gcaggccggcttccatctctcagat

SEQ ID NO: 5698856 - DNA, 25 bp, Homo sapien
tctctcagatcctccctggtactta

SEQ ID NO: 5698857 - DNA, 25 bp, Homo sapien
ccaggcctggggtgtaggagcggcc

SEQ ID NO: 5698858 - DNA, 25 bp, Homo sapien
tgaaggacggtgagaggaagcaggg

SEQ ID NO: 5698859 - DNA, 25 bp, Homo sapien
gaaggacggtgagaggaagcagggg

SEQ ID NO: 5698860 - DNA, 25 bp, Homo sapien
agatgaaggacggtgagaggaagca

SEQ ID NO: 5698861 - DNA, 25 bp, Homo sapien
ccagatgaaggacggtgagaggaag

SEQ ID NO: 5698862 - DNA, 25 bp, Homo sapien
ggcctggggtgtaggagcggccaga

SEQ ID NO: 5698863 - DNA, 25 bp, Homo sapien
cgggtggccgccagcaatattgtcc

SEQ ID NO: 5698864 - DNA, 25 bp, Homo sapien
ccgggtggccgccagcaatattgtc

SEQ ID NO: 5698865 - DNA, 25 bp, Homo sapien
ggtggccgccagcaatattgtccag

SEQ ID NO: 5698866 - DNA, 25 bp, Homo sapien
gtggccgccagcaatattgtccaga

SEQ ID NO: 5698867 - DNA, 25 bp, Homo sapien
gggtggccgccagcaatattgtcca

SEQ ID NO: 5698868 - DNA, 25 bp, Homo sapien
tggccgccagcaatattgtccagat

SEQ ID NO: 5698869 - DNA, 25 bp, Homo sapien
ctggacaatattgctggcggccacc

SEQ ID NO: 5698870 - DNA, 25 bp, Homo sapien
ggacaatattgctggcggccacccg

SEQ ID NO: 5698871 - DNA, 25 bp, Homo sapien
atctggacaatattgctggcggcca

SEQ ID NO: 5698872 - DNA, 25 bp, Homo sapien
tctggacaatattgctggcggccac

SEQ ID NO: 5698873 - DNA, 25 bp, Homo sapien
tggacaatattgctggcggccaccc

SEQ ID NO: 5698874 - DNA, 25 bp, Homo sapien
gacaatattgctggcggccacccgg

SEQ ID NO: 5698875 - DNA, 25 bp, Homo sapien
ggccgctcctacaccccaggcctgg

SEQ ID NO: 5698876 - DNA, 25 bp, Homo sapien
tggccgctcctacaccccaggcctg

SEQ ID NO: 5698877 - DNA, 25 bp, Homo sapien
tctggccgctcctacaccccaggcc

SEQ ID NO: 5698878 - DNA, 25 bp, Homo sapien
ccctgcttcctctcaccgtccttca

SEQ ID NO: 5698879 - DNA, 25 bp, Homo sapien
cttcctctcaccgtccttcatctgg

SEQ ID NO: 5698880 - DNA, 25 bp, Homo sapien
tgcttcctctcaccgtccttcatct

SEQ ID NO: 5698881 - DNA, 25 bp, Homo sapien
cgccagcaatattgtccagatgaag

SEQ ID NO: 5698882 - DNA, 25 bp, Homo sapien
tgaaggacggtgagaggaagcaggg

SEQ ID NO: 5698883 - DNA, 25 bp, Homo sapien
agatgaaggacggtgagaggaagca

SEQ ID NO: 5698884 - DNA, 25 bp, Homo sapien
gggtggccgccagcaatattgtcca

SEQ ID NO: 5698885 - DNA, 25 bp, Homo sapien
ccagatgaaggacggtgagaggaag

SEQ ID NO: 5698886 - DNA, 25 bp, Homo sapien
ggcctggggtgtaggagcggccaga

SEQ ID NO: 5698887 - DNA, 25 bp, Homo sapien
agtctcgtgctgtgtcggacctgca

SEQ ID NO: 5698888 - DNA, 25 bp, Homo sapien
gcgagtctcgtgctgtgtcggacct

SEQ ID NO: 5698889 - DNA, 25 bp, Homo sapien
ctcgtgctgtgtcggacctgcagcc

SEQ ID NO: 5698890 - DNA, 25 bp, Homo sapien
catcggtatccaaggccccgactat

SEQ ID NO: 5698891 - DNA, 25 bp, Homo sapien
caaggccccgactatgttcttgtcg

SEQ ID NO: 5698892 - DNA, 25 bp, Homo sapien
ggagtacctcatcggtatccaaggc

SEQ ID NO: 5698893 - DNA, 25 bp, Homo sapien
ggctgcaggtccgacacagcacgag

SEQ ID NO: 5698894 - DNA, 25 bp, Homo sapien
gacaagaacatagtcggggccttgg

SEQ ID NO: 5698895 - DNA, 25 bp, Homo sapien
ccttggataccgatgaggtactcca

SEQ ID NO: 5698896 - DNA, 25 bp, Homo sapien
aggtccgacacagcacgagactcgc

SEQ ID NO: 5698897 - DNA, 25 bp, Homo sapien
tgcaggtccgacacagcacgagact

SEQ ID NO: 5698898 - DNA, 25 bp, Homo sapien
gggccttggataccgatgaggtact

SEQ ID NO: 5698899 - DNA, 25 bp, Homo sapien
cacggctatcaatgttacacctaag

SEQ ID NO: 5698900 - DNA, 25 bp, Homo sapien
cttaggtgtaacattgatagccgtg

SEQ ID NO: 5698901 - DNA, 25 bp, Homo sapien
acatgtcagcatgtcagcatgttag

SEQ ID NO: 5698902 - DNA, 25 bp, Homo sapien
ctaacatgctgacatgctgacatgt

SEQ ID NO: 5698903 - DNA, 25 bp, Homo sapien
ggaggtcggagtcctggggccagtc

SEQ ID NO: 5698904 - DNA, 25 bp, Homo sapien
gactggccccaggactccgacctcc

SEQ ID NO: 5698905 - DNA, 25 bp, Homo sapien
tagttttaacaactccttttcacaa

SEQ ID NO: 5698906 - DNA, 25 bp, Homo sapien
ttgtgaaaaggagttgttaaaacta

SEQ ID NO: 5698907 - DNA, 25 bp, Homo sapien
agtaattacattggtagttttaaca

SEQ ID NO: 5698908 - DNA, 25 bp, Homo sapien
tgttaaaactaccaatgtaattact

SEQ ID NO: 5698909 - DNA, 25 bp, Homo sapien
aatcatccgtagatcgcacacgtcc

SEQ ID NO: 5698910 - DNA, 25 bp, Homo sapien
ggacgtgtgcgatctacggatgatt

SEQ ID NO: 5698911 - DNA, 25 bp, Homo sapien
cctgcagcccaagaggtacccgacc

SEQ ID NO: 5698912 - DNA, 25 bp, Homo sapien
ggtcgggtacctcttgggctgcagg

SEQ ID NO: 5698913 - DNA, 25 bp, Homo sapien
acaagagtgcccctcacaagagtct

SEQ ID NO: 5698914 - DNA, 25 bp, Homo sapien
agactcttgtgaggggcactcttgt

SEQ ID NO: 5698915 - DNA, 25 bp, Homo sapien
tctccccacgtgtaacctttcaagt

SEQ ID NO: 5698916 - DNA, 25 bp, Homo sapien
acttgaaaggttacacgtggggaga

SEQ ID NO: 5698917 - DNA, 25 bp, Homo sapien
cggacgagggtgattcggtattcat

SEQ ID NO: 5698918 - DNA, 25 bp, Homo sapien
atgaataccgaatcaccctcgtccg

SEQ ID NO: 5698919 - DNA, 25 bp, Homo sapien
gaccccgtcttagttcaggtcgtgg

SEQ ID NO: 5698920 - DNA, 25 bp, Homo sapien
ccacgacctgaactaagacggggtc

SEQ ID NO: 5698921 - DNA, 25 bp, Homo sapien
gaacgtaaagaagtaaacaggaatg

SEQ ID NO: 5698922 - DNA, 25 bp, Homo sapien
cattcctgtttacttctttacgttc

SEQ ID NO: 5698923 - DNA, 25 bp, Homo sapien
tccggacccccttgcggagacgacg

SEQ ID NO: 5698924 - DNA, 25 bp, Homo sapien
cgtcgtctccgcaagggggtccgga

SEQ ID NO: 5698925 - DNA, 25 bp, Homo sapien
ccatcggaggacgtccagcggagga

SEQ ID NO: 5698926 - DNA, 25 bp, Homo sapien
tcctccgctggacgtcctccgatgg

SEQ ID NO: 5698927 - DNA, 25 bp, Homo sapien
ggcccgaccgtggccggcagtccct

SEQ ID NO: 5698928 - DNA, 25 bp, Homo sapien
agggactgccggccacggtcgggcc

SEQ ID NO: 5698929 - DNA, 25 bp, Homo sapien
agacaggaggtcacattctagaagt

SEQ ID NO: 5698930 - DNA, 25 bp, Homo sapien
acttctagaatgtgacctcctgtct

SEQ ID NO: 5698931 - DNA, 25 bp, Homo sapien
gcgtcgtaaagatccgtcctccaat

SEQ ID NO: 5698932 - DNA, 25 bp, Homo sapien
attggaggacggatctttacgacgc

SEQ ID NO: 5698933 - DNA, 25 bp, Homo sapien
cgagagtcgtggaccaggcaccgtc

SEQ ID NO: 5698934 - DNA, 25 bp, Homo sapien
gacggtgcctggtccacgactctcg

SEQ ID NO: 5698935 - DNA, 25 bp, Homo sapien
agacgatgccaaaaatgacctcgag

SEQ ID NO: 5698936 - DNA, 25 bp, Homo sapien
ctcgaggtcatttttggcatcgtct

SEQ ID NO: 5698937 - DNA, 25 bp, Homo sapien
gaaagaacacaattaatataacatt

SEQ ID NO: 5698938 - DNA, 25 bp, Homo sapien
aatgttatattaattgtgttctttc

SEQ ID NO: 5698939 - DNA, 25 bp, Homo sapien
agaacacaattaatataacattcaa

SEQ ID NO: 5698940 - DNA, 25 bp, Homo sapien
ttgaatgttatattaattgtgttct

SEQ ID NO: 5698941 - DNA, 25 bp, Homo sapien
ttacgtcattcaccggaggtgtccc

SEQ ID NO: 5698942 - DNA, 25 bp, Homo sapien
gggacacctccggtgaatgacgtaa

SEQ ID NO: 5698943 - DNA, 25 bp, Homo sapien
cgcccggcggccgagccgtggcggg

SEQ ID NO: 5698944 - DNA, 25 bp, Homo sapien
cccgccacggctcggccgccgggcg

SEQ ID NO: 5698945 - DNA, 25 bp, Homo sapien
gagtccctggggaacccctctcctg

SEQ ID NO: 5698946 - DNA, 25 bp, Homo sapien
caggagaggggttccccagggactc

SEQ ID NO: 5698947 - DNA, 25 bp, Homo sapien
ggcgcccggcggtcacgcgtgggag

SEQ ID NO: 5698948 - DNA, 25 bp, Homo sapien
ctcccacgcgtgaccgccgggcgcc

SEQ ID NO: 5698949 - DNA, 25 bp, Homo sapien
gatttcccgttgtcaacaccgacag

SEQ ID NO: 5698950 - DNA, 25 bp, Homo sapien
ctgtcggtgttgacaacgggaaatc

SEQ ID NO: 5698951 - DNA, 25 bp, Homo sapien
ggaaccagtcgttcactcggtgtcg

SEQ ID NO: 5698952 - DNA, 25 bp, Homo sapien
cgacaccgagtgaacgactggttcc

SEQ ID NO: 5698953 - DNA, 25 bp, Homo sapien
gacctccccctgtctcgggttcgtg

SEQ ID NO: 5698954 - DNA, 25 bp, Homo sapien
cacgaacccgagacagggggaggtc

SEQ ID NO: 5698955 - DNA, 25 bp, Homo sapien
gaaccgtatcccctgtacttgaaat

SEQ ID NO: 5698956 - DNA, 25 bp, Homo sapien
atttcaagtacaggggatacggttc

SEQ ID NO: 5698957 - DNA, 25 bp, Homo sapien
gaacactatacgacctagacaataa

SEQ ID NO: 5698958 - DNA, 25 bp, Homo sapien
ttattgtctaggtcgtatagtgttc

SEQ ID NO: 5698959 - DNA, 25 bp, Homo sapien
acccggaggctatcgggtccctgct

SEQ ID NO: 5698960 - DNA, 25 bp, Homo sapien
agcagggacccgatagcctccgggt

SEQ ID NO: 5698961 - DNA, 25 bp, Homo sapien
caccggccacaacgtcttccccgtg

SEQ ID NO: 5698962 - DNA, 25 bp, Homo sapien
cacggggaagacgttgtggccggtg

SEQ ID NO: 5698963 - DNA, 25 bp, Homo sapien
cggaggtcttgattcgtcggactac

SEQ ID NO: 5698964 - DNA, 25 bp, Homo sapien
gtagtccgacgaatcaagacctccg

SEQ ID NO: 5698965 - DNA, 25 bp, Homo sapien
catcaaatcgttgaagcaatacacg

SEQ ID NO: 5698966 - DNA, 25 bp, Homo sapien
cgtgtattgcttcaacgatttgatg

SEQ ID NO: 5698967 - DNA, 25 bp, Homo sapien
caggactcacgtaaaggtcacttct

SEQ ID NO: 5698968 - DNA, 25 bp, Homo sapien
agaagtgacctttacgtgagtcctg

SEQ ID NO: 5698969 - DNA, 25 bp, Homo sapien
ttgtacgactagtcgggtagcaccc

SEQ ID NO: 5698970 - DNA, 25 bp, Homo sapien
gggtgctacccgactagtcgtacaa

SEQ ID NO: 5698971 - DNA, 25 bp, Homo sapien
agtagtcccgtgatccgacccggta

SEQ ID NO: 5698972 - DNA, 25 bp, Homo sapien
taccgggtcggatcacgggactact

SEQ ID NO: 5698973 - DNA, 25 bp, Homo sapien
ctcctccccctcgaaacacctgtga

SEQ ID NO: 5698974 - DNA, 25 bp, Homo sapien
tcacaggtgtttcgagggggaggag

SEQ ID NO: 5698975 - DNA, 25 bp, Homo sapien
cgccccggaggacgcagcaggacgc

SEQ ID NO: 5698976 - DNA, 25 bp, Homo sapien
gcgtcctgctgcgtcctccggggcg

SEQ ID NO: 5698977 - DNA, 25 bp, Homo sapien
atggtgaccgttaatttagtctcaa

SEQ ID NO: 5698978 - DNA, 25 bp, Homo sapien
ttgagactaaattaacggtcaccat

SEQ ID NO: 5698979 - DNA, 25 bp, Homo sapien
gggcactgaggaccgccgccgggtc

SEQ ID NO: 5698980 - DNA, 25 bp, Homo sapien
gacccggcggcggtcctcagtgccc

SEQ ID NO: 5698981 - DNA, 25 bp, Homo sapien
ggggtgcactcccaactcccacgtc

SEQ ID NO: 5698982 - DNA, 25 bp, Homo sapien
gacgtgggagttgggagtgcacccc

SEQ ID NO: 5698983 - DNA, 25 bp, Homo sapien
gattcctccttataacatacacgta

SEQ ID NO: 5698984 - DNA, 25 bp, Homo sapien
tacgtgtatgttataaggaggaatc

SEQ ID NO: 5698985 - DNA, 25 bp, Homo sapien
aactagaggaaggaataacagagac

SEQ ID NO: 5698986 - DNA, 25 bp, Homo sapien
gtctctgttattccttcctctagtt

SEQ ID NO: 5698987 - DNA, 25 bp, Homo sapien
ggtcaaacttcaccgttaagtcagt

SEQ ID NO: 5698988 - DNA, 25 bp, Homo sapien
actgacttaacggtgaagtttgacc

SEQ ID NO: 5698989 - DNA, 25 bp, Homo sapien
cgtcgcggaagttctgaggccaacc

SEQ ID NO: 5698990 - DNA, 25 bp, Homo sapien
ggttggcctcagaacttccgcgacg

SEQ ID NO: 5698991 - DNA, 25 bp, Homo sapien
cagagggcgaccctagcgctagcgg

SEQ ID NO: 5698992 - DNA, 25 bp, Homo sapien
ccgctagcgctagggtcgccctctg

SEQ ID NO: 5698993 - DNA, 25 bp, Homo sapien
acgagcgggaccacgaacttcggac

SEQ ID NO: 5698994 - DNA, 25 bp, Homo sapien
gtccgaagttcgtggtcccgctcgt

SEQ ID NO: 5698995 - DNA, 25 bp, Homo sapien
agataggactctccgaacacccacg

SEQ ID NO: 5698996 - DNA, 25 bp, Homo sapien
cgtgggtgttcggagagtcctatct

SEQ ID NO: 5698997 - DNA, 25 bp, Homo sapien
agaacactctacaacgaggacccgg

SEQ ID NO: 5698998 - DNA, 25 bp, Homo sapien
ccgggtcctcgttgtagagtgttct

SEQ ID NO: 5698999 - DNA, 25 bp, Homo sapien
aagttcacacctctattgaatctta

SEQ ID NO: 5699000 - DNA, 25 bp, Homo sapien
taagattcaatagaggtgtgaactt

SEQ ID NO: 5699001 - DNA, 25 bp, Homo sapien
tctacttgtaaactgaaagtcttag

SEQ ID NO: 5699002 - DNA, 25 bp, Homo sapien
ctaagactttcagtttacaagtaga

SEQ ID NO: 5699003 - DNA, 25 bp, Homo sapien
ttaaagtcattactcttttcccacg

SEQ ID NO: 5699004 - DNA, 25 bp, Homo sapien
cgtgggaaaagagtaatgactttaa

SEQ ID NO: 5699005 - DNA, 25 bp, Homo sapien
tgtcgactgtggtagactcgggtca

SEQ ID NO: 5699006 - DNA, 25 bp, Homo sapien
tgacccgagtctaccacagtcgaca

SEQ ID NO: 5699007 - DNA, 25 bp, Homo sapien
aatcatcataaataatagtagtaac

SEQ ID NO: 5699008 - DNA, 25 bp, Homo sapien
gttactactattatttatgatgatt

SEQ ID NO: 5699009 - DNA, 25 bp, Homo sapien
ccgacacgactcgaccctcggactg

SEQ ID NO: 5699010 - DNA, 25 bp, Homo sapien
cagtccgagggtcgagtcgtgtcgg

SEQ ID NO: 5699011 - DNA, 25 bp, Homo sapien
gtcccgacacgactcgaccctcgga

SEQ ID NO: 5699012 - DNA, 25 bp, Homo sapien
tccgagggtcgagtcgtgtcgggac

SEQ ID NO: 5699013 - DNA, 25 bp, Homo sapien
ggtctccaccttgcaaccgggaaga

SEQ ID NO: 5699014 - DNA, 25 bp, Homo sapien
tcttcccggttgcaaggtggagacc

SEQ ID NO: 5699015 - DNA, 25 bp, Homo sapien
cgtggcccggtccgcgacccttatg

SEQ ID NO: 5699016 - DNA, 25 bp, Homo sapien
cataagggtcgcggaccgggccacg

SEQ ID NO: 5699017 - DNA, 25 bp, Homo sapien
gcgcattaccgaaccgaccggacat

SEQ ID NO: 5699018 - DNA, 25 bp, Homo sapien
atgtccggtcggttcggtaatgcgc

SEQ ID NO: 5699019 - DNA, 25 bp, Homo sapien
tcgcgggtgggctagggtgtgcctc

SEQ ID NO: 5699020 - DNA, 25 bp, Homo sapien
gaggcacaccctagcccacccgcga

SEQ ID NO: 5699021 - DNA, 25 bp, Homo sapien
ttgttaccgttatggactccctccg

SEQ ID NO: 5699022 - DNA, 25 bp, Homo sapien
cggagggagtccataacggtaacaa

SEQ ID NO: 5699023 - DNA, 25 bp, Homo sapien
acctgactttatttaaacagtctgt

SEQ ID NO: 5699024 - DNA, 25 bp, Homo sapien
acagactgtttaaataaagtcaggt

SEQ ID NO: 5699025 - DNA, 25 bp, Homo sapien
gagtgtcaacgaagttgtcacctct

SEQ ID NO: 5699026 - DNA, 25 bp, Homo sapien
agaggtgacaacttcgttgacactc

SEQ ID NO: 5699027 - DNA, 25 bp, Homo sapien
gtcccgggtcatgaccccactgtgg

SEQ ID NO: 5699028 - DNA, 25 bp, Homo sapien
ccacagtggggtcatgacccgggac

SEQ ID NO: 5699029 - DNA, 25 bp, Homo sapien
gaccggctagaggcggtggtcccgg

SEQ ID NO: 5699030 - DNA, 25 bp, Homo sapien
ccgggaccaccgcctctagccggtc

SEQ ID NO: 5699031 - DNA, 25 bp, Homo sapien
cgtagtttgagacagaactaaagta

SEQ ID NO: 5699032 - DNA, 25 bp, Homo sapien
tactttagttctgtctcaaactacg

SEQ ID NO: 5699033 - DNA, 25 bp, Homo sapien
gggtctcgttcgacctgacacttca

SEQ ID NO: 5699034 - DNA, 25 bp, Homo sapien
tgaagtgtcaggtcgaacgagaccc

SEQ ID NO: 5699035 - DNA, 25 bp, Homo sapien
gtgtcgtcgccgacgggacgtctga

SEQ ID NO: 5699036 - DNA, 25 bp, Homo sapien
tcagacgtcccgtcggcgacgacac

SEQ ID NO: 5699037 - DNA, 25 bp, Homo sapien
acttggtattggaagactcactttc

SEQ ID NO: 5699038 - DNA, 25 bp, Homo sapien
gaaagtgagtcttccaataccaagt

SEQ ID NO: 5699039 - DNA, 25 bp, Homo sapien
gaaatcgtggagagggtgacacaac

SEQ ID NO: 5699040 - DNA, 25 bp, Homo sapien
gttgtgtcaccctctccacgatttc

SEQ ID NO: 5699041 - DNA, 25 bp, Homo sapien
gggacgaaagactgacgggcccttc

SEQ ID NO: 5699042 - DNA, 25 bp, Homo sapien
gaagggcccgtcagtctttcgtccc

SEQ ID NO: 5699043 - DNA, 25 bp, Homo sapien
gaaaagatcgttcttaagaaacaaa

SEQ ID NO: 5699044 - DNA, 25 bp, Homo sapien
tttgtttcttaagaacgatcttttc

SEQ ID NO: 5699045 - DNA, 25 bp, Homo sapien
tcaacgacgtcctgatacactcgaa

SEQ ID NO: 5699046 - DNA, 25 bp, Homo sapien
ttcgagtgtatcaggacgtcgttga

SEQ ID NO: 5699047 - DNA, 25 bp, Homo sapien
tagaaccgaaggtgtagcttagggt

SEQ ID NO: 5699048 - DNA, 25 bp, Homo sapien
accctaagctacaccttcggttcta

SEQ ID NO: 5699049 - DNA, 25 bp, Homo sapien
agactctctgagaagaatatggaaa

SEQ ID NO: 5699050 - DNA, 25 bp, Homo sapien
tttccatattcttctcagagagtct

SEQ ID NO: 5699051 - DNA, 25 bp, Homo sapien
tcctcgtcgcccgttccgagaggga

SEQ ID NO: 5699052 - DNA, 25 bp, Homo sapien
tccctctcggaacgggcgacgagga

SEQ ID NO: 5699053 - DNA, 25 bp, Homo sapien
gtcctcgtcgcccgttccgagaggg

SEQ ID NO: 5699054 - DNA, 25 bp, Homo sapien
ccctctcggaacgggcgacgaggac

SEQ ID NO: 5699055 - DNA, 25 bp, Homo sapien
cctatggaattgtgatagacaaaat

SEQ ID NO: 5699056 - DNA, 25 bp, Homo sapien
attttgtctatcacaattccatagg

SEQ ID NO: 5699057 - DNA, 25 bp, Homo sapien
tacggtaggcagcaccccttctctt

SEQ ID NO: 5699058 - DNA, 25 bp, Homo sapien
aagagaaggggtgctgcctaccgta

SEQ ID NO: 5699059 - DNA, 25 bp, Homo sapien
tccctccttcggttggtactaccaa

SEQ ID NO: 5699060 - DNA, 25 bp, Homo sapien
ttggtagtaccaaccgaaggaggga

SEQ ID NO: 5699061 - DNA, 25 bp, Homo sapien
gtatcggttaacttatcataatcag

SEQ ID NO: 5699062 - DNA, 25 bp, Homo sapien
ctgattatgataagttaaccgatac

SEQ ID NO: 5699063 - DNA, 25 bp, Homo sapien
gaatgaaactaagtatcggttaact

SEQ ID NO: 5699064 - DNA, 25 bp, Homo sapien
agttaaccgatacttagtttcattc

SEQ ID NO: 5699065 - DNA, 25 bp, Homo sapien
acgagtgaggtcagtcctgaacggg

SEQ ID NO: 5699066 - DNA, 25 bp, Homo sapien
cccgttcaggactgacctcactcgt

SEQ ID NO: 5699067 - DNA, 25 bp, Homo sapien
agactcttctcttactaatgttagt

SEQ ID NO: 5699068 - DNA, 25 bp, Homo sapien
actaacattagtaagagaagagtct

SEQ ID NO: 5699069 - DNA, 25 bp, Homo sapien
ggtccaccccctgtcatcgcccttg

SEQ ID NO: 5699070 - DNA, 25 bp, Homo sapien
caagggcgatgacagggggtggacc

SEQ ID NO: 5699071 - DNA, 25 bp, Homo sapien
agaaagattcaagttctcgatcaaa

SEQ ID NO: 5699072 - DNA, 25 bp, Homo sapien
tttgatcgagaacttgaatctttct

SEQ ID NO: 5699073 - DNA, 25 bp, Homo sapien
gttgggaactggaggggtctgcacc

SEQ ID NO: 5699074 - DNA, 25 bp, Homo sapien
ggtgcagacccctccagttcccaac

SEQ ID NO: 5699075 - DNA, 25 bp, Homo sapien
ggacgtatgagaccctgggagggaa

SEQ ID NO: 5699076 - DNA, 25 bp, Homo sapien
ttccctcccagggtctcatacgtcc

SEQ ID NO: 5699077 - DNA, 25 bp, Homo sapien
gcgcctcggcctctcgctgaagggg

SEQ ID NO: 5699078 - DNA, 25 bp, Homo sapien
ccccttcagcgagaggccgaggcgc

SEQ ID NO: 5699079 - DNA, 25 bp, Homo sapien
acctaccaaccaatacttgaggaag

SEQ ID NO: 5699080 - DNA, 25 bp, Homo sapien
cttcctcaagtattggttggtaggt

SEQ ID NO: 5699081 - DNA, 25 bp, Homo sapien
aggacacgtcggaaccaactctttc

SEQ ID NO: 5699082 - DNA, 25 bp, Homo sapien
gaaagagttggttccgacgtgtcct

SEQ ID NO: 5699083 - DNA, 25 bp, Homo sapien
ctacggactcgttggccgcggagac

SEQ ID NO: 5699084 - DNA, 25 bp, Homo sapien
gtctccgcggccaacgagtccgtag

SEQ ID NO: 5699085 - DNA, 25 bp, Homo sapien
acgggtgacgctgctaaagagtaat

SEQ ID NO: 5699086 - DNA, 25 bp, Homo sapien
attactctttagcagcgtcacccgt

SEQ ID NO: 5699087 - DNA, 25 bp, Homo sapien
aatatattcgactacagataaacta

SEQ ID NO: 5699088 - DNA, 25 bp, Homo sapien
tagtttatctgtagtcgaatatatt

SEQ ID NO: 5699089 - DNA, 25 bp, Homo sapien
atatattcgactacagataaactaa

SEQ ID NO: 5699090 - DNA, 25 bp, Homo sapien
ttagtttatctgtagtcgaatatat

SEQ ID NO: 5699091 - DNA, 25 bp, Homo sapien
aagtttgaaaagtatgtctatatcg

SEQ ID NO: 5699092 - DNA, 25 bp, Homo sapien
cgatatagacatacttttcaaactt

SEQ ID NO: 5699093 - DNA, 25 bp, Homo sapien
ggttattccgccgtccccttctcag

SEQ ID NO: 5699094 - DNA, 25 bp, Homo sapien
ctgagaaggggacggcggaataacc

SEQ ID NO: 5699095 - DNA, 25 bp, Homo sapien
agcgagagataggagtaagggtgag

SEQ ID NO: 5699096 - DNA, 25 bp, Homo sapien
ctcacccttactcctatctctcgct

SEQ ID NO: 5699097 - DNA, 25 bp, Homo sapien
ggcacggactgcagcccccgctcgg

SEQ ID NO: 5699098 - DNA, 25 bp, Homo sapien
ccgagcgggggctgcagtccgtgcc

SEQ ID NO: 5699099 - DNA, 25 bp, Homo sapien
gtctttctgcttggccaagatacgg

SEQ ID NO: 5699100 - DNA, 25 bp, Homo sapien
ccgtatcttggccaagcagaaagac

SEQ ID NO: 5699101 - DNA, 25 bp, Homo sapien
cggtctctaaggctggtccgtcctc

SEQ ID NO: 5699102 - DNA, 25 bp, Homo sapien
gaggacggaccagccttagagaccg

SEQ ID NO: 5699103 - DNA, 25 bp, Homo sapien
ggacacgtttcaaccggtggcggag

SEQ ID NO: 5699104 - DNA, 25 bp, Homo sapien
ctccgccaccggttgaaacgtgtcc

SEQ ID NO: 5699105 - DNA, 25 bp, Homo sapien
gggcacgttccacaccagtgaggtt

SEQ ID NO: 5699106 - DNA, 25 bp, Homo sapien
aacctcactggtgtggaacgtgccc

SEQ ID NO: 5699107 - DNA, 25 bp, Homo sapien
tcataagaaagtcgacagatttaag

SEQ ID NO: 5699108 - DNA, 25 bp, Homo sapien
cttaaatctgtcgactttcttatga

SEQ ID NO: 5699109 - DNA, 25 bp, Homo sapien
ccgggtctcacacgtcggtcggcct

SEQ ID NO: 5699110 - DNA, 25 bp, Homo sapien
aggccgaccgacgtgtgagacccgg

SEQ ID NO: 5699111 - DNA, 25 bp, Homo sapien
tccgttccgggtctcacacgtcggt

SEQ ID NO: 5699112 - DNA, 25 bp, Homo sapien
accgacgtgtgagacccggaacgga

SEQ ID NO: 5699113 - DNA, 25 bp, Homo sapien
tgaccctgatactctcgtgtccgag

SEQ ID NO: 5699114 - DNA, 25 bp, Homo sapien
ctcggacacgagagtatcagggtca

SEQ ID NO: 5699115 - DNA, 25 bp, Homo sapien
cactcggggtgcgtttggtcgtctc

SEQ ID NO: 5699116 - DNA, 25 bp, Homo sapien
gagacgaccaaacgcaccccgagtg

SEQ ID NO: 5699117 - DNA, 25 bp, Homo sapien
ctcgggctcctccaccttgtcccgg

SEQ ID NO: 5699118 - DNA, 25 bp, Homo sapien
ccgggacaaggtggaggagcccgag

SEQ ID NO: 5699119 - DNA, 25 bp, Homo sapien
ggaccaatcagacgtgacgtctccg

SEQ ID NO: 5699120 - DNA, 25 bp, Homo sapien
cggagacgtcacgtctgattggtcc

SEQ ID NO: 5699121 - DNA, 25 bp, Homo sapien
taggacatgtttggttgatgtagga

SEQ ID NO: 5699122 - DNA, 25 bp, Homo sapien
tcctacatcaaccaaacatgtccta

SEQ ID NO: 5699123 - DNA, 25 bp, Homo sapien
gcccccactcaggtgtgccgactgg

SEQ ID NO: 5699124 - DNA, 25 bp, Homo sapien
ccagtcggcacacctgagtgggggc

SEQ ID NO: 5699125 - DNA, 25 bp, Homo sapien
aactgtcgagacattaaattaacat

SEQ ID NO: 5699126 - DNA, 25 bp, Homo sapien
atgttaatttaatgtctcgacagtt

SEQ ID NO: 5699127 - DNA, 25 bp, Homo sapien
atctaaaaatacagtaacacctttc

SEQ ID NO: 5699128 - DNA, 25 bp, Homo sapien
gaaaggtgttactgtatttttagat

SEQ ID NO: 5699129 - DNA, 25 bp, Homo sapien
gggaggagaaagtctaggtagtcgt

SEQ ID NO: 5699130 - DNA, 25 bp, Homo sapien
acgactacctagactttctcctccc

SEQ ID NO: 5699131 - DNA, 25 bp, Homo sapien
ggcggtcggtggccccctggtcggc

SEQ ID NO: 5699132 - DNA, 25 bp, Homo sapien
gccgaccagggggccaccgaccgcc

SEQ ID NO: 5699133 - DNA, 25 bp, Homo sapien
cctggacgctccacgccgacggcgt

SEQ ID NO: 5699134 - DNA, 25 bp, Homo sapien
acgccgtcggcgtggagcgtccagg

SEQ ID NO: 5699135 - DNA, 25 bp, Homo sapien
gcggcgaaggcgcagccccagccgg

SEQ ID NO: 5699136 - DNA, 25 bp, Homo sapien
ccggctggggctgcgccttcgccgc

SEQ ID NO: 5699137 - DNA, 25 bp, Homo sapien
ggcgaccgagcccgaacctggagcc

SEQ ID NO: 5699138 - DNA, 25 bp, Homo sapien
ggctccaggttcgggctcggtcgcc

SEQ ID NO: 5699139 - DNA, 25 bp, Homo sapien
gacctcggggtctaccgccccgtga

SEQ ID NO: 5699140 - DNA, 25 bp, Homo sapien
tcacggggcggtagaccccgaggtc

SEQ ID NO: 5699141 - DNA, 25 bp, Homo sapien
ggttggtgccgcccagtcgtgccgc

SEQ ID NO: 5699142 - DNA, 25 bp, Homo sapien
gcggcacgactgggcggcaccaacc

SEQ ID NO: 5699143 - DNA, 25 bp, Homo sapien
gtcgtcctttcctgcggtgaccgct

SEQ ID NO: 5699144 - DNA, 25 bp, Homo sapien
agcggtcaccgcaggaaaggacgac

SEQ ID NO: 5699145 - DNA, 25 bp, Homo sapien
cggagcctcccgttctgaggacgaa

SEQ ID NO: 5699146 - DNA, 25 bp, Homo sapien
ttcgtcctcagaacgggaggctccg

SEQ ID NO: 5699147 - DNA, 25 bp, Homo sapien
agacagagtcaggacattatcagta

SEQ ID NO: 5699148 - DNA, 25 bp, Homo sapien
tactgataatgtcctgactctgtct

SEQ ID NO: 5699149 - DNA, 25 bp, Homo sapien
gaaggaaccaagctacgtccgagag

SEQ ID NO: 5699150 - DNA, 25 bp, Homo sapien
ctctcggacgtagcttggttccttc

SEQ ID NO: 5699151 - DNA, 25 bp, Homo sapien
ggctgccgcccaccgacaccacgta

SEQ ID NO: 5699152 - DNA, 25 bp, Homo sapien
tacgtggtgtcggtgggcggcagcc

SEQ ID NO: 5699153 - DNA, 25 bp, Homo sapien
catcgaccgtcataattggtgagag

SEQ ID NO: 5699154 - DNA, 25 bp, Homo sapien
ctctcaccaattatgacggtcgatg

SEQ ID NO: 5699155 - DNA, 25 bp, Homo sapien
gaccgtcataattggtgagagaacc

SEQ ID NO: 5699156 - DNA, 25 bp, Homo sapien
ggttctctcaccaattatgacggtc

SEQ ID NO: 5699157 - DNA, 25 bp, Homo sapien
tttatgaaaagtaggcttctgttct

SEQ ID NO: 5699158 - DNA, 25 bp, Homo sapien
agaacagaagcctacttttcataaa

SEQ ID NO: 5699159 - DNA, 25 bp, Homo sapien
gagtcttccagaggtcatgtgtaaa

SEQ ID NO: 5699160 - DNA, 25 bp, Homo sapien
tttacacatgacctctggaagactc

SEQ ID NO: 5699161 - DNA, 25 bp, Homo sapien
ccgtagacgtaggtcatggaagcgt

SEQ ID NO: 5699162 - DNA, 25 bp, Homo sapien
acgcttccatgacctacgtctacgg

SEQ ID NO: 5699163 - DNA, 25 bp, Homo sapien
gtggtcccgttacccactcgcgagc

SEQ ID NO: 5699164 - DNA, 25 bp, Homo sapien
gctcgcgagtgggtaacgggaccac

SEQ ID NO: 5699165 - DNA, 25 bp, Homo sapien
ggaccatagcattgtaagggttcgg

SEQ ID NO: 5699166 - DNA, 25 bp, Homo sapien
ccgaacccttacaatgctatggtcc

SEQ ID NO: 5699167 - DNA, 25 bp, Homo sapien
ctctttataacgtccttgtcgtagc

SEQ ID NO: 5699168 - DNA, 25 bp, Homo sapien
gctacgacaaggacgttataaagag

SEQ ID NO: 5699169 - DNA, 25 bp, Homo sapien
acgaaagagaccctgtggttactca

SEQ ID NO: 5699170 - DNA, 25 bp, Homo sapien
tgagtaaccacagggtctctttcgt

SEQ ID NO: 5699171 - DNA, 25 bp, Homo sapien
gggtctgggtcgctcctcccgcggc

SEQ ID NO: 5699172 - DNA, 25 bp, Homo sapien
gccgcgggaggagcgacccagaccc

SEQ ID NO: 5699173 - DNA, 25 bp, Homo sapien
cctggggtctgggtcgctcctcccg

SEQ ID NO: 5699174 - DNA, 25 bp, Homo sapien
cgggaggagcgacccagaccccagg

SEQ ID NO: 5699175 - DNA, 25 bp, Homo sapien
cttcctctggcgacctcccggggtc

SEQ ID NO: 5699176 - DNA, 25 bp, Homo sapien
gaccccgggaggtcgccagaggaag

SEQ ID NO: 5699177 - DNA, 25 bp, Homo sapien
ctaacacatgacgaagagattcaat

SEQ ID NO: 5699178 - DNA, 25 bp, Homo sapien
attgaatctcttcgtcatgtgttag

SEQ ID NO: 5699179 - DNA, 25 bp, Homo sapien
tacactttacagatttcatcttaaa

SEQ ID NO: 5699180 - DNA, 25 bp, Homo sapien
tttaagatgaaatctgtaaagtgta

SEQ ID NO: 5699181 - DNA, 25 bp, Homo sapien
attcatcttgacctctaaaattctt

SEQ ID NO: 5699182 - DNA, 25 bp, Homo sapien
aagaattttagaggtcaagatgaat

SEQ ID NO: 5699183 - DNA, 25 bp, Homo sapien
ctcctccggttcaccgacagggtgg

SEQ ID NO: 5699184 - DNA, 25 bp, Homo sapien
ccaccctgtcggtgaaccggaggag

SEQ ID NO: 5699185 - DNA, 25 bp, Homo sapien
tccatcaccggccctccctcggacc

SEQ ID NO: 5699186 - DNA, 25 bp, Homo sapien
ggtccgagggagggccggtgatgga

SEQ ID NO: 5699187 - DNA, 25 bp, Homo sapien
ggtaccacctttgttctacgataac

SEQ ID NO: 5699188 - DNA, 25 bp, Homo sapien
gttatcgtagaacaaaggtggtacc

SEQ ID NO: 5699189 - DNA, 25 bp, Homo sapien
acatagggtcgtcattggaaagact

SEQ ID NO: 5699190 - DNA, 25 bp, Homo sapien
agtctttccaatgacgaccctatgt

SEQ ID NO: 5699191 - DNA, 25 bp, Homo sapien
attaacgacatgaatatactaaaga

SEQ ID NO: 5699192 - DNA, 25 bp, Homo sapien
tctttagtatattcatgtcgttaat

SEQ ID NO: 5699193 - DNA, 25 bp, Homo sapien
aattaacgacatgaatatactaaag

SEQ ID NO: 5699194 - DNA, 25 bp, Homo sapien
ctttagtatattcatgtcgttaatt

SEQ ID NO: 5699195 - DNA, 25 bp, Homo sapien
gaccgtcggtgtgctgacaggccgg

SEQ ID NO: 5699196 - DNA, 25 bp, Homo sapien
ccggcctgtcagcacaccgacggtc

SEQ ID NO: 5699197 - DNA, 25 bp, Homo sapien
ccagacaccggtataagaaccgtta

SEQ ID NO: 5699198 - DNA, 25 bp, Homo sapien
taacggttcttataccggtgtctgg

SEQ ID NO: 5699199 - DNA, 25 bp, Homo sapien
gcccccgacgcccggtctccgagcc

SEQ ID NO: 5699200 - DNA, 25 bp, Homo sapien
ggctcggagaccgggcgtcgggggc

SEQ ID NO: 5699201 - DNA, 25 bp, Homo sapien
ttaatataaacttccctttattatc

SEQ ID NO: 5699202 - DNA, 25 bp, Homo sapien
gataataaagggaagtttatattaa

SEQ ID NO: 5699203 - DNA, 25 bp, Homo sapien
gaataggacacactaaggacaaagt

SEQ ID NO: 5699204 - DNA, 25 bp, Homo sapien
actttgtccttagtgtgtcctattc

SEQ ID NO: 5699205 - DNA, 25 bp, Homo sapien
cgtcgcggtgcggaacgcgggccgc

SEQ ID NO: 5699206 - DNA, 25 bp, Homo sapien
gcggcccgcgttccgcaccgcgacg

SEQ ID NO: 5699207 - DNA, 25 bp, Homo sapien
tgcattccaaccgtacgtaaaaggg

SEQ ID NO: 5699208 - DNA, 25 bp, Homo sapien
cccttttacgtacggttggaatgca

SEQ ID NO: 5699209 - DNA, 25 bp, Homo sapien
gaaaatggaagtttgttaactagtg

SEQ ID NO: 5699210 - DNA, 25 bp, Homo sapien
cactagttaacaaacttccattttc

SEQ ID NO: 5699211 - DNA, 25 bp, Homo sapien
gcagcctcgcctctctcgggtgctc

SEQ ID NO: 5699212 - DNA, 25 bp, Homo sapien
gagcacccgagagaggcgaggctgc

SEQ ID NO: 5699213 - DNA, 25 bp, Homo sapien
tatcccctagataacattgtgggtg

SEQ ID NO: 5699214 - DNA, 25 bp, Homo sapien
cacccacaatgttatctaggggata

SEQ ID NO: 5699215 - DNA, 25 bp, Homo sapien
cgtcctgtacgggtattcctcgcag

SEQ ID NO: 5699216 - DNA, 25 bp, Homo sapien
ctgcgaggaatacccgtacaggacg

SEQ ID NO: 5699217 - DNA, 25 bp, Homo sapien
tgtcgtcgaacgagtgccgaggaac

SEQ ID NO: 5699218 - DNA, 25 bp, Homo sapien
gttcctcggcactcgttcgacgaca

SEQ ID NO: 5699219 - DNA, 25 bp, Homo sapien
gacgcacagacagtagtgcaactgg

SEQ ID NO: 5699220 - DNA, 25 bp, Homo sapien
ccagttgcactactgtctgtgcgtc

SEQ ID NO: 5699221 - DNA, 25 bp, Homo sapien
aagaaccctctggtgcaacgactgt

SEQ ID NO: 5699222 - DNA, 25 bp, Homo sapien
acagtcgttgcaccagagggttctt

SEQ ID NO: 5699223 - DNA, 25 bp, Homo sapien
ccattctgcatgtgtgtctattggc

SEQ ID NO: 5699224 - DNA, 25 bp, Homo sapien
gccaatagacacacatgcagaatgg

SEQ ID NO: 5699225 - DNA, 25 bp, Homo sapien
tgtgtcgtcccccttgaagttgtcc

SEQ ID NO: 5699226 - DNA, 25 bp, Homo sapien
ggacaacttcaagggggacgacaca

SEQ ID NO: 5699227 - DNA, 25 bp, Homo sapien
gccactggccagaggacagaccgga

SEQ ID NO: 5699228 - DNA, 25 bp, Homo sapien
tccggtctgtcctctggccagtggc

SEQ ID NO: 5699229 - DNA, 25 bp, Homo sapien
tagtattaccaatctagagtctaat

SEQ ID NO: 5699230 - DNA, 25 bp, Homo sapien
attagactctagattggtaatacta

SEQ ID NO: 5699231 - DNA, 25 bp, Homo sapien
ccgaagtggtcaaaggccgtagtta

SEQ ID NO: 5699232 - DNA, 25 bp, Homo sapien
taactacggcctttgaccacttcgg

SEQ ID NO: 5699233 - DNA, 25 bp, Homo sapien
tcgggattccgattccttgaactct

SEQ ID NO: 5699234 - DNA, 25 bp, Homo sapien
agagttcaaggaatcggaatcccga

SEQ ID NO: 5699235 - DNA, 25 bp, Homo sapien
aaacggatgcatgaatagttgaagg

SEQ ID NO: 5699236 - DNA, 25 bp, Homo sapien
ccttcaactattcatgcatccgttt

SEQ ID NO: 5699237 - DNA, 25 bp, Homo sapien
ctacttttgtaagcatggttctaca

SEQ ID NO: 5699238 - DNA, 25 bp, Homo sapien
tgtagaaccatgcttacaaaagtag

SEQ ID NO: 5699239 - DNA, 25 bp, Homo sapien
aatacaatagttatagagcttctac

SEQ ID NO: 5699240 - DNA, 25 bp, Homo sapien
gtagaagctctataactattgtatt

SEQ ID NO: 5699241 - DNA, 25 bp, Homo sapien
tccaccttccccctctgtgccctac

SEQ ID NO: 5699242 - DNA, 25 bp, Homo sapien
gtagggcacagagggggaaggtgga

SEQ ID NO: 5699243 - DNA, 25 bp, Homo sapien
ttcacccgtgccacagacgatgttt

SEQ ID NO: 5699244 - DNA, 25 bp, Homo sapien
aaacatcgtctgtggcacgggtgaa

SEQ ID NO: 5699245 - DNA, 25 bp, Homo sapien
taccaatgttcgagggcccggagtg

SEQ ID NO: 5699246 - DNA, 25 bp, Homo sapien
cactccgggccctcgaacattggta

SEQ ID NO: 5699247 - DNA, 25 bp, Homo sapien
ctctttacccggagagacccgatgg

SEQ ID NO: 5699248 - DNA, 25 bp, Homo sapien
ccatcgggtctctccgggtaaagag

SEQ ID NO: 5699249 - DNA, 25 bp, Homo sapien
aagttcaaacaagagtatcagtaat

SEQ ID NO: 5699250 - DNA, 25 bp, Homo sapien
attactgatactcttgtttgaactt

SEQ ID NO: 5699251 - DNA, 25 bp, Homo sapien
ccgtattgttttaccgatactcttg

SEQ ID NO: 5699252 - DNA, 25 bp, Homo sapien
caagagtatcggtaaaacaatacgg

SEQ ID NO: 5699253 - DNA, 25 bp, Homo sapien
agtcagaggtattactggttggtat

SEQ ID NO: 5699254 - DNA, 25 bp, Homo sapien
ataccaaccagtaatacctctgact

SEQ ID NO: 5699255 - DNA, 25 bp, Homo sapien
aagagatcatccaccaaatagaagt

SEQ ID NO: 5699256 - DNA, 25 bp, Homo sapien
acttctatttggtggatgatctctt

SEQ ID NO: 5699257 - DNA, 25 bp, Homo sapien
tgcagttgcggttggagcccctgac

SEQ ID NO: 5699258 - DNA, 25 bp, Homo sapien
gtcaggggctccaaccgcaactgca

SEQ ID NO: 5699259 - DNA, 25 bp, Homo sapien
ccccacgggtcgtgtgcgtgcagtt

SEQ ID NO: 5699260 - DNA, 25 bp, Homo sapien
aactgcacgcacacgacccgtgggg

SEQ ID NO: 5699261 - DNA, 25 bp, Homo sapien
gtcttatcagatattaaccctattt

SEQ ID NO: 5699262 - DNA, 25 bp, Homo sapien
aaatagggttaatatctgataagac

SEQ ID NO: 5699263 - DNA, 25 bp, Homo sapien
tcgacctcccctacgctacacttac

SEQ ID NO: 5699264 - DNA, 25 bp, Homo sapien
gtaagtgtagcgtaggggaggtcga

SEQ ID NO: 5699265 - DNA, 25 bp, Homo sapien
agttgttttattcagtactaatact

SEQ ID NO: 5699266 - DNA, 25 bp, Homo sapien
agtattagtactgaataaaacaact

SEQ ID NO: 5699267 - DNA, 25 bp, Homo sapien
aattggttctttacacgagagtgtt

SEQ ID NO: 5699268 - DNA, 25 bp, Homo sapien
aacactctcgtgtaaagaaccaatt

SEQ ID NO: 5699269 - DNA, 25 bp, Homo sapien
gaggatccatggaccaccagtggag

SEQ ID NO: 5699270 - DNA, 25 bp, Homo sapien
ctccactggtggtccatggatcctc

SEQ ID NO: 5699271 - DNA, 25 bp, Homo sapien
gccagcccccagagcccgcgtcggg

SEQ ID NO: 5699272 - DNA, 25 bp, Homo sapien
cccgacgcgggctctgggggctggc

SEQ ID NO: 5699273 - DNA, 25 bp, Homo sapien
aaagaatctggatactccaattgat

SEQ ID NO: 5699274 - DNA, 25 bp, Homo sapien
atcaattggagtatccagattcttt

SEQ ID NO: 5699275 - DNA, 25 bp, Homo sapien
agtccgctgacatagctaacatgac

SEQ ID NO: 5699276 - DNA, 25 bp, Homo sapien
gtcatgttagctatgtcagcggact

SEQ ID NO: 5699277 - DNA, 25 bp, Homo sapien
gcgtcgggcaccctcccggagcggg

SEQ ID NO: 5699278 - DNA, 25 bp, Homo sapien
cccgctccgggagggtgcccgacgc

SEQ ID NO: 5699279 - DNA, 25 bp, Homo sapien
gcggcgtcgggcaccctcccggagc

SEQ ID NO: 5699280 - DNA, 25 bp, Homo sapien
gctccgggagggtgcccgacgccgc

SEQ ID NO: 5699281 - DNA, 25 bp, Homo sapien
ccggccgtccgctcggccactgcgg

SEQ ID NO: 5699282 - DNA, 25 bp, Homo sapien
ccgcagtggccgagcggacggccgg

SEQ ID NO: 5699283 - DNA, 25 bp, Homo sapien
ccgccggcctccagccccgagtgat

SEQ ID NO: 5699284 - DNA, 25 bp, Homo sapien
atcactcggggctggaggccggcgg

SEQ ID NO: 5699285 - DNA, 25 bp, Homo sapien
gtcgtgtgcgcctcgtctgtccttc

SEQ ID NO: 5699286 - DNA, 25 bp, Homo sapien
gaaggacagacgaggcgcacacgac

SEQ ID NO: 5699287 - DNA, 25 bp, Homo sapien
acgggcgagcgggcgccccctgtcg

SEQ ID NO: 5699288 - DNA, 25 bp, Homo sapien
cgacagggggcgcccgctcgcccgt

SEQ ID NO: 5699289 - DNA, 25 bp, Homo sapien
gaaacgggcgagcgggcgccccctg

SEQ ID NO: 5699290 - DNA, 25 bp, Homo sapien
cagggggcgcccgctcgcccgtttc

SEQ ID NO: 5699291 - DNA, 25 bp, Homo sapien
gggcgagcgggcgccccctgtcgcg

SEQ ID NO: 5699292 - DNA, 25 bp, Homo sapien
cgcgacagggggcgcccgctcgccc

SEQ ID NO: 5699293 - DNA, 25 bp, Homo sapien
ggggaggagcgtcccggtgcgaccc

SEQ ID NO: 5699294 - DNA, 25 bp, Homo sapien
gggtcgcaccgggacgctcctcccc

SEQ ID NO: 5699295 - DNA, 25 bp, Homo sapien
ccctgacaaggtgtcagggacccga

SEQ ID NO: 5699296 - DNA, 25 bp, Homo sapien
tcgggtccctgacaccttgtcaggg

SEQ ID NO: 5699297 - DNA, 25 bp, Homo sapien
cgtccttagtcgaggctggaccggg

SEQ ID NO: 5699298 - DNA, 25 bp, Homo sapien
cccggtccagcctcgactaaggacg

SEQ ID NO: 5699299 - DNA, 25 bp, Homo sapien
ccttaatccgtacttgacaagacag

SEQ ID NO: 5699300 - DNA, 25 bp, Homo sapien
ctgtcttgtcaagtacggattaagg

SEQ ID NO: 5699301 - DNA, 25 bp, Homo sapien
tactttacaacagaaggaatattaa

SEQ ID NO: 5699302 - DNA, 25 bp, Homo sapien
ttaatattccttctgttgtaaagta

SEQ ID NO: 5699303 - DNA, 25 bp, Homo sapien
agaagtgtatatgcatgagaataag

SEQ ID NO: 5699304 - DNA, 25 bp, Homo sapien
cttattctcatgcatatacacttct

SEQ ID NO: 5699305 - DNA, 25 bp, Homo sapien
tcgacgagagatccggtcagagggg

SEQ ID NO: 5699306 - DNA, 25 bp, Homo sapien
cccctctgaccggatctctcgtcga

SEQ ID NO: 5699307 - DNA, 25 bp, Homo sapien
aattttctaattcagacttataagt

SEQ ID NO: 5699308 - DNA, 25 bp, Homo sapien
acttataagtctgaattagaaaatt

SEQ ID NO: 5699309 - DNA, 25 bp, Homo sapien
acacgacgtcccatttgcacgaagc

SEQ ID NO: 5699310 - DNA, 25 bp, Homo sapien
gcttcgtgcaaatgggacgtcgtgt

SEQ ID NO: 5699311 - DNA, 25 bp, Homo sapien
tgtcgtccactcccgcctgccggga

SEQ ID NO: 5699312 - DNA, 25 bp, Homo sapien
tcccggcaggcgggagtggacgaca

SEQ ID NO: 5699313 - DNA, 25 bp, Homo sapien
aggaaagatgtaagatcgagtaact

SEQ ID NO: 5699314 - DNA, 25 bp, Homo sapien
agttactcgatcttacatctttcct

SEQ ID NO: 5699315 - DNA, 25 bp, Homo sapien
tccctgtagacacccgtagcgatgg

SEQ ID NO: 5699316 - DNA, 25 bp, Homo sapien
ccatcgctacgggtgtctacaggga

SEQ ID NO: 5699317 - DNA, 25 bp, Homo sapien
gatattcctatttaaggactgaaac

SEQ ID NO: 5699318 - DNA, 25 bp, Homo sapien
gtttcagtccttaaataggaatatc

SEQ ID NO: 5699319 - DNA, 25 bp, Homo sapien
accgacacgtgtctgctgtatttag

SEQ ID NO: 5699320 - DNA, 25 bp, Homo sapien
ctaaatacagcagacacgtgtcggt

SEQ ID NO: 5699321 - DNA, 25 bp, Homo sapien
gttctaggatcaccccgagctgtgt

SEQ ID NO: 5699322 - DNA, 25 bp, Homo sapien
acacagctcggggtgatcctagaac

SEQ ID NO: 5699323 - DNA, 25 bp, Homo sapien
tgacgacgtcgagttgtagtctccg

SEQ ID NO: 5699324 - DNA, 25 bp, Homo sapien
cggagactacaactcgacgtcgtca

SEQ ID NO: 5699325 - DNA, 25 bp, Homo sapien
taagagagcaagtattggaaatgtt

SEQ ID NO: 5699326 - DNA, 25 bp, Homo sapien
aacatttccaatacttgctctctta

SEQ ID NO: 5699327 - DNA, 25 bp, Homo sapien
tgggaagggtctctcattaaactgt

SEQ ID NO: 5699328 - DNA, 25 bp, Homo sapien
acagtttaatgagagacccttccca

SEQ ID NO: 5699329 - DNA, 25 bp, Homo sapien
aaccctacgacggactctgccgaag

SEQ ID NO: 5699330 - DNA, 25 bp, Homo sapien
cttcggcagagtccgtcgtagggtt

SEQ ID NO: 5699331 - DNA, 25 bp, Homo sapien
ttggagaaaagagcatagatagact

SEQ ID NO: 5699332 - DNA, 25 bp, Homo sapien
agtctatctatgctcttttctccaa

SEQ ID NO: 5699333 - DNA, 25 bp, Homo sapien
gcgcccctgtcaaccgctggacgtg

SEQ ID NO: 5699334 - DNA, 25 bp, Homo sapien
cacgtccagcggttgacaggggcgc

SEQ ID NO: 5699335 - DNA, 25 bp, Homo sapien
gaagaccatgataaagtctcctcat

SEQ ID NO: 5699336 - DNA, 25 bp, Homo sapien
atgaggagactttatcatggtcttc

SEQ ID NO: 5699337 - DNA, 25 bp, Homo sapien
aaggagcctaggctcccgccgcaac

SEQ ID NO: 5699338 - DNA, 25 bp, Homo sapien
gttgcggcgggagcctaggctcctt

SEQ ID NO: 5699339 - DNA, 25 bp, Homo sapien
taacagacattgcatttacttaaag

SEQ ID NO: 5699340 - DNA, 25 bp, Homo sapien
ctttaagtaaatgcaatgtctgtta

SEQ ID NO: 5699341 - DNA, 25 bp, Homo sapien
cctatccacattcagtgtacggaag

SEQ ID NO: 5699342 - DNA, 25 bp, Homo sapien
cttccgtacactgaatgtggatagg

SEQ ID NO: 5699343 - DNA, 25 bp, Homo sapien
aaaaaactgtacaaacaacttctga

SEQ ID NO: 5699344 - DNA, 25 bp, Homo sapien
tcagaagttgtttgtacagtttttt

SEQ ID NO: 5699345 - DNA, 25 bp, Homo sapien
acaccaggccccatgtcgtcgtacc

SEQ ID NO: 5699346 - DNA, 25 bp, Homo sapien
ggtacgacgacatggggcctggtgt

SEQ ID NO: 5699347 - DNA, 25 bp, Homo sapien
gtgacggcggcctaccgaccgttcc

SEQ ID NO: 5699348 - DNA, 25 bp, Homo sapien
ggaacggtcggtaggccgccgtcac

SEQ ID NO: 5699349 - DNA, 25 bp, Homo sapien
gtctcggagcccctccaccggcggt

SEQ ID NO: 5699350 - DNA, 25 bp, Homo sapien
accgccggtggaggggctccgagac

SEQ ID NO: 5699351 - DNA, 25 bp, Homo sapien
gtattaatagaaaatttgaccataa

SEQ ID NO: 5699352 - DNA, 25 bp, Homo sapien
ttatggtcaaattttctattaatac

SEQ ID NO: 5699353 - DNA, 25 bp, Homo sapien
agtattaatagaaaatttgaccata

SEQ ID NO: 5699354 - DNA, 25 bp, Homo sapien
tatggtcaaattttctattaatact

SEQ ID NO: 5699355 - DNA, 25 bp, Homo sapien
gtccggccctcacccctctcggcgg

SEQ ID NO: 5699356 - DNA, 25 bp, Homo sapien
ccgccgagaggggtgagggccggac

SEQ ID NO: 5699357 - DNA, 25 bp, Homo sapien
cgtccggccctcacccctctcggcg

SEQ ID NO: 5699358 - DNA, 25 bp, Homo sapien
cgccgagaggggtgagggccggacg

SEQ ID NO: 5699359 - DNA, 25 bp, Homo sapien
acaatttcgctctatatttaataat

SEQ ID NO: 5699360 - DNA, 25 bp, Homo sapien
attattaaatatagagcgaaattgt

SEQ ID NO: 5699361 - DNA, 25 bp, Homo sapien
atgtagaaattagtggaaaagtcag

SEQ ID NO: 5699362 - DNA, 25 bp, Homo sapien
ctgacttttccactaatttctacat

SEQ ID NO: 5699363 - DNA, 25 bp, Homo sapien
aaccccgtctcttatgccactcggg

SEQ ID NO: 5699364 - DNA, 25 bp, Homo sapien
cccgagtggcataagagacggggtt

SEQ ID NO: 5699365 - DNA, 25 bp, Homo sapien
atcttaattagattactatatggat

SEQ ID NO: 5699366 - DNA, 25 bp, Homo sapien
atccatatagtaatctaattaagat

SEQ ID NO: 5699367 - DNA, 25 bp, Homo sapien
tatgtattggaaatcttaattagat

SEQ ID NO: 5699368 - DNA, 25 bp, Homo sapien
atctaattaagatttccaatacata

SEQ ID NO: 5699369 - DNA, 25 bp, Homo sapien
ggcgaggaatcctcttcaacgtcca

SEQ ID NO: 5699370 - DNA, 25 bp, Homo sapien
tggacgttgaagaggattcctcgcc

SEQ ID NO: 5699371 - DNA, 25 bp, Homo sapien
gcggtggcttggtcgccgcctcggg

SEQ ID NO: 5699372 - DNA, 25 bp, Homo sapien
cccgaggcggcgaccaagccaccgc

SEQ ID NO: 5699373 - DNA, 25 bp, Homo sapien
gcgggagctccaggggcggtggctt

SEQ ID NO: 5699374 - DNA, 25 bp, Homo sapien
aagccaccgcccctggagctcccgc

SEQ ID NO: 5699375 - DNA, 25 bp, Homo sapien
tacaccggcgggagtacctcgttta

SEQ ID NO: 5699376 - DNA, 25 bp, Homo sapien
taaacgaggtactcccgccggtgta

SEQ ID NO: 5699377 - DNA, 25 bp, Homo sapien
aggtgaaagtgcattgacaaaagac

SEQ ID NO: 5699378 - DNA, 25 bp, Homo sapien
gtcttttgtcaatgcactttcacct

SEQ ID NO: 5699379 - DNA, 25 bp, Homo sapien
cgagtcccgctacccgagctggacg

SEQ ID NO: 5699380 - DNA, 25 bp, Homo sapien
cgtccagctcgggtagcgggactcg

SEQ ID NO: 5699381 - DNA, 25 bp, Homo sapien
gccctcggccacccacccggtcgga

SEQ ID NO: 5699382 - DNA, 25 bp, Homo sapien
tccgaccgggtgggtggccgagggc

SEQ ID NO: 5699383 - DNA, 25 bp, Homo sapien
tccgtgtagggctggacgcccggtc

SEQ ID NO: 5699384 - DNA, 25 bp, Homo sapien
gaccgggcgtccagccctacacgga

SEQ ID NO: 5699385 - DNA, 25 bp, Homo sapien
aaactctacacttacctacgcacgt

SEQ ID NO: 5699386 - DNA, 25 bp, Homo sapien
acgtgcgtaggtaagtgtagagttt

SEQ ID NO: 5699387 - DNA, 25 bp, Homo sapien
caacaaattccgagagaggtctatt

SEQ ID NO: 5699388 - DNA, 25 bp, Homo sapien
aatagacctctctcggaatttgttg

SEQ ID NO: 5699389 - DNA, 25 bp, Homo sapien
taccgacagtgatccaagggaacgt

SEQ ID NO: 5699390 - DNA, 25 bp, Homo sapien
acgttcccttggatcactgtcggta

SEQ ID NO: 5699391 - DNA, 25 bp, Homo sapien
tcttccgacaccaactgtatgattt

SEQ ID NO: 5699392 - DNA, 25 bp, Homo sapien
aaatcatacagttggtgtcggaaga

SEQ ID NO: 5699393 - DNA, 25 bp, Homo sapien
agttcattggtctgtagaaagacat

SEQ ID NO: 5699394 - DNA, 25 bp, Homo sapien
atgtctttctacagaccaatgaact

SEQ ID NO: 5699395 - DNA, 25 bp, Homo sapien
tgaacccgtgttacatgtatgccga

SEQ ID NO: 5699396 - DNA, 25 bp, Homo sapien
tcggcatacatgtaacacgggttca

SEQ ID NO: 5699397 - DNA, 25 bp, Homo sapien
ccagggacccagaagcgcgagcgcg

SEQ ID NO: 5699398 - DNA, 25 bp, Homo sapien
cgcgctcgcgcttctgggtccctgg

SEQ ID NO: 5699399 - DNA, 25 bp, Homo sapien
acctttaaacggagtctagagacac

SEQ ID NO: 5699400 - DNA, 25 bp, Homo sapien
gtgtctctagactccgtttaaaggt

SEQ ID NO: 5699401 - DNA, 25 bp, Homo sapien
gacctccccctcgccgagagaaagg

SEQ ID NO: 5699402 - DNA, 25 bp, Homo sapien
cctttctctcggcgagggggaggtc

SEQ ID NO: 5699403 - DNA, 25 bp, Homo sapien
ccagtggtcgggaccggcacccctg

SEQ ID NO: 5699404 - DNA, 25 bp, Homo sapien
caggggtgccggtcccgaccactgg

SEQ ID NO: 5699405 - DNA, 25 bp, Homo sapien
ggacaagggcctcacccccaagagt

SEQ ID NO: 5699406 - DNA, 25 bp, Homo sapien
actcttgggggtgaggcccttgtcc

SEQ ID NO: 5699407 - DNA, 25 bp, Homo sapien
agacacatcggaggtcaacgaggtc

SEQ ID NO: 5699408 - DNA, 25 bp, Homo sapien
gacctcgttgacctccgatgtgtct

SEQ ID NO: 5699409 - DNA, 25 bp, Homo sapien
gagaagtcttcgaattctgcaaaac

SEQ ID NO: 5699410 - DNA, 25 bp, Homo sapien
gttttgcagaattcgaagacttctc

SEQ ID NO: 5699411 - DNA, 25 bp, Homo sapien
aggaccggtgccctctgtcagtgtt

SEQ ID NO: 5699412 - DNA, 25 bp, Homo sapien
aacactgacagagggcaccggtcct

SEQ ID NO: 5699413 - DNA, 25 bp, Homo sapien
tttcctattcatcctaaagacagag

SEQ ID NO: 5699414 - DNA, 25 bp, Homo sapien
ctctgtctttaggatgaataggaaa

SEQ ID NO: 5699415 - DNA, 25 bp, Homo sapien
tatgtggcctaaaagttacacgaag

SEQ ID NO: 5699416 - DNA, 25 bp, Homo sapien
cttcgtgtaacttttaggccacata

SEQ ID NO: 5699417 - DNA, 25 bp, Homo sapien
gactgggagtttctatagtgccact

SEQ ID NO: 5699418 - DNA, 25 bp, Homo sapien
agtggcactatagaaactcccagtc

SEQ ID NO: 5699419 - DNA, 25 bp, Homo sapien
ttagatcctccacgtaatcgttttg

SEQ ID NO: 5699420 - DNA, 25 bp, Homo sapien
caaaacgattacgtggaggatctaa

SEQ ID NO: 5699421 - DNA, 25 bp, Homo sapien
tcgcacgcctctacttcccccgcgc

SEQ ID NO: 5699422 - DNA, 25 bp, Homo sapien
gcgcgggggaagtagaggcgtgcga

SEQ ID NO: 5699423 - DNA, 25 bp, Homo sapien
gtatcctgagttgctacttttggcc

SEQ ID NO: 5699424 - DNA, 25 bp, Homo sapien
ggccaaaagtagcaactcaggatac

SEQ ID NO: 5699425 - DNA, 25 bp, Homo sapien
acacatcagtggtttaactttttat

SEQ ID NO: 5699426 - DNA, 25 bp, Homo sapien
ataaaaagttaaaccactgatgtgt

SEQ ID NO: 5699427 - DNA, 25 bp, Homo sapien
tcgggtctaggtgtacctctgggtc

SEQ ID NO: 5699428 - DNA, 25 bp, Homo sapien
gacccagaggtacacctagacccga

SEQ ID NO: 5699429 - DNA, 25 bp, Homo sapien
ccgcggcgtccttcgggagcgggtg

SEQ ID NO: 5699430 - DNA, 25 bp, Homo sapien
cacccgctcccgaaggacgccgcgg

SEQ ID NO: 5699431 - DNA, 25 bp, Homo sapien
acgcctggggcctccgcggcgtcct

SEQ ID NO: 5699432 - DNA, 25 bp, Homo sapien
aggacgccgcggaggccccaggcgt

SEQ ID NO: 5699433 - DNA, 25 bp, Homo sapien
cacgcctggggcctccgcggcgtcc

SEQ ID NO: 5699434 - DNA, 25 bp, Homo sapien
ggacgccgcggaggccccaggcgtg

SEQ ID NO: 5699435 - DNA, 25 bp, Homo sapien
cccacgcctggggcctccgcggcgt

SEQ ID NO: 5699436 - DNA, 25 bp, Homo sapien
acgccgcggaggccccaggcgtggg

SEQ ID NO: 5699437 - DNA, 25 bp, Homo sapien
actcaggccttcttacgactactaa

SEQ ID NO: 5699438 - DNA, 25 bp, Homo sapien
ttagtagtcgtaagaaggcctgagt

SEQ ID NO: 5699439 - DNA, 25 bp, Homo sapien
attaatagtagtccgttactactca

SEQ ID NO: 5699440 - DNA, 25 bp, Homo sapien
tgagtagtaacggactactattaat

SEQ ID NO: 5699441 - DNA, 25 bp, Homo sapien
ccggtgactccgcccgacggccgta

SEQ ID NO: 5699442 - DNA, 25 bp, Homo sapien
tacggccgtcgggcggagtcaccgg

SEQ ID NO: 5699443 - DNA, 25 bp, Homo sapien
atttgtaactgctactctatacttt

SEQ ID NO: 5699444 - DNA, 25 bp, Homo sapien
aaagtatagagtagcagttacaaat

SEQ ID NO: 5699445 - DNA, 25 bp, Homo sapien
cacctaagacttgaggataacaatt

SEQ ID NO: 5699446 - DNA, 25 bp, Homo sapien
aattgttatcctcaagtcttaggtg

SEQ ID NO: 5699447 - DNA, 25 bp, Homo sapien
atatcttgtcgcgtaagaagacatc

SEQ ID NO: 5699448 - DNA, 25 bp, Homo sapien
gatgtcttcttacgcgacaagatat

SEQ ID NO: 5699449 - DNA, 25 bp, Homo sapien
acctcttggctactggtgttcagaa

SEQ ID NO: 5699450 - DNA, 25 bp, Homo sapien
ttctgaacaccagtagccaagaggt

SEQ ID NO: 5699451 - DNA, 25 bp, Homo sapien
accatccaccatccacccctccgta

SEQ ID NO: 5699452 - DNA, 25 bp, Homo sapien
tacggaggggtggatggtggatggt

SEQ ID NO: 5699453 - DNA, 25 bp, Homo sapien
tggaatacaaatggctgatgatacg

SEQ ID NO: 5699454 - DNA, 25 bp, Homo sapien
cgtatcatcagccatttgtattcca

SEQ ID NO: 5699455 - DNA, 25 bp, Homo sapien
gaggtagcccaggagtccgacccag

SEQ ID NO: 5699456 - DNA, 25 bp, Homo sapien
ctgggtcggactcctgggctacctc

SEQ ID NO: 5699457 - DNA, 25 bp, Homo sapien
agtagaaaactacatacgggtcctg

SEQ ID NO: 5699458 - DNA, 25 bp, Homo sapien
caggacccgtatgtagttttctact

SEQ ID NO: 5699459 - DNA, 25 bp, Homo sapien
ctaccaatcacaatctcttcaacat

SEQ ID NO: 5699460 - DNA, 25 bp, Homo sapien
atgttgaagagattgtgattggtag

SEQ ID NO: 5699461 - DNA, 25 bp, Homo sapien
ctacaggacaggtgaccgagtcctc

SEQ ID NO: 5699462 - DNA, 25 bp, Homo sapien
gaggactcggtcacctgtcctgtag

SEQ ID NO: 5699463 - DNA, 25 bp, Homo sapien
agtagtaaagcttataatacatcaa

SEQ ID NO: 5699464 - DNA, 25 bp, Homo sapien
ttgatgtattataagctttactact

SEQ ID NO: 5699465 - DNA, 25 bp, Homo sapien
aagtagtaaagcttataatacatca

SEQ ID NO: 5699466 - DNA, 25 bp, Homo sapien
tgatgtattataagctttactactt

SEQ ID NO: 5699467 - DNA, 25 bp, Homo sapien
gaaagtagtaaagcttataatacat

SEQ ID NO: 5699468 - DNA, 25 bp, Homo sapien
atgtattataagctttactactttc

SEQ ID NO: 5699469 - DNA, 25 bp, Homo sapien
ttaaacacggttctattgaaaggca

SEQ ID NO: 5699470 - DNA, 25 bp, Homo sapien
tgcctttcaatagaaccgtgtttaa

SEQ ID NO: 5699471 - DNA, 25 bp, Homo sapien
caccacaaactgtttagattcatat

SEQ ID NO: 5699472 - DNA, 25 bp, Homo sapien
atatgaatctaaacagtttgtggtg

SEQ ID NO: 5699473 - DNA, 25 bp, Homo sapien
gtccctggtggacatcaagccgcaa

SEQ ID NO: 5699474 - DNA, 25 bp, Homo sapien
ttgcggcttgatgtccaccagggac

SEQ ID NO: 5699475 - DNA, 25 bp, Homo sapien
ctcgggtcctcctcagctggttcgg

SEQ ID NO: 5699476 - DNA, 25 bp, Homo sapien
ccgaaccagctgaggaggacccgag

SEQ ID NO: 5699477 - DNA, 25 bp, Homo sapien
taagttgtgtaaacctgaaaaggta

SEQ ID NO: 5699478 - DNA, 25 bp, Homo sapien
taccttttcaggtttacacaactta

SEQ ID NO: 5699479 - DNA, 25 bp, Homo sapien
tccaggtagttaaattgagaattga

SEQ ID NO: 5699480 - DNA, 25 bp, Homo sapien
tcaattctcaatttaactacctgga

SEQ ID NO: 5699481 - DNA, 25 bp, Homo sapien
gagacacgatgacctcgcggaccga

SEQ ID NO: 5699482 - DNA, 25 bp, Homo sapien
tcggtccgcgaggtcatcgtgtctc

SEQ ID NO: 5699483 - DNA, 25 bp, Homo sapien
acataatccttctgaaaagagtcaa

SEQ ID NO: 5699484 - DNA, 25 bp, Homo sapien
ttgactcttttcagaaggattatgt

SEQ ID NO: 5699485 - DNA, 25 bp, Homo sapien
atcccaatgtaaccgtcgagaaacg

SEQ ID NO: 5699486 - DNA, 25 bp, Homo sapien
cgtttctcgacggttacattgggat

SEQ ID NO: 5699487 - DNA, 25 bp, Homo sapien
tatcattcccggtgtgtcagcaaat

SEQ ID NO: 5699488 - DNA, 25 bp, Homo sapien
atttgctgacacaccgggaatgata

SEQ ID NO: 5699489 - DNA, 25 bp, Homo sapien
ctcctaaacaaatgtaatccttctg

SEQ ID NO: 5699490 - DNA, 25 bp, Homo sapien
cagaaggattacatttgtttaggag

SEQ ID NO: 5699491 - DNA, 25 bp, Homo sapien
ccccggtgccactctgggaccgact

SEQ ID NO: 5699492 - DNA, 25 bp, Homo sapien
agtcggtcccagagtggcaccgggg

SEQ ID NO: 5699493 - DNA, 25 bp, Homo sapien
gacccccagcccccggtgccactct

SEQ ID NO: 5699494 - DNA, 25 bp, Homo sapien
agagtggcaccgggggctgggggtc

SEQ ID NO: 5699495 - DNA, 25 bp, Homo sapien
agatctaaccaattgttcgtgatgt

SEQ ID NO: 5699496 - DNA, 25 bp, Homo sapien
acatcacgaacaattggttagatct

SEQ ID NO: 5699497 - DNA, 25 bp, Homo sapien
aatttttgtctcgaagtcgacaaaa

SEQ ID NO: 5699498 - DNA, 25 bp, Homo sapien
ttttgtcgacttcgagacaaaaatt

SEQ ID NO: 5699499 - DNA, 25 bp, Homo sapien
gacgaaataatttgttataaacatt

SEQ ID NO: 5699500 - DNA, 25 bp, Homo sapien
aatgtttataacaaattatttcgtc

SEQ ID NO: 5699501 - DNA, 25 bp, Homo sapien
tgtagactcgttacgagacaggcga

SEQ ID NO: 5699502 - DNA, 25 bp, Homo sapien
tcgcctgtctcgtaacgagtctaca

SEQ ID NO: 5699503 - DNA, 25 bp, Homo sapien
aacaaaatctccgattataccaatg

SEQ ID NO: 5699504 - DNA, 25 bp, Homo sapien
cattggtataatcggagattttgtt

SEQ ID NO: 5699505 - DNA, 25 bp, Homo sapien
aactcgtgcagcaactcttgggacc

SEQ ID NO: 5699506 - DNA, 25 bp, Homo sapien
ggtcccaagagttgctgcacgagtt

SEQ ID NO: 5699507 - DNA, 25 bp, Homo sapien
gggacgacctcgtgaaagcgggtgt

SEQ ID NO: 5699508 - DNA, 25 bp, Homo sapien
acacccgctttcacgaggtcgtccc

SEQ ID NO: 5699509 - DNA, 25 bp, Homo sapien
tagaacaggttatcagtgggtgacc

SEQ ID NO: 5699510 - DNA, 25 bp, Homo sapien
ggtcacccactgataacctgttcta

SEQ ID NO: 5699511 - DNA, 25 bp, Homo sapien
ttacggaagtcattatgaaaggagt

SEQ ID NO: 5699512 - DNA, 25 bp, Homo sapien
actcctttcataatgacttccgtaa

SEQ ID NO: 5699513 - DNA, 25 bp, Homo sapien
gtacgtcccctacgaaagaggagaa

SEQ ID NO: 5699514 - DNA, 25 bp, Homo sapien
ttctcctctttcgtaggggacgtac

SEQ ID NO: 5699515 - DNA, 25 bp, Homo sapien
cctcgaacggccagaggctggcgac

SEQ ID NO: 5699516 - DNA, 25 bp, Homo sapien
gtcgccagcctctggccgttcgagg

SEQ ID NO: 5699517 - DNA, 25 bp, Homo sapien
tcaaccgtaaagtggtgttagttga

SEQ ID NO: 5699518 - DNA, 25 bp, Homo sapien
tcaactaacaccactttacggttga

SEQ ID NO: 5699519 - DNA, 25 bp, Homo sapien
gaccgtgtaggtccccgtgtaggga

SEQ ID NO: 5699520 - DNA, 25 bp, Homo sapien
tccctacacggggacctacacggtc

SEQ ID NO: 5699521 - DNA, 25 bp, Homo sapien
gggtctcgaccaggttcatcctaaa

SEQ ID NO: 5699522 - DNA, 25 bp, Homo sapien
tttaggatgaacctggtcgagaccc

SEQ ID NO: 5699523 - DNA, 25 bp, Homo sapien
agacgtgggagcaccagccgtcatg

SEQ ID NO: 5699524 - DNA, 25 bp, Homo sapien
catgacggctggtgctcccacgtct

SEQ ID NO: 5699525 - DNA, 25 bp, Homo sapien
cccgagacacgaaggatccgtactg

SEQ ID NO: 5699526 - DNA, 25 bp, Homo sapien
cagtacggatccttcgtgtctcggg

SEQ ID NO: 5699527 - DNA, 25 bp, Homo sapien
taggattgagaaggcttactgagtt

SEQ ID NO: 5699528 - DNA, 25 bp, Homo sapien
aactcagtaagccttctcaatccta

SEQ ID NO: 5699529 - DNA, 25 bp, Homo sapien
atacttctctagagactacttccgg

SEQ ID NO: 5699530 - DNA, 25 bp, Homo sapien
ccggaagtagtctctagagaagtat

SEQ ID NO: 5699531 - DNA, 25 bp, Homo sapien
taccgttacgtagactaaatctaag

SEQ ID NO: 5699532 - DNA, 25 bp, Homo sapien
cttagatttagtctacgtaacggta

SEQ ID NO: 5699533 - DNA, 25 bp, Homo sapien
gaccccaataattatgtgaagtatt

SEQ ID NO: 5699534 - DNA, 25 bp, Homo sapien
aatacttcacataattattggggtc

SEQ ID NO: 5699535 - DNA, 25 bp, Homo sapien
cggcgtactctgcacccccgcaccg

SEQ ID NO: 5699536 - DNA, 25 bp, Homo sapien
cggtgcgggggtgcagagtacgccg

SEQ ID NO: 5699537 - DNA, 25 bp, Homo sapien
acggcgtactctgcacccccgcacc

SEQ ID NO: 5699538 - DNA, 25 bp, Homo sapien
ggtgcgggggtgcagagtacgccgt

SEQ ID NO: 5699539 - DNA, 25 bp, Homo sapien
ggattcagcggatttcaacagggag

SEQ ID NO: 5699540 - DNA, 25 bp, Homo sapien
ctccctgttgaaatccgctgaatcc

SEQ ID NO: 5699541 - DNA, 25 bp, Homo sapien
tgctccttccattggactcggttct

SEQ ID NO: 5699542 - DNA, 25 bp, Homo sapien
agaaccgagtccaatggaaggagca

SEQ ID NO: 5699543 - DNA, 25 bp, Homo sapien
cggactaaaggtgaagtccaatgaa

SEQ ID NO: 5699544 - DNA, 25 bp, Homo sapien
ttcattggacttcacctttagtccg

SEQ ID NO: 5699545 - DNA, 25 bp, Homo sapien
gggagccctttgtactcgtaaactc

SEQ ID NO: 5699546 - DNA, 25 bp, Homo sapien
gagtttacgagtacaaagggctccc

SEQ ID NO: 5699547 - DNA, 25 bp, Homo sapien
ataggggagccctttgtactcgtaa

SEQ ID NO: 5699548 - DNA, 25 bp, Homo sapien
ttacgagtacaaagggctcccctat

SEQ ID NO: 5699549 - DNA, 25 bp, Homo sapien
ttcacgtttcgggaaacaagtctct

SEQ ID NO: 5699550 - DNA, 25 bp, Homo sapien
agagacttgtttcccgaaacgtgaa

SEQ ID NO: 5699551 - DNA, 25 bp, Homo sapien
gaaccggtgtcagtcccgagggtcc

SEQ ID NO: 5699552 - DNA, 25 bp, Homo sapien
ggaccctcgggactgacaccggttc

SEQ ID NO: 5699553 - DNA, 25 bp, Homo sapien
ggtgcacgtgctccgggctgtcgta

SEQ ID NO: 5699554 - DNA, 25 bp, Homo sapien
tacgacagcccggagcacgtgcacc

SEQ ID NO: 5699555 - DNA, 25 bp, Homo sapien
gttgtctacgtaatgtcacgtacgt

SEQ ID NO: 5699556 - DNA, 25 bp, Homo sapien
acgtacgtgacattacgtagacaac

SEQ ID NO: 5699557 - DNA, 25 bp, Homo sapien
ggcgcgagcgtctaccgtcgagccc

SEQ ID NO: 5699558 - DNA, 25 bp, Homo sapien
gggctcgacggtagacgctcgcgcc

SEQ ID NO: 5699559 - DNA, 25 bp, Homo sapien
cggactcgctcacccacgtgaaggg

SEQ ID NO: 5699560 - DNA, 25 bp, Homo sapien
cccttcacgtgggtgagcgagtccg

SEQ ID NO: 5699561 - DNA, 25 bp, Homo sapien
ttgggtcgagcctccgcagtccctg

SEQ ID NO: 5699562 - DNA, 25 bp, Homo sapien
cagggactgcggaggctcgacccaa

SEQ ID NO: 5699563 - DNA, 25 bp, Homo sapien
cgtcatcggcccgtccccctgccgc

SEQ ID NO: 5699564 - DNA, 25 bp, Homo sapien
gcggcagggggacgggccgatgacg

SEQ ID NO: 5699565 - DNA, 25 bp, Homo sapien
gtgtttcgttgatcggttcctcgac

SEQ ID NO: 5699566 - DNA, 25 bp, Homo sapien
gtcgaggaaccgatcaacgaaacac

SEQ ID NO: 5699567 - DNA, 25 bp, Homo sapien
ttgttaccgtctgtccataaggtcg

SEQ ID NO: 5699568 - DNA, 25 bp, Homo sapien
cgaccttatggacagacggtaacaa

SEQ ID NO: 5699569 - DNA, 25 bp, Homo sapien
tccgctgtcgcctcgtcgcacgcgc

SEQ ID NO: 5699570 - DNA, 25 bp, Homo sapien
gcgcgtgcgacgaggcgacagcgga

SEQ ID NO: 5699571 - DNA, 25 bp, Homo sapien
cactacctcgtctgtccctcgccga

SEQ ID NO: 5699572 - DNA, 25 bp, Homo sapien
tcggcgagggacagacgaggtagtg

SEQ ID NO: 5699573 - DNA, 25 bp, Homo sapien
ggcgaccgccacccggtccagcgcc

SEQ ID NO: 5699574 - DNA, 25 bp, Homo sapien
ggcgctggaccgggtggcggtcgcc

SEQ ID NO: 5699575 - DNA, 25 bp, Homo sapien
ggtcccgcctctcggcccctcccgc

SEQ ID NO: 5699576 - DNA, 25 bp, Homo sapien
gcgggaggggccgagaggcgggacc

SEQ ID NO: 5699577 - DNA, 25 bp, Homo sapien
taaaggatattactgtcgtcttgtc

SEQ ID NO: 5699578 - DNA, 25 bp, Homo sapien
gacaagacgacagtaatatccttta

SEQ ID NO: 5699579 - DNA, 25 bp, Homo sapien
taaactggaccattaagtccagact

SEQ ID NO: 5699580 - DNA, 25 bp, Homo sapien
agtctggacttaatggtccagttta

SEQ ID NO: 5699581 - DNA, 25 bp, Homo sapien
cggtcggtctggggggtgcctgacg

SEQ ID NO: 5699582 - DNA, 25 bp, Homo sapien
cgtcaggcaccccccagaccgaccg

SEQ ID NO: 5699583 - DNA, 25 bp, Homo sapien
cggtctggggggtgcctgacggact

SEQ ID NO: 5699584 - DNA, 25 bp, Homo sapien
agtccgtcaggcaccccccagaccg

SEQ ID NO: 5699585 - DNA, 25 bp, Homo sapien
aggtcgtgggcacagtcgtgggaac

SEQ ID NO: 5699586 - DNA, 25 bp, Homo sapien
gttcccacgactgtgcccacgacct

SEQ ID NO: 5699587 - DNA, 25 bp, Homo sapien
tgtagcaacgattaggagaccgact

SEQ ID NO: 5699588 - DNA, 25 bp, Homo sapien
agtcggtctcctaatcgttgctaca

SEQ ID NO: 5699589 - DNA, 25 bp, Homo sapien
aatatttccgagtcacactacaaac

SEQ ID NO: 5699590 - DNA, 25 bp, Homo sapien
gtttgtagtgtgactcggaaatatt

SEQ ID NO: 5699591 - DNA, 25 bp, Homo sapien
acgtcagtggtcttgtcggtcgtgt

SEQ ID NO: 5699592 - DNA, 25 bp, Homo sapien
acacgaccgacaagaccactgacgt

SEQ ID NO: 5699593 - DNA, 25 bp, Homo sapien
aatatattgtcatactcctttaaat

SEQ ID NO: 5699594 - DNA, 25 bp, Homo sapien
atttaaaggagtatgacaatatatt

SEQ ID NO: 5699595 - DNA, 25 bp, Homo sapien
cgaaagtgacgtggtcgttaaagga

SEQ ID NO: 5699596 - DNA, 25 bp, Homo sapien
tcctttaacgaccacgtcactttcg

SEQ ID NO: 5699597 - DNA, 25 bp, Homo sapien
tccccggcgagtgtcggttctgtgg

SEQ ID NO: 5699598 - DNA, 25 bp, Homo sapien
ccacagaaccgacactcgccgggga

SEQ ID NO: 5699599 - DNA, 25 bp, Homo sapien
tattgttataatccgctgaaacaaa

SEQ ID NO: 5699600 - DNA, 25 bp, Homo sapien
tttgtttcagcggattataacaata

SEQ ID NO: 5699601 - DNA, 25 bp, Homo sapien
ttattgttataatccgctgaaacaa

SEQ ID NO: 5699602 - DNA, 25 bp, Homo sapien
ttgtttcagcggattataacaataa

SEQ ID NO: 5699603 - DNA, 25 bp, Homo sapien
gggccaagacttgacaggtccaagg

SEQ ID NO: 5699604 - DNA, 25 bp, Homo sapien
ccttggacctgtcaagtcttggccc

SEQ ID NO: 5699605 - DNA, 25 bp, Homo sapien
gattccagaaccgtccgcgtaacga

SEQ ID NO: 5699606 - DNA, 25 bp, Homo sapien
tcgttacgcggacggttctggaatc

SEQ ID NO: 5699607 - DNA, 25 bp, Homo sapien
tcagaggacggtccccgtgctctgc

SEQ ID NO: 5699608 - DNA, 25 bp, Homo sapien
gcagagcacggggaccgtcctctga

SEQ ID NO: 5699609 - DNA, 25 bp, Homo sapien
gcgcgcgagccgcaggcttgggcgg

SEQ ID NO: 5699610 - DNA, 25 bp, Homo sapien
ccgcccaagcctgcggctcgcgcgc

SEQ ID NO: 5699611 - DNA, 25 bp, Homo sapien
gaaagagtcttggaaaggacagacc

SEQ ID NO: 5699612 - DNA, 25 bp, Homo sapien
ggtctgtcctttccaagactctttc

SEQ ID NO: 5699613 - DNA, 25 bp, Homo sapien
gaggtctccattacaacttattcag

SEQ ID NO: 5699614 - DNA, 25 bp, Homo sapien
ctgaataagttgtaatggagacctc

SEQ ID NO: 5699615 - DNA, 25 bp, Homo sapien
ccgacgccgccctcgcgtgctaggg

SEQ ID NO: 5699616 - DNA, 25 bp, Homo sapien
ccctagcacgcgagggcggcgtcgg

SEQ ID NO: 5699617 - DNA, 25 bp, Homo sapien
ccccgacgcaggtctctgtactctg

SEQ ID NO: 5699618 - DNA, 25 bp, Homo sapien
cagagtacagagacctgcgtcgggg

SEQ ID NO: 5699619 - DNA, 25 bp, Homo sapien
gaccactgcgcaccccctcaggtgt

SEQ ID NO: 5699620 - DNA, 25 bp, Homo sapien
acacctgagggggtgcgcagtggtc

SEQ ID NO: 5699621 - DNA, 25 bp, Homo sapien
cgaacaccaggtggtccaaacacgg

SEQ ID NO: 5699622 - DNA, 25 bp, Homo sapien
ccgtgtttggaccacctggtgttcg

SEQ ID NO: 5699623 - DNA, 25 bp, Homo sapien
ccagggacggtataacgtgactcgt

SEQ ID NO: 5699624 - DNA, 25 bp, Homo sapien
acgagtcacgttataccgtccctgg

SEQ ID NO: 5699625 - DNA, 25 bp, Homo sapien
gcttacctattcttaacttgtgtat

SEQ ID NO: 5699626 - DNA, 25 bp, Homo sapien
atacacaagttaagaataggtaagc

SEQ ID NO: 5699627 - DNA, 25 bp, Homo sapien
gccgacgattgaacaagagatctac

SEQ ID NO: 5699628 - DNA, 25 bp, Homo sapien
gtagatctcttgttcaatcgtcggc

SEQ ID NO: 5699629 - DNA, 25 bp, Homo sapien
gtccccccctctcggaagctactgg

SEQ ID NO: 5699630 - DNA, 25 bp, Homo sapien
ccagtagcttccgagagggggggac

SEQ ID NO: 5699631 - DNA, 25 bp, Homo sapien
tttcttggtattaaaagttcactaa

SEQ ID NO: 5699632 - DNA, 25 bp, Homo sapien
ttagtgaacttttaataccaagaaa

SEQ ID NO: 5699633 - DNA, 25 bp, Homo sapien
atcagtatcatccgttaaagtaaaa

SEQ ID NO: 5699634 - DNA, 25 bp, Homo sapien
ttttactttaacggatgatactgat

SEQ ID NO: 5699635 - DNA, 25 bp, Homo sapien
tcatccttgttacaggagcggtcag

SEQ ID NO: 5699636 - DNA, 25 bp, Homo sapien
ctgaccgctcctgtaacaaggatga

SEQ ID NO: 5699637 - DNA, 25 bp, Homo sapien
tggaaggatacgtgacgcaccccgt

SEQ ID NO: 5699638 - DNA, 25 bp, Homo sapien
acggggtgcgtcacgtatccttcca

SEQ ID NO: 5699639 - DNA, 25 bp, Homo sapien
ctttgtcttccatggttgtagaggt

SEQ ID NO: 5699640 - DNA, 25 bp, Homo sapien
acctctacaaccatggaagacaaag

SEQ ID NO: 5699641 - DNA, 25 bp, Homo sapien
actgtcagtaagactgaacgtttag

SEQ ID NO: 5699642 - DNA, 25 bp, Homo sapien
ctaaacgttcagtcttactgacagt

SEQ ID NO: 5699643 - DNA, 25 bp, Homo sapien
ctgaagttattagtaaggttaggac

SEQ ID NO: 5699644 - DNA, 25 bp, Homo sapien
gtcctaaccttactaataacttcag

SEQ ID NO: 5699645 - DNA, 25 bp, Homo sapien
gtaacgactgacactcgtaacatga

SEQ ID NO: 5699646 - DNA, 25 bp, Homo sapien
tcatgttacgagtgtcagtcgttac

SEQ ID NO: 5699647 - DNA, 25 bp, Homo sapien
cacggtgccggacgacagtcgtacc

SEQ ID NO: 5699648 - DNA, 25 bp, Homo sapien
ggtacgactgtcgtccggcaccgtg

SEQ ID NO: 5699649 - DNA, 25 bp, Homo sapien
cgggtcgacgattatccttgtggct

SEQ ID NO: 5699650 - DNA, 25 bp, Homo sapien
agccacaaggataatcgtcgacccg

SEQ ID NO: 5699651 - DNA, 25 bp, Homo sapien
aagaaactgatgtatctaccgatag

SEQ ID NO: 5699652 - DNA, 25 bp, Homo sapien
ctatcggtagatacatcagtttctt

SEQ ID NO: 5699653 - DNA, 25 bp, Homo sapien
atcatctgtgataaggaggattgtc

SEQ ID NO: 5699654 - DNA, 25 bp, Homo sapien
gacaatcctccttatcacagatgat

SEQ ID NO: 5699655 - DNA, 25 bp, Homo sapien
actcataccccaacgagggtgctca

SEQ ID NO: 5699656 - DNA, 25 bp, Homo sapien
tgagcaccctcgttggggtatgagt

SEQ ID NO: 5699657 - DNA, 25 bp, Homo sapien
tccggcgcacggtcgctcctttcga

SEQ ID NO: 5699658 - DNA, 25 bp, Homo sapien
tcgaaaggagcgaccgtgcgccgga

SEQ ID NO: 5699659 - DNA, 25 bp, Homo sapien
tcgaccggttcccacagtacctggc

SEQ ID NO: 5699660 - DNA, 25 bp, Homo sapien
gccaggtactgtgggaaccggtcga

SEQ ID NO: 5699661 - DNA, 25 bp, Homo sapien
actttactatcctcgaaaagtcgaa

SEQ ID NO: 5699662 - DNA, 25 bp, Homo sapien
ttcgacttttcgaggatagtaaagt

SEQ ID NO: 5699663 - DNA, 25 bp, Homo sapien
actccggtcgagtgcaggtgcggcc

SEQ ID NO: 5699664 - DNA, 25 bp, Homo sapien
ggccgcacctgcactcgaccggagt

SEQ ID NO: 5699665 - DNA, 25 bp, Homo sapien
gaccactgtggggtccctcttcccc

SEQ ID NO: 5699666 - DNA, 25 bp, Homo sapien
ggggaagagggaccccacagtggtc

SEQ ID NO: 5699667 - DNA, 25 bp, Homo sapien
aacttgttttagaccgacgcgagcc

SEQ ID NO: 5699668 - DNA, 25 bp, Homo sapien
ggctcgcgtcggtctaaaacaagtt

SEQ ID NO: 5699669 - DNA, 25 bp, Homo sapien
ctgtggcaaagtctctggaacctct

SEQ ID NO: 5699670 - DNA, 25 bp, Homo sapien
agaggttccagagactttgccacag

SEQ ID NO: 5699671 - DNA, 25 bp, Homo sapien
gggatgtgaggttgtcgccgagagc

SEQ ID NO: 5699672 - DNA, 25 bp, Homo sapien
gctctcggcgacaacctcacatccc

SEQ ID NO: 5699673 - DNA, 25 bp, Homo sapien
gattctatgcccgacgtatgtcctt

SEQ ID NO: 5699674 - DNA, 25 bp, Homo sapien
aaggacatacgtcgggcatagaatc

SEQ ID NO: 5699675 - DNA, 25 bp, Homo sapien
atagtgatattagtgaaacctcaaa

SEQ ID NO: 5699676 - DNA, 25 bp, Homo sapien
tttgaggtttcactaatatcactat

SEQ ID NO: 5699677 - DNA, 25 bp, Homo sapien
ataaagctgaagagtggacataaag

SEQ ID NO: 5699678 - DNA, 25 bp, Homo sapien
ctttatgtccactcttcagctttat

SEQ ID NO: 5699679 - DNA, 25 bp, Homo sapien
ccgccacaggggtccattgggtacg

SEQ ID NO: 5699680 - DNA, 25 bp, Homo sapien
cgtacccaatggacccctgtggcgg

SEQ ID NO: 5699681 - DNA, 25 bp, Homo sapien
gactcaactattataaccatagaaa

SEQ ID NO: 5699682 - DNA, 25 bp, Homo sapien
tttctatggttataatagttgagtc

SEQ ID NO: 5699683 - DNA, 25 bp, Homo sapien
atacagactcaactattataaccat

SEQ ID NO: 5699684 - DNA, 25 bp, Homo sapien
atggttataatagttgagtctgtat

SEQ ID NO: 5699685 - DNA, 25 bp, Homo sapien
tattaacatatacgctaaaagtgac

SEQ ID NO: 5699686 - DNA, 25 bp, Homo sapien
gtcacttttagcgtatatgttaata

SEQ ID NO: 5699687 - DNA, 25 bp, Homo sapien
agcttcttaacggggtgtctccgca

SEQ ID NO: 5699688 - DNA, 25 bp, Homo sapien
tgcggagacaccccgttaagaagct

SEQ ID NO: 5699689 - DNA, 25 bp, Homo sapien
cgtaactaattgactgcttacacgg

SEQ ID NO: 5699690 - DNA, 25 bp, Homo sapien
ccgtgtaagcagtcaattagttacg

SEQ ID NO: 5699691 - DNA, 25 bp, Homo sapien
taggcccttctttgcgtacagagag

SEQ ID NO: 5699692 - DNA, 25 bp, Homo sapien
ctctctgtacgcaaagaagggccta

SEQ ID NO: 5699693 - DNA, 25 bp, Homo sapien
cgcgtcgggcactcgggtccacacc

SEQ ID NO: 5699694 - DNA, 25 bp, Homo sapien
ggtgtggacccgagtgcccgacgcg

SEQ ID NO: 5699695 - DNA, 25 bp, Homo sapien
cgactcgaaccctgtggtcgccctt

SEQ ID NO: 5699696 - DNA, 25 bp, Homo sapien
aagggcgaccacagggttcgagtcg

SEQ ID NO: 5699697 - DNA, 25 bp, Homo sapien
tgtctattttgaccaccaacttggt

SEQ ID NO: 5699698 - DNA, 25 bp, Homo sapien
accaagttggtggtcaaaatagaca

SEQ ID NO: 5699699 - DNA, 25 bp, Homo sapien
gaggagccgtggtactcgtggacgt

SEQ ID NO: 5699700 - DNA, 25 bp, Homo sapien
acgtccacgagtaccacggctcctc

SEQ ID NO: 5699701 - DNA, 25 bp, Homo sapien
gttactggcagtcgtactaatccgg

SEQ ID NO: 5699702 - DNA, 25 bp, Homo sapien
ccggattagtacgactgccagtaac

SEQ ID NO: 5699703 - DNA, 25 bp, Homo sapien
cgaagggccgttctccgccctctgg

SEQ ID NO: 5699704 - DNA, 25 bp, Homo sapien
ccagagggcggagaacggcccttcg

SEQ ID NO: 5699705 - DNA, 25 bp, Homo sapien
tactacgactagaaccattatgtaa

SEQ ID NO: 5699706 - DNA, 25 bp, Homo sapien
ttacataatggttctagtcgtagta

SEQ ID NO: 5699707 - DNA, 25 bp, Homo sapien
gccggctccggcccagactcctcgc

SEQ ID NO: 5699708 - DNA, 25 bp, Homo sapien
gcgaggagtctgggccggagccggc

SEQ ID NO: 5699709 - DNA, 25 bp, Homo sapien
gagcttcgtcgaccgccggctcgga

SEQ ID NO: 5699710 - DNA, 25 bp, Homo sapien
tccgagccggcggtcgacgaagctc

SEQ ID NO: 5699711 - DNA, 25 bp, Homo sapien
cgctagggagagtccgggtccggcg

SEQ ID NO: 5699712 - DNA, 25 bp, Homo sapien
cgccggacccggactctccctagcg

SEQ ID NO: 5699713 - DNA, 25 bp, Homo sapien
acatagaacgacttaataaaaacag

SEQ ID NO: 5699714 - DNA, 25 bp, Homo sapien
ctgtttttattaagtcgttctatgt

SEQ ID NO: 5699715 - DNA, 25 bp, Homo sapien
gatgtgtttcccagaccatgtttac

SEQ ID NO: 5699716 - DNA, 25 bp, Homo sapien
gtaaacatggtctgggaaacacatc

SEQ ID NO: 5699717 - DNA, 25 bp, Homo sapien
tcgggctaagtgtctgagggtggag

SEQ ID NO: 5699718 - DNA, 25 bp, Homo sapien
ctccaccctcagacacttagcccga

SEQ ID NO: 5699719 - DNA, 25 bp, Homo sapien
cgtctgaaaatagagtttatccttt

SEQ ID NO: 5699720 - DNA, 25 bp, Homo sapien
aaaggataaactctattttcagacg

SEQ ID NO: 5699721 - DNA, 25 bp, Homo sapien
tgtcctagtaaacactcttgacgag

SEQ ID NO: 5699722 - DNA, 25 bp, Homo sapien
ctcgtcaagagtgtttactaggaca

SEQ ID NO: 5699723 - DNA, 25 bp, Homo sapien
taaaatcctcaagtaacagtaaaaa

SEQ ID NO: 5699724 - DNA, 25 bp, Homo sapien
tttttactgttacttgaggatttta

SEQ ID NO: 5699725 - DNA, 25 bp, Homo sapien
gtgacggaggagagaccgggtcatg

SEQ ID NO: 5699726 - DNA, 25 bp, Homo sapien
catgacccggtctctcctccgtcac

SEQ ID NO: 5699727 - DNA, 25 bp, Homo sapien
atctgaactgttgaccttgagacat

SEQ ID NO: 5699728 - DNA, 25 bp, Homo sapien
atgtctcaaggtcaacagttcagat

SEQ ID NO: 5699729 - DNA, 25 bp, Homo sapien
cttcaggccataatatgtagttcaa

SEQ ID NO: 5699730 - DNA, 25 bp, Homo sapien
ttgaactacatattatggcctgaag

SEQ ID NO: 5699731 - DNA, 25 bp, Homo sapien
gcccgtgcccgcgtgtcccgccccg

SEQ ID NO: 5699732 - DNA, 25 bp, Homo sapien
cggggcgggacacgcgggcacgggc

SEQ ID NO: 5699733 - DNA, 25 bp, Homo sapien
gtgcccgcgtgtcccgccccgtcgc

SEQ ID NO: 5699734 - DNA, 25 bp, Homo sapien
gcgacggggcgggacacgcgggcac

SEQ ID NO: 5699735 - DNA, 25 bp, Homo sapien
cgtgcccgcgtgtcccgccccgtcg

SEQ ID NO: 5699736 - DNA, 25 bp, Homo sapien
cgacggggcgggacacgcgggcacg

SEQ ID NO: 5699737 - DNA, 25 bp, Homo sapien
ccgtgcccgcgtgtcccgccccgtc

SEQ ID NO: 5699738 - DNA, 25 bp, Homo sapien
gacggggcgggacacgcgggcacgg

SEQ ID NO: 5699739 - DNA, 25 bp, Homo sapien
agacacgtcactcttcccggtacaa

SEQ ID NO: 5699740 - DNA, 25 bp, Homo sapien
ttgtaccgggaagagtgacgtgtct

SEQ ID NO: 5699741 - DNA, 25 bp, Homo sapien
cggtcgagagctcggcgcgccggca

SEQ ID NO: 5699742 - DNA, 25 bp, Homo sapien
tgccggcgcgccgagctctcgaccg

SEQ ID NO: 5699743 - DNA, 25 bp, Homo sapien
tcgcaccggaggtgtggtgcccggg

SEQ ID NO: 5699744 - DNA, 25 bp, Homo sapien
cccgggcaccacacctccggtgcga

SEQ ID NO: 5699745 - DNA, 25 bp, Homo sapien
ttcacgttttaatataagatcttac

SEQ ID NO: 5699746 - DNA, 25 bp, Homo sapien
gtaagatcttatattaaaacgtgaa

SEQ ID NO: 5699747 - DNA, 25 bp, Homo sapien
acattactgtagagtcgttgagcat

SEQ ID NO: 5699748 - DNA, 25 bp, Homo sapien
atgctcaacgactctacagtaatgt

SEQ ID NO: 5699749 - DNA, 25 bp, Homo sapien
tgacgaggtagtttctgacacaagg

SEQ ID NO: 5699750 - DNA, 25 bp, Homo sapien
ccttgtgtcagaaactacctcgtca

SEQ ID NO: 5699751 - DNA, 25 bp, Homo sapien
tgtgcggtcccggatcctagtcttt

SEQ ID NO: 5699752 - DNA, 25 bp, Homo sapien
aaagactaggatccgggaccgcaca

SEQ ID NO: 5699753 - DNA, 25 bp, Homo sapien
gagacttgtcgtcccccgggctccg

SEQ ID NO: 5699754 - DNA, 25 bp, Homo sapien
cggagcccgggggacgacaagtctc

SEQ ID NO: 5699755 - DNA, 25 bp, Homo sapien
cctctaacgggtgggttctgaggtc

SEQ ID NO: 5699756 - DNA, 25 bp, Homo sapien
gacctcagaacccacccgttagagg

SEQ ID NO: 5699757 - DNA, 25 bp, Homo sapien
ggacccgagatcgaacgacagtgaa

SEQ ID NO: 5699758 - DNA, 25 bp, Homo sapien
ttcactgtcgttcgatctcgggtcc

SEQ ID NO: 5699759 - DNA, 25 bp, Homo sapien
acctgtggcaacctgcgaatgaggt

SEQ ID NO: 5699760 - DNA, 25 bp, Homo sapien
acctcattcgcaggttgccacaggt

SEQ ID NO: 5699761 - DNA, 25 bp, Homo sapien
gaacaacgagcacatttgtggagaa

SEQ ID NO: 5699762 - DNA, 25 bp, Homo sapien
ttctccacaaatgtgctcgttgttc

SEQ ID NO: 5699763 - DNA, 25 bp, Homo sapien
gaggaggaggcgccgggccgggttg

SEQ ID NO: 5699764 - DNA, 25 bp, Homo sapien
caacccggcccggcgcctcctcctc

SEQ ID NO: 5699765 - DNA, 25 bp, Homo sapien
aagaggtatcaaatcctggtgcaac

SEQ ID NO: 5699766 - DNA, 25 bp, Homo sapien
gttgcaccaggatttgatacctctt

SEQ ID NO: 5699767 - DNA, 25 bp, Homo sapien
gtaagtcaatttgatgaatcttgtc

SEQ ID NO: 5699768 - DNA, 25 bp, Homo sapien
gacaagattcatcaaattgacttac

SEQ ID NO: 5699769 - DNA, 25 bp, Homo sapien
ggacacaacgtcgtgctggttacag

SEQ ID NO: 5699770 - DNA, 25 bp, Homo sapien
ctgtaaccagcacgacgttgtgtcc

SEQ ID NO: 5699771 - DNA, 25 bp, Homo sapien
agggccggcgcgagcgtgcgccacg

SEQ ID NO: 5699772 - DNA, 25 bp, Homo sapien
cgtggcgcacgctcgcgccggccct

SEQ ID NO: 5699773 - DNA, 25 bp, Homo sapien
acccgagggaaaccgcagcggtcga

SEQ ID NO: 5699774 - DNA, 25 bp, Homo sapien
tcgaccgctgcggtttccctcgggt

SEQ ID NO: 5699775 - DNA, 25 bp, Homo sapien
tattaaccacgtatcccgacccact

SEQ ID NO: 5699776 - DNA, 25 bp, Homo sapien
agtgggtcgggatacgtggttaata

SEQ ID NO: 5699777 - DNA, 25 bp, Homo sapien
aaaagactgttagtaattggtccag

SEQ ID NO: 5699778 - DNA, 25 bp, Homo sapien
ctggaccaattactaacagtctttt

SEQ ID NO: 5699779 - DNA, 25 bp, Homo sapien
ggttttcattataatctaaactaaa

SEQ ID NO: 5699780 - DNA, 25 bp, Homo sapien
tttagtttagattataatgaaaacc

SEQ ID NO: 5699781 - DNA, 25 bp, Homo sapien
aggttttcattataatctaaactaa

SEQ ID NO: 5699782 - DNA, 25 bp, Homo sapien
ttagtttagattataatgaaaacct

SEQ ID NO: 5699783 - DNA, 25 bp, Homo sapien
agtcagacctcctgtgctgtccaag

SEQ ID NO: 5699784 - DNA, 25 bp, Homo sapien
cttggacagcacaggaggtctgact

SEQ ID NO: 5699785 - DNA, 25 bp, Homo sapien
tgcggagggccctgccgctcgggcg

SEQ ID NO: 5699786 - DNA, 25 bp, Homo sapien
cgcccgagcggcagggccctccgca

SEQ ID NO: 5699787 - DNA, 25 bp, Homo sapien
gcctgcggagggccctgccgctcgg

SEQ ID NO: 5699788 - DNA, 25 bp, Homo sapien
ccgagcggcagggccctccgcaggc

SEQ ID NO: 5699789 - DNA, 25 bp, Homo sapien
ggcctgcggagggccctgccgctcg

SEQ ID NO: 5699790 - DNA, 25 bp, Homo sapien
cgagcggcagggccctccgcaggcc

SEQ ID NO: 5699791 - DNA, 25 bp, Homo sapien
gagtatcgtccactggtaaagaaac

SEQ ID NO: 5699792 - DNA, 25 bp, Homo sapien
gtttctttaccagtggacgatactc

SEQ ID NO: 5699793 - DNA, 25 bp, Homo sapien
gtgtcctaactgaatacattcctat

SEQ ID NO: 5699794 - DNA, 25 bp, Homo sapien
ataggaatgtattcagttaggacac

SEQ ID NO: 5699795 - DNA, 25 bp, Homo sapien
agttgtcgaaatctcggtgtaacgg

SEQ ID NO: 5699796 - DNA, 25 bp, Homo sapien
ccgttacaccgagatttcgacaact

SEQ ID NO: 5699797 - DNA, 25 bp, Homo sapien
ggtcaaaacgagaccgctcgcgacg

SEQ ID NO: 5699798 - DNA, 25 bp, Homo sapien
cgtcgcgagcggtctcgttttgacc

SEQ ID NO: 5699799 - DNA, 25 bp, Homo sapien
ctatatctggtcacgagtagttaac

SEQ ID NO: 5699800 - DNA, 25 bp, Homo sapien
gttaactactcgtgaccagatatag

SEQ ID NO: 5699801 - DNA, 25 bp, Homo sapien
gaataaactttacatccttgaaaac

SEQ ID NO: 5699802 - DNA, 25 bp, Homo sapien
gttttcaaggatgtaaagtttattc

SEQ ID NO: 5699803 - DNA, 25 bp, Homo sapien
cgtcgagcgtctgggggcgcgtccg

SEQ ID NO: 5699804 - DNA, 25 bp, Homo sapien
cggacgcgcccccagacgctcgacg

SEQ ID NO: 5699805 - DNA, 25 bp, Homo sapien
aattttggcctgctacgacgtcgcg

SEQ ID NO: 5699806 - DNA, 25 bp, Homo sapien
cgcgacgtcgtagcaggccaaaatt

SEQ ID NO: 5699807 - DNA, 25 bp, Homo sapien
aagtagtaacaattaagcgtgaagg

SEQ ID NO: 5699808 - DNA, 25 bp, Homo sapien
ccttcacgcttaattgttactactt

SEQ ID NO: 5699809 - DNA, 25 bp, Homo sapien
ttcaaaagttctaatgtggaggtat

SEQ ID NO: 5699810 - DNA, 25 bp, Homo sapien
atacctccacattagaacttttgaa

SEQ ID NO: 5699811 - DNA, 25 bp, Homo sapien
gctacgcgagtagaaagggcgccct

SEQ ID NO: 5699812 - DNA, 25 bp, Homo sapien
agggcgccctttctactcgcgtagc

SEQ ID NO: 5699813 - DNA, 25 bp, Homo sapien
taaaaatagaaacatcagacttctt

SEQ ID NO: 5699814 - DNA, 25 bp, Homo sapien
aagaagtctgatgtttctattttta

SEQ ID NO: 5699815 - DNA, 25 bp, Homo sapien
catgagtatacactgatctagattc

SEQ ID NO: 5699816 - DNA, 25 bp, Homo sapien
gaatctagatcagtgtatactcatg

SEQ ID NO: 5699817 - DNA, 25 bp, Homo sapien
aaagaaaatgagtaatggacacaat

SEQ ID NO: 5699818 - DNA, 25 bp, Homo sapien
attgtgtccattactcattttcttt

SEQ ID NO: 5699819 - DNA, 25 bp, Homo sapien
cgaacttgattccagacgtgacacc

SEQ ID NO: 5699820 - DNA, 25 bp, Homo sapien
ggtgtcacgtctggaatcaagttcg

SEQ ID NO: 5699821 - DNA, 25 bp, Homo sapien
attccatcatctacatatgtctcct

SEQ ID NO: 5699822 - DNA, 25 bp, Homo sapien
aggagacatatgtagatgatggaat

SEQ ID NO: 5699823 - DNA, 25 bp, Homo sapien
tacgctagagcacaccgctcggagg

SEQ ID NO: 5699824 - DNA, 25 bp, Homo sapien
cctccgagcggtgtgctctagcgta

SEQ ID NO: 5699825 - DNA, 25 bp, Homo sapien
gagtttcttcctactcccctaacac

SEQ ID NO: 5699826 - DNA, 25 bp, Homo sapien
gtgttaggggagtaggaagaaactc

SEQ ID NO: 5699827 - DNA, 25 bp, Homo sapien
ttccagtaggcctcccgcgtcagag

SEQ ID NO: 5699828 - DNA, 25 bp, Homo sapien
ctctgacgcgggaggcctactggaa

SEQ ID NO: 5699829 - DNA, 25 bp, Homo sapien
tggttaagcgccttcgtagacagac

SEQ ID NO: 5699830 - DNA, 25 bp, Homo sapien
gtctgtctacgaaggcgcttaacca

SEQ ID NO: 5699831 - DNA, 25 bp, Homo sapien
gaagcggaactctccaactcgttgg

SEQ ID NO: 5699832 - DNA, 25 bp, Homo sapien
ccaacgagttggagagttccgcttc

SEQ ID NO: 5699833 - DNA, 25 bp, Homo sapien
ttgtgttgcatagccggtagaggta

SEQ ID NO: 5699834 - DNA, 25 bp, Homo sapien
tacctctaccggctatgcaacacaa

SEQ ID NO: 5699835 - DNA, 25 bp, Homo sapien
cgtagggccgagactcaccccgcgt

SEQ ID NO: 5699836 - DNA, 25 bp, Homo sapien
acgcggggtgagtctcggccctacg

SEQ ID NO: 5699837 - DNA, 25 bp, Homo sapien
aatcgttataagtcgttactacacc

SEQ ID NO: 5699838 - DNA, 25 bp, Homo sapien
ggtgtagtaacgacttataacgatt

SEQ ID NO: 5699839 - DNA, 25 bp, Homo sapien
cctcctcccacgtccctcctcgtcg

SEQ ID NO: 5699840 - DNA, 25 bp, Homo sapien
cgacgaggagggacgtgggaggagg

SEQ ID NO: 5699841 - DNA, 25 bp, Homo sapien
agacgagagcccgtgcctggccgta

SEQ ID NO: 5699842 - DNA, 25 bp, Homo sapien
tacggccaggcacgggctctcgtct

SEQ ID NO: 5699843 - DNA, 25 bp, Homo sapien
ccaatttagagtgtctattttaaga

SEQ ID NO: 5699844 - DNA, 25 bp, Homo sapien
tcttaaaatagacactctaaattgg

SEQ ID NO: 5699845 - DNA, 25 bp, Homo sapien
tcttcgtcggggacggcttcatgtc

SEQ ID NO: 5699846 - DNA, 25 bp, Homo sapien
gacatgaagccgtccccgacgaaga

SEQ ID NO: 5699847 - DNA, 25 bp, Homo sapien
gtttcgtcgcgcacacggcctgcgg

SEQ ID NO: 5699848 - DNA, 25 bp, Homo sapien
ccgcaggccgtgtgcgcgacgaaac

SEQ ID NO: 5699849 - DNA, 25 bp, Homo sapien
gtaaggtccacccttgcctctacag

SEQ ID NO: 5699850 - DNA, 25 bp, Homo sapien
ctgtagaggcaagggtggaccttac

SEQ ID NO: 5699851 - DNA, 25 bp, Homo sapien
aacggccccgatctgtgacgcggtc

SEQ ID NO: 5699852 - DNA, 25 bp, Homo sapien
gaccgcgtcacagatcggggccgtt

SEQ ID NO: 5699853 - DNA, 25 bp, Homo sapien
gttgtttttcgcatcctttatgagg

SEQ ID NO: 5699854 - DNA, 25 bp, Homo sapien
cctcataaaggatgcgaaaaacaac

SEQ ID NO: 5699855 - DNA, 25 bp, Homo sapien
gatcctctttgtgtaatgttcttaa

SEQ ID NO: 5699856 - DNA, 25 bp, Homo sapien
ttaagaacattacacaaagaggatc

SEQ ID NO: 5699857 - DNA, 25 bp, Homo sapien
tctcaacacctaacagcagaaaaag

SEQ ID NO: 5699858 - DNA, 25 bp, Homo sapien
ctttttctgctgttaggtgttgaga

SEQ ID NO: 5699859 - DNA, 25 bp, Homo sapien
atccaggctgcgttccgtcaaggtg

SEQ ID NO: 5699860 - DNA, 25 bp, Homo sapien
caccttgacggaacgcagcctggat

SEQ ID NO: 5699861 - DNA, 25 bp, Homo sapien
actccgttgttctccactcttacaa

SEQ ID NO: 5699862 - DNA, 25 bp, Homo sapien
ttgtaagagtggagaacaacggagt

SEQ ID NO: 5699863 - DNA, 25 bp, Homo sapien
acctactccgagataccgacatatg

SEQ ID NO: 5699864 - DNA, 25 bp, Homo sapien
catatgtcggtatctcggagtaggt

SEQ ID NO: 5699865 - DNA, 25 bp, Homo sapien
cccgtccgtcgagtgcggtagtggg

SEQ ID NO: 5699866 - DNA, 25 bp, Homo sapien
cccactaccgcactcgacggacggg

SEQ ID NO: 5699867 - DNA, 25 bp, Homo sapien
gggtacgtgaaaatagaacaatagt

SEQ ID NO: 5699868 - DNA, 25 bp, Homo sapien
actattgttctattttcacgtaccc

SEQ ID NO: 5699869 - DNA, 25 bp, Homo sapien
aaggaaatacgcacgttgtccctaa

SEQ ID NO: 5699870 - DNA, 25 bp, Homo sapien
ttagggacaacgtgcgtatttcctt

SEQ ID NO: 5699871 - DNA, 25 bp, Homo sapien
agcgcccaccaggaccagcccggtt

SEQ ID NO: 5699872 - DNA, 25 bp, Homo sapien
aaccgggctggtcctggtgggcgct

SEQ ID NO: 5699873 - DNA, 25 bp, Homo sapien
accgtagagccaaataataatgtac

SEQ ID NO: 5699874 - DNA, 25 bp, Homo sapien
gtacattattatttggctctacggt

SEQ ID NO: 5699875 - DNA, 25 bp, Homo sapien
tttgattcagattagagttctaata

SEQ ID NO: 5699876 - DNA, 25 bp, Homo sapien
tattagaactctaatctgaatcaaa

SEQ ID NO: 5699877 - DNA, 25 bp, Homo sapien
gaggccttcgccctcgcacccgtcg

SEQ ID NO: 5699878 - DNA, 25 bp, Homo sapien
cgacgggtgcgagggcgaaggcctc

SEQ ID NO: 5699879 - DNA, 25 bp, Homo sapien
agggaggaggtggttgagtacatga

SEQ ID NO: 5699880 - DNA, 25 bp, Homo sapien
tcatgtactcaaccacctcctccct

SEQ ID NO: 5699881 - DNA, 25 bp, Homo sapien
tacgtgtttccactaatgaccttag

SEQ ID NO: 5699882 - DNA, 25 bp, Homo sapien
ctaaggtcattagtggaaacacgta

SEQ ID NO: 5699883 - DNA, 25 bp, Homo sapien
tgtcaacgaagtaatatctcaaatt

SEQ ID NO: 5699884 - DNA, 25 bp, Homo sapien
aatttgagatattacttcgttgaca

SEQ ID NO: 5699885 - DNA, 25 bp, Homo sapien
ggaactccttcctatcgtcccgctc

SEQ ID NO: 5699886 - DNA, 25 bp, Homo sapien
gagcgggacgataggaaggagttcc

SEQ ID NO: 5699887 - DNA, 25 bp, Homo sapien
accactaacttacctacaaactcat

SEQ ID NO: 5699888 - DNA, 25 bp, Homo sapien
atgagtttgtaggtaagttagtggt

SEQ ID NO: 5699889 - DNA, 25 bp, Homo sapien
cgtctcttagaatatgataacgtgt

SEQ ID NO: 5699890 - DNA, 25 bp, Homo sapien
acacgttatcatattctaagagacg

SEQ ID NO: 5699891 - DNA, 25 bp, Homo sapien
cggccgccttttgcgtcgcgccgct

SEQ ID NO: 5699892 - DNA, 25 bp, Homo sapien
agcggcgcgacgcaaaaggcggccg

SEQ ID NO: 5699893 - DNA, 25 bp, Homo sapien
ggagtgaagtgtgaccgtctcgggt

SEQ ID NO: 5699894 - DNA, 25 bp, Homo sapien
acccgagacggtcacacttcactcc

SEQ ID NO: 5699895 - DNA, 25 bp, Homo sapien
gttctgactcacctttatacaagag

SEQ ID NO: 5699896 - DNA, 25 bp, Homo sapien
ctcttgtataaaggtgagtcagaac

SEQ ID NO: 5699897 - DNA, 25 bp, Homo sapien
gtctaaataatcaattttcttgcat

SEQ ID NO: 5699898 - DNA, 25 bp, Homo sapien
atgcaagaaaattgattatttagac

SEQ ID NO: 5699899 - DNA, 25 bp, Homo sapien
tccctccggtctaacggctcccgac

SEQ ID NO: 5699900 - DNA, 25 bp, Homo sapien
gtcgggagccgttagaccggaggga

SEQ ID NO: 5699901 - DNA, 25 bp, Homo sapien
aagtctcctagtcggtacaataaaa

SEQ ID NO: 5699902 - DNA, 25 bp, Homo sapien
ttttattgtaccgactaggagactt

SEQ ID NO: 5699903 - DNA, 25 bp, Homo sapien
tctgttctctatccaacccttcact

SEQ ID NO: 5699904 - DNA, 25 bp, Homo sapien
agtgaagggttggatagagaacaga

SEQ ID NO: 5699905 - DNA, 25 bp, Homo sapien
atttaattgaagtaaggacgatgta

SEQ ID NO: 5699906 - DNA, 25 bp, Homo sapien
tacatcgtccttacttcaattaaat

SEQ ID NO: 5699907 - DNA, 25 bp, Homo sapien
aaacataagtaagaccatcttttgt

SEQ ID NO: 5699908 - DNA, 25 bp, Homo sapien
acaaaagatggtcttacttatgttt

SEQ ID NO: 5699909 - DNA, 25 bp, Homo sapien
ccgccgaaaggacagtcgccgacgg

SEQ ID NO: 5699910 - DNA, 25 bp, Homo sapien
ccgtcggcgactgtcctttcggcgg

SEQ ID NO: 5699911 - DNA, 25 bp, Homo sapien
gcgcggcccgtgtgcgcaggaggtc

SEQ ID NO: 5699912 - DNA, 25 bp, Homo sapien
gacctcctgcgcacacgggccgcgc

SEQ ID NO: 5699913 - DNA, 25 bp, Homo sapien
aattttgtactagaacaacaatcac

SEQ ID NO: 5699914 - DNA, 25 bp, Homo sapien
gtgattgttgttctagtacaaaatt

SEQ ID NO: 5699915 - DNA, 25 bp, Homo sapien
gtaaacggccgctgtgggctcgccc

SEQ ID NO: 5699916 - DNA, 25 bp, Homo sapien
gggcgagcccacagcggccgtttac

SEQ ID NO: 5699917 - DNA, 25 bp, Homo sapien
ttcgatcgtacacacaaccttgtcg

SEQ ID NO: 5699918 - DNA, 25 bp, Homo sapien
cgacaaggttgtgtgtacgatcgaa

SEQ ID NO: 5699919 - DNA, 25 bp, Homo sapien
gtgacccctgcggttcaggcgtcgg

SEQ ID NO: 5699920 - DNA, 25 bp, Homo sapien
ccgacgcctgaaccgcaggggtcac

SEQ ID NO: 5699921 - DNA, 25 bp, Homo sapien
aggacacccagtctacctgtagcac

SEQ ID NO: 5699922 - DNA, 25 bp, Homo sapien
gtgctacaggtagactgggtgtcct

SEQ ID NO: 5699923 - DNA, 25 bp, Homo sapien
gacagacgccgttgtctgtggcggg

SEQ ID NO: 5699924 - DNA, 25 bp, Homo sapien
cccgccacagacaacggcgtctgtc

SEQ ID NO: 5699925 - DNA, 25 bp, Homo sapien
aagtagtacgtcgaggcctcgggcc

SEQ ID NO: 5699926 - DNA, 25 bp, Homo sapien
ggcccgaggcctcgacgtactactt

SEQ ID NO: 5699927 - DNA, 25 bp, Homo sapien
ggacggaccgctcggcccgagtgcg

SEQ ID NO: 5699928 - DNA, 25 bp, Homo sapien
cgcactcgggccgagcggtccgtcc

SEQ ID NO: 5699929 - DNA, 25 bp, Homo sapien
gtcagggcttcctgccccgcctcct

SEQ ID NO: 5699930 - DNA, 25 bp, Homo sapien
aggaggcggggcaggaagccctgac

SEQ ID NO: 5699931 - DNA, 25 bp, Homo sapien
tttaaacagagatacgaattatatt

SEQ ID NO: 5699932 - DNA, 25 bp, Homo sapien
aatataattcgtatctctgtttaaa

SEQ ID NO: 5699933 - DNA, 25 bp, Homo sapien
ggtgagcctggccagtgaagtccag

SEQ ID NO: 5699934 - DNA, 25 bp, Homo sapien
gggctactacctgagcttcctgacc

SEQ ID NO: 5699935 - DNA, 25 bp, Homo sapien
tgccccggagaagctccgggaggag

SEQ ID NO: 5699936 - DNA, 25 bp, Homo sapien
ctgggagtgggaagcctcttccttg

SEQ ID NO: 5699937 - DNA, 25 bp, Homo sapien
tcccatttcacaaaggggaaactga

SEQ ID NO: 5699938 - DNA, 25 bp, Homo sapien
ctgggtatccagagagcactgcact

SEQ ID NO: 5699939 - DNA, 25 bp, Homo sapien
gggctcaccctgttcacctgtggcc

SEQ ID NO: 5699940 - DNA, 25 bp, Homo sapien
agtggtggctggcgcagtatatcta

SEQ ID NO: 5699941 - DNA, 25 bp, Homo sapien
gctcctgccacgccctggctctggc

SEQ ID NO: 5699942 - DNA, 25 bp, Homo sapien
gggcctccatctacttctgtatcca

SEQ ID NO: 5699943 - DNA, 25 bp, Homo sapien
gtatccagagagcactgcacttccc

SEQ ID NO: 5699944 - DNA, 25 bp, Homo sapien
ttaccttggagagggtcctggagag

SEQ ID NO: 5699945 - DNA, 25 bp, Homo sapien
catgtgcatgggcttcgtgctgctc

SEQ ID NO: 5699946 - DNA, 25 bp, Homo sapien
ccgtccagctgctgctgacgctgaa

SEQ ID NO: 5699947 - DNA, 25 bp, Homo sapien
caccctccaatgcccaccccccagc

SEQ ID NO: 5699948 - DNA, 25 bp, Homo sapien
gggaatcatgacaggcccgttcttc

SEQ ID NO: 5699949 - DNA, 25 bp, Homo sapien
gggactgctcggcccctcctgcccg

SEQ ID NO: 5699950 - DNA, 25 bp, Homo sapien
catccgcaacatcgactgctacagc

SEQ ID NO: 5699951 - DNA, 25 bp, Homo sapien
actacatgtgcatgggcttcgtgct

SEQ ID NO: 5699952 - DNA, 25 bp, Homo sapien
gagcttcctgaccatcccgctgtgc

SEQ ID NO: 5699953 - DNA, 25 bp, Homo sapien
tcttcccgctggaggccgtgcgcga

SEQ ID NO: 5699954 - DNA, 25 bp, Homo sapien
gactttctcctatctcctgttcttc

SEQ ID NO: 5699955 - DNA, 25 bp, Homo sapien
gtgtctttcgctccacttttagctc

SEQ ID NO: 5699956 - DNA, 25 bp, Homo sapien
gtgcgcgggcctggggacggccgtc

SEQ ID NO: 5699957 - DNA, 25 bp, Homo sapien
gtactggaacatgacggtgcagtgg

SEQ ID NO: 5699958 - DNA, 25 bp, Homo sapien
ccgggggtgtcctccctgccctctg

SEQ ID NO: 5699959 - DNA, 25 bp, Homo sapien
cgcaacatcgactgctacagcacag

SEQ ID NO: 5699960 - DNA, 25 bp, Homo sapien
cgcgcctatgactacatgtgcatgg

SEQ ID NO: 5699961 - DNA, 25 bp, Homo sapien
cgcctggccggccccgctcttcggc

SEQ ID NO: 5699962 - DNA, 25 bp, Homo sapien
cctggcgccctcttctcatcgcttg

SEQ ID NO: 5699963 - DNA, 25 bp, Homo sapien
gggtatccagagagcactgcacttc

SEQ ID NO: 5699964 - DNA, 25 bp, Homo sapien
atcgactgctacagcacagatttct

SEQ ID NO: 5699965 - DNA, 25 bp, Homo sapien
ggcccaccctggggctgctgcccga

SEQ ID NO: 5699966 - DNA, 25 bp, Homo sapien
gcccgcccgctgcccgcccgcctct

SEQ ID NO: 5699967 - DNA, 25 bp, Homo sapien
ctggggacggccgtcccatggcttc

SEQ ID NO: 5699968 - DNA, 25 bp, Homo sapien
tggaaggaagcataagcttcccatt

SEQ ID NO: 5699969 - DNA, 25 bp, Homo sapien
ggggcaggtcctgggagtgggaagc

SEQ ID NO: 5699970 - DNA, 25 bp, Homo sapien
actgggtgcactggttcctgaagat

SEQ ID NO: 5699971 - DNA, 25 bp, Homo sapien
gacaagagtcactggcccctgctcc

SEQ ID NO: 5699972 - DNA, 25 bp, Homo sapien
gcccgttcctatgtcctgcggagcg

SEQ ID NO: 5699973 - DNA, 25 bp, Homo sapien
agcccttccccggggcagtgcccag

SEQ ID NO: 5699974 - DNA, 25 bp, Homo sapien
atgtcctgcggagcgcctggaccat

SEQ ID NO: 5699975 - DNA, 25 bp, Homo sapien
ggcctggactttctcctatctcctg

SEQ ID NO: 5699976 - DNA, 25 bp, Homo sapien
ggggcccaccctggggctgctgccc

SEQ ID NO: 5699977 - DNA, 25 bp, Homo sapien
gcgcacctgcccgttcctatgtcct

SEQ ID NO: 5699978 - DNA, 25 bp, Homo sapien
ttggccgacacccttcggtactggg

SEQ ID NO: 5699979 - DNA, 25 bp, Homo sapien
ccggagaagctccgggaggagtaag

SEQ ID NO: 5699980 - DNA, 25 bp, Homo sapien
gaaagccggtcctgggctgaagaga

SEQ ID NO: 5699981 - DNA, 25 bp, Homo sapien
ggccgtcccatggcttccatctgag

SEQ ID NO: 5699982 - DNA, 25 bp, Homo sapien
ccaatgcccaccccccagcagtccg

SEQ ID NO: 5699983 - DNA, 25 bp, Homo sapien
gaagcataagcttcccatttcacaa

SEQ ID NO: 5699984 - DNA, 25 bp, Homo sapien
accatccgcaacatcgactgctaca

SEQ ID NO: 5699985 - DNA, 25 bp, Homo sapien
aagagtccttaccttggagagggtc

SEQ ID NO: 5699986 - DNA, 25 bp, Homo sapien
gtggttcttcttatctccatcccca

SEQ ID NO: 5699987 - DNA, 25 bp, Homo sapien
tgcagacttggaaggaagcataagc

SEQ ID NO: 5699988 - DNA, 25 bp, Homo sapien
cctcattcaggcccagccctgctcc

SEQ ID NO: 5699989 - DNA, 25 bp, Homo sapien
ttcccgctggaggccgtgcgcgagg

SEQ ID NO: 5699990 - DNA, 25 bp, Homo sapien
cccgcccgcctcttctacatgatcc

SEQ ID NO: 5699991 - DNA, 25 bp, Homo sapien
tcttctcatcgcttggcctatgaca

SEQ ID NO: 5699992 - DNA, 25 bp, Homo sapien
ctttcgctccacttttagctcatcg

SEQ ID NO: 5699993 - DNA, 25 bp, Homo sapien
aagctgtcacgacgctccctctgcc

SEQ ID NO: 5699994 - DNA, 25 bp, Homo sapien
tgtgcatgggcttcgtgctgctctc

SEQ ID NO: 5699995 - DNA, 25 bp, Homo sapien
tggcccctgctccagcttctgggta

SEQ ID NO: 5699996 - DNA, 25 bp, Homo sapien
caggtcctgggagtgggaagcctct

SEQ ID NO: 5699997 - DNA, 25 bp, Homo sapien
gtgcgggtgcgcgggcctggggacg

SEQ ID NO: 5699998 - DNA, 25 bp, Homo sapien
gtgccctccctgatggagacactca

SEQ ID NO: 5699999 - DNA, 25 bp, Homo sapien
aggccgtgcgcgaggacgccttcta

SEQ ID NO: 5700000 - DNA, 25 bp, Homo sapien
cctgctgttcctgctctcctctcac

SEQ ID NO: 5700001 - DNA, 25 bp, Homo sapien
agaaggcctgggactgggtgcactg

SEQ ID NO: 5700002 - DNA, 25 bp, Homo sapien
acctgcatctggcccagaggaagga

SEQ ID NO: 5700003 - DNA, 25 bp, Homo sapien
cgcctactggcacggcctccacccg

SEQ ID NO: 5700004 - DNA, 25 bp, Homo sapien
gcggaaggcagcatcccagcccacc

SEQ ID NO: 5700005 - DNA, 25 bp, Homo sapien
ccagctgctgctgacgctgaagctg

SEQ ID NO: 5700006 - DNA, 25 bp, Homo sapien
gagggccggctggagtcagccctgc

SEQ ID NO: 5700007 - DNA, 25 bp, Homo sapien
tctacgtggcctggattgccgccga

SEQ ID NO: 5700008 - DNA, 25 bp, Homo sapien
aatggacgtatctagtggttcttct

SEQ ID NO: 5700009 - DNA, 25 bp, Homo sapien
tcgcaccaatattgcagacttggaa

SEQ ID NO: 5700010 - DNA, 25 bp, Homo sapien
cccaataaagtgttgcacaaagaaa

SEQ ID NO: 5700011 - DNA, 25 bp, Homo sapien
taccgcacctacctggactggctgg

SEQ ID NO: 5700012 - DNA, 25 bp, Homo sapien
ctgctctcctctcacctcttcccgc

SEQ ID NO: 5700013 - DNA, 25 bp, Homo sapien
agcttcccatttcacaaaggggaaa

SEQ ID NO: 5700014 - DNA, 25 bp, Homo sapien
cctggagagaatttcctcttcccca

SEQ ID NO: 5700015 - DNA, 25 bp, Homo sapien
tggactttctcctatctcctgttct

SEQ ID NO: 5700016 - DNA, 25 bp, Homo sapien
cgtatctagtggttcttcttatctc

SEQ ID NO: 5700017 - DNA, 25 bp, Homo sapien
ccttcaccaatgccgtccagctgct

SEQ ID NO: 5700018 - DNA, 25 bp, Homo sapien
agcacagatttctgcgtgcgggtgc

SEQ ID NO: 5700019 - DNA, 25 bp, Homo sapien
actcccacgcccttcaccaatgccg

SEQ ID NO: 5700020 - DNA, 25 bp, Homo sapien
agacactcagctacagctactgcta

SEQ ID NO: 5700021 - DNA, 25 bp, Homo sapien
ggcttcctctttaagaaagccggtc

SEQ ID NO: 5700022 - DNA, 25 bp, Homo sapien
ctacaagagcgcacctgcccgttcc

SEQ ID NO: 5700023 - DNA, 25 bp, Homo sapien
tgcattgccgccggctttggggcct

SEQ ID NO: 5700024 - DNA, 25 bp, Homo sapien
tttgcattctctggtcaccatcctc

SEQ ID NO: 5700025 - DNA, 25 bp, Homo sapien
atcccagcccaccagccttgccccg

SEQ ID NO: 5700026 - DNA, 25 bp, Homo sapien
gggcctgcccactcccacgcccttc

SEQ ID NO: 5700027 - DNA, 25 bp, Homo sapien
tgcgggtgcgcgatggcatgcggta

SEQ ID NO: 5700028 - DNA, 25 bp, Homo sapien
tacatgtgcatgggcttcgtgctgc

SEQ ID NO: 5700029 - DNA, 25 bp, Homo sapien
gggagcagccgctgtgggcctgggg

SEQ ID NO: 5700030 - DNA, 25 bp, Homo sapien
gcacctgcccgttcctatgtcctgc

SEQ ID NO: 5700031 - DNA, 25 bp, Homo sapien
gcagtgcccagcctgcggcccctgc

SEQ ID NO: 5700032 - DNA, 25 bp, Homo sapien
ctggaggccgtgcgcgaggacgcct

SEQ ID NO: 5700033 - DNA, 25 bp, Homo sapien
gctggtcccgggaattctgtgaacc

SEQ ID NO: 5700034 - DNA, 25 bp, Homo sapien
tgacaggcccgttcttccgctaccg

SEQ ID NO: 5700035 - DNA, 25 bp, Homo sapien
gggaccccagcgctcctggcgccct

SEQ ID NO: 5700036 - DNA, 25 bp, Homo sapien
ctgcccagaggccacctccactcct

SEQ ID NO: 5700037 - DNA, 25 bp, Homo sapien
tggcgccctcttctcatcgcttggc

SEQ ID NO: 5700038 - DNA, 25 bp, Homo sapien
catcgcaccaatattgcagacttgg

SEQ ID NO: 5700039 - DNA, 25 bp, Homo sapien
gggccggaggcggccccaccctcca

SEQ ID NO: 5700040 - DNA, 25 bp, Homo sapien
cccttccccggggcagtgcccagcc

SEQ ID NO: 5700041 - DNA, 25 bp, Homo sapien
ccacttttagctcatcgcaccaata

SEQ ID NO: 5700042 - DNA, 25 bp, Homo sapien
atcatgacaggcccgttcttccgct

SEQ ID NO: 5700043 - DNA, 25 bp, Homo sapien
tcctgggagtgggaagcctcttcct

SEQ ID NO: 5700044 - DNA, 25 bp, Homo sapien
ctaaataccctgcctgcaactgaag

SEQ ID NO: 5700045 - DNA, 25 bp, Homo sapien
ataccctgcctgcaactgaagcaga

SEQ ID NO: 5700046 - DNA, 25 bp, Homo sapien
caccccccagcagtccggagaaggc

SEQ ID NO: 5700047 - DNA, 25 bp, Homo sapien
cggcctccacccgggctactacctg

SEQ ID NO: 5700048 - DNA, 25 bp, Homo sapien
agcctcctgggcctgcccactccca

SEQ ID NO: 5700049 - DNA, 25 bp, Homo sapien
actggctggagcagcccttccccgg

SEQ ID NO: 5700050 - DNA, 25 bp, Homo sapien
ctacatgatccccgtcttcttcgcc

SEQ ID NO: 5700051 - DNA, 25 bp, Homo sapien
tgcacttccccaaaacggaaggggc

SEQ ID NO: 5700052 - DNA, 25 bp, Homo sapien
cctacaaaatcaaagtattgtccag

SEQ ID NO: 5700053 - DNA, 25 bp, Homo sapien
cagatttctgcgtgcgggtgcgcga

SEQ ID NO: 5700054 - DNA, 25 bp, Homo sapien
aaggcagcatcccagcccaccagcc

SEQ ID NO: 5700055 - DNA, 25 bp, Homo sapien
agaatggacgtatctagtggttctt

SEQ ID NO: 5700056 - DNA, 25 bp, Homo sapien
gggaagcctcttccttgtgtctttc

SEQ ID NO: 5700057 - DNA, 25 bp, Homo sapien
agtgcggctgcattgccgccggctt

SEQ ID NO: 5700058 - DNA, 25 bp, Homo sapien
ggaaactgaggtgcgggtgcgcggg

SEQ ID NO: 5700059 - DNA, 25 bp, Homo sapien
gctgcggcggcaagcgggctgggac

SEQ ID NO: 5700060 - DNA, 25 bp, Homo sapien
tactggcacggcctccacccgggct

SEQ ID NO: 5700061 - DNA, 25 bp, Homo sapien
cagctcagaccatgtcgcctgaaga

SEQ ID NO: 5700062 - DNA, 25 bp, Homo sapien
gtatatctacaagagcgcacctgcc

SEQ ID NO: 5700063 - DNA, 25 bp, Homo sapien
tttctttgcatccacaatgtggggt

SEQ ID NO: 5700064 - DNA, 25 bp, Homo sapien
agcagacccgggggtgtcctccctg

SEQ ID NO: 5700065 - DNA, 25 bp, Homo sapien
tcggtactgggcctccatctacttc

SEQ ID NO: 5700066 - DNA, 25 bp, Homo sapien
gagaatttcctcttccccagctaaa

SEQ ID NO: 5700067 - DNA, 25 bp, Homo sapien
tgggggcagccccagccggcggaag

SEQ ID NO: 5700068 - DNA, 25 bp, Homo sapien
aaggcctgggactgggtgcactggt

SEQ ID NO: 5700069 - DNA, 25 bp, Homo sapien
attcaggcccagccctgctcctgcc

SEQ ID NO: 5700070 - DNA, 25 bp, Homo sapien
ctttctcctatctcctgttcttccg

SEQ ID NO: 5700071 - DNA, 25 bp, Homo sapien
gactgctcggcccctcctgcccggc

SEQ ID NO: 5700072 - DNA, 25 bp, Homo sapien
accaatattgcagacttggaaggaa

SEQ ID NO: 5700073 - DNA, 25 bp, Homo sapien
tggggcctaccccgtggccgccaaa

SEQ ID NO: 5700074 - DNA, 25 bp, Homo sapien
tctgcgtgcgggtgcgcgatggcat

SEQ ID NO: 5700075 - DNA, 25 bp, Homo sapien
acatgatccccgtcttcttcgcctt

SEQ ID NO: 5700076 - DNA, 25 bp, Homo sapien
tgctctccttggccgacacccttcg

SEQ ID NO: 5700077 - DNA, 25 bp, Homo sapien
cccgtggccggagctgcggcggcaa

SEQ ID NO: 5700078 - DNA, 25 bp, Homo sapien
cccgctcttcggcctgctgttcctg

SEQ ID NO: 5700079 - DNA, 25 bp, Homo sapien
atggcatgcggtactggaacatgac

SEQ ID NO: 5700080 - DNA, 25 bp, Homo sapien
gagtccttaccttggagagggtcct

SEQ ID NO: 5700081 - DNA, 25 bp, Homo sapien
cttctacgtggcctggattgccgcc

SEQ ID NO: 5700082 - DNA, 25 bp, Homo sapien
tggccagtgaagtccaggacctgca

SEQ ID NO: 5700083 - DNA, 25 bp, Homo sapien
gtaagctgtcacgacgctccctctg

SEQ ID NO: 5700084 - DNA, 25 bp, Homo sapien
cacctcgggaccccagcgctcctgg

SEQ ID NO: 5700085 - DNA, 25 bp, Homo sapien
cagacaagagtcactggcccctgct

SEQ ID NO: 5700086 - DNA, 25 bp, Homo sapien
gctttggggcctaccccgtggccgc

SEQ ID NO: 5700087 - DNA, 25 bp, Homo sapien
tttgcatccacaatgtggggtcgga

SEQ ID NO: 5700088 - DNA, 25 bp, Homo sapien
agccctgcgggggcggctgagccca

SEQ ID NO: 5700089 - DNA, 25 bp, Homo sapien
gcccagaggccacctccactcctac

SEQ ID NO: 5700090 - DNA, 25 bp, Homo sapien
gatggggagcagccgctgtgggcct

SEQ ID NO: 5700091 - DNA, 25 bp, Homo sapien
cctatgactacatgtgcatgggctt

SEQ ID NO: 5700092 - DNA, 25 bp, Homo sapien
ccacactttgcattctctggtcacc

SEQ ID NO: 5700093 - DNA, 25 bp, Homo sapien
ccgagggccggctggagtcagccct

SEQ ID NO: 5700094 - DNA, 25 bp, Homo sapien
tggacgtatctagtggttcttctta

SEQ ID NO: 5700095 - DNA, 25 bp, Homo sapien
cggtgcagtggtggctggcgcagta

SEQ ID NO: 5700096 - DNA, 25 bp, Homo sapien
ggcagccccagccggcggaaggcag

SEQ ID NO: 5700097 - DNA, 25 bp, Homo sapien
gacgctgaagctggtgagcctggcc

SEQ ID NO: 5700098 - DNA, 25 bp, Homo sapien
caactgaagcagacccgggggtgtc

SEQ ID NO: 5700099 - DNA, 25 bp, Homo sapien
atccccatcggcttcctctttaaga

SEQ ID NO: 5700100 - DNA, 25 bp, Homo sapien
agctacagctactgctacgtgggaa

SEQ ID NO: 5700101 - DNA, 25 bp, Homo sapien
tgtgcctggctgccgagggccggct

SEQ ID NO: 5700102 - DNA, 25 bp, Homo sapien
caaagtattgtccagacaagagtca

SEQ ID NO: 5700103 - DNA, 25 bp, Homo sapien
ggcctgctgttcctgctctcctctc

SEQ ID NO: 5700104 - DNA, 25 bp, Homo sapien
gggcctggggacggccgtcccatgg

SEQ ID NO: 5700105 - DNA, 25 bp, Homo sapien
gatgcgcgcctatgactacatgtgc

SEQ ID NO: 5700106 - DNA, 25 bp, Homo sapien
gctaccgcacctacctggactggct

SEQ ID NO: 5700107 - DNA, 25 bp, Homo sapien
ctttaagaaagccggtcctgggctg

SEQ ID NO: 5700108 - DNA, 25 bp, Homo sapien
cttcgtgctgctctccttggccgac

SEQ ID NO: 5700109 - DNA, 25 bp, Homo sapien
actcagctacagctactgctacgtg

SEQ ID NO: 5700110 - DNA, 25 bp, Homo sapien
ggcatgcggtactggaacatgacgg

SEQ ID NO: 5700111 - DNA, 25 bp, Homo sapien
accctgcctgcaactgaagcagacc

SEQ ID NO: 5700112 - DNA, 25 bp, Homo sapien
aggaagcataagcttcccatttcac

SEQ ID NO: 5700113 - DNA, 25 bp, Homo sapien
gctccgggaggagtaagctgtcacg

SEQ ID NO: 5700114 - DNA, 25 bp, Homo sapien
cttccgcatgcgcttctacgtggcc

SEQ ID NO: 5700115 - DNA, 25 bp, Homo sapien
tgctgacgctgaagctggtgagcct

SEQ ID NO: 5700116 - DNA, 25 bp, Homo sapien
ccgtcccatggcttccatctgagcc

SEQ ID NO: 5700117 - DNA, 25 bp, Homo sapien
cgggaattctgtgaaccaggctgct

SEQ ID NO: 5700118 - DNA, 25 bp, Homo sapien
atatctacaagagcgcacctgcccg

SEQ ID NO: 5700119 - DNA, 25 bp, Homo sapien
cacctcttcccgctggaggccgtgc

SEQ ID NO: 5700120 - DNA, 25 bp, Homo sapien
tcttccccagctaaataccctgcct

SEQ ID NO: 5700121 - DNA, 25 bp, Homo sapien
acggccgtcccatggcttccatctg

SEQ ID NO: 5700122 - DNA, 25 bp, Homo sapien
agtatgactatgagaccatccgcaa

SEQ ID NO: 5700123 - DNA, 25 bp, Homo sapien
gcccctgctccagcttctgggtatc

SEQ ID NO: 5700124 - DNA, 25 bp, Homo sapien
gggccctcattcaggcccagccctg

SEQ ID NO: 5700125 - DNA, 25 bp, Homo sapien
ttctcatcgcttggcctatgacagg

SEQ ID NO: 5700126 - DNA, 25 bp, Homo sapien
catgtcgcctgaagaatggacgtat

SEQ ID NO: 5700127 - DNA, 25 bp, Homo sapien
cccgggaattctgtgaaccaggctg

SEQ ID NO: 5700128 - DNA, 25 bp, Homo sapien
ttcctgaccatcccgctgtgcctgg

SEQ ID NO: 5700129 - DNA, 25 bp, Homo sapien
acctgcccgttcctatgtcctgcgg

SEQ ID NO: 5700130 - DNA, 25 bp, Homo sapien
tcttccgagccctcagcctcctggg

SEQ ID NO: 5700131 - DNA, 25 bp, Homo sapien
gctgagcgcctactggcacggcctc

SEQ ID NO: 5700132 - DNA, 25 bp, Homo sapien
cgcctatgactacatgtgcatgggc

SEQ ID NO: 5700133 - DNA, 25 bp, Homo sapien
tggccggccccgctcttcggcctgc

SEQ ID NO: 5700134 - DNA, 25 bp, Homo sapien
cctcaggcttcagcaaggggcccac

SEQ ID NO: 5700135 - DNA, 25 bp, Homo sapien
gctgctctccttggccgacaccctt

SEQ ID NO: 5700136 - DNA, 25 bp, Homo sapien
ctccacttttagctcatcgcaccaa

SEQ ID NO: 5700137 - DNA, 25 bp, Homo sapien
ccagaaggcctgggactgggtgcac

SEQ ID NO: 5700138 - DNA, 25 bp, Homo sapien
agaggccacctccactcctacaaaa

SEQ ID NO: 5700139 - DNA, 25 bp, Homo sapien
acatcgactgctacagcacagattt

SEQ ID NO: 5700140 - DNA, 25 bp, Homo sapien
acactttgcattctctggtcaccat

SEQ ID NO: 5700141 - DNA, 25 bp, Homo sapien
gaatttcctcttccccagctaaata

SEQ ID NO: 5700142 - DNA, 25 bp, Homo sapien
attgcagacttggaaggaagcataa

SEQ ID NO: 5700143 - DNA, 25 bp, Homo sapien
ggctgctgcccgacgtgccctccct

SEQ ID NO: 5700144 - DNA, 25 bp, Homo sapien
cctccctgatggagacactcagcta

SEQ ID NO: 5700145 - DNA, 25 bp, Homo sapien
tcctctcacctcttcccgctggagg

SEQ ID NO: 5700146 - DNA, 25 bp, Homo sapien
gaatcccgtggccggagctgcggcg

SEQ ID NO: 5700147 - DNA, 25 bp, Homo sapien
ctgttcctgctctcctctcacctct

SEQ ID NO: 5700148 - DNA, 25 bp, Homo sapien
ccttggccgacacccttcggtactg

SEQ ID NO: 5700149 - DNA, 25 bp, Homo sapien
ctctccttggccgacacccttcggt

SEQ ID NO: 5700150 - DNA, 25 bp, Homo sapien
caccctggggctgctgcccgacgtg

SEQ ID NO: 5700151 - DNA, 25 bp, Homo sapien
cataagcttcccatttcacaaaggg

SEQ ID NO: 5700152 - DNA, 25 bp, Homo sapien
gccccaccctccaatgcccaccccc

SEQ ID NO: 5700153 - DNA, 25 bp, Homo sapien
ccccagcagtccggagaaggcggct

SEQ ID NO: 5700154 - DNA, 25 bp, Homo sapien
ccgccgagtgcggctgcattgccgc

SEQ ID NO: 5700155 - DNA, 25 bp, Homo sapien
tgctacagcacagatttctgcgtgc

SEQ ID NO: 5700156 - DNA, 25 bp, Homo sapien
ctggggctgctgcccgacgtgccct

SEQ ID NO: 5700157 - DNA, 25 bp, Homo sapien
ggcggccccaccctccaatgcccac

SEQ ID NO: 5700158 - DNA, 25 bp, Homo sapien
tggtggctggcgcagtatatctaca

SEQ ID NO: 5700159 - DNA, 25 bp, Homo sapien
gatttctgcgtgcgggtgcgcgatg

SEQ ID NO: 5700160 - DNA, 25 bp, Homo sapien
cgcatgcgcttctacgtggcctgga

SEQ ID NO: 5700161 - DNA, 25 bp, Homo sapien
ctggcccagaggaaggaaatggcct

SEQ ID NO: 5700162 - DNA, 25 bp, Homo sapien
ggccagaaggcctgggactgggtgc

SEQ ID NO: 5700163 - DNA, 25 bp, Homo sapien
gctgtcacgacgctccctctgccag

SEQ ID NO: 5700164 - DNA, 25 bp, Homo sapien
cggccccaccctccaatgcccaccc

SEQ ID NO: 5700165 - DNA, 25 bp, Homo sapien
ccccagaaagagtccttaccttgga

SEQ ID NO: 5700166 - DNA, 25 bp, Homo sapien
agctcatcgcaccaatattgcagac

SEQ ID NO: 5700167 - DNA, 25 bp, Homo sapien
ctggttcctgaagatgcgcgcctat

SEQ ID NO: 5700168 - DNA, 25 bp, Homo sapien
caggacctgcatctggcccagagga

SEQ ID NO: 5700169 - DNA, 25 bp, Homo sapien
gagcagcccttccccggggcagtgc

SEQ ID NO: 5700170 - DNA, 25 bp, Homo sapien
tcctgttcttccgagccctcagcct

SEQ ID NO: 5700171 - DNA, 25 bp, Homo sapien
ccgtgtgtaaatctttcccaataaa

SEQ ID NO: 5700172 - DNA, 25 bp, Homo sapien
gacgctccctctgccagctggtccc

SEQ ID NO: 5700173 - DNA, 25 bp, Homo sapien
ccgctgtgggcctggggctcaccct

SEQ ID NO: 5700174 - DNA, 25 bp, Homo sapien
tccacaatgtggggtcggagcttgg

SEQ ID NO: 5700175 - DNA, 25 bp, Homo sapien
actgaggtgcgggtgcgcgggcctg

SEQ ID NO: 5700176 - DNA, 25 bp, Homo sapien
ttccccagctaaataccctgcctgc

SEQ ID NO: 5700177 - DNA, 25 bp, Homo sapien
gcaaattccctttctttgcatccac

SEQ ID NO: 5700178 - DNA, 25 bp, Homo sapien
gctgcattgccgccggctttggggc

SEQ ID NO: 5700179 - DNA, 25 bp, Homo sapien
actatgagaccatccgcaacatcga

SEQ ID NO: 5700180 - DNA, 25 bp, Homo sapien
cattgccgccggctttggggcctac

SEQ ID NO: 5700181 - DNA, 25 bp, Homo sapien
ggactgggtgcactggttcctgaag

SEQ ID NO: 5700182 - DNA, 25 bp, Homo sapien
gcctggaccatgctgctgagcgcct

SEQ ID NO: 5700183 - DNA, 25 bp, Homo sapien
gaagtccaggacctgcatctggccc

SEQ ID NO: 5700184 - DNA, 25 bp, Homo sapien
agaccatccgcaacatcgactgcta

SEQ ID NO: 5700185 - DNA, 25 bp, Homo sapien
gctcggcccctcctgcccggcgagc

SEQ ID NO: 5700186 - DNA, 25 bp, Homo sapien
ccctggggctgctgcccgacgtgcc

SEQ ID NO: 5700187 - DNA, 25 bp, Homo sapien
cccgtcttcttcgccttccgcatgc

SEQ ID NO: 5700188 - DNA, 25 bp, Homo sapien
attgccgccgagtgcggctgcattg

SEQ ID NO: 5700189 - DNA, 25 bp, Homo sapien
ggcagcatcccagcccaccagcctt

SEQ ID NO: 5700190 - DNA, 25 bp, Homo sapien
cgctcttcggcctgctgttcctgct

SEQ ID NO: 5700191 - DNA, 25 bp, Homo sapien
gtattgtccagacaagagtcactgg

SEQ ID NO: 5700192 - DNA, 25 bp, Homo sapien
tggcctggattgccgccgagtgcgg

SEQ ID NO: 5700193 - DNA, 25 bp, Homo sapien
tgaccatcccgctgtgcctggctgc

SEQ ID NO: 5700194 - DNA, 25 bp, Homo sapien
ctgcatctggcccagaggaaggaaa

SEQ ID NO: 5700195 - DNA, 25 bp, Homo sapien
agcactgcacttccccaaaacggaa

SEQ ID NO: 5700196 - DNA, 25 bp, Homo sapien
ctgctgagcgcctactggcacggcc

SEQ ID NO: 5700197 - DNA, 25 bp, Homo sapien
gcttctgggtatccagagagcactg

SEQ ID NO: 5700198 - DNA, 25 bp, Homo sapien
gaatcatgacaggcccgttcttccg

SEQ ID NO: 5700199 - DNA, 25 bp, Homo sapien
tgacaggtcaccgtgtgtaaatctt

SEQ ID NO: 5700200 - DNA, 25 bp, Homo sapien
catgcgcttctacgtggcctggatt

SEQ ID NO: 5700201 - DNA, 25 bp, Homo sapien
ctggcctggactttctcctatctcc

SEQ ID NO: 5700202 - DNA, 25 bp, Homo sapien
agctgctgctgacgctgaagctggt

SEQ ID NO: 5700203 - DNA, 25 bp, Homo sapien
tcttccgctaccgcacctacctgga

SEQ ID NO: 5700204 - DNA, 25 bp, Homo sapien
atctccatccccatcggcttcctct

SEQ ID NO: 5700205 - DNA, 25 bp, Homo sapien
ccgctgtgcctggctgccgagggcc

SEQ ID NO: 5700206 - DNA, 25 bp, Homo sapien
ttaagaaagccggtcctgggctgaa

SEQ ID NO: 5700207 - DNA, 25 bp, Homo sapien
gggccggctggagtcagccctgcgg

SEQ ID NO: 5700208 - DNA, 25 bp, Homo sapien
tggagagggtcctggagagaatttc

SEQ ID NO: 5700209 - DNA, 25 bp, Homo sapien
cgggtgcgcgatggcatgcggtact

SEQ ID NO: 5700210 - DNA, 25 bp, Homo sapien
tctcctgttcttccgagccctcagc

SEQ ID NO: 5700211 - DNA, 25 bp, Homo sapien
ctgttcttccgagccctcagcctcc

SEQ ID NO: 5700212 - DNA, 25 bp, Homo sapien
tcaggcttcagcaaggggcccaccc

SEQ ID NO: 5700213 - DNA, 25 bp, Homo sapien
gcctccatctacttctgtatccact

SEQ ID NO: 5700214 - DNA, 25 bp, Homo sapien
gcgcctggaccatgctgctgagcgc

SEQ ID NO: 5700215 - DNA, 25 bp, Homo sapien
ccccccagcagtccggagaaggcgg

SEQ ID NO: 5700216 - DNA, 25 bp, Homo sapien
gagggtcctggagagaatttcctct

SEQ ID NO: 5700217 - DNA, 25 bp, Homo sapien
gccacgccctggctctggcctggac

SEQ ID NO: 5700218 - DNA, 25 bp, Homo sapien
cgcagtatatctacaagagcgcacc

SEQ ID NO: 5700219 - DNA, 25 bp, Homo sapien
ggccgacacccttcggtactgggcc

SEQ ID NO: 5700220 - DNA, 25 bp, Homo sapien
aagctccgggaggagtaagctgtca

SEQ ID NO: 5700221 - DNA, 25 bp, Homo sapien
gctcagaccatgtcgcctgaagaat

SEQ ID NO: 5700222 - DNA, 25 bp, Homo sapien
gcccggcgagcagctcagaccatgt

SEQ ID NO: 5700223 - DNA, 25 bp, Homo sapien
tccgcaacatcgactgctacagcac

SEQ ID NO: 5700224 - DNA, 25 bp, Homo sapien
aagccggtcctgggctgaagagatg

SEQ ID NO: 5700225 - DNA, 25 bp, Homo sapien
cgcttctacgtggcctggattgccg

SEQ ID NO: 5700226 - DNA, 25 bp, Homo sapien
cttggaaggaagcataagcttccca

SEQ ID NO: 5700227 - DNA, 25 bp, Homo sapien
tttctgcgtgcgggtgcgcgatggc

SEQ ID NO: 5700228 - DNA, 25 bp, Homo sapien
ctactgctacgtgggaatcatgaca

SEQ ID NO: 5700229 - DNA, 25 bp, Homo sapien
tcctgcccggcgagcagctcagacc

SEQ ID NO: 5700230 - DNA, 25 bp, Homo sapien
gtgaaccaggctgctgtctcctccc

SEQ ID NO: 5700231 - DNA, 25 bp, Homo sapien
tcccgctgtgcctggctgccgaggg

SEQ ID NO: 5700232 - DNA, 25 bp, Homo sapien
cctgggcagtgggttttgggcaaat

SEQ ID NO: 5700233 - DNA, 25 bp, Homo sapien
tccaggacctgcatctggcccagag

SEQ ID NO: 5700234 - DNA, 25 bp, Homo sapien
tggagagaatttcctcttccccagc

SEQ ID NO: 5700235 - DNA, 25 bp, Homo sapien
gtcctgcggagcgcctggaccatgc

SEQ ID NO: 5700236 - DNA, 25 bp, Homo sapien
ggcacggcctccacccgggctacta

SEQ ID NO: 5700237 - DNA, 25 bp, Homo sapien
gtgtaaatctttcccaataaagtgt

SEQ ID NO: 5700238 - DNA, 25 bp, Homo sapien
ggaggagtaagctgtcacgacgctc

SEQ ID NO: 5700239 - DNA, 25 bp, Homo sapien
acactcagctacagctactgctacg

SEQ ID NO: 5700240 - DNA, 25 bp, Homo sapien
ctacgtgggaatcatgacaggcccg

SEQ ID NO: 5700241 - DNA, 25 bp, Homo sapien
ttgggcaaattccctttctttgcat

SEQ ID NO: 5700242 - DNA, 25 bp, Homo sapien
gcctgcccactcccacgcccttcac

SEQ ID NO: 5700243 - DNA, 25 bp, Homo sapien
gccggccccgctcttcggcctgctg

SEQ ID NO: 5700244 - DNA, 25 bp, Homo sapien
agcttgggggcaggtcctgggagtg

SEQ ID NO: 5700245 - DNA, 25 bp, Homo sapien
tcctgggctgaagagatggggagca

SEQ ID NO: 5700246 - DNA, 25 bp, Homo sapien
tgagcctggccagtgaagtccagga

SEQ ID NO: 5700247 - DNA, 25 bp, Homo sapien
cggaggcggccccaccctccaatgc

SEQ ID NO: 5700248 - DNA, 25 bp, Homo sapien
tggccgccaaagcccgggccggagg

SEQ ID NO: 5700249 - DNA, 25 bp, Homo sapien
cccctgctgcgccgcgcctggccgg

SEQ ID NO: 5700250 - DNA, 25 bp, Homo sapien
gagtgggaagcctcttccttgtgtc

SEQ ID NO: 5700251 - DNA, 25 bp, Homo sapien
cccttcggtactgggcctccatcta

SEQ ID NO: 5700252 - DNA, 25 bp, Homo sapien
aaactgaggtgcgggtgcgcgggcc

SEQ ID NO: 5700253 - DNA, 25 bp, Homo sapien
ccaatgccgtccagctgctgctgac

SEQ ID NO: 5700254 - DNA, 25 bp, Homo sapien
acccgggctactacctgagcttcct

SEQ ID NO: 5700255 - DNA, 25 bp, Homo sapien
catgctgctgagcgcctactggcac

SEQ ID NO: 5700256 - DNA, 25 bp, Homo sapien
acgacgctccctctgccagctggtc

SEQ ID NO: 5700257 - DNA, 25 bp, Homo sapien
gaccccagcgctcctggcgccctct

SEQ ID NO: 5700258 - DNA, 25 bp, Homo sapien
ccggcgagcagctcagaccatgtcg

SEQ ID NO: 5700259 - DNA, 25 bp, Homo sapien
ggattgccgccgagtgcggctgcat

SEQ ID NO: 5700260 - DNA, 25 bp, Homo sapien
gcccactcccacgcccttcaccaat

SEQ ID NO: 5700261 - DNA, 25 bp, Homo sapien
cacctgtggcccccacactttgcat

SEQ ID NO: 5700262 - DNA, 25 bp, Homo sapien
gtcggagcttgggggcaggtcctgg

SEQ ID NO: 5700263 - DNA, 25 bp, Homo sapien
ccccacactttgcattctctggtca

SEQ ID NO: 5700264 - DNA, 25 bp, Homo sapien
actttgcattctctggtcaccatcc

SEQ ID NO: 5700265 - DNA, 25 bp, Homo sapien
catcgcttggcctatgacaggtcac

SEQ ID NO: 5700266 - DNA, 25 bp, Homo sapien
accttggagagggtcctggagagaa

SEQ ID NO: 5700267 - DNA, 25 bp, Homo sapien
gtatccacttcctggccctggcagc

SEQ ID NO: 5700268 - DNA, 25 bp, Homo sapien
gcttcctgaccatcccgctgtgcct

SEQ ID NO: 5700269 - DNA, 25 bp, Homo sapien
tcctgctctcctctcacctcttccc

SEQ ID NO: 5700270 - DNA, 25 bp, Homo sapien
tgcccgacgtgccctccctgatgga

SEQ ID NO: 5700271 - DNA, 25 bp, Homo sapien
atgacggtgcagtggtggctggcgc

SEQ ID NO: 5700272 - DNA, 25 bp, Homo sapien
gttcttccgctaccgcacctacctg

SEQ ID NO: 5700273 - DNA, 25 bp, Homo sapien
cttcttatctccatccccatcggct

SEQ ID NO: 5700274 - DNA, 25 bp, Homo sapien
ctggcacggcctccacccgggctac

SEQ ID NO: 5700275 - DNA, 25 bp, Homo sapien
tcctgccacgccctggctctggcct

SEQ ID NO: 5700276 - DNA, 25 bp, Homo sapien
ccctctgccagctggtcccgggaat

SEQ ID NO: 5700277 - DNA, 25 bp, Homo sapien
ccagaggccacctccactcctacaa

SEQ ID NO: 5700278 - DNA, 25 bp, Homo sapien
ttgtgtctttcgctccacttttagc

SEQ ID NO: 5700279 - DNA, 25 bp, Homo sapien
gtctttcgctccacttttagctcat

SEQ ID NO: 5700280 - DNA, 25 bp, Homo sapien
gagccacctcgggaccccagcgctc

SEQ ID NO: 5700281 - DNA, 25 bp, Homo sapien
cttcggcctgctgttcctgctctcc

SEQ ID NO: 5700282 - DNA, 25 bp, Homo sapien
agaaggcggcttccttggagtatga

SEQ ID NO: 5700283 - DNA, 25 bp, Homo sapien
cctgaccatcccgctgtgcctggct

SEQ ID NO: 5700284 - DNA, 25 bp, Homo sapien
ggaggccgtgcgcgaggacgccttc

SEQ ID NO: 5700285 - DNA, 25 bp, Homo sapien
ggtgcgcgatggcatgcggtactgg

SEQ ID NO: 5700286 - DNA, 25 bp, Homo sapien
cctcgggaccccagcgctcctggcg

SEQ ID NO: 5700287 - DNA, 25 bp, Homo sapien
tccccgtcttcttcgccttccgcat

SEQ ID NO: 5700288 - DNA, 25 bp, Homo sapien
catccacaatgtggggtcggagctt

SEQ ID NO: 5700289 - DNA, 25 bp, Homo sapien
gaacatgacggtgcagtggtggctg

SEQ ID NO: 5700290 - DNA, 25 bp, Homo sapien
cggggcagtgcccagcctgcggccc

SEQ ID NO: 5700291 - DNA, 25 bp, Homo sapien
cctgttcacctgtggcccccacact

SEQ ID NO: 5700292 - DNA, 25 bp, Homo sapien
ctggggctggggctggctttaggtg

SEQ ID NO: 5700293 - DNA, 25 bp, Homo sapien
tgcattctctggtcaccatcctcgg

SEQ ID NO: 5700294 - DNA, 25 bp, Homo sapien
cagcccaccagccttgccccggaga

SEQ ID NO: 5700295 - DNA, 25 bp, Homo sapien
cacgccctggctctggcctggactt

SEQ ID NO: 5700296 - DNA, 25 bp, Homo sapien
cgctgaagctggtgagcctggccag

SEQ ID NO: 5700297 - DNA, 25 bp, Homo sapien
gtccagctgctgctgacgctgaagc

SEQ ID NO: 5700298 - DNA, 25 bp, Homo sapien
ccgagccctcagcctcctgggcctg

SEQ ID NO: 5700299 - DNA, 25 bp, Homo sapien
tgcgcgaggacgccttctacgcccg

SEQ ID NO: 5700300 - DNA, 25 bp, Homo sapien
taggtgggggcagccccagccggcg

SEQ ID NO: 5700301 - DNA, 25 bp, Homo sapien
ccaccagccttgccccggagaagct

SEQ ID NO: 5700302 - DNA, 25 bp, Homo sapien
cgacgtgccctccctgatggagaca

SEQ ID NO: 5700303 - DNA, 25 bp, Homo sapien
aaatcaaagtattgtccagacaaga

SEQ ID NO: 5700304 - DNA, 25 bp, Homo sapien
ttctacatgatccccgtcttcttcg

SEQ ID NO: 5700305 - DNA, 25 bp, Homo sapien
tgaagagatggggagcagccgctgt

SEQ ID NO: 5700306 - DNA, 25 bp, Homo sapien
gctcaccctgttcacctgtggcccc

SEQ ID NO: 5700307 - DNA, 25 bp, Homo sapien
gagcgcacctgcccgttcctatgtc

SEQ ID NO: 5700308 - DNA, 25 bp, Homo sapien
gaggaaggaaatggcctcaggcttc

SEQ ID NO: 5700309 - DNA, 25 bp, Homo sapien
ggcaagcgggctgggactgctcggc

SEQ ID NO: 5700310 - DNA, 25 bp, Homo sapien
gacgtatctagtggttcttcttatc

SEQ ID NO: 5700311 - DNA, 25 bp, Homo sapien
cagctggtcccgggaattctgtgaa

SEQ ID NO: 5700312 - DNA, 25 bp, Homo sapien
tggggctcaccctgttcacctgtgg

SEQ ID NO: 5700313 - DNA, 25 bp, Homo sapien
gccgagtgcggctgcattgccgccg

SEQ ID NO: 5700314 - DNA, 25 bp, Homo sapien
gaaccaggctgctgtctcctcccca

SEQ ID NO: 5700315 - DNA, 25 bp, Homo sapien
gcccagccctgctcctgccacgccc

SEQ ID NO: 5700316 - DNA, 25 bp, Homo sapien
gtcccgggaattctgtgaaccaggc

SEQ ID NO: 5700317 - DNA, 25 bp, Homo sapien
ctacttctgtatccacttcctggcc

SEQ ID NO: 5700318 - DNA, 25 bp, Homo sapien
gagatggggagcagccgctgtgggc

SEQ ID NO: 5700319 - DNA, 25 bp, Homo sapien
gctggagtcagccctgcgggggcgg

SEQ ID NO: 5700320 - DNA, 25 bp, Homo sapien
tcacgacgctccctctgccagctgg

SEQ ID NO: 5700321 - DNA, 25 bp, Homo sapien
cgaggacgccttctacgcccgcccg

SEQ ID NO: 5700322 - DNA, 25 bp, Homo sapien
ctacagctactgctacgtgggaatc

SEQ ID NO: 5700323 - DNA, 25 bp, Homo sapien
taagcttcccatttcacaaagggga

SEQ ID NO: 5700324 - DNA, 25 bp, Homo sapien
aaatctttcccaataaagtgttgca

SEQ ID NO: 5700325 - DNA, 25 bp, Homo sapien
ggaaggaaatggcctcaggcttcag

SEQ ID NO: 5700326 - DNA, 25 bp, Homo sapien
cacagatttctgcgtgcgggtgcgc

SEQ ID NO: 5700327 - DNA, 25 bp, Homo sapien
gccggaggcggccccaccctccaat

SEQ ID NO: 5700328 - DNA, 25 bp, Homo sapien
agcagctcagaccatgtcgcctgaa

SEQ ID NO: 5700329 - DNA, 25 bp, Homo sapien
tgggcctggggctcaccctgttcac

SEQ ID NO: 5700330 - DNA, 25 bp, Homo sapien
cgtgcgggtgcgcgatggcatgcgg

SEQ ID NO: 5700331 - DNA, 25 bp, Homo sapien
gccccagccggcggaaggcagcatc

SEQ ID NO: 5700332 - DNA, 25 bp, Homo sapien
gcacctacctggactggctggagca

SEQ ID NO: 5700333 - DNA, 25 bp, Homo sapien
ccgggctactacctgagcttcctga

SEQ ID NO: 5700334 - DNA, 25 bp, Homo sapien
tgcactggttcctgaagatgcgcgc

SEQ ID NO: 5700335 - DNA, 25 bp, Homo sapien
cgggctgggactgctcggcccctcc

SEQ ID NO: 5700336 - DNA, 25 bp, Homo sapien
ttcctctttaagaaagccggtcctg

SEQ ID NO: 5700337 - DNA, 25 bp, Homo sapien
ctgtatccacttcctggccctggca

SEQ ID NO: 5700338 - DNA, 25 bp, Homo sapien
tgctgcgccgcgcctggccggcccc

SEQ ID NO: 5700339 - DNA, 25 bp, Homo sapien
ttccttgtgtctttcgctccacttt

SEQ ID NO: 5700340 - DNA, 25 bp, Homo sapien
ttcctgaagatgcgcgcctatgact

SEQ ID NO: 5700341 - DNA, 25 bp, Homo sapien
ctccctctgccagctggtcccggga

SEQ ID NO: 5700342 - DNA, 25 bp, Homo sapien
ctccttggccgacacccttcggtac

SEQ ID NO: 5700343 - DNA, 25 bp, Homo sapien
gccctccctgatggagacactcagc

SEQ ID NO: 5700344 - DNA, 25 bp, Homo sapien
aattctgtgaaccaggctgctgtct

SEQ ID NO: 5700345 - DNA, 25 bp, Homo sapien
gcatcccagcccaccagccttgccc

SEQ ID NO: 5700346 - DNA, 25 bp, Homo sapien
caacatcgactgctacagcacagat

SEQ ID NO: 5700347 - DNA, 25 bp, Homo sapien
gggtgtcctccctgccctctgccca

SEQ ID NO: 5700348 - DNA, 25 bp, Homo sapien
tcgcttggcctatgacaggtcaccg

SEQ ID NO: 5700349 - DNA, 25 bp, Homo sapien
cgcgaggacgccttctacgcccgcc

SEQ ID NO: 5700350 - DNA, 25 bp, Homo sapien
tggaacatgacggtgcagtggtggc

SEQ ID NO: 5700351 - DNA, 25 bp, Homo sapien
ccttaccttggagagggtcctggag

SEQ ID NO: 5700352 - DNA, 25 bp, Homo sapien
tgccgagggccggctggagtcagcc

SEQ ID NO: 5700353 - DNA, 25 bp, Homo sapien
gacgccttctacgcccgcccgctgc

SEQ ID NO: 5700354 - DNA, 25 bp, Homo sapien
ggaaatggcctcaggcttcagcaag

SEQ ID NO: 5700355 - DNA, 25 bp, Homo sapien
gccccgctcttcggcctgctgttcc

SEQ ID NO: 5700356 - DNA, 25 bp, Homo sapien
aagagcgcacctgcccgttcctatg

SEQ ID NO: 5700357 - DNA, 25 bp, Homo sapien
gccctcagcctcctgggcctgccca

SEQ ID NO: 5700358 - DNA, 25 bp, Homo sapien
tgtcacgacgctccctctgccagct

SEQ ID NO: 5700359 - DNA, 25 bp, Homo sapien
ctgtgaaccaggctgctgtctcctc

SEQ ID NO: 5700360 - DNA, 25 bp, Homo sapien
cgcgcctggccggccccgctcttcg

SEQ ID NO: 5700361 - DNA, 25 bp, Homo sapien
cactggttcctgaagatgcgcgcct

SEQ ID NO: 5700362 - DNA, 25 bp, Homo sapien
ctggctctggcctggactttctcct

SEQ ID NO: 5700363 - DNA, 25 bp, Homo sapien
ggcttcgtgctgctctccttggccg

SEQ ID NO: 5700364 - DNA, 25 bp, Homo sapien
ccggagaaggcggcttccttggagt

SEQ ID NO: 5700365 - DNA, 25 bp, Homo sapien
cagtccggagaaggcggcttccttg

SEQ ID NO: 5700366 - DNA, 25 bp, Homo sapien
gcccaccagccttgccccggagaag

SEQ ID NO: 5700367 - DNA, 25 bp, Homo sapien
tgcgcgcctatgactacatgtgcat

SEQ ID NO: 5700368 - DNA, 25 bp, Homo sapien
actggcccctgctccagcttctggg

SEQ ID NO: 5700369 - DNA, 25 bp, Homo sapien
ctgaagaatggacgtatctagtggt

SEQ ID NO: 5700370 - DNA, 25 bp, Homo sapien
agctggtgagcctggccagtgaagt

SEQ ID NO: 5700371 - DNA, 25 bp, Homo sapien
gccctcattcaggcccagccctgct

SEQ ID NO: 5700372 - DNA, 25 bp, Homo sapien
tatctagtggttcttcttatctcca

SEQ ID NO: 5700373 - DNA, 25 bp, Homo sapien
ggagaagctccgggaggagtaagct

SEQ ID NO: 5700374 - DNA, 25 bp, Homo sapien
tactgggcctccatctacttctgta

SEQ ID NO: 5700375 - DNA, 25 bp, Homo sapien
tccgggaggagtaagctgtcacgac

SEQ ID NO: 5700376 - DNA, 25 bp, Homo sapien
ccctccaatgcccaccccccagcag

SEQ ID NO: 5700377 - DNA, 25 bp, Homo sapien
cacggcctccacccgggctactacc

SEQ ID NO: 5700378 - DNA, 25 bp, Homo sapien
tctttgcatccacaatgtggggtcg

SEQ ID NO: 5700379 - DNA, 25 bp, Homo sapien
ggcctgggactgggtgcactggttc

SEQ ID NO: 5700380 - DNA, 25 bp, Homo sapien
tggctggagcagcccttccccgggg

SEQ ID NO: 5700381 - DNA, 25 bp, Homo sapien
gcttcagcaaggggcccaccctggg

SEQ ID NO: 5700382 - DNA, 25 bp, Homo sapien
ctgctcctgccacgccctggctctg

SEQ ID NO: 5700383 - DNA, 25 bp, Homo sapien
gctgccgagggccggctggagtcag

SEQ ID NO: 5700384 - DNA, 25 bp, Homo sapien
atgatccccgtcttcttcgccttcc

SEQ ID NO: 5700385 - DNA, 25 bp, Homo sapien
agtccaggacctgcatctggcccag

SEQ ID NO: 5700386 - DNA, 25 bp, Homo sapien
gccctcttctcatcgcttggcctat

SEQ ID NO: 5700387 - DNA, 25 bp, Homo sapien
ggcccctgggcagtgggttttgggc

SEQ ID NO: 5700388 - DNA, 25 bp, Homo sapien
ctccccagaaagagtccttaccttg

SEQ ID NO: 5700389 - DNA, 25 bp, Homo sapien
ctctggcctggactttctcctatct

SEQ ID NO: 5700390 - DNA, 25 bp, Homo sapien
tgcctggctgccgagggccggctgg

SEQ ID NO: 5700391 - DNA, 25 bp, Homo sapien
acaggcccgttcttccgctaccgca

SEQ ID NO: 5700392 - DNA, 25 bp, Homo sapien
tgaggtgcgggtgcgcgggcctggg

SEQ ID NO: 5700393 - DNA, 25 bp, Homo sapien
ttggcctatgacaggtcaccgtgtg

SEQ ID NO: 5700394 - DNA, 25 bp, Homo sapien
ggcccctgctgcgccgcgcctggcc

SEQ ID NO: 5700395 - DNA, 25 bp, Homo sapien
atggagacactcagctacagctact

SEQ ID NO: 5700396 - DNA, 25 bp, Homo sapien
gccacctccactcctacaaaatcaa

SEQ ID NO: 5700397 - DNA, 25 bp, Homo sapien
cctccctgccctctgcccagaggcc

SEQ ID NO: 5700398 - DNA, 25 bp, Homo sapien
ccccagctaaataccctgcctgcaa

SEQ ID NO: 5700399 - DNA, 25 bp, Homo sapien
tggagcagcccttccccggggcagt

SEQ ID NO: 5700400 - DNA, 25 bp, Homo sapien
tgtgggcctggggctcaccctgttc

SEQ ID NO: 5700401 - DNA, 25 bp, Homo sapien
accagccttgccccggagaagctcc

SEQ ID NO: 5700402 - DNA, 25 bp, Homo sapien
ggcctggggctcaccctgttcacct

SEQ ID NO: 5700403 - DNA, 25 bp, Homo sapien
gccagctggtcccgggaattctgtg

SEQ ID NO: 5700404 - DNA, 25 bp, Homo sapien
ggtgggggcagccccagccggcgga

SEQ ID NO: 5700405 - DNA, 25 bp, Homo sapien
ctacgcccgcccgctgcccgcccgc

SEQ ID NO: 5700406 - DNA, 25 bp, Homo sapien
ggcctatgacaggtcaccgtgtgta

SEQ ID NO: 5700407 - DNA, 25 bp, Homo sapien
ttccgctaccgcacctacctggact

SEQ ID NO: 5700408 - DNA, 25 bp, Homo sapien
tcgcctgaagaatggacgtatctag

SEQ ID NO: 5700409 - DNA, 25 bp, Homo sapien
ggctggcgcagtatatctacaagag

SEQ ID NO: 5700410 - DNA, 25 bp, Homo sapien
acctgagcttcctgaccatcccgct

SEQ ID NO: 5700411 - DNA, 25 bp, Homo sapien
ttctgtatccacttcctggccctgg

SEQ ID NO: 5700412 - DNA, 25 bp, Homo sapien
accatcccgctgtgcctggctgccg

SEQ ID NO: 5700413 - DNA, 25 bp, Homo sapien
tcgccttccgcatgcgcttctacgt

SEQ ID NO: 5700414 - DNA, 25 bp, Homo sapien
gggcaaattccctttctttgcatcc

SEQ ID NO: 5700415 - DNA, 25 bp, Homo sapien
ttcccaataaagtgttgcacaaaga

SEQ ID NO: 5700416 - DNA, 25 bp, Homo sapien
acctgggccctcattcaggcccagc

SEQ ID NO: 5700417 - DNA, 25 bp, Homo sapien
acctacctggactggctggagcagc

SEQ ID NO: 5700418 - DNA, 25 bp, Homo sapien
ctctcacctcttcccgctggaggcc

SEQ ID NO: 5700419 - DNA, 25 bp, Homo sapien
tcagaccatgtcgcctgaagaatgg

SEQ ID NO: 5700420 - DNA, 25 bp, Homo sapien
tcggcccctcctgcccggcgagcag

SEQ ID NO: 5700421 - DNA, 25 bp, Homo sapien
gctgtctcctccccagaaagagtcc

SEQ ID NO: 5700422 - DNA, 25 bp, Homo sapien
ccagccctgctcctgccacgccctg

SEQ ID NO: 5700423 - DNA, 25 bp, Homo sapien
gaggcggccccaccctccaatgccc

SEQ ID NO: 5700424 - DNA, 25 bp, Homo sapien
cgcgatggcatgcggtactggaaca

SEQ ID NO: 5700425 - DNA, 25 bp, Homo sapien
cggctggagtcagccctgcgggggc

SEQ ID NO: 5700426 - DNA, 25 bp, Homo sapien
ctgcccggcgagcagctcagaccat

SEQ ID NO: 5700427 - DNA, 25 bp, Homo sapien
gctccagcttctgggtatccagaga

SEQ ID NO: 5700428 - DNA, 25 bp, Homo sapien
ccttctacgcccgcccgctgcccgc

SEQ ID NO: 5700429 - DNA, 25 bp, Homo sapien
tgcggctgcattgccgccggctttg

SEQ ID NO: 5700430 - DNA, 25 bp, Homo sapien
cagcctgcggcccctgctgcgccgc

SEQ ID NO: 5700431 - DNA, 25 bp, Homo sapien
cctggctgccgagggccggctggag

SEQ ID NO: 5700432 - DNA, 25 bp, Homo sapien
acagctactgctacgtgggaatcat

SEQ ID NO: 5700433 - DNA, 25 bp, Homo sapien
ggtactgggcctccatctacttctg

SEQ ID NO: 5700434 - DNA, 25 bp, Homo sapien
gagcgcctggaccatgctgctgagc

SEQ ID NO: 5700435 - DNA, 25 bp, Homo sapien
cctcttccttgtgtctttcgctcca

SEQ ID NO: 5700436 - DNA, 25 bp, Homo sapien
ataaagtgttgcacaaagaaaaaaa

SEQ ID NO: 5700437 - DNA, 25 bp, Homo sapien
cagccttgccccggagaagctccgg

SEQ ID NO: 5700438 - DNA, 25 bp, Homo sapien
tctcctccccagaaagagtccttac

SEQ ID NO: 5700439 - DNA, 25 bp, Homo sapien
gcggcccctgctgcgccgcgcctgg

SEQ ID NO: 5700440 - DNA, 25 bp, Homo sapien
ggtcctgggagtgggaagcctcttc

SEQ ID NO: 5700441 - DNA, 25 bp, Homo sapien
tgggtgcactggttcctgaagatgc

SEQ ID NO: 5700442 - DNA, 25 bp, Homo sapien
cctggggctcaccctgttcacctgt

SEQ ID NO: 5700443 - DNA, 25 bp, Homo sapien
ggagaaggcggcttccttggagtat

SEQ ID NO: 5700444 - DNA, 25 bp, Homo sapien
gcctaccccgtggccgccaaagccc

SEQ ID NO: 5700445 - DNA, 25 bp, Homo sapien
ctgacgctgaagctggtgagcctgg

SEQ ID NO: 5700446 - DNA, 25 bp, Homo sapien
ctccaatgcccaccccccagcagtc

SEQ ID NO: 5700447 - DNA, 25 bp, Homo sapien
ggacctgggccctcattcaggccca

SEQ ID NO: 5700448 - DNA, 25 bp, Homo sapien
cagtgaagtccaggacctgcatctg

SEQ ID NO: 5700449 - DNA, 25 bp, Homo sapien
tcttcttcgccttccgcatgcgctt

SEQ ID NO: 5700450 - DNA, 25 bp, Homo sapien
tcaccatcctcgggacctgggccct

SEQ ID NO: 5700451 - DNA, 25 bp, Homo sapien
gagagaatttcctcttccccagcta

SEQ ID NO: 5700452 - DNA, 25 bp, Homo sapien
cggtactggaacatgacggtgcagt

SEQ ID NO: 5700453 - DNA, 25 bp, Homo sapien
cctactggcacggcctccacccggg

SEQ ID NO: 5700454 - DNA, 25 bp, Homo sapien
tgcaactgaagcagacccgggggtg

SEQ ID NO: 5700455 - DNA, 25 bp, Homo sapien
ctgctccagcttctgggtatccaga

SEQ ID NO: 5700456 - DNA, 25 bp, Homo sapien
cggagctgcggcggcaagcgggctg

SEQ ID NO: 5700457 - DNA, 25 bp, Homo sapien
tgcgtgcgggtgcgcgatggcatgc

SEQ ID NO: 5700458 - DNA, 25 bp, Homo sapien
tagtggttcttcttatctccatccc

SEQ ID NO: 5700459 - DNA, 25 bp, Homo sapien
cctggactttctcctatctcctgtt

SEQ ID NO: 5700460 - DNA, 25 bp, Homo sapien
ttttgggcaaattccctttctttgc

SEQ ID NO: 5700461 - DNA, 25 bp, Homo sapien
caaaggggaaactgaggtgcgggtg

SEQ ID NO: 5700462 - DNA, 25 bp, Homo sapien
ttcctcttccccagctaaataccct

SEQ ID NO: 5700463 - DNA, 25 bp, Homo sapien
cctgcggagcgcctggaccatgctg

SEQ ID NO: 5700464 - DNA, 25 bp, Homo sapien
ggtgcactggttcctgaagatgcgc

SEQ ID NO: 5700465 - DNA, 25 bp, Homo sapien
cagccccagccggcggaaggcagca

SEQ ID NO: 5700466 - DNA, 25 bp, Homo sapien
ctctgcccagaggccacctccactc

SEQ ID NO: 5700467 - DNA, 25 bp, Homo sapien
ggcctcaggcttcagcaaggggccc

SEQ ID NO: 5700468 - DNA, 25 bp, Homo sapien
tccgcatgcgcttctacgtggcctg

SEQ ID NO: 5700469 - DNA, 25 bp, Homo sapien
actgctacagcacagatttctgcgt

SEQ ID NO: 5700470 - DNA, 25 bp, Homo sapien
tgtggcccccacactttgcattctc

SEQ ID NO: 5700471 - DNA, 25 bp, Homo sapien
gtcctccctgccctctgcccagagg

SEQ ID NO: 5700472 - DNA, 25 bp, Homo sapien
ccatcggcttcctctttaagaaagc

SEQ ID NO: 5700473 - DNA, 25 bp, Homo sapien
gcgcgggcctggggacggccgtccc

SEQ ID NO: 5700474 - DNA, 25 bp, Homo sapien
cgatggcatgcggtactggaacatg

SEQ ID NO: 5700475 - DNA, 25 bp, Homo sapien
ggttcttcttatctccatccccatc

SEQ ID NO: 5700476 - DNA, 25 bp, Homo sapien
ctcgggacctgggccctcattcagg

SEQ ID NO: 5700477 - DNA, 25 bp, Homo sapien
ggagacactcagctacagctactgc

SEQ ID NO: 5700478 - DNA, 25 bp, Homo sapien
cctcttctcatcgcttggcctatga

SEQ ID NO: 5700479 - DNA, 25 bp, Homo sapien
gcaccaatattgcagacttggaagg

SEQ ID NO: 5700480 - DNA, 25 bp, Homo sapien
agaaagagtccttaccttggagagg

SEQ ID NO: 5700481 - DNA, 25 bp, Homo sapien
tcccacgcccttcaccaatgccgtc

SEQ ID NO: 5700482 - DNA, 25 bp, Homo sapien
gatccccgtcttcttcgccttccgc

SEQ ID NO: 5700483 - DNA, 25 bp, Homo sapien
aaataccctgcctgcaactgaagca

SEQ ID NO: 5700484 - DNA, 25 bp, Homo sapien
gctctcctctcacctcttcccgctg

SEQ ID NO: 5700485 - DNA, 25 bp, Homo sapien
gcgccgcgcctggccggccccgctc

SEQ ID NO: 5700486 - DNA, 25 bp, Homo sapien
acagcacagatttctgcgtgcgggt

SEQ ID NO: 5700487 - DNA, 25 bp, Homo sapien
ttggagtatgactatgagaccatcc

SEQ ID NO: 5700488 - DNA, 25 bp, Homo sapien
ctttcccaataaagtgttgcacaaa

SEQ ID NO: 5700489 - DNA, 25 bp, Homo sapien
ctcttcggcctgctgttcctgctct

SEQ ID NO: 5700490 - DNA, 25 bp, Homo sapien
ccttgtgtctttcgctccactttta

SEQ ID NO: 5700491 - DNA, 25 bp, Homo sapien
ggctttaggtgggggcagccccagc

SEQ ID NO: 5700492 - DNA, 25 bp, Homo sapien
caccgtgtgtaaatctttcccaata

SEQ ID NO: 5700493 - DNA, 25 bp, Homo sapien
cgtggccggagctgcggcggcaagc

SEQ ID NO: 5700494 - DNA, 25 bp, Homo sapien
gaagctggtgagcctggccagtgaa

SEQ ID NO: 5700495 - DNA, 25 bp, Homo sapien
catgcggtactggaacatgacggtg

SEQ ID NO: 5700496 - DNA, 25 bp, Homo sapien
attgtccagacaagagtcactggcc

SEQ ID NO: 5700497 - DNA, 25 bp, Homo sapien
tatctcctgttcttccgagccctca

SEQ ID NO: 5700498 - DNA, 25 bp, Homo sapien
ctggaccatgctgctgagcgcctac

SEQ ID NO: 5700499 - DNA, 25 bp, Homo sapien
ggacggccgtcccatggcttccatc

SEQ ID NO: 5700500 - DNA, 25 bp, Homo sapien
tacaaaatcaaagtattgtccagac

SEQ ID NO: 5700501 - DNA, 25 bp, Homo sapien
cggcggaaggcagcatcccagccca

SEQ ID NO: 5700502 - DNA, 25 bp, Homo sapien
ctacctgagcttcctgaccatcccg

SEQ ID NO: 5700503 - DNA, 25 bp, Homo sapien
agccgctgtgggcctggggctcacc

SEQ ID NO: 5700504 - DNA, 25 bp, Homo sapien
ttctgggtatccagagagcactgca

SEQ ID NO: 5700505 - DNA, 25 bp, Homo sapien
cctatgacaggtcaccgtgtgtaaa

SEQ ID NO: 5700506 - DNA, 25 bp, Homo sapien
acgtgccctccctgatggagacact

SEQ ID NO: 5700507 - DNA, 25 bp, Homo sapien
tgactatgagaccatccgcaacatc

SEQ ID NO: 5700508 - DNA, 25 bp, Homo sapien
agcgctcctggcgccctcttctcat

SEQ ID NO: 5700509 - DNA, 25 bp, Homo sapien
ttcgctccacttttagctcatcgca

SEQ ID NO: 5700510 - DNA, 25 bp, Homo sapien
ggaccatgctgctgagcgcctactg

SEQ ID NO: 5700511 - DNA, 25 bp, Homo sapien
tgaagatgcgcgcctatgactacat

SEQ ID NO: 5700512 - DNA, 25 bp, Homo sapien
cgactgctacagcacagatttctgc

SEQ ID NO: 5700513 - DNA, 25 bp, Homo sapien
tcctcgggacctgggccctcattca

SEQ ID NO: 5700514 - DNA, 25 bp, Homo sapien
ggctctggcctggactttctcctat

SEQ ID NO: 5700515 - DNA, 25 bp, Homo sapien
gagctgcggcggcaagcgggctggg

SEQ ID NO: 5700516 - DNA, 25 bp, Homo sapien
cagcatcccagcccaccagccttgc

SEQ ID NO: 5700517 - DNA, 25 bp, Homo sapien
accatgctgctgagcgcctactggc

SEQ ID NO: 5700518 - DNA, 25 bp, Homo sapien
gcagcccttccccggggcagtgccc

SEQ ID NO: 5700519 - DNA, 25 bp, Homo sapien
ttctcctatctcctgttcttccgag

SEQ ID NO: 5700520 - DNA, 25 bp, Homo sapien
gccacctcgggaccccagcgctcct

SEQ ID NO: 5700521 - DNA, 25 bp, Homo sapien
agcgggctgggactgctcggcccct

SEQ ID NO: 5700522 - DNA, 25 bp, Homo sapien
ccgctaccgcacctacctggactgg

SEQ ID NO: 5700523 - DNA, 25 bp, Homo sapien
ccatctgagccacctcgggacccca

SEQ ID NO: 5700524 - DNA, 25 bp, Homo sapien
tggcttccatctgagccacctcggg

SEQ ID NO: 5700525 - DNA, 25 bp, Homo sapien
ggctgggactgctcggcccctcctg

SEQ ID NO: 5700526 - DNA, 25 bp, Homo sapien
cagaggaaggaaatggcctcaggct

SEQ ID NO: 5700527 - DNA, 25 bp, Homo sapien
cttcgccttccgcatgcgcttctac

SEQ ID NO: 5700528 - DNA, 25 bp, Homo sapien
cggcggcaagcgggctgggactgct

SEQ ID NO: 5700529 - DNA, 25 bp, Homo sapien
ggcgagcagctcagaccatgtcgcc

SEQ ID NO: 5700530 - DNA, 25 bp, Homo sapien
ctccatccccatcggcttcctcttt

SEQ ID NO: 5700531 - DNA, 25 bp, Homo sapien
gtgtcctccctgccctctgcccaga

SEQ ID NO: 5700532 - DNA, 25 bp, Homo sapien
tcgaatcccgtggccggagctgcgg

SEQ ID NO: 5700533 - DNA, 25 bp, Homo sapien
cccgcctcttctacatgatccccgt

SEQ ID NO: 5700534 - DNA, 25 bp, Homo sapien
ctgggcctgcccactcccacgccct

SEQ ID NO: 5700535 - DNA, 25 bp, Homo sapien
cgctccacttttagctcatcgcacc

SEQ ID NO: 5700536 - DNA, 25 bp, Homo sapien
ttcaccaatgccgtccagctgctgc

SEQ ID NO: 5700537 - DNA, 25 bp, Homo sapien
cccagcccaccagccttgccccgga

SEQ ID NO: 5700538 - DNA, 25 bp, Homo sapien
tcttccttgtgtctttcgctccact

SEQ ID NO: 5700539 - DNA, 25 bp, Homo sapien
tggtcccgggaattctgtgaaccag

SEQ ID NO: 5700540 - DNA, 25 bp, Homo sapien
tgatggagacactcagctacagcta

SEQ ID NO: 5700541 - DNA, 25 bp, Homo sapien
gaagcctcttccttgtgtctttcgc

SEQ ID NO: 5700542 - DNA, 25 bp, Homo sapien
ctgctgtctcctccccagaaagagt

SEQ ID NO: 5700543 - DNA, 25 bp, Homo sapien
ccacttcctggccctggcagccctg

SEQ ID NO: 5700544 - DNA, 25 bp, Homo sapien
tgtccagacaagagtcactggcccc

SEQ ID NO: 5700545 - DNA, 25 bp, Homo sapien
cctgccctctgcccagaggccacct

SEQ ID NO: 5700546 - DNA, 25 bp, Homo sapien
ctcatcgcaccaatattgcagactt

SEQ ID NO: 5700547 - DNA, 25 bp, Homo sapien
ctgctgcccgacgtgccctccctga

SEQ ID NO: 5700548 - DNA, 25 bp, Homo sapien
catggcttccatctgagccacctcg

SEQ ID NO: 5700549 - DNA, 25 bp, Homo sapien
atctgagccacctcgggaccccagc

SEQ ID NO: 5700550 - DNA, 25 bp, Homo sapien
tccagcttctgggtatccagagagc

SEQ ID NO: 5700551 - DNA, 25 bp, Homo sapien
gccgcgcctggccggccccgctctt

SEQ ID NO: 5700552 - DNA, 25 bp, Homo sapien
tggcccccacactttgcattctctg

SEQ ID NO: 5700553 - DNA, 25 bp, Homo sapien
gtgggaagcctcttccttgtgtctt

SEQ ID NO: 5700554 - DNA, 25 bp, Homo sapien
cttcggtactgggcctccatctact

SEQ ID NO: 5700555 - DNA, 25 bp, Homo sapien
attccctttctttgcatccacaatg

SEQ ID NO: 5700556 - DNA, 25 bp, Homo sapien
catgacaggcccgttcttccgctac

SEQ ID NO: 5700557 - DNA, 25 bp, Homo sapien
cctggccagtgaagtccaggacctg

SEQ ID NO: 5700558 - DNA, 25 bp, Homo sapien
ctatgtcctgcggagcgcctggacc

SEQ ID NO: 5700559 - DNA, 25 bp, Homo sapien
ccctggctctggcctggactttctc

SEQ ID NO: 5700560 - DNA, 25 bp, Homo sapien
cccgctggaggccgtgcgcgaggac

SEQ ID NO: 5700561 - DNA, 25 bp, Homo sapien
ttcacctgtggcccccacactttgc

SEQ ID NO: 5700562 - DNA, 25 bp, Homo sapien
gggggtgtcctccctgccctctgcc

SEQ ID NO: 5700563 - DNA, 25 bp, Homo sapien
ctgcggcccctgctgcgccgcgcct

SEQ ID NO: 5700564 - DNA, 25 bp, Homo sapien
acttttagctcatcgcaccaatatt

SEQ ID NO: 5700565 - DNA, 25 bp, Homo sapien
gggtcctggagagaatttcctcttc

SEQ ID NO: 5700566 - DNA, 25 bp, Homo sapien
catgggcttcgtgctgctctccttg

SEQ ID NO: 5700567 - DNA, 25 bp, Homo sapien
cagtatatctacaagagcgcacctg

SEQ ID NO: 5700568 - DNA, 25 bp, Homo sapien
cctttctttgcatccacaatgtggg

SEQ ID NO: 5700569 - DNA, 25 bp, Homo sapien
gccggcggaaggcagcatcccagcc

SEQ ID NO: 5700570 - DNA, 25 bp, Homo sapien
aggagtaagctgtcacgacgctccc

SEQ ID NO: 5700571 - DNA, 25 bp, Homo sapien
gtgtgtaaatctttcccaataaagt

SEQ ID NO: 5700572 - DNA, 25 bp, Homo sapien
gacttggaaggaagcataagcttcc

SEQ ID NO: 5700573 - DNA, 25 bp, Homo sapien
ttcagcaaggggcccaccctggggc

SEQ ID NO: 5700574 - DNA, 25 bp, Homo sapien
atccagagagcactgcacttcccca

SEQ ID NO: 5700575 - DNA, 25 bp, Homo sapien
ctacctggactggctggagcagccc

SEQ ID NO: 5700576 - DNA, 25 bp, Homo sapien
ctcatcgcttggcctatgacaggtc

SEQ ID NO: 5700577 - DNA, 25 bp, Homo sapien
gctggctttaggtgggggcagcccc

SEQ ID NO: 5700578 - DNA, 25 bp, Homo sapien
cggagcgcctggaccatgctgctga

SEQ ID NO: 5700579 - DNA, 25 bp, Homo sapien
tatgacaggtcaccgtgtgtaaatc

SEQ ID NO: 5700580 - DNA, 25 bp, Homo sapien
tcctccccagaaagagtccttacct

SEQ ID NO: 5700581 - DNA, 25 bp, Homo sapien
aagatgcgcgcctatgactacatgt

SEQ ID NO: 5700582 - DNA, 25 bp, Homo sapien
agaccatgtcgcctgaagaatggac

SEQ ID NO: 5700583 - DNA, 25 bp, Homo sapien
acaagagcgcacctgcccgttccta

SEQ ID NO: 5700584 - DNA, 25 bp, Homo sapien
gcttggcctatgacaggtcaccgtg

SEQ ID NO: 5700585 - DNA, 25 bp, Homo sapien
ctgaagcagacccgggggtgtcctc

SEQ ID NO: 5700586 - DNA, 25 bp, Homo sapien
tgagaccatccgcaacatcgactgc

SEQ ID NO: 5700587 - DNA, 25 bp, Homo sapien
tccagacaagagtcactggcccctg

SEQ ID NO: 5700588 - DNA, 25 bp, Homo sapien
tggagtcagccctgcgggggcggct

SEQ ID NO: 5700589 - DNA, 25 bp, Homo sapien
ctcctacaaaatcaaagtattgtcc

SEQ ID NO: 5700590 - DNA, 25 bp, Homo sapien
tggggagcagccgctgtgggcctgg

SEQ ID NO: 5700591 - DNA, 25 bp, Homo sapien
gacacccttcggtactgggcctcca

SEQ ID NO: 5700592 - DNA, 25 bp, Homo sapien
ctctttaagaaagccggtcctgggc

SEQ ID NO: 5700593 - DNA, 25 bp, Homo sapien
cagacttggaaggaagcataagctt

SEQ ID NO: 5700594 - DNA, 25 bp, Homo sapien
ttcttcgccttccgcatgcgcttct

SEQ ID NO: 5700595 - DNA, 25 bp, Homo sapien
cccatggcttccatctgagccacct

SEQ ID NO: 5700596 - DNA, 25 bp, Homo sapien
aggcccagccctgctcctgccacgc

SEQ ID NO: 5700597 - DNA, 25 bp, Homo sapien
ttttagctcatcgcaccaatattgc

SEQ ID NO: 5700598 - DNA, 25 bp, Homo sapien
gaaggaagcataagcttcccatttc

SEQ ID NO: 5700599 - DNA, 25 bp, Homo sapien
gcggcaagcgggctgggactgctcg

SEQ ID NO: 5700600 - DNA, 25 bp, Homo sapien
ctgaagctggtgagcctggccagtg

SEQ ID NO: 5700601 - DNA, 25 bp, Homo sapien
cgctccctctgccagctggtcccgg

SEQ ID NO: 5700602 - DNA, 25 bp, Homo sapien
ctggcgcagtatatctacaagagcg

SEQ ID NO: 5700603 - DNA, 25 bp, Homo sapien
ccccatcggcttcctctttaagaaa

SEQ ID NO: 5700604 - DNA, 25 bp, Homo sapien
tgcatgggcttcgtgctgctctcct

SEQ ID NO: 5700605 - DNA, 25 bp, Homo sapien
cggagcttgggggcaggtcctggga

SEQ ID NO: 5700606 - DNA, 25 bp, Homo sapien
cccaccccccagcagtccggagaag

SEQ ID NO: 5700607 - DNA, 25 bp, Homo sapien
gcttccttggagtatgactatgaga

SEQ ID NO: 5700608 - DNA, 25 bp, Homo sapien
gtcaccgtgtgtaaatctttcccaa

SEQ ID NO: 5700609 - DNA, 25 bp, Homo sapien
tcctatgtcctgcggagcgcctgga

SEQ ID NO: 5700610 - DNA, 25 bp, Homo sapien
tgcccgcccgcctcttctacatgat

SEQ ID NO: 5700611 - DNA, 25 bp, Homo sapien
ctgctgctgacgctgaagctggtga

SEQ ID NO: 5700612 - DNA, 25 bp, Homo sapien
ccgttcttccgctaccgcacctacc

SEQ ID NO: 5700613 - DNA, 25 bp, Homo sapien
tgggcttcgtgctgctctccttggc

SEQ ID NO: 5700614 - DNA, 25 bp, Homo sapien
tatgagaccatccgcaacatcgact

SEQ ID NO: 5700615 - DNA, 25 bp, Homo sapien
cgtgcgcgaggacgccttctacgcc

SEQ ID NO: 5700616 - DNA, 25 bp, Homo sapien
cctccactcctacaaaatcaaagta

SEQ ID NO: 5700617 - DNA, 25 bp, Homo sapien
ctgccagctggtcccgggaattctg

SEQ ID NO: 5700618 - DNA, 25 bp, Homo sapien
tcaccctgttcacctgtggccccca

SEQ ID NO: 5700619 - DNA, 25 bp, Homo sapien
ttatctccatccccatcggcttcct

SEQ ID NO: 5700620 - DNA, 25 bp, Homo sapien
atccacttcctggccctggcagccc

SEQ ID NO: 5700621 - DNA, 25 bp, Homo sapien
accatcctcgggacctgggccctca

SEQ ID NO: 5700622 - DNA, 25 bp, Homo sapien
tttggggcctaccccgtggccgcca

SEQ ID NO: 5700623 - DNA, 25 bp, Homo sapien
cgctggaggccgtgcgcgaggacgc

SEQ ID NO: 5700624 - DNA, 25 bp, Homo sapien
ggagtatgactatgagaccatccgc

SEQ ID NO: 5700625 - DNA, 25 bp, Homo sapien
acaggtcaccgtgtgtaaatctttc

SEQ ID NO: 5700626 - DNA, 25 bp, Homo sapien
ttccatctgagccacctcgggaccc

SEQ ID NO: 5700627 - DNA, 25 bp, Homo sapien
tcaggcccagccctgctcctgccac

SEQ ID NO: 5700628 - DNA, 25 bp, Homo sapien
tcactggcccctgctccagcttctg

SEQ ID NO: 5700629 - DNA, 25 bp, Homo sapien
atctacttctgtatccacttcctgg

SEQ ID NO: 5700630 - DNA, 25 bp, Homo sapien
gaagcagacccgggggtgtcctccc

SEQ ID NO: 5700631 - DNA, 25 bp, Homo sapien
gccgtgcgcgaggacgccttctacg

SEQ ID NO: 5700632 - DNA, 25 bp, Homo sapien
atcggcttcctctttaagaaagccg

SEQ ID NO: 5700633 - DNA, 25 bp, Homo sapien
cctcttctacatgatccccgtcttc

SEQ ID NO: 5700634 - DNA, 25 bp, Homo sapien
ccagcagtccggagaaggcggcttc

SEQ ID NO: 5700635 - DNA, 25 bp, Homo sapien
ctggactggctggagcagcccttcc

SEQ ID NO: 5700636 - DNA, 25 bp, Homo sapien
tatgactacatgtgcatgggcttcg

SEQ ID NO: 5700637 - DNA, 25 bp, Homo sapien
cccaccctccaatgcccacccccca

SEQ ID NO: 5700638 - DNA, 25 bp, Homo sapien
agagagcactgcacttccccaaaac

SEQ ID NO: 5700639 - DNA, 25 bp, Homo sapien
tatgactatgagaccatccgcaaca

SEQ ID NO: 5700640 - DNA, 25 bp, Homo sapien
gtccggagaaggcggcttccttgga

SEQ ID NO: 5700641 - DNA, 25 bp, Homo sapien
ccactcccacgcccttcaccaatgc

SEQ ID NO: 5700642 - DNA, 25 bp, Homo sapien
acgcccgcccgctgcccgcccgcct

SEQ ID NO: 5700643 - DNA, 25 bp, Homo sapien
cctgctgcgccgcgcctggccggcc

SEQ ID NO: 5700644 - DNA, 25 bp, Homo sapien
caagcgggctgggactgctcggccc

SEQ ID NO: 5700645 - DNA, 25 bp, Homo sapien
caccaatgccgtccagctgctgctg

SEQ ID NO: 5700646 - DNA, 25 bp, Homo sapien
cctgatggagacactcagctacagc

SEQ ID NO: 5700647 - DNA, 25 bp, Homo sapien
ctccatctacttctgtatccacttc

SEQ ID NO: 5700648 - DNA, 25 bp, Homo sapien
gcgccctcttctcatcgcttggcct

SEQ ID NO: 5700649 - DNA, 25 bp, Homo sapien
ccgcacctacctggactggctggag

SEQ ID NO: 5700650 - DNA, 25 bp, Homo sapien
ctgggcctccatctacttctgtatc

SEQ ID NO: 5700651 - DNA, 25 bp, Homo sapien
aggtgcgggtgcgcgggcctgggga

SEQ ID NO: 5700652 - DNA, 25 bp, Homo sapien
gcgggcctggggacggccgtcccat

SEQ ID NO: 5700653 - DNA, 25 bp, Homo sapien
ctccacccgggctactacctgagct

SEQ ID NO: 5700654 - DNA, 25 bp, Homo sapien
atctttcccaataaagtgttgcaca

SEQ ID NO: 5700655 - DNA, 25 bp, Homo sapien
gcagtggtggctggcgcagtatatc

SEQ ID NO: 5700656 - DNA, 25 bp, Homo sapien
tcagctacagctactgctacgtggg

SEQ ID NO: 5700657 - DNA, 25 bp, Homo sapien
tgcctgcaactgaagcagacccggg

SEQ ID NO: 5700658 - DNA, 25 bp, Homo sapien
tctcctctcacctcttcccgctgga

SEQ ID NO: 5700659 - DNA, 25 bp, Homo sapien
atattgcagacttggaaggaagcat

SEQ ID NO: 5700660 - DNA, 25 bp, Homo sapien
cctggccctggcagccctggggctg

SEQ ID NO: 5700661 - DNA, 25 bp, Homo sapien
gccggagctgcggcggcaagcgggc

SEQ ID NO: 5700662 - DNA, 25 bp, Homo sapien
tcagcctcctgggcctgcccactcc

SEQ ID NO: 5700663 - DNA, 25 bp, Homo sapien
cctgggactgggtgcactggttcct

SEQ ID NO: 5700664 - DNA, 25 bp, Homo sapien
gctgtgcctggctgccgagggccgg

SEQ ID NO: 5700665 - DNA, 25 bp, Homo sapien
aatgcccaccccccagcagtccgga

SEQ ID NO: 5700666 - DNA, 25 bp, Homo sapien
ccctgctcctgccacgccctggctc

SEQ ID NO: 5700667 - DNA, 25 bp, Homo sapien
ctcctggcgccctcttctcatcgct

SEQ ID NO: 5700668 - DNA, 25 bp, Homo sapien
tgggcagtgggttttgggcaaattc

SEQ ID NO: 5700669 - DNA, 25 bp, Homo sapien
cccctcctgcccggcgagcagctca

SEQ ID NO: 5700670 - DNA, 25 bp, Homo sapien
gctgctgacgctgaagctggtgagc

SEQ ID NO: 5700671 - DNA, 25 bp, Homo sapien
caggctgctgtctcctccccagaaa

SEQ ID NO: 5700672 - DNA, 25 bp, Homo sapien
cagcttctgggtatccagagagcac

SEQ ID NO: 5700673 - DNA, 25 bp, Homo sapien
agcctcttccttgtgtctttcgctc

SEQ ID NO: 5700674 - DNA, 25 bp, Homo sapien
cgcctcttctacatgatccccgtct

SEQ ID NO: 5700675 - DNA, 25 bp, Homo sapien
cctgcctgcaactgaagcagacccg

SEQ ID NO: 5700676 - DNA, 25 bp, Homo sapien
ctcctatctcctgttcttccgagcc

SEQ ID NO: 5700677 - DNA, 25 bp, Homo sapien
ccttggagtatgactatgagaccat

SEQ ID NO: 5700678 - DNA, 25 bp, Homo sapien
tcggcctgctgttcctgctctcctc

SEQ ID NO: 5700679 - DNA, 25 bp, Homo sapien
ctgagccacctcgggaccccagcgc

SEQ ID NO: 5700680 - DNA, 25 bp, Homo sapien
catcctcgggacctgggccctcatt

SEQ ID NO: 5700681 - DNA, 25 bp, Homo sapien
agctactgctacgtgggaatcatga

SEQ ID NO: 5700682 - DNA, 25 bp, Homo sapien
aaggcggcttccttggagtatgact

SEQ ID NO: 5700683 - DNA, 25 bp, Homo sapien
gcttccatctgagccacctcgggac

SEQ ID NO: 5700684 - DNA, 25 bp, Homo sapien
cagcaaggggcccaccctggggctg

SEQ ID NO: 5700685 - DNA, 25 bp, Homo sapien
ccctctgcccagaggccacctccac

SEQ ID NO: 5700686 - DNA, 25 bp, Homo sapien
ccgttcctatgtcctgcggagcgcc

SEQ ID NO: 5700687 - DNA, 25 bp, Homo sapien
gacggtgcagtggtggctggcgcag

SEQ ID NO: 5700688 - DNA, 25 bp, Homo sapien
gttcctatgtcctgcggagcgcctg

SEQ ID NO: 5700689 - DNA, 25 bp, Homo sapien
tgtcgcctgaagaatggacgtatct

SEQ ID NO: 5700690 - DNA, 25 bp, Homo sapien
cgctcctggcgccctcttctcatcg

SEQ ID NO: 5700691 - DNA, 25 bp, Homo sapien
gcatctggcccagaggaaggaaatg

SEQ ID NO: 5700692 - DNA, 25 bp, Homo sapien
tccctgatggagacactcagctaca

SEQ ID NO: 5700693 - DNA, 25 bp, Homo sapien
tccctttctttgcatccacaatgtg

SEQ ID NO: 5700694 - DNA, 25 bp, Homo sapien
accctgttcacctgtggcccccaca

SEQ ID NO: 5700695 - DNA, 25 bp, Homo sapien
tgctgttcctgctctcctctcacct

SEQ ID NO: 5700696 - DNA, 25 bp, Homo sapien
accaggctgctgtctcctccccaga

SEQ ID NO: 5700697 - DNA, 25 bp, Homo sapien
cgtggccgccaaagcccgggccgga

SEQ ID NO: 5700698 - DNA, 25 bp, Homo sapien
ttctacgcccgcccgctgcccgccc

SEQ ID NO: 5700699 - DNA, 25 bp, Homo sapien
cctgaagatgcgcgcctatgactac

SEQ ID NO: 5700700 - DNA, 25 bp, Homo sapien
aggacgccttctacgcccgcccgct

SEQ ID NO: 5700701 - DNA, 25 bp, Homo sapien
tgcccagcctgcggcccctgctgcg

SEQ ID NO: 5700702 - DNA, 25 bp, Homo sapien
ccatccccatcggcttcctctttaa

SEQ ID NO: 5700703 - DNA, 25 bp, Homo sapien
ctggattgccgccgagtgcggctgc

SEQ ID NO: 5700704 - DNA, 25 bp, Homo sapien
gccttgccccggagaagctccggga

SEQ ID NO: 5700705 - DNA, 25 bp, Homo sapien
ctgggactgctcggcccctcctgcc

SEQ ID NO: 5700706 - DNA, 25 bp, Homo sapien
tgcccaccccccagcagtccggaga

SEQ ID NO: 5700707 - DNA, 25 bp, Homo sapien
cgggacctgggccctcattcaggcc

SEQ ID NO: 5700708 - DNA, 25 bp, Homo sapien
tgccgccgagtgcggctgcattgcc

SEQ ID NO: 5700709 - DNA, 25 bp, Homo sapien
tgagcgcctactggcacggcctcca

SEQ ID NO: 5700710 - DNA, 25 bp, Homo sapien
tgctgctgagcgcctactggcacgg

SEQ ID NO: 5700711 - DNA, 25 bp, Homo sapien
aaggaaatggcctcaggcttcagca

SEQ ID NO: 5700712 - DNA, 25 bp, Homo sapien
tcttctacatgatccccgtcttctt

SEQ ID NO: 5700713 - DNA, 25 bp, Homo sapien
cacccttcggtactgggcctccatc

SEQ ID NO: 5700714 - DNA, 25 bp, Homo sapien
cggcttccttggagtatgactatga

SEQ ID NO: 5700715 - DNA, 25 bp, Homo sapien
ttcttcttatctccatccccatcgg

SEQ ID NO: 5700716 - DNA, 25 bp, Homo sapien
agtcactggcccctgctccagcttc

SEQ ID NO: 5700717 - DNA, 25 bp, Homo sapien
gcccgttcttccgctaccgcaccta

SEQ ID NO: 5700718 - DNA, 25 bp, Homo sapien
aagaaagccggtcctgggctgaaga

SEQ ID NO: 5700719 - DNA, 25 bp, Homo sapien
gggcctaccccgtggccgccaaagc

SEQ ID NO: 5700720 - DNA, 25 bp, Homo sapien
ctacagcacagatttctgcgtgcgg

SEQ ID NO: 5700721 - DNA, 25 bp, Homo sapien
caagagtcactggcccctgctccag

SEQ ID NO: 5700722 - DNA, 25 bp, Homo sapien
cctcttccccagctaaataccctgc

SEQ ID NO: 5700723 - DNA, 25 bp, Homo sapien
ccagcgctcctggcgccctcttctc

SEQ ID NO: 5700724 - DNA, 25 bp, Homo sapien
tgcgcgatggcatgcggtactggaa

SEQ ID NO: 5700725 - DNA, 25 bp, Homo sapien
cctatctcctgttcttccgagccct

SEQ ID NO: 5700726 - DNA, 25 bp, Homo sapien
ggcgcagtatatctacaagagcgca

SEQ ID NO: 5700727 - DNA, 25 bp, Homo sapien
cccctgggcagtgggttttgggcaa

SEQ ID NO: 5700728 - DNA, 25 bp, Homo sapien
agcagtccggagaaggcggcttcct

SEQ ID NO: 5700729 - DNA, 25 bp, Homo sapien
gtgaagtccaggacctgcatctggc

SEQ ID NO: 5700730 - DNA, 25 bp, Homo sapien
cctcctgcccggcgagcagctcaga

SEQ ID NO: 5700731 - DNA, 25 bp, Homo sapien
cgtggcctggattgccgccgagtgc

SEQ ID NO: 5700732 - DNA, 25 bp, Homo sapien
atggcctcaggcttcagcaaggggc

SEQ ID NO: 5700733 - DNA, 25 bp, Homo sapien
cctcttcccgctggaggccgtgcgc

SEQ ID NO: 5700734 - DNA, 25 bp, Homo sapien
aaggggcccaccctggggctgctgc

SEQ ID NO: 5700735 - DNA, 25 bp, Homo sapien
tccctgccctctgcccagaggccac

SEQ ID NO: 5700736 - DNA, 25 bp, Homo sapien
gctggagcagcccttccccggggca

SEQ ID NO: 5700737 - DNA, 25 bp, Homo sapien
cagccggcggaaggcagcatcccag

SEQ ID NO: 5700738 - DNA, 25 bp, Homo sapien
acgcccttcaccaatgccgtccagc

SEQ ID NO: 5700739 - DNA, 25 bp, Homo sapien
atcaaagtattgtccagacaagagt

SEQ ID NO: 5700740 - DNA, 25 bp, Homo sapien
catcccgctgtgcctggctgccgag

SEQ ID NO: 5700741 - DNA, 25 bp, Homo sapien
ctgcccactcccacgcccttcacca

SEQ ID NO: 5700742 - DNA, 25 bp, Homo sapien
gtgggaatcatgacaggcccgttct

SEQ ID NO: 5700743 - DNA, 25 bp, Homo sapien
cccggggcagtgcccagcctgcggc

SEQ ID NO: 5700744 - DNA, 25 bp, Homo sapien
agctaaataccctgcctgcaactga

SEQ ID NO: 5700745 - DNA, 25 bp, Homo sapien
aaggggaaactgaggtgcgggtgcg

SEQ ID NO: 5700746 - DNA, 25 bp, Homo sapien
cttccccggggcagtgcccagcctg

SEQ ID NO: 5700747 - DNA, 25 bp, Homo sapien
tctagtggttcttcttatctccatc

SEQ ID NO: 5700748 - DNA, 25 bp, Homo sapien
gggcagtgcccagcctgcggcccct

SEQ ID NO: 5700749 - DNA, 25 bp, Homo sapien
ggcccctcctgcccggcgagcagct

SEQ ID NO: 5700750 - DNA, 25 bp, Homo sapien
ttcctggccctggcagccctggggc

SEQ ID NO: 5700751 - DNA, 25 bp, Homo sapien
ctgcccgttcctatgtcctgcggag

SEQ ID NO: 5700752 - DNA, 25 bp, Homo sapien
aatgtggggtcggagcttgggggca

SEQ ID NO: 5700753 - DNA, 25 bp, Homo sapien
gcccttcaccaatgccgtccagctg

SEQ ID NO: 5700754 - DNA, 25 bp, Homo sapien
ttgccgccggctttggggcctaccc

SEQ ID NO: 5700755 - DNA, 25 bp, Homo sapien
agtgcccagcctgcggcccctgctg

SEQ ID NO: 5700756 - DNA, 25 bp, Homo sapien
ccagctaaataccctgcctgcaact

SEQ ID NO: 5700757 - DNA, 25 bp, Homo sapien
ggggcagccccagccggcggaaggc

SEQ ID NO: 5700758 - DNA, 25 bp, Homo sapien
tgcgcttctacgtggcctggattgc

SEQ ID NO: 5700759 - DNA, 25 bp, Homo sapien
ccatctacttctgtatccacttcct

SEQ ID NO: 5700760 - DNA, 25 bp, Homo sapien
agcgcctactggcacggcctccacc

SEQ ID NO: 5700761 - DNA, 25 bp, Homo sapien
tgcggcggcaagcgggctgggactg

SEQ ID NO: 5700762 - DNA, 25 bp, Homo sapien
aggcttcagcaaggggcccaccctg

SEQ ID NO: 5700763 - DNA, 25 bp, Homo sapien
cgccttctacgcccgcccgctgccc

SEQ ID NO: 5700764 - DNA, 25 bp, Homo sapien
tacgtggcctggattgccgccgagt

SEQ ID NO: 5700765 - DNA, 25 bp, Homo sapien
tccactcctacaaaatcaaagtatt

SEQ ID NO: 5700766 - DNA, 25 bp, Homo sapien
ttctgtgaaccaggctgctgtctcc

SEQ ID NO: 5700767 - DNA, 25 bp, Homo sapien
cccaccctggggctgctgcccgacg

SEQ ID NO: 5700768 - DNA, 25 bp, Homo sapien
ccacccgggctactacctgagcttc

SEQ ID NO: 5700769 - DNA, 25 bp, Homo sapien
ccacgcccttcaccaatgccgtcca

SEQ ID NO: 5700770 - DNA, 25 bp, Homo sapien
cgcccgcctcttctacatgatcccc

SEQ ID NO: 5700771 - DNA, 25 bp, Homo sapien
gggcggctgagcccagggggccaga

SEQ ID NO: 5700772 - DNA, 25 bp, Homo sapien
ggggccagaaggcctgggactgggt

SEQ ID NO: 5700773 - DNA, 25 bp, Homo sapien
cccgacgtgccctccctgatggaga

SEQ ID NO: 5700774 - DNA, 25 bp, Homo sapien
gttcctgctctcctctcacctcttc

SEQ ID NO: 5700775 - DNA, 25 bp, Homo sapien
cagacccgggggtgtcctccctgcc

SEQ ID NO: 5700776 - DNA, 25 bp, Homo sapien
cttgccccggagaagctccgggagg

SEQ ID NO: 5700777 - DNA, 25 bp, Homo sapien
acctggactggctggagcagccctt

SEQ ID NO: 5700778 - DNA, 25 bp, Homo sapien
gcaaggggcccaccctggggctgct

SEQ ID NO: 5700779 - DNA, 25 bp, Homo sapien
gtgcagtggtggctggcgcagtata

SEQ ID NO: 5700780 - DNA, 25 bp, Homo sapien
gagccctcagcctcctgggcctgcc

SEQ ID NO: 5700781 - DNA, 25 bp, Homo sapien
tcgtgctgctctccttggccgacac

SEQ ID NO: 5700782 - DNA, 25 bp, Homo sapien
cctgtggcccccacactttgcattc

SEQ ID NO: 5700783 - DNA, 25 bp, Homo sapien
aggccacctccactcctacaaaatc

SEQ ID NO: 5700784 - DNA, 25 bp, Homo sapien
gcccgctgcccgcccgcctcttcta

SEQ ID NO: 5700785 - DNA, 25 bp, Homo sapien
ggcagtgggttttgggcaaattccc

SEQ ID NO: 5700786 - DNA, 25 bp, Homo sapien
gagcagccgctgtgggcctggggct

SEQ ID NO: 5700787 - DNA, 25 bp, Homo sapien
tggctgccgagggccggctggagtc

SEQ ID NO: 5700788 - DNA, 25 bp, Homo sapien
gcctggattgccgccgagtgcggct

SEQ ID NO: 5700789 - DNA, 25 bp, Homo sapien
atctacaagagcgcacctgcccgtt

SEQ ID NO: 5700790 - DNA, 25 bp, Homo sapien
ggcggcttccttggagtatgactat

SEQ ID NO: 5700791 - DNA, 25 bp, Homo sapien
tgtctcctccccagaaagagtcctt

SEQ ID NO: 5700792 - DNA, 25 bp, Homo sapien
agcctggccagtgaagtccaggacc

SEQ ID NO: 5700793 - DNA, 25 bp, Homo sapien
cctggccggccccgctcttcggcct

SEQ ID NO: 5700794 - DNA, 25 bp, Homo sapien
cgtcttcttcgccttccgcatgcgc

SEQ ID NO: 5700795 - DNA, 25 bp, Homo sapien
agagtcactggcccctgctccagct

SEQ ID NO: 5700796 - DNA, 25 bp, Homo sapien
ctggtcaccatcctcgggacctggg

SEQ ID NO: 5700797 - DNA, 25 bp, Homo sapien
gtggctggcgcagtatatctacaag

SEQ ID NO: 5700798 - DNA, 25 bp, Homo sapien
gctactacctgagcttcctgaccat

SEQ ID NO: 5700799 - DNA, 25 bp, Homo sapien
ccctggggctggggctggctttagg

SEQ ID NO: 5700800 - DNA, 25 bp, Homo sapien
cgccaaagcccgggccggaggcggc

SEQ ID NO: 5700801 - DNA, 25 bp, Homo sapien
gcccccacactttgcattctctggt

SEQ ID NO: 5700802 - DNA, 25 bp, Homo sapien
ggggctgctgcccgacgtgccctcc

SEQ ID NO: 5700803 - DNA, 25 bp, Homo sapien
tgccctctgcccagaggccacctcc

SEQ ID NO: 5700804 - DNA, 25 bp, Homo sapien
tcgggaccccagcgctcctggcgcc

SEQ ID NO: 5700805 - DNA, 25 bp, Homo sapien
gcctggggacggccgtcccatggct

SEQ ID NO: 5700806 - DNA, 25 bp, Homo sapien
aaattccctttctttgcatccacaa

SEQ ID NO: 5700807 - DNA, 25 bp, Homo sapien
cctcagcctcctgggcctgcccact

SEQ ID NO: 5700808 - DNA, 25 bp, Homo sapien
tcctgggcctgcccactcccacgcc

SEQ ID NO: 5700809 - DNA, 25 bp, Homo sapien
gcagccgctgtgggcctggggctca

SEQ ID NO: 5700810 - DNA, 25 bp, Homo sapien
tccccggggcagtgcccagcctgcg

SEQ ID NO: 5700811 - DNA, 25 bp, Homo sapien
ccgctgcccgcccgcctcttctaca

SEQ ID NO: 5700812 - DNA, 25 bp, Homo sapien
gctgcccgacgtgccctccctgatg

SEQ ID NO: 5700813 - DNA, 25 bp, Homo sapien
caataaagtgttgcacaaagaaaaa

SEQ ID NO: 5700814 - DNA, 25 bp, Homo sapien
ctgagcttcctgaccatcccgctgt

SEQ ID NO: 5700815 - DNA, 25 bp, Homo sapien
cttggagagggtcctggagagaatt

SEQ ID NO: 5700816 - DNA, 25 bp, Homo sapien
ttccttggagtatgactatgagacc

SEQ ID NO: 5700817 - DNA, 25 bp, Homo sapien
atttcctcttccccagctaaatacc

SEQ ID NO: 5700818 - DNA, 25 bp, Homo sapien
cgagcagctcagaccatgtcgcctg

SEQ ID NO: 5700819 - DNA, 25 bp, Homo sapien
gccttccgcatgcgcttctacgtgg

SEQ ID NO: 5700820 - DNA, 25 bp, Homo sapien
gagtcagccctgcgggggcggctga

SEQ ID NO: 5700821 - DNA, 25 bp, Homo sapien
cgggaggagtaagctgtcacgacgc

SEQ ID NO: 5700822 - DNA, 25 bp, Homo sapien
gctgtgggcctggggctcaccctgt

SEQ ID NO: 5700823 - DNA, 25 bp, Homo sapien
ggactggctggagcagcccttcccc

SEQ ID NO: 5700824 - DNA, 25 bp, Homo sapien
ctgggccctcattcaggcccagccc

SEQ ID NO: 5700825 - DNA, 25 bp, Homo sapien
aatgccgtccagctgctgctgacgc

SEQ ID NO: 5700826 - DNA, 25 bp, Homo sapien
cctcctgggcctgcccactcccacg

SEQ ID NO: 5700827 - DNA, 25 bp, Homo sapien
acttctgtatccacttcctggccct

SEQ ID NO: 5700828 - DNA, 25 bp, Homo sapien
ttccgagccctcagcctcctgggcc

SEQ ID NO: 5700829 - DNA, 25 bp, Homo sapien
actgctacgtgggaatcatgacagg

SEQ ID NO: 5700830 - DNA, 25 bp, Homo sapien
ccctgctccagcttctgggtatcca

SEQ ID NO: 5700831 - DNA, 25 bp, Homo sapien
atctggcccagaggaaggaaatggc

SEQ ID NO: 5700832 - DNA, 25 bp, Homo sapien
gcctccacccgggctactacctgag

SEQ ID NO: 5700833 - DNA, 25 bp, Homo sapien
aagtattgtccagacaagagtcact

SEQ ID NO: 5700834 - DNA, 25 bp, Homo sapien
gtaaatctttcccaataaagtgttg

SEQ ID NO: 5700835 - DNA, 25 bp, Homo sapien
ggctgctgtctcctccccagaaaga

SEQ ID NO: 5700836 - DNA, 25 bp, Homo sapien
ggcccagaggaaggaaatggcctca

SEQ ID NO: 5700837 - DNA, 25 bp, Homo sapien
gtcctggagagaatttcctcttccc

SEQ ID NO: 5700838 - DNA, 25 bp, Homo sapien
tgggactgggtgcactggttcctga

SEQ ID NO: 5700839 - DNA, 25 bp, Homo sapien
gagtaagctgtcacgacgctccctc

SEQ ID NO: 5700840 - DNA, 25 bp, Homo sapien
ggggctggggctggctttaggtggg

SEQ ID NO: 5700841 - DNA, 25 bp, Homo sapien
gctgcccgcccgcctcttctacatg

SEQ ID NO: 5700842 - DNA, 25 bp, Homo sapien
tgcggagcgcctggaccatgctgct

SEQ ID NO: 5700843 - DNA, 25 bp, Homo sapien
cccagccggcggaaggcagcatccc

SEQ ID NO: 5700844 - DNA, 25 bp, Homo sapien
aaatggcctcaggcttcagcaaggg

SEQ ID NO: 5700845 - DNA, 25 bp, Homo sapien
aggcccgttcttccgctaccgcacc

SEQ ID NO: 5700846 - DNA, 25 bp, Homo sapien
ctcacctcttcccgctggaggccgt

SEQ ID NO: 5700847 - DNA, 25 bp, Homo sapien
gggagtgggaagcctcttccttgtg

SEQ ID NO: 5700848 - DNA, 25 bp, Homo sapien
tgctacgtgggaatcatgacaggcc

SEQ ID NO: 5700849 - DNA, 25 bp, Homo sapien
gcctgcggcccctgctgcgccgcgc

SEQ ID NO: 5700850 - DNA, 25 bp, Homo sapien
ggcaggtcctgggagtgggaagcct

SEQ ID NO: 5700851 - DNA, 25 bp, Homo sapien
tttaggtgggggcagccccagccgg

SEQ ID NO: 5700852 - DNA, 25 bp, Homo sapien
ggacctgcatctggcccagaggaag

SEQ ID NO: 5700853 - DNA, 25 bp, Homo sapien
gccgccaaagcccgggccggaggcg

SEQ ID NO: 5700854 - DNA, 25 bp, Homo sapien
accatgtcgcctgaagaatggacgt

SEQ ID NO: 5700855 - DNA, 25 bp, Homo sapien
ccagagagcactgcacttccccaaa

SEQ ID NO: 5700856 - DNA, 25 bp, Homo sapien
cacctccactcctacaaaatcaaag

SEQ ID NO: 5700857 - DNA, 25 bp, Homo sapien
ccgcccgctgcccgcccgcctcttc

SEQ ID NO: 5700858 - DNA, 25 bp, Homo sapien
ggtcaccatcctcgggacctgggcc

SEQ ID NO: 5700859 - DNA, 25 bp, Homo sapien
cgccctggctctggcctggactttc

SEQ ID NO: 5700860 - DNA, 25 bp, Homo sapien
caaaatcaaagtattgtccagacaa

SEQ ID NO: 5700861 - DNA, 25 bp, Homo sapien
acttcctggccctggcagccctggg

SEQ ID NO: 5700862 - DNA, 25 bp, Homo sapien
gccggtcctgggctgaagagatggg

SEQ ID NO: 5700863 - DNA, 25 bp, Homo sapien
ctgcgccgcgcctggccggccccgc

SEQ ID NO: 5700864 - DNA, 25 bp, Homo sapien
cgagtgcggctgcattgccgccggc

SEQ ID NO: 5700865 - DNA, 25 bp, Homo sapien
ggaattctgtgaaccaggctgctgt

SEQ ID NO: 5700866 - DNA, 25 bp, Homo sapien
ggggacggccgtcccatggcttcca

SEQ ID NO: 5700867 - DNA, 25 bp, Homo sapien
agccctgctcctgccacgccctggc

SEQ ID NO: 5700868 - DNA, 25 bp, Homo sapien
ctggtgagcctggccagtgaagtcc

SEQ ID NO: 5700869 - DNA, 25 bp, Homo sapien
agcataagcttcccatttcacaaag

SEQ ID NO: 5700870 - DNA, 25 bp, Homo sapien
gaagaatggacgtatctagtggttc

SEQ ID NO: 5700871 - DNA, 25 bp, Homo sapien
gccggctggagtcagccctgcgggg

SEQ ID NO: 5700872 - DNA, 25 bp, Homo sapien
aagagatggggagcagccgctgtgg

SEQ ID NO: 5700873 - DNA, 25 bp, Homo sapien
ccccggagaagctccgggaggagta

SEQ ID NO: 5700874 - DNA, 25 bp, Homo sapien
ccccagcgctcctggcgccctcttc

SEQ ID NO: 5700875 - DNA, 25 bp, Homo sapien
cactcctacaaaatcaaagtattgt

SEQ ID NO: 5700876 - DNA, 25 bp, Homo sapien
ccgacacccttcggtactgggcctc

SEQ ID NO: 5700877 - DNA, 25 bp, Homo sapien
atcccgtggccggagctgcggcggc

SEQ ID NO: 5700878 - DNA, 25 bp, Homo sapien
gtccttaccttggagagggtcctgg

SEQ ID NO: 5700879 - DNA, 25 bp, Homo sapien
cccagaggaaggaaatggcctcagg

SEQ ID NO: 5700880 - DNA, 25 bp, Homo sapien
tggccggagctgcggcggcaagcgg

SEQ ID NO: 5700881 - DNA, 25 bp, Homo sapien
tgccgtccagctgctgctgacgctg

SEQ ID NO: 5700882 - DNA, 25 bp, Homo sapien
ggttcctgaagatgcgcgcctatga

SEQ ID NO: 5700883 - DNA, 25 bp, Homo sapien
ctctgccagctggtcccgggaattc

SEQ ID NO: 5700884 - DNA, 25 bp, Homo sapien
actggaacatgacggtgcagtggtg

SEQ ID NO: 5700885 - DNA, 25 bp, Homo sapien
acgtgggaatcatgacaggcccgtt

SEQ ID NO: 5700886 - DNA, 25 bp, Homo sapien
cactgcacttccccaaaacggaagg

SEQ ID NO: 5700887 - DNA, 25 bp, Homo sapien
tcattcaggcccagccctgctcctg

SEQ ID NO: 5700888 - DNA, 25 bp, Homo sapien
cggctgcattgccgccggctttggg

SEQ ID NO: 5700889 - DNA, 25 bp, Homo sapien
cattctctggtcaccatcctcggga

SEQ ID NO: 5700890 - DNA, 25 bp, Homo sapien
cccagcctgcggcccctgctgcgcc

SEQ ID NO: 5700891 - DNA, 25 bp, Homo sapien
agaagctccgggaggagtaagctgt

SEQ ID NO: 5700892 - DNA, 25 bp, Homo sapien
gtgctgctctccttggccgacaccc

SEQ ID NO: 5700893 - DNA, 25 bp, Homo sapien
ctgccacgccctggctctggcctgg

SEQ ID NO: 5700894 - DNA, 25 bp, Homo sapien
tgactacatgtgcatgggcttcgtg

SEQ ID NO: 5700895 - DNA, 25 bp, Homo sapien
ttagctcatcgcaccaatattgcag

SEQ ID NO: 5700896 - DNA, 25 bp, Homo sapien
aggtcaccgtgtgtaaatctttccc

SEQ ID NO: 5700897 - DNA, 25 bp, Homo sapien
gccagtgaagtccaggacctgcatc

SEQ ID NO: 5700898 - DNA, 25 bp, Homo sapien
ggggaaactgaggtgcgggtgcgcg

SEQ ID NO: 5700899 - DNA, 25 bp, Homo sapien
ctgctcggcccctcctgcccggcga

SEQ ID NO: 5700900 - DNA, 25 bp, Homo sapien
gttcttccgagccctcagcctcctg

SEQ ID NO: 5700901 - DNA, 25 bp, Homo sapien
gcctgaagaatggacgtatctagtg

SEQ ID NO: 5700902 - DNA, 25 bp, Homo sapien
ttctctggtcaccatcctcgggacc

SEQ ID NO: 5700903 - DNA, 25 bp, Homo sapien
gagagggtcctggagagaatttcct

SEQ ID NO: 5700904 - DNA, 25 bp, Homo sapien
acatgacggtgcagtggtggctggc

SEQ ID NO: 5700905 - DNA, 25 bp, Homo sapien
tcttatctccatccccatcggcttc

SEQ ID NO: 5700906 - DNA, 25 bp, Homo sapien
ccagaaagagtccttaccttggaga

SEQ ID NO: 5700907 - DNA, 25 bp, Homo sapien
caatattgcagacttggaaggaagc

SEQ ID NO: 5700908 - DNA, 25 bp, Homo sapien
gggtcggagcttgggggcaggtcct

SEQ ID NO: 5700909 - DNA, 25 bp, Homo sapien
ctctggtcaccatcctcgggacctg

SEQ ID NO: 5700910 - DNA, 25 bp, Homo sapien
cctgcaactgaagcagacccggggg

SEQ ID NO: 5700911 - DNA, 25 bp, Homo sapien
ggaaggcagcatcccagcccaccag

SEQ ID NO: 5700912 - DNA, 25 bp, Homo sapien
cggccccgctcttcggcctgctgtt

SEQ ID NO: 5700913 - DNA, 25 bp, Homo sapien
tgcggtactggaacatgacggtgca

SEQ ID NO: 5700914 - DNA, 25 bp, Homo sapien
tactacctgagcttcctgaccatcc

SEQ ID NO: 5700915 - DNA, 25 bp, Homo sapien
agagcactgcacttccccaaaacgg

SEQ ID NO: 5700916 - DNA, 25 bp, Homo sapien
tgttcacctgtggcccccacacttt

SEQ ID NO: 5700917 - DNA, 25 bp, Homo sapien
gtcccatggcttccatctgagccac

SEQ ID NO: 5700918 - DNA, 25 bp, Homo sapien
cccagcccgcttgccgccgcagctc

SEQ ID NO: 5700919 - DNA, 25 bp, Homo sapien
ctggttcacagaattcccgggacca

SEQ ID NO: 5700920 - DNA, 25 bp, Homo sapien
tcgggcagcagccccagggtgggcc

SEQ ID NO: 5700921 - DNA, 25 bp, Homo sapien
ggctcggaagaacaggagataggag

SEQ ID NO: 5700922 - DNA, 25 bp, Homo sapien
atgattcccacgtagcagtagctgt

SEQ ID NO: 5700923 - DNA, 25 bp, Homo sapien
atacgtccattcttcaggcgacatg

SEQ ID NO: 5700924 - DNA, 25 bp, Homo sapien
gatggagataagaagaaccactaga

SEQ ID NO: 5700925 - DNA, 25 bp, Homo sapien
gcaggcagggtatttagctggggaa

SEQ ID NO: 5700926 - DNA, 25 bp, Homo sapien
tatttagctggggaagaggaaattc

SEQ ID NO: 5700927 - DNA, 25 bp, Homo sapien
gcagccaggcacagcgggatggtca

SEQ ID NO: 5700928 - DNA, 25 bp, Homo sapien
cagagggagcgtcgtgacagcttac

SEQ ID NO: 5700929 - DNA, 25 bp, Homo sapien
ttgcaggcagggtatttagctgggg

SEQ ID NO: 5700930 - DNA, 25 bp, Homo sapien
ggcaggaggggccgagcagtcccag

SEQ ID NO: 5700931 - DNA, 25 bp, Homo sapien
tcttcaggcgacatggtctgagctg

SEQ ID NO: 5700932 - DNA, 25 bp, Homo sapien
agtgtctccatcagggagggcacgt

SEQ ID NO: 5700933 - DNA, 25 bp, Homo sapien
gaagagggcgccaggagcgctgggg

SEQ ID NO: 5700934 - DNA, 25 bp, Homo sapien
tggagcgaaagacacaaggaagagg

SEQ ID NO: 5700935 - DNA, 25 bp, Homo sapien
tgctccagccagtccaggtaggtgc

SEQ ID NO: 5700936 - DNA, 25 bp, Homo sapien
tgactcttgtctggacaatactttg

SEQ ID NO: 5700937 - DNA, 25 bp, Homo sapien
gcactcggcggcaatccaggccacg

SEQ ID NO: 5700938 - DNA, 25 bp, Homo sapien
tccatcagggagggcacgtcgggca

SEQ ID NO: 5700939 - DNA, 25 bp, Homo sapien
aagatttacacacggtgacctgtca

SEQ ID NO: 5700940 - DNA, 25 bp, Homo sapien
gactccagccggccctcggcagcca

SEQ ID NO: 5700941 - DNA, 25 bp, Homo sapien
aggcgtcctcgcgcacggcctccag

SEQ ID NO: 5700942 - DNA, 25 bp, Homo sapien
caggccacgtagaagcgcatgcgga

SEQ ID NO: 5700943 - DNA, 25 bp, Homo sapien
tgtgggggccacaggtgaacagggt

SEQ ID NO: 5700944 - DNA, 25 bp, Homo sapien
accgaagggtgtcggccaaggagag

SEQ ID NO: 5700945 - DNA, 25 bp, Homo sapien
agccccaggcccacagcggctgctc

SEQ ID NO: 5700946 - DNA, 25 bp, Homo sapien
tcgcgcacggcctccagcgggaaga

SEQ ID NO: 5700947 - DNA, 25 bp, Homo sapien
agaggaaattctctccaggaccctc

SEQ ID NO: 5700948 - DNA, 25 bp, Homo sapien
ggggctgcccccacctaaagccagc

SEQ ID NO: 5700949 - DNA, 25 bp, Homo sapien
gcgggaagaggtgagaggagagcag

SEQ ID NO: 5700950 - DNA, 25 bp, Homo sapien
cgaagggtgtcggccaaggagagca

SEQ ID NO: 5700951 - DNA, 25 bp, Homo sapien
cccaggcccgcgcacccgcacctca

SEQ ID NO: 5700952 - DNA, 25 bp, Homo sapien
cgacatggtctgagctgctcgccgg

SEQ ID NO: 5700953 - DNA, 25 bp, Homo sapien
ggcagggaggacacccccgggtctg

SEQ ID NO: 5700954 - DNA, 25 bp, Homo sapien
agcacgaagcccatgcacatgtagt

SEQ ID NO: 5700955 - DNA, 25 bp, Homo sapien
tcagccgcccccgcagggctgactc

SEQ ID NO: 5700956 - DNA, 25 bp, Homo sapien
agtagctgtagctgagtgtctccat

SEQ ID NO: 5700957 - DNA, 25 bp, Homo sapien
atgcaaagaaagggaatttgcccaa

SEQ ID NO: 5700958 - DNA, 25 bp, Homo sapien
agggtgagccccaggcccacagcgg

SEQ ID NO: 5700959 - DNA, 25 bp, Homo sapien
gaaccactagatacgtccattcttc

SEQ ID NO: 5700960 - DNA, 25 bp, Homo sapien
gaagctggagcaggggccagtgact

SEQ ID NO: 5700961 - DNA, 25 bp, Homo sapien
caaagccggcggcaatgcagccgca

SEQ ID NO: 5700962 - DNA, 25 bp, Homo sapien
agaacgggcctgtcatgattcccac

SEQ ID NO: 5700963 - DNA, 25 bp, Homo sapien
cttctccggggcaaggctggtgggc

SEQ ID NO: 5700964 - DNA, 25 bp, Homo sapien
cagaagctggagcaggggccagtga

SEQ ID NO: 5700965 - DNA, 25 bp, Homo sapien
gcttccttccaagtctgcaatattg

SEQ ID NO: 5700966 - DNA, 25 bp, Homo sapien
aggcgcggcgcagcaggggccgcag

SEQ ID NO: 5700967 - DNA, 25 bp, Homo sapien
accccacattgtggatgcaaagaaa

SEQ ID NO: 5700968 - DNA, 25 bp, Homo sapien
cacgaagcccatgcacatgtagtca

SEQ ID NO: 5700969 - DNA, 25 bp, Homo sapien
agtgcagtgctctctggatacccag

SEQ ID NO: 5700970 - DNA, 25 bp, Homo sapien
cgtccccaggcccgcgcacccgcac

SEQ ID NO: 5700971 - DNA, 25 bp, Homo sapien
gtaggcgctcagcagcatggtccag

SEQ ID NO: 5700972 - DNA, 25 bp, Homo sapien
gctgagtgtctccatcagggagggc

SEQ ID NO: 5700973 - DNA, 25 bp, Homo sapien
gatggaagccatgggacggccgtcc

SEQ ID NO: 5700974 - DNA, 25 bp, Homo sapien
ggccaggcgcggcgcagcaggggcc

SEQ ID NO: 5700975 - DNA, 25 bp, Homo sapien
ccacagcggctgctccccatctctt

SEQ ID NO: 5700976 - DNA, 25 bp, Homo sapien
ccaggaccctctccaaggtaaggac

SEQ ID NO: 5700977 - DNA, 25 bp, Homo sapien
acatgtagtcataggcgcgcatctt

SEQ ID NO: 5700978 - DNA, 25 bp, Homo sapien
agctgctcgccgggcaggaggggcc

SEQ ID NO: 5700979 - DNA, 25 bp, Homo sapien
cacattgtggatgcaaagaaaggga

SEQ ID NO: 5700980 - DNA, 25 bp, Homo sapien
cagcatggtccaggcgctccgcagg

SEQ ID NO: 5700981 - DNA, 25 bp, Homo sapien
ttcagcccaggaccggctttcttaa

SEQ ID NO: 5700982 - DNA, 25 bp, Homo sapien
cgaagcccatgcacatgtagtcata

SEQ ID NO: 5700983 - DNA, 25 bp, Homo sapien
ggaggggccgagcagtcccagcccg

SEQ ID NO: 5700984 - DNA, 25 bp, Homo sapien
aggacctgcccccaagctccgaccc

SEQ ID NO: 5700985 - DNA, 25 bp, Homo sapien
tggggggtgggcattggagggtggg

SEQ ID NO: 5700986 - DNA, 25 bp, Homo sapien
gccagagccagggcgtggcaggagc

SEQ ID NO: 5700987 - DNA, 25 bp, Homo sapien
cgggcaggtgcgctcttgtagatat

SEQ ID NO: 5700988 - DNA, 25 bp, Homo sapien
cttctccggactgctggggggtggg

SEQ ID NO: 5700989 - DNA, 25 bp, Homo sapien
ctttgattttgtaggagtggaggtg

SEQ ID NO: 5700990 - DNA, 25 bp, Homo sapien
ccggagcttctccggggcaaggctg

SEQ ID NO: 5700991 - DNA, 25 bp, Homo sapien
cgctccgcaggacataggaacgggc

SEQ ID NO: 5700992 - DNA, 25 bp, Homo sapien
caaggtaaggactctttctggggag

SEQ ID NO: 5700993 - DNA, 25 bp, Homo sapien
tgagggcccaggtcccgaggatggt

SEQ ID NO: 5700994 - DNA, 25 bp, Homo sapien
aagggctgctccagccagtccaggt

SEQ ID NO: 5700995 - DNA, 25 bp, Homo sapien
ctcaggtagtagcccgggtggaggc

SEQ ID NO: 5700996 - DNA, 25 bp, Homo sapien
cgatgagctaaaagtggagcgaaag

SEQ ID NO: 5700997 - DNA, 25 bp, Homo sapien
cttcaggaaccagtgcacccagtcc

SEQ ID NO: 5700998 - DNA, 25 bp, Homo sapien
tccaggccacgtagaagcgcatgcg

SEQ ID NO: 5700999 - DNA, 25 bp, Homo sapien
cgggcaggaggggccgagcagtccc

SEQ ID NO: 5701000 - DNA, 25 bp, Homo sapien
gggaagtgcagtgctctctggatac

SEQ ID NO: 5701001 - DNA, 25 bp, Homo sapien
cagcaggggccgcaggctgggcact

SEQ ID NO: 5701002 - DNA, 25 bp, Homo sapien
aaggactctttctggggaggagaca

SEQ ID NO: 5701003 - DNA, 25 bp, Homo sapien
ctctgggccagatgcaggtcctgga

SEQ ID NO: 5701004 - DNA, 25 bp, Homo sapien
agccgccttctccggactgctgggg

SEQ ID NO: 5701005 - DNA, 25 bp, Homo sapien
ggtatttagctggggaagaggaaat

SEQ ID NO: 5701006 - DNA, 25 bp, Homo sapien
ggtaggtgcggtagcggaagaacgg

SEQ ID NO: 5701007 - DNA, 25 bp, Homo sapien
gggcaaggctggtgggctgggatgc

SEQ ID NO: 5701008 - DNA, 25 bp, Homo sapien
ttaaagaggaagccgatggggatgg

SEQ ID NO: 5701009 - DNA, 25 bp, Homo sapien
agcagccccagggtgggccccttgc

SEQ ID NO: 5701010 - DNA, 25 bp, Homo sapien
tctgggcagagggcagggaggacac

SEQ ID NO: 5701011 - DNA, 25 bp, Homo sapien
agccaggcacagcgggatggtcagg

SEQ ID NO: 5701012 - DNA, 25 bp, Homo sapien
taaaagtggagcgaaagacacaagg

SEQ ID NO: 5701013 - DNA, 25 bp, Homo sapien
gggcactgccccggggaagggctgc

SEQ ID NO: 5701014 - DNA, 25 bp, Homo sapien
cgaagagcggggccggccaggcgcg

SEQ ID NO: 5701015 - DNA, 25 bp, Homo sapien
aggccaagcgatgagaagagggcgc

SEQ ID NO: 5701016 - DNA, 25 bp, Homo sapien
agaagaaccactagatacgtccatt

SEQ ID NO: 5701017 - DNA, 25 bp, Homo sapien
ccaggagcgctggggtcccgaggtg

SEQ ID NO: 5701018 - DNA, 25 bp, Homo sapien
gtgtcggccaaggagagcagcacga

SEQ ID NO: 5701019 - DNA, 25 bp, Homo sapien
ccaggctcaccagcttcagcgtcag

SEQ ID NO: 5701020 - DNA, 25 bp, Homo sapien
gcacatgtagtcataggcgcgcatc

SEQ ID NO: 5701021 - DNA, 25 bp, Homo sapien
ctttgtgaaatgggaagcttatgct

SEQ ID NO: 5701022 - DNA, 25 bp, Homo sapien
caagcgatgagaagagggcgccagg

SEQ ID NO: 5701023 - DNA, 25 bp, Homo sapien
ctggtgggctgggatgctgccttcc

SEQ ID NO: 5701024 - DNA, 25 bp, Homo sapien
tcatagtcatactccaaggaagccg

SEQ ID NO: 5701025 - DNA, 25 bp, Homo sapien
tgccccggggaagggctgctccagc

SEQ ID NO: 5701026 - DNA, 25 bp, Homo sapien
ttcactggccaggctcaccagcttc

SEQ ID NO: 5701027 - DNA, 25 bp, Homo sapien
cgaggtggctcagatggaagccatg

SEQ ID NO: 5701028 - DNA, 25 bp, Homo sapien
tgagtgtctccatcagggagggcac

SEQ ID NO: 5701029 - DNA, 25 bp, Homo sapien
ggcccagtaccgaagggtgtcggcc

SEQ ID NO: 5701030 - DNA, 25 bp, Homo sapien
cacacggtgacctgtcataggccaa

SEQ ID NO: 5701031 - DNA, 25 bp, Homo sapien
atgtagtcataggcgcgcatcttca

SEQ ID NO: 5701032 - DNA, 25 bp, Homo sapien
gtcggccaaggagagcagcacgaag

SEQ ID NO: 5701033 - DNA, 25 bp, Homo sapien
aggcagggtatttagctggggaaga

SEQ ID NO: 5701034 - DNA, 25 bp, Homo sapien
acatggtctgagctgctcgccgggc

SEQ ID NO: 5701035 - DNA, 25 bp, Homo sapien
tctttctggggaggagacagcagcc

SEQ ID NO: 5701036 - DNA, 25 bp, Homo sapien
caggtcccgaggatggtgaccagag

SEQ ID NO: 5701037 - DNA, 25 bp, Homo sapien
gtgcacccagtcccaggccttctgg

SEQ ID NO: 5701038 - DNA, 25 bp, Homo sapien
ccagccagtccaggtaggtgcggta

SEQ ID NO: 5701039 - DNA, 25 bp, Homo sapien
cacccccgggtctgcttcagttgca

SEQ ID NO: 5701040 - DNA, 25 bp, Homo sapien
atggtgaccagagaatgcaaagtgt

SEQ ID NO: 5701041 - DNA, 25 bp, Homo sapien
agtgtgggggccacaggtgaacagg

SEQ ID NO: 5701042 - DNA, 25 bp, Homo sapien
cttgctgaagcctgaggccatttcc

SEQ ID NO: 5701043 - DNA, 25 bp, Homo sapien
gattttgtaggagtggaggtggcct

SEQ ID NO: 5701044 - DNA, 25 bp, Homo sapien
cctgtcatgattcccacgtagcagt

SEQ ID NO: 5701045 - DNA, 25 bp, Homo sapien
atggtctcatagtcatactccaagg

SEQ ID NO: 5701046 - DNA, 25 bp, Homo sapien
gcacgcagaaatctgtgctgtagca

SEQ ID NO: 5701047 - DNA, 25 bp, Homo sapien
tggcggccacggggtaggccccaaa

SEQ ID NO: 5701048 - DNA, 25 bp, Homo sapien
aaatctgtgctgtagcagtcgatgt

SEQ ID NO: 5701049 - DNA, 25 bp, Homo sapien
ctcggcagccaggcacagcgggatg

SEQ ID NO: 5701050 - DNA, 25 bp, Homo sapien
agcggaagaacgggcctgtcatgat

SEQ ID NO: 5701051 - DNA, 25 bp, Homo sapien
gcatgccatcgcgcacccgcacgca

SEQ ID NO: 5701052 - DNA, 25 bp, Homo sapien
agcaggaacagcaggccgaagagcg

SEQ ID NO: 5701053 - DNA, 25 bp, Homo sapien
cagctggacggcattggtgaagggc

SEQ ID NO: 5701054 - DNA, 25 bp, Homo sapien
gccagtaggcgctcagcagcatggt

SEQ ID NO: 5701055 - DNA, 25 bp, Homo sapien
aggccccaaagccggcggcaatgca

SEQ ID NO: 5701056 - DNA, 25 bp, Homo sapien
ctgctggggggtgggcattggaggg

SEQ ID NO: 5701057 - DNA, 25 bp, Homo sapien
ggcagagggcagggaggacaccccc

SEQ ID NO: 5701058 - DNA, 25 bp, Homo sapien
tccaggtaggtgcggtagcggaaga

SEQ ID NO: 5701059 - DNA, 25 bp, Homo sapien
ttatgcttccttccaagtctgcaat

SEQ ID NO: 5701060 - DNA, 25 bp, Homo sapien
acgcagaaatctgtgctgtagcagt

SEQ ID NO: 5701061 - DNA, 25 bp, Homo sapien
ccgcccccgcagggctgactccagc

SEQ ID NO: 5701062 - DNA, 25 bp, Homo sapien
ggcccgcgcacccgcacctcagttt

SEQ ID NO: 5701063 - DNA, 25 bp, Homo sapien
agctcaggtagtagcccgggtggag

SEQ ID NO: 5701064 - DNA, 25 bp, Homo sapien
gggctttggcggccacggggtaggc

SEQ ID NO: 5701065 - DNA, 25 bp, Homo sapien
cgggcgggcgtagaaggcgtcctcg

SEQ ID NO: 5701066 - DNA, 25 bp, Homo sapien
gatacccagaagctggagcaggggc

SEQ ID NO: 5701067 - DNA, 25 bp, Homo sapien
gggaccagctggcagagggagcgtc

SEQ ID NO: 5701068 - DNA, 25 bp, Homo sapien
tgggcctgaatgagggcccaggtcc

SEQ ID NO: 5701069 - DNA, 25 bp, Homo sapien
cccaggaggctgagggctcggaaga

SEQ ID NO: 5701070 - DNA, 25 bp, Homo sapien
gccaccactgcaccgtcatgttcca

SEQ ID NO: 5701071 - DNA, 25 bp, Homo sapien
tgggctcagccgcccccgcagggct

SEQ ID NO: 5701072 - DNA, 25 bp, Homo sapien
acactttattgggaaagatttacac

SEQ ID NO: 5701073 - DNA, 25 bp, Homo sapien
cagatggaagccatgggacggccgt

SEQ ID NO: 5701074 - DNA, 25 bp, Homo sapien
cggaagaacaggagataggagaaag

SEQ ID NO: 5701075 - DNA, 25 bp, Homo sapien
cgtgacagcttactcctcccggagc

SEQ ID NO: 5701076 - DNA, 25 bp, Homo sapien
gcaaggctggtgggctgggatgctg

SEQ ID NO: 5701077 - DNA, 25 bp, Homo sapien
cctctccaaggtaaggactctttct

SEQ ID NO: 5701078 - DNA, 25 bp, Homo sapien
aatgggaagcttatgcttccttcca

SEQ ID NO: 5701079 - DNA, 25 bp, Homo sapien
gcagcacgaagcccatgcacatgta

SEQ ID NO: 5701080 - DNA, 25 bp, Homo sapien
cagtgcacccagtcccaggccttct

SEQ ID NO: 5701081 - DNA, 25 bp, Homo sapien
gccagggcgtggcaggagcagggct

SEQ ID NO: 5701082 - DNA, 25 bp, Homo sapien
caacactttattgggaaagatttac

SEQ ID NO: 5701083 - DNA, 25 bp, Homo sapien
accactagatacgtccattcttcag

SEQ ID NO: 5701084 - DNA, 25 bp, Homo sapien
cagccccagggtgggccccttgctg

SEQ ID NO: 5701085 - DNA, 25 bp, Homo sapien
gtgggccccttgctgaagcctgagg

SEQ ID NO: 5701086 - DNA, 25 bp, Homo sapien
tcatactccaaggaagccgccttct

SEQ ID NO: 5701087 - DNA, 25 bp, Homo sapien
gtaggccccaaagccggcggcaatg

SEQ ID NO: 5701088 - DNA, 25 bp, Homo sapien
ccagtaccgcatgccatcgcgcacc

SEQ ID NO: 5701089 - DNA, 25 bp, Homo sapien
ccttccaagtctgcaatattggtgc

SEQ ID NO: 5701090 - DNA, 25 bp, Homo sapien
ccgtcatgttccagtaccgcatgcc

SEQ ID NO: 5701091 - DNA, 25 bp, Homo sapien
ggagagcaggaacagcaggccgaag

SEQ ID NO: 5701092 - DNA, 25 bp, Homo sapien
gtaccgaagggtgtcggccaaggag

SEQ ID NO: 5701093 - DNA, 25 bp, Homo sapien
ggactctttctggggaggagacagc

SEQ ID NO: 5701094 - DNA, 25 bp, Homo sapien
ttgtaggagtggaggtggcctctgg

SEQ ID NO: 5701095 - DNA, 25 bp, Homo sapien
ggtgcgatgagctaaaagtggagcg

SEQ ID NO: 5701096 - DNA, 25 bp, Homo sapien
tcagcagcatggtccaggcgctccg

SEQ ID NO: 5701097 - DNA, 25 bp, Homo sapien
atgagaagagggcgccaggagcgct

SEQ ID NO: 5701098 - DNA, 25 bp, Homo sapien
ggatgcaaagaaagggaatttgccc

SEQ ID NO: 5701099 - DNA, 25 bp, Homo sapien
tgcaccgtcatgttccagtaccgca

SEQ ID NO: 5701100 - DNA, 25 bp, Homo sapien
gggctgctccagccagtccaggtag

SEQ ID NO: 5701101 - DNA, 25 bp, Homo sapien
ttcacagaattcccgggaccagctg

SEQ ID NO: 5701102 - DNA, 25 bp, Homo sapien
tgaccagagaatgcaaagtgtgggg

SEQ ID NO: 5701103 - DNA, 25 bp, Homo sapien
ccaggaagtggatacagaagtagat

SEQ ID NO: 5701104 - DNA, 25 bp, Homo sapien
atgcacatgtagtcataggcgcgca

SEQ ID NO: 5701105 - DNA, 25 bp, Homo sapien
gtctgcaatattggtgcgatgagct

SEQ ID NO: 5701106 - DNA, 25 bp, Homo sapien
ggccgtgccagtaggcgctcagcag

SEQ ID NO: 5701107 - DNA, 25 bp, Homo sapien
gcacggcctccagcgggaagaggtg

SEQ ID NO: 5701108 - DNA, 25 bp, Homo sapien
tcgatgttgcggatggtctcatagt

SEQ ID NO: 5701109 - DNA, 25 bp, Homo sapien
gcaggacataggaacgggcaggtgc

SEQ ID NO: 5701110 - DNA, 25 bp, Homo sapien
agtggagcgaaagacacaaggaaga

SEQ ID NO: 5701111 - DNA, 25 bp, Homo sapien
aggcccacagcggctgctccccatc

SEQ ID NO: 5701112 - DNA, 25 bp, Homo sapien
ggacaatactttgattttgtaggag

SEQ ID NO: 5701113 - DNA, 25 bp, Homo sapien
gaccctctccaaggtaaggactctt

SEQ ID NO: 5701114 - DNA, 25 bp, Homo sapien
gacacaaggaagaggcttcccactc

SEQ ID NO: 5701115 - DNA, 25 bp, Homo sapien
gcgcacccgcacgcagaaatctgtg

SEQ ID NO: 5701116 - DNA, 25 bp, Homo sapien
gaagaggtgagaggagagcaggaac

SEQ ID NO: 5701117 - DNA, 25 bp, Homo sapien
taggtgcggtagcggaagaacgggc

SEQ ID NO: 5701118 - DNA, 25 bp, Homo sapien
gacctgtcataggccaagcgatgag

SEQ ID NO: 5701119 - DNA, 25 bp, Homo sapien
gaagccgccttctccggactgctgg

SEQ ID NO: 5701120 - DNA, 25 bp, Homo sapien
ggcgctccgcaggacataggaacgg

SEQ ID NO: 5701121 - DNA, 25 bp, Homo sapien
gtcgtgacagcttactcctcccgga

SEQ ID NO: 5701122 - DNA, 25 bp, Homo sapien
aagtctgcaatattggtgcgatgag

SEQ ID NO: 5701123 - DNA, 25 bp, Homo sapien
gaagctcaggtagtagcccgggtgg

SEQ ID NO: 5701124 - DNA, 25 bp, Homo sapien
taccgcatgccatcgcgcacccgca

SEQ ID NO: 5701125 - DNA, 25 bp, Homo sapien
cagcagcagctggacggcattggtg

SEQ ID NO: 5701126 - DNA, 25 bp, Homo sapien
agccgcactcggcggcaatccaggc

SEQ ID NO: 5701127 - DNA, 25 bp, Homo sapien
caggcgacatggtctgagctgctcg

SEQ ID NO: 5701128 - DNA, 25 bp, Homo sapien
tttattgggaaagatttacacacgg

SEQ ID NO: 5701129 - DNA, 25 bp, Homo sapien
gctgccagggccaggaagtggatac

SEQ ID NO: 5701130 - DNA, 25 bp, Homo sapien
gtgagaggagagcaggaacagcagg

SEQ ID NO: 5701131 - DNA, 25 bp, Homo sapien
gctggacggcattggtgaagggcgt

SEQ ID NO: 5701132 - DNA, 25 bp, Homo sapien
ccgttttggggaagtgcagtgctct

SEQ ID NO: 5701133 - DNA, 25 bp, Homo sapien
tgagggctcggaagaacaggagata

SEQ ID NO: 5701134 - DNA, 25 bp, Homo sapien
ccgggaccagctggcagagggagcg

SEQ ID NO: 5701135 - DNA, 25 bp, Homo sapien
gcgcacggcctccagcgggaagagg

SEQ ID NO: 5701136 - DNA, 25 bp, Homo sapien
ggcaggcccaggaggctgagggctc

SEQ ID NO: 5701137 - DNA, 25 bp, Homo sapien
cccagaagctggagcaggggccagt

SEQ ID NO: 5701138 - DNA, 25 bp, Homo sapien
agggcccaggtcccgaggatggtga

SEQ ID NO: 5701139 - DNA, 25 bp, Homo sapien
cgtagcagtagctgtagctgagtgt

SEQ ID NO: 5701140 - DNA, 25 bp, Homo sapien
aggagaaagtccaggccagagccag

SEQ ID NO: 5701141 - DNA, 25 bp, Homo sapien
gaggatggtgaccagagaatgcaaa

SEQ ID NO: 5701142 - DNA, 25 bp, Homo sapien
ggcctctgggcagagggcagggagg

SEQ ID NO: 5701143 - DNA, 25 bp, Homo sapien
accagcttcagcgtcagcagcagct

SEQ ID NO: 5701144 - DNA, 25 bp, Homo sapien
tcctctgggccagatgcaggtcctg

SEQ ID NO: 5701145 - DNA, 25 bp, Homo sapien
agagcaggaacagcaggccgaagag

SEQ ID NO: 5701146 - DNA, 25 bp, Homo sapien
ggaacagcaggccgaagagcggggc

SEQ ID NO: 5701147 - DNA, 25 bp, Homo sapien
gatggaggcccagtaccgaagggtg

SEQ ID NO: 5701148 - DNA, 25 bp, Homo sapien
gtcagcagcagctggacggcattgg

SEQ ID NO: 5701149 - DNA, 25 bp, Homo sapien
actgccccggggaagggctgctcca

SEQ ID NO: 5701150 - DNA, 25 bp, Homo sapien
ggatggtctcatagtcatactccaa

SEQ ID NO: 5701151 - DNA, 25 bp, Homo sapien
caggcccgcgcacccgcacctcagt

SEQ ID NO: 5701152 - DNA, 25 bp, Homo sapien
ggcgtagaaggcgtcctcgcgcacg

SEQ ID NO: 5701153 - DNA, 25 bp, Homo sapien
gcccgcttgccgccgcagctccggc

SEQ ID NO: 5701154 - DNA, 25 bp, Homo sapien
cccttgctgaagcctgaggccattt

SEQ ID NO: 5701155 - DNA, 25 bp, Homo sapien
gaagaggaaattctctccaggaccc

SEQ ID NO: 5701156 - DNA, 25 bp, Homo sapien
tccagcgggaagaggtgagaggaga

SEQ ID NO: 5701157 - DNA, 25 bp, Homo sapien
aatattggtgcgatgagctaaaagt

SEQ ID NO: 5701158 - DNA, 25 bp, Homo sapien
acggcctccagcgggaagaggtgag

SEQ ID NO: 5701159 - DNA, 25 bp, Homo sapien
gcccccgcagggctgactccagccg

SEQ ID NO: 5701160 - DNA, 25 bp, Homo sapien
gaatgcaaagtgtgggggccacagg

SEQ ID NO: 5701161 - DNA, 25 bp, Homo sapien
gctttcttaaagaggaagccgatgg

SEQ ID NO: 5701162 - DNA, 25 bp, Homo sapien
tttttttctttgtgcaacactttat

SEQ ID NO: 5701163 - DNA, 25 bp, Homo sapien
gagagcagcacgaagcccatgcaca

SEQ ID NO: 5701164 - DNA, 25 bp, Homo sapien
tcgccgggcaggaggggccgagcag

SEQ ID NO: 5701165 - DNA, 25 bp, Homo sapien
gacataggaacgggcaggtgcgctc

SEQ ID NO: 5701166 - DNA, 25 bp, Homo sapien
gggagcgtcgtgacagcttactcct

SEQ ID NO: 5701167 - DNA, 25 bp, Homo sapien
ctgggccagatgcaggtcctggact

SEQ ID NO: 5701168 - DNA, 25 bp, Homo sapien
aagctccgaccccacattgtggatg

SEQ ID NO: 5701169 - DNA, 25 bp, Homo sapien
tttttctttgtgcaacactttattg
